United States Patent Application Publication US 2021/0199660 A1 - sequence listing, part 31

SEQ ID NO: 437300 - DNA, 120 bp, Artificial Sequence
  ENSG00000153187_88 (sequence is synthesized)
gtgtgacattaatgctataaaagttaaagcatatatagagatacctaaagagttattggggcttatttaaatgtcaactaacaaaggaattttttgaggcagcttgtatcctgtatcagt

SEQ ID NO: 437301 - DNA, 120 bp, Artificial Sequence
  ENSG00000153187_89 (sequence is synthesized)
tgtttgtagttaaagattgggagagtcatggtcacgtacaagaaaaaaagattccaacataactttttttttttttcttgaaaagtaaagcaaacaaatgtgttgatttacatttcatct

SEQ ID NO: 437302 - DNA, 120 bp, Artificial Sequence
  ENSG00000153187_90 (sequence is synthesized)
ccttttccttagtctgtccatgtgaatgtgctgtgtggaagagttaaagggcccaactaaatgttccagtgattccaataggtattccaaattaattgctgcttgtacatttaatagtta

SEQ ID NO: 437303 - DNA, 120 bp, Artificial Sequence
  ENSG00000153187_91 (sequence is synthesized)
tgttaggcttccagaatcactttaaataggactctttttaaaagatgggggaagagagtaattggtaatcagatggacagagtctctgtaacagaaaaaaaagggtgttttctcttgcat

SEQ ID NO: 437304 - DNA, 120 bp, Artificial Sequence
  ENSG00000153187_92 (sequence is synthesized)
atctgaggtgaagtgtgtattctgtgtgctcttagcaattggcagtcctcttgcttaggtttacaggtgtatgtgaaaatagacctgagtcttttcaaagttagatcatttttctgattt

SEQ ID NO: 437305 - DNA, 120 bp, Artificial Sequence
  ENSG00000153187_93 (sequence is synthesized)
catcttttaacttttggcaatacatttgttttgatatccaccctacttggtagagtgtaagtacttccttacaatgttctaatgtaaaacagtgcataggagacctttctgtccttggtt

SEQ ID NO: 437306 - DNA, 120 bp, Artificial Sequence
  ENSG00000153187_94 (sequence is synthesized)
tttcatttctactaaattcagaaatacatatttttactagcttatgaaaatttggaaaatagcttgacatccttttggataatgaagtgattagttcatatattgaagtatataaaatca

SEQ ID NO: 437307 - DNA, 120 bp, Artificial Sequence
  ENSG00000153187_95 (sequence is synthesized)
actaggaagtaaattcaagactgaaggaatgggagagcttgtgtgagttttggttgtatcagtccagaatatgtaattttccatttccctgaaaaagacttcagaggaaatttattttcc

SEQ ID NO: 437308 - DNA, 120 bp, Artificial Sequence
  ENSG00000153187_96 (sequence is synthesized)
ccactatacgctccagaatgtctttcggtgaaatgagagggcttgggctcttctgattctagacgtagctatcagagtttgcttaatgaaatatgggtctactcacaaataaagcaattt

SEQ ID NO: 437309 - DNA, 120 bp, Artificial Sequence
  ENSG00000153187_97 (sequence is synthesized)
aatggtttcgaaagagtaggcaacttgtggtttcattaccatttctgttcatttgagaaaaatcataaaattacagaaaaggaaacattcatttcaaaaataagctttgaatttagatgg

SEQ ID NO: 437310 - DNA, 120 bp, Artificial Sequence
  ENSG00000153187_98 (sequence is synthesized)
taaggcatatatgttttatttcacatgacttcagggtagaagtcaaatgaagaaacatttctatggaaacttaccctttaagaaaccagtatatgcaaagaatgattgataccccctgag

SEQ ID NO: 437311 - DNA, 120 bp, Artificial Sequence
  ENSG00000153187_99 (sequence is synthesized)
ggtgtgccatataataggtgactgataacatacaggatttaattcttagaataattaagaacagatatcacccattacattgacctacatttttctaaagtgaacaatagaaacctctct

SEQ ID NO: 437312 - DNA, 120 bp, Artificial Sequence
  ENSG00000153187_100 (sequence is synthesized)
cagaattagtatttgcctattaatgtaatcagtgtagccttctcaacataaaaatgtccttattctagaacatggaagcgtacggcaaatgcaacggttgaaagcactgaaaaatatttg

SEQ ID NO: 437313 - DNA, 120 bp, Artificial Sequence
  ENSG00000153187_101 (sequence is synthesized)
taaaacatctgtagtgctcacattatgaactttaaatgtaatactttgaaaaccatcttcataatttttttgttctaacagcttcctttttaagaaaacattttaaaacattttaaaatg

SEQ ID NO: 437314 - DNA, 120 bp, Artificial Sequence
  ENSG00000153187_102 (sequence is synthesized)
gaacttaatgtgcaaaataagttgtgtaaaataccagtatttgggtggtggaggatattggtatattatattgacctgggttgatgactactggactattttaagatacctacttccaaa

SEQ ID NO: 437315 - DNA, 120 bp, Artificial Sequence
  ENSG00000153187_103 (sequence is synthesized)
acttattttattctagaggaccactaaaaatcagaattacagcaatcattttaatttttctactttccttgttaaggtcttctgcttacccaaagaatagtgtatatcttaacatgactt

SEQ ID NO: 437316 - DNA, 120 bp, Artificial Sequence
  ENSG00000153187_104 (sequence is synthesized)
ttaaaggggtatcttgatccccatcacagatttttatctatgaatagaaggattgaaaccctatttgatccctagctctttgctgaaaagtgcataaacaggaatcctgaatttattata

SEQ ID NO: 437317 - DNA, 120 bp, Artificial Sequence
  ENSG00000153187_105 (sequence is synthesized)
tagacctcctcgcattatataatcgaagcaaagggaaaccagcgatggagtagaggtacgtagactaaagagatgcttgcaaatgatggtacctagggatagtcacattttcttgttgcc

SEQ ID NO: 437318 - DNA, 120 bp, Artificial Sequence
  ENSG00000153187_106 (sequence is synthesized)
aaactcagacaatataatcacaagtccagagaagagctagttaattttaaattccccgaggtccttttactgagatggaaaagcacaaacagtcaaggaaaaccaaagagggaggggtga

SEQ ID NO: 437319 - DNA, 120 bp, Artificial Sequence
  ENSG00000153187_107 (sequence is synthesized)
gttatgtatgttacacgtcagccctccatgtcctccagttctgcatccttggattcaaccaactgtgggttgaaaatactggaggtaaaaagacaaaaaataacaatgaagaacaacaac

SEQ ID NO: 437320 - DNA, 120 bp, Artificial Sequence
  ENSG00000153187_108 (sequence is synthesized)
ggaggtaaaaagacaaaaaataacaatgaagaacaacaacaaaaatacacagtataataattacatttacatagcatttattttgtattagacattataagtaatctagagatgatttaa

SEQ ID NO: 437321 - DNA, 120 bp, Artificial Sequence
  ENSG00000153187_109 (sequence is synthesized)
gggtattttatttaaagggacttgggcctgtggataccaaggaataactaaggtaaaactgagcataagtggcctgtccatattttgttaaatatcagattattgattagtgatcatcaa

SEQ ID NO: 437322 - DNA, 120 bp, Artificial Sequence
  ENSG00000153187_110 (sequence is synthesized)
ttgttaaatatcagattattgattagtgatcatcaacattttcccgcattcatgcagtgcggcctctgaaaacatggttgaacatcctatggaatttttttttttttttgagatggagtc

SEQ ID NO: 437323 - DNA, 120 bp, Artificial Sequence
  ENSG00000153187_111 (sequence is synthesized)
cagaattttttaactatttggttacgactaatttggataatgtagtgcatgcagctttgatttgtgccactaagagtgggcaaactgtcttcctttttgtgaatcagtaaaaattttccc

SEQ ID NO: 437324 - DNA, 120 bp, Artificial Sequence
  ENSG00000153187_112 (sequence is synthesized)
tcaacatgtgtttgacagttgtcattcactgctaagttaaggcatttggtaaaccacacagcctctgcatccttcctagcgacagccacaagaaaaggtgggcatgggagggaaaatgct

SEQ ID NO: 437325 - DNA, 120 bp, Artificial Sequence
  ENSG00000153187_113 (sequence is synthesized)
cttgtgaattgaactggaggcaagctccacttttctttagaaaaagatgtagatcaaaataactaatattttcttccttgctcgatttctgtgccttccatggtacatcaaaataatagg

SEQ ID NO: 437326 - DNA, 120 bp, Artificial Sequence
  ENSG00000153187_114 (sequence is synthesized)
accagtaatggccacaatcctgttgactgctgttaccttcgccccaatatttctttaagcatttcttaagcatctagcttgtgttttgttatatttaacagattttcttaaagtattgta

SEQ ID NO: 437327 - DNA, 120 bp, Artificial Sequence
  ENSG00000153187_115 (sequence is synthesized)
tgaattaaaaccagaaataacttcattttcctagaaagggataatttctcccggagaataaatcctgaggatttagttagatgctgtgggtattgtattttaaataatattttaatggga

SEQ ID NO: 437328 - DNA, 120 bp, Artificial Sequence
  ENSG00000153187_116 (sequence is synthesized)
gcagctgattgactttcaaatggattgtttacattaatagtaattctgcagttgttttactattgcatcagtctgccagacaagttccatgtgcatattttaattcagaactaattatac

SEQ ID NO: 437329 - DNA, 120 bp, Artificial Sequence
  ENSG00000153187_117 (sequence is synthesized)
ttaaaaatttaaaccctgcatacttccccaaaaatgtttagggcagttaaaaacaactcttttggaagatgactcgcattttaagaaatgagagaacactgtcaaatgatgaatgcattt

SEQ ID NO: 437330 - DNA, 120 bp, Artificial Sequence
  ENSG00000153187_118 (sequence is synthesized)
aaaaaataatttgcaaagtgataaaagcccttagttttaaatcttacaatgacattagctcttacaagaactcagtaagtatttgctgttttttaatgggatagtaataaggttgaggtt

SEQ ID NO: 437331 - DNA, 120 bp, Artificial Sequence
  ENSG00000153187_119 (sequence is synthesized)
tttgttaagggacgtttacttatcatcaaactctatacttactactacaaggaaactccaagtacattaaacactatgttttataattctttgccacactgccaataaattctgttcaca

SEQ ID NO: 437332 - DNA, 120 bp, Artificial Sequence
  ENSG00000153187_120 (sequence is synthesized)
ttttaaggatgacaagtccactatatgtaacacgtaagaatgctatcctggcagtagacacagggccagaataaactggcaagttttcattccacacaagtgtgggaaaaaaatgactac

SEQ ID NO: 437333 - DNA, 120 bp, Artificial Sequence
  ENSG00000153187_121 (sequence is synthesized)
aacttaaactttatttacttgattgagagcttattgcacatgaaatgttttatgtggttgatcttaacttcgtttacattgacttctatgctcaagattgttcaattgctgctgctgccg

SEQ ID NO: 437334 - DNA, 120 bp, Artificial Sequence
  ENSG00000153187_122 (sequence is synthesized)
ttgtgttttctttcaggatcgaggtgggtaccttcatataatatcttctttttaatttcttctctggcaattctttcctggattctttgctttgcataattatacctacaatgaaacctt

SEQ ID NO: 437335 - DNA, 120 bp, Artificial Sequence
  ENSG00000153187_123 (sequence is synthesized)
agaagaaaagaatatgaataaattgttaatataaagtcctacagaaattaatttatgaaatttctctaaatcacacaaaacttaaatacagatgactactaccctgagactgaaaaatat

SEQ ID NO: 437336 - DNA, 120 bp, Artificial Sequence
  ENSG00000153187_124 (sequence is synthesized)
gttctaatttatagtgctatttttgggcagttttggtgtcagaatacctatcaacacattctttttttattaggaaaaaaaggatgtctacataacaatttgtaaagtgataaaatccat

SEQ ID NO: 437337 - DNA, 120 bp, Artificial Sequence
  ENSG00000153187_125 (sequence is synthesized)
tagtttttaagtcttctgatagcattggctattataagaaacaagtatttgctctcgtttttaacgggataataatgctatgtctacataaaatgatttctaccaccttaaatagctcac

SEQ ID NO: 437338 - DNA, 120 bp, Artificial Sequence
  ENSG00000153187_126 (sequence is synthesized)
tgtagaaattcatgtataaatggaaccatatagtacatacatatcatactcttaggtctggcaaatatttgaggttcatccatattttatattcactcatcagtagttgtaaacacattc

SEQ ID NO: 437339 - DNA, 120 bp, Artificial Sequence
  ENSG00000153187_127 (sequence is synthesized)
ttaaagtagcattttcagatatgaataagcagggatgaaataagtattagggtaagggaaatggttgaggctttcctaagtgaagtgtaaaaaccacagctttctttttaatgggatgtc

SEQ ID NO: 437340 - DNA, 120 bp, Artificial Sequence
  ENSG00000153187_128 (sequence is synthesized)
taatatgcatttatctgttcaagcattttaagatttccatgaaaatgtcctgaaaaatcaagattcttcattgagggtgaggatctcccaatgggagactgctctgaaaagagcatgtgc

SEQ ID NO: 437341 - DNA, 120 bp, Artificial Sequence
  ENSG00000153187_129 (sequence is synthesized)
tttttgaattagataacctactataatcatggatgttcttgaatacttagcaaacataccagcatcccaaagtcaccaagataaaccctcctactccaacatcacatgatcttctaattc

SEQ ID NO: 437342 - DNA, 120 bp, Artificial Sequence
  ENSG00000153187_130 (sequence is synthesized)
tacctgtaaaaataagcataacaattaattagaatataattacgttatatacattactccacctagaaaaaaaaatagttcattatgtagagaaatgctttttttagtacatagagaaat

SEQ ID NO: 437343 - DNA, 120 bp, Artificial Sequence
  ENSG00000153187_131 (sequence is synthesized)
aaaaaatacagatactcactagtgaacaaaaaatgtccaaagccagccacaacagatcctaatgaaccatacaatattgaatgccgggcgcagggagtattttcaacatctaaaaatcct

SEQ ID NO: 437344 - DNA, 120 bp, Artificial Sequence
  ENSG00000153187_132 (sequence is synthesized)
aggagcttaagggactagaatgaaaaaaaagaacctagattgagtaagaaagtatttcattttggggtgctttggcaaaaatgacaatacaccatttcttttcttgtagttgagggttta

SEQ ID NO: 437345 - DNA, 120 bp, Artificial Sequence
  ENSG00000153187_133 (sequence is synthesized)
aactagagtatgtgccacgtgacaacctaaatcagcttgcgttgtctttgtccacctttggtatgcagtctgaatctttaaatccgaaaaccttacaaattggaccggaaaacccttaag

SEQ ID NO: 437346 - DNA, 120 bp, Artificial Sequence
  ENSG00000153187_134 (sequence is synthesized)
cagtagggtaacttggagctgtatcttaatttgctaatcaactgacttggaaataggataattcattttatgagctctttaaatgagtttatttgggaatatgcctatcattggaattga

SEQ ID NO: 437347 - DNA, 120 bp, Artificial Sequence
  ENSG00000153187_135 (sequence is synthesized)
aagcagcatagcttgcttcagtaactccaataatttgggaagcagaaatggaaaaagtaatttgagtcatgtttgcttatgtagtgccgtttaaaattcccctagtaattacctttcata

SEQ ID NO: 437348 - DNA, 120 bp, Artificial Sequence
  ENSG00000153187_136 (sequence is synthesized)
ttttattaactaggttaacatcaactgtggttgtaagagtaaatgtttcaccttaagataaacatgggcaatatattaaactctagtctgttttcttgcctgtgaagtgaggctgcactt

SEQ ID NO: 437349 - DNA, 120 bp, Artificial Sequence
  ENSG00000153187_137 (sequence is synthesized)
gattatatttgattctttgttcgtaatacatgggaacgacagctaagtgtggtgaaaaacgcggggatccaaagagctggatttttatctcagatctgccgctaacttttgtatcctata

SEQ ID NO: 437350 - DNA, 120 bp, Artificial Sequence
  ENSG00000153187_138 (sequence is synthesized)
ggctacttttatttctatggtctcaatctataacatgaatgggttgggttaaatgactgaagttccttcaagtgctaaaattctttttctacagtcttcattggatttatgtatttctta

SEQ ID NO: 437351 - DNA, 120 bp, Artificial Sequence
  ENSG00000153187_139 (sequence is synthesized)
ttcctaatatgtttaactgggatgtctgtcactctagggcggcaagacagacatttaaaagtaacagtcacactgctgaactggcatttctgttaacacaaaagtttagaaaactcacgg

SEQ ID NO: 437352 - DNA, 120 bp, Artificial Sequence
  ENSG00000153187_140 (sequence is synthesized)
taactgttacttgatttaagtgtatataaaattttcagtaaggctgcttttaaaaggaaccactgtccatttaaaggtttcatagttatcttcaatgggttagtattgtttggggcagga

SEQ ID NO: 437353 - DNA, 120 bp, Artificial Sequence
  ENSG00000153187_141 (sequence is synthesized)
cattaaactagaagggattctataggatgaggtgatacctagaaggtaatatattgtaaggcaaaagagattagaagaaatggggaaaggatagtaaaaggcaagtcagattaaaggttg

SEQ ID NO: 437354 - DNA, 120 bp, Artificial Sequence
  ENSG00000153187_142 (sequence is synthesized)
aaacatgaagatattctcaattgtatttctgcctatgtttgcttttttggctcaagcatctgttggaagagacaaaatgtgacttggttcataataaagcaagaattatttactctcgga

SEQ ID NO: 437355 - DNA, 80 bp, Artificial Sequence
  ENSG00000153187_143 (sequence is synthesized)
tgcccgcctgagcctctcagaatgctggaattacaggtgcttcatactgctaagttatcaaaggtacttatttttgaagc

SEQ ID NO: 437356 - DNA, 120 bp, Artificial Sequence
  ENSG00000153187_144 (sequence is synthesized)
ttcatactgctaagttatcaaaggtacttatttttgaagcttcctgtaaattaaaagaggagcttggaaccttcattttgttgtgacagttaatcacggttgttatgttagaacttgcca

SEQ ID NO: 437357 - DNA, 120 bp, Artificial Sequence
  ENSG00000153187_145 (sequence is synthesized)
tgcagagctaggcgattttttatttagggtacttcatttttatcaagcatttgaaagggccaccaaagagttaaaaataaaatttggttacattactgcttttgttggtgagaaaaacat

SEQ ID NO: 437358 - DNA, 120 bp, Artificial Sequence
  ENSG00000153187_146 (sequence is synthesized)
acattaattgtatcctttaattggctttaagttaaagactgacaacatgaactttaaaaatattaagtattcttttaaatatgggtcaaataagtatttaactctttaaatttcaagtta

SEQ ID NO: 437359 - DNA, 120 bp, Artificial Sequence
  ENSG00000153187_147 (sequence is synthesized)
cacatcagtttaaagttcttacaaatattgggggtgggctagagtgtgccttctttgtatttatagctagaggaagattagcccgtggcgcaatgaaatatgcgagagttaaggggttac

SEQ ID NO: 437360 - DNA, 120 bp, Artificial Sequence
  ENSG00000153187_148 (sequence is synthesized)
taactacaagtggaatgttacttggtaaagcttctttttgactgatgtgggctcatgaatgttcaggagggtctgatttcagtgttttttaactagagggcattctaagccttttgtctg

SEQ ID NO: 437361 - DNA, 120 bp, Artificial Sequence
  ENSG00000153187_149 (sequence is synthesized)
tttttatctattctgttaatacttcagacaggtaatattagcacatagtaggcacaggctacattttagtttttgttcctttattagaagtttatgaccaatggttgaaataaaatctta

SEQ ID NO: 437362 - DNA, 120 bp, Artificial Sequence
  ENSG00000153187_150 (sequence is synthesized)
cccgtgatatgcaaatcgtcaactaatttggtctctgcgtatatatccctcctaacttccatcaattctggtacagagatagaaaagtaatagtgtcagtgacaggtgattaggttatat

SEQ ID NO: 437363 - DNA, 120 bp, Artificial Sequence
  ENSG00000153187_151 (sequence is synthesized)
gatttttttttttttaactgtggcatttgaatattgcttgcctggcacaaaatgacatttagaagaactagatgattagtctgtttcatttactttgtgctgtgcatattgctcttaagt

SEQ ID NO: 437364 - DNA, 120 bp, Artificial Sequence
  ENSG00000153187_152 (sequence is synthesized)
aattgtttcccccttatgttgactgttaatctttccataaacaaatttttgtccgttagtgtaagggctatgaaaacttagatatttaaattggccttaacaatatttaaagaattatta

SEQ ID NO: 437365 - DNA, 80 bp, Artificial Sequence
  ENSG00000153187_153 (sequence is synthesized)
cgaagccccgttcctactaaaaatttaaaaattagctgggtgtggtagtgggttcctgtaatcccagctgctcgggaggt

SEQ ID NO: 437366 - DNA, 120 bp, Artificial Sequence
  ENSG00000153187_154 (sequence is synthesized)
cgaagccccgttcctactaaaaatttaaaaattagctgggtgtggtagtgggttcctgtaatcccagctgctcgggaggttgaggcagggacaattacttgaacctgggaggcagaggtt

SEQ ID NO: 437367 - DNA, 120 bp, Artificial Sequence
  ENSG00000153187_155 (sequence is synthesized)
aaaaaaaaaaaaagaaaagaaaaattatagaccgggaggtattctaggtaaactttttgtctttgtctctatccattttgttagtatcttaaagagatgggaggaaaggcaagattaagt

SEQ ID NO: 437368 - DNA, 120 bp, Artificial Sequence
  ENSG00000153187_156 (sequence is synthesized)
atgggaggaaaggcaagattaagttggttctttcaactctgagggtaaactgccttccactggctaggcttctgtttttttccgtagtgtttttgagctcttaacatctagcagctaaaa

SEQ ID NO: 437369 - DNA, 120 bp, Artificial Sequence
  ENSG00000153187_157 (sequence is synthesized)
ctcaaaatgaaaggcatggaattttaattctgttactgtgtgaaatcttctttttaaaagaatgtttttcctacatattctgcttgtgtaactatgttaaatctattaggacttaggcct

SEQ ID NO: 437370 - DNA, 120 bp, Artificial Sequence
  ENSG00000153187_158 (sequence is synthesized)
cctgaaagttaacattttttccagcaatactgcttcaggaattaaaattgcagttgttacatatgcatatatgtttggtctgtttttatttttaggaaaatatgttactaaacctcaaga

SEQ ID NO: 437371 - DNA, 120 bp, Artificial Sequence
  ENSG00000153187_159 (sequence is synthesized)
attgtcagctttaggattgtgaggattcgtggtgggtttctaaattaataatatgactttgtttcctgcaggaaactttaccctcccagaggtagctgagtgctttgatgaaataaccta

SEQ ID NO: 437372 - DNA, 120 bp, Artificial Sequence
  ENSG00000153187_160 (sequence is synthesized)
ggatcgaaacaagtgataattttatagtttggatgtagctgaagtttcttcctcattaatggtatactgtcacagtaactaaagtattcatgtgatttgatattaaatacacctaggtta

SEQ ID NO: 437373 - DNA, 120 bp, Artificial Sequence
  ENSG00000153187_161 (sequence is synthesized)
tgttaatggttagaattaaacatttcttttgtctttaaacaattatttttggagaaaaaggaacaatctagaggaatcctaagtcttctgtataagtagggtacaatatacaatgaaact

SEQ ID NO: 437374 - DNA, 120 bp, Artificial Sequence
  ENSG00000153187_162 (sequence is synthesized)
aactgtagcttagtctggaaaggtgtgagctttatgttggggtgtcttagtaatccgtaaggaacatgataggcattgacataaggaaaattgaactagtaatggtgaaatgagtctact

SEQ ID NO: 437375 - DNA, 120 bp, Artificial Sequence
  ENSG00000153187_163 (sequence is synthesized)
tacttttgagttttttcaggtgtactaaacaagtcagatgcatttctcataatgaataaaaaattaaaacataagaaaccagcagagggtatccagaatttgtgtattgcttgctaccta

SEQ ID NO: 437376 - DNA, 120 bp, Artificial Sequence
  ENSG00000153187_164 (sequence is synthesized)
agattaggggctagcaacctgtccatttctgctcctctctctcacccccacaaacctaacaagcaattgggctcagagctcttagagagtatttcctttttgtagaacttcagaggacga

SEQ ID NO: 437377 - DNA, 120 bp, Artificial Sequence
  ENSG00000153187_165 (sequence is synthesized)
tcttgaaaaagatcttgttcagggattgaagtgtttataagtgttaatagggtaaagtgtgaatcgtcttgcagtagtagccataatctaccttttgaaggcaaaataggttgaagattg

SEQ ID NO: 437378 - DNA, 120 bp, Artificial Sequence
  ENSG00000153187_166 (sequence is synthesized)
aaggtaggttactcttaaagtttgaaattgtaaagtgtgaaagtctggatagaggggaaggggaacctggactatttttatttttttttgagacgagtctggctctgtcgccaaggctgg

SEQ ID NO: 437379 - DNA, 120 bp, Artificial Sequence
  ENSG00000153187_167 (sequence is synthesized)
acgccattgtactccagcctgggcgacgagagtgaaactccatctcaagagagaaaaaaaaaaggtcatagtgcattgaaggtttggcaaaaaactaaatagtttggacgtgaagttgga

SEQ ID NO: 437380 - DNA, 120 bp, Artificial Sequence
  ENSG00000153187_168 (sequence is synthesized)
agtttggacgtgaagttggatggtagggtagacattgataggagagactttcgttctaccagtctctccttattgagggtgggtgttacagactttggtaatttattaatacacttgtaa

SEQ ID NO: 437381 - DNA, 120 bp, Artificial Sequence
  ENSG00000153187_169 (sequence is synthesized)
aatcttaatagcataagaataaaaattattagtgatcatgtaaatacatgaaacatttaaaaaataatccaaccaaatatgttacaactttgtttttatccaggtttccagtttatgcaa

SEQ ID NO: 437382 - DNA, 120 bp, Artificial Sequence
  ENSG00000153187_170 (sequence is synthesized)
gattgccgtggtgcgacctaggctcactgcaacctccgcgtcctgggttcaagcgattctccttgcttcagtctctcaagtagctcggactagaggcacacactaccacacctggctaat

SEQ ID NO: 437383 - DNA, 120 bp, Artificial Sequence
  ENSG00000153187_171 (sequence is synthesized)
aataatggacaaaggtaatatttaaattataaaatgttgcctgctttacatatagatatgagttgaattttaaaaagcataacttattaaaattcacaagttcaaggggaaattttaact

SEQ ID NO: 437384 - DNA, 120 bp, Artificial Sequence
  ENSG00000153187_172 (sequence is synthesized)
gggcggaagatcagtacaatgcggccgcggggagcgcgggcccgcgggggaggggagcgccgccgcgccgggctcggcccctccccctctctgcgctctcttcgggatacacgtgggctt

SEQ ID NO: 437385 - DNA, 120 bp, Artificial Sequence
  ENSG00000153187_173 (sequence is synthesized)
gagttaaagggcccaactaaatgttccagtgattccaatagctctttgctgaaaagtgcataaacaggaatcctgaatttattatatagacctcctcgcattatataatcgaagcaaagg

SEQ ID NO: 437386 - DNA, 120 bp, Artificial Sequence
  ENSG00000153187_174 (sequence is synthesized)
cagttttcaatatgagcaacaaaatacaccagtccctggattagtgtaaagacttcattcagcagttgaattgggaaaacacaggacatttttgaggaactcactaattcattttgactg

SEQ ID NO: 437387 - DNA, 120 bp, Artificial Sequence
  ENSG00000153187_175 (sequence is synthesized)
aaaacagtgaacatgaaattgacctagaaaattcagtctagcttctaggtcagtattgtttctggttctggagatacgtgcttcatggtttacaaccatcagatttcttaactgtgtagc

SEQ ID NO: 437388 - DNA, 120 bp, Artificial Sequence
  ENSG00000153187_176 (sequence is synthesized)
ccttaaaggccacctaatagttctttaacctgtagcttccacaggataagctttgctcctaattttaattcttagttttttagaaagtttaaggaagcagattttaactgttgaattttt

SEQ ID NO: 437389 - DNA, 120 bp, Artificial Sequence
  ENSG00000153201_0 (sequence is synthesized)
acagtggtcctccgccggctacggcgctgcgtcactggtttgcaggcgctttcctcttggaagtggcgactgctgcgggcctgagcgctggtctcacgcgcctcgggagccaggttggcg

SEQ ID NO: 437390 - DNA, 120 bp, Artificial Sequence
  ENSG00000153201_1 (sequence is synthesized)
gcgcgatgaggcgcagcaaggctgacgtggagcggtacatcgcctcggtgcagggctccaccccgtcgcctcgacagaagtcaatgaaaggattctattttgcaaagctgtattatgaag

SEQ ID NO: 437391 - DNA, 120 bp, Artificial Sequence
  ENSG00000153201_2 (sequence is synthesized)
ctaaagaatatgatcttgctaaaaaatacatatgtacttacattaatgtgcaagagagggatcccaaagctcacagatttctgggtcttctttatgaattggaagaaaacacagacaaag

SEQ ID NO: 437392 - DNA, 120 bp, Artificial Sequence
  ENSG00000153201_3 (sequence is synthesized)
ccgttgaatgttacaggcgttcagtggaattaaacccaacacaaaaagatcttgtgttgaagattgcagaattgctttgtaaaaatgatgttactgatggaagagcaaaatactggcttg

SEQ ID NO: 437393 - DNA, 87 bp, Artificial Sequence
  ENSG00000153201_4 (sequence is synthesized)
aaaaatgatgttactgatggaagagcaaaatactggcttgaaagagcagccaaacttttcccaggaagtcctgcaatttataaacta

SEQ ID NO: 437394 - DNA, 120 bp, Artificial Sequence
  ENSG00000153201_5 (sequence is synthesized)
atgtaagacctgatgacgtccatgtgaacatccggctagtggaggtgtatcgctcaactaaaagattgaaggatgctgtggcccactgccatgaggcagagaggaacatagctttgcgtt

SEQ ID NO: 437395 - DNA, 120 bp, Artificial Sequence
  ENSG00000153201_6 (sequence is synthesized)
caagtttagaatggaattcgtgtgttgtacagacccttaaggaatatctggagtctttacagtgtttggagtctgataaaagtgactggcgagcaaccaatacagacttactgctggcct

SEQ ID NO: 437396 - DNA, 120 bp, Artificial Sequence
  ENSG00000153201_7 (sequence is synthesized)
atgctaatcttatgcttcttacgctttccactagagatgtgcaggaaagtagagaattactgcaaagttttgatagtgctcttcagtctgtgaaatctttgggtggaaatgatgaactgt

SEQ ID NO: 437397 - DNA, 120 bp, Artificial Sequence
  ENSG00000153201_8 (sequence is synthesized)
cagctactttcttagaaatgaaaggacatttctacatgcatgctggttctctgcttttgaagatgggtcagcatagtagtaatgttcaatggcgagctctttctgagctggctgcattgt

SEQ ID NO: 437398 - DNA, 120 bp, Artificial Sequence
  ENSG00000153201_9 (sequence is synthesized)
gctatctcatagcatttcaggttccaagaccaaagattaaattaataaaaggtgaagctggacaaaatctgctggaaatgatggcctgtgaccgactgagccaatcagggcacatgttgc

SEQ ID NO: 437399 - DNA, 120 bp, Artificial Sequence
  ENSG00000153201_10 (sequence is synthesized)
taaacttaagtcgtggcaagcaagattttttaaaagagattgttgaaacttttgccaacaaaagcgggcagtctgcattatatgatgctctgttttctagtcagtcacctaaggatacat

SEQ ID NO: 437400 - DNA, 120 bp, Artificial Sequence
  ENSG00000153201_11 (sequence is synthesized)
cttttcttggtagcgatgatattggaaacattgatgtacgagaaccagagcttgaagatttgactagatacgatgttggtgctattcgagcacataatggtagtcttcagcaccttactt

SEQ ID NO: 437401 - DNA, 120 bp, Artificial Sequence
  ENSG00000153201_12 (sequence is synthesized)
ggcttggcttacagtggaattcattgcctgctttacctggaatccgaaaatggctaaaacagcttttccatcatttgccccatgaaacctcaaggcttgaaacaaatgcacctgaatcaa

SEQ ID NO: 437402 - DNA, 120 bp, Artificial Sequence
  ENSG00000153201_13 (sequence is synthesized)
tatgtattttagatcttgaagtatttctccttggagtagtatataccagccacttacaattaaaggagaaatgtaattctcaccacagctcctatcagccgttatgcctgccccttcctg

SEQ ID NO: 437403 - DNA, 120 bp, Artificial Sequence
  ENSG00000153201_14 (sequence is synthesized)
tgtgtaaacagctttgtacagaaagacaaaaatcttggtgggatgcggtttgtactctgattcacagaaaagcagtacctggaaacgtagcaaaattgagacttctagttcagcatgaaa

SEQ ID NO: 437404 - DNA, 120 bp, Artificial Sequence
  ENSG00000153201_15 (sequence is synthesized)
taaacactctaagagcccaggaaaaacatggccttcaacctgctctgcttgtacattgggcagaatgccttcagaaaacgggcagcggtcttaattctttttatgatcaacgagaataca

SEQ ID NO: 437405 - DNA, 120 bp, Artificial Sequence
  ENSG00000153201_16 (sequence is synthesized)
tagggagaagtgttcattattggaagaaagttttgccattgttgaagataataaaaaagaagaacagtattcctgaacctattgatcctctgtttaaacattttcatagtgtagacattc

SEQ ID NO: 437406 - DNA, 120 bp, Artificial Sequence
  ENSG00000153201_17 (sequence is synthesized)
aggcatcagaaattgttgaatatgaagaagacgcacacataacttttgctatattggatgcagtaaatggaaatatagaagatgctgtgactgcttttgaatctataaaaagtgttgttt

SEQ ID NO: 437407 - DNA, 120 bp, Artificial Sequence
  ENSG00000153201_18 (sequence is synthesized)
cttattggaatcttgcactgatttttcacaggaaggcagaagacattgaaaatgatgccctttctcctgaagaacaagaagaatgcaaaaattatctgagaaagaccagggactacctaa

SEQ ID NO: 437408 - DNA, 120 bp, Artificial Sequence
  ENSG00000153201_19 (sequence is synthesized)
taaagattatagatgacagtgattcaaatctttcagtggtcaagaaattgcctgtgcccctggagtctgtaaaagagatgcttaattcagtcatgcaggaactcgaagactatagtgaag

SEQ ID NO: 437409 - DNA, 120 bp, Artificial Sequence
  ENSG00000153201_20 (sequence is synthesized)
gaggtcctctctataaaaatggttctttgcgaaatgcagattcagaaataaaacattctacaccgtctcctaccagatattcactatcaccaagtaaaagttacaagtattctcccaaaa

SEQ ID NO: 437410 - DNA, 120 bp, Artificial Sequence
  ENSG00000153201_21 (sequence is synthesized)
caccacctcgatgggcagaagatcagaattctttactgaaaatgatttgccaacaagtagaggccattaagaaagaaatgcaggagttgaaactaaatagcagtaactcagcatcccctc

SEQ ID NO: 437411 - DNA, 120 bp, Artificial Sequence
  ENSG00000153201_22 (sequence is synthesized)
atcccctcatcgttggcccacagagaattatggaccagactcagtgcctgatggatatcaggggtcacagacatttcatggggctccactaacagttgcaactactggcccttcagtata

SEQ ID NO: 437412 - DNA, 120 bp, Artificial Sequence
  ENSG00000153201_23 (sequence is synthesized)
agtcaccagcatataattcccagtatcttctcagaccagcagctaatgttactcccacaaagggcccagtctatggcatgaataggcttccaccccaacagcatatttatgcctatccgc

SEQ ID NO: 437413 - DNA, 120 bp, Artificial Sequence
  ENSG00000153201_24 (sequence is synthesized)
aacagatgcacacaccgccagtgcaaagctcatctgcttgtatgttctctcaggagatgtatggtcctcctgcattgcgttttgagtctcctgcaacgggaattctatcgcccaggggtg

SEQ ID NO: 437414 - DNA, 120 bp, Artificial Sequence
  ENSG00000153201_25 (sequence is synthesized)
atgattactttaattacaatgttcaacagacaagcacaaatccacctttgccagaaccaggatatttcacaaaacctccgattgcagctcatgcttcaagatctgcagaatctaagacta

SEQ ID NO: 437415 - DNA, 120 bp, Artificial Sequence
  ENSG00000153201_26 (sequence is synthesized)
tagaatttgggaaaactaattttgttcagcccatgccgggtgaaggattaaggccatctttgccaacacaagcacacacaacacagccaactccttttaaatttaactcaaatttcaaat

SEQ ID NO: 437416 - DNA, 120 bp, Artificial Sequence
  ENSG00000153201_27 (sequence is synthesized)
caaatgatggtgacttcacgttttcctcaccacaggttgtgacacagccccctcctgcagcttacagtaacagtgaaagccttttaggtctcctgacttcagataaacccttgcaaggag

SEQ ID NO: 437417 - DNA, 120 bp, Artificial Sequence
  ENSG00000153201_28 (sequence is synthesized)
atggctatagtggagccaaaccaattcctggtggtcaaaccattgggcctcgaaatacattcaattttggaagcaaaaatgtgtctggaatttcatttacagaaaacatggggtcgagtc

SEQ ID NO: 437418 - DNA, 120 bp, Artificial Sequence
  ENSG00000153201_29 (sequence is synthesized)
agcaaaagaattctggttttcggcgaagtgatgatatgtttactttccatggtccagggaaatcagtatttggaacacccactttagagacagcaaacaagaatcatgagacagatggag

SEQ ID NO: 437419 - DNA, 120 bp, Artificial Sequence
  ENSG00000153201_30 (sequence is synthesized)
gaagtgcccatggggatgatgatgatgacggtcctcactttgagcctgtagtacctcttcctgataagattgaagtaaaaactggtgaggaagatgaagaagaattcttttgcaaccgcg

SEQ ID NO: 437420 - DNA, 120 bp, Artificial Sequence
  ENSG00000153201_31 (sequence is synthesized)
cgaaattgtttcgtttcgatgtagaatccaaagaatggaaagaacgtgggattggcaatgtaaaaatactgaggcataaaacatctggtaaaattcgccttctaatgagacgagagcaag

SEQ ID NO: 437421 - DNA, 120 bp, Artificial Sequence
  ENSG00000153201_32 (sequence is synthesized)
tattgaaaatctgtgcaaatcattacatcagtccagatatgaaattgacaccaaatgctggatcagacagatcttttgtatggcatgcccttgattatgcagatgagttgccaaaaccag

SEQ ID NO: 437422 - DNA, 120 bp, Artificial Sequence
  ENSG00000153201_33 (sequence is synthesized)
aacaacttgctattaggttcaaaactcctgaggaagcagcactttttaaatgcaagtttgaagaagcccagagcattttaaaagccccaggaacaaatgtagccatggcgtcaaatcagg

SEQ ID NO: 437423 - DNA, 120 bp, Artificial Sequence
  ENSG00000153201_34 (sequence is synthesized)
ctgtcagaattgtaaaagaacccacaagtcatgataacaaggatatttgcaaatctgatgctggaaacctgaattttgaatttcaggttgcaaagaaagaagggtcttggtggcattgta

SEQ ID NO: 437424 - DNA, 120 bp, Artificial Sequence
  ENSG00000153201_35 (sequence is synthesized)
acagctgctcattaaagaatgcttcaactgctaagaaatgtgtatcatgccaaaatctaaacccaagcaataaagagctcgttggcccaccattagctgaaactgtttttactcctaaaa

SEQ ID NO: 437425 - DNA, 120 bp, Artificial Sequence
  ENSG00000153201_36 (sequence is synthesized)
ccagcccagagaatgttcaagatcgatttgcattggtgactccaaagaaagaaggtcactgggattgtagtatttgtttagtaagaaatgaacctactgtatctaggtgcattgcgtgtc

SEQ ID NO: 437426 - DNA, 120 bp, Artificial Sequence
  ENSG00000153201_37 (sequence is synthesized)
agaatacaaaatctgctaacaaaagtggatcttcatttgttcatcaagcttcatttaaatttggccagggagatcttcctaaacctattaacagtgatttcagatctgttttttctacaa

SEQ ID NO: 437427 - DNA, 120 bp, Artificial Sequence
  ENSG00000153201_38 (sequence is synthesized)
aggaaggacagtgggattgcagtgcatgtttggtacaaaatgaggggagctctacaaaatgtgctgcttgtcagaatccgagaaaacagagtctacctgctacttctattccaacacctg

SEQ ID NO: 437428 - DNA, 120 bp, Artificial Sequence
  ENSG00000153201_39 (sequence is synthesized)
cctcttttaagtttggtacttcagagacaagtaaaactctaaaaagtggatttgaagacatgtttgctaagaaggaaggacagtgggattgcagttcatgcttagtgcgaaatgaagcaa

SEQ ID NO: 437429 - DNA, 120 bp, Artificial Sequence
  ENSG00000153201_40 (sequence is synthesized)
atgctacaagatgtgttgcttgtcagaatccggataaaccaagtccatctacttctgttccagctcctgcctcttttaagtttggtacttcagagacaagcaaggctccaaagagcggat

SEQ ID NO: 437430 - DNA, 120 bp, Artificial Sequence
  ENSG00000153201_41 (sequence is synthesized)
ttgagggaatgttcactaagaaggagggacagtgggattgcagtgtgtgcttagtaagaaatgaagccagtgctaccaaatgtattgcttgtcagaatccaggtaaacaaaatcaaacta

SEQ ID NO: 437431 - DNA, 120 bp, Artificial Sequence
  ENSG00000153201_42 (sequence is synthesized)
cttctgcagtttcaacacctgcctcttcagagacaagcaaggctccaaagagcggatttgagggaatgttcactaagaaggagggacagtgggattgcagtgtgtgcttagtaagaaatg

SEQ ID NO: 437432 - DNA, 120 bp, Artificial Sequence
  ENSG00000153201_43 (sequence is synthesized)
aagccagtgctaccaaatgtattgcttgtcagaatccaggtaaacaaaatcaaactacttctgcagtttcaacacctgcctcttcagagacaagcaaggctccaaagagcggatttgagg

SEQ ID NO: 437433 - DNA, 120 bp, Artificial Sequence
  ENSG00000153201_44 (sequence is synthesized)
gaatgttcactaagaaggaaggacagtgggattgcagtgtgtgcttagtaagaaatgaagccagtgctaccaaatgtattgcttgtcagtgtccaagtaaacaaaatcaaacaactgcaa

SEQ ID NO: 437434 - DNA, 120 bp, Artificial Sequence
  ENSG00000153201_45 (sequence is synthesized)
tttcaacacctgcctcttcggagataagcaaggctccaaagagtggatttgaaggaatgttcatcaggaaaggacagtgggattgtagtgtttgctgtgtacaaaatgagagttcttcct

SEQ ID NO: 437435 - DNA, 120 bp, Artificial Sequence
  ENSG00000153201_46 (sequence is synthesized)
taaaatgtgtggcttgtgatgcctctaaaccaactcataaacctattgcagaagctccttcagctttcacactgggctcagaaatgaagttgcatgactcttctggaagtcaggtgggaa

SEQ ID NO: 437436 - DNA, 120 bp, Artificial Sequence
  ENSG00000153201_47 (sequence is synthesized)
caggatttaaaagtaatttctcagaaaaagcttctaagtttggcaatacagagcaaggattcaaatttgggcatgtggatcaagaaaattcaccttcatttatgtttcagggttcttcta

SEQ ID NO: 437437 - DNA, 120 bp, Artificial Sequence
  ENSG00000153201_48 (sequence is synthesized)
atttcggaaccaggaaatcaagaaaagaaaagtgaaaagcctcttgaaaatggtactggcttccaggctcaggatattagtggccagaagaatggccgtggtgtgatttttggccaaaca

SEQ ID NO: 437438 - DNA, 120 bp, Artificial Sequence
  ENSG00000153201_49 (sequence is synthesized)
agtagcacttttacatttgcagatcttgcaaaatcaacttcaggagaaggatttcagtttggcaaaaaagaccccaatttcaagggattttcaggtgctggagaaaaattattctcatca

SEQ ID NO: 437439 - DNA, 120 bp, Artificial Sequence
  ENSG00000153201_50 (sequence is synthesized)
caatacggtaaaatggccaataaagcaaacacttccggtgactttgagaaagatgatgatgcctataagactgaggacagcgatgacatccattttgaaccagtagttcaaatgcccgaa

SEQ ID NO: 437440 - DNA, 120 bp, Artificial Sequence
  ENSG00000153201_51 (sequence is synthesized)
aaagtagaacttgtaacaggagaagaagatgaaaaagttctgtattcacagcgggtaaaactatttagatttgatgctgaggtaagtcagtggaaagaaaggggcttggggaacttaaaa

SEQ ID NO: 437441 - DNA, 120 bp, Artificial Sequence
  ENSG00000153201_52 (sequence is synthesized)
attctcaaaaacgaggtcaatggcaaactaagaatgctgatgcgaagagaacaagtactaaaagtgtgtgctaatcattggataacgactacgatgaacctgaagcctctctctggatca

SEQ ID NO: 437442 - DNA, 120 bp, Artificial Sequence
  ENSG00000153201_53 (sequence is synthesized)
gatagagcatggatgtggttagccagtgatttctctgatggtgatgccaaactagagcagttggcagcaaaatttaaaacaccagagctggctgaagaattcaagcagaaatttgaggaa

SEQ ID NO: 437443 - DNA, 120 bp, Artificial Sequence
  ENSG00000153201_54 (sequence is synthesized)
tgccagcggcttctgttagacataccacttcaaactccccataaacttgtagatactggcagagctgccaagttaatacagagagctgaagaaatgaagagtggactgaaagatttcaaa

SEQ ID NO: 437444 - DNA, 120 bp, Artificial Sequence
  ENSG00000153201_55 (sequence is synthesized)
acatttttgacaaatgatcaaacaaaagtcactgaggaagaaaataagggttcaggtacaggtgcggccggtgcctcagacacaacaataaaacccaatcctgaaaacactgggcccaca

SEQ ID NO: 437445 - DNA, 120 bp, Artificial Sequence
  ENSG00000153201_56 (sequence is synthesized)
ttagaatgggataactatgatttaagggaagatgctttggatgatagtgtcagtagtagctcagtacatgcttctccattggcaagtagccctgtgagaaaaaatcttttccgttttggt

SEQ ID NO: 437446 - DNA, 120 bp, Artificial Sequence
  ENSG00000153201_57 (sequence is synthesized)
gagtcaacaacaggatttaacttcagttttaaatctgctttgagtccatctaagtctcctgccaagttgaatcagagtgggacttcagttggcactgatgaagaatctgatgttactcaa

SEQ ID NO: 437447 - DNA, 120 bp, Artificial Sequence
  ENSG00000153201_58 (sequence is synthesized)
gaagaagagagagatggacagtactttgaacctgttgttcctttacctgatctagttgaagtatccagtggtgaggaaaatgaacaagttgtttttagtcacagggcaaaactctacaga

SEQ ID NO: 437448 - DNA, 120 bp, Artificial Sequence
  ENSG00000153201_59 (sequence is synthesized)
tatgataaagatgttggtcaatggaaagaaaggggcattggtgatataaagattttacagaattatgataataagcaagttcgtatagtgatgagaagggaccaagtattaaaactttgt

SEQ ID NO: 437449 - DNA, 120 bp, Artificial Sequence
  ENSG00000153201_60 (sequence is synthesized)
gccaatcacagaataactccagacatgactttgcaaaatatgaaagggacagaaagagtatggttgtggactgcatgtgattttgcagatggagaaagaaaagtagagcatttagctgtt

SEQ ID NO: 437450 - DNA, 120 bp, Artificial Sequence
  ENSG00000153201_61 (sequence is synthesized)
cgttttaaactacaggatgttgcagactcgtttaagaaaatttttgatgaagcaaaaacagcccaggaaaaagattctttgataacacctcatgtttctcggtcaagcactcccagagag

SEQ ID NO: 437451 - DNA, 120 bp, Artificial Sequence
  ENSG00000153201_62 (sequence is synthesized)
tcaccatgtggcaaaattgctgtagctgtattagaagaaaccacaagagagaggacagatgttattcagggtgatgatgtagcagatgcaacttcagaagttgaagtgtctagcacatct

SEQ ID NO: 437452 - DNA, 120 bp, Artificial Sequence
  ENSG00000153201_63 (sequence is synthesized)
gaaacaacaccaaaagcagtggtttctcctccaaagtttgtatttggttcagagtctgttaaaagcatttttagtagtgaaaaatcaaaaccatttgcattcggcaacagttcagccact

SEQ ID NO: 437453 - DNA, 120 bp, Artificial Sequence
  ENSG00000153201_64 (sequence is synthesized)
gggtctttgtttggatttagttttaatgcacctttgaaaagtaacaatagtgaaactagttcagtagcccagagtggatctgaaagcaaagtggaacctaaaaaatgtgaactgtcaaag

SEQ ID NO: 437454 - DNA, 120 bp, Artificial Sequence
  ENSG00000153201_65 (sequence is synthesized)
aactctgatatcgaacagtcttcagatagcaaagtcaaaaatctctttgcttcctttccaacggaagaatcttcaatcaactacacatttaaaacaccagaaaaggcaaaagagaagaaa

SEQ ID NO: 437455 - DNA, 120 bp, Artificial Sequence
  ENSG00000153201_66 (sequence is synthesized)
aaacctgaagattctccctcagatgatgatgttctcattgtatatgaactaactccaaccgctgagcagaaagcccttgcaaccaaacttaaacttcctccaactttcttctgctacaag

SEQ ID NO: 437456 - DNA, 120 bp, Artificial Sequence
  ENSG00000153201_67 (sequence is synthesized)
aatagaccagattatgttagtgaagaagaggaggatgatgaagatttcgaaacagctgtcaagaaacttaatggaaaactatatttggatggctcagaaaaatgtagacccttggaagaa

SEQ ID NO: 437457 - DNA, 120 bp, Artificial Sequence
  ENSG00000153201_68 (sequence is synthesized)
aatacagcagataatgagaaagaatgtattattgtttgggaaaagaaaccaacagttgaagagaaggcaaaagcagatacgttaaaacttccacctacatttttttgtggagtctgtagt

SEQ ID NO: 437458 - DNA, 120 bp, Artificial Sequence
  ENSG00000153201_69 (sequence is synthesized)
gatactgatgaagacaatggaaatggggaggactttcaatcagagcttcaaaaagttcaggaagctcaaaaatctcagacagaagaaataactagcacaactgacagtgtatatacaggt

SEQ ID NO: 437459 - DNA, 120 bp, Artificial Sequence
  ENSG00000153201_70 (sequence is synthesized)
gggactgaagtgatggtaccttctttctgtaaatctgaagaacctgattctattaccaaatccattagttcaccatctgtttcctctgaaactatggacaaacctgtagatttgtcaact

SEQ ID NO: 437460 - DNA, 120 bp, Artificial Sequence
  ENSG00000153201_71 (sequence is synthesized)
agaaaggaaattgatacagattctacaagccaaggggaaagcaagatagtttcatttggatttggaagtagcacagggctctcatttgcagacttggcttccagtaattctggagatttt

SEQ ID NO: 437461 - DNA, 120 bp, Artificial Sequence
  ENSG00000153201_72 (sequence is synthesized)
gcttttggttctaaagataaaaatttccaatgggcaaatactggagcagctgtgtttggaacacagtcagtcggaacccagtcagccggtaaagttggtgaagatgaagatggtagtgat

SEQ ID NO: 437462 - DNA, 120 bp, Artificial Sequence
  ENSG00000153201_73 (sequence is synthesized)
gaagaagtagttcataatgaagatatccattttgaaccaatagtgtcactaccagaggtagaagtaaaatctggagaagaagatgaagaaattttgtttaaagagagagccaaactttat

SEQ ID NO: 437463 - DNA, 120 bp, Artificial Sequence
  ENSG00000153201_74 (sequence is synthesized)
agatgggatcgggatgtcagtcagtggaaggagcgcggtgttggagatataaagattctttggcatacaatgaagaattattaccggatcctaatgagaagagaccaggtttttaaagtg

SEQ ID NO: 437464 - DNA, 120 bp, Artificial Sequence
  ENSG00000153201_75 (sequence is synthesized)
tgtgcaaaccacgttattactaaaacaatggaattaaagcccttaaatgtttcaaataatgctttagtttggactgcctcagattatgctgatggagaagcaaaagtagaacagcttgca

SEQ ID NO: 437465 - DNA, 120 bp, Artificial Sequence
  ENSG00000153201_76 (sequence is synthesized)
gtgagatttaaaactaaagaagtagctgattgtttcaagaaaacatttgaagaatgtcagcagaatttaatgaaactccagaaaggacatgtatcactggcagcagaattatcaaaggag

SEQ ID NO: 437466 - DNA, 120 bp, Artificial Sequence
  ENSG00000153201_77 (sequence is synthesized)
accaatcctgtggtgttttttgatgtttgtgcggacggtgaacctctagggcggataactatggaattattttcaaacattgttcctcggactgctgagaacttcagagcactatgcact

SEQ ID NO: 437467 - DNA, 120 bp, Artificial Sequence
  ENSG00000153201_78 (sequence is synthesized)
ggagagaaaggctttggtttcaagaattccatttttcacagagtaattccagattttgtttgccaaggaggagatatcaccaaacatgatggaacaggcggacagtccatttatggagac

SEQ ID NO: 437468 - DNA, 120 bp, Artificial Sequence
  ENSG00000153201_79 (sequence is synthesized)
aaatttgaagatgaaaattttgatgtgaaacatactggtcctggtttactatccatggccaatcaaggccagaataccaataattctcaatttgttataacactgaagaaagcagaacat

SEQ ID NO: 437469 - DNA, 120 bp, Artificial Sequence
  ENSG00000153201_80 (sequence is synthesized)
ttggactttaagcatgtagtatttgggtttgttaaggatggcatggatactgtgaaaaagattgaatcatttggttctcccaaagggtctgtttgtcgaagaataactatcacagaatgt

SEQ ID NO: 437470 - DNA, 120 bp, Artificial Sequence
  ENSG00000153201_81 (sequence is synthesized)
ggacagatataaaatcattgttgttcatagaaaatttcatctgtataagcagttggattgaagcttagctattacaatttgatagttatgttcagcttttgaaaatggacgtttccgatt

SEQ ID NO: 437471 - DNA, 120 bp, Artificial Sequence
  ENSG00000153201_82 (sequence is synthesized)
tacaaatgtaaaattgcagcttatagctgttgtcactttttaatgtgttataattgaccttgcatggtgtgaaataaaagtttaaacactggtgtatttcaggtgtacttgtgtttatgt

SEQ ID NO: 437472 - DNA, 120 bp, Artificial Sequence
  ENSG00000153201_83 (sequence is synthesized)
actcctgacgtattaaaatggaataatactaatcttgttaaaagcaatagacctcaaactattgaaggaatatgatatatgcaatttaattttaattccttttaagatatttggacttcc

SEQ ID NO: 437473 - DNA, 120 bp, Artificial Sequence
  ENSG00000153201_84 (sequence is synthesized)
tgcatggatatacttaccatttgaataaagggaccacaacttggataatttaattttaggtttgaaatatatttggtaatcttaactattggtgtactcatttatgcatagagactcgtt

SEQ ID NO: 437474 - DNA, 120 bp, Artificial Sequence
  ENSG00000153201_85 (sequence is synthesized)
tatgaatgggtagagccacagaacgtatagagttaaccaaagtgctcttctctagaatctttacacctcctgtgtggttacaagttaactttgtaagtagcgtaccttccttccttaaaa

SEQ ID NO: 437475 - DNA, 120 bp, Artificial Sequence
  ENSG00000153201_86 (sequence is synthesized)
tatctagcttcctgtgccctttcatagatattcgattaatttttacattttaaacaagttgactatttcctttaggggttttgtttcaaacttttctgtcatctgtctctactacctcag

SEQ ID NO: 437476 - DNA, 120 bp, Artificial Sequence
  ENSG00000153201_87 (sequence is synthesized)
aaactgcagcttggttctgatgatagaaattgaatttttccttgtagttattgtgataaagtatgaatatttttagaaagtctataccatgttctttcgttaaagatttgctttatacaa

SEQ ID NO: 437477 - DNA, 120 bp, Artificial Sequence
  ENSG00000153201_88 (sequence is synthesized)
gattgttgcagtacctttttctggtaaattttgtagcagaaataaaatgacaattcctaagagccactgacatccaaaaaattcattacttacgcttcgggttcattctaaagtaaggaa

SEQ ID NO: 437478 - DNA, 120 bp, Artificial Sequence
  ENSG00000153201_89 (sequence is synthesized)
gacaatttaaaggcagtaaattcaaactgctgcataatttccagagctcctagtttctcaagtttgatacacaccaaaaacgtatttggaaatggcttgtatcaaatgttaggcaaattg

SEQ ID NO: 437479 - DNA, 120 bp, Artificial Sequence
  ENSG00000153201_90 (sequence is synthesized)
ctaaagaaaagaggatgttcttattggcctactcaatatggaactacaaagaatccaggtagaacacaaaattttgtatattgcaattatgaatattgactgtcttccacccatctgtgt

SEQ ID NO: 437480 - DNA, 120 bp, Artificial Sequence
  ENSG00000153201_91 (sequence is synthesized)
tctttcgggtgaaattacctcattttatttagtgaggaaagacaggtttattccctgttacatggggatttggaaattgggtatcctaaagcaagtaactgttcaaccaccagtcaaaag

SEQ ID NO: 437481 - DNA, 120 bp, Artificial Sequence
  ENSG00000153201_92 (sequence is synthesized)
aggggagggatgttgtgcgagtaatgagtgatggtataccatcaccattccactcggccacaaagccagatacttgaaataaacctactccaaatgtatcagttcagtcttgaaccatgg

SEQ ID NO: 437482 - DNA, 120 bp, Artificial Sequence
  ENSG00000153201_93 (sequence is synthesized)
attacatatgtttacactaaatatttcaaattggcttatttggaaatctatgtaatataaactgatgtaaagtgtgttgtaacttttcagctgagacagttgatgccttcgtcatgattt

SEQ ID NO: 437483 - DNA, 120 bp, Artificial Sequence
  ENSG00000153201_94 (sequence is synthesized)
tagaataaattcttaagttaatgcaagtgctttttaagagactttttacagatttgtatgctttcctaaagcactaaagttacaaattaaaaagctttaaaaactttgaccaaaaatttg

SEQ ID NO: 437484 - DNA, 120 bp, Artificial Sequence
  ENSG00000153201_95 (sequence is synthesized)
acaaaatgacatgtaaactgacttttcccgtattagtattccaaagatgcttaaaagtggcttgtggcatttatgagaaagtctttgtgtcacatttcaggaaaggactttgatttctct

SEQ ID NO: 437485 - DNA, 120 bp, Artificial Sequence
  ENSG00000153201_96 (sequence is synthesized)
ttgttatttaatcactgatgtggtctaaacccacgataatatgtatctttccttttaaactggattttatgttgtctcattaaaatctgcttaaagatagaataaaattcattatttgta

SEQ ID NO: 437486 - DNA, 120 bp, Artificial Sequence
  ENSG00000153201_97 (sequence is synthesized)
aattacttttcaatagcaaaccttaagcccaggtgttagtgtttcctttaaaaattttcttttaaaaagtgtgttaaaacctttctgagcatctactgtcttattaggcattgttatact

SEQ ID NO: 437487 - DNA, 120 bp, Artificial Sequence
  ENSG00000153201_98 (sequence is synthesized)
ttataagtgacatctcatttacctttctggaataattaatattttagggattttacagtttagtagctgtaaactaagtagagctaagatttacattaagttccgtctggtatacaattt

SEQ ID NO: 437488 - DNA, 120 bp, Artificial Sequence
  ENSG00000153201_99 (sequence is synthesized)
ttgcttcattaagtgaaaattacctacaggatgacaatttagggatattttaaagaagtgttttctaataactattgtctgaaagtagaagggattgcattttgagatagtaaggttttc

SEQ ID NO: 437489 - DNA, 120 bp, Artificial Sequence
  ENSG00000153201_100 (sequence is synthesized)
tgcggtttgtactctgattcacagaaaagcagtgtaagtagtaaaacaaaaatattgctttcacttagtgcgtaggttttaccggggatttaatcctcatgtgaagatttaatttgtcat

SEQ ID NO: 437490 - DNA, 120 bp, Artificial Sequence
  ENSG00000153207_0 (sequence is synthesized)
tggggctcgagggggcgagcggtggcggtggcgggtacggcaggctcgcgggcgccgggcttcgttacataatctcggaccggaggagcggcggcacatggcggcggagcggcgctgtgg

SEQ ID NO: 437491 - DNA, 120 bp, Artificial Sequence
  ENSG00000153207_1 (sequence is synthesized)
aagtatgcgagacttaagagctcaagtgactagtggtctcctgccatttccagaagtgactcttcaagcccttggagaagacgaaataacattagaatctgtgcttcgtggaaagtttgc

SEQ ID NO: 437492 - DNA, 120 bp, Artificial Sequence
  ENSG00000153207_2 (sequence is synthesized)
tgcagggaaaaatggacttgcttgcttggcttgtggtccacaacttgaggtagtaaactctataacaggagagcgattgtctgcttacagattcagtggagtcaatgaacagcctcctgt

SEQ ID NO: 437493 - DNA, 120 bp, Artificial Sequence
  ENSG00000153207_3 (sequence is synthesized)
agttttagctgtgaaagaattctcttggcagaagagaactggattattaataggattggaagaaacagaagggagtgttctctgtctttatgaccttggaatatcaaaagtagttaaagc

SEQ ID NO: 437494 - DNA, 120 bp, Artificial Sequence
  ENSG00000153207_4 (sequence is synthesized)
agttgttcttcctggaagggtaacagctattgaacctataattaatcatggaggagccagtgcaagcactcagcatttacatccaagtctgcgatggctttttggagtggcagctgtggt

SEQ ID NO: 437495 - DNA, 120 bp, Artificial Sequence
  ENSG00000153207_5 (sequence is synthesized)
cactgatgttggacagatccttcttgttgacctatgtttggatgacttgtcatgcaatcaaaatgaagttgaagcatcagatcttgaagttctaactggtatcccagctgaagtaccaca

SEQ ID NO: 437496 - DNA, 120 bp, Artificial Sequence
  ENSG00000153207_6 (sequence is synthesized)
cattagagaaagtgtaatgagacaagggcgccatctgtgtttccagttagtaagtccaacaggaacagctgtttcaactcttagttacataagcaggacaaatcagcttgctgtaggttt

SEQ ID NO: 437497 - DNA, 120 bp, Artificial Sequence
  ENSG00000153207_7 (sequence is synthesized)
ttctgatggctatctagcactttggaacatgaaaagcatgaaaagagaatattacatacaattggaaagtggacaagttcctgtatatgctgtcacttttcaagaacctgagaatgatcc

SEQ ID NO: 437498 - DNA, 120 bp, Artificial Sequence
  ENSG00000153207_8 (sequence is synthesized)
tcggaattgctgttacttgtgggctgttcagtctacacaagatagtgaaggggatgttttgagtttgcatctgctgcagctggcctttggtaatagaaagtgtttggcatcaggacaaat

SEQ ID NO: 437499 - DNA, 120 bp, Artificial Sequence
  ENSG00000153207_9 (sequence is synthesized)
cttatatgaggggttagaatactgtgaagaaagatacaccctggacctgacaggtggcatgttccctttgaggggacagacgagtaataccaaattgttgggatgccagagtatagagaa

SEQ ID NO: 437500 - DNA, 120 bp, Artificial Sequence
  ENSG00000153207_10 (sequence is synthesized)
atttcgatctcatggtgacagggaggaaggcgtgaatgaagctctatcgcctgacactagtgtttcagtctttacctggcaggtgaatatatatggacagggaaagccttctgtatattt

SEQ ID NO: 437501 - DNA, 120 bp, Artificial Sequence
  ENSG00000153207_11 (sequence is synthesized)
ggggctttttgatataaatcgttggtatcatgcacaaatgccagattcgttaaggtcaggagaatatctacataattgctcttattttgcactgtggtcattggagtctgttgtaagtag

SEQ ID NO: 437502 - DNA, 120 bp, Artificial Sequence
  ENSG00000153207_12 (sequence is synthesized)
gacttctccacatggcatcttggatatattagtacatgagagaagtttaaatagaggagtccctccttcatatccacctcccgagcagttttttaatccaagcacttataattttgatgc

SEQ ID NO: 437503 - DNA, 120 bp, Artificial Sequence
  ENSG00000153207_13 (sequence is synthesized)
cacttgtttgttaaactcgggagttgttcatttaacttgtactggctttcagaaggagactttgacttttttaaagaaatcaggtccatcactcaatgaactcattcctgatggttataa

SEQ ID NO: 437504 - DNA, 120 bp, Artificial Sequence
  ENSG00000153207_14 (sequence is synthesized)
tcgatgtcttgtagctggccttctttccccaagatttgttgatgttcagccttccagtttaagccaagaagaacagttagaagctatattgtcagcagcaattcagactagttccctggg

SEQ ID NO: 437505 - DNA, 120 bp, Artificial Sequence
  ENSG00000153207_15 (sequence is synthesized)
acttttgactggttatatccgaagatggataacagaagaacaaccaaattctgccactaatttgcgctttgttcttgaatggacgtggaataaagtggttctcacaaaagaggaatttga

SEQ ID NO: 437506 - DNA, 120 bp, Artificial Sequence
  ENSG00000153207_16 (sequence is synthesized)
cagactatgtgtgccattatttgatggttcgtgtcatttcatggatccacaaactatacagtctatccagcaatgctatttgcttcttagcaatcttaatatagtcttgagctgttttgc

SEQ ID NO: 437507 - DNA, 120 bp, Artificial Sequence
  ENSG00000153207_17 (sequence is synthesized)
atcagaagcccgagagatcactgagagaggactgatagacttaagcaataagtttgtggtttcccacctcatctgtcagtatgcacaagtggttctttggttctctcattctgggctttt

SEQ ID NO: 437508 - DNA, 120 bp, Artificial Sequence
  ENSG00000153207_18 (sequence is synthesized)
accagaaggcatagatgattctgtgcagttgtcaaggttatgctacaactaccctgtaattcagaactactacaccagtcgtcgacagaagtttgagcgtttatcaagagggaagtggaa

SEQ ID NO: 437509 - DNA, 120 bp, Artificial Sequence
  ENSG00000153207_19 (sequence is synthesized)
tcccgattgcttgatgattgatggactggtttctcagttaggagagcgaattgagaagttgtggaaacgagatgaaggaggcacaggaaaatatcctcctgctagtctgcatgcagtact

SEQ ID NO: 437510 - DNA, 120 bp, Artificial Sequence
  ENSG00000153207_20 (sequence is synthesized)
tgatatgtacctattagacggcgttactgaagcagccaaacactctattaccatttatttgctacttgatattatgtattcctttcccaacaaaacagacactcccattgaatctttccc

SEQ ID NO: 437511 - DNA, 120 bp, Artificial Sequence
  ENSG00000153207_21 (sequence is synthesized)
aactgtatttgccatttcttggggccaagttaaacttattcaggggttttggttgatagatcataatgactatgagagtggtttggatcttttgtttcatccagctactgcaaaaccttt

SEQ ID NO: 437512 - DNA, 120 bp, Artificial Sequence
  ENSG00000153207_22 (sequence is synthesized)
gtcatggcaacattcaaagattattcaggcattcatgagtcagggcgagcacagacaagccctcagatatattcagacaatgaagccaacagtgtccagtggtaacgatgttatccttca

SEQ ID NO: 437513 - DNA, 120 bp, Artificial Sequence
  ENSG00000153207_23 (sequence is synthesized)
cctcactgttttgctttttaataggtgtatggttgaagcctggaattttttgcggcaacattgcaataggttgaatatagaggagttactgaagcacatgtatgaagtctgtcaggaaat

SEQ ID NO: 437514 - DNA, 120 bp, Artificial Sequence
  ENSG00000153207_24 (sequence is synthesized)
gggcttgatggaagatttactgaagttaccatttacagacactgagcaggaatgtttagtgaaatttttgcagtccagtgccagcgttcagaatcatgaattccttttagtgcaccattt

SEQ ID NO: 437515 - DNA, 120 bp, Artificial Sequence
  ENSG00000153207_25 (sequence is synthesized)
gcagcgtgccaattatgtgcctgccttgaagctgaaccaaactctgaagattaatgttatgaatgatcgtgatcctcgtttgcgggagagatcactggctcgaaattctatattagacca

SEQ ID NO: 437516 - DNA, 120 bp, Artificial Sequence
  ENSG00000153207_26 (sequence is synthesized)
gtatggaaaaatccttcctagagtccatcgaaaattagccattgaacgagctaagccttatcatctgtcaacatcatcagtttttcgattagtttctagacccaaaccattatcagcagt

SEQ ID NO: 437517 - DNA, 120 bp, Artificial Sequence
  ENSG00000153207_27 (sequence is synthesized)
tccaaagcaagttgtaacaggaactgtgttgacaagatctgttttcatcaacaatgtgttatctaaaattggagaagtttgggcaagcaaagaacctataaatagcaccacacctttcaa

SEQ ID NO: 437518 - DNA, 120 bp, Artificial Sequence
  ENSG00000153207_28 (sequence is synthesized)
tagttctaaaatagaagaaccatctcctatagtgtattcgctcccagctccagagctgcctgaggcattttttggaacaccaatttcaaaagcatcacaaaaaatttctagactgctaga

SEQ ID NO: 437519 - DNA, 120 bp, Artificial Sequence
  ENSG00000153207_29 (sequence is synthesized)
tttggttgttcagcctgtcccccggccttctcagtgttcggagtttattcagcaaagctccatgaaatctcctttgtacctagtatcccgttcactgccctcaagttcgcaattaaaagg

SEQ ID NO: 437520 - DNA, 120 bp, Artificial Sequence
  ENSG00000153207_30 (sequence is synthesized)
atcgcctcaggccatctccagggcttcagaattacatttgcttgaaactcctcttgtagttaagaaagctaaaagtttggccatgtcagttactacttctggattttctgagttcactcc

SEQ ID NO: 437521 - DNA, 120 bp, Artificial Sequence
  ENSG00000153207_31 (sequence is synthesized)
tcagtccatcctgaggtctactcttcgatcaacacctttagcatctccctctccatcacctggaaggtctcctcaacgacttaaagaaactagaatttcatttgtggaagaagatgtcca

SEQ ID NO: 437522 - DNA, 120 bp, Artificial Sequence
  ENSG00000153207_32 (sequence is synthesized)
cccaaaatggattcctggggctgcagatgatagcaaattagaagtatttactacacctaaaaaatgtgcagttccagtggaaactgaatggctgaagagcaaagataggaccacatcttt

SEQ ID NO: 437523 - DNA, 120 bp, Artificial Sequence
  ENSG00000153207_33 (sequence is synthesized)
tttcctgaacagccctgaaaaggagcatcaagaaatggatgaggggtcacaaagtttagagaaactggatgtgagcaaaggaaacagcagtgtttcaatcacatccgatgagactacctt

SEQ ID NO: 437524 - DNA, 120 bp, Artificial Sequence
  ENSG00000153207_34 (sequence is synthesized)
agagtatcaggatgcaccgtcaccggaagaccttgaagagactgttttcacggcctctaagcccaaaagctcttccactgcactaactactaatgtaactgaacaaactgaaaaggatgg

SEQ ID NO: 437525 - DNA, 120 bp, Artificial Sequence
  ENSG00000153207_35 (sequence is synthesized)
aattgaatcacttaagcccggttcaaggaactgaagcttctctttgtgcaccatcagtctatgaagggaaaatcttcacccagaagtccaaggtaccagtgttggacgaaggattaacat

SEQ ID NO: 437526 - DNA, 120 bp, Artificial Sequence
  ENSG00000153207_36 (sequence is synthesized)
ctgttgaaacctacacccctgcaattagagcaaatgacaataaatctatggctgatgtccttggtgatggtggaaactcctcgctcactatctctgaaggtcctattgtctctgagcgca

SEQ ID NO: 437527 - DNA, 120 bp, Artificial Sequence
  ENSG00000153207_37 (sequence is synthesized)
ggcttaaccaggaagtagcgctgaacttaaaagaagatcatgaagtagaagttggtgtactaaaagaaagtgttgacttaccagaagaaaagcttccaatttctgacagccctcctgata

SEQ ID NO: 437528 - DNA, 120 bp, Artificial Sequence
  ENSG00000153207_38 (sequence is synthesized)
ctcaagaaattcatgtgattgaacaagaaaagcttgaagctcaagattcaggagaagaggctaggaatctttcatttaatgagttatatccctctggaacacttaagcttcagtacaatt

SEQ ID NO: 437529 - DNA, 120 bp, Artificial Sequence
  ENSG00000153207_39 (sequence is synthesized)
ttgatactattgaccaacagttttgtgacttagctgataacaaagacactgctgaatgtgacattgctgaagtagatggggaactttttgtggctcaaagcaactttaccttgatattgg

SEQ ID NO: 437530 - DNA, 120 bp, Artificial Sequence
  ENSG00000153207_40 (sequence is synthesized)
aaggtgaagaaggagaagttgagccaggtgattttgcatcatctgatgtgttacctaaagcagctaacacagcaactgaagaaaaacttgtatgcagtggggaaaatgataatcatggac

SEQ ID NO: 437531 - DNA, 120 bp, Artificial Sequence
  ENSG00000153207_41 (sequence is synthesized)
aaattgcaaatttgccatctgccgtaactagtgaccaaaagtcccaaaaagtagacactttaccatatgtgcctgaacctattaaagtagcaattgcagaaaatttactagatgtaatta

SEQ ID NO: 437532 - DNA, 120 bp, Artificial Sequence
  ENSG00000153207_42 (sequence is synthesized)
aagacacaagaagtaaagaaattacttcagatacaatggaacagtccattcatgaaacaatacctttagtgagccaaaacataatgtgtcccactaaattggtcaaatctgcatttaaga

SEQ ID NO: 437533 - DNA, 120 bp, Artificial Sequence
  ENSG00000153207_43 (sequence is synthesized)
ctgctcaggaaacaagcacaatgactatgaatgtcagccaggttgatgacgtggtttcctccaaaactcgtacgagaggtcaacgtatccaaaacgtgaatgtcaaatcagcacaacagg

SEQ ID NO: 437534 - DNA, 120 bp, Artificial Sequence
  ENSG00000153207_44 (sequence is synthesized)
aagcatcagcagatgttgctactcctaagatgccagggcagtcagtcaggaagaaaactaggaaggcaaaagaaatttctgaagcttctgaaaacatctattctgatgtcagaggactat

SEQ ID NO: 437535 - DNA, 120 bp, Artificial Sequence
  ENSG00000153207_45 (sequence is synthesized)
ctcagaaccagcaaatacctcaaaattctgttacgcctaggagaggaaggagaaagaaagaagttaatcaggacatactagaaaacaccagttctgtggaacaagaattacagatcacta

SEQ ID NO: 437536 - DNA, 120 bp, Artificial Sequence
  ENSG00000153207_46 (sequence is synthesized)
caggtagggaatcaaaaagattaaaatcatctcagctgttggaaccagcagttgaagaaactactaaaaaagaagttaaggtttcatctgttacaaaaaggactcctagaagaattaaaa

SEQ ID NO: 437537 - DNA, 120 bp, Artificial Sequence
  ENSG00000153207_47 (sequence is synthesized)
gatctgtagaaaatcaggaaagtgttgaaattataaatgatctaaaagttagtacggtaacaagtcctagcagaatgatcagaaaattgagaagtactaatttagatgcttctgaaaata

SEQ ID NO: 437538 - DNA, 120 bp, Artificial Sequence
  ENSG00000153207_48 (sequence is synthesized)
caggaaataagcaagatgataaatccagtgacaagcagctgcgtattaaacatgttagaagggtcagagggagagaagttagtccatcagatgtgagagaagactccaaccttgagtcat

SEQ ID NO: 437539 - DNA, 120 bp, Artificial Sequence
  ENSG00000153207_49 (sequence is synthesized)
ctcagttgactgttcaagcagaatttgatatgtctgccatacctagaaaacgtggtagaccaagaaaaatcaatccatctgaagatgtaggatctaaggctgttaaggaagagagaagcc

SEQ ID NO: 437540 - DNA, 120 bp, Artificial Sequence
  ENSG00000153207_50 (sequence is synthesized)
ccaagaagaaagaagctcccagcattagaaggagatctacaagaaataccccagctaaaagtgaaaatgttgatgttggaaaaccagctttaggaaaatccattttagtgccaaacgagg

SEQ ID NO: 437541 - DNA, 120 bp, Artificial Sequence
  ENSG00000153207_51 (sequence is synthesized)
aactttcgatggtgatgagctctaagaaaaaacttacaaaaaagactgaaagtcaaagccaaaaacgttcattgcactcagtatcagaagaacgcacagatgaaatgacacataaagaaa

SEQ ID NO: 437542 - DNA, 120 bp, Artificial Sequence
  ENSG00000153207_52 (sequence is synthesized)
caaatgagcaggaagaaagattgctcgccacagcttccttcactaaatcatcccgcagcagcaggactcggtctagcaaggccatcttgttgccggacctttctgaaccaaacaatgagc

SEQ ID NO: 437543 - DNA, 120 bp, Artificial Sequence
  ENSG00000153207_53 (sequence is synthesized)
ctttattttctccagcgtcagaagttccaaggaaagcaaaagctaaaaaaatagaggttcctgcacagctgaaagaattagtttcggatttatcttctcagtttgtcatctcacctcctg

SEQ ID NO: 437544 - DNA, 120 bp, Artificial Sequence
  ENSG00000153207_54 (sequence is synthesized)
ctttaaggagcagacaaaaaaacacatccaataagaacaagcttgaagatgaactgaaagatgatgcacaatcagtagaaactctgggaaagccaaaagcgaaacgaatcaggacgtcaa

SEQ ID NO: 437545 - DNA, 120 bp, Artificial Sequence
  ENSG00000153207_55 (sequence is synthesized)
aaacaaaacaagcaagcaaaaacacagaaaaagaaagtgcttggtcacctcctcccatagaaattcggctgatttcccccttggctagcccagctgacggagtcaagagcaaaccaagaa

SEQ ID NO: 437546 - DNA, 120 bp, Artificial Sequence
  ENSG00000153207_56 (sequence is synthesized)
aaactacagaagtgacaggaacaggtcttggaaggaacagaaagaaactgtcttcctatccaaagcaaattttacgcagaaaaatgctgtaatttcttgggaagattttaatgtacacct

SEQ ID NO: 437547 - DNA, 120 bp, Artificial Sequence
  ENSG00000153207_57 (sequence is synthesized)
agtcatcagaatagtgtggattattaaatatctagtttggaagaaaataatttatataaattattgtaaatttttatgtaaacagaaggtcttcaataagtaaagtaactccatatggag

SEQ ID NO: 437548 - DNA, 120 bp, Artificial Sequence
  ENSG00000153207_58 (sequence is synthesized)
atatggagtgattgtttcagtccaggcaatttttctattttatattaagacttcatacatttatatatgtaaatatggcttattaatggaatgttaaataaaatgtatacttcacagtcg

SEQ ID NO: 437549 - DNA, 120 bp, Artificial Sequence
  ENSG00000153207_59 (sequence is synthesized)
tttgtgtcttggatttttgaaagggaggggatatctgtttaaatagttttatatgctcattggtctcattttctctataattaaaatactagaccagtcttaaaatggggatgattgaag

SEQ ID NO: 437550 - DNA, 120 bp, Artificial Sequence
  ENSG00000153207_60 (sequence is synthesized)
tattgatatttctttttacagttactattttataatttatgcactttgattctgtgattcagatttctaatcagaaaatgtatttttttgtttttggctgttactatgttaaaattgaat

SEQ ID NO: 437551 - DNA, 120 bp, Artificial Sequence
  ENSG00000153207_61 (sequence is synthesized)
tatgggcatgtcattttgccatctttgtagtttcacaaattttgtgtaatctacctcaaatgaataatccaagtattggttaactataatgttggcatctcttattcggcaagcttaaag

SEQ ID NO: 437552 - DNA, 120 bp, Artificial Sequence
  ENSG00000153207_62 (sequence is synthesized)
gctctttaaagtcttaattagtcaaagactaatccaggttagattgaccggttcactgctcacttgcaaccttatcaaagggtttgacaaagggaaatgtaaaataaatctgtttatgga

SEQ ID NO: 437553 - DNA, 120 bp, Artificial Sequence
  ENSG00000153207_63 (sequence is synthesized)
tattgagtgcatcttgtatgtgcctaatattgataggatgagatgtctgaacaaatttttataatattgctgtgaaggagcttgctattgaaccacagaaatcccttaatattcaggttt

SEQ ID NO: 437554 - DNA, 120 bp, Artificial Sequence
  ENSG00000153207_64 (sequence is synthesized)
taaaactggcaaattctcacaggacctcaggcacagattattgaggttgggagagagtgagtagatgtagaaaaggagaaaaacaacacacgccctgttctctacagtacaactgtgtgc

SEQ ID NO: 437555 - DNA, 120 bp, Artificial Sequence
  ENSG00000153207_65 (sequence is synthesized)
aattaagcaatggtacttgatgtaggctctaacactcatcaataaataagtgttgtaaaataatttataacaggtaatcgatagtgtgtaatgaatggactattaataattgattatcta

SEQ ID NO: 437556 - DNA, 120 bp, Artificial Sequence
  ENSG00000153207_66 (sequence is synthesized)
gaaacgaactgctttcgtgggcttttaatattttaatgtgaagcatatgcagtgtgctttctgcatttatttttctaccaaataatacagataatgagaaattggtgaaaatgcctacgc

SEQ ID NO: 437557 - DNA, 120 bp, Artificial Sequence
  ENSG00000153207_67 (sequence is synthesized)
aaagtgttgacagtgtgaaagcagtgcgagtgcggccttttagtcaggttagtgatggatgttacgctgccttgttgaaaatttcactgactttgattttattacttttttaatgatagt

SEQ ID NO: 437558 - DNA, 120 bp, Artificial Sequence
  ENSG00000153207_68 (sequence is synthesized)
tatcaaacttgtatttaagctgcttgtcatttatggaatattgaacttatttaaatgaacttgttaaatgaataaagagctaaacataattcagtaaacaattcctttgcgcaagtagca

SEQ ID NO: 437559 - DNA, 120 bp, Artificial Sequence
  ENSG00000153207_69 (sequence is synthesized)
caataaacatggatgcaacgtatgtcaagttaatacttttttaaaccaacgcaatttggtgaatatagatgtgtggtacctgtttttaataagtgtactttttttcccccctccgtgaat

SEQ ID NO: 437560 - DNA, 120 bp, Artificial Sequence
  ENSG00000153207_70 (sequence is synthesized)
gtagatcataagcaaacaaattgcctgttctaaatgaactttacatatattttaaatgaatgtatgtacttacgtataaatgtctttatatagcttgaataaaaacactgctcattaaaa

SEQ ID NO: 437561 - DNA, 120 bp, Artificial Sequence
  ENSG00000153207_71 (sequence is synthesized)
tcgttacataatctcggaccggaggagcggcggcacatggcggcggagcggcgctggtggttcgcgtcctgcgccggcagtcgggtccctttacggacggccggggccgcgaccctttcc

SEQ ID NO: 437562 - DNA, 120 bp, Artificial Sequence
  ENSG00000153207_72 (sequence is synthesized)
tccggggcgtgtggaactcggttttgtcggcgcagggtaatgcgcagagcggggccggcgctgtccgaggcgagcaggcagcgttgcaaggggaaggacccagaagcgcggcgggagcag

SEQ ID NO: 437563 - DNA, 120 bp, Artificial Sequence
  ENSG00000153207_73 (sequence is synthesized)
cgactgcgttttagccgctgagcggtctgcaggcctacagcccgcgaaggcactctcgggggcgtgtggctctgaggtggccggggaggtcgcaggcggcggccggagcgcagaggagcg

SEQ ID NO: 437564 - DNA, 120 bp, Artificial Sequence
  ENSG00000153207_74 (sequence is synthesized)
gcttcagccgggcggaggggtgtgagcccggcccgtggcggccacgtctcccgggagatgctgtgacggacccgcacgggaggagctcgcgcctggcctggcgacccggtggactcggcc

SEQ ID NO: 437565 - DNA, 120 bp, Artificial Sequence
  ENSG00000153207_75 (sequence is synthesized)
ttgcgatgaataattttctgactttttgaatgcatggtagcactttggattacattaatatacttgactgtatttgcatgtggctatcatagttaccagtgaatatagaggtctgattaa

SEQ ID NO: 437566 - DNA, 120 bp, Artificial Sequence
  ENSG00000153208_0 (sequence is synthesized)
actcggcactcactgcccgggccgcccggacagggagcttcgctggcgcgcttggccggcgacaggacaggttcgggacgtccatctgtccatccgtccggagagaaattacagatccgc

SEQ ID NO: 437567 - DNA, 120 bp, Artificial Sequence
  ENSG00000153208_1 (sequence is synthesized)
agccccgggatggggccggccccgctgccgctgctgctgggcctcttcctccccgcgctctggcgtagagctatcactgaggcaagggaagaagccaagccttacccgctattcccggga

SEQ ID NO: 437568 - DNA, 120 bp, Artificial Sequence
  ENSG00000153208_2 (sequence is synthesized)
ccttttccagggagcctgcaaactgaccacacaccgctgttatcccttcctcacgccagtgggtaccagcctgccttgatgttttcaccaacccagcctggaagaccacatacaggaaac

SEQ ID NO: 437569 - DNA, 120 bp, Artificial Sequence
  ENSG00000153208_3 (sequence is synthesized)
gtagccattccccaggtgacctctgtcgaatcaaagcccctaccgcctcttgccttcaaacacacagttggacacataatactttctgaacataaaggtgtcaaatttaattgctcaatc

SEQ ID NO: 437570 - DNA, 120 bp, Artificial Sequence
  ENSG00000153208_4 (sequence is synthesized)
agtgtacctaatatataccaggacaccacaatttcttggtggaaagatgggaaggaattgcttggggcacatcatgcaattacacagttttatccagatgatgaagttacagcaataatc

SEQ ID NO: 437571 - DNA, 120 bp, Artificial Sequence
  ENSG00000153208_5 (sequence is synthesized)
gcttccttcagcataaccagtgtgcagcgttcagacaatgggtcgtatatctgtaagatgaaaataaacaatgaagagatcgtgtctgatcccatctacatcgaagtacaaggacttcct

SEQ ID NO: 437572 - DNA, 120 bp, Artificial Sequence
  ENSG00000153208_6 (sequence is synthesized)
cactttactaagcagcctgagagcatgaatgtcaccagaaacacagccttcaacctcacctgtcaggctgtgggcccgcctgagcccgtcaacattttctgggttcaaaacagtagccgt

SEQ ID NO: 437573 - DNA, 120 bp, Artificial Sequence
  ENSG00000153208_7 (sequence is synthesized)
gttaacgaacagcctgaaaaatccccctccgtgctaactgttccaggcctgacggagatggcggtcttcagttgtgaggcccacaatgacaaagggctgaccgtgtccaagggagtgcag

SEQ ID NO: 437574 - DNA, 120 bp, Artificial Sequence
  ENSG00000153208_8 (sequence is synthesized)
atcaacatcaaagcaattccctccccaccaactgaagtcagcatccgtaacagcactgcacacagcattctgatctcctgggttcctggttttgatggatactccccgttcaggaattgc

SEQ ID NO: 437575 - DNA, 120 bp, Artificial Sequence
  ENSG00000153208_9 (sequence is synthesized)
agcattcaggtcaaggaagctgatccgctgagtaatggctcagtcatgatttttaacacctctgccttaccacatctgtaccaaatcaagcagctgcaagccctggctaattacagcatt

SEQ ID NO: 437576 - DNA, 120 bp, Artificial Sequence
  ENSG00000153208_10 (sequence is synthesized)
ggtgtttcctgcatgaatgaaataggctggtctgcagtgagcccttggattctagccagcacgactgaaggagccccatcagtagcacctttaaatgtcactgtgtttctgaatgaatct

SEQ ID NO: 437577 - DNA, 120 bp, Artificial Sequence
  ENSG00000153208_11 (sequence is synthesized)
agtgataatgtggacatcagatggatgaagcctccgactaagcagcaggatggagaactggtgggctaccggatatcccacgtgtggcagagtgcagggatttccaaagagctcttggag

SEQ ID NO: 437578 - DNA, 120 bp, Artificial Sequence
  ENSG00000153208_12 (sequence is synthesized)
gaagttggccagaatggcagccgagctcggatctctgttcaagtccacaatgctacgtgcacagtgaggattgcagccgtcaccagagggggagttgggcccttcagtgatccagtgaaa

SEQ ID NO: 437579 - DNA, 120 bp, Artificial Sequence
  ENSG00000153208_13 (sequence is synthesized)
atatttatccctgcacacggttgggtagattatgccccctcttcaactccggcgcctggcaacgcagatcctgtgctcatcatctttggctgcttttgtggatttattttgattgggttg

SEQ ID NO: 437580 - DNA, 120 bp, Artificial Sequence
  ENSG00000153208_14 (sequence is synthesized)
attttatacatctccttggccatcagaaaaagagtccaggagacaaagtttgggaatgcattcacagaggaggattctgaattagtggtgaattatatagcaaagaaatccttctgtcgg

SEQ ID NO: 437581 - DNA, 120 bp, Artificial Sequence
  ENSG00000153208_15 (sequence is synthesized)
tgggtgaaggagagtttgggtctgtaatggaaggaaatcttaagcaggaagatgggacctctctgaaagtggcagtgaagaccatgaagttggacaactcttcacagcgggagatcgagg

SEQ ID NO: 437582 - DNA, 120 bp, Artificial Sequence
  ENSG00000153208_16 (sequence is synthesized)
agtttctcagtgaggcagcgtgcatgaaagacttcagccacccaaatgtcattcgacttctaggtgtgtgtatagaaatgagctctcaaggcatcccaaagcccatggtaattttaccct

SEQ ID NO: 437583 - DNA, 120 bp, Artificial Sequence
  ENSG00000153208_17 (sequence is synthesized)
tcatgaaatacggggacctgcatacttacttactttattcccgattggagacaggaccaaagcatattcctctgcagacactattgaagttcatggtggatattgccctgggaatggagt

SEQ ID NO: 437584 - DNA, 120 bp, Artificial Sequence
  ENSG00000153208_18 (sequence is synthesized)
atctgagcaacaggaattttcttcatcgagatttagctgctcgaaactgcatgttgcgagatgacatgactgtctgtgttgcggacttcggcctctctaagaagatttacagtggcgatt

SEQ ID NO: 437585 - DNA, 120 bp, Artificial Sequence
  ENSG00000153208_19 (sequence is synthesized)
attaccgccaaggccgcattgctaagatgcctgttaaatggatcgccatagaaagtcttgcagaccgagtctacacaagtaaaagtgatgtgtgggcatttggcgtgaccatgtgggaaa

SEQ ID NO: 437586 - DNA, 120 bp, Artificial Sequence
  ENSG00000153208_20 (sequence is synthesized)
tagctacgcggggaatgactccctatcctggggtccagaaccatgagatgtatgactatcttctccatggccacaggttgaagcagcccgaagactgcctggatgaactgtatgaaataa

SEQ ID NO: 437587 - DNA, 120 bp, Artificial Sequence
  ENSG00000153208_21 (sequence is synthesized)
tgtactcttgctggagaaccgatcccttagaccgccccaccttttcagtattgaggctgcagctagaaaaactcttagaaagtttgcctgacgttcggaaccaagcagacgttatttacg

SEQ ID NO: 437588 - DNA, 120 bp, Artificial Sequence
  ENSG00000153208_22 (sequence is synthesized)
tcaatacacagttgctggagagctctgagggcctggcccagggctccacccttgctccactggacttgaacatcgaccctgactctataattgcctcctgcactccccgcgctgccatca

SEQ ID NO: 437589 - DNA, 120 bp, Artificial Sequence
  ENSG00000153208_23 (sequence is synthesized)
gtgtggtcacagcagaagttcatgacagcaaacctcatgaaggacggtacatcctgaatgggggcagtgaggaatgggaagatctgacttctgccccctctgctgcagtcacagctgaaa

SEQ ID NO: 437590 - DNA, 120 bp, Artificial Sequence
  ENSG00000153208_24 (sequence is synthesized)
agaacagtgttttaccgggggagagacttgttaggaatggggtctcctggtcccattcgagcatgctgcccttgggaagctcattgcccgatgaacttttgtttgctgacgactcctcag

SEQ ID NO: 437591 - DNA, 120 bp, Artificial Sequence
  ENSG00000153208_25 (sequence is synthesized)
aaggctcagaagtcctgatgtgaggagaggtgcggggagacattccaaaaatcaagccaattcttctgctgtaggagaatccaattgtacctgatgtttttggtatttgtcttccttacc

SEQ ID NO: 437592 - DNA, 120 bp, Artificial Sequence
  ENSG00000153208_26 (sequence is synthesized)
aagtgaactccatggccccaaagcaccagatgaatgttgttaagtaagctgtcattaaaaatacataatatatatttatttaaagagaaaaaatatgtgtatatcatggaaaaagacaag

SEQ ID NO: 437593 - DNA, 120 bp, Artificial Sequence
  ENSG00000153208_27 (sequence is synthesized)
gatattttaataaaacattacttatttcatttcacttatcttgcatatcttaaaattaagcttcagctgctccttgatattaacatttgtacagagttgaagttgttttttcaagttctt

SEQ ID NO: 437594 - DNA, 120 bp, Artificial Sequence
  ENSG00000153208_28 (sequence is synthesized)
ttctttttcatgactattaaatgtaaaaatatttgtaaaatgaaatgccatatttgacttggcttctggtcttgatgtatttgataagaatgattcattcaatgtttaaagttgtataac

SEQ ID NO: 437595 - DNA, 120 bp, Artificial Sequence
  ENSG00000153208_29 (sequence is synthesized)
tgattaattttctgatatggcttcctaataaaatatgaataaggaaggatatgttgaacttacttgagacttgaaagacagtggtcggcagcggccttgtggcctttgcaaaggaattcc

SEQ ID NO: 437596 - DNA, 120 bp, Artificial Sequence
  ENSG00000153208_30 (sequence is synthesized)
cttaatgcctggtccttggggcaattgctctgaccattcttggcattgctttatagagatatggaaaaaccacaccagggtctgtagataaggaataaagaatattgaaggattgaaaaa

SEQ ID NO: 437597 - DNA, 120 bp, Artificial Sequence
  ENSG00000153208_31 (sequence is synthesized)
caaacccacatgacattttacaaaataaagaaatgcaaagtttctaacattttaaactacagtagaagtaaatttgttcttccctgttacaagttgggtagattatgccccctcttcaac

SEQ ID NO: 437598 - DNA, 120 bp, Artificial Sequence
  ENSG00000153208_32 (sequence is synthesized)
ttatgcatgattgatgctgtgtttgtaatttcaggtattattatcctgctttatgaaaatcaccgagactcttccaaagagcataggccagcctgtatttttttacatcatattcctctg

SEQ ID NO: 437599 - DNA, 120 bp, Artificial Sequence
  ENSG00000153208_33 (sequence is synthesized)
aggttgaagcagcccgaagccaggtgggcatgtgcagaggggaggtcgaggttgcagatgaaattgcccatttgtgggagtagggccaccaaaaaagtctcaataatttttataaaaagt

SEQ ID NO: 437600 - DNA, 120 bp, Artificial Sequence
  ENSG00000153208_34 (sequence is synthesized)
aattcttttaaaatgtgggataagaaggtagcagtttagaataattctttaacatatatttattaaataaaatagcatctcaggactctgagttatactatggatagttatattttatta

SEQ ID NO: 437601 - DNA, 120 bp, Artificial Sequence
  ENSG00000153208_35 (sequence is synthesized)
tttaaaatgatagactattgatttttgaaactcagatctggcacatgaaaagattctcttcaatgcctagcacatacaggtccttgaaaaatattaattttctttcttcattgaaaagca

SEQ ID NO: 437602 - DNA, 120 bp, Artificial Sequence
  ENSG00000153208_36 (sequence is synthesized)
catattcctctgcagacactattgaagttcatggtggatattgccctgggaatggagtatctgagcaacaggaattttcttcatcgagatttagctgctcgaaactgcatcacccacctg

SEQ ID NO: 437603 - DNA, 120 bp, Artificial Sequence
  ENSG00000153214_0 (sequence is synthesized)
atcttcacgcccacgctaggccctgagcccagcctccacgtctcgccgccaactccacatcctggctcctatctctgccttccaggcatctcccagctgcacgctcgggcccggctcaga

SEQ ID NO: 437604 - DNA, 120 bp, Artificial Sequence
  ENSG00000153214_1 (sequence is synthesized)
gccctaagccctgcctcccggtcctggccgggtttcccagaactgcacggcgcctctccgcccaggcccaagcgcgagcccctcctccacacccgagtccgagccccgcgtcccggattc

SEQ ID NO: 437605 - DNA, 120 bp, Artificial Sequence
  ENSG00000153214_2 (sequence is synthesized)
ggacccgcctgcctggggcggtgctgcaccaggtgcgggtgtggcaggcgtctcggagcgccaggtgcagcttcctggtcaagatggtcgccgcctgccgctcggtagccgggctcctgc

SEQ ID NO: 437606 - DNA, 120 bp, Artificial Sequence
  ENSG00000153214_3 (sequence is synthesized)
cacgccgccgccgctgctttcccgcccgggccccgctgctgcgcgtcgccctctgcctcctgtgctggaccccggcggctgtgcgcgcggtccctgagctcgggctctggttagagacag

SEQ ID NO: 437607 - DNA, 120 bp, Artificial Sequence
  ENSG00000153214_4 (sequence is synthesized)
tcaacgacaaatcaggacctttgatatttaggaaaactatgtttaactctacagatatcaagttatctgttaagtcattccattgttctgggcctgtgaagtttaccatagtgtggcatt

SEQ ID NO: 437608 - DNA, 120 bp, Artificial Sequence
  ENSG00000153214_5 (sequence is synthesized)
tgaagtatcatacctgtcacaatgagcattctaatctggaagagctgttccaaaaacataaacttagtgttgatgaagacttttgtcattatttgaagaatgacaactgttggacaacaa

SEQ ID NO: 437609 - DNA, 120 bp, Artificial Sequence
  ENSG00000153214_6 (sequence is synthesized)
aaaatgaaaacttagattgcaacagtgattcacaggtgtttccctctttgaataataaagaactaataaatatcagaaatgtttcaaaccaggaaagatcaatggatgttgtagccagaa

SEQ ID NO: 437610 - DNA, 120 bp, Artificial Sequence
  ENSG00000153214_7 (sequence is synthesized)
cacaaaaagatgggtttcatatctttattgtttctattaaaacggagaatacagatgcaagctggaatttgaatgtttctctttctatgattgggcctcatggatatatctctgcatcag

SEQ ID NO: 437611 - DNA, 120 bp, Artificial Sequence
  ENSG00000153214_8 (sequence is synthesized)
attggcccctaatgattttttacatggtgatgtgtattgtttatatattatatggcatactctggctgacgtggtctgcctgttattggaaagatatattaagaatccagttctggattg

SEQ ID NO: 437612 - DNA, 120 bp, Artificial Sequence
  ENSG00000153214_9 (sequence is synthesized)
cagctgttatttttttgggaatgcttgaaaaagcagttttttatagtgaataccaaaacatcagcaacactggactgtcaacccaaggcttattgatatttgcggagttgatttctgcga

SEQ ID NO: 437613 - DNA, 120 bp, Artificial Sequence
  ENSG00000153214_10 (sequence is synthesized)
ttaagaggacgttggctcgccttctcgtgatcattgtgagcctgggctatggcattgtgaagcctcgtttaggaacagtcatgcaccgggtgatcggactggggcttctatacttaatct

SEQ ID NO: 437614 - DNA, 120 bp, Artificial Sequence
  ENSG00000153214_11 (sequence is synthesized)
ttgcagctgttgaaggcgtgatgagagtcattgggggttctaaccatttagctgttgttcttgatgacattattttagcagttattgactccatttttgtgtggttcatttttattagtt

SEQ ID NO: 437615 - DNA, 120 bp, Artificial Sequence
  ENSG00000153214_12 (sequence is synthesized)
tggcacaaactatgaagaccctaaggctaagaaagaacactgtgaaattttcattatatagacattttaaaaatactctgatctttgctgtgctggcttctatagtgtttatggggtgga

SEQ ID NO: 437616 - DNA, 120 bp, Artificial Sequence
  ENSG00000153214_13 (sequence is synthesized)
caactaagacatttagaattgcaaaatgccaatcagattggatggaacgctgggttgacgatgcattttggagcttccttttttcgcttatccttattgtaatcatgtttttgtggagac

SEQ ID NO: 437617 - DNA, 120 bp, Artificial Sequence
  ENSG00000153214_14 (sequence is synthesized)
catcagcaaacaatcagagatatgccttcatgcccttaatagatgattctgatgatgaaattgaggaattcatggtaacttctgaaaatttaaccgaaggaataaaattaagagcctcaa

SEQ ID NO: 437618 - DNA, 120 bp, Artificial Sequence
  ENSG00000153214_15 (sequence is synthesized)
aatcagtttccaatggaacagctaagcctgccacttctgagaactttgatgaagatttgaagtgggtagaagaaaatattccctcttcattcacagatgtagctcttccagtgttagtgg

SEQ ID NO: 437619 - DNA, 120 bp, Artificial Sequence
  ENSG00000153214_16 (sequence is synthesized)
attcagatgaggaaatcatgaccagatctgaaatggctgaaaaaatgttctcttcagaaaagataatgtgattggaacccgtataagaaatgtagttaagcctgaaggactatccttcat

SEQ ID NO: 437620 - DNA, 120 bp, Artificial Sequence
  ENSG00000153214_17 (sequence is synthesized)
caagactgaaagtgagctttgatttgatattgcctaaaaatttttattgtgttatcttggaagtctgtgtatcaaaatgaagaattcagatggtaggaggttctatagtccttttaaagc

SEQ ID NO: 437621 - DNA, 120 bp, Artificial Sequence
  ENSG00000153214_18 (sequence is synthesized)
tgactcttgagtgtcagttgaatatccattaaattggatttggaaataacctgaggaaagtattatgataaagatctgcacagatgcctcttagctgataggtggcaggcctgtgggttt

SEQ ID NO: 437622 - DNA, 120 bp, Artificial Sequence
  ENSG00000153214_19 (sequence is synthesized)
gggttctccctcttttctctggaacatatgacaattccagattaaagaaaaatgttttttaataaatacccttggtctttcttctagtcacctttgaggtagatattgtgattttctgga

SEQ ID NO: 437623 - DNA, 120 bp, Artificial Sequence
  ENSG00000153214_20 (sequence is synthesized)
gtatagtatatccgtgtctctgtgtcttaggtttactagatgcaataatacttctctttgacatttgtactgaagtgatttgatattaagtaaaacagttaatgtttgaatataggcata

SEQ ID NO: 437624 - DNA, 120 bp, Artificial Sequence
  ENSG00000153214_21 (sequence is synthesized)
tataggttttttccgctcccccccaacccaccctttttaaaaaatctatacaaagcccttgtttgagtctcatcatgcacatcaaatcatggagttaggtcttctctgagctcaggggaa

SEQ ID NO: 437625 - DNA, 120 bp, Artificial Sequence
  ENSG00000153214_22 (sequence is synthesized)
cacaagtgcacagagagagatgtcttgagggtcactaccaaagaattaccctcattgtccctcactcaggccatgtgtacatgcgatgctgctgagtgtgctggggtgggtggtggccac

SEQ ID NO: 437626 - DNA, 120 bp, Artificial Sequence
  ENSG00000153214_23 (sequence is synthesized)
gtggctcccccagagcacttcctaactggcaagctgggagacccattactggtgaactttgtggaaattagaactgtatcttttacataatcttggcatattacatttcataataaaaac

SEQ ID NO: 437627 - DNA, 120 bp, Artificial Sequence
  ENSG00000153214_24 (sequence is synthesized)
atacatttagttgcatgctacatcactattgattttataattaatttcttaagcttcaaccatgttttataccttatttcgttacatcatatatttgtaatgtgtaatatgaaatctttt

SEQ ID NO: 437628 - DNA, 120 bp, Artificial Sequence
  ENSG00000153214_25 (sequence is synthesized)
gctttaatgtctttttttaaaatgtagaatgttctaaacttgaaaggcaattgaatgtagtatgatgaaaatgtgaatgttttgctgctttcatgaccaaagatacagggctagtggaca

SEQ ID NO: 437629 - DNA, 120 bp, Artificial Sequence
  ENSG00000153214_26 (sequence is synthesized)
tttagaataataattaaagctagagtcttgtatgtcttttctttgaaggagttctaaccttgtaaattgagaatgacttcagagaattttgattaagaaaacattaaaatcttaaccggc

SEQ ID NO: 437630 - DNA, 120 bp, Artificial Sequence
  ENSG00000153214_27 (sequence is synthesized)
acaaacactccaatttttttcactgtgaagccgcaagcaattttttttctttttctttcaaaagcctaccttctgaatttatttcttgtttactcatttcagagagggtagtaaagaaga

SEQ ID NO: 437631 - DNA, 120 bp, Artificial Sequence
  ENSG00000153214_28 (sequence is synthesized)
tctatttctggtagtcatatcgcttgaaaggtattggtaaatgtgttttcagtcgtgaccatgtggaaagtgaacagtgttggcaaacattaccgagaaaatcatgcttttcaagatgcc

SEQ ID NO: 437632 - DNA, 120 bp, Artificial Sequence
  ENSG00000153214_29 (sequence is synthesized)
cttgctttgggatatccttcctagggagaaaaaaaaaaagtagtttaacaattgtgaattccatttcttatttcagtttctgctgcagtaatgggttcccacccactataattcccagca

SEQ ID NO: 437633 - DNA, 120 bp, Artificial Sequence
  ENSG00000153214_30 (sequence is synthesized)
tttatgttctgttgtattctccccttagcccagtaacatttttatctaataccccattccccaagttttgagacagattgaccccctactcattatgtggctctagttgaattttaaaat

SEQ ID NO: 437634 - DNA, 120 bp, Artificial Sequence
  ENSG00000153214_31 (sequence is synthesized)
gtggaatattgggcttgcaggcagtaggagctgcaaatctggtagagtgggagtgtggagttaatggtgagtatgttaataaagggaaactgtctctgacagaatctcagtaatgtttac

SEQ ID NO: 437635 - DNA, 120 bp, Artificial Sequence
  ENSG00000153214_32 (sequence is synthesized)
caaaacatgtctttctacagctggtaggataaatgatgctaccctgtagctcagctacaggctgcagtgcaaacttttcttccatccagagaaagcagaattccctcctagtaacctcat

SEQ ID NO: 437636 - DNA, 120 bp, Artificial Sequence
  ENSG00000153214_33 (sequence is synthesized)
tacaaatactgttactagaagggcatgtgctgtctgtcaccttcagtaatatttgtgccatctcttgatgactgatgacctggatcgagtatttctatgaagggtcttcttaggcccctt

SEQ ID NO: 437637 - DNA, 120 bp, Artificial Sequence
  ENSG00000153214_34 (sequence is synthesized)
acatacgcaagaggggtgctctagtgccatagctgtagttcacaggaaggacaccaggagaagttatacctagggctactgagcagctcatcatccctgtttctgcacagtttcctgaaa

SEQ ID NO: 437638 - DNA, 120 bp, Artificial Sequence
  ENSG00000153214_35 (sequence is synthesized)
ctggccatcagggcctctgaggcactcaaatcagtttacttttagcatgcccccatcagggtgggtctcactgttagtgaggatacgggtctggtttgatgtttttctaggcaaaatgct

SEQ ID NO: 437639 - DNA, 120 bp, Artificial Sequence
  ENSG00000153214_36 (sequence is synthesized)
taagtgttctggttatgccattcattcatacgatgtgtgaaatttgcttaaaagggaattttcatgatttgatttagattagtatttaaatatctgctttagatagcaattaattttatt

SEQ ID NO: 437640 - DNA, 120 bp, Artificial Sequence
  ENSG00000153214_37 (sequence is synthesized)
gtaaaaataaggaaaaatatgtgaatatgtgaattttttaagcctgagagatgatagaatgttcccatatttttcttgtaaagaaaataatattttaacttacacatcctgtagaaaata

SEQ ID NO: 437641 - DNA, 120 bp, Artificial Sequence
  ENSG00000153214_38 (sequence is synthesized)
ccaccttttccccttgtattacagtacaatgtttacattactatactgtcaagctgaaagtataaaaaatgtacatatacattttgagttatgtatcctttttttaaaaaaaagttcgag

SEQ ID NO: 437642 - DNA, 120 bp, Artificial Sequence
  ENSG00000153214_39 (sequence is synthesized)
tctgttgcactaggctgtacatgactaaagttgacagatgctatgctagatttataatcactagttctggtacttgtgtctttgtatgatcaaagcatgcaataagcaatacaaaatacc

SEQ ID NO: 437643 - DNA, 120 bp, Artificial Sequence
  ENSG00000153214_40 (sequence is synthesized)
aagccttatacttaaaagaagtttaacatattggttaatatactggttaatatactggttaaacatattgaatgtatataagtggcaaaactagatttttaaggaagtgtacattataat

SEQ ID NO: 437644 - DNA, 120 bp, Artificial Sequence
  ENSG00000153214_41 (sequence is synthesized)
attggagctcagtactgcatgaagagacttcattaaaactaagaaaacatttatttggggagaaattttaggcatttaagaacttgtatttttctattttaaaaagttaaattattccgt

SEQ ID NO: 437645 - DNA, 120 bp, Artificial Sequence
  ENSG00000153214_42 (sequence is synthesized)
aatttggaagaagtttcgttgaatgtaggacataaccgtttgaagggttttcatttgaaaaattgatgtattttgtgccttaatattttgttcttttaataaaaatgctctgaatttgaa

SEQ ID NO: 437646 - DNA, 120 bp, Artificial Sequence
  ENSG00000153214_43 (sequence is synthesized)
ttttttttttttttttgctgttttgctgcaggtgagtgattctgatcttgttcttctggccagcctccccctctctctccttgactctggcttgtgctggtggatttttattagtttggc

SEQ ID NO: 437647 - DNA, 120 bp, Artificial Sequence
  ENSG00000153230_0 (sequence is synthesized)
atgaccaatcagacacagatgatggaattcttgcttgtgagatttactgagaattgggtgctcctgaggctgcatgctttgctcttctcactgatctacctcacggctgtgctgatgaat

SEQ ID NO: 437648 - DNA, 120 bp, Artificial Sequence
  ENSG00000153230_1 (sequence is synthesized)
ttagtcatcattctcctcatgattctggaccatcgtctccacatggcaatgtactttttcctccgacatttgtccttcttagacctgtgtctcatttctgccacagtccccaaatccatc

SEQ ID NO: 437649 - DNA, 120 bp, Artificial Sequence
  ENSG00000153230_2 (sequence is synthesized)
ctcaactctgtcgcctccactgactccatctccttcctggggtgtgtgttgcagctcttcttggtggtactgctggctggatcagagattggcatccttactgccatgtcctatgaccgc

SEQ ID NO: 437650 - DNA, 120 bp, Artificial Sequence
  ENSG00000153230_3 (sequence is synthesized)
ttgtacacagctggaacattctctctgaatttttatggctctgatgagctacatcagttcttctgcgatgtccctgccctactaaagctcacttgttctaaagaacatgccatcattagt

SEQ ID NO: 437651 - DNA, 120 bp, Artificial Sequence
  ENSG00000153230_4 (sequence is synthesized)
gtcagtgtggccattggggtctgttatgcattttcatgtttagtttgcattgtagtttcctatgtgtacattttctctgctgtgttaaggatatcacagagacagagacaatccaaagcc

SEQ ID NO: 437652 - DNA, 120 bp, Artificial Sequence
  ENSG00000153230_5 (sequence is synthesized)
ttttccaactgtgtgcctcacctcattgttgtcactgtgtttcttgtaacaggtgctgttgcttatttaaagccagggtctgatgcaccttctattctagacttgctggtgtctgtgttc

SEQ ID NO: 437653 - DNA, 120 bp, Artificial Sequence
  ENSG00000153230_6 (sequence is synthesized)
tattctgtcgcacctccaaccttgaaccctgttatctactgtctgaagaacaaggacattaaatccgctctgagtaaagtcctgtggaatgttagaagcagtggggtaatgaaaagatga

SEQ ID NO: 437654 - DNA, 120 bp, Artificial Sequence
  ENSG00000153233_0 (sequence is synthesized)
atgctcagtagccgcggcgctgctgctgggctgctgggctggcgcggagtccaccctgccgtctccgccttggcttctgggcgtccagaaggccaggcatttgccgcctctgagcgcttc

SEQ ID NO: 437655 - DNA, 120 bp, Artificial Sequence
  ENSG00000153233_1 (sequence is synthesized)
tgttccccttacccgcaacctcctactgctcttcctctctccctctcttagggaggttgaagctggtgctggtttctgtcggcgccacagactgactgctctgcaaaccccagccgagga

SEQ ID NO: 437656 - DNA, 120 bp, Artificial Sequence
  ENSG00000153233_2 (sequence is synthesized)
cctgaatcccggagactagaagacccttggcggtggctctttctaatagcactttacctgaagtggggtcgtggtggagtttctcctccacctctcaatgcaaacactatgcggagagca

SEQ ID NO: 437657 - DNA, 120 bp, Artificial Sequence
  ENSG00000153233_3 (sequence is synthesized)
gtctgcttccctgcgctgtgcctgctccttaatcttcacgctgcagggtgcttttcaggaaacaatgatcattttttggcaattaatcagaagaagagtgggaagccggtattcatttat

SEQ ID NO: 437658 - DNA, 120 bp, Artificial Sequence
  ENSG00000153233_4 (sequence is synthesized)
aagcattcacaagacattgagaagagcctggatatagccccacaaaaaatctacagacatagctaccattcctcttccgaagctcaagtaagcaaacgccaccagattgtcaattcagca

SEQ ID NO: 437659 - DNA, 120 bp, Artificial Sequence
  ENSG00000153233_5 (sequence is synthesized)
tttcctagacccgcatatgacccgtctctcaatctgctggccatggatggtcaagatcttgaagtggaaaatctcccaatcccagcagcaaatgtaattgtggtgacactgcaaatggat

SEQ ID NO: 437660 - DNA, 120 bp, Artificial Sequence
  ENSG00000153233_6 (sequence is synthesized)
gtaaacaagctgaacataaccttgcttcggatcttccgccaaggagtggctgcagctttaggactcttaccccagcaagtgcacatcaatcgcctcattggaaagaagaacagtattgaa

SEQ ID NO: 437661 - DNA, 120 bp, Artificial Sequence
  ENSG00000153233_7 (sequence is synthesized)
ctgtttgtgtctcccataaaccgaaaaacaggaatttctgatgctctgccctctgaggaagttcttcgttcacttaatatcaatgttttgcatcaaagtttatcccagtttggaattaca

SEQ ID NO: 437662 - DNA, 120 bp, Artificial Sequence
  ENSG00000153233_8 (sequence is synthesized)
gaagtctctcctgagaaaaatgttttacaagggcagcatgaagcggacaaaatctggagcaaagaaggattttatgctgttgtcatttttctcagcatctttgttattatagtaacgtgt

SEQ ID NO: 437663 - DNA, 120 bp, Artificial Sequence
  ENSG00000153233_9 (sequence is synthesized)
ttgatgattctttacagattaaaagaaagatttcagctttccttaagacaagacaaagagaaaaaccaggagatccacctatcgcccatcacattacagccagcactgtccgaggcaaag

SEQ ID NO: 437664 - DNA, 120 bp, Artificial Sequence
  ENSG00000153233_10 (sequence is synthesized)
acagtccacagcatggtccaacctgagcaggccccaaaggtactgaatgttgtcgtggaccctcaaggccgaggtgctcctgagatcaaagctaccaccgctacctctgtttgcccttct

SEQ ID NO: 437665 - DNA, 120 bp, Artificial Sequence
  ENSG00000153233_11 (sequence is synthesized)
cctttcaaaatgaagcccataggacttcaagagagaagagggtccaacgtatctcttacattggacatgagtagcttggggaacattgaaccctttgtgtctataccaacaccacgggag

SEQ ID NO: 437666 - DNA, 120 bp, Artificial Sequence
  ENSG00000153233_12 (sequence is synthesized)
aaggtagcaatggagtatctgcagtcagccagccgaattctcacaaggtctcagctgagggacgtcgtggcaagttcacatttactccaaagtgaattcatggaaataccaatgaacttt

SEQ ID NO: 437667 - DNA, 120 bp, Artificial Sequence
  ENSG00000153233_13 (sequence is synthesized)
gtggatcccaaagaaattgatattccgcgtcatggaactaaaaatcgctataagaccattttaccaaatcccctcagcagagtgtgtttaagaccaaaaaatgtaaccgattcattgagc

SEQ ID NO: 437668 - DNA, 120 bp, Artificial Sequence
  ENSG00000153233_14 (sequence is synthesized)
gccccatgatcaacaccgtggatgatttctggcagatggtttggcaggaagacagccctgtgattgttatgatcacaaaactcaaagaaaaaaatgagaaatgtgtgctatactggccgg

SEQ ID NO: 437669 - DNA, 120 bp, Artificial Sequence
  ENSG00000153233_15 (sequence is synthesized)
aaaagagagggatatatggaaaagttgaggttctggttatcagtgtaaatgaatgtgataactacaccattcgaaaccttgtcttaaagcaaggaagccacacccaacatgtgaagcatt

SEQ ID NO: 437670 - DNA, 120 bp, Artificial Sequence
  ENSG00000153233_16 (sequence is synthesized)
actggtacacctcatggcctgatcacaagactccagacagtgcccagcccctcctacagctcatgctggatgtagaagaagacagacttgcttcccagggccgagggcctgtggttgtcc

SEQ ID NO: 437671 - DNA, 120 bp, Artificial Sequence
  ENSG00000153233_17 (sequence is synthesized)
actgcagtgcaggaataggtagaacagggtgttttattgctacatccattggctgtcaacagctgaaagaagaaggagttgtggatgcactaagcattgtctgccagcttcgtatggata

SEQ ID NO: 437672 - DNA, 120 bp, Artificial Sequence
  ENSG00000153233_18 (sequence is synthesized)
gaggtggaatggtgcaaaccagtgagcagtatgaatttgtgcaccatgctctgtgcctgtatgagagcagactttcagcagagactgtccagtgagtcattgaagacttgtcagaccatc

SEQ ID NO: 437673 - DNA, 120 bp, Artificial Sequence
  ENSG00000153233_19 (sequence is synthesized)
aatctcttggggtgattaatcaaattacccacccaaggcttctagaaggagcttcctgcaatggaaggaaggagaagctctgaagcccatgtatggcatggattgtggaagactgggcaa

SEQ ID NO: 437674 - DNA, 120 bp, Artificial Sequence
  ENSG00000153233_20 (sequence is synthesized)
catatttaagatttccagctccttgtgtatatgaatgcatttgtaagcatcccccaaattattctgaaggttttttgatgatggaggtatgataggtttatcacacagcctaaggcagat

SEQ ID NO: 437675 - DNA, 120 bp, Artificial Sequence
  ENSG00000153233_21 (sequence is synthesized)
tttgttttgtctgtactgactctatctgccacacagaatgtatgtatgtaatattcagtaataaatgtcatcaggtgatgactggatgagctgctgaagacattcgtattatgtgttaga

SEQ ID NO: 437676 - DNA, 120 bp, Artificial Sequence
  ENSG00000153233_22 (sequence is synthesized)
tgctttaatgtttgcaaaatctgtcttgtgaatggactgtcagctgttaaactgttcctgttttgaagtgctattacctttctcagttaccagaatcttgctgctaaagttgcaagtgat

SEQ ID NO: 437677 - DNA, 120 bp, Artificial Sequence
  ENSG00000153233_23 (sequence is synthesized)
tgataatggatttttaacagagaagtctttgtttttgaaaaacaaaaatcaaaaacagtaactattttatatggaaatgtgtcttgataatattacctattaaatgtgtatttatagtcc

SEQ ID NO: 437678 - DNA, 120 bp, Artificial Sequence
  ENSG00000153233_24 (sequence is synthesized)
ctcctatcaaacaattacagagcacaatgattgtcattgggtatatatgtatttactctctattattgggcataaaggtggcttctgctccagaactctatccactgtatttccacatcg

SEQ ID NO: 437679 - DNA, 120 bp, Artificial Sequence
  ENSG00000153233_25 (sequence is synthesized)
tgagtcattttactttaaaagggaaaaacaaatttgtagcaactctgaagtatcaagagttttaactacttgtctctcttttgctaagaagggatttttgaatatgctatctacctggaa

SEQ ID NO: 437680 - DNA, 120 bp, Artificial Sequence
  ENSG00000153233_26 (sequence is synthesized)
tctctctctcaacaaaaggtatatgccttcaggaatgatataatctgtcccattttcgaggctccttataaggacatttccatgtatgtccttacatttctgaaagctttcaatcttcaa

SEQ ID NO: 437681 - DNA, 120 bp, Artificial Sequence
  ENSG00000153233_27 (sequence is synthesized)
gagacaaaaaaaattaaaataactaccctcagcaaacactagctgttctgctcatatatgaatttttaatgcagcaatgttgactttgtttcatactgccaataaactcttaatactaaa

SEQ ID NO: 437682 - DNA, 120 bp, Artificial Sequence
  ENSG00000153233_28 (sequence is synthesized)
atgcaccagataatcaatacataacaggtttctacttactggttattggcattctaaggaactttaaaaagggtaaatctgtttaatatattcttttttgttttcttcattagatcccct

SEQ ID NO: 437683 - DNA, 120 bp, Artificial Sequence
  ENSG00000153233_29 (sequence is synthesized)
gaaccaggtagtttccaagagagacgctgagggatgtttagaaagcctgggacctgcagatgccatgtcaggcacgcttgctcctgcataggagactaaataatctcgatatataaggat

SEQ ID NO: 437684 - DNA, 120 bp, Artificial Sequence
  ENSG00000153233_30 (sequence is synthesized)
ggcagtctgttgtcttagatcagtttgagaagcagctctggcagcggggggtgtaggtgtgttgcactacactgaatggaataaggctaaaaatatgtttagtgtctgataagaacgcca

SEQ ID NO: 437685 - DNA, 120 bp, Artificial Sequence
  ENSG00000153233_31 (sequence is synthesized)
agaaaaaaatgagaagaggaggcttacagggctggcacctgcccacacctggcattcgacatttccctgggctaagctgagtgggagcagatgcccccatcctatgaccagggcctgtgc

SEQ ID NO: 437686 - DNA, 120 bp, Artificial Sequence
  ENSG00000153233_32 (sequence is synthesized)
aggagccatcacaccaccttgctgatgatgacacctagttcttcaatttcacactggacttcatctcccttcttgagaaagacagaaggtttcctgaatacaccaacacctggggaggtc

SEQ ID NO: 437687 - DNA, 120 bp, Artificial Sequence
  ENSG00000153233_33 (sequence is synthesized)
atttgtccaagatgcatacagctaagaattggcagaggagggatttgaactcaccttggctgatgccaaatccaagtacttgatcattaggctgtaccacctccccagtaatgttacaca

SEQ ID NO: 437688 - DNA, 120 bp, Artificial Sequence
  ENSG00000153233_34 (sequence is synthesized)
aatgcaccacaagcttttgtttgcacttgtttcacttttgtttaaaagtaaagaggtagtacagcacgtaatccagggtgctgatgttgtgggaggggacttaaaacagagtaaggaaat

SEQ ID NO: 437689 - DNA, 120 bp, Artificial Sequence
  ENSG00000153233_35 (sequence is synthesized)
cattcgaaaccttgtcttaaagaaataaattgccagcaagatgggggtgataaaaggcattcagtattgtggtttggatgacttttagttctacaagtgaatgaggcatttggtggctgt

SEQ ID NO: 437690 - DNA, 120 bp, Artificial Sequence
  ENSG00000153233_36 (sequence is synthesized)
aaacagtaccaggcggttacctccaggtgactaaatgaggcttcatctcagcacacaagcttagaaagctttacgattagtcctgcttgctatggtaaggaaataacacaaagaagagtg

SEQ ID NO: 437691 - DNA, 120 bp, Artificial Sequence
  ENSG00000153233_37 (sequence is synthesized)
agaagcgagcagcatttccatttatcaagtaggtgcagaagcctgtgcaagtattaagagtcagggtgcaggcggcaagctcctgctttgcagcttttcttactggttttgagagccacc

SEQ ID NO: 437692 - DNA, 120 bp, Artificial Sequence
  ENSG00000153233_38 (sequence is synthesized)
ttcctaaagagggccctgctgctcaggtctgatcgtggacaatggggcacgtacgccagactgctggactactgaatgaatgcctctttctttgttcaataccttttccaagattctttg

SEQ ID NO: 437693 - DNA, 120 bp, Artificial Sequence
  ENSG00000153233_39 (sequence is synthesized)
tcattcttcttggactcatcgggaggcatgggttttaagatacacagtagctcgggtcttacagcgaaataattgatgcttcattgaaagaaaccaggcaaattgaaatgtgtgctatac

SEQ ID NO: 437694 - DNA, 120 bp, Artificial Sequence
  ENSG00000153234_0 (sequence is synthesized)
aagccacataaacaaaggcacattggcggccagggccagtccgcccggcggctcgcgcacggctccgcggtcccttttgcctgtccagccggccgcctgtccctgctccctccctccgtg

SEQ ID NO: 437695 - DNA, 120 bp, Artificial Sequence
  ENSG00000153234_1 (sequence is synthesized)
aggtgtccgggttcccttcgcccagctctcccacccctacccgaccccggcgcccgggctcccagagggaactgcacttcggcagagttgaatgaatgaagacagacgcggagaactcct

SEQ ID NO: 437696 - DNA, 120 bp, Artificial Sequence
  ENSG00000153234_2 (sequence is synthesized)
aaggaggagattggacaggctggactccccattgcttttctaaaaatcttggaaactttgtccttcattgaattacgacactgtccacctttaatttcctcgaaaacgcctgtaactcgg

SEQ ID NO: 437697 - DNA, 120 bp, Artificial Sequence
  ENSG00000153234_3 (sequence is synthesized)
ctgaagccatgccttgtgttcaggcgcagtatgggtcctcgcctcaaggagccagccccgcttctcagagctacagttaccactcttcgggagaatacagctccgatttcttaactccag

SEQ ID NO: 437698 - DNA, 120 bp, Artificial Sequence
  ENSG00000153234_4 (sequence is synthesized)
agtttgtcaagtttagcatggacctcaccaacactgaaatcactgccaccacttctctccccagcttcagtacctttatggacaactacagcacaggctacgacgtcaagccaccttgct

SEQ ID NO: 437699 - DNA, 120 bp, Artificial Sequence
  ENSG00000153234_5 (sequence is synthesized)
tgtaccaaatgcccctgtccggacagcagtcctccattaaggtagaagacattcagatgcacaactaccagcaacacagccacctgcccccccagtctgaggagatgatgccgcactccg

SEQ ID NO: 437700 - DNA, 120 bp, Artificial Sequence
  ENSG00000153234_6 (sequence is synthesized)
ggtcggtttactacaagccctcctcgcccccgacgcccaccaccccgggcttccaggtgcagcacagccccatgtgggacgacccgggatctctccacaacttccaccagaactacgtgg

SEQ ID NO: 437701 - DNA, 120 bp, Artificial Sequence
  ENSG00000153234_7 (sequence is synthesized)
ccactacgcacatgatcgagcagaggaaaacgccagtctcccgcctctccctcttctcctttaagcaatcgccccctggcaccccggtgtctagttgccagatgcgcttcgacgggcccc

SEQ ID NO: 437702 - DNA, 120 bp, Artificial Sequence
  ENSG00000153234_8 (sequence is synthesized)
tgcacgtccccatgaacccggagcccgccggcagccaccacgtggtggacgggcagaccttcgctgtgcccaaccccattcgcaagcccgcgtccatgggcttcccgggcctgcagatcg

SEQ ID NO: 437703 - DNA, 120 bp, Artificial Sequence
  ENSG00000153234_9 (sequence is synthesized)
gccacgcgtctcagctgctcgacacgcaggtgccctcaccgccgtcgcggggctccccctccaacgaggggctgtgcgctgtgtgtggggacaacgcggcctgccaacactacggcgtgc

SEQ ID NO: 437704 - DNA, 120 bp, Artificial Sequence
  ENSG00000153234_10 (sequence is synthesized)
gcacctgtgagggctgcaaaggcttctttaagcgcacagtgcaaaaaaatgcaaaatacgtgtgtttagcaaataaaaactgcccagtggacaagcgtcgccggaatcgctgtcagtact

SEQ ID NO: 437705 - DNA, 120 bp, Artificial Sequence
  ENSG00000153234_11 (sequence is synthesized)
gccgatttcagaagtgcctggctgttgggatggtcaaagaagtggttcgcacagacagtttaaaaggccggagaggtcgtttgccctcgaaaccgaagagcccacaggagccctctcccc

SEQ ID NO: 437706 - DNA, 120 bp, Artificial Sequence
  ENSG00000153234_12 (sequence is synthesized)
cttcgcccccggtgagtctgatcagtgccctcgtcagggcccatgtcgactccaacccggctatgaccagcctggactattccaggttccaggcgaaccctgactatcaaatgagtggag

SEQ ID NO: 437707 - DNA, 120 bp, Artificial Sequence
  ENSG00000153234_13 (sequence is synthesized)
atgacacccagcatatccagcaattctatgatctcctgactggctccatggagatcatccggggctgggcagagaagatccctggcttcgcagacctgcccaaagccgaccaagacctgc

SEQ ID NO: 437708 - DNA, 120 bp, Artificial Sequence
  ENSG00000153234_14 (sequence is synthesized)
cgttcgtggctttggggaatggattgattccattgttgaattctcctccaacttgcagaatatgaacatcgacatttctgccttctcctgcattgctgccctggctatggtcacagagag

SEQ ID NO: 437709 - DNA, 120 bp, Artificial Sequence
  ENSG00000153234_15 (sequence is synthesized)
acacgggctcaaggaacccaagagagtggaagaactgcaaaacaagattgtaaattgtctcaaagaccacgtgactttcaacaatggggggttgaaccgccccaattatttgtccaaact

SEQ ID NO: 437710 - DNA, 120 bp, Artificial Sequence
  ENSG00000153234_16 (sequence is synthesized)
gttggggaagctcccagaacttcgtaccctttgcacacaggggctacagcgcattttctacctgaaattggaagacttggtgccaccgccagcaataattgacaaacttttcctggacac

SEQ ID NO: 437711 - DNA, 120 bp, Artificial Sequence
  ENSG00000153234_17 (sequence is synthesized)
tttacctttctaagacctcctcccaagcacttcaaaggaactggaatgataatggaaactgtcaagagggggcaagtcacatgggcagagatagccgtgtgagcagtctcagctcaagct

SEQ ID NO: 437712 - DNA, 120 bp, Artificial Sequence
  ENSG00000153234_18 (sequence is synthesized)
gccccccatttctgtaaccctcctagcccccttgatccctaaagaaaacaaacaaacaaacaaaaactgttgctatttcctaacctgcaggcagaacctgaaagggcattttggctccgg

SEQ ID NO: 437713 - DNA, 120 bp, Artificial Sequence
  ENSG00000153234_19 (sequence is synthesized)
ggcatcctggatttagaacatggactacacacaatacagtggtataaactttttattctcagtttaaaaatcagtttgttgttcagaagaaagattgctataatgtataatgggaaatgt

SEQ ID NO: 437714 - DNA, 88 bp, Artificial Sequence
  ENSG00000153234_20 (sequence is synthesized)
gagacacatcttaaggggacccacaagtattgccctttaacaagacttcaaagttttctgctgtaaagaaagctgtaatatatagtaa

SEQ ID NO: 437715 - DNA, 120 bp, Artificial Sequence
  ENSG00000153234_21 (sequence is synthesized)
caaagttttctgctgtaaagaaagctgtaatatatagtaaaactaaatgttgcgtgggtggcatgagttgaagaaggcaaaggcttgtaaatttacccaatgcagtttggctttttaaat

SEQ ID NO: 437716 - DNA, 120 bp, Artificial Sequence
  ENSG00000153234_22 (sequence is synthesized)
tattttgtgcctatttatgaataaatattacaaattctaaaagataagtgtgtttgcaaaaaaaaagaaaataaatacataaaaaagggacaagcatgttgattctaggttgaaaatgtt

SEQ ID NO: 437717 - DNA, 120 bp, Artificial Sequence
  ENSG00000153234_23 (sequence is synthesized)
ataggcacttgctacttcagtaatgtctatattatataaatagtatttcagacactatgtagtctgttagattttataaagattggtagttatctgagcttaaacattttctcaattgta

SEQ ID NO: 437718 - DNA, 120 bp, Artificial Sequence
  ENSG00000153234_24 (sequence is synthesized)
aaataggtgggcacaagtattacacatcagaaaatcctgacaaaagggacacatagtgtttgtaacaccgtccaacattccttgtttgtaagtgttgtatgtaccgttgatgttgataaa

SEQ ID NO: 437719 - DNA, 120 bp, Artificial Sequence
  ENSG00000153234_25 (sequence is synthesized)
aagaaagtttatatcttgattattttgttgtctaaagctaaacaaaacttgcatgcagcagcttttgactgtttccagagtgcttataatatacataactccctggaaataactgagcac

SEQ ID NO: 437720 - DNA, 120 bp, Artificial Sequence
  ENSG00000153234_26 (sequence is synthesized)
tttgaattttttttatgtctaaaattgtcagttaatttattattttgtttgagtaagaattttaatattgccatattctgtagtatttttctttgtatatttctagtatggcacatgata

SEQ ID NO: 437721 - DNA, 120 bp, Artificial Sequence
  ENSG00000153234_27 (sequence is synthesized)
tgagtcactgcctttttttctatggtgtatgacagttagagatgctgattttttttctgataaattctttctttgagaaagacaattttaatgtttacaacaataaaccatgtaaatgaa

SEQ ID NO: 437722 - DNA, 120 bp, Artificial Sequence
  ENSG00000153234_28 (sequence is synthesized)
ctccccggctcccttcttggtcggccgcgaccccccgaaaggtaacaggcctctttcgcccccggccaggacctgggccctgtgggctttttttttttccattttatcagtaagttcccc

SEQ ID NO: 437723 - DNA, 120 bp, Artificial Sequence
  ENSG00000153234_29 (sequence is synthesized)
ttgtcccagcctccgctttcacttcccgcgttccctccaccccaaaaaccgccccaacatgtccagagaggggcatctacccagccgcccagccaggggcgaccactttgtgagccccgg

SEQ ID NO: 437724 - DNA, 120 bp, Artificial Sequence
  ENSG00000153234_30 (sequence is synthesized)
aagttgcctgaaatttctggttttgacatatgctgtccttgggtttgcgaatgtatcagagcgagaatatgaatatgtaaagagtacagttatgaaactgtggagctaccagggggttaa

SEQ ID NO: 437725 - DNA, 120 bp, Artificial Sequence
  ENSG00000153237_0 (sequence is synthesized)
atagagaccgatgctgttcagcgcgagagggcctggagagggtgggtgtgagagagaaggtgtctcaggtctcgggcgcgggagggggtggcggagaggacagggagattccccagcgct

SEQ ID NO: 437726 - DNA, 120 bp, Artificial Sequence
  ENSG00000153237_1 (sequence is synthesized)
ggctctgaaatctggggcaggctttccttgccttactgccaatcccaactgtgcctggtagggtttgtccctggcgtcaaaggtaggaacagctgagcccttagatgtacccctgacggc

SEQ ID NO: 437727 - DNA, 120 bp, Artificial Sequence
  ENSG00000153237_2 (sequence is synthesized)
gagagcccaggagtgggcgtttcacttttcctgcgtttggggagtccctgaggctatgccctttgacctttgacatgtgtgcagcttctgcttctccagataatctggtattccatatga

SEQ ID NO: 437728 - DNA, 120 bp, Artificial Sequence
  ENSG00000153237_3 (sequence is synthesized)
aaaatgagatgagaaacatcaagtacaaaccagtagactatcaacaattgcgtgcattaactgaagcaaagaaattggcttctgcctctgcaaagctaaagatcagaaaagcaatgttga

SEQ ID NO: 437729 - DNA, 120 bp, Artificial Sequence
  ENSG00000153237_4 (sequence is synthesized)
cttcaaagttatccaaagaacaaacactaataaaacaacacaagcaagtgtggtggcaggaataccagaggctgaatgaagtcagatgtaaaatggaatctgaaataaaatcccttctca

SEQ ID NO: 437730 - DNA, 120 bp, Artificial Sequence
  ENSG00000153237_5 (sequence is synthesized)
atgaagagaacattggaaatgaatgtctttgtgaccttacaaattttgagcaagagctatcagaacaacagtgcacatatcttaaaaatgtaataaatcctattcagcagctgagagcag

SEQ ID NO: 437731 - DNA, 120 bp, Artificial Sequence
  ENSG00000153237_6 (sequence is synthesized)
atctaaaatacagacagcatcacactttgcagcattcacacccacatattgagtttaactccatgaaagtattggaagaggttgactttgtgaagaaacaattgaaaactgtctttgaaa

SEQ ID NO: 437732 - DNA, 120 bp, Artificial Sequence
  ENSG00000153237_7 (sequence is synthesized)
gacttaggctggagcaacagagaatagaaaatgatctttcagactggagtataaagattctagatcattctttggaagaaaagactaacccgcttagtgaactgcccattgaattagaaa

SEQ ID NO: 437733 - DNA, 120 bp, Artificial Sequence
  ENSG00000153237_8 (sequence is synthesized)
gtttggaatgcccataccctgatttgaaatcttcaattctcagtgagttctataagtttacacagaaatatcagaagaagcttcaagactttaatctgcagttggaagacatatacagaa

SEQ ID NO: 437734 - DNA, 120 bp, Artificial Sequence
  ENSG00000153237_9 (sequence is synthesized)
actgtcaactaagtgaagaagaccactggatttaccaggctattttggatcagtaccctggagatctctttggaagaaggactctgtatctggacatgttacaaagatattttcctcaca

SEQ ID NO: 437735 - DNA, 120 bp, Artificial Sequence
  ENSG00000153237_10 (sequence is synthesized)
aatctaggcatgatttggttgaacacgagaaatattgtgaccaatatcgctttgctatagagcagcaaaatatcctgatatcaaattggaataaaaataagaaagactttatacagaagg

SEQ ID NO: 437736 - DNA, 120 bp, Artificial Sequence
  ENSG00000153237_11 (sequence is synthesized)
ctgtgctgacactcactgaggcttgtgcaacacatgaaatggagagcatgttggctaaggacaagaaaaagcaacaggaattgtgtgctgatctgaaagccaaggttcgtcaatggcgag

SEQ ID NO: 437737 - DNA, 120 bp, Artificial Sequence
  ENSG00000153237_12 (sequence is synthesized)
cccaccaagaagaggtagcaagactggaaatggaaatttctgccagaagaagagaaaaggaagaggagaaagagaaactgtggaagaagaaggaattgttgcaaagagcagagaagaaaa

SEQ ID NO: 437738 - DNA, 120 bp, Artificial Sequence
  ENSG00000153237_13 (sequence is synthesized)
aaaatactgggccaagaaaaaacagaagtggcaagaaatggaaatgagagatcttcagcgtctagaagaactgaagaaattaatcgctgaacagtcactaaaagacagagaaagggttaa

SEQ ID NO: 437739 - DNA, 120 bp, Artificial Sequence
  ENSG00000153237_14 (sequence is synthesized)
atatagacaagaattattggaaaggcgtttgatggagaaaaaggaagtggcccttcaagaagctcatgaagacaaagagagagcacggcggctagaagcccttaggaaacaggttgctgt

SEQ ID NO: 437740 - DNA, 120 bp, Artificial Sequence
  ENSG00000153237_15 (sequence is synthesized)
tgttgctcaatttgatcctgttagaatgatgtcagatacaatggcatcaaaagctagaatgggcattgaaattgaagaagaatttattcttcaaaagccactcttcacattgaatacata

SEQ ID NO: 437741 - DNA, 120 bp, Artificial Sequence
  ENSG00000153237_16 (sequence is synthesized)
caatgaacagcagataatttctgaccctagacttcgcttcgagttagcacttcgagaagctggacttcatagaacactttatgctaaagagatattaccaaaaattagtcctcaaaaacc

SEQ ID NO: 437742 - DNA, 120 bp, Artificial Sequence
  ENSG00000153237_17 (sequence is synthesized)
tccaagaaaggacatggagtctactgtatttaaaatatagagctcatcctcaaattctatatgtaaagagcatttttctttgaaaacatgtatatggataataataattactactttcta

SEQ ID NO: 437743 - DNA, 120 bp, Artificial Sequence
  ENSG00000153237_18 (sequence is synthesized)
aaatgtttgaaatatcagacatagaaatcatagcatctattaaaacaactttgcctttcttttgtgattcttagaattttatgcactatatttcctgtatctttaagttatatttaatag

SEQ ID NO: 437744 - DNA, 120 bp, Artificial Sequence
  ENSG00000153237_19 (sequence is synthesized)
tactaaattcccccaaattatggaacttaattatggcacatatagtacttatactataatttagtaaactacatgttggaggttatgttatcctataaaaagagctcaaaataactttgt

SEQ ID NO: 437745 - DNA, 120 bp, Artificial Sequence
  ENSG00000153237_20 (sequence is synthesized)
gagaattataaattatgtagctgctacctgctaatgttcatttctgcttgttatttcagaatttgactttttaattatggaagcttcattatcattaatacttctattatttcttgatta

SEQ ID NO: 437746 - DNA, 120 bp, Artificial Sequence
  ENSG00000153237_21 (sequence is synthesized)
ttataagaggagactcaacctttctctaaatttagaaaccaatttggtacaccatgtttactgcaaaccaatcatccaaacaatttcattttgcaaattagcccttaagaataaattaga

SEQ ID NO: 437747 - DNA, 120 bp, Artificial Sequence
  ENSG00000153237_22 (sequence is synthesized)
aattagaaatagcatttcaagcatgggaatatctgttttggtttggaaatatatatatttgtgtgattgtttagaagaaatatttaaaatttcataatatttggaatgctgtcaaaaatt

SEQ ID NO: 437748 - DNA, 120 bp, Artificial Sequence
  ENSG00000153237_23 (sequence is synthesized)
atatttagatgattttatagaaaaggagcatttaaaataaaactcaaacataaatatttgactatttctaaaaaataatttttcaagcagaataacaagttagtgttgttgaaagttgcc

SEQ ID NO: 437749 - DNA, 120 bp, Artificial Sequence
  ENSG00000153237_24 (sequence is synthesized)
gttgttgaaagttgccattgttacagttaagattaccccactcctttttctgtctattgcagctccctgacatttcccacctacctcccaggggttgcagcctctgtgcaattactggaa

SEQ ID NO: 437750 - DNA, 120 bp, Artificial Sequence
  ENSG00000153237_25 (sequence is synthesized)
taatgtaaaaaaaaaaaagcccaatccaactagtggaatctttgactttatgattgtccccaacatcatggaaataaaaaatacaagtacagtcccgttagaataaatcttcacaaaaga

SEQ ID NO: 437751 - DNA, 120 bp, Artificial Sequence
  ENSG00000153237_26 (sequence is synthesized)
tatgtgactgttgggaagtaggagatcaagaatcactttttccatgtgggtatccaacagaaccaggaccatttattaaagactgttctttccatactgcacagcagtatgactcacttc

SEQ ID NO: 437752 - DNA, 120 bp, Artificial Sequence
  ENSG00000153237_27 (sequence is synthesized)
actgagtcctgtgtagacttttgacactaactttttatttttgtttgggatcactatacttccaacttactgtatagttactatgtaactggaatacaatcaataaatgtttagactgac

SEQ ID NO: 437753 - DNA, 83 bp, Artificial Sequence
  ENSG00000153237_28 (sequence is synthesized)
aaatgtggaagtgactttggaactggtatcaggcagaggttggaacagtgtggaaggctcagaagaagacgtttgaatggttt

SEQ ID NO: 437754 - DNA, 120 bp, Artificial Sequence
  ENSG00000153237_29 (sequence is synthesized)
agatgatccaggcagcattcgacctatttttattgatttgaaatctaaggcaatatgatacggaaaacatgaatcaaagagaccaaccattcatgacaattcagagaaatgatagctcag

SEQ ID NO: 437755 - DNA, 120 bp, Artificial Sequence
  ENSG00000153246_0 (sequence is synthesized)
agagccccgagtgtcggttcactgtggagacagcggtggcggagtgggtctccagggctctgggctggcaaggcccccggagggggtggggcgcggaggaggctacggatccgcttccgc

SEQ ID NO: 437756 - DNA, 120 bp, Artificial Sequence
  ENSG00000153246_1 (sequence is synthesized)
gcggcggggccgggtgcttgggacgcggctctgggctcccgggataaggggctcccgggacaaggggctcccggagagcccagtggttagcgatgctgctgtcgccgtcgctgctgctgc

SEQ ID NO: 437757 - DNA, 120 bp, Artificial Sequence
  ENSG00000153246_2 (sequence is synthesized)
tgctgctgctgggggcgccgcggggctgcgccgagggtgtggcggcggcgcttacccccgagcggctcctggagtggcaggataaaggaatatttgttatccaaagtgagagtctcaaga

SEQ ID NO: 437758 - DNA, 120 bp, Artificial Sequence
  ENSG00000153246_3 (sequence is synthesized)
aatgcattcaagcaggtaaatcggttctgaccctggagaactgcaagcaagcaaacaagcacatgctgtggaaatgggtttcaaaccatggcctctttaacataggaggcagtggttgcc

SEQ ID NO: 437759 - DNA, 120 bp, Artificial Sequence
  ENSG00000153246_4 (sequence is synthesized)
tgggcctgaatttctccgccccagagcagccattaagcttatatgaatgtgactccaccctcgtttccttacggtggcgctgtaacaggaagatgatcacaggcccgctgcagtactctg

SEQ ID NO: 437760 - DNA, 120 bp, Artificial Sequence
  ENSG00000153246_5 (sequence is synthesized)
tccaggtggcgcatgacaacacagtggtggcctcacggaagtatattcataagtggatttcttatgggtcaggtggtggagacatttgtgaatatctacacaaagatttgcatacaatca

SEQ ID NO: 437761 - DNA, 120 bp, Artificial Sequence
  ENSG00000153246_6 (sequence is synthesized)
aagggaacacccacgggatgccgtgtatgtttcccttccagtataaccatcagtggcatcatgaatgtacccgtgaaggtcgggaagatgacttactgtggtgtgccacgacaagccgtt

SEQ ID NO: 437762 - DNA, 120 bp, Artificial Sequence
  ENSG00000153246_7 (sequence is synthesized)
atgaaagagatgaaaagtggggattttgccctgatcccacctctgcagaagtaggttgtgatactatttgggagaaggacctcaattcacacatttgctaccagttcaacctgctttcat

SEQ ID NO: 437763 - DNA, 120 bp, Artificial Sequence
  ENSG00000153246_8 (sequence is synthesized)
ctctctcttggagtgaggcacattcttcatgccagatgcaaggaggtacgctgttaagtattacagatgaaactgaagaaaatttcataagggagcacatgagcagtaaaacagtggagg

SEQ ID NO: 437764 - DNA, 120 bp, Artificial Sequence
  ENSG00000153246_9 (sequence is synthesized)
tgtggatgggcctcaatcagctggatgaacacgctggctggcagtggtctgatggaacgccgctcaactatctgaattggagcccagaggtaaattttgagccatttgttgaagatcact

SEQ ID NO: 437765 - DNA, 120 bp, Artificial Sequence
  ENSG00000153246_10 (sequence is synthesized)
gtggaacatttagttcatttatgccaagtgcctggaggagtcgggattgtgagtccaccttgccatatatatgtaaaaaatatctaaaccacattgatcatgaaatagttgaaaaagatg

SEQ ID NO: 437766 - DNA, 120 bp, Artificial Sequence
  ENSG00000153246_11 (sequence is synthesized)
cgtggaaatattatgctacccactgtgagcctggctggaatccctacaatcgtaattgctacaaacttcagaaagaagaaaagacctggcatgaggctctgcgttcttgtcaggctgata

SEQ ID NO: 437767 - DNA, 120 bp, Artificial Sequence
  ENSG00000153246_12 (sequence is synthesized)
acagtgcattaatagacataacctcattagcagaggtggagtttcttgtaaccctccttggagatgaaaatgcatcagaaacatggattggtttgagcagcaataaaattccagtttcct

SEQ ID NO: 437768 - DNA, 120 bp, Artificial Sequence
  ENSG00000153246_13 (sequence is synthesized)
ttgaatggtctaatgactcttcagtcatctttactaattggcacacacttgagccccacatttttccaaatagaagccagctgtgtgtctcagcagagcagtctgagggacactggaaag

SEQ ID NO: 437769 - DNA, 120 bp, Artificial Sequence
  ENSG00000153246_14 (sequence is synthesized)
tcaaaaattgtgaagaaagacttttttacatttgtaaaaaagcaggccatgtcctctctgatgctgaatcaggatgtcaagagggatgggagagacatggtggattctgttacaaaattg

SEQ ID NO: 437770 - DNA, 120 bp, Artificial Sequence
  ENSG00000153246_15 (sequence is synthesized)
acacagtccttcgaagctttgaccaagcttccagcggttattactgtcctcctgcacttgtaaccattacaaacaggtttgaacaggcttttattaccagtttgatcagtagtgtggtaa

SEQ ID NO: 437771 - DNA, 120 bp, Artificial Sequence
  ENSG00000153246_16 (sequence is synthesized)
aaatgaaggacagttatttttggatagctcttcaggaccaaaatgatacgggagaatacacttggaagccagtagggcagaaacccgagccggtgcagtacacacactggaacacacacc

SEQ ID NO: 437772 - DNA, 120 bp, Artificial Sequence
  ENSG00000153246_17 (sequence is synthesized)
agccgcgctacagtggtggctgtgttgccatgcgaggaaggcatccacttggtcgctgggaagtgaagcactgtcggcactttaaggcaatgtccttgtgcaagcagccagttgaaaatc

SEQ ID NO: 437773 - DNA, 120 bp, Artificial Sequence
  ENSG00000153246_18 (sequence is synthesized)
aggaaaaagcagagtatgaagagagatggccctttcacccctgctatttggactgggagtcagagcctggtctggccagttgcttcaaggtatttcatagtgaaaaagttctgatgaaaa

SEQ ID NO: 437774 - DNA, 120 bp, Artificial Sequence
  ENSG00000153246_19 (sequence is synthesized)
gaacatggagagaagctgaagcattttgcgaagaatttggagctcatcttgcaagctttgcccatattgaggaagagaattttgtgaatgagctcttacattcaaaatttaattggacag

SEQ ID NO: 437775 - DNA, 120 bp, Artificial Sequence
  ENSG00000153246_20 (sequence is synthesized)
aagaaaggcagttctggattggatttaataaaagaaacccactgaatgccggctcatgggagtggtctgatagaactcctgttgtctcttcgtttttagacaacacttattttggagaag

SEQ ID NO: 437776 - DNA, 120 bp, Artificial Sequence
  ENSG00000153246_21 (sequence is synthesized)
atgcaagaaactgtgctgtttataaggcaaacaaaacattgctgcccttacactgtggttccaaacgtgaatggatatgcaaaatcccaagagatgtgaaacccaagattccgttctggt

SEQ ID NO: 437777 - DNA, 120 bp, Artificial Sequence
  ENSG00000153246_22 (sequence is synthesized)
accagtacgatgtaccctggctcttttatcaggatgcagaatacctttttcatacctttgcctcagaatggttgaactttgagtttgtctgtagctggctgcacagtgatcttctcacaa

SEQ ID NO: 437778 - DNA, 120 bp, Artificial Sequence
  ENSG00000153246_23 (sequence is synthesized)
ttcattctgcacatgagcaagaattcatccacagcaaaataaaagcgctatcaaagtatggtgcaagttggtggattggacttcaagaagaaagagccaatgatgaatttcgctggagag

SEQ ID NO: 437779 - DNA, 120 bp, Artificial Sequence
  ENSG00000153246_24 (sequence is synthesized)
atggaacaccagtgatataccagaactgggacacaggaagagaaagaactgtgaataatcagagccagagatgtggctttatttcttctataacaggactctggggtagtgaagagtgtt

SEQ ID NO: 437780 - DNA, 120 bp, Artificial Sequence
  ENSG00000153246_25 (sequence is synthesized)
cagtttctatgcctagtatctgtaagcgaaaaaaggtttggctcatagagaaaaagaaagatacaccaaaacaacatggaacgtgtcccaaaggatggctatattttaactataagtgcc

SEQ ID NO: 437781 - DNA, 120 bp, Artificial Sequence
  ENSG00000153246_26 (sequence is synthesized)
ttctgctgaatatccccaaagacccaagcagttggaagaactggacgcatgctcaacatttctgtgctgaagaaggggggaccctggtcgccattgaaagtgaggtggagcaagctttca

SEQ ID NO: 437782 - DNA, 120 bp, Artificial Sequence
  ENSG00000153246_27 (sequence is synthesized)
ttactatgaatctttttggccagaccaccagtgtgtggataggtttacaaaatgatgattatgaaacatggctaaatggaaagcctgtggtatattctaactggtctccatttgatataa

SEQ ID NO: 437783 - DNA, 120 bp, Artificial Sequence
  ENSG00000153246_28 (sequence is synthesized)
taaatattccaagtcacaataccactgaagttcagaaacacattcctctctgtgccttactctcaagtaatcctaattttcatttcactggaaaatggtattttgaagactgtggaaagg

SEQ ID NO: 437784 - DNA, 120 bp, Artificial Sequence
  ENSG00000153246_29 (sequence is synthesized)
aaggctatgggtttgtttgtgaaaaaatgcaagatacttctggacacggtgtaaatacatctgatatgtatccaatgcccaataccttagaatatggaaacagaacttacaaaataatta

SEQ ID NO: 437785 - DNA, 120 bp, Artificial Sequence
  ENSG00000153246_30 (sequence is synthesized)
atgcaaatatgacttggtatgcagcaataaaaacctgcctgatgcacaaagcacaactggtcagcatcacagaccagtatcaccagtccttcctcactgttgtcctcaaccggctaggat

SEQ ID NO: 437786 - DNA, 120 bp, Artificial Sequence
  ENSG00000153246_31 (sequence is synthesized)
atgcccactggattggactgttcaccacagataatggtcttaattttgactggtctgatggcaccaaatcttctttcactttttggaaagatgaggagtcctccctccttggtgactgcg

SEQ ID NO: 437787 - DNA, 120 bp, Artificial Sequence
  ENSG00000153246_32 (sequence is synthesized)
tttttgccgacagcaacggacgctggcatagcacagcctgcgagtcatttctgcaaggtgccatttgtcatgtgccacctgaaacaagacaatctgaacacccagagttgtgctcagaaa

SEQ ID NO: 437788 - DNA, 120 bp, Artificial Sequence
  ENSG00000153246_33 (sequence is synthesized)
catctattccctggataaaatttaaaagtaattgctacagtttttctacagtcctagacagtatgagttttgaggctgctcatgaattttgcaaaaaggaaggttctaatcttttaacaa

SEQ ID NO: 437789 - DNA, 120 bp, Artificial Sequence
  ENSG00000153246_34 (sequence is synthesized)
tcaaggatgaggctgaaaatgcatttctcctagaagagctgtttgcttttggttcttctgtccagatggtttggttgaatgctcaatttgatggtaacaatgaaaccataaagtggtttg

SEQ ID NO: 437790 - DNA, 120 bp, Artificial Sequence
  ENSG00000153246_35 (sequence is synthesized)
atggaactcccacagaccagtcaaactggggcattcggaagccagacacagactacttcaagccccatcattgtgttgccttgaggatccctgaaggattatggcagctatccccgtgtc

SEQ ID NO: 437791 - DNA, 120 bp, Artificial Sequence
  ENSG00000153246_36 (sequence is synthesized)
aagaaaaaaaaggctttatatgtaaaatggaggcagatattcacactgcagaggcgctgccagaaaaaggaccaagtcacagcatcattcctcttgcggttgtactgacactgatagtca

SEQ ID NO: 437792 - DNA, 120 bp, Artificial Sequence
  ENSG00000153246_37 (sequence is synthesized)
ttgtggccatttgcacactttccttctgcatatacaagcataacggtggcttcttcaggagacttgcagggtttcggaatccttactatcctgcaaccaactttagtacagtatatttag

SEQ ID NO: 437793 - DNA, 120 bp, Artificial Sequence
  ENSG00000153246_38 (sequence is synthesized)
aagaaaatattctcatttctgatcttgagaagagtgaccaataataatgaggtcagagaatgccacagacaccagggtaagtaaagaagactaaacaggagtctcatctgtctttccctt

SEQ ID NO: 437794 - DNA, 120 bp, Artificial Sequence
  ENSG00000153246_39 (sequence is synthesized)
tacagcacagatgccattagaatgtgaattgggtcactattttaattattcttgaagtgattactggttttgaatcttaaccaaatcagatgggttttgatttattcatttccctaaact

SEQ ID NO: 437795 - DNA, 120 bp, Artificial Sequence
  ENSG00000153246_40 (sequence is synthesized)
gtgatccattcttaaaaggggtaaattatgcattggttatttttcagaaagacaagaactattaaaagaaactccctattgaaaactctgaaatcaatgcgaataatagtttttgcatta

SEQ ID NO: 437796 - DNA, 120 bp, Artificial Sequence
  ENSG00000153246_41 (sequence is synthesized)
atgtatctctactaaaatttgggggaattttaaaactaatctggtatctattcagacatttacctgcactcgtaccattaagaaagacagaaagaagcaaaaaaaaattaatcttgtata

SEQ ID NO: 437797 - DNA, 120 bp, Artificial Sequence
  ENSG00000153246_42 (sequence is synthesized)
tgagaggaaaaggaaagggcttctgagaggattcttagttgtttcttttgaattcacttttaatagcaggatttggaaaatactaatttctgtgcttaagggtcacaggttctgggctct

SEQ ID NO: 437798 - DNA, 120 bp, Artificial Sequence
  ENSG00000153246_43 (sequence is synthesized)
caactgatatttaaggtgacattcatttttattaggtctaacatctcaagctaaaggagaaagaaaaataccttcttttaaatggcaaagaccttcattagcagcacacttttataaaca

SEQ ID NO: 437799 - DNA, 120 bp, Artificial Sequence
  ENSG00000153246_44 (sequence is synthesized)
accatatagttaaaatgtggccttaaactttcaattactaaatgatgattaagttggatattttaaaatgtcttatacataagcttaaagtaatatattgaaactttaacagttgtactg

SEQ ID NO: 437800 - DNA, 120 bp, Artificial Sequence
  ENSG00000153246_45 (sequence is synthesized)
ttaaaactcatggactttctgaaaaactaaatatataaaataatatgtaacactcttaataactggaagatataaaatgtaacttggatttaaaggagaagagctaaagatctgaattat

SEQ ID NO: 437801 - DNA, 120 bp, Artificial Sequence
  ENSG00000153246_46 (sequence is synthesized)
agtctcattagaaccagacagatgttgttgagaagtactaaataaattagtaatctagatatctttattatgtaaatgagtttaggtgttctatttaataaactattttctgggaacgat

SEQ ID NO: 437802 - DNA, 120 bp, Artificial Sequence
  ENSG00000153246_47 (sequence is synthesized)
ctccttttatattagtctagttagtgtagatggtaaataatgattatgatactgtctgtaaataaaaaattacagattttattttcctttattagttccttataaagaaaacagcttcat

SEQ ID NO: 437803 - DNA, 120 bp, Artificial Sequence
  ENSG00000153246_48 (sequence is synthesized)
tccttataaagaaaacagcttcataatcaatatctaaaaatttactcattacataactgtttattgaattttatcaagaaaaaagtgtactgagcatggtggcacgcacctgtagtccca

SEQ ID NO: 437804 - DNA, 120 bp, Artificial Sequence
  ENSG00000153246_49 (sequence is synthesized)
ggatcaactgagcccagaagttgaaggctgcagtgagctatggttgcaccactgcactcctgcctgggcaactgaatgagaccccacctcaaaaaagtgctgttctagaaacagaggtac

SEQ ID NO: 437805 - DNA, 120 bp, Artificial Sequence
  ENSG00000153246_50 (sequence is synthesized)
taaggtgagcaacttggggtaagggctatcttttcatgccacttattttctaatgagggaaaattgacagtaactcagtaaagaaatgcatatgcataaaatagcaagtggttatgaaaa

SEQ ID NO: 437806 - DNA, 120 bp, Artificial Sequence
  ENSG00000153246_51 (sequence is synthesized)
tgaagtaaggttccatgatagagagaaactgggggactctcagggcctccctgagagtgtgcattttaattattacaaccaactgcctcaaaaccagtggccactaatcacaagggggag

SEQ ID NO: 437807 - DNA, 120 bp, Artificial Sequence
  ENSG00000153246_52 (sequence is synthesized)
ctctgagagaaagtatgaatgaatttctaagaggcaaaccatcatcattagaaatacaatttgaagagcataccactaagaatggaatccttgtggcctgcaacagttaatccagcttcc

SEQ ID NO: 437808 - DNA, 120 bp, Artificial Sequence
  ENSG00000153246_53 (sequence is synthesized)
aaaagcagctctttgctactgttataataatttacacactgggacagtctacctccataatttttttaagtattgggacttcattttttaaaagatattatattatgtggcagttgcata

SEQ ID NO: 437809 - DNA, 120 bp, Artificial Sequence
  ENSG00000153246_54 (sequence is synthesized)
tttatgactcaaaaaataattggcttgaactcaccagatggtataaaagcccaatttaaccatcttttgagtggaattaaagttctgttcttttcaatggacttggtaaaaactgctaat

SEQ ID NO: 437810 - DNA, 120 bp, Artificial Sequence
  ENSG00000153246_55 (sequence is synthesized)
caaccagccttccagtcaaggtatatagtcacacataataatttgacaaaatacaccattaggaaagtgattttgcagaaagaagctgtattgcttctcagtgctccatactttgatgtt

SEQ ID NO: 437811 - DNA, 120 bp, Artificial Sequence
  ENSG00000153246_56 (sequence is synthesized)
tagtattgaacaacatctccagataatctggacccatggacagatcacacacttcttgccattactgaatttgcagaaatagtactgaagtattctgctacatttttatatttgcatttt

SEQ ID NO: 437812 - DNA, 81 bp, Artificial Sequence
  ENSG00000153246_57 (sequence is synthesized)
ttttggagatggagtcttgctctgttgccaggcaactgcctggttcgagcaagtttcctgcctcagcctcccgagtagctg

SEQ ID NO: 437813 - DNA, 120 bp, Artificial Sequence
  ENSG00000153246_58 (sequence is synthesized)
aactagattttatagctataattcgaaaagaaaaaaaagtagcaggtaatgggtatattatacactatttgcgtgatggttacaccagactttaccactacatactgtatttatgtaaca

SEQ ID NO: 437814 - DNA, 120 bp, Artificial Sequence
  ENSG00000153246_59 (sequence is synthesized)
aaattacacttgtactccttacatttatgccaaaaaagcggcaggatcacaaattcacacatagttaatgtgcccctccaacagtcaattatgttctatgactaacctgaggatctttat

SEQ ID NO: 437815 - DNA, 120 bp, Artificial Sequence
  ENSG00000153246_60 (sequence is synthesized)
agaatctgagtaatggaaatgcctgggtttttccatttaacaatatattgggctcttacagttacaacagtcttctttcgggttaaatatttcttctcttgaagggtccactccttatta

SEQ ID NO: 437816 - DNA, 120 bp, Artificial Sequence
  ENSG00000153246_61 (sequence is synthesized)
aagataagattgaactgaatgtttacttaaacgttcagtcttttggagtttctttactcttctcaaaatggtggttggatatataagaacttgctgtgtcctggtagtgttgaggggaga

SEQ ID NO: 437817 - DNA, 120 bp, Artificial Sequence
  ENSG00000153246_62 (sequence is synthesized)
aggtgacaacttactgtggatgtatgttagctggtgtccactgagaatagctgtctggcctcactcctgggaattctgctggcatctgctgtgaagtctgcagttgctttaatctgtagt

SEQ ID NO: 437818 - DNA, 120 bp, Artificial Sequence
  ENSG00000153246_63 (sequence is synthesized)
ctgttctctttgatttggcctcattctggctgtccctggtgctgtcttatctcttgagaactggctgtgtctcctgttgaattccctatccgaacactgcagttcttggctacaaggcag

SEQ ID NO: 437819 - DNA, 120 bp, Artificial Sequence
  ENSG00000153246_64 (sequence is synthesized)
tcacttcacccctgcagtggtgagatcccattagctaccattagctactcttttcgtccagaaaggcgaaatgccatagcaaacaatcccacagtcttggtggattaacacagcaaaggt

SEQ ID NO: 437820 - DNA, 120 bp, Artificial Sequence
  ENSG00000153246_65 (sequence is synthesized)
ttatttctcacccacacctgcatgggctggcaagaggactttgctctgttcagtcattcatgggtccatgcttctcctatatagccagccctctgtctcctaaggcctggagtcctccat

SEQ ID NO: 437821 - DNA, 120 bp, Artificial Sequence
  ENSG00000153246_66 (sequence is synthesized)
gggcctccaatctgtggctgacagaggatgttgacttgagacccatctttgattcattatggagcttccacaggctgttgaaatcctctaagtcaaaagtcctcaaactggggacacatg

SEQ ID NO: 437822 - DNA, 120 bp, Artificial Sequence
  ENSG00000153246_67 (sequence is synthesized)
cctaaggaatacaggagcatgggtatttaagaaacttaatttccagaatcttcatgtatattttttcttaaaactgatttacctgagagcacccctggttcttctttcccacctctcttt

SEQ ID NO: 437823 - DNA, 120 bp, Artificial Sequence
  ENSG00000153246_68 (sequence is synthesized)
acacaaatgcctttctctacctttaaaaagaaaaagaaaaagaaatggctttcatttcagatcttactatgggaaaatcctccatggctccaaagaaaaatattcgaagtattgatgtca

SEQ ID NO: 437824 - DNA, 120 bp, Artificial Sequence
  ENSG00000153246_69 (sequence is synthesized)
gtgaagcttcttttaataaagaaattgtaaactcattctgtagatcctcacgtctttctctgtgttaggacatttttctgttaaagttgaagcgatgacttagaaatgagttattttgcc

SEQ ID NO: 437825 - DNA, 120 bp, Artificial Sequence
  ENSG00000153246_70 (sequence is synthesized)
ccatgttcatattctgaattaatatgtattatacagtggaacagctggagtgctactttcatttgaaaatttatctcatccactgcctgactattgtcagagaacaagctgtagaaaaag

SEQ ID NO: 437826 - DNA, 120 bp, Artificial Sequence
  ENSG00000153246_71 (sequence is synthesized)
tctggtgaaagcaaagtgaagcatgtgttgccaagaacctaacatcttatgttatccagaagaaagtcccaaggcttgatttatcttagatttctatgtgagttgtgaggatgagtatta

SEQ ID NO: 437827 - DNA, 120 bp, Artificial Sequence
  ENSG00000153246_72 (sequence is synthesized)
acaagcttatttgaactgaaaaatgaattcagaccttttctgaagttttttttatttggctcattggtttgacaacaaggattgactttacccattaagttttatgatgaacattttgta

SEQ ID NO: 437828 - DNA, 120 bp, Artificial Sequence
  ENSG00000153246_73 (sequence is synthesized)
ttaattgaatgaactaaatctgctgctcttgtgttctgattaaagcttgtaatagggtaaaggcattttaatagaaaaatagtattgactgaactataatgaagtgatattttacttttc

SEQ ID NO: 437829 - DNA, 120 bp, Artificial Sequence
  ENSG00000153246_74 (sequence is synthesized)
ccagccttcatttgtatatcaggtaaagcaagatgcctgtaagtgaaagagtaacaggcataatgaacagttatttgaagagtcttagtaaagccttttaattttacttgtaggaaattg

SEQ ID NO: 437830 - DNA, 120 bp, Artificial Sequence
  ENSG00000153246_75 (sequence is synthesized)
acatgaatcattctaatgactgggtaacaaatcactttgcaagtagggtgtttccacttctatgctttaaaaaaaactgaaggagaacataatcaagcagttggttgatatagaaaataa

SEQ ID NO: 437831 - DNA, 120 bp, Artificial Sequence
  ENSG00000153246_76 (sequence is synthesized)
tttttaatgtagaatcactgattttttggcacctatgagaaaggaattcaagtaatagagggatattgttataacaaacctccttttattcccatctacttatttatatgaacaaagttt

SEQ ID NO: 437832 - DNA, 120 bp, Artificial Sequence
  ENSG00000153246_77 (sequence is synthesized)
ctatgttaagataagttagagagtgctgtggaaacaaaccctgtaatactagtggttaaaaacaaaactcagaagttaatttattgatcatgcgaagcctgctatggtcaggacacttgc

SEQ ID NO: 437833 - DNA, 120 bp, Artificial Sequence
  ENSG00000153246_78 (sequence is synthesized)
ctccaagcagtaactcacagatccaggctgtgtcctacctccagaacatggggcttccagtgctgctatggcactagagaactgttaagttcccaggtttaggaagaaacacgtggcact

SEQ ID NO: 437834 - DNA, 120 bp, Artificial Sequence
  ENSG00000153246_79 (sequence is synthesized)
tccactcgcgtgtcattggctggaactagtcacatgacctaacctaactgaaaggaaatccaggaagtcttctgctttgtgtgctcaggaaagagaggataagggactacagacagcacc

SEQ ID NO: 437835 - DNA, 120 bp, Artificial Sequence
  ENSG00000153246_80 (sequence is synthesized)
agcaattgctaccagagtttctcaacatgtatagctacaaaaaaagaagagagagaacagaattgatgctgaaccttgatttatactagcagtttttaatactaattaatttttatctat

SEQ ID NO: 437836 - DNA, 120 bp, Artificial Sequence
  ENSG00000153246_81 (sequence is synthesized)
gatatatccatttcattaacagatccatttgctatcattttagtttgacatatactatcttaatctttgtaacatatttattttgttctgatcaattgtatactaacaataattgaaatg

SEQ ID NO: 437837 - DNA, 120 bp, Artificial Sequence
  ENSG00000153246_82 (sequence is synthesized)
tgtatactaacaataattgaaatgacaactcaatatagaagaaaatgtgtaatacttagagcctatgttcacagggacttcttaaaaaataattttaggctgggcgcggtggctcacgcc

SEQ ID NO: 437838 - DNA, 120 bp, Artificial Sequence
  ENSG00000153246_83 (sequence is synthesized)
aaaaaaaaaaaaaaaattaatttatatacatatttttactgcaggaaaatatgacaaggtaatgaataaaatatttcacaaattaaagtatatctcattaggataaaattctgtggggga

SEQ ID NO: 437839 - DNA, 120 bp, Artificial Sequence
  ENSG00000153246_84 (sequence is synthesized)
gggagttggaatggaaatacaagattgaaagaaagtaatatctctgactgctgaagaggttatttctatttttaaatagattatgatagaattcaaattgttgtagtatctccagtcaaa

SEQ ID NO: 437840 - DNA, 120 bp, Artificial Sequence
  ENSG00000153246_85 (sequence is synthesized)
ggaacttaggcttcttgagaaagtggttgattgcaggtctaaggcaggaaaatacaagatgaaactggaatatcttgtgatggcagaaaataaggaggtgctcacaaaaagatggcacat

SEQ ID NO: 437841 - DNA, 120 bp, Artificial Sequence
  ENSG00000153246_86 (sequence is synthesized)
gtctgaaggctacaggaaccaacctgaaggagctctccagtggaaatgctggaacaatttgagcaaacaataaaaaattataatattggattataacccacacaataaatatctgtgtgt

SEQ ID NO: 437842 - DNA, 120 bp, Artificial Sequence
  ENSG00000153246_87 (sequence is synthesized)
ccatactgatgtaaacaattgaatgagtgaatgaatgaatgaaaagaagaaacagttcttctccccagtaaattccaattgataaatgtagaagaaatgggagaaacaaaaatcactatc

SEQ ID NO: 437843 - DNA, 120 bp, Artificial Sequence
  ENSG00000153246_88 (sequence is synthesized)
aggaaaacacaacagtaataattgttggcaagacctaccagttggtgcaaaagttagtgggtgaatgtttgaggaaaaacagaatatttgcataaccttagagtattttccccaaaataa

SEQ ID NO: 437844 - DNA, 120 bp, Artificial Sequence
  ENSG00000153246_89 (sequence is synthesized)
tcactaattacaaagagaaagtaataactttacagtagagaaacttctttaatcaagggatcaaggttaacagaagcagtaataagccacatcagcatcatgtaccccctggtatggcat

SEQ ID NO: 437845 - DNA, 120 bp, Artificial Sequence
  ENSG00000153246_90 (sequence is synthesized)
tgagaagggcacatgacttctttggtatcctccccaaaatgcataatctcaatcatgaaaaaacattagacaaatccaagttgagggacattccacaagataaatgatcacttcaaaagt

SEQ ID NO: 437846 - DNA, 120 bp, Artificial Sequence
  ENSG00000153246_91 (sequence is synthesized)
gtcctggtcatgaaagataaggaaagattgaggaaatgtcaaggattggaggacactaaagagacatgacaactacgtgcaagttgaaatcctcaaatggatcatggaacagaaaatggt

SEQ ID NO: 437847 - DNA, 120 bp, Artificial Sequence
  ENSG00000153246_92 (sequence is synthesized)
cattatgggaaaatgggaaagtaaaataaagtctatggtttaattaatagtattgtaccagtattagtttctttgttttgatgattataccatggttttatgagatgtaccattagaaga

SEQ ID NO: 437848 - DNA, 120 bp, Artificial Sequence
  ENSG00000153246_93 (sequence is synthesized)
agctgaaggaggctgtacaggaactctctggactaagttggcaatttttctgtaaacctaaaatcatttcaatataaaaagttaacattttgctatgatattagacaccactggatatat

SEQ ID NO: 437849 - DNA, 120 bp, Artificial Sequence
  ENSG00000153246_94 (sequence is synthesized)
taaaagggtgataaggcacttttatttttacatgttgttatttataatattctgaaaattgcatcctaattataaaaaattttggctgtcaacttagaaattcgtgaagcaatatgcctt

SEQ ID NO: 437850 - DNA, 120 bp, Artificial Sequence
  ENSG00000153246_95 (sequence is synthesized)
ctttcatgattcttttaacaattttgtatgctagccaaaaagtttgaggaccactgctatatgacattttttctctcatgtctcagatgagaagcagggcaaaaccctgtgtgtctccaa

SEQ ID NO: 437851 - DNA, 120 bp, Artificial Sequence
  ENSG00000153246_96 (sequence is synthesized)
cttacctaacacaccatccgctgtaggattaggagccagacacgtcttgctgcaggccatgctcacttccatctgctctcttttccctgcattcttcttttgtgtcacttccctgacttg

SEQ ID NO: 437852 - DNA, 120 bp, Artificial Sequence
  ENSG00000153246_97 (sequence is synthesized)
tcagtacttctaattctcatagtcctgctatcccctacaacctcgtgccttagtattaatagggtacagcagggaaaaactcacttagtttccattttgttcttggagaagaaaaatttg

SEQ ID NO: 437853 - DNA, 120 bp, Artificial Sequence
  ENSG00000153246_98 (sequence is synthesized)
gagacatttccaaaatggcatgtacatcataattcttattgccaacatttataagaaactttgactgtagtgattatcaagatacatgcttggaatatttattccctctttccccacctt

SEQ ID NO: 437854 - DNA, 120 bp, Artificial Sequence
  ENSG00000153246_99 (sequence is synthesized)
tcaaaataaggatttagagcaggagttggcagggccaaatccagcctgcagcctattttggaaataaagttattgggatgctgccatccccattcactcacatactgtgcatgactgctt

SEQ ID NO: 437855 - DNA, 120 bp, Artificial Sequence
  ENSG00000153246_100 (sequence is synthesized)
tcatgcttccatgacagagctgagtggttgcaacagagaccgaatggcctgcaaagcctaaaatatttactttctggacccttacaggaagtttgccaacccctgatttagaaagtgaaa

SEQ ID NO: 437856 - DNA, 120 bp, Artificial Sequence
  ENSG00000153246_101 (sequence is synthesized)
acctaaatggggaagtcttacatactttaacgtatcttagcaagcactgttatgttaatgtatatggacagcacttaaaatatatcaataaacaattatgatcagtaaacatttatttag

SEQ ID NO: 437857 - DNA, 120 bp, Artificial Sequence
  ENSG00000153246_102 (sequence is synthesized)
agcctattgtggcccagagagtgtcctgtgctcagaggctataaataccaataacaccccatctctcccctcatggaactcagtctcaggggagaggaatatgtaaatgataagtgcaat

SEQ ID NO: 437858 - DNA, 120 bp, Artificial Sequence
  ENSG00000153246_103 (sequence is synthesized)
gcaatgtgacataaataatatcaagaagaagagaatcagaaaaaaaaggagaggggactgattaattctgtcagaagtagagaaaggcttaacaagataagtgatatgtattaaattgta

SEQ ID NO: 437859 - DNA, 120 bp, Artificial Sequence
  ENSG00000153246_104 (sequence is synthesized)
ggaaatgttagataaacagctttctttagtattttttgagttagaaagcaagtttttagcttggggtcagaatatttttagagaaaaagtttaaaatgtgcctaaatctgaaattctgga

SEQ ID NO: 437860 - DNA, 120 bp, Artificial Sequence
  ENSG00000153246_105 (sequence is synthesized)
tttaaaaaagtgaaaatctgcatgttcctctaatacctaatgacgaattctaattgcagaaggatgccaataactaaaaccacaaaatgaaccctatgtataccggtgaccttctttact

SEQ ID NO: 437861 - DNA, 120 bp, Artificial Sequence
  ENSG00000153246_106 (sequence is synthesized)
cagaattaattaacacaagcacttgtttcttgcagagcactttgctgtaatttagaacaaattaagggaaaaaatcattcaagtgctgttttcttcacaccatgaagtaagcatgatgga

SEQ ID NO: 437862 - DNA, 120 bp, Artificial Sequence
  ENSG00000153246_107 (sequence is synthesized)
ccaaagttaactaatttaaaatattatcatccatttcttgtaattatgaatagcaataccatcttttttcttcaaaaaaaaaaaaagacatcatgatctatgctattttcaacttgtttc

SEQ ID NO: 437863 - DNA, 120 bp, Artificial Sequence
  ENSG00000153246_108 (sequence is synthesized)
ctgtgcttctattaatggaaattgatttttcaagattaatgtaaaatgtgtttctgtttctcccattaagtctcttatttatattagatccaatgtatatgttcctggatatttttcaaa

SEQ ID NO: 437864 - DNA, 120 bp, Artificial Sequence
  ENSG00000153246_109 (sequence is synthesized)
taaatatatttttaatataatacagcaaattgtaaattgttaaaggaccatttataatgttttctccttgccctccctagcactgaaactgtggttttattattgtcttcacactgttgt

SEQ ID NO: 437865 - DNA, 120 bp, Artificial Sequence
  ENSG00000153246_110 (sequence is synthesized)
ttgtgaattaacttgagctccttgagttcctacttctaagagattatttaaactttactttttaccttcttagtatacagagcttggtaggagctggaaacccgactcacagatttagga

SEQ ID NO: 437866 - DNA, 120 bp, Artificial Sequence
  ENSG00000153246_111 (sequence is synthesized)
aacagtgggttcttgtccctgtggacatcagaacttgggggacggagagatagagaaccagaaggcagaacaaggaaaaactcaaagaaaggaatggggaggaatggaaacgtaacagga

SEQ ID NO: 437867 - DNA, 120 bp, Artificial Sequence
  ENSG00000153246_112 (sequence is synthesized)
catgttgcctcagtgagtcaccaagggctttggagttcttagcccaaaatgtggttctgtggaggctgaggacaaacttcaggacagagcatgccttaatcgatgtgctaagccactggc

SEQ ID NO: 437868 - DNA, 120 bp, Artificial Sequence
  ENSG00000153246_113 (sequence is synthesized)
tcgggcagtccttaagcaagggctcctctgatcagacaaggaattgtttccttcccttttactccagatgacacctaaaggtgcaaaagaaaaccatctctgcacactaccaaacagaca

SEQ ID NO: 437869 - DNA, 120 bp, Artificial Sequence
  ENSG00000153246_114 (sequence is synthesized)
gtgcgtgaacgaagcagaccctcctgaccacagccaaggactggagagcttggtgaaactggtgctcaaggtagaaattccctgcgattgctactgcaacttatactaaacgtcccaagt

SEQ ID NO: 437870 - DNA, 120 bp, Artificial Sequence
  ENSG00000153246_115 (sequence is synthesized)
gaagtgaagggagaaaaaagagatattaagcaagaaggcccacttgtttatgcattgctttagaagataatctgtaattgcatattaataagtaaagttaacgttacacttaaataataa

SEQ ID NO: 437871 - DNA, 120 bp, Artificial Sequence
  ENSG00000153246_116 (sequence is synthesized)
cataaataaatacatggttgttaaagctgatgataatggcatctgtgagccagaaaactctccttggatacgttttctgagaaaaaatagcatgaagcctaaagccatttcttccaaaaa

SEQ ID NO: 437872 - DNA, 120 bp, Artificial Sequence
  ENSG00000153246_117 (sequence is synthesized)
caacattgcaacccttttctttacccttttgtcttttaaaataatcccagaacaccaaaaataaaaacaaacaataacatgtttatctttacccttagcaggaagatgcttggctggaac

SEQ ID NO: 437873 - DNA, 120 bp, Artificial Sequence
  ENSG00000153246_118 (sequence is synthesized)
tttgtgttcacagacttagtcattgcataccaaaaccatatttactggaaaatatcccaggtttctaaatgttataaaagcacaatagagttatggaaatgtttccatgatgaactgtgc

SEQ ID NO: 437874 - DNA, 120 bp, Artificial Sequence
  ENSG00000153246_119 (sequence is synthesized)
tgttaggattcttatttgctactcataaaaaccagagtttgtaataaaatggaagcatggtattcttttctttatgtaattgatggttattgaaaggtacttgtgaagaaaattatttta

SEQ ID NO: 437875 - DNA, 120 bp, Artificial Sequence
  ENSG00000153246_120 (sequence is synthesized)
attggtatggagagcttgttacagtggtgtaccaaggttgggggtgagcctaccctttcgaggaggagtattttaatcaccaacattgtttagaatttcaagcagatggtgataataaaa

SEQ ID NO: 437876 - DNA, 120 bp, Artificial Sequence
  ENSG00000153246_121 (sequence is synthesized)
agcagaccaacttttagttagctgtattgttagttttaaattattttcagacaatacactattgcccacacatgggatggactctcctaccgcccctacccccttggtacatggctggct

SEQ ID NO: 437877 - DNA, 120 bp, Artificial Sequence
  ENSG00000153246_122 (sequence is synthesized)
tggtattaaagaaattcactgtaaaatctttttagaaagtgagccattttgtaatgatgaagatgttaggacttcaaaggatttttctttactcgattagttttgtttatcaaatgattt

SEQ ID NO: 437878 - DNA, 120 bp, Artificial Sequence
  ENSG00000153246_123 (sequence is synthesized)
ctttaaatcgattatatatatatatggaatatttcaaaattcaaactgtcacattaagaaacatgataacctaaatgacctaaataagaacactgtacctaaaataaagaggcaacttta

SEQ ID NO: 437879 - DNA, 120 bp, Artificial Sequence
  ENSG00000153250_0 (sequence is synthesized)
agatgccgcctggcaccaagcgcagccgccgctgccgcactttccacttgtattgatcacctctcagccccgcgcagccggctcgcccgagcggaccgcggccagcgcgccagcccttgg

SEQ ID NO: 437880 - DNA, 120 bp, Artificial Sequence
  ENSG00000153250_1 (sequence is synthesized)
cagccccggagcagtcgggctccgggaggaaactccttgggagcgccctgtccggggtgccctctgcgctctgcagtgtctttctttctgcctgggaggaggaggaggaggaggaagagg

SEQ ID NO: 437881 - DNA, 120 bp, Artificial Sequence
  ENSG00000153250_2 (sequence is synthesized)
gaggaagaggaggaggaggaggaggacgtctggtcccggctgggaggtggagcagcggcagcagcagcagccgccgccgccgccgccgctgccgccgccgccggaaagggagaggcagga

SEQ ID NO: 437882 - DNA, 120 bp, Artificial Sequence
  ENSG00000153250_3 (sequence is synthesized)
ccggaaagggagaggcaggagagcccgagacttggaaaccccaaagtgtccgcgaccctgcacggcaggctcccttccagcttcatgggcaaagtgtggaaacagcagatgtaccctcag

SEQ ID NO: 437883 - DNA, 120 bp, Artificial Sequence
  ENSG00000153250_4 (sequence is synthesized)
tacgccacctactattacccccagtatctgcaagccaagcagtctctggtcccagcccaccccatggcccctcccagtcccagcaccaccagcagtaataacaacagtagcagcagtagc

SEQ ID NO: 437884 - DNA, 120 bp, Artificial Sequence
  ENSG00000153250_5 (sequence is synthesized)
aactcaggatgggatcagctcagcaaaacgaacctctatatccgaggactgcctccccacaccaccgaccaggacctggtgaagctctgtcaaccatatgggaaaatagtctccacaaag

SEQ ID NO: 437885 - DNA, 120 bp, Artificial Sequence
  ENSG00000153250_6 (sequence is synthesized)
gcaattttggataagacaacgaacaaatgcaaaggttatggttttgtcgactttgacagccctgcagcagctcaaaaagctgtgtctgccctgaaggccagtggggttcaagctcaaatg

SEQ ID NO: 437886 - DNA, 120 bp, Artificial Sequence
  ENSG00000153250_7 (sequence is synthesized)
gcaaagcaacaggaacaagatcctaccaacctctacatttctaatttgccactctccatggatgagcaagaactagaaaatatgctcaaaccatttggacaagttatttctacaaggata

SEQ ID NO: 437887 - DNA, 120 bp, Artificial Sequence
  ENSG00000153250_8 (sequence is synthesized)
ctacgtgattccagtggtacaagtcgtggtgttggctttgctaggatggaatcaacagaaaaatgtgaagctgttattggtcattttaatggaaaatttattaagacaccaccaggagtt

SEQ ID NO: 437888 - DNA, 120 bp, Artificial Sequence
  ENSG00000153250_9 (sequence is synthesized)
tctgcccccacagaacctttattgtgtaagtttgctgatggaggacagaaaaagagacagaacccaaacaaatacatccctaatggaagaccatggcatagagaaggagaggtgagactt

SEQ ID NO: 437889 - DNA, 120 bp, Artificial Sequence
  ENSG00000153250_10 (sequence is synthesized)
gctggaatgacacttacttacgacccaactacagctgctatacagaacggattttatccttcaccatacagtattgctacaaaccgaatgatcactcaaacttctattacaccctatatt

SEQ ID NO: 437890 - DNA, 120 bp, Artificial Sequence
  ENSG00000153250_11 (sequence is synthesized)
gcatctcctgtatctgcctaccaggtgcaaagtccttcgtggatgcaacctcaaccatatattctacagcaccctggtgccgtgttaactccctcaatggagcacaccatgtcactacag

SEQ ID NO: 437891 - DNA, 120 bp, Artificial Sequence
  ENSG00000153250_12 (sequence is synthesized)
cccgcatcaatgatcagccctctggcccagcagatgagtcatctgtcactaggcagcaccggaacatacatgcctgcaacgtcagctatgcaaggagcctacttgccacagtatgcacat

SEQ ID NO: 437892 - DNA, 120 bp, Artificial Sequence
  ENSG00000153250_13 (sequence is synthesized)
atgcagacgacagcggttcctgttgaggaggcaagtggtcaacagcaggtggctgtcgagacgtctaatgaccattctccatatacctttcaacctaataagtaactgtgagatgtacag

SEQ ID NO: 437893 - DNA, 120 bp, Artificial Sequence
  ENSG00000153250_14 (sequence is synthesized)
aaaggtgttcttacatgaagaagggtgtgaaggctgaacaatcatggatttttctgatcaattgtgctttaggaaattattgacagttttgcacaggttcttgaaaacgttatttataat

SEQ ID NO: 437894 - DNA, 120 bp, Artificial Sequence
  ENSG00000153250_15 (sequence is synthesized)
gaaatcaactaaaactatttttgctataagttctataaggtgcataaaacccttaaattcatctagtagctgttcccccgaacaggtttattttagtaaaaaaaaaaaaacaaaaaacaa

SEQ ID NO: 437895 - DNA, 120 bp, Artificial Sequence
  ENSG00000153250_16 (sequence is synthesized)
aaaaagaaaaaaaaaaagaaaagaaaacttcaattttctgggtatgcacaaagaccatgaagacttatccaagtgcatgaccggatttttgtggttttgttcattttgtgtttaatttgt

SEQ ID NO: 437896 - DNA, 120 bp, Artificial Sequence
  ENSG00000153250_17 (sequence is synthesized)
agtccgacttcacccatggtgttctgtgcttgcagtgcgagtgttgctgtaattcagtgttgccgtcagtgtctcttttcttagctttctgtctttctttcaacgtagtgtgaagtgtct

SEQ ID NO: 437897 - DNA, 120 bp, Artificial Sequence
  ENSG00000153250_18 (sequence is synthesized)
tatccttttctatgaattccaatttgccttaactcttttgatgctgtagctgtttcagtaaaagttagttcaaactaatgatgtagaatgctttgaccaaatgagctggtctattatgcc

SEQ ID NO: 437898 - DNA, 120 bp, Artificial Sequence
  ENSG00000153250_19 (sequence is synthesized)
ttgtaaaacagcagcatagggcttttaaaaggtagtcaataaaagttgctgaaattttggcttttttaaatatgtagtaggtgtttttaatgatttttcacataatgtgtaaggtagtga

SEQ ID NO: 437899 - DNA, 120 bp, Artificial Sequence
  ENSG00000153250_20 (sequence is synthesized)
aatgcaagaagggaaaaatgttttgtgtgaaacacattttctgactggggaacttttattagggtaaattgtttgtaaggctgtacgccaacagtttcctctgatagtttgactgattta

SEQ ID NO: 437900 - DNA, 120 bp, Artificial Sequence
  ENSG00000153250_21 (sequence is synthesized)
ggatatctgctgtatgatgcaatgtaaagtcttttttgccttttttcaggaaaaaaaaaaagctaacttgatgtactagatttagtgtaggtagtgttggggttggggatgggggtgggg

SEQ ID NO: 437901 - DNA, 120 bp, Artificial Sequence
  ENSG00000153250_22 (sequence is synthesized)
gaggggagtcactgaatgttttgtccttcctttatactaatgatagtgctttagaatgagaattatgcctgaaatctggcaaaccgaaaaatgttgctattgcaacaaagtggcaaaagc

SEQ ID NO: 437902 - DNA, 120 bp, Artificial Sequence
  ENSG00000153250_23 (sequence is synthesized)
taaaagtaaggatttatcttcaaacataagctgagataacgaatagaagcaaaacgattggctactagctctctctctctctctctattaggtaaatttgaaaaataaaaatgacttggc

SEQ ID NO: 437903 - DNA, 120 bp, Artificial Sequence
  ENSG00000153250_24 (sequence is synthesized)
acttttaaaggtaacttcaccaaagaccgaagagccagtaaccagtagctccaacttgtctcagcatcacatcttctgtgctctttatttttgccggaccagtttgcggttaggagaatg

SEQ ID NO: 437904 - DNA, 120 bp, Artificial Sequence
  ENSG00000153250_25 (sequence is synthesized)
tgccttttttgtacctttgcatttaggttttataattttaattgatgtatggacacacacaaacaaaaaagcatgaaggaagatttggatccaagcagtgccacactttacatcatcact

SEQ ID NO: 437905 - DNA, 120 bp, Artificial Sequence
  ENSG00000153250_26 (sequence is synthesized)
acaagtgttcaagtgtaaagaaaaccaattttgaaactatgaaattcctgattcataaatacacagttatttctactttagtacatataagataattcactgttattaaagctcttttat

SEQ ID NO: 437906 - DNA, 120 bp, Artificial Sequence
  ENSG00000153250_27 (sequence is synthesized)
taaggcaattgcatatgttttaaaagcaatggtaaattaagttgtcttccaaaactgtgtacttgtctggtcagctgtgtatgatcagttatctacctcagagtctattttcttttgtgc

SEQ ID NO: 437907 - DNA, 120 bp, Artificial Sequence
  ENSG00000153250_28 (sequence is synthesized)
tgggacaggttgctggccctccctgtttccacagaccaaatcctcctagctcaggagctagggctaagcagttatttctttcaagtattttttagttcttaaattttatgcttgtatttg

SEQ ID NO: 437908 - DNA, 120 bp, Artificial Sequence
  ENSG00000153250_29 (sequence is synthesized)
atgatagatgtcagtgacatttcatagtttcaaaagtccttgctgctctgagaagtgtagattctagtgaaaattacatagtcataagagaaatgtgtttttgtttttgtttttgtttca

SEQ ID NO: 437909 - DNA, 120 bp, Artificial Sequence
  ENSG00000153250_30 (sequence is synthesized)
tttttttaaagttgtggtattattggttctatgctccctggaatattactgctttgtgaaagtccagactgaacgcagcaccctctgtgtacctagtacagttataaacctgggtctctc

SEQ ID NO: 437910 - DNA, 120 bp, Artificial Sequence
  ENSG00000153250_31 (sequence is synthesized)
actacttgatatttttgcattagttaagacagaaatttgatagctcggttagaggggaggggaaatctgctgctagaaatgtctgaactaagtgccatactcgtctgggtaagatttggg

SEQ ID NO: 437911 - DNA, 120 bp, Artificial Sequence
  ENSG00000153250_32 (sequence is synthesized)
aaacataacctctgtacataaaaaaaaaaaaatcagttaaacatcacatagtagacagccattaaattataaaaaaattaatttatgaagaaagaccttttgtacagattgaaaaaaaaa

SEQ ID NO: 437912 - DNA, 120 bp, Artificial Sequence
  ENSG00000153250_33 (sequence is synthesized)
gattttcatagagatatctatatgatcaagagagttaattttttatttttgttttactagtgccacagacttgccagtggtaacttatttgtccggttcaagataactctgtagttttct

SEQ ID NO: 437913 - DNA, 120 bp, Artificial Sequence
  ENSG00000153250_34 (sequence is synthesized)
ttcctaggacttgttgttaaacgccaaaagacatttttgaactgtacatttgatcagattgttagcttttctgttttatttcttttgagaacctttgaataaaaaacatctgaaatttta

SEQ ID NO: 437914 - DNA, 120 bp, Artificial Sequence
  ENSG00000153250_35 (sequence is synthesized)
tggccggcggccgtcgcctggtgtgcgcgtctggatccgctggtggcccggcttttcgaccccttctccaagggcctcgccctcagtctctggtcccagcccaccccatggcccctccca

SEQ ID NO: 437915 - DNA, 120 bp, Artificial Sequence
  ENSG00000153250_36 (sequence is synthesized)
atatatactgcattataagagaagtttataagaagtatctgtggactctcagtgtcacaacaataaaatgggtttcaagttttaacttcttaaatactttttgagtcaatattaacatca

SEQ ID NO: 437916 - DNA, 120 bp, Artificial Sequence
  ENSG00000153250_37 (sequence is synthesized)
tcagactggctacatatcaaaatgaattggagcattttctcaatagaatttgactttatgggcatatgagaagtaaaatatgaatttttttaaaaaaaacttatggctagatatttttca

SEQ ID NO: 437917 - DNA, 120 bp, Artificial Sequence
  ENSG00000153250_38 (sequence is synthesized)
agttatttctacaaggatactacgtgattccagtggtacaagtcgtggtgttggctttgctagatttttttttttttttgtgagaaataaaacctaggccaggcatggtggctcatgcct

SEQ ID NO: 437918 - DNA, 73 bp, Artificial Sequence
  ENSG00000153250_39 (sequence is synthesized)
gtaatcccagcattttgggaggccaggcgggcagagttcgaaacctacctggccgctggtggaaggcacctgt

SEQ ID NO: 437919 - DNA, 120 bp, Artificial Sequence
  ENSG00000153250_40 (sequence is synthesized)
gctcccttccagcttcatgggcaaagtgtggaaacagcagatgtaccctcagtacgccacctactattacccccagtatctgcaagccaagtttggaaggcattcgggaataccaagtga

SEQ ID NO: 437920 - DNA, 120 bp, Artificial Sequence
  ENSG00000153250_41 (sequence is synthesized)
aaaggaagagtgaagaacagaaaaatgttagtgggatggcaaacactgtgaacattgctgtttctagtgggccagaaaaatcagtctctggtcccagcccaccccatggcccctcccagt

SEQ ID NO: 437921 - DNA, 120 bp, Artificial Sequence
  ENSG00000153250_42 (sequence is synthesized)
acttgcggaccatgaatctctgctacatttttatgtgtcttaaaattttgagcgtttatgaaatttgagtcaaatattatgcagcttggatacccaatttagtatgagctgctttgtatt

SEQ ID NO: 437922 - DNA, 120 bp, Artificial Sequence
  ENSG00000153250_43 (sequence is synthesized)
tggcagagcaatttatgtataggagaatgtaaagcaaaggaaaatgtttgtcagtggtcagtccttggaatcatagcattttggattggaatgaacccaaacacttccttcaccaagggg

SEQ ID NO: 437923 - DNA, 120 bp, Artificial Sequence
  ENSG00000153250_44 (sequence is synthesized)
ccctgcttttggacaccatgtgtcccaaaaattgaaacttaagataattgccgttagatataatacagaataggtgtgtacccttgcttttgtttattcttcagcaggaactgataaaag

SEQ ID NO: 437924 - DNA, 120 bp, Artificial Sequence
  ENSG00000153250_45 (sequence is synthesized)
aacaagtataaacatggtaatacataaagatgtgtctctagtaggtagcattaagtgagcaatgcagctgacatttgaggtaaaaatataaaagcaaaaaggtgacttcctgtttaggtt

SEQ ID NO: 437925 - DNA, 120 bp, Artificial Sequence
  ENSG00000153250_46 (sequence is synthesized)
catgaacccagtagtgtacatgcatttctcctcctgtgtcagaaaacctctaacaggattacttcctggacccagataggaaccttataatggagttcagttgcagacatgtgggagcag

SEQ ID NO: 437926 - DNA, 120 bp, Artificial Sequence
  ENSG00000153250_47 (sequence is synthesized)
agttcccttttgttgaccatcaggatcctgtgtgactaaatttttgtgtattcttgattttaaaacaattgaattagatgttgtagtcctaatttctggggttagaggactacaatatgt

SEQ ID NO: 437927 - DNA, 120 bp, Artificial Sequence
  ENSG00000153250_48 (sequence is synthesized)
aatctaatagttgtgttattttaacttctataagcctcagtttcctcatctttaaaatggggataataatagtttctatctcataggcttgagagaattatgaaaaccaaatgagactgt

SEQ ID NO: 437928 - DNA, 120 bp, Artificial Sequence
  ENSG00000153250_49 (sequence is synthesized)
ataaagagcccagccaaggacctcacatatcattatcactcagttaatgttagctatgattattatcattaatatgcatgattaggtggctgataataagagtatattagttatacgttt

SEQ ID NO: 437929 - DNA, 120 bp, Artificial Sequence
  ENSG00000153250_50 (sequence is synthesized)
aaataatgaattggccaacataagcaatgtcatataactaattctgcctaaaaacataaaaatggttttgaataacagaagtgattagatacgctaaaactgaggattggcattatcatt

SEQ ID NO: 437930 - DNA, 120 bp, Artificial Sequence
  ENSG00000153250_51 (sequence is synthesized)
cacagtctcctatgcttctaggctcttacagcctcctttccctgagttgtcactcgttttcttttcttttttctctctgggttcttatgttacttattctggtgcttcattctgctgggc

SEQ ID NO: 437931 - DNA, 120 bp, Artificial Sequence
  ENSG00000153250_52 (sequence is synthesized)
gtagtattgactaatttaatgcctctttagttgttttggatttaggattcctatcctttctttgactgtataagactcagtgagatctgctctagtgcacttccctaattaacaattcat

SEQ ID NO: 437932 - DNA, 120 bp, Artificial Sequence
  ENSG00000153250_53 (sequence is synthesized)
gtgtctgctatgaaaaggtagtctttcttaactgtctgaacttggaaacctctgtcatttatatgtcactgaaaataggggcaagtgtaagttattctcaggcaaatgaaaggttgtaag

SEQ ID NO: 437933 - DNA, 120 bp, Artificial Sequence
  ENSG00000153250_54 (sequence is synthesized)
tattaatttgaatttatgttgctatagatattacagctattaacacatttctccaacacctctttttccctcttataatataaaaccagtgtgcatttggccacagaaccattttgtaca

SEQ ID NO: 437934 - DNA, 120 bp, Artificial Sequence
  ENSG00000153250_55 (sequence is synthesized)
ataaaaattaggagatctgtgtcagtaatagatttgatatagctaactagaaataacatattatttcagaggccttatttcctctcctgggcattctgtatttctctaagatacatatgg

SEQ ID NO: 437935 - DNA, 120 bp, Artificial Sequence
  ENSG00000153250_56 (sequence is synthesized)
agttgtttgcaaaatgttgcttgtgtgtgtgcaattaagtggggaaaaatgttctatttccctaattaggttttcagagggctccatgaccctaaagaggttaagaaccaatagtaaaga

SEQ ID NO: 437936 - DNA, 120 bp, Artificial Sequence
  ENSG00000153250_57 (sequence is synthesized)
gtttacaaaacattattattcccattttataattagaaaattgaggaatagaaattgacagcagctgatttgctgcttaagaaagaaaattagatgtcatagttccctaatcctgtaatg

SEQ ID NO: 437937 - DNA, 120 bp, Artificial Sequence
  ENSG00000153250_58 (sequence is synthesized)
ctataagctattagattattaagaccactgaagcatataaaaaatgggggcatctggcccaaattagggtctgtagggagttgtttgccttcccatcatatatccagtgagggccctgca

SEQ ID NO: 437938 - DNA, 120 bp, Artificial Sequence
  ENSG00000153250_59 (sequence is synthesized)
ctcatgttggagtgggcctttctccactaaaccaccataagcttatgcaattggatttgagaaattggcagctgcaagaaaccaccaaccccaatggggaaaggctacagtccagataac

SEQ ID NO: 437939 - DNA, 120 bp, Artificial Sequence
  ENSG00000153250_60 (sequence is synthesized)
tgaaatgttaacaaggcagaagcacttaactttggtctgccttaggtggcaaaggaaaccagagaaaacaagtatcggggctctgctatcaaggtaaatcgcaatacattcttcccccat

SEQ ID NO: 437940 - DNA, 120 bp, Artificial Sequence
  ENSG00000153250_61 (sequence is synthesized)
gactcttccccatatcctctctgttgaacctctgaagttaacaataggggataaaatgcaggagggttttgttgttaagaattggaaactgaaacttaataaaattacttagactctgga

SEQ ID NO: 437941 - DNA, 120 bp, Artificial Sequence
  ENSG00000153250_62 (sequence is synthesized)
aagctctgggcatcaagaaatgggctgatatgtttttctcttgagtggcagactacacatgctttctttcctgccacaaaacctgactctcacatctatttctcaattcagagggtctac

SEQ ID NO: 437942 - DNA, 120 bp, Artificial Sequence
  ENSG00000153250_63 (sequence is synthesized)
tgtgtggatgcccatttgactgtagatgtcaaaatctagttactgaagtttaatttccttaatctgaatttcagatttttattttctgcactaagtagaaattgttgaccacaatacaag

SEQ ID NO: 437943 - DNA, 120 bp, Artificial Sequence
  ENSG00000153250_64 (sequence is synthesized)
atttctaaaattaatgtcctagatatgaaagagaaattgaatttggttttttgtattaaataagcacatactttaagggttagcttctaataagatgtgctggaattaatcgtcattcat

SEQ ID NO: 437944 - DNA, 120 bp, Artificial Sequence
  ENSG00000153250_65 (sequence is synthesized)
ctgtaattctaaagcacctagttcataccttgattgttaacacttttcactatttgagttgttgctgtgtttatctcccttgcatagatagtaaatttcttgagggtggggcccagtctg

SEQ ID NO: 437945 - DNA, 120 bp, Artificial Sequence
  ENSG00000153250_66 (sequence is synthesized)
tttcgcctttttctctttgttgcctgatactcaacaattacttcttgagtgggcaaatagaaattgtttctaaataatcatttcatcctgttcagagtgaccagtttgccaagaattcta

SEQ ID NO: 437946 - DNA, 120 bp, Artificial Sequence
  ENSG00000153250_67 (sequence is synthesized)
actgccttaatctttttaatcattgatagtattgtttccttgttttctttctgtagatttttaacatgattaaaaagagttctaaagaaataggtaagctttacaatgaaaatcaatatt

SEQ ID NO: 437947 - DNA, 120 bp, Artificial Sequence
  ENSG00000153250_68 (sequence is synthesized)
taatcgtggccaaggcatctagtcttgttgaaatattaaaatcagtgattttatgaatttaagattaatcattttgtctaaagagaatgctttatactgaagccaaatgtatactctccc

SEQ ID NO: 437948 - DNA, 120 bp, Artificial Sequence
  ENSG00000153250_69 (sequence is synthesized)
taggtggggacgcggcggcgctgctcctccgctgccgccgggagagtcggcgacgccgccagctccgcgcgcgaactcccgtccatggcacgcagggcggcggctgcccgagctgctcga

SEQ ID NO: 437949 - DNA, 120 bp, Artificial Sequence
  ENSG00000153250_70 (sequence is synthesized)
ctgctcgagtctcgcccgctgccgcgccgtacttttaggcgagtgcggaggtcgaaggcggaggggaagtcagcgcggagctgcagcccccgccggccgccgccgcgcggcgagagggag

SEQ ID NO: 437950 - DNA, 80 bp, Artificial Sequence
  ENSG00000153250_71 (sequence is synthesized)
agagggagttcccagagctgccgcggccccgggcccggccggccacctccttgcgccctccccctcgcggcgaggctgcc

SEQ ID NO: 437951 - DNA, 120 bp, Artificial Sequence
  ENSG00000153250_72 (sequence is synthesized)
atttgccttctcttcacttggggagtatcaatttgccacagagcaagcaacagcgggtggtcctaggagacttctgtgtggtctagggagaccttgacacagtcgcctaagaatggaccg

SEQ ID NO: 437952 - DNA, 120 bp, Artificial Sequence
  ENSG00000153250_73 (sequence is synthesized)
gattgtctatctaattatcaataaataacagttgtatttaagggatgccaggtacagtgataacaaaacatacattagtagttacagagcgtgtcagaatacttgcattctcagataatg

SEQ ID NO: 437953 - DNA, 120 bp, Artificial Sequence
  ENSG00000153250_74 (sequence is synthesized)
aggtgattgcaaaagtccaaaaataaagagttcattgaattttggtttatacaatcaatgtaaccatttaaaaaaatgatgataatgatagtttttcaacaagctaggtaaatggttaga

SEQ ID NO: 437954 - DNA, 120 bp, Artificial Sequence
  ENSG00000153250_75 (sequence is synthesized)
atagaatgcaaagttaagagcaaaatcccaggatatgaagttgttgatgtgctctgattgaacctgtacagaaacacacagaggctatgatctggcagtagtaccctgacattgctaaca

SEQ ID NO: 437955 - DNA, 120 bp, Artificial Sequence
  ENSG00000153250_76 (sequence is synthesized)
gtggttgtattagactggctgagttagaagcaattgttttttttttccctcctattttcctaaatatatttaatttgattttaatgactaacattttttcaaattaaataaaagaatctg

SEQ ID NO: 437956 - DNA, 120 bp, Artificial Sequence
  ENSG00000153250_77 (sequence is synthesized)
gactcagattattaatcatatctgaattgccttccctcccaggcaccaaaatgtaacttaaagttctgagaaacactgagtgaatgaagaaatgtgctcttgatcctaacaacctgatct

SEQ ID NO: 437957 - DNA, 120 bp, Artificial Sequence
  ENSG00000153250_78 (sequence is synthesized)
tgaaccagacgattatctggatagaacattgttaaacaaaatactatattgatcttattaaatataatacattgtttggtgactggagaaaacatcaactgccttttttttccagatttt

SEQ ID NO: 437958 - DNA, 120 bp, Artificial Sequence
  ENSG00000153250_79 (sequence is synthesized)
tttttaagaaagcgttttgtaaccctaggcaggcagtgataatcagtttgtttttcctatgatagctcctcctgctggactagcttgcttccagttactggaagtgaagggaaagggaag

SEQ ID NO: 437959 - DNA, 120 bp, Artificial Sequence
  ENSG00000153250_80 (sequence is synthesized)
gagaagagggacactggctttaatacagggattgttgtgaagtgaatgccaagatatcatttcccctaacgctcttaaaaaactctcaggaagagcaatttagaagatttttaggaaact

SEQ ID NO: 437960 - DNA, 120 bp, Artificial Sequence
  ENSG00000153250_81 (sequence is synthesized)
gtttatgatgccatttgcaagattgaggaaggttgtttttgcttcacattcttaaacaaactaaggtatttcctttgtaaaaagtaattacaggatcttaactcttgcctcagtttgtct

SEQ ID NO: 437961 - DNA, 120 bp, Artificial Sequence
  ENSG00000153250_82 (sequence is synthesized)
aattttgctcctgtctccaactccccagggtgccgtgttaactccctcaatggagcacaccatgtcactacagcccgcatcaatgatcagccctctggcccagcagatgagtcatctgtc

SEQ ID NO: 437962 - DNA, 120 bp, Artificial Sequence
  ENSG00000153250_83 (sequence is synthesized)
actaggcagcaccggaacagtaggtggcaaataattatcatgtgtctctgtaaacagaggagggtaaattaatgcagcctgtatcttccctatcaaatgacagcctctatgataacagat

SEQ ID NO: 437963 - DNA, 120 bp, Artificial Sequence
  ENSG00000153250_84 (sequence is synthesized)
tgggtatctctcctttacgagaatatagcacccacacgtgaccacatctagccttttatgactagtgtcatctatataactagtaccactgtccctgtggcagtgtcatgaagcgaaaga

SEQ ID NO: 437964 - DNA, 120 bp, Artificial Sequence
  ENSG00000153250_85 (sequence is synthesized)
cgaaggtaatacaagatggtaaaagcagggaattatttctcgcttatttcttcttttatggagtttgggagtattgaatcatggtcttaatattgaaatatttcaccaaagtccagggga

SEQ ID NO: 437965 - DNA, 120 bp, Artificial Sequence
  ENSG00000153250_86 (sequence is synthesized)
ctcctttgggtaatgaggttgagctggcaccagatcagcttccagatttgatgcttagcattttgctggtaagatggctaaaggattttaatttagcctctattctatagtggcttaaaa

SEQ ID NO: 437966 - DNA, 120 bp, Artificial Sequence
  ENSG00000153250_87 (sequence is synthesized)
gaacaaagggtggtgcgttttccccttatacactcaaaacctacagctgtttcttgtgaaggctaagccagggccacacatatccaatgagactgactagaaatttctcctgcctttggg

SEQ ID NO: 437967 - DNA, 120 bp, Artificial Sequence
  ENSG00000153250_88 (sequence is synthesized)
aaaggatgactgtcagtgtcagaaaagccaggctctgctgcctaatctgcagtgacctgttagaggtctaataagtcttacccctgtgggctctacctgtagaaacaatactaggtacta

SEQ ID NO: 437968 - DNA, 120 bp, Artificial Sequence
  ENSG00000153250_89 (sequence is synthesized)
gtttagggggctgctagaaaataatgaggtcctttgaggagagatcttctaaaatcacacattagtgatactgaattattgagagtgacaaacttttttatcttcacccataataaactt

SEQ ID NO: 437969 - DNA, 120 bp, Artificial Sequence
  ENSG00000153250_90 (sequence is synthesized)
tttttatcttcactttgttagcaaatccaaagaaatgtggaatttttagtttagcagattcaaaaagtagaaaacagtttaccttccatatgacatatttatatgcactatttaagcttt

SEQ ID NO: 437970 - DNA, 120 bp, Artificial Sequence
  ENSG00000153250_91 (sequence is synthesized)
gaggtgtagcccatttaaatttcttctttgagatttccaaatacattatatccatctcacaatccccccacgtactccaaattttgcatggtttaccattgcccattctgacctcattct

SEQ ID NO: 437971 - DNA, 120 bp, Artificial Sequence
  ENSG00000153250_92 (sequence is synthesized)
ggaaggattacactgttccaggttttagggagaaaggtttaccaaaccggtggccttaaatgattttcgctccttgatattatcatcttgaaggaaagctgcagtctctggtcccagccc

SEQ ID NO: 437972 - DNA, 120 bp, Artificial Sequence
  ENSG00000153253_0 (sequence is synthesized)
agaacaggaagcggaggcataagcagagaggattctggaaaggtctctttgttttcttatccacagagaaagaaagaaaaaaaattgtaactaatttgtaaacctctgtggtcaaaaaaa

SEQ ID NO: 437973 - DNA, 120 bp, Artificial Sequence
  ENSG00000153253_1 (sequence is synthesized)
aaaaaaaaaaaaaaagctgaacagctgcagaggaagacacgttataccctaaccatcttggatgctgggctttgttatgctgtaattcataaggctctgttttatcagagattatggagc

SEQ ID NO: 437974 - DNA, 120 bp, Artificial Sequence
  ENSG00000153253_2 (sequence is synthesized)
aagaaaactgaagccaagccacatcaaggtttgacagggatgagatacctgtcaaggattcatagtagagtggcttactgggaaaggagcaaagaatctcttctagggatattgtaagaa

SEQ ID NO: 437975 - DNA, 120 bp, Artificial Sequence
  ENSG00000153253_3 (sequence is synthesized)
taaatgagataattcacagaagggacctggagcttttccggaaaaaggtgctgtgactatctaaggtaattcgtatgcaagaagctacacgtaattaaatgtgcaggatgaaaagatggc

SEQ ID NO: 437976 - DNA, 120 bp, Artificial Sequence
  ENSG00000153253_4 (sequence is synthesized)
acaggcactgttggtacccccaggacctgaaagcttccgcctttttactagagaatctcttgctgctatcgaaaaacgtgctgcagaagagaaagccaagaagcccaaaaaggaacaaga

SEQ ID NO: 437977 - DNA, 120 bp, Artificial Sequence
  ENSG00000153253_5 (sequence is synthesized)
taatgatgatgagaacaaaccaaagccaaatagtgacttggaagctggaaagaaccttccatttatttatggagacattcctccagagatggtgtcagagcccctggaggacctggatcc

SEQ ID NO: 437978 - DNA, 120 bp, Artificial Sequence
  ENSG00000153253_6 (sequence is synthesized)
ctactatatcaataagaaaacttttatagtaatgaataaaggaaaggcaattttccgattcagtgccacctctgccttgtatattttaactccactaaaccctgttaggaaaattgctat

SEQ ID NO: 437979 - DNA, 120 bp, Artificial Sequence
  ENSG00000153253_7 (sequence is synthesized)
caagattttggtacattctttattcagcatgcttatcatgtgcactattttgaccaactgtgtatttatgaccttgagcaaccctcctgactggacaaagaatgtagagtacacattcac

SEQ ID NO: 437980 - DNA, 120 bp, Artificial Sequence
  ENSG00000153253_8 (sequence is synthesized)
tggaatctatacctttgagtcacttataaaaatcttggcaagagggttttgcttagaagattttacgtttcttcgtgatccatggaactggctggatttcagtgtcattgtgatggcata

SEQ ID NO: 437981 - DNA, 120 bp, Artificial Sequence
  ENSG00000153253_9 (sequence is synthesized)
tgtgacagagtttgtggacctgggcaatgtctcagcgttgagaacattcagagttctccgagcactgaaaacaatttcagtcattccaggtttaaagaccattgtgggggccctgatcca

SEQ ID NO: 437982 - DNA, 120 bp, Artificial Sequence
  ENSG00000153253_10 (sequence is synthesized)
gtcggtaaagaagctttctgatgtgatgatcctgactgtgttctgtctgagcgtgtttgctctcattgggctgcagctgttcatgggcaatctgaggaataaatgtttgcagtggccccc

SEQ ID NO: 437983 - DNA, 120 bp, Artificial Sequence
  ENSG00000153253_11 (sequence is synthesized)
aagcgattctgcttttgaaaccaacaccacttcctactttaatggcacaatggattcaaatgggacatttgttaatgtaacaatgagcacatttaactggaaggattacattggagatga

SEQ ID NO: 437984 - DNA, 120 bp, Artificial Sequence
  ENSG00000153253_12 (sequence is synthesized)
cagtcacttttatgttttggatgggcaaaaagaccctttactctgtggaaatggctcagatgcaggccagtgtccagaaggatacatctgtgtgaaggctggtcgaaaccccaactatgg

SEQ ID NO: 437985 - DNA, 120 bp, Artificial Sequence
  ENSG00000153253_13 (sequence is synthesized)
ctacacaagctttgacacctttagctgggctttcctgtctctatttcgactcatgactcaagactactgggaaaatctttaccagttgacattacgtgctgctgggaaaacatacatgat

SEQ ID NO: 437986 - DNA, 120 bp, Artificial Sequence
  ENSG00000153253_14 (sequence is synthesized)
attttttgtcctggtcattttcttgggctcattttatttggtgaatttgatcctggctgtggtggccatggcctatgaggagcagaatcaggccaccttggaagaagcagaacaaaaaga

SEQ ID NO: 437987 - DNA, 120 bp, Artificial Sequence
  ENSG00000153253_15 (sequence is synthesized)
ggccgaatttcagcagatgctcgaacagcttaaaaagcaacaggaagaagctcaggcagttgcggcagcatcagctgcttcaagagatttcagtggaataggtgggttaggagagctgtt

SEQ ID NO: 437988 - DNA, 120 bp, Artificial Sequence
  ENSG00000153253_16 (sequence is synthesized)
ggaaagttcttcagaagcatcaaagttgagttccaaaagtgctaaagaatggaggaaccgaaggaagaaaagaagacagagagagcaccttgaaggaaacaacaaaggagagagagacag

SEQ ID NO: 437989 - DNA, 120 bp, Artificial Sequence
  ENSG00000153253_17 (sequence is synthesized)
ctttcccaaatccgaatctgaagacagcgtcaaaagaagcagcttccttttctccatggatggaaacagactgaccagtgacaaaaaattctgctcccctcatcagtctctcttgagtat

SEQ ID NO: 437990 - DNA, 120 bp, Artificial Sequence
  ENSG00000153253_18 (sequence is synthesized)
ccgtggctccctgttttccccaagacgcaatagcaaaacaagcattttcagtttcagaggtcgggcaaaggatgttggatctgaaaatgactttgctgatgatgaacacagcacatttga

SEQ ID NO: 437991 - DNA, 120 bp, Artificial Sequence
  ENSG00000153253_19 (sequence is synthesized)
agacagcgaaagcaggagagactcactgtttgtgccgcacagacatggagagcgacgcaacagtaacgttagtcaggccagtatgtcatccaggatggtgccagggcttccagcaaatgg

SEQ ID NO: 437992 - DNA, 120 bp, Artificial Sequence
  ENSG00000153253_20 (sequence is synthesized)
gaagatgcacagcactgtggattgcaatggtgtggtttccttggtgggtggaccttcagctctaacgtcacctactggacaacttcccccagagggcaccaccacagaaacggaagtcag

SEQ ID NO: 437993 - DNA, 120 bp, Artificial Sequence
  ENSG00000153253_21 (sequence is synthesized)
aaagagaaggttaagctcttaccagatttcaatggagatgctggaggattcctctggaaggcaaagagccgtgagcatagccagcattctgaccaacacaatggaagaacttgaagaatc

SEQ ID NO: 437994 - DNA, 120 bp, Artificial Sequence
  ENSG00000153253_22 (sequence is synthesized)
tagacagaaatgtccgccatgctggtatagatttgccaatgtgttcttgatctgggactgctgtgatgcatggttaaaagtaaaacatcttgtgaatttaattgttatggatccatttgt

SEQ ID NO: 437995 - DNA, 120 bp, Artificial Sequence
  ENSG00000153253_23 (sequence is synthesized)
tgatcttgccatcactatttgcattgtcttaaataccctctttatggccatggagcactaccccatgactgagcaattcagtagtgtgttgactgtaggaaacctggtctttactgggat

SEQ ID NO: 437996 - DNA, 120 bp, Artificial Sequence
  ENSG00000153253_24 (sequence is synthesized)
tttcacagcagaaatggttctcaagatcattgccatggatccttattactatttccaagaaggctggaatatctttgatggaattattgtcagcctcagtttaatggagcttggtctgtc

SEQ ID NO: 437997 - DNA, 120 bp, Artificial Sequence
  ENSG00000153253_25 (sequence is synthesized)
aaatgtggagggattgtctgtactgcgatcattcagactgcttagagttttcaagttggcaaaatcctggcccacactaaatatgctaattaagatcattggcaattctgtgggggctct

SEQ ID NO: 437998 - DNA, 120 bp, Artificial Sequence
  ENSG00000153253_26 (sequence is synthesized)
aggaaacctcaccttggtgttggccatcatcgtcttcatttttgctgtggtcggcatgcagctctttggtaagagctacaaagaatgtgtctgcaagatcaatgatgactgtacgctccc

SEQ ID NO: 437999 - DNA, 120 bp, Artificial Sequence
  ENSG00000153253_27 (sequence is synthesized)
acggtggcacatgaacgacttcttccactccttcctgattgtgttccgcgtgctgtgtggagagtggatagagaccatgtgggactgtatggaggtcgctggccaaaccatgtgccttat

SEQ ID NO: 438000 - DNA, 120 bp, Artificial Sequence
  ENSG00000153253_28 (sequence is synthesized)
tgttttcatgttggtcatggtcattggaaaccttgtggttctgaacctctttctggccttattgttgagttcatttagctcagacaaccttgctgctactgatgatgacaatgaaatgaa

SEQ ID NO: 438001 - DNA, 120 bp, Artificial Sequence
  ENSG00000153253_29 (sequence is synthesized)
taatctgcagattgcagtaggaagaatgcaaaagggaattgattatgtgaaaaataagatgcgggagtgtttccaaaaagccttttttagaaagccaaaagttatagaaatccatgaagg

SEQ ID NO: 438002 - DNA, 120 bp, Artificial Sequence
  ENSG00000153253_30 (sequence is synthesized)
caataagatagacagctgcatgtccaataatactggaattgaaataagcaaagagcttaattatcttagagatgggaatggaaccaccagtggtgtaggtactggaagcagtgttgaaaa

SEQ ID NO: 438003 - DNA, 120 bp, Artificial Sequence
  ENSG00000153253_31 (sequence is synthesized)
atacgtaatcgatgaaaatgattatatgtcattcataaacaaccccagcctcaccgtcacagtgccaattgctgttggagagtctgactttgaaaacttaaatactgaagagttcagcag

SEQ ID NO: 438004 - DNA, 120 bp, Artificial Sequence
  ENSG00000153253_32 (sequence is synthesized)
tgagtcagaactagaagaaagcaaagagaaattaaatgcaaccagctcatctgaaggaagcacagttgatgttgttctaccccgagaaggtgaacaagctgaaactgaacccgaagaaga

SEQ ID NO: 438005 - DNA, 120 bp, Artificial Sequence
  ENSG00000153253_33 (sequence is synthesized)
ccttaaaccggaagcttgttttactgaaggatgtattaaaaagtttccattctgtcaagtaagtacagaagaaggcaaagggaagatctggtggaatcttcgaaaaacctgctacagtat

SEQ ID NO: 438006 - DNA, 120 bp, Artificial Sequence
  ENSG00000153253_34 (sequence is synthesized)
tgttgagcacaactggtttgagactttcattgtgttcatgatccttctcagtagtggtgcattggcctttgaagatatatacattgaacagcgaaagactatcaaaaccatgctagaata

SEQ ID NO: 438007 - DNA, 120 bp, Artificial Sequence
  ENSG00000153253_35 (sequence is synthesized)
tgctgacaaagtctttacctatatattcattctggaaatgcttctcaaatgggttgcttatggatttcaaacatatttcactaatgcctggtgctggctagatttcttgatcgttgatgt

SEQ ID NO: 438008 - DNA, 120 bp, Artificial Sequence
  ENSG00000153253_36 (sequence is synthesized)
ttctttggttagcctggtagccaatgctcttggctactcagaactcggtgccatcaaatcattacggacattaagagctttaagacctctaagagccttatcccggtttgaaggcatgag

SEQ ID NO: 438009 - DNA, 120 bp, Artificial Sequence
  ENSG00000153253_37 (sequence is synthesized)
gtttgctggcaagttctaccactgtgttaacatgacaacgggtaacatgtttgacattagtgatgttaacaatttgagtgactgtcaggctcttggcaagcaagctcggtggaaaaacgt

SEQ ID NO: 438010 - DNA, 120 bp, Artificial Sequence
  ENSG00000153253_38 (sequence is synthesized)
gaaagtaaactttgataatgttggcgctggctatcttgcactgcttcaagtggccacatttaaaggctggatggatattatgtatgcagctgttgattcacgagatgttaaacttcagcc

SEQ ID NO: 438011 - DNA, 120 bp, Artificial Sequence
  ENSG00000153253_39 (sequence is synthesized)
tgtatatgaagaaaatctgtacatgtatttatactttgtcatctttatcatctttgggtcattcttcactctgaatctattcattggtgtcatcatagataacttcaaccagcagaaaaa

SEQ ID NO: 438012 - DNA, 120 bp, Artificial Sequence
  ENSG00000153253_40 (sequence is synthesized)
gaagtttggaggtcaagacatctttatgacagaggaacagaaaaaatattacaatgcaatgaagaaacttggatccaagaaacctcagaaacccatacctcgcccagcaaacaaattcca

SEQ ID NO: 438013 - DNA, 120 bp, Artificial Sequence
  ENSG00000153253_41 (sequence is synthesized)
aggaatggtctttgattttgtaaccagacaagtctttgatatcagcatcatgatcctcatctgcctcaacatggtcaccatgatggtggaaacggatgaccagggcaaatacatgaccct

SEQ ID NO: 438014 - DNA, 120 bp, Artificial Sequence
  ENSG00000153253_42 (sequence is synthesized)
agttttgtcccggatcaacctagtgttcattgttctgttcactggagaatttgtgctgaagctcgtctccctcagacactactacttcactataggctggaacatctttgactttgtggt

SEQ ID NO: 438015 - DNA, 120 bp, Artificial Sequence
  ENSG00000153253_43 (sequence is synthesized)
ggtgattctctccattgtaggtatgtttctggctgagatgatagaaaagtattttgtgtcccctaccttgttccgagtgatccgtcttgccaggattggccgaatcctacgtctgatcaa

SEQ ID NO: 438016 - DNA, 120 bp, Artificial Sequence
  ENSG00000153253_44 (sequence is synthesized)
aggagcaaaggggatccgcacgctgctctttgctttgatgatgtcccttcctgcgttgtttaacatcggcctcctgctcttcctggtcatgtttatctatgccatctttgggatgtccaa

SEQ ID NO: 438017 - DNA, 120 bp, Artificial Sequence
  ENSG00000153253_45 (sequence is synthesized)
ctttgcctatgttaaaaaggaagctggaattgatgacatgttcaactttgagacctttggcaacagcatgatctgcttgttccaaattacaacctctgctggctgggatggattgctagc

SEQ ID NO: 438018 - DNA, 120 bp, Artificial Sequence
  ENSG00000153253_46 (sequence is synthesized)
acctattcttaatagtgcaccacccgactgtgaccctgacacaattcaccctggcagctcagttaagggagactgtgggaacccatctgttgggattttcttttttgtcagttacatcat

SEQ ID NO: 438019 - DNA, 120 bp, Artificial Sequence
  ENSG00000153253_47 (sequence is synthesized)
catatccttcctggttgtggtgaacatgtacatcgcggtcatcctggagaacttcagtgttgctactgaagaaagtgcagagcccctgagtgaggatgactttgagatgttctatgaggt

SEQ ID NO: 438020 - DNA, 120 bp, Artificial Sequence
  ENSG00000153253_48 (sequence is synthesized)
ttgggaaaagtttgatcccgatgcgacccagtttatagagttctctaaactctctgattttgcagctgccctggatcctcctcttctcatagcaaaacccaacaaagtccagcttattgc

SEQ ID NO: 438021 - DNA, 120 bp, Artificial Sequence
  ENSG00000153253_49 (sequence is synthesized)
catggatctgcccatggtcagtggtgaccggatccactgtcttgatattttatttgcctttacaaagcgtgttttgggtgagagtggagagatggatgcccttcgaatacagatggaaga

SEQ ID NO: 438022 - DNA, 120 bp, Artificial Sequence
  ENSG00000153253_50 (sequence is synthesized)
caggtttatggcatcaaacccctccaaagtctcttatgagcctattacaaccactttgaaacgtaaacaagaggaggtgtctgccgctatcattcagcgtaatttcagatgttatctttt

SEQ ID NO: 438023 - DNA, 120 bp, Artificial Sequence
  ENSG00000153253_51 (sequence is synthesized)
aaagcaaaggttaaaaaatatatcaagtaactataacaaagaggcaattaaagggaggattgacttacctataaaacaagacatgattattgacaaactaaatgggaactccactccaga

SEQ ID NO: 438024 - DNA, 120 bp, Artificial Sequence
  ENSG00000153253_52 (sequence is synthesized)
aaaaacagatgggagttcctctaccacctctcctccttcctatgatagtgtaacaaaaccagacaaggaaaagtttgagaaagacaaaccagaaaaagaaagcaaaggaaaagaggtcag

SEQ ID NO: 438025 - DNA, 120 bp, Artificial Sequence
  ENSG00000153253_53 (sequence is synthesized)
agaaaatcaaaagtaaaaagaaacaaagaattatctttgtgatcaattgtttacagcctatgaaggtaaagtatatgtgtcaactggacttcaagaggaggtccatgccaaactgactgt

SEQ ID NO: 438026 - DNA, 120 bp, Artificial Sequence
  ENSG00000153253_54 (sequence is synthesized)
tttaacaaatactcatagtcagtgcctatacaagacagtgaagtgacctctctgtcactgcaactctgtgaagcagggtatcaacattgacaagaggttgctgtttttattaccagctga

SEQ ID NO: 438027 - DNA, 120 bp, Artificial Sequence
  ENSG00000153253_55 (sequence is synthesized)
cactgctgaggagaaacccaatggctacctagactatagggatagttgtgcaaagtgaacattgtaactacaccaaacacctttagtacagtccttgcatccattctatttttaacttcc

SEQ ID NO: 438028 - DNA, 120 bp, Artificial Sequence
  ENSG00000153253_56 (sequence is synthesized)
atatctgccatatttttacaaaatttgttctagtgcatttccatggtccccaattcatagtttattcataatgctatgtcactatttttgtaaatgaggtttacgttgaagaaacagtat

SEQ ID NO: 438029 - DNA, 120 bp, Artificial Sequence
  ENSG00000153253_57 (sequence is synthesized)
acaagaaccctgtctctcaaatgatcagacaaaggtgttttgccagagagataaaatttttgctcaaaaccagaaaaagaattgtaatggctacagtttcagttacttccattttctaga

SEQ ID NO: 438030 - DNA, 120 bp, Artificial Sequence
  ENSG00000153253_58 (sequence is synthesized)
tggctttaattttgaaagtattttagtctgttatgtttgtttctatctgaacagttatgtgcctgtaaagtctcctctaatatttaaaggattatttttatgcaaagtattctgtttcag

SEQ ID NO: 438031 - DNA, 120 bp, Artificial Sequence
  ENSG00000153253_59 (sequence is synthesized)
caagtgcaaattttattctaagtttcagagctctatatttaatttaggtcaaatgctttccaaaaagtaatctaataaatccattctagaaaaatatatctaaagtattgctttagaata

SEQ ID NO: 438032 - DNA, 120 bp, Artificial Sequence
  ENSG00000153253_60 (sequence is synthesized)
gttgttccactttctgctgcagtattgctttgccatcttctgctctcagcaaagctgatagtctatgtcaattaaataccctatgttatgtaaatagttattttatcctgtggtgcatgt

SEQ ID NO: 438033 - DNA, 120 bp, Artificial Sequence
  ENSG00000153253_61 (sequence is synthesized)
ttgggcaaatatatatatagcctgataaacaacttctattaaatcaaatatgtaccacagtgtatgtgtcttttgcaagcttccaacagggatgtatcctgtatcattcattaaacatag

SEQ ID NO: 438034 - DNA, 120 bp, Artificial Sequence
  ENSG00000153253_62 (sequence is synthesized)
tttaaaggctatcactaatgcatgttaatattgcctatgctgctctattttactcaatccattcttcacaagtcttggttaaagaatgtcacatattggtgatagaatgaattcaacctg

SEQ ID NO: 438035 - DNA, 120 bp, Artificial Sequence
  ENSG00000153253_63 (sequence is synthesized)
ctctgtccattatgtcaagcagaataatttgaagctatttacaaacacctttacttttgcacttttaattcaacatgagtatcatatggtatctctctagatttcaaggaaacacactgg

SEQ ID NO: 438036 - DNA, 120 bp, Artificial Sequence
  ENSG00000153253_64 (sequence is synthesized)
atactgcctactgacaaaacctattcttcatattttgctaaaaatatgtctaaaacttgtttaaatataaataatgtaaaaatataatcaactttatttgtcagcattttgtacataaga

SEQ ID NO: 438037 - DNA, 120 bp, Artificial Sequence
  ENSG00000153253_65 (sequence is synthesized)
aaattattttcaggttgatgacatcacaatttattttactttatgcttttgcttttgatttttaatcacaattccaaacttttgaatccataagatttttcaatggataatttcctaaaa

SEQ ID NO: 438038 - DNA, 120 bp, Artificial Sequence
  ENSG00000153253_66 (sequence is synthesized)
taaaagttagataatgggttttatggatttctttgttataatatattttctaccattccaataggagatacattggtcaaacactcaaacctagatcattttctaccaactatggttgcc

SEQ ID NO: 438039 - DNA, 120 bp, Artificial Sequence
  ENSG00000153253_67 (sequence is synthesized)
tcaatataaccttttattcatagatgtttttttttattcaacttttgtagtatttacgtatgcagactagtcttatttttttaattcctgctgcactaaagctattacaaatataacatg

SEQ ID NO: 438040 - DNA, 120 bp, Artificial Sequence
  ENSG00000153253_68 (sequence is synthesized)
gactttgttctttttagccatgaacaaagtggcaaagttgtgcaattacctaacatgatataaatttttgttttttgcacaaaccaaaagtttaatgttaattctttttacaaaactatt

SEQ ID NO: 438041 - DNA, 120 bp, Artificial Sequence
  ENSG00000153253_69 (sequence is synthesized)
tactgtagtgtattgaagaactgcatgcagggaattgctattgctaaaaagaatggtgagctacgtcattattgagccaaaagaataaatttcattttttattgcatttcacttattggc

SEQ ID NO: 438042 - DNA, 120 bp, Artificial Sequence
  ENSG00000153253_70 (sequence is synthesized)
ctctggggttttttgtttttgttttttgctgttggcagtttaaaatatatataattaataaaacctgtgcttgatctgacatttgtatacataaaagtttacatgaattttacaacaaac

SEQ ID NO: 438043 - DNA, 120 bp, Artificial Sequence
  ENSG00000153253_71 (sequence is synthesized)
tagtgcatgattcaccaagcagtactacagaacaaaggcaaattaaaagcagctttgtgaacttttatgtgtgcaaaggatcaagttcacatgttccaactttcaggtttgataataata

SEQ ID NO: 438044 - DNA, 120 bp, Artificial Sequence
  ENSG00000153253_72 (sequence is synthesized)
gtagtaaccacctacaatagctttcaatttcaattaactcccttggctataagcatctaaactcatcttctttcaatataattgatgctatctcctaattacttggtggctaataaatgt

SEQ ID NO: 438045 - DNA, 120 bp, Artificial Sequence
  ENSG00000153253_73 (sequence is synthesized)
tacattctttgttacttaaatgcattatataaactcctatgtatacataaggtattaatgatatagttattgagaatttatattaacttttttttcaagaacccttggatttatgtgagg

SEQ ID NO: 438046 - DNA, 120 bp, Artificial Sequence
  ENSG00000153253_74 (sequence is synthesized)
tcaaaaccaaactcttattctcagtggaaaactccagttgtaatgcatatttttaaagacaatttggatctaaatatgtatttcataattctcccataataaattatataaggtggctaa

SEQ ID NO: 438047 - DNA, 120 bp, Artificial Sequence
  ENSG00000153253_75 (sequence is synthesized)
gccagaggctcgtgccaccacttttacccaggttatccaagcaagttgtacatgtacaatcacgttctaaatgaattttgactggcctgcatgctactcagctatgttccttcccctgcc

SEQ ID NO: 438048 - DNA, 120 bp, Artificial Sequence
  ENSG00000153253_76 (sequence is synthesized)
atggcaaggaagtgctagacttgcccagctgctctctgctgaatcgtgtgacacatcacagcatggtcaggcgagatgggcaatcccaacatcatatttaattctgctaatgagttttct

SEQ ID NO: 438049 - DNA, 120 bp, Artificial Sequence
  ENSG00000153253_77 (sequence is synthesized)
aatttagtctttagccttttaaaaccaattgcatgctctataggatttgtaatatctattttaaaacatgataggaatgtttatggttcaatatagtcagggatgtaggagggcatgcat

SEQ ID NO: 438050 - DNA, 120 bp, Artificial Sequence
  ENSG00000153253_78 (sequence is synthesized)
ttttttgtttctctgcttttatttcattaaaataagaccacaactttttattgttgattcagcctttataagtaaattgtattaccaaaataagcctcacagggtttttttctgatagta

SEQ ID NO: 438051 - DNA, 120 bp, Artificial Sequence
  ENSG00000153253_79 (sequence is synthesized)
ctgccactttcagatcattatattcagatctatgaatataattttcagcctatccaattcatgtgctccagatgaaaatgtttgctttcatgttttgggggaaaggttctgtaaaaaaaa

SEQ ID NO: 438052 - DNA, 120 bp, Artificial Sequence
  ENSG00000153253_80 (sequence is synthesized)
gaaagaaaaaagaaaaaaaaaagaatagggtgatcctgaggtttggagatgaagggccatagtctgtatgcatttgggcaacacatatcttggattttcatgtaggttgggaaaagttat

SEQ ID NO: 438053 - DNA, 120 bp, Artificial Sequence
  ENSG00000153253_81 (sequence is synthesized)
tgtaggttgggaaaagttatgtctgcaaaaccatagtgatcattgtaacttaaaaaaggaaacatcatgatatatgggatgaaaattcattatatcttgatcattaagtaattggcctag

SEQ ID NO: 438054 - DNA, 120 bp, Artificial Sequence
  ENSG00000153253_82 (sequence is synthesized)
tgtacccatttgttatttgaaatgtcaatgatttatgttaatttctccctaaatgttctatccaaaactgaccaggcaaaaaagagacttggaaaatttactattttcagttattaatta

SEQ ID NO: 438055 - DNA, 120 bp, Artificial Sequence
  ENSG00000153253_83 (sequence is synthesized)
ttaattttagttttgtgaggagtaaagggaatctcccaagattattgtagatttgtggcgtaatgagcttttattttattctgttcactcaactttctccattgcttactggaatctcag

SEQ ID NO: 438056 - DNA, 120 bp, Artificial Sequence
  ENSG00000153253_84 (sequence is synthesized)
ccagagtgcgggttctgggagggaaattttgaaggaaatgtaaagagttcataaatattgggcagttttcaaggcttctggtgacaaggaatatctaattagtttggggttgtctctagg

SEQ ID NO: 438057 - DNA, 120 bp, Artificial Sequence
  ENSG00000153253_85 (sequence is synthesized)
tttaatttatgcatagtcttattttccttagggataactgagaattagttgcagaatgcaaaaaaaatgagaaataaaattatcaatggaaaatagtaacaaagatacagtccatggtga

SEQ ID NO: 438058 - DNA, 120 bp, Artificial Sequence
  ENSG00000153253_86 (sequence is synthesized)
tttatgcaatttttattcagcaccaaatttttagatttagaataaaacaacattattagtcattgaagaaaatctgatttctttttcttttttcttcaccagcagaatagaattaaatgg

SEQ ID NO: 438059 - DNA, 120 bp, Artificial Sequence
  ENSG00000153253_87 (sequence is synthesized)
tactgccatattattatttacactgtgtttataacaggattccctccttttcagagtctttatggaaactttgaaagtagatgtttgactaaggtccggagcacatgcccttctggacat

SEQ ID NO: 438060 - DNA, 120 bp, Artificial Sequence
  ENSG00000153253_88 (sequence is synthesized)
gactttgtgctatttttggaatttggaaagcaatggaataatgactctagctttcagtttctctgttacatggccagtgtcttccaaatgctctttgtgaaattgaatgtgagataattt

SEQ ID NO: 438061 - DNA, 120 bp, Artificial Sequence
  ENSG00000153253_89 (sequence is synthesized)
ttgagaggagcagatgggtgtgtgaatagccattttaaacccatctcaacctttaaagatggtcttggtgctttagtgtacttctgctgaaaaaaaaaaaaattaaagctggttcagacg

SEQ ID NO: 438062 - DNA, 120 bp, Artificial Sequence
  ENSG00000153253_90 (sequence is synthesized)
aagcacatattaatactaaacaaatacattgaaggaatggtttccattcaaaaggtttgtaagctatgttcccctcgctgtctcttctaggtggttgtgaatgctcttgttggagcaatt

SEQ ID NO: 438063 - DNA, 120 bp, Artificial Sequence
  ENSG00000153253_91 (sequence is synthesized)
gcgtatgtaacagaatttgtaagcctaggcaatgtttcagcccttcgaactttcagagtcttgagagctctgaaaactatttctgtaattccaggtttaaagaccattgtgggggccctg

SEQ ID NO: 438064 - DNA, 120 bp, Artificial Sequence
  ENSG00000153253_92 (sequence is synthesized)
tatgggaatttcaacgagacgtttttactttcttttgaccaagattcaaattctttattccagcccttgataagtaaataagaaggtaattcgtatgcaagaagctacacgtaattaaat

SEQ ID NO: 438065 - DNA, 120 bp, Artificial Sequence
  ENSG00000153253_93 (sequence is synthesized)
attttctgagattggtaaggagtaaggaaactgaggcccaaagaacatacgaatcatgccccaagtcacaaatcttgtaattgccagaactgggacttgacaaggccccataaattctct

SEQ ID NO: 438066 - DNA, 120 bp, Artificial Sequence
  ENSG00000153253_94 (sequence is synthesized)
aagtgacttgactttaccatatttataagagtagttggagctggaatgtgagggagcagggtaagaggggaaaggattgaactgactttactagagttctttaaaaattaaaacatggtc

SEQ ID NO: 438067 - DNA, 120 bp, Artificial Sequence
  ENSG00000153266_0 (sequence is synthesized)
actttcccgagaggagcgcgggcgccagttgcctccttttaaagtttgaggggcggtggtggcggcggccggcaggcgcgggggaacacaggggccgctacgggagccgcgccgccgccc

SEQ ID NO: 438068 - DNA, 120 bp, Artificial Sequence
  ENSG00000153266_1 (sequence is synthesized)
atgtcattccacttcaagtgacttcatgtgatgtcagctgaatgtaaaagacagtgatctcacgcggaggggaagatgtttgccatcaaaatgtgacagaagagacacgctgcatggctc

SEQ ID NO: 438069 - DNA, 120 bp, Artificial Sequence
  ENSG00000153266_2 (sequence is synthesized)
ggaacgcatctccttggtggtgggggaaagagacttagaggagagaggctgcgccctggcccagcctggctcggctcagctccgcgcgccatggcaagctcggcttccctggagaccatg

SEQ ID NO: 438070 - DNA, 120 bp, Artificial Sequence
  ENSG00000153266_3 (sequence is synthesized)
gtgcccccggcctgcccgcgcgccggagcgtcgccggccacttccaagacactggccttttccatcgagcgcatcatggccaagacgtcggagccccgtgcgccctttgagccccggcct

SEQ ID NO: 438071 - DNA, 120 bp, Artificial Sequence
  ENSG00000153266_4 (sequence is synthesized)
ggagcgctagaggcggacggcagccagggcaagaaactgctcaacctctgctcgccgctgccctgtatgatccccctccagcccctaggctacgaggtgccgtcaaagacactgctcagt

SEQ ID NO: 438072 - DNA, 120 bp, Artificial Sequence
  ENSG00000153266_5 (sequence is synthesized)
cgtcaaagacactgctcagttactcggagctctggaaaagcagcctccgggcgggcggcggcggaggcggcggcggcggtggcggcggcggcggcgggggggccccagtgtgcggcgcca

SEQ ID NO: 438073 - DNA, 120 bp, Artificial Sequence
  ENSG00000153266_6 (sequence is synthesized)
tgtggcgtgtgctgcaaggccgagctgggcctggcgccgtccgcgctgcccgcgggcagggtcatcaagccgcaggtcatcaaccaggctgtggggctgccggccagcggctcgctctac

SEQ ID NO: 438074 - DNA, 120 bp, Artificial Sequence
  ENSG00000153266_7 (sequence is synthesized)
tacttcaactacctggactcgaccgcgtacccgccgtctgagctcctcagcggccacctcttcccgtctggcctcctcaatgcgcaggcccccgccgccctggctgctcaccccaagctc

SEQ ID NO: 438075 - DNA, 120 bp, Artificial Sequence
  ENSG00000153266_8 (sequence is synthesized)
aaggagcgcttgccggcgccgctggagcaggtactgaaggaaaactcggccctgactgccgagcgcggaggcgtcaagggccacagcaagctgccaggaggctccgcagatggcaagccc

SEQ ID NO: 438076 - DNA, 120 bp, Artificial Sequence
  ENSG00000153266_9 (sequence is synthesized)
aaaaacttcacctgcgaggtgtgcggcaaggtgtttaacgctcactataatctcacccgccacatgccggtccacaccggagccagaccgttcgtgtgcaaagtctgcggcaaaggcttt

SEQ ID NO: 438077 - DNA, 120 bp, Artificial Sequence
  ENSG00000153266_10 (sequence is synthesized)
cgccaggccagcacgctctgcaggcacaaaattatccacacccaggaaaagccacataaatgcaaccagtgcggcaaagcgttcaaccgcagctccacgctcaacacgcatatccgcatc

SEQ ID NO: 438078 - DNA, 120 bp, Artificial Sequence
  ENSG00000153266_11 (sequence is synthesized)
cacgcgggctacaagcccttcgtctgcgaattttgcggcaaaggctttcaccaaaaagggaactacaagaaccacaagctgacccacagcggcgagaagcagtacaaatgtaccatctgc

SEQ ID NO: 438079 - DNA, 120 bp, Artificial Sequence
  ENSG00000153266_12 (sequence is synthesized)
aacaaggccttccaccaggtctacaacctaaccttccatatgcacacccacaacgacaagaagcctttcacgtgcgccacttgcggcaaagggttttgcagaaactttgacttaaagaaa

SEQ ID NO: 438080 - DNA, 120 bp, Artificial Sequence
  ENSG00000153266_13 (sequence is synthesized)
catgtgcgcaaactccacgacagcgtgggccctgctgccccctccgcaaaggacctgactaggacagtgcagagctgagagctactgccttgcccttccttccctccctgtaccacctga

SEQ ID NO: 438081 - DNA, 120 bp, Artificial Sequence
  ENSG00000153266_14 (sequence is synthesized)
aaacagatcacacatataaacttatttctaaaattaaaagaaaaaaaaactatagcagagaggctaaaatctatttatcgaaaccagcatatttttggaaagctaaatgtttcctcgatg

SEQ ID NO: 438082 - DNA, 120 bp, Artificial Sequence
  ENSG00000153266_15 (sequence is synthesized)
actggcagcaaactcgtggcccccacctttgtatattcaggaaacttatttaaatccagtgcgccgaaacgtatttaattccaggcctccgcttctcctggggcagccagttttaacccc

SEQ ID NO: 438083 - DNA, 120 bp, Artificial Sequence
  ENSG00000153266_16 (sequence is synthesized)
agcctgtcaccgtgagcgccccagaagagcgcggcgcccctagccatctttatacagccatgtaaatcctcctgtacaagcgaacacggaatatatacatatataactcaataaacagaa

SEQ ID NO: 438084 - DNA, 120 bp, Artificial Sequence
  ENSG00000153283_0 (sequence is synthesized)
aattgactttgtgatcattacagaaatgctggtgtaaggtgttcagaagacaatggagaaaaaatggaaatactgtgctgtctattacatcatccagatacattttgtcaagggagtttg

SEQ ID NO: 438085 - DNA, 120 bp, Artificial Sequence
  ENSG00000153283_1 (sequence is synthesized)
ggaaaaaacagtcaacacagaagaaaatgtttatgctacacttggctctgatgtcaacctgacctgccaaacacagacagtaggcttcttcgtgcagatgcaatggtccaaggtcaccaa

SEQ ID NO: 438086 - DNA, 120 bp, Artificial Sequence
  ENSG00000153283_2 (sequence is synthesized)
taagatagacctgattgctgtctatcatccccaatacggcttctactgtgcctatgggagaccctgtgagtcacttgtgactttcacagaaactcctgagaatgggtcaaaatggactct

SEQ ID NO: 438087 - DNA, 120 bp, Artificial Sequence
  ENSG00000153283_3 (sequence is synthesized)
gcacttaaggaatatgtcttgttcagtcagtggaaggtacgagtgtatgcttgttctgtatccagagggcattcagactaaaatctacaaccttctcattcagacacacgttacagcaga

SEQ ID NO: 438088 - DNA, 120 bp, Artificial Sequence
  ENSG00000153283_4 (sequence is synthesized)
tgaatggaacagcaaccatacgatagaaatagagataaatcagactctggaaataccatgctttcaaaatagctcctcaaaaatttcatctgagttcacctatgcatggtcggtggaaaa

SEQ ID NO: 438089 - DNA, 120 bp, Artificial Sequence
  ENSG00000153283_5 (sequence is synthesized)
cagcagcacggattcttgggtccttctttctaagggtataaaggaggataatggaactcaggaaacacttatctcccaaaatcacctcatcagcaattccacattacttaaagatagagt

SEQ ID NO: 438090 - DNA, 120 bp, Artificial Sequence
  ENSG00000153283_6 (sequence is synthesized)
caagcttggtacagactacagactccacctctctccagtccaaatcttcgatgatgggcggaagttctcttgccacattagagtcggtcctaacaaaatcttgaggagctccaccacagt

SEQ ID NO: 438091 - DNA, 120 bp, Artificial Sequence
  ENSG00000153283_7 (sequence is synthesized)
caaggtttttgctaaaccagaaatccctgtgattgtggaaaataactccacggatgtcttggtagagagaagatttacctgcttactaaagaatgtatttcccaaagcaaatatcacatg

SEQ ID NO: 438092 - DNA, 120 bp, Artificial Sequence
  ENSG00000153283_8 (sequence is synthesized)
gtttatagatggaagttttcttcatgatgaaaaagaaggaatatatattactaatgaagagagaaaaggcaaagatggatttttggaactgaagtctgttttaacaagggtacatagtaa

SEQ ID NO: 438093 - DNA, 120 bp, Artificial Sequence
  ENSG00000153283_9 (sequence is synthesized)
taaaccagcccaatcagacaacttgaccatttggtgtatggctctgtctccagtcccaggaaataaagtgtggaacatctcatcagaaaagatcacttttctcttaggttctgaaatttc

SEQ ID NO: 438094 - DNA, 120 bp, Artificial Sequence
  ENSG00000153283_10 (sequence is synthesized)
ctcaacagaccctccactgagtgttacagaatctacccttgacacccaaccttctccagccagcagtgtatctcctgcaagatatccagctacatcttcagtgacccttgtagatgtgag

SEQ ID NO: 438095 - DNA, 120 bp, Artificial Sequence
  ENSG00000153283_11 (sequence is synthesized)
tgccttgaggccaaacaccactcctcaacccagcaattccagtatgactacccgaggcttcaactatccctggacctccagtgggacagataccaaaaaatcagtttcacggatacctag

SEQ ID NO: 438096 - DNA, 120 bp, Artificial Sequence
  ENSG00000153283_12 (sequence is synthesized)
tgaaacatacagttcatccccgtcaggtgcaggctcaacacttcatgacaatgtctttaccagcacagccagagcattttcagaagtccccacaactgccaatggatctacgaaaactaa

SEQ ID NO: 438097 - DNA, 120 bp, Artificial Sequence
  ENSG00000153283_13 (sequence is synthesized)
tcacgtccatatcactggtattgtggtcaataagcccaaagatggaatgtcctggccagtgattgtagcagctttactcttttgctgcatgatattgtttggtcttggagtgagaaaatg

SEQ ID NO: 438098 - DNA, 120 bp, Artificial Sequence
  ENSG00000153283_14 (sequence is synthesized)
gtgtcagtaccaaaaagaaataatggaaagacctccacctttcaagccaccaccacctcccatcaagtacacttgcattcaagagcccaacgaaagtgatctgccttatcatgagatgga

SEQ ID NO: 438099 - DNA, 120 bp, Artificial Sequence
  ENSG00000153283_15 (sequence is synthesized)
gaccctctagtctcgtgagactttgccccatggcagaactctgctggaatcctattgagaaggtagacattgtgctttattaatatagtcgctcttcagccatgcctttgctgcagctga

SEQ ID NO: 438100 - DNA, 120 bp, Artificial Sequence
  ENSG00000153283_16 (sequence is synthesized)
aatggaagtcagaagtgagtgacctgttttcccagcaactcaccctcttccatctccaaacgcctgaagcttaaccaagagtgagaggatatgtcatgttcacactcaatgcaattcgta

SEQ ID NO: 438101 - DNA, 120 bp, Artificial Sequence
  ENSG00000153283_17 (sequence is synthesized)
ttaaaaaaaaatacagtattttcatttaaattctctgatggagggacaacaatggtttcaactgtatgcccatgcctgatcctcttatttgaacatctatcaacattgtaaactctttgc

SEQ ID NO: 438102 - DNA, 120 bp, Artificial Sequence
  ENSG00000153283_18 (sequence is synthesized)
caaaatcctggggctttgctgcattccctaagataattacaggaaaaagaaaatgtaaaagtgctaacaaggctgccaagtaatggagaagtatggttagtcttcatattgaaattctgt

SEQ ID NO: 438103 - DNA, 120 bp, Artificial Sequence
  ENSG00000153283_19 (sequence is synthesized)
tgcttattttcatggaaggaaacagaatactttgcacaggaaccacattttcaatcctccttcactgtcttcctaccatgttcagcccagactcctgccacatggaccaggatgaagagg

SEQ ID NO: 438104 - DNA, 120 bp, Artificial Sequence
  ENSG00000153283_20 (sequence is synthesized)
gatcaaagagataattagccaaaaacccagtagcctagaagatacaaaactccactggcctctaaaattatattagccaagagtggtttcatttgagtgccttcgtgtgtatgtccatca

SEQ ID NO: 438105 - DNA, 120 bp, Artificial Sequence
  ENSG00000153283_21 (sequence is synthesized)
aactggaaccaaactgttttgtaagtaaacaggcagcctaagcccaaccctactttctaattccagttattctctttttcatctggggatttacctgttcatttaatctgcctgttttga

SEQ ID NO: 438106 - DNA, 120 bp, Artificial Sequence
  ENSG00000153283_22 (sequence is synthesized)
tctgttttgaaaaagataaagagcctcaaatcagaccagcactgattaattaaccctgctcctaccaatcttttttaaagcagttgaagcagaatgtataggtgtcagagaagaaaccta

SEQ ID NO: 438107 - DNA, 120 bp, Artificial Sequence
  ENSG00000153283_23 (sequence is synthesized)
gtcagccagacgtgctctgtattcagcaatagtttgtgaatgaataaattactaatcctccttgtcgcttgaaaccttcccacactccctgctccaggagggaaaaacagatgttgttga

SEQ ID NO: 438108 - DNA, 120 bp, Artificial Sequence
  ENSG00000153283_24 (sequence is synthesized)
cagatagagtgataggcaaattctgtgtggactttagtcccaaaaggaaactttagttcacttgcagtatgcttatccttgactgcacatgagaatgccttgtgcagagttatttggaga

SEQ ID NO: 438109 - DNA, 120 bp, Artificial Sequence
  ENSG00000153283_25 (sequence is synthesized)
ttatgtctttttcttaaacaccatggctgtcacacttcagttcaattaaatcagaatgtctgaggagtgagacacaggcatcaacactctcaaatgattcacatgttcagccaaagttga

SEQ ID NO: 438110 - DNA, 120 bp, Artificial Sequence
  ENSG00000153283_26 (sequence is synthesized)
gaaccatcgagcctgtggaagttctttctcatggctcagaatcttaggtaggtgcttaactcttgtggtggccagcctccaagatgagccccagtgttcttgcctcctactattcacatc

SEQ ID NO: 438111 - DNA, 120 bp, Artificial Sequence
  ENSG00000153283_27 (sequence is synthesized)
tttatgtggtcccctccaatgctgaatacagatgatttgtgtaacctgaggccaggattaaggggaggcaatcaatgcacctagggaaaaaatttaaggaggtattcacactcagggtca

SEQ ID NO: 438112 - DNA, 120 bp, Artificial Sequence
  ENSG00000153283_28 (sequence is synthesized)
tgcacttgcacaatgttgagaatgagtaccactctcaccattggtatagccaaaaaagcttggaagtgaccaaggctaggtcacaaaatacactgtggcttcttctttgatctctctttg

SEQ ID NO: 438113 - DNA, 120 bp, Artificial Sequence
  ENSG00000153283_29 (sequence is synthesized)
ctttgatctctctttgaccatactgacactgggaaaagcccattcccatgccatgaagacaccaaggcagccctattgagaaatctacctgtcgtggccgggcgcagtggctcacgcctg

SEQ ID NO: 438114 - DNA, 70 bp, Artificial Sequence
  ENSG00000153283_30 (sequence is synthesized)
aggctgaggcaggagaagggtgctccaatctgggtgaaagaccgagactccgcctcaaaaaaaaaaaaaa

SEQ ID NO: 438115 - DNA, 120 bp, Artificial Sequence
  ENSG00000153283_31 (sequence is synthesized)
aagaaagaaagaaagaaagaaagaaatctacctgtcaaggaactaaggtattttgctaacaagcaccaacttgccagccatgtaagggagccatcttggaagcagatcctccagcctcca

SEQ ID NO: 438116 - DNA, 120 bp, Artificial Sequence
  ENSG00000153283_32 (sequence is synthesized)
gatcctccagcctccagtcaagtcttcagataattgcaacttcagttgatcttttgaccaagacctcaagagagccagaactacccagctaagccttttactaaatttctgaacttctaa

SEQ ID NO: 438117 - DNA, 120 bp, Artificial Sequence
  ENSG00000153283_33 (sequence is synthesized)
cactattagataataagtgcttattgtttaacaccattaattttgagtataatttgttacatagcgacagataactatacagctcaacaactagaaaaataaactgtttacctgccttaa

SEQ ID NO: 438118 - DNA, 120 bp, Artificial Sequence
  ENSG00000153283_34 (sequence is synthesized)
ataacgataaaatttcagcaaacttgcatcattcatgcctgtttcttagctatgacttttttggggctgaaattgggttttattttttaacagctttattgagatataattcacgtcaca

SEQ ID NO: 438119 - DNA, 120 bp, Artificial Sequence
  ENSG00000153283_35 (sequence is synthesized)
ttaacttgcccatttaaaatgtatgatctaatggtttttagtatgttcacagacttgtacaaccatgactacagccaatttcagaacattttcatcatctaataaagaaactcctaaaca

SEQ ID NO: 438120 - DNA, 120 bp, Artificial Sequence
  ENSG00000153283_36 (sequence is synthesized)
gaatcctattgagaaggtattggctgggatccaccaaaacttcaatcaattttcctttcttaaggagataattggagccctttgattttcccaaaactccagagcaaacttaccctctca

SEQ ID NO: 438121 - DNA, 120 bp, Artificial Sequence
  ENSG00000153283_37 (sequence is synthesized)
ccgttgaaccatttcatatcaaagaaaactaagctgtgtttctccagactccacccaagaaagagactttcattcctccctcaaacccttgggcagtgttttttgttgctactttagtag

SEQ ID NO: 438122 - DNA, 120 bp, Artificial Sequence
  ENSG00000153283_38 (sequence is synthesized)
tagttccttattagttctcaagaaacaaatgctagcttcatatgtatggctgttgctttgcttcatgtgtatggctatttgtatttaacaagacttaatcatcagtaatttgtatacaaa

SEQ ID NO: 438123 - DNA, 120 bp, Artificial Sequence
  ENSG00000153283_39 (sequence is synthesized)
taacagtgctggagtctgtttccctggatacttgtcattcttgttgggcagggggatgagggtaggatgctaaagaatgatgattctgttaacagaataaaatcatacagaagccaataa

SEQ ID NO: 438124 - DNA, 120 bp, Artificial Sequence
  ENSG00000153283_40 (sequence is synthesized)
tctccctgtggtctttccccagctccaccggcagccctccctaaggactcctgcgagacaaagacagaaatggcttccctgaggactgagagtggttacagggctcttcctgctgcttcc

SEQ ID NO: 438125 - DNA, 120 bp, Artificial Sequence
  ENSG00000153283_41 (sequence is synthesized)
tctactcctgtatttcacttggctctctaaatttgtttcagctccagagcccagtgcagctgaaatcctagaagacctcacaactgtgttaaattttcacagctgaccacttaaaggcag

SEQ ID NO: 438126 - DNA, 120 bp, Artificial Sequence
  ENSG00000153283_42 (sequence is synthesized)
cccaggttcaagagattctcctgcctcacttacatagatgagtttgataacagtcaagctgaaactaaaaagacgcagcttgactgacacagagatcctgaataagagactctttggata

SEQ ID NO: 438127 - DNA, 120 bp, Artificial Sequence
  ENSG00000153283_43 (sequence is synthesized)
agagactctttggatactgaaaagtctcttaaataagaaatgctggtgtaaggtgttcagaagacaatggagaaaaaatggaaatactgtgctgtctattacatcatccagatacatttt

SEQ ID NO: 438128 - DNA, 120 bp, Artificial Sequence
  ENSG00000153291_0 (sequence is synthesized)
gtgtttttctattctggggtgtaaggggcagctggaccactccagctgggactgctaggaaggttgcgggtccacccggccgagccgaacgagggaaatggtcctcacccggccactcgc

SEQ ID NO: 438129 - DNA, 120 bp, Artificial Sequence
  ENSG00000153291_1 (sequence is synthesized)
cggttgaaaaggggccgccctggcagggaagcggccgccgcggcgcggtgcagcgcagcggcgagaaggagtgcgttatcgtcttgcgctactgctgaatgtccgtcccggaggaggagg

SEQ ID NO: 438130 - DNA, 120 bp, Artificial Sequence
  ENSG00000153291_2 (sequence is synthesized)
agaggcttttgccgctgacccagagatggccccgagcgagcaaattcctactgtccggctgcgcggctaccgtggccgagctagcaacctttcccctggatctcacaaaaactcgactcc

SEQ ID NO: 438131 - DNA, 120 bp, Artificial Sequence
  ENSG00000153291_3 (sequence is synthesized)
aaatgcaaggagaagcagctcttgctcggttgggagacggtgcaagagaatctgccccctataggggaatggtgcgcacagctctagggatcattgaagaggaaggctttctaaagcttt

SEQ ID NO: 438132 - DNA, 120 bp, Artificial Sequence
  ENSG00000153291_4 (sequence is synthesized)
ggcaaggagtgacacccgccatttacagacacgtagtgtattctggaggtcgaatggtcacatatgaacatctccgagaggttgtgtttggcaaaagtgaagatgagcattatccccttt

SEQ ID NO: 438133 - DNA, 120 bp, Artificial Sequence
  ENSG00000153291_5 (sequence is synthesized)
ggaaatcagtcattggagggatgatggctggtgttattggccagtttttagccaatccaactgacctagtgaaggttcagatgcaaatggaaggaaaaaggaaactggaaggaaaaccat

SEQ ID NO: 438134 - DNA, 120 bp, Artificial Sequence
  ENSG00000153291_6 (sequence is synthesized)
tgcgatttcgtggtgtacatcatgcatttgcaaaaatcttagctgaaggaggaatacgagggctttgggcaggctgggtacccaatatacaaagagcagcactggtgaatatgggagatt

SEQ ID NO: 438135 - DNA, 120 bp, Artificial Sequence
  ENSG00000153291_7 (sequence is synthesized)
taaccacttatgatacagtgaaacactacttggtattgaatacaccacttgaggacaatatcatgactcacggtttatcaagtttatgttctggactggtagcttctattctgggaacac

SEQ ID NO: 438136 - DNA, 120 bp, Artificial Sequence
  ENSG00000153291_8 (sequence is synthesized)
cagccgatgtcatcaaaagcagaataatgaatcaaccacgagataaacaaggaaggggacttttgtataaatcatcgactgactgcttgattcaggctgttcaaggtgaaggattcatga

SEQ ID NO: 438137 - DNA, 120 bp, Artificial Sequence
  ENSG00000153291_9 (sequence is synthesized)
gtctatataaaggctttttaccatcttggctgagaatgaccccttggtcaatggtgttctggcttacttatgaaaaaatcagagagatgagtggagtcagtccattttaaacccctaaag

SEQ ID NO: 438138 - DNA, 120 bp, Artificial Sequence
  ENSG00000153291_10 (sequence is synthesized)
atgcaacccttaaagatacagtgttcagtattattgaaatatgggcatctgcaacacataccccctattatttctacctctttaggaagacacctattccacagagactgatttataggg

SEQ ID NO: 438139 - DNA, 120 bp, Artificial Sequence
  ENSG00000153291_11 (sequence is synthesized)
ggcagcactttatttttttctggaaacccaagttctctttgactcctctttttgtccaaaagtgatctggtcggatctcacaaggccatccaatgagaccccgcacagcattttctaaag

SEQ ID NO: 438140 - DNA, 120 bp, Artificial Sequence
  ENSG00000153291_12 (sequence is synthesized)
ctttgagttgctattctatgctgaagagcctgcttagaggaggagtaccaggagggagccagcatttcagatctgaagtagacgataggaatgtggaagaacacatacatagtgcttaag

SEQ ID NO: 438141 - DNA, 120 bp, Artificial Sequence
  ENSG00000153291_13 (sequence is synthesized)
aaatacatttaacctgttatgtcagtatttatcaatgaagtttgataattcacttttctgtcattgttaaagcgtacatactgtaaattaaagggaggtgaatggaaattaatgaataaa

SEQ ID NO: 438142 - DNA, 120 bp, Artificial Sequence
  ENSG00000153291_14 (sequence is synthesized)
cattttgagtttccctagtgttgaaggaaggtgtactttttcttgtcagaaagataaaaaaaatcaagttgagatgatgtttgaatttcaagaaaagaggctgctttctgtcagtgccct

SEQ ID NO: 438143 - DNA, 120 bp, Artificial Sequence
  ENSG00000153291_15 (sequence is synthesized)
ctcattagatctgtgttaattagttagcactccactgcacatgctaatgacttcctctgacagccacacaccgaatcttgatgaaaaaagagaagagcatttgccttgttacatagtctg

SEQ ID NO: 438144 - DNA, 120 bp, Artificial Sequence
  ENSG00000153291_16 (sequence is synthesized)
ttacaagccagatatgttgctagctctcaagagttgtaatatattaagaactacaacttatttgattaaaactcagctgtatagatccttttataaagcaccttttgttaaacatcagcc

SEQ ID NO: 438145 - DNA, 120 bp, Artificial Sequence
  ENSG00000153291_17 (sequence is synthesized)
tttcattggtattttaaaagcaaggcagatagatatgaagtcagccaactctgacatgcgtcctttcttatctcccttacctgacactaggggctctagagaggcagagagagcactcac

SEQ ID NO: 438146 - DNA, 120 bp, Artificial Sequence
  ENSG00000153291_18 (sequence is synthesized)
aaatcacactaaaactgccagcggcctgactcttactcagtttagcaaaaattcttgcctaaaaagtgataagtaaaaatctgtttatggtatacagttatgtctcgaatctttgaatca

SEQ ID NO: 438147 - DNA, 120 bp, Artificial Sequence
  ENSG00000153291_19 (sequence is synthesized)
aatccatgttcttattttagaaaggtaagagttcttcaaattcagctacataccaccggctctcccaacctcagacggtgggcatttctggatggatggctgcggttatggataaaggct

SEQ ID NO: 438148 - DNA, 120 bp, Artificial Sequence
  ENSG00000153291_20 (sequence is synthesized)
gtaactgttaacacagaaaaacatgaaaagctcaggcccaagaaaggccttggagccagccaaacagaatttgttctaatggacatggatgatgttgaacagaaaaaagtttacaagtgc

SEQ ID NO: 438149 - DNA, 120 bp, Artificial Sequence
  ENSG00000153291_21 (sequence is synthesized)
tttgtggttgcactaatgtatactcactgccattttaagagggggaagtacattttaaaatatatttgaatgtcatgtactgatatgcagtagcttattgtttttctagttgcagagaat

SEQ ID NO: 438150 - DNA, 120 bp, Artificial Sequence
  ENSG00000153291_22 (sequence is synthesized)
gcttattgtttttctagttgcagagaatgtgaagtttaatctcttaaaatatttagatggtctactttttcattgaatttgtcaatatgtaattgcgttgtaaaatattatatatatata

SEQ ID NO: 438151 - DNA, 120 bp, Artificial Sequence
  ENSG00000153291_23 (sequence is synthesized)
acttcccaagtgttctgcattgaaccacttagggaaaattttgtttgtttttatgttttgtaatttttaaaattaagtaaagactggatcaaaataattgcatccaacctggaccgtgaa

SEQ ID NO: 438152 - DNA, 120 bp, Artificial Sequence
  ENSG00000153291_24 (sequence is synthesized)
tcatgactcacggtttatcaagtgatctggtcggatctcacaaggccatccaatgagaccccgcacagcattttctaaagaagaatcgaagcctgaccactttcaccttgggcaagaagg

SEQ ID NO: 438153 - DNA, 120 bp, Artificial Sequence
  ENSG00000153291_25 (sequence is synthesized)
gtgtgtgggaagggcagagtctgaaaagagcatgccccatttggagaagcatcaagaagcccacgtgttagaagcaccggccccatgagacaaagacacagctagagagattgactaggc

SEQ ID NO: 438154 - DNA, 120 bp, Artificial Sequence
  ENSG00000153291_26 (sequence is synthesized)
catgtcggaatgtcctcttattttatacatacataagcatatagatacatatagccaaagttacctttttaatgatcttttttacccagtgtattctggaggtcgaatggtcacatatga

SEQ ID NO: 438155 - DNA, 120 bp, Artificial Sequence
  ENSG00000153292_0 (sequence is synthesized)
agtgagcctgtgttcatgccagtgagctgctgtggctcagatactgatactttctttccaaacagcataagaagtgattgagccacaagtatactgaaggaagggctccctcgagttctg

SEQ ID NO: 438156 - DNA, 120 bp, Artificial Sequence
  ENSG00000153292_1 (sequence is synthesized)
gtgtgaagagataaatcaccagtcacagactatgcacccgactgctgctgttcagtccagggaaaatgaaagttggagtgctgtggctcatttctttcttcaccttcactgacggccacg

SEQ ID NO: 438157 - DNA, 120 bp, Artificial Sequence
  ENSG00000153292_2 (sequence is synthesized)
gtggcttcctggggaaaaatgatggcatcaaaacaaaaaaagaactcattgtgaataagaaaaaacatctaggcccagtcgaagaatatcagctgctgcttcaggtgacctatagagatt

SEQ ID NO: 438158 - DNA, 120 bp, Artificial Sequence
  ENSG00000153292_3 (sequence is synthesized)
ccaaggagaaaagagatttgagaaattttctgaagctcttgaagcctccattattatggtcacatgggctaattagaattatcagagcaaaggctaccacagactgcaacagcctgaatg

SEQ ID NO: 438159 - DNA, 120 bp, Artificial Sequence
  ENSG00000153292_4 (sequence is synthesized)
gagtcctgcagtgtacctgtgaagacagctacacctggtttcctccctcatgccttgatccccagaactgctaccttcacacggctggagcactcccaagctgtgaatgtcatctcaaca

SEQ ID NO: 438160 - DNA, 120 bp, Artificial Sequence
  ENSG00000153292_5 (sequence is synthesized)
acctcagccagagtgtcaatttctgtgagagaacaaagatttggggcactttcaaaattaatgaaaggtttacaaatgaccttttgaattcatcttctgctatatactccaaatatgcaa

SEQ ID NO: 438161 - DNA, 120 bp, Artificial Sequence
  ENSG00000153292_6 (sequence is synthesized)
atggaattgaaattcaacttaaaaaagcatatgaaagaattcaaggttttgagtcggttcaggtcacccaatttcgaaatggaagcatcgttgctgggtatgaagttgttggctccagca

SEQ ID NO: 438162 - DNA, 120 bp, Artificial Sequence
  ENSG00000153292_7 (sequence is synthesized)
gtgcatctgaactgctgtcagccattgaacatgttgccgagaaggctaagacagcccttcacaagctgtttccattagaagacggctctttcagagtgttcggaaaagcccagtgtaatg

SEQ ID NO: 438163 - DNA, 120 bp, Artificial Sequence
  ENSG00000153292_8 (sequence is synthesized)
acattgtctttggatttgggtccaaggatgatgaatataccctgccctgcagcagtggctacaggggaaacatcacagccaagtgtgagtcctctgggtggcaggtcatcagggagactt

SEQ ID NO: 438164 - DNA, 120 bp, Artificial Sequence
  ENSG00000153292_9 (sequence is synthesized)
gtgtgctctctctgcttgaagaactgaacaagaatttcagtatgattgtaggcaatgccactgaggcagctgtgtcatccttcgtgcaaaatctttctgtcatcattcggcaaaacccat

SEQ ID NO: 438165 - DNA, 120 bp, Artificial Sequence
  ENSG00000153292_10 (sequence is synthesized)
caaccacagtggggaatctggcttcggtggtgtcgattctgagcaatatttcatctctgtcactggccagccatttcagggtgtccaattcaacaatggaggatgtcatcagtatagctg

SEQ ID NO: 438166 - DNA, 120 bp, Artificial Sequence
  ENSG00000153292_11 (sequence is synthesized)
acaatatccttaattcagcctcagtaaccaactggacagtcttactgcgggaagaaaagtatgccagctcacggttactagagacattagaaaacatcagcactctggtgcctccgacag

SEQ ID NO: 438167 - DNA, 120 bp, Artificial Sequence
  ENSG00000153292_12 (sequence is synthesized)
ctcttcctctgaatttttctcggaaattcattgactggaaagggattccagtgaacaaaagccaactcaaaaggggttacagctatcagattaaaatgtgtccccaaaatacatctattc

SEQ ID NO: 438168 - DNA, 120 bp, Artificial Sequence
  ENSG00000153292_13 (sequence is synthesized)
ccatcagaggccgtgtgttaattgggtcagaccaattccagagatcccttccagaaactattatcagcatggcctcgttgactctggggaacattctacccgtttccaaaaatggaaatg

SEQ ID NO: 438169 - DNA, 120 bp, Artificial Sequence
  ENSG00000153292_14 (sequence is synthesized)
ctcaggtcaatggacctgtgatatccacggttattcaaaactattccataaatgaagttttcctatttttttccaagatagagtcaaacctgagccagcctcattgtgtgttttgggatt

SEQ ID NO: 438170 - DNA, 120 bp, Artificial Sequence
  ENSG00000153292_15 (sequence is synthesized)
tcagtcatttgcagtggaacgatgcaggctgccacctagtgaatgaaactcaagacatcgtgacgtgccaatgtactcacttgacctccttctccatattgatgtcaccttttgtcccct

SEQ ID NO: 438171 - DNA, 120 bp, Artificial Sequence
  ENSG00000153292_16 (sequence is synthesized)
ctacaatcttccccgttgtaaaatggatcacctatgtgggactgggtatctccattggaagtctcattttatgcctgatcatcgaggctttgttttggaagcagattaaaaaaagccaaa

SEQ ID NO: 438172 - DNA, 120 bp, Artificial Sequence
  ENSG00000153292_17 (sequence is synthesized)
cctctcacacacgtcgtatttgcatggtgaacatagccctgtccctcttgattgctgatgtctggtttattgttggtgccacagtggacaccacggtgaacccttctggagtctgcacag

SEQ ID NO: 438173 - DNA, 120 bp, Artificial Sequence
  ENSG00000153292_18 (sequence is synthesized)
ctgctgtgttctttacacacttcttctacctctctttgttcttctggatgctcatgcttggcatcctgctggcttaccggatcatcctcgtgttccatcacatggcccagcatttgatga

SEQ ID NO: 438174 - DNA, 120 bp, Artificial Sequence
  ENSG00000153292_19 (sequence is synthesized)
tggctgttggattttgcctgggttatgggtgccctctcattatatctgtcattaccattgctgtcacgcaacctagcaatacctacaaaaggaaagatgtgtgttggcttaactggtcca

SEQ ID NO: 438175 - DNA, 120 bp, Artificial Sequence
  ENSG00000153292_20 (sequence is synthesized)
atggaagcaaaccactcctggcttttgttgtccctgcactggctattgtggctgtgaacttcgttgtggtgctgctagttctcacaaagctctggaggccgactgttggggaaagactga

SEQ ID NO: 438176 - DNA, 120 bp, Artificial Sequence
  ENSG00000153292_21 (sequence is synthesized)
gtcgggatgacaaggccaccatcatccgcgtggggaagagcctcctcattctgacccctctgctagggctcacctggggctttggaataggaacaatagtggacagccagaatctggctt

SEQ ID NO: 438177 - DNA, 120 bp, Artificial Sequence
  ENSG00000153292_22 (sequence is synthesized)
cagggattttttatcttatgctttggaatactcttggacagtaagctgcgacaacttctgttcaacaagttgtctgccttaagttcttggaagcaaacagaaaagcaaaactcatcagat

SEQ ID NO: 438178 - DNA, 120 bp, Artificial Sequence
  ENSG00000153292_23 (sequence is synthesized)
ttatctgccaaacccaaattctcaaagcctttcaacccactgcaaaacaaaggccattatgcattttctcatactggagattcctccgacaacatcatgctaactcagtttgtctcaaat

SEQ ID NO: 438179 - DNA, 120 bp, Artificial Sequence
  ENSG00000153292_24 (sequence is synthesized)
gaataaggcaaggaatcataaaatcaagaaaaaatttccagaacaacttgacatttagagacaaatgtcaatgaagaaattatgctcagtattcgatcgggttttctgatttaggggtct

SEQ ID NO: 438180 - DNA, 120 bp, Artificial Sequence
  ENSG00000153292_25 (sequence is synthesized)
gggaataaaacaagaatgtctcagtggcttcattactgctcccttttgtcttcaattaaatgaaaagaagatttatttccatgtgatttgattcaaagaaagtgctccataaatgcagaa

SEQ ID NO: 438181 - DNA, 120 bp, Artificial Sequence
  ENSG00000153292_26 (sequence is synthesized)
gagtaggttttgttggaaatcgtgtcagttgtaccctgaccataaaatatggtttctattttcataaaacagcattattcacatggcatttccaataatctggattgaaggaagaaaatt

SEQ ID NO: 438182 - DNA, 120 bp, Artificial Sequence
  ENSG00000153292_27 (sequence is synthesized)
ttatgaaatagctttagataaattaataggccacgttcattttcttgtcaaaaagttactggtggggggatggtgggaaaaagttattagtgcaaatttcctagagaaaaaaccatttct

SEQ ID NO: 438183 - DNA, 120 bp, Artificial Sequence
  ENSG00000153292_28 (sequence is synthesized)
ctttcaaattttccagttgaattttatgttcgcttttgcttcttaggttctatcacttaatattgaaagttaatcagaaataaaatgtaaacttctatttcagatagctttgtaaccatt

SEQ ID NO: 438184 - DNA, 120 bp, Artificial Sequence
  ENSG00000153292_29 (sequence is synthesized)
tatcagaaagtataataatgtgatatgatatataatgtggtatttttcagtttacaaggcacttccatctggtcctaaaccctgcaaacaaaagtgtcaaggcagacctagtgcagagat

SEQ ID NO: 438185 - DNA, 120 bp, Artificial Sequence
  ENSG00000153292_30 (sequence is synthesized)
gagggcatgggggctcagagaggtaaagtgacttgccaaagattgtgaagccagttaagggaaattggggatttttaggacatttgtctcccagaccatttctacagccaataaaagcct

SEQ ID NO: 438186 - DNA, 120 bp, Artificial Sequence
  ENSG00000153292_31 (sequence is synthesized)
tgaaaattacctacatctctagtaaatctttctgaggtcagttacacagttcaccattcccagaattctatgtaagagagaaattaagggagaatttggttgtcagcttccagggaggta

SEQ ID NO: 438187 - DNA, 120 bp, Artificial Sequence
  ENSG00000153292_32 (sequence is synthesized)
ccttaaaacatccttattttctttcataatacaccataggcactttgtggaagttattttcttgtacagccagtgccacttttggatgacatacaaagcagcaggagttgacgctatgtg

SEQ ID NO: 438188 - DNA, 120 bp, Artificial Sequence
  ENSG00000153292_33 (sequence is synthesized)
aagcaacacttctcttccatacttccatcacatttggctcacctacctgagtttcagccgtgaccatagtgcccagaggaacccgagcctttgattcatccttgctgttttgagaggcct

SEQ ID NO: 438189 - DNA, 120 bp, Artificial Sequence
  ENSG00000153292_34 (sequence is synthesized)
agggagtgtctcttagcctcctgacatggaaagccttcatgctatgcaaataaagacagctgggggaacttctagttagtggtggtagattaaataagcatacctgagagaaattcaaag

SEQ ID NO: 438190 - DNA, 120 bp, Artificial Sequence
  ENSG00000153292_35 (sequence is synthesized)
ttagacttccacaaggcaccaaggtgcagcacacatgaaatatgaaagtgagaggttcaaaggaaatgactgaggatcagttagatggttctataccccacaaatatgtatgagagtcaa

SEQ ID NO: 438191 - DNA, 120 bp, Artificial Sequence
  ENSG00000153292_36 (sequence is synthesized)
cagaattttatgagaaagacttctttgcagaaaactgctctatgagccttctcactctacctacccacaaaagtgagagaaggaggaatgtctgctccttgacctcaaatttagtgagag

SEQ ID NO: 438192 - DNA, 120 bp, Artificial Sequence
  ENSG00000153292_37 (sequence is synthesized)
aagatttctcagatagctcagatagctcagatttctcagaaccacaacaattaggatgcatggctgatggaagtctgattcttgcctagaattgtggccacagctccggtagtagagccc

SEQ ID NO: 438193 - DNA, 120 bp, Artificial Sequence
  ENSG00000153292_38 (sequence is synthesized)
tgaatgagttctgtgttgagaatagcctgtatgtctagtgtttgtcagggcaatggatgtgtgtgtttcccatgaaccatagtgagacatgcaagagtgaaggtcagcatggggctcttt

SEQ ID NO: 438194 - DNA, 120 bp, Artificial Sequence
  ENSG00000153292_39 (sequence is synthesized)
taggtcctctctgatagggttgtccaaagaggtggagggaacccagcatcaagaagtgggaggtgaagccagattgtgggatgaggaaggagtcacaaatgaccacctggaatacaaaaa

SEQ ID NO: 438195 - DNA, 120 bp, Artificial Sequence
  ENSG00000153292_40 (sequence is synthesized)
aatctacacaagctaaagatgagaagtcagggctatgagaatttctatgggagttcttgaatgctccctctcttattacacacaattactatccagagaaccctgacaccatgtgaaggc

SEQ ID NO: 438196 - DNA, 120 bp, Artificial Sequence
  ENSG00000153292_41 (sequence is synthesized)
agccctatctcataagacagatttctttttttggggaccttggggaaagggaggccagaaacctccgtgtccaaggtggggtggaaggagagggagaaatcttagcaaaaatgtcaacca

SEQ ID NO: 438197 - DNA, 120 bp, Artificial Sequence
  ENSG00000153292_42 (sequence is synthesized)
gcaagggaagatgtgctagcgcaagtaggcaactcaacacaagactcagttggagagggaagaaaaatttagtactaaattattgtagtttcttcttattgtaggcgactgggagtcata

SEQ ID NO: 438198 - DNA, 120 bp, Artificial Sequence
  ENSG00000153292_43 (sequence is synthesized)
attaccaaactatttaaaatgaccaaaatgttgctcttacctgagtatgttggcatacaactggaatgtatctgatggaagaaaaagcttctcccactgaataaattttatgaggatgat

SEQ ID NO: 438199 - DNA, 120 bp, Artificial Sequence
  ENSG00000153292_44 (sequence is synthesized)
gagagacaaaaaaatgtttgatcagatatcatgtatgtgcatgcttgtctaattcactgattatgcatacattcacctcaaaatgctactaaaacaacaataaaataatgaaaaagtgaa

SEQ ID NO: 438200 - DNA, 120 bp, Artificial Sequence
  ENSG00000153292_45 (sequence is synthesized)
gaaattcaacttaaaaaagcatatgaaagaattcaaggttttgagtcggttcaggtcacccaatttcgaatgtcactcttgtcgcccaagttggagtgcaatggcacaatctaggctcac

SEQ ID NO: 438201 - DNA, 65 bp, Artificial Sequence
  ENSG00000153292_46 (sequence is synthesized)
tgcaaccctgcaacctctgcctacctgccaccacatccagctaactttttttgtatttttagtag

SEQ ID NO: 438202 - DNA, 76 bp, Artificial Sequence
  ENSG00000153292_47 (sequence is synthesized)
ggaccttaaatattggaaagcattctcaaaactgtgggtcagtgagtagaactacaaaacaatagcagtagggcag

SEQ ID NO: 438203 - DNA, 120 bp, Artificial Sequence
  ENSG00000153292_48 (sequence is synthesized)
ggtcagtgagtagaactacaaaacaatagcagtagggcagaaacttgaaagaaggcaggagatcatggtgacagtggatgggaaaaagtgagggttggggataagggttgcgggttgtcg

SEQ ID NO: 438204 - DNA, 120 bp, Artificial Sequence
  ENSG00000153292_49 (sequence is synthesized)
agagtaaagcaaagctttgttgagaatcatttttagtcagagcactgtttttcctccattttcctccatgggtttctcttccagtaacaaatgtgatccaaagaaatgtaagcatagaca

SEQ ID NO: 438205 - DNA, 120 bp, Artificial Sequence
  ENSG00000153292_50 (sequence is synthesized)
tgaaaagggataatgccgcctttaaaactgttttctagtttgttgttagaagttataaaaatacacaggaacacagcattcacttgaaaataaatttttaggcattttaaatagattaaa

SEQ ID NO: 438206 - DNA, 120 bp, Artificial Sequence
  ENSG00000153292_51 (sequence is synthesized)
gcagaagaaagagtgagaaagtaaccattctaaattcttaaaaagagaatagcacctatgaaaatgaaataaagaatcatgaataacatcaggaagtcaggaaatgcagaccaacagtaa

SEQ ID NO: 438207 - DNA, 120 bp, Artificial Sequence
  ENSG00000153292_52 (sequence is synthesized)
aattcggagccagaagtggggctttgggtgagatatctttgcacagataacatgtatacatcatagttcaaaacccagtagtcattgtttacagcaaataaagaaatatttagtaaatta

SEQ ID NO: 438208 - DNA, 120 bp, Artificial Sequence
  ENSG00000153292_53 (sequence is synthesized)
gaaaatactctgtaatcaatagaatggacatatcaatacaaagaaatggaagcatcgttgctgggtatgaagttgttggctccagcagtgcatctgaactgctgtcagccattgaacatg

SEQ ID NO: 438209 - DNA, 120 bp, Artificial Sequence
  ENSG00000153292_54 (sequence is synthesized)
gtgaggcattttcactgtgtagacttgccctggtcttgagtttcagagtggcaatatcccagtgagcatggctaggtggagggtaagtatacctacgtgcatcattggccagtatgcaaa

SEQ ID NO: 438210 - DNA, 120 bp, Artificial Sequence
  ENSG00000153292_55 (sequence is synthesized)
gagcaaggatgacatcagaccctggtgaacccgtggagtcgtgcatgagtggtagcgtctgggcagcagagtctaggttgcagctcaaaagacagagttgatagttttgtcaggcagagg

SEQ ID NO: 438211 - DNA, 120 bp, Artificial Sequence
  ENSG00000153292_56 (sequence is synthesized)
tgttgtggaggagtgtatcattgctgaggaggtctatgatggatggtagagcagcaactaagctggcctcagaagtccagaagacctgggaattaaagagaagagtgaaggtgtgagtca

SEQ ID NO: 438212 - DNA, 120 bp, Artificial Sequence
  ENSG00000153292_57 (sequence is synthesized)
aactgcaatggaccttaaggggcatctggtttaccaacctcattttgcagatcagaaaacaaaagaccaaggggccaatagttcctctggtagcaatagttttgaattagaagcatggtc

SEQ ID NO: 438213 - DNA, 120 bp, Artificial Sequence
  ENSG00000153292_58 (sequence is synthesized)
acttgattcctagtccagtgctgtattagtctgttctcacattgttataaagaactatttgagactgggtagtttataaagaaaagaggtttgactcacagttatgcaggatgtacaaaa

SEQ ID NO: 438214 - DNA, 84 bp, Artificial Sequence
  ENSG00000153292_59 (sequence is synthesized)
ggatgtacaaaaggcatagaggcgaaagggaagtaagcacatccttatatggtgacaggagagagagagagagagagagagaga

SEQ ID NO: 438215 - DNA, 120 bp, Artificial Sequence
  ENSG00000153292_60 (sequence is synthesized)
ttttaaacaaccagatcttgtgagaactgtatcatgagacagcacttgggggatggtgctaaaccattagaaaccacctccatgatccaatcatctcccaccaagccccacctccaacat

SEQ ID NO: 438216 - DNA, 89 bp, Artificial Sequence
  ENSG00000153292_61 (sequence is synthesized)
atggtgctaaaccattagaaaccacctccatgatccaatcatctcccaccaagccccacctccaacattgggaattataactcgacata

SEQ ID NO: 438217 - DNA, 120 bp, Artificial Sequence
  ENSG00000153292_62 (sequence is synthesized)
gttcaagtattaagacaagtaagacagaaagaaggaaataaatatctaggaatcagaagaactcaagtcacagaaaagaaggaccccaagaccagttcacagatactgttcagcaagtag

SEQ ID NO: 438218 - DNA, 120 bp, Artificial Sequence
  ENSG00000153292_63 (sequence is synthesized)
atttccatattgagcagaacttctattccagccagagaccttgcttctgctgctgcagtagaaaaccccagaatagtattcatcagaggactgtggaatgtttacttctccctttgtgga

SEQ ID NO: 438219 - DNA, 120 bp, Artificial Sequence
  ENSG00000153292_64 (sequence is synthesized)
tctcagtttcctcatctgtaaactggggaaggggattagattctggggtttcttcttgctcttgccttcgttgcctcaattctggacatgagcaatagttgagactagttcgctccaggc

SEQ ID NO: 438220 - DNA, 120 bp, Artificial Sequence
  ENSG00000153292_65 (sequence is synthesized)
agatcccaggtggcttgaacagaaaacagcattgtcagttgagaagaacaagaaggaaaatggcgggcacttgggcgcctgagtggacttaatgttgagtggaaggggactgccttcctt

SEQ ID NO: 438221 - DNA, 120 bp, Artificial Sequence
  ENSG00000153292_66 (sequence is synthesized)
ggaaggggactgccttcctttgctgctttccaagttagcctggtgtagtaaaagtagatgggagcctcaagaaagaagtaaaattccaaatctagggccgggtgcagtggctcatgcctg

SEQ ID NO: 438222 - DNA, 62 bp, Artificial Sequence
  ENSG00000153292_67 (sequence is synthesized)
gcctggccaacatggtgaaacccctgtttctactaaggatacaaaaacaattagctgggcgt

SEQ ID NO: 438223 - DNA, 120 bp, Artificial Sequence
  ENSG00000153292_68 (sequence is synthesized)
gtttacattaattaccaactattaataatctgtctgcttgttagagaaagtggcttagaggtcagagaaattgacttgtgattttttttcacagttaacttaaaaacacccataggacat

SEQ ID NO: 438224 - DNA, 88 bp, Artificial Sequence
  ENSG00000153292_69 (sequence is synthesized)
tctggccaacccataggaaattttcaacagcatttgctataaacatgttgttctgggcattatcctttaagtcatacatgaatagttt

SEQ ID NO: 438225 - DNA, 120 bp, Artificial Sequence
  ENSG00000153292_70 (sequence is synthesized)
tgttctgggcattatcctttaagtcatacatgaatagttttctttaaaattcaataccagcaaaaacactgcttttttttatattgaggtttatacagttgatcatactttcaatattca

SEQ ID NO: 438226 - DNA, 120 bp, Artificial Sequence
  ENSG00000153292_71 (sequence is synthesized)
tatttttcttttctgtgatccttgttttctatttatacttctaatttatattctatcatgcatatcttataagctgtctccaataatctgcagaccaaatcacagtaaaagtaggcacaa

SEQ ID NO: 438227 - DNA, 120 bp, Artificial Sequence
  ENSG00000153292_72 (sequence is synthesized)
gtctataaactacaactttttacttttgttctgtttcattttgtttcaatatggggtctcactctgttgcccatgctggagtggagtggtgcgatctcagttcactgcagccttgacccc

SEQ ID NO: 438228 - DNA, 120 bp, Artificial Sequence
  ENSG00000153292_73 (sequence is synthesized)
ctgcagccttgacccctgggttcaagcaatcccacctatgcctccctggtagctaggatcacaggcacttgccatcattcttggctaattagttgaggtcttgctatgttgctcaggctg

SEQ ID NO: 438229 - DNA, 120 bp, Artificial Sequence
  ENSG00000153292_74 (sequence is synthesized)
ctctagtgatcttcctaccttggcctcccataatactggcattacaggcatgagacacgaagcccagcctaaagttttactttttgcatatatgatttaaaataaatctcttttaaaaaa

SEQ ID NO: 438230 - DNA, 89 bp, Artificial Sequence
  ENSG00000153292_75 (sequence is synthesized)
tttttgcatatatgatttaaaataaatctcttttaaaaaaattattttaaaaaataaagaagggtttcagcctcaaatgacccacacac

SEQ ID NO: 438231 - DNA, 120 bp, Artificial Sequence
  ENSG00000153292_76 (sequence is synthesized)
catgcccagattaaaataaatcttaatctctcactctatttacttatctgtcaaacaggacagttatacacctgtggaacctggtttaacttcactaaatcaaacctataacaagcagga

SEQ ID NO: 438232 - DNA, 120 bp, Artificial Sequence
  ENSG00000153292_77 (sequence is synthesized)
aaatactctgtaatcaatagaatggacatatcaatacaaaggtattgtgaccatcattaagcaaaagggtgtctgcacttatttatacattgtgagcagaagttcaatgtagtaagaatt

SEQ ID NO: 438233 - DNA, 120 bp, Artificial Sequence
  ENSG00000153292_78 (sequence is synthesized)
tgagctgcggaacttccgatcaattagtaattaataattttttcacccaacttctcattgggcctcagttctcttatctataaaatgggaatgatacactgcttatctcatgagttattg

SEQ ID NO: 438234 - DNA, 120 bp, Artificial Sequence
  ENSG00000153292_79 (sequence is synthesized)
caggattgacttaatgtattgatctcatgtgctttcatgtcttcaaacacatctgtatgctgatggattctaaatttattacttgagctcgggcactcccctgaactccagactcaaata

SEQ ID NO: 438235 - DNA, 120 bp, Artificial Sequence
  ENSG00000153292_80 (sequence is synthesized)
accaacggcctacttgacagtctccacttggttttccagctgggatgtcaaatgtcatgtgtccaaactgggaatcctctgactctccccttcctaacctataacttatttttcccactg

SEQ ID NO: 438236 - DNA, 120 bp, Artificial Sequence
  ENSG00000153292_81 (sequence is synthesized)
tcttccctatttccattacagcaatgctgtccttccacttgcagagacccaatcctggagccatcctgtgctataatttcttttattgaggtataacttgcacacagttatgtgctcaaa

SEQ ID NO: 438237 - DNA, 120 bp, Artificial Sequence
  ENSG00000153292_82 (sequence is synthesized)
ctttgtgtatgactctatcagctttgaaaaacgcttgtgcaagtcccttcctgtcaagatggaacattcccataaccccaaaagttctcttgtgttgctttccagcctctttccatgcca

SEQ ID NO: 438238 - DNA, 120 bp, Artificial Sequence
  ENSG00000153292_83 (sequence is synthesized)
tcccctcacgccagaagcaaccacttgtatgatttttatcatcacaggttagtttagtctattccagaacttcacataaatagaataatccagtttttttttttttttgcatgttcggcg

SEQ ID NO: 438239 - DNA, 120 bp, Artificial Sequence
  ENSG00000153292_84 (sequence is synthesized)
tctttcactcagcataatgtcattgagattcatcctcatttttctatcagtggttccttcctttttgtagtccagtagtactccatggtaagaatatacaaaaacttgcttttccattcc

SEQ ID NO: 438240 - DNA, 120 bp, Artificial Sequence
  ENSG00000153292_85 (sequence is synthesized)
ttggagttattattgactgatttctttctttcacatcccaaatcttctccattagtaagttctatggctctggctccaaataaaacctgaatttgaccacatgcatagctacccagctag

SEQ ID NO: 438241 - DNA, 120 bp, Artificial Sequence
  ENSG00000153292_86 (sequence is synthesized)
ttcaagccaccaccagctctttcctaactgagttccctgtaccttgcttgcttcccttccatctgttttctacacagcagcctttacggtcttaaaaagataaatcttatgatgccacta

SEQ ID NO: 438242 - DNA, 120 bp, Artificial Sequence
  ENSG00000153292_87 (sequence is synthesized)
ccttttaataaagaagaaaactttttaataaagaatgaaatcgcaactctaatgtcctatgagatctgactcctggtaccactccaatatcatctcctgctattgctcccttgctgctga

SEQ ID NO: 438243 - DNA, 120 bp, Artificial Sequence
  ENSG00000153292_88 (sequence is synthesized)
atttcaatcatcctagtatttaagcttgtcaaactcacaggcattttcccgccttaggacctttacttgtgctgacattccacaccagtgttctttgcatagctggccttttcttctttg

SEQ ID NO: 438244 - DNA, 120 bp, Artificial Sequence
  ENSG00000153292_89 (sequence is synthesized)
catagctggcctcaggcctcagcttcaaagacccacagcacaaaaaagccttccataaccagctttatttaatgtggggccccataattatatctgtatatatacagatgtatttataca

SEQ ID NO: 438245 - DNA, 120 bp, Artificial Sequence
  ENSG00000153292_90 (sequence is synthesized)
tatatatatatcatatatatatgtatttttggtggatacttgtttttttatttgccttgccttatccactagaatgtaagctctgtttactttattcctatggaccccatggcatgtaca

SEQ ID NO: 438246 - DNA, 120 bp, Artificial Sequence
  ENSG00000153292_91 (sequence is synthesized)
aaaaaaaacaaatcttgtgacaaaacgggggctggcacaagcccagtagtcaaatctccatgtatgtttctctctcttcccatcttacaacgcattctcagtgtagcgtggtgaacataa

SEQ ID NO: 438247 - DNA, 120 bp, Artificial Sequence
  ENSG00000153292_92 (sequence is synthesized)
caggattactaccagtagacctaccctaacattttccgctgagtgctctttggaaggtcattaaatctcattgaacatgagtttctgtataattaagataataatttatatgaaaatgat

SEQ ID NO: 438248 - DNA, 120 bp, Artificial Sequence
  ENSG00000153292_93 (sequence is synthesized)
ttttagtaaatctttgcaagtttcagtttccttagctataaaatgaaaataataatggcacctccctcaaaggatattgaaagaattcaatgaatgaaaataataatggtacctccctca

SEQ ID NO: 438249 - DNA, 120 bp, Artificial Sequence
  ENSG00000153292_94 (sequence is synthesized)
aaggatgttgaaagaattcaatgaatccctggtaaagcacctagtgcaatgtctaaaatatagaaatcactgaataacagcctttgttactattgttatgtaattatcctacattagaac

SEQ ID NO: 438250 - DNA, 120 bp, Artificial Sequence
  ENSG00000153292_95 (sequence is synthesized)
acaccatacaaatgttagttctatatggccaagacatctgatttaaatttgatgaaacacagcatgtcattgttttctagaacttaaccattttcgcttctagaatttcagtatgattgt

SEQ ID NO: 438251 - DNA, 120 bp, Artificial Sequence
  ENSG00000153292_96 (sequence is synthesized)
gtgaccctgacagaaaacaggacagaagtcatctttatagtaggatttttactaagtgaacaaggatctgtgatgctttaaaaagtctgaagagtaaagcctagattctcacttaaatga

SEQ ID NO: 438252 - DNA, 120 bp, Artificial Sequence
  ENSG00000153294_0 (sequence is synthesized)
acaagccttgaaactgtgggtaactttacagttctcagatcggcttctcgcaacaggcagtcagttctcactgggccccttggactcccatttcaaaaatggagaagacagatcacagcc

SEQ ID NO: 438253 - DNA, 120 bp, Artificial Sequence
  ENSG00000153294_1 (sequence is synthesized)
actgaccagggaccgtgggaggtgccacgtgatggtgaggcatcatgctagggagctgagctctgaccttcctgctgggtgattctccacctctgggctgctagatctacttcctggatg

SEQ ID NO: 438254 - DNA, 120 bp, Artificial Sequence
  ENSG00000153294_2 (sequence is synthesized)
ccgtgaagatcctcatgtatgaaaatgaagtcccaggcaaccatgatttgctgcttagtgttctttctgtccacagaatgttcccactatagatccaagattcacctaaaagctggagat

SEQ ID NO: 438255 - DNA, 120 bp, Artificial Sequence
  ENSG00000153294_3 (sequence is synthesized)
aaacttcaaagccctgaagggaaacccaagactggaaggatccaagagaaatgcgaaggaccttgtatttcttcttccaactgcagccagccctgtgctaaggactttcatggagaaata

SEQ ID NO: 438256 - DNA, 120 bp, Artificial Sequence
  ENSG00000153294_4 (sequence is synthesized)
ggatttacatgtaatcaaaaaaagtggcaaaaatcagctgaaacatgtacaagcctttctgtggaaaaactctttaaggactcaactggtgcatctcgcctttctgtagcagcaccatct

SEQ ID NO: 438257 - DNA, 120 bp, Artificial Sequence
  ENSG00000153294_5 (sequence is synthesized)
atacctctgcatattctagactttcgagctccagagaccattgagagtgtagctcaaggaatccgtaagaactgcccctttgattatgcctgcatcactgacatggtgaaatcatcagaa

SEQ ID NO: 438258 - DNA, 120 bp, Artificial Sequence
  ENSG00000153294_6 (sequence is synthesized)
acaacatctggaaatattgcatttatagtggagttattaaaaaatatttctacagacttgtctgataatgttactcgagagaaaatgaagagctatagtgaagtggccaaccacatcctc

SEQ ID NO: 438259 - DNA, 120 bp, Artificial Sequence
  ENSG00000153294_7 (sequence is synthesized)
gacacagcagccatttcaaactgggctttcattcccaacaaaaatgccagctcggatttgttgcagtcagtgaatttgtttgccagacaactccacatccacaataattctgagaacatt

SEQ ID NO: 438260 - DNA, 120 bp, Artificial Sequence
  ENSG00000153294_8 (sequence is synthesized)
gtgaatgaactcttcattcagacaaaagggtttcacatcaaccataatacctcagagaaaagcctcaatttctccatgagcatgaacaataccacagaagatatcttaggaatggtacag

SEQ ID NO: 438261 - DNA, 120 bp, Artificial Sequence
  ENSG00000153294_9 (sequence is synthesized)
attcccaggcaagagctaaggaagctgtggccaaatgcatcccaagccattagcatagctttcccaaccttgggggctatcctgagagaagcccacttgcaaaatgtgagtcttcccaga

SEQ ID NO: 438262 - DNA, 120 bp, Artificial Sequence
  ENSG00000153294_10 (sequence is synthesized)
caggtaaatggtctggtgctatcagtggttttaccagaaaggttgcaagaaatcatactcaccttcgaaaagatcaataaaacccgcaatgccagagcccagtgtgttggctggcactcc

SEQ ID NO: 438263 - DNA, 120 bp, Artificial Sequence
  ENSG00000153294_11 (sequence is synthesized)
aagaaaaggagatgggatgagaaagcgtgccaaatgatgttggatatcaggaacgaagtgaaatgccgctgtaactacaccagtgtggtgatgtctttttccattctcatgtcctccaaa

SEQ ID NO: 438264 - DNA, 120 bp, Artificial Sequence
  ENSG00000153294_12 (sequence is synthesized)
tcgatgaccgacaaagttctggactacatcacctgcattgggctcagcgtctcaatcctaagcttggttctttgcctgatcattgaagccacagtgtggtcccgggtggttgtgacggag

SEQ ID NO: 438265 - DNA, 120 bp, Artificial Sequence
  ENSG00000153294_13 (sequence is synthesized)
tcccttctgactgccaatgtgtggtttatcataggctctcactttaacattaaggcccaggactacaacatgtgtgttgcagtgacatttttcagccactttttctacctctctctgttt

SEQ ID NO: 438266 - DNA, 120 bp, Artificial Sequence
  ENSG00000153294_14 (sequence is synthesized)
ttctggatgctcttcaaagcattgctcatcatttatggaatattggtcattttccgtaggatgatgaagtcccgaatgatggtcattggctttgccattggctatgggtgcccattgatc

SEQ ID NO: 438267 - DNA, 120 bp, Artificial Sequence
  ENSG00000153294_15 (sequence is synthesized)
attgctgtcactacagttgctatcacagagccagagaaaggctacatgagacctgaggcctgttggcttaactgggacaataccaaagcccttttagcatttgccatcccggcgttcgtc

SEQ ID NO: 438268 - DNA, 120 bp, Artificial Sequence
  ENSG00000153294_16 (sequence is synthesized)
attgtggctgtaaatctgattgtggttttggttgttgctgtcaacactcagaggccctctattggcagttccaagtctcaggatgtggtcataattatgaggatcagcaaaaatgttgcc

SEQ ID NO: 438269 - DNA, 120 bp, Artificial Sequence
  ENSG00000153294_17 (sequence is synthesized)
atcctcactccactgctgggactgacctggggttttggaatagccactctcatagaaggcacttccttgacgttccatataatttttgccttgctcaatgctttccagggttttttcatc

SEQ ID NO: 438270 - DNA, 120 bp, Artificial Sequence
  ENSG00000153294_18 (sequence is synthesized)
ctgctgtttggaaccattatggatcacaagataagagatgctttgaggatgaggatgtcttcactgaaggggaaatcgagggcagctgagaatgcatcactaggcccaaccaatggatct

SEQ ID NO: 438271 - DNA, 120 bp, Artificial Sequence
  ENSG00000153294_19 (sequence is synthesized)
aaattaatgaatcgtcaaggatgaaatgctgccccatttctcatggatgtcctgagaccaagaggggagatccaggagaaagaggccatggaaagcaggctggagtgaggaggaatggtc

SEQ ID NO: 438272 - DNA, 120 bp, Artificial Sequence
  ENSG00000153294_20 (sequence is synthesized)
atgcttccttggaagactttctcttcttgtcaggagtgactcccaagctcttggtcggccgaagaaaaactgaggataacatttgctgactgggctttaaggagcatgatttatggaccc

SEQ ID NO: 438273 - DNA, 120 bp, Artificial Sequence
  ENSG00000153294_21 (sequence is synthesized)
cttaacctacccgtgccctgcaagaggctggcttcttggtcaatcttgactagattaagagtcaatctgcaagccattttatggtctccctggccagctgggggctgtagggccctgctg

SEQ ID NO: 438274 - DNA, 120 bp, Artificial Sequence
  ENSG00000153294_22 (sequence is synthesized)
ggcttggtcgtctttcactcctgaggcctgctctgtggctccatagctcagtcctccatcactctgcgtggatcctgggtactttggacagtgagggttcgatccaattttaggggtagg

SEQ ID NO: 438275 - DNA, 120 bp, Artificial Sequence
  ENSG00000153294_23 (sequence is synthesized)
gttgggggtgggagtgggagtgtgggttggcaggaggaagaatgagtctactttggagacaattaagtcatggtacgtttcctaaagatagggaacggaagaaaagcaagagaactgttt

SEQ ID NO: 438276 - DNA, 120 bp, Artificial Sequence
  ENSG00000153294_24 (sequence is synthesized)
aatatgctgattattttagtctattttagaccttgagtaaactaatttagcttctaggatccaagtttccttatttgtgaaacaggaaaaaaaaattcttgtaggtattactgtttgtgt

SEQ ID NO: 438277 - DNA, 120 bp, Artificial Sequence
  ENSG00000153294_25 (sequence is synthesized)
gtttgagtttactgcacatgtttgtgtttgtgtatatgtgtcttttaaaaatactatatataaagaagattctggttgttattttagacataaacgaatatatgtacctttcacaacttg

SEQ ID NO: 438278 - DNA, 120 bp, Artificial Sequence
  ENSG00000153294_26 (sequence is synthesized)
atgtacactggtccctgtaaggtcctccacctctcatctgggcttttaccaaatagcggtaggtttggtattgttctcagcgatgaataccaggttgtaacatctttatggtgccagctg

SEQ ID NO: 438279 - DNA, 120 bp, Artificial Sequence
  ENSG00000153294_27 (sequence is synthesized)
tatacaacccatgcacctcaacaggcctctggaatgcttcttctgaattatcttgtcatcccatcaaaggcccaagttaacaaaccaggctacatccctaacctaggagaatgttcccac

SEQ ID NO: 438280 - DNA, 120 bp, Artificial Sequence
  ENSG00000153303_0 (sequence is synthesized)
tgaggcttccccagccatgtggaactagcatttaggaactgtgcagccatcactgccatccgaccacccccagaggacacctcgcccctctgcagtccctgctgccagctccctggcccc

SEQ ID NO: 438281 - DNA, 120 bp, Artificial Sequence
  ENSG00000153303_1 (sequence is synthesized)
ccagctccctggccccgaagatgctgcctttgctggatgtctcggaatggagcccggccttttgcatccagcttctcccttgcagtgggatgtttagtcctgtgcctgtgtcagttctgc

SEQ ID NO: 438282 - DNA, 120 bp, Artificial Sequence
  ENSG00000153303_2 (sequence is synthesized)
cttccttctcaccacggaacagcattcccacattgttttccaaaacctgtgctttgtggacctagagctccgaagcttgagttctagaatgttctcagcaggcctctatctatctcatga

SEQ ID NO: 438283 - DNA, 120 bp, Artificial Sequence
  ENSG00000153303_3 (sequence is synthesized)
tagaggatggaaaccagccgtccagaagaagagagagttgggccgaggaggactccagggctcagccatgaggagatctgggcggtggtctcctcttcctcgcggcctctgcccgtccac

SEQ ID NO: 438284 - DNA, 120 bp, Artificial Sequence
  ENSG00000153303_4 (sequence is synthesized)
tgcccggccctgacatcacgaacgtggcaggccagcctcttccatcacgaacaggccagtcgagaagacaagacattcagaggggcgcgatgtatggaacccagtcctgagaggcctgca

SEQ ID NO: 438285 - DNA, 120 bp, Artificial Sequence
  ENSG00000153303_5 (sequence is synthesized)
tgcagtcagcaggagccgaccctgggaatggacgcgatggcctcggaacacagggatgtcctcgtgctgctgcccagccgggagcaactgcggctggccgtgggggtgaaggctactggc

SEQ ID NO: 438286 - DNA, 120 bp, Artificial Sequence
  ENSG00000153303_6 (sequence is synthesized)
cgcgagcttttccagcaagtgtgcaacgtggcgagcatcagagacgcgcagttctttggcctctgtgtggtcagaaacaatgagtatatatttatggatttggagcaaaagctcagcaag

SEQ ID NO: 438287 - DNA, 120 bp, Artificial Sequence
  ENSG00000153303_7 (sequence is synthesized)
tacttctcaaaagattggaagaaagaaagaaatgaaggaaatgagaaacccagagcccccttcgtggccttcctccgagtgcagcactacgtggaaaacggaagggtcataagcgaccac

SEQ ID NO: 438288 - DNA, 120 bp, Artificial Sequence
  ENSG00000153303_8 (sequence is synthesized)
agggcacggcacctgtactactgccacttgaaggagcgcgtgctgaggtcacagtgcgctcaccgggaggaagcctacttcctgctggctgcctgcgcgctgcaggctgacctgggcgag

SEQ ID NO: 438289 - DNA, 120 bp, Artificial Sequence
  ENSG00000153303_9 (sequence is synthesized)
caccgggagtcggcccatgccgggaggtacttcgagccacactcctacttcccacagtggatcatcaccaagagggggattgactacatcctccggcacatgcctaccctgcaccgtgag

SEQ ID NO: 438290 - DNA, 120 bp, Artificial Sequence
  ENSG00000153303_10 (sequence is synthesized)
cgccagggcctgagccccaaggaggccatgctgtgcttcatccaggaggcctgccggctggaggacgtgcccgtgcacttcttcaggctgcacaaggataagaaggaaggtcgtcccacc

SEQ ID NO: 438291 - DNA, 120 bp, Artificial Sequence
  ENSG00000153303_11 (sequence is synthesized)
gtgatcctgggactggccctcaggggagtgcacatctaccaggaggtggaccgtgctccgcagctgctgtacgacctcccctggccccacgttgggaagctggcatttctgggaaagaag

SEQ ID NO: 438292 - DNA, 120 bp, Artificial Sequence
  ENSG00000153303_12 (sequence is synthesized)
ctggagatccagctggatgggctgcccgcagcacagaagctggtttactacacggggtgcacctggcggtccaggcacctgctgcacctgctgcgcgccagccaccagctccacctccgc

SEQ ID NO: 438293 - DNA, 120 bp, Artificial Sequence
  ENSG00000153303_13 (sequence is synthesized)
gtgcggcccactctgcaacagctgcggcagcgggaggaggcagaagagaagcagcactaccgggagtcctatatcagcgatgagctggagctggacctggccagcaggagcttcccgggc

SEQ ID NO: 438294 - DNA, 120 bp, Artificial Sequence
  ENSG00000153303_14 (sequence is synthesized)
agtggggtcagcagccagcactgcccccactgcctctcacgccactccgccgacagccacggcagttcctacacgtcaggcatcaaggccaactcctggctcagggaatccagagagatg

SEQ ID NO: 438295 - DNA, 120 bp, Artificial Sequence
  ENSG00000153303_15 (sequence is synthesized)
tctgtggacgtgcccttggaggtccacgggctccatgagaaggagccgtcctccagccccaggaccagccgcagccaccccagcacacgtggtgacagccaagccactcgtcaggagccc

SEQ ID NO: 438296 - DNA, 120 bp, Artificial Sequence
  ENSG00000153303_16 (sequence is synthesized)
tgcacccaggtcaggaccagaggccagagcgccgaggccgtgcaccagatccaggaaatgacagccggggtcagtgaggagcagcacagccatggcctggacgacatgcagctgcaccag

SEQ ID NO: 438297 - DNA, 120 bp, Artificial Sequence
  ENSG00000153303_17 (sequence is synthesized)
ctggccctgcacccagcgcccacctcactcagccataccttccaccgcgccctggactgcaggctggcaggcccctgcgagaccagggccactctccccagcaagaggtccagcaactgt

SEQ ID NO: 438298 - DNA, 120 bp, Artificial Sequence
  ENSG00000153303_18 (sequence is synthesized)
ctcgccctggacctgttcggagaggctccaccacaggagtttgtggtgtaggcaccacccacccagcagtaccgtccgcaccgccaggctcagcccctgcccaccccacttccacatggc

SEQ ID NO: 438299 - DNA, 120 bp, Artificial Sequence
  ENSG00000153303_19 (sequence is synthesized)
cctcgtcccttcctgcccgccagatgctgcctgcacttccgcagccagcacgctccacaggttcacctgtaagaggtgtggagctggctctgacatcaacctgggaggtaacaaacaggt

SEQ ID NO: 438300 - DNA, 120 bp, Artificial Sequence
  ENSG00000153303_20 (sequence is synthesized)
cccgcacctcatgcctgtctgccatacacccgggagctctttccctcagggtctcagggagccagttcaaggtctggctgtcaagtgtccagagagccatggtgttggcccctgaggcag

SEQ ID NO: 438301 - DNA, 120 bp, Artificial Sequence
  ENSG00000153303_21 (sequence is synthesized)
cctgtcacccatcctaatctgggagagaaggtgacacagctgggcccagaccctggagagacagctctgcagtttcccacactgtcagctccccaagagacagtcctgatgggcacaggc

SEQ ID NO: 438302 - DNA, 120 bp, Artificial Sequence
  ENSG00000153303_22 (sequence is synthesized)
tgccagagctcccaagccggagttcacagtcatcactgtgcaggacccaggttcctcccagacctgaacccctctctgcaactcctgtttgcaagcgctgggcctgccagacagaggccc

SEQ ID NO: 438303 - DNA, 120 bp, Artificial Sequence
  ENSG00000153303_23 (sequence is synthesized)
ctcttgtggtgcaagcccagctctgtcacctgagatccagccagagaccctcctccaccatccacagtcaatggctgtgctttcccttccaagccagggcttccaaagaccccactgccc

SEQ ID NO: 438304 - DNA, 120 bp, Artificial Sequence
  ENSG00000153303_24 (sequence is synthesized)
cggagctgaagccgactctgctcccatctcagccatgaggcctcaggacccactctgctcacaggtggcttccttaagccattgccctggctggggttgggctggtgcagcccagctggc

SEQ ID NO: 438305 - DNA, 120 bp, Artificial Sequence
  ENSG00000153303_25 (sequence is synthesized)
agacggagagtgggggactagctgtgcatggcacctgctctgatccggtgggctccacgggtagtgcgacctcggttctgtgggctctggaaggccaccagggtagggtctccccagggc

SEQ ID NO: 438306 - DNA, 120 bp, Artificial Sequence
  ENSG00000153303_26 (sequence is synthesized)
tcctccccctgcacaacactcctgcacacgtgcaaacctgctgtcctctgcatttagaggaatggcccgtgcatccctgctagtctcaggcccatcccagagcactgagaggccacaatc

SEQ ID NO: 438307 - DNA, 120 bp, Artificial Sequence
  ENSG00000153303_27 (sequence is synthesized)
gttcagccctgtgccctgaacaccactgcccccttcactgtctgtgtgtggtgaagaccacgccacaccaccctccagctcactggagacaagcatgagcttgagccccatggcctggtg

SEQ ID NO: 438308 - DNA, 120 bp, Artificial Sequence
  ENSG00000153303_28 (sequence is synthesized)
cagggctgcgtgcattgaggccgcctctttgacgggtccatccagggggaccctctcctttctgtgaaagggaatcgtgtgtgtgccccaggcacgtgtaataaagaacccgagcagatg

SEQ ID NO: 438309 - DNA, 120 bp, Artificial Sequence
  ENSG00000153303_29 (sequence is synthesized)
cctcctgcttgaaccaggaccagcctgcctggggggctggtgagatgccggctgtaactcactcaggggcatcggccacagaaggctgcgttctgtagatggccacaagccccagtgctg

SEQ ID NO: 438310 - DNA, 120 bp, Artificial Sequence
  ENSG00000153303_30 (sequence is synthesized)
ccgagggcaagactgcccacaattcctgtgcggcaggggaggtgcgcctagtgctggctcagatgtgagcatgtgggcacttcccaaagccattcccattagtacaagatgattgatttg

SEQ ID NO: 438311 - DNA, 120 bp, Artificial Sequence
  ENSG00000153303_31 (sequence is synthesized)
ccccgctccggggcaatgactatcttcttcctttgaagaaacttggaagcaagagcccagtcccatggaccatgagggaaggtacacaccagtgttggggagacacagcaggtggtgtcc

SEQ ID NO: 438312 - DNA, 120 bp, Artificial Sequence
  ENSG00000153303_32 (sequence is synthesized)
accatgaagcagggtctgagccaagacctacatgcacacatgcacacatccacatgcatgcacacacatacatgcacacacgcacacatctgcacacagatgcacacgcatgcacacaca

SEQ ID NO: 438313 - DNA, 120 bp, Artificial Sequence
  ENSG00000153303_33 (sequence is synthesized)
cacatgcacacatccatacatgcacactccccatgtccaggcttcccctgccagtcaccttcgccacacgccatagaccccaggggcagcaaaggccgggccagcccacccctaacttgt

SEQ ID NO: 438314 - DNA, 120 bp, Artificial Sequence
  ENSG00000153303_34 (sequence is synthesized)
ggaagcatcagtgaagctggcccggcgccttgtgtcctggcagaggcgaggcagccatggcccctggctgacccgagaagcttctctggccccactggggattcctatttctgtccttcc

SEQ ID NO: 438315 - DNA, 120 bp, Artificial Sequence
  ENSG00000153303_35 (sequence is synthesized)
tctgggccttgtggacagacatggagaattatgccagatgcctgttaactaccgggtagggctgctccaaagactctaatctctggtgttcagggtatgtggagaggacaattagaggcc

SEQ ID NO: 438316 - DNA, 120 bp, Artificial Sequence
  ENSG00000153303_36 (sequence is synthesized)
cgctgccctgagacttgcccaagaggggacggccaggcaggccacatgaagcccatgtgggctaccagctcagacacacccagccggggccggggcagactcccctaaggcttgagcctc

SEQ ID NO: 438317 - DNA, 120 bp, Artificial Sequence
  ENSG00000153303_37 (sequence is synthesized)
agctttgctcaccgcccctccccacagcccccttccacgtcacccacacctggaggggcaggagcggagctggaagcagaaggccatcctgggagggggctccttcccagacagaaagca

SEQ ID NO: 438318 - DNA, 120 bp, Artificial Sequence
  ENSG00000153303_38 (sequence is synthesized)
gcagagagcggggctgcgggaagtcggggaagccaacctttctttttgcacagattgagatcagaggtcttttaggcaatacggctattttccagaaaaatggacaccgactggtaggga

SEQ ID NO: 438319 - DNA, 120 bp, Artificial Sequence
  ENSG00000153303_39 (sequence is synthesized)
cagggatgtttcctaagaaggagggtggggggcagggctgggggtggcctgcaaacagcagaagccgctgtgtacaggggggcttgtggccttcaggtggcatgaggcaggccggtgggg

SEQ ID NO: 438320 - DNA, 120 bp, Artificial Sequence
  ENSG00000153303_40 (sequence is synthesized)
gaggggcacagggtaaagtccccaatccctgtcttaccctgtcagtggagaggaaaagaaaaccacctgtcccagtccctgtggacccccaaggagcaggccaaggacctccagcatcac

SEQ ID NO: 438321 - DNA, 120 bp, Artificial Sequence
  ENSG00000153303_41 (sequence is synthesized)
agcctcgcatgagcccggctggggtggtcagtcctgtggcccgggccaggtcagcggtcaagctggcaggtccagactcgcaagaacgacccagagagcttgttcaggctgggtttctca

SEQ ID NO: 438322 - DNA, 120 bp, Artificial Sequence
  ENSG00000153303_42 (sequence is synthesized)
gccccccactgcgtctgcttctgtgggtctcgctgggccccggaacctgcattgctgctgcgggggtctgggtctgagggcgcagctctccctgctgggtggggtgtgggaggcggcaga

SEQ ID NO: 438323 - DNA, 120 bp, Artificial Sequence
  ENSG00000153303_43 (sequence is synthesized)
ccctgctcctgggggcagttggtctggagtggtgacagggtggccctgggcagggtgtggccggttccctcttgcctgtgttgaagcatggactcctctgggccctcagccatcagccca

SEQ ID NO: 438324 - DNA, 120 bp, Artificial Sequence
  ENSG00000153303_44 (sequence is synthesized)
gcctccctcacggaagatggagaattccagacaaagctcatccttcctccaggaaagcctgctccatctgcagtaattgacggcctgagaagctctgctcttgggctgaaccccaagcag

SEQ ID NO: 438325 - DNA, 120 bp, Artificial Sequence
  ENSG00000153303_45 (sequence is synthesized)
gaggaggaggccggggtcctcaggtgcccatctgggaggcccggggcagccagcaactgcctgtgtgtctgggatctcacaggagaggtggttcccaagccgagcatcagcccgtcgtgg

SEQ ID NO: 438326 - DNA, 120 bp, Artificial Sequence
  ENSG00000153303_46 (sequence is synthesized)
cccatggactctgggttccccaggcgggggaaatgtgccagagccacggggaaagctgagctctgcggccctgcgagtgcattcacaaaggtttatcagtttgtaaaacttgcagaaaaa

SEQ ID NO: 438327 - DNA, 120 bp, Artificial Sequence
  ENSG00000153303_47 (sequence is synthesized)
gccgtccgtgtttgggacaggcggccccttccactcagggttcatccgtcacgctcctttcgccttgaggggcactgagggccctgtgggtgtgtggggcccgcgtaggggaggctgaac

SEQ ID NO: 438328 - DNA, 120 bp, Artificial Sequence
  ENSG00000153303_48 (sequence is synthesized)
tggacacacacttggctcggtctgctgggagacgtttcggggttcccagtcatgtcgtctctacctgtaggagcagcagggagtctcaggacaggatggccagggccagaggtcacctgg

SEQ ID NO: 438329 - DNA, 120 bp, Artificial Sequence
  ENSG00000153303_49 (sequence is synthesized)
tgaggcggacatgtactcccaacctgggaggtgtggggactggaagagaaacagagctggcagtgggaggctggacgtggtaggcaatgccggtcctgcagccgggcccatgaccgttct

SEQ ID NO: 438330 - DNA, 120 bp, Artificial Sequence
  ENSG00000153303_50 (sequence is synthesized)
cacggcggcgagctgtgatggggaggctgccttccaggtgccaaggttagaaaacaaatccggggcagccctgccgggagaaagctggtattctacaaaggcgcgtgaagaggtgaacac

SEQ ID NO: 438331 - DNA, 120 bp, Artificial Sequence
  ENSG00000153303_51 (sequence is synthesized)
aagagcggcggccgcttctacaccgccggcgggaccacggcccggagccttgagccggacgacgagccggacctcggcccccggaaggggcgcgatgtatggaacccagtcctgagaggc

SEQ ID NO: 438332 - DNA, 120 bp, Artificial Sequence
  ENSG00000153303_52 (sequence is synthesized)
ggaaatgtggacacgggacgccggaaacagggacacgcaccagacgctgggtgtttagaggctgccgtgagaggctcagctgtaggaacactgttgggatcactcgcatcagttgggcga

SEQ ID NO: 438333 - DNA, 120 bp, Artificial Sequence
  ENSG00000153303_53 (sequence is synthesized)
tggaagaaagaaagaaatgaactgctccgtccagaggggctgtccgcagggggactgtggtgagccctgaggctgcaagcaggtgtgcccgcccgaagcccgcctttgcagatgttcttg

SEQ ID NO: 438334 - DNA, 120 bp, Artificial Sequence
  ENSG00000153303_54 (sequence is synthesized)
aacgctgtagaccacgtcccactcagggttctccgggtagaaaataccatgagtcgaattgtcagctatggctgcagacacctgagcttcgactttaagctgagtgtgaagcaatccagg

SEQ ID NO: 438335 - DNA, 120 bp, Artificial Sequence
  ENSG00000153303_55 (sequence is synthesized)
cccccccaactgggaagacaggacagccagcggcacctccctgcggctcacttgctctttcttgcattttccccactagggaaatgagaaacccagagcccccttcgtggccttcctccg

SEQ ID NO: 438336 - DNA, 120 bp, Artificial Sequence
  ENSG00000153303_56 (sequence is synthesized)
gaaatgagaaacccagagcccccttcgtggccttcctccgagtgcagcactacgtggaaaacggaagggtcataagtagagacggggtttctctgtgttggtcaagctggtctcaaactc

SEQ ID NO: 438337 - DNA, 120 bp, Artificial Sequence
  ENSG00000153303_57 (sequence is synthesized)
cacccaggtcaggaccagaggccagagcgccgaggccgtgcaccagtttcctcccgtataaaataggaggccgttcttgaccactgaggtgcttccagagctagtgttcaaggcccacac

SEQ ID NO: 438338 - DNA, 120 bp, Artificial Sequence
  ENSG00000153303_58 (sequence is synthesized)
tcagacctgatcctaaattacaccaaacgctaagagtccaggtccactgagttaaaaggcagaaagcagccccaggaaagaagctgggcaaggtgggggcctcctgaaatgcatcaaagg

SEQ ID NO: 438339 - DNA, 120 bp, Artificial Sequence
  ENSG00000153303_59 (sequence is synthesized)
gtgatctgggaggtgctgagcacccacctgcgacccatggcgggggagggccgagtaacgacagcatggcggtgcccccgagagggaggggcatagaccccgcccggacaaaccctgaca

SEQ ID NO: 438340 - DNA, 120 bp, Artificial Sequence
  ENSG00000153303_60 (sequence is synthesized)
gtaaggggtgtttcctggaatactgaaaatctgccgcatgacgtggaagtcccctgaaggccacacattacatttgagtttatccaaaaacaaaaaacaaacaaacaaccccactatatc

SEQ ID NO: 438341 - DNA, 120 bp, Artificial Sequence
  ENSG00000153303_61 (sequence is synthesized)
acaaacaaccccactatatcggctgtttgctttggggttaacacaggaattctatttaatcgaaaggtatacagactgtgtcataaattggtacttctttttcttttctttttctttttg

SEQ ID NO: 438342 - DNA, 69 bp, Artificial Sequence
  ENSG00000153303_62 (sequence is synthesized)
caagcgattcttctgccttagtctccagagtagctgggattacaggcggtgtgttggtcaagctggtct

SEQ ID NO: 438343 - DNA, 120 bp, Artificial Sequence
  ENSG00000153303_63 (sequence is synthesized)
caggtgtgagccaccgtgcccggcctaaagtggtacttcctcaaatgccaggactcgtactctctagggtgggtataccatccgggggtgggcgaggcttctggaggtcgctgggctaag

SEQ ID NO: 438344 - DNA, 120 bp, Artificial Sequence
  ENSG00000153303_64 (sequence is synthesized)
aggtcgctgggctaagggctgctatgcttgctgcgtggcggttctcgctgttcactgcccactctgcaggtgtctagtgggaagctttccccgacaggagtgggtaagttgtacatctgg

SEQ ID NO: 438345 - DNA, 120 bp, Artificial Sequence
  ENSG00000153303_65 (sequence is synthesized)
tgggctgcactctaaaccaacgggggctgcttcttccagagctgccttagagcttctagggtaacaaagacgtccctcaggaggatcctgagacttacttccagaacagagcttcagggg

SEQ ID NO: 438346 - DNA, 120 bp, Artificial Sequence
  ENSG00000153303_66 (sequence is synthesized)
tgcgtgaacagggtttaccctgggggaaaacctaagggggtttcccaggaattccctaagcaggcacaatccctgccagttccaaaaggcatgtgtgcggttgtgtggaaggttctaggg

SEQ ID NO: 438347 - DNA, 120 bp, Artificial Sequence
  ENSG00000153303_67 (sequence is synthesized)
ggtgaggggcgtgtggttgtgtgggagggttctggagagtgaaaggtgtgtggttgtgtggagagccctggagacactggtatgtggttgtgtggcaggttctggagagtgaggggtgtg

SEQ ID NO: 438348 - DNA, 120 bp, Artificial Sequence
  ENSG00000153303_68 (sequence is synthesized)
tgaatatgtggaaggttctggatagccttggaggggaggtctggaaagtgttgggttgatggatggagctacctggtgctatggggccagttcgggggaattatatgagaagatcttgca

SEQ ID NO: 438349 - DNA, 120 bp, Artificial Sequence
  ENSG00000153303_69 (sequence is synthesized)
cctgcatcttgggcgagcctccacctggcctgtgattaatgaataccagccatggccaagccccgtgctgggcggtgagctctgggagccaggtctgtccacatccagggattcaagttg

SEQ ID NO: 438350 - DNA, 120 bp, Artificial Sequence
  ENSG00000153303_70 (sequence is synthesized)
tccaggccctgtgcacctccagggattcgagtcgcccgggctctgtgcacctctcctgcactggggcttggtttggtgaaggccaagctcactggggaaggagtgggacctcggcaggtg

SEQ ID NO: 438351 - DNA, 120 bp, Artificial Sequence
  ENSG00000153303_71 (sequence is synthesized)
gagcctcatctagtggctccttggtggcagcaagtcacctgtgccccgctccaggaagagtgtgggcctgtgccgtgctggccctgcagggacacagctgtgggtataacaagacaggaa

SEQ ID NO: 438352 - DNA, 120 bp, Artificial Sequence
  ENSG00000153303_72 (sequence is synthesized)
ctaggtaccaggggctcaggacagccctgggagctggtgtggggagggacaaggcagggccagaggggccagcagtccccacaccggtcgtcctggaactcactccctgccaccttccag

SEQ ID NO: 438353 - DNA, 120 bp, Artificial Sequence
  ENSG00000153303_73 (sequence is synthesized)
acactcagttttgaacacacggtgacacctgagaagcatggtgactgctctgatgaagccttttgttttgctttcagacaatgagtatatatttatggatttggagcaaaagctcagcaa

SEQ ID NO: 438354 - DNA, 120 bp, Artificial Sequence
  ENSG00000153310_0 (sequence is synthesized)
aaacggcggcggcggcggcaccggaggctccgaggctcctgcgctcccgcgccgcgctcccctcgcccgcccgggccgccaggagaagaaactgaggcctggaatttgattaactcattc

SEQ ID NO: 438355 - DNA, 120 bp, Artificial Sequence
  ENSG00000153310_1 (sequence is synthesized)
aaggttacccagttggtaattcatttgcacacctgttagcaagaaacagaagttgaaggactggaacaagtgaactaggaaagagggaacgccaatccaaggatagaaggacaaggacag

SEQ ID NO: 438356 - DNA, 120 bp, Artificial Sequence
  ENSG00000153310_2 (sequence is synthesized)
aatcaccagcactggctgaaggcctcctgtttcctgcgctttctccttttcctgtgaaatctccgaggagaagaaagaatgatggacagtttatcctttcactgccacaaggcctgttta

SEQ ID NO: 438357 - DNA, 120 bp, Artificial Sequence
  ENSG00000153310_3 (sequence is synthesized)
cttggcagtaccttaacatggggaatcttcttaaagttttgacatgcacagaccttgagcaggggccaaattttttccttgattttgaaaatgcccagcctacagagtctgagaaggaaa

SEQ ID NO: 438358 - DNA, 120 bp, Artificial Sequence
  ENSG00000153310_4 (sequence is synthesized)
tttataatcaggtgaatgtagtattaaaagatgcagaaggcatcttggaggacttgcagtcatacagaggagctggccacgaaatacgagaggcaatccagcatccagcagatgagaagt

SEQ ID NO: 438359 - DNA, 120 bp, Artificial Sequence
  ENSG00000153310_5 (sequence is synthesized)
tgcaagagaaggcatggggtgcagttgttccactagtaggcaaattaaagaaattttacgaattttctcagaggttagaagcagcattaagaggtcttctgggagccttaacaagtaccc

SEQ ID NO: 438360 - DNA, 120 bp, Artificial Sequence
  ENSG00000153310_6 (sequence is synthesized)
catattctcccacccagcatctagagcgagagcaggctcttgctaaacagtttgcagaaattcttcatttcacactccggtttgatgaactcaagatgacaaatcctgccatacagaatg

SEQ ID NO: 438361 - DNA, 120 bp, Artificial Sequence
  ENSG00000153310_7 (sequence is synthesized)
atttcagctattatagaagaacattgagtcgtatgaggattaacaatgtaccggcagaaggagaaaatgaagtaaataatgaattggcaaatcgaatgtctttgttttatgctgaggcaa

SEQ ID NO: 438362 - DNA, 120 bp, Artificial Sequence
  ENSG00000153310_8 (sequence is synthesized)
gtatgcagagtcatgctggaaacaccggaatacagaagcagatttacaaatgaagagacagtgtcattctgcttgagggtaatggtgggtgtcataatactctatgaccacgtacatcca

SEQ ID NO: 438363 - DNA, 120 bp, Artificial Sequence
  ENSG00000153310_9 (sequence is synthesized)
gtgggagcatttgctaaaacttccaaaattgatatgaaaggttgtatcaaagttcttaaggaccaacctcctaatagtgtggaaggtcttctaaatgctctcaggtacacaacaaaacat

SEQ ID NO: 438364 - DNA, 120 bp, Artificial Sequence
  ENSG00000153310_10 (sequence is synthesized)
ttgaatgatgagactacctccaagcaaattaaatccatgctgcaataacaattctggaataagcacctgctgtagacagaagacagtattctgcaatgactgagaatgcagttttttagt

SEQ ID NO: 438365 - DNA, 120 bp, Artificial Sequence
  ENSG00000153310_11 (sequence is synthesized)
gattgcaattactatctcatttattcttgcttttatttctttcctctgttcctcttccctcttttttaatcatgttcttaagacttcttttctgtgccaaaatcagtaaagttacactct

SEQ ID NO: 438366 - DNA, 120 bp, Artificial Sequence
  ENSG00000153310_12 (sequence is synthesized)
gaagggatatcatcctttcaaacgggccatctaaggcagctaattatgcattgcattggggtctctactgagaaaaattctgtgacttgaactaaatatttttaaatgtggatttttttt

SEQ ID NO: 438367 - DNA, 120 bp, Artificial Sequence
  ENSG00000153310_13 (sequence is synthesized)
gaaactaatatttaatattgcttctcctgcatggcaaaactgcctattctgctatttaaaaaccctcaatgactttattttctactgccgcctttttcatgtgcaaccaaaatgaaaatg

SEQ ID NO: 438368 - DNA, 120 bp, Artificial Sequence
  ENSG00000153310_14 (sequence is synthesized)
tttaaattaactgtgttgtacaaatggtacccaacacaaactttttttaaattagtaatacttttgtttaaagttttaagtttgcattttgactttttttgtaaggatgtatgttgtgtg

SEQ ID NO: 438369 - DNA, 120 bp, Artificial Sequence
  ENSG00000153310_15 (sequence is synthesized)
tttaacctttattaactaacgttaaaagctgtgatgtgtgcgtagaatattacgtatgcatgttcatgtctaaagaatggctgttgatgataaaataaaaatcagctttcatttttctaa

SEQ ID NO: 438370 - DNA, 120 bp, Artificial Sequence
  ENSG00000153310_16 (sequence is synthesized)
cggcgccctcacttcctggcattccctcctccccctccccgtcgttaccctgtacatccgggtcacttgccctccccgctcggagctgccgcctggcttgtcgcggctctgccacagggg

SEQ ID NO: 438371 - DNA, 120 bp, Artificial Sequence
  ENSG00000153310_17 (sequence is synthesized)
caggtgttgaggggctcccggtccggctgccgccgctcccccgctccggacccggggctccccctagcgccgctgaggagccgcctctgcggctccaggagggcgcaggagcgggactga

SEQ ID NO: 438372 - DNA, 120 bp, Artificial Sequence
  ENSG00000153310_18 (sequence is synthesized)
tacattacatgattttttcttcttttaggggagagccgggtcttttcattagaattttgatcattgtctatgtatatacttttaattgcctttaaaattttgctaagtatattaagacca

SEQ ID NO: 438373 - DNA, 120 bp, Artificial Sequence
  ENSG00000153310_19 (sequence is synthesized)
gtgatcttttcattaactggacttttattcttgatttactcttgtatggatgtagtaatggaaggaaaaccgcatccttgcttgattctccatttccaggggagcgggtagcaacatgaa

SEQ ID NO: 438374 - DNA, 120 bp, Artificial Sequence
  ENSG00000153310_20 (sequence is synthesized)
ggcagagtagccctttaatcatgggaagagagtgattataagagggacttcccaggagaaaagcagaggccatgatctcactagtggtagaaaactaacaggtttcagtttaagatcata

SEQ ID NO: 438375 - DNA, 120 bp, Artificial Sequence
  ENSG00000153310_21 (sequence is synthesized)
aaacctaaatcatgaaatctaaatctcatggttggaacaaactacttaaaggttgtctagttcaaccatgccagtgttttaaatatttaggaatatccgaggtataatacaattaaaatg

SEQ ID NO: 438376 - DNA, 120 bp, Artificial Sequence
  ENSG00000153310_22 (sequence is synthesized)
tttaaccatggaagagaatcacagaggcttccatcagacccttctggattaatagggccagatcatggcacacacagcttctcaagatcacatccctgctgatctctctggccctcctga

SEQ ID NO: 438377 - DNA, 120 bp, Artificial Sequence
  ENSG00000153310_23 (sequence is synthesized)
tcactgctcccccacttcacaccctgtcctgcagccaggccctactgcttgctgttcacaaattgttccatgtgatgtcacttccttagctctggtctggctggtccctgaacctgacat

SEQ ID NO: 438378 - DNA, 120 bp, Artificial Sequence
  ENSG00000153310_24 (sequence is synthesized)
tcccttcctccccttgtgaccctctaatgaacgccaactttcatctttgaagggttagcttctattacctccttcatgaagccttctggataacattggccatatccttctaggcatctt

SEQ ID NO: 438379 - DNA, 120 bp, Artificial Sequence
  ENSG00000153310_25 (sequence is synthesized)
ctaagaatagtgtaataggctgaatagtggcccccaggagatacattcactgggaatctccacgtgtgacattatttggaaaaagtttttgcagatgaaatcaaggacctggaaatgaga

SEQ ID NO: 438380 - DNA, 120 bp, Artificial Sequence
  ENSG00000153310_26 (sequence is synthesized)
tcaacctgtagtagggtgggccctaaattcaatgactagctcttagaaaagaaggggaaatagacacacagagctgaaggccatgggaagatggaggcagagattagagcaatgcatcta

SEQ ID NO: 438381 - DNA, 120 bp, Artificial Sequence
  ENSG00000153310_27 (sequence is synthesized)
tgagccaaagaaccctaagaattggaggaagtcactagaagctaggaaaacaggcatgtcacagattctccctcagagtctcgagaaggaaccaaccctaccaatatcttgatttcagac

SEQ ID NO: 438382 - DNA, 120 bp, Artificial Sequence
  ENSG00000153310_28 (sequence is synthesized)
atctggcctccaggattgtgagggaataaatttctgttgttttaagccatgcagtttgtggtattttggtacagcagccttaagaatctgatacatgtatctcgtaaaacacctctgata

SEQ ID NO: 438383 - DNA, 120 bp, Artificial Sequence
  ENSG00000153310_29 (sequence is synthesized)
cttacctgcgcttgtggctgtgttttctgatactatgagagccgtagtatctggataccggagagtctgcgaacttgagagaagggccgtgtctgattttccttcagtgtcccaaggaag

SEQ ID NO: 438384 - DNA, 120 bp, Artificial Sequence
  ENSG00000153310_30 (sequence is synthesized)
gatcttgcacagtacccagatttggagaggtgccaagtgaatgcttcggtggactgaatgaatacaaatcaaaaataatgatgcagcgggaatggatgcagtaagattgctgtggcctat

SEQ ID NO: 438385 - DNA, 120 bp, Artificial Sequence
  ENSG00000153310_31 (sequence is synthesized)
gcagttcacacagttcacactctgcatgttgaggagtaagtggacagatctcttaagcccaggggctagcaaaccggtctgtgggccaatttactcaccgtctgtttttgtacagcttgt

SEQ ID NO: 438386 - DNA, 120 bp, Artificial Sequence
  ENSG00000153310_32 (sequence is synthesized)
gagctaaaaatggtttttaaaaaggttgaatacaatcaaaagaataatattttgtggcatgagaaaagcatatgaaattcaaattttagtgttcataaataaaattttattggaacctaa

SEQ ID NO: 438387 - DNA, 120 bp, Artificial Sequence
  ENSG00000153310_33 (sequence is synthesized)
ccactagtaggcaaagaaattttacgaattttctcagaggttagaagcagcattaagaggtcttctgggagccttaacaagtaccccatattctcccacccagcatctagagcgagacag

SEQ ID NO: 438388 - DNA, 120 bp, Artificial Sequence
  ENSG00000153310_34 (sequence is synthesized)
aggcccagtaagtatctgcgggagggctgaatgggtgcgtggacagcattcctctcactgaccccgctgcgaggtgagccaggcaggggctgtcaccattcctgaagtccaggagaagaa

SEQ ID NO: 438389 - DNA, 120 bp, Artificial Sequence
  ENSG00000153310_35 (sequence is synthesized)
gagcgtcctccttttgtgcgagcgccggcggctcggcttctcgaaggagaagaaactgaggcctggaatttgattaactcattcaaggttacccagttggtaagtaacagagctggaatt

SEQ ID NO: 438390 - DNA, 120 bp, Artificial Sequence
  ENSG00000153310_36 (sequence is synthesized)
tgaccatggtcatctggctccagagccagcactcttaaccacacttcctatgaggaaaaattaaagtggatggtgatggctacaagatggatttcagttgcatagaaataagaacctcct

SEQ ID NO: 438391 - DNA, 120 bp, Artificial Sequence
  ENSG00000153310_37 (sequence is synthesized)
catatacaccccttcattcactctatgaatattcattcattccatgaacctacaaggtttttaggtcaaattattagtttaaataagaactataggctgggcgcagtggctcacacctgt

SEQ ID NO: 438392 - DNA, 120 bp, Artificial Sequence
  ENSG00000153310_38 (sequence is synthesized)
gccaccctgcccagcccattctgtcctttaaatcgccactcagcaccttttccagaagtcttcccttagcaaaccgtttgtttttcattgcatgtgtggtatattagtttgactgatttt

SEQ ID NO: 438393 - DNA, 120 bp, Artificial Sequence
  ENSG00000153310_39 (sequence is synthesized)
actcttaggttgggtttttttctgttctaagaataattaatttgacatagtatgtaatctcttgagttccatagttatggtcttgatttattttactattttgaaaaggaatgttacatg

SEQ ID NO: 438394 - DNA, 120 bp, Artificial Sequence
  ENSG00000153310_40 (sequence is synthesized)
attgagttgctaaaaatgttgttaggaaatattgattgtttagtttttggcttagaataggacctggtggggaaaatgtaaattaattagaactttttttaacagctttctttctttagg

SEQ ID NO: 438395 - DNA, 120 bp, Artificial Sequence
  ENSG00000153310_41 (sequence is synthesized)
agaggtatgtgttttcctttgaattaagtcattttagctgtcaccagtatagttgatcaagaaagttctaagccataattttagtagtttaaagtatatatatgtacatatatatttttt

SEQ ID NO: 438396 - DNA, 120 bp, Artificial Sequence
  ENSG00000153310_42 (sequence is synthesized)
ccgccaacccggaaacggcggcggcggcggcaccggaggctccgaggctcctgcgctcccgcgccgcgctcccctcgcccgcccgggccgccagatagaaggacaaggacagaatcacca

SEQ ID NO: 438397 - DNA, 120 bp, Artificial Sequence
  ENSG00000153310_43 (sequence is synthesized)
gtgcgagcgccggcggctcggcttctcgaaggagaagaaactgaggcctggaatttgattaactcattcaaggttacccagttgataactgcagcattggactagaggtggagagagtgg

SEQ ID NO: 438398 - DNA, 120 bp, Artificial Sequence
  ENSG00000153310_44 (sequence is synthesized)
ataaaaatttaccaatagaaaataccacagattgtttaagcacaatggctagtgtatgcagagtcatgctggaaacaccgtgagtatcagctgatctttttcactttaacagtgctgttg

SEQ ID NO: 438399 - DNA, 120 bp, Artificial Sequence
  ENSG00000153310_45 (sequence is synthesized)
agatgactgatatttcaaaacatgttcatatatgaacatgttaacatgttttatctggaaggtggaaagtaagtatattccaaatattgaatgttaatatatgaacaaacttaaaataat

SEQ ID NO: 438400 - DNA, 120 bp, Artificial Sequence
  ENSG00000153310_46 (sequence is synthesized)
ttggctatttaacgtaacttctggttaagtataaaatagagttagttggtcttcaggtacctcagaccactcagactgactcagactcttagttctcttctcagaacagaagtggtggtg

SEQ ID NO: 438401 - DNA, 120 bp, Artificial Sequence
  ENSG00000153310_47 (sequence is synthesized)
cgcgtcgcgaggcgagcgtcctccttttgtgcgagcgccggcggctcggcttctcgaaggtaaacagcgcttcctcttcctcctcgccgcgcctcttccttttatagttatttctcgcct

SEQ ID NO: 438402 - DNA, 120 bp, Artificial Sequence
  ENSG00000153310_48 (sequence is synthesized)
gcgatgcggcggggactgggcgcggggggaggcgcgtcgcgaggcgagcgtcctccttttgtgcgagcgccggcggctcggcttctcgaaggagaagaaactgaggcctggaatttgatt

SEQ ID NO: 438403 - DNA, 120 bp, Artificial Sequence
  ENSG00000153310_49 (sequence is synthesized)
ggcaggtactctgtgttgttatttatgcccctgttggcagacgtgatgtcagcaagcccaagacattaaataccatcttgaaaccaacagactcccagatgtatgtgttgagtcctgact

SEQ ID NO: 438404 - DNA, 120 bp, Artificial Sequence
  ENSG00000153310_50 (sequence is synthesized)
tttttctgaggcccacatgtgcacacctgtccacgtatttgcagtttctctggagggatggtggaaacctcagtgatagctgatggcatggccaaaccaaactctgggttgcgttttcta

SEQ ID NO: 438405 - DNA, 120 bp, Artificial Sequence
  ENSG00000153310_51 (sequence is synthesized)
gttttctaaccctgccctttctttagtttttgctttctcaattaacagtaccagtgcaggcaaaaacttacaacttatgtcatcctaaattcctttcttttttttttgagacagagtttc

SEQ ID NO: 438406 - DNA, 120 bp, Artificial Sequence
  ENSG00000153310_52 (sequence is synthesized)
catgagccaccgcgcctggccatcatcctaaattcctttctatacctcactccctacatgtattccatcaaacagtctcattggctttccctccaaaatactaatatatcatgattctga

SEQ ID NO: 438407 - DNA, 120 bp, Artificial Sequence
  ENSG00000153310_53 (sequence is synthesized)
aaacttaagttgctttcttgccaccagccacatcagacttctcatctggattactgcattcgtgtcctgaccattcttacttcctccactcttgccccaatatagtcctttctccataga

SEQ ID NO: 438408 - DNA, 120 bp, Artificial Sequence
  ENSG00000153310_54 (sequence is synthesized)
gcaaccaagtaatcttaaaacataaaccatgttccctccctcctccatgtaaaatgttcccagtgacttcctagtacccttaggataaaatccaactatttcatagcctataaaactcta

SEQ ID NO: 438409 - DNA, 120 bp, Artificial Sequence
  ENSG00000153310_55 (sequence is synthesized)
cacctttgaccccctgtctgcattgttgcagttgttcttacattgctggaatgcaggtgcctttcagaagagtcctgccttcgctgtcttgctcatagctgtatccccagtgcttggaac

SEQ ID NO: 438410 - DNA, 120 bp, Artificial Sequence
  ENSG00000153310_56 (sequence is synthesized)
agttgcttagagtctagtgcattatttagaaaattaggagtaggaaccaggttttaaagttgctaatttttcatattacgctaaattttaaattgtgcttaagtaataacgtttgttact

SEQ ID NO: 438411 - DNA, 120 bp, Artificial Sequence
  ENSG00000153310_57 (sequence is synthesized)
tttagtaaagaatcttacccttttgccaaagggctggaattattcttctgtttatccctttttctctcaataattaattgtcactcttttcttttttttttccaacacgaacctgaattc

SEQ ID NO: 438412 - DNA, 120 bp, Artificial Sequence
  ENSG00000153310_58 (sequence is synthesized)
tgtttttttttctctcctctctaaacatttatgatgtatgatacagtgtgtcctggctggatttttcctgttagcaggcagaaagaatccctcctggattccagaataataaatacagtc

SEQ ID NO: 438413 - DNA, 120 bp, Artificial Sequence
  ENSG00000153310_59 (sequence is synthesized)
atgtgctgcttaatgacgttttggtcaacaatgggccacatatatgatggtccaaagcactatactgtacatcatctcattggaaaaccttatgaaataggagggcaactatcatcataa

SEQ ID NO: 438414 - DNA, 120 bp, Artificial Sequence
  ENSG00000153310_60 (sequence is synthesized)
tcatcttccttccccccaccaccaacttcagggagtgaggtcctgggaaatgaagggacactatccatgtgcttggatgtctctatcctggttccgtactctttccgctatgatatactg

SEQ ID NO: 438415 - DNA, 120 bp, Artificial Sequence
  ENSG00000153310_61 (sequence is synthesized)
ccttctatatatagataaaagttcaattttctttttcacaaatgagaggagaatatgattgagttttagtaaaattgatatccagtaatactataatgtatttagatcaagttagcacct

SEQ ID NO: 438416 - DNA, 120 bp, Artificial Sequence
  ENSG00000153310_62 (sequence is synthesized)
aaatagcaaacctgcttgctctattaagctagtgatttttcactataggtgctaacaaccattacgtagcatctattctctaaaattgttgctatcggtctagcagaggagcagtgcact

SEQ ID NO: 438417 - DNA, 120 bp, Artificial Sequence
  ENSG00000153310_63 (sequence is synthesized)
aatgtgggtgcagatattatagaaaccagaatacatgggtgatgactgttccactcaccatcttctcatatctctggggatctcattgtggagtaaggggcataatgttagtataccttt

SEQ ID NO: 438418 - DNA, 120 bp, Artificial Sequence
  ENSG00000153310_64 (sequence is synthesized)
tagagatcaaaggggcaagtcagcatcagctgaaagttgaatcacctcattaaagaattttatatccctttcagggggttgatttggaaaggaaaacagacataagatttgaatgtatca

SEQ ID NO: 438419 - DNA, 120 bp, Artificial Sequence
  ENSG00000153310_65 (sequence is synthesized)
gtgtggctacttgtgaacatactgcattcaactaatggatagaaatttgaataaaatatttcagaagaggtttttcttgtgtgtgtgtgtttttaaaaagaattttgtaatgcacttctt

SEQ ID NO: 438420 - DNA, 80 bp, Artificial Sequence
  ENSG00000153317_0 (sequence is synthesized)
acatggtcgcccgccccttcctgcgccgcgctcggctcccgcgcctcgcctggcctggccgctgccgcgggcgagcactg

SEQ ID NO: 438421 - DNA, 120 bp, Artificial Sequence
  ENSG00000153317_1 (sequence is synthesized)
gcgcttcccggtcgcagttcgctttcccacccgagagccgcgagcgcccggccgaacccgcgatggaataatgcccagcggcccgccaggtcccggtcgttttctgatgtgacggctgag

SEQ ID NO: 438422 - DNA, 120 bp, Artificial Sequence
  ENSG00000153317_2 (sequence is synthesized)
acatgagatcttcagcctccaggctctccagtttttcgtcgagagattcactatggaatcggatgccggaccagatctctgtctcggagttcatcgccgagaccaccgaggactacaact

SEQ ID NO: 438423 - DNA, 120 bp, Artificial Sequence
  ENSG00000153317_3 (sequence is synthesized)
cgcccaccacgtccagcttcaccacgcggctgcacaactgcaggaacaccgtcacgctgctggaggaggctctagaccaagatagaacagcccttcagaaagtgaagaagtctgtaaaag

SEQ ID NO: 438424 - DNA, 120 bp, Artificial Sequence
  ENSG00000153317_4 (sequence is synthesized)
caatatataattctggtcaagatcatgtacaaaatgaagaaaactatgcacaagttcttgataagtttgggagtaattttttaagtcgagacaaccccgaccttggcaccgcgtttgtca

SEQ ID NO: 438425 - DNA, 120 bp, Artificial Sequence
  ENSG00000153317_5 (sequence is synthesized)
agttttctactcttacaaaggaactgtccacactgctgaaaaatctgctccagggtttgagccacaatgtgatcttcaccttggattctttgttaaaaggagacctaaagggagtcaaag

SEQ ID NO: 438426 - DNA, 120 bp, Artificial Sequence
  ENSG00000153317_6 (sequence is synthesized)
gagatctcaagaagccatttgacaaagcctggaaagattatgagacaaagtttacaaaaattgagaaagagaaaagagagcacgcaaaacaacatgggatgatccgcacagagataacag

SEQ ID NO: 438427 - DNA, 120 bp, Artificial Sequence
  ENSG00000153317_7 (sequence is synthesized)
gagctgagattgcggaagaaatggagaaggaaaggcgcctctttcagctccaaatgtgtgaatatctcattaaagttaatgaaatcaagaccaaaaagggtgtggatctgctgcagaatc

SEQ ID NO: 438428 - DNA, 120 bp, Artificial Sequence
  ENSG00000153317_8 (sequence is synthesized)
ttataaagtattaccatgcacagtgcaatttctttcaagatggcttgaaaacagctgataagttgaaacagtacattgaaaaactggctgctgatttatataatataaaacagacccagg

SEQ ID NO: 438429 - DNA, 120 bp, Artificial Sequence
  ENSG00000153317_9 (sequence is synthesized)
atgaagaaaagaaacagctaactgcactccgagacttaataaaatcctctcttcaactggatcagaaagaagattctcagagccggcaaggaggatacagcatgcatcagctccagggca

SEQ ID NO: 438430 - DNA, 120 bp, Artificial Sequence
  ENSG00000153317_10 (sequence is synthesized)
ataaggaatatggcagtgaaaagaaggggtacctgctaaagaaaagtgacgggatccggaaagtatggcagaggaggaagtgttcagtcaagaatgggattctgaccatctcacatgcca

SEQ ID NO: 438431 - DNA, 120 bp, Artificial Sequence
  ENSG00000153317_11 (sequence is synthesized)
catctaacaggcaaccagccaagttgaaccttctcacctgccaagtaaaacctaatgccgaagacaaaaaatcttttgacctgatatcacataatagaacatatcactttcaggcagaag

SEQ ID NO: 438432 - DNA, 120 bp, Artificial Sequence
  ENSG00000153317_12 (sequence is synthesized)
atgagcaggattatgtagcatggatatcagtattgacaaatagcaaagaagaggccctaaccatggccttccgtggagagcagagtgcgggagagaacagcctggaagacctgacaaaag

SEQ ID NO: 438433 - DNA, 120 bp, Artificial Sequence
  ENSG00000153317_13 (sequence is synthesized)
ccattattgaggatgtccagcggctcccagggaatgacatttgctgcgattgtggctcatcagaacccacctggctttcaaccaacttgggtattttgacctgtatagaatgttctggca

SEQ ID NO: 438434 - DNA, 120 bp, Artificial Sequence
  ENSG00000153317_14 (sequence is synthesized)
tccatagggaaatgggggttcatatttctcgcattcagtctttggaactagacaaattaggaacttctgaactcttgctggccaagaatgtaggaaacaatagttttaatgatattatgg

SEQ ID NO: 438435 - DNA, 120 bp, Artificial Sequence
  ENSG00000153317_15 (sequence is synthesized)
aagcaaatttacccagcccctcaccaaaacccaccccttcaagtgatatgactgtacgaaaagaatatatcactgcaaagtatgtagatcataggttttcaaggaagacctgttcaactt

SEQ ID NO: 438436 - DNA, 120 bp, Artificial Sequence
  ENSG00000153317_16 (sequence is synthesized)
catcagctaaactaaatgaattgcttgaggccatcaaatccagggatttacttgcactaattcaagtctatgcagaaggggtagagctaatggaaccactgctggaacctgggcaggagc

SEQ ID NO: 438437 - DNA, 120 bp, Artificial Sequence
  ENSG00000153317_17 (sequence is synthesized)
ttggggagacagcccttcaccttgccgtccgaactgcagatcagacatctctccatttggttgacttccttgtacaaaactgtgggaacctggataagcagacggccctgggaaacacag

SEQ ID NO: 438438 - DNA, 120 bp, Artificial Sequence
  ENSG00000153317_18 (sequence is synthesized)
ttctacactactgtagtatgtacagtaaacctgagtgtttgaagcttttgctcaggagcaagcccactgtggatatagttaaccaggctggagaaactgccctagacatagcaaagagac

SEQ ID NO: 438439 - DNA, 120 bp, Artificial Sequence
  ENSG00000153317_19 (sequence is synthesized)
taaaagctacccagtgtgaagatctgctttcccaggctaaatctggaaagttcaatccacacgtccacgtagaatatgagtggaatcttcgacaggaggagatagatgagagcgatgatg

SEQ ID NO: 438440 - DNA, 120 bp, Artificial Sequence
  ENSG00000153317_20 (sequence is synthesized)
atctggatgacaaaccaagccctatcaagaaagagcgctcacccagacctcagagcttctgccactcctccagcatctccccccaggacaagctggcactgccaggattcagcactccaa

SEQ ID NO: 438441 - DNA, 120 bp, Artificial Sequence
  ENSG00000153317_21 (sequence is synthesized)
gggacaaacagcggctctcctatggagccttcaccaaccagatcttcgtttccacaagcacagactcgcccacatcaccaaccacggaggctccccctctgcctcctaggaacgccggga

SEQ ID NO: 438442 - DNA, 120 bp, Artificial Sequence
  ENSG00000153317_22 (sequence is synthesized)
aaggtccaactggcccaccttcaacactccctctaagcacccagacctctagtggcagctccaccctatccaagaagaggcctcctcccccaccacccggacacaagagaaccctatccg

SEQ ID NO: 438443 - DNA, 120 bp, Artificial Sequence
  ENSG00000153317_23 (sequence is synthesized)
accctcccagcccactacctcatgggcccccaaacaaaggcgcagttccttggggtaacgatgggggtccatcctcttcaagtaagactacaaacaagtttgagggactatcccagcagt

SEQ ID NO: 438444 - DNA, 120 bp, Artificial Sequence
  ENSG00000153317_24 (sequence is synthesized)
cgagcaccagttctgcaaagactgcccttggcccaagagttcttcctaaactacctcagaaagtggcactaaggaaaacagatcatctctccctagacaaagccaccatcccgcccgaaa

SEQ ID NO: 438445 - DNA, 120 bp, Artificial Sequence
  ENSG00000153317_25 (sequence is synthesized)
tctttcagaaatcatcacagttggcagagttgccacaaaagccaccacctggagacctgcccccaaagcccacagaactggcccccaagccccaaattggagatttgccgcctaagccag

SEQ ID NO: 438446 - DNA, 120 bp, Artificial Sequence
  ENSG00000153317_26 (sequence is synthesized)
acagctgggggacctgccacccaaaccccaactctcagacttacctcccaaaccacagatgaaggacctgccccccaaaccacagctgggagacctgctagcaaaatcccagactggaga

SEQ ID NO: 438447 - DNA, 120 bp, Artificial Sequence
  ENSG00000153317_27 (sequence is synthesized)
tgtctcacccaaggctcagcaaccctctgaggtcacactgaagtcacacccattggatctatccccaaatgtgcagtccagagacgccatccaaaagcaagcatctgaagactccaacga

SEQ ID NO: 438448 - DNA, 120 bp, Artificial Sequence
  ENSG00000153317_28 (sequence is synthesized)
cctcacgcctactctgccagagacgcccgtaccactgcccagaaaaatcaatacggggaaaaataaagtgaggcgagtgaagaccatttatgactgccaggcagacaacgatgacgagct

SEQ ID NO: 438449 - DNA, 120 bp, Artificial Sequence
  ENSG00000153317_29 (sequence is synthesized)
cacattcatcgagggagaagtgattatcgtcacaggggaagaggaccaggagtggtggattggccacatcgaaggacagcctgaaaggaagggggtctttccagtgtcctttgttcatat

SEQ ID NO: 438450 - DNA, 120 bp, Artificial Sequence
  ENSG00000153317_30 (sequence is synthesized)
cctgtctgactagcaaaacgcagaaccttaagattgtccacatccttcatgcaagactgctgccttcatgtaaccctgggcacagtgtgtatatagctgctgttacagagtaagaaactc

SEQ ID NO: 438451 - DNA, 120 bp, Artificial Sequence
  ENSG00000153317_31 (sequence is synthesized)
atggaagggccacctcaggagggggatataatgtgtgttgtaaatatcctgtggttttctgccttcaccagtatgagggtagcctcggacccggcgcgccttactggtttgccaaagcca

SEQ ID NO: 438452 - DNA, 120 bp, Artificial Sequence
  ENSG00000153317_32 (sequence is synthesized)
tccttggcatctagcacttacatctctctatgctgttctacaagcaaacaaacaaaaataggagtataggaactgctggctttgcaaatagaagtggtctccagcaaccgttgaaaggca

SEQ ID NO: 438453 - DNA, 120 bp, Artificial Sequence
  ENSG00000153317_33 (sequence is synthesized)
tagaattgactctgttcctaacaatgcagtattctcaattgtgttactgaaaatgcaacattagcaaagaggtgggttctgttttccaggtgaaacttttagctccatgacagaccagcc

SEQ ID NO: 438454 - DNA, 120 bp, Artificial Sequence
  ENSG00000153317_34 (sequence is synthesized)
tgtagttatctgtgtacacagtttacagctacaaaaacctactttggtatttattacagaaaagtgctcagttaaatgtaagtgttattccttcagcaaaatattcactgacccaaaact

SEQ ID NO: 438455 - DNA, 120 bp, Artificial Sequence
  ENSG00000153317_35 (sequence is synthesized)
ctttatggcattttacaatgcacacagcctcatgcaagtttagacaagtggatttatactgtcttatgagtgcccgcccctgatatattacctcattatgcaaaaataacatatctttca

SEQ ID NO: 438456 - DNA, 120 bp, Artificial Sequence
  ENSG00000153317_36 (sequence is synthesized)
tgactattttgacaaaagtttaaaacacatatgaagttcaaatttcaggaaccaaggactgccagaaaatattagcctctacattacgcatgcatttagaagcttacctgaaatctgcct

SEQ ID NO: 438457 - DNA, 120 bp, Artificial Sequence
  ENSG00000153317_37 (sequence is synthesized)
tttataaaggaatagtatggataagtggaattgtacattttttaaacttgattgccattaaagcagaaattataaggttgcaacaatatttgtttctaatcactggctttctcaagagta

SEQ ID NO: 438458 - DNA, 120 bp, Artificial Sequence
  ENSG00000153317_38 (sequence is synthesized)
tggattgacatattgtgttatgaatgcacatctctcagatgtgttgaagcatccattgcatccattttttattattttcttagttttgttcttggacaaatttaaacttttaaaagatta

SEQ ID NO: 438459 - DNA, 120 bp, Artificial Sequence
  ENSG00000153317_39 (sequence is synthesized)
ttcaagatgaatttaaaagtcaacccttcacacagtttccctactgtatgtagaatccaggtgctgaaaccaagtgtttcttttcccatgctctttgttaaaccccaattatagataatt

SEQ ID NO: 438460 - DNA, 120 bp, Artificial Sequence
  ENSG00000153317_40 (sequence is synthesized)
tttccagtcttaagctctgtccaccttcaagtcaattcataaccaagtttttgaacgctgctatgaattgcactgtgaaaagcactcttccctctcagttttcttttcatcccagccatg

SEQ ID NO: 438461 - DNA, 120 bp, Artificial Sequence
  ENSG00000153317_41 (sequence is synthesized)
tttatcagatccttaagaacattgtatttcagtcttttacatcagtctgaattttggaaaagaatgcaatagttgtactccacagtcagtggaactgttccctgagtccgaggctcatgt

SEQ ID NO: 438462 - DNA, 120 bp, Artificial Sequence
  ENSG00000153317_42 (sequence is synthesized)
gtcattctggcactacatttgcttaaattgctattttggcaacagcacagaaaactaatatttttaagcagagaatcttggcaatgagtgagagatgttaatttcacagaagcacaactc

SEQ ID NO: 438463 - DNA, 120 bp, Artificial Sequence
  ENSG00000153317_43 (sequence is synthesized)
ccaacccaacccttaggaaaagccctcttccatcgttacagtgctcagtgaatattaatttagttctgcttaagtggttgctatacaaactttgaatagccacctaataaataaaccttg

SEQ ID NO: 438464 - DNA, 120 bp, Artificial Sequence
  ENSG00000153317_44 (sequence is synthesized)
catgacaaacctgcaaaatattttatcagctgttattggaaagtgattttaagcaattgcttcctcagtgtcagggcacatgtgaatttccacaccaaacagagcatgaggaaccagttg

SEQ ID NO: 438465 - DNA, 120 bp, Artificial Sequence
  ENSG00000153317_45 (sequence is synthesized)
acatgctgggttgtgactggcagctttagcagcctcggtactgaagccacaccagtgtccggatggaagtctgcatctgaggttgctcagtgtcccggtcattcatttacacattttaac

SEQ ID NO: 438466 - DNA, 120 bp, Artificial Sequence
  ENSG00000153317_46 (sequence is synthesized)
ggtcattcatttacacattttaacttgcattaaagagctgttcttttctgtggcctagactcttttcactgatctcaaaataaactggtttttttcaaaaaaaaaaaaaaaacaaaaaca

SEQ ID NO: 438467 - DNA, 120 bp, Artificial Sequence
  ENSG00000153317_47 (sequence is synthesized)
tctaaaattacatggagttagtgtctattctttttccccttttgcagcaacttacacagcatttttaacaccttttttttctagtttttttgttcggttttgttttccatcaggaatttg

SEQ ID NO: 438468 - DNA, 120 bp, Artificial Sequence
  ENSG00000153317_48 (sequence is synthesized)
agttctctctaacccagcttactgtgggacataggaaaactcagtagaaatacctttggtgatcttgttgagtttaagtctgatcttgatcttaaactcagtaagccactatctgcaatt

SEQ ID NO: 438469 - DNA, 120 bp, Artificial Sequence
  ENSG00000153317_49 (sequence is synthesized)
ttgtacattatatagtattttgaagatatggaaccttatgaaaaaaaaatagcaaattagttctttttcccccagaggggaaagttatgttctgcaaatagtgtgtgtcttattttactg

SEQ ID NO: 438470 - DNA, 120 bp, Artificial Sequence
  ENSG00000153317_50 (sequence is synthesized)
ttgaacagcaattgctatttatttttttattgcctagaacttcaacatgttgtataggaatcctgtagtgccactagttaaatgccgaattctcatctggatgttaccatcaaacatcag

SEQ ID NO: 438471 - DNA, 120 bp, Artificial Sequence
  ENSG00000153317_51 (sequence is synthesized)
tacacttgtcatttcacatgtgtttaatgtgacagtttttcagtactgtatgtgttaatttctactttttttaatatttaaaattgcttttaaataaacatattctcagttgatcccaaa

SEQ ID NO: 438472 - DNA, 120 bp, Artificial Sequence
  ENSG00000153317_52 (sequence is synthesized)
gcctccaggctctccagtttttcgtcgagagattcactatggaatcgatatccaggaatgattttcagagtatttgagaaaatgagaggtgcagatggttttcactgaggcatggtttca

SEQ ID NO: 438473 - DNA, 120 bp, Artificial Sequence
  ENSG00000153317_53 (sequence is synthesized)
ttagacccagaccagtgccaaaggctcaatggcagaatagaatcaaagatgggagaattgtctctagtttttgtttaatctgtagtttttctttcctaggattctcagagccggcaagga

SEQ ID NO: 438474 - DNA, 120 bp, Artificial Sequence
  ENSG00000153317_54 (sequence is synthesized)
tcttaatttaccctgcctcatgggccagaaagcaaacacgattatgtactcagcagtaaaaattggcgcaaatatatttatgcatttgggtcagatcattttagatattcctttaccaaa

SEQ ID NO: 438475 - DNA, 120 bp, Artificial Sequence
  ENSG00000153317_55 (sequence is synthesized)
attagcccaattactgccccctgtacttcattatttgtcttaatcctcttcatatcttttcttcatctcgtgactaaataaagtgatataatgacctttttcagctaaatggataagaaa

SEQ ID NO: 438476 - DNA, 120 bp, Artificial Sequence
  ENSG00000153317_56 (sequence is synthesized)
gtttgtagccgtggctttacacctctcaagatggtagcttgccgcgtgataggctatgtttcttccaagaggcaaaggctctagaccaagatagaacagcccttcagaaagtgaagaagt

SEQ ID NO: 438477 - DNA, 120 bp, Artificial Sequence
  ENSG00000153317_57 (sequence is synthesized)
ttttattcccttgaagactttggaaagattttgtcattcatcgcaatgattggtcagcctcaagaagcatgcaggagccatcataagagtcacaaggctctagaccaagatagaacagcc

SEQ ID NO: 438478 - DNA, 120 bp, Artificial Sequence
  ENSG00000153317_58 (sequence is synthesized)
ggtgcaaacatgcttgccaagctgaagtgtggagtgacagtttttggctgagccatgaacctaaaagtggaggtttacaaagttactgcagacaggtcattagcacgactggctgcagtg

SEQ ID NO: 438479 - DNA, 120 bp, Artificial Sequence
  ENSG00000153317_59 (sequence is synthesized)
agctccctaagtcttcatcgctcctgccttttcatcagcagcgagataattgactgttagactcccgagccacagaccacggcagagatatccaggaatgattttcagagtatttgagaa

SEQ ID NO: 438480 - DNA, 120 bp, Artificial Sequence
  ENSG00000153317_60 (sequence is synthesized)
tggcccagaaatgatgaagaagatggaaggaaccaccacctcagtggaggtgacaggtgctagacgactacctggaatagatgggagaacaaaataaatgcaagaatccaagtctgaaat

SEQ ID NO: 438481 - DNA, 120 bp, Artificial Sequence
  ENSG00000153317_61 (sequence is synthesized)
cagcctagaggaaggaaggccttcttggagtgaagcctaagtgccgtgtgttgtcagtgctccatggggtaactgagtctcagagagcttaattagctcaactagcatgggccatatttg

SEQ ID NO: 438482 - DNA, 120 bp, Artificial Sequence
  ENSG00000153317_62 (sequence is synthesized)
ttccaagtcacagaattttccagatgcagagtgacttggttagtatgtggggaaggatggtaggattttctcctgggtagctcatacttcaaaagaccatgttctgtcaactatggcaca

SEQ ID NO: 438483 - DNA, 120 bp, Artificial Sequence
  ENSG00000153317_63 (sequence is synthesized)
tgagcaagtgacctccaggtatggatcttcagctgtctgctatcatcatctggctgtctcctctgaacttcaaacttggtgtgtcccaaaccaagcttttaaagtgctaatgaggacaaa

SEQ ID NO: 438484 - DNA, 120 bp, Artificial Sequence
  ENSG00000153317_64 (sequence is synthesized)
gaccttggcaccgcgtttgtcaagttttctactcttacaaaggaactgtccacactgctgaaaaatctgatcagccttcatcctcattgcagcctcatccccttctagttgtgagagcca

SEQ ID NO: 438485 - DNA, 120 bp, Artificial Sequence
  ENSG00000153317_65 (sequence is synthesized)
acttcccaggctgttcttgaactcatgggctcaagcagttcccacaccttggcccccgccaattgcttggattacaggcatgagccaccattcctcgtcctgaaatgattttaaatgtgt

SEQ ID NO: 438486 - DNA, 120 bp, Artificial Sequence
  ENSG00000153317_66 (sequence is synthesized)
tgtttgcttaataaaatgaaaaaaatgcactttaaaaaacatacccttcgacttcttatagacttgaatcatgtaaagaacttatgttaattcaacttaatgaataaaggaaaggaaatg

SEQ ID NO: 438487 - DNA, 120 bp, Artificial Sequence
  ENSG00000153317_67 (sequence is synthesized)
gtatcttaattaaaataacttctcaaagagaaatgtttgtcagaaaaatgtaaacctttcctagcacttggaaaataaaaattctttattttgttctgttttaggactgtacgaaaagaa

SEQ ID NO: 438488 - DNA, 120 bp, Artificial Sequence
  ENSG00000153339_0 (sequence is synthesized)
gagtagtactgccggttggtcagggttcggcctcaacatggcggttccggccgggcagtgaccaaggttttgccgtccgaaggactaagtggtgactgtcggcgtctccacctatcgggg

SEQ ID NO: 438489 - DNA, 120 bp, Artificial Sequence
  ENSG00000153339_1 (sequence is synthesized)
tggaatgcgagcacgcggggacgagcgctgagaagcggcggtgacgggaaggggggggtcagtggattgtgccccagaaaccgaagcggcggcgtctgttccttcttgtttctaggctcc

SEQ ID NO: 438490 - DNA, 120 bp, Artificial Sequence
  ENSG00000153339_2 (sequence is synthesized)
cttgtttctaggctccagtgcgttcggggccccgcccggccgggccaggccggcgggcggcggcggtagctgctgcagccgcaggataacctcgcagggtgggccggagggcgggcgccg

SEQ ID NO: 438491 - DNA, 120 bp, Artificial Sequence
  ENSG00000153339_3 (sequence is synthesized)
ggcgatggcccagtgtgtacaatcagtgcaggagctaatcccggactccttcgtcccctgtgtcgctgcgctgtgcagcgacgaagccgagcggctcactcgtctcaatcacctcagctt

SEQ ID NO: 438492 - DNA, 120 bp, Artificial Sequence
  ENSG00000153339_4 (sequence is synthesized)
cgcggagctgcttaagcccttctcccgcctcacttccgaggttcacatgagagatcctaataatcaacttcacgtaattaaaaatttgaagatagcagtaagcaacattgtcacccagcc

SEQ ID NO: 438493 - DNA, 120 bp, Artificial Sequence
  ENSG00000153339_5 (sequence is synthesized)
acctcagcctggagccatccggaagcttttgaatgatgttgtttctggcagtcagcctgcagaaggattagtagctaatgtgattacagcaggagattatgaccttaacatcagtgccac

SEQ ID NO: 438494 - DNA, 120 bp, Artificial Sequence
  ENSG00000153339_6 (sequence is synthesized)
tactccatggtttgagtcttacagagaaacctttcttcagtcgatgccagcattggatcatgaatttctgaaccactatttagcatgtatgttggtagcgtcatctagtgaagctgaacc

SEQ ID NO: 438495 - DNA, 120 bp, Artificial Sequence
  ENSG00000153339_7 (sequence is synthesized)
tgtggaacagttttcaaagttgtcacaagaacagcatcgaattcagcacaacagtgattattcctaccccaagtggtttataccaaatacacttaaatactatgtacttttacatgatgt

SEQ ID NO: 438496 - DNA, 120 bp, Artificial Sequence
  ENSG00000153339_8 (sequence is synthesized)
aagtgcaggagatgaacagagagctgaatcaatttatgaagaaatgaaacagaaatatggaactcagggttgctatttacttaaaattaattctcgaacatctaatcgagcatcagatga

SEQ ID NO: 438497 - DNA, 120 bp, Artificial Sequence
  ENSG00000153339_9 (sequence is synthesized)
acagataccagatccttggagtcagtatctccagaaaaatagtattcaaaaccaggaatcatatgaagatggcccttgtactataacttcaaataagaattctgataataacttgctttc

SEQ ID NO: 438498 - DNA, 120 bp, Artificial Sequence
  ENSG00000153339_10 (sequence is synthesized)
attggatggattagataacgaagtcaaagatggcttaccaaataactttagagctcacccacttcagttggagcaatccagtgacccttctaacagtattgatggcccagatcatctaag

SEQ ID NO: 438499 - DNA, 120 bp, Artificial Sequence
  ENSG00000153339_11 (sequence is synthesized)
atctgcttcatcgttacatgaaacaaagaaaggaaatactggaataattcatggtgcatgtttaacacttactgatcatgatagaattcgacagtttatacaagagttcacatttcgggg

SEQ ID NO: 438500 - DNA, 120 bp, Artificial Sequence
  ENSG00000153339_12 (sequence is synthesized)
ccttttgccacatatagagaaaacaattaggcaattaaacgatcagctaatatcaagaaaaggtttgagtcgatctctattttctgcaactaaaaaatggtttagtggcagtaaagttcc

SEQ ID NO: 438501 - DNA, 120 bp, Artificial Sequence
  ENSG00000153339_13 (sequence is synthesized)
agaaaagagcattaatgacctgaaaaatacatctggcttgctgtatccgccggaagcaccagaacttcaaatcaggaaaatggctgacttatgttttttggtgcagcattatgatttggc

SEQ ID NO: 438502 - DNA, 120 bp, Artificial Sequence
  ENSG00000153339_14 (sequence is synthesized)
ttacagttgctatcatactgcaaagaaagattttcttaatgatcaagcaatgctttatgcagctggtgccttggaaatggcagcagtgtctgcttttcttcaaccaggagcacctaggcc

SEQ ID NO: 438503 - DNA, 120 bp, Artificial Sequence
  ENSG00000153339_15 (sequence is synthesized)
atatcctgctcattacatggatacagcaattcagacatacagagatatctgcaagaatatggtgttggctgaaagatgtgtgttgcttagtgctgaacttttaaaaagccaaagcaaata

SEQ ID NO: 438504 - DNA, 120 bp, Artificial Sequence
  ENSG00000153339_16 (sequence is synthesized)
ttcagaggctgcagctctcctaatacggttgaccagtgaggattctgatcttcgaagtgcacttcttttggaacaggcagcacattgctttataaacatgaaaagtcccatggttagaaa

SEQ ID NO: 438505 - DNA, 120 bp, Artificial Sequence
  ENSG00000153339_17 (sequence is synthesized)
atatgcatttcatatgatattggcaggccatcgatttagtaaagcagggcagaaaaagcatgctttacgctgttattgtcaagccatgcaagtttacaaaggaaaaggctggtctcttgc

SEQ ID NO: 438506 - DNA, 120 bp, Artificial Sequence
  ENSG00000153339_18 (sequence is synthesized)
agaggatcacattaatttcactattgggcgccagtcctatactcttagacagctggataatgctgtgtctgcttttaggcatattctaattaatgaaagtaaacaatctgctgctcaaca

SEQ ID NO: 438507 - DNA, 120 bp, Artificial Sequence
  ENSG00000153339_19 (sequence is synthesized)
gggggctttcctcagagaatatctttatgtttacaagaatgtaagtcagctgtcaccagatggtcctttgccacagcttcctttaccgtatattaacagttcagcaacacgggttttttt

SEQ ID NO: 438508 - DNA, 120 bp, Artificial Sequence
  ENSG00000153339_20 (sequence is synthesized)
tggccatgacagacgaccagcggatggtgaaaaacaagcagctactcatgtaagtcttgatcaagaatatgattctgaatcctctcagcagtggcgagaacttgaggaacaagttgtttc

SEQ ID NO: 438509 - DNA, 120 bp, Artificial Sequence
  ENSG00000153339_21 (sequence is synthesized)
tgtggttaacaaaggagtaattccatccaattttcatcccacacaatactgtttgaacagttactcagataattcaagatttccacttgcagttgtagaagaaccaattacagtggaagt

SEQ ID NO: 438510 - DNA, 120 bp, Artificial Sequence
  ENSG00000153339_22 (sequence is synthesized)
ggcttttagaaaccctttgaaagttctacttttgttgactgatttgtcattgctttggaagtttcatcctaaagatttcagtggaaaggataatgaagaagttaaacaactagttacaag

SEQ ID NO: 438511 - DNA, 120 bp, Artificial Sequence
  ENSG00000153339_23 (sequence is synthesized)
tgaacctgaaatgattggagctgaagttatttcagagttcttaattaatggcgaagaatcaaaagtggcaagactaaagctctttccccatcacataggggagctgcatattctgggagt

SEQ ID NO: 438512 - DNA, 120 bp, Artificial Sequence
  ENSG00000153339_24 (sequence is synthesized)
tgtttataatcttggcactattcagggctctatgacagtagatggcattggtgctcttcccggatgtcacacaggaaaatattccttgagtatgtcagtccgagggaagcaggatttaga

SEQ ID NO: 438513 - DNA, 120 bp, Artificial Sequence
  ENSG00000153339_25 (sequence is synthesized)
aattcaaggtcctcgacttaacaacacaaaagaagagaaaacatctgttaaatatggccctgatcgacgtttagatcccataatcacagaagaaatgccactgttggaggtgttctttat

SEQ ID NO: 438514 - DNA, 120 bp, Artificial Sequence
  ENSG00000153339_26 (sequence is synthesized)
cctacagggcttctctgtggagaaatccgaaaagcatatgtagaatttgtcaatgtcagcaaatgtccacttactggattgaaggttgtttctaaacgtccagagttctttactttcggt

SEQ ID NO: 438515 - DNA, 120 bp, Artificial Sequence
  ENSG00000153339_27 (sequence is synthesized)
ggtaatactgctgttctaacaccactaagtccctcagcttctgagaattgtagtgcttacaagactgttgtgacagatgctacctctgtgtgtacagcactcatatcatcagcttcttct

SEQ ID NO: 438516 - DNA, 120 bp, Artificial Sequence
  ENSG00000153339_28 (sequence is synthesized)
gtagactttggcattggcacaggaagtcaaccagaggtgattcctgttccccttcctgacactgttcttctacccggagcctcagtgcagctgccaatgtggttacgtgggcctgatgaa

SEQ ID NO: 438517 - DNA, 120 bp, Artificial Sequence
  ENSG00000153339_29 (sequence is synthesized)
gaaggtgtccatgaaattaactttttgttttactatgaaagtgtcaaaaagcagccaaaaatacggcacagaatattaagacacactgcaattatttgtaccagtcggtctttaaatgta

SEQ ID NO: 438518 - DNA, 120 bp, Artificial Sequence
  ENSG00000153339_30 (sequence is synthesized)
cgggccactgtctgcagaagtaattctcttgaaaatgaagaaggcagaggaggcaatatgctagtctttgtggatgtggaaaataccaatactagtgaagcaggcgttaaggaattccac

SEQ ID NO: 438519 - DNA, 120 bp, Artificial Sequence
  ENSG00000153339_31 (sequence is synthesized)
atagtgcaagtatcaagtagtagcaaacactggaagttacagaaatctgtaaatctttctgaaaacaaagataccaaacttgccagtagggagaagggaaagttttgctttaaggcaata

SEQ ID NO: 438520 - DNA, 120 bp, Artificial Sequence
  ENSG00000153339_32 (sequence is synthesized)
agatgtgagaaagaagaagcggccacacagtcctctgaaaaatatacctttgcagatatcatctttggaaatgaacagataataagttcagcaagcccatgtgcagacttcttttatcga

SEQ ID NO: 438521 - DNA, 120 bp, Artificial Sequence
  ENSG00000153339_33 (sequence is synthesized)
agtttatcttctgaattgaaaaaaccacaagctcacttgcctgtgcatacagaaaaacagtcaacagaggatgctgtgagattgattcaaaaatgcagtgaggtagatttgaatattgtc

SEQ ID NO: 438522 - DNA, 120 bp, Artificial Sequence
  ENSG00000153339_34 (sequence is synthesized)
atattatggaaggcatacgttgtggaagacagtaaacagcttattttggaaggtcaacatcatgttattcttcgcactataggaaaagaagccttttcatatcctcagaaacaggagcca

SEQ ID NO: 438523 - DNA, 120 bp, Artificial Sequence
  ENSG00000153339_35 (sequence is synthesized)
ccagaaatggaactattgaaatttttcaggccagaaaacattacagtttcctcaaggccatcagtagagcagctttctagtctcattaaaacgagtcttcactacccagaatcatttaat

SEQ ID NO: 438524 - DNA, 120 bp, Artificial Sequence
  ENSG00000153339_36 (sequence is synthesized)
catccatttcatcaaaaaagcctttgtttagtaccagtcactcttttactttccaattgttctaaggctgatgtagatgtcatagttgatcttcggcataaaacaacaagtccagaagca

SEQ ID NO: 438525 - DNA, 120 bp, Artificial Sequence
  ENSG00000153339_37 (sequence is synthesized)
ctggaaatccatggatcattcacatggcttggacaaacacagtataaacttcaacttaaaagccaggagattcacagtctgcagctgaaagcatgctttgttcatacaggtgtttataac

SEQ ID NO: 438526 - DNA, 120 bp, Artificial Sequence
  ENSG00000153339_38 (sequence is synthesized)
cttggaactcctagggtatttgccaagttatcggaccaagttacagtgtttgaaacaagtcagcagaattccatgcctgccctgatcatcatcagtaatgtgtgacaacttggaaatttg

SEQ ID NO: 438527 - DNA, 120 bp, Artificial Sequence
  ENSG00000153339_39 (sequence is synthesized)
tactgaaatccacaataatcagtttttgctggatgggttttacagcagtatttgatatacctaacttgttatggaggttgattgatatctgatccctgcaaaatactttgacttgtcatt

SEQ ID NO: 438528 - DNA, 120 bp, Artificial Sequence
  ENSG00000153339_40 (sequence is synthesized)
ttgttgatgatgcaaagcacgttggactgagaatacttaacattctttttctgtatttctttaaaccctgagaataatttacatgctcataatacaggatatcagcatatttgtgcacct

SEQ ID NO: 438529 - DNA, 120 bp, Artificial Sequence
  ENSG00000153339_41 (sequence is synthesized)
tattaagccccatcttaagaaaacacaaagtctaagtctgctgttacaacttgtcaatggtatacgaatattaggagatgattctgagaaaggaaaggccttgttggcagtactcctgtt

SEQ ID NO: 438530 - DNA, 120 bp, Artificial Sequence
  ENSG00000153339_42 (sequence is synthesized)
aagccattagtctctaaattccagctttactgtgaagttctatagagtgttaaatacaaattttcctgtcttgcttcacacagttccttaaaatcagttttgaactttggtcatagagtc

SEQ ID NO: 438531 - DNA, 120 bp, Artificial Sequence
  ENSG00000153339_43 (sequence is synthesized)
ttcatatttcagtatttggtggtccctatgacttatacataactttgtaaaaagaaaaaaaaattttttctgatgctttgaatatagttttgaaaggagttttgacttttttcccctcat

SEQ ID NO: 438532 - DNA, 120 bp, Artificial Sequence
  ENSG00000153339_44 (sequence is synthesized)
tcatctcagtatagagtgcgctatttcacaatacgatttttgtcattaaaattaccatattctttattatataacgttaactattgagttgatctgtttaaaatataaatctcaagttaa

SEQ ID NO: 438533 - DNA, 120 bp, Artificial Sequence
  ENSG00000153339_45 (sequence is synthesized)
ttaaaaataagcttttcaaaaatgtattatatttataacaaatatactgtaaatagaataaagacatgctattcactgtatagcgtattagtatctgttgattagaaagtctggtttcaa

SEQ ID NO: 438534 - DNA, 120 bp, Artificial Sequence
  ENSG00000153339_46 (sequence is synthesized)
aatatttttttattcagagaatgggcatttggacataagaaatttcaattcagccctgctgcagatagagaaatgggagcaaggttgtttcaatgaatatctcttgtcattggagaagga

SEQ ID NO: 438535 - DNA, 120 bp, Artificial Sequence
  ENSG00000153339_47 (sequence is synthesized)
gggaagacagggtgtaggagtgggtggcagggagtacaagagccagggtcagtcaagtctggagcagatggggtccttgtgccattgacagctaccatggtttgttccagtctcaatctc

SEQ ID NO: 438536 - DNA, 120 bp, Artificial Sequence
  ENSG00000153339_48 (sequence is synthesized)
ggcactaatcggagcagactgcaccaaagtggggagagatcaaaagaccccgttttcagactgaagattccaaacctgtacttggaacaactcttcttgagagatgggtggctagtctgt

SEQ ID NO: 438537 - DNA, 120 bp, Artificial Sequence
  ENSG00000153339_49 (sequence is synthesized)
gtgcctctctgcaactgctgcttatgcttctggatcttaagtgggtctctggcttttcagctccttccactctgtgtcttagcaggtgtgggacaagttggagaggaaggtcacattcta

SEQ ID NO: 438538 - DNA, 120 bp, Artificial Sequence
  ENSG00000153339_50 (sequence is synthesized)
aggacactcatttccttcttgagagtttagggccatgggcttataaaaagtctgaggaggaaagacaagaatgaggaggcataatcacagtggtatctcatatttaaaccactcagctga

SEQ ID NO: 438539 - DNA, 120 bp, Artificial Sequence
  ENSG00000153339_51 (sequence is synthesized)
ctgaatattaaattgaaccgattgttaaacagacactaataaaaaaattaaactatataaacctacaactgaatatattaaaaataaaggtaataaagcactcaaaattacttcctgaat

SEQ ID NO: 438540 - DNA, 120 bp, Artificial Sequence
  ENSG00000153339_52 (sequence is synthesized)
agagtagtaagaggatgcttagataaagggaggaccttgaattctaggaaagggatttgcgattttatgtctaatggtaaatttcacatgagagatcctaataatcaacttcacgtaatt

SEQ ID NO: 438541 - DNA, 120 bp, Artificial Sequence
  ENSG00000153339_53 (sequence is synthesized)
aatgtcagtctaggccaagttctcaaaattaagtaatttttaataagcacaaagacaacagtattagttgttggcattttcatggtttactttttcttcattgatctaagttgagatttt

SEQ ID NO: 438542 - DNA, 120 bp, Artificial Sequence
  ENSG00000153339_54 (sequence is synthesized)
actttttcttcattgatctaagttgagattttgtttttcattttgtgaaatatctagaaacattttagttgtttttagaagattaataaatgaaaataaaatagttctgtgaatgtatat

SEQ ID NO: 438543 - DNA, 88 bp, Artificial Sequence
  ENSG00000153339_55 (sequence is synthesized)
tgaaaatcagctgcttgaggcggaggttgcagtaagccgagatcccaccgttgcactccagcttggacaacaagagcgaaactctgtc

SEQ ID NO: 438544 - DNA, 120 bp, Artificial Sequence
  ENSG00000153339_56 (sequence is synthesized)
gttataaaaattatgatatgtacttatttttgaaaattgaaaatacataaaaacataaggaatagaagtgaaaccatctgtcttcataatatttagaaataaccactttaacattttgct

SEQ ID NO: 438545 - DNA, 63 bp, Artificial Sequence
  ENSG00000153339_57 (sequence is synthesized)
tcttcataatatttagaaataaccactttaacattttgctgtgtatctttccagtcattttgt

SEQ ID NO: 438546 - DNA, 120 bp, Artificial Sequence
  ENSG00000153339_58 (sequence is synthesized)
cggtatacctgtattaaatttgtagtttacatacttttttgccatttgagaaaggattgcaattattcacagatttggtacatggcacatatcataaccagacatgtggcttttatgaaa

SEQ ID NO: 438547 - DNA, 120 bp, Artificial Sequence
  ENSG00000153339_59 (sequence is synthesized)
agctaagtatttcatggtagaagatgttttcaaagcttaaaagaattttgtgtttattggaaaaatcaagattggttttccccttgatctttgccctcatatactcttaagttaaacatt

SEQ ID NO: 438548 - DNA, 120 bp, Artificial Sequence
  ENSG00000153339_60 (sequence is synthesized)
ggatatgctatatattaagaaattaaatgtttttttcactagttatctatttacttttaacttggtgaaactaacctttttctcttttaaacattcactaggattctgatcttcgaagtg

SEQ ID NO: 438549 - DNA, 120 bp, Artificial Sequence
  ENSG00000153339_61 (sequence is synthesized)
gcacacatggatatgtattttgagaaaattgaaatttatcctttttaagaggtcatttcattgagataaaaacaaagatgttcttcattaaacattatttataattacgaattattttct

SEQ ID NO: 438550 - DNA, 120 bp, Artificial Sequence
  ENSG00000153339_62 (sequence is synthesized)
attttgaccaaggaagtctaaataatgaattggtttttatcatgtgatgaactgagaaacatctttgaaatttccctttttcttcctagataccaaacttgccagtagggagaagggaaa

SEQ ID NO: 438551 - DNA, 120 bp, Artificial Sequence
  ENSG00000153339_63 (sequence is synthesized)
catatcttacgatagttttattagaatatatgtagttatcagtcataaaaaagctgtggcaggctaggctttttggctatagatcttggttacattgccccttccacagttcttgaaaag

SEQ ID NO: 438552 - DNA, 120 bp, Artificial Sequence
  ENSG00000153339_64 (sequence is synthesized)
agaattttaatattacaatgaacacttgatttgtggctgttcttagaatcttaaaaaaaaaaaagattccacaggttttctggattctttattcatcatgcttttatagactcacaactg

SEQ ID NO: 438553 - DNA, 120 bp, Artificial Sequence
  ENSG00000153339_65 (sequence is synthesized)
attttacagttggttttaagtgggttctctttaccatcctttggagatggacattctatgttcttttccttgtgaaagatgagggggtatggatctgtggaaagtagacaggctattatg

SEQ ID NO: 438554 - DNA, 120 bp, Artificial Sequence
  ENSG00000153339_66 (sequence is synthesized)
gtgcaatggagaaaaattaacaggaagaaggactgtttcactgaggcaagcagataaacatataaagcattgttttatggaaaaaatgggaagttgtaaattttttcccaaggcctatga

SEQ ID NO: 438555 - DNA, 120 bp, Artificial Sequence
  ENSG00000153339_67 (sequence is synthesized)
atagtgcatattatatctatcgtgcagaaaataactacctttagggtctagactttattaatttgaaattatatgggttagaattttggcagataggatgctataatgagtcataagaag

SEQ ID NO: 438556 - DNA, 120 bp, Artificial Sequence
  ENSG00000153339_68 (sequence is synthesized)
taaaacgcttactaaaataagttttgcatatttaacatccaggtaattagctgagtaacctcagtaagattcttttgaggcagaataaatatctgaagtgcttctgagttgtaaaatttt

SEQ ID NO: 438557 - DNA, 120 bp, Artificial Sequence
  ENSG00000153339_69 (sequence is synthesized)
atgactgatatgagaaataaaactagtaattacatatcttaatattcttgcttaacatatttttaatgccttgtgtattaagaaacgaggaaacaaataaaaataccattttcacaaaaa

SEQ ID NO: 438558 - DNA, 120 bp, Artificial Sequence
  ENSG00000153339_70 (sequence is synthesized)
agtatgatacttacagtttgctggggtagatgggggtgctcttcactggaatgaagatgatgagtttcactttggaccaggagatatccacatgttcacatttcttcttctactagaagc

SEQ ID NO: 438559 - DNA, 120 bp, Artificial Sequence
  ENSG00000153339_71 (sequence is synthesized)
tagtgaaggagtataatgagttggacgttagtggacaggtagacagttggtagaaagcaagagggcagtcattccctatgaaggagtggtatgaggttataatggtatgggcaaaaggtc

SEQ ID NO: 438560 - DNA, 120 bp, Artificial Sequence
  ENSG00000153339_72 (sequence is synthesized)
taaattatgactgaatggttgggaaacagggaggaaactcttactggggtacagagtagtaagaggatgcttagataaagggaggaccttgaattctaggaaagggatttgcgattttat

SEQ ID NO: 438561 - DNA, 120 bp, Artificial Sequence
  ENSG00000153347_0 (sequence is synthesized)
agaaacaggaagaccttagttaggatgcaattacaattccttggtacattggcttcctcagaaaaaagaaaaaaatcacagagattgtttttcaaaaatatcaaatctacaaaaaataaa

SEQ ID NO: 438562 - DNA, 120 bp, Artificial Sequence
  ENSG00000153347_1 (sequence is synthesized)
gctggaaaagcaagcatcatgagttcagatacaaatgtaaacaaaagtgcctctccaactgcgactgcagaggaacagccagttgaacctgatggcccccttcctggctcagacaataac

SEQ ID NO: 438563 - DNA, 120 bp, Artificial Sequence
  ENSG00000153347_2 (sequence is synthesized)
caagaaaagaaagtaagattatctccagccaaaatgtcaaccaagaattctacagatctagttgaatatgttgacaagagtcatgcttttctccccatcattccaaacacccagagaggt

SEQ ID NO: 438564 - DNA, 120 bp, Artificial Sequence
  ENSG00000153347_3 (sequence is synthesized)
cagctagaagacagactgaacaaccaggcgcgtaccatagctttccttcttgaacaagccttccgcatcaaggaggacatctctgcttgcctgcaggggacccatggctttcgaaaagag

SEQ ID NO: 438565 - DNA, 120 bp, Artificial Sequence
  ENSG00000153347_4 (sequence is synthesized)
gaatcgctcgccaggaagttactggaaagccacatccagaccatcaccagcatcgtcaaaaaactcagccaaaatattgagattttagaagaccaaataagagctcgagatcaggcggcc

SEQ ID NO: 438566 - DNA, 120 bp, Artificial Sequence
  ENSG00000153347_5 (sequence is synthesized)
acaggaactaactttgcagtacacgagataaacatcaaacacctacaaggagttggagatcttcgaggaagagtagccagatgtgattcaagcattgtgaagctttctggagacattcac

SEQ ID NO: 438567 - DNA, 120 bp, Artificial Sequence
  ENSG00000153347_6 (sequence is synthesized)
ttaggaaagatagaaactgccagttctgagcaaacctcgaatttaaagatggtccagggggattatcgccacgaaatgaaccttttggaattcaaatttcattcactttcaagtaatctg

SEQ ID NO: 438568 - DNA, 120 bp, Artificial Sequence
  ENSG00000153347_7 (sequence is synthesized)
tacgaagaagttgagaataataaaaaatggacagaaaaccaatttctcaaatatagaaaagaccacctgggccatataaatgaatgtctgaaggtcctacaggagaaactggaaaagtct

SEQ ID NO: 438569 - DNA, 120 bp, Artificial Sequence
  ENSG00000153347_8 (sequence is synthesized)
gaaaataaaatggaagaaaaactgctgcagctttcaagcaaagtagagaatttcattaacacacagaaacaggaaacacaactaagtaaagtaaagcatatggaaaataaattgtccaaa

SEQ ID NO: 438570 - DNA, 120 bp, Artificial Sequence
  ENSG00000153347_9 (sequence is synthesized)
aagatggaacaaatggaaaagcagatctggggtgaattagagacaatgcagaatgaatatcaatcaggatttaaatcaattcatgactctctcagctccctccaacaaatacagaaaaca

SEQ ID NO: 438571 - DNA, 120 bp, Artificial Sequence
  ENSG00000153347_10 (sequence is synthesized)
aagatggatttagagaaatataaagtacagaaagacctaaagaaattacagcgcaagatagtggaactccaggaagtataaaccttttcagtcatcttctttttcatcagccaatggagt

SEQ ID NO: 438572 - DNA, 120 bp, Artificial Sequence
  ENSG00000153347_11 (sequence is synthesized)
gatttgttggaaaaagttctgaagaagaaagttactatctctgggatgtttactgcttctaatgtctccttttaaggagacgaatgtaccagaaaaataataaagcaaagaagcttcgga

SEQ ID NO: 438573 - DNA, 120 bp, Artificial Sequence
  ENSG00000153347_12 (sequence is synthesized)
ccagttgaacctgatggcccccttcctggctcagacaataaccaagaaaagaaagtaagattatctccagccaaaatgtcaaccaagaattctacagatctagttgaatatgttgacaac

SEQ ID NO: 438574 - DNA, 120 bp, Artificial Sequence
  ENSG00000153347_13 (sequence is synthesized)
cccaagctatctcttgtcccaggccaacgcagccatctgattcaggttgggttgcccagggaacagactctgagatggagattggcgaatagaaggcttattacagagcacactgggatc

SEQ ID NO: 438575 - DNA, 120 bp, Artificial Sequence
  ENSG00000153347_14 (sequence is synthesized)
aacacctgtggaagggaagggaaatgaatggaactgaacagaaggaatagttgaactatatgaagctgacttctctttccagtgatcttcacaacataatttgctaccattcagaggcgg

SEQ ID NO: 438576 - DNA, 120 bp, Artificial Sequence
  ENSG00000153347_15 (sequence is synthesized)
agatcttcgaggaagagtagccaggacctccctccttgcccgcttatacctgagagaaactggctgaagtgcgacaggctgaggaaggagagagatttgatactgcaagcctgaatagag

SEQ ID NO: 438577 - DNA, 120 bp, Artificial Sequence
  ENSG00000153347_16 (sequence is synthesized)
gcagatctggggtgaattagagacaatgcagaatgaatatcaatcagatcatggaatttttactaattcatggaattgtcagacttggaaaatccttggacatacccaagacgtgacttg

SEQ ID NO: 438578 - DNA, 120 bp, Artificial Sequence
  ENSG00000153347_17 (sequence is synthesized)
gttgaatatgttgacaatgccatacctggagctcccccaggaaaggtgtaccacagagggacaactccaggcacttggaaatagagtaacacactgttaacacatgcacattgtccaaaa

SEQ ID NO: 438579 - DNA, 120 bp, Artificial Sequence
  ENSG00000153347_18 (sequence is synthesized)
ttcagggcactggggatttagtgtcagtccttctactactttgctgtgtaacaccagtcagttccataatgtctctgggctttagttttttcatttgaaaaacaaagaggttggactaga

SEQ ID NO: 438580 - DNA, 120 bp, Artificial Sequence
  ENSG00000153347_19 (sequence is synthesized)
aactactgcagctttaaaataattctgattttaataatcatgaccacagaagaaaaaaatagccaaatgaatgaaatgagttcatgtgaagagaaaaatctaaatacaccttgaacttcg

SEQ ID NO: 438581 - DNA, 120 bp, Artificial Sequence
  ENSG00000153391_0 (sequence is synthesized)
acagcttggagtccaggccgggttttcaagcatcaagacggaagtaacagcggaaaggaagttccaaggcccgcgctgggaaaaaggtggggggaccaggggaagactcggagtgcgatg

SEQ ID NO: 438582 - DNA, 120 bp, Artificial Sequence
  ENSG00000153391_1 (sequence is synthesized)
gcggcgcaaattccaattgtggccaccacttccactcccggaatagtccggaacagcaagaagaggccggccagcccttcccacaatggcagcagcggcgggggctatggcgccagtaag

SEQ ID NO: 438583 - DNA, 120 bp, Artificial Sequence
  ENSG00000153391_2 (sequence is synthesized)
aagaaaaaagcgtccgcttccagctttgcgcagggtatcagcatggaagccatgagtgagaataaaatggtgccctctgagtttagcacaggacctgtggaaaaagctgccaaacctttg

SEQ ID NO: 438584 - DNA, 120 bp, Artificial Sequence
  ENSG00000153391_3 (sequence is synthesized)
ccatttaaggatcccaactttgtgcactctggccacggtggcgcagtagctggcaagaagaacagaacctggaagaacctgaaacaaatcctcgcttctgaaagggcattgccgtggcaa

SEQ ID NO: 438585 - DNA, 120 bp, Artificial Sequence
  ENSG00000153391_4 (sequence is synthesized)
ctacttcagtattgatgctcctccatcctttaagccagctaagaagtattctgatgtttcaggtctgcttgccaactacacagacccccagagcaaactgcggttcagcaccattgaaga

SEQ ID NO: 438586 - DNA, 120 bp, Artificial Sequence
  ENSG00000153391_5 (sequence is synthesized)
gttttcctacattcggaggctgccctctgacgtcgtcaccggctacctggccctgaggaaggccacgagcatcgttccctgagccccagaaagggagatgaagtggaaagctgtttcaaa

SEQ ID NO: 438587 - DNA, 120 bp, Artificial Sequence
  ENSG00000153391_6 (sequence is synthesized)
aacagactctggactcatgattttgtttcacggaaacaaactcgttctgctgtcaatctgaaaatgccagtgctgtgccttggaaagaatgtttggctttaatttaagggtttttttttt

SEQ ID NO: 438588 - DNA, 120 bp, Artificial Sequence
  ENSG00000153391_7 (sequence is synthesized)
ttttagtgtgtgttttccctccaagtgtgatatttcctgctgaattaaattatacttcagttgttgcctcaagtaaaggtgtttgacaagaagatacaataaaaccatacttttcattta

SEQ ID NO: 438589 - DNA, 75 bp, Artificial Sequence
  ENSG00000153391_8 (sequence is synthesized)
atttacccagtctattggtaccggtagagtgggttgctgctgtatgtaaagatacccgaaaatgtggaagcaact

SEQ ID NO: 438590 - DNA, 120 bp, Artificial Sequence
  ENSG00000153391_9 (sequence is synthesized)
gaaagacgctgccccgcggagtgaatgactactctttcccttcgtttggacacatgggcttacaacgccttgtgttgtaaggagagaagaagaataagatttacacagagtacaatgcac

SEQ ID NO: 438591 - DNA, 120 bp, Artificial Sequence
  ENSG00000153391_10 (sequence is synthesized)
tcccagcactttgagaggccaagggtatcagcatggaagccatgagtgagaataaaatggtgccctctgagtttagcacaggacctgtggaaaaagctgccaaacctttgccatttaagg

SEQ ID NO: 438592 - DNA, 120 bp, Artificial Sequence
  ENSG00000153391_11 (sequence is synthesized)
acattattgtattgtgtttgcatcattgtaggaaataatttttagcttgagaattttatagtggcatcagtctgggcagattatgtgtgtattttctcataactgtatctgtattgagcc

SEQ ID NO: 438593 - DNA, 120 bp, Artificial Sequence
  ENSG00000153391_12 (sequence is synthesized)
tatttgtttgtgttgtcatggatgtgtggtttttagggtcataggtcccaatatgataatattggtgtttctactagacaaacttcttattcaaaagtctactcttaaaatgtgtttcca

SEQ ID NO: 438594 - DNA, 120 bp, Artificial Sequence
  ENSG00000153391_13 (sequence is synthesized)
agtattctgatgtttcaggtctgcttgaaccaccaaactgttttccacagaggctgcatcaattgacattcccactagcaatggatgagggttccaatttttccagatgctcaccaacac

SEQ ID NO: 438595 - DNA, 120 bp, Artificial Sequence
  ENSG00000153391_14 (sequence is synthesized)
ttgttaattttggttttgttttcattatggccattctggtgggtgtaaagtagcatctcattgtggcttgactgaatttctctaatgagtaatgatgttgagcatttttcatgtgcttat

SEQ ID NO: 438596 - DNA, 120 bp, Artificial Sequence
  ENSG00000153391_15 (sequence is synthesized)
tggctatttgtatatctttgttggagaaatatctgttcaagttctttggccattttaaaattgggttgtctttttgttgttgaattgtaaagttctttagatattctgaatactagatcc

SEQ ID NO: 438597 - DNA, 120 bp, Artificial Sequence
  ENSG00000153391_16 (sequence is synthesized)
ttattaaatatatgatttgaaaatatttttcccattttgaatgttgtcttttcattttttggatagtgtcttttggtgcaccaaacttcaaaaattttttcgaagtccagtttatcaatt

SEQ ID NO: 438598 - DNA, 120 bp, Artificial Sequence
  ENSG00000153391_17 (sequence is synthesized)
gcctgtgcttttggtgtcatatccaataagtcattgccaaatccaatgtcacaaatatatttttgctgctttcttgtaagagttatacagttttagctcatatgtttaggtctttgatgc

SEQ ID NO: 438599 - DNA, 120 bp, Artificial Sequence
  ENSG00000153391_18 (sequence is synthesized)
ggtctttgatgcattttgagttaatttttgtatgtagtgtaggataagggtctaacttcattcctttgcatgtaaatattccatttttctggcaccatttgttgtaggaactgtcatttc

SEQ ID NO: 438600 - DNA, 120 bp, Artificial Sequence
  ENSG00000153391_19 (sequence is synthesized)
cccattaaatgatttggcatccttgtcagaaatcaattgtccatacatgtgagggtttatttctgggctcccaattctattccattggtctatacatctgttcccatgccagtaccacac

SEQ ID NO: 438601 - DNA, 120 bp, Artificial Sequence
  ENSG00000153391_20 (sequence is synthesized)
tgtttgattaatgtcgatttttagtaagttttgaaatcaggaagtgtgaatcctccaactttgttcttttcaagatcattttggttatatgggttaccttaagattccatttgaattttc

SEQ ID NO: 438602 - DNA, 120 bp, Artificial Sequence
  ENSG00000153391_21 (sequence is synthesized)
ggatgggtttttctatttttgtaaaaaatatcattgggattttgataggaattgcactgaatctgtagatcgctttgggtagtactatcatattaacaatattaagtcttccaagccata

SEQ ID NO: 438603 - DNA, 120 bp, Artificial Sequence
  ENSG00000153391_22 (sequence is synthesized)
ggactgtctttccatttatttagattttctttaatttctttcagcaatgttttgcagtattcagtgtacaagtcttttgcctcctttgttaaatttattcctaaggatgctattctttct

SEQ ID NO: 438604 - DNA, 120 bp, Artificial Sequence
  ENSG00000153391_23 (sequence is synthesized)
gatgctagtaaaatagttttcctaatttcattttcagatcatgcataaccaccaccataaacatgattccaacaccccagagtattccctcagtctgaccttttgtaaagtggtgctttt

SEQ ID NO: 438605 - DNA, 120 bp, Artificial Sequence
  ENSG00000153391_24 (sequence is synthesized)
taaaatttaattttccaattgcttgttgctagtgtatagaaatacgactgatacttttatattggccttgtatcctgagaccctgtaaattcacttattagttctagacagttttaattc

SEQ ID NO: 438606 - DNA, 120 bp, Artificial Sequence
  ENSG00000153391_25 (sequence is synthesized)
gtaaattcacttattagttctagacagttttaattctttctttccaatctttatgcctattatttctgttttgttttgttttttaaacagggtttggctctgtcacccaggctggagtgc

SEQ ID NO: 438607 - DNA, 80 bp, Artificial Sequence
  ENSG00000153391_26 (sequence is synthesized)
gtgcagtggcttgattccaactcactgcaccctcgacctcctgggctcaagtccatgagccaccacacccagctaatttt

SEQ ID NO: 438608 - DNA, 76 bp, Artificial Sequence
  ENSG00000153391_27 (sequence is synthesized)
tcaaattcctgagctcaagtaattcatattgcctgactattacttctttttttgagacagtcttgctctgttgcca

SEQ ID NO: 438609 - DNA, 120 bp, Artificial Sequence
  ENSG00000153391_28 (sequence is synthesized)
gcgtgagccactgcacccggcctattattcctttttttgccctattgtcccagtggatagtgatgtccagtagagcgttgaatcaaagtggtaaaattgtgcgtccttgccttgttctcc

SEQ ID NO: 438610 - DNA, 120 bp, Artificial Sequence
  ENSG00000153391_29 (sequence is synthesized)
aaagtggtaaaattgtgcgtccttgccttgttctccacgttaaggtgaaattttgaagatttcattattacatatgatgtaagctgtaggtttttatttatttatttatttagagacagg

SEQ ID NO: 438611 - DNA, 78 bp, Artificial Sequence
  ENSG00000153391_30 (sequence is synthesized)
gccttgacctcccagtcacaggcacatgccaccataccctgctaattttttattttttgtagacatggggtcttacta

SEQ ID NO: 438612 - DNA, 120 bp, Artificial Sequence
  ENSG00000153391_31 (sequence is synthesized)
cacatgccaccataccctgctaattttttattttttgtagacatggggtcttactatcttgaccaggctggtctcaaactcatgggctcaaatcatcctcctgcctcagcctcccaaagt

SEQ ID NO: 438613 - DNA, 120 bp, Artificial Sequence
  ENSG00000153391_32 (sequence is synthesized)
tgagccactgcacctggcctaactgtgggctttttttgaaatgtctttttcaggttgaggaaggtcccttctattcctagtgtactgagagtttgtatcatgaaaaggtattgaattttg

SEQ ID NO: 438614 - DNA, 120 bp, Artificial Sequence
  ENSG00000153391_33 (sequence is synthesized)
tcaaatgttgttcctgtgtctattgagatggctgtatgggttttctcttttttctgataatgtgatgaattatatggatttattaatattgaaataataaaatgacactgcattcttcgg

SEQ ID NO: 438615 - DNA, 76 bp, Artificial Sequence
  ENSG00000153391_34 (sequence is synthesized)
tgattgattttaacatgtgaggacatgagatttgggaggggccgggggcggaatgatagtttggctgtgccatgtt

SEQ ID NO: 438616 - DNA, 79 bp, Artificial Sequence
  ENSG00000153391_35 (sequence is synthesized)
taactctcaggattcattctctctcttgcctgctgccacgtaagacgtgcctcttgccttccgccatgattgtgaggcc

SEQ ID NO: 438617 - DNA, 120 bp, Artificial Sequence
  ENSG00000153391_36 (sequence is synthesized)
aaagctgccaaacctttgccatttaaggatcccaactttcactctggccacggtggcgcagtagctggcaagaagaacagaacctggaagaacctgaaacaaatcctcgcttctgaaagg

SEQ ID NO: 438618 - DNA, 120 bp, Artificial Sequence
  ENSG00000153391_37 (sequence is synthesized)
aaaaaagcgtccgcttccagctttgcgcaggtacgcagtcgcgctcccaggctgcgcgtgcgcgtcgcgaaacgggacttggcggggcggagccgagccagggcgcgtgcgtaatgtggg

SEQ ID NO: 438619 - DNA, 120 bp, Artificial Sequence
  ENSG00000153391_38 (sequence is synthesized)
gcgctgcgcgtgcggtctccgttggggttgaaagacgctgccccgcggagtgaatgactactctttcccttcgtttggacacatgggcttacaacgccttgtgttgtaaggagagaagaa

SEQ ID NO: 438620 - DNA, 83 bp, Artificial Sequence
  ENSG00000153391_39 (sequence is synthesized)
cgtgccgcgtggaaatggtatcagcatggaagccatgagtgagaataaaatggtgccctctgagtttagcacaggacctgtgg

SEQ ID NO: 438621 - DNA, 80 bp, Artificial Sequence
  ENSG00000153395_0 (sequence is synthesized)
gcagctcggctgcgctcgccgcgggacggcgcggccatgaggctgcggggatgcggaccccgggccgcccctgcctccag

SEQ ID NO: 438622 - DNA, 120 bp, Artificial Sequence
  ENSG00000153395_1 (sequence is synthesized)
ccgcccctgcctccagcgcaggggccagcgacgctcggctgctggcgcccccggggcggaaccccttcgtgcacgagctgcgcctcagcgccctgcagaaggcccaggtggccctcatga

SEQ ID NO: 438623 - DNA, 120 bp, Artificial Sequence
  ENSG00000153395_2 (sequence is synthesized)
agaaggcccaggtggccctcatgacactgacgctcttcccggtccggctcctggttgccgctgccatgatgctgctggcctggcccctcgcacttgtcgcatccctgggctctgcggaga

SEQ ID NO: 438624 - DNA, 120 bp, Artificial Sequence
  ENSG00000153395_3 (sequence is synthesized)
aggaacccgagcagcccccggccctgtggaggaaggttgtggacttcctgctgaaggccatcatgcgcaccatgtggttcgccggcggcttccaccgggtggccgtgaaggggcggcagg

SEQ ID NO: 438625 - DNA, 120 bp, Artificial Sequence
  ENSG00000153395_4 (sequence is synthesized)
cgctgcccaccgaggcggccatcctcacgctcgcgcctcactcgtcctacttcgacgccatccctgtgaccatgacgatgtcctccatcgtgatgaaggcagagagcagagacatcccga

SEQ ID NO: 438626 - DNA, 120 bp, Artificial Sequence
  ENSG00000153395_5 (sequence is synthesized)
tctggggaactctgatccagtatatacggcctgtgttcgtgtcccggtcagaccaggattctcgcaggaaaacagtagaagaaatcaagagacgggcgcagtccaacggaaagtggccac

SEQ ID NO: 438627 - DNA, 120 bp, Artificial Sequence
  ENSG00000153395_6 (sequence is synthesized)
agataatgatttttccagaaggaacttgtacaaacaggacctgcctaattaccttcaaacctggtgcattcatccctggagcgcccgtccagcctgtggttttacgatatccaaataaac

SEQ ID NO: 438628 - DNA, 120 bp, Artificial Sequence
  ENSG00000153395_7 (sequence is synthesized)
tggacaccatcacatggacgtggcaaggacctggagcgctggaaatcctgtggctcacgctgtgtcagtttcacaaccaagtggaaatcgagttccttcctgtgtacagcccttctgagg

SEQ ID NO: 438629 - DNA, 120 bp, Artificial Sequence
  ENSG00000153395_8 (sequence is synthesized)
aggagaagaggaaccccgcgctgtatgccagcaacgtgcggcgagtcatggccgaggccttgggtgtctccgtgactgactacacgttcgaggactgccagctggccctggcggaaggac

SEQ ID NO: 438630 - DNA, 120 bp, Artificial Sequence
  ENSG00000153395_9 (sequence is synthesized)
agctccgtctccccgctgacacttgccttttagaatttgccaggctcgtgcggggcctcgggctaaaaccagaaaagcttgaaaaagatctggacagatactcagaaagagccaggatga

SEQ ID NO: 438631 - DNA, 120 bp, Artificial Sequence
  ENSG00000153395_10 (sequence is synthesized)
agggaggagagaagataggtattgcggagtttgccgcctccctggaagtccccgtttctgacttgctggaagacatgttttcactgttcgacgagagcggcagcggcgaggtggacctgc

SEQ ID NO: 438632 - DNA, 120 bp, Artificial Sequence
  ENSG00000153395_11 (sequence is synthesized)
gagagtgtgtggttgccctgtctgtcgtctgccggccggcccggaccctggacaccatccagctggctttcaagatgtacggagcgcaagaggacggcagcgtcggcgaaggtgacctgt

SEQ ID NO: 438633 - DNA, 120 bp, Artificial Sequence
  ENSG00000153395_12 (sequence is synthesized)
cctgcatcctcaagacggccctgggggtggcagagctcaccgtgaccgacctattccgagccattgaccaagaggagaaggggaagatcacattcgctgacttccacaggtttgcagaaa

SEQ ID NO: 438634 - DNA, 120 bp, Artificial Sequence
  ENSG00000153395_13 (sequence is synthesized)
tgtaccctgccttcgcagaggaatacctgtacccggatcagacacatttcgaaagctgtgcagagacctcacctgcgccaatcccaaacggcttctgtgccgatttcagcccggaaaact

SEQ ID NO: 438635 - DNA, 120 bp, Artificial Sequence
  ENSG00000153395_14 (sequence is synthesized)
cagacgctgggcggaagcctgttcgcaagaagctggattaggacccagggttgcggagagacgcggcccctcccgcgtggacatcaccgccatgagcctctttgcgagtgacctctgggc

SEQ ID NO: 438636 - DNA, 120 bp, Artificial Sequence
  ENSG00000153395_15 (sequence is synthesized)
tccgctcctcactcctgctgtacaggcactgtcttcagcccgagttccaggggcctcgggggctgtttgtatcttgttcctttgtgaagtgtgttgcagaaccgacgcttactgtgcgag

SEQ ID NO: 438637 - DNA, 120 bp, Artificial Sequence
  ENSG00000153395_16 (sequence is synthesized)
ccctggtttcgagtctctgtcacagcctcttccggcggcagcgtgcaccgggcgggcctccgtgcacactcagcacacgcctgccacacagcgtgcgcttgcgtgtcactctggcacgaa

SEQ ID NO: 438638 - DNA, 120 bp, Artificial Sequence
  ENSG00000153395_17 (sequence is synthesized)
acctgtctgcctctgtggatccacagcctggcagagccgagccgtcacctgatttttcagtgtttctacctgtgtgctggagctcatgagtattttataaactccatttaggtacttcag

SEQ ID NO: 438639 - DNA, 120 bp, Artificial Sequence
  ENSG00000153395_18 (sequence is synthesized)
gaaacatgcagcattttttaaaaaatgaaaattgtttttctacttcatttttccttttagagtcaaaggatatttatttataggcctttttttttttaatatagaatctgaggctgtttg

SEQ ID NO: 438640 - DNA, 120 bp, Artificial Sequence
  ENSG00000153395_19 (sequence is synthesized)
ggctttgacttaaatttccatcaggcctctctccagcaggtaatccctctccttccgctgggtcccctggggaggtgtgaactcaagggcctagccccaaaacactttttctgcttttct

SEQ ID NO: 438641 - DNA, 120 bp, Artificial Sequence
  ENSG00000153395_20 (sequence is synthesized)
taatccttttccagtcccctctttttttataaacgttggcagtttgatgtttctgtttcggcataacgtaatccatttcactgtagcctaaactccagtccgaggttggatattgttcaa

SEQ ID NO: 438642 - DNA, 120 bp, Artificial Sequence
  ENSG00000153395_21 (sequence is synthesized)
atgagcagggcccgagctggaagcgcaaggcagccgccgccgtgccgctcctcccttgccctcaggccaggtccctgctggaagcggctgcatcttcctgtcagccctggtttccatggt

SEQ ID NO: 438643 - DNA, 120 bp, Artificial Sequence
  ENSG00000153395_22 (sequence is synthesized)
gactggcgtcacgctgccacccgagtatggctgaccttcctgcagagagaggagccgcagtcttttgcttgtggaaggagacgctgggctgtgcggtgcggagggtgatgaggatgtctg

SEQ ID NO: 438644 - DNA, 120 bp, Artificial Sequence
  ENSG00000153395_23 (sequence is synthesized)
gtgacagccgtgcggacaccactcctctctgcagcactgcctcccagcgccagggtcgcgggcacatcccactgagagcgggggtcctgccccatcttagagtcaaaggcagaggggctt

SEQ ID NO: 438645 - DNA, 120 bp, Artificial Sequence
  ENSG00000153395_24 (sequence is synthesized)
ccaggccctggatggggtattttggtgtcacctgaagtccctctgacatcaccttgtttcatcattttttatgacagaattagaaacccatccttcaagcacaataatcatcacagactt

SEQ ID NO: 438646 - DNA, 120 bp, Artificial Sequence
  ENSG00000153395_25 (sequence is synthesized)
gagtttgcttcctaaagcaaaggctccgggtttgtttggaaaatttttttgatttctgaaatgaattgatttttatatttggggcatctctatagaaagtgaccaccaaggccagtaagt

SEQ ID NO: 438647 - DNA, 120 bp, Artificial Sequence
  ENSG00000153395_26 (sequence is synthesized)
acgggaaaaaatgtttactaacttcctcagagattcgtgatacgcgtttctccactgacagacatttaaaaacaaccttcagctccgtttcaatcaatcacctcgacttgttttttagca

SEQ ID NO: 438648 - DNA, 120 bp, Artificial Sequence
  ENSG00000153395_27 (sequence is synthesized)
tggacactgccagcaggacagacagggatggagtaaaccgaagtcaatttcagggctcttggcgtgttggacacagaagaaatcctagtgcagcctttggtagctaacagtcactgattt

SEQ ID NO: 438649 - DNA, 120 bp, Artificial Sequence
  ENSG00000153395_28 (sequence is synthesized)
tataattggagaatgcgtaaagattcatttttcaaggagaagagcctgcaaatggccaatgaaggaggtaaataaactaagatattccgagggaagggacccaggccacctcccttccgc

SEQ ID NO: 438650 - DNA, 120 bp, Artificial Sequence
  ENSG00000153395_29 (sequence is synthesized)
aggtctgcagatgaagggttttttgaatgaaatgccactgtgcattttcagaaaaaaaaatctctgataaacagactttgaatggatgtttgttcctcctgattctcttttctcttcgtg

SEQ ID NO: 438651 - DNA, 120 bp, Artificial Sequence
  ENSG00000153395_30 (sequence is synthesized)
gcgacttagagttggcggatattcggaactgtgaatgtacatagcgttgagttaaaccccttgtgtgtgagacaggacgcagcgggcccctggtggcctgggggccagacccgtgggcag

SEQ ID NO: 438652 - DNA, 120 bp, Artificial Sequence
  ENSG00000153395_31 (sequence is synthesized)
gtggggcatgggccctggcctgcggggacctgctggggtgtgagggcagagggagggttgccatgaaggaacttgggattttcaatggaataagtaaaacataaagtctatacttgggaa

SEQ ID NO: 438653 - DNA, 120 bp, Artificial Sequence
  ENSG00000153395_32 (sequence is synthesized)
tattactgatgcttgtgaacacgtctgctgtagcctgcactcacggaggcagagggccgtgggggaactctgcagcccaagcttgcgccgcgctcgcccgtggcccaggcaggacccttc

SEQ ID NO: 438654 - DNA, 120 bp, Artificial Sequence
  ENSG00000153395_33 (sequence is synthesized)
gcgctcttcacagtggttgatgcagacacgagcttacaccaggatgcccagataagccttgtacaatgtggcatatcacctgtcttgctttcccatctttccgtttctcagggctccttc

SEQ ID NO: 438655 - DNA, 120 bp, Artificial Sequence
  ENSG00000153395_34 (sequence is synthesized)
gctgcgcctcagcgccctgcagaaggcccagtttccacagagtgaaatagcctgtctttcaagccaagaaagccttcttccccaaagaaagaaatgggtccagtagtggctgacacactc

SEQ ID NO: 438656 - DNA, 120 bp, Artificial Sequence
  ENSG00000153395_35 (sequence is synthesized)
ccagatgagattttcttggtgtggttctagcatgtttggaaaacacaagaattgaaattctgtagaaaaagctgtcttggtggcaaagggacgctccggagtgttctggtattttgcgga

SEQ ID NO: 438657 - DNA, 120 bp, Artificial Sequence
  ENSG00000153395_36 (sequence is synthesized)
cagtagcagacatcttacagagttgaaacatggatggctggctgcctgcctgttctccactcagcattggagccaggagaaatgaaggtgggaccctcaggaaaaagcaaacccaccccc

SEQ ID NO: 438658 - DNA, 120 bp, Artificial Sequence
  ENSG00000153395_37 (sequence is synthesized)
ggtgttcacgcaagagttgacacagctgcacctgctgctgccgtatgctgatcctaaccagaagctggctgggaggagaggccccctgggccatgaagcagagctcgggaatgtgagaag

SEQ ID NO: 438659 - DNA, 120 bp, Artificial Sequence
  ENSG00000153395_38 (sequence is synthesized)
tggggctgagggcaaacggggtagtgaaggaccagcactgcccacccatagctgctctgtgtccacaagcaggtcagctgcagctctgctccatgtcaccatctgcatccagcccagcac

SEQ ID NO: 438660 - DNA, 120 bp, Artificial Sequence
  ENSG00000153395_39 (sequence is synthesized)
agcagcccctcctgggactcagccagtcagatggctttgggaagaggtgacaagcaagcctgcctagatgctatatctgctgcacagacgcagaatacagcaggcccactcctggttcat

SEQ ID NO: 438661 - DNA, 120 bp, Artificial Sequence
  ENSG00000153395_40 (sequence is synthesized)
tggccacagtaagccatgtggtcacagctgaattcaacagccagagacgtacagtcctgcaagggagcccctcaaaggaggtgaaggatcttctgaacagcagcaccagccaccctgcag

SEQ ID NO: 438662 - DNA, 120 bp, Artificial Sequence
  ENSG00000153395_41 (sequence is synthesized)
taagtgttggatgtggtggtgagcagggccagtcctaattccacccattgacattacagacattattctggctatgaaatggtgccatgtcttggtccacagttcgaggcactatgtcat

SEQ ID NO: 438663 - DNA, 120 bp, Artificial Sequence
  ENSG00000153395_42 (sequence is synthesized)
ccatcaggatggcagtccaatgttctagggcactgcctccccatgggcagcacacctaaagcttcaagaagtcatcctcatgcttaatcagactcgccacctctgggtgatgggaaacgt

SEQ ID NO: 438664 - DNA, 120 bp, Artificial Sequence
  ENSG00000153395_43 (sequence is synthesized)
agggattccaagtgtgtacctgttcccatgctgcctttgctgtaaagtaaattccttaacaatgccataggaggtgggcaatagtgaataagccattcatcaagcccacagatggtgctg

SEQ ID NO: 438665 - DNA, 120 bp, Artificial Sequence
  ENSG00000153395_44 (sequence is synthesized)
tcagaaacactgacagcaaagacatatccatatctggaataagggaaactgaaaccaagagatactcccctcaatgatggaagagtccagtgtgatcaacctgcctccagggggctggct

SEQ ID NO: 438666 - DNA, 120 bp, Artificial Sequence
  ENSG00000153395_45 (sequence is synthesized)
agtccctttcccaggaatggtacctggggctaagtatgggaccctgcttccgacatgttgggagtccagtgataactgcatcagcctaggctattgttgatgggtcagctctttgttatt

SEQ ID NO: 438667 - DNA, 120 bp, Artificial Sequence
  ENSG00000153395_46 (sequence is synthesized)
gatccacactcatctccatccctatttccagtgccagtttgtgaatggttctactaggtaaacactgggttggctgggaaagagacaggctgacatccactgcctgtgtcataccctggc

SEQ ID NO: 438668 - DNA, 120 bp, Artificial Sequence
  ENSG00000153395_47 (sequence is synthesized)
agagactatagtaaattagacccgacaagagaaaatattagtgaacctgaaaatacagctatgtgtgatcccagtgatgtacagggagaaacagacagaaatgaagcacaagtgggcatg

SEQ ID NO: 438669 - DNA, 120 bp, Artificial Sequence
  ENSG00000153395_48 (sequence is synthesized)
gaataatgccacaaggcccatcacatgtgattggagccctagaaaaggaggaggacaggacagaaaaattatttgatgaaataatggccagaatttttttccaaatctataaactaagat

SEQ ID NO: 438670 - DNA, 120 bp, Artificial Sequence
  ENSG00000153395_49 (sequence is synthesized)
acccaagaagctcaataagcacccagcagaaaaaatacaataaaaacacagcaagacacacatcacaaactgctgaaagccactgaaaaggagaaaaatcttaaaagcagctggagaaaa

SEQ ID NO: 438671 - DNA, 120 bp, Artificial Sequence
  ENSG00000153395_50 (sequence is synthesized)
acaacatactatcaaggaacagagataagaatgaaagccaacttctcttcagaaactatgcaacccagacgtcaaggaacagagataagaacgacagccgacttctctgcagaaactatg

SEQ ID NO: 438672 - DNA, 120 bp, Artificial Sequence
  ENSG00000153395_51 (sequence is synthesized)
caacccagacgtcaaggaacagagataagaacgacagccgacttctctgcagaaactatgcaacccagacgtcaaggaacagagataagaacgacagccgacttctctgcagaaactatg

SEQ ID NO: 438673 - DNA, 120 bp, Artificial Sequence
  ENSG00000153404_0 (sequence is synthesized)
gaaggcggcctcggcccagtgcacagcgggaccaggcagagttcggggaaagcgtcggagttcgggagaccagggtccagcatgggtttcagcacagcagacggcgggggcggcccaggc

SEQ ID NO: 438674 - DNA, 120 bp, Artificial Sequence
  ENSG00000153404_1 (sequence is synthesized)
gcccgggatctggaatctcttgatgcctgtatccagaggacgctctctgccttgtacccaccgtttgaagccacggcagccacggtgctctggcagctgttcagcgtggccgagaggtgc

SEQ ID NO: 438675 - DNA, 120 bp, Artificial Sequence
  ENSG00000153404_2 (sequence is synthesized)
cacggtggggacgggctgcactgcctcaccagcttcctcctcccagccaagagggccctgcagcacctgcagcaggaagcctgtgccaggtacaggggtctggtcttcctgcacccaggc

SEQ ID NO: 438676 - DNA, 120 bp, Artificial Sequence
  ENSG00000153404_3 (sequence is synthesized)
tggccgctgtgcgcccatgagaaggtggtggtgcagctggcgtccctgcacggagtcaggctccagcccggggacttctacctgcaggtcacgtcggcggggaagcagtcagctagactg

SEQ ID NO: 438677 - DNA, 120 bp, Artificial Sequence
  ENSG00000153404_4 (sequence is synthesized)
gtcttgaaatgcctgtcccggctgggaagaggcacagaggaagtcaccgtccctgaggccatgtatggctgtgtcttcacgggggcgttcctggagtgggtgaaccgggagcggcgccat

SEQ ID NO: 438678 - DNA, 120 bp, Artificial Sequence
  ENSG00000153404_5 (sequence is synthesized)
gtccccctgcaaacctgcttgctgacctcaggcttggccgtccaccgagccccgtggagcgacgtcactgaccctgtctttgtccccagccctggagccatcctgcagagctactccagc

SEQ ID NO: 438679 - DNA, 120 bp, Artificial Sequence
  ENSG00000153404_6 (sequence is synthesized)
tgcacaggtcctgagcggctgcccagcagcccctcagaggccccagtccccacccaagccacagcaggcccccatttccagggaagcgcctcttgccccgacaccctgacctcaccctgc

SEQ ID NO: 438680 - DNA, 120 bp, Artificial Sequence
  ENSG00000153404_7 (sequence is synthesized)
cgccgagggcatacgggcagcgaccagctcaggcaccttccttatccagaaagagccgagctgggaagccccaggaccctgtctggaagctcagacagggacttcgaaaaggtcagcccc

SEQ ID NO: 438681 - DNA, 120 bp, Artificial Sequence
  ENSG00000153404_8 (sequence is synthesized)
tcagagcagggcccacggatgccccctgagaactgtggggggtcgggggagaggccggaccccatggaccaggaggacagacccaaggccctcaccttccacacagacctgggcatcccg

SEQ ID NO: 438682 - DNA, 120 bp, Artificial Sequence
  ENSG00000153404_9 (sequence is synthesized)
agcagcaggaggcggccgccgggggaccccacttgtgtgcagcctagacgctggttcagggagtcgtacatggaagccttgcggaaccccatgcccctgggcagctctgaggaggccctc

SEQ ID NO: 438683 - DNA, 120 bp, Artificial Sequence
  ENSG00000153404_10 (sequence is synthesized)
ggggacctggcctgcagctccctgactggagccagcagggacctggggactggggcagtagccagtgggacccaggaggaaacctctggcccccggggagacccccaacagaccccaagt

SEQ ID NO: 438684 - DNA, 120 bp, Artificial Sequence
  ENSG00000153404_11 (sequence is synthesized)
ctagagaaggagaggcacacacccagccggacaggtccaggagctgcagggcggactcttcccaggagatctcggtcctgggaaagggcacccagaagctccagaggggcccaggctgca

SEQ ID NO: 438685 - DNA, 120 bp, Artificial Sequence
  ENSG00000153404_12 (sequence is synthesized)
gcctgccacacctcccaccactcagcaggctccaggcctgggggccacctaggaggacaagctgtggggaccccaaactgtgtcccagtagagggtcccggctgcaccaaagaggaagac

SEQ ID NO: 438686 - DNA, 120 bp, Artificial Sequence
  ENSG00000153404_13 (sequence is synthesized)
gttcttgcatcctcagcctgtgtcagcacagacggcggcagcctccattgccacaaccccagcgggccttccgatgtgcctgcccggcagccacaccccgagcaagaagggtggccaccc

SEQ ID NO: 438687 - DNA, 120 bp, Artificial Sequence
  ENSG00000153404_14 (sequence is synthesized)
ggcacaggagacttccccagccaggtgcccaagcaggtgctggacgtcagtcaggagctgctgcagtccggggtcgtcaccctcccagggacccgagaccgtcatggcagagcagtggtg

SEQ ID NO: 438688 - DNA, 120 bp, Artificial Sequence
  ENSG00000153404_15 (sequence is synthesized)
caggtccgcaccaggagcctgctctggaccagggaacactcgtcctgtgctgagctgacccgcctgctgctgtacttccatagcatccccaggaaagaggtccgggacctggggctggtt

SEQ ID NO: 438689 - DNA, 120 bp, Artificial Sequence
  ENSG00000153404_16 (sequence is synthesized)
gtcctggtggatgcacgcaggagtccagctgcccctgccgtctcccaggccctctcaggattgcagaacaacacatctcctataattcatagtatcttgctgttggtagataaagaatct

SEQ ID NO: 438690 - DNA, 120 bp, Artificial Sequence
  ENSG00000153404_17 (sequence is synthesized)
gcatttaggcctgacaaggatgcaataattcagtgtgaggtcgtgagctccctgaaggccgtgcacaaatttgttgacagctgccagctgaccgcagacctcgacggctcctttccctac

SEQ ID NO: 438691 - DNA, 120 bp, Artificial Sequence
  ENSG00000153404_18 (sequence is synthesized)
agccatggtgactggatctgcttccgtcagaggctggaacacttcgctgcaaactgtgaagaagccatcattttcctacagaattcattctgctccctgaacacccacagaaccccaaga

SEQ ID NO: 438692 - DNA, 120 bp, Artificial Sequence
  ENSG00000153404_19 (sequence is synthesized)
acagcccaggaagtcgccgagttaattgaccagcatgagacgatgatgaagcttgtcctggaagacccactgcttgtgtctctcaggctggaggggggcaccgtcctggcgcggctgagg

SEQ ID NO: 438693 - DNA, 120 bp, Artificial Sequence
  ENSG00000153404_20 (sequence is synthesized)
agagaagagcttggcacagaagacagccgggacaccctggaggccgccacaagcctgtacgaccgagtggatgaggaggtgcacaggctggtcctcacctcgaacaatcgtctccagcag

SEQ ID NO: 438694 - DNA, 120 bp, Artificial Sequence
  ENSG00000153404_21 (sequence is synthesized)
ctggagcacctccgggagctggcgtcactcctggaagggaatgaccagcaatcctgccagaaaggactacagctggcgaaggagaacccgcaacgtacagaggaaatggtccaggatttc

SEQ ID NO: 438695 - DNA, 120 bp, Artificial Sequence
  ENSG00000153404_22 (sequence is synthesized)
agaaggggcctgagcgccgtggtcagccaggctgagtgcagggagggagagctggccaggtggacccgctcgtccgagttgtgcgagacggtgagcagctggatggggcccctggacccg

SEQ ID NO: 438696 - DNA, 120 bp, Artificial Sequence
  ENSG00000153404_23 (sequence is synthesized)
gaggcttgtccctcctcacccgtggctgagtgtttgaggagctgtcaccaggaggctacctcggtggctgcagaggccttccccggggcaggtgtggcagtgctgaagcctcatgccctg

SEQ ID NO: 438697 - DNA, 120 bp, Artificial Sequence
  ENSG00000153404_24 (sequence is synthesized)
gggaaaccgtgggcatcacagcaagacctgtggctgcagtacccccagacccggctccgtctggaagaggccctttctgaggctgccccagaccccagcttaccgccccttgcccagagc

SEQ ID NO: 438698 - DNA, 120 bp, Artificial Sequence
  ENSG00000153404_25 (sequence is synthesized)
cccccaaagcatgagcgtgcccaggaggccatgaggaggcaccagaagccaccctcattccccagcacggacagtgggggtggtgcctgggaacctgcgcaaccactgtccggcctccct

SEQ ID NO: 438699 - DNA, 120 bp, Artificial Sequence
  ENSG00000153404_26 (sequence is synthesized)
ggacgagcgcttctgtgtggacaggacggggagaccctgcgcccagggctgtgtgctctgtgggacccactgtccctcctcaggggccttccaggggcaggggccaccacggcccacctg

SEQ ID NO: 438700 - DNA, 120 bp, Artificial Sequence
  ENSG00000153404_27 (sequence is synthesized)
gaggacagctctgcctgttcctctgagcccacccagaccctggccagccgccccaggaaacatccccagaagaaaatgataaagaaaacgcaaagtttcgagatacctcagcccgacagt

SEQ ID NO: 438701 - DNA, 120 bp, Artificial Sequence
  ENSG00000153404_28 (sequence is synthesized)
ggccccagggactcctgccagccagaccatactagtgtcttcagcaagggcctggaggtaaccagcactgtagccacagagaagaagctcccgctgtggcagcatgccaggagccccccg

SEQ ID NO: 438702 - DNA, 120 bp, Artificial Sequence
  ENSG00000153404_29 (sequence is synthesized)
gtcactcagagccggagtctgtcctccccctcggggctccaccctgctgaggaggatgggaggcagcaggtgggcagcagccgactgaggcacatcatggccgagatgatcgccacagag

SEQ ID NO: 438703 - DNA, 120 bp, Artificial Sequence
  ENSG00000153404_30 (sequence is synthesized)
agggagtacattcggtgcttaggatacgtcattgacaactattttccagaaatggaaagaatggacttgccccagggccttcgagggaagcaccacgttattttcggcaacttggagaag

SEQ ID NO: 438704 - DNA, 120 bp, Artificial Sequence
  ENSG00000153404_31 (sequence is synthesized)
ctccacgacttccaccagcagcacttcctccgggagctggagcgctgccagcactgccccttggccgtgggccgcagtttcctgagacacgaagagcagtttgggatgtacgtgatctac

SEQ ID NO: 438705 - DNA, 120 bp, Artificial Sequence
  ENSG00000153404_32 (sequence is synthesized)
agcaaaaacaagccgcagtcggatgccctgctcagcagccatggcaacgccttcttcaaggacaagcagcgggagctaggtgacaaaatggacctggcctcctacctgctgcggcccgtg

SEQ ID NO: 438706 - DNA, 120 bp, Artificial Sequence
  ENSG00000153404_33 (sequence is synthesized)
cagcgtgtggccaagtacgcgctgctactccaggacctgctcaaggaggccagctgtggcctggcccaggggcaggagctgggcgagctccgagccgccgaggtcgtggtctgcttccag

SEQ ID NO: 438707 - DNA, 120 bp, Artificial Sequence
  ENSG00000153404_34 (sequence is synthesized)
ctgcgtcacggcaatgacctgctggccatggacgccatccgcggctgtgacgtgaatttgaaggaacaggggcagctgagatgccgggatgagtttatcgtttgctgcgggaggaagaag

SEQ ID NO: 438708 - DNA, 120 bp, Artificial Sequence
  ENSG00000153404_35 (sequence is synthesized)
tatctgaggcatgtgttcctctttgaagacctcatcctgtttagcaagacccagaaggtggagggcagccacgacgtctacctgtacaagcagtccttcaagacggccgagatcgggatg

SEQ ID NO: 438709 - DNA, 120 bp, Artificial Sequence
  ENSG00000153404_36 (sequence is synthesized)
acagagaacgtcggggacagtggcttgaggtttgagatttggtttcgcaggcggcggaaatctcaggacacctacattctccaagcaagctcggcagaggtcaagagtgcatggaccgat

SEQ ID NO: 438710 - DNA, 120 bp, Artificial Sequence
  ENSG00000153404_37 (sequence is synthesized)
gtcatagggaggatcctgtggcggcaggcactaaagagcagagaactcagaatccaagaaatggcatccatgggtataggcaaccagccattcatggatgtcaagcccagagaccggacc

SEQ ID NO: 438711 - DNA, 120 bp, Artificial Sequence
  ENSG00000153404_38 (sequence is synthesized)
cctgactgtgcagtgataagcgaccgggctcccaaatgtgcagtgatgagcgaccgagtccccgacagcatcgtcaagggcacagagtcacaaatgagagggtccacagcggtgtcctcc

SEQ ID NO: 438712 - DNA, 120 bp, Artificial Sequence
  ENSG00000153404_39 (sequence is synthesized)
tctgaccacgccgcccccttcaagcgaccacactccaccatctcagacagcagcacctcctcttctagcagccagtcctcctccatcctggggtcgctgggcctgcttgtgtcctccagc

SEQ ID NO: 438713 - DNA, 120 bp, Artificial Sequence
  ENSG00000153404_40 (sequence is synthesized)
ccagcccacccgggcctatggagccctgcccacagcccctggtcatctgatatcagagcctgcgtcgaggaagatgagccagagccagaactagagacgggcacccaggctgcagtgtgt

SEQ ID NO: 438714 - DNA, 120 bp, Artificial Sequence
  ENSG00000153404_41 (sequence is synthesized)
gagggggctcctgctgtgctgctgagccgcacacgccaggcctgatgactgtcagggtggcagtgcccatcatgtggctagaacaatacagagggagcagcacgccaggcctgatgactc

SEQ ID NO: 438715 - DNA, 120 bp, Artificial Sequence
  ENSG00000153404_42 (sequence is synthesized)
tgggggtggcggtgcccatcgcgtggctggaacgatccagagggaatagcacagcaggtgtccaggtatttcccaggattttagacattccctaacattttcaaacaaatttataatttt

SEQ ID NO: 438716 - DNA, 120 bp, Artificial Sequence
  ENSG00000153404_43 (sequence is synthesized)
gtcttatttaaaaaacaaaccttccacttccacccaagacaacagcataggaaacagacctaaaacaagacaaaaaaagactaaacatgaaacaaaagatgtcaagacacaagacatttg

SEQ ID NO: 438717 - DNA, 120 bp, Artificial Sequence
  ENSG00000153404_44 (sequence is synthesized)
gcaacaaaggaccgcgatccctgagagacaggaaaacgggaggtgagcccggtgatggcctcagacctccctccgccttgagagtttgcaggcctcagtgcagggaggggcccaggaaga

SEQ ID NO: 438718 - DNA, 120 bp, Artificial Sequence
  ENSG00000153404_45 (sequence is synthesized)
gcccagcagcctccgtgagttgaagagaccaagtcagcaggagttggcaggtcagagtgccagagagagatgcctgcatggggaaagactcaccagatcagcccctccagcacctagtgg

SEQ ID NO: 438719 - DNA, 120 bp, Artificial Sequence
  ENSG00000153404_46 (sequence is synthesized)
gttgctacccattcgcacactcaaacagggaggctaccaaggctgggagcaacctttgaaaagaccaaagatcaattcctggtactcatgtgggctggggacaggacccgttcccaccag

SEQ ID NO: 438720 - DNA, 120 bp, Artificial Sequence
  ENSG00000153404_47 (sequence is synthesized)
ccagactagggaaactctcaatagatcaattcctgatactcatgtgggctggggacaggacccactcccaccagccagactaggaaaactcccaatctgtgagcattaggtggagttctc

SEQ ID NO: 438721 - DNA, 120 bp, Artificial Sequence
  ENSG00000153404_48 (sequence is synthesized)
agaaaatcttgcctcaggaatggggataattagccctagactgagccctgctcctgactcgcctacaaaatcataaaagcaagacctaaaatgatcaaaccattcccagataattcactt

SEQ ID NO: 438722 - DNA, 120 bp, Artificial Sequence
  ENSG00000153404_49 (sequence is synthesized)
tatcccagaacaaagctccagatgatctaggggttaccaaagtgtccacaccctgcaaggtaaactcacagtgcctgacctcggagtgccaggcgtgcagaggagcagccaagggcaaac

SEQ ID NO: 438723 - DNA, 120 bp, Artificial Sequence
  ENSG00000153404_50 (sequence is synthesized)
actccaaggagagtcgcctggcaaagccaaccacccagagccagcgtctgtgctagaatcacagaattcaaactgtggctgaaatcgcagcccaggcgtccagaaagttaaagttaagaa

SEQ ID NO: 438724 - DNA, 120 bp, Artificial Sequence
  ENSG00000153404_51 (sequence is synthesized)
tgtctcacaaaaaaggttaagaaatgacttaatggaagagattcagaagacccagaccgaccttacagggatgagaaactacaatattgacagtggaaactatcctggatggggtaacag

SEQ ID NO: 438725 - DNA, 120 bp, Artificial Sequence
  ENSG00000153404_52 (sequence is synthesized)
attggatttcacagaagagaccatgaggcaccttgaagacacatcagtggaaactatttgcatttgttgggcctccagagagacagaaccaataggagatagctagatatatatacagac

SEQ ID NO: 438726 - DNA, 120 bp, Artificial Sequence
  ENSG00000153404_53 (sequence is synthesized)
agatagatagatagatagatagactgacagacagatgagaggggccttaggggcattggctgacacaattttggcaggtcaagagccccacaataggccatccacaagctggagacccaa

SEQ ID NO: 438727 - DNA, 120 bp, Artificial Sequence
  ENSG00000153404_54 (sequence is synthesized)
gccccacaataggccatccacaagctggagacccaaggaagctgctagtgtgcccagtccgagtcctaaagcctcagagccagggaagccagtggtgtaattctcagaggccaaaggcct

SEQ ID NO: 438728 - DNA, 120 bp, Artificial Sequence
  ENSG00000153404_55 (sequence is synthesized)
gagaacctgggggccactggtataagtctgagtccatagacccagtgaactccaaacacaagagatacgagtgcacatcataatcaaattgcatataaccagtgataaacagaaaatcct

SEQ ID NO: 438729 - DNA, 120 bp, Artificial Sequence
  ENSG00000153404_56 (sequence is synthesized)
aaaaccagtcagaggacaagggcatgttctgttgggaggcacaaagctgatgaggatggctgactcctcaggagcagcatgggtgagaggcagtggaatgtactaaggagaaaactgcca

SEQ ID NO: 438730 - DNA, 120 bp, Artificial Sequence
  ENSG00000153404_57 (sequence is synthesized)
aattcacattctgtacctgacaaaatctttccgaagcgatggtgacataaagacattttcatacacacagaaactaagagtttcatccccagcagacctgcactacaagaaatgttaaat

SEQ ID NO: 438731 - DNA, 120 bp, Artificial Sequence
  ENSG00000153404_58 (sequence is synthesized)
gatgtgcttcagggaaaagaaaaatgaagagcatgtgcaccatccaggattttcctcgttatttaaatccctttagcccatctcccatttgccccaaggaatgagtgctggcagtgagct

SEQ ID NO: 438732 - DNA, 120 bp, Artificial Sequence
  ENSG00000153404_59 (sequence is synthesized)
aggaatgagtgctggcagtgagctgcactttttttttctctaaacgggaaatgggttaaaagatgagtggcttggccgggtgcggtggctcatgtctctaatcccagcactttgggaggc

SEQ ID NO: 438733 - DNA, 120 bp, Artificial Sequence
  ENSG00000153404_60 (sequence is synthesized)
gagcccaggaactggggggtcatgctgggaaacatggcaagaccgcatctctattaaaaataaataaaagttaactgactgtttaaacaaaagtattaacgtatctgcggtttgtactat

SEQ ID NO: 438734 - DNA, 120 bp, Artificial Sequence
  ENSG00000153404_61 (sequence is synthesized)
acgcacaggtaaactgtgtgaccacagcagcgtgatggctgggagacgctggatgtgatacgtgaagtgaggggtatcacttgaaggtagattgtggtaagctaaagatgtactgataaa

SEQ ID NO: 438735 - DNA, 120 bp, Artificial Sequence
  ENSG00000153404_62 (sequence is synthesized)
cccttgaaacacccactaacaaagaattacagctaatagaccaacagaggagataaaatggaatttttaaaaatccagtccaaaaatacgtagagaaagagggaaagggaagaatggact

SEQ ID NO: 438736 - DNA, 120 bp, Artificial Sequence
  ENSG00000153404_63 (sequence is synthesized)
tgggggcgacacagaagacaagtggagagagactgaagcagccactggccatcacagcaaacacaagcagggcgcaggacgccggcaagccacagacaggcctgctctctgaattggtga

SEQ ID NO: 438737 - DNA, 120 bp, Artificial Sequence
  ENSG00000153404_64 (sequence is synthesized)
ccacatgagtaacttcacgggtctgttctatgtccagagttgtcaaactgcatgctttaaagatgtgcagtggatcgtatgtcgcttaaatcccaacaaagcagtatttttttaaagtac

SEQ ID NO: 438738 - DNA, 120 bp, Artificial Sequence
  ENSG00000153404_65 (sequence is synthesized)
aatcatgcacacagcacttcccctgggaggcaggggctgtgcccacagaagtcgttacctctgcgtcctgagtatggacagccaccatcacacagccccagaggccgcccaggctctagc

SEQ ID NO: 438739 - DNA, 120 bp, Artificial Sequence
  ENSG00000153404_66 (sequence is synthesized)
cacactctggcactgcctgggacaggtgccctcaggaacccaaatgccactgcccccgtgaaagccacttcaagcgtgttgcttcaaatcagaaggcatctacgcctgtggaagaggagg

SEQ ID NO: 438740 - DNA, 120 bp, Artificial Sequence
  ENSG00000153404_67 (sequence is synthesized)
ctgctgggggcccaggtgtgcagggggcagggccaggtgcaggggcacagcttatgcctgtggccaacccactggggagcaaggctggggatatgcccaggccagcagggccagcaggag

SEQ ID NO: 438741 - DNA, 120 bp, Artificial Sequence
  ENSG00000153404_68 (sequence is synthesized)
tgactgcgccatcctgaacacgtccttgggcctcccaggaccttggtgcctcccatctgggctggcacaagcctccagtcaaaagatgggtctctctctcctgatagcatggagcctgga

SEQ ID NO: 438742 - DNA, 120 bp, Artificial Sequence
  ENSG00000153404_69 (sequence is synthesized)
tgtgggaatggagccacaccagccccacgggagccccacgacccatcgggctgtgggatgcatccccacggccgggacccctcagcctgtgacttggtctgggcagatgcaaaggccacc

SEQ ID NO: 438743 - DNA, 120 bp, Artificial Sequence
  ENSG00000153404_70 (sequence is synthesized)
ctgcagggctgaggtgtctgtggggaaggaggtgcccagccctgggaggccatcttgctcctgctttttatttaacccatggggctctttggcctcattttctgttttttgagtttctcg

SEQ ID NO: 438744 - DNA, 120 bp, Artificial Sequence
  ENSG00000153404_71 (sequence is synthesized)
tgcactccaaactgtcctggagccagccctggtgtgaaacagaggcttcctgctggcagaagaggcccaccgagttacgtccacaccagctggccctgggcacctctctctctggccttc

SEQ ID NO: 438745 - DNA, 120 bp, Artificial Sequence
  ENSG00000153404_72 (sequence is synthesized)
tgtccacactgggatttggctctgatttccagaaggcagggttaggaaacacctgtttccaggcagagtaatgcttctgtctgaatcaggcctcatgggcttcaccagcagacacgaagg

SEQ ID NO: 438746 - DNA, 120 bp, Artificial Sequence
  ENSG00000153404_73 (sequence is synthesized)
tttcatttagatggcgaacacgtgttctcatttctccagggttctggacccgtgagctgaagcaggtgctgagaagtgggagaggcggccactgggtccctcagggtcactcaccccgcc

SEQ ID NO: 438747 - DNA, 120 bp, Artificial Sequence
  ENSG00000153404_74 (sequence is synthesized)
acgtgaggccacttccgcccagcactgggggcgctgggagctgaggggcccacaggggacgtgggagacagccccgatgcgtccccatccgcagtgacgctagcgcggagtcgtcgccaa

SEQ ID NO: 438748 - DNA, 120 bp, Artificial Sequence
  ENSG00000153404_75 (sequence is synthesized)
gcacgtggagggacagccctggagccctggcctggcccagcatctcccagagtcacttcctgatgcctccccagccctgcccaggaagggtttgtggccacagccccacagcggccccct

SEQ ID NO: 438749 - DNA, 120 bp, Artificial Sequence
  ENSG00000153404_76 (sequence is synthesized)
cgcctcgaccaccagtgcctccttccaagctgcctgagcaatcctgggtggtgagctccaccactcccacccacgcctcagcactgggaccccccagggatggtgtggggattcctgccc

SEQ ID NO: 438750 - DNA, 120 bp, Artificial Sequence
  ENSG00000153404_77 (sequence is synthesized)
cccgtccatgcctcagcactgggagctgggaaggtgtgtgatttcctcccccacctcagtactgggacccccaggaagggtgtgtggccccaccatcctgaatgctcagggctggtggtc

SEQ ID NO: 438751 - DNA, 120 bp, Artificial Sequence
  ENSG00000153404_78 (sequence is synthesized)
agcgaggtggtttctaaaccaagccctgggaggagccatcctgggactgtgcttggacaaggttggggctcccgcagtgagctctagccctccccaggaccctcccacggccccagggtg

SEQ ID NO: 438752 - DNA, 120 bp, Artificial Sequence
  ENSG00000153404_79 (sequence is synthesized)
ccggccttcagattgaccccattcgtggatgagtctacaaggctccccagtgcccagcaagagtgtttttacattcagaggtgaggaaggggtgccggcatctgccccagacacaaccgg

SEQ ID NO: 438753 - DNA, 120 bp, Artificial Sequence
  ENSG00000153404_80 (sequence is synthesized)
gcaggtacagatgtcatccccttgaggacagcagggaggcgactcaggagaggctgatcagacgggagccgcatccccatcaccttccagagagacctcttcttttgccaggtgtcgtga

SEQ ID NO: 438754 - DNA, 120 bp, Artificial Sequence
  ENSG00000153404_81 (sequence is synthesized)
gggctgtggcttagctgggcctgcgtccatccccggttctggggagatgcccgggcccctcctggatggcagcagcagtggaggtttgggttttgagggagccctaagaacctgagagac

SEQ ID NO: 438755 - DNA, 120 bp, Artificial Sequence
  ENSG00000153404_82 (sequence is synthesized)
ttagatggagcatggcacgccctggagagtccacgtccccagacccctcatgccaacaccattccacccagcagtttcttccctgtggtcagaacaaaacccccaagcctcaggcctcag

SEQ ID NO: 438756 - DNA, 120 bp, Artificial Sequence
  ENSG00000153404_83 (sequence is synthesized)
gctggttttctgacaggcaaaatgctccttacataaggaaagacctttccttggctgaccctaaagtagccaaggggagctcacatcgcctggcctgccgccaccaccaggctgcctgac

SEQ ID NO: 438757 - DNA, 120 bp, Artificial Sequence
  ENSG00000153404_84 (sequence is synthesized)
cagctcaccgccttgttctagatgcttctgaagcaacagctcgcctggccccacccccatcaagcatctgctgggcagcctccctccccggcccgcctgtagctcccaaaggtctcaagc

SEQ ID NO: 438758 - DNA, 120 bp, Artificial Sequence
  ENSG00000153404_85 (sequence is synthesized)
ctcaacatcctggtaaccaagtgcacccagagggctggcagggtcacatggaggcaggggacccttggccccagggtggtcgtcttcccaggaggtccgcctgtcaggtcagagggcagc

SEQ ID NO: 438759 - DNA, 120 bp, Artificial Sequence
  ENSG00000153404_86 (sequence is synthesized)
aggaggccaccccacctccccgggttccctcgagcattcctttgtcaggagcagctcccccaggatccaggcatccctggcccccctttgcccccgccctgctctcaggagccccctgcc

SEQ ID NO: 438760 - DNA, 120 bp, Artificial Sequence
  ENSG00000153404_87 (sequence is synthesized)
aggtgctctgaccacaggaaacaggagccctcagggccactgccagaggacggattctgctgccaaccagaggtcctggggctggcggcgctggtgtgcctgccctgggccttcagcagc

SEQ ID NO: 438761 - DNA, 120 bp, Artificial Sequence
  ENSG00000153404_88 (sequence is synthesized)
ccccataaggagaaagctccagcctcccgttcagagaaggctccatcctggggacacgcctctcccaaggtcacccacgtgggggctttgttactcatgcttcccagactgcgtgctgtg

SEQ ID NO: 438762 - DNA, 120 bp, Artificial Sequence
  ENSG00000153404_89 (sequence is synthesized)
tcagagttttcacacctgcctgatgtcctgggggggctcacagaggaccgaccctgcagggagatgctgacccaccctgagacccaggagaagaaaacggccagggtccaggctgctccc

SEQ ID NO: 438763 - DNA, 120 bp, Artificial Sequence
  ENSG00000153404_90 (sequence is synthesized)
accatccctgggggattagcaccttggctgagcccgaactgaccacctggggcgtaggtccaagatttaattacaaaacgataggtgaatgtgggttctgtgtgcctgtgacatagagaa

SEQ ID NO: 438764 - DNA, 120 bp, Artificial Sequence
  ENSG00000153404_91 (sequence is synthesized)
tgttttccacaccgcgtgtgaaatgacgagagcttttgtgtcacacatgtagctgctacgagacagacgctcttgttccggatcagagcagcagacagaaccggcacttttagggtccaa

SEQ ID NO: 438765 - DNA, 120 bp, Artificial Sequence
  ENSG00000153404_92 (sequence is synthesized)
accctgttgcccacagaacgcccatgacaccagctgggtggagctgccgccgagtccacgccccgtctggctgggacctggagctcccctcaagctgcagatccactctgcaccacaagg

SEQ ID NO: 438766 - DNA, 120 bp, Artificial Sequence
  ENSG00000153404_93 (sequence is synthesized)
tggcctcgcagaggagcctcccgagctttggaaccagaggcaggctcagcgatgctctccatccggcctggccccaccgtgtgtatcaggtgtcagaggccttgctgggtgccaggccac

SEQ ID NO: 438767 - DNA, 120 bp, Artificial Sequence
  ENSG00000153404_94 (sequence is synthesized)
gtctgtgctgtcacagctttgaggggccagcgggtcctagggagaggcccgtgcgacgtgagtaacagcagtttttcttctgacagctgggatggaggtgggtcctccagggagtgcccc

SEQ ID NO: 438768 - DNA, 120 bp, Artificial Sequence
  ENSG00000153404_95 (sequence is synthesized)
agtcctcgagagccagacttgtgcacgggcctggaaatgaaggtctcaggcaggggctgcgcacaccgatggtcagcattgccgttcggggcctgcagtcgcccataatgggccctgccc

SEQ ID NO: 438769 - DNA, 120 bp, Artificial Sequence
  ENSG00000153404_96 (sequence is synthesized)
cctaggcctggcctcttttgctttcctcctggatggttcctctacccctggtccagcagggactcagcagtgcctgccagctgcagacccccatgctcctgcagcctggaaccctcctgc

SEQ ID NO: 438770 - DNA, 120 bp, Artificial Sequence
  ENSG00000153404_97 (sequence is synthesized)
cctccaaaggtcatggggtgacccagggtgggaacaccagaccccctcaccccgtgtccaccgcccatggccgggctcacagtgtctcagagccgtggtgagccatcctaggaccagtgt

SEQ ID NO: 438771 - DNA, 120 bp, Artificial Sequence
  ENSG00000153404_98 (sequence is synthesized)
acctcacaacctttcagaccagtgaaggccagtgggctgggtggtccaggcatgtccccaacgcaggtccagccatctctgcacagaactggaatctcggttcatttcggtttcagcagg

SEQ ID NO: 438772 - DNA, 120 bp, Artificial Sequence
  ENSG00000153404_99 (sequence is synthesized)
tcccatgtagttagcaggacagcacttgagttaggtctgagaaagaacgcctgtttgtcatggcatttcctgtaaggagcccagagccgtggccccaggttgggacggcggcgccagagc

SEQ ID NO: 438773 - DNA, 120 bp, Artificial Sequence
  ENSG00000153404_100 (sequence is synthesized)
tgggcctgagtctgacccaacctgtgctgagtggtcctgctggaatgggaaccccaagaggaccacccctctctaaaagaagggaaaacagtaagcgagagggaggctgcaggggcccag

SEQ ID NO: 438774 - DNA, 120 bp, Artificial Sequence
  ENSG00000153404_101 (sequence is synthesized)
accttggctgaccttcctagccatggtctccaccctccgagacccaggggccccgcagtgacagcagggtgttgggccacacagagcccgagtaggtaaaggaaggttctggaaaccact

SEQ ID NO: 438775 - DNA, 120 bp, Artificial Sequence
  ENSG00000153404_102 (sequence is synthesized)
tttcagaacccaaaaggtgtctgggaaatggcgttacctgccactgttgttaagtgtttactttgtatcaatactgaattgttaaaaattttaatcataaaaaccaatggaacatgtttt

SEQ ID NO: 438776 - DNA, 120 bp, Artificial Sequence
  ENSG00000153404_103 (sequence is synthesized)
acctccgggagctggcgtcactcctggaagggaatgaccaggtcagagctgcaggaggaaggcggcccggtcagcatcccctccaggccaggctggccaaggcaaccctctcaccttcac

SEQ ID NO: 438777 - DNA, 120 bp, Artificial Sequence
  ENSG00000153404_104 (sequence is synthesized)
actgtgtctttagggccttgatctgatttccatttggaatgaaattatgtcaggatagggcatgccttgctgcttgtgtaaaaagaaataaattttattttttacgtgagagatactgga

SEQ ID NO: 438778 - DNA, 68 bp, Artificial Sequence
  ENSG00000153404_105 (sequence is synthesized)
ctcgatctctcgagcccccacgcctggccggaagcttttttatcgtgcatcccacatgtgcccatgtg

SEQ ID NO: 438779 - DNA, 120 bp, Artificial Sequence
  ENSG00000153404_106 (sequence is synthesized)
cggaagcttttttatcgtgcatcccacatgtgcccatgtgcctccagtccacatgtgaccctgctcatccctccgggttttcatgtgtttctgtctcaggcatgaattgcttttaataaa

SEQ ID NO: 438780 - DNA, 120 bp, Artificial Sequence
  ENSG00000153404_107 (sequence is synthesized)
gagcagaggaaggcggggaacaccccccaggcagagagacctgggcagccaccgccatgaatgagagctctctggctgtccccaggccagctatgctctgacggccaagcgtggtggtcc

SEQ ID NO: 438781 - DNA, 120 bp, Artificial Sequence
  ENSG00000153404_108 (sequence is synthesized)
ttgcctgtgtccgagcgtggggttagttctggaacatttgatcacttctcctgctccactctctgcactccacctggaactcccgattacacaactcagaatccaagaaatggcatccat

SEQ ID NO: 438782 - DNA, 120 bp, Artificial Sequence
  ENSG00000153406_0 (sequence is synthesized)
taagactcatggacatagctttaattatctttgcctgacgcccaatacctgaaaattaagatgttcatgcaagataaagaggtaatttttctcctcctcccagtcatcacccgtagcatc

SEQ ID NO: 438783 - DNA, 120 bp, Artificial Sequence
  ENSG00000153406_1 (sequence is synthesized)
cggttaagaggctctccacctcgctcattttggtctaactggatttacacaaactcactgtgcacgtgcctggggcgggcaaacccggaaacgacgccgagtcccgcgggatccaggagg

SEQ ID NO: 438784 - DNA, 120 bp, Artificial Sequence
  ENSG00000153406_2 (sequence is synthesized)
agccaactgcgccggaggaggggtttcggccgacacgtcgggattggcggctgcagccaggggtcctccgacgctgggcttccgtgagcggcgctctgccagatctctggaccggattcg

SEQ ID NO: 438785 - DNA, 120 bp, Artificial Sequence
  ENSG00000153406_3 (sequence is synthesized)
tcccattctcgtcctcatggtggacaagaaactggtggtggttttcggaggcacaggtgcccagggtggctccgtggcccgcacactcctggaagatgggacattcaaggttcgagtggt

SEQ ID NO: 438786 - DNA, 120 bp, Artificial Sequence
  ENSG00000153406_4 (sequence is synthesized)
gacccgaaaccctaggaagaaggcagcaaaggagctgaggctgcaaggtgcagaagtagtgcagggagaccaagatgaccaggtcatcatggagctggccctgaatggggcttacgccac

SEQ ID NO: 438787 - DNA, 120 bp, Artificial Sequence
  ENSG00000153406_5 (sequence is synthesized)
ggaagctgctcgctgatctggccaggcgcctgggcctccactatgtggtctacagcggcctggagaacatcaagaagctgacggcagggagattggccgccgcgcactttgacggcaaag

SEQ ID NO: 438788 - DNA, 120 bp, Artificial Sequence
  ENSG00000153406_6 (sequence is synthesized)
gggaggtggaggaatatttccgggacattggcgttcccatgaccagtgtgcggctgccctgctattttgagaacctcctctcccacttcttgccccagaaagccccagacggaaagagct

SEQ ID NO: 438789 - DNA, 120 bp, Artificial Sequence
  ENSG00000153406_7 (sequence is synthesized)
acttgctgagcttgcccacaggtgacgttcccatggatggcatgtccgtgtctgacctgggtcctgtggtgctcagccttttgaagatgccagaaaaatacgtcggccagaacatcgggc

SEQ ID NO: 438790 - DNA, 120 bp, Artificial Sequence
  ENSG00000153406_8 (sequence is synthesized)
tgagcacttgcaggcacacggccgaggagtacgctgccctgctcaccaagcacacccgcaaggtcgtgcacgatgccaagatgactcctgaggactacgaaaagcttggctttcccggtg

SEQ ID NO: 438791 - DNA, 120 bp, Artificial Sequence
  ENSG00000153406_9 (sequence is synthesized)
cccgggacctggccaacatgttccgtttctatgccctgagacccgaccgtgacatcgagctgaccctgagactcaaccccaaggccctgacgctggaccagtggctggaacagcacaaag

SEQ ID NO: 438792 - DNA, 120 bp, Artificial Sequence
  ENSG00000153406_10 (sequence is synthesized)
gggacttcaacctgctgtgacctgcccgcctcgcggccccttgtggggatcgggggcaccagaggggcagaggcaccaacatctgaataaagccattgttctcccagatggcttccagga

SEQ ID NO: 438793 - DNA, 120 bp, Artificial Sequence
  ENSG00000153406_11 (sequence is synthesized)
cccgcctctgcagtggactcggccgcagaatcggggtcccgggctcctggaacttgtcccgcccaggccgcggcgaggaggtcactccagccggtgggacccgggccggggggcgggtga

SEQ ID NO: 438794 - DNA, 120 bp, Artificial Sequence
  ENSG00000153406_12 (sequence is synthesized)
ctggaaccgggggaggcgggaaggaggaggggatcgggcccaagggacacgaggtgggtcgcgggaccccgatatctcgggacaggcgtcttgccgctccgggcccagccgcccccttcg

SEQ ID NO: 438795 - DNA, 74 bp, Artificial Sequence
  ENSG00000153406_13 (sequence is synthesized)
tgcgtgcctcagcctcccaaagtgtctggattacaggcatgagcccctgggcccagctgcaacgcgcaaaatct

SEQ ID NO: 438796 - DNA, 120 bp, Artificial Sequence
  ENSG00000153406_14 (sequence is synthesized)
aaaaataaaataaagaaaataaaaatacctgaatgagaatcgtcgttgagaaggtttcctggatgctccttgctgtggtggagcactcccttcggggtttcgcccttcagtgggactttc

SEQ ID NO: 438797 - DNA, 120 bp, Artificial Sequence
  ENSG00000153406_15 (sequence is synthesized)
ccagattagcggagaccctgggctccagccacactctctgtagcagctttcagagtccttttcctttgtcccttctctgtcatcctagcgctgagagagctgggcaggcccaggttctta

SEQ ID NO: 438798 - DNA, 120 bp, Artificial Sequence
  ENSG00000153406_16 (sequence is synthesized)
gccccattctaggaatgcagcaacccaggctcagagagcctcaacagcctgccctaggtggcagtacccggattccatcccgtttcctgactcaattccactgctgcctctgtgctacca

SEQ ID NO: 438799 - DNA, 120 bp, Artificial Sequence
  ENSG00000153406_17 (sequence is synthesized)
caaatagcaagacttgtcttagctatgcccgagtgctggagtgtgcagctgactgctgggaagaaccagcttggaccctttggagaggggctctgtccctgcccctgtctgccctcggga

SEQ ID NO: 438800 - DNA, 120 bp, Artificial Sequence
  ENSG00000153406_18 (sequence is synthesized)
ttctccaggtgttgtctcttctcccgtctcttataagtaccctggttactggatttagcgcctatctagttagtgcaggatgttcccatctcaagatccttcacgtaattacatctgcca

SEQ ID NO: 438801 - DNA, 120 bp, Artificial Sequence
  ENSG00000153406_19 (sequence is synthesized)
agctaactggccacagagtgaaatttctggcttagatgttttgaccaaatagagagaaaagcttccaggaggagagggccataggagccaagatgactcctgaggactacgaaaagcttg

SEQ ID NO: 438802 - DNA, 120 bp, Artificial Sequence
  ENSG00000153406_20 (sequence is synthesized)
aaatagactaaactgtgtcaagcatgtattgagtatttaaaatctaagcagttctatctttctgcctactgaaatatattgtgcctcagaaatggtagtgcaatggatagaaagtatgtt

SEQ ID NO: 438803 - DNA, 120 bp, Artificial Sequence
  ENSG00000153406_21 (sequence is synthesized)
aacataaacttcctgtaaaattagtaactccataggacaagcctttggtcaatcgaacaaggtggctccaatttctcactctgggcctgcaaggtatctttacacgtttccacaggccta

SEQ ID NO: 438804 - DNA, 120 bp, Artificial Sequence
  ENSG00000153406_22 (sequence is synthesized)
taactactgaagatgatggctacacttggacagctgagtgaagagaatatccactttgttggcttctgacatacacactgacagcacagttcaccagacaacaatcactcttctggcgtc

SEQ ID NO: 438805 - DNA, 120 bp, Artificial Sequence
  ENSG00000153406_23 (sequence is synthesized)
cctttccccagtcatcacccgtagcatccggttaagaggctctccacctcgctcattttggtctaactggatttacacaaactcactgtgcacgtgcctggggcgggcaaacccggaaac

SEQ ID NO: 438806 - DNA, 120 bp, Artificial Sequence
  ENSG00000153406_24 (sequence is synthesized)
cacccgcaaggtcgtgcacgatgccaaggtgggcctcccgccccaggtgactcaggcatccttgtcagggctttctagctcccgtagggagggtgtgtccagggctgcccacacctctgg

SEQ ID NO: 438807 - DNA, 120 bp, Artificial Sequence
  ENSG00000153443_0 (sequence is synthesized)
gtattagccggagccggctcgctaatggtggacgcgtgaggcggaggcgcgggcggaggagggaggccggagcgggcagcgcggcggcgccatgtccgtgaacatggacgagctcaagca

SEQ ID NO: 438808 - DNA, 120 bp, Artificial Sequence
  ENSG00000153443_1 (sequence is synthesized)
ccaggtcatgatcaaccagttcgtgctgacggcgggctgcgcggccgaccaggcgaagcaactgctgcaggcggcccactggcagttcgagacagccctcagcgcctttttccaggagac

SEQ ID NO: 438809 - DNA, 120 bp, Artificial Sequence
  ENSG00000153443_2 (sequence is synthesized)
caacatcccctacagccaccatcaccaccagatgatgtgcacccccgccaatacccctgctacaccccccaacttccctgacgctctcaccatgttctcccgtctcaaggcctccgagag

SEQ ID NO: 438810 - DNA, 120 bp, Artificial Sequence
  ENSG00000153443_3 (sequence is synthesized)
cttccacagcggtggcagcggcagcccgatggccgcgacagccacgtcacccccgccacacttcccccatgccgccaccagcagctctgcggcctccagctggcccacggcggcctcgcc

SEQ ID NO: 438811 - DNA, 120 bp, Artificial Sequence
  ENSG00000153443_4 (sequence is synthesized)
cccggggggcccacagcaccaccagccacagccgcccctgtggactccaacacccccttctccggcttcagactggccacccctggccccccaacaggccacctcagaacccagggccca

SEQ ID NO: 438812 - DNA, 120 bp, Artificial Sequence
  ENSG00000153443_5 (sequence is synthesized)
ggaccccgtggggcgggggagaggacgtctctgcgggcccccttcaccccttttctgtctgcaccccttgttccccggagccctggaggggagagcgcggactctagccaggcagggaca

SEQ ID NO: 438813 - DNA, 120 bp, Artificial Sequence
  ENSG00000153443_6 (sequence is synthesized)
cgtctggtgccagaacacgcagctgcccacacgcaaggtcatggccccagcggccccggcacatggagtggttcagcgcggcctgggtgcctggcggacagaacttcagagaccacgcag

SEQ ID NO: 438814 - DNA, 120 bp, Artificial Sequence
  ENSG00000153443_7 (sequence is synthesized)
ccttccttcgaagacgcacctgcccagcccagcccaggggtgccgtggaggaccaccctggcagagacattgctgatccctggcttggagctccttgggggccggcaggcctcgaccccc

SEQ ID NO: 438815 - DNA, 120 bp, Artificial Sequence
  ENSG00000153443_8 (sequence is synthesized)
accctagggaatgcagagcctctccgcatgtgtgcgcgtggccgtgtctgtgtatttctacgtgtgtcgctcttcagaagcaacctagttcctggggcagctggactttgcatgttagtg

SEQ ID NO: 438816 - DNA, 120 bp, Artificial Sequence
  ENSG00000153443_9 (sequence is synthesized)
tgagcccccagccccctgcccgccgccccctccccagggccctgcctcctccccaccccctcgtcagccagcgttgctgttccttgcagagaaaaggattgtgggaaactccaggactct

SEQ ID NO: 438817 - DNA, 120 bp, Artificial Sequence
  ENSG00000153443_10 (sequence is synthesized)
tcccaccgcctcccagcgcctgcctgctggggctgcctgcatgcctcccctgcacctgggggtacccgcatccacttcctttcccccttttaacaaaagagaagaacgaattccaaacca

SEQ ID NO: 438818 - DNA, 120 bp, Artificial Sequence
  ENSG00000153443_11 (sequence is synthesized)
gcggtgcagacggacagtcgggcgggcggccggaaggaggacgccccaggcctcggcagagctgggccggagggcggagccgctccgggcgagtggtccgagggtccgcgtgcctggtgg

SEQ ID NO: 438819 - DNA, 120 bp, Artificial Sequence
  ENSG00000153443_12 (sequence is synthesized)
gcgagtggtccgagggtccgcgtgcctggtgggcggtcggcggcgtgcgcacacgtccatgtgcatttgtgtttacgcacgcaccgcgccacggcgtcggccgggcaccggggaggtggc

SEQ ID NO: 438820 - DNA, 120 bp, Artificial Sequence
  ENSG00000153443_13 (sequence is synthesized)
tgatcaacgcgtacacatgtggcgggtgtgcagatgccgcccgtgcccggcacggtgtgatgtgtgtacacggcctggagtgtaggggtggcgtgtcggagccccacactacaccacagg

SEQ ID NO: 438821 - DNA, 120 bp, Artificial Sequence
  ENSG00000153443_14 (sequence is synthesized)
gccggctcgctaatggtggacgcgtgaggcggaggcgcgggcggaggagggaggccggagcgggcagcgcggcggcgccatgtccgtgaacatggacgagctcaagcaccagcgttgctg

SEQ ID NO: 438822 - DNA, 120 bp, Artificial Sequence
  ENSG00000153443_15 (sequence is synthesized)
tgacagtccacggccccgctgggatggagccctgctgggtgcccgcaccgtgctcagtgtggcatgcggcccgggtgtggagggagacggtggagcatcccgtgcctagcgtggtgccag

SEQ ID NO: 438823 - DNA, 120 bp, Artificial Sequence
  ENSG00000153443_16 (sequence is synthesized)
ccaagggcgggtggctggggagctgtgctgggagctgtcgtaaacccgtggtggctttgatcctagggccgtctttctgctccacttcccgggcactgttccgagggaggctcaggtggg

SEQ ID NO: 438824 - DNA, 120 bp, Artificial Sequence
  ENSG00000153443_17 (sequence is synthesized)
gaagcgagtgagcctaaagcccaggcttgtctccttggtgccaggccctgcttgctggaatctggtgatcttaggaggtcactgttgcaagggaggggacccaggagccacctagtcgaa

SEQ ID NO: 438825 - DNA, 120 bp, Artificial Sequence
  ENSG00000153443_18 (sequence is synthesized)
cctctttgtggtacagatggagaaaccaaggcccaaacagtggcccccttgatcagccagaagcagagctgggtggggcagcaggggatccccaccaccaggctcagactccttcaggat

SEQ ID NO: 438826 - DNA, 120 bp, Artificial Sequence
  ENSG00000153443_19 (sequence is synthesized)
gcttttgcttcgcagatgaggagaccgaggcttagagaagagtagagacttgctacccgttgaggtggtaacagccaggctagaatctcctgaaacggggcagggtggggaggtctggtt

SEQ ID NO: 438827 - DNA, 120 bp, Artificial Sequence
  ENSG00000153443_20 (sequence is synthesized)
gggctacctggggccgggcgcctttcccccaggatggggtgtactgcccgccctcccccagtcatggtgctggtgccagctggtgcagggggagggctctgcaggccttaggcactgagg

SEQ ID NO: 438828 - DNA, 120 bp, Artificial Sequence
  ENSG00000153443_21 (sequence is synthesized)
caggtggcgagcagcaggggaagggtcttctccacccaccccaactgcccaaggttccgtggctcctccttagacagcagtgagggttgggggtgacaggcaagccactgagcctcagca

SEQ ID NO: 438829 - DNA, 120 bp, Artificial Sequence
  ENSG00000153443_22 (sequence is synthesized)
ccgcgactcacccctcccactcagcagtccagccagggtcatccccagcctcagaggagcctgggaacaagggcagcggcagggccggcgggggcctggagggtgagcaggggcctttct

SEQ ID NO: 438830 - DNA, 120 bp, Artificial Sequence
  ENSG00000153443_23 (sequence is synthesized)
tcctgcagacagccctcagcgcctttttccaggagaccaacatcccctacagccaccatcaccaccagatggtaagtgtccccggagtccccagttctggattgggcggaaggaggccga

SEQ ID NO: 438831 - DNA, 120 bp, Artificial Sequence
  ENSG00000153443_24 (sequence is synthesized)
gctagttctgtgtataagcagcccctggccccggtgtacgagggcgctggtgcaggcggggctcgacctctttggagatgggtcagcaggagtcccggctccgtgggtcctgcacttaat

SEQ ID NO: 438832 - DNA, 120 bp, Artificial Sequence
  ENSG00000153443_25 (sequence is synthesized)
cttgcctgtgccagctccccctgagacctggggggcgctggcctctggggcaatgaagctccttaccctacagcccccggggatgctgtggctgatggaaaggggtgggctgggaaagcc

SEQ ID NO: 438833 - DNA, 120 bp, Artificial Sequence
  ENSG00000153443_26 (sequence is synthesized)
cgtggccccaggcaccgtgggctcctgagagtgaggctgggtcggttcatctcaaggcttctcctctgggaacccctgggcggcggacaggcttggggatctggggaaggaacacagagc

SEQ ID NO: 438834 - DNA, 120 bp, Artificial Sequence
  ENSG00000153443_27 (sequence is synthesized)
cttccgagaatgggccagccacgcatctccccttgggaggcagtgggggcccctccaggaaggggtgctcaccccatctctcctctcttcccctcacagatgtgcacccccgccaatacc

SEQ ID NO: 438835 - DNA, 120 bp, Artificial Sequence
  ENSG00000153443_28 (sequence is synthesized)
cttcgcgtcccctagggtgccggccccgctcccccggggcgcccggcgcaccgtggggactacatatcccagcatgccgcggcgccggcggagcgaggcgaggcgcgacagccctcagcg

SEQ ID NO: 438836 - DNA, 120 bp, Artificial Sequence
  ENSG00000153446_0 (sequence is synthesized)
ccgtcatccccctgcagccacccttcccagagtcctttgcccaggccaccccaggcttcttggcagccctgccgggccacttgtcttcatgtctgccagggggaggtgggaaggaggtgg

SEQ ID NO: 438837 - DNA, 120 bp, Artificial Sequence
  ENSG00000153446_1 (sequence is synthesized)
gaggagggcgtgcagaggcagtctgggcttggccagagctcagggtgctgagcgtgtgaccagcagtgagcagaggccggccatggccagcctggggctgctgctcctgctcttactgac

SEQ ID NO: 438838 - DNA, 120 bp, Artificial Sequence
  ENSG00000153446_2 (sequence is synthesized)
agcactgccaccgctgtggtcctcctcactgcctgggctggacactgctgaaagtaaagccaccattgcagacctgatcctgtctgcgctggagagagccaccgtcttcctagaacagag

SEQ ID NO: 438839 - DNA, 120 bp, Artificial Sequence
  ENSG00000153446_3 (sequence is synthesized)
gctgcctgaaatcaacctggatggcatggtgggggtccgagtgctggaagagcagctaaaaagtgtccgggagaagtgggcccaggagcccctgctgcagccgctgagcctgcgcgtggg

SEQ ID NO: 438840 - DNA, 120 bp, Artificial Sequence
  ENSG00000153446_4 (sequence is synthesized)
gatgctgggggagaagctggaggctgccatccagagatccctccactacctcaagctgagtgatcccaagtacctaagagagttccagctgaccctccagcccgggttttggaagctccc

SEQ ID NO: 438841 - DNA, 120 bp, Artificial Sequence
  ENSG00000153446_5 (sequence is synthesized)
acatgcctggatccacactgatgcctccttggtgtaccccacgttcgggccccaggactcattctcagaggagagaagtgacgtgtgcctggtgcagctgctgggaaccgggacggacag

SEQ ID NO: 438842 - DNA, 120 bp, Artificial Sequence
  ENSG00000153446_6 (sequence is synthesized)
cagcgagccctgcggcctctcagacctctgcaggagcctcatgaccaagcccggctgctcaggctactgcctgtcccaccaactgctcttcttcctctgggccagaatgagggggtgcac

SEQ ID NO: 438843 - DNA, 120 bp, Artificial Sequence
  ENSG00000153446_7 (sequence is synthesized)
agctgaggccatcggatacgcctaccctacccgggacatcttcatggaaaacatcatgttctgtggaatgggcggcttctccgacttctacaagctccggtggctggaggccattctcag

SEQ ID NO: 438844 - DNA, 120 bp, Artificial Sequence
  ENSG00000153446_8 (sequence is synthesized)
ctggcagaaacagcaggaaggatgcttcggggagcctgatgctgaagatgaagaattatctaaagctattcaatatcagcagcatttttcgaggagagtgaagaggcgagaaaaacaatt

SEQ ID NO: 438845 - DNA, 62 bp, Artificial Sequence
  ENSG00000153446_9 (sequence is synthesized)
agcatttttcgaggagagtgaagaggcgagaaaaacaatttccagattctcgctctgttgct

SEQ ID NO: 438846 - DNA, 120 bp, Artificial Sequence
  ENSG00000153446_10 (sequence is synthesized)
ttagtagagacagggtttcatcatgttgctcatgctggtctcgaactcctgatctcaagagatccgcccacctcaggctcccaaagtgtgggattataggtgtgagccaccgcgtctggc

SEQ ID NO: 438847 - DNA, 120 bp, Artificial Sequence
  ENSG00000153446_11 (sequence is synthesized)
ccaaagtgtgggattataggtgtgagccaccgcgtctggctgaaaagcactttcaatgagactgtgttgaataaagggccaaggttcttgccacccagcactcatgggggctctctcccc

SEQ ID NO: 438848 - DNA, 120 bp, Artificial Sequence
  ENSG00000153446_12 (sequence is synthesized)
tagatggctgctcctcccacaacacagccacagcagtggcagccctgggtggcttcctatacatcctggcagaataccccccagcaaacagagagccacacccatccacaccgccaccac

SEQ ID NO: 438849 - DNA, 120 bp, Artificial Sequence
  ENSG00000153446_13 (sequence is synthesized)
caagcagccgctgagacggacggttccatgccagctgcctggaggaggaacagacccctttagtcctcatcccttagatcctggagggcacggatcacatcctgggaagaaggcatctgg

SEQ ID NO: 438850 - DNA, 120 bp, Artificial Sequence
  ENSG00000153446_14 (sequence is synthesized)
aggataagcaaagccaccccgacacccaatcttggaagccctgagtaggcaaggccagggtaggtgggggccgggagggacccaggtgtgaacggatgaataaagttcaactgcaactga

SEQ ID NO: 438851 - DNA, 120 bp, Artificial Sequence
  ENSG00000153485_0 (sequence is synthesized)
gcgcgcttccggcccgagccggaagctccgactgcggcggcatccgggacggcgggcgggctggccaccacgggacaggaaggcacagagcatggagaatgatgaacttccgtcagcgga

SEQ ID NO: 438852 - DNA, 120 bp, Artificial Sequence
  ENSG00000153485_1 (sequence is synthesized)
tgggatggattggagtgggattgtatctgttagccagtgcagcagcattttactatgtttttgaaatcagtgagacttacaacaggctggccttggaacacattcaacagcaccctgagg

SEQ ID NO: 438853 - DNA, 120 bp, Artificial Sequence
  ENSG00000153485_2 (sequence is synthesized)
agccccttgaaggaaccacatggacacactccttgaaagctcaattactctccttgcctttttgggtgtggacagttatttttctggtaccttacttacagatgtttttgttcctatact

SEQ ID NO: 438854 - DNA, 120 bp, Artificial Sequence
  ENSG00000153485_3 (sequence is synthesized)
atcgccaccaggcatttgtcaaggcttctaatcagatcagcagactacaactgattgacacgtaaaatcagtcaccgttttttccctacgattacaaaactgccagtcctatatggagtc

SEQ ID NO: 438855 - DNA, 120 bp, Artificial Sequence
  ENSG00000153485_4 (sequence is synthesized)
tgatcacaagactgcagtttcttcacagatctcaggaagttgtcgtggggcagaggctttttaaaaacatgtgattagggagctatctttatctgaataataacgaatttttaggtaaaa

SEQ ID NO: 438856 - DNA, 120 bp, Artificial Sequence
  ENSG00000153485_5 (sequence is synthesized)
cctgagatagagtactacaaaatcatgttgatgacttcagattttggaagttaaatcatgtctgttatttgcattctttagaaacttgactaagtacctgaattcatatttctattctac

SEQ ID NO: 438857 - DNA, 120 bp, Artificial Sequence
  ENSG00000153485_6 (sequence is synthesized)
tgtgcaacatagtgatgattcagaaatttttcctttggggaaaaaaatgaatatgaacatttccattgtgttaagtgtaaaaaggtccagacatgatcataaaatttaaattttatacaa

SEQ ID NO: 438858 - DNA, 120 bp, Artificial Sequence
  ENSG00000153485_7 (sequence is synthesized)
ggccaccacgggacaggaaggtgagatccgggacctcagctttgcaagcaggctccgccggcgaccgctgacgggcgctgggctcgcggcgctgcaaggcggcgaggcccgggcctggcg

SEQ ID NO: 438859 - DNA, 80 bp, Artificial Sequence
  ENSG00000153485_8 (sequence is synthesized)
cgcggcagggggcggggccggccgcccggaggcccaagtggcggggacgcctccctgccgggtcaggttctcagagcggg

SEQ ID NO: 438860 - DNA, 120 bp, Artificial Sequence
  ENSG00000153485_9 (sequence is synthesized)
tctccggcggcggcgacgggggccgggccgcgcgtgacccgccgcagtcacgccgttcttaatcactagtagctggtgctccaggctggcggcgctcacctttctcctagccgggtgacc

SEQ ID NO: 438861 - DNA, 120 bp, Artificial Sequence
  ENSG00000153485_10 (sequence is synthesized)
caggggatttattttatgttggctttctctgaaatgccaaagccacccgattattcagagctgagtgactctttaacgcttgccgtgggaacaggaagattttcgggaccattgcacaga

SEQ ID NO: 438862 - DNA, 120 bp, Artificial Sequence
  ENSG00000153487_0 (sequence is synthesized)
gcgagttgcggtagttgctgtgtaccatggtctcggaggtttctgtcccgcggcccgttaggtcctggtcgggttttcagcgaagcaggccgctcccctgcgtttcccagcgggcgtgct

SEQ ID NO: 438863 - DNA, 120 bp, Artificial Sequence
  ENSG00000153487_1 (sequence is synthesized)
gtgccgcccaacaggctctgcctccaagtgccaaaaactcctagtaaagtttgcgcctcgcccgccgtccacaccccagcggccctgacgctgtcccctccgcgaccctcgcctctggaa

SEQ ID NO: 438864 - DNA, 120 bp, Artificial Sequence
  ENSG00000153487_2 (sequence is synthesized)
ctctggaaaaagtgacaggcaaggccacgcccccgcgagggccggcctggagcccgcagcccccagggcctgggacggtgaggggcgtgaatgcggcggggggcggggccgttgccgggg

SEQ ID NO: 438865 - DNA, 120 bp, Artificial Sequence
  ENSG00000153487_3 (sequence is synthesized)
cggggcgcatgcgcgctgcgcagcggggctgaatgtttcccaagtgtttgaaactggtatttgggttttccacgttggacaagtgcggctcggcggccagcggagcgcgccccttcccgc

SEQ ID NO: 438866 - DNA, 120 bp, Artificial Sequence
  ENSG00000153487_4 (sequence is synthesized)
cttcccgctgcccgctccgctcctctcttctacccagcccagtgggcgagtgggcagcggcggccgcggcgctgggccctctcccgccggtgtgtgcgcgctcgtacgcgcggcccccgg

SEQ ID NO: 438867 - DNA, 80 bp, Artificial Sequence
  ENSG00000153487_5 (sequence is synthesized)
caccgccaccgcggcccgcgccctcaggcgctggggtccccgcggacccggaggcggcggacgggctcggcagatgtagc

SEQ ID NO: 438868 - DNA, 120 bp, Artificial Sequence
  ENSG00000153487_6 (sequence is synthesized)
ggcagatgtagccgccgggccgaagcaggagccggcgggggggcgccgggagagcgagggctttgcattttgcagtgctattttttgaggggggcggggggtggaggaagcggaaagccg

SEQ ID NO: 438869 - DNA, 120 bp, Artificial Sequence
  ENSG00000153487_7 (sequence is synthesized)
cgccgagtcgccggggacctccggggtgaaccatgttgagtcctgccaacggggagcagctccacctggtgaactatgtggaggactacctggactccatcgagtccctgcctttcgact

SEQ ID NO: 438870 - DNA, 120 bp, Artificial Sequence
  ENSG00000153487_8 (sequence is synthesized)
tgcagagaaatgtctcgctgatgcgggagatcgacgcgaaataccaagagatcctgaaggagctagacgagtgctacgagcgcttcagtcgcgagacagacggggcgcagaagcggcgga

SEQ ID NO: 438871 - DNA, 120 bp, Artificial Sequence
  ENSG00000153487_9 (sequence is synthesized)
tgctgcactgtgtgcagcgcgcgctgatccgcagccaggagctgggcgacgagaagatccagatcgtgagccagatggtggagctggtggagaaccgcacgcggcaggtggacagccacg

SEQ ID NO: 438872 - DNA, 120 bp, Artificial Sequence
  ENSG00000153487_10 (sequence is synthesized)
tggagctgttcgaggcgcagcaggagctgggcgacacagcgggcaacagcggcaaggctggcgcggacaggcccaaaggcgaggcggcagcgcaggctgacaagcccaacagcaagcgct

SEQ ID NO: 438873 - DNA, 120 bp, Artificial Sequence
  ENSG00000153487_11 (sequence is synthesized)
cacggcggcagcgcaacaacgagaaccgtgagaacgcgtccagcaaccacgaccacgacgacggcgcctcgggcacacccaaggagaagaaggccaagacctccaagaagaagaagcgct

SEQ ID NO: 438874 - DNA, 120 bp, Artificial Sequence
  ENSG00000153487_12 (sequence is synthesized)
ccaaggccaaggcggagcgagaggcgtcccctgccgacctccccatcgaccccaacgaacccacgtactgtctgtgcaaccaggtctcctatggggagatgatcggctgcgacaacgacg

SEQ ID NO: 438875 - DNA, 120 bp, Artificial Sequence
  ENSG00000153487_13 (sequence is synthesized)
agtgccccatcgagtggttccacttctcgtgcgtggggctcaatcataaacccaagggcaagtggtactgtcccaagtgccggggggagaacgagaagaccatggacaaagccctggaga

SEQ ID NO: 438876 - DNA, 120 bp, Artificial Sequence
  ENSG00000153487_14 (sequence is synthesized)
aatccaaaaaagagagggcttacaacaggtagtttgtggacaggcgcctggtgtgaggaggacaaaataaaccgtgtatttattacattgctgcctttgttgaggtgcaaggagtgtaaa

SEQ ID NO: 438877 - DNA, 120 bp, Artificial Sequence
  ENSG00000153487_15 (sequence is synthesized)
atgtatatttttaaagaatgttagtaaaggaaccattcctttcatagggatggcagtgattctgtttgccttttgttttcattggtacacgtgtaacaagaaagtggtctgtggatcagc

SEQ ID NO: 438878 - DNA, 120 bp, Artificial Sequence
  ENSG00000153487_16 (sequence is synthesized)
attttagaaactacaaatataggtttgattcaacacttaagtctcagactgatttcttgcgggaggagggggactaaactcaacctaacacattaaatgtggaaggaaaatatttcattt

SEQ ID NO: 438879 - DNA, 120 bp, Artificial Sequence
  ENSG00000153487_17 (sequence is synthesized)
agcttttttattttaatacaagtaatattattactttatgaacaattttttttaattggccatgtcgccaaaaatacagcctatagtaaatgtgtttcttgctgccatgatgtatatcca

SEQ ID NO: 438880 - DNA, 120 bp, Artificial Sequence
  ENSG00000153487_18 (sequence is synthesized)
tataacaattcagtaacaaaggtttaaagtttgaagattattttttaaaaaggtaaatggttaaattttacatgacagatattttatctattggcctgttccccaaatggccattttaaa

SEQ ID NO: 438881 - DNA, 120 bp, Artificial Sequence
  ENSG00000153487_19 (sequence is synthesized)
atgcttgggtacacttctcttaagtggtctagtcaaggaacctcaagtcatgcttttgctatcaccaatcatagtgtacccatctttaatttatatcaggtgtataaatgtacatttcca

SEQ ID NO: 438882 - DNA, 120 bp, Artificial Sequence
  ENSG00000153487_20 (sequence is synthesized)
aatgaacttgcacttgttatattataattggaagtgcagtcagcagatgctgttgtgaagctaatgtcacaattatgtgcaaaggtgtgcttcctgctgtatgtgagctgtaaaaatgtt

SEQ ID NO: 438883 - DNA, 120 bp, Artificial Sequence
  ENSG00000153487_21 (sequence is synthesized)
ttgtcttaaaaatttatacaccagcaatttagacaaagccttaagcaaattttgtattattgttctcacttattattaataatgaagtagaagttacttaattgccagcaaataaatacg

SEQ ID NO: 438884 - DNA, 120 bp, Artificial Sequence
  ENSG00000153487_22 (sequence is synthesized)
tgtcaaaaaagaatctgtattcagaccctgggtcaggaaattactgcccacttgtcaagttcagcccaccatctgtttgaagattatatgaagtttaaattctagtgtccataaataaag

SEQ ID NO: 438885 - DNA, 120 bp, Artificial Sequence
  ENSG00000153487_23 (sequence is synthesized)
tttcagcggaacacagccgtgcttatgtgcgtatgtattgtctgactgcttttgcaaaacggcagagttcaatagttgcacctgaaaccatttgacttgacaagccaaaactattttctg

SEQ ID NO: 438886 - DNA, 120 bp, Artificial Sequence
  ENSG00000153487_24 (sequence is synthesized)
gccctctgcagaaagggtttgctgacctctgatttagactagcatctaacattgatttgcccacatattgaaagggtcagtggagttttcatttattattttttatttttttgagattga

SEQ ID NO: 438887 - DNA, 61 bp, Artificial Sequence
  ENSG00000153487_25 (sequence is synthesized)
tggagttttcatttattattttttatttttttgagattgagttccaggctggagtgcaata

SEQ ID NO: 438888 - DNA, 67 bp, Artificial Sequence
  ENSG00000153487_26 (sequence is synthesized)
caccgtgcccggctgtccaggctagagtgcagtggcccagtcttggctcactgcaacctctgcctct

SEQ ID NO: 438889 - DNA, 72 bp, Artificial Sequence
  ENSG00000153487_27 (sequence is synthesized)
tgagtgatacgtggttccctttaacttcgcacatggtaaaatcagtttctttccatgatctgtttcacagtc

SEQ ID NO: 438890 - DNA, 120 bp, Artificial Sequence
  ENSG00000153487_28 (sequence is synthesized)
atggtaaaatcagtttctttccatgatctgtttcacagtctctgtgaagctacctaccacaaagaagtagtgagtgatgactttctagaatctaagtatatggcatgtatttattataag

SEQ ID NO: 438891 - DNA, 120 bp, Artificial Sequence
  ENSG00000153487_29 (sequence is synthesized)
taaaacattaagtttgctgattgtttacttgtgataaacaattattgtgaactttatttgtgctggacataagtgtctgttttacagtgaaattccattatagagggttacttggtagag

SEQ ID NO: 438892 - DNA, 120 bp, Artificial Sequence
  ENSG00000153487_30 (sequence is synthesized)
aaatgcaaattgtagttggtcatatactaaaatttgaactttttacatatcaatacttacaaataggtgtttattttcccacaaaactccagaacatttaagagtctcgggtgtttaaat

SEQ ID NO: 438893 - DNA, 120 bp, Artificial Sequence
  ENSG00000153487_31 (sequence is synthesized)
ttgatgagatttacccaaacaaatagtgaacaaaaggtttatgaaaataagttatgaaactaaaatacttaataaacatccagtgacaataaaaatagcttgagtctttgcttatataaa

SEQ ID NO: 438894 - DNA, 120 bp, Artificial Sequence
  ENSG00000153487_32 (sequence is synthesized)
atttcatgctaatttttcacttctatattaattggaggtaataatgcaaattaagttatagaaatgaagattcaatgaaatgcagttgctcatcctggatttcttcatattcagttttgg

SEQ ID NO: 438895 - DNA, 120 bp, Artificial Sequence
  ENSG00000153487_33 (sequence is synthesized)
tgtagacaactggtgaagagagatggctcagaggccaagccttgcaatctaggagcccagccctgtcctttaagggcttgatcttgaataaattgcttaacagttggtctatagttctac

SEQ ID NO: 438896 - DNA, 120 bp, Artificial Sequence
  ENSG00000153487_34 (sequence is synthesized)
acttttaaagtatgtttcacagagggtggttccaataaataaatgcactggcatattcaaatgttggataatttttctctagctttcttcaagtttctcataaggacaggtgggtagcca

SEQ ID NO: 438897 - DNA, 120 bp, Artificial Sequence
  ENSG00000153487_35 (sequence is synthesized)
cttattctttaaaaaaaaatagatacaatacagagtcgtgttggactggcagtcttaaatcactcttgttatttccagtggacattaaaaaaaaatcacagataagtacttaaaacactc

SEQ ID NO: 438898 - DNA, 120 bp, Artificial Sequence
  ENSG00000153487_36 (sequence is synthesized)
aagatttgggatttagatcatgattagatacaatagaaagatcctggaatcccgacatgaggacaaaaatggtactgaattctttttgaaaaatagattactgaaaagcgatctaatata

SEQ ID NO: 438899 - DNA, 120 bp, Artificial Sequence
  ENSG00000153487_37 (sequence is synthesized)
gaacagttgcttttacttagatgttcaatgcatatttgttgtataataaccaagttattacagttcagataaagggtccaaagtgttttcgttatgatataatactttctattgtaaact

SEQ ID NO: 438900 - DNA, 120 bp, Artificial Sequence
  ENSG00000153487_38 (sequence is synthesized)
ggactaaagaaacgttgtatgttcaaggaagtgttgagcagccatggtgttcctgggacaggctccccaggtgctgagagaggtgctgcaggagtcacagacctgcaggcacgcacttgc

SEQ ID NO: 438901 - DNA, 120 bp, Artificial Sequence
  ENSG00000153487_39 (sequence is synthesized)
cagtgactgggacgttggctggtggttctcttttggtgtgattagagctatgtgagttgtctcaatacttgagactgtcggtggttgccaatgctgaataaagcatttatcaaagtaaaa

SEQ ID NO: 438902 - DNA, 120 bp, Artificial Sequence
  ENSG00000153487_40 (sequence is synthesized)
ggctgtgatgtccttcgtggaatgtccttatcattcccctgcggaacgattggtcgctgaggcggatgaaggcgggcctagcgcaataactgagatcctgaaggagctagacgagtgcta

SEQ ID NO: 438903 - DNA, 120 bp, Artificial Sequence
  ENSG00000153487_41 (sequence is synthesized)
agcggaggcggggaaggcgcccatctgcgctgcgctcgggggggcgcgggcagatcgctggcttggagaggactgtggcaggtgagaggacctgtgcgtcgttctctgcagacctggccg

SEQ ID NO: 438904 - DNA, 120 bp, Artificial Sequence
  ENSG00000153487_42 (sequence is synthesized)
ccccgggtgtcagagagaggtggcgagttcgtgtccgccgggaattgttggctgttggggaaactttcctgcgaggtcagtcaaggctttgggggctctgttttgaatgtggatcaccac

SEQ ID NO: 438905 - DNA, 120 bp, Artificial Sequence
  ENSG00000153487_43 (sequence is synthesized)
tcggagtttactaatgtttacaaggctgcgcagtagggaaacggaagagttgggtgggggcaaaaaaaaaaattgaccgctatccccgaaagtactagacgcctctgccgggaaggcgcc

SEQ ID NO: 438906 - DNA, 120 bp, Artificial Sequence
  ENSG00000153487_44 (sequence is synthesized)
cctgcgcgttctatccgagacgtagcttcgcagcgaattttataggaacttcattagcatattatggaacgtcccgcctcagccccccagtagttggctgtgatgtccttcgtggaatgt

SEQ ID NO: 438907 - DNA, 120 bp, Artificial Sequence
  ENSG00000153487_45 (sequence is synthesized)
ccttatcattcccctgcggaacgattggtcgctgaggcggatgaaggcgggcctagcgcaataactggtatgggtctgtgtttccgctgtcttcttttttctttttcggggaggagcggg

SEQ ID NO: 438908 - DNA, 120 bp, Artificial Sequence
  ENSG00000153487_46 (sequence is synthesized)
gtggagggtggacgagttgatttgaacgtcttcgggtcgctcggcctccagccttggattggttcttctcgctgctggggcgggccgtgctcttccgccctgcggtgtggttggttctcc

SEQ ID NO: 438909 - DNA, 120 bp, Artificial Sequence
  ENSG00000153487_47 (sequence is synthesized)
tcctggcctccgccctccaaatcggcgattcccataggcggcggctctcggggtgcggggcgagtctcccgctggcctcctccccattggctggaggcctggcgggtgtcgccccggccc

SEQ ID NO: 438910 - DNA, 120 bp, Artificial Sequence
  ENSG00000153487_48 (sequence is synthesized)
ctctccccgctcagcccggccactttcgggcgcggatttatagcagtagcagtgatcccgggcctgtgggctcggggccggggctgcagttcggaccgcctcccgcgacccgcggggccg

SEQ ID NO: 438911 - DNA, 120 bp, Artificial Sequence
  ENSG00000153487_49 (sequence is synthesized)
cctccgagaacggtgtccatgacacagggcgggaagagataaggcctagggaaggcgcccctcgggcctatccacctcttctggggctcggcactaggaagcagcttccctctcaggccc

SEQ ID NO: 438912 - DNA, 120 bp, Artificial Sequence
  ENSG00000153487_50 (sequence is synthesized)
ctttgtctccaagccgttccaaactgagtaccgggagacgacacaaagggagggcggtgacggatggcgcaggcgcgggagccgcctaggctgctgggagtggtggtccggccgcggaat

SEQ ID NO: 438913 - DNA, 120 bp, Artificial Sequence
  ENSG00000153495_0 (sequence is synthesized)
atagtgagcggcagacagaggggtggccagtttgttgttttacctaaaaggtgttttccacgtggagtgggactgagaggcacaggtggctgaggggacccgcctgggatgtgaggcgca

SEQ ID NO: 438914 - DNA, 120 bp, Artificial Sequence
  ENSG00000153495_1 (sequence is synthesized)
ggtgtgctcggccccttcatctgtcagctgcagcaatggaatacgtgctggaagtgaagaactctccgcggcacctcctgaagcaattcacagtgtgtgacgttcctctgtatgacattt

SEQ ID NO: 438915 - DNA, 120 bp, Artificial Sequence
  ENSG00000153495_2 (sequence is synthesized)
gtgactacaacgtctccagggaccgatgccaggagctcgggtgctgcttctacgaaggcgtctgctacaagaaagcggttcccatttacatccacgtgttctctgccttgattgtgatca

SEQ ID NO: 438916 - DNA, 120 bp, Artificial Sequence
  ENSG00000153495_3 (sequence is synthesized)
catcaccatcatctacagagtcattcaggagagcaggaaagaaaaggccatccctgtggatgtcgcgctgccacagaagtccagcgaaaaggcggagttggcctcatccagcagcaagtt

SEQ ID NO: 438917 - DNA, 120 bp, Artificial Sequence
  ENSG00000153495_4 (sequence is synthesized)
agggctgaagcctgcgagtcctgggcctccaagtgctgggccctcgatgaagagtgacgaggataaggatgatgtaacagggacaataacagaagccgaagaaactgaggactgactgag

SEQ ID NO: 438918 - DNA, 120 bp, Artificial Sequence
  ENSG00000153495_5 (sequence is synthesized)
acgcatgaagaagtggagattgtcagaattatccaaatgaaatggtacagcaggtgcactgttaacagtgtgatggaatgaccacccaaagagaaaaaaataaaggtattttgaaaattg

SEQ ID NO: 438919 - DNA, 120 bp, Artificial Sequence
  ENSG00000153498_0 (sequence is synthesized)
agaacgtccttctccctcagctggagggagcatggcagtgagccaaggagacgggaccctctgctttgtcctcctgctgtgctgttggcaagaaactgagctccggccgagaaccgtgat

SEQ ID NO: 438920 - DNA, 120 bp, Artificial Sequence
  ENSG00000153498_1 (sequence is synthesized)
tccaggttcacctactgaaataccattcagttcaaaacaggaggatatgtctgaattattagatgaaattctggtccaggagattttagatctgaataaaacaacaccgagcgaaatgcc

SEQ ID NO: 438921 - DNA, 120 bp, Artificial Sequence
  ENSG00000153498_2 (sequence is synthesized)
aagtacagcatcaacattatcaacaccgttacatgctggtattgatgagaattatcaagctggtggttctgagaattaccatgaattattagagaatttacaattctctcctggcattga

SEQ ID NO: 438922 - DNA, 120 bp, Artificial Sequence
  ENSG00000153498_3 (sequence is synthesized)
tctccatggcgatccttctgagaattatcgtgggccacaggtgtctcctggcagtgagaagagtgtttccagtaaagaaaagaattcaaagaacactcagtatgaaaatctatccattct

SEQ ID NO: 438923 - DNA, 120 bp, Artificial Sequence
  ENSG00000153498_4 (sequence is synthesized)
ggaccaaatccttcaaaatattggaagatcttcaggaaacattttccataaagagcagcagaggaccagcgcacagaggaggagccaaggcagtcagtgaggccgcagccccagaccccc

SEQ ID NO: 438924 - DNA, 120 bp, Artificial Sequence
  ENSG00000153498_5 (sequence is synthesized)
tgcgcaggagaggagcctgctagaacccccacccaccagcctccggaacagggcacttgtgtgcacacgcccacgttctctgaaccattccacataaaggaaaatcgtttattcacacga

SEQ ID NO: 438925 - DNA, 120 bp, Artificial Sequence
  ENSG00000153498_6 (sequence is synthesized)
aataacaccttaatcttcaggtgcaggctgtgaagatgggaaaaggctgtcaatgctctggcttcttcccactgacaggggacgtagtgggaatgggaatgaaccccaagatgaaattct

SEQ ID NO: 438926 - DNA, 120 bp, Artificial Sequence
  ENSG00000153498_7 (sequence is synthesized)
tccaggtctcgaggttcccaaagttcctggatctgccagcaaatgaccttcttcactcacctgtgggatggggacccggtgagccaggtagcagagtctcactctgttgccagactggag

SEQ ID NO: 438927 - DNA, 120 bp, Artificial Sequence
  ENSG00000153531_0 (sequence is synthesized)
tgaccactataaaagtcaggcgggctgaggaggagacaaaggccaggacgctccgcagctgttggggaagaggagctgcctcctgggatggagaaatttaaggctgcgatgttgctgggg

SEQ ID NO: 438928 - DNA, 120 bp, Artificial Sequence
  ENSG00000153531_1 (sequence is synthesized)
agcgtcggcgatgctcttggctacagaaatgtctgcaaggagaacagcactgtaggcatgaagatccaggaggagctgcaacgttccgggggcctggaccacctcgtactctcgccagga

SEQ ID NO: 438929 - DNA, 120 bp, Artificial Sequence
  ENSG00000153531_2 (sequence is synthesized)
gaatggcccgtgagtgacaacaccatcatgcacatcgcaaccgccgaggccctcaccacagactactggtgcctggatgatctgtaccgggagatggtgagatgctatgtggaaatcgtt

SEQ ID NO: 438930 - DNA, 120 bp, Artificial Sequence
  ENSG00000153531_3 (sequence is synthesized)
gagaagcttccagaacgccggccagacccagctaccattgaaggctgtgctcagctaaagcccaataactaccttctcgcctggcacacaccgttcaatgaaaaaggctcagggtttgga

SEQ ID NO: 438931 - DNA, 120 bp, Artificial Sequence
  ENSG00000153531_4 (sequence is synthesized)
gcggccaccaaggccatgtgcatcggcctgcggtactggaagcctgagcggctggagaccctcatcgaggtcagcgtggagtgcggccggatgacccacaaccatcccacaggcttcctg

SEQ ID NO: 438932 - DNA, 120 bp, Artificial Sequence
  ENSG00000153531_5 (sequence is synthesized)
tttgtgtcgttcgccgcacaaggaaagcccctggtccagtgggggagagacatgctgcgggcggtgcctctggcagaagagtactgcaggaagaccatccggcacacggcagaataccag

SEQ ID NO: 438933 - DNA, 120 bp, Artificial Sequence
  ENSG00000153531_6 (sequence is synthesized)
gagcactggttttactttgaagctaaatggcaattttatttggaggagaggaaaatcagtaaagactcagaaaataaagccatcttccccgacaattatgatgcagaagagagggaaaag

SEQ ID NO: 438934 - DNA, 120 bp, Artificial Sequence
  ENSG00000153531_7 (sequence is synthesized)
acctacaggaagtggagctcggaaggtcgagggggaagacgaggccacgatgcccccatgatagcctatgacgccctccttgcagcaggaaacagctggactgagctgtgtcaccgggcc

SEQ ID NO: 438935 - DNA, 120 bp, Artificial Sequence
  ENSG00000153531_8 (sequence is synthesized)
atgtttcatggaggggagagcgcggccacgggcaccattgcaggctgcctgttcgggttgctgtacggcctggacctcgttcccaaaggcttgtaccaggacctggaggacaaggagaag

SEQ ID NO: 438936 - DNA, 120 bp, Artificial Sequence
  ENSG00000153531_9 (sequence is synthesized)
ctggaggacctgggcgcggctctctaccgcctgtccacagaggagaagtaaagccatttctgccactttccccctagagagccgattccaccccggggcccgtagggccctctcgcagcc

SEQ ID NO: 438937 - DNA, 120 bp, Artificial Sequence
  ENSG00000153531_10 (sequence is synthesized)
cctgggtgagggtgtctctgtgaggctccactgcggtctgtgcctgactggccacatctaactctctgtttccaatttcagaatcctaactgttgcataaaatacattgtttgtcctgcg

SEQ ID NO: 438938 - DNA, 120 bp, Artificial Sequence
  ENSG00000153531_11 (sequence is synthesized)
ggtccctccttcccggtgagcctctctgactggggctgcctccttccgggtgagcctctctgactggggctgcctccttccgggtgagcctctctgactggggctgcctccttccgggtg

SEQ ID NO: 438939 - DNA, 120 bp, Artificial Sequence
  ENSG00000153531_12 (sequence is synthesized)
agcctctctgaacagggcacgagagcagactctgaaccaggaagtagccgtgtctagcgctctacaagacacataggagaggtggcatccatggccctgaaacgacaagcccatgttgcc

SEQ ID NO: 438940 - DNA, 120 bp, Artificial Sequence
  ENSG00000153531_13 (sequence is synthesized)
ctgaagaagaagatgggcaagctggcctgtgacccggccgcccactccatcctcagcagcctgctgctctacgtcacgggccgcgcagaccggcccccggggacagaggccggggggagc

SEQ ID NO: 438941 - DNA, 120 bp, Artificial Sequence
  ENSG00000153531_14 (sequence is synthesized)
aggcccagccaccagccccagacccaggaggccacccagcggcccacgcgcttccagctcctgcaggccaagttcctgggcactggccgggagcgctacctcaagaggaccagggaggtg

SEQ ID NO: 438942 - DNA, 120 bp, Artificial Sequence
  ENSG00000153531_15 (sequence is synthesized)
ggccggctgatctccaaggacaagcaggggccgggtgggggcctcgtgggtgccaccatcaacaagctcctggagaagaccaaggagccggccccaaagccctgcctcagcgagaagccc

SEQ ID NO: 438943 - DNA, 120 bp, Artificial Sequence
  ENSG00000153531_16 (sequence is synthesized)
cgctggggccacccggccgggaagagcaccgtgaaaaacatcctgaagatattcttggccgccgaggagaaggaggcgaaggagaaagaagcacgcgagaagccccctgtggagcggccc

SEQ ID NO: 438944 - DNA, 120 bp, Artificial Sequence
  ENSG00000153531_17 (sequence is synthesized)
aaagccgccaggggcctcttgccgaagatcatgggcaagagctcggtgctgtccaagctgcgggagaagttcgagcagaacagctgcctgtgctccgaggccagtgcgctgaggctgcac

SEQ ID NO: 438945 - DNA, 120 bp, Artificial Sequence
  ENSG00000153531_18 (sequence is synthesized)
acgcaggagcggaagaagaggaacctgcagaggaagaggatgcaccggccggaggtgcgcgtgctgcacacggccaccatggccagcacctgcgtcaagatgccccctgcccgctttctg

SEQ ID NO: 438946 - DNA, 120 bp, Artificial Sequence
  ENSG00000153531_19 (sequence is synthesized)
gcctgcacggctgagcccctgccggccctcagcatcgccaccgtcgtctgtggccccaggagctggctgtcccactgcaccaaaatcagccactcggaggcaaggcgtccacccagagga

SEQ ID NO: 438947 - DNA, 120 bp, Artificial Sequence
  ENSG00000153531_20 (sequence is synthesized)
gaagccagcgtgccccctagtgccagggagacggggcccagtgggaacaaagcagtgggaaaggggcccctggaggaggagccccaaagacagccaaggccctcgaagcccgtgacaccc

SEQ ID NO: 438948 - DNA, 120 bp, Artificial Sequence
  ENSG00000153531_21 (sequence is synthesized)
caggtgatggctcagagggacggccacgctgtcccctcgctggccttctcttgtgctccctgcacaggtggagtccttcctggccttgtgcctgcatcatccccactgggaccggccagc

SEQ ID NO: 438949 - DNA, 120 bp, Artificial Sequence
  ENSG00000153531_22 (sequence is synthesized)
ccttggggcaccggatcagccggaggtgatgggactgcagaccccaccgcagagagcaccgcaggaggcgtccaggaggtgaggggagccaggctcacgtggcctcctgggcccccaggc

SEQ ID NO: 438950 - DNA, 120 bp, Artificial Sequence
  ENSG00000153531_23 (sequence is synthesized)
gagtgtgcaggggagggccctgaaatcaccatgactgtttgcagttcagaggatgaaagggaaggagcaggcttcccagacccagggagagaccccctctttgccacccagaagtatttc

SEQ ID NO: 438951 - DNA, 120 bp, Artificial Sequence
  ENSG00000153531_24 (sequence is synthesized)
ccagaacagaaggtgccggagcacatcccacccctgaacgctccatcggtccaggctgctcggagaacacagcctgccacggagcctccacggataactgtccaaattccagttgtccat

SEQ ID NO: 438952 - DNA, 120 bp, Artificial Sequence
  ENSG00000153531_25 (sequence is synthesized)
gaaatgccagcccctcccaccaggctgcaaaatatgtcaagtggtgaaaacaaaccttgtatttgtggaggagagaatgtggttgaaaatgcccacacagaatttcccaccgtgactgag

SEQ ID NO: 438953 - DNA, 120 bp, Artificial Sequence
  ENSG00000153531_26 (sequence is synthesized)
aacagaaggggtcaccgagccccagtggaactgagcaagctttcagggatgcaggcgggactcagcgcctcttcgccgcaggggccacgggcagctccgcgtctggcagcagcaagaggg

SEQ ID NO: 438954 - DNA, 120 bp, Artificial Sequence
  ENSG00000153531_27 (sequence is synthesized)
gctgtgggcgccgaccacagtgtcccagagacacttctgacacagagactccagacagatcctgctggcgggaaggaaaacaaaggcagctttgagaattcacacggtcccaggaatcct

SEQ ID NO: 438955 - DNA, 120 bp, Artificial Sequence
  ENSG00000153531_28 (sequence is synthesized)
gacgatatttcaggagagaggacctctgagctcagagatgtgaagcatccgttgccggaatctaatgaaatatcaatgcagaagaagggctccgcaacaaatgatcctgcagcctcacaa

SEQ ID NO: 438956 - DNA, 120 bp, Artificial Sequence
  ENSG00000153531_29 (sequence is synthesized)
aaccttctgaggggaaacaccagccatgcctccagcagccagcaagtgccgtccccgactgggagaaacccaacaggagcccccacgtcactggcggcatcatccaaggggcgtacgggg

SEQ ID NO: 438957 - DNA, 120 bp, Artificial Sequence
  ENSG00000153531_30 (sequence is synthesized)
cctgagggtgtcaccccgatgggcatgacagtgcccggtgcgctggaggaatgcagaaggccgctgctaatagagtcttctcagcccctgaaggctgccgaggaaatcaccagccatgat

SEQ ID NO: 438958 - DNA, 120 bp, Artificial Sequence
  ENSG00000153531_31 (sequence is synthesized)
gttcgcgagaacccactgtcctcattaaatgaaccacccaaaccaggtatgaaagcctgtggggcgatggcagctgcagggagcgttgcgagccgcgccacgcctgcaccagcgccaggc

SEQ ID NO: 438959 - DNA, 120 bp, Artificial Sequence
  ENSG00000153531_32 (sequence is synthesized)
agcacccagagccctggagaccgcacagcgggagagccagagacgctgggccagtggggaagcagagccttgtccgaaagccaccccagaggagaggctctccctcgagaccctcacagc

SEQ ID NO: 438960 - DNA, 120 bp, Artificial Sequence
  ENSG00000153531_33 (sequence is synthesized)
cacggcctcctggcccctgggggatccttggagcccaagagtggagcagcagggaggagcctcctgagaggcgtggccctcgtccagcacccagaggacattgcgaccctcgcccgccac

SEQ ID NO: 438961 - DNA, 120 bp, Artificial Sequence
  ENSG00000153531_34 (sequence is synthesized)
ccggaggatgctgcggccctcgcccggcacccagaggcggcccgattatacatttcaaacacatcagcagccagcagacatacagcagctgtaggaggcagaaaggatgtggctgtggaa

SEQ ID NO: 438962 - DNA, 120 bp, Artificial Sequence
  ENSG00000153531_35 (sequence is synthesized)
ggaaaccttttgggtttcagcacagagtctggaattcctgcttctgatcatcctaggccacaggcaaggagcgtggcagagtcccccagctatggccctggcctcccgccgtcgcctcct

SEQ ID NO: 438963 - DNA, 120 bp, Artificial Sequence
  ENSG00000153531_36 (sequence is synthesized)
gagaacccacaggcaaagggcagggagggcgtcaggtttccccgtggggcggagcctgaccatctgcttcccgcagtgcctcccgcggaggtggacatggggtgggtaggtggcacccac

SEQ ID NO: 438964 - DNA, 120 bp, Artificial Sequence
  ENSG00000153531_37 (sequence is synthesized)
cagcggggccctccccatctacaggcacacctgccccctactgctggtgacacacaggcaaagctccgggccagtgtccccgagcctaggacgcaggcaggtgaatcccaggagcgtccc

SEQ ID NO: 438965 - DNA, 120 bp, Artificial Sequence
  ENSG00000153531_38 (sequence is synthesized)
ctgacacaggcggacctggggaggcaacagagtcaccaggcacaggaggagaccccccagcccggggatgcggggaagagggtggcgccgtcgggctcgaaggttgtgctgaacccagca

SEQ ID NO: 438966 - DNA, 120 bp, Artificial Sequence
  ENSG00000153531_39 (sequence is synthesized)
aaagagcctcagacatggtgggcacaggatctggccggggacaaagggatggccattggggttgggggcgcctgccagcgcagtgaccaaggtcagcagcatctgcagggaccctgggag

SEQ ID NO: 438967 - DNA, 120 bp, Artificial Sequence
  ENSG00000153531_40 (sequence is synthesized)
gagcgggggcggagcacggcgtggggagagggcaccagggctgccaggaacccagctgtgcctccaggggagcccgaggggccgggaagcccggcagcccaaggacaggcccagaaacag

SEQ ID NO: 438968 - DNA, 120 bp, Artificial Sequence
  ENSG00000153531_41 (sequence is synthesized)
gttcaggaatgggaccggggacaggttcagggacacgctcaagaacaggcccagtggcagacccagatagaggcccaggggcaggcacaggaacaggctcagggtgggacccagggacac

SEQ ID NO: 438969 - DNA, 120 bp, Artificial Sequence
  ENSG00000153531_42 (sequence is synthesized)
agtcagggacaggcccagaaacagtttcagaattgggcccagggacaggctcagggacacgctcaagaacaggcccagtggcagacccagatagaggcccaggggcaggcacaggaacca

SEQ ID NO: 438970 - DNA, 120 bp, Artificial Sequence
  ENSG00000153531_43 (sequence is synthesized)
cagaaatgggctcaggggcagattcagggacaggcccagaaacaggttcaaggagaggttcagaaatgggcccaggaagaggctcagggacaggcccagtggcagacccagataaaggcc

SEQ ID NO: 438971 - DNA, 120 bp, Artificial Sequence
  ENSG00000153531_44 (sequence is synthesized)
cagaaatgggctcaggaacagacccagaaaggggctcaggaacgggttcagggtcaggcccagaaaggggctcaggaacgggcccaggaacaggctcaggagcagacccagatagaggct

SEQ ID NO: 438972 - DNA, 120 bp, Artificial Sequence
  ENSG00000153531_45 (sequence is synthesized)
cagggtcaggcccagaagggggctcaggaacgggctcgggaacaggcccagaaaggggctcaggaacgggctcgggaacaggcccagaaaggggctcaggaacgggctcgggaacaggcc

SEQ ID NO: 438973 - DNA, 120 bp, Artificial Sequence
  ENSG00000153531_46 (sequence is synthesized)
cagaaaggggctcaggagcgggctcgggaacaggcccagaaaggggctcaggaacgggctcgggaacaggcccagaaaggggctcaggaacgggctcgggaacaggcccagaaaggggct

SEQ ID NO: 438974 - DNA, 120 bp, Artificial Sequence
  ENSG00000153531_47 (sequence is synthesized)
caggaacgggctcaggaacagggtcgggagcagacccacatagaggctcagggtcaggcccagaaaggggctcaggaatgggctcgggatcgggctcgggatcagggctgggagcagacc

SEQ ID NO: 438975 - DNA, 120 bp, Artificial Sequence
  ENSG00000153531_48 (sequence is synthesized)
cagatagagactcagaggcagacccagaaaggggctcaggaacgggcttgggaacagggtcgggaacaggccttgacaagtgggatggcgcctcgggcctgggagcagcccattagtggc

SEQ ID NO: 438976 - DNA, 120 bp, Artificial Sequence
  ENSG00000153531_49 (sequence is synthesized)
atagctgagggagtggatgctgctggcaggagtggggggtccagaagcccagcccccagggatggtggacagtcagggggcagtggcctgggggagcccagcgccgggtacccaccccca

SEQ ID NO: 438977 - DNA, 120 bp, Artificial Sequence
  ENSG00000153531_50 (sequence is synthesized)
ggaagccgccccctcaggggcaagagcattgccacctctcccctggggctgggaaagagcccaactgagcccaagcctgaggctgggggctgcgggactccccaggccccggcccaggag

SEQ ID NO: 438978 - DNA, 120 bp, Artificial Sequence
  ENSG00000153531_51 (sequence is synthesized)
gggtccccagaccaccctggggctgagagggccctgcaggacaggatggaggcatcggagcccgagcgtcgcgggaggtccaggcacctggccaagtacaaagcccagagcttccgtgac

SEQ ID NO: 438979 - DNA, 120 bp, Artificial Sequence
  ENSG00000153531_52 (sequence is synthesized)
cagagggccttcgatttgtccttcagaccaatgagcgtcagggccagcgacacgtctgagctcccaaagtgaggccccgagtacacaccgtggctcgcccagcactgtgacatccgccca

SEQ ID NO: 438980 - DNA, 120 bp, Artificial Sequence
  ENSG00000153531_53 (sequence is synthesized)
ttgagggacttcaggcattttcctgcctccaaatgcgtcttggagcatcccctacagagacgcctgtttccataattttctttcccttcttcacaagctgaccttgggaggattgagcta

SEQ ID NO: 438981 - DNA, 120 bp, Artificial Sequence
  ENSG00000153531_54 (sequence is synthesized)
catgtgggtcgggttcctgtcaccccacagagccacgaggccatgggggtgggaggtgcgggcctgtggcctcaccaggccctcgggattctttgtgtcttcactcgggggcgccggctc

SEQ ID NO: 438982 - DNA, 120 bp, Artificial Sequence
  ENSG00000153531_55 (sequence is synthesized)
acccctctctcacacagcctgcagcgtggagctcacacctcccgcagtggcacggtgtgtgcgtccccttcgatctgcaggatgctggcactttgggacacctccccagctctcacaggg

SEQ ID NO: 438983 - DNA, 120 bp, Artificial Sequence
  ENSG00000153531_56 (sequence is synthesized)
ccacctcccactgctccctgcccacaccccaccatgccctgctctgacgtggccgcatggcacccaccatccatgggcccaaagtgatgcacaccgccccacccccatgactcgaaagaa

SEQ ID NO: 438984 - DNA, 120 bp, Artificial Sequence
  ENSG00000153531_57 (sequence is synthesized)
agggcagagcttcctccagcctcagacgcccaggtgggtgccgggtgctgtgtggctgctgggccatgtggtggtcaccagagggtgtggggacgctgggatcccaggccgaaaccagct

SEQ ID NO: 438985 - DNA, 120 bp, Artificial Sequence
  ENSG00000153531_58 (sequence is synthesized)
catccggaggaagaggcctcaggaaatgcccacgttaagttctgagaaagggacagtgcagagccgtgggaagccaggatcccagggaggcttcgtctggaaactgggtgctgggagaac

SEQ ID NO: 438986 - DNA, 120 bp, Artificial Sequence
  ENSG00000153531_59 (sequence is synthesized)
gaacgggagcctgcccgcccttccctgcagtccctgtgggtggtgccactggtgccggtgacctgagagcctcgctgtctgtcctccgtcctcccgaacagcatagaagtgtttcctgcc

SEQ ID NO: 438987 - DNA, 120 bp, Artificial Sequence
  ENSG00000153531_60 (sequence is synthesized)
ctggcccgagacggcccacgactccggccctgttcaggtactgaggtaatgcatgttcaggctggaatatttgaatgctgtctagaggcacaagaaggaaatcaaagccacctgtggtca

SEQ ID NO: 438988 - DNA, 120 bp, Artificial Sequence
  ENSG00000153531_61 (sequence is synthesized)
cattgcctcgagatggtttttgttgctactctggactattttttaggctcttcctccatgcacctattttaaagcacattcttccccatgatggagccatgcacctccgtgtcgcgatcc

SEQ ID NO: 438989 - DNA, 120 bp, Artificial Sequence
  ENSG00000153531_62 (sequence is synthesized)
atcgtcccaggccactcggtggcctctgaaacccggacccgtgaggccacacggctgcctgagtggccccggagcagctggattttcagcgtgaaccgatgcagcctgtcgccctacagc

SEQ ID NO: 438990 - DNA, 120 bp, Artificial Sequence
  ENSG00000153531_63 (sequence is synthesized)
cccgcacccttgtttttggtggtgccctccctgtggaaagttaattcctgctttttgaaggtgtcttggcatcttctgcctttgctactgagcggtttcctgaaacagccctaagcgttc

SEQ ID NO: 438991 - DNA, 120 bp, Artificial Sequence
  ENSG00000153531_64 (sequence is synthesized)
gcaaaggcgctttggtgcctgctgcgagcacctgttttctgactcggatgttcctttagaggaaggtgttttccagtgtcggccctgagagggcgttcagcaggcgcgtcctacccacgc

SEQ ID NO: 438992 - DNA, 120 bp, Artificial Sequence
  ENSG00000153531_65 (sequence is synthesized)
ggggctgaggtctctccttccagggaaggtccatcccggcagacgccagtggctttggctctgcagcgccaaggaggcggcgtggcgtcatgctccggggagcgcacaggtttccttcca

SEQ ID NO: 438993 - DNA, 120 bp, Artificial Sequence
  ENSG00000153531_66 (sequence is synthesized)
gtcgaacaattaacttcagatccagcaggtttgacccaccctcacctgctgggacatgcgagtgctggtgtctggaaggagggccgggctgtgctgagctctggggggccggtccccaca

SEQ ID NO: 438994 - DNA, 120 bp, Artificial Sequence
  ENSG00000153531_67 (sequence is synthesized)
gctcccccgacagggcccccggggcctcctctataaatcaggggtccgtgctcccagcccgcttcgaggggtttctgcttggcgtgtgggttctaagtgcgagctgctgtgtgtggaggc

SEQ ID NO: 438995 - DNA, 120 bp, Artificial Sequence
  ENSG00000153531_68 (sequence is synthesized)
tcctgagcaccgggtgcccctcgcgcgtgtgggtcccggggcagcccagctgcacacaggatggtccgggggtgcgggtgggggcagagctgagcatggcgtgtacttggccacagaagt

SEQ ID NO: 438996 - DNA, 120 bp, Artificial Sequence
  ENSG00000153531_69 (sequence is synthesized)
cttgctgtggtgccgctggacccctgctaggaggacagggtcccctctctcacgaagcacacggacctccagagtccctgcccctgcagtcctgggagcctgcagttggggctggagttg

SEQ ID NO: 438997 - DNA, 120 bp, Artificial Sequence
  ENSG00000153531_70 (sequence is synthesized)
gcctctcggagccacccaaacggagaggcccatgagaggggagctcaggggtccagcagaggctgacagagtggcctctttgtcctgttggcggcccctgctcatgcctggggcgtcctc

SEQ ID NO: 438998 - DNA, 120 bp, Artificial Sequence
  ENSG00000153531_71 (sequence is synthesized)
cctggagctgggggagctcagggacccccaggtctgtgtggctgcccctgccactccaggcacagcggcacggccctcactctttacctatttggaattggaggcaatgagtggcaagaa

SEQ ID NO: 438999 - DNA, 120 bp, Artificial Sequence
  ENSG00000153531_72 (sequence is synthesized)
catgatgacagacacgggaggtaaaaatatgttcactggctgttccctttataaataagaagtggtgggacttgcgctgctatttttaaatagaccagagagtacactggagaaggcatt

SEQ ID NO: 439000 - DNA, 120 bp, Artificial Sequence
  ENSG00000153531_73 (sequence is synthesized)
gagtggttttattttaagtggtggaaaaaatgatgagaatctcctccagatgacagctccggaagtgtcgtgcctgaacccctctcacagtctggcgggcgcagagtctgtgagcggcca

SEQ ID NO: 439001 - DNA, 120 bp, Artificial Sequence
  ENSG00000153531_74 (sequence is synthesized)
ggaggccacctgctcgactggcccgtcctctccatgtgccagatgcagcccagcatgacactgccctcagctcaaaaacagcacagctactctgtgtgcaggaaaaaactgccagtgact

SEQ ID NO: 439002 - DNA, 120 bp, Artificial Sequence
  ENSG00000153531_75 (sequence is synthesized)
tcaccaggatttgagaacggtccgtacgttcacactaagctgagacagcgcaggttagaagatagcgcggggaagtattcacacttcagatacgaccatcacggccacatggctaaggcc

SEQ ID NO: 439003 - DNA, 120 bp, Artificial Sequence
  ENSG00000153531_76 (sequence is synthesized)
cacaccctcccggggtgaaataactacagcagaagaatggggcgctaaccacctccacgggcattttaaataaaacccaaagttgttttgtttttttaaaaaaaaaaaaaaagaaagaaa

SEQ ID NO: 439004 - DNA, 78 bp, Artificial Sequence
  ENSG00000153531_77 (sequence is synthesized)
cgcaggatatttattttagcttcttagttaacatcattaattttgtgtagttgagcgactcgttgactgcctcctccc

SEQ ID NO: 439005 - DNA, 120 bp, Artificial Sequence
  ENSG00000153531_78 (sequence is synthesized)
aattttgtgtagttgagcgactcgttgactgcctcctccctgcagttttttacggtgcctccggctgtcgacaggcccactgtgagccgcaggtctgtgggtgcaagtgacaacagccgg

SEQ ID NO: 439006 - DNA, 120 bp, Artificial Sequence
  ENSG00000153531_79 (sequence is synthesized)
gcgggaggcggtgcactcaggcggcaggaaggtcccgagacggcgacgagaatgtggtcatgttcaggacactcgctcagggagggtcgttgtctgggattttacacgctcagcaccacc

SEQ ID NO: 439007 - DNA, 120 bp, Artificial Sequence
  ENSG00000153531_80 (sequence is synthesized)
tccttattctgttctcagggtatctctgctgttggagttacggtctttcggttgtgtattaggctacagctatttattaaatttgttcttgttcatattcttctttgtatataaacaacc

SEQ ID NO: 439008 - DNA, 120 bp, Artificial Sequence
  ENSG00000153531_81 (sequence is synthesized)
ctaaaatgggttagtcagaaaaaattactaaatgtcatttgttgtattctctctgtatttttactaacatcattcagctggaaataatttcaaaaagaaataaaatacctttcccattac

SEQ ID NO: 439009 - DNA, 120 bp, Artificial Sequence
  ENSG00000153531_82 (sequence is synthesized)
acaggcgctgtattttattctgtcgcagagctaatgctgtttactcactcacttcaacaacactaactgcggtggtggcctccagcaggcccccccgctgcagaccctctgtcctgcctc

SEQ ID NO: 439010 - DNA, 120 bp, Artificial Sequence
  ENSG00000153531_83 (sequence is synthesized)
tgcctccaggcatgcgtttccccgtgagggccaatgcacctccccccaccccccaccctcccatgtccacagtgggtcgtgtgttcctggacagagaaacagtccacactggggcctgcg

SEQ ID NO: 439011 - DNA, 120 bp, Artificial Sequence
  ENSG00000153531_84 (sequence is synthesized)
ggacacatatagcagcatattttgctcttaaccccacccacctttttaatcacactagattttaagatcaatccctttttgaaacaactcacggagaaaaccagaacataaatggcctcc

SEQ ID NO: 439012 - DNA, 120 bp, Artificial Sequence
  ENSG00000153531_85 (sequence is synthesized)
tgccagctccggcgtctctctgtggtctgccttagtgggccaagtccaaatgcagagaaggcctttcccttccgcgcctgccccatcgggctcgctgacgaggaagcgctgtccctgtga

SEQ ID NO: 439013 - DNA, 120 bp, Artificial Sequence
  ENSG00000153531_86 (sequence is synthesized)
tgaggttctctctcagagagtcttggaaaagagaccacttgctcttgtttaaaataaatttggacgtgatttttccatgcagcatctggtgtgaataaaacagcagttgactgatgttta

SEQ ID NO: 439014 - DNA, 80 bp, Artificial Sequence
  ENSG00000153551_0 (sequence is synthesized)
atctggcccctgggcagctgcccggggaggcggccagcgagctggggccgcgcaatgtcgcacggagccgggctcgtccg

SEQ ID NO: 439015 - DNA, 120 bp, Artificial Sequence
  ENSG00000153551_1 (sequence is synthesized)
ggcgcggcccagcccagcgcgagccccttggaggggctgctggacctcagctacccccgcacccacgcggccctgctgaaagtggcgcaaatggtcaccctgctgattgccttcatctgt

SEQ ID NO: 439016 - DNA, 120 bp, Artificial Sequence
  ENSG00000153551_2 (sequence is synthesized)
gtgcggagctccctgtggaccaactacagcgcctacagctactttgaagtggtcaccatttgcgacttgataatgatcctcgccttttacctggtccacctcttccgcttctaccgcgtg

SEQ ID NO: 439017 - DNA, 120 bp, Artificial Sequence
  ENSG00000153551_3 (sequence is synthesized)
ctcacctgtatcagctggcccctgtcggaacttctgcactatttaatcggtaccctgctcctcctcatcgcctccattgtggcagcttccaagagttacaaccagagcggactggtagcc

SEQ ID NO: 439018 - DNA, 120 bp, Artificial Sequence
  ENSG00000153551_4 (sequence is synthesized)
ggagcgatctttggtttcatggccaccttcctctgcatggcaagcatatggctgtcctataagatctcgtgtgtaacccagtccacagatgcagccgtctgatgaggccacaacccctag

SEQ ID NO: 439019 - DNA, 120 bp, Artificial Sequence
  ENSG00000153551_5 (sequence is synthesized)
gcccctcaggagctttgcagagaggaggacgtgtactccaggcgaggcctctggacctgtgttcctgtgccaaagtcctgtcaggctggtgggcaccaggaaaggcctgcaccctcttcc

SEQ ID NO: 439020 - DNA, 120 bp, Artificial Sequence
  ENSG00000153551_6 (sequence is synthesized)
tgctctcccaggaagccagctccctgagctcctgagccagccggaaactcttcctccagccttccggggagaacatccctcccattctgggaaaggaaagcagcctccagggaaatgttt

SEQ ID NO: 439021 - DNA, 120 bp, Artificial Sequence
  ENSG00000153551_7 (sequence is synthesized)
ctgaaggggtttgtgaatactcccgcctaaatcccttctacttcactcctcaggggagtgaagtgccttaagaaacaaagccctgtcctaatttatctagcttgtcagtccggtcttaga

SEQ ID NO: 439022 - DNA, 120 bp, Artificial Sequence
  ENSG00000153551_8 (sequence is synthesized)
gataccctctttcctgaagtgaggcgtgcctgtagaaacactatgtggtcagcctgtccccaaggagatcttgtgtctcctctccatctctgcctttgttaccagtgtgcatgtgtttgt

SEQ ID NO: 439023 - DNA, 120 bp, Artificial Sequence
  ENSG00000153551_9 (sequence is synthesized)
gtgttttttaataaaatattgactcggccagttgcacaaggatttcttattgaaccagatgaaggctgtaaaacctggcctgaaacagtttccattcgagcttgtgtctggcccatggcc

SEQ ID NO: 439024 - DNA, 120 bp, Artificial Sequence
  ENSG00000153551_10 (sequence is synthesized)
ctccacccgtgctctgtgtgtgccccttgctgaactgctggacttcaggttttctctccatcttgggggatagtatagcagggcagagttttaggtaaacatgtgcaggttctcaattat

SEQ ID NO: 439025 - DNA, 120 bp, Artificial Sequence
  ENSG00000153551_11 (sequence is synthesized)
attcacgtcctccttctcctgcaataccaatcttctcattttggaaagagctttagagcaagctaagggttgtgtttacactatgatgattaatgatctcggcctaaatgtgctgtttcg

SEQ ID NO: 439026 - DNA, 120 bp, Artificial Sequence
  ENSG00000153551_12 (sequence is synthesized)
ctgatcttgagctgctcagttggctagaaaaaggagggatggaacaatgtttgagcaaccccgtgtgcaaggacctacattcacaaccacatctaatagcgatggtagtgactgcaaggg

SEQ ID NO: 439027 - DNA, 120 bp, Artificial Sequence
  ENSG00000153551_13 (sequence is synthesized)
ggcaggttataggaccacatttttagaaatgaaatcggggctccatccccaggcacagggcaagccagtgaggagctgggctcaggatctaggtctgcctgactcccagccccatccttg

SEQ ID NO: 439028 - DNA, 120 bp, Artificial Sequence
  ENSG00000153551_14 (sequence is synthesized)
cctctgctgagtgttgccggaaatggaagcagcccctgtgggctttgagctggagctctggggctactcttgtggctgctggccagctcggggcatcgggttctgtctgggatgatctaa

SEQ ID NO: 439029 - DNA, 120 bp, Artificial Sequence
  ENSG00000153551_15 (sequence is synthesized)
aacccagaccaggcactgaagctgccaagagtgaagaccgagaggcctggctgccagccctgacctggcccaacctggaggactggggccagtggctgggcctcgcggggcttcctctct

SEQ ID NO: 439030 - DNA, 120 bp, Artificial Sequence
  ENSG00000153551_16 (sequence is synthesized)
gcacctgatccaggatgaggtggttgggttagatgactctccaagctcctttctggccagagacatgaagggaacaagcacagagatgagaagcagacaggattgcccgagtaattagcc

SEQ ID NO: 439031 - DNA, 120 bp, Artificial Sequence
  ENSG00000153551_17 (sequence is synthesized)
ccgggactgccgctacctttctggaaggcgccggccggccagtcaccggagggatcccgccagaggcggctccgcgtctccagcagcggggcagggacccgggcgccccgccctcgccag

SEQ ID NO: 439032 - DNA, 120 bp, Artificial Sequence
  ENSG00000153551_18 (sequence is synthesized)
aatagcattctgtagcgatataataaactgttcaattatgcagtgcagacagttggggaccgggatggtatataacgtgctaattgtgcagaacagacaatgagaggccgggacaggctc

SEQ ID NO: 439033 - DNA, 120 bp, Artificial Sequence
  ENSG00000153551_19 (sequence is synthesized)
taataggctaattatgtgctgtagacaattggtacaaaaggagcccaggaaaagaaacccggggaagaagtggatgtgggctggtgggggcagctgtttatgtaaagcagcatctgggct

SEQ ID NO: 439034 - DNA, 120 bp, Artificial Sequence
  ENSG00000153551_20 (sequence is synthesized)
tgaaaagaaaaccaaaccttgttgaaaatcctacccttagctgcccctgcgccattctcactggacaccagtggcggtgtagtgaagtggaggcctttgtgtgggtctgagaacacctag

SEQ ID NO: 439035 - DNA, 120 bp, Artificial Sequence
  ENSG00000153551_21 (sequence is synthesized)
gcacccggtactgcagagtgcggactctggagccaggctccctgggctcccatcccatatctggcccttgctggctctgtggccttcggcaaaacagatgaccgcctgtacctctgtttc

SEQ ID NO: 439036 - DNA, 120 bp, Artificial Sequence
  ENSG00000153551_22 (sequence is synthesized)
tttagctgtgaaatggaggagcagggtgggtaatcctagcacccacccagcagagttgtgagggttaaaggaatcaatacacccacagggcctcacaccctggtagggatgtagtaaagt

SEQ ID NO: 439037 - DNA, 120 bp, Artificial Sequence
  ENSG00000153551_23 (sequence is synthesized)
ggtcagtaagttttcaccactgcagctgccggtgttgttcacaagcaaggaaaatggctgcaggcttcaaagcccagagattccagaagaagctactgcctcttcctcgaccatttgatg

SEQ ID NO: 439038 - DNA, 120 bp, Artificial Sequence
  ENSG00000153551_24 (sequence is synthesized)
agcctcccacaggcactcttcgtctcccagcacccgaatctcatctacaagtgagggggctgggctaggtcagccttcctcacacttgagcgctggatgaccctgagaaagggaaagggt

SEQ ID NO: 439039 - DNA, 120 bp, Artificial Sequence
  ENSG00000153551_25 (sequence is synthesized)
gctgccttgacttagttgagtctaatattgtttaatatgtacaaacgtaaacctagatgtaaaggcctcggcttctggctctaatacggctatgaagccagaatggaacagaaagtcatt

SEQ ID NO: 439040 - DNA, 120 bp, Artificial Sequence
  ENSG00000153551_26 (sequence is synthesized)
acaccacaaatcatgggaacgttcagatttttttaacccaaattaaaatttcatccttttcttctcttttggtccaggataatcaaagtccattggcttagccccagcttgcttgtaaat

SEQ ID NO: 439041 - DNA, 120 bp, Artificial Sequence
  ENSG00000153551_27 (sequence is synthesized)
aggaccacctaaagacaactgacaaaaagtgtcagagccagaggccaacctctgctagatgaagcagcagcacatgactccatttctatctgataaggagacagagaagaggcatctcga

SEQ ID NO: 439042 - DNA, 120 bp, Artificial Sequence
  ENSG00000153551_28 (sequence is synthesized)
acagatgaaaaaccaaaggctggtgtcctaaaaaaaacagattggcttcaaagaaaacactaaggaagacccacagagctgtattaattttagtaaaaataatcatatgccaacagggga

SEQ ID NO: 439043 - DNA, 120 bp, Artificial Sequence
  ENSG00000153558_0 (sequence is synthesized)
gtcaccaggacaacgggcgtcgccggcgccgtgtgacttcgggctgtgggctcgctcgcggctcttcggccatggttttctcaaacaatgatgaaggccttattaacaaaaagttaccca

SEQ ID NO: 439044 - DNA, 120 bp, Artificial Sequence
  ENSG00000153558_1 (sequence is synthesized)
aagaacttctgttaagaatattttccttcttggatatagtaactttgtgccgatgtgcacagatttccaaggcttggaacatcttagccctggatggaagcaactggcaaagaatagatc

SEQ ID NO: 439045 - DNA, 120 bp, Artificial Sequence
  ENSG00000153558_2 (sequence is synthesized)
tttttaactttcaaacagatgtagagggtcgagtggtggaaaatatctcgaagcgatgcggtggattcctgaggaagctcagcttgcgaggctgcattggtgttggggattcctccttga

SEQ ID NO: 439046 - DNA, 120 bp, Artificial Sequence
  ENSG00000153558_3 (sequence is synthesized)
agacctttgcacagaactgccgaaacattgaacatttgaacctcaatggatgcacaaaaatcactgacagcacgtgttatagccttagcagattctgttccaagctgaaacatctggatc

SEQ ID NO: 439047 - DNA, 120 bp, Artificial Sequence
  ENSG00000153558_4 (sequence is synthesized)
tgacctcctgtgtgtctattacaaacagctccttgaaggggatcagtgagggctgccgaaacctggagtacctgaacctctcttggtgtgatcagatcacgaaggatggcatcgaggcac

SEQ ID NO: 439048 - DNA, 120 bp, Artificial Sequence
  ENSG00000153558_5 (sequence is synthesized)
tggtgcgaggttgtcgaggcctgaaagccctgctcctgaggggctgcacacagttagaagatgaagctctgaaacacattcagaattactgccatgagcttgtgagcctcaacttgcagt

SEQ ID NO: 439049 - DNA, 120 bp, Artificial Sequence
  ENSG00000153558_6 (sequence is synthesized)
cctgctcacgtatcacggatgaaggtgtggtgcagatatgcaggggctgtcaccggctacaggctctctgcctttcgggttgcagcaacctcacagatgcctctcttacagccctgggtt

SEQ ID NO: 439050 - DNA, 120 bp, Artificial Sequence
  ENSG00000153558_7 (sequence is synthesized)
tgaactgtccgcgactgcaaattttggaggctgcccgatgctcccatttgactgacgcaggttttacacttttagctcggaattgccacgaattggagaagatggatcttgaagaatgca

SEQ ID NO: 439051 - DNA, 120 bp, Artificial Sequence
  ENSG00000153558_8 (sequence is synthesized)
tcctgataaccgacagcacactcatccagctctccattcactgtcctaaactgcaagccctgagcctgtcccactgtgaactcatcacagatgatgggatcctgcacctgagcaacagta

SEQ ID NO: 439052 - DNA, 120 bp, Artificial Sequence
  ENSG00000153558_9 (sequence is synthesized)
cctgtggccatgagaggctgcgggtactggagttggacaactgcctcctcatcactgatgtggccctggaacacctagagaactgccgaggcctggagcgcctcgagctgtacgactgcc

SEQ ID NO: 439053 - DNA, 120 bp, Artificial Sequence
  ENSG00000153558_10 (sequence is synthesized)
agcaggttacccgtgcaggcatcaagcggatgcgggctcagctccctcatgtcaaagtccacgcctactttgctcccgtcaccccaccgacagcagtggcaggaagtggacagcgactgt

SEQ ID NO: 439054 - DNA, 120 bp, Artificial Sequence
  ENSG00000153558_11 (sequence is synthesized)
gcaggtgctgtgtcattctctgacagcagctgcctgggcccaaggggtgatgaggcatcctttcctctagaagacctgagtcttcctgaccgactccaccatcacccaatctgttgattc

SEQ ID NO: 439055 - DNA, 120 bp, Artificial Sequence
  ENSG00000153558_12 (sequence is synthesized)
tccattgggaaaggcatttacaggtaaaagacttctgtatggattgcagttactctggtgatagttttcacctttattctgctgtgaaacaatcaaatcaaagccttgtgtcagttaaca

SEQ ID NO: 439056 - DNA, 120 bp, Artificial Sequence
  ENSG00000153558_13 (sequence is synthesized)
catgacaagtggtctcaatgcagctaggaccatgccagaaacctggatctcttaagagattggtacctacctaggtacgaaagttctacccttggcatactcagcattcctcaaaaagac

SEQ ID NO: 439057 - DNA, 120 bp, Artificial Sequence
  ENSG00000153558_14 (sequence is synthesized)
catcagtgttagcacaaactgagcagaaaaaataagctgttgattttctacctgatacttaagccagtggcctactttaattcacaattccattttgattagcaggacttttccactttg

SEQ ID NO: 439058 - DNA, 120 bp, Artificial Sequence
  ENSG00000153558_15 (sequence is synthesized)
tgagacaccaaagaaaagaggactctatactgggtggagcagggtcttcacctttttgtttctgtcaacttgtcatatacacctccagggaccaaaaacaaaagcagctcggagtctgtg

SEQ ID NO: 439059 - DNA, 120 bp, Artificial Sequence
  ENSG00000153558_16 (sequence is synthesized)
ttgcctgattggaaagtagaagctctggtgtatgctacagcacataacacatttttactaaaggaaaaaagctaattatgtccatgcctctcgtaaaactggggggaaccttaaagagaa

SEQ ID NO: 439060 - DNA, 120 bp, Artificial Sequence
  ENSG00000153558_17 (sequence is synthesized)
agaactaaggcttaagttatctgtagtataatcaattagaagtaatgaatggatgcatgtaaaatggatgtgattttttttcaagcttattttgaaatcttaaaaatcaggttacaccat

SEQ ID NO: 439061 - DNA, 120 bp, Artificial Sequence
  ENSG00000153558_18 (sequence is synthesized)
agctactcaaaagttttacacacttaaaactcagatcagtaagtgttggtaccttttagactcataaaattgaataaaccattgcaatgctttaaaaaaaattaagtcagagggttttat

SEQ ID NO: 439062 - DNA, 120 bp, Artificial Sequence
  ENSG00000153558_19 (sequence is synthesized)
tgctatgattttatggcagacacatccaagcaaaaccattttccaaatgcagaccttcctgatgttatctgaaatctgataaaatgaccctactctctgctgtggttcattcttgctcca

SEQ ID NO: 439063 - DNA, 120 bp, Artificial Sequence
  ENSG00000153558_20 (sequence is synthesized)
tgctgtccatatttatgatctttattaagaacctgtcaatcagtcatcaccaccttcattgtaaacttaggtgttcatggtggctggcccttccaaacaaccactcccccaaactgaagg

SEQ ID NO: 439064 - DNA, 120 bp, Artificial Sequence
  ENSG00000153558_21 (sequence is synthesized)
gccagagctcatgagaaacttaaaagtgaaacggcaaaagcaagatgtgttcccatgactaccaatacctttattaggcagttttagaagtgtttttaaggatatattatgtcagctgca

SEQ ID NO: 439065 - DNA, 120 bp, Artificial Sequence
  ENSG00000153558_22 (sequence is synthesized)
ttctaggaagagaagcagattatatatatatataatctccccataaacggacttagcacaattatcatcagagtaagcattaaagtcattttattgccttatgatatattccagtattcc

SEQ ID NO: 439066 - DNA, 120 bp, Artificial Sequence
  ENSG00000153558_23 (sequence is synthesized)
ttggtctaaaaattgtgtggataccatagcagttagttaaatatacatttatacccactgtttgttgtggaagagatgatgggggaggaggactgatgcaggaagcaacttcaataaatg

SEQ ID NO: 439067 - DNA, 120 bp, Artificial Sequence
  ENSG00000153558_24 (sequence is synthesized)
ggaagcaacttcaataaatgagcatataacagacttgcttcagtgattatgaattagtttagtttctattaaaaaaaattaacttaaggctggccacggtggttcatgcctataatccca

SEQ ID NO: 439068 - DNA, 80 bp, Artificial Sequence
  ENSG00000153558_25 (sequence is synthesized)
tccagcccaggagacaacagtgagactccatcatcatctcaaaacaaaacaaacaaacaaacaaaacaaaccaccagagc

SEQ ID NO: 439069 - DNA, 120 bp, Artificial Sequence
  ENSG00000153558_26 (sequence is synthesized)
aaaacaaaacaaacaaacaaacaaaacaaaccaccagagccttctatacatgattgatttcttttgagccaggatacaacctatcatcagtcacagctattggacttgatgctcaatgat

SEQ ID NO: 439070 - DNA, 89 bp, Artificial Sequence
  ENSG00000153558_27 (sequence is synthesized)
ctatcatcagtcacagctattggacttgatgctcaatgatccatggcctcatttacaaaacaggagaacctcttgtaagaaaatcaggt

SEQ ID NO: 439071 - DNA, 120 bp, Artificial Sequence
  ENSG00000153558_28 (sequence is synthesized)
tattataacaactcattggaagcttgaagcagatagaatggaatctgagcagtagctacttcaggtgctggggttttctcaaacaatgatgaaggccttattaacaaaaagttacccaaa

SEQ ID NO: 439072 - DNA, 120 bp, Artificial Sequence
  ENSG00000153558_29 (sequence is synthesized)
gaacttctgttaagaatgctgttcagcttgttgttaaattttacttggtctaatccagaatgtactaagtatgtacatagcattggtctggattctttttgtaatgtgaatattttcctt

SEQ ID NO: 439073 - DNA, 120 bp, Artificial Sequence
  ENSG00000153558_30 (sequence is synthesized)
catcacatggtgacctgaaacatggctctgacctagctagtgctccttttgccctcttccctaatgagcagcctcaccagtacccatttgcttctctgatacctctaaaggttaataatc

SEQ ID NO: 439074 - DNA, 120 bp, Artificial Sequence
  ENSG00000153558_31 (sequence is synthesized)
tgcttctctgatacctctaaaggttaataatcctcaagacagaccagacaggcccagcatcaaaatacatcaactgtgtacagtactacatctatctctatctatctatctatctatcta

SEQ ID NO: 439075 - DNA, 120 bp, Artificial Sequence
  ENSG00000153558_32 (sequence is synthesized)
gagttccagctacagtgcaggactacacctacctgccaacttttcccatgggccttcaattagtacattggaataggagttcggatgctggggcaagggaaagagagctaagaagggtcc

SEQ ID NO: 439076 - DNA, 120 bp, Artificial Sequence
  ENSG00000153558_33 (sequence is synthesized)
gctttatagaatgggtacactgtgatttatttatcctttctctacttttgaatatttgagtactgcttctagtttggggccattacagccagtattcctgttttttggttaacacatgta

SEQ ID NO: 439077 - DNA, 120 bp, Artificial Sequence
  ENSG00000153558_34 (sequence is synthesized)
tgcatttcagtcagaaacatcgaaataacccctgcagcatatgagacttccaattgctccacatcctcaccaacacttattttccatcttttttgaaaaacaattgtaacatcacattct

SEQ ID NO: 439078 - DNA, 120 bp, Artificial Sequence
  ENSG00000153558_35 (sequence is synthesized)
ccttacaactcctcccactgaccttggaatcagaactaaatttctttacataacctacacaactctgtgatctggcccttacctccccaattccatctgcatctacatgcgtcctcttat

SEQ ID NO: 439079 - DNA, 120 bp, Artificial Sequence
  ENSG00000153558_36 (sequence is synthesized)
ttcccacctattatatgttgaccttcttcctaaacagtacttgccgttctcctgctacccctgggccttgcacacaacaaactctttgctctctttcctaggattagctcctaatccttc

SEQ ID NO: 439080 - DNA, 120 bp, Artificial Sequence
  ENSG00000153558_37 (sequence is synthesized)
aaatatcaactcagtggtctgttccccaggacaaatcctgctatcatatgctctcaaagcacctcagcttcagtttaaaagattagcattatttgattttatagactctccagtctgggc

SEQ ID NO: 439081 - DNA, 120 bp, Artificial Sequence
  ENSG00000153558_38 (sequence is synthesized)
tctgccagtgcagagaagtatacttttactcatcattgcacacgtgggggctgggacagagttagaactcatttatttgaaggaacaaatgaacaaatgggaattgatacagtacttttg

SEQ ID NO: 439082 - DNA, 120 bp, Artificial Sequence
  ENSG00000153558_39 (sequence is synthesized)
cctctctagtttttatggtggggtgaatcttacatttgatatgcactgggggaaactgtcaggtctgaaactgtttttgatatagagaacttaagagaattacataaatgtcatttggct

SEQ ID NO: 439083 - DNA, 120 bp, Artificial Sequence
  ENSG00000153558_40 (sequence is synthesized)
atataatattcatctgaatttatcttttgcaaccattactgtttacccaagagaagtcagtaatgtcagatcacactgttcaaggtctatttgattataaccttcaaagatgctcagtat

SEQ ID NO: 439084 - DNA, 120 bp, Artificial Sequence
  ENSG00000153558_41 (sequence is synthesized)
atctctgggtctcagctatttgtgcaattttctaaatgaacaaggacattagatgcattgatttcactggcatcccctcaaatggagaactggccaataaaactgctctcaagggggtaa

SEQ ID NO: 439085 - DNA, 120 bp, Artificial Sequence
  ENSG00000153558_42 (sequence is synthesized)
actgaaatctcccctgaagattttatttccatctttacacaattagaagagagaagccactcccagtgtagcaaacccataaccaaagggccccaaggctttgtgtttggtcctcactgc

SEQ ID NO: 439086 - DNA, 120 bp, Artificial Sequence
  ENSG00000153558_43 (sequence is synthesized)
ctgattaaatgtctcagtctgttttgtgctgctactacagactggataatttgtaatgaacagaaacttctcatagttctgaaggctgggaagtccaggggctggcatctgctgagggca

SEQ ID NO: 439087 - DNA, 120 bp, Artificial Sequence
  ENSG00000153558_44 (sequence is synthesized)
cccattgcagaagggcaaaaaggctagcttccagcttttttttaggacttgagccttggaataagggtcctgcaaacatttactcatgtcttcctgttccagagcctgtcccactgtgaa

SEQ ID NO: 439088 - DNA, 120 bp, Artificial Sequence
  ENSG00000153558_45 (sequence is synthesized)
agttaacttcagacggcgtgggcataacacctggccccctttaagctcgttttaaaaacgttgctcggtttcactcggcggaggtgctggcttgaacagacaagttcagagaattgccaa

SEQ ID NO: 439089 - DNA, 120 bp, Artificial Sequence
  ENSG00000153558_46 (sequence is synthesized)
ccgaaggcataattctccagaggccttcacggggtgtaagagaagagaggagctagactccttgcttggggacacacccttggtatagaatacttgaggaggttttctcaaacaatgatg

SEQ ID NO: 439090 - DNA, 120 bp, Artificial Sequence
  ENSG00000153558_47 (sequence is synthesized)
ataacaacaataaacaataaaacttgtaaaaaggaagaatggaagacacacatcattgttttgtagcaatgatgagattctgctaaacagatattatgaagcccgccttatcctagcagt

SEQ ID NO: 439091 - DNA, 120 bp, Artificial Sequence
  ENSG00000153558_48 (sequence is synthesized)
gacttcgggctgtgggctcgctcgcggctcttcggccatggttttctcaaacaatgatgaaggccttattaacaaaaagttacccaaagaacttctgttaagggtcgagtggtggaaaat

SEQ ID NO: 439092 - DNA, 120 bp, Artificial Sequence
  ENSG00000153558_49 (sequence is synthesized)
aatttcagccccatttcttcatctcagacagtcccatcaggcttggttccccctaccggtaccagggcaggttggaaggagcaaatctcaaagctgtatttcagaatgatggagacgacc

SEQ ID NO: 439093 - DNA, 120 bp, Artificial Sequence
  ENSG00000153558_50 (sequence is synthesized)
tgagctagtccttgctgaatatgttaagcagtgagtggtgaatagggcgttttaatgtgctgcttctggccttgctaccaacccacagatcaatgaggaagttcctcttcatgactgaat

SEQ ID NO: 439094 - DNA, 120 bp, Artificial Sequence
  ENSG00000153558_51 (sequence is synthesized)
agcagattctgttccaagctgaaacatctggatctgacctcctgtgtgtctattacaaacagctccttgaaggggatcaggtaagagtgcccattgtttgtgtcaagagaaatacccaaa

SEQ ID NO: 439095 - DNA, 120 bp, Artificial Sequence
  ENSG00000153558_52 (sequence is synthesized)
gctatgaacattctggaaaccttcttaatggtcacgttggatccagcaagaaataggtgactccaagaggtcccaggcatggtctccccttcggaatttcttgtgatgtactaaactcag

SEQ ID NO: 439096 - DNA, 120 bp, Artificial Sequence
  ENSG00000153558_53 (sequence is synthesized)
agggctaaggctttcaaaaggcagtgtacaggttttggtttttgcatttgtgtttgtttttgtttgttggttggttttagaatacttaatgctttaattggaccatttttcagtgcttgc

SEQ ID NO: 439097 - DNA, 120 bp, Artificial Sequence
  ENSG00000153558_54 (sequence is synthesized)
agcccctgtatgcattaaggatagaactgaggtgttacaggaatgttccaaaatattttctgttacacttggaaaaatatattcagttcctagatttcaggttattttgctgttagataa

SEQ ID NO: 439098 - DNA, 120 bp, Artificial Sequence
  ENSG00000153560_0 (sequence is synthesized)
ggggagtggccctaagcgcggggctgtacggggagggccgaggcgtggggcgaacgccggggcggggtcggggcggggccgggggaggcggaagcggcgcgtgaacctaagtcggagtcg

SEQ ID NO: 439099 - DNA, 120 bp, Artificial Sequence
  ENSG00000153560_1 (sequence is synthesized)
acctaagtcggagtcgcgttgaagccagcgtccggccggcagagcggcgtcggcggggacgcgccagcggagctccggctccttcgccctggacgcggaggccgcggtgtgcggggcgac

SEQ ID NO: 439100 - DNA, 120 bp, Artificial Sequence
  ENSG00000153560_2 (sequence is synthesized)
ggcgaggccggaagatggcctgggtgctcaagatggacgaggtgatcgagtccgggctggtgcacgacttcgacgccagcctctcgggcatcgggcaggaactgggcgccggcgcttaca

SEQ ID NO: 439101 - DNA, 120 bp, Artificial Sequence
  ENSG00000153560_3 (sequence is synthesized)
gcatgagtgatgtcttggcattgcccattttcaagcaggaagattccagccttccattggatggtgaaacagagcacccaccctttcagtatgtgatgtgtgctgcaacgtcaccagcag

SEQ ID NO: 439102 - DNA, 120 bp, Artificial Sequence
  ENSG00000153560_4 (sequence is synthesized)
taaaactgcatgatgaaacgcttacttatttgaaccaaggtcagtcatatgaaattcggatgctggataatcggaaaatgggtgatatgcctgagatcaatggaaaattagtaaagagca

SEQ ID NO: 439103 - DNA, 120 bp, Artificial Sequence
  ENSG00000153560_5 (sequence is synthesized)
tcataagggttgtattccatgacagacggctacaatacacagagcatcagcaacttgaaggatggaagtggaatcgcccaggagacagacttcttgatttagatattccaatgtctgtgg

SEQ ID NO: 439104 - DNA, 120 bp, Artificial Sequence
  ENSG00000153560_6 (sequence is synthesized)
gaataattgacacaaggacgaatccaagccagttaaatgcggttgaatttctgtgggacccagcaaaacgcacctctgctttcattcaggtacactgcatcagcacagaatttactccac

SEQ ID NO: 439105 - DNA, 120 bp, Artificial Sequence
  ENSG00000153560_7 (sequence is synthesized)
ggaagcacggaggtgaaaagggagtgccctttaggatccaggttgacacctttaagcagaatgaaaatggagaatacacagatcatctacactcagctagctgccaaatcaaagttttta

SEQ ID NO: 439106 - DNA, 120 bp, Artificial Sequence
  ENSG00000153560_8 (sequence is synthesized)
ccgagagaagatggagaagagaacagctcatgaaaaagaaaagtatcagccgtcctatgataccacaatcctcacagagatgaggcttgagcctataattgaagatgcagttgaacatga

SEQ ID NO: 439107 - DNA, 120 bp, Artificial Sequence
  ENSG00000153560_9 (sequence is synthesized)
gcagaaaaagtccagcaagcggactttgccagcagactacggtgattctctggcaaagcgaggcagttgttctccgtggcccgatgcccccacagcctatgtgaataacagcccttcccc

SEQ ID NO: 439108 - DNA, 120 bp, Artificial Sequence
  ENSG00000153560_10 (sequence is synthesized)
agcgcccactttcacctccccacagcagagcacttgcagtgtcccagacagcaattcttcttccccaaatcatcagggagatggagcttcacagacctctggtgaacaaattcagccttc

SEQ ID NO: 439109 - DNA, 120 bp, Artificial Sequence
  ENSG00000153560_11 (sequence is synthesized)
agctacgatccaggaaacacagcaatggctgctcaaaaacagattctcttcctacacaagactgttctctaatttttcaggtgccgacttattaaaactgacaaaggaggatttagttca

SEQ ID NO: 439110 - DNA, 120 bp, Artificial Sequence
  ENSG00000153560_12 (sequence is synthesized)
aatttgtggtgcagccgatggaattcggctctataattcactgaagtcaaggtcggttagaccccgtttaaccatctatgtctgccgggagcagccaagcagcacagtgctgcaagggca

SEQ ID NO: 439111 - DNA, 120 bp, Artificial Sequence
  ENSG00000153560_13 (sequence is synthesized)
gcagcaagctgcaagcagtgcaagcgagaatggcagtggggcaccctatgtttatcatgcaatctacttggaagaaatgattgcctcagaagttgctcgaaaacttgcgctggtgtttaa

SEQ ID NO: 439112 - DNA, 120 bp, Artificial Sequence
  ENSG00000153560_14 (sequence is synthesized)
tatccctctccaccaaattaatcaggtttacagacagggtcccaccggtattcacattcttgttagtgatcagatggttcagaattttcaagatgagagttgttttttattctccacagt

SEQ ID NO: 439113 - DNA, 120 bp, Artificial Sequence
  ENSG00000153560_15 (sequence is synthesized)
aaaagctgaaagtagtgatggcatccacataattttgaagtgatgtcttatatagactgaactgtattcagtaccaaatagtcacgcttaaaagtgtgtgaagactgaatccaagaagtc

SEQ ID NO: 439114 - DNA, 120 bp, Artificial Sequence
  ENSG00000153560_16 (sequence is synthesized)
ttgggattggattttaccatatgaaatgtttcatattgaaaacacaagatgacctttctaatgagctgtatgagaggtgaatctcctcactgtcactgccatagccaagcatcctcatga

SEQ ID NO: 439115 - DNA, 120 bp, Artificial Sequence
  ENSG00000153560_17 (sequence is synthesized)
ggaagcggcgcgtgaacctaagtcggagtcgcgttgaagccagcgtccggccggcagagcggcgtcggcggggttggccggggcggtgtggcgctagagcctgggcgggccgggggcaag

SEQ ID NO: 439116 - DNA, 120 bp, Artificial Sequence
  ENSG00000153560_18 (sequence is synthesized)
gagtcaaggcttgggggcgggtgacgggcgggcggagggcttgcccccgtgtggtcctcggagcggcccgaggtccagcctcccagcggtcccggaggaggatgcgaccggggggccccg

SEQ ID NO: 439117 - DNA, 80 bp, Artificial Sequence
  ENSG00000153560_19 (sequence is synthesized)
ccggcatgaggcgcagggccggtgtccgcgggagggtggcgctgccggcggcccggccgctcccgctgcaattgctcgct

SEQ ID NO: 439118 - DNA, 120 bp, Artificial Sequence
  ENSG00000153560_20 (sequence is synthesized)
gctgcaattgctcgctgggctcgtcgtgccctgccagtggggcccccgcagctctcgtcccggccgccgctggtgaccactcgccgcccctccggaggcttcacccgcgccctcccccag

SEQ ID NO: 439119 - DNA, 120 bp, Artificial Sequence
  ENSG00000153560_21 (sequence is synthesized)
tttacactgtatgcggtttggaaatgaatgtagaaacttactgtgggcatttacctttctgtgccagtttggcttttattgcctgaaccttatgctgacctggagaggagatgggggaca

SEQ ID NO: 439120 - DNA, 120 bp, Artificial Sequence
  ENSG00000153560_22 (sequence is synthesized)
gtgctgttgtggggccagcagtgaatctgtatgcggagagttgtgttgtgctgatgtggccgttggtggtcaggtaagaggctcggcaccttcttggaagaaatcatgtctgagggtgta

SEQ ID NO: 439121 - DNA, 120 bp, Artificial Sequence
  ENSG00000153560_23 (sequence is synthesized)
cgtttgatatgatcatgccagattggagaagatccaagccaggaagatgggcttgaagcaaactgcattatcaggagtaccttggtgagaggatcagtgtaaatcctaataggtacaaag

SEQ ID NO: 439122 - DNA, 120 bp, Artificial Sequence
  ENSG00000153560_24 (sequence is synthesized)
acttttgtgttttggctttgtcacagatttattgaaaaacttttttgcttctgcttccatttttagcattttagtttctggttttcatttttggagattccttgccttttaaactcgtgg

SEQ ID NO: 439123 - DNA, 120 bp, Artificial Sequence
  ENSG00000153560_25 (sequence is synthesized)
tttttctctcattttcttccctctctccctccatctctgaccacccccaccctaaccccccacccccaccatcctattaaacatttttaaagccctaccccagacattggaaataggtga

SEQ ID NO: 439124 - DNA, 120 bp, Artificial Sequence
  ENSG00000153560_26 (sequence is synthesized)
cccaagtagggggagaaagtattattgttgatagcttctgactaggtgttaagggatcttcattatgaacaagatgaatttttttctggaaacactagatgttatcaatcaaacactaaa

SEQ ID NO: 439125 - DNA, 120 bp, Artificial Sequence
  ENSG00000153560_27 (sequence is synthesized)
atgtaccatacaaatcccttaagcctctcaaatattgagctttagtacaatcatggatagacattctggtgatgatttaggggctttttatacaccacatactagcttctttctctataa

SEQ ID NO: 439126 - DNA, 120 bp, Artificial Sequence
  ENSG00000153560_28 (sequence is synthesized)
gagtgcctctttcataaaaccaaatgcttgtctgctagcatacttttcaaagggaatccactgttttctcactttcctcccatatctccgtccttcatccaaaaccttcccagaatccat

SEQ ID NO: 439127 - DNA, 120 bp, Artificial Sequence
  ENSG00000153560_29 (sequence is synthesized)
cagcaagcatgtttgaggcctgtggtgtaggggactgaattttttttttaacttctattccattttaattgtaggatatctttgtccatatacccaggtgtcctgatttgaatgtactat

SEQ ID NO: 439128 - DNA, 120 bp, Artificial Sequence
  ENSG00000153560_30 (sequence is synthesized)
ttgatcctcattgtgttcaggcaaaaaataggaaatgagtaattttgagtttgaaatctctcccagaagacaaactacttcagtgagtaaaagctttgacattttatgttttattcataa

SEQ ID NO: 439129 - DNA, 120 bp, Artificial Sequence
  ENSG00000153560_31 (sequence is synthesized)
agggggttaattatttgctacaaagaagcacgatctattttcatcatcgatttgaaaatatctgtaactcctatagatcctataggcagagagttttcctttctgactttttccctttgc

SEQ ID NO: 439130 - DNA, 120 bp, Artificial Sequence
  ENSG00000153560_32 (sequence is synthesized)
tttcgtgtgaccacatgttttctgtaccagtcactggggaaagaagtgagtttatctcgtttgttttaaaagttttgcttgtctatttagcattcctttttgggtctcaagatttatgga

SEQ ID NO: 439131 - DNA, 120 bp, Artificial Sequence
  ENSG00000153560_33 (sequence is synthesized)
acaataaatgtcatttaatgctgtgtgcttattttgaattcctcatcaggttttagaagcggggtaaaaatacttagatgcttatcagacttgaaattatactgagtggcattgaacgtg

SEQ ID NO: 439132 - DNA, 120 bp, Artificial Sequence
  ENSG00000153560_34 (sequence is synthesized)
agtttgtcccagtgaaacaggctaaataaattttggcaccagcaaatttgttactttgtttttttaatagtaggatgtacacatttcagtataataaatgttttctgattgttttgcaaa

SEQ ID NO: 439133 - DNA, 120 bp, Artificial Sequence
  ENSG00000153560_35 (sequence is synthesized)
gatgcagggcgaagcccgggccttgacgttctcttcagcaaggattccgcccgtcaagcgccagcagccgctcctaaggaactctgatccgcacactggctctatggggtgcaaaccgct

SEQ ID NO: 439134 - DNA, 120 bp, Artificial Sequence
  ENSG00000153560_36 (sequence is synthesized)
cactccctcggtagagagggcataaagcagagacgaccgggaaataccacagaggagcaaatcacctccggaagtggcgttttgggtcgctttctaccatgcagtccaatgaactctttc

SEQ ID NO: 439135 - DNA, 120 bp, Artificial Sequence
  ENSG00000153560_37 (sequence is synthesized)
attctttaaaatgattgctttactcattttaagaagaaagtttgataaatgagaatatttctagtggttgtaacagaaattagcatataaggaagaggagtcagtctttctagatgactg

SEQ ID NO: 439136 - DNA, 120 bp, Artificial Sequence
  ENSG00000153560_38 (sequence is synthesized)
atttgtggtgcagccgatggaattcggctctataattcactgaagtcaaggtaaaatactgtgaactgttttgcttgaaataagaatgtacctttcttcgcgtggggaatttgggcagaa

SEQ ID NO: 439137 - DNA, 120 bp, Artificial Sequence
  ENSG00000153560_39 (sequence is synthesized)
tgtgcgccatcgagcattggcagcattgtgctcacaagaagactgttttgtgtacaccttcagggcaggcccagatatgatgcaggcactgatgagggcagaggtagactgtaagactgg

SEQ ID NO: 439138 - DNA, 120 bp, Artificial Sequence
  ENSG00000153560_40 (sequence is synthesized)
tagaaatgcacatgggcagtactgatttcttgaagacgactgggtttgttgccaagaaaacaaaacttctaatttaggtgagctatacagaatctatggttttcaaggtcatgactatta

SEQ ID NO: 439139 - DNA, 120 bp, Artificial Sequence
  ENSG00000153560_41 (sequence is synthesized)
ctaaacagttattaaaaatgtaaactaattgtgaattaaaatgacagaaactgtaaattgtgctggcttgtaagaaccatttactatcattgctctttctatacttgtggtgtgagaatt

SEQ ID NO: 439140 - DNA, 120 bp, Artificial Sequence
  ENSG00000153560_42 (sequence is synthesized)
tcacaactgtgaggtgcatgtagtaagccctagtagagagatgaaagagagcctctttgcttacctgactctataaaatgactctattaatgctcatgtctcatgggagatgtgcttctc

SEQ ID NO: 439141 - DNA, 120 bp, Artificial Sequence
  ENSG00000153560_43 (sequence is synthesized)
tgatctttgttttacagactagaaatttagtaggctattgcatttgagcctttaaaaaatagaaagatgactccattatcttctacatatgtaagtggctatttatcatatggaagtcaa

SEQ ID NO: 439142 - DNA, 120 bp, Artificial Sequence
  ENSG00000153560_44 (sequence is synthesized)
gccttcatcccaaagttcatcttaattcccccaataaactgtatcctgggtgttagagaataaaacaaaagattatggatacattcagacattaaaaagtagagagaatatgatgaactc

SEQ ID NO: 439143 - DNA, 120 bp, Artificial Sequence
  ENSG00000153560_45 (sequence is synthesized)
ccatgcagccatctcctaccttcaaaaactaccagcatttggtcagtcttgctctccactatttcctctcctgccttctgttgtatttcaaagcaaatcctagatgccatatcatttatg

SEQ ID NO: 439144 - DNA, 120 bp, Artificial Sequence
  ENSG00000153560_46 (sequence is synthesized)
cttgaaatactgaatagtagttcatggtgtgtatgtactcaggtatggcttttttatacttatatgtaagtttttttttcttgtatggtaagcgaagggagtgttcagatagaattttta

SEQ ID NO: 439145 - DNA, 120 bp, Artificial Sequence
  ENSG00000153560_47 (sequence is synthesized)
aaagtgtcaaacactgcttctctaggtggtgctataggaaacctgtatagagagacatttacacttgtaaatgacatcgtaagtaggatgtgcttgggggaaatcttagggtataatgtg

SEQ ID NO: 439146 - DNA, 120 bp, Artificial Sequence
  ENSG00000153560_48 (sequence is synthesized)
tgattctctgccattcttctgttaaaattagctgctgtgacagagttgtttatgttataaaatttaacatgtttgactttacattgcacgtttcagaataaagaggcccagtcctagttc

SEQ ID NO: 439147 - DNA, 120 bp, Artificial Sequence
  ENSG00000153560_49 (sequence is synthesized)
ggctaccaactcttacagactttaggcaagtcccacaaactctggacttccatttccttttttttaaaattaaagattgactggcccgggtgatctcagggtttgtttctgtggggtggg

SEQ ID NO: 439148 - DNA, 120 bp, Artificial Sequence
  ENSG00000153560_50 (sequence is synthesized)
ttagaatcatgtttcttcacatagccacaacccagtcactaaataaggtagatgagtgaaatcctatatcgggaagagttctttaggccctgctctcattgatttgattcatcagcctca

SEQ ID NO: 439149 - DNA, 120 bp, Artificial Sequence
  ENSG00000153560_51 (sequence is synthesized)
ggacttctaagctccttcttgatacaggacatggaaaagccagcattttccttggctctgaaggacaggtgtctgtttgtcttcttatattgttcatgtgtatgtgtgtattcaggatat

SEQ ID NO: 439150 - DNA, 120 bp, Artificial Sequence
  ENSG00000153560_52 (sequence is synthesized)
ctgattattttgaaggacattggactgcatgaagacagatgcctgtaaagcagttctgttctttttccatttatttgagaaaaatatttttgctcttctctaggtgccgacttattaaaa

SEQ ID NO: 439151 - DNA, 120 bp, Artificial Sequence
  ENSG00000153560_53 (sequence is synthesized)
agcatctgacagaccatctcaatggtttagagtctggatcatcatattagaccacctgtgatagttggtgtgaggtgtgtggtttttatatttttattagtaaattactttgtataacga

SEQ ID NO: 439152 - DNA, 120 bp, Artificial Sequence
  ENSG00000153560_54 (sequence is synthesized)
aataacattataaagttctcataaggaaatagaacttagattcctgtagttgtcatatttgtacatgtgtaaggcagctttctctcccaggctcatcagtggcatcttctgattgcaggt

SEQ ID NO: 439153 - DNA, 120 bp, Artificial Sequence
  ENSG00000153560_55 (sequence is synthesized)
acattcttgttagtgatcaggtaaatcaaatcatttgtttttccttttcagactggtatttacttttatacatgtaattgtagaactgtagaaaaattctgtgacctcttttgaaaatac

SEQ ID NO: 439154 - DNA, 120 bp, Artificial Sequence
  ENSG00000153560_56 (sequence is synthesized)
ttatgagaatcattttcagagagttgggaatcactttggaagaacttataaccaagagtttcaggcatcctagtgataatatggaatacaagccaaggaaaactggcttagcctcccccc

SEQ ID NO: 439155 - DNA, 120 bp, Artificial Sequence
  ENSG00000153560_57 (sequence is synthesized)
agccctttaggatgcagccaatcactggggcactctagggatagtggcaggctttggccctttttatgaggtgagtcactggatgtgttttccttttgtctattatttgatgactaattt

SEQ ID NO: 439156 - DNA, 120 bp, Artificial Sequence
  ENSG00000153560_58 (sequence is synthesized)
aaaaaaacatgtaagatatataatttttcccctagtgattggtggcaagtaataatagaagagcactttatgcaatttttgttcgagtcatcatccactggagccggcagggaatgtgcc

SEQ ID NO: 439157 - DNA, 120 bp, Artificial Sequence
  ENSG00000153560_59 (sequence is synthesized)
cctgtgggtcacatgggtgactgaccaggtctctcagggaccattatggacaggcatagtgaacacaaggcagtgcagcacgtgtgcatctttgctgcctcacactgccttcatgaatta

SEQ ID NO: 439158 - DNA, 120 bp, Artificial Sequence
  ENSG00000153560_60 (sequence is synthesized)
tcgttttggccattgagtcctgtgtttgtttgagaagaatatttactgttttaaaatcattttaagaaacgacagttggatcttaattgtacttacgcatttactttatccttccagatg

SEQ ID NO: 439159 - DNA, 120 bp, Artificial Sequence
  ENSG00000153560_61 (sequence is synthesized)
ctattggggaaagcaaaccaaaattggccaagagatacacaaaattcccaatatgttaagttccatgaaggaacaggaaagtgtgggggtacttatggataagggagatctgggttgagg

SEQ ID NO: 439160 - DNA, 120 bp, Artificial Sequence
  ENSG00000153560_62 (sequence is synthesized)
cgggagctggccattggattagcatccccaggcaacgtggggctgtgtgcaaagaaaacacctggcttcttggaaagcctggcagtgggccatgtaggtgccatgcagtgtgtgagggtg

SEQ ID NO: 439161 - DNA, 120 bp, Artificial Sequence
  ENSG00000153560_63 (sequence is synthesized)
agcggatcagggcaaatcaaagcaggaggccgggtctggcatgcggggaccggatgatgatggtagttcggatttacttgaaatgcattgggttgtcactgaagttgtttaaacaaagga

SEQ ID NO: 439162 - DNA, 120 bp, Artificial Sequence
  ENSG00000153560_64 (sequence is synthesized)
gtagtaatgtgactagatttttctttcactttcacaactctgtggagacagatgagaaggtggcaaaacgaggcaggagatatccaggtgaaaggtgatggtatcttacacgtttataga

SEQ ID NO: 439163 - DNA, 120 bp, Artificial Sequence
  ENSG00000153560_65 (sequence is synthesized)
cagggtcccagtgggctccacttttgagggaggaatagttctgacaccttattttctgtggaaagtaactgggcagatggtgatctcattgaagaggtaagtatggttggggtaaatcaa

SEQ ID NO: 439164 - DNA, 120 bp, Artificial Sequence
  ENSG00000153560_66 (sequence is synthesized)
ccaagagtttgattttggatatgtagaaatgtcaagtaggcagttgactattaccagtctggggctcagagaagaggcctgggcttgagatgtaaatttggaaaccttcagcatatcagc

SEQ ID NO: 439165 - DNA, 120 bp, Artificial Sequence
  ENSG00000153560_67 (sequence is synthesized)
agtgactcaaagctgtagaagttgttaaggtcatttagggagagaatatgaaaagagccaggaccaggcttaggtggctccaacattaaagaggagggattcctaaatgtaaaattattt

SEQ ID NO: 439166 - DNA, 120 bp, Artificial Sequence
  ENSG00000153560_68 (sequence is synthesized)
gagaagagatcatacattcatagactgttttaaaagtcaggtgagctaagatccaaatccggtcttagcacaaaagctgcccctagaagagggagatgtcatgtgtgtcaggtgtcccca

SEQ ID NO: 439167 - DNA, 120 bp, Artificial Sequence
  ENSG00000153560_69 (sequence is synthesized)
gactactgaaatactgattttattttgcgcctcacatgttgcgtatgccatcaggttacctgcaaggctgagttttaactctgaactggttcactctttcagaaacatctttagcctagt

SEQ ID NO: 439168 - DNA, 120 bp, Artificial Sequence
  ENSG00000153560_70 (sequence is synthesized)
acccttctgctcagtcttttgttttcacagcagtacagtttttaccttgcataactgacattgtctgaaaaagaagacatatactataattgcatagttttgttttgtgaaaccagcaga

SEQ ID NO: 439169 - DNA, 120 bp, Artificial Sequence
  ENSG00000153560_71 (sequence is synthesized)
cattttttggtattagaaatcataggatctcccctctaatctcaatttactgttttgtttttttttttaaactttgtcgtcatgagaaaaatcatttttttatgaatgcctatattgctt

SEQ ID NO: 439170 - DNA, 120 bp, Artificial Sequence
  ENSG00000153560_72 (sequence is synthesized)
ctcactatttactgagaaacactaggcaaaaggaatgatacagttttaaaatgtttgaaatctctgtgagtagctcagaaatttttctggaaaaggtagatgtacacatttgcatttact

SEQ ID NO: 439171 - DNA, 120 bp, Artificial Sequence
  ENSG00000153560_73 (sequence is synthesized)
ccctcaggtcctctgccctgacacagtatatttcacctgttctccttctagctcttgctccccttatggacagcactattattgtgtgtcttgatagatgtccccctacccccagaactg

SEQ ID NO: 439172 - DNA, 120 bp, Artificial Sequence
  ENSG00000153560_74 (sequence is synthesized)
gcagacagtgttggaatgcgggcgttgatagtgggccaggcttcgcagaatgtctaaaaagggaatgtgtacatgaagttttttgggggaagaggagctagagcaagttaatctgcttgt

SEQ ID NO: 439173 - DNA, 120 bp, Artificial Sequence
  ENSG00000153560_75 (sequence is synthesized)
ttctctagaatcatttaaaggtaacctctgaattgggaagggaggttgtagttggcagggagttttccatttaataggcttaatttcctaagcctgactgaagaaatactgtctttcctt

SEQ ID NO: 439174 - DNA, 120 bp, Artificial Sequence
  ENSG00000153560_76 (sequence is synthesized)
attcggatgctggataatcggaaaatgggtgatatgcctgagatcaatggaaaattagtaaagagtggcatgtcagggcccaggtgctgctgggccctcagtgtggaggggcattctatt

SEQ ID NO: 439175 - DNA, 120 bp, Artificial Sequence
  ENSG00000153560_77 (sequence is synthesized)
gtgcggggacgcagcgaggccaccccggctgggaacagccgcgtgggcggggccgcattgcactctctggacagttcctgggccgcgaggcgcggggagtggccctaagcgcggggctgt

SEQ ID NO: 439176 - DNA, 120 bp, Artificial Sequence
  ENSG00000153561_0 (sequence is synthesized)
ctccccccagtcggcggcgcttggtgccgcccgggagaaccaggtcatcggtcggttcccgtgaaaacaaaaacaatcggccgcgccgtcgcaggcacccgaacgtcgcgagcggggcct

SEQ ID NO: 439177 - DNA, 120 bp, Artificial Sequence
  ENSG00000153561_1 (sequence is synthesized)
gccgtcgcaggcacccgaacgtcgcgagcggggcctggggacgcggagccgagtgcagcgagcgaacgggagcagcggcgactcgccggggggctagggcgccatggggcaggcgggctc

SEQ ID NO: 439178 - DNA, 120 bp, Artificial Sequence
  ENSG00000153561_2 (sequence is synthesized)
ccgcgccgcccgcttggggaacgaggagcaggacgcggcctcggtggggcccgggccgaacggctgcggacacctgggcgccgaggagccgagcgccgccgcctccggcatggatcagtg

SEQ ID NO: 439179 - DNA, 120 bp, Artificial Sequence
  ENSG00000153561_3 (sequence is synthesized)
gcgccgccgcctccggcatggatcagtgcgtgacggtggagcgcgagctggagaaggtgctgcacaagttctcaggctacgggcagctgtgcgagcgcggcctggaggagctcatcgact

SEQ ID NO: 439180 - DNA, 120 bp, Artificial Sequence
  ENSG00000153561_4 (sequence is synthesized)
acaccggcggcctcaagcacgagatcctgcagagccacggccaagatgctgaattatcagggacactttcacttgttttgacacagtgctgtaaaagaataaaggatactgttcaaaaat

SEQ ID NO: 439181 - DNA, 120 bp, Artificial Sequence
  ENSG00000153561_5 (sequence is synthesized)
tggcctccgaccacaaagacatccacagcagtgtttctcgggttggaaaagccattgataagaattttgattctgacattagcagtgtgggaatagatggctgctggcaggcagacagcc

SEQ ID NO: 439182 - DNA, 120 bp, Artificial Sequence
  ENSG00000153561_6 (sequence is synthesized)
aaaggcttctcaatgaggtgatggtggagcacttctttcgacaaggaatgctggatgtggctgaggagctctgtcaggaatctggtctttctgtagacccaagtcagaaggaaccatttg

SEQ ID NO: 439183 - DNA, 120 bp, Artificial Sequence
  ENSG00000153561_7 (sequence is synthesized)
tggagttaaatagaatattagaggcattaaaggtcagagttctgagacctgctctggagtgggcagtgtcaaaccgggaaatgcttatagctcaaaacagctccttggaatttaagctac

SEQ ID NO: 439184 - DNA, 120 bp, Artificial Sequence
  ENSG00000153561_8 (sequence is synthesized)
acagactgtattttattagcttgttaatgggtggaaccacaaatcagcgagaggcattacaatatgctaaaaattttcagccatttgccctaaatcatcaaaaagacattcaggttttga

SEQ ID NO: 439185 - DNA, 120 bp, Artificial Sequence
  ENSG00000153561_9 (sequence is synthesized)
tgggaagccttgtgtacctgagacaagggattgagaactcaccatatgttcacctacttgatgcaaaccagtgggctgatatctgtgacatctttacacgggatgcttgtgccctcctgg

SEQ ID NO: 439186 - DNA, 120 bp, Artificial Sequence
  ENSG00000153561_10 (sequence is synthesized)
ggctctccgtggagtcccctctcagtgtcagtttctcagcaggttgtgtggcgctgccagctttaattaacatcaaagccgtgattgaacagaggcagtgtactggagtttggaaccaga

SEQ ID NO: 439187 - DNA, 120 bp, Artificial Sequence
  ENSG00000153561_11 (sequence is synthesized)
aagatgaattacctattgaagtggaccttggtaaaaagtgctggtatcactctatatttgcctgccccattcttcgtcagcaaacaacagataacaatccacccatgaaattggtctgtg

SEQ ID NO: 439188 - DNA, 120 bp, Artificial Sequence
  ENSG00000153561_12 (sequence is synthesized)
gtcatattatatcaagagatgccctgaataaaatgtttaatggtagcaaattaaaatgtccctactgtccaatggaacaaagtccaggagatgccaaacagatatttttctgaagagata

SEQ ID NO: 439189 - DNA, 120 bp, Artificial Sequence
  ENSG00000153561_13 (sequence is synthesized)
actttagtttgcaatttgtaagtgaaactgaatcgtgggtgcatttcagaagagaacgttccatataatgcagctaaccaaggactcctgtgtttctataagctaatgctccagaaactt

SEQ ID NO: 439190 - DNA, 120 bp, Artificial Sequence
  ENSG00000153561_14 (sequence is synthesized)
tgccaacctgttagtgtacacacactgaggggagtgctcccggtgaatattatcatagggctttattatattcttggtcttcatttctgatcaagtaaatacaccagcagttgtcattca

SEQ ID NO: 439191 - DNA, 120 bp, Artificial Sequence
  ENSG00000153561_15 (sequence is synthesized)
atgcaggtttttgtacttaattatatggtgatttttttactttttaagagcagaaacggaaattgacctccccgccatgtgtttaatattcctcctgcttttacttttgtcattttcttg

SEQ ID NO: 439192 - DNA, 120 bp, Artificial Sequence
  ENSG00000153561_16 (sequence is synthesized)
ataatcgtaagccttgagagtgtttgtgaaaaagttttatttcctgttatgtatacataattaaatgaaaattcttcagaaaaagtttgataaattgaattgtggttatgaaactaattt

SEQ ID NO: 439193 - DNA, 120 bp, Artificial Sequence
  ENSG00000153561_17 (sequence is synthesized)
gcatttttatttgcttaagaaagaaagctgtgatagattccagatatgctttttgatgttttcctctgctccagctccaagaagtcagcacacctgcattttagctctgcatgcagcccc

SEQ ID NO: 439194 - DNA, 120 bp, Artificial Sequence
  ENSG00000153561_18 (sequence is synthesized)
agcaggctgcgtgtttaagaatttcattgtttaactggctggtgtgagaagtcttccgttagcatagagtggaaggagtactattgtttggttgggtttttgtttgtttgttttttgttt

SEQ ID NO: 439195 - DNA, 120 bp, Artificial Sequence
  ENSG00000153561_19 (sequence is synthesized)
ttgcttttattgccaagaggtgcttgttttaaaagtatgtttaataaaatgaaattctaaagttagaagtgttcttaagttgatatttactctcttggtcttggtagccctattatatca

SEQ ID NO: 439196 - DNA, 120 bp, Artificial Sequence
  ENSG00000153561_20 (sequence is synthesized)
ttgcagacacagtgttgtgcatgtgtgtattgtatatgtgcaccagcatcaaacattgtgtatctggaaggaaagcagcatgttccagttctaaaatgcagttaccagacccatcacttt

SEQ ID NO: 439197 - DNA, 120 bp, Artificial Sequence
  ENSG00000153561_21 (sequence is synthesized)
aaatccttaaagttagaagctagcaaattttctgtagtgcagaacgtttattgctgtttttgtgtttgaatagtataatgtttgatgcctctcttctgcaaagcgtatcatctcattgac

SEQ ID NO: 439198 - DNA, 120 bp, Artificial Sequence
  ENSG00000153561_22 (sequence is synthesized)
tgtgaatctgtatattattctgatggatacagataatgatcttttctcttgtgaggtatcttcatttatgcactgtccaaaaatagccatgtgtaagagtctttctgtatgacgaactac

SEQ ID NO: 439199 - DNA, 120 bp, Artificial Sequence
  ENSG00000153561_23 (sequence is synthesized)
atggaaaagacttctgtggacataattctgaccgaaacccatgaagttacttcagtataagaagaacgttacacggaaatcaccaaatattttgcaactttatttcttctgacatggagt

SEQ ID NO: 439200 - DNA, 120 bp, Artificial Sequence
  ENSG00000153561_24 (sequence is synthesized)
gaacatcaataggaatactttcaaagaaaatgaaaacacagaagcaaagagaaatgtggcacttcacattttaaactacagatggacttggtttgagggagggggaatcacagatttggt

SEQ ID NO: 439201 - DNA, 120 bp, Artificial Sequence
  ENSG00000153561_25 (sequence is synthesized)
aatgtttacctgggagagctggggtttgtttgtgaggagaaagagtactgtggaaaacctctgcttgagtaccatgtggccaggcctatgtggatggctactccgtgctgtgcggcttca

SEQ ID NO: 439202 - DNA, 120 bp, Artificial Sequence
  ENSG00000153561_26 (sequence is synthesized)
ccagcggttgggattggcccagcttggagtgcttgtgtggtccaacctcagtctggccccatagcgacttttgccccatgattctgcttcactgttggaatcctctttgaagttccccct

SEQ ID NO: 439203 - DNA, 120 bp, Artificial Sequence
  ENSG00000153561_27 (sequence is synthesized)
ctctttgctaaagcagtgaaggaagagaacagagacaaactctttggactgtgaaagagaaggtagagaattccaggcaacagtctgaccaagggtgtaaaccagtttattatatatata

SEQ ID NO: 439204 - DNA, 81 bp, Artificial Sequence
  ENSG00000153561_28 (sequence is synthesized)
ccttaggccaagtttagcttattcttatctttccacccaaacacctacacaacgtttaggcttcctgtaaggtttgaatga

SEQ ID NO: 439205 - DNA, 120 bp, Artificial Sequence
  ENSG00000153561_29 (sequence is synthesized)
cacctacacaacgtttaggcttcctgtaaggtttgaatgagacagatgtactctgaaggctggtggtaaatgtgtttgatgaccagactcttcatacagtcggcttgggccactttaaag

SEQ ID NO: 439206 - DNA, 120 bp, Artificial Sequence
  ENSG00000153561_30 (sequence is synthesized)
gacaaaagccagagctcagctttatccctctcccagtgctgggagccaaaaaactgttgacggttttttgtgcagctcaagaaaactttgaaaagaacatgctttaactgaagcattgga

SEQ ID NO: 439207 - DNA, 120 bp, Artificial Sequence
  ENSG00000153561_31 (sequence is synthesized)
ctctgcagctttctgtgtaaggcccgtgtactcccactgggcagggtgaggaccaaaaatctgaaactcttatgaatctgacatattatatggaaattatatcttgtgaccgtcttcaag

SEQ ID NO: 439208 - DNA, 120 bp, Artificial Sequence
  ENSG00000153561_32 (sequence is synthesized)
tgcatggacttaaaattcatgagagactaaatgtgagggagaggtggatttaaagaggccagaccttaaccaaagatgctgagatacagcattctgtcccccctgccctagaaactccat

SEQ ID NO: 439209 - DNA, 120 bp, Artificial Sequence
  ENSG00000153561_33 (sequence is synthesized)
aaatgctgtcacaaccctatcatcgctgatgctttctgcatgtcagcagtccaggaggatgctttttgtctctctttgcctccactttacaaaagataatatgatagaggcaacgtttat

SEQ ID NO: 439210 - DNA, 120 bp, Artificial Sequence
  ENSG00000153561_34 (sequence is synthesized)
aacagtcacatttaattataatgtacatcaaaggcagaatttcagaatggtttcttaaatttccttgggaaccgtttccacatatcagttatagacaaaggccatgggactatgctaaac

SEQ ID NO: 439211 - DNA, 120 bp, Artificial Sequence
  ENSG00000153561_35 (sequence is synthesized)
caataaaaccttattagcaaatctttagattctgacttagccagagcatctgagtgttcaagtacagttttacagtggctaaggttgtctcttgatcttttttctccgttgtgtgatcac

SEQ ID NO: 439212 - DNA, 120 bp, Artificial Sequence
  ENSG00000153561_36 (sequence is synthesized)
agatgctatttctgttttattggtgattatacgagacttctaatacataaatgaacgggtattggtgcctctttattttaaaaaatttgaagaaaagagccacctcatattcatagggtg

SEQ ID NO: 439213 - DNA, 120 bp, Artificial Sequence
  ENSG00000153561_37 (sequence is synthesized)
tgtattttttgagtgtgagcatttaattgaaaataagaaagctatgaagtaaatgttaacttctctgtagcagctaatgcatagagacactaaaacccacaccacattttgtgggaaatg

SEQ ID NO: 439214 - DNA, 120 bp, Artificial Sequence
  ENSG00000153561_38 (sequence is synthesized)
aggatcctgatcctcttttgtcctctccaggtagtctcgcaggttatgcagcttaagttcagtcttctttatgctgcgattgatttccacctcagtggcttagcctttgggacagtggat

SEQ ID NO: 439215 - DNA, 120 bp, Artificial Sequence
  ENSG00000153561_39 (sequence is synthesized)
actgcaacagccaagaactcttggttatccgcacaagctgctggtagactacattagccctctggttttccagctcaacctctgataaagtggactgagagccacgctgctcagtctgtt

SEQ ID NO: 439216 - DNA, 120 bp, Artificial Sequence
  ENSG00000153561_40 (sequence is synthesized)
tcgtcagccgactcaggttattttcagggaaggcatggaggcatagtttggttagtttcatcactaggatgtataaggtgacgacacaaaccaaatacctttctttcatcacttaactat

SEQ ID NO: 439217 - DNA, 120 bp, Artificial Sequence
  ENSG00000153561_41 (sequence is synthesized)
acgtactttatctctggtaacactagaatgctgtggtcttgagggaatgttagcaaggaacacatagaagatttggtgtttcataagcctgtctaggtgtggcaggttttgtgtggtaca

SEQ ID NO: 439218 - DNA, 120 bp, Artificial Sequence
  ENSG00000153561_42 (sequence is synthesized)
ctgatgtttaccataagcaggtacaagcttcatgaaccgttcttaatgaactataattgaatagataccaaaaatagaatgacaaatgtattttaatagcagatgaggcagttttaggat

SEQ ID NO: 439219 - DNA, 120 bp, Artificial Sequence
  ENSG00000153561_43 (sequence is synthesized)
gaattttccactgttgattttacttcaagacatagcaagagaaacaaaattttgttttcaagacatttccactgcagtttcaagctgtagtgggcatatgcttcatttacttccaaagag

SEQ ID NO: 439220 - DNA, 120 bp, Artificial Sequence
  ENSG00000153561_44 (sequence is synthesized)
gcaaaagcagctggaattggcttacagcacatgctttgtttcatgttatgggtgaggacctacatacactcttactttagcagtcacttaaccttctccagcaaggcagttgtggggttc

SEQ ID NO: 439221 - DNA, 120 bp, Artificial Sequence
  ENSG00000153561_45 (sequence is synthesized)
actaggatttagtgcctgatcttttttttgggaaggggcgggaatgaatgtgttggggctgggagggaagcagaagaaaatgggagtgtgagtgagtgtgcatgtgtctgaagttcacca

SEQ ID NO: 439222 - DNA, 120 bp, Artificial Sequence
  ENSG00000153561_46 (sequence is synthesized)
ttgcccccacctgcacctagcaaggaacaggtgtttgatgtattttgctcatgactgcagtatgcatgtatttttttccttctctgtgttttctaaacttacactaaaggattcatcaaa

SEQ ID NO: 439223 - DNA, 120 bp, Artificial Sequence
  ENSG00000153561_47 (sequence is synthesized)
tcatcttgttcagatggctcaggattgtatttattttgcttaccccgtgctcttgggttctatagtatttctataattatgtaacgagaatagtgttgcactgtaatctatcatatagag

SEQ ID NO: 439224 - DNA, 120 bp, Artificial Sequence
  ENSG00000153561_48 (sequence is synthesized)
ctatatgtatggaaaattttgatcaattttttaagaaatgtatcctgtttgcaaaggcacagtaaagttgcatcttatagactataggcaataaagctaacaataaaccttatttaacac

SEQ ID NO: 439225 - DNA, 120 bp, Artificial Sequence
  ENSG00000153561_49 (sequence is synthesized)
aaaccacatccatatcctctgttcatttgattttggaaaaagtagcatatccagtagtttcagggaattcattttaactttaagaattctgatatatttaatttataaatttcggactga

SEQ ID NO: 439226 - DNA, 120 bp, Artificial Sequence
  ENSG00000153561_50 (sequence is synthesized)
tataatagagttttggaaaactataagaaatgctttgttaatgtgtgtattcctatgtaaaacacatggcttttcctgtgtatatttttaaaaattaaagaaatgcacatttaaaaagtg

SEQ ID NO: 439227 - DNA, 120 bp, Artificial Sequence
  ENSG00000153561_51 (sequence is synthesized)
agttataacaaaaggagtttgacagtgtattgcatttcctcaacctctatatattttataatcttagctttaatttttaatgcatgtgaccagaaaataagctatggaagtttacttatc

SEQ ID NO: 439228 - DNA, 120 bp, Artificial Sequence
  ENSG00000153561_52 (sequence is synthesized)
tacctcagtagtttatactggaaaatcagaatggtagaagggagctcagaagtgtccagaaaacaatcgaatgcattgcttattcatgcttcttttccaagagcagcaaataagttacga

SEQ ID NO: 439229 - DNA, 120 bp, Artificial Sequence
  ENSG00000153561_53 (sequence is synthesized)
attagaggtggtgatcaggtcattgtttgtcagacttgtttttacactttgtcagctttcttgaaaataatcttgaaggctaatttaacactttgaatcactaagactgtccatctgagt

SEQ ID NO: 439230 - DNA, 120 bp, Artificial Sequence
  ENSG00000153563_0 (sequence is synthesized)
gaatttccatccagcaatgcaggccatgggaggctgcagcagtgacgctgtcagatcccctttgtgagaataataatttttataacaacgtggctggaggactgatcaggagagagactg

SEQ ID NO: 439231 - DNA, 120 bp, Artificial Sequence
  ENSG00000153563_1 (sequence is synthesized)
gtgtgaattgaaggctgttgcaatggctccaagaagagatgaggctgtgtggtgagtttagccgctggatgaaaggccggaagaatgaggtcagcagcgcactgacaccgacacccaaag

SEQ ID NO: 439232 - DNA, 120 bp, Artificial Sequence
  ENSG00000153563_2 (sequence is synthesized)
cttcggctgctgccgctctcatggaaatctcctgggggaagggagagggtccttcctcggtgaaaactggggctgctctagcgagttcctcagaagcgggcaggtcgctagttcctcttc

SEQ ID NO: 439233 - DNA, 120 bp, Artificial Sequence
  ENSG00000153563_3 (sequence is synthesized)
cttttcagccctcagtgcccattttgccaataaaaagtcccaaggtgacagtacaagagacgcctttagtgaaggcaaaggaagggacactcccctcctttgctgcctactctcgccctc

SEQ ID NO: 439234 - DNA, 120 bp, Artificial Sequence
  ENSG00000153563_4 (sequence is synthesized)
acttcttgaaatctttggtctcccttcacccactctgtcactctcacaagacaaccatttccaaggactatttccaagcccttttcctcatccccaaacccgcagttttcagctgccccc

SEQ ID NO: 439235 - DNA, 120 bp, Artificial Sequence
  ENSG00000153563_5 (sequence is synthesized)
agttgcctggccaggctgcctcgacggccctattcacgggccccagcctcctcgccgggctggaaggcgacaaccgcgaaaaggagggtgactctcctcggcgggggcttcgggtgacat

SEQ ID NO: 439236 - DNA, 120 bp, Artificial Sequence
  ENSG00000153563_6 (sequence is synthesized)
cacatcctccaaatgcgaaatcaggctccgggccggccgaagggcgcaactttcccccctcggcgccccaccggctcccgcgcgcctcccctcgcgcccgagcttcgagccaagcagcgt

SEQ ID NO: 439237 - DNA, 120 bp, Artificial Sequence
  ENSG00000153563_7 (sequence is synthesized)
cctggggagcgcgtcatggccttaccagtgaccgccttgctcctgccgctggccttgctgctccacgccgccaggccgagccagttccgggtgtcgccgctggatcggacctggaacctg

SEQ ID NO: 439238 - DNA, 120 bp, Artificial Sequence
  ENSG00000153563_8 (sequence is synthesized)
ggcgagacagtggagctgaagtgccaggtgctgctgtccaacccgacgtcgggctgctcgtggctcttccagccgcgcggcgccgccgccagtcccaccttcctcctatacctctcccaa

SEQ ID NO: 439239 - DNA, 120 bp, Artificial Sequence
  ENSG00000153563_9 (sequence is synthesized)
aacaagcccaaggcggccgaggggctggacacccagcggttctcgggcaagaggttgggggacaccttcgtcctcaccctgagcgacttccgccgagagaacgagggctactatttctgc

SEQ ID NO: 439240 - DNA, 120 bp, Artificial Sequence
  ENSG00000153563_10 (sequence is synthesized)
tcggccctgagcaactccatcatgtacttcagccacttcgtgccggtcttcctgccagcgaagcccaccacgacgccagcgccgcgaccaccaacaccggcgcccaccatcgcgtcgcag

SEQ ID NO: 439241 - DNA, 120 bp, Artificial Sequence
  ENSG00000153563_11 (sequence is synthesized)
tggggtccttctcctgtcactggttatcaccctttactgcaaccacaggaaccgaagacgtgtttgcaaatgtccccggcctgtggtcaaatcgggagacaagcccagcctttcggcgag

SEQ ID NO: 439242 - DNA, 120 bp, Artificial Sequence
  ENSG00000153563_12 (sequence is synthesized)
atacgtctaaccctgtgcaacagccactacattacttcaaactgagatccttccttttgagggagcaagtccttccctttcattttttccagtcttcctccctgtgtattcattctcatg

SEQ ID NO: 439243 - DNA, 120 bp, Artificial Sequence
  ENSG00000153563_13 (sequence is synthesized)
attattattttagtgggggcggggtgggaaagattactttttctttatgtgtttgacgggaaacaaaactaggtaaaatctacagtacaccacaagggtcacaatactgttgtgcgcaca

SEQ ID NO: 439244 - DNA, 120 bp, Artificial Sequence
  ENSG00000153563_14 (sequence is synthesized)
tcgcggtagggcgtggaaaggggcaggccagagctacccgcagagttctcagaatcatgctgagagagctggaggcacccatgccatctcaacctcttccccgcccgttttacaaagggg

SEQ ID NO: 439245 - DNA, 120 bp, Artificial Sequence
  ENSG00000153563_15 (sequence is synthesized)
gaggctaaagcccagagacagcttgatcaaaggcacacagcaagtcagggttggagcagtagctggagggaccttgtctcccagctcagggctctttcctccacaccattcaggtctttc

SEQ ID NO: 439246 - DNA, 120 bp, Artificial Sequence
  ENSG00000153563_16 (sequence is synthesized)
tttccgaggcccctgtctcagggtgaggtgcttgagtctccaacggcaagggaacaagtacttcttgatacctgggatactgtgcccagagcctcgaggaggtaatgaattaaagaagag

SEQ ID NO: 439247 - DNA, 120 bp, Artificial Sequence
  ENSG00000153563_17 (sequence is synthesized)
aactgcctttggcagagttctataatgtaaacaatatcagactttttttttttataatcaagcctaaaattgtatagacctaaaataaaatgaagtggtgagcttaaccctggaaaatga

SEQ ID NO: 439248 - DNA, 120 bp, Artificial Sequence
  ENSG00000153563_18 (sequence is synthesized)
atccctctatctctaaagaaaatctctgtgaaacccctatgtggaggcggaattgctctcccagcccttgcattgcagaggggcccatgaaagaggacaggctacccctttacaaataga

SEQ ID NO: 439249 - DNA, 120 bp, Artificial Sequence
  ENSG00000153563_19 (sequence is synthesized)
atttgagcatcagtgaggttaaactaaggccctcttgaatctctgaatttgagatacaaacatgttcctgggatcactgatgactttttatactttgtaaagacaattgttggagagccc

SEQ ID NO: 439250 - DNA, 120 bp, Artificial Sequence
  ENSG00000153563_20 (sequence is synthesized)
ctcacacagccctggcctctgctcaactagcagatacagggatgaggcagacctgactctcttaaggaggctgagagcccaaactgctgtcccaaacatgcacttccttgcttaaggtat

SEQ ID NO: 439251 - DNA, 120 bp, Artificial Sequence
  ENSG00000153563_21 (sequence is synthesized)
ggtacaagcaatgcctgcccattggagagaaaaaacttaagtagataaggaaataagaaccactcataattcttcaccttaggaataatctcctgttaatatggtgtacattcttcctga

SEQ ID NO: 439252 - DNA, 120 bp, Artificial Sequence
  ENSG00000153563_22 (sequence is synthesized)
ttattttctacacatacatgtaaaatatgtctttcttttttaaatagggttgtactatgctgttatgagtggctttaatgaataaacatttgtagcatcctctttaatgggtaaacagca

SEQ ID NO: 439253 - DNA, 120 bp, Artificial Sequence
  ENSG00000153563_23 (sequence is synthesized)
ctctgtaaaataaatgcgctgggccggatcttttctgagttctcttctcccctacgaattctagatccctcctctgtcctccctgcgccagggaccttcgggcgacccttccctgtaccc

SEQ ID NO: 439254 - DNA, 120 bp, Artificial Sequence
  ENSG00000153563_24 (sequence is synthesized)
ccaccccaccctctctggaccccgtttctgcctcagtacggcgcgctgagctctgccccctgcccaggccctgaccccctcaggagccgcggtttcctggggtaacagtgggaaacgtgt

SEQ ID NO: 439255 - DNA, 120 bp, Artificial Sequence
  ENSG00000153563_25 (sequence is synthesized)
cggccgtctccgctcaggcgcttgctgtgtacagaaaggctgattcaggcacaccggctctcgtcgccttggtggccctccccagccctcctccgcgcctgctccgggtggcgctccgct

SEQ ID NO: 439256 - DNA, 120 bp, Artificial Sequence
  ENSG00000153563_26 (sequence is synthesized)
gggctcctcgtgcgcctgtccgcgaccgcacccacctcatcctggcacccccatcgtggcatcacgtgttccctcatctgtcctcatggctggcgtgcccctctgcggtgagacctgcag

SEQ ID NO: 439257 - DNA, 120 bp, Artificial Sequence
  ENSG00000153563_27 (sequence is synthesized)
aacaggaattggtgccgggtcagcagccggcgatgaagccggacgaagcctgcaaaccccacccatacgccagcttcacatagctcctatccattgcacagcagcgtggggaagcaccgt

SEQ ID NO: 439258 - DNA, 80 bp, Artificial Sequence
  ENSG00000153563_28 (sequence is synthesized)
tagctcctatccattgcacagcagcgtggggaagcaccgttctctaccctccaaacaaaagcatgaaaggccaaggtgga

SEQ ID NO: 439259 - DNA, 80 bp, Artificial Sequence
  ENSG00000153574_0 (sequence is synthesized)
agcggaggccggagcgaggcgtcgggatgcagcgccccgggcccttcagcaccctctacgggcgggtcttggccccgctg

SEQ ID NO: 439260 - DNA, 120 bp, Artificial Sequence
  ENSG00000153574_1 (sequence is synthesized)
acagctgggacctcccgggttcccacgtgcggctgccggggcgtgcacagtctgggacccgtggcggtgctggcaacacaagcaccagctgcggggactccaacagcatctgcccggccc

SEQ ID NO: 439261 - DNA, 120 bp, Artificial Sequence
  ENSG00000153574_2 (sequence is synthesized)
cctccacgatgtccaaggccgaggaggccaagaagctggcgggccgcgcggctgtggagaaccacgtgaggaataaccaagtgctgggaattggaagtggttctacaattgtccatgctg

SEQ ID NO: 439262 - DNA, 120 bp, Artificial Sequence
  ENSG00000153574_3 (sequence is synthesized)
tgcagcgaatagctgaaagggtgaagcaagagaatctgaacctcgtctgtattcccacttccttccaggcccgccagctcatcctgcagtatggcttgaccctcagtgatctggatcgac

SEQ ID NO: 439263 - DNA, 120 bp, Artificial Sequence
  ENSG00000153574_4 (sequence is synthesized)
acccagagatcgaccttgccatcgatggtgctgatgaagtagatgctgatctcaatctcatcaagggtggcggaggctgcctgacccaggagaagattgtggctggctatgctagtcgct

SEQ ID NO: 439264 - DNA, 120 bp, Artificial Sequence
  ENSG00000153574_5 (sequence is synthesized)
tcatcgtgatcgctgatttcaggaaagattcgaagaatctcggggatcagtggcacaagggaatccccatcgaggtcatcccaatggcctatgtcccagtgagccgagctgtgagccaga

SEQ ID NO: 439265 - DNA, 120 bp, Artificial Sequence
  ENSG00000153574_6 (sequence is synthesized)
agtttgggggcgtggttgaacttcgaatggctgtcaacaaggctggtcctgtggtgacagataatgggaattttatcttggactggaagtttgaccgggtacacaaatggagtgaagtga

SEQ ID NO: 439266 - DNA, 120 bp, Artificial Sequence
  ENSG00000153574_7 (sequence is synthesized)
aatgatcccaggtgtggtggacacaggcctattcatcaacatggctgagagagtctactttgggatgcaggatggctcagtgaacatgagggagaagcctttctgttgaccctgcaagga

SEQ ID NO: 439267 - DNA, 120 bp, Artificial Sequence
  ENSG00000153574_8 (sequence is synthesized)
gcagagtgtgttcaccttgagtctccagcccacagccaaggtggacgtacctctccaggagcctttgccttaatgtatctctgcctggacaacttgtggtggggggtggggggaagagtg

SEQ ID NO: 439268 - DNA, 120 bp, Artificial Sequence
  ENSG00000153574_9 (sequence is synthesized)
ggagggggagttaaatccagtcttatgaagtattgttattaaatgtctttttaaaaagagaaatataaacatatatttttactattaaaatattcagttttttaaatgaagtagaacttg

SEQ ID NO: 439269 - DNA, 120 bp, Artificial Sequence
  ENSG00000153574_10 (sequence is synthesized)
agttcatgttttatatgaaatatttaccaaaaaaaaaaaatgaggtaaactgtatttaaaacctttgacttgagtctgctggtaaagcttctgaatattgagtttgctgagaaataaaaa

SEQ ID NO: 439270 - DNA, 120 bp, Artificial Sequence
  ENSG00000153574_11 (sequence is synthesized)
tcaaaacttctttaagctggtaaagtgaggggcccaccagcagtgatctcctgatgccttactggaaactttgtttacttgtctgctaccctctgatttgtttttagttagtttttattg

SEQ ID NO: 439271 - DNA, 120 bp, Artificial Sequence
  ENSG00000153574_12 (sequence is synthesized)
tgagcacacatagtacctagttacatcttaagatcaggtttataaaactgtggagtggagcggtatggtatggaatgacttggaatgtaagctgtcagggagaaaatgttgttacacttt

SEQ ID NO: 439272 - DNA, 120 bp, Artificial Sequence
  ENSG00000153574_13 (sequence is synthesized)
tgctaagatctgggggtttcttcatattcctgctgttggaagcagttgaccagaaatgcttgccagtactgccaaagcactgctgtgaaatgtgaagtactttgtttttttatttttaat

SEQ ID NO: 439273 - DNA, 120 bp, Artificial Sequence
  ENSG00000153574_14 (sequence is synthesized)
gattttctttttgttattaatatttttctctgttcctttgttattacttgcatggtttggcgtcagaagtccttacctctttatattgtttgcaggtttaaataaaacagtgtggtgcca

SEQ ID NO: 439274 - DNA, 120 bp, Artificial Sequence
  ENSG00000153684_0 (sequence is synthesized)
agtcgcacagctacctggtaggtgactggaggtgttgatcagtgcttggtgggattttgctgatgtggccccaagcccgcctccctccccaccctgcgatggcagaagaaactcgacaaa

SEQ ID NO: 439275 - DNA, 120 bp, Artificial Sequence
  ENSG00000153684_1 (sequence is synthesized)
gtaaattggcagcagccaagagaaagttaaaagaatattggcagagaaacagccctggtgttccagcaggagccaagaggaacaggaaaacaaatggcagcatccatgagacagccactt

SEQ ID NO: 439276 - DNA, 120 bp, Artificial Sequence
  ENSG00000153684_2 (sequence is synthesized)
aacaggaaaacaaatggcagcatccatgagacagccacttctggtggttgccactcacctggagattcagcaacaggtatccacggggagagccctacatcatctgctaccctgaaggat

SEQ ID NO: 439277 - DNA, 120 bp, Artificial Sequence
  ENSG00000153684_3 (sequence is synthesized)
agagcccgtgccaagaactagcagtagtcccagactcgaggtccgtaaaagtcagtcaactgaagaacaccatcaaatctttgaaacaacagaataaacaagtggaacatcagctggaag

SEQ ID NO: 439278 - DNA, 120 bp, Artificial Sequence
  ENSG00000153684_4 (sequence is synthesized)
aaagggagctagaggttcaaatccagagattgaacatacagaaagggaaactaaatacggacctgtaccacacgaaacgttctctcagatactttgaagaagagtccaaggatctggccg

SEQ ID NO: 439279 - DNA, 120 bp, Artificial Sequence
  ENSG00000153684_5 (sequence is synthesized)
tccgtctgcaacattcattgcagcgtaaaggagagttagagcgggctctctctgctgtcaccgccacacagaagaagaaggcggagaggcagttctccagccgcagtaaagcacgtatgg

SEQ ID NO: 439280 - DNA, 120 bp, Artificial Sequence
  ENSG00000153684_6 (sequence is synthesized)
agtggaagttagagcagtccatgcgggagcaggcactgctgaaagcgcagctgacacagttgaaggagtcacttaaagaagtccagctagagagggatgaatatgctgaacatctaaaag

SEQ ID NO: 439281 - DNA, 90 bp, Artificial Sequence
  ENSG00000153684_7 (sequence is synthesized)
cagaggatgagaaaaatgtcgcaggaggtttgctcgttgaagaaggagaagaagcatgataaatatcgggtagagcaccagatggctgaa

SEQ ID NO: 439282 - DNA, 120 bp, Artificial Sequence
  ENSG00000153684_8 (sequence is synthesized)
agtacaatcagcgcataagtctcctgaatgaggggcaaaaggagaggcttcgggagcaggaggagaggcttcaggagcagcaggagaggcttccagagcaggaggagaggcttcagcagc

SEQ ID NO: 439283 - DNA, 120 bp, Artificial Sequence
  ENSG00000153684_9 (sequence is synthesized)
agaggcttccagagcaggaggagaggcttcagcagctggccgagccacagaacagcttcaaggagctgaacaatgagaacaagagcgtactacagttggagcagcaagtaaaggagctgc

SEQ ID NO: 439284 - DNA, 120 bp, Artificial Sequence
  ENSG00000153684_10 (sequence is synthesized)
gcaaggagcgtctggaagctgcgagccagcagaaacagcagctaacggcccagttgagcctcatggctctccctggggaaggagatggaggaggacatctggacagtgagggggaggagg

SEQ ID NO: 439285 - DNA, 120 bp, Artificial Sequence
  ENSG00000153684_11 (sequence is synthesized)
cacaggacctggagagcagggaggccatgagcggctttatggaccacctggaggagaaggcagacctgagtgagctggtggagaaagaagaacttggattcttccagtactacagagaga

SEQ ID NO: 439286 - DNA, 120 bp, Artificial Sequence
  ENSG00000153684_12 (sequence is synthesized)
gatgccatcagaaagtttatcaccctataacaaagccagggggcagtgccaaagatgcagcaccgggaggaggacaccatcaggctggccctggacagggaggagatgaaggtgaagctg

SEQ ID NO: 439287 - DNA, 120 bp, Artificial Sequence
  ENSG00000153684_13 (sequence is synthesized)
ctggagctgcaggagatggtgttgcagctggtggcgactacaagggacacagcaaattcttggtgactgcccagaaccctgctcatgagcccagtccaggagccccagccccccaggagc

SEQ ID NO: 439288 - DNA, 120 bp, Artificial Sequence
  ENSG00000153684_14 (sequence is synthesized)
ttggggctgcccacaagcatggtgatctttgtgaggtgagcctcactgacagcgtggagcctgtgcaaggagaggccagggagggttctccccacgacaaccctactgcacagccgatcg

SEQ ID NO: 439289 - DNA, 77 bp, Artificial Sequence
  ENSG00000153684_15 (sequence is synthesized)
ctgtgtgccattcttttgtcaaagagctgctgaagaaatttttaaaaaagaaacaaagttatggggttaatctccta

SEQ ID NO: 439290 - DNA, 120 bp, Artificial Sequence
  ENSG00000153684_16 (sequence is synthesized)
gtttctaatttatagtttaagttcatttgtaaatagttaaaagagagtgggtctctgtggctttcactgatgttcactctggcatactttcgcaattttctttttcaatttcataattgt

SEQ ID NO: 439291 - DNA, 89 bp, Artificial Sequence
  ENSG00000153684_17 (sequence is synthesized)
ggagttcaaacacacaaagacccactatttgcacaaaactattcttgctggtttggaataggctgccatgtgtacagaattcagataaa

SEQ ID NO: 439292 - DNA, 120 bp, Artificial Sequence
  ENSG00000153684_18 (sequence is synthesized)
gttattgcagcatgtatattcattacagaattcagataaaatgtgcctatgttctgctgttgtttgatctaatcttaatcacagtgagctcttcattagcacaatatgtggtttgcccca

SEQ ID NO: 439293 - DNA, 120 bp, Artificial Sequence
  ENSG00000153684_19 (sequence is synthesized)
tactgacatttagagttgtttaaaggccgagaactggaaacagcctttccctcattttctgtgtattggtgatgggagtaataacattttgggggagctttttaaatttcacagaagagg

SEQ ID NO: 439294 - DNA, 120 bp, Artificial Sequence
  ENSG00000153684_20 (sequence is synthesized)
ataacattttgggggagctttttaaatttcacagaagaggaaagttgcctgctctggcaggtatgtgcaagatagagtgtgtttcatttgttctgttgccaagaattagtgctgtactat

SEQ ID NO: 439295 - DNA, 72 bp, Artificial Sequence
  ENSG00000153684_21 (sequence is synthesized)
gctcatgaagatattgcatcatgagcttcagcagttgtactctttttttgactacggatgtggaaaaccttt

SEQ ID NO: 439296 - DNA, 81 bp, Artificial Sequence
  ENSG00000153684_22 (sequence is synthesized)
ggttggcattcttcttaatgtatttagtaaagatcataagaaatcctttaagagttcaaatgtccctggaacaggcataca

SEQ ID NO: 439297 - DNA, 83 bp, Artificial Sequence
  ENSG00000153684_23 (sequence is synthesized)
actctgcctattcttcaaccaccttggttactttgacataggaattgacttcttttccttgaatggaaaacactttgaaataa

SEQ ID NO: 439298 - DNA, 120 bp, Artificial Sequence
  ENSG00000153684_24 (sequence is synthesized)
ttactttgacataggaattgacttcttttccttgaatggaaaacactttgaaataataataaacattgttataaactaatatatgtgagagtgcttagttgaaacaaaaaggagttttag

SEQ ID NO: 439299 - DNA, 120 bp, Artificial Sequence
  ENSG00000153684_25 (sequence is synthesized)
tgtacaaactgcagtgcaatctactgttggtgaatgtcagtgtattatcaggaaacatgtctatacaatcacagagttatatttcctcacaaacttctttgtgaagagtgaaatgtgttt

SEQ ID NO: 439300 - DNA, 120 bp, Artificial Sequence
  ENSG00000153684_26 (sequence is synthesized)
atttcctcacaaacttctttgtgaagagtgaaatgtgtttctgtacctctgggtttcacttacgggcatattttgtgcagtatttatgtgattgtgcctatgcatgatgaatgaatgaat

SEQ ID NO: 439301 - DNA, 63 bp, Artificial Sequence
  ENSG00000153684_27 (sequence is synthesized)
tatttatgtgattgtgcctatgcatgatgaatgaatgaatttcagttgtacattgcctaaatc

SEQ ID NO: 439302 - DNA, 76 bp, Artificial Sequence
  ENSG00000153684_28 (sequence is synthesized)
ttataaatacgacattaacaggagagcagcagtacgattttgccgatggaataacagatttgccggcaatcactga

SEQ ID NO: 439303 - DNA, 120 bp, Artificial Sequence
  ENSG00000153684_29 (sequence is synthesized)
tacgattttgccgatggaataacagatttgccggcaatcactgaaagagtgcaaacatcgggtccttgtgacttcaacggactcttccaaattgtatgaatgtatcaatgtattagataa

SEQ ID NO: 439304 - DNA, 120 bp, Artificial Sequence
  ENSG00000153684_30 (sequence is synthesized)
agtttcagaatgataaagaaaaaatgttagaccaaataatgcggctagttaacagtggtacgatttctcgcccgtggctttaaaatgcacttaaagtcctgtccttgccttttattttct

SEQ ID NO: 439305 - DNA, 83 bp, Artificial Sequence
  ENSG00000153684_31 (sequence is synthesized)
gaagaagtaacatgatttctttgtttgctcgcgacatgactgctcggtttgggggacactcagatgtagaggccccgagtctc

SEQ ID NO: 439306 - DNA, 120 bp, Artificial Sequence
  ENSG00000153684_32 (sequence is synthesized)
ccggtcccatgggtgggcctgtcccggggcaggggcagtggtggcattctggggacatgtctcttgcagtaccatctctgcctctgcctggttagatctctgtcttcctcttcctacagg

SEQ ID NO: 439307 - DNA, 120 bp, Artificial Sequence
  ENSG00000153684_33 (sequence is synthesized)
tgtgttcatcaggtgcctgtggattaaatcacatactggcatatttaagctgaatgtcaatctggaaaataaattgactgtattaacggaaataccactctttgtgtagatatttgtcgt

SEQ ID NO: 439308 - DNA, 120 bp, Artificial Sequence
  ENSG00000153684_34 (sequence is synthesized)
atatttaagaaaaagctaaaaagaatggaaatcgcatgactataacttaagtctttcttcaaagtgcatgcagtcttttgcgatacctcattcagccaagtattggtattcttcctcatt

SEQ ID NO: 439309 - DNA, 120 bp, Artificial Sequence
  ENSG00000153684_35 (sequence is synthesized)
cggtataaggcagctttcaatttgcttagagggcaacattggaaggttagagttcatcagaaacagaattctaaaatgtgagttcaattcaataaatttgaatttctgtaggaagaatca

SEQ ID NO: 439310 - DNA, 120 bp, Artificial Sequence
  ENSG00000153684_36 (sequence is synthesized)
aatcaccgatttaaagattgcaatatataataatcatttttaaagtattggattaaatctgataggttttccagaaatgaacaaaaatcagctctaaaaccaaagctgatttttagaaaa

SEQ ID NO: 439311 - DNA, 120 bp, Artificial Sequence
  ENSG00000153684_37 (sequence is synthesized)
aaaatgtaaatcagccctatccatactatagtttctctaaaactttatctgaaacagtcattttaaaataactattaaacaatgtaactgctatcttaatgttctgaaataagttaaaac

SEQ ID NO: 439312 - DNA, 75 bp, Artificial Sequence
  ENSG00000153684_38 (sequence is synthesized)
tgtatttgccaagttttcttagaatgaattttaccaatttatgaattcttgtaagcggaatgtaaaacggaaata

SEQ ID NO: 439313 - DNA, 120 bp, Artificial Sequence
  ENSG00000153684_39 (sequence is synthesized)
aatttatgaattcttgtaagcggaatgtaaaacggaaatactgaaagacttttgcctaaagtggcattattgactgctggtgtgatgctactgtaatgtaataaattattaagttgttgc

SEQ ID NO: 439314 - DNA, 120 bp, Artificial Sequence
  ENSG00000153684_40 (sequence is synthesized)
aactgtcattactgcaagactggcctttgatcttatgacccagtcccctaagcattgccaccccatttctggttcctcttgtcacagcacaaatttccagctggaaggggaatggagatt

SEQ ID NO: 439315 - DNA, 120 bp, Artificial Sequence
  ENSG00000153684_41 (sequence is synthesized)
ggtgggacggggtgcccctctgccagctgagacagtccacacacaccccagccctaatgattgctctctctacctctccccccactcctcctccacctcctcctctctgcatgcgcctca

SEQ ID NO: 439316 - DNA, 120 bp, Artificial Sequence
  ENSG00000153707_0 (sequence is synthesized)
caggctctgaaagtgttccagctgaaatttcagatcggacagactcgctgcggctccggaggcagtgattccaagctgctcgcgcacgctgctgccaagctgcaggatggtgcacgtagc

SEQ ID NO: 439317 - DNA, 120 bp, Artificial Sequence
  ENSG00000153707_1 (sequence is synthesized)
caggctgctgctgctgctcctcactttcttcctccgcacggatgctgagacacctccaaggtttacacgaacacccgttgatcagacaggggtctctggcggagttgcctctttcatctg

SEQ ID NO: 439318 - DNA, 120 bp, Artificial Sequence
  ENSG00000153707_2 (sequence is synthesized)
ccaagctacgggagacccaagacctaaaattgtctggaacaaaaaaggaaagaaagtcagcaatcagagatttgaggtaatagagtttgacgatgggtctggatcagttctcagaataca

SEQ ID NO: 439319 - DNA, 120 bp, Artificial Sequence
  ENSG00000153707_3 (sequence is synthesized)
acccttacggactccgagggatgaggccatttatgaatgtgtggcctcaaataatgtgggagaaataagtgtatccaccagactcacagttttgcgggaagatcaaattcccaggggctt

SEQ ID NO: 439320 - DNA, 120 bp, Artificial Sequence
  ENSG00000153707_4 (sequence is synthesized)
ccctaccattgacatgggcccacagttgaaggtggttgagcgtactcgcacggccaccatgctttgtgcagccagtggtaatccggatccagaaatcacttggtttaaagatttcttacc

SEQ ID NO: 439321 - DNA, 120 bp, Artificial Sequence
  ENSG00000153707_5 (sequence is synthesized)
tgtggacacaagcaacaacaatggtcgtattaagcagttacgatcagaatctattggtggtacaccaataagaggagcccttcagattgagcagagtgaagagtctgaccaaggaaaata

SEQ ID NO: 439322 - DNA, 120 bp, Artificial Sequence
  ENSG00000153707_6 (sequence is synthesized)
tgagtgtgttgccaccaacagcgcgggcactcgctattccgctcctgccaatttatatgtcagagagctgcgagaagttcgccgtgtcccaccaagattctctatcccacccactaatca

SEQ ID NO: 439323 - DNA, 120 bp, Artificial Sequence
  ENSG00000153707_7 (sequence is synthesized)
tgaaatcatgccaggcggaagcgttaatatcacctgtgtggccgtggggtcaccaatgccttatgtaaagtggatgttgggggcagaagatctgacacctgaagatgatatgccaatagg

SEQ ID NO: 439324 - DNA, 120 bp, Artificial Sequence
  ENSG00000153707_8 (sequence is synthesized)
aagaaatgtgctagaactgaatgatgtaagacagtcagcaaattacacctgtgttgctatgtcaacactgggtgtcattgaagcaatagcacagatcactgtcaaagccttacccaaacc

SEQ ID NO: 439325 - DNA, 120 bp, Artificial Sequence
  ENSG00000153707_9 (sequence is synthesized)
tccaggaactcctgtagtgaccgagagcacagctacaagcatcacactgacgtgggactctgggaaccctgagcctgtttcttattacataattcagcataaacctaaaaactctgagga

SEQ ID NO: 439326 - DNA, 120 bp, Artificial Sequence
  ENSG00000153707_10 (sequence is synthesized)
actttacaaagaaattgatggggtggcgaccacacgctacagtgtcgctggactaagtccctactcggattatgaattcagggttgttgctgtcaataacattgggcgggggcctcccag

SEQ ID NO: 439327 - DNA, 120 bp, Artificial Sequence
  ENSG00000153707_11 (sequence is synthesized)
cgaacctgtgctaacacaaacctcagagcaagcaccatccagtgccccgagggatgtccaggcacgaatgttgagttcgaccaccattttggtacagtggaaggaacctgaagagccaaa

SEQ ID NO: 439328 - DNA, 120 bp, Artificial Sequence
  ENSG00000153707_12 (sequence is synthesized)
tggacagatccaaggatatagagtttattatacaatggatcccactcaacatgtcaacaactggatgaaacacaatgtagctgacagccaaatcactactattggcaacttagtgcccca

SEQ ID NO: 439329 - DNA, 120 bp, Artificial Sequence
  ENSG00000153707_13 (sequence is synthesized)
gaaaacatattctgtcaaagtcctggcttttacctcaattggagatggtcccctttcaagtgacatacaagtcatcactcagacaggagtaccagggcagccactaaacttcaaagcaga

SEQ ID NO: 439330 - DNA, 120 bp, Artificial Sequence
  ENSG00000153707_14 (sequence is synthesized)
acctgagtctgaaacaagtattttgctctcttggacacctccacgttcagataccattgccaactatgaactggtctacaaagatggggagcatggagaggagcaacgaattaccattga

SEQ ID NO: 439331 - DNA, 120 bp, Artificial Sequence
  ENSG00000153707_15 (sequence is synthesized)
gccagggacatcatataggctgcaaggactgaaaccaaacagcttatactatttccgtctggctgcacgctcccctcaaggcctgggtgcttctactgcagaaatatcagctagaaccat

SEQ ID NO: 439332 - DNA, 120 bp, Artificial Sequence
  ENSG00000153707_16 (sequence is synthesized)
gcagtcaaagccgtcagctcctcctcaagacattagttgcaccagcccaagttccactagtattttggtaagttggcaacctccaccagtggaaaaacagaatggcattatcactgaata

SEQ ID NO: 439333 - DNA, 120 bp, Artificial Sequence
  ENSG00000153707_17 (sequence is synthesized)
ctccatcaagtacactgcagtggatggggaagatgacaagcctcacgagattttgggaattccttcggacactaccaaataccttttggaacagctggaaaaatggactgaataccggat

SEQ ID NO: 439334 - DNA, 120 bp, Artificial Sequence
  ENSG00000153707_18 (sequence is synthesized)
cactgtgacagcccatacagatgtcggccctggccctgagagcttgtccgtgttgattcgaaccaatgaagatgttcctagtggtcctcctcgcaaagtcgaggtagaggctgtcaactc

SEQ ID NO: 439335 - DNA, 120 bp, Artificial Sequence
  ENSG00000153707_19 (sequence is synthesized)
aacatctgttaaagtctcatggcgctcacccgtgcccaataaacagcatggccagataagaggatatcaggtgcattatgtgaggatggaaaatggtgagcccaagggccagcccatgct

SEQ ID NO: 439336 - DNA, 120 bp, Artificial Sequence
  ENSG00000153707_20 (sequence is synthesized)
gaaagatgtcatgctggctgatgcacagtgggaatttgatgatactactgaacatgacatgatcatttctgggctccagcctgaaacttcctactccctcaccgtcacagcctacacaac

SEQ ID NO: 439337 - DNA, 120 bp, Artificial Sequence
  ENSG00000153707_21 (sequence is synthesized)
caaaggagatggtgctcgcagcaagcccaaactggtgtccaccactggggcagttccagggaaacctcggcttgtgattaaccacactcagatgaatactgctcttattcagtggcaccc

SEQ ID NO: 439338 - DNA, 120 bp, Artificial Sequence
  ENSG00000153707_22 (sequence is synthesized)
tccggtggacacatttggacctcttcagggctaccgtctaaaatttggccgcaaggatatggagccacttactactcttgagttctctgaaaaagaagatcactttacagctacagacat

SEQ ID NO: 439339 - DNA, 120 bp, Artificial Sequence
  ENSG00000153707_23 (sequence is synthesized)
ccacaagggagcatcatacgtcttcaggctctcagccagaaacaaagtgggctttggggaggagatggtgaaggagatttccattccagaagaagtaccaactggattccctcaaaacct

SEQ ID NO: 439340 - DNA, 120 bp, Artificial Sequence
  ENSG00000153707_24 (sequence is synthesized)
tcactcagaaggcaccacttcaacctccgtccagttatcttggcaaccacctgtcctggcagagagaaatggcattatcaccaagtatacccttctttatagggatatcaacatccccct

SEQ ID NO: 439341 - DNA, 120 bp, Artificial Sequence
  ENSG00000153707_25 (sequence is synthesized)
tctcccgatggagcagcttattgttccagctgacaccactatgacactcactggcttaaaaccagataccacatacgatgtaaaagtacgtgctcatacgagcaaagggcccgggccata

SEQ ID NO: 439342 - DNA, 120 bp, Artificial Sequence
  ENSG00000153707_26 (sequence is synthesized)
tagtcccagtgtccagttcaggacactgcctgtggatcaagtgtttgcaaaaaattttcatgtcaaagcagtaatgaagacttccgtgttgctgtcttgggagattccagagaattataa

SEQ ID NO: 439343 - DNA, 120 bp, Artificial Sequence
  ENSG00000153707_27 (sequence is synthesized)
ctccgccatgcctttcaaaattctttatgatgatgggaaaatggtagaagaagtggatggccgagccacacagaagttaattgtcaacctgaagcctgagaaatcatattcatttgtgct

SEQ ID NO: 439344 - DNA, 120 bp, Artificial Sequence
  ENSG00000153707_28 (sequence is synthesized)
gacaaatcgtggaaacagtgctggtgggctgcagcacagggtcacggcaaagactgcaccagatgtattacgtaccaagcctgccttcattgggaagaccaacttggatggcatgattac

SEQ ID NO: 439345 - DNA, 120 bp, Artificial Sequence
  ENSG00000153707_29 (sequence is synthesized)
tgtgcaactgcctgaagtacctgcaaatgagaatataaaaggttactacataataattgtgcctttgaagaaatctcgcgggaaatttatcaagccatgggagagtccagatgaaatgga

SEQ ID NO: 439346 - DNA, 120 bp, Artificial Sequence
  ENSG00000153707_30 (sequence is synthesized)
attagatgagctgcttaaggagatatctaggaagcgcagaagcatccgttatgggagagaagttgaattaaagccatatattgccgctcactttgatgtccttcccactgagttcaccct

SEQ ID NO: 439347 - DNA, 120 bp, Artificial Sequence
  ENSG00000153707_31 (sequence is synthesized)
gggggatgacaagcattatggtggatttacaaacaagcaactccaaagtggtcaagaatatgtcttctttgtgttagcagtaatggaacatgcagagtctaagatgtatgcaaccagccc

SEQ ID NO: 439348 - DNA, 120 bp, Artificial Sequence
  ENSG00000153707_32 (sequence is synthesized)
ttactccgaccccgtggtgtcaatggatctggatccgcagccaatcacggatgaagaagaaggcttgatctgggttgtaggtcctgtccttgcagtggtctttatcatctgcattgtcat

SEQ ID NO: 439349 - DNA, 120 bp, Artificial Sequence
  ENSG00000153707_33 (sequence is synthesized)
tgctattcttctttataaaaggaagagggcagagtccgactctagaaaaagcagcataccgaacaataaggagatcccttcacaccacccaacagaccctgtagaactgaggcgccttaa

SEQ ID NO: 439350 - DNA, 120 bp, Artificial Sequence
  ENSG00000153707_34 (sequence is synthesized)
ctttcaaacaccgggtatggctagccatcctccaatacccatcttggaacttgcagaccacattgaaagattgaaagcaaatgacaacttgaagttttcccaggaatatgagtcaattga

SEQ ID NO: 439351 - DNA, 120 bp, Artificial Sequence
  ENSG00000153707_35 (sequence is synthesized)
ccctggccagcagttcacttgggaacattcaaacttggaagtaaacaaaccaaagaatagatacgcgaatgtaatcgcatatgatcattcccgggttctcctatcagctatagaagggat

SEQ ID NO: 439352 - DNA, 120 bp, Artificial Sequence
  ENSG00000153707_36 (sequence is synthesized)
cccaggaagtgactatgtgaatgccaactacatagatgggtataggaagcaaaatgcctatattgcaacacagggatctctccccgaaacatttggggacttttggagaatgatatggga

SEQ ID NO: 439353 - DNA, 120 bp, Artificial Sequence
  ENSG00000153707_37 (sequence is synthesized)
acaacggagtgccacagttgtcatgatgacaaaactagaagaaagatcaagggtgaagtgtgaccagtattggcctagcagaggcacagaaacccacggactcgttcaagtaacgctgct

SEQ ID NO: 439354 - DNA, 120 bp, Artificial Sequence
  ENSG00000153707_38 (sequence is synthesized)
tgatactgtggagctggccacatattgtgttcgaacatttgcactttacaagaatggttcaagtgagaagagagaagtgagacaattccagttcaccgcctggcctgatcatggtgttcc

SEQ ID NO: 439355 - DNA, 120 bp, Artificial Sequence
  ENSG00000153707_39 (sequence is synthesized)
ttcatcgtcatagatgccatgttagaaagaataaagcatgaaaaaactgtagatatttatggccatgtaactttaatgagagcccagaggaactatatggttcaaacagaagaccaatac

SEQ ID NO: 439356 - DNA, 120 bp, Artificial Sequence
  ENSG00000153707_40 (sequence is synthesized)
atctttatccatgatgcactgttagaagcagtgacttgtggaaataccgaagtgccagctagaaacttgtatgcctacattcagaagctgacacaaatagaaacgggagagaatgtcaca

SEQ ID NO: 439357 - DNA, 120 bp, Artificial Sequence
  ENSG00000153707_41 (sequence is synthesized)
ggaatggagctcgaatttaagcgtctagccagctcaaaagctcacacctcaaggtttatcagtgccaatcttccatgtaataaattcaaaaatcgccttgttaatattatgccatatgaa

SEQ ID NO: 439358 - DNA, 120 bp, Artificial Sequence
  ENSG00000153707_42 (sequence is synthesized)
tccacaagggtatgcctgcagcctatccgtggagtagaaggatctgattacatcaatgccagttttattgatggatacagacaacagaaagcctacatcgctacccaggggcccttggca

SEQ ID NO: 439359 - DNA, 120 bp, Artificial Sequence
  ENSG00000153707_43 (sequence is synthesized)
gagaccactgaagacttctggcggatgctctgggaacacaattccaccatagttgtgatgctcaccaagctgcgtgaaatgggcagagagaaatgtcaccaatactggccagcagaacgg

SEQ ID NO: 439360 - DNA, 120 bp, Artificial Sequence
  ENSG00000153707_44 (sequence is synthesized)
tctgcaagataccagtactttgttgtagatcccatggctgagtacaacatgccacagtatatcctaagggaattcaaggtcacagatgccagggacggccagtcccgaacagtaaggcag

SEQ ID NO: 439361 - DNA, 120 bp, Artificial Sequence
  ENSG00000153707_45 (sequence is synthesized)
ttccagttcactgactggccagagcaaggagtgccaaagtccggagaaggatttattgacttcatcggccaagtccataaaacaaaagaacagtttggccaagatggacccatttcagtc

SEQ ID NO: 439362 - DNA, 120 bp, Artificial Sequence
  ENSG00000153707_46 (sequence is synthesized)
cattgcagcgcgggcgttggaagaactggagtcttcataacgctaagcattgttttggaaagaatgagatatgaaggagttgtagatatcttccagactgtcaaaatgttaagaacacaa

SEQ ID NO: 439363 - DNA, 120 bp, Artificial Sequence
  ENSG00000153707_47 (sequence is synthesized)
cgaccagctatggtacagacagaggatcaatatcagttttcctatcgtgccgcactagagtacctgggcagctttgaccactatgcaacgtagaaacccctgacccattctggattttta

SEQ ID NO: 439364 - DNA, 120 bp, Artificial Sequence
  ENSG00000153707_48 (sequence is synthesized)
ctacaggcccttcaatatccatggagtctcttctgagccatacagggcacttgagaagtccttcttaacttctagctaacaactacttagtgggactattacacacaaaacaaattaaaa

SEQ ID NO: 439365 - DNA, 120 bp, Artificial Sequence
  ENSG00000153707_49 (sequence is synthesized)
acaaattattccaggtggaccaagaattcacagtttaataatctaacctgaaaaataatgaagagaatcctgactgatgaggcatctgaaggattttatttacagatacctcaaggattc

SEQ ID NO: 439366 - DNA, 120 bp, Artificial Sequence
  ENSG00000153707_50 (sequence is synthesized)
aaaatcaagggaagaagaaatcacagcaaagaaccaccatcttattcaggattgcttgaaaggtgcaaggagaaattgccagaatgctgcagttcagcacaagatatgtgctggtgtggc

SEQ ID NO: 439367 - DNA, 120 bp, Artificial Sequence
  ENSG00000153707_51 (sequence is synthesized)
ttctcacaatgaaacggactctgctttgacatcgccccttcccaccatactgctcataataacattttagggggaaaggggagggaatgtttaaaaagaaagtccttgatttagtttttt

SEQ ID NO: 439368 - DNA, 120 bp, Artificial Sequence
  ENSG00000153707_52 (sequence is synthesized)
agtattgtaaagatactgctgacctgtgcttcatttctaactgtgtaaacttttttttaacaaaatgtatcattcgataaagtgaattttaaaaaagttacataactcttcattttttta

SEQ ID NO: 439369 - DNA, 120 bp, Artificial Sequence
  ENSG00000153707_53 (sequence is synthesized)
tttccaaatcgtaggtttttttaagctgtagaactgttatctgtaatatcttgctgtagaaatatcaaatcatttgaaaatttgcacatttttgtgcaaaactcaatctacagtatcagt

SEQ ID NO: 439370 - DNA, 120 bp, Artificial Sequence
  ENSG00000153707_54 (sequence is synthesized)
ctcgtcagatatattaattttacacttcagttttgattggtgagaaagtacccattctcttcaaataatcaaagataattattattttgttttgtttttggaatcaacagggaggcgcaa

SEQ ID NO: 439371 - DNA, 120 bp, Artificial Sequence
  ENSG00000153707_55 (sequence is synthesized)
agtataaagttgctgctaacatatatacatatatatccatattttataagggtgtctatgtatatatagacagtgtgtccacacaaaaaatagatacagttatcagtcagtcagttcttc

SEQ ID NO: 439372 - DNA, 120 bp, Artificial Sequence
  ENSG00000153707_56 (sequence is synthesized)
catgatttagtttttttaaacgtagaaaagctattgtaaacatctctttccatttattcttaattttttgacatattggtatttctttaaagggaaatgaggaatgcacatcagtgattg

SEQ ID NO: 439373 - DNA, 120 bp, Artificial Sequence
  ENSG00000153707_57 (sequence is synthesized)
attgtcaaacctcaccccctgatttcctacctaatctacccccacctaaccaatcaatcacatccacaaattgttttgtttgtttgttagtcaggcttccaacaaagttcaatatttcta

SEQ ID NO: 439374 - DNA, 120 bp, Artificial Sequence
  ENSG00000153707_58 (sequence is synthesized)
acactctagtgcaataaaaattattattaaatagctaagaggtgtgcatgtgggaaaggtcagtgcatatccctttaggaggggagaatgttgtaatatatcagctatcgagttgtttaa

SEQ ID NO: 439375 - DNA, 120 bp, Artificial Sequence
  ENSG00000153707_59 (sequence is synthesized)
aaaaagtgtattcaatcgtatattgtctatagtatgtgctatgaaatttgcatttatgatatgtaacaggggcaaagccaaattcatgttactctgttcagtcagaaacattttgtggca

SEQ ID NO: 439376 - DNA, 120 bp, Artificial Sequence
  ENSG00000153707_60 (sequence is synthesized)
tacagcattcctgggaagtgctgtactttgtttcgttttggttttagttttgcatttagagtgccttataattgatgcctattttaatagcatttctttttagcttttggttcgtatttc

SEQ ID NO: 439377 - DNA, 120 bp, Artificial Sequence
  ENSG00000153707_61 (sequence is synthesized)
cattcactgttcgtatctgttactttctattaaagcattatctgtttaccacatgtacaaaaactctttgaataatatgcattcctagttttcagccaagtcggggatgttagtgattgt

SEQ ID NO: 439378 - DNA, 120 bp, Artificial Sequence
  ENSG00000153707_62 (sequence is synthesized)
accagcccaaagcacttggataatcagggcccttcttccttttataatcaatcatcaacatcagaaaaagctacttgttttatttatattcccttccaaatccgctctggaacatgcagt

SEQ ID NO: 439379 - DNA, 120 bp, Artificial Sequence
  ENSG00000153707_63 (sequence is synthesized)
aactgcaccaaacttattttagtaacaaatatcattggcaactttggaatatatttgatattccattaggatttttctaaaaggggaaataaactatatatatatatgtatcttaccccc

SEQ ID NO: 439380 - DNA, 120 bp, Artificial Sequence
  ENSG00000153707_64 (sequence is synthesized)
aattcttccaacagaatttctataggaagccatggatgatggcataagtttgccacatattacatgattttaaataatcctcaaaatacccaaggaactcttaaagagttttggtatgag

SEQ ID NO: 439381 - DNA, 120 bp, Artificial Sequence
  ENSG00000153707_65 (sequence is synthesized)
tatactactttggtttaattttagcttcatggatgttctgcatggaaggatttttgttttccacattttcccattgctagcagagtgaaatccaagagaccaaacatttgcaagcattgt

SEQ ID NO: 439382 - DNA, 120 bp, Artificial Sequence
  ENSG00000153707_66 (sequence is synthesized)
aacaaagaaaaagaaaaaaaagaaaatatatataatactaaaaaaaagtatctagaaggctacctcagaatgagactctctaacctacatcagaaccagagaagaatgtgcactatgtgg

SEQ ID NO: 439383 - DNA, 120 bp, Artificial Sequence
  ENSG00000153707_67 (sequence is synthesized)
gaagaatgtgcactatgtgggtctgttatcattattttcttttagtttgtatctttttggagatttatccaagtgccagattactcagtgctataattttcttttagttaaacaaagggg

SEQ ID NO: 439384 - DNA, 120 bp, Artificial Sequence
  ENSG00000153707_68 (sequence is synthesized)
gtcagacagacattgcatcatccagacatgccttgttggacatgtagaatccgatggagcactgcacaccagaatgattggccaatgagcagcttctctccctgaaacaataactgccca

SEQ ID NO: 439385 - DNA, 120 bp, Artificial Sequence
  ENSG00000153707_69 (sequence is synthesized)
tttggcaaagggaaagatgacaataatcagaagaagaaaatgaatgggatgcataccatagacgaacgaggcggagactattgcgggaatcttactgttcaggagctgttcctagaacta

SEQ ID NO: 439386 - DNA, 120 bp, Artificial Sequence
  ENSG00000153707_70 (sequence is synthesized)
actcccttactgtcattgatgtgcattccactctgtgcttttctgtacaaccattcaagttttaatttcccaggtgaaccatctttatctgccattaccacaagctttcaagtttccagt

SEQ ID NO: 439387 - DNA, 120 bp, Artificial Sequence
  ENSG00000153707_71 (sequence is synthesized)
tattttcatcatcataaccagtacggtgctattatttacctatgtacgtgtagttatgtataattttgtaattagttacaatggtaaaaaaaatcaaaatatataaaaagtgatttgtac

SEQ ID NO: 439388 - DNA, 120 bp, Artificial Sequence
  ENSG00000153707_72 (sequence is synthesized)
agaactttattttagctcttttttaaaaatgatttgcatggttagaaaacggcgaggacagccaggggagggaagggcctctagggaactttgcactttctatacctttgtactatgcac

SEQ ID NO: 439389 - DNA, 120 bp, Artificial Sequence
  ENSG00000153707_73 (sequence is synthesized)
tgccctattgattctacacccaataatgatattacttgaacccatctgtaagaaactgcttcggaaattcatttgtgtgtatgtaaataacacaacatagaaacaggaagggaaaaaagt

SEQ ID NO: 439390 - DNA, 120 bp, Artificial Sequence
  ENSG00000153707_74 (sequence is synthesized)
ctgcagtaatgcacgtattttttttctttcctgtttattttcggttttgctttaagtccttttatttttaattccctttttgtttttctttttgggttttggttccttttgggtttatgg

SEQ ID NO: 439391 - DNA, 120 bp, Artificial Sequence
  ENSG00000153707_75 (sequence is synthesized)
gtgccctgatactccagcagagatcagaaggctacagatccattctatccatccgttatgtggctttgccatcccagcttggagtgtctttacaaagataataacagttgtgttctttgc

SEQ ID NO: 439392 - DNA, 120 bp, Artificial Sequence
  ENSG00000153707_76 (sequence is synthesized)
tctcgttttggatgcatagactgaaaaattaaaacaaataacttgtaaaatggcttgttaaaaaatacaattacctctaattagtagtacgcgtaaatgttttacagaatgaaaggcgtg

SEQ ID NO: 439393 - DNA, 120 bp, Artificial Sequence
  ENSG00000153707_77 (sequence is synthesized)
ctttttattttcttacttcgttacattggtggcgaaagaagtctgtatgaaaatcagttctttgctgacacaagttccatttgttacaaatgaattctaataaaaatgtcagtgttatgc

SEQ ID NO: 439394 - DNA, 120 bp, Artificial Sequence
  ENSG00000153707_78 (sequence is synthesized)
ggaaatcttgaggagtctgatacttttcatcctccagctataaaatcatcttgtagggggaagctgtacattggtggaaaataaaaggcaagcagttcctggcccgtgatattccagtta

SEQ ID NO: 439395 - DNA, 120 bp, Artificial Sequence
  ENSG00000153707_79 (sequence is synthesized)
gaggtgtctgactgacagcatgttggcaccgagggaagcgatgggcttcggctccaggtttctgtcctgagaccacagcagaatgtgccttggacaaaggcttggactccttgatcttct

SEQ ID NO: 439396 - DNA, 120 bp, Artificial Sequence
  ENSG00000153707_80 (sequence is synthesized)
ggtaacttcaaaaatctggtctcagggtggtgaactttttcttcgaattcctaacctgtgagcttacgatgatggtgcctgtccattaactgaacaactgtggttttgaacttcttgagg

SEQ ID NO: 439397 - DNA, 120 bp, Artificial Sequence
  ENSG00000153707_81 (sequence is synthesized)
gggattaaattggccgcccggaggcggcggcgcggccgtggcggggcgcgaaggcgctggaggaaagtgttggcggcggcgcgggaggcggtggcggcggctgcccggggccaacatgac

SEQ ID NO: 439398 - DNA, 120 bp, Artificial Sequence
  ENSG00000153707_82 (sequence is synthesized)
tgtgtcctccctctctagccaaaccaccactcagtccatatatgataataactctctcccacgatccgctcgaaaaggtatggctagccatcctccaatacccatcttggaacttgcaga

SEQ ID NO: 439399 - DNA, 120 bp, Artificial Sequence
  ENSG00000153707_83 (sequence is synthesized)
aaagtatgtaaaacttactacgtcttggatgccttagatttcagttatagaatgtcaagcaagtctggctgacagcaccccaatgtcctcaggtaaggaaaacacaatagagttggctga

SEQ ID NO: 439400 - DNA, 120 bp, Artificial Sequence
  ENSG00000153707_84 (sequence is synthesized)
attggagagaaaggaaagatctctgtgagaatggggtattaaaatgaatgctctaaacaggtaggaaaatcatacttctctctctgatcaaagtagacagcatctagcataagcccctat

SEQ ID NO: 439401 - DNA, 120 bp, Artificial Sequence
  ENSG00000153707_85 (sequence is synthesized)
cggcgccgccagccagcctcggcggggagagtgcagtttattctgggcctgtgtggaatagaaagacaattctttatttgactggtaggaaagaaaagagaagactcctcagggtttcca

SEQ ID NO: 439402 - DNA, 120 bp, Artificial Sequence
  ENSG00000153707_86 (sequence is synthesized)
ttcgaattcctaacctgtgagcttacgaaaaagggagcatgcctgtcttattctcagtgcctcatgggaaataaaagattgggagatgatagctacctgatgatggtgcctgtccattaa

SEQ ID NO: 439403 - DNA, 120 bp, Artificial Sequence
  ENSG00000153707_87 (sequence is synthesized)
attaagcagttacgatcaggtactgatttttctccctcttctctttctctgttacttaatgggtggtccatgtttgtgatgtcatagcctgtttcagagtctgtctttctccttttctct

SEQ ID NO: 439404 - DNA, 120 bp, Artificial Sequence
  ENSG00000153707_88 (sequence is synthesized)
gtgtgttttgcagcttctgtttaatccacattgctcactgctgtgactgtatttttggtaattttttaatttactgctttttcgcagtatttgatggatccattttctcctctttctttc

SEQ ID NO: 439405 - DNA, 120 bp, Artificial Sequence
  ENSG00000153707_89 (sequence is synthesized)
ttctttctctgttttcttttgaaacaaatttatttcaacattggacttcattcagaacttgcaaggagatccaatggttgtatccattaaaaaataaaatgttcatattaaaccctaaaa

SEQ ID NO: 439406 - DNA, 120 bp, Artificial Sequence
  ENSG00000153714_0 (sequence is synthesized)
aatgacttggatcaaacagcctaaatgggaagaaggacatttttgctgcatcaaggaagccgttaaactcctgctaagctaactagctcttttttatgggtccatgcacacgaccgaact

SEQ ID NO: 439407 - DNA, 120 bp, Artificial Sequence
  ENSG00000153714_1 (sequence is synthesized)
cctctttcactgaccagagattatttctgacaacccaggatatcccgaaagcttggaggcatatggctggaaaatgaaacgacccaggacatcgtttctggctgcatcattattttgtgt

SEQ ID NO: 439408 - DNA, 120 bp, Artificial Sequence
  ENSG00000153714_2 (sequence is synthesized)
cgcgtagtaccagatgggcagtcagtgagcggcgcagggatgtgaacggacggttttataatgtgaaaattttcccttggtaaagctaaaacagatttaatttccctctcttttctttca

SEQ ID NO: 439409 - DNA, 120 bp, Artificial Sequence
  ENSG00000153714_3 (sequence is synthesized)
ctacttccccctctttattccccctctgtctgcaatatcagtgaactcaactttgcagtgaggtggccaaaaagagagagaatgaggagatcttgatcatcttagtgtcggaggagtcgc

SEQ ID NO: 439410 - DNA, 120 bp, Artificial Sequence
  ENSG00000153714_4 (sequence is synthesized)
agcggactgggaactgcagctgcgaccccccgcgtcctgtgcggatttcagggctgataccgcataggcggttatggaaaggacggtacaccggagcggcggaggatagagaccctggcc

SEQ ID NO: 439411 - DNA, 120 bp, Artificial Sequence
  ENSG00000153714_5 (sequence is synthesized)
cccggagaggtctgctgatttcgcagcagccttcgaagccgtggctgcctttcatctgctgcgttttattactattatcgccgttccggaaaagtcatggaagacagcccgctgccagac

SEQ ID NO: 439412 - DNA, 120 bp, Artificial Sequence
  ENSG00000153714_6 (sequence is synthesized)
ctcagagacatcgagctgaagctggggcgcaaagtacccgagagtctagtgcgctctctccgtggggaggagccggttcccagggaaagggacagggacccctgcggggggagcggtggt

SEQ ID NO: 439413 - DNA, 120 bp, Artificial Sequence
  ENSG00000153714_7 (sequence is synthesized)
ggtggcggcggcggcggcggctgcagtagcagcagcagctactgcagcttccctccctccttgtcgtcctcctcttcgtcctccccaacctctggctccccacgaggtagccactctagc

SEQ ID NO: 439414 - DNA, 120 bp, Artificial Sequence
  ENSG00000153714_8 (sequence is synthesized)
gccctggagaggctagaaaccaagcttcacctcctcaggcaagagatggttaacctcagagccacagacgtcaggctcatgcgccagttgcttgtaatcaatgagagcatcgagtccatc

SEQ ID NO: 439415 - DNA, 120 bp, Artificial Sequence
  ENSG00000153714_9 (sequence is synthesized)
aagtggatgatcgaagaaaaagccaccattaccagcagaggcagcagcctcagtggcagcctgtgcagtttgttggagagtcagagcacctccttacgtggcagctacaacagcctacac

SEQ ID NO: 439416 - DNA, 120 bp, Artificial Sequence
  ENSG00000153714_10 (sequence is synthesized)
gatggcagtgatgggctggatggcatttccgtgggaagttatctggacacgttggcggatgatgtcccaggccatcagaccccttcagacttggaccaattcagtgacagctccctcata

SEQ ID NO: 439417 - DNA, 120 bp, Artificial Sequence
  ENSG00000153714_11 (sequence is synthesized)
aatactactgctttggctagtgacagttttttgcatgggactggtgtgcaatgaacttgtatttatccttcttctccgctgctatatttttggtgtgatttttattttaataagatgacc

SEQ ID NO: 439418 - DNA, 120 bp, Artificial Sequence
  ENSG00000153714_12 (sequence is synthesized)
tttttaaaagaagctgattttgaaactgcttaatggtattgctgttgctcctaatacttctcatctgagctgatttatttttctctgttacatctctattttttatttattacaatgatt

SEQ ID NO: 439419 - DNA, 120 bp, Artificial Sequence
  ENSG00000153714_13 (sequence is synthesized)
ttctcccttcttttacagtagcacaaacaaagtagggggaaaagaataagcaataattatgtttttgcttttgttttcagagcaatgggtcagggattacaagaaaaactttgctaaatt

SEQ ID NO: 439420 - DNA, 120 bp, Artificial Sequence
  ENSG00000153714_14 (sequence is synthesized)
ttacaataaaccaaagtctgataacagttaatgttgctgcttgcgtccttaaatgacttaaggtttcatcttccagaagatattgagatatattactgtttgcatatcaggttgaacaaa

SEQ ID NO: 439421 - DNA, 120 bp, Artificial Sequence
  ENSG00000153714_15 (sequence is synthesized)
atgcttggaacaaaattaagcattatttctagaccacaacattctagtgtataatcaaccatactgttagtcacacacgcccacatgacaatcatctgaaagtccccaactatacacatt

SEQ ID NO: 439422 - DNA, 120 bp, Artificial Sequence
  ENSG00000153714_16 (sequence is synthesized)
ctgttcaaccaactcacccttgtgttggtactttagattaacattttgtcatcagtgattctaactcaaatcatatgtttatttgtgtaataaaatgtattattctcccaaatttcaagg

SEQ ID NO: 439423 - DNA, 120 bp, Artificial Sequence
  ENSG00000153714_17 (sequence is synthesized)
aataattgagattaagtatggaggccattcaaggcaaaaatgtcctaaatttaattgcattttgagattttgttggcatttacttgtatgtattttgtgattctgataggatgtataaat

SEQ ID NO: 439424 - DNA, 120 bp, Artificial Sequence
  ENSG00000153714_18 (sequence is synthesized)
acttagatgcatacaagccgatggatagaaagacagataaatatcccgatagcctactatcagcatcctactactgcttccctaaagcagaattgttattcatttaagaagtctaatatg

SEQ ID NO: 439425 - DNA, 120 bp, Artificial Sequence
  ENSG00000153714_19 (sequence is synthesized)
atatacattcatcctagtataaataaataatctctaagttttctgaaatggaatatttaacgcacatagacagtggatatttactttaaatataatgttattaatcctctgcatttcttt

SEQ ID NO: 439426 - DNA, 120 bp, Artificial Sequence
  ENSG00000153714_20 (sequence is synthesized)
tatcttgataactcctagtgagggaatctaattaagatttcatgctgttctttgtaatgataaatgtttccggactaaacactctataatacaaatcaaaaaatcttccttcttataact

SEQ ID NO: 439427 - DNA, 120 bp, Artificial Sequence
  ENSG00000153714_21 (sequence is synthesized)
gagaaatgtttcacccaaatttcctttgttattatatatttactacacatgttgaatttattattgtttatttccaaggcatgtattattcaatttctaattaaaatatatcagggctta

SEQ ID NO: 439428 - DNA, 120 bp, Artificial Sequence
  ENSG00000153714_22 (sequence is synthesized)
acaacccttaggtacataatggagaagctggaaagtggaagtcatcttgatgagtttgcaaaatagatgaaaagataaaatggaaaagatgacaaaccaacaggtcaggggatgcctgat

SEQ ID NO: 439429 - DNA, 120 bp, Artificial Sequence
  ENSG00000153714_23 (sequence is synthesized)
accgtatcacaaagatcagacatacgtgtggagactaacaggtaaaactattttccacaagaaaatttcttgtacaaggaattaagaatgttgctaactctgcaaattaaggacttaata

SEQ ID NO: 439430 - DNA, 120 bp, Artificial Sequence
  ENSG00000153714_24 (sequence is synthesized)
tgagggacgaagacatcaaggagatgaggaaattttattcctaaccatgtcttctgtaattttacccatggaatgttaatatattcacttaatctaataaataaatcttgttgaaacata

SEQ ID NO: 439431 - DNA, 120 bp, Artificial Sequence
  ENSG00000153721_0 (sequence is synthesized)
attcggtttgcagcaaccggagctgaaactttgcaacccgagcgcgcacgctctgcgctcggccctgccagggcggcacgggagggcggcgcaggaggtgggacctgcgccgggaaggct

SEQ ID NO: 439432 - DNA, 120 bp, Artificial Sequence
  ENSG00000153721_1 (sequence is synthesized)
ccgggacgccagcgcacgcggagcggggaccccggagagccagcaggcgagaagaccggccgagggagagccgatcgcgcctcgagagatccgaggaagtggtcgcgggccgggaggctc

SEQ ID NO: 439433 - DNA, 120 bp, Artificial Sequence
  ENSG00000153721_2 (sequence is synthesized)
ccgtgccgagccgaggccaggggtctggggtcgcagcccggcgtgcctgcagctgccgtcgctcgggagcagcagctgtgcccgggatcccggcggcggcgggggaaggaggagctgcag

SEQ ID NO: 439434 - DNA, 120 bp, Artificial Sequence
  ENSG00000153721_3 (sequence is synthesized)
ctggactgtggcagctggagggagagggccgggctcccctggcggagccgcgctgggacgactggctgaccgcggccatgcagtcttgacggagtcgctcgggcgcaggggagcagccgc

SEQ ID NO: 439435 - DNA, 120 bp, Artificial Sequence
  ENSG00000153721_4 (sequence is synthesized)
gggcgcgccctcccgggaaggggcaccggagcgcaggcagcagcactttatctgcgactctccagcccagcgagaggcgaagcggtttaccatggaacccgtgaccaagtggagccccaa

SEQ ID NO: 439436 - DNA, 120 bp, Artificial Sequence
  ENSG00000153721_5 (sequence is synthesized)
acaagtggtggactggactagagggttggatgactgcctgcaacaatatgtccacaagtttgaacgagagaagatcaacggcgagcagctgctgcagatttcccatcaggacctggagga

SEQ ID NO: 439437 - DNA, 120 bp, Artificial Sequence
  ENSG00000153721_6 (sequence is synthesized)
gctgggggtcacacggattggacaccaggagcttgtgttggaggctgtggaccttctctgtgcactgaattatggcctcgaaactgataacatgaagaacttggttctgaaactgagagc

SEQ ID NO: 439438 - DNA, 120 bp, Artificial Sequence
  ENSG00000153721_7 (sequence is synthesized)
atcttcccacaatttacagaattacataagtagccgacggaaaagtcccgcttacgatggcaacacctcccgcaaggcccccaatgagttcctgacctcggtggtggagctcatcggcgc

SEQ ID NO: 439439 - DNA, 120 bp, Artificial Sequence
  ENSG00000153721_8 (sequence is synthesized)
cgccaaggccctgctggcgtggctggaccgggctccgtttacagggatcactgatttctcagtcacgaagaacaaaattatccagctttgcttggacctgaccactacagtccagaagga

SEQ ID NO: 439440 - DNA, 120 bp, Artificial Sequence
  ENSG00000153721_9 (sequence is synthesized)
ttgctttgtagcggaaatggaggataaagttttaactgtggtcaaggttttaaatggcatctgtgacaaaacaatccgatctaccacagatcctgtgatgagccagtgtgcatgtctgga

SEQ ID NO: 439441 - DNA, 120 bp, Artificial Sequence
  ENSG00000153721_10 (sequence is synthesized)
ggaagttcacttaccaaacattaaacctggggaaggcctgggcatgtacatcaaatcaacctatgatgggttacacgtgattactggaaccacagaaaattctcctgcagacagatctca

SEQ ID NO: 439442 - DNA, 120 bp, Artificial Sequence
  ENSG00000153721_11 (sequence is synthesized)
gaagattcatgctggtgacgaagtcattcaagttaatcagcaaactgtggtgggatggcagctgaaaaatctggtgaagaaattgagagagaatcccaccggagttgtgttactgcttaa

SEQ ID NO: 439443 - DNA, 120 bp, Artificial Sequence
  ENSG00000153721_12 (sequence is synthesized)
gaagcgccccaccgggtctttcaactttactcctgctcccctgaaaaacctacggtggaagccacctcttgtacagacctcacctccacccgcgacaacccagtcccctgaaagcactat

SEQ ID NO: 439444 - DNA, 120 bp, Artificial Sequence
  ENSG00000153721_13 (sequence is synthesized)
ggatacctcactgaagaaggagaagtcagccatcctggatctttatattcctcctccgcctgctgttccctactctccccgggatgagaatggcagttttgtttatggagggtccagtaa

SEQ ID NO: 439445 - DNA, 120 bp, Artificial Sequence
  ENSG00000153721_14 (sequence is synthesized)
gtgcaaacaaccattgcctggtcctaagggttcagagtccccgaattccttcttggaccaggaaagccggagacgaagattcaccattgcagactcggatcagttgcctgggtactcggt

SEQ ID NO: 439446 - DNA, 120 bp, Artificial Sequence
  ENSG00000153721_15 (sequence is synthesized)
ggaaaccaacattctgcccacaaaaatgagagagaaaacaccatcttatggcaagccacggcctttgtccatgcctgctgatgggaactggatggggattgtggacccttttgccagacc

SEQ ID NO: 439447 - DNA, 120 bp, Artificial Sequence
  ENSG00000153721_16 (sequence is synthesized)
tcgaggtcatggcaggaaaggggaggatgccctttgccggtatttcagtaacgagcggattcctccgatcattgaagagagctcctctcccccataccggttctccagacccacgaccga

SEQ ID NO: 439448 - DNA, 120 bp, Artificial Sequence
  ENSG00000153721_17 (sequence is synthesized)
gcggcatctggtccggggtgcggactacatccgaggaagcaggtgctacatcaactcagatctccacagcagcgccacgattccattccaggaggaagggaccaaaaagaaatctggctc

SEQ ID NO: 439449 - DNA, 120 bp, Artificial Sequence
  ENSG00000153721_18 (sequence is synthesized)
ctcagctacgaagtcctcgtccacagaaccgtccctcctggtcagctggtttacgcgcctcaaactgttgactcactgagagggaccctgctcaggccacctgcctggctcctgccccaa

SEQ ID NO: 439450 - DNA, 120 bp, Artificial Sequence
  ENSG00000153721_19 (sequence is synthesized)
gtgccttgcttttacagtggacagcctcttctcgtttcagcctcagtattatgtagggaccttatgcaatttctttttcttttgaaaagttatctactgcccttcttggaagtttgcagg

SEQ ID NO: 439451 - DNA, 120 bp, Artificial Sequence
  ENSG00000153721_20 (sequence is synthesized)
attggatgggaacaaattcagaggatcttaggtgctggcttgtggagacaaaaggagggaaatgggtagagcctgtttgtcttgcttccccagagatagaatgtgaagacacgcgctaga

SEQ ID NO: 439452 - DNA, 120 bp, Artificial Sequence
  ENSG00000153721_21 (sequence is synthesized)
aatcgcagtcctggccagagacgttatggtcattgtgagggactggtggcattgttcctttttgaggggctggggggactcaaattggtggctgttttcacacagatgtgttggtttgtg

SEQ ID NO: 439453 - DNA, 120 bp, Artificial Sequence
  ENSG00000153721_22 (sequence is synthesized)
gtccaacttctttatctgaaaaagccagtgagaaaacatttttgatttgatttttctaaactatctaccatattttaagtgtagcagctttgactttgcaataacgtggcaagtatctga

SEQ ID NO: 439454 - DNA, 120 bp, Artificial Sequence
  ENSG00000153721_23 (sequence is synthesized)
tttctcctttgaggcagaggtttaagtgtaggcctgttacacttgtttgatacctttttcatgacagtctcagtatagatcagttggtacagaaatacatgaacacattttgatagggct

SEQ ID NO: 439455 - DNA, 120 bp, Artificial Sequence
  ENSG00000153721_24 (sequence is synthesized)
tatttcacacaaagaagtttatggttatttgtgtggggtggtgttgttatatattattgtctttaagggaaaagaagctataagattcgctgacagccaaagtatcatttagaaaagtga

SEQ ID NO: 439456 - DNA, 120 bp, Artificial Sequence
  ENSG00000153721_25 (sequence is synthesized)
agcaacaagatttaggttgatgaaagatacatgagtttgcattttgacctgttcagtgtctgtcttccagcacggtgtgtacacttcttcaaaattgtacacagtttgctaattagaaat

SEQ ID NO: 439457 - DNA, 120 bp, Artificial Sequence
  ENSG00000153721_26 (sequence is synthesized)
atcttggaaagcctcatggtcactaattttcaactagcatcaggtattttgaaaacgtgtgtctggatattaactcttgtttaaactgaatgtatgatattttgttagaatggaaaagta

SEQ ID NO: 439458 - DNA, 120 bp, Artificial Sequence
  ENSG00000153721_27 (sequence is synthesized)
ctatcttgttaatttaagtattttaaatatagttgtatatttttcttactcttagtcacctgtaattgaaatatttctgttttgcgtcatacacgaagctagtgaaaaagaaagtgcaag

SEQ ID NO: 439459 - DNA, 120 bp, Artificial Sequence
  ENSG00000153721_28 (sequence is synthesized)
gcattttcagatgagcaagtgactatcgtggctgttgccagcagggcagtattgttaaaaaaaatcaaaataaaccctcccaagcattttgggattttatggattagaaatggaagaaca

SEQ ID NO: 439460 - DNA, 120 bp, Artificial Sequence
  ENSG00000153721_29 (sequence is synthesized)
ggagaagcatatgcaaagtgaaattgcacgaggggaattttctgaggtatcttcctaggcagagccgaaatctcctactccaaaatgccctttctcataccaccggaattgttgagtttg

SEQ ID NO: 439461 - DNA, 120 bp, Artificial Sequence
  ENSG00000153721_30 (sequence is synthesized)
ctgaactgcctggaattcagcccatgaaaatcactggagttaggaaacatcttccctttaaaatgcttctggtgtggttaaaggaactagcaaccactcatgtataattactgtgactga

SEQ ID NO: 439462 - DNA, 60 bp, Artificial Sequence
  ENSG00000153721_31 (sequence is synthesized)
aaggaactagcaaccactcatgtataattactgtgactgaattcagtcaggctggttttt

SEQ ID NO: 439463 - DNA, 76 bp, Artificial Sequence
  ENSG00000153721_32 (sequence is synthesized)
agtctggctgttttcttctctacctctaagacaactgccatgaagatctggtatttcggcctggcgcagtggctca

SEQ ID NO: 439464 - DNA, 120 bp, Artificial Sequence
  ENSG00000153721_33 (sequence is synthesized)
tctaagacaactgccatgaagatctggtatttcggcctggcgcagtggctcatgcctgtaattccagaactttggggggccaaggtgggtggattacctggggtcaggagttcaagacca

SEQ ID NO: 439465 - DNA, 120 bp, Artificial Sequence
  ENSG00000153721_34 (sequence is synthesized)
cagaaggagactctgtctcaaaaaaaaaacaaaaagaaaaagatctggtatttcatggagacatggagacccaagggtgtttggcagatggagagaagaggcttgcagtgtgtgaccaca

SEQ ID NO: 439466 - DNA, 120 bp, Artificial Sequence
  ENSG00000153721_35 (sequence is synthesized)
cagatggagagaagaggcttgcagtgtgtgaccacagggtgttcaacacactaggagggtggggtgtgggctggggaggtctcgtgtagggcactggtgatgaggagggagctgtgtacg

SEQ ID NO: 439467 - DNA, 120 bp, Artificial Sequence
  ENSG00000153721_36 (sequence is synthesized)
aggggcgagccagccctgcctgttttactcttgtcttgagctggctttatgcccaggaagtgggtggcaacatctcctcttactccccagattgtggggagaactctaagagctgtagtt

SEQ ID NO: 439468 - DNA, 120 bp, Artificial Sequence
  ENSG00000153721_37 (sequence is synthesized)
ccactggatgatgagttaaatcactctggaggccttagctggctggtgagctctttttctgtggggaaaatgccacttgtgaattgaacagccatcctttaagtgaatattcggcagtca

SEQ ID NO: 439469 - DNA, 120 bp, Artificial Sequence
  ENSG00000153721_38 (sequence is synthesized)
gtcttcattataggcagtggccaaccagattggtgcttttcagcctttgttccctggagtcccaggacccgcgagagaagttcctggctcctctacttgcagtcaccctccacagcttca

SEQ ID NO: 439470 - DNA, 120 bp, Artificial Sequence
  ENSG00000153721_39 (sequence is synthesized)
tctttctttttatttgaggttttctcctgaattgtgtttgaaaaatatattgctgctaaaaaaaaaaaacctttgtaaacctctactatggacatacataaataatagtttaatatggat

SEQ ID NO: 439471 - DNA, 120 bp, Artificial Sequence
  ENSG00000153721_40 (sequence is synthesized)
ttcttagaaattaatggaaactgcttgcctcagtagtaatccaggtttaattgtggacgtgtgttcacatatgaagttgcttgatgatgctttttgacaggattctttatttttatttct

SEQ ID NO: 439472 - DNA, 80 bp, Artificial Sequence
  ENSG00000153721_41 (sequence is synthesized)
tgatgctttttgacaggattctttatttttatttctttaaaaaaaatttttttttttttctgagacagattcaactcact

SEQ ID NO: 439473 - DNA, 120 bp, Artificial Sequence
  ENSG00000153721_42 (sequence is synthesized)
ggatactttacaagagtgattgttaaaactctcccagacacaactcaacacctacccctattataatattttatagcatcacttttcaatcttcaaatgaaaatcatggatgatgaagct

SEQ ID NO: 439474 - DNA, 120 bp, Artificial Sequence
  ENSG00000153721_43 (sequence is synthesized)
taccttcactcataaaaacatcactccatttactattctgaaatgaaactagcaggtaatataactagcctctaaaacatacccatcagtgacgttctaactgaaacagataagatattt

SEQ ID NO: 439475 - DNA, 120 bp, Artificial Sequence
  ENSG00000153721_44 (sequence is synthesized)
tataatgaaataattattttcatatgtacatattctagcatggttatattacaagatgtaattaaactactaagcagggcacatactttgtatgtgtgtgtataaatataaatatgtgaa

SEQ ID NO: 439476 - DNA, 120 bp, Artificial Sequence
  ENSG00000153721_45 (sequence is synthesized)
aaatcaccatgaatgtggtagttaccaattcagacctgctgcattggcagttcaataccaggaaaggggtcgatgtcagcagtatgattttctaaaatgtggccaattctttagataaag

SEQ ID NO: 439477 - DNA, 120 bp, Artificial Sequence
  ENSG00000153721_46 (sequence is synthesized)
ttctaggcatacctagtctgtaatggcttcactcatatagtgcttgctgtgtgcctggcattgttctaatacctttctaataaatctatgaggtgagtactgctgttagtcccgttttgc

SEQ ID NO: 439478 - DNA, 120 bp, Artificial Sequence
  ENSG00000153721_47 (sequence is synthesized)
atatgagggagttacccaggttatgtgctagtcatcctggttatgtgctaataatggcagagctgggattaaaatgaaagcagcctggctctggctttcttgctcataatcactcagtat

SEQ ID NO: 439479 - DNA, 120 bp, Artificial Sequence
  ENSG00000153721_48 (sequence is synthesized)
ataggcttccttccatttatagaattctctcattgcattcttgaaaaatccaaagcatattaaaactgggctgaaaattctgtgtgtttatatataaaatgaaatgagatcatagatttg

SEQ ID NO: 439480 - DNA, 120 bp, Artificial Sequence
  ENSG00000153721_49 (sequence is synthesized)
ttattgtaaactgagttcccatctatatgaatattgggcggggcaattgaaagttgtgttgatgagtcagctctttgttgtgagggctgtaagctgcagggcttgtgtatcacgcatgct

SEQ ID NO: 439481 - DNA, 120 bp, Artificial Sequence
  ENSG00000153721_50 (sequence is synthesized)
ccaacaggttaaatctcagtagtggccgcccatcagtggcacccctaacatgctcacatttccagaactgcctcttgggcggaggtgggggagggtaccatctctttcagaacaagtatt

SEQ ID NO: 439482 - DNA, 120 bp, Artificial Sequence
  ENSG00000153721_51 (sequence is synthesized)
ttaaaagaaatcctgtatcctccttaagtagtatttcagtctatatatttgtccatttcctatctctgcttctctctcagttctttccccaccaaacctgaaatttcagaatctattttg

SEQ ID NO: 439483 - DNA, 120 bp, Artificial Sequence
  ENSG00000153721_52 (sequence is synthesized)
tgggctttctttttttaattttttccctggaagaccatgaacattcctctttaggttgttagtattgcagcaaaccctgaggtattgacacaaaacttttcatccgccaaagagctcgag

SEQ ID NO: 439484 - DNA, 120 bp, Artificial Sequence
  ENSG00000153721_53 (sequence is synthesized)
taagtaaatctgtctgacatttgaatgtcaccagcaaagcatgagactcatgctgccttttgccaccataggcatgaatggtatggagaagtaggcctgacttgttttcttctattgtag

SEQ ID NO: 439485 - DNA, 120 bp, Artificial Sequence
  ENSG00000153721_54 (sequence is synthesized)
atgagattagttttgtagaccattagttcacattttgctcctacccttgtgcataaaatcactgcatcatttccgtggggatgagactactgcaagctacttccttggagattctgtgga

SEQ ID NO: 439486 - DNA, 120 bp, Artificial Sequence
  ENSG00000153721_55 (sequence is synthesized)
agatggacatcttaaaagtaaactacttttggtatgactgctcattggcttggccagtgatacttgatgttatttattttgtgagttactctgtgtcttaatcagctcaggctgcaataa

SEQ ID NO: 439487 - DNA, 87 bp, Artificial Sequence
  ENSG00000153721_56 (sequence is synthesized)
gtgagttactctgtgtcttaatcagctcaggctgcaataacaaaataccatacactgggtagcttaaatgacagaaatttctcacca

SEQ ID NO: 439488 - DNA, 120 bp, Artificial Sequence
  ENSG00000153721_57 (sequence is synthesized)
tcatcttcccattgcatccttacatggcagagagagagaaaggaagcaagcaagctctcctttcccttcttgtgagggcgctaatattcatgagggctccaccctcaggacctactcact

SEQ ID NO: 439489 - DNA, 120 bp, Artificial Sequence
  ENSG00000153721_58 (sequence is synthesized)
tcccaaaggcccacttatggtattagctccgcctcctaataccattgctttggagattagggtttcaacagatgaattttgggaggacataaacatgcaatccatagcactctgcttttg

SEQ ID NO: 439490 - DNA, 120 bp, Artificial Sequence
  ENSG00000153721_59 (sequence is synthesized)
tatatttttcaaacctttcatgctaatcagctggaaggtgaatattttaaaatctattttaaaactggcttaaggagcacacaaaagctgatttctgatgtttcttccaatacgtggaaa

SEQ ID NO: 439491 - DNA, 120 bp, Artificial Sequence
  ENSG00000153721_60 (sequence is synthesized)
attttgcatgatgtattaacccctagttagggtccctcaaccccagttgaggacctcaacacacatttggtaatacctaagggaatttaaatatatattttgtagcctatagcatatgga

SEQ ID NO: 439492 - DNA, 120 bp, Artificial Sequence
  ENSG00000153721_61 (sequence is synthesized)
attagaaaaaaattagtctctttactgtaaaatttaccttttaattatttggaaatttcacaattgccaagtttcaacttaaagtttctatttatttggggccagaattattgccagaag

SEQ ID NO: 439493 - DNA, 120 bp, Artificial Sequence
  ENSG00000153721_62 (sequence is synthesized)
tgtgctaatttgacaaagggtaccttttacataagtaaaggaaaaagtgattacatcatgttcagacctgctagagggccttgtttttcctctagttttaggggtgtggagtctgtccca

SEQ ID NO: 439494 - DNA, 120 bp, Artificial Sequence
  ENSG00000153721_63 (sequence is synthesized)
aaccctatatatgtgtgcatttgtgtatgtaaaagacaaattttttatactcaaaagtttgtcttaaataatggcctatggcctactgatttggatagaggagagaaattttgtctataa

SEQ ID NO: 439495 - DNA, 120 bp, Artificial Sequence
  ENSG00000153721_64 (sequence is synthesized)
gcaacaaaaaatgctacacagccaggagactgtcacacacagtttttcagaacctttgggccacatactgcactccccttccatagaaatacacatggggtcagtgattaaggactcaat

SEQ ID NO: 439496 - DNA, 120 bp, Artificial Sequence
  ENSG00000153721_65 (sequence is synthesized)
tctggttgtgacttggccatccataggcatattctaaagttctatggcaacctttatgaagctcgtcttctgagttgatcacctgttcatgcgctgcccatttacaacatacctcaggga

SEQ ID NO: 439497 - DNA, 120 bp, Artificial Sequence
  ENSG00000153721_66 (sequence is synthesized)
ttaaaacgtgaggctacacctaaggaaagtcggtcctaatcctgcgtttcctcctgcatgtcactgaccattggagtcactgctctctgaggaagacagtttacagcctgagcattcatg

SEQ ID NO: 439498 - DNA, 120 bp, Artificial Sequence
  ENSG00000153721_67 (sequence is synthesized)
tcacgctcacagccaacctgttacttgctggcctcctttaccaagctccttgtttcatgaagaagttgtgaaactgaagttggaggaaaaaaattaagaaataaacctcaaaggtattta

SEQ ID NO: 439499 - DNA, 120 bp, Artificial Sequence
  ENSG00000153721_68 (sequence is synthesized)
aaagggcagtagagtaattactcctcacacccagggataaggatattctcatcattttctctcctcttgcctggagcataaacattcagatgtttgtgaagaaatgattaaaaggagaga

SEQ ID NO: 439500 - DNA, 120 bp, Artificial Sequence
  ENSG00000153721_69 (sequence is synthesized)
aaatatcaggagaaaaatgattaaaatgagagaaatgttcttccactgactagacccattaaaggggaggatttaactttattgttagaggggtgaaaactggattttaagatatttctt

SEQ ID NO: 439501 - DNA, 120 bp, Artificial Sequence
  ENSG00000153721_70 (sequence is synthesized)
caccattttgacatatcttgggctgaacattttgattattttagagaatcagggagcttcagaaatgaagtttaatataaagtaagattgtctctgaaggaagaaattgtccttttaact

SEQ ID NO: 439502 - DNA, 120 bp, Artificial Sequence
  ENSG00000153721_71 (sequence is synthesized)
cagtgtcaggttccgttttcttactcatatctaaacttcctgtcactccaactgaggctgcaccaggataagaggagggatttgaggaattagcgcgaatttagaagcctttgacttttg

SEQ ID NO: 439503 - DNA, 120 bp, Artificial Sequence
  ENSG00000153721_72 (sequence is synthesized)
ggaatttgcatcaagcagatagaagcaggcgggggctcagcttttgaagttggatcatccagctgtctcactttgccacttatgggatctgtgacttgaagcaggtgactgacctctcca

SEQ ID NO: 439504 - DNA, 120 bp, Artificial Sequence
  ENSG00000153721_73 (sequence is synthesized)
ctcctcagttatctatgaaatggggataatactagcatctacttcgaaggcttatggtgattaaatgagataatgtttttaaggccctttcttcgcatagtctggcacacagcatttaag

SEQ ID NO: 439505 - DNA, 120 bp, Artificial Sequence
  ENSG00000153721_74 (sequence is synthesized)
agatgttgactcgtgttcctgtagtagcagtactgactccatctcagcctctagtgaataaggtattcagagctggccaacaggaaattgctcattcttttgtccataagcagcaaaata

SEQ ID NO: 439506 - DNA, 120 bp, Artificial Sequence
  ENSG00000153721_75 (sequence is synthesized)
atgccagtgtgacactgtcagagggctgcagtgtggtcagtggcctagagatgcagcttttactgttagaaaactcactcggatgttttagccgattcagaactcaagaaatgacaaaag

SEQ ID NO: 439507 - DNA, 86 bp, Artificial Sequence
  ENSG00000153721_76 (sequence is synthesized)
agagtattctttcaatattgacttgatttgtcatcatcatatcttttctattaaatcccttccacttccttcaatgaaatcgtata

SEQ ID NO: 439508 - DNA, 120 bp, Artificial Sequence
  ENSG00000153721_77 (sequence is synthesized)
tctattaaatcccttccacttccttcaatgaaatcgtatatgaaaacaaagggaatcggagcattttgcccacctcctagttggctgaattatttttgcctcccattcccatcttgaagt

SEQ ID NO: 439509 - DNA, 120 bp, Artificial Sequence
  ENSG00000153721_78 (sequence is synthesized)
ggtattcctcaaactcgtttctatgtttcctgtggttttaaataaaggaataatgtagaatggtatctattttggacattctcatcgtgaaaaggaactcttacacaaatacaaagccaa

SEQ ID NO: 439510 - DNA, 120 bp, Artificial Sequence
  ENSG00000153721_79 (sequence is synthesized)
gagattgtgttgccattgttgaagctgaaaaggacagtcactggatgcctccccacccaaggccaaggctttggtaggtccaggaagtgaaaaggaaagagaagctatgggagagacaaa

SEQ ID NO: 439511 - DNA, 120 bp, Artificial Sequence
  ENSG00000153721_80 (sequence is synthesized)
gggaagtaaaaaatggttgttcggctcagcataacaatcacttttgtggggcttattggttgtgcataaatttcatccatttgggcacacacacagatgtgacacccagaccactcagac

SEQ ID NO: 439512 - DNA, 120 bp, Artificial Sequence
  ENSG00000153721_81 (sequence is synthesized)
acttggctaacactgatgccgtcatcctgaatgttgtttctggaaggactttcatgaatagaatctatttcagattggccgtaagtctcgatttattgatccgcaccactggactggggt

SEQ ID NO: 439513 - DNA, 120 bp, Artificial Sequence
  ENSG00000153721_82 (sequence is synthesized)
ctgtgaaggtgtggatatgtggccatattttacctgcataatctgcagttcatatgattcagcctaatgggttgcaatgccctgaggacagagaccatactttttcttcctttgtctttt

SEQ ID NO: 439514 - DNA, 120 bp, Artificial Sequence
  ENSG00000153721_83 (sequence is synthesized)
tagcgaaattcaatcctgttctgcgcctgcgccacagttgcaggctgtactgtctgccctgtgcatctcacacacccccactgcactgtgcacctagtgatggccgcagatttgctttta

SEQ ID NO: 439515 - DNA, 120 bp, Artificial Sequence
  ENSG00000153721_84 (sequence is synthesized)
ctcatcttccagggcctaccctgttaattccatcacagttgcaggctgtactgtctgccctgtgcatctcacacacccccactgcactgtgcacctagtgatggccgcagatttgctttt

SEQ ID NO: 439516 - DNA, 120 bp, Artificial Sequence
  ENSG00000153721_85 (sequence is synthesized)
actcatctgtttgcagggcctaccctgttaattccatcacagttgcaggctctactgtctgccctgtgcatgcatctcacacacccactggactgtgcacctagttgatgaccacagatt

SEQ ID NO: 439517 - DNA, 120 bp, Artificial Sequence
  ENSG00000153721_86 (sequence is synthesized)
tgctcttacccatctatttccagggcctgccactgttaattcctaggaaaaaagaaaaaacaagcatggtggattggttaaattggcattttatattgtttgtgttcatggccatgccaa

SEQ ID NO: 439518 - DNA, 120 bp, Artificial Sequence
  ENSG00000153721_87 (sequence is synthesized)
tgataaacaagagctggtcatgggcattcagatcagatgagcaattaaatcccctccaaaaaacagaaacctacttttagagaagaaaagaattaaaccaagatctttcagggttttgct

SEQ ID NO: 439519 - DNA, 120 bp, Artificial Sequence
  ENSG00000153721_88 (sequence is synthesized)
tctccttttgtttttaaggcacttaaataaatggaagaacatgtaagctaaccgtgtttagagtactatgttttactagaaagtgctacccttctgcagatttctcctcaatgaaagaat

SEQ ID NO: 439520 - DNA, 120 bp, Artificial Sequence
  ENSG00000153721_89 (sequence is synthesized)
gccactgaagcacctttaatggtgcctttatcctatagtcttattgaatcattctctttagccaacataaaatacaaagccagggtataagacttcatgtaggtggtaatttaaactaac

SEQ ID NO: 439521 - DNA, 82 bp, Artificial Sequence
  ENSG00000153721_90 (sequence is synthesized)
caattagtgaatttttgctgatgctttccttaaaccccttacttagcacttagttctggattcttaaatcctgataatggac

SEQ ID NO: 439522 - DNA, 120 bp, Artificial Sequence
  ENSG00000153721_91 (sequence is synthesized)
ttagcacttagttctggattcttaaatcctgataatggactcatccttctcggtctagttaccccagtaagtcccaaggtcatccatatgaggtcctccttgatcttactctgaatagaa

SEQ ID NO: 439523 - DNA, 120 bp, Artificial Sequence
  ENSG00000153721_92 (sequence is synthesized)
ttaactggtctcttctgtttttccatagcattgactcatcgtgttagaccagcttgaattgtgagcctttctaaagcagggtctgtataatttacccttatatttgctctgtaggcagag

SEQ ID NO: 439524 - DNA, 120 bp, Artificial Sequence
  ENSG00000153721_93 (sequence is synthesized)
attgaagtaactagatggtaaaattaactgtgcaatcagaaaagaagttagaaaaaattattaaaattttctgtgaaaattgttttaattttattaatatattaaagcattttgcagact

SEQ ID NO: 439525 - DNA, 120 bp, Artificial Sequence
  ENSG00000153721_94 (sequence is synthesized)
tgcagactattccataaagaattttattacattggctctcattttaaagaaaacattataccaggtgtcagaactcaatcatatttgtaggaagaataagccttggccatcaacaacgct

SEQ ID NO: 439526 - DNA, 120 bp, Artificial Sequence
  ENSG00000153721_95 (sequence is synthesized)
tctttggttacaggattacaggaactgctgagaatgtaagcactttccgaagtccacaaagaactcatttaaagctcgtacaggcagtttcaaattagccagggaaaagttaatggtggg

SEQ ID NO: 439527 - DNA, 120 bp, Artificial Sequence
  ENSG00000153721_96 (sequence is synthesized)
gaggtaaggtcatagaatgctctataaatggaggcgacgtggaggacagttgcagttgtataacatttgattgaaggagagggatttggacctgaggaaaccaggtctataaatactaag

SEQ ID NO: 439528 - DNA, 78 bp, Artificial Sequence
  ENSG00000153721_97 (sequence is synthesized)
gggatttggacctgaggaaaccaggtctataaatactaaggctggctgggcacagcggtggattgcttgagcccagga

SEQ ID NO: 439529 - DNA, 62 bp, Artificial Sequence
  ENSG00000153721_98 (sequence is synthesized)
acctcttgagcctgagaggtagaggctgcagtaagcccagattgcaccactgcactccagcc

SEQ ID NO: 439530 - DNA, 120 bp, Artificial Sequence
  ENSG00000153721_99 (sequence is synthesized)
gagtgagactccatctcaaacaaacaaaacgtacatgcatatataggctgtagactaaatagtgaaatattactaagaaccttcatcccaaggggttgagtggtagaaccactgagaata

SEQ ID NO: 439531 - DNA, 120 bp, Artificial Sequence
  ENSG00000153721_100 (sequence is synthesized)
tgagtggtagaaccactgagaatattgttgctgctcttttggagacaacaaactgcattaataaaagtctgagaacaagaaagttgagttttcaagtaatgtcctttgcatattgctaca

SEQ ID NO: 439532 - DNA, 120 bp, Artificial Sequence
  ENSG00000153721_101 (sequence is synthesized)
tagggctcatctgagtctgtgatgttctactttgttgatgaaagaaaacaagtggaaattctgctcccccacacatcctgcactgcaaaaagataacaagtagcaggagatactcaatta

SEQ ID NO: 439533 - DNA, 120 bp, Artificial Sequence
  ENSG00000153721_102 (sequence is synthesized)
tgatgcagttcaacaaagaaaacaaattaaaataaagagatcctgggtggttaaatacagagtctcctttgtaaacagcaatggatgatgatgatgactgttaccagggctctgtatgat

SEQ ID NO: 439534 - DNA, 120 bp, Artificial Sequence
  ENSG00000153721_103 (sequence is synthesized)
cattttcccaattctttggagtacttttttcaaaagcactcttgtagaattaactggaaacatagactacccttcactcattacatgggaaatgggattgaattctcttcttggcaatgg

SEQ ID NO: 439535 - DNA, 120 bp, Artificial Sequence
  ENSG00000153721_104 (sequence is synthesized)
aaaatacttgatgcatgcaaataagaaaactcttactttttccttctctccttgcagggggagcacgcgtcctaagcttgccaggaagccctgctctcctgccctgggcacctccgttcc

SEQ ID NO: 439536 - DNA, 120 bp, Artificial Sequence
  ENSG00000153721_105 (sequence is synthesized)
acttgaccttttccacctgtactccctgcattttggtctcttgctctggtctttagccttcgcattttcctgatgcagcccaaaccagtcacctctctcctagattcattctctgtgctc

SEQ ID NO: 439537 - DNA, 120 bp, Artificial Sequence
  ENSG00000153721_106 (sequence is synthesized)
agaccatctctttcctttagttcctgtgacgaaagaaaatgtatttggccattggaggtataagcaacaaagaatccaacccacacagctttatatatgcaggttctctatatgctcttc

SEQ ID NO: 439538 - DNA, 120 bp, Artificial Sequence
  ENSG00000153721_107 (sequence is synthesized)
ttgtgaacagcgtggggagaggaaaatagacttggcaagaggactaagaacagaatcggacagttatctgatggctttcctaaggttcaggaaagaacagtggtccctttgttgggcctt

SEQ ID NO: 439539 - DNA, 120 bp, Artificial Sequence
  ENSG00000153721_108 (sequence is synthesized)
acagtggtccctttgttgggcctttctgttgtttctttgttttcaatttcactgatttctgctttttattttctattttcttctgtttcctttggaattcttcttttttttttttttttt

SEQ ID NO: 439540 - DNA, 120 bp, Artificial Sequence
  ENSG00000153721_109 (sequence is synthesized)
gctataacaaacaacccccaaatctcagtgactttacacactaagagtttacattttcctcatcaacgtccactttggatgttccaggttgggtaatgctctgtggctgtcctctagcta

SEQ ID NO: 439541 - DNA, 120 bp, Artificial Sequence
  ENSG00000153721_110 (sequence is synthesized)
gtgactcagggacttgggttgctcctggtgtctccagcgtggttatggtgtctccaattttggacttcaaggtgacccaggcattatccacctggtaaattgggagatgggtcccaggaa

SEQ ID NO: 439542 - DNA, 120 bp, Artificial Sequence
  ENSG00000153721_111 (sequence is synthesized)
agtgaatactcaaccaacctggcctagaagtgacaataataaggccatgtgtggtggctaacagtcagaaacccaacaattgggagattgagctgggaggattgcttgagaccagaagtt

SEQ ID NO: 439543 - DNA, 120 bp, Artificial Sequence
  ENSG00000153721_112 (sequence is synthesized)
attgcttgagaccagaagttcaagaccagctgggcaccatagtgagaccctatctttcaaaaaaatataacaaccaggcttggtggtgtacacctgtggtcccagctatttgggaggctg

SEQ ID NO: 439544 - DNA, 120 bp, Artificial Sequence
  ENSG00000153721_113 (sequence is synthesized)
cccaggagtttgaggttacagtaaaccaggtttacaccactgcactccagtctggatgacaaagcaaaaccctcatctcacaaaagaaaagaaatgacaatcacagccactgcaacttca

SEQ ID NO: 439545 - DNA, 120 bp, Artificial Sequence
  ENSG00000153721_114 (sequence is synthesized)
aggaaggttgggagagtgatattggtcaggatgagtggtctctgacatgtttcttaagttggatatttagcttattaatttacaactcttttctaatattaatactcaagactacatttt

SEQ ID NO: 439546 - DNA, 120 bp, Artificial Sequence
  ENSG00000153721_115 (sequence is synthesized)
ccccaaaacatttattttgccatgttttgcaaggcttggtatatggcattttcattactctttaattctaactaatttttaatttctattatgatttattatttgatctatgaatcattt

SEQ ID NO: 439547 - DNA, 120 bp, Artificial Sequence
  ENSG00000153721_116 (sequence is synthesized)
tgaaatttgtttttgtaaccttggatagggaaagatttcttatagaagacagtaaaagggctgagtacaaaagaaaagactaataaattcagctacgctaaagcttagaacttttcctca

SEQ ID NO: 439548 - DNA, 120 bp, Artificial Sequence
  ENSG00000153721_117 (sequence is synthesized)
tcataggacaccttaaagaaaatttttaaaaagttacaaattgggagaagattaaaaagtcctaagggttagcagtaagaatatatacatataattattacaaattggcaagagaatgac

SEQ ID NO: 439549 - DNA, 120 bp, Artificial Sequence
  ENSG00000153721_118 (sequence is synthesized)
aaatcaacacaaaaacgagcgaaaaggcattttgcaaaagagaatcagatggtccatatgcatgtgaagcgattttcactagcgagcagggaaagtgaagtcaaaatcacagggagatgc

SEQ ID NO: 439550 - DNA, 120 bp, Artificial Sequence
  ENSG00000153721_119 (sequence is synthesized)
tgctctctacctgactggcaaaactgaaatgattagaaaatacttggaggatatcctagaacgatcagtgggatctggtatattatgtgtatgaggttaaattagcagtgagtattcaca

SEQ ID NO: 439551 - DNA, 120 bp, Artificial Sequence
  ENSG00000153721_120 (sequence is synthesized)
ttaaattagcagtgagtattcacataccctatgactcagcagtttcattcctagatatatatcctggggattagaaacactaagtaggtgggtgcagtggctcacacctacaatcccagc

SEQ ID NO: 439552 - DNA, 120 bp, Artificial Sequence
  ENSG00000153721_121 (sequence is synthesized)
aaacaaaccactaactacctcagaggacaatgctaacatttcaaagtgttctagaagttggtttcccagaaaagaagtcaggctcttgtggagctccatggaaactggcaatgacccatg

SEQ ID NO: 439553 - DNA, 120 bp, Artificial Sequence
  ENSG00000153721_122 (sequence is synthesized)
acttagggcagtgaagtctcatcaaatgcaaggcttagaccccattctgctgctgccgtcaggggaggcaagggctccttgttccccaaacatcgatgctaatgaagcaaatcctgctgc

SEQ ID NO: 439554 - DNA, 120 bp, Artificial Sequence
  ENSG00000153721_123 (sequence is synthesized)
tagtttgcagtgttgcctagctgcaaacacaacctctgatgatgccaatagagaggctggtgcctccttcatcatagagcttacaatccccacaaggtttcgggaccctcttttggattc

SEQ ID NO: 439555 - DNA, 120 bp, Artificial Sequence
  ENSG00000153721_124 (sequence is synthesized)
tgagggtgggctcctttagccatctgtttagtgccccagatgaaattgacagcaggggacctgcactccttctactgctttttctcaaggcatccccagcagagggtctctagggtgcct

SEQ ID NO: 439556 - DNA, 120 bp, Artificial Sequence
  ENSG00000153721_125 (sequence is synthesized)
gttatgtgtgctgtttggccatctgcctttgtagaacacagcccaatgtctgttggcaaaaaaaggtttacatgtggtatattcttaccatggaatattctgcagcaagtaaaaatgaat

SEQ ID NO: 439557 - DNA, 120 bp, Artificial Sequence
  ENSG00000153721_126 (sequence is synthesized)
aaattacagctattcatatcaaagagatggattttattaatatagtgctgagtgggaaaaagcatcagaagacaacatataatggtacactctttttttttttttgagatggagtctctc

SEQ ID NO: 439558 - DNA, 120 bp, Artificial Sequence
  ENSG00000153721_127 (sequence is synthesized)
caggcatgagccaccatgcccagctacattctttttaaacattcagaaacaggtaaaactgaaaaatatataatttagacacaacacttatgtgaaaagaccaagtttaggatgttggtt

SEQ ID NO: 439559 - DNA, 120 bp, Artificial Sequence
  ENSG00000153721_128 (sequence is synthesized)
acctgtgacggggcagcaagattgtgggaaaggaaggaagctacaggtatgtgacagagagttgcattagcccaaatctctacagagctggtgtcaaggatgaaactattggtgttttat

SEQ ID NO: 439560 - DNA, 120 bp, Artificial Sequence
  ENSG00000153721_129 (sequence is synthesized)
ttggaagatacaagcccaaggcgaggtgagaaaaaagagaagggaagcaaaagaagacacaaagtgacacaaaatggcatgaactaaattacgttctctccaaattcacatattgaagtc

SEQ ID NO: 439561 - DNA, 120 bp, Artificial Sequence
  ENSG00000153721_130 (sequence is synthesized)
caaattcacatattgaagtcctaaccccagtacctcagaatgtaactgtatttggagattcggtctttaaagaagtgattcaggctgggcctgattgctcacgcctgtaatcccagcact

SEQ ID NO: 439562 - DNA, 120 bp, Artificial Sequence
  ENSG00000153721_131 (sequence is synthesized)
gattcagttaaaatgcagtcattatggtgggctcaatcaaggacatgtggacacagatatgtatgcacatggaggaaagaccatgtgaagtcggggagaagaaaaccagctacacactaa

SEQ ID NO: 439563 - DNA, 90 bp, Artificial Sequence
  ENSG00000153721_132 (sequence is synthesized)
ccatgtgaagtcggggagaagaaaaccagctacacactaaagaaagaggcgtcaggccgggcgcgatggctcccgcttgtaatcctagca

SEQ ID NO: 439564 - DNA, 81 bp, Artificial Sequence
  ENSG00000153721_133 (sequence is synthesized)
tcagaagaaaccagtgctgctgacaccttgatcagtcttccacctgcagagctgtgagaagacacatttctgttgtttaag

SEQ ID NO: 439565 - DNA, 120 bp, Artificial Sequence
  ENSG00000153721_134 (sequence is synthesized)
acctgcagagctgtgagaagacacatttctgttgtttaagctacccagtctgtggtattttgttatggcagccccaacaaactaatacacaaaatgatgcacagccttgctgactatcac

SEQ ID NO: 439566 - DNA, 120 bp, Artificial Sequence
  ENSG00000153721_135 (sequence is synthesized)
ttcaaaatgagccaaacagagacacaacggggcactaggcaattgtgtcccactcagtgaaacttctctggaaagctgtaaggtatagtccagagacgagaggaagggaagaagaaattt

SEQ ID NO: 439567 - DNA, 120 bp, Artificial Sequence
  ENSG00000153721_136 (sequence is synthesized)
atcctctgggagcctcccatttcctgtctcctaatagtgagaatttttccatgagaagttaatgtccctatactttcacaatgtgttaccttcttttgttgctgttcaagatgccaagcc

SEQ ID NO: 439568 - DNA, 120 bp, Artificial Sequence
  ENSG00000153721_137 (sequence is synthesized)
tatgccctgcagtgtggccttttgtcagagtccataaagggcaggaggaactaggaactctgggtgtgtatggttggcccagctgcagagttgacagtcaaggggataaccaactctaat

SEQ ID NO: 439569 - DNA, 120 bp, Artificial Sequence
  ENSG00000153721_138 (sequence is synthesized)
cagcctagaagggaacttggtagcctaggtgagttggtcaggcacaggctggggctaaggcaaggcaaatggctgaggtctaagacgtaggtggtgctgagaaaatgtggggaagcatac

SEQ ID NO: 439570 - DNA, 120 bp, Artificial Sequence
  ENSG00000153721_139 (sequence is synthesized)
aagatttgtgactgatgagtaatattctagttcttggttaggataatgggtacatggggtgttccttttattattttcaaaatgaaatgaaataaaagagggatatgtgtggactgatga

SEQ ID NO: 439571 - DNA, 120 bp, Artificial Sequence
  ENSG00000153721_140 (sequence is synthesized)
tgatgtataatgaatcaaagattatgattaacttaactctgcatacttgagtttgtttatttttctataaaaggagaatagcaatattaagtcttacagcccaggaatgaaatgtctttc

SEQ ID NO: 439572 - DNA, 120 bp, Artificial Sequence
  ENSG00000153721_141 (sequence is synthesized)
catttgtttgtgtcttctttaatttatttcatcagtattttgtagttttcagtatacaagtctttcacctccttagttaagtttattcccaagtattttattattttgggtgctattata

SEQ ID NO: 439573 - DNA, 120 bp, Artificial Sequence
  ENSG00000153721_142 (sequence is synthesized)
tatgggattgtttcgctaatttcctttttagatagttctgtgttaatgtatagaaatcgcaactgatttttgtatgttgattttgtattatgcaactttattgaattcctttattctaac

SEQ ID NO: 439574 - DNA, 120 bp, Artificial Sequence
  ENSG00000153721_143 (sequence is synthesized)
atgtttaaaaaatggagtcttagggcgttctatatatgagacgatgtcatctgaagacagggacaaaacaattctacagtccatatgaaaccacaaaagaccatgaatagccatatcaat

SEQ ID NO: 439575 - DNA, 120 bp, Artificial Sequence
  ENSG00000153721_144 (sequence is synthesized)
cttgagaaagaagaacaaagatagaggcatcacattgcttgatttcagaatgtataacaaaactacagtaatcaaaacagtatgttactggccaacagatagacatatatgtgaatggaa

SEQ ID NO: 439576 - DNA, 120 bp, Artificial Sequence
  ENSG00000153721_145 (sequence is synthesized)
cagaatagagagtccagaaatagattcacatgtatattgtcaactgatcttcaacaatggtgccaagaatacataatggggaaaggatagtctcttcaacacatggtattgagaaaatca

SEQ ID NO: 439577 - DNA, 120 bp, Artificial Sequence
  ENSG00000153721_146 (sequence is synthesized)
gatatccatgtgcaaaagggggaaactggacttttatcttacatcacatacaaaacccaactcaaaatggattaaagatttaaacataaaatctgaagctgtaaaactcctagaagaaaa

SEQ ID NO: 439578 - DNA, 120 bp, Artificial Sequence
  ENSG00000153721_147 (sequence is synthesized)
cataggcgaaaagctctttgacattggtcttgtcaatgatttcatggatatgacccccaaaacacaggcaacaaaaacaaaaataagcaaagttacatcaaatcacaaagcttctcacag

SEQ ID NO: 439579 - DNA, 120 bp, Artificial Sequence
  ENSG00000153721_148 (sequence is synthesized)
caaaggcaacaatcaacagagtgaaaagaaaacctatgaaatgggagaaagtatttgcaagcgatgtatgtgataagggttgacatctaaaatatgtaaggaattcataactcaatagca

SEQ ID NO: 439580 - DNA, 120 bp, Artificial Sequence
  ENSG00000153721_149 (sequence is synthesized)
aaaaaaaaaaaacccaatttttacaaatgggccaaggatctgaatagcatgggctctggcatcttgaacagcaatgaaagaagctagttgacacattgcgagagtatagggatattaacc

SEQ ID NO: 439581 - DNA, 120 bp, Artificial Sequence
  ENSG00000153721_150 (sequence is synthesized)
tctcatgggcaaattctcatcaatgagaggaaatgggaggctcccagaggataaaaggtgctcatcatcactgatcatcagggcaatgcaaatcaaaaccaccgtgagatatcaactctc

SEQ ID NO: 439582 - DNA, 120 bp, Artificial Sequence
  ENSG00000153721_151 (sequence is synthesized)
acctgtcaggatggctatcattgaagaaccaaaacacaacaaatattggtgaagaagtggacaaattggaacccttgcatactgttgatgggaatgcaaaatggtgcagccactaaggaa

SEQ ID NO: 439583 - DNA, 120 bp, Artificial Sequence
  ENSG00000153721_152 (sequence is synthesized)
aacagtatgggtgttcctaaaaaatgtaaaaatagaactgccatgtgacctagcaaccctatttctggatatttatccaaaaaaattgaaatcaggatcccaaagaggtattagcatttg

SEQ ID NO: 439584 - DNA, 120 bp, Artificial Sequence
  ENSG00000153721_153 (sequence is synthesized)
caggttcattgccgcattattcacaatatccaagatacacaaacaatctaagcgtccatcggcggagaaatgaataaagaaaatgtatatacacatacaatggaatactatttagctttt

SEQ ID NO: 439585 - DNA, 120 bp, Artificial Sequence
  ENSG00000153721_154 (sequence is synthesized)
aaaaagaaggaaattctgcaattattcaacaacatggataaatcttaaggacattacgctaagtgaaataaactattaacagaaagactaatatggcaggattcaatttatgtgggatat

SEQ ID NO: 439586 - DNA, 120 bp, Artificial Sequence
  ENSG00000153721_155 (sequence is synthesized)
ttaaaatagtcaacttcatagaaccaaagagtgaaatgatggtggccaggggctgaggggagtggggagttactaatcaataggcataaagtttcagtgaagtcaggtgaataagctcta

SEQ ID NO: 439587 - DNA, 120 bp, Artificial Sequence
  ENSG00000153721_156 (sequence is synthesized)
gagatttgtggtacaatattgcacctatagtcaacaatactgcagtgtacactgaacaatttgttaagatagatctcaccttgtgttcttactgaaaaaaaaaaagaaagaaaatagaac

SEQ ID NO: 439588 - DNA, 120 bp, Artificial Sequence
  ENSG00000153721_157 (sequence is synthesized)
agaaaagcaattggattttaattctggaaactcctttctcttccttacatccaggaaatttgctgtttattttgaaaagcaaatttaaacctatttaagggagagagagctcttgtaaaa

SEQ ID NO: 439589 - DNA, 120 bp, Artificial Sequence
  ENSG00000153721_158 (sequence is synthesized)
attcatttattagttctggaccaatgttatttataagctattatttcaaatgataaaaaataaatgcataatacatttgatgatagaacatttttctttttaaataaggcctgatttttc

SEQ ID NO: 439590 - DNA, 120 bp, Artificial Sequence
  ENSG00000153721_159 (sequence is synthesized)
aaaaagcattgaatatgtttgtttctaatttccaaagcttgacagtttcttatgtttcattaaaagcagaagaattgttatgtatgcatgttcatatcacttttgaatgactcatgtggc

SEQ ID NO: 439591 - DNA, 120 bp, Artificial Sequence
  ENSG00000153721_160 (sequence is synthesized)
tacaaatgcagcaatctgtggttatcatggaccatgaactagataaacattcctgcttttcttaacattcctttcctgtgcctcattaactaatgtacataataaaacatctttatttca

SEQ ID NO: 439592 - DNA, 120 bp, Artificial Sequence
  ENSG00000153721_161 (sequence is synthesized)
gtcagtgtgttaatgaatgttttgttgaacccttttcatctatcaaggactgaaatatctgatttaatctcagtggtgcttaaaataaacttttgtggctgagtttactcaagcccttat

SEQ ID NO: 439593 - DNA, 120 bp, Artificial Sequence
  ENSG00000153721_162 (sequence is synthesized)
ttgaaagctattcttataggcaggcccagagctaaagactgccagcttgttggcccactgctgtctgttcctgggggcacattgggagccgtcgtcaggtttcttgacttggacttctga

SEQ ID NO: 439594 - DNA, 120 bp, Artificial Sequence
  ENSG00000153721_163 (sequence is synthesized)
aacattaaacctggggaaggcctgggcatgtacatcaaatcaacctatgatgggttacacgtgattactggaaccacagaaaatgtgggatggcagctgaaaaatctggtgaagaaattg

SEQ ID NO: 439595 - DNA, 120 bp, Artificial Sequence
  ENSG00000153721_164 (sequence is synthesized)
acatgaataaacacggtgcagtccagaggggcagaagggagaagtgatgaatcttgctggtgaggaagctggtgcgtggttggtgtccagagaaggcctcaaaaaggaggagaagcttct

SEQ ID NO: 439596 - DNA, 120 bp, Artificial Sequence
  ENSG00000153767_0 (sequence is synthesized)
agttgaagcgctgggggcagctgtagtgggagtgttccaggattcgccttgtatatttaaagttggagttcgttgctaaagatggcagacccagatgtcctcactgaagttccagcagca

SEQ ID NO: 439597 - DNA, 120 bp, Artificial Sequence
  ENSG00000153767_1 (sequence is synthesized)
ttgaagcggttagccaagtatgtgatccggggattttatggcattgagcatgccttggccttggacatcttgatcaggaactcctgtgtgaaagaggaggatatgctggagctgctcaag

SEQ ID NO: 439598 - DNA, 120 bp, Artificial Sequence
  ENSG00000153767_2 (sequence is synthesized)
tttgatcggaagcaacttcgatcagttttgaataatttaaagggagacaagtttatcaaatgcagaatgagggtagagactgctgcagacgggaaaaccactcgccataactactacttc

SEQ ID NO: 439599 - DNA, 120 bp, Artificial Sequence
  ENSG00000153767_3 (sequence is synthesized)
atcaattatcgtactcttgttaatgtggtaaaatataaactggaccacatgagaagaagaattgagaccgatgagagagattcgaccaaccgggcttccttcaaatgtcctgtctgtagt

SEQ ID NO: 439600 - DNA, 120 bp, Artificial Sequence
  ENSG00000153767_4 (sequence is synthesized)
agtactttcacagacttagaagctaatcagctctttgatcctatgacaggaactttccgctgtactttttgccatacagaggtagaagaggatgaatcagcaatgcccaaaaaagatgca

SEQ ID NO: 439601 - DNA, 120 bp, Artificial Sequence
  ENSG00000153767_5 (sequence is synthesized)
cgcacacttttggcaaggtttaatgaacaaattgagcccatttatgcattgcttcgggagacagaggatgtgaacttggcctatgaaatacttgagccagaacccacagaaatcccagcc

SEQ ID NO: 439602 - DNA, 120 bp, Artificial Sequence
  ENSG00000153767_6 (sequence is synthesized)
ctgaaacagagcaaggaccatgcagcaactactgctggagctgctagcctagcaggtgggcaccaccgggaagcatgggccaccaaaggtccttcctatgaagacttatacactcagaat

SEQ ID NO: 439603 - DNA, 120 bp, Artificial Sequence
  ENSG00000153767_7 (sequence is synthesized)
gttgtcattaacatggatgaccaagaagatcttcatcgagcctcactggaagggaaatctgccaaagagaggcctatttggttgagagaaagcactgtccaaggggcatatggttctgaa

SEQ ID NO: 439604 - DNA, 120 bp, Artificial Sequence
  ENSG00000153767_8 (sequence is synthesized)
gatatgaaagaagggggcatagatatggacgcatttcaggagcgtgaggaaggccatgctgggcctgatgacaacgaagaggtcatgcgagcactgctcattcacgagaaaaagacttcc

SEQ ID NO: 439605 - DNA, 120 bp, Artificial Sequence
  ENSG00000153767_9 (sequence is synthesized)
tctgccatggctggttcagtgggggcagctgctccagtgaccgctgccaatggcagtgactcagaaagcgagaccagtgagtcagatgatgattctccaccccgtccggcagctgtggct

SEQ ID NO: 439606 - DNA, 120 bp, Artificial Sequence
  ENSG00000153767_10 (sequence is synthesized)
gtgcataaacgagaagaggatgaagaggaagatgacgagtttgaagaagtagcagatgaccccattgtcatggtggctggccgtccgttctcctacagtgaagtgagccaacggccagag

SEQ ID NO: 439607 - DNA, 120 bp, Artificial Sequence
  ENSG00000153767_11 (sequence is synthesized)
ctagtggcccagatgacaccagaagaaaaggaagcatatatagcaatgggacaacgcatgtttgaggacctctttgagtgagctttccctaattctttctcctttctctaatgctcagtt

SEQ ID NO: 439608 - DNA, 120 bp, Artificial Sequence
  ENSG00000153767_12 (sequence is synthesized)
caaaaaggaatgtctcatctttgaagaaaagtatttaagtggctttctgcccctcttgatgtaagcaactgtccatccttgtgcaaagattgatggtagagagtttgacttttatgccag

SEQ ID NO: 439609 - DNA, 120 bp, Artificial Sequence
  ENSG00000153767_13 (sequence is synthesized)
gagtttgacttttatgccagaaactttcccagcaaggtagggtgctgagaatcctacccttccttgctgtcactacagtattaatattttactgtattttcttttctttttttttttttt

SEQ ID NO: 439610 - DNA, 120 bp, Artificial Sequence
  ENSG00000153767_14 (sequence is synthesized)
ttatctgatttttttcttgccttattaagacataattttctcccttctgaaatgagtgagggaagttcataaggtaaatccttcccatccatctgtttactacaataggttacaataatt

SEQ ID NO: 439611 - DNA, 120 bp, Artificial Sequence
  ENSG00000153767_15 (sequence is synthesized)
cactgatcacatccattttatctgttctagccaggcattccaaacaatttcttatactgctgcccaccaaagcagcttgccaacagtcaaatcactgattgggggaaaaaatcctgaaat

SEQ ID NO: 439612 - DNA, 120 bp, Artificial Sequence
  ENSG00000153767_16 (sequence is synthesized)
tttgcttagaatttgagcatttcctcaaaattgagatggatcaatatgtaaggggaggtgggagcgtgtgtggaagggggagagatatacttgagtcttatgattaatgtctaaaccaga

SEQ ID NO: 439613 - DNA, 120 bp, Artificial Sequence
  ENSG00000153767_17 (sequence is synthesized)
atttgtgtctttagaactgaccagactggtagattttattgtattgcttaatgtcttttggtttggatttaggatgatagaaaacagaagtataattggtaaacccttaggaagaaatta

SEQ ID NO: 439614 - DNA, 120 bp, Artificial Sequence
  ENSG00000153767_18 (sequence is synthesized)
gaaaaacatggacgtaagacaagaagtctctgtgaagggttgaagagtgacaagcattggtaacagtgccttagaactgtgtcagttagtctgatttggaaatcctttatgtaaagctga

SEQ ID NO: 439615 - DNA, 120 bp, Artificial Sequence
  ENSG00000153767_19 (sequence is synthesized)
gactggtcctggttttgttccctttgggtacagacctcttgtcagtgctataaattgtttaatgaggccattccagcagaaatcaacagaataattgattactcttctctctctctgtca

SEQ ID NO: 439616 - DNA, 120 bp, Artificial Sequence
  ENSG00000153767_20 (sequence is synthesized)
ctctccctctttctaaacatcattgaaggctgtctctcttttaatttttgtcagacacagtattttagggtgcatccagtataccattgagcattgtaacctcaggaaacagtttatttt

SEQ ID NO: 439617 - DNA, 120 bp, Artificial Sequence
  ENSG00000153767_21 (sequence is synthesized)
gggttctgatatgtagcatggtattttccctaaggcagaactttaaaaataaagaactttcacacaagggtctgtaacaattgtatatcttacaatatttttccttgcattgtaattttt

SEQ ID NO: 439618 - DNA, 120 bp, Artificial Sequence
  ENSG00000153767_22 (sequence is synthesized)
aagtatttatcattttatagtacacatgtaaagaatatatgagccttgtatggagtgatgtttcatttacctgggttgtgttaatgactgaatgttgacaataaatctgttttatactga

SEQ ID NO: 439619 - DNA, 120 bp, Artificial Sequence
  ENSG00000153767_23 (sequence is synthesized)
gaactcattggctggtctggtaaaaggtagcggggtgcttccccagctggtcgcaggaatagtgcgttttctttgtcgcgcaaggggcgtggttcatttaagccggtagttgaagcgctg

SEQ ID NO: 439620 - DNA, 120 bp, Artificial Sequence
  ENSG00000153767_24 (sequence is synthesized)
ggggcagctgtagtgggagtgttccaggattcgccttgcccaggtttttaaagtaaactatatgccaatgtgggctttgagaagacagctttctgggtcatggtacggaaatgagataca

SEQ ID NO: 439621 - DNA, 120 bp, Artificial Sequence
  ENSG00000153767_25 (sequence is synthesized)
agttgaagcgctgggggcagctgtagtgggagtgttccaggattcgccttgggatccagtatttaagaatattttgggctgctctccctccctcattttctacctttttaaggactggat

SEQ ID NO: 439622 - DNA, 120 bp, Artificial Sequence
  ENSG00000153774_0 (sequence is synthesized)
gtagtactctctgcgcatgtgcaaagcgctgtcgggggccgccctagctgccgtcgccgccgccggggctctatggtctctccctagagctttgccgttggaggcggctgctgcggtctt

SEQ ID NO: 439623 - DNA, 120 bp, Artificial Sequence
  ENSG00000153774_1 (sequence is synthesized)
gtgagtttgaccagcgtcgagcggcagcaacatggaggaattcgactccgaagacttctctacgtcggaggaggacgaggactacgtgccgtcgggtggagagtatagtgaagatgatgt

SEQ ID NO: 439624 - DNA, 120 bp, Artificial Sequence
  ENSG00000153774_2 (sequence is synthesized)
aaatgaattagtgaaggaagatgaagtggatggtgaagagcagacacagaaaacccaagggaaaaaaagaaaggcccagagcattccagccaggaagagaagacaaggtggcctctcatt

SEQ ID NO: 439625 - DNA, 120 bp, Artificial Sequence
  ENSG00000153774_3 (sequence is synthesized)
agaagaagaggaagaggaggatgccaattcagaatctgagggaagcagtagtgaggaggaagatgacgctgcagagcaggaaaaaggcattggatcagaggatgccaggaaaaagaagga

SEQ ID NO: 439626 - DNA, 120 bp, Artificial Sequence
  ENSG00000153774_4 (sequence is synthesized)
ggacgaactctgggccagcttcctcaatgatgtgggaccaaaatcaaaagtgcccccaagtacacaagttaagaaaggagaggagactgaagagacaagttcaagtaaattgttggtaaa

SEQ ID NO: 439627 - DNA, 120 bp, Artificial Sequence
  ENSG00000153774_5 (sequence is synthesized)
agtggatgctacatctaaagaggccaaatccttcttcaagcagaatgagaaagaaaaaccacaggctaatgttccttcagctctgccatcactccctgccgggtcagggttaaaaagatc

SEQ ID NO: 439628 - DNA, 120 bp, Artificial Sequence
  ENSG00000153774_6 (sequence is synthesized)
aagtggcatgagcagccttttggggaaaattggtgccaagaagcagaaaatgagcacccttgagaagtccaaactggactgggagagcttcaaggaggaagaggggattggtgaagaact

SEQ ID NO: 439629 - DNA, 120 bp, Artificial Sequence
  ENSG00000153774_7 (sequence is synthesized)
ggccatccataatcgagggaaagaggggtacattgaacggaaagccttccttgaccgagtggatcacaggcagtttgaaattgagcgagatctcaggctgagcaaaatgaaaccttgatg

SEQ ID NO: 439630 - DNA, 120 bp, Artificial Sequence
  ENSG00000153774_8 (sequence is synthesized)
ttacgggctaaatcaagagcagcttaatcctgtttacaatgtgagctttttgtgcgtctgtgaaatgttttacagtgtttctcatcatctgtttcccagcaaggtcttttttttttctac

SEQ ID NO: 439631 - DNA, 120 bp, Artificial Sequence
  ENSG00000153774_9 (sequence is synthesized)
attgaagttctgtctatgtatcttaatcacaaatggtttcattcactttacttttaaaaatttgtccttaaatgaataaataaaataaaagttggtcctgtgagaggataatgaagatga

SEQ ID NO: 439632 - DNA, 120 bp, Artificial Sequence
  ENSG00000153774_10 (sequence is synthesized)
tcttaagctcagcatgtactggggtgtgacccaaacagggaagttgacatcctctctactaaagttaatagaatgagaatgttcagggtcattgttcagtcccagcagtctggtgttcag

SEQ ID NO: 439633 - DNA, 120 bp, Artificial Sequence
  ENSG00000153774_11 (sequence is synthesized)
gcaggtgattaagagttgccaggtttgtatgtggtattattagtgtttcttgcacttattgaaagtattgctatgaagttacctctggatataaccaccagatggaaataaaggcaaaga

SEQ ID NO: 439634 - DNA, 120 bp, Artificial Sequence
  ENSG00000153774_12 (sequence is synthesized)
tattctcagttcacatgccactgggtcatcagaagacaagtatctggatttcagagccaacagtttgcttttatttaagctgcaagaccctccattgccataagatctgccactgccata

SEQ ID NO: 439635 - DNA, 120 bp, Artificial Sequence
  ENSG00000153774_13 (sequence is synthesized)
gcggtcttgtgagtttgaccagcgtcgagcggcagcaacatggaggaattcgactccgaagacttctctacgtcggaggaggacgaggactacgtgccgtcgggtcttcactgctttggc

SEQ ID NO: 439636 - DNA, 75 bp, Artificial Sequence
  ENSG00000153774_14 (sequence is synthesized)
atggaactacaggtggagagtatagtgaagatgatgtaaatgaattagtgaaggaagatgaagtggatggtgaag

SEQ ID NO: 439637 - DNA, 120 bp, Artificial Sequence
  ENSG00000153774_15 (sequence is synthesized)
cagaggtctgaagaaggcaggatttcctgttcgtagctcaggagagcagacagtggtgttaagcaggaaaagcacattagaattccagtttacttacagtgctctccacaccaggaagga

SEQ ID NO: 439638 - DNA, 120 bp, Artificial Sequence
  ENSG00000153774_16 (sequence is synthesized)
aatgccccaaatatgaacatggcttccactaagataaatggccccaatctaggggattcccatttgcatcagaaaaactgttaatatagagatcagagtttttacctgctacatctttca

SEQ ID NO: 439639 - DNA, 120 bp, Artificial Sequence
  ENSG00000153774_17 (sequence is synthesized)
gctctgttcttcaccttggctgagcatgagaatcctctggtgacattttccaaagttcaggtgaccacctctgtacagagctgctgaatcaagagtctagaacaggtacattgaacggaa

SEQ ID NO: 439640 - DNA, 90 bp, Artificial Sequence
  ENSG00000153774_18 (sequence is synthesized)
caaggtgtttgattttgctggtgaagaagtaagttggagtctcgctctatcaacccagccacaacctatgcctccggggttcagaccatt

SEQ ID NO: 439641 - DNA, 120 bp, Artificial Sequence
  ENSG00000153774_19 (sequence is synthesized)
tgtttttaagttctagttctggttcgatttcagaaccagtctgcaggcaactctgcattgtctccttagagaactggacaattccactgatctggatcctttggcagcaagctgacattt

SEQ ID NO: 439642 - DNA, 120 bp, Artificial Sequence
  ENSG00000153774_20 (sequence is synthesized)
tattgaggctggtcagcactcctggccagagtcttgaaattgtgggtgtgtttttgctgcccattgttgagttattcatgaacagatatgaaaaccatatatatccgaattttgttacca

SEQ ID NO: 439643 - DNA, 120 bp, Artificial Sequence
  ENSG00000153774_21 (sequence is synthesized)
ctttcagtgcaaatacctactttcgctgcagatcagactccttgcctgagagagagaattatgatgctgctttgcctttgctgcaatatttaccagaatggaagatgcaaaggaaaatta

SEQ ID NO: 439644 - DNA, 120 bp, Artificial Sequence
  ENSG00000153774_22 (sequence is synthesized)
aaaggaaaattagccataactttctcaggaggattgcttgaacccaggagtttgtgaccagcctgggcaatacagtaagaccctgtctcttaaaaaaaaaaaaattagctgggcatggtg

SEQ ID NO: 439645 - DNA, 120 bp, Artificial Sequence
  ENSG00000153779_0 (sequence is synthesized)
aaccagctcggctgttagcaactctgttagcaacgctgtttgtctttctcggaaacaacagtaacgataagcctcttggaatatggaggccgctgcggacggcccggctgagacccaaag

SEQ ID NO: 439646 - DNA, 120 bp, Artificial Sequence
  ENSG00000153779_1 (sequence is synthesized)
cccggtggaaaaagacagcccggcgaagacccaaagcccagcccaagacacctcaatcatgtcgagaaataacgcagatacaggcagagttcttgccttaccagagcacaagaagaagcg

SEQ ID NO: 439647 - DNA, 120 bp, Artificial Sequence
  ENSG00000153779_2 (sequence is synthesized)
caagggaaacttgccagccgagtccgttaagatcctccgcgactggatgtataagcatcggtttaaggcctacccttcagaagaagagaagcaaatgctgtcagagaagaccaatttgtc

SEQ ID NO: 439648 - DNA, 120 bp, Artificial Sequence
  ENSG00000153779_3 (sequence is synthesized)
cgcattctcccggatatgcttcaacagcgtagaaacgaccccatcattggccacaaaacgggcaaagatgcccatgccacccacctgcagagcaccgaggcgtctgtgccggccaagtca

SEQ ID NO: 439649 - DNA, 120 bp, Artificial Sequence
  ENSG00000153779_4 (sequence is synthesized)
gggcccagtggtccagacaatgtacaaagcctgcccctgtggcccttgccaaagggccagatgtcaagagagaagcaaccagatccggagtcggcccctagccagaagctcaccggaata

SEQ ID NO: 439650 - DNA, 120 bp, Artificial Sequence
  ENSG00000153779_5 (sequence is synthesized)
gcccagccgaagaaaaaggtcaaggtttctgtcacatccccgtcttctccagaacttgtgtctccagaggagcacgccgacttcagcagcttcctgctgctagtcgatgcagcagtacaa

SEQ ID NO: 439651 - DNA, 120 bp, Artificial Sequence
  ENSG00000153779_6 (sequence is synthesized)
agggctgccgagctggagctagagaagaagcaagagcctaatccatgattgatgatgttccaaaaacccaagtagtcagtcccttatgtactgtggtaaacctgtttatgttcaccccaa

SEQ ID NO: 439652 - DNA, 120 bp, Artificial Sequence
  ENSG00000153779_7 (sequence is synthesized)
tcggaaacaacaggtgagaattccccttacagacctgcccatgctttctaaagtggctctcccaaacctacctttgtcctaactcagttgtctgtgattctcaatatagtaacgataagc

SEQ ID NO: 439653 - DNA, 120 bp, Artificial Sequence
  ENSG00000153786_0 (sequence is synthesized)
acttccggcgctcgcaccgccccgctctccagccaaggctccgggctgaggcatttgcttggctgcagcctccttccgacctgcccggcgggacccaggggaccaagccgagccgagccg

SEQ ID NO: 439654 - DNA, 120 bp, Artificial Sequence
  ENSG00000153786_1 (sequence is synthesized)
ccgcatgatgcgtccctgcctcggccgctgcagtcgccgccgccgccgccgcaggccgggaggagccgcagcgccgggcgaccccgcccgggcctcggatccgatcacataggacagtat

SEQ ID NO: 439655 - DNA, 120 bp, Artificial Sequence
  ENSG00000153786_2 (sequence is synthesized)
cgggcctcggatccgatcacataggacagtatgcaccttaagatcctgaagaaacggcacaaaatgttcaagtgatgtttagaaataacttgtgagggtgcgtcagggaaatcatgcagc

SEQ ID NO: 439656 - DNA, 120 bp, Artificial Sequence
  ENSG00000153786_3 (sequence is synthesized)
catcaggacacaggctccgggacgtcgagcatcatcctctcctggctgaaaatgacaactatgactcttcatcgtcctcctcctccgaggctgacgtggctgaccgggtctggttcatcc

SEQ ID NO: 439657 - DNA, 120 bp, Artificial Sequence
  ENSG00000153786_4 (sequence is synthesized)
gtgacggctgcggcatgatctgtgctgtcatgacgtggcttctggtcgcctatgcagacttcgtggtgactttcgtcatgctgctgccttccaaagacttctggtactctgtggtcaacg

SEQ ID NO: 439658 - DNA, 120 bp, Artificial Sequence
  ENSG00000153786_5 (sequence is synthesized)
gggtcatctttaactgcttggccgtgcttgccctgtcatcccacctgagaaccatgctcaccgaccctggggcagtacccaaaggaaacgctacgaaagaatacatggagagcttgcagc

SEQ ID NO: 439659 - DNA, 120 bp, Artificial Sequence
  ENSG00000153786_6 (sequence is synthesized)
tgaagcccggggaagtcatctacaagtgccccaagtgctgctgtattaaacccgagcgcgcccaccactgcagtatttgcaaaagatgtattcggaaaatggatcatcactgcccgtggg

SEQ ID NO: 439660 - DNA, 120 bp, Artificial Sequence
  ENSG00000153786_7 (sequence is synthesized)
tgaacaattgtgtaggagaaaagaatcaaagattttttgtgctcttcactatgtatatagctctgtcttcagtccatgctctgatcctttgtggatttcagttcatctcctgtgtccgag

SEQ ID NO: 439661 - DNA, 120 bp, Artificial Sequence
  ENSG00000153786_8 (sequence is synthesized)
ggcagtggactgaatgcagtgatttttcacctccgataactgtaatcctgttgatcttcctgtgccttgagggtcttctgtttttcactttcactgcagttatgtttggcacccaaatcc

SEQ ID NO: 439662 - DNA, 120 bp, Artificial Sequence
  ENSG00000153786_9 (sequence is synthesized)
actccatatgcaacgacgagacggagatcgagcgattgaaaagtgagaagcccacatgggagcggaggctgcgatgggaagggatgaagtccgtctttggggggcccccctcactcctct

SEQ ID NO: 439663 - DNA, 120 bp, Artificial Sequence
  ENSG00000153786_10 (sequence is synthesized)
ggatgaatccctttgtgggcttccgatttaggcgactgcccacgagacccagaaaaggtggcccggagttctcagtgtgaggcgtggctcatcagactgaaacttgctcacagacttcca

SEQ ID NO: 439664 - DNA, 120 bp, Artificial Sequence
  ENSG00000153786_11 (sequence is synthesized)
gttatttatttggggtctgaaggatatcaacagctcatctgtgaccaacagggcaactggaacctacacaaaccaattgcttgcagcaagcagagttttatatatttatagtcacagatg

SEQ ID NO: 439665 - DNA, 120 bp, Artificial Sequence
  ENSG00000153786_12 (sequence is synthesized)
gcagaggaagaggctctcagtccccacctgtacaacaacggaaaggtgtgtggccacacgaagaagccaaacgccgtggcctcctgcagagctggggcttctgtggagaatacttcgggt

SEQ ID NO: 439666 - DNA, 120 bp, Artificial Sequence
  ENSG00000153786_13 (sequence is synthesized)
tattacatgggttattcaaatcctgggtcctgagctgctgtttccaatcatgaagaaaaacagtgaatccagtgaacagggattctccaagcagtcatttcagggggctcctgctgaccc

SEQ ID NO: 439667 - DNA, 120 bp, Artificial Sequence
  ENSG00000153786_14 (sequence is synthesized)
tgcactgaagttgcaaaagatctgtgcactgaacagtgaaggtggcttccggcacactccccgctgccccggaagagacatcctttgaccctctcagcaagtctgtgtgtgtgcgtgtct

SEQ ID NO: 439668 - DNA, 120 bp, Artificial Sequence
  ENSG00000153786_15 (sequence is synthesized)
gtgcgtgtgcgcgcgtgtgtgcatgtgtgtcaaaattgccagtgttgtttaggcaatgtaacatttaccggctgtgtacagcaaacaagctattttttagaaaccgacgtttcagggaag

SEQ ID NO: 439669 - DNA, 120 bp, Artificial Sequence
  ENSG00000153786_16 (sequence is synthesized)
aggggagagagccgcggggtcctgcccgtggttactatgaatgtattgctgttggaggacatctcgatccaaagaacagccgttcctgtgcggcccttcgttgccctcctgctttcattt

SEQ ID NO: 439670 - DNA, 120 bp, Artificial Sequence
  ENSG00000153786_17 (sequence is synthesized)
tttaaagaaatcttgagtgcttgagggccttggaactgattttttttttttgttccagccaaattagcagtgtataaatggcacctaggtaagagcagagctgcggctcggtgacttgat

SEQ ID NO: 439671 - DNA, 120 bp, Artificial Sequence
  ENSG00000153786_18 (sequence is synthesized)
acttggggcagcccgatgctgtgtgtggggcaggggaggcatccttactggagaggcagggcccagccattgggcacctctgggaaggggaggggaccatgaggcagccagcccctggca

SEQ ID NO: 439672 - DNA, 120 bp, Artificial Sequence
  ENSG00000153786_19 (sequence is synthesized)
ggggcgactgtgccaccgcaggcagcgctccagtcgggaatggccaggatggcgccctcttgttggagtttttggttagcttttacgttttcttctccacccacggcacaggtgataaaa

SEQ ID NO: 439673 - DNA, 120 bp, Artificial Sequence
  ENSG00000153786_20 (sequence is synthesized)
taggatccttggtgcggagcttaaaattatgccagaaagccaacagctcccctcgtggggccttgccttaaacttgcctggtttgtacattttttgccggacgcatcaagaagcaatctg

SEQ ID NO: 439674 - DNA, 120 bp, Artificial Sequence
  ENSG00000153786_21 (sequence is synthesized)
tgacaaagtctgagggtcttcctttatgcttgccctccacactaagagaagttggcgtctccctcctgggaattgttttgcctttctgttcatctgtgaactgttttttgtttttaatta

SEQ ID NO: 439675 - DNA, 120 bp, Artificial Sequence
  ENSG00000153786_22 (sequence is synthesized)
ctctgtaccccatccgaatcagggcttctaccactgctgatgcaaaaccacaaagggacctacctgagccaccgtcctagccaagcgagcaaacctgcagggggtttggaagtggacttg

SEQ ID NO: 439676 - DNA, 120 bp, Artificial Sequence
  ENSG00000153786_23 (sequence is synthesized)
gtcaccgcagaagcgtgtgcgccgttgggggaagagctgcgtcacagccagagggacaaagtgtgggtgatcctggagacgccagtttccgagattgttctgcatattcatttgcacatt

SEQ ID NO: 439677 - DNA, 120 bp, Artificial Sequence
  ENSG00000153786_24 (sequence is synthesized)
gttgtctgggttggacatgcgtgtgggcttcagtgtgaggcttttaatatgtatatcctgttatcaataaaacaattatccaagtggttgaatcctgtgagacttggcaagtgtgtgcaa

SEQ ID NO: 439678 - DNA, 120 bp, Artificial Sequence
  ENSG00000153786_25 (sequence is synthesized)
atcaagtatacttgacttttcaacctcttctttcaatgtaacttttatatgaaataaagtaatcaattaacagttctcaaatggcttccaaagcgcccgttcttcctggatggtggtgtt

SEQ ID NO: 439679 - DNA, 120 bp, Artificial Sequence
  ENSG00000153786_26 (sequence is synthesized)
ttcagggggtgcctttccgtgcttcgtgggcccagccccaggctgttaaggtcactcccaaacagtttccagaaactctaaatgcttttgtgcccatgacaagtgacctgggcactcaag

SEQ ID NO: 439680 - DNA, 120 bp, Artificial Sequence
  ENSG00000153786_27 (sequence is synthesized)
cgcgactcacaaatgttgcccagtgagtactgttgcttgttgaatgtttaattcgactcccatcgttttacttagtcctttttttagtgcacgttgaaataaaaacaatgtttcaaaatc

SEQ ID NO: 439681 - DNA, 120 bp, Artificial Sequence
  ENSG00000153786_28 (sequence is synthesized)
tgtcatcccacctgagaaccatgctcaccgaccctgaaaaatccagtgactgccgaccatctgcctgcacagtgaaaactgggctggacccaacccttgtgggcatttgtggtgagggaa

SEQ ID NO: 439682 - DNA, 120 bp, Artificial Sequence
  ENSG00000153786_29 (sequence is synthesized)
ggcggaggttgcagtgagctgagactacgccgctgcattccagcctggacaacagagggagactctgtttctaaaaaaaataaaaaataaaagtgactaaccaatctccccctcattcta

SEQ ID NO: 439683 - DNA, 120 bp, Artificial Sequence
  ENSG00000153786_30 (sequence is synthesized)
gggattacaggtgtgacccactgcgcccggcctgatgtttttaactttcattctccccaactaaagtacattcttcttatatggtagggggcagtacccaaaggaaacgctacgaaagaa

SEQ ID NO: 439684 - DNA, 120 bp, Artificial Sequence
  ENSG00000153789_0 (sequence is synthesized)
gtcccttgagcccaggccacacagctgcacccagccctgcccggctcctcccaggcctgcaggacccctggggccctgtccttattccccagcaccgggacagccaaagctctggtcaca

SEQ ID NO: 439685 - DNA, 120 bp, Artificial Sequence
  ENSG00000153789_1 (sequence is synthesized)
atgaacatcgtcttctccagggacagccaggtgagggtgatggagaataccgtggccaacaccgagaagtactttgggcagttctgctcgctgctggccgcctacacgcgcaagacggcc

SEQ ID NO: 439686 - DNA, 120 bp, Artificial Sequence
  ENSG00000153789_2 (sequence is synthesized)
cggctgcgggacaaggcggaccagctggtcaagcagctcatcgactttgccaactccgagaaccccgagctgcgggccaccatgaggggcttcgctgaggacctggccaaagtgcaggat

SEQ ID NO: 439687 - DNA, 120 bp, Artificial Sequence
  ENSG00000153789_3 (sequence is synthesized)
taccggcaggcccaggtcgagaggctggagaccaaggtggtcaaccccctgaagctctacggggcacagatcaagcagacacgggctgagatcaagaaattcaaacatgtccaaaatcat

SEQ ID NO: 439688 - DNA, 120 bp, Artificial Sequence
  ENSG00000153789_4 (sequence is synthesized)
gagatcaaacaactggaaaaactggagaaactgaggcagaagtcaccctcggatcagcaaatgatctcccaggcagagaccagagtgcagagggccgctgtggactccagccgcaccacc

SEQ ID NO: 439689 - DNA, 120 bp, Artificial Sequence
  ENSG00000153789_5 (sequence is synthesized)
ctccagctggaggagactgtggatggcttccagaggcagaagctcaaggacctgcagaaatttttttgtgactttgtaactattgagatggttttccatgccaaagcggtggaggtgtat

SEQ ID NO: 439690 - DNA, 120 bp, Artificial Sequence
  ENSG00000153789_6 (sequence is synthesized)
tctagcgccttccagaccctggagaagtatgacctggagagggatctactggattttagagccaagatgcaaggagtttatgggcattatgacactcggctgcttgccaacaccagcccc

SEQ ID NO: 439691 - DNA, 120 bp, Artificial Sequence
  ENSG00000153789_7 (sequence is synthesized)
aaatgaagaccctgaacatcctcatgccaatcatggcaggtttagtctctgtgagtgggtggttaaggggcagccagcccactgtgtgtgtgggcagggtgggcatctcatgcttccagg

SEQ ID NO: 439692 - DNA, 120 bp, Artificial Sequence
  ENSG00000153789_8 (sequence is synthesized)
acattctctctaacgacgtagggtaagtgcaatcccaagccgtttaaaataatcccagactgcctggaggctttgttcttattttctgattcttttttctttgtctttgttggattgtgt

SEQ ID NO: 439693 - DNA, 78 bp, Artificial Sequence
  ENSG00000153789_9 (sequence is synthesized)
attttctgattcttttttctttgtctttgttggattgtgttaattcaaagaccttgtcttcaagctctgaatttcctt

SEQ ID NO: 439694 - DNA, 120 bp, Artificial Sequence
  ENSG00000153789_10 (sequence is synthesized)
tgattgtttttctttatgctatctatttcttggtccgagcccactgctcccggcggtgtgaccttgggaaagtctcctagcctctctgtgccttagagtcctcgcctgcagagtggctta

SEQ ID NO: 439695 - DNA, 120 bp, Artificial Sequence
  ENSG00000153789_11 (sequence is synthesized)
gaacagtaacctccgtgtagggctgtgctgagtatcagatgaacagatctatacgaagcacagaaaacccggcctgttgcgcaacaaacacttgagacttgttgctgccattatcattac

SEQ ID NO: 439696 - DNA, 120 bp, Artificial Sequence
  ENSG00000153789_12 (sequence is synthesized)
tgatgttgctgtcgttttattattattattatttagagtgctcagagcaccatatggagcccaggaaaagaaggggaggagagtgaggacaactccatggaggaggcccccgtggaggac

SEQ ID NO: 439697 - DNA, 120 bp, Artificial Sequence
  ENSG00000153789_13 (sequence is synthesized)
ctcagggcactggggcagggaccccataagagagaactgcccacaacagtcagaagaacttagctggccttggatcctcaggtgggctctgctgtgtgccctcaggcaagccacgtgtcc

SEQ ID NO: 439698 - DNA, 120 bp, Artificial Sequence
  ENSG00000153789_14 (sequence is synthesized)
tctgagcctcagtttcctcatctgtacaacagggccaatatcactcacttcacaggttgctctgggggatcgctgtgcctggcatatagtaggtgttcaataaatgccctgtgactctca

SEQ ID NO: 439699 - DNA, 120 bp, Artificial Sequence
  ENSG00000153790_0 (sequence is synthesized)
agagcccctctcgcctccgacccggcgcctcgcactccgttcactctcggttcctcttcgcattcttgccagtcccgtagcgctgggctggtttcctccgaggtctctaagagcctccta

SEQ ID NO: 439700 - DNA, 120 bp, Artificial Sequence
  ENSG00000153790_1 (sequence is synthesized)
ctgcgccccgctcgccgcccggaagcccccagcccctcaaggacgcatcacctaatgccgcggtcacggccaccgtcacaagcgcccccagccccaccccaccccggcctgcccgccgtc

SEQ ID NO: 439701 - DNA, 120 bp, Artificial Sequence
  ENSG00000153790_2 (sequence is synthesized)
cttctcccgcccccgcccctgcctgccagctccaccgggccgtaggtgcggacgacctcaaaattcctcggcccgcgaaggccgccagctgcggggaggggaggggaggcgcggtcccgc

SEQ ID NO: 439702 - DNA, 120 bp, Artificial Sequence
  ENSG00000153790_3 (sequence is synthesized)
agcgcccccaggctcatgtcccaggtatgtccagacccccgaggcaccgcttgcagggcagtgacagcccgtgaggctcggcctcgacccctggcacccttggtcccagctacgccggct

SEQ ID NO: 439703 - DNA, 120 bp, Artificial Sequence
  ENSG00000153790_4 (sequence is synthesized)
cctggccttcccccaagtccgagagagaggtgggattctccccgacgcagttggaaaccgggaatcccctttagggtcccgttcgtgctgcactactgactccaccatctgcaaagggat

SEQ ID NO: 439704 - DNA, 120 bp, Artificial Sequence
  ENSG00000153790_5 (sequence is synthesized)
tcttgtccagaatccccgaaggctttaggacagcgcttattttgttgaatgaagagtctctaattttcggaaagaccacaggctaaaagtcaagttgtgcctttttagccaagaagcatg

SEQ ID NO: 439705 - DNA, 120 bp, Artificial Sequence
  ENSG00000153790_6 (sequence is synthesized)
gaagtcattcacggcaggccctactgttgcagggagcttgaaggagctgacatactgtccaacaccttttactctaatgaattgcacaaccccctccagacggttactcgcccaactgcc

SEQ ID NO: 439706 - DNA, 120 bp, Artificial Sequence
  ENSG00000153790_7 (sequence is synthesized)
tcagaggacaggtatcaggaattaagggagtcacttcaacaatgtaggcttccttggggcgctgaaagagagtatggtgggataataccgatttcactccccgaggaccacaggccaaag

SEQ ID NO: 439707 - DNA, 120 bp, Artificial Sequence
  ENSG00000153790_8 (sequence is synthesized)
tatgagcctcctcgtgtcatgggcaaaggacatcagcattatggatttggtggagaaacctggccaagaaagcttcctgttgaacaattttattatttgacccagaacaaaaaaagtgat

SEQ ID NO: 439708 - DNA, 120 bp, Artificial Sequence
  ENSG00000153790_9 (sequence is synthesized)
gtctatggaaatgattctttgatacccaagccgcctaattcaacagtaggagagatctgcttgccatatccaattgaacacccctaccacacacacatctgtcgcggcgccatgttcccc

SEQ ID NO: 439709 - DNA, 120 bp, Artificial Sequence
  ENSG00000153790_10 (sequence is synthesized)
accttcacgtcacctgaggacctctacacgggcattaaagcccgcacccagcagccctttcctcccacggtgccaaccaaggcttatgattcaacagttttgaagacaagaggtaatcct

SEQ ID NO: 439710 - DNA, 120 bp, Artificial Sequence
  ENSG00000153790_11 (sequence is synthesized)
tatagatatgaactgattgatattcccatggattcaaagaagaaagcactgacttggccaggtcaaggtgtatattatgattttcccagaggtgttgagaaaaataagccagtattctac

SEQ ID NO: 439711 - DNA, 120 bp, Artificial Sequence
  ENSG00000153790_12 (sequence is synthesized)
ccaaaacctcctaaaaccttcgctcctaacacttctttaaattcatgggaccctatttgctctgccaaagaagccaacatacaaagaaatcttgagaggtcccactggctcacttcgtac

SEQ ID NO: 439712 - DNA, 120 bp, Artificial Sequence
  ENSG00000153790_13 (sequence is synthesized)
actcatgattttacaggtctggggcccatggacccccttgaactggatgattaccatgaaaagatggtagcagagttaacacgaaagataggatttgacccagagccgcaagaaaaattc

SEQ ID NO: 439713 - DNA, 120 bp, Artificial Sequence
  ENSG00000153790_14 (sequence is synthesized)
caccctgtcttcaaacctcccagaccgttggaaggacgaattgcccgattaattcagaaccgacgttctctggaggctatagtccagcaaagaccacgttcctgtccagattgtactcct

SEQ ID NO: 439714 - DNA, 120 bp, Artificial Sequence
  ENSG00000153790_15 (sequence is synthesized)
ggcacttagtgataacataccagccggtgtgacccataaaaaccaggatattgaagagaagatcatagaagaacagagcttgctgtctacctatgaactcccatcttgttacccaacaaa

SEQ ID NO: 439715 - DNA, 120 bp, Artificial Sequence
  ENSG00000153790_16 (sequence is synthesized)
agacctaactagcatttatgacataaagccatttccaaaaatcacagatactaaaaagacagaagatttatactggagacagcagtcactaaaaacccaacccacaccttactgtaaacc

SEQ ID NO: 439716 - DNA, 120 bp, Artificial Sequence
  ENSG00000153790_17 (sequence is synthesized)
agaccactggattcactatgaaaatcttaaatctcccctacgtgatcagtataatatgtgtccagaccctgttagccttagtaaacctagtgttttacaaaataaacaagacacggaagc

SEQ ID NO: 439717 - DNA, 120 bp, Artificial Sequence
  ENSG00000153790_18 (sequence is synthesized)
tttcactttagaacattttttaagtaagccagaagaagagttgttcttgaatatggaaaacaatgaagaaacaagacctgttcttggttggattcctagagctggagtgaccaaacctca

SEQ ID NO: 439718 - DNA, 120 bp, Artificial Sequence
  ENSG00000153790_19 (sequence is synthesized)
gaccaacctgctggagcttaagaactctttttcaaaaactggtgcacaaaagcgtttccataaatcaattctagaagaccataaagacctcagggataatgagcattcggggatgaagca

SEQ ID NO: 439719 - DNA, 120 bp, Artificial Sequence
  ENSG00000153790_20 (sequence is synthesized)
ccaattctatggccataattcctattatttctataattgagatactcattcttcccttcaaaacccagcctcttgcaagaagctaaaaaatataacagaatttccttcgtattgctggat

SEQ ID NO: 439720 - DNA, 120 bp, Artificial Sequence
  ENSG00000153790_21 (sequence is synthesized)
tctgttttctagattaaaccacaaggaccttgttagtgaggtttacattttcaggaatttaagttagtatctggttggaggaacccagaaaaggtgatgttatgacttcttgaaaagttt

SEQ ID NO: 439721 - DNA, 120 bp, Artificial Sequence
  ENSG00000153790_22 (sequence is synthesized)
aacaatttggcaataaaatattagaactagaaaaatttatagtctttaatctctcatcttcagattatacaaggaaattttccaaaatcacaaaaagcaatgtgtacaacaaagtttaca

SEQ ID NO: 439722 - DNA, 120 bp, Artificial Sequence
  ENSG00000153790_23 (sequence is synthesized)
tcattgtttcaccaaaaaaaattgaaaagctggaaagaactcaaatgatcaataattaatgaatgactatacaaattatagtatcttaataaaaatgagaacactgtccctttatgtaaa

SEQ ID NO: 439723 - DNA, 120 bp, Artificial Sequence
  ENSG00000153790_24 (sequence is synthesized)
tttttgtacatagtagcattaggtagaaaagacaaaacccaaacacctagttaattgagggatggacacctctaaaaactatattgtcttaaaagtatgtggactctgttcctttatgta

SEQ ID NO: 439724 - DNA, 120 bp, Artificial Sequence
  ENSG00000153790_25 (sequence is synthesized)
aacatgtaaagaaaataagtcagcgaaaaaaatgaaacccaaaactctctgcatgtacacattacaaattgaattgtttgcttacccttaaccttctgattgagaaacataactgtttct

SEQ ID NO: 439725 - DNA, 120 bp, Artificial Sequence
  ENSG00000153790_26 (sequence is synthesized)
tttatgcagataaaattattttactgaagatctagcaatggccttaattagcaactggtgagttctaattatagcaagaaaggatggcttggtatcagttattacagagccccaaatctt

SEQ ID NO: 439726 - DNA, 120 bp, Artificial Sequence
  ENSG00000153790_27 (sequence is synthesized)
catttctggagtgtgttctctaagagtttggctaactcccatatgcaagtcaattcatttaatgtgccaagaggtagattttaaacatagtctatcgtggaagttcaagaggaatttctt

SEQ ID NO: 439727 - DNA, 120 bp, Artificial Sequence
  ENSG00000153790_28 (sequence is synthesized)
taagtattttgtgaatatttattttaattttatgaccaacatgtcatttggttgtaacctccttaaaactattctgggctaaagttagagaatttttttccaactgcattctgtacagca

SEQ ID NO: 439728 - DNA, 120 bp, Artificial Sequence
  ENSG00000153790_29 (sequence is synthesized)
ctagttacattatgacaggaagtaaaagtttacatggtgaaataatactggggaaatcggagcaacaatgtcagttgcatgccttggtcactgggttctctatagcctttaatatgtaat

SEQ ID NO: 439729 - DNA, 120 bp, Artificial Sequence
  ENSG00000153790_30 (sequence is synthesized)
gcaattgggagtgtctgaagtgagggagatatagtgtacacactttttatcacagagtagatcactggaatggaattccaaataataaactttggaaggtgtaactctccagtataaaaa

SEQ ID NO: 439730 - DNA, 120 bp, Artificial Sequence
  ENSG00000153790_31 (sequence is synthesized)
ctcggcccgcgaaggccgccagctgcggggaggggaggggaggcgcggtcccgcagcgcccccaggctcatgtcccagggtcccgttcgtgctgcactactgactccaccatctgcaaag

SEQ ID NO: 439731 - DNA, 120 bp, Artificial Sequence
  ENSG00000153802_0 (sequence is synthesized)
attcatttgagtgggaatctcaaagcagttgagtaggcagaaaaaagaacctcttcattaaggattaaaatgtataggccagcacgtgtaacttcgacttcaagatttctgaatccatat

SEQ ID NO: 439732 - DNA, 120 bp, Artificial Sequence
  ENSG00000153802_1 (sequence is synthesized)
gtagtatgtttcattgtcgtcgcaggggtagtgatcctggcagtcaccatagctctacttgtttactttttagcttttgatcaaaaatcttacttttataggagcagttttcaactccta

SEQ ID NO: 439733 - DNA, 120 bp, Artificial Sequence
  ENSG00000153802_2 (sequence is synthesized)
aatgttgaatataatagtcagttaaattcaccagctacacaggaatacaggactttgagtggaagaattgaatctctgattactaaaacattcaaagaatcaaatttaagaaatcagttc

SEQ ID NO: 439734 - DNA, 120 bp, Artificial Sequence
  ENSG00000153802_3 (sequence is synthesized)
atcagagctcatgttgccaaactgaggcaagatggtagtggtgtgagagcggatgttgtcatgaaatttcaattcactagaaataacaatggagcatcaatgaaaagcagaattgagtct

SEQ ID NO: 439735 - DNA, 120 bp, Artificial Sequence
  ENSG00000153802_4 (sequence is synthesized)
gttttacgacaaatgctgaataactctggaaacctggaaataaacccttcaactgagataacatcacttactgaccaggctgcagcaaattggcttattaatgaatgtggggccggtcca

SEQ ID NO: 439736 - DNA, 120 bp, Artificial Sequence
  ENSG00000153802_5 (sequence is synthesized)
gacctaataacattgtctgagcagagaatccttggaggcactgaggctgaggagggaagctggccgtggcaagtcagtctgcggctcaataatgcccaccactgtggaggcagcctgatc

SEQ ID NO: 439737 - DNA, 120 bp, Artificial Sequence
  ENSG00000153802_6 (sequence is synthesized)
aataacatgtggatcctgacagcagctcactgcttcagaagcaactctaatcctcgtgactggattgccacgtctggtatttccacaacatttcctaaactaagaatgagagtaagaaat

SEQ ID NO: 439738 - DNA, 120 bp, Artificial Sequence
  ENSG00000153802_7 (sequence is synthesized)
attttaattcataacaattataaatctgcaactcatgaaaatgacattgcacttgtgagacttgagaacagtgtcacctttaccaaagatatccatagtgtgtgtctcccagctgctacc

SEQ ID NO: 439739 - DNA, 120 bp, Artificial Sequence
  ENSG00000153802_8 (sequence is synthesized)
cagaatattccacctggctctactgcttatgtaacaggatggggcgctcaagaatatgctggccacacagttccagagctaaggcaaggacaggtcagaataataagtaatgatgtatgt

SEQ ID NO: 439740 - DNA, 120 bp, Artificial Sequence
  ENSG00000153802_9 (sequence is synthesized)
aatgcaccacatagttataatggagccatcttgtctggaatgctgtgtgctggagtacctcaaggtggagtggacgcatgtcagggtgactctggtggcccactagtacaagaagactca

SEQ ID NO: 439741 - DNA, 120 bp, Artificial Sequence
  ENSG00000153802_10 (sequence is synthesized)
cggcggctttggtttattgtggggatagtaagctggggagatcagtgtggcctgccggataagccaggagtgtatactcgagtgacagcctaccttgactggattaggcaacaaactggg

SEQ ID NO: 439742 - DNA, 120 bp, Artificial Sequence
  ENSG00000153802_11 (sequence is synthesized)
gcaaagtctgtatgcaggtgtgcctgtcttaaattccaaagctttacatttcaactgaaaaagaaactagaaatgtcctaatttaacatcttgttacataaatatggtttaacaaacact

SEQ ID NO: 439743 - DNA, 120 bp, Artificial Sequence
  ENSG00000153802_12 (sequence is synthesized)
gtttaacctttctttattattaaaggttttctattttctccagagaactatatgaatgttgcatagtactgtggctgtgtaacagaagaaacacactaaactaattacaaagttaacaat

SEQ ID NO: 439744 - DNA, 120 bp, Artificial Sequence
  ENSG00000153802_13 (sequence is synthesized)
ttcattacagttgtgctaaatgcccgtagtgagaagaacaggaaccttgagcatgtatagtagaggaacctgcacaggtctgatgggtcagaggggtcttctctgggtttcactgaggat

SEQ ID NO: 439745 - DNA, 120 bp, Artificial Sequence
  ENSG00000153802_14 (sequence is synthesized)
gagaagtaagcaaactgtggaaacatgcaaaggaaaaagtgatagaataatattcaagacaaaaagaacagtatgaggcaagagaaataatatgtatttaaaatttttggttactcaata

SEQ ID NO: 439746 - DNA, 120 bp, Artificial Sequence
  ENSG00000153802_15 (sequence is synthesized)
tcttatacttagtatgagtcctaaaattaaaaatgtgaaactgttgtactatacgtataacctaaccttaattattctgtaagaacatgcttccataggaaatagtggataattttcagc

SEQ ID NO: 439747 - DNA, 120 bp, Artificial Sequence
  ENSG00000153802_16 (sequence is synthesized)
tatttaaggcaaaagctaaaatagttcactcctcaactgagacccaaagaattatagatatttttcatgatgacccatgaaaaatatcactcatctacataaaggagagactatatctat

SEQ ID NO: 439748 - DNA, 120 bp, Artificial Sequence
  ENSG00000153802_17 (sequence is synthesized)
tttatagagaagctaagaaatatacctacacaaacttgtcaggtgctttacaactacatagtactttttaacaacaaaataataattttaagaatgaaaaatttaatcatcgggaagaac

SEQ ID NO: 439749 - DNA, 120 bp, Artificial Sequence
  ENSG00000153802_18 (sequence is synthesized)
gtcccactacagacttcctatcactggcagttatatttttgagcgtaaaagggtcgtcaaacgctaaatctaagtaacgaattgaaagtttaaagagggggaagagttggtttgcaaagg

SEQ ID NO: 439750 - DNA, 120 bp, Artificial Sequence
  ENSG00000153802_19 (sequence is synthesized)
aaaagtttaaatagcttaatatcaatagaatgatcctgaagacagaaaaaactttgtcactcttcctctctcattttctttctctctctctccccttctcatacacatgcctcccccacc

SEQ ID NO: 439751 - DNA, 120 bp, Artificial Sequence
  ENSG00000153802_20 (sequence is synthesized)
aaagaatataatgtaaattaaatccactaaaatgtaatggcatgaaaatctctgtagtctgaatcactaatattcctgagtttttatgagctcctagtacagctaaagtttgcctatgca

SEQ ID NO: 439752 - DNA, 120 bp, Artificial Sequence
  ENSG00000153802_21 (sequence is synthesized)
tgatcatctatgcgtcagagcttcctccttctacaagctaactccctgcatctgggcatcaggactgctccatacatttgctgaaaacttcttgtatttcctgatgtaaaattgtgcaaa

SEQ ID NO: 439753 - DNA, 120 bp, Artificial Sequence
  ENSG00000153802_22 (sequence is synthesized)
cacctacaataaagccatctacttttagggaaagggagttgaaaatgcaaccaactcttggcgaactgtacaaacaaatctttgctatactttatttcaaataaattctttttaaaataa

SEQ ID NO: 439754 - DNA, 120 bp, Artificial Sequence
  ENSG00000153802_23 (sequence is synthesized)
aaacaattttatttcaatatatccctcaagtttaccaattcaaattcatattttaattgagaggctgacttttctttctttgaaactaaactgtgaaaacaatccattaaaaagctaaat

SEQ ID NO: 439755 - DNA, 120 bp, Artificial Sequence
  ENSG00000153802_24 (sequence is synthesized)
aaaagaacctcttcattaaggattaaaatgtatagataaagaaaatctcagataaatgacaatatgacctccaagcaaacaaaggcacgtgtaacttcgacttcaagatttctgaatcca

SEQ ID NO: 439756 - DNA, 120 bp, Artificial Sequence
  ENSG00000153802_25 (sequence is synthesized)
ctgctcaaaatttgaagcctatatgccaactaaattcagaaatgttctccaaaatgctatctataagcaacagtagtcacaaatgcattgtagaaatatatcgatcatgctttttggaaa

SEQ ID NO: 439757 - DNA, 120 bp, Artificial Sequence
  ENSG00000153802_26 (sequence is synthesized)
atccagcatgtcctgaggaagaatgtataagacataaaagtcataaattatggaaagactcttcagcttcttccaaatgtaaaggaatcatgatcttcccagcacattaatgccctttct

SEQ ID NO: 439758 - DNA, 120 bp, Artificial Sequence
  ENSG00000153814_0 (sequence is synthesized)
ccggtggctcctcgctctccttccatctctctcgccccctctccctccgtcccgtcctcgccgctcccctcaccccgcctctctccccctcccccagcccctcctctcctcaccccaccc

SEQ ID NO: 439759 - DNA, 120 bp, Artificial Sequence
  ENSG00000153814_1 (sequence is synthesized)
cccagcccctcctctcctcaccccacccggcctccctccctccctcgcccgcccggcgctcgcagagccgacaccaggggggctctcgatgtagcaccatgacaggcatcgccgccgcct

SEQ ID NO: 439760 - DNA, 120 bp, Artificial Sequence
  ENSG00000153814_2 (sequence is synthesized)
ccttcttctccaatacctgccgattcgggggctgcggactccacttccccaccctggccgacctcatcgagcacatcgaggacaaccacatcgatacagatccacgggttttagaaaaac

SEQ ID NO: 439761 - DNA, 120 bp, Artificial Sequence
  ENSG00000153814_3 (sequence is synthesized)
aagaattacagcagccaacctatgttgccctgagttacataaatagattcatgacagatgctgcccgccgagagcaggagtccctaaagaagaagattcagccgaagctctcgctgactc

SEQ ID NO: 439762 - DNA, 120 bp, Artificial Sequence
  ENSG00000153814_4 (sequence is synthesized)
tgtccagctcagtgtctcgagggaatgtgtccactcccccacgccacagcagtggaagccttactccccccgtgaccccacccatcaccccctcctcttcattccgcagcagcactccga

SEQ ID NO: 439763 - DNA, 120 bp, Artificial Sequence
  ENSG00000153814_5 (sequence is synthesized)
caggcagcgagtatgacgaggaggaggtggactatgaggagtcggacagcgatgagtcctggaccacagagagtgccatcagctccgaagccatcctcagctccatgtgcatgaatggag

SEQ ID NO: 439764 - DNA, 120 bp, Artificial Sequence
  ENSG00000153814_6 (sequence is synthesized)
gggaagagaagccttttgcctgcccagttcctggatgtaaaaagagatacaagaatgtgaatggcataaagtatcacgctaagaatggtcacagaacacagattcgtgtccgcaaaccat

SEQ ID NO: 439765 - DNA, 120 bp, Artificial Sequence
  ENSG00000153814_7 (sequence is synthesized)
tcaagtgtcgctgtgggaagagttacaagacagctcagggcctgcggcaccacacaatcaatttccatcccccggtgtcggctgagattatcaggaagatgcagcaataacatgctggtc

SEQ ID NO: 439766 - DNA, 120 bp, Artificial Sequence
  ENSG00000153814_8 (sequence is synthesized)
ataactgtgccaagaaatcctcaccagcagttgctgattttgaaaacagccaccttttttcaggggaagcattcagcaaccctttaaagaaaaagaattaaatgcatgctttaaattttt

SEQ ID NO: 439767 - DNA, 120 bp, Artificial Sequence
  ENSG00000153814_9 (sequence is synthesized)
tctgtaattttggaatgatgtatctttgtagagttaatgattttgtacatttgcacatgtaatcatcatacccattttcattactttgatataaggtgctaaacaaaaaaagctctaggt

SEQ ID NO: 439768 - DNA, 120 bp, Artificial Sequence
  ENSG00000153814_10 (sequence is synthesized)
tcttcagcacatttcccccaaaacaaaataaaattgagggcatgttgcatattgttgaattgtattgcggtggtatcaacctggggggaggaggggctggcactgagatttttttttcaa

SEQ ID NO: 439769 - DNA, 120 bp, Artificial Sequence
  ENSG00000153814_11 (sequence is synthesized)
gattgtaatgtgattgaagttttcaacacatcaactcacatatgttcaaaaccaaaataataccttcattatcaaactggttaccatgccttacataatggagttagtatttgtgagtag

SEQ ID NO: 439770 - DNA, 120 bp, Artificial Sequence
  ENSG00000153814_12 (sequence is synthesized)
aaagactttaggtaatggaaatataaataagaaagaatgtttaacataatatgctaaaaatattttcatatttaaataacatacgtaaaggtgtgctttctgtgttttatattatcttgc

SEQ ID NO: 439771 - DNA, 120 bp, Artificial Sequence
  ENSG00000153814_13 (sequence is synthesized)
attttagtgttataaatggcattttgtacaaaatagtctattcagttcgttcattcatttaacacacattgattgagtgcctgctgggtacaagggattcaatttatgcctattgatatc

SEQ ID NO: 439772 - DNA, 120 bp, Artificial Sequence
  ENSG00000153814_14 (sequence is synthesized)
tgcggaccaagatacccatttagtgaaatacttttttccctgaaatctgttagaaaagactttgaaatacttcagtgcaaagtgtgtgtgtgtgaagtttagttatatcttcatcttcag

SEQ ID NO: 439773 - DNA, 120 bp, Artificial Sequence
  ENSG00000153814_15 (sequence is synthesized)
atgaagttttaaagcactttgtagttctctattgccaacaatttaatgtttatgtgttgccaattcttgcaaccactgccctaccaaacctgtgggttgcaaatcagaactaaaattcta

SEQ ID NO: 439774 - DNA, 120 bp, Artificial Sequence
  ENSG00000153814_16 (sequence is synthesized)
agcacgtttcaaagatgaacacttttgttaagacccctattgcctcttcttcatgctcattttttactttttttaaaaggtacttttctcatcacattgtagagaggtctgcattctcat

SEQ ID NO: 439775 - DNA, 120 bp, Artificial Sequence
  ENSG00000153814_17 (sequence is synthesized)
tggaaatgtctgtttagctttataaaacaaacactttgctgaaataggaaaatgagccttattgacaattaagtgcttcttgcagcaggtggtcaaagaaaagcatgactaatacgacct

SEQ ID NO: 439776 - DNA, 120 bp, Artificial Sequence
  ENSG00000153814_18 (sequence is synthesized)
attagagtaatctacatctggaccattccttaagtttttcctcaccgacagtaccatcatgccttgagtgttcttttctcccaagtgctattccttaaacacgagagtttaccagttgcc

SEQ ID NO: 439777 - DNA, 120 bp, Artificial Sequence
  ENSG00000153814_19 (sequence is synthesized)
taataatgcaataaaaaatgctttgagatagctaactgcccataaaacaaactcaaattgcttataaagtttcttcccatgttcccatttgatgaaaagtcttacatcacatataactgg

SEQ ID NO: 439778 - DNA, 120 bp, Artificial Sequence
  ENSG00000153814_20 (sequence is synthesized)
gaagcaggggtccctcctcaattttcagacattttgaaaggatgacagttctgtttgttagatgagtaaacctctatattcataagttctaaaatccttcattatgagggattcaaagta

SEQ ID NO: 439779 - DNA, 120 bp, Artificial Sequence
  ENSG00000153814_21 (sequence is synthesized)
tttataaaaacactgccctctaaaaatttcctcagatctgaagtatggtcttggtcctgaatatacagtgttatcctatgtttaaaagggtgatccagacatgagacgcaactagttggt

SEQ ID NO: 439780 - DNA, 120 bp, Artificial Sequence
  ENSG00000153814_22 (sequence is synthesized)
gcataagaaggccccacttggctatttcatatctacctacaattgaccaaaaaaaattttttaggccagcaattattatttagcttcgctctttctagtgcaagaaactgcaggctggat

SEQ ID NO: 439781 - DNA, 120 bp, Artificial Sequence
  ENSG00000153814_23 (sequence is synthesized)
cagtagttcaacagctaaacagtcataaaatagtcattgtgcatgttaaatttctttcaatgctttcaaagataaattccaatttctatttacttattcattgtgacagtattactaaac

SEQ ID NO: 439782 - DNA, 120 bp, Artificial Sequence
  ENSG00000153814_24 (sequence is synthesized)
aggtaaggatgggaatattttgttatactgtgtatagtgaatgtattgtactgtgtctgtgaaaactgtgctttaaattatattttcatatgttttgttggggacagagcacattaagtc

SEQ ID NO: 439783 - DNA, 120 bp, Artificial Sequence
  ENSG00000153814_25 (sequence is synthesized)
tgaaagcaacagaggtttgttttagaactgaaggcaatttaatcaaaattcctgtcaagaaaagctgcttataaatgtaaatgaaatcacatttaaaataaactgcctctgacccaaaaa

SEQ ID NO: 439784 - DNA, 120 bp, Artificial Sequence
  ENSG00000153814_26 (sequence is synthesized)
agtcagggccctgcgctcctggtgagtccgggctctgttcacaaagctggcggcttggaggaggcagcccctgcattctcctgtgctcctctctggcagttgacctagcgggaagtgcca

SEQ ID NO: 439785 - DNA, 120 bp, Artificial Sequence
  ENSG00000153814_27 (sequence is synthesized)
aaagaagccttgggtgctggagaagagatgctcagccaaggctgcagaggcttcagccactagcatggatgcagttgggagggacaaatgccagtgtcacattcatcagcagttccttcg

SEQ ID NO: 439786 - DNA, 120 bp, Artificial Sequence
  ENSG00000153814_28 (sequence is synthesized)
ctcacttctacctctactgagaacagggagcttggggttgagaaaacgtttgatgcttttgaaatgctgagaaatgaagacatggttgttgtacgaatatgcatgtccatgcctgccgta

SEQ ID NO: 439787 - DNA, 90 bp, Artificial Sequence
  ENSG00000153814_29 (sequence is synthesized)
ctcctgggctcaagcaatcctccctatacagatccacgggttttagaaaaacaagaattacagcagccaacctatgttgccctgagttac

SEQ ID NO: 439788 - DNA, 120 bp, Artificial Sequence
  ENSG00000153815_0 (sequence is synthesized)
gccccagcagcccaggacagccccctctccccgcccccagccccctcccccggcgcggccatggatgtgaccagcagctcgggcggcggcggcgacccccggcagatcgaggagaccaag

SEQ ID NO: 439789 - DNA, 120 bp, Artificial Sequence
  ENSG00000153815_1 (sequence is synthesized)
gaggagaccaagccgctgctggggggcgacgtgtcggcccccgaaggcacgaagatgggcgccgtgccctgccgccgggctcttctgctttgcaacgggatgaggtacaaactgctgcag

SEQ ID NO: 439790 - DNA, 120 bp, Artificial Sequence
  ENSG00000153815_2 (sequence is synthesized)
gagggcgacattcaggtctgtgtcatccggcacccgcggacctttctcagcaagatcctcacctcgaaattcctgaggcgctgggagccgcaccacctaacgctggccgacaacagcctg

SEQ ID NO: 439791 - DNA, 120 bp, Artificial Sequence
  ENSG00000153815_3 (sequence is synthesized)
gcgtccgccacgccaactgggtacatggaaaactcagtctcctacagcgcaattgaagacgttcagctgctgtcctgggagaatgccccgaagtactgtttacagctcacgattcctggg

SEQ ID NO: 439792 - DNA, 120 bp, Artificial Sequence
  ENSG00000153815_4 (sequence is synthesized)
ggaactgtcttactgcaggctgccaatagctacctgcgagaccagtggttccattctctgcaatggaagaaaaagatttacaaatataagaaagtgctgagtaacccaagccgctgggaa

SEQ ID NO: 439793 - DNA, 120 bp, Artificial Sequence
  ENSG00000153815_5 (sequence is synthesized)
gttgtcttgaaagagatccggaccctggtggacatggccctgacatcccccctgcaggatgactccatcaaccaggccccactggaaatcgtctcgaaactgctctcagagaacacaaac

SEQ ID NO: 439794 - DNA, 120 bp, Artificial Sequence
  ENSG00000153815_6 (sequence is synthesized)
ttgaccacccaggagcatgaaaacatcattgtggcaatcgctcctttgctggaaaacaaccacccaccaccagatctctgtgaattcttttgcaagcactgcagagagcggccccggtcc

SEQ ID NO: 439795 - DNA, 120 bp, Artificial Sequence
  ENSG00000153815_7 (sequence is synthesized)
atggtggtcatcgaggtgttcacccccgtggtgcagcgaatcctcaagcataacatggactttgggaagtgcccgcgactgaggctgtttactcaggagtacatccttgccttgaacgag

SEQ ID NO: 439796 - DNA, 120 bp, Artificial Sequence
  ENSG00000153815_8 (sequence is synthesized)
ctcaacgcggggatggaagtggtgaagaagttcattcagagcatgcacggccccacagggcactgcccccacccccgggtcctgcccaacctggtggccgtgtgcctggctgccatctac

SEQ ID NO: 439797 - DNA, 120 bp, Artificial Sequence
  ENSG00000153815_9 (sequence is synthesized)
tcctgctatgaagagttcatcaacagccgcgacaattccccaagcctgaaggaaatccggaacggctgccagcagccgtgcgaccggaagcccactttacctctgcgccttctgcacccc

SEQ ID NO: 439798 - DNA, 120 bp, Artificial Sequence
  ENSG00000153815_10 (sequence is synthesized)
agcccggacctggtgtctcaggaagccacgctgtctgaggcccggctcaagtcggtggtcgtggcctccagtgagatccacgtggaggtggaacgcaccagcactgccaagccggcgctg

SEQ ID NO: 439799 - DNA, 120 bp, Artificial Sequence
  ENSG00000153815_11 (sequence is synthesized)
acggccagcgcaggcaacgacagcgagcccaacctcatcgactgcctcatggtcagccccgcctgcagcaccatgagcatcgagctgggcccccaggccgaccgcacgctcggctgctac

SEQ ID NO: 439800 - DNA, 120 bp, Artificial Sequence
  ENSG00000153815_12 (sequence is synthesized)
gtggaaatcctcaagctgctgtcagactatgatgactggagaccgtctctggccagtttgcttcaacccattccattccccaaagaagctctcgcacatgagaagttcaccaaggaactg

SEQ ID NO: 439801 - DNA, 120 bp, Artificial Sequence
  ENSG00000153815_13 (sequence is synthesized)
aagtacgtgattcagaggttcgccgaagaccccaggcaagaggtccactcatgcctgctgagcgtgcgggccggcaaagatggctggttccagctctacagccccggaggggtggcctgc

SEQ ID NO: 439802 - DNA, 120 bp, Artificial Sequence
  ENSG00000153815_14 (sequence is synthesized)
gacgatgacggggagctgttcgccagcatggtgcacatcctcatgggctcctgttacaagaccaaaaaattcctgctctccctggcagaaaacaagctgggtccctgcatgctcctggca

SEQ ID NO: 439803 - DNA, 120 bp, Artificial Sequence
  ENSG00000153815_15 (sequence is synthesized)
ctgagggggaaccagaccatggtggagatcctgtgcttgatgctggaatacaacatcatcgacaacaacgacacccaactgcagatcatctcaaccctggagagcacagacgtggggaag

SEQ ID NO: 439804 - DNA, 120 bp, Artificial Sequence
  ENSG00000153815_16 (sequence is synthesized)
cgcatgtacgagcagctgtgtgaccggcagcgggagctgaaggagctgcaaaggaaaggcgggcccaccaggctaacactgccctccaagtccacagacgctgacttggctcgtttgctg

SEQ ID NO: 439805 - DNA, 120 bp, Artificial Sequence
  ENSG00000153815_17 (sequence is synthesized)
agctccggctccttcggaaacctggagaacctcagtttggccttcaccaatgtaaccagtgcctgcgccgagcacctcatcaaactgccttcgctcaagcagctgaacctgtggtccact

SEQ ID NO: 439806 - DNA, 120 bp, Artificial Sequence
  ENSG00000153815_18 (sequence is synthesized)
acctcaccatgctccaggtgctgaacctgtgcgagaccccggtcacagacgctggcctgctggccctgagctccatgaagagtctctgcagtttaaacatgaacagcaccaagctctcag

SEQ ID NO: 439807 - DNA, 120 bp, Artificial Sequence
  ENSG00000153815_19 (sequence is synthesized)
ctgacacctacgaagatctgaaggccaagcttcccaatttgaaggaagtggacgtccgctacaccgaagcctggtgaagctcccagctcaaggcaggaagacgtttgcaaccgcgacaaa

SEQ ID NO: 439808 - DNA, 120 bp, Artificial Sequence
  ENSG00000153815_20 (sequence is synthesized)
gcgacaaaataactcttgactaacagccgcagagcagccggtcctggggtcccaccctggtgccctggctgtgagatagatggggagtctttctgggggcggaggggggagggggtgggg

SEQ ID NO: 439809 - DNA, 120 bp, Artificial Sequence
  ENSG00000153815_21 (sequence is synthesized)
cacaagcacgcccagcccccgccgaattcttttagcttcgtaattggaacctttgacctgatctaaagtggactttgtagcaacaagaggagcatcagcgggtcggggaggggtttgggg

SEQ ID NO: 439810 - DNA, 120 bp, Artificial Sequence
  ENSG00000153815_22 (sequence is synthesized)
gtgggctggggggtgggggaccctttgtggattttctttgcctttgtgtttgatgccgtcgtgtgggaaaagtcaactccgatgccaccattgcgggccggacgaaggatgctttcttcc

SEQ ID NO: 439811 - DNA, 120 bp, Artificial Sequence
  ENSG00000153815_23 (sequence is synthesized)
tagaggctccgagctgagctgcgaactcgccccccgcccttgggacaagaagacccagtcacatcactgcacccgtcctgtgtcctcaccattgctatgcaaagtgattcttgttgtaca

SEQ ID NO: 439812 - DNA, 120 bp, Artificial Sequence
  ENSG00000153815_24 (sequence is synthesized)
taagatttaaataatgcacctatttaagacatgttgacaaattgcgggtctgggacccgcctcttatttatgaagtctttgaccgtcccccccgcccgaccccaccgccctcccgccccc

SEQ ID NO: 439813 - DNA, 120 bp, Artificial Sequence
  ENSG00000153815_25 (sequence is synthesized)
acctggcgtgtagtactgtataaaccagtcagctgtcgggttagtggtagtattattgttatttttttaaaggaaacaaacagacaacaaaaagaagaaaaaaaaaaagaacctccttgg

SEQ ID NO: 439814 - DNA, 120 bp, Artificial Sequence
  ENSG00000153815_26 (sequence is synthesized)
aaaaattaattgctttttcgtaatggattctctatgctaatgctctctcgtctgtctgtctgtctgcccactcccccacccaccactgtgcgtttctgatttccaaatgtctccaactcc

SEQ ID NO: 439815 - DNA, 120 bp, Artificial Sequence
  ENSG00000153815_27 (sequence is synthesized)
ctcacgaggtggggctcaggctggaggaggagggattaagatccccttgctccactaaggcccaagctctttctctcggcaccttttagacttgaatgggaggctgctaacccgccctct

SEQ ID NO: 439816 - DNA, 120 bp, Artificial Sequence
  ENSG00000153815_28 (sequence is synthesized)
ccagtccaccccggtaaaagagctgttccccacccccagggagctcctgtccctgtcagcctttgctgtcccctgtccccaacggagactctgtcacccctgggctccccctgccatcgt

SEQ ID NO: 439817 - DNA, 120 bp, Artificial Sequence
  ENSG00000153815_29 (sequence is synthesized)
gtgcttcacgtggccccatgcatgcccgcctctctgcatggtctcttgggaaaagagagatgtgtcgcctccgccagtccgactgccctccccaccccacccccgccaccccccacatgt

SEQ ID NO: 439818 - DNA, 120 bp, Artificial Sequence
  ENSG00000153815_30 (sequence is synthesized)
gaccactgcaacgaagacactccttctgtccccacctgctccgaagacaaaccaacctccgtttcttttataaacagtcggctttttcttaataagccctcactgtacagaacagcccgt

SEQ ID NO: 439819 - DNA, 120 bp, Artificial Sequence
  ENSG00000153815_31 (sequence is synthesized)
tgatggtttatttggggtccccctctccccccagcccttttttctgttggtttagcacaaatacttccctcctccggcacctccaaacctaccccacagtcagtgtacttgttttatata

SEQ ID NO: 439820 - DNA, 120 bp, Artificial Sequence
  ENSG00000153815_32 (sequence is synthesized)
tatttaatcttattcaatggaaaccatgcttttgtcgttttatactttgctaggtagactttattacccccccactatgccctcatttttttaaaaaaggaaaaaaaaaagaaactgggt

SEQ ID NO: 439821 - DNA, 120 bp, Artificial Sequence
  ENSG00000153815_33 (sequence is synthesized)
tccagtcttaattcattttccgtgccaggttttatttcgtgtgtgtgtgagtgtgttctgttttgtgttttgttttttgttgttgtttttagttgtttggttttcttttctttcccccct

SEQ ID NO: 439822 - DNA, 82 bp, Artificial Sequence
  ENSG00000153815_34 (sequence is synthesized)
tgttgtttttagttgtttggttttcttttctttcccccctccggtcccatacttcacagcactctggtgcgggaagaagcag

SEQ ID NO: 439823 - DNA, 120 bp, Artificial Sequence
  ENSG00000153815_35 (sequence is synthesized)
catgccacctttcccctcgcactgttgcttttcctgatggttaatactactgtcacgtagctgtgtacaaagagatgtgaaatactttcaggcaaaaataaactgtaagtgactcatcaa

SEQ ID NO: 439824 - DNA, 120 bp, Artificial Sequence
  ENSG00000153815_36 (sequence is synthesized)
gtgtacgcgcgcgagccccagaggctgcggcagcagcagagcagcagagcagcagcccctgcctggcgcgacgtgcttccagtgcattctgagtcactcctctcctggcaaggggcacat

SEQ ID NO: 439825 - DNA, 120 bp, Artificial Sequence
  ENSG00000153815_37 (sequence is synthesized)
tcctgctgacgacttgtctcccgtggaggagcaacaggctctgctttccctggcctgagaaccctggcatatgtgcttgcctctgctgacagttgccagagcgatggcaagtgttgccca

SEQ ID NO: 439826 - DNA, 120 bp, Artificial Sequence
  ENSG00000153815_38 (sequence is synthesized)
tgaggacagcgctggagtggctgactctgccagacgggaagcaggaggctctgcctgctgtctctgcttgccgctggctggtggggcttgggctcggatgtggggagccctcctgagttc

SEQ ID NO: 439827 - DNA, 120 bp, Artificial Sequence
  ENSG00000153815_39 (sequence is synthesized)
tacctccctggactactcctttacagaacttgaaaaagatttacaaatataagaaagtgctgagtaacccaagccgctgggaagttgtcttgaaagagatccggaccctggtggacatgg

SEQ ID NO: 439828 - DNA, 120 bp, Artificial Sequence
  ENSG00000153815_40 (sequence is synthesized)
ggcttcttggatgggctgggcgtgcatggcataaccgtttgagaacaacaaaccaagccggccgggctgccgctctgtttcctgcgaggagggaagttacagatctccgccctggcgtcc

SEQ ID NO: 439829 - DNA, 120 bp, Artificial Sequence
  ENSG00000153815_41 (sequence is synthesized)
aatgaaggagttcatccagttagaaagtctctcaagcaggccgggtgcatggggcaggcagctgcaaaggcgggagcccgggcgggggtggagggagtgcttggcccagacctccgcctt

SEQ ID NO: 439830 - DNA, 120 bp, Artificial Sequence
  ENSG00000153815_42 (sequence is synthesized)
ccgagggcctccgtttccatgatgtcagagaggcggaactaactctgcctcaaatccagggaggcagcagcccctgtcccaaccgctctctggcttcgacacagcgcccaagcaaagaaa

SEQ ID NO: 439831 - DNA, 120 bp, Artificial Sequence
  ENSG00000153815_43 (sequence is synthesized)
ccaacacccagaccccagcgcccagaacatgaggccccgcgcgcctccctggccttttgcgttggcacagatttggggaatgtggttggcccagcgtgacagccaggaactggggttgag

SEQ ID NO: 439832 - DNA, 120 bp, Artificial Sequence
  ENSG00000153815_44 (sequence is synthesized)
attctggttaaggacttttgggggttttgtacagcttgtcctccattacggcaacaggaagaatctttttgcagttcctaagaattacaaaaataccgcagctggaggagaagaggaaag

SEQ ID NO: 439833 - DNA, 120 bp, Artificial Sequence
  ENSG00000153815_45 (sequence is synthesized)
cctcccgggaagaataggcccaaataatgtctgtagatgccctgccctcaaggacccagagcgcgactttgcactcctttagtgtgtgctgcgcacagcgaggtccttccagagagcact

SEQ ID NO: 439834 - DNA, 120 bp, Artificial Sequence
  ENSG00000153815_46 (sequence is synthesized)
gtatggaagggggcaggagtagccttgcagtggagaaaccagacacactcagcctcagccaggtgatcaaggtcaacatcgacaacaacaagccagttagacagaatattcccttcatag

SEQ ID NO: 439835 - DNA, 120 bp, Artificial Sequence
  ENSG00000153815_47 (sequence is synthesized)
gacgtataaaaacgacacttgacctctatggtcttcctcccagtaacccatcaccccattccaatcatgagaaaaacatcagacaaatcccaacaaggggacagtctacaaagtacctgg

SEQ ID NO: 439836 - DNA, 120 bp, Artificial Sequence
  ENSG00000153815_48 (sequence is synthesized)
ccagtactccccacggtcaaggtcatcaaaaacaaggagattctaagaaactgtcacagctcagaggagtctacgggggcgtaacgactaaatgtcatttggggctctccatgggatccc

SEQ ID NO: 439837 - DNA, 120 bp, Artificial Sequence
  ENSG00000153815_49 (sequence is synthesized)
agaacagaaaagggacatgaagggaaaactgaggaaatctgaataaagcttggcctttaatttttttttttaaatacaaaagcaggatttaattgcacacttagagcgggtggggcgctt

SEQ ID NO: 439838 - DNA, 120 bp, Artificial Sequence
  ENSG00000153815_50 (sequence is synthesized)
gtaatctgtgtggccccttggtgttccctcatcattccagggacagcagcaaatgccattatttgccctgtatgtcacgaggaaactgaggcttagctaggtccactaagtggccacagg

SEQ ID NO: 439839 - DNA, 120 bp, Artificial Sequence
  ENSG00000153815_51 (sequence is synthesized)
gaccacaggtaggaataagaataacatctttttgcagatgcttattgaacactttcttggagtcaagagtgtggtgctctttgagtgtattgtgttattaaccctcatgccattcccatg

SEQ ID NO: 439840 - DNA, 120 bp, Artificial Sequence
  ENSG00000153815_52 (sequence is synthesized)
agaggtgggacgggataggcagggtctgatgagcagctgtgggtggtcctggtgggagctaaggagcaggcagcctgaggccagggcccattcccaatcacatgttgtactgagccagcc

SEQ ID NO: 439841 - DNA, 120 bp, Artificial Sequence
  ENSG00000153815_53 (sequence is synthesized)
accacgttagattttagagtctcctggagcacgtgaaaacaactgaaaaagggtaaccacacatcatttcacttgtgatgtagcttgcctgtctccacaccatgcccctgaagaatagta

SEQ ID NO: 439842 - DNA, 120 bp, Artificial Sequence
  ENSG00000153815_54 (sequence is synthesized)
tatcacctacagccccttccccagtcaggaatggaagtgcatgacacatgtgctcctctaccccttccatgctcatggcagacatcattaatcaattatagcactctttctgtagagcca

SEQ ID NO: 439843 - DNA, 120 bp, Artificial Sequence
  ENSG00000153815_55 (sequence is synthesized)
gagacagcatcacactctttcccctcctgcattccaggccaccactaccaactgaaatcgtgttagtaccataatgaatgctatgtaccattctctaccctaagcgattgcaaactgtaa

SEQ ID NO: 439844 - DNA, 120 bp, Artificial Sequence
  ENSG00000153815_56 (sequence is synthesized)
atgaattgttgctgatttctgagcccctcctagatttggggtaaattcatttcttgttttcagaacacaggggatagggacaccctgtgcagttctttctccaggacaaggagactcccc

SEQ ID NO: 439845 - DNA, 120 bp, Artificial Sequence
  ENSG00000153815_57 (sequence is synthesized)
actgggggatggggcggggtttctgccttaatttgggcgctcatagtttcaaggaggagctctttctggctttggccagctagaaggaaaggtgccctgtttgttaactttaaaatcact

SEQ ID NO: 439846 - DNA, 120 bp, Artificial Sequence
  ENSG00000153815_58 (sequence is synthesized)
acgggtgtagtgtatggagtgggctgtgccatgctggagttcagagcaaaggttcttcaggttttcttgcgaaggaccttaacttgtcaatggcagagccacacccccgggacatacttg

SEQ ID NO: 439847 - DNA, 120 bp, Artificial Sequence
  ENSG00000153815_59 (sequence is synthesized)
gcagaggaatgcctcttcaggcacataaacatttttgcatactccatgttagtcaataaaccgtttcataagggttctttgaggacatctgacttcaaagggaaaaaattcataattcag

SEQ ID NO: 439848 - DNA, 120 bp, Artificial Sequence
  ENSG00000153815_60 (sequence is synthesized)
acaggctctcggggcttcaccatacaacgcctttcttgtatttggttagttttatgggcctggagtgttgaccatgtattaattttctctataaaaatcagaaccgctctgggcagaccc

SEQ ID NO: 439849 - DNA, 120 bp, Artificial Sequence
  ENSG00000153815_61 (sequence is synthesized)
agaatttatagtatctgtggcagtctggcagagagtagggaccctcagccatgagtcctcgcctcacttgtaacgagtaccccctaagtgatcccaggtgtctggggatgctttaacgca

SEQ ID NO: 439850 - DNA, 120 bp, Artificial Sequence
  ENSG00000153815_62 (sequence is synthesized)
cccagatcccaccttgctcttggcgcctcctaattacacaccatgagcggcggcggcagaggagaactgctgggaggaccgaggaggatccgcctctcgtgtagaagaacagactgtatt

SEQ ID NO: 439851 - DNA, 120 bp, Artificial Sequence
  ENSG00000153815_63 (sequence is synthesized)
aaacagtgattatggccatgccaggcacaggaagacctgacctcatggaatcctaacaacacaggcggtgggcgagagagagctttgacatttactcactgaatgcgccctgatgcttaa

SEQ ID NO: 439852 - DNA, 120 bp, Artificial Sequence
  ENSG00000153815_64 (sequence is synthesized)
tgagtggcacgggtcagcagcaccgttgtggagctggggctctcagctggtgtggggggggggtcatgtctctggctaaggagcgtacctagcctgcctaagccatgagcctgttggggt

SEQ ID NO: 439853 - DNA, 120 bp, Artificial Sequence
  ENSG00000153815_65 (sequence is synthesized)
ggcatgaacagtgactgctcttcaccccaaatgcagtgtttctccttaaggaggcactcagacatttaggaaacggggggaacgtagccacggtgctgttctgggatttgggggctcccc

SEQ ID NO: 439854 - DNA, 120 bp, Artificial Sequence
  ENSG00000153815_66 (sequence is synthesized)
cattctgggtgcatctcttgcaaatatgttatgtgctccctttcacggatgagcaaactgaagctttgagagtctcaaagaatgttctttactagactgaaataaaaactagaaacaaaa

SEQ ID NO: 439855 - DNA, 120 bp, Artificial Sequence
  ENSG00000153815_67 (sequence is synthesized)
gtggtgctgaggagccgagcgggcggggagcctctagctgctccagcatcccacttgctcactgccccctgatcccgtggacagcgcagtcagaggcaggagcaggagaggaggaagcag

SEQ ID NO: 439856 - DNA, 120 bp, Artificial Sequence
  ENSG00000153815_68 (sequence is synthesized)
aggaaaaggaggaggaggaggcggcttgcaactcctcagatccagagccggactccgagctaatgagggagcagcagacacggcctcccaacccttcccccaaggggaacccaggctgcc

SEQ ID NO: 439857 - DNA, 120 bp, Artificial Sequence
  ENSG00000153815_69 (sequence is synthesized)
gagtgtctgggcaccgccctcattccattctggcacgcacggcctctgtcctgaggtcttccctccgtggcccatgcattctgggaggcagtggtggctcctcttggcagttctcttgag

SEQ ID NO: 439858 - DNA, 120 bp, Artificial Sequence
  ENSG00000153815_70 (sequence is synthesized)
acacgtgtccctgatccaccgccttgcccagctccctggcccgttcttccttgacaccatcccctccccttcccacacctcccactcagttccagaccccggcagtaactccggccgcct

SEQ ID NO: 439859 - DNA, 120 bp, Artificial Sequence
  ENSG00000153815_71 (sequence is synthesized)
ccgtcccccatcccctggggccagccccggagtttcccggctaacacagtgctgatcatgaaggtggtggtggtggtggtggtgatggtgaccgtgactgtcacttactcatttcttatc

SEQ ID NO: 439860 - DNA, 120 bp, Artificial Sequence
  ENSG00000153815_72 (sequence is synthesized)
tgaggctccaagccaagcacttggctttcccagttgcactcagctctcacagcacagtgagaagacgacacatgtcattgccccattttatacccaaggcagctaaagcctgggccgtta

SEQ ID NO: 439861 - DNA, 120 bp, Artificial Sequence
  ENSG00000153815_73 (sequence is synthesized)
ggttatgttcctacaagaaattgagtgcccaacgggaccagggattctggaaggcactgcaggtccaccagcttgtttaatccttacaaggaggtgtcgcggtcagggggattgttccca

SEQ ID NO: 439862 - DNA, 120 bp, Artificial Sequence
  ENSG00000153815_74 (sequence is synthesized)
ctatcatgaggggtctgaggtcaccaaaccaatagctgcatccatgataactttctttgtgcccggcactgtatccggcacttcatatgcactatccttttttatctgtactgcatcctt

SEQ ID NO: 439863 - DNA, 120 bp, Artificial Sequence
  ENSG00000153815_75 (sequence is synthesized)
gttgctgaattacacctctgttgaaacagaggcccacagaggttcggtggcgtgcctggggtcccacaggccttctgtttccaagcccttccttggccaggcacacatggcttcttccag

SEQ ID NO: 439864 - DNA, 120 bp, Artificial Sequence
  ENSG00000153815_76 (sequence is synthesized)
gagtaaagggccacagactcttcctcccccagggcagatgctgcaccctagtggccagcagcctcgccgactccacttgctgagaaaaccagctccatttactggtcactggtgctccca

SEQ ID NO: 439865 - DNA, 120 bp, Artificial Sequence
  ENSG00000153815_77 (sequence is synthesized)
cactcaaactgggcttccagtcgcagctctgctgggagctagcttgttgaccttgggctggtaacttgcctctgccagcttcagcccctcgtccgggagcctcgcattggcctctcgagg

SEQ ID NO: 439866 - DNA, 120 bp, Artificial Sequence
  ENSG00000153815_78 (sequence is synthesized)
ttaccgcagcgatcgcatgcaacagtagatgcacggcgcccggcgggccggcacagtcgctgctcggaaatgacgccggtggtgattctcctctctgctgggtggctggtttggctgtcc

SEQ ID NO: 439867 - DNA, 120 bp, Artificial Sequence
  ENSG00000153815_79 (sequence is synthesized)
acactgaactcagcagagatgtttgtgcagcgatgacaaattgaggcgctgcccctgggagcttcttgaaaagggcttatttttaggccctttgcctcatgcactccctcgccactcctc

SEQ ID NO: 439868 - DNA, 120 bp, Artificial Sequence
  ENSG00000153815_80 (sequence is synthesized)
ctgtgtgctcgtgtgtgggttgtgatcagtttaatatctgtgggtaacagattcttggcagccaatcgtcctttcctaaaggaaatgatgaggaacttctctcagctttcttcggaggac

SEQ ID NO: 439869 - DNA, 120 bp, Artificial Sequence
  ENSG00000153815_81 (sequence is synthesized)
aggaggaggtggggaaaagtcctttgtgtttcctgcacgcccttgctctcatgctctgtctctctccctcactctccccgctctccatcctctccctccttccctctctctctgtgtaat

SEQ ID NO: 439870 - DNA, 120 bp, Artificial Sequence
  ENSG00000153815_82 (sequence is synthesized)
cacagcaggggccagagtggatgtggaattcctcccatacacacacacacgtgtgctcacatgcacaaacaggcccatccacacagacacacagctctgggaaggaatgtgagagctgtg

SEQ ID NO: 439871 - DNA, 120 bp, Artificial Sequence
  ENSG00000153815_83 (sequence is synthesized)
cttttggcactgaaattgcccccagccacggacagatccttcagtggagggggacaaagactcagggaaggaagtggggatgagacctaacaagagagggtggcagagtcccaaagaggg

SEQ ID NO: 439872 - DNA, 120 bp, Artificial Sequence
  ENSG00000153815_84 (sequence is synthesized)
ggagagagagagagagagagagattagcagggcagatacctggaggggaggatggtgcctgcacaagtcaagaaagggagggcagaaggcacacacccaagagggagagtcagtgctggg

SEQ ID NO: 439873 - DNA, 120 bp, Artificial Sequence
  ENSG00000153815_85 (sequence is synthesized)
ggcagcagaaccccagagaggcagcagggagaggtttctagagaaagagggcagagagcacgggagaggagttagaaacacagagagaggaggacagagaaccaaacagagaacggagac

SEQ ID NO: 439874 - DNA, 120 bp, Artificial Sequence
  ENSG00000153815_86 (sequence is synthesized)
ccaggagatggccccacccagaggaaggcatagcagaaggagaaagggggcaggagaaagggaaaaggggctgattgtgggcggttgctctgggcatctctacctgctgcagccacaggc

SEQ ID NO: 439875 - DNA, 120 bp, Artificial Sequence
  ENSG00000153815_87 (sequence is synthesized)
ccgcttcattcagatcagccaatcaagccggggcctgccctccctcctgtgcagctgacagccagtagccagagtcccctggggtgtgggggccacggtatttcccgaaagacctttcat

SEQ ID NO: 439876 - DNA, 120 bp, Artificial Sequence
  ENSG00000153815_88 (sequence is synthesized)
ggcatttggtggaaggctgggggttgctggaggaaacaaagttaagcgggtttcttgactgcaggacttgcctgagcctttcccattcatgtgtgcagatcatggtcgcccttgtcaccg

SEQ ID NO: 439877 - DNA, 120 bp, Artificial Sequence
  ENSG00000153815_89 (sequence is synthesized)
tctaggaacatgcctgcccctgccagcctgcaccacctctctcgcgctctcggtcacctctcgggttctcctctgatgtcacagcttcaccatagcaacgctcagctgcgcccccccgcc

SEQ ID NO: 439878 - DNA, 120 bp, Artificial Sequence
  ENSG00000153815_90 (sequence is synthesized)
cccgcccccaccctacaatgtgaggattcggtgcaagaaagcgcagggagctggcggcttcccagcccgagagattgcatttgtatgccagagctgttcatgatggagcggaaaaaatat

SEQ ID NO: 439879 - DNA, 120 bp, Artificial Sequence
  ENSG00000153815_91 (sequence is synthesized)
aatagctacctgcgagaccagtggttccattctctgcaatggaaggtaagtactgactcggttgcttgtttaaagcgactcaggcagtggtgcgatggcttaaagccaatctgtcaccca

SEQ ID NO: 439880 - DNA, 120 bp, Artificial Sequence
  ENSG00000153815_92 (sequence is synthesized)
gaggcatgaaagtggagaactcatgccttccagatggctcagctgaggaactttgttcccctacctaagagcccctggcccttcgtcctctgctgttcaattcctgtcccctgcagtgct

SEQ ID NO: 439881 - DNA, 120 bp, Artificial Sequence
  ENSG00000153815_93 (sequence is synthesized)
gaaatagcattctcgccctggtgttctcaaaccctatagctgttttcctgcttcaaaaggatcatagaactgcttgctctcagagtgagggcgaccctgaggggagtccagccggggagg

SEQ ID NO: 439882 - DNA, 120 bp, Artificial Sequence
  ENSG00000153815_94 (sequence is synthesized)
ctggacttcaggggctcaagatgcttagttgaaagtaacttccaaaggctgtgccaagtgtaaacttaacagagattcaaaatcctgagccctatttctgtagtcttcactgattttcag

SEQ ID NO: 439883 - DNA, 120 bp, Artificial Sequence
  ENSG00000153815_95 (sequence is synthesized)
ggtcccccagccacccgaggagcctgagttgtgccccatggctcaggcgatggaaaccttgacgtcaggaccagggcgtgaagcacgtacagtcagcttctcattcctgccctgcctccc

SEQ ID NO: 439884 - DNA, 120 bp, Artificial Sequence
  ENSG00000153815_96 (sequence is synthesized)
tgtctctccttgtcttctgatcttctggtttagaacaagctttgacaggcccctggccccacagcgggtatggctggaatgaccagtgtgtcataagctgtcatccttacagtaagctgg

SEQ ID NO: 439885 - DNA, 120 bp, Artificial Sequence
  ENSG00000153815_97 (sequence is synthesized)
ggagccacaggggatgaacagctggccccatgcagagctgggtgccatgtcacgtgttgggaggacccagggaacactcaggattcctctcatggctccagaggggctcccccaacggcc

SEQ ID NO: 439886 - DNA, 120 bp, Artificial Sequence
  ENSG00000153815_98 (sequence is synthesized)
agggttgggggcagaaaggcaaccccagataattactttcctggtcccagagagggccactcccctcctttcctctgtcagctactggtcctcttgctttgtgctgtggggccaagtctc

SEQ ID NO: 439887 - DNA, 120 bp, Artificial Sequence
  ENSG00000153815_99 (sequence is synthesized)
agaagctgagctgagtctccacgttgggttgcaaaggggaagagaactagtgtttactgagcttctactgtgtgccaggactggcgtgttttgagctcctactgtgtgccaggagctctg

SEQ ID NO: 439888 - DNA, 120 bp, Artificial Sequence
  ENSG00000153815_100 (sequence is synthesized)
ctagtctcatcatgtccatttcaccctcaccacaaccgcataaggttgatgattatcgttgttgccattttccatacgggaaagatgaggctcagactggagtccaagctcccatcgtta

SEQ ID NO: 439889 - DNA, 120 bp, Artificial Sequence
  ENSG00000153815_101 (sequence is synthesized)
agtgccactgactacctgccaggctctcaccccatcttttggcccatctgggaccaaaaacagtgccataaaccttccttgtcccaaccaaagctgactgtcaccctctctcattctagg

SEQ ID NO: 439890 - DNA, 120 bp, Artificial Sequence
  ENSG00000153820_0 (sequence is synthesized)
gtctttcttctctgggcgcccaccaacaatggatggcaactccctgctctcggtaccaagcaacttggagtcatcacggatgtatgacgttttggaaccgcagcagggcagaggctgtgg

SEQ ID NO: 439891 - DNA, 120 bp, Artificial Sequence
  ENSG00000153820_1 (sequence is synthesized)
cagctcaggaagcggcccggggaactccatcacagcctgtaagaaggttcttcgcagcaatagcctgctggagtcaacagactactggttgcagaatcagaggatgccctgccaaattgg

SEQ ID NO: 439892 - DNA, 120 bp, Artificial Sequence
  ENSG00000153820_2 (sequence is synthesized)
ttttgtagaagacaagtctgaaaactgtgcttctgtctgctttgtgaatcttgatgtgaacaaggatgaatgcagcacagagcacctgcaacagaaactggtcaacgtttcaccagatct

SEQ ID NO: 439893 - DNA, 120 bp, Artificial Sequence
  ENSG00000153820_3 (sequence is synthesized)
tccaaaacttatcagttccatgaatgtccaacaaccaaaagaaaatgaaattgttgtcctaagtgggttagcctctggaaatctccaggcagattttgaagtttcacagtgcccttggct

SEQ ID NO: 439894 - DNA, 120 bp, Artificial Sequence
  ENSG00000153820_4 (sequence is synthesized)
gccagatatctgcttggtccaatgtgcaagagggaacagaccaaacagtaccaactgcatcatctttgaaatcaacaaatttctgattggtctggaactggtgcaggagcgacagctcca

SEQ ID NO: 439895 - DNA, 120 bp, Artificial Sequence
  ENSG00000153820_5 (sequence is synthesized)
cctggaaacaaacatcttgaaactggaggatgacacgaactgttccttatcttcaatcgaggaagactttctcaccgcttctgagcacttggaggaggaaagcgaggtggatgaatctag

SEQ ID NO: 439896 - DNA, 120 bp, Artificial Sequence
  ENSG00000153820_6 (sequence is synthesized)
gaacgattatgaaaatataaatgtctcagccaatgttttggaaagtaaacagctaaagggagccacccaggtggaatggaattgcaacaaggaaaagtggctttatgctttggaagacaa

SEQ ID NO: 439897 - DNA, 120 bp, Artificial Sequence
  ENSG00000153820_7 (sequence is synthesized)
atacatcaacaaatatcccacaccattgattaaaacagaacgatctccagaaaacctaacaaagaacacagccttgcagagtctagatccctcagccaagccatcacagtggaaaagaga

SEQ ID NO: 439898 - DNA, 120 bp, Artificial Sequence
  ENSG00000153820_8 (sequence is synthesized)
agctgtggggaatgggagacaagccacacattattatcattcagaagcttttaaaggtcaaatggaaaaatcacaggcactgtatattccaaaagatgcttatttctccatgatggataa

SEQ ID NO: 439899 - DNA, 120 bp, Artificial Sequence
  ENSG00000153820_9 (sequence is synthesized)
agatgtaccttctgcatgtgctgtggcagagcagagaagcaacctaaacccaggagaccatgaagacacaagaaacgctctccctcctagacaagatggagaagtcaccactggcaagta

SEQ ID NO: 439900 - DNA, 120 bp, Artificial Sequence
  ENSG00000153820_10 (sequence is synthesized)
tgctacaaatttagcagaatccgtgctgcaggatgcatttattagattatctcaatctcagtccacattaccccaggaatctgcagtcagtgtttctgtaggaagttctctgcttcccag

SEQ ID NO: 439901 - DNA, 120 bp, Artificial Sequence
  ENSG00000153820_11 (sequence is synthesized)
ttgctattccacaaaagatacagtggtttctcggtcatggaatgagctccccaaaatcgtcgttgttcagagtccagatggcagtgatgctgccccacagccaggcatctcctcctggcc

SEQ ID NO: 439902 - DNA, 120 bp, Artificial Sequence
  ENSG00000153820_12 (sequence is synthesized)
tgagatggaagtctctgttgaaacctcaagcatcctctctggagagaactccagcagacaaccccagagtgctctagaagtggcgttagcttgtgcagccactgtgattggaactatttc

SEQ ID NO: 439903 - DNA, 120 bp, Artificial Sequence
  ENSG00000153820_13 (sequence is synthesized)
cagtccacaggccacagaaagactcaaaatggagcaagtggtctcgaactttcccccagggagcagtggtgcactgcaaactcaagcaccccaaggactcaaggaaccttccatcaatga

SEQ ID NO: 439904 - DNA, 120 bp, Artificial Sequence
  ENSG00000153820_14 (sequence is synthesized)
gtactcctttccatctgctttgtgtggcatgactcaggtggccagtgccgtggctgtctgtggtctgggtgaaagagaagaggtgacatgctcagtggctccaagtggtagcctcccgcc

SEQ ID NO: 439905 - DNA, 120 bp, Artificial Sequence
  ENSG00000153820_15 (sequence is synthesized)
tgcagctgaggcttctgaagccatgcccccactttgtggtttagcaagcatggagcttggcaaggaagccattgccaagggattgctcaaggaggctgctctggttttaacaaggcctaa

SEQ ID NO: 439906 - DNA, 120 bp, Artificial Sequence
  ENSG00000153820_16 (sequence is synthesized)
tacctacagcagcattggagactttctggactccatgaacaggagaatcatggaaactgcttcaaagtctcagaccctgtgctcagaaaatgtcgtcaggaatgaactggcacataccct

SEQ ID NO: 439907 - DNA, 120 bp, Artificial Sequence
  ENSG00000153820_17 (sequence is synthesized)
gtccaatgttatcctgaggcattccattgatgaagttcaccacaaaaatatgataatcgaccccaatgacaacaggcattcatctgaaattctggacaccttaatggaaagtacaaatca

SEQ ID NO: 439908 - DNA, 120 bp, Artificial Sequence
  ENSG00000153820_18 (sequence is synthesized)
actgcttttagatgtgatatgcttcacgttcaagaagatgagtcatattgtacggcttggtgaatgtcctgctgtcctttctaaggagaccatcagaaggagggagacagaaccaagctg

SEQ ID NO: 439909 - DNA, 120 bp, Artificial Sequence
  ENSG00000153820_19 (sequence is synthesized)
ccagccatctgatccgggtgctagtcaagcttggacaaaagccactgaatcctccagcagctctccacttagcaattcacacaacacgagtcttgtcatcaacaatcttgtggatggcat

SEQ ID NO: 439910 - DNA, 120 bp, Artificial Sequence
  ENSG00000153820_20 (sequence is synthesized)
gtattcaaaacaagacaagggtggagtgaggccaggcctcttcaagaaccccacgctgcagtcacaattatcacgtagtcacagagtgcccgattcttcaactgctacaacatcctccaa

SEQ ID NO: 439911 - DNA, 120 bp, Artificial Sequence
  ENSG00000153820_21 (sequence is synthesized)
ggaaatatatctgaaaggaatagcaggagaggatacaaaaagccctcatcacagtgagaatgaatgcagagcctcttccgaaggacaaaggtccccaacggtcagccagtccagaagtgg

SEQ ID NO: 439912 - DNA, 120 bp, Artificial Sequence
  ENSG00000153820_22 (sequence is synthesized)
ttcccaggaggctgaggagagtatccacccaaacacccaagaaaagtacaactgtgccacatctcgcatcaacgaagttcaagtcaacctgtccttgttaggggatgacctgctgcttcc

SEQ ID NO: 439913 - DNA, 120 bp, Artificial Sequence
  ENSG00000153820_23 (sequence is synthesized)
tgctcaatccacgcttcaaacaaagcatccagacatctactgcattacagactttgcggaagaattagcagacacggtcgtctccatggcaactgaaattgcagcgatttgccttgacaa

SEQ ID NO: 439914 - DNA, 120 bp, Artificial Sequence
  ENSG00000153820_24 (sequence is synthesized)
ctccagtggaaaacaaccctggttttgtgcatggaaaagagggagtgagtttctgatgacacccaacgtaccctgccgatccttgaagaggaagaaagagagccaggggagcgggaccgc

SEQ ID NO: 439915 - DNA, 120 bp, Artificial Sequence
  ENSG00000153820_25 (sequence is synthesized)
tgtgaggaaacacaagcctccccggctcagtgagatcaagaggaagacggacgagcaccctgagcttaaagaaaagctgatgaacagggttgtggatgagtccatgaaccttgaagatgt

SEQ ID NO: 439916 - DNA, 120 bp, Artificial Sequence
  ENSG00000153820_26 (sequence is synthesized)
cccagattctgtcaatctttttgccaatgaagtggcagccaagatcatgaacctaacggagttctctatggtggacggcatgtggcaggcgcagggctatccccggaatcggttactgag

SEQ ID NO: 439917 - DNA, 120 bp, Artificial Sequence
  ENSG00000153820_27 (sequence is synthesized)
tggcgacaggtggagccggctgaaggcctccagctgcgaaagcattcctgaggaagactccgaggccagggcctatgtcaacagcctgggcttaatgagcacgctgagccagccggtcag

SEQ ID NO: 439918 - DNA, 120 bp, Artificial Sequence
  ENSG00000153820_28 (sequence is synthesized)
tgaagggagaggatttgagttactgctggattactatgctggcaagaacgccagcagcattctgaactcagccatgcaacaggcgtgccggaaaagtgaccacctcagtgtgaggcctag

SEQ ID NO: 439919 - DNA, 120 bp, Artificial Sequence
  ENSG00000153820_29 (sequence is synthesized)
ctgtccctctaagcagtccagcacagagagcatcactgaggagttctacaggtacatgctgagggacatcgaaagagacagcagagaaagtgcctcctccagacggagcagccaggattg

SEQ ID NO: 439920 - DNA, 120 bp, Artificial Sequence
  ENSG00000153820_30 (sequence is synthesized)
gacagccggcctgctgtctccttctctgcgatccccagtgtgccacagacagtcgtccatgccagacagcagatccccatgctccaggctgacagtgaatgtgcccatcaaagccaactc

SEQ ID NO: 439921 - DNA, 120 bp, Artificial Sequence
  ENSG00000153820_31 (sequence is synthesized)
tttagatggctttgctcagaactgcccacaagatttcctaagcgtgcagccggtcagtagcgcgtcctcatccggtctctgcaaatctgactcttgcttgtatcggagaggtgggactga

SEQ ID NO: 439922 - DNA, 120 bp, Artificial Sequence
  ENSG00000153820_32 (sequence is synthesized)
ccacatcaccaacatgttaattcatgaaacgtgggctagctccattgaggctctcatgcgcaagaacaaaatcattgtggatgatgcagaggaagctgacactgagcctgtttctggtgg

SEQ ID NO: 439923 - DNA, 120 bp, Artificial Sequence
  ENSG00000153820_33 (sequence is synthesized)
ctctccctcgcaagcagagaagtgtgcaaatagattagctgcgagcaggatgtgcagtgggccaactctgcttgttcaggagtctctcgattgcccgaggaaagactctgttaccgaatg

SEQ ID NO: 439924 - DNA, 120 bp, Artificial Sequence
  ENSG00000153820_34 (sequence is synthesized)
taaacagcccccagtgtcatctttgagcaaaactgcttctcttacaaaccacagccctttagattctaaaaaagaaacttcctcgtgccaggaccctgtaccaataaaccacaaaaggcg

SEQ ID NO: 439925 - DNA, 120 bp, Artificial Sequence
  ENSG00000153820_35 (sequence is synthesized)
atcactttgctcgagggaagtgcctttgattcagattgaaacagatcagagagaagcctgtgctggggaacctgaacccttcctttccaaaagcagcctcctagaggaagcagaagggca

SEQ ID NO: 439926 - DNA, 120 bp, Artificial Sequence
  ENSG00000153820_36 (sequence is synthesized)
ttcgaatgacaaaaacatcccagatgtggtgagaggtggagacacagccgtgagcgcttgtcaaatccatagtgacagccttgataccagagatgtaccagaggctgaagcctccacaga

SEQ ID NO: 439927 - DNA, 120 bp, Artificial Sequence
  ENSG00000153820_37 (sequence is synthesized)
agccagagcccccgatgaggcccccaaccctccaagcagcagcgaggagagcacaggcagctggacccagcttgccaatgaggaagacaacccagatgacacaagtagctttctccagct

SEQ ID NO: 439928 - DNA, 120 bp, Artificial Sequence
  ENSG00000153820_38 (sequence is synthesized)
cagtgagcgatccatgagtgaattagtagaagaaaagaagattcttaaaggacagtcagaaagcacagaggcacctgcatctggaccgcctacgggaacagccagcccccagaggagcct

SEQ ID NO: 439929 - DNA, 120 bp, Artificial Sequence
  ENSG00000153820_39 (sequence is synthesized)
gctggtgatcaactttgacctggagccagagtgtccagatgccgagctccgagccactctgcagtggatagctgcctctgaactggggattcccaccatctactttaagaaatctcagga

SEQ ID NO: 439930 - DNA, 120 bp, Artificial Sequence
  ENSG00000153820_40 (sequence is synthesized)
aaacagaattgaaaagtttctagatgtcgtgcagctggttcatcggaagtcctggaaagtgggtgatatcttccatgcagttgtccagtactgcaaaatgcatgaggagcagaaggatgg

SEQ ID NO: 439931 - DNA, 120 bp, Artificial Sequence
  ENSG00000153820_41 (sequence is synthesized)
gagactgagtctctttgactggctcttggaactgggataataaggcagtctgccgtatagatcattccttccctttattccaacttagattacagtggtttgttctaaatgctctaaaca

SEQ ID NO: 439932 - DNA, 120 bp, Artificial Sequence
  ENSG00000153820_42 (sequence is synthesized)
ttctcaaaacatcacatcacattagcagaactataaaaaaaaatctgctactcagatccactgcatacagaataagtcagaggaaaagcaaaatataggtctgtccaaattcatacaact

SEQ ID NO: 439933 - DNA, 120 bp, Artificial Sequence
  ENSG00000153820_43 (sequence is synthesized)
tgtgggtgagttccaaagagcttggattagaagggctggacaaagagagaattcaatggggcccaaattagaatgcttataatgagacccaatctccaggaaaacaacactcacataagt

SEQ ID NO: 439934 - DNA, 120 bp, Artificial Sequence
  ENSG00000153820_44 (sequence is synthesized)
ttaatcatataaaatgatttgtaatgtctctaattagatgaatcaactagaaacaaactcagtggtcaaaataatttttaagagtattccgtaacctatattttacttttctgattatat

SEQ ID NO: 439935 - DNA, 120 bp, Artificial Sequence
  ENSG00000153820_45 (sequence is synthesized)
taaggggctgccagcccggagaaatacttaagatatgggtgagaaatccccagacttttatacaaaagatttccactttcaaatcaatgtcagtagacattgataaaagtatagcagcat

SEQ ID NO: 439936 - DNA, 120 bp, Artificial Sequence
  ENSG00000153820_46 (sequence is synthesized)
cctctactgaggtgatttcatttattccctgcagcccactgataaatatctcacttctcccaaatagtatgtggactcccagctaagcagaaaactattgtcattcaactgaagaagagg

SEQ ID NO: 439937 - DNA, 120 bp, Artificial Sequence
  ENSG00000153820_47 (sequence is synthesized)
aagataaaagattgtcttgtttccatcactgtattacttgtgtaacatgattacataattcttatcctaagagaaagctttcatatttaaaaaaaagtcttttcagataaaatctgcttg

SEQ ID NO: 439938 - DNA, 120 bp, Artificial Sequence
  ENSG00000153820_48 (sequence is synthesized)
tctgcttgtgtcttgaataatatgaaatacaaactttcactttattttattgtaaattataaagagattattgtcttaaataatatattgagttagcttcaagcttcctaaaatatgaag

SEQ ID NO: 439939 - DNA, 120 bp, Artificial Sequence
  ENSG00000153820_49 (sequence is synthesized)
gtctaaagtcacatattgacattgagctcagtggcctgtttcatcacgtatgtgctgctacctgtacagcagacatgccgctccagtgacatttataatgacagaagcagggtaatggtc

SEQ ID NO: 439940 - DNA, 120 bp, Artificial Sequence
  ENSG00000153820_50 (sequence is synthesized)
ttgtgtttgacatgatcagttaggatcatagactttccctgactcgtagatattagccttgaattgggggaaaagaagactttgacacattttagttattttaataacagagatttactc

SEQ ID NO: 439941 - DNA, 120 bp, Artificial Sequence
  ENSG00000153820_51 (sequence is synthesized)
ttttgaaaaataaaggtatctaatgtctccctaataagtcttctttccttccaactaaatgacctacacggacttttattttcttgatcaaagaggtgtttattaaggacttctggataa

SEQ ID NO: 439942 - DNA, 120 bp, Artificial Sequence
  ENSG00000153820_52 (sequence is synthesized)
ctatacttttactctatttttaaagatcacaaagtaattttaaatgtgaacaggttcccataccatgaatgctggcctcaccttctctatcatccacattttgaaatgcaaagaaagctc

SEQ ID NO: 439943 - DNA, 120 bp, Artificial Sequence
  ENSG00000153820_53 (sequence is synthesized)
ccttgtaagccatacttccttccccactcccatcctaggatacttgcccagtgctcattaggcatttcttattcagatagtccaaatttaggttattatgcttaatttgacacattaact

SEQ ID NO: 439944 - DNA, 120 bp, Artificial Sequence
  ENSG00000153820_54 (sequence is synthesized)
aaatgcccagttttaaaatatatccatcaattcacgctgaaatgtgcttctttgtgctatcaaatggaatagaatacacttattttttaaacaatcccagaatactgtgtgtagactttt

SEQ ID NO: 439945 - DNA, 120 bp, Artificial Sequence
  ENSG00000153820_55 (sequence is synthesized)
gttgtgctcaaataaatgtttacttatcttacaaagctcaaatactggattgtaaccatgtgatgaagttatctatgttgtacctaacattgcaaattaatcaataaatctctgttgtca

SEQ ID NO: 439946 - DNA, 120 bp, Artificial Sequence
  ENSG00000153822_0 (sequence is synthesized)
agattcccagggaggaactgtaggaacaaaccggtgtcaatggttaacccaggttcttggtgtctggagcttttctttcctttattattaactaaagagcattctctaccattgcccagc

SEQ ID NO: 439947 - DNA, 120 bp, Artificial Sequence
  ENSG00000153822_1 (sequence is synthesized)
tgaaagcacctagctcatagattctctgtggggagagtgaataaagaatgggggattgaggcacagagtgttaaaatagtgagacacaggattctaactggcagactggcactttatctc

SEQ ID NO: 439948 - DNA, 120 bp, Artificial Sequence
  ENSG00000153822_2 (sequence is synthesized)
aattcttaactgctgtgttgcctctcactttaaagacatccacattccaccctgggccttgcccgtctggtgagcccaatctctgctggtcagtcacgcagttgaggtcagggaaggagt

SEQ ID NO: 439949 - DNA, 120 bp, Artificial Sequence
  ENSG00000153822_3 (sequence is synthesized)
aactcaagatgattttgatgttgcagttttaaatttcactttgacttgagctgggaaatcctttggcctattataccatggatgctaaaaatggttctaactgaaaacccaaaccaagaa

SEQ ID NO: 439950 - DNA, 120 bp, Artificial Sequence
  ENSG00000153822_4 (sequence is synthesized)
atagcaacaagtctagaattcttactactacaaaactcacctggatccctaagggcacagcaaagaatgagctattacggcagcagctatcatattatcaatgcggacgcaaaataccca

SEQ ID NO: 439951 - DNA, 120 bp, Artificial Sequence
  ENSG00000153822_5 (sequence is synthesized)
ggctacccgccagagcacattatagctgagaagagaagagcaagaagacgattacttcacaaagatggcagctgtaatgtctacttcaagcacatttttggagaatggggaagctatgtg

SEQ ID NO: 439952 - DNA, 120 bp, Artificial Sequence
  ENSG00000153822_6 (sequence is synthesized)
gttgacatcttcaccactcttgtggacaccaagtggcgccatatgtttgtgatattttctttatcttatattctctcgtggttgatatttggctctgtcttttggctcatagcctttcat

SEQ ID NO: 439953 - DNA, 120 bp, Artificial Sequence
  ENSG00000153822_7 (sequence is synthesized)
catggcgatctattaaatgatccagacatcacaccttgtgttgacaacgtccattctttcacaggggcctttttgttctccctagagacccaaaccaccataggatatggttatcgctgt

SEQ ID NO: 439954 - DNA, 120 bp, Artificial Sequence
  ENSG00000153822_8 (sequence is synthesized)
gttactgaagaatgttctgtggccgtgctcatggtgatcctccagtccatcttaagttgcatcataaatacctttatcattggagctgccttggccaaaatggcaactgctcgaaagaga

SEQ ID NO: 439955 - DNA, 120 bp, Artificial Sequence
  ENSG00000153822_9 (sequence is synthesized)
gcccaaaccattcgtttcagctactttgcacttataggtatgagagatgggaagctttgcctcatgtggcgcattggtgattttcggccaaaccacgtggtagaaggaacagttagagcc

SEQ ID NO: 439956 - DNA, 120 bp, Artificial Sequence
  ENSG00000153822_10 (sequence is synthesized)
caacttctccgctatacagaagacagtgaagggaggatgacgatggcatttaaagacctcaaattagtcaacgaccaaatcatcctggtcaccccggtaactattgtccatgaaattgac

SEQ ID NO: 439957 - DNA, 120 bp, Artificial Sequence
  ENSG00000153822_11 (sequence is synthesized)
catgagagccctctgtatgcccttgaccgcaaagcagtagccaaagataactttgagattttggtgacatttatctatactggtgattccactggaacatctcaccaatctagaagctcc

SEQ ID NO: 439958 - DNA, 120 bp, Artificial Sequence
  ENSG00000153822_12 (sequence is synthesized)
tatgttccccgagaaattctctggggccataggtttaatgatgtcttggaagttaagaggaagtattacaaagtgaactgcttacagtttgaaggaagtgtggaagtatatgcccccttt

SEQ ID NO: 439959 - DNA, 120 bp, Artificial Sequence
  ENSG00000153822_13 (sequence is synthesized)
tgcagtgccaagcaattggactggaaagaccagcagctccacatagaaaaagcaccaccagttcgagaatcctgcacgtcggacaccaaggcgagacgaaggtcatttagtgcagttgcc

SEQ ID NO: 439960 - DNA, 120 bp, Artificial Sequence
  ENSG00000153822_14 (sequence is synthesized)
attgtcagcagctgtgaaaaccctgaggagaccaccacttccgccacacatgaatatagggaaacaccttatcagaaagctctcctgactttaaacagaatctctgtagaatcccaaatg

SEQ ID NO: 439961 - DNA, 120 bp, Artificial Sequence
  ENSG00000153822_15 (sequence is synthesized)
tagtcctaaattgcaattatgagggctaccactgaatcattttatctttcagccaatcaagtcgttgtaaacgtggcttttttgaaagtgttatggctatgttttatgatgatgctgggt

SEQ ID NO: 439962 - DNA, 120 bp, Artificial Sequence
  ENSG00000153822_16 (sequence is synthesized)
aagcctaattgattaaaatttatcttttttattatcttacatgcttgtatcttcagttggaggtgtagtattcaaaaacggggaatgaaggcaggaaggaggctggaataaataaaaata

SEQ ID NO: 439963 - DNA, 120 bp, Artificial Sequence
  ENSG00000153822_17 (sequence is synthesized)
aaaatagacaagtaagacagcataaataatacatttttaaacatgtcaacattgataatacaatgaagatttaccataaaaagtatcatatctaaccaagatatgcaaaagatgcattca

SEQ ID NO: 439964 - DNA, 120 bp, Artificial Sequence
  ENSG00000153822_18 (sequence is synthesized)
gtaagctgtaacgttgagaaatgtaactgtgaaatcagctcaccagttcaagtcactaggtttgccacttggaccgtcttggtttcagcgagcatagcgagtggctgtaagaaattgtcc

SEQ ID NO: 439965 - DNA, 120 bp, Artificial Sequence
  ENSG00000153822_19 (sequence is synthesized)
atgccaccaattccactgctacttgcccaggtagtgatcagtgagagttagaagcaattttttctctaaccgatgaggcagaagaaaagttaacagtatttaaagcagcatttctctctt

SEQ ID NO: 439966 - DNA, 120 bp, Artificial Sequence
  ENSG00000153822_20 (sequence is synthesized)
aacgttcctgggagactccaacaaatggagaccagaaacaaggcaaccacgaccttgctaggttctctgaggaggggactttctatgttcacgtcccaccttcttcgaggacatgaccaa

SEQ ID NO: 439967 - DNA, 120 bp, Artificial Sequence
  ENSG00000153822_21 (sequence is synthesized)
gggacaggatcatacagatgaggtgaggggatggttagcagcgataaacattctcagacccttggagagaaaccgttgctagcttgctggtcccgaaagattgcaactttggctgctaca

SEQ ID NO: 439968 - DNA, 120 bp, Artificial Sequence
  ENSG00000153822_22 (sequence is synthesized)
gaaaggatagaacctttttggggggagggtggggagggagatatttatttgtgcccagaagcagttatgtatgcttcttgtcttggttactgtacaagatacaaatgactcgagttgtgg

SEQ ID NO: 439969 - DNA, 120 bp, Artificial Sequence
  ENSG00000153822_23 (sequence is synthesized)
attgcaagaaactcttttattaaacttggaacaaccatttaaatgaaggattttgtgagatagaattcaattaaagcgatttgaatgcacagtaagtggataatctgagtacaatgaaat

SEQ ID NO: 439970 - DNA, 120 bp, Artificial Sequence
  ENSG00000153822_24 (sequence is synthesized)
ttcttaagttttagaacatgagataaagttgtatactctactttcatgttaaaatgttaatcatgattactttaagcccacatccactgagtaaagagtcactttaaactttataaatca

SEQ ID NO: 439971 - DNA, 120 bp, Artificial Sequence
  ENSG00000153822_25 (sequence is synthesized)
aagagatattaggaacattcagaattatttgtgttttgtttttgttttacattgttgctgcactggcaataagtatgtggcactgtttttatttgtttatgttatttaaatacacaccca

SEQ ID NO: 439972 - DNA, 120 bp, Artificial Sequence
  ENSG00000153822_26 (sequence is synthesized)
gacacacacacacacagtttttgctttttctggaaaatctttctttctcttctctctccatgaaaattaaaacacacaagtgaatgaagtaattacatagtccaagattagaaatacaag

SEQ ID NO: 439973 - DNA, 90 bp, Artificial Sequence
  ENSG00000153822_27 (sequence is synthesized)
tcccttcctttcttccctcctccccctcatccttccctttctccttcttttcccttttttttttttttttgacctgggagtaataaagtt

SEQ ID NO: 439974 - DNA, 120 bp, Artificial Sequence
  ENSG00000153822_28 (sequence is synthesized)
tcccttttttttttttttttgacctgggagtaataaagttactttttaaatgcacgtatgcaatcttttattcctcttgttttatggataagagatttgttcaggtcaaaagttgcaaaa

SEQ ID NO: 439975 - DNA, 120 bp, Artificial Sequence
  ENSG00000153822_29 (sequence is synthesized)
ctgttctgaagcttaatattagagacccaagtaagattgtttttagtcttgcttgaggaatgcacactccatttaaaaaattgtgcgctctgtagatttggattttacagcagcaattac

SEQ ID NO: 439976 - DNA, 120 bp, Artificial Sequence
  ENSG00000153822_30 (sequence is synthesized)
ttggctaaattagagtactgcaatcttgtaagtagaaaacagccaccatgacaataaacaaaaacacttaaaaatatttttagcttgttttacctacatctagtttcatttcatcttgct

SEQ ID NO: 439977 - DNA, 120 bp, Artificial Sequence
  ENSG00000153822_31 (sequence is synthesized)
ttgctttgttgactctgctaccgctgatgtttgccttgtcaatatcagaataggggcatcagtgtcccgtgaaatacattttgttgtgctatgagcctctgtaatcaaatgcttgtactc

SEQ ID NO: 439978 - DNA, 120 bp, Artificial Sequence
  ENSG00000153822_32 (sequence is synthesized)
agaagagagtgtaaaatcagcatttctatgtaacatatatctctaattatctgtgtaattttataacatactttgacaaccccagtgagttacttaataataaagatcttaaaataatgc

SEQ ID NO: 439979 - DNA, 120 bp, Artificial Sequence
  ENSG00000153822_33 (sequence is synthesized)
gagaactcagtggcctttgtctgtggtgaatgtatccggaaaggcaaagaagagagagattctcctgtggggtttctcatctccatggcggtaggtgctgacagcttcagaagggtacta

SEQ ID NO: 439980 - DNA, 120 bp, Artificial Sequence
  ENSG00000153822_34 (sequence is synthesized)
acagggccaagagaaaagggccctgagatgctcagctacggtgctcttacaagatgaaaaggacatggggttcagatctgcacttcatcatctttcactaagacatccacattccaccct

SEQ ID NO: 439981 - DNA, 120 bp, Artificial Sequence
  ENSG00000153822_35 (sequence is synthesized)
gtttaatgtgaagtagtactcctgtcagttctgtttgtcctgggaagtatacaaggaagaaaagcctccgtggaagagagagcaagcaccaggtgctgaaggttctaactgaaaacccaa

SEQ ID NO: 439982 - DNA, 120 bp, Artificial Sequence
  ENSG00000153822_36 (sequence is synthesized)
gagatgctcagctacggtgctcttacaagatgaaaaggacatggggttcagatctgcacttcatcatctttcactaaggagtaactcaagatgattttgatgttgcagttttaaatttca

SEQ ID NO: 439983 - DNA, 120 bp, Artificial Sequence
  ENSG00000153822_37 (sequence is synthesized)
ctctcactttaaaggtaagaaattaaaccaattttaacatgattctccgaaaaaccaatacttgcactccttcctccatgaaaatgtgctttatccctacgcatttttccagaagtccag

SEQ ID NO: 439984 - DNA, 120 bp, Artificial Sequence
  ENSG00000153822_38 (sequence is synthesized)
ctttctacttatacgtttatattttcataaactttgctacagagcaaattcggtgttacaaacattgcttccttttgttcacattttacacgtttactgcctccttaaatcattcacctt

SEQ ID NO: 439985 - DNA, 120 bp, Artificial Sequence
  ENSG00000153822_39 (sequence is synthesized)
cactgtattttaggaaagaaatgctatttatatattttgtgaatccacagtctattatacattctgctaactaagaataaaacttgtctacttggttatttgagtctagagaatgatttt

SEQ ID NO: 439986 - DNA, 120 bp, Artificial Sequence
  ENSG00000153822_40 (sequence is synthesized)
caacctggagtgactttgctcaccaagggacatctggcaatgtctggtcacatttttggatgtctctactggggtttggggtcatactggcatctagtgggaagagtttagggatgctgt

SEQ ID NO: 439987 - DNA, 120 bp, Artificial Sequence
  ENSG00000153822_41 (sequence is synthesized)
taaactaaatgccataaccacaggtcatcttcccacaacaaagaattttctggccctaaatattgaggttgagaaacccagatctaggatattctgtgcatttaaaatgattccgttcag

SEQ ID NO: 439988 - DNA, 120 bp, Artificial Sequence
  ENSG00000153822_42 (sequence is synthesized)
tcaatagtactgcaaaagctatatgaaaactatatgtatataaaaattatatctatctgtctctagctacattaacatatcaatctgctaggttaagtagactcaatttaaccatctggt

SEQ ID NO: 439989 - DNA, 120 bp, Artificial Sequence
  ENSG00000153822_43 (sequence is synthesized)
gtttcatgtttgcttttgatttgtaaaagactcagacctataacatagccttaatgctaatatcattcttgagataaacgattataattgcagatttctttttttttgagaaagagtctc

SEQ ID NO: 439990 - DNA, 120 bp, Artificial Sequence
  ENSG00000153822_44 (sequence is synthesized)
taccaatacttgcagatttctttagtgttatgttatttagccactcatccatttttttaaagatttaagtattaagcattcactgtacaccaagcaatgttcttagtgaacaagtaattt

SEQ ID NO: 439991 - DNA, 120 bp, Artificial Sequence
  ENSG00000153822_45 (sequence is synthesized)
agtgaacaagtaatttagaattagattacaattaaattgtggattttaggacattttagttaacgtttactgaaaagtattatcacagaatttatattttctatagtttatgttgtttta

SEQ ID NO: 439992 - DNA, 120 bp, Artificial Sequence
  ENSG00000153822_46 (sequence is synthesized)
atgatttaagaattaagtgaagtattttacatgatgtggaaaaaatgagagaaaaagatggaaaagagttgattgaattattcattttcacctgattagttgaagccagtggttagtaac

SEQ ID NO: 439993 - DNA, 120 bp, Artificial Sequence
  ENSG00000153822_47 (sequence is synthesized)
atcacatgcacaaaggacccagtggctgattcaaaatagtattccattctctccccatgattttacaatgaaactacgagaccaatcaggacaccttcttctttcttcttgttcaccaaa

SEQ ID NO: 439994 - DNA, 120 bp, Artificial Sequence
  ENSG00000153822_48 (sequence is synthesized)
acaatcttttgtactattgatgtgacaatatgtacattaagtggggtgaagaattaagtcattctcttcataatcaggtgataacaaccttctcctttattgagaatcaagcatctcaga

SEQ ID NO: 439995 - DNA, 120 bp, Artificial Sequence
  ENSG00000153822_49 (sequence is synthesized)
gcgagcgtgaatggatattagagtttctgcctcagtgttctcaacagcttctactggtaaagcaagttacagctagtaacttggtcagggtttttggatataaactttattgtttagagt

SEQ ID NO: 439996 - DNA, 87 bp, Artificial Sequence
  ENSG00000153822_50 (sequence is synthesized)
ttatccagacaggggaattgcaatggagagagagtaattcaagcagagtcagctgtgtgggagatgatcagagtttttaaggatagt

SEQ ID NO: 439997 - DNA, 120 bp, Artificial Sequence
  ENSG00000153823_0 (sequence is synthesized)
gcgcggccgtgcccacaagttgccggcagctgagcgccgcgcctcctcctgctcgcagccccctacgcccacccggcggcggtggccagcgccaggacgcacatcccgcggacaccgacc

SEQ ID NO: 439998 - DNA, 120 bp, Artificial Sequence
  ENSG00000153823_1 (sequence is synthesized)
gcgccaggacgcacatcccgcggacaccgaccccagatgtaaagcgggaccccagcccctcgccccccggcgcgatcgacagtctcgccagcgtctcctctgccaaaacccagggctgga

SEQ ID NO: 439999 - DNA, 120 bp, Artificial Sequence
  ENSG00000153823_2 (sequence is synthesized)
agatgtggcagccggccacggagcgcctgcagcactttcagaccatgctgaagtctaaattgaatgtcttaacactgaaaaaggaacctctcccagcggtcatcttccatgagccggagg

SEQ ID NO: 440000 - DNA, 120 bp, Artificial Sequence
  ENSG00000153823_3 (sequence is synthesized)
ccattgagctgtgcacgaccacaccgctgatgaagacaaggactcacagtggctgcaaggttacctacctgggcaaagtctccaccactggcatgcagtttttgtcaggctgcacagaaa

SEQ ID NO: 440001 - DNA, 120 bp, Artificial Sequence
  ENSG00000153823_4 (sequence is synthesized)
agccagtcattgagctctggaagaagcacacgctagcccgagaggatgtctttccggccaatgccctcctggaaatccggccattccaagtttggctccatcatctcgaccacaaagggg

SEQ ID NO: 440002 - DNA, 120 bp, Artificial Sequence
  ENSG00000153823_5 (sequence is synthesized)
aggccacagtgcacatggataccttccaggtggcccgcatcgcctactgcaccgccgaccacaacgtgagccccaacatcttcgcctgggtctacagggagatcaatgatgacctgtcct

SEQ ID NO: 440003 - DNA, 120 bp, Artificial Sequence
  ENSG00000153823_6 (sequence is synthesized)
accagatggactgccacgccgtggagtgcgagagcaagctcgaggccaagaaactggcccacgccatgatggaggccttcaggaagactttccacagtatgaagagcgacgggcggatcc

SEQ ID NO: 440004 - DNA, 120 bp, Artificial Sequence
  ENSG00000153823_7 (sequence is synthesized)
acagcaacagctcctccgaagaggtttcccaggaattggaatccgatgatggctgaatgaacttgagacgcttcagcaaaggcagcattggtcacggagttcaagggaatagatgagtaa

SEQ ID NO: 440005 - DNA, 120 bp, Artificial Sequence
  ENSG00000153823_8 (sequence is synthesized)
gcaacgtttcaaatttgggatgaaaagactgccaaactattggctgaccaaggtttttaaattcagaagagcaattctaaatctaaagaaatgtatcattaaagtaattacgttacattg

SEQ ID NO: 440006 - DNA, 120 bp, Artificial Sequence
  ENSG00000153823_9 (sequence is synthesized)
aaacctgctgctgctgtgactgtgaggagggtgggagtgtggatggggaggaaggttctaggctctcttatttttctcatttcccaatgcctctctgtgggagagctccatgccagtttt

SEQ ID NO: 440007 - DNA, 120 bp, Artificial Sequence
  ENSG00000153823_10 (sequence is synthesized)
caaatactctgcagctgttattggatgggccattccgatctgccttatgaaattccacaagaatgttaggggcacctatgggatctctagtggggtgggcagggtgctgatggggacgct

SEQ ID NO: 440008 - DNA, 120 bp, Artificial Sequence
  ENSG00000153823_11 (sequence is synthesized)
ggccgcagggaggaaggaacatctcgggagggccctctgttcctctcccacggcagatgccctcctctgtatgcaaatcagcacagcctttattgagctttacaactaacaacctgatag

SEQ ID NO: 440009 - DNA, 120 bp, Artificial Sequence
  ENSG00000153823_12 (sequence is synthesized)
ttggcagttaattcacagttacagataatgcttttatttacataaatataccaagtagtaccctcttattgtattcacttcatctattttcttagaatacttgcaattactaatgacccc

SEQ ID NO: 440010 - DNA, 120 bp, Artificial Sequence
  ENSG00000153823_13 (sequence is synthesized)
ttccctttccctcctgctgccctgtccaccctctttccccttctaacatccttagagggatgaaatctcagcatatgttgcaggacaccaaaaggaagaaaacaatcaagcaaataaaat

SEQ ID NO: 440011 - DNA, 120 bp, Artificial Sequence
  ENSG00000153823_14 (sequence is synthesized)
aaacagtcaaacaaaccaggagtttaaaacaacaaccccaacaacagaagccttggcaaagaggaataagtgatcagcaagtgaacacactctatgtcaactctccttttatccagctga

SEQ ID NO: 440012 - DNA, 120 bp, Artificial Sequence
  ENSG00000153823_15 (sequence is synthesized)
gatttatggtaacttatttaattaatggtcctgtctgatgcatccttgatggcaagcttcaaatctgatttggtatcaccgaggaaaccttgcccccatcactcagcattgcacttagat

SEQ ID NO: 440013 - DNA, 120 bp, Artificial Sequence
  ENSG00000153823_16 (sequence is synthesized)
acagaatgagttagataaacttggcttgtctagagacccatgtcatcttaacctaaagggaaatcttattgcgttatcataaaattgatgatatcttagggtcagaattgcccttttttt

SEQ ID NO: 440014 - DNA, 120 bp, Artificial Sequence
  ENSG00000153823_17 (sequence is synthesized)
ttattttgaatgggaagttctcactaaaacaatcctgagatttcttaatttcatggttctttaaatattataaacacagagtcaacatagaatgaaattgtatttgttaaaatacacaca

SEQ ID NO: 440015 - DNA, 120 bp, Artificial Sequence
  ENSG00000153823_18 (sequence is synthesized)
ttggaggacaagagcagatgactacttttcgaagtaatgctgctccttcctaaaagtctgttttcaatcctggtaatattaggggcactgcggcacctaagaagccttaaatgagagcta

SEQ ID NO: 440016 - DNA, 120 bp, Artificial Sequence
  ENSG00000153823_19 (sequence is synthesized)
atccaatctagagagcgatggtgtcagcatttcggtctgcatatctgtgtgtccgtatctgcgtttgtgtgcgtgtacgtgtgcccctgtgtgtgggcccagttttcaggcatgtagaat

SEQ ID NO: 440017 - DNA, 120 bp, Artificial Sequence
  ENSG00000153823_20 (sequence is synthesized)
aagcatggagtcatattgaggaggactcacttcttgaagatatgcttgttgctttacaacatatgtaagctattctttagcataaatgcattcattctttaataaaaatatgtttgcatt

SEQ ID NO: 440018 - DNA, 120 bp, Artificial Sequence
  ENSG00000153823_21 (sequence is synthesized)
atgaaaagccttgtacaagaggcttcgtgccatgttcagcctgccccttagccttccactgtgtgaggacacagcattccttccttccaagtgctgcagctctcacaagacaatcaaaca

SEQ ID NO: 440019 - DNA, 120 bp, Artificial Sequence
  ENSG00000153823_22 (sequence is synthesized)
gagcgcctgcaggagagatttgcagacacagaagcggcacagagaaggccattgtgaagatcaaggcagaaaccggagttatggcatcataagccaaggaatgccaaggattgctggcaa

SEQ ID NO: 440020 - DNA, 120 bp, Artificial Sequence
  ENSG00000153823_23 (sequence is synthesized)
ccacctgatgttagaagagtcgaggacatgttcttctccagagcttttggatggtgtgtggccctgccaacctttacattttggacttccagcctccgaaatgcactttcagaccatgct

SEQ ID NO: 440021 - DNA, 120 bp, Artificial Sequence
  ENSG00000153823_24 (sequence is synthesized)
tggagatgggctttgcaacacaacagacctgtgtgtgcgattttgatcttaggcaactgaaaagcaagtaacgctccctttctattacctgaagcttctgcttatggagttttgaagttc

SEQ ID NO: 440022 - DNA, 120 bp, Artificial Sequence
  ENSG00000153823_25 (sequence is synthesized)
ctcacagtggctgcaaggtacatggtttcactgtgttgcccaggatggtctcaaactcatggcctcaagcaatactcagacttcagcctctgaaagtgctgggattataggcgtgaacca

SEQ ID NO: 440023 - DNA, 120 bp, Artificial Sequence
  ENSG00000153827_0 (sequence is synthesized)
agctgataattgaaggaacccggagccgccgccgccgcgccgctggggggggtggggggagctagtggaagttactgccgcgccaccgagtccggaccggagactttggggcctaactag

SEQ ID NO: 440024 - DNA, 120 bp, Artificial Sequence
  ENSG00000153827_1 (sequence is synthesized)
tgaatggtagtgtctagaaagggtatgtcccttcaagagagaggtgccaatgtccaaccggcctaataacaatccaggggggtcactgcgacgttcacagaggaacactgccggggccca

SEQ ID NO: 440025 - DNA, 120 bp, Artificial Sequence
  ENSG00000153827_2 (sequence is synthesized)
accacaagacgactcaataggaggaaggtcacatttagggcaggcaaaacataagggatatagccctcctgagagtagaaaatctaattctaaggcacccaaagtgcagtctaatactac

SEQ ID NO: 440026 - DNA, 120 bp, Artificial Sequence
  ENSG00000153827_3 (sequence is synthesized)
ttctgaactgtcaaggggacacctttctaaaagaagctgcagttcatcatctgctgtgatagttccacaaccagaggatccagacagagccaatacttcagaaagacaaaaaacggggca

SEQ ID NO: 440027 - DNA, 120 bp, Artificial Sequence
  ENSG00000153827_4 (sequence is synthesized)
ggtgcctaagaaagacaattctcgaggagtgaagcgcagtgctagtccagactacaacaggaccaattctcctagctctgcaaaaaaaccaaaagcacttcagcatactgaatctccctc

SEQ ID NO: 440028 - DNA, 120 bp, Artificial Sequence
  ENSG00000153827_5 (sequence is synthesized)
agaaacaaataagccacatagtaagtcaaagaagagacatttagaccaggagcaacaactgaaatctgcacaatcaccatcaacaagcaaggctcataccaggaagagtggggccactgg

SEQ ID NO: 440029 - DNA, 120 bp, Artificial Sequence
  ENSG00000153827_6 (sequence is synthesized)
cggttcacggagtcagaaaagaaaaaggacagagagttcttgtgtaaagagtggctccgggtctgaatcaactggtgcagaagagagatctgcgaaacctaccaagctggcttcaaaatc

SEQ ID NO: 440030 - DNA, 120 bp, Artificial Sequence
  ENSG00000153827_7 (sequence is synthesized)
agccacctcagccaaagctgggtgtagcaccatcactgattcttcttctgctgcctctacttcctcctcgtcttctgctgtagcctcggcctcctccactgtaccaccaggtgccagagt

SEQ ID NO: 440031 - DNA, 120 bp, Artificial Sequence
  ENSG00000153827_8 (sequence is synthesized)
gaaacaaggaaaagatcagaacaaggccaggcgttcccgttcagcgtccagtcccagccccagaagaagtagcagggaaaaggaacagagtaaaactggtggctcttcaaaatttgattg

SEQ ID NO: 440032 - DNA, 120 bp, Artificial Sequence
  ENSG00000153827_9 (sequence is synthesized)
ggctgctcgtttcagccctaaagttagccttcctaaaacaaaactgtctcttccagggtcttctaagtcagagacatcaaaacctggaccttctggattacaggccaaattagcaagttt

SEQ ID NO: 440033 - DNA, 120 bp, Artificial Sequence
  ENSG00000153827_10 (sequence is synthesized)
aagaaaatctacgaagaaacgcagtgagtctccacctgctgagctccccagtttgaggcggagcacacgccaaaagaccacgggctcctgtgctagtaccagtcggcgaggctctggcct

SEQ ID NO: 440034 - DNA, 120 bp, Artificial Sequence
  ENSG00000153827_11 (sequence is synthesized)
gggcaaaagaggagcagctgaagctcgtcgacaggagaaaatggcagaccctgaaagcaaccaggaggcagtaaattcttcagctgctcggacagatgaagctccccaaggagctgcagc

SEQ ID NO: 440035 - DNA, 120 bp, Artificial Sequence
  ENSG00000153827_12 (sequence is synthesized)
ctctagttctgttgcaggggctgttggcatgaccacctctggggagagtgaatcagatgattccgagatgggacgtttgcaagctttgttagaggcaaggggtcttccccctcacctatt

SEQ ID NO: 440036 - DNA, 120 bp, Artificial Sequence
  ENSG00000153827_13 (sequence is synthesized)
tggtcctcttggtcctcggatgtcacagcttttccatagaacaattggaagtggagctagttctaaggcccagcagctactacaaggattgcaagccagtgatgaaagtcaacagcttca

SEQ ID NO: 440037 - DNA, 120 bp, Artificial Sequence
  ENSG00000153827_14 (sequence is synthesized)
ggcagttattgagatgtgtcagttactggtcatgggaaatgaggagacactgggagggtttcctgtcaagagtgttgttccagctttgattacgttacttcagatggagcacaattttga

SEQ ID NO: 440038 - DNA, 120 bp, Artificial Sequence
  ENSG00000153827_15 (sequence is synthesized)
tattatgaaccatgcttgtcgagccttaacatacatgatggaagcacttcctcgatcttctgctgttgtagtagatgctattcctgtctttttagaaaagctgcaagttattcagtgtat

SEQ ID NO: 440039 - DNA, 120 bp, Artificial Sequence
  ENSG00000153827_16 (sequence is synthesized)
tgatgtggcagagcaggccttgactgccttggagatgttgtcacggagacatagtaaagccattctacaggcgggtggtttggcagactgcttgctgtacctagaattcttcagcataaa

SEQ ID NO: 440040 - DNA, 120 bp, Artificial Sequence
  ENSG00000153827_17 (sequence is synthesized)
tgcccaaagaaatgcattagcaattgcagctaattgctgccagagtatcacgccagatgaatttcattttgtggcagattcactcccattgctaacccaaaggctaacacatcaggataa

SEQ ID NO: 440041 - DNA, 120 bp, Artificial Sequence
  ENSG00000153827_18 (sequence is synthesized)
aaagtcagtagaaagcacttgcctttgttttgcacgcctagtggacaacttccagcatgaggagaatttactccagcaggttgcttccaaagatctgcttacaaatgttcaacagctgtt

SEQ ID NO: 440042 - DNA, 120 bp, Artificial Sequence
  ENSG00000153827_19 (sequence is synthesized)
ggtagtgactccacccattttaagttctgggatgtttataatggtggttcgcatgttttctctgatgtgttccaactgtccaactttagctgttcaacttatgaaacaaaacattgcaga

SEQ ID NO: 440043 - DNA, 120 bp, Artificial Sequence
  ENSG00000153827_20 (sequence is synthesized)
aacgcttcactttctcctgtgtggtgcctccaatggaagttgtcaggaacagattgatcttgttccacgaagccctcaagagttgtatgaactgacatctctgatttgtgaacttatgcc

SEQ ID NO: 440044 - DNA, 120 bp, Artificial Sequence
  ENSG00000153827_21 (sequence is synthesized)
atgtttaccaaaagaaggcatttttgcagttgataccatgttgaagaagggaaatgcacagaacacagatggtgcgatatggcagtggcgtgatgatcggggcctctggcatccatataa

SEQ ID NO: 440045 - DNA, 120 bp, Artificial Sequence
  ENSG00000153827_22 (sequence is synthesized)
caggattgacagccggatcattgagcaaatcaatgaggacacgggaacagcacgtgccattcagagaaaacctaacccgttagccaatagtaacactagtggatattcagagtcaaagaa

SEQ ID NO: 440046 - DNA, 120 bp, Artificial Sequence
  ENSG00000153827_23 (sequence is synthesized)
ggatgatgctcgagcacagcttatgaaagaggatccggaactggctaagtcttttattaagacattatttggtgttctttatgaagtgtatagttcctcagcaggacctgcggtcagaca

SEQ ID NO: 440047 - DNA, 120 bp, Artificial Sequence
  ENSG00000153827_24 (sequence is synthesized)
taagtgccttagagcaattcttaggataatttattttgcggatgctgaacttctgaaggatgttctgaaaaatcatgctgtttcaagtcacattgcttccatgctgtcaagccaagacct

SEQ ID NO: 440048 - DNA, 120 bp, Artificial Sequence
  ENSG00000153827_25 (sequence is synthesized)
gaagatagtagtgggagcacttcagatggcagaaattttaatgcagaagttacctgatatttttagtgtttacttcagaagagaaggtgtaatgcatcaagtaaaacacttagcagaatc

SEQ ID NO: 440049 - DNA, 120 bp, Artificial Sequence
  ENSG00000153827_26 (sequence is synthesized)
gggatccatgggatccacaacttcagtcagcagtgggacagccacagctgccactcatgctgcagctgacttgggatcacccagcttgcagcacagcagggatgattctttagatctcag

SEQ ID NO: 440050 - DNA, 120 bp, Artificial Sequence
  ENSG00000153827_27 (sequence is synthesized)
ccctcaaggtcgattaagtgatgttctaaagagaaaacgactgccaaaacgagggccaagaaggccaaagtactcacctccaagagatgatgacaaagtagacaatcaagctaaaagccc

SEQ ID NO: 440051 - DNA, 120 bp, Artificial Sequence
  ENSG00000153827_28 (sequence is synthesized)
caccactactcagtcacctaaatcttctttcctggcaagcttgaatccaaaaacatggggaaggttaagtacacagtccaacagcaacaacattgagccagcacggactgcgggaggtag

SEQ ID NO: 440052 - DNA, 120 bp, Artificial Sequence
  ENSG00000153827_29 (sequence is synthesized)
tggccttgccagggctgcctcaaaggataccatctccaataatagagaaaaaattaaaggttggattaaggagcaggcacataaatttgtagaacgttatttcagttctgagaatatgga

SEQ ID NO: 440053 - DNA, 120 bp, Artificial Sequence
  ENSG00000153827_30 (sequence is synthesized)
tggaagcaaccctgcattgaatgtccttcagagactttgtgctgcaaccgaacaactcaacctccaggtggatggtggagctgagtgccttgtagaaatccgtagcatagtctcagagtc

SEQ ID NO: 440054 - DNA, 120 bp, Artificial Sequence
  ENSG00000153827_31 (sequence is synthesized)
agatgtttcatcatttgaaatccaacatagtggatttgtgaagcagctgttgctttatttgacatctaaaagtgaaaaggatgctgtgagcagagagatcagattaaagcgatttcttca

SEQ ID NO: 440055 - DNA, 120 bp, Artificial Sequence
  ENSG00000153827_32 (sequence is synthesized)
tgtatttttttcttctccacttcctggagaagagcccattggaagagtggaaccagtgggtaatgcacctttgttggcattagttcacaagatgaacaactgcctcagccagatggaaca

SEQ ID NO: 440056 - DNA, 120 bp, Artificial Sequence
  ENSG00000153827_33 (sequence is synthesized)
atttccagtcaaagtacatgatttccctagtggaaatgggacaggaggcagcttttctctcaacagaggatcacaggctttaaaatttttcaacacacatcaattaaaatgccagttaca

SEQ ID NO: 440057 - DNA, 120 bp, Artificial Sequence
  ENSG00000153827_34 (sequence is synthesized)
aaggcatccagactgtgcaaatgtgaagcagtggaagggtggacctgtcaagattgaccctctggctttggtacaagccatcgagagataccttgtagttagagggtatggaagagtaag

SEQ ID NO: 440058 - DNA, 120 bp, Artificial Sequence
  ENSG00000153827_35 (sequence is synthesized)
agaagatgatgaagacagcgatgacgatggatcagatgaggaaatagatgagtctctggctgctcagttcctaaattcaggaaatgtaagacacaggctgcagttttatattggagaaca

SEQ ID NO: 440059 - DNA, 120 bp, Artificial Sequence
  ENSG00000153827_36 (sequence is synthesized)
tttgctgccgtataacatgactgtgtatcaggcagtacggcagtttagtatacaggctgaagatgaaagagaatccacagatgatgagagcaatcctctaggcagagctggtatttggac

SEQ ID NO: 440060 - DNA, 120 bp, Artificial Sequence
  ENSG00000153827_37 (sequence is synthesized)
aaagactcatacaatatggtataaacctgtgagagaggatgaagaaagtaataaagattgtgttggtggtaaaagaggaagagcccaaacagctccaacgaaaacttcccctagaaatgc

SEQ ID NO: 440061 - DNA, 120 bp, Artificial Sequence
  ENSG00000153827_38 (sequence is synthesized)
aaaaaagcatgatgagttatggcacgatggagtgtgcccatcagtatcaaatcctttagaagtttacctcattcccacaccacctgaaaatataacatttgaagacccgtcattagatgt

SEQ ID NO: 440062 - DNA, 120 bp, Artificial Sequence
  ENSG00000153827_39 (sequence is synthesized)
gatccttcttttaagagttttacatgctatcagtcgatactggtattacttgtatgataatgcaatgtgcaaggaaattattccaactagtgaatttattaacagtaagttaacagcaaa

SEQ ID NO: 440063 - DNA, 120 bp, Artificial Sequence
  ENSG00000153827_40 (sequence is synthesized)
agcaaataggcaacttcaagatcctttagtaatcatgacaggaaacatcccaacatggcttactgagctaggaaaaacctgcccatttttctttccttttgatacccggcaaatgctttt

SEQ ID NO: 440064 - DNA, 120 bp, Artificial Sequence
  ENSG00000153827_41 (sequence is synthesized)
ttatgtaactgcatttgatcgggaccgagcaatgcaaagattacttgataccaacccagaaatcaaccagtctgattctcaagatagcagagttgcacctagattggatagaaaaaaacg

SEQ ID NO: 440065 - DNA, 120 bp, Artificial Sequence
  ENSG00000153827_42 (sequence is synthesized)
tactgtgaaccgagaggagctgctgaaacaggcggagtctgtgatgcaggacctcggcagctcacgggccatgttagaaatccagtatgaaaatgaggttggtacaggtcttgggcctac

SEQ ID NO: 440066 - DNA, 120 bp, Artificial Sequence
  ENSG00000153827_43 (sequence is synthesized)
actggagttttatgcgcttgtatctcaggaactacagagagctgacttgggtctttggagaggtgaagaagtaactcttagcaatccaaaagggagccaagaagggaccaagtatattca

SEQ ID NO: 440067 - DNA, 120 bp, Artificial Sequence
  ENSG00000153827_44 (sequence is synthesized)
aaacctccagggcctgtttgcgcttccctttggtaggacagcaaagccagctcatatcgcaaaggttaagatgaagtttcgcttcttaggaaaattaatggccaaggctatcatggattt

SEQ ID NO: 440068 - DNA, 120 bp, Artificial Sequence
  ENSG00000153827_45 (sequence is synthesized)
cagattggtggaccttccccttggcttacccttttataaatggatgctacggcaagaaacttcactgacatcacacgatttgtttgacatcgacccagttgtagccagatcagtttatca

SEQ ID NO: 440069 - DNA, 120 bp, Artificial Sequence
  ENSG00000153827_46 (sequence is synthesized)
cctagaagacattgtcagacagaagaaaagacttgaacaagataaatcccagaccaaagagagtctacagtatgcattagaaaccttgactatgaatggctgctcagttgaagatctagg

SEQ ID NO: 440070 - DNA, 120 bp, Artificial Sequence
  ENSG00000153827_47 (sequence is synthesized)
actggatttcactctgccagggtttcccaatatcgaactgaagaaaggagggaaggatataccagtcactatccacaatttagaggagtatctaagactggttatattctgggcactaaa

SEQ ID NO: 440071 - DNA, 120 bp, Artificial Sequence
  ENSG00000153827_48 (sequence is synthesized)
tgaaggcgtttctaggcaatttgattcgttcagagatggatttgaatcagtcttcccactcagtcatcttcagtacttctacccggaggaactggatcagctcctttgtggcagtaaagc

SEQ ID NO: 440072 - DNA, 120 bp, Artificial Sequence
  ENSG00000153827_49 (sequence is synthesized)
agacacttgggatgcaaagacactgatggaatgctgtaggcctgatcatggttatactcatgacagtcgggctgtgaagtttttgtttgagattctcagtagttttgataatgagcagca

SEQ ID NO: 440073 - DNA, 120 bp, Artificial Sequence
  ENSG00000153827_50 (sequence is synthesized)
gaggttatttctccagtttgtgactggtagcccaagattgcctgttggaggattccggagtttgaatccacctttgacaattgtccgaaagacgtttgaatcaacagaaaacccagatga

SEQ ID NO: 440074 - DNA, 120 bp, Artificial Sequence
  ENSG00000153827_51 (sequence is synthesized)
cttcttgccctctgtaatgacttgtgtgaactatcttaagttgccggactattcaagcattgagataatgcgtgaaaaactgttgatagcagcaagagaagggcagcagtcgttccatct

SEQ ID NO: 440075 - DNA, 120 bp, Artificial Sequence
  ENSG00000153827_52 (sequence is synthesized)
ttcctgatcatagcaagaaatgcagtgtctgcctgttacagcaaaagaaacaaatcatgatttcttttctaatgttatcacctgagtcaaggaaacatgttacgccttcttgttgtagga

SEQ ID NO: 440076 - DNA, 120 bp, Artificial Sequence
  ENSG00000153827_53 (sequence is synthesized)
gattgtaccttgcttctggctgcacacgctatggcttgagaccttccacatccccaggaccactgcatgaaggctgctttacaaggcactagcttctctttgctcttgagtgcacatatc

SEQ ID NO: 440077 - DNA, 120 bp, Artificial Sequence
  ENSG00000153827_54 (sequence is synthesized)
agatatttcctgtcttatataaccttgaattatttctcctcaggcttgaatgctatctaattacaccacgttttcttagtttaaaaaacaagtgaaaagagacattatttgtgttctcac

SEQ ID NO: 440078 - DNA, 120 bp, Artificial Sequence
  ENSG00000153827_55 (sequence is synthesized)
taaattgcatttttgcatttccatcaaggcagctagcttgacagaatttactccaggcaccgtgcagtgcacacttttatgtttggtgacacctttcaaattactaacttatgggcgagg

SEQ ID NO: 440079 - DNA, 120 bp, Artificial Sequence
  ENSG00000153827_56 (sequence is synthesized)
tgcagtggctcacgcctgtaatcctcccagcactttgtgaggcagaagcaggaggattacttgaggccagtagttcaagaccagcctgggcaacaaagtaggggccttgtctctacaaaa

SEQ ID NO: 440080 - DNA, 120 bp, Artificial Sequence
  ENSG00000153827_57 (sequence is synthesized)
acggcttgcagattataaagagacatttggttgatattcattaatggccccatggacttaaagtgatcaggccctaaaacgttgttgtgatgaggtttctttagcaagttcttgtttaaa

SEQ ID NO: 440081 - DNA, 120 bp, Artificial Sequence
  ENSG00000153827_58 (sequence is synthesized)
ttatcatttatttgatgagtgaagtttttaacatgctttgctgtgtgaaatttaaaaaagggatgtttttccaggctggaacaataaatgtggctgtgcagtttaattctgggctgtgtg

SEQ ID NO: 440082 - DNA, 120 bp, Artificial Sequence
  ENSG00000153827_59 (sequence is synthesized)
tatccatctagctaagtctgcagttttctttcctccaaagacaactcttgtacataagtacagaaatttaagctcacatgtatttgacaaatatagtttagtagactagctctatgtgct

SEQ ID NO: 440083 - DNA, 120 bp, Artificial Sequence
  ENSG00000153827_60 (sequence is synthesized)
tttcactttcctctgattttctctccctgattcattattatctgtgcagctcacagttttttttttgtatacaactcacagttctcaaattttcgttacccatgggcttctgttgtccca

SEQ ID NO: 440084 - DNA, 120 bp, Artificial Sequence
  ENSG00000153827_61 (sequence is synthesized)
tgttctctccagttaagatctaatttaaaattcattggattgaaatttattgaatataattcagcttttgtaactaggtagacttttcttatagtttagttttaatatagtttagggtat

SEQ ID NO: 440085 - DNA, 120 bp, Artificial Sequence
  ENSG00000153827_62 (sequence is synthesized)
tactggctttttcccaggtgacacactaaggactgtttacatggcaattccagcagcaacagcctctggaatgagacaaggaaagctcatttgtttcttttatgaaggttaagaagtcta

SEQ ID NO: 440086 - DNA, 120 bp, Artificial Sequence
  ENSG00000153827_63 (sequence is synthesized)
cagcttgggctggccggtatttattattctgtggccagaggattttaaattaatgtaaattttttaaacaaaataagcagttttccttccctgttggagtaaaaaaatttttttcccttt

SEQ ID NO: 440087 - DNA, 120 bp, Artificial Sequence
  ENSG00000153827_64 (sequence is synthesized)
gttgttttacgtttttgttcatagtcttctttattccacgctcctcttccccttctcccagtgctgacttgggacaaaacagttcagcctttgtctcgacgcagataaaagcacctgtaa

SEQ ID NO: 440088 - DNA, 120 bp, Artificial Sequence
  ENSG00000153827_65 (sequence is synthesized)
gcaatgctgtccagtcattttatgtgctgatttctcaaatctgcaataatccatcaggttaatgtttttacctgaaaataaagaaagtttgcttcacctttttgtttatagttttgtgct

SEQ ID NO: 440089 - DNA, 120 bp, Artificial Sequence
  ENSG00000153827_66 (sequence is synthesized)
gtatgcataactttcaattgtatagatgtatttcaatgcaaggaaatccacatatctccatgattcgggtcatggctgattttgctattcaaacaatttataatagcaacttgaagaaac

SEQ ID NO: 440090 - DNA, 120 bp, Artificial Sequence
  ENSG00000153827_67 (sequence is synthesized)
taaaatgtgaagagaaaatgggaggagattccttcctaaggtccaaaactaggcctgtggcataaatttgaaggaattttccataattcatctccttgaaaataagagatgagctagttt

SEQ ID NO: 440091 - DNA, 120 bp, Artificial Sequence
  ENSG00000153827_68 (sequence is synthesized)
ttttttttaattgaactttgagaaatcaatttttttgactgttctgtaagttttaattaattgacacaaaagcccttttccctatcccaccacccaaaagaaactcagtggcttgtttga

SEQ ID NO: 440092 - DNA, 120 bp, Artificial Sequence
  ENSG00000153827_69 (sequence is synthesized)
catagattgctgtgtcaatttacacttaaatggccttatatggaaatgtcccctcctgagagttcacttgggcagtgaccccattaagtggaagggaactgtcagaggagttgggggcag

SEQ ID NO: 440093 - DNA, 120 bp, Artificial Sequence
  ENSG00000153827_70 (sequence is synthesized)
agaattctctccctgtctctgcagagactgacaagtgaatggcttttccctgaaatccaagaagggaattgtgtttctgcagttttcaccactaacagcacagttgctgagcagcttcat

SEQ ID NO: 440094 - DNA, 120 bp, Artificial Sequence
  ENSG00000153827_71 (sequence is synthesized)
caagtgaagttaaagactgaaacaatttgttttcaactgttctgatatcttcctgcaaattaagcacaaggatttttgtgtgaacatagcattttgttcctgatttttaaagggttctgt

SEQ ID NO: 440095 - DNA, 120 bp, Artificial Sequence
  ENSG00000153827_72 (sequence is synthesized)
taaaatttagacatgtataaacaaaataatgtttcatctgtacttgacattttatccatgttgcagccctggcaaatttggcctcattgattccagcatctaataagtatatatgatgat

SEQ ID NO: 440096 - DNA, 120 bp, Artificial Sequence
  ENSG00000153827_73 (sequence is synthesized)
tttgactcaaactctaaagtcttgagtgtttcaaagtcagtcgttacctgtttaaaagcctcagcctttagcttattcctccttcaatacacgggacctttggttaatttggggcaggaa

SEQ ID NO: 440097 - DNA, 120 bp, Artificial Sequence
  ENSG00000153827_74 (sequence is synthesized)
aactcttaaagtaatctctcttggcagaggccttattgcaccagagggaaaaagtatatacttcatttgctgttactccagttatgccttaaattcatttgcttggtaatcctatcaacg

SEQ ID NO: 440098 - DNA, 120 bp, Artificial Sequence
  ENSG00000153827_75 (sequence is synthesized)
agcactaacttcttagtatactttaaacacttagttgggtaacaactgagattttgttgtcctttattttttgctgagatggagtcagtcagatgttagtcatagctaacaccgaatttg

SEQ ID NO: 440099 - DNA, 120 bp, Artificial Sequence
  ENSG00000153827_76 (sequence is synthesized)
tgttgtcatttagacagttactgattcgatctgctttatatatgagaacgtatttttaactattccaagaaggaagaggtagctaaatgtaatcccctcttcctatccccccagaaaact

SEQ ID NO: 440100 - DNA, 120 bp, Artificial Sequence
  ENSG00000153827_77 (sequence is synthesized)
gaactgtaagttctaggtagactaattgggagcagacacggagttttagatgccttagccaaacccagcagaaacctttcacacagccactcatcgtaagaaacgcagatttttctcttc

SEQ ID NO: 440101 - DNA, 120 bp, Artificial Sequence
  ENSG00000153827_78 (sequence is synthesized)
tcatgcttgtctctggttccctgcatttgtagtgacagaactttcactagcaggatataaagaaagtaattatgcttggagtccctctttactgggtttgagttaggtgcataacatgga

SEQ ID NO: 440102 - DNA, 120 bp, Artificial Sequence
  ENSG00000153827_79 (sequence is synthesized)
aaggagtggtgccttcaaatgaatgtgaccactccgtattgtggagtgacttccctagggcatcctatacatcctaccacagaaggccaagggacagagcaccaacttcagtatccaaga

SEQ ID NO: 440103 - DNA, 120 bp, Artificial Sequence
  ENSG00000153827_80 (sequence is synthesized)
aattagatccacaactcttgattttccacactgaggactgtcgcgagtaagttgtaagtttgccgtcttccttctggcttagcaggtgctgcagctgtactctcgactcctgtctgtgag

SEQ ID NO: 440104 - DNA, 120 bp, Artificial Sequence
  ENSG00000153827_81 (sequence is synthesized)
cgtgagctcaggaaatgagagtggagtctattccaaaaaaaaaatgtgatgaagtttttcataaaagtgcattcatatgccaaatcctttttggaggattctggatgctattgttcattt

SEQ ID NO: 440105 - DNA, 120 bp, Artificial Sequence
  ENSG00000153827_82 (sequence is synthesized)
ctctactagtaaaatgatcaagccttcatttattttaggctttgttttttgatccattttgttttccctgctgtaatgagaataattgtttggaaatgtcatattctgtatttatgattc

SEQ ID NO: 440106 - DNA, 120 bp, Artificial Sequence
  ENSG00000153827_83 (sequence is synthesized)
tctgagaaatgcttttgtataagtcttaggtttgacattgcagtagttgacatacacggtaaaggataacctagtgacaaatcactgaagatgcttcctttgttacctcaaaaaaaaaaa

SEQ ID NO: 440107 - DNA, 120 bp, Artificial Sequence
  ENSG00000153827_84 (sequence is synthesized)
tccagacaaaatagcatttataaatatagaaaacaggattggctgttttccaagaacttcaagttaacaattcttatgcaaggaaaagttcttaatgctaaagacttgttctgcatgaag

SEQ ID NO: 440108 - DNA, 120 bp, Artificial Sequence
  ENSG00000153827_85 (sequence is synthesized)
gagacattctttaataatggaagaggtggttttatttttactacaagccgactcatatttccaaacctataaccaattgctgatctcctgtgtaaagcatttttttccttttatctgaaa

SEQ ID NO: 440109 - DNA, 120 bp, Artificial Sequence
  ENSG00000153827_86 (sequence is synthesized)
cagtgatttatatgaactgttggaataatggaacctcaaactacagatgtgtatgtaaaattgcataaatgcactgacttccttctccctgactatatttttaataaacagcattatcct

SEQ ID NO: 440110 - DNA, 120 bp, Artificial Sequence
  ENSG00000153827_87 (sequence is synthesized)
gtctattttgttggagagtgggtgtagggatggaatggggaggtggatatgtggatttgaatgtgcttgattttgaattaactcaagattctctcattttgtctcctgagaacaaggtcc

SEQ ID NO: 440111 - DNA, 120 bp, Artificial Sequence
  ENSG00000153827_88 (sequence is synthesized)
tcatttctgttcaggtcagaaaacttcatgttctagtcctgcttctgctgctaactacctgattgacttggagcaagtaatttaagtttgttgttccatagtttcctcatttctgaaagg

SEQ ID NO: 440112 - DNA, 120 bp, Artificial Sequence
  ENSG00000153827_89 (sequence is synthesized)
aaacattggaagacttaggccgtaggtttctaaaatttatctatcttctatcagaaagcaatgtcccatgagcaaagatttacatacaaatagtttcctctcaatatttttccagagcag

SEQ ID NO: 440113 - DNA, 120 bp, Artificial Sequence
  ENSG00000153827_90 (sequence is synthesized)
tttcatatgcatgcatacacatccgtcttttatttcttacgtataaaaattttttctaaataacttgaattattggctttaccattcacagaactggtaagtaaatgcttagtactagtg

SEQ ID NO: 440114 - DNA, 120 bp, Artificial Sequence
  ENSG00000153827_91 (sequence is synthesized)
tgtcttatgaaaatgcagtttgtattaacttgcctttatttgaattaatgtatattaaatgtgaaaataatagactaacttttttttcacaaattatcttgagcttttctctcaacagag

SEQ ID NO: 440115 - DNA, 120 bp, Artificial Sequence
  ENSG00000153827_92 (sequence is synthesized)
gttttggctatactttgtagcttaagctgctaagtgacttgcatcctatggtgggttacatgttagagatagtatacatggatgtaaattagagaaaatatgtagaagataagttattgg

SEQ ID NO: 440116 - DNA, 120 bp, Artificial Sequence
  ENSG00000153827_93 (sequence is synthesized)
gatctttcatcaagattttacctgcatttatgtctaagggtccctgataaggcttgaggcatgtaacctatgtctaattaaaaatgatttgttgaatgaatgagttttgtcatatctaca

SEQ ID NO: 440117 - DNA, 120 bp, Artificial Sequence
  ENSG00000153827_94 (sequence is synthesized)
ctattattccatcttctgttaacttcaccatctaaaacctgttgaaataaatatgtaagatagcatatttggagggtccccactgtgtcttaaggtaatagatttctcaatgtttatatt

SEQ ID NO: 440118 - DNA, 120 bp, Artificial Sequence
  ENSG00000153827_95 (sequence is synthesized)
caaagtttctctctctttgctctcaggcagcccatcaggtcggtgaggatgagataagcttgtccactctgggacgagtttatactattgattttaattctatgcagcaaatcaatgagg

SEQ ID NO: 440119 - DNA, 120 bp, Artificial Sequence
  ENSG00000153827_96 (sequence is synthesized)
caaagtacatgatttccctagtggaaatgggacaggaggcaggtaaggaccattgcctggctatacccttgccactggaatttggtacttaatttcactgaagtaagatggcaagaggtc

SEQ ID NO: 440120 - DNA, 120 bp, Artificial Sequence
  ENSG00000153827_97 (sequence is synthesized)
tggtaaagtcttgattggcccagaaaacattcagctgtaatgatgaaagaaattaagcactctaaagaatgaatcaaatgctttcttatctttaaaattataccatatgccttaaacagg

SEQ ID NO: 440121 - DNA, 120 bp, Artificial Sequence
  ENSG00000153827_98 (sequence is synthesized)
atgctttataaatatataatccagtgattgtatttgtaacttgtaataggcttagttttccttaaattgatacacttcagcatacaaaacttccttaagaactttatgtttaacttcagt

SEQ ID NO: 440122 - DNA, 120 bp, Artificial Sequence
  ENSG00000153827_99 (sequence is synthesized)
ataattgaaggaacccggagccgccgccgccgcgccgctggggggggtggggggagctagtggaagttactgccgcgccaccgagtccggaccggagactttggggcctaactagacaga

SEQ ID NO: 440123 - DNA, 120 bp, Artificial Sequence
  ENSG00000153832_0 (sequence is synthesized)
ggcgtcccaagatggcgtcgtggctgccggagactctctttgaaactgtaggacaaggcccgccgcctagcaaagactattaccagttactggtcacccggtctcaggtaatctttagat

SEQ ID NO: 440124 - DNA, 120 bp, Artificial Sequence
  ENSG00000153832_1 (sequence is synthesized)
ggtggaagatctctctaaggagtgagtatcgatcaacaaaacctggagaagcaaaagaaacccatgaagacttcctagagaattcacatcttcaaggtcaaactgccttaatatttggtg

SEQ ID NO: 440125 - DNA, 120 bp, Artificial Sequence
  ENSG00000153832_2 (sequence is synthesized)
caagaatattagactatgtcatcaatttgtgcaaaggtaaatttgacttccttgaacggctctcagacgatttgctcctgactatcatttcttatctggatcttgaagatattgccaggc

SEQ ID NO: 440126 - DNA, 120 bp, Artificial Sequence
  ENSG00000153832_3 (sequence is synthesized)
tttgtcaaacatcacacagatttgcaaagctgtgcatgtctgataaactgtgggaacagatagtccagtcgacctgcgacaccatcactcctgacgtgagggccctggcggaggacacag

SEQ ID NO: 440127 - DNA, 120 bp, Artificial Sequence
  ENSG00000153832_4 (sequence is synthesized)
gctggagacagctgttcttcaccaacaagctccagctccagcggcagctccgcaagaggaaacaaaaatatggaaacctgagagaaaagcaaccttaggcacacattttcctaccagcag

SEQ ID NO: 440128 - DNA, 120 bp, Artificial Sequence
  ENSG00000153832_5 (sequence is synthesized)
ggagctcaggcatggctgtgtttctcttcagtgtccaaatctcttctgtctccttttcttaagaactaagaggttttgttgatgcgtggagccatttgaaactcgtaggggatttgcaca

SEQ ID NO: 440129 - DNA, 120 bp, Artificial Sequence
  ENSG00000153832_6 (sequence is synthesized)
caaatgcagcagagtctggctccccagtgccttgctagagtcaccgtcattctgaggtcaaatcatggcccgaggacaagggctgtaagacagggagccccataggccatcatcatcctt

SEQ ID NO: 440130 - DNA, 120 bp, Artificial Sequence
  ENSG00000153832_7 (sequence is synthesized)
atcccacacccattataaaagaggtttctattgtatataaacaaacaataaatgattattagcaggtttttattagacatctattttatctaggcattagaaagggtaatggggcttttg

SEQ ID NO: 440131 - DNA, 120 bp, Artificial Sequence
  ENSG00000153832_8 (sequence is synthesized)
aattttttcctggcattgtgtcgtctgcgtccagccatgaagctggtggctgagtgtccccaccaggaactgtgaagggcacgtaccacgggaggcactcagggtgggtgcagctgcctt

SEQ ID NO: 440132 - DNA, 120 bp, Artificial Sequence
  ENSG00000153832_9 (sequence is synthesized)
cccaactttgttctgctaagtccatattcagggccctatccttgtgagcccaggatgccagggtccatccccgcatgtagacagcttccgacctggtgctggagcatgactggagaagtg

SEQ ID NO: 440133 - DNA, 120 bp, Artificial Sequence
  ENSG00000153832_10 (sequence is synthesized)
catgactggagaagtgcaggcatcctgcttgcggaccttgctcaaagtacaacttcccaggactacttcacattgttaaataaacctataaacatttcttttcttttctttttttttttt

SEQ ID NO: 440134 - DNA, 120 bp, Artificial Sequence
  ENSG00000153832_11 (sequence is synthesized)
tgctgggattacaggcatgagccactatgtctggctaaaacctataaacatttcttagagaaatgctgttccccaaaggaatgtgaacagctaccacttttaacaaggatatttaagaaa

SEQ ID NO: 440135 - DNA, 120 bp, Artificial Sequence
  ENSG00000153832_12 (sequence is synthesized)
agctaccacttttaacaaggatatttaagaaaacagactatgagttaactaagtaaaaatgtaaatatggtttgcatgctgttaacatggcagaggggtaaaaagaatacagtcctgggg

SEQ ID NO: 440136 - DNA, 120 bp, Artificial Sequence
  ENSG00000153832_13 (sequence is synthesized)
agaaaggtcacttcactgagaaggcttacttaaaaatgtttttctccctgcactttcatgattattaagtacccctagaaaatgaactcatagcagcaaataatctaatgactcctttta

SEQ ID NO: 440137 - DNA, 120 bp, Artificial Sequence
  ENSG00000153832_14 (sequence is synthesized)
ggttacagagcaaagtagctttctacttccacatcacattataatatagccttataatttcttctttcctgcaaccttcactttcctacctaggaaaactcacctccggtgccagagaaa

SEQ ID NO: 440138 - DNA, 120 bp, Artificial Sequence
  ENSG00000153832_15 (sequence is synthesized)
cttcccaggatgcactagggccctgtgaacaatacagaagttgtggactctggctctttgtcccacctaagtccttccagaagggctctacagcatggcttagtgacattaaaaaaaaaa

SEQ ID NO: 440139 - DNA, 120 bp, Artificial Sequence
  ENSG00000153832_16 (sequence is synthesized)
actgaacccatgttaatatcaaacaagattttaatcttcattcacacacccttaaaacccagtcacggggctccccggtgccagtttgagaccgtcaacctagccctctctgcttctcat

SEQ ID NO: 440140 - DNA, 120 bp, Artificial Sequence
  ENSG00000153832_17 (sequence is synthesized)
tgctggaggtacacacagtcaaaagttttccgtgactgtgaaatccagtgcaatctgcttcccagcagatgaggagcctgacgtggttatgtctggatttagtccaagaacagagcaaag

SEQ ID NO: 440141 - DNA, 120 bp, Artificial Sequence
  ENSG00000153832_18 (sequence is synthesized)
ctttaattgtcaagagacccaggcctcattctccacttaggagagtttgctagggcaggtacaggtaaaggtaaccagcaggcagctgagagcaagaaggcacgtgctctgcagagctct

SEQ ID NO: 440142 - DNA, 120 bp, Artificial Sequence
  ENSG00000153832_19 (sequence is synthesized)
agctgccttggctctccctgagctcccagacttcactcatggcctaattttcaatgacagaacgtaggttttatcgtgaggatgcagacacaaccacaattacgtatgtcaacataactt

SEQ ID NO: 440143 - DNA, 120 bp, Artificial Sequence
  ENSG00000153832_20 (sequence is synthesized)
cataaatatgtaactgtaacttattggtaacatcagtgcaagatgattaaagcttcatgtgtagtattttatcaacaaacagattctgaaagcttatggacatgcgcaatagttgattca

SEQ ID NO: 440144 - DNA, 120 bp, Artificial Sequence
  ENSG00000153832_21 (sequence is synthesized)
cgcaatagttgattcagcttcaatcaataagaacataaatatggcaatttgaaaacactatgtatatacctactcacatatatattatacttacgatatatacttatatgtagtatataa

SEQ ID NO: 440145 - DNA, 120 bp, Artificial Sequence
  ENSG00000153832_22 (sequence is synthesized)
acatattatatacccctgttaagttctcattagttagtggtagattttgttaaagaagtttcaaatatattttcacttgaaatattgatatgcagttatgtacttacatatacaatgtta

SEQ ID NO: 440146 - DNA, 120 bp, Artificial Sequence
  ENSG00000153832_23 (sequence is synthesized)
tacttacatatacaatgttagattcttaaaaactagaaaactgttgtttttttctcttggaaaacatattagcatttggccgggcgcggtcgctcatgcctgtaatcccaacactttggg

SEQ ID NO: 440147 - DNA, 120 bp, Artificial Sequence
  ENSG00000153832_24 (sequence is synthesized)
gtcttaaaaaaaaaaaagatcctaggttaacatgtggactccattaatgaagttaaaatcaagtaaatatagttttatgctataatatttatgaattgggcagtggcaaacaaccaagtg

SEQ ID NO: 440148 - DNA, 120 bp, Artificial Sequence
  ENSG00000153832_25 (sequence is synthesized)
gtttgggctttactggcaagggcttgagggaaaacttttatacggtgttttctgaaggaagacaaaatatttgattggttacagtggaaattccctggttagaggttagttggcagtttc

SEQ ID NO: 440149 - DNA, 120 bp, Artificial Sequence
  ENSG00000153832_26 (sequence is synthesized)
tgactggtaaagtctctggttagaggttagttggcggtttctgactgggtaaagagaaatttccttttcctatgctacaaccatctatatttaaaaaacattttttttattaaaaaaaaa

SEQ ID NO: 440150 - DNA, 120 bp, Artificial Sequence
  ENSG00000153832_27 (sequence is synthesized)
aattccccctcgggtcacccgggacctggagctggaaatttcacggatcagggttccctaagacccttggaagaggggacgatcgccccaagttagaaatccttctgccagctcataagc

SEQ ID NO: 440151 - DNA, 120 bp, Artificial Sequence
  ENSG00000153832_28 (sequence is synthesized)
gtggttcaatttaaactagggttttggccccttgaccccaaccaagccccgccccttcctggttgtcttagcgacggcggtggcgtcccaagatggcgtcgtggctgccggagactctct

SEQ ID NO: 440152 - DNA, 120 bp, Artificial Sequence
  ENSG00000153832_29 (sequence is synthesized)
gactctctttgaaactgtaggacaaggcccgccgcctagcaaagactattaccagttactggtcacccggtctcagaaaaattgagtttgcatagccgggcgcagtggcttacgcctgta

SEQ ID NO: 440153 - DNA, 120 bp, Artificial Sequence
  ENSG00000153879_0 (sequence is synthesized)
gcgcgcggccccggcgagcaggggaagccggtggccgcggctgcggaacgggcggaggctgccggtttcgtaaccgtcgctcctcctcgctgactcgcgggctgtgaggcctgggtcggc

SEQ ID NO: 440154 - DNA, 120 bp, Artificial Sequence
  ENSG00000153879_1 (sequence is synthesized)
tcgggccgcaccgcgcggggccgctcggagtggaggccgcctgggggcaggcgggctagaggagcaggtacatgtgaagattttttggcagcttagcgtggaaaccattgatcaccctgc

SEQ ID NO: 440155 - DNA, 120 bp, Artificial Sequence
  ENSG00000153879_2 (sequence is synthesized)
tctcatttctacctgttctgtgttggcaagggagagtgcccaaatgagcaagatatcgcagcaaaacagcactccaggggtgaacggaattagtgttatccatacccaggcacatgccag

SEQ ID NO: 440156 - DNA, 120 bp, Artificial Sequence
  ENSG00000153879_3 (sequence is synthesized)
cggcttacagcaggttcctcagctggtgcctgctggccctgggggaggaggcaaagctgtggctcccagcaagcagagcaaaaagagttcgcccatggatcgaaacagtgacgagtatcg

SEQ ID NO: 440157 - DNA, 120 bp, Artificial Sequence
  ENSG00000153879_4 (sequence is synthesized)
gcaacgccgagagaggaacaacatggctgtgaaaaagagccggttgaaaagcaagcagaaagcacaagacacactgcagagagtcaatcagctcaaagaagagaatgaacggttggaagc

SEQ ID NO: 440158 - DNA, 120 bp, Artificial Sequence
  ENSG00000153879_5 (sequence is synthesized)
aaaaatcaaattgctgaccaaggaattaagtgtactcaaagatttgtttcttgagcatgcacacaaccttgcagacaacgtacagtccattagcactgaaaatacgacagcagatggcga

SEQ ID NO: 440159 - DNA, 120 bp, Artificial Sequence
  ENSG00000153879_6 (sequence is synthesized)
caatgcaggacagtagacctcaccctttccagactttagagcttgtggcttgaatgttaaaggtgtgaccaccgacaccactcatgtcaatggctgaaagttgtccatttccatgactca

SEQ ID NO: 440160 - DNA, 120 bp, Artificial Sequence
  ENSG00000153879_7 (sequence is synthesized)
aagacccattggaggctattttctgggatcagcactgaagagttgattagctaaaaatgttagccttgtaattcgaatatctggttttaaatgatagaggtttttgtgggaatcaaaatc

SEQ ID NO: 440161 - DNA, 120 bp, Artificial Sequence
  ENSG00000153879_8 (sequence is synthesized)
ccccaaatgttaaggtatatggtaaaaaaagaaatatctgggatcccgatgttcttaataaatcctgacttcccaagaaatgcttcttttttaagttgacaaaaggaatggggaactggc

SEQ ID NO: 440162 - DNA, 120 bp, Artificial Sequence
  ENSG00000153879_9 (sequence is synthesized)
aggccgcgcagaaggttcttggttttaatggataggctgaattggattaagaaaagttgaatgccacctatggtaatctatttgtgattttcttctaaattatgtattataaattcgtag

SEQ ID NO: 440163 - DNA, 120 bp, Artificial Sequence
  ENSG00000153879_10 (sequence is synthesized)
agctatagaaagcaatgagtgtgtaatttggagtgattttatatatggcataaactttgttttaacataattagtactgttttcccccaaaagtacaagtttttgagtagcaatgtcagg

SEQ ID NO: 440164 - DNA, 120 bp, Artificial Sequence
  ENSG00000153879_11 (sequence is synthesized)
ttaagtaaagaaacttcatcacatcttataggtagtgtgtggccaattgacttaaaaaatacaaataacatttaggaagcaaatagattaaacacaaaaataaaactaaagcataggaat

SEQ ID NO: 440165 - DNA, 120 bp, Artificial Sequence
  ENSG00000153879_12 (sequence is synthesized)
tatgtttttgagatacctttgggcttagattggcattgttttattctaaaaacccaactcagtggtgtagagaaacttgtgtaccaaaattttagtttctgcagatgctagtgttttttt

SEQ ID NO: 440166 - DNA, 120 bp, Artificial Sequence
  ENSG00000153879_13 (sequence is synthesized)
ggatacaattttgacaaccaagttagtaaacaaaatatcttaacagtttgatgacacaagctactgatgagggtttggaatattaattcagaaggtagtttctcttgtgttcaaaatagc

SEQ ID NO: 440167 - DNA, 120 bp, Artificial Sequence
  ENSG00000153879_14 (sequence is synthesized)
tgccatggggctgttacttttaaagtcaaaattttcttctgaaggctcattttggtatttgatcttaaccaagtgattattagagaaatgtatcaactccatgccatctcccaaaataat

SEQ ID NO: 440168 - DNA, 120 bp, Artificial Sequence
  ENSG00000153879_15 (sequence is synthesized)
aacttgaaagtgtaaggttttaacctttaatttatttctcttaaatacatcttttgatattgttgttgtgacatttctttttctggttagtgggctttccagactttgtaccactgcttc

SEQ ID NO: 440169 - DNA, 120 bp, Artificial Sequence
  ENSG00000153879_16 (sequence is synthesized)
tgtttattcatttatatgcttttgtgtcccataaattatttcagaaaatgctgataaaactcaggatattgacatttttgttgagactaaaaaatggcagtcgctaaagtagggactcta

SEQ ID NO: 440170 - DNA, 120 bp, Artificial Sequence
  ENSG00000153879_17 (sequence is synthesized)
gagtctggcttacgtcagtgttggtagtttagattgtctttgtcaacgttttttcttctctcttttgctttcttttctttctctttttttcttagcacagttctagctcaaatttgtgta

SEQ ID NO: 440171 - DNA, 120 bp, Artificial Sequence
  ENSG00000153879_18 (sequence is synthesized)
ttttttgtgtgcctgggctggagatgagagactgagtcataactgatttaaaagtttgtgttatcaggtatcttatttgaacatggtcatttttggccacattgctgtttcatactagga

SEQ ID NO: 440172 - DNA, 120 bp, Artificial Sequence
  ENSG00000153879_19 (sequence is synthesized)
cttgggatgatgtagccagaataaaactcaagttgcaccctccggttggtggaagattgctgaccgtgccgtttctgggcaggagaagacatcatggtgtccagcaactcagcaaagcca

SEQ ID NO: 440173 - DNA, 120 bp, Artificial Sequence
  ENSG00000153879_20 (sequence is synthesized)
ttcttaagagtcgtgaggtccttctgaatgtaaaactggagcccaggagaagctgtcccaggagggctgttaactccctatagagccaggagacaggataggggtttctagggtccaaca

SEQ ID NO: 440174 - DNA, 120 bp, Artificial Sequence
  ENSG00000153879_21 (sequence is synthesized)
ccagcttaccttggagtatgaatctacccatgaaggatgagagatgttttgaaaaactagccaggacacacccacaggatcctactggctccttagcagctgattggtgttacataatta

SEQ ID NO: 440175 - DNA, 120 bp, Artificial Sequence
  ENSG00000153879_22 (sequence is synthesized)
acttaattggagatgcattaggtcacttgaatgtataagcaagcacctatggtaggcgctacagacatttaaatctcttgggaattcgatgctcccatggaatttataccagttatatga

SEQ ID NO: 440176 - DNA, 120 bp, Artificial Sequence
  ENSG00000153879_23 (sequence is synthesized)
attgacttaagtatcttgaaaaagaaactttagagaaagcatcaggggtgtgtactcagtatttcaaatcagaacacaagattggaacttttggaaaaatgggttcaagctttcctatta

SEQ ID NO: 440177 - DNA, 120 bp, Artificial Sequence
  ENSG00000153879_24 (sequence is synthesized)
gccatggaaatgcaaagtttagcagaagcaagcaattaggcagagaacaaaaatgttaagcatggtgttgtctatcttattgaagtggttggaaatgaaagcttttaatttgatagattt

SEQ ID NO: 440178 - DNA, 120 bp, Artificial Sequence
  ENSG00000153879_25 (sequence is synthesized)
atcagtataaaattagggaaaccacgtgtggggaatgaatcaatttagagcttcgggaattgtgaggtgacttttgtaacttttgttctgtgtgtgacctgtgaaccactaggatgtgat

SEQ ID NO: 440179 - DNA, 120 bp, Artificial Sequence
  ENSG00000153879_26 (sequence is synthesized)
ctgcccttgtgggcaggtccagcatagttaggagttaggctttagcataaatttctagctgcatctgagtctcctgggatgggtgctctttggctggttttggctgcggatggtgagatc

SEQ ID NO: 440180 - DNA, 120 bp, Artificial Sequence
  ENSG00000153879_27 (sequence is synthesized)
agagcagctcttcctgctgctggcccctgcaatcagttgttgggatgccagtgcagatcactaagtagtaagattttaatcaaacacgaccaggtccgaaatgcaggtcatgagtgtgaa

SEQ ID NO: 440181 - DNA, 120 bp, Artificial Sequence
  ENSG00000153879_28 (sequence is synthesized)
attctcaaatttacataaaaagtagaagtatagacagtttaacatttggtattaaaggagaggaaattgtagcagcttttcacgtttcccagtccccattagagggcttgagaccttgta

SEQ ID NO: 440182 - DNA, 120 bp, Artificial Sequence
  ENSG00000153879_29 (sequence is synthesized)
cctgaacaacccattttgcactcagtgctttctgatgccttaggagaattgttttgtttcacaaaagctgggaaggaagaagtccattctgcagctgttagatctgcctctcaggaaaaa

SEQ ID NO: 440183 - DNA, 120 bp, Artificial Sequence
  ENSG00000153879_30 (sequence is synthesized)
gtactaacttgttctttttgttcctggctttcatcagtttgtgagatttctctattttttttaaatataattttatttctttcaacaaatataaaataaaaaacaactttggaacaatga

SEQ ID NO: 440184 - DNA, 120 bp, Artificial Sequence
  ENSG00000153879_31 (sequence is synthesized)
gaaggtggaccgagtcgagctttagaatcctgatcttctagaagggctcagcttgcggtgatcgaaaatctgttcagaagttcaaagactgatcaataaaatagggaaagcaactggttt

SEQ ID NO: 440185 - DNA, 120 bp, Artificial Sequence
  ENSG00000153879_32 (sequence is synthesized)
ttaaatgcatgactttgcagagataatattttgcttctttgtggagctgttggaatgtcctgcactttactgttgaacgtagtttagaagaacacgcaacacctacgggtcgaatagaga

SEQ ID NO: 440186 - DNA, 120 bp, Artificial Sequence
  ENSG00000153885_0 (sequence is synthesized)
attttgtgtgtaaatgagcgtggcattctgctcacttctctctgctcgggcgggcggggctcggcggcgggcgggcagggacccgggtctcccgccgcagctggagaagcgggtcactac

SEQ ID NO: 440187 - DNA, 120 bp, Artificial Sequence
  ENSG00000153885_1 (sequence is synthesized)
cgggccagtttggaaacctgtgggccctcccgaccgctatcgctgaggcccctgcaacaggcgggccagggcgcactggggctgggtgctgggtttgatgctggtgctggtggaatgaac

SEQ ID NO: 440188 - DNA, 120 bp, Artificial Sequence
  ENSG00000153885_2 (sequence is synthesized)
ttgtatctctcactgcacccacttttgtgcttctgacttaagcagtggtctcggaaagagggtcgtggtcccgcacggatgcgcttgttgggagaaaccttggagattcacggcaaggcg

SEQ ID NO: 440189 - DNA, 120 bp, Artificial Sequence
  ENSG00000153885_3 (sequence is synthesized)
taaagcctggggcttccaacgatactctgggcagggatggaagcctagatgcctcaccgcaaggagcggccgagcgggtcctcgcttcacacacacggcagcaccggcaccgcggaggga

SEQ ID NO: 440190 - DNA, 120 bp, Artificial Sequence
  ENSG00000153885_4 (sequence is synthesized)
ggaaacatgtcccggctgtctctcacccggtcgcctgtgtctcccctggctgcccagggcatccccctgccagcccagctcaccaagtccaatgcacctgtgcacatcgatgtgggcggc

SEQ ID NO: 440191 - DNA, 120 bp, Artificial Sequence
  ENSG00000153885_5 (sequence is synthesized)
cacatgtacaccagcagcctggccacgctcaccaagtaccctgactccaggataagccgcctcttcaatggcactgaacccatcgtcctggacagtttgaagcaacattatttcattgac

SEQ ID NO: 440192 - DNA, 120 bp, Artificial Sequence
  ENSG00000153885_6 (sequence is synthesized)
cgggatggggagattttccgctacgtcctgagcttcctgcggacgtccaagctgctgcttccggatgactttaaggacttcagtctgctgtacgaggaggcgcgctactatcagctccag

SEQ ID NO: 440193 - DNA, 120 bp, Artificial Sequence
  ENSG00000153885_7 (sequence is synthesized)
cccatggtgcgcgagctggagcgctggcagcaggagcaggagcagcggcgccgcagccgggcctgtgactgcctggtggtgcgcgtcacgcccgacttgggcgagcggatcgcactcagc

SEQ ID NO: 440194 - DNA, 120 bp, Artificial Sequence
  ENSG00000153885_8 (sequence is synthesized)
ggcgagaaggccctcatcgaggaggtcttccccgagaccggagacgtcatgtgcaactccgtcaacgccggctggaaccaggaccccacgcacgtcatccgcttcccgctcaatggctac

SEQ ID NO: 440195 - DNA, 120 bp, Artificial Sequence
  ENSG00000153885_9 (sequence is synthesized)
tgccggctcaactcggtacaggtcctggagcggctgttccagaggggtttcagcgtggctgcgtcctgtgggggcggtgtggactcctcccagttcagcgagtatgtgctttgccgggag

SEQ ID NO: 440196 - DNA, 120 bp, Artificial Sequence
  ENSG00000153885_10 (sequence is synthesized)
aatcaagcaggaacccctggactaggccctgcttcagtgcccacctgggcccccccagggacctggaaacagtgctggggagttctgcctgtgtatacttggccgtgggcatgagaccga

SEQ ID NO: 440197 - DNA, 120 bp, Artificial Sequence
  ENSG00000153885_11 (sequence is synthesized)
gggtgaggctggagggtccaaagctggcccagcgagcaccagggtcccaggtgtcatggcaacagaacgtgggatgctggaggcatgcctgcagaaggactgttgatgcgacccaaagat

SEQ ID NO: 440198 - DNA, 120 bp, Artificial Sequence
  ENSG00000153885_12 (sequence is synthesized)
acagcggtgggatctctgctgccagctctcccagcccctcagcttcgcagcctggcgcagcatcctctgaggccccggggcctgttggggcggggttggaagagccgtctgcagctactt

SEQ ID NO: 440199 - DNA, 120 bp, Artificial Sequence
  ENSG00000153885_13 (sequence is synthesized)
cagaggagctgtttatccctctccacgcggggcagactctggcgggtctcctagcgtccgagagatggcttattttctacagtatttaaaatggatgcagccctaactgcaaaagtcaga

SEQ ID NO: 440200 - DNA, 120 bp, Artificial Sequence
  ENSG00000153885_14 (sequence is synthesized)
gaggctgacaaggaccaatgcttctttatctggtgctcagttctcagtcagacgtgcagcatggctgcagggtggaccagctgcctggcattcaggcccagatgcctgcagggctggggc

SEQ ID NO: 440201 - DNA, 120 bp, Artificial Sequence
  ENSG00000153885_15 (sequence is synthesized)
tctcgggacagatgcagggatgtgtgctgcagggctgctgggaggagagtggtgggggcctgagggctgagtgattctgtaaccacctgagaccttcacgtttgctgccgttgggggctc

SEQ ID NO: 440202 - DNA, 120 bp, Artificial Sequence
  ENSG00000153885_16 (sequence is synthesized)
aggctgcactccccgggtcacctgacctgctgcccaggggcttccagtcctgtctgtgtggactggcacctgggctgctggagaagtctcctcccgttcggaccagcctcagggctgcac

SEQ ID NO: 440203 - DNA, 120 bp, Artificial Sequence
  ENSG00000153885_17 (sequence is synthesized)
gttacctcaggaatgggccccaccatgaaggggcccatctgtcagcagcgtcttctaggtccccagctcagggagccatccccagctccagttttctcatgcgaatatgcacagttttaa

SEQ ID NO: 440204 - DNA, 120 bp, Artificial Sequence
  ENSG00000153885_18 (sequence is synthesized)
ttcacgttgttacactagcctgccgatgagacccagacacaggcagacctggcgctcttgacccctgattccagtgaggactggccctgaggagtccttgcagacctgctgcctccccca

SEQ ID NO: 440205 - DNA, 120 bp, Artificial Sequence
  ENSG00000153885_19 (sequence is synthesized)
cgacaggcccaaagatggaccccccctggccttgtgacagctccccaagtgttctccggtggagaaactgcagaggactggtgggcggggctccccagccatcaccatcctgtgtacaat

SEQ ID NO: 440206 - DNA, 120 bp, Artificial Sequence
  ENSG00000153885_20 (sequence is synthesized)
ggctgtagacttgtatatggctcctttaatattgtaaagatgctgatgtacaattgtcgtgcatttgtgtgaacacattgcgttcccagtccatgccataaatgatgctctcaagcaaaa

SEQ ID NO: 440207 - DNA, 120 bp, Artificial Sequence
  ENSG00000153885_21 (sequence is synthesized)
ataggcggcgaagctgcgcccggcgcccgagaccggcagctgcgtggggcgggggctgcgcccgagcccgatctgccggctccgagcagtggtctcggaaagagggtcgtggtcccgcac

SEQ ID NO: 440208 - DNA, 120 bp, Artificial Sequence
  ENSG00000153885_22 (sequence is synthesized)
actctaatcctctgccccgcggcgcagccgagccccgagccaggagtcgccgcgcgcgcccgttcgcgctggcagtggtctcggaaagagggtcgtggtcccgcacggatgcgcttgttg

SEQ ID NO: 440209 - DNA, 120 bp, Artificial Sequence
  ENSG00000153885_23 (sequence is synthesized)
ggagaaaccttggagattcacggcaaggcgtaaagcctggggcttccaacggtgactacggcacagaggagagttactgagtgcctctggggaggagcagtagaaagggtccattggctg

SEQ ID NO: 440210 - DNA, 120 bp, Artificial Sequence
  ENSG00000153885_24 (sequence is synthesized)
gcatctgtaatctgctgcctagggggtggggtctctccccactgtcactccacccaccagggtctccagggtgcacaagctgacacagcctgagggagctagggttggggagtccaagtc

SEQ ID NO: 440211 - DNA, 120 bp, Artificial Sequence
  ENSG00000153885_25 (sequence is synthesized)
tgcctgttgaaagctgctatgcacagaggcttgtgaccctgacttggcggcattggtagtgcaaggtggagctcctgacccacctgcaggggactagggcttattcagagccagcccagc

SEQ ID NO: 440212 - DNA, 120 bp, Artificial Sequence
  ENSG00000153885_26 (sequence is synthesized)
ctgagcctgccggcagcgggcaggggagtctcacgtaccttcaaggttcctctggagggagacttaggcccggcccctgcagggggtcatttgtgagtgatactgagtaggtaagtcttg

SEQ ID NO: 440213 - DNA, 120 bp, Artificial Sequence
  ENSG00000153885_27 (sequence is synthesized)
ccggcgtccgcggagccctccaggggcagagtgagctggagggaggcgcgatccctgaaacggtgaagccccccgtgccatcctacaaaaaaggcaacaatgtgtcgatgcataatttat

SEQ ID NO: 440214 - DNA, 120 bp, Artificial Sequence
  ENSG00000153885_28 (sequence is synthesized)
gtccctctcataattaaatgatggcgcctgggggatggacttaaaaaaatcgatctgtactttttttttttttttccaaaaggatgttctataaaaatggcccagagtattttcaacaaa

SEQ ID NO: 440215 - DNA, 120 bp, Artificial Sequence
  ENSG00000153885_29 (sequence is synthesized)
agcccgatctgccggctccgagcttagcaaagaagcgacttcagaagaagcgatttagtgaaatcgtctcaagctgccgcagctcagccagtttaatcacccccagagagccgaacaact

SEQ ID NO: 440216 - DNA, 120 bp, Artificial Sequence
  ENSG00000153885_30 (sequence is synthesized)
tggcccagagtattttcaacaaagcgtgcttcatttgacacccagagtctgactttggattcgaactaaacccaggcaacaggcgaggcaggacagaggctgagtggaaaggtggtctgg

SEQ ID NO: 440217 - DNA, 120 bp, Artificial Sequence
  ENSG00000153885_31 (sequence is synthesized)
agccccttccctctccctgctgacctgggagtcgcaggcacccaccagctgccaagagaatccctggaccggctcttcctggatgggtccaagaattggacagctcagatggagtgaggg

SEQ ID NO: 440218 - DNA, 120 bp, Artificial Sequence
  ENSG00000153885_32 (sequence is synthesized)
cctattttccaacagctcttcgcagacccaagagcttggcacatttccgggttagggtggaatgggctttgcagggaagagggccccctgtgcacgcattccacagcctgtcggtcagaa

SEQ ID NO: 440219 - DNA, 120 bp, Artificial Sequence
  ENSG00000153885_33 (sequence is synthesized)
cttgctagttgcaggagacgggtgttacacgcagtcatcagacctcaccctcacagaggcacaaacccacatagttgtggacgcctgcagagactcaaatattgagaggacttctccttt

SEQ ID NO: 440220 - DNA, 120 bp, Artificial Sequence
  ENSG00000153885_34 (sequence is synthesized)
ttctctccctccagagctcccacgagctgatgcacccccaggcttcaaaccacctggaatgcacagctcagggaagctggtggatgcctagaggctgaaggacagggaactctccattat

SEQ ID NO: 440221 - DNA, 120 bp, Artificial Sequence
  ENSG00000153885_35 (sequence is synthesized)
tggggcaggactcagggaggacacttggggccatgtgtctggagagagggcataggttacaccctacagaataaagaagggacccaaagcctctttttgcctcccggaatcaaggccctg

SEQ ID NO: 440222 - DNA, 120 bp, Artificial Sequence
  ENSG00000153885_36 (sequence is synthesized)
agggcagcaggatggtggcctgggtggggtcgtccaactaggtttgctaacctgaggggtcactgggcctggccacttctgtccctctggtggtggaacccagcacgtggttctgtaggg

SEQ ID NO: 440223 - DNA, 120 bp, Artificial Sequence
  ENSG00000153885_37 (sequence is synthesized)
acctttgtcagtgagcaagactgagatcgtcacaggagaaggtgcccttgctggctgccccagcaggcacccacctccctgccaggccaagccaggtgtcctcttgcagcttggccttga

SEQ ID NO: 440224 - DNA, 120 bp, Artificial Sequence
  ENSG00000153885_38 (sequence is synthesized)
ggattcctcccttggatccttcagttcccatcgaggaataacccgcagcagtggtggaggaaggtcagtggctgggtcctgagcttggtgttatttattgcatttgggtgcctgtcccct

SEQ ID NO: 440225 - DNA, 120 bp, Artificial Sequence
  ENSG00000153885_39 (sequence is synthesized)
cagggcagcacagattctgaattctgattcacagtccctagccagatgggaactgggaaagagacagaaggcgtctgggtgcttttgaaccctgtctcaaatgtttgggattttctctct

SEQ ID NO: 440226 - DNA, 120 bp, Artificial Sequence
  ENSG00000153885_40 (sequence is synthesized)
cactattctttggttggggatgatgtcctctttagacccccacgtaatggtatgagaaggtggcaggcagtggctcagccagccagggggcaccaagtcatgcagccagcgtgagacctg

SEQ ID NO: 440227 - DNA, 120 bp, Artificial Sequence
  ENSG00000153885_41 (sequence is synthesized)
cagttcacctaagcacagaacgagatctcagtatgcctccatgtaaacagattcacataggcctccaatttcaatgagaccttttgcattttttctcaaagcccttatgttctaacccat

SEQ ID NO: 440228 - DNA, 120 bp, Artificial Sequence
  ENSG00000153885_42 (sequence is synthesized)
gagaaccattttacctgccctctaagggccaccagcttcgacctgcctcaggggacagcagcacagaccagtggctccctgtccaaggccgcagagcagacgccatcccactgtacaatc

SEQ ID NO: 440229 - DNA, 120 bp, Artificial Sequence
  ENSG00000153885_43 (sequence is synthesized)
gaatttgctggacaaacttgataggtttctctgcttagcaacgagcctatagttagttggcacatctgcgttttggcatctgaggctcccatctgagtggaggagaaagtgttgtgttta

SEQ ID NO: 440230 - DNA, 120 bp, Artificial Sequence
  ENSG00000153885_44 (sequence is synthesized)
ttagcaggaagtcttgtgaaaacagctcgctgctgtgtatgtttatggatttttctgatataacagccagcatggttaccgagtggtagagattctcgaacattctcaaactctcttttt

SEQ ID NO: 440231 - DNA, 120 bp, Artificial Sequence
  ENSG00000153885_45 (sequence is synthesized)
gggtaaatgattgtgctaaaaataaaatttattaataaagaaggggaaaaaggagtaactctacctgactaaatgttactctaatttatttatttctttactaattaagtaaaaccagga

SEQ ID NO: 440232 - DNA, 120 bp, Artificial Sequence
  ENSG00000153885_46 (sequence is synthesized)
agtatgattttacatcaaccagagaatttctgaatttatagggaaacactatgtccccataatgatgctataattctaatatatctagtccccataaacagtaagtacaaattatcattc

SEQ ID NO: 440233 - DNA, 120 bp, Artificial Sequence
  ENSG00000153885_47 (sequence is synthesized)
ctttaaagcatttttacacttcctggaatgagtatattatcagcaatcttttgtcaaatgccagccgtataaatgttacttctgctctttgtaaacctcaaaactcattattcttgatta

SEQ ID NO: 440234 - DNA, 120 bp, Artificial Sequence
  ENSG00000153885_48 (sequence is synthesized)
taagcaactggacagaaccatgccaaagcttccccgtttcccaccaaacccctgccagtgagtgcagagaactcgcaaagccacagcaggcggtctcagccaccgtcccgctcacagggg

SEQ ID NO: 440235 - DNA, 120 bp, Artificial Sequence
  ENSG00000153885_49 (sequence is synthesized)
cccaatgccaggtcacaacactaagaatatctttcaaaaaatgtgtcttttttttttttttttttaaagctactgcttgactgttccttagaataaataaaggatattttataaattaca

SEQ ID NO: 440236 - DNA, 120 bp, Artificial Sequence
  ENSG00000153885_50 (sequence is synthesized)
ggaggggcggcctggcccccggctccgctccagccccgaccgactggcagcccagtttcttcccaagtcccgcccccagccccgggcgccgcggcggcggctgctctcctctttgtaacc

SEQ ID NO: 440237 - DNA, 120 bp, Artificial Sequence
  ENSG00000153896_0 (sequence is synthesized)
cggcgtccagtcttcgtccgccgttaggttgcggctgctgtggttgccaacgctacactgggtagaacgccagacaggggccacttttcgagaccgagtagagacggacagtgaggagga

SEQ ID NO: 440238 - DNA, 120 bp, Artificial Sequence
  ENSG00000153896_1 (sequence is synthesized)
taggacccacttacacgcttttatgtcagccgcgatcccacccccacaagcgtctgcaaaacccttcctggggccttggcgacagccctgtgtcctcacggcgcgcagaggcggcgccgc

SEQ ID NO: 440239 - DNA, 120 bp, Artificial Sequence
  ENSG00000153896_2 (sequence is synthesized)
gaaccttgtgtgcattttacacgacggcggggactgaggtccctcgcagcccagagccggagcccggggtcggccgagcccgcaggaccggcttcctcgccgactctcacggcctcaccc

SEQ ID NO: 440240 - DNA, 120 bp, Artificial Sequence
  ENSG00000153896_3 (sequence is synthesized)
agccccctgggcccatggcggcgccggcgttggcattagtatcatttgaagacgtggttgtgaccttcactggagaggaatgggggcacctggacctggcccagaggaccctgtaccagg

SEQ ID NO: 440241 - DNA, 120 bp, Artificial Sequence
  ENSG00000153896_4 (sequence is synthesized)
aggtgatgctggagacctgcaggctcctggtctcactggggcatcctgttcccaaaccagagctgatctatctactggaacatggacaggaactgtggacagtgaagagaggcctctccc

SEQ ID NO: 440242 - DNA, 120 bp, Artificial Sequence
  ENSG00000153896_5 (sequence is synthesized)
aaagcacctgcgcaggtgaaaaagcaaaacccaagattacagagcctactgcttctcagctggccttctctgaggaatcctctttccaggaacttctggcacagagatcctcaagagatt

SEQ ID NO: 440243 - DNA, 120 bp, Artificial Sequence
  ENSG00000153896_6 (sequence is synthesized)
ccaggttggggcaagctagagatgaggaaaagctaataaaaattcaggaagggaacttgaggccaggaacaaacccccacaaagagatatgccctgagaagttgagttataaacatgatg

SEQ ID NO: 440244 - DNA, 120 bp, Artificial Sequence
  ENSG00000153896_7 (sequence is synthesized)
atttggagccagatgatagtctgggcttaagggttttacaggaacgagtcactccacaagatgctctccatgagtgtgactctcaaggaccaggaaaagaccccatgactgatgcaagga

SEQ ID NO: 440245 - DNA, 120 bp, Artificial Sequence
  ENSG00000153896_8 (sequence is synthesized)
ataacccttacacatgcacggaatgtgggaaagggtttagcaagaagtgggcccttgttcggcatcaacagattcatgctggagtgaagccctatgagtgcaatgagtgtgggaaagcct

SEQ ID NO: 440246 - DNA, 120 bp, Artificial Sequence
  ENSG00000153896_9 (sequence is synthesized)
gtcgttatatggctgatgtcattcgacatatgaggcttcatactggggaaaaaccatacaagtgtattgagtgtgggaaagccttcaaacgcaggtttcacctcacggagcaccagcgta

SEQ ID NO: 440247 - DNA, 120 bp, Artificial Sequence
  ENSG00000153896_10 (sequence is synthesized)
ttcacaccggagataagccctatgagtgcaaagaatgtggcaaagcattcacccaccgctcttcttttatccagcataatatgactcacactcgagaaaaaccctttttatgcaaagaat

SEQ ID NO: 440248 - DNA, 120 bp, Artificial Sequence
  ENSG00000153896_11 (sequence is synthesized)
gtgggaaagctttttactacagctcctcatttgctcaacatatgaggattcatactggaaagaaactctatgagtgcggtgaatgtggaaaggccttcacgcaccgctccacatttatcc

SEQ ID NO: 440249 - DNA, 120 bp, Artificial Sequence
  ENSG00000153896_12 (sequence is synthesized)
ctggagagaaaccctatgagtgcggtgaatgtggaaaggcctttactcatcgctccactttcatccgacataagaggacccataccggagagaagccctttgagtgcaaagaatgtggga

SEQ ID NO: 440250 - DNA, 120 bp, Artificial Sequence
  ENSG00000153896_13 (sequence is synthesized)
aggccttttgtgacagctcttccttaattcaacatatgaggattcacactggtgagaagccttatgagtgcagtgaatgtggaaaggcttttacacaccactctgtttttattcgacata

SEQ ID NO: 440251 - DNA, 120 bp, Artificial Sequence
  ENSG00000153896_14 (sequence is synthesized)
ataggacccacagtggacaaaaacccttggagtgcaaagaatgtgcaaaagccttttactatagctcttccttcactcgacacatgaggattcacactggagagaagccctatgtttgta

SEQ ID NO: 440252 - DNA, 120 bp, Artificial Sequence
  ENSG00000153896_15 (sequence is synthesized)
gagaatgtggaaaggcttttacccaacctgcaaattttgttcggcataataggatccacactggagaaaaaccttttgaatgcaaagaatgtgagaaagccttctgtgacaactttgctt

SEQ ID NO: 440253 - DNA, 120 bp, Artificial Sequence
  ENSG00000153896_16 (sequence is synthesized)
taactcagcacatgagaactcacactggagagaaaccctttgaatgcaatgaatgtggaaagaccttcagccacagttcatcgttcactcaccatcgaaagattcataccagagtttaaa

SEQ ID NO: 440254 - DNA, 120 bp, Artificial Sequence
  ENSG00000153896_17 (sequence is synthesized)
agatacaggaaggcctattacaagtgtgtttgtctttagtgaactcatagtggtgacatacctttccttttgagtataactattgagggaaatattttggccagagagatgtcttagtat

SEQ ID NO: 440255 - DNA, 120 bp, Artificial Sequence
  ENSG00000153896_18 (sequence is synthesized)
ctgataatttatactaactagaaacagaattgtccctgtgaaatctttttatggcaggtaatcacttgtcatccaaagaattatattaaagattcacccagtttagagccttacactgta

SEQ ID NO: 440256 - DNA, 120 bp, Artificial Sequence
  ENSG00000153896_19 (sequence is synthesized)
cctgagaataatcgaggggagagacctggtggttaacatgcatttaggtaaaatgtcaggaacaactttcctcttattaatactataaatccatctcaagcatattttaaaataatgaga

SEQ ID NO: 440257 - DNA, 120 bp, Artificial Sequence
  ENSG00000153896_20 (sequence is synthesized)
gatggaggaaacaatctagaagataaaagaaaaagatgtgcataacttgttttcagtttccctgtttatgacagtttgtcatttggcgggttgggggatggagcagggaataagacattg

SEQ ID NO: 440258 - DNA, 120 bp, Artificial Sequence
  ENSG00000153896_21 (sequence is synthesized)
aaaaagtctcatcccctttgtgtgttttacatatatatatctctaagtccagagccaggagagttggaccattgagggcagctctgccaacatttagtaaaagtattcattgttccaaaa

SEQ ID NO: 440259 - DNA, 120 bp, Artificial Sequence
  ENSG00000153896_22 (sequence is synthesized)
ctgtcatctctacccttgagggagtgtgtctttgtgagaaatataaaggcttgagtcatgaaatacttaacacatgtgcacatgtacacatgtacatttatatgcagtgaattgttactc

SEQ ID NO: 440260 - DNA, 120 bp, Artificial Sequence
  ENSG00000153896_23 (sequence is synthesized)
gtggtagttaggttctgtgaattttctgtgcacactgaattagtgaatgctgaatgattgttgctaggggaaatacagcgttagcttctgtgagcctctgatccaaacatttttatcaac

SEQ ID NO: 440261 - DNA, 120 bp, Artificial Sequence
  ENSG00000153896_24 (sequence is synthesized)
cagtcaacacataaccttcttctatgggtatttgtttgtttgtttgtttaaagacactttatcagtgtttcttgaataattataattattctttataataaaaatattttaattatagca

SEQ ID NO: 440262 - DNA, 120 bp, Artificial Sequence
  ENSG00000153896_25 (sequence is synthesized)
gcacctgcgcaggttggtgactgagagtctggcagcgggtatcagggcagcctgcagaccacccaggcatcactgtgtctgaaatgccatgggcagctattttgtggtcttgagcagtca

SEQ ID NO: 440263 - DNA, 120 bp, Artificial Sequence
  ENSG00000153896_26 (sequence is synthesized)
tggagcccttgaccccatggtcccccgtcttcccacttctgtcacacactctttgcctttattcaggttggaatatgttaggtaggagacagattctaggctttaatgatttgccactca

SEQ ID NO: 440264 - DNA, 120 bp, Artificial Sequence
  ENSG00000153896_27 (sequence is synthesized)
ctagcctcatgactctggagaggttgtgtgacgtcactgtgcctttggtatataagttaggctgagttaatgaccttctctgaaaaataaactccaaaatcatgtgactcaacagattaa

SEQ ID NO: 440265 - DNA, 120 bp, Artificial Sequence
  ENSG00000153896_28 (sequence is synthesized)
gcccatggcggcgccggcgttggtgagtggagggttccgcagcccgcgcgagctcgggtcaccgcccgcatgcacccatccgctgtaatacggcggatgccgggactctgtgcttctccc

SEQ ID NO: 440266 - DNA, 120 bp, Artificial Sequence
  ENSG00000153896_29 (sequence is synthesized)
ttttgatgccctaggttatggagatcccgggagagggtgaggtgagagggcagggctaatcacttcctacccagggtcctgaatccaggacaggagttgtaaggagaggtccctgtctct

SEQ ID NO: 440267 - DNA, 120 bp, Artificial Sequence
  ENSG00000153896_30 (sequence is synthesized)
ctcagtaattttctctgtggagggagctggagagggtacgcttgtgacgtgggtcctgtctttcactgctcggagagcatcactctaggtgccgtctttgaagaaggactctctaggtcc

SEQ ID NO: 440268 - DNA, 120 bp, Artificial Sequence
  ENSG00000153896_31 (sequence is synthesized)
tattagccatctactattaatatgtaacaatattaccacaaaccctgcagctgaaaacatcacttatttattatctcccacctatggattgggagtccaggcacagcttagctgggtcct

SEQ ID NO: 440269 - DNA, 120 bp, Artificial Sequence
  ENSG00000153896_32 (sequence is synthesized)
ctcaggcgtgtcataggcagctcatagctcatcatcaccatcagctcacttcttcaaatcaagccactgtgtgagactccagcaagacggatgttccagtcttataaaattacatatatt

SEQ ID NO: 440270 - DNA, 120 bp, Artificial Sequence
  ENSG00000153896_33 (sequence is synthesized)
ttatcatgtacattccatcatctttgccatattctatactttagaagcaaatcgaggtcctgccaacattttaacaggggaactacaaaagggtgtgaacactatgacttggggatcatg

SEQ ID NO: 440271 - DNA, 120 bp, Artificial Sequence
  ENSG00000153896_34 (sequence is synthesized)
agaagccatacgtgaatctctcagctgcatcagggaacatgcttcttcacttacttcctacctcttctatattttcatcccctctctactcaacattaaaaaaaaatgatgatgtttctg

SEQ ID NO: 440272 - DNA, 120 bp, Artificial Sequence
  ENSG00000153896_35 (sequence is synthesized)
atacctgggggagacttttttttttttagtgctcttacgtctccagcagcatctacatattgttgactctatttcacctgaacagccaagcttgttggagaagtcttctcattctttgaa

SEQ ID NO: 440273 - DNA, 120 bp, Artificial Sequence
  ENSG00000153896_36 (sequence is synthesized)
gagacatctacacaagactttcctttatttattttttcccttatttttgtactgaggtgcaatttatacataataagtgtacaaatcataaagtttcatttctataaagttttatatatg

SEQ ID NO: 440274 - DNA, 120 bp, Artificial Sequence
  ENSG00000153896_37 (sequence is synthesized)
tacaagtcagagaaaccatctcacagttcaagaaatacagtgttttcagcacttaacaggctccttgtgctcattctttgtcagtatccccttctataaaagtagtcagtgtttatactc

SEQ ID NO: 440275 - DNA, 120 bp, Artificial Sequence
  ENSG00000153896_38 (sequence is synthesized)
tatatcaccatacattagttttgaaggcatataaatagaaccccctagtacatactctgtcctgacttcttttgataatctttatgactcagattcattcatgtggttgcatatagttgg

SEQ ID NO: 440276 - DNA, 120 bp, Artificial Sequence
  ENSG00000153896_39 (sequence is synthesized)
cttgattgtattttttgttggatataaacccatatttctgttgggaatatacatacaagtggactggccagatcaagtgtgggcatatgattagctttaatcgaaaccaccagtttcaga

SEQ ID NO: 440277 - DNA, 120 bp, Artificial Sequence
  ENSG00000153896_40 (sequence is synthesized)
gtaactacaccatttcacatttccactagccacgtatgagagtcttcattgttccatgtacgcctgagcagttggtgtctttccctttactctttgatgcctggtagtggtgtttctcag

SEQ ID NO: 440278 - DNA, 120 bp, Artificial Sequence
  ENSG00000153896_41 (sequence is synthesized)
caccacagcacttaaagtgttcttgcccaggtcactgttgccatcctgattgctaaattcaactataatgataatagacagtggtctacagtttaccaaacatttattctttgtcacacg

SEQ ID NO: 440279 - DNA, 120 bp, Artificial Sequence
  ENSG00000153896_42 (sequence is synthesized)
ttaccaaacatttattctttgtcacacgaatgaacttttgtttggtttttgggttttttttgagacaggatctcactctgtcgcctaggctagtgtgcagtggcacaatctcggctcact

SEQ ID NO: 440280 - DNA, 120 bp, Artificial Sequence
  ENSG00000153896_43 (sequence is synthesized)
tgggattacaggtgtgagcccccacacccagccacaaatcaatattttgtatgctttttctcctaacaacttgtaggcaggaactgagagtatcccagtttttcagatgaggaaagtgaa

SEQ ID NO: 440281 - DNA, 120 bp, Artificial Sequence
  ENSG00000153896_44 (sequence is synthesized)
gaactgagagtatcccagtttttcagatgaggaaagtgaatcttagaaaagtgtgttagtctgctctggctgctgtaataaaatactatagactgcgtggcttatatagcagaaatgtgt

SEQ ID NO: 440282 - DNA, 120 bp, Artificial Sequence
  ENSG00000153896_45 (sequence is synthesized)
tttctctcaggtctagaggccgcaagtctaaggtcagggtaccagcattgttgggttctgataagggctgtcttctcagcttgcagatggccgccttctcactttgtgctcacatggcct

SEQ ID NO: 440283 - DNA, 79 bp, Artificial Sequence
  ENSG00000153896_46 (sequence is synthesized)
ttgcagatggccgccttctcactttgtgctcacatggccttccctcagtgccttcacttcttacaagaacagtgatccg

SEQ ID NO: 440284 - DNA, 120 bp, Artificial Sequence
  ENSG00000153896_47 (sequence is synthesized)
gccaccatgcctggcccccctctgactttcataattgtccctaggtgtgcagaattagaaaaattataaataatgatttatgacacattgtcatcattagtcaatgcgtgtcctggtttt

SEQ ID NO: 440285 - DNA, 120 bp, Artificial Sequence
  ENSG00000153896_48 (sequence is synthesized)
ttgttttattttctttcattgcattttattaatatatttattcatcctcctttaaaaagattgtaatgaacacctacaaacctttcgccaagtacaagaacatgacctgcttcctgcatc

SEQ ID NO: 440286 - DNA, 120 bp, Artificial Sequence
  ENSG00000153896_49 (sequence is synthesized)
tgttgatgtgtttctttcctttcccattcctatgctgcctcccttgcatacatggccactttaagatttgttattccattgcttattctgtaggaagattcaggtttttttcataaatat

SEQ ID NO: 440287 - DNA, 120 bp, Artificial Sequence
  ENSG00000153896_50 (sequence is synthesized)
aggctattcagatgttctgtttttgtttgtccgttttggtaatttgagtaatgtaaaatatttgcctactttatctttgtcttcccattactttttaagattgtttcatctcataatggt

SEQ ID NO: 440288 - DNA, 120 bp, Artificial Sequence
  ENSG00000153898_0 (sequence is synthesized)
cacagagccgcctttcagccgcccgagaactgcccgccgcactccacgactgcggcgcctgctctcgggccggggtctgcgcgcaccacgcggccggcagaaaggaaatgcaatggcaca

SEQ ID NO: 440289 - DNA, 120 bp, Artificial Sequence
  ENSG00000153898_1 (sequence is synthesized)
tcgtgattctgagatgaaagaagaatgtctaagggaagacctgaagttttacttcatgagcccttgtgaaaaataccgagccagacgccagattccgtggaaactgggtttgcagatttt

SEQ ID NO: 440290 - DNA, 120 bp, Artificial Sequence
  ENSG00000153898_2 (sequence is synthesized)
gaagatagtcatggtcaccacacagcttgttcgttttggtttaagtaaccagctggtggttgctttcaaagaagataacactgttgcttttaagcacttgtttttgaaaggatattctgg

SEQ ID NO: 440291 - DNA, 120 bp, Artificial Sequence
  ENSG00000153898_3 (sequence is synthesized)
tacagatgaagatgactacagctgcagtgtatatactcaagaggatgcctatgagagcatcttttttgctattaatcagtatcatcagctaaaggacattaccctggggacccttggtta

SEQ ID NO: 440292 - DNA, 120 bp, Artificial Sequence
  ENSG00000153898_4 (sequence is synthesized)
tggagaaaatgaagacaatagaattggcttaaaagtctgtaagcagcattacaagaaagggaccatgtttccttctaatgagacactgaatattgacaacgacgttgagctcgattgtgt

SEQ ID NO: 440293 - DNA, 120 bp, Artificial Sequence
  ENSG00000153898_5 (sequence is synthesized)
tcaattagaccttcaggacctctccaagaagcctccggactggaagaactcatcattcttcagactggaattttatcggctcttacaggttgaaatctcctttcatcttaaaggcattga

SEQ ID NO: 440294 - DNA, 120 bp, Artificial Sequence
  ENSG00000153898_6 (sequence is synthesized)
cctacagacaattcattcccgtgagttaccagactgttatgtctttcagaatacgattatctttgacaataaagctcacagtggcaaaatcaaaatctattttgacagtgatgccaaaat

SEQ ID NO: 440295 - DNA, 120 bp, Artificial Sequence
  ENSG00000153898_7 (sequence is synthesized)
cagtatgtcctggtgtttgatgcatttgtcattgtgatttgcttggcatctcttattctgtgtacaagatccattgttcttgctctaaggttacggaagagatttctaaatttcttcctg

SEQ ID NO: 440296 - DNA, 120 bp, Artificial Sequence
  ENSG00000153898_8 (sequence is synthesized)
gagaagtacaagcggcctgtgtgtgacaccgaccagtgggagttcatcaacggctggtatgtcctggtgattatcagcgacctaatgacaatcattggctccatattaaaaatggaaatc

SEQ ID NO: 440297 - DNA, 120 bp, Artificial Sequence
  ENSG00000153898_9 (sequence is synthesized)
aaagcaaagaatctcacaaactatgatctctgcagcatttttcttggaacctctacgctcttggtttgggttggagtcatcagatacctgggttatttccaggcatataatgtgctgatt

SEQ ID NO: 440298 - DNA, 120 bp, Artificial Sequence
  ENSG00000153898_10 (sequence is synthesized)
ttaacaatgcaggcctcactgccaaaagttcttcggttttgtgcttgtgctggtatgatttatctgggttacacattctgtggctggattgtcttaggaccataccatgacaagtttgaa

SEQ ID NO: 440299 - DNA, 120 bp, Artificial Sequence
  ENSG00000153898_11 (sequence is synthesized)
aatctgaacacagttgctgagtgtctgttttctctggtcaacggtgatgacatgtttgcaacctttgcccaaatccagcagaagagcatcttggtgtggctgttcagtcgtctgtattta

SEQ ID NO: 440300 - DNA, 120 bp, Artificial Sequence
  ENSG00000153898_12 (sequence is synthesized)
tattccttcatcagcctttttatatatatgattctcagtctttttattgcacttattacagattcttatgacaccattaagaaattccaacagaatgggtttcctgaaacggatttgcag

SEQ ID NO: 440301 - DNA, 120 bp, Artificial Sequence
  ENSG00000153898_13 (sequence is synthesized)
gaattcctgaaggaatgcagtagcaaagaagagtatcagaaagagtcctcagccttcctgtcctgcatctgctgtcggaggaggaaaagaagtgatgatcacttgatacctattagctaa

SEQ ID NO: 440302 - DNA, 120 bp, Artificial Sequence
  ENSG00000153898_14 (sequence is synthesized)
acacagagccgcctttcagccgcccgagaactgcccgccgcactccacgactgcggcgcctgctctcgggccggggtctgcgcgcaccacgcggccggcagaaagggtaagagaagggaa

SEQ ID NO: 440303 - DNA, 120 bp, Artificial Sequence
  ENSG00000153898_15 (sequence is synthesized)
ccccgctttgcagggctccaacttcggcggacgcgttacggcgagggcgaaatgagtcggccgtgaacggtgtttcctgttccgaatcccgagagccctggaaagttttgaaggaggagg

SEQ ID NO: 440304 - DNA, 120 bp, Artificial Sequence
  ENSG00000153898_16 (sequence is synthesized)
accccaaatgacttggacaagcagttccaaaatgactctcttatttaattgtggagtgggaaagaggactcacagttagccagctgaccatgactgaagttccagctttactttttataa

SEQ ID NO: 440305 - DNA, 120 bp, Artificial Sequence
  ENSG00000153898_17 (sequence is synthesized)
acttgaatgataaagaatagaccatgggctactactgggcattagtgcaatataacagcgataataaaattctctattagtctgttaatttatgacatgatctcggaatggaaaaagatc

SEQ ID NO: 440306 - DNA, 120 bp, Artificial Sequence
  ENSG00000153898_18 (sequence is synthesized)
atttcagagtgtgcgaaataatagtctttaaccatgtaattaaatatgtgtgtttattgtcaaataaggatttgttttaaaggtgattcttgggtttgaagacatttgttaattcatggt

SEQ ID NO: 440307 - DNA, 120 bp, Artificial Sequence
  ENSG00000153898_19 (sequence is synthesized)
tggtctgtacagaaatgaagctggttgcaataccaatctagagagtccaagctggtgaactattaagctgtttaaagatcacccttggcctggcacagtggttcacacctgtaatcccag

SEQ ID NO: 440308 - DNA, 83 bp, Artificial Sequence
  ENSG00000153898_20 (sequence is synthesized)
gaccaaaaacccacctctacaaaaagtacaaaaattagtcgggcgtgatggcaggcatctgtagtcccagctacttgggaagc

SEQ ID NO: 440309 - DNA, 77 bp, Artificial Sequence
  ENSG00000153898_21 (sequence is synthesized)
cgggcgtgatggcaggacctgagctctggaggtggaggctgccatgagccatgatcgtgccactacactccagcctg

SEQ ID NO: 440310 - DNA, 120 bp, Artificial Sequence
  ENSG00000153898_22 (sequence is synthesized)
gttctgggactgacagattgattcatcattgtaaatatcagttcttggatctgagctagcaatgtgggagagttttattttagcaaaggtgggcttggtttgttgacaaaagagcaattt

SEQ ID NO: 440311 - DNA, 120 bp, Artificial Sequence
  ENSG00000153898_23 (sequence is synthesized)
tttcttcagcatgatatgaagcaactgttggcatagccagtgggataaataagaaatggaatcatttggctgcctcgtcacttgtgctaatggtcagttgtacacacatgacatgtggaa

SEQ ID NO: 440312 - DNA, 120 bp, Artificial Sequence
  ENSG00000153898_24 (sequence is synthesized)
gtgacctgtagcagcggtcactcattttaacaattgaactctgctgggttgggtatttacctttgtctagaaaagaaatatgatatattttctctaaataaatttattttcatcattcca

SEQ ID NO: 440313 - DNA, 120 bp, Artificial Sequence
  ENSG00000153898_25 (sequence is synthesized)
tacaggatattgaaacaagaactgtacaatactagaaagcatgtattatagttgtctgggactggcttaaggggtcacatggttacccggtgatcatcaaatgggaaatgtttggacgtg

SEQ ID NO: 440314 - DNA, 120 bp, Artificial Sequence
  ENSG00000153902_0 (sequence is synthesized)
acacacactcacatacactcacacacatagagaccaacagatagacagctacctaaagcctgaaagactgacagcaacacagaaaaaaagaaacaggcagaaagagagacaaagacagaa

SEQ ID NO: 440315 - DNA, 120 bp, Artificial Sequence
  ENSG00000153902_1 (sequence is synthesized)
atagaaacagactaacacacagagtcaaaaatacagagacagaaagacagggagaaagagaaacagaaaattagacaccaaagacatacgaacagggaggaaggccgactgaaagaaaga

SEQ ID NO: 440316 - DNA, 120 bp, Artificial Sequence
  ENSG00000153902_2 (sequence is synthesized)
cggagaagaggagagagaagccagggccgagcgtgccagcaggcggatggagggcggcctggtggaggaggagacgtagtggcctgggctgagctgggtgggccgggagaagcgggtgcc

SEQ ID NO: 440317 - DNA, 120 bp, Artificial Sequence
  ENSG00000153902_3 (sequence is synthesized)
tcagagtgggggtgggggcatgggaggggcaggcattctgctgctgctgctggctggggcgggggtggtggtggcctggagacccccaaagggaaagtgtcccctgcgctgctcctgctc

SEQ ID NO: 440318 - DNA, 120 bp, Artificial Sequence
  ENSG00000153902_4 (sequence is synthesized)
taaagacagcgccctgtgtgagggctccccggacctgcccgtcagcttctctccgaccctgctgtcactctcactcgtcaggacgggagtcacccagctgaaggccggcagcttcctgag

SEQ ID NO: 440319 - DNA, 120 bp, Artificial Sequence
  ENSG00000153902_5 (sequence is synthesized)
aattccgtctctgcacctgctcctcttcacctccaactccttctccgtgattgaggacgatgcatttgcgggcctgtcccacctgcagtacctcttcatcgaggacaatgagattggctc

SEQ ID NO: 440320 - DNA, 120 bp, Artificial Sequence
  ENSG00000153902_6 (sequence is synthesized)
catctctaagaatgccctcagaggacttcgctcgcttacacacctaagcctggccaataaccatctggagaccctccccagattcctgttccgaggcctggacacccttactcatgtgga

SEQ ID NO: 440321 - DNA, 120 bp, Artificial Sequence
  ENSG00000153902_7 (sequence is synthesized)
cctccgcgggaacccgttccagtgtgactgccgcgtcctctggctcctgcagtggatgcccaccgtgaatgccagcgtggggaccggcgcctgtgcgggccccgcctccctgagccacat

SEQ ID NO: 440322 - DNA, 120 bp, Artificial Sequence
  ENSG00000153902_8 (sequence is synthesized)
gcagctccaccacctcgaccccaagactttcaagtgcagagccatagagctgtcctggttccagacggtgggggagtcggcactgagcgtagagcccttctcctaccaaggggagcctca

SEQ ID NO: 440323 - DNA, 120 bp, Artificial Sequence
  ENSG00000153902_9 (sequence is synthesized)
cattgtgctggcacagcccttcgccggccgctgcctgattctctcctgggactacagcctgcagcgcttccggcccgaggaagagctgcccgcggcctccgtggtgtcctgcaagccact

SEQ ID NO: 440324 - DNA, 120 bp, Artificial Sequence
  ENSG00000153902_10 (sequence is synthesized)
aagccactggtgctgggcccgagcctcttcgtgctggctgcccgcctgtgggggggctcacagctgtgggcccggcccagtcccggcctgcgcctggccccaacgcagaccctggccccg

SEQ ID NO: 440325 - DNA, 120 bp, Artificial Sequence
  ENSG00000153902_11 (sequence is synthesized)
ggaagggcaaccctgcttcgtggtggccgatgcctccaaggcgggcagcaccacgctgctgtgccgcgacgggcccggcttttacccgcaccagagcctgcacgcctggcaccgggacac

SEQ ID NO: 440326 - DNA, 120 bp, Artificial Sequence
  ENSG00000153902_12 (sequence is synthesized)
ggacgctgaggccctggagctggacggccggccccacctgctgctggcctcggcttcccagcggcccgtgctcttccactggaccggtggccgcttcgagagacgcacagacatccccga

SEQ ID NO: 440327 - DNA, 120 bp, Artificial Sequence
  ENSG00000153902_13 (sequence is synthesized)
ggccgaggatgtctatgccacacgccacttccaggctggtggggacgtgttcctgtgcctcacacgctacattggggactccatggtcatgcgctgggacggctccatgtttcgtctgct

SEQ ID NO: 440328 - DNA, 120 bp, Artificial Sequence
  ENSG00000153902_14 (sequence is synthesized)
gcagcaacttccctcgcgcggtgcccacgtcttccagccactgctcatcgccagggaccagctggccatcctaggcagcgacttcgccttcagccaggtcctccgccttgagcctgacaa

SEQ ID NO: 440329 - DNA, 120 bp, Artificial Sequence
  ENSG00000153902_15 (sequence is synthesized)
ggggctcctggagccactgcaggagctggggcctccggccctggtggccccccgtgcctttgcccacatcactatggccggcagacgcttcctctttgctgcttgctttaagggccccac

SEQ ID NO: 440330 - DNA, 120 bp, Artificial Sequence
  ENSG00000153902_16 (sequence is synthesized)
acagatctaccagcatcacgagatcgacctcagtgcctgagaccaccaacgggactctgggcatggctggggcccctggacggccccttggctggctcctggccctacttggggtgatgg

SEQ ID NO: 440331 - DNA, 120 bp, Artificial Sequence
  ENSG00000153902_17 (sequence is synthesized)
cccgcctgtgagctgctgaccgtgggccacgttcatcagccacacgtctaggccttaagcccacttcttaaaggatctgcacccatggggggacatagagggtcccagcctactggacct

SEQ ID NO: 440332 - DNA, 120 bp, Artificial Sequence
  ENSG00000153902_18 (sequence is synthesized)
cccgagctgcccttcaggtctaaagcaacatctggacatctcggctggggcagattccccatcaaaggcaacctggggggtgcaggctggtgcactgcatggagtcgaggtggaggtcac

SEQ ID NO: 440333 - DNA, 120 bp, Artificial Sequence
  ENSG00000153902_19 (sequence is synthesized)
gtgcagagctccatgaggtcccggagcccccctctcaacccgctcctaccccgctggtccctctgaaagcaccgaggggttgatggcattcctttcccattctaaactccacgcagccaa

SEQ ID NO: 440334 - DNA, 120 bp, Artificial Sequence
  ENSG00000153902_20 (sequence is synthesized)
tcgctttcctggaggagcgccaacctcgaagacaactcagcactgggcgggttcccctctgctgcttgtgcgcatgcgtgcggccgcccagcaagctgtgccttttgcgcctcttgcgcg

SEQ ID NO: 440335 - DNA, 120 bp, Artificial Sequence
  ENSG00000153902_21 (sequence is synthesized)
tgcgccggggcacagggagggacagcgggaggtgtcgcggggagcctggtgcccttctagatgggcgacggaggcaaggacaagacgagtccgagctcaataaatgcgctgtgcaccctc

SEQ ID NO: 440336 - DNA, 120 bp, Artificial Sequence
  ENSG00000153902_22 (sequence is synthesized)
ccgacaaccagctcaagggagtgtgcgtttatgcacatgtgtgggagtgtatgctcacacagatgtcaggtgggcattgatgcacgtgtgtgggggtgtatgcacacgtctgtacaaaag

SEQ ID NO: 440337 - DNA, 120 bp, Artificial Sequence
  ENSG00000153902_23 (sequence is synthesized)
catttgtgtccatgcacatactcacacctgcgtgcccatgcccacctaggctgagggtggaggccagggttaaaatgtcagatgggggctgcaattctggaaaaatttctttcttgcccc

SEQ ID NO: 440338 - DNA, 120 bp, Artificial Sequence
  ENSG00000153902_24 (sequence is synthesized)
ggatttcgggatggaaagggggagaggctgcccttctaggaaccccccagtacaagcctcctttcccagattggtgtaactaggcccagatatggacgaagagcaggctcggggtccgcc

SEQ ID NO: 440339 - DNA, 120 bp, Artificial Sequence
  ENSG00000153902_25 (sequence is synthesized)
gaggctcgtctcactccctgccctgccatttcccggagtgggaagaccctgagcaagcagcactgccttcctgagccccagttttctcatctgtaaagtgggggtaataaacagtgatat

SEQ ID NO: 440340 - DNA, 120 bp, Artificial Sequence
  ENSG00000153902_26 (sequence is synthesized)
aggagtgccatgggaattcaatgatacatcttcacgtgttcggcatttggcgccgggcctgggacaggaggtccttataaacgttcacccttgttaacataaaagcaaccaatttaaaaa

SEQ ID NO: 440341 - DNA, 120 bp, Artificial Sequence
  ENSG00000153902_27 (sequence is synthesized)
gccgggtgtccagcgaacccctttcccaaaccttcggggagaagggaggtgggaggaggcaaagaaactacaggcagggagctggaagggggggtggggggggcaggagacaagaaatca

SEQ ID NO: 440342 - DNA, 120 bp, Artificial Sequence
  ENSG00000153902_28 (sequence is synthesized)
caatcttgcacactaagcctctaaactctgacctaccctcacatgccgacctttgaaccaggaccccaccccacactgatgccaagactctgaccccctcaaggctggctgactccgaac

SEQ ID NO: 440343 - DNA, 120 bp, Artificial Sequence
  ENSG00000153902_29 (sequence is synthesized)
ccaccctgacactgagcccccaaggctgatgctagggttaagcactgcccactgtttctggagtgaggtgcaggcaggggagggttctgagtctggaagggccctgatctgactcaggtg

SEQ ID NO: 440344 - DNA, 120 bp, Artificial Sequence
  ENSG00000153902_30 (sequence is synthesized)
ttcacaaggtctctgggtggggaacagactgggggagcagggagaggagcctagaggccagggaagaggctgccaggatggtccagtcaggaggggatggagttcagccagaggtggtgg

SEQ ID NO: 440345 - DNA, 120 bp, Artificial Sequence
  ENSG00000153902_31 (sequence is synthesized)
gagaaatgtacaactgtagaaggtgaaactgacagagtccatggctgagtgcttctgtgtggggcgtgagggcaagggaagggctcagaacaactgcatgtgtgtggccgaacaggtggg

SEQ ID NO: 440346 - DNA, 120 bp, Artificial Sequence
  ENSG00000153902_32 (sequence is synthesized)
tggtgacttttatgaagataagaaagctatgggagttttgggaccgacaggcttctgcttccaagctgttccacggcccccagagacccccgggaccccaggccctcactggccacaccc

SEQ ID NO: 440347 - DNA, 80 bp, Artificial Sequence
  ENSG00000153904_0 (sequence is synthesized)
acattcagcggctgccaagaggagccgacgggcgctcgcaggctcagcgcgcgctgcccgcggcaggacccggccgcctc

SEQ ID NO: 440348 - DNA, 120 bp, Artificial Sequence
  ENSG00000153904_1 (sequence is synthesized)
gggctcggccaccccgccgccttcggccgggccacccacgccgtggtgcgggcgctacccgagtcgctcggccagcacgcgctgagaagcgccaagggcgaggaggtggacgtcgcccgc

SEQ ID NO: 440349 - DNA, 120 bp, Artificial Sequence
  ENSG00000153904_2 (sequence is synthesized)
gcggaacggcagcaccagctctacgtgggcgtgctgggcagcaagctggggctgcaggtggtggagctgccggccgacgagagccttccggactgcgtcttcgtggaggacgtggccgtg

SEQ ID NO: 440350 - DNA, 120 bp, Artificial Sequence
  ENSG00000153904_3 (sequence is synthesized)
gtgtgcgaggagacggccctcatcacccgacccggggcgccgagccggaggaaggaggttgacatgatgaaagaagcattagaaaaacttcagctcaatatagtagagatgaaagatgaa

SEQ ID NO: 440351 - DNA, 120 bp, Artificial Sequence
  ENSG00000153904_4 (sequence is synthesized)
aatgcaactttagatggcggagatgttttattcacaggcagagaattttttgtgggcctttccaaaaggacaaatcaacgaggtgctgaaatcttggctgatacttttaaggactatgca

SEQ ID NO: 440352 - DNA, 120 bp, Artificial Sequence
  ENSG00000153904_5 (sequence is synthesized)
gtctccacagtgccagtggcagatgggttgcatttgaagagtttctgcagcatggctgggcctaacctgatcgcaattgggtctagtgaatctgcacagaaggcccttaagatcatgcaa

SEQ ID NO: 440353 - DNA, 120 bp, Artificial Sequence
  ENSG00000153904_6 (sequence is synthesized)
cagatgagtgaccaccgctacgacaaactcactgtgcctgatgacatagcagcaaactgtatatatctaaatatccccaacaaagggcacgtcttgctgcaccgaaccccggaagagtat

SEQ ID NO: 440354 - DNA, 120 bp, Artificial Sequence
  ENSG00000153904_7 (sequence is synthesized)
ccagaaagtgcaaaggtttatgagaaactgaaggaccatatgctgatccccgtgagcatgtctgaactggaaaaggtggatgggctgctcacctgctgctcagttttaattaacaagaaa

SEQ ID NO: 440355 - DNA, 120 bp, Artificial Sequence
  ENSG00000153904_8 (sequence is synthesized)
gtagactcctgagctgcagagtcccccccggtagccggcaagaccgcacaggcaaggccgatgactctgtgcccactcctgttgttttccttgacaatctactgtgccactgtgctacta

SEQ ID NO: 440356 - DNA, 120 bp, Artificial Sequence
  ENSG00000153904_9 (sequence is synthesized)
actcttgtttacaaaatttgattctaagttgaattgcttcattcaacacccccaccctccctcccctcgaggtggtacctaagctgtggatttgctaaatgaattaagcaacctagaaga

SEQ ID NO: 440357 - DNA, 120 bp, Artificial Sequence
  ENSG00000153904_10 (sequence is synthesized)
tacagagctaatgaattatcaaaatgtgattaatcccagtaaggaaacactcatttagtgtctgtatttttggtgtgaaaattatttagttgccagtatattctgaagaatgtcttcttg

SEQ ID NO: 440358 - DNA, 120 bp, Artificial Sequence
  ENSG00000153904_11 (sequence is synthesized)
atcagtcagataagcttgctttttttttttttttttttcatgaatcatgtttggttcctgtgaaagtccctggtccagggatcctcctcctttctcttttacttctgaattctgaaattc

SEQ ID NO: 440359 - DNA, 120 bp, Artificial Sequence
  ENSG00000153904_12 (sequence is synthesized)
agttagttacttttgcctttcgctcttctatcacagccaccttgaccttgggtaaaacccaaggtctttccttctggctaccttcctgcaggtccaccctgtctgccattggtctcctct

SEQ ID NO: 440360 - DNA, 120 bp, Artificial Sequence
  ENSG00000153904_13 (sequence is synthesized)
gcctctgactacatctgccaccaacaaccctcccctcacccctgccaggggcagacaggcttctcagcagaactgtgactgaaatcagagctgctgtctggggcagtgttaactacacag

SEQ ID NO: 440361 - DNA, 120 bp, Artificial Sequence
  ENSG00000153904_14 (sequence is synthesized)
aggcacatcctgacagggtttgccccagagatctaaattccagaaggagggcaccacacctaggaaggtaaatccagtatcagaaggttgctaaaagattaaagatcaagaagcttggaa

SEQ ID NO: 440362 - DNA, 120 bp, Artificial Sequence
  ENSG00000153904_15 (sequence is synthesized)
acatcccatgggtacaatgtcttagaaagtctttaagtcacataccatgaatttttgcttcattactgaccatatatgaccttggaggaactcttttttttttttccttctactcatttc

SEQ ID NO: 440363 - DNA, 120 bp, Artificial Sequence
  ENSG00000153904_16 (sequence is synthesized)
aaaataattactggtagtctaatatgagccagagtaaacagctcctcatggtcaatgaacatgttcaggaagcgatcaccttgatgcttgaacccaaccccagacagtggacaattctac

SEQ ID NO: 440364 - DNA, 120 bp, Artificial Sequence
  ENSG00000153904_17 (sequence is synthesized)
tttgaaatatccgtgaatatttactgtgggatccaatttaaacttctttcttctctagcctttaaattacacaactttgaactgacacggatctcttacaaagaacaatgcggcactgaa

SEQ ID NO: 440365 - DNA, 120 bp, Artificial Sequence
  ENSG00000153904_18 (sequence is synthesized)
ggaagagatgattcctttactcaaacctgcaggaatcagcctattaacaggcaggggaaacggtactttccaatgaatggtaactgatccaggcacattatcacacttcctagtcatctc

SEQ ID NO: 440366 - DNA, 120 bp, Artificial Sequence
  ENSG00000153904_19 (sequence is synthesized)
cacctttcctgtattgcctgtggcttgttgtttaagattaagaatcaaagagattaagaagtatcacttcaaatcttgctctgctcacttctatgtttgcagtcaaattattccttatgt

SEQ ID NO: 440367 - DNA, 120 bp, Artificial Sequence
  ENSG00000153904_20 (sequence is synthesized)
tggtgacctaaagagaattactttcattcatttcatttcccccgtagcagatggaaggagaaacctctgagaaaatgaaaacatccttaaccactatctttcccttttatttgattattt

SEQ ID NO: 440368 - DNA, 120 bp, Artificial Sequence
  ENSG00000153904_21 (sequence is synthesized)
tatgtcagaaatttgcaaaagtttttttctcctccttctcttccttgttgcttaactttttaattcatgccatatgcagatatccaattatgtgcatcctgtgaataaaccacgtcttgg

SEQ ID NO: 440369 - DNA, 120 bp, Artificial Sequence
  ENSG00000153904_22 (sequence is synthesized)
tcactgtcatattttgaaccatctcatcagagatgaataatatctttttaccagagagagaacgaatgttagccacatgcccaagttaacaaagaaaaaatgttctcaaggttgtccttt

SEQ ID NO: 440370 - DNA, 120 bp, Artificial Sequence
  ENSG00000153904_23 (sequence is synthesized)
tgggttaaatctggcccttccttggcaaaagcaaaaattctccctgtgagagctcaacatctcaaatacaaccacaggaaaaatggcccaatctgccagtttaggcttaccagcatataa

SEQ ID NO: 440371 - DNA, 120 bp, Artificial Sequence
  ENSG00000153904_24 (sequence is synthesized)
tttttaatatctttacttctatcatcccaaatcaaagaactcttctctattatgtttaatcaattgcaagcaaatagatttttctttgtaacaatttgttctgcagaaggctgtttttca

SEQ ID NO: 440372 - DNA, 120 bp, Artificial Sequence
  ENSG00000153904_25 (sequence is synthesized)
cttttcctttcttttgcttctttctgtctttccttctcttttgtctggagaaatcacttagactctgtgtgcctcttctacattgcattctgctctgctatgttacctgctaggctggct

SEQ ID NO: 440373 - DNA, 120 bp, Artificial Sequence
  ENSG00000153904_26 (sequence is synthesized)
tctttggactccctatatgattgatgatgtgaaaacctaaattacttgcagcatagtattacttctttgatgttctcattagcataatgttatttttgaaaaggaaagatactatcacat

SEQ ID NO: 440374 - DNA, 120 bp, Artificial Sequence
  ENSG00000153904_27 (sequence is synthesized)
aagttttcctcatctgttgtgatatacaccaatggataaactaacggaaactgctttttgacattaaaagacaggagaaattatatttaactaagtaaaagttaagtcagaattacttgg

SEQ ID NO: 440375 - DNA, 120 bp, Artificial Sequence
  ENSG00000153904_28 (sequence is synthesized)
gtgatgtgattcaatttagttaaaggatgatatagagaaaatacattatttagcattatttcttcagctataatgaattgctatagaaatcaggcagatctttctaatgtgtattgattg

SEQ ID NO: 440376 - DNA, 120 bp, Artificial Sequence
  ENSG00000153904_29 (sequence is synthesized)
gtcttttcagctactctgaacagattactaaggccatctcctcatctctaagggagaaaaatagtctgtagatgaataatgtaaggtaaagagttgcatgtcagtctttgtaattattta

SEQ ID NO: 440377 - DNA, 120 bp, Artificial Sequence
  ENSG00000153904_30 (sequence is synthesized)
cactttaactttctccagaactcagacatgatttcaacatggtgttagatttgtgcattttattttcctgaccacctcattccagccaatgtatggttatccactctgtgtgccaaaacc

SEQ ID NO: 440378 - DNA, 120 bp, Artificial Sequence
  ENSG00000153904_31 (sequence is synthesized)
aatcatgcctttcacggccctttagttcagagaagttctgcactgatttttagtctcttgatgtctcaatcttacatgtataccaatcacaatggaataaagtgttgagttgtactgtga

SEQ ID NO: 440379 - DNA, 120 bp, Artificial Sequence
  ENSG00000153904_32 (sequence is synthesized)
gtttgtttctggacttcaactggggaatcttgaggatgagtttgccccagaagagaaatttagagaaccttaccgtcagctgcccatttaaagcagggggtgtgttgtgggatgggggtg

SEQ ID NO: 440380 - DNA, 120 bp, Artificial Sequence
  ENSG00000153904_33 (sequence is synthesized)
ggaagctggagcaacagggccaggaggtgtgggagcgggagacactagagtaacctatgtgcacagcctctccatataccatgtgctgttgcgcctgctagtaatcgacgacattaggca

SEQ ID NO: 440381 - DNA, 120 bp, Artificial Sequence
  ENSG00000153904_34 (sequence is synthesized)
agagaaacagcggctcctcaagtcctgcccaaagaccgtccagaaaccccagcctcccgtcgccttctcgccgcctccgctgggagccgcagatcagtccaagttgacggacaggaggcg

SEQ ID NO: 440382 - DNA, 120 bp, Artificial Sequence
  ENSG00000153904_35 (sequence is synthesized)
aaatgtgcaaatgtttatggtttcatctgtatggaaaaggagctctggtaactttggccaagacttttcagtaggaaatgcttcaaaatacaaagcaagagctattttcaagaaagacct

SEQ ID NO: 440383 - DNA, 120 bp, Artificial Sequence
  ENSG00000153904_36 (sequence is synthesized)
gttattatttgctccatggctcaatccgggtcagactgttcttcagtaacacaggtggatgttaaaacagggaatctgttgaaaagattgcggaggaactgcttcccaaaagcagttctg

SEQ ID NO: 440384 - DNA, 120 bp, Artificial Sequence
  ENSG00000153914_0 (sequence is synthesized)
gttctccgctttcccggctccgtcgctgacgcgtcgtagacgttggggagcgggaaggcaacggcagcgggatcgggatgaacagcggcggcggcttcggtttgggcttaggcttcggcc

SEQ ID NO: 440385 - DNA, 120 bp, Artificial Sequence
  ENSG00000153914_1 (sequence is synthesized)
tcacccccacgtcggtgattcaggtgacgaatctgtcgtcggcggtgaccagcgagcagatgcggacgcttttttccttcctaggagaaatcgaggagctgcggctctaccccccggaca

SEQ ID NO: 440386 - DNA, 120 bp, Artificial Sequence
  ENSG00000153914_2 (sequence is synthesized)
acgcacctcttgctttttcctccaaagtatgttatgttaagtttcgtgatccatcaagtgttggcgtggcccagcatctaactaacacggtttttattgacagagctctgatagttgttc

SEQ ID NO: 440387 - DNA, 120 bp, Artificial Sequence
  ENSG00000153914_3 (sequence is synthesized)
cttgtgcagaaggtaaaatcccagaggaatccaaagccctctctttattggctcctgctccaaccatgacaagtctgatgcctggtgcaggattgcttccaataccgaccccaaatcctt

SEQ ID NO: 440388 - DNA, 120 bp, Artificial Sequence
  ENSG00000153914_4 (sequence is synthesized)
tgactactcttggtgtttcacttagcagtttgggagctataccagcagcagcactagaccccaacattgcaacacttggagagataccacagccaccacttatgggaaacgtggatcctt

SEQ ID NO: 440389 - DNA, 120 bp, Artificial Sequence
  ENSG00000153914_5 (sequence is synthesized)
ccaaaatagatgaaattaggagaacggtttatgttggaaatctgaattcccagacaacgacagctgatcaactacttgaattttttaaacaagttggagaagtgaagtttgtgcggatgg

SEQ ID NO: 440390 - DNA, 120 bp, Artificial Sequence
  ENSG00000153914_6 (sequence is synthesized)
caggtgatgagactcagccaactcggtttgcttttgtggaatttgcagaccaaaattctgtaccaagggcccttgcttttaatggagttatgtttggagacaggccactgaaaataaatc

SEQ ID NO: 440391 - DNA, 120 bp, Artificial Sequence
  ENSG00000153914_7 (sequence is synthesized)
actccaacaatgcaatagtaaaaccccctgagatgacacctcaggctgcagctaaggagttagaagaagtaatgaagcgagtacgagaagctcagtcatttatctcagcagctattgaac

SEQ ID NO: 440392 - DNA, 120 bp, Artificial Sequence
  ENSG00000153914_8 (sequence is synthesized)
cagagtctggaaagagcaatgaaagaaaaggcggtcgatctcgttcccatactcgctcaaaatccaggtctagctcaaaatcccattctagaaggaaaagatcacaatcaaaacacagga

SEQ ID NO: 440393 - DNA, 120 bp, Artificial Sequence
  ENSG00000153914_9 (sequence is synthesized)
gtagatcccataatagatcacgttcaagacagaaagacagacgtagatctaagagcccacataaaaaacgctctaaatcaagggagagacggaagtcaaggagtcgttcgcattcacggg

SEQ ID NO: 440394 - DNA, 120 bp, Artificial Sequence
  ENSG00000153914_10 (sequence is synthesized)
acaagagaaaagacactcgagaaaagatcaaggaaaaggaaagagtgaaagagaaagacagggaaaaggagagagagagggaaaaggaacgtgaaaaagaaaaggaacggggtaaaaaca

SEQ ID NO: 440395 - DNA, 120 bp, Artificial Sequence
  ENSG00000153914_11 (sequence is synthesized)
aagaccgggacaaggaacgggaaaaggaccgggaaaaagacaaggaaaaggacagagagagagaacgggaaaaagagcatgagaaggatcgagacaaagagaaggaaaaggaacaggaca

SEQ ID NO: 440396 - DNA, 120 bp, Artificial Sequence
  ENSG00000153914_12 (sequence is synthesized)
aagaaaaggaacgagaaaaagacagatccaaagagatagatgaaaaaagaaagaaggataaaaaatccagaacaccacccaggagttacaatgcatcgcgaagatctcgtagttccagca

SEQ ID NO: 440397 - DNA, 120 bp, Artificial Sequence
  ENSG00000153914_13 (sequence is synthesized)
gggaaaggcgtaggaggaggagcaggagttcttccagatcgccaagaacatcaaaaaccataaaaaggaaatcttctagatctccgtcccccaggagcagaaataagaaggataaaaaga

SEQ ID NO: 440398 - DNA, 120 bp, Artificial Sequence
  ENSG00000153914_14 (sequence is synthesized)
gagaaaaagaaagggaccacatcagtgaaagaagagagagagaacgttcaacgtctatgagaaagagttctaatgatagagatgggaaggagaagttggagaagaacagtacttcactta

SEQ ID NO: 440399 - DNA, 120 bp, Artificial Sequence
  ENSG00000153914_15 (sequence is synthesized)
aagagaaagagcacaataaagaaccagattcaagtgtgagcaaagaagtagatgacaaggatgcaccaaggactgaggaaaacaaaatacagcacaatgggaattgtcagctgaatgaag

SEQ ID NO: 440400 - DNA, 120 bp, Artificial Sequence
  ENSG00000153914_16 (sequence is synthesized)
aaaacctctctaccaaaacagaagcagtataggaccgacaagtgtacctctgcactcaatgctggaatcaaatccaaagcttttaattctctcaacaagatgtaaacaggaaagaaatct

SEQ ID NO: 440401 - DNA, 120 bp, Artificial Sequence
  ENSG00000153914_17 (sequence is synthesized)
agttgagcatgaagataggatctaacagcttttccagttgttagatgactttgtggccatcttgttattgagtaagaaaataaagcatggacatcatgaaaataacagatgttacccaaa

SEQ ID NO: 440402 - DNA, 120 bp, Artificial Sequence
  ENSG00000153914_18 (sequence is synthesized)
ctcatcttctaaaatctgtgcatttccatggtggctgacacacttgtcatgtggtctgttagtgtttgccaagaaccattgcaaataaattgaacatcaaagatccaagtttgtactatc

SEQ ID NO: 440403 - DNA, 120 bp, Artificial Sequence
  ENSG00000153914_19 (sequence is synthesized)
cctaaagactggagataagcattggaggctcttttaaaaaatgctagttactgaattttgtattgttttacttttttttttatttcaatatatacagtttgatgatgtgcttgaaattgg

SEQ ID NO: 440404 - DNA, 120 bp, Artificial Sequence
  ENSG00000153914_20 (sequence is synthesized)
tgcaaatatatacacacccttgtaagtgcaaagtatgtaagaagttttaacatttacttcacaggacttgtgattgtgttaaattctcactattgtgttttcttttgctcactgtttagg

SEQ ID NO: 440405 - DNA, 120 bp, Artificial Sequence
  ENSG00000153914_21 (sequence is synthesized)
acaatttttctttaaaatagttttgcagattaaaattgcttaaataagtggattaaaaaactgacaatgcatgctactgttctctttcaaaaggaagagcaaccgtgttgaatactaata

SEQ ID NO: 440406 - DNA, 120 bp, Artificial Sequence
  ENSG00000153914_22 (sequence is synthesized)
atgatgaattagtattcagtgtttagaatcattgggactacccacaaagtgagcatttctttttaaattttcttgacatttccaagcttattatgaataatattgcagtgtgtcttgtca

SEQ ID NO: 440407 - DNA, 120 bp, Artificial Sequence
  ENSG00000153914_23 (sequence is synthesized)
gctgtaggtggcaaaggtgcccttataaaaaaggaaactggcttttcaaaatgggctatgggagcacaagctgaagctttagtgccttctacaatgtggtatactgttttctagaatttt

SEQ ID NO: 440408 - DNA, 120 bp, Artificial Sequence
  ENSG00000153914_24 (sequence is synthesized)
atatgtgctagtcattctcaattcatatggaatctagatggatatttcatgcatacccatagagaagtgtgtaagtgatatgtcagaagagcttcttactgatttcacctaaaatgagaa

SEQ ID NO: 440409 - DNA, 120 bp, Artificial Sequence
  ENSG00000153914_25 (sequence is synthesized)
ggaagtcctgttttcaagaatgacattagagtcatgcagctttgggaccatcagttttatactgtgataattgaaaatgaaacatgttcttattttccttaaattgaagaaaacccttta

SEQ ID NO: 440410 - DNA, 120 bp, Artificial Sequence
  ENSG00000153914_26 (sequence is synthesized)
gttgtctacattggatggccttattacctctcaatcatcttttcataaatgatgtgcagaaattgtacttaaggacttaggagtatatgggaggttattggttttatgtttaaggatacg

SEQ ID NO: 440411 - DNA, 120 bp, Artificial Sequence
  ENSG00000153914_27 (sequence is synthesized)
ccagtactataacttgtggtttctgaactcattattgttgtatttccaaaaaagtaataccttttaattagtgtattaaaagttaagtataattattttaatgcaatctaatacaatcag

SEQ ID NO: 440412 - DNA, 120 bp, Artificial Sequence
  ENSG00000153914_28 (sequence is synthesized)
attactcagttgccttacctcatgggaagagttacttttttagatctaaaaagctgaatagcatgttagttacttggtttcaacttgagttttcttttaatgttaataagattgaaactt

SEQ ID NO: 440413 - DNA, 120 bp, Artificial Sequence
  ENSG00000153914_29 (sequence is synthesized)
tagtatttagtggggaatggaaagagttgcccttgttgcaagtaatgaagcctgatttgattatgaagctgcttaatcactcttcatgtgttcagaattactgttttttttgtttgtttt

SEQ ID NO: 440414 - DNA, 120 bp, Artificial Sequence
  ENSG00000153914_30 (sequence is synthesized)
tcctttttgtcactgtgtacattaaaattttggaagatgctttactatgtaaagtatagatggtcattttaatcattcagccacatacggttggctggtaaacagcttattctgatacaa

SEQ ID NO: 440415 - DNA, 120 bp, Artificial Sequence
  ENSG00000153914_31 (sequence is synthesized)
gaatgcttgggtgcatatggaaagattgtgaaagagtgtgtcttgcatcaacagctgtcttatttatgatatataagtagaaatagagcaaatgttggaatctgttatttttagtaccat

SEQ ID NO: 440416 - DNA, 120 bp, Artificial Sequence
  ENSG00000153914_32 (sequence is synthesized)
gtctttaataaagctaagtattttagaggaaaatgtttgtttatgcatttcaaaaaagcattttagttttatcctgctcattttagttgtcatagagattgttgtgacgtggagagtgca

SEQ ID NO: 440417 - DNA, 120 bp, Artificial Sequence
  ENSG00000153914_33 (sequence is synthesized)
tgtttgtgtggtgtctataaaacaagtcatttaaagtatgagtgttttcttgtactctggacctattacatgtttctttatgttggtaattaacatttaatttggttcttgctgctaatt

SEQ ID NO: 440418 - DNA, 120 bp, Artificial Sequence
  ENSG00000153914_34 (sequence is synthesized)
attttctctgctgatatttattaagctttaaaataatcgtactataatcttgaaacactgatttgtaaaaactaagaatgagtaggaatacaagagatctggaggaacaaatcagattgt

SEQ ID NO: 440419 - DNA, 120 bp, Artificial Sequence
  ENSG00000153914_35 (sequence is synthesized)
tattagggtttgactttttttttacatgggcttatggaagcaaggcattctagggtctagagggatgtgtgtgtgtgcttgtgtgtccatgtgtgcgcatgcgcacgtgtgtatctgttt

SEQ ID NO: 440420 - DNA, 120 bp, Artificial Sequence
  ENSG00000153914_36 (sequence is synthesized)
gagacatactttctctgttcacttaaaagagctcatgttttcatttgtttattcttttctttcagggtattttgtttttttctttaagacttctttttttaaatcccaggtagatgttgt

SEQ ID NO: 440421 - DNA, 120 bp, Artificial Sequence
  ENSG00000153914_37 (sequence is synthesized)
cagataaacttgaggtaaggccaagaagacagacattttatgcttcatactttctgtaattatcttttgtagcttgattacatagagtaccctctcttccttaagttgtagttgctattt

SEQ ID NO: 440422 - DNA, 120 bp, Artificial Sequence
  ENSG00000153914_38 (sequence is synthesized)
atcattgtagacaaattctgttgcctttcagcaacgtatgctgaactagtatcataagatggtgcatcagttcataagctagtgcataagttttgtgtcaaaacttttaaatcctgaagt

SEQ ID NO: 440423 - DNA, 120 bp, Artificial Sequence
  ENSG00000153914_39 (sequence is synthesized)
tctgcagttatcatcttagttattttctatctaattagcttataattgcaaacactagtcagcttgtgatctctgtgtttcaagttcttttcttcacgaggttcagtacctgctatgttg

SEQ ID NO: 440424 - DNA, 120 bp, Artificial Sequence
  ENSG00000153914_40 (sequence is synthesized)
atctttggcagtgccagaggcttaaattttgacctgctcaattaaaaataaacactggcgtttataatgaaaaggtttttttgtcgggggggggggggtcaagagaatttattttgtgat

SEQ ID NO: 440425 - DNA, 120 bp, Artificial Sequence
  ENSG00000153914_41 (sequence is synthesized)
agtaataattttcaagaccttcagtcattcctatgtctatgttgctatctttattttaaaacttagaaccctgatctaactcccttctcaagtgaagatactgtgtagattcaagaatta

SEQ ID NO: 440426 - DNA, 120 bp, Artificial Sequence
  ENSG00000153914_42 (sequence is synthesized)
taatgtagagtaataggcctttaagtttttttttaatctgttagaaataaagagcatgatttaattattgttgaattaacaattaaaatgaatccctttggagggatggcattgaataac

SEQ ID NO: 440427 - DNA, 120 bp, Artificial Sequence
  ENSG00000153914_43 (sequence is synthesized)
ttataatttcagtgaatcatttacgttttcattggaagacagtatctgatttcaactggtgcgttacgaagtagagccattcccacaaagtaaatgtgcagtgcccatgtttcttgtgtt

SEQ ID NO: 440428 - DNA, 120 bp, Artificial Sequence
  ENSG00000153914_44 (sequence is synthesized)
tgcagtgcccatgtttcttgtgtttaaatattttttattttcactacatatatattattttctcatgtttatttactaatgtaattttcacttaaaattagatgtttattttcaaatttt

SEQ ID NO: 440429 - DNA, 120 bp, Artificial Sequence
  ENSG00000153914_45 (sequence is synthesized)
taaattatatttctggaagcaggagtttagtataaatgtaataaaattttaaaataaaattgacttccctacttaatcttgggtttgtgggtgagtttgtttttagtacactcttattgg

SEQ ID NO: 440430 - DNA, 77 bp, Artificial Sequence
  ENSG00000153914_46 (sequence is synthesized)
gggtttgtgggtgagtttgtttttagtacactcttattggtggttttgcctgaagagtaatacattattattattac

SEQ ID NO: 440431 - DNA, 120 bp, Artificial Sequence
  ENSG00000153914_47 (sequence is synthesized)
tctcggcatggatgatcctctcacctcagcctcttgaatagctgggaccacagacatgtgccaccaagcccagttaattttagaattttttttgtagagacaggatcttgccatgttgcc

SEQ ID NO: 440432 - DNA, 120 bp, Artificial Sequence
  ENSG00000153914_48 (sequence is synthesized)
tctcaaactcctgggctcaaacaatctgtctgcctcagccttctaaagtgctgagattacaggtgtgaggtactgcacctggcaatacgttattttaaaagtaaacgctaagccatttat

SEQ ID NO: 440433 - DNA, 120 bp, Artificial Sequence
  ENSG00000153914_49 (sequence is synthesized)
ccatttatgactttggttatattcagtcagttggatttagtaactaataactagctttcttccattctaaggtacttttatagtttctagcaattagtttgttacaattagcttatatca

SEQ ID NO: 440434 - DNA, 120 bp, Artificial Sequence
  ENSG00000153914_50 (sequence is synthesized)
gatataacagttcttaatataatgtttataaaaggttttaagtctgttgcctgatttttaaatttatatctagttaacattttaattttaaaattgccaacttttgggagatttcacata

SEQ ID NO: 440435 - DNA, 120 bp, Artificial Sequence
  ENSG00000153914_51 (sequence is synthesized)
ttttacctctatattttatttttccaggattggtatggaggagtagtaccttctattcttggtttatttttatttgctagacataatttcttaactacatatgtaagtataaattcataa

SEQ ID NO: 440436 - DNA, 120 bp, Artificial Sequence
  ENSG00000153914_52 (sequence is synthesized)
aaatcacactgaaagaataggttgatttcaaccattttgagggtactggtaggtaacacactgttggggaataaactaaagaatttctgatttctacaatagatttaagtatgaaatttg

SEQ ID NO: 440437 - DNA, 120 bp, Artificial Sequence
  ENSG00000153914_53 (sequence is synthesized)
agtatactgtgtagctgtgtagatcaacttaatgcttaaaaaattacctccttaatgattagattaatagaacagtgttagattatcaagggaagagtttggaatgtaaacataaacatg

SEQ ID NO: 440438 - DNA, 120 bp, Artificial Sequence
  ENSG00000153914_54 (sequence is synthesized)
ctgcataggtggtggttatttgtgagtaggactacttttaaatggtactagtaaagatttatcaaacaatgctgctattatgttgctatatttttaataaaatgaaaatcttaaaatctt

SEQ ID NO: 440439 - DNA, 120 bp, Artificial Sequence
  ENSG00000153914_55 (sequence is synthesized)
tgcagccaacacgaacggttgtcatgtgtaacacaactttcgatcaccgcgaaaacaccgtcctgggaaagcgtccatgcttgatatcgtttggttcatgaacattaagtttccagtaca

SEQ ID NO: 440440 - DNA, 120 bp, Artificial Sequence
  ENSG00000153914_56 (sequence is synthesized)
ctggggtaagggtggggtaggtcaggttgtagggctcatttatgttactttgcaaaccagcttactgttgatgcttattaacaatgcattattttagatatccagtgttagaaaaggata

SEQ ID NO: 440441 - DNA, 120 bp, Artificial Sequence
  ENSG00000153914_57 (sequence is synthesized)
gatagattcatttattattattattttttaactgcaagggtaattgtaaaatcatagtgtaaagtttgtgtggtgtttctgctttttgtaatgtttggaacttgcctctgcaggtaaaat

SEQ ID NO: 440442 - DNA, 120 bp, Artificial Sequence
  ENSG00000153914_58 (sequence is synthesized)
aatgattttgaaacatttaaagtatttttgatgtaatgaaggctttttttttctttttaatagtaattggcaatttgtggaaaggaagactttgtgttaagtataaatgaaatacatgag

SEQ ID NO: 440443 - DNA, 120 bp, Artificial Sequence
  ENSG00000153914_59 (sequence is synthesized)
atacttaccattttagtctttaaattcctttatttagagacatttattttctcattttctgttttctagggtctaattcagtgttaacattatttatataccctgcataacggttgtagg

SEQ ID NO: 440444 - DNA, 120 bp, Artificial Sequence
  ENSG00000153914_60 (sequence is synthesized)
tctttttccataaactttaatagtcaggttggttttacattatgacactagactaattgagcaacttaacaggtgggttgaactacagtacttccagtaacaactgtggtaaattcaaaa

SEQ ID NO: 440445 - DNA, 120 bp, Artificial Sequence
  ENSG00000153914_61 (sequence is synthesized)
tctacagaaggaaattataagtgcccagaaatgttttaaaccagaaattttgacttttgaggtttgcttacatccttgtttgtaaaacgttgataatggccttcgagatactccagacca

SEQ ID NO: 440446 - DNA, 120 bp, Artificial Sequence
  ENSG00000153914_62 (sequence is synthesized)
ttctgttaaggataagtttttagtgggtacttgtcttcccagtgtggaaggggtaaagcaagacacataatatccattcatgtgcatcagagaagtcactcttacctagtagaggaagaa

SEQ ID NO: 440447 - DNA, 120 bp, Artificial Sequence
  ENSG00000153914_63 (sequence is synthesized)
ttttttcagatgccttgcacattcaaagctatgtctaactcagccatggttcagcgttggttaaaatggtgtacataatatgatgatatacaggtagcttacccttcttctagagtgtac

SEQ ID NO: 440448 - DNA, 120 bp, Artificial Sequence
  ENSG00000153914_64 (sequence is synthesized)
aggatatcagtaagatcttttgatttgaaaatagaaatgattcattttcatattggtatcaacattttaatttattttaattctaagctatggaaaagcacttcatctagtctgtttgaa

SEQ ID NO: 440449 - DNA, 120 bp, Artificial Sequence
  ENSG00000153914_65 (sequence is synthesized)
ttaagttagctagggttcaatttttcttttctccctgcttttggttgtattcgcaaggaatgataggaagtggggatgagagattaatcatggttttgaggttgcttttggttattctgt

SEQ ID NO: 440450 - DNA, 120 bp, Artificial Sequence
  ENSG00000153914_66 (sequence is synthesized)
atatcattcttacgtgcttctgagatgtcctcacgtttataaatatgtgtatcatataaatgtttgtttcatgttttataaaatgtggtgtgtatttgtgatatgctaatatttttaatt

SEQ ID NO: 440451 - DNA, 120 bp, Artificial Sequence
  ENSG00000153914_67 (sequence is synthesized)
ctgttacacttgcctgagttaggcattgtttgccatgccactaaacctgccgtcaagtgaaaccttcattggggaaatgagatcggagtctgaaccgcagaagatggacgccctgtctct

SEQ ID NO: 440452 - DNA, 89 bp, Artificial Sequence
  ENSG00000153914_68 (sequence is synthesized)
gatcggagtctgaaccgcagaagatggacgccctgtctctgttttttattgttttactttaatttcatttctttttctttattttgtcc

SEQ ID NO: 440453 - DNA, 120 bp, Artificial Sequence
  ENSG00000153914_69 (sequence is synthesized)
agttctttgtaaatggtatttcattaagggttcataacgtgttgcaaattatattgggagatgattagtagagctcaaccttaagataaagcaaattttcatgtggtaaattaggataca

SEQ ID NO: 440454 - DNA, 120 bp, Artificial Sequence
  ENSG00000153914_70 (sequence is synthesized)
gtgttgtgaagctcattgtgagtcttaatttgtgtgtatggactcataaggtacattttattcttgaaacattaaaacactgataagtatctcaggaacactttctgatctcagcgcaac

SEQ ID NO: 440455 - DNA, 120 bp, Artificial Sequence
  ENSG00000153914_71 (sequence is synthesized)
atttttctagtttttttcccccctagtctacatctctcataaaaactgatagcttctaatttttgtccttccccctggaattttaggcatacaaaatcatcaaggaaaataagtaaatat

SEQ ID NO: 440456 - DNA, 120 bp, Artificial Sequence
  ENSG00000153914_72 (sequence is synthesized)
aacaatctgggagtaaagaagagcctttcatttttatgatggttatttatcatataacttatttccttgacttatgaagactttttgttgcctatgtggggaatggatatttgagaaact

SEQ ID NO: 440457 - DNA, 120 bp, Artificial Sequence
  ENSG00000153914_73 (sequence is synthesized)
taagtatttgcatgtaggtttttgttagcttgaattttttgttgaatatttttcagaggttactagcttctaaatggattctgagattaggactataatactgtgagagatgttttcctc

SEQ ID NO: 440458 - DNA, 120 bp, Artificial Sequence
  ENSG00000153914_74 (sequence is synthesized)
agttgactttgaggagtatagtttgggaaaaatgctaaatgcttatttgttttatacttttataagctctgttatttggagggtaaatttggtagaattctatcttggaaattaagcaat

SEQ ID NO: 440459 - DNA, 120 bp, Artificial Sequence
  ENSG00000153914_75 (sequence is synthesized)
ggagctttttcttaaagtacttttgccattacctttaggtaattagaataagtatatagagtaattagaatggtaattgaaagttaatttattaaaaaatgtgcttatagtggatttata

SEQ ID NO: 440460 - DNA, 120 bp, Artificial Sequence
  ENSG00000153914_76 (sequence is synthesized)
catttatagtagtatactatatttatagtagtatactcttttgaaaggcagtgggagagtttgacaacctactgatacttaagctgaaagtgaaagacttcataatactaagtagtcaac

SEQ ID NO: 440461 - DNA, 120 bp, Artificial Sequence
  ENSG00000153914_77 (sequence is synthesized)
ttttggccagtgttgaataccctttttgtttgtatagtctttctacaatgtcttcaataggtagttttacttattaaaggacaagtaatattaaatttgggacattactagattagaact

SEQ ID NO: 440462 - DNA, 120 bp, Artificial Sequence
  ENSG00000153914_78 (sequence is synthesized)
ctgagtttccttaggtgcatacattaaggtagtgacgatggagtttctgcctcaaaacctcaatttatcaagaatgttcaggttttacaaaccttttgagataataccaatttataacag

SEQ ID NO: 440463 - DNA, 120 bp, Artificial Sequence
  ENSG00000153914_79 (sequence is synthesized)
aacaggtgaaatcaatataaatagtatagtgtatatgtgggtatatataaatacatgtgttaataccaataactaatacatataaagcagattattgttatttgatgttttcagtaaggc

SEQ ID NO: 440464 - DNA, 120 bp, Artificial Sequence
  ENSG00000153914_80 (sequence is synthesized)
ctgcaaaggtagaaaatagtaggttttatttgcttcctataaataaggcatagccattatttaaatcaagttttaaattccaacttgagttccatccatgtttaaagatatattcagata

SEQ ID NO: 440465 - DNA, 120 bp, Artificial Sequence
  ENSG00000153914_81 (sequence is synthesized)
atattgtttagggatttatctctgcacatgtggttgttttaaatatttttacaactgaaaccaggcatggtgcttgtggaaatttactgcatatgctatatttcagtttagcatgatttt

SEQ ID NO: 440466 - DNA, 120 bp, Artificial Sequence
  ENSG00000153914_82 (sequence is synthesized)
gtgcattgtcttttaaaacacttttggagaattaataatagaaatgctttaccagctaccacatgagtgttcttctaaatatatccacatgtagtcaactatttaagaattttttttttt

SEQ ID NO: 440467 - DNA, 120 bp, Artificial Sequence
  ENSG00000153914_83 (sequence is synthesized)
tttttttgcctaaggggataaggaaaaataatgtgaaagttgcagtccttatcagaagtaattgattagaattcagcaatgaatatgccaaatcgtacttatttcagagtaagtttttca

SEQ ID NO: 440468 - DNA, 120 bp, Artificial Sequence
  ENSG00000153914_84 (sequence is synthesized)
tttttttaggttgtagggagtttttttcctactgagtgttattagattattttaatgttactattgttattaggcaattaaaatgtttttaagcaagctttaaggcattaacctccccct

SEQ ID NO: 440469 - DNA, 120 bp, Artificial Sequence
  ENSG00000153914_85 (sequence is synthesized)
tcagataagtatacataaattggttctaaaagttaataagaagttttctgaaaccagggaactttttttttcctgaaacatttttagtagtttcccaaggcatattttttggaactgagt

SEQ ID NO: 440470 - DNA, 120 bp, Artificial Sequence
  ENSG00000153914_86 (sequence is synthesized)
tcttttaggcatctctgatgttggtgagatgctttattaactgaatggatgtaggcttccttttacgttgaagttgattacatggagtaagtttttgttttctatttgaaattaaatgga

SEQ ID NO: 440471 - DNA, 120 bp, Artificial Sequence
  ENSG00000153914_87 (sequence is synthesized)
atctgttggagggttatcaaaattgtttgcatcacaaataggtagtttcagtaacaggataggggcactcattaagaaatttcaattcgcacatatttgttttttctttttctttttttt

SEQ ID NO: 440472 - DNA, 120 bp, Artificial Sequence
  ENSG00000153914_88 (sequence is synthesized)
tggcaagtagacagtactcttggtgtgtgtgtgaaagtaagaatgaaatttggaggaggtaaacctttttacctaatagtaatattaaaatggttaatttatgacatgtacatttgaggt

SEQ ID NO: 440473 - DNA, 120 bp, Artificial Sequence
  ENSG00000153914_89 (sequence is synthesized)
cataggtcatagtttaaagatcatagactcttagaactggaaggaattttagaaatcatcttgttcagtcacttcattttacaaacaagaagactgaaactcaagaaatagtaagtagca

SEQ ID NO: 440474 - DNA, 120 bp, Artificial Sequence
  ENSG00000153914_90 (sequence is synthesized)
tactcatgtcaaagaacaacttagcccatattttatctctttctgtgatactgaattgaggcactttagtctgagctaatcagctctgtattttcatagcaaaatcagtgctcacaagtg

SEQ ID NO: 440475 - DNA, 120 bp, Artificial Sequence
  ENSG00000153914_91 (sequence is synthesized)
atttgctgaaagcaaaaatgttattgcaaggctaaaaagagtacatatatttaaaacgttacgactcagcaggtttacttttcctcaacattttaattttagaagtagagaagagagccc

SEQ ID NO: 440476 - DNA, 120 bp, Artificial Sequence
  ENSG00000153914_92 (sequence is synthesized)
gtgatttagaaaaaaatacagatactgtattttagtaaggtaaaagaacatctatttaaacttttgtgttgctaatgaaaataattaaaaaacccattctaaaaacatctaggtggttta

SEQ ID NO: 440477 - DNA, 120 bp, Artificial Sequence
  ENSG00000153914_93 (sequence is synthesized)
catttgagcagattttctaaatcaacacttagaatttaagcttcaaattctagcagaataagtggagaaaggacttaaaatcactgtcacaggaattacagacatgttgtaatcgtacgt

SEQ ID NO: 440478 - DNA, 120 bp, Artificial Sequence
  ENSG00000153914_94 (sequence is synthesized)
tacggcagcaacaaaatattacgaacagctgtttataatcatctggtttatatgtactgctgcagggtggctgcactcaacgagtttatgcaatgactttcttggatgtttctgaaggag

SEQ ID NO: 440479 - DNA, 120 bp, Artificial Sequence
  ENSG00000153914_95 (sequence is synthesized)
aatttctgctgtcatatttaaattttattttagttttgtatttaaaatattaagattttatgagttttcgtcaaaatatcagaagttagaaattttagtagtgtacacctgaagtgtggt

SEQ ID NO: 440480 - DNA, 120 bp, Artificial Sequence
  ENSG00000153914_96 (sequence is synthesized)
ctgaagtgtggttacctttaaatattgttctaattgtaatactgtagttgagaatgaaattttgtctaatgatacttaatttttaaatatttgaacttatctttatttttagaagttagt

SEQ ID NO: 440481 - DNA, 120 bp, Artificial Sequence
  ENSG00000153914_97 (sequence is synthesized)
gatactctattccagatttttctaagagtaaactagtctttatatagaagtgacaaaagctgttttcattcttcatattgagaaaagggaacatccttagtgaccatgctgaaaataatt

SEQ ID NO: 440482 - DNA, 120 bp, Artificial Sequence
  ENSG00000153914_98 (sequence is synthesized)
gctcaagttgcagcttttttgttttgttttcccagtctattccaagtttggggagcaccaccccagatctttcacgcaattccctattttcagtaccacgtatccaaaggaacactttga

SEQ ID NO: 440483 - DNA, 120 bp, Artificial Sequence
  ENSG00000153914_99 (sequence is synthesized)
gtccttggtattgctggtgataagagcctcctctgcccacttttggacctgaaacacaggagtaacttgcagtttcagcttcagttttagtactttgcttaagctctgtttatcttattt

SEQ ID NO: 440484 - DNA, 120 bp, Artificial Sequence
  ENSG00000153914_100 (sequence is synthesized)
ttgatcatagctttgtccttttgattttctttatctgtcatttctttgtctttggtataaaggggaccttaaaatgcaaatttggcaataccatcctaattggaagtaccctaaagatca

SEQ ID NO: 440485 - DNA, 120 bp, Artificial Sequence
  ENSG00000153914_101 (sequence is synthesized)
ttactaaagttacaaattttgttgtctattttaaggtacggagggggctgtttttgaaatgtgaaagtatgtatagtggatcctaattgcatgttatgtgtacatacgtactcctatgta

SEQ ID NO: 440486 - DNA, 120 bp, Artificial Sequence
  ENSG00000153914_102 (sequence is synthesized)
tgtcttgagagagcagggagggaagagtgtatctgtgtatgttgggattttaaagaaggagaaaggatttgggggagggaaaaggaaccagtttgttgtacattgttttaccagcaggct

SEQ ID NO: 440487 - DNA, 120 bp, Artificial Sequence
  ENSG00000153914_103 (sequence is synthesized)
cagtttactttgtttttgtgtgtgtgtgtgttgatcaaggagattcaaagaatgaggaaaaataggatgttctttcttagattctagtaaacaagtatacaccagatatactagtgtata

SEQ ID NO: 440488 - DNA, 120 bp, Artificial Sequence
  ENSG00000153914_104 (sequence is synthesized)
cttgtctattcttagtttgcaaaatctcctttggaatatggttttactgcgtttatccaaggacttacagtaagacactttcagaaccaagtgaaggaggttgtttcacatacaagaata

SEQ ID NO: 440489 - DNA, 120 bp, Artificial Sequence
  ENSG00000153914_105 (sequence is synthesized)
aggcagtgcagcagaggccagaatcaggaaaggacagtggaacagaagctgcagtgatactagactgtggatatttccatatgttgacaggatgtggtgagggtaaaggagatcaaggaa

SEQ ID NO: 440490 - DNA, 120 bp, Artificial Sequence
  ENSG00000153914_106 (sequence is synthesized)
ataatagaattgggctgaagagtaatattacaacttcttttctgaggaagactgatgacctggatctcatattgtgttgattgtaagagagagctaatgtccaagactggaacaagacaa

SEQ ID NO: 440491 - DNA, 120 bp, Artificial Sequence
  ENSG00000153914_107 (sequence is synthesized)
aacttgatgatgaataaaattgttgtttctttgatcatctaagtgaagttttatgtgctttatgtagatatgtctatacagatgtacacacaatgtctgcgtagcattagaaataatgta

SEQ ID NO: 440492 - DNA, 120 bp, Artificial Sequence
  ENSG00000153914_108 (sequence is synthesized)
ctgcgtagcattagaaataatgtatatatattccttttttttccccccccaagatgcagtttcagtccgttgccgaggctggagtgcagtagcttgatctcggctcactgcaacctccac

SEQ ID NO: 440493 - DNA, 87 bp, Artificial Sequence
  ENSG00000153914_109 (sequence is synthesized)
tcactgcaacctccacctcccaggcacaagtgatcctcccacctcagcttctcgagtagctaagccacagacacgtagaaacggggt

SEQ ID NO: 440494 - DNA, 120 bp, Artificial Sequence
  ENSG00000153914_110 (sequence is synthesized)
cctccaaaagtgctgggattataggcatggtatacatgttcttaactgacatatatacatacatacatacttttgtcagcatattctgtttttgtgcatgcatgtggaaacatgtagcct

SEQ ID NO: 440495 - DNA, 120 bp, Artificial Sequence
  ENSG00000153914_111 (sequence is synthesized)
catgtggaaacatgtagccttaagttcaagaacaaatacaaaagagagaatgagttatctttaaatgagaaaaaaaaaattccttacctaaaaacatttaacttaaagattctgacctgg

SEQ ID NO: 440496 - DNA, 120 bp, Artificial Sequence
  ENSG00000153914_112 (sequence is synthesized)
aaggatcccactatcccccagaaatcaggaagggaatgataggcctttcttgacatttcctcctctgctagtgggagttgttgtccttgaatctcaccctgacctattagacttagcatg

SEQ ID NO: 440497 - DNA, 120 bp, Artificial Sequence
  ENSG00000153914_113 (sequence is synthesized)
agcgtgggttgcaggaaccctttaacttaaaggcccaccttctactttttcaccattttcaaatgcttctagagccatgcttcctacctcccaaccctcccccacagcctttccctgttc

SEQ ID NO: 440498 - DNA, 120 bp, Artificial Sequence
  ENSG00000153914_114 (sequence is synthesized)
cttccgcttcttatggttagagagaggaaggggtttcttgtcactgtgaccttggctaggactagggaggtatgtttccattttatccaagttttgatgcctgttttatttattgagaca

SEQ ID NO: 440499 - DNA, 120 bp, Artificial Sequence
  ENSG00000153914_115 (sequence is synthesized)
tagaaaagatggatagtactataattgttataattttaagtaacctttatagattagaacaggaactgtaagacattttataatattttaatggaaaacaactgatttacaaatgaactt

SEQ ID NO: 440500 - DNA, 120 bp, Artificial Sequence
  ENSG00000153914_116 (sequence is synthesized)
tgatgcagcataatggtaagttgctggttttttacagtttaatttaaaaataagattttgcattattcagaataatacaatttcgcattaaaaatgagagttaatgataaatctttagtt

SEQ ID NO: 440501 - DNA, 120 bp, Artificial Sequence
  ENSG00000153914_117 (sequence is synthesized)
agattagatctgctcttgactacttctagcattcttaatcagaaaactactagtgggtaagattgacgtgaaaatatttaacgtcacagttaaaatgtaataattactcttagtcactgt

SEQ ID NO: 440502 - DNA, 120 bp, Artificial Sequence
  ENSG00000153914_118 (sequence is synthesized)
cttttgacatctcaattgcagggtaaggttggaagccaagtgatcagtgctttttattattaacttatttatgagagttatacttaatttttaaaaataagttttgcttaaggttggtgg

SEQ ID NO: 440503 - DNA, 120 bp, Artificial Sequence
  ENSG00000153914_119 (sequence is synthesized)
aaagcattgctttgaggaaaacaaaagaattatatttttagcaaggacaacttaaaacagaaatcttatagtaagactttttattaagtatgtagaagcaaaggcactttaaaagattac

SEQ ID NO: 440504 - DNA, 120 bp, Artificial Sequence
  ENSG00000153914_120 (sequence is synthesized)
cctatgtggatatctgtaaacggactaataatgttctcagttttgcagttttgccttaacatctactccttaactttcatggctcttaagtactagtgataaagatttcagcaagctatg

SEQ ID NO: 440505 - DNA, 120 bp, Artificial Sequence
  ENSG00000153914_121 (sequence is synthesized)
aattatcttcttgtattaaaaacatggtatgtgatttcttatctagggtctttggaaaaaaataaaataaaaaataatgtggtatgttgaaccaagtgaggctaaaaaaaaaaaatatgg

SEQ ID NO: 440506 - DNA, 120 bp, Artificial Sequence
  ENSG00000153914_122 (sequence is synthesized)
ttgactaactgaaaaatgtgtttaaaaacaaaagattttgttattaatgaggattatttggaggtttttctggtttcaaagcataccacaaaacatggtctttttcttttttcttttatt

SEQ ID NO: 440507 - DNA, 120 bp, Artificial Sequence
  ENSG00000153914_123 (sequence is synthesized)
tgtgttgcccaggctggagtgcagtggagcgacctcagctcattgcaacctctgccccccgggttcagttgattctcccacctcagcttcctcagtaactgggaatacaggtgcatgcca

SEQ ID NO: 440508 - DNA, 77 bp, Artificial Sequence
  ENSG00000153914_124 (sequence is synthesized)
tggcaaggctgatcttgaaatcctgacctcaaggcaggtggacctcaagtaccacctgcctcggcctcccagagtgc

SEQ ID NO: 440509 - DNA, 120 bp, Artificial Sequence
  ENSG00000153914_125 (sequence is synthesized)
caggtgtgagccactgtgcccagcccaactatatttcttttactgataattgttctaaatttattaaaacatgactatcaagatgagttttagctgtataaaggatacttatagaagttc

SEQ ID NO: 440510 - DNA, 120 bp, Artificial Sequence
  ENSG00000153914_126 (sequence is synthesized)
gagttttagctgtataaaggatacttatagaagttcattcagcttccttggaatacgtacataaggatataaagtttacatttatgttaacttttaatgatgatgacattgagagttaag

SEQ ID NO: 440511 - DNA, 120 bp, Artificial Sequence
  ENSG00000153914_127 (sequence is synthesized)
atttttaaacatttattttgtgctagagaatactacgcagttttacatacatcatcagttgtaatcctcatgacagccctaagagatgcaggtatgattgctactccactttatagagga

SEQ ID NO: 440512 - DNA, 120 bp, Artificial Sequence
  ENSG00000153914_128 (sequence is synthesized)
agaaactcaggcttggagaggttaagtgactagccagagttctcacaggtagcgtgtggcagagctgactttcagagccagattgtcagactccaaagctgttgagtctaatcactttgc

SEQ ID NO: 440513 - DNA, 120 bp, Artificial Sequence
  ENSG00000153914_129 (sequence is synthesized)
tatttaagttgtgtacatctgttttgttacaatttaataagcagttaggatacctcgttatgaaaaaaatcacattctcaaaaaactttttcagtgagaaagggggcctagtccaaattg

SEQ ID NO: 440514 - DNA, 120 bp, Artificial Sequence
  ENSG00000153914_130 (sequence is synthesized)
gaataacagttacttttcctgcaattaaacgtttcctgcagttaacagtttcttttcatacaggttgagactcacaaatttgaaaatctgaaattcaaaaggcttcaaaactttttgagc

SEQ ID NO: 440515 - DNA, 120 bp, Artificial Sequence
  ENSG00000153914_131 (sequence is synthesized)
gctttcgtgatgctcaaaggaaatgctcactggagcattttggatttttcagttgtgtgtttgggatgctcaaccagttttatgcgtgtgtatatatagaatgcaaatattcgaaaatct

SEQ ID NO: 440516 - DNA, 120 bp, Artificial Sequence
  ENSG00000153914_132 (sequence is synthesized)
ccaaaaatgtgaaattcaaaacacttttggttccaagcatttcacataagggatactcaactggtagctatgattatagttacagctataaaatcaaggcattgcaaatccaatatttga

SEQ ID NO: 440517 - DNA, 120 bp, Artificial Sequence
  ENSG00000153914_133 (sequence is synthesized)
ttatatctagttttaacttatgagtaatgatttttattttcctgtcacagtggcgctgtcattaggactgtgcttccttttatatattctttttgtttgttatgacagacagcacacatt

SEQ ID NO: 440518 - DNA, 120 bp, Artificial Sequence
  ENSG00000153914_134 (sequence is synthesized)
cacaggaactactcaaccacgtaaccactactccctgtcatgatgtgttatgaccagattacatgcaagtcaacagggaaaaatcttctatactgatttgaggcataaaatgactagcaa

SEQ ID NO: 440519 - DNA, 120 bp, Artificial Sequence
  ENSG00000153914_135 (sequence is synthesized)
aagccacatctgaaaatatacgaaataactgttaaattctttgtttctgtctctgttctagacaatgaaatatccggtaaagtttccagtaaatgtatttcagattatgtaactaaagta

SEQ ID NO: 440520 - DNA, 120 bp, Artificial Sequence
  ENSG00000153914_136 (sequence is synthesized)
ttatttccccccgaacttaagatggccgcaggtgggcccggaacagccctcatggcaaacgtctcagagcgtttttccactctgaaaatcgcggagaccgcgcctgagccacagtccagt

SEQ ID NO: 440521 - DNA, 120 bp, Artificial Sequence
  ENSG00000153914_137 (sequence is synthesized)
ttttaaggccttggtgtcaggccgttttgctgacgagaaagcctgctgctggtgacaagatggaactggggctgtgtttgtttcccaggacggtcgcacaaacttagcattttggtttat

SEQ ID NO: 440522 - DNA, 120 bp, Artificial Sequence
  ENSG00000153914_138 (sequence is synthesized)
atagctcaaagtgttaaataattgtctacattattcaatttttaaaataatattccattaatgagattgttaatatttgaagttttgctcacttttatttttcctagtagagcaggataa

SEQ ID NO: 440523 - DNA, 120 bp, Artificial Sequence
  ENSG00000153914_139 (sequence is synthesized)
gagaagcagaaacgccacgccattaatattttttctactgaagaaattgttcaaataaacgaggtgaaaaggaggaggtcttctactcttcctaatatgaagtcttagatgatgttttca

SEQ ID NO: 440524 - DNA, 120 bp, Artificial Sequence
  ENSG00000153914_140 (sequence is synthesized)
tcagtctgtaaaatttatggttcataatttgacccactctaaagttaggtaattgaacatgctcataaaggacataagtttaaactggcctctaaagaatactgttcatatgagaatatc

SEQ ID NO: 440525 - DNA, 120 bp, Artificial Sequence
  ENSG00000153922_0 (sequence is synthesized)
gtgaatcaaaggagagtcccagaaaacctgtgactgttgaagaaaattcatctgtgaatttttatattcaaggagtcagtatttatattcatcttttaaactgggaagatttatatttta

SEQ ID NO: 440526 - DNA, 120 bp, Artificial Sequence
  ENSG00000153922_1 (sequence is synthesized)
ctttaaaacttcttgataataatttacaatgaatggacacagtgatgaagaaagtgttagaaacagtagtggagaatcaagccagtcggatgatgattctgggtcagcttcaggctctgg

SEQ ID NO: 440527 - DNA, 120 bp, Artificial Sequence
  ENSG00000153922_2 (sequence is synthesized)
atctggttcgagttctggaagcagtagtgatggaagcagtagccagtcaggtagcagtgactctgactccggatctgaatcaggcagtcagtcagagtctgagtcagacacttcccgaga

SEQ ID NO: 440528 - DNA, 120 bp, Artificial Sequence
  ENSG00000153922_3 (sequence is synthesized)
aaacaaagttcaagcaaaaccaccgaaagttgatggagctgagttttggaaatctagtcctagtattctggccgttcagagatctgcaatcctcaagaagcagcaacagcagcagcagca

SEQ ID NO: 440529 - DNA, 120 bp, Artificial Sequence
  ENSG00000153922_4 (sequence is synthesized)
acaacaacatcaagcctcatctaatagcggatcagaagaggattcctctagcagtgaagattccgatgactcatcaagtgaggtcaaaaggaaaaagcataaagatgaagattggcaaat

SEQ ID NO: 440530 - DNA, 120 bp, Artificial Sequence
  ENSG00000153922_5 (sequence is synthesized)
gtctgggtcaggatctccatctcagtctggttcagattcagaatctgaagaagagagagagaaaagcagttgtgatgaaacagaatctgattatgagccaaaaaacaaagtcaaaagcag

SEQ ID NO: 440531 - DNA, 120 bp, Artificial Sequence
  ENSG00000153922_6 (sequence is synthesized)
aaaacctcaaaatagatctaagtcaaaaaatggaaagaagattcttggacaaaaaaagagacagattgattcatctgaggaggatgatgatgaagaagattatgataatgataaaagaag

SEQ ID NO: 440532 - DNA, 120 bp, Artificial Sequence
  ENSG00000153922_7 (sequence is synthesized)
ttctcgtcgccaagcaactgttaatgttagctataaggaggatgaagaaatgaaaacagattctgatgacctactggaagtctgtggagaggatgttcctcaacctgaggaagaggaatt

SEQ ID NO: 440533 - DNA, 120 bp, Artificial Sequence
  ENSG00000153922_8 (sequence is synthesized)
tgaaaccatagaaagatttatggattgtcggattgggagaaaaggagctactggtgctactacaaccatctatgcagttgaagcagatggtgacccaaatgcaggctttgaaaaaaacaa

SEQ ID NO: 440534 - DNA, 120 bp, Artificial Sequence
  ENSG00000153922_9 (sequence is synthesized)
agaaccaggagagattcagtatttaattaaatggaaaggatggtcccatatccacaacacttgggagacagaagaaaccctcaagcagcagaatgttagaggaatgaaaaaattggataa

SEQ ID NO: 440535 - DNA, 120 bp, Artificial Sequence
  ENSG00000153922_10 (sequence is synthesized)
ttataagaaaaaagatcaggaaacaaaaagatggttgaaaaatgcctctccagaagatgtggaatattataattgccagcaagaacttacagatgatctacataaacagtatcaaatagt

SEQ ID NO: 440536 - DNA, 120 bp, Artificial Sequence
  ENSG00000153922_11 (sequence is synthesized)
ggaacgtataattgctcattccaatcaaaagtcagcagctggttatcctgattattactgcaaatggcagggccttccatactcagagtgcagctgggaagatggagctctcatttccaa

SEQ ID NO: 440537 - DNA, 120 bp, Artificial Sequence
  ENSG00000153922_12 (sequence is synthesized)
aaagtttcaagcatgcattgatgagtattttagcaggaaccaatcaaaaaccactccttttaaagattgcaaagtattaaaacaaaggccaaggtttgtagccctgaagaagcagccatc

SEQ ID NO: 440538 - DNA, 120 bp, Artificial Sequence
  ENSG00000153922_13 (sequence is synthesized)
ctatattggaggacatgagggcttagaattaagagattatcaactgaatggtttaaattggcttgctcattcttggtgcaaaggaaatagttgcatactcgctgatgaaatgggccttgg

SEQ ID NO: 440539 - DNA, 120 bp, Artificial Sequence
  ENSG00000153922_14 (sequence is synthesized)
aaaaacaatacagacgatctcatttctgaattatttgtttcatgaacatcaattatatggaccttttttattggtagtaccgctctccactcttacttcctggcaaagggaaattcagac

SEQ ID NO: 440540 - DNA, 120 bp, Artificial Sequence
  ENSG00000153922_15 (sequence is synthesized)
ttgggcttctcaaatgaatgctgtggtttatttaggtgacattaacagcagaaacatgataagaactcatgaatggacgcatcatcagaccaaacggttaaaatttaatatattgttaac

SEQ ID NO: 440541 - DNA, 120 bp, Artificial Sequence
  ENSG00000153922_16 (sequence is synthesized)
aacttatgaaattttattaaaagataaggcattccttggaggtctaaattgggcatttataggtgttgatgaagcacaccgattaaagaatgatgactcccttctgtataaaactttaat

SEQ ID NO: 440542 - DNA, 120 bp, Artificial Sequence
  ENSG00000153922_17 (sequence is synthesized)
agattttaaatccaatcatcgtctccttatcactggaactcctctacagaattccctcaaagagctctggtctttgctacatttcattatgccagaaaagttttcttcctgggaagattt

SEQ ID NO: 440543 - DNA, 120 bp, Artificial Sequence
  ENSG00000153922_18 (sequence is synthesized)
tgaagaagaacatggcaaagggagagaatatggttatgcaagccttcacaaggagcttgagccatttctgttacgccgagttaagaaagatgtggaaaaatctcttcctgccaaggttga

SEQ ID NO: 440544 - DNA, 120 bp, Artificial Sequence
  ENSG00000153922_19 (sequence is synthesized)
gcagattttaagaatggaaatgagtgctttacagaaacaatattacaaatggattttaactaggaattacaaagccctcagcaaaggttccaagggcagtacctcaggctttttgaacat

SEQ ID NO: 440545 - DNA, 120 bp, Artificial Sequence
  ENSG00000153922_20 (sequence is synthesized)
tatgatggagctaaagaaatgttgtaaccattgctacctcattaaaccaccagataataatgaattctataataaacaggaggccttacaacacttaattcgtagtagcggaaaattgat

SEQ ID NO: 440546 - DNA, 120 bp, Artificial Sequence
  ENSG00000153922_21 (sequence is synthesized)
tcttcttgacaagctattaattcgcctaagagaacgaggcaatcgagttcttattttttcacaaatggtgcggatgttagatatacttgcagaatatttgaaatatcgtcaattcccctt

SEQ ID NO: 440547 - DNA, 120 bp, Artificial Sequence
  ENSG00000153922_22 (sequence is synthesized)
tcaaagattagatggatcaataaaaggagaactgaggaaacaagctctagatcattttaatgctgagggatcagaggatttttgctttttgctgtccacaagagctggaggtctagggat

SEQ ID NO: 440548 - DNA, 120 bp, Artificial Sequence
  ENSG00000153922_23 (sequence is synthesized)
taatttagcctctgctgacactgttgttatatttgattccgattggaatccacagaatgatcttcaggcacaggctagagcccatcgaattgggcaaaagaaacaggtgaatatttatcg

SEQ ID NO: 440549 - DNA, 120 bp, Artificial Sequence
  ENSG00000153922_24 (sequence is synthesized)
tctagttacaaagggatcagttgaagaagatattcttgaaagggcgaaaaagaagatggttttagatcatcttgtaattcaaagaatggacacaactgggaagacagtactacatacagg

SEQ ID NO: 440550 - DNA, 120 bp, Artificial Sequence
  ENSG00000153922_25 (sequence is synthesized)
ttctgccccatcaagttctactcctttcaataaagaagagttatcagccattttaaagtttggtgctgaagaactttttaaggaacctgaaggagaagaacaagagccccaggaaatgga

SEQ ID NO: 440551 - DNA, 120 bp, Artificial Sequence
  ENSG00000153922_26 (sequence is synthesized)
ttctcaaatatggatgaggatgacattgagttggaacctgaaagaaattcaaagaattgggaggaaattattccagaagatcaaagaagacgattagaagaagaagaaagacaaaaggaa

SEQ ID NO: 440552 - DNA, 120 bp, Artificial Sequence
  ENSG00000153922_27 (sequence is synthesized)
cttgaagaaatttatatgctcccaagaatgagaaattgtgcaaaacagattagtttcaatggaagtgaagggaggcgcagtagaagtaggagatactctggatctgatagtgattccatc

SEQ ID NO: 440553 - DNA, 120 bp, Artificial Sequence
  ENSG00000153922_28 (sequence is synthesized)
tcagaagggaaaaggccaaagaaacgtggaagaccacggactattcctcgggagaatattaaaggatttagtgatgcagaaattaggcggtttatcaagagctataagaaatttggtggt

SEQ ID NO: 440554 - DNA, 120 bp, Artificial Sequence
  ENSG00000153922_29 (sequence is synthesized)
cctctggaaagattagatgcaattgctcgagatgctgagttagttgataagtcagaaacagaccttagacgactgggagaattggtacataatggttgcattaaagcattaaaggatagt

SEQ ID NO: 440555 - DNA, 120 bp, Artificial Sequence
  ENSG00000153922_30 (sequence is synthesized)
tcttcaggaacagaacgaacaggtggtagactcggaaaagtgaagggtccaacattccgaatatcaggagtacaggtgaatgccaaactagtcatctcccatgaagaagaattaatacct

SEQ ID NO: 440556 - DNA, 120 bp, Artificial Sequence
  ENSG00000153922_31 (sequence is synthesized)
ttgcacaaatccattccttctgatccagaagaaagaaagcagtatactatcccatgccacacaaaggcagctcattttgatatagactggggcaaagaagatgattccaatttgttaatt

SEQ ID NO: 440557 - DNA, 120 bp, Artificial Sequence
  ENSG00000153922_32 (sequence is synthesized)
ggcatctatgaatatggatatggaagctgggaaatgattaaaatggatcctgacctcagtctaacacacaagattcttccagatgatcccgataaaaaaccacaagcaaaacagttgcag

SEQ ID NO: 440558 - DNA, 120 bp, Artificial Sequence
  ENSG00000153922_33 (sequence is synthesized)
acccgtgcagactacctcatcaaattacttagtagagatcttgcaaaaaaagaagctctttctggtgcgggaagttcaaagaggagaaaagcaagagctaagaagaataaagcaatgaag

SEQ ID NO: 440559 - DNA, 120 bp, Artificial Sequence
  ENSG00000153922_34 (sequence is synthesized)
tctataaaagtgaaagaggaaataaagagtgattcttctcctctgccttcagagaagtctgatgaagatgatgataaattgagtgaatccaagtctgatggtagggaaagatccaagaaa

SEQ ID NO: 440560 - DNA, 120 bp, Artificial Sequence
  ENSG00000153922_35 (sequence is synthesized)
tcttcagtgtcagatgctccagttcatatcacggcaagtggtgaaccagttcccatttctgaagaatctgaagagctggatcagaagacattcagcatttgtaaagaaagaatgaggcct

SEQ ID NO: 440561 - DNA, 120 bp, Artificial Sequence
  ENSG00000153922_36 (sequence is synthesized)
gttaaagcagctttgaaacaacttgataggcctgagaaaggcctttcagaaagagaacaactagagcatactagacaatgtttaataaaaattggagaccatatcacagaatgtctaaaa

SEQ ID NO: 440562 - DNA, 120 bp, Artificial Sequence
  ENSG00000153922_37 (sequence is synthesized)
gagtatacaaatcctgaacaaattaagcaatggagaaaaaacctgtggatttttgtatctaagtttactgaatttgatgcaagaaaattacataaattatataagcatgctattaaaaaa

SEQ ID NO: 440563 - DNA, 120 bp, Artificial Sequence
  ENSG00000153922_38 (sequence is synthesized)
cggcaggagtctcagcaaaacagtgatcaaaacagcaacttgaatcctcacgtgattagaaatccagatgtggaaagattaaaagagaatacaaatcacgatgatagcagcagggacagt

SEQ ID NO: 440564 - DNA, 120 bp, Artificial Sequence
  ENSG00000153922_39 (sequence is synthesized)
tattcctctgatagacacttaactcagtaccatgatcatcataaagaccgacatcagggagattcttacaaaaaaagtgattccaggaaaagaccctattcttcttttagtaatggtaaa

SEQ ID NO: 440565 - DNA, 120 bp, Artificial Sequence
  ENSG00000153922_40 (sequence is synthesized)
gaccatcgtgattgggatcactacaagcaagacagcagatattacagtgacagagagaaacacagaaaactggatgatcacaggagtagagatcacaggtcaaatttggaaggaagttta

SEQ ID NO: 440566 - DNA, 120 bp, Artificial Sequence
  ENSG00000153922_41 (sequence is synthesized)
aaagatagatctcattctgatcatcgttctcactcagatcatcggttacattcagaccaccggtcaagttctgaatatacgcaccataaatcttccagggattataggtatcactcagac

SEQ ID NO: 440567 - DNA, 120 bp, Artificial Sequence
  ENSG00000153922_42 (sequence is synthesized)
tggcaaatggaccacagagcttccagcagtggccctaggtcaccactagatcagagatctccttatggctccagatctccatttgaacattcagttgaacacaaaagtacaccggagcat

SEQ ID NO: 440568 - DNA, 120 bp, Artificial Sequence
  ENSG00000153922_43 (sequence is synthesized)
acctggagtagtcggaaaacataacaaaaactgatacttcgtctttctggacttttcttttagccatatatcataaaccaacacagtaattgccttacatgacttgaaagatataaacag

SEQ ID NO: 440569 - DNA, 120 bp, Artificial Sequence
  ENSG00000153922_44 (sequence is synthesized)
atcttctatcagtagcagtattgttacttctttccaggatgcaaggtctattatcccaacagaagagaaaatatttttatatttaaggattatgctgcactgtactacaaaattgtagta

SEQ ID NO: 440570 - DNA, 120 bp, Artificial Sequence
  ENSG00000153922_45 (sequence is synthesized)
cttttttttgttttcttttttaaagaaatggaaaatgtttactattacagggacctcaacactgccctcccatacaggctggataaaactgtttttaagtcagtgattttagactgacct

SEQ ID NO: 440571 - DNA, 120 bp, Artificial Sequence
  ENSG00000153922_46 (sequence is synthesized)
ccatttaaattatgtttatatatgaactttactctgacctgtgatcatgtttcaggaaggaatgaaagagagttctttcttaataaagaaaaacactcaaggactttgttcatttccaaa

SEQ ID NO: 440572 - DNA, 120 bp, Artificial Sequence
  ENSG00000153922_47 (sequence is synthesized)
gctacttgtttacattgtacactgcgaccaccttgccgcttttcatcacaagcttgaatatttaaattctgtacttatatctgtaaaatagccaggaatttcctgtttgtgatctattat

SEQ ID NO: 440573 - DNA, 120 bp, Artificial Sequence
  ENSG00000153922_48 (sequence is synthesized)
gcctttttacaaaaaaaatggctgtaaattattgtaaatattaaaggaactttccttacttccttccctttctcaggctttttttgactgttcctttccctaccaactcaggccttctta

SEQ ID NO: 440574 - DNA, 120 bp, Artificial Sequence
  ENSG00000153922_49 (sequence is synthesized)
ttaaaaaaaaaaaaatcagtgtaataacactttttaatgatttgtcttgatggaatcattgtttagaatgtaaaaatggggaaaggggccacttaattccattagtcctctttttatact

SEQ ID NO: 440575 - DNA, 120 bp, Artificial Sequence
  ENSG00000153922_50 (sequence is synthesized)
gaatattttattagatacatgttattcccttttttttccttttttagtcaatattgtgtttgtagttttaaaaaatggcgagatatgtaaaatctaaactgcatgctctggaaacacttt

SEQ ID NO: 440576 - DNA, 120 bp, Artificial Sequence
  ENSG00000153922_51 (sequence is synthesized)
tttcagatgcatctggtttaaaagggtaggtgtataaacacttttcagaatccaaaacggccaaaagttattgtaaatccgtttgttttcccgttttatgtgggcaataatgtcaaatgt

SEQ ID NO: 440577 - DNA, 120 bp, Artificial Sequence
  ENSG00000153922_52 (sequence is synthesized)
gctatgcagccaggttaacattttagataaacttgattgacttttaatataaactgttacaatgcacactgattgtatataaaaacgttatatatgacaaattaaatttaagaaaaagga

SEQ ID NO: 440578 - DNA, 120 bp, Artificial Sequence
  ENSG00000153922_53 (sequence is synthesized)
gggaggcggaggcgacggcgacctcggtggcggcggcggctacgacggagacggttgcgctcgcttgctttctcggcgtcatggcggctgccgggggcagataagcggagggagcgggag

SEQ ID NO: 440579 - DNA, 120 bp, Artificial Sequence
  ENSG00000153922_54 (sequence is synthesized)
cgcgcgcgcgacggcggcggcggcggcggcgacgactggttacttatagctcttgctgccctcgcccttggtgcttcaataatgaattgttagctccactccgcaggggatcgcgcgttg

SEQ ID NO: 440580 - DNA, 120 bp, Artificial Sequence
  ENSG00000153922_55 (sequence is synthesized)
gtgctgcggaccggggcttccccttcccctccgcgtctgtccccttccccctcccccgcacggactcttgcttaccccgagacgccggagccctaggactgggcggcggagatcccgggc

SEQ ID NO: 440581 - DNA, 120 bp, Artificial Sequence
  ENSG00000153922_56 (sequence is synthesized)
ttctgctgcattcttactccctcaagcacttaccaccaccaccaccgccccctacccccgtttttaagtaacattttgctgccagaaaaagtattttggtaagcagttgaatatttgtaa

SEQ ID NO: 440582 - DNA, 120 bp, Artificial Sequence
  ENSG00000153922_57 (sequence is synthesized)
tgtgtagcattacaactaaatctgttttggagactatgaatattcctatgaagtaaaacttaggtcatagacatttttgttggccccttttggcttcctacagatattattatgggatgc

SEQ ID NO: 440583 - DNA, 120 bp, Artificial Sequence
  ENSG00000153922_58 (sequence is synthesized)
tttatatttattcacagatttttattttgttttatattcagcgggaagtttttaagtcatgtggcacacattcttgcatgtatgctttgatgtaacaaatttgaatctttgacgaatata

SEQ ID NO: 440584 - DNA, 120 bp, Artificial Sequence
  ENSG00000153922_59 (sequence is synthesized)
agtatgtggacataatttctatagtattgctatgtgtgtcactgttaattagctgtgggagcaacctacagatatttgtccataggtgtattttttaatattttcctttgtccaattagg

SEQ ID NO: 440585 - DNA, 120 bp, Artificial Sequence
  ENSG00000153922_60 (sequence is synthesized)
tttatgtgtataaaagcttgtgggtttttttgctttttgttttgttttttgcagtaatttctctttctgatacagttaccctgaagaataataatgctttgtttcttttctggtatatga

SEQ ID NO: 440586 - DNA, 120 bp, Artificial Sequence
  ENSG00000153922_61 (sequence is synthesized)
gagaacatgtgagggagtagctcagttttttaaacatctaatttataattaaatataaaagtaatgaaggtagtcctggcacacatttttgaaacttttatcacttttctctacatttag

SEQ ID NO: 440587 - DNA, 120 bp, Artificial Sequence
  ENSG00000153922_62 (sequence is synthesized)
tatgactattttattccacaagatagcatttgactaattcataatgcttaagtcataagatggtggctggcattttttaatttattactaaaagctaagatatttgcattatattgtgca

SEQ ID NO: 440588 - DNA, 120 bp, Artificial Sequence
  ENSG00000153922_63 (sequence is synthesized)
aatttcacagaacaatgttgcattttctgagataaggctctaattttttaaatagtgctacatttagttgaaagtttcagtcagctagttagctgagttgaatgaaaaatatagaactgt

SEQ ID NO: 440589 - DNA, 120 bp, Artificial Sequence
  ENSG00000153922_64 (sequence is synthesized)
atgtacatttatcaaatgataaaatatgttcatttttgtaagaaatcagaaaaattaagacgcaatggtgaagaacattagtacataaatatagcagaacattctccataaaatattctg

SEQ ID NO: 440590 - DNA, 120 bp, Artificial Sequence
  ENSG00000153922_65 (sequence is synthesized)
ttttcattctgctttgttatttttatccagttatgtttaatttttcaagggtgagagattatgtatagtactgtaccaattaaccttccacttttatacaataaataattcttactaaaa

SEQ ID NO: 440591 - DNA, 120 bp, Artificial Sequence
  ENSG00000153922_66 (sequence is synthesized)
gatgatgataaagatgagatcagttctgtgaaacatccaaataaaaaaattaaaacagaaagagacagtgaagaaaaacctgagccagatgtttatataaagaaggaaccagaagaaaag

SEQ ID NO: 440592 - DNA, 120 bp, Artificial Sequence
  ENSG00000153922_67 (sequence is synthesized)
agggaagcaaaagaaaaggagaataaaaaagaacttaaaagggagataaaagaaaaagaggataagaaagatataaaggaaaaagattttaaagaaaaaagagaaaacaaagtaaaagaa

SEQ ID NO: 440593 - DNA, 120 bp, Artificial Sequence
  ENSG00000153922_68 (sequence is synthesized)
gctatacagaaagaaaaagacataaaggaagaaaaggtatgcaaatcataataaaaaatgtagaaagtaaaaacaatcagcatatttacattttaggagactaaattgcatatcagccct

SEQ ID NO: 440594 - DNA, 120 bp, Artificial Sequence
  ENSG00000153922_69 (sequence is synthesized)
tatttaaggtatacaatttgatgatttgatatacacatgcattgtgaaataattacagtctctgattaattactgatgcctcccttgggatgggaagagatagcaaactgtacctcattt

SEQ ID NO: 440595 - DNA, 120 bp, Artificial Sequence
  ENSG00000153922_70 (sequence is synthesized)
atggtgtttggttgtgttactcttgggaccattacattaccattattaagtgacagttaactttttaatgcattatttaagacaattctttacaagcataattcatattatctgatggta

SEQ ID NO: 440596 - DNA, 120 bp, Artificial Sequence
  ENSG00000153922_71 (sequence is synthesized)
tttccactccagttattaacatacctgtcccttatatgcataatcaggatcacaatatgaatctgagtcacttcctgatttaatttatgtctttggtgcatttcaaattaggattgtact

SEQ ID NO: 440597 - DNA, 120 bp, Artificial Sequence
  ENSG00000153922_72 (sequence is synthesized)
gcttttcaccctaaagactataaaatgaagcgatttggaagagaagtaaaatttaatgtttagtttcactggagtcttagtcatatatgaagttttgaaaaaatgcataggaaaattaat

SEQ ID NO: 440598 - DNA, 120 bp, Artificial Sequence
  ENSG00000153922_73 (sequence is synthesized)
atccttaagagtttgttccatagagggctgtgtatgtgtatatgtgtttgtgcctggagggaaggagttccatgaaaaaaactaaatattttccaccagactaacttaatttgccttttt

SEQ ID NO: 440599 - DNA, 120 bp, Artificial Sequence
  ENSG00000153922_74 (sequence is synthesized)
tgtgttttagaacaacaaccttttctatggaaagggaatatggcatgtttttgtgtactttacatttaaaatttatattttaggtaccgaagtctgtgtgtgtgtgtgtgtgtgtgtgtg

SEQ ID NO: 440600 - DNA, 120 bp, Artificial Sequence
  ENSG00000153922_75 (sequence is synthesized)
tagttcataacagtctcaattatagaacagaattctaactgtccagtagatattatatagcactagaggcatagagcaaaggtccttccttttcaaacatttgccaatttgatgagcttc

SEQ ID NO: 440601 - DNA, 120 bp, Artificial Sequence
  ENSG00000153922_76 (sequence is synthesized)
cacatcaataattttcaaactttagtgtgcatcagaattaactggatggcctttgctaaacaccttcagtaggtctggggtaggactcaataatttgcttatctatgttctcaggtgaca

SEQ ID NO: 440602 - DNA, 120 bp, Artificial Sequence
  ENSG00000153922_77 (sequence is synthesized)
ctaatgctgttctagtaaccacgctggacttaatcagtgtttttaaaactgaattgtaacctgttaatggatctgtgaatcagtttaatgggttgcaccaacattttgaaagtaaaatga

SEQ ID NO: 440603 - DNA, 120 bp, Artificial Sequence
  ENSG00000153922_78 (sequence is synthesized)
taaaacatgagagtataacatagtatatcatgtcatgatatgaaactgtttcaggtgtttgcaaacagctatgtactcaatcacatacttttagaatggggactcaggcagaatagtatg

SEQ ID NO: 440604 - DNA, 120 bp, Artificial Sequence
  ENSG00000153922_79 (sequence is synthesized)
agtgatttggagcacagactaaagacagaatgcctgagcattattttactgtctagtaagtactttctattatagttttagcaaaggacatgcttcacatttctacttaattttataatt

SEQ ID NO: 440605 - DNA, 120 bp, Artificial Sequence
  ENSG00000153922_80 (sequence is synthesized)
gcattctttctgtatcagagtcacaaaagtatagtctgagaaaggaataggtcccatattttttagtttttgtgacatttcagaatcaagcaaccttttttaattaatccttagtactgc

SEQ ID NO: 440606 - DNA, 120 bp, Artificial Sequence
  ENSG00000153922_81 (sequence is synthesized)
ttttatacaccatttctaaatgctttaactgcttgtatttgggaaccgattttgttttggcaagggttgaaacgaattcttgttatctatcaactaagttttttttgccacattattttt

SEQ ID NO: 440607 - DNA, 120 bp, Artificial Sequence
  ENSG00000153922_82 (sequence is synthesized)
tgatccagaagaaagaaagcagtgagtgatttattttctccattgtaagatttttgttattcaataattgcaaaatgaatgtgctgaatttttatggtgttattggctagttttgaaaaa

SEQ ID NO: 440608 - DNA, 120 bp, Artificial Sequence
  ENSG00000153922_83 (sequence is synthesized)
aaaaaggaagaaataaagcatattattttgaagttctaatgactcacgtttttcaaaattaatttttcagttaaggcaattacaaacttatcattagttattaactttgatgccaggtat

SEQ ID NO: 440609 - DNA, 120 bp, Artificial Sequence
  ENSG00000153930_0 (sequence is synthesized)
ctctttcaactcaagagctcagtcctgtgtctctcatggaggcgtctctaaccaggaggctactctttaaagacaggcattttacttgcagcaaaataataggaaggagattcgcttgct

SEQ ID NO: 440610 - DNA, 120 bp, Artificial Sequence
  ENSG00000153930_1 (sequence is synthesized)
ttgcacagaggctgagccacaggagaaagcaaagccaatgtgatttattgaatgaaagcactggacaattaccaacaacttgttcctctgctgcctcgaacagcataaactggaattgtc

SEQ ID NO: 440611 - DNA, 120 bp, Artificial Sequence
  ENSG00000153930_2 (sequence is synthesized)
gtgtgaaaatgacgcaacaaatgcaaaatttacatctctgtcagtcaaaaaaacatagtgctccctcatctcccaacgcagccaaacgcctgtacaggaacctctctgagaaactgaaag

SEQ ID NO: 440612 - DNA, 120 bp, Artificial Sequence
  ENSG00000153930_3 (sequence is synthesized)
ggagccactcttccttcgatgaggcctattttaggacaagaactgatcggctgagtctcaggaagacctcggtgaatttccagggcaatgaagccatgtttgaggcagtcgaacagcagg

SEQ ID NO: 440613 - DNA, 120 bp, Artificial Sequence
  ENSG00000153930_4 (sequence is synthesized)
acatggatgctgtgcagatcctcctgtatcagtacacaccagaagaacttgacctcaacacacctaacagcgagggcttgacacccctggatattgccatcatgaccaacaatgtgccca

SEQ ID NO: 440614 - DNA, 120 bp, Artificial Sequence
  ENSG00000153930_5 (sequence is synthesized)
ttgcaaggattcttctgaggacaggggcccgagaaagtccacactttgtcagcctggaaagccgagcaatgcacctcaacacactggtccaggaagcccaggagagggtgagtgaactgt

SEQ ID NO: 440615 - DNA, 120 bp, Artificial Sequence
  ENSG00000153930_6 (sequence is synthesized)
ctgcccaggtggagaatgaaggattcactctggacaacacagagaaagagaagcagctgaaagcttgggagtggaggtatcggctctacagacgcatgaaaacaggctttgagcatgcca

SEQ ID NO: 440616 - DNA, 120 bp, Artificial Sequence
  ENSG00000153930_7 (sequence is synthesized)
gagcccctgagatgccaaccaatgtctgtctcatggtaaccagcagcacatcactcactgtcagcttccaagagcctcttagcgtcaatgcagctgtagtaaccaggtataaagtggaat

SEQ ID NO: 440617 - DNA, 120 bp, Artificial Sequence
  ENSG00000153930_8 (sequence is synthesized)
ggagtatgtccgaagacttttctcctttggctggagaaatcatcatggataatctgcagactctgagatgcacaatcacaggacttacaatgggccaacagtattttgttcaagtctcgg

SEQ ID NO: 440618 - DNA, 120 bp, Artificial Sequence
  ENSG00000153930_9 (sequence is synthesized)
cttacaatatgaaaggatggggacctgctcagaccacgacaccggcatgtgcctctccttctaactggaaagactatgacgacagagagcccagacacaagggacagagtgaagttttgg

SEQ ID NO: 440619 - DNA, 120 bp, Artificial Sequence
  ENSG00000153930_10 (sequence is synthesized)
cttcatcagcattacagttgccgggaaagcacaaaattacaaaccacaggccgcaagcagtcagtctcaagaagcctgaaacacctgttccattcctcgaacaagtttgtgaagacctta

SEQ ID NO: 440620 - DNA, 120 bp, Artificial Sequence
  ENSG00000153930_11 (sequence is synthesized)
aaacggggactctacatagccgttatattttattacaaagacaatatcttagtcaccaatgaagatcaagtaccaattgttgaaatagatgactctcacaccagttctattacacaagat

SEQ ID NO: 440621 - DNA, 120 bp, Artificial Sequence
  ENSG00000153930_12 (sequence is synthesized)
tttctgtggttcacgaagctgtcttgtatgtgggaagatataaggtggctgaggcaaagcataccaatatcctcatcctcatccacagtgctgcaaactcggcagaagatgctcgcagca

SEQ ID NO: 440622 - DNA, 120 bp, Artificial Sequence
  ENSG00000153930_13 (sequence is synthesized)
acagcacagctacagaatttacttgggacacacaacttgggaagagtttactatgagcccattaaagatcgacatggaaacatactcatagtcaccatcagggaggtggagatgctttat

SEQ ID NO: 440623 - DNA, 120 bp, Artificial Sequence
  ENSG00000153930_14 (sequence is synthesized)
tcattttttaatggcaaatggatgcagatctcaaagctgcaaagccagagaaagtctctatcaacacctgaggagccaacagctttagacattctactgataaccatccaggatattcta

SEQ ID NO: 440624 - DNA, 120 bp, Artificial Sequence
  ENSG00000153930_15 (sequence is synthesized)
tcctatcacaaaaggagtcatcagcgtctctttcctggattatatctgggttacctaaagctctgtagctctgtggatcaaatcaaagttcttgttacccaaaagttgcccaacattctc

SEQ ID NO: 440625 - DNA, 120 bp, Artificial Sequence
  ENSG00000153930_16 (sequence is synthesized)
tgccacgtgaagatccgtgaaaacaataatatttctagagaggaatgggaatggatccaaaagctttctggctctgaatctatggaaagtgtggatcatacttctgactgccccatgcaa

SEQ ID NO: 440626 - DNA, 120 bp, Artificial Sequence
  ENSG00000153930_17 (sequence is synthesized)
ttgttcttctacgagctccagatggcagtgaaagctctccttcagcagatcaatatacctctacaccaggcaaggaacttccgcctctacacacaggaggtgttggaaatgggtcacaat

SEQ ID NO: 440627 - DNA, 120 bp, Artificial Sequence
  ENSG00000153930_18 (sequence is synthesized)
gtgtcctttcttctcctgctccctgcctcagacgacgtctgtacagccccaggacagaataatccttacaccccacactcagggtttcttaacctccctcttcagatgtttgaacttggt

SEQ ID NO: 440628 - DNA, 120 bp, Artificial Sequence
  ENSG00000153930_19 (sequence is synthesized)
atagtagcttgtttcacctagaaatattaacccagcctccttataataaaatcacaaagttatatctgttcccccttgtcccagtggagggtcaataaatcacatgatggctttggcaac

SEQ ID NO: 440629 - DNA, 120 bp, Artificial Sequence
  ENSG00000153930_20 (sequence is synthesized)
acagagctggctgggcagcctcaagctggagccctggggaacagcctgaaggctgggagcactgacaggccgcttctgagccccaggtgaggctactctttaaagacaggcattttactt

SEQ ID NO: 440630 - DNA, 120 bp, Artificial Sequence
  ENSG00000153930_21 (sequence is synthesized)
gcagcaaaatgtaagtacatttcctccttgaaatggtatctacttctcagctgtaattcctaaagcctcctaatctttaaggctcccatctcacattgctgcatttttaaagtctagctc

SEQ ID NO: 440631 - DNA, 120 bp, Artificial Sequence
  ENSG00000153930_22 (sequence is synthesized)
agcacacacagccaatctaacatttcatactattgatttgtataacatcatggaacatttcagaaaccaatttggaagcagattgaacttaattgtggttgtgacaatattacgtctaaa

SEQ ID NO: 440632 - DNA, 120 bp, Artificial Sequence
  ENSG00000153930_23 (sequence is synthesized)
agataaaagtgaggagtaaaaaaataggcaatattcatttatatattatgaccatgtgacactaaacatttaaatattcagttctctcaaatgactaatttattattcttttcccagttg

SEQ ID NO: 440633 - DNA, 120 bp, Artificial Sequence
  ENSG00000153930_24 (sequence is synthesized)
ctcctcaccgtgtggtcacagactgtttcttgtttaacggcatggtggtaaccttaataattccttcctgtgtgtactgcgttatggccactctgtaaacccgtattctctccagaacta

SEQ ID NO: 440634 - DNA, 120 bp, Artificial Sequence
  ENSG00000153930_25 (sequence is synthesized)
atctcctgtgtattatgtttctttattcttagtacttccagtgtctatacccaaattacaaatcccctctattctgaaagaccaaagaaaattttagcagatctgaactgggagttctga

SEQ ID NO: 440635 - DNA, 120 bp, Artificial Sequence
  ENSG00000153930_26 (sequence is synthesized)
gcacttcttcctgctgctatgtgaataaggacgtgttcgtttccccttctgccacgattgtaagtttcccaaggcttcttcagccctgcggaactgcaaagaaattggtgcaaaataatt

SEQ ID NO: 440636 - DNA, 120 bp, Artificial Sequence
  ENSG00000153930_27 (sequence is synthesized)
atggctgaataggaacagctccggtcgcagctcccagcgagaccaacacaggagggtgatttctgcatttccaactgagggtagcctacggcaggctgaatcctgatggcatctggacca

SEQ ID NO: 440637 - DNA, 120 bp, Artificial Sequence
  ENSG00000153930_28 (sequence is synthesized)
tgaatcctgatggcatctggaccaggaagaggtcaaggaggcttccgatggtcccacaggacatctatagctccatgccagaagcccagccggtggaaactaacagccccaaagccctgc

SEQ ID NO: 440638 - DNA, 120 bp, Artificial Sequence
  ENSG00000153930_29 (sequence is synthesized)
ttgtgttaggggagctatcgaacacggataatgacataaacgagtcggtgttcatctggggaatctcagacaaagcagcccagaggaaaaccatctctgtcgatgaaggtttgtttcatt

SEQ ID NO: 440639 - DNA, 120 bp, Artificial Sequence
  ENSG00000153930_30 (sequence is synthesized)
tgcaacaggaaaagcagcagcaacagcagcagcagcagcgactggagcccgtgcacaggctgggaagaggtaaagggaggctgaggctgccgcataggctactctttaaagacaggcatt

SEQ ID NO: 440640 - DNA, 120 bp, Artificial Sequence
  ENSG00000153930_31 (sequence is synthesized)
ggtcctctttcaactcaagagctcagtcctgtgtctctcatggaggcgtctctaaccagggtaggaaaacaatagttctaaatatcggtaattggtgtttggaggccattgttttgcatt

SEQ ID NO: 440641 - DNA, 120 bp, Artificial Sequence
  ENSG00000153930_32 (sequence is synthesized)
caacaggcaggaaaatatgagcaagacaactggaaacgtaagatgcatgatctgccctgagaggtcggtacatcctgtgctattgtctcatctgagaaatgaagcgacacgtccaagatc

SEQ ID NO: 440642 - DNA, 120 bp, Artificial Sequence
  ENSG00000153930_33 (sequence is synthesized)
ctcaggcacagaataacactctgggctgcacatgagctaacagaaggaaataaaatgtcaactctttcaaactctatgcttctcgaagactgtgtttaattcatctctgcctattcaagg

SEQ ID NO: 440643 - DNA, 120 bp, Artificial Sequence
  ENSG00000153930_34 (sequence is synthesized)
accgggcccacactgtggttatcagctatggatcacagtgttatctgggtttgagccctacatgttgccccctcctcaatgctcaatcaaggagccccacaaatgaagtacctggtcccg

SEQ ID NO: 440644 - DNA, 120 bp, Artificial Sequence
  ENSG00000153930_35 (sequence is synthesized)
ggcacaggttacagatgacaaccagatgggatcaaccacaggaaccagggtgagaagttgagatcaatgaatggtatgaagaatcccctggttgagcacttggtttaaagataagatgtt

SEQ ID NO: 440645 - DNA, 120 bp, Artificial Sequence
  ENSG00000153930_36 (sequence is synthesized)
ctcagaagagatcacagacagagatgtatcctcagtgttcagcacagttcatatgaaagtggattccagcaaagagaccaaagaatgtgtccaagggcttcggtcaaagtctgttctgta

SEQ ID NO: 440646 - DNA, 120 bp, Artificial Sequence
  ENSG00000153930_37 (sequence is synthesized)
tgaaccttgctactgaatcaggcacatgtcctactgtgatccgaggagggtaacctgctggccatgcagatcttctgagaggctactctttaaagacaggcattttacttgcagcaaaat

SEQ ID NO: 440647 - DNA, 120 bp, Artificial Sequence
  ENSG00000153930_38 (sequence is synthesized)
atgttatgtttagagaaactggtggggctgttgctgaaaaatcagcggaaatcggatgcctgcaagaaaggaccctggaaaagccagcggtacacggtgacaggcaacagggtagcctac

SEQ ID NO: 440648 - DNA, 120 bp, Artificial Sequence
  ENSG00000153930_39 (sequence is synthesized)
agctacagagagaaatttattagtctgtattgccgcctttctgctgttgtggagctggattctctgaacacccaacagtccctcagggaagcaatctcagacagcgaggttgcagctgcc

SEQ ID NO: 440649 - DNA, 120 bp, Artificial Sequence
  ENSG00000153930_40 (sequence is synthesized)
aaacaaagacaccagcaagttttagatttcattcagcaaatagatgaagtctggcgtgaaatgagatggatcatggatgctctacagtatgcaagatacaaacaaccagtttctggcttg

SEQ ID NO: 440650 - DNA, 120 bp, Artificial Sequence
  ENSG00000153930_41 (sequence is synthesized)
cccatcactaagctgatagacccctcagatgagcagagcctaaagaagatcaattctacatcatcatcacatatagactgtcttccatccccacccccatccccagagatgcacagaaga

SEQ ID NO: 440651 - DNA, 120 bp, Artificial Sequence
  ENSG00000153930_42 (sequence is synthesized)
aagacagtgagtgattcacagccctgctctgatgaagaagcctgctcagaagtcttcctccccaccaacagtgactacgactccagcgatgccctgagccccagagacctggacctggtc

SEQ ID NO: 440652 - DNA, 120 bp, Artificial Sequence
  ENSG00000153930_43 (sequence is synthesized)
tacctatcatctcacgacattgcgcagcagacccttagcggcctaagcggcagcgcccccgacgtcctgcaagtgcacgacgtgaaaacccctctggggccgggccaggatccccagggc

SEQ ID NO: 440653 - DNA, 120 bp, Artificial Sequence
  ENSG00000153930_44 (sequence is synthesized)
gagggcccaaatcccgatcactcatgtgccgagtttctccatagcctgaccctcacggggttcacacccaagaaccacgccaagactgtgtccggtgggcggcccccgctaggcttcctg

SEQ ID NO: 440654 - DNA, 120 bp, Artificial Sequence
  ENSG00000153930_45 (sequence is synthesized)
ggaaagcggaagccaggcaagcacccccactatggcggcttcagccgccatcatcgctggttgcgcatccacagcgagacccagtcgctatcgctctctgagggcatttatacacagcac

SEQ ID NO: 440655 - DNA, 120 bp, Artificial Sequence
  ENSG00000153930_46 (sequence is synthesized)
ctgtcccaggcctgtggtctggcccaggagcccaaggaggccaagcgggccggccctgcccttgatgatcccaggggcctaactctggcccacgctgccagccttcctgaggagcggaac

SEQ ID NO: 440656 - DNA, 120 bp, Artificial Sequence
  ENSG00000153930_47 (sequence is synthesized)
agcagtctccaggacgcgaggccttccgtccgccgcctctacgtggagccctacgcagcggccgtggtggcccaggacgaaaaaccatgggcaagcttgagcccgccctctggaggccgc

SEQ ID NO: 440657 - DNA, 120 bp, Artificial Sequence
  ENSG00000153930_48 (sequence is synthesized)
atcaccctgcccagccccactggccccgatgtgagtcaggagggccccaccgcctctcccatgtcagaaatactcagcagcatgctttagggaggcccatcccggctgtccacccctcca

SEQ ID NO: 440658 - DNA, 120 bp, Artificial Sequence
  ENSG00000153930_49 (sequence is synthesized)
tggctgctacctgcgttttacatcacccttacccccatcctgccccactgtgtacccactcattttcaagcgttttgaatgttataaatacaaaggttacaagttcaaggtcctcttttt

SEQ ID NO: 440659 - DNA, 120 bp, Artificial Sequence
  ENSG00000153930_50 (sequence is synthesized)
ttggaacagagtggtgggtggaggccagagttgccagtgccattcccacttcagcctagaaagggcatgggggagttgtgtcaacatggaatacgacatacagtgactcaaacatgccac

SEQ ID NO: 440660 - DNA, 120 bp, Artificial Sequence
  ENSG00000153930_51 (sequence is synthesized)
cctgttggtggcacctatgactgaagctggccatcccaaagagagaccctctgttctgcagctggttctgtaatctgacccctagtttagggctctttcatgaatttgtgattgatgaag

SEQ ID NO: 440661 - DNA, 120 bp, Artificial Sequence
  ENSG00000153930_52 (sequence is synthesized)
gggaggagtagaaggaaagaaagggcaaagctgcctttagatcccatctcgtgctgtagtcattattagagtcttctctaggtctggctaatctcacttatacttctctcagaaccagag

SEQ ID NO: 440662 - DNA, 120 bp, Artificial Sequence
  ENSG00000153930_53 (sequence is synthesized)
aaataattgcaggcttatgctaagagttatagagcaccagtctgcagagacgagacgaactccaggaaacagccagagaacaaaaaggaagaacatcctgtaaaagtgctaggaagtggg

SEQ ID NO: 440663 - DNA, 120 bp, Artificial Sequence
  ENSG00000153930_54 (sequence is synthesized)
agacaaaaataggaaggagattcgcttgctttgcacagaggctgagccacaggagaaagcaaagccaatgtgatttattgaatgaaagcactggacaattaccaacaacttgttcctctg

SEQ ID NO: 440664 - DNA, 120 bp, Artificial Sequence
  ENSG00000153930_55 (sequence is synthesized)
ctggaaatactgaaggcaccttttgttggtgagggaggcctccttatcccaactctggacttccttcaccttcccatgtccacatcaccccaaactgaataaagacctctaaatattgtg

SEQ ID NO: 440665 - DNA, 120 bp, Artificial Sequence
  ENSG00000153930_56 (sequence is synthesized)
atttcctgggctggccacagagccagatgcctgcagggttctctctttgccagcagctcttcaaagacttgtgagcccactcagccctccagagacactcttcactgcaaagcctcaggc

SEQ ID NO: 440666 - DNA, 120 bp, Artificial Sequence
  ENSG00000153930_57 (sequence is synthesized)
agcctagccaggggaccctggagctgatgccacctggaatccctaccaagtgtgcaaagcagccacattctgggacagctggattggaggagggagcagaggctgagaggctactcttta

SEQ ID NO: 440667 - DNA, 120 bp, Artificial Sequence
  ENSG00000153930_58 (sequence is synthesized)
aggctactctttaaagacaggcattttacttgcagcaaaataagaaacagaagtggaagctaggagacactatcaagggaaaagcacttttctgaggaaaccagagagtcctactttgac

SEQ ID NO: 440668 - DNA, 120 bp, Artificial Sequence
  ENSG00000153930_59 (sequence is synthesized)
atttcaacacagaccttcaggagccctgctgctgaagaaacagaagacctggaggtaataaagtgatttgttcaagttacacagctaaccaatgatggaaccaagactagaattcttgaa

SEQ ID NO: 440669 - DNA, 120 bp, Artificial Sequence
  ENSG00000153930_60 (sequence is synthesized)
cagaacatgcgtcagaaaatgcttagaggagcaaaggcaaataaaacaatccttcagcacactggatttctgaaccactgccccattctcaccattatcccagatgctgccctggaagcc

SEQ ID NO: 440670 - DNA, 120 bp, Artificial Sequence
  ENSG00000153930_61 (sequence is synthesized)
caccagcttcttcagcagattgatgacgtggctgctaacaggctcttctcttggaggttttcaatttcagccagagtaagaagagctggataaggacttacaaattcagttccttcttct

SEQ ID NO: 440671 - DNA, 120 bp, Artificial Sequence
  ENSG00000153930_62 (sequence is synthesized)
ttccatgttcacttgcacatgatgattttattaaagtgatatagcatttttatttgccatgaaatcttcattccacaatttaaatgggcttctgatggctttacctgttaggtgaacttt

SEQ ID NO: 440672 - DNA, 120 bp, Artificial Sequence
  ENSG00000153930_63 (sequence is synthesized)
taggaactttcatgacccatggtctaaactagaaatgttcgccctctactctagcttaaaaattgtattttaaagacagcactaggctcttcatgtgaaaataaagacaatattgtaaaa

SEQ ID NO: 440673 - DNA, 120 bp, Artificial Sequence
  ENSG00000153933_0 (sequence is synthesized)
aagcgtttcccccgcccggcttcatccctgctggcggcccagcgtcgttctcctcctgcgcgaggcggccaaggcctgctggcccggagccgcgcctccacccgcgcgaggtatcgtcct

SEQ ID NO: 440674 - DNA, 120 bp, Artificial Sequence
  ENSG00000153933_1 (sequence is synthesized)
tggagaagatggaagcggagaggcggccggcgccgggctcgccctccgagggcctgtttgcggacgggcacctgatcttgtggacgctgtgctcggtcctgctgccggtgttcatcacct

SEQ ID NO: 440675 - DNA, 120 bp, Artificial Sequence
  ENSG00000153933_2 (sequence is synthesized)
tctggtgtagcctccagcggtcgcgccggcagctgcaccgcagggacatcttccgcaagagcaagcacgggtggcgcgacacggacctgttcagccagcccacctactgctgcgtgtgcg

SEQ ID NO: 440676 - DNA, 120 bp, Artificial Sequence
  ENSG00000153933_3 (sequence is synthesized)
cgcagcacattctgcagggcgccttctgcgactgctgcgggctccgcgtggacgagggctgcctcaggaaggccgacaagcgcttccagtgcaaggagattatgctcaagaatgacacca

SEQ ID NO: 440677 - DNA, 120 bp, Artificial Sequence
  ENSG00000153933_4 (sequence is synthesized)
aggtcctggacgccatgccccaccactggatccggggcaacgtgcccctgtgcagttactgtatggtttgcaagcagcagtgtggctgtcaacccaagctttgcgattacaggtgcattt

SEQ ID NO: 440678 - DNA, 120 bp, Artificial Sequence
  ENSG00000153933_5 (sequence is synthesized)
ggtgccagaaaacagtacatgatgagtgcatgaaaaatagtttaaagaatgaaaaatgtgattttggagaattcaaaaacctaatcattccaccaagttatttaacatccattaatcaga

SEQ ID NO: 440679 - DNA, 120 bp, Artificial Sequence
  ENSG00000153933_6 (sequence is synthesized)
tgcgtaaagacaaaaaaacagattatgaagtgctagcctctaagcttggaaagcagtggaccccattaataatcctggccaactctcgtagtggaactaatatgggagaaggactgttgg

SEQ ID NO: 440680 - DNA, 120 bp, Artificial Sequence
  ENSG00000153933_7 (sequence is synthesized)
gagaatttaggatcttgttgaatccagtccaggtttttgatgtaactaaaactcctcctatcaaagccctacaactctgtactcttctcccatattattcagctcgagtacttgtttgtg

SEQ ID NO: 440681 - DNA, 120 bp, Artificial Sequence
  ENSG00000153933_8 (sequence is synthesized)
gaggggatgggactgtagggtgggtcctggatgcagttgatgacatgaagattaagggacaagaaaagtacattccacaagttgcagttttgcctctgggaacaggcaacgatctatcca

SEQ ID NO: 440682 - DNA, 120 bp, Artificial Sequence
  ENSG00000153933_9 (sequence is synthesized)
atacattgggttggggtacaggttatgctggagaaattccagttgcgcaggttttgcgaaatgtaatggaagcagatggaattaaactagatcgatggaaagttcaagtaacaaataaag

SEQ ID NO: 440683 - DNA, 120 bp, Artificial Sequence
  ENSG00000153933_10 (sequence is synthesized)
gatactacaacttaagaaaacccaaggaattcacaatgaacaactatttttctgttggacctgatgctctcatggctctcaattttcatgctcatcgtgagaaggcaccatctctgtttt

SEQ ID NO: 440684 - DNA, 120 bp, Artificial Sequence
  ENSG00000153933_11 (sequence is synthesized)
ctagcagaattcttaataaggcggtttacttattctatggaaccaaagattgtttagtgcaagaatgtaaagatttgaataaaaaagttgagctagaactggatggtgagcgagtagcac

SEQ ID NO: 440685 - DNA, 120 bp, Artificial Sequence
  ENSG00000153933_12 (sequence is synthesized)
tgcccagcttggaaggtattatagttctgaacatcggatactggggcggtggctgcagactatgggaagggatgggggacgagacttaccctctagccaggcatgacgatggtctgctgg

SEQ ID NO: 440686 - DNA, 120 bp, Artificial Sequence
  ENSG00000153933_13 (sequence is synthesized)
aagtcgttggagtatatgggtctttccactgtgctcagattcaagtaaaactggctaatccttttcgaataggacaggcacatacagtgaggctgattttgaagtgctccatgatgccaa

SEQ ID NO: 440687 - DNA, 120 bp, Artificial Sequence
  ENSG00000153933_14 (sequence is synthesized)
tgcaggtggatggggagccttgggcccaagggccctgcactgtcaccataactcacaagacacatgcaatgatgttatatttctctggagaacaaacagatgatgacatctctagtactt

SEQ ID NO: 440688 - DNA, 120 bp, Artificial Sequence
  ENSG00000153933_15 (sequence is synthesized)
cggatcaagaagatataaaggcgactgaatagatggatgagggagtgaaaactttgcatagaatcctcacgcaagtagatacatgttcatccaaaagtattaatagaaattctctatcag

SEQ ID NO: 440689 - DNA, 120 bp, Artificial Sequence
  ENSG00000153933_16 (sequence is synthesized)
ctattcagtcttaatttcactagtagtataatgggtatacatttttgtaaatagcatccccaaaccagccagccttcagttatttacaaatgtttgttcttttttcagcaaaatacttca

SEQ ID NO: 440690 - DNA, 120 bp, Artificial Sequence
  ENSG00000153933_17 (sequence is synthesized)
aatgaatagtattaacttacaaaaagtcacaaaaacttacatgagagtgaaaatttgttatgactgttttgagagtgggactcactctgaagtatgtgctgtctcatgtcttatttttga

SEQ ID NO: 440691 - DNA, 120 bp, Artificial Sequence
  ENSG00000153933_18 (sequence is synthesized)
accatgcatatgatggacacacaatggatggacacattatatctccaacaaggtgtgggtggaaagatcaaattaacctgcttttttgaaaggaaatgattactgtcaaaccagcatggt

SEQ ID NO: 440692 - DNA, 120 bp, Artificial Sequence
  ENSG00000153933_19 (sequence is synthesized)
taattgtgagcatcctcctgcagcatgccccttaagattttctacaacccaaaccaagtgtatgtattgatttctaggaacccccaaaaggagaatagtaaaaaaagatcatacttaaaa

SEQ ID NO: 440693 - DNA, 120 bp, Artificial Sequence
  ENSG00000153933_20 (sequence is synthesized)
tttgtattacaatttttattttaggaacttattcagacacgtaaatgttgtttaattctgtaggtaaccatttgagctgcaattcaggatcttttttataacaccagtgtagccaaaaga

SEQ ID NO: 440694 - DNA, 120 bp, Artificial Sequence
  ENSG00000153933_21 (sequence is synthesized)
gaaacagataagtgaattggtaagaaataagattcagagcacttgggattgtaagttataggttctgagctgaactgtttatcagccgctctttttattaaaagacagtgtcaacacttc

SEQ ID NO: 440695 - DNA, 120 bp, Artificial Sequence
  ENSG00000153933_22 (sequence is synthesized)
aaaaaacgtgcttaaaggagacaacggtgagattaattgcttagaaaaagctcaaggctgactgataagttttaaaaatttggtggtcttgtagtattttgaaatacagtagtcttttaa

SEQ ID NO: 440696 - DNA, 120 bp, Artificial Sequence
  ENSG00000153933_23 (sequence is synthesized)
cagaatttccccttagggaggtaagtggacagaaatctttgctaaaatgtttatatcatatttattttaaaatgagagagatatatttttaaattatttattatttaccttgtggtatgg

SEQ ID NO: 440697 - DNA, 120 bp, Artificial Sequence
  ENSG00000153933_24 (sequence is synthesized)
tacctgtgtttagtgtttacgttctgtagctttatttaataagttaaattgatcacataaattctgctagtcacaatcagatagaaatttagtctattaattaaaattctaatttaattc

SEQ ID NO: 440698 - DNA, 120 bp, Artificial Sequence
  ENSG00000153933_25 (sequence is synthesized)
tcctgacagaaatctagatattcttattcttcacaaatattcctcattgtattgaaaaatgaaggagggcatgaaaagcactagggaactacttttggataactgaaagctttgtttcat

SEQ ID NO: 440699 - DNA, 120 bp, Artificial Sequence
  ENSG00000153933_26 (sequence is synthesized)
tgttttatttgcccctcaattgccacaaacttactgaagggctagtttcatggttcccattagagggtgcttgttcgctgctgttgaccagcccaagggtcgtgacccacaggtcggctg

SEQ ID NO: 440700 - DNA, 120 bp, Artificial Sequence
  ENSG00000153933_27 (sequence is synthesized)
acccagagggcatccagcctggtgtttttctgacacatggcccaggctttgtggtctttcatgacattaatctctgaaagatcagaatgtatcccccaaaataccattagctatctttga

SEQ ID NO: 440701 - DNA, 120 bp, Artificial Sequence
  ENSG00000153933_28 (sequence is synthesized)
gggtctattatgaatctgtcatccatgaattgccataaacctaagtttgcctcacctcaggcccagaccatgttttcaaagagcaacttagtaatgtatacagtagtcagtacattttat

SEQ ID NO: 440702 - DNA, 120 bp, Artificial Sequence
  ENSG00000153933_29 (sequence is synthesized)
gaaatactctattttgctaaattaacctcttgcagatctcctcaggtgatcttaaattctagtcttgagaaactttgtgagcagatctgttttcagcttctttatatacctttcatggta

SEQ ID NO: 440703 - DNA, 120 bp, Artificial Sequence
  ENSG00000153933_30 (sequence is synthesized)
agtaaccatggcagtgaggatggcagagttttgttttttttttttttaatgggccaatcatgttctgagtattatgaagtttatcctttcattcatgatcaaaattgttaaagacatcac

SEQ ID NO: 440704 - DNA, 120 bp, Artificial Sequence
  ENSG00000153933_31 (sequence is synthesized)
attttataaatacactgttaaatccactttgctgtaggttatagtttacctgttatataattcgtagtgctaattgtagtagaagcaaatcaatttaggatgttggaacgaaaataatca

SEQ ID NO: 440705 - DNA, 120 bp, Artificial Sequence
  ENSG00000153933_32 (sequence is synthesized)
caataactaatacagctttttaattgtgaaaactacaattaaaaattataattttaataccaaccataatattacactgtatttagaacaggcttatgtaaaatgccctcatttatctaa

SEQ ID NO: 440706 - DNA, 120 bp, Artificial Sequence
  ENSG00000153933_33 (sequence is synthesized)
ataagttgattttttggttattgtaatctagtaaggtttttgcatcactactggtctgtcatgaagtttttctgctggcttattcacttatttagacttcatttagggaagctatttcag

SEQ ID NO: 440707 - DNA, 120 bp, Artificial Sequence
  ENSG00000153933_34 (sequence is synthesized)
aataccatctcataaaatgtatcattatcttgtttttgcaaaattcacttactttttgggcacatttacccagcatttcaaataagtgtataggcatgtgccttgtttaagtacaattta

SEQ ID NO: 440708 - DNA, 120 bp, Artificial Sequence
  ENSG00000153933_35 (sequence is synthesized)
agattttcctgttccattttaaattgtcttgatatttaaaaaaataacttctacattctcaggaagaaatacatgaagtaaatcatatctccatgtctgtttccagatttctctaatctt

SEQ ID NO: 440709 - DNA, 120 bp, Artificial Sequence
  ENSG00000153933_36 (sequence is synthesized)
tttactatcccaatacattcctaattcctataaacgtagtggcttaaatactgaatacctggcagctcttaaagatcccttaggcagatgatgataattttcagtgtttcgtcatgttta

SEQ ID NO: 440710 - DNA, 120 bp, Artificial Sequence
  ENSG00000153933_37 (sequence is synthesized)
atagaaatcaaactgacttgtgttttaaaatacaagttgtctgctagtaaagttacatgatttaggtgtgttttaggttttctgcaacaattagctgtgaacccctaatgtagctaagtt

SEQ ID NO: 440711 - DNA, 120 bp, Artificial Sequence
  ENSG00000153933_38 (sequence is synthesized)
ataatcaaaattatttatttttatttttttagagtatgtcaaaaacatatagtgtttgctttgtgaaatacatttgcttagagttataaaatatactgtgactcagaaattgtaaagtca

SEQ ID NO: 440712 - DNA, 120 bp, Artificial Sequence
  ENSG00000153933_39 (sequence is synthesized)
actcagaaattgtaaagtcagtttgcgttgtaaaaatgaatactaccagcatgtcaaaagaaaaataatttacatttgtaatataaagtaaaattgtatttaatatatttattgaatttt

SEQ ID NO: 440713 - DNA, 120 bp, Artificial Sequence
  ENSG00000153933_40 (sequence is synthesized)
actaacttgaaaactttaaaggttatactaatttaatgattaatgtggacccaaatacataatttggccaaaaaagtcattagaatgggtaatggttttgtgtggttttccttcaaaatg

SEQ ID NO: 440714 - DNA, 120 bp, Artificial Sequence
  ENSG00000153933_41 (sequence is synthesized)
ataatattgaagcaagaaccagcattttatattgataatttttttaatatttctacccagttgaggacagtggaatataagtagatatatttaaaatatctagatatttaaaaagaaaga

SEQ ID NO: 440715 - DNA, 120 bp, Artificial Sequence
  ENSG00000153933_42 (sequence is synthesized)
aaaggttgtttatcccaatctgaattcattctcagcaacaagacagaaaaggtggtttgggttttgcttttaaacagtgtccccctgtctttttcaatttttcccttgaagcctttctct

SEQ ID NO: 440716 - DNA, 120 bp, Artificial Sequence
  ENSG00000153933_43 (sequence is synthesized)
tgttcttcagagtacgcgctgcaggctatctgcagcatcagaatgcctgggcaggctgttgaaagtatggattcctgagcccaacccttaacttaatgattccctgtctctggagatgca

SEQ ID NO: 440717 - DNA, 120 bp, Artificial Sequence
  ENSG00000153933_44 (sequence is synthesized)
acatagaaatctctgtttttattaacaagcgcctcaggcgattcttaagcatactgaaatttgaaagcttctggtctgaacctcatgtattcacctagggcttttgctaggtgggatacc

SEQ ID NO: 440718 - DNA, 120 bp, Artificial Sequence
  ENSG00000153933_45 (sequence is synthesized)
atgccgaaaaattgaattaattgtatgttcttaaaattgtttttcttctactccgctgtcctcttccctcaaaatcacttttctaaaagaactctatgaaaaacttatttgtatcatacc

SEQ ID NO: 440719 - DNA, 120 bp, Artificial Sequence
  ENSG00000153933_46 (sequence is synthesized)
caaattgatatatttgtctgaactctgttacataaaaattggtatgattcatatgtggaatcagtttttggactgtgacccatgcagtgttgggggacaaggagttgcttcaggagttag

SEQ ID NO: 440720 - DNA, 120 bp, Artificial Sequence
  ENSG00000153933_47 (sequence is synthesized)
tgcagtgcgcctccaaggggcagtgagccatggaggcgcctgccttctcactgcagtcaatgcagccacacttgtgtatactgagtgctgcttcagatctcagtagataaaataattcca

SEQ ID NO: 440721 - DNA, 120 bp, Artificial Sequence
  ENSG00000153933_48 (sequence is synthesized)
catttaaaatgattctgctattttttataaagggtttgaaagccactactataatgactttgtcacctaattgattttctactaatttttacatattcagaaacttcgtgtttttttggt

SEQ ID NO: 440722 - DNA, 120 bp, Artificial Sequence
  ENSG00000153933_49 (sequence is synthesized)
ggacagaatattttggaggtctccgtcgctgtttagaatgtggccacttggctgtttcacagtttttaaagctattttattgaatagtaaagcagtgaacttagcctttgttctttgtgt

SEQ ID NO: 440723 - DNA, 120 bp, Artificial Sequence
  ENSG00000153933_50 (sequence is synthesized)
ttctaatttaagcatatagtctatttaatttttgatatgtaaatacacatcaatacatatatatttacccatgtggccctgtgtagtcagtgcatgaggcttgcatagcccagaaaggta

SEQ ID NO: 440724 - DNA, 120 bp, Artificial Sequence
  ENSG00000153933_51 (sequence is synthesized)
cattccagggttctggggaaagaattttaaaatgccatcctctaatacagacgtttataaaacttaaatgaaatgattgggcttaaccatatgcaagaaagtctgcagaaaataaatcac

SEQ ID NO: 440725 - DNA, 73 bp, Artificial Sequence
  ENSG00000153933_52 (sequence is synthesized)
gcttaaccatatgcaagaaagtctgcagaaaataaatcacctagaaactataaatagaaatgtgctgggctaa

SEQ ID NO: 440726 - DNA, 120 bp, Artificial Sequence
  ENSG00000153933_53 (sequence is synthesized)
ctaaaaatacaaaaaaaattagccaggtacattggcacatgcctttaatcccagctaatcaggaggctgaggcacgagaattgctcgaacccaggcggcagagcttgcagtgagcggaga

SEQ ID NO: 440727 - DNA, 75 bp, Artificial Sequence
  ENSG00000153933_54 (sequence is synthesized)
agctaatcaggaggctgaggcacgagaattgctcgaacccaggcggcagagcttgcagtgagcggagatcacatg

SEQ ID NO: 440728 - DNA, 78 bp, Artificial Sequence
  ENSG00000153933_55 (sequence is synthesized)
gcggagcttgcagcgagccgagatagtgccactgcagtggggcctgggccaaagagtgagactccatctcaaaaaaaa

SEQ ID NO: 440729 - DNA, 120 bp, Artificial Sequence
  ENSG00000153933_56 (sequence is synthesized)
tctcaaaaaaaaaaaaaaagaaagaaatgtgttgctggtatcagatatcagaccaagaacacttcagtctctctaaggatgccctgagctacctcactgttaaaggacgacatcaacaca

SEQ ID NO: 440730 - DNA, 120 bp, Artificial Sequence
  ENSG00000153933_57 (sequence is synthesized)
taaaggacgacatcaacacagaatgcactaaacaggaaataagctgtaatctagagaatttccattatgtgttactttttggtgactaacatggaatgttgaaaaggaagagctggaaag

SEQ ID NO: 440731 - DNA, 120 bp, Artificial Sequence
  ENSG00000153933_58 (sequence is synthesized)
ctcagttgttttccttgttcctctgacattgtccaggcaagagggcatcctgatcagatgagtagatttggctgagaaaaaccctagagtaaggcaggcactttgtggaggtggatgatg

SEQ ID NO: 440732 - DNA, 120 bp, Artificial Sequence
  ENSG00000153933_59 (sequence is synthesized)
atggctcataaaaacgtttgttctcagtccagttcagggctctgccagcagtctttcagatctgaactgcttaaacaaaccctacagataaattggcactctgatttgtaattctgtttg

SEQ ID NO: 440733 - DNA, 120 bp, Artificial Sequence
  ENSG00000153933_60 (sequence is synthesized)
tacaagtttagagcagcctagctcgagtcctcaaccccagtcctcttagaagtgaactgattgcactggatccctaaacccacaatgttgaggacacatgtgatgactccacttgctcag

SEQ ID NO: 440734 - DNA, 120 bp, Artificial Sequence
  ENSG00000153933_61 (sequence is synthesized)
ccagctggcctcttgcactttcccctgcccaccacttgtaactaccacttaattatcttgtgttaattgcttttgttgtgttgggtctgtatttttgtggtcagtgcctgcaggcagaaa

SEQ ID NO: 440735 - DNA, 120 bp, Artificial Sequence
  ENSG00000153933_62 (sequence is synthesized)
tgtgaaagcatttggtatgttgaagatacttgcttcttttttaataaaattaaaagtgcagcacgtaagtatgatactgtgtagttttttgacacaaccatgagatacaataagcagctt

SEQ ID NO: 440736 - DNA, 120 bp, Artificial Sequence
  ENSG00000153933_63 (sequence is synthesized)
tgacttagtgtcccaaaaagtggttcttggtctacagcagggcaaacatatatgtggcaagttctgatcacatacttttagacagaaagaataaaaaattcatattgcatggcttttgta

SEQ ID NO: 440737 - DNA, 120 bp, Artificial Sequence
  ENSG00000153933_64 (sequence is synthesized)
gcctaagagcacagaatcatacacgtgtgttaggagaaacattcattctcacgcatataaactggctcctggcagagtagagcagtaagtgggatcaaaggtgaattcaccttattttca

SEQ ID NO: 440738 - DNA, 120 bp, Artificial Sequence
  ENSG00000153933_65 (sequence is synthesized)
gttggtagagtatggaaaaatgtatcacttatttgaaatacctgaatggaaacccagcctctactactgtaacttaacacttgttcttcctgagcctcaaattttctttctctgtaagaa

SEQ ID NO: 440739 - DNA, 120 bp, Artificial Sequence
  ENSG00000153933_66 (sequence is synthesized)
tgggaattaatgcccacctacgggttgcaagtgcttacaggagctgggcaagcaacgaaggtaagagttgtagagacttcggtaaactggagcacatgattcctgggaagcaggcctagt

SEQ ID NO: 440740 - DNA, 120 bp, Artificial Sequence
  ENSG00000153933_67 (sequence is synthesized)
gtaaacaatttatttttctagaaaagacagaagtttagagtatatgaaatctaatttttaagtattggttggcaactaattgactatcgtctaccataaggttatatgataattattagg

SEQ ID NO: 440741 - DNA, 120 bp, Artificial Sequence
  ENSG00000153933_68 (sequence is synthesized)
gcaggagagtgaatgcatcttaatatgcatggcagaactgtgtgtttccttccatctggattttcataaagctttctgatttatcagtaacgatctgaaaaatgtactgtggcatgtaac

SEQ ID NO: 440742 - DNA, 120 bp, Artificial Sequence
  ENSG00000153933_69 (sequence is synthesized)
atcttttattcattttattaggcattagaggaagaatattctgtagtcctgctttattctgccatctttacctggaaatccatttttataaaatttttgtaataaaaattcacttgatca

SEQ ID NO: 440743 - DNA, 120 bp, Artificial Sequence
  ENSG00000153933_70 (sequence is synthesized)
atgtggataaacaggcactcttgtgggaatataaaatggtacaacctctttagaagacatcttggcagtttcttaaaaagataaatataaatttattatatcttctagcaagtcctctac

SEQ ID NO: 440744 - DNA, 120 bp, Artificial Sequence
  ENSG00000153933_71 (sequence is synthesized)
taggaatctacccaagggaagtgaaaacatatttctcacaaacatttgcatgaaaatgttcacagcagcattattcatgatagctgaaaagcataaacagcccagctgttcatcagctga

SEQ ID NO: 440745 - DNA, 120 bp, Artificial Sequence
  ENSG00000153933_72 (sequence is synthesized)
tgagttgataaacaaaatgtgatgtagccctacaatggaataccatgaaatgacaaaaaggaacaaactactgatacgtatatattacaataaatgaacctcaaaaacatactaagtgaa

SEQ ID NO: 440746 - DNA, 120 bp, Artificial Sequence
  ENSG00000153933_73 (sequence is synthesized)
taatatgggagaaggactgttgggagaatttaggatcttgttgaatccagtccagagtcttgctttgttgccgaagctggagtgcaggggcatgatcttggctcactgtaacctctgcct

SEQ ID NO: 440747 - DNA, 120 bp, Artificial Sequence
  ENSG00000153933_74 (sequence is synthesized)
tttaaacagtggtttatggctcatgcagctggtcactgtacactagcggctagagtgggatgaggaagaaacagaaacatggctcaagatccatgagataaaacgttcacttgaaaaaag

SEQ ID NO: 440748 - DNA, 120 bp, Artificial Sequence
  ENSG00000153933_75 (sequence is synthesized)
aattccttaatcaatgaataaaaacatattcagattaatattttctaaaaatgaaatgcataagggttaagggattgtggatggtattattaaggaagacctttctaaatttggggggac

SEQ ID NO: 440749 - DNA, 120 bp, Artificial Sequence
  ENSG00000153933_76 (sequence is synthesized)
ctctgctgatgacctaaactcattttgaggaaacaagctaataaataaacatccctgagtttgtgcaagcgtggcagctttgcagtagtcatttgctgagacgatgcatccagcctccac

SEQ ID NO: 440750 - DNA, 120 bp, Artificial Sequence
  ENSG00000153933_77 (sequence is synthesized)
aacgttaatacagaggtttctaagtggtgcctgcttcatggccactgtatattttagcttttgttcctatcgattatctccttattttaaataaggaaaaatgaaatatggacaaattaa

SEQ ID NO: 440751 - DNA, 120 bp, Artificial Sequence
  ENSG00000153933_78 (sequence is synthesized)
cttttcccttcagccgcaaaactgatgggtcacaggttttgtactatgaatgtgcagtgaaaacaagtgtcattccaaggcagcacttttatgtcttttgctaatatagctgttggtacc

SEQ ID NO: 440752 - DNA, 120 bp, Artificial Sequence
  ENSG00000153933_79 (sequence is synthesized)
atagcgaaatatactcaaaaagaacactgaaaggaatattccttttgacgcttggtctttcaggacatgtagaatcttagataagtgaccttgattaagccaagaatattttaatgtctt

SEQ ID NO: 440753 - DNA, 120 bp, Artificial Sequence
  ENSG00000153933_80 (sequence is synthesized)
ttatatacacactggacaacacatttttgtccttaaatattgtttgaaaataggtgaagatgtcctttgctgatgttggaaattggtaaaggagaatgctgctttgcaaatgatctattc

SEQ ID NO: 440754 - DNA, 120 bp, Artificial Sequence
  ENSG00000153933_81 (sequence is synthesized)
taactcagttcacagttgagaaaattaaagcccgttaggtccactctggtaaaataggactggcctccaggatttccagctctggactaacacttagcctcctttgagccttaagtctgg

SEQ ID NO: 440755 - DNA, 120 bp, Artificial Sequence
  ENSG00000153933_82 (sequence is synthesized)
acatcttcattgtaatgggttttatttctgacaagtagaaaggcgcataaacatgcttaagaaatgaaataggcagtaaataggaagctgctttttaatttttttaattttttttgcaga

SEQ ID NO: 440756 - DNA, 120 bp, Artificial Sequence
  ENSG00000153933_83 (sequence is synthesized)
aattctttcattagcatgaacgctattataatgtcaatacctgtttttaagtcttattttaaataattttacacattatcaaagaggcttaagaataaatgttcaaaataatgtattcta

SEQ ID NO: 440757 - DNA, 120 bp, Artificial Sequence
  ENSG00000153933_84 (sequence is synthesized)
gacaactacaaagttttgtaaccatgcatttttatttggtatctttaaaaattaaatgctgtccttctggcatcagtgagagccaagttagcagggactttaaataaatttcataatgaa

SEQ ID NO: 440758 - DNA, 120 bp, Artificial Sequence
  ENSG00000153936_0 (sequence is synthesized)
gcagccgcagcgccggtggaggggcgcgcggccgcgagcaaaggagggagggaaggaaggaagagagggaggcgggcaagcaggcgggcgcgggggtcggggactgaggcagtagaggga

SEQ ID NO: 440759 - DNA, 120 bp, Artificial Sequence
  ENSG00000153936_1 (sequence is synthesized)
ggcgagagcccggcagccgcttcgcgctgtttgctgcgcgggcttttggagggggcggccgtttagtcggctgaggagaagcggacaccagcggcgttggtgatagcgcctgggggaggg

SEQ ID NO: 440760 - DNA, 120 bp, Artificial Sequence
  ENSG00000153936_2 (sequence is synthesized)
ggactggagaggcgagaaggggggtcgctgcggtggttctctcgctgtcgctctctctttgcctcgctcccggctcggcgggctcctcccggcgtctctctcgcctccggggtcccgctc

SEQ ID NO: 440761 - DNA, 120 bp, Artificial Sequence
  ENSG00000153936_3 (sequence is synthesized)
cccgccccccgcggtatgtcttgatcccgagcagcgggtttcatggggctcctcaggattatgatgccgcccaagttgcagctgctggcggtggtggccttcgcggtggcgatgctcttc

SEQ ID NO: 440762 - DNA, 120 bp, Artificial Sequence
  ENSG00000153936_4 (sequence is synthesized)
ttggaaaaccagatccagaaactggaggagtcccgctcgaagctagaaagggctattgcaagacacgaagtccgagaaattgagcagcgacatacaatggatggccctcggcaagatgcc

SEQ ID NO: 440763 - DNA, 120 bp, Artificial Sequence
  ENSG00000153936_5 (sequence is synthesized)
actttagatgaggaagaggacatggtgatcatttataacagagttcccaaaacggcaagcacttcatttaccaatatcgcctatgacctgtgtgcaaagaataaataccatgtccttcat

SEQ ID NO: 440764 - DNA, 120 bp, Artificial Sequence
  ENSG00000153936_6 (sequence is synthesized)
atcaacactaccaaaaataatccagtgatgtcattgcaagatcaggtgcgctttgtaaagaatataacttcctggaaagagatgaaaccaggattttatcatggacacgtttcttacttg

SEQ ID NO: 440765 - DNA, 120 bp, Artificial Sequence
  ENSG00000153936_7 (sequence is synthesized)
gattttgcaaaatttggtgtgaagaagaaaccaatttacattaatgtcataagggatcctattgagaggctagtttcttattattactttctgagatttggagatgattatagaccaggg

SEQ ID NO: 440766 - DNA, 120 bp, Artificial Sequence
  ENSG00000153936_8 (sequence is synthesized)
ttacggagacgaaaacaaggagacaaaaagacctttgatgaatgtgtagcagaaggtggctcagactgtgctccagagaagctctggcttcaaatcccgttcttctgtggccatagctcc

SEQ ID NO: 440767 - DNA, 120 bp, Artificial Sequence
  ENSG00000153936_9 (sequence is synthesized)
gaatgctggaatgtgggaagcaggtgggctatggatcaagccaagtataacctaattaatgaatattttctggtgggagttactgaagaacttgaagattttatcatgttattggaggca

SEQ ID NO: 440768 - DNA, 120 bp, Artificial Sequence
  ENSG00000153936_10 (sequence is synthesized)
gcattgccccggtttttcaggggtgctactgaactctatcgcacaggaaagaaatctcatcttaggaaaaccacagagaagaaactccccactaaacaaaccattgcaaaactacagcaa

SEQ ID NO: 440769 - DNA, 120 bp, Artificial Sequence
  ENSG00000153936_11 (sequence is synthesized)
tctgatatttggaaaatggagaatgagttctatgaatttgcactagagcagttccaattcatcagagcccatgccgttcgagaaaaagatggagacctctacatcctcgcacaaaacttt

SEQ ID NO: 440770 - DNA, 120 bp, Artificial Sequence
  ENSG00000153936_12 (sequence is synthesized)
ttctatgaaaagatttaccctaagtcgaactgagtataaggtgtgactattggattcttgaactaaaatttgaccctgtcttcacctttgttctcagctccacagtctggattgctgaca

SEQ ID NO: 440771 - DNA, 120 bp, Artificial Sequence
  ENSG00000153936_13 (sequence is synthesized)
gtaggtgtatatgacaatttgtattgagccaaattaggaaacagacagtaacgtcaaggaagtagatactggctggcattgtcagtgttctaagtttcaggcatttttatttttcctggc

SEQ ID NO: 440772 - DNA, 120 bp, Artificial Sequence
  ENSG00000153936_14 (sequence is synthesized)
taaacgttggtgaaagttataacctcctgcctgggagaaaatatacatcacctaaaatgaacttatggcaggtctaatcaaaaggctaaatacaatttcagaaaaggttctgatactctt

SEQ ID NO: 440773 - DNA, 120 bp, Artificial Sequence
  ENSG00000153936_15 (sequence is synthesized)
gtttttgataaagcattttttcaactaaccatgaattaagatgagtccatttgcctcttctgccttcactgagggtttgggttatacacctctactgaattgtgttaataactgtttggc

SEQ ID NO: 440774 - DNA, 120 bp, Artificial Sequence
  ENSG00000153936_16 (sequence is synthesized)
agtgtgtactttgtttttgtgagtcatgtctcatgaaatttattggaatgtttaatcatatttgctaagaaatgtttctgctgtagttggatttgcccatatttatgtaggtggttttaa

SEQ ID NO: 440775 - DNA, 120 bp, Artificial Sequence
  ENSG00000153936_17 (sequence is synthesized)
ttttttaaatggtgattagtgttaaaaatcaatttaaatcatgactaatatggtaaaaagataaagcatcaaagcagtatttctcattcctgcctcctcaatatctaatactgggaagat

SEQ ID NO: 440776 - DNA, 120 bp, Artificial Sequence
  ENSG00000153936_18 (sequence is synthesized)
acttcaaagaatattgagattgtctgaagttttagttaagattttcacacattaatatcaaaaaagtaagtttagtatttgtttctccatgggttatttgtaaagctgtaaactgagata

SEQ ID NO: 440777 - DNA, 120 bp, Artificial Sequence
  ENSG00000153936_19 (sequence is synthesized)
tcggtgactccgtattatgactccattagtgagctgtggtatgggtaggattttcctacttcttctgtacttttacctgtagactatttttactaaggtgctttataatgtgttttaaag

SEQ ID NO: 440778 - DNA, 120 bp, Artificial Sequence
  ENSG00000153936_20 (sequence is synthesized)
cattgcatttacaaaacaaggaaaatgctgtaaatattgcatattttatgtatttggaccaaaaggttacaagtaattagacaaaagtggttttgcaccaattttatgtcaagtaaaacc

SEQ ID NO: 440779 - DNA, 120 bp, Artificial Sequence
  ENSG00000153936_21 (sequence is synthesized)
atcagacctactgttcttgtatttctcatttaactttactgttaagacatcactgaaatgaacttcagtaagctttcaattttgatacacagttcattattcataacttgaggcagtaat

SEQ ID NO: 440780 - DNA, 120 bp, Artificial Sequence
  ENSG00000153936_22 (sequence is synthesized)
tacagtggaatgagtactggacaaggagtcaaaaaacttgatttcaggtcctagctctagcacttacagctgtgtgatcttgggcaagtcacttaacctctctttgcctcaatttcctca

SEQ ID NO: 440781 - DNA, 120 bp, Artificial Sequence
  ENSG00000153936_23 (sequence is synthesized)
tcttgaaatgaggataataatacctgctgtacctacctcacagggctgttgtgaggattaaatgagatggcatgtgaaagcactttgaaaattgtaaagcgctatgtaaatgtaaggtat

SEQ ID NO: 440782 - DNA, 120 bp, Artificial Sequence
  ENSG00000153936_24 (sequence is synthesized)
tatagaaacatctttaacatatagtttcataccattcattttttaacaaagaaagggaaaagtctgcttgtaagctggttgaaaaagttaatcttgatataaatttgtgtttgataaata

SEQ ID NO: 440783 - DNA, 120 bp, Artificial Sequence
  ENSG00000153936_25 (sequence is synthesized)
tcctctcagtgttttatcttccatgtttcaacaactattgaaatatgaaatgcctgtgaactcttaaagcttcatgagcagctgcttgagttcaggaagttcactgttagaaataggctt

SEQ ID NO: 440784 - DNA, 120 bp, Artificial Sequence
  ENSG00000153936_26 (sequence is synthesized)
tgttagctgactagggtcagggaaacttttctcttcaaatttgaaagctgtttctgttttcattttacattattattcagaaatggtagctattctatacctatggtttaagtaaatatt

SEQ ID NO: 440785 - DNA, 120 bp, Artificial Sequence
  ENSG00000153936_27 (sequence is synthesized)
tctgaataaggcttcaccatactgtaagcattttaggtagattgccttaaaggttatgggagggcatgagggaacacttcttatgagaaaacatttataaacaaaagaaacatttataaa

SEQ ID NO: 440786 - DNA, 120 bp, Artificial Sequence
  ENSG00000153936_28 (sequence is synthesized)
gcaccctttcctcacaataatataaaaatattaaaagaacataggcaggctttttttaaatttggcttttttctttccttttttcaaattgacttttataggtatttcctgaaagtgtat

SEQ ID NO: 440787 - DNA, 120 bp, Artificial Sequence
  ENSG00000153936_29 (sequence is synthesized)
acaaattatttcctcgcccaaaataaagcaccacttcaaggtgtggtttgacattacatgctaatgaacaaacccagtatgcaagttattcttgcaccacatgctcaaatcttcttgagg

SEQ ID NO: 440788 - DNA, 120 bp, Artificial Sequence
  ENSG00000153936_30 (sequence is synthesized)
tgcattaactcttttaggtaactagagcagtacttggtgaactagatcaggaggtcagtaaactttctgtggaagggccagagagtaaatattttaggctttgcagcccatacggtctct

SEQ ID NO: 440789 - DNA, 120 bp, Artificial Sequence
  ENSG00000153936_31 (sequence is synthesized)
ttgcagcccatacggtctctgtcacagctagtcaaccctgccattttaccacaaaagcagcaatagacattatgtaaacaaatgagcacagttatgttccaataaaactttatttacaaa

SEQ ID NO: 440790 - DNA, 120 bp, Artificial Sequence
  ENSG00000153936_32 (sequence is synthesized)
cagaccatgggcaaccaaccattgcactggccaaatcattatttatggagaaatcctctttgtgtctctactctagatgcctaaaagagtttatatacttctaaaagctcctaacttata

SEQ ID NO: 440791 - DNA, 120 bp, Artificial Sequence
  ENSG00000153936_33 (sequence is synthesized)
tccaaagaattgctttctgattcgtgtagtctctcccacagattcataaacttttatgacttatattgtttccaggtgggcatggtttatttcccagtttaacagttcagaataggggca

SEQ ID NO: 440792 - DNA, 120 bp, Artificial Sequence
  ENSG00000153936_34 (sequence is synthesized)
tttattttatcatattttagggtgggttaggagtatcctttctggagactgagaaaggggtgtatttaattccatcaggtccagtacagtactaggagtcataatactttataatcaatt

SEQ ID NO: 440793 - DNA, 120 bp, Artificial Sequence
  ENSG00000153936_35 (sequence is synthesized)
aaataaatagaaccactgagacaataatgtatttttttaaagtggcaaatgtggttttcttttttcagcctttgcgctttttcagtattttgaccatagggagataatttttttataata

SEQ ID NO: 440794 - DNA, 120 bp, Artificial Sequence
  ENSG00000153936_36 (sequence is synthesized)
caaaagtaaccacttggaattttaaagataatgttatgtgtgtatgtgaaatatatatacatatatatatatatgtttatttcctaaaagaagaaaagatacctttctgttcaacttgta

SEQ ID NO: 440795 - DNA, 120 bp, Artificial Sequence
  ENSG00000153936_37 (sequence is synthesized)
tcaactcctcttttctaattgctgtgaaatggcaactgttgataaattattgtgattgttttaaaatctaatgggaagtaaaatatattttgattttacccagcttaatctgtaaagtag

SEQ ID NO: 440796 - DNA, 120 bp, Artificial Sequence
  ENSG00000153936_38 (sequence is synthesized)
cacttaaatatatctgatagcaacacttaagatattgcatggggattactttcctatcatccatatgcatttgtgcaacttcaaacatattgggtgcttctgaattcctgatgattggat

SEQ ID NO: 440797 - DNA, 120 bp, Artificial Sequence
  ENSG00000153936_39 (sequence is synthesized)
ttaagctattgaaaattggataatttaaacttaatgatttttataattttctgatcttaaaatttggttaatgcctataatctgttgctttttctcaatatgtgtcctattggaaattcc

SEQ ID NO: 440798 - DNA, 120 bp, Artificial Sequence
  ENSG00000153936_40 (sequence is synthesized)
tcaaatcgttggtgccatcagtgatttacaaacaatattttgatattgcagatgacttgcttactgtatttgcattgttagaaaacagtttgtagacaatgattcttttttaataaaatc

SEQ ID NO: 440799 - DNA, 120 bp, Artificial Sequence
  ENSG00000153936_41 (sequence is synthesized)
aaataattctaaaagtgctagagaatttaactaaaagctggttcccaaatgcatagctggcattttaatttaaattcaaatctacatagagaacatctgtgtaaatcatctaactggatt

SEQ ID NO: 440800 - DNA, 120 bp, Artificial Sequence
  ENSG00000153936_42 (sequence is synthesized)
tttccattggtcattcccaaacacacctatggtcctagaatccttaagagaagcaccctgtaaccttttatgtggtttgcctttaagaggcccaggtgcttctcctttatgatttgagtt

SEQ ID NO: 440801 - DNA, 120 bp, Artificial Sequence
  ENSG00000153936_43 (sequence is synthesized)
ggcctcttcataaattagtgctgtttactttcagaggaagcagagaagttgctgttatgtttttgcatccgtttaccctatgcaaagttgctgtatgatgccaactaaactactctttag

SEQ ID NO: 440802 - DNA, 120 bp, Artificial Sequence
  ENSG00000153936_44 (sequence is synthesized)
gcagccttctgaggagaaaagcaaccctgtttcaaatccactgccaattcagctcctctggagtggagctttctgatttcttggagcaggaattttagagattgaaatgaatgatcattt

SEQ ID NO: 440803 - DNA, 120 bp, Artificial Sequence
  ENSG00000153936_45 (sequence is synthesized)
agtcagatttatcctgtaatttcatgcagctttgtggcctttgcagtactatttataaaatggaccctgatggtgatgaactctttagaacgcattactgttaagcctgtgttgagacat

SEQ ID NO: 440804 - DNA, 120 bp, Artificial Sequence
  ENSG00000153936_46 (sequence is synthesized)
tgatgctgtctatctcattttttagacagtttttgtagctttctattgagagtcaggtatgtgagcatctctgaagcagtgttgaatgtaattttcggaaacatggattgtgtattttga

SEQ ID NO: 440805 - DNA, 120 bp, Artificial Sequence
  ENSG00000153936_47 (sequence is synthesized)
cttttattttataaatacacagctcaacagtgccttttttttccctcatagtcctgttggaagatgctcactactttctctcttctctctccctgccctcccccactccattcagttgat

SEQ ID NO: 440806 - DNA, 120 bp, Artificial Sequence
  ENSG00000153936_48 (sequence is synthesized)
tcatttatgcaaattctgtttccaacttgaaaccattttgtcacatctgttggagagataatcactccttttccttaacattctgccagctttctgatgttgaagtgtttcagttgacta

SEQ ID NO: 440807 - DNA, 120 bp, Artificial Sequence
  ENSG00000153936_49 (sequence is synthesized)
cctgatgcaaaagctataaaataaacagtgggaaggggaaaaattggtgtcctgttttaatattttcttttgtagccttgacactgatggacattttccaagctgactcagtgttcagtg

SEQ ID NO: 440808 - DNA, 120 bp, Artificial Sequence
  ENSG00000153936_50 (sequence is synthesized)
tcaacttaactctcagatagtgttgccatcaagaaagcatgcaacatcattggtttctaatgattttatggcttgtgacaatattttatctggactgacatgcctctgctgcttttgctt

SEQ ID NO: 440809 - DNA, 120 bp, Artificial Sequence
  ENSG00000153936_51 (sequence is synthesized)
tgtacttcattgctggtaataaaatttcagatggaaaacttacaaaatatatacttaattagaagaaaaaaatagagaaagggctattagaattaaaaaaatttgaaagtaacttaatct

SEQ ID NO: 440810 - DNA, 120 bp, Artificial Sequence
  ENSG00000153936_52 (sequence is synthesized)
aacatttatggcacagtttggacatatccataattttttttgggaacacacatttctgattttttttttcccccttaaagaagaaagtctcaattccattgattttcaattcttagccac

SEQ ID NO: 440811 - DNA, 120 bp, Artificial Sequence
  ENSG00000153936_53 (sequence is synthesized)
tggctcattgctttgagcaatgcttgattgattctatttatattatatgatattgggttgataaaataccagttcaatgatgagttttcttaacagaatttggtttgtacttgcagtggc

SEQ ID NO: 440812 - DNA, 120 bp, Artificial Sequence
  ENSG00000153936_54 (sequence is synthesized)
tgaacaaagagcatggcttgagaatcaaagggatctgcatttagcaatgtgatgtcagtaaatggacataacaggattgttgtaaaggttgggcatgatgtatgcaaagtactggccagg

SEQ ID NO: 440813 - DNA, 120 bp, Artificial Sequence
  ENSG00000153936_55 (sequence is synthesized)
gtagactaataactgatggcatttatatgctgtgctggaatattgttaccaagctgatgtgccgttctcaccctgcagaatactggttttgtcatttcataaatgatatttttataaata

SEQ ID NO: 440814 - DNA, 120 bp, Artificial Sequence
  ENSG00000153936_56 (sequence is synthesized)
ctatggctgtagaaaaataacagtactgctcccatgaaaatctgattttcagcagtgtgaacctgcccagaaggaactgatggtgagaggttgaggaggaagaggaggagttggtcttgc

SEQ ID NO: 440815 - DNA, 120 bp, Artificial Sequence
  ENSG00000153936_57 (sequence is synthesized)
tatcatccttattatctctgtaatctgtgtttcatttcacaagggctagatatagggaaatcggtgaaagactagactaaaaataacatgtaattcagtaatatctagttttgcagttac

SEQ ID NO: 440816 - DNA, 120 bp, Artificial Sequence
  ENSG00000153936_58 (sequence is synthesized)
ttttaaatgcatttaaaagattcctcatgtagagtgatatcctaatatccttgcattgttttctgagatgccggtttttagtatttcttatttttggtgttatgttttgctgtattccag

SEQ ID NO: 440817 - DNA, 120 bp, Artificial Sequence
  ENSG00000153936_59 (sequence is synthesized)
cagagctcttagagactgggggtgggggtgggtgtcataaatcttattttgtccaaagcttactgttttagctattcatgttaaattaagaaaaggcttagtgggttaaaattcacctgg

SEQ ID NO: 440818 - DNA, 120 bp, Artificial Sequence
  ENSG00000153936_60 (sequence is synthesized)
ttttactgttaaactgattttgactttaagagaagccaaggttatggctgtggtttagtttgctagtaaatatcaagtggaaaataaagatactttaataagaactgtatttcctcagaa

SEQ ID NO: 440819 - DNA, 120 bp, Artificial Sequence
  ENSG00000153944_0 (sequence is synthesized)
gtgcgaggcagcggggctgagctaagccgagcccacgtgtgacggctctcgccgctgccccggctccgccgctcgcagagagattcggaggagcccgggcgggggggaggaggaggggga

SEQ ID NO: 440820 - DNA, 120 bp, Artificial Sequence
  ENSG00000153944_1 (sequence is synthesized)
ggagggagcggagatctcggggctcggagccggccgccgctccgctccgatcgctgtggggcttggttttttgggggtgggggggcgggggggctcagatatggaggcaaatgggagcca

SEQ ID NO: 440821 - DNA, 120 bp, Artificial Sequence
  ENSG00000153944_2 (sequence is synthesized)
aggcacctcgggcagcgccaacgactcccagcacgaccccggtaaaatgtttatcggtggactgagctggcagacctcaccagatagccttagagactattttagcaaatttggagaaat

SEQ ID NO: 440822 - DNA, 120 bp, Artificial Sequence
  ENSG00000153944_3 (sequence is synthesized)
tagagaatgtatggtcatgagagatcccactacgaaacgctccagaggcttcggtttcgtcacgttcgcagacccagcaagtgtagataaagtattaggtcagccccaccatgagttaga

SEQ ID NO: 440823 - DNA, 120 bp, Artificial Sequence
  ENSG00000153944_4 (sequence is synthesized)
ttccaagacgattgaccccaaagttgcatttcctcgtcgagcgcaacccaagatggtcacaagaacaaagaaaatatttgtaggcgggttatctgcgaacacagtagtggaagatgtaaa

SEQ ID NO: 440824 - DNA, 120 bp, Artificial Sequence
  ENSG00000153944_5 (sequence is synthesized)
gcaatatttcgagcagtttggcaaggtggaagatgcaatgctgatgtttgataaaactaccaacaggcacagagggtttggctttgtcacttttgagaatgaagatgttgtggagaaagt

SEQ ID NO: 440825 - DNA, 120 bp, Artificial Sequence
  ENSG00000153944_6 (sequence is synthesized)
ctgtgagattcatttccatgaaatcaataataaaatggtagaatgtaagaaagctcagccgaaagaagtcatgttcccacctgggacaagaggccgggcccggggactgccttacaccat

SEQ ID NO: 440826 - DNA, 120 bp, Artificial Sequence
  ENSG00000153944_7 (sequence is synthesized)
ggacgcgttcatgcttggcatggggatgctgggatatcccaacttcgtggcgacctatggccgtggctaccccggatttgctccaagctatggctatcagttcccaggcttcccagcagc

SEQ ID NO: 440827 - DNA, 120 bp, Artificial Sequence
  ENSG00000153944_8 (sequence is synthesized)
ggcttatggaccagtggcagcagcggcggtggcggcagcaagaggatcaggctccaacccggcgcggcccggaggcttcccgggggccaacagcccaggacctgtcgccgatctctacgg

SEQ ID NO: 440828 - DNA, 120 bp, Artificial Sequence
  ENSG00000153944_9 (sequence is synthesized)
ccctgccagccaggactccggagtggggaattacataagtgcggccagcccacagccgggctcgggcttcggccacggcatagctggacctttgattgcaacggcctttacaaatggata

SEQ ID NO: 440829 - DNA, 120 bp, Artificial Sequence
  ENSG00000153944_10 (sequence is synthesized)
ccattgagcaggtgctttcgttgccatctcactctgagagcatacctggatgtccaggcaagactgggcgaagtttctgagtggccctttgtttaggtgatgtcctcagacctggacccc

SEQ ID NO: 440830 - DNA, 120 bp, Artificial Sequence
  ENSG00000153944_11 (sequence is synthesized)
caccagcctcactccccatcccaaccagagatggctcacttcggatcgagggttgactacatctcatcatctcacgaatctgctgtaatataagacaacagcttttaaatgtgtatataa

SEQ ID NO: 440831 - DNA, 120 bp, Artificial Sequence
  ENSG00000153944_12 (sequence is synthesized)
cccatgatttcggttttgttttgttttgtttttcttgatggtttccctctccctccctctcttcccattctccttttaaatctctttgaatcacatttggtagtgattttgacttagtcc

SEQ ID NO: 440832 - DNA, 120 bp, Artificial Sequence
  ENSG00000153944_13 (sequence is synthesized)
agtagtcacatagctttaatatctagttcaaagctaaccatagtataattgttatattaaggagttattttttcttaaaacatttttttttgcttgttttggttctgttctcacttttaa

SEQ ID NO: 440833 - DNA, 120 bp, Artificial Sequence
  ENSG00000153944_14 (sequence is synthesized)
aggatgctgagatggtaatatgactctccatattttggtaccaattctgagactgtatgaattttcaggtggaactttagcacacactgaagcaaagttgtgaagtgcagggcgggaggt

SEQ ID NO: 440834 - DNA, 120 bp, Artificial Sequence
  ENSG00000153944_15 (sequence is synthesized)
gggcgtgagctttctattttgcgttgtagaagaagtgagatgtagtaagctaattaacagactttctagcagttctttttgtgatgtctctttgttaatctgagtctatctattttcggc

SEQ ID NO: 440835 - DNA, 120 bp, Artificial Sequence
  ENSG00000153944_16 (sequence is synthesized)
aataaggtaaggacgacagtgttttgagtgtcctccttttctataagtgctttttttctgttgaaagaggtgatattataaggttttttgaaattgtgaattctaaaaaagaaatgttgt

SEQ ID NO: 440836 - DNA, 120 bp, Artificial Sequence
  ENSG00000153944_17 (sequence is synthesized)
aaatacaattccattaactacatagaaactattaagaaagagagaatcaaaaatatttttgtgagggagtcggtcccaggcagtttgatgctctgtggaaggaggcgggaagggaacgtt

SEQ ID NO: 440837 - DNA, 120 bp, Artificial Sequence
  ENSG00000153944_18 (sequence is synthesized)
ggccaagtcagttactgagatgaagatcgcccagctgccaggaccaccccaggacaagttagagcactgtttagctcctttgtctgtgtgatagacctaagaactgtattagtgttgtac

SEQ ID NO: 440838 - DNA, 120 bp, Artificial Sequence
  ENSG00000153944_19 (sequence is synthesized)
cagcctattaacctcttgtctgtgcacagcttcaaatgttaccgtctagttagatttttatttaaaatatgaaaaactgcttttcccaagatgttttttaaaaacaaagctacaatttta

SEQ ID NO: 440839 - DNA, 120 bp, Artificial Sequence
  ENSG00000153944_20 (sequence is synthesized)
atatttaacatatttaaagtttcaaagcacacctgtttggcttgggtgggggtggggtgggggggacattctttttcagtcttaatttttaaatatttgatcattttctattgtccaatc

SEQ ID NO: 440840 - DNA, 120 bp, Artificial Sequence
  ENSG00000153944_21 (sequence is synthesized)
atttcagcacctccaaaggtccctaggacactttgcctctcttctccccctgccccccaccctgctcccacatctgggggcccatgggccaggagtggataagcctgcattaatacaacc

SEQ ID NO: 440841 - DNA, 120 bp, Artificial Sequence
  ENSG00000153944_22 (sequence is synthesized)
tttctccattcactttctatttacaaattaggaaagcaaccttttggtttatatatattttttttaatacctcagtgctgcaagtatcaccagagaggctatggaagaatttttttttaa

SEQ ID NO: 440842 - DNA, 120 bp, Artificial Sequence
  ENSG00000153944_23 (sequence is synthesized)
tttattgtagatgtaaacagaattttaaaaataaaaagtataaacatcactgcactgtgactggtgggaaaaactgacagtttcctctttgcacatgtttaacatttggctgttataata

SEQ ID NO: 440843 - DNA, 120 bp, Artificial Sequence
  ENSG00000153944_24 (sequence is synthesized)
tatggtcctcggttggggaaagatacttatgatgaaggatattttttaatttaacttttttttaaatattggtaataggtcggcaacagcaactatagaagtacaactcaatagatggca

SEQ ID NO: 440844 - DNA, 120 bp, Artificial Sequence
  ENSG00000153944_25 (sequence is synthesized)
ttaaaacatattgtagtgtggatatatattttttcttttttaaaatgtgatattgacgttttattaatattttttaaattgttacgtttataaatttggtacttaaggcacagccagtat

SEQ ID NO: 440845 - DNA, 120 bp, Artificial Sequence
  ENSG00000153944_26 (sequence is synthesized)
ttattataaagagctgctgcactcctatttttataaattttactaacaaagtagactaatgtagacattcacagacatggtagggcaaaagcatcttcaaactaaagactccaaaatgct

SEQ ID NO: 440846 - DNA, 120 bp, Artificial Sequence
  ENSG00000153944_27 (sequence is synthesized)
aactcagaaagaaagaaaaaacccgttttcaattctaatgaaacagcaacaacattttttttaattaaaaaaaaaatcatgttctttgtttttctaataaaatgttaggttgtttggtga

SEQ ID NO: 440847 - DNA, 120 bp, Artificial Sequence
  ENSG00000153944_28 (sequence is synthesized)
ggtttttttgttgtttttttcctttctttgtttcttttcttttcccccaaacaaccagattaaatgctgagcgcttttaaaatatcaaaacttgttcaagtcataaaacaacaaaacata

SEQ ID NO: 440848 - DNA, 120 bp, Artificial Sequence
  ENSG00000153944_29 (sequence is synthesized)
aaaaaaaaaaagaaagaaaaaatagtaaattcccagaaattcagtgtttagacgagggaatttaattcctattttgtccatgttggtgatgtactgtacttcccttccttttctctgcat

SEQ ID NO: 440849 - DNA, 120 bp, Artificial Sequence
  ENSG00000153944_30 (sequence is synthesized)
ttttctctgcatcccccatcacctcatagaagactctttgttgatcattgtatgttaataatgtataaaatggctatcttgtaagcgtgctgtcctggtactagtgtagcgacttttttt

SEQ ID NO: 440850 - DNA, 120 bp, Artificial Sequence
  ENSG00000153944_31 (sequence is synthesized)
ctcctctttcttctagtacatattgataggtataacataattaaggtttaaaaaaaattagacatagttattcagatttaggaccagtaaggatagaactttctcttatttatgaaaaaa

SEQ ID NO: 440851 - DNA, 120 bp, Artificial Sequence
  ENSG00000153944_32 (sequence is synthesized)
aatgctaataattttggggcagttttttcctttaattatttttttcaatttcaagtttaattttattttagctgatctgatgtggtttcaactaacccaaggtctcaccatgttaaaatg

SEQ ID NO: 440852 - DNA, 120 bp, Artificial Sequence
  ENSG00000153944_33 (sequence is synthesized)
ccggcggactctacggcgttttgtagatccccccccccccacccactgtgaaggggtgccatactaccttaaatgctaatgctagatatgcaaaactggatttttttaatttatttttta

SEQ ID NO: 440853 - DNA, 120 bp, Artificial Sequence
  ENSG00000153944_34 (sequence is synthesized)
aaagagggaggcatggtatattaaaatgattttactaagagaaaaaatatttttttaagaatgctcagaagaaattgataatctgtgtgaatatgttttagatgtttatataccttttga

SEQ ID NO: 440854 - DNA, 120 bp, Artificial Sequence
  ENSG00000153944_35 (sequence is synthesized)
agagacccagtagcccatagcacaaatcttgtggaaatccgatatgttttaatgtggctacctaggtttaaggttcacgttagtccccccattccatctagaagtccattttgaaagatt

SEQ ID NO: 440855 - DNA, 120 bp, Artificial Sequence
  ENSG00000153944_36 (sequence is synthesized)
tttgtaaattcttttaacactgatgtttcagcctcgtctttgtttcagttaagctcaatggcgaacatgggaaccacctttcgccttccctgggggagaaaccctcttggctgatggctt

SEQ ID NO: 440856 - DNA, 120 bp, Artificial Sequence
  ENSG00000153944_37 (sequence is synthesized)
ttccccggaattatcaaacagccaccgggtgactttctggcttccagatccatctgcctgagacccccgaactcctctcctcccaagcagaggcgagtgagtggcattagctcccggacc

SEQ ID NO: 440857 - DNA, 120 bp, Artificial Sequence
  ENSG00000153944_38 (sequence is synthesized)
cattcccggtcctagctgggcatggggctgacggagatgaccaagccttggtctgctctctagcagcttccacagacttggctcgtggccttccttatatccactgggaacaaacagcct

SEQ ID NO: 440858 - DNA, 120 bp, Artificial Sequence
  ENSG00000153944_39 (sequence is synthesized)
cgcgctctataccaaacagcctcgcgctctatcccagtcgcccattagcttgattcaaacaaagccccagcaggcctttgcgtttttatccttcataaccttcatcttaatttgaacttg

SEQ ID NO: 440859 - DNA, 120 bp, Artificial Sequence
  ENSG00000153944_40 (sequence is synthesized)
tagcttggactttaaggtagcatggctctattgctgtcaatttactgtttcactgcacagcaatcacagccagtgaatgttacacacatcttgctagactagtataaaaatcattgggta

SEQ ID NO: 440860 - DNA, 120 bp, Artificial Sequence
  ENSG00000153944_41 (sequence is synthesized)
attgttggttctaatgacctgaaaggtgttcagtttttgttcttggttttgttttgtttttgatttcttgggggtgggttttgcttgttgttccttttcatttgggggtttttggggaaa

SEQ ID NO: 440861 - DNA, 120 bp, Artificial Sequence
  ENSG00000153944_42 (sequence is synthesized)
aaatttatttttggttccaaatagaaaaacaaaacctattttgatctttagtgcaaacgagggctagggacttagcctcctccaccacctccacactgcttcattctgccattcactcac

SEQ ID NO: 440862 - DNA, 120 bp, Artificial Sequence
  ENSG00000153944_43 (sequence is synthesized)
tgcagcatattcaagaataaagcaatatcgtttactacattttttattgaaggtcagccatgctttctgtattatattgcatatgaaattgtttacaaaagaaacactaactcatacttc

SEQ ID NO: 440863 - DNA, 120 bp, Artificial Sequence
  ENSG00000153944_44 (sequence is synthesized)
tctttattggttgcaagtggcacgcaggaacagagggagagtggggggctggtgggggaggggagatttttttttttttttcttgaatgtgcttcgcaagccaggctatcttccaaggaa

SEQ ID NO: 440864 - DNA, 120 bp, Artificial Sequence
  ENSG00000153944_45 (sequence is synthesized)
ggcagacagtgggagagcagagggactgactgcaggcaagcacattgaagaaagacactggcgggtttccccaccctcaccccaaagcagaaaactagcagacgtcagctcagccccgtc

SEQ ID NO: 440865 - DNA, 120 bp, Artificial Sequence
  ENSG00000153944_46 (sequence is synthesized)
ctgggcacagacactacacaaggagacgctggaagttaagcaatactttaatactgtaatatgtttgttttctttttctttcttttttttctaccaaaaaaaagtaagtaaactaaaaca

SEQ ID NO: 440866 - DNA, 120 bp, Artificial Sequence
  ENSG00000153944_47 (sequence is synthesized)
caaaaacatataaataaaatccatccctcttgtcggggacctgcaggggggcaaccttaatccaaacacctggctatcaaataatcagaatgtattgtctcagacaggatttcagttccg

SEQ ID NO: 440867 - DNA, 120 bp, Artificial Sequence
  ENSG00000153944_48 (sequence is synthesized)
ggaggcaggggcatgatgggggagggggccggaggctgagagacaaaagttccagagcctccctcgaaggttctctactactgtattctgtacataatgtaccatcccatgtggaatctg

SEQ ID NO: 440868 - DNA, 120 bp, Artificial Sequence
  ENSG00000153944_49 (sequence is synthesized)
tgagtgtcctcttaagtagcgtgggctagccaatctgccgttcatggtgtattgtaaactccgaattccatatgtaataggatgcaagtctaagcgtttcatgtggacataaatgtatct

SEQ ID NO: 440869 - DNA, 120 bp, Artificial Sequence
  ENSG00000153944_50 (sequence is synthesized)
aaataaaactttccctagcactgtggctgacctcacccttacttttatactttagtatgaaactgatgagaactttggtagtgagtattttttttatatatatacatatatatgtactat

SEQ ID NO: 440870 - DNA, 120 bp, Artificial Sequence
  ENSG00000153944_51 (sequence is synthesized)
ctatatatatatctcaagcatctttcaggtctttgtgtgtggctttcttaaagccctgttgtaaaaaattactatgtggatggcagtctctcacatcacagatgtggaaagtataatttt

SEQ ID NO: 440871 - DNA, 120 bp, Artificial Sequence
  ENSG00000153944_52 (sequence is synthesized)
atatttgtattttcaaataaataagtttgtgaaaggtttccatcctctactgtggtccagaaatcaatgtgtttgtctgacaaaaaaaaaaataaaataaaataaactgttttgaacaga

SEQ ID NO: 440872 - DNA, 120 bp, Artificial Sequence
  ENSG00000153944_53 (sequence is synthesized)
taagtaggagaataaacagtaggattttagcactcagagatgattgccaagaatttcaaatttcaaacagcattggccatgaactgttgaagcctggtattcactgttccttcggggtat

SEQ ID NO: 440873 - DNA, 120 bp, Artificial Sequence
  ENSG00000153944_54 (sequence is synthesized)
caggacaggctgggcaagtagtcctgtgagataaccatgcgtctctaagttagccatcccaaggtggcttctgaacatccacctgggggcagggacaagtctgatgcttagtgggaggac

SEQ ID NO: 440874 - DNA, 120 bp, Artificial Sequence
  ENSG00000153944_55 (sequence is synthesized)
tttctgttgtgtagttctgattttccgaacaggtgtttagatgatgaggggttatattaagaaagtactaaagaatacgtcttatcacgtgaatcagtatctttttattcaacatggatg

SEQ ID NO: 440875 - DNA, 120 bp, Artificial Sequence
  ENSG00000153944_56 (sequence is synthesized)
aaatgtcagagccaggcgcaggctttgtgtttggtgctgatgcatggcatttactctgaaggttcaggaaagtacatgggctttgcggggtctggctgcccaaatatgggttaattagca

SEQ ID NO: 440876 - DNA, 120 bp, Artificial Sequence
  ENSG00000153944_57 (sequence is synthesized)
acagctgacagcagcgcccccggccacaggagagaggtgacccagacccttaataaaaaaaccctcatgagagacaaattattctgtgaaggaaaataactcaggctttcctcattgcca

SEQ ID NO: 440877 - DNA, 120 bp, Artificial Sequence
  ENSG00000153944_58 (sequence is synthesized)
agctcttaagagaggcatagcaaagtgggggttgctaccatttctagagagagaggacacagtcccggcctgggctgcccccgctccagtcaatgctcactgaaagtctgtcttagctgc

SEQ ID NO: 440878 - DNA, 120 bp, Artificial Sequence
  ENSG00000153944_59 (sequence is synthesized)
ctttattgactcctgcttttctattttttttcccagattgaccccaaagttgcatttcctcgtcgagcgcaacccaagagggcttcccagagttagcagtatttcctgggtttggaggaa

SEQ ID NO: 440879 - DNA, 120 bp, Artificial Sequence
  ENSG00000153944_60 (sequence is synthesized)
ttgctgtttcttccataagtgtgaatcttcaaatttccaggttagtcatttgatcactcagagcttggatcagattacccaagagggaagctggaaaaatcccttacttggtaaaaccat

SEQ ID NO: 440880 - DNA, 120 bp, Artificial Sequence
  ENSG00000153944_61 (sequence is synthesized)
gggtttgacctgtttttctctcccctttgttgtcccccttccttaactttgtttttaaatgagaaaagcaatatttcactttaatacactctgcagtgatgcattcaacttgaaaacgag

SEQ ID NO: 440881 - DNA, 120 bp, Artificial Sequence
  ENSG00000153944_62 (sequence is synthesized)
acagaatgtttctcaaacttgtcaaagtgtgcattcctttcccaaccctcaactccacatctggaatgtttgtaggtgaattaacatgaaaccacttgggggagaacatctttccatgaa

SEQ ID NO: 440882 - DNA, 120 bp, Artificial Sequence
  ENSG00000153944_63 (sequence is synthesized)
ttctagggatttaataataacaccttactgtgtatgacatacttcactttacggaggacttggctgttcattatctccatctgaattccatctcctggggcatttggctgttgtccctaa

SEQ ID NO: 440883 - DNA, 120 bp, Artificial Sequence
  ENSG00000153944_64 (sequence is synthesized)
ccttctctcagtctcagtgtgctcatctgtaaagtaggagtgatgacatagctctcccagaaggtttttgtgtagagtaaaagagcatggtctgcgacaaaggtcttcgtcattgtcatt

SEQ ID NO: 440884 - DNA, 120 bp, Artificial Sequence
  ENSG00000153944_65 (sequence is synthesized)
atttttcttgtcggttttctcatcattgttccggttgttgtttgcaagtgggacagcctgggttcggatgctggtggtgccactccttagctgtgtgaatttgaacaggtcgtttaactt

SEQ ID NO: 440885 - DNA, 120 bp, Artificial Sequence
  ENSG00000153944_66 (sequence is synthesized)
ccttgaaccttcgtttttccatctcatagagtttttctgcagattacgtaaattaataaaggtaaagggactgaaaaaaaaaagacgttgcatggtaatgccatagaagcgttaacctgc

SEQ ID NO: 440886 - DNA, 72 bp, Artificial Sequence
  ENSG00000153944_67 (sequence is synthesized)
ttatttatttatttatttttcaagctatcctcccacctctgccccccagagtgctgggattataggcgtgag

SEQ ID NO: 440887 - DNA, 120 bp, Artificial Sequence
  ENSG00000153944_68 (sequence is synthesized)
ggcgtgagccactgtgcctggccaacctgctatttttttctgccatttttattaagtcctcacatcaatcctgtgagaggttgagtaataataatgatactagttgaatttatatgccag

SEQ ID NO: 440888 - DNA, 120 bp, Artificial Sequence
  ENSG00000153944_69 (sequence is synthesized)
gcactattgcagagactttattaatccatttaattctcatgcagccctatgaggagagtactagtatgagctcattttgtaaatgaggaaacggaggcacagatggatgtccaggagcca

SEQ ID NO: 440889 - DNA, 120 bp, Artificial Sequence
  ENSG00000153944_70 (sequence is synthesized)
tacccaggcaacctggctgtagaactgggcccttcaccactgtgccatgctgtgggggtacctcaggggatggcccctctgctatgcgacaggagatgggctcggagaggtcagcgggct

SEQ ID NO: 440890 - DNA, 120 bp, Artificial Sequence
  ENSG00000153944_71 (sequence is synthesized)
gtgctgagggaaccatagccagaggcccagtactttgaagttctgcgttcctgggcctaggtgatttgccttgccccatcatgttataccagtgtgtgacactgtcttgtatcttttgat

SEQ ID NO: 440891 - DNA, 120 bp, Artificial Sequence
  ENSG00000153944_72 (sequence is synthesized)
ctgacccctcaggccatcttttcagatggttctggagttactcaaccccagtgaggcaacagagtaaatgccaaggttgtatggtggttgggaattgggacagggtggggagaaagtgtc

SEQ ID NO: 440892 - DNA, 120 bp, Artificial Sequence
  ENSG00000153944_73 (sequence is synthesized)
ttccctgtctacggttattttccaatagaatttgagcctggccaccgggatttcagactggagttagcgctgggggccaaaacccaggagcatagaactttaagtcgaccctgatttatt

SEQ ID NO: 440893 - DNA, 120 bp, Artificial Sequence
  ENSG00000153944_74 (sequence is synthesized)
tatcgattatctcccttcaataaaacttctgtgtttttgtgttcaggtcacagtggcagagggaaccctgcccctcctcgtgggatgggcgaggagcttgtaaatgatatgtcagtgtgt

SEQ ID NO: 440894 - DNA, 120 bp, Artificial Sequence
  ENSG00000153944_75 (sequence is synthesized)
gtttcagttaaaatgagtttctctgctttctggctgtccctccttgctaacgctcgccagagaaatattccgtggaggtgttaaaacaagactagtggaaagaaatggtaacttaaaaag

SEQ ID NO: 440895 - DNA, 120 bp, Artificial Sequence
  ENSG00000153944_76 (sequence is synthesized)
aaagaaaatccatggcagtgaagaacagatttcatattagtactgtcataatattctctaatgtatcatataaataaaaatctgtttagaccagaattttaataagtcaccaaaggaagg

SEQ ID NO: 440896 - DNA, 120 bp, Artificial Sequence
  ENSG00000153944_77 (sequence is synthesized)
ttttgaatcctacagtttatgtatccccctttgcgatgtaaatgttcacatctcaagtgaagtagagtggggagacgcttcggagactagaggctgttaattagtgaggtatattttgat

SEQ ID NO: 440897 - DNA, 120 bp, Artificial Sequence
  ENSG00000153944_78 (sequence is synthesized)
cagggcaagaagactggttcattctatatcttcgtatttctctggatgattatttcattttgtaaaatatgtaagagttcccccccagccccttatctttttaaaaattaaaatggtcat

SEQ ID NO: 440898 - DNA, 120 bp, Artificial Sequence
  ENSG00000153944_79 (sequence is synthesized)
gctcttctaaaaagatgacttaatttgaaggctttggagacatgaggatgatggggatccatcactccctgttctttgctccctttggactggagtgttggctgtctggaagagttttgc

SEQ ID NO: 440899 - DNA, 120 bp, Artificial Sequence
  ENSG00000153944_80 (sequence is synthesized)
tatccttgtgtataagaaaacattcccatcttttcccaattgccatttccttccttaacttttagaggccagaacctcatctgttgatgcagggagatctcacttctttaacctatttct

SEQ ID NO: 440900 - DNA, 120 bp, Artificial Sequence
  ENSG00000153944_81 (sequence is synthesized)
agttgccttcagtcacagcggggtggccaggggcgagtcacttaagcctccccaaggctcagtttcctcctttgtaaaagagggagaattatagtactcactgcctgcagttagttgttt

SEQ ID NO: 440901 - DNA, 120 bp, Artificial Sequence
  ENSG00000153944_82 (sequence is synthesized)
ggaggataaatgcaaaattcttcactgggagtctggcataaaacagcactccgcaaatgtctgttgatcttattattatagaattattatttttattattattatttttaagacggagcc

SEQ ID NO: 440902 - DNA, 120 bp, Artificial Sequence
  ENSG00000153944_83 (sequence is synthesized)
acaggcatgagccaccgtgcccgaccagataattattttaatagaataaaaaaaagtacaatggtgaaatgactgaaggaaaatcttaattggaatgtaagctccctgagggcagggaac

SEQ ID NO: 440903 - DNA, 120 bp, Artificial Sequence
  ENSG00000153944_84 (sequence is synthesized)
gaactgttggtggctgctgtttggtaactaaatgaacgaactgagtccagcctgcttttttcaccgtggaggtagctgctacccagtaaagttacgttggttgcttcagatccacactta

SEQ ID NO: 440904 - DNA, 120 bp, Artificial Sequence
  ENSG00000153944_85 (sequence is synthesized)
ggttgtagcagggctgagctagcagtcaggttttcctgttcctgtcttgtcctctgacgtggcttcagggccctggaaggttctctgctaagcacgcatccagatgggtgcaatggcagc

SEQ ID NO: 440905 - DNA, 120 bp, Artificial Sequence
  ENSG00000153944_86 (sequence is synthesized)
ccgagcgtgtacacgcacacctcctgttctgggggagtggtttcttggcagcttctcaagggcgaagggtgagttttcggcatctggccttcccttgctgctgtgggtcgggtcattcta

SEQ ID NO: 440906 - DNA, 120 bp, Artificial Sequence
  ENSG00000153944_87 (sequence is synthesized)
gcatcttgccatcttggatgatctgcagctgtcatctcggcagccaccatgaactggcctgccagtgggttttctcgttcccagcgaggatgtggtggtgtgtctgcagcccttttccac

SEQ ID NO: 440907 - DNA, 120 bp, Artificial Sequence
  ENSG00000153944_88 (sequence is synthesized)
agcagcgaggacctgggaggattagtggcttagcttctttcttgtcggtgagcaccgctccttcctatgttccaagtcagtagcaggtgtcagcttaaggaggaggggcaccttgtccta

SEQ ID NO: 440908 - DNA, 120 bp, Artificial Sequence
  ENSG00000153944_89 (sequence is synthesized)
caaatgtcctttccctggattttgccgttcctcacatgctttcgtttcattgttgaggtcagtctcctaggactatgaagctcctgtgttctttgtcagatgatttttggcagacaggtg

SEQ ID NO: 440909 - DNA, 120 bp, Artificial Sequence
  ENSG00000153944_90 (sequence is synthesized)
agcctcctctgctgcccgggaagggaggagaaggcagtctcggaggaaccagctgaccatctcaggtgccgcttggggcagcgtccattctttgtgtcctattttgtatttttaaacccg

SEQ ID NO: 440910 - DNA, 120 bp, Artificial Sequence
  ENSG00000153944_91 (sequence is synthesized)
gacaatcttcggccgaaaaccccgagaacacacaggggagatgtagttcatcatctctctcttcccgtttgatctagtgtgttcatttaacaagagctgggttaatccttgttcattgcc

SEQ ID NO: 440911 - DNA, 120 bp, Artificial Sequence
  ENSG00000153944_92 (sequence is synthesized)
aactgtatgcgtgcacccacttttggagggattcaggaaatactcggtgcttcctgatgtgcatggaacacagtctcgacgtcttagcttggtgcttaattaaggtccttcaaaatctgt

SEQ ID NO: 440912 - DNA, 120 bp, Artificial Sequence
  ENSG00000153944_93 (sequence is synthesized)
accagggtcttttccaccttatctctcaattcttctagtttttgctgccttgaaactgaatgctcacccttctttgagaaacctgtccttttgcagatttccctctctgcactgcccttc

SEQ ID NO: 440913 - DNA, 120 bp, Artificial Sequence
  ENSG00000153944_94 (sequence is synthesized)
ccttctctgtacacaacagaccctctttgaaagcccagcttcatcattatcttttccacgaagctgtccctgcccctttgtggaaacagtcatacttctttggatttccacagcacttac

SEQ ID NO: 440914 - DNA, 120 bp, Artificial Sequence
  ENSG00000153944_95 (sequence is synthesized)
cttttctttggttaagccccttccaacaataataaattagcagaaacttgtggagcacatacatctgttgcatgttgtgctagacattcactcattcatttattcaccaaacaagcaccg

SEQ ID NO: 440915 - DNA, 120 bp, Artificial Sequence
  ENSG00000153944_96 (sequence is synthesized)
accgtttgccagatactgtgcaaaattcgggggatagtgtggagaatatgacaaagttcctgctgtcaccaaacttttgctctagtggggcaaataagcagtgagcaaacagataagttt

SEQ ID NO: 440916 - DNA, 120 bp, Artificial Sequence
  ENSG00000153944_97 (sequence is synthesized)
atgacatgctctcaggtgtgatcaccaaagccagggaggagcgatggcgggagtggggtggaccatatctatggtacagtcagttgccactttcagtagttcagaaattatttaccaagt

SEQ ID NO: 440917 - DNA, 120 bp, Artificial Sequence
  ENSG00000153944_98 (sequence is synthesized)
ttctgctcagcaccggggattgcgttaggtactttgttctgagttttatggtatttaggttcatgccttatcttctccattggacacaagcatattttactaataattaaaaaaaaaaaa

SEQ ID NO: 440918 - DNA, 120 bp, Artificial Sequence
  ENSG00000153944_99 (sequence is synthesized)
gctttccttttagcttttgtaagttacacgtcaaaatggccgatctgacatcggtgctcacttctgttatgttttctccctctagtaaaatgtttatcggtggactgagctggcagacct

SEQ ID NO: 440919 - DNA, 120 bp, Artificial Sequence
  ENSG00000153944_100 (sequence is synthesized)
tatgcattgtgaccgaccccacttcctcagaatgtaacggggccagagggaaacttctcacaaacttcgtagagcctcctcaggggaagctaggaagaagacatcaaatgtttttaagtc

SEQ ID NO: 440920 - DNA, 120 bp, Artificial Sequence
  ENSG00000153944_101 (sequence is synthesized)
atgaccaaacaggcttgttggggacatatcatggggtgagctttgaagtgctggtggtccagaggggttgcagatacgtgacttggagcacccgtgtcttacgatggacagtgataaagg

SEQ ID NO: 440921 - DNA, 120 bp, Artificial Sequence
  ENSG00000153944_102 (sequence is synthesized)
tgaacacacagagacagactattctctaagaatgtgagaaacctgatctggaagaggagctatataaacactatctgactatctttgtcttttggggccagtggctgttggcataatcac

SEQ ID NO: 440922 - DNA, 120 bp, Artificial Sequence
  ENSG00000153944_103 (sequence is synthesized)
aagcctgtctgtcttcgagaagggacagtggagtcatccaggtgctgccacatgacaggcacggtgggcaccgatccacagtgggccccgccttccccagctcgcctccctgcctgtgct

SEQ ID NO: 440923 - DNA, 120 bp, Artificial Sequence
  ENSG00000153944_104 (sequence is synthesized)
ggcctggccttgcctgctggcaccattggagtaggagggggtggaacacagggggcccatcctgatcaggccccatctcaaggttggcactcctgcccatcacccttagaaggatctttt

SEQ ID NO: 440924 - DNA, 120 bp, Artificial Sequence
  ENSG00000153944_105 (sequence is synthesized)
cccatggcttgacttccttcatttccctaactgaaatacacccactctcttggaataatgacgtaccactcagttggaccctcaagagtcactgctttgtctgtgctggtagtttgtgag

SEQ ID NO: 440925 - DNA, 120 bp, Artificial Sequence
  ENSG00000153944_106 (sequence is synthesized)
aagtgacccgcacgcttccatttgatgcatttgatgtgagtgaatccatacatttgaatgtcattgtccttgagaccctacatgtgcagtttggctcatctcattaaagatgcttgatgt

SEQ ID NO: 440926 - DNA, 120 bp, Artificial Sequence
  ENSG00000153944_107 (sequence is synthesized)
tgaatccttgctctgccactgcagctgtgtgaccttgagcaagctatctaaatattctgtgcctttgttttgtcatctgtacaatggagatgatgatggtatcaccttcatggggttgtc

SEQ ID NO: 440927 - DNA, 120 bp, Artificial Sequence
  ENSG00000153944_108 (sequence is synthesized)
gactggagaatgacttccacagaaagcaccctcaggctccaacccggcgcggcccggaggcttcccgggggccaacagcccaggacctgtcgccgatctctacggccctgccagccagga

SEQ ID NO: 440928 - DNA, 120 bp, Artificial Sequence
  ENSG00000153944_109 (sequence is synthesized)
ctcgtcgagcgcaacccaagcattgctgactttcttcctccatggcacaggatttttgcccaaaacaaaagtctcaatttatttgttctttaaaaaaataaaaaccacactgaacaaaaa

SEQ ID NO: 440929 - DNA, 120 bp, Artificial Sequence
  ENSG00000153944_110 (sequence is synthesized)
agagccagagagaacttccagcgcaaaaggaaaataaaacttgtggctggtgtttgtgcaggagggtctccgccatcctgaagccccccgatcctggggcgtctcgggggccgccaaagg

SEQ ID NO: 440930 - DNA, 120 bp, Artificial Sequence
  ENSG00000153944_111 (sequence is synthesized)
gggatgtttttaaagggtttgtgtagaagggcagagacacccgtggaaagtgtcactgttgccctcaattgctggagagcctggaggctgtcataagtccactcatcaaagtaattgttt

SEQ ID NO: 440931 - DNA, 120 bp, Artificial Sequence
  ENSG00000153944_112 (sequence is synthesized)
gccagtgttttgataacaagcaacagaaacaaccctggctgctgtaagcagcaaaggagattattagaaggagcttgggcagtgctggagaattgacaggatggctggagaacaggactc

SEQ ID NO: 440932 - DNA, 120 bp, Artificial Sequence
  ENSG00000153944_113 (sequence is synthesized)
agaaaacaggcaggaactgggggagctgggtggtcagagccccagccctagccaaggggacaactcaggaatgacctggtcagggggccactgttgccaacactggatgccagattctgc

SEQ ID NO: 440933 - DNA, 120 bp, Artificial Sequence
  ENSG00000153944_114 (sequence is synthesized)
tactgacaccagaataaattcggagccagtccctcctcctctgccctaccagctccagaggcagatcctaaggagggcttccgtctgtcgagcccaggttcacaggcctgcctcccagcc

SEQ ID NO: 440934 - DNA, 120 bp, Artificial Sequence
  ENSG00000153944_115 (sequence is synthesized)
tccagccccaggaagagccctgaggccttctcagcttctgtgatggccgggggggtgggcctctctccaagacttacacacagggagaggctcaggggctgggcagccaaaaaatgacca

SEQ ID NO: 440935 - DNA, 120 bp, Artificial Sequence
  ENSG00000153944_116 (sequence is synthesized)
cagacattcacctccaaagtcaaagcgaaagtcacgttctcggtggttgggtggccgtggtggcatcttaagagcaagaatgtactgaggttacatatacactgagtggagggaggcaga

SEQ ID NO: 440936 - DNA, 120 bp, Artificial Sequence
  ENSG00000153944_117 (sequence is synthesized)
gtgagcctgacccatacggccttcatttagcctgaatcaggcagggacttgaagaacgaagtggcctgagcagccacaatgactccctgagagctgaatgacacctcacatcactggggg

SEQ ID NO: 440937 - DNA, 120 bp, Artificial Sequence
  ENSG00000153944_118 (sequence is synthesized)
ttagtgacagatctgagatggtcacaccagcccctggacttgccagctgagtttcttgtgtgcccagtggccagcccagtggcagtttctacaagtgtctttcagtgaaccactcacccc

SEQ ID NO: 440938 - DNA, 120 bp, Artificial Sequence
  ENSG00000153944_119 (sequence is synthesized)
ctagcttgcctgctgagacaggggtctagaaacaatacgcttgtggtgaaacgcccatccagtcacacggcacggggctcctgagtcggagctacactttgtggtatgcatcttaacaca

SEQ ID NO: 440939 - DNA, 120 bp, Artificial Sequence
  ENSG00000153944_120 (sequence is synthesized)
tccagcctctcaccattctccaaagatcttggcacctccgtggagtgtcaaaactgcagtgtgggccatggctcatcaggcccagcgttttccagaggcccagggtgagccctgagtttg

SEQ ID NO: 440940 - DNA, 120 bp, Artificial Sequence
  ENSG00000153944_121 (sequence is synthesized)
gccgctaaactgtgactcctgagttcgcatgctctgtctggtgctggctctgttgtccactgccttgggaggatgcatcacgaggactttaatctcctactgtcaatagctttaaggtaa

SEQ ID NO: 440941 - DNA, 120 bp, Artificial Sequence
  ENSG00000153944_122 (sequence is synthesized)
tatggccgtggctaccccggatttgctccaagctatggctatcagttcccaggtgagtggcttggtctcccagggctttggaagcacaagaggtgggctgcatttgcggggaggtgagag

SEQ ID NO: 440942 - DNA, 120 bp, Artificial Sequence
  ENSG00000153944_123 (sequence is synthesized)
gacccctaaagagaatgcatttcttacatgcatccacttgaaaatgacctatacatgataaatttcaaatccactgaagttcaaggccaggatgcagctcagagtttttgattaactcag

SEQ ID NO: 440943 - DNA, 120 bp, Artificial Sequence
  ENSG00000153944_124 (sequence is synthesized)
gtataactcactggtgccgggtatttgagaacggcagcttttaaagggaaagcagaacggaggcaggaggcctccctgtgctcacctcctttttctgaagcctcttccgggttttttctc

SEQ ID NO: 440944 - DNA, 120 bp, Artificial Sequence
  ENSG00000153944_125 (sequence is synthesized)
actggggactgaactctaggcccagggctttctttcaccctctaccaccccttgcccgcctccccgctccctgtgtccacctgcccaatgtttgatgtctccccgcccttgcttcctttc

SEQ ID NO: 440945 - DNA, 120 bp, Artificial Sequence
  ENSG00000153944_126 (sequence is synthesized)
ctccacccctcctcctcctgctccgtcctgactgctgtggcttcggcgtccttctgggctgtgttgatgttgagctgctaggggttgggactgctgtccatcctgggtgagctgtttaga

SEQ ID NO: 440946 - DNA, 120 bp, Artificial Sequence
  ENSG00000153944_127 (sequence is synthesized)
ttatcctttccctctgcgtgggtatcaagacttgaggcagagcccatggtgatgcccgccacatgccagggctgctccagctccaactccaggtagctggcaggcctgggacctcacctg

SEQ ID NO: 440947 - DNA, 120 bp, Artificial Sequence
  ENSG00000153944_128 (sequence is synthesized)
ggagaagcagcgaggggaaacatggtcttgtagggatggggtagggacaatgaaggaagcgatgttttacagggtatgcttttccccagcctttctcaaatctggagtacagataagaat

SEQ ID NO: 440948 - DNA, 120 bp, Artificial Sequence
  ENSG00000153944_129 (sequence is synthesized)
atattggggtgtttgggggtctccatgtgcaaaggacagccgagattccagaggaggtgtagggacagagtcttgtcccctgtgggttttctgctgagggaggaggctccctggggagct

SEQ ID NO: 440949 - DNA, 120 bp, Artificial Sequence
  ENSG00000153944_130 (sequence is synthesized)
gggctgcaggcggagtttcacccctgccttgtcgtcatgcctagacctggaggtctgggagtgtcagggtctgagatgaattaggaagcaaagggagtgaagacgcgtcgctggaagatg

SEQ ID NO: 440950 - DNA, 120 bp, Artificial Sequence
  ENSG00000153944_131 (sequence is synthesized)
gcgccctgacactgatgacaggagggcagagtgagggcttggcctggtctttgcctcagaccaagcattggggcgggaagggtgtagttggagagatgaggaggcatttgggggcaccta

SEQ ID NO: 440951 - DNA, 120 bp, Artificial Sequence
  ENSG00000153944_132 (sequence is synthesized)
gagccgtgctctatggcagacagatccttcaaccagcggtggaagccccaagctcttgtcctgtctccgataccacctggccaagtggccatgggcgggtcactcagcttctagggcctt

SEQ ID NO: 440952 - DNA, 120 bp, Artificial Sequence
  ENSG00000153944_133 (sequence is synthesized)
acttctctcttttggaaaagggggtctacgaggaatggtctttggggtctgtgcccctctccgattgtgtgggtcagagggtgcagggaaggcaggcacagaagcagaagtccaagatgg

SEQ ID NO: 440953 - DNA, 120 bp, Artificial Sequence
  ENSG00000153944_134 (sequence is synthesized)
aggagtttgagtgcaggtggctcccccaccagtgtcccctggggctgggatggttccccatctgggaggggcctcaacaagactcctcggcccgcactaaggaagccgtccccaaagatg

SEQ ID NO: 440954 - DNA, 120 bp, Artificial Sequence
  ENSG00000153944_135 (sequence is synthesized)
ccccccagcagcaggctgcttcaggatggccacaggctcccagacctgaagaaaagaagggcacatgcaagaaggaccaccacaagagaggccagcactcaaccagccactgtcattaga

SEQ ID NO: 440955 - DNA, 120 bp, Artificial Sequence
  ENSG00000153944_136 (sequence is synthesized)
ctttcccatttccaggcagagacccccaccaggcacaggcacagaggtagaaactccttctgaaggggtcacagtacgcaaggggtaggacctgcatttggaccaggcggtctgggcctt

SEQ ID NO: 440956 - DNA, 120 bp, Artificial Sequence
  ENSG00000153944_137 (sequence is synthesized)
aactgccaccctccaccatctccctagtgtccatttttctggtacaataacactagccacaaagagctactaaaacttaggtttaaattaaagttggctgggtgcggtggctcacgcctg

SEQ ID NO: 440957 - DNA, 120 bp, Artificial Sequence
  ENSG00000153944_138 (sequence is synthesized)
gatcacaccactatactccagcctggataacagagtgagactctgtctcaaaaataagaagaagaataagaagaagtaaaaagaaaatttcagttcctttagaaacactggccacatttc

SEQ ID NO: 440958 - DNA, 120 bp, Artificial Sequence
  ENSG00000153944_139 (sequence is synthesized)
aaatttcagttcctttagaaacactggccacatttcagtgactcagtaaccatgtgtggcaagtggctattgccagcacagaatgtagaacagtcaccgtggaaatttcttacgggctgg

SEQ ID NO: 440959 - DNA, 120 bp, Artificial Sequence
  ENSG00000153944_140 (sequence is synthesized)
tgctgttccagtgcctaaaggaagagggctgttactggggggtgcacggtccacacactcacacatgcgcaccactccttcctggagacacccatggggtcagtgtccctgtgcttcatt

SEQ ID NO: 440960 - DNA, 120 bp, Artificial Sequence
  ENSG00000153944_141 (sequence is synthesized)
ctctgccagtcttgctcagcccagaagctggtggcttttcctctcacttcctcccctcgcttcccctccaggggatgacaggtgcaaaggctcacgcatctcggccctccaggtgcagca

SEQ ID NO: 440961 - DNA, 120 bp, Artificial Sequence
  ENSG00000153944_142 (sequence is synthesized)
ctgatctgtgcactcagcctgcacaacctgctcccctccgtaatcaggctgccattgcccctgagtgtgatgctagtcccaggaggacagagttgagggatcttaacatggaataattgg

SEQ ID NO: 440962 - DNA, 120 bp, Artificial Sequence
  ENSG00000153944_143 (sequence is synthesized)
gagaggacatcaatgtggaccctatgctaaggcccctgtctcatcagagggcctgccccggggcccccatgagctggctcaggagacatctagtagaactctgcctccatggcctgcatc

SEQ ID NO: 440963 - DNA, 120 bp, Artificial Sequence
  ENSG00000153944_144 (sequence is synthesized)
cctgggcctgccccaggcagacggacatgcagcagtgaccagattgaggctgggcagagtgagatagggtcccctgggtgcccagcccttcaccaaagccaagactttgggaactggggg

SEQ ID NO: 440964 - DNA, 120 bp, Artificial Sequence
  ENSG00000153944_145 (sequence is synthesized)
ggcgggggatggactgggctgcaggaaggaggatagagtggggttggagtgtttttgcccagggcccatccgtttgtcatggccacagtccctgcagcttaatacaatcaggtgggtttg

SEQ ID NO: 440965 - DNA, 120 bp, Artificial Sequence
  ENSG00000153944_146 (sequence is synthesized)
aatgggacagaaatcaggcattacaatgtacagacagcagcttcctgacctttgggagttagctgccctgttctcaaccatcaaacttttatttttccatccttcccaccttcccactca

SEQ ID NO: 440966 - DNA, 120 bp, Artificial Sequence
  ENSG00000153944_147 (sequence is synthesized)
ctatggaagcctcttgattctcttaactaatggccagaaaggggccaccagtggccacaagagtaaggttgcctgctctcagggagggcaagagtggagtggccctgaactgggaagggt

SEQ ID NO: 440967 - DNA, 120 bp, Artificial Sequence
  ENSG00000153944_148 (sequence is synthesized)
ggccccatggctggggccgcccaccccactcatctgagaagccaggctagggtcagagtctattcccctcctgaccccctcccaaaggatatgctccttgtggagtgttgggtctgtgct

SEQ ID NO: 440968 - DNA, 120 bp, Artificial Sequence
  ENSG00000153944_149 (sequence is synthesized)
tatcccagatgcctccccaagcagccaaatgtttccagacacaaagcctaggtaggtccatgtgtcattccagtcaagagcgcagggagtagctgagcccctctagaaccaaacttgatg

SEQ ID NO: 440969 - DNA, 120 bp, Artificial Sequence
  ENSG00000153944_150 (sequence is synthesized)
actcctggagccacagcctcagggccagggctacagagaagcttctggatgccctgacttccatctgtcacctcatgccaataaggaaagtttcgggtggatctggccgaggcggctggg

SEQ ID NO: 440970 - DNA, 120 bp, Artificial Sequence
  ENSG00000153944_151 (sequence is synthesized)
gtacagaagggggacccagagatggggcagcccagccctctgccctctcctcatccccatcaggtagattctgcgaacccctgccatgccccggggatcctgtgacttcgtgacattaca

SEQ ID NO: 440971 - DNA, 120 bp, Artificial Sequence
  ENSG00000153944_152 (sequence is synthesized)
cagcagtcatgtcacctcccaactatcctgatgttttctttgtggtctttcttttcagtgtcctcactgtatgcccactttacccacttcccacctccggtccccctcatgctgtgcatg

SEQ ID NO: 440972 - DNA, 120 bp, Artificial Sequence
  ENSG00000153944_153 (sequence is synthesized)
gatcccgaacctctcccagcccctttctgagtccccctagcagggccatgcaagacagctagctgggagaaatgaaagcacgcccaggtcctagagagctccgagactcttcatcctggc

SEQ ID NO: 440973 - DNA, 120 bp, Artificial Sequence
  ENSG00000153944_154 (sequence is synthesized)
tgttctcactcataaaccaggtagcctgggtcccctttcaggaagatgcaatctgatcccctttatgaagggtcctcctttccacctggacttaccctttctatgaacatccatctcatc

SEQ ID NO: 440974 - DNA, 120 bp, Artificial Sequence
  ENSG00000153944_155 (sequence is synthesized)
tggttgggggtgcagatatcactcttagtagagcctcattctcaccatgtgacatggggctgcacggaccttcctgggccacacagctggtggcaagtggcacctggctgtgcccatctt

SEQ ID NO: 440975 - DNA, 120 bp, Artificial Sequence
  ENSG00000153944_156 (sequence is synthesized)
cagaattctgtcagaataaatgttcctagagaaggctagacactggatagtttttagagtggggagtagttcttttctagaaaggctgggtggtgaccaaccactctgggaacagctcct

SEQ ID NO: 440976 - DNA, 120 bp, Artificial Sequence
  ENSG00000153944_157 (sequence is synthesized)
tcttcccacatccaggtgtccaccccagcctggaatttggatcaggatcccgtcttgaattattatgggttgtgatcagggatctcccctgcttcctctcttttccccactctggacttc

SEQ ID NO: 440977 - DNA, 120 bp, Artificial Sequence
  ENSG00000153944_158 (sequence is synthesized)
tgagtattatttttttcaaagaacaaatctgtatggcttttccccatctccatattttgttttgctatgaattgctttgctttggtgaacttgtcctagtatgcttgcctcacaaacgtt

SEQ ID NO: 440978 - DNA, 120 bp, Artificial Sequence
  ENSG00000153944_159 (sequence is synthesized)
ttagccattgtgaattttcttcatctctgtaaatagttcatctgtgcttctccctgatgacgttttattttttttcccctgtaagcaaccgaggtagaaaaataaattgtttaccatgga

SEQ ID NO: 440979 - DNA, 120 bp, Artificial Sequence
  ENSG00000153944_160 (sequence is synthesized)
tgtgcatgcatgtgtgtgtgtgtgtgtgtgtgtttgtatttataatattgccccatgcctggcttataggatatgttagactattttctctcttttccatctccttcctcaaaagaagga

SEQ ID NO: 440980 - DNA, 120 bp, Artificial Sequence
  ENSG00000153944_161 (sequence is synthesized)
aaagtccccctctatctgcctcagccctctcatctgagtgggagttcttaagatgtaaggactcctggctgacttgacttgtgtgggctaaggctacgttttctaaaacttgggagagga

SEQ ID NO: 440981 - DNA, 120 bp, Artificial Sequence
  ENSG00000153944_162 (sequence is synthesized)
gggaagtggtaagggtgggcgataatcctgtctatttaaatgattaacatttttctcttgggatatcaaaatttgcatttaaatggatgttttaaatagcctgttttactctttatttgc

SEQ ID NO: 440982 - DNA, 120 bp, Artificial Sequence
  ENSG00000153944_163 (sequence is synthesized)
caagtcagtcgatcctgtgtttgtgctcccgaaggacttggcgacttggctaacaaggagacatttgttatttcatttcctcatccattattcatgcagtgagagatggtcacaagaaca

SEQ ID NO: 440983 - DNA, 120 bp, Artificial Sequence
  ENSG00000153944_164 (sequence is synthesized)
gagatgacacagatctttccactaggccatcctgttttgttgctggagaactttgtccctggaagggcagaaatgattattctggttgcccaaggcctggtggcccaggtggaagatgca

SEQ ID NO: 440984 - DNA, 120 bp, Artificial Sequence
  ENSG00000153944_165 (sequence is synthesized)
tttccaattcagtgggctgctacaatccggcctttatcacgggctgctctggttcccatgtcccttctgggccagtgcctgagtttgtggtttgacatgagggctttaaccccttcctgt

SEQ ID NO: 440985 - DNA, 120 bp, Artificial Sequence
  ENSG00000153944_166 (sequence is synthesized)
gccagcccctcactgtggtggccgggaagaaaaggccttccaggaaccggcgtggaaagttacagctcttgaggtctcgtcaaagtgggagatcgctgtggaaaccagggtttggctttg

SEQ ID NO: 440986 - DNA, 120 bp, Artificial Sequence
  ENSG00000153956_0 (sequence is synthesized)
agcgagagcgcgcgagcgccggcgggctcgccgaggtctgtttccaaagtcgcccttgatggcggcggaggcaaggcggccgcggcgcggagcagccgacgcacgctagtgggtccgccc

SEQ ID NO: 440987 - DNA, 80 bp, Artificial Sequence
  ENSG00000153956_1 (sequence is synthesized)
gcggctccgcgcctcgggccccgggcgcagccagccctccagacgcccgcggtcccggcggcgtgtgctgctcttcctcc

SEQ ID NO: 440988 - DNA, 120 bp, Artificial Sequence
  ENSG00000153956_2 (sequence is synthesized)
cttcctccgcccgcggtttccagcgccgctccttcccccgcttgggcagggagggggcattgatcttcgatcgcgaagatggctgctggctgcctgctggccttgactctgacacttttc

SEQ ID NO: 440989 - DNA, 120 bp, Artificial Sequence
  ENSG00000153956_3 (sequence is synthesized)
caatctttgctcatcggcccctcgtcggaggagccgttcccttcggccgtcactatcaaatcatgggtggataagatgcaagaagaccttgtcacactggcaaaaacagcaagtggagtc

SEQ ID NO: 440990 - DNA, 120 bp, Artificial Sequence
  ENSG00000153956_4 (sequence is synthesized)
aatcagcttgttgatatttatgagaaatatcaagatttgtatactgtggaaccaaataatgcacgccagctggtagaaattgcagccagggatattgagaaacttctgagcaacagatct

SEQ ID NO: 440991 - DNA, 120 bp, Artificial Sequence
  ENSG00000153956_5 (sequence is synthesized)
aaagccctggtgcgcctggcattggaagcggagaaagttcaagcagctcaccagtggagagaagattttgcaagcaatgaagttgtctactacaatgcaaaggatgatctcgatcctgag

SEQ ID NO: 440992 - DNA, 120 bp, Artificial Sequence
  ENSG00000153956_6 (sequence is synthesized)
aaaaatgacagtgagccaggcagccagaggataaaacctgttttcattgaagatgctaattttggacgacaaatatcttatcagcacgcagcagtccatattcctactgacatctatgag

SEQ ID NO: 440993 - DNA, 120 bp, Artificial Sequence
  ENSG00000153956_7 (sequence is synthesized)
ggctcaacaattgtgttaaatgaactcaactggacaagtgccttagatgaagttttcaaaaagaatcgcgaggaagacccttcattattgtggcaggtttttggcagtgccactggccta

SEQ ID NO: 440994 - DNA, 120 bp, Artificial Sequence
  ENSG00000153956_8 (sequence is synthesized)
gctcgatattatccagcttcaccatgggttgataatagtagaactccaaataagattgacctttatgatgtacgcagaagaccatggtacatccaaggagctgcatctcctaaagacatg

SEQ ID NO: 440995 - DNA, 120 bp, Artificial Sequence
  ENSG00000153956_9 (sequence is synthesized)
cttattctggtggatgtgagtggaagtgttagtggattgacacttaaactgatccgaacatctgtctccgaaatgttagaaaccctctcagatgatgatttcgtgaatgtagcttcattt

SEQ ID NO: 440996 - DNA, 120 bp, Artificial Sequence
  ENSG00000153956_10 (sequence is synthesized)
aacagcaatgctcaggatgtaagctgttttcagcaccttgtccaagcaaatgtaagaaataaaaaagtgttgaaagacgcggtgaataatatcacagccaaaggaattacagattataag

SEQ ID NO: 440997 - DNA, 120 bp, Artificial Sequence
  ENSG00000153956_11 (sequence is synthesized)
aagggctttagttttgcttttgaacagctgcttaattataatgtttccagagcaaactgcaataagattattatgctattcacggatggaggagaagagagagcccaggagatatttaac

SEQ ID NO: 440998 - DNA, 120 bp, Artificial Sequence
  ENSG00000153956_12 (sequence is synthesized)
aaatacaataaagataaaaaagtacgtgtattcacgttttcagttggtcaacacaattatgacagaggacctattcagtggatggcctgtgaaaacaaaggttattattatgaaattcct

SEQ ID NO: 440999 - DNA, 120 bp, Artificial Sequence
  ENSG00000153956_13 (sequence is synthesized)
tccattggtgcaataagaatcaatactcaggaatatttggatgttttgggaagaccaatggttttagcaggagacaaagctaagcaagtccaatggacaaatgtgtacctggatgcattg

SEQ ID NO: 441000 - DNA, 120 bp, Artificial Sequence
  ENSG00000153956_14 (sequence is synthesized)
gaactgggacttgtcattactggaactcttccggtcttcaacataaccggccaatttgaaaataagacaaacttaaagaaccagctgattcttggtgtgatgggagtagatgtgtctttg

SEQ ID NO: 441001 - DNA, 120 bp, Artificial Sequence
  ENSG00000153956_15 (sequence is synthesized)
gaagatattaaaagactgacaccacgttttacactgtgccccaatgggtattactttgcaatcgatcctaatggttatgttttattacatccaaatcttcagccaaagaaccccaaatct

SEQ ID NO: 441002 - DNA, 120 bp, Artificial Sequence
  ENSG00000153956_16 (sequence is synthesized)
caggagccagtaacattggatttccttgatgcagagttagagaatgatattaaagtggagattcgaaataagatgattgatggggaaagtggagaaaaaacattcagaactctggttaaa

SEQ ID NO: 441003 - DNA, 120 bp, Artificial Sequence
  ENSG00000153956_17 (sequence is synthesized)
tctcaagatgagagatatattgacaaaggaaacaggacatacacatggacacctgtcaatggcacagattacagtttggccttggtattaccaacctacagtttttactatataaaagcc

SEQ ID NO: 441004 - DNA, 120 bp, Artificial Sequence
  ENSG00000153956_18 (sequence is synthesized)
aaactagaagagacaataactcaggccagatcaaaaaagggcaaaatgaaggattcggaaaccctgaagccagataattttgaagaatctggctatacattcatagcaccaagagattac

SEQ ID NO: 441005 - DNA, 120 bp, Artificial Sequence
  ENSG00000153956_19 (sequence is synthesized)
tgcaatgacctgaaaatatcggataataacactgaatttcttttaaatttcaacgagtttattgatagaaaaactccaaacaacccatcatgtaacgcggatttgattaatagagtcttg

SEQ ID NO: 441006 - DNA, 120 bp, Artificial Sequence
  ENSG00000153956_20 (sequence is synthesized)
cttgatgcaggctttacaaatgaacttgtccaaaattactggagtaagcagaaaaatatcaagggagtgaaagcacgatttgttgtgactgatggtgggattaccagagtttatcccaaa

SEQ ID NO: 441007 - DNA, 120 bp, Artificial Sequence
  ENSG00000153956_21 (sequence is synthesized)
gaggctggagaaaattggcaagaaaacccagagacatatgaggacagcttctataaaaggagcctagataatgataactatgttttcactgctccctactttaacaaaagtggacctggt

SEQ ID NO: 441008 - DNA, 120 bp, Artificial Sequence
  ENSG00000153956_22 (sequence is synthesized)
gcctatgaatcgggcattatggtaagcaaagctgtagaaatatatattcaagggaaacttcttaaacctgcagttgttggaattaaaattgatgtaaattcctggatagagaatttcacc

SEQ ID NO: 441009 - DNA, 120 bp, Artificial Sequence
  ENSG00000153956_23 (sequence is synthesized)
aaaacctcaatcagagatccgtgtgctggtccagtttgtgactgcaaaagaaacagtgacgtaatggattgtgtgattctggatgatggtgggtttcttctgatggcaaatcatgatgat

SEQ ID NO: 441010 - DNA, 120 bp, Artificial Sequence
  ENSG00000153956_24 (sequence is synthesized)
tatactaatcagattggaagattttttggagagattgatcccagcttgatgagacacctggttaatatatcagtttatgcttttaacaaatcttatgattatcagtcagtatgtgagccc

SEQ ID NO: 441011 - DNA, 120 bp, Artificial Sequence
  ENSG00000153956_25 (sequence is synthesized)
ggtgctgcaccaaaacaaggagcaggacatcgctcagcatatgtgccatcagtagcagacatattacaaattggctggtgggccactgctgctgcctggtctattctacagcagtttctc

SEQ ID NO: 441012 - DNA, 120 bp, Artificial Sequence
  ENSG00000153956_26 (sequence is synthesized)
ttgagtttgacctttccacgactccttgaggcagttgagatggaggatgatgacttcacggcctccctgtccaagcagagctgcattactgaacaaacccagtatttcttcgataacgac

SEQ ID NO: 441013 - DNA, 120 bp, Artificial Sequence
  ENSG00000153956_27 (sequence is synthesized)
agtaaatcattcagtggtgtattagactgtggaaactgttccagaatctttcatggagaaaagcttatgaacaccaacttaatattcataatggttgagagcaaagggacatgtccatgt

SEQ ID NO: 441014 - DNA, 120 bp, Artificial Sequence
  ENSG00000153956_28 (sequence is synthesized)
gacacacgactgctcatacaagcggagcagacttctgacggtccaaatccttgtgacatggttaagcaacccagataccgaaaagggcctgatgtctgctttgataacaatgtcttggag

SEQ ID NO: 441015 - DNA, 120 bp, Artificial Sequence
  ENSG00000153956_29 (sequence is synthesized)
gattatactgactgtggtggtgtttctggattaaatccctccctgtggtatatcattggaatccagtttctactactttggctggtatctggcagcacacaccgcctgttatgaccttct

SEQ ID NO: 441016 - DNA, 120 bp, Artificial Sequence
  ENSG00000153956_30 (sequence is synthesized)
aaaaaccaaatctgcatagttaaactccagaccctgccaaaacatgagccctgccctcaattacagtaacgtagggtcagctataaaatcagacaaacattagctgggcctgttccatgg

SEQ ID NO: 441017 - DNA, 120 bp, Artificial Sequence
  ENSG00000153956_31 (sequence is synthesized)
aagcaaaatcctatacgtgtcctctattggaaaatttgggagtttgttgttgcattgttggtgattacatgtgaaagggttccccatacaattgttaatgaaccataagaaatgtcttga

SEQ ID NO: 441018 - DNA, 120 bp, Artificial Sequence
  ENSG00000153956_32 (sequence is synthesized)
tattgacctggaattttgacttgctgcaattttactaagaaaatctctaaggggaaagaaattatttttgccttcactttttcttctgtgaaaagttaattcctgctttaagtagcaatt

SEQ ID NO: 441019 - DNA, 120 bp, Artificial Sequence
  ENSG00000153956_33 (sequence is synthesized)
attgaaatatatagagaaagagagaattaacattggtctaaattgttgaaatataaataatggctaattttctatgaaaaatttgccatgaataaaatgccttatgaagaacggcttctt

SEQ ID NO: 441020 - DNA, 120 bp, Artificial Sequence
  ENSG00000153956_34 (sequence is synthesized)
tgccaaaaataaaacacaattgatgaccaattcaattttgatggggtaatgaattgatggtttgaaaatagtaactaagaaattattaaactaaaggtgcttgagggagaaattagaata

SEQ ID NO: 441021 - DNA, 120 bp, Artificial Sequence
  ENSG00000153956_35 (sequence is synthesized)
tgtgacatatttcctcataaatgtaagcaagcccttaataaatgctttgatgtaatgttccttttgttcacagtacagttatgtagtgctagccagatatttaaaaatgctctaagaaaa

SEQ ID NO: 441022 - DNA, 120 bp, Artificial Sequence
  ENSG00000153956_36 (sequence is synthesized)
gcttgtcaggggggagggggaaatgtttttcttgtgataaatgaactttggtttaccaagggtattttgcatgatgctgctgctattttaacttttcagttgttttttctcttactgtag

SEQ ID NO: 441023 - DNA, 120 bp, Artificial Sequence
  ENSG00000153956_37 (sequence is synthesized)
agtgtagtcattgaaaagttaactgagtgatattgttatgtaagaatctgaaccttgcagtgtaaatgcacttaagtcatctttaaaatgttgttaaactactctgaatatactgtgcaa

SEQ ID NO: 441024 - DNA, 120 bp, Artificial Sequence
  ENSG00000153956_38 (sequence is synthesized)
tgtaaatgctgaatgattggggttagataaatggtgaaatgagaattaatgaattttatacagattcatgctttcgcctgataacctatgtacagatattttaagtacataaatcagatt

SEQ ID NO: 441025 - DNA, 120 bp, Artificial Sequence
  ENSG00000153956_39 (sequence is synthesized)
tgacacatttattttttgaaaagtacatatatgttctcaatgaagattcatcctaggtttcctctttgttcgtttcaatagtagcacatacaatccaaaagttcctgctactgctgcttt

SEQ ID NO: 441026 - DNA, 120 bp, Artificial Sequence
  ENSG00000153956_40 (sequence is synthesized)
tgcccttccattttaaatggtatgatcgtttggccaaaatttccatgcaagttgataagggttttacaataatctgaacaaataggaaaccttgaatctctatgtatgcacatgaatact

SEQ ID NO: 441027 - DNA, 120 bp, Artificial Sequence
  ENSG00000153956_41 (sequence is synthesized)
tgattgtgaataataaaagttgttttttatacagcctcattggtgaaaatggttagtgtagtaaatcagatatttcattatagactaatatggtagcagattatttatgcttttaaaaat

SEQ ID NO: 441028 - DNA, 120 bp, Artificial Sequence
  ENSG00000153956_42 (sequence is synthesized)
tattttctggagcaaacagtatttgaagaaaaggtaaaaactatgaatgtgtaattctaagaatagttaataattttactgaaggctgaacgtatgtagatattttttatgataaaatgc

SEQ ID NO: 441029 - DNA, 120 bp, Artificial Sequence
  ENSG00000153956_43 (sequence is synthesized)
agtttttctttttttggaacatgccaattactggtatgtgtatatgctggaaattttcttacatatcctttttaagtcaaagttattaacattatccagcatgctttaatatgctccaca

SEQ ID NO: 441030 - DNA, 120 bp, Artificial Sequence
  ENSG00000153956_44 (sequence is synthesized)
tatcaaagatataaccaataatttaacgtagcttaaaagataacatttgttttgtttttagctttgcatacatttgtaattccctcccaccaccaatataccttaggtaccatttgtgta

SEQ ID NO: 441031 - DNA, 120 bp, Artificial Sequence
  ENSG00000153956_45 (sequence is synthesized)
catttcaagattttttttttcaataaaaaggtggggggaaatggaatcactttgccaactattgttctaagagttgacatcagttaccatttctaatgcattgttgtgattttgtagtgt

SEQ ID NO: 441032 - DNA, 120 bp, Artificial Sequence
  ENSG00000153956_46 (sequence is synthesized)
cattcataactggtattgacattttagaaaacaccaaagtgatttaaaatatatgtggggaaaaaaacttctcactctagtaacaatgttttaatcatgttgtttgttaaatatttaaaa

SEQ ID NO: 441033 - DNA, 120 bp, Artificial Sequence
  ENSG00000153956_47 (sequence is synthesized)
gttattgttcaatttttgctagactatcttaaatcatgatagtgttgggaagggggtatcaaaatataaaattgttagtttgtgtatataaacaatgcacattaaaacaattgaattgct

SEQ ID NO: 441034 - DNA, 120 bp, Artificial Sequence
  ENSG00000153956_48 (sequence is synthesized)
tccagcatacaacaaactaccttaaaattatgttcaaaatctattaaatatattttcatggctaatgtcgagtatatgttttcatcaattacattgttattgtattaatcgcggttaaac

SEQ ID NO: 441035 - DNA, 120 bp, Artificial Sequence
  ENSG00000153956_49 (sequence is synthesized)
ttggcatctcttggcaggatcctatttaatttctgttgccatcaaaatatatttatatgcatgagttttgctataaacctttattttctgctataaagttatatattatgacaaccataa

SEQ ID NO: 441036 - DNA, 120 bp, Artificial Sequence
  ENSG00000153956_50 (sequence is synthesized)
atgcaattacaaattgggtaagaacaagctgaataaaagttgttcccatgactaatattagtcttcatgcttttagcatattttttaagacagtaacactcatcccatcaaattattaca

SEQ ID NO: 441037 - DNA, 120 bp, Artificial Sequence
  ENSG00000153956_51 (sequence is synthesized)
ttacatttagtatttttctgagttacattgacaagaacttaaattatagcctgttattaatattgatttccaacgactgaacagtacaacagatcaataaaaaagtttatacactgcttt

SEQ ID NO: 441038 - DNA, 120 bp, Artificial Sequence
  ENSG00000153956_52 (sequence is synthesized)
aactaatttttgttatactcatgtggcttagtgtagttagtcactaaaacagagttcaagtgagcttggcaatggtgttgagtaacaagaaagaattttgcattaatgatttctttttat

SEQ ID NO: 441039 - DNA, 120 bp, Artificial Sequence
  ENSG00000153956_53 (sequence is synthesized)
tttcctcatttaaacaaccagcattactgccaaacaccaaccgtggtccatatttgtaacaggtttttaacatgacatagttagcaagtttgattgaagagatttttaggtcctgggcct

SEQ ID NO: 441040 - DNA, 120 bp, Artificial Sequence
  ENSG00000153956_54 (sequence is synthesized)
ataagattttagtatgatcttttttcatgtttctaatgcttgaggtgttactgcttaacttgggaaaaaaaaaaacaaaaaacagtgttcctgccatttgtaagttttcctataatattc

SEQ ID NO: 441041 - DNA, 120 bp, Artificial Sequence
  ENSG00000153956_55 (sequence is synthesized)
cttttattaactttaaaactggacttatcgggttcaaataggcagtatcccttttaagtgacctttgcaacccaagtgttacttgcttatttgatgctctcttgtattttaaatctcatt

SEQ ID NO: 441042 - DNA, 120 bp, Artificial Sequence
  ENSG00000153956_56 (sequence is synthesized)
taaatctttgtctgtgaccaacaaagcttaagattttgtcttcatttaaaactctgaatctattccattgatcatgttagacgttcaaatgtttaatggtatagtctgacctagtgaaac

SEQ ID NO: 441043 - DNA, 120 bp, Artificial Sequence
  ENSG00000153956_57 (sequence is synthesized)
aaaatggatgttgttactttttttaaagaatagaatgaaataactatttcacttgcccaaaattttaaatattttttcatctaaacttgtattgtttcccatagcagaatgtcaatattc

SEQ ID NO: 441044 - DNA, 120 bp, Artificial Sequence
  ENSG00000153956_58 (sequence is synthesized)
acagtacatttctgtaaagagcaaaccaatataatgttttgagtgttgaaaaaaattccagatttttgaagaattagacaactcttcatctaccttatttctagttcacacagttatctc

SEQ ID NO: 441045 - DNA, 120 bp, Artificial Sequence
  ENSG00000153956_59 (sequence is synthesized)
aaattccactgaaactaatgggatactgtcttgtgtagatgccagttgagtttataatgtgacctagtaaagctgtcttttttgttgtgttgtatgagtgtcggatcatgcttttaggaa

SEQ ID NO: 441046 - DNA, 120 bp, Artificial Sequence
  ENSG00000153956_60 (sequence is synthesized)
tacttttattaaaatggtgtgcattcatgcaaaaggccaactggcttttgtgaacaatagatcttttctcccctttattttgttctcttgacacttttgtgaaaattacctagcctgata

SEQ ID NO: 441047 - DNA, 120 bp, Artificial Sequence
  ENSG00000153956_61 (sequence is synthesized)
gcctgataaaaacattttgtaaaaatttgtataatactgttataaaatatttataatcccagaaaatgttgtgttaaatcttgtgcaaaaacagtatattcagaataaaagtttatcatt

SEQ ID NO: 441048 - DNA, 120 bp, Artificial Sequence
  ENSG00000153956_62 (sequence is synthesized)
atcttatgattatcagtcagtatgtgagcccggtgctgcaccaaaacaaggagcaggacatcgctcagcatatgtggtcagtaatatccacggtctaatcaattctcaaggggtactcaa

SEQ ID NO: 441049 - DNA, 120 bp, Artificial Sequence
  ENSG00000153956_63 (sequence is synthesized)
tccttttgtcttacgttttttttctataccaaacaccagccatctctggtagctttcccttatgtatacattcctctctacaagtgataccttcctgctttctgtgtcattgctgtcaat

SEQ ID NO: 441050 - DNA, 120 bp, Artificial Sequence
  ENSG00000153956_64 (sequence is synthesized)
tcatactccatgttcaaaatgcacctcagtcattatttcctatgagatgtcttccttaaacatccttcaagtacaaatttaatagatatttaaattattaaaacatagttgtgtatctat

SEQ ID NO: 441051 - DNA, 120 bp, Artificial Sequence
  ENSG00000153956_65 (sequence is synthesized)
aacacctaactttgttttttagaatatgttcaatagaacatttccttgttttgtcttctgtttcagcaagggagtgaaagcacgatttgttgtgactgatggtgggattaccagagttta

SEQ ID NO: 441052 - DNA, 120 bp, Artificial Sequence
  ENSG00000153956_66 (sequence is synthesized)
tcccaaagattgttggaattaaaattgatgtaaattcctggatagagaatttcaccaaaacctcaatcagagatccgtgtgctggtccagtttgtgactgcaaaagaaacagtgacgtaa

SEQ ID NO: 441053 - DNA, 120 bp, Artificial Sequence
  ENSG00000153956_67 (sequence is synthesized)
atttgaaatgctatagtcctagctaagaagctgtatcacagcaaatagaaagaatagagtggctagggagactcgtgagtttggtattagaatgctagtttgatatagttatcattggaa

SEQ ID NO: 441054 - DNA, 120 bp, Artificial Sequence
  ENSG00000153956_68 (sequence is synthesized)
aaactattgtgtctctctggaggggaggatgagtgtgggccatcagaagcccctgtataagatcagggacttcctcatcttgggactcctggctggaaacccatctcactacctatgcag

SEQ ID NO: 441055 - DNA, 120 bp, Artificial Sequence
  ENSG00000153956_69 (sequence is synthesized)
gtgacccctggctgtcctcctgtcatcctgtgggaattgaggtttgggcagcttgtgcaaacaaagatgttactctgctcctctgttgctatgagtaataaactctttgtctctgactca

SEQ ID NO: 441056 - DNA, 120 bp, Artificial Sequence
  ENSG00000153956_70 (sequence is synthesized)
gaatgatcctgccaacacgttatccctgcatggacagtgttagtaagctcacatctggtttgactcattcttcacaggcaaccctgtctcttagatggactggtagaattgcataggaat

SEQ ID NO: 441057 - DNA, 120 bp, Artificial Sequence
  ENSG00000153975_0 (sequence is synthesized)
gaatgaggtactgagggccaaggtgttggaagttcctaattctttcctcggttaactgtgaaactctgcgtattgggaaggcctggcctcagtcatcaggccaggagaggtactggacgc

SEQ ID NO: 441058 - DNA, 120 bp, Artificial Sequence
  ENSG00000153975_1 (sequence is synthesized)
cgcgcacgcactcgtctgccagcgaggcccaaaggggaagcctagcggagctcagtgtggcagctgctggcctctgggccgctacttgtcaataccatgctttcctgtaatatttgtggt

SEQ ID NO: 441059 - DNA, 120 bp, Artificial Sequence
  ENSG00000153975_2 (sequence is synthesized)
gaaacagtaacctcagaaccagacatgaaagctcacctaattgttcacatggaaagtgaaattatatgtccattttgcaagttgtcaggtgtgaattatgatgaaatgtgttttcatatc

SEQ ID NO: 441060 - DNA, 120 bp, Artificial Sequence
  ENSG00000153975_3 (sequence is synthesized)
gaaacagctcattttgagcagaatacacttgaaagaaactttgagaggataaatacagtacaatatggaacttcagataacaagaaagacaacaccctacagtgtggaatggaagttaat

SEQ ID NO: 441061 - DNA, 120 bp, Artificial Sequence
  ENSG00000153975_4 (sequence is synthesized)
tcaagtattctttcaggttgtgcatctaatcatccaaaaaattcagctcaaaacctgactaaagatagtactttaaaacatgaaggcttctattcagagaacttaactgaatctagaaaa

SEQ ID NO: 441062 - DNA, 120 bp, Artificial Sequence
  ENSG00000153975_5 (sequence is synthesized)
ttcctgaaaagtagggaaaaacagtccagcctgaccgaaataaaaggatctgtttatgaaacaacatacagtcctcctgaatgtccattctgtggaaaaatagaggagcacagtgaagat

SEQ ID NO: 441063 - DNA, 120 bp, Artificial Sequence
  ENSG00000153975_6 (sequence is synthesized)
atggaaactcatgtgaaaacaaagcatgccaatcttttagacattccattggaagactgtgatcaaccactctatgattgtcctatgtgtgggctcatatgtacaaattaccatattctt

SEQ ID NO: 441064 - DNA, 120 bp, Artificial Sequence
  ENSG00000153975_7 (sequence is synthesized)
caggaacatgttgacttgcatttggaagaaaacagctttcagcaaggcatggatagagtccagtgttctggtgatctacaattggctcaccagcttcagcaagaagaagacagaaagagg

SEQ ID NO: 441065 - DNA, 120 bp, Artificial Sequence
  ENSG00000153975_8 (sequence is synthesized)
agatctgaagaatcaagacaagaaatagaagaatttcagaagctgcagagacaatatggtttagataattctggaggatacaaacaacaacaactacgaaatatggagatagaagtaaat

SEQ ID NO: 441066 - DNA, 120 bp, Artificial Sequence
  ENSG00000153975_9 (sequence is synthesized)
gaatgcctccatctgaatttcataggagaaaagctgatatgatggaatcattagctcttggttttgacgatggaaaaacaaaaacttccggaattattgaagcacttcataggtattatc

SEQ ID NO: 441067 - DNA, 120 bp, Artificial Sequence
  ENSG00000153975_10 (sequence is synthesized)
agaatgctgccacagatgtgagacgggtgtggctttcttcagtggtggatcactttcattcatctttaggcgacaaaggttggggttgtggttacagaaatttccaaatgctactttcat

SEQ ID NO: 441068 - DNA, 120 bp, Artificial Sequence
  ENSG00000153975_11 (sequence is synthesized)
cattattacaaaatgatgcttacaacgattgcttaaaaggtatgttgattccttgcattccaaaaattcaatctatgattgaagatgcatggaaggaaggttttgatcctcagggggcct

SEQ ID NO: 441069 - DNA, 120 bp, Artificial Sequence
  ENSG00000153975_12 (sequence is synthesized)
ctcaacttaataacaggttacagggaacaaaggcctggattggagcatgtgaagtatatatactcctgacctccctaagggtaaagtgtcatattgttgattttcacaaatcaactggtc

SEQ ID NO: 441070 - DNA, 120 bp, Artificial Sequence
  ENSG00000153975_13 (sequence is synthesized)
ctttgggtacacaccctcgcttatttgaatggatattgaactattattcttcagagggagaagggagtccaaaggtagtgtgtacatctaaacctcctatctatcttcagcatcaaggtc

SEQ ID NO: 441071 - DNA, 120 bp, Artificial Sequence
  ENSG00000153975_14 (sequence is synthesized)
acagtcgaactgttattggaattgaagagaaaaaaaaccgaacattatgcttactaatacttgatcctggatgtccttctcgagaaatgcagaaattattaaagcaagacatagaggcta

SEQ ID NO: 441072 - DNA, 120 bp, Artificial Sequence
  ENSG00000153975_15 (sequence is synthesized)
gcagtctcaagcaacttcggaaatctatgggaaatttaaaacataagcaataccagatattggcagtagagggtgctctttctctagaggagaaacttgccaggagacaagcttctcaag

SEQ ID NO: 441073 - DNA, 120 bp, Artificial Sequence
  ENSG00000153975_16 (sequence is synthesized)
tctttacagccgagaagattccttgaagaatcaagcatttaagcatttcagtgattgagaacaatactttgttttctaaatgtagatattgaactccttaatacaattatgaatctgtga

SEQ ID NO: 441074 - DNA, 120 bp, Artificial Sequence
  ENSG00000153975_17 (sequence is synthesized)
attctcttaagtcttaacatataatttaatttctaaaatgcctgtgttaattgaattatacctatcatacttcattgtttggtaaattatttcaataaaatgtcttgtttttgcattgtg

SEQ ID NO: 441075 - DNA, 120 bp, Artificial Sequence
  ENSG00000153975_18 (sequence is synthesized)
tcattatggtggcttagaagtggaaaaatcctatatgaatgttagaagcccactgaacgaaaataaaaagtagatcccaagagaaaccaattgtgttttaccctatttcagttttttaag

SEQ ID NO: 441076 - DNA, 120 bp, Artificial Sequence
  ENSG00000153975_19 (sequence is synthesized)
agttttgttctagaacagtttttgttctttcatttgagataatttgaataagaaggatcaaaggattgggaaaggaaaagtaaaatatttggcagaataaaaatgttttttttggtaatg

SEQ ID NO: 441077 - DNA, 120 bp, Artificial Sequence
  ENSG00000153975_20 (sequence is synthesized)
aagcctttagaaaactaaagttaaatgaaaaaactgaagtagaactaaactcttacgtcttaggagaacttagatacatatgtgtcagagtctgactgtatttatattctaaacacacat

SEQ ID NO: 441078 - DNA, 120 bp, Artificial Sequence
  ENSG00000153976_0 (sequence is synthesized)
gccagcggcggcccaggaggcagccggtgagcgcctgcgagcagagtggcgggggccgctgacaggtcccgcgcagcccagcccagcccagccacgcggctcacaggtggggtccaagag

SEQ ID NO: 441079 - DNA, 120 bp, Artificial Sequence
  ENSG00000153976_1 (sequence is synthesized)
cagtttggagcaacccggcgctacggagaggggtggacggctctgcacgggcctcctgtctcccgctcgggcagagggactcggggggacctcgctccttggctgagagaacctgaactc

SEQ ID NO: 441080 - DNA, 120 bp, Artificial Sequence
  ENSG00000153976_2 (sequence is synthesized)
gggcggagagaacgcgcccaggcgggcaaggggaccagagaaagccggggctggaagtcactgtcgctcgccactgtctggagcgcacggagcgcagaggcccggcagccgcgcgtgccc

SEQ ID NO: 441081 - DNA, 120 bp, Artificial Sequence
  ENSG00000153976_3 (sequence is synthesized)
tcacggggaccgagccagtgatgcaggatcgctgagcggagatccgcgccgagaagtctctcggggccggggctgagacgcacgccttcgacaccgctgccaagaccccgattccggcga

SEQ ID NO: 441082 - DNA, 120 bp, Artificial Sequence
  ENSG00000153976_4 (sequence is synthesized)
ctcttgcggggaaccgaggggccaaggctgccccaagctcaggacttgggcgagtctaagacgatggtttcttaagcacggacccgcgttccccttcccgctccctcgactggaggcagg

SEQ ID NO: 441083 - DNA, 120 bp, Artificial Sequence
  ENSG00000153976_5 (sequence is synthesized)
gatcctgcgcggggcccccgggattccgtttccccgcggagccccggccgctgcctcccgggacagttcgcacggccacaggggcgcacggcgatgtggcctccgtccagcgcgctggcc

SEQ ID NO: 441084 - DNA, 120 bp, Artificial Sequence
  ENSG00000153976_6 (sequence is synthesized)
cgccggggggatgctctggcacctgtcggggtccaggcctagcatggccggcgcgttgcccgacgtcgcctccggctaggatggcccctccgggcccggccagtgccctctccacctcgg

SEQ ID NO: 441085 - DNA, 120 bp, Artificial Sequence
  ENSG00000153976_7 (sequence is synthesized)
ccgagccgctgtcccgcagcatcttccggaagttcttgctgatgctctgctccctgctcacgtccctttacgtcttctactgcctggccgagcgctgccagaccctgtccggccccgtcg

SEQ ID NO: 441086 - DNA, 80 bp, Artificial Sequence
  ENSG00000153976_8 (sequence is synthesized)
tggcggcgtcctggccggaggcccgagggagctggcggtgtggccggcggcggcacagagaaagcgcctcctgcaactgc

SEQ ID NO: 441087 - DNA, 120 bp, Artificial Sequence
  ENSG00000153976_9 (sequence is synthesized)
aaagcgcctcctgcaactgccgcagtggcggaggcgccggccgcccgcgccccgcgacgacggcgaggaggcggcctgggaagaagagtcccctggcctgtcagggggtccgggcggctc

SEQ ID NO: 441088 - DNA, 120 bp, Artificial Sequence
  ENSG00000153976_10 (sequence is synthesized)
ccgaggccccgccggggaccctggcgctgctcctggacgaaggcagcaagcagctgccgcaggccatcatcatcggagtgaagaagggcggcacgcgggcgctgctggagttcctgcgcg

SEQ ID NO: 441089 - DNA, 120 bp, Artificial Sequence
  ENSG00000153976_11 (sequence is synthesized)
tgcaccccgacgtgcgcgccgtgggcgccgagccccacttcttcgaccgcagctacgacaagggcctcgcctggtaccgggacctgatgcccagaaccctggacgggcagatcaccatgg

SEQ ID NO: 441090 - DNA, 120 bp, Artificial Sequence
  ENSG00000153976_12 (sequence is synthesized)
agaagacgcccagttacttcgtcacgcgggaggcccccgcgcgcatctcggccatgtccaaggacaccaagctcatcgtggtggtgcgggacccggtgaccagggccatctcggactaca

SEQ ID NO: 441091 - DNA, 120 bp, Artificial Sequence
  ENSG00000153976_13 (sequence is synthesized)
cgcagacgctgtccaagcggcccgacatccccaccttcgagagcttgacgttcaaaaacaggacagcgggcctcatcgacacgtcgtggagcgccatccagatcggcatctacgccaagc

SEQ ID NO: 441092 - DNA, 120 bp, Artificial Sequence
  ENSG00000153976_14 (sequence is synthesized)
acctggagcactggctgcgccacttccccatccgccagatgctcttcgtgagcggcgagcggctcatcagcgacccggccggggagctgggccgcgtgcaagacttcctgggcctcaaga

SEQ ID NO: 441093 - DNA, 120 bp, Artificial Sequence
  ENSG00000153976_15 (sequence is synthesized)
ggatcatcacggacaagcacttctacttcaacaagaccaagggcttcccctgcctgaagaaggcggagggcagcagccggccccattgcctgggcaagaccaagggcaggacccatcctg

SEQ ID NO: 441094 - DNA, 120 bp, Artificial Sequence
  ENSG00000153976_16 (sequence is synthesized)
agatcgaccgcgaggtggtgcgcaggctgcgcgagttctaccggcctttcaacctcaagttctaccagatgaccgggcacgactttggctgggatggataaccatataatttaaaaagaa

SEQ ID NO: 441095 - DNA, 120 bp, Artificial Sequence
  ENSG00000153976_17 (sequence is synthesized)
agattgttctcactcccgccccatcttaatgtataaccaacaccaaacacgtggatcaacagaaaaggaaaatttcactcgtctaaacactttcaattttcagtttttattttatgttct

SEQ ID NO: 441096 - DNA, 120 bp, Artificial Sequence
  ENSG00000153976_18 (sequence is synthesized)
atatacccagtcataaagtataagcatcagttgtcattaaaagttttcagaaaatcttgaggttaaacatctctctctctttttttaaaatacaaggccctgataaaattgatatctatc

SEQ ID NO: 441097 - DNA, 120 bp, Artificial Sequence
  ENSG00000153976_19 (sequence is synthesized)
cttatatttttctccctttttcccgtgccactttttcttaaattatttcccagttagtattatcatatgtttgtacccgtcacagttttcatagtgctttcaaatacacctttttgatca

SEQ ID NO: 441098 - DNA, 120 bp, Artificial Sequence
  ENSG00000153976_20 (sequence is synthesized)
ttaaaataaaaaaataaatcttgctctgttgtataagatcacaataggtaaatattattatccccattttacagaaaggaaaactgagtctttgggaggtgaaataatgtatctaaaggt

SEQ ID NO: 441099 - DNA, 120 bp, Artificial Sequence
  ENSG00000153976_21 (sequence is synthesized)
caaatgttggatggaccctggacaaaattccatcttccacttgttccctatttcatgtcactttttccagggagaatggaaaagaagacatctgcacctttagaaatggttaggtagttt

SEQ ID NO: 441100 - DNA, 120 bp, Artificial Sequence
  ENSG00000153976_22 (sequence is synthesized)
tcagatgatatgaaaagggaaagagagccccttgttttctaaattcccaggctacccctcatggcacccagtctcattacatagttgtgtccaagaaaaccactgagacctggacacaac

SEQ ID NO: 441101 - DNA, 120 bp, Artificial Sequence
  ENSG00000153976_23 (sequence is synthesized)
ctctcttaagagccagtcttgcctcttggctatttaaagtacactgagatatggaaatcttgactgatgaatgcttgattgaattggagaggaattattggattcttgcatggaggacaa

SEQ ID NO: 441102 - DNA, 120 bp, Artificial Sequence
  ENSG00000153976_24 (sequence is synthesized)
ggtggccagccacactaggggtagcacaagatgtgttaggaacgtaacttacccatttgttgatttaattgactttaaaaaaaaaaaagaaacagatttcaattagcacttacaggtatg

SEQ ID NO: 441103 - DNA, 120 bp, Artificial Sequence
  ENSG00000153976_25 (sequence is synthesized)
agtctcatttgttttttagtttacctctttttaaagagagaaaacctacctttctttgtaatatctcacttctaactttggagctagtactctgaaagaattaattagcagttcgtttaa

SEQ ID NO: 441104 - DNA, 120 bp, Artificial Sequence
  ENSG00000153976_26 (sequence is synthesized)
aatgtttttatttttcatggatggaggactatcattttgtcactttattcccccctcccacttcctatttataccatttataacctaatgttcagtaatatttggaaaaatattctagga

SEQ ID NO: 441105 - DNA, 120 bp, Artificial Sequence
  ENSG00000153976_27 (sequence is synthesized)
aatgcatttgtgggtaaaatggtggcttttcctcttctctcgtctgtttctgcccatcccccatttaaatcactcaaataaatcaatagtttattaacagtattcctttcctctctgagt

SEQ ID NO: 441106 - DNA, 120 bp, Artificial Sequence
  ENSG00000153976_28 (sequence is synthesized)
gggtattaacaagattagcattaatgggaattaaattggtttagagaggaacacatatgcacgaaatatataaaacatttataattagcctgtcagcaacattttattagaaatttaaac

SEQ ID NO: 441107 - DNA, 120 bp, Artificial Sequence
  ENSG00000153976_29 (sequence is synthesized)
ccaagaggaaaaatgtcttctatttcatggaagttttctttatctgccaaaatttaaacgaccagacactctaaaataatattctttttcttctttaatgttgtcaatcaaaagaaacta

SEQ ID NO: 441108 - DNA, 120 bp, Artificial Sequence
  ENSG00000153976_30 (sequence is synthesized)
aagttgttttaaaatatgcagtacaattgtacatttaccatagctgctgcattaggtgatgtaaatatttcttgagaagcttaacacaggattaaaatgaaggaaaaaatattttaagtg

SEQ ID NO: 441109 - DNA, 120 bp, Artificial Sequence
  ENSG00000153976_31 (sequence is synthesized)
ttagatattttgtcattgctccaaatctttggatttatctgttaatatcccatttatagaagttaagtaaaccccaaatccaggtcaccttttttcagttgatttccttcatgtctatgc

SEQ ID NO: 441110 - DNA, 120 bp, Artificial Sequence
  ENSG00000153976_32 (sequence is synthesized)
tctcaatttcccagtgccacagactgtttttattctacttgaatcactagctgcaacaagatactcattttaaactcttgtcatcatttctcttagctcattttgtttgtacaactgatt

SEQ ID NO: 441111 - DNA, 120 bp, Artificial Sequence
  ENSG00000153976_33 (sequence is synthesized)
cttttgtaagtgtttgcttggcattatgcaaaagtggcttgcacaaagaaacaattgcattctgcaaccttcatttttttaatgtgaaagaaataaaagaacagaattgaatgcaaagga

SEQ ID NO: 441112 - DNA, 120 bp, Artificial Sequence
  ENSG00000153976_34 (sequence is synthesized)
cagtactgaagaagggcttcccagatttttcttcttcttaggtcattttgcataagattgggagaaagacaagagaaggaggaaatctaacgaaaccaaagggacctgatgcccagaacc

SEQ ID NO: 441113 - DNA, 120 bp, Artificial Sequence
  ENSG00000153982_0 (sequence is synthesized)
gagccgacctcgagcagccgccgccgccgccgtcgttgctactgccgcagcggagttcagagggcccggaggtgggagacttcccacacggtgactgagatgtcgtccactgcggctttt

SEQ ID NO: 441114 - DNA, 120 bp, Artificial Sequence
  ENSG00000153982_1 (sequence is synthesized)
taccttctctctacgctaggaggatacttggtgacctcattcttgttgcttaaatacccgaccttgctgcaccagagaaagaagcagcgattcctcagtaaacacatctctcaccgcgga

SEQ ID NO: 441115 - DNA, 120 bp, Artificial Sequence
  ENSG00000153982_2 (sequence is synthesized)
ggtgctggagaaaatttggagaatacaatggcagcctttcagcatgcggttaaaatcggaactgatatgctagaattggactgccatatcacaaaagatgaacaagttgtagtgtcacat

SEQ ID NO: 441116 - DNA, 120 bp, Artificial Sequence
  ENSG00000153982_3 (sequence is synthesized)
gatgagaatctaaagagagcaactggggtcaatgtaaacatctctgatctcaaatactgtgagctcccaccttaccttggcaaactggatgtctcatttcaaagagcatgccagtgtgaa

SEQ ID NO: 441117 - DNA, 120 bp, Artificial Sequence
  ENSG00000153982_4 (sequence is synthesized)
ggaaaagataaccgaattccattactgaaggaagtttttgaggcctttcctaacactcccattaacatcgatatcaaagtcaacaacaatgtgctgattaagaaggtttcagagttggtg

SEQ ID NO: 441118 - DNA, 120 bp, Artificial Sequence
  ENSG00000153982_5 (sequence is synthesized)
aagcggtataatcgagaacacttaacagtgtggggtaatgccaattatgaaattgtagaaaagtgctacaaagagaattcagatattcctatactcttcagtctacaacgtgtcctgctc

SEQ ID NO: 441119 - DNA, 120 bp, Artificial Sequence
  ENSG00000153982_6 (sequence is synthesized)
attcttggccttttcttcactggcctcttgccctttgtgcccattcgagaacagttttttgaaatcccaatgccttctattatactgaagctaaaagaaccacacaccatgtccagaagt

SEQ ID NO: 441120 - DNA, 120 bp, Artificial Sequence
  ENSG00000153982_7 (sequence is synthesized)
caaaagtttctcatctggctttctgatctcttactaatgaggaaagctttgtttgaccacctaactgctcgaggcattcaagtgtatatttgggtattaaatgaagaacaagaatacaaa

SEQ ID NO: 441121 - DNA, 120 bp, Artificial Sequence
  ENSG00000153982_8 (sequence is synthesized)
agagcttttgatttgggagcaactggggtgatgacagactatccaacaaagcttagggattttttacataacttttcagcatagaaaaagaggtacttagaagtattgaaggaaaaaatg

SEQ ID NO: 441122 - DNA, 120 bp, Artificial Sequence
  ENSG00000153982_9 (sequence is synthesized)
aagacctaagaaaaaaatatttcatgatcatttccctaagccatttccagaatggtaaaaggtttaatcagtttttattacctcatttttaagcctgtatgagaatgtagaaactatata

SEQ ID NO: 441123 - DNA, 120 bp, Artificial Sequence
  ENSG00000153982_10 (sequence is synthesized)
tattttatgtttgtaaattgtttagaaagataattggttatgagatgtaagttttaatttcttaatgtgcatttttgtttctagatcttatacagaaatcttgattaataacatacacag

SEQ ID NO: 441124 - DNA, 120 bp, Artificial Sequence
  ENSG00000153982_11 (sequence is synthesized)
tatacagaaatcttgattaataacatacacagaaatgtacatactacatcatctacagaaatcttgatcaataacctagaaactaggttatctaggttattgatcaagatttctgtagat

SEQ ID NO: 441125 - DNA, 120 bp, Artificial Sequence
  ENSG00000153982_12 (sequence is synthesized)
tatctaggttattgatcaagatttctgtagatgatgcagtgttctatcataagtaattctggaatcaaagactattggatacatttggcattgggctgagtgtggtggctcatgcctgta

SEQ ID NO: 441126 - DNA, 65 bp, Artificial Sequence
  ENSG00000153982_13 (sequence is synthesized)
atgcgtggtggtacacgtctgtcatcccagcagctcttaaggctgaggcacaagaattgcttgaa

SEQ ID NO: 441127 - DNA, 120 bp, Artificial Sequence
  ENSG00000153982_14 (sequence is synthesized)
ccgtctcaaaaaaagaaaaaaagaaaaaaaattggcaatagtcttcactggaatacaatcaattagtaaaagattttttttttttttttgacatgtagtcttgctctgtcgccgaggccg

SEQ ID NO: 441128 - DNA, 120 bp, Artificial Sequence
  ENSG00000153982_15 (sequence is synthesized)
tgcacccggccagtaaaagaaattttgaaggccattgcagctatttggtagtgtcttgttatttctaggtgtaccttagttaaagaggaaaaataaaacggaaaaaagcttggaaatcag

SEQ ID NO: 441129 - DNA, 120 bp, Artificial Sequence
  ENSG00000153982_16 (sequence is synthesized)
tgatgtgtagttatttggcaagttatacataatcagcagcagccaggctcaagaaaataaaagttgattagttgatcagaaataaaatctgtagagtgaattagatttctgagttgttgt

SEQ ID NO: 441130 - DNA, 120 bp, Artificial Sequence
  ENSG00000153982_17 (sequence is synthesized)
tgttaatggaacattctatttgagacctttttcaggtgtgtagcaattctaccatgtccatttttttaagcattaaaaaggaacttaccagttgtaaattaagacaagatccaaatagtc

SEQ ID NO: 441131 - DNA, 120 bp, Artificial Sequence
  ENSG00000153982_18 (sequence is synthesized)
atatttttgtgtttcctctaaaaaaatgtaagatttccatttttggcactgactaactgagcctacatctagattttaaataccatcttgaatcctaataattaaactgatgaaagtgca

SEQ ID NO: 441132 - DNA, 120 bp, Artificial Sequence
  ENSG00000153982_19 (sequence is synthesized)
tatcattgttcctaacatttatgaacccccataaagatgttcctgatctttaaaactcattaatctgagtattaagtagaaacagaattttccaaagcattagacatcactttctcagtt

SEQ ID NO: 441133 - DNA, 120 bp, Artificial Sequence
  ENSG00000153982_20 (sequence is synthesized)
tatctgaggtgacttcgtgtacatctgtttctaatatatttgactaattttcatgatctcagattgtgaggtaaatgtaatctggaataataagtgtcttttacctagattacatctctc

SEQ ID NO: 441134 - DNA, 120 bp, Artificial Sequence
  ENSG00000153982_21 (sequence is synthesized)
atttggagtttggcaatgaaactgctatgaagaatgactgtactctcctatctgtccctggatgacataaatatcatttgctttgttgtttaaactgaaataaagttttccaagaacaaa

SEQ ID NO: 441135 - DNA, 120 bp, Artificial Sequence
  ENSG00000153982_22 (sequence is synthesized)
gcaagaacttttaactgacttagtttggcccttgactctgatgctgctgctttactgatccacaaatgaggaccttaagctcttccttacacttagcaataaagcattggcatttctgga

SEQ ID NO: 441136 - DNA, 120 bp, Artificial Sequence
  ENSG00000153982_23 (sequence is synthesized)
taactgacctctaagtttgttccctcaggcctacaaatctgaatacttgaaaattatctgacgtgaaattatcaggtccaaagagttaagtgattcattctgcttaaattcatgtacagt

SEQ ID NO: 441137 - DNA, 120 bp, Artificial Sequence
  ENSG00000153982_24 (sequence is synthesized)
taacttaaacctgaacactgattgcaagaaacatttcacttctaaagcttcaaattctagaatattgccgcaacttatattagtcatccatcaaaaaatataataaaaaataaatgaaaa

SEQ ID NO: 441138 - DNA, 120 bp, Artificial Sequence
  ENSG00000153989_0 (sequence is synthesized)
gtactactgggggcggggctgccaagggaggaggaagatggcggcgggggcgaggtgaggtgttggcagtggaaaggggttcgggctcggggggcggggggacgcggagcgatggcccgc

SEQ ID NO: 441139 - DNA, 120 bp, Artificial Sequence
  ENSG00000153989_1 (sequence is synthesized)
gccggccgcaggggcggataaaaagccgtcgcgctgcgggagtgggcgggagggagagggggtgtctgagggccacaagagtatgacggggctgtacgagctggtgtggcgggtgctgca

SEQ ID NO: 441140 - DNA, 120 bp, Artificial Sequence
  ENSG00000153989_2 (sequence is synthesized)
cgcgctgctctgtctgcaccgcacgctcacctcctggctccgcgttcggttcggcacctggaactggatctggcggcgctgctgccgcgccgcctctgccgcggtcctagcgccgctcgg

SEQ ID NO: 441141 - DNA, 120 bp, Artificial Sequence
  ENSG00000153989_3 (sequence is synthesized)
cttcacgctccgcaagcccccggcagtcggcaggaaccgccgtcaccaccggcacccgcgcggggggtcgtgcctggcagccgcacaccaccggatgcgctggcgcgcggacggtcgttc

SEQ ID NO: 441142 - DNA, 120 bp, Artificial Sequence
  ENSG00000153989_4 (sequence is synthesized)
cttggagaagctgcctgtgcatatgggcctggtgatcaccgaggtggagcaggaacccagcttctcggacatcgcgagcctcgtggtgtggtgtatggccgtgggcatctcctacattag

SEQ ID NO: 441143 - DNA, 120 bp, Artificial Sequence
  ENSG00000153989_5 (sequence is synthesized)
cgtctacgaccaccaaggtattttcaaaagaaataattccagattgatggatgaaattttaaaacaacagcaagaacttctgggcctagattgttcaaaatactcaccagaatttgcaaa

SEQ ID NO: 441144 - DNA, 120 bp, Artificial Sequence
  ENSG00000153989_6 (sequence is synthesized)
tagtaatgacaaagatgatcaagttttaaattgccatttggcagtgaaggtgctgtctccggaagatggaaaagcagatattgtaagagctgctcaggacttttgccagttagtagccca

SEQ ID NO: 441145 - DNA, 120 bp, Artificial Sequence
  ENSG00000153989_7 (sequence is synthesized)
gaagcaaaagagacccacagatttggatgtagatacgttagccagtttacttagttcaaatggttgtcctgatcctgatttagtattgaagttcggtcctgtggacagcacattaggctt

SEQ ID NO: 441146 - DNA, 120 bp, Artificial Sequence
  ENSG00000153989_8 (sequence is synthesized)
tcttccctggcacatcagattgactgagattgtctctttgccttcccacctaaacatcagttatgaggactttttctctgcccttcgtcaatatgcagcctgtgaacagcgtctgggaaa

SEQ ID NO: 441147 - DNA, 120 bp, Artificial Sequence
  ENSG00000153989_9 (sequence is synthesized)
gtagtggtcattggttgcataatttgatttgaggcttgtggaggaaaggaaccaagtgactctgatgtttacaaagcacctatgaaaccctgtacacacctagttcataatcctcataat

SEQ ID NO: 441148 - DNA, 120 bp, Artificial Sequence
  ENSG00000153989_10 (sequence is synthesized)
ttatcaacaaacacaaaaaagtgtcttacttgagagtgagtgtgtgtgtgtgcgtgtgcacgtgcacacatgtgcacgtttgtatgtatggaaataaacttataaatggggacgtattgg

SEQ ID NO: 441149 - DNA, 120 bp, Artificial Sequence
  ENSG00000153989_11 (sequence is synthesized)
agaaggaaatacatagacctacaactttgagcaaatagcagtgatgttttaggaactgaaatgtcacacttaaagtcttcagcccagctacttccctatttttgtggggagaagagggcc

SEQ ID NO: 441150 - DNA, 120 bp, Artificial Sequence
  ENSG00000153989_12 (sequence is synthesized)
tgattagaactgttctggttgtgtttggcgggaggggaataatttttgttcagtccttcttagtgaccaaactttaatttttaagaataatatattgacttactgaactgaagcattctg

SEQ ID NO: 441151 - DNA, 120 bp, Artificial Sequence
  ENSG00000153989_13 (sequence is synthesized)
agttgaaaggagctccagaggagtggagttctgtgttgctcacatgttaaaatcttgctcaccttcagagcagagggaatacctatcttcagatatccgtccattttcatctcttaattg

SEQ ID NO: 441152 - DNA, 120 bp, Artificial Sequence
  ENSG00000153989_14 (sequence is synthesized)
tagtcaaaagtatgacttgagagtgttgctctggtattctgggttctgaagtctggtattctggtattctgggttcaaaagtatgacttgagagtgttgctctggtattctgagagttgc

SEQ ID NO: 441153 - DNA, 120 bp, Artificial Sequence
  ENSG00000153989_15 (sequence is synthesized)
tctgtattctgggttctgaagattatttgaaaaataactcctactacattgaaatgcagacttaaaaatttaaacattggattaggcagtcaaaaaaaccaagcaagcataaaaggtcaa

SEQ ID NO: 441154 - DNA, 120 bp, Artificial Sequence
  ENSG00000153989_16 (sequence is synthesized)
taagttgtaatcttgatagtaaaggtggaaaacttattataaatggaaagaaagttttatttccttttttgtttgatgggcagtatgccatattatacccaaagttcttttaaaaaatat

SEQ ID NO: 441155 - DNA, 120 bp, Artificial Sequence
  ENSG00000153989_17 (sequence is synthesized)
ttccatcaaccatttttatttaaaataaacatttgagggaagttaccaaggcagcttttttcctcaaaagtaacctgttcctctttggaatagcacattttaggggcatggttaatacct

SEQ ID NO: 441156 - DNA, 120 bp, Artificial Sequence
  ENSG00000153989_18 (sequence is synthesized)
gagatttttactcagtaaatcctgatggttactgtgtgtaaaatatctttaagtaggattgaaggcctctgtgggggaataaaatattaccaaagtctataaaaataaattttacatgtt

SEQ ID NO: 441157 - DNA, 120 bp, Artificial Sequence
  ENSG00000153989_19 (sequence is synthesized)
ttatatttgatagactgctttcagaaaacccttatcaacaagtgtacaatacttatctaaaactatacatttagaatggagcagtttaatactagatctcagaagttttgaaaaatagca

SEQ ID NO: 441158 - DNA, 120 bp, Artificial Sequence
  ENSG00000153989_20 (sequence is synthesized)
aagaagactggatttggaaagcatggtctacaattggttgttaaattctgaagctatgaagaataaatgtttcaactttggattatgaaaccccatttatgattttttaaatacacttga

SEQ ID NO: 441159 - DNA, 120 bp, Artificial Sequence
  ENSG00000153989_21 (sequence is synthesized)
aataaaaatgattaaactaaattttggtccagtgacattactttgcactgcataatccattatacgttgtacgactttttttttttgttttaatttattactgagagttttgtgtgaagc

SEQ ID NO: 441160 - DNA, 120 bp, Artificial Sequence
  ENSG00000153989_22 (sequence is synthesized)
tacagcatatctaaccagagaatttctgattccttatactgtgattatattatattgaggcatttgtagtgcagctgaagactgaatttatgccttttgtaaacatgataggtataaatg

SEQ ID NO: 441161 - DNA, 120 bp, Artificial Sequence
  ENSG00000153989_23 (sequence is synthesized)
tcttataaacattctggagtatgtatagctttaatgaatgaaatttaatggacctgattaaaatgaagggatttaatcgttgttaaagttaagttagtcaaataaattacctactggaat

SEQ ID NO: 441162 - DNA, 120 bp, Artificial Sequence
  ENSG00000153989_24 (sequence is synthesized)
atagcccaagccagtaaaggtttaatatttgcattttcgtgcttttattttctccttccattcataagtatatacttgaaagtacatctgtagcctatgatttgagtctcttgaagttct

SEQ ID NO: 441163 - DNA, 120 bp, Artificial Sequence
  ENSG00000153989_25 (sequence is synthesized)
aggaagaggcaaactacaaactactaggattctgatttcagatgtagtcattccagaaccttctctttatgagttcacctgctagtacaatctccacaacttgaatggcattggttgttc

SEQ ID NO: 441164 - DNA, 120 bp, Artificial Sequence
  ENSG00000153989_26 (sequence is synthesized)
tgtaattcctgccaaaagcatcacaagttgtacatcatcaaggctccctttgcactcccaagaagaactggtaattttaaacaaaagtatgtgtctttatttgtattggaaaatactgtc

SEQ ID NO: 441165 - DNA, 120 bp, Artificial Sequence
  ENSG00000153989_27 (sequence is synthesized)
tttaaattgtttcttgttgacactccccacaatggaaaaattaccgaattaaacctgttttatggatggcagcttggagcatagcaagaagttggaggatttgaattccattcccagttc

SEQ ID NO: 441166 - DNA, 120 bp, Artificial Sequence
  ENSG00000153989_28 (sequence is synthesized)
tcattgtgttttgtttcttaaaactataataatcggttactgttataaagtttaaaaggtggttttaatgtgaatagcaaattctggtatatcgtgactaacgcttaagaatgcctgtct

SEQ ID NO: 441167 - DNA, 120 bp, Artificial Sequence
  ENSG00000153989_29 (sequence is synthesized)
ttgagaggaaggtgttataatattaatgaacagtgccaaatacactgtgcatatctgcaatttaatctttgaatgtatgttactggattagctccctcctcctgtgtgatggtaccatgc

SEQ ID NO: 441168 - DNA, 120 bp, Artificial Sequence
  ENSG00000153989_30 (sequence is synthesized)
atagagtcaatcaaatccttgtgatgttttgtatggactttgacaatatgtaaataatgtgtaaagccagtttttatgattaaggaatcaaatttattgaattttattattgaaagttga

SEQ ID NO: 441169 - DNA, 120 bp, Artificial Sequence
  ENSG00000153989_31 (sequence is synthesized)
aacttaacatgtatgaacaaaaaccaataaaagaatatactcttttcattgactatagtattatgtgaatgctacatttgttctgaacacttaggggctgcaaaaatgtaataagaaatg

SEQ ID NO: 441170 - DNA, 120 bp, Artificial Sequence
  ENSG00000153989_32 (sequence is synthesized)
catatgactagatagcaatagtgttttttttagatggtatgctcttgattgaaatatattctcacttttaccaggttaaacatttggaatcttataatgttacttgctttttgatagata

SEQ ID NO: 441171 - DNA, 120 bp, Artificial Sequence
  ENSG00000153989_33 (sequence is synthesized)
atagtgaaataaattcagctttgccattgctggagttgtcaaaattccacagtaattaaaatttgaatttttaccgaatatgaaatttccaaattaaaaacgtatatgtgtactctttta

SEQ ID NO: 441172 - DNA, 120 bp, Artificial Sequence
  ENSG00000153989_34 (sequence is synthesized)
aaaaggaatttgatagttcttgtcaaatgagaaaatttaaaggtaagagttatggtttgtcttatgctgcatagactattcacctcctaacttgaaggtctaatcataagacaattgttt

SEQ ID NO: 441173 - DNA, 120 bp, Artificial Sequence
  ENSG00000153989_35 (sequence is synthesized)
ttttgtgcatagttttcatctaaaattaagtttaccaaaggcaaataactgcttactaggaacttcctttagcaaaaattactataaagttcaggacagtttgaaataaaacccaggaaa

SEQ ID NO: 441174 - DNA, 120 bp, Artificial Sequence
  ENSG00000153989_36 (sequence is synthesized)
caagattaatgtgagcagttctccaagatcctaactggtgggacataaactatgatgcaatggataggaaaaggtagtgcaaaaagaatttcttaaggtttaaaaaatacacttttcatt

SEQ ID NO: 441175 - DNA, 120 bp, Artificial Sequence
  ENSG00000153989_37 (sequence is synthesized)
ataggaaaaagaagattcagagaaacaaaggaatgtaaccttattgattacatttttggtgatcaccgagaattttttgtactatattttaaaaaatgtattctactgtaacaagttaat

SEQ ID NO: 441176 - DNA, 120 bp, Artificial Sequence
  ENSG00000153989_38 (sequence is synthesized)
aaagagattttttaaaaaactataaactagaaattgagagtcttgcattctcttttgtatttgattattgtgtctggatataaattacaatagcacatgaaaataaaatgttttaaaaaa

SEQ ID NO: 441177 - DNA, 120 bp, Artificial Sequence
  ENSG00000153993_0 (sequence is synthesized)
ttagattaaattaacaccatttgaaagagaacattgttttcatcatgaatgctaataaagatgaaagacttaaagccagaagccaagattttcacctttttcctgctttgatgatgctaa

SEQ ID NO: 441178 - DNA, 120 bp, Artificial Sequence
  ENSG00000153993_1 (sequence is synthesized)
gcatgaccatgttgtttcttccagtcactggcactttgaagcaaaatattccaagactcaagctaacctacaaagacttgctgctttcaaatagctgtattccctttttgggttcatcag

SEQ ID NO: 441179 - DNA, 120 bp, Artificial Sequence
  ENSG00000153993_2 (sequence is synthesized)
aaggactggattttcaaactcttctcttagatgaggaaagaggcaggctgctcttgggagccaaagaccacatctttctactcagtctggttgacttaaacaaaaattttaagaagattt

SEQ ID NO: 441180 - DNA, 120 bp, Artificial Sequence
  ENSG00000153993_3 (sequence is synthesized)
attggcctgctgcaaaggaacgggtggaattatgtaaattagctgggaaagatgccaatacagaatgtgcaaatttcatcagagtacttcagccctataacaaaactcacatatatgtgt

SEQ ID NO: 441181 - DNA, 120 bp, Artificial Sequence
  ENSG00000153993_4 (sequence is synthesized)
gtggaactggagcatttcatccaatatgtgggtatattgatcttggagtctacaaggaggatattatattcaaactagacacacataatttggagtctggcagactgaaatgtcctttcg

SEQ ID NO: 441182 - DNA, 120 bp, Artificial Sequence
  ENSG00000153993_5 (sequence is synthesized)
atcctcagcagccttttgcttcagtaatgacagatgagtacctctactctggaacagcttctgatttccttggcaaagatactgcattcactcgatcccttgggcctactcatgaccacc

SEQ ID NO: 441183 - DNA, 120 bp, Artificial Sequence
  ENSG00000153993_6 (sequence is synthesized)
actacatcagaactgacatttcagagcactactggctcaatggagcaaaatttattggaactttcttcataccagacacctacaatccagatgatgataaaatatatttcttctttcgtg

SEQ ID NO: 441184 - DNA, 120 bp, Artificial Sequence
  ENSG00000153993_7 (sequence is synthesized)
aatcatctcaagaaggcagtacctccgataaaaccatcctttctcgagttggaagagtttgtaagaatgatgtaggaggacaacgcagcctgataaacaagtggacgacttttcttaagg

SEQ ID NO: 441185 - DNA, 120 bp, Artificial Sequence
  ENSG00000153993_8 (sequence is synthesized)
ccagactgatttgctcaattcctggaagtgatggggcagatacttactttgatgagcttcaagatatttatttactccccacaagagatgaaagaaatcctgtagtatatggagtcttta

SEQ ID NO: 441186 - DNA, 120 bp, Artificial Sequence
  ENSG00000153993_9 (sequence is synthesized)
ctacaaccagctccatcttcaaaggctctgctgtttgtgtgtatagcatggctgacatcagagcagtttttaatggtccatatgctcataaggaaagtgcagaccatcgttgggtgcagt

SEQ ID NO: 441187 - DNA, 120 bp, Artificial Sequence
  ENSG00000153993_10 (sequence is synthesized)
atgatgggagaattccttatccacggcctggtacatgtccaagcaaaacctatgacccactgattaagtccacccgagattttccagatgatgtcatcagtttcataaagcggcactctg

SEQ ID NO: 441188 - DNA, 120 bp, Artificial Sequence
  ENSG00000153993_11 (sequence is synthesized)
tgatgtataagtccgtatacccagttgcaggaggaccaacgttcaagagaatcaatgtggattacagactgacacagatagtggtggatcatgtcattgcagaagatggccagtacgatg

SEQ ID NO: 441189 - DNA, 120 bp, Artificial Sequence
  ENSG00000153993_12 (sequence is synthesized)
taatgtttcttggaacagacattggaactgtcctcaaagttgtcagcatttcaaaggaaaagtggaatatggaagaggtagtgctggaggagttgcagatattcaagcactcatcaatca

SEQ ID NO: 441190 - DNA, 120 bp, Artificial Sequence
  ENSG00000153993_13 (sequence is synthesized)
tcttgaacatggaattgtctctgaagcagcaacaattgtacattggttcccgagatggattggttcagctctccttgcacagatgcgacacttatgggaaagcttgcgcagactgttgtc

SEQ ID NO: 441191 - DNA, 120 bp, Artificial Sequence
  ENSG00000153993_14 (sequence is synthesized)
ttgccagagacccctactgtgcctgggatggaaatgcatgctctcgatatgctcctacttctaaaaggagagctagacgccaagatgtaaaatatggcgacccaatcacccagtgctggg

SEQ ID NO: 441192 - DNA, 120 bp, Artificial Sequence
  ENSG00000153993_15 (sequence is synthesized)
acatcgaagacagcattagtcatgaaactgctgatgaaaaggtgatttttggcattgaatttaactcaacctttctggaatgtatacctaaatcccaacaagcaactattaaatggtata

SEQ ID NO: 441193 - DNA, 120 bp, Artificial Sequence
  ENSG00000153993_16 (sequence is synthesized)
tccagaggtcaggggatgagcatcgagaggagttgaagcccgatgaaagaatcatcaaaacggaatatgggctactgattcgaagtttgcagaagaaggattctgggatgtattactgca

SEQ ID NO: 441194 - DNA, 120 bp, Artificial Sequence
  ENSG00000153993_17 (sequence is synthesized)
aagcccaggagcacactttcatccacaccatagtgaagctgactttgaatgtcattgagaatgaacagatggaaaatacccagagggcagagcatgaggaggggaaggtcaaggatctat

SEQ ID NO: 441195 - DNA, 120 bp, Artificial Sequence
  ENSG00000153993_18 (sequence is synthesized)
tggctgagtcacggttgagatacaaagactacatccaaatccttagcagcccaaacttcagcctcgaccagtactgcgaacagatgtggcacagggagaagcggagacagagaaacaagg

SEQ ID NO: 441196 - DNA, 120 bp, Artificial Sequence
  ENSG00000153993_19 (sequence is synthesized)
ggggcccaaagtggaagcacatgcaggaaatgaagaagaaacgaaatcgaagacatcacagagacctggatgagctccctagagctgtagccacgtagttttctacttaatttaaagaaa

SEQ ID NO: 441197 - DNA, 120 bp, Artificial Sequence
  ENSG00000153993_20 (sequence is synthesized)
agaattccttacctataaaaacattgccttctgttttgtatatcccttatagtaattcataaatgcttcccatggagttttgctaaggcacaagacaataatctgaataagacaatatgt

SEQ ID NO: 441198 - DNA, 120 bp, Artificial Sequence
  ENSG00000153993_21 (sequence is synthesized)
gatgaatataagaaagggcaaaaaattcatttgaaccagttttccaagaacaaatcttgcacaagcaaagtataagaattatcctaaaaatagggggtttacagttgtaaatgttttatg

SEQ ID NO: 441199 - DNA, 120 bp, Artificial Sequence
  ENSG00000153993_22 (sequence is synthesized)
ttttgagttttggaatttattgtcatgtaaatagttgagctaagcaagccccgaatttgatagtgtataaggtgctttattccctcgaatgtccattaagcatggaatttaccatgcagt

SEQ ID NO: 441200 - DNA, 120 bp, Artificial Sequence
  ENSG00000153993_23 (sequence is synthesized)
tgtgctatgttcttatgaacagatatatcattcctattgagaaccagctaccttgtggtagggaataagaggtcagacacaaattaagacaactcccattatcaacaggaactttctcag

SEQ ID NO: 441201 - DNA, 120 bp, Artificial Sequence
  ENSG00000153993_24 (sequence is synthesized)
tgagccattcactcctggagaatggtataggaatttggagaggtgcattatttctttctggccactggggttaaatttagtgtactacaacattgatttactgaagggcactaatgtttc

SEQ ID NO: 441202 - DNA, 120 bp, Artificial Sequence
  ENSG00000153993_25 (sequence is synthesized)
ccccaggatttctattgactagtcaggagtaacaggttcacagagagaagttggtgcttagttatgtgttttttagagtatatactaagctctacagggacagaatgcttaataaatact

SEQ ID NO: 441203 - DNA, 120 bp, Artificial Sequence
  ENSG00000153993_26 (sequence is synthesized)
aataaaacaaggaaaacataatgatgtataatgcatcctgatgggaaggcatgcagatgggatttgttagaagacagaaggaaagacagccataaattctggctttggggaaaactcata

SEQ ID NO: 441204 - DNA, 120 bp, Artificial Sequence
  ENSG00000153993_27 (sequence is synthesized)
tccccatgaaaaggaagaacaatcacaaataaagtgagagtaatgtaatggagctcttttcactagggtataagtagctgccaatttgtaattcatctgttaaaaaaaatctagattata

SEQ ID NO: 441205 - DNA, 120 bp, Artificial Sequence
  ENSG00000153993_28 (sequence is synthesized)
acaaactgctagcaaaatctgaggaaacataaattcttctgaagaatcataggaagagtagacattttatttataaccaatgatatttcagtatatattttctctcttttaaaaaatatt

SEQ ID NO: 441206 - DNA, 120 bp, Artificial Sequence
  ENSG00000153993_29 (sequence is synthesized)
tatcatactctgtatattatttctttttactgcctttattctctcctgtatattggattttgtgattatatttgagtgaataggagaaaacaatatataacacacagagaattaagaaaa

SEQ ID NO: 441207 - DNA, 120 bp, Artificial Sequence
  ENSG00000153993_30 (sequence is synthesized)
tgacatttctggggagtggggatatatatttgttgaataacagaacgagtgtaaaattttaacaacggaaagggttaaattaactctttgacatcttcactcaaccttttctcattgctg

SEQ ID NO: 441208 - DNA, 120 bp, Artificial Sequence
  ENSG00000153993_31 (sequence is synthesized)
agttaatctgttgtaattgtagtattgtttttgtaatttaacaataaataagcctgctacatgtaaaaagaaccaaactcacaatattaacataaacatctttcatattttgttagtact

SEQ ID NO: 441209 - DNA, 120 bp, Artificial Sequence
  ENSG00000153993_32 (sequence is synthesized)
ttcaaatgttttcaatttgactttccctctgaatatgcatggtgtgtttcctgtctgtttaagcagaactcacctttccttcttgtaacacagaacccttagccttcttctgttttgcct

SEQ ID NO: 441210 - DNA, 120 bp, Artificial Sequence
  ENSG00000153993_33 (sequence is synthesized)
tttcacgccctttatagtgtgaaatgaaaaattagtcacttcctcacatggaaggcagcttttcagaaaataacagacattgctcgtttctcatgcattctacatatcttgaaagaaaag

SEQ ID NO: 441211 - DNA, 120 bp, Artificial Sequence
  ENSG00000153993_34 (sequence is synthesized)
tctgtgagaaaaccctgtgattagagggcaacttaatgcaagatctgtggctctatgttgagagcattctctctctgttatttttattttatttgcattgcttacctatctcaaagtagt

SEQ ID NO: 441212 - DNA, 120 bp, Artificial Sequence
  ENSG00000153993_35 (sequence is synthesized)
caaactgatatatgagattgagtactcccttttgatattatactgatgaatatttgtaggtgtttcactataaggaacagctaaggaataattttaataaaagtgaaccagaacaaatca

SEQ ID NO: 441213 - DNA, 120 bp, Artificial Sequence
  ENSG00000153993_36 (sequence is synthesized)
ctcatttaaaaagtaattcagaagaacagtgtggcatgatcagacttctaattgaatagcgtaacaacagtgtttgtaattatagatttgcttggacaaaatattccaggaactcatagc

SEQ ID NO: 441214 - DNA, 120 bp, Artificial Sequence
  ENSG00000153993_37 (sequence is synthesized)
gagctcaaagcaattaagtgggaacatttttaatttaaaaaaaatttccaaatatttgtgggtccgacagtaatgatcaaaatatgaatgactttggaaaatttacatgaagctcaagtg

SEQ ID NO: 441215 - DNA, 120 bp, Artificial Sequence
  ENSG00000153993_38 (sequence is synthesized)
ttaggattgacttatgaaaataaattttatttctatccaaatttgaatgtccaaaccattttttagttacttctttctaatcctagttattcagacaaaatttggaaacttattttatga

SEQ ID NO: 441216 - DNA, 120 bp, Artificial Sequence
  ENSG00000153993_39 (sequence is synthesized)
attcagacaaaatttggaaacttattttatgaccacatctaatattctggctgctttggatacaatactcttgatttatgataattagttaaaatatattaaaaatattattagtaaaat

SEQ ID NO: 441217 - DNA, 120 bp, Artificial Sequence
  ENSG00000153993_40 (sequence is synthesized)
acacatatttatatgtatttttaaagataaagaatatctaaaatgtgtttttttcttagctttttagttgtctagaacatttagagaaagagtatgaatatattaaatccacaaacacac

SEQ ID NO: 441218 - DNA, 120 bp, Artificial Sequence
  ENSG00000153993_41 (sequence is synthesized)
tatatacttcctcaccactgactattttatcaaatttgccttaaaataatgaaaaagaaaagtatagttaatggtttcaaatatgctaagaaattgactctgcggaggggatcttaaaat

SEQ ID NO: 441219 - DNA, 120 bp, Artificial Sequence
  ENSG00000153993_42 (sequence is synthesized)
gcctgtttactcatgttttcgtatttttcttgtctctaatacttttgtctttgtctgccttgtgtgttcttttctgaatttcatttcagcaatttatgctgctaaatagaatcccgcatg

SEQ ID NO: 441220 - DNA, 120 bp, Artificial Sequence
  ENSG00000153993_43 (sequence is synthesized)
tctgcattcatttacattcaacttattgtaaattttgagattttatttagaaatgaattgtctaattaatttatgtagagtccttttttccaaagagctcaaaacactacatccacatta

SEQ ID NO: 441221 - DNA, 120 bp, Artificial Sequence
  ENSG00000153993_44 (sequence is synthesized)
ttgacttttggaaaccaaccaaattacttaagaaatggaaaagtagtcacagagaaatttagtaatttgcaaaagccacaacagtagtggaagaattaaaattcataaagtctcatcatt

SEQ ID NO: 441222 - DNA, 120 bp, Artificial Sequence
  ENSG00000153993_45 (sequence is synthesized)
ctgttggctaaaataatgctctttacaatatgctggctacaaaatggtcttactcttgaattttgcttttggttcatattttggttcttcatattctagtatgttttgttcctgctgaat

SEQ ID NO: 441223 - DNA, 120 bp, Artificial Sequence
  ENSG00000153993_46 (sequence is synthesized)
tttacagactcagctaaacaataagttattagtagtcacttgttttcattatcataattgaatttccaagaacaacttgatatcattcagctgtccaaaaaataataagagcattcatta

SEQ ID NO: 441224 - DNA, 120 bp, Artificial Sequence
  ENSG00000153993_47 (sequence is synthesized)
aatactgattttcttaaacttaaatgttgtatttcatatttatttatataatacaaatggaaatcaaaactgaaatagcctccctttagaatgtcacatttttcttagaaaacattttgg

SEQ ID NO: 441225 - DNA, 120 bp, Artificial Sequence
  ENSG00000153993_48 (sequence is synthesized)
aattggttaaccttattgggaatggataatttagaaacaaaccaaaaaaaaaaaaagatatttgaagtgtttttataggagatgtatttttatcatagtaaatgatcacaattttaaata

SEQ ID NO: 441226 - DNA, 120 bp, Artificial Sequence
  ENSG00000153993_49 (sequence is synthesized)
attcatcttacaagtcaggtaaaataaaatcgattcccagattccatacattaggagtgcaaagacaggatcatacacatgacttatacctctcatttaaatattttatagtataaagta

SEQ ID NO: 441227 - DNA, 120 bp, Artificial Sequence
  ENSG00000153993_50 (sequence is synthesized)
tttatggaaagggtttgagatagatgatttttgggaaagggcaaaatgtgtcagatgccctagttaatcatgtaatttaattctggtattgtgagtggttagcaatcaattttgaattta

SEQ ID NO: 441228 - DNA, 120 bp, Artificial Sequence
  ENSG00000153993_51 (sequence is synthesized)
ggtattgtgagtggttagcaatcaattttgaatttataattctgctattttaaaagaaatgtagtcttgtagtatgaaataattaaaaattgttaaatgtatattttggttgtattataa

SEQ ID NO: 441229 - DNA, 120 bp, Artificial Sequence
  ENSG00000153993_52 (sequence is synthesized)
aattcctggaagtgatggggcagatacttactttgatgagcttcgtaagttccttctttccttctttcttggaaaggccttactgcctaattaagtaacttggcatttatttccctttgg

SEQ ID NO: 441230 - DNA, 120 bp, Artificial Sequence
  ENSG00000153993_53 (sequence is synthesized)
ctccaaatgcctgattaattttacctgagcaaaccttacaggagtggttcttactaaaattcacacgcaaagtacacggaagtgctctaggtctgggcacacgtcataatgcagtaactc

SEQ ID NO: 441231 - DNA, 120 bp, Artificial Sequence
  ENSG00000153993_54 (sequence is synthesized)
ttctctttgtaagagtcctcaaagtaagtgaaggaaacaaaactacagcaagacacagaaaggtgtgagctctggaactacacagttcatccattctccatgcagtctttcattttgaaa

SEQ ID NO: 441232 - DNA, 120 bp, Artificial Sequence
  ENSG00000153993_55 (sequence is synthesized)
ggagccaccttctataggtaggaaaatcttggattccttattccacgggtgccctctgctggcaagtacaggagatttggtgaacactgtccctccgacttgttaatgaaagaataatca

SEQ ID NO: 441233 - DNA, 120 bp, Artificial Sequence
  ENSG00000153993_56 (sequence is synthesized)
ttccaagtcctacaatgatttttttcttttttgtttatgtataatgttagcatcattagcttttagcttcttgaacttgttcttatttttgccatgtaatgtaaaaatgataatctatat

SEQ ID NO: 441234 - DNA, 120 bp, Artificial Sequence
  ENSG00000153993_57 (sequence is synthesized)
catggaattatttcatcagtattgtgtattttccaacttaaagtatacattgagtaatcgtggatgacctctcctattgtatgtaagcacattcacatcttaatcttttaaagaatatta

SEQ ID NO: 441235 - DNA, 120 bp, Artificial Sequence
  ENSG00000153993_58 (sequence is synthesized)
gaatattatttgcacataacttactgtcaatacggcactaatttgggggtagctattttcttattgttaccaaataggtaaatgaggtcaggtgtggtggctcacacctgaaatcccagc

SEQ ID NO: 441236 - DNA, 72 bp, Artificial Sequence
  ENSG00000153993_59 (sequence is synthesized)
aaaaaaaaaattagccgggctggtggtgggcacctgtaatcctagatactagggaggctgaggcaggagaat

SEQ ID NO: 441237 - DNA, 63 bp, Artificial Sequence
  ENSG00000153993_60 (sequence is synthesized)
aataaaaaaaaaaattagccgggctggtggtgggcacctgtaatcctagaggcagagattgtg

SEQ ID NO: 441238 - DNA, 120 bp, Artificial Sequence
  ENSG00000153993_61 (sequence is synthesized)
aacaaaactacagcaagacacagaaaggtgtgagctctggaactacacagttcatccattctccatgcagtctttcattttgaaaggagccaccttctatagaagatatttatttactcc

SEQ ID NO: 441239 - DNA, 120 bp, Artificial Sequence
  ENSG00000153993_62 (sequence is synthesized)
agcttcccggctctgccagggctgccggcggctccgcttgctcagccagggctgcggctcagaggaacgcgcgccggtgccccgggttgccgcgccgctggacctcagcctgcatcccgt

SEQ ID NO: 441240 - DNA, 120 bp, Artificial Sequence
  ENSG00000153993_63 (sequence is synthesized)
tcccctctccctgaaaaggcaccaggaaaagagagagggagagaagagttcacagcaggtctttacacttggactagaactgtaacatctgctgtcctggttgccaggcttttgaacata

SEQ ID NO: 441241 - DNA, 120 bp, Artificial Sequence
  ENSG00000153993_64 (sequence is synthesized)
gaacatagtcaaagtaatttggagctgtatttggagaaagttgcataaatgatttgaacaatgcaaattttggtcaagagatatcaatgaagagagacacaataaataaactgacttaaa

SEQ ID NO: 441242 - DNA, 120 bp, Artificial Sequence
  ENSG00000153993_65 (sequence is synthesized)
agataattttactgggcaatattgatcaatgagagcctgaggcgaataagtgccttcatccacagaatatcttttaaacttaatatgtttataattatacatggtagagcacatttccta

SEQ ID NO: 441243 - DNA, 120 bp, Artificial Sequence
  ENSG00000153993_66 (sequence is synthesized)
atgaattatttttagtagtgttcctactttccagtcaaactacttactctatttttccaataaattgtttaaccttgaaggatttctaaagtccttgtcaagctctacagttctttcatt

SEQ ID NO: 441244 - DNA, 120 bp, Artificial Sequence
  ENSG00000154001_0 (sequence is synthesized)
gctggccagaaggttcggttgcgcgtgtgccatggactcagccgcccggtgatattgacaataggagagagaaaggggcattgactgggacccaccgcgggtagcgaaaggtggctctgg

SEQ ID NO: 441245 - DNA, 120 bp, Artificial Sequence
  ENSG00000154001_1 (sequence is synthesized)
cagcggcggctccagctcctgcggctcctcctccttattctgtccccttctcttgctgccgctgcagatccagtcttcctccctcccttccccccctccccacgtcgtcgccgccgccgc

SEQ ID NO: 441246 - DNA, 120 bp, Artificial Sequence
  ENSG00000154001_2 (sequence is synthesized)
cgggtccggggcaacgagctgaggcgccgcccgccaggaatgtgagcgaggagccaccggcggagccgcaacggggtcggtgccgatttgatgggacgggcccgcgggggaggatcgtga

SEQ ID NO: 441247 - DNA, 120 bp, Artificial Sequence
  ENSG00000154001_3 (sequence is synthesized)
ggccgccgccgccaccggaacgctgaggttcgggtccggccgtgaggcctagaggctccgccgccgcggaaccggagggaccccgtaccggacagccgtcgccccaggctccccgcagct

SEQ ID NO: 441248 - DNA, 120 bp, Artificial Sequence
  ENSG00000154001_4 (sequence is synthesized)
gcccggacctccccctgcacgtcccggtcccgccgcccgcccccgctgcggccacctcgcccgtctcccgcccctccaagccacagatcatctttggattcttccccagaagcttcaagt

SEQ ID NO: 441249 - DNA, 120 bp, Artificial Sequence
  ENSG00000154001_5 (sequence is synthesized)
agggatatgtcctcagcaccaactactcctccatcagtggataaagtagacggattttctcggaagtccgtcagaaaagccagacagaagaggtcgcaaagttcctcacagtttaggtct

SEQ ID NO: 441250 - DNA, 120 bp, Artificial Sequence
  ENSG00000154001_6 (sequence is synthesized)
caaggcaagcctattgagttaacacctctgccgctgctaaaagacgttccatcctcagagcagcctgaactgttcctaaagaaacttcagcagtgctgtgtcatttttgacttcatggac

SEQ ID NO: 441251 - DNA, 120 bp, Artificial Sequence
  ENSG00000154001_7 (sequence is synthesized)
acgctatctgatcttaaaatgaaagaatacaagcgctccactcttaatgaactggtggactacattacaataagcagaggctgtttgacagagcagacttaccctgaagtagttagaatg

SEQ ID NO: 441252 - DNA, 120 bp, Artificial Sequence
  ENSG00000154001_8 (sequence is synthesized)
gtatcttgcaatatattcagaactctccctcctagtgacagcaatgaatttgatccagaagaagatgaacctacccttgaggcatcgtggccacacttacagcttgtatatgaatttttc

SEQ ID NO: 441253 - DNA, 120 bp, Artificial Sequence
  ENSG00000154001_9 (sequence is synthesized)
atacgatttttggaaagccaagaattccaacccagcattgccaaaaaatatatagatcagaaatttgtattacagcttctggagctatttgacagcgaagaccctcgggaacgggactac

SEQ ID NO: 441254 - DNA, 120 bp, Artificial Sequence
  ENSG00000154001_10 (sequence is synthesized)
ttaaaaacagtcttacacagaatttatggcaagtttcttggtcttagagcatttatccgaaaacagattaacaatatttttctaaggtttgtttatgaaacagaacacttcaatggtgta

SEQ ID NO: 441255 - DNA, 120 bp, Artificial Sequence
  ENSG00000154001_11 (sequence is synthesized)
gctgaactgctggaaatattaggaagtattatcaatggctttgctttacctcttaaggcagaacacaaacagtttctggtgaaagtattgatccctttacacactgtcaggagcttatca

SEQ ID NO: 441256 - DNA, 120 bp, Artificial Sequence
  ENSG00000154001_12 (sequence is synthesized)
ctcttccatgcacagctggcatattgtatagtacagtttctggagaaagatccttcactcacagaaccagttattagggggttaatgaaattttggcctaaaacatgtagtcaaaaagag

SEQ ID NO: 441257 - DNA, 120 bp, Artificial Sequence
  ENSG00000154001_13 (sequence is synthesized)
gtcatgttccttggggaactggaagaaatattggatgtgattgaaccttcacaatttgttaaaatccaagaacctttgtttaaacaaatcgccaagtgtgtatctagcccccattttcag

SEQ ID NO: 441258 - DNA, 120 bp, Artificial Sequence
  ENSG00000154001_14 (sequence is synthesized)
gtggcagaaagagcactctattattggaataatgaatacatcatgagtttgatagaagaaaactctaacgtcatccttcccatcatgttttccagcctttataggatttcaaaagaacat

SEQ ID NO: 441259 - DNA, 120 bp, Artificial Sequence
  ENSG00000154001_15 (sequence is synthesized)
tggaatccggctattgtggcgttggtgtacaatgtgttgaaggcatttatggaaatgaacagcaccatgtttgacgagctgacagccacatacaagtcagatcgtcagcgtgagaaaaag

SEQ ID NO: 441260 - DNA, 120 bp, Artificial Sequence
  ENSG00000154001_16 (sequence is synthesized)
aaagaaaaggagcgtgaagaattgtggaaaaaattggaggatctggagttaaagagaggtcttagacgtgatggaataattccaacttaacaaaaacaatgacaacaacattactaacct

SEQ ID NO: 441261 - DNA, 120 bp, Artificial Sequence
  ENSG00000154001_17 (sequence is synthesized)
gtggagtcacacgtttatgtagtagaagatggagcaacagttttctgtattgtgcaactttacagtagatttcacctttgtttcattattacagcagcactgtatatacctgtctctaag

SEQ ID NO: 441262 - DNA, 120 bp, Artificial Sequence
  ENSG00000154001_18 (sequence is synthesized)
taaaggaaaaaacaaaataaggacttcaatccaaagtttggacagtagatggacttctcagaactttgcaaacataatcattgttctcaccctcttttaaaaaaaaaaatcggtcttcaa

SEQ ID NO: 441263 - DNA, 120 bp, Artificial Sequence
  ENSG00000154001_19 (sequence is synthesized)
agatctgttgatgaaattgctatgttaaaattccattatcgggagttccttatttatcactagcagagagtatgatacaattttcaaatgtgaacaatcttaaatttagcttgtctttct

SEQ ID NO: 441264 - DNA, 120 bp, Artificial Sequence
  ENSG00000154001_20 (sequence is synthesized)
gctaagctgttaaatgtatttatagtaaaggaagaaaaaaagactgtcatttccttataagtttgtgtaacatcctcctctggataacttgactgtaatttaacatctttttcttttgca

SEQ ID NO: 441265 - DNA, 120 bp, Artificial Sequence
  ENSG00000154001_21 (sequence is synthesized)
catcttcctgagttgaatgtccacgtggaatggggtcatgaattataaaagtccctgataaaagttttgtttactggggtgaacatctttccagtaaccaggtagtcctggtactccttt

SEQ ID NO: 441266 - DNA, 120 bp, Artificial Sequence
  ENSG00000154001_22 (sequence is synthesized)
agttttaaaattaggagttaagagagaagaggtgataaacatagtagggaagggaatatcggattcatgcatcagtttatggtgaatccaaatcaatgtcttgaatcctttgaaaacagg

SEQ ID NO: 441267 - DNA, 120 bp, Artificial Sequence
  ENSG00000154001_23 (sequence is synthesized)
cactgggacatcacaggcttcagtacctgaccagtattagttgcatatatcattgaacacacataccagagatgttttagaaatgtgagaaaaacatccttttggaccatttgaaataag

SEQ ID NO: 441268 - DNA, 120 bp, Artificial Sequence
  ENSG00000154001_24 (sequence is synthesized)
aaagacaaacactaaacaatacaaccatgaaattgatcaccgggattgcaaatctaattgggaaaagagttgagcaaacagcttggactgtttggagttgttgccttactttttaatatg

SEQ ID NO: 441269 - DNA, 120 bp, Artificial Sequence
  ENSG00000154001_25 (sequence is synthesized)
tatttataaagtattccagcaaaagaggatgtagcctctgggaaaaaacaaacatgttacagtgttttttgtagattctcgttctatatctcatcacagcgccagccctgtttttagccg

SEQ ID NO: 441270 - DNA, 120 bp, Artificial Sequence
  ENSG00000154001_26 (sequence is synthesized)
gaaaggattcaggataaacattattatgcattctgaattggatgcatattcctaactactgtatttgttaccaaaagtggttctacaaatgctactgaaaaaaatctggaaattcctaat

SEQ ID NO: 441271 - DNA, 80 bp, Artificial Sequence
  ENSG00000154001_27 (sequence is synthesized)
atcaaaggtgcatcgtgaccaaattgtttaagaaaaaaaaacaaaaaaaacaaaatctagggctgtattttatatatata

SEQ ID NO: 441272 - DNA, 120 bp, Artificial Sequence
  ENSG00000154001_28 (sequence is synthesized)
agaatcttacatcttgggtaggtaaactgctgataaaatttgtgtacagtatgtacttacctaatgcagttgcattattacgtactgaaagatatgtgtttggaggtttatttccaggat

SEQ ID NO: 441273 - DNA, 120 bp, Artificial Sequence
  ENSG00000154001_29 (sequence is synthesized)
gcatttgcttgttttggtcatggcagcagtgagttggtaatcctaaaccatcacttccagcagtattcatggtatagagctgatctgtgttcatatgttgaattgtgatagtagcaaaca

SEQ ID NO: 441274 - DNA, 120 bp, Artificial Sequence
  ENSG00000154001_30 (sequence is synthesized)
tgaacatatgaactattgttgctcttaatagaaatacaatataaatatgggcttgtatattttcttccttacatttaaatataaagtagaatacgcagttttattattttcaagaaaaag

SEQ ID NO: 441275 - DNA, 120 bp, Artificial Sequence
  ENSG00000154001_31 (sequence is synthesized)
aaagagaagctgctgacctttctcccccataaagtttttcaggatgatcaggtcacagtgtgtacgtaagagtcagctaattatggatattgtcatctcggtaactttgtaaaaaaacaa

SEQ ID NO: 441276 - DNA, 120 bp, Artificial Sequence
  ENSG00000154001_32 (sequence is synthesized)
gaaaaaaaaaagcagtaaaaaaaaaaagtcatatgcaacaccagacgcaacatggtttaatggaattaatagtttttttttttttttttttaaagaacattgatggggattcactgtaaa

SEQ ID NO: 441277 - DNA, 120 bp, Artificial Sequence
  ENSG00000154001_33 (sequence is synthesized)
aagaacattgatggggattcactgtaaagttggcagaggctgccaaagacgaaacaactgactttaaaaatgctggaacaatgtgataaaaaataaatttgtaacaaatcttctcctttt

SEQ ID NO: 441278 - DNA, 120 bp, Artificial Sequence
  ENSG00000154001_34 (sequence is synthesized)
tagcccttgtcattttagccctttagtttcaactctgcattatatttagtttatatagtgtaaacttttgtttgccattaattcatctttttaggtagaagacattaaaatcacaggttt

SEQ ID NO: 441279 - DNA, 120 bp, Artificial Sequence
  ENSG00000154001_35 (sequence is synthesized)
atgaagaatctctgctcattggaatgaaatgcagtcatttgaaatgagaaaggccaggatccttttttgtaccttaccctgtcttcaagagtaaaggtgaacacttacagctctcctcct

SEQ ID NO: 441280 - DNA, 120 bp, Artificial Sequence
  ENSG00000154001_36 (sequence is synthesized)
tgatgtcaattttgtatgttgatcattccaaactgagaagaataaagccacattttagacatatttatagaatcaattaaagctatatgtctaaaattcgtagggcaacttctgagaaga

SEQ ID NO: 441281 - DNA, 120 bp, Artificial Sequence
  ENSG00000154001_37 (sequence is synthesized)
aacaccgtctttttcttttttaatggaaagtgacaatgtgacattagtcatgttgtgtgcggtgacgcagagtaactgaggtaatctgactgttgcactatgtgacatatttcaggacgt

SEQ ID NO: 441282 - DNA, 120 bp, Artificial Sequence
  ENSG00000154001_38 (sequence is synthesized)
acttgctgcatttgcagcagccctctctctctgtcccttcccacaattctgctgttgctgcaacttgagttaattgtgacaaatgcatctttgtgttatattttgtttgcttcataattt

SEQ ID NO: 441283 - DNA, 120 bp, Artificial Sequence
  ENSG00000154001_39 (sequence is synthesized)
ccagaactatatataaatatattttttaaatagcaaatattgtagttagtgagtgatgatcactccaaccttatccttaccatattggtttcagggataggattaagagtgtctttggaa

SEQ ID NO: 441284 - DNA, 120 bp, Artificial Sequence
  ENSG00000154001_40 (sequence is synthesized)
gagaaaaatacacacaaccctgtggtttagaatgacgctgaggccttaggctgtgggcctagaacaactatgtgagtgaattcacccatctcatactttgaatcaagcatgcattcctgt

SEQ ID NO: 441285 - DNA, 120 bp, Artificial Sequence
  ENSG00000154001_41 (sequence is synthesized)
ttctcattgtgaagtatccccagttgttttccttcagtgttgagtttttgtccttttaaattttattatattttgctctccctaacatttgactgttttttataaaagaaaagaaaaaaa

SEQ ID NO: 441286 - DNA, 120 bp, Artificial Sequence
  ENSG00000154001_42 (sequence is synthesized)
aagaaataaataataccctcgatgccactggatactcacaagcagggttatgctccttcatcttgggcttgtttgcctaaatgaaagggtttaatttattttgtacctcctatgcgtggg

SEQ ID NO: 441287 - DNA, 120 bp, Artificial Sequence
  ENSG00000154001_43 (sequence is synthesized)
atagtccagggtgcagagccaggacttgcttgtaattgcacctgctatacttaaatgtatagccctaggctcaatcacactatggaaagaaacaaaaaaagtatatttagagctttaaaa

SEQ ID NO: 441288 - DNA, 120 bp, Artificial Sequence
  ENSG00000154001_44 (sequence is synthesized)
gcttttttatttttttgtggggatgagggtgggatgggaaagggatgtatggatgttattggcatttttaagtgtttagagttttttggggtttggggtggttttttttccttgttttcc

SEQ ID NO: 441289 - DNA, 120 bp, Artificial Sequence
  ENSG00000154001_45 (sequence is synthesized)
ttttttccttttaattggatgcactgacctggcccaggaaatgaagagattctcttttgatgctattaccaatgttatcataaagtgacagtcacctgtaacaaaaaggtggcaccagac

SEQ ID NO: 441290 - DNA, 120 bp, Artificial Sequence
  ENSG00000154001_46 (sequence is synthesized)
atgatcactgatgttttatttgcacatcaatatttttatttttgtattctggctcagctgcttctctgagtggagttaaggaatgagccacaaagatttttgtagtaggtatattggcat

SEQ ID NO: 441291 - DNA, 120 bp, Artificial Sequence
  ENSG00000154001_47 (sequence is synthesized)
tgcattttatattcctctatatttaattttgaaaacctaaaagaaggattgtgcatcttgagagaaagttgagcaaattgtgatctagcggaatgttaatttgtgctgcttcttgtgcac

SEQ ID NO: 441292 - DNA, 120 bp, Artificial Sequence
  ENSG00000154001_48 (sequence is synthesized)
gatagcagcagtagtatctctcttggaaataaacatcccatattatgatgtctatgaatataggtttccttttcttccttccctccctccttcccccacctttctcttttttttttctct

SEQ ID NO: 441293 - DNA, 120 bp, Artificial Sequence
  ENSG00000154001_49 (sequence is synthesized)
ctcagcttctcttttcctccttccctcttcccttcctctttctttactttttttgaaatcacttattgtaaataagttgtaatccaaacctcatgtatcaatggggaattttcaaatata

SEQ ID NO: 441294 - DNA, 120 bp, Artificial Sequence
  ENSG00000154001_50 (sequence is synthesized)
aatattaccaatgcattttctggttgttgtctgatttttgattgaagtataatgagaatgacatgtctgttgcttttggtttgaggacttcgctttagcttcataaatcttttggtattt

SEQ ID NO: 441295 - DNA, 120 bp, Artificial Sequence
  ENSG00000154001_51 (sequence is synthesized)
tagtatttcattgttttagcaggagagggcagcaaaagttcattttccctgttagtaatgctgtggttcatgatcggttttaaatttagctgtgtgtgtgtttttttaaacagcatctct

SEQ ID NO: 441296 - DNA, 120 bp, Artificial Sequence
  ENSG00000154001_52 (sequence is synthesized)
ttgtgagtagaggtaaaaatgaaacatttttgatatgaaaagttgcatatgaaaattatagactggttcaaccagacagtgaagacttctgatccacatcaaacttaaaatgccacaaaa

SEQ ID NO: 441297 - DNA, 120 bp, Artificial Sequence
  ENSG00000154001_53 (sequence is synthesized)
caatcttccacctctggctaaaacatgctacttccttttcaaacaccacaaaatacaagctgagtcttaaacacttggaatttaaaatgtttttctttggaaatgatttgctttcttcaa

SEQ ID NO: 441298 - DNA, 120 bp, Artificial Sequence
  ENSG00000154001_54 (sequence is synthesized)
agtggtaacagaaacaaaaatgaaggtgctccccaaaaagaaatgtaaccttcccctttcacagatgtgtgagaggttctgtactgtgggtgcatcataataaagaagcagtgaagagtt

SEQ ID NO: 441299 - DNA, 120 bp, Artificial Sequence
  ENSG00000154001_55 (sequence is synthesized)
aagcatttgtgtgcatagtggctccaaagaggtgtgtgaggtgtgcgaggagggaagagcacacacttggtaatgaaggcctgagagctgcaggggctggaagagaacactcgtacgttc

SEQ ID NO: 441300 - DNA, 120 bp, Artificial Sequence
  ENSG00000154001_56 (sequence is synthesized)
gtttctttttttctccgcggacacttttaagcatcttccatagtgactcacaggtgtatatattgcaagagtgaggtcattggaggtcaactccacaaatgagagccaacctttggagag

SEQ ID NO: 441301 - DNA, 120 bp, Artificial Sequence
  ENSG00000154001_57 (sequence is synthesized)
ctaagcaaatgtagtcggcacagtgctagaatttgaagagcatgatttcatgagaacgaaatccagaactttaactacgacagtgctgaagcaataaatgacttcaaaatatgaagccaa

SEQ ID NO: 441302 - DNA, 120 bp, Artificial Sequence
  ENSG00000154001_58 (sequence is synthesized)
gattgccagggtattactggatttctagctttggcaaaagaaaagacacaggaaaataacaaaagtcttagatccgtgtttgaaaaatattcaagcctgttggatgtctttttttttttt

SEQ ID NO: 441303 - DNA, 120 bp, Artificial Sequence
  ENSG00000154001_59 (sequence is synthesized)
aatcttattcattgtggtatattagaaatggcttaatgcttaataaaattgtgatttgtagaatgtagttaaggcctctcttgggctttataactaacgcttctctttataatctccttg

SEQ ID NO: 441304 - DNA, 120 bp, Artificial Sequence
  ENSG00000154001_60 (sequence is synthesized)
aagtcagggttgataccttttatgatttttgaatagtgtcttagattttgtgtggtcattaggagttatgaggaaaaacattattaacataatgtgagtaattacattcttactgtgtga

SEQ ID NO: 441305 - DNA, 120 bp, Artificial Sequence
  ENSG00000154001_61 (sequence is synthesized)
acaattattttagtttttcaaaagctgagccaaaatgtggttttctgatagatttctgtgggagagttgcctttcttggcatcccagaagatcttggagctggagagtgcacgctatttg

SEQ ID NO: 441306 - DNA, 120 bp, Artificial Sequence
  ENSG00000154001_62 (sequence is synthesized)
tgcagggtggggaagctggtctactgactggtgaaatagcctcagagatccttaaggtcagtgcatcgttgaggagtccattgcaggatctggcacactctctgtgtactgcggaacatc

SEQ ID NO: 441307 - DNA, 120 bp, Artificial Sequence
  ENSG00000154001_63 (sequence is synthesized)
tgcctggcttttgtatttagttctttatcatttgtattcaaccaatgcagaaaagagacttttgtgatggagtagatatgtttaaaaatgatagttcagatttgcaaaggcacttgaatg

SEQ ID NO: 441308 - DNA, 120 bp, Artificial Sequence
  ENSG00000154001_64 (sequence is synthesized)
atctcagcgtgagactgtgactgaaataatgaaggtcatctgaaaacgatgcccaatatattcctcagttctatatctgaatgtatattggatttgttgttaatttacaggaatgtagca

SEQ ID NO: 441309 - DNA, 120 bp, Artificial Sequence
  ENSG00000154001_65 (sequence is synthesized)
ctagaatgttttgtaggttaaagatgaccgtgtggctcttgagcagtgcttctcaaccaggtgtgattttaccttacaggggacatttgtcagtgtctagagacatttttggtagtcaca

SEQ ID NO: 441310 - DNA, 120 bp, Artificial Sequence
  ENSG00000154001_66 (sequence is synthesized)
actagatgtgagaggagagtactaccagcatctagtgggagaggccagagatactgctaaacattttacaatgtaccgggtggcccccacaataaagaattatctggccccagatatcac

SEQ ID NO: 441311 - DNA, 120 bp, Artificial Sequence
  ENSG00000154001_67 (sequence is synthesized)
aagtgccactgttgagaaaccttgctcttgagtttgcatgctatctaaacctcttaatgtgatgcagaggatcttctctagtctacctgccttctgcagagcacagtccctggttttagc

SEQ ID NO: 441312 - DNA, 120 bp, Artificial Sequence
  ENSG00000154001_68 (sequence is synthesized)
ctacctgtatcatcagccaacagaggtatcggttatgactttcttctgtatcttcccatggatagttcatgaatatataagtatatgcaaacatatgtataaatatttttttttgtaagc

SEQ ID NO: 441313 - DNA, 120 bp, Artificial Sequence
  ENSG00000154001_69 (sequence is synthesized)
acacaaatggtggcacactatgtattttctgtaccttgcttttttcacttagcaatatatatttcagtacatataaagttgccatattctttttatagctgcataatatttattgtgtga

SEQ ID NO: 441314 - DNA, 120 bp, Artificial Sequence
  ENSG00000154001_70 (sequence is synthesized)
atgtaccatatttaagcagtactctatgaatatccttatacacacatcagtttgcctttgtatgaggacatctgtatacttatttatttttaaaaatttaattttttaagagcagtttta

SEQ ID NO: 441315 - DNA, 120 bp, Artificial Sequence
  ENSG00000154001_71 (sequence is synthesized)
ggttcacagcacaattgagaggaaagtacagagatttctcatatgcccctgtccctgcacaagcacagcctcccccattatcaacacctcccccctcactcccaccagagcagtacattt

SEQ ID NO: 441316 - DNA, 120 bp, Artificial Sequence
  ENSG00000154001_72 (sequence is synthesized)
gttacaattgatgatcctacattgacgcatcattatcacccagaattcagagttcacgttagggctcattcttggtgttggacattctgagtttagacaaatgtgtaatgacatgtatcc

SEQ ID NO: 441317 - DNA, 120 bp, Artificial Sequence
  ENSG00000154001_73 (sequence is synthesized)
accattatagtaccatacataccatacatcactgccctgaaaatcctctgtgctccacttcttcatcacccaccaccttcaactccctggcaaccactgatctttttactgtgtccataa

SEQ ID NO: 441318 - DNA, 120 bp, Artificial Sequence
  ENSG00000154001_74 (sequence is synthesized)
ttttgctttttccagactgtcatatagttggaatcatacagcatgtactcttttcagatgggcttctttgacttagttatatgcacttaagtttccttcatgtcttttcaagacttgata

SEQ ID NO: 441319 - DNA, 120 bp, Artificial Sequence
  ENSG00000154001_75 (sequence is synthesized)
gctcatttattttagtgttgaataacattttattggttggatgtaccatagtttatccattcacctactgaaggacattttagttgcttcctaattttggcaattatgaataaagctaat

SEQ ID NO: 441320 - DNA, 120 bp, Artificial Sequence
  ENSG00000154007_0 (sequence is synthesized)
aaagggcacttctgtttgtggagtaaagcctgccacattgtcaaaatatgtaactggaggattacagtatgcttacctctgattttatttctacagtgctgctataagtaacaatgagta

SEQ ID NO: 441321 - DNA, 120 bp, Artificial Sequence
  ENSG00000154007_1 (sequence is synthesized)
aatctactaaattatgtggtaagacttcttgtccaagaagcaatatattctgcaatctccttgacaaaattgttaaaagaccctccctacagtttttgggtcagtggggatatcactgtt

SEQ ID NO: 441322 - DNA, 120 bp, Artificial Sequence
  ENSG00000154007_2 (sequence is synthesized)
acgaaccaaggatttacagatcactggcaaaaattctgaggtatgtggacttggatggttttgacgcactactcacagattacattgcatttgtggaaaaatcaggataccgttttgaag

SEQ ID NO: 441323 - DNA, 120 bp, Artificial Sequence
  ENSG00000154007_3 (sequence is synthesized)
taagttttaacctcgacttcactgaaatatgtgtgaatacaattctgtactgggtttttgccagaaaaggtaatcctgactttgtggaattgcttctcaagaagacaaaagactatgttc

SEQ ID NO: 441324 - DNA, 120 bp, Artificial Sequence
  ENSG00000154007_4 (sequence is synthesized)
aagacagaagttgtaacctggcactgatatggagaactttcacaccagtatactgtccaagcccattaagtggcatcacacctctcttttatgtagctcagacaagacagtctaatatct

SEQ ID NO: 441325 - DNA, 120 bp, Artificial Sequence
  ENSG00000154007_5 (sequence is synthesized)
tcaaaatactactgcaatatggaatcttagaaagagaaaaaaaccctatcaacattgtcttaacaatagtactctacccttcgagagtaagagtaatggttgatcgtgaattggctgaca

SEQ ID NO: 441326 - DNA, 120 bp, Artificial Sequence
  ENSG00000154007_6 (sequence is synthesized)
tccatgaagatgccaaaacatgtttggtactatgttccagagtgctttctgtcatttcagtcaaggaaataaagacacagctgagtttaggaagacatccaattatttcaaattggtttg

SEQ ID NO: 441327 - DNA, 120 bp, Artificial Sequence
  ENSG00000154007_7 (sequence is synthesized)
attacattccttcaacaagatacaaagatccatgtgaactattacatctttgcagactaaccatcaggaatcaactattaaccaacaatatgctcccagatggaatattttcacttctaa

SEQ ID NO: 441328 - DNA, 120 bp, Artificial Sequence
  ENSG00000154007_8 (sequence is synthesized)
ttcctgctcgtctacaaaactatctgaatttagaaatctaacatacgtcagtgtcctaagttccttaacaatgcttaccaatgtatggcttagaagttaataaaaattcacttcatgtaa

SEQ ID NO: 441329 - DNA, 120 bp, Artificial Sequence
  ENSG00000154016_0 (sequence is synthesized)
accttctgagctggtctttgatggatgaataggagtctcctgggagcagaaagaggagaacaccaggcagaggaaccacgtgtgcaaaagtctggggttgaaatgagagtttggtgtggc

SEQ ID NO: 441330 - DNA, 120 bp, Artificial Sequence
  ENSG00000154016_1 (sequence is synthesized)
cccttgctgtggctgaagccctgggtttgtttagagtgaaggggatgacaaaggatgagaatgggggctgtttgtaggggcaggtggaggtggtggattgcaagggccttgaatgccagg

SEQ ID NO: 441331 - DNA, 120 bp, Artificial Sequence
  ENSG00000154016_2 (sequence is synthesized)
tgaggagcttgggattgaaggagcaggaggcagggcatcacaagaggcatcagggtttaggaaaagatggagagtcattggcagattggtgaagggaggccagcatctggtgccatgaga

SEQ ID NO: 441332 - DNA, 120 bp, Artificial Sequence
  ENSG00000154016_3 (sequence is synthesized)
ctcagtgcctgagccagcaggacagctttggcacttctcctccaggcacctcacttttacggatgataaaacatgggcacaagggggccccactcccagagcttcagggagactccccaa

SEQ ID NO: 441333 - DNA, 120 bp, Artificial Sequence
  ENSG00000154016_4 (sequence is synthesized)
gggccattcctggcacctggggtctgaggtagggacagagctggctcacaagccctccctgctctgtgacatgtctgtttcctgtttctcccccatcaggagcagtttcagtctcaactt

SEQ ID NO: 441334 - DNA, 120 bp, Artificial Sequence
  ENSG00000154016_5 (sequence is synthesized)
caaaagaacaaacgcgcactcaaaacaaaggaagaccgtcctcgactgcagaggaagcaggaagctgtcggcccagctctgagcccagctgctggagccccgagcagcggcatggagtcc

SEQ ID NO: 441335 - DNA, 120 bp, Artificial Sequence
  ENSG00000154016_6 (sequence is synthesized)
gtggccctgtacagctttcaggctacagagagcgacgagctggccttcaacaagggagacacactcaagatcctgaacatggaggatgaccagaactggtacaaggccgagctccggggt

SEQ ID NO: 441336 - DNA, 120 bp, Artificial Sequence
  ENSG00000154016_7 (sequence is synthesized)
gtcgagggatttattcccaagaactacatccgcgtcaagccccatccgtggtactcgggcaggatttcccggcagctggccgaagagattctgatgaagcggaaccatctgggagccttc

SEQ ID NO: 441337 - DNA, 120 bp, Artificial Sequence
  ENSG00000154016_8 (sequence is synthesized)
ctgatccgggagagtgagagctccccaggggagttctctgtgtctgtgaactatggagaccaggtgcagcacttcaaggtgctgcgtgaggcctcggggaagtacttcctgtgggaggag

SEQ ID NO: 441338 - DNA, 120 bp, Artificial Sequence
  ENSG00000154016_9 (sequence is synthesized)
aagttcaactccctcaacgagctggtcgacttctaccgcaccaccaccatcgccaagaagcggcagatcttcctgcgcgacgaggagcccttgctcaagtcacctggggcctgctttgcc

SEQ ID NO: 441339 - DNA, 120 bp, Artificial Sequence
  ENSG00000154016_10 (sequence is synthesized)
caggcccagtttgacttctcagcccaggacccctcgcagctcagcttccgccgtggcgacatcattgaggtcctggagcgcccagacccccactggtggcggggccggtcctgcgggcgc

SEQ ID NO: 441340 - DNA, 120 bp, Artificial Sequence
  ENSG00000154016_11 (sequence is synthesized)
cccacggagttacgtgcagcccgtgcacctgtgagcagcccggcggccgatctggccaacgggcctttttacaggaactgaggtccagagaggacatggacacccccagctctgtcagag

SEQ ID NO: 441341 - DNA, 120 bp, Artificial Sequence
  ENSG00000154016_12 (sequence is synthesized)
tcacacggggctcagtggacggccttggactgaacgtgggctcctaactgcctccggccgctctgcacaaactgggatggcccaggtcccccagcaagggtacccagcaagggtagctcc

SEQ ID NO: 441342 - DNA, 120 bp, Artificial Sequence
  ENSG00000154016_13 (sequence is synthesized)
ggggcttcctggctggttgctttccattggctgccagctgtgtgacaccacagggcggagtctgtggaggccccgcccacctcctcttgtcaatggccccatctgccaggaaggttgagg

SEQ ID NO: 441343 - DNA, 120 bp, Artificial Sequence
  ENSG00000154016_14 (sequence is synthesized)
actcccaggtttcacccactggaggctcaacctaaggaaccctggccatggtgggtgggttcaccttgggctgaccacccactgggcctgcctgcccctccctcaaaaggcccctggagt

SEQ ID NO: 441344 - DNA, 120 bp, Artificial Sequence
  ENSG00000154016_15 (sequence is synthesized)
tgttcaggctgttgggaggtggctcagcctcgaaggacagactgcacacctgttgacctaaactcactggacagactccaggtggacaccaactcctcaacagccccatgacttcagctc

SEQ ID NO: 441345 - DNA, 120 bp, Artificial Sequence
  ENSG00000154016_16 (sequence is synthesized)
cacctggggcacccagcaccccaccacagggctagaggccctaagaccctgaaaaaggggcgggcagtagggaaggtggaggcacactcctcttctgttggacaggtgagctctgagggc

SEQ ID NO: 441346 - DNA, 120 bp, Artificial Sequence
  ENSG00000154016_17 (sequence is synthesized)
aagccctgggcccagccacgcagagaccctggctgccctggctcttgtttgtttaggcccaggttctgcccagaccggggcccagcagagctctcaggaggctgagaaacctccagggca

SEQ ID NO: 441347 - DNA, 120 bp, Artificial Sequence
  ENSG00000154016_18 (sequence is synthesized)
gacagaaagttggggccagagctaggttttagagatcctacaggatcccacatgggacggctacctaggtggggcacggcccctacccgagaacaggagggtcctccagagaatgtgcca

SEQ ID NO: 441348 - DNA, 120 bp, Artificial Sequence
  ENSG00000154016_19 (sequence is synthesized)
tgatcagggatatgagcagggcctgcccagagcctgggcacctttgggagagggaaaagtgaggtgggacttggaaaggctttgaacgccaggctgatggttgagggatggtgggcaggg

SEQ ID NO: 441349 - DNA, 120 bp, Artificial Sequence
  ENSG00000154016_20 (sequence is synthesized)
agggagggcgaagaggctccctctggcatttgggagccggtgggtggagggaggagcccttggaggtggctgcagtcccttaatggggggccttgctctgggcatgtggggctcttcctc

SEQ ID NO: 441350 - DNA, 120 bp, Artificial Sequence
  ENSG00000154016_21 (sequence is synthesized)
catccagagctggcccaagacccttagaaccctgagtgctggcaaatctcactgctcctgacccagcctgtgtattcaaaacgaaaacagtaaaaccaacatcaggatgtccgtcagaaa

SEQ ID NO: 441351 - DNA, 120 bp, Artificial Sequence
  ENSG00000154016_22 (sequence is synthesized)
tctgtgtctgtgaagtgagctctggcccttgggggtgtgtgcagaggagggtgggcggggttgggcagcatttgagctgagccttggggcccgggacgggctcacggagtgagggtggag

SEQ ID NO: 441352 - DNA, 120 bp, Artificial Sequence
  ENSG00000154016_23 (sequence is synthesized)
gaatggcatccctgcagagggagcagtccgggcagaggccttccggacacaggcggtggtctgggcaccccagggtgcagcccagagcagtggggtgtgttgggaaagcaggatcaggcc

SEQ ID NO: 441353 - DNA, 120 bp, Artificial Sequence
  ENSG00000154016_24 (sequence is synthesized)
gtctcagaccaaaggcccccttatctgctccccagagcctgacgtccccccactgaattgtcacccctgagctgtctaaatgcgagggaccctaggtgaccactggtggctgtgctcagg

SEQ ID NO: 441354 - DNA, 120 bp, Artificial Sequence
  ENSG00000154025_0 (sequence is synthesized)
agtccctcgggctcatacctagtgcctgcggcaggacagccatggccgccaactccaccagcgacctccacactcccgggacgcagctgagcgtggctgacatcatcgtcatcactgtgt

SEQ ID NO: 441355 - DNA, 120 bp, Artificial Sequence
  ENSG00000154025_1 (sequence is synthesized)
attttgctctgaatgtggccgtgggcatatggtcctcttgtcgggccagtaggaacacggtgaatggctacttcctggcaggccgggacatgacgtggtggccgattggagcctccctct

SEQ ID NO: 441356 - DNA, 120 bp, Artificial Sequence
  ENSG00000154025_2 (sequence is synthesized)
tcgccagcagcgagggctctggcctcttcattggactggcgggctcaggcgcggcaggaggtctggccgtggcaggcttcgagtggaatgccacgtacgtgctgctggcactggcatggg

SEQ ID NO: 441357 - DNA, 120 bp, Artificial Sequence
  ENSG00000154025_3 (sequence is synthesized)
tgttcgtgcccatctacatctcctcagagatcgtcaccttacctgagtacattcagaagcgctacgggggccagcggatccgcatgtacctgtctgtcctgtccctgctactgtctgtct

SEQ ID NO: 441358 - DNA, 120 bp, Artificial Sequence
  ENSG00000154025_4 (sequence is synthesized)
tcaccaagatatcgctggacctgtacgcgggggctctgtttgtgcacatctgcctgggctggaacttctacctctccaccatcctcacgctcggcatcacagccctgtacaccatcgcag

SEQ ID NO: 441359 - DNA, 120 bp, Artificial Sequence
  ENSG00000154025_5 (sequence is synthesized)
ggggcctggctgctgtaatctacacggacgccctgcagacgctcatcatggtggtgggggctgtcatcctgacaatcaaagcttttgaccagatcggtggttacgggcagctggaggcag

SEQ ID NO: 441360 - DNA, 120 bp, Artificial Sequence
  ENSG00000154025_6 (sequence is synthesized)
cctacgcccaggccattccctccaggaccattgccaacaccacctgccacctgccacgtacagacgccatgcacatgtttcgagacccccacacaggggacctgccgtggaccgggatga

SEQ ID NO: 441361 - DNA, 120 bp, Artificial Sequence
  ENSG00000154025_7 (sequence is synthesized)
cctttggcctgaccatcatggccacctggtactggtgcaccgaccaggtcatcgtgcagcgatcactgtcagcccgggacctgaaccatgccaaggcgggctccatcctggccagctacc

SEQ ID NO: 441362 - DNA, 120 bp, Artificial Sequence
  ENSG00000154025_8 (sequence is synthesized)
ctctcgaacagatgatgtgggctgcgtggtgccgtccgagtgcctgcgggcctgcggggccgaggtcggctgctccaacatcgcctaccccaagctggtcatggaactgatgcccatcgg

SEQ ID NO: 441363 - DNA, 120 bp, Artificial Sequence
  ENSG00000154025_9 (sequence is synthesized)
tctgcgggggctgatgatcgcagtgatgctggcggcgctcatgtcgtcgctgacctccatcttcaacagcagcagcaccctcttcactatggacatctggaggcggctgcgtccccgctc

SEQ ID NO: 441364 - DNA, 120 bp, Artificial Sequence
  ENSG00000154025_10 (sequence is synthesized)
cggcgagcgggagctcctgctggtgggacggctggtcatagtggcactcatcggcgtgagtgtggcctggatccccgtcctgcaggactccaacagcgggcaactcttcatctacatgca

SEQ ID NO: 441365 - DNA, 120 bp, Artificial Sequence
  ENSG00000154025_11 (sequence is synthesized)
gtcagtgaccagctccctggccccaccagtgactgcagtctttgtcctgggcgtcttctggcgacgtgccaacgagcagggggccttctggggcctgatagcagggctggtggtgggggc

SEQ ID NO: 441366 - DNA, 120 bp, Artificial Sequence
  ENSG00000154025_12 (sequence is synthesized)
cacgaggctggtcctggaattcctgaacccagccccaccgtgcggagagccagacacgcggccagccgtcctggggagcatccactacctgcacttcgctgtcgccctctttgcactcag

SEQ ID NO: 441367 - DNA, 120 bp, Artificial Sequence
  ENSG00000154025_13 (sequence is synthesized)
tggtgctgttgtggtggctggaagcctgctgaccccacccccacagagtgtccagattgagaaccttacctggtggaccctggctcaggatgtgcccttgggaactaaagcaggtgatgg

SEQ ID NO: 441368 - DNA, 120 bp, Artificial Sequence
  ENSG00000154025_14 (sequence is synthesized)
ccaaacaccccagaaacacgccttctgggcccgtgtctgtggcttcaatgccatcctcctcatgtgtgtcaacatattcttttatgcctacttcgcctgacactgccatcctggacagaa

SEQ ID NO: 441369 - DNA, 120 bp, Artificial Sequence
  ENSG00000154025_15 (sequence is synthesized)
aggcaggagctctgagtcctcaggtccacccatttccctcatggggatcccgaggccccaagaggggcagattcccctcacagctgcacagcagctcggtgcccaagaactggccaagcc

SEQ ID NO: 441370 - DNA, 120 bp, Artificial Sequence
  ENSG00000154025_16 (sequence is synthesized)
agcaaagcgggagccctgaaaaattaggggggaaatgggagaaaataatgtgacatttcaaaaacagcaccaaagcagtcagcattggaaggaaaattagatttctgacggacatcctga

SEQ ID NO: 441371 - DNA, 120 bp, Artificial Sequence
  ENSG00000154025_17 (sequence is synthesized)
gccactgcccccctgccccactctcccctgtctgtgttcccggctgttcagtccgtaaatggggcccacagcctcctggaaaccctgtgcaggactcggagagatctcagacacccctcc

SEQ ID NO: 441372 - DNA, 120 bp, Artificial Sequence
  ENSG00000154025_18 (sequence is synthesized)
ttgagatgttccacagtaactgtggctgcagcccagggagatgctggagggcactatccaccctgatggtggcatgggagggagtggcattccaggcagaaggagcagcctctgggtttg

SEQ ID NO: 441373 - DNA, 120 bp, Artificial Sequence
  ENSG00000154025_19 (sequence is synthesized)
ggggtcctctggcagccaggtaagaaggctgggtaagaaagcgagggcctggctggagtggccccagccctggcacagagatgcagagtctggtgttgggcgggagagctgtgtgcagag

SEQ ID NO: 441374 - DNA, 120 bp, Artificial Sequence
  ENSG00000154025_20 (sequence is synthesized)
ggcggggtgggcaggcgttaatggaggcccgcctgggcctttgatgagggcagcgcccgcctgcctgcctggctaggggttaattagccttaatcaaggtggcacctccttcctccaccc

SEQ ID NO: 441375 - DNA, 120 bp, Artificial Sequence
  ENSG00000154025_21 (sequence is synthesized)
tctccctcaggcctagaagggaagaaagggagggaggaaggcggacaggcgctgagaggacccaccctagctgaacacatagcctctgtcacccctgccaccacagccagggttccagcg

SEQ ID NO: 441376 - DNA, 120 bp, Artificial Sequence
  ENSG00000154025_22 (sequence is synthesized)
ggtcacccaccacccaccttgggggtgaggaatgccaactgacccaggacacaggggtgaggtgctcagccagggaggagcggatggatgccatgccccagcttcatccccttagctggg

SEQ ID NO: 441377 - DNA, 120 bp, Artificial Sequence
  ENSG00000154025_23 (sequence is synthesized)
tcccatgcccctcaaggctcggggagggggtgcctcctcctgaaagccctcctagattgatgtttcctctgagctgctccagcccagtccgagtgtaggtaagaggctcatctgttttct

SEQ ID NO: 441378 - DNA, 120 bp, Artificial Sequence
  ENSG00000154025_24 (sequence is synthesized)
ttgctggactctgagtgctgggcaggcaccaggtcccactcatcgccgagttggggatcctagggtagtgtcctacgcaggtgagcacctcaccagtggtttgttggatgaacaagtgta

SEQ ID NO: 441379 - DNA, 120 bp, Artificial Sequence
  ENSG00000154025_25 (sequence is synthesized)
ggagctgacacgcaggggacaggaggggacgggctcatgctggcccagcagggctccggcttcacagctggggagtatgggctctaaccccaacccacacctctggctccaaactttgca

SEQ ID NO: 441380 - DNA, 120 bp, Artificial Sequence
  ENSG00000154025_26 (sequence is synthesized)
tccttagtaagcaggttgccctgtgaaggatgtgcagcacagggctgtcggggtggggatgtgccagccagaggtcccagctcccacaaatgccggccagtgtgaaaaatcctagtgtct

SEQ ID NO: 441381 - DNA, 120 bp, Artificial Sequence
  ENSG00000154025_27 (sequence is synthesized)
tcaaataaccaccaggaagtcagtctggcccagatcggggggcagtggtcattcatgcactcaccaaatgcttagtaagcacctactatatgctgggagacacagcaatgaactaaagag

SEQ ID NO: 441382 - DNA, 120 bp, Artificial Sequence
  ENSG00000154025_28 (sequence is synthesized)
atgaggctcctgctctcctggtgcttccattgggaggggaagacaggcagtaaacaagtagacacccaggtaaatgtgcatgtagtgactgggacaggtgctttgaaggagagacaagag

SEQ ID NO: 441383 - DNA, 120 bp, Artificial Sequence
  ENSG00000154025_29 (sequence is synthesized)
ggagctccatggcggagctccaagggctggctccgcagagaccccagggcagggaaggagcagacagcacttagagtcaggagctgcacctgcaggatccagggagccaccaaagggttt

SEQ ID NO: 441384 - DNA, 120 bp, Artificial Sequence
  ENSG00000154025_30 (sequence is synthesized)
ggagcagggcaggactggccaggtcactggtggtgtggaccagagtccagggaggaggctggagctggggtagcaggggaaagattagagagcaagtcttagtgaccaggggaggtggga

SEQ ID NO: 441385 - DNA, 120 bp, Artificial Sequence
  ENSG00000154025_31 (sequence is synthesized)
tggcaaaaatcccaaggacttttgatccaaaggcggcagttatcactaagtggtttatttccttctaagacctagccaacggtctcagagccaatgctgctggtacaactactctattaa

SEQ ID NO: 441386 - DNA, 120 bp, Artificial Sequence
  ENSG00000154025_32 (sequence is synthesized)
tgggatagttttggtaagtctggatcctcccagctgggtcctcctgatcagtgcaaagcagccttttgttttaaaacacattgcaagcaatggcttgggaagtaaacaccatctgaggct

SEQ ID NO: 441387 - DNA, 120 bp, Artificial Sequence
  ENSG00000154025_33 (sequence is synthesized)
cgctggccagaggcaaggggagacggcaggcagttgagcctgcctgagggttctctcagcagtgacttcctttttcccttccttcttctgcctagtcctgtatgtgaggactattaattg

SEQ ID NO: 441388 - DNA, 86 bp, Artificial Sequence
  ENSG00000154025_34 (sequence is synthesized)
ccttcttctgcctagtcctgtatgtgaggactattaattgttttttgttgttgttgttgtttgttttgctgcaatggcgcagtctt

SEQ ID NO: 441389 - DNA, 120 bp, Artificial Sequence
  ENSG00000154025_35 (sequence is synthesized)
gaagagccccacatgcccagagcaaggccccccattaagggactgcagccacctccaagggctcctccctccacccaccggctcccaaatgccagagggagcctcttcgccctccctccc

SEQ ID NO: 441390 - DNA, 120 bp, Artificial Sequence
  ENSG00000154025_36 (sequence is synthesized)
tgcccaccatccctcaaccatcagcctggcgttcaaagcctttccaagtcccacctcacttttccctctcccaaaggtgcccaggctctgggcaggccctgctcatatccctgatcatgg

SEQ ID NO: 441391 - DNA, 120 bp, Artificial Sequence
  ENSG00000154025_37 (sequence is synthesized)
cacattctctggaggaccctcctgttctcgggtaggggccgtgccccacctaggtagccgtcccatgtgggatcctgtaggatctctaaaacctagctctggccccaactttctgtctgc

SEQ ID NO: 441392 - DNA, 120 bp, Artificial Sequence
  ENSG00000154025_38 (sequence is synthesized)
cctggaggtttctcagcctcctgagagctctgctgggccccggtctgggcagaacctgggcctaaacaaacaagagccagggcagccagggtctctgcgtggctgggcccagggcttgcc

SEQ ID NO: 441393 - DNA, 120 bp, Artificial Sequence
  ENSG00000154025_39 (sequence is synthesized)
ctcagagctcacctgtccaacagaagaggagtgtgcctccaccttccctactgcccgcccctttttcagggtcttagggcctctagccctgtggtggggtgctgggtgccccaggtggag

SEQ ID NO: 441394 - DNA, 120 bp, Artificial Sequence
  ENSG00000154025_40 (sequence is synthesized)
ctgaagtcatggggctgttgaggagttggtgtccacctggagtctgtccagtgagtttaggtcaacaggtgtgcagtctgtccttcgaggctgagccacctcccaacagcctgaacaact

SEQ ID NO: 441395 - DNA, 120 bp, Artificial Sequence
  ENSG00000154025_41 (sequence is synthesized)
ccaggggccttttgagggaggggcaggcaggcccagtgggtggtcagcccaaggtgaacccacccaccatggccagggttccttaggttgagcctccagtgggtgaaacctgggagtcct

SEQ ID NO: 441396 - DNA, 120 bp, Artificial Sequence
  ENSG00000154025_42 (sequence is synthesized)
caaccttcctggcagatggggccattgacaagaggaggtgggcggggcctccacagactccgccctgtggtgtcacacagctggcagccaatggaaagcaaccagccaggaagccccgga

SEQ ID NO: 441397 - DNA, 120 bp, Artificial Sequence
  ENSG00000154025_43 (sequence is synthesized)
gctacccttgctgggtacccttgctgggggacctgggccatcccagtttgtgcagagcggccggaggcagttaggagcccacgttcagtccaaggccgtccactgagccccgtgtgactc

SEQ ID NO: 441398 - DNA, 120 bp, Artificial Sequence
  ENSG00000154025_44 (sequence is synthesized)
tgacagagctgggggtgtccatgtcctctctggacctcagttcctgtaaaaaggcccgttggccagatcggccgccgggctgctcacaggtgcacgggctgcacgtaactccgtgggaag

SEQ ID NO: 441399 - DNA, 120 bp, Artificial Sequence
  ENSG00000154025_45 (sequence is synthesized)
aagccaacgcgcccgcaggaccggccccgccaccagtgggggtctgggcgctccaggacctcaatgatgtcgccacggcggaagctgagctgcgaggggtcctgggctgagaagtcaaac

SEQ ID NO: 441400 - DNA, 120 bp, Artificial Sequence
  ENSG00000154025_46 (sequence is synthesized)
tgggcctgggcaaagcaggccccaggtgactgcaagaagaggaggtggttagtagggtgccttcagaagccctgcaacccaccctccctcagaggcacccaagagaagtgatttgccaca

SEQ ID NO: 441401 - DNA, 120 bp, Artificial Sequence
  ENSG00000154025_47 (sequence is synthesized)
ggtgaggaggggtctcgggcagcaccggagttgaactttaagtccagatcaatggtagtgccaccactgggcctcctgctgcccacacccctgcctgtctgctgtgcagatgctgcatct

SEQ ID NO: 441402 - DNA, 120 bp, Artificial Sequence
  ENSG00000154025_48 (sequence is synthesized)
acatagaacacggctttcccagccgcccagctgggacaatagggctggtgggtcaggggacctgagtcctggtccttagggtgggattttggttaggtccctgcttctcttgggatctta

SEQ ID NO: 441403 - DNA, 120 bp, Artificial Sequence
  ENSG00000154025_49 (sequence is synthesized)
tttacccgactctgcagcagccatggtagcttttgactccaggccacaaagccatgagaatgggccttataaactgtaaagtgacgtgcagctaagagtcgtgtttattgctcttgccct

SEQ ID NO: 441404 - DNA, 80 bp, Artificial Sequence
  ENSG00000154027_0 (sequence is synthesized)
ggcggccgcgctgcctggcagcccgggaagccgcggcacagctgctcggcgcctgcagctccggctcgggggctggaacc

SEQ ID NO: 441405 - DNA, 120 bp, Artificial Sequence
  ENSG00000154027_1 (sequence is synthesized)
ggagaggcggagggggtccctggcctgggcggagaggctgagctgagtgcgcgtgagaaagagggctgcaccgctgctcggcgcggactctgccagccccagcttcagccccggctcagg

SEQ ID NO: 441406 - DNA, 120 bp, Artificial Sequence
  ENSG00000154027_2 (sequence is synthesized)
tcgccgcagcccgggagcctccccgcttgcgccccaaggcacgcgcggcacagccatgaacaccaacgatgccaaggagtatctggcccggagggaaatccctcagctttttgagagcct

SEQ ID NO: 441407 - DNA, 120 bp, Artificial Sequence
  ENSG00000154027_3 (sequence is synthesized)
tttgaatggactgatgtgttctaagcccgaagatccagtagaatacttggaaagttgtttacaaaaagtaaaggaactgggtggctgtgacaaggtgaaatgggatacatttgtaagcca

SEQ ID NO: 441408 - DNA, 120 bp, Artificial Sequence
  ENSG00000154027_4 (sequence is synthesized)
ggaaaagaagaccttacctccactaaatggaggacagtcacggagatcctttctaagaaatgtaatgcctgaaaactcaaactttccatatcggcggtatgaccggctccctccaatcca

SEQ ID NO: 441409 - DNA, 120 bp, Artificial Sequence
  ENSG00000154027_5 (sequence is synthesized)
tcaattctccatagaaagtgacacggatctctctgagactgcagagttgattgaggagtatgaggtttttgatcctaccagacctcgaccaaaaatcattcttgttataggtggtccagg

SEQ ID NO: 441410 - DNA, 120 bp, Artificial Sequence
  ENSG00000154027_6 (sequence is synthesized)
aagtggaaagggtactcagagtttgaaaattgcagaacgatatggattccaatacatttctgtgggagaattattaagaaagaagatccacagtaccagcagcaataggaaatggagtct

SEQ ID NO: 441411 - DNA, 120 bp, Artificial Sequence
  ENSG00000154027_7 (sequence is synthesized)
tattgccaagataattacaactggagaattggccccacaggaaacaacaattacagagataaaacaaaaattgatgcaaatacctgatgaagagggcattgttattgatggatttccaag

SEQ ID NO: 441412 - DNA, 120 bp, Artificial Sequence
  ENSG00000154027_8 (sequence is synthesized)
agatgttgcccaggctctatcttttgaggaccaaatctgtacccccgatttggtggtattcctggcttgtgctaatcagagactcaaagaaagattactgaagcgtgcagaacagcaggg

SEQ ID NO: 441413 - DNA, 120 bp, Artificial Sequence
  ENSG00000154027_9 (sequence is synthesized)
ccgaccagacgacaatgtaaaagctacccaaaggagactaatgaacttcaagcagaatgctgctccattggttaaatacttccaggaaaaggggctcatcatgacatttgatgccgaccg

SEQ ID NO: 441414 - DNA, 120 bp, Artificial Sequence
  ENSG00000154027_10 (sequence is synthesized)
cgatgaggatgaggtgttctatgacatcagcatggcagttgacaacaagttatttccaaacaaagaggctgcagcaggttcaagtgaccttgatccttcgatgatattggacactggaga

SEQ ID NO: 441415 - DNA, 120 bp, Artificial Sequence
  ENSG00000154027_11 (sequence is synthesized)
gatcattgatacaggatctgattatgaagatcagggtgatgaccagttaaatgtatttggagaggacactatgggaggtttcatggaagatttgagaaagtgtaaaattattttcataat

SEQ ID NO: 441416 - DNA, 120 bp, Artificial Sequence
  ENSG00000154027_12 (sequence is synthesized)
tggtggtcctggctctggcaaaggcacacagtgtgaaaagctggtggaaaaatatggatttacacatctctcaactggcgagctcctgcgtgaggaactggcatcagaatctgaaagaag

SEQ ID NO: 441417 - DNA, 120 bp, Artificial Sequence
  ENSG00000154027_13 (sequence is synthesized)
ccctcaggcatcgttttggagctcctgaaggaggccatggtggccagcctcggggacaccaggggcttcctgattgacggctatcctcgggaggtgaagcaaggggaagagttcggacgc

SEQ ID NO: 441418 - DNA, 120 bp, Artificial Sequence
  ENSG00000154027_14 (sequence is synthesized)
aggattggagacccacagttggtgatctgtatggactgctcggcagacaccatgaccaaccgccttctccaaaggagccggagcagcctgcctgtggacgacaccaccaagaccatcgcc

SEQ ID NO: 441419 - DNA, 120 bp, Artificial Sequence
  ENSG00000154027_15 (sequence is synthesized)
aagcgcctagaagcctactaccgagcgtccatccccgtgatcgcctactacgagacaaaaacacagctacacaagataaatgcagagggaacaccagaggacgtttttcttcaactctgc

SEQ ID NO: 441420 - DNA, 120 bp, Artificial Sequence
  ENSG00000154027_16 (sequence is synthesized)
acagctattgactctattttctgaaggcaaaaatgcatgtttgttagaatggaaacagaaaaacattaaaaagttcattccttaacacaatgtttcaagttaaaccttttgtgtcaccgc

SEQ ID NO: 441421 - DNA, 120 bp, Artificial Sequence
  ENSG00000154027_17 (sequence is synthesized)
ccccaccaaccaccacctcctaaatcctgacagcactgtttgcttcccagctagacctgtgtgagaggtgtctggaaatcatgcatggtgtatttgggactatatcaacctattctccac

SEQ ID NO: 441422 - DNA, 120 bp, Artificial Sequence
  ENSG00000154027_18 (sequence is synthesized)
acttcagacaactgtctgcactcacggcacacacactttgtatcatgcaggccacactcagagctagtcagtacatgaacagtggtgcggtgccagtctgtgtccgttgtgatcacaggc

SEQ ID NO: 441423 - DNA, 120 bp, Artificial Sequence
  ENSG00000154027_19 (sequence is synthesized)
cttgctagaccctgatcatctggttctcctctcattaagcatccctaacccccagtcacaccttcctcttacatactgttccccaatggaggcccctggcataggggacagccctgggca

SEQ ID NO: 441424 - DNA, 120 bp, Artificial Sequence
  ENSG00000154027_20 (sequence is synthesized)
tcttcctttggtgtctggctgttttgtcaactctcatccactggtggctcagagccataaggtgggttgattacacaatgccttgtacatgatatagaggcatcaagcaagtaaaatttg

SEQ ID NO: 441425 - DNA, 120 bp, Artificial Sequence
  ENSG00000154027_21 (sequence is synthesized)
acagaaattttaaaatatgaagatgtatagctttcccaagatgatggtaaaacccaggttagtcatcagtaaccttctctattattattattttttagaaacttggaatactgtcgtcat

SEQ ID NO: 441426 - DNA, 120 bp, Artificial Sequence
  ENSG00000154027_22 (sequence is synthesized)
ggctaagagaacaaatctgataaattgtgtaacctagtctcttctctacatggtgatgcatttcagcaattataaattaatataaatgaccaaaagtaacttaaaagcatgagatatttg

SEQ ID NO: 441427 - DNA, 120 bp, Artificial Sequence
  ENSG00000154027_23 (sequence is synthesized)
ctatttcattcattgggcacatatcaaattataattttgattttaaatggtcacccatgtatttatttgttgccaagcaagtaaaaaaataccctaacaaacctgatgtgggtgggaggg

SEQ ID NO: 441428 - DNA, 120 bp, Artificial Sequence
  ENSG00000154027_24 (sequence is synthesized)
gcatgtcagtaagtggtgtgttcaatgtgtttgtttcatatgggccctttccaggagtttgcaaaccttgtcatacccatatgcaaaactgtgtttccttgcattaaaccagtgaagttt

SEQ ID NO: 441429 - DNA, 120 bp, Artificial Sequence
  ENSG00000154027_25 (sequence is synthesized)
gggttctcttttgtgctatcaatcagttgtaaaatcagagctgcttatatattctactggaataactgcatcttccactcagtcactacaaaaaagcatagtttcagtttgcatgaattt

SEQ ID NO: 441430 - DNA, 120 bp, Artificial Sequence
  ENSG00000154027_26 (sequence is synthesized)
ttttttttttcttcaatggctgtgcagataaggatccatttctgggatagaattgtattttttaagtcatttttttttcttgaaatggatatgtacaaataaaataaatggaagacagga

SEQ ID NO: 441431 - DNA, 120 bp, Artificial Sequence
  ENSG00000154027_27 (sequence is synthesized)
caactgactagaattagcctacaagaagaagttttctttcaccttagtgagataatttattatggccataagtaactgaaatgtagcatttggggatgaaaagcacagttaccagccaaa

SEQ ID NO: 441432 - DNA, 120 bp, Artificial Sequence
  ENSG00000154027_28 (sequence is synthesized)
tctgattatgaagatcaggtaattaaaatctgaaaatagttctctatttaaatgtttttaagttgaacctttgtaaatgttttatgaaaatttgaattataaaaactcattttgtgaaat

SEQ ID NO: 441433 - DNA, 120 bp, Artificial Sequence
  ENSG00000154027_29 (sequence is synthesized)
actcgtttgtttattatgttgtttatgaccactttcatactaccatggccaagttgaatagaaactgcacggctctcaaagcccaaaatattgactatctgaccctttacaataaagcct

SEQ ID NO: 441434 - DNA, 120 bp, Artificial Sequence
  ENSG00000154027_30 (sequence is synthesized)
gctgaccacttagggagacttcttccagttaagaaaaaaacaaacccatttaattttaaaattgcttttactaactgtttaagtgtgaagagtgttttattatggtgttttttccttttc

SEQ ID NO: 441435 - DNA, 120 bp, Artificial Sequence
  ENSG00000154027_31 (sequence is synthesized)
agtcttccagcagggttctgaaagcagcctgctcccatcgcgcccctcggatgtggacacccagggtgggctgcagaccgcggccgggccgcactctctgggggcgagggccaggtcagg

SEQ ID NO: 441436 - DNA, 120 bp, Artificial Sequence
  ENSG00000154027_32 (sequence is synthesized)
tggctgcactgtcgcccagcagcgagtaaagactcgaaactgagggagccagagccctagtcactctgctggtcgagggtcggaacccctgggggaaagaggaaatgtggacgaaggcag

SEQ ID NO: 441437 - DNA, 120 bp, Artificial Sequence
  ENSG00000154027_33 (sequence is synthesized)
cccttcctggagacagcttggaagagagggatgaagatgcaaaaagcaaaacccaacctatcaagtgccacctccccggtgacaggcccccagccttgctctgcgctttcgctgaatgaa

SEQ ID NO: 441438 - DNA, 120 bp, Artificial Sequence
  ENSG00000154027_34 (sequence is synthesized)
ctcctgagcacgtttttcccgttgcctaggaagggttgggccgcaggtttcgccagtgctcgacaacccacctggagatagcgggtcggggagggagctgcgaggggggcggactcctgt

SEQ ID NO: 441439 - DNA, 120 bp, Artificial Sequence
  ENSG00000154027_35 (sequence is synthesized)
tgctcagtcttcagaccgcagcacagcatcatctgcaccgggacccgggaatggggggacacttggagactgagagagaggaggctcgaggaatgaaccttggtctgttctaagccacaa

SEQ ID NO: 441440 - DNA, 120 bp, Artificial Sequence
  ENSG00000154027_36 (sequence is synthesized)
cccctgtctcaggtcgtttggcttcctttccttctctttgtatttgaatttaaaaacattcctgaatctcaagtgcttttgcttgaagtaggggggaggaggagaaaagaatagaagcaa

SEQ ID NO: 441441 - DNA, 120 bp, Artificial Sequence
  ENSG00000154027_37 (sequence is synthesized)
gccaggcttcctaagcgagctctgaaaggagaaatccattcactgcaaacctcgttccccatttctgaaaacggatagactgatatcgtaaactaaaggtcatgagggtttttccccccg

SEQ ID NO: 441442 - DNA, 120 bp, Artificial Sequence
  ENSG00000154027_38 (sequence is synthesized)
gtttgggggatttgttctgttaaaaggaattttaaagcaccacttgagaaaataattttgcctcagtttccctaaactatctttaaaatgggttgccataattacaggtcttcttttctc

SEQ ID NO: 441443 - DNA, 120 bp, Artificial Sequence
  ENSG00000154027_39 (sequence is synthesized)
gtagaaatcctctttaccttaaaaagtggcttttggggggtacagaaccaatggaaaaaaatgtatcattttgacctgatttgcctttttaagccatcatgtttttttaaaaaaactttc

SEQ ID NO: 441444 - DNA, 120 bp, Artificial Sequence
  ENSG00000154027_40 (sequence is synthesized)
tttttaatttaattgatttttatgaaagaagataaattttaaccttggccaaaattctgtagtcctcaagtaaaaaagtgttttaaagtaactgtctgggtgattgtaagcaatatttgt

SEQ ID NO: 441445 - DNA, 120 bp, Artificial Sequence
  ENSG00000154027_41 (sequence is synthesized)
cttgatggacaaaggggaagagggggagaaataataaaataattgtagtcatagtaatgacaatattgaacatatattgagaatttgctatgtgccattgttctgaacccatatatgtta

SEQ ID NO: 441446 - DNA, 120 bp, Artificial Sequence
  ENSG00000154027_42 (sequence is synthesized)
atatattgatgttaatcctcaaaacaatcttatgatatgaattgaagagtcgttctaattttatatgtgaggagatggaggctacgttttcaaggaggctggagaatctgctccaagtca

SEQ ID NO: 441447 - DNA, 120 bp, Artificial Sequence
  ENSG00000154027_43 (sequence is synthesized)
catgtatcaagaggcagaggtggtatttgaaccaggctaagcaggtcctgaggcttcagtcttaactaccacctacttttttagaaacatagattaatatgccggaatattctctagcta

SEQ ID NO: 441448 - DNA, 120 bp, Artificial Sequence
  ENSG00000154027_44 (sequence is synthesized)
caattgttgggcttttataacctaaaatcaactcatactaaatgaatcaaacaaacgacaaccaaaaaaataaaaaaaaaaaagaccaggagaatggaccaagaaatacagatgatataa

SEQ ID NO: 441449 - DNA, 120 bp, Artificial Sequence
  ENSG00000154027_45 (sequence is synthesized)
acacaatacatttaaagatattattttttgtactttttaatgtagcttaattttttaattgatacacaatcatatatttatggagtacagaatgatgtttcaatacatatagtgtatggt

SEQ ID NO: 441450 - DNA, 120 bp, Artificial Sequence
  ENSG00000154027_46 (sequence is synthesized)
tcatctcaaacatttatcatttctttatgttgggaacattcaatatcctccatcctccttttagctatttgaaactatatatttattgttaagtatagtcatcctacagtggcatagaac

SEQ ID NO: 441451 - DNA, 120 bp, Artificial Sequence
  ENSG00000154027_47 (sequence is synthesized)
gtatagtcatcctacagtggcatagaacactagaacttatttattcaatctagctataattttgtaaaggtactgtttaattctagcaggagaataaagtgaatgggagagaggcgaaca

SEQ ID NO: 441452 - DNA, 120 bp, Artificial Sequence
  ENSG00000154027_48 (sequence is synthesized)
cctgtaaggtccatagtattccagattatgaaatgacacagatatctcaggagaagatgagagcttttcacataatcattccaagaagtttcatttaacaacagatatttattgagatgc

SEQ ID NO: 441453 - DNA, 120 bp, Artificial Sequence
  ENSG00000154027_49 (sequence is synthesized)
tatcatgttctaggctattgtactttgtcctggaaacacaaagatgaatgaataatgtacccttacggtaaaatacgtgtacatataatcatgcataatagagtataaatacatacaatg

SEQ ID NO: 441454 - DNA, 120 bp, Artificial Sequence
  ENSG00000154040_0 (sequence is synthesized)
cctcaggagccgccggcaagggggcaacgaggaagctcttaagagcgcggccggaaagcagttgagttacagacatcctgccaaaatgatttcttcaaagcccagacttgtcgtacccta

SEQ ID NO: 441455 - DNA, 120 bp, Artificial Sequence
  ENSG00000154040_1 (sequence is synthesized)
tggcctcaagactctgctcgagggaattagcagagctgttctcaaaaccaacccatcaaacatcaaccagtttgcagcagcttattttcaagaacttactatgtatagagggaatactac

SEQ ID NO: 441456 - DNA, 120 bp, Artificial Sequence
  ENSG00000154040_2 (sequence is synthesized)
tatggatataaaagatctggttaaacaatttcatcagattaaagtagagaaatggtcagaaggaacgacaccacagaagaaattagaatgtttaaaagaaccaggaaaaacatctgtaga

SEQ ID NO: 441457 - DNA, 120 bp, Artificial Sequence
  ENSG00000154040_3 (sequence is synthesized)
atctaaagtacctacccagatggaaaaatctacagacacagacgaggacaatgtaaccagaacagaatatagtgacaaaaccacccagtttccatcagtttatgctgtgccaggcactga

SEQ ID NO: 441458 - DNA, 120 bp, Artificial Sequence
  ENSG00000154040_4 (sequence is synthesized)
gcaaacggaagcagttggtggtctttcttccaaaccagccacccctaagactactaccccaccctcatcaccacctccaacagctgtctcaccagagtttgcctacgtcccagctgaccc

SEQ ID NO: 441459 - DNA, 120 bp, Artificial Sequence
  ENSG00000154040_5 (sequence is synthesized)
agctcagcttgctgctcagatgttaggtaaagtttcatctattcattctgatcaatctgatgtgttaatggtggatgtggcaaccagtatgcctgttgttatcaaggaggtgccaagctc

SEQ ID NO: 441460 - DNA, 120 bp, Artificial Sequence
  ENSG00000154040_6 (sequence is synthesized)
agaggctgctgaagatgtcatggtggctgctcctcttgtgtgttctggaaaggtgctagaagtgcaggttgtgaaccaaacatctgtccatgtagatttgggttctcaacctaaagaaaa

SEQ ID NO: 441461 - DNA, 120 bp, Artificial Sequence
  ENSG00000154040_7 (sequence is synthesized)
actgttcatatatcatctgtctataacgatgtgcctgtgactgaaggagttgtttatatcgagcaactgccagaacaaatagttatcccttttactgatcaagttgcttgtcttaaagaa

SEQ ID NO: 441462 - DNA, 120 bp, Artificial Sequence
  ENSG00000154040_8 (sequence is synthesized)
aatgagcagtcaaaagaaaatgagcagtcaccacgagttagtcccaaatctgtagtagaaaagaccacctctggcatgtctaaaaaatctgtagagtctgtaaaacttgcacagttggag

SEQ ID NO: 441463 - DNA, 120 bp, Artificial Sequence
  ENSG00000154040_9 (sequence is synthesized)
gagaatgcaaaatattcctcagtatatatggaggcagaagcaacagctctgctctctgacacatctttgaaaggtcagcctgaggtacctgcacaactcctggatgcagaaggtgctatc

SEQ ID NO: 441464 - DNA, 120 bp, Artificial Sequence
  ENSG00000154040_10 (sequence is synthesized)
aaaataggctctgaaaaatctctgcaccttgaagtggagatcacttcaatagtctctgacaatactgggcaggaggagtctggggaaaactctgtaccccaggagatggaaggcaaacct

SEQ ID NO: 441465 - DNA, 120 bp, Artificial Sequence
  ENSG00000154040_11 (sequence is synthesized)
gtgctctctggggaagctgcagaagcagtgcactcaggtacatctgtaaagtcatctagtggccccttccctcctgctccagaaggccttactgcaccagaaattgaaccagaaggggaa

SEQ ID NO: 441466 - DNA, 120 bp, Artificial Sequence
  ENSG00000154040_12 (sequence is synthesized)
tcaacagctgaataaggtttgatgaagccagaagatgtagctaaaaaaagttcaggatctggtgacaaatgtgctccctttggaagttacggtattgctggggaggtaaccgtgactact

SEQ ID NO: 441467 - DNA, 120 bp, Artificial Sequence
  ENSG00000154040_13 (sequence is synthesized)
gctcacaaacgtcgcaaagcagaaactgaaaactgatccagaaatgacgctgtctgggtcaacatttcagggaggagtctgccaccagtgtaatgtatcaataaacttcatgcaagcata

SEQ ID NO: 441468 - DNA, 120 bp, Artificial Sequence
  ENSG00000154040_14 (sequence is synthesized)
caaggtcacccatcaccgccacctgcacctgggccttttccccaagcaaccctctatttacctaatcctaaggatccacagtttcagcagcatccaccaaaagtcacttttccaacttat

SEQ ID NO: 441469 - DNA, 120 bp, Artificial Sequence
  ENSG00000154040_15 (sequence is synthesized)
gtgatgggcgacaccaagaagaccagtgccccaccttttatcttagtaggctcaaatgttcaggaagcacagggatggaaacctcttcctggacatgctgtcgtttcacagtcagatgtc

SEQ ID NO: 441470 - DNA, 120 bp, Artificial Sequence
  ENSG00000154040_16 (sequence is synthesized)
ttgagatatgttgcaatgcaagtgcccattgctgttcctgcagatgagaaataccagaaacataccctaagtccccagaatgctaatcctccaagtggacaagatgtccccaggccaaaa

SEQ ID NO: 441471 - DNA, 120 bp, Artificial Sequence
  ENSG00000154040_17 (sequence is synthesized)
gatataaaagatctggttaaacaatttcatcagattaaagatggtgcaactaatgtttgttgaatgaagaaagaatggatggaagggcaaggaggaagaggggagaaactaaaccaccta

SEQ ID NO: 441472 - DNA, 120 bp, Artificial Sequence
  ENSG00000154040_18 (sequence is synthesized)
ggtgataggagagatctgggaagaattattaagctgtcgcttttaaataaccctaatagtgtttgtgacaattttacccgttgacttttctcagcttgcttaggacagttctttgtgggg

SEQ ID NO: 441473 - DNA, 76 bp, Artificial Sequence
  ENSG00000154040_19 (sequence is synthesized)
aggagccgccggcaagggggcaacgaggaagctcttaagagcgcggccggaaagcagacggactcttcagctccgc

SEQ ID NO: 441474 - DNA, 67 bp, Artificial Sequence
  ENSG00000154040_20 (sequence is synthesized)
gagccactttcaaaacggtctatctactcactttggagaaatggtcagaaggaacgacaccacagaa

SEQ ID NO: 441475 - DNA, 120 bp, Artificial Sequence
  ENSG00000154040_21 (sequence is synthesized)
agacgtaatttcaggtaccatgaacctgtgagggagacacttttaattaaaagagcaagtggtcctttccagagttgcctaagtcataccacaagcaacctgtcaggtcccgtgcaggca

SEQ ID NO: 441476 - DNA, 120 bp, Artificial Sequence
  ENSG00000154040_22 (sequence is synthesized)
gatttagatatttaaaaacaatttgagataataagttggggtatactctaacttcctggggttactgtctccaacttcctaaacaccagttactaataaatgcacagcaggtgcactgta

SEQ ID NO: 441477 - DNA, 120 bp, Artificial Sequence
  ENSG00000154059_0 (sequence is synthesized)
ctcggctcgcagccgcagcgccccgcccccgcgctccggacctggcaggcggcggctgcagggcaggtccaggggccacatggctgagggggacgcagggagcgaccagaggcagaatga

SEQ ID NO: 441478 - DNA, 120 bp, Artificial Sequence
  ENSG00000154059_1 (sequence is synthesized)
cagaatgaggaaattgaagcaatggcagccatttatggcgaggagtggtgtgtcattgatgactgtgccaaaatattttgtattagaattagcgacgatatagatgaccccaaatggaca

SEQ ID NO: 441479 - DNA, 120 bp, Artificial Sequence
  ENSG00000154059_2 (sequence is synthesized)
ctttgcttgcaggtgatgctgccgaatgaatacccaggtacagctccacctatctaccagttgaatgctccttggcttaaagggcaagaacgtgcggatttatcaaatagccttgaggaa

SEQ ID NO: 441480 - DNA, 120 bp, Artificial Sequence
  ENSG00000154059_3 (sequence is synthesized)
atatatattcagaatatcggtgaaagtattctttacctgtgggtggagaaaataagagatgttcttatacaaaaatctcagatgacagaaccaggcccagatgtaaagaagaaaactgaa

SEQ ID NO: 441481 - DNA, 120 bp, Artificial Sequence
  ENSG00000154059_4 (sequence is synthesized)
gaggaagatgttgaatgtgaagatgatctcattttagcatgtcagccggaaagttcgcttaaagcattggattttgatatcagtgaaactcggacagaagtagaagtagaagaattacct

SEQ ID NO: 441482 - DNA, 120 bp, Artificial Sequence
  ENSG00000154059_5 (sequence is synthesized)
ccgattgatcatggcattcctattacagaccgaagaagtacttttcaggcacacttggctccagtggtttgtcccaaacaggtgaaaatggttctttccaaattgtatgagaataagaaa

SEQ ID NO: 441483 - DNA, 120 bp, Artificial Sequence
  ENSG00000154059_6 (sequence is synthesized)
atagctagtgccacccacaacatctatgcctacagaatatattgtgaggataaacagaccttcttacaggattgtgaggatgatggggaaacagcagctggtgggcgtcttcttcatctc

SEQ ID NO: 441484 - DNA, 120 bp, Artificial Sequence
  ENSG00000154059_7 (sequence is synthesized)
atggagattttgaatgtgaagaatgtcatggtggtagtatcacgctggtatggagggattctgctaggaccagatcgctttaaacatatcaacaactgtgccagaaacatactagtggaa

SEQ ID NO: 441485 - DNA, 120 bp, Artificial Sequence
  ENSG00000154059_8 (sequence is synthesized)
aagaactacacaaattcacctgaggagtcatctaaggctttgggaaagaacaaaaaagtaagaaaagacaagaagaggaatgaacattaatacctgaaactataggaaaggttaatttgc

SEQ ID NO: 441486 - DNA, 120 bp, Artificial Sequence
  ENSG00000154059_9 (sequence is synthesized)
ctataattatatatacattccatagtcatcaaggaatatattgtgcagagagagtatccttgactgcttaagtcagccagttcagcatggataccaacattagcttttcttcttggttat

SEQ ID NO: 441487 - DNA, 120 bp, Artificial Sequence
  ENSG00000154059_10 (sequence is synthesized)
atcatctgccaaaaatagagaacttatgatctattcatgtgtgtttcaggcttatttgggagaactaatttgaacttaatcaccacttcatctaattttagcaaggtaacagttgcccag

SEQ ID NO: 441488 - DNA, 120 bp, Artificial Sequence
  ENSG00000154059_11 (sequence is synthesized)
ggcagtacctgaattaactgtccatttcagtacatgtcaagtgcctttgttaggtggagaagaaatgtctctagaggaatataaatacctgatttcttgtcatcgagattcttgtactgt

SEQ ID NO: 441489 - DNA, 120 bp, Artificial Sequence
  ENSG00000154059_12 (sequence is synthesized)
taaatgaatattgccttttactgctctttatggcttattggaataggagctcatttaagattgatcttggagagtttcttcttgtgattttagttcataagtatgtcacctttcatttta

SEQ ID NO: 441490 - DNA, 120 bp, Artificial Sequence
  ENSG00000154059_13 (sequence is synthesized)
tagtgttcatcattgagtaatggattaagtgaaaatccaggagtatccatctgcagttatgtgctgaggtgataattcatccaacatatttgttagcataaatattatgcttcagtttct

SEQ ID NO: 441491 - DNA, 120 bp, Artificial Sequence
  ENSG00000154059_14 (sequence is synthesized)
gttgcaaattggtgattgtgaaattacagaaagtgattttctagtctgctttttttgtttaattcttgtaatgtaagcaataaatatggagtgtcagtagtctccttccaccccagaaat

SEQ ID NO: 441492 - DNA, 120 bp, Artificial Sequence
  ENSG00000154059_15 (sequence is synthesized)
ttctcgtttcttttaacaacctggaagtacctttcttgtgatcttcactgaggaattagaactatgatagaagttaggctgtggcaaatgggacattcgtagagtgggatagaggtggca

SEQ ID NO: 441493 - DNA, 120 bp, Artificial Sequence
  ENSG00000154059_16 (sequence is synthesized)
gaatgaacctggtgtagggcaggagtatgttgtgtagttacatcaatttgatgcatgctttccatctgcactccagacggctttctcagttccaagattttgcagagagaaggagcaaac

SEQ ID NO: 441494 - DNA, 120 bp, Artificial Sequence
  ENSG00000154059_17 (sequence is synthesized)
cttttcattggaaaaacagaaacaaccctcccccccattttttcccctctattcatcaaacctttatgtatctttcatcttccagttacctctaggcatttagatagtgaaatttacctt

SEQ ID NO: 441495 - DNA, 120 bp, Artificial Sequence
  ENSG00000154059_18 (sequence is synthesized)
tgagatataacaataagtgattaactgttcactttcagatgtaatggcaaacaattgttaaaagttattaactgatcacagatttgcctggacttcccttcccagggagggaacagaagt

SEQ ID NO: 441496 - DNA, 120 bp, Artificial Sequence
  ENSG00000154059_19 (sequence is synthesized)
taggaggcaactttgggatggtgctagagcatggaaagcacagagaattggacaaacaggtctttttctcttttctctgatgttttacctttaaaagatccaacatccttaccgttggta

SEQ ID NO: 441497 - DNA, 120 bp, Artificial Sequence
  ENSG00000154059_20 (sequence is synthesized)
tttttagtaaggttatagtaaatagctttacaccaggatggattctgaaatataaattctaaattatatttgttataactatattttatgttgtatgttatcaggagccatcagagaatg

SEQ ID NO: 441498 - DNA, 120 bp, Artificial Sequence
  ENSG00000154059_21 (sequence is synthesized)
acctttttgtgtttggaacacttggttccatgaaaagtatgctttgtgttttaactgttaaaataatttaaaaattaattattttacataattaaagaagttaaaaactattaacattaa

SEQ ID NO: 441499 - DNA, 120 bp, Artificial Sequence
  ENSG00000154059_22 (sequence is synthesized)
ataatttcacaatttcaacatgtcaaacctatgaagggagataggaaacaatgagaaacttacttttgctcctttatacagaattattaactatattttactaactaaaaaactctagta

SEQ ID NO: 441500 - DNA, 120 bp, Artificial Sequence
  ENSG00000154059_23 (sequence is synthesized)
ttctttacctaaagtcaattggctggtaagagggagagatgcaaaattctccagctctgaacttggagctacttcacactctactcttaatggaaacttgaactaatgatagatagtatt

SEQ ID NO: 441501 - DNA, 120 bp, Artificial Sequence
  ENSG00000154059_24 (sequence is synthesized)
tttttcctctatttaaaatttttgtcttgattaggagatttttcagttctccatataataattttctacaatcagatctatgctgtggcatattttgctttatttaaaaattttttttta

SEQ ID NO: 441502 - DNA, 86 bp, Artificial Sequence
  ENSG00000154059_25 (sequence is synthesized)
cagcctgccaagtagctgggattacagacaggcatgtgctattacacctggctaatttttaaagttttttttgtaaagatagggtc

SEQ ID NO: 441503 - DNA, 120 bp, Artificial Sequence
  ENSG00000154059_26 (sequence is synthesized)
cctggctaatttttaaagttttttttgtaaagatagggtctttctatgttgcccaggctcgtcttgagctcctggcctcaatcgatcttcctgccaaggttttggaattacaggtgtgag

SEQ ID NO: 441504 - DNA, 120 bp, Artificial Sequence
  ENSG00000154059_27 (sequence is synthesized)
ccaccatgcctggcctgctttgacatattttatagtgtgttaattacaaatagtcttcatatgccagaatataagagcaagtgttatctactttttagatgggaattgcagaagctgcat

SEQ ID NO: 441505 - DNA, 120 bp, Artificial Sequence
  ENSG00000154059_28 (sequence is synthesized)
caaaagtatgctttgaggtatatatagtgaaacagagcctttctgaagagaattatatcaaactaattacaaccaagaaataatagtatgaagcggatgctgtttggaggacaggaaaat

SEQ ID NO: 441506 - DNA, 120 bp, Artificial Sequence
  ENSG00000154059_29 (sequence is synthesized)
ttatcgggaaaattacataatccctctgattccactatccagagatagccattattattaatatttggtatgtacatccttatattatttttttcttatgcatgattttgtatatatggt

SEQ ID NO: 441507 - DNA, 120 bp, Artificial Sequence
  ENSG00000154059_30 (sequence is synthesized)
tatttttctttccataaaaatggtattaaactgtatatactgttttgtagcctacatatttcatatagaagtatattgttaacattttccatgtcaataaatattcttctatggcttaaa

SEQ ID NO: 441508 - DNA, 120 bp, Artificial Sequence
  ENSG00000154059_31 (sequence is synthesized)
ggctttgggaaagaacaaaaaagtaagaaaagacaagaagaggaatgaacattaatacctgaaactataggaaagtgttcatcattgagtaatggattaagtgaaaatccaggagtatcc

SEQ ID NO: 441509 - DNA, 120 bp, Artificial Sequence
  ENSG00000154059_32 (sequence is synthesized)
cgccccgggttccgccagcactggccacgccatttgctccaccgcgttccattttcccggcgcttcccgtcggccgagcgctcttaggccggcggctcctcggcggccgcggtctcggcc

SEQ ID NO: 441510 - DNA, 120 bp, Artificial Sequence
  ENSG00000154059_33 (sequence is synthesized)
tgtctcggacggtgtcctcgtcaaccattaacacgcgactaagcagctctgggccgaaggcaaaaaccggggtttcgatccccaccctgccgccgccgagtcatcttggacaaatcactt

SEQ ID NO: 441511 - DNA, 120 bp, Artificial Sequence
  ENSG00000154059_34 (sequence is synthesized)
aagaattcgggtttccccctttgcaaaatggcaatagcccagaccctgcaggtcccgagagcccaccgaatctcactccttctggtccttggcatcgagctttccctgtgccttgttcac

SEQ ID NO: 441512 - DNA, 120 bp, Artificial Sequence
  ENSG00000154059_35 (sequence is synthesized)
gtgggcgatcataagtcttttcctacagggctgtgagtacaaaatgaaatgctacgaagtcgaatggatactttgcttcccatcttttccctttaggtcctccagttatttttctttttt

SEQ ID NO: 441513 - DNA, 120 bp, Artificial Sequence
  ENSG00000154059_36 (sequence is synthesized)
aaccccaagcccaaagaataatttatgaaacgttttaagggtttgattaccaagcaaccacccacccatctagtccttgtgtaccccctccccacctccccccaacacaaaatttaatac

SEQ ID NO: 441514 - DNA, 120 bp, Artificial Sequence
  ENSG00000154059_37 (sequence is synthesized)
gaaggaaccagtgagacacccagcaggagtacacagataatgtggggcagagctattgggggtgggagtcaggggtggagattacctgttaaaaaagagaaggtggaacagagaagatag

SEQ ID NO: 441515 - DNA, 120 bp, Artificial Sequence
  ENSG00000154059_38 (sequence is synthesized)
gtttatcttttcacgtgtgaatggtcactacaaagtatgggagtgcatatatattatattttgactcaatagtggccaaaagcacagtaatgcagtagcaaggctggctccagtcattgc

SEQ ID NO: 441516 - DNA, 120 bp, Artificial Sequence
  ENSG00000154059_39 (sequence is synthesized)
agtagcgcctagcaaccacccagagagcagaacatggtgacctgctcttaagaaactcttggcctggtgaggctcatctaggaatttttgatctactctggtaatgttgaatttgaatac

SEQ ID NO: 441517 - DNA, 80 bp, Artificial Sequence
  ENSG00000154065_0 (sequence is synthesized)
gccgggccgggcggcgggagcgcgcggcgtcggaggccgcccctctgcggaacgccgagagccccgggagagtgaagggc

SEQ ID NO: 441518 - DNA, 120 bp, Artificial Sequence
  ENSG00000154065_1 (sequence is synthesized)
cggggaggacaaggcgccccgggcccaaagcgcgccggctcccgctcgggcggccgcggacatgtgcaggatgtccttcaagaaggaaactccacttgccaatgctgcattctgggcagc

SEQ ID NO: 441519 - DNA, 120 bp, Artificial Sequence
  ENSG00000154065_2 (sequence is synthesized)
caggagaggaaacctggcgctgctgaagctgctgttgaacagcggccgggtggacgtggactgcagagacagccatggcaccacactcctgatggttgctgcctacgctggccacataga

SEQ ID NO: 441520 - DNA, 120 bp, Artificial Sequence
  ENSG00000154065_3 (sequence is synthesized)
ctgtgtgagggaactggttctgcaaggagcagacatcaatctccagagagagtcaggtacaactgccctattctttgccgcccagcaaggccataatgatgtcgtgagatttctctttgg

SEQ ID NO: 441521 - DNA, 120 bp, Artificial Sequence
  ENSG00000154065_4 (sequence is synthesized)
atttggagcatccactgaatttaggaccaaagacgggggcaccgccctgttggctgccagtcagtacgggcacatgcaggtggtggagaccttgctgaagcacggagcaaacatccatga

SEQ ID NO: 441522 - DNA, 120 bp, Artificial Sequence
  ENSG00000154065_5 (sequence is synthesized)
ccaactttatgatggagccactgccctcttcctagctgcccaaggtggttacttggatgttattcgattactgctggcttcaggagcaaaagtcaaccagccaaggcaggacgggacagc

SEQ ID NO: 441523 - DNA, 120 bp, Artificial Sequence
  ENSG00000154065_6 (sequence is synthesized)
gcccctgtggatcgcgtcccagatgggccacagcgaggtggtgcgggtgatgctgctgcgcggagccgaccgcgacgctgcgcggaacgatggcacaacagcattattgaaagcagccaa

SEQ ID NO: 441524 - DNA, 120 bp, Artificial Sequence
  ENSG00000154065_7 (sequence is synthesized)
caaagggtataatgatgtcataaaagagttgcttaaattctcacccactcttggtattttgaagaatgggacatcagcgctccatgcagcagtgctcagtggaaacattaaaacagttgc

SEQ ID NO: 441525 - DNA, 120 bp, Artificial Sequence
  ENSG00000154065_8 (sequence is synthesized)
gctgctcctagaagcaggggcagacccatccctgagaaacaaggccaatgaacttccggcagaactaaccaaaaatgaacgtatattgcgtctcctgagaagtaaagaaggtcccagaaa

SEQ ID NO: 441526 - DNA, 120 bp, Artificial Sequence
  ENSG00000154065_9 (sequence is synthesized)
gagctaacttagctccatatttgacagaaagatagaaagcttaaccacattgtccaaaaagaaattgcatttcaagcagtgttggaaattcttttatgaaaaaaaaagatgcccagaatg

SEQ ID NO: 441527 - DNA, 120 bp, Artificial Sequence
  ENSG00000154065_10 (sequence is synthesized)
cccatcctgtgggtccctgacaaagaagagctacgctctgtgcacgaagtcaagaaccaaacagctcagggaccctcttgccccttcaccatggacttctcatggtgtcctgtaactcat

SEQ ID NO: 441528 - DNA, 120 bp, Artificial Sequence
  ENSG00000154065_11 (sequence is synthesized)
ctcccggggggcctggcatgttcacagattccacagaaactcattttcaacaatgctaacttggacctgtcagttaaactctaaggtggacagggttctcagtactaagcaaggagacag

SEQ ID NO: 441529 - DNA, 120 bp, Artificial Sequence
  ENSG00000154065_12 (sequence is synthesized)
aatgctttgttcctttaaaagactgaaaagctgaccttcaatggattgaggcacttttgcttttgtgttaaatgtagatgtgctaaaatatatagatctatcatattttacctacatatg

SEQ ID NO: 441530 - DNA, 120 bp, Artificial Sequence
  ENSG00000154065_13 (sequence is synthesized)
tatgtcattccagtataaaacattctcctctacccaagaaccatagccatgattgttataaatcaatgaagtgtaaacatacattattaaaaaaccacttctgacattccattatgtgct

SEQ ID NO: 441531 - DNA, 120 bp, Artificial Sequence
  ENSG00000154065_14 (sequence is synthesized)
aaaagacagactgtgcatttgttcgttgatcctcatcttattcctgacatgtaaaaatcaattttacgtagagtcaacattgtaggtaggttaaaataccagtggcaaatttggaaattc

SEQ ID NO: 441532 - DNA, 120 bp, Artificial Sequence
  ENSG00000154065_15 (sequence is synthesized)
agaaacttataaaccacgagaaatatataggcttgtctctttggtcttttattttggctctattgttgggaatctatttcctattctataagtaagtatacctaacatgctgtggaatct

SEQ ID NO: 441533 - DNA, 120 bp, Artificial Sequence
  ENSG00000154065_16 (sequence is synthesized)
tgagtttccaacaccgtgctgcttgatagaatgactttgaggtccttggataaaatgtgatatatgcaagtacagtatgttgctattactattgcaggaatataaataataaaagactgt

SEQ ID NO: 441534 - DNA, 120 bp, Artificial Sequence
  ENSG00000154065_17 (sequence is synthesized)
tattagcacttagtaagtcttcatctatgcatgtttttgagttgactgattccaagaatgaaatatgaggtttattgaattattcctttgaaagggatcaaaacttatattcaatgcact

SEQ ID NO: 441535 - DNA, 120 bp, Artificial Sequence
  ENSG00000154065_18 (sequence is synthesized)
ttataattaatggtgtctaaatgcctcagtcagtgcctaactgcacatacaaaaataaaaccttctttctgtaatctaccaaaataaacgcaatggtatttctgctatttaaacacatct

SEQ ID NO: 441536 - DNA, 120 bp, Artificial Sequence
  ENSG00000154065_19 (sequence is synthesized)
ttagcttatttcttcatgttctgctctggttttcagtcagtgtctatgtaaagacacttttagaggaaaatgttgtaatcccaaaagaatttttgtttaaccaactttcagagttactaa

SEQ ID NO: 441537 - DNA, 120 bp, Artificial Sequence
  ENSG00000154065_20 (sequence is synthesized)
tctttaattcagtaaataatagaatataatcttcaaaattagaagatattctcttaaaatttataacaattaatgcaacaaaaatcagcatattttgataaatgtctcaagcaaatgagc

SEQ ID NO: 441538 - DNA, 120 bp, Artificial Sequence
  ENSG00000154065_21 (sequence is synthesized)
aaatgagcaactcacaggccccacaggtgcctacagcctgaccagctatacaaaaagcctgcaacctgattctaggataaaatattagaaagctctctgttgctaaaacatccagatata

SEQ ID NO: 441539 - DNA, 120 bp, Artificial Sequence
  ENSG00000154065_22 (sequence is synthesized)
aacattttggtggctaaaatcaatgccatttcctcattgacattcttttattcagcaaatttgtacaaatatacattttctcctgtgcgaatttcaaaaagctatattcattttgaagag

SEQ ID NO: 441540 - DNA, 120 bp, Artificial Sequence
  ENSG00000154065_23 (sequence is synthesized)
gaaaataatatggcattaaatgctttgtattttccccttagttagcccttatggcaaaaatagttgctaatcactgatacaaagcaaaacgttatgggtactgataacaaagttccaaaa

SEQ ID NO: 441541 - DNA, 120 bp, Artificial Sequence
  ENSG00000154065_24 (sequence is synthesized)
gccaaaatgggatgaatcacaaacttactgtttttcactaaaacatgtaattggcctattacatcaatagttttaagtgggtaatgttcttgaacaatattagagccataaaattgaagc

SEQ ID NO: 441542 - DNA, 120 bp, Artificial Sequence
  ENSG00000154065_25 (sequence is synthesized)
cagtagcttgaacaatatggaggccttcttactgtagggaagaggtgtctagcttagaaggatcacatttgatctagatgagattacccatagcagggaaaatgaatcatcacctaccaa

SEQ ID NO: 441543 - DNA, 120 bp, Artificial Sequence
  ENSG00000154065_26 (sequence is synthesized)
agactgtacggaaaggtgtgttattttcaaaattgcattttagtttgcacacatgtaaatgattattctatgttaatctaattgacaattcagttagctccgcatcctaagacttaaaac

SEQ ID NO: 441544 - DNA, 120 bp, Artificial Sequence
  ENSG00000154065_27 (sequence is synthesized)
tagcaattcctatgcaaatcatctgcttaactgaactacaaacgtttttcattaattcattctttgatgacatattccatgttatataataattcaaaataaagttaatatactacccca

SEQ ID NO: 441545 - DNA, 120 bp, Artificial Sequence
  ENSG00000154065_28 (sequence is synthesized)
tggtcatggacccccactgttcctagatcccagtactgtgctgttctttgtagatgccctacacccaggcctcagcttaatagtctctttattacactttcttccaattatcccaatctg

SEQ ID NO: 441546 - DNA, 120 bp, Artificial Sequence
  ENSG00000154065_29 (sequence is synthesized)
aatgtaccatctgttccttgccagaactcgggctgctgtcaagtcttgggcatctgtgaactggccatcttggtcttatttgggttttacggggctggttcctacatcacagtgggaaaa

SEQ ID NO: 441547 - DNA, 85 bp, Artificial Sequence
  ENSG00000154065_30 (sequence is synthesized)
tgggttttacggggctggttcctacatcacagtgggaaaactgtagggcagaaacaccagttgtcaccgtggccaacacggagaa

SEQ ID NO: 441548 - DNA, 120 bp, Artificial Sequence
  ENSG00000154065_31 (sequence is synthesized)
aggcgggggttgcagtgagctgagatcgtgccatcccactccagcctgggaggcgagacttcgactcaaaaaaaaaaaataccatagagcaccactaagaagccattagctttttgttac

SEQ ID NO: 441549 - DNA, 120 bp, Artificial Sequence
  ENSG00000154065_32 (sequence is synthesized)
cactaagaagccattagctttttgttacttcgttacttcgttactttaccgatactttttacataaagccaacaagactttcacaaaactagcatggccattgacagaagtcaacaaaag

SEQ ID NO: 441550 - DNA, 120 bp, Artificial Sequence
  ENSG00000154065_33 (sequence is synthesized)
ccagatgacagcctaacattgaattatcgtaatgttattttaatatctaacacttactgaacgaatatctaccattactatgttaaccatattgcctgacttatctcattcagtaattta

SEQ ID NO: 441551 - DNA, 120 bp, Artificial Sequence
  ENSG00000154065_34 (sequence is synthesized)
atcaggtggatacttttattattcccccatatttcagatgaagagaatgagacttaagggttacatgatgtgcccaagatcatactgtcagtgactactcagcaatactgccttcctaca

SEQ ID NO: 441552 - DNA, 120 bp, Artificial Sequence
  ENSG00000154065_35 (sequence is synthesized)
aaatcccgtagatgaaaataacacgaagcctccaaaattcacttaattaccctatacctaatgagcctcccctgtgtgcagagtcacctgtctctctcatcatccacttctgagcagcag

SEQ ID NO: 441553 - DNA, 120 bp, Artificial Sequence
  ENSG00000154065_36 (sequence is synthesized)
gttgctgaatatgcagaggtggtagctaagattacaatttcaagtgcttgaaaacaactgtaagtcaaactgcaaatgcccacttcaattagaagggtccatatcacatggtacacctca

SEQ ID NO: 441554 - DNA, 120 bp, Artificial Sequence
  ENSG00000154065_37 (sequence is synthesized)
ggtccttgaatcttaaagctgggacagactttggtgatcatcccatccaaccgctcattttaaaaatgaaataaatgagtccaagtaattgtaagcaacttgcccaggttacactgttgg

SEQ ID NO: 441555 - DNA, 120 bp, Artificial Sequence
  ENSG00000154065_38 (sequence is synthesized)
tcagtgacagctacctgggtttagcccccacagctcctgactctcaactctgtagtctctcatttcacctggtgccatacatctttacctgaatcattttgaagatgaagacttttaaat

SEQ ID NO: 441556 - DNA, 120 bp, Artificial Sequence
  ENSG00000154065_39 (sequence is synthesized)
atggaaaatcagatggtaccatttaatttttcttttgcattaatagcaatgttttggctcaggaatcatttaataggaatcataaaatgagagcaatatatcatcgctgccttaaaatgc

SEQ ID NO: 441557 - DNA, 120 bp, Artificial Sequence
  ENSG00000154065_40 (sequence is synthesized)
agtaactatggttcatttggactgtgcttctgaaggtaatggaagtaagtgaatttttacatcgaaaattccaacctcagcaatttgtcactttgctttttcccatctaggctgcatgat

SEQ ID NO: 441558 - DNA, 120 bp, Artificial Sequence
  ENSG00000154065_41 (sequence is synthesized)
gagattattcatgaccacttttatcactgcagggaattttgcccttggatgtgttctgagtggagctgacatctctgcagcatcttctctaggacccttctctctgacatagcagtggcc

SEQ ID NO: 441559 - DNA, 120 bp, Artificial Sequence
  ENSG00000154065_42 (sequence is synthesized)
gcgtccgtgggctacacacaccccctcttttctcactgcctcctgggcggtgtggatcagctgcagagtgtgatctgcggtcagggagtgccttcccggagttttcgctttcagacccct

SEQ ID NO: 441560 - DNA, 120 bp, Artificial Sequence
  ENSG00000154065_43 (sequence is synthesized)
ggtgttaaagacgttctgtgagcgggtggggccgggcgccccagtcacggcggccgccgcctcctcttcccgcaggacgggacagcgcccctgtggatcgcgtcccagatgggccacagc

SEQ ID NO: 441561 - DNA, 120 bp, Artificial Sequence
  ENSG00000154065_44 (sequence is synthesized)
agagcgaagcctcccggcgcgcctgtgtggagaaaacgggtcttgactgagtctgcagcccacatgggtttcctcccaacctccttccttgagcaggaaaacaaagtcaaggatggcaca

SEQ ID NO: 441562 - DNA, 120 bp, Artificial Sequence
  ENSG00000154065_45 (sequence is synthesized)
taatggcaggccgaagtggtttcttggctacgggagaattatggactaaatcctccaaacacagcgactgatatgtgaaaatgggagaaaaaggaatttggaaactgtgttcttgagcca

SEQ ID NO: 441563 - DNA, 120 bp, Artificial Sequence
  ENSG00000154065_46 (sequence is synthesized)
gaaactgtgttcttgagccaaaaaataacgacagaagctaaatattaatttttgaatttggcttttcattctttttagcagattttattttatttttttctgagacagagtctcactctg

SEQ ID NO: 441564 - DNA, 120 bp, Artificial Sequence
  ENSG00000154065_47 (sequence is synthesized)
aggggcagacccatccctgagaaacaaggtgcgatggcagaactgattgggccagattactggtctgggtggtgtcgctgatccatcaagtgcaaggccaatgaacttccggcagaacta

SEQ ID NO: 441565 - DNA, 120 bp, Artificial Sequence
  ENSG00000154065_48 (sequence is synthesized)
aggaatacattcccctttacaatgcttatttactttttcatgtgtttgcttgctttatcctttttaaaacatccaaggtactgtggtgaacttaaaaacatgctgggggaagtcagaaag

SEQ ID NO: 441566 - DNA, 120 bp, Artificial Sequence
  ENSG00000154065_49 (sequence is synthesized)
aaacaatgaaatgcataaaacagaaggcaaccacaatagggaaagaggcacttcactgggaatcagaattggcagattacaagaagaaaagcctgtttagtgaaagaattcaagccaacc

SEQ ID NO: 441567 - DNA, 120 bp, Artificial Sequence
  ENSG00000154065_50 (sequence is synthesized)
acttccatgaaaagatggagataatttagagcacaagtgggctgccatggatgtgggcgttatgtttcttctacaaggatgagaaaacaaaaattgaagcctcccccaggattttatcct

SEQ ID NO: 441568 - DNA, 120 bp, Artificial Sequence
  ENSG00000154065_51 (sequence is synthesized)
ttcattacctcttgaaaacataaatacactaattggcaatttaaaaagggaaacaaaaatagatactactgcccactggcagataccacttagagagcttttccatccccagctagaggc

SEQ ID NO: 441569 - DNA, 120 bp, Artificial Sequence
  ENSG00000154065_52 (sequence is synthesized)
aatcgtttttctgtcctcagcaagacttctcatctctgggaccaagaggacctccaatgaggaaagggagcgagcaatgatgttttgattttaggatttgaataaaaatgtttcaaagga

SEQ ID NO: 441570 - DNA, 120 bp, Artificial Sequence
  ENSG00000154079_0 (sequence is synthesized)
gagtcggcgccatgaccccatcgaggcttccctggttgcttagctgggtctcggccacggcgtggagagcggcaagatcaccccttctgtgtcattctctgaggaaaacaagttcttctc

SEQ ID NO: 441571 - DNA, 120 bp, Artificial Sequence
  ENSG00000154079_1 (sequence is synthesized)
aaggaggaaagtctgaacttgtcaaacagtcccttaagaagccgaagttaccagaaggtcgttttgatgcaccagaggattcccatttagagaaagaaccactggaaaaatttccagatg

SEQ ID NO: 441572 - DNA, 120 bp, Artificial Sequence
  ENSG00000154079_2 (sequence is synthesized)
atgttaatccagtgaccaaagaaaaaggtggacccaggggcccagaacctacccgatatggagattgggaacgaaaaggacgctgtattgatttttaagtcgcatattctttaacttcaa

SEQ ID NO: 441573 - DNA, 120 bp, Artificial Sequence
  ENSG00000154079_3 (sequence is synthesized)
gttttctgaatatgtacatctgaattaacttatttctgattattttctttctttatatcctttatgtcgtgtagtttgtataatgtgtttaaatatatatatatatgatggctttggaag

SEQ ID NO: 441574 - DNA, 120 bp, Artificial Sequence
  ENSG00000154079_4 (sequence is synthesized)
aactccgtctcaaaaaaaaagataggaaagggaaaatattttttcattaacatatattaatttaatgagtatagaaatgattcttgtttttttgagacagagtctctctctctcacccag

SEQ ID NO: 441575 - DNA, 85 bp, Artificial Sequence
  ENSG00000154079_5 (sequence is synthesized)
ttcttgtttttttgagacagagtctctctctctcacccaggctggagtggagtggcactatcccaactcactgcaacttccgccc

SEQ ID NO: 441576 - DNA, 120 bp, Artificial Sequence
  ENSG00000154079_6 (sequence is synthesized)
gccaccacgcccagcctagaaatgattcttagagctgtaggcctttacttcatcatttttcagtttaaattaatcagttgcttataaaatgcatacataaataaaataatttttaaaaaa

SEQ ID NO: 441577 - DNA, 120 bp, Artificial Sequence
  ENSG00000154079_7 (sequence is synthesized)
gcggaggctcggggagtcggcgccatgaccccatcgaggcttccctggttgcttagctgggtctcggccacggcgtggagagcggcaagaatccgcgctcctggtccaggctccagcaga

SEQ ID NO: 441578 - DNA, 120 bp, Artificial Sequence
  ENSG00000154079_8 (sequence is synthesized)
aagccaggaattgtcagtacagaaaaagcattcatgctttcagtaaaaccaacatttttaaacccattgttgttggaaatttttctcaagataatacagttagcagcccagactatgcaa

SEQ ID NO: 441579 - DNA, 120 bp, Artificial Sequence
  ENSG00000154080_0 (sequence is synthesized)
agtcttttctgtcttcagagcattagtgtgcacattaagtcttcagccttgttgagatagtgaatatttatgccgtatttgagaattaatattagcagaaatgtacaatgtagatttctt

SEQ ID NO: 441580 - DNA, 120 bp, Artificial Sequence
  ENSG00000154080_1 (sequence is synthesized)
tttaaaattctaggttactttatggaattgggctcttagagaacaagaaaagactgaagttttacgggaaaacaaatcatgtggtcttcagattctgaaataaggagaaatgcagccatc

SEQ ID NO: 441581 - DNA, 120 bp, Artificial Sequence
  ENSG00000154080_2 (sequence is synthesized)
tgaaatggtcatgaaccccaaacaagtcttcctctctgtgctgatatttggagtagctgggctactcctcttcatgtatttgcaagtctggattgaagaacaacatacagggagagtgga

SEQ ID NO: 441582 - DNA, 120 bp, Artificial Sequence
  ENSG00000154080_3 (sequence is synthesized)
gaagagaagagaacaaaaagtaacttcaggatggggaccagtgaagtacttgcggcctgtacccagaatcatgagtacagaaaaaatccaggaacatatcaccaaccagaaccccaagtt

SEQ ID NO: 441583 - DNA, 120 bp, Artificial Sequence
  ENSG00000154080_4 (sequence is synthesized)
tcacatgcctgaggatgtacgagaaaaaaaggaaaatcttctactcaattctgagagatctactaggctcttaacaaagaccagtcattcacaaggaggggatcaagctttaagtaagtc

SEQ ID NO: 441584 - DNA, 120 bp, Artificial Sequence
  ENSG00000154080_5 (sequence is synthesized)
cacagggtcaccaacagagaagttgattgaaaaacgtcaaggagctaagactgtttttaacaagttcagcaacatgaattggccagtggacattcaccctttaaacaaaagtttagtcaa

SEQ ID NO: 441585 - DNA, 120 bp, Artificial Sequence
  ENSG00000154080_6 (sequence is synthesized)
agataataaatggaagaaaactgaggagacccaagagaaacgaaggtctttccttcaggagttttgcaagaaatacggtggggtgagtcatcatcagtcacatctttttcatacagtatc

SEQ ID NO: 441586 - DNA, 120 bp, Artificial Sequence
  ENSG00000154080_7 (sequence is synthesized)
cagaatctatgtagaagataaacacaaaatcttatattgtgaggtacctaaggctggctgttccaattggaaaagaattctgatggtactaaatggattggcttcctctgcatacaacat

SEQ ID NO: 441587 - DNA, 120 bp, Artificial Sequence
  ENSG00000154080_8 (sequence is synthesized)
ccacaatgctgtccactacgggaagcatttgaagaagctagatagctttgacctaaaagggatatatacccgcttaaatacttacaccaaagctgtgtttgttcgtgatcccatggaaag

SEQ ID NO: 441588 - DNA, 120 bp, Artificial Sequence
  ENSG00000154080_9 (sequence is synthesized)
attagtatcagcctttagggacaaatttgaacaccccaatagttattaccatccagtattcggaaaggcaattatcaagaaatatcgaccaaatgcctgtgaagaagcattaattaatgg

SEQ ID NO: 441589 - DNA, 120 bp, Artificial Sequence
  ENSG00000154080_10 (sequence is synthesized)
atctggagtcaagttcaaagagtttatccactacttgctggattcccaccgtccagtaggaatggacattcactgggaaaaggtcagcaaactctgctatccgtgtttgatcaactatga

SEQ ID NO: 441590 - DNA, 120 bp, Artificial Sequence
  ENSG00000154080_11 (sequence is synthesized)
ttttgtagggaaatttgagactttggaagaagatgccaattactttttacagatgatcggtgctccaaaggagctgaaatttcccaactttaaggataggcactcttccgatgaaagaac

SEQ ID NO: 441591 - DNA, 120 bp, Artificial Sequence
  ENSG00000154080_12 (sequence is synthesized)
caatgctcaagtcgtgagacagtatttaaaggatctgactagaactgagagacaattaatctatgacttttattacttggactatttaatgtttaattatacaactccatttttgtagtt

SEQ ID NO: 441592 - DNA, 120 bp, Artificial Sequence
  ENSG00000154080_13 (sequence is synthesized)
tgcattcattttctaaaaccctgtatatacttaatgatgataagttcaaatcagctgtaatttttctataattctctgtatgacagaaatttaaccaagtgcagttgtcttgatttaatg

SEQ ID NO: 441593 - DNA, 120 bp, Artificial Sequence
  ENSG00000154080_14 (sequence is synthesized)
tagatttttaccaaatagtatgacaccaattggcacaaagttataggaaaatcacctacaggagatgtaaacaacttgagttgctctaaaatgtttggaaaagagctgcttttgcattat

SEQ ID NO: 441594 - DNA, 120 bp, Artificial Sequence
  ENSG00000154080_15 (sequence is synthesized)
gaattatattgttgaagcaataacctagccagctgttgcattagctaaagcagcctcttgcaatggtaggaaaaaaggatctcaaatagcatgagtgtatgtctatatcctgaaatttat

SEQ ID NO: 441595 - DNA, 120 bp, Artificial Sequence
  ENSG00000154080_16 (sequence is synthesized)
tgtctaaaatgcatgaatatatttttagcagtctgtggcatattaatcaaactgttgaattgttttcttacaccctggaaatctttctatcaactataatgataaatccattttgaagtg

SEQ ID NO: 441596 - DNA, 120 bp, Artificial Sequence
  ENSG00000154080_17 (sequence is synthesized)
agggtgagcgcccgactccgagctgtccccgctcccggcgcggcgctccgctctcagccacctcacggctgccaggagtgcgcgggagtttgccccggagcgcggggaagtttcctccga

SEQ ID NO: 441597 - DNA, 120 bp, Artificial Sequence
  ENSG00000154080_18 (sequence is synthesized)
cagatgaggctgtggctttttatattcaacagccaataaaaaatgcacaacatgctaagatcaaagcaacaaaaccaaccttcttcttccagaaaaacttaagggaattgattctgtttt

SEQ ID NO: 441598 - DNA, 120 bp, Artificial Sequence
  ENSG00000154080_19 (sequence is synthesized)
cttttgagccttccacaaagagacaaaatgaacacaagcactaaaggtctacatttctgaagcaggcagttgagaagcttaagtctcatcagatataaatgtgctcctaattctggttta

SEQ ID NO: 441599 - DNA, 120 bp, Artificial Sequence
  ENSG00000154080_20 (sequence is synthesized)
attgagcaggggggaaattgtttcaggatggaataatcatcaaaaacaaaagttgccattctgaatatggaactcaaacaataacaaagttttataagtatattatttgaatcaaagcat

SEQ ID NO: 441600 - DNA, 120 bp, Artificial Sequence
  ENSG00000154080_21 (sequence is synthesized)
catgtgcatagctttatatgtggaatacaccctaagaatagcttttgttttcagtttaattattcagcttaggaatgactttttaaaaactaatataccacttcaaagataggttatgtt

SEQ ID NO: 441601 - DNA, 120 bp, Artificial Sequence
  ENSG00000154080_22 (sequence is synthesized)
ctagagaataaacataaaaagagcccctagaaatgtgtttaataggcttatgcataagtaaattaaggtattttctttttaagtttaaatattctatactaacaaagtcagataccattg

SEQ ID NO: 441602 - DNA, 120 bp, Artificial Sequence
  ENSG00000154080_23 (sequence is synthesized)
cattcaaatattaaatcaaagtccttagaaaaataggtccatgtgtcacccttatgaatagttgtaatgcattttggaatttttttccaagggatcctaaattagatcccttggggaaaa

SEQ ID NO: 441603 - DNA, 120 bp, Artificial Sequence
  ENSG00000154080_24 (sequence is synthesized)
aaaaagggatcattttggatgggaaacatttggatgggaaacctactttaattggtcgacttttaccccgagttaagaaaatcacaagtctttcaaaccctgcttaaatgcttttcctga

SEQ ID NO: 441604 - DNA, 120 bp, Artificial Sequence
  ENSG00000154080_25 (sequence is synthesized)
acatcttcctcttcctaagctatcatttttttcttatcagtaaatattcagtaatggctttcaaagaacagtaggtattaatagttgaatgttaatagaccaagatagttgcagtcatac

SEQ ID NO: 441605 - DNA, 120 bp, Artificial Sequence
  ENSG00000154080_26 (sequence is synthesized)
ttatttcattttgattttctatttcatggctgagtattcatgaattgcttcgctccttacacacacctgccgtgtcccatctgtgtctcctaaggagtaagtaaactgcaatgggctgag

SEQ ID NO: 441606 - DNA, 120 bp, Artificial Sequence
  ENSG00000154080_27 (sequence is synthesized)
agatcaaaagtattaaaccttctaatccaaccttttactacttttccatgccattaactcttgcctctagaccatacacttaagctgtgctctcagtttttaagacgttttactctggag

SEQ ID NO: 441607 - DNA, 120 bp, Artificial Sequence
  ENSG00000154080_28 (sequence is synthesized)
taatctaaattacataatttaaaattttgctgcaccatgtagagtagattcctagtaatttagggaaattgaaattatctttttatggagagagaaaataaaaaatattccagaagcctg

SEQ ID NO: 441608 - DNA, 120 bp, Artificial Sequence
  ENSG00000154080_29 (sequence is synthesized)
aaattttattcctaagaaacacaaaacttgctttatatgaaatccactataaagaataaaggcaatttcctcaaaagtattcctaaaactatataaggaacagacaaagaactttcaata

SEQ ID NO: 441609 - DNA, 120 bp, Artificial Sequence
  ENSG00000154080_30 (sequence is synthesized)
gctttagaaggaaaaaaatggaaacaacagtcctacctctcttattggcatttgtaatgcattgggcagggtggaatgcatacctatataaatgtttggctttgatggtggagaggaggg

SEQ ID NO: 441610 - DNA, 120 bp, Artificial Sequence
  ENSG00000154080_31 (sequence is synthesized)
atgagtggaagaaaatgatacccagtgttctctacggaaagctgtattgtaccttttgctgtatatgttcctttcctgaccctttccaacgagcccgtgtcaccatgggtcattcttttc

SEQ ID NO: 441611 - DNA, 120 bp, Artificial Sequence
  ENSG00000154080_32 (sequence is synthesized)
ctaaatgggctctatgatgccaagtgacaccctgtgtagttgcaagttccaaaagccatgcatgtctttgccaagtaagaacaaactttttatgtacctgctcttcattttagatggctt

SEQ ID NO: 441612 - DNA, 120 bp, Artificial Sequence
  ENSG00000154080_33 (sequence is synthesized)
attttcatgttaggaccaaagaagccagtcatcatcctggattacttgtgagtttaaagccaaactccatttttctctcctgacttatttggccttgcagaccagctcacattcaccttt

SEQ ID NO: 441613 - DNA, 120 bp, Artificial Sequence
  ENSG00000154080_34 (sequence is synthesized)
gtcatttctgcctgtgcataaatccaggtgggaacaccactgttctttaggaccatcacaatttcatgaatttaattcctaaaggcaagtgaccaaatccagactcatcttccagatgtc

SEQ ID NO: 441614 - DNA, 120 bp, Artificial Sequence
  ENSG00000154080_35 (sequence is synthesized)
caaagttcccattttaacattaggtgcaattataagtcctccaattaaaccctaaggatcctatttgtttttataggcagcagtaacacaatgggcagaccccttcgctctgttattccc

SEQ ID NO: 441615 - DNA, 120 bp, Artificial Sequence
  ENSG00000154080_36 (sequence is synthesized)
ctgtctggaattactatcagggtaacaagttggcaattaaatccaaaaccacagttatgtaacctgtaaactatctatagatgtgcaatattgatgtgattgtgcccagaaactgccata

SEQ ID NO: 441616 - DNA, 120 bp, Artificial Sequence
  ENSG00000154080_37 (sequence is synthesized)
aacttcaatggaaatgtatgtacaggacatccagttttcggattttctcaaacatttggaaatatccattaattcaatggaaatgtgatgccacttgctagatgtctataaaacattctg

SEQ ID NO: 441617 - DNA, 120 bp, Artificial Sequence
  ENSG00000154080_38 (sequence is synthesized)
gctagatgtctataaaacattctgtaacagaaaataataatattattatcattagggaattagtagttctaattcaagaactacttgtatgtcatttttaattagaaagaggaaaaatac

SEQ ID NO: 441618 - DNA, 120 bp, Artificial Sequence
  ENSG00000154080_39 (sequence is synthesized)
tattcttatctcctaaaatgtatagtatttagcagaaggtatatataagaagatgcagagaattttgaatattagagtgccctttgaaaaaatcacttgctgaattaatagaacttggga

SEQ ID NO: 441619 - DNA, 120 bp, Artificial Sequence
  ENSG00000154080_40 (sequence is synthesized)
ttaggctaggactacagtaaacgtctccctcctgtgcattctcatgtggcctctcagggcatcccagcctctaggccttcatggggcgtggtgaagcagatgttttgcccagggctaacc

SEQ ID NO: 441620 - DNA, 120 bp, Artificial Sequence
  ENSG00000154080_41 (sequence is synthesized)
ctcccaagatgctctgatacttgaaaaaggattggccaaaggcgtttaattatagctcaactacctgagaaccttaggccaaggctaattcaatttagtcctacatttaggctcatacct

SEQ ID NO: 441621 - DNA, 120 bp, Artificial Sequence
  ENSG00000154080_42 (sequence is synthesized)
tctcaatctcaatcatgatcattatacagtaatcgtatgcatgatcctagctaacatttattcaatacttactgggtgtcaggcactcttcaagtagtttacatgcattaatttaatctc

SEQ ID NO: 441622 - DNA, 120 bp, Artificial Sequence
  ENSG00000154080_43 (sequence is synthesized)
catagccagtctaacataggtaatattatgtagccctctccctttccatctatcataaaggaaagtaaagcagactatagctgagtaacttgcctaaggagacagagatgataagtaggt

SEQ ID NO: 441623 - DNA, 120 bp, Artificial Sequence
  ENSG00000154080_44 (sequence is synthesized)
cagaagccaggatgaagccaagcagcaaataccactaccaaactctttgcttagaatattacaaaccaatatttacttttgctttccgttacctctattcaggataggtagaggcaaaaa

SEQ ID NO: 441624 - DNA, 79 bp, Artificial Sequence
  ENSG00000154080_45 (sequence is synthesized)
gctttccgttacctctattcaggataggtagaggcaaaaacaatatattggaatcctgaaattttttccatacaaatat

SEQ ID NO: 441625 - DNA, 120 bp, Artificial Sequence
  ENSG00000154080_46 (sequence is synthesized)
tatttctttattcctgctgagttaaactgacaggttcaaagactttggaagaaattaggtttcctccccacaacttttttgtaatccttagttaatcatggaaacaatgtttttaagaag

SEQ ID NO: 441626 - DNA, 120 bp, Artificial Sequence
  ENSG00000154080_47 (sequence is synthesized)
gaatctaagaggaagaaagttcaggcgaactttccacacataggcccctgacagccactgcagatggtcacggttcagcaagctagtcacacacagtgagaaccactcctgctagaaaca

SEQ ID NO: 441627 - DNA, 120 bp, Artificial Sequence
  ENSG00000154080_48 (sequence is synthesized)
gagcaactgtgcattatccccttcttcctgagtctccttccctagtactagtttgtagtcagattaccctgagcctacacgggaagactgcagaaaagaatagaggagcaagctgactta

SEQ ID NO: 441628 - DNA, 120 bp, Artificial Sequence
  ENSG00000154080_49 (sequence is synthesized)
aaccgactgaaaaaacaccatgaaaccaggtgaaaataaataagctcttgctagaagatggcagacatttcccaggcctgtgatcattacctgaggaaggccaggtctggggagttcaac

SEQ ID NO: 441629 - DNA, 120 bp, Artificial Sequence
  ENSG00000154080_50 (sequence is synthesized)
agaacattgcctcatatcatttcattctcagaatttcctagtcagtcacatcttagtttttcaccaggatcatatgcttccaggcaaaagtatttaaatccatttaagcagtcatctttt

SEQ ID NO: 441630 - DNA, 120 bp, Artificial Sequence
  ENSG00000154080_51 (sequence is synthesized)
tccatccctaaacctctcctcaagtctcacactatatttggaatgctcccctctctatatatctggacattcatttcttgttaactcaccaaggaatctcttgagattattcaatttcaa

SEQ ID NO: 441631 - DNA, 120 bp, Artificial Sequence
  ENSG00000154080_52 (sequence is synthesized)
aatctcatctctttatgagctccctgataggcagaaaaagacagcagagttttcccctggtgtaacatgcatcagattattctcttaccaataaatgcaggcattcctttcctcgatttt

SEQ ID NO: 441632 - DNA, 120 bp, Artificial Sequence
  ENSG00000154080_53 (sequence is synthesized)
ttttgtcagggaggttcgttaatttatttgttcatgtgctatttatctcactttttatgaatataaaatatctgttgttgtcattggaatgtcttaggtcttccaagaggaaaggaactg

SEQ ID NO: 441633 - DNA, 120 bp, Artificial Sequence
  ENSG00000154080_54 (sequence is synthesized)
tgtctgttgaatgcactttgtaccatgtctagcaaggcactcagtggaaagcgttactttaacagatgcttttgatgctgttgtttaaaggttcctgtacaacttcttttagtgtagaat

SEQ ID NO: 441634 - DNA, 120 bp, Artificial Sequence
  ENSG00000154080_55 (sequence is synthesized)
tcgtatatttctgcctgtgaccttcaggcatctataggaccagaggatctgaaaggaaggtgctagagcagggcagctgagggaagggagctgagccacacaccttttctacactaatag

SEQ ID NO: 441635 - DNA, 120 bp, Artificial Sequence
  ENSG00000154080_56 (sequence is synthesized)
tcatcccttgacctgaaggatagttgcagacacagaaatcttttacatttctaagaaatagcagttgcttgattgtttggggaagaaaattttgagaaaaatgcatgattctggtcaaca

SEQ ID NO: 441636 - DNA, 120 bp, Artificial Sequence
  ENSG00000154080_57 (sequence is synthesized)
taagagccatttactgaggatctactcagtagcagacacgggaaaaatactttgcatacattcatttaatgacatgaagagtaagtctaaccgtttccaaaagtagctttcaaaaaaatc

SEQ ID NO: 441637 - DNA, 120 bp, Artificial Sequence
  ENSG00000154080_58 (sequence is synthesized)
aaagtcgagtatttttccacctatcatttcatgaatgagaaaactgagtatcaaagaggtttaataacagtctctctggctccaaagctgagaccatacattggcagcccacggggtaga

SEQ ID NO: 441638 - DNA, 120 bp, Artificial Sequence
  ENSG00000154080_59 (sequence is synthesized)
tctggctacagatatgtttggtttggctgacagtgcattttatttaacatctgaattagctgccaacattgggcctcattaatgacaggggatttgttaccctacattctatatgcccac

SEQ ID NO: 441639 - DNA, 120 bp, Artificial Sequence
  ENSG00000154080_60 (sequence is synthesized)
ctgaaaatagttggacagaggcaaggtcagtccctttagatgaggttggagatctctagttgttcacactcttcactaatccaccatcactcattcaccttacttgcctggcccctaagc

SEQ ID NO: 441640 - DNA, 120 bp, Artificial Sequence
  ENSG00000154080_61 (sequence is synthesized)
atctcacttttcaagtcctgctctgaagagtgtattccttcccccgccaagcttccaaaggaaatcaactcctgaacattatccttgaccctatttgtgttgtgcaggtagtgaggttat

SEQ ID NO: 441641 - DNA, 120 bp, Artificial Sequence
  ENSG00000154080_62 (sequence is synthesized)
cccattccgggtttccatatccttgctcacagtgctgcttgccctttggtcctatatccagtgggatctccaaacagtatttcattgtttggggaagtctcttttgaccaatgacaaaga

SEQ ID NO: 441642 - DNA, 120 bp, Artificial Sequence
  ENSG00000154080_63 (sequence is synthesized)
tgttgggagaaatccagtacctttttttggcatctttctgtcgtagccactgggtcccctggcaacgacattccttcccacctctttctgcagagatgagtcattctcccaggctcttgg

SEQ ID NO: 441643 - DNA, 120 bp, Artificial Sequence
  ENSG00000154080_64 (sequence is synthesized)
agctctagtatctagggacagaaactggctcccactgctgcctctagactgctgttctataaccttcatccaaaaatctcttctgttttgcaggtgtgcccgcttcctcaactctaaaaa

SEQ ID NO: 441644 - DNA, 120 bp, Artificial Sequence
  ENSG00000154080_65 (sequence is synthesized)
tcacctgcttcccagccttctccgaagattcttctttctgatttataacatgcctctccaccctacttcctgctattatctgggtgattgtagcaccccctgtaacattctactctcttg

SEQ ID NO: 441645 - DNA, 120 bp, Artificial Sequence
  ENSG00000154080_66 (sequence is synthesized)
cttcttaatgctctgacaacctcctcctcctcctcttccctcctcttcctcctcctcctcctactcctcctactcctccccccacttctatacttagagaggtggagaaaacaggagaag

SEQ ID NO: 441646 - DNA, 120 bp, Artificial Sequence
  ENSG00000154080_67 (sequence is synthesized)
ggataactacgacttttgtcctcaaataccaggaaaactagtaaaacacacagtatctcattttatgcattcatttgctgaaaatatttccaaagtttagaaaaatgatttttggatgta

SEQ ID NO: 441647 - DNA, 120 bp, Artificial Sequence
  ENSG00000154080_68 (sequence is synthesized)
ctatataataaataaaaatgcactcagaatgctagagtgtctaccaacttaaaagaacaatattatttgtttgactgtgattatccttaggaaaaaataagccctgatttaacttatcaa

SEQ ID NO: 441648 - DNA, 120 bp, Artificial Sequence
  ENSG00000154080_69 (sequence is synthesized)
tttctgaaaaaaatagtgtatggacgacctgtatcagaattaacctaatttttgttaaaaacatattcccagaccccatccaagatacacagaattggaatctctatgaaaaccacctga

SEQ ID NO: 441649 - DNA, 120 bp, Artificial Sequence
  ENSG00000154080_70 (sequence is synthesized)
aaatttcctttttaataatctcttggggtacttctcgtgtgtgtgtgaattttttaagtcctggttgattataaatgataatacaacctgctcttttcattctgtcactgtgttgaaaag

SEQ ID NO: 441650 - DNA, 120 bp, Artificial Sequence
  ENSG00000154080_71 (sequence is synthesized)
ttaacaactctcagctcagagaattgtcagtgggtattggtaccaaagtcctctgtgggattttgaccagcactgaagcagaaacttggcgtccgaagtctgccaagtgcaagaactaga

SEQ ID NO: 441651 - DNA, 120 bp, Artificial Sequence
  ENSG00000154080_72 (sequence is synthesized)
gctgaaatgatgaagtgagggacggggacagcactgggcactgcccaaactttttgaaagctttcagaatgaaatggggaaatggaaactttcctctgtttgaaatataaaagacaaatg

SEQ ID NO: 441652 - DNA, 120 bp, Artificial Sequence
  ENSG00000154080_73 (sequence is synthesized)
tgtactgaaggcaattttggcaactcaacttcacattgaacaagtgaagacaatatgagtttctccaataaaaactaaaaagctgttttcaaattgacctaagatgattgaaaatggaaa

SEQ ID NO: 441653 - DNA, 120 bp, Artificial Sequence
  ENSG00000154080_74 (sequence is synthesized)
atatttgctatttggttattagtttgagagcaagtgccccaggaaatattttgcaatttaacttaaatggttataatgtatattttcttgaacttcattaaaggatttgtctctttttgc

SEQ ID NO: 441654 - DNA, 120 bp, Artificial Sequence
  ENSG00000154080_75 (sequence is synthesized)
ctttctattaggttgaaccatatgacattgccaacatttgactgactctgacatataaacacagccctttcatgtgggtccactaacagttctgctgctacctacccaattctaaccaca

SEQ ID NO: 441655 - DNA, 120 bp, Artificial Sequence
  ENSG00000154080_76 (sequence is synthesized)
ttggctctcctcagaactattggaaatagcctctgaatagaagtcctgccttttttatttatttatttaaaaattacttcttttctctttgcatttttcttcttttgatattttcaattg

SEQ ID NO: 441656 - DNA, 120 bp, Artificial Sequence
  ENSG00000154080_77 (sequence is synthesized)
tggcaaaatccacataacataaaattttatcaccttatcattttttggtatccttttaatgaatattttcctatccctccccatcttacctatttttttttttgagacagagtttcactc

SEQ ID NO: 441657 - DNA, 120 bp, Artificial Sequence
  ENSG00000154080_78 (sequence is synthesized)
aggcatgagccaccatgccttgccaccattttttaagtgtacagttcagcagcatttagtgtagttgtgcaagcatcaccactatcccatcacataccttccttccttgtgaaaaatgga

SEQ ID NO: 441658 - DNA, 120 bp, Artificial Sequence
  ENSG00000154080_79 (sequence is synthesized)
tactctgcacctattaaacaacttcactttttgccctcccccagttctggcaaccatcattctaccttttgtctctatgaatttgataacttaaaatacctcatataaatggaatcatac

SEQ ID NO: 441659 - DNA, 120 bp, Artificial Sequence
  ENSG00000154080_80 (sequence is synthesized)
gcataatgtcctcaaggttcatccatattgaaggacgtaccagaatttttttcttttcaaggctgaattgtattccattctcattgcctggcctcaatctctcaagactataacccattc

SEQ ID NO: 441660 - DNA, 120 bp, Artificial Sequence
  ENSG00000154080_81 (sequence is synthesized)
tgcctggcctcaatctctcaagactataacccattcccagcttaatcacctgatagctgcatcaaacccactattatccagccacatggaaccattacattctctgaaaacacctcttgc

SEQ ID NO: 441661 - DNA, 120 bp, Artificial Sequence
  ENSG00000154080_82 (sequence is synthesized)
tttttcccctattttgctcacactattacacgacctgaagtgtcctttattcctctttaaggacctccacatgggtgccccctccaagagttgcctgccccgcatgaccatcccacattc

SEQ ID NO: 441662 - DNA, 120 bp, Artificial Sequence
  ENSG00000154080_83 (sequence is synthesized)
agctcgctctaccctctctgcttggggactctcttccactctccttgctttagctccaccattaggctgatggttccgaaatctttttctaggctatgtttctatcacgaactttgattc

SEQ ID NO: 441663 - DNA, 120 bp, Artificial Sequence
  ENSG00000154080_84 (sequence is synthesized)
agattcccagtttcttgtgggactgcttcatctagatgtctcactggagcttccaactcaacatgaccaaagctgaactcatcacctaacccccaaacctgctttctccttatttggtgg

SEQ ID NO: 441664 - DNA, 120 bp, Artificial Sequence
  ENSG00000154080_85 (sequence is synthesized)
caacaccatccatctactccatcttctgagttaggaacctagaagtcaaccccgatttctccctaagctgactcctcacagccacagaattcagaaagcccattaacttcactgcctgac

SEQ ID NO: 441665 - DNA, 120 bp, Artificial Sequence
  ENSG00000154080_86 (sequence is synthesized)
tttttctcaagcttctcctctcctcccatccattctgctaatatctaagttcagactctcaccttctcctgtctacaactctacgataatcttgaacttctctcccactctcatttccct

SEQ ID NO: 441666 - DNA, 120 bp, Artificial Sequence
  ENSG00000154080_87 (sequence is synthesized)
caatgccatcctccatacagctgcccttgtaatcactttaaaatgcaaatccaattccagttctgtttcccactatacattctatatcctgcatgatcccaattcttctccaggcatatt

SEQ ID NO: 441667 - DNA, 120 bp, Artificial Sequence
  ENSG00000154080_88 (sequence is synthesized)
tctggccattttctgcctcctggcttaatctccaacagcctagaatggacataataccctaacattggatagttttcttcctcctgggtctactcagcttgtccctctattagggcaccc

SEQ ID NO: 441668 - DNA, 120 bp, Artificial Sequence
  ENSG00000154080_89 (sequence is synthesized)
acctaccccccttcacctccccaacacttcctaatccctaaactaagctcagggaggcatttgtcatctctgcctggctcagatgagatgctctgccctgagtactatgagagattggga

SEQ ID NO: 441669 - DNA, 120 bp, Artificial Sequence
  ENSG00000154080_90 (sequence is synthesized)
agcaggattctatgtaggatggttaggagcctggggcttgtcatgagtaagaactgggtttgaattccgtatcctcaactttcaaatgttgggacctctgaaattgctttaacttctctc

SEQ ID NO: 441670 - DNA, 120 bp, Artificial Sequence
  ENSG00000154080_91 (sequence is synthesized)
agtgccagttttctcatctgaaaactgaggatagaatacctacctagtaaggggggtatgggaaatgcatgtaaagtatttaataagtgctcaataaaataaaaccattgatttatctca

SEQ ID NO: 441671 - DNA, 120 bp, Artificial Sequence
  ENSG00000154096_0 (sequence is synthesized)
actaggcagggatgagcaagaggaatggctcacccttgagagctggggtccatagcccaggtcagttctccagctctcccacttaccagccaagacaggaggtgaggattgagatgggat

SEQ ID NO: 441672 - DNA, 120 bp, Artificial Sequence
  ENSG00000154096_1 (sequence is synthesized)
gaacccagcaggcggccatgggttaaaggtcgccatgaatgtaatgtgcccagcacagtgcctgctaaaaggcaacactcccttcctggtctgaagaccaaacaagcagactgtactcag

SEQ ID NO: 441673 - DNA, 120 bp, Artificial Sequence
  ENSG00000154096_2 (sequence is synthesized)
gaaagccagaagaaccttccagctgtctggaccagaaggtgccagcccaggggctgaagaagacgtaatgcccagagcaaaaagcgcctgcagccccctgaagggctgggtgctctggaa

SEQ ID NO: 441674 - DNA, 120 bp, Artificial Sequence
  ENSG00000154096_3 (sequence is synthesized)
tagatgagggggcgaaatggggctggggaccagggacggacagggtgggtccagcacctgcctcgcttccgaagggctgctccaacactgaaaaacacccaaccagcttcctttcagaaa

SEQ ID NO: 441675 - DNA, 120 bp, Artificial Sequence
  ENSG00000154096_4 (sequence is synthesized)
gactggaatattccaaaacttctcactggaggctccggaggaggtgggctccagctgaaaaggaaatgtggaggcgtgggcgctcccggcctgcatcctgcacctcttacactttggttt

SEQ ID NO: 441676 - DNA, 120 bp, Artificial Sequence
  ENSG00000154096_5 (sequence is synthesized)
tcccacagactcctgaagaataggtcagaagaaagggttaaagccttaaaaggggaacaaccattgcggggctcagggaggaggataatgttctttgggctgccgcaccctgatccccgg

SEQ ID NO: 441677 - DNA, 120 bp, Artificial Sequence
  ENSG00000154096_6 (sequence is synthesized)
ggtcccgaaccctcccgtccctggccaggcctgccagccacagggtgagggcccccttccgccgcaacctgccactctcacaccaatgcgggaccgccttctcttccttccccacccccc

SEQ ID NO: 441678 - DNA, 120 bp, Artificial Sequence
  ENSG00000154096_7 (sequence is synthesized)
accccaccctgccgtcctttctcccccaatctccgcctctgattggctgagcccccggctccccgctccccctctcctccatccccggtgaaaactgcgggctccgagctgggtgcagca

SEQ ID NO: 441679 - DNA, 120 bp, Artificial Sequence
  ENSG00000154096_8 (sequence is synthesized)
accggaggcggcggcgcgtctggaggaggctgcagcagcggaagaccccagtccagatccaggactgagatcccagaaccatgaacctggccatcagcatcgctctcctgctaacagtct

SEQ ID NO: 441680 - DNA, 120 bp, Artificial Sequence
  ENSG00000154096_9 (sequence is synthesized)
tgcaggtctcccgagggcagaaggtgaccagcctaacggcctgcctagtggaccagagccttcgtctggactgccgccatgagaataccagcagttcacccatccagtacgagttcagcc

SEQ ID NO: 441681 - DNA, 120 bp, Artificial Sequence
  ENSG00000154096_10 (sequence is synthesized)
tgacccgtgagacaaagaagcacgtgctctttggcactgtgggggtgcctgagcacacataccgctcccgaaccaacttcaccagcaaatacaacatgaaggtcctctacttatccgcct

SEQ ID NO: 441682 - DNA, 120 bp, Artificial Sequence
  ENSG00000154096_11 (sequence is synthesized)
tcactagcaaggacgagggcacctacacgtgtgcactccaccactctggccattccccacccatctcctcccagaacgtcacagtgctcagagacaaactggtcaagtgtgagggcatca

SEQ ID NO: 441683 - DNA, 120 bp, Artificial Sequence
  ENSG00000154096_12 (sequence is synthesized)
gcctgctggctcagaacacctcgtggctgctgctgctcctgctctccctctccctcctccaggccacggatttcatgtccctgtgactggtggggcccatggaggagacaggaagcctca

SEQ ID NO: 441684 - DNA, 120 bp, Artificial Sequence
  ENSG00000154096_13 (sequence is synthesized)
agttccagtgcagagatcctacttctctgagtcagctgaccccctccccccaatccctcaaaccttgaggagaagtggggaccccacccctcatcaggagttccagtgctgcatgcgatt

SEQ ID NO: 441685 - DNA, 120 bp, Artificial Sequence
  ENSG00000154096_14 (sequence is synthesized)
ctgcttctgtctggtttatttaggttttatccttccttttctttgagagttcgtgaagagggaagccaggattggggacctgatggagagtgagagcatgtgaggggtagtgggatggtg

SEQ ID NO: 441686 - DNA, 120 bp, Artificial Sequence
  ENSG00000154096_15 (sequence is synthesized)
gggtaccagccactggaggggtcatccttgcccatcgggaccagaaacctgggagagacttggatgaggagtggttgggctgtgcctgggcctagcacggacatggtctgtcctgacagc

SEQ ID NO: 441687 - DNA, 120 bp, Artificial Sequence
  ENSG00000154096_16 (sequence is synthesized)
actcctcggcaggcatggctggtgcctgaagaccccagatgtgagggcaccaccaagaatttgtggcctaccttgtgagggagagaactgagcatctccagcattctcagccacaaccaa

SEQ ID NO: 441688 - DNA, 120 bp, Artificial Sequence
  ENSG00000154096_17 (sequence is synthesized)
aaaaaaataaaaagggcagccctccttaccactgtggaagtccctcagaggccttggggcatgacccagtgaagatgcaggtttgaccaggaaagcagcgctagtggagggttggagaag

SEQ ID NO: 441689 - DNA, 120 bp, Artificial Sequence
  ENSG00000154096_18 (sequence is synthesized)
gaggtaaaggatgagggttcatcatccctccctgcctaaggaagctaaaagcatggccctgctgcccctccctgcctccacccacagtggagagggctacaaaggaggacaagaccctct

SEQ ID NO: 441690 - DNA, 120 bp, Artificial Sequence
  ENSG00000154096_19 (sequence is synthesized)
caggctgtcccaagctcccaagagcttccagagctctgacccacagcctccaagtcaggtggggtggagtcccagagctgcacagggtttggcccaagtttctaagggaggcacttcctc

SEQ ID NO: 441691 - DNA, 120 bp, Artificial Sequence
  ENSG00000154096_20 (sequence is synthesized)
ccctcgcccatcagtgccagcccctgctggctggtgcctgagcccctcagacagccccctgccccgcaggcctgccttctcagggacttctgcggggcctgaggcaagccatggagtgag

SEQ ID NO: 441692 - DNA, 120 bp, Artificial Sequence
  ENSG00000154096_21 (sequence is synthesized)
acccaggagccggacacttctcaggaaatggcttttcccaacccccagcccccacccggtggttcttcctgttctgtgactgtgtatagtgccaccacagcttatggcatctcattgagg

SEQ ID NO: 441693 - DNA, 120 bp, Artificial Sequence
  ENSG00000154096_22 (sequence is synthesized)
acaaagaaaactgcacaataaaaccaagcctctggaatctgtcctcgtgtccacctggccttcgctcctccagcagtgcctgcctgcccccgcttcgctggggtctccacgggtgaggct

SEQ ID NO: 441694 - DNA, 120 bp, Artificial Sequence
  ENSG00000154096_23 (sequence is synthesized)
ggggaacgccacctcttcctcttccctgacttctccccaaccacttagtagcaacgctaccccaggggctaatgactgcacactgggcttcttttcagaatgaccctaacgagacacatt

SEQ ID NO: 441695 - DNA, 120 bp, Artificial Sequence
  ENSG00000154096_24 (sequence is synthesized)
tgcccaaataaacgaacatcccatgtctgctgactcacctggctggaacaacatgcttactgccaacatgtgggccgaaccacatggccctggctctggaatgcacaagtggctttgcgt

SEQ ID NO: 441696 - DNA, 120 bp, Artificial Sequence
  ENSG00000154096_25 (sequence is synthesized)
gaatctgcgctaagctatgcagtctgctttttcttctcagctctggtagttcttcagaaatgtaccctccaggcacatccactattgcgagggtgagcacgaagggtgggagatgcccat

SEQ ID NO: 441697 - DNA, 120 bp, Artificial Sequence
  ENSG00000154096_26 (sequence is synthesized)
gtcctcaaggcatcacttcctaaatccaaaagcatcggcaggagaaaggactggggacaaatactgtcccttcgggagtagggagggaacactgaggcccatccctggctccttccctaa

SEQ ID NO: 441698 - DNA, 120 bp, Artificial Sequence
  ENSG00000154096_27 (sequence is synthesized)
aagtagagtaaaatggaagcgagcatcctgggattgggggcaagagggggaccgcagggtagctgtgggttccaactgctgtcagagtcagagaggcagccccaagccagcctccctgct

SEQ ID NO: 441699 - DNA, 120 bp, Artificial Sequence
  ENSG00000154096_28 (sequence is synthesized)
ttgccagggaatttgggggaggaaggtgacagctgcccagaggctgactcatctgatatttagcactgggtaggatgattgtttctgagcatttttcttaaaggcctcagatctaaatta

SEQ ID NO: 441700 - DNA, 120 bp, Artificial Sequence
  ENSG00000154096_29 (sequence is synthesized)
tttgggaaaggagaggattggaatacggaaatggattaaggatgaggcccgccgggggcttgagagggaggaagagcagaccttctctgggtctggagccgcctgaggacacagaccaga

SEQ ID NO: 441701 - DNA, 120 bp, Artificial Sequence
  ENSG00000154096_30 (sequence is synthesized)
ggaaatgaatacagactgcacctccccagccgctctccacccctcccctggctcttctaccctctccagccccagacccatttcttccctttcttgctctggccattgctcccccttccc

SEQ ID NO: 441702 - DNA, 120 bp, Artificial Sequence
  ENSG00000154096_31 (sequence is synthesized)
ctcctagatcccaagcccgcacaacatctcaaacaagagtcctcgattcaaaagccagatgccgaccccccttcctcctggatctggctcagggcagcagctccaccccgggacagagag

SEQ ID NO: 441703 - DNA, 120 bp, Artificial Sequence
  ENSG00000154096_32 (sequence is synthesized)
agcattgattgtagctgcagccgccgcgggatcctagcctcacccgtcaaggggctgagcgccagggaccctgaactcgtctagtggtgcgccctgcgcacccgggcgcactcaaccgag

SEQ ID NO: 441704 - DNA, 120 bp, Artificial Sequence
  ENSG00000154096_33 (sequence is synthesized)
gcaatgccctgcgcgctctcgcgggtgcacgccccttctgtggcctctcctgggcgagcactgctctgcagataggctagactaccggctccgcgtcgcctcgccaagggttggttcagc

SEQ ID NO: 441705 - DNA, 120 bp, Artificial Sequence
  ENSG00000154096_34 (sequence is synthesized)
caaggctgcaaaaaacaaaaaaagaccaggcagacagcctatccagggtggctattgaaactgggctggaaaactgcagtcccaggaactccagagagctggacattgggaagcatcctt

SEQ ID NO: 441706 - DNA, 120 bp, Artificial Sequence
  ENSG00000154096_35 (sequence is synthesized)
ggctcacatacaatcggagatcactatgtctttctctcctccaggaacacgattagcttgtgtcctatccagataggaatagatgctccctatctgggagcatccttagctatggtgaat

SEQ ID NO: 441707 - DNA, 120 bp, Artificial Sequence
  ENSG00000154096_36 (sequence is synthesized)
ggtatctagccatccactggggatggcgagtgacttagggatttgtgtctcacgtatatgaagcagtcatcgccagatgttggttgtttttcttaacccccatcataacccgatccagga

SEQ ID NO: 441708 - DNA, 120 bp, Artificial Sequence
  ENSG00000154096_37 (sequence is synthesized)
cagaatcagaaagctgttaagcaggaaggagtgcgctgccatgaagaggcagacagaagccagagccagtgtgtctggaatgcatcagatccaggactgagatcccagaaccatgaacct

SEQ ID NO: 441709 - DNA, 120 bp, Artificial Sequence
  ENSG00000154096_38 (sequence is synthesized)
aagagagggctctttttcatcctgaagtcagccaatccaccgcgctgatattctgacggcctgaggtggtttttgaaaacacagtttgctgagccctccttcacactattgaactagaat

SEQ ID NO: 441710 - DNA, 120 bp, Artificial Sequence
  ENSG00000154096_39 (sequence is synthesized)
ccccaactgagaacccggaaccagcatcaactccctaagatctcctgtccttgaaacacattgataggatccaaggctcaagcagagtggggagggaggctggggtctgcaaaggagaag

SEQ ID NO: 441711 - DNA, 120 bp, Artificial Sequence
  ENSG00000154096_40 (sequence is synthesized)
tgggatccctggggtggggaaaggcactcagagagcagaccccggtcccctccctagccaggcccatctctccacttcaggtgggtgggaggcccctgtgccgcaggcccctccagtttg

SEQ ID NO: 441712 - DNA, 120 bp, Artificial Sequence
  ENSG00000154096_41 (sequence is synthesized)
tattaccatacactatgttaatgtaagaagaggagaaagagtggtaaagttacttaaagtcacccagctagtaagtgctccatggccaagcgcagaaacacaccgtgactgggcttgttc

SEQ ID NO: 441713 - DNA, 120 bp, Artificial Sequence
  ENSG00000154096_42 (sequence is synthesized)
tccctccttccttgctttccctgagcaggaaagagccagtggcagtatcatgttcagtgagatgcagggacgagagggggaatggagagagggacttagatgactgccatagccactatg

SEQ ID NO: 441714 - DNA, 120 bp, Artificial Sequence
  ENSG00000154096_43 (sequence is synthesized)
ccatgttcccagggacccccagccctggtggtaagtgtggcacagcttggctgattcccatcctgttcccaccccagatccaggactgagatcccagaaccatgaacctggccatcagca

SEQ ID NO: 441715 - DNA, 120 bp, Artificial Sequence
  ENSG00000154096_44 (sequence is synthesized)
ctgggagagccaggctcggggacagcaggcagttcccttggctggactagagaggagaatagccccataacgctctcaccctctcccaactgctgcctggtcaactggggaaccattgcc

SEQ ID NO: 441716 - DNA, 120 bp, Artificial Sequence
  ENSG00000154096_45 (sequence is synthesized)
ttcggtgtgaatggggtgaagagctcagggccagacaggcagagcagtgtggttccaccagaactgtgggcaaggcctttggcctccctaatcttccttctcccagcgggaaaacaggga

SEQ ID NO: 441717 - DNA, 120 bp, Artificial Sequence
  ENSG00000154096_46 (sequence is synthesized)
tgacaccacctccctcagccagttttcttgtcatgatgtttagtaaggttttcataagatgatatgtgtgcaagagatcagtaatctgcaaatgggaaagatggctggttctgtgagacc

SEQ ID NO: 441718 - DNA, 120 bp, Artificial Sequence
  ENSG00000154096_47 (sequence is synthesized)
gggctgttcctggtcccagctaagacattgcagtacccacctcccaaagggagtacacccttgctttgggcctgtgcctgcctgagtcctgatccgtcttccttcctaccctgcccccgg

SEQ ID NO: 441719 - DNA, 120 bp, Artificial Sequence
  ENSG00000154099_0 (sequence is synthesized)
gtaaagactagggcgccagcggctggcgaagaaggaaagagggtactctctggctgggctggggccgtagcgacgtccgccgcgaacctgggccccccaaagctgcggggcgttcggtgt

SEQ ID NO: 441720 - DNA, 120 bp, Artificial Sequence
  ENSG00000154099_1 (sequence is synthesized)
cgccgaagtaaacatgcaccctgagccctcggagcctgcgacaggtggtgcagcagagctggattgcgcgcaggagcccggcgtggaggagtctgcgggtgaccacgggagcgcaggccg

SEQ ID NO: 441721 - DNA, 120 bp, Artificial Sequence
  ENSG00000154099_2 (sequence is synthesized)
agggggctgcaaggaagaaattaatgatcctaaggaaatatgtgtgggttcttctgacacatcctaccacagccagcagaaacagagtggtgataatgggtcaggtggtcacttcgcaca

SEQ ID NO: 441722 - DNA, 120 bp, Artificial Sequence
  ENSG00000154099_3 (sequence is synthesized)
cccaagagaagacagggaagatcggggccccagaatgactaaaagttccctgcaaaaactctgcaagcagcacaagctttatattaccccagcattgaatgatacgctgtatttacactt

SEQ ID NO: 441723 - DNA, 120 bp, Artificial Sequence
  ENSG00000154099_4 (sequence is synthesized)
taaaggttttgatcgcattgagaacctggaagagtacacagggctgcgctgtctctggctgcagagcaatggaatacagaaaatcgaaaacctggaggcccaaactgagttgcgttgcct

SEQ ID NO: 441724 - DNA, 120 bp, Artificial Sequence
  ENSG00000154099_5 (sequence is synthesized)
cttcttgcaaatgaacttgctccgtaaaattgagaacctggaacctctgcagaaactggatgctcttaacctcagcaacaattacatcaagaccattgaaaacctctcctgcctcccagt

SEQ ID NO: 441725 - DNA, 120 bp, Artificial Sequence
  ENSG00000154099_6 (sequence is synthesized)
cctgaacacattgcagatggcccacaatcacctggagaccgtggaggacattcagcatctacaagagtgtttgaggctttgtgtccttgacctttcgcacaacaagctgagtgacccgga

SEQ ID NO: 441726 - DNA, 120 bp, Artificial Sequence
  ENSG00000154099_7 (sequence is synthesized)
gatcctgagcattctggaaagcatgcccgatttgcgtgtactgaatttgatgggaaacccggttatcagacagattcctaattacagaaggacagtcactgtacgactaaagcacttaac

SEQ ID NO: 441727 - DNA, 120 bp, Artificial Sequence
  ENSG00000154099_8 (sequence is synthesized)
atacctggatgatagaccagtgtttccaaaggacagagcttgtgcggaggcctgggctaggggagggtacgcagctgaaaaggaggagagacagcagtgggagagcagggagcggaagaa

SEQ ID NO: 441728 - DNA, 120 bp, Artificial Sequence
  ENSG00000154099_9 (sequence is synthesized)
tgagaatgtgcccgccagtgcggaaggcaaggaggagcctcccggggacagagaaacaaggcagaagatggagctatttgttaaggaaagctttgaggccaaggacgagctctgcccgga

SEQ ID NO: 441729 - DNA, 120 bp, Artificial Sequence
  ENSG00000154099_10 (sequence is synthesized)
aaagccaagtggagaggagccgcctgtggaggctaaaagagaggatggaggtccagagccagaggggaccctcccagctgagaccctgctactgtcgtcacctgtggaggttaaaggaga

SEQ ID NO: 441730 - DNA, 120 bp, Artificial Sequence
  ENSG00000154099_11 (sequence is synthesized)
ggacggagatggagagccagaggggaccctcccagctgaggccccaccacccccgccacctgtggaggttaaaggagaggatggagatcaagagccagaggggaccctcccagctgagac

SEQ ID NO: 441731 - DNA, 120 bp, Artificial Sequence
  ENSG00000154099_12 (sequence is synthesized)
cctgctactgtcaccgcctgtgaaggttaaaggagaggatggagatcgagagccagaggggaccctcccagctgaggccccaccaccaccgcccctgggagctgccagggaagaaccgac

SEQ ID NO: 441732 - DNA, 120 bp, Artificial Sequence
  ENSG00000154099_13 (sequence is synthesized)
tccccaggctgtggccactgagggtgtattcgttacagaacttgatggaacgagaacggaagatttagaaaccattagactggagacaaaggagacattctgcattgatgacctacctga

SEQ ID NO: 441733 - DNA, 120 bp, Artificial Sequence
  ENSG00000154099_14 (sequence is synthesized)
cttggaagatgatgatgaaacaggcaaatctctggaagaccagaatatgtgctttccgaagattgaggtcatctcgagcttgagtgatgacagtgaccctgaactggactacacgtcact

SEQ ID NO: 441734 - DNA, 120 bp, Artificial Sequence
  ENSG00000154099_15 (sequence is synthesized)
ccctgtgctggaaaacctccccacagacactctgtcaaatatatttgcagtctctaaagacacctcaaaggcggctcgggtgcccttcacagacatctttaaaaaagaagctaagaggga

SEQ ID NO: 441735 - DNA, 120 bp, Artificial Sequence
  ENSG00000154099_16 (sequence is synthesized)
cttggaaatccgaaaacaagacaccaagtccccaagacccctgatccaggagctcagcgacgaggacccctctggccagctactgatgccccccacctgccaaagagatgctgcaccact

SEQ ID NO: 441736 - DNA, 120 bp, Artificial Sequence
  ENSG00000154099_17 (sequence is synthesized)
cacttccagtggagacagggacagcgacttccttgcagcctcttctccggtgccgactgagagcgccgccacacccccagagacgtgtgtcggagttgcccagcccagccaagctctgcc

SEQ ID NO: 441737 - DNA, 120 bp, Artificial Sequence
  ENSG00000154099_18 (sequence is synthesized)
cacgtgggacctcactgcattcccagcaccgaaagcatcatagttttccccagttatatgtagcataaatggtttaatcataaatgtctcccttaggcatgataaacattttaacaccca

SEQ ID NO: 441738 - DNA, 120 bp, Artificial Sequence
  ENSG00000154099_19 (sequence is synthesized)
acatgaagtatttaatcttggagataagtatcagttttactgttagtaaaataggtaatcagatgcagactttggagaccctcgataccccaagtgtggtccttgggccggcaggcctgg

SEQ ID NO: 441739 - DNA, 120 bp, Artificial Sequence
  ENSG00000154099_20 (sequence is synthesized)
catttctggggcgctggttagaaatgcagactcccaggcctcaccccaggcccactgattagaatccaactttcatgcactgccctaggtgattcgtgcacatgcatgctcaagtttggg

SEQ ID NO: 441740 - DNA, 120 bp, Artificial Sequence
  ENSG00000154099_21 (sequence is synthesized)
gagccctgacccaaatcgctacccttgaaccatgtctaccaaactcttgattcctttttgccaaagaagctatcttgctaagtggttctgactagttgccttatccaaattcgtggtgag

SEQ ID NO: 441741 - DNA, 120 bp, Artificial Sequence
  ENSG00000154099_22 (sequence is synthesized)
agttacattgtatcatcagttacattgtatctttatacattgtatcttttcccccctccgtggacaccgcccagcaggtagcttaggctctcactggccttctggctcatggaggtgtga

SEQ ID NO: 441742 - DNA, 120 bp, Artificial Sequence
  ENSG00000154099_23 (sequence is synthesized)
atgtttgatcgcagccttgcctgtcactcttccctgaagctcttcccattttgttgacagtctcaaatgcttaggcccacaagaatggtaccatgggaattcacacattgtctcacaacc

SEQ ID NO: 441743 - DNA, 120 bp, Artificial Sequence
  ENSG00000154099_24 (sequence is synthesized)
ccccaagaactgtcctttgatggggcacgaataggagaggcatttctgggtacctctgaccttataccttggagaggtggtcccctgcccacttccttgttaaacttcttctaaactggt

SEQ ID NO: 441744 - DNA, 120 bp, Artificial Sequence
  ENSG00000154099_25 (sequence is synthesized)
ctgcccacttccttgttaaacttcttctaaactggtgtttctaatgttcaaacttcagaatttcacatggcccagtaggagttaaagtgatcggccaggcatggtggcttacgcctgtaa

SEQ ID NO: 441745 - DNA, 120 bp, Artificial Sequence
  ENSG00000154099_26 (sequence is synthesized)
aaaagagttaaagtgatcacggtcagaattcacagtgggtttctagttttctggagctatgtaaaaaaaagaaacaaaggccaggtgtggaggcttacacctgtaatcccagcactttgg

SEQ ID NO: 441746 - DNA, 120 bp, Artificial Sequence
  ENSG00000154099_27 (sequence is synthesized)
gactctgtctcaaaaaaaagaaaaagaaagggacataattgggcaatttatctctcacatttgagaactgaccatatagataactacaacactaatagctaatgttaattggtttcttat

SEQ ID NO: 441747 - DNA, 120 bp, Artificial Sequence
  ENSG00000154099_28 (sequence is synthesized)
tatatgggtgacaccattctaagcatgacttgtattgattgatgtaacccttcctacaactctaagcagtacatactattatcatcccaatttcccagatgaggaaaatgagaaacagag

SEQ ID NO: 441748 - DNA, 120 bp, Artificial Sequence
  ENSG00000154099_29 (sequence is synthesized)
aggttaggcaacttgcccaaagccagacagctagaaaatggtggtgggggagtaacaacctaggcaccgtggctccagttcatgcatccaaccacacactatgctgcctccccaaccacg

SEQ ID NO: 441749 - DNA, 120 bp, Artificial Sequence
  ENSG00000154099_30 (sequence is synthesized)
cactggttgttatggacaaagataccgaacaaacacccacaatacaaaacaaaaaagtcctacaagttttggggaggtacaaaatatattacttttataccacatagagttttcggacta

SEQ ID NO: 441750 - DNA, 120 bp, Artificial Sequence
  ENSG00000154099_31 (sequence is synthesized)
gtttgtacagaggtgcatttggtttgggtcccattatttcccccaagatgaactggctgtgtctcttaataaaaaagcagaaaaaagatgtggaaattctttaaacacgtcacaccttgc

SEQ ID NO: 441751 - DNA, 120 bp, Artificial Sequence
  ENSG00000154099_32 (sequence is synthesized)
aagttccctttcatttattagatccagacacctgaggtggcaacgcttgctttgtgtgtatctagagttccttttggtggggaacaggcaggcgagtcacctgagtgatttgagtaactg

SEQ ID NO: 441752 - DNA, 120 bp, Artificial Sequence
  ENSG00000154099_33 (sequence is synthesized)
taactaaggctgggttgactgcgtgtttgcctttatcgtgcctatcagaacgttgacagtgcgtgtacctccctggtgatgtgcggctcacttgctctttcaggacctacctgacttgga

SEQ ID NO: 441753 - DNA, 120 bp, Artificial Sequence
  ENSG00000154099_34 (sequence is synthesized)
atgaaccacttgaaaatctattgctggtttgtaacagctgagtacagtgcatagttagctgaaagtactttctgtcattaagatgtatttctatgtccatcctatgaatgtctgtctgaa

SEQ ID NO: 441754 - DNA, 120 bp, Artificial Sequence
  ENSG00000154099_35 (sequence is synthesized)
tataggggaaggaaatgaaaacaggagaggggaaagaaaggggtgagtctgtgaggcacaatggggaattctctcagagtgacgtgaccctactccacccagaggccattactggcatta

SEQ ID NO: 441755 - DNA, 120 bp, Artificial Sequence
  ENSG00000154099_36 (sequence is synthesized)
ccaggagcccacacgtgccagacccgtaccctgagggagaaggaggcatcagccatcatctctgagcacgagctcagcagcaaagaaaacagacacagttactgtggggggcctgctgtc

SEQ ID NO: 441756 - DNA, 120 bp, Artificial Sequence
  ENSG00000154099_37 (sequence is synthesized)
caaggagctaagtcccagagagtctgtgaaggaaacggggttcaggggcatgccaagcagagcccagggctcaggggtgcgccctctcaggtaccaggagggtgaggaatagccagtggc

SEQ ID NO: 441757 - DNA, 120 bp, Artificial Sequence
  ENSG00000154099_38 (sequence is synthesized)
tgggggagcagagggcagagagaagggcatagacatgagctgtgcccagggagtggccacccccaggcctaactttcagagtcctgtgttcccttgggcctttcttggatgtggcaacag

SEQ ID NO: 441758 - DNA, 120 bp, Artificial Sequence
  ENSG00000154099_39 (sequence is synthesized)
aatactttgtgacattgggtgaaaaagcagaactggcatggtgcattgtagagcgattctgttgtgaaaacagaaactttcagacaccttttcttctgtaaatagaatatgtgctttccg

SEQ ID NO: 441759 - DNA, 120 bp, Artificial Sequence
  ENSG00000154099_40 (sequence is synthesized)
gtggggccgagagcacagtggagacaatgttggctccccggcctgggatgggtggggcagggcagtcactcagccttaccctgagctttcatgttgctggaggggtcacccaggacagac

SEQ ID NO: 441760 - DNA, 120 bp, Artificial Sequence
  ENSG00000154099_41 (sequence is synthesized)
cacacagatcctctgaaggtcccattcctgagttcacgggtctgaagctgccacttgctggtagccagcctgggccaggaagccaccgagccagcctcctcttgggcagccgagtctgac

SEQ ID NO: 441761 - DNA, 120 bp, Artificial Sequence
  ENSG00000154099_42 (sequence is synthesized)
gggggcctaatgaccgtgcatttccaccccctcctcaccatccctggcctcagcctttctagaccagggcttttggaggggaccaccaacaccactgctggggagtgtggggcaagcgag

SEQ ID NO: 441762 - DNA, 120 bp, Artificial Sequence
  ENSG00000154099_43 (sequence is synthesized)
gtgacagccacacaagggcgtggctgcttcacagtgacccaggcccgggtgaatcacaggccagtcctagtggccttcaaggcagggaaggcaaaggggcaaaggggcaccaggcaggga

SEQ ID NO: 441763 - DNA, 120 bp, Artificial Sequence
  ENSG00000154099_44 (sequence is synthesized)
cggcagccagaggcctggctgcagaagacccagaaaaacatgctgaatgtaccggggcctcccctcatactgcaggctggtacatgtgcctggcagatgcggttttggggagcagccggt

SEQ ID NO: 441764 - DNA, 120 bp, Artificial Sequence
  ENSG00000154099_45 (sequence is synthesized)
tagtgctgagaacaagcaagctgggactgttttttcattcagcatctgccttcaggtgcactcccaaattgggggctgtgtggagcccagaccgtgctactctcatccagcacgcatcgg

SEQ ID NO: 441765 - DNA, 120 bp, Artificial Sequence
  ENSG00000154099_46 (sequence is synthesized)
tggccaggctttttcctgaagacagctgcctggctgactccagacttgcaggcaggaagcagggagtggcctgagtgcatttcccgggaacactgagtggccttctcttccactctagga

SEQ ID NO: 441766 - DNA, 120 bp, Artificial Sequence
  ENSG00000154099_47 (sequence is synthesized)
accagcacagaaaagtgcagtctgagctggagcccgtgcagcctcgggcgggggcaggcctggaggacgttgaataatttgtttttgtttgttttgtttgagacagtctcgcactgtggc

SEQ ID NO: 441767 - DNA, 62 bp, Artificial Sequence
  ENSG00000154099_48 (sequence is synthesized)
gtttttgtttgttttgtttgagacagtctcgcactgtggcctaggctggaatgcagtccgcc

SEQ ID NO: 441768 - DNA, 90 bp, Artificial Sequence
  ENSG00000154099_49 (sequence is synthesized)
ttgaggacactgaatttggcctggactgaaccccaaggctgcccccctgtccttgcagtcacagtgacagggagaaagcacaggtcaccc

SEQ ID NO: 441769 - DNA, 120 bp, Artificial Sequence
  ENSG00000154099_50 (sequence is synthesized)
agtatttaaagatgggggaggatggcaggtcggattgccgagccccttcctcctccctggtcctaagtgacagcggggagagctgtaagccgaggaagaagggccgtccatcctgcggca

SEQ ID NO: 441770 - DNA, 120 bp, Artificial Sequence
  ENSG00000154099_51 (sequence is synthesized)
ggtcattagaaaccattttcccacaggcagcttaattccaccttcgttcttgtcgtttaccgtttctctcctaaacttgaaagtaaaatgttccctgtgcataaagcattgaattccccc

SEQ ID NO: 441771 - DNA, 120 bp, Artificial Sequence
  ENSG00000154099_52 (sequence is synthesized)
tgagattacaggagtgagccaccatgcccagccccactaagcattaaacttctttgagtttcttaaggcagtagaggaagagacagtatttaaagatgggggaggatggcaggtcggatt

SEQ ID NO: 441772 - DNA, 120 bp, Artificial Sequence
  ENSG00000154099_53 (sequence is synthesized)
ggccatgatcaagcagcgggcagaggagaggaaaagacagagagagagtcaagagagaggtatgcgctcggccgaagacaacagccccagagttcctttgagattaggggagatgacatc

SEQ ID NO: 441773 - DNA, 120 bp, Artificial Sequence
  ENSG00000154099_54 (sequence is synthesized)
gagacagggacagcgacttccttgcagcctcttctccggctgccaagtgtatttagtccctgaacctggatccaaggcatctccctgtaggaaacatcagaccggggcagagattgacaa

SEQ ID NO: 441774 - DNA, 120 bp, Artificial Sequence
  ENSG00000154099_55 (sequence is synthesized)
caggggcctcactccaccctcaccaaacacgaggagccagcactcctggcccccattccactggacaggaaggcgtgagaactgagggacctgcctgaggcccccacagctgaggcgcag

SEQ ID NO: 441775 - DNA, 120 bp, Artificial Sequence
  ENSG00000154099_56 (sequence is synthesized)
cggagccctgcctcccagcacagactaaaatcccagcaacacaggcccaccggcacctccagcctgccttgcgggatgatcttcaggcgaatatacaaaatacaaaagaaactactactg

SEQ ID NO: 441776 - DNA, 80 bp, Artificial Sequence
  ENSG00000154102_0 (sequence is synthesized)
cgctgctctgtcttgcaggctcgtcgccgcggccccccgagcccgaccgccgccgccaccaccaccagcgcccgggcggg

SEQ ID NO: 441777 - DNA, 120 bp, Artificial Sequence
  ENSG00000154102_1 (sequence is synthesized)
cctcgcgcgcctcgggcgcggctccgcagtgagcccaccaagaaggaagcggcctgcagaggtgccgacatggggcttaagatgtcctgcctgaaaggctttcaaatgtgtgtcagcagc

SEQ ID NO: 441778 - DNA, 120 bp, Artificial Sequence
  ENSG00000154102_2 (sequence is synthesized)
agcagcagcagccacgacgaggcccccgtcctgaacgacaagcacctggacgtgcccgacatcatcatcacgccccccacccccacgggcatgatgctgccgagggacttggggagcaca

SEQ ID NO: 441779 - DNA, 120 bp, Artificial Sequence
  ENSG00000154102_3 (sequence is synthesized)
gggtttggctggctggctcctgctccagcggcccggcttcaggtgtccgggggcgtggctgcctggagcaggtgtgctgaataccctggatgggaactgagcgaacccgggcctccgctc

SEQ ID NO: 441780 - DNA, 120 bp, Artificial Sequence
  ENSG00000154102_4 (sequence is synthesized)
agagagacgtggcaggaccagcgaggaatccagcctgtccacttccagaacagtgtttcccaggccccgctgagtggaccggacctctgacacctccaggttcttgctgactccggcctg

SEQ ID NO: 441781 - DNA, 120 bp, Artificial Sequence
  ENSG00000154102_5 (sequence is synthesized)
gtgaaagggagcgccatggtcctggctgttggggtcccagggagaggctctcttctggacaaacacaccctcccagcccccagggctgtgcaaacacatgcccctgccataagcaccaac

SEQ ID NO: 441782 - DNA, 120 bp, Artificial Sequence
  ENSG00000154102_6 (sequence is synthesized)
aagaacttcttgcaggtggagtggctgttttttataagttgttttacagatacggaaacagtccaaaatgggatttataatttcttttttgcattataaataaagatcctctgtaacaaa

SEQ ID NO: 441783 - DNA, 120 bp, Artificial Sequence
  ENSG00000154102_7 (sequence is synthesized)
ccgccgccgccaccaccaccagcgcccgggcgggcctcgcgcgcctcgggcgcggctccgcagtgagcccaccaagaaggaagcggctggacaaatcaggacgcaaaccctcgtcagctt

SEQ ID NO: 441784 - DNA, 120 bp, Artificial Sequence
  ENSG00000154102_8 (sequence is synthesized)
tggaacacaaatatttgccagtgaagaaaacattccctcatcagtcaaaacccggacagtctggcacacacgtctgcagctgcctgagggagcttctactgtgggaggggccagatggcc

SEQ ID NO: 441785 - DNA, 120 bp, Artificial Sequence
  ENSG00000154102_9 (sequence is synthesized)
cacagctccccctcctccctgaacactgcaggctccttctcttcctacttcattttgaagataaagagacaggggttcagagttgtcacttgcccttggtcacatagcatccagagtgac

SEQ ID NO: 441786 - DNA, 67 bp, Artificial Sequence
  ENSG00000154102_10 (sequence is synthesized)
agcatatctgtcttttctcttttgtttttatttttttttaatagagatggggtcttggcatgttgcc

SEQ ID NO: 441787 - DNA, 120 bp, Artificial Sequence
  ENSG00000154102_11 (sequence is synthesized)
tcttcacacatgaaagtaactcagcgaaaactccagatctgtaaataacaacttctaaggcagatacacaacagacacagctttgtgagcaggcctgtgagctttacggctttttttcac

SEQ ID NO: 441788 - DNA, 120 bp, Artificial Sequence
  ENSG00000154102_12 (sequence is synthesized)
cttcccagtgaccctctatggggcttcagggaggttggagaggagagcatccggttagctggggcgggggcagggggtgctttctgctggaattccaaaccctggaatcctcatgtctcc

SEQ ID NO: 441789 - DNA, 120 bp, Artificial Sequence
  ENSG00000154102_13 (sequence is synthesized)
gcagccagatctgctgggacacctttcccaaggaagagcccgttgcactgggctttgaaggataagcaggagcttgttactcaggcagaggaagaaagagcatcccaggcggggggagca

SEQ ID NO: 441790 - DNA, 120 bp, Artificial Sequence
  ENSG00000154102_14 (sequence is synthesized)
gcatatgcaaaggcacgaaggggccccaggagcctagggagtctggggaagtgtgagcactttggagagtggaggctggagcgctgtggagagtgggggctggtggccgggaatgaggct

SEQ ID NO: 441791 - DNA, 120 bp, Artificial Sequence
  ENSG00000154102_15 (sequence is synthesized)
gcagctggctgggccacatggtaaaggctgacaactggacccagaggccaactagcctatgatcagcatttcccaaaatctgtttcccgactcatggttctgtgagatgtgacaagggct

SEQ ID NO: 441792 - DNA, 120 bp, Artificial Sequence
  ENSG00000154102_16 (sequence is synthesized)
cctttttcattcctgagacgccggttttcatctgtgatgcggggacagctgcgctccttgctgcgaggcgtcaggacccaggtgatagtgaagggagggtggcgcccgcggttcccggcg

SEQ ID NO: 441793 - DNA, 120 bp, Artificial Sequence
  ENSG00000154114_0 (sequence is synthesized)
gactaggtgaagcggcgccgggccggggctggccgggaccaggcccgaggctgagcggcggcgacagcggtggccgggaggggggaggagaggcgcagccagaggagccgccgcagtagc

SEQ ID NO: 441794 - DNA, 120 bp, Artificial Sequence
  ENSG00000154114_1 (sequence is synthesized)
gcgcagccagaggagccgccgcagtagctcccccgcctcccgggctgagggcattttaagaaagaaagatggatcaacctagtggaagaagtttcatgcaagtattatgtgaaaaatata

SEQ ID NO: 441795 - DNA, 120 bp, Artificial Sequence
  ENSG00000154114_2 (sequence is synthesized)
gtcctgaaaattttccttatcgccgtggcccggggatgggagtccatgtcccagccacacctcagggctctcctatgaaagatcgcctcaacctcccaagtgtactagtgttgaacagct

SEQ ID NO: 441796 - DNA, 120 bp, Artificial Sequence
  ENSG00000154114_3 (sequence is synthesized)
gtggaataacctgtgcaggagatgaaaaagaaattgctgctttctgcgctcatgtgtcggaactagatctttctgacaacaaactcgaagactggcatgaggtcagtaaaattgtgtcaa

SEQ ID NO: 441797 - DNA, 120 bp, Artificial Sequence
  ENSG00000154114_4 (sequence is synthesized)
atgttcctcagttggagtttctaaacctgagttccaaccctctgaatttgtcggttttagaaagaacatgtgctgggtccttctctggggttcgcaaacttgtcctcaacaacagcaaag

SEQ ID NO: 441798 - DNA, 120 bp, Artificial Sequence
  ENSG00000154114_5 (sequence is synthesized)
cttcttgggagacggtccacatgatactacaggagttaccagatttggaggagctcttcctgtgccttaatgactatgaaacagtgtcttgtccttctatttgctgtcattctcttaagc

SEQ ID NO: 441799 - DNA, 120 bp, Artificial Sequence
  ENSG00000154114_6 (sequence is synthesized)
tactacatataacagacaataacctccaagactggactgaaatacgaaagttaggagttatgtttccttcactggataccctcgtcctggccaacaatcatttgaatgctattgaggagc

SEQ ID NO: 441800 - DNA, 120 bp, Artificial Sequence
  ENSG00000154114_7 (sequence is synthesized)
ctgatgattcattggccaggttgtttcctaatcttcgatccatcagcctccacaagtcaggtttgcagtcctgggaagacattgataaactaaattcatttcccaaactggaagaagtga

SEQ ID NO: 441801 - DNA, 120 bp, Artificial Sequence
  ENSG00000154114_8 (sequence is synthesized)
gattgttaggaattcctcttctgcagccatataccaccgaggagcgaaggaaattggtaatagccagattgccatcagtttccaaacttaatggcagcgttgttactgatggtgaacgag

SEQ ID NO: 441802 - DNA, 120 bp, Artificial Sequence
  ENSG00000154114_9 (sequence is synthesized)
aagattctgagagattttttattcgttactatgtggatgttccacaggaagaagtgccattcaggtatcatgaactgatcactaaatatgggaagttggagcctttggcagaagtggacc

SEQ ID NO: 441803 - DNA, 120 bp, Artificial Sequence
  ENSG00000154114_10 (sequence is synthesized)
taagaccccagagcagtgcaaaagtagaagtccactttaacgatcaggtggaagaaatgagcattcgtctggaccaaacagtggcagaactaaagaaacagttaaaaactctagtacaat

SEQ ID NO: 441804 - DNA, 120 bp, Artificial Sequence
  ENSG00000154114_11 (sequence is synthesized)
tacccacaagcaacatgcttctctactattttgaccatgaagcaccctttggcccagaggaaatgaagtacagctctcgggcattgcattcctttggcattagggatggagataaaattt

SEQ ID NO: 441805 - DNA, 120 bp, Artificial Sequence
  ENSG00000154114_12 (sequence is synthesized)
acgtggaatccaaaacaaaataacctctaccagccttgtgaaaaacatacacataaggacttgttgcagggcatttgtttttaatgtggttttctttaggagggagaggttgtttttgtt

SEQ ID NO: 441806 - DNA, 120 bp, Artificial Sequence
  ENSG00000154114_13 (sequence is synthesized)
ttgttttgttctgtttaggtttgggaaggattttgtatatttttccccctggagtgagtaggggccatttttgggtgttttctaccacagattgatttggctcagccagcggaattggcc

SEQ ID NO: 441807 - DNA, 120 bp, Artificial Sequence
  ENSG00000154114_14 (sequence is synthesized)
acatttccagtgtatgtgccctctctaaggaaagatgacaaagaaatcaccgacttcttactgtgttcactgggatttgcctgccacttggttatcattactgttgggtgaacctgtgaa

SEQ ID NO: 441808 - DNA, 120 bp, Artificial Sequence
  ENSG00000154114_15 (sequence is synthesized)
gataacatgaacactgtagccccttagaagggtctcatagagaatttaaacagggtgacaaggaatcttcacaggaagggccagaacttctctctcccagttcttccttccgctaccctc

SEQ ID NO: 441809 - DNA, 120 bp, Artificial Sequence
  ENSG00000154114_16 (sequence is synthesized)
cctccttggcttttttggttcagttccatttttttttcattttgacatgtggtttacctaatagttttgttctgttcataattcttatttctcaacctgggtgatttttttgttctcatt

SEQ ID NO: 441810 - DNA, 120 bp, Artificial Sequence
  ENSG00000154114_17 (sequence is synthesized)
tctcccttttgaaataattgaaagtgttttaagcatttttaacctgattctaatctcaggtacgcagtaagaagctataactctgttagaacctcgaagagtagatgtagaatgaaaact

SEQ ID NO: 441811 - DNA, 120 bp, Artificial Sequence
  ENSG00000154114_18 (sequence is synthesized)
ccaggaaaacttgcagttattctggaagcaccggcagaacagtctgatctctttgtatgttactaactcacttttaatgtccctgtacattatgtcagccattactttcataacatgaaa

SEQ ID NO: 441812 - DNA, 120 bp, Artificial Sequence
  ENSG00000154114_19 (sequence is synthesized)
tatgtcagattccagagttcttttatttttgcttattgaatgtatttcctcatatctttctttttcattactttaaactattgggaattgaggcctgacttcataaataattcaatagag

SEQ ID NO: 441813 - DNA, 120 bp, Artificial Sequence
  ENSG00000154114_20 (sequence is synthesized)
tcctggatacgtgcaccaggagagttgagaattagctcataaactatctgtggtgtgtgtggggaatgaagttgggggatgtgggggaagagcttatgactttcccacctgtgtcatcca

SEQ ID NO: 441814 - DNA, 120 bp, Artificial Sequence
  ENSG00000154114_21 (sequence is synthesized)
gaacagttcttttgttttacatttcaatttagttgcctcatagaagtataactgcccaatctatgagtaaagtgtaagtgtcaaaactttacaattgcctccaagtcatattttttgcag

SEQ ID NO: 441815 - DNA, 120 bp, Artificial Sequence
  ENSG00000154114_22 (sequence is synthesized)
aagcacatttaaagcacttttctgtaaaagctagttccttacctgcttggaaatctttttgtttgttcttctattcctttgttaatcagatgtaatccctttctttaatgtgtatttttc

SEQ ID NO: 441816 - DNA, 120 bp, Artificial Sequence
  ENSG00000154114_23 (sequence is synthesized)
ttggtccaccatgtttacagatgggagacttgagagatacttagcataactggggcagaaagtgtgtaagtgaagtatttttcaaagaatgcagttattatctgattgcatttgaccttt

SEQ ID NO: 441817 - DNA, 120 bp, Artificial Sequence
  ENSG00000154114_24 (sequence is synthesized)
tgacctttgttacataattctacccctcctacaaatttaatttttttatgaaatttttaggtgacttgtaaattcttcatgtatgaggagttgtgtttattaatgctactttttaaattt

SEQ ID NO: 441818 - DNA, 120 bp, Artificial Sequence
  ENSG00000154114_25 (sequence is synthesized)
tcctgtgccatgtggcagatgtttattctcttaatgcacttcaggtttgctatctgtaaagcctttgacccaggcctactgagtcaaatctacattcagtgtaacattaaaggtggaaac

SEQ ID NO: 441819 - DNA, 120 bp, Artificial Sequence
  ENSG00000154114_26 (sequence is synthesized)
caaagggtttgagaaagacgaataaggcctattctccttctgctgcagactttatctttcaaaatcataaaaatgagcaatggagatccaggctgggtatagacaagaataattattttg

SEQ ID NO: 441820 - DNA, 120 bp, Artificial Sequence
  ENSG00000154114_27 (sequence is synthesized)
caaacacattttcctgacagatttttggaagtaggaaaaaagtatggcaacagtgtcatgaagattgaaactgtaggtgctttgtgtatgtatgcatgagtgcagatgagtttgagagag

SEQ ID NO: 441821 - DNA, 120 bp, Artificial Sequence
  ENSG00000154114_28 (sequence is synthesized)
aaaaagtgtaattgagccctttgcttttgtcagcctgggaaacagatgcgttcttattttttgaagttgtgtgaccctggactgtcccacagcagaaggcagaacaaacacttatgttat

SEQ ID NO: 441822 - DNA, 120 bp, Artificial Sequence
  ENSG00000154114_29 (sequence is synthesized)
gctttaatcataagtggaatggtcacaattaataagatattttatatatggcaaagttttatgaaatgcttttttactattagagacctgtttcttctgttattacagaacacagtgttt

SEQ ID NO: 441823 - DNA, 120 bp, Artificial Sequence
  ENSG00000154114_30 (sequence is synthesized)
atcaactgcggacataattcttttattatacagttgcatgtaaagggagcttctcatttaattcagcggatgtgggtatttttagggcattgtaattgatggttttaataattgctgaat

SEQ ID NO: 441824 - DNA, 120 bp, Artificial Sequence
  ENSG00000154114_31 (sequence is synthesized)
aatttttgattaagagaaaaatgtaatacaattactggtctgagttacagaacagaagttaatgaaaaaggctatttgagcatgtgtacttatagattcatttgggtggctgagaaaaga

SEQ ID NO: 441825 - DNA, 120 bp, Artificial Sequence
  ENSG00000154114_32 (sequence is synthesized)
tgctgcttttgaaataaaattggtgctgtgtagacacttgtaaccaaaattatttttataacagaactaaaagaaggagagaagaggccatggacctttgagtttacatgttatacctaa

SEQ ID NO: 441826 - DNA, 120 bp, Artificial Sequence
  ENSG00000154114_33 (sequence is synthesized)
ttgattgtctgcagcttatctgtattttaatattgactttgtccagattcagtgagaacatagtattgacattatgaggcaaaatgctgtcatagccagtattactgatatgttgctaca

SEQ ID NO: 441827 - DNA, 120 bp, Artificial Sequence
  ENSG00000154114_34 (sequence is synthesized)
gacacaatgtatagaacataccttttctaaaataggaattatttccagttatgaaaaaggaaaagagtaataaagaaaaccaaatcaaaaccaagggatcctttctacatgtgggtgaac

SEQ ID NO: 441828 - DNA, 120 bp, Artificial Sequence
  ENSG00000154114_35 (sequence is synthesized)
ggctgctaaagccacagtagaaaccaatttttgaatttgaattgttgaaatatcctagattgctttaatggaaaaaatccagagtcacatatcttttttattatcaagtttttgcagcct

SEQ ID NO: 441829 - DNA, 120 bp, Artificial Sequence
  ENSG00000154114_36 (sequence is synthesized)
tttgccagcattgccataaatacgtaagaaagcagcagatagtataagcccctagttattaagacttctcagttaatattaaggccaaaatataacttgagctaggtataacagggctga

SEQ ID NO: 441830 - DNA, 120 bp, Artificial Sequence
  ENSG00000154114_37 (sequence is synthesized)
atgctacagtgttgtttttaaagattttgcttatttttaaagacaggaaaattcagttctaaccagatgttccagctatgttactcaaccagcagtggtaggagcagagagcacttgcac

SEQ ID NO: 441831 - DNA, 120 bp, Artificial Sequence
  ENSG00000154114_38 (sequence is synthesized)
taagagctgatcaccatttgagatacgcggcttaacgcacatgtgagtgtagcttgctacatgaaaatgctaggctctagggcatgtaaaacatgaatacagaatactagattgttctaa

SEQ ID NO: 441832 - DNA, 120 bp, Artificial Sequence
  ENSG00000154114_39 (sequence is synthesized)
gtaatgtcatttcggtttgtgaatttgatttttcccttcatttcatgtcatattgaaaatgcaaacaaactgctctcaagaacacccagaagctatctgtgttaccagatgtgttgtgaa

SEQ ID NO: 441833 - DNA, 120 bp, Artificial Sequence
  ENSG00000154114_40 (sequence is synthesized)
cactctactatttttcataggtgcttccttgaaatatatgtccattgtagtggtggagagggactggactctctcaggctctttacttgccagttgtctcccgcagttaatggaaatata

SEQ ID NO: 441834 - DNA, 120 bp, Artificial Sequence
  ENSG00000154114_41 (sequence is synthesized)
gtcacgtgttgttgttgggccgggaaagctgcttccgggtcaatgcaggacactgggctccggcggccagagtgggggactagcattttaagaaagaaagatggatcaacctagtggaag

SEQ ID NO: 441835 - DNA, 120 bp, Artificial Sequence
  ENSG00000154114_42 (sequence is synthesized)
gtaaccctatgagctaggagttacaggctactaccccttcctgtgagtgaagaggggtagacttagagaacttaagtaacttgcccacagttacacagagtagtggaatcagtcaggatt

SEQ ID NO: 441836 - DNA, 120 bp, Artificial Sequence
  ENSG00000154114_43 (sequence is synthesized)
tacatacccagggcgtttagttttagaaccagtacttactaccattgggcagtattgccatagcactaaatgtaggaggagctagtgaaaaaaaaaacaaaaacaaacgtggattttttt

SEQ ID NO: 441837 - DNA, 120 bp, Artificial Sequence
  ENSG00000154114_44 (sequence is synthesized)
ttttttaatgacctgcagacttttgcaacctttatgcgtgattgatgtttcaacattctggcaatccctggttattagccagggtggtttgtaaactgctctggaaggctgtagagtgat

SEQ ID NO: 441838 - DNA, 120 bp, Artificial Sequence
  ENSG00000154114_45 (sequence is synthesized)
gaactagtggtctgttcctaatgaggcttttccttaacatgatggcttctgtagctgctcaagagcacagataatgggggtaatctgttctgtaaacagctaagtaatgaccttaaactt

SEQ ID NO: 441839 - DNA, 120 bp, Artificial Sequence
  ENSG00000154114_46 (sequence is synthesized)
gtgtgttcacagcggaaagaaaacatgcatatatgattttcttctgatgaaacctaatgtattcaagaaaaagaatcttgctttttggaaggatggaaaaattgggaataattttttccc

SEQ ID NO: 441840 - DNA, 120 bp, Artificial Sequence
  ENSG00000154114_47 (sequence is synthesized)
ctttgataattagaccactcagtactgttgcttagttttttggttcagttactttgatgtggttacaagaggaattttggctgtaatggatttcatacatttttgtaagttatgtttcca

SEQ ID NO: 441841 - DNA, 120 bp, Artificial Sequence
  ENSG00000154114_48 (sequence is synthesized)
tgtctcgtgtgtgatgttgtgtactgttgacatgaaatactccttttttggtaaagatggattggcttaacagattagagctacagaaagtatgacttagcacgctggtaaggccacaaa

SEQ ID NO: 441842 - DNA, 120 bp, Artificial Sequence
  ENSG00000154114_49 (sequence is synthesized)
gtgtggggacatttggtttggggacatcagttcaggagtaaatgtatctgatcctgctttgaataaatgcaacttgaaagccttggaattttaccagatcgaatctgggccaaatagaaa

SEQ ID NO: 441843 - DNA, 120 bp, Artificial Sequence
  ENSG00000154114_50 (sequence is synthesized)
gaatgtctaatttaatagggatatagacagttggtttaaaccaacatttttggacgaggagaggctatggaaatgaagaaagaagtgtttagaaatatcacacaaacagcattttaagaa

SEQ ID NO: 441844 - DNA, 120 bp, Artificial Sequence
  ENSG00000154114_51 (sequence is synthesized)
atgattcattggccaggttgtttcctaatcttcgatccatcagcctccacaagtcagatccatctctcctgtcaccaaattgataatacagtcaaccctccatattcatggacttcatcc

SEQ ID NO: 441845 - DNA, 120 bp, Artificial Sequence
  ENSG00000154114_52 (sequence is synthesized)
cattcttatgtgaatggctattatacttacagtcagtactgcttaatttagtacttaattatttaagcacaaaagtaatttcgcactaccttatatcattcttcgctatttcagtgtgta

SEQ ID NO: 441846 - DNA, 120 bp, Artificial Sequence
  ENSG00000154114_53 (sequence is synthesized)
cttcaggttttgtcttcccagctatattttgaacttcaggaagacatcttggtattttctccacaattcctagcagagtctcacatatagtaggcacttacttatttattgaatgaatga

SEQ ID NO: 441847 - DNA, 120 bp, Artificial Sequence
  ENSG00000154114_54 (sequence is synthesized)
catgaggtgaagtttttatattgctacattttagtgaaaagcagcaataaccattgtgtcattgtttatgttattatatgttctgctaaattctgttctcacttgatgtctgtatgactt

SEQ ID NO: 441848 - DNA, 120 bp, Artificial Sequence
  ENSG00000154114_55 (sequence is synthesized)
acttgatgtctgtatgacttcttgttgtctgtatatcttattgtctgtatgtctttatatcaagataaataaggcctataatcccagtgctaaggaggctgaggcaggaggatcacttga

SEQ ID NO: 441849 - DNA, 80 bp, Artificial Sequence
  ENSG00000154118_0 (sequence is synthesized)
gaggtggagccgcgggccccgccgccgccgctcctgccccctccctccctcctcccctccccctcccctccggtcctgtc

SEQ ID NO: 441850 - DNA, 120 bp, Artificial Sequence
  ENSG00000154118_1 (sequence is synthesized)
tcccctccccctcccctccggtcctgtctccagcgggagcgcgagacgctggtcaggctccgcggcgcagctcgaaaaggaataatcgcccccgattgactgaaattcctccggagccgg

SEQ ID NO: 441851 - DNA, 120 bp, Artificial Sequence
  ENSG00000154118_2 (sequence is synthesized)
cgccgcggccgcccgcgcccgagaccgcgctccggggccgcgtcctcctctcctccggaaaacgctcgcgacccagggccgccggcggccgcgactctgctgtgtcgatcgcctgagtcc

SEQ ID NO: 441852 - DNA, 120 bp, Artificial Sequence
  ENSG00000154118_3 (sequence is synthesized)
gttttcaccgtttgcgggatctggaaccgagttacatgcatgtccagtgggggcaggtttaattttgacgacggagggtcctactgtggaggctgggaggacggcaaggcgcacggccat

SEQ ID NO: 441853 - DNA, 120 bp, Artificial Sequence
  ENSG00000154118_4 (sequence is synthesized)
ggcgtctgcaccggccccaagggccaaggcgaatacaccggctcgtggagccacggcttcgaggtgctgggcgtctacacctggcccagcggcaacacgtaccagggcacctgggcgcag

SEQ ID NO: 441854 - DNA, 120 bp, Artificial Sequence
  ENSG00000154118_5 (sequence is synthesized)
ggcaagcgccacggcatcggcctggagagcaaggggaagtgggtgtacaagggcgagtggacgcacggattcaaggggcgctacggggtgcgggagtgcgcgggcaacggggccaaatac

SEQ ID NO: 441855 - DNA, 120 bp, Artificial Sequence
  ENSG00000154118_6 (sequence is synthesized)
gaagggacctggagcaacgggctgcaggacggctacgggaccgagacctactcggacggagggacctaccagggccagtgggtcggtggcatgcgccagggctacggcgtccggcagagc

SEQ ID NO: 441856 - DNA, 120 bp, Artificial Sequence
  ENSG00000154118_7 (sequence is synthesized)
gtcccgtatggcatggccgcggtcatccgctcacccctgaggacgtccatcaactccctgcgcagcgagcacaccaacggcacggcgctgcatcccgacgcctctccggcggtggccggc

SEQ ID NO: 441857 - DNA, 120 bp, Artificial Sequence
  ENSG00000154118_8 (sequence is synthesized)
agcccggccgtgtcccgcgggggcttcgtgctcgtggcccacagtgactccgagatcctcaagagcaagaagaaggggctgtttcggcgctcgctgctgagtgggctgaagctgcgcaag

SEQ ID NO: 441858 - DNA, 120 bp, Artificial Sequence
  ENSG00000154118_9 (sequence is synthesized)
tcggagtccaagagcagcctggccagccaacgcagcaagcagagctcctttcgcagcgaggcgggcatgagcaccgtcagctccacggccagcgacatccactccaccatcagcctgggc

SEQ ID NO: 441859 - DNA, 120 bp, Artificial Sequence
  ENSG00000154118_10 (sequence is synthesized)
gaggctgaggccgagctggcggtcatcgaggacgacatcgacgccaccaccaccgagacctacgtgggcgagtggaagaacgacaaacgctccggcttcggcgtgagccagcgctcggac

SEQ ID NO: 441860 - DNA, 120 bp, Artificial Sequence
  ENSG00000154118_11 (sequence is synthesized)
gggctcaagtacgagggcgagtgggccagcaaccggcgccatggctacggctgcatgaccttcccggacggcaccaaggaggagggcaagtacaagcagaacatcctcgtcggcggcaag

SEQ ID NO: 441861 - DNA, 120 bp, Artificial Sequence
  ENSG00000154118_12 (sequence is synthesized)
cgcaagaacctcatccccctgcgggccagcaagatccgcgagaaggtggaccgcgccgttgaggccgctgagcgggccgccaccatcgccaagcagaaggctgagatcgcggcttccagg

SEQ ID NO: 441862 - DNA, 120 bp, Artificial Sequence
  ENSG00000154118_13 (sequence is synthesized)
acctcccactctcgggcaaaggccgaggcagccctcacagcagctcagaaagcccaggaggaggcgcggatcgccaggatcactgccaaagagttctccccttccttccagcaccgggaa

SEQ ID NO: 441863 - DNA, 120 bp, Artificial Sequence
  ENSG00000154118_14 (sequence is synthesized)
aacgggctggagtaccagaggccgaagcgtcagacctcctgtgacgacatcgaggtgctgtccaccgggacacccctgcagcaggagagccccgagctgtaccgcaagggcaccactccc

SEQ ID NO: 441864 - DNA, 120 bp, Artificial Sequence
  ENSG00000154118_15 (sequence is synthesized)
tccgacctgacccccgacgacagccccctgcagagcttccccaccagccccgcggccaccccgccgcccgcgcccgccgccaggaacaaggtcgcccacttctcgaggcaggtgtcggtg

SEQ ID NO: 441865 - DNA, 120 bp, Artificial Sequence
  ENSG00000154118_16 (sequence is synthesized)
cagcagctggggcgaggagcaggccgggggctccaggggtgtccgcagcggtgccctgcgcggcggcctgctcgtggatgacttccgcacccgaggttcgggccgcaagcagcccgggaa

SEQ ID NO: 441866 - DNA, 120 bp, Artificial Sequence
  ENSG00000154118_17 (sequence is synthesized)
ccccaagccgcgggagcggcggacggagtcaccccccgtgttcacgtggacttcccaccaccgggccagcaaccacagccccggaggctccaggctgctggagctgcaggaggagaagct

SEQ ID NO: 441867 - DNA, 120 bp, Artificial Sequence
  ENSG00000154118_18 (sequence is synthesized)
gagcaactaccggatggagatgaaacccttgctgaggatggagacgcatccccagaaaagacgctacagcaagggcggcgcctgccggggcttgggggacgaccaccgccccgaggaccg

SEQ ID NO: 441868 - DNA, 120 bp, Artificial Sequence
  ENSG00000154118_19 (sequence is synthesized)
gggcttcggggtgcagagactgcggtccaaggcccagaacaaggagaacttcaggccggcctcctccgcggagcccgccgtgcagaaactggcgagcctgcggctgggcggggccgagcc

SEQ ID NO: 441869 - DNA, 120 bp, Artificial Sequence
  ENSG00000154118_20 (sequence is synthesized)
ccggttgctgcgttgggacttgaccttctccccgccccagaaatccttgcctgtcgctctagagtccgacgaggagaatggggatgagctcaagtccagtacgggctcagcgcctatcct

SEQ ID NO: 441870 - DNA, 120 bp, Artificial Sequence
  ENSG00000154118_21 (sequence is synthesized)
ggtggtcatggtgatcttgctcaacatcggagtcgccattctgtttattaactttttcatctgatgagatgtcgcggtagcaaaaatagagaaagggtagaaaaaagggacattaaaatt

SEQ ID NO: 441871 - DNA, 120 bp, Artificial Sequence
  ENSG00000154118_22 (sequence is synthesized)
aaaagcaaaaccacaagaagggaaagaccgcaactcggacagcccagcgacttccaagtcctctcacagaagaaccacacgattgggtatcactcacagtttgcctttttttctgggtaa

SEQ ID NO: 441872 - DNA, 120 bp, Artificial Sequence
  ENSG00000154118_23 (sequence is synthesized)
tgttttttggattttagccaaaattctttgcttgtataacactctgctgtgtggcatggcagaaggaggccagcacgcagcccctccagctccacgtggagacagaagggatcccggcac

SEQ ID NO: 441873 - DNA, 120 bp, Artificial Sequence
  ENSG00000154118_24 (sequence is synthesized)
atcagtggtaacagcggacgttgtcctcgtggtcacacgtcccgtcttgggtgtggatggagggcagcccggggcagagcctcagccccgcggcccctgagtggcagggctgactcccgt

SEQ ID NO: 441874 - DNA, 120 bp, Artificial Sequence
  ENSG00000154118_25 (sequence is synthesized)
cgacacgagcttagaaagtggattcactgctttctctgtctagaacagacgggtgacaagtatgggcaggaggcatggggcagggtggcccaccccagtgggcagtagcctggccttttt

SEQ ID NO: 441875 - DNA, 120 bp, Artificial Sequence
  ENSG00000154118_26 (sequence is synthesized)
ctgtgtgagatctgtgctgcacacctgagggagggggagggatcggccacctcctccctgtgagacggatgcaggtccttccctcttctcggcactgcccccggccttccatgagaagcc

SEQ ID NO: 441876 - DNA, 120 bp, Artificial Sequence
  ENSG00000154118_27 (sequence is synthesized)
gactccccacaccgagttttaaagcaaagcccttttcttctgctgcccactcactgtgggtcccattcggctgtttcccccaccagaccccagggaagccggggcccactccgatccgcc

SEQ ID NO: 441877 - DNA, 120 bp, Artificial Sequence
  ENSG00000154118_28 (sequence is synthesized)
tgggctcagctaagcacggaagccaagggggctgtgccgtggagctgggctcgcgccggggctctgggtgtgtgcgcttggcgtgcagggtggacgcgtggggttccgtgtccccagcag

SEQ ID NO: 441878 - DNA, 120 bp, Artificial Sequence
  ENSG00000154118_29 (sequence is synthesized)
tgagggccctagaggacgccttctcccatggttactgatctccacgggttttcacatctctgtactgtgcctgcctcaacttcccctaacagatatgcatattccttccagatgcctcag

SEQ ID NO: 441879 - DNA, 120 bp, Artificial Sequence
  ENSG00000154118_30 (sequence is synthesized)
tgctacaccacagtgggcctggtcccaggacaggaatgcggttcaaacccagtggcttgaaacttcctgagaaactgtagcatatccagccccctaaaatgtacaatgtaacttgttcag

SEQ ID NO: 441880 - DNA, 120 bp, Artificial Sequence
  ENSG00000154118_31 (sequence is synthesized)
tccaacaaaaacaggttccttatgtttctgccttctccaccagggtcgctccatcacccaaacaaaagaacaaggtttgccaggatgtccgagtgccccctggccctggctctcgtgtgc

SEQ ID NO: 441881 - DNA, 120 bp, Artificial Sequence
  ENSG00000154118_32 (sequence is synthesized)
atggacgtgcctgaggggtccgggcacggccatacgcaggacccctgtgcccggggaggcgctgcagggattccccatccggtcgtcttggggccagcccgtcttatggactctgccttg

SEQ ID NO: 441882 - DNA, 120 bp, Artificial Sequence
  ENSG00000154118_33 (sequence is synthesized)
ctttgcttatgtttagctgtttctctgctacctttcgagcagacttctttactacactgcactggattgctatatttttaaccagaaataaactaaagattagagcatgttccagttaaa

SEQ ID NO: 441883 - DNA, 120 bp, Artificial Sequence
  ENSG00000154118_34 (sequence is synthesized)
ggaattcgggtgactttgctccaagatacacgcgtgtgtcccgactctcactcaatttataggggagagggactcgccaaatccctgttttctgggggacctaccagggccagtgggtcg

SEQ ID NO: 441884 - DNA, 120 bp, Artificial Sequence
  ENSG00000154118_35 (sequence is synthesized)
caagtcctctcacagaagaaccacacgattggggtcgctccatcacccaaacaaaagaacaaggtttgccaggatgtccgagtgccccctggccctggctctcgtgtgcatggacgtgcc

SEQ ID NO: 441885 - DNA, 120 bp, Artificial Sequence
  ENSG00000154118_36 (sequence is synthesized)
tttaaaatttatttctcattaaaattataacacagcctcgtaaaaatattaaaacagcgagacagatgtgtcaggggttatgtatatgaaggaggtagcacagttctcatcacgggtgtg

SEQ ID NO: 441886 - DNA, 120 bp, Artificial Sequence
  ENSG00000154118_37 (sequence is synthesized)
cttagtgtccccctaaagttcatgccagttaatgtgatcgtgactgtaattggaaatagggtcgttgcagatataattaagatgaggtccttctggagtcgagtgggactggtgtcctta

SEQ ID NO: 441887 - DNA, 120 bp, Artificial Sequence
  ENSG00000154118_38 (sequence is synthesized)
gaggagaagagacacggacacacagaatgccacgtgggacagaggcctgctgtctacacctgtgcagaggagacaacaaggagagtggggcatgacccctgcccacgacactcgcctcca

SEQ ID NO: 441888 - DNA, 120 bp, Artificial Sequence
  ENSG00000154118_39 (sequence is synthesized)
ggaaggcagccagctgcccatctttggtgcggtcatctctgcaggcaacagaatggcagagtggcagtctgatcactctactccattgtgtgagagtctccaggatgaagaccaggctcc

SEQ ID NO: 441889 - DNA, 120 bp, Artificial Sequence
  ENSG00000154118_40 (sequence is synthesized)
ccagcaggacgtgcggccctcatggagttctggccttgttttcggctgttgcctggctgatattctgcacatctgcccaccgtcctctgggcggtccacgaatacattgtgccttcctct

SEQ ID NO: 441890 - DNA, 120 bp, Artificial Sequence
  ENSG00000154118_41 (sequence is synthesized)
ttgcatatgctggtccctctgctggcaatgcccttccttcttggtgagctccaatgcatccctcaagactcagttcagatgcgcctctctggactcatccccaactcccagacggggttg

SEQ ID NO: 441891 - DNA, 120 bp, Artificial Sequence
  ENSG00000154118_42 (sequence is synthesized)
gctgctcccttttttcagatcctgaaacacttacttgtccccctttatgtgggcatttatctgatagtagagtttttctgtactgttggaatggtgagttccctgaagctaggtcagctt

SEQ ID NO: 441892 - DNA, 120 bp, Artificial Sequence
  ENSG00000154118_43 (sequence is synthesized)
ccttctcagcattcagcaggcggtgggggaggagggaaggagaggaacttcctaataaagatgaacacctctttgtggttaggtcagaccagcctgtgcctgtgcgacctggtgcagacc

SEQ ID NO: 441893 - DNA, 120 bp, Artificial Sequence
  ENSG00000154118_44 (sequence is synthesized)
ttcacctctcagagcctcggtttcctcatctgagcctcaggcacgacaatctgctagactctgcttcccggtggcagctggggaatgggatgggaaggagccctgggatgctcaggtcat

SEQ ID NO: 441894 - DNA, 120 bp, Artificial Sequence
  ENSG00000154118_45 (sequence is synthesized)
ccctgccaccagaatgtccccagagtcatgaccatcagcacctcagcctcgctgctttttccttggggtctgcaggggcaggacgcaaaccccacacgctcgctgcgcagtaagctgcag

SEQ ID NO: 441895 - DNA, 120 bp, Artificial Sequence
  ENSG00000154118_46 (sequence is synthesized)
gggcttctccagcagcacctctgaggcctgcctaccacgtggagatgctgctcccgtgggctctgaccaccgctctgccctcttctcacaggaaccagcgaccactcggcccggcgtaac

SEQ ID NO: 441896 - DNA, 120 bp, Artificial Sequence
  ENSG00000154118_47 (sequence is synthesized)
cacgcatgtccactggtcacctggtggccttcgacaagaacgtgtgataaatccctgccggagtgcggctccgggaaaacgctgtcaccgcaaaccagctcctctttgttgcagtccccc

SEQ ID NO: 441897 - DNA, 120 bp, Artificial Sequence
  ENSG00000154118_48 (sequence is synthesized)
tgctgctgctgctgctgctgctgctgtaagatggtttctgtgcagggaaccttggccggctctgcagctgcccgcctgcctggactctccgatatccactcctcagtgcacctgacacgc

SEQ ID NO: 441898 - DNA, 120 bp, Artificial Sequence
  ENSG00000154118_49 (sequence is synthesized)
ctctccgatatccactcctcagtgcacctgacacgcatggagccggtcctttcctggaagccagaccccaaacaaactggcttccccgaccagtccactcccatgtgggagcttatcctc

SEQ ID NO: 441899 - DNA, 120 bp, Artificial Sequence
  ENSG00000154118_50 (sequence is synthesized)
agaggcactgggtcctctgcctccctcgggcggctcgcctgtttcaggcatggatgcctgggaagggagtgagacgcagcaatgacttgtgcttctgccgagaataaaaatcctgagcgt

SEQ ID NO: 441900 - DNA, 120 bp, Artificial Sequence
  ENSG00000154122_0 (sequence is synthesized)
agagcgcttataatggagccgctgtcagcagaaccttctgccgccgccgccgccgccgccgtccctcctcttttttttcccggcagatctttgttgtgtgggagggcagcagggatggac

SEQ ID NO: 441901 - DNA, 120 bp, Artificial Sequence
  ENSG00000154122_1 (sequence is synthesized)
ggatggacttgagcttgcggatcccctgctagagcagccgcgctcggagaaggcgccgcagccgcgaggaggagccgccgccgccgcgcccgaggccccgccgcccgcggcctctgtcgg

SEQ ID NO: 441902 - DNA, 120 bp, Artificial Sequence
  ENSG00000154122_2 (sequence is synthesized)
ccgctcgccccgtcgccccgtcgcccctcgcctccccgcagagtcccctcgcggcagcagatgtgtgtggggtcagcccacggcggggactatggtgaaattcccggcgctcacgcacta

SEQ ID NO: 441903 - DNA, 120 bp, Artificial Sequence
  ENSG00000154122_3 (sequence is synthesized)
ctggcccctgatccggttcttggtgcccctgggcatcaccaacatagccatcgacttcggggagcaggccttgaaccggggcattgctgctgtcaaggaggatgcagtcgagatgctggc

SEQ ID NO: 441904 - DNA, 120 bp, Artificial Sequence
  ENSG00000154122_4 (sequence is synthesized)
cagctacgggctggcgtactccctcatgaagttcttcacgggtcccatgagtgacttcaaaaatgtgggcctggtgtttgtgaacagcaagagagacaggaccaaagccgtcctgtgtat

SEQ ID NO: 441905 - DNA, 120 bp, Artificial Sequence
  ENSG00000154122_5 (sequence is synthesized)
ggtggtggcaggggccatcgctgccgtctttcacacactgatagcttatagtgatttaggatactacattatcaataaactgcaccatgtggacgagtcggtggggagcaagacgagaag

SEQ ID NO: 441906 - DNA, 120 bp, Artificial Sequence
  ENSG00000154122_6 (sequence is synthesized)
ggccttcctgtacctcgccgcctttcctttcatggacgcaatggcatggacccatgctggcattctcttaaaacacaaatacagtttcctggtgggatgtgcctcaatctcagatgtcat

SEQ ID NO: 441907 - DNA, 120 bp, Artificial Sequence
  ENSG00000154122_7 (sequence is synthesized)
agctcaggttgtttttgtagccattttgcttcacagtcacctggaatgccgggagcccctgctcatcccgatcctctccttgtacatgggcgcacttgtgcgctgcaccaccctgtgcct

SEQ ID NO: 441908 - DNA, 120 bp, Artificial Sequence
  ENSG00000154122_8 (sequence is synthesized)
gggctactacaagaacattcacgacatcatccctgacagaagtggcccggagctggggggagatgcaacaataagaaagatgctgagcttctggtggcctttggctctaattctggccac

SEQ ID NO: 441909 - DNA, 120 bp, Artificial Sequence
  ENSG00000154122_9 (sequence is synthesized)
acagagaatcagtcggcctattgtcaacctctttgtttcccgggaccttggtggcagttctgcagccacagaggcagtggcgattttgacagccacataccctgtgggtcacatgccata

SEQ ID NO: 441910 - DNA, 120 bp, Artificial Sequence
  ENSG00000154122_10 (sequence is synthesized)
cggctggttgacggaaatccgtgctgtgtatcctgctttcgacaagaataaccccagcaacaaactggtgagcacgagcaacacagtcacggcagcccacatcaagaagttcaccttcgt

SEQ ID NO: 441911 - DNA, 120 bp, Artificial Sequence
  ENSG00000154122_11 (sequence is synthesized)
ctgcatggctctgtcactcacgctctgtttcgtgatgttttggacacccaacgtgtctgagaaaatcttgatagacatcatcggagtggactttgcctttgcagaactctgtgttgttcc

SEQ ID NO: 441912 - DNA, 120 bp, Artificial Sequence
  ENSG00000154122_12 (sequence is synthesized)
tttgcggatcttctccttcttcccagttccagtcacagtgagggcgcatctcaccgggtggctgatgacactgaagaaaaccttcgtccttgcccccagctctgtgctgcggatcatcgt

SEQ ID NO: 441913 - DNA, 120 bp, Artificial Sequence
  ENSG00000154122_13 (sequence is synthesized)
cctcatcgccagcctcgtggtcctaccctacctgggggtgcacggtgcgaccctgggcgtgggctccctcctggcgggctttgtgggagaatccaccatggtcgccatcgctgcgtgcta

SEQ ID NO: 441914 - DNA, 120 bp, Artificial Sequence
  ENSG00000154122_14 (sequence is synthesized)
tgtctaccggaagcagaaaaagaagatggagaatgagtcggccacggagggggaagactctgccatgacagacatgcctccgacagaggaggtgacagacatcgtggaaatgagagagga

SEQ ID NO: 441915 - DNA, 120 bp, Artificial Sequence
  ENSG00000154122_15 (sequence is synthesized)
gaatgaataaggcacgggacgccatgggcactgcagggacagtcagtcaggatgacacttcggcatcatctcttccctctcccatcgtattttgttcccttttttttgttttgttttggt

SEQ ID NO: 441916 - DNA, 120 bp, Artificial Sequence
  ENSG00000154122_16 (sequence is synthesized)
aatgaaagaggccttgatttaaaggtttcgtgtcaattctctagcatactgggtatgctcacactgacggggggacctagtgaatggtctttactgttgctatgtaaaaacaaacgaaac

SEQ ID NO: 441917 - DNA, 120 bp, Artificial Sequence
  ENSG00000154122_17 (sequence is synthesized)
aactgacttcatacccctgcctcacgaaaacccaaaagacacagctgcctcacggttgacgttgtgtcctcctcccctggacaatctcctcttggaaccaaaggactgcagctgtgccat

SEQ ID NO: 441918 - DNA, 120 bp, Artificial Sequence
  ENSG00000154122_18 (sequence is synthesized)
cgcgcctcggtcaccctgcacagcaggccacagactctcctgtcccccttcatcgctcttaagaatcaacaggttaaaactcggcttcctttgatttgcttcccagtcacatggccgtac

SEQ ID NO: 441919 - DNA, 120 bp, Artificial Sequence
  ENSG00000154122_19 (sequence is synthesized)
aaagagatggagccccggtggcctcttaaatttcccttccgccacggagttcgaaaccatctactccacacatgcaggaggcgggtggcacgctgcagcccggagtccccgttcacactg

SEQ ID NO: 441920 - DNA, 120 bp, Artificial Sequence
  ENSG00000154122_20 (sequence is synthesized)
aggaacggagacctgtgaccacagcaggctgacagatggacagaatctcccgtagaaaggtttggtttgaaatgccccgggggcagcaaactgacatggttgaatgatagcatttcactc

SEQ ID NO: 441921 - DNA, 120 bp, Artificial Sequence
  ENSG00000154122_21 (sequence is synthesized)
tgcgttctcctagatctgagcaagctgtcagttctcacccccaccgtgtatatacatgagctaacttttttaaattgtcacaaaagcgcatctccagattccagaccctgccgcatgact

SEQ ID NO: 441922 - DNA, 120 bp, Artificial Sequence
  ENSG00000154122_22 (sequence is synthesized)
tttcctgaaggcttgcttttccctcgcctttcctgaaggtcgcattagagcgagtcacatggagcatcctaactttgcattttagtttttacagtgaactgaagctttaagtctcatcca

SEQ ID NO: 441923 - DNA, 120 bp, Artificial Sequence
  ENSG00000154122_23 (sequence is synthesized)
gcattctaatgccaggttgctgtagggtaacttttgaagtagatatattacctggttctgctatccttagtcataactctgcggtacaggtaattgagaatgtactacggtacttccctc

SEQ ID NO: 441924 - DNA, 120 bp, Artificial Sequence
  ENSG00000154122_24 (sequence is synthesized)
ccacaccatacgataaagcaagacattttataacgataccagagtcactatgtggtcctccctgaaataacgcattcgaaatccatgcagtgcagtatatttttctaagttttggaaagc

SEQ ID NO: 441925 - DNA, 120 bp, Artificial Sequence
  ENSG00000154122_25 (sequence is synthesized)
aggttttttcctttaaaaaaattatagacacggttcactaaattgatttagtcagaattcctagactgaaagaacctaaaaaaaaaaatattttaaagatataaatatatgctgtatatg

SEQ ID NO: 441926 - DNA, 120 bp, Artificial Sequence
  ENSG00000154122_26 (sequence is synthesized)
ttatgtaatttattttaggctataatacatttcctattttcgcattttcaataaaatgtctctaatacaatacggtgattgcttgtgtgctcaacatacctgcagttgaaacgtattgta

SEQ ID NO: 441927 - DNA, 120 bp, Artificial Sequence
  ENSG00000154122_27 (sequence is synthesized)
tcaatgaacattgtaccttattggcagcagttttataaagtccgtcatttgcatttgaatgtaaggctcagtaaatgacagaactatttttcattatgggtaactggggaataaatgggt

SEQ ID NO: 441928 - DNA, 120 bp, Artificial Sequence
  ENSG00000154122_28 (sequence is synthesized)
cactggagtaggaatagaagtgcaagctggaaaggcaaaaatgagaaagaaaaaggcaggccctttgtgtctaccgttttcagtgctgtgtgatcatattgttcctcacagcaaaaaaga

SEQ ID NO: 441929 - DNA, 120 bp, Artificial Sequence
  ENSG00000154122_29 (sequence is synthesized)
atgcaagggcataatgttagctgtgaacatgccagggttgcattcacattcctgggtacccagtgctgatggggtgtgcccacgtggggacatgtccttggcgtgcttcctcagagtggc

SEQ ID NO: 441930 - DNA, 120 bp, Artificial Sequence
  ENSG00000154122_30 (sequence is synthesized)
ttttcctccattaatacatatatgagtactgaaaaattaagttgcatagctgctttgcagtggtttcagaggcagatctgagaagattaaaaaaaaatctcaatgtatcagcttttttta

SEQ ID NO: 441931 - DNA, 120 bp, Artificial Sequence
  ENSG00000154122_31 (sequence is synthesized)
tttaaaggacattactagaaaattaaacagtattttttaacatgtgtgactttcatgcttctggggttggagcttaaagatccaaactgagaaagcaggccgggcatggtggctcatgcc

SEQ ID NO: 441932 - DNA, 120 bp, Artificial Sequence
  ENSG00000154122_32 (sequence is synthesized)
ccaggaaggatcagcaagggcctcctcattatgagatgaggaaatacaactccagagattccttcagtgatcaagatcagtgggccataatatttggttagagtttctgagaacacagga

SEQ ID NO: 441933 - DNA, 120 bp, Artificial Sequence
  ENSG00000154122_33 (sequence is synthesized)
agcaatgccacactcaggccaccacaatggagctgatttggcaggacttgttcaaacctttcaccttaaagcacgtgatccttcttcgtacattttcttcacttgggctgcttaagtcac

SEQ ID NO: 441934 - DNA, 120 bp, Artificial Sequence
  ENSG00000154122_34 (sequence is synthesized)
agcctaacaactttgaggcaaaactgagaactggcatattctcctgcgtttcttctaatcgagtcccatcatccagctagacatgagagatcaaaccagggagggtgacctttctccttc

SEQ ID NO: 441935 - DNA, 120 bp, Artificial Sequence
  ENSG00000154122_35 (sequence is synthesized)
ccacttttcagagtcattggggcaactttttgacttttgtgaccaaagaaacattcccccaaaacatttatttttcattgtagggcattcagctgacagctgcattttagaaagttacca

SEQ ID NO: 441936 - DNA, 120 bp, Artificial Sequence
  ENSG00000154122_36 (sequence is synthesized)
tgcctgtgagattctcatgtcaaagaccagggaaagaccaggtgtgactttctccaaaactgagtgattgcttgtggatgaatacaatctaaaaatacaaggccatgaagtagtttttca

SEQ ID NO: 441937 - DNA, 120 bp, Artificial Sequence
  ENSG00000154122_37 (sequence is synthesized)
tttagatgctgagaaataataggtttgggcagctcaaagcataggaaatagtaagggttttctagagctcctcctttggtggcctgtttgagtagcacaagggacgtcatcctaaatgtg

SEQ ID NO: 441938 - DNA, 120 bp, Artificial Sequence
  ENSG00000154122_38 (sequence is synthesized)
cagttgccatttgttctgtagtgacttacagggatctcagtggcaaagggcgtcagtgagacaacaactgagcaaaaagaactagacgaggcttgcgcttggaaagtcacggtaggattg

SEQ ID NO: 441939 - DNA, 120 bp, Artificial Sequence
  ENSG00000154122_39 (sequence is synthesized)
gacctgccggccacatggctcagggagtattgacggatttgcacattggcaggaaactctcccgtttgggattctttaaatggggcacagaaggccacttgtttgcatttctgggtaaaa

SEQ ID NO: 441940 - DNA, 120 bp, Artificial Sequence
  ENSG00000154122_40 (sequence is synthesized)
aacagtcatcccccatgactgcctgcatcgggtttgtcttgtgccaaagttactcttcctttgtttttactttgccttgatttttagcattagctggtagtttggcttggaaatgtcctg

SEQ ID NO: 441941 - DNA, 120 bp, Artificial Sequence
  ENSG00000154122_41 (sequence is synthesized)
gatagccgattccctaagaaactgaaacatttaatattggcttaggatgtatcagatggggccaaataaagcttctttacaatagtaaaagcactttatacttcactctctgagtcttcc

SEQ ID NO: 441942 - DNA, 120 bp, Artificial Sequence
  ENSG00000154122_42 (sequence is synthesized)
caataaataaccttgggaggtgcagggggtggggggcccaggatggggaggcctgggagctcccagggtagtgacagagttgggctgagttctccagacgccaggatgcgtcgcagcggg

SEQ ID NO: 441943 - DNA, 120 bp, Artificial Sequence
  ENSG00000154122_43 (sequence is synthesized)
gccagctcaggagtgctcactcccagccctctggatctctctcctggttggaataatcattacatatcgtaactctcaaaatttattcacttatattttcagaataagaagtgtgaaatg

SEQ ID NO: 441944 - DNA, 120 bp, Artificial Sequence
  ENSG00000154122_44 (sequence is synthesized)
ttaacagctctctgctctcttacttgttccccatttggggatcttctggagggaaggggcagggggagagtaacttttctatatccttggtttctaggaacacatcgatttgaagactca

SEQ ID NO: 441945 - DNA, 120 bp, Artificial Sequence
  ENSG00000154122_45 (sequence is synthesized)
gtagctgactggtttttttttttcccccttcaaactgaagtgcgagtgtgcgtgtgttccacaaaatagcaagtatttatagtgttgtaattacatttccttgagaaatattttcttgta

SEQ ID NO: 441946 - DNA, 120 bp, Artificial Sequence
  ENSG00000154122_46 (sequence is synthesized)
tttaaaaatctttctacttcagtaactcccagcagaacagtgcccaggacagcatgtgccggttagtaccagctttgcaggtgagctgacttctaaacttaggacgacgtcttcatcaat

SEQ ID NO: 441947 - DNA, 120 bp, Artificial Sequence
  ENSG00000154122_47 (sequence is synthesized)
caaactagtgcacagtccagaaaaaggggtcctttatcttctaagttctgctcctcacctttctttggaaccaaaattgcagtggagtgtgaggaagagctttgaaagacgtggagtgtt

SEQ ID NO: 441948 - DNA, 120 bp, Artificial Sequence
  ENSG00000154122_48 (sequence is synthesized)
gagatgtctgcattgcacattcagccggttcaaagccagcagctcctgcctgcattctgtagacatcgccctcacacacagtcctctgatggctctcatataaagcactcaaaccgtagg

SEQ ID NO: 441949 - DNA, 120 bp, Artificial Sequence
  ENSG00000154122_49 (sequence is synthesized)
aaagcatgtttttgagcaacgtgtctgggatactcctctgtgtggttattttgaatctctatttctgtcattgaagcagcaaaaaacatcatgtgactcatcaactgatctaatcacact

SEQ ID NO: 441950 - DNA, 120 bp, Artificial Sequence
  ENSG00000154122_50 (sequence is synthesized)
taaaacaggatgtagagaaaaatctgatgagaaacgtaaaagggcctgttgcctgcccttttaaaggcaaaatgtctaaaatcatgcaaatgttcaaaatgagagaaattgcattgtgga

SEQ ID NO: 441951 - DNA, 120 bp, Artificial Sequence
  ENSG00000154122_51 (sequence is synthesized)
atcaaaataacccaaactccactcagaaaagtcacaaatatatagtatactatctgatctcaaaagggaaaaacgagatgataagaccttaagtttagactttattttcttctcaagagt

SEQ ID NO: 441952 - DNA, 120 bp, Artificial Sequence
  ENSG00000154122_52 (sequence is synthesized)
ggacattaaatctattaacttgcaactttctgctgggaagagcatcaaaggtgggcctcctaaatcatttttgaaaaacctctgtcaagtccaagtggttccaggagaattatagccagt

SEQ ID NO: 441953 - DNA, 120 bp, Artificial Sequence
  ENSG00000154122_53 (sequence is synthesized)
atcttttaaaatatttcattttagtgataatgtttttctctgcttcatttgcaatcaaccaggatctctaaaagactgcataagatatatgcacttttataggtggctgtcagctacaca

SEQ ID NO: 441954 - DNA, 120 bp, Artificial Sequence
  ENSG00000154122_54 (sequence is synthesized)
tagattcagcaaattttttttatatagtacctgtttttaagttaggctacataacttaaagtgcactttactaacaagacttgacattagcgtctacaatatgtatatgtaaacaaaagc

SEQ ID NO: 441955 - DNA, 120 bp, Artificial Sequence
  ENSG00000154122_55 (sequence is synthesized)
acacaagaactaggcaccctttctctctccaagagtttaagtggtttccttaggttaaagaaggggacagaccagctaaaaatggttgtaccactcactgtacaacctcatggaaattct

SEQ ID NO: 441956 - DNA, 120 bp, Artificial Sequence
  ENSG00000154122_56 (sequence is synthesized)
cactataagatttagaggcaatgttccctagctataagccagggcaagaaatggcgcctctggagttggggaacattaggggaacattacaaccgggtagatgctggttccctgaagtgt

SEQ ID NO: 441957 - DNA, 120 bp, Artificial Sequence
  ENSG00000154122_57 (sequence is synthesized)
ggggccatgaacatgcagggacccacggtttgaatgaaacagctactgaaagctaagttcaaaccacccttgcgtaacaaaggagtacagggtacacatcaacaccaatcacccagcacc

SEQ ID NO: 441958 - DNA, 120 bp, Artificial Sequence
  ENSG00000154122_58 (sequence is synthesized)
ccacagcgatggtcatgtcaccgtgcagcaggtcccttaccccagggctgccacatccacaagccttgcagtggcaaatacgctgctccttggatttaatgagatattttggttgcttaa

SEQ ID NO: 441959 - DNA, 120 bp, Artificial Sequence
  ENSG00000154122_59 (sequence is synthesized)
tgatgtactgatcagggaactgtctaaagctagtagggccaaggagttaatcaaagggcttcgggaaagtggacaagagccacacacgtgattctgttccatgccgacactcattcattt

SEQ ID NO: 441960 - DNA, 120 bp, Artificial Sequence
  ENSG00000154122_60 (sequence is synthesized)
aagaagtgtattcaagctggaggcttccatatcactcacgcttcttggcctcaccttgctcatctgtccaatgggaggcttgagccattattgctaaggccccttcctgatctaacattc

SEQ ID NO: 441961 - DNA, 120 bp, Artificial Sequence
  ENSG00000154122_61 (sequence is synthesized)
tgtttatgatctaggatttagaacgtcgtatgagatcctacaatggaagaataaaatcacctcattcttcatttcagatctgaacattagcagtgatctagatttttttttttttaaaca

SEQ ID NO: 441962 - DNA, 120 bp, Artificial Sequence
  ENSG00000154122_62 (sequence is synthesized)
aaattaagtgtgcttagagtcattcctctacatgggctgtggctgtcagcccataggtttgtcagtttcacatcaaaactgtgggtataaactgttgaaaccaatcacattaaaatattt

SEQ ID NO: 441963 - DNA, 120 bp, Artificial Sequence
  ENSG00000154122_63 (sequence is synthesized)
gggaggctgaggcaggaggatcgcttaagcacaggagttggaatccagcctgagcaacagagcaaaaccccgtctctaaaatacaaataaaatatttgtgtagtttttgattaaaattga

SEQ ID NO: 441964 - DNA, 120 bp, Artificial Sequence
  ENSG00000154122_64 (sequence is synthesized)
atacaaataaaatatttgtgtagtttttgattaaaattgactacagcggtcagtataaaatacatgtcgcttttaaggaagtgctctttatgtatctaacagatggaagtttttgcattg

SEQ ID NO: 441965 - DNA, 120 bp, Artificial Sequence
  ENSG00000154122_65 (sequence is synthesized)
gtaagagcatttatatatgctttgtttcagggtttatggatttgtattcatatattgtcaaataggtttcatactctaattttactttaagtaaagcttaaacacttggcatacaactga

SEQ ID NO: 441966 - DNA, 120 bp, Artificial Sequence
  ENSG00000154122_66 (sequence is synthesized)
gttctgctggcatttcgtcgggatgaagacaacacagccaggaaatccagaggttggccttgataacttagagttctaacaagggcagcactgatagtcctggccttgaaccggggcatt

SEQ ID NO: 441967 - DNA, 120 bp, Artificial Sequence
  ENSG00000154122_67 (sequence is synthesized)
cagggctggagttctgctgctgctttcttggtggggataaagccttcagggcatgacttccgtcgtggctttaaaacagctttgcttacctggcataaaaattgagtggtacctctactg

SEQ ID NO: 441968 - DNA, 120 bp, Artificial Sequence
  ENSG00000154122_68 (sequence is synthesized)
aaaccagttacataaaacactgtgaatgacacttcataaacccattgtgtaccttaaaattgttactgattgtttaagacgcgtgactgtcagtggtgaataaaggaaccaaaagattaa

SEQ ID NO: 441969 - DNA, 120 bp, Artificial Sequence
  ENSG00000154122_69 (sequence is synthesized)
ccactcttggaggagccacatctgctctgccgtgggggtcccctgggtacagacatggctaatggaccagggcctctgtggtcagaagagagtcaagcaagcaggtggcagatctgggac

SEQ ID NO: 441970 - DNA, 120 bp, Artificial Sequence
  ENSG00000154122_70 (sequence is synthesized)
cagcatgcccaccacccagtcaggccggttgtccctctttcgtaactctccaaggattgtgccacacctgatctgctcatttcacctgcttacactttttcctcacaaccctgtttgatg

SEQ ID NO: 441971 - DNA, 120 bp, Artificial Sequence
  ENSG00000154122_71 (sequence is synthesized)
aggctctctctgcctcttctctctgtttggtttttgtaaaggggcaagttgctattttaaagggggaaatcttattttccacaatgtaatgtgatgctggattaattagcaatctcttca

SEQ ID NO: 441972 - DNA, 120 bp, Artificial Sequence
  ENSG00000154122_72 (sequence is synthesized)
atacactttcttcttcaaatgtgaacgattgttattcaaggaggcccttgagtctaggaataaaggacccacttcaggcatttcttgggacttctcaaatgctgcagaaaggaagaggtt

SEQ ID NO: 441973 - DNA, 120 bp, Artificial Sequence
  ENSG00000154122_73 (sequence is synthesized)
gcctttaattggaatagtacacttgtcttgctgaaaaatttctagcccactttttaaacatcgaaagtcaactttacaaccacccctgtctcttttccaaatttaatccgcgttacttca

SEQ ID NO: 441974 - DNA, 120 bp, Artificial Sequence
  ENSG00000154122_74 (sequence is synthesized)
ggtgaggccgccgaccgccactgacgaatctagctttggcaatttcttattccttttcattgatttaaatgtatttattgagataagtggtttcttcactaattatcaaatgtttcttat

SEQ ID NO: 441975 - DNA, 120 bp, Artificial Sequence
  ENSG00000154122_75 (sequence is synthesized)
gaaattttcaggggatagaaggaaagcgcttgtgctcctagcttaagacaataatgtgttttttctggggagctgtagttttgtgtctctgattcccaaagtgaaaagcagtgatttcat

SEQ ID NO: 441976 - DNA, 120 bp, Artificial Sequence
  ENSG00000154122_76 (sequence is synthesized)
tagtaggcgattacatctaggaataacatttggtaaggccaataaaatagcaggtgctttcgttagagatatgtgtgcgtcattgtactgggtcattaaatcttaagaataaaaatagaa

SEQ ID NO: 441977 - DNA, 120 bp, Artificial Sequence
  ENSG00000154122_77 (sequence is synthesized)
aaaacagctttcaggaggcagttacaaatcggagatttgtgtgactccttcgtttgacgaatatctgtttggatttgtctttctgtgctcaaaacttttgaataattgcaactctgtaag

SEQ ID NO: 441978 - DNA, 120 bp, Artificial Sequence
  ENSG00000154122_78 (sequence is synthesized)
ctctctaatatgtagcccacattgtaagctactttttactttgaattttgttggtgataggtgttcacaatatggcatattctctagagacctttgtttaccgcgccagccaatgtcctt

SEQ ID NO: 441979 - DNA, 120 bp, Artificial Sequence
  ENSG00000154122_79 (sequence is synthesized)
tgataaaatcttgtctcttccgttgccactgtgccctgccagtgcctcacaagggtaccccaagggcttcttccctgctccaccctgtacccgcccaccttcccttctttctatagtaac

SEQ ID NO: 441980 - DNA, 120 bp, Artificial Sequence
  ENSG00000154122_80 (sequence is synthesized)
tggtgactttgaacacttcctacaatccgtagaaaagcttttagacacgaatttactacattgcccattttagatgagtcaaatgctgtatattcactcgagcctttcctattttaaggc

SEQ ID NO: 441981 - DNA, 120 bp, Artificial Sequence
  ENSG00000154122_81 (sequence is synthesized)
ttaccttcttggagctgccccaaaggttgtcagaaagcccaggctgctcatctgaactggtgtgtgtttgtgtgcatgtaagaatcatatcgagataactagtggaaataagagtagtct

SEQ ID NO: 441982 - DNA, 120 bp, Artificial Sequence
  ENSG00000154122_82 (sequence is synthesized)
gtgtcatcattaaaccacctgacgcataccacaatattgcctcccttttgccttgatttaatgaaaggctgacataactaggtttgattttagtataagaaaaagaatctcctgaagtca

SEQ ID NO: 441983 - DNA, 120 bp, Artificial Sequence
  ENSG00000154122_83 (sequence is synthesized)
caaaagggaggttaaacataagagacaactatccagatggtttatcctcgcaggtctaataattctaactcatccttaaaacattgctaacctgattatcatggctgatgtaagcaaagt

SEQ ID NO: 441984 - DNA, 120 bp, Artificial Sequence
  ENSG00000154122_84 (sequence is synthesized)
acttaatggagttgtgtttttgcagagaagcaaaatgttatcaacaagtgtcatttgaggtccttttcccaaaaacaccagagtatgaggttataggctgcctggagggcggagatattt

SEQ ID NO: 441985 - DNA, 120 bp, Artificial Sequence
  ENSG00000154122_85 (sequence is synthesized)
ggagaagaaattgataggttttccaaaccttgctttgccttctggtgtcagatgataattgtttttgcaaaatgctgcagggtgagagagagtgagactgacttactcttttcagcatta

SEQ ID NO: 441986 - DNA, 120 bp, Artificial Sequence
  ENSG00000154122_86 (sequence is synthesized)
aactggagggaaagaattacagtgggagctgaagagtgacctggtatgtgtgggtgatgaatagaagaacactttaccccaattcttctgaagcacagtaaagaggaggagaaatgaacc

SEQ ID NO: 441987 - DNA, 120 bp, Artificial Sequence
  ENSG00000154122_87 (sequence is synthesized)
agtttgcaaaagtgggtctacgttagctgaaaatatgcagcccttgagtttatatggagttctagacagatggacacatgtaggtactgccgctgagtgggcaggtgtattacaccttgc

SEQ ID NO: 441988 - DNA, 120 bp, Artificial Sequence
  ENSG00000154122_88 (sequence is synthesized)
tgggagtgaatgatggcttatttgtcagcgatttacaaatcctaagatggagaggtagcacgggagtacaaaggccaatgcagcctcaggttcacgtgcttttgagatgattaagaaatg

SEQ ID NO: 441989 - DNA, 120 bp, Artificial Sequence
  ENSG00000154122_89 (sequence is synthesized)
caaagttaggctgggcaaggtggctcatgcctatgatcgtagcacttggggagatcaatcctagcactttgggaggcttaggctagaggattgcttaggctaaggtgggaggatcgcttg

SEQ ID NO: 441990 - DNA, 86 bp, Artificial Sequence
  ENSG00000154122_90 (sequence is synthesized)
caaaaccagcctgggcaacatagtgaaacctcgtctctattaaaaaaaaaaaaaggccaggtgctatgaggtggatggatcacttg

SEQ ID NO: 441991 - DNA, 81 bp, Artificial Sequence
  ENSG00000154122_91 (sequence is synthesized)
cgagaccagcctggccaacatgatgaaattctatctctactaaaaaatacaaacaaacaaaaaattagccaggcatggtat

SEQ ID NO: 441992 - DNA, 78 bp, Artificial Sequence
  ENSG00000154122_92 (sequence is synthesized)
attgaaccccaggaggcaggggttgcagtaagccaagactgtaccactgcaccctccagcctgggcgacagagcaaga

SEQ ID NO: 441993 - DNA, 120 bp, Artificial Sequence
  ENSG00000154122_93 (sequence is synthesized)
gacttcggggagcaggtaagccccggccccgcgccccacgcccgctcgccctgccttggccttacacgcccggacacgggggcggaggggagtcacctgctccgagtccctctttatcct

SEQ ID NO: 441994 - DNA, 120 bp, Artificial Sequence
  ENSG00000154122_94 (sequence is synthesized)
gaaacatttggtcgggtgtgcagcttgtcaagggtgacttttccagcaccccattccctccctccctcccctcaattattcagcagacttttccagccctctctggaaaatgttaaaaag

SEQ ID NO: 441995 - DNA, 120 bp, Artificial Sequence
  ENSG00000154122_95 (sequence is synthesized)
actggatggtgtgaagcttcacctatggaagggtttttagtgcacggcagtattatgtaatttgcgattatgtaaacctcagctctaattaaaatgtagtttctagtagcttaagtgctg

SEQ ID NO: 441996 - DNA, 120 bp, Artificial Sequence
  ENSG00000154122_96 (sequence is synthesized)
ggtttttatttacccatggctggtggtaatggtgacggtggggagattctgttttataatgcgtccaagttgatttcccaggtacttccatttttaaacatttgtttcgtagtccaggta

SEQ ID NO: 441997 - DNA, 120 bp, Artificial Sequence
  ENSG00000154122_97 (sequence is synthesized)
tctttctttctttcttttttttttttcatggaccactaaagaaggggagcacatttttgtttggggtcgccttctcgtccttgtttcttttcacgttttctccatgtggcgtcattgaaa

SEQ ID NO: 441998 - DNA, 120 bp, Artificial Sequence
  ENSG00000154122_98 (sequence is synthesized)
ttcttttcacgttttctccatgtggcgtcattgaaaatctagcgctgcaagctctccagcgatggggcattggcaccctgcactttgcatgtggggaccgttttggcagggccaccagcg

SEQ ID NO: 441999 - DNA, 120 bp, Artificial Sequence
  ENSG00000154122_99 (sequence is synthesized)
ggatgcagctgcgttctaaggccggggagaggatttggtgatggggaggcagtgacatgccaccctgatgggcaggtgtcccaagtggccagagcgtgtgacgagcggcactcctgtatt

SEQ ID NO: 442000 - DNA, 120 bp, Artificial Sequence
  ENSG00000154124_0 (sequence is synthesized)
ggaaaccgccccggcggctgagaggctgcggccactgcctggcaccccgacgggaggggctccggatcgttcggagccggctgaaccccttcggccgcgagcgaccgcatgagtcggggg

SEQ ID NO: 442001 - DNA, 120 bp, Artificial Sequence
  ENSG00000154124_1 (sequence is synthesized)
ctgaaccccttcggccgcgagcgaccgcatgagtcgggggactatgccccagcccgaagcgtggccaggcgcgagctgcgccgagacgccggcgcgggaggcggcggccacggcgcggga

SEQ ID NO: 442002 - DNA, 120 bp, Artificial Sequence
  ENSG00000154124_2 (sequence is synthesized)
atgcagtgcccggccgagcatgaggaggacatgtaccgtgctgcagatgaaatagaaaaggagaaagaattgcttatacatgaaagaggggcatcagaaccgagattaagcgtagctcct

SEQ ID NO: 442003 - DNA, 120 bp, Artificial Sequence
  ENSG00000154124_3 (sequence is synthesized)
gaaatggatatcatggactactgcaaaaaagaatggagaggaaatacacagaaagcaacgtgtatgaaaatgggctatgaagaggtttctcagaagttcacctccatacggcgagtccgt

SEQ ID NO: 442004 - DNA, 120 bp, Artificial Sequence
  ENSG00000154124_4 (sequence is synthesized)
ggtgataattactgtgcactgagggccacgctgttccaggccatgagccaggctgtggggctgccgccctggctgcaggacccggagctcatgctgttaccagaaaaactcataagcaaa

SEQ ID NO: 442005 - DNA, 120 bp, Artificial Sequence
  ENSG00000154124_5 (sequence is synthesized)
tacaactggatcaagcaatggaaacttggactgaaatttgatgggaagaatgaggacctggttgataaaattaaagagtcccttactctgctgaggaagaagtgggcaggcttggctgaa

SEQ ID NO: 442006 - DNA, 120 bp, Artificial Sequence
  ENSG00000154124_6 (sequence is synthesized)
atgagaactgctgaagcaagacagatagcttgtgatgaactattcacaaatgaggcggaggaatatagcctctatgaagctgtaaaatttctaatgctaaacagagccattgaactatat

SEQ ID NO: 442007 - DNA, 120 bp, Artificial Sequence
  ENSG00000154124_7 (sequence is synthesized)
aatgataaagagaaaggaaaggaagtaccatttttctctgtgcttctgtttgctcgggacacatcaaatgacccaggacagcttctgaggaaccacctcaaccaggtgggacacactggt

SEQ ID NO: 442008 - DNA, 120 bp, Artificial Sequence
  ENSG00000154124_8 (sequence is synthesized)
ggtcttgaacaggttgaaatgttccttcttgcctatgctgtgcgccacaccatccaggtgtaccggctctccaagtacaacacggaagaattcatcacagtctaccccaccgacccaccc

SEQ ID NO: 442009 - DNA, 120 bp, Artificial Sequence
  ENSG00000154124_9 (sequence is synthesized)
aaggactggccagtggtaacgctcattgctgaggacgatcggcactataacatccccgtcagagtgtgtgaggagaccagtctatgagagacgcatgctcctgacagcctggcgacgtgg

SEQ ID NO: 442010 - DNA, 120 bp, Artificial Sequence
  ENSG00000154124_10 (sequence is synthesized)
cgaagatgcacaggtggctcctgggcttgggctgcaggtttgggggtctctaagaacaatctctgagaagaacccttgggcccctgggagccaagttggacaggatgtcctgaagactag

SEQ ID NO: 442011 - DNA, 120 bp, Artificial Sequence
  ENSG00000154124_11 (sequence is synthesized)
cttttgataagagaaattaaccaagtctttcccctcatctatgatgcaatatatttcagtgggggccttcagagcacacctgttggacggtgcaaaccatatcttctccagaaggcaaat

SEQ ID NO: 442012 - DNA, 120 bp, Artificial Sequence
  ENSG00000154124_12 (sequence is synthesized)
acttttgtatcagaggaaactcagttttggagaggaatatgttctttatgtctcaaatcaaaactctctctaatggtaaactggcttctaatttttttaagtacagtatttttttttccc

SEQ ID NO: 442013 - DNA, 120 bp, Artificial Sequence
  ENSG00000154124_13 (sequence is synthesized)
ctttagtagtaacgggtttctatagatcttcctatacagtctgctttaactcaggaccttgagattatgagactgacgtgctgcccactgcactgagggggcttctaacagtctgcttta

SEQ ID NO: 442014 - DNA, 120 bp, Artificial Sequence
  ENSG00000154124_14 (sequence is synthesized)
agtggtataattctgggatagatctgttactggcatagtcatgacaacctctggtaatcttaccttctcctttttatgaagggaagagcaatggtttggacttacatcttaattaaggct

SEQ ID NO: 442015 - DNA, 120 bp, Artificial Sequence
  ENSG00000154124_15 (sequence is synthesized)
attttaagcagattgttttgcaacagattaagaattgggtcccaaagtgggttatttcaaggcatttttgaagactggaggagcgtaggagggagtggtgagggaacctagaacttcttg

SEQ ID NO: 442016 - DNA, 120 bp, Artificial Sequence
  ENSG00000154124_16 (sequence is synthesized)
ctccttgtgactatgacagatgtctgatgcccccagcgcactggagtctggggcttggtgcaggtggtgccccatcagtgtggacagacactacttgcctttgtggtttagtgttggaag

SEQ ID NO: 442017 - DNA, 120 bp, Artificial Sequence
  ENSG00000154124_17 (sequence is synthesized)
ctttaattattctacagttccatagattcacaattttatagccaaacagtttgtatccacctgctttcagaggaggaaccaaaggccaaattactttgaggtagggcttagctggacctg

SEQ ID NO: 442018 - DNA, 120 bp, Artificial Sequence
  ENSG00000154124_18 (sequence is synthesized)
ggttttcctatgctcttttcatgctgtgttggagggtgtgtccactgccagatctgtgtaacccgtctgggtcaggggatgagtgacagcaaaccatcttaaaatttttcatgagtacat

SEQ ID NO: 442019 - DNA, 120 bp, Artificial Sequence
  ENSG00000154124_19 (sequence is synthesized)
ttaagcggaagcatacgggaatatgagtgcaaaagtgtggctgagccgcgtatgcccttgattggttttgggaagcctgagggaggcagccttcctggctatgagccatcgcctgcccaa

SEQ ID NO: 442020 - DNA, 120 bp, Artificial Sequence
  ENSG00000154124_20 (sequence is synthesized)
tcaggctaagggtggtgactggggtggtgaaggggcagctctgctgagcatggtctgccttatggcctgaattgtcctcaaggggtgtggactgcagatggtgttcacatgaaccggaga

SEQ ID NO: 442021 - DNA, 120 bp, Artificial Sequence
  ENSG00000154124_21 (sequence is synthesized)
catcactctttaggattctactggcagcccctgaattggctcaacgtttgtggaggtggtatttccctgaagtactgagctttgttttataataattaaaatccttatttggtccaattt

SEQ ID NO: 442022 - DNA, 120 bp, Artificial Sequence
  ENSG00000154124_22 (sequence is synthesized)
aatatagtttagaagctattttttttgaggcaaaccgtttttgaaaatgtaaattttgtttttaattaaaaataaagtcttagttaagaaaactcaggatgcacaaaactattcagactg

SEQ ID NO: 442023 - DNA, 120 bp, Artificial Sequence
  ENSG00000154124_23 (sequence is synthesized)
ttactttagctttctcccattacctcatcagtaatattcaccacattttgctaaatatttattgattagagtgttgaaatcaaattctgctctaaatgtgtgtgaatatgttggagaggc

SEQ ID NO: 442024 - DNA, 120 bp, Artificial Sequence
  ENSG00000154124_24 (sequence is synthesized)
tttgtgttcttcactgtgaaatgcaattgtgccttgaataagaaggtacctagaagccaaattaaagtaataatgacttcttattggctttgatttttcattgcagtatatgggattgta

SEQ ID NO: 442025 - DNA, 120 bp, Artificial Sequence
  ENSG00000154124_25 (sequence is synthesized)
cagcaggaaatgcttatcattaatttctgatgttttttaaagcacaactcgaaacatttcgatcatacatacatagcagtagagatctgtgcccttcaggtacattgaatctgaccatca

SEQ ID NO: 442026 - DNA, 120 bp, Artificial Sequence
  ENSG00000154124_26 (sequence is synthesized)
gtttatatatgtcattgaattttaagaatactcatgttaataatagtcatctatccttgcattttgaaactgttctaatcttagtgaacttgaattggatttctgggtaaaagaatgtgt

SEQ ID NO: 442027 - DNA, 120 bp, Artificial Sequence
  ENSG00000154124_27 (sequence is synthesized)
ttcttttatgttgcttatgtccgaaggccttgtcagaatctgtcagactcttgtttaggtttagtgtgatcatggcgtcagagaagcaaagctttcaaataaatagtacttcaggaaata

SEQ ID NO: 442028 - DNA, 120 bp, Artificial Sequence
  ENSG00000154124_28 (sequence is synthesized)
gaaatgattgaccaactttaaaaataatttttttttaattgcaatatgcagcttcagttgcccagaatcttagttccgtttctcattcttggtcttgagctggtcaggtgacatcagcag

SEQ ID NO: 442029 - DNA, 120 bp, Artificial Sequence
  ENSG00000154124_29 (sequence is synthesized)
attagaagttgaatggagattaagtggattcaggaggatgttccacttagagcagtcttcaaaatgataaggtgttctagaagaaaggaatgtagtaggaactatactatgcctaacttt

SEQ ID NO: 442030 - DNA, 120 bp, Artificial Sequence
  ENSG00000154124_30 (sequence is synthesized)
ctatcccagagtgtcttgcaagagtttaggagttttggaccctgtgtattggcagaaaagttatctccatcttaagcaggcatgacttttatacctgtgagctcatttaaggtgcattta

SEQ ID NO: 442031 - DNA, 120 bp, Artificial Sequence
  ENSG00000154124_31 (sequence is synthesized)
aacctaaaataatttccctgtattatgcttcatgggattaacactgcttttccagaacattttcagattcccctccttacatcctgagctccttctgtatatacatctgttgattttatc

SEQ ID NO: 442032 - DNA, 120 bp, Artificial Sequence
  ENSG00000154124_32 (sequence is synthesized)
catccacaaggaacaatgatagtcacattagagaacaagaaaccagtaatacatggtctctaactgatgattcgggcctggatttgattgaaagtgtttgcagttcctcttccgtagaat

SEQ ID NO: 442033 - DNA, 120 bp, Artificial Sequence
  ENSG00000154124_33 (sequence is synthesized)
tttctttatttagcgatttacacttttgttactctattatatattcagttagtgtctgataagattttctttgcttaaggagaacggacattgccttggtatgtttttttttttttttcc

SEQ ID NO: 442034 - DNA, 120 bp, Artificial Sequence
  ENSG00000154124_34 (sequence is synthesized)
ctccacttttggagcttatcaggtaaaaatctcaagccacatgaattgttaacacctctgttgggaaaagcctttgtgagtttttatgtacttggtctttgtttttgttattcatcctgt

SEQ ID NO: 442035 - DNA, 120 bp, Artificial Sequence
  ENSG00000154124_35 (sequence is synthesized)
gtcctccctcttcccgatgtgctgttttacctaggagttagtctgctttctgaggatcttttagagagaggctgtgaagtgctgaatcacctttaatgatacagcacttctgccatctca

SEQ ID NO: 442036 - DNA, 120 bp, Artificial Sequence
  ENSG00000154124_36 (sequence is synthesized)
gcatctacataggacttacatagacttcctgaatgtgtcttcttcagatactaaagtacagttggatcattttcttatctccttttcttaagcagtactttgcaggtactcccctttgaa

SEQ ID NO: 442037 - DNA, 120 bp, Artificial Sequence
  ENSG00000154124_37 (sequence is synthesized)
agccagaagcataaaccattggggaatcttaacttgtagacatgcagtaaaagaaatgcatttatgtaagatctgtgagtacttaaaaagaaagccctcagtgtgtgtgaagtgaatgtg

SEQ ID NO: 442038 - DNA, 120 bp, Artificial Sequence
  ENSG00000154124_38 (sequence is synthesized)
aaatgtgtgtgaaatacatagaattcccaaatagtttagcaaaggcagggcgcaatatcaagtaatttaaaaatggtccaaggaactgtaagaaggaggaactaattctagaataaatgt

SEQ ID NO: 442039 - DNA, 120 bp, Artificial Sequence
  ENSG00000154124_39 (sequence is synthesized)
taaaatgccattcaagaacaaaaccacagatgccatacagacctcctgtgcttaagttatagaagaataaaaatctgaatgaatggaaggccttacgtgtatacagtttacaaattccta

SEQ ID NO: 442040 - DNA, 120 bp, Artificial Sequence
  ENSG00000154124_40 (sequence is synthesized)
tttctaaaatttaagtcccttatttaacagaagtatgtattttaatgcttaactgtctcgggaaacctcatttgtgacatcatctaaggggatgggaagactagggagccagtgccacgt

SEQ ID NO: 442041 - DNA, 120 bp, Artificial Sequence
  ENSG00000154124_41 (sequence is synthesized)
tgaacagaacagtggtttagtgaatgtgtgaggaaagacatgggcaactgattattaatgtttttgtaattcagtttataacttggaaccaatgaaaagcaacaaaactaaactggtttg

SEQ ID NO: 442042 - DNA, 120 bp, Artificial Sequence
  ENSG00000154124_42 (sequence is synthesized)
acagcctgccacttctggcatttcctgtaagtcactagcagtaggtgtgaggtgggcttgcccatgaccaggaggggtgtgtgtgtgtgtgtgcatgtgtgtatatgcgtgttggtctgc

SEQ ID NO: 442043 - DNA, 120 bp, Artificial Sequence
  ENSG00000154124_43 (sequence is synthesized)
agtcacagcatacctttatgtgcatgtgtcctcgcagcttgggactcagcagtattctgggagggtggaggtgaactgtcccatgtattgtattatatattttttgagatggggtcttgc

SEQ ID NO: 442044 - DNA, 120 bp, Artificial Sequence
  ENSG00000154124_44 (sequence is synthesized)
acaggcgtgaactaccgcgcctggccccatgtattgtatttttttcaggttatattgaaatctactaccaggaatgtcggaatgggttttggtatgtataatggaaatagatagagtggt

SEQ ID NO: 442045 - DNA, 120 bp, Artificial Sequence
  ENSG00000154124_45 (sequence is synthesized)
taagtctagaaacacatacattaattgtattgaaatgttatatcaatacatcatttatgatgtgtgtgtggtcccagacctcatggccaccagtttgtttaagcattgtgaatgcttttt

SEQ ID NO: 442046 - DNA, 120 bp, Artificial Sequence
  ENSG00000154124_46 (sequence is synthesized)
aatagcattcattagcattaatggaggaggacactgtgttttctcaattaatctcattgatttgtttggtataagtttgggtcagaaatgaaactgccaaaacatcgatcagtacaagga

SEQ ID NO: 442047 - DNA, 120 bp, Artificial Sequence
  ENSG00000154124_47 (sequence is synthesized)
agggacacagggcttaaaatgtccacagtcttggcagtggacttggcagttctcccagtaagcagaagtacttgagcttaattctgaacttcaaagtaatattttatacttaattttagg

SEQ ID NO: 442048 - DNA, 120 bp, Artificial Sequence
  ENSG00000154124_48 (sequence is synthesized)
agttttcatttacatattgaaaaatgccttgactgtattcacataaatggtgctaaaacattgtaccccttataagaactgcagcaatccacagtaatgttggttacttctgagtatttg

SEQ ID NO: 442049 - DNA, 120 bp, Artificial Sequence
  ENSG00000154124_49 (sequence is synthesized)
ataaaggaacaaagtcaaaatgaatgtatttaataagcttctttctcatttccattgtttttataaaaatattttggtattgttgcctgcattttagccacttctaactttttgtattat

SEQ ID NO: 442050 - DNA, 120 bp, Artificial Sequence
  ENSG00000154124_50 (sequence is synthesized)
gaatttggagaggataacaagccaactttagaccctctgccagtggcgatggtgtttttcttccatgggtaagccattgtgaatggaggctggtggagcagcacactgtgtgaacctggc

SEQ ID NO: 442051 - DNA, 120 bp, Artificial Sequence
  ENSG00000154124_51 (sequence is synthesized)
agcgctcatcttggcttgtttagcagtgcctctgtttacaccataagatgttccgcatgtgtccaaaatttcgcctgctctgaaaaacatgcccccgaggctctgtgcagtttggggcct

SEQ ID NO: 442052 - DNA, 120 bp, Artificial Sequence
  ENSG00000154124_52 (sequence is synthesized)
tggttcccacctgcagatgcggtcagttgcctggctcctggggccagagtttcctctgttacttgttgagtctcttgtcttcactgtcagaagctgaactgacttgggggctttgctgtt

SEQ ID NO: 442053 - DNA, 120 bp, Artificial Sequence
  ENSG00000154124_53 (sequence is synthesized)
gatccactttagcaaaccctgctgcagaggactgtaaaaacaaataactaaaaataaacttagaaaatacaactcagaagcctggctctgttgctgtggtcaaatgcttgcctttgagga

SEQ ID NO: 442054 - DNA, 120 bp, Artificial Sequence
  ENSG00000154124_54 (sequence is synthesized)
ctttggcagattgtgctattacattgggctctaactttctggcacccgcaaggcagacctatgatgtccacatggctgactcttgacccctggccattgtgagcagaggaatcaagggtt

SEQ ID NO: 442055 - DNA, 120 bp, Artificial Sequence
  ENSG00000154124_55 (sequence is synthesized)
tagggaggcagtattgggcagtgtggaagagttagatgagatgaagcagttagcacagtgcttaacccatactaagtgcccccaaccctgccagccaaattaggtgcatagttttcagct

SEQ ID NO: 442056 - DNA, 120 bp, Artificial Sequence
  ENSG00000154124_56 (sequence is synthesized)
tgggtctggattcaacagcattcccgctgcccactaaaagggtgggcttggacagttcctgaacctccctaaatctgtttcttcatctttaccacacacagtctgtctcagtggtggtgt

SEQ ID NO: 442057 - DNA, 120 bp, Artificial Sequence
  ENSG00000154124_57 (sequence is synthesized)
ggattaagtgaggtgctagcacttattaggggaagatcctccagacctgcaaagcagggctgcagccccaattctgacccagccctgctgtgtgtttgccgcaaagaggtttggtgtgtg

SEQ ID NO: 442058 - DNA, 120 bp, Artificial Sequence
  ENSG00000154124_58 (sequence is synthesized)
cgagacatttctttatgaaccatttacactgctggaaatgtacccactaatgtgatggcaagaacttcaacaaattgcttatgaatcaggctctcaatggaagaagttaatcctctgaag

SEQ ID NO: 442059 - DNA, 120 bp, Artificial Sequence
  ENSG00000154124_59 (sequence is synthesized)
agggggaagactggactttcagaagtatgttggggatagagaatgaagtttgagtcagcagagctctgccttcctgtttgtcaaagaactagagtctgggagtcttgcaagatggagctg

SEQ ID NO: 442060 - DNA, 120 bp, Artificial Sequence
  ENSG00000154124_60 (sequence is synthesized)
ggcttctgaagaacccagtgggtaggtactgggcatccattagacggcagtgctaagtcggtcatgtgcagcagaaagacctccccactgtgaacaacaaaccactttcctcctccagtg

SEQ ID NO: 442061 - DNA, 120 bp, Artificial Sequence
  ENSG00000154124_61 (sequence is synthesized)
gcccattcatttggattgatacactttttcagtgtcagaaatgcactttctccctctacttgtctgaattacgatgctctgctcaactctgtggacagtgtttcttgaatttccttttcc

SEQ ID NO: 442062 - DNA, 120 bp, Artificial Sequence
  ENSG00000154124_62 (sequence is synthesized)
accgccttttcccactcaagaaagtggagagaaaaacagggatgcaggctgtgggtcttgtggaagccctttacaaccattaaataaagaacaccagctgcattatgtgtgtttagaacg

SEQ ID NO: 442063 - DNA, 120 bp, Artificial Sequence
  ENSG00000154124_63 (sequence is synthesized)
agaagttgtttgtacagtatttttctattgaccgcttccgtcttgcctgaaacctgggcattctttctgtagtttctctgaattttctgtctcacctcctcacccctacccttgcctttt

SEQ ID NO: 442064 - DNA, 120 bp, Artificial Sequence
  ENSG00000154124_64 (sequence is synthesized)
ccccagaagaccagtttttagtcttcactcagtggattttcaaatgctcttggctgatttttaggcaaaatggttttaaatgaattcaaactcttcccacgagggctttagtaaaatggg

SEQ ID NO: 442065 - DNA, 120 bp, Artificial Sequence
  ENSG00000154124_65 (sequence is synthesized)
aagtaccaacattatatattcttagagcagatgccatgtactagggtatcaaataatgaagtgtttgactttcttaaaaggaaaccttaacaaatatagtctttgttccaagtcatattt

SEQ ID NO: 442066 - DNA, 120 bp, Artificial Sequence
  ENSG00000154124_66 (sequence is synthesized)
aaatccgtataaccattttcataaaatatcaataaaatattcttatgtatatggtcttatctacattgattgttttgctgaagtatgttagagactgtttcctgaggcttttaaatttta

SEQ ID NO: 442067 - DNA, 120 bp, Artificial Sequence
  ENSG00000154124_67 (sequence is synthesized)
atgcaaacattctctctgcattctttacattcatatcgtttttcacacctatgaggattgttttgtttaatctcttgacaccgtcctctctcagttcttgatttccttatattcttagag

SEQ ID NO: 442068 - DNA, 120 bp, Artificial Sequence
  ENSG00000154124_68 (sequence is synthesized)
ggagagttcagatttgaagtgcatttttcatttcaaatggaaagacttaactgagaaactggctgtgcacatctttgcatgcagatggccatatgaatgtgattaagtaataagaaagac

SEQ ID NO: 442069 - DNA, 120 bp, Artificial Sequence
  ENSG00000154127_0 (sequence is synthesized)
attgcaaattcccggactgctaggcgaggagagggaagggggcggaggagacagggctactgcaggcgcagagctgggggcagccgggggcccgagtggctgaggctggtcccgcagcgg

SEQ ID NO: 442070 - DNA, 120 bp, Artificial Sequence
  ENSG00000154127_1 (sequence is synthesized)
ccgcttgccggcgttctggctcctgtggcctcaccaggaagcgtcagagtcccgacactggggaagctcggagcgccgcctccgctgccgccgcctcctgcctggctctgggtccccgag

SEQ ID NO: 442071 - DNA, 120 bp, Artificial Sequence
  ENSG00000154127_2 (sequence is synthesized)
ccccctcccctggcccagcccgactccctcctccttcccgaaccatccggctcgggctccttccctggcgatggctggccgctgagccatggctcagtacggccaccccagtccgctcgg

SEQ ID NO: 442072 - DNA, 120 bp, Artificial Sequence
  ENSG00000154127_3 (sequence is synthesized)
catggctgcgagagaggagctgtacagcaaagtcaccccccggaggaaccgccaacagcgccccggcaccatcaagcatggatcggcgctggacgtgctcctctccatggggttccccag

SEQ ID NO: 442073 - DNA, 120 bp, Artificial Sequence
  ENSG00000154127_4 (sequence is synthesized)
agcccgcgcacaaaaagccttggcatccacgggaggaagaagtgttcaggcagcatgtgactggttattctcccatgtcggtgaccccttcctggatgaccccctgccccgggagtacgt

SEQ ID NO: 442074 - DNA, 120 bp, Artificial Sequence
  ENSG00000154127_5 (sequence is synthesized)
cctctacctccgtcccaccggccccttagcacagaagctttccgacttttggcagcagtcgaagcagatctgcgggaagaacaaggcacacaacatcttcccccacatcacactctgcca

SEQ ID NO: 442075 - DNA, 120 bp, Artificial Sequence
  ENSG00000154127_6 (sequence is synthesized)
gttctttatgtgcgaggacagcaaggtggatgccctgggggaagccctgcagaccacggtcagtcgctggaaatgtaagttctcggccccgctgcccctggagctctatacgtcgtccaa

SEQ ID NO: 442076 - DNA, 120 bp, Artificial Sequence
  ENSG00000154127_7 (sequence is synthesized)
cttcatcggcctctttgtaaaggaagacagtgcggaggtcctcaagaagtttgctgctgactttgctgcagaggctgcatccaaaaccgaagtgcatgtggaacctcataagaagcagct

SEQ ID NO: 442077 - DNA, 120 bp, Artificial Sequence
  ENSG00000154127_8 (sequence is synthesized)
acatgtgaccctggcttaccacttccaagccagccacctacccaccctagagaaactggcccagaacattgacgtcaagctagggtgtgactgggtggctaccatattttctcgggatat

SEQ ID NO: 442078 - DNA, 120 bp, Artificial Sequence
  ENSG00000154127_9 (sequence is synthesized)
ccgatttgctaaccatgagacattacaggtcatctacccctataccccacaaaatgacgatgagctggagctggtccccggggacttcatcttcatgtctccaatggagcagaccagcac

SEQ ID NO: 442079 - DNA, 120 bp, Artificial Sequence
  ENSG00000154127_10 (sequence is synthesized)
cagcgagggttggatctatggcacgtccttaaccaccggctgctctggactcctgcctgagaattacattaccaaggctgatgaatgcagcacctggatatttcatggttcttattcaat

SEQ ID NO: 442080 - DNA, 120 bp, Artificial Sequence
  ENSG00000154127_11 (sequence is synthesized)
cttaaatacatcgtcatccaactctctcacgtttggggatggagtattggagaggcggccttatgaggaccaggggctcggggagacgactcctcttactatcatctgccagcccatgca

SEQ ID NO: 442081 - DNA, 120 bp, Artificial Sequence
  ENSG00000154127_12 (sequence is synthesized)
gccgctgagggtcaacagccagcccggcccccagaagcgatgcctttttgtgtgtcggcatggtgagaggatggatgttgtgtttgggaagtactggctgtcccagtgcttcgatgccaa

SEQ ID NO: 442082 - DNA, 120 bp, Artificial Sequence
  ENSG00000154127_13 (sequence is synthesized)
aggccgctacatacgcaccaacctgaacatgcctcatagtttacctcagcggagtggtggtttccgagattacgagaaagatgctcccatcactgtgtttggatgcatgcaagcaagact

SEQ ID NO: 442083 - DNA, 120 bp, Artificial Sequence
  ENSG00000154127_14 (sequence is synthesized)
agtgggtgaagccttattagagagcaataccattatcgatcatgtctattgctccccgtcccttcgctgcgttcagactgcacacaatatcttgaaaggtttacaacaagaaaatcactt

SEQ ID NO: 442084 - DNA, 120 bp, Artificial Sequence
  ENSG00000154127_15 (sequence is synthesized)
gaagatccgtgtagagcccggcttatttgagtggacaaaatgggttgctgggagcacattacctgcatggatacctccatcagagttagctgcagccaacctgagtgttgatacaaccta

SEQ ID NO: 442085 - DNA, 120 bp, Artificial Sequence
  ENSG00000154127_16 (sequence is synthesized)
cagacctcacattccaatcagcaaattagttgtttcagaatcctatgatacttatatcagtagaagtttccaagtaacaaaagaaataataagtgaatgtaaaagtaaaggaaataacat

SEQ ID NO: 442086 - DNA, 120 bp, Artificial Sequence
  ENSG00000154127_17 (sequence is synthesized)
cctgattgtggcccacgcatcttcccttgaagcgtgtacctgccaacttcagggcctgtcacctcagaactccaaggacttcgtacaaatggtccgaaagatcccatatctgggattttg

SEQ ID NO: 442087 - DNA, 120 bp, Artificial Sequence
  ENSG00000154127_18 (sequence is synthesized)
ttcctgtgaagaattaggagaaactggaatatggcagctgacagatccaccaatccttcctcttacccatggaccaactgggggcttcaactggagagagaccttgcttcaagaataaac

SEQ ID NO: 442088 - DNA, 120 bp, Artificial Sequence
  ENSG00000154127_19 (sequence is synthesized)
cacaccagtgaacaagaaggaaaggccttttggagtgtgtctttctgtgtgtttaaaaacagtgggaaaatccacaccacactctaagtggacagctcagaataatttagcatatttcct

SEQ ID NO: 442089 - DNA, 120 bp, Artificial Sequence
  ENSG00000154127_20 (sequence is synthesized)
ttcacacttaaagttcttaagatgagactgtgtaaatgagagaaagacttgattcagaggaaaaaaatgtgttctctctggactcttgcctagctcacaaggctttggagaattgtcttc

SEQ ID NO: 442090 - DNA, 120 bp, Artificial Sequence
  ENSG00000154127_21 (sequence is synthesized)
ctaaatcggggcacctgctacagaagagaatgtttcgttccctctgggtatgcacagctaaggggcctcatttctcccagagggagctgctggcccgctctaaggggtgcaagaggaagg

SEQ ID NO: 442091 - DNA, 120 bp, Artificial Sequence
  ENSG00000154127_22 (sequence is synthesized)
agtgtgcccagaccagctgggggagcattgaaaggacagcttggggatggaatttttttttttttatctccattttccagttaggtagagccaagctgaggaatccttttaagattatta

SEQ ID NO: 442092 - DNA, 120 bp, Artificial Sequence
  ENSG00000154127_23 (sequence is synthesized)
gaaaacatgccctgaagagagttgttcttaggttacacatgaaatcctaccgtcactagcccccatacaccagtgttgctggctgaagatacccgcttaaggatgctaacatttaccctg

SEQ ID NO: 442093 - DNA, 120 bp, Artificial Sequence
  ENSG00000154127_24 (sequence is synthesized)
gtactgccacattttctctagagcagctggcccttcttgctacagccctatcccccctccttgcttctgtgaaatggggagacaaagcacttttgctctccaaagcacttttggatactc

SEQ ID NO: 442094 - DNA, 120 bp, Artificial Sequence
  ENSG00000154127_25 (sequence is synthesized)
aggaggaaagataagatacatgtttgaagtattcaatcataggagcaaagaacttgcaaaatatgaagtgacttggaattaaccatgttgtagcctaacgtgctactgcatttctaaatc

SEQ ID NO: 442095 - DNA, 120 bp, Artificial Sequence
  ENSG00000154127_26 (sequence is synthesized)
atcaatatttgcttgtctttgcccctagactctagactatgttaactagttaaggatgttacattttgaaaggatgtatgttagatatattatttgcagcaagaagttcattctgtgcaa

SEQ ID NO: 442096 - DNA, 120 bp, Artificial Sequence
  ENSG00000154127_27 (sequence is synthesized)
tatggacatgtttgcaaaccataccaagggtcaggttgttgtacacttacagtacgtgtcaaccataatggaacatccacaaatgcatcaattataccagggatgtatagtaagtcaggg

SEQ ID NO: 442097 - DNA, 120 bp, Artificial Sequence
  ENSG00000154127_28 (sequence is synthesized)
ggctgcactgctacttgtgctgtcgttttgtttgtttttctatgataatttaaaatacataggtagggctactgaggaaatttggagagccacattctgtggtttctcattatacttact

SEQ ID NO: 442098 - DNA, 120 bp, Artificial Sequence
  ENSG00000154127_29 (sequence is synthesized)
tcctgcatttagagggagtttatttaaaagaaataaatgacaatcaaaccaaatcatcagttatcaatgtctgtttaattgtgtgactatctgactgttgatggccacagatgatggtct

SEQ ID NO: 442099 - DNA, 120 bp, Artificial Sequence
  ENSG00000154127_30 (sequence is synthesized)
cctatggtatagttcactctgtagaagatgtatgcaaagtgaaatgccagccctttaaagagacattagttagtgtaaaatggatctttacatgttgcagtaacattgactatgtttcaa

SEQ ID NO: 442100 - DNA, 120 bp, Artificial Sequence
  ENSG00000154127_31 (sequence is synthesized)
aactcagatgcataaaacgtaaggtatataaaaatacatctatgcttgcgtttgaaactacaacttgataacccctagaaagaagaggacatgaaaggatgctggctatatatgttaatg

SEQ ID NO: 442101 - DNA, 120 bp, Artificial Sequence
  ENSG00000154127_32 (sequence is synthesized)
acatgaaaggatgctggctatatatgttaatgagcaaaaggattatagttgttttgttttgtttttagagacagggtctcactataatgcttagactggtcttgaactcctgggctcaag

SEQ ID NO: 442102 - DNA, 120 bp, Artificial Sequence
  ENSG00000154127_33 (sequence is synthesized)
ggtgtgagccaccacacctggcccatagttgtattttttttaggtcacttagaaaaatatgtcatgtattttacattttgagaaacaaatcaatcatggtttcttctagcgttgcgcaaa

SEQ ID NO: 442103 - DNA, 120 bp, Artificial Sequence
  ENSG00000154127_34 (sequence is synthesized)
tgcgcaaacactgacccagcttctgggtatggaaataaccctgtgatgatgtgttaatataaaatgttgggagggaatattcccaataaaggtcttaagagaaaagtcacattacaagta

SEQ ID NO: 442104 - DNA, 120 bp, Artificial Sequence
  ENSG00000154127_35 (sequence is synthesized)
atgtaatggctctaccattcattcttctggtatttgtaatgaagtgaatccactgtttaatcagatccataatctttaacagattcaccacaaattttcatgggcgttgagtgctcagaa

SEQ ID NO: 442105 - DNA, 120 bp, Artificial Sequence
  ENSG00000154127_36 (sequence is synthesized)
taatgcttgaacacctcaccttgaaactgtagcagtgtgttctgggcagtatctgtaatgtatgaaatagagtctggaataggttatccactccatcttctaggttatcttagttgtatg

SEQ ID NO: 442106 - DNA, 120 bp, Artificial Sequence
  ENSG00000154127_37 (sequence is synthesized)
acgaactgataaatctgtctgactgggctacaatccattgttcttagtccaatatggacactgccttaggcaatggtctatataagcaaaaggagatagagatctgaaataattttccga

SEQ ID NO: 442107 - DNA, 120 bp, Artificial Sequence
  ENSG00000154127_38 (sequence is synthesized)
ataattcaggtggaaaacaagaaagattgtatttctctgctttcatttcaatttcattatttcaaattgcttgtcaaaatggcccaaaagatctgaattcacattaagttccccttgcac

SEQ ID NO: 442108 - DNA, 120 bp, Artificial Sequence
  ENSG00000154127_39 (sequence is synthesized)
acttacctatttaaaaaactaaacttgcactgcaactgagaaattatttgtaaatcatgtggcatctatgtataataaaagaaagagacaactatattactcaatttcatatacatccaa

SEQ ID NO: 442109 - DNA, 120 bp, Artificial Sequence
  ENSG00000154127_40 (sequence is synthesized)
aaagtataggctaatatatataacctgaagttgcagctggttctttttgatctgaagctgatgcttattaaaacaaatgatgtatggggagaggagaaggaagggcaaggaaggaattga

SEQ ID NO: 442110 - DNA, 120 bp, Artificial Sequence
  ENSG00000154127_41 (sequence is synthesized)
cagataagaagcaaatggtttcttgtacagaggaattttgttttaatgtagaaagttatttgaaataaactaggtgaaatgaaattaactaaaggttttaatctgggattgaaagcctga

SEQ ID NO: 442111 - DNA, 120 bp, Artificial Sequence
  ENSG00000154127_42 (sequence is synthesized)
aagcatttcctgcttctacaagtgtgccacatcaatccggtaatgccccagtgttattcacagacagaactttgtttcctgtgattttaaaataccgcgtctgttcctccatggaccaga

SEQ ID NO: 442112 - DNA, 120 bp, Artificial Sequence
  ENSG00000154127_43 (sequence is synthesized)
gtaattggcacattttaatgcataagctgggggtttcattttcccaggctctcttcaccatcactgcattggtagctaggagcttattgcttcaccccagtatggagttcagattacagt

SEQ ID NO: 442113 - DNA, 120 bp, Artificial Sequence
  ENSG00000154127_44 (sequence is synthesized)
gttttccattacatttagattcatagaatctgaatggctgattaaatggccatctgatggctgaaagaggggcgtatttttcactctgtagtgaaaggcttggaggagtttctacttttt

SEQ ID NO: 442114 - DNA, 120 bp, Artificial Sequence
  ENSG00000154127_45 (sequence is synthesized)
attttaattatactttaaccaaagaattattttaaagtaaccttatatttaaaagatgattttgcaaaaaataaaaaataaaaaatatgccttctggagtgatgtctgtttggtaaatca

SEQ ID NO: 442115 - DNA, 120 bp, Artificial Sequence
  ENSG00000154127_46 (sequence is synthesized)
ttgttgataatttccttgttagtggtatttggaatgcatatagattgtcttgtcattgtgcttaacattaccataagtgtgtcttttccactcaactagctgtattcgtattaaaatgaa

SEQ ID NO: 442116 - DNA, 120 bp, Artificial Sequence
  ENSG00000154127_47 (sequence is synthesized)
gtctcttatttcaattacctagtgttgttgggaactaattgaacagctacagtaaaagaagttcctatctcattgcctttgtggaaaggcttccctatgtggtaaaagaaaggcattcct

SEQ ID NO: 442117 - DNA, 120 bp, Artificial Sequence
  ENSG00000154127_48 (sequence is synthesized)
ccgtaacctaggcactctgcaagtccagtgtttaatttcaaagcagtgatgaattgctcttttgaaattactctaagtaatccatgtgttagaatacagatgaacctccgtttgatttca

SEQ ID NO: 442118 - DNA, 120 bp, Artificial Sequence
  ENSG00000154127_49 (sequence is synthesized)
cagccttcagcacaggcaactgttactgagtctgcacgaacttagataatgaggtgcagggttatttgcatttaaattgcaatccagcacacgtgtgagaaagaagaggcactagtctaa

SEQ ID NO: 442119 - DNA, 120 bp, Artificial Sequence
  ENSG00000154127_50 (sequence is synthesized)
aaggctgcattgcggggagagatgagacaggcagaggagggtggggtaaagagcgatttaacatctatttaggttaatgttcactttacaaaggtgatgggggatattttgttaggtgat

SEQ ID NO: 442120 - DNA, 120 bp, Artificial Sequence
  ENSG00000154127_51 (sequence is synthesized)
agcagaagcttttcatttttaaacatagaattaaaattggatttgcttctctttaatacttcaacatattgaatttccctaggaaagtgactagctataatgaaaattcaagcgaaaagg

SEQ ID NO: 442121 - DNA, 120 bp, Artificial Sequence
  ENSG00000154127_52 (sequence is synthesized)
gaaaaagattgtaaatgcagatgaaataacttcatttttaagtacaaataatagtaggattggtgtatgtaggtttaaaattatagtgatgactagtcgaacttaatatacaatcagttc

SEQ ID NO: 442122 - DNA, 120 bp, Artificial Sequence
  ENSG00000154127_53 (sequence is synthesized)
ttgcaaatactttacacttagctgccattacacaacaaattggaattttccagctgttcaactatcatggactctgtacaggatagatgtgtataatggaaaatatgtactgcttctttc

SEQ ID NO: 442123 - DNA, 120 bp, Artificial Sequence
  ENSG00000154127_54 (sequence is synthesized)
tttgattgccactcaagatggaaacaccatgccaaggcattttggttatacacagatcattctaaacctgttattttggagaggtgtattggtttctttctcatttataaggctattgta

SEQ ID NO: 442124 - DNA, 120 bp, Artificial Sequence
  ENSG00000154127_55 (sequence is synthesized)
tttttttttgtatgtgattcaggtgtatttatttgaagactatttgtagttataggaaaaccacacctacctgtattgccaaattctttgtaaactctccgtggcacttgtgctttcctg

SEQ ID NO: 442125 - DNA, 120 bp, Artificial Sequence
  ENSG00000154127_56 (sequence is synthesized)
gctgagagctctcccctgttgatacagctatggcaccattgtaattacagatgcacctttcaggagcatctccattaaatggttcatagatgatttaataaaaagaaacttctcagttga

SEQ ID NO: 442126 - DNA, 120 bp, Artificial Sequence
  ENSG00000154127_57 (sequence is synthesized)
caactaagggtgattttgtctcccagggtacatttggcaatgtctgaggtcattttcaattgttacagcttggagagtgctgctgacgtcttgtgggtagaggccagggatgctgcgaaa

SEQ ID NO: 442127 - DNA, 120 bp, Artificial Sequence
  ENSG00000154127_58 (sequence is synthesized)
caccccatcatgcacaggacagccaccccccccaaaaaataattattcaacccaaaatgctgttgagagaaaccctgcattaaactttgaaaatatccatcttttcccctcatttctcca

SEQ ID NO: 442128 - DNA, 120 bp, Artificial Sequence
  ENSG00000154127_59 (sequence is synthesized)
tcaatctcacccagaagctaagacacgtgattccaaaatgaagggaatagagctttgggagtcacgcagctataaaacatgctttgtatttctacacaaattatttcatcactgtaggtc

SEQ ID NO: 442129 - DNA, 120 bp, Artificial Sequence
  ENSG00000154127_60 (sequence is synthesized)
atagtgccctcttctgaaaggtggggctggtgaccaccaactggaatgttgtgagaaggacttaactaaaaggactgccctcagctgacccgcagctcctagaggaaagccgtatggtgg

SEQ ID NO: 442130 - DNA, 120 bp, Artificial Sequence
  ENSG00000154127_61 (sequence is synthesized)
cttttgtcttctttgttatgtgggaagcagaatttctcagggtacctttctatgcctttccttaagtcttcaccattgctatcatcaccaccttttaattactgacctttttcttccttt

SEQ ID NO: 442131 - DNA, 120 bp, Artificial Sequence
  ENSG00000154127_62 (sequence is synthesized)
gtttcctcaattcaaaaggaacttactacacaaccattaagtttaggacactgtgctcagccctgggttggttgaccaaagtgaatgaggtgtggtccttattgaggagcacgtgatcca

SEQ ID NO: 442132 - DNA, 120 bp, Artificial Sequence
  ENSG00000154127_63 (sequence is synthesized)
ggttaagtaattgcattatcagcctcctccagtctctggggagaggatgccaatgttaagtagcagcagacttccatctccccttgtctctgagtgaagactgcctgttttccctgccag

SEQ ID NO: 442133 - DNA, 120 bp, Artificial Sequence
  ENSG00000154127_64 (sequence is synthesized)
agtaagtcgtgaggaaacagacaaggctgcaacccagcagcagttgagcaccttgtcaaagtgtgggaatgagcgtgtgtgggtctctgtgcttccagccttttctgcaccagctgttcc

SEQ ID NO: 442134 - DNA, 78 bp, Artificial Sequence
  ENSG00000154127_65 (sequence is synthesized)
cgggaggattgcttgagtgcaggaggttgaggctgcagtgagccacaatcatcacatcactgcactccagcctgggtg

SEQ ID NO: 442135 - DNA, 120 bp, Artificial Sequence
  ENSG00000154127_66 (sequence is synthesized)
acagagtaagactctctcaaaaaaatagaaaaaagaaaaaagaaaaccatcagcaccacttctaatactttctgccaaaggggctgaaaacaagaatctgctctgtcagggatctgggtc

SEQ ID NO: 442136 - DNA, 120 bp, Artificial Sequence
  ENSG00000154127_67 (sequence is synthesized)
actaagaatgagtgggtgaagaggaaggaggaaaaaccaagacatgacaacctttagagaagcaaaaataaaactctaatgtggaaactgctgaaaatagactgcctgggctgtcagact

SEQ ID NO: 442137 - DNA, 120 bp, Artificial Sequence
  ENSG00000154127_68 (sequence is synthesized)
gcatgcaaatctgatgctaatcacatggaaattaattacaagtcctaacttccatatgtcttgatatgacccttgggggaaaacctgctgcaggtgtctactccccaccacagaggattg

SEQ ID NO: 442138 - DNA, 120 bp, Artificial Sequence
  ENSG00000154127_69 (sequence is synthesized)
attggagacttagaagtcttcactttcccatccccagccccaccttcatgtctacgttgtaaaagaggctgcagcaagagggcaataccaatatctattccaggggaagaatttggtaat

SEQ ID NO: 442139 - DNA, 120 bp, Artificial Sequence
  ENSG00000154133_0 (sequence is synthesized)
ccctcttcactgtgagctcagagcagcaggacaaagtgctcgggacaaggacatagggctgagagtagccatgggctctggaggagacagcctcctggggggcaggggttccctgcctct

SEQ ID NO: 442140 - DNA, 120 bp, Artificial Sequence
  ENSG00000154133_1 (sequence is synthesized)
gctgctcctgctcatcatgggaggcatggctcaggactccccgccccagatcctagtccacccccaggaccagctgttccagggccctggccctgccaggatgagctgccaagcctcagg

SEQ ID NO: 442141 - DNA, 120 bp, Artificial Sequence
  ENSG00000154133_2 (sequence is synthesized)
ccagccacctcccaccatccgctggttgctgaatgggcagcccctgagcatggtgcccccagacccacaccacctcctgcctgatgggacccttctgctgctacagccccctgcccgggg

SEQ ID NO: 442142 - DNA, 120 bp, Artificial Sequence
  ENSG00000154133_3 (sequence is synthesized)
acatgcccacgatggccaggccctgtccacagacctgggtgtctacacatgtgaggccagcaaccggcttggcacggcagtcagcagaggcgctcggctgtctgtggctgtcctccggga

SEQ ID NO: 442143 - DNA, 120 bp, Artificial Sequence
  ENSG00000154133_4 (sequence is synthesized)
ggatttccagatccagcctcgggacatggtggctgtggtgggtgagcagtttactctggaatgtgggccgccctggggccacccagagcccacagtctcatggtggaaagatgggaaacc

SEQ ID NO: 442144 - DNA, 120 bp, Artificial Sequence
  ENSG00000154133_5 (sequence is synthesized)
cctggccctccagcccggaaggcacacagtgtccggggggtccctgctgatggcaagagcagagaagagtgacgaagggacctacatgtgtgtggccaccaacagcgcaggacataggga

SEQ ID NO: 442145 - DNA, 120 bp, Artificial Sequence
  ENSG00000154133_6 (sequence is synthesized)
gagccgcgcagcccgggtttccatccaggagccccaggactacacggagcctgtggagcttctggctgtgcgaattcagctggaaaatgtgacactgctgaacccggatcctgcagaggg

SEQ ID NO: 442146 - DNA, 120 bp, Artificial Sequence
  ENSG00000154133_7 (sequence is synthesized)
ccccaagcctagaccggcggtgtggctcagctggaaggtcagtggccctgctgcgcctgcccaatcttacacggccttgttcaggacccagactgccccgggaggccagggagctccgtg

SEQ ID NO: 442147 - DNA, 120 bp, Artificial Sequence
  ENSG00000154133_8 (sequence is synthesized)
ggcagaggagctgctggccggctggcagagcgcagagcttggaggcctccactggggccaagactacgagttcaaagtgagaccatcctctggccgggctcgaggccctgacagcaacgt

SEQ ID NO: 442148 - DNA, 120 bp, Artificial Sequence
  ENSG00000154133_9 (sequence is synthesized)
gctgctcctgaggctgccggaaaaagtgcccagtgccccacctcaggaagtgactctaaagcctggcaatggcactgtctttgtgagctgggtcccaccacctgctgaaaaccacaatgg

SEQ ID NO: 442149 - DNA, 120 bp, Artificial Sequence
  ENSG00000154133_10 (sequence is synthesized)
catcatccgtggctaccaggtctggagcctgggcaacacatcactgccaccagccaactggactgtagttggtgagcagacccagctggaaatcgccacccatatgccaggctcctactg

SEQ ID NO: 442150 - DNA, 120 bp, Artificial Sequence
  ENSG00000154133_11 (sequence is synthesized)
cgtgcaagtggctgcagtcactggtgctggagctggggagcccagtagacctgtctgcctccttttagagcaggccatggagcgagccacccaagaacccagtgagcatggtccctggac

SEQ ID NO: 442151 - DNA, 120 bp, Artificial Sequence
  ENSG00000154133_12 (sequence is synthesized)
cctggagcagctgagggctaccttgaagcggcctgaggtcattgccacctgcggtgttgcactctggctgctgcttctgggcaccgccgtgtgtatccaccgccggcgccgagctagggt

SEQ ID NO: 442152 - DNA, 120 bp, Artificial Sequence
  ENSG00000154133_13 (sequence is synthesized)
gcacctgggcccaggtctgtacagatataccagtgaggatgccatcctaaaacacaggatggatcacagtgactcccagtggttggcagacacttggcgttccacctctggctctcggga

SEQ ID NO: 442153 - DNA, 120 bp, Artificial Sequence
  ENSG00000154133_14 (sequence is synthesized)
cctgagcagcagcagcagcctcagcagtcggctgggggcggatgcccgggacccactagactgtcgtcgctccttgctctcctgggactcccgaagccccggcgtgcccctgcttccaga

SEQ ID NO: 442154 - DNA, 120 bp, Artificial Sequence
  ENSG00000154133_15 (sequence is synthesized)
caccagcactttttatggctccctcatcgctgagctgccctccagtaccccagccaggccaagtccccaggtcccagctgtcaggcgcctcccaccccagctggcccagctctccagccc

SEQ ID NO: 442155 - DNA, 120 bp, Artificial Sequence
  ENSG00000154133_16 (sequence is synthesized)
ctgttccagctcagacagcctctgcagccgcaggggactctcttctccccgcttgtctctggcccctgcagaggcttggaaggccaaaaagaagcaggagctgcagcatgccaacagttc

SEQ ID NO: 442156 - DNA, 120 bp, Artificial Sequence
  ENSG00000154133_17 (sequence is synthesized)
ccccaagctctggttgcctggcgggccctgggaccgaaactcctcagctcctcaaatgagctggttactcgtcatctccctccagcacccctctttcctcatgaaactcccccaactcag

SEQ ID NO: 442157 - DNA, 120 bp, Artificial Sequence
  ENSG00000154133_18 (sequence is synthesized)
agtcaacagacccagcctccggtggcaccacaggctccctcctccatcctgctgccagcagcccccatccccatccttagcccctgcagtccccctagcccccaggcctcttccctctct

SEQ ID NO: 442158 - DNA, 120 bp, Artificial Sequence
  ENSG00000154133_19 (sequence is synthesized)
ggccccagcccagcttccagtcgcctgtccagctcctcactgtcatccctgggggaggatcaagacagcgtgctgacccctgaggaggtagccctgtgcttggaactcagtgagggtgag

SEQ ID NO: 442159 - DNA, 120 bp, Artificial Sequence
  ENSG00000154133_20 (sequence is synthesized)
gagactcccaggaacagcgtctctcccatgccaagggctccttcaccccccaccacctatgggtacatcagcgtcccaacagcctcagagttcacggacatgggcaggactggaggaggg

SEQ ID NO: 442160 - DNA, 120 bp, Artificial Sequence
  ENSG00000154133_21 (sequence is synthesized)
gtggggcccaaggggggagtcttgctgtgcccacctcggccctgcctcacccccacccccagcgagggctccttagccaatggttggggctcagcctctgaggacaatgccgccagcgcc

SEQ ID NO: 442161 - DNA, 120 bp, Artificial Sequence
  ENSG00000154133_22 (sequence is synthesized)
agagccagccttgtcagctcctccgatggctccttcctcgctgatgctcactttgcccgggccctggcagtggctgtggatagctttggtttcggtctagagcccagggaggcagactgc

SEQ ID NO: 442162 - DNA, 120 bp, Artificial Sequence
  ENSG00000154133_23 (sequence is synthesized)
gtcttcatagatgcctcatcacctccctccccacgggatgagatcttcctgacccccaacctctccctgcccctgtgggagtggaggccagactggttggaagacatggaggtcagccac

SEQ ID NO: 442163 - DNA, 120 bp, Artificial Sequence
  ENSG00000154133_24 (sequence is synthesized)
acccagcggctgggaagggggatgcctccctggccccctgactctcagatctcttcccagagaagtcagctccactgtcgtatgcccaaggctggtgcttctcctgtagattactcctga

SEQ ID NO: 442164 - DNA, 120 bp, Artificial Sequence
  ENSG00000154133_25 (sequence is synthesized)
accgtgtccctgagacttcccagacgggaatcagaaccacttctcctgtccacccacaagacctgggctgtggtgtgtgggtcttggcctgtgtttctctgcagctggggtccaccttcc

SEQ ID NO: 442165 - DNA, 120 bp, Artificial Sequence
  ENSG00000154133_26 (sequence is synthesized)
caagcctccagagagttctccctccacgattgtgaaaacaaatgaaaacaaaattagagcaaagctgacctggagccctcagggagcaaaacatcatctccacctgactcctagccactg

SEQ ID NO: 442166 - DNA, 120 bp, Artificial Sequence
  ENSG00000154133_27 (sequence is synthesized)
ctttctcctctgtgccatccactcccaccaccaggttgttttggcctgaggagcagccctgcctgctgctcttcccccaccatttggatcacaggaagtggaggagccagaggtgccttt

SEQ ID NO: 442167 - DNA, 120 bp, Artificial Sequence
  ENSG00000154133_28 (sequence is synthesized)
gtggaggacagcagtggctgctgggagagggctgtggaggaaggagcttctcggagccccctctcagccttacctgggcccctcctctagagaagagctcaactctctcccaacctcacc

SEQ ID NO: 442168 - DNA, 120 bp, Artificial Sequence
  ENSG00000154133_29 (sequence is synthesized)
atggaaagaaaataattatgaatgccactgaggcactgaggccctacctcatgccaaacaaagggttcaaggctgggtctagcgaggatgctgaaggaagggaggtatgagaccgtaggt

SEQ ID NO: 442169 - DNA, 120 bp, Artificial Sequence
  ENSG00000154133_30 (sequence is synthesized)
caaaagcaccatcctcgtactgttgtcactatgagcttaagaaatttgataccataaaatggtaaagacttgagttctgtgagatcattccccggagcaccatttttaggggagcacctg

SEQ ID NO: 442170 - DNA, 120 bp, Artificial Sequence
  ENSG00000154133_31 (sequence is synthesized)
gagagatggcaagaatttcctgagttaggcagggatcaggcattcattgacactcagggagtgtcacacatttctgttctgcaattaaagggagaatgaggttcatccaccaaattttaa

SEQ ID NO: 442171 - DNA, 120 bp, Artificial Sequence
  ENSG00000154133_32 (sequence is synthesized)
gcagaatataggaagggcaggggtggggagtttcagggtctgctggtcctggcaacttatattaaatccacctcctcaagataagccttagggatatttatggctgagggaagtgggatg

SEQ ID NO: 442172 - DNA, 120 bp, Artificial Sequence
  ENSG00000154133_33 (sequence is synthesized)
gtctaaggcatggggaagggtgattggctgtggggaaaatgaagtaataggttcattctgcccaagtgtacttggggttcatggcatttcataaggacatttgtgtagaaaattgttttg

SEQ ID NO: 442173 - DNA, 120 bp, Artificial Sequence
  ENSG00000154133_34 (sequence is synthesized)
ggtggagacatctgagctgaatgttcaagggaacatctgagaggtcagtgggatacctgtgagcagaggcctgggctggaaggcttgggagggcaagctggggcggggctggccctaaat

SEQ ID NO: 442174 - DNA, 120 bp, Artificial Sequence
  ENSG00000154133_35 (sequence is synthesized)
cactccaggtctgcatctatccacagaagttactgagcacctactatgtgccagcaaatccaggcctagagctgccatttcactgtcaggtcctcagcccagagcaggggtccaagctgg

SEQ ID NO: 442175 - DNA, 120 bp, Artificial Sequence
  ENSG00000154133_36 (sequence is synthesized)
ctggtgttgtgttttgagttttctgagctcactggcttctttcttccagctacctcctggctttgtctgctctgccttaagctttctgtggcttccctaggatctcctgctctgtccttg

SEQ ID NO: 442176 - DNA, 120 bp, Artificial Sequence
  ENSG00000154133_37 (sequence is synthesized)
agggagattccttctgatctttggttcattctttcctttggaatagcctccacctgccagaatctctcagtgtaggcagagacaggcatgaggggatatgagtgcaatcctgtattggcc

SEQ ID NO: 442177 - DNA, 120 bp, Artificial Sequence
  ENSG00000154133_38 (sequence is synthesized)
acgcagaagcaggtacaagacacatggagggggtcaatgtggaaaaacataggagaaagaagattccacattaccctgacagtaagaaggggatggagagaagagcaatgaagcagcaag

SEQ ID NO: 442178 - DNA, 120 bp, Artificial Sequence
  ENSG00000154133_39 (sequence is synthesized)
taatagcctgctatgtccacagggaaagacaaaccatttgttctggctcgggtatagggtgtgagatgggtcagagcaaaggctatagttagggagctggaagccagaccaaggaaggtc

SEQ ID NO: 442179 - DNA, 120 bp, Artificial Sequence
  ENSG00000154133_40 (sequence is synthesized)
ctcttagccatgctaggtacctgggctctatcatggtaaatgaggggccattgaaggtcttacgcagagaagctccttgctcagatccctgttcttgaaggatcactcaggcagccagag

SEQ ID NO: 442180 - DNA, 120 bp, Artificial Sequence
  ENSG00000154133_41 (sequence is synthesized)
gccaatatccatggagcaagctcctgctctgccagctgagtgatctcacatttcctcatataaacccagaccatcagtcttgagtgtggaaggccctattgccatcattttacagatgag

SEQ ID NO: 442181 - DNA, 120 bp, Artificial Sequence
  ENSG00000154133_42 (sequence is synthesized)
aaaactggggcttagagaggatgtacttacccaagtgcaacagatgtacttacccaagctaagctgtgacagatagagattgtcaaaccagatttgtcttcaggtcttctttttacctca

SEQ ID NO: 442182 - DNA, 120 bp, Artificial Sequence
  ENSG00000154133_43 (sequence is synthesized)
gcatacatagctgtctgtcattactacctcccagctctgggtgactcggatttcccctcatccaggaataagaaaggggtgctgggtttaggggaccaggtcagagatcttaaggagtct

SEQ ID NO: 442183 - DNA, 120 bp, Artificial Sequence
  ENSG00000154133_44 (sequence is synthesized)
gtgaaaagctgaaaagcagtagtaaggataaagccaccatctccttgccctcttctgctgcctctgaacaggaagtcttggccaaaaaggttctcacttctccctgtttctcctggcctc

SEQ ID NO: 442184 - DNA, 120 bp, Artificial Sequence
  ENSG00000154133_45 (sequence is synthesized)
cgggcctgtgagttaggaaatagaggttccaagaacctttcccaaagcccaggtgagagggggtccctgaaagggaagtgaaggggtgagatagggtgtagggatgcaggggcttaccag

SEQ ID NO: 442185 - DNA, 120 bp, Artificial Sequence
  ENSG00000154133_46 (sequence is synthesized)
cccagggccctcccacgggctcatcctcctttccctgaggaggctgatgagggttggatggagtagtggacaggtagctaagggggctggtgggcaggccggcaggctgagctccagagc

SEQ ID NO: 442186 - DNA, 120 bp, Artificial Sequence
  ENSG00000154133_47 (sequence is synthesized)
ccagtaagagggcatggggtcgggaagcagggctgggagagtgggggtgtggggagtgtgtgccgggattggacaggctggggaaggggggaaaggacttgaagagctgtagtaactacg

SEQ ID NO: 442187 - DNA, 120 bp, Artificial Sequence
  ENSG00000154133_48 (sequence is synthesized)
cagtgggatacctgtgagcagaggcctgggctggaaggcttgggagggcaagctggggcggggctggccctaaatgggaggccaggaaggtgggcaaagcagaagggggcaagagtgata

SEQ ID NO: 442188 - DNA, 120 bp, Artificial Sequence
  ENSG00000154134_0 (sequence is synthesized)
gtacccaggcgcaccggcaggagagcggcaccgtggctgccgcagcgcgcagaggctgtggaggggcttacggctcccagcccacgggtctcagacccaggggctgggcccccagccccc

SEQ ID NO: 442189 - DNA, 120 bp, Artificial Sequence
  ENSG00000154134_1 (sequence is synthesized)
agtcccgatcccagctgggtcgagccatgctgcgctacctgctgaaaacgctgctgcagatgaacttgttcgcggactctctggccggggacatctccaactccagcgagctgctcttgg

SEQ ID NO: 442190 - DNA, 120 bp, Artificial Sequence
  ENSG00000154134_2 (sequence is synthesized)
gcttcaactcctcgctggcggcgctcaaccacaccctgctgcctcccggcgatccctctctcaacgggtcaagggtaggaccggaggacgctatgccccgcatcgtggagcagccgccag

SEQ ID NO: 442191 - DNA, 120 bp, Artificial Sequence
  ENSG00000154134_3 (sequence is synthesized)
atctgctggtctcccgaggcgagcccgccacgttgccctgccgcgctgaaggccgaccccgacccaacattgagtggtacaagaacggggcgcgtgtggccactgtgcgggaggatccgc

SEQ ID NO: 442192 - DNA, 120 bp, Artificial Sequence
  ENSG00000154134_4 (sequence is synthesized)
gtgcgcaccgcctgctgctgcccagcggcgccctcttcttcccgcgcatcgtgcacgggcgccgcgcgcggccggacgaaggtgtctacacttgcgtggctcgcaactacctgggggcag

SEQ ID NO: 442193 - DNA, 120 bp, Artificial Sequence
  ENSG00000154134_5 (sequence is synthesized)
cagcgagcagaaacgcctcgctggaagtggcagtcctccgtgatgatttccggcagtctcctggaaacgtggtggtggcagtgggggagccagcagtactggaatgcgtgcccccccgcg

SEQ ID NO: 442194 - DNA, 120 bp, Artificial Sequence
  ENSG00000154134_6 (sequence is synthesized)
gccacccggagccttccgtgtcctggaggaaggacggtgcaagactcaaggaagaggaaggaaggatcacgatccgtggagggaagctgatgatgtcacatacactcaagagcgatgcag

SEQ ID NO: 442195 - DNA, 120 bp, Artificial Sequence
  ENSG00000154134_7 (sequence is synthesized)
gcatgtatgtgtgcgtagcctccaacatggcgggagaacgggagagtgcggcagctgaagtcatggtactggagcgtccctcattcctgcgcagaccagtgaatcaggtggtcctggctg

SEQ ID NO: 442196 - DNA, 120 bp, Artificial Sequence
  ENSG00000154134_8 (sequence is synthesized)
atgcccctgtgactttcctatgtgaggtgaagggggatcccccacctcgtctacgctggcgcaaggaggatggggaactgcccacaggcaggtatgagatccggagtgaccacagccttt

SEQ ID NO: 442197 - DNA, 120 bp, Artificial Sequence
  ENSG00000154134_9 (sequence is synthesized)
ggattgggcatgtgagtgccgaagatgagggaacgtacacctgtgtggcggagaacagtgtgggccgcgctgaagcatctggctccctcagtgttcacgtcccaccccagttggtgaccc

SEQ ID NO: 442198 - DNA, 120 bp, Artificial Sequence
  ENSG00000154134_10 (sequence is synthesized)
agccccaggaccagatggcagctcctggagagagcgtggctttccagtgcgagaccaaaggaaaccccccacctgccatcttctggcagaaggaggggagtcaggtcctgcttttcccca

SEQ ID NO: 442199 - DNA, 120 bp, Artificial Sequence
  ENSG00000154134_11 (sequence is synthesized)
gtcagtcacttcagccgacggggcgcttctcagtgtctccaagaggccaacttaacatcaccgcggtgcagcgtggggatgctgggtactacgtgtgccaggctgtcagtgtggctggca

SEQ ID NO: 442200 - DNA, 120 bp, Artificial Sequence
  ENSG00000154134_12 (sequence is synthesized)
gcatcctggccaaggccctgctggagataaaaggagcctctttggatgggctgcctcctgtcatcctccagggaccagccaatcagacgctggtgcttggctcctccgtgtggctgccct

SEQ ID NO: 442201 - DNA, 120 bp, Artificial Sequence
  ENSG00000154134_13 (sequence is synthesized)
gcagagtgactgggaaccctcaacccagtgtccgatggaagaaggatgggcagtggctgcagggggatgacctccagttcaagacaatggccaacggtaccctgtacatcgccaatgtgc

SEQ ID NO: 442202 - DNA, 120 bp, Artificial Sequence
  ENSG00000154134_14 (sequence is synthesized)
aggagatggacatgggcttctacagctgcgtggccaagagttccacaggggaagccacatggagcggctggcttaagatgcgggaagactggggagtatcaccagacccccctacagaac

SEQ ID NO: 442203 - DNA, 120 bp, Artificial Sequence
  ENSG00000154134_15 (sequence is synthesized)
ccagttcccctccgggggctccctctcagccagtggtcactgagatcaccaagaacagcattaccctgacctggaagcccaacccacaaactggggctgcagtcacgtcttatgtgatag

SEQ ID NO: 442204 - DNA, 120 bp, Artificial Sequence
  ENSG00000154134_16 (sequence is synthesized)
aggccttcagcccagcagctggcaacacatggcgtactgtggcagatggcgtgcagctggagacacacacagtcagcggtctgcagcccaataccatctacctgtttctggttcgagcag

SEQ ID NO: 442205 - DNA, 120 bp, Artificial Sequence
  ENSG00000154134_17 (sequence is synthesized)
tgggagcctggggcctcagtgagcccagccccgtctctgagcctgtccgtacacaggatagcagcccctctaggccagtggaggacccatggagaggccagcagggactggcggaagtgg

SEQ ID NO: 442206 - DNA, 120 bp, Artificial Sequence
  ENSG00000154134_18 (sequence is synthesized)
tttccgggtgtcttggagggtagcaggccctgagggaggaagctggacaatgttggacctacagtccccaagccagcaaagtactgtgctaagaggactccctccagggacccaaatcca

SEQ ID NO: 442207 - DNA, 120 bp, Artificial Sequence
  ENSG00000154134_19 (sequence is synthesized)
gatcaaggtgcaagcccaaggccaggaggggctgggggctgaaagcctctctgtgaccaggagcattcctgaggaggcccccagtggccccccacagggagtggcggtggccttgggggg

SEQ ID NO: 442208 - DNA, 120 bp, Artificial Sequence
  ENSG00000154134_20 (sequence is synthesized)
tgatggcaacagcagtatcactgtgtcctgggaacctccactcccctcccagcaaaatggggtcatcacggaataccagatctggtgcctgggcaatgagagccgctttcacctcaatcg

SEQ ID NO: 442209 - DNA, 120 bp, Artificial Sequence
  ENSG00000154134_21 (sequence is synthesized)
atctgcagcaggctgggcacgctccgcaatgctccgaggactggtgcccggtctcctctatcgaaccctggtcgcggcggccaccagcgcaggcgtgggcgtgcccagtgccccagtgct

SEQ ID NO: 442210 - DNA, 80 bp, Artificial Sequence
  ENSG00000154134_22 (sequence is synthesized)
gaggtgggcgcggggctggcggtgcggctggcgagggtgctgcgggagcccgccttcctcgcgggcagcggcgcagcctg

SEQ ID NO: 442211 - DNA, 120 bp, Artificial Sequence
  ENSG00000154134_23 (sequence is synthesized)
cggggcgctgcttctcgggctctgcgccgccctctactggcgccggaaacagcgcaaagagctcagccactacacggcctcttttgcctacacaccggcagtgtccttcccgcactcaga

SEQ ID NO: 442212 - DNA, 120 bp, Artificial Sequence
  ENSG00000154134_24 (sequence is synthesized)
gggcctctctggagccagttccaggccacccatgggccttggccccgccccctactcatggctggcagattcgtggccccacccatctcgaagcccctcggcccaggaacccaggggaag

SEQ ID NO: 442213 - DNA, 120 bp, Artificial Sequence
  ENSG00000154134_25 (sequence is synthesized)
ctgctgccctagcaatcctgacccggacgacagatattacaacgaagcgggaatctccctgtatctagctcagacggccaggggcacggccgcccctggcgagggtcctgtctatagcac

SEQ ID NO: 442214 - DNA, 120 bp, Artificial Sequence
  ENSG00000154134_26 (sequence is synthesized)
cattgacccagcgggggaggagctgcagaccttccatgggggcttcccccaacatccctcaggagatctgggtccctggagccagtacgctcctccagagtggagccagggggacagtgg

SEQ ID NO: 442215 - DNA, 120 bp, Artificial Sequence
  ENSG00000154134_27 (sequence is synthesized)
agccaagggaggcaaagtgaagcttctggggaaacctgtgcagatgccctctctgaactggccagaagccctgcccccacctcctccttcttgtgaactgagctgcctagaagggccgga

SEQ ID NO: 442216 - DNA, 120 bp, Artificial Sequence
  ENSG00000154134_28 (sequence is synthesized)
ggaggagctggagggcagctcagagccagaggagtggtgcccgccaatgcctgagagaagtcacctgacggagcccagctccagtggagggtgcctggtcaccccatcccgaagggaaac

SEQ ID NO: 442217 - DNA, 120 bp, Artificial Sequence
  ENSG00000154134_29 (sequence is synthesized)
cccctctcccacaccttcctatggacagcagtccacagccactcttacaccctcacctcctgaccctccccagcccccaactgacatgccccatctccatcagatgcccaggagggtgcc

SEQ ID NO: 442218 - DNA, 120 bp, Artificial Sequence
  ENSG00000154134_30 (sequence is synthesized)
ccttgggccgagttcccctctcagtgtatcccagcccatgctgggcatccgtgaagcgaggcctgctggcttgggtgctggccctgcagcctcaccccacctcagccccagtcctgcccc

SEQ ID NO: 442219 - DNA, 120 bp, Artificial Sequence
  ENSG00000154134_31 (sequence is synthesized)
tagcacagccagcagtgccccaggcagaacctggcaggggaatggggagatgactcccccacttcaaggaccccgtgctcgattccggaagaaacccaaggctcttccctacaggaggga

SEQ ID NO: 442220 - DNA, 120 bp, Artificial Sequence
  ENSG00000154134_32 (sequence is synthesized)
gaacagtcctggggacttgcccccaccacccttgccaccgccagaggaagaggcgagctgggccctagagctgagggcagcaggcagcatgtcctccctggagcgggagcgcagtgggga

SEQ ID NO: 442221 - DNA, 120 bp, Artificial Sequence
  ENSG00000154134_33 (sequence is synthesized)
gaggaaagcggtccaggccgtgcccctggcagcccagcgggtgctccacccagatgaagaggcctggctcccatacagcagaccaagcttcctgtcccggggccagggcaccagcacatg

SEQ ID NO: 442222 - DNA, 120 bp, Artificial Sequence
  ENSG00000154134_34 (sequence is synthesized)
ttccacggccggcagcaactcttccaggggctccagcagctctaggggctcccggggccctggccggagccggagtcggagtcagagccggagccagagccaaaggccaggacagaaacg

SEQ ID NO: 442223 - DNA, 120 bp, Artificial Sequence
  ENSG00000154134_35 (sequence is synthesized)
ccgagaggaaccaagatgacccttgttggggcattgagaatatcatgagtgccacggggaaggggagtagggatgtcttttcccccccagcagtgatgagtggggctagctgaagcccat

SEQ ID NO: 442224 - DNA, 120 bp, Artificial Sequence
  ENSG00000154134_36 (sequence is synthesized)
tggtttccacgatttcaattggctgagaaggcagagagctagctcctccctttctttctttttccacctgagacttgtttataaaaaacaaaacaataaaaagagtctgatcagagccca

SEQ ID NO: 442225 - DNA, 120 bp, Artificial Sequence
  ENSG00000154134_37 (sequence is synthesized)
tcgccaagcgtggttcagccactcccgcttaaacttggcaggagaggagacggaggtctctaggtggtccagaaagccggcctagaagtttgtgtcccgatccctctactaaccggcctg

SEQ ID NO: 442226 - DNA, 120 bp, Artificial Sequence
  ENSG00000154134_38 (sequence is synthesized)
tctgtaggcatcttcctttgagacgaggaacgcggaacgtctgccaataaggacatattggatcctgcagagggagagggtaggcaggtggggactgagctccgcagagaagcataggag

SEQ ID NO: 442227 - DNA, 120 bp, Artificial Sequence
  ENSG00000154134_39 (sequence is synthesized)
atggaacgaccagaggattctctttccctctggagcctcaatctctccccacaatttccctgtctgaacgctctgcgccaccccctgtccccagggtcaagggtaggaccggaggacgct

SEQ ID NO: 442228 - DNA, 120 bp, Artificial Sequence
  ENSG00000154134_40 (sequence is synthesized)
aaaggcggggcccgctgaaagaaggcgatccgagttctgctacttcctagtaagggacgtctctggagagattctgaggtgtttgagcctcttttgcctacacaccggcagtgtccttcc

SEQ ID NO: 442229 - DNA, 120 bp, Artificial Sequence
  ENSG00000154134_41 (sequence is synthesized)
gggcgcccgggagcccggtctctctgaggttggtcagtccctggggaggatgtgagctggggaagcctctcagacctacctccaccctggtttaggatgtaaggcttgtgtgggggaaga

SEQ ID NO: 442230 - DNA, 120 bp, Artificial Sequence
  ENSG00000154134_42 (sequence is synthesized)
agggtatccccaaagaggatcctcctccctgaccctctggcacctagcccggcacttccttctgacctgtctcatctctggctctttcctgcctgttctccgggtgtccccatcctattc

SEQ ID NO: 442231 - DNA, 120 bp, Artificial Sequence
  ENSG00000154134_43 (sequence is synthesized)
tcctcaggagccaagggaggcaaagtgaagcttctggggaaacctgtgcagatgccctctctgaactggccagaagccctgcccccacctcctccttcttgtgaactgagctgcctagaa

SEQ ID NO: 442232 - DNA, 120 bp, Artificial Sequence
  ENSG00000154134_44 (sequence is synthesized)
atggaaaggcggggcccgctgaaagaaggcgatccgagttctgctacttcctagtaagggacgtctctggagagattctgaggtgtttgagcctcttttgcctacacaccggcaggccac

SEQ ID NO: 442233 - DNA, 120 bp, Artificial Sequence
  ENSG00000154134_45 (sequence is synthesized)
ggatccgggagggagccaggcggcccatggggaggggcaggggcttagccgctggcgagtgaggaccgggtcgggagaaaggggtcgcacctggagttcagcctcttgggtaggggcggg

SEQ ID NO: 442234 - DNA, 120 bp, Artificial Sequence
  ENSG00000154134_46 (sequence is synthesized)
atacgtggggcgactcgaggagctgccaggactagggagggctgcgggccaagacggggcgggatctggatgacgtttgcctctaagacgccacgaggaggccaggctttgcaaccatct

SEQ ID NO: 442235 - DNA, 120 bp, Artificial Sequence
  ENSG00000154134_47 (sequence is synthesized)
ccataaagaaggggcaagttcgaggacggaaagcccactcaaagggcggggggcggggcctggcaagagggggtgtggccaggatcccaggcagtaaattgtgcggcggggtctggatgg

SEQ ID NO: 442236 - DNA, 120 bp, Artificial Sequence
  ENSG00000154134_48 (sequence is synthesized)
agccctgcccccacctcctccttcttgtgaactgagctgcctagaagggccggaggaggagctggagggcaggtagagatgctccctgcttccaggcccacacacctgcggccagaccat

SEQ ID NO: 442237 - DNA, 120 bp, Artificial Sequence
  ENSG00000154134_49 (sequence is synthesized)
ggagggagcatggccacctcccaccccaacaccaccgccactgtcctgaaactcccgaatatcgccacctccctttcctttgctggcctcttcaggctctccgtccccaacgctcacctg

SEQ ID NO: 442238 - DNA, 120 bp, Artificial Sequence
  ENSG00000154134_50 (sequence is synthesized)
tcagtggttttcaatcttggttggctacacataggaatcacttgaggggcttgagaaaaataccgacacctgagtcccacccccgagaaattctgatgaaatgggtccagggtgcagcct

SEQ ID NO: 442239 - DNA, 120 bp, Artificial Sequence
  ENSG00000154134_51 (sequence is synthesized)
gctgcgtgagtccacccgagggcagtgctgaggatcttgacgggggcggggcaagccccccactggggtagctgtgcctgccgggtcgggaatgaccctttcccagttccagggtttcgg

SEQ ID NO: 442240 - DNA, 120 bp, Artificial Sequence
  ENSG00000154134_52 (sequence is synthesized)
gtgcggcggggtctggatggaaaggcggggcccgctgaaagaaggcgatccgagttctgctacttcctagtaagggacgtctctggagagattctgaggtgtttgagtgtccttcccgca

SEQ ID NO: 442241 - DNA, 120 bp, Artificial Sequence
  ENSG00000154134_53 (sequence is synthesized)
tgggaccggggcctaggcgtggacaagtataggggtatttctgacccttctcctcatttcacctcttctttctcccacgggttcctttctggaagcctcttttgcctacacaccggcagg

SEQ ID NO: 442242 - DNA, 120 bp, Artificial Sequence
  ENSG00000154134_54 (sequence is synthesized)
tctatacgtatctactcagtagatgactgggtgggtggatggatggatgggtggatggatctggggtacagaggtctcagggctgtgtcagggtggaagtgtaatttgggcaggaatatg

SEQ ID NO: 442243 - DNA, 120 bp, Artificial Sequence
  ENSG00000154134_55 (sequence is synthesized)
gaggctgacaagatctctcatgcccattagactggctcttgctggagtggtcagcactctacctgagacatttcagatatggctctccttatgcttctctagcttgggaggacttacggg

SEQ ID NO: 442244 - DNA, 120 bp, Artificial Sequence
  ENSG00000154134_56 (sequence is synthesized)
cggacgggttgtgtctcgtttatctgttaggttgattgtctagcacagtgccaggcacatagtaggcattcagtttttgtggagggaacagaggctgcggcctcctgtcattgcaggagg

SEQ ID NO: 442245 - DNA, 120 bp, Artificial Sequence
  ENSG00000154143_0 (sequence is synthesized)
agagatatccataaggctggggtggcaggcactgtctgcccaaagtcagctgcctgaagctgccgtctcctcattccaccatcccaggacccctgctgccacctctgcacccccaagctc

SEQ ID NO: 442246 - DNA, 120 bp, Artificial Sequence
  ENSG00000154143_1 (sequence is synthesized)
agcagcatcatgtcacttgcacacacagctgcagagtacatgctctcagatgccctgctgcctgaccgcaggggaccccgcctcaaaggactgcgtctggaactgcccctggaccggata

SEQ ID NO: 442247 - DNA, 120 bp, Artificial Sequence
  ENSG00000154143_2 (sequence is synthesized)
gtcaagttcgtagctgtgggctcccccttgttgctgatgtccctggcattcgcccaggagttctcctctgggtctccgatcagctgcttctctcccagtaacttcagcatccggcaggca

SEQ ID NO: 442248 - DNA, 120 bp, Artificial Sequence
  ENSG00000154143_3 (sequence is synthesized)
gcctacgtggacagctcctgctgggactcactgcttcaccataagcaggacgggcctggccaggacaaaatgaaatctctctggccccacaaggccctcccctactccctgctggccctg

SEQ ID NO: 442249 - DNA, 120 bp, Artificial Sequence
  ENSG00000154143_4 (sequence is synthesized)
gccttgctcatgtacctgccggtgctgctgtggcagtatgcagctgtgccagccctcagctccgatctgctgttcatcatcagcgaactggacaaatcttataatcgctccatccgcctc

SEQ ID NO: 442250 - DNA, 120 bp, Artificial Sequence
  ENSG00000154143_5 (sequence is synthesized)
gtgcagcacatgctgaagatccggcagaagagttccgacccctatgtgttctggaatgagctggagaaggctcggaaagaacgatactttgaattccctttgctagagcggtacctggca

SEQ ID NO: 442251 - DNA, 120 bp, Artificial Sequence
  ENSG00000154143_6 (sequence is synthesized)
tgtaagcagcgttcacattcgctagtggctacctacctcctgaggaactccctcttgctcatcttcacctccgccacttacctataccttggtcatttccatctggatgtcttcttccag

SEQ ID NO: 442252 - DNA, 120 bp, Artificial Sequence
  ENSG00000154143_7 (sequence is synthesized)
atgtccccaatctgatcacatgcaggctgacatcactgtccattttccagattgttagcctctccagtgtagcaatatacaccatattggttccagtgataatatacaacctcacacggc

SEQ ID NO: 442253 - DNA, 120 bp, Artificial Sequence
  ENSG00000154143_8 (sequence is synthesized)
tatgtcggtgggacaaacgacttttatctgtctatgagatgctcccagcttttgatctcctcagcagaaagatgctaggatgtcccatcaatgacctcaatgtgatccttcttttcctcc

SEQ ID NO: 442254 - DNA, 120 bp, Artificial Sequence
  ENSG00000154143_9 (sequence is synthesized)
gagctaacatctctgagctcatctcttttagctggctgagtgtcttatgtgtgttgaaggatacaaccacccagaagcacaatattgacacagtagttgattttatgactttattggctg

SEQ ID NO: 442255 - DNA, 120 bp, Artificial Sequence
  ENSG00000154143_10 (sequence is synthesized)
gcttagaaccctcaaaacccaaacacctcaccaactcggcatgtgatgaacacccatagttaagaaaccatggagcaagaaagcttgtggaaagtctctctccttcctcataagacatgc

SEQ ID NO: 442256 - DNA, 120 bp, Artificial Sequence
  ENSG00000154143_11 (sequence is synthesized)
acactaatacacatacacaccaaaaaattacacattttaaaactgctaagcttggatttaactgaatcatatatcttttatcatgttatcctaaaagtgagaagacataaccaagacatg

SEQ ID NO: 442257 - DNA, 120 bp, Artificial Sequence
  ENSG00000154143_12 (sequence is synthesized)
gaaataaatgtgaaagctggagccgaagagtcaaagagctaaaaaattaagtctagaacattctatgaggatagtataaataaaaagaaatacagtctagacatgctgcaaggaaagaag

SEQ ID NO: 442258 - DNA, 120 bp, Artificial Sequence
  ENSG00000154143_13 (sequence is synthesized)
attctaaagtccgtttatggaggcaattccatatcctttcttgaacgcacattcagcttaccccagagagcaagtgaggcaatctggcaaaagattaataaagatgtaaacccctggaaa

SEQ ID NO: 442259 - DNA, 120 bp, Artificial Sequence
  ENSG00000154144_0 (sequence is synthesized)
acttccaagacagacacggaagtgctgggaggcgccgggagcccgttcggttgcgggtgtctctggccctgcggtcagccctgggaacgtcccggagagctagattcctagaggcccgat

SEQ ID NO: 442260 - DNA, 120 bp, Artificial Sequence
  ENSG00000154144_1 (sequence is synthesized)
tccgctagcccggaacagacaaagccagcgctcccgcccgctccccgacttaggatccgatgccggcagcgtcctggggcccccgtagcggggctggaccatgagcctgctggacggcct

SEQ ID NO: 442261 - DNA, 120 bp, Artificial Sequence
  ENSG00000154144_2 (sequence is synthesized)
cgcttcctcgccgcgggctccgctgcagtccagcaaggccaggatgaaaaagctcccgaagaagagccagaatgagaagtaccggctgaagtacctgcggctgcgcaaagcggccaaggc

SEQ ID NO: 442262 - DNA, 120 bp, Artificial Sequence
  ENSG00000154144_3 (sequence is synthesized)
cacggtgtttgaaaatgctgctatttgtgatgaaattgctcgtcttgaggaaaaatttcttaaagcaaaagaagaaagaaggtacttgctaaagaagctcctccagcttcaggctctaac

SEQ ID NO: 442263 - DNA, 120 bp, Artificial Sequence
  ENSG00000154144_4 (sequence is synthesized)
tgaaggggaagtacaggctgcagctccttcccacagttccagtttgcccctgacttatggtgtggccagctctgtgggaactatacagggagctgggcctatttcagggcccagcactgg

SEQ ID NO: 442264 - DNA, 120 bp, Artificial Sequence
  ENSG00000154144_5 (sequence is synthesized)
ggctgaggaaccatttgggaagaaaactaagaaggagaaaaaagaaaaaggcaaagagaacaacaaactggaagttctgaagaaaacatgcaagaaaaagaaaatggcgggaggtgctcg

SEQ ID NO: 442265 - DNA, 120 bp, Artificial Sequence
  ENSG00000154144_6 (sequence is synthesized)
caagctggttcagcccattgccctggatccctcaggacggcctgtgttccccatcggactagggggtctaacagtatatagcctgggggagatcatcaccgaccgacctggctttcatga

SEQ ID NO: 442266 - DNA, 120 bp, Artificial Sequence
  ENSG00000154144_7 (sequence is synthesized)
tgagagtgccatctaccccgtgggctattgcagtactcgaatatatgccagcatgaagtgcccagaccagaagtgtctatatacctgtcagatcaaggatggtggtgtgcagcctcagtt

SEQ ID NO: 442267 - DNA, 120 bp, Artificial Sequence
  ENSG00000154144_8 (sequence is synthesized)
tgaaattgttcctgaagatgacccccagaatgccattgtcagctcttctgcagatgcttgtcatgcagaactgctcaggactataagcactactatggggaaactaatgcctaacctgct

SEQ ID NO: 442268 - DNA, 120 bp, Artificial Sequence
  ENSG00000154144_9 (sequence is synthesized)
tccagctggagctgacttttttggattttctcatccagccatccacaacctgatccagagctgtccaggagctcgaaaatgcatcaattaccagtgggtgaaatttgatgtgtgcaaacc

SEQ ID NO: 442269 - DNA, 120 bp, Artificial Sequence
  ENSG00000154144_10 (sequence is synthesized)
tggagatgggcagctacctgaggggctgccggagaatgatgcagctatgagctttgaagcctttcagagacagatctttgatgaagatcagaatgatccccttctgccaggatccttgga

SEQ ID NO: 442270 - DNA, 120 bp, Artificial Sequence
  ENSG00000154144_11 (sequence is synthesized)
cctcccagagcttcagcctgcagcctttgtgtcttcttaccagcccatgtacctgacacatgaacccttggtagatactcacctgcagcacttgaagtctccatcacagggtagcccaat

SEQ ID NO: 442271 - DNA, 120 bp, Artificial Sequence
  ENSG00000154144_12 (sequence is synthesized)
tcagtcttcagattgaacaagaagggatcagatgccacatcgtttttgtcgtgattaatttaacttaaactaaaattttgggtatatgaaagaaggcagcaattcagaagtaaagaagat

SEQ ID NO: 442272 - DNA, 120 bp, Artificial Sequence
  ENSG00000154144_13 (sequence is synthesized)
actaacgtatttcatcatggaaggtcctgtggtgatggttttccctgggaaaaccttcagctgctttatttttagtaataaatttctcttgtcaattctgtttactttcatcttgtaatc

SEQ ID NO: 442273 - DNA, 120 bp, Artificial Sequence
  ENSG00000154144_14 (sequence is synthesized)
gggatgtaatcttttttgcttagctctgcctgaggtaaagtaaacttcagcctcttataaacaagagtgatagagagctgcaggctgctacaacaaataccatagacaggttggtttata

SEQ ID NO: 442274 - DNA, 120 bp, Artificial Sequence
  ENSG00000154144_15 (sequence is synthesized)
aataacatgaatttatttctcacagttctggatgctgggaagtccaagttcaaggagcgcagattcaatgtctggtgagggcccacttcctagttcttagacagctgtcttcctgcagtg

SEQ ID NO: 442275 - DNA, 120 bp, Artificial Sequence
  ENSG00000154144_16 (sequence is synthesized)
tcctcacgtggtagaagaggaaggcagctctccggggtcccttttataagatcactaagccggttcatgagaggtctgctctcatgacctaatcacctcccaaaggccccacctcccaat

SEQ ID NO: 442276 - DNA, 120 bp, Artificial Sequence
  ENSG00000154144_17 (sequence is synthesized)
accatcacattaggggttaggatttaacatgaattttggggacatataaacattaagtctgtagtagcagcagctgactaacgagggagatagggagattctgacaaacttctactcttg

SEQ ID NO: 442277 - DNA, 120 bp, Artificial Sequence
  ENSG00000154144_18 (sequence is synthesized)
attgtgatcctaattcaaggaatatcaagtcccagcccctgcaacccaggctgctgcttaattttcatgtcagtatcatcaaaatccaatgttctgcttaaactcaagatggaaagtcca

SEQ ID NO: 442278 - DNA, 120 bp, Artificial Sequence
  ENSG00000154144_19 (sequence is synthesized)
gtccaaggtacactgttcatctttttcttcacattttgcacatccttcaaggggatctttaacctctttaacctttgtattgcacctcagataatgtgctttttagctcagtacactgaa

SEQ ID NO: 442279 - DNA, 120 bp, Artificial Sequence
  ENSG00000154144_20 (sequence is synthesized)
accatatgataacacaaattcacatataattgggggttagtcccatactctataacagacttagtcctgtcttttcattagccatgtaataatataactccatgttccatgcaactggat

SEQ ID NO: 442280 - DNA, 120 bp, Artificial Sequence
  ENSG00000154144_21 (sequence is synthesized)
gctgtctggaaagggagggacaaaaggacccagaagtagaagaatggggatggagtggtgagaattgaatggttaatgcactgccattcataattgccaattgaggacaacacaaatggg

SEQ ID NO: 442281 - DNA, 120 bp, Artificial Sequence
  ENSG00000154144_22 (sequence is synthesized)
attggtactttatagtaataaatctgaccagcagagggagggatcaggcagcagtgtttagagcacaccacactggccactgtaaactgagaagctaagttaactggtattttatgattt

SEQ ID NO: 442282 - DNA, 120 bp, Artificial Sequence
  ENSG00000154144_23 (sequence is synthesized)
tgagtatagtctttttataagttgtatacactttacaatgtaaaagaaacaaactttgtataatagcaaatcgggaaggggactgcttaaaatgttaatgcagtgtttttctttttttct

SEQ ID NO: 442283 - DNA, 120 bp, Artificial Sequence
  ENSG00000154144_24 (sequence is synthesized)
ctgcataaatggcttgagcatactggcatttacacagaaatgatatatgctgcttttatcatataacaaatattttcccactattacagcctgagtaatacccgtattaaaagagcctca

SEQ ID NO: 442284 - DNA, 120 bp, Artificial Sequence
  ENSG00000154144_25 (sequence is synthesized)
ttttagaaagacatttaaaatttttggaacataccacatgtagaaaggttgaactggtttttcagctataatgcatatacaactatagtgtgtacgtataccacatatacatatacttgt

SEQ ID NO: 442285 - DNA, 120 bp, Artificial Sequence
  ENSG00000154144_26 (sequence is synthesized)
aactatagtgtgtacgtataccacatatacatatacttgtatgaagatatgtgtaaaatgtttttactatggatcatggatttaagaaacttgaaaagctgggcacggtggctcacgcct

SEQ ID NO: 442286 - DNA, 75 bp, Artificial Sequence
  ENSG00000154144_27 (sequence is synthesized)
ctcaaaaacaaaaacaaaaacaccttgaaaaacactgccttagtatacttaaactatcttttcatctatcagatt

SEQ ID NO: 442287 - DNA, 120 bp, Artificial Sequence
  ENSG00000154144_28 (sequence is synthesized)
tgccttagtatacttaaactatcttttcatctatcagattgttaaggattttttttaaatttgacaacatccagtgtcaatgagggtgagggcaaaaaaaggactaccttggtgagaatg

SEQ ID NO: 442288 - DNA, 120 bp, Artificial Sequence
  ENSG00000154144_29 (sequence is synthesized)
taagttgtttaatcctttgggagggttaagctgtagatatctaaattttaaatatatatttatcctcttccatgttaagaaccctaagaaataactggacgagtgtggtatgatgtttgc

SEQ ID NO: 442289 - DNA, 120 bp, Artificial Sequence
  ENSG00000154144_30 (sequence is synthesized)
atgtgatattcattacagtattattttaatagtagaaaattgttaaaaatctatatgtccattaataggaaattggttaaataaaatgaggcttccacaaactgaaacactctaaatcta

SEQ ID NO: 442290 - DNA, 120 bp, Artificial Sequence
  ENSG00000154144_31 (sequence is synthesized)
tattctattatttacataagaaaattattttggtaaagtaagtaagtcaaaaacacagattacaaaataatatgtactgtataaaattatataactcaagtcaagtgaatggttcagcaa

SEQ ID NO: 442291 - DNA, 120 bp, Artificial Sequence
  ENSG00000154144_32 (sequence is synthesized)
aatagtgtttctctgaatgatgaatttgggggtgatttttacttgcttatactttagtgtccaaattttctacagtgactataaatttcattttaaaactaaaaagttcttacatttggg

SEQ ID NO: 442292 - DNA, 120 bp, Artificial Sequence
  ENSG00000154144_33 (sequence is synthesized)
gaaatgcagtgaattcccacatcatgttttaaattactcagccactaaaaatgaatgtgcatggcgtcattaacataatcattgcctgaaccgtatttttcacactatgtactctaggtt

SEQ ID NO: 442293 - DNA, 120 bp, Artificial Sequence
  ENSG00000154144_34 (sequence is synthesized)
cctggaggtgaaaggaatctggacttagagttcttggctacctctggctgcccccgaattagaacagcccatgggggtatgtgtattgggagtggaggagtggacgggtagattgacttt

SEQ ID NO: 442294 - DNA, 120 bp, Artificial Sequence
  ENSG00000154144_35 (sequence is synthesized)
ttctcaggcatcaatctgttacaaggttcatggtttctatggggccagatgcatgagaggtcaaagcatgggcaataggggttaactgaacgagttgaatgctaggaagtcctcagggga

SEQ ID NO: 442295 - DNA, 120 bp, Artificial Sequence
  ENSG00000154144_36 (sequence is synthesized)
gccaacgttccttgtaaagtgtgtagattttttgttttttaactaaataaaatcttggcactgacaaagttattcctgctgtttggagctacaccagaaccccttggaactctacagagg

SEQ ID NO: 442296 - DNA, 120 bp, Artificial Sequence
  ENSG00000154144_37 (sequence is synthesized)
ggtagaactaaagcaaaaaccatcattcaccctacagagtattataaatttcattttcacacagtaaaaagttcctaaattgggggaaacatagtgaattccacataatgttttaaatta

SEQ ID NO: 442297 - DNA, 120 bp, Artificial Sequence
  ENSG00000154144_38 (sequence is synthesized)
ttcagccactaaaaataaatttacatatgatttcattaatatattcactatctaaaccatattttttacactacgtaaaatacattgtatatgtacagtgagtgatgctttttgctttag

SEQ ID NO: 442298 - DNA, 120 bp, Artificial Sequence
  ENSG00000154144_39 (sequence is synthesized)
ttctcatttttcacattaaggggaggaaagctacccatagatagtattcttactccttttcacatgcttcaaggacagtttgcaagtggatataaatacatacacatcactagtgattat

SEQ ID NO: 442299 - DNA, 120 bp, Artificial Sequence
  ENSG00000154144_40 (sequence is synthesized)
gcttttatttatttccaacttcttataggtaacataattttcagacaatgttagctgtttttaatccatcagtaaactgcattaagattcttaataaacaaacactgaaggcctctttca

SEQ ID NO: 442300 - DNA, 120 bp, Artificial Sequence
  ENSG00000154144_41 (sequence is synthesized)
tttcgatgcaacagtttctttttattaacataaccaagatattttaacgttcaaaatgaaagtaaatacaatgaaatggcagtttgcagtcagcctgtttctcctagatcttgtaaaatt

SEQ ID NO: 442301 - DNA, 120 bp, Artificial Sequence
  ENSG00000154144_42 (sequence is synthesized)
gacttaaaagattacatggagagtgatctcatttgtttttaaaataccatttgtatttgtacttaaggatataaataagtggattggaaaggtacacaacaaattaaacgctcacttttg

SEQ ID NO: 442302 - DNA, 120 bp, Artificial Sequence
  ENSG00000154144_43 (sequence is synthesized)
gaaagctgtcaaccaagaagggtagaactgaaacagtcaaaggactttctctaggtacttggatttgtttcaatttttagcagccctataggaaagtatgtgtgtcccttctgaagatgg

SEQ ID NO: 442303 - DNA, 120 bp, Artificial Sequence
  ENSG00000154144_44 (sequence is synthesized)
tatacgtcagcttcacgttccagagtaaagaaatatttacagagtagtatgcccctctctccttccttcttgaggattgatctcattgctcgtttgtctttctcagtttgaaattgttcc

SEQ ID NO: 442304 - DNA, 120 bp, Artificial Sequence
  ENSG00000154144_45 (sequence is synthesized)
tcactgttggtacagtgaaaccttttctcttgcttttaatgggtggagatactttattttatagaaacctatcctggatcctcctgacattgtgccaactagagcctccacattatcaaa

SEQ ID NO: 442305 - DNA, 120 bp, Artificial Sequence
  ENSG00000154144_46 (sequence is synthesized)
gtcaagaaagcttatcctgtttgttcataccactattctgttcttaaatccatcttcatctcccgctaagctctcaaactaaaattatccctctcctgtttagggggaaactaatgccta

SEQ ID NO: 442306 - DNA, 120 bp, Artificial Sequence
  ENSG00000154144_47 (sequence is synthesized)
cagctggagctgacttttttggattttctcatccagccatccacaacctgatccagagctgtccaggagctcgaaaatgcatcaagtaagtgtgatcaaattcattcccttgagaaaagc

SEQ ID NO: 442307 - DNA, 120 bp, Artificial Sequence
  ENSG00000154144_48 (sequence is synthesized)
tcagtgatcatccggccagggactggcagttcctactttgttcactgaccttctgtgtccaaagcctgcctgcttctcgaccagtagggctcagtattggcccccttagccctctggaca

SEQ ID NO: 442308 - DNA, 120 bp, Artificial Sequence
  ENSG00000154144_49 (sequence is synthesized)
ggtaagcaagagccaggactccactgttcgctgattattactattttctgtatgtaccatgacagcaaaaggggtgggaaatctagcagactaatttgtcactaaagaggcctgcttatt

SEQ ID NO: 442309 - DNA, 120 bp, Artificial Sequence
  ENSG00000154144_50 (sequence is synthesized)
tcttttaggtttttgttagcaaatatgtgttttagatatatatgggcggaatataaagaaaaattacctgatccctttagtgataggaatgggtatttatgtctagcagataactctcaa

SEQ ID NO: 442310 - DNA, 120 bp, Artificial Sequence
  ENSG00000154144_51 (sequence is synthesized)
gtcactctttgcagccccaaagtggttctaaaggctaccacaggaaactggacttctaaattcttcagtgacctcaatcccaggttgggggaatgttttttatagatcatcaccgaccga

SEQ ID NO: 442311 - DNA, 120 bp, Artificial Sequence
  ENSG00000154144_52 (sequence is synthesized)
catagccgagtaccctaaatatctatgcattgagtgataaaagctttcattgaatcagccttgcggagtgctgagttagagggggacctgcggcctgcatagcttcctagattactcaca

SEQ ID NO: 442312 - DNA, 120 bp, Artificial Sequence
  ENSG00000154144_53 (sequence is synthesized)
gatgtcatggggagcacctgcgatcatagtaaggcagggtaccccagaaactaaggtatctcattctgtaacctaagcaagactggagcagaacaccaggggaaagtttactgtgcaggg

SEQ ID NO: 442313 - DNA, 120 bp, Artificial Sequence
  ENSG00000154144_54 (sequence is synthesized)
aataacatttcaagtgaagtcagtggggtcaagtcaaggccttggccctgcctgtgttccatgagttcctcccacaaatgagtgatcaagggttcaggctttggggtcatatagggaaaa

SEQ ID NO: 442314 - DNA, 120 bp, Artificial Sequence
  ENSG00000154144_55 (sequence is synthesized)
ctctgggttaaaaaatggaattgaaattctcactctttgcctaatatactatataaccctaggcaagtcacttaatgtttcaaccagttttcattgtaaaagtatctgtcctatcttaac

SEQ ID NO: 442315 - DNA, 120 bp, Artificial Sequence
  ENSG00000154144_56 (sequence is synthesized)
aaaggcaaaattgagctgacaaatgcaagggtgttaaggaattgattgaaaggacatgtatatgtctgaccaaaacagtctgcccagactcccgagcagcagtggaacttaaggaattgt

SEQ ID NO: 442316 - DNA, 120 bp, Artificial Sequence
  ENSG00000154146_0 (sequence is synthesized)
agaccggacccgagagcagagctgctgtttcggcgcgggtcggctggcggccgactgccccagagcccccacccggcaccacacagaccccacccccgccctgcgccagccttcgtcccc

SEQ ID NO: 442317 - DNA, 120 bp, Artificial Sequence
  ENSG00000154146_1 (sequence is synthesized)
gcagaggaccccccgacaccagcatggactgctgcaccgagaacgcctgctccaagccggacgacgacattctagacatcccgctggacgatcccggcgccaacgcggccgccgccaaaa

SEQ ID NO: 442318 - DNA, 120 bp, Artificial Sequence
  ENSG00000154146_2 (sequence is synthesized)
tccaggcgagttttcggggccacatggcgcggaagaagataaagagcggagagcgcggccggaagggcccgggccctggggggcctggcggagctggggtggcccggggaggcgcgggcg

SEQ ID NO: 442319 - DNA, 120 bp, Artificial Sequence
  ENSG00000154146_3 (sequence is synthesized)
gcggccccagcggagactaggccagaactgagcattttcaaagttcccgaggagagatggatgccgcgtccccttcgcagcgacgagacttccctgccgtgtttgtgaccccctcctgcc

SEQ ID NO: 442320 - DNA, 120 bp, Artificial Sequence
  ENSG00000154146_4 (sequence is synthesized)
cagcaacctgccagctacaggagccccctgcgtcccagagactccctcacccaggcaggctccgtcgcggagtcgctgagtccgtgcccttttagttagttctgcagtctagtatggtcc

SEQ ID NO: 442321 - DNA, 120 bp, Artificial Sequence
  ENSG00000154146_5 (sequence is synthesized)
ttccactccaccccaccctaaaccatgcgctcccaatcttccttcttttgcttctcgcccacctcttcccgcacccagcatgcagctctgcctccgcagcctcagtgcgctttcctgcgc

SEQ ID NO: 442322 - DNA, 120 bp, Artificial Sequence
  ENSG00000154146_6 (sequence is synthesized)
gcactgcggagggcgccctaagcgtcacccaagcacactcacttaaagaaaaaacgagttctttcgttctgtgcgcagctaaaaggggcgccctacatctccgtgccactcccgccccag

SEQ ID NO: 442323 - DNA, 120 bp, Artificial Sequence
  ENSG00000154146_7 (sequence is synthesized)
cctagccccaagactttggatccggggcgagatgaagggaagagggttgttttggtttcggacgacccttgctctgaccggaagagaagtccctatcccacacctgcctgtcacgttccc

SEQ ID NO: 442324 - DNA, 120 bp, Artificial Sequence
  ENSG00000154146_8 (sequence is synthesized)
tcccctttccccagcgcactgttgagggcagcctctccagctctcttgtttatgcaaacgccgagcgcctgggaggctcggtaggaggagtcttccacggccccgccccgcccctgtcgg

SEQ ID NO: 442325 - DNA, 120 bp, Artificial Sequence
  ENSG00000154146_9 (sequence is synthesized)
tcccgccctcccccccgccgggctcctggggctgtggccgaaaggtttctgatctccgtgtgtgcatgtgactgtgctgggttggaatgtgaacaataaagaggaatgtccaagtgttca

SEQ ID NO: 442326 - DNA, 120 bp, Artificial Sequence
  ENSG00000154153_0 (sequence is synthesized)
atccaatgaaggttactggctgagcggggacaccttctcacaggactggagagagaatgcggggcagctgggcagggctcacttccagccgcctgtcacagtactgggagtaagaggtga

SEQ ID NO: 442327 - DNA, 120 bp, Artificial Sequence
  ENSG00000154153_1 (sequence is synthesized)
cctatttatttttagaagggggcagtgataataacccagctcctagcttcattcaagggaggcaggcgctttggaagtttgtaaacaccaactttctgagtaagggaggagcactttttt

SEQ ID NO: 442328 - DNA, 120 bp, Artificial Sequence
  ENSG00000154153_2 (sequence is synthesized)
tccaaaaaggaaagaacgtctctactgggtttttttcctcctgatattcagcattagagtagaaaagaaactattgtttggccacattagccgtggttagcaggtgctgcagcctttgcc

SEQ ID NO: 442329 - DNA, 120 bp, Artificial Sequence
  ENSG00000154153_3 (sequence is synthesized)
actgttattatttttaaagggcagaaatgcctgaaggtgaagactttggaccaggcaaaagctgggaagttatcaattccaaaccagatgaaagacccaggctcagccactgtattgcag

SEQ ID NO: 442330 - DNA, 120 bp, Artificial Sequence
  ENSG00000154153_4 (sequence is synthesized)
aatcatggatgaatttcagcatatttcttcaagaaatgtctctttttaaacagcagagccctggcaagttttgtctcctggtctgtagtgtgtgcacattttttacgatcttgggaagtt

SEQ ID NO: 442331 - DNA, 120 bp, Artificial Sequence
  ENSG00000154153_5 (sequence is synthesized)
acattcctggggttatactcagctatctactgttactgtgtgcatttttgtgtccattgtttaaatgtaatgatattggacaaaaaatttacagcaaaattaagtcagttctgctgaaac

SEQ ID NO: 442332 - DNA, 120 bp, Artificial Sequence
  ENSG00000154153_6 (sequence is synthesized)
tggattttggaattggagaatatattaatcagaagaaacgtgagagatctgaagcagacaaagaaaaaagtcacaaagatgacagtgaattagacttttcagctctttgtcctaagatta

SEQ ID NO: 442333 - DNA, 120 bp, Artificial Sequence
  ENSG00000154153_7 (sequence is synthesized)
gcctcacggttgctgccaaagagttatctgtgtctgacacagacgtctcagaggtatcctggactgataatgggaccttcaacctttcagaaggatacactccacagacagacacttctg

SEQ ID NO: 442334 - DNA, 120 bp, Artificial Sequence
  ENSG00000154153_8 (sequence is synthesized)
atgatcttgaccgacccagtgaggaagttttctctagagatctttcagattttccatctctagaaaatggcatgggaacaaatgatgaagatgaattaagccttggtttgcccactgagc

SEQ ID NO: 442335 - DNA, 120 bp, Artificial Sequence
  ENSG00000154153_9 (sequence is synthesized)
tcaagagaaagaaggaacagttggacagtggtcacagaccaagcaaagagacgcaatcagcagctggtctcacccttcctctgaacagtgaccaaacctttcacctgatgagcaacctgg

SEQ ID NO: 442336 - DNA, 120 bp, Artificial Sequence
  ENSG00000154153_10 (sequence is synthesized)
ctggggatgttatcacagctgcagtgactgcagctatcaaagaccagttagagggtgtgcagcaagcactttctcaggctgcccccatcccagaagaggacacagacactgaagaaggtg

SEQ ID NO: 442337 - DNA, 120 bp, Artificial Sequence
  ENSG00000154153_11 (sequence is synthesized)
atgactttgaactacttgaccagtcagagctggatcaaattgagagtgaattgggacttacacaagaccaggaagcagaagcacagcaaaataagaagtcttcaggtttcctttcaaatc

SEQ ID NO: 442338 - DNA, 120 bp, Artificial Sequence
  ENSG00000154153_12 (sequence is synthesized)
aagaagtcttcaggtttcctttcaaatctgctgggaggccattaatctaggaatcagcttgcaacagagcacaaaaaacaccaaaaaaatttcaaacaagaaaaaaaaaaaaaaaaggaa

SEQ ID NO: 442339 - DNA, 120 bp, Artificial Sequence
  ENSG00000154153_13 (sequence is synthesized)
tccctcctgcagtgaattaattggatatatatcagctgacactgatagattgatatttctgatcgttatttttgtgtaataagcatggaaatgaactttatacacaccactgtgttgtca

SEQ ID NO: 442340 - DNA, 120 bp, Artificial Sequence
  ENSG00000154153_14 (sequence is synthesized)
gagataaatattaggggttgtttttaaagcaaaaagaaaaaaacaaaaaccaaactattaaaatcctcctataaatattctttttctttacagtttttcaagcatgcaaaacagtttatt

SEQ ID NO: 442341 - DNA, 120 bp, Artificial Sequence
  ENSG00000154153_15 (sequence is synthesized)
gtaacttactgaaaaatattaacaattaattgtgaatacatgctgttaccagcttccttattcctaatacctggaaaatttttttttcaacggatagattttgatgtaaaaaagaccgaa

SEQ ID NO: 442342 - DNA, 120 bp, Artificial Sequence
  ENSG00000154153_16 (sequence is synthesized)
attatcaaggtatcttagttgaaggacttgggaaatactatcaaaattaatttcttaggaaaaaatttaaaagtatatttaagtactctggatagactgaaacgtttccatgttatttct

SEQ ID NO: 442343 - DNA, 120 bp, Artificial Sequence
  ENSG00000154153_17 (sequence is synthesized)
gcagttgtagacttaggcttatttgtaaagaagcatgctccattgactgccatctctagtcttgcagtgggtggtattaacccatagaaagcaagcagttgtgtatcacatagacaatgg

SEQ ID NO: 442344 - DNA, 120 bp, Artificial Sequence
  ENSG00000154153_18 (sequence is synthesized)
ttatgatgtaaacagattcagttgttttgttgttcattcgtcatatgtttgtgatagggatgttgggagcacagctctattctgcctgctcagacttaagttagacccttatcttttata

SEQ ID NO: 442345 - DNA, 120 bp, Artificial Sequence
  ENSG00000154153_19 (sequence is synthesized)
ttatgtcatgaaaaaagtctcctaaaattgtgaaactagttcttgatgagtgatgtgatcatcagcaataaagatataataactctgttttcttagcctgtatagaggagaggaacttgc

SEQ ID NO: 442346 - DNA, 120 bp, Artificial Sequence
  ENSG00000154153_20 (sequence is synthesized)
ttggctttaaaatatatttatttgccatttaagtataaatatggaatctgtttcttattgggaagatagaatatatatattttcctttaaactttttaaggtcacttttaaataaccaaa

SEQ ID NO: 442347 - DNA, 120 bp, Artificial Sequence
  ENSG00000154153_21 (sequence is synthesized)
tttgatttatggtttttaacaaaggactaaagagctgaaaccaacctagttttgtttttgtgatataaactttaagtgtcgagggaccatgccagcaactaccaaaaatctcttaaatct

SEQ ID NO: 442348 - DNA, 120 bp, Artificial Sequence
  ENSG00000154153_22 (sequence is synthesized)
tcaggtacagctggcattttggcagatgcatagagacatctgagaccctcagaaaggaaggataatccaagaatataggaaatctgtgttctcttcctttcattttatcccttatatttc

SEQ ID NO: 442349 - DNA, 120 bp, Artificial Sequence
  ENSG00000154153_23 (sequence is synthesized)
taaagactaattataagtaatctgacattttaatgtagctactcttatttattttttctttctgaggtattaaaatatctggactgagttttgccaaatgttaaagggagaagagttact

SEQ ID NO: 442350 - DNA, 120 bp, Artificial Sequence
  ENSG00000154153_24 (sequence is synthesized)
gaagactttgaacacttgctttttgtgattgcttatgtcattagtgcctcatgactgtgtttgatgtcctttattgatacaaagtgagcctgtgccttcattatcttgcccattttaata

SEQ ID NO: 442351 - DNA, 120 bp, Artificial Sequence
  ENSG00000154153_25 (sequence is synthesized)
caaatggaaacctggtgtttgaaaatctctgaactgtgtgggttttggaggaatatacctgaattttattcaataacagtttctggacaggaagaaaaatacagttacatatttataaaa

SEQ ID NO: 442352 - DNA, 120 bp, Artificial Sequence
  ENSG00000154153_26 (sequence is synthesized)
actaagaacatatgccataaaagctggtatcagcaaggttcagatgtgtgagtgtgcgaacactagataatcctcagcctcacattgtgaaattggattggttttacattttatatatat

SEQ ID NO: 442353 - DNA, 120 bp, Artificial Sequence
  ENSG00000154153_27 (sequence is synthesized)
ttatctagctcattagctaaaatgaatggtgattggtcttatcagcaagactagggagaaaacagtcttaagaatttcagttatcgtatttagcctggtgctgaagtcaaagggagatga

SEQ ID NO: 442354 - DNA, 120 bp, Artificial Sequence
  ENSG00000154153_28 (sequence is synthesized)
agtgtcaggctgcccctaaggacagggaagtcctggggagaaagcgttttgcccagatgaacacgtgaactcaacattcgtgtgcatgcttccgctgggaagttatcaattccaaaccag

SEQ ID NO: 442355 - DNA, 120 bp, Artificial Sequence
  ENSG00000154153_29 (sequence is synthesized)
ggcacccacacccaggcgcgcccgcgcgcgcgcccggccccgtccctgtctggaagcacagctgaagatggcgagcccggcgcctccggagcacgccgaggagggatgcccggctcctgc

SEQ ID NO: 442356 - DNA, 120 bp, Artificial Sequence
  ENSG00000154153_30 (sequence is synthesized)
gagggatgcccggctcctgccgccgaggagcaggcgccgccgtcgccgccaccgccccaggcatcccccgcagagcggcagcagcaggaggaggaagcgcaggaagctggggcggcggag

SEQ ID NO: 442357 - DNA, 120 bp, Artificial Sequence
  ENSG00000154153_31 (sequence is synthesized)
ggcgcggggttgcaggtggaggaggccgcgggccgggcggcggccgcggtaacctggctgctcggggagccggtgctgtggctgggctgccgcgccgacgagctgctgagctggaagagg

SEQ ID NO: 442358 - DNA, 120 bp, Artificial Sequence
  ENSG00000154153_32 (sequence is synthesized)
ccgctgcggagcctgctcggcttcgtcgctgccaacctgctgttctggttccttgcattgactccatggagagtatatcacctgatttccgtcatgatacttgggcgtgttattatgcaa

SEQ ID NO: 442359 - DNA, 120 bp, Artificial Sequence
  ENSG00000154153_33 (sequence is synthesized)
gtgtgcggatccagcctcagatgcgaggtggtcggccgaccctcaggcacctgcacctacaggtgttcccatcgtgcttgaaaacttcgcccctgctttctaaaactctgaggtcttgac

SEQ ID NO: 442360 - DNA, 120 bp, Artificial Sequence
  ENSG00000154153_34 (sequence is synthesized)
ctgctcgcccaagcttgccggagcaaacgtgcttgaacgtgtcttggttcttgcagccccagcaggcatatctggaccagattaggtacccgttcaaaacggtgccgcattcatcagtca

SEQ ID NO: 442361 - DNA, 120 bp, Artificial Sequence
  ENSG00000154153_35 (sequence is synthesized)
cctgagatgggccctgaatgatttgttttttccttcccctggagcgttaggtttactgtgtttactccctgatgagaaaacgggaggcaaacaagcaggtggagtatgcccagcacccac

SEQ ID NO: 442362 - DNA, 120 bp, Artificial Sequence
  ENSG00000154162_0 (sequence is synthesized)
attattgatctgaagggtaaatgtggagggagccacagagaggggtccaggcttttctgagaagagaggcagcctcttccaggaagaaagtggtgtctactggctgcccggcctggagaa

SEQ ID NO: 442363 - DNA, 120 bp, Artificial Sequence
  ENSG00000154162_1 (sequence is synthesized)
ccttctttgaatgaaaacggacaaaatgcaaagcagtgtgttggcacagtgatttggaaaggggaaacagaagagaagggtctcaccttccgcgcaaggctgagctgttggcaccctgct

SEQ ID NO: 442364 - DNA, 120 bp, Artificial Sequence
  ENSG00000154162_2 (sequence is synthesized)
gcggccgtcggtgctgctgctcctgcagctgccttttctgccatcagctttgttacctaacagcttggctcttttgggaaatatagacaagctggaacccaggagcagttgggagtttta

SEQ ID NO: 442365 - DNA, 120 bp, Artificial Sequence
  ENSG00000154162_3 (sequence is synthesized)
aagaatgccagcctttttaaagctttgatgtccagtgctatagaatcaagttactgtggaggtcaaaacaatttgagatacataagctggccttagaaaataaattgcctctaacttaca

SEQ ID NO: 442366 - DNA, 120 bp, Artificial Sequence
  ENSG00000154162_4 (sequence is synthesized)
gtgaggagctcaacataacagggaaaaggagcacaggatgcagctacttggagggtgttgattgaaaacttcgatctccccaccccattcacggttgatttgacggatttctcacctcgt

SEQ ID NO: 442367 - DNA, 120 bp, Artificial Sequence
  ENSG00000154162_5 (sequence is synthesized)
tcacagagaaaatttcaattaaggcccctttagatggaatataatacagcagaagccttttcatcaaaaggattaatgcctgcatcatcatttctgcaataaaacaagaagctaagtggt

SEQ ID NO: 442368 - DNA, 120 bp, Artificial Sequence
  ENSG00000154162_6 (sequence is synthesized)
ggaggccacagacacctcaaacctggattccacaattctacgttaagtgttggagtttttattactctgctgtaggaaagcctttgccaatgcttacaaggaactgtttatccctgcttc

SEQ ID NO: 442369 - DNA, 120 bp, Artificial Sequence
  ENSG00000154162_7 (sequence is synthesized)
tctgggttctgtttgatggaggtctcctaacaccactacaaccacagccacagcagactttagccacagagccaagagaaaatgttatccatctgccaggacaacggtcacatttccaac

SEQ ID NO: 442370 - DNA, 120 bp, Artificial Sequence
  ENSG00000154162_8 (sequence is synthesized)
gtgttaaacgtggctgggtatggaatcaattttttgtgctggaagaatacgtgggctccgagcctcagtatgtgggaaagctccattccgacttagacaagggagagggcactgtgaaat

SEQ ID NO: 442371 - DNA, 120 bp, Artificial Sequence
  ENSG00000154162_9 (sequence is synthesized)
acaccctctcaggagatggcgctggcaccgtttttaccattgatgaaaccacaggggacattcatgcaataaggagcctagatagagaagagaaacctttctacactcttcgtgctcagg

SEQ ID NO: 442372 - DNA, 120 bp, Artificial Sequence
  ENSG00000154162_10 (sequence is synthesized)
ctgtggacatagaaaccagaaagcccctggagcctgaatcagaattcatcatcaaagtgcaggatattaatgataatgagccaaagtttttggatggaccttatgttgctactgttccag

SEQ ID NO: 442373 - DNA, 120 bp, Artificial Sequence
  ENSG00000154162_11 (sequence is synthesized)
aaatgtctcctgtgggtgcatatgtactccaggtcaaggccacagatgcagatgacccgacctatggaaacagtgccagagtcgtttacagcattcttcagggacaaccttatttctcta

SEQ ID NO: 442374 - DNA, 120 bp, Artificial Sequence
  ENSG00000154162_12 (sequence is synthesized)
ttgatcccaagacaggtgttattagaacagctttgccaaacatggacagagaagtcaaagaacaatatcaagtactcatccaagccaaggatatgggaggacagcttggaggattagccg

SEQ ID NO: 442375 - DNA, 120 bp, Artificial Sequence
  ENSG00000154162_13 (sequence is synthesized)
gaacaacaatagtcaacatcactctcaccgatgtcaatgacaatccacctcgattccccaaaagcatcttccacttgaaagttcctgagtcttcccctattggttcagctattggaagaa

SEQ ID NO: 442376 - DNA, 120 bp, Artificial Sequence
  ENSG00000154162_14 (sequence is synthesized)
taagagctgtggatcctgattttggacaaaatgcagaaattgaatacaatattgttccaggagatgggggaaatttgtttgacatcgtcacagatgaggatacacaagagggagtcatca

SEQ ID NO: 442377 - DNA, 120 bp, Artificial Sequence
  ENSG00000154162_15 (sequence is synthesized)
aattgaaaaagcctttagattttgaaacaaagaaggcatacactttcaaagttgaggcttccaaccttcaccttgaccaccggtttcactcggcgggccctttcaaagacacagctacgg

SEQ ID NO: 442378 - DNA, 120 bp, Artificial Sequence
  ENSG00000154162_16 (sequence is synthesized)
tgaagatcagcgtgctggacgtagatgagccaccggttttcagcaagccgctctacaccatggaggtttatgaagacactccggtagggaccatcattggcgctgtcactgctcaagacc

SEQ ID NO: 442379 - DNA, 120 bp, Artificial Sequence
  ENSG00000154162_17 (sequence is synthesized)
ctactttacaatagatggaaatgaaggaaccatcgccactaatgaattactagacagagaaagcactgcgcagtataatttctccataattgcgagtaaagttagtaaccctttattgac

SEQ ID NO: 442380 - DNA, 120 bp, Artificial Sequence
  ENSG00000154162_18 (sequence is synthesized)
cagcaaagtcaatatactgattaatgtcttagatgtaaatgaatttcctccagaaatatctgtgccatatgagacagccgtgtgtgaaaatgccaagccaggacagataattcagatagt

SEQ ID NO: 442381 - DNA, 120 bp, Artificial Sequence
  ENSG00000154162_19 (sequence is synthesized)
cagtgctgcagaccgagatctttcacctgctgggcaacaattctcctttagattatcacctgaggctgctatcaaaccaaattttacagttcgtgacttcagaaacaacacagcggggat

SEQ ID NO: 442382 - DNA, 120 bp, Artificial Sequence
  ENSG00000154162_20 (sequence is synthesized)
tgaaacccgaagaaatggatacagccgcaggcagcaagagttgtatttcctccctgttgtaatagaagacagcagctaccctgtccagagcagcacaaacacaatgactattcgagtctg

SEQ ID NO: 442383 - DNA, 120 bp, Artificial Sequence
  ENSG00000154162_21 (sequence is synthesized)
tagatgtgactctgatggcaccatcctgtcttgtaatgtggaagcaatttttctacctgtaggacttagcactggggcgttgattgcaattctactatgcattgttatactcttagccat

SEQ ID NO: 442384 - DNA, 120 bp, Artificial Sequence
  ENSG00000154162_22 (sequence is synthesized)
agttgtactgtatgtagcactgcgaaggcagaagaaaaaagacaccctgatgacctctaaagaagacatcagagacaacgtcatccattacgatgatgaaggaggtggggaggaagatac

SEQ ID NO: 442385 - DNA, 120 bp, Artificial Sequence
  ENSG00000154162_23 (sequence is synthesized)
ccaggctttcgacatcggggctctgagaaacccaaaagtgattgaggagaacaaaattcgcagggatataaaaccagactctctctgtttacctcgtcagagaccacccatggaagataa

SEQ ID NO: 442386 - DNA, 120 bp, Artificial Sequence
  ENSG00000154162_24 (sequence is synthesized)
cacagacataagggatttcattcatcaaaggctacaggaaaatgatgtggatccaactgccccaccatacgattcactggccacatatgcctacgaagggagtgggtccgtggcagagtc

SEQ ID NO: 442387 - DNA, 120 bp, Artificial Sequence
  ENSG00000154162_25 (sequence is synthesized)
cctcagctctatagactctctcaccacagaagccgaccaggactatgactatctgacagactggggaccccgctttaaagtcttggcagacatgtttggcgaagaagagagttataaccc

SEQ ID NO: 442388 - DNA, 120 bp, Artificial Sequence
  ENSG00000154162_26 (sequence is synthesized)
tgataaagtcacttaagggagtcgtggaggctaaaatacaaccgagaggggagatttttaaaaaagaaaaagaaacacaaatattaatagaaatctctctcacacacacacacacacaca

SEQ ID NO: 442389 - DNA, 120 bp, Artificial Sequence
  ENSG00000154162_27 (sequence is synthesized)
aacacacacacacacacacacactctgggacaagattcctttgattacctggtttctagtaagttactaaattaatcatattgtcagttttggtttattctgccaacaagagatacatcc

SEQ ID NO: 442390 - DNA, 120 bp, Artificial Sequence
  ENSG00000154162_28 (sequence is synthesized)
tataatgtgtacttgctttgttttgttgttttgttttttcacaatcacactgagacaagctcaggcctattcaatacaatttactgacatgacaacctagaacgaagatagctatgtggc

SEQ ID NO: 442391 - DNA, 120 bp, Artificial Sequence
  ENSG00000154162_29 (sequence is synthesized)
atcacggtggaagagtgttagatttttcttaattccactaaagtgcctattgaaactcttatcatttaaagtggtgtacagtacactctgctgtgatggtattgcgggattcagagataa

SEQ ID NO: 442392 - DNA, 120 bp, Artificial Sequence
  ENSG00000154162_30 (sequence is synthesized)
agacataaaacaaagacaccgtctttatgtcaagaagcaatagcgacactctgactctcctcattccttttgagaacaaaagaagaacactttctgatctccaccttcttctaattcaaa

SEQ ID NO: 442393 - DNA, 120 bp, Artificial Sequence
  ENSG00000154162_31 (sequence is synthesized)
aggttttctttttcttttttaaactgtatgctaaaacgtatttgtttatcctatcctttcagaaaattgaaataaatatgaaaatatcaagttcaatatgtaagtcccaaattctagaaa

SEQ ID NO: 442394 - DNA, 120 bp, Artificial Sequence
  ENSG00000154162_32 (sequence is synthesized)
aagttcaatatgtaagtcccaaattctagaaacaatgtttgatcttaacattagttcacattaaagctgttcattaaaatgttactttcttttccaaaaaaaaaagaaagaaaaaaaaga

SEQ ID NO: 442395 - DNA, 120 bp, Artificial Sequence
  ENSG00000154162_33 (sequence is synthesized)
gggctcaaattacacattaaaataaatattggttttgcttaatattgtactggtgtgtggaaaattggttttaacagtcaccagattcagcttttagtcatagatgtaatttcaagttgt

SEQ ID NO: 442396 - DNA, 120 bp, Artificial Sequence
  ENSG00000154162_34 (sequence is synthesized)
gtttctatgaaaattcttagaagaaaaaagtgccattcatttaagcatggaaagagaaattcattatacagtttctcagagtttcttacaatctagtgattctttgatgagcagcaaaaa

SEQ ID NO: 442397 - DNA, 120 bp, Artificial Sequence
  ENSG00000154162_35 (sequence is synthesized)
aagagtgttagggagcctccaaacggagcacgctcacggagaatctcccgttcagaaacatcgcttagtcctcatttactcactgggaacctcggaggatttcagctgatgtttttctct

SEQ ID NO: 442398 - DNA, 120 bp, Artificial Sequence
  ENSG00000154162_36 (sequence is synthesized)
aaagagggttttaggcaaaggcagctgttcttcatcatctatattgagaaatagtagtattgcttttatggacatggttacttcctacagcagaaagaaagaaagcaaacaaaaccccat

SEQ ID NO: 442399 - DNA, 120 bp, Artificial Sequence
  ENSG00000154162_37 (sequence is synthesized)
atattgttttgagatgtctagaatgcagaagaactggagaatactttctgattttgttcagcattcaggatactgatggcatggaaagctgtgttatcaaagccacacacatgcgaacac

SEQ ID NO: 442400 - DNA, 120 bp, Artificial Sequence
  ENSG00000154162_38 (sequence is synthesized)
tctttttatgttatttgcataattttatcctgcaaaagtgagagctgtcaaaaattaaccatttggggctttggcattcagttatgtgaccttttccagagagttagatctcttcaggga

SEQ ID NO: 442401 - DNA, 90 bp, Artificial Sequence
  ENSG00000154162_39 (sequence is synthesized)
tcgtgatatgcctttctccaggcattcttacctgacgaccactcctgacagagaaagtgctcacagcctgtccttgtgtaactcctgagc

SEQ ID NO: 442402 - DNA, 120 bp, Artificial Sequence
  ENSG00000154162_40 (sequence is synthesized)
gctttatccgggtgactgcatggcactgaatttctgcattgaaagttctaactgactaaactgacattctgcactgcagcaagtgactgtgtcaggaaaagcttaatttataagcaagtt

SEQ ID NO: 442403 - DNA, 120 bp, Artificial Sequence
  ENSG00000154162_41 (sequence is synthesized)
tcctggagtgaaaacggcgttggagataatgatatctcagggcaatttcttctgaaatacattcattctgccttgtatccagagaaaataaaagggaacatgaaaagatagttaatttct

SEQ ID NO: 442404 - DNA, 120 bp, Artificial Sequence
  ENSG00000154165_0 (sequence is synthesized)
atacaaaaacatcatatgtaagtaaactcaccagatttggcatctgctctttggtgatggacccagaagaaacttcagtttatttggattattactatgctacgagcccaaactctgaca

SEQ ID NO: 442405 - DNA, 120 bp, Artificial Sequence
  ENSG00000154165_1 (sequence is synthesized)
tcagggagacccactcccatgttccttacacctctgtcttccttccagtcttttacacagctgtgttcctgactggagtgctggggaaccttgttctcatgggagcgttgcatttcaaac

SEQ ID NO: 442406 - DNA, 120 bp, Artificial Sequence
  ENSG00000154165_2 (sequence is synthesized)
ccggcagccgaagactgatcgacatctttatcatcaatctggctgcctctgacttcatttttcttgtcacattgcctctctgggtggataaagaagcatctctaggactgtggaggacgg

SEQ ID NO: 442407 - DNA, 120 bp, Artificial Sequence
  ENSG00000154165_3 (sequence is synthesized)
gctccttcctgtgcaaagggagctcctacatgatctccgtcaatatgcactgcagtgtcctcctgctcacttgcatgagtgttgaccgctacctggccattgtgtggccagtcgtatcca

SEQ ID NO: 442408 - DNA, 120 bp, Artificial Sequence
  ENSG00000154165_4 (sequence is synthesized)
ggaaattcagaaggacagactgtgcatatgtagtctgtgccagcatctggtttatctcctgcctgctggggttgcctactcttctgtccagggagctcacgctgattgatgataagccat

SEQ ID NO: 442409 - DNA, 120 bp, Artificial Sequence
  ENSG00000154165_5 (sequence is synthesized)
actgtgcagagaaaaaggcaactccaattaaactcatatggtccctggtggccttaattttcaccttttttgtccctttgttgagcattgtgacctgctactgttgcattgcaaggaagc

SEQ ID NO: 442410 - DNA, 120 bp, Artificial Sequence
  ENSG00000154165_6 (sequence is synthesized)
tgtgtgcccattaccagcaatcaggaaagcacaacaaaaagctgaagaaatctataaagatcatctttattgtcgtggcagcctttcttgtctcctggctgcccttcaatactttcaagt

SEQ ID NO: 442411 - DNA, 120 bp, Artificial Sequence
  ENSG00000154165_7 (sequence is synthesized)
tcctggccattgtctctgggttgcggcaagaacactatttaccctcagctattcttcagcttggtatggaggtgagtggacccttggcatttgccaacagctgtgtcaaccctttcattt

SEQ ID NO: 442412 - DNA, 120 bp, Artificial Sequence
  ENSG00000154165_8 (sequence is synthesized)
actatatcttcgacagctacatccgccgggccattgtccactgcttgtgcccttgcctgaaaaactatgactttgggagtagcactgagacatcagatagtcacctcactaaggctctct

SEQ ID NO: 442413 - DNA, 120 bp, Artificial Sequence
  ENSG00000154165_9 (sequence is synthesized)
ccaccttcattcatgcagaagattttgccaggaggaggaagaggtctgtgtcactctaaagggaactgtgacatttcaagctctgttggtgggtttaggagttaatttttgtcagcaaca

SEQ ID NO: 442414 - DNA, 120 bp, Artificial Sequence
  ENSG00000154165_10 (sequence is synthesized)
aagaaggaagtgttaatgataggattcacattgcttcatagatgcaaggaagagttcatttttaaagagaggactgaaaaatccctgtgttgtggatataattaggccatgtgctgtttt

SEQ ID NO: 442415 - DNA, 120 bp, Artificial Sequence
  ENSG00000154165_11 (sequence is synthesized)
ctgtccttgaactcctggataaaggctcctgcttgaaccagtccctttcttcatgattgttaatgcacatttgggcctttcctctctcaaaaaccatggtaccttcatccccaccaccct

SEQ ID NO: 442416 - DNA, 120 bp, Artificial Sequence
  ENSG00000154165_12 (sequence is synthesized)
tcatactgggctctaaattggactacatttaaatgattctgcctactttcatctgatgagaaatgcagtaacaatgcaggtaacaaaaatataatatacctgcactgtgcaattaattgt

SEQ ID NO: 442417 - DNA, 120 bp, Artificial Sequence
  ENSG00000154165_13 (sequence is synthesized)
ttctgagttactaagctagattctgacctcaatctttaaagctttgtatcgtgattcttcatcatcttccaacattgtgcttcatcctatgcctattcacaatggctttggactggcaaa

SEQ ID NO: 442418 - DNA, 120 bp, Artificial Sequence
  ENSG00000154165_14 (sequence is synthesized)
aaaaaactcatggggattttgtattgtgtttatgatttgggacttactttatcatatggtcttctagtattttaatacataagcatatggcaggattcaacatctatttgctttataaga

SEQ ID NO: 442419 - DNA, 120 bp, Artificial Sequence
  ENSG00000154165_15 (sequence is synthesized)
tattgataaaaatgtatctcattcataatggtgtagcaactactttttaatggggttttactatgctcttttgtttccattggctttataaattaggatttgactttgctttaattacat

SEQ ID NO: 442420 - DNA, 120 bp, Artificial Sequence
  ENSG00000154165_16 (sequence is synthesized)
gtttttaattacccagttatctagttatcaaatgaaaatgttattactaatataattggaactcataaaatgcttagctgtaccccgatgcagattatcattttgtattttaattaaaat

SEQ ID NO: 442421 - DNA, 120 bp, Artificial Sequence
  ENSG00000154165_17 (sequence is synthesized)
gttagtgctacacattccctatagtatcatttgcttggtgcctataatttcaagataagatccagtaatatagggagacaggctgctctgtattcagccaaagtagaaaatctctaacaa

SEQ ID NO: 442422 - DNA, 120 bp, Artificial Sequence
  ENSG00000154165_18 (sequence is synthesized)
agatctcactagtattttatatatattttttccatacccagaaaccttcttgaattcctttacccaataaatatttattgagtcaatttgtacctatattccttttgaagactttgatgt

SEQ ID NO: 442423 - DNA, 120 bp, Artificial Sequence
  ENSG00000154165_19 (sequence is synthesized)
gaaaaacatgtaattagtggcaaccacaaaagactctgcagcagcaagcatgctattgtaaacatcttttgattcaagggaaagcgggttatgtttttacctccactgttgacttgaatg

SEQ ID NO: 442424 - DNA, 120 bp, Artificial Sequence
  ENSG00000154165_20 (sequence is synthesized)
aattaccattttacttctaaatattagatttgaaaatcagaaaaaacttagaatcctttcaaagactagccaatttaatttcatctcatgtatctttcacatgaagagaaacctcaaata

SEQ ID NO: 442425 - DNA, 120 bp, Artificial Sequence
  ENSG00000154165_21 (sequence is synthesized)
tcggacatctccttgtagcctaattagaagctgaaaatacagtttttggttttataaattggctaacttgttaatttttcttaaactgttattaaataaaaatataatttccttacataa

SEQ ID NO: 442426 - DNA, 120 bp, Artificial Sequence
  ENSG00000154174_0 (sequence is synthesized)
cttttctgtcgtccgctctctctgcctagcgtgctcgctcgctcattgctttccttccctccctcggtcttccttcgcacgctgtttggtgattgtggcgctcgcgacagacagggaggc

SEQ ID NO: 442427 - DNA, 120 bp, Artificial Sequence
  ENSG00000154174_1 (sequence is synthesized)
ggtggcagaggacacttgtcatggccgcctctaaacctgtggaggcagcggtggtcgcagccgctgtaccgagctccgggagtggggtgggcggcggcgggactgcgggcccgggcacgg

SEQ ID NO: 442428 - DNA, 120 bp, Artificial Sequence
  ENSG00000154174_2 (sequence is synthesized)
gggggctgccgcgatggcagctggctctggcggtcggggcacccctgctgctgggcgcgggtgccatatacctgtggagtcggcagcaacggcgccgggaggccagaggccggggcgacg

SEQ ID NO: 442429 - DNA, 120 bp, Artificial Sequence
  ENSG00000154174_3 (sequence is synthesized)
ccagcggcctgaagcgcaacagcgaacggaagaccccggagggcagggccagtccggccccgggcagcggacaccctgaaggtcccggtgctcacttggacatgaactctcttgatagag

SEQ ID NO: 442430 - DNA, 120 bp, Artificial Sequence
  ENSG00000154174_4 (sequence is synthesized)
cccaagcagccaagaataaaggcaataaatattttaaagcaggaaaatatgaacaagctattcagtgctatactgaggctattagcttgtgccctacagagaagaatgttgacctttcta

SEQ ID NO: 442431 - DNA, 120 bp, Artificial Sequence
  ENSG00000154174_5 (sequence is synthesized)
cattttatcaaaacagagctgctgcctttgaacagttgcaaaaatggaaagaagtggcacaagactgtacaaaagctgttgaacttaatcccaaatatgtgaaagctctctttagacgtg

SEQ ID NO: 442432 - DNA, 120 bp, Artificial Sequence
  ENSG00000154174_6 (sequence is synthesized)
caaaagcccatgagaagctagacaataagaaggaatgtttagaagatgtcactgctgtgtgtatattagaagggttccaaaatcaacaaagcatgctgttagccgataaagttcttaaac

SEQ ID NO: 442433 - DNA, 120 bp, Artificial Sequence
  ENSG00000154174_7 (sequence is synthesized)
tccttggaaaagagaaagccaaagaaaaatataagaatcgtgaacctctgatgccatctccacagtttatcaaatcttacttcagttctttcacggatgatatcatttcccagcccatgc

SEQ ID NO: 442434 - DNA, 120 bp, Artificial Sequence
  ENSG00000154174_8 (sequence is synthesized)
ttaaaggagagaaatctgatgaagataaagacaaggaaggggaggctttagaagtgaaagaaaattctggatacttaaaggccaaacagtatatggaagaagaaaactacgataaaatca

SEQ ID NO: 442435 - DNA, 120 bp, Artificial Sequence
  ENSG00000154174_9 (sequence is synthesized)
taagtgaatgctcaaaagaaatagatgctgaaggcaaatacatggcagaagcattgctactacgagctaccttctacctgcttattggcaatgccaatgcagccaaaccagatttagata

SEQ ID NO: 442436 - DNA, 120 bp, Artificial Sequence
  ENSG00000154174_10 (sequence is synthesized)
aagtcatcagtttgaaagaagctaatgtgaagcttcgagcaaatgctctcatcaaaagaggcagcatgtacatgcaacagcagcagcctttgctgtccactcaagattttaacatggctg

SEQ ID NO: 442437 - DNA, 120 bp, Artificial Sequence
  ENSG00000154174_11 (sequence is synthesized)
ctgacatcgatcctcagaatgcagatgtttatcaccaccgaggacagctgaaaatactccttgatcaagttgaagaagcagtggcagattttgatgaatgtattaggttaagacctgagt

SEQ ID NO: 442438 - DNA, 120 bp, Artificial Sequence
  ENSG00000154174_12 (sequence is synthesized)
ctgctctggcacaagcacagaaatgttttgcattgtaccgccaggcatatacgggaaacaactcttcacaaatccaagcagctatgaaaggttttgaagaggtcataaagaaatttccaa

SEQ ID NO: 442439 - DNA, 120 bp, Artificial Sequence
  ENSG00000154174_13 (sequence is synthesized)
ggtgtgccgaaggctatgcactatacgcccaggcattaacagatcaacaacagtttggtaaagctgatgaaatgtatgataaatgtattgatttggaaccagataatgctacaacatatg

SEQ ID NO: 442440 - DNA, 120 bp, Artificial Sequence
  ENSG00000154174_14 (sequence is synthesized)
ttcataaaggtttacttcaacttcagtggaagcaagatctggatagaggtttggaacttatcagcaaggctattgaaattgacaataaatgtgattttgcctatgaaaccatgggaacta

SEQ ID NO: 442441 - DNA, 120 bp, Artificial Sequence
  ENSG00000154174_15 (sequence is synthesized)
ttgaagtacaaagaggaaacatggagaaagccattgacatgttcaacaaagctattaacctggccaaatcggaaatggagatggcccatctgtattcactttgcgatgccgcccatgccc

SEQ ID NO: 442442 - DNA, 120 bp, Artificial Sequence
  ENSG00000154174_16 (sequence is synthesized)
agacagaagttgcaaagaaatacggattaaaaccaccaacattataaaacagggggaaagcagactgaccctctttttaaaagtttaccccctcttcaactgaaccctaaagacactgtc

SEQ ID NO: 442443 - DNA, 120 bp, Artificial Sequence
  ENSG00000154174_17 (sequence is synthesized)
gaaatcagtatttctgtttgtggtgttgttatttgttacatctgtttcatgtctaggtgttgtgggtgtggctgttgaaggaagtttgcagtcttgcagcttttattccctgtgcaacaa

SEQ ID NO: 442444 - DNA, 120 bp, Artificial Sequence
  ENSG00000154174_18 (sequence is synthesized)
aagattagaacatgttaaagggatttttaaataaagttgcaaagagtacaaatgataattggccatgcaaataaaaactgatttgttgattttttttttaaggggggttggcagttgatt

SEQ ID NO: 442445 - DNA, 120 bp, Artificial Sequence
  ENSG00000154174_19 (sequence is synthesized)
atgttctggatgattccgtctatatatgtgtgaataatgtaagtattttacagcatgttgatttttaaattaacgtagtaaatgctgtaaaatagatttatattcagttaaccgctttca

SEQ ID NO: 442446 - DNA, 120 bp, Artificial Sequence
  ENSG00000154174_20 (sequence is synthesized)
gttgattttttgaaagaaacaaaggttaaatgggggattaaagtaaaattgagagaccctttaaaccattgtcagcatgcacaatgcctctgattctgcagttttagaaacttggtggca

SEQ ID NO: 442447 - DNA, 120 bp, Artificial Sequence
  ENSG00000154174_21 (sequence is synthesized)
cttattaatcctcttggcccctttccactctaatggatagtgtacattcttcttaaagtccacaacagcagattttcttgcagtaaattatgcagatgcaaaatattctaattgatatat

SEQ ID NO: 442448 - DNA, 120 bp, Artificial Sequence
  ENSG00000154174_22 (sequence is synthesized)
gtgttggaagactgagtattgatgggggagtggaccagacaaagaggtaagatgaaacagtagtgtgtttataattgtctgtgactattttctataataattagtactatttaatggtga

SEQ ID NO: 442449 - DNA, 120 bp, Artificial Sequence
  ENSG00000154174_23 (sequence is synthesized)
gcttttaaaaatgtaggatagagggtacagtggcactgtatatactatttatagtctcagctactagggaggctgaggcaagaggcttgagaccaggagctcgaggctgtaatgtgccat

SEQ ID NO: 442450 - DNA, 120 bp, Artificial Sequence
  ENSG00000154174_24 (sequence is synthesized)
cagcctgggcaatatagcaagaccccatcctttaaaaaattttagaacttttttaaaatcaaagtgcagattgcttgtatgtaaaacccaaataaaggtagagtaagtgtgatatatggg

SEQ ID NO: 442451 - DNA, 120 bp, Artificial Sequence
  ENSG00000154174_25 (sequence is synthesized)
caaataaaggtagagtaagtgtgatatatgggagtattaaaatagcttaaaatttctcgtgaaggacatgtggctaaagggtcaaaaaggatgtaagacttggagccagagcatagtatt

SEQ ID NO: 442452 - DNA, 120 bp, Artificial Sequence
  ENSG00000154174_26 (sequence is synthesized)
tcctgaaataacaagtttagtgctttaactatggctacatgtgcttaaggaattttgagccacttatttttgaagatgctgaggacatgtagagtgctttttgtagtgagctaaccttga

SEQ ID NO: 442453 - DNA, 120 bp, Artificial Sequence
  ENSG00000154174_27 (sequence is synthesized)
tctctaaggactaactacccaggtccaggtcttcactaggggtactgacagtgtttaagctttactccacctccttacttagaaatcactttacgatttatttccattttccacttttat

SEQ ID NO: 442454 - DNA, 120 bp, Artificial Sequence
  ENSG00000154174_28 (sequence is synthesized)
agaccatccttttgcttatatgctagatttttctggtgagggaagggttgtgttcttcaggggtcttttgttttgaaatactcaggatggggagaggtttatttaagaacgaattataat

SEQ ID NO: 442455 - DNA, 120 bp, Artificial Sequence
  ENSG00000154174_29 (sequence is synthesized)
tatggtttacactgttgggagtaaaggagcatttttacaccccttaagggtgcttaattctgttgaaaccaaaaagatttgtctacaaatgctatcttttttagaaactattagaaatga

SEQ ID NO: 442456 - DNA, 120 bp, Artificial Sequence
  ENSG00000154174_30 (sequence is synthesized)
ctccctttcaaagtcaatctttggaaaatattgaggaggtcactaattagttggtgcagttaatataattcaagatgatttggatgatgggaagtttgagaccgctgcattttgttttta

SEQ ID NO: 442457 - DNA, 120 bp, Artificial Sequence
  ENSG00000154174_31 (sequence is synthesized)
aattatgcaccttctgataacccccaaatacagaaatgttctacatctctgaatgacctctgactttaaaaaagtttttatttgcatggctgtatttacattaacactgacattttcttc

SEQ ID NO: 442458 - DNA, 120 bp, Artificial Sequence
  ENSG00000154174_32 (sequence is synthesized)
tactcttctcccttctttcatcttggggttgggtagagaaacacaaaggaaactgaagcatgtgccattctatactgtcattccaaattctcatggactattgcctgttgtgaaaatgtt

SEQ ID NO: 442459 - DNA, 120 bp, Artificial Sequence
  ENSG00000154174_33 (sequence is synthesized)
tgaaactgcactgaaagctgcatctgtctgtatctttcttttgtaaatgacctcacatgtaaattcaccaaataaatattacattcaagctcttctatctattctttaaatagaaagata

SEQ ID NO: 442460 - DNA, 120 bp, Artificial Sequence
  ENSG00000154174_34 (sequence is synthesized)
tttcattatgttttgccagattttttaaagcatttcaactgccattcttcaaagggctgtttttgtttttgaagaaactactcttaataataatgtagttggtgcagtgaatctgaaaac

SEQ ID NO: 442461 - DNA, 120 bp, Artificial Sequence
  ENSG00000154174_35 (sequence is synthesized)
ataaatatcaatgatatttatctttatttaggaaaggaaatttttttttcctatagcatccggtagtttcatcgtctccctgtagccactgcctaccatattggactgtatttgggcagt

SEQ ID NO: 442462 - DNA, 120 bp, Artificial Sequence
  ENSG00000154174_36 (sequence is synthesized)
ggtgtaataatagagatgagacactgaacatacttaactggactagttgaattacatttatttacgtatttttttcttagctgaaaatactccttgatcaagttgaagaagcagtggcag

SEQ ID NO: 442463 - DNA, 120 bp, Artificial Sequence
  ENSG00000154174_37 (sequence is synthesized)
gattgattctcatggcccctggttggtcccgaatcacctcagaagaggctcctttgttacacaatttggaaatcatggccctaaactcaatatggggaagcttaaggcgagaatttccct

SEQ ID NO: 442464 - DNA, 120 bp, Artificial Sequence
  ENSG00000154174_38 (sequence is synthesized)
cctgtcttcatttggattggttttgcaaaaagtaattaccttaggaaaatttaccgtatgcaattggtggagaaaatatccacggaaaggcttttctttctatctggtcactgccttttt

SEQ ID NO: 442465 - DNA, 120 bp, Artificial Sequence
  ENSG00000154174_39 (sequence is synthesized)
atatggctaggttgttgtaacggtttattttaatttatctttgctttatctaaaattcctgaaactctcttggtttaggattgaagctatggaaagcaggatttaaatctgaattttttt

SEQ ID NO: 442466 - DNA, 120 bp, Artificial Sequence
  ENSG00000154174_40 (sequence is synthesized)
attgtagtctgaaattcttgaaaacttcttagttttaaatcatccatttaaatgaaaatgattagcttcttgtagtgacggtcatacattttcccctcaaataaaagatctctgaatgac

SEQ ID NO: 442467 - DNA, 120 bp, Artificial Sequence
  ENSG00000154175_0 (sequence is synthesized)
gtgagtaagcccacggcacagctaagtgcagccgcccgcctctgtcactgggagacagtccacttaaatgcagctccagggttgcgaggcacccaccagcatcattccccatgcgaggtg

SEQ ID NO: 442468 - DNA, 120 bp, Artificial Sequence
  ENSG00000154175_1 (sequence is synthesized)
gcaaatgcaacatgctctccagtttggggtgtctacttctctgtggaagtattacactagccctgggaaatgcacagaaattgccaaaaggtaaaaggccaaacctcaaagtccacatca

SEQ ID NO: 442469 - DNA, 120 bp, Artificial Sequence
  ENSG00000154175_2 (sequence is synthesized)
ataccacaagtgactccatcctcttgaagttcttgcgtccaagtccaaatgtaaagcttgaaggtcttctcctgggatatggcagcaatgtatcaccaaaccagtacttccctcttcccg

SEQ ID NO: 442470 - DNA, 120 bp, Artificial Sequence
  ENSG00000154175_3 (sequence is synthesized)
ctgaagggaaattcacagaagctatagttgatgcagagccgaaatatctgatagttgtgcgacctgctccacctccaagtcaaaagaagtcatgttcaggtaaaactcgttctcgcaaac

SEQ ID NO: 442471 - DNA, 120 bp, Artificial Sequence
  ENSG00000154175_4 (sequence is synthesized)
ctctgcagctggtggttggcactctgacaccgagctcggtcttcctgtcctggggtttcctcatcaacccacaccatgactggacattgccaagtcactgtcccaatgacagattttata

SEQ ID NO: 442472 - DNA, 120 bp, Artificial Sequence
  ENSG00000154175_5 (sequence is synthesized)
caattcgctatcgagaaaaggataaagaaaagaagtggatttttcaaatctgtccagccactgaaacaattgtggaaaacctaaagcccaacacagtttatgaatttggagtgaaagaca

SEQ ID NO: 442473 - DNA, 120 bp, Artificial Sequence
  ENSG00000154175_6 (sequence is synthesized)
atgtggaaggtggaatttggagtaagattttcaatcacaagactgttgttggaagtaaaaaagtaaatgggaaaatccaaagtacctatgaccaagaccacacagtgccagcatatgtcc

SEQ ID NO: 442474 - DNA, 120 bp, Artificial Sequence
  ENSG00000154175_7 (sequence is synthesized)
caaggaaactaatcccaataacaatcatcaagcaagtgattcagaatgttactcacaaggattcagctaaatccccagaaaaagctccactgggaggagtgatactagtccaccttatta

SEQ ID NO: 442475 - DNA, 120 bp, Artificial Sequence
  ENSG00000154175_8 (sequence is synthesized)
ttccaggtcttaatgaaactactgtaaaacttcctgcatccctaatgtttgagatttcagatgcactcaagacacaattagctaagaatgaaaccttggcattacctgccgaatctaaaa

SEQ ID NO: 442476 - DNA, 120 bp, Artificial Sequence
  ENSG00000154175_9 (sequence is synthesized)
caccagaggttgaaaaaatctcagcacgacccacaacagtgactcctgaaacagttccaagaagcactaaacccactacgtctagtgcattagatgtttcagaaacaacactggcttcaa

SEQ ID NO: 442477 - DNA, 120 bp, Artificial Sequence
  ENSG00000154175_10 (sequence is synthesized)
gtgaaaagccatggattgtgcctacagctaaaatatctgaagattccaaagttctgcagcctcaaactgcaacttatgatgttttctcaagccctacaacatcagatgagcctgagatat

SEQ ID NO: 442478 - DNA, 120 bp, Artificial Sequence
  ENSG00000154175_11 (sequence is synthesized)
cagattcctacacagcaacaagtgatcgtattctggattctatcccacctaaaacttctagaactcttgaacagccaagggcaacactggctccaagtgaaacaccatttgttcctcaaa

SEQ ID NO: 442479 - DNA, 120 bp, Artificial Sequence
  ENSG00000154175_12 (sequence is synthesized)
aactggaaatctttaccagtccagaaatgcagcctacgacacctgctccccagcaaactacatctatcccttctacacctaaacgacgcccccggcccaaaccgccaagaaccaaacctg

SEQ ID NO: 442480 - DNA, 120 bp, Artificial Sequence
  ENSG00000154175_13 (sequence is synthesized)
aaagaaccacaagtgccggaacaattacacctaaaatttctaaaagccctgaacctacatggacaacaccggctcccggtaaaacacaatttatttctctgaaacctaaaatccctctca

SEQ ID NO: 442481 - DNA, 120 bp, Artificial Sequence
  ENSG00000154175_14 (sequence is synthesized)
gcccagaagtgacacacaccaaacctgctcccaagcagacaccacgtgctcctcctaagccaaaaacatcaccacgcccaagaatcccacaaacacaaccagttcctaaggtgccccagc

SEQ ID NO: 442482 - DNA, 120 bp, Artificial Sequence
  ENSG00000154175_15 (sequence is synthesized)
gtgttactgcaaaaccaaaaacgtcaccaagtccagaagtgtcatacaccacacctgctccaaaagatgtgctccttcctcataaaccataccctgaggtctctcagagcgaacctgctc

SEQ ID NO: 442483 - DNA, 120 bp, Artificial Sequence
  ENSG00000154175_16 (sequence is synthesized)
ctctagagacacgaggcatcccttttatacccatgatttccccaagtcctagtcaagaggaactacagaccactctggaagaaacagaccaatccacccaagaacctttcacaactaaga

SEQ ID NO: 442484 - DNA, 120 bp, Artificial Sequence
  ENSG00000154175_17 (sequence is synthesized)
ttccacgaacaactgaactagcaaagacaactcaggcgccacacagattttatactactgtgaggcccagaacatctgacaagccacacatcagacctggggtcaagcaagcacccaggc

SEQ ID NO: 442485 - DNA, 120 bp, Artificial Sequence
  ENSG00000154175_18 (sequence is synthesized)
gactcgccgcccacccttgccacccagacctacacacccacgaagaaaacctttaccaccaaataatgtcactggaaagccaggaagtgcaggaatcatttcatcaggcccaataactac

SEQ ID NO: 442486 - DNA, 120 bp, Artificial Sequence
  ENSG00000154175_19 (sequence is synthesized)
accacccctgaggtcaacacccaggcctactggaactcccttggagagaatagagacagatataaagcaaccaacagttcctgcctctggagaagaactggaaaatataactgactttag

SEQ ID NO: 442487 - DNA, 120 bp, Artificial Sequence
  ENSG00000154175_20 (sequence is synthesized)
ctcaagcccaacaagagaaactgatcctcttgggaagccaagattcaaaggacctcatgtgcgatacatccaaaagcctgacaacagtccctgctccattactgactctgtcaaacggtt

SEQ ID NO: 442488 - DNA, 120 bp, Artificial Sequence
  ENSG00000154175_21 (sequence is synthesized)
ccccaaagaggaggccacagaggggaatgccaccagcccaccacagaacccacccaccaacctcactgtggtcaccgtggaagggtgcccctcatttgtcatcttggactgggaaaagcc

SEQ ID NO: 442489 - DNA, 120 bp, Artificial Sequence
  ENSG00000154175_22 (sequence is synthesized)
actaaatgacactgtcactgaatatgaagttatatccagagaaaatgggtcattcagtgggaagaacaagtccattcaaatgacaaatcagacattttccacagtagaaaatctgaaacc

SEQ ID NO: 442490 - DNA, 120 bp, Artificial Sequence
  ENSG00000154175_23 (sequence is synthesized)
aaacacgagttatgaattccaggtgaaacccaaaaacccgcttggtgaaggcccggtcagcaacacagtggcattcagtactgaatcagcggacccaagagtgagtgagccagtttctgc

SEQ ID NO: 442491 - DNA, 120 bp, Artificial Sequence
  ENSG00000154175_24 (sequence is synthesized)
aggaagagatgccatctggactgaaagaccctttaattcagactcttactcagagtgtaagggcaaacaatatgtcaaaaggacatggtataaaaaatttgtaggagtgcagctgtgcaa

SEQ ID NO: 442492 - DNA, 120 bp, Artificial Sequence
  ENSG00000154175_25 (sequence is synthesized)
ctctctcagatacaagatttacttgagcgactccctcacaggaaaattttataacataggtgatcagaggggccatggagaagatcactgccagtttgtggattcatttttagatggacg

SEQ ID NO: 442493 - DNA, 120 bp, Artificial Sequence
  ENSG00000154175_26 (sequence is synthesized)
cactgggcagcaactcacttctgaccagttaccaatcaaagaaggttatttcagagcagttcgccaggaacctgtccaatttggagaaataggtggtcacacccaaatcaattatgttca

SEQ ID NO: 442494 - DNA, 120 bp, Artificial Sequence
  ENSG00000154175_27 (sequence is synthesized)
gtggtatgaatgtgggactacaattcctggaaaatggtagatgctgcacaaagttaccttctgtttcatcattgcaaacaaaaatcattgaaaatactatgccgcattcatttaaagcta

SEQ ID NO: 442495 - DNA, 120 bp, Artificial Sequence
  ENSG00000154175_28 (sequence is synthesized)
ttttgtttactatgtataaaagtctacaatctaattaatagcaatactagatgtttattattagaaaagattgctgagagtatttatcaggttttacaaagtcattttaagaaagcaaga

SEQ ID NO: 442496 - DNA, 120 bp, Artificial Sequence
  ENSG00000154175_29 (sequence is synthesized)
tactgatgttaacagaataacatttttggggaagctggctccctattcatggtattttaagagatcatttgtatattatttatcacactgttgtaatgatgttttgagatacttttataa

SEQ ID NO: 442497 - DNA, 120 bp, Artificial Sequence
  ENSG00000154175_30 (sequence is synthesized)
caaaattaacatcaaaaaggtatatactttttaaaaaaaatttacttttattgatgtgtactcttcctattgatgagttaattccataaatctctacttagtttaacttattggatcaaa

SEQ ID NO: 442498 - DNA, 120 bp, Artificial Sequence
  ENSG00000154175_31 (sequence is synthesized)
ttatcttcagcatgtatatctggggaaaaaaggtccgaattttcacatttatatttaaacttcaattttttatatttaaacttcaattttttagcaacagctgaatagctttgcggagga

SEQ ID NO: 442499 - DNA, 120 bp, Artificial Sequence
  ENSG00000154175_32 (sequence is synthesized)
gtttaatagttacacattcatgctaatatacatttcctttaaacatccacaaattcttaaaaagattgaatcagtaaatttcatttcagctaaaaatggagtctaatatattgtttcaaa

SEQ ID NO: 442500 - DNA, 120 bp, Artificial Sequence
  ENSG00000154175_33 (sequence is synthesized)
agatacatttttacccaccataaatgttacaatatctgaatatgctttgtcaaactatccctttatgcaatcgtcttcatattgtttttatgattctaatcaagctgtatgtagagactg

SEQ ID NO: 442501 - DNA, 120 bp, Artificial Sequence
  ENSG00000154175_34 (sequence is synthesized)
aatgtgaagtcaagtctgagcacaaaaagataatgcacgatgagattgcctaccattttataggatatttactatgtatttatacgttaagacctctatgaatgaatgtatcagagaatg

SEQ ID NO: 442502 - DNA, 120 bp, Artificial Sequence
  ENSG00000154175_35 (sequence is synthesized)
tctttgtaactgtttaattcaatctgtaataaaaatctaactaactaactcatttatttctattaaaaaggtattgtcctttaggcggggaatgggaatccttgctgcactgttgcagtc

SEQ ID NO: 442503 - DNA, 120 bp, Artificial Sequence
  ENSG00000154175_36 (sequence is synthesized)
attctgaaaggacctttccctgtacttacctttcaacatgcttcaatcttatcaacgctacattttgtatttttcaaacaagtataaattctgcaataaagagatgtagtttttttttaa

SEQ ID NO: 442504 - DNA, 120 bp, Artificial Sequence
  ENSG00000154175_37 (sequence is synthesized)
gcaaaaggaccccggaaacattgcaaactattctaatacctcagtttgaattgccactgagcactctagctccaaaaagccttccagaatttcctgaggcaaaaacacccttcccttttg

SEQ ID NO: 442505 - DNA, 120 bp, Artificial Sequence
  ENSG00000154175_38 (sequence is synthesized)
cttcaacaacattagcaccacgaaagaccaaaagaccaggtcgtcgcccccgcccccgtccccgccctaaaaccacacctagtccagaagtgcccaagtccaaacccgctctggaacctg

SEQ ID NO: 442506 - DNA, 120 bp, Artificial Sequence
  ENSG00000154175_39 (sequence is synthesized)
ccacgatacaaccggagcccttggtgcccacaactgcctcaaaaccatctgagagacctaaaaccacacacagaccagatgcacctcaaattcagcctggttcaaaaccaccaaaacaat

SEQ ID NO: 442507 - DNA, 120 bp, Artificial Sequence
  ENSG00000154175_40 (sequence is synthesized)
tacttcctaaaccccaaaccacagcagaaccagacatgccaccaactaaatccgtctctgagcctgttccatttgaaactgaagctccctcaatgaccatagttcccaccacagacattg

SEQ ID NO: 442508 - DNA, 120 bp, Artificial Sequence
  ENSG00000154175_41 (sequence is synthesized)
agcctgtaactgtgagaactgaggctacagtgacaacattagctccaaaaacatcgcaacgaacaagaacacgtcgtccacgtcccaaacataaaaccacgccacgcccagagacactgc

SEQ ID NO: 442509 - DNA, 120 bp, Artificial Sequence
  ENSG00000154175_42 (sequence is synthesized)
agaccaaactagactttggacctattactcctgggacatcttcagctccaacaacaacaacaaaaagaacccgtcgtccacatcccaaacctaaaaccacgccccatccagaagtacctc

SEQ ID NO: 442510 - DNA, 120 bp, Artificial Sequence
  ENSG00000154175_43 (sequence is synthesized)
aaactaaactggttcctgccacaatcctcgaaccagttcttagaactgaggcttcagggacaacagcagctcccaaagtgcctcaacgaactcatcgtccacatcccaaacctaaaacca

SEQ ID NO: 442511 - DNA, 120 bp, Artificial Sequence
  ENSG00000154175_44 (sequence is synthesized)
cactgagtcccgaagagcttcagactgaactggttcctgctacaatctttgaaccagtttctcctataaaagaggctccagggacaacattcgttcctgttacagacctcgagcctgtta

SEQ ID NO: 442512 - DNA, 120 bp, Artificial Sequence
  ENSG00000154175_45 (sequence is synthesized)
cttttagaactgagatccctgcaacaaccttagctaccaaaacatcaaaaagaacccgccctccacgtcccagacctaaaactacaccgagccctcaggcacctgagaccaaacctgttc

SEQ ID NO: 442513 - DNA, 120 bp, Artificial Sequence
  ENSG00000154175_46 (sequence is synthesized)
ctgctacagtcctagaacctgtcactcttagacctgaggcctcaacaacattagcttccaaaacatcacaacggacacgtcgtccacgtctcagaacaaaaaccacaccacgtcctgaag

SEQ ID NO: 442514 - DNA, 120 bp, Artificial Sequence
  ENSG00000154175_47 (sequence is synthesized)
cacctgaatccaaaccagttcctactgcggagctcaaacctgttacactcagaactgagacttgggtgacaacacaagctcctaaaacatcacaacgaactcgtcgtccacgtcccaaaa

SEQ ID NO: 442515 - DNA, 120 bp, Artificial Sequence
  ENSG00000154175_48 (sequence is synthesized)
ctaaaaccacaccaagtcctgaggttcctcaaaccaaactggttccttctacagatcttgaacctggtactctcagaactgaagctccaaaaaccatggttgttactacagtccttgaac

SEQ ID NO: 442516 - DNA, 120 bp, Artificial Sequence
  ENSG00000154175_49 (sequence is synthesized)
ctgacacttttagaaccaagtttccagaaacaacgttagctcctaaaacacaacggacacgtcgtccccgtcccagacccaaaactacatcaagtcctgaagtacctcagaacaaatcgg

SEQ ID NO: 442517 - DNA, 120 bp, Artificial Sequence
  ENSG00000154175_50 (sequence is synthesized)
tgactgaactgcaaactcttattttgaaaccagtgacatcaccaagcctagaaatgacagaaagtcaacctgtttctgatgttctggaatcggttacacttagtactgagtcaccaaagg

SEQ ID NO: 442518 - DNA, 120 bp, Artificial Sequence
  ENSG00000154175_51 (sequence is synthesized)
agaccatagcaccagccaaaacagactatgtatatcccactgccaaagcaccactctggccagaggagccaaagactgaagttgtggaatctattacatatgtatctgaaccacctgaga

SEQ ID NO: 442519 - DNA, 120 bp, Artificial Sequence
  ENSG00000154175_52 (sequence is synthesized)
tcgagaaggaaaatcactaagttttattcaggctctaccaacccccattatatctactgtttgtttatgtcctaaattaacctttcatcctatgaagtaataaagttcattttaaaccaa

SEQ ID NO: 442520 - DNA, 120 bp, Artificial Sequence
  ENSG00000154175_53 (sequence is synthesized)
atgcctatgacgggaagtaacagtcatcatgttttctaagaatcaaattatttaacatgggtagcaactgcttctcgtacagagctatccaggagaacatggcttggagccacttgtgtg

SEQ ID NO: 442521 - DNA, 120 bp, Artificial Sequence
  ENSG00000154175_54 (sequence is synthesized)
cctgatctcctaaatgacttggtttggatgacgttcttggtccctctttaaagatgtgtttacagcgagattagcatactcatgggtatttattgctatatctgcattgaaacatgtgat

SEQ ID NO: 442522 - DNA, 120 bp, Artificial Sequence
  ENSG00000154175_55 (sequence is synthesized)
ccatttgttatgattacataaacaggcatttattttcaacttccaagaaaagcaacaagttactttcatatatatttctctctgtattttcgtatctgttgcctaaacaaatttccaaag

SEQ ID NO: 442523 - DNA, 120 bp, Artificial Sequence
  ENSG00000154175_56 (sequence is synthesized)
ccaaatatccatactagttagaaaaccaaatacctaggaaaacctcatgtggataatatcaagatatgtaacagagttcaaaggttgtaactaccttctttgatgaattgttctagctag

SEQ ID NO: 442524 - DNA, 120 bp, Artificial Sequence
  ENSG00000154175_57 (sequence is synthesized)
tgtggccaaatcttccaaaagcaactatatgctgcctatcaattcaaaagttttaaaaaattgtgtatcatttgaaactcatgttttaaaataaaaattgaggattttttttaaaaagtc

SEQ ID NO: 442525 - DNA, 76 bp, Artificial Sequence
  ENSG00000154175_58 (sequence is synthesized)
atggcaaattagctttttcatgtgcaactggattgatttgctagtattttgttgaggatttctcattgtgtttctg

SEQ ID NO: 442526 - DNA, 120 bp, Artificial Sequence
  ENSG00000154175_59 (sequence is synthesized)
ccaggttttggtattagaatgatactggcctcatagaatgagttatggaggagtccctcctcctcaattttttggggaataatttcagtaggattggtaccagttcatctttataggtgg

SEQ ID NO: 442527 - DNA, 120 bp, Artificial Sequence
  ENSG00000154175_60 (sequence is synthesized)
accagcatcattccccatgcgaggtggcaaatgcaacatgctctccagtttggggtgtctacttctctgtggaagtattacactagccctgggaaatgcacagaaattgccaaaagcaaa

SEQ ID NO: 442528 - DNA, 120 bp, Artificial Sequence
  ENSG00000154175_61 (sequence is synthesized)
taaaaggactgaactagtgatacagcatggatggatgagtctcataaaaatgatgctgaatgaaagaagccaggtgtgaagagaacatgtcatgtaaaaggccaaacctcaaagtccaca

SEQ ID NO: 442529 - DNA, 120 bp, Artificial Sequence
  ENSG00000154175_62 (sequence is synthesized)
tgtatattcatctataatgaggacatgttttctatatactacagtgcgttgttgtccctggggacattaccaacatttatttataggaatatctgaatatatttgtgtgcacttttctgt

SEQ ID NO: 442530 - DNA, 120 bp, Artificial Sequence
  ENSG00000154175_63 (sequence is synthesized)
agaatctattctctgtcatccaactgctaattatcaaacattattttttatttttaaaaaccctgtttttttcgataatgaatctttatgatggctttatctaaaatacaatctcttatc

SEQ ID NO: 442531 - DNA, 120 bp, Artificial Sequence
  ENSG00000154175_64 (sequence is synthesized)
cagctaaaatatctgaagattccaaagttctgcagcctcaaactgctctgactgaactgcaaactcttattttgaaaccagtgacatcaccaagcctagaaatgacagaaagtcaacctg

SEQ ID NO: 442532 - DNA, 120 bp, Artificial Sequence
  ENSG00000154175_65 (sequence is synthesized)
ctcacataataaataagcctatcaagaaggcaatttatattaatttagaataaactagactctgtgtcctctgaattaaacaccaatgagcacccaaaagtttagacttccttgctttta

SEQ ID NO: 442533 - DNA, 120 bp, Artificial Sequence
  ENSG00000154175_66 (sequence is synthesized)
tgggaatgttttgcagcattgtacaacttggccttttcttaagagtttcaggcacgaatgggtgctgtaaacacaagttttcctctgagcaaaatgttacggaaacagttatcattccta

SEQ ID NO: 442534 - DNA, 120 bp, Artificial Sequence
  ENSG00000154175_67 (sequence is synthesized)
gaaagcaaggatttaagacatgctattagaaggtaaataataaaaatgcaattataaaacagtgccatcatgacaaactggaatgtacattcactaaccatggtcaaactccattttgtt

SEQ ID NO: 442535 - DNA, 120 bp, Artificial Sequence
  ENSG00000154175_68 (sequence is synthesized)
ccatttaatgtatagtttatttctaggttttccttctgtgtttttagacactgaaatgcctaaatattgatttgtttattattttgtttctttatttttccagctcccggtaaaacacaa

SEQ ID NO: 442536 - DNA, 120 bp, Artificial Sequence
  ENSG00000154175_69 (sequence is synthesized)
aaactattctaatacctcagtttgaattgccactgagcactctagcttcaagtgaaaagccatggattgtgcctacagctaaaatatctgaagattccaaagttctgcagcctcaaactg

SEQ ID NO: 442537 - DNA, 120 bp, Artificial Sequence
  ENSG00000154175_70 (sequence is synthesized)
caaacccagtgggatgcccagtgggaatggagtgggaacaggggtcaagcaagcacccaggccatcaggtgctgatagaaatgtatcagtggactctacccaccccactaaaaagccagg

SEQ ID NO: 442538 - DNA, 120 bp, Artificial Sequence
  ENSG00000154175_71 (sequence is synthesized)
aaagaaacctggtgccttaacttctctctccctccccactttctccttttccttccttcctggcagtggttaaccttcctctttcttggacagattccactgaagagttaaccacatggc

SEQ ID NO: 442539 - DNA, 120 bp, Artificial Sequence
  ENSG00000154175_72 (sequence is synthesized)
tgatcctggtgactgaacttctgggcaaatctggatgctaattgctaactaaatgccctttttaaccagtctctgggttatacagacagaataccagccttttaactcccaaatcttggg

SEQ ID NO: 442540 - DNA, 120 bp, Artificial Sequence
  ENSG00000154175_73 (sequence is synthesized)
ggagaatgaaggaaacctggaagtcttgactctgtgctttctgcttagagtggctttgggaagtcttgtgcatactaaatttgggaagaatccccaaaagtgtcatgcttttaaacaaga

SEQ ID NO: 442541 - DNA, 120 bp, Artificial Sequence
  ENSG00000154175_74 (sequence is synthesized)
atttcatggcacccatgtttgttgtttcttagcccaagagaatctaacttgctttgttgttctctttcccctgaagaaaaggagcagcatgtgttttgttctgtaatttgatgttgatct

SEQ ID NO: 442542 - DNA, 120 bp, Artificial Sequence
  ENSG00000154175_75 (sequence is synthesized)
agggaaggttatttccattaaaggtattggctgctctgtgtgcaagagtctgttacaaagcttgctgtgcatgatcatggttaagccacaacatcaaaacccaagtccaggagttgctaa

SEQ ID NO: 442543 - DNA, 120 bp, Artificial Sequence
  ENSG00000154175_76 (sequence is synthesized)
ctgcactcttttttattgtagttctcagcaaaaggaccccggaaacattgcaaactattctaatacctcagtttgaattgccactgagcactctaggtaaaaaataataaatactgcagc

SEQ ID NO: 442544 - DNA, 120 bp, Artificial Sequence
  ENSG00000154175_77 (sequence is synthesized)
tttattattaccttggatattgtatgcatgcttcaaagaagtcttttgaattaattacgctaatttatacccaatcccttaaaggtgacacagtcttcaagtttaggatcccaaagaggc

SEQ ID NO: 442545 - DNA, 120 bp, Artificial Sequence
  ENSG00000154175_78 (sequence is synthesized)
tctccctatgacaaattgtttggttgggttgtttttcttttaagtggtcatattttaatattatgtttgattcttttaattcagaatcaatatgtcactgaacaaattgatcatttctgt

SEQ ID NO: 442546 - DNA, 120 bp, Artificial Sequence
  ENSG00000154175_79 (sequence is synthesized)
attttttgtaaatgtgtttactctattgtctctcttaacagagaagatatatttatgatatttctgcagactgcttcttataattcttagaattcttctgagtgaagtatgagaaaaatg

SEQ ID NO: 442547 - DNA, 75 bp, Artificial Sequence
  ENSG00000154175_80 (sequence is synthesized)
taattcttagaattcttctgagtgaagtatgagaaaaatgagggcagggtgcagcggctcatgcctgtaagtagt

SEQ ID NO: 442548 - DNA, 120 bp, Artificial Sequence
  ENSG00000154175_81 (sequence is synthesized)
gactccatctcaaaaaaaaaaaagaggttgggggaggagcttacatataaagccacgtagttaccaaaactctatttttaaaagctttcagatggacattttctagttcagatgtgtttg

SEQ ID NO: 442549 - DNA, 120 bp, Artificial Sequence
  ENSG00000154175_82 (sequence is synthesized)
cagatggacattttctagttcagatgtgtttgcttggtttaaatttaaatgaaatatatttaagaacacacataaacatagctgaagaaatcagcaaactggtttaataagggtggaaag

SEQ ID NO: 442550 - DNA, 120 bp, Artificial Sequence
  ENSG00000154175_83 (sequence is synthesized)
aagagtccaaatacagtagcttaaatttagtcacttaactataaaaaactgaaaaagaaactttcttatattcaacattgaaacatagatgtaagaaatactactaatggtctcttaaca

SEQ ID NO: 442551 - DNA, 120 bp, Artificial Sequence
  ENSG00000154175_84 (sequence is synthesized)
tgatttgcctttttgtgtttgcttttgtttttgcaagcttaaaattttaaaaatctttcctgttactttcacctcaggtcgtaactttctttatgtgtttcattacagctccaaaaagcc

SEQ ID NO: 442552 - DNA, 120 bp, Artificial Sequence
  ENSG00000154175_85 (sequence is synthesized)
ttccagaatttcctgaggcaaaaacacccttcccttttgagaaacctaggggcacattgggtaataagagtaccttaaatttaatattaaggctgtgggtggtgattgcttaattctgca

SEQ ID NO: 442553 - DNA, 120 bp, Artificial Sequence
  ENSG00000154175_86 (sequence is synthesized)
ggacacatttactgcatcttatttctggaaacctcatgaactgatagttaggcaaacaaatggttgatttgatttttttttaataaatctatttggattttctgcaaattcggtaaaacc

SEQ ID NO: 442554 - DNA, 120 bp, Artificial Sequence
  ENSG00000154175_87 (sequence is synthesized)
catcagtcttaattccacataatccacttagctttttgtccttaaaaatgctgacagtctgacaccaaactctggtctctctctgaccactaatcaaatgttctctggatggatacatac

SEQ ID NO: 442555 - DNA, 120 bp, Artificial Sequence
  ENSG00000154175_88 (sequence is synthesized)
tgatttcttactgatatataatgactttttattgtattggtatactgcaggcttctggtagccacttaaccataccagcaacctatttctgtctcgttctcctgttaaaaaaaaaaaaaa

SEQ ID NO: 442556 - DNA, 120 bp, Artificial Sequence
  ENSG00000154175_89 (sequence is synthesized)
ctgttacctttagatttgagccaccaaagacaacaatagctcctctagagacacgaggcatcccttttatacccatgatttccccaagtcctagtcaagaggaactacagaccactctgg

SEQ ID NO: 442557 - DNA, 120 bp, Artificial Sequence
  ENSG00000154188_0 (sequence is synthesized)
agcagatctgcagcagatagggtagaggaaagggtctagaatatgtacacgcagctgactcaggcaggctccatgctgaacggtcacacagagaggaaacaataaatctcagctactatg

SEQ ID NO: 442558 - DNA, 120 bp, Artificial Sequence
  ENSG00000154188_1 (sequence is synthesized)
caataaatatctcaagttttaacgaagaaaaacatcattgcagtgaaataaaaaattttaaaattttagaacaaagctaacaaatggctagttttctatgattcttcttcaaacgctttc

SEQ ID NO: 442559 - DNA, 120 bp, Artificial Sequence
  ENSG00000154188_2 (sequence is synthesized)
tttgagggggaaagagtcaaacaaacaagcagttttacctgaaataaagaactagttttagaggtcagaagaaaggagcaagttttgcgagaggcacggaaggagtgtgctggcagtaca

SEQ ID NO: 442560 - DNA, 120 bp, Artificial Sequence
  ENSG00000154188_3 (sequence is synthesized)
atgacagttttcctttcctttgctttcctcgctgccattctgactcacatagggtgcagcaatcagcgccgaagtccagaaaacagtgggagaagatataaccggattcaacatgggcaa

SEQ ID NO: 442561 - DNA, 120 bp, Artificial Sequence
  ENSG00000154188_4 (sequence is synthesized)
tgtgcctacactttcattcttccagaacacgatggcaactgtcgtgagagtacgacagaccagtacaacacaaacgctctgcagagagatgctccacacgtggaaccggatttctcttcc

SEQ ID NO: 442562 - DNA, 120 bp, Artificial Sequence
  ENSG00000154188_5 (sequence is synthesized)
cagaaacttcaacatctggaacatgtgatggaaaattatactcagtggctgcaaaaacttgagaattacattgtggaaaacatgaagtcggagatggcccagatacagcagaatgcagtt

SEQ ID NO: 442563 - DNA, 120 bp, Artificial Sequence
  ENSG00000154188_6 (sequence is synthesized)
cagaaccacacggctaccatgctggagataggaaccagcctcctctctcagactgcagagcagaccagaaagctgacagatgttgagacccaggtactaaatcaaacttctcgacttgag

SEQ ID NO: 442564 - DNA, 120 bp, Artificial Sequence
  ENSG00000154188_7 (sequence is synthesized)
atacagctgctggagaattcattatccacctacaagctagagaagcaacttcttcaacagacaaatgaaatcttgaagatccatgaaaaaaacagtttattagaacataaaatcttagaa

SEQ ID NO: 442565 - DNA, 120 bp, Artificial Sequence
  ENSG00000154188_8 (sequence is synthesized)
atggaaggaaaacacaaggaagagttggacaccttaaaggaagagaaagagaaccttcaaggcttggttactcgtcaaacatatataatccaggagctggaaaagcaattaaacagagct

SEQ ID NO: 442566 - DNA, 120 bp, Artificial Sequence
  ENSG00000154188_9 (sequence is synthesized)
accaccaacaacagtgtccttcagaagcagcaactggagctgatggacacagtccacaaccttgtcaatctttgcactaaagaaggtgttttactaaagggaggaaaaagagaggaagag

SEQ ID NO: 442567 - DNA, 120 bp, Artificial Sequence
  ENSG00000154188_10 (sequence is synthesized)
aaaccatttagagactgtgcagatgtatatcaagctggttttaataaaagtggaatctacactatttatattaataatatgccagaacccaaaaaggtgttttgcaatatggatgtcaat

SEQ ID NO: 442568 - DNA, 120 bp, Artificial Sequence
  ENSG00000154188_11 (sequence is synthesized)
gggggaggttggactgtaatacaacatcgtgaagatggaagtctagatttccaaagaggctggaaggaatataaaatgggttttggaaatccctccggtgaatattggctggggaatgag

SEQ ID NO: 442569 - DNA, 120 bp, Artificial Sequence
  ENSG00000154188_12 (sequence is synthesized)
tttatttttgccattaccagtcagaggcagtacatgctaagaattgagttaatggactgggaagggaaccgagcctattcacagtatgacagattccacataggaaatgaaaagcaaaac

SEQ ID NO: 442570 - DNA, 120 bp, Artificial Sequence
  ENSG00000154188_13 (sequence is synthesized)
tataggttgtatttaaaaggtcacactgggacagcaggaaaacagagcagcctgatcttacacggtgctgatttcagcactaaagatgctgataatgacaactgtatgtgcaaatgtgcc

SEQ ID NO: 442571 - DNA, 120 bp, Artificial Sequence
  ENSG00000154188_14 (sequence is synthesized)
ctcatgttaacaggaggatggtggtttgatgcttgtggcccctccaatctaaatggaatgttctatactgcgggacaaaaccatggaaaactgaatgggataaagtggcactacttcaaa

SEQ ID NO: 442572 - DNA, 120 bp, Artificial Sequence
  ENSG00000154188_15 (sequence is synthesized)
gggcccagttactccttacgttccacaactatgatgattcgacctttagatttttgaaagcgcaatgtcagaagcgattatgaaagcaacaaagaaatccggagaagctgccaggtgaga

SEQ ID NO: 442573 - DNA, 120 bp, Artificial Sequence
  ENSG00000154188_16 (sequence is synthesized)
aactgtttgaaaacttcagaagcaaacaatattgtctcccttccagcaataagtggtagttatgtgaagtcaccaaggttcttgaccgtgaatctggagccgtttgagttcacaagagtc

SEQ ID NO: 442574 - DNA, 120 bp, Artificial Sequence
  ENSG00000154188_17 (sequence is synthesized)
cgactatagaaaactccactgactgtcgggctttaaaaagggaagaaactgctgagcttgctgtgcttcaaactactactggaccttattttggaactatggtagccagatgataaatat

SEQ ID NO: 442575 - DNA, 120 bp, Artificial Sequence
  ENSG00000154188_18 (sequence is synthesized)
ggttaatttcatgtaaaacagaaaaaaagagtgaaaaagagaatatacatgaagaatagaaacaagcctgccataatcctttggaaaagatgtattataccagtgaaaaggtgttatatc

SEQ ID NO: 442576 - DNA, 120 bp, Artificial Sequence
  ENSG00000154188_19 (sequence is synthesized)
tatgcaaacctactaacaaattatactgttgcacaattttgataaaaatttagaacagcattgtcctctgagttggttaaatgttaatggatttcagaagcctaattccagtatcatact

SEQ ID NO: 442577 - DNA, 120 bp, Artificial Sequence
  ENSG00000154188_20 (sequence is synthesized)
tactagttgatttctgcttacccatcttcaaatgaaaattccatttttgtaagccataatgaactgtagtacatggacaataagtgtgtggtagaaacaaactccattactctgattttt

SEQ ID NO: 442578 - DNA, 120 bp, Artificial Sequence
  ENSG00000154188_21 (sequence is synthesized)
gatacagttttcagaaaaagaaatgaacataatcaagtaaggatgtatgtggtgaaaacttaccacccccatactatggttttcatttactctaaaaactgattgaatgatatataaata

SEQ ID NO: 442579 - DNA, 120 bp, Artificial Sequence
  ENSG00000154188_22 (sequence is synthesized)
tatttatagcctgagtaaagttaaaagaatgtaaaatatatcatcaagttcttaaaataatatacatgcatttaatatttcctttgatattatacaggaaagcaatattttggagtatgt

SEQ ID NO: 442580 - DNA, 120 bp, Artificial Sequence
  ENSG00000154188_23 (sequence is synthesized)
taagttgaagtaaaagcaagtactctggagcagttcattttacagtatctacttgcatgtgtatacatacatgtaacttcattattttaaaaatatttttagaactccaatactcaccct

SEQ ID NO: 442581 - DNA, 120 bp, Artificial Sequence
  ENSG00000154188_24 (sequence is synthesized)
gttatgtcttgctaatttaaattttgctaattaactgaaacatgcttaccagattcacactgttccagtgtctataaaagaaacactttgaagtctataaaaaataaaataattataaat

SEQ ID NO: 442582 - DNA, 120 bp, Artificial Sequence
  ENSG00000154188_25 (sequence is synthesized)
atcattgtacatagcatgtttatatctgcaaaaaacctaatagctaattaatctggaatatgcaacattgtccttaattgatgcaaataacacaaatgctcaaagaaatctactatatcc

SEQ ID NO: 442583 - DNA, 120 bp, Artificial Sequence
  ENSG00000154188_26 (sequence is synthesized)
cttaatgaaatacatcattcttcatatatttctccttcagtccattcccttaggcaatttttaatttttaaaaattattatcaggggagaaaaattggcaaaactattatatgtaaggga

SEQ ID NO: 442584 - DNA, 120 bp, Artificial Sequence
  ENSG00000154188_27 (sequence is synthesized)
aatatatacaaaaagaaaattaatcatagtcacctgactaagaaattctgactgctagttgccataaataactcaatggaaatattcctatgggataatgtattttaagtgaatttttgg

SEQ ID NO: 442585 - DNA, 120 bp, Artificial Sequence
  ENSG00000154188_28 (sequence is synthesized)
ggtgcttgaagttactgcattattttatcaagaagtcttctctgcctgtaagtgtccaaggttatgacagtaaacagtttttattaaaacatgagtcactatgggatgagaaaattgaaa

SEQ ID NO: 442586 - DNA, 120 bp, Artificial Sequence
  ENSG00000154188_29 (sequence is synthesized)
taaagctactgggcctcctctcataaaagagacagttgttggcaaggtagcaataccagtttcaaacttggtgacttgatccactatgccttaatggtttcctccatttgagaaaataaa

SEQ ID NO: 442587 - DNA, 120 bp, Artificial Sequence
  ENSG00000154188_30 (sequence is synthesized)
gctattcacattgttaagaaaaatactttttaaagtttaccatcaagtcttttttatatttatgtgtctgtattctacccctttttgccttacaagtgatatttgcaggtattataccat

SEQ ID NO: 442588 - DNA, 120 bp, Artificial Sequence
  ENSG00000154188_31 (sequence is synthesized)
ttttctattcttggtggcttcttcatagcaggtaagcctctccttctaaaaacttctcaactgttttcatttaagggaaagaaaatgagtattttgtccttttgtgttcctacagacact

SEQ ID NO: 442589 - DNA, 90 bp, Artificial Sequence
  ENSG00000154188_32 (sequence is synthesized)
gaaaatgagtattttgtccttttgtgttcctacagacactttcttaaaccagtttttggataaagaatactatttccaaactcatattac

SEQ ID NO: 442590 - DNA, 120 bp, Artificial Sequence
  ENSG00000154188_33 (sequence is synthesized)
attgtttccaattatttataataaatcagtataaaatgttttatgattgttatgtgtattatgtaatacgtacatgtttatggcaatttaacatgtgtattcttttaattgtttcagaat

SEQ ID NO: 442591 - DNA, 120 bp, Artificial Sequence
  ENSG00000154188_34 (sequence is synthesized)
gaataggataattaggtattcgaattttgtctttaaaattcatgtggtttctatgcaaagttcttcatatcatcacaacattatttgatttaaataaaattgaaagtaatatttgtgcaa

SEQ ID NO: 442592 - DNA, 120 bp, Artificial Sequence
  ENSG00000154188_35 (sequence is synthesized)
gccctaagccatcagcaatccttagtataggggcacactcatgcattcctgtcaagtcatcttgtgaaaggctgcctgcttccagcttggcttggatgtgcaaccttaataaaactcact

SEQ ID NO: 442593 - DNA, 120 bp, Artificial Sequence
  ENSG00000154188_36 (sequence is synthesized)
aaaatcatccttcaaaatgaaaattcttttttttttgtctagacctattacaaagaggtacaaaaaagcctgtaaagactttttcaaagatttaaatttcagttttcgtaggttgactat

SEQ ID NO: 442594 - DNA, 120 bp, Artificial Sequence
  ENSG00000154188_37 (sequence is synthesized)
ctttgatattggcttaaattttagggaatggtgaatgaagtcaagcatactgttgttctgtggttatcatgcagttgcagtgaattcatatatataaaactgataagtttcatactcaaa

SEQ ID NO: 442595 - DNA, 120 bp, Artificial Sequence
  ENSG00000154188_38 (sequence is synthesized)
ctcattggcttaaataatctctttattctaaaaaaagattttctggttctactttttttgatgacctttcttgaattagcatttttcaaatgatcttgaagatgacaaaagtaaaatttt

SEQ ID NO: 442596 - DNA, 120 bp, Artificial Sequence
  ENSG00000154188_39 (sequence is synthesized)
tttatgtttgaatgatttacataaaagagaagatgaggcatgatttagagggttttcttggtaaatctaaaaagcaaaaataaattgtaataatggcatcaatatacataatacatgatt

SEQ ID NO: 442597 - DNA, 120 bp, Artificial Sequence
  ENSG00000154188_40 (sequence is synthesized)
gcagatgtaaaaatagataaactatacacttaatgatacatgtttccaattatcctttttcaatgagaagctcgtctactagggaaaaataaacacacaaaaatatggctaaggaaataa

SEQ ID NO: 442598 - DNA, 120 bp, Artificial Sequence
  ENSG00000154188_41 (sequence is synthesized)
agagctaccaccaacaacagtgtccttcagaagcagcaactggagctgatggacacagtccacaaccttgtcaatctttgcactaaagaaggtgttttgcaatatggatgtcaatggggg

SEQ ID NO: 442599 - DNA, 120 bp, Artificial Sequence
  ENSG00000154188_42 (sequence is synthesized)
gtcactattgaaacttggagatgtttgagtacctgacccatattttatttataataatacccccagttgtaagtgaaaactgatgcccaagaatggttgttgagtaaatcaaaaaataaa

SEQ ID NO: 442600 - DNA, 120 bp, Artificial Sequence
  ENSG00000154188_43 (sequence is synthesized)
tgaataaatgaagtagaattacggaaaataaaagtgtagctcgaggttatgttgactgagagcaggtgcagaaattaaaggaatagtggtggtggggactactgggacaggaatcaacat

SEQ ID NO: 442601 - DNA, 120 bp, Artificial Sequence
  ENSG00000154188_44 (sequence is synthesized)
ttcaaatgtacaatcttggaggtgagtcaattcctagggttaatgaagacatactgtatgtgtggctgttgtcaaagtagggcgagagccttgggaggagagttgtcctatttcatatgc

SEQ ID NO: 442602 - DNA, 120 bp, Artificial Sequence
  ENSG00000154188_45 (sequence is synthesized)
ccacaagtaggcatgtatatcttggacccttccactctgaggaagtacatggacaattcgctctttgaatgacatttcttgccactgcttttataccctttttgctacttgtgttccaaa

SEQ ID NO: 442603 - DNA, 120 bp, Artificial Sequence
  ENSG00000154188_46 (sequence is synthesized)
tgcaatgcctcagggaaaacacttgaggttttttctttaatcagggcttagctctgtgtcctcatagcctgcttgctgctgttgcatcatatcccacctttagccaagcttcaacatgct

SEQ ID NO: 442604 - DNA, 120 bp, Artificial Sequence
  ENSG00000154188_47 (sequence is synthesized)
ttagtattcagttgttgaggaaatagtgtttcccatagtccccgttgaataatcaagctgccacattcatgctacatcaattacagtgattgctctccgacgataatcccattacagata

SEQ ID NO: 442605 - DNA, 120 bp, Artificial Sequence
  ENSG00000154188_48 (sequence is synthesized)
tgtttctcttcttgggtagaccctgggggaaatgagtcaatttctaaataaataccattgtattttgaataattaaaatatgcataagtctttgaaagatttgtataaattttccacatg

SEQ ID NO: 442606 - DNA, 120 bp, Artificial Sequence
  ENSG00000154188_49 (sequence is synthesized)
ggaaagaagttattgtcacagtcagaagagatacaatatgtcatgttctcctgttattgttcgtgactaaaatacaagcaaataatatattctacatatgctatgccacaaatgttgcct

SEQ ID NO: 442607 - DNA, 120 bp, Artificial Sequence
  ENSG00000154188_50 (sequence is synthesized)
tcaaggatatctactgtaacatgtacatatataagaattgataggcaatgaaatatgtgatagttaaagacattatattttaaaaattttttattcttattgtactcccatttcaatcaa

SEQ ID NO: 442608 - DNA, 120 bp, Artificial Sequence
  ENSG00000154188_51 (sequence is synthesized)
tttaaagttttaaaattctgagtcatgtgttttggcaatcaaatggtctgtaactttggaaatttggtagcatttccaaaactttgaacatactcaaatgcttattttcatttaaaacaa

SEQ ID NO: 442609 - DNA, 120 bp, Artificial Sequence
  ENSG00000154188_52 (sequence is synthesized)
agattttttaaaatgttgtatagtctgagacaaagacttaattttcagctgactaaaatttgtgcatgtaatttattcatcattgatggaatttaatcagaaataactcaaatatgaatc

SEQ ID NO: 442610 - DNA, 120 bp, Artificial Sequence
  ENSG00000154188_53 (sequence is synthesized)
agaggaagaaataaccaataatatatctaaattaacattgttcaatatagtaatttcggtttttgtaatctgcagacctgttcgccttattcctattttgaaacatgtaggatatatgtt

SEQ ID NO: 442611 - DNA, 120 bp, Artificial Sequence
  ENSG00000154188_54 (sequence is synthesized)
tattacttctattttgattccaagtagttgccataggaagaagcaacaccctgcagaaactgaggctatcagtgtatgtaggtgaaattaatttatccatttatttggcaaaataattaa

SEQ ID NO: 442612 - DNA, 120 bp, Artificial Sequence
  ENSG00000154188_55 (sequence is synthesized)
tcaaagcatagtgattattatgcagctcatggcatcgctatcaggaaaggttttgaggcagaatagatgtgttatcaactctaaatgaagctatatgataattatgttaatccatcacct

SEQ ID NO: 442613 - DNA, 120 bp, Artificial Sequence
  ENSG00000154188_56 (sequence is synthesized)
tgcaagggggcaaatgatttgtgggtcaccataaatactggaactgttatggcactgctttcttgatgtgatggatttaattcaaagaaatcaactttccataatcacttgtcgattaaa

SEQ ID NO: 442614 - DNA, 120 bp, Artificial Sequence
  ENSG00000154188_57 (sequence is synthesized)
atgagcttgagaattacattgtggaaaacatgaagtcggagatggcccagatacagcagaatgcagttcagaaccacacggctaccatgctggagataggaaccagcctcctctctcaga

SEQ ID NO: 442615 - DNA, 80 bp, Artificial Sequence
  ENSG00000154217_0 (sequence is synthesized)
cccgcacccacctcccggccccaggcacactgcatcggcgcggacgctccggccccggcgaggtggctgcaaactcgcgg

SEQ ID NO: 442616 - DNA, 80 bp, Artificial Sequence
  ENSG00000154217_1 (sequence is synthesized)
gaggggacgcgcgcggaaggcgccagcttcctcccgcccgcccctggcagccgcgagccgaggttggaggcgcccggggc

SEQ ID NO: 442617 - DNA, 120 bp, Artificial Sequence
  ENSG00000154217_2 (sequence is synthesized)
ttttctccccgagccgagccccggagcggcgcggggaccggccctaaaaagagcaggaaatcttgtttaccgcccgcggagagaagccgatcgagcctttgtctggaaagtcagcatctc

SEQ ID NO: 442618 - DNA, 120 bp, Artificial Sequence
  ENSG00000154217_3 (sequence is synthesized)
cggctccggctgcaatgtgttcctggtgacattagcatcgggcagacccgccggaggaggggggtcgccaggttcccgtctgctttcggaggcggatcgagcgggtgacttttgtgcatt

SEQ ID NO: 442619 - DNA, 120 bp, Artificial Sequence
  ENSG00000154217_4 (sequence is synthesized)
cgttttaatttttggaaatctctcttttttcctccctcgctcgctgccgggcatgtcctgatctggcggccgctcctaccaccctgggcagccgagcagagtcgtccccagcgggtctcc

SEQ ID NO: 442620 - DNA, 120 bp, Artificial Sequence
  ENSG00000154217_5 (sequence is synthesized)
ctccctgcctccctgactttgcaacaccgcgttccgggaggaccggcctcggcgagggaggaggcgggggagctgcgaacacccagacccaaaccctgacatgctctggggcggagagga

SEQ ID NO: 442621 - DNA, 120 bp, Artificial Sequence
  ENSG00000154217_6 (sequence is synthesized)
ggagaggaggaagccaggagctgagcgcgccgcgggggctgcttcgccctccggctccgagcgccgggctccgggcgccctgccctgcgcctgggcagcagccttgctggtcttgggggc

SEQ ID NO: 442622 - DNA, 120 bp, Artificial Sequence
  ENSG00000154217_7 (sequence is synthesized)
cttcccgccccgggggtccgcggccggcaggaccatgctgctgaaagagtaccggatctgcatgccgctcaccgtagacgagtacaaaattggacagctgtacatgatcagcaaacacag

SEQ ID NO: 442623 - DNA, 120 bp, Artificial Sequence
  ENSG00000154217_8 (sequence is synthesized)
ccatgaacagagtgaccggggagaaggggtggaggtcgtccagaatgagccctttgaggaccctcaccatggcaatgggcagttcaccgagaagcgggtgtatctcaacagcaaactgcc

SEQ ID NO: 442624 - DNA, 120 bp, Artificial Sequence
  ENSG00000154217_9 (sequence is synthesized)
tagttgggctagagctgttgtccccaaaatattttatgtgacagagaaggcttggaactattatccctacacaattacagaatacacatgttcctttctgccgaaattctccattcatat

SEQ ID NO: 442625 - DNA, 120 bp, Artificial Sequence
  ENSG00000154217_10 (sequence is synthesized)
agaaaccaagtatgaggacaacaaaggaagcaatgacaccattttcgacaatgaagccaaagacgtggagagagaagtttgctttattgatattgcctgcgatgaaattccagagcgcta

SEQ ID NO: 442626 - DNA, 120 bp, Artificial Sequence
  ENSG00000154217_11 (sequence is synthesized)
ctacaaagaatctgaggatcctaagcacttcaagtcagagaagacaggacggggacagttgagggaaggctggagagatagtcatcagcctatcatgtgctcctacaagctggtgactgt

SEQ ID NO: 442627 - DNA, 120 bp, Artificial Sequence
  ENSG00000154217_12 (sequence is synthesized)
gaagtttgaggtctgggggcttcagaccagagtggaacaatttgtacacaaggtggtccgagacattctgctgattggacatagacaggcttttgcatgggttgatgagtggtatgacat

SEQ ID NO: 442628 - DNA, 120 bp, Artificial Sequence
  ENSG00000154217_13 (sequence is synthesized)
gacaatggatgaagtccgagaatttgaacgagccactcaggaagccaccaacaagaaaatcggcattttcccacctgcaatttctatctccagcatccccctgctgccttcttccgtccg

SEQ ID NO: 442629 - DNA, 120 bp, Artificial Sequence
  ENSG00000154217_14 (sequence is synthesized)
cagtgcgccttctagtgctccatccacccctctctccacagacgcacccgaatttctgtccgttcccaaagatcggccccggaaaaagtctgccccagaaactctcacacttccagaccc

SEQ ID NO: 442630 - DNA, 120 bp, Artificial Sequence
  ENSG00000154217_15 (sequence is synthesized)
tgagaaaaaagccaccctgaatttacccggcatgcactcttcagataagccatgtcggcccaaatctgagtaactttatataaatatctcatggggttttatattttcatttgttgttgt

SEQ ID NO: 442631 - DNA, 120 bp, Artificial Sequence
  ENSG00000154217_16 (sequence is synthesized)
tgtttttttttaagaatcttctgatagagaaaaagactgctttgtcactcaaacatgttccttcgacctttcagtgtgcatgtgactcagtaacttcacatagaatatgattccctaagt

SEQ ID NO: 442632 - DNA, 120 bp, Artificial Sequence
  ENSG00000154217_17 (sequence is synthesized)
atgctacacagcatcatattagatgtaagatgtaagacttgcaaaggacagaaggaatcttctgtaaccacatagctgtatgccagagaggaagccttgttattgggcatttgatgaggt

SEQ ID NO: 442633 - DNA, 120 bp, Artificial Sequence
  ENSG00000154217_18 (sequence is synthesized)
ttggcatggacttcaaggataaatgaatgaaaactttgcaccacttttgttacaaggtacggtagaaaatagtgaagtcagtttcctctcatcaaatctaaaattctccaaaatactctc

SEQ ID NO: 442634 - DNA, 120 bp, Artificial Sequence
  ENSG00000154217_19 (sequence is synthesized)
aggcataacatacttagctgttaaattttgaactgctaattactaatacttgaataccaatagttactgagattcctattttgtggttagtctgactcaggatttggagcctaattaact

SEQ ID NO: 442635 - DNA, 120 bp, Artificial Sequence
  ENSG00000154217_20 (sequence is synthesized)
ctaaacttttgaaaattttaatcatcaagctatagaggctccaagtgcaattaataataactcatttataccttccacagaatttaataaagattctacttgtttctgtcttttaataac

SEQ ID NO: 442636 - DNA, 120 bp, Artificial Sequence
  ENSG00000154217_21 (sequence is synthesized)
tttccccttttgtgcccttgtggcctcagaaatccttaagaattgcatggatgaatgtgaccataactgattttggaatggttcagtttaggaaccaagaggcccaggtgaggcaacatc

SEQ ID NO: 442637 - DNA, 120 bp, Artificial Sequence
  ENSG00000154217_22 (sequence is synthesized)
ttttttctctacaggtaccaacaaaccttgacttgtcagcttccatcatcaattaagattctcagaatttgcaattaattgaatagaattcatttactatctgcccactcaaagaagtac

SEQ ID NO: 442638 - DNA, 120 bp, Artificial Sequence
  ENSG00000154217_23 (sequence is synthesized)
aagggtagagtaagctaactgggctttaacatggtcagaatgtctggtgcatgaactataaaaaagagaactgtctcccatccccttccttgttttactcttagtaacatccagaattcc

SEQ ID NO: 442639 - DNA, 120 bp, Artificial Sequence
  ENSG00000154217_24 (sequence is synthesized)
ctggaacagattgcctaccaccagaccttagaaaagactgtcattctcttgctccttacttgaaatacaaatattgggaatgtcacagacatcaagcaactactgtcaagtgggaggaga

SEQ ID NO: 442640 - DNA, 120 bp, Artificial Sequence
  ENSG00000154217_25 (sequence is synthesized)
gaatgagcagaattgctgactcctatttgtagagtgaaaaggaggagtgataatagatgcccttctgtctagctttcctttcttcaactagtggtaatgcaagattagaatcaaggttga

SEQ ID NO: 442641 - DNA, 120 bp, Artificial Sequence
  ENSG00000154217_26 (sequence is synthesized)
aggaggcaaggtcactcactgaagtgacagaaagacaattctcctttgctccaaagagagaaatctgtcacctttgcacctcactgcctttaaacacagacgggagggcaggccaaatct

SEQ ID NO: 442642 - DNA, 120 bp, Artificial Sequence
  ENSG00000154217_27 (sequence is synthesized)
cagcattgacttttgtcctccaagagaggaagagaagaagtaattgggcaacttggaggcccacgccccagctagccttcctgatcgtaacctccaacctcaggaaagggaccttcccaa

SEQ ID NO: 442643 - DNA, 120 bp, Artificial Sequence
  ENSG00000154217_28 (sequence is synthesized)
aacacagatcccaaaggaaacaaaatagaccaaggagcataatctgcttctctcacacagcctctctgccagtggaccctgcctgcttccctctcagtgctcagcactctgtgtagtgtc

SEQ ID NO: 442644 - DNA, 120 bp, Artificial Sequence
  ENSG00000154217_29 (sequence is synthesized)
tttcaggttgatacactctcccaaggtgcaggcgctggccccatgagcccagcaccaaagttttctaagtcataggtcagactgtcaagatcatttctttatctataggttgatatttag

SEQ ID NO: 442645 - DNA, 120 bp, Artificial Sequence
  ENSG00000154217_30 (sequence is synthesized)
cttaaaaaaaaagaataaacctagaactcaaaggaaacctgttgcaaatagcttagatcaacagtgtatctcttccctaagaatgatagtatcttagtaagacaccttctatgcatggta

SEQ ID NO: 442646 - DNA, 120 bp, Artificial Sequence
  ENSG00000154217_31 (sequence is synthesized)
tggaagcatgatttttgcttgtgggaaaacctaatattttatcagacccctcggacttctcaatccctccctctccacacagtagtacttaatgaaaatgttttgctttagagagcaaaa

SEQ ID NO: 442647 - DNA, 120 bp, Artificial Sequence
  ENSG00000154217_32 (sequence is synthesized)
tgctactttcagaagacactgaaatagtatatgtatttgcttaccatttgcaagctaaaatcaaggtgggatggggtcattattttcacatagaatgtatttattttgtgcaggctgtta

SEQ ID NO: 442648 - DNA, 120 bp, Artificial Sequence
  ENSG00000154217_33 (sequence is synthesized)
aacacatctggcacctagtttttccattaagagcattgctattttccctttttataaagtagcttctgctgtcaaggttaacaattctatatgctttaggaagctaagttctaatttcct

SEQ ID NO: 442649 - DNA, 120 bp, Artificial Sequence
  ENSG00000154217_34 (sequence is synthesized)
tttgtgagtttcatttcttttataaccagtatgttaccacagacatcagttgcaaagctacgatgatagtgtgattcttagccgaaaaaaaagcgtgtgctcttaaagtatgttcagttt

SEQ ID NO: 442650 - DNA, 120 bp, Artificial Sequence
  ENSG00000154217_35 (sequence is synthesized)
ttctgtctacatatgctttgtgtgagttaaaaagggggtgggtggtgtaaatattcctttagctgctttgcatatttaacccagtcatcaaaaggcataaatgacttcaatattttatat

SEQ ID NO: 442651 - DNA, 120 bp, Artificial Sequence
  ENSG00000154217_36 (sequence is synthesized)
atcttggttttcaagtatcatttcacattctctatacatgactttgttattgtggaatacaagcctgcaatggatgtatatatacagaacattaataattcttagaaggatggaagccaa

SEQ ID NO: 442652 - DNA, 120 bp, Artificial Sequence
  ENSG00000154217_37 (sequence is synthesized)
atggctgcatgatggaaattagaagaaaaaaaaagcagaaacttgaatttgctaagcatgtttggggggaaatagaatccttaactcagtgcctctgtctgcgatatggaaaccttcaac

SEQ ID NO: 442653 - DNA, 120 bp, Artificial Sequence
  ENSG00000154217_38 (sequence is synthesized)
tatatatatatatatatataaatataaatatagtatagtgaatcagacaccatcagttttaagtctctggtagccaaacttaaataaataatccatagaatatcacatacgttcactcca

SEQ ID NO: 442654 - DNA, 120 bp, Artificial Sequence
  ENSG00000154217_39 (sequence is synthesized)
taaataatccatagaatatcacatacgttcactccatcttcatctctgaagttagtggagaccatcaaaatgactgtacatttcataactctgggaagatttcaaatgtgaagtgcccct

SEQ ID NO: 442655 - DNA, 120 bp, Artificial Sequence
  ENSG00000154217_40 (sequence is synthesized)
gtgcattttcttggccatagcacggcattcttgctttagctgtgctttcctgggatgagaagatcttggtgtatttaacacataagctttgttagaaatcacctctgaagatcatttcat

SEQ ID NO: 442656 - DNA, 120 bp, Artificial Sequence
  ENSG00000154217_41 (sequence is synthesized)
tttctcactttgggttgttgcaagacaaagcaaaggaaaaggaacacaatgaaggaggccgtgacatttttagttgccaccgttgtaactcaaacaatatgggtttgttggtgaactgat

SEQ ID NO: 442657 - DNA, 120 bp, Artificial Sequence
  ENSG00000154217_42 (sequence is synthesized)
ttatcaaggcttctgttacggttttgcatctgtgtgtgaggaaaattttaatttatttggaagtatttattagccatgttgttggtcctgaaaataaatctctaagtagcacagttgtgg

SEQ ID NO: 442658 - DNA, 120 bp, Artificial Sequence
  ENSG00000154217_43 (sequence is synthesized)
gtatattatgcagacacttaccacaatacctgcaaaagtaactgtggttttctttcaagacactgtaataaacagtgaactaagagaatagattctgatacatctcgataaatcattctc

SEQ ID NO: 442659 - DNA, 120 bp, Artificial Sequence
  ENSG00000154217_44 (sequence is synthesized)
tgcaaaagtttcagggctaatgtatttatgtgtatttttaaattctactttctttggcatctcttcatggctcagcgacaacaaagtaataggtcattggctggcttacgtcgataggaa

SEQ ID NO: 442660 - DNA, 120 bp, Artificial Sequence
  ENSG00000154217_45 (sequence is synthesized)
ttttactcttaagaagggccagtgtatagctgactctacatataatgtgtaatcagataatccaatagagaggaattgtccaaatagttttagtacctttctgatcatctgactcagtag

SEQ ID NO: 442661 - DNA, 120 bp, Artificial Sequence
  ENSG00000154217_46 (sequence is synthesized)
gctaggagacaatctgtcatctgagccatagttcttgagatttaaaaagtctgtccagtgactgcaatctgattatgaataaactattttaactattcattcttgctgaaactgaagtgt

SEQ ID NO: 442662 - DNA, 120 bp, Artificial Sequence
  ENSG00000154217_47 (sequence is synthesized)
acacaatagcacactgttggcatgctgaggcaaaacattgggttcttttgtgttctaccttcaaaacaatctgtttgcatttgaaatataagtgtttaagctttttaggagttagtgtaa

SEQ ID NO: 442663 - DNA, 120 bp, Artificial Sequence
  ENSG00000154217_48 (sequence is synthesized)
taagagaatgtgaatatgttgggaaattttcagatgccattaataattgtaattttgttgttaaattaacaaggactttaggataagcctcttgatgttttttgctttaaattgaaagca

SEQ ID NO: 442664 - DNA, 120 bp, Artificial Sequence
  ENSG00000154217_49 (sequence is synthesized)
tgtctgtcaaattgcaagtctcccttcagtttctatatatcacccaggagagggtctctgagttggtgttgtacctgtaccactcacatgtagctcaagtgtaatttgtagtgtttacat

SEQ ID NO: 442665 - DNA, 120 bp, Artificial Sequence
  ENSG00000154217_50 (sequence is synthesized)
tcaagctgggatcttgattggttaaattaatccacataccactgccactgctgaaggaccaggtgttggaatacacagcattacagactataagcaaagcaaacaaaagttgatccttac

SEQ ID NO: 442666 - DNA, 120 bp, Artificial Sequence
  ENSG00000154217_51 (sequence is synthesized)
atatgccatccttctgtgtcattttgtggctgttctgtgtttttcttcctagttatttattattgttaataacttactttttcttacattctgttgtaaataaaatacaaagcaatcttc

SEQ ID NO: 442667 - DNA, 120 bp, Artificial Sequence
  ENSG00000154217_52 (sequence is synthesized)
gattacaggcaggagccaccacgctggctatctggctgttctttaggcttcctctttgtctttgaaattctggagcctcagtcctgtgtgcatggattcatttttatttattctgcttag

SEQ ID NO: 442668 - DNA, 120 bp, Artificial Sequence
  ENSG00000154217_53 (sequence is synthesized)
aacttggtattctttacacggagaattcatgacttttacaattctggaatcccatttaccacattgagttctggacatcaaggttctccgggcatcactttctatgctgtgtcatcagtg

SEQ ID NO: 442669 - DNA, 120 bp, Artificial Sequence
  ENSG00000154217_54 (sequence is synthesized)
gtcctccaagcgcggctctgctgtccttctcccgatcctgcgaagccgcgagctccagtattcaggaagtggtgactcagataggattattccggccccggcttccctttcttccccttc

SEQ ID NO: 442670 - DNA, 120 bp, Artificial Sequence
  ENSG00000154217_55 (sequence is synthesized)
ttcctccccacctttgtggtgattccacgactgctgagcgtctctgtccagggacagcgagggagcccaaagccaagcaaggcaacgtgaaactcactagtgtggtttggtgtggcaaca

SEQ ID NO: 442671 - DNA, 120 bp, Artificial Sequence
  ENSG00000154217_56 (sequence is synthesized)
acaccaaaatttgaaatcccacctcaacgtcatcaataacaagctcttcttattggttacaaaagctgcttttccacttaaaagatttcctttgtggttaatgaaatactctactggaat

SEQ ID NO: 442672 - DNA, 120 bp, Artificial Sequence
  ENSG00000154217_57 (sequence is synthesized)
tattagtctttcatttgcttttataatgccaactctttggtttttaattagccacaagcctataggctaattgaatcttgtcttactgttcttatctgcccaaccacataagtatcatga

SEQ ID NO: 442673 - DNA, 120 bp, Artificial Sequence
  ENSG00000154217_58 (sequence is synthesized)
aagaatttcagtgcaacacggagacattcagtatttatgaaagtttcattaggacatcttttgtaattatagttcgtcagtatttgttagttctgtggtttttatattgcatataagcat

SEQ ID NO: 442674 - DNA, 120 bp, Artificial Sequence
  ENSG00000154217_59 (sequence is synthesized)
taagtgcctcctaacttgggaggatgccatctctcgtcgtgtggattcaatttgctttcgtatcttgctggttctttttgcaagtctcaaaattaagtctctaactcttcagggaccatc

SEQ ID NO: 442675 - DNA, 120 bp, Artificial Sequence
  ENSG00000154222_0 (sequence is synthesized)
tgttgcgcgcgagccacctcccctgctggcgcttcctgtcgctaccgctgcggcccagggcccgcgggagcccagggcggtgccgggtgagacaaggccggggtttggctcggattcacc

SEQ ID NO: 442676 - DNA, 120 bp, Artificial Sequence
  ENSG00000154222_1 (sequence is synthesized)
gcgaggtatctaggctgccatgatgccagggccaagacctcggaagggccctcaggccagaggccaaggggtggccgctgccaagcagatggggctctttatggagtttggccctgagga

SEQ ID NO: 442677 - DNA, 120 bp, Artificial Sequence
  ENSG00000154222_2 (sequence is synthesized)
catgctgctgggcatggatgaggctgaagatgatgaggacctggaggctgagctgctggctctcacaggggaagcacaaaccacaggcaagaagccagcacccaaggggcaggcccccct

SEQ ID NO: 442678 - DNA, 120 bp, Artificial Sequence
  ENSG00000154222_3 (sequence is synthesized)
gcccatggcccacatcgagaagttggcggcagactgtatgcgggatgtggaggaggaggaggaggaggaagggctggaggaagatgcagagctgctgacggagctgcaggaggtcttagg

SEQ ID NO: 442679 - DNA, 120 bp, Artificial Sequence
  ENSG00000154222_4 (sequence is synthesized)
tgtggacgaggagactgagcccctggatggtgatgaggtagctgacccaggcggctctgaggaggagaacggcctagaagacactgaacctccagtgcagacagccgtcctgacagcttc

SEQ ID NO: 442680 - DNA, 120 bp, Artificial Sequence
  ENSG00000154222_5 (sequence is synthesized)
agccccagcagctcaggccggagcatctcaggggctacacgctttgctggaggaacggattcacaactaccgagaggctgcggccagtgccaaggaggcaggcgaagcagccaaagccag

SEQ ID NO: 442681 - DNA, 120 bp, Artificial Sequence
  ENSG00000154222_6 (sequence is synthesized)
gcgctgcgagcgcggcctgaagaccttggagtcgcagctagcctctgtgaggagaggcagaaagatcaatgaggatgagatcccacctccagtggccttaggaaagcggcccctggcccc

SEQ ID NO: 442682 - DNA, 120 bp, Artificial Sequence
  ENSG00000154222_7 (sequence is synthesized)
ccaggaaccagccaacaggagccctgagacagaccctccagctccccctgccttggagtcagacaacccctcccaacctgagaccagcctccctggcatttctgcccagcccgtttcaga

SEQ ID NO: 442683 - DNA, 120 bp, Artificial Sequence
  ENSG00000154222_8 (sequence is synthesized)
cttagacccagacccgcgggccctgctgtcatcccgacagagagagtacaaagtggctgccctcagtgccaagcgggctggagagctagaccgtgcccgagagctcatgaggattgggaa

SEQ ID NO: 442684 - DNA, 120 bp, Artificial Sequence
  ENSG00000154222_9 (sequence is synthesized)
gagattcggtgctgtcctggaggccctggagaaggggcagcccgtggatctgagtgccatgcccccggcacctgaggatctgaagccccagcaggcttctcaggctcccacagcaccctc

SEQ ID NO: 442685 - DNA, 120 bp, Artificial Sequence
  ENSG00000154222_10 (sequence is synthesized)
agtcattcccccagccgtggagcgagtgcagccagtgatggcccctgacgtcccagcaaccccagtggcccctacagagtcacagacagtgctggatgccctgcagcagaggctgaacaa

SEQ ID NO: 442686 - DNA, 120 bp, Artificial Sequence
  ENSG00000154222_11 (sequence is synthesized)
gtaccgcgaggcgggcatccaggcccggagtggtggggacgagcgcaaggctcggatgcatgagcgcattgccaagcaatatcaagatgctattcgagcacaccgagcaggacggaaagt

SEQ ID NO: 442687 - DNA, 120 bp, Artificial Sequence
  ENSG00000154222_12 (sequence is synthesized)
caactttgctgaattgcctgttcctccaggatttccccccatccctggcctggagtccactatgggtgttgaggaggacgcagtggcagcgacattggcagctgcagagaaactggcctc

SEQ ID NO: 442688 - DNA, 120 bp, Artificial Sequence
  ENSG00000154222_13 (sequence is synthesized)
tgcagaggattcagccccggctgataaagacgaggacgagcctcctgggcacctgcagggtgagcccccagcacaggccccagtggccaagaaacctgcacggcccacagtcccttcatc

SEQ ID NO: 442689 - DNA, 120 bp, Artificial Sequence
  ENSG00000154222_14 (sequence is synthesized)
ccagcgcctgcctgagcccagggcctcaagttctaaggagtcaccgagtccatctgtgcgggagcagctggcactgctggaggcacggaaactgcagtatcagcgggcagccctgcaggc

SEQ ID NO: 442690 - DNA, 120 bp, Artificial Sequence
  ENSG00000154222_15 (sequence is synthesized)
caagcgcagccaggacctggagcaggccaaagcctatctgcgggtagccaaatggcttgaggctcagatcatccaggcccgatctggcagacctgttgatctgtccaaggtgccttcgcc

SEQ ID NO: 442691 - DNA, 120 bp, Artificial Sequence
  ENSG00000154222_16 (sequence is synthesized)
cttgacggatgaggagggtgacttcatcctcatccaccatgaggacctgcgactctcccagaaggcggaggaggtgtatgcccagctgcaaaaaatgcttctggagcaacaagagaagtg

SEQ ID NO: 442692 - DNA, 120 bp, Artificial Sequence
  ENSG00000154222_17 (sequence is synthesized)
cctgctgttctccaagcagttcatgcaccagggcaacgtggctgagaccacccgatttgagaagcttgctcaggaccgcaagaaacagctggagatcctgcagctggcccaggctcaggg

SEQ ID NO: 442693 - DNA, 120 bp, Artificial Sequence
  ENSG00000154222_18 (sequence is synthesized)
cctcgaccctcccacccaccactttgagttgaagacattccagactgtgaggatcttctcagaactcaacagcacagaaatgcatctgatcattgtccggggaatgaacctcccagcccc

SEQ ID NO: 442694 - DNA, 120 bp, Artificial Sequence
  ENSG00000154222_19 (sequence is synthesized)
tccaggggtgactcccgatgacctggatgcttttgtgcggtttgagtttcactaccctaactcggaccaggctcaaaaaagcaaaacagctgtggtgaagaacacaaactctccagaatt

SEQ ID NO: 442695 - DNA, 120 bp, Artificial Sequence
  ENSG00000154222_20 (sequence is synthesized)
tgatcaactcttcaaactaaacatcaaccgaaaccaccggggcttcaagagggtgatccagagcaaaggcatcaagtttgagatcttccacaaagggtccttcttcagaagcgacaagct

SEQ ID NO: 442696 - DNA, 120 bp, Artificial Sequence
  ENSG00000154222_21 (sequence is synthesized)
ggttggcacagcacacctgaaactggagcggctggagaatgagtgtgagatcagagaaattgtggaggtcctggatggaaggaagcccaccggggggaagctggaggtgaaggtgaggct

SEQ ID NO: 442697 - DNA, 120 bp, Artificial Sequence
  ENSG00000154222_22 (sequence is synthesized)
gcgggagcctctgagtggccaggatgtgcagatggtcactgagaactggctggttctggagcccaggggcttgtgaggtgggcagctctctgggccttcagaacctttgccccctccttt

SEQ ID NO: 442698 - DNA, 120 bp, Artificial Sequence
  ENSG00000154222_23 (sequence is synthesized)
ctcaactaactactcaactcatatctggagagaaaacctaggagtttctcatctatgagaaagacctaccatgctgggtagggcttatgggctgagtttctgatgttcctcagtagaact

SEQ ID NO: 442699 - DNA, 120 bp, Artificial Sequence
  ENSG00000154222_24 (sequence is synthesized)
gggaagagaaggtaaccttccaaggtttaactatctatctatctatctatcttcaggaaaccctttctaaaatctttgtgttttcactgcagtttagactgacttcttgtgctttgcacc

SEQ ID NO: 442700 - DNA, 120 bp, Artificial Sequence
  ENSG00000154222_25 (sequence is synthesized)
cctgtgtagccgatggccagcaccaggagaggagtcaggccgcgactgtgcaggagatgactttcccagctttgctggcttcagaagcctttgtacataagagatgctgctacccaagca

SEQ ID NO: 442701 - DNA, 120 bp, Artificial Sequence
  ENSG00000154222_26 (sequence is synthesized)
ccaaagacctgttaagcatgtgcactactgaccacgactctggtctttcctgttgttggcccctctggggctctacagaaacaggctgggttccaggagcccatctccccgctgtctccc

SEQ ID NO: 442702 - DNA, 120 bp, Artificial Sequence
  ENSG00000154222_27 (sequence is synthesized)
cctgccccgagtctggaagagggcaaggacacttccattcctctgtaccatggagtcctgcagccccttaacccctgcgtggcaactgtgtacagcttacccctgcctccagttgcacca

SEQ ID NO: 442703 - DNA, 120 bp, Artificial Sequence
  ENSG00000154222_28 (sequence is synthesized)
cttctagatgtgcctttaaaagatctaactatgggatgggagaacttgagggtgatcgggaacctcccctgctgagggtggtgtcagggttccgtgactccagtgggccagtggtagcct

SEQ ID NO: 442704 - DNA, 120 bp, Artificial Sequence
  ENSG00000154222_29 (sequence is synthesized)
gtcccagacaactccgtcaccccagctctgcctgtgcctttatccctgacagctgctgcactagccttcctgcttccctaaggacttagtggagggggaaagttgtttttggtactactt

SEQ ID NO: 442705 - DNA, 120 bp, Artificial Sequence
  ENSG00000154222_30 (sequence is synthesized)
ggtgggaagtaaggggaaggttggatcttgggtttggtctacccacccaagagaaaagactgttaactggaagaaaaaatatatatataaaattttatgtagacacgtttatttatctag

SEQ ID NO: 442706 - DNA, 120 bp, Artificial Sequence
  ENSG00000154222_31 (sequence is synthesized)
gaaactaagtctaactcattgtagggattttatactcaactatacagagtatccaccaaagtcctaatctaaagtcctgctccctgtcactttttaaaagccagggtagcagtaacatga

SEQ ID NO: 442707 - DNA, 120 bp, Artificial Sequence
  ENSG00000154222_32 (sequence is synthesized)
caaacggctgctgtggcttcctcttgagagaggacagggaaagcctttcctcttcggctggttatgtggggaacttccttagtttttttccacaagaaattctcctttggctttgttttt

SEQ ID NO: 442708 - DNA, 120 bp, Artificial Sequence
  ENSG00000154222_33 (sequence is synthesized)
ctgaatggatggagactatgaaggggtttgtagttgtaagagatttaatattcaaaactgaaatattctgcatttcttagaaataccccatcttcccccaccccctttttgaattattaa

SEQ ID NO: 442709 - DNA, 120 bp, Artificial Sequence
  ENSG00000154222_34 (sequence is synthesized)
ttcaagatcaacaaagcattcctcaagatcacttttaaaaaaggttagaagtgaagcaaatacattcagcttactgatcactatagtattgcataagcacagctcaagaactgagctttg

SEQ ID NO: 442710 - DNA, 120 bp, Artificial Sequence
  ENSG00000154222_35 (sequence is synthesized)
tatgtgtccttttgggggataacagggctggaccatgcttccctgcccttaaacgcagagcttttagtgggtcacagagcgggaactacacacaagtgacttttttccccatgagccctc

SEQ ID NO: 442711 - DNA, 89 bp, Artificial Sequence
  ENSG00000154222_36 (sequence is synthesized)
ccaatcttatcagaagtgagctaccaaaacttccacagatgtgagatttaacacttaattgcagtcacgtgtatgcaacacagcaataa

SEQ ID NO: 442712 - DNA, 120 bp, Artificial Sequence
  ENSG00000154222_37 (sequence is synthesized)
aacacttaattgcagtcacgtgtatgcaacacagcaataatctagaatgaaaaggagggtgattagccttcataagatgacctatagagcaaagaaaggtgactggaagggttcctaacc

SEQ ID NO: 442713 - DNA, 120 bp, Artificial Sequence
  ENSG00000154222_38 (sequence is synthesized)
caacctactccccttagggtgtgtatccaacccagtgcttcctaagagggttacggaccactgtggttatcctctaaagttccagccagctctaggagtttctaaattcaggcctctgtt

SEQ ID NO: 442714 - DNA, 120 bp, Artificial Sequence
  ENSG00000154222_39 (sequence is synthesized)
ggaaatggcctatttcgatagatagaaagttttctatagctctaaaggtttctcctttgcaacccattcaatttcagtctgctgctttgctctttcaaaacagaacctccaggctgacga

SEQ ID NO: 442715 - DNA, 120 bp, Artificial Sequence
  ENSG00000154222_40 (sequence is synthesized)
ggcaagacaaagcctcccaccagacttggagattgaagttcttaaaaggcctttgttgtagccaaaggcatgcatgcgtcactggtagtaggaggagcctgtcccagcttcatcttgtcc

SEQ ID NO: 442716 - DNA, 85 bp, Artificial Sequence
  ENSG00000154222_41 (sequence is synthesized)
actggtagtaggaggagcctgtcccagcttcatcttgtcctgagatttatccacatacaggaaacaggcgggaaaagctgaggca

SEQ ID NO: 442717 - DNA, 75 bp, Artificial Sequence
  ENSG00000154222_42 (sequence is synthesized)
ttagctgggcacacgaatcccttgagcccaggaagcagaggttgcagtgagcctcgattgtaccactgcactcca

SEQ ID NO: 442718 - DNA, 81 bp, Artificial Sequence
  ENSG00000154222_43 (sequence is synthesized)
caaatacagtatccaaacattggagattagtgactcacctgcagttgggagccagctacaacccaaatcattttaaaattt

SEQ ID NO: 442719 - DNA, 120 bp, Artificial Sequence
  ENSG00000154222_44 (sequence is synthesized)
cagttgggagccagctacaacccaaatcattttaaaattttcaattctttgatctcatgcaatgcacactttcttctgaattagcaaactgaataaactacagaaattttttagaatcaa

SEQ ID NO: 442720 - DNA, 120 bp, Artificial Sequence
  ENSG00000154222_45 (sequence is synthesized)
ttgtgatgtgcgtaagtgcctgctgttctccaagcagttcatgcaccagggcaacgtggctgagaccacccgatttgagaagcttgctcaggaccgcaagaaacagctggagatcctgca

SEQ ID NO: 442721 - DNA, 120 bp, Artificial Sequence
  ENSG00000154222_46 (sequence is synthesized)
gggaggagagaggtgaggctacagaggaaagttgaagctttgagaagtctagccttgaatgccaaccaaggcaggtcctgctctgggctcgggagtcactctgggcctctattttcagaa

SEQ ID NO: 442722 - DNA, 120 bp, Artificial Sequence
  ENSG00000154222_47 (sequence is synthesized)
ccccagcagctcaggtgggttctggaggagggcccctgtgcctctgatgctcctgtgcgcccagacgtaacacgtgtgtggcctggcctgcacagcaaggctgcagtcaccctttccagg

SEQ ID NO: 442723 - DNA, 120 bp, Artificial Sequence
  ENSG00000154222_48 (sequence is synthesized)
accctcccccagcagccgccccaagcagaaactgagcacaagaaactcctccgtggcagccagcctcaaaggcctctctgttctcctagactaccccccgggagccatatcctggcttcc

SEQ ID NO: 442724 - DNA, 120 bp, Artificial Sequence
  ENSG00000154222_49 (sequence is synthesized)
accaagtggggctctgtatttgcctctgccatggcctctggcctctccagtgagcctttgcttcctgccttaaggcttttaggctcttctttctcctggagtcccagagctccatcttct

SEQ ID NO: 442725 - DNA, 120 bp, Artificial Sequence
  ENSG00000154222_50 (sequence is synthesized)
ctccagggctggtggggagaatagcaggtgaggggtaaacccagaccctgttgtccatactaacaagcccaataaggtacatattctttcctccactgtacagagaaaaaacttgcccaa

SEQ ID NO: 442726 - DNA, 120 bp, Artificial Sequence
  ENSG00000154222_51 (sequence is synthesized)
aaatagcagaactaggattcaaaccaaggtctttctgaacccagagccccggctccatccccattaccctgcagtctctctcctgctggggaggttagatgtgagagcttctgaggctgc

SEQ ID NO: 442727 - DNA, 120 bp, Artificial Sequence
  ENSG00000154222_52 (sequence is synthesized)
ttctagctctcagatcttttaggacccaggaagagaagccacccatctcaggtcacacagcgatgtagtacagtgttaggaagacagcccaagtctgggagccgccatgactatgctagg

SEQ ID NO: 442728 - DNA, 120 bp, Artificial Sequence
  ENSG00000154222_53 (sequence is synthesized)
aaactggagcggctggagaatgagtgtgagatcagagaaattgtggagatggagaggttcagaaggtctgagaaatctcacagagggacccaggagaaggcagcctccttgtttccatga

SEQ ID NO: 442729 - DNA, 120 bp, Artificial Sequence
  ENSG00000154222_54 (sequence is synthesized)
gggtgactcccgatgacctggatgcttttgtgcggtttgagtttcactaccctaactcggtgaggttcaggtagaagtaggatcctctgaaacccgccttgcattccaggaccctgtgct

SEQ ID NO: 442730 - DNA, 120 bp, Artificial Sequence
  ENSG00000154222_55 (sequence is synthesized)
cactttcttcccatccctgggaggtgtggctgcagtgcctgccctgtgtgcctctttgtttatacgctgtcctgacttctccctcctcactgcttaggaccaggctcaaaaaagcaaaac

SEQ ID NO: 442731 - DNA, 120 bp, Artificial Sequence
  ENSG00000154222_56 (sequence is synthesized)
ttgtgagaatataaaagatgagttccatgacaacggggccctcactaagctggcaggcccctccatggatcaccggcaccaaggcgctgtccagatcattcatgtactgcgagggaaggg

SEQ ID NO: 442732 - DNA, 120 bp, Artificial Sequence
  ENSG00000154222_57 (sequence is synthesized)
ttgctccctgcttgatagccaacctataccacagagagaaaaggaggagaggttactgaacagagaaggcctctccagggctgagggcaaggaggctgagcaggaaaggagatgtccttt

SEQ ID NO: 442733 - DNA, 120 bp, Artificial Sequence
  ENSG00000154222_58 (sequence is synthesized)
ttggccataggctaaacatatggcagtgaatacaaatttatcctcttttctgggtgatcacttatcctgttgtttactcctcctgaccacttgacaaccatgaggcactgggtaagccac

SEQ ID NO: 442734 - DNA, 120 bp, Artificial Sequence
  ENSG00000154222_59 (sequence is synthesized)
ttaacctgttatggtcttagttttctggggaagggtagaggtgtgtaaaaaggtatggagtatcagaaataataccttaatctttggttgtgaaaattaaaatgagaaatacacaatgta

SEQ ID NO: 442735 - DNA, 120 bp, Artificial Sequence
  ENSG00000154227_0 (sequence is synthesized)
cgggatgcaccgctgcggggaccccccgcccggcctcgcggacccgcctcggcccaggacggaggaggaggtggtgaaacaggaagcaacatcccatcaggaagaacctgagggtgccat

SEQ ID NO: 442736 - DNA, 120 bp, Artificial Sequence
  ENSG00000154227_1 (sequence is synthesized)
ccagtagcttcgcctcacgtcactgactgccctcagtcagaaatcttgactcgcaactttggagggtgggtctctgaaggaatttcaggtcttacacagagatgagttgtgctgctctct

SEQ ID NO: 442737 - DNA, 120 bp, Artificial Sequence
  ENSG00000154227_2 (sequence is synthesized)
gaggagaacgaagctggttggaacgttggaagctgctctctgactacacttcacaagcaaggggcaccttttgtggactgacatttcagaaagggatgttgtgaaacaaaagctgacatt

SEQ ID NO: 442738 - DNA, 120 bp, Artificial Sequence
  ENSG00000154227_3 (sequence is synthesized)
tatatatatatacatatatacagtatttgagttcctcagtagaaagctatcatatatactcagaatgttttggacgtttaaagaatggttctggttggaaagattctggcttcctccaac

SEQ ID NO: 442739 - DNA, 120 bp, Artificial Sequence
  ENSG00000154227_4 (sequence is synthesized)
aataaagtggtcagatcttgaggatcacgatggactcgtctttgtaaaaccttctcatttatacgtgacaattccatatgcttttctcttgctgattatcagacgtgtatttgaaaaatt

SEQ ID NO: 442740 - DNA, 120 bp, Artificial Sequence
  ENSG00000154227_5 (sequence is synthesized)
tgttgcttcacctctagcaaaatcatttggcattaaagagacagttcgaaaggttacaccaaatactgtcttagagaattttttcaaacattccacaaggcaaccattgcaaactgatat

SEQ ID NO: 442741 - DNA, 120 bp, Artificial Sequence
  ENSG00000154227_6 (sequence is synthesized)
ttatggactggcaaagaagtgtaacttgacggagcgccaggtggaaagatggtttaggagtcggcggaatcaagagaggccttccaggctgaagaaattccaggaagcttgctggagatt

SEQ ID NO: 442742 - DNA, 120 bp, Artificial Sequence
  ENSG00000154227_7 (sequence is synthesized)
tgcattttacttaatgatcactgttgctggaattgcgtttctttatgataaaccttggctatatgacttatgggaggtttggaatggctatcccaaacagcccctgctgccatcccagta

SEQ ID NO: 442743 - DNA, 120 bp, Artificial Sequence
  ENSG00000154227_8 (sequence is synthesized)
ctggtactacattttagaaatgagtttttattggtctctgttatttagacttggctttgatgtcaagagaaaggattttctagctcatatcatccaccacctggctgctattagtctgat

SEQ ID NO: 442744 - DNA, 120 bp, Artificial Sequence
  ENSG00000154227_9 (sequence is synthesized)
gagcttctcttggtgtgctaattatattcgcagtgggaccctcgtgatgattgtacacgatgtggctgacatttggctggagtctgctaagatgttttcttatgctggatggacgcagac

SEQ ID NO: 442745 - DNA, 120 bp, Artificial Sequence
  ENSG00000154227_10 (sequence is synthesized)
ctgtaacaccctgtttttcatcttctccaccatatttttcatcagccgcctcattgtttttcctttctggattttatattgcacgctgatcttgcctatgtatcacctcgagcctttctt

SEQ ID NO: 442746 - DNA, 120 bp, Artificial Sequence
  ENSG00000154227_11 (sequence is synthesized)
ttcatacatcttcctcaacctacagctcatgatcttgcaggtccttcacctttactggggttattacatcttgaagatgctcaacagatgtatattcatgaagagcatccaggatgtgag

SEQ ID NO: 442747 - DNA, 120 bp, Artificial Sequence
  ENSG00000154227_12 (sequence is synthesized)
gagtgatgacgaggattatgaagaggaagaggaagaggaagaagaagaggctaccaaaggcaaagagatggattgtttaaagaacggcctcagggctgagaggcacctcattcccaatgg

SEQ ID NO: 442748 - DNA, 120 bp, Artificial Sequence
  ENSG00000154227_13 (sequence is synthesized)
ccagcatggccattagctggaagcctacaggactcccatggcacagcatgctgcaagtactgttggcagcctggcttccaggccccacaccgaccccacattctgcccttccctctttct

SEQ ID NO: 442749 - DNA, 120 bp, Artificial Sequence
  ENSG00000154227_14 (sequence is synthesized)
caccaccgccttccctcccacctaagatgtgtttaccaaaatgttgttaacttgtgttaaaatgttaaatataagcatgcccatggatttttactgcagttaggactcagactggtcaaa

SEQ ID NO: 442750 - DNA, 120 bp, Artificial Sequence
  ENSG00000154227_15 (sequence is synthesized)
gatttcaaagatttctccacagaaccgtctcagttctaattgcactccctcatgcatgtcactttctcaggggctcgctttgttatagaccctttcgcctcgccaccttgcctgtcctca

SEQ ID NO: 442751 - DNA, 120 bp, Artificial Sequence
  ENSG00000154227_16 (sequence is synthesized)
aaagagcagcttctttctcaaaatgagttagaagtggcagtgggacaggagcggaaggaccacaccaggagacacttccatcctgaagcttaggtgcctcatctccacagggcggtggca

SEQ ID NO: 442752 - DNA, 120 bp, Artificial Sequence
  ENSG00000154227_17 (sequence is synthesized)
gtccctgcctgccaccccacagggttacagcaaggattaagtgagatcacagaagtttaagtacacactgtcaaccgtggggtcatcgtgaaccaacccactttgcactgtttgggagac

SEQ ID NO: 442753 - DNA, 120 bp, Artificial Sequence
  ENSG00000154227_18 (sequence is synthesized)
agaaacctggctaaacatggcactgcaatgggcctgaacaaaaggcagaatctttaaaaattcctcttaaatgactctggagatacctggaaatgaaagtgccaagaaaggtgttccatt

SEQ ID NO: 442754 - DNA, 120 bp, Artificial Sequence
  ENSG00000154227_19 (sequence is synthesized)
ttatttgctaactatttatgcattagctccccaagggtcattctcagattctcctggaattcttctccctcaggacccatggttcaaggaaggaagcttaggccctgttccttcctgtcc

SEQ ID NO: 442755 - DNA, 120 bp, Artificial Sequence
  ENSG00000154227_20 (sequence is synthesized)
tttgctggtctttcccttttttcctttctaggagggaagcttctgtgctgctgccctgagcccttccttcaggccagcacagtacctggggacctccacgggggaatgggatccaggcca

SEQ ID NO: 442756 - DNA, 120 bp, Artificial Sequence
  ENSG00000154227_21 (sequence is synthesized)
ggttgcttgctgagcctcatcacccaggaggcctgagcctctggggagggcacgcatgtacactgccagacccaggggagatcttgggaacagaggatgctacgtgatttcctctggctt

SEQ ID NO: 442757 - DNA, 120 bp, Artificial Sequence
  ENSG00000154227_22 (sequence is synthesized)
ccaacccaatcagcctgcatcacagtgaaacacaacacaaaaggccataaaaggcatacccctgagaaatgtttaagggcaggtgctagagtcagtgccagctccctgggaggagggata

SEQ ID NO: 442758 - DNA, 120 bp, Artificial Sequence
  ENSG00000154227_23 (sequence is synthesized)
gggacgggcagatcagtagccagcttgtcctcaccctccggaagggagcaccggagaagacttgcacacgtccctgcctcccttgcggccttgtcaccagagggacacatctcctgggca

SEQ ID NO: 442759 - DNA, 120 bp, Artificial Sequence
  ENSG00000154227_24 (sequence is synthesized)
caatgtgcagggctgacctgggagacttctcaggtggctgctggctgaggagaggccaggccttcccaaggaagaccctgagtaaaatctgcatctgtcctcaccacctggcacagtctc

SEQ ID NO: 442760 - DNA, 120 bp, Artificial Sequence
  ENSG00000154227_25 (sequence is synthesized)
tcataacggtcagattttgtatgttcatcctatttattcaggggctcgtactagaaagccacaggagaggtcggcttgtagggactggaaaatcagccccaagcagagcagctgcagggc

SEQ ID NO: 442761 - DNA, 120 bp, Artificial Sequence
  ENSG00000154227_26 (sequence is synthesized)
ccctggagccggaaggacactgcacagaacagactgcgttattgttatttttaaataaaaatatacatttgaaaccttaaggctaaacaaaaataaacaaaaaatcctttagaattcttt

SEQ ID NO: 442762 - DNA, 120 bp, Artificial Sequence
  ENSG00000154227_27 (sequence is synthesized)
ccacaacaatatctctttctgagaaattgttacaaacaaggtcagattttctctgtataacatttgcttttatgaggacaatatcatatgcattatatgcataatatgatattataaatc

SEQ ID NO: 442763 - DNA, 120 bp, Artificial Sequence
  ENSG00000154227_28 (sequence is synthesized)
aaaatgcctgcacccactttagggtatagctattgacttattattaatattatattattattattttgctggaagaaggtcacactaagatataattttttatgttttcagttaacggta

SEQ ID NO: 442764 - DNA, 120 bp, Artificial Sequence
  ENSG00000154227_29 (sequence is synthesized)
tgctttcttctttgcttatttggtttttgtctctgtaccaaatatcttcttgcttaaggtagaaaagtatttgtttacctctatctccagttttttttcttatttgaatgttgaaggtaa

SEQ ID NO: 442765 - DNA, 120 bp, Artificial Sequence
  ENSG00000154227_30 (sequence is synthesized)
aattgatataccaattttaactatttctgatacagctgaaagcactaaactacttcataagaagtagatactcatttttgtaacactatttagggcttttgtggttaattttaaaggaaa

SEQ ID NO: 442766 - DNA, 120 bp, Artificial Sequence
  ENSG00000154227_31 (sequence is synthesized)
ccactctttctacaggaaacaagggctcaggattcttcagatgaccttataaaaatgcagtccacagtgctatcaatattgtaacagtaatgactacaataaagccaaaagtccagtgta

SEQ ID NO: 442767 - DNA, 120 bp, Artificial Sequence
  ENSG00000154227_32 (sequence is synthesized)
gagggcccgtgtccccgcggaggtcaaggccgagagagggcccgtgtccccgcgcaggtcaaggcccagagtccccgtgctcgcacagatggtgtcctggggcccagtcgcgctccccgc

SEQ ID NO: 442768 - DNA, 120 bp, Artificial Sequence
  ENSG00000154227_33 (sequence is synthesized)
tcgcggcagcccccgtgtactgggccttgcaaagtccgttaggagcgctccagggcgacagtgcccagcggttaacaagtggtgaaacaggaagcaacatcccatcaggaagaacctgag

SEQ ID NO: 442769 - DNA, 120 bp, Artificial Sequence
  ENSG00000154227_34 (sequence is synthesized)
gctgactgcatctattgctgtgagctgattgtcctctagtttctccatctcctgaggcatgcttcacaccactgccagaagagctgccagaatgttttggacgtttaaagaatggttctg

SEQ ID NO: 442770 - DNA, 120 bp, Artificial Sequence
  ENSG00000154227_35 (sequence is synthesized)
ggccttgcaaagtccgttaggagcgctccagggcgacagtgcccagcggttaacaagtttgtaattactttcgtgggtttctacgttgcaaattgagaagagggttgctgggttgggccc

SEQ ID NO: 442771 - DNA, 120 bp, Artificial Sequence
  ENSG00000154227_36 (sequence is synthesized)
acagtacagggttgtgactggtgttttggggttctctctgcgcataagccctttccttttaatacaaacagcaagatcatcctgttcagcagttgacagatgactgtgtgcaccaaaagg

SEQ ID NO: 442772 - DNA, 120 bp, Artificial Sequence
  ENSG00000154227_37 (sequence is synthesized)
caacaacgatgaggcaactgatgcatttgtaactcaatgtctcactgaattccagctttcttttctcaaggtggtgaaacaggaagcaacatcccatcaggaagaacctgagggtgccat

SEQ ID NO: 442773 - DNA, 120 bp, Artificial Sequence
  ENSG00000154227_38 (sequence is synthesized)
ggacagctccatttttcacagtttggccaggactgtgagccagaaacatctttaggttgccaaagaagcacagctgtggaggaccagcttgttacgtccctgtcttggcctctccaacaa

SEQ ID NO: 442774 - DNA, 120 bp, Artificial Sequence
  ENSG00000154227_39 (sequence is synthesized)
caatcaggaaggaatccaaccctctcttaattcctaggaccattgttgcttcttctcaagggattaagtatagtctatattctctattctatctccttataacttcagctcccaataact

SEQ ID NO: 442775 - DNA, 120 bp, Artificial Sequence
  ENSG00000154227_40 (sequence is synthesized)
ttatttacaaagcttctttatcaatttcttcaaaaattgccatctccctgccccaaattctaatctttaagttgtatttttctgtgtttttgggtccagttcattgcttttgtgtgcttt

SEQ ID NO: 442776 - DNA, 120 bp, Artificial Sequence
  ENSG00000154227_41 (sequence is synthesized)
atagtacataaaatattgctaattatactcatgctttggtgccttggtaaacatttgtagtgaaacattataaaaactttaactttgaagctccacctctgttcaataagaaaaaaaaca

SEQ ID NO: 442777 - DNA, 80 bp, Artificial Sequence
  ENSG00000154229_0 (sequence is synthesized)
gtcagtgagcctggggccagcgggcgagccagcggctccggctcccgctcccgctccgcgcagcaccagcccgactctcc

SEQ ID NO: 442778 - DNA, 120 bp, Artificial Sequence
  ENSG00000154229_1 (sequence is synthesized)
cgagcccgcacctctcccccgccgcccccgcccacccggccctccgcggccgcagctccccggcggaggcaagaggtggttgggggggaccatggctgacgttttcccgggcaacgactc

SEQ ID NO: 442779 - DNA, 120 bp, Artificial Sequence
  ENSG00000154229_2 (sequence is synthesized)
tggctgacgttttcccgggcaacgactccacggcgtctcaggacgtggccaaccgcttcgcccgcaaaggggcgctgaggcagaagaacgtgcacgaggtgaaggaccacaaattcatcg

SEQ ID NO: 442780 - DNA, 120 bp, Artificial Sequence
  ENSG00000154229_3 (sequence is synthesized)
cgcgcttcttcaagcagcccaccttctgcagccactgcaccgacttcatctgggggtttgggaaacaaggcttccagtgccaagtttgctgttttgtggtccacaagaggtgccatgaat

SEQ ID NO: 442781 - DNA, 120 bp, Artificial Sequence
  ENSG00000154229_4 (sequence is synthesized)
ttgttactttttcttgtccgggtgcggataagggacccgacactgatgaccccaggagcaagcacaagttcaaaatccacacttacggaagccccaccttctgcgatcactgtgggtcac

SEQ ID NO: 442782 - DNA, 120 bp, Artificial Sequence
  ENSG00000154229_5 (sequence is synthesized)
tgctctatggacttatccatcaagggatgaaatgtgacacctgcgatatgaacgttcacaagcaatgcgtcatcaatgtccccagcctctgcggaatggatcacactgagaagagggggc

SEQ ID NO: 442783 - DNA, 120 bp, Artificial Sequence
  ENSG00000154229_6 (sequence is synthesized)
ggatttacctaaaggctgaggttgctgatgaaaagctccatgtcacagtacgagatgcaaaaaatctaatccctatggatccaaacgggctttcagatccttatgtgaagctgaaactta

SEQ ID NO: 442784 - DNA, 120 bp, Artificial Sequence
  ENSG00000154229_7 (sequence is synthesized)
ttcctgatcccaagaatgaaagcaagcaaaaaaccaaaaccatccgctccacactaaatccgcagtggaatgagtcctttacattcaaattgaaaccttcagacaaagaccgacgactgt

SEQ ID NO: 442785 - DNA, 120 bp, Artificial Sequence
  ENSG00000154229_8 (sequence is synthesized)
ctgtagaaatctgggactgggatcgaacaacaaggaatgacttcatgggatccctttcctttggagtttcggagctgatgaagatgccggccagtggatggtacaagttgcttaaccaag

SEQ ID NO: 442786 - DNA, 120 bp, Artificial Sequence
  ENSG00000154229_9 (sequence is synthesized)
aagaaggtgagtactacaacgtacccattccggaaggggacgaggaaggaaacatggaactcaggcagaaattcgagaaagccaaacttggccctgctggcaacaaagtcatcagtccct

SEQ ID NO: 442787 - DNA, 120 bp, Artificial Sequence
  ENSG00000154229_10 (sequence is synthesized)
ctgaagacaggaaacaaccttccaacaaccttgaccgagtgaaactcacggacttcaatttcctcatggtgttgggaaaggggagttttggaaaggtgatgcttgccgacaggaagggca

SEQ ID NO: 442788 - DNA, 120 bp, Artificial Sequence
  ENSG00000154229_11 (sequence is synthesized)
cagaagaactgtatgcaatcaaaatcctgaagaaggatgtggtgattcaggatgatgacgtggagtgcaccatggtagaaaagcgagtcttggccctgcttgacaaacccccgttcttga

SEQ ID NO: 442789 - DNA, 120 bp, Artificial Sequence
  ENSG00000154229_12 (sequence is synthesized)
cgcagctgcactcctgcttccagacagtggatcggctgtacttcgtcatggaatatgtcaacggtggggacctcatgtaccacattcagcaagtaggaaaatttaaggaaccacaagcag

SEQ ID NO: 442790 - DNA, 120 bp, Artificial Sequence
  ENSG00000154229_13 (sequence is synthesized)
tattctatgcggcagagatttccatcggattgttctttcttcataaaagaggaatcatttatagggatctgaagttagataacgtcatgttggattcagaaggacatatcaaaattgctg

SEQ ID NO: 442791 - DNA, 120 bp, Artificial Sequence
  ENSG00000154229_14 (sequence is synthesized)
actttgggatgtgcaaggaacacatgatggatggagtcacgaccaggaccttctgtgggactccagattatatcgccccagagataatcgcttatcagccgtatggaaaatctgtggact

SEQ ID NO: 442792 - DNA, 120 bp, Artificial Sequence
  ENSG00000154229_15 (sequence is synthesized)
ggtgggcctatggcgtcctgttgtatgaaatgcttgccgggcagcctccatttgatggtgaagatgaagacgagctatttcagtctatcatggagcacaacgtttcctatccaaaatcct

SEQ ID NO: 442793 - DNA, 120 bp, Artificial Sequence
  ENSG00000154229_16 (sequence is synthesized)
tgtccaaggaggctgtttctgtctgcaaaggactgatgaccaaacacccagccaagcggctgggctgtgggcctgagggggagagggacgtgagagagcatgccttcttccggaggatcg

SEQ ID NO: 442794 - DNA, 120 bp, Artificial Sequence
  ENSG00000154229_17 (sequence is synthesized)
actgggaaaaactggagaacagggagatccagccaccattcaagcccaaagtgtgtggcaaaggagcagagaactttgacaagttcttcacacgaggacagcccgtcttaacaccacctg

SEQ ID NO: 442795 - DNA, 120 bp, Artificial Sequence
  ENSG00000154229_18 (sequence is synthesized)
atcagctggttattgctaacatagaccagtctgattttgaagggttctcgtatgtcaacccccagtttgtgcaccccatcttacagagtgcagtatgaaactcaccagcgagaacaaaca

SEQ ID NO: 442796 - DNA, 120 bp, Artificial Sequence
  ENSG00000154229_19 (sequence is synthesized)
cctccccagcccccagccctccccgcagtgggaagtgaatccttaaccctaaaattttaaggccacggccttgtgtctgattccatatggaggcctgaaaattgtagggttattagtcca

SEQ ID NO: 442797 - DNA, 120 bp, Artificial Sequence
  ENSG00000154229_20 (sequence is synthesized)
aatgtgatcaactgttcagggtctctctcttacaaccaagaacattatcttagtggaagatggtacgtcatgctcagtgtccagtttaattctgtagaagttacgtctggctctaggtta

SEQ ID NO: 442798 - DNA, 120 bp, Artificial Sequence
  ENSG00000154229_21 (sequence is synthesized)
acccttcctagaaagcaagcagactgttgccccattttgggtacaatttgatatactttccataccctccatctgtggatttttcagcattggaatcccccaaccagagatgttaaagtg

SEQ ID NO: 442799 - DNA, 120 bp, Artificial Sequence
  ENSG00000154229_22 (sequence is synthesized)
agcctgtcccaggaaacatctccacccaagacgtctttggaatccaagaacaggaagccaagagagtgagcagggagggattgggggtgggggaggcctcaaaataccgactgcgtccat

SEQ ID NO: 442800 - DNA, 120 bp, Artificial Sequence
  ENSG00000154229_23 (sequence is synthesized)
tctctgcctccatggaaacagcccctagaatctgaaaggccgggataaacctaatcactgttcccaaacattgacaaatcctaacccaaccatggtccagcagttaccagtttaaacaaa

SEQ ID NO: 442801 - DNA, 120 bp, Artificial Sequence
  ENSG00000154229_24 (sequence is synthesized)
aaaacctcagatgagtgttgggtgaatctgtcatctggtaccctccttggttgataactgtcttgatacttttcattctttgtaagaggccaaatcgtctaaggacgttgctgaacaagc

SEQ ID NO: 442802 - DNA, 120 bp, Artificial Sequence
  ENSG00000154229_25 (sequence is synthesized)
gtgtgaaatcatttcagatcaaggataagccagtgtgtacatatgttcattttaatctctgggagattatttttccatccagggtgccatcagtaatcatgccactactcaccagtgttg

SEQ ID NO: 442803 - DNA, 120 bp, Artificial Sequence
  ENSG00000154229_26 (sequence is synthesized)
ttcaccaacacccacccccacacacaccaacattttgctgcctaccttgttatccttctcaagaagctgaagtgtacgccctctccccttttgtgcttatttatttaataggctgcagtg

SEQ ID NO: 442804 - DNA, 120 bp, Artificial Sequence
  ENSG00000154229_27 (sequence is synthesized)
tcgcttatgaaagtacgatgtacagtaacttaatggaagtgctgactctagcatcagcctctaccgattgattttcctcccttctctagccctggatgtccacttagggataaaaagaat

SEQ ID NO: 442805 - DNA, 120 bp, Artificial Sequence
  ENSG00000154229_28 (sequence is synthesized)
atggttttggttcccatttctagttcacgttgaatgacaggcctggagctgtagaatcaggaaacccggatgcctaacagctcaaagatgttttgttaatagaaggattttaatacgttt

SEQ ID NO: 442806 - DNA, 120 bp, Artificial Sequence
  ENSG00000154229_29 (sequence is synthesized)
tgcaaatgcatcatgcaatgaattttgcatgtttataataaaccttaataacaagtgaatctatattattgatataatcgtatcaagtataaagagagtattataataattttataagac

SEQ ID NO: 442807 - DNA, 120 bp, Artificial Sequence
  ENSG00000154229_30 (sequence is synthesized)
acaattgtgctctatttgtgcaggttcttgtttctaatcctcttttctaattaagttttagctgaatcccttgcttctgtgctttccctccctgcacatgggcactgtatcagatagatt

SEQ ID NO: 442808 - DNA, 120 bp, Artificial Sequence
  ENSG00000154229_31 (sequence is synthesized)
actttttaaatgtagataaaatttcaaaaatgaatggctagtttacgtgatagattaggctcttactacatatgtgtgtgtatatatatgtatttgattctacctgcaaacaaattttta

SEQ ID NO: 442809 - DNA, 120 bp, Artificial Sequence
  ENSG00000154229_32 (sequence is synthesized)
ttggtgaggactatttttgagctgacactccctcttagtttcttcatgtcacctttcgtcctggttcctccgccactcttcctcttggggacaacaggaagtgtctgattccagtctgcc

SEQ ID NO: 442810 - DNA, 120 bp, Artificial Sequence
  ENSG00000154229_33 (sequence is synthesized)
tagtacgttggtacacacgtggcattgccgcagcacctgggctgacctttgtgtgtgcgtgtgtgtgtgtttccttcttcccttcagcctgtgactgttgctgactccaggggtgggagg

SEQ ID NO: 442811 - DNA, 120 bp, Artificial Sequence
  ENSG00000154229_34 (sequence is synthesized)
gatggggagactcccctcttgctgtgtgtactggacacgcaggaagcatgctgtcttgctgcctctgcaacgacctgtcgtttgctccagcatgcacaaacttcgtgagaccaacacagc

SEQ ID NO: 442812 - DNA, 120 bp, Artificial Sequence
  ENSG00000154229_35 (sequence is synthesized)
cgtgccctgcaggcaccagcacgtgcttttcagaggctgcggactttcttccagccattgtggcattggcctttccagtcttgggaggagcgcgctgctttggtgagacacccccatgca

SEQ ID NO: 442813 - DNA, 120 bp, Artificial Sequence
  ENSG00000154229_36 (sequence is synthesized)
aggtcctcagagtagccgggttctaccacaaacagaaacagaatgaaagtagctgtcagtccttgtagagagccgctctgtttcctcccagaagcatctcccagctaagctcgcattatt

SEQ ID NO: 442814 - DNA, 120 bp, Artificial Sequence
  ENSG00000154229_37 (sequence is synthesized)
caaccctgagtagaaggagagacggggtagggaacgggcccggccagaaaagaaccatttcttctgccatcttttatgcaccatagacatcgagactccagggggtcctggctcccctgt

SEQ ID NO: 442815 - DNA, 120 bp, Artificial Sequence
  ENSG00000154229_38 (sequence is synthesized)
ccctgcagccctgcaggtcagtgcatgatctgggttcgtgtcctgaccaggtgctcctcctttgatccgaggggaaagggactggtttatagaaagagcctaggagacaaaagggccagt

SEQ ID NO: 442816 - DNA, 120 bp, Artificial Sequence
  ENSG00000154229_39 (sequence is synthesized)
ccccctgcccagaatggagcagcagcaggacagacccccacgaggccccccagagaggaggaagatcccacggaggaacacatgaggttagggacccttgttcagcaccccaaacagcct

SEQ ID NO: 442817 - DNA, 120 bp, Artificial Sequence
  ENSG00000154229_40 (sequence is synthesized)
gcctgtttaaagcaggcagcaggcttaggccttccctgcaaccccaacacccacaagtttgtttctctaggaaacacattcactgtctcagctggctgttactctctcagaccatatggc

SEQ ID NO: 442818 - DNA, 120 bp, Artificial Sequence
  ENSG00000154229_41 (sequence is synthesized)
aaagttttccaagaaaatgccccgacaggggtgcccagcacactgcctgagggacaacagacatcagaacaaacccccagagagaaacagtcaaaatcagggcccggtgcagtgttgtca

SEQ ID NO: 442819 - DNA, 120 bp, Artificial Sequence
  ENSG00000154229_42 (sequence is synthesized)
tgtggaacctgctttatccattgctgagtgttgaatgtgggtaatggttagggctttccagatctcagcagccaaagacagttattgttggaagactgtcatgtagataaccatgagcaa

SEQ ID NO: 442820 - DNA, 120 bp, Artificial Sequence
  ENSG00000154229_43 (sequence is synthesized)
tggctcgcctcagaatcagttcataaaattctatggtactggccccttcgtgggtattgtgtgaaatgagatggtggcgaggggtgcgctgtggaactgccgcagccacgcaggaggtcc

SEQ ID NO: 442821 - DNA, 120 bp, Artificial Sequence
  ENSG00000154229_44 (sequence is synthesized)
ctgggggatgctttgggaagtccttgcccctgagcactgcctgattgccagggcctgtggaggtctaggccgcctggcagaatctagcaccgtccgaatccccgcaggacccatggagct

SEQ ID NO: 442822 - DNA, 120 bp, Artificial Sequence
  ENSG00000154229_45 (sequence is synthesized)
atgaccacaccaggccattcaaatggctctgcattatcttcccttggaaggtggccactcctcggtggcagggcctttccctgaggctgcaggccgtgggctggcagcccgtctcttggc

SEQ ID NO: 442823 - DNA, 120 bp, Artificial Sequence
  ENSG00000154229_46 (sequence is synthesized)
atttcaattgaaggtcaccaggtgctgggtttgaaaggaagtcactggagtgctgccaggggccgccctccaaggttaatgagaggcccacatccaggcaagaactaattcaaaaggcag

SEQ ID NO: 442824 - DNA, 120 bp, Artificial Sequence
  ENSG00000154229_47 (sequence is synthesized)
atcagaaaccacaggagtcaaaattattgctccggcagtgcttcccttcctttcatccactggcctcgtgtggtccatgcagggccactgtctgccctttctgatgccacgtattaggct

SEQ ID NO: 442825 - DNA, 120 bp, Artificial Sequence
  ENSG00000154229_48 (sequence is synthesized)
ttcttactcagaattttgatagaaaaccatggggccaagagctctggaagcctggccggaaagaccaaggttcatgcagcccaacaaatgattgttgagcacctctcggagccaaagtcc

SEQ ID NO: 442826 - DNA, 120 bp, Artificial Sequence
  ENSG00000154229_49 (sequence is synthesized)
ttaggcgagtgtggtgacttcctggaaggaggatgcagacttccagagagcccccccaacggacgtgctgagaagggagagggaggcgggggctgtagtcaggaaggagccagagaagaa

SEQ ID NO: 442827 - DNA, 120 bp, Artificial Sequence
  ENSG00000154229_50 (sequence is synthesized)
cagggtttgggtgcatccagaaatatgcctgcagtaggagggagaggaaggggtgccaccgtcaacggcttcccatcggaggtggttggtgcagatggaagtttctgtctgctggccctc

SEQ ID NO: 442828 - DNA, 120 bp, Artificial Sequence
  ENSG00000154229_51 (sequence is synthesized)
aagagagtgttttgccagggacacagtctgttcctcctcagaaaacaccccccaaatgctaacaacatccccaccagctgctagaagcccctttcccctccccaccttgaagtagctcat

SEQ ID NO: 442829 - DNA, 120 bp, Artificial Sequence
  ENSG00000154229_52 (sequence is synthesized)
agttctctgggcagagccagaccatccagtgtaccccagaggccagtaggttcctgcccattttcctctctggcttcctgccaagaattatggcagctgaggatgaatggagaagtaaaa

SEQ ID NO: 442830 - DNA, 120 bp, Artificial Sequence
  ENSG00000154229_53 (sequence is synthesized)
gaatggagaagtaaaaacaactaacaccgcacaactaacaactaacaccgcagttcccacctgggttccacttagcaggagacatttcggagggttttttttgtttttgttcctgttttt

SEQ ID NO: 442831 - DNA, 120 bp, Artificial Sequence
  ENSG00000154229_54 (sequence is synthesized)
tttgttttctcagtactgaaaagagaaaaagtgacaatcttgtatttttaaaagcctcggaaaggtgataccatctgacagtcattttctcacgttggtcttctaaagtcacctatttct

SEQ ID NO: 442832 - DNA, 120 bp, Artificial Sequence
  ENSG00000154229_55 (sequence is synthesized)
tgtgtgtgcacatcacaccatttcctgtttctttataacccgacaagggtaggagtgcctgtttcccctgctgggcacaccagacaatcgtaatcacaaaacagacactgagccaggggc

SEQ ID NO: 442833 - DNA, 120 bp, Artificial Sequence
  ENSG00000154229_56 (sequence is synthesized)
ccaaagggtgtgatcatgagagttaccgggacagcagtaggcatgacagtcaccaggaaggacaagggtgctctgttgttagtggccacacaccaatttgacaaggagtgttgcgaaatt

SEQ ID NO: 442834 - DNA, 90 bp, Artificial Sequence
  ENSG00000154229_57 (sequence is synthesized)
atttttttaaagtcattttccttaagctgcttgggctacatgtgaaatacactggacggtcaacattcctgtctcctcccatttgggctg

SEQ ID NO: 442835 - DNA, 120 bp, Artificial Sequence
  ENSG00000154229_58 (sequence is synthesized)
actggacggtcaacattcctgtctcctcccatttgggctgatgcagcagatccagggaatgttacctgtttctgctgctagaagatccaggaaattgggaaggttacctgacgcacacat

SEQ ID NO: 442836 - DNA, 120 bp, Artificial Sequence
  ENSG00000154229_59 (sequence is synthesized)
ggatgaaggccatcatctagaaatggggtcaaccacaattgtgttaattccgtagtgtcagggattcttcgggaaggtcaacagtatgaaggattctgacccctgtgcctcccatttatg

SEQ ID NO: 442837 - DNA, 120 bp, Artificial Sequence
  ENSG00000154229_60 (sequence is synthesized)
tgatcaggtgacagttaataaccgtggaggtcacactcagccatccaacagccttacagtgaccctacacaaaagcccccaaattccaaagactttttcttaacctaaaggaagaaatta

SEQ ID NO: 442838 - DNA, 120 bp, Artificial Sequence
  ENSG00000154229_61 (sequence is synthesized)
tttgttaattccagtagagcaactgaatatactgggctatttgtacttttttatagagaactttaataataattctttaaaaatgagtttttagaacaaagcaactgacgatttcctaag

SEQ ID NO: 442839 - DNA, 120 bp, Artificial Sequence
  ENSG00000154229_62 (sequence is synthesized)
attccaatgccctggagcttgtaggaggacttagcctgggtcagctggagcacccccgacctgatctcccactgccagattttcccatgctcctagggtatggagtccacgtgggaatga

SEQ ID NO: 442840 - DNA, 120 bp, Artificial Sequence
  ENSG00000154229_63 (sequence is synthesized)
ctgcaagttcaggtggaacttggccgactgatgctctgcgagtttttaatagacactggggacaactgcttaaggtttagaaacttccaaaccacaggaaagacatttttagtgtccccc

SEQ ID NO: 442841 - DNA, 120 bp, Artificial Sequence
  ENSG00000154229_64 (sequence is synthesized)
atccagaggcagccctggaataggattcccaggggtttctgggacccctttccttgctccgtgaggctctgtggccatcttttggcaggaggaggatgcttccttggctctgtgcccaga

SEQ ID NO: 442842 - DNA, 120 bp, Artificial Sequence
  ENSG00000154229_65 (sequence is synthesized)
cccgcctggtccccaggtctctcaccttgggtgaagattcagagatgccctgtaaggattttgcccactgggcaactcagaaatacttcgatctcccaagatataagaggcagcagcaaa

SEQ ID NO: 442843 - DNA, 120 bp, Artificial Sequence
  ENSG00000154229_66 (sequence is synthesized)
cgtgcctattgacgtctgtttcatagttaccacttacgcgagtagacagaactcggcttttcagaaaataggtgtcaagtccactttataagaacctttttttctaaaataagataaaag

SEQ ID NO: 442844 - DNA, 120 bp, Artificial Sequence
  ENSG00000154229_67 (sequence is synthesized)
gtggctttgcattttctgattaaacgactgtgtctttgtcacctctgcttaactttaggagtatccattcctgtgattgtagacttttgttgatattcttcctggaagaatatcattctt

SEQ ID NO: 442845 - DNA, 120 bp, Artificial Sequence
  ENSG00000154229_68 (sequence is synthesized)
ttcttgaagggttggtttactagaatattcaaaatcaatcatgaaggcagttactattttgagtctaaaggttttctaaaaattaacctcacatcccttctgttagggtctttcagaata

SEQ ID NO: 442846 - DNA, 120 bp, Artificial Sequence
  ENSG00000154229_69 (sequence is synthesized)
tcttttataaacagaagcatttgaagtcattgcttttgctacatgatttgtgtgtgtgaaggacataccacgtttaaatcattaattgaaaaacatcatataagccccaactttgtttgg

SEQ ID NO: 442847 - DNA, 120 bp, Artificial Sequence
  ENSG00000154229_70 (sequence is synthesized)
aggaagagacggaggttgaggtttttccttctgtataagcacctactgacaaaatgtagaggccattcaaccgtcaaacaccatttggttatatcgcagaggagacggatgtgtaaatta

SEQ ID NO: 442848 - DNA, 120 bp, Artificial Sequence
  ENSG00000154229_71 (sequence is synthesized)
ctgcattgctttttttttcagtttgtataacctctaatctccgtttgcatgatacgctttgttagaaacattaattgtagtttggaagcaagtgtgtatgaataaagataatgatcattc

SEQ ID NO: 442849 - DNA, 120 bp, Artificial Sequence
  ENSG00000154229_72 (sequence is synthesized)
gtggagatgataatagagactgccgcataggactgctgggaggattcactcagttcacttacgtcaggatcatccatatggctgtccctcacctctgcatcttgtcccactggaaggtct

SEQ ID NO: 442850 - DNA, 120 bp, Artificial Sequence
  ENSG00000154229_73 (sequence is synthesized)
tcaggggcagtaatacacatggagctgtcatcacccctgataacaatgccttctggaatacctcctgaaggctctgcctaaggctgttctacagttaacttttgttttaataagtagaaa

SEQ ID NO: 442851 - DNA, 120 bp, Artificial Sequence
  ENSG00000154229_74 (sequence is synthesized)
gaccacaaattcatcgcgcgcttcttcaagcagcccaccttctgcagccactgcaccgacttcatctgggggtttgggaaacaaggcttccagtgccaaggtaagctaccacttttggtt

SEQ ID NO: 442852 - DNA, 120 bp, Artificial Sequence
  ENSG00000154229_75 (sequence is synthesized)
ttatttagataattttgaaatatgagggctgtaaatttgggccttaaaaaataattggggcctactaatctgcatatagagctgcctttttctcattggaaaaaaaaaaaaaaagccttt

SEQ ID NO: 442853 - DNA, 120 bp, Artificial Sequence
  ENSG00000154229_76 (sequence is synthesized)
gaaggccaccaaaaaggaccaaaatgtttgcatggaaatggcaaccaagaaacccctaatattaagaacctaccttgaaatctgccaattaatgaatggaagcttcatcagattttcaaa

SEQ ID NO: 442854 - DNA, 120 bp, Artificial Sequence
  ENSG00000154229_77 (sequence is synthesized)
tggcttttataaaattatataatggaggtgaaagtgaaaggtctacactataactcctattacatgagctaaatgtgtaagccttaccatttgatgtgctcttctaggcttaacagtaag

SEQ ID NO: 442855 - DNA, 120 bp, Artificial Sequence
  ENSG00000154229_78 (sequence is synthesized)
tttttcttgtccgggtgcggataagggacccgacactgatctcttctcccctgtattgctagtctgcctctaccttttgagatcctactcactctccgaaggaccccaggagcaagcaca

SEQ ID NO: 442856 - DNA, 120 bp, Artificial Sequence
  ENSG00000154229_79 (sequence is synthesized)
atgaaatgcttgccgggcaggtaatgttttgctacattttcatgtttgtttattgctgtgttatgtgaatacttcagctctggttgggcctcgagagcaagacctgacgttttagtgcag

SEQ ID NO: 442857 - DNA, 120 bp, Artificial Sequence
  ENSG00000154229_80 (sequence is synthesized)
ctggtgttggcgtgacttccctgacccaggcgaaagagggagaaacgcccccttcaaagtggatcacgttcagtatgcacagaaattatctctggtcatagaaactccaaattgaaagct

SEQ ID NO: 442858 - DNA, 120 bp, Artificial Sequence
  ENSG00000154229_81 (sequence is synthesized)
acaacctggagtgtagacagtgtcagtttcacgttatgaaatgtacatgttggccaggcgcggtggctcatggctataatcccagcactttcagaagccaaggcaggcggatcgcctgag

SEQ ID NO: 442859 - DNA, 66 bp, Artificial Sequence
  ENSG00000154229_82 (sequence is synthesized)
actcagctacttgagctactgaggcatgagaattgcttaagcctgagaggcggaggctgcagtgag

SEQ ID NO: 442860 - DNA, 75 bp, Artificial Sequence
  ENSG00000154229_83 (sequence is synthesized)
ggtctcaaaaaagaaaaaaatgtgcacgttgatgacagcagtggcctctaagttttcagtatcttaaaactgggg

SEQ ID NO: 442861 - DNA, 120 bp, Artificial Sequence
  ENSG00000154229_84 (sequence is synthesized)
cagcagtggcctctaagttttcagtatcttaaaactggggttgggttatatggttccctgcaagtttgtctgcaaagattgccccagctgctgccaatgtgtgtaattagtattattatt

SEQ ID NO: 442862 - DNA, 120 bp, Artificial Sequence
  ENSG00000154229_85 (sequence is synthesized)
taaggaagaagacagttaccttgaagaagtgttttaatagtttctccccatctcctcctatctcacccttggcaattcgttgtaattttcactgaagtccagtgaggctgaacatccagt

SEQ ID NO: 442863 - DNA, 120 bp, Artificial Sequence
  ENSG00000154229_86 (sequence is synthesized)
taaggaaggtaaattagctttctcttatgatgtgacatgtaccagataaccatgtgccttattgcctaacatggcactttctaatataatggccttaatatctgtgtcatcagggtgaat

SEQ ID NO: 442864 - DNA, 120 bp, Artificial Sequence
  ENSG00000154229_87 (sequence is synthesized)
cgtactatctgccacttctaggcctggcccctaagacatcctttatgactgtcctcatgctctaggctgaaattaggaggaattagtggagaaatctgagaccctacaagatggtggtgc

SEQ ID NO: 442865 - DNA, 120 bp, Artificial Sequence
  ENSG00000154237_0 (sequence is synthesized)
gtgggacggccaggccccggccccgccagtgtgtccgcccggccccgcgtcccggagcgcccgcacccggccccgccgccgcctcagagcaagaaagctttctgctcagccatggctacg

SEQ ID NO: 442866 - DNA, 120 bp, Artificial Sequence
  ENSG00000154237_1 (sequence is synthesized)
tggctacgagtccacgccttaatgcaccccacagccagcggcagtggcagtgacaacagcgggacctgcctttgaagatcggctgctgcaagggttgatggctggcatgtcgcaaagacc

SEQ ID NO: 442867 - DNA, 120 bp, Artificial Sequence
  ENSG00000154237_2 (sequence is synthesized)
ccccagcatgtactggtgtgtggggccggaggagtcagctgtgtgtccagaacgtgccatggagacgcttaacggtgccggggacacgggcggcaagccgtccacgcggggcggtgaccc

SEQ ID NO: 442868 - DNA, 120 bp, Artificial Sequence
  ENSG00000154237_3 (sequence is synthesized)
tgcagcgcggtcccgcaggacggaaggcatccgcgccgcgtacaggcggggagaccgcggcggcgcccgggacctgctggaggaggcctgcgaccagtgcgcgtcccagctggaaaaggg

SEQ ID NO: 442869 - DNA, 120 bp, Artificial Sequence
  ENSG00000154237_4 (sequence is synthesized)
ccagcttctgagcatcccggcagcctatggggatctggagatggtccgctacctactcagcaagagactggtggagctgcccaccgagcccacggatgacaacccagccgtggtggcagc

SEQ ID NO: 442870 - DNA, 120 bp, Artificial Sequence
  ENSG00000154237_5 (sequence is synthesized)
gtattttggacacacggcagttgtgcaggaattgcttgagtccttaccaggtccctgcagtccccagcggcttctgaactggatgctggccttggcttgccagcgagggcacctgggggt

SEQ ID NO: 442871 - DNA, 120 bp, Artificial Sequence
  ENSG00000154237_6 (sequence is synthesized)
tgtgaagctcctggtcctgacgcacggggctgacccggagagctacgctgtcaggaagaatgagttccctgtcatcgtgcgcttgcccctgtatgcggccatcaagtcagggaatgaaga

SEQ ID NO: 442872 - DNA, 120 bp, Artificial Sequence
  ENSG00000154237_7 (sequence is synthesized)
cattgcaatattcctgcttcggcatggggcctatttctgttcctacatcttgctggatagtcctgaccccagcaaacatctgctgagaaagtacttcattgaagccagtcccttgcccag

SEQ ID NO: 442873 - DNA, 120 bp, Artificial Sequence
  ENSG00000154237_8 (sequence is synthesized)
cagttatccgggaaaaacagctctccgtgtgaaatggtcccatctcagactgccctgggtagacctagactggctcatagacatctcctgccagatcacggagctcgacctttctgccaa

SEQ ID NO: 442874 - DNA, 120 bp, Artificial Sequence
  ENSG00000154237_9 (sequence is synthesized)
ctgcctggcgaccctcccctcggttatcccctggggcctcatcaatctccggaagctgaacctctccgacaaccacctgggggagctgcctggcgtgcagtcatcggacgaaatcatctg

SEQ ID NO: 442875 - DNA, 120 bp, Artificial Sequence
  ENSG00000154237_10 (sequence is synthesized)
ttccaggctacttgaaattgacatttccagcaacaagttgtcccacctccctcctggattcttgcacctctcaaaacttcaaaaactgacagcttcaaaaaattgtttagaaaaattgtt

SEQ ID NO: 442876 - DNA, 120 bp, Artificial Sequence
  ENSG00000154237_11 (sequence is synthesized)
cgaagaagaaaatgccactaactggataggtttacggaagctacaggaacttgatatatctgacaataaattgacagaactccctgccctgttccttcactctttcaagtccctcaattc

SEQ ID NO: 442877 - DNA, 120 bp, Artificial Sequence
  ENSG00000154237_12 (sequence is synthesized)
tctgaatgtctccagaaacaacctgaaggtgtttccagatccctgggcctgccctttgaaatgttgtaaagcttccagaaatgccctggaatgtctgccagacaaaatggctgtcttttg

SEQ ID NO: 442878 - DNA, 120 bp, Artificial Sequence
  ENSG00000154237_13 (sequence is synthesized)
gaaaaatcacctgaaggatgtggatttctcagaaaacgcactcaaagaagttcccctgggacttttccagcttgatgccctcatgttcttgaggttacaggggaaccagctggcggcact

SEQ ID NO: 442879 - DNA, 120 bp, Artificial Sequence
  ENSG00000154237_14 (sequence is synthesized)
tccacctcaagagaagtggacctgcaggcagctcaaaaccctggatctctccagaaaccaacttggcaaaaatgaagatggactgaaaacgaagcgtattgcctttttcaccaccagagg

SEQ ID NO: 442880 - DNA, 120 bp, Artificial Sequence
  ENSG00000154237_15 (sequence is synthesized)
tcgccagcgctccgggactgaggcagcaagtgtgctggaatttccggccttcctaagtgagtctttggaagtcctttgcctgaacgacaaccacctcgacacagtccctccctcggtttg

SEQ ID NO: 442881 - DNA, 120 bp, Artificial Sequence
  ENSG00000154237_16 (sequence is synthesized)
cctactgaagagcttatcagagctctacttgggaaacaaccctggcctccgggagctccctcctgagctggggcagctgggcaacctctggcagctggacactgaagacctgaccatcag

SEQ ID NO: 442882 - DNA, 120 bp, Artificial Sequence
  ENSG00000154237_17 (sequence is synthesized)
caatgtgcctgcagaaatccaaaaagaaggccccaaagcaatgctgtcttacctgcgtgctcagctgcggaaagcggaaaagtgcaagctgatgaagatgatcatcgtgggtcccccgcg

SEQ ID NO: 442883 - DNA, 120 bp, Artificial Sequence
  ENSG00000154237_18 (sequence is synthesized)
ccagggcaagtccaccctcctggagatcttacagacggggagggccccccaggtggtgcatggagaggccaccatcaggaccaccaagtgggagctccagaggccggctggctcgagagc

SEQ ID NO: 442884 - DNA, 120 bp, Artificial Sequence
  ENSG00000154237_19 (sequence is synthesized)
caaggttgagtccgtggagttcaacgtctgggacatcgggggaccggccagcatggccactgtcaaccagtgcttcttcacggacaaggccctgtacgtggtggtctggaacctggcgct

SEQ ID NO: 442885 - DNA, 120 bp, Artificial Sequence
  ENSG00000154237_20 (sequence is synthesized)
gggggaggaggccgtggccaacctccagttctggctgctcaacatcgaggccaaggccccaaacgccgtggtgctggtggtcgggacgcacctggatttaattgaagccaagttccgtgt

SEQ ID NO: 442886 - DNA, 120 bp, Artificial Sequence
  ENSG00000154237_21 (sequence is synthesized)
ggaaaggattgcaacgctgcgtgcctatgtgctggcactctgccgctccccctccggctccagggccacaggcttcccagacatcaccttcaaacacttacatgagatttcctgcaagag

SEQ ID NO: 442887 - DNA, 120 bp, Artificial Sequence
  ENSG00000154237_22 (sequence is synthesized)
cctggaaggtcaggaagggctgcgacagctgattttccacgtcacgtgcagcatgaaggacgtgggcagcaccatcggctgccagcgactggcagggcggctgatccccaggagctacct

SEQ ID NO: 442888 - DNA, 120 bp, Artificial Sequence
  ENSG00000154237_23 (sequence is synthesized)
gagcctgcaggaggccgtgctggcagagcagcagcgccgcagccgggacgacgacgtgcagtacctgacggacaggcagctggagcagctggtggagcagacgcccgacaacgacatcaa

SEQ ID NO: 442889 - DNA, 120 bp, Artificial Sequence
  ENSG00000154237_24 (sequence is synthesized)
ggactacgaggacctgcagtcagccatcagcttcctcatagaaaccggcaccctgctccatttcccggacaccagccacggcctgaggaacctctacttcctcgaccctatttggctctc

SEQ ID NO: 442890 - DNA, 120 bp, Artificial Sequence
  ENSG00000154237_25 (sequence is synthesized)
cgaatgtctgcagaggatctttaatattaagggctctcggtcagtggccaagaatggggtgatcagagcagaagacctcaggatgctgctggtggggactggcttcacgcagcagacgga

SEQ ID NO: 442891 - DNA, 120 bp, Artificial Sequence
  ENSG00000154237_26 (sequence is synthesized)
agagcagtacttccagttcctggccaagtttgagatcgccctgcccgtcgccaatgacagctacctcctgccccatctccttccatctaaacctggcctggacacccacggtatgcggca

SEQ ID NO: 442892 - DNA, 120 bp, Artificial Sequence
  ENSG00000154237_27 (sequence is synthesized)
ccccacagccaacaccattcagagggtatttaagatgagcttcgttcccgttggcttctggcaaaggtttatagcacggatgctgatcagcctggcggagatggacctgcagctttttga

SEQ ID NO: 442893 - DNA, 120 bp, Artificial Sequence
  ENSG00000154237_28 (sequence is synthesized)
aaacaagaagaatactaaaagcaggaacaggaaagtcaccatttacagttttacaggaaaccagagaaatcgctgtagcacattcagagtgaaaagaaatcagaccatctattggcagga

SEQ ID NO: 442894 - DNA, 120 bp, Artificial Sequence
  ENSG00000154237_29 (sequence is synthesized)
agggctcctggtcacttttgatgggggctacctcagtgtggaatcttccgacgtgaactggaaaaagaagaaaagcggaggaatgaaaattgtttgccaatcagaagtgagggacttctc

SEQ ID NO: 442895 - DNA, 120 bp, Artificial Sequence
  ENSG00000154237_30 (sequence is synthesized)
agccatggctttcatcacggaccacgtcaattccttgattgatcagtggtttcccgccctgacagccacagagagcgacgggacgccactcatggagcagtacgtgccctgcccggtctg

SEQ ID NO: 442896 - DNA, 120 bp, Artificial Sequence
  ENSG00000154237_31 (sequence is synthesized)
cgagacagcctgggcccagcacacggaccccagtgagaaatcagaggatgtgcagtacttcgacatggaagactgtgtcctgacggccatcgagcgggacttcatctcctgccccagaca

SEQ ID NO: 442897 - DNA, 120 bp, Artificial Sequence
  ENSG00000154237_32 (sequence is synthesized)
cccggacctccccgtgccgctgcaggagctggtccctgaactgttcatgaccgacttcccggccaggctcttcctggagaacagcaagctggagcacagcgaggacgagggcagcgtcct

SEQ ID NO: 442898 - DNA, 120 bp, Artificial Sequence
  ENSG00000154237_33 (sequence is synthesized)
gggccagggcggcagtggcaccgtcatctaccgggcccggtaccagggccagcctgtggccgtcaagcgcttccacatcaaaaaattcaagaactttgctaacgtaccggcagacaccat

SEQ ID NO: 442899 - DNA, 120 bp, Artificial Sequence
  ENSG00000154237_34 (sequence is synthesized)
gctgaggcacctgcgggccaccgatgccatgaagaacttctccgagttccggcaggaggccagcatgctgcacgcgctgcagcacccctgcatcgtggcgctcatcggcatcagcatcca

SEQ ID NO: 442900 - DNA, 120 bp, Artificial Sequence
  ENSG00000154237_35 (sequence is synthesized)
cccgctctgcttcgccctggagctcgcgccgctcagcagcctcaacaccgtgctgtccgagaacgccagagattcttcctttatacccctgggacacatgctcacccaaaaaatagccta

SEQ ID NO: 442901 - DNA, 120 bp, Artificial Sequence
  ENSG00000154237_36 (sequence is synthesized)
ccagatcgcctcgggcctggcctacctgcacaagaaaaacatcatcttctgtgacctgaagtcggacaacattctggtgtggtcccttgacgtcaaggagcacatcaacatcaagctatc

SEQ ID NO: 442902 - DNA, 120 bp, Artificial Sequence
  ENSG00000154237_37 (sequence is synthesized)
tgactacgggatttcgaggcagtcattccatgagggcgccctaggcgtggagggcactcctggctaccaggccccagagatcaggcctcgcattgtatatgatgagaaggtagatatgtt

SEQ ID NO: 442903 - DNA, 120 bp, Artificial Sequence
  ENSG00000154237_38 (sequence is synthesized)
ctcctatggaatggtgctctacgagttgctgtcaggacagcgccctgcactgggccaccaccagctccagattgccaagaagctgtccaagggcatccgcccggttctggggcagccgga

SEQ ID NO: 442904 - DNA, 120 bp, Artificial Sequence
  ENSG00000154237_39 (sequence is synthesized)
ggaagtgcagttccggcgactgcaggcgctcatgatggagtgctgggacactaagccagagaagcgaccgctggccctgtcggtggtgagccagatgaaggacccgacttttgccacctt

SEQ ID NO: 442905 - DNA, 120 bp, Artificial Sequence
  ENSG00000154237_40 (sequence is synthesized)
catgtatgaactgtgctgtgggaagcagacagccttcttctcatcccagggccaggagtacaccgtggtgttttgggatggaaaagaggagtccaggaactacacggtggtgaacacaga

SEQ ID NO: 442906 - DNA, 120 bp, Artificial Sequence
  ENSG00000154237_41 (sequence is synthesized)
gaagggcctcatggaggtgcagaggatgtgctgccctgggatgaaggtgagctgccagctccaggtccagagatccctgtggacagccaccgaggaccagaaaatctacatctacaccct

SEQ ID NO: 442907 - DNA, 120 bp, Artificial Sequence
  ENSG00000154237_42 (sequence is synthesized)
caagggcatgtgccccttaaacacaccccaacaggccttggatactccagctgtcgtcacctgcttcttggccgtgcctgttattaaaaagaattcctacctggtcttagcgggcctcgc

SEQ ID NO: 442908 - DNA, 120 bp, Artificial Sequence
  ENSG00000154237_43 (sequence is synthesized)
cgatgggcttgtggctgtgtttcccgtggtgcggggcaccccaaaggacagctgctcctacctgtgctcacacacagccaacaggtccaagttcagcatcgcggatgaagacgcacggca

SEQ ID NO: 442909 - DNA, 120 bp, Artificial Sequence
  ENSG00000154237_44 (sequence is synthesized)
gaacccctacccagtgaaggccatggaggtggtcaacagcggctctgaggtctggtacagcaatgggccgggcctccttgtcatcgactgtgcctccctggagatctgcaggcggctgga

SEQ ID NO: 442910 - DNA, 120 bp, Artificial Sequence
  ENSG00000154237_45 (sequence is synthesized)
gccctacatggccccctccatggttacgtcagtcgtgtgcagctctgagggcagaggggaggaggtcgtctggtgcctggatgacaaggccaactccttggtgatgtaccactccaccac

SEQ ID NO: 442911 - DNA, 120 bp, Artificial Sequence
  ENSG00000154237_46 (sequence is synthesized)
ctaccagctgtgtgcccggtacttctgcggggtccccagccccctcagggacatgtttcccgtgcggcccttggacacggaacccccggcagccagccacacggccaacccaaaggtgcc

SEQ ID NO: 442912 - DNA, 120 bp, Artificial Sequence
  ENSG00000154237_47 (sequence is synthesized)
tgagggggactccatcgcggacgtgagcatcatgtacagtgaggagctgggcacgcagatcctgatccaccaggaatcactcactgactactgctccatgtcctcctactcctcatcccc

SEQ ID NO: 442913 - DNA, 120 bp, Artificial Sequence
  ENSG00000154237_48 (sequence is synthesized)
accccgccaggctgccaggtccccctcaagcctccccagctccccagcaagttcttccagtgtgcctttctccaccgactgcgaggactcagacatgctacatacgcccggtgctgcctc

SEQ ID NO: 442914 - DNA, 120 bp, Artificial Sequence
  ENSG00000154237_49 (sequence is synthesized)
cgacaggtctgagcatgacctgacccccatggacggggagaccttcagccagcacctgcaggccgtgaagatcctcgccgtcagagacctcatttgggtccccaggcgcggtggagatgt

SEQ ID NO: 442915 - DNA, 120 bp, Artificial Sequence
  ENSG00000154237_50 (sequence is synthesized)
tatcgtcattggcctggagaaggattctggcgcccagcggggccgagtcattgccgtcttaaaagcccgagagctgactccgcatggggtgctggtggatgctgccgtggtggcaaagga

SEQ ID NO: 442916 - DNA, 120 bp, Artificial Sequence
  ENSG00000154237_51 (sequence is synthesized)
cactgttgtgtgcacctttgaaaatgaaaacacagagtggtgcctggccgtctggaggggctggggcgccagggagttcgacattttctaccagtcctacgaggagctgggccggctgga

SEQ ID NO: 442917 - DNA, 120 bp, Artificial Sequence
  ENSG00000154237_52 (sequence is synthesized)
ggcttgcactcgcaagagaaggtaattcctgtggaatgactgtcacacatcagagctggctggcccggggctgcagcctgacccctctgccatcggcctctagttctccaaggacctaga

SEQ ID NO: 442918 - DNA, 120 bp, Artificial Sequence
  ENSG00000154237_53 (sequence is synthesized)
agacagatggagttctcccctgaactccttgctgctaagaagtgctgagaagttactcgcctggcggtggctccagggttctctggttctctggagcagagttctctgaataccccatcc

SEQ ID NO: 442919 - DNA, 120 bp, Artificial Sequence
  ENSG00000154237_54 (sequence is synthesized)
cccaactgctgattttacagccccagggaagacagtggtatcaggctgggagcggcctcctctggcctcccccatcagtttgcaggagcaggggtgcaggatcctgttctgagctgggtc

SEQ ID NO: 442920 - DNA, 120 bp, Artificial Sequence
  ENSG00000154237_55 (sequence is synthesized)
aaacaaagcagggccgggccttcctgccatccccaggtctcagatggaattacactagaggccctccgctgggaagcacttgaggtagggcaggaggggggctgtgacccctgccctttc

SEQ ID NO: 442921 - DNA, 120 bp, Artificial Sequence
  ENSG00000154237_56 (sequence is synthesized)
cccgccagagacctcaggctctcagcacattccacaggctcctgagtccccgaggcctgggccagcttgggcaagccaagatcagatgtctctgtgttcgggaaggtctccgtgtgggaa

SEQ ID NO: 442922 - DNA, 120 bp, Artificial Sequence
  ENSG00000154237_57 (sequence is synthesized)
agcccttgggggatcccgggtgaggagtgttgccccatccagagaatgaatgagttcctttaagtgccaccgccagcaagcccagaggcacacagtccgagtgcacccgcttagccttta

SEQ ID NO: 442923 - DNA, 120 bp, Artificial Sequence
  ENSG00000154237_58 (sequence is synthesized)
cattcctctccaccgacaaaaggaaggggaaactcaatcagcaggacttcagaaagggccttgtgtttatagctttgtcaagtaaatttggacgcagctggagcacaggccctgtttgtt

SEQ ID NO: 442924 - DNA, 120 bp, Artificial Sequence
  ENSG00000154237_59 (sequence is synthesized)
tgcacataataatcttgtttatcactttaaaaaattcagtaatatctcagcagtcaggcttctggttgtgaaatcacattgtatgggatttataccaaattatgtatttgctaaacattc

SEQ ID NO: 442925 - DNA, 120 bp, Artificial Sequence
  ENSG00000154237_60 (sequence is synthesized)
actgcacacgtgtacagcggagtacgaaaaggaacgttgtccacaggggatttatggatacaacagcaaacattttataaactatgcacatgcattacacacatgcacacacatatgcac

SEQ ID NO: 442926 - DNA, 120 bp, Artificial Sequence
  ENSG00000154237_61 (sequence is synthesized)
acacatgtgcaaacatagccacttttttgtcaagagttaccctttggggctccttaaaccagaatgggagtttgaaagagagatcatactccagctgaagtttgttgacccttttctaaa

SEQ ID NO: 442927 - DNA, 120 bp, Artificial Sequence
  ENSG00000154237_62 (sequence is synthesized)
attaaaaagatcaaatttagtatttgctggatatgcagggagatgagactcttttaatctcaaaataaacagattctttcaagaacgaagctgtggcctctgtcttttgagcgcttatga

SEQ ID NO: 442928 - DNA, 120 bp, Artificial Sequence
  ENSG00000154237_63 (sequence is synthesized)
ccacagcacgggctcagtccctcccagacccactcgctgtctggggataatgggcagcccctccttgcccactgtgccaacatgcaggtggcccctgagcagcttccatgggtggagacg

SEQ ID NO: 442929 - DNA, 84 bp, Artificial Sequence
  ENSG00000154237_64 (sequence is synthesized)
cctgggcaccaagtcccagggggctgagggtctgtgcttcctgtctacctccctgccattctctcaccctcatcccacagcagg

SEQ ID NO: 442930 - DNA, 120 bp, Artificial Sequence
  ENSG00000154237_65 (sequence is synthesized)
ccagtgccccacaactgcccagttaacccccagatgcaagccagattccatctgccccaggccccaagcttttgctttggcatcacgcgaggccaggctgctttgcaggcaccaaaattc

SEQ ID NO: 442931 - DNA, 120 bp, Artificial Sequence
  ENSG00000154237_66 (sequence is synthesized)
accctctcctactcctggaaaagcccagccccaggcctcacagagccaggggaggggatctcatcacatcacagttagaaatcatacaggcctaaagtcccagctacccaggagccaagg

SEQ ID NO: 442932 - DNA, 120 bp, Artificial Sequence
  ENSG00000154237_67 (sequence is synthesized)
caggaggaacccttgagcctgggagttggaggttacagtgagctatgatcacaccagctttctagcctgggtgacagagcaagacccaactcttaaaaaaaaaaaaaaaatacaggaaat

SEQ ID NO: 442933 - DNA, 120 bp, Artificial Sequence
  ENSG00000154237_68 (sequence is synthesized)
gactaatgaacttgactccatgaaattgaaacttacgtggaaaattagtccaaagcctaaaagactagcaactgagaaaaaaaaacattgcaacacaaatgagagacaaagacctcactt

SEQ ID NO: 442934 - DNA, 120 bp, Artificial Sequence
  ENSG00000154237_69 (sequence is synthesized)
atcttcattacagagagttcgtaatgtcaataagaaacagaaaaccggaaaggcaaacaggttaagggcatgggcagcaattgaattacaaagaaacagacagacccttaaacatcaatg

SEQ ID NO: 442935 - DNA, 120 bp, Artificial Sequence
  ENSG00000154237_70 (sequence is synthesized)
cttgacctcacccaacagcagggaaacagtctccacaacagtaaaatgttgctgggatgggcccagcattcagcatggtccctgcaactttggcctctgcccagtgacctctggcgggtg

SEQ ID NO: 442936 - DNA, 120 bp, Artificial Sequence
  ENSG00000154237_71 (sequence is synthesized)
tagaagagctcatgcttcagtgagggggtggggggcaccctgaggaccctgtcaacatcagctggaccacaggcatctcagatagatgtcacttaccaccctcatgttggcagagggtgg

SEQ ID NO: 442937 - DNA, 120 bp, Artificial Sequence
  ENSG00000154237_72 (sequence is synthesized)
tgttggcagagggtggtaaccagccagcatctccttcttaaacacctactaagtgtcaggcactgtgaccggagacacagtcaagaatctctgtgttttttttgttttgttttgtttttg

SEQ ID NO: 442938 - DNA, 120 bp, Artificial Sequence
  ENSG00000154237_73 (sequence is synthesized)
gggattacaggtgtgagctacctgcgctggccgaatctctgcttttaggagctcactcctcataggtagagttgacaataagcacacaaacaagtgagatagcagggcagccggaccacc

SEQ ID NO: 442939 - DNA, 120 bp, Artificial Sequence
  ENSG00000154237_74 (sequence is synthesized)
cagttgggcaattcgtggcttggcctaggaacgttacatttgactgaggctggcgaggcctgcagcctgcaccaggaggtacaatgtgagactgaggaatgggaagaaggcattccatgg

SEQ ID NO: 442940 - DNA, 120 bp, Artificial Sequence
  ENSG00000154237_75 (sequence is synthesized)
agctctgagggcactgggtgcaagggccttgcacatgcaaagaccctgttgtgggttcaagccactgtgtgggagggacaggagagcctggcgtggctgcggccttgaaggaggggactg

SEQ ID NO: 442941 - DNA, 120 bp, Artificial Sequence
  ENSG00000154237_76 (sequence is synthesized)
tgcacacagaattgcaagtgggggtctccgcggaagctcctggcagttttaagcaggattattagatgattcagtcaactttacaactcactttgctgaatggagggtggattaacgagg

SEQ ID NO: 442942 - DNA, 120 bp, Artificial Sequence
  ENSG00000154237_77 (sequence is synthesized)
gggtagttggaggctaccccttggagggcattctggacttatctaccaaaatttcaaatgcacataccctctgacccagcagttccacttaagtatttggtcctgaaatcttggtaaaag

SEQ ID NO: 442943 - DNA, 120 bp, Artificial Sequence
  ENSG00000154237_78 (sequence is synthesized)
tgcccaaagatacagaacaaggatgttcactatagcatctcttagaatatggccccaaacaggaagcaaccccaacctctatcatgagggaggtcataaaattcctgcacatgcaacagt

SEQ ID NO: 442944 - DNA, 120 bp, Artificial Sequence
  ENSG00000154237_79 (sequence is synthesized)
gccatcctctgcagcctgtcaaagaggcaggcagcactaactgctggactggaatgttctccaagatataataaatgcatttgtttgaaagcagcttgcagcacagtgcgtcaggcctct

SEQ ID NO: 442945 - DNA, 62 bp, Artificial Sequence
  ENSG00000154237_80 (sequence is synthesized)
atgacattccaccacaaaagaagtgaaaaaggccggtccttgacttaactgatgacattagt

SEQ ID NO: 442946 - DNA, 78 bp, Artificial Sequence
  ENSG00000154237_81 (sequence is synthesized)
tcacgcctatctcccttcactgactcccttttcggactcagcccacctgcgcccaggtgaaataaacagccttgttgc

SEQ ID NO: 442947 - DNA, 75 bp, Artificial Sequence
  ENSG00000154237_82 (sequence is synthesized)
tggtggtctcttcacatggacgtgcattaaatttggtgccgtaactggcgcggggggaggggggggtccatgaga

SEQ ID NO: 442948 - DNA, 75 bp, Artificial Sequence
  ENSG00000154237_83 (sequence is synthesized)
cgcggggggaggggggggtccatgagaaagatccacctacaacctcaagtcctcagaccaaccagcccaagaaac

SEQ ID NO: 442949 - DNA, 71 bp, Artificial Sequence
  ENSG00000154237_84 (sequence is synthesized)
ttctcccttctcttaacttcaattcctttcattttctggtagagataaaggagacacgttttatccgtgga

SEQ ID NO: 442950 - DNA, 74 bp, Artificial Sequence
  ENSG00000154237_85 (sequence is synthesized)
tgggcaaggaccccaaccccttctctccgtgtctctaccccttctccgcctttctggggggcaagaaaccccca

SEQ ID NO: 442951 - DNA, 85 bp, Artificial Sequence
  ENSG00000154237_86 (sequence is synthesized)
aacccccaaccccttctccttcaccctgagcggcaagtcccgcttttctagaggaggagcaagtactccaacctcatatctctgc

SEQ ID NO: 442952 - DNA, 120 bp, Artificial Sequence
  ENSG00000154237_87 (sequence is synthesized)
tgtgccccaatcccttatttccatgcccccacctcttatatctctgcaccttgatcccttatttccacatcccgacctcgtatctctgcaccccgacccctttcccacttttctggagag

SEQ ID NO: 442953 - DNA, 89 bp, Artificial Sequence
  ENSG00000154237_88 (sequence is synthesized)
gatcccttatttccacatcccgacctcgtatctctgcaccccgacccctttcccacttttctggagagtaagaacccctgaaccgcttc

SEQ ID NO: 442954 - DNA, 63 bp, Artificial Sequence
  ENSG00000154237_89 (sequence is synthesized)
acttgcctccttcactgtaggcaaccttccactctccattcctccttcttctcccttagccta

SEQ ID NO: 442955 - DNA, 68 bp, Artificial Sequence
  ENSG00000154237_90 (sequence is synthesized)
cttccgtgactagccctcccctacctgcccagcaattttctcttaaaaaggtggctggagctaaaggc

SEQ ID NO: 442956 - DNA, 120 bp, Artificial Sequence
  ENSG00000154237_91 (sequence is synthesized)
caaatataaaaacccagcccagttcatgcctcgtttggcagcaaccctgagacactttacggccctagaccctaaaagcccaaaaggccgtcttattctcaatatatattttatcaccca

SEQ ID NO: 442957 - DNA, 120 bp, Artificial Sequence
  ENSG00000154237_92 (sequence is synthesized)
gcaaccctgagacactttacggccctagaccctaaaagcccaaaaggccgtcttattctcaatatatattttatcacccaatctgctccctacattaaataaaactccaaaaattaaatt

SEQ ID NO: 442958 - DNA, 65 bp, Artificial Sequence
  ENSG00000154237_93 (sequence is synthesized)
tattcctgggctacagccacacctcattaccttaacccataagtataagatacctctactccctc

SEQ ID NO: 442959 - DNA, 120 bp, Artificial Sequence
  ENSG00000154237_94 (sequence is synthesized)
atctcatcgaaacctaatcacccttaccccgctcaacaccaatatcccatcccacagcatgctttgaaaagactaaagcctgttatcactctcctgctacagcatggccttttaaagcct

SEQ ID NO: 442960 - DNA, 63 bp, Artificial Sequence
  ENSG00000154237_95 (sequence is synthesized)
atttcactcattgttttgcctatccaccccatggtgtcaaacccatatactctcctatcctca

SEQ ID NO: 442961 - DNA, 87 bp, Artificial Sequence
  ENSG00000154237_96 (sequence is synthesized)
ctcagcaaattacctgggctgtactgccccaaagcttcacagacagcccccattacatcagtcaagcccaaattttttccctgacac

SEQ ID NO: 442962 - DNA, 120 bp, Artificial Sequence
  ENSG00000154237_97 (sequence is synthesized)
tatctcagcataattctcataaagacacacgtgctctccctgccgatcatgtccgattaatctcccaaaccccaaccccttctacaaaacaagaactcctttccttcctaggcatggtta

SEQ ID NO: 442963 - DNA, 62 bp, Artificial Sequence
  ENSG00000154237_98 (sequence is synthesized)
cggctccttcagctgtactcactctttattgagtctcccacaattaccatttttcctggcac

SEQ ID NO: 442964 - DNA, 120 bp, Artificial Sequence
  ENSG00000154237_99 (sequence is synthesized)
catttccccacatttccttcttccctgcttctcaccctgatcacacttggtttatggatggcagttccaccaggcctaatggccacacaccagcaaaggcaggctgtgctatagtacaag

SEQ ID NO: 442965 - DNA, 74 bp, Artificial Sequence
  ENSG00000154237_100 (sequence is synthesized)
ccctacacatcaagctcagggatttgcctccacccaggactggcaaattgtctaggtagacactttcactggat

SEQ ID NO: 442966 - DNA, 65 bp, Artificial Sequence
  ENSG00000154237_101 (sequence is synthesized)
acataattcctcggtttggccttcccacctctatactgtctgataacagaccagcctttattagt

SEQ ID NO: 442967 - DNA, 65 bp, Artificial Sequence
  ENSG00000154237_102 (sequence is synthesized)
tcagccaagcccttcaggaaaggtagaacggactaatgatcttttaaaaacacacctcaccaagc

SEQ ID NO: 442968 - DNA, 120 bp, Artificial Sequence
  ENSG00000154237_103 (sequence is synthesized)
ccactctgaactcttaaatacataatctttgctggcaggactatgctgaacctcctttggcactctctaatcagatgtcctgagtcatctcaattcttagaccttttatacctgtttttc

SEQ ID NO: 442969 - DNA, 74 bp, Artificial Sequence
  ENSG00000154237_104 (sequence is synthesized)
ttcatcaccaataattctaaatgacgaatgtttcttctaacaaccgcacaatatcaccccttaccacaagacct

SEQ ID NO: 442970 - DNA, 70 bp, Artificial Sequence
  ENSG00000154237_105 (sequence is synthesized)
gccgcccccaccgccccccaaaaattttcgctgccccaacacttcgacactattttgttttatttttctt

SEQ ID NO: 442971 - DNA, 120 bp, Artificial Sequence
  ENSG00000154237_106 (sequence is synthesized)
actgcctgtggagtgtgttttagttccttttgtgctgctgtaacagaatcctgcagactgggtaatttataataaacagaaatatatttggcttacaggtctggagattgagaagtccaa

SEQ ID NO: 442972 - DNA, 120 bp, Artificial Sequence
  ENSG00000154237_107 (sequence is synthesized)
gagcatagtgctggtatctggtgagggccttcatgcagtgatatgaaggtggagggcaagagaccaacagactgagagagggaagaactcacttttataacaacccaccctcaaaataac

SEQ ID NO: 442973 - DNA, 120 bp, Artificial Sequence
  ENSG00000154237_108 (sequence is synthesized)
agccgacgcggtgtctaggctgcggagctgcactctgttcctggctctgccctgggaggtgccccggggcggtctggggtgggcccagcattcagcaaggtccctgcaactttggcctct

SEQ ID NO: 442974 - DNA, 120 bp, Artificial Sequence
  ENSG00000154237_109 (sequence is synthesized)
gcccggtgacctctggcgggtgtagaagagctcatgcttcattgagggggtggggggcaccctgaggaccctgtcaacgtcagctgaaccacaggcatctcgatagatgtaagctgggat

SEQ ID NO: 442975 - DNA, 120 bp, Artificial Sequence
  ENSG00000154237_110 (sequence is synthesized)
gagggctcagcaggctgagacaggcctccagaagagggttgagtaggaagcgatttcttccagaattagttcagcaaacacatgtcatccacttggagcaggagccaggtggagtcacag

SEQ ID NO: 442976 - DNA, 65 bp, Artificial Sequence
  ENSG00000154237_111 (sequence is synthesized)
aaatcagggctcaaagtgtggggtctggggtacaggctgcagaggctgacaggagcccgtggtgg

SEQ ID NO: 442977 - DNA, 120 bp, Artificial Sequence
  ENSG00000154237_112 (sequence is synthesized)
tcagatgattttctcgttattgtcataacggtaatgggcgtttttactgtgttctggaaacgcctcgctttgcgtataaacttgtgggcgcctttcctttccaactgacttctcagtctg

SEQ ID NO: 442978 - DNA, 120 bp, Artificial Sequence
  ENSG00000154237_113 (sequence is synthesized)
tgaaggtatgctgggcagggtggcctgtccgggacatggtctacatggttgcagtgatgtgaggctggcgccagctgcagctccccacagtgtttacaccccgcactttgactaccgagc

SEQ ID NO: 442979 - DNA, 62 bp, Artificial Sequence
  ENSG00000154237_114 (sequence is synthesized)
ttgtcatccctactatcttctgtctagtcgtactcctattcaccattctcaactactcatac

SEQ ID NO: 442980 - DNA, 120 bp, Artificial Sequence
  ENSG00000154237_115 (sequence is synthesized)
gtggacagccaccgagactagtctgtctttttcaacgtttctacaaagagcagaaatccataaacaacccaccagaacgtgtcaatccatgtaactttccaagacccataggggatcccc

SEQ ID NO: 442981 - DNA, 120 bp, Artificial Sequence
  ENSG00000154237_116 (sequence is synthesized)
ttggccgtgcctgttattaaaaagggatggtagatatggctctgcggagtcagagctgcacttctttaggagtagccccggcctttctaagagatttgctgccctgaggcgcactggtgg

SEQ ID NO: 442982 - DNA, 120 bp, Artificial Sequence
  ENSG00000154237_117 (sequence is synthesized)
aaagtgactgcccgcctggtgtgggtgcagatgagtccagtgcctactctgtgtctctcttggaatgtgtgaaatggaaggatgtgacacatccctgtctccttccttcagaattcctac

SEQ ID NO: 442983 - DNA, 80 bp, Artificial Sequence
  ENSG00000154237_118 (sequence is synthesized)
gtgtccgcccggccccgcgtcccggagcgcccgcacccggccccgccgccgcctcaggtggtctctggctggcgcagata

SEQ ID NO: 442984 - DNA, 120 bp, Artificial Sequence
  ENSG00000154237_119 (sequence is synthesized)
ctcaggtggtctctggctggcgcagatacaactgctctgtctaccatggtctctgcaagctacaggggaccttcctggcaggcagggacgcgggaaggaagcctaggaaggccggggtca

SEQ ID NO: 442985 - DNA, 120 bp, Artificial Sequence
  ENSG00000154240_0 (sequence is synthesized)
gggcccgttctccgggcctggggggcgcgcgcccctggggtcccggcgctgcccgctgtggtgtccccggcaggcagagcgcgatccaggccgggacgacttgggaaagttctaagtaaa

SEQ ID NO: 442986 - DNA, 120 bp, Artificial Sequence
  ENSG00000154240_1 (sequence is synthesized)
gtttgatcagccggtttgatcggtctgacgtggtccaagagtctgacccaagggtttgcgactgggagaggaaatctgtgtcctggacaagattggattatggaagtgggaagtgaagaa

SEQ ID NO: 442987 - DNA, 120 bp, Artificial Sequence
  ENSG00000154240_2 (sequence is synthesized)
gaaaaatgggagaagctggatgcagaatttgatcactttgtggttgatatgaagccctttgttctaaaattacctcataggacagaacggcagaggtgtgctctttggattagaaagctg

SEQ ID NO: 442988 - DNA, 120 bp, Artificial Sequence
  ENSG00000154240_3 (sequence is synthesized)
tgcgaaccttcaggaacaggtgcaggaataatggggaggaagaatcggaacctgtatgcaaaattgttattgcatatgcttaaacgaggtgcgcttgaaggcccttttacacaccgacct

SEQ ID NO: 442989 - DNA, 120 bp, Artificial Sequence
  ENSG00000154240_4 (sequence is synthesized)
gaacccgggacactaaaaattctaccttcatacatgtccatctattttgatgaaccaaatccagcacgagcaaaaggttcaagcccagagggattaccagcctgggtactgggtgagctg

SEQ ID NO: 442990 - DNA, 120 bp, Artificial Sequence
  ENSG00000154240_5 (sequence is synthesized)
gagacaagtgaacacaaattaaatgaatcatggaaactctcttctggagaagataacactttagtacagtcgccaactgatgtctacagcagggaacagtacactgggaagctccgagtg

SEQ ID NO: 442991 - DNA, 120 bp, Artificial Sequence
  ENSG00000154240_6 (sequence is synthesized)
agatcacactccttgagtccaactcacagagaagatggacaaaatattaccccaaagatttgtgaagtttattcgaaaaaatctcctgtttctttggatgatagtgacattgaagctcgc

SEQ ID NO: 442992 - DNA, 120 bp, Artificial Sequence
  ENSG00000154240_7 (sequence is synthesized)
cttaatagttggaatcttgggatagaaaatcctcgatacctgagacagaagcctatcccagtttctctgatgacaccgaaattcagcctgagaaaatccagcagtttccatgatgatcat

SEQ ID NO: 442993 - DNA, 120 bp, Artificial Sequence
  ENSG00000154240_8 (sequence is synthesized)
tttctctctcgaatacgtgagaaagagctggacatgaaaacaaaaatgatggaagctaaatttcatgaagaaaagcttaaactgcaacagaaacatgatgctgatgttcagaagatttta

SEQ ID NO: 442994 - DNA, 120 bp, Artificial Sequence
  ENSG00000154240_9 (sequence is synthesized)
gaaagaaagaataatgaaatagaagaactgaaaactttatacaggagtaaacaacatgaaactgaagagactattagaaagcttgaaaagaaagttcagacactgatacgtgactgtcaa

SEQ ID NO: 442995 - DNA, 120 bp, Artificial Sequence
  ENSG00000154240_10 (sequence is synthesized)
gttatcagagagactaaagaagaccagattgcagagctgaaaaagatatgtgaacaaagtacggaatctctaaataatgactgggaaaaaaagcttcacaatgctgtagcagaaatggaa

SEQ ID NO: 442996 - DNA, 120 bp, Artificial Sequence
  ENSG00000154240_11 (sequence is synthesized)
caggaaaagtttgatcttcaaaagcaacacactgaaaacattcaagaattgcttgaggatacaaatgtgcgtctgaataaaatggagagtgaatacatggcgcaaacacagtccacaaac

SEQ ID NO: 442997 - DNA, 120 bp, Artificial Sequence
  ENSG00000154240_12 (sequence is synthesized)
cacatgatcaaagaactggaggcccgtgtccagcagctgactggagaagcagagaacagtaatttacagaggcagaaattaattcaagaaaaagcagaacttgaaagatgttaccagata

SEQ ID NO: 442998 - DNA, 120 bp, Artificial Sequence
  ENSG00000154240_13 (sequence is synthesized)
acgtgtagtgaattacaagaagtaaaggcaaggcgtaacacactgcataaagagaaggaccatcttgtaaatgattatgagcaaaacatgaaactgttacaaaccaaatatgatgctgat

SEQ ID NO: 442999 - DNA, 120 bp, Artificial Sequence
  ENSG00000154240_14 (sequence is synthesized)
ctaaggcatctagtatgattgaagaattagagcagaatgtctgtcaattaaaacagcagttacaggaatcagaacttcaaagaaagcaacaactaagggatcaagaaaataagtttcaga

SEQ ID NO: 443000 - DNA, 120 bp, Artificial Sequence
  ENSG00000154240_15 (sequence is synthesized)
tggagaaaagtcatttaaaacacatctatgaaaaaaaggctcatgacttgcagagtgaacttgataaaggaaaagaagatactcaaaagaaaattcataaatttgaggaagctttgaagg

SEQ ID NO: 443001 - DNA, 120 bp, Artificial Sequence
  ENSG00000154240_16 (sequence is synthesized)
aaaaagaggagcagctaactcgtgtgactgaagttcagaggttgcaggcccagcaggcagatgccgctctggaagagtttaagcggcaggtggaactgaactcagagaaagtctatgctg

SEQ ID NO: 443002 - DNA, 120 bp, Artificial Sequence
  ENSG00000154240_17 (sequence is synthesized)
aaatgaaagagcagatggaaaaagtggaggcagatctaactagatccaaatctcttcgtgagaaacaatcaaaggagtttttatggcaactggaggacatcagacagcggtatgaacaac

SEQ ID NO: 443003 - DNA, 120 bp, Artificial Sequence
  ENSG00000154240_18 (sequence is synthesized)
agatagtagagctgaagctggagcatgaacaggagaagacgcacctattacagcagcataacgcagagaaggatagcctagtccgagaccatgaacgggaaattgaaaacctggaaaaac

SEQ ID NO: 443004 - DNA, 120 bp, Artificial Sequence
  ENSG00000154240_19 (sequence is synthesized)
agcttcgcgctgccaatatggagcacgaaaatcaaattcaggagttcaagaaacgagatgcacaggttattgccgacatggaggcccaggttcacaagttgagagaagaattgatcaatg

SEQ ID NO: 443005 - DNA, 120 bp, Artificial Sequence
  ENSG00000154240_20 (sequence is synthesized)
tgaactcacagcggaaacagcagctggtagagcttggtcttcttcgtgaagaggaaaagcaaagggctacaagggaacatgagattgtcgtcaataaactgaaggctgaatcagaaaaga

SEQ ID NO: 443006 - DNA, 120 bp, Artificial Sequence
  ENSG00000154240_21 (sequence is synthesized)
tgaaaatagagctgaaaaagactcatgctgctgagacagagatgacactggaaaaggccaacagcaagctgaagcagattgagaaggaatacactcagaagcttgccaaatcttcacaga

SEQ ID NO: 443007 - DNA, 120 bp, Artificial Sequence
  ENSG00000154240_22 (sequence is synthesized)
tcatagcagaacttcagacaaccatttcctctctgaaagaagagaacagccagcagcagcttgctgcagaaaggcggctccaggatgttagacaaaagtttgaagatgagaagaagcagc

SEQ ID NO: 443008 - DNA, 120 bp, Artificial Sequence
  ENSG00000154240_23 (sequence is synthesized)
tgattagagataatgaccaagcaatcaaggttttacaagatgaattagaaaaccgttctaatcaggtgcgatgtgcagagaaaaaattacaacacaaagaattggagtcacaggaacaga

SEQ ID NO: 443009 - DNA, 120 bp, Artificial Sequence
  ENSG00000154240_24 (sequence is synthesized)
taacttacatacgacaagaatatgaaacaaaattgaaaggattgatgccagcatccctaagacaagaacttgaagacaccatttcctccctaaaatcacaggttaattttctgcaaaaga

SEQ ID NO: 443010 - DNA, 120 bp, Artificial Sequence
  ENSG00000154240_25 (sequence is synthesized)
gagcttccatccttcaggaagaactgactacatatcaaggcagaaggtaactgcacgagagaatgcaacggatgcaatttccaggctgtgctgtggacttcttccagcaggtttgaagat

SEQ ID NO: 443011 - DNA, 120 bp, Artificial Sequence
  ENSG00000154240_26 (sequence is synthesized)
ttggatattgtaaactgtgagatcagtggcattttttaaatccttaaatgtaattaagatcataaaaacatgcatcattcatacactagtggggtggttttatttgtgtctgcctaagtt

SEQ ID NO: 443012 - DNA, 120 bp, Artificial Sequence
  ENSG00000154240_27 (sequence is synthesized)
atttttttaacattcctttatttccgattttcatgtttgtgtgcatttgagtatgtgctgagaactgcttatattgggcaaagtgatttcctatgatatgccttgttaatccttttgcat

SEQ ID NO: 443013 - DNA, 120 bp, Artificial Sequence
  ENSG00000154240_28 (sequence is synthesized)
agaattttaccagttgcgtacgatcaaaatcacgtttgtagtatcatatcaaaaattctaacctgtttacattgttttcatgttcatgttcctatgttattaaaatattattttgtactt

SEQ ID NO: 443014 - DNA, 120 bp, Artificial Sequence
  ENSG00000154240_29 (sequence is synthesized)
gaaagtccccgcccccgggctgctgggcggcggcgacccagcggcccgcaaggatttgaaaccgtttggcaggggcggcggtggcggcggcgttggcggcagcggccgagcggaaagctt

SEQ ID NO: 443015 - DNA, 120 bp, Artificial Sequence
  ENSG00000154240_30 (sequence is synthesized)
aaatttaccttcctttcttcttccttcacttccctctcccttttccttgcccctcttgtttcttctctctttcccttactttaccttctgagccttcatacttttgctgtgtctatttct

SEQ ID NO: 443016 - DNA, 120 bp, Artificial Sequence
  ENSG00000154240_31 (sequence is synthesized)
gtctctctttctccctttctctttctatccacagaagtcttatgtttgtctaataattggcagaagagatcttttttttttttttgctttttaagtgatgaatagttggcgtaacatcaa

SEQ ID NO: 443017 - DNA, 120 bp, Artificial Sequence
  ENSG00000154240_32 (sequence is synthesized)
tggtgataggcatgtggaagagataccaagctcacaggtcactgtgtatgtgttcatgtacatgtgtttttcaggccaacagcaagctgaagcagattgagaaggaatacactcagaagc

SEQ ID NO: 443018 - DNA, 120 bp, Artificial Sequence
  ENSG00000154240_33 (sequence is synthesized)
ttcgtgagaaacaatcaaaggagtttttatggcaactggaggacatcagacagcggtatgaacaacaggtgctggagaagtgttttgaagtgttaaatgggaagataaccacaggagata

SEQ ID NO: 443019 - DNA, 120 bp, Artificial Sequence
  ENSG00000154240_34 (sequence is synthesized)
gcgcctgcttccagccttgcttcatctatcagcttgctaatcacagctgtgtttccagccttctgctctccctgtatcatgagcttcgggagcttcagcaggcagtagtcctggctgttg

SEQ ID NO: 443020 - DNA, 120 bp, Artificial Sequence
  ENSG00000154240_35 (sequence is synthesized)
ggcaggccctggtaccatctctaacagcggttatcacagcaacattaaacttttaaataaggagaacttccatgcgtaaactgaactgttgattgacagatttcatggatgtagcaaaca

SEQ ID NO: 443021 - DNA, 120 bp, Artificial Sequence
  ENSG00000154240_36 (sequence is synthesized)
tctaatctgggagccacatggccatccccaaatgacacattctatttctgttcttgacacactgcctgctttttacaatttttttgtgcctatttctattaaagtgttcagaaagtaaga

SEQ ID NO: 443022 - DNA, 120 bp, Artificial Sequence
  ENSG00000154240_37 (sequence is synthesized)
gcatttctctttcaacattttgcagggaatgatccaatgagtgggagggagagtgcaagctggtgcctgaagttgcatgggacagagaggatgaaaggagtttctggaccttttaggtta

SEQ ID NO: 443023 - DNA, 120 bp, Artificial Sequence
  ENSG00000154240_38 (sequence is synthesized)
acaaaaaggaaaacaatctcgtaaattatgtacctcatctactatcaggtgaccttgttctgtactctcggttattgccgacatggaggcccaggttcacaagttgagagaagaattgat

SEQ ID NO: 443024 - DNA, 120 bp, Artificial Sequence
  ENSG00000154240_39 (sequence is synthesized)
aacattttgcaggtagttattttcctgctagaacttacttaggtgtgctgggggataaatggatatttatttactagaataaatctagtaatctcagtactgcagggggtggcaaaggga

SEQ ID NO: 443025 - DNA, 120 bp, Artificial Sequence
  ENSG00000154240_40 (sequence is synthesized)
gatgacactggaaaagatgaatatcaacaagttgtgtccgggcttgggtggtgagtgtatgactccagatgttatgctgctccagcagaaccagtcactcttgtggaagccaaggaatgg

SEQ ID NO: 443026 - DNA, 120 bp, Artificial Sequence
  ENSG00000154240_41 (sequence is synthesized)
gaacaaaactccgtctcaaaaaaaaaaacaagtttacacattgcctgtttcagttaagatgctttgggtgcaagtaacagaatatcccacccatggttcacataaaaaataaagcaattt

SEQ ID NO: 443027 - DNA, 120 bp, Artificial Sequence
  ENSG00000154240_42 (sequence is synthesized)
atggttcacataaaaaataaagcaatttattacctcacagaacaagaagtccacaagtaaagcattctcatgactctccctccggtgctggcttcattctagaaccaacttcaagatggc

SEQ ID NO: 443028 - DNA, 120 bp, Artificial Sequence
  ENSG00000154240_43 (sequence is synthesized)
tgcagcagtgccaggcattctgcccagatctgcactattcggaggcagaaaagggctgccagtttctagggcctaatgagtaaggaaatctttcctggaaactaccccctccctttacat

SEQ ID NO: 443029 - DNA, 120 bp, Artificial Sequence
  ENSG00000154240_44 (sequence is synthesized)
gtcattggccagagaaggtcacatgcttagcctggcatacccagtccctggctaaagaactgagtatacaaaactagcctagaataatcaggacccacctgctggtgatgaaactgggag

SEQ ID NO: 443030 - DNA, 120 bp, Artificial Sequence
  ENSG00000154240_45 (sequence is synthesized)
aagaatgaaaactggaacaaaaaggaggggaaatggagtgttgagtatgcagccaacagtgtctgctatgtcatcatttcaaaataaatggatattattttgcttagaggcataaatcac

SEQ ID NO: 443031 - DNA, 120 bp, Artificial Sequence
  ENSG00000154240_46 (sequence is synthesized)
attagctgacatcaggaactgagccaggcagtgtggttgtgatgtcactatctcacctcacccccacctaagagattgtggtggggaatctcagacactctaaccctctgggcccaagtc

SEQ ID NO: 443032 - DNA, 120 bp, Artificial Sequence
  ENSG00000154240_47 (sequence is synthesized)
acctttctatcaggggagggaggctgtgctctcactggcttcttgttagaagttctgcctgccctacagcctgcactgagggctctcatcactgcttctgagatcttaatgggggtcaac

SEQ ID NO: 443033 - DNA, 120 bp, Artificial Sequence
  ENSG00000154240_48 (sequence is synthesized)
gaagatgtgggcttctctgagtttagaccatccatctgccaaggaaaaccaagccctgagactgatagagatgagagaagagaatggtaatgtccccaagacagagcaggcaggaagttt

SEQ ID NO: 443034 - DNA, 120 bp, Artificial Sequence
  ENSG00000154240_49 (sequence is synthesized)
atatagcaatcccccttaatcttgaggaatacattccaagacccccagaggctgcctgaaacagctgatagtactaaaacctatatatgctctgtcttttcctatacatacacactgatg

SEQ ID NO: 443035 - DNA, 89 bp, Artificial Sequence
  ENSG00000154240_50 (sequence is synthesized)
ctatatatgctctgtcttttcctatacatacacactgatgattaaatttagtttatcagttaggtacagtatgagattaacagcaatag

SEQ ID NO: 443036 - DNA, 120 bp, Artificial Sequence
  ENSG00000154240_51 (sequence is synthesized)
gcgaaaccatggataagtggagactgttgcatttattccagggagctgtgttaggagaagggagtatgatatataaattatgcattccgtgttcacttattgttctagggccttcaacct

SEQ ID NO: 443037 - DNA, 120 bp, Artificial Sequence
  ENSG00000154240_52 (sequence is synthesized)
ttcctagtcctggaacggcagaggtgtgctctttggattagaaagctgtgcgaaccttcaggaacaggtgcaggaataatggggaggaagaatcggaacctgtatgcaaaattgttattg

SEQ ID NO: 443038 - DNA, 120 bp, Artificial Sequence
  ENSG00000154240_53 (sequence is synthesized)
actgttagcttttttgaagatggattctcacgccgaaaataacacaacatattctagataacagcagtttttccccctgaaatccaccaaaactgaagaaaaatccaagtgactgttctt

SEQ ID NO: 443039 - DNA, 120 bp, Artificial Sequence
  ENSG00000154240_54 (sequence is synthesized)
gtgtatctatggcaactgagaacgctgtgtttttctacaaagtgttttgtaagatgatttttgaatttttgttatattgtgaaaagagaatggaatggggtctggcattttcgatggaaa

SEQ ID NO: 443040 - DNA, 120 bp, Artificial Sequence
  ENSG00000154240_55 (sequence is synthesized)
ttatcatccctttggggaatggtaatactattaggttgtatgtgctagataatatattaaaattgttttttttcttcctgattcaatttttttccacctttaataaaatacatgtattgc

SEQ ID NO: 443041 - DNA, 120 bp, Artificial Sequence
  ENSG00000154240_56 (sequence is synthesized)
gcagaaggtacagcccataagcaggtgtcttgtctcctgattagtttgtgttgtgtcacctgtgagcctccttgtctggcctttgtctttattaaaatgcttggatataatacaagtttt

SEQ ID NO: 443042 - DNA, 120 bp, Artificial Sequence
  ENSG00000154240_57 (sequence is synthesized)
agacttgtttttagtaagtagcatgtctttaagaagtcaccccccttctcatcccagtgcttagtctgtactatcaaaacaagatgagagaatctgccgggcacagtggctcactcctgt

SEQ ID NO: 443043 - DNA, 120 bp, Artificial Sequence
  ENSG00000154252_0 (sequence is synthesized)
agttcacctgccccacagccgcaccctgcctgtgcctgcaccctggggagcccagagccggcaggggccgaggcggtgggacctcgggggagctcaagcctcgactgtcccctcgctgga

SEQ ID NO: 443044 - DNA, 120 bp, Artificial Sequence
  ENSG00000154252_1 (sequence is synthesized)
ggccagaggccaagatgatgtccatgctgggcggcttgcagagatacttccgggtcatcctcctcctcctcctggccctgactctgctcctgctggccggattcctgcactcggacttag

SEQ ID NO: 443045 - DNA, 120 bp, Artificial Sequence
  ENSG00000154252_2 (sequence is synthesized)
agctggacacacccctgtttgggggccaggctgaggggccgccggtcaccaacatcatgttcctgaagacgcacaagacggccagcagcacggtgctcaacatcctctaccgcttcgccg

SEQ ID NO: 443046 - DNA, 120 bp, Artificial Sequence
  ENSG00000154252_3 (sequence is synthesized)
agacccacaacctgtccgtggcgctgcccgccggctcacgcgtccacctgggctacccctggctcttcctggcgcgctacgtggaaggcgtggggtcgcagcagcgcttcaacatcatgt

SEQ ID NO: 443047 - DNA, 120 bp, Artificial Sequence
  ENSG00000154252_4 (sequence is synthesized)
gcaaccacctgaggttcaacctgcctcaggtgcagaaagtcatgcccaacgacaccttctacttctccatcctgaggaaccccgtgttccagctggagtcctccttcatctactacaaaa

SEQ ID NO: 443048 - DNA, 120 bp, Artificial Sequence
  ENSG00000154252_5 (sequence is synthesized)
cctacgcccccgccttccggggcgccccgagcctggacgcgttcctggcctcgccgcggacgttctacaacgacagccgccacctcaggaacgtctacgccaagaacaacatgtggttcg

SEQ ID NO: 443049 - DNA, 120 bp, Artificial Sequence
  ENSG00000154252_6 (sequence is synthesized)
accccaacgcgcagtgcgaggagggctacgtgcgcgcgcgcatcgccgaggtggagcggcgcttccggctggtgctcatcgccgagcacctggacgagtccctggtgctgctgcggcgcc

SEQ ID NO: 443050 - DNA, 120 bp, Artificial Sequence
  ENSG00000154252_7 (sequence is synthesized)
ggctgcgctgggcgctggacgacgtggtggccttcaggctcaactcccgcagcgcgcgctccgtggcccgcctgtcgcccgagacccgggagcgcgcgcggagctggtgcgcgctggact

SEQ ID NO: 443051 - DNA, 120 bp, Artificial Sequence
  ENSG00000154252_8 (sequence is synthesized)
ggcgcctgtacgagcatttcaaccgcaccctctgggcgcagctgcgcgccgagctggggccgcggcggctgcgcggggaggtggagcggctgcgcgcccggaggcgcgaactcgcgagcc

SEQ ID NO: 443052 - DNA, 120 bp, Artificial Sequence
  ENSG00000154252_9 (sequence is synthesized)
tgtgcctgcaggacggcggcgcgctcaagaaccacacgcagatcagagacccgcgcctgcgcccctaccagtccggcaaggccgacatcctgggttacaacctccggccgggcctggaca

SEQ ID NO: 443053 - DNA, 120 bp, Artificial Sequence
  ENSG00000154252_10 (sequence is synthesized)
accagacgctgggcgtgtgccagaggcttgtgatgcctgagctccagtacatggcccgcctgtacgccctgcagttcccggagaagcccctcaagaacatcccgttcctgggggcgtaga

SEQ ID NO: 443054 - DNA, 120 bp, Artificial Sequence
  ENSG00000154252_11 (sequence is synthesized)
ggggccgggccggggacgaggcctcctgcggacaccagctcctctctccgccgtcaccggggaggccggggatccttgcagggcttctggggcgttgggaaacccaggcccgccggccac

SEQ ID NO: 443055 - DNA, 120 bp, Artificial Sequence
  ENSG00000154258_0 (sequence is synthesized)
agaacatgcagagacccatggatgaactgtgtttctagatttttcctccagctttcctgagagaaacaggtcaaaatgagcaagagacgcatgagcgtgggtcagcaaacatgggctctt

SEQ ID NO: 443056 - DNA, 120 bp, Artificial Sequence
  ENSG00000154258_1 (sequence is synthesized)
ctctgcaagaactgtctcaaaaaatggagaatgaaaagacagaccttgttggaatggctcttttcatttcttctggtactgtttctgtacctatttttctccaatttacatcaagttcat

SEQ ID NO: 443057 - DNA, 120 bp, Artificial Sequence
  ENSG00000154258_2 (sequence is synthesized)
gacactcctcaaatgtcttcaatggatctgggacgtgtagatagttttaatgatactaattatgttattgcatttgcacctgaatccaaaactacccaagagataatgaacaaagtggct

SEQ ID NO: 443058 - DNA, 120 bp, Artificial Sequence
  ENSG00000154258_3 (sequence is synthesized)
tcagccccattcctaaaaggaagaacaatcatggggtggcctgatgaaaaaagcatggatgaattggatttgaactattcaatagacgcagtgagagtcatctttactgataccttctcc

SEQ ID NO: 443059 - DNA, 120 bp, Artificial Sequence
  ENSG00000154258_4 (sequence is synthesized)
taccatttgaagttttcttggggacatagaatccccatgatgaaagagcacagagaccattcagctcactgtcaagcagtgaatgaaaaaatgaagtgtgaaggttcagagttctgggag

SEQ ID NO: 443060 - DNA, 120 bp, Artificial Sequence
  ENSG00000154258_5 (sequence is synthesized)
aaaggctttgtagcttttcaagctgccattaatgctgctatcatagaaatcgcaacaaatcattcagtgatggaacagctgatgtcagttactggtgtacatatgaagatattacctttt

SEQ ID NO: 443061 - DNA, 120 bp, Artificial Sequence
  ENSG00000154258_6 (sequence is synthesized)
gttgcccaaggaggagttgcaactgattttttcattttcttttgcattatttctttttctacatttatatactatgtatcagtcaatgttacacaagaaagacaatacattacgtcattg

SEQ ID NO: 443062 - DNA, 120 bp, Artificial Sequence
  ENSG00000154258_7 (sequence is synthesized)
atgacaatgatgggactccgagagtcagcattctggctttcctggggtttgatgtatgctggcttcatccttatcatggccactttaatggctcttattgtaaaatctgcacaaattgtc

SEQ ID NO: 443063 - DNA, 120 bp, Artificial Sequence
  ENSG00000154258_8 (sequence is synthesized)
gtcctgactggttttgtgatggtcttcaccctctttctcctctatggcctgtctttgataactttagctttcctgatgagtgtgttgataaagaaacctttccttacgggcttggttgtg

SEQ ID NO: 443064 - DNA, 120 bp, Artificial Sequence
  ENSG00000154258_9 (sequence is synthesized)
tttctccttattgtcttttgggggatcctgggattcccagcattgtatacacgtcttcctgcatttttggaatggactttgtgtcttcttagcccctttgccttcactgttgggatggcc

SEQ ID NO: 443065 - DNA, 120 bp, Artificial Sequence
  ENSG00000154258_10 (sequence is synthesized)
cagcttatacatttggactatgatgtgaattctaatgcccacttggattcttcacaaaatccatacctcataatagctactcttttcatgttggtttttgacacccttctgtatttggta

SEQ ID NO: 443066 - DNA, 120 bp, Artificial Sequence
  ENSG00000154258_11 (sequence is synthesized)
ttgacattatattttgacaaaattttgcccgctgaatatggacatcgatgttctcccttgtttttcctgaaatcctgtttttggtttcaacacggaagggctaatcatgtggtccttgag

SEQ ID NO: 443067 - DNA, 120 bp, Artificial Sequence
  ENSG00000154258_12 (sequence is synthesized)
aatgaaacagattctgatcctacacctaatgactgttttgaaccagtgtctccagaattctgtgggaaagaagccatcagaatcaaaaatcttaaaaaagaatatgcagggaagtgtgag

SEQ ID NO: 443068 - DNA, 120 bp, Artificial Sequence
  ENSG00000154258_13 (sequence is synthesized)
agagtagaagctttgaaaggtgtggtgtttgacatatatgaaggccagatcactgccctccttggtcacagtggagctggaaaaactaccctgttaaacatacttagtgggttgtcagtt

SEQ ID NO: 443069 - DNA, 120 bp, Artificial Sequence
  ENSG00000154258_14 (sequence is synthesized)
ccaacatcaggttcagtcactgtctataatcacacactttcaagaatggctgatatagaaaatatcagcaagttcactggattttgtccacaatccaatgtgcaatttggatttctcact

SEQ ID NO: 443070 - DNA, 120 bp, Artificial Sequence
  ENSG00000154258_15 (sequence is synthesized)
gtgaaagaaaacctcaggctgtttgctaaaataaaagggattttgccacatgaagtggagaaagaggtacaacgagttgtacaggaattagaaatggaaaatattcaagacatccttgct

SEQ ID NO: 443071 - DNA, 120 bp, Artificial Sequence
  ENSG00000154258_16 (sequence is synthesized)
caaaacttaagtggtggacaaaataggaaactaacttttgggattgccattttaggagatcctcaagttttgctattggatgaaccgactgctggattggatcctctttcaaggcaccga

SEQ ID NO: 443072 - DNA, 120 bp, Artificial Sequence
  ENSG00000154258_17 (sequence is synthesized)
atatggaatctcctgaaagaggggaaatcagacagagtaattctcttcagcacccagtttatagatgaggctgacattctggcggacaggaaggtgttcatatccaatgggaagctgaag

SEQ ID NO: 443073 - DNA, 120 bp, Artificial Sequence
  ENSG00000154258_18 (sequence is synthesized)
tgtgcaggctcttctctgttccttaagaagaaatggggcataggctaccatttaagtttgcatctgaatgaaaggtgtgatccagagagtataacatcactggttaagcagcacatctct

SEQ ID NO: 443074 - DNA, 120 bp, Artificial Sequence
  ENSG00000154258_19 (sequence is synthesized)
gatgccaaattgacagcacaaagtgaagaaaaacttgtatatattttgcctttggaaaggacaaacaaatttccagaactttacagggatcttgatagatgttctaaccaaggcattgag

SEQ ID NO: 443075 - DNA, 120 bp, Artificial Sequence
  ENSG00000154258_20 (sequence is synthesized)
gattatggtgtttccataacaactttgaatgaggtgtttctgaaattagaaggaaaatcaactattgatgaatcagatattggaatttggggacaattacaaactgatggggcaaaagat

SEQ ID NO: 443076 - DNA, 120 bp, Artificial Sequence
  ENSG00000154258_21 (sequence is synthesized)
ataggaagccttgttgagctggaacaagttttgtcttccttccacgaaacaaggaaaacaatcagtggcgtggcgctctggaggcagcaggtctgtgcaatagcaaaagttcgcttccta

SEQ ID NO: 443077 - DNA, 120 bp, Artificial Sequence
  ENSG00000154258_22 (sequence is synthesized)
aagttaaagaaagaaagaaaaagcctgtggactatattattgctttttggtattagctttatccctcaacttttggaacatctattctacgagtcatatcagaaaagttacccgtgggaa

SEQ ID NO: 443078 - DNA, 120 bp, Artificial Sequence
  ENSG00000154258_23 (sequence is synthesized)
ctgtctccaaatacatacttcctctcaccaggacaacaaccacaggatcctctgacccatttactggtcatcaataagacagggtcaaccattgataactttttacattcactgaggcga

SEQ ID NO: 443079 - DNA, 120 bp, Artificial Sequence
  ENSG00000154258_24 (sequence is synthesized)
cagaacatagctatagaagtggatgcctttggaactagaaatggcacagatgacccatcttacaatggtgctatcattgtgtcaggtgatgaaaaggatcacagattttcaatagcatgt

SEQ ID NO: 443080 - DNA, 120 bp, Artificial Sequence
  ENSG00000154258_25 (sequence is synthesized)
aatacaaaacggctgaattgctttcctgtcctcctggatgtcattagcaatggactacttggaatttttaattcgtcagaacacattcagactgacagaagcacattttttgaagagcat

SEQ ID NO: 443081 - DNA, 120 bp, Artificial Sequence
  ENSG00000154258_26 (sequence is synthesized)
gtaccgaagtaacaccttcttctggataccgatggcagcctctttcactccatacattgcaatgagcagcattggtgactacaaaaaaaaagctcattcccagctacggatttcaggcct

SEQ ID NO: 443082 - DNA, 120 bp, Artificial Sequence
  ENSG00000154258_27 (sequence is synthesized)
ctacccttctgcatactggtttggccaagcactggtggatgtttccctgtactttttgatcctcctgctaatgcaaataatggattatatttttagcccagaggagattatatttataat

SEQ ID NO: 443083 - DNA, 120 bp, Artificial Sequence
  ENSG00000154258_28 (sequence is synthesized)
tcaaaacctgttaattcaaatcctgtgtagtattggctatgtctcatctcttgttttcttgacatatgtgatttcattcatttttcgcaatgggagaaaaaatagtggcatttggtcatt

SEQ ID NO: 443084 - DNA, 120 bp, Artificial Sequence
  ENSG00000154258_29 (sequence is synthesized)
tttcttcttaattgtggtcatcttctcgatagttgctactgatctaaatgaatatggatttctagggctattttttggcaccatgttaatacctcccttcacattgattggctctctatt

SEQ ID NO: 443085 - DNA, 120 bp, Artificial Sequence
  ENSG00000154258_30 (sequence is synthesized)
cattttttctgagatttctcctgattccatggattacttaggagcttcagaatctgaaattgtatacctggcactgctaataccttaccttcattttctcatttttcttttcattctgcg

SEQ ID NO: 443086 - DNA, 120 bp, Artificial Sequence
  ENSG00000154258_31 (sequence is synthesized)
atgcctagaaatgaactgcaggaagaaactaatgagaaaggatcctgtgttcagaatttctccaagaagcaacgctatttttccaaacccagaagagcctgaaggagaggaggaagatat

SEQ ID NO: 443087 - DNA, 120 bp, Artificial Sequence
  ENSG00000154258_32 (sequence is synthesized)
ccagatggaaagaatgagaacagtgaatgctatggctgtgcgagactttgatgagacacccgtcatcattgccagctgtctacggaaggaatatgcaggcaaaaagaaaaattgcttttc

SEQ ID NO: 443088 - DNA, 120 bp, Artificial Sequence
  ENSG00000154258_33 (sequence is synthesized)
taaaaggaagaaaaaaattgccacaagaaatgtctctttttgtgttaaaaaaggtgaagttataggactgttaggacacaatggagctggtaaaagtacaactattaagatgataactgg

SEQ ID NO: 443089 - DNA, 120 bp, Artificial Sequence
  ENSG00000154258_34 (sequence is synthesized)
agacacaaaaccaactgcaggacaggtgattttgaaagggagcggtggaggggaacccctgggcttcctggggtactgccctcaggagaatgcgctgtggcccaacctgacagtgaggca

SEQ ID NO: 443090 - DNA, 120 bp, Artificial Sequence
  ENSG00000154258_35 (sequence is synthesized)
gcacctggaggtgtacgctgccgtgaaaggtctcaggaaaggggacgcaatgatcgccatcacacggttagtggatgcgctcaagctgcaggaccagctgaaggctcccgtgaagacctt

SEQ ID NO: 443091 - DNA, 120 bp, Artificial Sequence
  ENSG00000154258_36 (sequence is synthesized)
gtcagagggaataaagcgaaagctgtgctttgtgctgagcatcctggggaacccgtcagtggtgcttctggatgagccgtcgaccgggatggaccccgaggggcagcagcaaatgtggca

SEQ ID NO: 443092 - DNA, 120 bp, Artificial Sequence
  ENSG00000154258_37 (sequence is synthesized)
ggtgattcgggccacctttagaaacacggagaggggcgccctcctgaccacccactacatggcagaggctgaggcggtgtgtgaccgagtggccatcatggtgtcaggaaggctgagatg

SEQ ID NO: 443093 - DNA, 120 bp, Artificial Sequence
  ENSG00000154258_38 (sequence is synthesized)
tattggttccatccaacacctgaaaagcaaatttggcaaagactacctgctggagatgaagctgaagaacctggcacaaatggagcccctccatgcagagatcctgaggcttttccccca

SEQ ID NO: 443094 - DNA, 120 bp, Artificial Sequence
  ENSG00000154258_39 (sequence is synthesized)
ggctgctcagcaggaaaggttctcctccctgatggtctataagttgcctgttgaggatgtgcgacctttatcacaggctttcttcaaattagagatagttaaacagagtttcgacctgga

SEQ ID NO: 443095 - DNA, 120 bp, Artificial Sequence
  ENSG00000154258_40 (sequence is synthesized)
ggagtacagcctctcacagtctaccctggagcaggttttcctggagctctccaaggagcaggagctgggtgatcttgaagaggactttgatccctcggtgaagtggaaactcctcctgca

SEQ ID NO: 443096 - DNA, 120 bp, Artificial Sequence
  ENSG00000154258_41 (sequence is synthesized)
ggaagagccttaaagctccaaataccctatatctttctttaatcctgtgactcttttaaagataatattttatagccttaatatgccttatatcagaggtggtacaaaatgcatttgaaa

SEQ ID NO: 443097 - DNA, 120 bp, Artificial Sequence
  ENSG00000154258_42 (sequence is synthesized)
ctcatgcaataattatcctcagtagtatttcttacagtgagacaacaggcgatgtcagtgagggcgatcatagggcataagcctaagccataccatgcagcctttgtgccagcaaccaaa

SEQ ID NO: 443098 - DNA, 120 bp, Artificial Sequence
  ENSG00000154258_43 (sequence is synthesized)
tcccatgtttcctactgtgttaagtttaaaaatgcatttattatagaattgtctacatttctgaggatgtcatggagaatgcttaattttctttctctgaacttcaaaatattaaatatt

SEQ ID NO: 443099 - DNA, 120 bp, Artificial Sequence
  ENSG00000154258_44 (sequence is synthesized)
ttcttatttatttttttgattaaagtataaattaagacaccctattgacttccgggtaaggggagtcaattgattacccagcagcacagtatttgctttttataattccctttttaaata

SEQ ID NO: 443100 - DNA, 120 bp, Artificial Sequence
  ENSG00000154258_45 (sequence is synthesized)
cttgttcttaattcactggttttccttttctgtcatttttcagagtttagattgtgagtccatgttttgtctgttgtgcctataaaggaaatttgaaatctgtatcattctactataaag

SEQ ID NO: 443101 - DNA, 69 bp, Artificial Sequence
  ENSG00000154258_46 (sequence is synthesized)
agcaaagacttggaaccaaccaaaatacccacaaatgatagaccggataaagaaaacgtgattcttcac

SEQ ID NO: 443102 - DNA, 120 bp, Artificial Sequence
  ENSG00000154258_47 (sequence is synthesized)
cagtaagaacctgatcaagttgaacatgtatatatatgttatacacaagtttgaaacatatttctgtttttatatgttttcttatgatgcaagggcatactcttatgcaaataattaaaa

SEQ ID NO: 443103 - DNA, 120 bp, Artificial Sequence
  ENSG00000154258_48 (sequence is synthesized)
cttcataggtcttaatttcccatatctctatatattattatgacctatccaactggtaaccctatgaacaccttaaaataaacttgtatactcttatttaggtgagtttttcttgttaat

SEQ ID NO: 443104 - DNA, 120 bp, Artificial Sequence
  ENSG00000154258_49 (sequence is synthesized)
actattattattgctatctaattgaatacttgaaggaagttgtgtgaaagaccttggctttgattttagttcttatattcttctagtttttgaaaataaaacacttccatcaacccgtaa

SEQ ID NO: 443105 - DNA, 120 bp, Artificial Sequence
  ENSG00000154258_50 (sequence is synthesized)
atgtctttaaaacaactctacaatgtactaaataaaaattagcaagcagtttttcaaaatttctacaacaagcctaatgatattctatagtttgtttatagaatcactttctaagacttg

SEQ ID NO: 443106 - DNA, 120 bp, Artificial Sequence
  ENSG00000154258_51 (sequence is synthesized)
gctctgctataacactccagagtgtttctttttaaaaagagacacttgtgagagattatggatgatgatactattagtgtttatgtcagaactagatgaagaatgctggtgcttgatact

SEQ ID NO: 443107 - DNA, 120 bp, Artificial Sequence
  ENSG00000154258_52 (sequence is synthesized)
tgatcttagaaatctctaagtgctttcccatttaactcacttgatatacaatagtgggttattagtaaaaatattataattgcatagtcgatgtacaatctttcctttctttctttcctt

SEQ ID NO: 443108 - DNA, 120 bp, Artificial Sequence
  ENSG00000154258_53 (sequence is synthesized)
ccctttggcctcccaaactgctggaattacaggcatgagctaccatgccgcccttatgtacaatctttcctatagagaaacaaaatcttcatctgtgcatctctggggtctgtctgtcaa

SEQ ID NO: 443109 - DNA, 120 bp, Artificial Sequence
  ENSG00000154258_54 (sequence is synthesized)
ttcctcgtatatactaggtaagtgctaaggaagaggcagaaagggaaattgggaaatgaagggaaggaagagaccttctgaatagtttattcatcacgtttctgggagtactgatacaga

SEQ ID NO: 443110 - DNA, 120 bp, Artificial Sequence
  ENSG00000154258_55 (sequence is synthesized)
ataatgactcgctgattattttaaaacttcccaagtaagaaattttggaatgtatcattagtgttatgacatttactattattcttggtgtattgaccttatctaatccaaatggaggaa

SEQ ID NO: 443111 - DNA, 84 bp, Artificial Sequence
  ENSG00000154258_56 (sequence is synthesized)
ccttatctaatccaaatggaggaaatcacaatagtgagccgggatcatgctactggactgcagcctgggtgacagagtgagact

SEQ ID NO: 443112 - DNA, 120 bp, Artificial Sequence
  ENSG00000154258_57 (sequence is synthesized)
ggattacaggcgtgagccaacgctcctggccctggactcctatctttacaataattatctgtcatgggtagtactggtttcacttgctactattatatttctgttaggctctctctgaat

SEQ ID NO: 443113 - DNA, 120 bp, Artificial Sequence
  ENSG00000154258_58 (sequence is synthesized)
ttacaggttgtctttcagccttgtaaaaatgaatgctatcaaatcgaatttttatataatcaaactctttaaatcaattccaatattgaaatcattgcatttatagtgatactaattgtg

SEQ ID NO: 443114 - DNA, 120 bp, Artificial Sequence
  ENSG00000154258_59 (sequence is synthesized)
tatatctagagaacccttcccacacccttacgactataaatttacatgcaagtggtaaatctaatttttgtacttgatgcaatgaataatcaagcactttaataataattgtcaaatatg

SEQ ID NO: 443115 - DNA, 120 bp, Artificial Sequence
  ENSG00000154258_60 (sequence is synthesized)
gaggaggattcccctggctgagaaccactgccttattgcaagataaatcctataattataactatcactggcgaaacagaattctcaacaagtatctattcctttgaatgtttggatcaa

SEQ ID NO: 443116 - DNA, 120 bp, Artificial Sequence
  ENSG00000154258_61 (sequence is synthesized)
aaaggaatgtgaattctcctccagaacatgcagagacccatggatgaactgtgtttctagatttttcctccagctttcctgagactatatttttaagatgtcttcatgtggatgggtgtg

SEQ ID NO: 443117 - DNA, 120 bp, Artificial Sequence
  ENSG00000154258_62 (sequence is synthesized)
tgccaatccagtgctcctgaatcctacatagtaatctttggactgtatccatcaaaatttgttttattaacaccatgccacaataatctacattataaagaacatccttgcactggtccc

SEQ ID NO: 443118 - DNA, 120 bp, Artificial Sequence
  ENSG00000154258_63 (sequence is synthesized)
atgggactccgagagtcagcattctggtaaatcatatgactccaatccattatacagcataaacaaacagaacaacttagctggttgactccttagaccaggggtccccaagccccaggc

SEQ ID NO: 443119 - DNA, 120 bp, Artificial Sequence
  ENSG00000154258_64 (sequence is synthesized)
cacagactgctactggtccatggccagttaggtaccaggccacatagcaggaggtgagtggcaggcaagtgagcaaagcttcatgtatatttacagccactccctattgctcacattacc

SEQ ID NO: 443120 - DNA, 120 bp, Artificial Sequence
  ENSG00000154258_65 (sequence is synthesized)
acctgagctccacctcctgtcagaatagccacgttattagagtatcacagaagctcaaactctattgtgaactgtgtatgtgagagatctaggttgcgggctccttatgagtatccaatg

SEQ ID NO: 443121 - DNA, 120 bp, Artificial Sequence
  ENSG00000154258_66 (sequence is synthesized)
tgagagatctaggttgcgggctccttatgagtatccaatgcctgatgatctgtcactcaagagatctaggttgcgggctctttatgagtatccaatgcctgatgatctgtcactgtctcc

SEQ ID NO: 443122 - DNA, 120 bp, Artificial Sequence
  ENSG00000154262_0 (sequence is synthesized)
agaaaccaggctgtgtaagagctgctggagtaggcacccatttaaagaaaaaatgaagaagcagcaataaagaagttgtaatcgttacctagacaaacagagaactggttttgacagtgt

SEQ ID NO: 443123 - DNA, 120 bp, Artificial Sequence
  ENSG00000154262_1 (sequence is synthesized)
ttctagagtgctttttattattttcctgacagttgtgttccaccatgattactttctccttcagcgaataggctaaatgaatatgaaacagaaaagcgtgtatcagcaaaccaaagcact

SEQ ID NO: 443124 - DNA, 120 bp, Artificial Sequence
  ENSG00000154262_2 (sequence is synthesized)
tctgtgcaagaattttcttaagaaatggaggatgaaaagagagagcttattggaatggggcctctcaatacttctaggactgtgtattgctctgttttccagttccatgagaaatgtcca

SEQ ID NO: 443125 - DNA, 120 bp, Artificial Sequence
  ENSG00000154262_3 (sequence is synthesized)
gtttcctggaatggctcctcagaatctgggaagggtagataaatttaatagctcttctttaatggttgtgtatacaccaatatctaatttaacccagcagataatgaataaaacagcact

SEQ ID NO: 443126 - DNA, 120 bp, Artificial Sequence
  ENSG00000154262_4 (sequence is synthesized)
tgctcctcttttgaaaggaacaagtgtcattggggcaccaaataaaacacacatggacgaaatacttctggaaaatttaccatatgctatgggaatcatctttaatgaaactttctctta

SEQ ID NO: 443127 - DNA, 120 bp, Artificial Sequence
  ENSG00000154262_5 (sequence is synthesized)
taagttaatatttttccagggatataacagtccactttggaaagaagatttctcagctcattgctgggatggatatggtgagttttcatgtacattgaccaaatactggaatagaggatt

SEQ ID NO: 443128 - DNA, 120 bp, Artificial Sequence
  ENSG00000154262_6 (sequence is synthesized)
tgtggctttacaaacagctattaatactgccattatagaaatcacaaccaatcaccctgtgatggaggagttgatgtcagttactgctataactatgaagacattacctttcataactaa

SEQ ID NO: 443129 - DNA, 120 bp, Artificial Sequence
  ENSG00000154262_7 (sequence is synthesized)
aaatcttcttcacaatgagatgtttattttattcttcttgcttcatttctccccacttgtatattttatatcactcaatgtaacaaaagagagaaaaaagtctaagaatttgatgaaaat

SEQ ID NO: 443130 - DNA, 120 bp, Artificial Sequence
  ENSG00000154262_8 (sequence is synthesized)
gatgggtctccaagattcagcattctggctctcctggggtctaatctatgctggcttcatctttattatttccatattcgttacaattatcataacattcacccaaattatagtcatgac

SEQ ID NO: 443131 - DNA, 120 bp, Artificial Sequence
  ENSG00000154262_9 (sequence is synthesized)
tggcttcatggtcatatttatactcttttttttatatggcttatctttggtagctttggtgttcctgatgagtgtgctgttaaagaaagctgtcctcaccaatttggttgtgtttctcct

SEQ ID NO: 443132 - DNA, 120 bp, Artificial Sequence
  ENSG00000154262_10 (sequence is synthesized)
taccctcttttggggatgtctgggattcactgtattttatgaacaacttccttcatctctggagtggattttgaatatttgtagcccttttgcctttactactggaatgattcagattat

SEQ ID NO: 443133 - DNA, 120 bp, Artificial Sequence
  ENSG00000154262_11 (sequence is synthesized)
caaactggattataacttgaatggtgtaatttttcctgacccttcaggagactcatatacaatgatagcaactttttctatgttgcttttggatggtctcatctacttgctattggcatt

SEQ ID NO: 443134 - DNA, 120 bp, Artificial Sequence
  ENSG00000154262_12 (sequence is synthesized)
atactttgacaaaattttaccctatggagatgagcgccattattctcctttatttttcttgaattcatcatcttgtttccaacaccaaaggactaatgctaaggttattgagaaagaaat

SEQ ID NO: 443135 - DNA, 120 bp, Artificial Sequence
  ENSG00000154262_13 (sequence is synthesized)
cgatgctgagcatccctctgatgattattttgaaccagtagctcctgaattccaaggaaaagaagccatcagaatcagaaatgttaagaaggaatataaaggaaaatctggaaaagtgga

SEQ ID NO: 443136 - DNA, 120 bp, Artificial Sequence
  ENSG00000154262_14 (sequence is synthesized)
agcattgaaaggcttgctctttgacatatatgaaggtcaaatcacggcaatcctgggtcacagtggagctggcaaatcttcactgctaaatattcttaatggattgtctgttccaacaga

SEQ ID NO: 443137 - DNA, 120 bp, Artificial Sequence
  ENSG00000154262_15 (sequence is synthesized)
aggatcagttaccatctataataaaaatctctctgaaatgcaagacttggaggaaatcagaaagataactggcgtctgtcctcaattcaatgttcaatttgacatactcaccgtgaagga

SEQ ID NO: 443138 - DNA, 120 bp, Artificial Sequence
  ENSG00000154262_16 (sequence is synthesized)
aaacctcagcctgtttgctaaaataaaagggattcatctaaaggaagtggaacaagaggtacaacgaatattattggaattggacatgcaaaacattcaagataaccttgctaaacattt

SEQ ID NO: 443139 - DNA, 120 bp, Artificial Sequence
  ENSG00000154262_17 (sequence is synthesized)
aagtgaaggacagaaaagaaagctgacttttgggattaccattttaggagatcctcaaattttgcttttagatgaaccaactactggattggatcccttttccagagatcaagtgtggag

SEQ ID NO: 443140 - DNA, 120 bp, Artificial Sequence
  ENSG00000154262_18 (sequence is synthesized)
cctcctgagagagcgtagagcagatcatgtgatccttttcagtacccagtccatggatgaggctgacatcctggctgatagaaaagtgatcatgtccaatgggagactgaagtgtgcagg

SEQ ID NO: 443141 - DNA, 120 bp, Artificial Sequence
  ENSG00000154262_19 (sequence is synthesized)
ttcttctatgtttttgaaaagaaggtggggtcttggatatcacctaagtttacataggaatgaaatatgtaacccagaacaaataacatccttcattactcatcacatccccgatgctaa

SEQ ID NO: 443142 - DNA, 120 bp, Artificial Sequence
  ENSG00000154262_20 (sequence is synthesized)
attaaaaacagaaaacaaagaaaagcttgtatatactttgccactggaaaggacaaatacatttccagatcttttcagtgatctggataagtgttctgaccagggagtgacaggttatga

SEQ ID NO: 443143 - DNA, 120 bp, Artificial Sequence
  ENSG00000154262_21 (sequence is synthesized)
catttccatgtcaactctaaatgaagtctttatgaaactggaaggacagtcaactatcgaacaagatttcgaacaagtggagatgataagagactcagaaagcctcaatgaaatggagct

SEQ ID NO: 443144 - DNA, 120 bp, Artificial Sequence
  ENSG00000154262_22 (sequence is synthesized)
acatgggcctctggagaatgcaagtctttgccatggcacggctccgtttcttaaagttaaaacgtcaaactaaagtgttattgaccctattattggtatttggaatcgcaatattccctt

SEQ ID NO: 443145 - DNA, 120 bp, Artificial Sequence
  ENSG00000154262_23 (sequence is synthesized)
tgattgttgaaaatataatgtatgctatgttaaatgaaaagatcgattgggaatttaaaaacgaattgtattttctctctcctggacaacttccccaggaaccccgtaccagcctgttga

SEQ ID NO: 443146 - DNA, 120 bp, Artificial Sequence
  ENSG00000154262_24 (sequence is synthesized)
tcatcaataacacagaatcaaatattgaagattttataaaatcactgaagcatcaaaatatacttttggaagtagatgactttgaaaacagaaatggtactgatggcctctcatacaatg

SEQ ID NO: 443147 - DNA, 120 bp, Artificial Sequence
  ENSG00000154262_25 (sequence is synthesized)
gagctatcatagtttctggtaaacaaaaggattatagattttcagttgtgtgtaataccaagagattgcactgttttccaattcttatgaatattatcagcaatgggctacttcaaatgt

SEQ ID NO: 443148 - DNA, 120 bp, Artificial Sequence
  ENSG00000154262_26 (sequence is synthesized)
ttaatcacacacaacatattcgaattgagtcaagcccatttcctcttagccacataggactctggactgggttgccggatggttcctttttcttatttttggttctatgtagcatttctc

SEQ ID NO: 443149 - DNA, 120 bp, Artificial Sequence
  ENSG00000154262_27 (sequence is synthesized)
cttatatcaccatgggcagcatcagtgattacaagaaaaatgctaagtcccagctatggatttcaggcctctacacttctgcttactggtgtgggcaggcactagtggacgtcagcttct

SEQ ID NO: 443150 - DNA, 120 bp, Artificial Sequence
  ENSG00000154262_28 (sequence is synthesized)
tcattttaattctccttttaatgtatttaattttctacatagaaaacatgcagtaccttcttattacaagccaaattgtgtttgctttggttatagttactcctggttatgcagcttctc

SEQ ID NO: 443151 - DNA, 120 bp, Artificial Sequence
  ENSG00000154262_29 (sequence is synthesized)
ttgtcttcttcatatatatgatatcatttatttttcgcaaaaggagaaaaaacagtggcctttggtcattttacttcttttttgcctccaccatcatgttttccatcactttaatcaatc

SEQ ID NO: 443152 - DNA, 120 bp, Artificial Sequence
  ENSG00000154262_30 (sequence is synthesized)
attttgacctaagtatattgattaccaccatggtattggttccttcatataccttgcttggatttaaaacttttttggaagtgagagaccaggagcactacagagaatttccagaggcaa

SEQ ID NO: 443153 - DNA, 120 bp, Artificial Sequence
  ENSG00000154262_31 (sequence is synthesized)
attttgaattgagtgccactgattttctagtctgcttcataccctactttcagactttgctattcgtttttgttctaagatgcatggaactaaaatgtggaaagaaaagaatgcgaaaag

SEQ ID NO: 443154 - DNA, 120 bp, Artificial Sequence
  ENSG00000154262_32 (sequence is synthesized)
atcctgttttcagaatttccccccaaagtagagatgctaagccaaatccagaagaacccatagatgaagatgaagatattcaaacagaaagaataagaacagccactgctctgaccactt

SEQ ID NO: 443155 - DNA, 120 bp, Artificial Sequence
  ENSG00000154262_33 (sequence is synthesized)
caatcttagatgagaaacctgttataattgccagctgtctacacaaagaatatgcaggccagaagaaaagttgcttttcaaagaggaagaagaaaatagcagcaagaaatatctctttct

SEQ ID NO: 443156 - DNA, 120 bp, Artificial Sequence
  ENSG00000154262_34 (sequence is synthesized)
gtgttcaagaaggtgaaattttgggattgctaggacccaatggtgctggaaaaagttcatctattagaatgatatctgggatcacaaagccaactgctggagaggtggaactgaaaggct

SEQ ID NO: 443157 - DNA, 120 bp, Artificial Sequence
  ENSG00000154262_35 (sequence is synthesized)
gcagttcagttttgggccacctggggtactgccctcaagagaacgtgctgtggcccatgctgacgttgagggaacacctggaggtgtatgctgccgtcaaggggctcaggaaagcggacg

SEQ ID NO: 443158 - DNA, 120 bp, Artificial Sequence
  ENSG00000154262_36 (sequence is synthesized)
cgaggctcgccatcgcaagattagtgagtgctttcaaactgcatgagcagctgaatgttcctgtgcagaaattaacagcaggaatcacgagaaagttgtgttttgtgctgagcctcctgg

SEQ ID NO: 443159 - DNA, 120 bp, Artificial Sequence
  ENSG00000154262_37 (sequence is synthesized)
gaaactcacctgtcttgctcctggatgaaccatctacgggcatagaccccacagggcagcagcaaatgtggcaggcaatccaggcagtcgttaaaaacacagagagaggtgtcctcctga

SEQ ID NO: 443160 - DNA, 120 bp, Artificial Sequence
  ENSG00000154262_38 (sequence is synthesized)
ccacccataacctggctgaggcggaagccttgtgtgaccgtgtggccatcatggtgtctggaaggcttagatgcattggctccatccaacacctgaaaaacaaacttggcaaggattaca

SEQ ID NO: 443161 - DNA, 120 bp, Artificial Sequence
  ENSG00000154262_39 (sequence is synthesized)
ttctagagctaaaagtgaaggaaacgtctcaagtgactttggtccacactgagattctgaagcttttcccacaggctgcagggcaggaaaggtattcctctttgttaacctataagctgc

SEQ ID NO: 443162 - DNA, 120 bp, Artificial Sequence
  ENSG00000154262_40 (sequence is synthesized)
ccgtggcagacgtttaccctctatcacagacctttcacaaattagaagcagtgaagcataactttaacctggaagaatacagcctttctcagtgcacactggagaaggtattcttagagc

SEQ ID NO: 443163 - DNA, 120 bp, Artificial Sequence
  ENSG00000154262_41 (sequence is synthesized)
tttctaaagaacaggaagtaggaaattttgatgaagaaattgatacaacaatgagatggaaactcctccctcattcagatgaaccttaaaacctcaaacctagtaattttttgttgatct

SEQ ID NO: 443164 - DNA, 120 bp, Artificial Sequence
  ENSG00000154262_42 (sequence is synthesized)
agtatgtttaattttaaagatcatttaaaattaacatcaggtatattttgtaaatttagttaacaaatacataaattttaaaattattcttcctctcaaacataggggtgatagcaaacc

SEQ ID NO: 443165 - DNA, 120 bp, Artificial Sequence
  ENSG00000154262_43 (sequence is synthesized)
cttcctctcaaacataggggtgatagcaaacctgtgataaaggcaatacaaaatattagtaaagtcacccaaagagtcaggcactgggtattgtggaaataaaactatataaacttagaa

SEQ ID NO: 443166 - DNA, 120 bp, Artificial Sequence
  ENSG00000154262_44 (sequence is synthesized)
caagtaagtgagattatgcatggggaaggaagcaggtcgaatgtctgcaaaatgtcaagttcttttaccactaaaagtggtagagctttcattgtaatgcatcaagagagaacctgctat

SEQ ID NO: 443167 - DNA, 120 bp, Artificial Sequence
  ENSG00000154262_45 (sequence is synthesized)
gtttaactataaatagaagtatattggagaaaaatggctggatggttattattttatggtatttattgtttttcatgctatcttctggatacagttaatgtgaaagagagacatatttta

SEQ ID NO: 443168 - DNA, 120 bp, Artificial Sequence
  ENSG00000154262_46 (sequence is synthesized)
tcagtacccagtccatggatgaggctgacatcctggctggtaattgttggttttatctcagtgttaccatgatgcaattggggaatttagaagcgaggtctattcccagggtaagagccc

SEQ ID NO: 443169 - DNA, 120 bp, Artificial Sequence
  ENSG00000154262_47 (sequence is synthesized)
tgctctcattatggtgatgttcctacattctatagcagtcaggaggacgacaggagtctagttccactgtggaattcctttctggttgtacatttgctaggtagtgacaactaatgaaaa

SEQ ID NO: 443170 - DNA, 120 bp, Artificial Sequence
  ENSG00000154262_48 (sequence is synthesized)
tgattaccttttttttttagatcagctgtcaattaatttaaacattcaaatctttttttatatatatttaattgaaaaatagacacttattctttagcatcagagtatacagtataccat

SEQ ID NO: 443171 - DNA, 120 bp, Artificial Sequence
  ENSG00000154262_49 (sequence is synthesized)
ccatgtaatttatgtgttttttttttcagaaagtattggaaggtgcagatagactggtgttcatgagcttattttattttaaatttaatttatttgtataaatttaatgagtacaagtac

SEQ ID NO: 443172 - DNA, 120 bp, Artificial Sequence
  ENSG00000154262_50 (sequence is synthesized)
cgttttgttacatggatatattatgtagtggtgaagtccaggcttctggtgtattcatcaccaaataatatacattgtacccattaaataatttctcattccccatccccctctgactct

SEQ ID NO: 443173 - DNA, 120 bp, Artificial Sequence
  ENSG00000154262_51 (sequence is synthesized)
ctcacccttccgagtcttcagtgtctattactccacactgtatgtccatgtgtacccattttttagctctcactgataaatgagaacatgcagtatttgactttctgtttctgtgttgtt

SEQ ID NO: 443174 - DNA, 120 bp, Artificial Sequence
  ENSG00000154262_52 (sequence is synthesized)
tcacttatgataatagactccagttccatccatgttgctgcaaaagacatggtttcattctcttttatggctgaataatatcatgagttcattttaaatgcatcaattttaatatgtatt

SEQ ID NO: 443175 - DNA, 120 bp, Artificial Sequence
  ENSG00000154262_53 (sequence is synthesized)
tcaaatgttaaaatgcacactagatctagttataccctgttgaatacttctcctttgcacttctgagccttggctcctcgtctttctttactagagaaagaagaaatgacccccaatatc

SEQ ID NO: 443176 - DNA, 120 bp, Artificial Sequence
  ENSG00000154262_54 (sequence is synthesized)
ttttctcccttgatttctttcattcagatagaaaagtgatcatgtccaatgggagactgaagtgtgcaggttcttctatgtttttgaaaagaaggtggggtcttggatatcacctaaggt

SEQ ID NO: 443177 - DNA, 120 bp, Artificial Sequence
  ENSG00000154262_55 (sequence is synthesized)
aaagactttgggaatagattggatttatgtgtttgcaatactggtatatgaaaaaggtggacaattatgaaacagaactggcctcgtgcttcatctctaccatactggattgatcagtgt

SEQ ID NO: 443178 - DNA, 120 bp, Artificial Sequence
  ENSG00000154262_56 (sequence is synthesized)
ttcctgaatacttttttttactttccttcctcctgtgtctttacaatgttaatcattggcaacatttcaacatgataaaccaagcctgacttttcacagcaagactacttcatgtgccac

SEQ ID NO: 443179 - DNA, 120 bp, Artificial Sequence
  ENSG00000154262_57 (sequence is synthesized)
ttttctaggtagctgttctgtgcagcctaaacctctacctgcttcctacccacattttcctcagctgatccatagaattctgaaatatgttttcattctttcatagggcaaaaaggcaaa

SEQ ID NO: 443180 - DNA, 120 bp, Artificial Sequence
  ENSG00000154262_58 (sequence is synthesized)
taatttcagaagccagtatcaacaaggagagaatctaggggcagaaagtaatgataactgtggctaacaaaaaagtgtatatattagtctgttctcatgctgctaatgacatacccgaga

SEQ ID NO: 443181 - DNA, 120 bp, Artificial Sequence
  ENSG00000154262_59 (sequence is synthesized)
tagtctgttctcatgctgctaatgacatacccgagactgggtaatatataaaggaaagagatctaattgactcacagttcggcgtggctgagtaggcctcaggaaacttacaatcatggc

SEQ ID NO: 443182 - DNA, 80 bp, Artificial Sequence
  ENSG00000154262_60 (sequence is synthesized)
tggcagaagggaaagcaaacacgcccttcttcacatggtggcagcaaggacagatgcagactgaaggcagggaaatcatg

SEQ ID NO: 443183 - DNA, 74 bp, Artificial Sequence
  ENSG00000154262_61 (sequence is synthesized)
ggtgtatatccaggctaaaataattgtttaaaataaccctatggccaaacaaagcatgcatgtgggccagattt

SEQ ID NO: 443184 - DNA, 120 bp, Artificial Sequence
  ENSG00000154262_62 (sequence is synthesized)
aaccctatggccaaacaaagcatgcatgtgggccagattttctctactagctaatgatatggtctggtataataattattttccctaagaagtctcttcttcctaacattctcagcttcc

SEQ ID NO: 443185 - DNA, 120 bp, Artificial Sequence
  ENSG00000154262_63 (sequence is synthesized)
aacattctcagcttcctacatttatctataactatacatataaaactctatatagttccatttacattatatatttgtttgtatattttgtaattgttctgagcttatacattttccata

SEQ ID NO: 443186 - DNA, 120 bp, Artificial Sequence
  ENSG00000154262_64 (sequence is synthesized)
ttcaaactgatagattactatcatgttagtatttactcatctttttgttccataaagccaagtaaagttgtgctcaacagctaggtgttcaattaaagctcttcttttgtgatagtggtg

SEQ ID NO: 443187 - DNA, 120 bp, Artificial Sequence
  ENSG00000154262_65 (sequence is synthesized)
aaataattttctttgtccaatgaatttagactttttcttagttttggccacctgagaagcagaactcaagaggaaggattgagtgccactgatttattgggtagttgcttcgtggaagca

SEQ ID NO: 443188 - DNA, 120 bp, Artificial Sequence
  ENSG00000154262_66 (sequence is synthesized)
ccagcagataatggggacaggagagagggaagggaaggcagccagggaagtctgaattctggagcagattactgtggtaggcaattgaggtgcaatgcccacgggagggaaataaatgaa

SEQ ID NO: 443189 - DNA, 120 bp, Artificial Sequence
  ENSG00000154262_67 (sequence is synthesized)
gtaagtgggctcagcgttttgtcaccagaggggtgagtaagctggggttcttacccactgttccctatccattgttgattaagggatgcctacgagagcattaactttctcatccttctg

SEQ ID NO: 443190 - DNA, 120 bp, Artificial Sequence
  ENSG00000154262_68 (sequence is synthesized)
gcttactctgaacatgagcttagaatacttccaagtacagaaaaaggacctcaggtaggtgtttttaataagcagatttaccgtgtacaggtgaatgcagaagaggtgttggtggggcat

SEQ ID NO: 443191 - DNA, 120 bp, Artificial Sequence
  ENSG00000154262_69 (sequence is synthesized)
aaaggtttctgctacaggtttctctttgtaaggtagccccccattattcacaaggaatagatagttccaagatctccagttcatgtctgaaaccgtggatagaaccaaacctaattgcca

SEQ ID NO: 443192 - DNA, 120 bp, Artificial Sequence
  ENSG00000154262_70 (sequence is synthesized)
tcgatcggaaaacatttctgttcatgtcttccacctacacactgaatgccttttctatcttaactaagcacttaacacgcattgtggctgtaacttttgcagtttgaggtgcaacagcaa

SEQ ID NO: 443193 - DNA, 120 bp, Artificial Sequence
  ENSG00000154262_71 (sequence is synthesized)
aagtagcatgaatttcttctgccttcttcacaatttcacagacagaagattcattcttacgttagatcttagcatcagcataagattttttttttccttgttgagaactttcaccttttc

SEQ ID NO: 443194 - DNA, 120 bp, Artificial Sequence
  ENSG00000154262_72 (sequence is synthesized)
tctttggcatatccaaattgccagcatcattactcttgcactttgggaaccttattaggtaaaataggggtgccttgaactgcaataccgtgacagttgctctgatatcccagagggcta

SEQ ID NO: 443195 - DNA, 120 bp, Artificial Sequence
  ENSG00000154262_73 (sequence is synthesized)
ctaagtgacaggtgggtatagctcggttctgctggacaggggatgattcacgtcctgagcctgagcaagatggagtgtgatggcgaaggatttcatcacactgcttacaagggcacacaa

SEQ ID NO: 443196 - DNA, 120 bp, Artificial Sequence
  ENSG00000154262_74 (sequence is synthesized)
ctgaaaacttatgaattatttctggaattttccattttatgtttttagacagcagttgatggtggataattgaaactgtggaaaatgaaactgtagataaggcaggattactctatttta

SEQ ID NO: 443197 - DNA, 120 bp, Artificial Sequence
  ENSG00000154262_75 (sequence is synthesized)
attgtgcatgtactattttgcagagaaaaacaacttacatagtctacaaaagtgttcaaccctcggttccctgccaactgggtagcagcacccattcagactttgtttgataagaaatcc

SEQ ID NO: 443198 - DNA, 120 bp, Artificial Sequence
  ENSG00000154262_76 (sequence is synthesized)
taaagattacttgctctttgtgtaatgttttctacgtgttaggcactgttctaatggtttcatatatattaactcctttagttctcacaactgttctttctatgagatgggtgctataac

SEQ ID NO: 443199 - DNA, 120 bp, Artificial Sequence
  ENSG00000154262_77 (sequence is synthesized)
ttgccctatcttacaaatgaggaaatatatttcagtctcttgatttaaacagcttccctttggtttaaacatctagtttgttaaaggtataactccctatagacctaccttaaataagct

SEQ ID NO: 443200 - DNA, 120 bp, Artificial Sequence
  ENSG00000154262_78 (sequence is synthesized)
cttttgcataattcggtttcattaggcaaatactcaggaattcccagattttagcttcactccccaatgtggcagctctctatgtccttgtagtagcatagaagatggtgttcttctcag

SEQ ID NO: 443201 - DNA, 120 bp, Artificial Sequence
  ENSG00000154262_79 (sequence is synthesized)
atcagtggactatgccatgttattttgttcttggactaaggccctgtgaggtgcaactggtccactttcatttttggtcagagatggagaataaggaattatatgttggtactaccactg

SEQ ID NO: 443202 - DNA, 120 bp, Artificial Sequence
  ENSG00000154262_80 (sequence is synthesized)
gaatatgttactttgccagagtctctggtgttgacctcctggcccatggcagcctctttacacagacccaaggcctctgctgtctaatggcatgcttatgtccatttccggacatgggac

SEQ ID NO: 443203 - DNA, 120 bp, Artificial Sequence
  ENSG00000154262_81 (sequence is synthesized)
tcccaggtccattgctgccatgtgcgggtcatagggaaacacagtgtttgctacagtctcatccacctctttcctctcaataatgtcattggcccatcctcccacccaaactagaaagta

SEQ ID NO: 443204 - DNA, 120 bp, Artificial Sequence
  ENSG00000154262_82 (sequence is synthesized)
gcatctaagagtcttctagaatcctgcagtctcatgcaagtatctccatagaagagttacccaataaatgtgtactgggaaactattatataaatggcactgctccaggaactagaaata

SEQ ID NO: 443205 - DNA, 120 bp, Artificial Sequence
  ENSG00000154262_83 (sequence is synthesized)
ccacattaaataagagatatgtgtctctactctcatggagcctacatctaactagatagggaaaagtagacacacaaaatacacaaaatttttcaacaattgtacactaaaataataaac

SEQ ID NO: 443206 - DNA, 120 bp, Artificial Sequence
  ENSG00000154262_84 (sequence is synthesized)
aaggccagtgagttagagtgatgactggtgtctggctgaggtttatatagagtggtcactgaaggccacaagaagaaaatggtcaagggcactccaagtcaaggggaaaggagaatggct

SEQ ID NO: 443207 - DNA, 120 bp, Artificial Sequence
  ENSG00000154262_85 (sequence is synthesized)
ggagggcaatgagtgagggagcagaatggcaaatggaggtgggtaaggctgtgtggatagatggagacaggctcttttggagcctcagaggttgtgttattgactttaaattttatttta

SEQ ID NO: 443208 - DNA, 120 bp, Artificial Sequence
  ENSG00000154262_86 (sequence is synthesized)
aatgcattgagaaagcattgaaagacttatacagagagaagacccagaatataggtagagatatacgtgggtttgtagtgtggaggtgagaagataatggtctttctgattgttcagatt

SEQ ID NO: 443209 - DNA, 120 bp, Artificial Sequence
  ENSG00000154262_87 (sequence is synthesized)
tctgcagagaaatctgcaggaagctcataaactgagaatggaagatgaagtgagacagtttgaggatggaggaagaggtcttccttagtcatttcagagaaggagagcattctcatgaaa

SEQ ID NO: 443210 - DNA, 120 bp, Artificial Sequence
  ENSG00000154262_88 (sequence is synthesized)
ttttgcttttgactactgtgatactccaaggacataattttcttaacaatattatgtattgtcttttaaataagtattaatttacttggtttagttctcaatgtggttttccaaagtatc

SEQ ID NO: 443211 - DNA, 120 bp, Artificial Sequence
  ENSG00000154262_89 (sequence is synthesized)
aataacacaggtgaaaagaaaaataaaatttaaatccagaaataagttatttttattgttgaatagcacaggaggtgggggggggaagtgaatcataagagaagaaaatgggtatttaaa

SEQ ID NO: 443212 - DNA, 120 bp, Artificial Sequence
  ENSG00000154262_90 (sequence is synthesized)
cttcatttatagaaaacaccttatgaggaacagtgcagatttactctgattttggagatgacagggatgatgaggacaagagaaaaagaacttgggtcactgtataacctggaagagtaa

SEQ ID NO: 443213 - DNA, 120 bp, Artificial Sequence
  ENSG00000154262_91 (sequence is synthesized)
agacgtctctctacctgactaccctaagctattacatggcaaataaacttctatattggcacacccgttctattttgagatccctttgttacacagcagcctaacctataccacaaaggc

SEQ ID NO: 443214 - DNA, 120 bp, Artificial Sequence
  ENSG00000154262_92 (sequence is synthesized)
aatacacactggttaccatgtgaagatggcctatctattccccatgccccttcattaagtacaagatacaggaagatgccttattttgttatcccaaacaatgggtaattggttttgttt

SEQ ID NO: 443215 - DNA, 120 bp, Artificial Sequence
  ENSG00000154262_93 (sequence is synthesized)
ttataggtgtgagccactgcgcccggccagtaattgtttttttgtttttttgtttttttcctaaccgcttaattaactttgaagaaggaacttttatgttagtacctcagatgttaaaac

SEQ ID NO: 443216 - DNA, 120 bp, Artificial Sequence
  ENSG00000154262_94 (sequence is synthesized)
aaacaaacaaagaaacaaaaaaaaaatcacagtaagagtcttcccttgctgagttcctcattcatttgattttcccatggatttgcgattcaggcctgcggtgtatgctctttaaacaaa

SEQ ID NO: 443217 - DNA, 120 bp, Artificial Sequence
  ENSG00000154262_95 (sequence is synthesized)
atttgcgattcaggcctgcggtgtatgctctttaaacaaagacagtctttccctttccgtttctcattcttgttttccatttgggttttggaaagtaaattttattcacctcactacctt

SEQ ID NO: 443218 - DNA, 120 bp, Artificial Sequence
  ENSG00000154262_96 (sequence is synthesized)
aaatgctaattgtatgtttaatttctgagatctagaaaggtttctttacctatgagctcataagataagtaaattaggtctctcttttcctctttggtcactcttgagggcagtgggctt

SEQ ID NO: 443219 - DNA, 120 bp, Artificial Sequence
  ENSG00000154262_97 (sequence is synthesized)
gtgttaatatatttattttgtctctgtacttaggtattttatggtttaagtttgaagcttctgtgccattttgttcctcttttctcaaaatctgccaattattggtaacacgtttatctt

SEQ ID NO: 443220 - DNA, 120 bp, Artificial Sequence
  ENSG00000154262_98 (sequence is synthesized)
ttaatgtgagcatccctgtctgcctaggtgaatgtgggtcaccatatggcattgcacctcaagtgactgtggaggtggagtggggtgtgtggctgctcaaggtgcatggaaagcttattt

SEQ ID NO: 443221 - DNA, 120 bp, Artificial Sequence
  ENSG00000154262_99 (sequence is synthesized)
tctatgtgcatgttcctgtatcacttggttgggggatcctaattcatctaaggtttggccttatttttccaatcccagagcccactataaactcccatttcaaaggcaaaaaaaaaaaaa

SEQ ID NO: 443222 - DNA, 120 bp, Artificial Sequence
  ENSG00000154262_100 (sequence is synthesized)
ggtttcaccatgttggtcaggctggttcagactcctgacctcaagtgatcctttttaaggttgaatagtatccattgtttgtatatacatacacattttgttaatccattaatttggact

SEQ ID NO: 443223 - DNA, 120 bp, Artificial Sequence
  ENSG00000154262_101 (sequence is synthesized)
agcagaagcaatattgacagtcatcatcacatcatcacctgcacattagagaagaggacagtagtaaaatcacaggaatgctgatttttgacacatcttttaacagctagaataccacat

SEQ ID NO: 443224 - DNA, 120 bp, Artificial Sequence
  ENSG00000154262_102 (sequence is synthesized)
atatttttccagggatataacagtccactttggaaagaagatttctcaggtgactttccatatcaaatatcattatggaatttttcatgttttcaacataaagaacagaggaggttgggc

SEQ ID NO: 443225 - DNA, 120 bp, Artificial Sequence
  ENSG00000154262_103 (sequence is synthesized)
caatcgtatgttcctactacaggatgactgcaaaaattgtagagtcatccaacatatatgtgttgagcatgcagatgcatgtgtcaaaggacacatgagtaaccaagactgacaggcccc

SEQ ID NO: 443226 - DNA, 120 bp, Artificial Sequence
  ENSG00000154262_104 (sequence is synthesized)
agcctcaggtgagattccaggttagcagcaaagacagacattgaacaattaatgacaagtacaagaaaaagtgtttcatgggcacttagaccaggggttcctaatagtgggattagagaa

SEQ ID NO: 443227 - DNA, 120 bp, Artificial Sequence
  ENSG00000154262_105 (sequence is synthesized)
gtcctacctggggaaatgatgtttaaagggagaccagaatgaatagcaggtgtgaggtgctagaagcattgtgtttcagatagaagaaaggtaattgtgaagaccctgaggtgagaaagg

SEQ ID NO: 443228 - DNA, 120 bp, Artificial Sequence
  ENSG00000154262_106 (sequence is synthesized)
acatctgttcctagatctggaagaagagcagtatagctgaacaaggaacatgaaaaggaatgtaatgggagagtgaagctgaagtcactcaagtgctacctcctgtggcatcttgtaaac

SEQ ID NO: 443229 - DNA, 120 bp, Artificial Sequence
  ENSG00000154262_107 (sequence is synthesized)
ctaggcaaggaatagccactgagtcactttaatcacggcaaaagtgtaattcggtttccaaaattaggggaacactccagatatagcccggggaatagattgccaagaggctatggagaa

SEQ ID NO: 443230 - DNA, 120 bp, Artificial Sequence
  ENSG00000154262_108 (sequence is synthesized)
tgtcaagaaacaaggagtccattatggctggagcagagtgtttgctttcatctcctttttattttctaagactttctaagcatgctgtggtctgcaagaataaaattgctttattaaaaa

SEQ ID NO: 443231 - DNA, 120 bp, Artificial Sequence
  ENSG00000154262_109 (sequence is synthesized)
cagaagataatttaaaactagaacgcaatatctgacattcctgccacggggtggataaattcagcatttaatttttctgacagtgggaatacctgtatgttcacactcgattaagcttat

SEQ ID NO: 443232 - DNA, 120 bp, Artificial Sequence
  ENSG00000154262_110 (sequence is synthesized)
acgtgcaggtgtgttttgttttcatggtttgataacctggtgtttatatagtaatgccttctggtactgtgtagcatgctagggtattatcttcagaattttagcacctagaatcatgat

SEQ ID NO: 443233 - DNA, 120 bp, Artificial Sequence
  ENSG00000154262_111 (sequence is synthesized)
tggcataaggcaggcttggcactcaacaaatacttgtggaatgtcttactaaataaataaaattcctggagattaatatgctaatttttctttattgtttagattattggtatttggaat

SEQ ID NO: 443234 - DNA, 120 bp, Artificial Sequence
  ENSG00000154262_112 (sequence is synthesized)
tgcactccagtctaggtggcagaatgagatcctgtaacaaaaaaaaaaaattacaaacataaaatttgttaatgtatttgtttagttgtcccaatattatttattaaataaaccatcttt

SEQ ID NO: 443235 - DNA, 120 bp, Artificial Sequence
  ENSG00000154263_0 (sequence is synthesized)
tagtagtactaacaacgttttataggagcacaattaattttacttaggataagtgttgttattattgtttttattgttgttctgttagttactcaaaacttcattctaattgtgccctga

SEQ ID NO: 443236 - DNA, 120 bp, Artificial Sequence
  ENSG00000154263_1 (sequence is synthesized)
gtttgttaaaataccatactgtatttttgtgtaacatgtaaataggcattaatttttgagaaatagaaatgtttatccttaatgtatttttaatttgctaacattgattttttattttct

SEQ ID NO: 443237 - DNA, 120 bp, Artificial Sequence
  ENSG00000154263_2 (sequence is synthesized)
ttcctgaaatagcttatttcctaaaatgaaagaatttattctcagatgaataatttttatatcagctattcttatcagagcaataaacaaataccaatgatgcgctcagccaacaattca

SEQ ID NO: 443238 - DNA, 120 bp, Artificial Sequence
  ENSG00000154263_3 (sequence is synthesized)
ttacactctctgaagagtaactggacaaggagaaaaacatagggaaaaaaccaacagaatttgttggcatgttctacacacagaccatggcttttcagaagccaagctgaatcaaaacag

SEQ ID NO: 443239 - DNA, 120 bp, Artificial Sequence
  ENSG00000154263_4 (sequence is synthesized)
ttttaaaagaggcaaccatttgtagaggagtccttgaaggattcttcattgttttcttggacaaaaagagaccagtggatccaagtgcttcaaatacttctctcttattttcttaactct

SEQ ID NO: 443240 - DNA, 120 bp, Artificial Sequence
  ENSG00000154263_5 (sequence is synthesized)
attgctctgcaatatttactttaccctgttaatgaacaggacaaaatggttaaaaaagagataagcgtgcgtcaacaaattcaggctcttctgtacaagaattttcttaaaaaatggaga

SEQ ID NO: 443241 - DNA, 120 bp, Artificial Sequence
  ENSG00000154263_6 (sequence is synthesized)
ataaaaagagagtttattggaatggacaataacattgtttctagggctatatttgtgcatcttttcggaacacttcagagctacccgttttcctgaacaacctcctaaagtcctgggaag

SEQ ID NO: 443242 - DNA, 120 bp, Artificial Sequence
  ENSG00000154263_7 (sequence is synthesized)
cgtggatcagtttaatgactctggcctggtagtggcatatacaccagtcagtaacataacacaaaggataatgaataagatggccttggcttcctttatgaaaggaagaacagtcattgg

SEQ ID NO: 443243 - DNA, 120 bp, Artificial Sequence
  ENSG00000154263_8 (sequence is synthesized)
gacaccagatgaagagaccatggatatagaacttccaaaaaaataccatgaaatggtgggagttatatttagtgatactttctcatatcgcctgaagtttaattggggatatagaatccc

SEQ ID NO: 443244 - DNA, 120 bp, Artificial Sequence
  ENSG00000154263_9 (sequence is synthesized)
agttataaaggagcactctgaatacacagaacactgttgggccatgcatggtgaaattttttgttacttggcaaagtactggctaaaagggtttgtagcttttcaagctgcaattaatgc

SEQ ID NO: 443245 - DNA, 120 bp, Artificial Sequence
  ENSG00000154263_10 (sequence is synthesized)
tgcaattatagaagtcacaacaaatcattctgtaatggaggagttgacatcagttattggaataaatatgaagataccacctttcatttctaagggagaaattatgaatgaatggtttca

SEQ ID NO: 443246 - DNA, 120 bp, Artificial Sequence
  ENSG00000154263_11 (sequence is synthesized)
ttttacttgcttagtttctttctcttcttttatatactttgcatcattaaatgttgcaagggaaagaggaaaatttaagaaactgatgacagtgatgggtctccgagagtcagcattctg

SEQ ID NO: 443247 - DNA, 120 bp, Artificial Sequence
  ENSG00000154263_12 (sequence is synthesized)
gctctcctggggattgacatacatttgcttcatcttcattatgtccatttttatggctctggtcataacatcaatcccaattgtatttcatactggcttcatggtgatattcacactcta

SEQ ID NO: 443248 - DNA, 120 bp, Artificial Sequence
  ENSG00000154263_13 (sequence is synthesized)
tagcttatatggcctttctttgatagcattggctttcctcatgagtgttttaataaggaaacctatgctcgctggtttggctggatttctcttcactgtattttggggatgtctgggatt

SEQ ID NO: 443249 - DNA, 120 bp, Artificial Sequence
  ENSG00000154263_14 (sequence is synthesized)
cactgtgttatatagacaacttcctttatctttgggatgggtattaagtcttcttagcccttttgccttcactgctggaatggcccagattacacacctggataattacttaagtggtgt

SEQ ID NO: 443250 - DNA, 120 bp, Artificial Sequence
  ENSG00000154263_15 (sequence is synthesized)
tatttttcctgatccctctggggattcatacaaaatgatagccacttttttcattttggcatttgatactcttttctatttgatattcacattatattttgagcgagttttacctgataa

SEQ ID NO: 443251 - DNA, 120 bp, Artificial Sequence
  ENSG00000154263_16 (sequence is synthesized)
agatggccatggggattctccattatttttccttaagtcctcattttggtccaaacatcaaaatactcatcatgaaatctttgagaatgaaataaatcctgagcattcctctgatgattc

SEQ ID NO: 443252 - DNA, 120 bp, Artificial Sequence
  ENSG00000154263_17 (sequence is synthesized)
ttttgaaccggtgtctccagaattccatggaaaagaagccataagaatcagaaatgttataaaagaatataatggaaagactggaaaagtagaagcattgcaaggcatattttttgacat

SEQ ID NO: 443253 - DNA, 120 bp, Artificial Sequence
  ENSG00000154263_18 (sequence is synthesized)
atatgaaggacagatcactgcaatacttgggcataatggagctggtaaatcaacactgctaaacattcttagtggattgtctgtttctacagaaggatcagccactatttataatactca

SEQ ID NO: 443254 - DNA, 120 bp, Artificial Sequence
  ENSG00000154263_19 (sequence is synthesized)
actctctgaaataactgacatggaagaaattagaaagaatattggattttgtccacagttcaattttcaatttgacttcctcactgtgagagaaaacctcagggtatttgctaaaataaa

SEQ ID NO: 443255 - DNA, 120 bp, Artificial Sequence
  ENSG00000154263_20 (sequence is synthesized)
agggattcagccaaaggaagtggaacaagaggtaaaaagaattataatggaattagacatgcaaagcattcaagacattattgctaaaaaattaagtggtgggcagaagagaaaactaac

SEQ ID NO: 443256 - DNA, 120 bp, Artificial Sequence
  ENSG00000154263_21 (sequence is synthesized)
actagggattgccatcttaggagatcctcaggttttgctgctagatgaaccaactgctggattggatcccttttcaagacaccgagtgtggagcctcctgaaggagcataaagtagaccg

SEQ ID NO: 443257 - DNA, 120 bp, Artificial Sequence
  ENSG00000154263_22 (sequence is synthesized)
acttatcctcttcagtacccaattcatggatgaggctgacatcttggctgataggaaagtatttctgtctaatgggaagttgaaatgtgcaggatcatctttgtttctgaagcgaaagtg

SEQ ID NO: 443258 - DNA, 120 bp, Artificial Sequence
  ENSG00000154263_23 (sequence is synthesized)
gggtattggatatcatttaagtttacacaggaatgaaatgtgtgacacagaaaaaatcacatcccttattaagcagcacattcctgatgccaagttaacaacagaaagtgaagaaaaact

SEQ ID NO: 443259 - DNA, 120 bp, Artificial Sequence
  ENSG00000154263_24 (sequence is synthesized)
tgtatatagtttgcctttggaaaaaacgaacaaatttccagatctttacagtgaccttgataagtgttctgaccagggcataaggaattatgctgtttcagtgacatctctgaatgaagt

SEQ ID NO: 443260 - DNA, 120 bp, Artificial Sequence
  ENSG00000154263_25 (sequence is synthesized)
attcttgaacctagaaggaaaatcagcaattgatgaaccagattttgacattgggaaacaagagaaaatacatgtgacaagaaatactggagatgagtctgaaatggaacaggttctttg

SEQ ID NO: 443261 - DNA, 120 bp, Artificial Sequence
  ENSG00000154263_26 (sequence is synthesized)
ctcttcctgaaacaagaaaggctgtcagtagtgcagctctctggagacgacaaatctatgcagtggcaacacttcgcttcttaaagttaaggcgtgaaaggagagctcttttgtgtttgt

SEQ ID NO: 443262 - DNA, 120 bp, Artificial Sequence
  ENSG00000154263_27 (sequence is synthesized)
tactagtacttggaattgcttttatccccatcattctagagaagataatgtataaagtaactcgtgaaactcattgttgggagttttcacccagtatgtatttcctttctctggaacaaa

SEQ ID NO: 443263 - DNA, 120 bp, Artificial Sequence
  ENSG00000154263_28 (sequence is synthesized)
tcccgaagacgcctcttaccagcctgttaatcgttaataatacaggatcaaatattgaagacctcgtgcattcactgaagtgtcaggatatagttttggaaatagatgactttagaaaca

SEQ ID NO: 443264 - DNA, 120 bp, Artificial Sequence
  ENSG00000154263_29 (sequence is synthesized)
gaaatggctcagatgatccctcctacaatggagccatcatagtgtctggtgaccagaaggattacagattttctgttgcgtgtaataccaagaaattgaattgttttcctgttcttatgg

SEQ ID NO: 443265 - DNA, 120 bp, Artificial Sequence
  ENSG00000154263_30 (sequence is synthesized)
gaattgttagcaatgcccttatgggaatttttaacttcacggagcttattcaaatggagagcacttcattttctcgtgatgacatagtgctggatcttggttttatagatgggtccatat

SEQ ID NO: 443266 - DNA, 120 bp, Artificial Sequence
  ENSG00000154263_31 (sequence is synthesized)
ttttgttgttgatcacaaactgcgtttctccttttatcggcatgagcagcatcagcgattataaaaaaaatgttcaatcccagttatggatttcaggcctctggccttcagcatactggt

SEQ ID NO: 443267 - DNA, 120 bp, Artificial Sequence
  ENSG00000154263_32 (sequence is synthesized)
gtggacaggctctggtggacattccattatacttcttgattctcttttcaatacatttaatttactacttcatatttctgggattccagctttcatgggaactcatgtttgttttggtgg

SEQ ID NO: 443268 - DNA, 120 bp, Artificial Sequence
  ENSG00000154263_33 (sequence is synthesized)
tatgcataattggttgtgcagtttctcttatattcctcacatatgtgctttcattcatctttcgcaagtggagaaaaaataatggcttttggtcttttggcttttttattatcttaatat

SEQ ID NO: 443269 - DNA, 120 bp, Artificial Sequence
  ENSG00000154263_34 (sequence is synthesized)
gtgtatccacaattatggtatcaactcaatatgaaaaactcaacttaattttgtgcatgattttcataccttccttcactttgctggggtatgtcatgttattgatccagctcgacttta

SEQ ID NO: 443270 - DNA, 120 bp, Artificial Sequence
  ENSG00000154263_35 (sequence is synthesized)
tgagaaacttggacagtctggacaatagaataaatgaagtcaataaaaccattcttttaacaaccttaataccataccttcagagtgttattttcctttttgtcataaggtgtctggaaa

SEQ ID NO: 443271 - DNA, 120 bp, Artificial Sequence
  ENSG00000154263_36 (sequence is synthesized)
tgaagtatggaaatgaaataatgaataaagacccagttttcagaatctctccacggagtagagaaactcatcccaatccggaagagcccgaagaagaagatgaagatgttcaagctgaaa

SEQ ID NO: 443272 - DNA, 120 bp, Artificial Sequence
  ENSG00000154263_37 (sequence is synthesized)
gagtccaagcagcaaatgcactcactgctccaaacttggaggaggaaccagtcataactgcaagctgtttacacaaggaatattatgagacaaagaaaagttgcttttcaacaagaaaga

SEQ ID NO: 443273 - DNA, 120 bp, Artificial Sequence
  ENSG00000154263_38 (sequence is synthesized)
agaaaatagccatcagaaatgtttccttttgtgttaaaaaaggtgaagttttgggattactaggacacaatggagctggtaaaagtacttccattaaaatgataactgggtgcacaaagc

SEQ ID NO: 443274 - DNA, 120 bp, Artificial Sequence
  ENSG00000154263_39 (sequence is synthesized)
caactgcaggagtggtggtgttacaaggcagcagagcatcagtaaggcaacagcatgacaacagcctcaagttcttggggtactgccctcaggagaactcactgtggcccaagcttacaa

SEQ ID NO: 443275 - DNA, 120 bp, Artificial Sequence
  ENSG00000154263_40 (sequence is synthesized)
tgaaagagcacttggagttgtatgcagctgtgaaaggactgggcaaagaagatgctgctctcagtatttcacgattggtggaagctcttaagctccaggaacaacttaaggctcctgtga

SEQ ID NO: 443276 - DNA, 120 bp, Artificial Sequence
  ENSG00000154263_41 (sequence is synthesized)
aaactctatcagagggaataaagagaaagctgtgctttgtgctgagcatcctggggaacccatcagtggtgcttctagatgagccgttcaccgggatggaccccgaggggcagcagcaaa

SEQ ID NO: 443277 - DNA, 120 bp, Artificial Sequence
  ENSG00000154263_42 (sequence is synthesized)
tgtggcagatacttcaggctaccgttaaaaacaaggagaggggcaccctcttgaccacccattacatgtcagaggctgaggctgtgtgtgaccgtatggccatgatggtgtcaggaacgc

SEQ ID NO: 443278 - DNA, 120 bp, Artificial Sequence
  ENSG00000154263_43 (sequence is synthesized)
taaggtgtattggttccattcaacatctgaaaaacaagtttggtagagattatttactagaaataaaaatgaaagaacctacccaggtggaagctctccacacagagattttgaagcttt

SEQ ID NO: 443279 - DNA, 120 bp, Artificial Sequence
  ENSG00000154263_44 (sequence is synthesized)
tcccacaggctgcttggcaggaaagatattcctctttaatggcgtataagttacctgtggaggatgtccaccctctatctcgggcctttttcaagttagaggcgatgaaacagaccttca

SEQ ID NO: 443280 - DNA, 120 bp, Artificial Sequence
  ENSG00000154263_45 (sequence is synthesized)
acctggaggaatacagcctctctcaggctaccttggagcaggtattcttagaactctgtaaagagcaggagctgggaaatgttgatgataaaattgatacaacagttgaatggaaacttc

SEQ ID NO: 443281 - DNA, 120 bp, Artificial Sequence
  ENSG00000154263_46 (sequence is synthesized)
tcccacaggaagacccttaaaatgaagaacctcctaacattcaattttaggtcctactacattgttagtttccataattctacaagaatgtttccttttacttcagttaacaaaagaaaa

SEQ ID NO: 443282 - DNA, 120 bp, Artificial Sequence
  ENSG00000154263_47 (sequence is synthesized)
catttaataaacattcaataatgattacagttttcatttttaaaaatttaggatgaaggaaacaaggaaatatagggaaaagtagtagacaaaattaacaaaatcagacatgttattcat

SEQ ID NO: 443283 - DNA, 120 bp, Artificial Sequence
  ENSG00000154263_48 (sequence is synthesized)
ccccaacatgggtctattttgtgcttaaaaataatttaaaaatcatacaatattaggttggttatcggttattatcaataaagctaacactgagaacattttacaaataaaaatatgagg

SEQ ID NO: 443284 - DNA, 120 bp, Artificial Sequence
  ENSG00000154263_49 (sequence is synthesized)
tttttagcctgaacttcaaatgtatcagctatttttaaacattatttactcggattctaatttaatgtgacattgactataagaaggtctgataaactgatgaaatggcacagcataaca

SEQ ID NO: 443285 - DNA, 120 bp, Artificial Sequence
  ENSG00000154263_50 (sequence is synthesized)
tttaattataatgacattctgattataaaataaatgcatgtgaattttagtacatattgaagttatatggaagaagatagccataatctgtaagaaagtaccgcagttaatattttcttt

SEQ ID NO: 443286 - DNA, 120 bp, Artificial Sequence
  ENSG00000154263_51 (sequence is synthesized)
agccaacttatattcaatgtattttttatggatcctttttcaaaggtagtatcagtaggcatagtcattttctgtatcttttcacctcacagttcatgaacatttcccatgtcattatag

SEQ ID NO: 443287 - DNA, 120 bp, Artificial Sequence
  ENSG00000154263_52 (sequence is synthesized)
cacttttgtgttatataattgctgcattaatgttatagctgtattgatgtaataccagagttgttacgttcgggttatatgcaagtttatttcttagaaataaaactttgatggactttt

SEQ ID NO: 443288 - DNA, 61 bp, Artificial Sequence
  ENSG00000154263_53 (sequence is synthesized)
tggggagcgcctctgccccgccgcccatcatctgggatgtgaggagcgccgtctgggagat

SEQ ID NO: 443289 - DNA, 120 bp, Artificial Sequence
  ENSG00000154263_54 (sequence is synthesized)
ctagacaaaattaatgttcggaaggcttgtcaaggaagcaatttggatattaaattgtctcctgtggatccagggaaggatgacatagtgctggatcttggttttatagatgggtccata

SEQ ID NO: 443290 - DNA, 120 bp, Artificial Sequence
  ENSG00000154263_55 (sequence is synthesized)
ggctaccttggagcagaagcagtgtgaggcctcactggatgcagatattggcaccacgcttcttgtacaacctgtggtttcagaatcccaactgaaaaagtcagcctaaaagtgtcctgt

SEQ ID NO: 443291 - DNA, 120 bp, Artificial Sequence
  ENSG00000154263_56 (sequence is synthesized)
tgtgtcttgttccaaaagtgacaggaggaccactgccacagaaaccaccctaaagtcagaagcagcggtaagaagataggcctgatggaagcagagctgacatgcagttgctgactttca

SEQ ID NO: 443292 - DNA, 120 bp, Artificial Sequence
  ENSG00000154263_57 (sequence is synthesized)
catgcttccaacaagcagattttgcagcagagcaatatgaaacattgattggatgaatacagaagcaaatgaatcagaaaatttagcaggattgtgttagattgggcaaaaaaaaaaaaa

SEQ ID NO: 443293 - DNA, 120 bp, Artificial Sequence
  ENSG00000154263_58 (sequence is synthesized)
tactaaaataggacacaaggagctttttcgagtttataggaaactgaatatgttcatgcatggctatcttttattagccatatcaccactcttctttatccttcaagaaaatgtaattat

SEQ ID NO: 443294 - DNA, 120 bp, Artificial Sequence
  ENSG00000154263_59 (sequence is synthesized)
tattttaatttttataggagagattgaaaattaaatctcaatctctcctatgagagaggggaaaggtaatgtaaacattctagaaaggttgctttttgagagtaagtaagaaatatagca

SEQ ID NO: 443295 - DNA, 120 bp, Artificial Sequence
  ENSG00000154263_60 (sequence is synthesized)
caataacaaagtgcaggctgagtgggaaagattcttaatcagagctatttctcagaatttatctttaacataaaattagaggcaaccagatttttgttgttataactttttttatgattg

SEQ ID NO: 443296 - DNA, 120 bp, Artificial Sequence
  ENSG00000154263_61 (sequence is synthesized)
aatctgtaatttcacactgattcatgctatatcaaatcagacacttatttaaagaacacattgaaaaattattttactttgcctattaattcctcccccgtattatcacactgaaactta

SEQ ID NO: 443297 - DNA, 120 bp, Artificial Sequence
  ENSG00000154263_62 (sequence is synthesized)
gtaataaatctcactcttcttcctgacagatattcctctttaatggcgtataagttacctgtggaggatgtccaccctctatctcgggcctttttcaagttagagtgaaacagaccttca

SEQ ID NO: 443298 - DNA, 120 bp, Artificial Sequence
  ENSG00000154263_63 (sequence is synthesized)
tcattatatattaaaaggaaattataaacaatgtctttaaattttcatgcaaataaaatgattcaaatacctgaataagaaccaaatcataagatttagcatttatgaaaacgttaagga

SEQ ID NO: 443299 - DNA, 120 bp, Artificial Sequence
  ENSG00000154263_64 (sequence is synthesized)
agcttaaatttactatctagaataatagtgcttagagtttcctacagttgttttagataggtccatttgccatatacttcatgtataatcacactgttttttgtcagattggtggaagct

SEQ ID NO: 443300 - DNA, 120 bp, Artificial Sequence
  ENSG00000154263_65 (sequence is synthesized)
cttaagctccaggaacaacttaaggctcctgtgaaaactctatcagagggaataaagagaaaggtatgggccaggctcggggtttccctgtgcacccatggctgggtgccgacgggctgt

SEQ ID NO: 443301 - DNA, 120 bp, Artificial Sequence
  ENSG00000154263_66 (sequence is synthesized)
aagggtctcatctctgttgcctaccagctggtgacactggattacacacctggataattacttaagtggtgttatttttcctgatccctctggggattcatacaaaatgatagccacttt

SEQ ID NO: 443302 - DNA, 120 bp, Artificial Sequence
  ENSG00000154263_67 (sequence is synthesized)
acttggagtcttggaatatatcccctgtggaaacgggagactaccgtatatacatataaaattgagattttgaatttcttttatatcatgctgttcctgggaatggaacctgccactaag

SEQ ID NO: 443303 - DNA, 120 bp, Artificial Sequence
  ENSG00000154263_68 (sequence is synthesized)
gttaacaaaacatgtttgcttgtctctttgcttcttaaatcaggatgacatagtgctggatcttggttttatagatgggtccatatttttgttgttgatcacaaactgcgtttctccttt

SEQ ID NO: 443304 - DNA, 120 bp, Artificial Sequence
  ENSG00000154265_0 (sequence is synthesized)
acagatcccagctgggtcacccgcactgagtcaacagactgagcgcgtccaggcctgacagctctgcggctcgggccctgaggtttattcagaaaacatgtccactgcaattagggaggt

SEQ ID NO: 443305 - DNA, 120 bp, Artificial Sequence
  ENSG00000154265_1 (sequence is synthesized)
aggagtttggagacagaccagaacacttctactgaagaattacttaattaaatgcagaaccaaaaagagtagtgttcaggaaattctttttccactattttttttattttggttaatatt

SEQ ID NO: 443306 - DNA, 120 bp, Artificial Sequence
  ENSG00000154265_2 (sequence is synthesized)
aattagcatgatgcatccaaataagaaatatgaagaagtgcctaatatagaactcaatcctatggacaagtttactctttctaatctaattcttggatatactccagtgactaatattac

SEQ ID NO: 443307 - DNA, 120 bp, Artificial Sequence
  ENSG00000154265_3 (sequence is synthesized)
aagcagcatcatgcagaaagtgtctactgatcatctacctgatgtcataattactgaagaatatacaaatgaaaaagaaatgttaacatccagtctctctaagccgagcaactttgtagg

SEQ ID NO: 443308 - DNA, 120 bp, Artificial Sequence
  ENSG00000154265_4 (sequence is synthesized)
tgtggttttcaaagactccatgtcctatgaacttcgtttttttcctgatatgattccagtatcttctatttatatggattcaagagctggctgttcaaaatcatgtgaggctgctcagta

SEQ ID NO: 443309 - DNA, 120 bp, Artificial Sequence
  ENSG00000154265_5 (sequence is synthesized)
ctggtcctcaggtttcacagttttacaagcatccatagatgctgccattatacagttgaagaccaatgtttctctttggaaggagctggagtcaactaaagctgttattatgggagaaac

SEQ ID NO: 443310 - DNA, 120 bp, Artificial Sequence
  ENSG00000154265_6 (sequence is synthesized)
tgctgttgtagaaatagatacctttccccgaggagtaattttaatatacctagttatagcattttcaccttttggatactttttggcaattcatatcgtagcagaaaaagaaaaaaaaat

SEQ ID NO: 443311 - DNA, 120 bp, Artificial Sequence
  ENSG00000154265_7 (sequence is synthesized)
aaaagaatttttaaagataatgggacttcatgatactgccttttggctttcctgggttcttctatatacaagtttaatttttcttatgtcccttcttatggcagtcattgcgacagcttc

SEQ ID NO: 443312 - DNA, 120 bp, Artificial Sequence
  ENSG00000154265_8 (sequence is synthesized)
tttgttatttcctcaaagtagcagcattgtgatatttctgctttttttcctttatggattatcatctgtattttttgctttaatgctgacacctctttttaaaaaatcaaaacatgtggg

SEQ ID NO: 443313 - DNA, 120 bp, Artificial Sequence
  ENSG00000154265_9 (sequence is synthesized)
aatagttgaattttttgttactgtggcttttggatttattggccttatgataatcctcatagaaagttttcccaaatcgttagtgtggcttttcagtcctttctgtcactgtacttttgt

SEQ ID NO: 443314 - DNA, 120 bp, Artificial Sequence
  ENSG00000154265_10 (sequence is synthesized)
gattggtattgcacaggtcatgcatttagaagattttaatgaaggtgcttcattttcaaatttgactgcaggcccatatcctctaattattacaattatcatgctcacacttaatagtat

SEQ ID NO: 443315 - DNA, 120 bp, Artificial Sequence
  ENSG00000154265_11 (sequence is synthesized)
attctatgtcctcttggctgtctatcttgatcaagtcattccaggggaatttggcttacggagatcatctttatattttctgaagccttcatattggtcaaagagcaaaagaaattatga

SEQ ID NO: 443316 - DNA, 120 bp, Artificial Sequence
  ENSG00000154265_12 (sequence is synthesized)
ggagttatcagagggcaatgttaatggaaatattagttttagtgaaattattgagccagtttcttcagaatttgtaggaaaagaagccataagaattagtggtattcagaagacatacag

SEQ ID NO: 443317 - DNA, 120 bp, Artificial Sequence
  ENSG00000154265_13 (sequence is synthesized)
aaagaagggtgaaaatgtggaggctttgagaaatttgtcatttgacatatatgagggtcagattactgccttacttggccacagtggaacaggaaagagtacattgatgaatattctttg

SEQ ID NO: 443318 - DNA, 120 bp, Artificial Sequence
  ENSG00000154265_14 (sequence is synthesized)
tggactctgcccaccttctgatgggtttgcatctatatatggacacagagtctcagaaatagatgaaatgtttgaagcaagaaaaatgattggcatttgtccacagttagatatacactt

SEQ ID NO: 443319 - DNA, 120 bp, Artificial Sequence
  ENSG00000154265_15 (sequence is synthesized)
tgatgttttgacagtagaagaaaatttatcaattttggcttcaatcaaagggataccagccaacaatataatacaagaagtgcagaaggttttactagatttagacatgcagactatcaa

SEQ ID NO: 443320 - DNA, 120 bp, Artificial Sequence
  ENSG00000154265_16 (sequence is synthesized)
agataaccaagctaaaaaattaagtggtggtcaaaaaagaaagctgtcattaggaattgctgttcttgggaacccaaagatactgctgctagatgaaccaacagctggaatggacccctg

SEQ ID NO: 443321 - DNA, 120 bp, Artificial Sequence
  ENSG00000154265_17 (sequence is synthesized)
ttctcgacatattgtatggaatcttttaaaatacagaaaagccaatcgggtgacagtgttcagtactcatttcatggatgaagctgacattcttgcagataggaaagctgtgatatcaca

SEQ ID NO: 443322 - DNA, 120 bp, Artificial Sequence
  ENSG00000154265_18 (sequence is synthesized)
aggaatgctgaaatgtgttggttcttcaatgttcctcaaaagtaaatgggggatcggctaccgcctgagcatgtacatagacaaatattgtgccacagaatctctttcttcactggttaa

SEQ ID NO: 443323 - DNA, 120 bp, Artificial Sequence
  ENSG00000154265_19 (sequence is synthesized)
acaacatatacctggagctactttattacaacagaatgaccaacaacttgtgtatagcttgcctttcaaggacatggacaaattttcaggtttgttttctgccctagacagtcattcaaa

SEQ ID NO: 443324 - DNA, 120 bp, Artificial Sequence
  ENSG00000154265_20 (sequence is synthesized)
tttgggtgtcatttcttatggtgtttccatgacgactttggaagacgtatttttaaagctagaagttgaagcagaaattgaccaagcagattatagtgtatttactcagcagccactgga

SEQ ID NO: 443325 - DNA, 120 bp, Artificial Sequence
  ENSG00000154265_21 (sequence is synthesized)
ggaagaaatggattcaaaatcttttgatgaaatggaacagagcttacttattctttctgaaaccaaggctgctctagtgagcaccatgagcctttggaaacaacagatgtatacaatagc

SEQ ID NO: 443326 - DNA, 120 bp, Artificial Sequence
  ENSG00000154265_22 (sequence is synthesized)
aaagtttcatttctttaccttgaaacgtgaaagtaaatcagtgagatcagtgttgcttctgcttttaatttttttcacagttcagatttttatgtttttggttcatcactcttttaaaaa

SEQ ID NO: 443327 - DNA, 120 bp, Artificial Sequence
  ENSG00000154265_23 (sequence is synthesized)
tgctgtggttcccatcaaacttgttccagacttatattttctaaaacctggagacaaaccacataaatacaaaacaagtctgcttcttcaaaattctgctgactcagatatcagtgatct

SEQ ID NO: 443328 - DNA, 120 bp, Artificial Sequence
  ENSG00000154265_24 (sequence is synthesized)
tattagctttttcacaagccagaacataatggtgacgatgattaatgacagtgactatgtatccgtggctccccatagtgcggctttaaatgtgatgcattcagaaaaggactatgtttt

SEQ ID NO: 443329 - DNA, 120 bp, Artificial Sequence
  ENSG00000154265_25 (sequence is synthesized)
tgcagctgttttcaacagtactatggtttattctttacctatattagtgaatatcattagtaactactatctttatcatttaaatgtgactgaaaccatccagatctggagtaccccatt

SEQ ID NO: 443330 - DNA, 120 bp, Artificial Sequence
  ENSG00000154265_26 (sequence is synthesized)
ctttcaagaaattactgatatagtttttaaaattgagctgtattttcaagcagctttgcttggaatcattgttactgcaatgccaccttactttgccatggaaaatgcagagaatcataa

SEQ ID NO: 443331 - DNA, 120 bp, Artificial Sequence
  ENSG00000154265_27 (sequence is synthesized)
gatcaaagcttatactcaacttaaactttcaggtcttttgccatctgcatattggattggacaagctgttgttgatatccccttattttttatcattcttattttgatgctaggaagctt

SEQ ID NO: 443332 - DNA, 120 bp, Artificial Sequence
  ENSG00000154265_28 (sequence is synthesized)
attggcatttcattatggattatatttttatactgtaaagttccttgctgtggttttttgccttattggttatgttccatcagttattctgttcacttatattgcttctttcacctttaa

SEQ ID NO: 443333 - DNA, 120 bp, Artificial Sequence
  ENSG00000154265_29 (sequence is synthesized)
gaaaattttaaataccaaagaattttggtcatttatctattctgtggcagcgttggcttgtattgcaatcactgaaataactttctttatgggatacacaattgcaactattcttcatta

SEQ ID NO: 443334 - DNA, 120 bp, Artificial Sequence
  ENSG00000154265_30 (sequence is synthesized)
tgccttttgtatcatcattccaatctatccacttctaggttgcctgatttctttcataaagatttcttggaagaatgtacgaaaaaatgtggacacctataatccatgggataggctttc

SEQ ID NO: 443335 - DNA, 120 bp, Artificial Sequence
  ENSG00000154265_31 (sequence is synthesized)
agtagctgttatatcgccttacctgcagtgtgtactgtggattttcctcttacaatactatgagaaaaaatatggaggcagatcaataagaaaagatccctttttcagaaacctttcaac

SEQ ID NO: 443336 - DNA, 120 bp, Artificial Sequence
  ENSG00000154265_32 (sequence is synthesized)
gaagtctaaaaataggaagcttccagaaccaccagacaatgaggatgaagatgaagatgtcaaagctgaaagactaaaggtcaaagagctgatgggttgccagtgttgtgaggagaaacc

SEQ ID NO: 443337 - DNA, 120 bp, Artificial Sequence
  ENSG00000154265_33 (sequence is synthesized)
atccattatggtcagcaatttgcataaagaatatgatgacaagaaagattttcttctttcaagaaaagtaaagaaagtggcaactaaatacatctctttctgtgtgaaaaaaggagagat

SEQ ID NO: 443338 - DNA, 120 bp, Artificial Sequence
  ENSG00000154265_34 (sequence is synthesized)
taggagattattcttcagagacaagtgaagatgatgattcactgaagtgtatgggttactgtcctcagataaaccctttgtggccagatactacattgcaggaacattttgaaatttatg

SEQ ID NO: 443339 - DNA, 120 bp, Artificial Sequence
  ENSG00000154265_35 (sequence is synthesized)
gagctgtcaaaggaatgagtgcaagtgacatgaaagaagtcataagtcgaataacacatgcacttgatttaaaagaacatcttcagaagactgtaaagaaactacctgcaggaatcaaac

SEQ ID NO: 443340 - DNA, 120 bp, Artificial Sequence
  ENSG00000154265_36 (sequence is synthesized)
gaaagttgtgttttgctctaagtatgctagggaatcctcagattactttgctagatgaaccatctacaggtatggatcccaaagccaaacagcacatgtggcgagcaattcgaactgcat

SEQ ID NO: 443341 - DNA, 120 bp, Artificial Sequence
  ENSG00000154265_37 (sequence is synthesized)
ttaaaaacagaaagcgggctgctattctgaccactcactatatggaggaggcagaggctgtctgtgatcgagtagctatcatggtgtctgggcagttaagatgtatcggaacagtacaac

SEQ ID NO: 443342 - DNA, 120 bp, Artificial Sequence
  ENSG00000154265_38 (sequence is synthesized)
atctaaagagtaaatttggaaaaggctactttttggaaattaaattgaaggactggatagaaaacctagaagtagaccgccttcaaagagaaattcagtatattttcccaaatgcaagcc

SEQ ID NO: 443343 - DNA, 120 bp, Artificial Sequence
  ENSG00000154265_39 (sequence is synthesized)
gtcaggaaagtttttcttctattttggcttataaaattcctaaggaagatgttcagtccctttcacaatctttttttaagctggaagaagctaaacatgcttttgccattgaagaatata

SEQ ID NO: 443344 - DNA, 120 bp, Artificial Sequence
  ENSG00000154265_40 (sequence is synthesized)
gcttttctcaagcaacattggaacaggtttttgtagaactcactaaagaacaagaggaggaagataatagttgtggaactttaaacagcacactttggtgggaacgaacacaagaagata

SEQ ID NO: 443345 - DNA, 120 bp, Artificial Sequence
  ENSG00000154265_41 (sequence is synthesized)
gagtagtattttgaatttgtattgttcggtctgcttactgggacttctttctttttcacttaattttaactttggtttaaaaagttttttattggaatggtaactggagaaccaagaacg

SEQ ID NO: 443346 - DNA, 120 bp, Artificial Sequence
  ENSG00000154265_42 (sequence is synthesized)
cacttgaaatttttctaagctccttaattgaaatgctgtggttgtgtgttttgcttttctttaaataaaacgtatgtataattaagtgaagctgcatgtttgtattgaagtatattgaac

SEQ ID NO: 443347 - DNA, 120 bp, Artificial Sequence
  ENSG00000154265_43 (sequence is synthesized)
tatatagtttgtatgtcatctttttcaccattcagaaacagtgcttctgaatttgtgatttaaaggaattgtaatagaatagttttatttttaagttatctttaagtttatgccatcttc

SEQ ID NO: 443348 - DNA, 120 bp, Artificial Sequence
  ENSG00000154265_44 (sequence is synthesized)
ttaaataagtacgtaatgttccaatctaaataaaaaactaattcataactaatgcatagaaaagatacataaagcaatgtgaaagtttcttgcttctcctttttaatttctaaaaaagcc

SEQ ID NO: 443349 - DNA, 120 bp, Artificial Sequence
  ENSG00000154265_45 (sequence is synthesized)
actttgaatggaagttgtcatccgtaaaagctgaagtgtaagcactaggaaatctcaatatagagatttgaggaaagttatatccactaggtggcagtcattgatcataataagtgaaat

SEQ ID NO: 443350 - DNA, 120 bp, Artificial Sequence
  ENSG00000154265_46 (sequence is synthesized)
gagcccttgttctagtacatgattttaggcttaggtaattaggtatgtgaaattacatttctttaatttaaagtaaaattcagaaggttttagttattataattaaaggaagactgtgtg

SEQ ID NO: 443351 - DNA, 120 bp, Artificial Sequence
  ENSG00000154265_47 (sequence is synthesized)
tagaatcttacgtaatagtctgattctttgactctgtggctagaatgacagttatctatggaggtggtagaattaagccataccttttccttcatcactcttggaacatataaatttttt

SEQ ID NO: 443352 - DNA, 120 bp, Artificial Sequence
  ENSG00000154265_48 (sequence is synthesized)
gtcatcttccttgcaaagggcacatttaattttgttcttgaataaaatattttattgggtatttgtttttattggtaaactttagtgaatctcttctataaaattgtaagtagatcagtg

SEQ ID NO: 443353 - DNA, 120 bp, Artificial Sequence
  ENSG00000154265_49 (sequence is synthesized)
tgtagatttatttagtaacttacctcattgactttggaacatggtaggatatgaataaactctttcaagggttaaattaagaattgtaagtgcagtgcgcctatttctttttaataagaa

SEQ ID NO: 443354 - DNA, 120 bp, Artificial Sequence
  ENSG00000154265_50 (sequence is synthesized)
ccagaatttcatttttgatagagttaaaggcatggctaatattttcttagaaatacttccttgtacaacccatgtattggctcaaggtataaaatagtgtaaataatgctagttgacatt

SEQ ID NO: 443355 - DNA, 120 bp, Artificial Sequence
  ENSG00000154265_51 (sequence is synthesized)
acatttcaaccaaatgaaagtattaacttcataaaacaaatatattgagagtgtgattattgtattagacaacaacaacagcaatgacagaaggatttggtactgaattactttaaataa

SEQ ID NO: 443356 - DNA, 120 bp, Artificial Sequence
  ENSG00000154265_52 (sequence is synthesized)
gcaaaacctttcagtggcattattcattctttaatgtaggcaaaatttaatgaacttttagctttattgtgtaataagacatctgtgattttaggctctagcagtggatttaaaagtgtt

SEQ ID NO: 443357 - DNA, 120 bp, Artificial Sequence
  ENSG00000154265_53 (sequence is synthesized)
ctttctcggtacaaagtacgtggctgatattttcccccattgctgggggcagttgctatacactttcctaaagtatatataatgttcacataaatacccagggacctcttttttgggatg

SEQ ID NO: 443358 - DNA, 120 bp, Artificial Sequence
  ENSG00000154265_54 (sequence is synthesized)
tgcttttgtaattatgtgtaaccttgaatacttaagtttagtaaaagcaacaaaattatatctatagtttactaaggcagtcacgaaaaagcatagttttttttagaacctgaccatcct

SEQ ID NO: 443359 - DNA, 120 bp, Artificial Sequence
  ENSG00000154265_55 (sequence is synthesized)
aagaaagttatgtcatctgaagatagagcatgactaatgaagaaaattacctgcttttgcacgtagatttggtaactttcactttacatttgtgaatgtgtaattggtgcaaagtaaatt

SEQ ID NO: 443360 - DNA, 120 bp, Artificial Sequence
  ENSG00000154265_56 (sequence is synthesized)
ttttttcctgcaaagtgaaagttgagtagtcacaatcatgttatttattttgttcatttagttactttgcttttaatgtatatgaatacatgctcttgtaaacaattttaaaagacattc

SEQ ID NO: 443361 - DNA, 120 bp, Artificial Sequence
  ENSG00000154265_57 (sequence is synthesized)
aaatttttttttagtttttatatactcagaatatattttggttgttaaattaaattatgttccctttttcacagtaacaaaatctgactcaggagaaatataacttaattcttaggaaaa

SEQ ID NO: 443362 - DNA, 120 bp, Artificial Sequence
  ENSG00000154265_58 (sequence is synthesized)
caagggtaagtgagctggaaagcaaaggaggcaaaaagtgaaatatatttatttacagtgtacagttcatgtttatgaacatactaattttaaaatgtcttaaattactgatctcaaaac

SEQ ID NO: 443363 - DNA, 120 bp, Artificial Sequence
  ENSG00000154265_59 (sequence is synthesized)
ttttttctatgtcagtacagataaataaataaatatacatattaggcaaaagcaacatcaccaaccttatatttcccattcatggtcaaattttcaaaggaaagtaaaagctgagcttta

SEQ ID NO: 443364 - DNA, 120 bp, Artificial Sequence
  ENSG00000154265_60 (sequence is synthesized)
ctgagtgagtgtttactgactaataaggcaagaaaaaacatgatgagtgtactttacatcttacttttgtgggctcttaatttttttttctagtttgttttcagtaaagacagtgggttt

SEQ ID NO: 443365 - DNA, 120 bp, Artificial Sequence
  ENSG00000154265_61 (sequence is synthesized)
gacagtgggttttctttaaaataatttttttcttttaaatttgcacaaattatcttaggtcagtattttggttttaatcattaaaacatttttagagtaatgtaatttaacaaatatttt

SEQ ID NO: 443366 - DNA, 120 bp, Artificial Sequence
  ENSG00000154265_62 (sequence is synthesized)
ttccagaaatggattctttggagagaactcggatgactatcagttttggccctgtaagatcgtggagatctgtaagatagatacttatataacttacataaaatatatataatatattac

SEQ ID NO: 443367 - DNA, 120 bp, Artificial Sequence
  ENSG00000154265_63 (sequence is synthesized)
ataacttatataactagctattattttatataactaactataatatgacaaatcctttgctagtagtactaacaacgttttataggagcacaattaattttacttaggataagtgttgtt

SEQ ID NO: 443368 - DNA, 120 bp, Artificial Sequence
  ENSG00000154265_64 (sequence is synthesized)
tgttattattgtttttattgttgttctgttagttactcaaaacttcattctaattgtgccctgagtttgttaaaataccatactgtatttttgtgtaacatgtaaataggcattaatttt

SEQ ID NO: 443369 - DNA, 120 bp, Artificial Sequence
  ENSG00000154265_65 (sequence is synthesized)
tgagaaatagaaatgtttatccttaatgtatttttaatttgctaacattgattttttattttctttcctgaaatagcttatttcctaaaatgaaagaatttattctcagatgaataattt

SEQ ID NO: 443370 - DNA, 120 bp, Artificial Sequence
  ENSG00000154265_66 (sequence is synthesized)
tttcctaaaatgaaagaatttattctcagatgaataatttttatatcagctattcttatcaggtaaaagtttaattattttttatttataatatatgtaagcaattctcaatgctgctct

SEQ ID NO: 443371 - DNA, 120 bp, Artificial Sequence
  ENSG00000154265_67 (sequence is synthesized)
agagttgaaaatttaagacaagtcattttgtatactgaagtgaattctttgttatttagtgctgataattgaataatgagtagctcatattaaaaatgatgcaaaaacctggcactaaaa

SEQ ID NO: 443372 - DNA, 120 bp, Artificial Sequence
  ENSG00000154265_68 (sequence is synthesized)
aaaatgttgatattttctcttagcaggctgtcaaccaggttaggttcaggtcataagtttctacccacattctttgaactgtagttgtcattttagtttatttttcaaaaacttttgcag

SEQ ID NO: 443373 - DNA, 120 bp, Artificial Sequence
  ENSG00000154265_69 (sequence is synthesized)
tacctttttggtctgtcttgtgtgtgccttgcagtgaacagtctggatttggacagtggtctgtctgttagttcagtttctcaagcctttgtcacactaataggattggatttatgtatg

SEQ ID NO: 443374 - DNA, 120 bp, Artificial Sequence
  ENSG00000154265_70 (sequence is synthesized)
tccagcttgggaattattacaggaattaaaaacaactttttagagtgctttcctgagctctctttctatttgttcccccttctactttttgcttccctgtggctgctgtttctatcctcc

SEQ ID NO: 443375 - DNA, 120 bp, Artificial Sequence
  ENSG00000154265_71 (sequence is synthesized)
agccagagagctagtgtttattttctccattgtgttacacacttgtgcagctgcaaccaccatatccagggcccaatggtaggaggtagagaagaaaagcaaaagggattggcctcatcc

SEQ ID NO: 443376 - DNA, 120 bp, Artificial Sequence
  ENSG00000154265_72 (sequence is synthesized)
tcttacaacgatagttccattgaatagagagaaaggttttcctgcctcagagtgttggctgcactaggcttttgttactgtagtctggccctgttaccatgggattgcttgcatgtgggg

SEQ ID NO: 443377 - DNA, 120 bp, Artificial Sequence
  ENSG00000154265_73 (sequence is synthesized)
atacaggagaattcagaaaagaaaaaaagatttgctatttctacattctccctgagcattaagacttcccttgcccattcctcaattcaaagctaaggcttcttctggagctgcctctgt

SEQ ID NO: 443378 - DNA, 120 bp, Artificial Sequence
  ENSG00000154265_74 (sequence is synthesized)
gggcggttcgggagataccaaaggagaaaaagtaccactgttgatatggtggtatttcaaattctggtctaccctatttcacatgccttgtttacttttcagagctgacagattgctgct

SEQ ID NO: 443379 - DNA, 120 bp, Artificial Sequence
  ENSG00000154265_75 (sequence is synthesized)
ccatgcattctgtccagtttcctaagagagacagcttggagtatgcttaatccatcttacctgggactgaaacagctgcttattttgccgttaaaaattacatgcagtttactgcgtggc

SEQ ID NO: 443380 - DNA, 120 bp, Artificial Sequence
  ENSG00000154265_76 (sequence is synthesized)
ttttttcctttatggattatcatctgtaagtattttaacttgtgataggaataaagaactgtcaaaatgtttgataacatagcaaagtctttttcttcagtttacttatagtcaatttgc

SEQ ID NO: 443381 - DNA, 120 bp, Artificial Sequence
  ENSG00000154265_77 (sequence is synthesized)
catgaaagacagattttactaattgataagtgacttaataaataaatgatgtggcatcactgtattcctgtatttttagtaatgttacaaaatagttttagatttagatttagcttttgt

SEQ ID NO: 443382 - DNA, 120 bp, Artificial Sequence
  ENSG00000154265_78 (sequence is synthesized)
catatgatgtatttcacatacaactcctctatctgttgtctttatataatgatgtatataattaagactgtcaagtattggactatttttgtttgtcttcatggaatccttactctttca

SEQ ID NO: 443383 - DNA, 120 bp, Artificial Sequence
  ENSG00000154265_79 (sequence is synthesized)
agttaatttatgctccaggatgatgatttttaaagatacatctttgcaaatgtaactctttagcagtcttgatattcatttgatatattggctgaatgagaggttttaatgaccagcctt

SEQ ID NO: 443384 - DNA, 120 bp, Artificial Sequence
  ENSG00000154265_80 (sequence is synthesized)
tgttttaagtggttccatcttccattctgattggtttatgtgcccaccctgtatcagttgttaaatgttttggctatcatttctgctctttaaaataataaattgcaaataactaacata

SEQ ID NO: 443385 - DNA, 120 bp, Artificial Sequence
  ENSG00000154265_81 (sequence is synthesized)
agctctgcctgcgccaggagcgcgcgggtgcgcgcggccgcgccctcgcacagatcccagctgggtcacccgcactgagtcaacagactgagcgcgtccaggcctgacagctctgcggct

SEQ ID NO: 443386 - DNA, 120 bp, Artificial Sequence
  ENSG00000154265_82 (sequence is synthesized)
cgggccctgagagacagcgtctcgggctagagtgcagtggtgcgatcaaagttcactgcagccttgaacgtctggactctagggaccctgctgaatagctggggctacaggcgtgtgtca

SEQ ID NO: 443387 - DNA, 120 bp, Artificial Sequence
  ENSG00000154265_83 (sequence is synthesized)
agttagcttttgatagattgacttggaagtatgttgagttttttaaaaatatggctgtctactttgaatttgaattcacttaatatttcaataacttggaatattatttttaggcatagt

SEQ ID NO: 443388 - DNA, 120 bp, Artificial Sequence
  ENSG00000154265_84 (sequence is synthesized)
tttcaaaaaattgttatatattggattaattatgtaacacaaatatgaaataaacatatgagtttctacttacataaataaataattgagtaaagaaatgtgtcagagaagaggtacatc

SEQ ID NO: 443389 - DNA, 120 bp, Artificial Sequence
  ENSG00000154265_85 (sequence is synthesized)
ggtacatcttccttacagaacaattccaaataataatatatgtagataatacccacttcaagggaggaggcttaatctcctatcccccaagtttggacgggacttagccagtttcttgta

SEQ ID NO: 443390 - DNA, 120 bp, Artificial Sequence
  ENSG00000154265_86 (sequence is synthesized)
aaaaatgaacgacagaaggagaaaaatagtaactttacagttgagaaagctggcaaatactaccttaactaaacgatgttgtgcagatatcatgtattcactgatatgatatgatggaaa

SEQ ID NO: 443391 - DNA, 120 bp, Artificial Sequence
  ENSG00000154265_87 (sequence is synthesized)
aagtactacagctgtgtaatattctctccaaaacccataacccaagtgtagtcatgagaaaaatatcagactaacccaaattgagggaccttctaacacacacctgaccagtacttctca

SEQ ID NO: 443392 - DNA, 120 bp, Artificial Sequence
  ENSG00000154265_88 (sequence is synthesized)
aaactgtcaaaatcatgaaaaagacagaaagagtaagaaactgtcacccacagttagagactaaggtgacgtgacagccaagaacactacggtatcctggatagaacctggaataaacaa

SEQ ID NO: 443393 - DNA, 120 bp, Artificial Sequence
  ENSG00000154265_89 (sequence is synthesized)
aggacactaatagaaaattggtgaaatctaaataaagtatggagttcagtgacaaggaatgtaccaatgtcggtgtctcagttgtgaggaatttaccatggtaatataagatgataagat

SEQ ID NO: 443394 - DNA, 120 bp, Artificial Sequence
  ENSG00000154265_90 (sequence is synthesized)
atttttctctaaatataaaggtatatttttttaaaatgtagttatatgtgtgagagattattctttgaagctgtcattttatatctgagctttcttttaaaaaattacttcagatgtatc

SEQ ID NO: 443395 - DNA, 120 bp, Artificial Sequence
  ENSG00000154265_91 (sequence is synthesized)
ttttggcttataaaattcctaaggaagatgttcagtccctttcacaatctttttttaagctggaagaaggtaagtagttgaaaagcacttatgttgtagctctcaaattatgaaagaatt

SEQ ID NO: 443396 - DNA, 120 bp, Artificial Sequence
  ENSG00000154265_92 (sequence is synthesized)
ttatttaaaaagtttaaaactggggactcggtttattttagaaactatggcagataagaagataaccttttattcatttaatctaagacacaggtaaacactaatgtcatagggattttg

SEQ ID NO: 443397 - DNA, 120 bp, Artificial Sequence
  ENSG00000154265_93 (sequence is synthesized)
tagataaactctattgtaatgtaaaccttttacaatttttagagagcattgacacagtttatcacattgcatctatgagaagggtcagcttaattatcgagtctttgcagttagtccagc

SEQ ID NO: 443398 - DNA, 120 bp, Artificial Sequence
  ENSG00000154265_94 (sequence is synthesized)
agcaagagctctgagtttcttgaatccttacttcatactggtccatagaagtagcaacactatcaagactccagtggcaaagagaattctgagtgtagcgaggggtgggcagtccccaaa

SEQ ID NO: 443399 - DNA, 120 bp, Artificial Sequence
  ENSG00000154265_95 (sequence is synthesized)
attttaaggaagcttatagaatcttggcatttaaaaaataagtggtatgtaggataaatatatatatgctggtgacagttgagggagatcacctcctggaagaatcaggtattcatatgc

SEQ ID NO: 443400 - DNA, 120 bp, Artificial Sequence
  ENSG00000154265_96 (sequence is synthesized)
atattcttgttgcagctatggattaatgggtttacttttgccaagaacactaattaattattttttggtctgtaatatatggcctgcatgatgttcattgtttattcatgtttattggcc

SEQ ID NO: 443401 - DNA, 87 bp, Artificial Sequence
  ENSG00000154265_97 (sequence is synthesized)
gctgaggcgggaggatcccttaagcccatgctgtttttacaaaatattttttaaaattacccgggtatagtggcatgtgcctgtagt

SEQ ID NO: 443402 - DNA, 120 bp, Artificial Sequence
  ENSG00000154265_98 (sequence is synthesized)
tgtttttacaaaatattttttaaaattacccgggtatagtggcatgtgcctgtagtcccagctaactcaggaggctgaggtgggaagattgtttgagcctgggaggtcgaggctgcagtg

SEQ ID NO: 443403 - DNA, 120 bp, Artificial Sequence
  ENSG00000154265_99 (sequence is synthesized)
ctgggcaacagagcaagaccttgtcttaaaaacaaaacaaaacaaaacaaaaggtttatggagataggaccaatatccagaatctagttcaagaagccagaataggctacagtggagttg

SEQ ID NO: 443404 - DNA, 120 bp, Artificial Sequence
  ENSG00000154265_100 (sequence is synthesized)
catgaaaagaatcaccaggaaaaagataatggaggagaacttagaaaaagtgaaataagacaagtaacattcaacatacagtacttagggctatagaggaattataggtgtggggaagag

SEQ ID NO: 443405 - DNA, 120 bp, Artificial Sequence
  ENSG00000154265_101 (sequence is synthesized)
aaaggaagtaagcgggaaaaataacatgttttggcagcttcaaatttaagtgggttgattacagagatattttaaaacattgttagccactttggtaggtattgccatttttttcagata

SEQ ID NO: 443406 - DNA, 120 bp, Artificial Sequence
  ENSG00000154265_102 (sequence is synthesized)
aaacctctgaagaatcgagatagctccaatagaggtccacaggcagaaaggatttcaaggatcttcaaagggtaaatgtaccctggaagagggatactggacctgtgataggtttattca

SEQ ID NO: 443407 - DNA, 120 bp, Artificial Sequence
  ENSG00000154265_103 (sequence is synthesized)
caggcatgagccactgcacctagccacttcattcctttctatggctgaataataattgtatgtatatgccacagtttgttcatttatctgtcggtaagtatttgggctgtttctaccttt

SEQ ID NO: 443408 - DNA, 120 bp, Artificial Sequence
  ENSG00000154265_104 (sequence is synthesized)
ctgctattctgaatagcactactgtgaacgtgtgtgaacatgtactcaattgagtccttatgttcatttcttttgggtgtatacctaggagtggaattgtgaggtcatatagtaaaactg

SEQ ID NO: 443409 - DNA, 120 bp, Artificial Sequence
  ENSG00000154265_105 (sequence is synthesized)
aattgctaaataggaaaactcagaaggctaggtttcagcaagacagtgatgtactctgtctctatgtcatcccatggaggggtgtgccagtgcgagggtatctgctaggcactgcggatt

SEQ ID NO: 443410 - DNA, 120 bp, Artificial Sequence
  ENSG00000154269_0 (sequence is synthesized)
atacagtttctctttgccagactagactaaagaaggagcactaatttattctgataaaacaggtctatgcagctaccaggacaatggaatctacgttgactttagcaacggaacaacctg

SEQ ID NO: 443411 - DNA, 120 bp, Artificial Sequence
  ENSG00000154269_1 (sequence is synthesized)
ttaagaagaacactcttaagaaatataaaatagcttgcattgttcttcttgctttgctggtgatcatgtcacttggattaggcctggggcttggactcaggaaactggaaaagcaaggca

SEQ ID NO: 443412 - DNA, 120 bp, Artificial Sequence
  ENSG00000154269_2 (sequence is synthesized)
gctgcaggaagaagtgctttgatgcatcatttagaggactggagaactgccggtgtgatgtggcatgtaaagaccgaggtgattgctgctgggattttgaagacacctgtgtggaatcaa

SEQ ID NO: 443413 - DNA, 120 bp, Artificial Sequence
  ENSG00000154269_3 (sequence is synthesized)
ctcgaatatggatgtgcaataaatttcgttgtggagagaccagattagaggccagcctttgctcttgttcagatgactgtttgcagaggaaagattgctgtgctgactataagagtgttt

SEQ ID NO: 443414 - DNA, 120 bp, Artificial Sequence
  ENSG00000154269_4 (sequence is synthesized)
gccaaggagaaacctcatggctggaagaaaactgtgacacagcccagcagtctcagtgcccagaagggtttgacctgccaccagttatcttgttttctatggatggatttagagctgaat

SEQ ID NO: 443415 - DNA, 120 bp, Artificial Sequence
  ENSG00000154269_5 (sequence is synthesized)
atttatacacatgggatactttaatgccaaatatcaataaactgaaaacatgtggaattcattcaaaatacatgagagctatgtatcctaccaaaaccttcccaaatcattacaccattg

SEQ ID NO: 443416 - DNA, 120 bp, Artificial Sequence
  ENSG00000154269_6 (sequence is synthesized)
tcacgggcttgtatccagagtcacatggcatcattgacaataatatgtatgatgtaaatctcaacaagaatttttcactttcttcaaaggaacaaaataatccagcctggtggcatgggc

SEQ ID NO: 443417 - DNA, 120 bp, Artificial Sequence
  ENSG00000154269_7 (sequence is synthesized)
aaccaatgtggctgacagcaatgtatcaaggtttaaaagccgctacctacttttggcccggatcagaagtggctataaatggctcctttccttccatatacatgccttacaacggaagtg

SEQ ID NO: 443418 - DNA, 120 bp, Artificial Sequence
  ENSG00000154269_8 (sequence is synthesized)
tcccatttgaagagaggatttctacactgttaaaatggctggacctgcccaaagctgaaagacccaggttttataccatgtattttgaagaacctgattcctctggacatgcaggtggac

SEQ ID NO: 443419 - DNA, 120 bp, Artificial Sequence
  ENSG00000154269_9 (sequence is synthesized)
cagtcagtgccagagtaattaaagccttacaggtagtagatcatgcttttgggatgttgatggaaggcctgaagcagcggaatttgcacaactgtgtcaatatcatccttctggctgacc

SEQ ID NO: 443420 - DNA, 120 bp, Artificial Sequence
  ENSG00000154269_10 (sequence is synthesized)
atggaatggaccagacttattgtaacaagatggaatacatgactgattattttcccagaataaacttcttctacatgtacgaagggcctgccccccgcatccgagctcataatatacctc

SEQ ID NO: 443421 - DNA, 120 bp, Artificial Sequence
  ENSG00000154269_11 (sequence is synthesized)
atgacttttttagttttaattctgaggaaattgttagaaacctcagttgccgaaaacctgatcagcatttcaagccctatttgactcctgatttgccaaagcgactgcactatgccaaga

SEQ ID NO: 443422 - DNA, 120 bp, Artificial Sequence
  ENSG00000154269_12 (sequence is synthesized)
acgtcagaatcgacaaagttcatctctttgtggatcaacagtggctggctgttaggagtaaatcaaatacaaattgtggaggaggcaaccatggttataacaatgagtttaggagcatgg

SEQ ID NO: 443423 - DNA, 120 bp, Artificial Sequence
  ENSG00000154269_13 (sequence is synthesized)
aagttgaaccatttgaaaatattgaagtctataacctaatgtgtgatcttctacgcattcaaccagcaccaaacaatggaacccatggtagtttaaaccatcttctgaaggtgccttttt

SEQ ID NO: 443424 - DNA, 120 bp, Artificial Sequence
  ENSG00000154269_14 (sequence is synthesized)
atgagccatcccatgcagaggaggtgtcaaagttttctgtttgtggctttgctaatccattgcccacagagtctcttgactgtttctgccctcacctacaaaatagtactcagctggaac

SEQ ID NO: 443425 - DNA, 120 bp, Artificial Sequence
  ENSG00000154269_15 (sequence is synthesized)
aagtgaatcagatgctaaatctcacccaagaagaaataacagcaacagtgaaagtaaatttgccatttgggaggcctagggtactgcagaagaacgtggaccactgtctcctttaccaca

SEQ ID NO: 443426 - DNA, 120 bp, Artificial Sequence
  ENSG00000154269_16 (sequence is synthesized)
gggaatatgtcagtggatttggaaaagctatgaggatgcccatgtggagttcatacacagtcccccagttgggagacacatcgcctctgcctcccactgtcccagactgtctgcgggctg

SEQ ID NO: 443427 - DNA, 120 bp, Artificial Sequence
  ENSG00000154269_17 (sequence is synthesized)
atgtcagggttcctccttctgagagccaaaaatgttccttctatttagcagacaagaatatcacccacggcttcctctatcctcctgccagcaatagaacatcagatagccaatatgatg

SEQ ID NO: 443428 - DNA, 120 bp, Artificial Sequence
  ENSG00000154269_18 (sequence is synthesized)
ctttaattactagcaatttggtacctatgtatgaagaattcagaaaaatgtgggactacttccacagtgttcttcttataaaacatgccacagaaagaaatggagtaaatgtggttagtg

SEQ ID NO: 443429 - DNA, 120 bp, Artificial Sequence
  ENSG00000154269_19 (sequence is synthesized)
gaccaatatttgattataattatgatggccattttgatgctccagatgaaattaccaaacatttagccaacactgatgttcccatcccaacacactactttgtggtgctgaccagttgta

SEQ ID NO: 443430 - DNA, 120 bp, Artificial Sequence
  ENSG00000154269_20 (sequence is synthesized)
aaaacaagagccacacaccggaaaactgccctgggtggctggatgtcctaccctttatcatccctcaccgacctaccaacgtggagagctgtcctgaaggtaaaccagaagctctttggg

SEQ ID NO: 443431 - DNA, 120 bp, Artificial Sequence
  ENSG00000154269_21 (sequence is synthesized)
ttgaagaaagatttacagctcacattgcccgggtccgtgatgtagaacttctcactgggcttgacttctatcaggataaagtgcagcctgtctctgaaattttgcaactaaagacatatt

SEQ ID NO: 443432 - DNA, 120 bp, Artificial Sequence
  ENSG00000154269_22 (sequence is synthesized)
taaagacatatttaccaacatttgaaaccactatttaacttaataatgtctacttaatatataatttactgtataaagtaattttggcaaaatataagtgatttttttctggagaattgt

SEQ ID NO: 443433 - DNA, 120 bp, Artificial Sequence
  ENSG00000154269_23 (sequence is synthesized)
tctatttttccttaagtcccctaaaagccataatttttattattcctttttctcttttttcaattctatgaatatgtattattttaaagttatatttttcacacagagatgatgctatat

SEQ ID NO: 443434 - DNA, 120 bp, Artificial Sequence
  ENSG00000154269_24 (sequence is synthesized)
tacaccttcccttttttgttggtttcttaaactctaatctcatgacagattataccttccttattacttgttttatcttactcagaatctttgaatatatttttctgcccagaattatct

SEQ ID NO: 443435 - DNA, 120 bp, Artificial Sequence
  ENSG00000154269_25 (sequence is synthesized)
aaacaaaagggagaacaaaagaagtatgtctcacttgggaactgaatcaactctaaatcagttttgtcacaaaactttttgtatttgactggcaatgctgattaaaattaaaaatgcaca

SEQ ID NO: 443436 - DNA, 120 bp, Artificial Sequence
  ENSG00000154269_26 (sequence is synthesized)
gagaaatgaaaagtttggaacccagaagctgcagcctgcggaaaatgctggagccgcagccgacaccaagttgatgtctgtgagcagctgaccttctggacctccatcagcggcctgcag

SEQ ID NO: 443437 - DNA, 120 bp, Artificial Sequence
  ENSG00000154269_27 (sequence is synthesized)
ccaggagctgaagccacagagacggtgtcttctcagctatgataacctcagtgcaaatattgcccaatcactgaagagctgtgatcttcctaaacagttaaaagtcaggcacagctatgt

SEQ ID NO: 443438 - DNA, 120 bp, Artificial Sequence
  ENSG00000154269_28 (sequence is synthesized)
ggtggcaattctattaatccagttgtttaagccaaaaatcttgggaatcaccattgattcctttcctttatgtcactcaagcagtctctcagtaaatgcttttggctgtaattaaaaatc

SEQ ID NO: 443439 - DNA, 120 bp, Artificial Sequence
  ENSG00000154269_29 (sequence is synthesized)
aacctgttaagaagaacactcttaagaaatataaaatagcttgcattacagggtctctctcctttgggatctcacctcaccacaacctctgtttcccaggctcaagtgatcctcctgcct

SEQ ID NO: 443440 - DNA, 120 bp, Artificial Sequence
  ENSG00000154274_0 (sequence is synthesized)
acacaaccttggacattagagcctgtccgtctgatctagagaaggaatgttgctggggaaggaaaactcagggcgaggtgagagaggacagaacctctaaccaggaagaggctgtccccg

SEQ ID NO: 443441 - DNA, 120 bp, Artificial Sequence
  ENSG00000154274_1 (sequence is synthesized)
ccaagctccggagaggcgcggaagcatgaccctcaggtggtaacagaaaacaatccagatggggtgcaggtgctgtaaaataatacaaagctatctctttgatccagttcaagtgccctc

SEQ ID NO: 443442 - DNA, 120 bp, Artificial Sequence
  ENSG00000154274_2 (sequence is synthesized)
tcctggctatgtcaatgaagtcaacagctgcaagctagatgaagacgacactgataaattaaaaggcaaatggagcagtgaagtcttggtgcagaaaaatgaccctcagaggcagggctc

SEQ ID NO: 443443 - DNA, 120 bp, Artificial Sequence
  ENSG00000154274_3 (sequence is synthesized)
aaagaagactgagagcagcagcaggacagctgatccatgggagccctgctggcctcaccaagggccgctcccacagggggacgctggaggggaacaccatgcctgcggtgtcaacggcat

SEQ ID NO: 443444 - DNA, 120 bp, Artificial Sequence
  ENSG00000154274_4 (sequence is synthesized)
cggccctgctgccactccacagcccactgggaattccagccccacccaggatgacaggggctcctgggccagtactgcaaatactgttcccccaactcaacccttcctggaaggaggggg

SEQ ID NO: 443445 - DNA, 120 bp, Artificial Sequence
  ENSG00000154274_5 (sequence is synthesized)
caccaggaaacaggactgtgtgctgctggcctcagaagggacccaagtcatgagaaatggagactccagagctccttctgaggcagaaagttttgccttggaagtacaagaccatgtctt

SEQ ID NO: 443446 - DNA, 120 bp, Artificial Sequence
  ENSG00000154274_6 (sequence is synthesized)
ccagataccagccccagattaccttcagcattggggcccagctggagacaacgttgatcataatgaaaaggactgtgttttcaagaaccatactgaggatgaatccctagagggaattca

SEQ ID NO: 443447 - DNA, 120 bp, Artificial Sequence
  ENSG00000154274_7 (sequence is synthesized)
gcccccagtgggggagcatggtttgaatacgcccttctctgtgaggagaagctgggattcattgaatgaggatgtggaaacagaagttctaagcatctgctttaatgagaagggtcctgt

SEQ ID NO: 443448 - DNA, 120 bp, Artificial Sequence
  ENSG00000154274_8 (sequence is synthesized)
acaggcaggaggatacccatggctccgatggagatggggatggggagattgtggacgaggatgcagcggtggcggaggcccttgcagctttagaagctgctactgcaggagaagatttgg

SEQ ID NO: 443449 - DNA, 120 bp, Artificial Sequence
  ENSG00000154274_9 (sequence is synthesized)
atgagactgattaggggaggggatttgcacagggaggtaagctggtgtcatgctgagcatgcagatgcatttgctccctggatgcatagcaggtgattctgccagcatgcaccagtgcag

SEQ ID NO: 443450 - DNA, 120 bp, Artificial Sequence
  ENSG00000154274_10 (sequence is synthesized)
ccttaccagttgtttacatccagcatctgttctgattgtcagcatctgtcccatgctgcttgtcacatatctggagtttcactctgtgtagatgagctgtcattcaggacactaggagaa

SEQ ID NO: 443451 - DNA, 120 bp, Artificial Sequence
  ENSG00000154274_11 (sequence is synthesized)
aaatctgagtgggtcattgtgcccatatccacagaaaatgcagaagttgaacagcttgcttgacaaccctcaaacatctttgagcacctggtacagatgtttatgagaatactctaagat

SEQ ID NO: 443452 - DNA, 120 bp, Artificial Sequence
  ENSG00000154274_12 (sequence is synthesized)
ctcaacccttgatcccaaaggcacacaatcacagagcattccttttgactgtaaactgtttaccttgcttttgagagccaaacattgtacccaacctggaaaaagtaactaccccaatta

SEQ ID NO: 443453 - DNA, 120 bp, Artificial Sequence
  ENSG00000154274_13 (sequence is synthesized)
aagtgcctcatgtgtccccagagcatggcttaacttcagggacaatcacccagggaactaataactaaccagttgttcaacagcgggttaagctcagcagttttcacagtagagcagaag

SEQ ID NO: 443454 - DNA, 120 bp, Artificial Sequence
  ENSG00000154274_14 (sequence is synthesized)
tccccaggaaacaaagggttagtcattagctgagatgttgattttaaaacaccttgaccttaacttttttacattattacttttaaatctcctttgggattggggaggctggccaaaata

SEQ ID NO: 443455 - DNA, 120 bp, Artificial Sequence
  ENSG00000154274_15 (sequence is synthesized)
agtcttaaaactgcttatgtcatatttggattttaagttcatgacattcggaacagcaaagccatatatgcaatgtttttatgccattaaatgtctgattccaattaaaatataacaacg

SEQ ID NO: 443456 - DNA, 120 bp, Artificial Sequence
  ENSG00000154274_16 (sequence is synthesized)
cgcggagccgctagcgtctcccggcgcggctgcccgaggccggcgaagccatgggcgccgggaccccgccgccgccgccgccgccgccgtctggccccaggaagagaagttaaacttcta

SEQ ID NO: 443457 - DNA, 120 bp, Artificial Sequence
  ENSG00000154274_17 (sequence is synthesized)
tgtctttctagaagtcttaactcaaaggtggttctaattttctcagaatatcagtgaccctggatgttactttcaatgtaaagaactaatctagatggccgggcgtggtggctcatgcct

SEQ ID NO: 443458 - DNA, 120 bp, Artificial Sequence
  ENSG00000154274_18 (sequence is synthesized)
catctcaaaaaaaaaaaaaaaaaaaagagctaagctaggcacagtggctcatgtctgtaatctgagcactttggaaggctgaggtgagaggattgccagggccaggaattcgagaccaac

SEQ ID NO: 443459 - DNA, 120 bp, Artificial Sequence
  ENSG00000154274_19 (sequence is synthesized)
ttcgagaccaacctgggcaatttagcgagaccccatctctatgaaaaaaaaaaaaaaaaaaagagctagactacaaaattatactcaaggaagggaccgagctggtttgcagagccatag

SEQ ID NO: 443460 - DNA, 120 bp, Artificial Sequence
  ENSG00000154274_20 (sequence is synthesized)
ctttggctttctctctgtcaaacttgatgccataactaaatgtcctgatcttacctcaaagatgaacaagccctctctggatttcagccttctaattcactgaaacaaggacaaccattc

SEQ ID NO: 443461 - DNA, 120 bp, Artificial Sequence
  ENSG00000154274_21 (sequence is synthesized)
taacgtaactcaatggagaatttaaaggcattaaggatgctcaaaactatctagaaaaaaataaacatggaagatgctttagtttggtgttttgtaacacagaattgaaatctgactgaa

SEQ ID NO: 443462 - DNA, 120 bp, Artificial Sequence
  ENSG00000154274_22 (sequence is synthesized)
cttcatttgatttccagctttgccatgtgaccttggacaagttatgtatccctttacccatctgtaaagtgagaagaataattgtatgtgcttgtaaaggttaaatgagatgatgtaagt

SEQ ID NO: 443463 - DNA, 120 bp, Artificial Sequence
  ENSG00000154274_23 (sequence is synthesized)
gtttagcacagtgcttggcacactaggcactcaaaaatgatgttttactagttgaaaacaattcctttaacaaacatttttacatccccacaactgaaaactctaaaactgggaagtatg

SEQ ID NO: 443464 - DNA, 120 bp, Artificial Sequence
  ENSG00000154274_24 (sequence is synthesized)
tataatgtcattatttgactttggcaattatttagtataaaacatgatttctgagccttccagcacctttaaggacggcacccttacaaatgcttaatgagcctatgggtttgtttggta

SEQ ID NO: 443465 - DNA, 120 bp, Artificial Sequence
  ENSG00000154274_25 (sequence is synthesized)
ctgtaatgacaagccatcgcaagtgacctctatatacagggtcactcagagcccttaaaaagataaagtcttggcattgttaattgcattagaggtatgtctccttttgtatttagtaca

SEQ ID NO: 443466 - DNA, 120 bp, Artificial Sequence
  ENSG00000154274_26 (sequence is synthesized)
ccaaatacttaatatttcagaatgcttattccttcaatgatttcctaagtgtatcagttgagattatgttcagttgtatgggacgagtgttttatacaaatagaggcttatttacctctt

SEQ ID NO: 443467 - DNA, 120 bp, Artificial Sequence
  ENSG00000154274_27 (sequence is synthesized)
atgtaaaagaagtctggagttagtgatccagggtggtagagaatgtatcactggcccgtgtatcaatgacccacatatcaatgacccacgtatcaatgacccgcatatgaatgacccatg

SEQ ID NO: 443468 - DNA, 120 bp, Artificial Sequence
  ENSG00000154274_28 (sequence is synthesized)
ctgcttcaatcattttggtttccttctcaagatcactttgtagtccataatggctgctgtggcttcagtcattacatttgcattccatgttggaaaaagaataaaggaataaaaacccca

SEQ ID NO: 443469 - DNA, 120 bp, Artificial Sequence
  ENSG00000154274_29 (sequence is synthesized)
caatatccacaacaggtggtaacagaaaacaatccagatggggtgcaggtgctgtaaaataatacaaagacagagtcttgctgttgtcaccccggctgaagtgcagtggcatgatctcgg

SEQ ID NO: 443470 - DNA, 120 bp, Artificial Sequence
  ENSG00000154274_30 (sequence is synthesized)
cattgatctgaactagcaatcacagctgctctggagtctgcaagtctatgaccttcatctacctggaagaaaactgaatggctcacacacctggacctgatccagacagagccttaaaat

SEQ ID NO: 443471 - DNA, 120 bp, Artificial Sequence
  ENSG00000154274_31 (sequence is synthesized)
ccatcagctgctcatcagatgatcccatcggatgccaaggaggccatccaaaggctggaatgatcagttctgtgagctattgagctatgtgaagaaacggcggttgatttgctttcttgc

SEQ ID NO: 443472 - DNA, 120 bp, Artificial Sequence
  ENSG00000154274_32 (sequence is synthesized)
caagaaaagcaaagctccctcacactccacggccactgagcatgtaagctcccaagtataaatttcttcccatccaagccctctcactacctagccctgagatatggggaacattaatcc

SEQ ID NO: 443473 - DNA, 120 bp, Artificial Sequence
  ENSG00000154277_0 (sequence is synthesized)
agctgtttttcgtcttccctaggctatttctgccgggcgctccgcgaagatgcagctcaagccgatggagatcaaccccgagatgctgaacaaagtgctgtcccggctgggggtcgccgg

SEQ ID NO: 443474 - DNA, 120 bp, Artificial Sequence
  ENSG00000154277_1 (sequence is synthesized)
ccagtggcgcttcgtggacgtgctggggctggaagaggagtctctgggctcggtgccagcgcctgcctgcgcgctgctgctgctgtttcccctcacggcccagcatgagaacttcaggaa

SEQ ID NO: 443475 - DNA, 120 bp, Artificial Sequence
  ENSG00000154277_2 (sequence is synthesized)
aaagcagattgaagagctgaagggacaagaagttagtcctaaagtgtacttcatgaagcagaccattgggaattcctgtggcacaatcggacttattcacgcagtggccaataatcaaga

SEQ ID NO: 443476 - DNA, 120 bp, Artificial Sequence
  ENSG00000154277_3 (sequence is synthesized)
caaactgggatttgaggatggatcagttctgaaacagtttctttctgaaacagagaaaatgtcccctgaagacagagcaaaatgctttgaaaagaatgaggccatacaggcagcccatga

SEQ ID NO: 443477 - DNA, 120 bp, Artificial Sequence
  ENSG00000154277_4 (sequence is synthesized)
gtcgggtagatgacaaggtgaatttccattttattctgtttaacaacgtggatggccacctctatgaacttgatggacgaatgccttttccggtgaaccatggcgccagttcagaggaca

SEQ ID NO: 443478 - DNA, 120 bp, Artificial Sequence
  ENSG00000154277_5 (sequence is synthesized)
ccctgctgaaggacgctgccaaggtctgcagagaattcaccgagcgtgagcaaggagaagtccgcttctctgccgtggctctctgcaaggcagcctaatgctctgtgggagggactttgc

SEQ ID NO: 443479 - DNA, 120 bp, Artificial Sequence
  ENSG00000154277_6 (sequence is synthesized)
tgatttcccctcttcccttcaacatgaaaatatatacccccccatgcagtctaaaatgcttcagtacttgtgaaacacagctgttcttctgttctgcagacacgccttcccctcagccac

SEQ ID NO: 443480 - DNA, 120 bp, Artificial Sequence
  ENSG00000154277_7 (sequence is synthesized)
acccaggcacttaagcacaagcagagtgcacagctgtccactgggccattgtggtgtgagcttcagatggtgaagcattctccccagtgtatgtcttgtatccgatatctaacgctttaa

SEQ ID NO: 443481 - DNA, 120 bp, Artificial Sequence
  ENSG00000154277_8 (sequence is synthesized)
atggctactttggtttctgtctgtaagttaagaccttggatgtggtttaattgtttgtcctcaaaaggaataaaacttttctgctgataagatagccacagctgattctcattttctttt

SEQ ID NO: 443482 - DNA, 120 bp, Artificial Sequence
  ENSG00000154277_9 (sequence is synthesized)
gcagcctgggcggctccgctagctgtttttcgtcttccctaggctatttctgccgggcgctccgcgaagatgcagctcaagccgatggagatcaaccccgagatgctgaacaaagtgagt

SEQ ID NO: 443483 - DNA, 120 bp, Artificial Sequence
  ENSG00000154277_10 (sequence is synthesized)
aagtgagtggcgtctcgcgccgtctctggccccctcccccgcgagcgccgaggcgggggcgcccaccggttccggctgctggcagggaccaagccgcccgctgcgagcaccggagacggc

SEQ ID NO: 443484 - DNA, 120 bp, Artificial Sequence
  ENSG00000154277_11 (sequence is synthesized)
ggcgtgggctgggcgcctttcctgggcccctgcatttagcgggtgactctacgaaaccggtcacggggagacggagggggctgcgccccgtggcgagcgagcgccaggcggagctcccga

SEQ ID NO: 443485 - DNA, 120 bp, Artificial Sequence
  ENSG00000154277_12 (sequence is synthesized)
gggcgtggcgcgggcagcacagactcggctgcacgggcttcgcgggcgccacgtgtgggccgcgctttgtgctgtgtcattgcgccggcccgggtgggggtggcagggcgggactggggc

SEQ ID NO: 443486 - DNA, 80 bp, Artificial Sequence
  ENSG00000154277_13 (sequence is synthesized)
cctggccccgccccctggcaggtgcccgcgacccgcgtgtccccgtgcgcctggccgccttgtctcctctccgcaggtgc

SEQ ID NO: 443487 - DNA, 120 bp, Artificial Sequence
  ENSG00000154277_14 (sequence is synthesized)
aaagtgctaacactcttccagtatagccagcatcagttgcctgggttaatagcagtctttagggctgcaagatcctcttagtaactctatctaccttattttattgcaagtggttttaaa

SEQ ID NO: 443488 - DNA, 120 bp, Artificial Sequence
  ENSG00000154277_15 (sequence is synthesized)
cagggcttcagagacaccctgagtaatctgtttcatgtgttgtctttagtccacagttagaattagcctgaaagctgttgctttgcttcctggtgggattaaggtgaccattgtcctccc

SEQ ID NO: 443489 - DNA, 120 bp, Artificial Sequence
  ENSG00000154277_16 (sequence is synthesized)
gttttattctaggtagtcacttaaaaacgaacctcggtactggtctgacttaacatggaggaggaattgtctaagagactcgagctttagagtaattgggatggtgaaaggatgggtttc

SEQ ID NO: 443490 - DNA, 120 bp, Artificial Sequence
  ENSG00000154277_17 (sequence is synthesized)
gcctgggcggctccgctagctgtttttcgtcttccctaggctatttctgccgggcgctccgcgaagatgcagctcaagccgatggagatcaaccccgaggtgagcgccaggtgctgtccc

SEQ ID NO: 443491 - DNA, 120 bp, Artificial Sequence
  ENSG00000154305_0 (sequence is synthesized)
gaggtgaccacaacatggctgcggcgcctgggctgctcgtctggctgctcgtgctccggctgccctggcgggtgccgggccagctggaccccagcactggccggcggttctcggagcaca

SEQ ID NO: 443492 - DNA, 120 bp, Artificial Sequence
  ENSG00000154305_1 (sequence is synthesized)
aactctgcgcggacgacgaatgcagcatgttaatgtaccgcggtgaggctcttgaagatttcacaggcccggattgtcgttttgtgaattttaaaaaaggtgatcctgtatatgtttact

SEQ ID NO: 443493 - DNA, 120 bp, Artificial Sequence
  ENSG00000154305_2 (sequence is synthesized)
ataaactggcaagaggatggcctgaagtttgggctggaagtgttggacgcacttttggatattttccaaaagatttaatccaggtagttcatgaatataccaaagaagagctacaagttc

SEQ ID NO: 443494 - DNA, 120 bp, Artificial Sequence
  ENSG00000154305_3 (sequence is synthesized)
caacagatgagacggattttgtttgttttgatggaggaagagatgattttcataattataatgtagaagaacttttagggtttttggaactgtacaattctgcagctacagattctgaga

SEQ ID NO: 443495 - DNA, 120 bp, Artificial Sequence
  ENSG00000154305_4 (sequence is synthesized)
aagctgtagaaaaaactttacaggatatggaaaaaaaccctgaattatctaaggaaagggaacctgaacctgaaccagtagaagccaactcagaggaaagtgatagtgtattctcagaaa

SEQ ID NO: 443496 - DNA, 120 bp, Artificial Sequence
  ENSG00000154305_5 (sequence is synthesized)
acactgaggatcttcaggaacagtttacaactcagaagcaccactcccatgcaaacagccaagcaaatcatgctcagggagagcaggcttcatttgaatcttttgaagaaatgctgcaag

SEQ ID NO: 443497 - DNA, 120 bp, Artificial Sequence
  ENSG00000154305_6 (sequence is synthesized)
ataaactaaaagtgccagaaagtgaaaacaacaaaaccagcaatagttctcaggtctcaaatgaacaggataagattgatgcctataaacttttgaaaaaagaaatgactctagacttga

SEQ ID NO: 443498 - DNA, 120 bp, Artificial Sequence
  ENSG00000154305_7 (sequence is synthesized)
aaaccaaatttggctcaacagctgatgcacttgtatctgatgatgagacaaccagactcgttacttcattagaagatgattttgatgaggaattggatactgagtattatgcagttggaa

SEQ ID NO: 443499 - DNA, 120 bp, Artificial Sequence
  ENSG00000154305_8 (sequence is synthesized)
aggaagatgaggagaaccaagaagactttgatgagttgccattacttacctttacagatggggaagatatgaaaactccagcaaagtctggcgttgagaaatatccaacagataaagagc

SEQ ID NO: 443500 - DNA, 120 bp, Artificial Sequence
  ENSG00000154305_9 (sequence is synthesized)
agaattcaaatgaagaggacaaggttcagctaactgtgccccctggcatcaaaaatgatgataaaaatatactaacaacctggggggacactatcttctctattgtcacaggaggtgaag

SEQ ID NO: 443501 - DNA, 120 bp, Artificial Sequence
  ENSG00000154305_10 (sequence is synthesized)
aaacaagagatacgatggatttagagagctctagttcagaggaagaaaaagaagatgatgatgatgcattagtcccagatagcaaacaggggaaaccacagtcagcaacagattatagtg

SEQ ID NO: 443502 - DNA, 120 bp, Artificial Sequence
  ENSG00000154305_11 (sequence is synthesized)
accctgacaatgtagatgatggtctttttattgtagacattcctaaaacaaataatgacaaagaagtaaacgcagaacatcacattaaaggaaaagggaggggagttcaggaatccaaga

SEQ ID NO: 443503 - DNA, 120 bp, Artificial Sequence
  ENSG00000154305_12 (sequence is synthesized)
ggggcctggtacaagataagacagaattagaggatgaaaatcaagaaggcatgactgtgcacagttctgttcacagcaataacctcaactctatgccagctgctgaaaagggtaaagaca

SEQ ID NO: 443504 - DNA, 120 bp, Artificial Sequence
  ENSG00000154305_13 (sequence is synthesized)
cattaaaatcagcttatgatgatacagaaaatgacctaaaaggagcagctattcatatctcaaaaggaatgctccacgaagaaaagcctggagagcagattttggaaggtggctcagaga

SEQ ID NO: 443505 - DNA, 120 bp, Artificial Sequence
  ENSG00000154305_14 (sequence is synthesized)
gtgaatctgcacagaaagctgcagggaatcaaatgaatgacagaaagattcaacaggaatccctgggtagtgcaccactcatgggagatgaccaccctaacgcatccagagacagtgtgg

SEQ ID NO: 443506 - DNA, 120 bp, Artificial Sequence
  ENSG00000154305_15 (sequence is synthesized)
agggagacgctttggtaaatggggccaaactgcacacgctttcagtggagcatcaacgtgaggaattgaaagaggaattagttcttaaaactcaaaaccaacctagattctcctctccag

SEQ ID NO: 443507 - DNA, 120 bp, Artificial Sequence
  ENSG00000154305_16 (sequence is synthesized)
atgagattgatttgcccagagaactggaagacgaggttcccattctgggaagaaatcttccctggcaacaagaaagagatgtggctgccacagccagtaagcaaatgagtgagaagataa

SEQ ID NO: 443508 - DNA, 120 bp, Artificial Sequence
  ENSG00000154305_17 (sequence is synthesized)
ggctctctgagggagaagccaaagaggactccttggatgaagagttttttcatcacaaggcaatgcagggcacagaggtaggacagacagaccaaactgacagcacaggaggaccagctt

SEQ ID NO: 443509 - DNA, 120 bp, Artificial Sequence
  ENSG00000154305_18 (sequence is synthesized)
tcctttctaaagtagaagaggatgattatccctctgaagaactactagaggatgaaaacgctataaatgcaaaacggtctaaagaaaaaaaccctgggaatcagggcaggcagtttgatg

SEQ ID NO: 443510 - DNA, 120 bp, Artificial Sequence
  ENSG00000154305_19 (sequence is synthesized)
ttaatctgcaagtccctgacagagcagttttagggaccattcatccagatccagaaattgaagaaagcaagcaagaaactagtatgattttggatagcgaaaaaacaagtgagactgctg

SEQ ID NO: 443511 - DNA, 120 bp, Artificial Sequence
  ENSG00000154305_20 (sequence is synthesized)
ccaaaggggtcaacacaggaggcagggaaccaaatacaatggtggaaaaagaacgccctctggcagataagaaagcacagagaccatttgaacgaagtgacttttctgacagcataaaaa

SEQ ID NO: 443512 - DNA, 120 bp, Artificial Sequence
  ENSG00000154305_21 (sequence is synthesized)
ttcagactccagaattaggtgaagtgtttcagaataaagattctgattatctgaagaacgacaaccctgaggaacatctgaagacctcagggcttgcaggggagcctgagggagaactct

SEQ ID NO: 443513 - DNA, 120 bp, Artificial Sequence
  ENSG00000154305_22 (sequence is synthesized)
caaaagaggaccatgagaacacagagaagtacatgggcacagaaagccaggggtctgctgctgcagaacctgaagatgactcgttccactggactccacatacaagtgtagagccagggc

SEQ ID NO: 443514 - DNA, 120 bp, Artificial Sequence
  ENSG00000154305_23 (sequence is synthesized)
atagtgacaagagggaggacttacttatcataagcagcttctttaaagaacaacagtctttgcagcggttccagaagtactttaatgtccatgagctggaagccttgctacaagaaatgt

SEQ ID NO: 443515 - DNA, 120 bp, Artificial Sequence
  ENSG00000154305_24 (sequence is synthesized)
catcaaaactgaagtcagcgcagcaggagagcctgccctataatatggaaaaagtcctagataaggtcttccgtgcttctgagtcacaaattctgagcatagcagaaaaaatgcttgata

SEQ ID NO: 443516 - DNA, 120 bp, Artificial Sequence
  ENSG00000154305_25 (sequence is synthesized)
ctcgtgtggctgaaaatagagatctgggaatgaacgaaaataacatatttgaagaggctgcagtgcttgatgacattcaagacctcatctattttgtcaggtacaagcactccacagcag

SEQ ID NO: 443517 - DNA, 120 bp, Artificial Sequence
  ENSG00000154305_26 (sequence is synthesized)
aggagacagccacactggtgatggcaccacctctagaggaaggcttgggtggagcaatggaagagatgcaaccactgcatgaagataatttctcacgagagaagacagcagaacttaatg

SEQ ID NO: 443518 - DNA, 120 bp, Artificial Sequence
  ENSG00000154305_27 (sequence is synthesized)
tgcaggttcctgaagaacccacccacttggaccaacgtgtgattggggacactcatgcctcagaagtgtcacagaagccaaatactgagaaagacctggacccagggccagttacaacag

SEQ ID NO: 443519 - DNA, 120 bp, Artificial Sequence
  ENSG00000154305_28 (sequence is synthesized)
aagacactcctatggatgctattgatgcaaacaagcaaccagagacagccgccgaagagccggcaagtgtcacacctttggaaaacgcaatccttctaatatattcattcatgttttatt

SEQ ID NO: 443520 - DNA, 120 bp, Artificial Sequence
  ENSG00000154305_29 (sequence is synthesized)
taactaagtcgctagttgctacattgcctgatgatgttcagcctgggcctgatttttatggactgccatggaaacctgtatttatcactgccttcttgggaattgcttcgtttgccattt

SEQ ID NO: 443521 - DNA, 120 bp, Artificial Sequence
  ENSG00000154305_30 (sequence is synthesized)
tcttatggagaactgtccttgttgtgaaggatagagtatatcaagtcacggaacagcaaatttctgagaagttgaagactatcatgaaagaaaatacagaacttgtacaaaaattgtcaa

SEQ ID NO: 443522 - DNA, 120 bp, Artificial Sequence
  ENSG00000154305_31 (sequence is synthesized)
attatgaacagaagatcaaggaatcaaagaaacatgttcaggaaaccaggaaacaaaatatgattctctctgatgaagcaattaaatataaggataaaatcaagacacttgaaaaaaatc

SEQ ID NO: 443523 - DNA, 120 bp, Artificial Sequence
  ENSG00000154305_32 (sequence is synthesized)
aggaaattctggatgacacagctaaaaatcttcgtgttatgctagaatctgagagagaacagaatgtcaagaatcaggacttgatatcagaaaacaagaaatctatagagaagttaaagg

SEQ ID NO: 443524 - DNA, 120 bp, Artificial Sequence
  ENSG00000154305_33 (sequence is synthesized)
gaatgccatcgggttcaagaagaaaatgctaggcttaagaagaaaaaagagcagttgcagcaggaaatcgaagactggagtaaattacatgctgagctcagtgagcaaatcaaatcattt

SEQ ID NO: 443525 - DNA, 120 bp, Artificial Sequence
  ENSG00000154305_34 (sequence is synthesized)
gagaagtctcagaaagatttggaagtagctcttactcacaaggatgataatattaatgctttgactaactgcattacacagttgaatctgttagagtgtgaatctgaatctgagggtcaa

SEQ ID NO: 443526 - DNA, 120 bp, Artificial Sequence
  ENSG00000154305_35 (sequence is synthesized)
aataaaggtggaaatgattcagatgaattagcaaatggagaagtgggaggtgaccggaatgagaagatgaaaaatcaaattaagcagatgatggatgtctctcggacacagactgcaata

SEQ ID NO: 443527 - DNA, 120 bp, Artificial Sequence
  ENSG00000154305_36 (sequence is synthesized)
tcggtagttgaagaggatctaaagcttttacagcttaagctaagagcctccgtgtccactaaatgtaacctggaagaccaggtaaagaaattggaagatgaccgcaactcactacaagct

SEQ ID NO: 443528 - DNA, 120 bp, Artificial Sequence
  ENSG00000154305_37 (sequence is synthesized)
gccaaagctggactggaagatgaatgcaaaaccttgaggcagaaagtggagattctgaatgagctctatcagcagaaggagatggctttgcaaaagaaactgagtcaagaagagtatgaa

SEQ ID NO: 443529 - DNA, 120 bp, Artificial Sequence
  ENSG00000154305_38 (sequence is synthesized)
cggcaagaaagagagcacaggctgtcagctgcagatgaaaaggcagtttcggctgcagaggaagtaaaaacttacaagcggagaattgaagaaatggaggatgaattacagaagacagag

SEQ ID NO: 443530 - DNA, 120 bp, Artificial Sequence
  ENSG00000154305_39 (sequence is synthesized)
cggtcatttaaaaaccagatcgctacccatgagaagaaagctcatgaaaactggctcaaagctcgtgctgcagaaagagctatagctgaagagaaaagggaagctgccaatttgagacac

SEQ ID NO: 443531 - DNA, 120 bp, Artificial Sequence
  ENSG00000154305_40 (sequence is synthesized)
aaattattagaattaacacaaaagatggcaatgctgcaagaagaacctgtgattgtaaaaccaatgccaggaaaaccaaatacacaaaaccctccacggagaggtcctctgagccagaat

SEQ ID NO: 443532 - DNA, 120 bp, Artificial Sequence
  ENSG00000154305_41 (sequence is synthesized)
ggctcttttggcccatcccctgtgagtggtggagaatgctcccctccattgacagtggagccacccgtgagacctctctctgctactctcaatcgaagagatatgcctagaagtgaattt

SEQ ID NO: 443533 - DNA, 120 bp, Artificial Sequence
  ENSG00000154305_42 (sequence is synthesized)
ggatcagtggacgggcctctacctcatcctcgatggtcagctgaggcatctgggaaaccctctccttctgatccaggatctggtacagctaccatgatgaacagcagctcaagaggctct

SEQ ID NO: 443534 - DNA, 120 bp, Artificial Sequence
  ENSG00000154305_43 (sequence is synthesized)
tcccctaccagggtactcgatgaaggcaaggttaatatggctccaaaagggccccctcctttcccaggagtccctctcatgagcacccccatgggaggccctgtaccaccacccattcga

SEQ ID NO: 443535 - DNA, 120 bp, Artificial Sequence
  ENSG00000154305_44 (sequence is synthesized)
tatggaccaccacctcagctctgcggaccttttgggcctcggccacttcctccaccctttggccctggtatgcgtccaccactaggcttaagagaatttgcaccaggcgttccaccagga

SEQ ID NO: 443536 - DNA, 120 bp, Artificial Sequence
  ENSG00000154305_45 (sequence is synthesized)
agacgggacctgcctctccaccctcggggatttttacctggacacgcaccatttagacctttaggttcacttggcccaagagagtactttattcctggtacccgattaccacccccaacc

SEQ ID NO: 443537 - DNA, 120 bp, Artificial Sequence
  ENSG00000154305_46 (sequence is synthesized)
catggtccccaggaatacccaccaccacctgctgtaagagacttactgccgtcaggctctagagatgagcctccacctgcctctcagagcactagccaggactgttcacaggctttaaaa

SEQ ID NO: 443538 - DNA, 120 bp, Artificial Sequence
  ENSG00000154305_47 (sequence is synthesized)
cagagcccataaaactatgacctctgaggtttcattggaaagaaagtgtactgtgcattatccattacagtaaaggatttcattggcttcaaaatccaaaagtttattttaaaaggtttg

SEQ ID NO: 443539 - DNA, 120 bp, Artificial Sequence
  ENSG00000154305_48 (sequence is synthesized)
ttgttagaactaagctgccttggcagtgtgcatttttgagccaaacaattcaaaaatgtcatttcttccctaaataaaaatcaccttttaagctagagcgtccttacaactttgaaatgt

SEQ ID NO: 443540 - DNA, 120 bp, Artificial Sequence
  ENSG00000154305_49 (sequence is synthesized)
gcaataaagaatacctgtgttttagctaatgtagcatatgtaattgcaaaatgatttagaatgtcatgaaaaatatgaacatttcctgtggaaatgctttaagaacatgtatttccatta

SEQ ID NO: 443541 - DNA, 120 bp, Artificial Sequence
  ENSG00000154305_50 (sequence is synthesized)
tcctatttttagtgtacaccagctgaatacggagcaatggtgtttataagcgtttttttaaactatctggtcacaaagactgttacgctaaaaatgtttactaaaagatcactaaactat

SEQ ID NO: 443542 - DNA, 120 bp, Artificial Sequence
  ENSG00000154305_51 (sequence is synthesized)
ctcccctcttgctgaagttctttgtagtaatagctcataaaaatttgtttattaatatttcccaagtgtctgttgactcattggactgttatgaggcttgtgccatttggggaacatgta

SEQ ID NO: 443543 - DNA, 120 bp, Artificial Sequence
  ENSG00000154305_52 (sequence is synthesized)
aactcaggctcccagaactgaagatggtggctggtggcacacttccggctgctcctccgtcacctgtgaactctacaagtgacgtctttttatttcaaagaagtttatttcccacttgta

SEQ ID NO: 443544 - DNA, 120 bp, Artificial Sequence
  ENSG00000154305_53 (sequence is synthesized)
tagcattcacatgctttctttacgatcctcattgtctatttgagaatggttttctgagagtgagtttacattagtagcaagagttgtttgacctgatgttccattgtttttaccattcct

SEQ ID NO: 443545 - DNA, 120 bp, Artificial Sequence
  ENSG00000154305_54 (sequence is synthesized)
gtagaaaaagggtgcacaacagaaaaatgaaaatgatgtgtcatggccataaaagtatagaaatctttaaaaattttaaaatgtacagtcccttatctatctttcccattccttgccact

SEQ ID NO: 443546 - DNA, 120 bp, Artificial Sequence
  ENSG00000154305_55 (sequence is synthesized)
gatttttgaggaatataataaaaagattggaagagtataatgccatgagaaagaatgatttaggactgtgagggttataacatgccctaggtcagcaaccaagggttgaaatcagttctg

SEQ ID NO: 443547 - DNA, 120 bp, Artificial Sequence
  ENSG00000154305_56 (sequence is synthesized)
ttttagggggaaatgggggcgacagatattattccaaaattaatattaattaatatttaaacgttggtgtttttatttaaaaatcagtaactaaccatctggaattgcaccatacttaaa

SEQ ID NO: 443548 - DNA, 120 bp, Artificial Sequence
  ENSG00000154305_57 (sequence is synthesized)
gtcttatccattactacactgtctttaaaacaatgtttctttaaatactctacaacgtttctaagaacgaacttcagacattttaattacagtaataatagcactccttttaaggagttt

SEQ ID NO: 443549 - DNA, 120 bp, Artificial Sequence
  ENSG00000154305_58 (sequence is synthesized)
cagatccacactaaaactaaaatcataaaaggctgatacttttgtttgctgctaggctatattcttccattctttgaagtcctatgatgtaatatttttgaaacctagtgtatgtcttgt

SEQ ID NO: 443550 - DNA, 120 bp, Artificial Sequence
  ENSG00000154305_59 (sequence is synthesized)
cactgttgtgatatttaatcgattaagaataccttgtaaaaaggagcaaaagcttcaatgtgaaacaattttctctctttatactaaacaactgaagatagatagtttagaaagataagg

SEQ ID NO: 443551 - DNA, 120 bp, Artificial Sequence
  ENSG00000154305_60 (sequence is synthesized)
acctttgaaagaagacaactctgtcaaagttcataaggaatataaaaattcttcaggaaaagagaattcaatctatatgtcctcccgtttaatatcaagaatagaagaaattaagaggaa

SEQ ID NO: 443552 - DNA, 120 bp, Artificial Sequence
  ENSG00000154305_61 (sequence is synthesized)
aactccacagaagagcataggccacttttagccatgtaaaaataagattaagtcacaaatacaacttttgaatttacctgtcaatatctctttaggacacaaaacaatgctgaagttaat

SEQ ID NO: 443553 - DNA, 120 bp, Artificial Sequence
  ENSG00000154305_62 (sequence is synthesized)
ataatttctaattttaaatgtcatttaagtgtagattatgccatctaggaaggtaagtaggaaaggtaaattaaatctatttttaaaattcaaaatattagagtatttttcccctctaaa

SEQ ID NO: 443554 - DNA, 120 bp, Artificial Sequence
  ENSG00000154305_63 (sequence is synthesized)
gccttttttggtgattattctgtatctgacataattgagaaactggtaagctgtaaagattccagtgtagcttctctgagaagttgtgagccagtccataactgcttcctcacatccatc

SEQ ID NO: 443555 - DNA, 120 bp, Artificial Sequence
  ENSG00000154305_64 (sequence is synthesized)
tgattgcaccatttctgcagcaaaccccaaagcagggtgccaatatgcagatggcatagggagtatcatccctcagccaaatcacttttccatctctaaagtttcatctattttggaagt

SEQ ID NO: 443556 - DNA, 120 bp, Artificial Sequence
  ENSG00000154305_65 (sequence is synthesized)
catctccaactaattgtgtctggatttagttgctaaaattgtcttatttatgaagcagcaatattcagcctgaaagcatttctgccatagttgttgtagttatatcgccaatggctgatt

SEQ ID NO: 443557 - DNA, 120 bp, Artificial Sequence
  ENSG00000154305_66 (sequence is synthesized)
tttttcattggaaagtaaatttaagtaattcgtgggatgtggtatattctgtgtcaacttcaagataatcactcattttctcgttatattcaggtctgaattaaagttaagttaatcaca

SEQ ID NO: 443558 - DNA, 120 bp, Artificial Sequence
  ENSG00000154305_67 (sequence is synthesized)
tccggaggaggaagctctgaaaaacagggggcccagtgccattccgcagggaattgtcgcttgcgttcagctgttctacacaatggactcagtacctgccactgtgccttctatcgccgc

SEQ ID NO: 443559 - DNA, 120 bp, Artificial Sequence
  ENSG00000154305_68 (sequence is synthesized)
tgatgccattttctgagaagaaagatgcttcatgcagggaggaatattgagctataacattttactgtatttcccatcttggaaataaattaaactctcattgaaataaaggttcttatt

SEQ ID NO: 443560 - DNA, 120 bp, Artificial Sequence
  ENSG00000154305_69 (sequence is synthesized)
ctcattgaaataaaggttcttattatatttttcttaaattctaaccgtatttttacatccttattcttgttagcagattgctttttgtattaatctgttctcacactgctataaagaaat

SEQ ID NO: 443561 - DNA, 73 bp, Artificial Sequence
  ENSG00000154305_70 (sequence is synthesized)
aggctgaggcaggaggattgcttgagcttgggaggcggactttgcagtgagctgagattgcaccactatacct

SEQ ID NO: 443562 - DNA, 120 bp, Artificial Sequence
  ENSG00000154305_71 (sequence is synthesized)
cagcagtgtccttaaacagtgtccacataagtgtattctcttgtaacttgtatagctgttatggctggttaatatggctccaaaagggccccctcctttcccaggagtccctctcatgag

SEQ ID NO: 443563 - DNA, 120 bp, Artificial Sequence
  ENSG00000154305_72 (sequence is synthesized)
aactctctctttgcctcatctcctatttgtgtgttctatctgtactatctcatttattttttaaaaaagcaaactgttctccaagagcctgaagtcccctcagttcccagcattacatct

SEQ ID NO: 443564 - DNA, 120 bp, Artificial Sequence
  ENSG00000154305_73 (sequence is synthesized)
acagaaattaatgcttttaattcaagctaaccttgtaaaataatttagtataatttttgtgttggtaaattcttaagtgaataagacaacatgtataatctcagtgggaaaacttcagtt

SEQ ID NO: 443565 - DNA, 120 bp, Artificial Sequence
  ENSG00000154305_74 (sequence is synthesized)
tatatgtctcatatcaaagtctaaattttaagaattaggtgggtctgtatttcaactcacaaaggatgaaaagaaagaattagataggtcatatgtacactgttagtagaactaggaatt

SEQ ID NO: 443566 - DNA, 120 bp, Artificial Sequence
  ENSG00000154305_75 (sequence is synthesized)
cttagagccatcctgaaaaatagtttcatgatgtgtatgataagccttaaaaatggttatatccttttatattgtattaatgtcatgtctagtaatcgatcctaaagaaataaccagtca

SEQ ID NO: 443567 - DNA, 77 bp, Artificial Sequence
  ENSG00000154305_76 (sequence is synthesized)
tatggaccaccacctcagctctgcggaccttttgggcctcggccacttcctccaccctttgataaagatggtgaatc

SEQ ID NO: 443568 - DNA, 89 bp, Artificial Sequence
  ENSG00000154305_77 (sequence is synthesized)
acccccatctctacaaaaaatccaaaaattagctgggaggggagtctgaggtgggaggattgattgagtccgggagattgaggctgcag

SEQ ID NO: 443569 - DNA, 120 bp, Artificial Sequence
  ENSG00000154305_78 (sequence is synthesized)
ggtgggaggattgattgagtccgggagattgaggctgcagtgagccatgatcactcattacactccagcccatgtgacaggcaagaccctgccgccaaaaaaaaaaaaaaaaaaaaaaaa

SEQ ID NO: 443570 - DNA, 120 bp, Artificial Sequence
  ENSG00000154309_0 (sequence is synthesized)
attcagtctgtcctgccgctctgtggagctgcgcctgccaactcattgctttctgctgtgctgtgatcctgcagtcagttgccgctgttgctactgcaatcatttgcaccaaactgagcc

SEQ ID NO: 443571 - DNA, 120 bp, Artificial Sequence
  ENSG00000154309_1 (sequence is synthesized)
agagaagttccctcttttaacataaagagtcaagaaattggagcatggctatgagcaatggaaacaatgattttgtggttctgagcaacagcagcatcgcaaccagtgctgctaacccga

SEQ ID NO: 443572 - DNA, 120 bp, Artificial Sequence
  ENSG00000154309_2 (sequence is synthesized)
gtcccctcaccccctgtgatggagaccatgcagcccagcagctcacacccaaagaagcaacaagaacaaaagtgagtccaaatggatgcctgcaacttaatggcacggtcaaatcatcct

SEQ ID NO: 443573 - DNA, 120 bp, Artificial Sequence
  ENSG00000154309_3 (sequence is synthesized)
ttctgcctttagacaaccaaagaatgcctcagatgttaccccaatgctgccatccttgcccataccatcaccctttgactagccatagcagtcaccaagagtgccatcccgaggctggcc

SEQ ID NO: 443574 - DNA, 120 bp, Artificial Sequence
  ENSG00000154309_4 (sequence is synthesized)
ctgcagcaccctctgctttggcctcgtgttgcatgcagccacactccgagtattctgcatctctttgtccaaatcattcacctgtgtatcagactacgtgctgtcttcagccctctccat

SEQ ID NO: 443575 - DNA, 120 bp, Artificial Sequence
  ENSG00000154309_5 (sequence is synthesized)
ccttctgcctgcatcatccgtggcctgaccattttcagcatcagcctgtgcaacagcacatagccaacataagaccatccagacctttcaagttgccaaaaagttatgcagccctgatag

SEQ ID NO: 443576 - DNA, 120 bp, Artificial Sequence
  ENSG00000154309_6 (sequence is synthesized)
ccgactggccggtggtggtcttgggcatgtgcaccatgttcatcgtagtctgtgccttggttggagtattagtgccagagctccctgacttctctgatccattgctgggttttgaaccaa

SEQ ID NO: 443577 - DNA, 120 bp, Artificial Sequence
  ENSG00000154309_7 (sequence is synthesized)
gaggaacagcaataggccagagattggtcacatggaataatatggtgaaaaatacaggatacaaagcaacattagcaaattatccctttaaatatgcagatgaacaagccaaaagccatc

SEQ ID NO: 443578 - DNA, 120 bp, Artificial Sequence
  ENSG00000154309_8 (sequence is synthesized)
gggatgatagatggtcagatgatcattatgaaagagagaaaagagaagttgactggaacttccacaaggacagctttttctgcgacgttccaagtgaccgatattccagagtggtattta

SEQ ID NO: 443579 - DNA, 120 bp, Artificial Sequence
  ENSG00000154309_9 (sequence is synthesized)
cttcatctggaggggagacattatggaatttacctgcaattaaatcaatgtgcaatgtagataattccaggatcagatctcatccccagtttggtgatctctgccagaggaccactgctg

SEQ ID NO: 443580 - DNA, 120 bp, Artificial Sequence
  ENSG00000154309_10 (sequence is synthesized)
cctcctgctgccccagctggacactgggaaactacatcgccattctgaacaatagatcgtcctgtcagaaaatagttgagcgagacgtttctcataccttgaagctgcttcggacttgtg

SEQ ID NO: 443581 - DNA, 120 bp, Artificial Sequence
  ENSG00000154309_11 (sequence is synthesized)
ccaaacactaccaaaatggcactctggggccagactgctgggacatggcagccagaagaaaggaccagctcaagtgcaccaatgtgccacgcaaatgtaccaagtacaatgctgtgtacc

SEQ ID NO: 443582 - DNA, 120 bp, Artificial Sequence
  ENSG00000154309_12 (sequence is synthesized)
agatcctccattacttggtggacaaagactttatgaccccaaagacggctgactatgccacgccagctttaaaatacagcatgctcttctctcccacagagaaaggggagagcatgatga

SEQ ID NO: 443583 - DNA, 120 bp, Artificial Sequence
  ENSG00000154309_13 (sequence is synthesized)
acatttacttggacaactttgaaaactggaactcttctgacggcgtgactaccatcaccgggattgagtttggtatcaaacacagtttgtttcaggattatcttctaatggatactgtgt

SEQ ID NO: 443584 - DNA, 120 bp, Artificial Sequence
  ENSG00000154309_14 (sequence is synthesized)
atcctgccatagccattgtgattgtccttttagttatgtgtgtctacaccaagtccatgtttatcactctgatgacaatgtttgcaataatcagttctttgattgtttcctattttctct

SEQ ID NO: 443585 - DNA, 120 bp, Artificial Sequence
  ENSG00000154309_15 (sequence is synthesized)
atcgtgtagtatttcacttcgaattttttccttttatgaacctcactgccctcattattttggttggaattggagcagatgatgcttttgtcctgtgtgatgtttggaactacacaaaat

SEQ ID NO: 443586 - DNA, 120 bp, Artificial Sequence
  ENSG00000154309_16 (sequence is synthesized)
ttgataagcctcatgccgaaacctcagaaacagtaagcatcaccttgcagcacgctgccctctccatgttcgtcaccagttttaccactgctgctgccttttatgctaactatgttagca

SEQ ID NO: 443587 - DNA, 120 bp, Artificial Sequence
  ENSG00000154309_17 (sequence is synthesized)
acattacagcaatccgatgctttggggtttatgcggggacagctatattggtgaattacgttttgatggtcacatggcttccagcagttgttgtgctgcatgagcggtatcttcttaata

SEQ ID NO: 443588 - DNA, 120 bp, Artificial Sequence
  ENSG00000154309_18 (sequence is synthesized)
tattcacttgcttcaaaaagccccagcagcaaatatatgataacaaaagctgctggacagtggcttgccagaagtgccacaaagtactctttgccatttcagaagcatctcgaatttttt

SEQ ID NO: 443589 - DNA, 120 bp, Artificial Sequence
  ENSG00000154309_19 (sequence is synthesized)
ctacattgtatgtataaatccaaagatgaaactgccctcactggagttatccgagttccaggtgttccggtcgtcccatccttttgagcgttatgatgctgaatacaaaaagcttttcat

SEQ ID NO: 443590 - DNA, 120 bp, Artificial Sequence
  ENSG00000154309_20 (sequence is synthesized)
gtttgaacgtgttcaccatggcgaggagctccacatgcccatcacagtaatctggggcgtgtccccagaagacaatggcaacccactaaatcccaagagtaaagggaagttgacattaga

SEQ ID NO: 443591 - DNA, 120 bp, Artificial Sequence
  ENSG00000154309_21 (sequence is synthesized)
tagcagttttaacatcgccagcccagcttcccaggcctggattttgcacttctgtcaaaaactgagaaaccaaacattcttttaccagactgatgaacaggacttcaccagctgcttcat

SEQ ID NO: 443592 - DNA, 120 bp, Artificial Sequence
  ENSG00000154309_22 (sequence is synthesized)
tgagacattcaaacagtggatggaaaaccaggactgtgatgagcctgccctgtacccatgctgcagccactggagcttcccctacaagcaagagatttttgaactgtgcatcaagagagc

SEQ ID NO: 443593 - DNA, 120 bp, Artificial Sequence
  ENSG00000154309_23 (sequence is synthesized)
tatcatggagctggaaaggagtacagggtaccatttggatagcaaaaccccagggccgaggtttgatatcaatgatactatcagggcagtggtgttagagttccagagtacctacctctt

SEQ ID NO: 443594 - DNA, 120 bp, Artificial Sequence
  ENSG00000154309_24 (sequence is synthesized)
cacactggcttatgaaaagatgcatcagttttataaagaggtggactcgtggatatccagtgagctgagttcggcccctgaaggcctcagcaatggttggtttgtcagcaatctggagtt

SEQ ID NO: 443595 - DNA, 120 bp, Artificial Sequence
  ENSG00000154309_25 (sequence is synthesized)
ctatgacctccaggatagcctctccgatggcaccctcattgccatggggctgtcagttgctgttgcatttagcgtgatgctgctgacaacttggaacatcatcataagcctttatgccat

SEQ ID NO: 443596 - DNA, 120 bp, Artificial Sequence
  ENSG00000154309_26 (sequence is synthesized)
catttcaattgctggaacgatatttgtcactgttggttctcttgtcctgctgggctgggagctcaatgtgttggaatctgtcaccatttcggttgccgtcggcttgtctgtagactttgc

SEQ ID NO: 443597 - DNA, 120 bp, Artificial Sequence
  ENSG00000154309_27 (sequence is synthesized)
cgtccattatggggttgcctaccgcttggctccagatcccgaccgagaaggcaaagtgatcttctctctgagtcgcgtgggctctgcgatggccatggctgccctgaccaccttcgtggc

SEQ ID NO: 443598 - DNA, 120 bp, Artificial Sequence
  ENSG00000154309_28 (sequence is synthesized)
aggggccatgatgatgccctccacagttctagcttacacccagctgggcaccttcatgatgctcatcatgtgtatcagttgggctttcgccaccttctttttccagtgcatgtgccggtg

SEQ ID NO: 443599 - DNA, 120 bp, Artificial Sequence
  ENSG00000154309_29 (sequence is synthesized)
ccttggaccacagggtacctgtggtcagattcctttacctaaaaaactacagtgcagtgccttttcccatgccttgtctacaagtcccagtgacaagggacaaagcaaaacacataccat

SEQ ID NO: 443600 - DNA, 120 bp, Artificial Sequence
  ENSG00000154309_30 (sequence is synthesized)
aaatgcttatcatttagatcccaggggcccaaaatctgaactggagcatgagttttatgaattagaacctctggcttcccacagctgcactgcccctgagaagaccacttatgaagagac

SEQ ID NO: 443601 - DNA, 120 bp, Artificial Sequence
  ENSG00000154309_31 (sequence is synthesized)
ccacatctgctctgaatttttcaacagccaagcaaagaatttagggatgcctgtgcatgcagcttacaacagtgaactcagcaaaagcactgaaagtgacgctggctctgccttgttaca

SEQ ID NO: 443602 - DNA, 120 bp, Artificial Sequence
  ENSG00000154309_32 (sequence is synthesized)
gccccctcttgaacagcataccgtgtgtcacttcttctctctgaatcagagatgtagctgcccagatgcctacaaacacttgaactatggcccacactcttgccagcagatgggggactg

SEQ ID NO: 443603 - DNA, 120 bp, Artificial Sequence
  ENSG00000154309_33 (sequence is synthesized)
cttgtgccaccagtgctctcctaccactagcagctttgtccagatccaaaacggcgtggcacctctgaaggccacacaccaagctgtcgagggctttgtgcaccccatcacgcacatcca

SEQ ID NO: 443604 - DNA, 120 bp, Artificial Sequence
  ENSG00000154309_34 (sequence is synthesized)
ccactgtccctgcctgcagggcagagtaaagccagccggaatgcagaattctctgcctaggaattttttcctccacccagtgcagcacattcaggcccaagaaaaaattggcaagaccaa

SEQ ID NO: 443605 - DNA, 120 bp, Artificial Sequence
  ENSG00000154309_35 (sequence is synthesized)
tgtacacagtcttcagaggagcatagaagagcatcttccaaagatggcagagccatcgtcatttgtctgcagaagcactggatcgttactcaaaacgtgttgcgaccccgagaataaaca

SEQ ID NO: 443606 - DNA, 120 bp, Artificial Sequence
  ENSG00000154309_36 (sequence is synthesized)
aagggaactctgtaaaaatagagacgtgagcaatctggagagcagtggagggactgaaaacaaggcaggagggaaagtggagctgagcttgtcacagacggatgcaagtgtgaactcaga

SEQ ID NO: 443607 - DNA, 120 bp, Artificial Sequence
  ENSG00000154309_37 (sequence is synthesized)
acatttcaatcagaatgaaccaaaagtcctatttaatcatttaatgggggaggctggttgtaggtcttgcccaaataattcacaaagttgtggcagaattgtgagagtgaagtgcaattc

SEQ ID NO: 443608 - DNA, 120 bp, Artificial Sequence
  ENSG00000154309_38 (sequence is synthesized)
tgtggactgtcaaatgccaaacatggaagccaatgtgcctgctgtattaacacactcggaactttctggtgaaagtttgttaataaaaacactataataaatgcagcattcaattcagaa

SEQ ID NO: 443609 - DNA, 120 bp, Artificial Sequence
  ENSG00000154309_39 (sequence is synthesized)
ttcaccagaaaaactaagtgtgcttcatggcttcttcagatgtgaacgtgttcactgaaagcccagtctgtgtaaagctgctaagccctcaccagctcactggagtggccctgcactccg

SEQ ID NO: 443610 - DNA, 120 bp, Artificial Sequence
  ENSG00000154309_40 (sequence is synthesized)
tccctctatgcatacttggatagccctggccagctgagcgctgcaggtcaggaggctgctgtctcctacagccacacacttctgctcccagcatttgacaagtgtgcttaccaaacccac

SEQ ID NO: 443611 - DNA, 120 bp, Artificial Sequence
  ENSG00000154309_41 (sequence is synthesized)
aacagcacatagccaacataaggtaagtgatccgaaagttttgcttttagcattcaactaatgccacgtgaacatgacagcttgtgtttattttcctgaaaggagaggagaaaaatgagg

SEQ ID NO: 443612 - DNA, 120 bp, Artificial Sequence
  ENSG00000154309_42 (sequence is synthesized)
cacagaaagaaaacatgaaaacgcatattctgtggattgtgtgaagccaacaaaaacgcaaataaaataatactgtatatcgattttatccactgacttgttagtcaaatcctcccttcc

SEQ ID NO: 443613 - DNA, 120 bp, Artificial Sequence
  ENSG00000154310_0 (sequence is synthesized)
ataacagccaatgcagccgccatccacgcacaagcaaagaagcatgtcccatttaaatacacccacgcagccccagcgcccttagccgatcggggcgctcagcccacacgcaccgctgct

SEQ ID NO: 443614 - DNA, 120 bp, Artificial Sequence
  ENSG00000154310_1 (sequence is synthesized)
cacacgcaccgctgctcggggcttggagatccgcgcaggctgggctcccggacccggcggaccgacgcgcggaggatcgggatccggcgctgtggggctggggtgggcgggggaggctgg

SEQ ID NO: 443615 - DNA, 120 bp, Artificial Sequence
  ENSG00000154310_2 (sequence is synthesized)
gcgacacccgcatgaggacgcgagtgaaatagaccaaggtggaatttccaagggaaaagcttcggggtggttttggtccatttctccagcgaagaagtagacatggcgagcgactccccg

SEQ ID NO: 443616 - DNA, 120 bp, Artificial Sequence
  ENSG00000154310_3 (sequence is synthesized)
gctcgaagcctggatgaaatagatctctcggctctgagggaccccgcagggatctttgaattggtggaacttgttggaaatggaacatacgggcaagtttataagggtcgtcatgtcaaa

SEQ ID NO: 443617 - DNA, 120 bp, Artificial Sequence
  ENSG00000154310_4 (sequence is synthesized)
acgggccagcttgcagccatcaaggttatggatgtcacaggggatgaagaggaagaaatcaaacaagaaattaacatgttgaagaaatattctcatcaccggaatattgctacatactat

SEQ ID NO: 443618 - DNA, 120 bp, Artificial Sequence
  ENSG00000154310_5 (sequence is synthesized)
ggtgcttttatcaaaaagaacccaccaggcatggatgaccaactttggttggtgatggagttttgtggtgctggctctgtcaccgacctgatcaagaacacaaaaggtaacacgttgaaa

SEQ ID NO: 443619 - DNA, 120 bp, Artificial Sequence
  ENSG00000154310_6 (sequence is synthesized)
gaggagtggattgcatacatctgcagggaaatcttacgggggctgagtcacctgcaccagcataaagtgattcatcgagatattaaagggcaaaatgtcttgctgactgaaaatgcagaa

SEQ ID NO: 443620 - DNA, 120 bp, Artificial Sequence
  ENSG00000154310_7 (sequence is synthesized)
gttaaactagtggactttggagtcagtgctcagcttgatcgaacagtgggcaggaggaatactttcattggaactccctactggatggcaccagaagttattgcctgtgatgaaaaccca

SEQ ID NO: 443621 - DNA, 120 bp, Artificial Sequence
  ENSG00000154310_8 (sequence is synthesized)
gatgccacatatgatttcaagagtgacttgtggtctttgggtatcaccgccattgaaatggcagaaggtgctccccctctctgtgacatgcaccccatgagagctctcttcctcatcccc

SEQ ID NO: 443622 - DNA, 120 bp, Artificial Sequence
  ENSG00000154310_9 (sequence is synthesized)
cggaacccagcgcctcggctgaagtctaagaagtggtcaaaaaaattccagtcatttattgagagctgcttggtaaagaatcacagccagcgaccagcaacagaacaattgatgaagcat

SEQ ID NO: 443623 - DNA, 120 bp, Artificial Sequence
  ENSG00000154310_10 (sequence is synthesized)
ccatttatacgagaccaacctaatgagcgacaggtccgcattcaactcaaggaccatattgatagaacaaagaagaagcgaggagaaaaagatgagacagagtatgagtacagtggaagt

SEQ ID NO: 443624 - DNA, 120 bp, Artificial Sequence
  ENSG00000154310_11 (sequence is synthesized)
gaggaagaagaggaggagaatgactcaggagagcccagctccatcctgaatctgccaggggagtcgacgctgcggagggactttctgaggctgcagctggccaacaaggagcgttctgag

SEQ ID NO: 443625 - DNA, 120 bp, Artificial Sequence
  ENSG00000154310_12 (sequence is synthesized)
gccctacggaggcagcagctggagcagcagcagcgggagaatgaggagcacaagcggcagctgctggccgagcgtcagaagcgcatcgaggagcagaaagagcagaggcggcggctggag

SEQ ID NO: 443626 - DNA, 120 bp, Artificial Sequence
  ENSG00000154310_13 (sequence is synthesized)
gagcaacaaaggcgagagaaggagctgcggaagcagcaggagagggagcagcgccggcactatgaggagcagatgcgccgggaggaggagaggaggcgtgcggagcatgaacaggaatac

SEQ ID NO: 443627 - DNA, 120 bp, Artificial Sequence
  ENSG00000154310_14 (sequence is synthesized)
atcaggcgacagttagaggaggagcagagacagttagagatcttgcagcagcagctactgcatgaacaagctctacttctggaatataagcgcaaacaattggaagaacagagacaagca

SEQ ID NO: 443628 - DNA, 120 bp, Artificial Sequence
  ENSG00000154310_15 (sequence is synthesized)
gaaagactgcagaggcagctaaagcaagaaagagactacttagtttcccttcagcatcagcggcaggagcagaggcctgtggagaagaagccactgtaccattacaaagaaggaatgagt

SEQ ID NO: 443629 - DNA, 120 bp, Artificial Sequence
  ENSG00000154310_16 (sequence is synthesized)
cctagtgagaagccagcatgggccaaggaggtagaagaacggtcaaggctcaaccggcaaagttcccctgccatgcctcacaaggttgccaacaggatatctgaccccaacctgccccca

SEQ ID NO: 443630 - DNA, 120 bp, Artificial Sequence
  ENSG00000154310_17 (sequence is synthesized)
aggtcggagtccttcagcattagtggagttcagcctgctcgaacaccccccatgctcagaccagtcgatccccagatcccacatctggtagctgtaaaatcccagggacctgccttgacc

SEQ ID NO: 443631 - DNA, 120 bp, Artificial Sequence
  ENSG00000154310_18 (sequence is synthesized)
gcctcccagtcagtgcacgagcagcccacaaagggcctctctgggtttcaggaggctctgaacgtgacctcccaccgcgtggagatgccacgccagaactcagatcccacctcggaaaat

SEQ ID NO: 443632 - DNA, 120 bp, Artificial Sequence
  ENSG00000154310_19 (sequence is synthesized)
cctcctctccccactcgcattgaaaagtttgaccgaagctcttggttacgacaggaagaagacattccaccaaaggtgcctcaaagaacaacttctatatccccagcattagccagaaag

SEQ ID NO: 443633 - DNA, 120 bp, Artificial Sequence
  ENSG00000154310_20 (sequence is synthesized)
aattctcctgggaatggtagtgctctgggacccagactaggatctcaacccatcagagcaagcaaccctgatctccggagaactgagcccatcttggagagccccttgcagaggaccagc

SEQ ID NO: 443634 - DNA, 120 bp, Artificial Sequence
  ENSG00000154310_21 (sequence is synthesized)
agtggcagttcctccagctccagcacccctagctcccagcccagctcccaaggaggctcccagcctggatcacaagcaggatccagtgaacgcaccagagttcgagccaacagtaagtca

SEQ ID NO: 443635 - DNA, 120 bp, Artificial Sequence
  ENSG00000154310_22 (sequence is synthesized)
gaaggatcacctgtgctcccccatgagcctgcgaaggtgaaaccagaagaatccagggacattacccggcccagtcgaccagctagctacaaaaaagctatagatgaggatctgacggca

SEQ ID NO: 443636 - DNA, 120 bp, Artificial Sequence
  ENSG00000154310_23 (sequence is synthesized)
ttagccaaagaactaagagaactccggattgaagaaacaaaccgcccaatgaagaaggtgactgattactcctcctccagtgaggagtcagaaagtagcgaggaagaggaggaagatgga

SEQ ID NO: 443637 - DNA, 120 bp, Artificial Sequence
  ENSG00000154310_24 (sequence is synthesized)
gagagcgagacccatgatgggacagtggctgtcagcgacatacccagactgataccaacaggagctccaggcagcaacgagcagtacaatgtgggaatggtggggacgcatgggctggag

SEQ ID NO: 443638 - DNA, 120 bp, Artificial Sequence
  ENSG00000154310_25 (sequence is synthesized)
acctctcatgcggacagtttcagcggcagtatttcaagagaaggaaccttgatgattagagagacgtctggagagaagaagcgatctggccacagtgacagcaatggctttgctggccac

SEQ ID NO: 443639 - DNA, 120 bp, Artificial Sequence
  ENSG00000154310_26 (sequence is synthesized)
atcaacctccctgacctggtgcagcagagccattctccagctggaaccccgactgagggactggggcgcgtctcaacccattcccaggagatggactctgggactgaatatggcatgggg

SEQ ID NO: 443640 - DNA, 120 bp, Artificial Sequence
  ENSG00000154310_27 (sequence is synthesized)
agcagcaccaaagcctccttcaccccctttgtggaccccagagtataccagacgtctcccactgatgaagatgaagaggatgaggaatcatcagccgcagctctgtttactagcgaactt

SEQ ID NO: 443641 - DNA, 120 bp, Artificial Sequence
  ENSG00000154310_28 (sequence is synthesized)
cttaggcaagaacaggccaaactcaatgaagcaagaaagatttcggtggtaaatgtaaacccaaccaacattcggcctcatagcgacacaccagaaatcagaaaatacaagaaacgattc

SEQ ID NO: 443642 - DNA, 120 bp, Artificial Sequence
  ENSG00000154310_29 (sequence is synthesized)
aactcagaaatactttgtgcagctctgtggggtgtaaaccttctggtggggactgaaaatggcctgatgcttttggaccgaagtgggcaaggcaaagtctataatctgatcaaccggagg

SEQ ID NO: 443643 - DNA, 120 bp, Artificial Sequence
  ENSG00000154310_30 (sequence is synthesized)
cgatttcagcagatggatgtgctagagggactgaatgtccttgtgacaatttcaggaaagaagaataagctacgagtttactatctttcatggttaagaaacagaatactacataatgac

SEQ ID NO: 443644 - DNA, 120 bp, Artificial Sequence
  ENSG00000154310_31 (sequence is synthesized)
ccagaagtagaaaagaaacaaggctggatcactgttggggacttggaaggctgtatacattataaagttgttaaatatgaaaggatcaaatttttggtgattgccttaaagaatgctgtg

SEQ ID NO: 443645 - DNA, 120 bp, Artificial Sequence
  ENSG00000154310_32 (sequence is synthesized)
gaaatatatgcttgggctcctaaaccgtatcataaattcatggcatttaagtcttttgcagatctccagcacaagcctctgctagttgatctcacggtagaagaaggtcaaagattaaag

SEQ ID NO: 443646 - DNA, 120 bp, Artificial Sequence
  ENSG00000154310_33 (sequence is synthesized)
gttatttttggttcacacactggtttccatgtaattgatgttgattcaggaaactcttatgatatctacataccatctcatattcagggcaatatcactcctcatgctattgtcatcttg

SEQ ID NO: 443647 - DNA, 120 bp, Artificial Sequence
  ENSG00000154310_34 (sequence is synthesized)
cctaaaacagatggaatggaaatgcttgtttgctatgaggatgagggggtgtatgtaaacacctatggccggataactaaggatgtggtgctccaatggggagaaatgcccacgtctgtg

SEQ ID NO: 443648 - DNA, 120 bp, Artificial Sequence
  ENSG00000154310_35 (sequence is synthesized)
gcctacattcattccaatcagataatgggctggggcgagaaagctattgagatccggtcagtggaaacaggacatttggatggagtatttatgcataagcgagctcaaaggttaaagttt

SEQ ID NO: 443649 - DNA, 120 bp, Artificial Sequence
  ENSG00000154310_36 (sequence is synthesized)
ctatgtgaaagaaatgataaggtattttttgcatccgtgcgatctggaggaagtagccaagtgtttttcatgaccctcaacagaaattccatgatgaactggtaacagaagagcacttgg

SEQ ID NO: 443650 - DNA, 120 bp, Artificial Sequence
  ENSG00000154310_37 (sequence is synthesized)
cacttatcttcatggcgttatttctaatttaaaagaacataactcatgtggacttatgccagtctagaggcagaatcagaaggcttggttgaacatatcgctttccctttttcctctccc

SEQ ID NO: 443651 - DNA, 120 bp, Artificial Sequence
  ENSG00000154310_38 (sequence is synthesized)
tccgcccctcccagtacagtccatctttcaatgttgcagcctggttgagaaggagagaaaaaggtggcaggaatttccaggagatccccaagaatgctgccttgtctgtggacaaagatg

SEQ ID NO: 443652 - DNA, 120 bp, Artificial Sequence
  ENSG00000154310_39 (sequence is synthesized)
gaccatgtgcccttcggaattagggatagaaacaaatattgtgtgctcttaacgattaagctgtgttatggtgggttttcaggtttttaccttttttctttacccctttactctgcaaga

SEQ ID NO: 443653 - DNA, 120 bp, Artificial Sequence
  ENSG00000154310_40 (sequence is synthesized)
atggggaaagaatgcatactgcgaaaatgagtcttttaaattctgtctgcctactagttttaagtatatggtatgttgtaaaatttccaatgatgagagacagcacaataaatgtacctt

SEQ ID NO: 443654 - DNA, 120 bp, Artificial Sequence
  ENSG00000154310_41 (sequence is synthesized)
cttgccttcaccaacccaaaaggttgctttttgatagcaactggctaatgaatttttaaaaagagaagaaaaatactagttttcccctcttttgggaaatagattttaaatggctaaact

SEQ ID NO: 443655 - DNA, 120 bp, Artificial Sequence
  ENSG00000154310_42 (sequence is synthesized)
actagccttaaaactactagtctaataaaatcaactaccacttttgtgaatctgacaggccacatttttatatggccctttacagaatggagtgtgttgaacaggatactaacgccattg

SEQ ID NO: 443656 - DNA, 120 bp, Artificial Sequence
  ENSG00000154310_43 (sequence is synthesized)
agttgagctggcctagcgatggagggacactctaacacaactttccctcagctattatgcaacagatcagggaaaaagatgggatgacagatggggtcagacagaaagagcttctgggaa

SEQ ID NO: 443657 - DNA, 120 bp, Artificial Sequence
  ENSG00000154310_44 (sequence is synthesized)
acaagcttacatagtcttttttaaaatgcacaaagcctcccagctaagaggtcacttggtttgggcttcattaggactgagactttgttgagttctttctgggacttggagagtggatga

SEQ ID NO: 443658 - DNA, 120 bp, Artificial Sequence
  ENSG00000154310_45 (sequence is synthesized)
tattcaggctctgaacattcccagcgctctcccgagggtgccactttctcaagatgaaaactgtgactgaaaaaattaataataaatgtttctgagctgcctgtgttctccctgtgtggg

SEQ ID NO: 443659 - DNA, 120 bp, Artificial Sequence
  ENSG00000154310_46 (sequence is synthesized)
tgagagaagggactagactcctaagcctgcctcagatacaagaggcatcattggctccaattttagagaacttgaaagcaaggctttggacaaaattttgagaccctaatcactttacct

SEQ ID NO: 443660 - DNA, 120 bp, Artificial Sequence
  ENSG00000154310_47 (sequence is synthesized)
tcctccaaattacccaacatacggtaaacaacatttgtgcagaagtatgtatgtatttagttcaggttgacttgtgtccttataaactcttactcaaatgatttgaacttttatgcgact

SEQ ID NO: 443661 - DNA, 120 bp, Artificial Sequence
  ENSG00000154310_48 (sequence is synthesized)
gggattttttttttccaaagctacaagcatggccgcctgtggtatcgaggtgttgcaaacaatatctgtgttgcgcttcctgttttaacctacctcgttttgtttgtttttgtttcactg

SEQ ID NO: 443662 - DNA, 120 bp, Artificial Sequence
  ENSG00000154310_49 (sequence is synthesized)
ttcatcacagcagtgttatctccaggagacatatagagagctcaaccggcaatctcaggtgcatttaacatttttaaaacgaaacagtagttgaccaaatttttcttcttaaaaaattgg

SEQ ID NO: 443663 - DNA, 120 bp, Artificial Sequence
  ENSG00000154310_50 (sequence is synthesized)
aagtggggggaatccaatgacaaaaactaatgtggcttgtttctggagaaaataattactgtaaatggaacaacaacaacaaaaaaaactacgatcttactgactttgcctaaatacaca

SEQ ID NO: 443664 - DNA, 120 bp, Artificial Sequence
  ENSG00000154310_51 (sequence is synthesized)
agcagctgatgtactattaatgagaacgaaatacacattaggaaaatggagccatttcaatctagtggtttgggcaagatggggaagagaaggggaaacattctagtttctggattacat

SEQ ID NO: 443665 - DNA, 120 bp, Artificial Sequence
  ENSG00000154310_52 (sequence is synthesized)
tattatgcccctcctgaaaaggtggttgtcatttgcatttatttaaagcaggtaatatgcaggaatgtaactgaggattatcttcaggcaatcagcaagatatcctcctcatggtccctt

SEQ ID NO: 443666 - DNA, 120 bp, Artificial Sequence
  ENSG00000154310_53 (sequence is synthesized)
tagctctcaaaagcaatgaaatcctcctgttctcatttttactgctgtggttgtgctgctgaacaatactatcttctcaaattccatgccacaaattcagcaataactttttggattgaa

SEQ ID NO: 443667 - DNA, 120 bp, Artificial Sequence
  ENSG00000154310_54 (sequence is synthesized)
tttaacaactactgtaattggatgctgatgtggacaaaatatattgatttcgatttcactcccgaatgtgattgccaccagctctttatattgctgctgtggtattttaaaccagaagct

SEQ ID NO: 443668 - DNA, 120 bp, Artificial Sequence
  ENSG00000154310_55 (sequence is synthesized)
tctttaaattatgttgcaaactgatctttgtttttatgttttgttttgtttttatttctaagtgataagtttgaaacacacagctttaaatgatttttttattgtgggattttgggtaca

SEQ ID NO: 443669 - DNA, 120 bp, Artificial Sequence
  ENSG00000154310_56 (sequence is synthesized)
gttaagaaataaaagggaatcattgtgtttaaacataaggtagtttgtgaatgtattttttaaaatctagagtcattgaaacaaatcataagaaaacaatattaatgcagtcttgtttac

SEQ ID NO: 443670 - DNA, 120 bp, Artificial Sequence
  ENSG00000154310_57 (sequence is synthesized)
agtatgtacagtgacataacatagaacatgagcttttctggtgccaacaacaataaaacacacgttaaacatcaagccatgccttttatatttttgtactaatattttacactgagtaca

SEQ ID NO: 443671 - DNA, 120 bp, Artificial Sequence
  ENSG00000154310_58 (sequence is synthesized)
aggcaaatccaaatttaaatgggccccccagaaatctgtgctctttaaaagacagatatttaaagaattcactgaagcttttatcttcaaaaataaattttcctccagcaagacagaccc

SEQ ID NO: 443672 - DNA, 120 bp, Artificial Sequence
  ENSG00000154310_59 (sequence is synthesized)
cagccctgacataaggaggcctagaacatgcagaatacgtcagaatggtgtccttgtggctcatccaaactttctgaattgccttaattctttttgggggtaggggaggaacggttgctt

SEQ ID NO: 443673 - DNA, 120 bp, Artificial Sequence
  ENSG00000154310_60 (sequence is synthesized)
ttcatccatttttatagcatctcaacaaaaaaaatcttcagttctgatctttttataggtgattttgtctctagaaattggctcattttatttttattttcctacaaagagaaactggag

SEQ ID NO: 443674 - DNA, 120 bp, Artificial Sequence
  ENSG00000154310_61 (sequence is synthesized)
aaactgagccctcccctcagagtaagtttcactagatctgccagttcttactgctctaaattaataatcatccagtaaaatctactgagcctgcccacaccatagtctgggtctggggtc

SEQ ID NO: 443675 - DNA, 120 bp, Artificial Sequence
  ENSG00000154310_62 (sequence is synthesized)
tggcaggtgaccatcattcctgggtgccagtcaaagatactgtagcatggattcctgcatccagtggtggtaggaatggatgaccagtgaagttccttcaaataatgaggctcttccccc

SEQ ID NO: 443676 - DNA, 120 bp, Artificial Sequence
  ENSG00000154310_63 (sequence is synthesized)
tgccagttccagccagaccactgtcataacacacaatgcaaatgaagacagccttcactaagttccacataaaattgaacagctctattttagatagatctcattatttttcttggagac

SEQ ID NO: 443677 - DNA, 120 bp, Artificial Sequence
  ENSG00000154310_64 (sequence is synthesized)
ttctaaacaatccttcaagaagacctagaactattatttttattaaacagggtatattaagttatgggtgaaatctcacaaggtcacctggacaggggctccatttttctaacactttga

SEQ ID NO: 443678 - DNA, 120 bp, Artificial Sequence
  ENSG00000154310_65 (sequence is synthesized)
cattgttttctagggtgcactcctaatatactttgcatcaagtacatgttttttaaaaacaccttagttcctggttgtcaaaacctactaacaatttttgtctgttcttgtgactcattg

SEQ ID NO: 443679 - DNA, 120 bp, Artificial Sequence
  ENSG00000154310_66 (sequence is synthesized)
gtaattggtgtctctggtccctcctgtccagtagattattagaaagatgtgaaattccagccagaaccattttggttttatccactgccaggaaaggaaggggctaaagtctcacattcc

SEQ ID NO: 443680 - DNA, 120 bp, Artificial Sequence
  ENSG00000154310_67 (sequence is synthesized)
acgaagcttttaaaaaaatgctttccctactactatgtgtaccagttcccgtcactgtattcttgaaacgtggaagagctctttgtgttaacagtgtgtgctgtctttgaaagtctgctt

SEQ ID NO: 443681 - DNA, 120 bp, Artificial Sequence
  ENSG00000154310_68 (sequence is synthesized)
gaacaggcatcacttgcatttgtgctgattgctttaagatgtaagatgtgctacattatttttaagaaaaaaaatagttattgataaaacttttaattttaacctactgcaggaaaacat

SEQ ID NO: 443682 - DNA, 120 bp, Artificial Sequence
  ENSG00000154310_69 (sequence is synthesized)
gagaaaatccacagcatgctgataacaattctgaatgatgctactatgctctttatattccagaatcaccactggtaccatgttctgatcatttcaacagtctctaacttgttagttacc

SEQ ID NO: 443683 - DNA, 120 bp, Artificial Sequence
  ENSG00000154310_70 (sequence is synthesized)
ttttagttcattcttcaaaatttaaatctaaccaaatcaagcaaaacataaccaaccaaccaaaaactgacctcccctgagactacatagttgtaacataaatctaaaatccaaaagtct

SEQ ID NO: 443684 - DNA, 120 bp, Artificial Sequence
  ENSG00000154310_71 (sequence is synthesized)
aaatttgatttaatttacctgctaatatttctcataaatgccactatatctccttggtcactatatatcaggaaccctaaagtaagctgtcctttcatggatcttaaataaattgggtgt

SEQ ID NO: 443685 - DNA, 120 bp, Artificial Sequence
  ENSG00000154310_72 (sequence is synthesized)
aaaattgatcacttttcaggagtcccagcaaagaagaaaacctcttgagaatttgcaagttcaaaactgacaatttgtatattcctaccaaacattttctaggttgtttttatttctaca

SEQ ID NO: 443686 - DNA, 120 bp, Artificial Sequence
  ENSG00000154310_73 (sequence is synthesized)
ccattattctgggaattcttccattgataactagaatattcaacagtttgcttagcattaaacagtgtgagatcataaccctgtgctttggactttattcttctagacctgccattccag

SEQ ID NO: 443687 - DNA, 120 bp, Artificial Sequence
  ENSG00000154310_74 (sequence is synthesized)
gaagtgccagaatataccaaaataaaaatccccataaaagcatttttaaacaaaaatccctgggtaatgtttgagttattttaaatctagatcaaaatcttggattcttctgagtccatg

SEQ ID NO: 443688 - DNA, 120 bp, Artificial Sequence
  ENSG00000154310_75 (sequence is synthesized)
atgacaaatgtttggatgaaaagtagaaaatacagttaaaaataaaaatgtcctaaagtttacagatttttgagtttgtgtacatatcttcaaactcactccttgcatgatagggtttgg

SEQ ID NO: 443689 - DNA, 120 bp, Artificial Sequence
  ENSG00000154310_76 (sequence is synthesized)
ttttaatggtttatttttatcagcaccaagttgcattgcactattgaggctgagcaaatgctggtggaaaggtgagttttcatttctggcaatggatcattatttgtacactgtaaatat

SEQ ID NO: 443690 - DNA, 120 bp, Artificial Sequence
  ENSG00000154310_77 (sequence is synthesized)
catgcccagctacccctttcccttatctcttcccctgggataaatgttaaggaatagtaatacttattatggtatgtttaagaaaccttggacattaccctgaatcaaaacttcaaatgt

SEQ ID NO: 443691 - DNA, 120 bp, Artificial Sequence
  ENSG00000154310_78 (sequence is synthesized)
taggtggcagcaggaaacaaaagattacagcttgaatgaaattttaaaattgaatgttgtaaaactatttttgaacgttttagctgccttatttatgttaatataactgtagagagatgc

SEQ ID NO: 443692 - DNA, 120 bp, Artificial Sequence
  ENSG00000154310_79 (sequence is synthesized)
caaatgtataatatcagaagggaaaactacgattttgctgtgcctacaattgtttacattttttaaatctccagttttcaaaagtattttaaattgtcaaacatttgctaaaactggatt

SEQ ID NO: 443693 - DNA, 120 bp, Artificial Sequence
  ENSG00000154310_80 (sequence is synthesized)
ataacctcacctgagaatgagagaagaaaatcttcctggcatattttccagtctgaaacttttggttactttcaggtattttttttcttgcatacaaaaatcattgagaaagtactttct

SEQ ID NO: 443694 - DNA, 120 bp, Artificial Sequence
  ENSG00000154310_81 (sequence is synthesized)
acagttattctaagcagtcattaaaaatgctttgataggtttccccacatggtaactaccatgtcctggaatataatatgctatctttgtcaaaatatgaataataaaacattaatcgta

SEQ ID NO: 443695 - DNA, 120 bp, Artificial Sequence
  ENSG00000154310_82 (sequence is synthesized)
tattgctagaccaccttgcttggaattaaaagttacacagttatttttcccagaacatgtattttcagcttaaggaatgtcagttagtctttctaaactgggtttcattaagcatctaag

SEQ ID NO: 443696 - DNA, 120 bp, Artificial Sequence
  ENSG00000154310_83 (sequence is synthesized)
agtacagcagcaatcataagaggggaaaagccatcactgtggcttgggcaggagtcccagaatactggggcacaatttctaatcccacatattttcccattaactctgggggtgaccagc

SEQ ID NO: 443697 - DNA, 120 bp, Artificial Sequence
  ENSG00000154310_84 (sequence is synthesized)
ttcacctttccaaaacaaaatgagaacccaatgtttgtatatatgtgtacatacacatatgtacacatatatattcaggactgaacagtctcagtctagctattggttttgaaaaagttt

SEQ ID NO: 443698 - DNA, 120 bp, Artificial Sequence
  ENSG00000154310_85 (sequence is synthesized)
aaattgatttcatctttcttttctagcttctacacgctacaaacatcattttcttagttccatgcagtaactatgtttgtcacagttctatatagagcttttttttttcttgttgcttaa

SEQ ID NO: 443699 - DNA, 120 bp, Artificial Sequence
  ENSG00000154310_86 (sequence is synthesized)
tgttgcttatacattcattaatattaatacaaagaacttgagtaaattgatgtactttttcactcataatttttctattacagttaaatatgaaaggatcaaatttttggtgattgcctt

SEQ ID NO: 443700 - DNA, 120 bp, Artificial Sequence
  ENSG00000154310_87 (sequence is synthesized)
aactaggagtcacccatgacatcatctcctgaatttcatcaccaagcccagctgatcctatttcctaaatggttcctgatttctctcttctgttttctgtctctgccaccactgtcctag

SEQ ID NO: 443701 - DNA, 120 bp, Artificial Sequence
  ENSG00000154310_88 (sequence is synthesized)
cacaggcattgcacatctctcatatgaacgcctgcaggactgtcccttgatgttatccttgcagcccctacattcctactgtgcagccagtaaagtcatattaaaatgcttatttgatca

SEQ ID NO: 443702 - DNA, 120 bp, Artificial Sequence
  ENSG00000154310_89 (sequence is synthesized)
ccatctttcaatgttgcagcctggttgagaaggagagaaaaagatggaccatgtgcccttcggaattagggatagaaacaaatattgtgtgctcttaacgattaagctgtgttatggtgg

SEQ ID NO: 443703 - DNA, 120 bp, Artificial Sequence
  ENSG00000154310_90 (sequence is synthesized)
tcacatctgtgcctaaggctcctattgacaaggactctctgcattaggtagtaaataactagatgtatgaatgctgctaactttataaaagaaaactgtaatttcattaccagaagtaca

SEQ ID NO: 443704 - DNA, 120 bp, Artificial Sequence
  ENSG00000154310_91 (sequence is synthesized)
atgatttaattattatgtcagagcttctacattcattagtttatatttacctacttgcccattagtgtatatttacaagtcacagtttcttaaattttatagggactctcgatgcagaag

SEQ ID NO: 443705 - DNA, 120 bp, Artificial Sequence
  ENSG00000154310_92 (sequence is synthesized)
attccacaaaaaaaaaaaaaaaaaaatctgtgaataactcttgtaagacttgctttgtccatttatctcaagtcgtttgtcatttttgtggttaagatgtgaacagatgctgtgagttat

SEQ ID NO: 443706 - DNA, 120 bp, Artificial Sequence
  ENSG00000154319_0 (sequence is synthesized)
gagaattcaccggagctcggggaggcgaggcgggagccctgagctgaggccgggcagcgcggacccgcgcaggaggaggcggcggggacaccggcgagtccccagcagggcccctgggct

SEQ ID NO: 443707 - DNA, 120 bp, Artificial Sequence
  ENSG00000154319_1 (sequence is synthesized)
cccggaagggtctccagccacctgcccttcccgagaagagagagctctgggccttcttcctgccagtctggtcttcgagtgcgttcaggacagatagaccttggcacaggctgccccgag

SEQ ID NO: 443708 - DNA, 120 bp, Artificial Sequence
  ENSG00000154319_2 (sequence is synthesized)
attcctgcgacgctgtctgttcctgccttctgtggagcatggcacccacaggcttccaggacggatcatagacccgagcctccaggagggcgccctgtgcggctcactgcgcggtccctc

SEQ ID NO: 443709 - DNA, 120 bp, Artificial Sequence
  ENSG00000154319_3 (sequence is synthesized)
tcagctcccctgccacccagcctctgaggccggctcctgtcccggaaatgccctcgggcacctggatgaggccatcccagagcgggacccaactgtgccacccaccaagcctccccctgc

SEQ ID NO: 443710 - DNA, 120 bp, Artificial Sequence
  ENSG00000154319_4 (sequence is synthesized)
gccccccgtgccctcgcatgtccggctgccagggcagactgtagaatgtctgtgccccagatccacgtggaagaagtgggtgcagaagagggggcgggagcagccgcaccacccgatgac

SEQ ID NO: 443711 - DNA, 120 bp, Artificial Sequence
  ENSG00000154319_5 (sequence is synthesized)
cacctccggagcctgaaggccctcaccgagaaactgaggctggagacccgcaggccctcctacctggaatggcaggccaggctggaggagcatacctggcccttcccgaggccggctgcg

SEQ ID NO: 443712 - DNA, 120 bp, Artificial Sequence
  ENSG00000154319_6 (sequence is synthesized)
gagccacaggcgagcttggaggagggggagcgtggggggcaggagcccttgctccccctgagagaggctgggcagcaccccccttctgccaggagtgccagccaaggtgccagacccctg

SEQ ID NO: 443713 - DNA, 120 bp, Artificial Sequence
  ENSG00000154319_7 (sequence is synthesized)
tccactggcaagctggaaggctttcagagcatcgatgaagctatagcctggctcaggaaggaactgacggagatgcggctgcaggaccagcaactggccagacagctcatgcgcctgcgt

SEQ ID NO: 443714 - DNA, 120 bp, Artificial Sequence
  ENSG00000154319_8 (sequence is synthesized)
ggcgacatcaacaagctgaaaatcgaacacacctgccgcctccacaggaggatgctcaacgatgccacctacgagctggaggagcgggatgagctggccgacctcttctgtgactcccct

SEQ ID NO: 443715 - DNA, 120 bp, Artificial Sequence
  ENSG00000154319_9 (sequence is synthesized)
cttgcctcctccttcagcctctccacaccactcaagcttattggcgtgaccaagatgaacatcaactctcggaggttctctctctgctgaggagccctcagactgggcggaggggctgga

SEQ ID NO: 443716 - DNA, 120 bp, Artificial Sequence
  ENSG00000154319_10 (sequence is synthesized)
gcggagggcttgggctggaggggtgtcagaggaagctgaggccaagttactccagtgggtctcccggaggcaggggtccctgggactggcgactcaagggccccaggacctattcagtgg

SEQ ID NO: 443717 - DNA, 120 bp, Artificial Sequence
  ENSG00000154319_11 (sequence is synthesized)
tgctctcccacccaggggccctgggtgtggatgccagtgtctctgtgactggctcttgcttactacccaaagagctctgcagaagggccgctccaaccaagatgttaaaggagacctggg

SEQ ID NO: 443718 - DNA, 120 bp, Artificial Sequence
  ENSG00000154319_12 (sequence is synthesized)
ttcccaccataatccatccctccacggtcacgttcctgtttcctggaatcactggtgctatgaactgggattcccaaagggaggccccccaacaaagctgtcatttttgcagaaggctgt

SEQ ID NO: 443719 - DNA, 120 bp, Artificial Sequence
  ENSG00000154319_13 (sequence is synthesized)
cccgcaagggccttgggggaaattaggcatgtcagatgtgcctgtctcacgtgctgttgctgtcctctaagtattgtctcaaattcaccctaagtacatgactcagcaacattgacaggg

SEQ ID NO: 443720 - DNA, 120 bp, Artificial Sequence
  ENSG00000154319_14 (sequence is synthesized)
agctactaggaagggaaaatcgaaaggcatgacaaatgggcacttggggacgcagccccagtggctggcagccagtgtctctggtgagcctgacactataaggctgtgtaaattgtaaat

SEQ ID NO: 443721 - DNA, 120 bp, Artificial Sequence
  ENSG00000154319_15 (sequence is synthesized)
tctggcgtgtgctgggacatgtgatgggggcactagcgtagcttgggtgcaacaagcacagatgtccccattgtctcccctggccacatgcatctccaaagagcctcttcactgccaccc

SEQ ID NO: 443722 - DNA, 120 bp, Artificial Sequence
  ENSG00000154319_16 (sequence is synthesized)
ggtggattctggtggtgtcaccttactgccctctctggaaagacaatctagggagcccagaggcccatcctgagcctcctctgagattttgtgcctgacctaaacaactagttttaataa

SEQ ID NO: 443723 - DNA, 120 bp, Artificial Sequence
  ENSG00000154319_17 (sequence is synthesized)
gactgttactgatgtgttgttcacttgttagtaactgatttttgtccaaatgcggaagccacttgtgtaggtcaactacagtgcgtaggatttgattttaagagtttctccctcccaaca

SEQ ID NO: 443724 - DNA, 120 bp, Artificial Sequence
  ENSG00000154319_18 (sequence is synthesized)
ggcttgaggatcagcaagttaagaccccagcaggttagggaggtcagtctggggtcatacggcatggcaggggtccctcggccagacccgtagaatcctgagataaggagtgtttctgac

SEQ ID NO: 443725 - DNA, 120 bp, Artificial Sequence
  ENSG00000154319_19 (sequence is synthesized)
ctttggtgtcatctagtcgagtcctctcattagtaaaggagcaaagtgaaacctgggggaggagaaggacttccctcaggttgcacagctgtttaggctatagaatattgatgtgtgaaa

SEQ ID NO: 443726 - DNA, 120 bp, Artificial Sequence
  ENSG00000154319_20 (sequence is synthesized)
ccattattgataatgcctagtagatcacatgtcaatgaacttgaaccccaaagatggtcgtgatgctttgccaaacccgcacactgccaacccctctactctccacctcagcccccaccc

SEQ ID NO: 443727 - DNA, 120 bp, Artificial Sequence
  ENSG00000154319_21 (sequence is synthesized)
acatctcccagagtattgcaattcagaacatttgggtcaaggtggagcaaggcactgacagtggccccacagggcatgtgtcactaatcactgtcccatggtctacgcacggcatctggc

SEQ ID NO: 443728 - DNA, 120 bp, Artificial Sequence
  ENSG00000154319_22 (sequence is synthesized)
tgctctgtctactgtgacttcttcctgtgtaatctcagtggggcccgtgtccacccacacatcgtgacccacataggggagaggttgcttttcttttgtgggctgagagtaggacaatgc

SEQ ID NO: 443729 - DNA, 120 bp, Artificial Sequence
  ENSG00000154319_23 (sequence is synthesized)
aaatgaatgatctctagtagacagaaaagaacttggtctcttttttaaaatttcaaagagccagaagttctatgcctccttcaaagtaggcagaacaacgcagccaagatctactgtctg

SEQ ID NO: 443730 - DNA, 120 bp, Artificial Sequence
  ENSG00000154319_24 (sequence is synthesized)
ccatgctctgtgcaatgaagtctgcaggcctgaggaccatgtactgctgtccttcctcagagctctgcacaaacactgccaagtcctgaagacgcattcctttcctgccaacctctttcc

SEQ ID NO: 443731 - DNA, 85 bp, Artificial Sequence
  ENSG00000154319_25 (sequence is synthesized)
cacacgacagagaacatgccataaacatccttgaacccatgcaggaaagcccatcccatattctgaaaaaatgccaaattaggtt

SEQ ID NO: 443732 - DNA, 120 bp, Artificial Sequence
  ENSG00000154319_26 (sequence is synthesized)
aaagcccatcccatattctgaaaaaatgccaaattaggtttttctttctttttggaaatcagtcattacagtaaccgaaaccattgggttcagcgaaaatggaaagatttagctgaatgt

SEQ ID NO: 443733 - DNA, 120 bp, Artificial Sequence
  ENSG00000154319_27 (sequence is synthesized)
agtcagtccaattaagttggatgcaactgagtgatttagttgcttgggtaacccagtgcttgcttgctttcttcattctctgggtggaaactaagatcaagacacatgtttggggataag

SEQ ID NO: 443734 - DNA, 120 bp, Artificial Sequence
  ENSG00000154319_28 (sequence is synthesized)
ttaaatgtctgagctattttgctcggtttatcctaagagaactttattatgggatgaggaggtgacccaagatgagaagtggagggggacagcgatgttttctaaacatcgtccagtgtt

SEQ ID NO: 443735 - DNA, 120 bp, Artificial Sequence
  ENSG00000154319_29 (sequence is synthesized)
gactggcttccttactttgcacagtgaacacaactaaccacattaattcagctttgtgaagtccctgctctctgtgggtctatgagtcagcagcaacattggcctaacctccgtcccagc

SEQ ID NO: 443736 - DNA, 120 bp, Artificial Sequence
  ENSG00000154319_30 (sequence is synthesized)
ctcctggctcaccacatgtgtacagtgctgtttgcagttgtactcattatccatccatctctctgccatccccaagcatcgctgggtgtaaaacgcaaactctccaccgacactgccatg

SEQ ID NO: 443737 - DNA, 120 bp, Artificial Sequence
  ENSG00000154319_31 (sequence is synthesized)
cgtggtcatgtcttgatgccttcaggggctcagtagctatcaaagaggcctggagggcctgggcaggcttgacgatgcctgaccgagttcaagacccacaccctgtagcaataccaagtg

SEQ ID NO: 443738 - DNA, 120 bp, Artificial Sequence
  ENSG00000154319_32 (sequence is synthesized)
accaagtgctattacataatcaatggacgatttatacttttattttttatgattatttgtttctatattgctgttagaaaaagtgaaataaaaatacttcaaaagaagatatccatataa

SEQ ID NO: 443739 - DNA, 120 bp, Artificial Sequence
  ENSG00000154319_33 (sequence is synthesized)
gatgtagaaacggctgctggaggacaggacctgtggtgggtggaggtggtgagggggcagtggcacctggacggagcagacccaccttagcctgtgtggggtgcggtttccctgctggct

SEQ ID NO: 443740 - DNA, 120 bp, Artificial Sequence
  ENSG00000154319_34 (sequence is synthesized)
ctgcccctccctctgtgctggaacctccccaccctgctgtccaccccagctgcctgccactccggggaccactcttctgcacacggagatgcggctgcaggaccagcaactggccagaca

SEQ ID NO: 443741 - DNA, 120 bp, Artificial Sequence
  ENSG00000154319_35 (sequence is synthesized)
tttgatcagaccatgaaacatcagtgggttcttgcagaagtgatttctctgtgtgttcatcagtctgtcctctgcactgtggcttctcgcatcttccaggaccctagacggagatgcggc

SEQ ID NO: 443742 - DNA, 120 bp, Artificial Sequence
  ENSG00000154319_36 (sequence is synthesized)
gtgagaatggcagactggagccctttgaaagacgcttccagccccgggcatctaggaaaggtgcttgatgaggtctgggatgaagaaaatgagacttagcaagcctgacaagacgtagag

SEQ ID NO: 443743 - DNA, 120 bp, Artificial Sequence
  ENSG00000154319_37 (sequence is synthesized)
ctaggccatctgatcccaactctagtgtctgcatctggagacagtggttctccaccccggctgcacactcggatcatcgggggagctgaacactgctgtctaagtcccatctctcgacca

SEQ ID NO: 443744 - DNA, 120 bp, Artificial Sequence
  ENSG00000154319_38 (sequence is synthesized)
attgaatcagaatccagttcctcagggggattctcgcttgctccaagcagagctggaggtgctgccatgcgggcacttaggtgaacacgagaagcctcgttctagaacaatgagtcacag

SEQ ID NO: 443745 - DNA, 120 bp, Artificial Sequence
  ENSG00000154319_39 (sequence is synthesized)
ggggaggcgaggcgggagccctgagctgaggccgggcagcgcggacccgcgcaggaggaggcggcggggacaccggcgagtccccagcagggcccctgggctcccggaagatgaagaaaa

SEQ ID NO: 443746 - DNA, 120 bp, Artificial Sequence
  ENSG00000154328_0 (sequence is synthesized)
aaatctccgcccccagctggagcggctgtgcgggctgcgtagcggtgctgggtcgggccgacgtgccacccacccggagccggtgagtgcagccgcccgccctccggtagatctgcggcc

SEQ ID NO: 443747 - DNA, 120 bp, Artificial Sequence
  ENSG00000154328_1 (sequence is synthesized)
tggcggagaagtcgggaggggacaggaagggagggcgggccccgggccctcctccgtctcagccgcctgcggaggtgctgcccacgcctggaggcccccactgaccctcagacccgcgtc

SEQ ID NO: 443748 - DNA, 120 bp, Artificial Sequence
  ENSG00000154328_2 (sequence is synthesized)
tgcgcccctctccccgcaccccgaggcagagttgggaaagcagtggtcttagaccccccacctcgggcactcggaagagaacggcggagacaacccctcctcttccctggctggcgcagc

SEQ ID NO: 443749 - DNA, 120 bp, Artificial Sequence
  ENSG00000154328_3 (sequence is synthesized)
gccagcctcgagctcctcggtagcccccgggcagggagggccggagggtgggcgcggcatcttcagcgactcttcgaagtcccttccgcgtctcatctttcaaggctgttgcagaggcgg

SEQ ID NO: 443750 - DNA, 120 bp, Artificial Sequence
  ENSG00000154328_4 (sequence is synthesized)
cttgcttcccacctgtccatctccataaaaatccctaaacgaaacatgcccacgtgtccggagattttcaggacttggtgcatttcagatgaaggcttttccagaagcttccccgtagaa

SEQ ID NO: 443751 - DNA, 120 bp, Artificial Sequence
  ENSG00000154328_5 (sequence is synthesized)
gaggatcaggcatccaactggttaagggatgccagaagggccgttggtgaggaaatttcaccatttggtctccccctttgtgggtcagcaggtggtcaagacagggggcagcagtaagaa

SEQ ID NO: 443752 - DNA, 120 bp, Artificial Sequence
  ENSG00000154328_6 (sequence is synthesized)
gctacagcccgccagcctgcagtctctgtggctccaggacacccaggtccatggaaagaaattattccttagatttgatctagatgaagaaatggggccccctggcagcagcccaacacc

SEQ ID NO: 443753 - DNA, 120 bp, Artificial Sequence
  ENSG00000154328_7 (sequence is synthesized)
agagcctccacaaaaagaagtgcagaaggaaggggctgcggacccaaagcaggtcggggagcccagcgggcagaagacccttgatggatcctcacggtctgcagagctcgtcccccaggg

SEQ ID NO: 443754 - DNA, 120 bp, Artificial Sequence
  ENSG00000154328_8 (sequence is synthesized)
cgaggatgattctgagtatttggagagagacgcccctgcaggagatgctgggaggtggctgcgtgtcagctttggtttgtttggcagcgtttgggtgaacgatttctccagagccaagaa

SEQ ID NO: 443755 - DNA, 120 bp, Artificial Sequence
  ENSG00000154328_9 (sequence is synthesized)
agccaacaagaggggggactggagggacccttccccgaggttggtcctgcactttggtggtggtggcttcctggcattttataattgtcagttgtcttggagctcttccccagtggtcac

SEQ ID NO: 443756 - DNA, 120 bp, Artificial Sequence
  ENSG00000154328_10 (sequence is synthesized)
acccacctgtgacatcctgtctgagaagttccatcgaggacaagccttagaagctctaggccaggctcagcctgtctgctatacactgctggaccagagatacttctcagggctagggaa

SEQ ID NO: 443757 - DNA, 120 bp, Artificial Sequence
  ENSG00000154328_11 (sequence is synthesized)
tcctgagtgcctcgcgtcgggaggtcctggtggatcacgtggtggagttcagtacagcctggctgcagggcaagttccaaggcagaccgcagcacacacaggtctaccagaaagaacagt

SEQ ID NO: 443758 - DNA, 120 bp, Artificial Sequence
  ENSG00000154328_12 (sequence is synthesized)
gccctgctggccaccaggtcatgaaggaggcgtttgggcccgaagatgggttacagaggctcacctggtggtgcccgcagtgccagccccagttgtcagaggagccagagcagtgccagt

SEQ ID NO: 443759 - DNA, 120 bp, Artificial Sequence
  ENSG00000154328_13 (sequence is synthesized)
tctcctaaggagctggtggtgctcctcacggaaccttgccgcttggggaacctgacgtctaagtgtccagaaaggaggatgtgggcagggacggggtacagaggatagtgtgggtcagag

SEQ ID NO: 443760 - DNA, 120 bp, Artificial Sequence
  ENSG00000154328_14 (sequence is synthesized)
gtgccagtagtataatattcgtctccctggagttatgttgaaggcagagttttcatagggttagattttttttatccttttctagttcagttaattcatcctgttgaattgcaccatcgt

SEQ ID NO: 443761 - DNA, 120 bp, Artificial Sequence
  ENSG00000154328_15 (sequence is synthesized)
gaaagatgggaaaaatcgtgatgatgggtaaggggaaaacttcccggaaggcaatggggcaaggaaaaagaaagcctatgggaaatggctgtgctcccaacatagctttgcagatgatgt

SEQ ID NO: 443762 - DNA, 120 bp, Artificial Sequence
  ENSG00000154328_16 (sequence is synthesized)
tttttttttttttttggttgtttgttttgagagagagtcttgctctgtctccctggctagggtgtggtggtgtgatcttggctcacggcagccttgccctccctggctcaagcagtcttc

SEQ ID NO: 443763 - DNA, 120 bp, Artificial Sequence
  ENSG00000154328_17 (sequence is synthesized)
agagtagctgggactacaggcatgtgatatgatgctcggctgatttttgtttactttttagagagatggggtcttgccatatttgccaggctggtttgaactcctacaactcaagcattc

SEQ ID NO: 443764 - DNA, 120 bp, Artificial Sequence
  ENSG00000154328_18 (sequence is synthesized)
tacaactcaagcattcctcccaccttggtctcccaaaatgttgggaccacgggtgtgagccaccgcgcccagctagctcctgtgttttgtttttgttttgtaactttggttgatgttaag

SEQ ID NO: 443765 - DNA, 120 bp, Artificial Sequence
  ENSG00000154328_19 (sequence is synthesized)
gccctccattttggaaagcaggaaaacaggatttttttttttttatcttgttccctggaggatccagggatgaggatagagtggcctgagagcagtgcttggattcagcctcctgctggg

SEQ ID NO: 443766 - DNA, 120 bp, Artificial Sequence
  ENSG00000154328_20 (sequence is synthesized)
tccttctgctggatacaggcaccaagaggcggtcgtggagcagggagctgcgccttcctggggtgcccggtggtgtgtagagaaaagctgcttgtttactccttaagtcaatgtattggt

SEQ ID NO: 443767 - DNA, 120 bp, Artificial Sequence
  ENSG00000154328_21 (sequence is synthesized)
gactgttgatttgttgaacaattcaggaatcaagggctgtggagaaactccctcatgttgttggcaacaggtgaatgaacctagagcggtgacatgaaaataaagctcactgttactcgc

SEQ ID NO: 443768 - DNA, 120 bp, Artificial Sequence
  ENSG00000154328_22 (sequence is synthesized)
ggagccccgcagcctccacctacaggggcgtcccctaaggggacggaggccgcatgggccgccgagccgggaaatctccgcccccagctggagcggctgtgcgggctgcgtagcggtgct

SEQ ID NO: 443769 - DNA, 120 bp, Artificial Sequence
  ENSG00000154328_23 (sequence is synthesized)
ctgaaaatgaaggttttataggtactcaaagtatggcttttactgagtgtgcattgattttgtaccattataaaatcaaaaattaaaagtgaaccattgtaagtcagggatgtctgtatg

SEQ ID NO: 443770 - DNA, 120 bp, Artificial Sequence
  ENSG00000154328_24 (sequence is synthesized)
tgtgtatgatccagccacagagtgtgctctgactacgttgtggtaacgatgtggggatgtgtgtatgtgtgtatgatccagccacagagtgtgcttggactatattgtaacgatgtgggg

SEQ ID NO: 443771 - DNA, 120 bp, Artificial Sequence
  ENSG00000154328_25 (sequence is synthesized)
atgtgtgtatgtgtgtatgatccagccacagagtgtgctctatgttgtggtaacgatgtggggatgtgtgtatgtgtgtatgatccagccacagagtgtcctctgactatgttgtggtaa

SEQ ID NO: 443772 - DNA, 120 bp, Artificial Sequence
  ENSG00000154328_26 (sequence is synthesized)
tgatgtggggatgtgtgtatgtgtgcatgatccagccacagagtgtgctctgactatactgtggtaacgatgtggggatgtctgtatgtgtgtatgatccagccacagagtgtgctctat

SEQ ID NO: 443773 - DNA, 120 bp, Artificial Sequence
  ENSG00000154328_27 (sequence is synthesized)
gttgtggtaacgatgtggggatgtgtgtatgtgtgtatgacccagccacagggtgtgctctgactatactgtggtaacgatgtgtacatatgacctgttctttcttcccaggttggtcct

SEQ ID NO: 443774 - DNA, 120 bp, Artificial Sequence
  ENSG00000154328_28 (sequence is synthesized)
gaaatctccgcccccagctggagcggctgtgcgggctgcgtagcggtgctgggtcgggccgacgtgccacccacccggagccggtccatggaaagaaattattccttagatttgatctag

SEQ ID NO: 443775 - DNA, 120 bp, Artificial Sequence
  ENSG00000154330_0 (sequence is synthesized)
gcactcccagggagacagggagacgggccgggcgccggagaggaacccggactctgcccaaagtctcgccgcccgccggctgttttctggcggagggtgtgccccggagggcggcgatcg

SEQ ID NO: 443776 - DNA, 120 bp, Artificial Sequence
  ENSG00000154330_1 (sequence is synthesized)
cgggtgaaggctggggccaggcgcgggtggaggcgtcaccggggtcgggctagcaggccctggaatcaggcttttgggacaccccgaaagtgagtccaacttggggagaaactgagggca

SEQ ID NO: 443777 - DNA, 120 bp, Artificial Sequence
  ENSG00000154330_2 (sequence is synthesized)
gctcgggcggtctggcagcggagaaggtgggtgggagaaaactttacaggaaggcagaagcaatctctgccgagagagtcagccgagcggccgcgcggagaggaggggcgggcggtcccc

SEQ ID NO: 443778 - DNA, 80 bp, Artificial Sequence
  ENSG00000154330_3 (sequence is synthesized)
gagggggcccgggcgcgaggcggagtcccggcgcgcagccaggctggtggaggcccccggcaggctgcagattccctccg

SEQ ID NO: 443779 - DNA, 120 bp, Artificial Sequence
  ENSG00000154330_4 (sequence is synthesized)
agattccctccggctccgggagccgcagcaggaccggccaggaggcgccatggaggggagccccatcccggtgctgacagtgcccaccgcgccctacgaggaccagcggccggccggcgg

SEQ ID NO: 443780 - DNA, 120 bp, Artificial Sequence
  ENSG00000154330_5 (sequence is synthesized)
gcgacccaccggcctcttcgagggccagcgcaactacctgcccaactttatccagagcgtgctgtcgtccatcgacctgcgcgaccgtcagggctgcaccatggtggtgggcagcgacgg

SEQ ID NO: 443781 - DNA, 120 bp, Artificial Sequence
  ENSG00000154330_6 (sequence is synthesized)
caggtactttagcaggacggccatcgagatcgtggtgcagatggccgcggccaacgggattggacgactgattattggacagaatggcatcttgtcgacacctgcggtctcctgcattat

SEQ ID NO: 443782 - DNA, 120 bp, Artificial Sequence
  ENSG00000154330_7 (sequence is synthesized)
caggaagatcaaggcagctggtggaatcattctaacagccagccactgccctggaggaccagggggagagtttggagtgaagtttaatgttgccaatggaggtcctgcacccgatgttgt

SEQ ID NO: 443783 - DNA, 120 bp, Artificial Sequence
  ENSG00000154330_8 (sequence is synthesized)
ctcagacaaaatctaccaaatcagcaaaacgattgaggaatatgctatatgtcctgatctccgaatcgacctatctcgactaggaagacaagaatttgacctagaaaacaaattcaaacc

SEQ ID NO: 443784 - DNA, 120 bp, Artificial Sequence
  ENSG00000154330_9 (sequence is synthesized)
attcagagtggagatagtggacccagtggatatctatcttaacctccttcggaccatctttgactttcatgccatcaagggtttgctgactggacccagccaactgaagattcgcattga

SEQ ID NO: 443785 - DNA, 120 bp, Artificial Sequence
  ENSG00000154330_10 (sequence is synthesized)
cgcaatgcacggagttatgggaccttatgtgagaaaagttctgtgtgatgagctgggggccccagccaattctgcaataaactgtgttcccctggaagactttggagggcagcaccctga

SEQ ID NO: 443786 - DNA, 120 bp, Artificial Sequence
  ENSG00000154330_11 (sequence is synthesized)
cccaaacctgacatatgcaacgactcttctggaagcaatgaaaggaggagaatatggatttggagctgcatttgatgctgatggggaccgttatatgatcctaggccaaaatggcttctt

SEQ ID NO: 443787 - DNA, 120 bp, Artificial Sequence
  ENSG00000154330_12 (sequence is synthesized)
tgtgagcccttctgactccctggccatcattgctgccaacctctcttgcattccatatttccgtcagatgggggtccgcgggtttgggaggagtatgccaaccagcatggccctggacag

SEQ ID NO: 443788 - DNA, 120 bp, Artificial Sequence
  ENSG00000154330_13 (sequence is synthesized)
agtggccaaatcaatgaaggtccctgtatatgagaccccagctggatggagattcttctcaaatctgatggactcaggacgttgcaatctgtgtggggaagagagctttggcactggctc

SEQ ID NO: 443789 - DNA, 120 bp, Artificial Sequence
  ENSG00000154330_14 (sequence is synthesized)
tgaccacctccgagagaaggatggcctgtgggctgtcttggtctggctctccattattgctgcccggaagcagagtgtggaggaaattgtccgagatcactgggccaaatttggccgcca

SEQ ID NO: 443790 - DNA, 120 bp, Artificial Sequence
  ENSG00000154330_15 (sequence is synthesized)
ggttggatcccaagacgacatattatatcatgagggacctggaggccctggtcacagacaaatccttcattggccagcagtttgctgtggggagccatgtctacagcgtggcgaagacgg

SEQ ID NO: 443791 - DNA, 120 bp, Artificial Sequence
  ENSG00000154330_16 (sequence is synthesized)
atagttttgaatacgtggaccctgtggatggcactgtgaccaagaaacagggcctaaggatcattttctcggatgcatcacggctcatcttccggctcagttcctccagtggtgtgcggg

SEQ ID NO: 443792 - DNA, 120 bp, Artificial Sequence
  ENSG00000154330_17 (sequence is synthesized)
ccaccctcagactgtacgcagagagctacgagagggatcccagcggccatgaccaggagccacaggcagtgctgagccctctcatagccatcgcactgaaaatatcccagattcatgaga

SEQ ID NO: 443793 - DNA, 120 bp, Artificial Sequence
  ENSG00000154330_18 (sequence is synthesized)
gaactggccggaggggacccactgtcatcacctgaatagaggaaagatcactcaccagggccaaagagagtgctcagcgggagatgcttcactgatgccttcttgctacctgtttgtgcc

SEQ ID NO: 443794 - DNA, 120 bp, Artificial Sequence
  ENSG00000154330_19 (sequence is synthesized)
tcttatgactttggaaaaacaaaagatattttgcttttgggggatagagggtgggtgggaaaagaaaaaaaatccatttggttttggttttgtcctattcctccaaatgcagcagggcct

SEQ ID NO: 443795 - DNA, 120 bp, Artificial Sequence
  ENSG00000154330_20 (sequence is synthesized)
ttagttgtctgttaaagctgcactataatttggtatctacattttatcacacaaaggaacctccccttttgacaacaactgggctaggcagctgttaatcacaacatttgtgcatcactt

SEQ ID NO: 443796 - DNA, 120 bp, Artificial Sequence
  ENSG00000154330_21 (sequence is synthesized)
gtgccaagtgagaaaatgttctaaaatcacaagagagaacagtgccagaatgaaactgaccctaagtcccaggtgcccctgggcaggcagaaggagacactcccagcatggaggagggtt

SEQ ID NO: 443797 - DNA, 120 bp, Artificial Sequence
  ENSG00000154330_22 (sequence is synthesized)
tatcttttcatcctaggtcaggtctacaatgggggaaggttttattatagaactcccaacagcccacctcactcctgccacccacccgatggccctgcctcccccatcccatccccaaca

SEQ ID NO: 443798 - DNA, 120 bp, Artificial Sequence
  ENSG00000154330_23 (sequence is synthesized)
tccctgtaccaccttctctcacatcttctaaagctttgtacaaatcacaatggtgcacttccaacaaaatatatcaataggtgttttcctctcttattttgtaaatagtattattttagc

SEQ ID NO: 443799 - DNA, 120 bp, Artificial Sequence
  ENSG00000154330_24 (sequence is synthesized)
tattaagctggataccttctttcaaattcagccattcagttgtaaagttgggaagaagtttcttgacaagactctgcaattaaatgcttaaaatttggaggggatccttccttgattaca

SEQ ID NO: 443800 - DNA, 120 bp, Artificial Sequence
  ENSG00000154330_25 (sequence is synthesized)
tcaagtatgttggtacatgggtttatacaagttcctcttgagaaggcaaaaagaccaccatgtgtgagagctctttgacttggccaataggggcctatcttaatgcacttgtttggacac

SEQ ID NO: 443801 - DNA, 120 bp, Artificial Sequence
  ENSG00000154330_26 (sequence is synthesized)
atttctgatcttatttgtaaaggctgcaaaaggagaggatgaaatgctgtaaaagtaggaaatgaagtggaagctggaagaaaatgtaattggtggtacagctatgggccagatggtgga

SEQ ID NO: 443802 - DNA, 120 bp, Artificial Sequence
  ENSG00000154330_27 (sequence is synthesized)
ggggagggtggggacccctgccggcaagcagagtgtcacagctggctttcctcacttgggaaaagggtactgccggtctagcagcctcctctgtactcagccaggacacccagcgcgtgg

SEQ ID NO: 443803 - DNA, 120 bp, Artificial Sequence
  ENSG00000154330_28 (sequence is synthesized)
gacctgtttgtgtctgttttgcttccttgggaacggcacagtcactcaccctgccatttgcggaaatgacctggtgcactttgactgttaagcaatgcgttattgctgtagtcaaggtta

SEQ ID NO: 443804 - DNA, 120 bp, Artificial Sequence
  ENSG00000154330_29 (sequence is synthesized)
gtgcaagcaaggaaacattcccagtaaggtatttgtttccattttctgtctgtgcttctgtcagaaacttgctaggacatttagtggccaataaaaaagaaattcctaatttcaacctta

SEQ ID NO: 443805 - DNA, 120 bp, Artificial Sequence
  ENSG00000154330_30 (sequence is synthesized)
cttcaaagggttgagtctgggggctcatcagaagaggtaatcccaagtgacttggaatctgcaacaggtgggttaggacctcatccttagatattgctttaaccaatttatgggtaagcc

SEQ ID NO: 443806 - DNA, 120 bp, Artificial Sequence
  ENSG00000154330_31 (sequence is synthesized)
atagttctgagcagagtcacgtgctcacgcgccccacgtgtagtgacaacgggaatgtaggcttaaacataggtaacagcttcaaaagagtttgtaaaaacaaggctgtgaatatcaata

SEQ ID NO: 443807 - DNA, 120 bp, Artificial Sequence
  ENSG00000154330_32 (sequence is synthesized)
taattgtgagacttttggggatttattgtaggtttgaacgtaacttgaaatacagtgatttgtagacagtcagtaattgcttcacttgctccatttggaattttgtaactattcacttct

SEQ ID NO: 443808 - DNA, 120 bp, Artificial Sequence
  ENSG00000154330_33 (sequence is synthesized)
ccagcagcataaggtggttaagaagacagtttctgttcgttgtaaaaaattactccaggcttaaggaggacaactattgtgtctttatattcatatacccaggatttagcacagtgccta

SEQ ID NO: 443809 - DNA, 120 bp, Artificial Sequence
  ENSG00000154330_34 (sequence is synthesized)
atccataagggccacactaaaatgtttgcccagtgaataaatcctggataatatcatcctgtctgcaaagccagtattacagagtgattggttgccagtaggggagatagctccctttgg

SEQ ID NO: 443810 - DNA, 120 bp, Artificial Sequence
  ENSG00000154330_35 (sequence is synthesized)
ttacacaaattgtggcagacattgaaccactccaaaagaaactaaagctatttatttggggattgaaacaaaaaagcctacacaacttgaaaaaagcataaagacactcagatggaacca

SEQ ID NO: 443811 - DNA, 120 bp, Artificial Sequence
  ENSG00000154330_36 (sequence is synthesized)
tagtgtctcccagcagatatcaccagatgggggtgggggtaaataattgcagtcacatatgcagcaggtatatatatttttactaatggcttattcttaaacaggacttgaggccagaga

SEQ ID NO: 443812 - DNA, 120 bp, Artificial Sequence
  ENSG00000154330_37 (sequence is synthesized)
aatttcaaggataaattgctttgggagaatgcctgatatcaatgtctcctgagacatagaagttttccaaaataacaaatcaccagatatattattttgttgcctcctcttccttcccct

SEQ ID NO: 443813 - DNA, 120 bp, Artificial Sequence
  ENSG00000154330_38 (sequence is synthesized)
ggcccctgccaatatgcttatttacaagagttaccttatcagttgtcttaggagaacacatttccttcaacagaagtcacagtatcatcttatggtcataattttacaatatccctgcct

SEQ ID NO: 443814 - DNA, 120 bp, Artificial Sequence
  ENSG00000154330_39 (sequence is synthesized)
ctactgagaagagatacatagcgaatggagatgtgctgagccaatgaggaattaatcctaggcagcactagtagatgtggccacagctctggccccaccccactctggtggtcaggccaa

SEQ ID NO: 443815 - DNA, 120 bp, Artificial Sequence
  ENSG00000154330_40 (sequence is synthesized)
aaaagaagtcaggtaagaagtgtgaaaggaaattcaatcttgggacccccaaactcattaagccacagggaaaattcaagctgggaactgggtcacgcaaacatgcctcccccttttggt

SEQ ID NO: 443816 - DNA, 120 bp, Artificial Sequence
  ENSG00000154330_41 (sequence is synthesized)
aagatggctacaagatgaaaagctacatgcctcccccatattttgcccacaagggaattcccagtgagctgctagatctttacactaaaggtgtttctattaaaatttcaccatggcaat

SEQ ID NO: 443817 - DNA, 120 bp, Artificial Sequence
  ENSG00000154330_42 (sequence is synthesized)
atggcaatataaattgatagtttatagatgcagtcacccctggcccaccagacacaaatgcatatctgattgttcccctggcccagttttgtctgttatcttatataaaatgcagattcc

SEQ ID NO: 443818 - DNA, 85 bp, Artificial Sequence
  ENSG00000154330_43 (sequence is synthesized)
gcccagttttgtctgttatcttatataaaatgcagattccctgcaattttcctctgcctcatttgtctgtgtcatcttatgttaa

SEQ ID NO: 443819 - DNA, 120 bp, Artificial Sequence
  ENSG00000154330_44 (sequence is synthesized)
tgtgtacttctcaatatcctgccctttcccctttaaatttggagccttcaaaatcatctttggagaaaggcatagacctgtctcctaggtgtgcatccttaactttggcaaataaacctc

SEQ ID NO: 443820 - DNA, 120 bp, Artificial Sequence
  ENSG00000154330_45 (sequence is synthesized)
ctaaaataattgagacttgtcatttttctcgattgacagaagaaaagacagagccaagaggatggcagtgtacttggctacccccagagcctagctgaggctccagccctgggcacttca

SEQ ID NO: 443821 - DNA, 120 bp, Artificial Sequence
  ENSG00000154330_46 (sequence is synthesized)
ccgtcttactgtaatagacaaattgcctgctttcacttaatccacagatttacaagggacaaactttggccctaggaatatttattgaatatcatttcatccctgtgacttccacttctt

SEQ ID NO: 443822 - DNA, 120 bp, Artificial Sequence
  ENSG00000154330_47 (sequence is synthesized)
tctgattcccatatcaccagcccaagagaacttgagtatctgttcacagctttgctcctctttccccacattaaccacaaagcaacggaaatagaataaagagacaaatgggtaactcta

SEQ ID NO: 443823 - DNA, 120 bp, Artificial Sequence
  ENSG00000154330_48 (sequence is synthesized)
agtaggttcatcacattcattacatgccctgtatccagagccaatataaatggtcttgattctgattgtgttgaggtataaaaacatgctgatttctgtggcaggtattaatgattatta

SEQ ID NO: 443824 - DNA, 120 bp, Artificial Sequence
  ENSG00000154330_49 (sequence is synthesized)
tctaaaatagctgttaagcaaagagaaaattgggcctgatagggtgagaatcacagctctaatacctagagtgaccttataatgtattgtccaaaggagatatttttgacagtgaaagag

SEQ ID NO: 443825 - DNA, 120 bp, Artificial Sequence
  ENSG00000154330_50 (sequence is synthesized)
ggtgttgttagtaattatatcaggaccatggcctaaaccaggactatcccaggaagcctgggacatatttgtaccccatctctatttaatgcctttatacaattctttacttaattctac

SEQ ID NO: 443826 - DNA, 120 bp, Artificial Sequence
  ENSG00000154330_51 (sequence is synthesized)
cagcctttattgagcctgctttctttgtctagctgagtgccacgtgctgacgtcactaagatcaatacagcaaactctgaaagatggacagagagacaggagatggtcctttataatgca

SEQ ID NO: 443827 - DNA, 120 bp, Artificial Sequence
  ENSG00000154330_52 (sequence is synthesized)
gtgtgatctgtgctgcaatagagatggaagagtgttctgattggctggaaaacaatgcacatgggaagctgtacagaaatgagtggggaaagggtcttgctctgttgaccagaccgtgac

SEQ ID NO: 443828 - DNA, 120 bp, Artificial Sequence
  ENSG00000154330_53 (sequence is synthesized)
ctcctgggttcaagcgaggactcagcctcctgagtagccgggactacagataaagatgcagagcctcagagaagttaaatgattgatcctatgtcaggggatagtcaagactcataccta

SEQ ID NO: 443829 - DNA, 120 bp, Artificial Sequence
  ENSG00000154330_54 (sequence is synthesized)
gctcttacaccagcttgtctatgaagatggaagacaaagcttttctttccaagaagaaactgaaaacatcaactcaagtcttgactttggttgggaaagagtaactgcagtaattaggac

SEQ ID NO: 443830 - DNA, 120 bp, Artificial Sequence
  ENSG00000154330_55 (sequence is synthesized)
ccaattgatggcaaaggggtatgatctagaatacctgaaacttggtaatttatgaagaaaaggaattcatttcttacagttatggaggctgagaagtccaaggtccaggggcataacagg

SEQ ID NO: 443831 - DNA, 120 bp, Artificial Sequence
  ENSG00000154330_56 (sequence is synthesized)
aaatctctgtttcagtcagaaaccagaggccttgcttagaaatttcacaaaggacctgttctgatatagacatctggtgatactatctgttgattgcaaagaaaaatatacctgactaat

SEQ ID NO: 443832 - DNA, 120 bp, Artificial Sequence
  ENSG00000154330_57 (sequence is synthesized)
aagaagaaaatgaatggtgcataatgacccaatctcctttggatataataaaactatgcctgatttgtggttttcgtttacatttaggggcaagaatcattgctctctttgaatgactct

SEQ ID NO: 443833 - DNA, 120 bp, Artificial Sequence
  ENSG00000154330_58 (sequence is synthesized)
actgattctttccttagctgtgtccaatctgctgatgagcctgttgaaggaattcttcttctccgatactgtgtgttttttttttttttttagcatttctctttgactcttttaaaatag

SEQ ID NO: 443834 - DNA, 120 bp, Artificial Sequence
  ENSG00000154330_59 (sequence is synthesized)
tttttagttctctgaaattccccatctgtttatgtaattgtttatctttttcattagatcatttaacatattagacatggttgttttaaacaccctgtctgatagttccaatctctggtt

SEQ ID NO: 443835 - DNA, 120 bp, Artificial Sequence
  ENSG00000154330_60 (sequence is synthesized)
catctctgactttggttcagctgattgctttatctcttgacaatggtttgggttttcctgttttttgtagatctcataaatttttattgaatgctgaataatatgtggataagaacagta

SEQ ID NO: 443836 - DNA, 80 bp, Artificial Sequence
  ENSG00000154342_0 (sequence is synthesized)
gccccccccggcgctcacgctctcggggcggactcccggccctccgcgccctctcgcgcggcgatggccccactcggata

SEQ ID NO: 443837 - DNA, 120 bp, Artificial Sequence
  ENSG00000154342_1 (sequence is synthesized)
ctcgcgcggcgatggccccactcggatacttcttactcctctgcagcctgaagcaggctctgggcagctacccgatctggtggtcgctggctgttgggccacagtattcctccctgggct

SEQ ID NO: 443838 - DNA, 120 bp, Artificial Sequence
  ENSG00000154342_2 (sequence is synthesized)
cgcagcccatcctgtgtgccagcatcccgggcctggtccccaagcagctccgcttctgcaggaactacgtggagatcatgcccagcgtggccgagggcatcaagattggcatccaggagt

SEQ ID NO: 443839 - DNA, 120 bp, Artificial Sequence
  ENSG00000154342_3 (sequence is synthesized)
gccagcaccagttccgcggccgccggtggaactgcaccaccgtccacgacagcctggccatcttcgggcccgtgctggacaaagctaccagggagtcggcctttgtccacgccattgcct

SEQ ID NO: 443840 - DNA, 120 bp, Artificial Sequence
  ENSG00000154342_4 (sequence is synthesized)
cagccggtgtggcctttgcagtgacacgctcatgtgcagaaggcacggccgccatctgtggctgcagcagccgccaccagggctcaccaggcaagggctggaagtggggtggctgtagcg

SEQ ID NO: 443841 - DNA, 120 bp, Artificial Sequence
  ENSG00000154342_5 (sequence is synthesized)
aggacatcgagtttggtgggatggtgtctcgggagttcgccgacgcccgggagaaccggccagatgcccgctcagccatgaaccgccacaacaacgaggctgggcgccaggccatcgcca

SEQ ID NO: 443842 - DNA, 120 bp, Artificial Sequence
  ENSG00000154342_6 (sequence is synthesized)
gccacatgcacctcaagtgcaagtgccacgggctgtcgggcagctgcgaggtgaagacatgctggtggtcgcaacccgacttccgcgccatcggtgacttcctcaaggacaagtacgaca

SEQ ID NO: 443843 - DNA, 120 bp, Artificial Sequence
  ENSG00000154342_7 (sequence is synthesized)
gcgcctcggagatggtggtggagaagcaccgggagtcccgcggctgggtggagaccctgcggccgcgctacacctacttcaaggtgcccacggagcgcgacctggtctactacgaggcct

SEQ ID NO: 443844 - DNA, 120 bp, Artificial Sequence
  ENSG00000154342_8 (sequence is synthesized)
cgcccaacttctgcgagcccaaccctgagacgggctccttcggcacgcgcgaccgcacctgcaacgtcagctcgcacggcatcgacggctgcgacctgctgtgctgcggccgcggccaca

SEQ ID NO: 443845 - DNA, 120 bp, Artificial Sequence
  ENSG00000154342_9 (sequence is synthesized)
acgcgcgagcggagcggcgccgggagaagtgccgctgcgtgttccactggtgctgctacgtcagctgccaggagtgcacgcgcgtctacgacgtgcacacctgcaagtaggcaccggccg

SEQ ID NO: 443846 - DNA, 120 bp, Artificial Sequence
  ENSG00000154342_10 (sequence is synthesized)
cggctccccctggacggggcgggccctgcctgagggtgggcttttccctgggtggagcaggactcccacctaaacggggcagtactcctccctgggggcgggactcctccctgggggtgg

SEQ ID NO: 443847 - DNA, 120 bp, Artificial Sequence
  ENSG00000154342_11 (sequence is synthesized)
ggctcctacctgggggcagaactcctacctgaaggcagggctcctccctggagctagtgtctcctctctggtggctgggctgctcctgaatgaggcggagctccaggatggggaggggct

SEQ ID NO: 443848 - DNA, 120 bp, Artificial Sequence
  ENSG00000154342_12 (sequence is synthesized)
gtaagggcgtggctctgggtgggcggggcactaggtaggcttctacctgcaggcggggctcctcctgaaggaggcggggctctaggatggggcacggctctggggtaggctgctccctga

SEQ ID NO: 443849 - DNA, 120 bp, Artificial Sequence
  ENSG00000154342_13 (sequence is synthesized)
gggcggagcgcctccttaggagtggggttttatggtggatgaggcttcttcctggatggggcagagcttctcctgaccagggcaaggccccttccacgggggctgtggctctgggtgggc

SEQ ID NO: 443850 - DNA, 120 bp, Artificial Sequence
  ENSG00000154342_14 (sequence is synthesized)
gtggcctgcataggctccttcctgtgggtggggcttctctgggaccaggctccaatggggcggggcttctctccgcgggtgggactcttccctgggaaccgccctcctgattaaggcgtg

SEQ ID NO: 443851 - DNA, 120 bp, Artificial Sequence
  ENSG00000154342_15 (sequence is synthesized)
gcttctgcaggaatcccggctccagagcaggaaattcagcccaccagccacctcatccccaaccccctgtaaggttccatccacccctgcgtcgagctgggaaggttccatgaagcgagt

SEQ ID NO: 443852 - DNA, 120 bp, Artificial Sequence
  ENSG00000154342_16 (sequence is synthesized)
cgggtccccaacccgtgcccctgggatccgagggcccctctccaagcgcctggctttggaatgctccaggcgcgccgacgcctgtgccaccccttcctcagcctggggtttgaccaccca

SEQ ID NO: 443853 - DNA, 120 bp, Artificial Sequence
  ENSG00000154342_17 (sequence is synthesized)
cctgaccaggggccctacctggggaaagcctgaagggcctcccagcccccaaccccaagaccaagcttagtcctgggagaggacagggacttcgcagaggcaagcgaccgaggccctccc

SEQ ID NO: 443854 - DNA, 120 bp, Artificial Sequence
  ENSG00000154342_18 (sequence is synthesized)
aaagaggcccgccctgcccgggctcccacaccgtcaggtactcctgccagggaactggcctgctgcgccccaggccccgcccgtctctgctctgctcagctgcgcccccttctttgcagc

SEQ ID NO: 443855 - DNA, 120 bp, Artificial Sequence
  ENSG00000154342_19 (sequence is synthesized)
tgcccagcccctcctccctgccctcgggtctccccacctgcactccatccagctacaggagagatagaagcctctcgtcccgtccctccctttcctccgcctgtccacagccccttaagg

SEQ ID NO: 443856 - DNA, 120 bp, Artificial Sequence
  ENSG00000154342_20 (sequence is synthesized)
gaaaggtaggaagagaggtccagccccccaggctgcccagagctgctggtctcatttgggggcgttcgggaggtttggggggcatcaaccccccgactgtgctgctcgcgaaggtcccac

SEQ ID NO: 443857 - DNA, 120 bp, Artificial Sequence
  ENSG00000154342_21 (sequence is synthesized)
agccctgagatgggccggcccccttcctggcccctcatggcgggactggagaaatggtccgctttcctggagccaatggcccggcccctcctgactcatccgcctggcccgggaatgaat

SEQ ID NO: 443858 - DNA, 120 bp, Artificial Sequence
  ENSG00000154342_22 (sequence is synthesized)
ggggaggccgctgaacccacccggcccatatccctggttgcctcatggccagcgcccctcagcctctgccactgtgaaccggctcccaccctcaaggtgcggggagaagaagcggccagg

SEQ ID NO: 443859 - DNA, 120 bp, Artificial Sequence
  ENSG00000154342_23 (sequence is synthesized)
cggggcgccccaagagcccaaaagagggcacaccgccatcctctgcctcaaattctgcgtttttggttttaatgttatatctgatgctgctatatccactgtccaacggagttagacgaa

SEQ ID NO: 443860 - DNA, 120 bp, Artificial Sequence
  ENSG00000154358_0 (sequence is synthesized)
atggatcagccacagttcagcggggcgccccgctttctcacccggcccaaggccttcgtggtgtcggtgggcaaggacgccaccctcagctgccagatcgtgggtaatcccacgccacag

SEQ ID NO: 443861 - DNA, 120 bp, Artificial Sequence
  ENSG00000154358_1 (sequence is synthesized)
gtgagctgggagaaggaccagcagccggtggcggccggcgcgcgcttccgtctggcccaggacggcgacctctaccgcctcactatcctggacctggcgctgggcgacagtgggcaatac

SEQ ID NO: 443862 - DNA, 120 bp, Artificial Sequence
  ENSG00000154358_2 (sequence is synthesized)
gtgtgccgcgcgcgcaatgccataggcgaggccttcgctgctgtgggcctgcaggtggacgcggaggccgcgtgcgccgagcaggcgccgcacttcctgctgcggcccacgtccatccgc

SEQ ID NO: 443863 - DNA, 120 bp, Artificial Sequence
  ENSG00000154358_3 (sequence is synthesized)
gtgcgcgagggctcagaggccaccttccgctgccgcgtgggtggctccccgaggccggcagtgagctggtccaaggacgggcggcgcctgggtgagcccgacggcccccgcgtgcgcgtg

SEQ ID NO: 443864 - DNA, 120 bp, Artificial Sequence
  ENSG00000154358_4 (sequence is synthesized)
gaggagctcggcgaggcaagtgcgctgcgcattcgggcggcgcggccgcgcgacggcggcacttacgaggtccgcgccgagaacccgctgggcgctgccagcgccgccgcggcgctagtg

SEQ ID NO: 443865 - DNA, 120 bp, Artificial Sequence
  ENSG00000154358_5 (sequence is synthesized)
cctccacggccgcgctcctggcgcacctgcagcggcggcgcgaggctatgcgcgccgagggcgcccccgcctcaccgcccagcaccggcacgcgcacctgcacggtgactgaaggcaagc

SEQ ID NO: 443866 - DNA, 120 bp, Artificial Sequence
  ENSG00000154358_6 (sequence is synthesized)
agcaccggcacgcgcacctgcacggtgactgaaggcaagcacgcgcgcctcagctgctacgtgaccggcgagcccaagcccgagacggtgtggaagaaggacggccagctggtgaccgag

SEQ ID NO: 443867 - DNA, 120 bp, Artificial Sequence
  ENSG00000154358_7 (sequence is synthesized)
ggccggcgccacgtggtgtacgaggacgcgcaggagaacttcgtgctcaagatcctcttctgcaagcagtcggaccgcggcctctacacctgcacggcgtccaacctcgtgggccagacc

SEQ ID NO: 443868 - DNA, 120 bp, Artificial Sequence
  ENSG00000154358_8 (sequence is synthesized)
tacagctctgtgctggtcgtagtgcgcgagcccgcggttcccttcaaaaagcggctgcaagatctggaggtgcgggagaaggagtcggccacgttcctatgtgaggtgccccagccgtcc

SEQ ID NO: 443869 - DNA, 120 bp, Artificial Sequence
  ENSG00000154358_9 (sequence is synthesized)
actgaggccgcgtggttcaaggaggagacgcggttgtgggcgagcgccaagtacggcatcgaggaggagggcaccgagcgccgcctgaccgtgcgcaatgtctcggccgacgacgacgcg

SEQ ID NO: 443870 - DNA, 120 bp, Artificial Sequence
  ENSG00000154358_10 (sequence is synthesized)
gtgtacatctgcgagacgccagagggcagccgcacggtggcggagctcgcagtccaaggaaacctcctccgaaagctccctcggaagacggcggtgcgcgtgggcgacacggctatgttt

SEQ ID NO: 443871 - DNA, 120 bp, Artificial Sequence
  ENSG00000154358_11 (sequence is synthesized)
tgcgtggagctggcggtcccggtgggccccgtccactggctgcggaaccaggaggaagtggtggcggggggccgcgtggccatctccgcggagggcacgcgccacacactaaccatctcc

SEQ ID NO: 443872 - DNA, 120 bp, Artificial Sequence
  ENSG00000154358_12 (sequence is synthesized)
cagtgctgcctggaggatgtgggccaggtggcctttatggctggcgactgccagacgtccacccagttctgcgtgtcggcccccaggaagcctcccctgcaaccccctgtggatcctgtg

SEQ ID NO: 443873 - DNA, 120 bp, Artificial Sequence
  ENSG00000154358_13 (sequence is synthesized)
gtaaaggccaggatggagagttccgtgattctcagctggtccccaccaccccatggggaacgccctgtcactatcgacggctacctggtagagaagaagaagcttggcacctacacctgg

SEQ ID NO: 443874 - DNA, 120 bp, Artificial Sequence
  ENSG00000154358_14 (sequence is synthesized)
atcaggtgccacgaggctgaatgggtggctacacctgagctgaccgtggctgatgtggcggaggaggggaacttccagttccgagtgtccgctctcaacagctttggtcagagtccctac

SEQ ID NO: 443875 - DNA, 120 bp, Artificial Sequence
  ENSG00000154358_15 (sequence is synthesized)
ctcgagttcccggggactgtccacctggcccccaagctggccgtgaggacaccgctgaaggcggtgcaggcggtagagggtggcgaggtcactttctccgtggacctcacggtggcctca

SEQ ID NO: 443876 - DNA, 120 bp, Artificial Sequence
  ENSG00000154358_16 (sequence is synthesized)
gcgggtgagtggttcctggatgggcaggccctgaaggccagcagtgtgtatgagatccactgtgatcgcacccggcacacgctcaccatccgggaggtgcccgccagcctgcacggggcg

SEQ ID NO: 443877 - DNA, 120 bp, Artificial Sequence
  ENSG00000154358_17 (sequence is synthesized)
cagctgaagttcgtggccaacggcattgagagcagcatccggatggaggtccgggcggccccagggctgactgccaacaagccgccagccgcagctgcccgggaggtgctggctcggctg

SEQ ID NO: 443878 - DNA, 120 bp, Artificial Sequence
  ENSG00000154358_18 (sequence is synthesized)
cacgaggaggcgcagctgctggctgagctgtcagatcaggctgcggctgtgacgtggctgaaggatggtcgcacactgtccccaggccccaagtatgaggtgcaggcatcggccgggcgg

SEQ ID NO: 443879 - DNA, 120 bp, Artificial Sequence
  ENSG00000154358_19 (sequence is synthesized)
cgggtgctccttgtgcgagatgtggcccgggacgatgcaggcctctacgagtgcgtcagccgcgggggccgcatcgcctaccagctctccgtgcaaggcctcgcgcgctttctgcacaag

SEQ ID NO: 443880 - DNA, 120 bp, Artificial Sequence
  ENSG00000154358_20 (sequence is synthesized)
gacatggcgggcagctgtgtggatgccgtggctgggggcccggcgcagtttgagtgtgagacctccgaagcccacgtccacgtgcactggtacaaggatggcatggagctgggccactcc

SEQ ID NO: 443881 - DNA, 120 bp, Artificial Sequence
  ENSG00000154358_21 (sequence is synthesized)
ggtgagcgcttcttgcaggaggatgtggggacgcggcaccggctggtggcagccacagtcaccaggcaggatgaaggcacctactcctgccgcgtgggcgaggactctgtggacttccgg

SEQ ID NO: 443882 - DNA, 120 bp, Artificial Sequence
  ENSG00000154358_22 (sequence is synthesized)
ctccgcgtctctgagcccaaggcggtgtttgccaaggagcagccggcgtgcagggaggtgcaggctgaggtgggggccagcgccacgctgagctgtgaggtggcccaggaccagatggag

SEQ ID NO: 443883 - DNA, 120 bp, Artificial Sequence
  ENSG00000154358_23 (sequence is synthesized)
gtgacgtggtacaaggacgggaagaagttgagctccagctcgaaagtgcacgtggaggctgtgggctgtatgcggaggctggtggtgcagcaggtgggccaggcagactccggagagtac

SEQ ID NO: 443884 - DNA, 120 bp, Artificial Sequence
  ENSG00000154358_24 (sequence is synthesized)
agctgtgaggccaggggacagagggtctccttccgcctggacgttgcagagcccaaggtggtgtttgctaaggagcagctggcacgcaggaagctgcaggcagaggcaggagccagtgcc

SEQ ID NO: 443885 - DNA, 120 bp, Artificial Sequence
  ENSG00000154358_25 (sequence is synthesized)
acactgagctgcgaggtggcccaggcccagacggaggtgacgtggtacaaggatgggaagaagctgagctccagctcgaaagtgtgcatggaggccacaggctgcacgcgcaggctggtt

SEQ ID NO: 443886 - DNA, 120 bp, Artificial Sequence
  ENSG00000154358_26 (sequence is synthesized)
gtgcagcaggcaggccaggcggatgccggggagtatagctgcgaggctgggggccagcggctctccttccatctggatgtcaaagagcccaaggtggtgtttgccaaggaccaggtggca

SEQ ID NO: 443887 - DNA, 120 bp, Artificial Sequence
  ENSG00000154358_27 (sequence is synthesized)
cacagtgaggtgcaggctgaggcaggggccagtgccacgctgagctgcgaggtggcccaggcccagacggaggtgatgtggtacaaagatgggaagaagctgagctccagcttgaaagtg

SEQ ID NO: 443888 - DNA, 120 bp, Artificial Sequence
  ENSG00000154358_28 (sequence is synthesized)
catgtagaggccaagggctgcagacggaggctggtggtgcagcaggcaggcaagacagatgccggggactacagctgcgaggccaggggccagagggtctccttccgcctgcacatcaca

SEQ ID NO: 443889 - DNA, 120 bp, Artificial Sequence
  ENSG00000154358_29 (sequence is synthesized)
gagcccaagatgatgtttgcaaaggagcagtcagtgcataatgaggtgcaggctgaggcgggggccagtgccatgctgagctgtgaggtggcccaggcccagacggaggtgacgtggtac

SEQ ID NO: 443890 - DNA, 120 bp, Artificial Sequence
  ENSG00000154358_30 (sequence is synthesized)
aaggatgggaagaagctgagctccagctcaaaagtgggcatggaggtcaaagggtgcacacggaggctggtgctgccacaggcgggcaaagcagatgctggggagtacagctgtgaggct

SEQ ID NO: 443891 - DNA, 120 bp, Artificial Sequence
  ENSG00000154358_31 (sequence is synthesized)
gggggccagagagtctccttccacctgcacatcacagagcccaagggggtgtttgcgaaggagcagtcagtgcataatgaggtgcaggctgaggcggggaccactgccatgctgagctgt

SEQ ID NO: 443892 - DNA, 120 bp, Artificial Sequence
  ENSG00000154358_32 (sequence is synthesized)
gaggtggcccagccccagacagaggtgacgtggtacaaggacgggaagaagctgagctccagctcaaaagtacgcatggaggtcaagggctgcacacgaaggctggtagtgcagcaggtg

SEQ ID NO: 443893 - DNA, 120 bp, Artificial Sequence
  ENSG00000154358_33 (sequence is synthesized)
ggcaaagcagatgctggggagtacagctgcgaggctgggggccagagagtctcctttcaactgcacatcacagagcccaaggcagtgtttgccaaggagcagttggtgcataatgaggtg

SEQ ID NO: 443894 - DNA, 120 bp, Artificial Sequence
  ENSG00000154358_34 (sequence is synthesized)
cggactgaggcaggggccagtgccacactgagctgtgaggtggcccaggcccagacagaggtgacgtggtacaaggatgggaagaagctgagctccagttcgaaagtgcgcatagaggct

SEQ ID NO: 443895 - DNA, 120 bp, Artificial Sequence
  ENSG00000154358_35 (sequence is synthesized)
gcgggctgcatgcggcagctggtggtgcagcaggcaggccaggcagatgctggggagtacacctgtgaggctgggggccagcggctctccttccacctggatgtttcagagcccaaggcg

SEQ ID NO: 443896 - DNA, 120 bp, Artificial Sequence
  ENSG00000154358_36 (sequence is synthesized)
gtgtttgcaaaggagcagctggcacacaggaaggtgcaggccgaggcgggggccattgccacgctgagctgcgaggtggcccaggcccagacagaggtgacgtggtacaaggacgggaag

SEQ ID NO: 443897 - DNA, 120 bp, Artificial Sequence
  ENSG00000154358_37 (sequence is synthesized)
aagctgagctccagctcgaaagttcgaatggaggctgtgggctgcacacggaggctggtggtgcagcaggcatgccaggcggacaccggggagtatagctgcgaggccgggggccagcgg

SEQ ID NO: 443898 - DNA, 120 bp, Artificial Sequence
  ENSG00000154358_38 (sequence is synthesized)
ctctccttcagcctggacgtggcagagcccaaggtggtgtttgccaaggagcagccagtgcacagggaggtgcaggcccaggcgggggccagcaccacactcagctgcgaggtggctcag

SEQ ID NO: 443899 - DNA, 120 bp, Artificial Sequence
  ENSG00000154358_39 (sequence is synthesized)
gcccagacggaggtgatgtggtacaaggacgggaagaagctgagcttcagctcgaaagtgcgcatggaggctgtgggctgcacacggaggctggtggtgcagcaggcgggccaggcggtc

SEQ ID NO: 443900 - DNA, 120 bp, Artificial Sequence
  ENSG00000154358_40 (sequence is synthesized)
gccggggagtacagctgcgaggcggggagccagcggctctccttccacctgcacgtggcagagcccaaggcggtgtttgctaaggagcagccagcacacagggaggtgcaggctgaagca

SEQ ID NO: 443901 - DNA, 120 bp, Artificial Sequence
  ENSG00000154358_41 (sequence is synthesized)
ggggctagcgccacactgagctgtgaggtggcccaggcccagacagaggtgacttggtacaaggacgggaagaagctgagctccagcttgaaagtgcatgtggaggctgcaggctgtaca

SEQ ID NO: 443902 - DNA, 120 bp, Artificial Sequence
  ENSG00000154358_42 (sequence is synthesized)
cggaggctggtggtgcagcaggcaggccaggcagacaccggagagtatagctgtgaggctgggggccagcagctctccttccgcctgcaagtggcagagcccaaggcggtgtttgccaag

SEQ ID NO: 443903 - DNA, 120 bp, Artificial Sequence
  ENSG00000154358_43 (sequence is synthesized)
gagcagccagcgagcagggaggtgcaggctgaggcggggaccagtgccacgctgagctgcgaggtggcccaggcccagacagaggtgacgtggtacaaggacgggaagaaactgagctcc

SEQ ID NO: 443904 - DNA, 120 bp, Artificial Sequence
  ENSG00000154358_44 (sequence is synthesized)
agctcgaaagtgcgaatggaggccgtgggctgcacacggaggctggtggtgcaggaggcaggccaggcggacgccggggagtacagctgcaaggccggggatcagcggctgtccttccac

SEQ ID NO: 443905 - DNA, 120 bp, Artificial Sequence
  ENSG00000154358_45 (sequence is synthesized)
ctgcacgtggcagagcccaaggtggtgtttgccaaggagcagccagcacacagggaggtgcaggctgaggcgggggccagtgccacgctgagctgcgaggtggcccaggcccagacagag

SEQ ID NO: 443906 - DNA, 120 bp, Artificial Sequence
  ENSG00000154358_46 (sequence is synthesized)
gtgacgtggtacaaggatgggaagaagctgagttccagctcgaaagtgcgcgtggaggccgtgggctgcacacggaggctggtggtgcagcaggcgggccaggcagaggccggggagtac

SEQ ID NO: 443907 - DNA, 120 bp, Artificial Sequence
  ENSG00000154358_47 (sequence is synthesized)
agctgcgaggcagggggtcagcagctctccttccgcctgcaggtggcagagcccaaggcggtgtttgccaaggagcaggtggtgtttgccaaggatcagccggtgcacagggaggtgcag

SEQ ID NO: 443908 - DNA, 120 bp, Artificial Sequence
  ENSG00000154358_48 (sequence is synthesized)
gctgaggcagggaccagcaccatgctgagctgcgaggtggcccaagcccagacggaggttatgtggtacaaggacgggaagaagctgagctccagctcgaaaatgcgtgtggaggccgtg

SEQ ID NO: 443909 - DNA, 120 bp, Artificial Sequence
  ENSG00000154358_49 (sequence is synthesized)
ggctgcacacggaggctggtggtgcaggaggcaggccaggcggacgccggggagtacagctgcgaggctgggggccagcggctctccttccatctgcatgtggctgagcccaaggtggtg

SEQ ID NO: 443910 - DNA, 120 bp, Artificial Sequence
  ENSG00000154358_50 (sequence is synthesized)
tttgccaaggagcagccggcatgcagggaggtgcaggcggaggcgggggccagtgccacgctgagctgtgaggtggcccagggccagatggaggtgacatggtacaaggacgggaagaag

SEQ ID NO: 443911 - DNA, 120 bp, Artificial Sequence
  ENSG00000154358_51 (sequence is synthesized)
ctgagctccagctcaaaagtgcacatggaggccagcggctacacacggaggctggtagtgcagcaggcgggccaggcggatgctggggagtacagctgtgaggcggggggccaacggctg

SEQ ID NO: 443912 - DNA, 120 bp, Artificial Sequence
  ENSG00000154358_52 (sequence is synthesized)
tccttccgcctgcacgtggcagagctggagccccaaatttcagagagaccctgccgcagggagcctctggtggtcaaggagcatgaagacatcatcctgaccgccacactggccacaccc

SEQ ID NO: 443913 - DNA, 120 bp, Artificial Sequence
  ENSG00000154358_53 (sequence is synthesized)
tctgcggccacggtgacctggctcaaggatggtgtggagattcgccgcagcaagcggcatgagacagccagccagggggacacccacaccctgaccgtgcatggcgcccaggttctggac

SEQ ID NO: 443914 - DNA, 120 bp, Artificial Sequence
  ENSG00000154358_54 (sequence is synthesized)
agcgccatctacagctgccgtgtgggcgcagaggggcaggacttcccagtgcaggtggaagaggtggccgccaagttctgccggctgctggagcctgtgtgcggcgagctgggtggcacg

SEQ ID NO: 443915 - DNA, 120 bp, Artificial Sequence
  ENSG00000154358_55 (sequence is synthesized)
gtgacactggcctgcgagctaagcccagcgtgtgcagaggtggtgtggcgctgcggcaacacgcagcttcgggtgggcaagcgcttccagatggtggccgaggggcccgtgcgctcactc

SEQ ID NO: 443916 - DNA, 120 bp, Artificial Sequence
  ENSG00000154358_56 (sequence is synthesized)
actgtgttggggctgcgcgcagaggacgcaggggagtacgtgtgtgagagccgtgatgaccacaccagtgcgcagctcaccgtcagtgtgccccgagtggtgaagtttatgtctgggctg

SEQ ID NO: 443917 - DNA, 120 bp, Artificial Sequence
  ENSG00000154358_57 (sequence is synthesized)
agcaccgtggtcgcagaggagggcggcgaggccaccttccagtgcgtggtgtcccccagtgatgtggcagtcgtgtggttccgggacggtgccctgcttcagcccagcgagaagtttgcc

SEQ ID NO: 443918 - DNA, 120 bp, Artificial Sequence
  ENSG00000154358_58 (sequence is synthesized)
atatcacagagtggcgccagccacagcctgaccatctcagacctggtgctggaggacgcgggccagatcaccgtggaggctgagggcgcctcatcctctgctgccctgagggtccgagag

SEQ ID NO: 443919 - DNA, 120 bp, Artificial Sequence
  ENSG00000154358_59 (sequence is synthesized)
gcgcctgtgctgttcaaaaagaagctggagccgcagacggtggaggagcggagctcggtgaccctggaggtggagctgacgcggccgtggccggagctgaggtggacacggaacgcgacg

SEQ ID NO: 443920 - DNA, 120 bp, Artificial Sequence
  ENSG00000154358_60 (sequence is synthesized)
gccctggcgccgggaaagaacgtggagatccacgccgagggcgcccgccaccgcctggttctgcacaacgtaggttttgccgaccgtggcttctttggctgcgagacgccggatgacaag

SEQ ID NO: 443921 - DNA, 120 bp, Artificial Sequence
  ENSG00000154358_61 (sequence is synthesized)
acacaggccaaactcaccgtggagatgcgccaggtacggctcgtacggggcctgcaggcagtggaggcacgggagcagggcacggctaccatggaggtgcagctgtcgcatgcggacgtg

SEQ ID NO: 443922 - DNA, 120 bp, Artificial Sequence
  ENSG00000154358_62 (sequence is synthesized)
gatggcagctggactcgtgacggtctgcggttccagcaggggcccacgtgccacctggctgtgcggggccccatgcacaccctcacactctcggggctgcggccagaggatagtggcctt

SEQ ID NO: 443923 - DNA, 120 bp, Artificial Sequence
  ENSG00000154358_63 (sequence is synthesized)
atggtcttcaaggccgaaggagtgcacacgtcggcgcggctcgtggtcaccgagcttcccgtgagcttcagccgcccgctgcaggacgtggtgaccactgagaaggagaaggttaccctg

SEQ ID NO: 443924 - DNA, 120 bp, Artificial Sequence
  ENSG00000154358_64 (sequence is synthesized)
gagtgcgagctgtcgcgtcctaatgtggatgtgcgctggctgaaggacggtgtggagctgcgggcaggcaagacgatggccatcgcagcccagggcgcctgcaggagcctcaccatttac

SEQ ID NO: 443925 - DNA, 120 bp, Artificial Sequence
  ENSG00000154358_65 (sequence is synthesized)
cggtgcgagttcgcggatcagggagtgtatgtgtgtgatgcccatgatgcccagagctctgcctccgtgaaggtacaaggccgcaacatccagatcgtgaggcccctggaggatgtggaa

SEQ ID NO: 443926 - DNA, 120 bp, Artificial Sequence
  ENSG00000154358_66 (sequence is synthesized)
gtgatggagaaggacggtgccaccttctcctgtgaggtctcccacgacgaagtgcctggccagtggttctgggagggcagtaaactgcggcccactgacaacgtgcgcatccgccaggaa

SEQ ID NO: 443927 - DNA, 120 bp, Artificial Sequence
  ENSG00000154358_67 (sequence is synthesized)
ggaaggacatacactctcatctaccggagagtcctggcggaagatgcaggagagatccaatttgtagccgaaaatgcagaatcgcgagcccagctccgagtgaaggagctgccagtgacc

SEQ ID NO: 443928 - DNA, 120 bp, Artificial Sequence
  ENSG00000154358_68 (sequence is synthesized)
ctcgtgcgcccgctgcgggacaagattgccatggagaagcaccgcggtgtgctggagtgtcaggtgtcccgggccagcgcccaggtgcggtggttcaagggcagtcaggagctgcagccc

SEQ ID NO: 443929 - DNA, 120 bp, Artificial Sequence
  ENSG00000154358_69 (sequence is synthesized)
gggcccaagtacgagctggtcagtgatggcctctaccgcaagctgatcatcagtgatgtccacgcagaggacgaggacacctacacctgtgacgccggtgatgtcaagaccagtgcacag

SEQ ID NO: 443930 - DNA, 120 bp, Artificial Sequence
  ENSG00000154358_70 (sequence is synthesized)
ttcttcgtggaagagcaatccatcaccattgtgcggggtctgcaggacgtgacagtgatggagcccgctcctgcctggtttgagtgtgagacctccatcccctcagtgcggccacctaag

SEQ ID NO: 443931 - DNA, 120 bp, Artificial Sequence
  ENSG00000154358_71 (sequence is synthesized)
tggctcctggggaagacggtgttgcaggctggggggaacgtgggcctggagcaggagggcacggtgcaccggctgatgctgcggcggacctgctccaccatgaccgggcccgtgcacttc

SEQ ID NO: 443932 - DNA, 120 bp, Artificial Sequence
  ENSG00000154358_72 (sequence is synthesized)
accgttggcaagtcgcgctcctctgcccgcctggtggtctcagacatccccgtagtcctcacacggccgttggagcccaagacagggcgtgagctgcagtcagtggtcctgtcctgcgac

SEQ ID NO: 443933 - DNA, 120 bp, Artificial Sequence
  ENSG00000154358_73 (sequence is synthesized)
ttccggccagcccccaaggctgtgcagtggtacaaggatgacacgcccctgtctccctctgagaagtttaagatgagcctggagggtcagatggctgagctgcgcatcctccggctcatg

SEQ ID NO: 443934 - DNA, 120 bp, Artificial Sequence
  ENSG00000154358_74 (sequence is synthesized)
cctgctgatgctggtgtctaccggtgccaggcgggcagtgcccacagcagcactgaggtcactgtggaagcgcgggaggtgacagtgacagggccgctacaggatgcagaggccacggag

SEQ ID NO: 443935 - DNA, 120 bp, Artificial Sequence
  ENSG00000154358_75 (sequence is synthesized)
gagggctgggccagcttctcctgtgagctgtcccacgaggatgaggaggtcgagtggtcgctcaacgggatgcccctgtacaacgacagcttccatgagatctcacacaagggccggcgc

SEQ ID NO: 443936 - DNA, 120 bp, Artificial Sequence
  ENSG00000154358_76 (sequence is synthesized)
cacacgctggtactgaagagcatccagcgggctgatgcgggcatagtacgcgcctcctccctgaaggtgtcgacctctgcccgcctggaggtccgagtgaagccggtggtgttcctgaag

SEQ ID NO: 443937 - DNA, 120 bp, Artificial Sequence
  ENSG00000154358_77 (sequence is synthesized)
gcgctggatgacctgtccgcagaggagcgcggcaccctggccctgcagtgtgaagtctctgaccccgaggcccatgtggtgtggcgcaaagatggcgtgcagctgggccccagtgacaag

SEQ ID NO: 443938 - DNA, 120 bp, Artificial Sequence
  ENSG00000154358_78 (sequence is synthesized)
tatgacttcctgcacacggcgggcacgcgggggctcgtggtgcatgacgtgagccctgaagacgccggcctgtacacctgccacgtgggctccgaggagacccgggcccgggtccgcgtg

SEQ ID NO: 443939 - DNA, 120 bp, Artificial Sequence
  ENSG00000154358_79 (sequence is synthesized)
cacgatctgcacgtgggcatcaccaagaggctgaagacaatggaggtgctggaaggggaaagctgcagctttgagtgcgtcctgtcccacgagagtgccagcgacccggccatgtggaca

SEQ ID NO: 443940 - DNA, 120 bp, Artificial Sequence
  ENSG00000154358_80 (sequence is synthesized)
gtcggtgggaagacagtgggcagctccagccgcttccaggccacacgtcagggccgaaaatacatcctggtggtccgggaggctgcaccaagtgatgccggggaggtggtcttctctgtg

SEQ ID NO: 443941 - DNA, 120 bp, Artificial Sequence
  ENSG00000154358_81 (sequence is synthesized)
cggggcctcacctccaaggcctcactcattgtcagagagaggccggccgccatcatcaagcccctggaagaccagtgggtggcgccaggggaggacgtggagctgcgctgtgagctgtca

SEQ ID NO: 443942 - DNA, 120 bp, Artificial Sequence
  ENSG00000154358_82 (sequence is synthesized)
cgggcgggaacgcccgtgcactggctgaaggacaggaaggccatccgcaagagccagaagtatgatgtggtctgcgagggcacgatggccatgctggtcatccgcggggcctcgctcaag

SEQ ID NO: 443943 - DNA, 120 bp, Artificial Sequence
  ENSG00000154358_83 (sequence is synthesized)
gacgcgggcgagtacacgtgtgaggtggaggcttccaagagcacagccagcctccatgtggaagaaaaagcaaactgcttcacagaggagctgaccaatctgcaggtggaggagaaaggc

SEQ ID NO: 443944 - DNA, 120 bp, Artificial Sequence
  ENSG00000154358_84 (sequence is synthesized)
acagctgtgttcacgtgcaagacggagcaccccgcggccacagtgacctggcgcaagggcctcttggagctacgggcctcagggaagcaccagcccagccaggagggcctgaccctgcgg

SEQ ID NO: 443945 - DNA, 120 bp, Artificial Sequence
  ENSG00000154358_85 (sequence is synthesized)
ctcaccatcagtgccctggagaaggcagacagcgacacctatacctgcgacattggccaggcccagtcccgggcccagctcctagtgcaaggccggagagtgcacatcatcgaggacctg

SEQ ID NO: 443946 - DNA, 120 bp, Artificial Sequence
  ENSG00000154358_86 (sequence is synthesized)
gaggatgtggatgtgcaggagggctcctcggccaccttccgttgccggatctccccggccaactacgagcctgtgcactggttcctggacaagacacccctgcatgccaacgagctcaat

SEQ ID NO: 443947 - DNA, 120 bp, Artificial Sequence
  ENSG00000154358_87 (sequence is synthesized)
gagatcgatgcccagcccgggggctaccacgtgctgaccctgcggcagctggcgctcaaggactcgggcaccatctactttgaggcgggtgaccagcgggcctcggccgccctgcgggtc

SEQ ID NO: 443948 - DNA, 120 bp, Artificial Sequence
  ENSG00000154358_88 (sequence is synthesized)
actgagaagccaagcgtcttctcccgggagctcacagatgccaccatcacagagggtgaggacttgaccctggtgtgcgagaccagcacctgcgacattcctgtgtgctggaccaaggat

SEQ ID NO: 443949 - DNA, 120 bp, Artificial Sequence
  ENSG00000154358_89 (sequence is synthesized)
gggaagaccctgcgggggtctgcccggtgccagctgagccatgagggccaccgggcccagctgctcatcactggggccaccctgcaggacagtggacgctacaagtgtgaggctgggggc

SEQ ID NO: 443950 - DNA, 120 bp, Artificial Sequence
  ENSG00000154358_90 (sequence is synthesized)
gcctgcagcagctccattgtcagggtgcatgcgcggccagtgcggttccaggaggccctgaaggacctggaggtgctggagggtggtgctgccacactgcgctgtgtgctgtcatctgtg

SEQ ID NO: 443951 - DNA, 120 bp, Artificial Sequence
  ENSG00000154358_91 (sequence is synthesized)
gctgcgcccgtgaagtggtgctatggaaacaacgtcctgaggccaggtgacaaatacagcctacgccaggagggtgccatgctggagctggtggtccggaacctccggccgcaggacagc

SEQ ID NO: 443952 - DNA, 120 bp, Artificial Sequence
  ENSG00000154358_92 (sequence is synthesized)
gggcggtactcatgctccttcggggaccagactacttctgccaccctcacagtgactgccctgcctgcccagttcatcgggaaactgagaaacaaggaggccacagaaggggccacggcc

SEQ ID NO: 443953 - DNA, 120 bp, Artificial Sequence
  ENSG00000154358_93 (sequence is synthesized)
acgctgcggtgtgagctgagcaaggcagcccctgtggagtggagaaaggggtccgagaccctcagagatggggacagatactgtctgaggcaggacggggccatgtgtgagctgcagatc

SEQ ID NO: 443954 - DNA, 120 bp, Artificial Sequence
  ENSG00000154358_94 (sequence is synthesized)
cgtggcctggccatggtggatgccgcggagtactcgtgtgtgtgtggagaggagaggacctcagcctcactcaccatcaggcccatgcctgcccacttcataggaagactgagacaccaa

SEQ ID NO: 443955 - DNA, 120 bp, Artificial Sequence
  ENSG00000154358_95 (sequence is synthesized)
gagagcatagaaggggccacagccacgctgcggtgtgagctgagcaaggcggcccccgtggagtggaggaaggggcgtgagagcctcagagatggggacagacatagcctgaggcaggac

SEQ ID NO: 443956 - DNA, 120 bp, Artificial Sequence
  ENSG00000154358_96 (sequence is synthesized)
ggggctgtgtgcgagctgcagatctgtggcctggctgtggcagatgctggggagtactcctgtgtgtgtggggaggagaggacctctgccactctcaccgtgaaggccctgccagccaag

SEQ ID NO: 443957 - DNA, 120 bp, Artificial Sequence
  ENSG00000154358_97 (sequence is synthesized)
ttcacagagggtctgaggaatgaagaggccgtggaaggggccacagccatgttgtggtgtgaactgagcaaggtggcccctgtggagtggaggaaggggcccgagaacctcagagatggg

SEQ ID NO: 443958 - DNA, 120 bp, Artificial Sequence
  ENSG00000154358_98 (sequence is synthesized)
gacagatacatcctgaggcaggaggggaccaggtgtgagctgcagatctgtggcctggccatggcggacgccggggagtacttgtgtgtgtgcgggcaggagaggacctcagccacgctc

SEQ ID NO: 443959 - DNA, 120 bp, Artificial Sequence
  ENSG00000154358_99 (sequence is synthesized)
accatcagggctctgcctgccaggttcatagaagatgtgaaaaaccaggaggccagagaaggggccacagctgtgctgcagtgtgagctgaacagtgcagcccctgtggagtggagaaag

SEQ ID NO: 443960 - DNA, 120 bp, Artificial Sequence
  ENSG00000154358_100 (sequence is synthesized)
gggtctgagacccttagagatggggacagatacagcctgaggcaggacgggactaaatgtgagctgcagattcgtggcctggccatggcagacactggggagtactcgtgcgtgtgcggg

SEQ ID NO: 443961 - DNA, 120 bp, Artificial Sequence
  ENSG00000154358_101 (sequence is synthesized)
caggagaggacctcggctatgctcaccgtcagggctctacccatcaagttcacagagggtctgaggaacgaagaggccacagaaggggcaacagccgtgctgcggtgtgagctgagcaag

SEQ ID NO: 443962 - DNA, 120 bp, Artificial Sequence
  ENSG00000154358_102 (sequence is synthesized)
atggcccccgtggagtggtggaaggggcatgagaccctcagagatggagacagacacagcctgaggcaggacggggccaggtgtgagctgcagatccgcggcctcgtggcagaggacgct

SEQ ID NO: 443963 - DNA, 120 bp, Artificial Sequence
  ENSG00000154358_103 (sequence is synthesized)
ggggagtacctgtgcatgtgcgggaaggagaggacctcagccatgctcaccgtcagggccatgccttccaagttcatagagggtctgaggaatgaagaggccacagaaggggacacggcc

SEQ ID NO: 443964 - DNA, 120 bp, Artificial Sequence
  ENSG00000154358_104 (sequence is synthesized)
acgctgtggtgtgagctgagcaaggcggcaccggtggagtggaggaaggggcatgagaccctcagagatggggacagacacagcctgaggcaggacgggtccaggtgtgagctgcagatc

SEQ ID NO: 443965 - DNA, 120 bp, Artificial Sequence
  ENSG00000154358_105 (sequence is synthesized)
cgtggcctggctgtggtggatgccggggagtactcgtgtgtgtgcgggcaggagaggacctcagccacactcactgtcagggccctgcctgccagattcatagaagatgtgaaaaaccag

SEQ ID NO: 443966 - DNA, 120 bp, Artificial Sequence
  ENSG00000154358_106 (sequence is synthesized)
gaggccagagaaggggccacggccgtgctgcaatgtgagctgagcaaggcggcccccgtggagtggaggaaggggtctgagaccctcagaggtggggacagatacagcctgaggcaggat

SEQ ID NO: 443967 - DNA, 120 bp, Artificial Sequence
  ENSG00000154358_107 (sequence is synthesized)
gggaccagatgtgagctgcagattcatggcctgtctgtggcagacactggggagtactcgtgtgtgtgcgggcaggagaggacctcggccacactcaccgtcagggccctgcctgcacga

SEQ ID NO: 443968 - DNA, 120 bp, Artificial Sequence
  ENSG00000154358_108 (sequence is synthesized)
ttcactcaagatctgaagaccaaggaggcctcagaaggggccacagctacactgcagtgtgagctgagcaaggtggcccctgtggaatggaagaagggtcctgagaccctcagagatggg

SEQ ID NO: 443969 - DNA, 120 bp, Artificial Sequence
  ENSG00000154358_109 (sequence is synthesized)
ggcagatacagcctgaagcaggatgggacgaggtgtgagctgcagatccatgacctgtctgtggcggatgctggggaatactcatgcatgtgtggacaagagaggacctcggccacgctc

SEQ ID NO: 443970 - DNA, 120 bp, Artificial Sequence
  ENSG00000154358_110 (sequence is synthesized)
actgtcagggccctgcctgccaggttcacagagggtctgaggaatgaagaggccatggaaggggccacagccacactgcaatgtgagctgagcaaggcagcccctgtggagtggaggaaa

SEQ ID NO: 443971 - DNA, 120 bp, Artificial Sequence
  ENSG00000154358_111 (sequence is synthesized)
ctcagagatggggacaaatacagcctgagacaagacggggctgtgtgtgagctgcagattcatggcctggctatggcagataacggggtgtactcatgtgtgtgtgggcaggagaggacc

SEQ ID NO: 443972 - DNA, 120 bp, Artificial Sequence
  ENSG00000154358_112 (sequence is synthesized)
tcagctacactcactgtcagggccctgcctgccagattcatagaggatatgagaaaccagaaggccacagaaggggctacagtcacattgcaatgtaagctgagaaaggcggcccccgtg

SEQ ID NO: 443973 - DNA, 120 bp, Artificial Sequence
  ENSG00000154358_113 (sequence is synthesized)
gagtggagaaaggggcccaacaccctcaaagatggggacaggtacagcctgaagcaggatgggaccagttgtgagctgcagattcgtggcctggtcatagcagatgctggagaatactcg

SEQ ID NO: 443974 - DNA, 120 bp, Artificial Sequence
  ENSG00000154358_114 (sequence is synthesized)
tgcatatgtgagcaggagaggacctcggccacgctcactgtcagggccctgccggccagattcatagaagatgtgagaaatcacgaggccacagaaggggccacagctgtgctgcagtgt

SEQ ID NO: 443975 - DNA, 120 bp, Artificial Sequence
  ENSG00000154358_115 (sequence is synthesized)
gagctgagcaaggcggcccccgtggagtggcggaaggggtctgagaccctcagagatggggacagatatagcctgaggcaggacgggacgaggtgtgagctgcagattcgtggcctggct

SEQ ID NO: 443976 - DNA, 120 bp, Artificial Sequence
  ENSG00000154358_116 (sequence is synthesized)
gtggaggacactggagagtatttgtgtgtgtgcgggcaggagagaacctcagctacactcactgtcagggccctgccagccagattcatagacaacatgacaaaccaggaggccagagaa

SEQ ID NO: 443977 - DNA, 120 bp, Artificial Sequence
  ENSG00000154358_117 (sequence is synthesized)
ggggccacggccacactgcactgtgaactgagcaaggtggcccctgtggagtggaggaagggacctgaaaccctccgagatggggacagacacagcctgaggcaggatgggaccaggtgt

SEQ ID NO: 443978 - DNA, 120 bp, Artificial Sequence
  ENSG00000154358_118 (sequence is synthesized)
gagctgcagattcgtggcctgtctgtggcagatgccggggagtactcgtgcgtgtgtgggcaggagaggacctcagccacactcacgatcagggccctgcccgccaagttcacaaagggt

SEQ ID NO: 443979 - DNA, 120 bp, Artificial Sequence
  ENSG00000154358_119 (sequence is synthesized)
ctgaggaatgaagaggccacagaaggggccacggctatgttgcagtgtgagctgagcaaggtggcccctgttgagtggaggaagggacctgaaaccctcagagatggggacagatacaac

SEQ ID NO: 443980 - DNA, 120 bp, Artificial Sequence
  ENSG00000154358_120 (sequence is synthesized)
ctgaggcaggatgggaccagatgtgagctgcagattcatggcctgtccgtggcagacactggggagtactcatgtgtatgtggtcaggagaagacgtcggccactctcactgtcaaggcc

SEQ ID NO: 443981 - DNA, 120 bp, Artificial Sequence
  ENSG00000154358_121 (sequence is synthesized)
ccacagccagtgttccgggagccgctgcagagtctgcaggcggaggagggctccacggccaccctgcagtgtgagctgtctgagcccactgctacagtggtctggagcaagggtggcctg

SEQ ID NO: 443982 - DNA, 120 bp, Artificial Sequence
  ENSG00000154358_122 (sequence is synthesized)
cagctgcaggccaatgggcgccgggagccacggcttcagggctgcaccgcggagctggtgttacaggacctacaacgtgaagacactggcgaatacacttgcacctgtggctcccaggcc

SEQ ID NO: 443983 - DNA, 120 bp, Artificial Sequence
  ENSG00000154358_123 (sequence is synthesized)
accagtgccaccctcactgtcacagctgcgcctgtgcggttcctccgagagctgcagcaccaggaggtggatgagggaggcaccgcacacttatgctgcgagctgagccgggcgggtgcg

SEQ ID NO: 443984 - DNA, 120 bp, Artificial Sequence
  ENSG00000154358_124 (sequence is synthesized)
agcgtggagtggcgcaagggctccctacagctcttcccttgtgccaagtaccagatggtgcaggatggtgcagctgcagagctgctggtacgcggagtggagcaggaggatgcgggtgac

SEQ ID NO: 443985 - DNA, 120 bp, Artificial Sequence
  ENSG00000154358_125 (sequence is synthesized)
tacacgtgtgacacgggccacacgcagagcatggccagcctctctgtccgtgtccccaggcccaagttcaagacccggcttcagagtctggagcaggagacaggtgacatagcccggctg

SEQ ID NO: 443986 - DNA, 120 bp, Artificial Sequence
  ENSG00000154358_126 (sequence is synthesized)
tgctgtcagctgagtgatgcagagtcgggggccgtggtgcaatggctcaaggagggcgtggagctgcatgcgggccccaagtacgagatgcggagccagggggccacgcgggagctgctg

SEQ ID NO: 443987 - DNA, 120 bp, Artificial Sequence
  ENSG00000154358_127 (sequence is synthesized)
atccaccaactggaggccaaggacacgggcgagtatgcctgtgtgacaggcggccagaaaaccgctgcctccctcagggtcacagagcctgaggtgaccattgtacgggggctggttgat

SEQ ID NO: 443988 - DNA, 120 bp, Artificial Sequence
  ENSG00000154358_128 (sequence is synthesized)
gcggaggtgacggccgatgaggatgttgagttcagctgtgaggtgtccagggctggagccacaggcgtgcagtggtgcctacagggcctgccactgcaaagcaatgaggtgacagaggtg

SEQ ID NO: 443989 - DNA, 120 bp, Artificial Sequence
  ENSG00000154358_129 (sequence is synthesized)
gctgtgcgggatggccgcatccacaccctgcggctgaagggcgtgacgcccgaggacgctggcactgtctccttccatttgggaaaccatgcttcctctgcccagctcaccgtcagagct

SEQ ID NO: 443990 - DNA, 120 bp, Artificial Sequence
  ENSG00000154358_130 (sequence is synthesized)
cctgaggtgaccatcctggagcccctgcaggacgtgcagctcagtgagggccaggatgccagcttccagtgccggctatccagagcttcaggccaggaggcccgctgggctttaggaggg

SEQ ID NO: 443991 - DNA, 120 bp, Artificial Sequence
  ENSG00000154358_131 (sequence is synthesized)
gtgcccctgcaggccaacgagatgaatgacatcactgtggagcagggcacactccacctgctcaccctgcacaaggtgacccttgaggatgctggaactgtcagtttccacgtgggcacg

SEQ ID NO: 443992 - DNA, 120 bp, Artificial Sequence
  ENSG00000154358_132 (sequence is synthesized)
tgtagctctgaggcccagctgaaagtcacagccaagaacacggtggtgcgggggctggagaatgtggaggcgctggagggcggcgaggcgctgttcgagtgccagctgtcccagcccgag

SEQ ID NO: 443993 - DNA, 120 bp, Artificial Sequence
  ENSG00000154358_133 (sequence is synthesized)
gtggccgcccacacctggctgctggacgacgaacccgtgcacacctcggagaacgccgaggtggtcttcttcgagaacggcctgcgccacctgctgctgctcaaaaacttgcggccacaa

SEQ ID NO: 443994 - DNA, 120 bp, Artificial Sequence
  ENSG00000154358_134 (sequence is synthesized)
gacagctgccgggtgaccttcctggctggggatatggtgacgtccgcattcctcacggtccgaggctggcgcctggagatcctggagcctctgaaaaacgcggcggtccgggccggcgca

SEQ ID NO: 443995 - DNA, 120 bp, Artificial Sequence
  ENSG00000154358_135 (sequence is synthesized)
caggcatgcttcacctgcacgctcagcgaggcggtgcccgtgggagaggcgtcctggtacatcaatggcgcggcagtgcagccggatgacagcgactggactgtcaccgccgacggcagt

SEQ ID NO: 443996 - DNA, 120 bp, Artificial Sequence
  ENSG00000154358_136 (sequence is synthesized)
caccacgccctactgctgcgcagcgcccagccccaccacgccggggaggtcaccttcgcttgccgcgacgccgtggcctctgcgcggctcaccgtgctgggcctccctgatcccccagag

SEQ ID NO: 443997 - DNA, 120 bp, Artificial Sequence
  ENSG00000154358_137 (sequence is synthesized)
gatgctgaggtggtggctcgcagcagccacactgtgacactgtcttgggcagctcccatgagtgatggaggcggtggtctctgtggctaccgcgtggaggtgaaggagggggccacaggc

SEQ ID NO: 443998 - DNA, 120 bp, Artificial Sequence
  ENSG00000154358_138 (sequence is synthesized)
cagtggcggctgtgccacgagctggtgcctggacccgagtgtgtggtggatggcctggcccccggggagacctaccgcttccgtgtggcagctgtgggccctgtgggtgctggggaaccg

SEQ ID NO: 443999 - DNA, 120 bp, Artificial Sequence
  ENSG00000154358_139 (sequence is synthesized)
gttcacctgccccagacagtgcggcttgcagagccaccgaagcctgtgcctccccagccctcagcccctgagagccggcaggtggcagctggtgaagatgtctctctggagcttgaggtg

SEQ ID NO: 444000 - DNA, 120 bp, Artificial Sequence
  ENSG00000154358_140 (sequence is synthesized)
gtggctgaggctggtgaggtcatctggcacaagggaatggagcgcatccagcccggtgggcggttcgaggtggtctcccagggtcggcaacagatgctggtgatcaagggcttcacggca

SEQ ID NO: 444001 - DNA, 120 bp, Artificial Sequence
  ENSG00000154358_141 (sequence is synthesized)
gaagaccagggcgagtaccactgtggcctggctcagggctccatctgccctgcggctgccaccttccaggtggcactgagcccagcctctgtggatgaggcccctcagcccagcttgccc

SEQ ID NO: 444002 - DNA, 120 bp, Artificial Sequence
  ENSG00000154358_142 (sequence is synthesized)
cccgaggcagcccaggagggtgacctgcacctactgtgggaggccctggctcggaaacgtcgcatgagccgtgagcccacgctggactccattagcgagctgccagaggaggacggccgc

SEQ ID NO: 444003 - DNA, 120 bp, Artificial Sequence
  ENSG00000154358_143 (sequence is synthesized)
tcgcagcgcctgccacaggaggcagaggaggtggcacctgatctctctgaaggctactccacggccgatgagctggcccgcactggagatgctgacctctcacacaccagctctgatgat

SEQ ID NO: 444004 - DNA, 120 bp, Artificial Sequence
  ENSG00000154358_144 (sequence is synthesized)
gagtcccgggcaggcaccccttccctggtcacctacctcaagaaggctgggaggccaggcacctcaccactggccagcaaggttggggccccagcagccccctctgtgaagccacagcag

SEQ ID NO: 444005 - DNA, 120 bp, Artificial Sequence
  ENSG00000154358_145 (sequence is synthesized)
cagcaggagccactggctgctgtgcgcccaccactgggagacctgagcaccaaagacctgggtgatccctcaatggacaaggcagctgtgaagatccaggctgcctttaagggctacaag

SEQ ID NO: 444006 - DNA, 120 bp, Artificial Sequence
  ENSG00000154358_146 (sequence is synthesized)
gtccggaaggagatgaagcagcaggaagggcccatgttctcccacacatttggggacaccgaggcacaggtgggggatgccctgcggctggagtgtgtcgtggccagcaaggcagatgtg

SEQ ID NO: 444007 - DNA, 120 bp, Artificial Sequence
  ENSG00000154358_147 (sequence is synthesized)
cgagcccgctggctgaaggatggtgtggagctgaccgatgggcggcaccatcacatcgaccagcttggggatggcacctgctctctgctgatcactggcctggaccgtgctgatgctggc

SEQ ID NO: 444008 - DNA, 120 bp, Artificial Sequence
  ENSG00000154358_148 (sequence is synthesized)
tgctacacctgtcaggtgagcaacaagtttggccaggtgacccacagtgcctgtgtggtggtcagtgggtcagagagtgaagccgagagctcctctgggggtgagctggacgatgccttc

SEQ ID NO: 444009 - DNA, 120 bp, Artificial Sequence
  ENSG00000154358_149 (sequence is synthesized)
cgccgggctgcccgtcggctgcaccggctcttccgcaccaaaagtccggctgaagtttcagatgaggagctcttcctgagtgcagacgagggccctgcagagccagaggagcccgcggac

SEQ ID NO: 444010 - DNA, 120 bp, Artificial Sequence
  ENSG00000154358_150 (sequence is synthesized)
tggcagacataccgcgaagatgagcatttcatctgcatccgttttgaggcgctcactgaggcccgccaggcggtaactcgcttccaggagatgtttgccacactgggcattggggtggag

SEQ ID NO: 444011 - DNA, 120 bp, Artificial Sequence
  ENSG00000154358_151 (sequence is synthesized)
atcaagctggtggaacaggggcctcggagggtagagatgtgcatcagcaaagagactcctgcccctgtggtgcctccagagccattgcccagcctactgacttctgacgctgccccagtg

SEQ ID NO: 444012 - DNA, 120 bp, Artificial Sequence
  ENSG00000154358_152 (sequence is synthesized)
ttcctgactgagttgcagaaccaagaagtgcaggatgggtatcctgtgagctttgactgcgtggtgacaggtcagcccatgcccagtgtgcgctggttcaaggatgggaagttgttggag

SEQ ID NO: 444013 - DNA, 120 bp, Artificial Sequence
  ENSG00000154358_153 (sequence is synthesized)
gaggatgatcactacatgattaatgaagaccaacagggtggccatcagctcatcatcacagccgtggtgccagcagacatgggcgtctaccgctgcctggccgagaacagcatgggtgtc

SEQ ID NO: 444014 - DNA, 120 bp, Artificial Sequence
  ENSG00000154358_154 (sequence is synthesized)
tcctccaccaaggctgagctccgtgtggacttgacaagcacagactatgacactgcagcagatgccacggagtcctcatcctacttcagtgcccaaggctacctgtccagccgggagcag

SEQ ID NO: 444015 - DNA, 120 bp, Artificial Sequence
  ENSG00000154358_155 (sequence is synthesized)
gagggaacagagtccaccactgatgagggccagctgccccaggtggtggaggagctgagagacctccaggtggcccctggcacacgcctggccaagttccagctcaaggtgaaaggctac

SEQ ID NO: 444016 - DNA, 120 bp, Artificial Sequence
  ENSG00000154358_156 (sequence is synthesized)
cctgctcccagattatactggttcaaagatggccagcccctgaccgcatctgcccacatccgcatgactgacaagaagatcctgcacaccctggagatcatctccgtcacccgggaggac

SEQ ID NO: 444017 - DNA, 120 bp, Artificial Sequence
  ENSG00000154358_157 (sequence is synthesized)
tctggccagtatgcagcctatatcagcaatgccatgggtgctgcctactcgtctgcccggctgctggttcgaggccctgatgagccagaagagaagcctgcatcagatgtgcatgagcag

SEQ ID NO: 444018 - DNA, 120 bp, Artificial Sequence
  ENSG00000154358_158 (sequence is synthesized)
ctggtgccgccccgaatgctggagaggttcacccccaagaaagtgaagaaaggctccagcatcaccttctctgtgaaggtagaaggacgcccggtgcccaccgtgcactggctcagggag

SEQ ID NO: 444019 - DNA, 120 bp, Artificial Sequence
  ENSG00000154358_159 (sequence is synthesized)
gaggctgagagaggcgtgctgtggattggccctgacacaccgggctacaccgtggccagctctgcgcagcagcacagcctggtcctgctggacgtgggccggcagcaccagggcacctac

SEQ ID NO: 444020 - DNA, 120 bp, Artificial Sequence
  ENSG00000154358_160 (sequence is synthesized)
acatgcattgccagcaacgctgccggccaggccctctgctccgccagcctgcacgtctcgggcctgcctaaggtggaggagcaggagaaagtgaaggaagcgctgatttccactttcctg

SEQ ID NO: 444021 - DNA, 120 bp, Artificial Sequence
  ENSG00000154358_161 (sequence is synthesized)
caggggaccacacaagccatctcagcacaggggttggaaactgcgagttttgctgaccttggtgggcagaggaaagaagagcctctggctgccaaggaggccctcggccacctgtccctc

SEQ ID NO: 444022 - DNA, 120 bp, Artificial Sequence
  ENSG00000154358_162 (sequence is synthesized)
gctgaggtgggcacagaggagttcctgcagaaactgacctcccagatcactgagatggtatcggccaagatcacgcaggccaagctgcaggtgcccggaggtgacagtgatgaggactcc

SEQ ID NO: 444023 - DNA, 120 bp, Artificial Sequence
  ENSG00000154358_163 (sequence is synthesized)
aagacaccatctgcatccccccgccatggccgatcacggccatcctccagcatccaggagtcttcctcagagtcagaggacggcgatgcccgaggcgagatctttgacatctacgtggtc

SEQ ID NO: 444024 - DNA, 120 bp, Artificial Sequence
  ENSG00000154358_164 (sequence is synthesized)
accgctgactacctgcccctaggggctgagcaggatgccatcacgctgcgggaaggccagtatgtggaggtcctggatgcagcccacccactgcgctggcttgtccgcaccaagcccacc

SEQ ID NO: 444025 - DNA, 120 bp, Artificial Sequence
  ENSG00000154358_165 (sequence is synthesized)
aagtccagcccctcacggcagggctgggtgtcaccagcctacctggacaggaggctcaagctgtcacctgagtggggggccgctgaggcccctgagttccctggggaggctgtgtctgaa

SEQ ID NO: 444026 - DNA, 120 bp, Artificial Sequence
  ENSG00000154358_166 (sequence is synthesized)
gacgaatacaaggcaaggctgagctctgtgatccaggagctgctgagttctgagcaggccttcgtggaggagctgcagttcctgcagagccaccacctgcagcacctggagcgctgcccc

SEQ ID NO: 444027 - DNA, 120 bp, Artificial Sequence
  ENSG00000154358_167 (sequence is synthesized)
cacgtgcccatagctgtggccggccagaaggcagtcatcttccgcaatgtgcgggacatcggccgcttccacagcagcttcctgcaggagttgcagcagtgcgacacggacgacgacgtg

SEQ ID NO: 444028 - DNA, 120 bp, Artificial Sequence
  ENSG00000154358_168 (sequence is synthesized)
gccatgtgcttcatcaagaaccaggcggcctttgagcagtacctggagttcctggtggggcgtgtgcaggctgagtcggtggtcgtcagcacggccatccaggagttctacaagaaatac

SEQ ID NO: 444029 - DNA, 120 bp, Artificial Sequence
  ENSG00000154358_169 (sequence is synthesized)
gcggaggaggccctgttggcaggggacccctctcagcccccgccaccacctctgcagcactacctggagcagccagtggagcgggtgcagcgctaccaggccttgctgaaggagctgatc

SEQ ID NO: 444030 - DNA, 120 bp, Artificial Sequence
  ENSG00000154358_170 (sequence is synthesized)
cgcaacaaggcgcggaacagacagaactgcgcgctgctggagcaggcctatgccgtggtgtctgccctgccacagcgcgctgagaacaagctgcacgtgtccctcatggagaactaccca

SEQ ID NO: 444031 - DNA, 120 bp, Artificial Sequence
  ENSG00000154358_171 (sequence is synthesized)
ggcaccctgcaggccctgggcgagcccatccgccagggccacttcatcgtgtgggagggtgcaccgggggcccgcatgccctggaagggccacaaccgtcacgtgttcctcttccgcaac

SEQ ID NO: 444032 - DNA, 120 bp, Artificial Sequence
  ENSG00000154358_172 (sequence is synthesized)
cacctggtaatctgcaagccccggcgagactcccgcaccgataccgtcagctacgtgttccggaacatgatgaagctgagcagcatcgacctgaacgaccaggtggagggggatgaccgc

SEQ ID NO: 444033 - DNA, 120 bp, Artificial Sequence
  ENSG00000154358_173 (sequence is synthesized)
gccttcgaggtgtggcaggagcgggaggactcggtgcgcaagtacctgctgcaggcacggacagccattatcaagagctcgtgggtgaaggagatctgtggcatccagcagcgtctggcc

SEQ ID NO: 444034 - DNA, 120 bp, Artificial Sequence
  ENSG00000154358_174 (sequence is synthesized)
ctgcctgtgtggcggcccccggactttgaagaggagctggccgactgcacagccgagctgggtgagacagtcaagctggcctgccgcgtgacgggcacacccaagcctgtcatcagctgg

SEQ ID NO: 444035 - DNA, 120 bp, Artificial Sequence
  ENSG00000154358_175 (sequence is synthesized)
tacaaagatgggaaagcagtgcaggtggacccccaccacatcctcattgaagaccctgatggctcgtgtgcactcatcctggacagcctgaccggtgtggactctggccagtacatgtgc

SEQ ID NO: 444036 - DNA, 120 bp, Artificial Sequence
  ENSG00000154358_176 (sequence is synthesized)
ttcgcggccagcgccgctggcaactgcagtaccctgggcaagatcctggtgcaagtcccaccacggttcgtgaacaaggtccgggcctcaccctttgtggagggagaggacgcccagttc

SEQ ID NO: 444037 - DNA, 120 bp, Artificial Sequence
  ENSG00000154358_177 (sequence is synthesized)
acctgcaccatcgaaggcgccccgtacccgcagatcaggtggtacaaggacggggccctgctgaccactggcaacaagttccagacactgagtgagcctcgcagcggcctgctagtgctg

SEQ ID NO: 444038 - DNA, 120 bp, Artificial Sequence
  ENSG00000154358_178 (sequence is synthesized)
gtgatccgggcggccagcaaggaggacctggggctctacgagtgtgagctggtgaaccggctgggctccgcgcgggctagtgcggagctgcgcattcagagccccatgctgcaggcccag

SEQ ID NO: 444039 - DNA, 120 bp, Artificial Sequence
  ENSG00000154358_179 (sequence is synthesized)
gagcagtgtcacagggagcagctcgtggctgcagtggaagacaccaccctggagcgagcggaccaggaggtcacatctgtcctgaagagactgctgggccccaaggcgccaggcccctcc

SEQ ID NO: 444040 - DNA, 120 bp, Artificial Sequence
  ENSG00000154358_180 (sequence is synthesized)
acaggggacctcactggccctggcccctgccccaggggggcacccgcactccaggaaaccggctcccagcccccagtcaccggaacttcggaggcacctgccgtgcccccgagggtgcca

SEQ ID NO: 444041 - DNA, 120 bp, Artificial Sequence
  ENSG00000154358_181 (sequence is synthesized)
cagcccctcctccacgaaggcccagagcaggagccggaggccattgccagagcccaggaatggactgtgcccattcggatggagggtgcagcctggcccggggcaggcacaggggagctg

SEQ ID NO: 444042 - DNA, 120 bp, Artificial Sequence
  ENSG00000154358_182 (sequence is synthesized)
ctctgggacgtccacagccacgtggtcagagagaccacacagaggacctacacataccaggccatcgacacgcacaccgcacggcccccatccatgcaggtaaccatcgaggatgtgcag

SEQ ID NO: 444043 - DNA, 120 bp, Artificial Sequence
  ENSG00000154358_183 (sequence is synthesized)
gcacagacaggcggaacggcccaattcgaggctatcattgagggcgacccacagccctcggtgacctggtacaaggacagcgtccagctggtggacagcacccggcttagccagcagcaa

SEQ ID NO: 444044 - DNA, 120 bp, Artificial Sequence
  ENSG00000154358_184 (sequence is synthesized)
gaaggcaccacatactccctggtgctgaggcatgtggcctcgaaggatgccggcgtttacacctgcctggcccaaaacactggtggccaggtgctctgcaaggcagagctgctggtgctt

SEQ ID NO: 444045 - DNA, 120 bp, Artificial Sequence
  ENSG00000154358_185 (sequence is synthesized)
gggggggacaatgagccggactcagagaagcaaagccaccggaggaagctgcactccttctatgaggtcaaggaggagattggaaggggcgtgtttggcttcgtaaaaagagtgcagcac

SEQ ID NO: 444046 - DNA, 120 bp, Artificial Sequence
  ENSG00000154358_186 (sequence is synthesized)
aaaggaaacaagatcttgtgcgctgccaagttcatccccctacggagcagaactcgggcccaggcatacagggagcgagacatcctggccgcgctgagccacccgctggtcacggggctg

SEQ ID NO: 444047 - DNA, 120 bp, Artificial Sequence
  ENSG00000154358_187 (sequence is synthesized)
ctggaccagtttgagacccgcaagaccctcatcctcatcctggagctgtgctcatccgaggagctgctggaccgcctgtacaggaagggcgtggtgacggaggccgaggtcaaggtctac

SEQ ID NO: 444048 - DNA, 120 bp, Artificial Sequence
  ENSG00000154358_188 (sequence is synthesized)
atccagcagctggtggaggggctgcactacctgcacagccatggcgttctccacctggacataaagccctctaacatcctgatggtgcatcctgcccgggaagacattaaaatctgcgac

SEQ ID NO: 444049 - DNA, 120 bp, Artificial Sequence
  ENSG00000154358_189 (sequence is synthesized)
tttggctttgcccagaacatcaccccagcagagctgcagttcagccagtacggctcccctgagttcgtctcccccgagatcatccagcagaaccctgtgagcgaagcctccgacatttgg

SEQ ID NO: 444050 - DNA, 120 bp, Artificial Sequence
  ENSG00000154358_190 (sequence is synthesized)
gccatgggtgtcatctcctacctcagcctgacctgctcatccccatttgccggcgagagtgaccgtgccaccctcctgaacgtcctggaggggcgcgtgtcatggagcagccccatggct

SEQ ID NO: 444051 - DNA, 120 bp, Artificial Sequence
  ENSG00000154358_191 (sequence is synthesized)
gcccacctcagcgaagacgccaaagacttcatcaaggctacgctgcagagagcccctcaggcccggcctagtgcggcccagtgcctctcccacccctggttcctgaaatccatgcctgcg

SEQ ID NO: 444052 - DNA, 120 bp, Artificial Sequence
  ENSG00000154358_192 (sequence is synthesized)
gaggaggcccacttcatcaacaccaagcagctcaagttcctcctggcccgaagtcgctggcagcgttccctgatgagctacaagtccatcctggtgatgcgctccatccctgagctgctg

SEQ ID NO: 444053 - DNA, 120 bp, Artificial Sequence
  ENSG00000154358_193 (sequence is synthesized)
cggggcccacccgacagcccctccctcggcgtagcccggcacctctgcagggacactggtggctcctccagttcctcctcctcctctgacaacgagctcgccccatttgcccgggctaag

SEQ ID NO: 444054 - DNA, 120 bp, Artificial Sequence
  ENSG00000154358_194 (sequence is synthesized)
tcactgccaccctccccggtgacacactcaccactgctgcacccccggggcttcctgcggccctcggccagcctgcctgaggaagccgaggccagtgagcgctccaccgaggccccagct

SEQ ID NO: 444055 - DNA, 120 bp, Artificial Sequence
  ENSG00000154358_195 (sequence is synthesized)
ccgcctgcatctcccgagggtgccgggccaccggccgcccagggctgcgtgccccggcacagcgtcatccgcagcctgttctaccaccaggcgggtgagagccctgagcacggggccctg

SEQ ID NO: 444056 - DNA, 120 bp, Artificial Sequence
  ENSG00000154358_196 (sequence is synthesized)
gccccggggagcaggcggcacccggcccggcggcggcacctgctgaagggcgggtacattgcgggggcgctgccaggcctgcgcgagccactgatggagcaccgcgtgctggaggaggag

SEQ ID NO: 444057 - DNA, 120 bp, Artificial Sequence
  ENSG00000154358_197 (sequence is synthesized)
gccgccagggaggagcaggccaccctcctggccaaagccccctcattcgagactgccctccggctgcctgcctctggcacccacttggcccctggccacagccactccctggaacatgac

SEQ ID NO: 444058 - DNA, 120 bp, Artificial Sequence
  ENSG00000154358_198 (sequence is synthesized)
tctccgagcaccccccgcccctcctcggaggcctgcggtgaggcacagcgactgccttcagccccctccgggggggcccctatcagggacatggggcaccctcagggctccaagcagctt

SEQ ID NO: 444059 - DNA, 120 bp, Artificial Sequence
  ENSG00000154358_199 (sequence is synthesized)
ccatccactggtggccacccaggcactgctcagccagagaggccatccccggacagcccttgggggcagccagcccctttctgccaccccaagcagggttctgccccccaggagggctgc

SEQ ID NO: 444060 - DNA, 120 bp, Artificial Sequence
  ENSG00000154358_200 (sequence is synthesized)
agcccccacccagcagttgccccatgccctcctggctccttccctccaggatcttgcaaagaggcccccttagtaccctcaagccccttcttgggacagccccaggcaccccctgcccct

SEQ ID NO: 444061 - DNA, 120 bp, Artificial Sequence
  ENSG00000154358_201 (sequence is synthesized)
gccaaagcaagccccccattggactctaagatggggcctggagacatctctcttcctgggaggccaaaacccggcccctgcagttccccagggtcagcctcccaggcgagctcttcccaa

SEQ ID NO: 444062 - DNA, 120 bp, Artificial Sequence
  ENSG00000154358_202 (sequence is synthesized)
gtgagctccctcagggtgggctcctcccaggtgggcacagagcctggcccctccctggatgcggagggctggacccaggaggctgaggatctgtccgactccacacccaccttgcagcgg

SEQ ID NO: 444063 - DNA, 120 bp, Artificial Sequence
  ENSG00000154358_203 (sequence is synthesized)
cctcaggaacaggcgaccatgcgcaagttctccctgggtggtcgcgggggctacgcaggcgtggctggctatggcacctttgcctttggtggagatgcagggggcatgctggggcagggg

SEQ ID NO: 444064 - DNA, 120 bp, Artificial Sequence
  ENSG00000154358_204 (sequence is synthesized)
cccatgtgggccaggatagcctgggctgtgtcccagtcagaggaggaggagcaggaggaggccagggctgagtcccagtcggaggagcagcaggaggccagggctgagagcccactgccc

SEQ ID NO: 444065 - DNA, 120 bp, Artificial Sequence
  ENSG00000154358_205 (sequence is synthesized)
caggtcagtgcaaggcctgtgcctgaggtcggcagggctcccaccaggagctctccagagcccaccccatgggaggacatcgggcaggtctccctggtgcagatccgggacctgtcaggt

SEQ ID NO: 444066 - DNA, 120 bp, Artificial Sequence
  ENSG00000154358_206 (sequence is synthesized)
gatgcggaggcggccgacacaatatccctggacatttccgaggtggaccccgcctacctcaacctctcagacctgtacgatatcaagtacctcccattcgagtttatgatcttcaggaaa

SEQ ID NO: 444067 - DNA, 120 bp, Artificial Sequence
  ENSG00000154358_207 (sequence is synthesized)
gtccccaagtccgctcagccagagccgccctcccccatggctgaggaggagctggccgagttcccggagcccacgtggccctggccaggtgaactgggcccccacgcaggcctggagatc

SEQ ID NO: 444068 - DNA, 120 bp, Artificial Sequence
  ENSG00000154358_208 (sequence is synthesized)
acagaggagtcagaggatgtggacgcgctgctggcagaggctgccgtgggcaggaagcgcaagtggtcctcgccgtcacgcagcctcttccacttccctgggaggcacctgccgctggat

SEQ ID NO: 444069 - DNA, 120 bp, Artificial Sequence
  ENSG00000154358_209 (sequence is synthesized)
gagcctgcagagctggggctgcgtgagagagtgaaggcctccgtggagcacatctcccggatcctgaagggcaggccggaaggtctggagaaggaggggccccccaggaagaagccaggc

SEQ ID NO: 444070 - DNA, 120 bp, Artificial Sequence
  ENSG00000154358_210 (sequence is synthesized)
cttgcttccttccggctctcaggtctgaagagctgggaccgagcgccgacattcctaagggagctctcagatgagactgtggtcctgggccagtcagtgacactggcctgccaggtgtca

SEQ ID NO: 444071 - DNA, 120 bp, Artificial Sequence
  ENSG00000154358_211 (sequence is synthesized)
gcccagccagctgcccaggccacctggagcaaagacggagcccccctggagagcagcagccgtgtcctcatctctgccaccctcaagaacttccagcttctgaccatcctggtggtggtg

SEQ ID NO: 444072 - DNA, 120 bp, Artificial Sequence
  ENSG00000154358_212 (sequence is synthesized)
gctgaggacctgggtgtgtacacctgcagcgtgagcaatgcgctggggacagtgaccaccacgggcgtcctccggaaggcagagcgcccctcatcttcgccatgcccggatatcggggag

SEQ ID NO: 444073 - DNA, 120 bp, Artificial Sequence
  ENSG00000154358_213 (sequence is synthesized)
gtgtacgcggatggggtgctgctggtctggaagcccgtggaatcctacggccctgtgacctacattgtgcagtgcagcctagaaggcggcagctggaccacactggcctccgacatcttt

SEQ ID NO: 444074 - DNA, 120 bp, Artificial Sequence
  ENSG00000154358_214 (sequence is synthesized)
gactgctgctacctgaccagcaagctctcccggggtggcacctacaccttccgcacggcatgtgtcagcaaggcaggaatgggtccctacagcagcccctcggagcaagtcctcctggga

SEQ ID NO: 444075 - DNA, 120 bp, Artificial Sequence
  ENSG00000154358_215 (sequence is synthesized)
gggcccagccacctggcctctgaggaggagagccaggggcggtcagcccaacccctgcccagcacaaagaccttcgcattccagacacagatccagaggggccgcttcagcgtggtgcgg

SEQ ID NO: 444076 - DNA, 120 bp, Artificial Sequence
  ENSG00000154358_216 (sequence is synthesized)
caatgctgggagaaggccagcgggcgggcgctggccgccaagatcatcccctaccaccccaaggacaagacagcagtgctgcgcgaatacgaggccctcaagggcctgcgccacccgcac

SEQ ID NO: 444077 - DNA, 120 bp, Artificial Sequence
  ENSG00000154358_217 (sequence is synthesized)
ctggcccagctgcacgcagcctacctcagcccccggcacctggtgctcatcttggagctgtgctctgggcccgagctgctcccctgcctggccgagagggcctcctactcagaatccgag

SEQ ID NO: 444078 - DNA, 120 bp, Artificial Sequence
  ENSG00000154358_218 (sequence is synthesized)
gtgaaggactacctgtggcagatgttgagtgccacccagtacctgcacaaccagcacatcctgcacctggacctgaggtccgagaacatgatcatcaccgaatacaacctgctcaaggtc

SEQ ID NO: 444079 - DNA, 120 bp, Artificial Sequence
  ENSG00000154358_219 (sequence is synthesized)
gtggacctgggcaatgcacagagcctcagccaggagaaggtgctgccctcagacaagttcaaggactacctagagaccatggagctcctggagggccagggggctgttccacagacagac

SEQ ID NO: 444080 - DNA, 120 bp, Artificial Sequence
  ENSG00000154358_220 (sequence is synthesized)
atctgggccatcggtgtgacagccttcatcatgctgagcgccgagtacccggtgagcagcgagggtgcacgcgacctgcagagaggactgcgcaaggggctggtccggctgagccgctgc

SEQ ID NO: 444081 - DNA, 120 bp, Artificial Sequence
  ENSG00000154358_221 (sequence is synthesized)
tacgcggggctgtccgggggcgccgtggccttcctgcgcagcactctgtgcgcccagccctggggccggccctgcgcgtccagctgcctgcagtgcccgtggctaacagaggagggcccg

SEQ ID NO: 444082 - DNA, 120 bp, Artificial Sequence
  ENSG00000154358_222 (sequence is synthesized)
gcctgttcgcggcccgcgcccgtgaccttccctaccgcgcggctgcgcgtcttcgtgcgcaatcgcgagaagagacgcgcgctgctgtacaagaggcacaacctggcccaggtgcgctga

SEQ ID NO: 444083 - DNA, 120 bp, Artificial Sequence
  ENSG00000154358_223 (sequence is synthesized)
tggccagggctgcaggaggcctgagaaggtcaacacagagttctgaccgcccaggctgccttgggctggcaggaggccctgagctggtcccagcagaaacaaccagccttgggaaggatg

SEQ ID NO: 444084 - DNA, 120 bp, Artificial Sequence
  ENSG00000154358_224 (sequence is synthesized)
gccggacgcagctgctgacgttacagggcttggaaggaagcctgttcatccacgctccctgccagggagaaagcccatcccattggccacttgccgggagaactgagtttctcgggcgca

SEQ ID NO: 444085 - DNA, 120 bp, Artificial Sequence
  ENSG00000154358_225 (sequence is synthesized)
tgacccattgcaccatcttcccacgttccttccatgcccatccctccagcctatgcaggagtgggctgcttcccgttccatgcctcaatcaaagtcgagttacaagcacaacacagttcc

SEQ ID NO: 444086 - DNA, 120 bp, Artificial Sequence
  ENSG00000154358_226 (sequence is synthesized)
ctggggcgtgtttctgaggtggtcaggatgggggctacaggcctagctctgggacccctggcccaatgcccagagtgggccggcctgcttgaacctgtgcagggcaacccagtgaagccc

SEQ ID NO: 444087 - DNA, 120 bp, Artificial Sequence
  ENSG00000154358_227 (sequence is synthesized)
agcagccccaccaagggcccttctgaccagaggctcggcccctgcacagggttctggtcacacccaggtggatgggccagcccaggagtgggatctggcagggcagacacctccccagcc

SEQ ID NO: 444088 - DNA, 120 bp, Artificial Sequence
  ENSG00000154358_228 (sequence is synthesized)
cctcgccaggagaggcccctcctaccattcctcactgtgactggaccctgaatgaacaggaccagggagggtgggctccagagccctggtggctgccagggtgaggcaggcgccagccag

SEQ ID NO: 444089 - DNA, 120 bp, Artificial Sequence
  ENSG00000154358_229 (sequence is synthesized)
tctaggggcccttggggagatgcctggcctgctgtgttcccatgggtggcctcagggaagggtttctccacccccactgacgtggtgtgtggaggcctcagtggcccctcacgtgctcct

SEQ ID NO: 444090 - DNA, 120 bp, Artificial Sequence
  ENSG00000154358_230 (sequence is synthesized)
catgctgcaggcccaggagcagtgtcacagggagcagctcgtggctgcagtggaagtcactgagcaagagactaaagtccccaagaaaaccgtcatcatgtaagtgcaggcgtgttccta

SEQ ID NO: 444091 - DNA, 120 bp, Artificial Sequence
  ENSG00000154358_231 (sequence is synthesized)
accttccttctgactgcagtgcctcctgcatgccactgacctgcctggatcatgcctgtgtggcccagccacctgcttgctgcctgtctgctcacataacatgcaccctctgactgccag

SEQ ID NO: 444092 - DNA, 120 bp, Artificial Sequence
  ENSG00000154358_232 (sequence is synthesized)
caccttacagagaagagaccatcaccactgtggtgaagagcccacgtggccaacgacggtcccccagcaagtccccctcccgctcaccttcccgctgctctgccagcccgctgaggccag

SEQ ID NO: 444093 - DNA, 120 bp, Artificial Sequence
  ENSG00000154358_233 (sequence is synthesized)
gcctactggcccccgacctgctgtacctgccaggtgctggccagccccgcaggccggaggcagaaccaggccagaagcccgtggtgcccacactgtatgtgacggaggccgaggcccact

SEQ ID NO: 444094 - DNA, 120 bp, Artificial Sequence
  ENSG00000154358_234 (sequence is synthesized)
ctccagctctgcccggactctcggggccccagcccaagtgggtggaggtggaggagaccattgaagtccgggtgaagaagatgggcccgcagggtgtgtctcccaccacagaggtgccca

SEQ ID NO: 444095 - DNA, 120 bp, Artificial Sequence
  ENSG00000154358_235 (sequence is synthesized)
ggagctcatcggggcatctcttcacactgcccggtgcgacccccggaggggaccccaattccaacaactccaacaacaagctgctggcccaggaggcctgggcccagggcacagccatgg

SEQ ID NO: 444096 - DNA, 120 bp, Artificial Sequence
  ENSG00000154358_236 (sequence is synthesized)
tcggcgtcagagagccccttgtcttccgcgtggatgccagaggcagtgtggactgggctgcttctggcatgggcagcctggaggaggagggcaccatggaggaggcgggagaggaagagg

SEQ ID NO: 444097 - DNA, 120 bp, Artificial Sequence
  ENSG00000154358_237 (sequence is synthesized)
gctgacctggaagattacgtgcctggggaaggggagaccttccactgtggtggccctgggcctggcgcccctgatgaccctccctgcgaggtctcggtgatccagagagagatcggggag

SEQ ID NO: 444098 - DNA, 120 bp, Artificial Sequence
  ENSG00000154358_238 (sequence is synthesized)
cccacggtggggcagcctgtgctgctcagcgtggggcatgcactgggtccccgaggccctctcggcctctttaggcctgagccccgtggggcgtcaccaccgggaccccaggtccgtagc

SEQ ID NO: 444099 - DNA, 120 bp, Artificial Sequence
  ENSG00000154358_239 (sequence is synthesized)
cttgagggcacctccttcctcttgcgggaggccccggctcggcctgtgggcagtgctccctggacgcagtctttctgcacccgcatccggcgttctgcggacagtggccagagcagcttc

SEQ ID NO: 444100 - DNA, 120 bp, Artificial Sequence
  ENSG00000154358_240 (sequence is synthesized)
accacagagctttccacccagaccgtcaacttcgggacagtgggggagacggtcacccttcacatctgcccagacagggatggggatgaggcggcacagccctgatgctgctgccatggt

SEQ ID NO: 444101 - DNA, 120 bp, Artificial Sequence
  ENSG00000154358_241 (sequence is synthesized)
ggcttggggcagcggggagaaaggagtgtccttgaggcctaggacgctgcccggcctcagcagcagccctgggagcctcctgagggccctccctgtccctggccacgggcccttcttacc

SEQ ID NO: 444102 - DNA, 120 bp, Artificial Sequence
  ENSG00000154358_242 (sequence is synthesized)
tcactcaacttcagccaggaggactgggtggtgcttgcaatgttggaatgaccggctcaaagacctcagctctgggctgtttcctgtcagcctggcaggagcctcaggactgtggacgaa

SEQ ID NO: 444103 - DNA, 120 bp, Artificial Sequence
  ENSG00000154358_243 (sequence is synthesized)
ggatgtggccttgggcatttgtcctgttcccacatgggcctggtccctccctcctggccccagccacagctgccaggcctgacatggccttgcctctcctgcagtcttggtgactgagac

SEQ ID NO: 444104 - DNA, 120 bp, Artificial Sequence
  ENSG00000154358_244 (sequence is synthesized)
ccttgggtggcgcttcccagctctgcaggccctcctggccttttctgcagggtggacacagggtctgtgtgtgggcagcagcccctgtctctcagcaagaataaagcagcttcctgtgca

SEQ ID NO: 444105 - DNA, 120 bp, Artificial Sequence
  ENSG00000154358_245 (sequence is synthesized)
gggagcaagcttgcactcacatgggtgcgggaacagatgaggggtcctggtgggtgtagtgaactgagcagtcttggaggacttcctggaggaggtgatggtggtacagatgggccaggc

SEQ ID NO: 444106 - DNA, 120 bp, Artificial Sequence
  ENSG00000154358_246 (sequence is synthesized)
ggcagtggtggggcagggctcctcctggtgtctccagggtccaggccatgctctggggcctggaggtcacccctgaaggctgacctcaccctccctcctcagcgccgacattcctaaggg

SEQ ID NO: 444107 - DNA, 120 bp, Artificial Sequence
  ENSG00000154358_247 (sequence is synthesized)
acctgagtgacttctgtcttcccccacttaacccacatgttctgtgctctcccagtgtctctcagtgtcgttgacattttattcagtcactcatctttgtggtccatctcacaaatgcat

SEQ ID NO: 444108 - DNA, 120 bp, Artificial Sequence
  ENSG00000154358_248 (sequence is synthesized)
gctgaggacccacttggatggcctaatctagggcctgggcatacagaccccaagggtgaatagtgcagggtccccaggtgtcaggacagggagagcagcaggcaggtgtcagggtccagg

SEQ ID NO: 444109 - DNA, 120 bp, Artificial Sequence
  ENSG00000154358_249 (sequence is synthesized)
agagctgtctggggcccctgccatcttgcaaaggcctgtggatgtccaccagctcttgagcctcaggcatggaggtcaggaaatgtatgtcctttgacagacatagcgatggctcaggcc

SEQ ID NO: 444110 - DNA, 120 bp, Artificial Sequence
  ENSG00000154358_250 (sequence is synthesized)
aggcccctcttcaggctggtgagtgttctgattgatccttgtggtcattccaagcttctaaaggagtattgtcttcatctgctcaggctaacgtaacaaagcactgcagacagggtggct

SEQ ID NO: 444111 - DNA, 120 bp, Artificial Sequence
  ENSG00000154358_251 (sequence is synthesized)
caaataacacagatttattttctcagaagtatggggctgaaatctcaagatcaagatgtcagctcctctcttcttgtagacagctgtcttctccccatgtcttcacatggatgtccctct

SEQ ID NO: 444112 - DNA, 120 bp, Artificial Sequence
  ENSG00000154358_252 (sequence is synthesized)
gtgtgcatgtgtgtgtcctaacctctttttataagagcaccagtcatactggatttggaaccaccctaacaacctcatttttcctttcaatgattgtctttaaatacagtgatattctga

SEQ ID NO: 444113 - DNA, 120 bp, Artificial Sequence
  ENSG00000154358_253 (sequence is synthesized)
cgtgtactgggggttaggacttcaacatatgcattttttctgaggcacaattcagaccataacactccaccatctggattctcaaaattcatggccttctcacgtgcaaaatatgtttac

SEQ ID NO: 444114 - DNA, 120 bp, Artificial Sequence
  ENSG00000154358_254 (sequence is synthesized)
ttcttcctaacagtcccaaatcttagcccatttcaatatcaactagtccaaatcacctctaaatatcatctgagtcaactgtgagggagataaagtgtgacttatacagaggcaaaattt

SEQ ID NO: 444115 - DNA, 120 bp, Artificial Sequence
  ENSG00000154358_255 (sequence is synthesized)
ttcttcatctgtgaggctgtgaaatcagacaagttatttgttttgaagtcacaatggtgggacaggcataggatggacattctgaatcagggagaaactggaaaggaggaatgagtcacg

SEQ ID NO: 444116 - DNA, 120 bp, Artificial Sequence
  ENSG00000154358_256 (sequence is synthesized)
ggtcccaagtaaggtgtaaccctagcaggacaaatattattaggttttaaggctttggattaatacctagtcctctcgacccaacagggttgcaactctaccccctcagccctgagtgga

SEQ ID NO: 444117 - DNA, 120 bp, Artificial Sequence
  ENSG00000154358_257 (sequence is synthesized)
ggtgtctggctctctgtaactgaggaggagacagccttacttccaggcctgtgccctctaccctctggttataatgccattcctgtcaactcctgaactaacttttgggtcattattcct

SEQ ID NO: 444118 - DNA, 120 bp, Artificial Sequence
  ENSG00000154358_258 (sequence is synthesized)
ttttcttacagaatatcttgtttatatccatgtagctctattggcccatcctgtggattctcagaagtctgacatccttccttcattttgtcccatctctgttcgaatcagttcaagcta

SEQ ID NO: 444119 - DNA, 120 bp, Artificial Sequence
  ENSG00000154358_259 (sequence is synthesized)
gcagcatttcctctggtataaaggtctcaaaaactttgtcccatgtgatccatgtgggtcaaagccaccagacaaaagaattctccacagatctttccttgataatcttatttttattac

SEQ ID NO: 444120 - DNA, 120 bp, Artificial Sequence
  ENSG00000154358_260 (sequence is synthesized)
tggcttctgctgagagggctgaatggatccataaaccacacacctgatctgtttagcaaatggttgtccagtgtggatattctccccagaataatgctttctcatttttttttgcagtat

SEQ ID NO: 444121 - DNA, 120 bp, Artificial Sequence
  ENSG00000154358_261 (sequence is synthesized)
gtatagcctgaaaatttttctgtatcttcaagctctggttcctttttgcttaacaaatcctttttgaatttatctctctcctctcacattttcatattagagagaaatcaggctatggtt

SEQ ID NO: 444122 - DNA, 120 bp, Artificial Sequence
  ENSG00000154358_262 (sequence is synthesized)
tcaattctttggttagaaacttcctcaggtaaatatatccaattttgttgtttgcaagtcctatcttccacaaaacactagaataaaatttgaccaggtttttggctactttataacagt

SEQ ID NO: 444123 - DNA, 120 bp, Artificial Sequence
  ENSG00000154358_263 (sequence is synthesized)
gattgtctttctccagtttttaataatatgtcccccgttgtcatctgaggcttgaccagaatcacttttaacacccatgttttcaccgacaattgctgcctgcaaacactgttttttggc

SEQ ID NO: 444124 - DNA, 120 bp, Artificial Sequence
  ENSG00000154358_264 (sequence is synthesized)
atgcacctgaaatatctttcagctacctcccattaccgagttctaaagccacatccacatttataggtatttgttcctttggcaccccactcctggtaccaaagtctgaatttgtttgct

SEQ ID NO: 444125 - DNA, 120 bp, Artificial Sequence
  ENSG00000154358_265 (sequence is synthesized)
tgggttgccataaagaaagtgtcatagactgggtggtataaataacagaaatctatttcctcaccattctggaggctagatggttgagatccaggtgtcagtacggttggctccttctga

SEQ ID NO: 444126 - DNA, 120 bp, Artificial Sequence
  ENSG00000154358_266 (sequence is synthesized)
ggcctctctcctttgcttgtagacagccattttctctgtgtcttcactggtccttctctgtttgtgtcctaatctccttttcttataaggacagcatttatattggattagataccaccc

SEQ ID NO: 444127 - DNA, 120 bp, Artificial Sequence
  ENSG00000154358_267 (sequence is synthesized)
ttgtgatcccatttagcattaatcacctctttaaaggccctatctcaaaaacagtcatattctgaaatagtggaagttaggacttcaacatttgacttctgtagaaacacaacccatagc

SEQ ID NO: 444128 - DNA, 120 bp, Artificial Sequence
  ENSG00000154358_268 (sequence is synthesized)
agtctatggctatgtaattgggttaggccctgctctgctaacttgtgagccccctgcctggagtcaggaggcaagagagaatggtagattggaggttcagaggtgtggttcaaggccaca

SEQ ID NO: 444129 - DNA, 120 bp, Artificial Sequence
  ENSG00000154358_269 (sequence is synthesized)
tctggtgtctgtcatgatctaggtgatatgagtcagggtaatatgtgggaatgtggattcagtagggtcagtctagcagtatgttggatggaggtagcagggccttgtgtgggctgggat

SEQ ID NO: 444130 - DNA, 120 bp, Artificial Sequence
  ENSG00000154358_270 (sequence is synthesized)
gttgtgcggtgcgccaggtatatctaggcatgggcactgctggatggaagccctgtctggtcaggctatctcttgtgtgagggatgacaacggggcagtggatgttgggacctgaaggtg

SEQ ID NO: 444131 - DNA, 120 bp, Artificial Sequence
  ENSG00000154358_271 (sequence is synthesized)
tctgctgtgtcatcatagagagatgtccatcacattattgcatatgtgggttgcaagttggaggagcctgtcttgcttccccataatgaaagttcacaggtaggataagatgccctctga

SEQ ID NO: 444132 - DNA, 120 bp, Artificial Sequence
  ENSG00000154358_272 (sequence is synthesized)
gaagagatccaggatggagcccatctcccacccaatctgcacctcacaggcagaatgcaggaagtcctcactgtcaaatgcactttggtccgcctcatcccaagtccctccagccttcct

SEQ ID NO: 444133 - DNA, 120 bp, Artificial Sequence
  ENSG00000154358_273 (sequence is synthesized)
gcttctgttttcttcctggatgttcaggtgtgtccctcagatcctccagagggcttgatggcttctgtccatgtgacccttcctacctctgcctacccagttcactcaagatctgaagac

SEQ ID NO: 444134 - DNA, 120 bp, Artificial Sequence
  ENSG00000154358_274 (sequence is synthesized)
caacgaggcctcagaaggggccacagccacattgcagtgtgaactaagcaaggtgtcgctgtggagtggaagaagggacctgagaccctcagagatggggactgtgttctctgttcctgg

SEQ ID NO: 444135 - DNA, 120 bp, Artificial Sequence
  ENSG00000154358_275 (sequence is synthesized)
gccgtgtgctttctcaccatctgtatattcatttgcttattctgccatggtcctgtggtggtttgtgtgcctccttgtgtgtgtctgtgttctgtccacagagttgtccagttagtctga

SEQ ID NO: 444136 - DNA, 120 bp, Artificial Sequence
  ENSG00000154358_276 (sequence is synthesized)
ttgaatggcacggagacttggaggtggacaggcccagcctcagtttcttatcatgagggtatagggggtgcaccctgggtggtcactgaggctccccagcatggctgtgaatgagctgct

SEQ ID NO: 444137 - DNA, 120 bp, Artificial Sequence
  ENSG00000154358_277 (sequence is synthesized)
ggtgctcacttactcgtgtgtttatttggtcactgtgtgtttctcccacatgccccgtgtgcctggcccccatgcgtaagctcagcgtgtatccgtacataaaacgtgtcacccttatcc

SEQ ID NO: 444138 - DNA, 120 bp, Artificial Sequence
  ENSG00000154358_278 (sequence is synthesized)
cagagggacagcctgactcagccgtgccaggcagcctcaggtgctcccagggaagaactgatggtcattagggttgtcattgagagttacagtggcattttagtctttttcttgttgttt

SEQ ID NO: 444139 - DNA, 120 bp, Artificial Sequence
  ENSG00000154358_279 (sequence is synthesized)
acaacagaatacctgaaactgggtaatttataaaggaaataaatttacttcttacagctctggaggctgggaagtccaaggtcaaggggccacatctggtgagggcccttttgctgacag

SEQ ID NO: 444140 - DNA, 120 bp, Artificial Sequence
  ENSG00000154358_280 (sequence is synthesized)
gaactctctgcagagtccccaagggacggcacagggcatcccatggggagggggctgagtgtgctagcttgggcctctcttcatcttcttttaaagccaccactcatatggaagcacttt

SEQ ID NO: 444141 - DNA, 120 bp, Artificial Sequence
  ENSG00000154358_281 (sequence is synthesized)
aacccattaacctgttaacccgttgatccatgaatgggttaatccattcccgccttggacccaatcccctcttaaaggctccacctcttaatattgccacattgggattaagtttcaaca

SEQ ID NO: 444142 - DNA, 120 bp, Artificial Sequence
  ENSG00000154358_282 (sequence is synthesized)
tgagtttccagggggacattcagatcatagtaggtggctgttcgatcttactgtttggctccacatttgagtggcaggcagagtgagagctgtcattctctcaactctgtagataagaaa

SEQ ID NO: 444143 - DNA, 120 bp, Artificial Sequence
  ENSG00000154358_283 (sequence is synthesized)
actgaagctttagtgggtccatggccagggcaaggtcatcaggcacattgggatcagagcaggcgaggcccagccccatcaccgcagccttcacttggctctgaagtcccgggctggtgt

SEQ ID NO: 444144 - DNA, 120 bp, Artificial Sequence
  ENSG00000154358_284 (sequence is synthesized)
ccagagctgagtttgcaggaggtccctactggggtctgaccacagggcgttcacagggttcagtatttgaaaggccccagttgtgatcatcagaagtaacgtaaaccaggaatcatcact

SEQ ID NO: 444145 - DNA, 120 bp, Artificial Sequence
  ENSG00000154358_285 (sequence is synthesized)
gattttttctctccaatggatttggtgaccctggtgaaagtattctgttagcacagtaacgccccatgatctaataaagttggtacccagagttaatttttaaaaaagtcatcaagagtg

SEQ ID NO: 444146 - DNA, 81 bp, Artificial Sequence
  ENSG00000154358_286 (sequence is synthesized)
tggtacccagagttaatttttaaaaaagtcatcaagagtgagagtcataagataacaaaagatgctcttttaaagtttaac

SEQ ID NO: 444147 - DNA, 120 bp, Artificial Sequence
  ENSG00000154358_287 (sequence is synthesized)
gcgcaatgtctcggccgacgacgacgcggtgtacatctgcgagacgccagagggcagccgcacggtggcggagctcgcagtccaagcccccaggaagcctcccctgcaaccccctgtgga

SEQ ID NO: 444148 - DNA, 120 bp, Artificial Sequence
  ENSG00000154358_288 (sequence is synthesized)
ttctttgattgtttaaccttacaaaaatttagactagtaacttatttcacactgaaaagtgagttccaggaaggttagaggccacagagtataaaaggtaaaaccataaagcctctagat

SEQ ID NO: 444149 - DNA, 120 bp, Artificial Sequence
  ENSG00000154358_289 (sequence is synthesized)
gctaacatagattgctaaaaacttcagggaaaggaaagatttcttaaaactaaacagtggaacaatggtatatttaactacattaaaactaaaactttaatttgtcaagacatcatttga

SEQ ID NO: 444150 - DNA, 120 bp, Artificial Sequence
  ENSG00000154358_290 (sequence is synthesized)
gagcgaaaaggccggtcaaggacatgggtaagatgtttacaaatacacagttatcatttgctagcatttaaaatatataaagagttcctaaaaataaggaaggaaaagacagaaaaggct

SEQ ID NO: 444151 - DNA, 120 bp, Artificial Sequence
  ENSG00000154358_291 (sequence is synthesized)
actgaaaattggacagaagcctgaagagcgacaccccagaagagctgacgtaatggccagaagtggtggaaagggctccaccttgcatgtcaccaggcaatgcatgacaaagcccaggcc

SEQ ID NO: 444152 - DNA, 120 bp, Artificial Sequence
  ENSG00000154358_292 (sequence is synthesized)
ttccccgcagaggccaacgctgaccctcctgacagtggcaggactggaagcctcagtactctggggccctgcagtgaggacacgccctgcccagtcccatggggagaccctagcatatcc

SEQ ID NO: 444153 - DNA, 120 bp, Artificial Sequence
  ENSG00000154358_293 (sequence is synthesized)
ttgaagggagctgtgtaagcattaggaacccagtccctgcactggaggagctcgtgcacggagggtttgtcacaactgccccgcctggaatagcccatggcactgcacagtggatggaga

SEQ ID NO: 444154 - DNA, 120 bp, Artificial Sequence
  ENSG00000154358_294 (sequence is synthesized)
aactgtgattcttgtgctgggaggtggtggggcttctcccagctacatggccagtgccaagcttgggaaggttctgtttctcctactttcttgtctaggccctcctaccctagggtggtc

SEQ ID NO: 444155 - DNA, 120 bp, Artificial Sequence
  ENSG00000154358_295 (sequence is synthesized)
cctctcacctcctatttttatgcctgtggtggagctgggctgcttagtggggaagggagtgaacggaagggtcagggccctccttgtccatgttgggtggtgtttctgtgcagacatgct

SEQ ID NO: 444156 - DNA, 120 bp, Artificial Sequence
  ENSG00000154358_296 (sequence is synthesized)
gggtcacattttcccagtaccttctccaaactaccgatgtcccgaggtgtccaggactctggtcctatctaatgcatgagatggcggtaagccagacgtccctccctcggggatactcct

SEQ ID NO: 444157 - DNA, 120 bp, Artificial Sequence
  ENSG00000154358_297 (sequence is synthesized)
gcagtccctgcacggcctcatctggccccatgtgagggctctccctgtggaaagagattttaattcgttgagtcagggtgtagggaaattccagccacacagtcttatttggaattatat

SEQ ID NO: 444158 - DNA, 120 bp, Artificial Sequence
  ENSG00000154358_298 (sequence is synthesized)
caacactgaacactgggttcccaaagttttcagtgttctgggacacacttctgtccttccctgtggatgtagaagccctgtcagagccctgactaaaacccagatccacagcgttagtgt

SEQ ID NO: 444159 - DNA, 120 bp, Artificial Sequence
  ENSG00000154358_299 (sequence is synthesized)
gtgcaaaacgagtaaagagcagcacattggcaggtgcgcacacgtgacgttggaattccatttcggaagccaatctcactttccttttgcattctgttagaatgttctgtgtctgaattc

SEQ ID NO: 444160 - DNA, 120 bp, Artificial Sequence
  ENSG00000154358_300 (sequence is synthesized)
cccttggaatttggatagatttaaaagtgataggaataagtagctggtgtttctagcctccgcctccaggcgggtgaggaggtgacacctgagaattcctccctctcacccctgaccctg

SEQ ID NO: 444161 - DNA, 120 bp, Artificial Sequence
  ENSG00000154358_301 (sequence is synthesized)
ccggaaagcgaaactgagatgcgggcattgggccctgggaagcgtggggaaggggaaaggagaaagccaggtgggtttttaggtcccttccagtgccacactgtggggtgttgaggggcc

SEQ ID NO: 444162 - DNA, 120 bp, Artificial Sequence
  ENSG00000154358_302 (sequence is synthesized)
ctgtggggtgttgaggggccgcgcgaggcaggcccttccatgaggcctggactggaggccttctctaggcgccggcgtggcctgggccgcctgccgccacgcaggggccgcacgcctggg

SEQ ID NO: 444163 - DNA, 120 bp, Artificial Sequence
  ENSG00000154358_303 (sequence is synthesized)
cccggggtcaggggaggccgggaaacctcggctcccgggcgacaggcacccaggcccttctcagccccccggccgcggccgcgccgggcctcgcttcagccgggcgattcttcccctcat

SEQ ID NO: 444164 - DNA, 120 bp, Artificial Sequence
  ENSG00000154358_304 (sequence is synthesized)
cctcgcttcagccgggcgattcttcccctcatttgttgcattgtttgcattaatatgaatatcttgttctgtttgttttgtctcctgagagccaataaagctgtgttttttctttacacc

SEQ ID NO: 444165 - DNA, 120 bp, Artificial Sequence
  ENSG00000154358_305 (sequence is synthesized)
gtgtgggctgctggtaggcagcctgctggtcctgggccctcggagggaggtgagacccggcagcccctgcctcccagcctgtgcccccagcctgcgtgctgcccagagcccccatagaga

SEQ ID NO: 444166 - DNA, 120 bp, Artificial Sequence
  ENSG00000154358_306 (sequence is synthesized)
aagctgctccaaagcagagtttcagtctgcagctcatacataggtggggaaggctctgcagctgctcagaaggtacctttagagccagagctcctcacagcctgggtgcaccttgttaca

SEQ ID NO: 444167 - DNA, 120 bp, Artificial Sequence
  ENSG00000154358_307 (sequence is synthesized)
gatgacagaggcacagtcatgaatactgccagacgttatctcatgtgcagggagaagaaggggccagcaccattgaacttacctttcctaaaattgccgtacttcaggctagagacatgg

SEQ ID NO: 444168 - DNA, 120 bp, Artificial Sequence
  ENSG00000154358_308 (sequence is synthesized)
gaacctgcactgtgtcccccagggctgcactcattcaccgggccaggattggtgaattctgctggcagaccaggatgagcaaacacagcttcttatgtttgctgcctcgtcccagagaac

SEQ ID NO: 444169 - DNA, 120 bp, Artificial Sequence
  ENSG00000154358_309 (sequence is synthesized)
atttgcttctctgtttgggaaaagaaatgactgactaacttcttctctgtttgggaaaaacagagttagactaactaactaacttctctgtttgggaaaaactaacgtttacgtgggtaa

SEQ ID NO: 444170 - DNA, 120 bp, Artificial Sequence
  ENSG00000154358_310 (sequence is synthesized)
agaatctaaatgtagaaaataagaaaagataacatgaaggaaattgtggaaagtggacgtggacctggttttcttaggctttaggataatcttttccatctgtacatgggcctctgtctc

SEQ ID NO: 444171 - DNA, 120 bp, Artificial Sequence
  ENSG00000154358_311 (sequence is synthesized)
ctgctgtgtctcgtcctcgccgccagggctcactcacagctctgcagacgcttttgtgtattgtgtgtttgtgggccagggttagggctggcacttcatttaaaatgtgtttttatttta

SEQ ID NO: 444172 - DNA, 120 bp, Artificial Sequence
  ENSG00000154358_312 (sequence is synthesized)
gaaacagacacagagatagagacaaagaaagaaactgagtctaagacagagggacaaagaaagatggagatagagaggcagagacacagagagaaggtgagctcgtgtcagcctctccct

SEQ ID NO: 444173 - DNA, 120 bp, Artificial Sequence
  ENSG00000154358_313 (sequence is synthesized)
ccagggttgcaggtcagcctggaagctggacctggcagggagcctgtgcctggcccttgtgctacaagcgtggcccctccatcccctccccgaccataactgcagcccccaggccaggcc

SEQ ID NO: 444174 - DNA, 120 bp, Artificial Sequence
  ENSG00000154358_314 (sequence is synthesized)
gtgacccttgaggatgctggaactgtcagtttccacgtgggcacgtgtagctctgaggcccagctgaaagtcacagaggcagtgccgtgcctggtacgtggcttgcagaatgtggatgtc

SEQ ID NO: 444175 - DNA, 120 bp, Artificial Sequence
  ENSG00000154358_315 (sequence is synthesized)
ttcgcgggggaggtggccacgttctcctgtgaggtgtctcacgcgggtgggccggaggcccgctggtggctggatgggaccctgctacaggatggcccccagagcgccatcgctgtgcga

SEQ ID NO: 444176 - DNA, 120 bp, Artificial Sequence
  ENSG00000154358_316 (sequence is synthesized)
gatgggatctttcactccctcatgctctcgggcctgggggtggccgactccggcactgtcatcttccgcgcagggcccctggtctccacggccaagttgttgatcaaagatcccgtggtg

SEQ ID NO: 444177 - DNA, 120 bp, Artificial Sequence
  ENSG00000154358_317 (sequence is synthesized)
ctgagctcctctgccagtattcacggcccgtgcaggccacgtggaagatggacgagcgggaggtgcacacggatgggcaccgtgtcatcatagagcaggactggaacgtggccaggctga

SEQ ID NO: 444178 - DNA, 80 bp, Artificial Sequence
  ENSG00000154359_0 (sequence is synthesized)
gaccgtggcggcgggcggcggcggcgcagccctccgcgggccatgtcctctccggcggtggcgaggacctccccaggagg

SEQ ID NO: 444179 - DNA, 120 bp, Artificial Sequence
  ENSG00000154359_1 (sequence is synthesized)
ggtggcgaggacctccccaggagggagtcgggagatggccccagcgccgcagggccgaggccggttctgggaagtgggcggcggcagcggccatcggctggagcgcgcggccgcggagtc

SEQ ID NO: 444180 - DNA, 80 bp, Artificial Sequence
  ENSG00000154359_2 (sequence is synthesized)
ggagcgctgggagctgctgctccgccgcggggagctgctggcgctgggcggccacctgaagggcgcgctggaggcgttcg

SEQ ID NO: 444181 - DNA, 120 bp, Artificial Sequence
  ENSG00000154359_3 (sequence is synthesized)
cctgggcgccctggtggactgcctggtgttcaactaccggctccgccacgggctgggctggagcgcggccccggttgcaggcgctgacggcggcgccggcgggctcctcagatgcctggg

SEQ ID NO: 444182 - DNA, 120 bp, Artificial Sequence
  ENSG00000154359_4 (sequence is synthesized)
ctgccggggcttcctgagcgagccggtgaccgtgccctgtggccacagctactgccgccgctgcctgcggagggaactccgcgcccgctgccgcctctgccgggaccggctgccgcccgc

SEQ ID NO: 444183 - DNA, 120 bp, Artificial Sequence
  ENSG00000154359_5 (sequence is synthesized)
caccgccagtgccactgatgctgaagggaccgccccgcggccgccgcctctggccgccgccatcgccgcttcagacttcagaaccagcgtcgtcctcaaccacctggccgagaagtggtt

SEQ ID NO: 444184 - DNA, 120 bp, Artificial Sequence
  ENSG00000154359_6 (sequence is synthesized)
ggccagcgcgagcgggcccgggcggccggcaggctcggggagctactgcaccaggggcgctaccgggaggccctggccgccgcctgcgaggcgctgcgagcagaacccagtgacttgatt

SEQ ID NO: 444185 - DNA, 120 bp, Artificial Sequence
  ENSG00000154359_7 (sequence is synthesized)
gattgtaaaaatttacagagcggaatcatatgctggtctccaagagtttaaagcagccatagaagatttaaatgcagttctttttcaacttccagattggcctgaggtctacttcaggaa

SEQ ID NO: 444186 - DNA, 120 bp, Artificial Sequence
  ENSG00000154359_8 (sequence is synthesized)
aggaaaagtactctgcgatgctggttttttaggtgatgccttacaactctttcttcagtgcttagcccttgatgaagattttgcacctgcaaagctgcaagtacaaaagattttatgtga

SEQ ID NO: 444187 - DNA, 120 bp, Artificial Sequence
  ENSG00000154359_9 (sequence is synthesized)
tttattattacctgaaaacttaaaagaaggcctgaaggaatcttcctggagttcattaccatgtactaaaaacagaccttttgattttcattcagtgatggaagagtctcagtctctcaa

SEQ ID NO: 444188 - DNA, 120 bp, Artificial Sequence
  ENSG00000154359_10 (sequence is synthesized)
tgaacctagcccaaagcagagtgaagaaataccagaggtcacttcagagcctgtcaaaggaagcttaaaccgtgctcagtcagcacagtctataaattcaacagaaatgcctgccagaga

SEQ ID NO: 444189 - DNA, 120 bp, Artificial Sequence
  ENSG00000154359_11 (sequence is synthesized)
ggactgtttaaaaagagtgtcctcagaacctgttctgtcagttcaagaaaaaggtgttctgctgaaaagaaagttgtctcttttagaacaggatgtgattgtaaatgaagatggaagaaa

SEQ ID NO: 444190 - DNA, 120 bp, Artificial Sequence
  ENSG00000154359_12 (sequence is synthesized)
taagctgaaaaaacaaggagaaactcccaatgaagtctgtatgttttccttagcttatggtgatattccagaagaattaatcgatgtctcagatttcgagtgttctctctgcatgaggtt

SEQ ID NO: 444191 - DNA, 120 bp, Artificial Sequence
  ENSG00000154359_13 (sequence is synthesized)
gttttttgagccagtaacaaccccttgcggacattcgttctgtaagaattgtcttgagcgttgtttagatcatgcaccatattgtcctctttgcaaagaaagcttaaaagagtatctagc

SEQ ID NO: 444192 - DNA, 120 bp, Artificial Sequence
  ENSG00000154359_14 (sequence is synthesized)
agataggaggtactgtgtcacacagctgttggaagaattaatagtgaagtatctgcctgatgaactgtctgagagaaaaaaaatatatgatgaagaaactgctgaactctcacacttgac

SEQ ID NO: 444193 - DNA, 120 bp, Artificial Sequence
  ENSG00000154359_15 (sequence is synthesized)
tgtttgcactatggcctaccccactgtgccttgccctctccatgtatttgagccaagatacagattgatgattcgaagaagtatacagactggaaccaaacagtttggcatgtgtgtcag

SEQ ID NO: 444194 - DNA, 120 bp, Artificial Sequence
  ENSG00000154359_16 (sequence is synthesized)
tgatacacaaaatagttttgcagattatggttgtatgttacaaattagaaacgtgcatttcttaccggacggaaggtctgtggttgatacagttggaggaaagcggtttagggttttaaa

SEQ ID NO: 444195 - DNA, 120 bp, Artificial Sequence
  ENSG00000154359_17 (sequence is synthesized)
aagaggaatgaaagatggatattgcactgccgacattgaatatctggaagatgttaaggttgagaatgaagatgagattaagaatctcagagagcttcatgatttggtttactctcaagc

SEQ ID NO: 444196 - DNA, 120 bp, Artificial Sequence
  ENSG00000154359_18 (sequence is synthesized)
ctgcagctggtttcagaatttaagagacagatttcgaagccaaattcttcagcatttcggatcaatgcccgagagggaggaaaaccttcaggcagcccctaatggacctgcatggtgttg

SEQ ID NO: 444197 - DNA, 120 bp, Artificial Sequence
  ENSG00000154359_19 (sequence is synthesized)
gtggcttcttgcagttctccctgtagacccacgataccagctgtcggttttgtcaatgaagtctttgaaagaacggttgaccaagatacagcatatactgacctatttttctagagacca

SEQ ID NO: 444198 - DNA, 120 bp, Artificial Sequence
  ENSG00000154359_20 (sequence is synthesized)
atctaagtaactaactctttggatctccctttaaagtgaccctaatctggctgcattgatggccagattgtctgctgcctttgcacatctagtgctggtttcagaaatttaatgaaactt

SEQ ID NO: 444199 - DNA, 120 bp, Artificial Sequence
  ENSG00000154359_21 (sequence is synthesized)
ttctttttccttcgacctcctgaatcatgtggttctgcaaatgaataccttcaactaggatttagaccactaagaacttgcacagaaaaacacgcattgaatgtgtgtcgaacctctaca

SEQ ID NO: 444200 - DNA, 120 bp, Artificial Sequence
  ENSG00000154359_22 (sequence is synthesized)
ttgtgaagttgcactatgtaccatactctaaaatgaaataagaactctttatgtctgtgagagagtgtgtgtgtgtgtgtgcgtgcgtgtgtgcttgtgggggttgggtagtgtgtgtgt

SEQ ID NO: 444201 - DNA, 120 bp, Artificial Sequence
  ENSG00000154359_23 (sequence is synthesized)
attttctctggctttaaaattttaaaacaaacaaacaaaaaagccatagagagcagaacttgccgagggtcatttattgcccaagtttacaagagtagcgatacaagtttttgcaaattg

SEQ ID NO: 444202 - DNA, 120 bp, Artificial Sequence
  ENSG00000154359_24 (sequence is synthesized)
aatttgcctcagatatatctgtcctaatgcttatatttgcacaagtatgtaaaatatcgtgttgaggatcattctttgttggaaacactgctcttgctgaactgtcttgaccattgacta

SEQ ID NO: 444203 - DNA, 120 bp, Artificial Sequence
  ENSG00000154359_25 (sequence is synthesized)
tgacacagtttcttatttatgtaaatacttgcatcacagtggccgacaggcattggatgcagaacctagagccagttttcaggaacaattgtaaacctgacatggtactgtgcatctatt

SEQ ID NO: 444204 - DNA, 120 bp, Artificial Sequence
  ENSG00000154359_26 (sequence is synthesized)
cataaaacactcaaaactgtgaaaatatggtttacatttaattgtacataaaggtaaagggagaactcaattcagtaccagttagtttgtacattttagggggcttttcacattaactgc

SEQ ID NO: 444205 - DNA, 120 bp, Artificial Sequence
  ENSG00000154359_27 (sequence is synthesized)
ccatttgtgtaatttatagtttgacatgatgtgtttgttttaaaaaaaaatgcatagtataaacccattaaggatctgggaaaagagaagaagtttaatatagaactaagcttttaaagt

SEQ ID NO: 444206 - DNA, 120 bp, Artificial Sequence
  ENSG00000154359_28 (sequence is synthesized)
ttgtttttgtttttaattctggtctcggtgcaaatgttagttatgccttattcatatcacagttagatcaccatgctgcaacatggtttatattcatgctgccctagaaacttttgtaat

SEQ ID NO: 444207 - DNA, 120 bp, Artificial Sequence
  ENSG00000154359_29 (sequence is synthesized)
tatttgttgcaaatttgtgactgtccttattaactttcttttatgtaagtaatttgtaaaagtttcttaaaatttttgcttttgcttatttaattttgaataaaagctaaattcctaata

SEQ ID NO: 444208 - DNA, 120 bp, Artificial Sequence
  ENSG00000154359_30 (sequence is synthesized)
gaagagtcccagtcatctgccgaaggtgcgctcccaggccccctgcttgggcgcgcccacctggaacatgggcgtagagctatgaaaatgcagacccgcacaagcgcgaggccacgcggg

SEQ ID NO: 444209 - DNA, 120 bp, Artificial Sequence
  ENSG00000154359_31 (sequence is synthesized)
ggcccttggctctaggcctttggcaggaggcctttgttgatggagaattttaaaacattctggagggtatggttacacttatcactgccctttctctcctctcctgcctgctgggccctc

SEQ ID NO: 444210 - DNA, 120 bp, Artificial Sequence
  ENSG00000154359_32 (sequence is synthesized)
gcggccgctcgcttcctgccgcgcgctttccgggaattggctctcgggccgggcccgccgcggggaaacgactgccggggcggggagagaatcccccgcgagggcaactaggccgggcag

SEQ ID NO: 444211 - DNA, 120 bp, Artificial Sequence
  ENSG00000154359_33 (sequence is synthesized)
gcggcgtctcccttcctcacccacaaaagtcaccgggacaattgggaaccgcgggagggcagaattgcataagctgggggcggggggcgttgtgtaacgggtgacgtccggtgggcgtgg

SEQ ID NO: 444212 - DNA, 120 bp, Artificial Sequence
  ENSG00000154359_34 (sequence is synthesized)
cgggagctccgcgcgggcgcccggccccgggaggccctgcaggccgccgggcttggggcttggggcggagctgcccagggtggtcccttgctacctggaaatgcctgaactggttcctct

SEQ ID NO: 444213 - DNA, 120 bp, Artificial Sequence
  ENSG00000154359_35 (sequence is synthesized)
tgaaagtttcagctggcctgtttcagatcctgcttatttcctatgtactttgcagtgcacctagcttatggtaaagatgagaggggctgcctgatccatagttctctgccacgcttctcc

SEQ ID NO: 444214 - DNA, 120 bp, Artificial Sequence
  ENSG00000154359_36 (sequence is synthesized)
tggcctttccacttaggatcaggctgtggggaaaggccttataggtcttgagtgcatttcttagtctccaagaagcagcctcggcctcctaacctaggttagcactttcttcttaaggtg

SEQ ID NO: 444215 - DNA, 120 bp, Artificial Sequence
  ENSG00000154359_37 (sequence is synthesized)
gttttaggcgctgaaagggggcagtttcaagcttctcttacgtaaaaggaagagttgttctatataaatcagtagttctctaccagggggattttatctcccctctctcagggggcatta

SEQ ID NO: 444216 - DNA, 120 bp, Artificial Sequence
  ENSG00000154359_38 (sequence is synthesized)
tttagaacaatatctggagagatttttggttgccacctcttgtgggggtggtgctggtaccgacatctagtgggagaggctggggtgctgctcagacatcctactaggcacagcaggatt

SEQ ID NO: 444217 - DNA, 120 bp, Artificial Sequence
  ENSG00000154359_39 (sequence is synthesized)
cccacaacaaagaattatcaggccccaagtgccactgttgataaaccttgtgttacgcgtatttcaagatcttagtgtctatccattggcatgaaatgataggggaataatccccaagaa

SEQ ID NO: 444218 - DNA, 120 bp, Artificial Sequence
  ENSG00000154359_40 (sequence is synthesized)
aacagacatctagaatagcaactgactttaggtattacaggtaaatttatagactgtgtaactgaaaggatcatctttcgggtcatcttttgtcccaagtgcttagtcatattgaactaa

SEQ ID NO: 444219 - DNA, 120 bp, Artificial Sequence
  ENSG00000154359_41 (sequence is synthesized)
tgtcaagatcttgtgttgtttagtatctttagagttcgaagcacaaaccccggagatttttgtattctttcagtgccttcgtgaggagtaggcaggtataaaatagaaaggtaggctcag

SEQ ID NO: 444220 - DNA, 120 bp, Artificial Sequence
  ENSG00000154359_42 (sequence is synthesized)
aacaaaaaaaaagtatttggaatacagaattctgatacacatgactctgcttctctgggtgaataaagagaagagaaactggactcagttgtacagaccacctagtaactgaccatgaac

SEQ ID NO: 444221 - DNA, 120 bp, Artificial Sequence
  ENSG00000154359_43 (sequence is synthesized)
aggcatattcctgaggtaagcacccagaaatttgattctccagctgtctcccagcttatttcctcgctattatagggaagctgccatggggtgcttctaaccaagtattgggcagcagta

SEQ ID NO: 444222 - DNA, 120 bp, Artificial Sequence
  ENSG00000154359_44 (sequence is synthesized)
cagcactgaaacaggtattgccctgttcttctgatccctttttccatttgtgtcggttggcatatggcatatggacgggggattagacacagaagtcttactgactattgtatttctagg

SEQ ID NO: 444223 - DNA, 120 bp, Artificial Sequence
  ENSG00000154370_0 (sequence is synthesized)
gcctcggctcctcttcctgccggcatccgggatccctacgtcccgcgtcccccgagcgctcggagcctacgcgcccagcgctaccgaaacccagagtcctgcgccctggagtccccgcgc

SEQ ID NO: 444224 - DNA, 120 bp, Artificial Sequence
  ENSG00000154370_1 (sequence is synthesized)
cgaaacccagagtcctgcgccctggagtccccgcgccccggagcccgagcacccgggagtcccgagcctcgcgccccggagtgcccgagcctgcgccgccgcacccggataccccgcgtc

SEQ ID NO: 444225 - DNA, 120 bp, Artificial Sequence
  ENSG00000154370_2 (sequence is synthesized)
ggacagtaccgccttcctcccctctgtccgcgccatggccgcccccgacctgtccaccaacctccaggaggaggccacctgcgccatctgcctcgactacttcacggatccggtgatgac

SEQ ID NO: 444226 - DNA, 120 bp, Artificial Sequence
  ENSG00000154370_3 (sequence is synthesized)
cgactgcggccacaacttctgccgcgagtgcatccggcgctgctggggccagcccgagggcccgtacgcgtgccccgagtgccgcgagctgtccccgcagaggaacctgcggcccaaccg

SEQ ID NO: 444227 - DNA, 120 bp, Artificial Sequence
  ENSG00000154370_4 (sequence is synthesized)
cccgcttgctaagatggccgagatggcgcggcgcctgcacccgccgtcgccggtcccgcagggcgtgtgccccgcgcaccgcgagccactggccgccttctgtggcgacgagctgcgcct

SEQ ID NO: 444228 - DNA, 120 bp, Artificial Sequence
  ENSG00000154370_5 (sequence is synthesized)
cctgtgtgcggcctgcgagcgctctggggagcactgggcgcaccgcgtgcggccgctgcaggacgcggccgaagacctcaaggcgaagctggagaagtcactggagcatctccggaagca

SEQ ID NO: 444229 - DNA, 120 bp, Artificial Sequence
  ENSG00000154370_6 (sequence is synthesized)
gatgcaggatgcgttgctgttccaagcccaggcggatgagacctgcgtcttgtggcagaagatggtggagagccagcggcagaacgtgctgggtgagttcgagcgtcttcgccgtttgct

SEQ ID NO: 444230 - DNA, 120 bp, Artificial Sequence
  ENSG00000154370_7 (sequence is synthesized)
ggcagaggaggagcagcagctgctgcagaggctggaggaggaggagctggaggtgctgccccggctgcgggagggcgcagcccacctaggccagcagagcgcccacctagctgagctcat

SEQ ID NO: 444231 - DNA, 120 bp, Artificial Sequence
  ENSG00000154370_8 (sequence is synthesized)
cgccgagctcgagggccgctgccagctgcctgctctggggctgctgcaggacatcaaggacgccctgcgcagggtccaggatgtgaagctgcagcccccagaagttgtgcctatggagct

SEQ ID NO: 444232 - DNA, 120 bp, Artificial Sequence
  ENSG00000154370_9 (sequence is synthesized)
gaggaccgtgtgcagggtcccgggactggtagagacactgcggaggtttcgaggggacgtgaccttggacccggacaccgccaaccctgagctgatcctgtctgaagacaggcggagcgt

SEQ ID NO: 444233 - DNA, 120 bp, Artificial Sequence
  ENSG00000154370_10 (sequence is synthesized)
gcagcggggggacctacggcaggccctgccggacagcccagagcgctttgaccccggcccctgcgtgctgggccaggagcgcttcacctcaggccgccactactgggaggtggaggttgg

SEQ ID NO: 444234 - DNA, 120 bp, Artificial Sequence
  ENSG00000154370_11 (sequence is synthesized)
gcgggcaacggcttctggatcctggtcttcctggggagctattacaattcctcggaacgggccttggctccactccgggacccacccaggcgcgtggggatctttctggactacgaggct

SEQ ID NO: 444235 - DNA, 120 bp, Artificial Sequence
  ENSG00000154370_12 (sequence is synthesized)
ggacatctctctttctacagtgccaccgatgggtcactgctattcatctttcccgagatccccttctcggggacgctgcggcccctcttctcacccctgtccagcagcccgaccccgatg

SEQ ID NO: 444236 - DNA, 120 bp, Artificial Sequence
  ENSG00000154370_13 (sequence is synthesized)
actatctgccggccgaaaggtgggtccggggacaccctggctccccagtgactcgggccctcctggaggagtcctgttgcctctcctgcccctccaggccactgagtgttttggccactt

SEQ ID NO: 444237 - DNA, 120 bp, Artificial Sequence
  ENSG00000154370_14 (sequence is synthesized)
ggaggacctgggaggagggagtgtgtcctttgagcaagaggaggaactcctggtgcctttctgagcctgcgtgggagaaccccaattctagcactccaggaaactgtgggagagtgtggg

SEQ ID NO: 444238 - DNA, 120 bp, Artificial Sequence
  ENSG00000154370_15 (sequence is synthesized)
gcaggctccgtcctccctgggagacccctccagccaccgggtgccacttaatgccaacagcccttaccaaagctgggagccccattgccccggcagctctggcctgtggttccagaagct

SEQ ID NO: 444239 - DNA, 120 bp, Artificial Sequence
  ENSG00000154370_16 (sequence is synthesized)
gagaaaactccactggggcttgcagaatccagggttcacctaagctgcacagttcctgcagctttgccagccccctgaaagtcttgtgtaccccacctctgaagatgctgggggaggcag

SEQ ID NO: 444240 - DNA, 120 bp, Artificial Sequence
  ENSG00000154370_17 (sequence is synthesized)
ctgggatgggagccagccccatgcctgtctgtgaccccacagtgggtgagagcccgtcacagtcctgggtgtggctgctctggaagaattaggaggcagccataataagagtcttcagag

SEQ ID NO: 444241 - DNA, 120 bp, Artificial Sequence
  ENSG00000154370_18 (sequence is synthesized)
agatgatgggaggggccagtgaggacaggaacagagagtagatgtcctataataaaggggcttctgggaggtgcctgggcacagatgtctgttcagcaggtgtgtgggcctagaggagag

SEQ ID NO: 444242 - DNA, 120 bp, Artificial Sequence
  ENSG00000154370_19 (sequence is synthesized)
agcagagcccagaaatgtcttttgcaggcccacgttctgacttgaagctttcgtgggcatgttgccattgggttttgcccttgcaaaggcttcctaggtctccagtggcccctcaggacc

SEQ ID NO: 444243 - DNA, 120 bp, Artificial Sequence
  ENSG00000154370_20 (sequence is synthesized)
cagggtcccagctgctgcttggggatgtgcactgctggccgccggccttgcagtctctctaccctggggaggaacagtggcttctcagagcctggggcatacagaagaaggcaggagttg

SEQ ID NO: 444244 - DNA, 120 bp, Artificial Sequence
  ENSG00000154370_21 (sequence is synthesized)
atttttgtgttgggtttggggtttctttgtcctcaaggtactgttctgtttctctttacccctctgctttatttattgtaagcattcccacgttaaataaactttggctgttgtctacaa

SEQ ID NO: 444245 - DNA, 120 bp, Artificial Sequence
  ENSG00000154370_22 (sequence is synthesized)
aacatggagtcagatgctatcacgtatcaggcagtgacacaggaaggacgcacgcccaagagtggggctgagcagggagcctgcagggcaggtggagctgggagaggaagcagtgcaacc

SEQ ID NO: 444246 - DNA, 120 bp, Artificial Sequence
  ENSG00000154370_23 (sequence is synthesized)
acagggttgggctccagctggggtggaggtgcccctatgctgaaggctgggatgtgtgcctgtcctgtccttggcacccagaggcgcccacttggggctctgggtgagtgagccaacagc

SEQ ID NO: 444247 - DNA, 120 bp, Artificial Sequence
  ENSG00000154370_24 (sequence is synthesized)
agagcctctgtccagcattcctgtgtctgagccttgctgcgggtggtttatggccccctgtgtgtgtttttgctgcctgacgctcaaatgtaggagagggggacggggcgaggctccagg

SEQ ID NO: 444248 - DNA, 80 bp, Artificial Sequence
  ENSG00000154370_25 (sequence is synthesized)
gagagaatgtggccataccctggccagcaaggagctggaatcagaggaaagtgggagaacctcagaggtggccgatccta

SEQ ID NO: 444249 - DNA, 120 bp, Artificial Sequence
  ENSG00000154370_26 (sequence is synthesized)
tcagaggaaagtgggagaacctcagaggtggccgatcctagatggactccctgcagggactgtgttagcaggtcagtacttaagtcctgggaaagccccagactgggcaggatgaggggg

SEQ ID NO: 444250 - DNA, 120 bp, Artificial Sequence
  ENSG00000154370_27 (sequence is synthesized)
acacagtcgtttcctctctaacctcccctccagggctgccctgcatttctgggtggggtactgggagccatctctgccatctgagatgccagggctcagcctgccttttctccccttgtc

SEQ ID NO: 444251 - DNA, 120 bp, Artificial Sequence
  ENSG00000154370_28 (sequence is synthesized)
ttgctgcttaaaacccaaataaaacccgagctgaagggcctggggcacacgttccctggcctgcgctccctcccgctgtcctctttcctcgctgacctgctgcaggtgtgctcctgggag

SEQ ID NO: 444252 - DNA, 120 bp, Artificial Sequence
  ENSG00000154370_29 (sequence is synthesized)
cctacgtgtggggcagatggcagcatctttggagctttcttgattgcactttgtgtgttgcatcatggtcacttgtgtgtgccagatgagcagttaaggcagtgttagaatcagtactga

SEQ ID NO: 444253 - DNA, 120 bp, Artificial Sequence
  ENSG00000154370_30 (sequence is synthesized)
gcttgatctgtccctatcacagagcaaacttctgggatactagaataaatctgaatctgtccccttctgctttggattttagcagaaaggtggtttagagccatatccgtgggcttgttc

SEQ ID NO: 444254 - DNA, 120 bp, Artificial Sequence
  ENSG00000154370_31 (sequence is synthesized)
agacacagattcatttgggttttcttttctttgcccatgcaggaatgtctacacctgaaacatgttagcccagcagaattacccttgtgacaccaattaccccaatgggtgcagagagtg

SEQ ID NO: 444255 - DNA, 120 bp, Artificial Sequence
  ENSG00000154370_32 (sequence is synthesized)
cccaatagctctatagagttgactcgatatagtttcatgggatagcacttaaccctttcttttgcaggtgaagaaaaaaatttccctctaccctgttaggttcagtggctcagggctgca

SEQ ID NO: 444256 - DNA, 120 bp, Artificial Sequence
  ENSG00000154370_33 (sequence is synthesized)
aattaaactggcacaagacaaattaacaggaaaaaaaatcatacaatttgattaatattttaagtttcacatgcacaagaacttcatagaaaagcgtatttcagcaaaggtttgtgaatt

SEQ ID NO: 444257 - DNA, 120 bp, Artificial Sequence
  ENSG00000154370_34 (sequence is synthesized)
gtggagaagtgactggacacagaaatgggattgggcgtctaggactgataaattgtgggaaagtgactaggaaatagatgggaagaattaacacaagataatggtcattgtagtaaggtc

SEQ ID NO: 444258 - DNA, 120 bp, Artificial Sequence
  ENSG00000154370_35 (sequence is synthesized)
tgtttaggcagaatcatctcccaggattagagtgccctcctcttcctggtagagagagggtgcctttctcatggggaatgaataccctacttttaggcagataggagtacagagagctct

SEQ ID NO: 444259 - DNA, 120 bp, Artificial Sequence
  ENSG00000154370_36 (sequence is synthesized)
tcctgcatctgcttttactcagaataattcttgtaccacagcggtatatttggggatgacatcctgttcttcactgccttagagcctaggttatgttaaccacagcaaactgcttttacc

SEQ ID NO: 444260 - DNA, 120 bp, Artificial Sequence
  ENSG00000154370_37 (sequence is synthesized)
tgcccccatgggcctagaaagctcagtcccacctatggggctgtgtgtccacttgccagagctggggcccattagctccatgacaggttcactccttgcctggccctgacctggggtcat

SEQ ID NO: 444261 - DNA, 120 bp, Artificial Sequence
  ENSG00000154370_38 (sequence is synthesized)
gacagctgaacaagccccaggctgggttgccccgaggtggtaaacagggaagtcccagtaagctccagttccaggaagcagcaccatgggagagagaagatggcccccagatctctctgg

SEQ ID NO: 444262 - DNA, 120 bp, Artificial Sequence
  ENSG00000154370_39 (sequence is synthesized)
gttgtgtgtcagatggcacttgtgtggggagggggtttgccacaggaaggaggaggccagggaagatcccaggcctgcaccaagccccagcatcccagttctgactacacgcagggtaag

SEQ ID NO: 444263 - DNA, 120 bp, Artificial Sequence
  ENSG00000154370_40 (sequence is synthesized)
aggtttctgttctgatctggccagagacacaaagatgcaggtacctgaaatgcaagatctttgccatgctgggtatgttgtgctgctttacagcccattccatctgatcaaatgctgttt

SEQ ID NO: 444264 - DNA, 68 bp, Artificial Sequence
  ENSG00000154370_41 (sequence is synthesized)
tgctgctttacagcccattccatctgatcaaatgctgtttgtaaccttagtgttgaaaactgaaaacg

SEQ ID NO: 444265 - DNA, 120 bp, Artificial Sequence
  ENSG00000154370_42 (sequence is synthesized)
atcgtgccactgcactccagcttgggggacaaagcgagactccgtctcaaaaaaagaaaactgaaaatgtcccgtagggactgaggcattgagggagaagtgagaggcactgggccaagt

SEQ ID NO: 444266 - DNA, 120 bp, Artificial Sequence
  ENSG00000154370_43 (sequence is synthesized)
gaagtgagaggcactgggccaagtgtttgaggtggggttggggtcacaggggccaggcctgagttttctggaacaggtcggcagcagtgaggagagaggcctggggacagggaccgccat

SEQ ID NO: 444267 - DNA, 120 bp, Artificial Sequence
  ENSG00000154370_44 (sequence is synthesized)
ttggggttcttgtagctcacgtgagagctgagcctaggcagagacagtaaagcagttggacatgtccttggtgctccagcggtcttcccgaatcgtgaggccaagtggtgaactaaagtg

SEQ ID NO: 444268 - DNA, 120 bp, Artificial Sequence
  ENSG00000154370_45 (sequence is synthesized)
agcacctggagccaggcagctgggctgaagtcctggctctgctaccggggcagacttctggaccctcccagcacctccatccttccagagcgtggatagcgagagatgagagccaagact

SEQ ID NO: 444269 - DNA, 120 bp, Artificial Sequence
  ENSG00000154370_46 (sequence is synthesized)
tggggtggctgagaagcaaagaggtgtggccagcacagggcccgttgctgataagggtgtcagatggggtggaagtgagcagacccttcgagaagtgggttcagggcaccccaagcacac

SEQ ID NO: 444270 - DNA, 120 bp, Artificial Sequence
  ENSG00000154370_47 (sequence is synthesized)
acagtacagtgagcttgtgtacaggattttcactgcttcctggtatgcacagcatgaggaaccgtgggaatgagaattaaggaccaagaaagcagaatggaggtgtacccatcctggagc

SEQ ID NO: 444271 - DNA, 120 bp, Artificial Sequence
  ENSG00000154370_48 (sequence is synthesized)
gctgatgaagctgaaaatgcacaaggtcccgagtggcttggagaaaagatagggtgggtagccaggcatgtctgtccgtgctgactgtcctaccaaaacaccatggtttgcacatggcag

SEQ ID NO: 444272 - DNA, 120 bp, Artificial Sequence
  ENSG00000154370_49 (sequence is synthesized)
atgtatacaagctggagactcacagctctggaggctggaagtctaagatcaagccctggcaggtttggtgtctggtgagggtgcttcctggttcacagacaacaccctctcactgtgttg

SEQ ID NO: 444273 - DNA, 120 bp, Artificial Sequence
  ENSG00000154370_50 (sequence is synthesized)
tcatatggtgaaaggggcgagggttcctttataacactaatcccattgtggcggcactgccctcctgacctagtcacctcccaaagcccccgcctcctaacatcatcacactgggtgttg

SEQ ID NO: 444274 - DNA, 120 bp, Artificial Sequence
  ENSG00000154370_51 (sequence is synthesized)
ggatttcaacctatgaatttgtgggggcatagggcagaatttttggaccccagcataggcttggtccaaggcccttatgtgagccagcaggtgagaaggaagaggaggaggagtagacac

SEQ ID NO: 444275 - DNA, 120 bp, Artificial Sequence
  ENSG00000154370_52 (sequence is synthesized)
tggcttgggaacaggagagctcagcaccttcagagccagcttggggacagatggggtgggcagccagaacccttgaggtagctttgcaaaggggggtgaggcctgggctagggtagcaag

SEQ ID NO: 444276 - DNA, 120 bp, Artificial Sequence
  ENSG00000154370_53 (sequence is synthesized)
gtcgaggactagaaatgccccatatgagaaaaaggaaagaatgtggctggggctgtcagcctctggcaagaggctgcccacctaccatgagggctcacgcttattggagggcattgagtt

SEQ ID NO: 444277 - DNA, 120 bp, Artificial Sequence
  ENSG00000154370_54 (sequence is synthesized)
ccctgattcaccaggcagatttcagtttgtccccattgtctttgaggaggggacagggtgtcaggtgcaaaagggcaggcttctgtgacaggactcatgtctcatggtcctgcctggcct

SEQ ID NO: 444278 - DNA, 120 bp, Artificial Sequence
  ENSG00000154370_55 (sequence is synthesized)
cggccgctgcaggacgcggccgaagacctcaaggacatcaaggacgccctgcgcaggtacgaacccagcctctcctggagggggggcaggagggagtggggtgggacccagctgttggcc

SEQ ID NO: 444279 - DNA, 120 bp, Artificial Sequence
  ENSG00000154370_56 (sequence is synthesized)
cagctccaaactcacagtgtcatggtggtgggttgttgggaaaacgtcctctgctcatacttctgacatcagttgtgtgggtattttcacaccaaacaattcttcaacttctggaaacga

SEQ ID NO: 444280 - DNA, 120 bp, Artificial Sequence
  ENSG00000154370_57 (sequence is synthesized)
attgggtatccaaggattccattcagcattgaacagaattgccagtgctgacactacaggagttagtacagaccccacagattaagggctcagtcccataagactgcccccacttcagat

SEQ ID NO: 444281 - DNA, 120 bp, Artificial Sequence
  ENSG00000154370_58 (sequence is synthesized)
ttattgtgaaggataccactcaggaagagccaaatggaagagacacatgggcaaagcctggggaagggctcagagctttcccaccctccctgggtgcaccttcccagcacctcagtgtgc

SEQ ID NO: 444282 - DNA, 120 bp, Artificial Sequence
  ENSG00000154370_59 (sequence is synthesized)
tcaccaacctggaaactccctgagccccaagagctgtttaggtgtctttgtggaggttccattacatggttatgattgattaaatcattggtcattggtgatggggctcaacctcagacc

SEQ ID NO: 444283 - DNA, 120 bp, Artificial Sequence
  ENSG00000154370_60 (sequence is synthesized)
cctttccccttcctgaggtcagaggctggggctgagtgttcccgccctctactgacaggattggtctttctggtggctggccttatgctgggctctcaggtccccacctcagccactgca

SEQ ID NO: 444284 - DNA, 120 bp, Artificial Sequence
  ENSG00000154370_61 (sequence is synthesized)
gtggcatcaactcaggtgtgatggaaaggggcatcttatgatagcacaagatgcttctatcagtcaggaaattcccagggttctgtgagctctgcgccaggaactgggcacaaaacccaa

SEQ ID NO: 444285 - DNA, 120 bp, Artificial Sequence
  ENSG00000154370_62 (sequence is synthesized)
atctgagtcttgtatcacagtcacccaaaggaagtactatcctcagctcttgctagcaggtcaggagcctgttgtgtaggaactgtgtgcaggcctccagaggtggatagatctgaaatc

SEQ ID NO: 444286 - DNA, 120 bp, Artificial Sequence
  ENSG00000154370_63 (sequence is synthesized)
ggagtggtcagggttgggacagctgccctaattcacatccttcatttggagattgaaaggaaaaacagactggatgcattggctcacctctgtaatcccagcactttgagaggctcaggc

SEQ ID NO: 444287 - DNA, 120 bp, Artificial Sequence
  ENSG00000154370_64 (sequence is synthesized)
gggaggattgcttgaggccatcagttcaagaccaacccgggaaacatagcaagactcccatctctacaaataaaaaacaaaaaaatgagccagccatggtggcacacgcctgtaatccca

SEQ ID NO: 444288 - DNA, 73 bp, Artificial Sequence
  ENSG00000154370_65 (sequence is synthesized)
aaaaatgagccagccatggtggcacacgcctgtaatcccagcagcttgggaggatctgaggcgggaggatcat

SEQ ID NO: 444289 - DNA, 120 bp, Artificial Sequence
  ENSG00000154380_0 (sequence is synthesized)
gccggcaccatgagtgaacagagtatctgtcaggcaagagctgctgtgatggtttatgatgatgccaataagaagtgggtgccagctggtggctcaactggattcagcagagttcatatc

SEQ ID NO: 444290 - DNA, 120 bp, Artificial Sequence
  ENSG00000154380_1 (sequence is synthesized)
tatcaccatacaggcaacaacacattcagagtggtgggcaggaagattcaggaccatcaggtcgtgataaactgtgccattcctaaagggttgaagtacaatcaagctacacagaccttc

SEQ ID NO: 444291 - DNA, 120 bp, Artificial Sequence
  ENSG00000154380_2 (sequence is synthesized)
caccagtggcgagatgctagacaggtgtatggtctcaactttggcagcaaagaggatgccaatgtcttcgcaagtgccatgatgcatgccttagaagtgttaaattcacaggaaacagtg

SEQ ID NO: 444292 - DNA, 120 bp, Artificial Sequence
  ENSG00000154380_3 (sequence is synthesized)
ttctatttagggccaacattgcctagacaaaactcacaactacctgctcaagttcaaaatggcccatcccaagaagaattggaaattcaaagaagacaactacaagaacagcaacggcaa

SEQ ID NO: 444293 - DNA, 120 bp, Artificial Sequence
  ENSG00000154380_4 (sequence is synthesized)
aaggagctggagcgggaaaggctggagcgagaaagaatggaaagagaaaggttggagagagagaggttagaaagggaaaggctggagagggagcgactggaacaagaacagctggagaga

SEQ ID NO: 444294 - DNA, 120 bp, Artificial Sequence
  ENSG00000154380_5 (sequence is synthesized)
gagagacaagaacgggaacggcaggaacgcctggagcggcaggaacgcctggagcggcaggaacgcctggagcggcaggaacgcctggatcgggagaggcaagaaagacaagaacgagag

SEQ ID NO: 444295 - DNA, 120 bp, Artificial Sequence
  ENSG00000154380_6 (sequence is synthesized)
aggctggagagactggaacgggagaggcaagaaagggagcgacaagagcagttagaaagggaacagctggaatgggagagagagcgcagaatatcaagtgctgctccatcttcagacagc

SEQ ID NO: 444296 - DNA, 120 bp, Artificial Sequence
  ENSG00000154380_7 (sequence is synthesized)
tccctgtataacgctccacttcctgagtattccagttgccagcctccttcagcacctcctccatcatacgctaaagtcatctcagctccagtgtcagatgccactcctgattatgctgta

SEQ ID NO: 444297 - DNA, 120 bp, Artificial Sequence
  ENSG00000154380_8 (sequence is synthesized)
gtgactgctttgccacctacttccacaccccctacaccaccactgcgacactcagcgacacgttttgcaacatctttaggttcagccttccaccctgttcttccccattacgctacagtt

SEQ ID NO: 444298 - DNA, 120 bp, Artificial Sequence
  ENSG00000154380_9 (sequence is synthesized)
cctcgtcctctgaacaaaaactctcgaccttcttctcctgtgaacacaccctcttctcagcctccagctacgaagccctgtgcctggtctacttccaatttttcgcccctccctccatct

SEQ ID NO: 444299 - DNA, 120 bp, Artificial Sequence
  ENSG00000154380_10 (sequence is synthesized)
cctccaataatgattagcagccccccaggcaaagctactggtccaaggcctgtcctccctgtttgtgtttcttctcctgtgccccaaatgcctccatcaccgacagcacccaatgggctg

SEQ ID NO: 444300 - DNA, 120 bp, Artificial Sequence
  ENSG00000154380_11 (sequence is synthesized)
gttgactctgtaacatatccagtgtctccaccgcctacctcagggccagcagctcctccgccgccgcctccactgccttccctcgcatcactctcacactgtggatctcaagcttctcct

SEQ ID NO: 444301 - DNA, 120 bp, Artificial Sequence
  ENSG00000154380_12 (sequence is synthesized)
cctccaagcacccctattgcctcaactccctcatccaagcctagtgttctcccttctccctctgcagctgcccctgcctctgttgagactcctctaaactctgtgctgggagactcttct

SEQ ID NO: 444302 - DNA, 120 bp, Artificial Sequence
  ENSG00000154380_13 (sequence is synthesized)
gggaccacttgcacctccacctcctccaccactcccaccagggcctgcacaggcttcagtagccctccctcctcccccagggccccctccacctcctccactcccatccaccgggcctcc

SEQ ID NO: 444303 - DNA, 120 bp, Artificial Sequence
  ENSG00000154380_14 (sequence is synthesized)
accgccccctcctccccctcctctccctaatcaagtaccccctcctcctccaccacctcctgccccacccctccctgcatctggattctttttggcatccatgtcagaagacaatcgccc

SEQ ID NO: 444304 - DNA, 120 bp, Artificial Sequence
  ENSG00000154380_15 (sequence is synthesized)
tttaactggacttgcagctgcaattgccggagcaaaacttaggaaagtgtcacggatggaggatacctctttcccaagtggagggaatgctattggtgtgaactccgcctcatctaaaac

SEQ ID NO: 444305 - DNA, 120 bp, Artificial Sequence
  ENSG00000154380_16 (sequence is synthesized)
agatacaggccgtggaaatggaccccttcctttagggggtagtggtttaatggaagaaatgagtgccctgctggccaggaggagaagaattgctgaaaagggatcaacaatagaaacaga

SEQ ID NO: 444306 - DNA, 120 bp, Artificial Sequence
  ENSG00000154380_17 (sequence is synthesized)
acaaaaagaggacaaaggtgaagattcagagcctgtaacttctaaggcctcttcaacaagtacacctgaaccaacaagaaaaccttgggaaagaacaaatacaatgaatggcagcaagtc

SEQ ID NO: 444307 - DNA, 120 bp, Artificial Sequence
  ENSG00000154380_18 (sequence is synthesized)
acctgttatctccagaccaaaatccacacccttatcacagcccagtgccaatggagtccagacggaaggacttgactatgacaggctgaagcaggacattttagatgaaatgagaaaaga

SEQ ID NO: 444308 - DNA, 120 bp, Artificial Sequence
  ENSG00000154380_19 (sequence is synthesized)
attaacaaagctaaaagaagagctcattgatgcaatcaggcaggaactgagcaagtcaaatactgcatagaggaacagactaaggagagataggactttaatctggaggaaaaatatcct

SEQ ID NO: 444309 - DNA, 120 bp, Artificial Sequence
  ENSG00000154380_20 (sequence is synthesized)
acaaacaacaactgttcacaacagcaaacccctacatttatgagctgtaagaagaaaatggagacaaacagaaggagggaaaaaccaacctactctgaaagccttcagacattatgactc

SEQ ID NO: 444310 - DNA, 120 bp, Artificial Sequence
  ENSG00000154380_21 (sequence is synthesized)
tggtgataagctctttccctctccgtttgctgcttttttctggcctttacaacagaatggaagagaatcatttaagagttcctgtaacagttatgcagaaaatactaaaacccatcaggc

SEQ ID NO: 444311 - DNA, 120 bp, Artificial Sequence
  ENSG00000154380_22 (sequence is synthesized)
aagatcaccacgcattgaaatattttcatatcaagataaagtcgcacattttccacaatacattgctaaaataaagaggagaaaggcttaggaagtttttttgcagagagtgctggtaaa

SEQ ID NO: 444312 - DNA, 120 bp, Artificial Sequence
  ENSG00000154380_23 (sequence is synthesized)
gaattgagcaagtttgctattgtattgtaatgtttctctcaggtttgttcttcctatcatgtttgatattccatgaataattgagatcagccctatgtaagttaagatcataatatgtgg

SEQ ID NO: 444313 - DNA, 120 bp, Artificial Sequence
  ENSG00000154380_24 (sequence is synthesized)
aacaaatggaattgtaagtgctttcaaagggtaatatttataagaaagtgtccgaaaaatgtttcttcagcttgagaaattttagaatgataggaagtttctcgagttagccttcatgca

SEQ ID NO: 444314 - DNA, 120 bp, Artificial Sequence
  ENSG00000154380_25 (sequence is synthesized)
attttgtagattaaaacataaaatttgtccagaacttaaagatttagatgccttcctaaattgttacaatgctttaccaaatctatgacttctacataacacaaaccagtggtcaaatgt

SEQ ID NO: 444315 - DNA, 120 bp, Artificial Sequence
  ENSG00000154380_26 (sequence is synthesized)
aaacactatattgtagatttactgtaggttttcaaccttttttagatttatgcatgtggacatttttataatgtaattacaatcaccacaaggttagcttttttaattgcagacagtaat

SEQ ID NO: 444316 - DNA, 120 bp, Artificial Sequence
  ENSG00000154380_27 (sequence is synthesized)
tctgagcttggatgatgtctcttgtgcagtcatgtgttaaaatatttcacatttgagatgtttgggattaagccatacaatttgaaattatgaataaatatgcagcaattactactttaa

SEQ ID NO: 444317 - DNA, 80 bp, Artificial Sequence
  ENSG00000154380_28 (sequence is synthesized)
ggttcctcgcggcgatcccgactctcctcccgcggctgcagcagctgccggttgcacacggcctcggcggcggcgcggcg

SEQ ID NO: 444318 - DNA, 120 bp, Artificial Sequence
  ENSG00000154380_29 (sequence is synthesized)
gcgggcacccctcagagggcggccgaggaagctccgggaggaggagcaggaccacgaggaggtgggaggcggcggccgcctggggaccagctccgcgcctcggcctctccgccccctccc

SEQ ID NO: 444319 - DNA, 120 bp, Artificial Sequence
  ENSG00000154380_30 (sequence is synthesized)
cagcctttctctcgccctcttctcccacactcccggccggcgcctcggctttgtgcgaggagatggtgtagccccctggccgccgaaggaggagccggacacttgtctcccgtctccgag

SEQ ID NO: 444320 - DNA, 120 bp, Artificial Sequence
  ENSG00000154380_31 (sequence is synthesized)
atgtcacactaatatgtagtggccttttcaaggcctagtcccagggaaaacattttgtagagtataggggagtgggaggaaggggaggaataattttttatttaaagttgatttctgcac

SEQ ID NO: 444321 - DNA, 120 bp, Artificial Sequence
  ENSG00000154380_32 (sequence is synthesized)
tatctttttctcagttacctgcatgaataaataatgagaaatattttgtgactttaattggtaaatatgttacaaaaccaagtacttaatcttttacatcatgtcttcagctatttgtat

SEQ ID NO: 444322 - DNA, 120 bp, Artificial Sequence
  ENSG00000154380_33 (sequence is synthesized)
tttaaccagtaatttcaatggtctgaaacatgattctgagcttcacataatatcttaactgtggaactcaaaagtttgatcactgaatttggcagttattattacctaggtacccccgct

SEQ ID NO: 444323 - DNA, 120 bp, Artificial Sequence
  ENSG00000154380_34 (sequence is synthesized)
gttacacaggtgtttagatacgtgttcctgaatgaagctgcttttgaattttgttatgttgaaatgcaagaaataacaatgatggcagcaattaaggtcacagaaatcattaggtaaagg

SEQ ID NO: 444324 - DNA, 120 bp, Artificial Sequence
  ENSG00000154380_35 (sequence is synthesized)
aaaaccaatgaggagttctgcagttttcttttaataagtaaagtgagacttgggtggtgggaagaaggaaggtgggaagaaggaattagacactctgcctgccactctgcgtgtgtgtgc

SEQ ID NO: 444325 - DNA, 120 bp, Artificial Sequence
  ENSG00000154380_36 (sequence is synthesized)
tctcgcgcacgtgctgtctatatggaagccactcccttttctttcctttgaaactggtaaggttaaaataggggagaaatcctacatgttggaatgatagctttttggaaaatttaagaa

SEQ ID NO: 444326 - DNA, 120 bp, Artificial Sequence
  ENSG00000154380_37 (sequence is synthesized)
actctccaggctctccatcttgatttatgcttgagttgttatgtgccatatttgctttgaactctgattatcagaagttttactaaaactttgaaataattcactttcatctgctttcta

SEQ ID NO: 444327 - DNA, 120 bp, Artificial Sequence
  ENSG00000154380_38 (sequence is synthesized)
gattttgtacatctcagtccataaagcaaagcttgttgatagtgtagttttctaaacgctgcaaatttgcagcctttaccactacaaagaagtttggatgagggattttttttttctttg

SEQ ID NO: 444328 - DNA, 120 bp, Artificial Sequence
  ENSG00000154380_39 (sequence is synthesized)
tcaaaatagttcctgtttctgtagaaatttcatttttagattaaactgtgatggatgagctatcataattcaagtatacatttcttttttctatcagatattcattgtcatgcagtagta

SEQ ID NO: 444329 - DNA, 120 bp, Artificial Sequence
  ENSG00000154380_40 (sequence is synthesized)
gtaaaaacatcaaagatgcagcaagcttattaagtattattttctaaaagaaataggaggcattttcatctttattattgtacttttggttatgcaaacactttgataatataaacagtt

SEQ ID NO: 444330 - DNA, 120 bp, Artificial Sequence
  ENSG00000154380_41 (sequence is synthesized)
atgtcccctataaatctggtcagcaacctcttttgattttgttgggtaagttaaatagtctgtagtaggtagagtactgggtacaagtggtccaaactaagataagagactaaaataaaa

SEQ ID NO: 444331 - DNA, 120 bp, Artificial Sequence
  ENSG00000154380_42 (sequence is synthesized)
agagactaaaataaaatgctaaatcttaaaagaaactgggtttatgcactaaacgttttgtgccttggtctaatattaacatgatgtatgtgtaaactgacaaaaaaaaaaaaaaaaaaa

SEQ ID NO: 444332 - DNA, 120 bp, Artificial Sequence
  ENSG00000154380_43 (sequence is synthesized)
tgctatatttcccatcatcccagattgctaaatgttctttccaagaagtctgaatgaattattatatacatttgctatcatacatgacagttgtgtcattattagagatttcagtaatta

SEQ ID NO: 444333 - DNA, 120 bp, Artificial Sequence
  ENSG00000154380_44 (sequence is synthesized)
aaatgggaaacagaagcctaagttatttaccttatcaaaaccacgttccttggaaccacattattatgatggtttttgtgctcttgtacgttggatgtcttaagctgagtacagtttagg

SEQ ID NO: 444334 - DNA, 120 bp, Artificial Sequence
  ENSG00000154380_45 (sequence is synthesized)
ggatcctttctaatgacaggaaggcactgctttcctcaacactgtgatctgacctgtgacaagtctgtactatccactatgtaaatggctcacaagtcaattgcaaacaaactgaatgta

SEQ ID NO: 444335 - DNA, 120 bp, Artificial Sequence
  ENSG00000154380_46 (sequence is synthesized)
caaatcttagtgctggtgctgaaatctcttcagaatagtcatcatgatttaaaagtttgtttaaaaatttgcaagcatcaagtgtcaatcaaaactgaagatgaaacactaatgaatgtt

SEQ ID NO: 444336 - DNA, 120 bp, Artificial Sequence
  ENSG00000154380_47 (sequence is synthesized)
gaattctcatgcttttaggtgtacttcctttttagaattttcagttttctgctatttttaccgtaactatttcgtttaaatttgtttcatttaagtttcctacacgctaacttcgtttgt

SEQ ID NO: 444337 - DNA, 120 bp, Artificial Sequence
  ENSG00000154380_48 (sequence is synthesized)
gcgattgaaataaaattgcagtatatatatgttgcttgtttgtgacacttagataatcttctgaaataatttgttttaaagtaagttatattggatgtgaaaaacaccttttaaagtcca

SEQ ID NO: 444338 - DNA, 120 bp, Artificial Sequence
  ENSG00000154380_49 (sequence is synthesized)
agactttactacttaaaagtttacatgtcacgtcactattctttacagatttcatagaagtcgtgaatactaagtaatgtatacaaaagaaatatgtgatgatgtgtctactttttgttt

SEQ ID NO: 444339 - DNA, 120 bp, Artificial Sequence
  ENSG00000154380_50 (sequence is synthesized)
gaaataactgttgggtgttccctcttcttattttctctctgcccaccttgacacagtaacttcctcttatagtcaagatgatgattaagtgtttaatttttattccattttgttctgcaa

SEQ ID NO: 444340 - DNA, 120 bp, Artificial Sequence
  ENSG00000154380_51 (sequence is synthesized)
cacgttcaggtacttaaaactcattcatgcagttagaattatcctttatgtagtttgcatggtaaaggacattgtgtggtaaagggcattattgagtaatgaattttaagtatagcaaaa

SEQ ID NO: 444341 - DNA, 120 bp, Artificial Sequence
  ENSG00000154380_52 (sequence is synthesized)
tatgtatagtgtttatacatgatgctgatttcttaaaacctacatataagcagtagtactttttctctattataaagtattaattttgagttccattttataattctgatgtcttcatta

SEQ ID NO: 444342 - DNA, 120 bp, Artificial Sequence
  ENSG00000154380_53 (sequence is synthesized)
gaaatacaaaaatacaatccttgtattttttctttgaccagacccaaattttccccttcccccctccattctcctctccacttctcgtggaccgcgtgttcccaatattcattaacattt

SEQ ID NO: 444343 - DNA, 120 bp, Artificial Sequence
  ENSG00000154380_54 (sequence is synthesized)
gcagccattacagagttacagttgtaaaattttcagctgtttttttttttttttttttgctctagcctgtctcatgttcttgcttctcttcatatgtaagtcagtatttttgtctacaaa

SEQ ID NO: 444344 - DNA, 120 bp, Artificial Sequence
  ENSG00000154380_55 (sequence is synthesized)
ttaaaagtcacttgtcattcaaaaatgagttaagtaacatgataatcttttaaatttacctagctacaacttttatgtctcttgtaaatttatatatactttcagtgccattgtgaagaa

SEQ ID NO: 444345 - DNA, 120 bp, Artificial Sequence
  ENSG00000154380_56 (sequence is synthesized)
ttggccttttaattctaagtagtattaccctatgaagcacagtgtgcaaaggtatgctacaaggtctctttaattcctgtgtggccattataattttataacaccattaccctttaaatt

SEQ ID NO: 444346 - DNA, 120 bp, Artificial Sequence
  ENSG00000154380_57 (sequence is synthesized)
ctaccgattataagcagcgtaaaagtaactatataaagcaaacatcgcaaaggaactctgcaggagctcttaattcctttatgtagctatcataaaattcactttcctgaagacatttac

SEQ ID NO: 444347 - DNA, 120 bp, Artificial Sequence
  ENSG00000154380_58 (sequence is synthesized)
tctcattcacttccaaactccaaacctttttctggtagcaccacttttgtttttaatagaaagatgagttcatatctgtacatctctccaaagctctaaggaatgagaaaaggatcctag

SEQ ID NO: 444348 - DNA, 120 bp, Artificial Sequence
  ENSG00000154380_59 (sequence is synthesized)
ttataaggaatctccatgactctgaaggaatgaaattgatgtaggtagctttggctatgtaaagacatagtagaggacaattacttaaagaagagttttcttttgaggatttgtagattt

SEQ ID NO: 444349 - DNA, 120 bp, Artificial Sequence
  ENSG00000154380_60 (sequence is synthesized)
gactaagcagctgaagtcagtaacccctcaagaaagtccgtttatagaagccaagaactgttggaggtctgtgatgcaggtttttctgttcccaacatcaaaagctgtggattatttggt

SEQ ID NO: 444350 - DNA, 120 bp, Artificial Sequence
  ENSG00000154380_61 (sequence is synthesized)
gtgttcccctttatgttatctctcgataatttttgagacatcaagattttttaaaatatcaatactggaaagatgaaaccttcaaattaaaacctaaaattgattagaaagaaaagtaaa

SEQ ID NO: 444351 - DNA, 120 bp, Artificial Sequence
  ENSG00000154380_62 (sequence is synthesized)
atattaatgcagtaaatttaggatggttacagatactcaccatcaacataaataaatggagttctaggataaattatttgtggaatactaatggtcaagtcacataagagtaaaatcttt

SEQ ID NO: 444352 - DNA, 120 bp, Artificial Sequence
  ENSG00000154380_63 (sequence is synthesized)
tggtgaggagacacatttgacaactgctaaagaattaactaaatttgtctttctaaatagttttctttataaagtaacagaaacattgtaaaaggataaatgactgtcataatgacttag

SEQ ID NO: 444353 - DNA, 120 bp, Artificial Sequence
  ENSG00000154380_64 (sequence is synthesized)
gatgttgtaagaatgtctgccacatttattggttatttctgttgaaatctgaaggaatcgatacatctgaaaattgagaaagggaaataggactgtccccgttacagatactctgtgatg

SEQ ID NO: 444354 - DNA, 120 bp, Artificial Sequence
  ENSG00000154380_65 (sequence is synthesized)
cacacaaccttctaaacggaagtgttagtatcatttaaagcacatagtaggccttgagtatttgcagattaacatgcagaaaaaatcaaagatgaagccccaattaagtgtttgaaccaa

SEQ ID NO: 444355 - DNA, 120 bp, Artificial Sequence
  ENSG00000154380_66 (sequence is synthesized)
agaatcacagtcactgagctgcacccccgttctgtgaagcatgttaaatactcataaagagcagagagcagggcccgtagacgcttctggtgtaggacacaggaattctaggcagaggga

SEQ ID NO: 444356 - DNA, 120 bp, Artificial Sequence
  ENSG00000154380_67 (sequence is synthesized)
gaaaattaggggccccagttggtggctgagagtaaaaagaatataccatttgagtagtgctgttctttttcctcagtttttaaagacatataattcctagtagttaggacatctaaatag

SEQ ID NO: 444357 - DNA, 120 bp, Artificial Sequence
  ENSG00000154380_68 (sequence is synthesized)
ctcggtaaactggtcagaggcgggaggattgcttgaggccagaagttttgagatcagcctgggtaacagggagactcatttctacaaaaaaatttaaaaatttaggccaggcatggtggt

SEQ ID NO: 444358 - DNA, 78 bp, Artificial Sequence
  ENSG00000154380_69 (sequence is synthesized)
agcgggaggatcacctgagcccagggaggacgcggctgcagtgagccgttatcatgccactgtactccagcctgggtg

SEQ ID NO: 444359 - DNA, 120 bp, Artificial Sequence
  ENSG00000154380_70 (sequence is synthesized)
agaacctgtctctaaaaaaaaaaaaaaaaaattctaagagaatatagcttttcatagaaattattagaaaagcttacatatttcattagagagcccagtttgttagactacatttattcc

SEQ ID NO: 444360 - DNA, 120 bp, Artificial Sequence
  ENSG00000154380_71 (sequence is synthesized)
gtaaaagttctatatacaaatgacaacccatagtttatcatgtaaatctgatttaactgttcccttcaattccaagaaagatttcttcagcagtagatgacaattctaaaagcataaaga

SEQ ID NO: 444361 - DNA, 120 bp, Artificial Sequence
  ENSG00000154380_72 (sequence is synthesized)
aataactaataaaggagatggatgatgttataggttggtttggttgggttttagtaaatagttattcttctaagaaggcttagaaaatcgagaattgaatagttggtactttgaattcca

SEQ ID NO: 444362 - DNA, 120 bp, Artificial Sequence
  ENSG00000154380_73 (sequence is synthesized)
taggaaaaagcactcagaagaaaaagtctacattggctagtgtttagattgagagttaattttcccatcaagtccaaaagtttccatccaagtctatagaaactgagagaaaaggttctt

SEQ ID NO: 444363 - DNA, 120 bp, Artificial Sequence
  ENSG00000154380_74 (sequence is synthesized)
ggcttacacttaaaatacacattgttgcaaccatataagagagatacattacagaacgcttttaaaaatttggtctcttaagcgcctaacagtccatgctttagtcacatctgtgaaacc

SEQ ID NO: 444364 - DNA, 81 bp, Artificial Sequence
  ENSG00000154380_75 (sequence is synthesized)
tgctttagtcacatctgtgaaaccagattaaaggcattttaaaaataaatgtttcatggccgggcatggtggctcacgcct

SEQ ID NO: 444365 - DNA, 84 bp, Artificial Sequence
  ENSG00000154380_76 (sequence is synthesized)
catagtggtgggcacctgtaatcccagctcttcgggaggctgagacagaagagaagaccgcgccactgtactccagcctgggcg

SEQ ID NO: 444366 - DNA, 120 bp, Artificial Sequence
  ENSG00000154380_77 (sequence is synthesized)
taaataaatgtttttcaacgtgttttatgtgagaaataccagcttttcattattactaccagttgatctcaggtgtcacttggttggttctgctgaccgaggcactgggcattttaaata

SEQ ID NO: 444367 - DNA, 120 bp, Artificial Sequence
  ENSG00000154380_78 (sequence is synthesized)
tggagtttccctccacccattgatcaagtctgaggtttgtccatccttggtggcaggctagcttaaccatggattcacaaaccccatttgattgtcgtaagtcataaggccaccccagtg

SEQ ID NO: 444368 - DNA, 120 bp, Artificial Sequence
  ENSG00000154380_79 (sequence is synthesized)
ccagtggttgggcatcacagtgagtctgaggtgatgaatttgagttagctgtaggctagttccgcaactcagcaatagcccatggatggttggtaaaagacgttgactttgccacttaaa

SEQ ID NO: 444369 - DNA, 120 bp, Artificial Sequence
  ENSG00000154380_80 (sequence is synthesized)
tttccaggagaagaatagcttatagtttatctgaggaaagtaattgggaaggcttagatattgagaagaaagccctgttaaaatctaggtagcatttcctttcttctttattactagagg

SEQ ID NO: 444370 - DNA, 120 bp, Artificial Sequence
  ENSG00000154380_81 (sequence is synthesized)
gatgggaggttcaggcctgagtcaggactttacaatttggtgtccttcccagaggtactttgggcttgatcattttaagtttcaattgcaaaaaaaaatttttgacggagtgttgctctg

SEQ ID NO: 444371 - DNA, 75 bp, Artificial Sequence
  ENSG00000154380_82 (sequence is synthesized)
aatttttgacggagtgttgctctgtcaccccccctgggttcaaagggattttcctgcctcagcctcccaagtagc

SEQ ID NO: 444372 - DNA, 65 bp, Artificial Sequence
  ENSG00000154380_83 (sequence is synthesized)
cggccttcaattgcagaagtttttgaagggagaatatttgatcctcacataaaatgtccttgttt

SEQ ID NO: 444373 - DNA, 120 bp, Artificial Sequence
  ENSG00000154380_84 (sequence is synthesized)
aagggagaatatttgatcctcacataaaatgtccttgtttctgaaagaaaacatggtaaaaattgttattgagtccatgtctttgccaccttgttggacttgatttccctttctctgtgt

SEQ ID NO: 444374 - DNA, 120 bp, Artificial Sequence
  ENSG00000154380_85 (sequence is synthesized)
tcctcccgccctcagtctctctcagtctgtccttttttgtgtgtggagttgtgggcaggtcattggactgggactgactttaccagttttcaggctgtggggctagtcagtcattctctc

SEQ ID NO: 444375 - DNA, 120 bp, Artificial Sequence
  ENSG00000154380_86 (sequence is synthesized)
tgagccttctacctctaaagttgagttctttttttaaattctttttgttttgtttttattttttccttgccactatacaagcaaggatagataaagctttttattattattgttattatt

SEQ ID NO: 444376 - DNA, 120 bp, Artificial Sequence
  ENSG00000154380_87 (sequence is synthesized)
aaagtgttgggattacaggcataagcgaccgtgcccatccccgataaagttgagttctgaatttcctctttcactgtattctcggcagctactggttggtttattctttttttttaatct

SEQ ID NO: 444377 - DNA, 120 bp, Artificial Sequence
  ENSG00000154380_88 (sequence is synthesized)
tttaatcttttttggtttattcttcttttgatctttgaagagaaggagaaaaaagatctgagtttggctctcccatcttaagtgcagcttttagttgttttatagtcatagacgctattg

SEQ ID NO: 444378 - DNA, 120 bp, Artificial Sequence
  ENSG00000154380_89 (sequence is synthesized)
cactggacagcatgcatcctggatgtaaacaatgcggaaaaatcaatggagtgaccatcttggggtcagtggtgttgcataaagcaccagtggtgtgctgttctgtgtcagtttcctctg

SEQ ID NO: 444379 - DNA, 120 bp, Artificial Sequence
  ENSG00000154380_90 (sequence is synthesized)
cgccacgtgctttcacagtttgaattaccagcatctctgtggtggcttcagtacattctccattgtgcttcaacctggaagcacattctgccgttcagaaagactgattccaatcatgta

SEQ ID NO: 444380 - DNA, 120 bp, Artificial Sequence
  ENSG00000154380_91 (sequence is synthesized)
atgggaccacacgagatccatgctccaattatatgaatagcagaaggtccatttgactcttgtagttcaagagctgtttctaagtaaacagactttccagagctcgatgaagtgaagaag

SEQ ID NO: 444381 - DNA, 120 bp, Artificial Sequence
  ENSG00000154380_92 (sequence is synthesized)
cccttctttcaattcctgggcagaattcagtggttttcatatcatctgaacctgctgtgctgctgtttattctatcactgtcagccttgaaaggaaaaaaggaataatcttaccctcctg

SEQ ID NO: 444382 - DNA, 120 bp, Artificial Sequence
  ENSG00000154380_93 (sequence is synthesized)
cccttcttattttatatcttccatcttatccatctatatccatgtagtcattccttccgagttccctggttttaatccaaaagactctgtttaacagcaatgtcttggcagaccaggtgc

SEQ ID NO: 444383 - DNA, 120 bp, Artificial Sequence
  ENSG00000154380_94 (sequence is synthesized)
cgcttccgtgccatttgagggctctgagtctttgcttcgtcttaggaagataaagataatttggcagaaagtcagagatggaaatagcagtttgggatgataaaagatgggtcctgtttt

SEQ ID NO: 444384 - DNA, 120 bp, Artificial Sequence
  ENSG00000154380_95 (sequence is synthesized)
gctgacattcttttactttggttcttggtgcgtgtcctttgggattcatttcttgctagcatgaataggacatgcttttcgttaggtgcttttcttttttggagaacatgaagtgtttct

SEQ ID NO: 444385 - DNA, 120 bp, Artificial Sequence
  ENSG00000154380_96 (sequence is synthesized)
aacaaaactgaatgagctagaaagaattctattttgagacatctgtagttgatgcaaagtatttctgtaatcctcaatgacagtacttacatatttgcatagaattttttttttaatttt

SEQ ID NO: 444386 - DNA, 120 bp, Artificial Sequence
  ENSG00000154380_97 (sequence is synthesized)
tgaggaaacctctctggagtctgtatttataggagcatcctgaaagtccctattatgtagctggtgggagcgagagagggacagccacactcgtgctgtgagcagagcacaacttcaggc

SEQ ID NO: 444387 - DNA, 120 bp, Artificial Sequence
  ENSG00000154380_98 (sequence is synthesized)
agagtgaatgccttctgagttctcattggaagctttctgttgctcagcctctggcagatttcagaaccttctacttaagccaggtgtggtggtgcgtgctcctaggcacagcgactcggg

SEQ ID NO: 444388 - DNA, 90 bp, Artificial Sequence
  ENSG00000154380_99 (sequence is synthesized)
ggcacagcgactcggggagttggaggccagcctgggcaacatagcgaggcctgtctccttaaaaaataaataaataaataataaataaat

SEQ ID NO: 444389 - DNA, 120 bp, Artificial Sequence
  ENSG00000154380_100 (sequence is synthesized)
tgtccttgactattgtgctgtctgctgcccctttgtagggatggggttggggtcagaataagcatgtgcatgaatggcggaaagctttggtggtgtttgtttgtttgtttgttttttgag

SEQ ID NO: 444390 - DNA, 120 bp, Artificial Sequence
  ENSG00000154380_101 (sequence is synthesized)
aggtgggggagtcagcagtgaacctttctggttaaagaacaacgtacataatttctattatgagatttagaaggttaaatacttttttttttcaggcctaccaagttgatagaccaaaag

SEQ ID NO: 444391 - DNA, 120 bp, Artificial Sequence
  ENSG00000154380_102 (sequence is synthesized)
tatatagtagaacagcacagtagaaaaaatttaaaagtgaatttcttatggtccaaaaggatggatagtcacagtccataacctttcataatatatgctggaattggaatctcttgtcat

SEQ ID NO: 444392 - DNA, 120 bp, Artificial Sequence
  ENSG00000154380_103 (sequence is synthesized)
cttgctttgctctgaattttagaactagaagtgtgcatgtatgtcaaaagattatgcagagctattttctttgctaacaatgtaaacatttgcaccccatgaatgggactttataatctg

SEQ ID NO: 444393 - DNA, 120 bp, Artificial Sequence
  ENSG00000154380_104 (sequence is synthesized)
gaagtgagcctaaggttgcgtatactgaagtcatgttttaaaagttaaggttgacttaaacatatacaaggctgtattttaattgtaactagaaatcatttactatgcatacagaacctc

SEQ ID NO: 444394 - DNA, 120 bp, Artificial Sequence
  ENSG00000154380_105 (sequence is synthesized)
atgtatcttatcatggaatttgtgaattaatgggccttgccgaattcaagggtaagggaaactggtaacaacttgttttaaatcaacatactataagctcctgcttgcttgactcaagtt

SEQ ID NO: 444395 - DNA, 120 bp, Artificial Sequence
  ENSG00000154380_106 (sequence is synthesized)
gtttgaaaatctgaattaaacaggatctcattgtcaggaaacatcttctaagcttgacatctacgtttaagaagggaacgtggaagagaaggtgagacatgaaactaaaacagctgggag

SEQ ID NO: 444396 - DNA, 120 bp, Artificial Sequence
  ENSG00000154380_107 (sequence is synthesized)
ggtaggatcagactgcacctgatttttggaccaaagtttcatataggaataaataaaaaggaggaccacttgtgagccaacctaggaaggacttgccagaaagtagcagctcctgctgca

SEQ ID NO: 444397 - DNA, 120 bp, Artificial Sequence
  ENSG00000154380_108 (sequence is synthesized)
aaatacagtgccttcaaaatgattctctgtgtgaattgcatgcaatttcatgtaaccataaagtgtaacctgtatgtgcatgacatgtgtctagaatgtgtaaagttaggattcagcagg

SEQ ID NO: 444398 - DNA, 120 bp, Artificial Sequence
  ENSG00000154380_109 (sequence is synthesized)
aaggggcctggccctgtcactgtggtggatcagtggacctgctgaagtcactggactcatgtgacttaggtttgcagcatcagacccctgtgtttgcattaagtggccacatcgttgaaa

SEQ ID NO: 444399 - DNA, 120 bp, Artificial Sequence
  ENSG00000154380_110 (sequence is synthesized)
tcggatcaatctctccctcagctttctttcctactttgcagctttgctggttttaactgcttcattcttctgcttcttggtatccttttttcttttgaaataaaaacatgaaatacttaa

SEQ ID NO: 444400 - DNA, 120 bp, Artificial Sequence
  ENSG00000154380_111 (sequence is synthesized)
caagaattaattgtttaagaatcaaggaagtacaatagaatttcaggattctgatatttattttgagttgttcctatttttttccccaagagggactatttggatttagattaaatgttg

SEQ ID NO: 444401 - DNA, 120 bp, Artificial Sequence
  ENSG00000154380_112 (sequence is synthesized)
aaatacatgaacatattataagttatacttactgtttttatcattggcactaaaaaataatttaaaacagtgtcgaaccaacaagaaaaccttgggaaagaacaaatacaatgaatggca

SEQ ID NO: 444402 - DNA, 120 bp, Artificial Sequence
  ENSG00000154380_113 (sequence is synthesized)
agaaaagtgaaaaaatgttgttttatgttctaatcagccctacaattttgataattttttaagaaaatggcttttttaaagaaatgtatttaaatctggtgttgggttggtaaatttgca

SEQ ID NO: 444403 - DNA, 120 bp, Artificial Sequence
  ENSG00000154380_114 (sequence is synthesized)
tcctccttcatgtttttaatacagccactttgactgtaaacaattaaatgtatgtgttcactgttactgaatttactgtctcaacacttaaggttaatgtggattattttgggtctgata

SEQ ID NO: 444404 - DNA, 120 bp, Artificial Sequence
  ENSG00000154380_115 (sequence is synthesized)
tttcaagtagtactaactgccatcctatatactagtttgttttttcagggacgcttacctctcttccaaattttataagtatttattttgcttatttaccaaatccccatgaaaaaaaaa

SEQ ID NO: 444405 - DNA, 120 bp, Artificial Sequence
  ENSG00000154380_116 (sequence is synthesized)
agtcttaattagatgatctgttgcatagttctattactaaagctctaacctaaagtaagtagttatatatacttggaccttacatttcagtatctttcaaaaactgatctagacttttac

SEQ ID NO: 444406 - DNA, 120 bp, Artificial Sequence
  ENSG00000154380_117 (sequence is synthesized)
aactatgataaattggactcattaagtaaatacatgagtcagtttaatttagcatggcattctgcgtaccttcccacataaaataatatcactcagctctattgttgatggtcttactta

SEQ ID NO: 444407 - DNA, 120 bp, Artificial Sequence
  ENSG00000154415_0 (sequence is synthesized)
atcagagagcccaatggagccttctgaagtacctagtcagattagcaaagataattttttagaagttcctaatttatctgactctctttgtgaagatgaagaagttactttccaacctgg

SEQ ID NO: 444408 - DNA, 120 bp, Artificial Sequence
  ENSG00000154415_1 (sequence is synthesized)
tttctcccctcaaccaagtagacgaggttctgattcttctgaagacatatacctggataccccatcttcaggtactagaagagtttcatttgctgattcctttggattcaatcttgtgtc

SEQ ID NO: 444409 - DNA, 120 bp, Artificial Sequence
  ENSG00000154415_2 (sequence is synthesized)
tgttaaagaatttgattgctgggaattaccgagtgcttcaaccacttttgacttagggacggacattttccacacagaagaatatgttttagccccactgtttgacttgccttcttcaaa

SEQ ID NO: 444410 - DNA, 120 bp, Artificial Sequence
  ENSG00000154415_3 (sequence is synthesized)
agaagatcttatgcaacaactccaaatacagaaagcaatactggagtcaactgagtctcttcttgggtctacaagtatcaagggtattattcgagttttgaatgtttcttttgagaagtt

SEQ ID NO: 444411 - DNA, 120 bp, Artificial Sequence
  ENSG00000154415_4 (sequence is synthesized)
agtatatgtaagaatgtctttagatgactggcagacacattatgacattttagcagaatatgttcctaattcatgtgatggtgaaactgaccagttctcctttaagattgtattggttcc

SEQ ID NO: 444412 - DNA, 120 bp, Artificial Sequence
  ENSG00000154415_5 (sequence is synthesized)
tccttatcaaaaagatggcagtaaagttgagttttgtatacgttatgaaacttctgttggtacattttggtcaaataataatggcacaaattatacattcatttgtcaaaagaaagaaca

SEQ ID NO: 444413 - DNA, 120 bp, Artificial Sequence
  ENSG00000154415_6 (sequence is synthesized)
agagccggagcctgtaaaaccatggaaagaagttcctaacagacaaataaaaggctgcttaaaggtaaaatcaagtaaagaagaatcatcagtaacatcagaagaaaataactttgagaa

SEQ ID NO: 444414 - DNA, 120 bp, Artificial Sequence
  ENSG00000154415_7 (sequence is synthesized)
tccaaagaatacagatacctatatcccaacaatcatttgttctcatgaggacaaggaagatttggaagccagtaatcgaaatgtaaaagatgtaaacagggaacatgatgaacataatga

SEQ ID NO: 444415 - DNA, 120 bp, Artificial Sequence
  ENSG00000154415_8 (sequence is synthesized)
aaaagaattagagttgatgataaatcaacacttaataagaaccagaagtactgcttccagagatgaaaggaatacattttcaacagatccagtcaattttccaaataaagcagaggggtt

SEQ ID NO: 444416 - DNA, 120 bp, Artificial Sequence
  ENSG00000154415_9 (sequence is synthesized)
agagaagaagcaaatccatggtgaaatatgtactgacttgttccaaaggtctctgtctccaagttcatcagcagaaagctccgtaaagggagatttttactgcaatgaaaaatattcctc

SEQ ID NO: 444417 - DNA, 120 bp, Artificial Sequence
  ENSG00000154415_10 (sequence is synthesized)
aggagatgactgtacacatcaaccttcagaggaaactacttcaaatatgggagaaatcaagccatcattgggagatactagtagtgatgaactagtgcaattacatactggcagcaaaga

SEQ ID NO: 444418 - DNA, 120 bp, Artificial Sequence
  ENSG00000154415_11 (sequence is synthesized)
agtcctggatgataatgctaatccagcccatggcaatggcacagtgcaaataccttgcccctcttcagatcaactaatggcaggaaaccttaataaaaaacatgaaggaggagctaaaaa

SEQ ID NO: 444419 - DNA, 120 bp, Artificial Sequence
  ENSG00000154415_12 (sequence is synthesized)
tattgaagtaaaagatttgggatgtttacgaagagatttccattcagatacgtcggcatgtctcaaagaatcaacagaagaaggatcttctaaggaagattattatggcaatggtaagga

SEQ ID NO: 444420 - DNA, 120 bp, Artificial Sequence
  ENSG00000154415_13 (sequence is synthesized)
tgatgaagaacaaagaatatatttaggtgttaatgaaaaacaaagaaaaaatttccaaacaatcttacatgaccaagaaaggaagatgggtaaccctaaaataagtgtggcagggattgg

SEQ ID NO: 444421 - DNA, 120 bp, Artificial Sequence
  ENSG00000154415_14 (sequence is synthesized)
agctagtaacagagacctggctactctgctgagcgaacataccgcaatccccacccgggcaatcacagcagatgtgtctcattcaccaaggacaaatttaagttgggaagaagctgtgtt

SEQ ID NO: 444422 - DNA, 120 bp, Artificial Sequence
  ENSG00000154415_15 (sequence is synthesized)
aaccccagagcatcatcatttgactagtgaaggcagcgctttaggagggataactggtcaagtttgttcatcaagaactggaaatgttttgaggaatgattatcttttccaagttgaaga

SEQ ID NO: 444423 - DNA, 120 bp, Artificial Sequence
  ENSG00000154415_16 (sequence is synthesized)
aaaatcaggtgggattaattctgaagatcaggataatagcccacagcataaacaaagttggaatgttctggaaagtcagggaaaatcaagagagaataagacaaacataacagagcatat

SEQ ID NO: 444424 - DNA, 120 bp, Artificial Sequence
  ENSG00000154415_17 (sequence is synthesized)
caaaggacaaacagattgtgaagacgtgtggggaaaaagagataatacgaggagtttgaaagctactacagaagaattgtttacctgccaagaaacagtgtgctgtgaactgtcttctct

SEQ ID NO: 444425 - DNA, 120 bp, Artificial Sequence
  ENSG00000154415_18 (sequence is synthesized)
atggcattactgagaaagcagaagctggtacagcctatataattaagacaacatcagaaagtactccagaaagcatgtctgctagagaaaaagcaataattgctaagctacctcaagaga

SEQ ID NO: 444426 - DNA, 120 bp, Artificial Sequence
  ENSG00000154415_19 (sequence is synthesized)
cagcacgaagtgacaggcccatcgaggtaaaggaaacagcgtttgatccacatgaagggagaaatgatgattcacattataccctttgtcaacgagatacagtaggtgtaatctatgaca

SEQ ID NO: 444427 - DNA, 120 bp, Artificial Sequence
  ENSG00000154415_20 (sequence is synthesized)
atgattttgaaaaggaatcacgtttaggtatttgtaatgtacgtgtagatgaaatggagaaggaagaaaccatgtctatgtacaatcctaggaagacacatgacagggagaaatgtggca

SEQ ID NO: 444428 - DNA, 120 bp, Artificial Sequence
  ENSG00000154415_21 (sequence is synthesized)
ctggaaatataacatctgtggaagaatcctcatgggtcattacagaatatcaaaaagcaacttcaaaactggatttacagttgggaatgttaccaacagacaaaactgtattttcagaaa

SEQ ID NO: 444429 - DNA, 120 bp, Artificial Sequence
  ENSG00000154415_22 (sequence is synthesized)
acagagatcttaggcaggttcaagaattatcaaagaaaacagactcggatgccattgtgcattctgcttttaactcagacactaatagagctcctcagaatagctctcctttttccaaac

SEQ ID NO: 444430 - DNA, 120 bp, Artificial Sequence
  ENSG00000154415_23 (sequence is synthesized)
atcatactgaaatttcagtgtcaactaatgagcaggcaattgctgtagagaatgcagttactaccatggctagccaacctatttctacgaaatcagaaaatatttgtaattcaacaagag

SEQ ID NO: 444431 - DNA, 120 bp, Artificial Sequence
  ENSG00000154415_24 (sequence is synthesized)
aaatccagggtattgagaagcacccttatcctgagtctaaacctgaagaagtttccagaagttcaggaatagtgacatcaggtagtagaaaagaaagatgcataggccagattttccaaa

SEQ ID NO: 444432 - DNA, 120 bp, Artificial Sequence
  ENSG00000154415_25 (sequence is synthesized)
cagaagagtatagtgtggaaaaatctctagggccaatgattttaatcaacaaacctcttgagaatatggaagaagcaaggcatgaaaatgaaggattagtaagctctgggcaatcactat

SEQ ID NO: 444433 - DNA, 120 bp, Artificial Sequence
  ENSG00000154415_26 (sequence is synthesized)
acacttcaggtgaaaaggaatctgacagctctgcttctactagtcttcctgttgaggaaagtcaagctcaaggcaacgaatctttgttttcaaaatataccaactctaaaataccttatt

SEQ ID NO: 444434 - DNA, 120 bp, Artificial Sequence
  ENSG00000154415_27 (sequence is synthesized)
tccttttgtttctgatatttcttataactgtctaccattatgacttaatgattggcttgacattctacgttttgtcattgtcctggctatcctgggaagagggtagacaaaaagagtctg

SEQ ID NO: 444435 - DNA, 120 bp, Artificial Sequence
  ENSG00000154415_28 (sequence is synthesized)
tcaaaaagaagtaacctcagcactactattctctcttaaaagataagctatttaaccccaaacatttggattggtgaatgggactattcattgttcaaagatccagtgcagtttttctct

SEQ ID NO: 444436 - DNA, 120 bp, Artificial Sequence
  ENSG00000154415_29 (sequence is synthesized)
tgaaggatcatttaaaaagggacgcgaataagtttgctccttcatataagtaattattctatataggaccattatgtttggatcattaaatacctatatgaatatgagatctgaagcacg

SEQ ID NO: 444437 - DNA, 120 bp, Artificial Sequence
  ENSG00000154415_30 (sequence is synthesized)
tcaagttgaaattaggtacagctgttgctccttagcaggctatgaagttgcaatgcttcacatctcttcactacttaaagtgctatttcttgcattcatttctcttgcaataaagcttca

SEQ ID NO: 444438 - DNA, 120 bp, Artificial Sequence
  ENSG00000154415_31 (sequence is synthesized)
tttttttttccccttgagagtatatattttcccctacggttttaaaaaacagataaaacatggacaatggcagaggacttttttggtcttttagtattgaacatgaaatttgttcaattt

SEQ ID NO: 444439 - DNA, 120 bp, Artificial Sequence
  ENSG00000154415_32 (sequence is synthesized)
atcatttatcaggattcattgatcaaatatttcaacctttcatatttttaagaaaacacccatatatattgaaatgcaaacttaaacatattctgttcacttgagtgtaatacttgatgc

SEQ ID NO: 444440 - DNA, 120 bp, Artificial Sequence
  ENSG00000154415_33 (sequence is synthesized)
atgcacacacacacacacataccttctttatagctacaaagtcagggcgttcataggcaaaatctgacaagactgaaacaattgggagattatctttcaattctgaaaaattctgtgggt

SEQ ID NO: 444441 - DNA, 120 bp, Artificial Sequence
  ENSG00000154415_34 (sequence is synthesized)
ggcctgtctttaagcaatgcttttctcttgtgagggaagactgtaacacagctgaactatttcagtgtcaactattcagaattgaaaatgtaaattaaaatttccacaagcattgcttca

SEQ ID NO: 444442 - DNA, 120 bp, Artificial Sequence
  ENSG00000154415_35 (sequence is synthesized)
gaatgaatttgtacctataaagcataaggcattaaatgacaataaaaattccaaatggactatttgttccacattgtatttttgtcttcaaatattttctaagagaatgaattatccccc

SEQ ID NO: 444443 - DNA, 120 bp, Artificial Sequence
  ENSG00000154415_36 (sequence is synthesized)
gagtttaagttatgaaagatggtggctttcatttaggtctctggatctctctctctatcactttatctgccaagctgctgtgttttaagcagccctctagagagacttttatggtaagga

SEQ ID NO: 444444 - DNA, 120 bp, Artificial Sequence
  ENSG00000154415_37 (sequence is synthesized)
agtatagtattatactatctggccaatagccagagaagaattgagatctcccaacaaccatgtgactgaacttggaagcagacccttctttcccagctgaatcttcttgagatgtctgga

SEQ ID NO: 444445 - DNA, 120 bp, Artificial Sequence
  ENSG00000154429_0 (sequence is synthesized)
agctggagcgcgggccgccgcggcgacatcttgctcaggaggaaagcgcgcgggagagcgagctgcgctttagctgctgcgccacgcgcgcctcgggcctgggcgcagaggatcggccgg

SEQ ID NO: 444446 - DNA, 120 bp, Artificial Sequence
  ENSG00000154429_1 (sequence is synthesized)
gcgcggcgggaaggaggctgcgggcagcgaggagcggctggcgctcgaggcggcggacggcaccatgtccccggggagcggggtgaagagcgagtacatgaagcgctaccaggagccgcg

SEQ ID NO: 444447 - DNA, 120 bp, Artificial Sequence
  ENSG00000154429_2 (sequence is synthesized)
ctgggaggagtacgggccgtgctaccgcgagctgctgcactaccgcctaggccgccggctgctggagcaggcgcacgcgccctggctctgggacgactggggcccggccggctcctcgga

SEQ ID NO: 444448 - DNA, 80 bp, Artificial Sequence
  ENSG00000154429_3 (sequence is synthesized)
cggctcctcggaggactcggcgtcgtcagagtcgtcgggcgccgggggccccgcaccccggtgcgccccgccctcgcccc

SEQ ID NO: 444449 - DNA, 120 bp, Artificial Sequence
  ENSG00000154429_4 (sequence is synthesized)
ggccccggaggagcaggacgcggaggccggggacgcggaggccgaggacgcggaggacgcggctctgccagcactgccagtgaaagatgtagaagataaacctgaacaacaaaccagaac

SEQ ID NO: 444450 - DNA, 120 bp, Artificial Sequence
  ENSG00000154429_5 (sequence is synthesized)
aagagagactgacaaatcacccaccagtactgagcctcgacagcaaccaagtgccttatttgctagaggaaacaggaaagcggtcaaaagtccccaaagatcatcgagtaaaataaaaga

SEQ ID NO: 444451 - DNA, 120 bp, Artificial Sequence
  ENSG00000154429_6 (sequence is synthesized)
aaacaagcatccatttgctctttatggctggggagaaaaacagaccgatacaggaagccagaagactcacaacgtctgtgcgtccgctcctgtgcacgagattcatgaatcagcattacg

SEQ ID NO: 444452 - DNA, 120 bp, Artificial Sequence
  ENSG00000154429_7 (sequence is synthesized)
agccaagaacagaagacaggtggaaaaaaggaaactggttgctcaaaggcagcgagctcactctgtggatgtggagaagaacagaaagatgaaggcttcctcctcagagaacccgtggat

SEQ ID NO: 444453 - DNA, 120 bp, Artificial Sequence
  ENSG00000154429_8 (sequence is synthesized)
gacagaatacatgaggtgctattcggcaagagcttaaagaaacacttgcgtggacagcctcttttaaaaagtgtaaatgactgaaaggaaaaacaaaacaaaaaccatcaaaagaaacgg

SEQ ID NO: 444454 - DNA, 120 bp, Artificial Sequence
  ENSG00000154429_9 (sequence is synthesized)
acacaggtttaagaaaccaactgattatgcaaggttttttttagggaatttgtaaaagattgttttattttgatgaatattggtcacctacctcggcagtagggcagacagttgaagcca

SEQ ID NO: 444455 - DNA, 120 bp, Artificial Sequence
  ENSG00000154429_10 (sequence is synthesized)
tagacatttggttatttatgaagataattccctaaatctttgatattcttataaggtttttgttttaaagcatcttaatcttttaagatactgacaccaaatgcctttaaatggcaacag

SEQ ID NO: 444456 - DNA, 120 bp, Artificial Sequence
  ENSG00000154429_11 (sequence is synthesized)
atgcttacagttcagtattcttttcataagcttaggtagagcctattatcatcttgttctaaataactttccagattccatagctataagatcattccatcctacagcataagactcgtt

SEQ ID NO: 444457 - DNA, 120 bp, Artificial Sequence
  ENSG00000154429_12 (sequence is synthesized)
ttccttatatgccgttttgtttgtgaaagaatatcaagtcaaaaatgagtgtcagcactactactgattccatgtataatgaaagtagaactttgctagttcctgaaaatttttaactta

SEQ ID NO: 444458 - DNA, 120 bp, Artificial Sequence
  ENSG00000154429_13 (sequence is synthesized)
tttgtatttcagttcagcagcatctttatgtagattgtgatatttaagaattatctgggctgggcgagggtctctttttctctttcagtgatcatctaggcagttattatttaatagttt

SEQ ID NO: 444459 - DNA, 120 bp, Artificial Sequence
  ENSG00000154429_14 (sequence is synthesized)
aatagctcaagtacattccaatagacgaagtgcacacaacacaatatgtgtgtacagtagtagtaaagtttcttttgagtagtcaaagactcactttttttattgccttttttttttttt

SEQ ID NO: 444460 - DNA, 120 bp, Artificial Sequence
  ENSG00000154429_15 (sequence is synthesized)
ttaaagaatacatactgtggattcagtcccttgtcacacttgaccttttggcatacacccactgtggacttttgcctcttctgtaatggctggcaatgacatttcaaacttacaatctgg

SEQ ID NO: 444461 - DNA, 120 bp, Artificial Sequence
  ENSG00000154429_16 (sequence is synthesized)
aattgcacttggtacattggcattgcttgttccactgggatggggaccagtgtgaagatgcctgttagatagactgcccacccctactttctctttttctttatagcacttaacaataac

SEQ ID NO: 444462 - DNA, 120 bp, Artificial Sequence
  ENSG00000154429_17 (sequence is synthesized)
aaagtcttgatgatgtacagtattcaaactttaggttgaaatacgttactctttgattcctagccagtagatcttatctacactttaatgggagagaatggtggtgtgtgggtaggcaca

SEQ ID NO: 444463 - DNA, 120 bp, Artificial Sequence
  ENSG00000154429_18 (sequence is synthesized)
aatttatgtaaatagtgctccttctctttagtatgtttgctttgggggtagaaaaatggttttaacaaacactggtttccatcaaatgaatgatgtcttctccatcctgtggagacaaga

SEQ ID NO: 444464 - DNA, 120 bp, Artificial Sequence
  ENSG00000154429_19 (sequence is synthesized)
atctgctagaaggatatgtgctaagttccttataagagataatggtgctctgcctatgccagcttggcacccgaagatgtgtgagtggacgtgaggctgagtattaccttagtatttttc

SEQ ID NO: 444465 - DNA, 120 bp, Artificial Sequence
  ENSG00000154429_20 (sequence is synthesized)
tctgggtctttggaaaaccatagtcaatttttagaacatattgctttcattccccataaactcttcacacatgataactgtttaagctttgaaaacacatactgaagtattgtgagctta

SEQ ID NO: 444466 - DNA, 120 bp, Artificial Sequence
  ENSG00000154429_21 (sequence is synthesized)
ctcctaatcattgagatgtatatttcaaaagaggaaattttacatgttgtccaaaacagccttgctagtaactggtgaattttggtattaactattattaaagtctttaaacgacacagg

SEQ ID NO: 444467 - DNA, 120 bp, Artificial Sequence
  ENSG00000154429_22 (sequence is synthesized)
tacctaaagatcaccttaatgtggcaatttgtgatggtgtagctagctgattgtgaaaactgttcctttaaagtcgcttcttgcatgttcggtgttagtcatccagctcaggcttgtgtt

SEQ ID NO: 444468 - DNA, 120 bp, Artificial Sequence
  ENSG00000154429_23 (sequence is synthesized)
gcagctgacaatctaggaaagacggccttagagagtggtgcaggccccacactgacggactgccttagaaacccgacttcctctagactttgaaccgccagacttttctcttgtttagaa

SEQ ID NO: 444469 - DNA, 120 bp, Artificial Sequence
  ENSG00000154429_24 (sequence is synthesized)
aacaaacttatatttaatgtacttactacttaaaactccagacagagatataatgtagaaggcaaatattggccaattttttcctctttttaagtggaagacaaatgaacgggattttta

SEQ ID NO: 444470 - DNA, 120 bp, Artificial Sequence
  ENSG00000154429_25 (sequence is synthesized)
aagtgcttttaaagtgcatgaatggttaataaatcagtatgaattgtaagccttcatcttacatccaagtccttagttggttagggtttcttttctttcttttttaaagagtgtcaatta

SEQ ID NO: 444471 - DNA, 120 bp, Artificial Sequence
  ENSG00000154429_26 (sequence is synthesized)
ccttttgaacctgtgaaaatttgatagttgttaacagtctgatggtcctaattctttcttttcattctagaaatgaatgtggttgtaatcatgttcctaattcttgggacaacctgcaag

SEQ ID NO: 444472 - DNA, 120 bp, Artificial Sequence
  ENSG00000154429_27 (sequence is synthesized)
acagtgagacagtttaaaaattacctttcatgttgaaaaagtctgaaacagagaacccaatgatatttaaaataaatgctacataaaactctttttaaaattttgattttaacttaatta

SEQ ID NO: 444473 - DNA, 120 bp, Artificial Sequence
  ENSG00000154429_28 (sequence is synthesized)
aaacaatgtcataaatatgctttttgattttgttactgcttttaatattaaagtaatagaatattgaagcaatattgtctagcactctgctggacattaagtccgcgggaggagaagtga

SEQ ID NO: 444474 - DNA, 120 bp, Artificial Sequence
  ENSG00000154429_29 (sequence is synthesized)
acaggaatcgattctttgtcttttaactgcccttagttaggagatgttaaaatacttggcacctctggttatatgtatgttatgtgtgttctcccccctaaaatttctaagcacatttat

SEQ ID NO: 444475 - DNA, 120 bp, Artificial Sequence
  ENSG00000154429_30 (sequence is synthesized)
cccccctaaaatttctaagcacatttattcacttttaaaatgaatctttaaaagattatagttagtagttatagttaatattctatttacttggaaaaatgtgaataaatggatcttcaa

SEQ ID NO: 444476 - DNA, 120 bp, Artificial Sequence
  ENSG00000154429_31 (sequence is synthesized)
ataataggctataggtgatcttacttgcgtattaggtaggaggcacatatttataccatttcatatgtaatatctttgtcattgtgtttcatcgaagatcaattgctagcaacttgaagg

SEQ ID NO: 444477 - DNA, 120 bp, Artificial Sequence
  ENSG00000154429_32 (sequence is synthesized)
gtatttatacttgggtcacttgaactcagctgactaaattgtaagaacgagagcaagcaagatggctgttattggaagccataacttccagaagataattctgcacaattcgtaagttaa

SEQ ID NO: 444478 - DNA, 120 bp, Artificial Sequence
  ENSG00000154429_33 (sequence is synthesized)
aaaaaatctgtagggtcttccactatcctttttcaggttgataatgctgttctgggcacacactttgtaaatggaatgttatggtacagtcgcctctcagtatccatggggcattggttc

SEQ ID NO: 444479 - DNA, 120 bp, Artificial Sequence
  ENSG00000154429_34 (sequence is synthesized)
caggcctcccttaggatgccaaactccatggatactcaaaccccttctataaaatggtgtagtatttgcatatatcctagacacatcctcctgtatgctttaaatcatctctagattact

SEQ ID NO: 444480 - DNA, 88 bp, Artificial Sequence
  ENSG00000154429_35 (sequence is synthesized)
gaaaaaaaagcctgtacatgttcagcacaagtgaaaccatcctttttgcccccaaatattttcaatttgtatttggttgaatccatgg

SEQ ID NO: 444481 - DNA, 120 bp, Artificial Sequence
  ENSG00000154429_36 (sequence is synthesized)
cccccaaatattttcaatttgtatttggttgaatccatggatgcagaactcacggatacagagggccgactgtactttctttaaagtgttcaaaagtattactagcaaagaggaggagga

SEQ ID NO: 444482 - DNA, 120 bp, Artificial Sequence
  ENSG00000154429_37 (sequence is synthesized)
gcaaagcatatatcagaagtaaaacaatttttcttgttgactgctttggtaaaaaacagtttgatggatagttttacatttcactggactagataaaaaatggtgctaatatttatgtag

SEQ ID NO: 444483 - DNA, 120 bp, Artificial Sequence
  ENSG00000154429_38 (sequence is synthesized)
cttgatgctatagttgctttggtatcaaacttaatacctaacccatataagatccttattatataattttgtgatcagtaaaatgatattttaaagagtgatcttaaaaatatgacctgg

SEQ ID NO: 444484 - DNA, 120 bp, Artificial Sequence
  ENSG00000154429_39 (sequence is synthesized)
tcattgcacaacgtttgcatttgaaatgaatttttgtactatagggtggatatggagttattcagtgcaagtgtgtgcttaatatcaaaccctatgcaaggagctatgtctagatttttg

SEQ ID NO: 444485 - DNA, 120 bp, Artificial Sequence
  ENSG00000154429_40 (sequence is synthesized)
gtccaaatttgcctccttcaagcctactagtgtgagatggaaaaaaatcgattgctcttttaatattatttccattttgaaattctcgacacttgaatgaaggcagtagaggcctctttt

SEQ ID NO: 444486 - DNA, 120 bp, Artificial Sequence
  ENSG00000154429_41 (sequence is synthesized)
tggatttctcttctaataacaaaactttatttagggaaggtttccctgtgctatcgtaagtttgttttgagcactgcattcactttaaaattctggaggaacaaaggctgggcacataat

SEQ ID NO: 444487 - DNA, 120 bp, Artificial Sequence
  ENSG00000154429_42 (sequence is synthesized)
cacaaagcccaggccacacaataattcggggttgtattttctaagaactatgtattgtttttagcttatagttaatattgtatttacttggaaaaatgtgaataaagttaattaacatta

SEQ ID NO: 444488 - DNA, 120 bp, Artificial Sequence
  ENSG00000154429_43 (sequence is synthesized)
ctgctagaaatgcaaataacagaaggtggagggggtagggaacatgccttccagattattcctgtgggtactgatctgctagctaaattgagatgtactttatcaggctaaatggctttt

SEQ ID NO: 444489 - DNA, 120 bp, Artificial Sequence
  ENSG00000154429_44 (sequence is synthesized)
ctctccccgatcttttattgtttgtgatggagttgtcaaatatttgcatgcaatataaatacaatttttaggcagcgttgtgatatggatggtgcctgtatttaccagctcagcactgcc

SEQ ID NO: 444490 - DNA, 120 bp, Artificial Sequence
  ENSG00000154429_45 (sequence is synthesized)
aactgacgactcctgcagagtgacgcgtgcctgggacagcgtctgctgggaccagggtggacgggcacctcaaataagtgggccagggacctgggcctgggcccctcggactggcaggca

SEQ ID NO: 444491 - DNA, 80 bp, Artificial Sequence
  ENSG00000154429_46 (sequence is synthesized)
gactggcaggcacgcccgcacccccgcgcctcgcgctctctacggaagcagccgcccccacggagcgggcggaggcccgg

SEQ ID NO: 444492 - DNA, 120 bp, Artificial Sequence
  ENSG00000154429_47 (sequence is synthesized)
ctccctgttgtgcggaggggcttttgaatgaaggaagcggctctcaggaggagcacggaaggactaaggagcattttcgggtggagtaactcaaacagcaacctcctgcagctgctggag

SEQ ID NO: 444493 - DNA, 120 bp, Artificial Sequence
  ENSG00000154429_48 (sequence is synthesized)
gatgaccacaaatccagatctttccgtgaaggaaagcaaaattgagatgattggatttatcttgggggattgcggagaaagcccttagggtgtggtgctgtctatcttttaacattccag

SEQ ID NO: 444494 - DNA, 120 bp, Artificial Sequence
  ENSG00000154429_49 (sequence is synthesized)
atgctaagtctcagaatcggagtagcagtggttgcttttgaataagcttggttcaatcttggtatatttgttgttgattttaaaatgagataaatggtttgaaaattatgctaacttgtt

SEQ ID NO: 444495 - DNA, 120 bp, Artificial Sequence
  ENSG00000154429_50 (sequence is synthesized)
cctgtatttctactttaagtggatcgtatgagttgagccataagtgaaaatgttactgtcttaagcattatgatttttcaacataaatattttaattatatataaatctgatttcaaagt

SEQ ID NO: 444496 - DNA, 120 bp, Artificial Sequence
  ENSG00000154438_0 (sequence is synthesized)
gcgcggtgccgacagggagcttccttggctggcatggcggcgagcgcgctgcgaggcctgccagtggctggcggaggcgagagtagcgagagcgaggatgatggctgggagattgggtat

SEQ ID NO: 444497 - DNA, 120 bp, Artificial Sequence
  ENSG00000154438_1 (sequence is synthesized)
ctcgaccggacgtctcagaaattgaaaaggctattacccattgaagaaaagaaagaaaaatttaagaaagcaatgaccatcggagatgtttcattggtccaggagctcctagattctggc

SEQ ID NO: 444498 - DNA, 120 bp, Artificial Sequence
  ENSG00000154438_2 (sequence is synthesized)
attagtgtagattccaactttcagtatggatggactccccttatgtatgctgctagtgttgccaatgcagagctggttcgggtccttttggacagaggtgctaatgcaagctttgagaag

SEQ ID NO: 444499 - DNA, 120 bp, Artificial Sequence
  ENSG00000154438_3 (sequence is synthesized)
gataagcaaagtattttgataactgcatgttctgctcatggctcagaggaacagatcttgaagtgtgtagaactactactttcaagaaatgctgatccaaatgttgcttgtaggagactt

SEQ ID NO: 444500 - DNA, 120 bp, Artificial Sequence
  ENSG00000154438_4 (sequence is synthesized)
atgaccccaatcatgtatgctgctcgagatggtcacacccaggttgttgctctccttgttgctcatggagcagaagttaatacccaggatgagaatggttacactgctttaacgtgggca

SEQ ID NO: 444501 - DNA, 120 bp, Artificial Sequence
  ENSG00000154438_5 (sequence is synthesized)
gcacgtcagggtcataaaaatatagttttgaagttgcttgaacttggagctaataaaatgctacaaaccaaagatggaaagatgccaagtgagattgcaaaaagaaacaaacatcatgag

SEQ ID NO: 444502 - DNA, 120 bp, Artificial Sequence
  ENSG00000154438_6 (sequence is synthesized)
atcttcaacttactttcttttactttaaatccattggaaggaaaacttcaacagctaactaaagaagacactatttgtaaaatattgacaacagattctgatagagaaaaagatcacatt

SEQ ID NO: 444503 - DNA, 120 bp, Artificial Sequence
  ENSG00000154438_7 (sequence is synthesized)
atttttacatggtcttggacttgaacatatgacagatttactaaaggaaagggatataacgttaagacatcttttgaccatgagggaagatgaatttacaaagaatggaattaccagtaa

SEQ ID NO: 444504 - DNA, 120 bp, Artificial Sequence
  ENSG00000154438_8 (sequence is synthesized)
agaccagcagaaaattctggctgctcttaaagaactacaggtagaagagatacaatttggagagctatctgaagagacaaagttggaaatcagtggtgatgagttcctcaactttcttct

SEQ ID NO: 444505 - DNA, 120 bp, Artificial Sequence
  ENSG00000154438_9 (sequence is synthesized)
caaattaaataaacagtgtggccatttaataacagctgtacagaatgttattactgagttacctgtaaattctcaaaagataacactggaatgggcttctccccagaattttacttcagt

SEQ ID NO: 444506 - DNA, 120 bp, Artificial Sequence
  ENSG00000154438_10 (sequence is synthesized)
ttgtgaagaattggttaataatgttgaagatttgagtgaaaaggtctgcaaactaaaagacctaattcaaaagttgcaaaatgaacgggaaaatgatccaactcatatacaattaaggga

SEQ ID NO: 444507 - DNA, 120 bp, Artificial Sequence
  ENSG00000154438_11 (sequence is synthesized)
agaagtatctacatggaatagtagaattttgaagaggacagctattaccatatgcggattcggttttcttcttttcatttgcaagctaactttccagaggaaataatccaaatatttgtt

SEQ ID NO: 444508 - DNA, 120 bp, Artificial Sequence
  ENSG00000154438_12 (sequence is synthesized)
ttaagttatatatacacatcttattgaaccatccaaaaatcattgcttttaactgtttgcagcacaatataactttacattctttgccaatattccataggaaaaattttgacaatgtgg

SEQ ID NO: 444509 - DNA, 120 bp, Artificial Sequence
  ENSG00000154438_13 (sequence is synthesized)
agtttttttttaaaaagtggtttgttactttgacttataaatacaatttgttatgtttatgttaattgtgattaggtagtaaagtataagtaattttttggtttgatcgtatctaaatca

SEQ ID NO: 444510 - DNA, 120 bp, Artificial Sequence
  ENSG00000154438_14 (sequence is synthesized)
cattcaaaattaaagttatatctaatatctttgacattttttaaagtgtgttcatttgtcagtgaatcgtacaggatttgtaaagtgttcataaattgagctttcttttgtttctttttt

SEQ ID NO: 444511 - DNA, 120 bp, Artificial Sequence
  ENSG00000154438_15 (sequence is synthesized)
aaagtatgaacactgaagaacattccagataagttcatgataattcaataaatagtattgatttgctgaaattacatcgtttgttctgcaaaatcacataagatctaaataagtcaattt

SEQ ID NO: 444512 - DNA, 120 bp, Artificial Sequence
  ENSG00000154438_16 (sequence is synthesized)
gtttaatattactcctttacatactgattttaaaactttgtattcttgccttcaagaaaaagaaaatgagtcagaccaaaaattaaactgatccgtgtattgaatttaccatgtgttctt

SEQ ID NO: 444513 - DNA, 120 bp, Artificial Sequence
  ENSG00000154438_17 (sequence is synthesized)
aaatatttttaaataaatttagaataggaagagtgtaagtggctgggcatagtggctcacatccgtaatcccaacactttgggaggcccacgtgggagaattgcttgaggccaggagttt

SEQ ID NO: 444514 - DNA, 120 bp, Artificial Sequence
  ENSG00000154438_18 (sequence is synthesized)
tacaaagaatttttaaaaattagctgcgcatgatggcatgtgcctctagtcctagctgaaaattagctgggcatgatggcatgcacctgtggtcctagctattcaggaggctgaggcagg

SEQ ID NO: 444515 - DNA, 77 bp, Artificial Sequence
  ENSG00000154438_19 (sequence is synthesized)
actttctcaaaaaaaagaaagaaaaagtggaagtggcctgcaaaagcagcttatttcatgtgattaggttttagctg

SEQ ID NO: 444516 - DNA, 120 bp, Artificial Sequence
  ENSG00000154438_20 (sequence is synthesized)
ctgcaaaagcagcttatttcatgtgattaggttttagctgtttgtcttagtgaaaattttttaatgcacttgttttccagtgatttttatataacatcaattaatatgagaatcatcatt

SEQ ID NO: 444517 - DNA, 120 bp, Artificial Sequence
  ENSG00000154438_21 (sequence is synthesized)
tttaaaaccttcatgaactgatttgttcatcataaatgttattactaatattaatctccatatagaaagttatatatacatatattcaggaaatgcatttggcaagctcatttgattata

SEQ ID NO: 444518 - DNA, 120 bp, Artificial Sequence
  ENSG00000154438_22 (sequence is synthesized)
tttttataaaattacttatttttggtgtcagtatttatcctaaacaaaaaaatgcctttcaattatgtaatctaatgtttaagaatgttgtataatctttgtggatataaagttgtagaa

SEQ ID NO: 444519 - DNA, 120 bp, Artificial Sequence
  ENSG00000154447_0 (sequence is synthesized)
agagacactgcgagcggcgagcgcggtggggccgcatctgcatcagccgccgcagccgctgcggggccgcgaacaaagaggaggagccgaggcgcgagagcaaagtctgaaatggatgtt

SEQ ID NO: 444520 - DNA, 120 bp, Artificial Sequence
  ENSG00000154447_1 (sequence is synthesized)
acatgagtcattttaagggatgcacacaactatgaacatttctgaagattttttctcagtaaagtagataaagatggatgaatcagccttgttggatcttttggagtgtccggtgtgtct

SEQ ID NO: 444521 - DNA, 120 bp, Artificial Sequence
  ENSG00000154447_2 (sequence is synthesized)
agagcgccttgatgcttctgcgaaggtcttgccttgccagcatacgttttgcaagcgatgtttgctggggatcgtaggttctcgaaatgaactcagatgtcccgagtgcaggactcttgt

SEQ ID NO: 444522 - DNA, 120 bp, Artificial Sequence
  ENSG00000154447_3 (sequence is synthesized)
tggctcgggtgtcgaggagcttcccagtaacatcttgctggtcagacttctggatggcatcaaacagaggccttggaaacctggtcctggtgggggaagtgggaccaactgcacaaatgc

SEQ ID NO: 444523 - DNA, 120 bp, Artificial Sequence
  ENSG00000154447_4 (sequence is synthesized)
attaaggtctcagagcagcactgtggctaattgtagctcaaaagatctgcagagctcccagggcggacagcagcctcgggtgcaatcctggagccccccagtgaggggtatacctcagtt

SEQ ID NO: 444524 - DNA, 120 bp, Artificial Sequence
  ENSG00000154447_5 (sequence is synthesized)
accatgtgccaaagcattatacaactatgaaggaaaagagcctggagaccttaaattcagcaaaggtgacatcatcattttgcgaagacaagtggatgaaaattggtaccatggggaagt

SEQ ID NO: 444525 - DNA, 120 bp, Artificial Sequence
  ENSG00000154447_6 (sequence is synthesized)
caatggaatccatggctttttccccaccaactttgtgcagattattaaaccgttacctcagcccccacctcagtgcaaagcactttatgactttgaagtgaaagacaaggaagcagacaa

SEQ ID NO: 444526 - DNA, 120 bp, Artificial Sequence
  ENSG00000154447_7 (sequence is synthesized)
agattgccttccatttgcaaaggatgatgttctgactgtgatccgaagagtggatgaaaactgggctgaaggaatgctggcagacaaaataggaatatttccaatttcatatgttgagtt

SEQ ID NO: 444527 - DNA, 120 bp, Artificial Sequence
  ENSG00000154447_8 (sequence is synthesized)
taactcggctgctaagcagctgatagaatgggataagcctcctgtgccaggagttgatgctggagaatgttcctcggcagcagcccagagcagcactgccccaaagcactccgacaccaa

SEQ ID NO: 444528 - DNA, 120 bp, Artificial Sequence
  ENSG00000154447_9 (sequence is synthesized)
gaagaacaccaaaaagcggcactccttcacttccctcactatggccaacaagtcctcccaggcatcccagaaccgccactccatggagatcagcccccctgtcctcatcagctccagcaa

SEQ ID NO: 444529 - DNA, 120 bp, Artificial Sequence
  ENSG00000154447_10 (sequence is synthesized)
ccccactgctgctgcacggatcagcgagctgtctgggctctcctgcagtgccccttctcaggttcatataagtaccaccgggttaattgtgaccccgcccccaagcagcccagtgacaac

SEQ ID NO: 444530 - DNA, 120 bp, Artificial Sequence
  ENSG00000154447_11 (sequence is synthesized)
tggcccctcgtttactttcccatcagatgttccctaccaagctgcccttggaactttgaatcctcctcttccaccaccccctctcctggctgccactgtccttgcctccacaccaccagg

SEQ ID NO: 444531 - DNA, 120 bp, Artificial Sequence
  ENSG00000154447_12 (sequence is synthesized)
cgccaccgccgctgctgctgctgctggaatgggaccgaggcccatggcaggatccactgaccagattgcacatttacggccgcagactcgccccagtgtgtatgttgctatatatccata

SEQ ID NO: 444532 - DNA, 120 bp, Artificial Sequence
  ENSG00000154447_13 (sequence is synthesized)
cactcctcggaaagaggatgaactagagctgagaaaaggggagatgtttttagtgtttgagcgctgccaggatggctggttcaaagggacatccatgcataccagcaagataggggtttt

SEQ ID NO: 444533 - DNA, 120 bp, Artificial Sequence
  ENSG00000154447_14 (sequence is synthesized)
ccctggcaattatgtggcaccagtcacaagggcggtgacaaatgcttcccaagctaaagtccctatgtctacagctggccagacaagtcggggagtgaccatggtcagtccttccacggc

SEQ ID NO: 444534 - DNA, 120 bp, Artificial Sequence
  ENSG00000154447_15 (sequence is synthesized)
aggagggcctgcccagaagctccagggaaatggcgtggctgggagtcccagtgttgtccccgcagctgtggtatcagcagctcacatccagacaagtcctcaggctaaggtcttgttgca

SEQ ID NO: 444535 - DNA, 120 bp, Artificial Sequence
  ENSG00000154447_16 (sequence is synthesized)
catgacggggcaaatgacagtcaaccaggcccgcaatgctgtgaggacagttgcagcgcacaaccaggaacgccccacggcagcagtgacacccatccaggtacagaatgccgccggcct

SEQ ID NO: 444536 - DNA, 120 bp, Artificial Sequence
  ENSG00000154447_17 (sequence is synthesized)
cagccctgcatctgtgggcctgtcccatcactcgctggcctccccacaacctgcgcctctgatgccaggctcagccacgcacactgctgccatcagtatcagtcgagccagtgcccctct

SEQ ID NO: 444537 - DNA, 120 bp, Artificial Sequence
  ENSG00000154447_18 (sequence is synthesized)
ggcctgtgcagcagctgctccactgacttccccaagcatcaccagtgcttctctggaggctgagcccagtggccggatagtgaccgttctccctggactccccacatctcctgacagtgc

SEQ ID NO: 444538 - DNA, 120 bp, Artificial Sequence
  ENSG00000154447_19 (sequence is synthesized)
ttcatcagcttgtgggaacagttcagcaaccaaaccagacaaggatagcaaaaaagaaaaaaagggtttgttgaagttgctttctggcgcctccactaaacggaagccccgcgtgtctcc

SEQ ID NO: 444539 - DNA, 120 bp, Artificial Sequence
  ENSG00000154447_20 (sequence is synthesized)
tccagcatcgcccaccctagaagtggagctgggcagtgcagagcttcctctccagggagcggtggggcccgaactgccaccaggaggtggccatggcagggcaggctcctgccctgtgga

SEQ ID NO: 444540 - DNA, 120 bp, Artificial Sequence
  ENSG00000154447_21 (sequence is synthesized)
actccgcagttcccatcgctccacctcctcgccaggcctgttcctccctgggtcctgtcttgaatgagtctagacctgtcgtttgtgaaaggcacagggtggtggtttcctatcctcctc

SEQ ID NO: 444541 - DNA, 120 bp, Artificial Sequence
  ENSG00000154447_22 (sequence is synthesized)
agagtgaggcagaacttgaacttaaagaaggagatattgtgtttgttcataaaaaacgagaggatggctggttcaaaggcacattacaacgtaatgggaaaactggccttttcccaggaa

SEQ ID NO: 444542 - DNA, 120 bp, Artificial Sequence
  ENSG00000154447_23 (sequence is synthesized)
gctttgtggaaaacatatgaggagactgacactgaagaagcttaaaatcacttcacacaacaaagtagcacaaagcagtttaacagaaagagcacatttgtggacttccagatggtcagg

SEQ ID NO: 444543 - DNA, 120 bp, Artificial Sequence
  ENSG00000154447_24 (sequence is synthesized)
agatgagcaaaggattggtatgtgactctgatgccccagcacagttaccccagcgagcagaatgaagaagatgtttgtgtgggttttgttagtctggattcggatgtataaggtgtgcct

SEQ ID NO: 444544 - DNA, 120 bp, Artificial Sequence
  ENSG00000154447_25 (sequence is synthesized)
tgtactgtctgatttactacacagagaaacttttttttttttttaagatatatgactaaaatggacaattgtttacaaggcttaactaatttatttgcttttttaaacttgaacttttcg

SEQ ID NO: 444545 - DNA, 120 bp, Artificial Sequence
  ENSG00000154447_26 (sequence is synthesized)
tataatagatacgttctttggattatgattttaagaaattattaatttatgaaatgataggtaaggagaagctggattatctcctgttgagagcaagagattcgttttgacatagagtga

SEQ ID NO: 444546 - DNA, 120 bp, Artificial Sequence
  ENSG00000154447_27 (sequence is synthesized)
atgcattttcccctctcctcctccctgctaccattatattttggggttatgttttgcttctttaagatagaaatcccagttctctaatttggttttcttctttgggaaaccaaacataca

SEQ ID NO: 444547 - DNA, 120 bp, Artificial Sequence
  ENSG00000154447_28 (sequence is synthesized)
aatgaatcagtatcaattagggcctggggtagagagacagaaacttgagagaagagaagttagtgattccctctctttctagtttggtaggaatcaccctgaagacctagtcctcaattt

SEQ ID NO: 444548 - DNA, 120 bp, Artificial Sequence
  ENSG00000154447_29 (sequence is synthesized)
aattgtgtgggtttttaattttcctagaatgaagtgactgaaacaatgagaaagaatacagcacaacccttgaacaaaatgtatttagaaatatatttagttttatagcagaagcagctc

SEQ ID NO: 444549 - DNA, 120 bp, Artificial Sequence
  ENSG00000154447_30 (sequence is synthesized)
aattgtttggttggaaagtaggggaaattgaagttgtagtcactgtctgagaatggctatgaagcgtcatttcacattttaccccaactgacctgcatgcccaggacacaagtaaaacat

SEQ ID NO: 444550 - DNA, 120 bp, Artificial Sequence
  ENSG00000154447_31 (sequence is synthesized)
ttgtgagatagtggtggtaagtgatgcactcgtgttaagtcaaaggctataagaaacactgtgaaaagttcatattcatccattgtgattctttccccacgtcttgcatgtattactgga

SEQ ID NO: 444551 - DNA, 120 bp, Artificial Sequence
  ENSG00000154447_32 (sequence is synthesized)
ttcccacagtaatatagactgtgcatggtgtgtatatttcattgcgatttcctgttaagatgagtttgtactcagaattgaccaattcaggaggtgtaaaaataaacagtgttctcttct

SEQ ID NO: 444552 - DNA, 120 bp, Artificial Sequence
  ENSG00000154447_33 (sequence is synthesized)
ctaccccaaagccactactgaccaaggtctcttcagtgcactcgctccctctctggctaaggcatgcattagccactacacaagtcattagtgaaagtggtcttttatgtcctcccagca

SEQ ID NO: 444553 - DNA, 120 bp, Artificial Sequence
  ENSG00000154447_34 (sequence is synthesized)
gacagacatcaaggatgagttaaccaggagactactcctgtgactgtggagctctggaaggcttggtgggagtgaatttgcccacaccttacaattgtggcaggatccagaagagcctgt

SEQ ID NO: 444554 - DNA, 120 bp, Artificial Sequence
  ENSG00000154447_35 (sequence is synthesized)
ctttttatatccattccttgatgtcattggcctctcccaccgatttcattacggtgccacgcagtcatggatctgggtagtccggaaaacaaaaggagggaagacagcctggtaatgaat

SEQ ID NO: 444555 - DNA, 120 bp, Artificial Sequence
  ENSG00000154447_36 (sequence is synthesized)
aagatccttaccacagttttctcatgggaaatacataataaaccctttcatctttttttttttcctttaagaattaaaactgggaaatagaaacatgaactgaaaagtcttgcaatgaca

SEQ ID NO: 444556 - DNA, 120 bp, Artificial Sequence
  ENSG00000154447_37 (sequence is synthesized)
agaggtttcatggtcttaaaaagatactttatgtggttgaagatgaaatcattcctaaattaaccttttttttaaaaaaaaacaatgtatattatgttcctgtgtgttgaatttaaaaaa

SEQ ID NO: 444557 - DNA, 120 bp, Artificial Sequence
  ENSG00000154447_38 (sequence is synthesized)
aaaatactttacttggatattcatgtaatatataaaggtttggtgaaatgaactttagttaggaaaaagctggcatcagctttcatctgtgtaagttgacaccaatgtgtcataatattc

SEQ ID NO: 444558 - DNA, 120 bp, Artificial Sequence
  ENSG00000154447_39 (sequence is synthesized)
tttattttgggaaattagtgtattttataaaaattttaaaaagaaaaaagactactacaggttaagataatttttttacctgtcttttctccatattttaagctatgtgattgaagtacc

SEQ ID NO: 444559 - DNA, 120 bp, Artificial Sequence
  ENSG00000154447_40 (sequence is synthesized)
tctgttcatagtttcctggtataaagttggttaaaatttcatctgttaatagatcattaggtaatataatgtatgggttttctattggttttttgcagacagtagagggagattttgtaa

SEQ ID NO: 444560 - DNA, 120 bp, Artificial Sequence
  ENSG00000154447_41 (sequence is synthesized)
caagggcttgttacacagtgatatggtaatgataaaattgcgatttatcactccttttcatgttaataatttgaggactggataaaaggtttcaagattaaaatttgatgttcaaacctt

SEQ ID NO: 444561 - DNA, 120 bp, Artificial Sequence
  ENSG00000154447_42 (sequence is synthesized)
cagagtttatcaactactgccctgaagggcgcttttctgttttagctgctttcaagcaaatctgtgtcttttagaattgtcaaccttcagctctttttggttgggcaaaattaaacagtt

SEQ ID NO: 444562 - DNA, 120 bp, Artificial Sequence
  ENSG00000154447_43 (sequence is synthesized)
ctatttttaataacagcgaagaaacatatgtatttaatattgggatcatttaccacgagcgattacatgaggcatggtttcttaaacgctaaagtggcttaaaaaagggaatttagttgg

SEQ ID NO: 444563 - DNA, 120 bp, Artificial Sequence
  ENSG00000154451_0 (sequence is synthesized)
gctaattgttgtagatcatcacttcaaggtgcccatatctttctagtggaaaaattattctggcctccgctgcatacaaatcaggcaaccagaattctacatatataaggcaaagtaaca

SEQ ID NO: 444564 - DNA, 120 bp, Artificial Sequence
  ENSG00000154451_1 (sequence is synthesized)
tcctagacatggctttagagatccacatgtcagaccccatgtgcctcatcgagaactttaatgagcagctgaaggttaatcaggaagctttggagatcctgtctgccattacgcaacctg

SEQ ID NO: 444565 - DNA, 120 bp, Artificial Sequence
  ENSG00000154451_2 (sequence is synthesized)
tagttgtggtagcgattgtgggcctctatcgcactggcaaatcctacctgatgaacaagctggctgggaagaacaagggcttctctgttgcatctacggtgcagtctcacaccaagggaa

SEQ ID NO: 444566 - DNA, 120 bp, Artificial Sequence
  ENSG00000154451_3 (sequence is synthesized)
tttggatatggtgtgtgcctcatcccaactggccaaatcacacattagttctgcttgacaccgagggcctgggagatgtagagaaggctgacaacaagaatgatatccagatctttgcac

SEQ ID NO: 444567 - DNA, 120 bp, Artificial Sequence
  ENSG00000154451_4 (sequence is synthesized)
tggcactcttactgagcagcacctttgtgtacaatactgtgaacaaaattgatcagggtgctatcgacctactgcacaatgtgacagaactgacagatctgctcaaggcaagaaactcac

SEQ ID NO: 444568 - DNA, 120 bp, Artificial Sequence
  ENSG00000154451_5 (sequence is synthesized)
ccgaccttgacagggttgaagatcctgctgactctgcgagcttcttcccagacttagtgtggactctgagagatttctgcttaggcctggaaatagatgggcaacttgtcacaccagatg

SEQ ID NO: 444569 - DNA, 120 bp, Artificial Sequence
  ENSG00000154451_6 (sequence is synthesized)
aatacctggagaattccctaaggccaaagcaaggtagtgatcaaagagttcaaaatttcaatttgccccgtctgtgtatacagaagttctttccaaaaaagaaatgctttatctttgact

SEQ ID NO: 444570 - DNA, 120 bp, Artificial Sequence
  ENSG00000154451_7 (sequence is synthesized)
tacctgctcaccaaaaaaagcttgcccaacttgaaacactgcctgatgatgagctagagcctgaatttgtgcaacaagtgacagaattctgttcctacatctttagccattctatgacca

SEQ ID NO: 444571 - DNA, 120 bp, Artificial Sequence
  ENSG00000154451_8 (sequence is synthesized)
ttgcatagagaatgcagtcctggccttggctcagagagagaactcagctgcagtgcaaaaggccattgcccactatgaccagcaaatgggccagaaagtgcagctgcccatggaaaccct

SEQ ID NO: 444572 - DNA, 120 bp, Artificial Sequence
  ENSG00000154451_9 (sequence is synthesized)
ccaggagctgctggacctgcacaggaccagtgagagggaggccattgaagtcttcatgaaaaactctttcaaggatgtagaccaaagtttccagaaagaattggagactctactagatgc

SEQ ID NO: 444573 - DNA, 120 bp, Artificial Sequence
  ENSG00000154451_10 (sequence is synthesized)
aaaacagaatgacatttgtaaacggaacctggaagcatcctcggattattgctcggctttacttaaggatatttttggtcctctagaagaagcagtgaagcagggaatttattctaagcc

SEQ ID NO: 444574 - DNA, 120 bp, Artificial Sequence
  ENSG00000154451_11 (sequence is synthesized)
aggaggccataatctcttcattcagaaaacagaagaactgaaggcaaagtactatcgggagcctcggaaaggaatacaggctgaagaagttctgcagaaatatttaaagtccaaggagtc

SEQ ID NO: 444575 - DNA, 120 bp, Artificial Sequence
  ENSG00000154451_12 (sequence is synthesized)
tgtgagtcatgcaatattacagactgaccaggctctcacagagacggaaaaaaagaagaaagaggcacaagtgaaagcagaagctgaaaaggctgaagcgcaaaggttggcggcgattca

SEQ ID NO: 444576 - DNA, 120 bp, Artificial Sequence
  ENSG00000154451_13 (sequence is synthesized)
aaggcagaacgagcaaatgatgcaggagagggagagactccatcaggaacaagtgagacaaatggagatagccaaacaaaattggctggcagagcaacagaaaatgcaggaacaacagat

SEQ ID NO: 444577 - DNA, 120 bp, Artificial Sequence
  ENSG00000154451_14 (sequence is synthesized)
gcaggaacaggctgcacagctcagcacaacattccaagctcaaaatagaagccttctcagtgagctccagcacgcccagaggactgttaataacgatgatccatgtgttttactctaaag

SEQ ID NO: 444578 - DNA, 120 bp, Artificial Sequence
  ENSG00000154451_15 (sequence is synthesized)
tgctaaatatgggagtttcctttttttactctttgtcactgatgacacaacagaaaagaaactgtagaccttgggacaatcaacatttaaataaactttataattattttttcaaacttt

SEQ ID NO: 444579 - DNA, 120 bp, Artificial Sequence
  ENSG00000154451_16 (sequence is synthesized)
gaatacaggtatccctagttctacctattgtggagaattgctgagggacctctttgtaaaaccagtgagaacaggaaaattgccatgtatacaggcacacagatgaggtttatgtctctg

SEQ ID NO: 444580 - DNA, 120 bp, Artificial Sequence
  ENSG00000154451_17 (sequence is synthesized)
tctagtagtaatccttttcttgaataagcatttatggaaaaacaatgtgcctggtgttggtgttcctcgcacagaatttatatctaatggtagcagtggggttaaactgaaccatcacca

SEQ ID NO: 444581 - DNA, 120 bp, Artificial Sequence
  ENSG00000154451_18 (sequence is synthesized)
taatcaccagacttgctttgtgaccatcaacattcattgcaacaaagaggcctttttggttacattggacagaatgccaatacttgaaactaacctaagaaacaccagtaattcattggc

SEQ ID NO: 444582 - DNA, 120 bp, Artificial Sequence
  ENSG00000154451_19 (sequence is synthesized)
ttacacaaactaaaagcaaaagattttaatttagtttcaagtatagatgcattcagaattttaaacaatattatcccttttcctccttctttctgtcatttttctgtttcattttcctga

SEQ ID NO: 444583 - DNA, 120 bp, Artificial Sequence
  ENSG00000154451_20 (sequence is synthesized)
ctattggcttcatttccaggcaggctcaccccacatgacaataaaggtgacaccaacaggtccaagcttaactagtccttactgccctcagtctcaggggaaagagagcatcttttctcc

SEQ ID NO: 444584 - DNA, 120 bp, Artificial Sequence
  ENSG00000154451_21 (sequence is synthesized)
agcatatatctgtcattcaaacacaaaagcatcatcaattttcatactctttgcagtatttttctccctgtgaacaagtcctttgcatctagtggacttgcatgctctgactgaccatgg

SEQ ID NO: 444585 - DNA, 120 bp, Artificial Sequence
  ENSG00000154451_22 (sequence is synthesized)
agtcatggccaaacttgtgacaggagcaggtgttccacaagcctctccagtctcaattggcagttccaccaagtgcagggtggaagcctgtataggctccacctctcctatggagcctct

SEQ ID NO: 444586 - DNA, 120 bp, Artificial Sequence
  ENSG00000154451_23 (sequence is synthesized)
cctatggcaagcctctcctatgaggaatagatgctgctggaaggaacaagacaaagatgtttacaacattcctaatcaccatttcctgcatctaactgcatgttttccgggttgctaggc

SEQ ID NO: 444587 - DNA, 120 bp, Artificial Sequence
  ENSG00000154451_24 (sequence is synthesized)
tgaagaagttctgcagaaatatttaaagtccaaggagtctgtgagtcatgcaatattacagactgaccaggctctcacagagacggaaaaaaagaagaaaggtgagaagaaagtggaaat

SEQ ID NO: 444588 - DNA, 120 bp, Artificial Sequence
  ENSG00000154451_25 (sequence is synthesized)
tatgcaagatagaaagaaatctataaattttaaataaatttggcctggccctcatgggatgttaaactagagcaagaatggcaaagatgcttcttagctcctcaagcatatctgactggc

SEQ ID NO: 444589 - DNA, 120 bp, Artificial Sequence
  ENSG00000154451_26 (sequence is synthesized)
atgatcctgcattgtggttacctggaagggaaaaacaacccctgggaattttatccaggaagttggaacaatcacaaacaaaagtgggaggcagaaggaagaggcacattaatcctagag

SEQ ID NO: 444590 - DNA, 120 bp, Artificial Sequence
  ENSG00000154451_27 (sequence is synthesized)
tttattgcttcctttaagagattataaattgtataagggacattgtatcactgccttcatttatgcgtgatattgggatggtttcatcaggagatgctttccttgcatctcaatgtcatc

SEQ ID NO: 444591 - DNA, 120 bp, Artificial Sequence
  ENSG00000154451_28 (sequence is synthesized)
tgtctaatttctcataaggggattatgttacctagagcagggcttcccaaccctcaggccatagactagctctgatctgtggcctcttaggaacccggccacacagcaggaggtgagcag

SEQ ID NO: 444592 - DNA, 120 bp, Artificial Sequence
  ENSG00000154451_29 (sequence is synthesized)
agctccacctcctgtcagatcagcagtgacattagattctcacaggagtgggaaccctattgtgaactgtgcatgcaaaagatctaggttgtgtgatccttgtggaacaatataaaccag

SEQ ID NO: 444593 - DNA, 120 bp, Artificial Sequence
  ENSG00000154451_30 (sequence is synthesized)
tccttgtggaacaatataaaccagaaaccaataacgccaccccacctccaacccccgccaaccctctgtggaaaaattaccttccacgaaactggtccctgatgccaaataggttggggg

SEQ ID NO: 444594 - DNA, 120 bp, Artificial Sequence
  ENSG00000154451_31 (sequence is synthesized)
accgctgacctagagggagttatgcacatgggcttataaggttagccaagagaaaggacaagaagacccaaagtcggcaagcaaatttattaacctgctgggctgctctacagaaatctg

SEQ ID NO: 444595 - DNA, 120 bp, Artificial Sequence
  ENSG00000154451_32 (sequence is synthesized)
aggaggcagacaccgggcttacaggctaaggggtataagtaggtctgcaggggttttgtgtgtgtgtgcgggggtgtcgggggggcaaggccatttgtggagacttttcctcccagtatg

SEQ ID NO: 444596 - DNA, 120 bp, Artificial Sequence
  ENSG00000154451_33 (sequence is synthesized)
gccacatcctgcagtttgtcagtttttgcccccgcctggctcagggtaccaggatgtggtttagcttaggggtggttatagtggcacctaagttctgggaacttgcggtgggggcgacct

SEQ ID NO: 444597 - DNA, 120 bp, Artificial Sequence
  ENSG00000154451_34 (sequence is synthesized)
tttggacgaaaaataagctgcagggcagctaggggagggggcttgttatattcctctgggggcagggtgtccctaactgggctcagtcggaaggaacttgaccaaagtctgggctcagtt

SEQ ID NO: 444598 - DNA, 120 bp, Artificial Sequence
  ENSG00000154451_35 (sequence is synthesized)
gggcatcactcaggctaatggtcgtgtgctggatgccatcagagggaagtaccaatggtaaagtggaaacaatgtgcagctttcaactgggtggaggctgctattctgtggacagtgaga

SEQ ID NO: 444599 - DNA, 120 bp, Artificial Sequence
  ENSG00000154451_36 (sequence is synthesized)
tgtttccttggcactgtcaatagacaatctgcgtagagaaattccaagctgaaagccaataatgttataataaaatagagattcttcagaagatgaaaggaattaccagcatggaaattg

SEQ ID NO: 444600 - DNA, 120 bp, Artificial Sequence
  ENSG00000154451_37 (sequence is synthesized)
tgtcataggcttaagggctaaagaagaagccttttcttttctgttcaccctcaccaagagcacaacttaaatagggcattttataacctgaacacaatttatattggacttaattattat

SEQ ID NO: 444601 - DNA, 120 bp, Artificial Sequence
  ENSG00000154451_38 (sequence is synthesized)
gtgtaatatgtttataatcctttagatcttataaatatgtggtataaggaatgccatataatgtgccaaaaatctgagtgcatttaatttaatgcttgcttatagtgctaaagttaaatg

SEQ ID NO: 444602 - DNA, 73 bp, Artificial Sequence
  ENSG00000154451_39 (sequence is synthesized)
tccaaacacatccgaacatcagaaggagcaaactcctgacacgccacctttaagaaccgtgacactcaacgct

SEQ ID NO: 444603 - DNA, 120 bp, Artificial Sequence
  ENSG00000154451_40 (sequence is synthesized)
tggggcaagaggtggaagagatttgcaagattcatttggttttagaaacattctacaaaggataggatgcagcttatcctgatgtggtatatcagacctcagtaaagaataaattgtatt

SEQ ID NO: 444604 - DNA, 120 bp, Artificial Sequence
  ENSG00000154451_41 (sequence is synthesized)
cttatcagacaggcagcagaattcatcaagtaccagctgtgtctgcctcttgctgaattagacatcaatgtgtgtggtgactaaactaagagtttgaaatgccttcaaattatttttctt

SEQ ID NO: 444605 - DNA, 120 bp, Artificial Sequence
  ENSG00000154451_42 (sequence is synthesized)
cctttgcaattttatgacttattcaggatcataatttccacttaagttaccttcgtccttcataaaatctgattaaactgactcgaacttcagcatgaaagtttcaaaaactatgatagc

SEQ ID NO: 444606 - DNA, 120 bp, Artificial Sequence
  ENSG00000154451_43 (sequence is synthesized)
tattattttcatgagaaagaacaatgaatatgatgcaatgtaagtagcttgcaaacattaaggacaagaaaaaaatgttgcccagagagaagtttcatgaaaacagtgatgtatttttag

SEQ ID NO: 444607 - DNA, 120 bp, Artificial Sequence
  ENSG00000154451_44 (sequence is synthesized)
tcatagtcttgtactttgtttgaaagtagatttcttcctttagcaatagccctgacttaattcatgttggtttcttggcatctactcacttaactaaccccttttgtgttgggttctgct

SEQ ID NO: 444608 - DNA, 120 bp, Artificial Sequence
  ENSG00000154451_45 (sequence is synthesized)
tctactactctattgcctttactattatgaatcacctaatttaacagttgcccaactggatccctcaatactgtctggcaactgttcactcgttgaaattctctcctttgaatttcttac

SEQ ID NO: 444609 - DNA, 120 bp, Artificial Sequence
  ENSG00000154451_46 (sequence is synthesized)
catgacacatacttcaagcattttgtactagtttgatttccatttatatccttaataagagccttttccttttccttgaaattcaaaccagaaactatgcaaaataagcaaaagcaagca

SEQ ID NO: 444610 - DNA, 120 bp, Artificial Sequence
  ENSG00000154451_47 (sequence is synthesized)
ataacaactacatatacaaatgcaggcgcaaaacccaaactagaatcatatggctgaaaacagatgttttctttcagaaatccttccactaccacttctgagcattttctcttagtattt

SEQ ID NO: 444611 - DNA, 120 bp, Artificial Sequence
  ENSG00000154451_48 (sequence is synthesized)
ttttttgggcattttccttctttgcactttttaaaatctcctgcagctcgctcactctctttcataagccagcagttatactgatgttaataaatagttgtttatttacttttgcttttt

SEQ ID NO: 444612 - DNA, 120 bp, Artificial Sequence
  ENSG00000154451_49 (sequence is synthesized)
tagaaaacaagctgaaagaattgagtgaaatgccagagagatacagatagccagttgtagggctggggttggaaatcaagtctaatttaaggcaagggcaaaatgtgcattttgtgtgtg

SEQ ID NO: 444613 - DNA, 120 bp, Artificial Sequence
  ENSG00000154451_50 (sequence is synthesized)
tattttgaaccattcttgcattgtttttatttgcaaaggttatagggctcaagcagttagggagaatgcatcccagaacactaagttatgaataacagagcaacagttatgtttgtggct

SEQ ID NO: 444614 - DNA, 120 bp, Artificial Sequence
  ENSG00000154451_51 (sequence is synthesized)
tgaacacattaaatctgcaataatgttttagaaatttggctttactaaaagcattaaagatgctatccagatgacattggggacaacatgtcaaatactattattaatgtagatatacaa

SEQ ID NO: 444615 - DNA, 120 bp, Artificial Sequence
  ENSG00000154451_52 (sequence is synthesized)
tgctattgtcattcataagagagtctgaacactcagacacattcattccctcttccttagtgacatcatcccaaatcataagatcttgtaagctctcaatatctgcttatagatttggct

SEQ ID NO: 444616 - DNA, 120 bp, Artificial Sequence
  ENSG00000154451_53 (sequence is synthesized)
tatgtatcttttgtttttctagctaattgttgtagatcatcacttcaaggtgcccatatctttctagtggaaaaattattctggcctccgctgcatacaaatcaggcaaccagaattcta

SEQ ID NO: 444617 - DNA, 120 bp, Artificial Sequence
  ENSG00000154451_54 (sequence is synthesized)
catatataaggtactaatactacattgaaaatagattagaatgagaagagacctgccatttgagtctctaaatttgttgcaaaattgcctctttctgggtcaggcttgcactaggcattt

SEQ ID NO: 444618 - DNA, 120 bp, Artificial Sequence
  ENSG00000154451_55 (sequence is synthesized)
cctgactcccatgtcctagtgctacaccatttgcaaatggatatcctattttctgctgccaagcagtttctgttttaatttatgtcaacataatgatttccagggcattagctatgagga

SEQ ID NO: 444619 - DNA, 120 bp, Artificial Sequence
  ENSG00000154451_56 (sequence is synthesized)
cataattgtaaaatgacagtttttgaaatttgctagtaaagagatggagaatccaaaccttttcattgtaagattttagtgaaagaactcgtcaagcggatagtgaagttttagcatcct

SEQ ID NO: 444620 - DNA, 120 bp, Artificial Sequence
  ENSG00000154451_57 (sequence is synthesized)
tagtaaataaccacctttaaaatggaagaaaactatcctttatgataaggcaaagtagaaaagcatatttttatggcatttgctttttctcatatagctcaaacattttttttaaccaga

SEQ ID NO: 444621 - DNA, 120 bp, Artificial Sequence
  ENSG00000154451_58 (sequence is synthesized)
gactctttaggttatagggattgatgctcagaagttagaaaaaaataggttaagtattattaaaggaagttgttttactcattcagtcaatcataaaataatcatgctttgaagttttgg

SEQ ID NO: 444622 - DNA, 120 bp, Artificial Sequence
  ENSG00000154451_59 (sequence is synthesized)
tttaataaagcacattagtaactatgtaaaaaatttcaagtatatcactaagaagcaaacagctatgatttgttagataatgctgcataatgacttggtagtatttaatgtaatgcagtt

SEQ ID NO: 444623 - DNA, 120 bp, Artificial Sequence
  ENSG00000154451_60 (sequence is synthesized)
tgactggacatagatctaactgaaaaaaatgaagttgacacaaagtaaaaggaacagtgtaatatattaataaagaacatcataaagaattaatataggaacccagggaggtaaaaacta

SEQ ID NO: 444624 - DNA, 120 bp, Artificial Sequence
  ENSG00000154451_61 (sequence is synthesized)
aaaaacataactaagccaaaaaccaatggaataagagttagattcaaactagtaggttagacgcaggaaatggattttcgtatgcctatcaaatatttaagaaccagtagaatggcctat

SEQ ID NO: 444625 - DNA, 120 bp, Artificial Sequence
  ENSG00000154451_62 (sequence is synthesized)
agtagacatataaagggcctaggacttacttttgttttaaaataaagtctctctattttacaggactctttttattttaaaactttttttttccagaaacttaggcagtgctggggagta

SEQ ID NO: 444626 - DNA, 120 bp, Artificial Sequence
  ENSG00000154451_63 (sequence is synthesized)
agccaaacaaaattggctggcagagcaacagaaaatgcaggaacaacagatgcaggtattcatcaattgtttcatctctcccctgcctgtaacgatgagagtatgtagcagtggcaaaga

SEQ ID NO: 444627 - DNA, 120 bp, Artificial Sequence
  ENSG00000154473_0 (sequence is synthesized)
gagtgttctgagggaagcaaggaggcggcggcggccgcagcgagtggcgagtagtggaaacgttgcttctgaggggagcccaagatgaccggttctaacgagttcaagctgaaccagcca

SEQ ID NO: 444628 - DNA, 120 bp, Artificial Sequence
  ENSG00000154473_1 (sequence is synthesized)
cccgaggatggcatctcctccgtgaagttcagccccaacacctcccagttcctgcttgtctcctcctgggacacgtccgtgcgtctctacgatgtgccggccaactccatgcggctcaag

SEQ ID NO: 444629 - DNA, 120 bp, Artificial Sequence
  ENSG00000154473_2 (sequence is synthesized)
taccagcacaccggcgccgtcctggactgcgccttctacgatccaacgcatgcctggagtggaggactagatcatcaattgaaaatgcatgatttgaacactgatcaagaaaatcttgtt

SEQ ID NO: 444630 - DNA, 120 bp, Artificial Sequence
  ENSG00000154473_3 (sequence is synthesized)
gggacccatgatgcccctatcagatgtgttgaatactgtccagaagtgaatgtgatggtcactggaagttgggatcagacagttaaactgtgggatcccagaactccttgtaatgctggg

SEQ ID NO: 444631 - DNA, 120 bp, Artificial Sequence
  ENSG00000154473_4 (sequence is synthesized)
accttctctcagcctgaaaaggtatataccctctcagtgtctggagaccggctgattgtgggaacagcaggccgcagagtgttggtgtgggacttacggaacatgggttacgtgcagcag

SEQ ID NO: 444632 - DNA, 120 bp, Artificial Sequence
  ENSG00000154473_5 (sequence is synthesized)
cgcagggagtccagcctgaaataccagactcgctgcatacgagcgtttccaaacaagcagggttatgtattaagctctattgaaggccgagtggcagttgagtatttggacccaagccct

SEQ ID NO: 444633 - DNA, 120 bp, Artificial Sequence
  ENSG00000154473_6 (sequence is synthesized)
gaggtacagaagaagaagtatgccttcaaatgtcacagactaaaagaaaataatattgagcagatttacccagtcaatgccatttcttttcacaatatccacaatacatttgccacaggt

SEQ ID NO: 444634 - DNA, 120 bp, Artificial Sequence
  ENSG00000154473_7 (sequence is synthesized)
ggttctgatggctttgtaaatatttgggatccatttaacaaaaagcgactgtgccaattccatcggtaccccacgagcatcgcatcacttgccttcagtaatgatgggactacgcttgca

SEQ ID NO: 444635 - DNA, 120 bp, Artificial Sequence
  ENSG00000154473_8 (sequence is synthesized)
atagcgtcatcatatatgtatgaaatggatgacacagaacatcctgaagatggtatcttcattcgccaagtgacagatgcagaaacaaaacccaagtcaccatgtacttgacaagatttc

SEQ ID NO: 444636 - DNA, 120 bp, Artificial Sequence
  ENSG00000154473_9 (sequence is synthesized)
atttacttaagtgccatgttgatgataataaaacaattcgtactccccaatggtggatttattactattaaagaaaccagggaaaatattaattttaatattataacaacctgaaaataa

SEQ ID NO: 444637 - DNA, 120 bp, Artificial Sequence
  ENSG00000154473_10 (sequence is synthesized)
tggaaaagaggtttttgaatttttttttttaaataaacaccttcttaagtgcatgagatggtttgatggtttgctgcattaaaggtatttgggcaaacaaaattggagggcaagtgactg

SEQ ID NO: 444638 - DNA, 120 bp, Artificial Sequence
  ENSG00000154473_11 (sequence is synthesized)
cagttttgagaatcagttttgaccttgatgattttttgtttccactgtggaaataaatgtttgtaaataagtgtaataaaaatccctttgcattctttctggaccttaaatggtagagga

SEQ ID NO: 444639 - DNA, 120 bp, Artificial Sequence
  ENSG00000154473_12 (sequence is synthesized)
aaaggctcgtgagccatttgtttcttttgctggttatagttgctaattctaaagctgcttcagactgcttcatgaggaggttaatctacaattaaacaatatttcctcttggccgtccat

SEQ ID NO: 444640 - DNA, 120 bp, Artificial Sequence
  ENSG00000154473_13 (sequence is synthesized)
tattttctgaagcagatggttcatcatttcctgggctgttaaacaaagcgaggttaaggttagactcttgggaatcagctagttttcaatcttattagggtgcagaaggaaaactaataa

SEQ ID NO: 444641 - DNA, 120 bp, Artificial Sequence
  ENSG00000154473_14 (sequence is synthesized)
gaaaacctcctaatatcattttgtgactgtaaacaattatttattagcaaacaattgatcccagaagggcaaattgtttgagtcagtaatgagctgagaaaagacagagcatatctgtgt

SEQ ID NO: 444642 - DNA, 120 bp, Artificial Sequence
  ENSG00000154473_15 (sequence is synthesized)
atttggaaaaataattgtaacgtaattgcagtgcatttagacaggcatctatttggacctgtttctatctctaaatgaatttttggaaacattaatgaggtttacatatttctctgacat

SEQ ID NO: 444643 - DNA, 120 bp, Artificial Sequence
  ENSG00000154473_16 (sequence is synthesized)
ttatatagttcttatgtccatttcagttgaccagccgctggtgattaaagttaaaaagaaaaaaattatagtgagaatgagattcatttcaatgtaatgcactaaagcagaacacgaact

SEQ ID NO: 444644 - DNA, 120 bp, Artificial Sequence
  ENSG00000154473_17 (sequence is synthesized)
tagcttggcctattctaggtagttccaaatagtatttttgttgtcaaactttaaaatttatattaatttgcaaatgtatgtctctgagtaggacttggacctttcctgagatttatttta

SEQ ID NO: 444645 - DNA, 120 bp, Artificial Sequence
  ENSG00000154473_18 (sequence is synthesized)
tccgtgatgtattttttttaattcttttgatacagagaagggtctttttttttttaagtatttcagtgaaaacttggtgtaagtctgaacccatcttttgaaatgtattttcttcattgc

SEQ ID NO: 444646 - DNA, 120 bp, Artificial Sequence
  ENSG00000154473_19 (sequence is synthesized)
aggtccacctaatcatcctgtgaaagtggtttctctatggaaagctttgtttgcttcctacaaatacatgcttattccttaagggatgtgttagagttactgtggatttctctgttttct

SEQ ID NO: 444647 - DNA, 120 bp, Artificial Sequence
  ENSG00000154473_20 (sequence is synthesized)
gtcttacaagaaacttgtctatgtaccttaatactttgtttaggatgaggagtctttgtgtccctgtacagtagtctgacgtatttccccttctgtcccctagtaagcccagttgctgta

SEQ ID NO: 444648 - DNA, 120 bp, Artificial Sequence
  ENSG00000154473_21 (sequence is synthesized)
tctgaacagtttgagctctttttgtaatatactctaaacctgttatttctgtgctaataaacgagatgcagaacccttgaatgttggatgtttttgaatgttggtaattaatataattta

SEQ ID NO: 444649 - DNA, 120 bp, Artificial Sequence
  ENSG00000154473_22 (sequence is synthesized)
cttaaaaaggcttgtgtaaggcaaaactcgtcatcacaggcatgttgggggatgacattttacctttaagtccactctccctcgtttaattgtctcctctgatgtgtgttggggattcag

SEQ ID NO: 444650 - DNA, 120 bp, Artificial Sequence
  ENSG00000154473_23 (sequence is synthesized)
tcctgcataaagtgatttgttggagttcagccatttccctcatgcccccttgtgccctctcggtggatcagcagggcctttgagccaagtgtgcagcttcactcaggatgggcagagact

SEQ ID NO: 444651 - DNA, 120 bp, Artificial Sequence
  ENSG00000154473_24 (sequence is synthesized)
atgtggcagcctctggggaccttttggctcagtgctttactagtgccagcgcagtagtgcttaggtagcttgtgcatccccgtgttgatgtagtcatagtccacacagagccaaataaca

SEQ ID NO: 444652 - DNA, 120 bp, Artificial Sequence
  ENSG00000154473_25 (sequence is synthesized)
gacccttctgtacttagccatcaaatactaaatcacagtgaagcccttgggaaggtaaataatgtaatagccagggactgatggtattagttctttagtgtgattatgtgcttctaaaag

SEQ ID NO: 444653 - DNA, 120 bp, Artificial Sequence
  ENSG00000154473_26 (sequence is synthesized)
tccctaaccacttggttgaggacagaccataagtttaaaacattgtataagtgaaagaattaatatagtattgttataggtaaccaaattatagtaatgtggacttgtttttgaggtggt

SEQ ID NO: 444654 - DNA, 120 bp, Artificial Sequence
  ENSG00000154473_27 (sequence is synthesized)
gagggagggcttattttgtggttccatctggatgtcctcttgtctctggaaatcaagtgtgcctccctgccatctctacataccccttaaccagctctccacaatttacttgtttatggt

SEQ ID NO: 444655 - DNA, 120 bp, Artificial Sequence
  ENSG00000154473_28 (sequence is synthesized)
tatagctaccttttccccaagttacccaggtgtagttaccttggccttctcattggtttccctcacccacattctttaagtgtctcttctgtttatcttttcttcctactgctaccatcc

SEQ ID NO: 444656 - DNA, 120 bp, Artificial Sequence
  ENSG00000154473_29 (sequence is synthesized)
cagggccttttgggtgaatgtggcagcctccaatttctgccttaagtcctccatctaatagagtagtgacttttgaaccttgtagttgtgacccaagtaagaaatacattttgaactaca

SEQ ID NO: 444657 - DNA, 120 bp, Artificial Sequence
  ENSG00000154473_30 (sequence is synthesized)
gttcagaacacagaggtcagtatattatacatgacagaaggatcctgaaatatgacttgcccttcttgcatgcgatgtatctggtgcatgtgtgcatttttttctttgctttttaagaaa

SEQ ID NO: 444658 - DNA, 120 bp, Artificial Sequence
  ENSG00000154473_31 (sequence is synthesized)
tcctggctatgtcaccttgaattgattttacaacaaatgcctgtcacctgtaatttgcaaaaactgcttgatcagattctaaaaaatttctaaaagatttttaaaaaatgtattctgatg

SEQ ID NO: 444659 - DNA, 120 bp, Artificial Sequence
  ENSG00000154473_32 (sequence is synthesized)
ttcctgttgctcatagtcacccttcagtgatttcataaggaggtgtgctgcttcccaagcttctagatcatcaggaaggggccgcggactgtaaggtgctctcagaagatgggactaacc

SEQ ID NO: 444660 - DNA, 120 bp, Artificial Sequence
  ENSG00000154473_33 (sequence is synthesized)
tttgttgggaatataaataagtggatgggatgggaagtgacagcaatatctggttctgagttctgttgtgtaaaaacttaaaggtatattagcaggttagcctttgttctgtgggagatc

SEQ ID NO: 444661 - DNA, 120 bp, Artificial Sequence
  ENSG00000154473_34 (sequence is synthesized)
caggccttgttagaaggaccaaggccagaatgcccagtttagccttagcattcaaacccttcattgtttttcctccattatctgttaaactcctgctttgccaaaggtatcttctatacc

SEQ ID NO: 444662 - DNA, 120 bp, Artificial Sequence
  ENSG00000154473_35 (sequence is synthesized)
ctaataacactagcttccttccctcagtggggactcaacgcacattagcctactgagagcttagatcactacaacgaatccttgtaaatttgtttaactcagttttccccaaattcattt

SEQ ID NO: 444663 - DNA, 120 bp, Artificial Sequence
  ENSG00000154473_36 (sequence is synthesized)
aagccggttctactttttctggtcttgttcccacaatcattttaccttttaccactcccccagaaaacactggggttcttctcttacgctgagagccaggttactttcttcactatcact

SEQ ID NO: 444664 - DNA, 120 bp, Artificial Sequence
  ENSG00000154473_37 (sequence is synthesized)
ccgacgcttgtgttgattcccaaatctcagtctgcccagggtcattctctttctgaattgctctttcaggatttaatttgaatcctgcaaagtcctgttcaaggcccccttttccatgaa

SEQ ID NO: 444665 - DNA, 120 bp, Artificial Sequence
  ENSG00000154473_38 (sequence is synthesized)
gcccttcttccttgttgcagctcacaaataagtgtgccctttctcaaaacacgtatgaaacacctcctgcttgtatacctttagcagtagttcctcatattgcctggcatttaaacattt

SEQ ID NO: 444666 - DNA, 120 bp, Artificial Sequence
  ENSG00000154473_39 (sequence is synthesized)
ttgtatgcgtacatcttgctttcctacttaaagcaagagcaggaccacatctttttgtatgctctggcacatgactgttggaccactttgatattgctgaattatatagactccttttaa

SEQ ID NO: 444667 - DNA, 120 bp, Artificial Sequence
  ENSG00000154473_40 (sequence is synthesized)
aataatttgaaatataattttggagtatagacatcttgtccagtgcactagacaggtgacctttggctttgttcattaagcatttagtgtcttagaagtgatatgtttactgcagaaaaa

SEQ ID NO: 444668 - DNA, 120 bp, Artificial Sequence
  ENSG00000154473_41 (sequence is synthesized)
tttggatagcatgcaaaaaatgaaacatactatcacaatcctatgatataacttaaaaatttctttatagcttcatggaggtatttgatgaaaattgtatatatttaaggtatataatgt

SEQ ID NO: 444669 - DNA, 120 bp, Artificial Sequence
  ENSG00000154473_42 (sequence is synthesized)
tttgatacatgtatacattgtgaaatgattaccacaaggaggttactaaacatctccatcaccttgttaaattgagttaaacaaatttacaagttgacaaattacatttacaaatttatg

SEQ ID NO: 444670 - DNA, 120 bp, Artificial Sequence
  ENSG00000154473_43 (sequence is synthesized)
atttacaagttgacaaattacatttacaaatttatgtaattttttacgctttttttttttctcctttttctggagaacggggtctcgctatactgcccaggcaggtctcgaactcctggg

SEQ ID NO: 444671 - DNA, 120 bp, Artificial Sequence
  ENSG00000154473_44 (sequence is synthesized)
ctgggattataggcgtgagccaccccacccggcctatgtcatttttttatgtggtgagaataaataatctcagcaaatttcaagtatacaattcattattactaagatagccaccacact

SEQ ID NO: 444672 - DNA, 120 bp, Artificial Sequence
  ENSG00000154473_45 (sequence is synthesized)
gtatgtcagggctccagaacttactcatctcataggaggcagctacttttaacattcttggtgtatatccatccttcaggattttctgtatatttctctaacagcaaaagtttttgttag

SEQ ID NO: 444673 - DNA, 120 bp, Artificial Sequence
  ENSG00000154473_46 (sequence is synthesized)
ctacatcatgtgaaatgcctgggtagacaaatttaaagatgttatttgggatggtgtgacttgcacaagccacacagcctgcatggtgtccactttgagggggatgcccatagctatact

SEQ ID NO: 444674 - DNA, 120 bp, Artificial Sequence
  ENSG00000154473_47 (sequence is synthesized)
tagaagtcatcctctagagcaagcttgtccaatttgttgtccatgggccacatgctgcccaggatggctttgaaggtggcccaaaacaaattcataaacttttgtaaaacgtgagatttt

SEQ ID NO: 444675 - DNA, 87 bp, Artificial Sequence
  ENSG00000154473_48 (sequence is synthesized)
ccaaaacaaattcataaacttttgtaaaacgtgagattttttgtgattttttttttttcgagacagtggcgcgatctccgctcattg

SEQ ID NO: 444676 - DNA, 74 bp, Artificial Sequence
  ENSG00000154473_49 (sequence is synthesized)
ccatcacgcccggctaatttttgtatttcttttagtagagacggtaatccgccctccttggtctcccaaagtgc

SEQ ID NO: 444677 - DNA, 120 bp, Artificial Sequence
  ENSG00000154473_50 (sequence is synthesized)
caaagtgctgggatacaggcatgagccactgcacccagctgtgacttttttttttttaagctcatcagctattgtattagtgtattttatgtgtagctcaagacaattcttccagtgtgg

SEQ ID NO: 444678 - DNA, 120 bp, Artificial Sequence
  ENSG00000154473_51 (sequence is synthesized)
ctcaagacaattcttccagtgtggaccaggaaagccaaaagattggacacccctgccctagagcatctgacgcctggatacaaaagagcctgtggctatgactatcaggattctggccat

SEQ ID NO: 444679 - DNA, 120 bp, Artificial Sequence
  ENSG00000154473_52 (sequence is synthesized)
gaggaattccatgacatggagggaaaatggcaacttcaaatttgcacccccaggtatcatgtgggcaggtgctccatgtggctggtgatagttgtgagtgagccttgcacgggctttccc

SEQ ID NO: 444680 - DNA, 120 bp, Artificial Sequence
  ENSG00000154473_53 (sequence is synthesized)
cctatcggctgttccagagcgagaggctgcaggtgtccacttacgtacctgtggctaagatgcgcctgagcaagtgagggccagttagtatacataatttttacaaaatttggatcatat

SEQ ID NO: 444681 - DNA, 120 bp, Artificial Sequence
  ENSG00000154473_54 (sequence is synthesized)
tacataaatatcttgcttcatgcacttaatatgaaattttgcccatgatttattttttaccttatttttaagggccacctagttagaatttgattatttgagcaactatttagtgcctgt

SEQ ID NO: 444682 - DNA, 120 bp, Artificial Sequence
  ENSG00000154473_55 (sequence is synthesized)
gatgtgccagccactgctaggttctggggctcaaaacactgtgacagatgctgtgataccacaacgtggccacattttgttttcaagaccttggccaacctttggtcttcacagccactg

SEQ ID NO: 444683 - DNA, 120 bp, Artificial Sequence
  ENSG00000154473_56 (sequence is synthesized)
ccctggtagtaagggacttagttaagtttggtgactgcttgaagtctaagatcaccaaagtggctaatgcaggcactgtgacaatctgggcactaggaaaagcaatgtgggcagaaattc

SEQ ID NO: 444684 - DNA, 120 bp, Artificial Sequence
  ENSG00000154473_57 (sequence is synthesized)
cttgttcgagagccttctggttatactttaaaaagaagggagcctagcatcttgtcaaatctttgagcccactcactcagagggcctgtcactcatccagaattgaatctgctggtttaa

SEQ ID NO: 444685 - DNA, 120 bp, Artificial Sequence
  ENSG00000154473_58 (sequence is synthesized)
caggtcaggcagtgtgatttgacagcgtgaatcttagagtccagcctttgaacctggcgctgaatcctgactttactgcttattcagggggccactagctaagttaatttgtgagcctgg

SEQ ID NO: 444686 - DNA, 120 bp, Artificial Sequence
  ENSG00000154473_59 (sequence is synthesized)
gcaacatggcgtgacccatctctacaaaagatacaaaaattaactggatgtggtggtgcatgcctgtagttcatagctactctggaggctgaggcgggaggataacctgagtgcgggagg

SEQ ID NO: 444687 - DNA, 120 bp, Artificial Sequence
  ENSG00000154473_60 (sequence is synthesized)
tccagcctaggtgacagagtgagaccttatcttaatctaaaaaataaaatttctgagccttattttcctcatctgtaaaatgaagagaatacctagctcatggagttaggaacaagtatg

SEQ ID NO: 444688 - DNA, 120 bp, Artificial Sequence
  ENSG00000154473_61 (sequence is synthesized)
gagaatacctagctcatggagttaggaacaagtatgttaaatatttatcagagtgtgcctgacagtgagttgaaaatatctactctctttggatgaaaaatatttaacacttcactctca

SEQ ID NO: 444689 - DNA, 120 bp, Artificial Sequence
  ENSG00000154473_62 (sequence is synthesized)
gatataattattagctgactttttagattcttttttcttttacatgatgtagttctcagatatatacgggatttctagttcttaaatgccagtattttttttctgttaaaatatttatga

SEQ ID NO: 444690 - DNA, 120 bp, Artificial Sequence
  ENSG00000154473_63 (sequence is synthesized)
actatttcaaacattcagaaaaactcaggatcatacccataaacccactgtttagattttaaaaagttcaatgtttttctgtattttatctcttcattttaaaataaagttttgcacatg

SEQ ID NO: 444691 - DNA, 120 bp, Artificial Sequence
  ENSG00000154473_64 (sequence is synthesized)
attaatttttctaaattcatgaatagcattgttgatgcctgctcgatattacagctgactgtagggttggagttgatgttatcatgttctcccaagctttcaatatccgtaggttgatag

SEQ ID NO: 444692 - DNA, 120 bp, Artificial Sequence
  ENSG00000154473_65 (sequence is synthesized)
acgtctgatggataaaattgtgcctagttgttttgtagagaagaatgtcaaactcttattcttcttgaataggctctattatttgaatctctggagttattaccagctcattgcttcaaa

SEQ ID NO: 444693 - DNA, 120 bp, Artificial Sequence
  ENSG00000154473_66 (sequence is synthesized)
attaagttgaggaattcaagaataatttattttagtaaattctatttaagatgtttaagaatttgaactgccaaaaatctttcctctccacagaggttgtttctttaatattaacacaaa

SEQ ID NO: 444694 - DNA, 120 bp, Artificial Sequence
  ENSG00000154478_0 (sequence is synthesized)
cgccatggcggcgccgggttgcggaccctgagcgccggcgcggggcgcgcaccatgaactcgtgggacgcgggcctggcggggctactggtgggcacgatgggcgtctcgctgctgtcca

SEQ ID NO: 444695 - DNA, 120 bp, Artificial Sequence
  ENSG00000154478_1 (sequence is synthesized)
acgcgctggtgctgctctgcctgctgcacagcgcggacatccgccgccaggcgccggcgctcttcaccctgaacctcacgtgcgggaacctgctgtgcaccgtggtcaacatgccgctca

SEQ ID NO: 444696 - DNA, 120 bp, Artificial Sequence
  ENSG00000154478_2 (sequence is synthesized)
cgctggccggcgtcgtggcgcagcggcagccggcgggcgaccgcctgtgccgcctggctgccttcctcgacaccttcctggctgccaactccatgctcagcatggccgcgctcagcatcg

SEQ ID NO: 444697 - DNA, 120 bp, Artificial Sequence
  ENSG00000154478_3 (sequence is synthesized)
accgctgggtggccgtggtcttcccgctgagctaccgggccaagatgcgcctccgcgacgcggcgctcatggtggcctacacgtggctgcacgcgctcaccttcccagccgccgcgctcg

SEQ ID NO: 444698 - DNA, 120 bp, Artificial Sequence
  ENSG00000154478_4 (sequence is synthesized)
ccctgtcctggctcggcttccaccagctgtacgcctcgtgcacgctgtgcagccggcggccagacgagcgcctgcgcttcgccgtcttcactggcgccttccacgctctcagcttcctgc

SEQ ID NO: 444699 - DNA, 120 bp, Artificial Sequence
  ENSG00000154478_5 (sequence is synthesized)
tctccttcgtcgtgctctgctgcacgtacctcaaggtgctcaaggtggcccgcttccattgcaagcgcatcgacgtgatcaccatgcagacgctggtgctgctggtggacctgcacccca

SEQ ID NO: 444700 - DNA, 120 bp, Artificial Sequence
  ENSG00000154478_6 (sequence is synthesized)
gtgtgcgggaacgctgtctggaggagcagaagcggaggcgacagcgagccaccaagaagatcagcaccttcatagggaccttccttgtgtgcttcgcgccctatgtgatcaccaggctag

SEQ ID NO: 444701 - DNA, 120 bp, Artificial Sequence
  ENSG00000154478_7 (sequence is synthesized)
tggagctcttctccacggtgcccatcggctcccactggggggtgctgtccaagtgcttggcgtacagcaaggccgcatccgacccctttgtgtactccttactgcgacaccagtaccgca

SEQ ID NO: 444702 - DNA, 120 bp, Artificial Sequence
  ENSG00000154478_8 (sequence is synthesized)
aaagctgcaaggagattctgaacaggctcctgcacagacgctccatccactcctctggcctcacaggcgactctcacagccagaacattctgccggtgtctgagtgaaggaccgcgctcc

SEQ ID NO: 444703 - DNA, 120 bp, Artificial Sequence
  ENSG00000154478_9 (sequence is synthesized)
tgctgaagagtttagaatgaggcagcggtgagaagaagggtgggagggcgtgggggcccctgggtggacaccaccagccaccagtccctggcatgcccagtgatcctggttccctggctt

SEQ ID NO: 444704 - DNA, 120 bp, Artificial Sequence
  ENSG00000154478_10 (sequence is synthesized)
gtaggggctccagagcctgcttcctggttcctcaagggcagatattggacactccttatttgtcaccaaaggatgactgtaggccgtgtgctggcctttctttctaagaagctgctttga

SEQ ID NO: 444705 - DNA, 120 bp, Artificial Sequence
  ENSG00000154478_11 (sequence is synthesized)
gctcctggactcacctgaggctccctgggggatgacactcagttctgtcactgtcaaggatgcagagagctggtggtaggtgggaagcatggtgtccacctgcctgctgaccactggacg

SEQ ID NO: 444706 - DNA, 120 bp, Artificial Sequence
  ENSG00000154478_12 (sequence is synthesized)
ctgctccatgctgaagaaaagtgacagtctccaggggacatttcagccatgctgaaagggaggctggcagtggtcatttggcccggatctaacatggcacctcgtctccacagggtagtg

SEQ ID NO: 444707 - DNA, 120 bp, Artificial Sequence
  ENSG00000154478_13 (sequence is synthesized)
gtggctgcttcaacccaaatattattcagctggtactaacgacattgtgcccagctgggactcttgggctctgtgcctgagggaaaatgtttcacaactagtggctgcccaattgctgct

SEQ ID NO: 444708 - DNA, 120 bp, Artificial Sequence
  ENSG00000154478_14 (sequence is synthesized)
gaccagttgtcttagaaatggtcaattggattcaactttagtcctctccttccccctaaaagcgaatgtttgtgtgtgcagacaatcttagcatgaaaatggtttaaataggctggtcct

SEQ ID NO: 444709 - DNA, 120 bp, Artificial Sequence
  ENSG00000154478_15 (sequence is synthesized)
acatgtattaggttctttcaagtttgactgggaggtcacctttttctgatttacaagtcctaattgttggagctcagtaaaggtaggaggaaggtggctggttggtcctcccttccccct

SEQ ID NO: 444710 - DNA, 120 bp, Artificial Sequence
  ENSG00000154478_16 (sequence is synthesized)
gtttgtgacctgaatttacaggaagtgtttcaacttgtcttatgcatcttatctggcatgtcctgggagatggatgggcaagaactggcctgagcagggatttttgccttgattttaagt

SEQ ID NO: 444711 - DNA, 120 bp, Artificial Sequence
  ENSG00000154478_17 (sequence is synthesized)
cactgggttccattgtcctggcacctccatttccttagtttctgtaagcctgttaacagaaagtagaggctattcaaggttatcaagaaagtgccctgtgctaatgatgagacagtgaat

SEQ ID NO: 444712 - DNA, 88 bp, Artificial Sequence
  ENSG00000154478_18 (sequence is synthesized)
tatcaagaaagtgccctgtgctaatgatgagacagtgaattttttttttttttcgagatgggagtttcactcttaggctcaccacaac

SEQ ID NO: 444713 - DNA, 120 bp, Artificial Sequence
  ENSG00000154478_19 (sequence is synthesized)
tttatggaatactgcacctataaaacacatgccaatctgttagcagtcctgacttgatttaataaaaaccaaggagagccacccctgctttctggccatctcttctttgtctaccatttc

SEQ ID NO: 444714 - DNA, 120 bp, Artificial Sequence
  ENSG00000154478_20 (sequence is synthesized)
aaattgacttgtgaatactcagagcagttatttttcaatcctccactctaagtgattcctccagggtgggaagcacggggagcaatggaatcagatggctcattctctccttccagctct

SEQ ID NO: 444715 - DNA, 120 bp, Artificial Sequence
  ENSG00000154478_21 (sequence is synthesized)
ttacatcctaactttggaggtatagaaggaaggatgtggtccaacgggaaggaagtgaagagtctattggtttttacttctaggcagtcccaatttttaaaggcagagaagtatctgcat

SEQ ID NO: 444716 - DNA, 120 bp, Artificial Sequence
  ENSG00000154478_22 (sequence is synthesized)
ctttatttgaaaagacgtcttattaactcttagctcctcagttagaaaacaattcacctggcttagtcttgtctagtttcaaagttaccatggagactagaatggagacaggtgtagctt

SEQ ID NO: 444717 - DNA, 120 bp, Artificial Sequence
  ENSG00000154478_23 (sequence is synthesized)
ccaaggaggccttggcatcttgcagttgctgtcagagatgggctcatatctgcttggggaagccaatggggcacaatccttcccaatttcatgatctggggcatcatgtcggtagctgaa

SEQ ID NO: 444718 - DNA, 120 bp, Artificial Sequence
  ENSG00000154478_24 (sequence is synthesized)
gtcagccacggtgggagtgtttataccatgaaaatcagcaagtgctgtaaatcaggccttttgccccacagagagctgattgtgaaacatctactagcacaccactgccagacatgactg

SEQ ID NO: 444719 - DNA, 120 bp, Artificial Sequence
  ENSG00000154478_25 (sequence is synthesized)
tgtgtgtccctgaaacaaaattgctctggctcagagctcctttggccactcatattacaatagcaacagacatttgcttcctggtggcaagtaactgtgcaccctccaacatcccaaccc

SEQ ID NO: 444720 - DNA, 120 bp, Artificial Sequence
  ENSG00000154478_26 (sequence is synthesized)
cagaggaaccagtgggattgaaaaccagcagaagccaagacaggatgcacagctgaattggaggagagtagctcccttctcacacaaacgctttcaaagttgggcaaaagtggcccagtg

SEQ ID NO: 444721 - DNA, 120 bp, Artificial Sequence
  ENSG00000154478_27 (sequence is synthesized)
cgtgaggtcagtcaacagccaaattccagcagcaaaatacattttcatcaatatcactttgggagaataactgtggcacatgctctttctgctttctctgtactgtataggcaacatgtt

SEQ ID NO: 444722 - DNA, 120 bp, Artificial Sequence
  ENSG00000154478_28 (sequence is synthesized)
gtactcccagtagcaactagatctcttttacctcttctttagccaagaagcaagatctgtcacccacaacaccacatatcttgaaaagatgcttttcataattttcactatacctctaaa

SEQ ID NO: 444723 - DNA, 120 bp, Artificial Sequence
  ENSG00000154478_29 (sequence is synthesized)
accaattgtaccgacatcacgtagacaaaaactccagataaatccattgattgggtattttcattattatttggacacatgaattaaatcccaagggaaagtgagaagaaaattaatgta

SEQ ID NO: 444724 - DNA, 120 bp, Artificial Sequence
  ENSG00000154478_30 (sequence is synthesized)
ttagcaaccagtgttagccaactctgctgtaattacctttagataaatgtttattttcatctctatacagtctatcaaatttgccccctggctttattactcccaattgaattatctacc

SEQ ID NO: 444725 - DNA, 120 bp, Artificial Sequence
  ENSG00000154478_31 (sequence is synthesized)
tcattttgttaatttaatttatcaaaggtaacattgttttctcaggtataacacatagaaacaccaagattttcagcatctgaatcaaactaaaattacttgcttgacttcactccaggg

SEQ ID NO: 444726 - DNA, 120 bp, Artificial Sequence
  ENSG00000154478_32 (sequence is synthesized)
tgagacttgacctttaaggcccaaactctggtgaactgttggactgggtagaaatctttcaagaagcttgaaaataaggccataaaggaggggctttcaaattcctaaatccacatatag

SEQ ID NO: 444727 - DNA, 120 bp, Artificial Sequence
  ENSG00000154478_33 (sequence is synthesized)
ggctgagttcctagtcctacacaatcagaatttgcctttttaagtcacgctgcaactattccggctttttatatggcacctttctgagggaggggattttacagccgagggacctccaaa

SEQ ID NO: 444728 - DNA, 120 bp, Artificial Sequence
  ENSG00000154478_34 (sequence is synthesized)
gggaacgtccatttgcatgtgtgccctggtatttagggtttgtctcatggtcagctcgcctctcaaagatggctcaccaatcacctgcctgtttttacttagaaagcaggcttgggcagg

SEQ ID NO: 444729 - DNA, 120 bp, Artificial Sequence
  ENSG00000154478_35 (sequence is synthesized)
aggggaaatggatttgaaccatctcagaccaactctatctcttctagcactcagctcagcctcctgtccccatgagcaataaaactctctccttatgtctgtgaaattcgttttcttttt

SEQ ID NO: 444730 - DNA, 120 bp, Artificial Sequence
  ENSG00000154478_36 (sequence is synthesized)
catggtgcctttctttctaagaaaagatagaaagaatggggccaggttcatgtcccagttgtcacccttttacatgcttgggtgcaggtagatgaggccttcccatggctacagtgtgac

SEQ ID NO: 444731 - DNA, 120 bp, Artificial Sequence
  ENSG00000154478_37 (sequence is synthesized)
ccttggaggaaccaaaggctgtgcattgttagaatttagcccagatgcaggataaactagcttgcctgagtttaatgaggatattatatcaggtgccaggaatcccttgggtcagctcct

SEQ ID NO: 444732 - DNA, 120 bp, Artificial Sequence
  ENSG00000154478_38 (sequence is synthesized)
atcctctggacggggagcatcatgggaaaaagaggtccgagtcatatttagggcttcatgtgtctggaagggagccattagctcttaaattattcacagaagtcaccacggaaggttgtt

SEQ ID NO: 444733 - DNA, 120 bp, Artificial Sequence
  ENSG00000154478_39 (sequence is synthesized)
taagatgcagattccagcatcccctcctcagagatcaatttcagcagggccaggcaggacctgggtttccgcacttttaatcatcgatgcccaggtaactgataggagttttcttcaaac

SEQ ID NO: 444734 - DNA, 120 bp, Artificial Sequence
  ENSG00000154478_40 (sequence is synthesized)
catcccctaaggagaaatgatcttagacacttggataaactctatagaaaattgagtgtttctattaataactatctaggtttcaattgtcttgtatctttccctaattctccaaacagt

SEQ ID NO: 444735 - DNA, 120 bp, Artificial Sequence
  ENSG00000154478_41 (sequence is synthesized)
tcaatctccagctttattcaatggctgggccattttgttcttggagggacaaaattgacctctccatgaaattgcaaaaacccatcttcattcctttttatggggctccaggtcataagg

SEQ ID NO: 444736 - DNA, 120 bp, Artificial Sequence
  ENSG00000154478_42 (sequence is synthesized)
gggcacttgcttgggtcttggatcaaactctactggggcagcctggctgtgggaggtgatgacatctgccacctctgccactacccagagcttgtcctgccctcttcccagccagcctca

SEQ ID NO: 444737 - DNA, 120 bp, Artificial Sequence
  ENSG00000154478_43 (sequence is synthesized)
cacacaggagctgagccaggctgaggcaaggtcagcgagagacagttctccatgccagtatctgggtgtgggtctcttgttggctcccagctcatcccgtgtggctgacccttccaggtc

SEQ ID NO: 444738 - DNA, 120 bp, Artificial Sequence
  ENSG00000154478_44 (sequence is synthesized)
acttggagcagccagtaatgacagtgtcctaacagctggtgggtatggaggaaagactagacatcaggctatggactcacatggagggccctggtgttggctctgggacctgggctgggc

SEQ ID NO: 444739 - DNA, 120 bp, Artificial Sequence
  ENSG00000154478_45 (sequence is synthesized)
cggacctggggagagggtgggtggagcttggcctctgcagtttgcgcttgcaggttcaggggagaaagttgtttgagatcagggtttaggggtagtgtttcccattaatcttcatcataa

SEQ ID NO: 444740 - DNA, 120 bp, Artificial Sequence
  ENSG00000154478_46 (sequence is synthesized)
tcttttgatgtaggtgctgttattatctctacgttacacatctgggaggatttgaaagtcctggagacagggaggttttggggagaatgcaaaacagggcagggctctcaaggagggtgg

SEQ ID NO: 444741 - DNA, 120 bp, Artificial Sequence
  ENSG00000154478_47 (sequence is synthesized)
accagtgaccatggggaaactgagtgtttctattaataagtatctaagtttcaattgtcttgtatctttccctaattctccaaacggttcaatctccagttttattcagggactgggcca

SEQ ID NO: 444742 - DNA, 120 bp, Artificial Sequence
  ENSG00000154478_48 (sequence is synthesized)
ttttgttctcagagggacaaaactgatctctccatgaaatcccctgcacctcactctgggcagctctaggctcagcagatgtttttctgccattaggaaacagccccttactctcagctc

SEQ ID NO: 444743 - DNA, 120 bp, Artificial Sequence
  ENSG00000154478_49 (sequence is synthesized)
ctgtgctaacacccatacccaccagctgggcgttgggacctctcccgtcatatggctgccacttgcttgggaaggaattctccagactccttttactttgtatgtgtttctaggggaatt

SEQ ID NO: 444744 - DNA, 120 bp, Artificial Sequence
  ENSG00000154478_50 (sequence is synthesized)
ctgagggaagaagctttgcagcaacctctgtgcccagaacatacggctcacaagtcctttgtgccgacagggaatctatctaattgttttagtgtgtgaggctcattgtcagcctagatt

SEQ ID NO: 444745 - DNA, 120 bp, Artificial Sequence
  ENSG00000154478_51 (sequence is synthesized)
tccctgaaactctgggccagcagcccccaggagcatcagtaggacccagcatttcccctggcaccaaagtggacctctttgcaccttgcagccgggagaactgacttagagggccctggt

SEQ ID NO: 444746 - DNA, 120 bp, Artificial Sequence
  ENSG00000154478_52 (sequence is synthesized)
gttggctctggaacctgggctgagatggattcggggagaggctgggtggagcttggcctctacggtctgttcttgcagattcaggagagaaagtggtatgagagcagtgtggtttgtaag

SEQ ID NO: 444747 - DNA, 120 bp, Artificial Sequence
  ENSG00000154478_53 (sequence is synthesized)
ttccccaacttccccgctggctcacactgtctccccagaccaatggcctattagcccccaaaaagttagtccaaccccaggccagctgcctttgctctgctgtggcctaagttctggcct

SEQ ID NO: 444748 - DNA, 120 bp, Artificial Sequence
  ENSG00000154478_54 (sequence is synthesized)
ggtcaaaggaaggtggcaggaactccaggcttgctcctgcctcctcacacctcattccacaaatgcggagtgaaagagcaggagccagacacatttgggggttgactgtctagaaaggag

SEQ ID NO: 444749 - DNA, 120 bp, Artificial Sequence
  ENSG00000154478_55 (sequence is synthesized)
gaatcagaggtcccaaggaacacaatcgtgcaacttcctagggaatctgcatcaggagaaagaagcggctaggacacacagtggcttcgctcagcctggccacgacatcactgtgcagaa

SEQ ID NO: 444750 - DNA, 120 bp, Artificial Sequence
  ENSG00000154478_56 (sequence is synthesized)
gaagagatctgtcaggggtccagaggagcggagtcctggagcctctgggagggtggcatgtggcagctgcaggctgtggtccagaactatgagcagacttgcctgtcactctccaaacat

SEQ ID NO: 444751 - DNA, 120 bp, Artificial Sequence
  ENSG00000154478_57 (sequence is synthesized)
ttactgaacacctactgtgtgccaggccctgtgctttgtcaggctctgggggagacaggtcattactctgcagtgtgggaagcggggctgccctggaagtgtgtactcagtgctgtgggg

SEQ ID NO: 444752 - DNA, 120 bp, Artificial Sequence
  ENSG00000154478_58 (sequence is synthesized)
gtacagagggagggctggagaacttagctggtgggaaaggagggttctggaaggcttctcagaggtagtggcattgggccagaacttacagtagggaagagcatgtggcaaggcacagag

SEQ ID NO: 444753 - DNA, 120 bp, Artificial Sequence
  ENSG00000154478_59 (sequence is synthesized)
gagatgggagcctgcctggtgaggggtccagtggtgacagagctcagtgtgggtccagagatggtgtcaggtgagggctgagaggggagggcaagtgccccttgagatgggctgaacgtg

SEQ ID NO: 444754 - DNA, 120 bp, Artificial Sequence
  ENSG00000154478_60 (sequence is synthesized)
atgatgatctgtggccagtgggagatgatagaagtcttgaggttgggaatataagaattaggtctcttttagaaagagaggacatggagaaaatccatatatttttagctaccaaaaaag

SEQ ID NO: 444755 - DNA, 120 bp, Artificial Sequence
  ENSG00000154478_61 (sequence is synthesized)
agaaggaagaaagaaaagaaataagaagagaagcaagacagaaaagaaggaagagagaaggaagaatggcaaaggaaggaagaaggagagaaggaaggaaaaacaaaggaaggagaaaaa

SEQ ID NO: 444756 - DNA, 120 bp, Artificial Sequence
  ENSG00000154478_62 (sequence is synthesized)
gggaaggaaagaagaaaggaaggaaaaaaggaaggagggaggggaggaaggaaaagaaaaagaaggaaggaaggagtcctagccacttctttctcctgatgcagattccctaggaagttg

SEQ ID NO: 444757 - DNA, 120 bp, Artificial Sequence
  ENSG00000154478_63 (sequence is synthesized)
aacgaagaaggaaggaaggaagaaaggagagaaaggaggaaggaaaatgaatctcattcattttgaggggcatcttcattacacagcgtggggagggaagcataattcactcttaagaaa

SEQ ID NO: 444758 - DNA, 120 bp, Artificial Sequence
  ENSG00000154478_64 (sequence is synthesized)
ccaaccacaccagccagggcccatcttctgacaatatcctgaagggttcgaatgtttgtcttcggtagggagtgccacacatttaatatcaatgcagggtcctgatgggcactgccacat

SEQ ID NO: 444759 - DNA, 120 bp, Artificial Sequence
  ENSG00000154478_65 (sequence is synthesized)
acccccaggacaaacggaaaaatccacacagcagaaacaagcagttggcaaaagctgtcctcatgctacttggcaattcaatcaccctcccttcactcccacacctatctccgggtgttg

SEQ ID NO: 444760 - DNA, 120 bp, Artificial Sequence
  ENSG00000154478_66 (sequence is synthesized)
cccgtacagtgtgtcatgtaaatagcatctagcatttaaaggtcaaatttgatgagtctaatcaatcttagcagtgttccagttcatcacgtatacccatatttaaggacttttaaagta

SEQ ID NO: 444761 - DNA, 120 bp, Artificial Sequence
  ENSG00000154478_67 (sequence is synthesized)
atttggatttttaactcaaaagacgatgtgtaccccttggggcatgcgtgtgttcttaggaacaccagcgtgtggtatttcctgtgtcctctcatgcatgctcagcatgtcactgttgta

SEQ ID NO: 444762 - DNA, 120 bp, Artificial Sequence
  ENSG00000154478_68 (sequence is synthesized)
ctcattccctggcacggaagaattgttgcacatctttaatagaagccaaagcccatgatttgatggtttcaagagcctaaaatctgtatttggagagaggaagtctactcttaactgtga

SEQ ID NO: 444763 - DNA, 120 bp, Artificial Sequence
  ENSG00000154478_69 (sequence is synthesized)
gagttaagagtatcaccatcaaggcgcaaggcttcagtcttatcccggacaatcctcagggattgggtttgatgtcgggggagcattggatgccatcacgttgacactcaattgattggg

SEQ ID NO: 444764 - DNA, 120 bp, Artificial Sequence
  ENSG00000154478_70 (sequence is synthesized)
tgacccaagatggtcagtttcctaaggaccagaccatagtgactgctcatgcatcggctgaaataccaaacaccctgcaccaaaagactcagcttgacattgctttgcactcaactcatg

SEQ ID NO: 444765 - DNA, 120 bp, Artificial Sequence
  ENSG00000154478_71 (sequence is synthesized)
tattaccaaatctttgcttgaattattaatagtaaccaaactctctgctctaacaaccttcgaatgtcaagttcccttgcaagctgaaattgttccaaacctcaacactcctgttttaca

SEQ ID NO: 444766 - DNA, 120 bp, Artificial Sequence
  ENSG00000154478_72 (sequence is synthesized)
acaaacatgtaaatacaacctcttttggagtgcagaaacatttgcggagtctggtgtgccaccaaccccatcaggatttccccaggggaaaatggctaactctggatcacaaacagcaca

SEQ ID NO: 444767 - DNA, 120 bp, Artificial Sequence
  ENSG00000154478_73 (sequence is synthesized)
aattaaaaaggtgccttgcctgatgcccattaccacctggggtggtttttctagacaccagaataggccagatttaattttcacaggctcatctgggagaaggatcaaatcctgccatct

SEQ ID NO: 444768 - DNA, 120 bp, Artificial Sequence
  ENSG00000154478_74 (sequence is synthesized)
ggatgtgcattattaatgctggtgtttggtgaggaagctcctaggaatgcatagatctctccttctgccatagtatgtcgtgtgtagtggatgccagtagacaactttagccactcctgt

SEQ ID NO: 444769 - DNA, 120 bp, Artificial Sequence
  ENSG00000154478_75 (sequence is synthesized)
ccgtccttcttcatggaacacactcatttcgccacacggaggctttactctgcccagtgtccaatgggagaaccatcccttccctttagtgagaggacagctggctaaatgctatcctca

SEQ ID NO: 444770 - DNA, 120 bp, Artificial Sequence
  ENSG00000154478_76 (sequence is synthesized)
gtcctcctggaggctcctagtaatgagggcactgaacaccaattctttacattccttgaattttcatagattctatttttttcatgtctgtgaaaagtggggtggggaactcacaccaac

SEQ ID NO: 444771 - DNA, 120 bp, Artificial Sequence
  ENSG00000154478_77 (sequence is synthesized)
catagcttggggcatccagagagtggctagtagatgatagaagggagtccagttaaggaaacctaaggtatgtgccagctggtttagcattcaatatggaaatgcactttatatttattt

SEQ ID NO: 444772 - DNA, 120 bp, Artificial Sequence
  ENSG00000154478_78 (sequence is synthesized)
gcacacatcaagaatacttttggaaaccaggatttagaaaaataaaagatatttctttcctggggacaaagtgacctgcaaatgattggcttctgtacaatgttgcaatcccttaatgtc

SEQ ID NO: 444773 - DNA, 120 bp, Artificial Sequence
  ENSG00000154478_79 (sequence is synthesized)
agactcttaggaaaatgggtgggacatctgtgtgtttgtgttggagtgaatgtgcccataaccctgtgctcccataagtctgtgtgcccgtgatcatatgcatatgggtgaatgtttgtg

SEQ ID NO: 444774 - DNA, 120 bp, Artificial Sequence
  ENSG00000154478_80 (sequence is synthesized)
tgcccatgattttatgcatataggtgaatatttgtgtgcccatgagcatatgcatatgggtgaatgtttgtgtgcccatgagtatatgcatacgggtgaatgtttgtgtgcccatgagta

SEQ ID NO: 444775 - DNA, 120 bp, Artificial Sequence
  ENSG00000154478_81 (sequence is synthesized)
tatgcatatgggtatatgtttgtgtgcccgtgattatatgcatatgggtgaatgtttgtgtgcccgtgattatatgcatgtgggtgaatgttcatgaacacaaacagctacactcggagt

SEQ ID NO: 444776 - DNA, 120 bp, Artificial Sequence
  ENSG00000154478_82 (sequence is synthesized)
agaaaacaaatgaagcaaaagtttagcatcctctcatgtgtgtcaacattgtagttttacatttactttcttctaatctattaaacataagtatggctccatttttttagtattaccaga

SEQ ID NO: 444777 - DNA, 120 bp, Artificial Sequence
  ENSG00000154478_83 (sequence is synthesized)
agccctcccaatacggcaatattaccttctgtgtaatccacttgccaacagctgttttctgttgaaatgggactcaagaattttgaatccaaggccaatgctgcctgctctgtttacaat

SEQ ID NO: 444778 - DNA, 120 bp, Artificial Sequence
  ENSG00000154478_84 (sequence is synthesized)
ggtttgtgttttgtggatacatatcaaatgctgtaatatatttttatgatagaattgatggttaatacagggaaaaagtatatattgtgattctgtccaataaagcctcctgttataaaa

SEQ ID NO: 444779 - DNA, 120 bp, Artificial Sequence
  ENSG00000154479_0 (sequence is synthesized)
gtggtacgagtaacaactccaccggctggcgtccgcggcgcttggcgccacagtcacttttccagatctaggagcatcatggacacctcgtcagagatgctggtacggtttggacggcgc

SEQ ID NO: 444780 - DNA, 120 bp, Artificial Sequence
  ENSG00000154479_1 (sequence is synthesized)
tgtggacgggcgaaggaaagtacagaaataagaaactctgaagaagatcaagttctctatctgcctcttctacctagcaaagtagatctccagcaggtcaccataattccacacgatgag

SEQ ID NO: 444781 - DNA, 120 bp, Artificial Sequence
  ENSG00000154479_2 (sequence is synthesized)
tggaaaaggattcaagatagccttgacaggttgacaagagaagcagcatgcctccgtgcagaaagaaaggcaaagaaagaaatgcatttgcgatctcaagaagtggtaaaacactggact

SEQ ID NO: 444782 - DNA, 120 bp, Artificial Sequence
  ENSG00000154479_3 (sequence is synthesized)
aatacatatgcagggatgaaagaacagaaacttgaagccaaaaagaagcgtgatgaagaaatagaggcagaaagacaaattcttgatctggaagaagaaatatacaaacaaggaaaaaga

SEQ ID NO: 444783 - DNA, 120 bp, Artificial Sequence
  ENSG00000154479_4 (sequence is synthesized)
aaaaaggccattgaaaatgcaaagcaatatcaattttaccagacagaaagagtgaaaaactttcattcgggacttcttcttagtagagttatgaaagaacgtgatgcccagattgaattc

SEQ ID NO: 444784 - DNA, 120 bp, Artificial Sequence
  ENSG00000154479_5 (sequence is synthesized)
cgaaagagtaagataaaatcagataaaaaatgggaggaacagttgaaactcaacattgaaaaagcttttaaagaagaacaagaaaaagcagaaaaacgacacagagaaagggtggctctt

SEQ ID NO: 444785 - DNA, 120 bp, Artificial Sequence
  ENSG00000154479_6 (sequence is synthesized)
gccaaagatcatctaaaacaaataaaggaacatgaggaagaagaggaaagaaggaaaaaatatgaagaaaaagatgctgaggaaataaagcgacagaatgcattatatgaaattgaaatg

SEQ ID NO: 444786 - DNA, 120 bp, Artificial Sequence
  ENSG00000154479_7 (sequence is synthesized)
agaaaaaaactagaaaagaaaagagaagagatgcatgaaagcaggagacggtttcttgaacatatgcaggataaacatattatcaaagctgtagaacagcagcagcaagaggaagaagat

SEQ ID NO: 444787 - DNA, 120 bp, Artificial Sequence
  ENSG00000154479_8 (sequence is synthesized)
cctgagtgaactgttgaaagagaaacttgacaatgaagatatgattattgctagagatattgcagaagctgaggctgaatgggaaaaaagagaaagagaaaaagatgaaaaaaacaaagc

SEQ ID NO: 444788 - DNA, 120 bp, Artificial Sequence
  ENSG00000154479_9 (sequence is synthesized)
agaattaaaaacaattgcagaatatcgagccattgtgatgaaaaataaagaggaagaagaaagacaaagaaaaatagaggctaaagaacaattgctggctgtcatgaaagcagatcagat

SEQ ID NO: 444789 - DNA, 120 bp, Artificial Sequence
  ENSG00000154479_10 (sequence is synthesized)
tttctgggaacatgaaaaggagaaaaaatgcaaagctgataaagaacatcaagaggttcaagatgcccatattcagcaaatggccaaaaataagtttaatgcaaagcaagcaaaacaagc

SEQ ID NO: 444790 - DNA, 120 bp, Artificial Sequence
  ENSG00000154479_11 (sequence is synthesized)
agaattagattattgcagacttactgaagctcttgtggctgaaaaggagaaagaatttcaggactatgccagagaggtaattgaacttgaatcggaaacaacaaataaatatatttaccc

SEQ ID NO: 444791 - DNA, 120 bp, Artificial Sequence
  ENSG00000154479_12 (sequence is synthesized)
tcttgtaaaagctgtacaggaaggacctggaggtggccgtggaccagtgtttgtggacagaggtggattaagacccagctatcaggcaaatgatgttactggagtccagctcccttttta

SEQ ID NO: 444792 - DNA, 120 bp, Artificial Sequence
  ENSG00000154479_13 (sequence is synthesized)
taactctcagggaccaaaatataattttcaaaagtcaaagagaaggctaggttttacatggtagaaaaaaattatttttaacattgagaagactaagttgtagcatatatgagcttcaaa

SEQ ID NO: 444793 - DNA, 120 bp, Artificial Sequence
  ENSG00000154479_14 (sequence is synthesized)
tataaatggatttcagttaataaagctgttcttcatctaagtacaattatgtctgatttaattgattgttctcagtatttcttttgggtatatataaaaccccaattttgagattccttt

SEQ ID NO: 444794 - DNA, 120 bp, Artificial Sequence
  ENSG00000154479_15 (sequence is synthesized)
ttttaactgtggtaaaatacacaagtttactttttaaatgtacattcagtggtattaagtacattcaaaatattgtgtagccatgaccattgtgtagttccagaatttttcagtgctctt

SEQ ID NO: 444795 - DNA, 120 bp, Artificial Sequence
  ENSG00000154479_16 (sequence is synthesized)
actagaaaccccatacccattcattaagcagtcactccccattccccttccccacagctcctggtaactttatctgctttgcctatactgggtattttgaataaacagaatcatactgtg

SEQ ID NO: 444796 - DNA, 120 bp, Artificial Sequence
  ENSG00000154485_0 (sequence is synthesized)
atgctcgccgcctccatcttccgtccgacactgctgctctgctggctggctgctccctggcccacccagcccgagagtctcttccacagccgggaccgctcggacctggagccgtcccca

SEQ ID NO: 444797 - DNA, 120 bp, Artificial Sequence
  ENSG00000154485_1 (sequence is synthesized)
ctgcgccaggccaagcccattgccgacctccacgctgctcagcggttcctgtccagatacggctggtcaggggtgtgggcggcctgggggcccagtcccgaggggccgccggagaccccc

SEQ ID NO: 444798 - DNA, 80 bp, Artificial Sequence
  ENSG00000154485_2 (sequence is synthesized)
aagggcgccgccctggccgaggcggtgcgcaggttccagcgggcgaacgcgctgccggccagcggggagctggacgcggc

SEQ ID NO: 444799 - DNA, 80 bp, Artificial Sequence
  ENSG00000154485_3 (sequence is synthesized)
ccccccagagcccgctccaggcgctccccgcgggcgccgctgtccttgtcccggcggggttggcagccccggggctaccc

SEQ ID NO: 444800 - DNA, 120 bp, Artificial Sequence
  ENSG00000154485_4 (sequence is synthesized)
ggctaccccgacggcggagctgcccaggccttctccaagaggacgctgagctggcggctgctgggcgaggccctgagcagccaactgtccgtggccgaccagcggcgcattgtggcgctg

SEQ ID NO: 444801 - DNA, 120 bp, Artificial Sequence
  ENSG00000154485_5 (sequence is synthesized)
gccttcaggatgtggagcgaggtgacgccgctggacttccgcgaggacctggccgcccccggggccgcggtcgacatcaagctgggctttgggagaggccggcacctgggctgtccgcgg

SEQ ID NO: 444802 - DNA, 120 bp, Artificial Sequence
  ENSG00000154485_6 (sequence is synthesized)
gccttcgatgggagcgggcaggagtttgcacacgcctggcgcctaggtgacattcactttgacgacgacgagcacttcacacctcccaccagtgacacgggcatcagccttctcaaggtg

SEQ ID NO: 444803 - DNA, 120 bp, Artificial Sequence
  ENSG00000154485_7 (sequence is synthesized)
agcaattcaaaagctgtatggctcctgtgagggatcatttgatactgcgtttgactggattcgcaaagagagaaaccaatatggagaggtgatggtgagatttagcacatatttcttccg

SEQ ID NO: 444804 - DNA, 120 bp, Artificial Sequence
  ENSG00000154485_8 (sequence is synthesized)
taacagctggtactggctttatgaaaatcgaaacaataggacacgctatggggaccctatccaaatcctcactggctggcctggaatcccaacacacaacatagatgcctttgttcacat

SEQ ID NO: 444805 - DNA, 120 bp, Artificial Sequence
  ENSG00000154485_9 (sequence is synthesized)
ctggacatggaaaagagatgaacgttatttttttcaaggaaatcaatactggagatatgacagtgacaaggatcaggccctcacagaagatgaacaaggaaaaagctatcccaaattgat

SEQ ID NO: 444806 - DNA, 120 bp, Artificial Sequence
  ENSG00000154485_10 (sequence is synthesized)
ttcagaaggatttcctggcatcccaagtcccctagacacggcgttttatgaccgaagacagaagttaatttacttcttcaaggagtcccttgtatttgcatttgatgtcaacagaaatcg

SEQ ID NO: 444807 - DNA, 120 bp, Artificial Sequence
  ENSG00000154485_11 (sequence is synthesized)
agtacttaattcttatccaaagaggattactgaagtttttccagcagtaataccacaaaatcatcctttcagaaatatagattccgcttattactcctatgcatacaactccattttctt

SEQ ID NO: 444808 - DNA, 120 bp, Artificial Sequence
  ENSG00000154485_12 (sequence is synthesized)
tttcaaaggcaatgcatactggaaggtagttaatgacaaggacaaacaacagaattcctggcttcctgctaatggcttatttccaaaaaagtttatttcagagaagtggtttgatgtttg

SEQ ID NO: 444809 - DNA, 120 bp, Artificial Sequence
  ENSG00000154485_13 (sequence is synthesized)
tgacgtccatatctccacactgaacatgtaataagaaaaagtaggaaatggagggtcataggacttcgctaaaattctgatactgtttacaaagaaaaccggattttcagtagctgaaga

SEQ ID NO: 444810 - DNA, 120 bp, Artificial Sequence
  ENSG00000154485_14 (sequence is synthesized)
aaatatggcactgtaagttaaaacccaatgggaaaagccttagttgaacttttaaaatacttgatttaaaaacaattgctcaggcaaaacataattcataaactaaaaggtttaaaaaaa

SEQ ID NO: 444811 - DNA, 120 bp, Artificial Sequence
  ENSG00000154485_15 (sequence is synthesized)
ggaagaactgtgagagtataaagacagaccctctctaaggtgcaaaacaaaagaaagacctagagctgaaggtagagaagacactaagaatcaccttctgcagatctgttccaccctaca

SEQ ID NO: 444812 - DNA, 120 bp, Artificial Sequence
  ENSG00000154485_16 (sequence is synthesized)
cacgaggactgctaggaaaacttgaagcctgtggtacatggaaggtaaccatcgcaataaaaaaatctcaaccacagctcaactccaggctagaaaaatgaattccacttcccacactaa

SEQ ID NO: 444813 - DNA, 120 bp, Artificial Sequence
  ENSG00000154485_17 (sequence is synthesized)
caggcaaaaaaaaaatatttctcttggtctctactatcatacataaggtgtccagttttcaacaaacaagagatatacggaaggcaaggaaaaaacaacatacttccaagagacaaagaa

SEQ ID NO: 444814 - DNA, 120 bp, Artificial Sequence
  ENSG00000154485_18 (sequence is synthesized)
tcaacagaaccagctaattatgacacagatgttggaactatctcatagggaatttaaaaggactataattagtatgttcaagacactaatggacaagatggatgccacgcaaggtcagat

SEQ ID NO: 444815 - DNA, 120 bp, Artificial Sequence
  ENSG00000154485_19 (sequence is synthesized)
tggtgatttcagcagagagctggaactgtaagaatgaacccagggcaattgctagaaataaggaacattgtaacagagacaaagaatgccttcaaaaagttcaactgtagatgacacaaa

SEQ ID NO: 444816 - DNA, 120 bp, Artificial Sequence
  ENSG00000154485_20 (sequence is synthesized)
accaagtaaggaatccatgaacttgaagacagttcaacagaaattacccaaacaaaatcacaaaaaggaaaaaatggcatcaaaaaaaccagaacggaatatccaagagctgtggaataa

SEQ ID NO: 444817 - DNA, 120 bp, Artificial Sequence
  ENSG00000154485_21 (sequence is synthesized)
catcaaacagtctaacataggcataacgggctacagaggaggagagagaatggaacagaagaaagaaaaatgctgaagccagaggtaaaagccatcacgacacactcaagcctatcatag

SEQ ID NO: 444818 - DNA, 120 bp, Artificial Sequence
  ENSG00000154485_22 (sequence is synthesized)
ttaaactgctggggggtgaggcgcctacaggcaaggaagatgcatttctaacagatgaacaaaagtaggaaacacagctggcttctggtcagaaaacacacaggccagagacaatggagt

SEQ ID NO: 444819 - DNA, 120 bp, Artificial Sequence
  ENSG00000154485_23 (sequence is synthesized)
gacatctttaaagtactgaatgaaaaggactgttaacccagaattctatactctgctcaaagatcttccaagactgaaaaaagaataaaaactctctcaattgaaaagatagaattcatt

SEQ ID NO: 444820 - DNA, 120 bp, Artificial Sequence
  ENSG00000154485_24 (sequence is synthesized)
gctagcacacctacaaatgctaaatgctaaaagtttttcaggcagaaggaatatgatgctagacagaaacctacacaaaaagtaagagtactgaaatggaataaatgaaggtaaataaaa

SEQ ID NO: 444821 - DNA, 120 bp, Artificial Sequence
  ENSG00000154485_25 (sequence is synthesized)
cagtttaatggactgaaggagaagaaatgacaaccgagactcaaatatactgaggagtttcatcacttcttctcgattgagactaggagaagcatcagcagctgcagcggcgtcaccact

SEQ ID NO: 444822 - DNA, 120 bp, Artificial Sequence
  ENSG00000154485_26 (sequence is synthesized)
cttaggctaaaaacaacaaaaagttattttactcgagctatccaacaactgtagtttcatatcgtaccaagtgatggaactgcagtttcattcatccaatacatttttaaccctaaacaa

SEQ ID NO: 444823 - DNA, 120 bp, Artificial Sequence
  ENSG00000154493_0 (sequence is synthesized)
attctgagcctagccacagaggtaaactccggacatttttttctttcatgtcgccaaatacatccttgtcattaaaagacctttgaaactgagtaaaatggctttgaaacctcagtagaa

SEQ ID NO: 444824 - DNA, 120 bp, Artificial Sequence
  ENSG00000154493_1 (sequence is synthesized)
tatgctcaaactgtctggagaaggattacgggacagctaccacagtagaagagatcaaattgcccttaaaaatctccagtctgatgtcacagaggcaaaatctgacttcaccaaggagac

SEQ ID NO: 444825 - DNA, 120 bp, Artificial Sequence
  ENSG00000154493_2 (sequence is synthesized)
cctggcatcacaaaacacaaaaatgatttcatccatagtcatctcccagatgattgatgagaataagtcaagagaaaacagggcctccttgcccctaccgtgtgccattgctcagtctcg

SEQ ID NO: 444826 - DNA, 120 bp, Artificial Sequence
  ENSG00000154493_3 (sequence is synthesized)
tgcacatcacgccaagcaatctctggctaaccgcagcggagtcaacattcacagagcatttgcgttacttccgggcagattaggaatcccggcaccgtcagatgagcgaggacctgaggc

SEQ ID NO: 444827 - DNA, 120 bp, Artificial Sequence
  ENSG00000154493_4 (sequence is synthesized)
agagctgccgcccaaagaggagagaccctgtgggggcccccgcagagggtttgcatccatcaccatcacggccagacgcgtgggccccccagcccgcgccctggtgtgggggactgctgg

SEQ ID NO: 444828 - DNA, 120 bp, Artificial Sequence
  ENSG00000154493_5 (sequence is synthesized)
ggactctctgtgccccaagtgcagggctgaggacacactgttccaggcgcccccggctctggccaatggcgcccatccaggtcggcatcagagatcttttgcctgcacagagttctccag

SEQ ID NO: 444829 - DNA, 120 bp, Artificial Sequence
  ENSG00000154493_6 (sequence is synthesized)
aaacagctccgtggtgcggctgaaggttcccgaggcccacactgggttgtgtgagagacgcaagtactgggtcacccatgcagacgacaaagagaccagtttttctccagacaccccact

SEQ ID NO: 444830 - DNA, 120 bp, Artificial Sequence
  ENSG00000154493_7 (sequence is synthesized)
gtcaggaaagagcccgctggtgttcagttcctgtgtccacctcagggtgtctcagcagtgtccagattcaatctattacgtagacaagtctctctccgtccccattgagccacctcaaat

SEQ ID NO: 444831 - DNA, 120 bp, Artificial Sequence
  ENSG00000154493_8 (sequence is synthesized)
tgccagccccaaaatgcacagatccgtcctgtcgctcaacctcaattgtagttcccacagattaacagcagatggagtagatggcctagtgaacagagagccaataagcgaagccctgaa

SEQ ID NO: 444832 - DNA, 120 bp, Artificial Sequence
  ENSG00000154493_9 (sequence is synthesized)
gcaggagctcctggagggagaccaggacctcgtaggccagcgctggaacccaggtttacaagaaagtcacttgaaggaaaccccatcgttgaggcgggtgcatttggggaccggcgcttg

SEQ ID NO: 444833 - DNA, 120 bp, Artificial Sequence
  ENSG00000154493_10 (sequence is synthesized)
tccttggagtggttcttttccattggaaaacacagaattggcaaatgtgggagctaaccaagtcactgtaagaaaaggggaaaaggaccatacaactcattgtcacgccagcgatcatgc

SEQ ID NO: 444834 - DNA, 120 bp, Artificial Sequence
  ENSG00000154493_11 (sequence is synthesized)
caaccaactgtccattcacattcctggctggagttacagggcagtacacacaaaagtattttctggaagcagcaagaggcaacaaggagaagtatgtatgactgtgtctgctcctccagt

SEQ ID NO: 444835 - DNA, 120 bp, Artificial Sequence
  ENSG00000154493_12 (sequence is synthesized)
tctgagcccacagagagacgacatcaaagcttcctgaaacccagaatcctttttcctgggtttctttgccccttacaagatgtatgtgcatctctgcaggaagacaatggtgttcagata

SEQ ID NO: 444836 - DNA, 120 bp, Artificial Sequence
  ENSG00000154493_13 (sequence is synthesized)
gaaagcaagttccccaaaggagattacacatgctgtgacttggttgtaaaaataaaggaatgtaagaagagtgaggaccccaccacacctgagccctccccagcagcaccctcgccagca

SEQ ID NO: 444837 - DNA, 120 bp, Artificial Sequence
  ENSG00000154493_14 (sequence is synthesized)
ccccgcgatggagcagggagccctggcctgtccgaagactgttctgagtctcagcaaacgcctgcaagatctttgaccttgcaagaagcactggaagttcgtaagcctcagttcatttct

SEQ ID NO: 444838 - DNA, 120 bp, Artificial Sequence
  ENSG00000154493_15 (sequence is synthesized)
cgctcacaagaacggctgaagaagcttgaacacatggtccagcagaggaaagcccagcggaaggaggacctgaggcagaagcagagcctccttcccatccgcaccagcaagaagcagttc

SEQ ID NO: 444839 - DNA, 120 bp, Artificial Sequence
  ENSG00000154493_16 (sequence is synthesized)
acgattccccatcctctgagtgataacttgttcaaacccaaagaacggtgcatttcagagaaggagatgcatatgcgatctaagagaatctatgataacttgccggaagttaaaaagaaa

SEQ ID NO: 444840 - DNA, 120 bp, Artificial Sequence
  ENSG00000154493_17 (sequence is synthesized)
aaagaagaacaaaggaaaagggtgatcttacaaagtaacagactccgtgccgaagtcttcaaaaagcaattactggaccagctccttcaaaggaatgcggtctaaccacaggctgccctg

SEQ ID NO: 444841 - DNA, 120 bp, Artificial Sequence
  ENSG00000154493_18 (sequence is synthesized)
ctgaccacactacctggacctgggaggacttcgaatgctggataagccattaaacttagcattatcttcatcatgggaaaacacttattttactttcgattttttttttccataaaggaa

SEQ ID NO: 444842 - DNA, 120 bp, Artificial Sequence
  ENSG00000154493_19 (sequence is synthesized)
aacatcacttcctgaattactgacccaagccaaacagaaacaataaccctcgagaaaataggtcaacaatctgttgtggggaaaccacctccatgtaacccactggatacagtcccctta

SEQ ID NO: 444843 - DNA, 120 bp, Artificial Sequence
  ENSG00000154493_20 (sequence is synthesized)
atgtttttgcttctaaattgtaccttttgcttctgatttcttctcccctgctgtttcctgcccatcagagaggcctgatacaagcaagtttgtttacatccctggggaatcttttacatc

SEQ ID NO: 444844 - DNA, 120 bp, Artificial Sequence
  ENSG00000154493_21 (sequence is synthesized)
aaacttttgggatccaaatccatctccttttaaatttcaatctcagcacctgccagttatgcaaatgccaaaatgtgggtcatcatatagtatatttgaaacctttctgaacatgtacac

SEQ ID NO: 444845 - DNA, 120 bp, Artificial Sequence
  ENSG00000154493_22 (sequence is synthesized)
cacccaatgctagaggctgacttggaaaccggtgggtgcaatgcccgaggctgtggaacaatcagcccatctctttgtgacctggagcagtcagagggccctcagtcaccccgccccatt

SEQ ID NO: 444846 - DNA, 120 bp, Artificial Sequence
  ENSG00000154493_23 (sequence is synthesized)
cctcaccagagaaaagaatccatttctatggaagctctgacgtaacttcagtgttttctacaatactcctcctgccccgccccattaaaacagttcttttgttaagaaatagcctaatgg

SEQ ID NO: 444847 - DNA, 120 bp, Artificial Sequence
  ENSG00000154493_24 (sequence is synthesized)
tccaactttgctgtctgttcttccaaatgtttataatacacattatttataaatatgtctgtttgggaagctaagaacaagctagtttttacaacacaaatggaaataaatgcaattatt

SEQ ID NO: 444848 - DNA, 120 bp, Artificial Sequence
  ENSG00000154493_25 (sequence is synthesized)
gggaagatggccatgtgcaggtggaggcagagattagagaggggctgtcccaagccgagggacacagaggatgccagacaccacgggacactgagaagggcaaggaagggtcctccccta

SEQ ID NO: 444849 - DNA, 120 bp, Artificial Sequence
  ENSG00000154493_26 (sequence is synthesized)
gggccttcagagggagcacggtcctgacacctggatttctggcctccagaactgggaaggagtaaatccctgttgtatccagctgctccctttgtagtcacttttcacagcagcgctggg

SEQ ID NO: 444850 - DNA, 120 bp, Artificial Sequence
  ENSG00000154493_27 (sequence is synthesized)
aacgaacgcaggcaccaatccagcttgggggccatgtggggtagcagcggatcgggacttccttctaagagaagcgatcttgagccgtgtcacgggtgaggagttaggagttagctcagt

SEQ ID NO: 444851 - DNA, 120 bp, Artificial Sequence
  ENSG00000154493_28 (sequence is synthesized)
ggggaaaaggtgaaggcagcactcacggtcatcaagccagcccctgtgggaagcaggctgggtttaaggatttctaacctgggctccttgaactcccagggtccccctacatgtgtgctt

SEQ ID NO: 444852 - DNA, 120 bp, Artificial Sequence
  ENSG00000154493_29 (sequence is synthesized)
caattttgcaccttttcttggggagaaacgaatcccttgcatttgagttttggaggaccatgtggccttcacggtcacaaactggcaatgtcaagaaggtttggcaggaccggctgggag

SEQ ID NO: 444853 - DNA, 120 bp, Artificial Sequence
  ENSG00000154493_30 (sequence is synthesized)
atgaggctggtggggtcaccagcttgattgtgaccttgctgacaccagcagggcagggaggtgaactgacgcaatggagcagagcctttgtctcaggagcaaaccagccttggctttcag

SEQ ID NO: 444854 - DNA, 120 bp, Artificial Sequence
  ENSG00000154493_31 (sequence is synthesized)
ccgaagtcttcaaaaaggtaatggcctcgtcaccagcaggtgtgatgtgtgtggtgcacagatgccgaatctcaacttgacatctttgtttcccttttcctctagcaattactggaccag

SEQ ID NO: 444855 - DNA, 120 bp, Artificial Sequence
  ENSG00000154493_32 (sequence is synthesized)
gaggacagatgggagaggagcacggctgggggctgaggcccagccggcaaggagagcgtggagtcactgtgaaggaggggctgcggctgcagagacgctcaggatccagggatgggtctt

SEQ ID NO: 444856 - DNA, 120 bp, Artificial Sequence
  ENSG00000154493_33 (sequence is synthesized)
cgcaggggtatgctgcccgctacacagaaacggccgtgcatcggactttccagataaaaacatttagtacagagttgaaaaaccatgtgatggtcatggattttgtgaagagtaactggt

SEQ ID NO: 444857 - DNA, 120 bp, Artificial Sequence
  ENSG00000154493_34 (sequence is synthesized)
ttccctcccagagaagagccaaagtttgtatcatccatatgtgtcaaggcttgaagacggctgagcagacagccagcagatatgagatccacagtcgactcttctcatcccccaaagatc

SEQ ID NO: 444858 - DNA, 120 bp, Artificial Sequence
  ENSG00000154493_35 (sequence is synthesized)
ctctcacacatgccctccctcgatggcccccagctcttgtaggacaagccctcatggcagagctagatggcaccctaggggccatacaggtgcgtgcactccttgcctcgcggatgagga

SEQ ID NO: 444859 - DNA, 120 bp, Artificial Sequence
  ENSG00000154493_36 (sequence is synthesized)
agatgagcccagaggaggagctgacatggctgagtggccaggtgggatctggagcctagtgtccttgccgtctggacccctcccagcatatcatgctgtgtcctactaaggctcccaaaa

SEQ ID NO: 444860 - DNA, 120 bp, Artificial Sequence
  ENSG00000154493_37 (sequence is synthesized)
tggggacaaacttttcatctttcagcttctcccagtgcaccttcttgctgcctaagccctgactctctgcttaggtttcaaaaaatgagacaactcatgagagaaaagaaaatggtcaga

SEQ ID NO: 444861 - DNA, 120 bp, Artificial Sequence
  ENSG00000154493_38 (sequence is synthesized)
tccgcaatgcatggaaaaatatctctttatgtgtgtcatctcctcaagactcccaacaaagcctatgccagcctctctcttacagaggaacaaacagaggccaggaggttacgtggctcg

SEQ ID NO: 444862 - DNA, 120 bp, Artificial Sequence
  ENSG00000154493_39 (sequence is synthesized)
tccaaggctagacagcattaaaatgtggtggcaccaagagtcaacctggaccaggcgtcaaaactcaagctgttctacttttaccttctcctaatcatgtacagtgattattcatattgc

SEQ ID NO: 444863 - DNA, 120 bp, Artificial Sequence
  ENSG00000154493_40 (sequence is synthesized)
actttagtggttaaagagattgctcaagctaagcacttcgtcttccttattgatgatgattccagaaatacaccactgcattgttgtatgttaccccagttaaagcacatcctcattttt

SEQ ID NO: 444864 - DNA, 120 bp, Artificial Sequence
  ENSG00000154493_41 (sequence is synthesized)
aatgcttgaaagtgaggacgcagagaaagtcctgcaagtgtgtttggatgagatcaccttttggacttgttcaaggtccttcagctatttagttcccatgtttgatggtgaaaatggact

SEQ ID NO: 444865 - DNA, 120 bp, Artificial Sequence
  ENSG00000154511_0 (sequence is synthesized)
gactgcagcgcggcggggcgatgtgtgattaccatggcgaggagtctctgtccgggggcctggctaaggaaaccctattacctccaggctcgcttctcatatgtgcggatgaaatatctt

SEQ ID NO: 444866 - DNA, 120 bp, Artificial Sequence
  ENSG00000154511_1 (sequence is synthesized)
ttcttttcctggttagtggtttttgttggaagctggattatatatgtgcagtattctacctatacagaattatgcagaggaaaggactgtaagaaaataatatgtgacaagtacaagact

SEQ ID NO: 444867 - DNA, 120 bp, Artificial Sequence
  ENSG00000154511_2 (sequence is synthesized)
ggagttattgatgggcctgcatgtaacagcctttgtgttacagaaactctttactttggaaaatgtttatccaccaagcccaacaatcagatgtatttagggatttgggataatctacca

SEQ ID NO: 444868 - DNA, 120 bp, Artificial Sequence
  ENSG00000154511_3 (sequence is synthesized)
ggtgttgtgaaatgtcaaatggaacaagcgcttcatcttgattttggaactgaattggaaccaagaaaagaaatagtgctatttgataagccaactagaggaactactgtacaaaaattt

SEQ ID NO: 444869 - DNA, 120 bp, Artificial Sequence
  ENSG00000154511_4 (sequence is synthesized)
aaagaaatggtctatagtctctttaaggcaaaattgggtgaccaaggaaacctctctgaactggttaatctcatcttgacggtggctgatggagacaaagatggccaggtttccttggga

SEQ ID NO: 444870 - DNA, 120 bp, Artificial Sequence
  ENSG00000154511_5 (sequence is synthesized)
gaagcaaagtcggcatgggcacttcttcaactgaatgaatttcttctcatggtgatacttcaagataaagaacatacccccaaattaatgggattctgtggtgacctctatgtgatggaa

SEQ ID NO: 444871 - DNA, 120 bp, Artificial Sequence
  ENSG00000154511_6 (sequence is synthesized)
agtgttgaatatacctctctttatggaataagccttccttgggtcattgaactttttattccatctgggttcagaagaagcatggatcagctgttcacaccatcatggccaagaaaggcc

SEQ ID NO: 444872 - DNA, 120 bp, Artificial Sequence
  ENSG00000154511_7 (sequence is synthesized)
aaaatagccataggacttctagaatttgtggaagatgttttccatggcccctacggaaatttcctcatgtgcgatactagtgccaaaaacctaggatataatgataagtatgatttgaaa

SEQ ID NO: 444873 - DNA, 120 bp, Artificial Sequence
  ENSG00000154511_8 (sequence is synthesized)
atggtggatatgagaaaaattgtgccagagacaaacctgaaagaacttattaaggatcgtcactgtgagtctgatttggactgtgtctatggcacagattgtagaactagctgtgatcag

SEQ ID NO: 444874 - DNA, 120 bp, Artificial Sequence
  ENSG00000154511_9 (sequence is synthesized)
agtacaatgaagtgtacttcagaagtgatacaaccaaacttggcaaaagcttgtcagttactcaaagactacctactgcgtggtgctccaagtgaaattcgtgaagaattagaaaagcag

SEQ ID NO: 444875 - DNA, 120 bp, Artificial Sequence
  ENSG00000154511_10 (sequence is synthesized)
ctctcaaagtcacagcaaatcaaatggaaatggaacattctttgatactaaataacctaaaaacattattgtggaagaaaatttcctacactaatgactcttagttcatttggacataat

SEQ ID NO: 444876 - DNA, 120 bp, Artificial Sequence
  ENSG00000154511_11 (sequence is synthesized)
taccattttaagaaacctgccacttttaaagaacaattttgagcattaaaaaaaaatggcttcaaattccggccagttacacaaaactccttccccccaggcctgagaagccatcagtat

SEQ ID NO: 444877 - DNA, 120 bp, Artificial Sequence
  ENSG00000154511_12 (sequence is synthesized)
gtgatcactgaagtaatggcaggtgtaggatcaacaggtccccaagatgtcattcctgcccttttagaagccctgttacatctccgaagtacattcattgtgtaactattttgactgact

SEQ ID NO: 444878 - DNA, 120 bp, Artificial Sequence
  ENSG00000154511_13 (sequence is synthesized)
ttaaaaaccaatgctgtgaaaagcttcattccataaacatcaacagtgagtgatttgtagatttaccttagccaaaataccaatgctggaagcattgtgtttgcattgaagctgctgttc

SEQ ID NO: 444879 - DNA, 120 bp, Artificial Sequence
  ENSG00000154511_14 (sequence is synthesized)
aacaagaaaatttataaatttactaatgtcttagcatggtaaagtttgcacattaacagaaattaagactgcaaagcaggttaaacttgcttctttataaaacagatgttgggttaatag

SEQ ID NO: 444880 - DNA, 120 bp, Artificial Sequence
  ENSG00000154511_15 (sequence is synthesized)
catggtttactgtattaaagacttatacacccatttttaacctcattcagacatcaagttatgtgtagcttcacaatggttcaagtggcttacttcaagaaatcttatacttgacagtac

SEQ ID NO: 444881 - DNA, 120 bp, Artificial Sequence
  ENSG00000154511_16 (sequence is synthesized)
accaattttattgactaaaaatggatgaactttcctaaagattcaaagggcccatcttagtatcacgcagctgactgagcccttcaaaactgacatcttaaggcccaatcaagatccaca

SEQ ID NO: 444882 - DNA, 120 bp, Artificial Sequence
  ENSG00000154511_17 (sequence is synthesized)
tatcctgattttgaactatgtgaaagtgggactgtaagtgcaagactaaaataaattatagcagactttttagtaataactttccattttcaaacagtatatcctgtgggccaaagggct

SEQ ID NO: 444883 - DNA, 120 bp, Artificial Sequence
  ENSG00000154511_18 (sequence is synthesized)
atttcttaaagaggcatgtaaatgtatttatttatctaatgtttttttccccatgtaaacttgatatacaaggtttagtatttgctcctctttcatattattttcacacgtatactcaga

SEQ ID NO: 444884 - DNA, 120 bp, Artificial Sequence
  ENSG00000154511_19 (sequence is synthesized)
tttggcatgtacctttcaacatctccataaaattaaacaccttttggagaaaagaaccactattttctgctcaaaggtttcgcctacctaaagtggaacatgttaaaaatctatgtgacc

SEQ ID NO: 444885 - DNA, 120 bp, Artificial Sequence
  ENSG00000154511_20 (sequence is synthesized)
atcactggacagctttctctcaaaactttccttcaacgccatggattagcaccagttttgtttactttaaggtacttttcccattcatcatctggttataataaatggatggaagaaata

SEQ ID NO: 444886 - DNA, 120 bp, Artificial Sequence
  ENSG00000154511_21 (sequence is synthesized)
tgatgccaaacgtcggtttgttcggaacacgctatgtcccacttcgaaaacctagcctcaaataacaactacgtacctctctcgcttcccatgttatgtttttcaaaagcctaaattacc

SEQ ID NO: 444887 - DNA, 120 bp, Artificial Sequence
  ENSG00000154511_22 (sequence is synthesized)
tgccacaaagcttaactgggcaagagcacattcagcagtaattcccccactaaaacagcactgttccccatcagctaaagcaacatttcatcccacccttggggccctaccccaataatt

SEQ ID NO: 444888 - DNA, 120 bp, Artificial Sequence
  ENSG00000154511_23 (sequence is synthesized)
aatgcaaagaggatcctattgtgcagctttacactttgcaagttgatatgcaaagagtaacttatttttaatatatcttaacccttctccagtcatttctcctttaacaattgttagcgt

SEQ ID NO: 444889 - DNA, 120 bp, Artificial Sequence
  ENSG00000154518_0 (sequence is synthesized)
ctaaaaaaagaatcccaggattttacctcctgtgtgttttcttcttgcttcttcatggtccatgataccagctgaggttgttagtacaataaaaccaaaccggccggatagaagcagatt

SEQ ID NO: 444890 - DNA, 120 bp, Artificial Sequence
  ENSG00000154518_1 (sequence is synthesized)
attctgccatttttccagatgtttgagttgcacatcaaatctggggctgattactcaacgcttgtttagcctacctgtgaggttcacaacaatttttcccagctctgtaatcatcagtga

SEQ ID NO: 444891 - DNA, 120 bp, Artificial Sequence
  ENSG00000154518_2 (sequence is synthesized)
ttcaaatttgccaatgtaaccatacttcaccattacagtgagaaaccagatgatgattttggagcacagcctaataagaacctggggtttgcctcttctttcggcattgttgatgctctt

SEQ ID NO: 444892 - DNA, 120 bp, Artificial Sequence
  ENSG00000154518_3 (sequence is synthesized)
gagagcatcaggcaggacattcatgtgcaccattgtggcggcacgaaaagatggcggaaagagccaaacgacaaccctttcattgctcttgacaccgtgggtcaggaatttgggtaaagc

SEQ ID NO: 444893 - DNA, 120 bp, Artificial Sequence
  ENSG00000154518_4 (sequence is synthesized)
tcatttggatggctcatttttgttcctcgtggtgttgggaaggcttgacgagagctagagatccaagaaggcctcactcatgtgttggacacctcagttctctttggacttttttctatc

SEQ ID NO: 444894 - DNA, 120 bp, Artificial Sequence
  ENSG00000154518_5 (sequence is synthesized)
caagtggtttctggagagggctatatttgggagtgatctgtcatacttctctttgctatcggatttctatcttcatcatgccatcatcactcaggctatcatcatcacccggtcttatca

SEQ ID NO: 444895 - DNA, 120 bp, Artificial Sequence
  ENSG00000154518_6 (sequence is synthesized)
gatattgccaaattatgatgtcataacttactatgactgtccccactgtccatgaaaaaacacagaaaagattagatacttctcagggaggtccctgttcatctttatggcctcacttta

SEQ ID NO: 444896 - DNA, 120 bp, Artificial Sequence
  ENSG00000154518_7 (sequence is synthesized)
gtcctctcagaaggtactctttttcttcaatcttcctcagtgcaaatatccaccctcaatcaacatcaacatgggttggtgttactccaattcactcctctttttcttttcttttttttt

SEQ ID NO: 444897 - DNA, 120 bp, Artificial Sequence
  ENSG00000154518_8 (sequence is synthesized)
gattacaggcgtgaaccaccgtgcctggccttcattctcctctttctataacgcaatcttaggatgcaaaaccaagcaaagtctgaattaatctatctagaatagcaccgtggagtcaca

SEQ ID NO: 444898 - DNA, 120 bp, Artificial Sequence
  ENSG00000154518_9 (sequence is synthesized)
ctatctagaatagcaccgtggagtcacagccatggtcaggcccctccaaagaacagactggatttcggaacccatgtctctccctgccacaagcaactagtccatatgcaacttggaagc

SEQ ID NO: 444899 - DNA, 120 bp, Artificial Sequence
  ENSG00000154518_10 (sequence is synthesized)
agccactgtggatcttggcttctttcttgcttcctcctcaatagttactgccactgatttagtgctaaagagataggaacatcacttaaaaccatctctacacataaatccacttagaat

SEQ ID NO: 444900 - DNA, 120 bp, Artificial Sequence
  ENSG00000154518_11 (sequence is synthesized)
aattttttcccctggaggatctattattgaagtacaaggctttactgtttattctactgtagacaccacaggacaccatgttcttggttagaattgagtacttgagaaactatatgaata

SEQ ID NO: 444901 - DNA, 120 bp, Artificial Sequence
  ENSG00000154518_12 (sequence is synthesized)
attgcttgttgaacagtacacgtgaattatctctattttccagctaaagattgagcctaaaatgattagtatttttgtaattttgaatcatttgatccatttgaagttggattagtgaca

SEQ ID NO: 444902 - DNA, 120 bp, Artificial Sequence
  ENSG00000154518_13 (sequence is synthesized)
aagtcttattcatttttcaagtgttagttctgagggcttctcccagaactagcagcaaccagcgttgctgctagataatattgcacctttaagctaacaagtaaaaagctgatcctctgg

SEQ ID NO: 444903 - DNA, 120 bp, Artificial Sequence
  ENSG00000154518_14 (sequence is synthesized)
gttgatgttgtctcatgctagggctctaggcagagtgggctggagttcagtccccagccatcttcttagcagggcattctagatgtttaatcttttatgttgacgtgttgatatcacttc

SEQ ID NO: 444904 - DNA, 120 bp, Artificial Sequence
  ENSG00000154518_15 (sequence is synthesized)
cattagccatttgttagaattactaaattaaatttacataattcaaggatctaaaaagaccagaagttcagtcagagccatttttctgagatatttctgcatccctctgaagaagataat

SEQ ID NO: 444905 - DNA, 120 bp, Artificial Sequence
  ENSG00000154518_16 (sequence is synthesized)
ttgtccaaacttaacaaaaacaggtgttaaaattgagtacgttctgagaatactcagactttttttaagactttttttagtctcaaaccctacatgaaatacaatcccttaaatcttcca

SEQ ID NO: 444906 - DNA, 120 bp, Artificial Sequence
  ENSG00000154518_17 (sequence is synthesized)
atcttagagctagaagaaaagtcgagcaccctcactttacccagaggcaattttgtgccccagatgacaaagctcttagatctactcatttgcttatggctccaccagtacttctaggtc

SEQ ID NO: 444907 - DNA, 120 bp, Artificial Sequence
  ENSG00000154518_18 (sequence is synthesized)
aggccctctttcacctgaaggattagccatacttctggaaccattttccaggttccttgaaataaatatcttcgctttgctggggaccctagtttcctgttaagtagtgaatgacccttc

SEQ ID NO: 444908 - DNA, 120 bp, Artificial Sequence
  ENSG00000154518_19 (sequence is synthesized)
tttcctcccgccagccacagtcctatttcacagaggaagagaatgaccagcaagtcaacttctactacagagaagcagcaactgataaaaggccaaatcttacaaggtgccaacgtgaag

SEQ ID NO: 444909 - DNA, 120 bp, Artificial Sequence
  ENSG00000154518_20 (sequence is synthesized)
tttttgtctccctcttgccccatcaccaggtggttgtcgttgtccttcccggctagttgccaataaagttgttacaaagtgaccttgagtgtcttccttggtgcacccgaaaccccgcct

SEQ ID NO: 444910 - DNA, 120 bp, Artificial Sequence
  ENSG00000154518_21 (sequence is synthesized)
tcttcatccgggtgctgcggcgcgaataagagccggaccgcgcttgcgcattgagtcccactccttcgacctctgccgcagcccgtgccgccgccgcctcctgggaagagaggaagcggg

SEQ ID NO: 444911 - DNA, 120 bp, Artificial Sequence
  ENSG00000154518_22 (sequence is synthesized)
agaggagcccacgtcgcctgtcacccaatatctccagccgcgcagtcccgaagagtgtaagatgttcgcctgcgccaagctcgcctgcaccccctctctgatccgagctggatccagagt

SEQ ID NO: 444912 - DNA, 120 bp, Artificial Sequence
  ENSG00000154518_23 (sequence is synthesized)
tgcatacagaccaatttctgcatcagtgttatctcgaccagaggctagtaggactggagagggctctacggtatttaatggggcccagaatggtgtgtctcagctaatccaaagggagtt

SEQ ID NO: 444913 - DNA, 120 bp, Artificial Sequence
  ENSG00000154518_24 (sequence is synthesized)
tcagaccagtgcaatcagcagagacattgatactgctgccaaatttattggtgcaggtgctgcaacagtaggagtggctggttctggtgctggtattggaacagtctttggcagccttat

SEQ ID NO: 444914 - DNA, 120 bp, Artificial Sequence
  ENSG00000154518_25 (sequence is synthesized)
cattggttatgccagaaacccttcgctgaagcagcagctgttctcatatgctatcctgggatttgccttgtctgaagctatgggtctcttttgtttgatggttgctttcttgattttgtt

SEQ ID NO: 444915 - DNA, 120 bp, Artificial Sequence
  ENSG00000154518_26 (sequence is synthesized)
tgccatgtaacaaattactgcttgacatgttggcattcatattaattacggatgtaattctgtgtatcttactgtgactccgaaaactgtagtattggtgtcatgggaatgtacgttatt

SEQ ID NO: 444916 - DNA, 120 bp, Artificial Sequence
  ENSG00000154518_27 (sequence is synthesized)
tccaaagtcatttcattaaagatgaaaactttaatttcttctgtgatttgtacttacactaagtttagattatcacaaagaagaacgtgcattcaggcagatgctgtcccattcagagga

SEQ ID NO: 444917 - DNA, 120 bp, Artificial Sequence
  ENSG00000154518_28 (sequence is synthesized)
agctacagcagttgctccactgatgaaaaatattccaatgtaatttttatgggaattcttttatatagtgttctgcatattgtaattcatagggcttttgtttattcatataaaggataa

SEQ ID NO: 444918 - DNA, 120 bp, Artificial Sequence
  ENSG00000154518_29 (sequence is synthesized)
atatttgggtgttttgagcttctataaaatatgattaattaaaggtagttaatactcaagatggtcttgagtttttaaggtctaacatcagttagaatacttcaaatcagaatcaccttc

SEQ ID NO: 444919 - DNA, 120 bp, Artificial Sequence
  ENSG00000154518_30 (sequence is synthesized)
caagactgacttgacaggtggttctaaaaataaatcacgtcagctttttaggaaatgaagccttaagctagggggtaatgtgacttttgtttttcagtaagtctcacattaagcaattgt

SEQ ID NO: 444920 - DNA, 120 bp, Artificial Sequence
  ENSG00000154518_31 (sequence is synthesized)
gtgcctctaatgaatcttccatgtcttttcagaacaggctcagtccaactagcagctagtttcttacttgaacaagactattaaaaaccaaatatcaaaaaactgaattggctagatttt

SEQ ID NO: 444921 - DNA, 120 bp, Artificial Sequence
  ENSG00000154518_32 (sequence is synthesized)
tacagccaaaaattgctgtaaggcagtgtgtatcactgttgctaacatgtttatagtgggagtcttggggatgatagctggttcaacagtattttgctgctaatactttatgttgcttct

SEQ ID NO: 444922 - DNA, 120 bp, Artificial Sequence
  ENSG00000154518_33 (sequence is synthesized)
tggtcaaacttttcccattcaaaggaagaagatggtgctactatagacagtttttcccctagcaaatatattgtaccataatatctatcatccaagtttcagggttttttgaaagttgat

SEQ ID NO: 444923 - DNA, 120 bp, Artificial Sequence
  ENSG00000154518_34 (sequence is synthesized)
aattaggaaagtgacattttacttttcttagtgccctttgcctgtttgatttccattgagaaagagcagtcaccaaagttcctcaagtgtcggaagaccacctccatcagaatcagtgct

SEQ ID NO: 444924 - DNA, 120 bp, Artificial Sequence
  ENSG00000154518_35 (sequence is synthesized)
tgtttaaaaaataaaaatccctaggttccagacctactgaattggactctttggacatgagactcagcaatctacatctttaaaaaggcttcccaggtggtttttgtgcatactgtttga

SEQ ID NO: 444925 - DNA, 120 bp, Artificial Sequence
  ENSG00000154518_36 (sequence is synthesized)
gagtcactaagttatatatatatcctaccttctgtaaagtgaaatgaggccccaaaaagctaaagaggtagagctgctacctcgtttttagttgattcatcatctagtctatatcaccca

SEQ ID NO: 444926 - DNA, 120 bp, Artificial Sequence
  ENSG00000154518_37 (sequence is synthesized)
aaagaattggaaataggtattcaaacaaaaacctgtatacaagtattcatagaagcactacttacaatagccgaaaggtagaaacaaccaaatgtctatcagctgatgaatggataagta

SEQ ID NO: 444927 - DNA, 120 bp, Artificial Sequence
  ENSG00000154518_38 (sequence is synthesized)
aaatacatccatataatggaatattcagccatgaaaaggaatgaggcactgatacataatgaatagatgtgagtgaaccctaagaaagcatgctaagtggaagaagccagccacatgatt

SEQ ID NO: 444928 - DNA, 120 bp, Artificial Sequence
  ENSG00000154518_39 (sequence is synthesized)
ccatttatatgaaatatccaaaataggcaaatccacggtgacaaagccaattagtagttatcaggaactagggagggggtgaaaagggagtgactgcgtaatgcgtatggggattccttt

SEQ ID NO: 444929 - DNA, 120 bp, Artificial Sequence
  ENSG00000154518_40 (sequence is synthesized)
taggatgatgaaaattggatgaattacagctggtctgatggtagtgggttatcagaacttattaacattagtgtcattaaagttggtatatagcccctcactgctaaatctggctcaaaa

SEQ ID NO: 444930 - DNA, 120 bp, Artificial Sequence
  ENSG00000154518_41 (sequence is synthesized)
attaaaagattattaaaatttgatgaattagtggtgatggttgcacaacattgtaaatataataaatgtcactgaattgtacactttaaggtggttaaaatggcaaattttacatgtctt

SEQ ID NO: 444931 - DNA, 120 bp, Artificial Sequence
  ENSG00000154518_42 (sequence is synthesized)
actgaaactactatttaatacaaagtacatagtataaaattttaaaagtgataggaaaatgcttagattaatattcacctattccaagtatattttaaataaaaacagtcttggtaaaga

SEQ ID NO: 444932 - DNA, 120 bp, Artificial Sequence
  ENSG00000154518_43 (sequence is synthesized)
ctgggaaggtaagtggagggcacagggagcccggcctggccagggcggagcggcgcccagtagggacccattcattgtgccggcgcctcactgggcacggggcccaagctgacggcgtgc

SEQ ID NO: 444933 - DNA, 120 bp, Artificial Sequence
  ENSG00000154518_44 (sequence is synthesized)
tgcagtagttggaaacttagctactgaaataatagctactttgcattaagtgcttactctgtgtcttgcattatatttaaagggctttgtatgcattatctcacttaattctcataacac

SEQ ID NO: 444934 - DNA, 120 bp, Artificial Sequence
  ENSG00000154518_45 (sequence is synthesized)
cttcagagtctgcattcctaattgttaagctattttgggaataaaattattagagcacattccttaaaaggatcaatttattttatttaagacctaaactgtcagatcttaaaaggtata

SEQ ID NO: 444935 - DNA, 120 bp, Artificial Sequence
  ENSG00000154518_46 (sequence is synthesized)
gatcatattttcagatggataagaatgtcagaacccatcaaaatgaatgaaaactaaccatttatattgacagacagctccctacctttacaccatattatcaggattgaaggagaatag

SEQ ID NO: 444936 - DNA, 120 bp, Artificial Sequence
  ENSG00000154518_47 (sequence is synthesized)
tgtaagagagatctaggcaaatactcttccagcagacttttcagtttacaaaaatccccacactagtaatctgattctttaacatttaccaaacatgttgaaattaatatttcaaagtaa

SEQ ID NO: 444937 - DNA, 120 bp, Artificial Sequence
  ENSG00000154518_48 (sequence is synthesized)
tgagggcaagtctttcccacccttttatccaaaaaactagatgagccaaatagccaaaaatagccaaaaaactagatgagacgaatagagaaatttctctatccaaaacttggccaagta

SEQ ID NO: 444938 - DNA, 120 bp, Artificial Sequence
  ENSG00000154518_49 (sequence is synthesized)
tttatattcaagtctattgatttaagttgcctatatttaaaattataatagctacagttattgaaaaatgtactctattggactggatgcggtggctcacacctgtgttcctagcactgt

SEQ ID NO: 444939 - DNA, 120 bp, Artificial Sequence
  ENSG00000154518_50 (sequence is synthesized)
gggaggccaaggagggaggattgcttgaccccaggagttcaagatcagcctgggccacatagtaagatcctgtttctacaaaacatttaaaaattagcccagcctggtggtcacctgtag

SEQ ID NO: 444940 - DNA, 120 bp, Artificial Sequence
  ENSG00000154529_0 (sequence is synthesized)
tgccggtataacgggaggagagcgccaggcggagctggggcgtccctcccgctcgcttcttgactcgcgttggtgccggccgcctcccgcgcctagtgtccgggacgcgcctgaacctgc

SEQ ID NO: 444941 - DNA, 120 bp, Artificial Sequence
  ENSG00000154529_1 (sequence is synthesized)
gcgcggcccccaggctcccgcggggccgacctcggagacgcagctggggccgggcgcggcttggcgggagggtctgcagcgccgagggaggctgccagtgcgtgaggaagagagctagag

SEQ ID NO: 444942 - DNA, 120 bp, Artificial Sequence
  ENSG00000154529_2 (sequence is synthesized)
agtgcgtgaggaagagagctagagactggacaggggagacagagcagcgtcggagccgcgcaggggacgggagtgagagcgggagtgagagcaggaacgacgcagagcggccgtcgccgt

SEQ ID NO: 444943 - DNA, 120 bp, Artificial Sequence
  ENSG00000154529_3 (sequence is synthesized)
gcccgggtctcagggcgcctggctgaagtgagcatggcttcagtggcctgggccgtcctcaaggtgctgctgcttctccccactcagacttggagccccgtaggagcaggaaatccacct

SEQ ID NO: 444944 - DNA, 120 bp, Artificial Sequence
  ENSG00000154529_4 (sequence is synthesized)
gactgtgattccccactggcctctgccttgcctaggtcatccttcagcagctcctcagagctgtccagcagccacggcccggggttttcaaggcttaatcgaagagatggagctggtggc

SEQ ID NO: 444945 - DNA, 120 bp, Artificial Sequence
  ENSG00000154529_5 (sequence is synthesized)
tggaccccacttgtgtcaaataaataccaatggctgcaaattgaccttggagagagaatggaggtcactgctgtcgccacccaaggaggatatgggagctctgactgggtgaccagctac

SEQ ID NO: 444946 - DNA, 120 bp, Artificial Sequence
  ENSG00000154529_6 (sequence is synthesized)
ctcctgatgttcagtgatggtgggagaaactggaagcagtatcgccgagaagaaagcatctggggttttccaggaaacacaaacgcagacagtgtggtgcactacagactccagcctccc

SEQ ID NO: 444947 - DNA, 120 bp, Artificial Sequence
  ENSG00000154529_7 (sequence is synthesized)
tttgaagccaggttcctgcgctttctccctttagcctggaaccccaggggcaggattgggatgcggatcgaagtgtacggatgtgcatataaatctgaggtggtttattttgatggacaa

SEQ ID NO: 444948 - DNA, 120 bp, Artificial Sequence
  ENSG00000154529_8 (sequence is synthesized)
agtgctctgctgtatacacttgataaaaaacctttaaaaccaataagagatgttatttctttgaaatttaaagccatgcagagcaatggaattctacttcacagagaaggacaacatgga

SEQ ID NO: 444949 - DNA, 120 bp, Artificial Sequence
  ENSG00000154529_9 (sequence is synthesized)
aatcacattactctggaattaattaaaggaaagcttgtcttttttcttaattcaggcaatgctaagctgccttctactattgctcctgtgaccctcaccctgggcagcctgctggatgac

SEQ ID NO: 444950 - DNA, 120 bp, Artificial Sequence
  ENSG00000154529_10 (sequence is synthesized)
cagcactggcattccgtcctcatcgagctcctcgacacgcaggtcaacttcaccgtggacaaacacactcatcatttccaagcaaagggagattccagtaacttggatcttaattttgag

SEQ ID NO: 444951 - DNA, 120 bp, Artificial Sequence
  ENSG00000154529_11 (sequence is synthesized)
atcagctttgggggaattctgtcacccggaagatcacgggcattcacacgtaaaagctttcatgggtgtttagaaaatctttattataatggagtggatgttaccgaattagccaagaaa

SEQ ID NO: 444952 - DNA, 120 bp, Artificial Sequence
  ENSG00000154529_12 (sequence is synthesized)
cacaaaccacagatcctcatgatgggaaatgtgtccttctcatgtccacagccacagactgtccctgtgacttttctgagctccaggagttatctggctctgccaggcaactctggggag

SEQ ID NO: 444953 - DNA, 120 bp, Artificial Sequence
  ENSG00000154529_13 (sequence is synthesized)
gacaaagtgtctgtcacttttcaatttcgaacgtggaacagagcaggacatttgcttttcggcgaacttcaacgtggttcagggagtttcgtcctctttcttaaggatggcaagctcaaa

SEQ ID NO: 444954 - DNA, 120 bp, Artificial Sequence
  ENSG00000154529_14 (sequence is synthesized)
ctgagtctcttccaggcgggacagtcaccaaggaatgtcacagcaggtgctggattaaacgatgggcagtggcactctgtatccttctctgccaagtggagccatatgaatgtggtggtg

SEQ ID NO: 444955 - DNA, 120 bp, Artificial Sequence
  ENSG00000154529_15 (sequence is synthesized)
gatgatgacacagctgttcagcccctggtggctgtgctcattgattcaggtgacacctattattttggaggctgcctgggcaacagctctggctctggatgtaaaagccccctgggaggg

SEQ ID NO: 444956 - DNA, 120 bp, Artificial Sequence
  ENSG00000154529_16 (sequence is synthesized)
tttcagggctgcctaaggctcatcaccattggtgacaaagcggtggatcccatcttagtacagcagggggcgctggggagtttcagggacctccagatagactcctgcggcatcacagac

SEQ ID NO: 444957 - DNA, 120 bp, Artificial Sequence
  ENSG00000154529_17 (sequence is synthesized)
aggtgcttgcccagctactgtgagcatgggggcgagtgttcccagtcgtgggacaccttctcctgtgactgtctaggcacaggctatacgggcgagacctgccattcctctctctacgag

SEQ ID NO: 444958 - DNA, 120 bp, Artificial Sequence
  ENSG00000154529_18 (sequence is synthesized)
cagtcttgtgaagcccacaagcaccgagggaacccatccgggctttactatattgatgcagatggaagtggccccctgggaccatttcttgtgtactgcaatatgacagcagactccgcg

SEQ ID NO: 444959 - DNA, 120 bp, Artificial Sequence
  ENSG00000154529_19 (sequence is synthesized)
cgcgtggacggtggtgcggcacggtggccccgacgcggtgaccctccgaggtgcccccagcgggcacccgctctcggctgtgtccttcgcgtacgcagcgggcgcggggcagctgcgggc

SEQ ID NO: 444960 - DNA, 120 bp, Artificial Sequence
  ENSG00000154529_20 (sequence is synthesized)
gtgaacctggcggagcgctgcgagcagcggctggctctgcgctgcgggacagcgcggcgcccggactcacgagatggaaccccactgagctggtgggttggaagaaccaatgaaacacac

SEQ ID NO: 444961 - DNA, 120 bp, Artificial Sequence
  ENSG00000154529_21 (sequence is synthesized)
acttcctggggaggttctctgcctgatgctcaaaagtgtacttgtggattagaggggaactgcattgattctcagtattactgcaactgtgatgctggccagaatgaatggactagtgac

SEQ ID NO: 444962 - DNA, 120 bp, Artificial Sequence
  ENSG00000154529_22 (sequence is synthesized)
ctgctctgccgcggagataagtcattttggaattcagcttccttcaacactgagacttcataccttcatttccctgctttccacggagaactcactgctgacgtgtgcttcttttttaag

SEQ ID NO: 444963 - DNA, 120 bp, Artificial Sequence
  ENSG00000154529_23 (sequence is synthesized)
accacagtttcctctggggtgtttatggagaacctggggatcacagacttcatcaggattgagctgcgggctcccacagaagtgacattttccttcgatgtggggaatggaccttgtgag

SEQ ID NO: 444964 - DNA, 120 bp, Artificial Sequence
  ENSG00000154529_24 (sequence is synthesized)
gtcacggtgcagtcacccactccctttaatgacaatcagtggcaccacgtgagggcagagagaaatgttaaaggagcgtctcttcaagttgatcagcttcctcagaagatgcagcctgcc

SEQ ID NO: 444965 - DNA, 120 bp, Artificial Sequence
  ENSG00000154529_25 (sequence is synthesized)
cctgctgatgggcacgttcgtttacagctcaacagccagctcttcattggtggaacggccaccagacagagaggctttctaggatgcattcggtctctgcagttgaacggggtggccctg

SEQ ID NO: 444966 - DNA, 120 bp, Artificial Sequence
  ENSG00000154529_26 (sequence is synthesized)
gatctggaagaaagagccacagtgacgccaggagtggagccagggtgtgcaggacactgcagcacctatggacacttgtgtcgcaatggagggagatgcagagagaaacgcaggggggtc

SEQ ID NO: 444967 - DNA, 120 bp, Artificial Sequence
  ENSG00000154529_27 (sequence is synthesized)
acctgtgactgtgccttctcagcctatgatggaccgttctgctccaatgagatttccgcatatttcgcaactggctcctcaatgacataccattttcaagaacattacactttaagtgaa

SEQ ID NO: 444968 - DNA, 120 bp, Artificial Sequence
  ENSG00000154529_28 (sequence is synthesized)
aactccagctctctcgtttcttcattacacagagatgtaacattgaccagagaaatgatcacactgagcttccgaaccacacgaactccgagcttattgctgtatgtgagctctttctat

SEQ ID NO: 444969 - DNA, 120 bp, Artificial Sequence
  ENSG00000154529_29 (sequence is synthesized)
gaggaatacctttcagttatcctcgccaacaatggaagtttgcagattaggtacaagctagatagacatcaaaatcctgatgcatttacctttgattttaaaaacatggctgatgggcaa

SEQ ID NO: 444970 - DNA, 120 bp, Artificial Sequence
  ENSG00000154529_30 (sequence is synthesized)
cttcaccaagtgaagattaacagagaagaagccgtggtcatggtagaggttaaccagagcgcaaagaaacaagtcatcttgtcctcagggacagaattcaacgccgtcaaatctctcata

SEQ ID NO: 444971 - DNA, 120 bp, Artificial Sequence
  ENSG00000154529_31 (sequence is synthesized)
ttgggaaaggttttagaggctgccggcgcggacccggacacaaggcgggcggcgactagtggcttcactggctgcctctcggcggtgcgcttcggctgcgctgctcccctgaaggcggcg

SEQ ID NO: 444972 - DNA, 120 bp, Artificial Sequence
  ENSG00000154529_32 (sequence is synthesized)
ggccacgtggcccctatggcccgctgcgcggcgggggcggcgtccggctccccggcgcgggaactggctccccgactcgcggggggcgcaggtcgttctggaccagtggatgagggagag

SEQ ID NO: 444973 - DNA, 120 bp, Artificial Sequence
  ENSG00000154529_33 (sequence is synthesized)
ggcgcaggtcgttctggaccagtggatgagggagagcccttggttaatgcagacagaagagactctgctgtcatcggaggtgtgatagcagtggagatatttattttgctttgcatcact

SEQ ID NO: 444974 - DNA, 120 bp, Artificial Sequence
  ENSG00000154529_34 (sequence is synthesized)
gccatagccatacgcatctatcaacagagaaagttacgcaaagaaaatgagtcaaaagtctcaaaaaaagaagagtgctaggacagctctaaacagtgagctcgatgtgcaaaacgcagt

SEQ ID NO: 444975 - DNA, 120 bp, Artificial Sequence
  ENSG00000154529_35 (sequence is synthesized)
ccatgaaaaccagaaagagtgagtcttctgattggcagctgtggctgtctctatcatcgtgactgtggacttccctgctgttgccatcagggtgcacacagcaggtgcagtgctgtcacc

SEQ ID NO: 444976 - DNA, 120 bp, Artificial Sequence
  ENSG00000154529_36 (sequence is synthesized)
tggctgaagatctgcagcctcagagcctctgggaggtccctttctccctcggtgaaacacagtcctccacatcaatttccaaacaatgaattaggtatggccattcatcactgttcagta

SEQ ID NO: 444977 - DNA, 120 bp, Artificial Sequence
  ENSG00000154529_37 (sequence is synthesized)
gtttccccgtccaaaggctctcttccaaaactgcagtttgatctgtgttaataattgtggggttttagatgagaaaatgactataaagctgtggccctactttattttttaaaaatgaca

SEQ ID NO: 444978 - DNA, 120 bp, Artificial Sequence
  ENSG00000154529_38 (sequence is synthesized)
gaacttttgttcagatgtaaaagacaaaattgcactttaatgttttttgttacttgaaaacatatctgggatccctttttttggtcctctgctgatattataaaacaagaaatgcttctt

SEQ ID NO: 444979 - DNA, 120 bp, Artificial Sequence
  ENSG00000154529_39 (sequence is synthesized)
ggactaccttcactggcatttccatagtcctggaatccagagccaagtggcctatctaaaattcacagcccttttattctcctgtgtgatggttaatacaacacagttgaagcctggaaa

SEQ ID NO: 444980 - DNA, 120 bp, Artificial Sequence
  ENSG00000154529_40 (sequence is synthesized)
cactaccattatttttggtgtattgctttttctaattgactgtttttaatgattttgatacattttaatgttgaaattaatattgaatgttagctatgaaattttagtattgaattttat

SEQ ID NO: 444981 - DNA, 120 bp, Artificial Sequence
  ENSG00000154529_41 (sequence is synthesized)
aatggaacagaacattggtaggtaacaagatgcaagaggatgtcaatacaagattgtctgcctgtttttctttgtaatttgtaattacagtttttgtaacttgtgattatgtttttaact

SEQ ID NO: 444982 - DNA, 120 bp, Artificial Sequence
  ENSG00000154529_42 (sequence is synthesized)
aaatttaccaccagatacaaacactacttcttacacagagttatcctttatttatatcattaagacgtgaatgaaacatcatcctaacttacttccccaagatattgagaggtcatatct

SEQ ID NO: 444983 - DNA, 120 bp, Artificial Sequence
  ENSG00000154529_43 (sequence is synthesized)
gtttttcatcattcatttctttttctaaaagttgttactgatatgcttttgatttcctatgactctattatgttgtacagaacatcttttcaatttattaaaaaaaatagcttaactgaa

SEQ ID NO: 444984 - DNA, 120 bp, Artificial Sequence
  ENSG00000154529_44 (sequence is synthesized)
aggcataaatatcattgtgtattatcctttcatctaatcacttttggaatgtaaactgaaggctgttcactccaagttaagttaacatttacatgatgtttattaaatctgccagtctga

SEQ ID NO: 444985 - DNA, 120 bp, Artificial Sequence
  ENSG00000154529_45 (sequence is synthesized)
tcaaaggtttatgaccatggggccaaattcccatagattacccaaaattgaatatgtgcagttaactggaacatgtctcattaaggtttacatacacactaagacagcaaaggattggaa

SEQ ID NO: 444986 - DNA, 120 bp, Artificial Sequence
  ENSG00000154529_46 (sequence is synthesized)
ttaactttatggagacagttccagggactaatattgaagcagtggttatttgataatgcatggaaccaccatttggattcaataaaccaattacataaaagcaatgatgctacgctcttc

SEQ ID NO: 444987 - DNA, 120 bp, Artificial Sequence
  ENSG00000154529_47 (sequence is synthesized)
atattccagataccaactgcctaccaaggactaatgagatggtatatttcttccacatcagggcaagctgaaaatatattgattcagcgttactgttatgtaaatgaatttccatcttct

SEQ ID NO: 444988 - DNA, 120 bp, Artificial Sequence
  ENSG00000154529_48 (sequence is synthesized)
catatgtgttatttttgaaagaatgaatacactctctgtcttaaatccgctcttaacaaatgatctcttctcagaatactacatctgtattgagagtacagacagcccattggtcactgc

SEQ ID NO: 444989 - DNA, 120 bp, Artificial Sequence
  ENSG00000154529_49 (sequence is synthesized)
accttttgcaagacagcgaaacggatgcatcaaattgcattgatacatcatcaccatcaatcttttgcactgatttttagacttaatcttcttatttgaaaataaactcatttttaaata

SEQ ID NO: 444990 - DNA, 120 bp, Artificial Sequence
  ENSG00000154529_50 (sequence is synthesized)
aaataaaaaatattttagggaaagctctataaaattaaaattacagaattatatgctttttaaaatttatgcaaaaatgtgcagacaaatgtattctgtattggtttatgtatcactttg

SEQ ID NO: 444991 - DNA, 120 bp, Artificial Sequence
  ENSG00000154529_51 (sequence is synthesized)
cccttgtatattttgagattattaagatttgttgacttttttggtttgatatttatcatctgttaaatttttccttttaaattattaaatgcaaagtgcaagaaaaagagataaatattt

SEQ ID NO: 444992 - DNA, 120 bp, Artificial Sequence
  ENSG00000154529_52 (sequence is synthesized)
actgattgctagatgtaaaaatatctatgaatatatatatttaaacttctgccagagagcaaccatctgacagtcaacttactaaaatctaaattgagtactttttactgttgcagagaa

SEQ ID NO: 444993 - DNA, 120 bp, Artificial Sequence
  ENSG00000154529_53 (sequence is synthesized)
ttaagtcactaaacgttatttagatatatagatgctagttgcaagtaacacccttttgtaatataaaagtaaaagcataataatttcccaacttttgtcttcaaattaaaaaagaaaata

SEQ ID NO: 444994 - DNA, 120 bp, Artificial Sequence
  ENSG00000154529_54 (sequence is synthesized)
gcatataattaccattcttcatttgagaaagctgaagattctgatgcttaaaaacttcagaattctaatattaaaaatagagtggttcatgtgacattgaaggcttatctctgtaaaata

SEQ ID NO: 444995 - DNA, 120 bp, Artificial Sequence
  ENSG00000154529_55 (sequence is synthesized)
gtgacactggtgagtggtattatctcaatatttttgtccaaattcaccttaggaagtcactgtaaatcttcattgtttcctaaaagtcattattacggcataaacttaacatactttgat

SEQ ID NO: 444996 - DNA, 120 bp, Artificial Sequence
  ENSG00000154529_56 (sequence is synthesized)
agtagttagtactgatacgtgacatattctaccccgtgtctctgttactctgtctctattactgtgaaaagtcacagtaaatttaacattttcttccagactgtgtatgatctttcattg

SEQ ID NO: 444997 - DNA, 120 bp, Artificial Sequence
  ENSG00000154529_57 (sequence is synthesized)
taatagagacatggagtaggataagtcatgtattaacatataagatttttttaacctgctccctcagttttatagatgagacaaagataaggttgtaagagctaatctcttcaagtaggc

SEQ ID NO: 444998 - DNA, 120 bp, Artificial Sequence
  ENSG00000154529_58 (sequence is synthesized)
agtactagtaagttgtcatgcgtggactgaactcctggcacttctttctcttaacttcaatccatagagaagcccaccttcctgccttcccagtattatttagcagaggagaaaatcata

SEQ ID NO: 444999 - DNA, 120 bp, Artificial Sequence
  ENSG00000154529_59 (sequence is synthesized)
ttaggctgtttgatactctgtttgcctagactgatcaataattctggatctttgttcacatcttctctgaaagaatatttgatgggaaatcttttttattttttaatttttgtgtacata

SEQ ID NO: 445000 - DNA, 120 bp, Artificial Sequence
  ENSG00000154529_60 (sequence is synthesized)
gatgggaaatcttttttattttttaatttttgtgtacatactaggtgcatatatttatggagtacatgaaatgttttgatacaggcatgcactgtgaaataagcacatcatggagaatgg

SEQ ID NO: 445001 - DNA, 88 bp, Artificial Sequence
  ENSG00000154529_61 (sequence is synthesized)
tttatagtaagttttactcattctttctactttttttgtacccattaacctatccccacctctgccccaccattatctcagctgtcta

SEQ ID NO: 445002 - DNA, 120 bp, Artificial Sequence
  ENSG00000154529_62 (sequence is synthesized)
cctatccccacctctgccccaccattatctcagctgtctactacttttttcagcctttactaaccatccttctactctatatccatgagttccgttgttttggtttttagatcccacaaa

SEQ ID NO: 445003 - DNA, 82 bp, Artificial Sequence
  ENSG00000154529_63 (sequence is synthesized)
atccatgagttccgttgttttggtttttagatcccacaaataaatgagaacatggcaatgtttgtctttctatgcctggccc

SEQ ID NO: 445004 - DNA, 120 bp, Artificial Sequence
  ENSG00000154529_64 (sequence is synthesized)
gagtactccattttgtatgtgaaccacattttcttcattcatctgttgatgaacacttagggtgtttccaaatcttagctgttataaacagtattgcaacaaataaaagagtgcagatgg

SEQ ID NO: 445005 - DNA, 120 bp, Artificial Sequence
  ENSG00000154529_65 (sequence is synthesized)
ttaaatgtcagacaagctggtacaataaggtaactagattaaagtatgttcaagcaagctgaaatacaagttttgatgaaatatgatcagttaatctaaggattaaattttatgaccaaa

SEQ ID NO: 445006 - DNA, 120 bp, Artificial Sequence
  ENSG00000154529_66 (sequence is synthesized)
acagcgcggcgcccggactcacgaggactagtgacacaatagtcctttcccaaaaggagcacctcccagtcactcagattgtgatgacagacacaggccaaccacattccgaagcagatt

SEQ ID NO: 445007 - DNA, 120 bp, Artificial Sequence
  ENSG00000154529_67 (sequence is synthesized)
atacactggggccactgctctgccgcggagatacaagacttctgaaagtatggagaagagaaagtgtgatatttgaaatattcccttctctttttgggagactgagatgggaggatggct

SEQ ID NO: 445008 - DNA, 120 bp, Artificial Sequence
  ENSG00000154529_68 (sequence is synthesized)
aatgagtacgtatttaagtttaaaacagccagttccatctttttcatggattctgccaattatagatccttccattatgaagaagagtaaagccagcaagttaaccagagcgcaaagaaa

SEQ ID NO: 445009 - DNA, 120 bp, Artificial Sequence
  ENSG00000154529_69 (sequence is synthesized)
ggaaaatatactgtatagagaacagcagtgcttggttttatgtttcatattttctccacagaatgagtacgtatttaagtttaaaacagccagttccatctttttcatggattctgccaa

SEQ ID NO: 445010 - DNA, 120 bp, Artificial Sequence
  ENSG00000154529_70 (sequence is synthesized)
ttatagatccttccattatgaagaagagtaaagccagcaagtgggtacatcgtggatagggtggtagctgatggcatcataggaattgcttataaaatagcttccccttctaaatgatta

SEQ ID NO: 445011 - DNA, 120 bp, Artificial Sequence
  ENSG00000154529_71 (sequence is synthesized)
attatttgaaggtggcttcttgagcttttgtagtggtacttaaaagtgatttattttcatctttcctttcctcatcttcctttgcttccttatcattaaaattgtactttgtgttgatgt

SEQ ID NO: 445012 - DNA, 120 bp, Artificial Sequence
  ENSG00000154529_72 (sequence is synthesized)
tacatcacttaggttagcatgagaaaaggggaaaaacagctgtgaagcccatgaactttccaagaaggtaaaggagaaaaaaaaaaaaaagttgggtttgaagtctaagttttactatga

SEQ ID NO: 445013 - DNA, 120 bp, Artificial Sequence
  ENSG00000154529_73 (sequence is synthesized)
acagcaccctgctgagatcataaaaatgaaaaataccatcaagatacatgaaaaaggaaacaccaaagggaagagtgataacaaggctccacagagcgcagtttcctttgacaagatgaa

SEQ ID NO: 445014 - DNA, 120 bp, Artificial Sequence
  ENSG00000154529_74 (sequence is synthesized)
aaagaaatgaaaagaggaaggagataaatggaacagccctctacctaaagtttctgtccatggagaaactgacatttaagtgctgctcaacaggaaaaagaaaaaagacctggttattga

SEQ ID NO: 445015 - DNA, 120 bp, Artificial Sequence
  ENSG00000154529_75 (sequence is synthesized)
agttggctttgttggagatgcgttactcagatacagatacaaagatgggtttggccaatgggcatccgtgtcaagaagcctgacctaacacgttctgaatattaagctaccttttatctg

SEQ ID NO: 445016 - DNA, 120 bp, Artificial Sequence
  ENSG00000154529_76 (sequence is synthesized)
ccagtccttggtgttcagaagaatccctcctcctcaccctaacttctatggggctatttccaaagacactgtcattgaagtgaggaagagtgagttgggccttatgacacaaagagacaa

SEQ ID NO: 445017 - DNA, 120 bp, Artificial Sequence
  ENSG00000154529_77 (sequence is synthesized)
gactatttgaggacaatagacacaggttttcatatacattccatgttattctgaattactgatgggttcgctgatggaattattgagtatagccaataaggagaaccacagttaagctgg

SEQ ID NO: 445018 - DNA, 120 bp, Artificial Sequence
  ENSG00000154529_78 (sequence is synthesized)
tgtctctgggttctggatatcatcctcaagaaaactatttactaattacattgaatgaggttattaaaatgtgtaagtttcacacaaaaacaaaaagacaattcattccaaattgtgcat

SEQ ID NO: 445019 - DNA, 120 bp, Artificial Sequence
  ENSG00000154529_79 (sequence is synthesized)
atggatatataatgttaattatgggaattccattttaagaattactacaattctatgtgttctgtataaaaacaggaaaatagttgttccaatatataaaaggaaaacatttaaaaatgt

SEQ ID NO: 445020 - DNA, 120 bp, Artificial Sequence
  ENSG00000154529_80 (sequence is synthesized)
attttcttgggaaaatcagctgccagaattcattagtcaactaacaagcactcctctgtggcaagaagccctgcttctctgttgtagcaggcagctacccacctaaatgatgaggtcaag

SEQ ID NO: 445021 - DNA, 120 bp, Artificial Sequence
  ENSG00000154529_81 (sequence is synthesized)
aaatatacagctgataaaaagataaaaaatatgtaatagtccagtgattacatgtgtactacggatcagcgccaattagttgtaagcttttggtatttagttcgttacagcaaatgtttt

SEQ ID NO: 445022 - DNA, 120 bp, Artificial Sequence
  ENSG00000154529_82 (sequence is synthesized)
cttttttaaattttcttctgcaaatgttttcttgtcatgaaaagtgttttccgtttagcagaattacaaaaatagtcaagaagaaatgttctgattgatgtatacagttagaatgtgtat

SEQ ID NO: 445023 - DNA, 120 bp, Artificial Sequence
  ENSG00000154529_83 (sequence is synthesized)
taaagattattataaaatgataactgaattatatccatttctaaagtatgttgggacaaaattttttaaaaatgtgattctgttttgaaaattgttttaccactggatcagtgtggttct

SEQ ID NO: 445024 - DNA, 120 bp, Artificial Sequence
  ENSG00000154529_84 (sequence is synthesized)
taaacttggctttatcttggagtcaccagaggagattcaaaagatacctttacctggctccacctccagagatcgggattttaaatggtctgtatctggattttaagagcccttctggtg

SEQ ID NO: 445025 - DNA, 120 bp, Artificial Sequence
  ENSG00000154529_85 (sequence is synthesized)
attcgactgtttagctaggtttgagagccactaccctagatgagctgtcctgctccagtaacattctttttctaaaatcttttatagtatattagaaataaatccatggaaattccaagt

SEQ ID NO: 445026 - DNA, 120 bp, Artificial Sequence
  ENSG00000154529_86 (sequence is synthesized)
atgcaatcgctcatctcactgttgggaatgggggaaagttggaaaaagaggatctggttttcatataacagtgtgaaggcatgattttgattgtgagggctagggaagttgagctctcaa

SEQ ID NO: 445027 - DNA, 120 bp, Artificial Sequence
  ENSG00000154529_87 (sequence is synthesized)
actcataaaagggaaagcaggaaataagaaggaaactgattaaagcagcaaaataaaagaaaaaaagatgaaataatgtgaaataaatagtgtaagataaaaaataaaatcagatatagt

SEQ ID NO: 445028 - DNA, 120 bp, Artificial Sequence
  ENSG00000154529_88 (sequence is synthesized)
ggttattactctaaagacaaatggactaaattctgtcaaactaggtttaaaaacaacagttaaatgctcttagaatattgaaaatgaaggggcatgccaagaactagcaggcaacagctg

SEQ ID NO: 445029 - DNA, 120 bp, Artificial Sequence
  ENSG00000154529_89 (sequence is synthesized)
ataaatttaagaaatgcagcactactttcagataagattgaatttaagattggaatataatcgaatcttaaatgagataaagagggatattatctgatgacaaaagatacagtttattaa

SEQ ID NO: 445030 - DNA, 120 bp, Artificial Sequence
  ENSG00000154529_90 (sequence is synthesized)
gataatatgaaagtcatcatacaaaatagcaactatagtatgaaggatttccagagctctgccctcatctccaagagtcgcttttctgtaatcctccggattattggctgtgagcgccat

SEQ ID NO: 445031 - DNA, 120 bp, Artificial Sequence
  ENSG00000154529_91 (sequence is synthesized)
ggcagaggatttcttaaatttatgccatgtaactgctttcctatgaagctctgttacttgcagagagccagccatctgcacttgaacaaatctgttaaaaacctgcctttcataaccctg

SEQ ID NO: 445032 - DNA, 120 bp, Artificial Sequence
  ENSG00000154529_92 (sequence is synthesized)
acaatggaaatagttgccaaacaggtaaagattcagggtgacctctcctggagtgaaggaacgaggggatcggagggacctctcctggagtgaaggaacgagggtcgctgtcttgcagat

SEQ ID NO: 445033 - DNA, 120 bp, Artificial Sequence
  ENSG00000154529_93 (sequence is synthesized)
accaagtgaagattaacagagaagaagccgtggtcatggtagaggtaatcccacaaatgcaaaagtcaaactaactaatattattattttgagaacaaataatctaatgaaaaaatttga

SEQ ID NO: 445034 - DNA, 120 bp, Artificial Sequence
  ENSG00000154529_94 (sequence is synthesized)
taataaatattaatagaagagcaacccattcagtgctgctcttccataagtcaagaagaggccaaatatggccaggatctgggagagaggaggtggttgtttattctgtattgctttgtt

SEQ ID NO: 445035 - DNA, 120 bp, Artificial Sequence
  ENSG00000154529_95 (sequence is synthesized)
ttgtttgtttagcaatgcaattccgtcaaaggtattattaatattttactatttaaaatatcaaaatatctttatttgttttactttactcaataggggaatgttctctagtttatcata

SEQ ID NO: 445036 - DNA, 120 bp, Artificial Sequence
  ENSG00000154529_96 (sequence is synthesized)
gtgactactggtggaatctattcattgatattgcagtgggaacttgtcttattccgattataaaagaacaaatactttagcaacttaaaaacacggtttaaaagcacacaacatagttat

SEQ ID NO: 445037 - DNA, 120 bp, Artificial Sequence
  ENSG00000154529_97 (sequence is synthesized)
aaacaagtcatcttgtcctcagggacagaattcaacgccgtcaaatctctcatattgggaaaggttttaggtaagtaggagaaagagctttttcccaaaaaatctaagtgtcatgtcaca

SEQ ID NO: 445038 - DNA, 120 bp, Artificial Sequence
  ENSG00000154529_98 (sequence is synthesized)
aactctggaagcattcatcatgctgaaagaagctccttgtcttacttgaataataatttcacagtgagtgacaatcaaggtgcaaactgtactcttgcctgagtgtacatataatcatga

SEQ ID NO: 445039 - DNA, 120 bp, Artificial Sequence
  ENSG00000154529_99 (sequence is synthesized)
gtaagtgctgcctgtgagatgtgcaagggcgttcctggaaaaatacctccacacttaacctctcacttggcaatcatgcataatgaatcacggtatttttctaacccttcttgaaaagtg

SEQ ID NO: 445040 - DNA, 120 bp, Artificial Sequence
  ENSG00000154529_100 (sequence is synthesized)
aaatgttatcaaagctgacacgaagttcacagattatgtatgtattaatcaacatcaactccggagaccatcattcaatgataaaactacatttgagttgaacacaagagaaaaaactgg

SEQ ID NO: 445041 - DNA, 120 bp, Artificial Sequence
  ENSG00000154529_101 (sequence is synthesized)
taatcttattacagcagatgaatacagttttatttctctctcaagccctgctttgcctgttgtttccatcctttttgactttagtatctaacaggaatggggaggcatattcataaatat

SEQ ID NO: 445042 - DNA, 120 bp, Artificial Sequence
  ENSG00000154529_102 (sequence is synthesized)
ctgttacgcaaggtagaaagttacagtaattgtctatcatattgtctatcataacctgttgtaaaagcacagttagctttacatttaataaaggaactgaggaaagtaatcttttttaaa

SEQ ID NO: 445043 - DNA, 120 bp, Artificial Sequence
  ENSG00000154529_103 (sequence is synthesized)
aaaaacccatcttatgtaactcaattaagaaaatgaactatactttaatattaggatcaaaaagttgaataatatttattatatacatctttgtttccttccaaataaaggagaacatgg

SEQ ID NO: 445044 - DNA, 120 bp, Artificial Sequence
  ENSG00000154529_104 (sequence is synthesized)
ctcatattgggaaaggttttaggagaacatggaattgaaggtgttaatgttttcattcaaggatggtgtattcaaaggcatgtaacttacggtataaaaatctacattgaaattcagcaa

SEQ ID NO: 445045 - DNA, 120 bp, Artificial Sequence
  ENSG00000154529_105 (sequence is synthesized)
cgaagtatatactcagaagcaattgatctcagaaaattataaatattcattttgcctgtccttggaggtagagataatcatcaaacattaataaaacactttatactttgaaaaactgta

SEQ ID NO: 445046 - DNA, 120 bp, Artificial Sequence
  ENSG00000154545_0 (sequence is synthesized)
gcggctgcggggttcctggtgctgaggacggacgccattggagttcccgagaagcatggctgagggaagcttcagcgtgcaatcggaaagctacagtgttgaagacatggatgagggtag

SEQ ID NO: 445047 - DNA, 120 bp, Artificial Sequence
  ENSG00000154545_1 (sequence is synthesized)
cgacgaagtcggggaggaagagatggttgaaggcaacgactatgaagaattcggtgcgtttggtggctatggcaccctcaccagctttgacatccatatcctcagagccttcggaagctt

SEQ ID NO: 445048 - DNA, 120 bp, Artificial Sequence
  ENSG00000154545_2 (sequence is synthesized)
gggtccaggccttcgcatcttatcgaatgagccctgggaactggaaaaccctgtgctggcccagaccctggtggaggcattgcagctggatccggaaacacttgccaatgagacggccgc

SEQ ID NO: 445049 - DNA, 120 bp, Artificial Sequence
  ENSG00000154545_3 (sequence is synthesized)
ccgtgctgccaacgtagcccgcgccgccgcctccaaccgtgcggctcgggccgctgccgccgctgcccgtaccgccttcagtcaggtggtcgctagccaccgggtggccacgccgcaggt

SEQ ID NO: 445050 - DNA, 120 bp, Artificial Sequence
  ENSG00000154545_4 (sequence is synthesized)
ctcaggagaggatacccagcccacgacctacgccgccgaggctcaggggcccacccctgagccaccccttgcttctccgcagacctcccagatgttagtcaccagtaagatggctgcccc

SEQ ID NO: 445051 - DNA, 120 bp, Artificial Sequence
  ENSG00000154545_5 (sequence is synthesized)
cgaggctccggcaacctccgcacagtcccagacaggctccccggcccaggaggctgctactgagggccctagtagcgcctgtgctttctctcaggctccgtgtgccagggaggtggacgc

SEQ ID NO: 445052 - DNA, 120 bp, Artificial Sequence
  ENSG00000154545_6 (sequence is synthesized)
caaccggcccagcacagccttcctgggccagaatgatgtcttcgatttcactcagccggcaggtgtcagtggcatggccttcccgcgccccaagagacctgccccagcccaagaggctgc

SEQ ID NO: 445053 - DNA, 120 bp, Artificial Sequence
  ENSG00000154545_7 (sequence is synthesized)
cacagagggccccagtgctgcctctggtgtgccccagacgggacctggcagggaggtggcagccacccggcccaagaccaccaagtcggggaaggcgctggccaagactcggtgggtgga

SEQ ID NO: 445054 - DNA, 120 bp, Artificial Sequence
  ENSG00000154545_8 (sequence is synthesized)
gcctcagaatgttgtggcagcagctgctgccaaggccaagatggccacgagcatccctgagccggagggtgcagctgctgccactgctcagcacagtgctgagccctgggccaggatggg

SEQ ID NO: 445055 - DNA, 120 bp, Artificial Sequence
  ENSG00000154545_9 (sequence is synthesized)
aggcaagaggaccaagaagtccaagcacctggatgatgagtatgagagcagcgaggaggagagagagactcccgcggtcccacccacctggagagcatcacagccctcattgacggtgcg

SEQ ID NO: 445056 - DNA, 120 bp, Artificial Sequence
  ENSG00000154545_10 (sequence is synthesized)
aggagagggcaaataagttggtgaaatacctgatgattaaggactacaagaagatccccatcaagcgcgcagacatgctgaaggatgtcatcagagaatatgatgaacatttccctgaga

SEQ ID NO: 445057 - DNA, 120 bp, Artificial Sequence
  ENSG00000154545_11 (sequence is synthesized)
tcattgaacgagcaacgtacaccctggaaaagaagtttgggatccacctgaaggagatcgacaaggaagaacacctgtatattcttgtctgcacacgggactcctcagctcgcctccttg

SEQ ID NO: 445058 - DNA, 120 bp, Artificial Sequence
  ENSG00000154545_12 (sequence is synthesized)
gaaaaaccaaggacactcccaggctgagtctcctcttggtgattctgggcgtcatcttcatgaatggcaaccgtgccagcgaggctgtcctctgggaggcactacgcaagatgggactgc

SEQ ID NO: 445059 - DNA, 120 bp, Artificial Sequence
  ENSG00000154545_13 (sequence is synthesized)
gccctggggtgaggcacccattcctcggcgatctgaggaagctcatcacagatgactttgtgaagcagaagtacctggaatacaagaagatccccaacagcaacccacctgagtatgaat

SEQ ID NO: 445060 - DNA, 120 bp, Artificial Sequence
  ENSG00000154545_14 (sequence is synthesized)
tcctctggggcctgcgagcccgccatgagaccagcaagatgagggtcctgagattcatcgcccagaatcagaaccgagacccccgggaatggaaggctcatttcttggaggctgtggatg

SEQ ID NO: 445061 - DNA, 120 bp, Artificial Sequence
  ENSG00000154545_15 (sequence is synthesized)
atgctttcaagacaatggatgtggatatggccgaggaacatgccagggcccagatgagggcccagatgaatatcggggatgaagcgctgattggacggtggagctgggatgacatacaag

SEQ ID NO: 445062 - DNA, 120 bp, Artificial Sequence
  ENSG00000154545_16 (sequence is synthesized)
tcgagctcctgacctgggatgaggacggagattttggcgatgcctgggccaggatcccctttgctttctgggccagataccatcagtacattctgaatagcaaccgtgccaacaggaggg

SEQ ID NO: 445063 - DNA, 120 bp, Artificial Sequence
  ENSG00000154545_17 (sequence is synthesized)
ccacgtggagagctggcgtcagcagtggcaccaatggaggggccagcaccagcgtcctagatggccccagcaccagctccaccatccggaccagaaatgctgccagagctggcgccagct

SEQ ID NO: 445064 - DNA, 120 bp, Artificial Sequence
  ENSG00000154545_18 (sequence is synthesized)
tcttctcctggatccagtaagagtttcggcaccgttgacgaactgcagcgatcttactggccaagccagagcgcctcctctcagattccttctcgacacagcaccctaggcggcttcttc

SEQ ID NO: 445065 - DNA, 120 bp, Artificial Sequence
  ENSG00000154545_19 (sequence is synthesized)
ctgtcagtcggaggtggcatgcaagatgaagctctctttgctcttcctgctttcattttgtgcttttccttgtgttttcatgttttgggtatcagtgttacattaaagttgcaaaattaa

SEQ ID NO: 445066 - DNA, 120 bp, Artificial Sequence
  ENSG00000154545_20 (sequence is synthesized)
gcatgcgcaggctacccagccgcggggggtgcacggagaaaaggggcggggtggtccgggctgctgtgctggcagcagtaggcgagggcgcggctgcggggttcctggtgctgaggacgg

SEQ ID NO: 445067 - DNA, 120 bp, Artificial Sequence
  ENSG00000154545_21 (sequence is synthesized)
acgccattggagttcccgagaagctgcttcaccctccctctcaggctgagctctcatctccctgggacccgcagcatggctgagggaagcttcagcgtgcaatcggaaagctacagtgtt

SEQ ID NO: 445068 - DNA, 120 bp, Artificial Sequence
  ENSG00000154545_22 (sequence is synthesized)
gaggaagctcatcacagatgactttgtgaagcagaagaacccggagctcagagaggagacgcctctgagcatggctcccagctggtacctggaatacaagaagatccccaacagcaaccc

SEQ ID NO: 445069 - DNA, 120 bp, Artificial Sequence
  ENSG00000154545_23 (sequence is synthesized)
ggtgcaggatgggagcagctctgtgggggaagagcgggcatgggggtgcggtgaccctgcagcccctcaaggcccagtctctggagccatctctcacctctccgactctgagcttccact

SEQ ID NO: 445070 - DNA, 120 bp, Artificial Sequence
  ENSG00000154545_24 (sequence is synthesized)
gcactggcagtttgactcgtgcttcctgccctcggcttctctctctcatgctctctgagtgtctcgccgtctggccaggtgggtctcatcgcctctgccagcgtcagctcccacagcgaa

SEQ ID NO: 445071 - DNA, 120 bp, Artificial Sequence
  ENSG00000154545_25 (sequence is synthesized)
ggtcttccgtgtgctgtcttcttctgccctcgctcacgagtttggattccttgctgaggagcagttctaacccggaatcactgtctgccggcaggatgcccagcatggggtttggatctc

SEQ ID NO: 445072 - DNA, 120 bp, Artificial Sequence
  ENSG00000154545_26 (sequence is synthesized)
gtatgattggcctctccagctcctcccctcggtgctatcctctggccaaagaggtcctgggattgcaatagcctggtggtctggcgcaagggcgtggggtgccctgggctcggtagagag

SEQ ID NO: 445073 - DNA, 120 bp, Artificial Sequence
  ENSG00000154545_27 (sequence is synthesized)
caaaggatctcaccagggcggatggggaagcggtgctggacgctgctcagccctctctctgctctgtggccccagatgacatctaagagagacagtcagagtcagggattccatcaaatc

SEQ ID NO: 445074 - DNA, 120 bp, Artificial Sequence
  ENSG00000154545_28 (sequence is synthesized)
cctacctggggcgtccctgaccaacagtcctctggcctctgctgcatgcccaggcctccacagcgactccccgggggctgggaagtcatagtcatgctagggagggcccctgccaccgtc

SEQ ID NO: 445075 - DNA, 120 bp, Artificial Sequence
  ENSG00000154545_29 (sequence is synthesized)
tctgctcatggattcctttccttgccctcagggtgaggcacccattcctcggcgatctgaggaagctcatcacagatgactttgtgaagcagaagtaagtatcacctgagctaactgcgg

SEQ ID NO: 445076 - DNA, 120 bp, Artificial Sequence
  ENSG00000154545_30 (sequence is synthesized)
cctttgtgtgctggtctggctgagaaagcagttccctatcccaaatcttcaactggagggatgggtgcctctgacctgggagtgagtggcagtggggggtatgcgagtgtgtggggagcc

SEQ ID NO: 445077 - DNA, 120 bp, Artificial Sequence
  ENSG00000154545_31 (sequence is synthesized)
gaaggccagggcggtcttgggaaaagggagctcacgtcacctgagaacacggtgtggggtgtgaaaacggccgccatcaccttgagcacctgccctgtagactgacacaagagttccccc

SEQ ID NO: 445078 - DNA, 120 bp, Artificial Sequence
  ENSG00000154545_32 (sequence is synthesized)
tggtttacacctaaggaacccggagctcagagaggagacgcctctgagcatggctcccagctggtaagggcctcagcccaactctcctgattttcaggccaggggccaccctctccccgt

SEQ ID NO: 445079 - DNA, 120 bp, Artificial Sequence
  ENSG00000154545_33 (sequence is synthesized)
ccctggaggacttgccaacgcacaggcgcgcatgcacaccaacaaagggtcaggacttgaggaggatgcctggagcacgcttctcctggctgactgtttcttcctctccagtcgtttcct

SEQ ID NO: 445080 - DNA, 120 bp, Artificial Sequence
  ENSG00000154545_34 (sequence is synthesized)
ctggtgggcctctccagggctccgccggggtgtggccaagaccctcgaggtggggtgtgctcagagcagggggcctgaagaatggctcctctgtttacaacacacccaacaggaagctgg

SEQ ID NO: 445081 - DNA, 120 bp, Artificial Sequence
  ENSG00000154545_35 (sequence is synthesized)
ggtcatcgtgatgaggggcacaaacttgtggcctccctacagacaaatgccctacatgtggaccccctgcacctccgcatggcttccggggaggaccaatggcaaaaggctttgaaggcc

SEQ ID NO: 445082 - DNA, 120 bp, Artificial Sequence
  ENSG00000154545_36 (sequence is synthesized)
tcacttttgcaggcagaagtcctgggagtgggtttgggaatgagtgaagggctggaggggcaggacagtcctcttccaggagctgagctgcggcatcgggttgaggaggggccccctgga

SEQ ID NO: 445083 - DNA, 120 bp, Artificial Sequence
  ENSG00000154545_37 (sequence is synthesized)
ctgccccctgccacctccacacccccttgctcctgtcctttccttctcctccctttcctgctcctctcctccctctcctctcccccttcttcctctcttctcctctttcccctccttctc

SEQ ID NO: 445084 - DNA, 120 bp, Artificial Sequence
  ENSG00000154545_38 (sequence is synthesized)
tcctcacctcccctctcctcccctcctctcctctcagctagtccatgtttctccaacacaagtttgctgagcatgttttcactccacgtagtccctaccctcaggactggtgggagaaga

SEQ ID NO: 445085 - DNA, 120 bp, Artificial Sequence
  ENSG00000154545_39 (sequence is synthesized)
gggggtgcacggagaaaaggggcggggtggtccgggctgctgtgctggcagcagtaggcgagggcgcggctgcggggttcctggtgctgaggacggacgccattggagttcccgagaagg

SEQ ID NO: 445086 - DNA, 80 bp, Artificial Sequence
  ENSG00000154548_0 (sequence is synthesized)
cggctgcgcgctggcggggctgaggccgaggggtgggggtcgcgccgggggccggcggagctcctgtggtggtagcagcg

SEQ ID NO: 445087 - DNA, 120 bp, Artificial Sequence
  ENSG00000154548_1 (sequence is synthesized)
gtagcgggagacggagcgagtccagcggccgcgggcagacccggagggaacggaggaagcggtcatgtctcgctacacgaggccccccaacacctccctgttcatcaggaacgtcgcgga

SEQ ID NO: 445088 - DNA, 120 bp, Artificial Sequence
  ENSG00000154548_2 (sequence is synthesized)
cgccaccaggcctgaggacttgcgccgtgagtttggtcgatatggccctatagtagacgtttacattccacttgacttctacactcgccgcccaagaggatttgcttatgttcaatttga

SEQ ID NO: 445089 - DNA, 120 bp, Artificial Sequence
  ENSG00000154548_3 (sequence is synthesized)
agatgttcgagatgctgaagatgctctttataacctcaatagaaagtgggtatgtggccgtcagattgaaatacagtttgcacaaggtgatcgcaaaacaccaggccaaatgaaatcaaa

SEQ ID NO: 445090 - DNA, 120 bp, Artificial Sequence
  ENSG00000154548_4 (sequence is synthesized)
agaacgtcatccttgttctccaagtgatcacaggagatcaagaagccccagccaaagaagaactcgaagtagaagttcttcatggggaagaaataggaggcggtcagacagccttaaaga

SEQ ID NO: 445091 - DNA, 120 bp, Artificial Sequence
  ENSG00000154548_5 (sequence is synthesized)
gtctcgacacaggcgattttcttatagccagtctaaatctcgttccaaatcattaccaaggcggtctacctcagcaaggcagtcaagaactccaagaaggaattttggctctagaggacg

SEQ ID NO: 445092 - DNA, 120 bp, Artificial Sequence
  ENSG00000154548_6 (sequence is synthesized)
gtcaaggtccaagtccttacaaaagaggtccaagtcaataggaaaatcacagtcaagttcacctcaaaagcagactagctcaggaacaaaatcaagatcacatggaagacattctgactc

SEQ ID NO: 445093 - DNA, 120 bp, Artificial Sequence
  ENSG00000154548_7 (sequence is synthesized)
aatagcaagatccccgtgtaaatctcccaaagggtataccaattctgaaactaaagtacaaacagcaaagcattctcattttcggtcacattccagatctcgaagttatcgtcataaaaa

SEQ ID NO: 445094 - DNA, 120 bp, Artificial Sequence
  ENSG00000154548_8 (sequence is synthesized)
cagttggtgaacagcaacagaaagagcaccacgccgtctttaatataagttattaaactctcattatgttaaataaaaattctttaaggcatacagaaaatgcgagttgatattagttac

SEQ ID NO: 445095 - DNA, 120 bp, Artificial Sequence
  ENSG00000154548_9 (sequence is synthesized)
tttgggcatatggaagaaataaaatctctagctttggattaataaaaatttggtctccatttaaagggcccacactacaaattatgatttgtctaatgtcaccattttatggaccatttt

SEQ ID NO: 445096 - DNA, 120 bp, Artificial Sequence
  ENSG00000154548_10 (sequence is synthesized)
ttatttacattgtggcagaagggtacttttcaagggaaatgagtaaactggaactaatttttaaaattctacttgcatagtattagtactattaataataccttttacacaaatattttt

SEQ ID NO: 445097 - DNA, 120 bp, Artificial Sequence
  ENSG00000154548_11 (sequence is synthesized)
gactttaaagcactttcatgtaaaaagtaactatgactgtataattgcatagagcagacttaagctgtttgacacctatgtctcttttgtgtcttctgtttaaacttgggccaattcctg

SEQ ID NO: 445098 - DNA, 120 bp, Artificial Sequence
  ENSG00000154548_12 (sequence is synthesized)
gtggatattagttcatattacaaaattctgatgttccaaaaagtagaatatatatagagatcaaacattcaaaagatacattctctcctaagctcaaaggttatatttttattgggtaga

SEQ ID NO: 445099 - DNA, 120 bp, Artificial Sequence
  ENSG00000154548_13 (sequence is synthesized)
acagtataggtaagttgacatgaaattgcatcctgcaccatgaccacattagtaatatcagaacttttgagaaatactggattttgaatggtttgagactaattctttaaaaattaggct

SEQ ID NO: 445100 - DNA, 120 bp, Artificial Sequence
  ENSG00000154548_14 (sequence is synthesized)
tcatctgttgcttaattttttctttttagagttcttgctcaactttatatggaacaagtcttattatttttgaaagagtgtttagtaccttgtattaagaaacttggccaagcgtggtgg

SEQ ID NO: 445101 - DNA, 79 bp, Artificial Sequence
  ENSG00000154548_15 (sequence is synthesized)
gcagattgcttgaggccaggagaaatttaaaaaaaagaagaagaagaaactcgagactacatcttcaaaaaacaacttt

SEQ ID NO: 445102 - DNA, 120 bp, Artificial Sequence
  ENSG00000154548_16 (sequence is synthesized)
gaagaagaaactcgagactacatcttcaaaaaacaactttgcagtatttgaattttacattatactgcccttcatttctgacagccaaataactttattgatatttattgcttttgtagt

SEQ ID NO: 445103 - DNA, 120 bp, Artificial Sequence
  ENSG00000154548_17 (sequence is synthesized)
tgttataactaataatttctttgaaaatgtgttgtagtttatgtttttcaaagggttttggtagtgtttgtgatagaatggttttgcatatgattattataggggatatatttatagagc

SEQ ID NO: 445104 - DNA, 120 bp, Artificial Sequence
  ENSG00000154548_18 (sequence is synthesized)
tctacttgtatactttgtgacttacattatgaaaacttcaaagttctcaatccatacagttagtatttgtatccagagtgtttaagaaaaaaatctgtcttatatttttagtatatagga

SEQ ID NO: 445105 - DNA, 120 bp, Artificial Sequence
  ENSG00000154548_19 (sequence is synthesized)
gccagtgttgcttctatttgttttgaatacaaattccagttttctttgcatattagatcccatatgtaagaaacaaccttaaacaataatttgtatgctggtaatatttggacaagtgcc

SEQ ID NO: 445106 - DNA, 120 bp, Artificial Sequence
  ENSG00000154548_20 (sequence is synthesized)
attaatgtatattgtactttctgaatagattttctctaatcatagcaaaatttatttcaaaactacaactctttgaattattccgctataataaaatttagttataaaattatgtggcac

SEQ ID NO: 445107 - DNA, 120 bp, Artificial Sequence
  ENSG00000154548_21 (sequence is synthesized)
gcactactgaaaatctaaaggataatctgaagaatgagtaagacagatattgatagaaatttttagtattttcagaatgtttgggttcatacacataagtgaaatcattttaaaaactag

SEQ ID NO: 445108 - DNA, 64 bp, Artificial Sequence
  ENSG00000154548_22 (sequence is synthesized)
ttgggttcatacacataagtgaaatcattttaaaaactaggggctgggcacagtggctcacacc

SEQ ID NO: 445109 - DNA, 120 bp, Artificial Sequence
  ENSG00000154548_23 (sequence is synthesized)
taaaaataataataactaggtaccattgtgaaaaataataactagggattgattatagtatctttactctgtattcacaaatctctgtattcctgaacatatttaatcctttgatttacc

SEQ ID NO: 445110 - DNA, 120 bp, Artificial Sequence
  ENSG00000154548_24 (sequence is synthesized)
tctgactaggtttgtcattgtaatccctgggctgcttaggaggataccatttggtttgatgaaaaagctggaatgataatagctcaaactcttttgagcatttagtacatgcttggcact

SEQ ID NO: 445111 - DNA, 120 bp, Artificial Sequence
  ENSG00000154548_25 (sequence is synthesized)
gttctatatgtcttaagttattcactcttgtatttaaccatcaacactcttatgaggtaaatatcccgcaattacttttgcgccaacctagtaccactacagacaaggaaacagatgcag

SEQ ID NO: 445112 - DNA, 120 bp, Artificial Sequence
  ENSG00000154548_26 (sequence is synthesized)
agaggctaagttacaagggcacacagccataaactttggatctgtggagtgactgggcttcagagtcctcttcctgactgctgttcctatgtcttttgcaaagagaagtctttgacaggt

SEQ ID NO: 445113 - DNA, 120 bp, Artificial Sequence
  ENSG00000154548_27 (sequence is synthesized)
atatgctttattaaaatcatgtttagaaagaaatgagagaatagaattagaaaaaggaatgactgtaggcttcgatgaaaatgacttttgtgactaggtgaaaattgtttggctgggtat

SEQ ID NO: 445114 - DNA, 120 bp, Artificial Sequence
  ENSG00000154548_28 (sequence is synthesized)
cctggaaaattgtcttctgggaatatctatattccagggttcacttttgtcatagaattgtttcttggcccatttaagagagatactttgtttattaataaatcaaacgttttaatttta

SEQ ID NO: 445115 - DNA, 120 bp, Artificial Sequence
  ENSG00000154548_29 (sequence is synthesized)
tcaagcaaaagacaaagccaacaccaggttgagacttcggctttcctacatttactcagagttccagagtcaaagccaagtctgattttgttggttctgcgtctcttataaagtccatct

SEQ ID NO: 445116 - DNA, 120 bp, Artificial Sequence
  ENSG00000154548_30 (sequence is synthesized)
tgcaagccttaaagagtaaaggtcaaggttcaagatcaagtgacattgagtgtccttaacagctagtcatatttgaagatgttcgagatgctgaagatgctctttataacctcaatagaa

SEQ ID NO: 445117 - DNA, 120 bp, Artificial Sequence
  ENSG00000154548_31 (sequence is synthesized)
aattatacatgcatactgcagccacactattgtagacactaaaagtacagttacatgtttgttttgttctttttatttttagactcactcttctaaacataatgggtcatttgttttcat

SEQ ID NO: 445118 - DNA, 120 bp, Artificial Sequence
  ENSG00000154548_32 (sequence is synthesized)
gagaaaaagtgaaagttttttttctgattattcatattatattgaagatgtgagcttaataacttgaacttgattttcctattaatttcatttcacatgtaaataatgcttttaaaatat

SEQ ID NO: 445119 - DNA, 120 bp, Artificial Sequence
  ENSG00000154548_33 (sequence is synthesized)
agtttcagtgatgactgattttttaatttaaaattctttcagtaaatgattgctagttgagtggttgttactgtggtgttcaggtaacgaattatgtcataagtcttgttctttatgttc

SEQ ID NO: 445120 - DNA, 120 bp, Artificial Sequence
  ENSG00000154548_34 (sequence is synthesized)
tagctagaatccaagcataaacccagcaggcgagacaaaaggcacctaaagttcaagcatcaaggagtaaagagggagggtggacacagatataaagacctggaagaggggaagtcttta

SEQ ID NO: 445121 - DNA, 120 bp, Artificial Sequence
  ENSG00000154548_35 (sequence is synthesized)
tttaatttcagaataaaggcttctgcatgctgatattcagtgaaaaatctgatggatcctttatctgaaagaagggagtgagtcctaaacagtttgtaattttataatgctagccaaatt

SEQ ID NO: 445122 - DNA, 120 bp, Artificial Sequence
  ENSG00000154553_0 (sequence is synthesized)
aggacgccgcccggcgcggagtggctgccctgcgcggggacacttagagcccggtgggcgggaggaaggcggcatgccccagacggtgatcctcccgggccctgcgccctggggcttcag

SEQ ID NO: 445123 - DNA, 120 bp, Artificial Sequence
  ENSG00000154553_1 (sequence is synthesized)
gctctcagggggcatagacttcaaccagcctttggtcatcaccaggattacaccaggaagcaaggcggcagctgccaacctgtgtcctggagatgtcatcctggctattgacggctttgg

SEQ ID NO: 445124 - DNA, 120 bp, Artificial Sequence
  ENSG00000154553_2 (sequence is synthesized)
gacagagtccatgactcatgctgatgcgcaggacaggattaaagcagcagctcaccagctgtgtctcaaaattgacaggggagaaactcacttatggtctccacaagtatctgaagatgg

SEQ ID NO: 445125 - DNA, 120 bp, Artificial Sequence
  ENSG00000154553_3 (sequence is synthesized)
gaaagcccatcctttcaaaatcaacttagaatcagaaccacaggacgggaactactttgaacacaagcataatattcggcccaaacctttcgtgatcccgggccgaagcagtggatgcag

SEQ ID NO: 445126 - DNA, 120 bp, Artificial Sequence
  ENSG00000154553_4 (sequence is synthesized)
cactccctccgggattgactgtggcagtggacgcagcaccccttcttctgtcagtactgttagtaccatttgcccaggtgacttgaaagttgcggctaagctggcccctaacattccttt

SEQ ID NO: 445127 - DNA, 120 bp, Artificial Sequence
  ENSG00000154553_5 (sequence is synthesized)
ggaaatggaacttcctggtgtgaagattgtacatgctcagtttaatacacctatgcagttgtactcagatgacaatattatggaaacactccagggtcaggtttcaacagccctagggga

SEQ ID NO: 445128 - DNA, 120 bp, Artificial Sequence
  ENSG00000154553_6 (sequence is synthesized)
aacacctttgatgagcgagcccacagcctcggtgccccccgagtcggacgtgtaccggatgctccacgacaatcggaatgagcccacacagcctcgccagtcgggctccttcagagtgct

SEQ ID NO: 445129 - DNA, 120 bp, Artificial Sequence
  ENSG00000154553_7 (sequence is synthesized)
ccagggaatggtggacgatggctctgatgaccgtccggctggaacgcggagtgtgagagctccggtgacgaaagtccatggcggttcaggcggggcacagaggatgccgctctgtgacaa

SEQ ID NO: 445130 - DNA, 120 bp, Artificial Sequence
  ENSG00000154553_8 (sequence is synthesized)
atgtgggagtggcatagtcggtgctgtggtgaaggcgcgggataagtaccggcaccctgagtgcttcgtgtgtgccgactgcaacctcaacctcaagcaaaagggctacttcttcataga

SEQ ID NO: 445131 - DNA, 120 bp, Artificial Sequence
  ENSG00000154553_9 (sequence is synthesized)
aggggagctgtactgcgaaacccacgcaagagcccgcacaaagcccccagagggctatgacacggtcactctgtatcccaaagcttaagtctctgcaggcgtggcacgcacgcacgcacc

SEQ ID NO: 445132 - DNA, 120 bp, Artificial Sequence
  ENSG00000154553_10 (sequence is synthesized)
cacccacgcgcacttacacgagaagacattcatggctttgggcagaaggattgtgcagattgtcaactccaaatctaaagtcaaggctttagacctttatcctattgtttattgaggaaa

SEQ ID NO: 445133 - DNA, 120 bp, Artificial Sequence
  ENSG00000154553_11 (sequence is synthesized)
cttagctatgttttgcaactctttttggggctagcaataatgatatttaaagcaataattttttgtatgtcatactccacaatttacatgtatattacagccatcaaacacataaacatc

SEQ ID NO: 445134 - DNA, 120 bp, Artificial Sequence
  ENSG00000154553_12 (sequence is synthesized)
aagatatttgaaggactctaattgtctttccttgacaagttgattttgcaattgtggtaaatagcaaataacaatcttgtattctaacataatctgcagttgtctgtatgtgttttaact

SEQ ID NO: 445135 - DNA, 120 bp, Artificial Sequence
  ENSG00000154553_13 (sequence is synthesized)
attacagtgcatgttagggagaaattccctgaatttctttagttttgtattcaaacaattatgccactcgatgcaacaaacataataaatacataaaagatttaaaaaatacctaatgaa

SEQ ID NO: 445136 - DNA, 120 bp, Artificial Sequence
  ENSG00000154553_14 (sequence is synthesized)
gtggcattcattgaattcaaataaaatcaacatttcaatgagagaacccaatcatattttaacatgtacactaacaaatattttaagataaatgtggcttcttcaggttttataactcat

SEQ ID NO: 445137 - DNA, 120 bp, Artificial Sequence
  ENSG00000154553_15 (sequence is synthesized)
tactctttcttatgagcacaaaatttctgatgatagaagcgttgaaatttgctagttaaaggtagttcagtctctttcaaattaaaagtttcacttgcttcaacagagactctttcaatt

SEQ ID NO: 445138 - DNA, 120 bp, Artificial Sequence
  ENSG00000154553_16 (sequence is synthesized)
taaatatctctttcagatcaatattcagtcaaattgaaggttcaaagtccatcactgctgtttcttaggctcaatggttcaccacctcctcctcttcccaagatggcatctccaggaaga

SEQ ID NO: 445139 - DNA, 120 bp, Artificial Sequence
  ENSG00000154553_17 (sequence is synthesized)
aacaatttagacgacttcctaaggaaggcaggggctgctggtctcctggggtcctgcttgtatccactgttgaaatccttggtttcacttgtgatctgtggtctgttttcttgacatagt

SEQ ID NO: 445140 - DNA, 120 bp, Artificial Sequence
  ENSG00000154553_18 (sequence is synthesized)
tgaggccaggcaataataacacctccactaccacctccaaaactctcagctcagctttcctggagtcatggatcctctgtctgagacatgcactctgcctggccctggcgcaggcagcct

SEQ ID NO: 445141 - DNA, 120 bp, Artificial Sequence
  ENSG00000154553_19 (sequence is synthesized)
accttgcaggctctgcatggcgttaccttgcctctcacccagggtgcccatggcaatgctcctgacttgcatctctcacctactttccatgtcccccactggggacgtacaggaacttct

SEQ ID NO: 445142 - DNA, 120 bp, Artificial Sequence
  ENSG00000154553_20 (sequence is synthesized)
gaaactgtcccctcaggttcaaaccatggggaaccagcagggtggggaccctcagaccctctgtctcaccaccttgtgtcacatggtcatctctaccacccctcaacccccacagctgct

SEQ ID NO: 445143 - DNA, 120 bp, Artificial Sequence
  ENSG00000154553_21 (sequence is synthesized)
aacttctggcctgaaacaagtgttctcctcccataaggtcccaaatgggacacaagttttattgctctgggattcttccaaacttaactgactctgaccctgacctgttcaggattttga

SEQ ID NO: 445144 - DNA, 120 bp, Artificial Sequence
  ENSG00000154553_22 (sequence is synthesized)
gaggagccaaaacacgtgcctggcccctgtaggcatttgacattgcaactcctgtgccaacacatgcattcactaacaaagctattaaaaaaataaaacagacttttgagatcaaagaaa

SEQ ID NO: 445145 - DNA, 120 bp, Artificial Sequence
  ENSG00000154553_23 (sequence is synthesized)
caaaatcaacttagaatcagaaccacaggaattcaaacccattggtaccgcgcacaacagaagggcccagccttttgttgcagctgcaaacattgatgacaaaagacaggtagtgagcgc

SEQ ID NO: 445146 - DNA, 120 bp, Artificial Sequence
  ENSG00000154553_24 (sequence is synthesized)
taagcgctgagactgtggagtttgcagtgcatgcttcttaaatcagttcttactaatcatcaagaaaagtaactggtagatgtttggagtggcttttctcattgcgaagcttatttcaaa

SEQ ID NO: 445147 - DNA, 120 bp, Artificial Sequence
  ENSG00000154553_25 (sequence is synthesized)
tcctataactcgccaattgggctctattcaactagcaatatacaagatgcgcttcacggacagctgcggggtctcattcctagctcacctcaaaagacgggaactactttgaacacaagc

SEQ ID NO: 445148 - DNA, 120 bp, Artificial Sequence
  ENSG00000154553_26 (sequence is synthesized)
aagatgacagagctgtgaaattgtatgcaatcaccacgtgtatttatagcgaacacccctgaggctctggggatcccatccagaacactgtgacctttgagtcgggcagtcagtatgtct

SEQ ID NO: 445149 - DNA, 120 bp, Artificial Sequence
  ENSG00000154553_27 (sequence is synthesized)
atcccaggtcaggaaagccctgccagcaggagcgagcatggaaaccagccccggttaggaggaaggaatcaggtgaacaagccagaatgataaggagcaagctcttccttctcgtctctc

SEQ ID NO: 445150 - DNA, 120 bp, Artificial Sequence
  ENSG00000154553_28 (sequence is synthesized)
agtagagaaactgatcatcttcagatcatccttttcaaatatcttctctagaaattgaactccaacctaaggggaaagaaaataatgccctgtattgccaaatcaggaaacagtgacttc

SEQ ID NO: 445151 - DNA, 120 bp, Artificial Sequence
  ENSG00000154553_29 (sequence is synthesized)
aggaaacctctgttccatccttctgacctcagctaagccagtcagcccacaggaaggaagctggtggttagaccggattgattccgacaggaacattgaatatgatttaccgcagctgtt

SEQ ID NO: 445152 - DNA, 120 bp, Artificial Sequence
  ENSG00000154553_30 (sequence is synthesized)
tttaaaaaaaaaaaaagaatttaagtgcctttagacagaacatttaaactcaccatcttgtcaaaatgcacatcactcttaagtgtgtgagacacggcccattttcatacatgtgtgacc

SEQ ID NO: 445153 - DNA, 120 bp, Artificial Sequence
  ENSG00000154553_31 (sequence is synthesized)
tcctggcccctctagacacccgagcttatgactcctgtcataagctgcggatagcaggtcatcccttatgtatgatttccatgtccagacctttcaggaagctacaggcagagccaggtg

SEQ ID NO: 445154 - DNA, 120 bp, Artificial Sequence
  ENSG00000154553_32 (sequence is synthesized)
attgtctcaaaatatgccagacaattcttgtgatatcagatccagaaaggagccctggaccagaggagcaggagaaaggcgttaagaaggcaaccatgagcaaacacatcttcccccccc

SEQ ID NO: 445155 - DNA, 120 bp, Artificial Sequence
  ENSG00000154553_33 (sequence is synthesized)
tagaacgtgagctcagtgtctgcaggggcctggtctgactggctcaacattatacccccagcacctagaaatgagacagaataaatgctcaataagcgaccatctacaaacagacaaaat

SEQ ID NO: 445156 - DNA, 120 bp, Artificial Sequence
  ENSG00000154553_34 (sequence is synthesized)
aaatgcccaataaatgctcactggataaaggaatcaaatcctgagggtgcacaacatttcccaagcaagtggcaagaagagtccagagccgtctcgctcccgatgctggcagctctgtgt

SEQ ID NO: 445157 - DNA, 120 bp, Artificial Sequence
  ENSG00000154553_35 (sequence is synthesized)
cctctcctgcttctctctatgtgttccctcgttcatactctgttctcatctgcatcttttccgtttctccactttcaacagcttccccaccccaacccaaccccaataacaaaacactgg

SEQ ID NO: 445158 - DNA, 120 bp, Artificial Sequence
  ENSG00000154553_36 (sequence is synthesized)
atttaaagttaaaaggatatgatattttactgttgaatatatacaacttcccaaagaagcatagtaaaattaatcacttgcattcttttcaggttagtgtgactgagtccacccacacaa

SEQ ID NO: 445159 - DNA, 120 bp, Artificial Sequence
  ENSG00000154553_37 (sequence is synthesized)
gctctggggcttcagaaggcttgaataaagtgatacgttagagtaacacatatcctgcctttactaaaaacctataacatttaattttataaaaagtcaggaaagtcagagaatcctagg

SEQ ID NO: 445160 - DNA, 120 bp, Artificial Sequence
  ENSG00000154553_38 (sequence is synthesized)
tatataatcaccttttaaaaaaatttttcattttaacttaaacatagggataatggcaagccactcataatgttgtcatttgaagatcacaccttttaatgtagctgaatttggaagaga

SEQ ID NO: 445161 - DNA, 120 bp, Artificial Sequence
  ENSG00000154553_39 (sequence is synthesized)
ctgaatttggaagagagaaggagagaaacagaaatgagaaggtttgcttaaaaaacagatgccagtgcacaaatcttaaagaattataaggcctggtgcgatggctcacacctgtaatcc

SEQ ID NO: 445162 - DNA, 120 bp, Artificial Sequence
  ENSG00000154553_40 (sequence is synthesized)
aacttagaatcagaaccacaggtatgcgttttagagcaaatgatacacattgtatttccttttaaatcatggggatgccttccaaggggaggaagagacaaatagaaaaattggaacaag

SEQ ID NO: 445163 - DNA, 120 bp, Artificial Sequence
  ENSG00000154553_41 (sequence is synthesized)
ccacctatgaagctgttgtctgtcattcctctccgagattaatttatattatccgtgttttcttacatcaagaaaaagaagtgttcctatgtgaacatcttgttgaaagacaaaatatgc

SEQ ID NO: 445164 - DNA, 120 bp, Artificial Sequence
  ENSG00000154553_42 (sequence is synthesized)
tctgaatgtaaaatagaggttgttggtttttttttttaacaaattacacatttgtgatctttgcaatatatgtgtaaccaaaaccgaaaattgcaaagaaattgcttggagctgattaac

SEQ ID NO: 445165 - DNA, 120 bp, Artificial Sequence
  ENSG00000154553_43 (sequence is synthesized)
ttacatgctgctatttagaaattctactagagattattaatgcacaaatattttcagagaagttgccttatttacaggacaacactacctatatttaattatcatcttaaggctaagaag

SEQ ID NO: 445166 - DNA, 120 bp, Artificial Sequence
  ENSG00000154553_44 (sequence is synthesized)
aaataagggcagaggtattttccataaagccattatattatgttagtttttattaattcaattctatttacaaagactttaaggcaggccttactttctttaaaaaaaaaaaaaaaaaaa

SEQ ID NO: 445167 - DNA, 120 bp, Artificial Sequence
  ENSG00000154553_45 (sequence is synthesized)
aaaaaaaaaagctaagctccacaaaacttaagtgattcagtactgcctgattctttaattagcctgagagacttgtaatccaccaaaacttaactaggcagttaggcaattagtgtgctg

SEQ ID NO: 445168 - DNA, 120 bp, Artificial Sequence
  ENSG00000154553_46 (sequence is synthesized)
tcttctctcatatcaaaaaggcttgaatcatggccattgtcattacttacaattatttctagtttttcatgccataataatggctaattatactggttaatcacaaaactcagccaatcc

SEQ ID NO: 445169 - DNA, 120 bp, Artificial Sequence
  ENSG00000154553_47 (sequence is synthesized)
aaattcactaataaatcagctaaaacaattagattgcaccatttataaatgtttagctacacacattttcacaggatctaggattaggcatttttctaaagctacatttgatggtttggg

SEQ ID NO: 445170 - DNA, 120 bp, Artificial Sequence
  ENSG00000154553_48 (sequence is synthesized)
tcattctacctaagagcagctacaataatgttaatcaactccttggctgtgagccattattatgaaggaaaaaagttaagtgaacaaggtatcagcgaactcaatcacactacaaaatca

SEQ ID NO: 445171 - DNA, 120 bp, Artificial Sequence
  ENSG00000154553_49 (sequence is synthesized)
tagactaaatggaattcaactcagaccttctttttgggttcaggaggctgttaacatatgctgtccaaggttggtgagagaaatgctgttctttaccccatcacagattctcagatcccc

SEQ ID NO: 445172 - DNA, 120 bp, Artificial Sequence
  ENSG00000154553_50 (sequence is synthesized)
tgagatttggggtgggtggagtcaaaggctcctaggctaggatttgaagctgtaccccattgccctggcataatttttgtttttttaagtgagctttgccaataggcctagatagtagaa

SEQ ID NO: 445173 - DNA, 120 bp, Artificial Sequence
  ENSG00000154553_51 (sequence is synthesized)
gaaggagtatactcagaagaactgaaagaaagcgttttgtagctggggtccctacaggaagttgttcatattctcaggcacaagaatcttctatgaaaaactctggtcttacacctaggg

SEQ ID NO: 445174 - DNA, 120 bp, Artificial Sequence
  ENSG00000154553_52 (sequence is synthesized)
aagagagacactctcttttctttcctcctcctttttcttctttttgtttttgacagtctgttttctaacagaaaagcataacccacaacttatctgaaatgaaaaggagaaaactaaata

SEQ ID NO: 445175 - DNA, 120 bp, Artificial Sequence
  ENSG00000154553_53 (sequence is synthesized)
ttacaggatcttttaatgttttaaagacgataatctctttccagtattatttcaaataattatatatgtttgtacgatttcaaatctggaacactggtgccacattcacgaaagtaaatg

SEQ ID NO: 445176 - DNA, 120 bp, Artificial Sequence
  ENSG00000154553_54 (sequence is synthesized)
cgaaagtaaatgaagttgatgtgaatgtgtaagggaaaatactgttagaaagatttatcttactaattctgccaaatagaaagatttgggactgggcgcggtggctcatgcctataatcc

SEQ ID NO: 445177 - DNA, 85 bp, Artificial Sequence
  ENSG00000154553_55 (sequence is synthesized)
gactgaggcaggagaatcacctgaaccggggaggcggaggtttgagtgagccgagattgcgccattgcattaaataaataaatat

SEQ ID NO: 445178 - DNA, 120 bp, Artificial Sequence
  ENSG00000154553_56 (sequence is synthesized)
ataaataaataaatattaaaaaaaaagatttggaaagagaatcagctgacctgtaattgagcattcccttttggttttcttctgttgcttagaagaaaaaagttttaaaggctttacaaa

SEQ ID NO: 445179 - DNA, 120 bp, Artificial Sequence
  ENSG00000154553_57 (sequence is synthesized)
attataaatctgtacaaaaactggaaaacatgattcccacgttaaaaaaaaaaattataggattttagatcattcagacatgtttcaaactcagggttgaggactctgctgtttggtcct

SEQ ID NO: 445180 - DNA, 120 bp, Artificial Sequence
  ENSG00000154553_58 (sequence is synthesized)
tttcccaaggaataaagtgaaaatcctcctgtgaaccatacacattttctctctctgaattactgactttaatcttttggggactagagtaaacatgaagaggtcttcaaacacacaaca

SEQ ID NO: 445181 - DNA, 120 bp, Artificial Sequence
  ENSG00000154553_59 (sequence is synthesized)
tgaaatcattacaataaagggaggggttgtatatgttattcccgctttcataaaaagagtctctcacttgtgttttctaaaattaagattatagcttaatccaagttaagaactttttgt

SEQ ID NO: 445182 - DNA, 120 bp, Artificial Sequence
  ENSG00000154553_60 (sequence is synthesized)
taaaaggtgttttcaaaaacgagttttcacctggcttagtttaaatgattcagtgtagctaattattcgtaaatgctcattctccttgttttgttccctcatgtctcaaaatgggggaaa

SEQ ID NO: 445183 - DNA, 120 bp, Artificial Sequence
  ENSG00000154553_61 (sequence is synthesized)
gtttatcaatgtatcaatagaagagaaaccatatgtaaattctacttgagaaaacgttaagtatatttttcaagccaaaaatcccatttctgacacaaaatgtctgtattcaaatgagtc

SEQ ID NO: 445184 - DNA, 120 bp, Artificial Sequence
  ENSG00000154553_62 (sequence is synthesized)
tttcaccttaacatttgatcggtgaatatagcacatgtaaagctcagagaaaaccatggaaaagtttatggctaactcctcctctaatctttccgtcaatctcgtcgtgggtaaagatgc

SEQ ID NO: 445185 - DNA, 120 bp, Artificial Sequence
  ENSG00000154553_63 (sequence is synthesized)
ctgttttatttttactttcctgaaggcactatcagatttctcttttaaagacaagcatctaaaacatgttctaattgttgtggggtccaatccgccagtgcctgaccgtttagcggatag

SEQ ID NO: 445186 - DNA, 120 bp, Artificial Sequence
  ENSG00000154553_64 (sequence is synthesized)
atggttggaaagaagacatcgtcctggtcccgtcatcgcctttcttagttatgacagtagttggtggtaaatgatcctccctgtacaactatcgttcgtttaatcttatctgcaacagtg

SEQ ID NO: 445187 - DNA, 120 bp, Artificial Sequence
  ENSG00000154553_65 (sequence is synthesized)
gaattttaccgacaatttgatgactgagaataatctgagtgctcactgctgcactttctgtcatgtgtatattgccttttctctgggaaaagttaattttgttcacatctatcattatgt

SEQ ID NO: 445188 - DNA, 120 bp, Artificial Sequence
  ENSG00000154553_66 (sequence is synthesized)
atccatcagactcaagtcttgttcttcttaattactatttcctgacaattatcttttagtttccttccaaagtattttgccaagtggaggagtgtgggtgtgactccccgatttgttgtt

SEQ ID NO: 445189 - DNA, 120 bp, Artificial Sequence
  ENSG00000154553_67 (sequence is synthesized)
caatgacatttccaaggcagccatttgaattcacattatgcttttaactatactagagattcacttgaaaatactagacctctgttcaggagtggctgtgcatagagtaatggctgagta

SEQ ID NO: 445190 - DNA, 120 bp, Artificial Sequence
  ENSG00000154556_0 (sequence is synthesized)
tccttttattgtggatgaacaccacgtacatgccgtaaatgctccctaggctggctgcggctacaaggcagacccgggagctgagaatagaggaatacctgcccaagcaactcattctgc

SEQ ID NO: 445191 - DNA, 120 bp, Artificial Sequence
  ENSG00000154556_1 (sequence is synthesized)
acagcagccgacaagacagcgattttcctgtgctggaatgtgcccatccaaagacacttggattggacttaatcttaaacctctggagttcaagaccttttaaaaagggctaaataaaca

SEQ ID NO: 445192 - DNA, 120 bp, Artificial Sequence
  ENSG00000154556_2 (sequence is synthesized)
atctctacatgtaaaaggccactgactcctacttcctctgtatagagcaactgttgaactcagctgcctgtagggcgtgattctcagtcaccagactcagcttggagatcttacaatgat

SEQ ID NO: 445193 - DNA, 120 bp, Artificial Sequence
  ENSG00000154556_3 (sequence is synthesized)
ggcaatcaggagacactgaacggagatgctacatattcctctcttgcagcaaaaggttttagaagcgttcgaccaaacctacaagataaaagatcaccaactcagagccagataacagtg

SEQ ID NO: 445194 - DNA, 120 bp, Artificial Sequence
  ENSG00000154556_4 (sequence is synthesized)
aatggaaactcaggaggtgccgtgagtcccatgagttactatcagaggccgttttccccctcggcatattctctcccagcctcactcaactccagcattgtcatgcagcacggcacatcc

SEQ ID NO: 445195 - DNA, 120 bp, Artificial Sequence
  ENSG00000154556_5 (sequence is synthesized)
ctcgattccacagacacatatccccagcatgcgcagtctctggatggcaccaccagcagctctatccccctgtaccgatcctcagaggaagagaagagagtgacagtcatcaaagccccg

SEQ ID NO: 445196 - DNA, 120 bp, Artificial Sequence
  ENSG00000154556_6 (sequence is synthesized)
cattacccagggatcgggcccgtggatgaatccggaatccccacagcaattagaacgacagtcgaccggcccaaggactggtacaagacgatgtttaagcaaattcacatggtgcacaag

SEQ ID NO: 445197 - DNA, 120 bp, Artificial Sequence
  ENSG00000154556_7 (sequence is synthesized)
ccggatgatgacacagacatgtataatactccttatacatacaatgcaggtctgtacaacccaccctacagtgctcagtcacaccctgctgcaaagacccaaacctacagacctctttcc

SEQ ID NO: 445198 - DNA, 120 bp, Artificial Sequence
  ENSG00000154556_8 (sequence is synthesized)
aaaagccactccgacaacagccccaatgcctttaaggatgcgtcctccccagtgcctcccccacatgttccacctccagtcccgccgcttcgaccaagagatcggtcttcaacagaaaag

SEQ ID NO: 445199 - DNA, 120 bp, Artificial Sequence
  ENSG00000154556_9 (sequence is synthesized)
catgactgggatcctccagacagaaaagtggacacaagaaaatttcggtctgagccaaggagtatttttgaatatgaacctggcaagtcatcaattcttcagcatgaaagaccagcctcc

SEQ ID NO: 445200 - DNA, 120 bp, Artificial Sequence
  ENSG00000154556_10 (sequence is synthesized)
ttgtatcagtcctctatagacagaagcctggaaagacccatgagttctgcaagcatggccagtgacttcaggaagcggaggaagagcgagcctgcagtgggtccaccacggggcttggga

SEQ ID NO: 445201 - DNA, 120 bp, Artificial Sequence
  ENSG00000154556_11 (sequence is synthesized)
gatcaaagtgcgagcaggactagcccaggccgagtggacctcccaggatcaagcaccactcttacaaagtctttcactagctcttctccttcttccccatcaagagcaaaaggtggggat

SEQ ID NO: 445202 - DNA, 120 bp, Artificial Sequence
  ENSG00000154556_12 (sequence is synthesized)
gatagcaaaatatgtccatccctttgcagttactcagggctcaacggcaacccctccagtgagttagattactgtagcacttacagacagcacttggatgtccctcgggactcaccaaga

SEQ ID NO: 445203 - DNA, 120 bp, Artificial Sequence
  ENSG00000154556_13 (sequence is synthesized)
gccattagtttcaagaacggctggcaaatggcccggcaaaacgcagaaatctggagcagcacggaagaaaccgtctctcccaaaatcaaatcccggagctgtgacgatctcctaaacgac

SEQ ID NO: 445204 - DNA, 120 bp, Artificial Sequence
  ENSG00000154556_14 (sequence is synthesized)
gactgcgatagcttcccggacccgaaagtcaagtcggaaagcatgggctccctgttatgtgaggaggactccaaggagagctgccccatggcgtgggggtccccctacgtcccggaggtt

SEQ ID NO: 445205 - DNA, 120 bp, Artificial Sequence
  ENSG00000154556_15 (sequence is synthesized)
cgcagtaacggcagatcaaggatcagacacaggtcagcccgcaacgccccggggttcctgaagatgtacaagaaaatgcaccgcatcaaccgcaaggacctgatgaactccgaggtgatc

SEQ ID NO: 445206 - DNA, 120 bp, Artificial Sequence
  ENSG00000154556_16 (sequence is synthesized)
tgctccgtgaagtccaggattctgcagtacgagagcgagcagcagcacaaggacctgctgcgcgcctggagccagtgctccacggaggaggtgccccgggacatggtgcccacacgcatc

SEQ ID NO: 445207 - DNA, 120 bp, Artificial Sequence
  ENSG00000154556_17 (sequence is synthesized)
tccgaattcgaaaagctgatccagaagtccaaatccatgccaaatttaggggatgacatgctgtctcccgtaaccctagaaccaccgcaaaatggcctatgtcccaagaggcggttttcc

SEQ ID NO: 445208 - DNA, 120 bp, Artificial Sequence
  ENSG00000154556_18 (sequence is synthesized)
attgagtatttgctggaggaagaaaatcaaagcggcccccccgctcggggccggcgaggctgccagtctaacgccctggtgcccattcacattgaagtcaccagcgatgagcagccccga

SEQ ID NO: 445209 - DNA, 120 bp, Artificial Sequence
  ENSG00000154556_19 (sequence is synthesized)
gcacacgtggagttttccgacagcgaccaggacggggttgtgtccgaccacagtgactacattcacctagaggggtcatccttctgcagtgaaagtgactttgatcacttttccttcaca

SEQ ID NO: 445210 - DNA, 120 bp, Artificial Sequence
  ENSG00000154556_20 (sequence is synthesized)
ccaccaccatcaccaccaccaccaccaccgccacctcatcagctcctgcaaaggcaggtgcccggcctcctacactcgatttaccacaatgttaaaacacgaaagagccagacacgaaaa

SEQ ID NO: 445211 - DNA, 120 bp, Artificial Sequence
  ENSG00000154556_21 (sequence is synthesized)
atgttaaaacacgaaagagccagacacgaaaacaccgaggagcccagaaggcaagaaatggaccctggcctttctaaacttgcttttctagtcagtcctgtgcctttccggaggaaaaaa

SEQ ID NO: 445212 - DNA, 120 bp, Artificial Sequence
  ENSG00000154556_22 (sequence is synthesized)
aattcggctcctaagaaacagactgaaaaggcaaaatgtaaagcatctgtgtttgaggctctggactctgcccttaaagacatctgtgaccaaattaaagctgaaaagaaaagggggagc

SEQ ID NO: 445213 - DNA, 120 bp, Artificial Sequence
  ENSG00000154556_23 (sequence is synthesized)
ttgccggacaacagcatcctgcaccgcctcatcagtgagctgctgccagatgttcccgagaggaactcatccctgagagcgctgaggaggagccccctgcaccagcctctccacccactg

SEQ ID NO: 445214 - DNA, 120 bp, Artificial Sequence
  ENSG00000154556_24 (sequence is synthesized)
tggcggtgcactccaagaccgtgagtcccctagaagttactcatccactttgactgacatggggagaagtgcaccaagggaaagaagaggaactccagaaaaagagaaattgcctgcaaa

SEQ ID NO: 445215 - DNA, 120 bp, Artificial Sequence
  ENSG00000154556_25 (sequence is synthesized)
agctgtttatgattttaaggctcagacatctaaggagttgtcatttaagaaaggagatactgtctacatcctcaggaaaattgatcaaaattggtatgagggagaacaccacgggagagt

SEQ ID NO: 445216 - DNA, 120 bp, Artificial Sequence
  ENSG00000154556_26 (sequence is synthesized)
gggcatcttcccgatctcatacgtagagaaactcacacctcctgagaaagcacagcctgcaagaccacctccgccagcccagcccggagaaatcggagaagctatagccaaatacaactt

SEQ ID NO: 445217 - DNA, 120 bp, Artificial Sequence
  ENSG00000154556_27 (sequence is synthesized)
caacgcagacacaaatgtggagctgtcactgagaaagggagatagagttattcttcttaaaagagttgatcaaaactggtatgaaggtaaaatcccaggaaccaacagacaaggcatctt

SEQ ID NO: 445218 - DNA, 120 bp, Artificial Sequence
  ENSG00000154556_28 (sequence is synthesized)
ccctgtttcctatgtggaggtcgtcaagaagaacacaaaaggtgctgaggactaccctgaccctccaataccccacagctattctagtgataggattcacagcttgagctcaaataagcc

SEQ ID NO: 445219 - DNA, 120 bp, Artificial Sequence
  ENSG00000154556_29 (sequence is synthesized)
acagcgtcctgtgtttactcatgaaaatattcaaggtgggggggaaccgtttcaggctctgtataactatactcccaggaatgaagatgagctggagctcagagaaagtgatgtcattga

SEQ ID NO: 445220 - DNA, 120 bp, Artificial Sequence
  ENSG00000154556_30 (sequence is synthesized)
tgtcatggaaaagtgtgatgacggctggtttgtggggacctcaagaagaaccaaattctttggtactttccccggaaactacgtcaagaggctgtgaattgcgctccctccttctgtaga

SEQ ID NO: 445221 - DNA, 120 bp, Artificial Sequence
  ENSG00000154556_31 (sequence is synthesized)
ggccgcctgccagccatgcacctgcgtcaacgcgcctgaaacaccccgcgggcctcccgttgtcatgccttacggtttccaatgcgccgtcaccatctccacctgccaccaaaccaccag

SEQ ID NO: 445222 - DNA, 120 bp, Artificial Sequence
  ENSG00000154556_32 (sequence is synthesized)
cagagtagccgccgctgctgtgagcctggggacgacatggcaggctggtccccctccgtgaaagtgtggattcctacttcctgctctaagctttgacacgtcaaaatgtgggatcagaaa

SEQ ID NO: 445223 - DNA, 120 bp, Artificial Sequence
  ENSG00000154556_33 (sequence is synthesized)
gaaaaaaatcatgatatttaaaaatggtcaaatatttgaggcaaaaaaaaaaaaaaaaagtgtctccaggaggctgtccagcctcgtggctccatttcaacatctccccccaggcgatgt

SEQ ID NO: 445224 - DNA, 120 bp, Artificial Sequence
  ENSG00000154556_34 (sequence is synthesized)
tctcccccaagacgaccagaaaattgtttattggggaatgctgtggtttgcattttcatattcttcgcttggcagtgtgtattcttttcacaagtttgcctagtgtcttggtttacacaa

SEQ ID NO: 445225 - DNA, 120 bp, Artificial Sequence
  ENSG00000154556_35 (sequence is synthesized)
tatgacaactgtaactgtactttagctattgtttgcctgcacatacatgttgtaatatgcacagtgattacaacctttaaagcaagaggaggcgagttaatttggatgagtgtgattttg

SEQ ID NO: 445226 - DNA, 120 bp, Artificial Sequence
  ENSG00000154556_36 (sequence is synthesized)
ctgattgaatgtgagttttcaaataggagtctttttctgcaatttgtttgcattttttagaagtgcaaacagtaagtaaataaaagccttcggtaataatcatgacaatacaagaggctg

SEQ ID NO: 445227 - DNA, 120 bp, Artificial Sequence
  ENSG00000154556_37 (sequence is synthesized)
agctaggctacaggggaaaactattgtgttgtaaagttgcatcgctattttatattaaaatgtaatgatcagcatcatgaacaatgagctcttagtgttttatttatctgaaaaaatgta

SEQ ID NO: 445228 - DNA, 120 bp, Artificial Sequence
  ENSG00000154556_38 (sequence is synthesized)
agtaaaagcagtgttagtgagaggtgcaaagaattattctaacagacacctgaaagtatctgtaagcaatactagtaggtaagatttcactgtgtgtacacatacacatttgagattgta

SEQ ID NO: 445229 - DNA, 120 bp, Artificial Sequence
  ENSG00000154556_39 (sequence is synthesized)
tgagaacatataatccatatgatatgttgtacattttatggaaatgtaatagaatctcacacattattttatagaaatagagtacagaagcatcacaagtattaaagttggttttagcaa

SEQ ID NO: 445230 - DNA, 120 bp, Artificial Sequence
  ENSG00000154556_40 (sequence is synthesized)
ggattaggattactacaattatttttactataataattatttttcttctatggaactcagaatcctggctacatttgaggacaggaatatgttgagcctgattttcctggtgtgtgtaaa

SEQ ID NO: 445231 - DNA, 120 bp, Artificial Sequence
  ENSG00000154556_41 (sequence is synthesized)
atatttcctaggaataaattaggcactttttagaagcaatgttaaatcattcaggttttattttctgccctgaagcagaaatttaaaaaatgatattgggacctggaaggtttaatatgg

SEQ ID NO: 445232 - DNA, 120 bp, Artificial Sequence
  ENSG00000154556_42 (sequence is synthesized)
ttcacagtgcctgaattacacctgctccgaaaactagctttgtatttcttatgactttgcataagaactgttcatctttggatcttgagcaccttacagataaaactttttatggcatct

SEQ ID NO: 445233 - DNA, 120 bp, Artificial Sequence
  ENSG00000154556_43 (sequence is synthesized)
ctttcatggacagtgatattgatcttttcacaatgtacgtagcctctagaattttgtacatatgtttgctctttttttgtacagactagttgttgagaaaacaggggcgtttcctaattt

SEQ ID NO: 445234 - DNA, 120 bp, Artificial Sequence
  ENSG00000154556_44 (sequence is synthesized)
ggtctttatcctgcgacaacactttcagcagactagcctctccttatctcacagatcacaagcacccctagatagtgtgattctgtcagatagcatttatgcaaaaatctatgaagttaa

SEQ ID NO: 445235 - DNA, 120 bp, Artificial Sequence
  ENSG00000154556_45 (sequence is synthesized)
aagatcgtagaagccaaatgaaatgtacatatctactgactgatgacaagggaatttcattaggaagaaggtaaagaaacatcgttgagtagcctaccttgatttctgtcaagttcataa

SEQ ID NO: 445236 - DNA, 120 bp, Artificial Sequence
  ENSG00000154556_46 (sequence is synthesized)
ccagcttcatattttaaaggcttcaggtttgaaattaagtcaactgcatgcagctttgctgataaatgaataattctctttgatgccatttatgagaaaagacttcaatatctgttgcct

SEQ ID NO: 445237 - DNA, 120 bp, Artificial Sequence
  ENSG00000154556_47 (sequence is synthesized)
gtcatatttaagaaaaattactgtttctactctctgtatctgattttaaaagaaaaaactattcatacctggcttccaggtaattgactttgaattcttacaagcaaaggtcattgtgtt

SEQ ID NO: 445238 - DNA, 120 bp, Artificial Sequence
  ENSG00000154556_48 (sequence is synthesized)
tttcttgaatagacatctaataaattttgcttggaagtatacttcagtttttcttcttgacatttatctttataaaaattgtgtattttattccaacttgttaaactaagagaaaatgca

SEQ ID NO: 445239 - DNA, 120 bp, Artificial Sequence
  ENSG00000154556_49 (sequence is synthesized)
cgttcacacctcctttccgagtatctgcatgccttgctggcccagagcacaagacccccattgtgctcccccggctcagaatccaaggaaagaaaggaagcgaagcctctgcattgagtt

SEQ ID NO: 445240 - DNA, 120 bp, Artificial Sequence
  ENSG00000154556_50 (sequence is synthesized)
gtatagagcaactgttgaactcagctgcctgtagatagcggtgggtgtgctcgcaaacgtgccgccatgtctgttacgctaacatctgtgaagagagtgcaaagttctccaaacctattg

SEQ ID NO: 445241 - DNA, 120 bp, Artificial Sequence
  ENSG00000154556_51 (sequence is synthesized)
ttttattacgtctctccttgtggattacgtagaactttggaaaattaaacattagacatcttcatagaaaatcatgtcactgatttttaaagccagctcaatttaacctgccactgattc

SEQ ID NO: 445242 - DNA, 120 bp, Artificial Sequence
  ENSG00000154556_52 (sequence is synthesized)
cctaaccagctcttctctgactgtatcccgagggaaaatgtattgaacgcagcagaaggttaaggcagaggagttcggctagaccgggtagcagccaatcagatggggagggtccaagga

SEQ ID NO: 445243 - DNA, 120 bp, Artificial Sequence
  ENSG00000154556_53 (sequence is synthesized)
cattttacttatggaaaacagtgtggcatattctgctgagcttcgccctggaagaagcctcttttatacatctcttcagggaagagagaagcaatgggcatgttagtatacaatgatcac

SEQ ID NO: 445244 - DNA, 120 bp, Artificial Sequence
  ENSG00000154556_54 (sequence is synthesized)
agccacgcaggcctgcaagctgccttttggacaggctgttgactgccgttccaattagctgattggagaatgtggaatgcagagtgataatgctgcatatctgctatcaggcagcagcaa

SEQ ID NO: 445245 - DNA, 120 bp, Artificial Sequence
  ENSG00000154556_55 (sequence is synthesized)
aggtttttgtcttgggaaggcaagctttccctgcaatattatctcagcagctccctagctgcttaccctgaaaacgagggatccaaacggagggtgttgcactctgctaacgctggtcct

SEQ ID NO: 445246 - DNA, 120 bp, Artificial Sequence
  ENSG00000154556_56 (sequence is synthesized)
gtgcgtggctgtggcatatgagcggcaggtctgaaaaagcaggtgtgtgctgggacgggcactggactggaacgcaggcggacgctctcgggtttacctgcttcctgttaacagattgtg

SEQ ID NO: 445247 - DNA, 120 bp, Artificial Sequence
  ENSG00000154556_57 (sequence is synthesized)
ggctcccagggcatatgtctgcacgctgaggccgaggcggagaaggggcttcctgagcgtcccagtacactgacagagacacttggattggacttaatcttaaacctctggagttcaaga

SEQ ID NO: 445248 - DNA, 120 bp, Artificial Sequence
  ENSG00000154556_58 (sequence is synthesized)
agctttcaaaaatagcatagttgatgaaactggaaatttaggtgcgggctcttttaagaaatcatttgtcttcagtcttaagaatagactgacaacagatactgctaccagagggctctc

SEQ ID NO: 445249 - DNA, 120 bp, Artificial Sequence
  ENSG00000154556_59 (sequence is synthesized)
aactatttcttaagaccccctaggaaatatcagaagaaaagcctccttctcaataaagcataagtaggacatctcgttttcagtgaatcagacacttggattggacttaatcttaaacct

SEQ ID NO: 445250 - DNA, 120 bp, Artificial Sequence
  ENSG00000154556_60 (sequence is synthesized)
taaccagtcacacaaagggtgtcattttagaccagttagtaactaacacacaaattccctccagtacagagtactttgctaacaaaaaacctcttcagggaactatgtattccaatgaag

SEQ ID NO: 445251 - DNA, 120 bp, Artificial Sequence
  ENSG00000154556_61 (sequence is synthesized)
attcgagacagacaattgtatattctgaagaatctaacacaaccatgtcatatacacaaaaaatcactaatccactaccagcagcttccagcacggatcctgcaccattcgctaacatca

SEQ ID NO: 445252 - DNA, 120 bp, Artificial Sequence
  ENSG00000154556_62 (sequence is synthesized)
acaccccagttctacaagaggactacaggcaagattctcaaactcggaggatttctaccttgaaactaacccataaccaggatctaggaagtagcagccccattagtactccacagttct

SEQ ID NO: 445253 - DNA, 120 bp, Artificial Sequence
  ENSG00000154556_63 (sequence is synthesized)
ccaaatctgtcgaagtaccgtcatttctcaaaaggccccgctcactgacccctaatccagtgcctgagacacacacagcatctctttccattcagatagctcccctttcaggacaggatc

SEQ ID NO: 445254 - DNA, 120 bp, Artificial Sequence
  ENSG00000154556_64 (sequence is synthesized)
ttgaaagccacaaacagctacctgagctttctccagagactgcaaagatacctcttcagcaagagagacaaaaatctgcagttgcagcggcctctcagtcctcagactgcagagtgagcc

SEQ ID NO: 445255 - DNA, 120 bp, Artificial Sequence
  ENSG00000154556_65 (sequence is synthesized)
ctccgacacctgttccaagggaacctggccggaagcctctttctagctcccgactcggagaagtcactggtagcccctcccctccgccccggagtggcgcccccacaccaagctcgcgcg

SEQ ID NO: 445256 - DNA, 120 bp, Artificial Sequence
  ENSG00000154556_66 (sequence is synthesized)
aagcagataggtttcagagataaagagtgaaaccaaaaacaccgcacacctcatccaaatctgcgctcatacttgcagcaaatgtttgctgtcagttgcttcataataacagcacagacc

SEQ ID NO: 445257 - DNA, 120 bp, Artificial Sequence
  ENSG00000154556_67 (sequence is synthesized)
ccgaattgcaggaggaattgcctggtagaaaactgaagactttaataacaaactctccaaggtgaaaatgaacacagggcgtgattctcagtcaccagactcagcttggagatcttacaa

SEQ ID NO: 445258 - DNA, 120 bp, Artificial Sequence
  ENSG00000154556_68 (sequence is synthesized)
cagacacacagacaaaccacaccagaagcttctcctccgtgccctccttccgtggtacctttgaaccgagccactttctcaccaggcagtggcaccagctcagcatcactcagccttccg

SEQ ID NO: 445259 - DNA, 120 bp, Artificial Sequence
  ENSG00000154556_69 (sequence is synthesized)
agcagtagcagaggcagcttctgagagcctgggcaggcagcagctggctgaccaagtccactggaagagaaggcttgtgccagccgggagaaggaagccggggacaggatgaaagcaaca

SEQ ID NO: 445260 - DNA, 120 bp, Artificial Sequence
  ENSG00000154556_70 (sequence is synthesized)
gacttctcatgaatgttatgctgtgtgtggcagagaaagaaagctgttgatgggagagaattacacaatctgtttttccatttgaatgaaacatcatgaacattgcgattttgttaaatg

SEQ ID NO: 445261 - DNA, 120 bp, Artificial Sequence
  ENSG00000154556_71 (sequence is synthesized)
tggcgatctgggcaaggcattttcatccctttgcagacaaccccggctgctgttaatgctgaaaatagctcaaatgctctcagaacagtagcaccacccagcagctgggattctttccct

SEQ ID NO: 445262 - DNA, 120 bp, Artificial Sequence
  ENSG00000154556_72 (sequence is synthesized)
agcacaacaatcatttgttgagagcctactcaagactctgtacttgtccgtgacagtcactgggagcatagcctttctccaatgacatcgccctgaacatccactctaaaaatgcagggc

SEQ ID NO: 445263 - DNA, 120 bp, Artificial Sequence
  ENSG00000154556_73 (sequence is synthesized)
agcttcctgattgattgtcattctaatggatcaagattatatttcactttgcaggattttttccaattatttaattatatgcaaacaaaaatatctatacacttaagaagaaccacttgc

SEQ ID NO: 445264 - DNA, 120 bp, Artificial Sequence
  ENSG00000154556_74 (sequence is synthesized)
ctcctcgaagcgcaggttcacacataggtcttcccttggccttctttggttttgattccccaatactcccttgcatgtcctttgcttcccctcagaaatcagtgtcctcaggattttctt

SEQ ID NO: 445265 - DNA, 120 bp, Artificial Sequence
  ENSG00000154556_75 (sequence is synthesized)
tgaaactccacagttcctctgcatctccttccaagcctacttctaggaaaacatttgcaatcaattgcaatttactctcatttttgctttaaaagaattttaggtgtcagtgaacaggaa

SEQ ID NO: 445266 - DNA, 120 bp, Artificial Sequence
  ENSG00000154556_76 (sequence is synthesized)
aaagagagttttctttgtggagctccttcaagagtctccaagaaatcacactcatatataatccaaggccagccctgtggtttaattggaaactctagccttgccacacccaacatgagt

SEQ ID NO: 445267 - DNA, 120 bp, Artificial Sequence
  ENSG00000154556_77 (sequence is synthesized)
gtatagagcaactgttgaactcagctgcctgtagagcgagaataggacagactcgtataccattctgatctgggtgcatttcttcagaagggcgtgattctcagtcaccagactcagctt

SEQ ID NO: 445268 - DNA, 120 bp, Artificial Sequence
  ENSG00000154556_78 (sequence is synthesized)
gtctcacctggctcagataaaggagctctccagggaactggccagggctggttgtccctgacagcctcatgtctaccagcaaaccctttggccccaacaccacctcgtttcctggacaac

SEQ ID NO: 445269 - DNA, 120 bp, Artificial Sequence
  ENSG00000154556_79 (sequence is synthesized)
ttcttgggtgaattggagaagcttggtgctttaaccttgtcagctgaccaagccaaaccaaccatcctagaggacgccatcctggaaattaaggaggaacctgctgtcctcctcccattg

SEQ ID NO: 445270 - DNA, 120 bp, Artificial Sequence
  ENSG00000154556_80 (sequence is synthesized)
tccccagcgactgcacctgccgaatcaccttccactcacgcgggtgtggcctcggctgcagcccagccttaccatgcagagcctcttcaggatcccagaacgacaactcaaagcaacttt

SEQ ID NO: 445271 - DNA, 120 bp, Artificial Sequence
  ENSG00000154556_81 (sequence is synthesized)
gcagagttgagaaaaatgagaaggggcttctcagaccctaaaaaggcaccagaagtcctaggggataattttgtggcctctgcgtgcaccagcgtgggttccttgcctgtaccccttccg

SEQ ID NO: 445272 - DNA, 120 bp, Artificial Sequence
  ENSG00000154556_82 (sequence is synthesized)
gtcattggagaggaagatgagggcatctatgaggggattgtgtcaggcatccagagagggccgccagaacctcaggaaggagacgcctggtggtgtggccacgatgggtcagagggcacc

SEQ ID NO: 445273 - DNA, 120 bp, Artificial Sequence
  ENSG00000154556_83 (sequence is synthesized)
ccacacctgcacattgaagaggaggaggaggaggagaaacccaactgcctaaaacaccccatagccacccccacagatcctaggacccccaaggaggacagcaatgcagcaaaacccagt

SEQ ID NO: 445274 - DNA, 120 bp, Artificial Sequence
  ENSG00000154556_84 (sequence is synthesized)
gatttgggagttgggaggtgagatgattggagtgaagagagttaatgtcatggaaaggaaaagctgtctgaagaaaaatacacattttaatgtccctcttcagccgtgcctgctgagagc

SEQ ID NO: 445275 - DNA, 120 bp, Artificial Sequence
  ENSG00000154556_85 (sequence is synthesized)
aacagattgtgggctcccagggcatatgtctgcacgctgaggccgaggcggagaaggggcttcctgagcgtcccagtacactgacagagggcgtgattctcagtcaccagactcagcttg

SEQ ID NO: 445276 - DNA, 120 bp, Artificial Sequence
  ENSG00000154556_86 (sequence is synthesized)
agacgaatagacccacagatgattcaaacactgttgtactttaatggttactgcaaaataccacagttcacgatgattctacagcgatactctagaactgctgtaacgttcgagtagaca

SEQ ID NO: 445277 - DNA, 120 bp, Artificial Sequence
  ENSG00000154556_87 (sequence is synthesized)
tgagatcactgggtggattgtgtttttaccaacatatgaaactgtaattatccatgagcaccgtactgcctttggagacactgctgggactgtgactcagacctcccttgagacaactgg

SEQ ID NO: 445278 - DNA, 120 bp, Artificial Sequence
  ENSG00000154556_88 (sequence is synthesized)
cactttattagcagaggaagacatttttaggagaagcattttgaatcagaaggcttaagaagaattctgcttttctcccaaccaatttgttggaaaatcagtcaaaatctaattttgatg

SEQ ID NO: 445279 - DNA, 120 bp, Artificial Sequence
  ENSG00000154556_89 (sequence is synthesized)
tacgctgtcctcacgggaaaccgcccgccactgcctgggtttggggctgatgaggccaggaagaaacttaatgcgtgcactctaacaaaaagatttcccaggcgtgattctcagtcacca

SEQ ID NO: 445280 - DNA, 120 bp, Artificial Sequence
  ENSG00000154556_90 (sequence is synthesized)
ttaaacagaatatgccagctcgctgggctcccagggctccccaataaacctgaatttcagacccattagcaatttttgtcacaaaggtaatcacttagaaatcatgtttattttgtataa

SEQ ID NO: 445281 - DNA, 120 bp, Artificial Sequence
  ENSG00000154556_91 (sequence is synthesized)
tgatttgtacatctcatctcagaattgaaagatacatgttctaatatattgtctttactgaccaaatacaagtgtatgtgtgtgtgtatgtgtgtgtatttatatatatatatatacaca

SEQ ID NO: 445282 - DNA, 120 bp, Artificial Sequence
  ENSG00000154556_92 (sequence is synthesized)
cacacatgcaggtgtatatacatacacatatatacacatgtgtatgcacacacatatatatatttatatgcaagattcatttgcatgtaactctaactgtgcctaatcattaatcagagt

SEQ ID NO: 445283 - DNA, 120 bp, Artificial Sequence
  ENSG00000154556_93 (sequence is synthesized)
ttaacttttaaaaaagttcataagtgcaatacttaattgctatcatagcttgctaatgagaaaaatcattaattaatctccccaatatacatggacccaggcagttccatcccttgtttt

SEQ ID NO: 445284 - DNA, 120 bp, Artificial Sequence
  ENSG00000154556_94 (sequence is synthesized)
aacttacttatagtgaaaataataaggggagttgtgaacaattttcaggtaaacacggtgttccagaatacagcaggagcatctgggcatttttgtggctgtaagttttaaactttgctt

SEQ ID NO: 445285 - DNA, 120 bp, Artificial Sequence
  ENSG00000154556_95 (sequence is synthesized)
aaagctctcataatagtgacctgcagtacacgcttgactatgactaagccatggatcagaggtctaattaagcctgattgccagagcaatgagaggatgtttcagacatcatatttttgt

SEQ ID NO: 445286 - DNA, 120 bp, Artificial Sequence
  ENSG00000154556_96 (sequence is synthesized)
tgtttagactgctttatttttaactttccaggggcattaaaaaaaaaaaaagaggaaaaagatgcaaccatccacctgagtaaagataatatatataagtaattgttctttaagggcaat

SEQ ID NO: 445287 - DNA, 120 bp, Artificial Sequence
  ENSG00000154556_97 (sequence is synthesized)
tataatgttctcctttcatcactgtttcgttcattgctcgtgtggaattagagtggttgatttgggggaatctgggggttttgtttttgttattgttgttttgtatgttcctagcacatt

SEQ ID NO: 445288 - DNA, 120 bp, Artificial Sequence
  ENSG00000154556_98 (sequence is synthesized)
ttaggggacagtgttgaggattccttactaagctgactgtcttttgctgggtacatctgctggcaggtttctctaacgtgacaatgtgatacttcgggtcagtttctgtggctcccctct

SEQ ID NO: 445289 - DNA, 120 bp, Artificial Sequence
  ENSG00000154556_99 (sequence is synthesized)
ccccctcgttacgcttgcacttgacattttgcgaagtactttgatctgtggactttaacttcaaacacagcatttactttgattgtggctatttactatgctcagtaaaaagtctccttt

SEQ ID NO: 445290 - DNA, 120 bp, Artificial Sequence
  ENSG00000154556_100 (sequence is synthesized)
tttttccttttggtttaatgctttcatagcatttcctttaaacaatttattggagctttagttttcctcactgatctgtcttagatttcacttctagagggacccccaattgtaagaaaa

SEQ ID NO: 445291 - DNA, 120 bp, Artificial Sequence
  ENSG00000154556_101 (sequence is synthesized)
gtgttctctggtaaagttctccccaacacagacttcaggacagttcatggcccctgtctggcagatgtgtaagagcaagcagcaaatgagagtgcacagagccccgcgctggctgccctg

SEQ ID NO: 445292 - DNA, 120 bp, Artificial Sequence
  ENSG00000154556_102 (sequence is synthesized)
ctgcctcagaatctccgtgtgccttggggcccaactggtgctttttaaaaacatggatgctgaaatctttggagttcagaaatacttttttttcagaaaagtttattggtatcacagagc

SEQ ID NO: 445293 - DNA, 120 bp, Artificial Sequence
  ENSG00000154556_103 (sequence is synthesized)
acatatcaaaggaaagcatgcattttaaccacataaggatcgtctgagtaacaaaaacgggaagaaataacaaagaaaaagaaaattagaatcaaaagaaaactggaaaaaaaaaaaaaa

SEQ ID NO: 445294 - DNA, 120 bp, Artificial Sequence
  ENSG00000154556_104 (sequence is synthesized)
gactcctacttcctctgtatagagcaactgttgaactcagctgcctagcgagaataggacagactcgtataccattctgatctgggtgcatttcttcagaaggaaaactgaagactttaa

SEQ ID NO: 445295 - DNA, 120 bp, Artificial Sequence
  ENSG00000154556_105 (sequence is synthesized)
acacaactggatgtttctgtttataaaatagtgttccttggaggggcttgcaacatctaaatatcttatgtcagaataaaagccactgagatccaaagaagtggactaaacttgacaata

SEQ ID NO: 445296 - DNA, 120 bp, Artificial Sequence
  ENSG00000154556_106 (sequence is synthesized)
tctgaaagtcttctgctggaccaggaacccctacagtggacagtgtgcttcctgcttttccacgcagttcgacaggaaaaccatcccaaagtgaacaaaaatggaagcctgcgaagttca

SEQ ID NO: 445297 - DNA, 120 bp, Artificial Sequence
  ENSG00000154556_107 (sequence is synthesized)
agatagaatatgactggtgatagagtcctgaaaaagaagaaaagcctgggggttctgcagaagatttacgttgttcatggcattaatcatggtagattcccagaggaggtgaaatgttat

SEQ ID NO: 445298 - DNA, 120 bp, Artificial Sequence
  ENSG00000154556_108 (sequence is synthesized)
acgcagacacaaatgtggagctgtcactgagaaaggtagcccagctggttttttgtttgtttgtttttgtttgtttgttcttcagtgggtttgaaaaggctgtatattttcaaaactaaa

SEQ ID NO: 445299 - DNA, 120 bp, Artificial Sequence
  ENSG00000154556_109 (sequence is synthesized)
ataggttatctttttctttagacatttttatgtttaccctattttctacaaaggactctttaaggcagcccagagtcacggttccctgctggtccctgtgtccttttagaggagttcccc

SEQ ID NO: 445300 - DNA, 120 bp, Artificial Sequence
  ENSG00000154556_110 (sequence is synthesized)
agcagggatgaatgtcctgacagcgtgtgtccactgtgcatgtgcttccacttgtcagcatgggcgaagcccaagtatgatgtgtagacaagaccaccgcttctctctgctccattcctg

SEQ ID NO: 445301 - DNA, 120 bp, Artificial Sequence
  ENSG00000154556_111 (sequence is synthesized)
cacaagccacacacagcagacttgtatttctgtcaagggctccggttttccatcatctattttttatagcactgatactcaaccagttgcagcaaatgaagggtattatttctggtttga

SEQ ID NO: 445302 - DNA, 120 bp, Artificial Sequence
  ENSG00000154556_112 (sequence is synthesized)
gtgtaagggataagggatttcttaaaaatgtatttcctaaaatgggcaaaatgtagcacttactagccattcaatcagctttggaatattctcttcattgtgaagaaagcacaggtgtgt

SEQ ID NO: 445303 - DNA, 120 bp, Artificial Sequence
  ENSG00000154556_113 (sequence is synthesized)
gtgacatttgttcccttcttctttcccaccccaagcacaaggtattttcacagtcctcagccaaatacagagtttgacgttccctggcaaacggtccctgcgtgttctgttgaaggttag

SEQ ID NO: 445304 - DNA, 120 bp, Artificial Sequence
  ENSG00000154556_114 (sequence is synthesized)
gagtagaatgagcctaatcctgtcaggagactgtttaagtcccagtcaaggacgctagctcctcagcgctgacgcagtctgccccgtcctctgcaccttgctaagaaggacaaacgcaag

SEQ ID NO: 445305 - DNA, 120 bp, Artificial Sequence
  ENSG00000154556_115 (sequence is synthesized)
ctacggcagagatctccctggattaggagcagatgcaatcgaatctccagaacttggatttatagtagaaaaacctagagatgttcagtctaatctttaagtttcccaaacctgggcatt

SEQ ID NO: 445306 - DNA, 120 bp, Artificial Sequence
  ENSG00000154556_116 (sequence is synthesized)
tcattgccacttttccccttcaaatctacattataagaagcatgtcaatcatcgcatttatgtgtatggttaccattttaaatcctcccgttattttgagcctgggctttgttgggggga

SEQ ID NO: 445307 - DNA, 120 bp, Artificial Sequence
  ENSG00000154556_117 (sequence is synthesized)
tggggtgcgtctagctagaatactcactctcccttagtactgggaagccttggtctgcagggctgagtgcaaatatattgctagaggtgatagtccagcggcaaaattaaatggcaccag

SEQ ID NO: 445308 - DNA, 120 bp, Artificial Sequence
  ENSG00000154556_118 (sequence is synthesized)
gtccagcggcaaaattaaatggcaccaggatgaaatctttttggagaatggtaggtgatcattccattcccaggcaagccattttccccctgttttgttttgttttttttttctttctgt

SEQ ID NO: 445309 - DNA, 120 bp, Artificial Sequence
  ENSG00000154556_119 (sequence is synthesized)
aactttggattgtttgaatgtgaaacttcaggtgaaagctagccaaagccaccgagtttcacccagcttccacatgaaagaagtattctacccagccttgcacgaaacttggcctgtgtt

SEQ ID NO: 445310 - DNA, 120 bp, Artificial Sequence
  ENSG00000154556_120 (sequence is synthesized)
gccaaaggtttcatgaatgtcagtgagcctggatttgaaacataacccaaggccaggtgacttctggtgactttgaggctttattgtattagtatagaatctgctgaacagggacagtcc

SEQ ID NO: 445311 - DNA, 120 bp, Artificial Sequence
  ENSG00000154556_121 (sequence is synthesized)
tatttccgcatcttctactatagtttcatgagggcacacgttttcccccagtaaactcccatttatctcatgatgtttgaaagccaggttcaatcctaatgtgaatgtttgtagccgtgg

SEQ ID NO: 445312 - DNA, 120 bp, Artificial Sequence
  ENSG00000154556_122 (sequence is synthesized)
gatcgaagcactggcagatagaggtctgcgttttaaattccagcagcctggccctcagtggtgtgaacatgttggtataattcagctgaaggaaggaagtcccgggagagccgtggaatg

SEQ ID NO: 445313 - DNA, 120 bp, Artificial Sequence
  ENSG00000154556_123 (sequence is synthesized)
cctttctttgcttaaatatacctctgtgctcgtgaggaacaaacagtaacattttgtccaggtctatccgcttgacagtatgccttttgttccctctccaaaggtggtgtcaaatatatt

SEQ ID NO: 445314 - DNA, 120 bp, Artificial Sequence
  ENSG00000154556_124 (sequence is synthesized)
ggtggaaaaataataaacttccagatattttttttccgcctgctcaactgatatactccaagggaacattgcaagcattgagaagttcagtactgtggctgggaatgtaaggtatactga

SEQ ID NO: 445315 - DNA, 120 bp, Artificial Sequence
  ENSG00000154556_125 (sequence is synthesized)
gaataaaggagctctcagtgaaggcaatgtccctcagaaaagcatggcgacccagagttgatgtgggtgtgaacggtcagatggtccccggttgggaaggggtgtgtgtgtgttttctgg

SEQ ID NO: 445316 - DNA, 120 bp, Artificial Sequence
  ENSG00000154556_126 (sequence is synthesized)
gtcggggtagtagcgagcagagaggaaaagggagatttgtaagctttgttcagcaaatctgtcacatcgaaaacaaaaataatcaagcccaggatctgaaaacattcctttcttttgtag

SEQ ID NO: 445317 - DNA, 120 bp, Artificial Sequence
  ENSG00000154556_127 (sequence is synthesized)
atcatataaatttgtgttggctgaatattgaatttttttgtattatttttctcattagagacaccaagcattaggattccaggcatagtaaataatctccaatgaaaatatgacccattg

SEQ ID NO: 445318 - DNA, 120 bp, Artificial Sequence
  ENSG00000154556_128 (sequence is synthesized)
ggaaacataaaatcattgcagataactcccatgagtcagtcccaggaaggtcctcatggttctctggcagttatgaaatgctaagccacccaggacactaagatctgacttgtccttttc

SEQ ID NO: 445319 - DNA, 120 bp, Artificial Sequence
  ENSG00000154556_129 (sequence is synthesized)
ttagttgggagatttctaaactcatgtgaagaattttcataaaaatgaatgtgtggcctcactaaagatttaggctatctttggtgagatacatagatatagatttattataaaattaaa

SEQ ID NO: 445320 - DNA, 120 bp, Artificial Sequence
  ENSG00000154556_130 (sequence is synthesized)
ttgccatcaaatttcattttgaaatttcatagtcacttatatattcaataaaacagactttcattaaagatgtggtttgcattttagcaggtgacatgcagtggatgccctagtagagaa

SEQ ID NO: 445321 - DNA, 120 bp, Artificial Sequence
  ENSG00000154556_131 (sequence is synthesized)
agcactggaaaagctagcaataacacaatttggaagtgccatatgtagaagctgctttttagcactggcttcaccagtcatagtgtagcatttatcagcatatgtgatttgatagcccca

SEQ ID NO: 445322 - DNA, 120 bp, Artificial Sequence
  ENSG00000154556_132 (sequence is synthesized)
gactggtacagtgagcagaggaaaggaagatgttcaaatggaggttctagagaaaatcattcagaaccatcccacaaggaagctctcactaaccatatcaaggtataaggagttcagtag

SEQ ID NO: 445323 - DNA, 120 bp, Artificial Sequence
  ENSG00000154556_133 (sequence is synthesized)
ataaggagttcagtagttttaagacattcatcatccataacaaaacagaaaaaggggaaggataggcttggcgtggtggctcacgcctataaccccagcacgttgggaggccgaggcagg

SEQ ID NO: 445324 - DNA, 120 bp, Artificial Sequence
  ENSG00000154582_0 (sequence is synthesized)
acccggctgcggtggctgcgggactgacgagtgagtctcgggctggggcggaaacggagctccgggaaactactaaagttcctggggaagcaaagtagaatttcataagaacaaaatgga

SEQ ID NO: 445325 - DNA, 120 bp, Artificial Sequence
  ENSG00000154582_1 (sequence is synthesized)
tggagaggagaaaacctatggtggctgtgaaggacctgatgccatgtatgtcaaattgatatcatctgatggccatgaatttattgtaaaaagagaacatgcattaacatcaggcacgat

SEQ ID NO: 445326 - DNA, 120 bp, Artificial Sequence
  ENSG00000154582_2 (sequence is synthesized)
tatcgaaagtatgcatgtattttacgtacaaggttcgctacactaacagctccaccgagattcctgaattcccaattgcacctgaaattgcactggaactgctgatggctgcgaacttct

SEQ ID NO: 445327 - DNA, 120 bp, Artificial Sequence
  ENSG00000154582_3 (sequence is synthesized)
tagattgttaaataaaataaattataataaactgttaactcttttcagtatttaatacctgtagttcagttagtaactttttcatatatagcatgttgcctgtatgcagttgaactatat

SEQ ID NO: 445328 - DNA, 120 bp, Artificial Sequence
  ENSG00000154582_4 (sequence is synthesized)
aaagttcattgcaaagcagattatcttgtttttttgcatagcaatcaaagttgaaatttgtttgctacatcaacaaattaaggacattttcacaaactgagaaataaacaaatatgccaa

SEQ ID NO: 445329 - DNA, 120 bp, Artificial Sequence
  ENSG00000154582_5 (sequence is synthesized)
gtaaatactgaaatttaggtgtaaatcaatacgttctacagggaaataatgaggctaagtatttttatgtttttagtggttttttagaaacctaatcttatagccgccattagcattact

SEQ ID NO: 445330 - DNA, 120 bp, Artificial Sequence
  ENSG00000154582_6 (sequence is synthesized)
agagttatgcaaataattgcattataaacatgtttataacttagccaaaacattgatttttataactctccaagtatgagttgaaatttcttatgtcttttgataaactgcagtattctt

SEQ ID NO: 445331 - DNA, 120 bp, Artificial Sequence
  ENSG00000154582_7 (sequence is synthesized)
tattgctacaatttaagaactttatttaaaaacaattttggaaggttactaggtacagcttttgcagaagaaactgaactgtagccagatggtcagcaagtaaactacatgacttagagt

SEQ ID NO: 445332 - DNA, 120 bp, Artificial Sequence
  ENSG00000154582_8 (sequence is synthesized)
tcttgtgcattatacattttgggtaattcaaagtactgtatttgcattgactataaagcgtcgtttgcaatatttattcttccttcatagtcccttgttgtgattatacttccagttgtt

SEQ ID NO: 445333 - DNA, 120 bp, Artificial Sequence
  ENSG00000154582_9 (sequence is synthesized)
taaatgtattttaaaagactcactattaactttattcagatcttaaaagctacacctttttgaactattccagtctttctccatccaattagaatgttatggaataacatgtgaagagat

SEQ ID NO: 445334 - DNA, 120 bp, Artificial Sequence
  ENSG00000154582_10 (sequence is synthesized)
acagtgaaaatcatattataatgcattgaagatatcctacatgaattatcttctattaaaatatgtcccaataaatatacccataatcagtgggtcttctactgaaatcaagctcattca

SEQ ID NO: 445335 - DNA, 120 bp, Artificial Sequence
  ENSG00000154582_11 (sequence is synthesized)
gcttttctattaagcagccaaaaaattttttgaaaaaatatgacagcatcattccttatgcatggggaaagaagcactggagatgggtttagtattgtctttatctcagaggtggaacaa

SEQ ID NO: 445336 - DNA, 120 bp, Artificial Sequence
  ENSG00000154582_12 (sequence is synthesized)
tattgtctttatctcagaggtggaacaaagttgtcattatagggtctataaacttaagtctccagcttatttgagactggcttaatatggctgagcccggtggctcatgcctgtaatccc

SEQ ID NO: 445337 - DNA, 73 bp, Artificial Sequence
  ENSG00000154582_13 (sequence is synthesized)
ccagcctggccaccatggcaaaaccccatctctaccaaaaatgcaaaaattagctaggctgagaatcgcttga

SEQ ID NO: 445338 - DNA, 120 bp, Artificial Sequence
  ENSG00000154582_14 (sequence is synthesized)
caggtacggatctcccgcgcgtcgccgaaagcggctctgacccagcggaagtaattctttcgactgccccggaacccaccggagcaggcagctgggggtgggggggcggccctgggatag

SEQ ID NO: 445339 - DNA, 120 bp, Artificial Sequence
  ENSG00000154582_15 (sequence is synthesized)
gcggggacccggctgcggtggctgcgggactgacgagatcatcagggaaggaagacctctctgaggagttgatgttttacctggagacctaaatgatgaggatttaaaagcttttcggac

SEQ ID NO: 445340 - DNA, 120 bp, Artificial Sequence
  ENSG00000154582_16 (sequence is synthesized)
gggagaagagggcggcgggacctttcctggcgccgctcgcagtttacatgtggatttattcattctggagatacaatggcaaggaaacagctgtgagtcttgctgtgtggcccaggctgg

SEQ ID NO: 445341 - DNA, 120 bp, Artificial Sequence
  ENSG00000154582_17 (sequence is synthesized)
gtctcaaattcctgacctcaagtgatctccctcccaaagtgttgcgattgcaggtgtgagccactgcacctggctgctgagaaatctttgcctacagtgagggaaactactaaagttcct

SEQ ID NO: 445342 - DNA, 120 bp, Artificial Sequence
  ENSG00000154582_18 (sequence is synthesized)
gggagaagagggcggcgggacctttcctggcgccgctcgcagtttacatgtggatttattcattctggagatacaatggcaaggaaacagctgtggaaactactaaagttcctggggaag

SEQ ID NO: 445343 - DNA, 120 bp, Artificial Sequence
  ENSG00000154582_19 (sequence is synthesized)
ttgcccaggctgaagtgcagtggctgttcataggcacaatcatagcacactgcagccttccactcatggcctcaagcagtcatcctgcctcagcctctcatagctgggactaaaggcaca

SEQ ID NO: 445344 - DNA, 120 bp, Artificial Sequence
  ENSG00000154582_20 (sequence is synthesized)
caaaactgcacccagctggggaaattttaaagttgctttgagatagatctcatggtcttaatcatcaaattattctataaattttgtatttttgtgtgatggtactctcgtataggacag

SEQ ID NO: 445345 - DNA, 120 bp, Artificial Sequence
  ENSG00000154582_21 (sequence is synthesized)
acacaggtacatcagaatttgattttttcctctctgtattagtccattttctgctcataaaggcatacccgagaccgggcaatttacaaaagaaaggtttaatcgacttacagttccatg

SEQ ID NO: 445346 - DNA, 120 bp, Artificial Sequence
  ENSG00000154582_22 (sequence is synthesized)
acaatcatggtggaaggtgaaaggcacaaagagaagagagcttgtacagagaaattccccatttttaaaaccatcagatctgagacttactcactatcacaaggacagcacaggaaagac

SEQ ID NO: 445347 - DNA, 89 bp, Artificial Sequence
  ENSG00000154582_23 (sequence is synthesized)
ttaaaaccatcagatctgagacttactcactatcacaaggacagcacaggaaagacctgcccccgtgattcaattacctcctgctgatt

SEQ ID NO: 445348 - DNA, 120 bp, Artificial Sequence
  ENSG00000154582_24 (sequence is synthesized)
aacctggccaacatggcaaaaccccgtttttactaaaaataccaaaattagccagatgtggtggcagacatctgtgatcccagccactagggaggctaagacaggagaactgcttgaacc

SEQ ID NO: 445349 - DNA, 120 bp, Artificial Sequence
  ENSG00000154582_25 (sequence is synthesized)
tgagattgtaccactgcactccagcctggtcgacagagaagacactgtctcaaaaaaaaaaacaacgaaaaagaatcatgccttcccaacagtccccctatgtcttaactcatttttcag

SEQ ID NO: 445350 - DNA, 120 bp, Artificial Sequence
  ENSG00000154582_26 (sequence is synthesized)
tttgactccatgtctcacatccacatcatgttgatgcaagaggtgagttcacgtgggcagctccacacctgtggctttgcagggtacagcctgccttctggctgctttcatgggctggtg

SEQ ID NO: 445351 - DNA, 87 bp, Artificial Sequence
  ENSG00000154582_27 (sequence is synthesized)
tcaccttctcagagctactctaggagtgccccagtagtgactccgtgtgagggctctgaccccacatttttcttttttctttttttt

SEQ ID NO: 445352 - DNA, 87 bp, Artificial Sequence
  ENSG00000154582_28 (sequence is synthesized)
tcctggagccaccatgcctgactcttacttcacatttttcttccacactgccctatcagagggtccccatgagagccctgccctgca

SEQ ID NO: 445353 - DNA, 87 bp, Artificial Sequence
  ENSG00000154582_29 (sequence is synthesized)
gccaccatgcctgactcttacttcacatttttcttccacactgccctatcagagggtccccatgagagccctgatttcgatatatct

SEQ ID NO: 445354 - DNA, 120 bp, Artificial Sequence
  ENSG00000154582_30 (sequence is synthesized)
ctcaattcttgacatctgtgcactgacaggctcaacaccatttgaaagctgccaaggattgaggcttgcaccctctgaagccacggcccaaactctatgttggcccctttcagccatggc

SEQ ID NO: 445355 - DNA, 120 bp, Artificial Sequence
  ENSG00000154582_31 (sequence is synthesized)
tggagtggctaggatgcatggcaccaagtgcctaggcttcacacagcatggggaccctgagcccagtccccaaaaccacttttttgtgacagagtcactctgttgcccaggctggagtgc

SEQ ID NO: 445356 - DNA, 120 bp, Artificial Sequence
  ENSG00000154589_0 (sequence is synthesized)
gattagttactgatcctctttgcatttgtaaagctttggagatattgaatcatgttaccatttctgtttttttccaccctgttttcttccatatttactgaagctcagaagcagtattgg

SEQ ID NO: 445357 - DNA, 120 bp, Artificial Sequence
  ENSG00000154589_1 (sequence is synthesized)
gtctgcaactcatccgatgcaagtatttcatacacctactgtgataaaatgcaatacccaatttcaattaatgttaacccctgtatagaattgaaaagatccaaaggattattgcacatt

SEQ ID NO: 445358 - DNA, 120 bp, Artificial Sequence
  ENSG00000154589_2 (sequence is synthesized)
gcaaagaagttatttgccgaggatctgatgacgattactctttttgcagagctctgaagggagagactgtgaatacaacaatatcattctccttcaagggaataaaattttctaagggaa

SEQ ID NO: 445359 - DNA, 120 bp, Artificial Sequence
  ENSG00000154589_3 (sequence is synthesized)
aatacaaatgtgttgttgaagctatttctgggagcccagaagaaatgctcttttgcttggagtttgtcatcctacaccaacctaattcaaattagaataaattgagtatttaaaaaaaaa

SEQ ID NO: 445360 - DNA, 120 bp, Artificial Sequence
  ENSG00000154611_0 (sequence is synthesized)
gcggtagcacgctgtgttggcggcggctccccgcttgcctcagctgcagcagcgggaagctcggtggcaagcccttgtagtcctgtgcgatggcgtctcgatatgacagggcgatcactg

SEQ ID NO: 445361 - DNA, 120 bp, Artificial Sequence
  ENSG00000154611_1 (sequence is synthesized)
tcttctccccagacggacacctttttcaagttgaatatgcccaggaagcggtgaagaaaggatccaccgcggtcggaattcgaggtaccaatatagttgttcttggggtagaaaaaaaat

SEQ ID NO: 445362 - DNA, 120 bp, Artificial Sequence
  ENSG00000154611_2 (sequence is synthesized)
ctgttgccaagcttcaagatgaaagaactgtgaggaaaatttgtgcccttgatgaccatgtctgcatggcttttgcagttttgacaatttttataggacttactgctgatgctagagtag

SEQ ID NO: 445363 - DNA, 120 bp, Artificial Sequence
  ENSG00000154611_3 (sequence is synthesized)
taataaacagagcccgtgtggagtgccagagccataagcttacggttgaggacccagtcactgtagaatacataactcgcttcatagcaactttaaagcagaaatatacccaaagcaatg

SEQ ID NO: 445364 - DNA, 120 bp, Artificial Sequence
  ENSG00000154611_4 (sequence is synthesized)
gacgaagaccttttggtatttctgccttaattgtaggttttgatgatgatggtatctcaagattgtatcagacagatccttctggtacttatcatgcttggaaggcaaatgcaataggcc

SEQ ID NO: 445365 - DNA, 120 bp, Artificial Sequence
  ENSG00000154611_5 (sequence is synthesized)
gaagtgctaaaactgttcgagaatttctagaaaagaattacacagaagatgccatagcaagtgacagtgaagctatcaagttagcaataaaagctttgctagaagttgtccagtctggtg

SEQ ID NO: 445366 - DNA, 120 bp, Artificial Sequence
  ENSG00000154611_6 (sequence is synthesized)
gaaaaaacattgaacttgctataataagaagaaatcaacctttgaagatgtttagtgcaaaagaagttgaattatatgtaactgaaatagaaaaggaaaaggaagaagcagagaagaaaa

SEQ ID NO: 445367 - DNA, 120 bp, Artificial Sequence
  ENSG00000154611_7 (sequence is synthesized)
aaagaaatctgtctaattcttaggatgaccactgggaggtcttaatgttttgttttattgtactgcctgaggttgtttagtgaaattttagaggaaaacagttattttgcagcattacat

SEQ ID NO: 445368 - DNA, 120 bp, Artificial Sequence
  ENSG00000154611_8 (sequence is synthesized)
gcagtacttgtgtgatgttttgagaatgccagatctgtggctgtcttcattctattacatagtcaaacataggtttatgtgaagattttctttgaaaggggatttcagtaattgttgaga

SEQ ID NO: 445369 - DNA, 120 bp, Artificial Sequence
  ENSG00000154611_9 (sequence is synthesized)
gcagtcataattccacataagcctgagactctataatttgtccagtgtcttacttaccttcatatatgcaaatataattttaaaaaattttttaattaaaaaaatttaataatttggtga

SEQ ID NO: 445370 - DNA, 120 bp, Artificial Sequence
  ENSG00000154611_10 (sequence is synthesized)
tgtttgaatattgactgtcagttaaggacatagctattccaaataaactaaatataatattgagctgcatttctcaaagaatgacaaaagcatccttatactgatgagttcttaaaattt

SEQ ID NO: 445371 - DNA, 120 bp, Artificial Sequence
  ENSG00000154611_11 (sequence is synthesized)
tgtcagagccttcttcattttacaatattttgttatttttattttacctttttcattttacaatatttcgttatttttattttacctttttcattttacaagttgcaatatattgtttcg

SEQ ID NO: 445372 - DNA, 120 bp, Artificial Sequence
  ENSG00000154611_12 (sequence is synthesized)
ttcatggaacaaatataggctgaattcaaacatgcaattaaagcatgggaagagcttctaagggcatcttaacaggatgctacatgaaaataaggaaagaaattaatacatatcactttt

SEQ ID NO: 445373 - DNA, 120 bp, Artificial Sequence
  ENSG00000154611_13 (sequence is synthesized)
agtttagatttttattttatctcaagtatgtccagtgtgttcggtttgttacatattccatgaaatatctgagtgtgtattttatgattggtattatggaaggcttattgggggaacaag

SEQ ID NO: 445374 - DNA, 120 bp, Artificial Sequence
  ENSG00000154611_14 (sequence is synthesized)
aaaaatataaaaagtgatctctgcccacggaaaggatttaatccaaatggtccacaagaggaatgtgcttaattcctacagtgagtttatatttttgaaaataaaagctagtaaatattc

SEQ ID NO: 445375 - DNA, 120 bp, Artificial Sequence
  ENSG00000154620_0 (sequence is synthesized)
gttgtttgcagagaggccgtggctacaaaatggaagtgcttttgcgacctgggctccattttaggaattcttgcccgattttaaccacttgaacgcggaagtggctttcctattctcttc

SEQ ID NO: 445376 - DNA, 120 bp, Artificial Sequence
  ENSG00000154620_1 (sequence is synthesized)
caagccagcctttaattttaaacgctgtaattaacagttcacaggggtcaaattcctttattccggaacattccactttgagagggatctgtcctctttggtcccctgcgttttcaaata

SEQ ID NO: 445377 - DNA, 120 bp, Artificial Sequence
  ENSG00000154620_2 (sequence is synthesized)
tttgaggaaaggtgtcgcctctttttctgtggaaagaggaagctcatgagcgcgaaacagcaggggacggagggcgagaagggctttctcaggttgcgggtcggagggcagaagcacagt

SEQ ID NO: 445378 - DNA, 120 bp, Artificial Sequence
  ENSG00000154620_3 (sequence is synthesized)
tcccagtacagagacccggacaggtggctgtttctcacgctcactttggattgctccctacggcttcctccgcagccatgtctgacaaacctggtatggctgagatcgagaaattcgata

SEQ ID NO: 445379 - DNA, 120 bp, Artificial Sequence
  ENSG00000154620_4 (sequence is synthesized)
agtcgaaactgaagaagacagaaacgcaagagaagaatccattgtcttccaaagaaactatcgaacaggagaggcaagcaggcgaatcttaaacaggcatgtgccaccaatatctactgt

SEQ ID NO: 445380 - DNA, 120 bp, Artificial Sequence
  ENSG00000154620_5 (sequence is synthesized)
ctttcttattttacttcttttacttgtttaacttggttagatgcaaacacgttggatgagtttgaaaggactatgctgcccttttgacatcaaagacctgctgacaatggaggccacgcc

SEQ ID NO: 445381 - DNA, 120 bp, Artificial Sequence
  ENSG00000154620_6 (sequence is synthesized)
tgcttctcccatcgcctgtctggctggcagggaaggaaaatagcttgaatgttggtgaaagacttagcggagtgggagggcagtgaaatctagagtaaaaccaagttgggccaagtgtcc

SEQ ID NO: 445382 - DNA, 120 bp, Artificial Sequence
  ENSG00000154620_7 (sequence is synthesized)
tgcagaatctaaaatgaagtttaatcagcgtgccatttttgttgttgtttgaaagattttaatttttggaatgcacagtttttatttaaaaaagacatttttaaaccactgcttgtgaga

SEQ ID NO: 445383 - DNA, 120 bp, Artificial Sequence
  ENSG00000154620_8 (sequence is synthesized)
ttgcttgttgattggaaagagtgttttattcaccatttaaacgtttgcaaagtggcgtgccccttggcctcacaggcaaagaataacttaaaagctgacgatttgaataaattatgttac

SEQ ID NO: 445384 - DNA, 120 bp, Artificial Sequence
  ENSG00000154620_9 (sequence is synthesized)
agtatgaaatatgttttacctggatatgtaaaataccttctttattctagctaattgggagatgattttttttggctaattgagattacctttagattatgttttcaaaactggcttata

SEQ ID NO: 445385 - DNA, 120 bp, Artificial Sequence
  ENSG00000154620_10 (sequence is synthesized)
ctgtaatctacaactaataagcactaatttagagttcagctatattgttgcatgtagtgagaagggacttaattacaaacttaagacgtaagtgtgcaataaagtaagctaagaagaaaa

SEQ ID NO: 445386 - DNA, 120 bp, Artificial Sequence
  ENSG00000154639_0 (sequence is synthesized)
agtcgggagcgcgcgaggcgcggggagcctgggaccaggagcgagagccgcctacctgcagccgccgcccacggcacggcagccaccatggcgctcctgctgtgcttcgtgctcctgtgc

SEQ ID NO: 445387 - DNA, 120 bp, Artificial Sequence
  ENSG00000154639_1 (sequence is synthesized)
ggagtagtggatttcgccagaagtttgagtatcactactcctgaagagatgattgaaaaagccaaaggggaaactgcctatctgccatgcaaatttacgcttagtcccgaagaccaggga

SEQ ID NO: 445388 - DNA, 120 bp, Artificial Sequence
  ENSG00000154639_2 (sequence is synthesized)
ccgctggacatcgagtggctgatatcaccagctgataatcagaaggtggatcaagtgattattttatattctggagacaaaatttatgatgactactatccagatctgaaaggccgagta

SEQ ID NO: 445389 - DNA, 120 bp, Artificial Sequence
  ENSG00000154639_3 (sequence is synthesized)
cattttacgagtaatgatctcaaatctggtgatgcatcaataaatgtaacgaatttacaactgtcagatattggcacatatcagtgcaaagtgaaaaaagctcctggtgttgcaaataag

SEQ ID NO: 445390 - DNA, 120 bp, Artificial Sequence
  ENSG00000154639_4 (sequence is synthesized)
aagattcatctggtagttcttgttaagccttcaggtgcgagatgttacgttgatggatctgaagaaattggaagtgactttaagataaaatgtgaaccaaaagaaggttcacttccatta

SEQ ID NO: 445391 - DNA, 120 bp, Artificial Sequence
  ENSG00000154639_5 (sequence is synthesized)
cagtatgagtggcaaaaattgtctgactcacagaaaatgcccacttcatggttagcagaaatgacttcatctgttatatctgtaaaaaatgcctcttctgagtactctgggacatacagc

SEQ ID NO: 445392 - DNA, 120 bp, Artificial Sequence
  ENSG00000154639_6 (sequence is synthesized)
tgtacagtcagaaacagagtgggctctgatcagtgcctgttgcgtctaaacgttgtccctccttcaaataaagctggactaattgcaggagccattataggaactttgcttgctctagcg

SEQ ID NO: 445393 - DNA, 120 bp, Artificial Sequence
  ENSG00000154639_7 (sequence is synthesized)
ctcattggtcttatcatcttttgctgtcgtaaaaagcgcagagaagaaaaatatgaaaaggaagttcatcacgatatcagggaagatgtgccacctccaaagagccgtacgtccactgcc

SEQ ID NO: 445394 - DNA, 120 bp, Artificial Sequence
  ENSG00000154639_8 (sequence is synthesized)
agaagctacatcggcagtaatcattcatccctggggtccatgtctccttccaacatggaaggatattccaagactcagtataaccaagtaccaagtgaagactttgaacgcactcctcag

SEQ ID NO: 445395 - DNA, 120 bp, Artificial Sequence
  ENSG00000154639_9 (sequence is synthesized)
agtccgactctcccacctgctaaggtagctgcccctaatctaagtcgaatgggtgcgattcctgtgatgattccagcacagagcaaggatgggtctatagtatagagcctccatatgtct

SEQ ID NO: 445396 - DNA, 120 bp, Artificial Sequence
  ENSG00000154639_10 (sequence is synthesized)
catctgtgctctccgtgttcctttcctttttttgatatatgaaaacctattctggtctaaattgtgttactagcctcaaaatacatcaaaaaataagttaatcaggaactgtacggaata

SEQ ID NO: 445397 - DNA, 120 bp, Artificial Sequence
  ENSG00000154639_11 (sequence is synthesized)
tatttttaaaaatttttgtttggttatatcgaaatagttacaggcactaaagttagtaaagaaaagtttaccatctgaaaaagctggattttctttaagaggttgattataaagttttct

SEQ ID NO: 445398 - DNA, 120 bp, Artificial Sequence
  ENSG00000154639_12 (sequence is synthesized)
aaatttatcagtacctaagtaagatgtagcgctttgaatatgaaatcataggtgaagacatgggtgaacttacttgcataccaagttgatacttgaataaccatctgaaagtggtacttg

SEQ ID NO: 445399 - DNA, 120 bp, Artificial Sequence
  ENSG00000154639_13 (sequence is synthesized)
atcatttttaccattatttttaggatgtgtatttcatttatttatggcccaccagtctcccccaaattagtacagaaatatccatgacaaaattacttacgtatgtttgtacttggtttt

SEQ ID NO: 445400 - DNA, 120 bp, Artificial Sequence
  ENSG00000154639_14 (sequence is synthesized)
acagctcctttgaaaactctgtgtttggaatatctctaaaaacatagaaaacactacagtggtttagaaattactaattttacttctaagtcattcataaaccttgtctatgaaatgact

SEQ ID NO: 445401 - DNA, 120 bp, Artificial Sequence
  ENSG00000154639_15 (sequence is synthesized)
tcttaaatatttagttgatagactgctacaggtaatagggacttagcaagctcttttatatgctaaaggagcatctatcagattaagttagaacatttgctgtcagccacatattgagat

SEQ ID NO: 445402 - DNA, 120 bp, Artificial Sequence
  ENSG00000154639_16 (sequence is synthesized)
gacactaggtgcaatagcagggatagattttgttggtgagtagtctcatgccttgagatctgtggtggtcttcaaaatggtggccagccagatcaaggatgtagtatctcatagttccca

SEQ ID NO: 445403 - DNA, 120 bp, Artificial Sequence
  ENSG00000154639_17 (sequence is synthesized)
ggtgatatttttcttattagaaaaatattataactcatttgttgtttgacacttatagattgaaatttcctaatttattctaaattttaagtggttctttggttccagtgctttatgttg

SEQ ID NO: 445404 - DNA, 120 bp, Artificial Sequence
  ENSG00000154639_18 (sequence is synthesized)
ttgttgtttttggatggtgttacatattatatgttctagaaacatgtaatcctaaatttaccctcttgaatataatccctggatgatattttttatcataaatgcagaataatcaaatac

SEQ ID NO: 445405 - DNA, 120 bp, Artificial Sequence
  ENSG00000154639_19 (sequence is synthesized)
attttaagcaagttaagtgtcctccatcaattctgtattccagacttgggaggatgtacagttgctgttgtgtgatcaaacatgtctctgtgtagttccagcaaatcaagctgagctttg

SEQ ID NO: 445406 - DNA, 86 bp, Artificial Sequence
  ENSG00000154639_20 (sequence is synthesized)
gaaggaggagtaaagggactactcctccttgccaaatgtgctaaatatcattttaggagaagaaagtgggtttattgtatttccct

SEQ ID NO: 445407 - DNA, 120 bp, Artificial Sequence
  ENSG00000154639_21 (sequence is synthesized)
atcattttaggagaagaaagtgggtttattgtatttcccttaagattgtgagggagtgtggatacagtagaatgagccaacagtttctttataataaatacggtctgcaataaattattt

SEQ ID NO: 445408 - DNA, 120 bp, Artificial Sequence
  ENSG00000154639_22 (sequence is synthesized)
cactagctctaaaacctttccctagattttagtagggagttggtttctgttaatatctttgggtgctgtggtggtaaatgctatattatgaacggtggcatgtatttacagttagagtat

SEQ ID NO: 445409 - DNA, 120 bp, Artificial Sequence
  ENSG00000154639_23 (sequence is synthesized)
agcattttaaaaacaggttttaaccttatgtaaaattacttttatactcgtgttaacattttcatctgtgccttttggtaatttaatttctattatgaatttctggtgcctatgagctag

SEQ ID NO: 445410 - DNA, 120 bp, Artificial Sequence
  ENSG00000154639_24 (sequence is synthesized)
ctatcacctacctgaaaggtgcttagaggtgaaggtactgtttctaaaaacacatcactgtgatacctttctatcctcacattttcaagcttgcctcttttctgttctttgtggatataa

SEQ ID NO: 445411 - DNA, 120 bp, Artificial Sequence
  ENSG00000154639_25 (sequence is synthesized)
cttaagcaattgtgttattcataaaggtttagaaatttcaatattcccaacactctatgtttctgattttataacagtagccatttttgaaagtcagatgtttggcctgttttatatgaa

SEQ ID NO: 445412 - DNA, 120 bp, Artificial Sequence
  ENSG00000154639_26 (sequence is synthesized)
ttataaaaaataagtaaataaacagaacattaataataaagttttggttcttcctattcctgactttcatataatgaaaattatcctattgatctaagtagaagttatcatagaaagtgg

SEQ ID NO: 445413 - DNA, 120 bp, Artificial Sequence
  ENSG00000154639_27 (sequence is synthesized)
gaagttatcatagaaagtggacacgtataagactttccttcctttttttttttaataacatatgaggaacaagacttctcttcccatatacttcatattttagaggacattgttttaaag

SEQ ID NO: 445414 - DNA, 120 bp, Artificial Sequence
  ENSG00000154639_28 (sequence is synthesized)
gcttatgtctcactgtaaaattctgtcagccaaatagtaccaatacgttttcaagtagttctcactgataatttagttgaaccagagatcaaatatttgctcccgaattactactggtaa

SEQ ID NO: 445415 - DNA, 120 bp, Artificial Sequence
  ENSG00000154639_29 (sequence is synthesized)
atatttgctcccgaattactactggtaatcaagtagttgaacaaaaaattactaaagcatttccgttagatcagtcaaggacagtactgcatctttttttttttttttttttttaagacg

SEQ ID NO: 445416 - DNA, 120 bp, Artificial Sequence
  ENSG00000154639_30 (sequence is synthesized)
cccggcccagtactgcatcttaacagcaaagccattttattctactttataactgagagacttgataccatccatctctttaggttacagaggataatttgaagagaaatgttactgtag

SEQ ID NO: 445417 - DNA, 120 bp, Artificial Sequence
  ENSG00000154639_31 (sequence is synthesized)
gtagaatatatagttctgtactttttttttttttttttaagagatagggtttcactattgctcaggctggtctcaaactgctgggctcaggagatcctcctgccttggcctcccaaattg

SEQ ID NO: 445418 - DNA, 120 bp, Artificial Sequence
  ENSG00000154639_32 (sequence is synthesized)
gattacaggtgtgagccgcagcatccagccagttctgtactttgaatatggagtagtttacagctatttttttttcttactggtaatcttaactaatatgattcccttgttagagagcct

SEQ ID NO: 445419 - DNA, 120 bp, Artificial Sequence
  ENSG00000154639_33 (sequence is synthesized)
ctcactcccccacccccaaaaatgtctactattcatgacagtaaccaattattctggacaaattgcttctttttaatttgagctatctgccatggactttctaaaatggaaacacagcct

SEQ ID NO: 445420 - DNA, 120 bp, Artificial Sequence
  ENSG00000154639_34 (sequence is synthesized)
gagtgtatcttagggagagtttgattgaaaaaatccaaatcactatccatatagatcatggatataaagagatacctgatttttattaaaaagatactttttcaaatttaagagttaatc

SEQ ID NO: 445421 - DNA, 120 bp, Artificial Sequence
  ENSG00000154639_35 (sequence is synthesized)
ttggaaatttggaacaagtaaaggggcaagtaaaccttttgatgaaatataaaaggaactcattgcatgaagttgactatcaaattctgtgatgtgtggcttcttaaaaatattctcagt

SEQ ID NO: 445422 - DNA, 120 bp, Artificial Sequence
  ENSG00000154639_36 (sequence is synthesized)
gtcttttgtgtgcgtgcagcatgtacatttgatgttatgtgaatgttgagttttttcttctaattttcacttcagcagtgtttagggctttcagatgccttattccagtgtgaacagaaa

SEQ ID NO: 445423 - DNA, 120 bp, Artificial Sequence
  ENSG00000154639_37 (sequence is synthesized)
aagttcatattttatgtggttaatgctttgatgtgtcacataaagagtagtttgtagaaaatgttggcacaattttaacttcttagtggcttgtgacattatatattatatatatatatg

SEQ ID NO: 445424 - DNA, 120 bp, Artificial Sequence
  ENSG00000154639_38 (sequence is synthesized)
tacatatatctttataacattcctgtgtttagtagtgtaaatgttctgggcaagttttaatattttgaatgcctttggatattccagcaataaaggcatcatgttctgcaataggatttc

SEQ ID NO: 445425 - DNA, 120 bp, Artificial Sequence
  ENSG00000154639_39 (sequence is synthesized)
ttactcatttacctattttaacactaaaatagaccacaactgagcacaaattccttttataaatgttatagaagcagggaagaataataaacacatttgtgaattgtggttcagtttatt

SEQ ID NO: 445426 - DNA, 120 bp, Artificial Sequence
  ENSG00000154639_40 (sequence is synthesized)
tatctttagggaaggctgatcatttatcttatagcagataaccccagcctcttattcattatggttaacttttataatttatcttattttataatttaagaatatagtacatatcagttg

SEQ ID NO: 445427 - DNA, 120 bp, Artificial Sequence
  ENSG00000154639_41 (sequence is synthesized)
ggtttggttttggtcatcgagactaaaagctccatcaaaacagaactttgtgttttctgctaacttatttaatgacacaagttttaagagaaccacaattcattgattcacttattcttt

SEQ ID NO: 445428 - DNA, 120 bp, Artificial Sequence
  ENSG00000154639_42 (sequence is synthesized)
tccctaattgtgaattttagtgataaatacacctgtactactgaggaaaatattctgacacttcacgtgtgcaaagtatagaactgacagtgtcagtttcagattttgtatgtacgattt

SEQ ID NO: 445429 - DNA, 120 bp, Artificial Sequence
  ENSG00000154639_43 (sequence is synthesized)
ctggcttatatatccaatggtgcagattttgaaatttgtaagaacaaaatttgttaagaaaaacaacttgctctagttttgtgaccttgtgtacttttgaaataaaatcaagaaagcagt

SEQ ID NO: 445430 - DNA, 120 bp, Artificial Sequence
  ENSG00000154639_44 (sequence is synthesized)
attgtattatttgactttattttaggcctctagtaaagacttaaatgttttttaaaaaaagcacaaggcacagagattagagcagctgtaagaacacatctactttatgcaatggcatta

SEQ ID NO: 445431 - DNA, 120 bp, Artificial Sequence
  ENSG00000154639_45 (sequence is synthesized)
gacatgtaagtcagatgtcatgtcaaaattagtacgagccaaattctttgttaaaaaaccctatgtatagtgacactgatagttaaaagatgttttattatattttcaataactaccact

SEQ ID NO: 445432 - DNA, 120 bp, Artificial Sequence
  ENSG00000154639_46 (sequence is synthesized)
aacaaatttttaacttttcatatgcatattctgatatgtggtcttttaggaaaagtatggttaatagttgatttttcaaaggaaattttaaaattcttacgttctgtttaatgtttttgc

SEQ ID NO: 445433 - DNA, 120 bp, Artificial Sequence
  ENSG00000154640_0 (sequence is synthesized)
tcttccgggccgcgagccccctgcgcgccgctttggggctgcgctcactcgtgtgcgcgctcgtccgcccgccagtcctctcaacgcgcgcttggccgcccgacgacgcgggagccgcac

SEQ ID NO: 445434 - DNA, 120 bp, Artificial Sequence
  ENSG00000154640_1 (sequence is synthesized)
gcgccggacgaggctcgctgcgctccctgttgcccagcgcgggcccgttgaggcggagccctcagttcccggccaggacacggtctgggccgccgaatctccggccgaagagcggcggcg

SEQ ID NO: 445435 - DNA, 120 bp, Artificial Sequence
  ENSG00000154640_2 (sequence is synthesized)
gcagcggcgggaaaaaaatgaagaatgaaattgctgccgttgtcttctttttcacaaggctagttcgaaaacatgataagttgaaaaaagaggcagttgagaggtttgctgagaaattga

SEQ ID NO: 445436 - DNA, 120 bp, Artificial Sequence
  ENSG00000154640_3 (sequence is synthesized)
ccctaatacttcaagaaaaatataaaaatcactggtatccagaaaaaccatcgaaaggacaggcctacagatgtattcgtgtcaataaatttcagagagttgatcctgatgtcctgaaag

SEQ ID NO: 445437 - DNA, 120 bp, Artificial Sequence
  ENSG00000154640_4 (sequence is synthesized)
cctgtgaaaacagctgcatcttgtatagtgacctgggcttgccaaaggagctcactctctgggtggacccatgtgaggtgtgctgtcggtatggagagaaaaacaatgcattcattgttg

SEQ ID NO: 445438 - DNA, 120 bp, Artificial Sequence
  ENSG00000154640_5 (sequence is synthesized)
ccagctttgaaaataaagatgagaacaaggatgagatctccaggaaagttaccagggcccttgataaggttacctctgattatcattcaggatcctcttcttcagatgaagaaacaagta

SEQ ID NO: 445439 - DNA, 120 bp, Artificial Sequence
  ENSG00000154640_6 (sequence is synthesized)
acccagttcggtgactgcagccgcaagtcctgtgtaccagatttcagaacttatatttccacctcttccaatgtggcaccctttgcccagaaaaaagccaggaatgtatcgagggaatgg

SEQ ID NO: 445440 - DNA, 120 bp, Artificial Sequence
  ENSG00000154640_7 (sequence is synthesized)
ccatcagaatcactatcctcctcctgttccatttggttatccaaatcagggaagaaaaaataaaccatatcgcccaattccagtgacatgggtacctcctcctggaatgcattgtgaccg

SEQ ID NO: 445441 - DNA, 120 bp, Artificial Sequence
  ENSG00000154640_8 (sequence is synthesized)
gaatcactggattaatcctcacatgttagcacctcactaacttcgtttttgattgtgttggtgtcatgttgagaaaaaggtagaataaaccttactacacattaaaagttaaaagttctt

SEQ ID NO: 445442 - DNA, 120 bp, Artificial Sequence
  ENSG00000154640_9 (sequence is synthesized)
actaatagtagtgaagttagatgggccaaaccatcaaacttatttttatagaagttattgagaataatctttcttaaaaaatatatgcactttagatattgatatagtttgagaaatttt

SEQ ID NO: 445443 - DNA, 120 bp, Artificial Sequence
  ENSG00000154640_10 (sequence is synthesized)
attaaagttagtcaagtgcctaagtttttaatattggacttgagtatttatatattgtgcatcaactctgttggatacgagaacactgtagaagtggacgatttgttctagcacctttga

SEQ ID NO: 445444 - DNA, 120 bp, Artificial Sequence
  ENSG00000154640_11 (sequence is synthesized)
gaatttactttatggagcgtatgtaagttatttatatacaaggaaatctattttatgtcgttgtttaagagaattgtgtgaaatcatgtagttgcaaataaaaaatagtttgaggcatga

SEQ ID NO: 445445 - DNA, 120 bp, Artificial Sequence
  ENSG00000154640_12 (sequence is synthesized)
gatatgctcctaggttctctaccagggtatttttttattactattttattactcaccttggcaagtatgaatagatattacggcgtttatgattaaattcatttaaatccattaacgtaa

SEQ ID NO: 445446 - DNA, 120 bp, Artificial Sequence
  ENSG00000154640_13 (sequence is synthesized)
ttttttttttaggaattagtagaaagaaaataagggaaagaaaatggggttatgtttatgaatacttaaatagaccagaagtagaaaactgtggtttgcttgctggcattgagctgtatt

SEQ ID NO: 445447 - DNA, 120 bp, Artificial Sequence
  ENSG00000154640_14 (sequence is synthesized)
aggatattaaatgtgtagggtcaagttctgtgatgattcaatctttgccttgtattgatggcatgtccagatctctttgtttttatggacattttttgctttgctgatgtgacttcaaga

SEQ ID NO: 445448 - DNA, 120 bp, Artificial Sequence
  ENSG00000154640_15 (sequence is synthesized)
atcactggtatccagaaaaaccatcgaaaggacaggcctacaggtaaaggattagattggattaagcagaggctgatcaacccctgaggtgggttcaaggccggatgattgaagggtgtg

SEQ ID NO: 445449 - DNA, 120 bp, Artificial Sequence
  ENSG00000154640_16 (sequence is synthesized)
cagaccatgcctacaggtgtttcatctgcaaaatatagaactctggggtgtttgtatattttctccttactcattttaaaacaagtatttgttggcggagtggtggagtcccactgcctg

SEQ ID NO: 445450 - DNA, 120 bp, Artificial Sequence
  ENSG00000154642_0 (sequence is synthesized)
agtggaggaacccgagccgcacggaacggcggtggtggcccgcggagccggacggggcactatgaacgaagaggagcagtttgtaaacattgatttgaatgatgacaacatttgcagtgt

SEQ ID NO: 445451 - DNA, 120 bp, Artificial Sequence
  ENSG00000154642_1 (sequence is synthesized)
ttgtaaactgggaacagacaaagaaacactctccttctgccacatttgttttgagctaaatattgagggggtaccaaagtctgatctcttgcacaccaaatcattaaggggccataaaga

SEQ ID NO: 445452 - DNA, 120 bp, Artificial Sequence
  ENSG00000154642_2 (sequence is synthesized)
ctgctttgaaaaataccatttaattgcaaaccagggttgtcctcgatctaagctttcaaaaagtacttatgaagaagttaaaaccattttgagtaagaagataaactggattgtgcagta

SEQ ID NO: 445453 - DNA, 120 bp, Artificial Sequence
  ENSG00000154642_3 (sequence is synthesized)
tgcacaaaataaggatctggattcagattctgaatgttctaaaaacccccagcatcatctgtttaatttcaggcataagccagaagaaaaattactcccacagtttgactcccaagtacc

SEQ ID NO: 445454 - DNA, 120 bp, Artificial Sequence
  ENSG00000154642_4 (sequence is synthesized)
aaaatattctgcaaaatggatagatggaagtgcaggtggcatctctaactgtacacaaagaattttggagcagagggaaaatacagactttggactttctatgttacaagattcaggtgc

SEQ ID NO: 445455 - DNA, 120 bp, Artificial Sequence
  ENSG00000154642_5 (sequence is synthesized)
cactttatgtcgtaacagtgtattgtggcctcatagtcacaaccaggcacagaaaaaagaagagacaatctctagtccagaggctaatgtccagacccagcatccacattacagcagaga

SEQ ID NO: 445456 - DNA, 120 bp, Artificial Sequence
  ENSG00000154642_6 (sequence is synthesized)
ggaattgaattcgatgactcttggtgaggtagagcaactgaatgcaaagctcctacagcaaatccaggaagtttttgaagagttaactcaccaagtgcaagaaaaagattctttggcctc

SEQ ID NO: 445457 - DNA, 120 bp, Artificial Sequence
  ENSG00000154642_7 (sequence is synthesized)
acagctccatgtccgccacgttgccatcgaacagcttctgaagaactgttctaagttaccatgtctgcaagtagggcgaacaggaatgaagtcgcacctacccataaacaactgacctaa

SEQ ID NO: 445458 - DNA, 120 bp, Artificial Sequence
  ENSG00000154642_8 (sequence is synthesized)
acagacttacttcgtatgccctgccctttattggtctcccagacatgcaaactttgaagaagtttgaagaaagttgtggtccgtttttttatggtcattaaatttgccaaacataaggca

SEQ ID NO: 445459 - DNA, 120 bp, Artificial Sequence
  ENSG00000154642_9 (sequence is synthesized)
gtatttaacatctttgtcaaataaagcagatcattatactctagtcttctagggctaatcattttggctcatttggggactcttttttcccagaattactaaacaaattttatcacatgt

SEQ ID NO: 445460 - DNA, 120 bp, Artificial Sequence
  ENSG00000154642_10 (sequence is synthesized)
gactacttaaatatactgttacagtgtcattttattaaacattttaattcacctgtcaaaacaacagattaactccttagtgtaaactactagagataatttttaagagggaaatggaat

SEQ ID NO: 445461 - DNA, 120 bp, Artificial Sequence
  ENSG00000154642_11 (sequence is synthesized)
tcatatcacctcttatttattatgagcaatattttaatataaaaattttatatgtgaaaatgctattttaggtactttgccattctctttataaatgtgtatttgagtggttctgtatat

SEQ ID NO: 445462 - DNA, 120 bp, Artificial Sequence
  ENSG00000154642_12 (sequence is synthesized)
ttatttacattatcatgtgtgaatatgttcacccatatttcaggtcactgcattttattctcttaatacaatgttttcacaacggttaccttgctttccaaagataaatatattttggat

SEQ ID NO: 445463 - DNA, 120 bp, Artificial Sequence
  ENSG00000154642_13 (sequence is synthesized)
tagaaatctgagttgttttaatttctaatacctcttgtaaaagaagaattaataactttttaaagcagtattcaggtaaatacaatacattattttgttttctaacaaaagcagttctta

SEQ ID NO: 445464 - DNA, 120 bp, Artificial Sequence
  ENSG00000154642_14 (sequence is synthesized)
gttcaggaagaaaagactaatctggcttctatgtcaatttgtctccatagaaatgaaagcctcctcttgcttctttcattattagcttcacaccagtgactgtgatgcattagaatttgg

SEQ ID NO: 445465 - DNA, 120 bp, Artificial Sequence
  ENSG00000154642_15 (sequence is synthesized)
acagagtaagtcaagcctcacttccaattcaaatataatgtctatcttcaaattgagtgtgctgtgaaattgttctgtctttgaaaaaaaaaagtaagattattttgtgtgccactttgg

SEQ ID NO: 445466 - DNA, 120 bp, Artificial Sequence
  ENSG00000154642_16 (sequence is synthesized)
gtaaagtttcaagaatacttaaactgtccaaattgtattatcaccatcattgaacttagtgctcaaagaaagcattgtgaggtatttttctaaactttagactctatagagaaatatagg

SEQ ID NO: 445467 - DNA, 120 bp, Artificial Sequence
  ENSG00000154642_17 (sequence is synthesized)
attgttctacagaagaaaagcaaaactcctaattaaaaaaaaataaacctatgtattaagagaatgttctcgtaagttgcctatgatgcttccaaagagtttttatctaacagattgtgc

SEQ ID NO: 445468 - DNA, 120 bp, Artificial Sequence
  ENSG00000154642_18 (sequence is synthesized)
caaacagctagataaattttaataatgtattacagtaaaggctataaccaatgcagaattaaaatgggctctaaattctgtttttaactcatgtttagaatgtacttatgaggtagatcc

SEQ ID NO: 445469 - DNA, 120 bp, Artificial Sequence
  ENSG00000154642_19 (sequence is synthesized)
ttgcttgaaagtatctgctgaaaagcccagtaacgtggcagcttcatgcataaagatataaatgacatttgccttaaatttggcagcctaccctggcttgggtcagattttgttgttgaa

SEQ ID NO: 445470 - DNA, 120 bp, Artificial Sequence
  ENSG00000154642_20 (sequence is synthesized)
cacaagaaagtatttaagcaaagaaacacttcagtttaattgaaaacaactttttgtaatgctgacgtgttaaattggcctgagggtattaattgatatctgttgattttgtttttcttt

SEQ ID NO: 445471 - DNA, 120 bp, Artificial Sequence
  ENSG00000154642_21 (sequence is synthesized)
gaagtataacattactttttggagggaatttttgaaagatgctttcgatttctctcaattctttaagtcatgcaaaatgaatttaaaatccagggagtatggatgcattgccttagtttt

SEQ ID NO: 445472 - DNA, 120 bp, Artificial Sequence
  ENSG00000154642_22 (sequence is synthesized)
tttactcttttttggcgtaattcagtaagattgttaccagccagtgtgtttgcacacatttgggtttgtgtttagatgagttagggacagtcataaaagttggggatatgttgcatttga

SEQ ID NO: 445473 - DNA, 120 bp, Artificial Sequence
  ENSG00000154642_23 (sequence is synthesized)
tatcaatagtagcatatttccagaatatgagccataagttgcagtcctgaatacaacagtgttatccaaagaaaggagttttctgacaaatatacatagctttgctaatgagtacggaac

SEQ ID NO: 445474 - DNA, 120 bp, Artificial Sequence
  ENSG00000154642_24 (sequence is synthesized)
aagtggatgaacgtgtgcatgtgctaaggtcttaagtgggactctgatttattccatttagatatttctacttaagctctaaaaaggagaggtgctcttaaaaaaaactttgtggtgctg

SEQ ID NO: 445475 - DNA, 120 bp, Artificial Sequence
  ENSG00000154642_25 (sequence is synthesized)
gtactcacactactttatttggatgagttcctagtaaaaaaaactttttgttgaagtattttgcacagcagtttatccaaatgtttggtaaacttataatttagtcctatgttagttttc

SEQ ID NO: 445476 - DNA, 120 bp, Artificial Sequence
  ENSG00000154642_26 (sequence is synthesized)
ttaatcaaatatgcaattactgtgtatgcaaatataagtatcaggtacagagttgagttctaacaagagaacatgaaatatcacaaatattgttttccacacttggctattctctacagt

SEQ ID NO: 445477 - DNA, 120 bp, Artificial Sequence
  ENSG00000154642_27 (sequence is synthesized)
tgttagtaatttttgagaatgttttgaagcatatctcatgtactactgtttaaaaagtggcaaaacagactgccagtcatccattactaaattttcagagcttatatgattaaggggagt

SEQ ID NO: 445478 - DNA, 120 bp, Artificial Sequence
  ENSG00000154642_28 (sequence is synthesized)
gagataagacaaatctttttcacgttcagttttataatttgacacgttaaattgagttttaaaaattagaaaagtgtttttgaccacacaggttgttctctttaaagttcagccttataa

SEQ ID NO: 445479 - DNA, 120 bp, Artificial Sequence
  ENSG00000154642_29 (sequence is synthesized)
tgaagctaaaaatcaattatgttttactttgagattatcatcttatcctttgatcctcatattaatatctaaattagtcttttttaaaaggcatgcacttgagactccagtaatagatga

SEQ ID NO: 445480 - DNA, 120 bp, Artificial Sequence
  ENSG00000154642_30 (sequence is synthesized)
ttcaggcagcagaatagtgttttgttgtgtcgttgactatgcacaatggtggagcaaagacacattcttagtttttcaaaacacatgttcattttaccacaaagtgcccatttttatata

SEQ ID NO: 445481 - DNA, 120 bp, Artificial Sequence
  ENSG00000154642_31 (sequence is synthesized)
catttaaggattattttttcaatgtcaagttcatgttagtgatttcagaaatatagtcaaaatatatagtcaaatatatcttgacaggcatcttgagatttggtttttcattttactata

SEQ ID NO: 445482 - DNA, 120 bp, Artificial Sequence
  ENSG00000154642_32 (sequence is synthesized)
tttatgactgaaaatggttttgtgttttctttatgttgtttatatattttttaccttagtgtttacactggtaaggcttgttagtccatttttgtagtttttttaaagtaagcttttaga

SEQ ID NO: 445483 - DNA, 120 bp, Artificial Sequence
  ENSG00000154642_33 (sequence is synthesized)
tctatttgtgttttaatgtttcccagtttgggttttgttttgttttggaagaatctgctttcattattaaattataaaatgtaaatgctctaaagtaggaatttttaaagagtaaattat

SEQ ID NO: 445484 - DNA, 120 bp, Artificial Sequence
  ENSG00000154642_34 (sequence is synthesized)
ttgtgtagcttattaggaggttcaggttagtgaccataaagtgggttacttgtacatgaaaatttgaaatggtaccatgtaaaattcttctattgtcaactttttctgatgtatgccagt

SEQ ID NO: 445485 - DNA, 120 bp, Artificial Sequence
  ENSG00000154642_35 (sequence is synthesized)
tcatttactgacaaatgttgttactaagtgcttattaagaagtgtaatacgctataaaaaagttaatactttttgttcagatgtaaggcaaagataattgatgccgtttcagtgtatgat

SEQ ID NO: 445486 - DNA, 120 bp, Artificial Sequence
  ENSG00000154642_36 (sequence is synthesized)
tgtatttttaacttttacgttggtgggagtaactatttgaggaaatttgtggtgagaattagtaagagataaaacccccaacagtttattcttaccaagtaaagttttgtggtcatgggg

SEQ ID NO: 445487 - DNA, 120 bp, Artificial Sequence
  ENSG00000154642_37 (sequence is synthesized)
cagggaagagtttatttaccagaatactagagccctcacacaaaataaaggtaacttggaggagggctataatgcttgcatctcagtattttcatttcacttcatcctttcataattgcc

SEQ ID NO: 445488 - DNA, 120 bp, Artificial Sequence
  ENSG00000154642_38 (sequence is synthesized)
ttgattatggtgcagtctaacctattaagcaacttctggctatggtaacattgatatgaaccatattatatcaagtctccaaaacatctagtttgttaacatacactttccctgttcttt

SEQ ID NO: 445489 - DNA, 120 bp, Artificial Sequence
  ENSG00000154642_39 (sequence is synthesized)
ttagtttgagtccacattactaatacattttaataatatttaattatttcacaattttaagtttaccaaagtaaacaaaaattcatgaagatgagtattgccctctcccaaaaaaggttt

SEQ ID NO: 445490 - DNA, 120 bp, Artificial Sequence
  ENSG00000154642_40 (sequence is synthesized)
aaagattagttgaacttccctcaactacacctaaagcaaaggggaattttagtaagtgtgtgtaccttgtttctttcagacgcatctagaatgtttttctttcaccgtacctccaaaaga

SEQ ID NO: 445491 - DNA, 78 bp, Artificial Sequence
  ENSG00000154642_41 (sequence is synthesized)
cgcatctagaatgtttttctttcaccgtacctccaaaagaggcaatttagaaagtattaagtagtgacttttgttcag

SEQ ID NO: 445492 - DNA, 120 bp, Artificial Sequence
  ENSG00000154642_42 (sequence is synthesized)
acttaatctctctggtgttagaaatttactttacaaaattgtgttaagacttttggaaaaagaaaatgaaactgctgtggtaaaaaccaagtttgtttcaaaaaagtaggcaattatttg

SEQ ID NO: 445493 - DNA, 120 bp, Artificial Sequence
  ENSG00000154642_43 (sequence is synthesized)
gctgttatattttctttgaaaactgcaataatttatatatttgtattgctctgcttgggaactgtatatatgcttgtctactatttttaattttacaacaataaaataagtattttgtta

SEQ ID NO: 445494 - DNA, 120 bp, Artificial Sequence
  ENSG00000154642_44 (sequence is synthesized)
tgaatagtgtagagatttgttaaagataaggtttctggaaatgaaggtgcagttaacagagttacgaatttaagagaaatcttttttttttaaagacccctgcaacaaccccatttttcc

SEQ ID NO: 445495 - DNA, 120 bp, Artificial Sequence
  ENSG00000154642_45 (sequence is synthesized)
taatacagaaataagtatgagtgttgactgggaaacgtgttttctggtttgagagcttattgaattgtcagattttaacagacctgtgtgttttttatattaagaagtaacataacaatt

SEQ ID NO: 445496 - DNA, 120 bp, Artificial Sequence
  ENSG00000154642_46 (sequence is synthesized)
tttttattctttcgagcctattatgcaagtatttgagtgagatgagcccgaactcttttctcaccagtatgatcttattatctggaaaaatactttaaaatttttagattaacctctttt

SEQ ID NO: 445497 - DNA, 120 bp, Artificial Sequence
  ENSG00000154642_47 (sequence is synthesized)
gagcgatgggacgaggctctcccgcccgccgggctccaggatgccgcggctctcccagctccggcttgggcccctccggcggtgcccggccggtaccgtgaagccgccgctcggccttcg

SEQ ID NO: 445498 - DNA, 120 bp, Artificial Sequence
  ENSG00000154642_48 (sequence is synthesized)
caaagatagatttatctctactttagaggaagtgaagtgtcaccctctagttggaagaaactagtccaccttatgctcagtaaatatttagggaatttatacttttaggggtaccaaagt

SEQ ID NO: 445499 - DNA, 120 bp, Artificial Sequence
  ENSG00000154645_0 (sequence is synthesized)
gctgctgctgtgatccaggaccagggcgcaccggctcagcctctcacttgtcagaggccggggaagagaagcaaagcgcaacggtgtggtccaagccggggcttctgcttcgcctctagg

SEQ ID NO: 445500 - DNA, 120 bp, Artificial Sequence
  ENSG00000154645_1 (sequence is synthesized)
acatacacgggaccccctaacttcagtcccccaaacgcgcaccctcgaagtcttgaactccagccccgcacatccacgcgcggcacaggcgcggcaggcggcaggtcccggccgaaggcg

SEQ ID NO: 445501 - DNA, 120 bp, Artificial Sequence
  ENSG00000154645_2 (sequence is synthesized)
cgaaggcgatgcgcgcagggggtcgggcagctgggctcgggcggcgggagtagggcccggcagggaggcagggaggctgcagagtcagagtcgcgggctgcgccctgggcagaggccgcc

SEQ ID NO: 445502 - DNA, 120 bp, Artificial Sequence
  ENSG00000154645_3 (sequence is synthesized)
acgcaacacctgctgctgccaccgcgccgcgatgagccgcgtggtctcgctgctgctgggcgccgcgctgctctgcggccacggagccttctgccgccgcgtggtcagcggccaaaaggt

SEQ ID NO: 445503 - DNA, 120 bp, Artificial Sequence
  ENSG00000154645_4 (sequence is synthesized)
gtgttttgctgacttcaagcatccctgctacaaaatggcctacttccatgaactgtccagccgagtgagctttcaggaggcacgcctggcttgtgagagtgagggaggagtcctcctcag

SEQ ID NO: 445504 - DNA, 120 bp, Artificial Sequence
  ENSG00000154645_5 (sequence is synthesized)
ccttgagaatgaagcagaacagaagttaatagagagcatgttgcaaaacctgacaaaacccgggacagggatttctgatggtgatttctggatagggctttggaggaatggagatgggca

SEQ ID NO: 445505 - DNA, 120 bp, Artificial Sequence
  ENSG00000154645_6 (sequence is synthesized)
aacatctggtgcctgcccagatctctaccagtggtctgatggaagcaattcccagtaccgaaactggtacacagatgaaccttcctgcggaagtgaaaagtgtgttgtgatgtatcacca

SEQ ID NO: 445506 - DNA, 120 bp, Artificial Sequence
  ENSG00000154645_7 (sequence is synthesized)
accaactgccaatcctggccttgggggtccctacctttaccagtggaatgatgacaggtgtaacatgaagcacaattatatttgcaagtatgaaccagagattaatccaacagcccctgt

SEQ ID NO: 445507 - DNA, 120 bp, Artificial Sequence
  ENSG00000154645_8 (sequence is synthesized)
agaaaagccttatcttacaaatcaaccaggagacacccatcagaatgtggttgttactgaagcaggtataattcccaatctaatttatgttgttataccaacaatacccctgctcttact

SEQ ID NO: 445508 - DNA, 120 bp, Artificial Sequence
  ENSG00000154645_9 (sequence is synthesized)
gatactggttgcttttggaacctgttgtttccagatgctgcataaaagtaaaggaagaacaaaaactagtccaaaccagtctacactgtggatttcaaagagtaccagaaaagaaagtgg

SEQ ID NO: 445509 - DNA, 120 bp, Artificial Sequence
  ENSG00000154645_10 (sequence is synthesized)
ttggttccagaattttgtaattctggatctgtataaggaatggcatcagaacaatagcttggaatggcttgaaatcacaaaggatctgcaagatgaactgtaagctcccccttgaggcaa

SEQ ID NO: 445510 - DNA, 120 bp, Artificial Sequence
  ENSG00000154645_11 (sequence is synthesized)
atattaaagtaatttttatatgtctattatttcatttaaagaatatgctgtgctaataatggagtgagacatgcttattttgctaaaggatgcacccaaacttcaaacttcaagcaaatg

SEQ ID NO: 445511 - DNA, 120 bp, Artificial Sequence
  ENSG00000154645_12 (sequence is synthesized)
aaatggacaatgcagataaagttgttatcaacacgtcgggagtatgtgtgttagaagcaattccttttatttctttcacctttcataagttgttatctagtcaatgtaatgtatattgta

SEQ ID NO: 445512 - DNA, 120 bp, Artificial Sequence
  ENSG00000154645_13 (sequence is synthesized)
ttgaaatttacagtgtgcaaaagtattttacctttgcataagtgtttgataaaaatgaactgttctaatatttatttttatggcatctcatttttcaatacatgctcttttgattaaaga

SEQ ID NO: 445513 - DNA, 120 bp, Artificial Sequence
  ENSG00000154645_14 (sequence is synthesized)
aacttattactgttgtcaactgaattcacacacacacaaatatagtaccatagaaaaagtttgttttctcgaaataattcatctttcagcttctctgcttttggtcaatgtctaggaaat

SEQ ID NO: 445514 - DNA, 120 bp, Artificial Sequence
  ENSG00000154645_15 (sequence is synthesized)
ctcttcagaaataagaagctatttcattaagtgtgatataaacctcctcaaacattttacttagaggcaaggattgtctaatttcaattgtgcaagacatgtgccttataattattttta

SEQ ID NO: 445515 - DNA, 120 bp, Artificial Sequence
  ENSG00000154645_16 (sequence is synthesized)
gcttaaaattaaacagattttgtaataatgtaactttgttaataggtgcataaacactaatgcagtcaatttgaacaaaagaagtgacatacacaatataaatcatatgtcttcacacgt

SEQ ID NO: 445516 - DNA, 120 bp, Artificial Sequence
  ENSG00000154645_17 (sequence is synthesized)
tgcctatataatgagaagcagctctctgagggttctgaaatcaatgtggtccctctcttgcccactaaacaaagatggttgttcggggtttgggattgacactggaggcagatagttgca

SEQ ID NO: 445517 - DNA, 120 bp, Artificial Sequence
  ENSG00000154645_18 (sequence is synthesized)
aagttagtctaaggtttccctagctgtatttagcctctgactatattagtatacaaagaggtcatgtggttgagaccaggtgaatagtcactatcagtgtggagacaagcacagcacaca

SEQ ID NO: 445518 - DNA, 120 bp, Artificial Sequence
  ENSG00000154645_19 (sequence is synthesized)
gacattttaggaaggaaaggaactacgaaatcgtgtgaaaatgggttggaacccatcagtgatcgcatattcattgatgagggtttgcttgagatagaaaatggtggctcctttctgtct

SEQ ID NO: 445519 - DNA, 120 bp, Artificial Sequence
  ENSG00000154645_20 (sequence is synthesized)
tatctcctagtttcttcaatgcttacgccttgttcttctcaagagaaagttgtaactctctggtcttcatatgtccctgtgctccttttaaccaaataaagagttcttgtttctgaagaa

SEQ ID NO: 445520 - DNA, 120 bp, Artificial Sequence
  ENSG00000154645_21 (sequence is synthesized)
ctgtggtgtttttcccccgctcctctggctgccttcctgatggatctctgtggtcccaggcaggaatggcctgcttggggacccagcgagctcccaaggcctttcctgctgcttcctcta

SEQ ID NO: 445521 - DNA, 120 bp, Artificial Sequence
  ENSG00000154645_22 (sequence is synthesized)
tccctgtgttttgcttggctctctaaattgactcagctccaggacatcaggaccccaggttctctggtcttgggactctgagacttgcaccaggaatcctgcccaggctctcaggccttt

SEQ ID NO: 445522 - DNA, 120 bp, Artificial Sequence
  ENSG00000154645_23 (sequence is synthesized)
gcttgaagatggcagatcgtgggacttctcagcctccataattgagtgagccaattccctgaatacaacaagaagatgcccatctgtagaccaggaggtggtccctccccagaaactgga

SEQ ID NO: 445523 - DNA, 120 bp, Artificial Sequence
  ENSG00000154646_0 (sequence is synthesized)
gccaaagagacatacacaactcacttacactgactggtatgcatgtagacaggtggttgttgctttacacatctttaaaaatttgagagatttttctcttcagttggtagaattatttat

SEQ ID NO: 445524 - DNA, 120 bp, Artificial Sequence
  ENSG00000154646_1 (sequence is synthesized)
attctctttcagttcttaaattagcaagccttcaaaaccaaaaatggggtcgaaaagaggcatatcttctaggcatcattctctcagctcctatgaaatcatgtttgcagctctctttgc

SEQ ID NO: 445525 - DNA, 120 bp, Artificial Sequence
  ENSG00000154646_2 (sequence is synthesized)
catattggtagtgctctgtgctggattaattgcagtatcctgcctgacaatcaaggaatcccaacgaggtgcagcacttggacagagtcatgaagccagagcgacatttaaaataacatc

SEQ ID NO: 445526 - DNA, 120 bp, Artificial Sequence
  ENSG00000154646_3 (sequence is synthesized)
cggagttacatataatcctaatttgcaagacaaactctcagtggatttcaaagttcttgcttttgaccttcagcaaatgatagatgagatctttctatcaagcaatctgaagaatgaata

SEQ ID NO: 445527 - DNA, 120 bp, Artificial Sequence
  ENSG00000154646_4 (sequence is synthesized)
taagaactcaagagttttacaatttgaaaatggcagcattatagtcgtatttgaccttttctttgcccagtgggtgtcagatgaaaatgtaaaagaagaactgattcaaggccttgaagc

SEQ ID NO: 445528 - DNA, 120 bp, Artificial Sequence
  ENSG00000154646_5 (sequence is synthesized)
aaataaatccagccaactggtcactttccatattgatttgaacagcgttgatatcctagacaagctaacaaccaccagtcatctggcaactccaggaaatgtctcaatagagtgcctgcc

SEQ ID NO: 445529 - DNA, 120 bp, Artificial Sequence
  ENSG00000154646_6 (sequence is synthesized)
tggttcaagtccttgtactgatgctctaacgtgtataaaagctgatttattttgtgatggagaagtaaactgtccagatggttctgacgaagacaataaaatgtgtgccacagtttgtga

SEQ ID NO: 445530 - DNA, 120 bp, Artificial Sequence
  ENSG00000154646_7 (sequence is synthesized)
tggaagatttttgttaactggatcatctgggtctttccaggctactcattatccaaaaccttctgaaacaagtgttgtctgccagtggatcatacgtgtaaaccaaggactttccattaa

SEQ ID NO: 445531 - DNA, 120 bp, Artificial Sequence
  ENSG00000154646_8 (sequence is synthesized)
actgagcttcgatgattttaatacatattatacagatatattagatatttatgaaggtgtaggatcaagcaagattttaagagcttctatttgggaaactaatcctggcacaataagaat

SEQ ID NO: 445532 - DNA, 120 bp, Artificial Sequence
  ENSG00000154646_9 (sequence is synthesized)
tttttccaaccaagttactgccacctttcttatagaatctgatgaaagtgattatgttggctttaatgcaacatatactgcatttaacagcagtgagcttaataattatgagaaaattaa

SEQ ID NO: 445533 - DNA, 120 bp, Artificial Sequence
  ENSG00000154646_10 (sequence is synthesized)
ttgtaactttgaggatggcttttgtttctgggtccaggatctaaatgatgataatgaatgggaaaggattcagggaagcaccttttctccttttactggacccaattttgaccacacttt

SEQ ID NO: 445534 - DNA, 120 bp, Artificial Sequence
  ENSG00000154646_11 (sequence is synthesized)
tggcaatgcttcaggattttacatttctaccccaactggaccaggagggagacaagaacgagtggggcttttaagcctccctttggaccccactttggagccagcttgccttagtttctg

SEQ ID NO: 445535 - DNA, 120 bp, Artificial Sequence
  ENSG00000154646_12 (sequence is synthesized)
gtatcatatgtatggtgaaaatgtccataaattaagcattaatatcagcaatgaccaaaatatggagaagacagttttccaaaaggaaggaaattatggagacaattggaattatggaca

SEQ ID NO: 445536 - DNA, 120 bp, Artificial Sequence
  ENSG00000154646_13 (sequence is synthesized)
agtaaccctaaatgaaacagttaaatttaaggttgcttttaatgcttttaaaaacaagatcctgagtgatattgcgttggatgacattagcctaacatatgggatttgcaatgggagtct

SEQ ID NO: 445537 - DNA, 120 bp, Artificial Sequence
  ENSG00000154646_14 (sequence is synthesized)
ttatccagaaccaactttggtgccaactcctccaccagaacttcctacggactgtggaggaccttttgagctgtgggagccaaatacaacattcagttctacgaactttccaaacagcta

SEQ ID NO: 445538 - DNA, 120 bp, Artificial Sequence
  ENSG00000154646_15 (sequence is synthesized)
ccctaatctggctttctgtgtttggattttaaatgcacaaaaaggaaagaatatacaacttcattttcaagaatttgacttagaaaatattaacgatgtagttgaaataagagatggtga

SEQ ID NO: 445539 - DNA, 120 bp, Artificial Sequence
  ENSG00000154646_16 (sequence is synthesized)
gagggtttaaagcaaactttactactggctatcacttggggattccagagccatgcaaggcagaccattttcaatgtaaaaatggagagtgtgttccactggtgaatctctgtgacggtc

SEQ ID NO: 445540 - DNA, 120 bp, Artificial Sequence
  ENSG00000154646_17 (sequence is synthesized)
atctgcactgtgaggatggctcagatgaagcagattgtgtgcgttttttcaatggcacaacgaacaacaatggtttagtgcggttcagaatccagagcatatggcatacagcttgtgctg

SEQ ID NO: 445541 - DNA, 120 bp, Artificial Sequence
  ENSG00000154646_18 (sequence is synthesized)
agaactggaccacccagatttcaaatgatgtttgtcaactgctgggactagggagtggaaactcatcaaagccaatcttccctaccgatggtggaccatttgtcaaattaaacacagcac

SEQ ID NO: 445542 - DNA, 120 bp, Artificial Sequence
  ENSG00000154646_19 (sequence is synthesized)
ctgatggccacttaatactaacacccagtcaacagtgtttacaggattccttgattcggttacagtgtaaccataaatcttgtggaaaaaaactggcagctcaagacatcaccccaaaga

SEQ ID NO: 445543 - DNA, 120 bp, Artificial Sequence
  ENSG00000154646_20 (sequence is synthesized)
ttgttggaggaagtaatgccaaagaaggggcctggccctgggttgtgggtctgtattatggcggccgactgctctgcggcgcatctctcgtcagcagtgactggctggtgtccgccgcac

SEQ ID NO: 445544 - DNA, 120 bp, Artificial Sequence
  ENSG00000154646_21 (sequence is synthesized)
actgcgtgtatgggagaaacttagagccatccaagtggacagcaatcctaggcctgcatatgaaatcaaatctgacctctcctcaaacagtccctcgattaatagatgaaattgtcataa

SEQ ID NO: 445545 - DNA, 120 bp, Artificial Sequence
  ENSG00000154646_22 (sequence is synthesized)
accctcattacaataggcgaagaaaggacaacgacattgccatgatgcatctggaatttaaagtgaattacacagattacatacaacctatttgtttaccggaagaaaatcaagtttttc

SEQ ID NO: 445546 - DNA, 120 bp, Artificial Sequence
  ENSG00000154646_23 (sequence is synthesized)
ctccaggaagaaattgttctattgctggttgggggacggttgtatatcaaggtactactgcaaacatattgcaagaagctgatgttcctcttctatcaaatgagagatgccaacagcaga

SEQ ID NO: 445547 - DNA, 120 bp, Artificial Sequence
  ENSG00000154646_24 (sequence is synthesized)
tgccagaatataacattactgaaaatatgatatgtgcaggctatgaagaaggaggaatagattcttgtcagggggattcaggaggaccattaatgtgccaagaaaacaacaggtggttcc

SEQ ID NO: 445548 - DNA, 120 bp, Artificial Sequence
  ENSG00000154646_25 (sequence is synthesized)
ttgctggtgtgacctcatttggatacaagtgtgccctgcctaatcgccccggagtgtatgccagggtctcaaggtttaccgaatggatacaaagttttctacattagcgcatttcttaaa

SEQ ID NO: 445549 - DNA, 120 bp, Artificial Sequence
  ENSG00000154646_26 (sequence is synthesized)
ctaaacaggaaagtcgcattattttcccattctactctagaaagcatggaaattaagtgtttcgtacaaaaattttaaaaagttaccaaaggtttttattcttacctatgtcaatgaaat

SEQ ID NO: 445550 - DNA, 120 bp, Artificial Sequence
  ENSG00000154646_27 (sequence is synthesized)
gctagggggccagggaaacaaaattttaaaaataataaaattcaccatagcaatacagaataactttaaaataccattaaatacatttgtatttcattgtgaacaggtatttcttcacag

SEQ ID NO: 445551 - DNA, 120 bp, Artificial Sequence
  ENSG00000154646_28 (sequence is synthesized)
atctcatttttaaaattcttaatgattatttttattacttactgttgtttaaagggatgttattttaaagcatataccatacacttaagaaatttgagcagaatttaaaaaagaaagaaa

SEQ ID NO: 445552 - DNA, 120 bp, Artificial Sequence
  ENSG00000154646_29 (sequence is synthesized)
ataaattgtttttcccaaagtatgtcactgttggaaataaactgccataaattttctagttccagtttagtttgctgctattagcagaaactcaattgtttctctgtcttttctatcaaa

SEQ ID NO: 445553 - DNA, 120 bp, Artificial Sequence
  ENSG00000154646_30 (sequence is synthesized)
attttcaacatatgcataaccttagtattttcccaaccaatagaaactatttattgtaagcttatgtcacaggcctggactaaattgattttacgttcctcttaaataagttaattaaat

SEQ ID NO: 445554 - DNA, 120 bp, Artificial Sequence
  ENSG00000154646_31 (sequence is synthesized)
aaaagataaattaactgatatagtcattgtatattagataaattttacctatttatttcaagcaagtatttttaagtctcaagaaaataatcagacataccaaagaaatgcacctattgc

SEQ ID NO: 445555 - DNA, 120 bp, Artificial Sequence
  ENSG00000154646_32 (sequence is synthesized)
aaatcctggtcttggtttatgtgtgttacagtggatatttctaatatatgaaaacttatttagacacagctgaatcacccatgagaaggtcaaatatgtgtaataaatgaatttgcttca

SEQ ID NO: 445556 - DNA, 76 bp, Artificial Sequence
  ENSG00000154646_33 (sequence is synthesized)
cagcacttggacagagtcatgaagccagagcgacatttaaaataacatccggagttacatataatcctaatttgca

SEQ ID NO: 445557 - DNA, 120 bp, Artificial Sequence
  ENSG00000154646_34 (sequence is synthesized)
cactttccatattgatttgaacagcgttgatatcctagcatctttggagaatttttctacagtaagccctgcaacaacttcagacaagctaacaaccaccagtcatctggcaactccagg

SEQ ID NO: 445558 - DNA, 120 bp, Artificial Sequence
  ENSG00000154646_35 (sequence is synthesized)
ttgaaggtgactgaatagaacaatagatagatctcacatgagtgagaggaattctacagcaggtagtctttgcctttgaactgcagcatgaactctcctctgggtctcccacctgccagc

SEQ ID NO: 445559 - DNA, 120 bp, Artificial Sequence
  ENSG00000154654_0 (sequence is synthesized)
actttgcgaggaggagcgcgcgggctgcgggcggctggggcaccgcgggagcggcggcggcggctctagcagaggcggccggggcagcgaaaggttctctctccagggctggacttaata

SEQ ID NO: 445560 - DNA, 120 bp, Artificial Sequence
  ENSG00000154654_1 (sequence is synthesized)
actttgaaactgtccaccggtgtcacgtcctgaacatgagcctcctcctctccttctacctgctggggttgcttgtcagtagcgggcaagctcttcttcaagtgacaatttcacttagca

SEQ ID NO: 445561 - DNA, 120 bp, Artificial Sequence
  ENSG00000154654_2 (sequence is synthesized)
aagtagagcttagtgttggagaatctaaattcttcacatgtacagcgattggtgaacctgaaagtatagattggtataatcctcaaggagagaagataatttcaacacagagggtagtag

SEQ ID NO: 445562 - DNA, 120 bp, Artificial Sequence
  ENSG00000154654_3 (sequence is synthesized)
tgcaaaaggaaggtgttaggtcacggttaaccatctacaatgcaaatatagaagatgcagggatatatcgttgtcaagcaacagatgccaaaggacaaacacaagaagctacagtagttt

SEQ ID NO: 445563 - DNA, 120 bp, Artificial Sequence
  ENSG00000154654_4 (sequence is synthesized)
tggaaatttaccaaaaactcactttcagagaagtggtatctccacaagaattcaaacaaggagaagatgcagaagtggtttgccgagttagcagttcacctgcacctgctgtcagctggt

SEQ ID NO: 445564 - DNA, 120 bp, Artificial Sequence
  ENSG00000154654_5 (sequence is synthesized)
tgtatcataatgaggaagtcaccactatttccgacaatcggttcgctatgttagcaaacaataacctgcagattctcaacatcaataaaagtgatgaaggtatatacagatgtgaaggaa

SEQ ID NO: 445565 - DNA, 120 bp, Artificial Sequence
  ENSG00000154654_6 (sequence is synthesized)
gagtggaggccaggggagaaattgacttccgtgatatcattgttattgttaatgtgccgccagcaatctcaatgcctcagaaatcttttaatgccacagcagagagaggagaagaaatga

SEQ ID NO: 445566 - DNA, 120 bp, Artificial Sequence
  ENSG00000154654_7 (sequence is synthesized)
cattttcctgcagggcctcaggctctccagaacccgccatctcctggttcaggaatggcaagctcattgaagaaaatgagaagtacatattgaaagggagcaatacagaactcactgtca

SEQ ID NO: 445567 - DNA, 120 bp, Artificial Sequence
  ENSG00000154654_8 (sequence is synthesized)
ggaacataatcaatagtgatggtggtccttatgtctgcagggccacaaataaggcaggagaagatgaaaagcaagctttcctccaagtctttgtacagcctcacataatacagcttaaaa

SEQ ID NO: 445568 - DNA, 120 bp, Artificial Sequence
  ENSG00000154654_9 (sequence is synthesized)
atgaaactacatatgagaatggtcaagtcacactcgtatgtgatgcggaaggggagcctattccagaaatcacttggaaaagagctgtggatggcttcacgttcactgaaggcgataaga

SEQ ID NO: 445569 - DNA, 120 bp, Artificial Sequence
  ENSG00000154654_10 (sequence is synthesized)
gcctggacggccgtatcgaagtcaaagggcagcatggaagctcatcactgcatattaaagatgtgaagttgtcagattcagggagatatgactgtgaagctgcaagcagaattggagggc

SEQ ID NO: 445570 - DNA, 120 bp, Artificial Sequence
  ENSG00000154654_11 (sequence is synthesized)
atcaaaagagcatgtaccttgatattgaatatgcccccaagtttatatcaaaccaaacaatttattactcttgggaaggaaatcctatcaatataagttgtgatgtgaaatcgaatccac

SEQ ID NO: 445571 - DNA, 120 bp, Artificial Sequence
  ENSG00000154654_12 (sequence is synthesized)
cagcatcaattcactggagaagagataaattagtcttacctgctaaaaacacgaccaatttaaagacttatagtacaggaagaaagatgatattagagattgcacctacatctgacaatg

SEQ ID NO: 445572 - DNA, 120 bp, Artificial Sequence
  ENSG00000154654_13 (sequence is synthesized)
actttggacgctataattgcacagccactaatcatataggaacaagatttcaagaatatattcttgctttggctgacgtgccatccagtccctatggagtgaagatcatagagctgtcgc

SEQ ID NO: 445573 - DNA, 120 bp, Artificial Sequence
  ENSG00000154654_14 (sequence is synthesized)
agaccacggccaaggtttccttcaacaaaccggactcccatggaggtgtacctattcatcactatcaggtggatgtcaaagaagtagcgtcagaaatctggaaaattgtacgctcccatg

SEQ ID NO: 445574 - DNA, 120 bp, Artificial Sequence
  ENSG00000154654_15 (sequence is synthesized)
gagttcaaacaatggttgttttgaacaacctggaaccaaatacaacttatgaaatcagggttgcagctgtaaatggaaagggacaaggagactacagtaaaatagaaatcttccaaacat

SEQ ID NO: 445575 - DNA, 120 bp, Artificial Sequence
  ENSG00000154654_16 (sequence is synthesized)
taccagttcgtgaaccaagtcctccatccatacatggacagccaagcagtggaaagagctttaaactcagcatcaccaaacaggacgatggaggggcccctattttggaatacattgtga

SEQ ID NO: 445576 - DNA, 120 bp, Artificial Sequence
  ENSG00000154654_17 (sequence is synthesized)
aatatagaagtaaagataaggaagaccaatggctagagaaaaaagtgcaaggaaataaagaccacatcattttggagcatctccagtggaccatggggtatgaagttcagattacagctg

SEQ ID NO: 445577 - DNA, 120 bp, Artificial Sequence
  ENSG00000154654_18 (sequence is synthesized)
ccaatagattgggatattctgaaccgacagtttatgaattcagcatgccaccaaagcccaacattattaaagacacgctgtttaatggtcttgggcttggagcagtaattggcctgggag

SEQ ID NO: 445578 - DNA, 120 bp, Artificial Sequence
  ENSG00000154654_19 (sequence is synthesized)
ttgctgcactgctgctaattcttgtggtaacagacgtcagctgcttctttattcggcaatgtgggttgctgatgtgcatcactaggagaatgtgtggaaagaaaagtggctccagtggca

SEQ ID NO: 445579 - DNA, 120 bp, Artificial Sequence
  ENSG00000154654_20 (sequence is synthesized)
aaagtaaagaactcgaagaaggaaaagctgcatacctgaaagatggatcaaaagaaccaatagtggagatgagaacagaggatgaaagagttactaatcacgaagatgggagcccagtaa

SEQ ID NO: 445580 - DNA, 120 bp, Artificial Sequence
  ENSG00000154654_21 (sequence is synthesized)
atgagccaaatgaaaccacaccactgacagaacctgaaaaattgcctttaaaggaagaagatgggaaagaagctctaaatccagaaactatagaaattaaagtttctaacgacatcattc

SEQ ID NO: 445581 - DNA, 120 bp, Artificial Sequence
  ENSG00000154654_22 (sequence is synthesized)
aatcaaaagaagacgacagcaaagcataacaacaatattacaggggcttgaacaacactacgaagagtatttggattgcgtgaccctatgaccaaaactattccattgaccttaatttct

SEQ ID NO: 445582 - DNA, 120 bp, Artificial Sequence
  ENSG00000154654_23 (sequence is synthesized)
tgggaaacttctagcttggaatagcttgtacacatatacatatgatcaaatactcctgcccatgatccattcccttttgttattgttgttgttgttgctgttgttgttaattttgttaag

SEQ ID NO: 445583 - DNA, 120 bp, Artificial Sequence
  ENSG00000154654_24 (sequence is synthesized)
aatttcaatatcaagactgactggcaccaacactttggtattcaatttgattctatgactgaagtactggaatttattatgtggctaaagtgctctatttattaagaactatatttaata

SEQ ID NO: 445584 - DNA, 120 bp, Artificial Sequence
  ENSG00000154654_25 (sequence is synthesized)
ccaccaacaaatataggggttaaggaaaaaaaacgtgagctacatgtgtaagaaggccctgcatgtgtatgagtcctattctgggcaaatagattcttaaagtggctttcaacttcaaga

SEQ ID NO: 445585 - DNA, 120 bp, Artificial Sequence
  ENSG00000154654_26 (sequence is synthesized)
tgaaggagcttaataatggttactcattttatcaggggaatttcagggaacgtaggcgtcaaagagccagttatctttagcagatattaaaaattgaaaactttggagaactcatttcaa

SEQ ID NO: 445586 - DNA, 120 bp, Artificial Sequence
  ENSG00000154654_27 (sequence is synthesized)
gttatgattcagtgcattttcaacattgatttttgatagactgaagtgccagatcaaaattgttacccatttgaaagaatattagttgtatataaaattagattagaaagactttctaaa

SEQ ID NO: 445587 - DNA, 120 bp, Artificial Sequence
  ENSG00000154654_28 (sequence is synthesized)
tctctatctctttatatatgtcctattcattcacaatggattatacaaaaaaaagtgtattgcaagtgaaataatattgatttctgccctcagcttcaaataaagtaaattgaaatggga

SEQ ID NO: 445588 - DNA, 120 bp, Artificial Sequence
  ENSG00000154654_29 (sequence is synthesized)
tggtgtcttgatatatttataaatatgtgattatcatttatttttaaaataatttatcaaaaaacaagtctttagtgttcaaatacttcaaatcatatcctcagatatatttttagccca

SEQ ID NO: 445589 - DNA, 120 bp, Artificial Sequence
  ENSG00000154654_30 (sequence is synthesized)
atttttagcccatggttttatataatctttaagaactaattttaccactgttataggttcaccattaaatataattggctaataaaaattttaaggttgactaaattaagaagaaattat

SEQ ID NO: 445590 - DNA, 120 bp, Artificial Sequence
  ENSG00000154654_31 (sequence is synthesized)
ttaacattttaatgtgccataaaagagtaaatgataaataattaaatgccactatgtgttctattccggatgttctagctagaagtcattttaagattttgataaacaactttggttgaa

SEQ ID NO: 445591 - DNA, 120 bp, Artificial Sequence
  ENSG00000154654_32 (sequence is synthesized)
gaaattccttaagtattcaacacaaactttctaatatcttttgttagggttataccagaataaaatgcttctttacttccaagctatgcaagctcccagaggtaatagagtgacacatga

SEQ ID NO: 445592 - DNA, 120 bp, Artificial Sequence
  ENSG00000154654_33 (sequence is synthesized)
ttaacttatatgtaaggtttaaaaaagtatttatcattataaacatacataccatttgggagcaggtttattaaccttgagagccaaaggtttccttaggccctgtaacattcagaacct

SEQ ID NO: 445593 - DNA, 120 bp, Artificial Sequence
  ENSG00000154654_34 (sequence is synthesized)
ttggtgtttcaggtggtattatagctcaaatagtgacaggacagggaatgcgttccaaaggaatattggagcaattttaacattgcagaaacctgctctgggtgtgtctctctgtagaga

SEQ ID NO: 445594 - DNA, 120 bp, Artificial Sequence
  ENSG00000154654_35 (sequence is synthesized)
taacctgatgattattaaatgtaaaattaaggcaactcatgaatatttttatttacaaagtgcttgaaactcagccaaggagagaaaactaagtacttttatataattcatcacttttct

SEQ ID NO: 445595 - DNA, 120 bp, Artificial Sequence
  ENSG00000154654_36 (sequence is synthesized)
ggctacagcaggacagaatatgaccatcttcgtttgaaggcaccaaatcgtcgcagtgtctttgccataagttgcagggttaaatgcgggaatctctccttgcgttcctgtctggcgtat

SEQ ID NO: 445596 - DNA, 120 bp, Artificial Sequence
  ENSG00000154654_37 (sequence is synthesized)
tctgaagaaaagaacagaattcttgtgcctacctaagaatttgagtagtgtctaaacaaacaaagcagttaggtcattttaactgacttgattatccaactggtctttgacagatttgac

SEQ ID NO: 445597 - DNA, 120 bp, Artificial Sequence
  ENSG00000154654_38 (sequence is synthesized)
tgttcatatttagtttatgtttgtctgatcatccagtttgctttattttgctgtgttttattttgttgtttgttttgttttgtaccagtgtactaaaactagtcaaaatacttgaattag

SEQ ID NO: 445598 - DNA, 120 bp, Artificial Sequence
  ENSG00000154654_39 (sequence is synthesized)
tttgtttgtgcaaagtgtacaagcttagtaaagtgtccatgaagcaatagccatgaatgctaattatttctaaatagggccacatggttttaaactaatgatggtgaaagaaatacgatg

SEQ ID NO: 445599 - DNA, 120 bp, Artificial Sequence
  ENSG00000154654_40 (sequence is synthesized)
actgagaaagtcatttcgcatgtttactattgttatattcgtgctttacttcaagagtgcagaaatcataataaataacaaactatttttgtgttttctcaatgtgacatttctgtttct

SEQ ID NO: 445600 - DNA, 80 bp, Artificial Sequence
  ENSG00000154654_41 (sequence is synthesized)
gttttctcaatgtgacatttctgtttctctcatttattcggattttccttgtaaagaaattgacatatatttcatatata

SEQ ID NO: 445601 - DNA, 120 bp, Artificial Sequence
  ENSG00000154654_42 (sequence is synthesized)
tgtggagtaatgatctgaaattaacagataatctgaagctaattatattcagactatttcaagtgcactgtttcagttgcccgggtggtccttacctcttgtccttgaaatccatgccat

SEQ ID NO: 445602 - DNA, 120 bp, Artificial Sequence
  ENSG00000154654_43 (sequence is synthesized)
gctgaagcaaggcaatactgtgataaagtattttttttaatatttcaatggaatgctccaaatgatttataaaaatttcaaaataaaagatggcttgtagtaaattgtaaaatatgagta

SEQ ID NO: 445603 - DNA, 120 bp, Artificial Sequence
  ENSG00000154654_44 (sequence is synthesized)
agtagaactgaaataacctgtttcattcttattctagattaaacaaacatatacatataaccatataaatgttatttttattgtctgagagtactcttaaatattagtataaagtgtcaa

SEQ ID NO: 445604 - DNA, 120 bp, Artificial Sequence
  ENSG00000154654_45 (sequence is synthesized)
attgactgaatataagtactgttaaaataatttgaaccctatgatattttaaaccaagaggcaaagatatcacctaaaacttggtatttcttgataggttaggtgcaattaggcagtgac

SEQ ID NO: 445605 - DNA, 120 bp, Artificial Sequence
  ENSG00000154654_46 (sequence is synthesized)
aatctgtattcaacaacatataagaggaaagagtaatatcagaattttgacacaaattaatgtgtcaacatattttacaatgattgtcaaaggaatttaagaattgtatttttaaagatt

SEQ ID NO: 445606 - DNA, 120 bp, Artificial Sequence
  ENSG00000154654_47 (sequence is synthesized)
tatttattatttttgtgggctaagacattgccattctattgatactaatgtctaacattaatgtttcttgttttcttttatttttaatattaataactataaaagcatttttcaaaggct

SEQ ID NO: 445607 - DNA, 120 bp, Artificial Sequence
  ENSG00000154654_48 (sequence is synthesized)
atttgatccagcacacttcatatggatcttagtctttgaattaaatatttatataaatagattttattaatcaaattatttatttgtgtgccaacaattaattgtaactttatgatcata

SEQ ID NO: 445608 - DNA, 120 bp, Artificial Sequence
  ENSG00000154654_49 (sequence is synthesized)
tctttgtttatgcttcttattttaaataattaagatgtatctgtgccttttaattagcatgacagtctgctttattaaaagaaaaaaactacaattaacatcattactagtatattttgc

SEQ ID NO: 445609 - DNA, 120 bp, Artificial Sequence
  ENSG00000154654_50 (sequence is synthesized)
ttgcttagatttgagatactcaaatgatgctgtcttatttacagtcagtaattaagttcaattcaaactattttaccttgaatataaaatctaaatataataaactatactgtataattt

SEQ ID NO: 445610 - DNA, 120 bp, Artificial Sequence
  ENSG00000154654_51 (sequence is synthesized)
taattcatgtcaaaacaattctttttatacacacacatgaaatattcttaatctgttctgtattgtttttctaaacaataaatacattctagatattgttgaaattaaattttgccagtt

SEQ ID NO: 445611 - DNA, 120 bp, Artificial Sequence
  ENSG00000154654_52 (sequence is synthesized)
gtaagacaaagacaacagataacttttgaaaatcaagcaaattactatggtgtttcttgggtcttcattattccatttatatatattttttatttcgaataataaatcaacctttatttt

SEQ ID NO: 445612 - DNA, 120 bp, Artificial Sequence
  ENSG00000154654_53 (sequence is synthesized)
tggcaataagattatcactgacgaaaatatgtacagttcaagaagtagaaataatattttccattagttaatttaggaaatattggaatagcatattataattatttatgaggttcccaa

SEQ ID NO: 445613 - DNA, 120 bp, Artificial Sequence
  ENSG00000154654_54 (sequence is synthesized)
tgttgtttttcacagaaaataaggtaaacattcaacttaaatcccccatgaagttttttcatgctcatactcataatcattatcacataatgtgcttattcaacaaactttgtatctgga

SEQ ID NO: 445614 - DNA, 120 bp, Artificial Sequence
  ENSG00000154654_55 (sequence is synthesized)
tatatttttaacaataagtttgttagcattatttatttatctttagagagaaaatatttgcatctgtttatttaccctttgaagcattaatacttagtcactcacattgaaattgcatat

SEQ ID NO: 445615 - DNA, 120 bp, Artificial Sequence
  ENSG00000154654_56 (sequence is synthesized)
ggatgtatcaacataggctaaaattaaattatggatgtcgcagaaatgaaatacttcatcttagaaggtaaaattttcaagaaagtattttattcatggacttaataatgtcttaagatg

SEQ ID NO: 445616 - DNA, 120 bp, Artificial Sequence
  ENSG00000154654_57 (sequence is synthesized)
aaacaattttatgtccaaatgagaaatttataaaaagacccacatatagtagttgctgaacaaacataattttcttccagctcccatccttcctttttgaaaaattgaatttacccatgt

SEQ ID NO: 445617 - DNA, 120 bp, Artificial Sequence
  ENSG00000154654_58 (sequence is synthesized)
acccatgtagatgcagctatttacaattatacaagaatgcgaatagattaattatatcttctcatataaaggcaaagaattttatattatatataatgctaaatatttatttgataacac

SEQ ID NO: 445618 - DNA, 120 bp, Artificial Sequence
  ENSG00000154654_59 (sequence is synthesized)
tagtttattactttaggattttatctataacataaatatattatttgttattacctctttaaattttcattttatacaatttttgagattctggccacacaacattcagaattattgctc

SEQ ID NO: 445619 - DNA, 120 bp, Artificial Sequence
  ENSG00000154654_60 (sequence is synthesized)
tattgctcatgtaaatttaaatattgctacttattttttttcttttctgaaatgaaaacatgaatcttttggcatctgtttttagcctcccatggaagacagtaagcaaaaccatcactg

SEQ ID NO: 445620 - DNA, 120 bp, Artificial Sequence
  ENSG00000154654_61 (sequence is synthesized)
ttggagaatttcaaatcacaacccgacataggagagtagagaaacaaagaaatgagtggatctagaaaggcaaactgaattgctatatttggaatagctaagaaggacctgactttgaga

SEQ ID NO: 445621 - DNA, 120 bp, Artificial Sequence
  ENSG00000154654_62 (sequence is synthesized)
agtgctagaccagggactaggaacgttgcttagataaaaattatggccgattacactgatgcgaaggagaaaacagtgtaacacagaggagaaagttaacagagatagaatctatgattt

SEQ ID NO: 445622 - DNA, 120 bp, Artificial Sequence
  ENSG00000154654_63 (sequence is synthesized)
aattttgcaaatagtttttttagagaacaacatgcatactataaaagaaatgatactattaagaacaaacctacttgttccaactcttaaagaaatattcatggtttagcatttgcctct

SEQ ID NO: 445623 - DNA, 120 bp, Artificial Sequence
  ENSG00000154654_64 (sequence is synthesized)
aaaccctgttagaaatatgtgaagttagaaataaaggtttttttaaaaaaaaagcttttttggtatgtgaactgtatgctgtgctcagtatgtactgaaacatactatcttttattttct

SEQ ID NO: 445624 - DNA, 120 bp, Artificial Sequence
  ENSG00000154654_65 (sequence is synthesized)
ttaatttatatattccattcaaattctatattcttaagttagctaccacaacgttttcttattgtttcaatatggtatgtcccaatgaaatgctgtatatatatgtctaaactgtaaaaa

SEQ ID NO: 445625 - DNA, 120 bp, Artificial Sequence
  ENSG00000154654_66 (sequence is synthesized)
ttatactgcaaatgttgaagttttgtatttatgagagacattgaaagtatggcttacagtatatcaaacttgtcacacttcaccatttgtatattaatagtaaagatacttttactttaa

SEQ ID NO: 445626 - DNA, 120 bp, Artificial Sequence
  ENSG00000154655_0 (sequence is synthesized)
gggcaccgcggggcagcggcgccgcagcctgggctggcggaacctcgcgctccgactcgccccccgcctgtagctcggtcggcgttgcgggcaggcgccgctccgctggggattgctatg

SEQ ID NO: 445627 - DNA, 120 bp, Artificial Sequence
  ENSG00000154655_1 (sequence is synthesized)
ctatgccttgtatgactaagacctcttaccaagaatacgtgtcagaccataaaaccactgccaaggagtgcgggggtggcaatgaaacagcccaacaggaaaaggaagcttaatatggat

SEQ ID NO: 445628 - DNA, 120 bp, Artificial Sequence
  ENSG00000154655_2 (sequence is synthesized)
tccaaagagcgtttggatcaggacggacgcttggagcaagctgaagaggaaaagaagcccaaggatagcacaacccctttgagtcacgtcccttcagcggctgcacagggagcatggtct

SEQ ID NO: 445629 - DNA, 120 bp, Artificial Sequence
  ENSG00000154655_3 (sequence is synthesized)
tgggagtggtacttgaaagaacagaaggctgtcgcagcacctgttgagctgttttccaaggatcagtcctttccagagcatgaaaatggttttcagattggaatgagattagaaggcatt

SEQ ID NO: 445630 - DNA, 120 bp, Artificial Sequence
  ENSG00000154655_4 (sequence is synthesized)
gatccccgacatccatcggtattctgtgtgctttctgtagcggaggtttgtggttaccgtctaagacttcattttgatggttatttaagttgctatgatttttggaccaatgctggttcc

SEQ ID NO: 445631 - DNA, 120 bp, Artificial Sequence
  ENSG00000154655_5 (sequence is synthesized)
cctgacattcatccagtaggatggtgtgaaaagaccaaacatgaactgcacatccctaagggttatagaaaagataaatttgtttggatggattacttgaaggcctgcaaattgcaaaat

SEQ ID NO: 445632 - DNA, 120 bp, Artificial Sequence
  ENSG00000154655_6 (sequence is synthesized)
gctccaaagaaattattcagaaacagaagtcctaatgggccaatgtctaaagaatttcaggttggaatgaagctggaggccgtggacaggaagaacccttccttggtgtgtgtggcgacc

SEQ ID NO: 445633 - DNA, 120 bp, Artificial Sequence
  ENSG00000154655_7 (sequence is synthesized)
atagcagatattgttgaagatcgcttactagtgcattttgacaactgggatgatagttacgattactggtgcgatgttaatagcccttatgtccagccagttggttggtgtcaggagaat

SEQ ID NO: 445634 - DNA, 120 bp, Artificial Sequence
  ENSG00000154655_8 (sequence is synthesized)
ggaagaactctgatagcaccccaaggttatcccaatccagaaaatttttcctggacagaatacctggaagctactcaaaccaatgcagttcctgccaaagtttttaaaatgaggttgcct

SEQ ID NO: 445635 - DNA, 120 bp, Artificial Sequence
  ENSG00000154655_9 (sequence is synthesized)
catggttttctgccaaatatgaaacttgaagttgtggataaacggaaccccaggttaattcgtgttgctacgattgtagatgttgatgaccaaagagtaaaggttcattttgatggttgg

SEQ ID NO: 445636 - DNA, 120 bp, Artificial Sequence
  ENSG00000154655_10 (sequence is synthesized)
gaccataagtatgactactgggtggaggcagacagccctgatatccacccgatcggatggtgtgatgtcacagggcatccactggaagtgccacagcgaacgaatgacctgaagatcctt

SEQ ID NO: 445637 - DNA, 120 bp, Artificial Sequence
  ENSG00000154655_11 (sequence is synthesized)
ccaggtcaagctgtctgtcctactcccgggtgccgaggaataggccatatccgtggtccacgttattcgggacatcacagtgcttttggctgcccgtattcagacatgaacttgaaaaag

SEQ ID NO: 445638 - DNA, 120 bp, Artificial Sequence
  ENSG00000154655_12 (sequence is synthesized)
gaggcaacacttcacgatcgtttgagagaacaaacacaggcaaatttggaatcagactcttcacattcaaaatcaaaaagcctctgtagtttgaacttcaatggaaaacatgaaaaggtg

SEQ ID NO: 445639 - DNA, 120 bp, Artificial Sequence
  ENSG00000154655_13 (sequence is synthesized)
aacagtcagcccagacttgtacagcaggcaaagtgtttgaaaatcaaaggaaaagaagatattgacttggataatctcttcagagaatactcggtggagcaggcgcagcaggtgcttcac

SEQ ID NO: 445640 - DNA, 120 bp, Artificial Sequence
  ENSG00000154655_14 (sequence is synthesized)
tccaggcgtggctgacatccgggccagccaagtggcacgttggactgtggatgaggtggctgagtttgtacagtctcttctgggctgtgaagagcatgccaagtgctttaagaaagagca

SEQ ID NO: 445641 - DNA, 120 bp, Artificial Sequence
  ENSG00000154655_15 (sequence is synthesized)
gatcgatggcaaagccttcctgcttctgacacagacggacattgtcaaagtgatgaagatcaaactgggcccagcactgaagatttacaactctatcctgatgttcaggcattcccagga

SEQ ID NO: 445642 - DNA, 120 bp, Artificial Sequence
  ENSG00000154655_16 (sequence is synthesized)
actccctgaagaagatattgcctcaggccaagaagtcaggggatgaatgggctccctgaacttcctctggcaccaagacctgcgctctttcagcaataaaagtggagcacattaatttga

SEQ ID NO: 445643 - DNA, 120 bp, Artificial Sequence
  ENSG00000154655_17 (sequence is synthesized)
tgtgaatgtccccatggccgtatccacactgaatctggactttttaaagtgtctgtgatttgtttacatgtttagaggattttgatgactggtccagtgccaatgactcagaggcttagg

SEQ ID NO: 445644 - DNA, 120 bp, Artificial Sequence
  ENSG00000154655_18 (sequence is synthesized)
cccatctgtgggtttggtttacgaacattgttatctttggtgggatccgctcagctctgatttgtttgcaagacagaccaaagaagcccacacatccacctttattcttctccgtcacca

SEQ ID NO: 445645 - DNA, 120 bp, Artificial Sequence
  ENSG00000154655_19 (sequence is synthesized)
gaaaagaaaccattttccatcttacaagcataacactctcaagtggtgaaatattagaaaagcagtgttcatgaatacatcgttaatgtttttaccagagcaacatcgagcttggctcag

SEQ ID NO: 445646 - DNA, 120 bp, Artificial Sequence
  ENSG00000154655_20 (sequence is synthesized)
atctgccatggagcacagctagtctaagagctagaggcctggtgctttcaaaagacttcatgtgagatttttgtgtactttactcaggaaagtgtgaatctctaaaaaataataataata

SEQ ID NO: 445647 - DNA, 120 bp, Artificial Sequence
  ENSG00000154655_21 (sequence is synthesized)
agcacatgttttcatgattcattaattctcctttttgttccattaaccatttcttggttgtgctcccaagctttcctggagcctccacaaaggagagtagccaggagtaatgagaggacg

SEQ ID NO: 445648 - DNA, 120 bp, Artificial Sequence
  ENSG00000154655_22 (sequence is synthesized)
gtcaggtgggcacttccaaaagctggagagacccttctgaggaccctccaccatcagcggggcctcaggggaccctgtcctaacactggtgtggctgctgggccagacgctcacctgcac

SEQ ID NO: 445649 - DNA, 120 bp, Artificial Sequence
  ENSG00000154655_23 (sequence is synthesized)
agaactcctccctgctcccactctgaagggcgtttcagaattgactcatttccactgcagtctgccagaacccctgtaataaggagctgtgttatattacatctggggctgtgtgcatct

SEQ ID NO: 445650 - DNA, 120 bp, Artificial Sequence
  ENSG00000154655_24 (sequence is synthesized)
ttacaaatggagacacactattcaaagggaagatctctaaagtagggagcgtggtacttattctttgtttgaaacattccgatttgttgtcaggccttatttgttttttgtaagtgattg

SEQ ID NO: 445651 - DNA, 120 bp, Artificial Sequence
  ENSG00000154655_25 (sequence is synthesized)
tatcggaggcttaagttgtgtggaatcagtcccacagtgttgaaagacaagtacctcttttctgacacttcttactacttttacaggtagtaacagctacaaatactctcccagaagtgg

SEQ ID NO: 445652 - DNA, 120 bp, Artificial Sequence
  ENSG00000154655_26 (sequence is synthesized)
agggacaccatttgtgggtggggagaaagagggagaggttctatgtccacttgcttcattaagaatgttaaggtttaagaaagttgattctgcttggagaatttctcaagctttacattt

SEQ ID NO: 445653 - DNA, 120 bp, Artificial Sequence
  ENSG00000154655_27 (sequence is synthesized)
ttttttcactgaagaaaataaacaaactctaagaggtgtgcatatataacatttctttagatctttacctaaaaggaattttaatatattattggttgatgtaaattttgtttctgtgga

SEQ ID NO: 445654 - DNA, 120 bp, Artificial Sequence
  ENSG00000154655_28 (sequence is synthesized)
gttttgtttgttttgctttttgtagactgccatgtgcaagtaaaattcctgcttctgccatgttaaaattttaatatattttaaatgataataaacagagaaaacaaaatttatacctca

SEQ ID NO: 445655 - DNA, 120 bp, Artificial Sequence
  ENSG00000154655_29 (sequence is synthesized)
agacggtgaaccccaagagctgggatgaagcatgggtgagctactgggacttcgctgccagggagcaagctggcaggcaggaagtagccaagatttgggggaatccttcccagggaacga

SEQ ID NO: 445656 - DNA, 120 bp, Artificial Sequence
  ENSG00000154655_30 (sequence is synthesized)
atacagagaaggacgcatctgaaaattccgccgcagccacctccctcccatgggaaagccccgacctcggcgggcccagcgccacccggctccccggggtgtggaacactgagcgagatt

SEQ ID NO: 445657 - DNA, 120 bp, Artificial Sequence
  ENSG00000154655_31 (sequence is synthesized)
gtctcaaaaaaaaaaagaaagaaagaaaaaatggtggaaagggtggagaaattccttttaatgggtacaaaccacacaatgcaggtgaccattactctaaaagcccaggcttcatcacta

SEQ ID NO: 445658 - DNA, 120 bp, Artificial Sequence
  ENSG00000154655_32 (sequence is synthesized)
tgcaatatatctgtgtaacaaaactgtacttgtgcctgctaaatctgtgaaattaaaaaaaaaaaaaaaccatgaatctgatttgcctttagtcaccagatgactgcagataggcacaca

SEQ ID NO: 445659 - DNA, 120 bp, Artificial Sequence
  ENSG00000154655_33 (sequence is synthesized)
gacctgtgaagctgagtcagctgccctggtcatcccagccaaggccatgtcctctctgctcagccaacaactgtccaacaaacatgtgaatgagccctgctgaaatcagaactgaccggc

SEQ ID NO: 445660 - DNA, 120 bp, Artificial Sequence
  ENSG00000154655_34 (sequence is synthesized)
ccacctgagcctaaattcctgacaaacagatgtgtgaactaagtaaatacttaaaaaaatgagatgctgatggtccctgaatttctcaagaggcaaagaatggtcccacctcgcaactta

SEQ ID NO: 445661 - DNA, 120 bp, Artificial Sequence
  ENSG00000154655_35 (sequence is synthesized)
taaatgttcagaagttagacggccacaaagaagtagcacctcatatacattctcttgctatctacaataaggtgaaggaaggcatttatcttctctgcaaccagaaaacctataacccaa

SEQ ID NO: 445662 - DNA, 120 bp, Artificial Sequence
  ENSG00000154655_36 (sequence is synthesized)
atgcccaggaacacaagaacactgttcaccattctgctgtgcttattagcagaagatatatcagctcacaaaatcccctttgaaacagaaactaaaataatgctcaatgatcattctact

SEQ ID NO: 445663 - DNA, 120 bp, Artificial Sequence
  ENSG00000154655_37 (sequence is synthesized)
cccacgggggaggagggagaggagcataaatcaggacaagagctgggtttagaacttggatcacgtgtggcttttctccatgatcacaaaccccagcttcctataattaataattggatg

SEQ ID NO: 445664 - DNA, 120 bp, Artificial Sequence
  ENSG00000154655_38 (sequence is synthesized)
tattaagtgttttatggagcagtccagccagagagcaactataaaatggaaacatggaccagcttggtaaagggaaagatgaaattgtagaattaatttgtttgttcgttcattgagtat

SEQ ID NO: 445665 - DNA, 120 bp, Artificial Sequence
  ENSG00000154655_39 (sequence is synthesized)
ttcataacaataaacttattgtatttataaagggaaaaacctctgggtgtaatttggctgcctggttgtttatatcctacagtgcagtttcagtatgtttcatgttagtgtgcctgtttt

SEQ ID NO: 445666 - DNA, 120 bp, Artificial Sequence
  ENSG00000154655_40 (sequence is synthesized)
aaaatgttttacttcattatcgtaagacgtttttaatgcaatgaaacttcaagccagaaaaatcttagaaaattaacgaaatagggagtagagagaaatggagatagcattaaactaaat

SEQ ID NO: 445667 - DNA, 120 bp, Artificial Sequence
  ENSG00000154655_41 (sequence is synthesized)
gtggaggcagtgagctgagatcgtgccactgtacatcaccagcctgggcgacagagtgagactccttctccaaaaaaaaaaaaaagagtctcttcattaaaataaacctaatacttcact

SEQ ID NO: 445668 - DNA, 120 bp, Artificial Sequence
  ENSG00000154655_42 (sequence is synthesized)
tgtttagtaaagcaatgcaaattaatacctgatgataaagtcagaagatgtatatatgtttgtgttcctgctttctttcatttcacagtctaattctcccagactaggatttttgctagc

SEQ ID NO: 445669 - DNA, 120 bp, Artificial Sequence
  ENSG00000154655_43 (sequence is synthesized)
tatttgttctatcacccagaattttgagaaggcttaaaagcatattattgatttgtgcatttggtgcaaaattcaacaggtataagggggtatctctccctgaacctgatcctcagcctt

SEQ ID NO: 445670 - DNA, 120 bp, Artificial Sequence
  ENSG00000154655_44 (sequence is synthesized)
cagtttcctcccttggaataatcactgtatacttctcttgtgtgtctttctaaaaatatgttctgtttatttaaatatatgtgtgtatgtgtatttacacaagtgatggcataccacata

SEQ ID NO: 445671 - DNA, 120 bp, Artificial Sequence
  ENSG00000154655_45 (sequence is synthesized)
cattgttaaacagtttcctcgtgtcctttagcaataaaatctgacgagcagttcttaacacatggagcggcacactataagtgaccagtccctgcccatggccatctggatggttttcat

SEQ ID NO: 445672 - DNA, 120 bp, Artificial Sequence
  ENSG00000154655_46 (sequence is synthesized)
gttgctgtgtaaaggaggcttcaaagtgtcttctgtaggtgtcagcttgactggaaaataaaaagtgtcttctgtactcatcactcatgcttgtgagaatctacaggatagattctgtgt

SEQ ID NO: 445673 - DNA, 120 bp, Artificial Sequence
  ENSG00000154655_47 (sequence is synthesized)
gtgaatctatcctattctaatccttttcggcatttcctcagctacccttactcgttcatttttccaaatgaactttaatatcagtttttctggtacaacttttttccattccagttggtt

SEQ ID NO: 445674 - DNA, 120 bp, Artificial Sequence
  ENSG00000154655_48 (sequence is synthesized)
aatttttggattgcaataaatttatgatttaacttttaattttaccctttgtgaacttgaccatagtaagctgttcccatactcaaatatttcctgtcctgtaattgcattttaagtttt

SEQ ID NO: 445675 - DNA, 120 bp, Artificial Sequence
  ENSG00000154655_49 (sequence is synthesized)
cctttatgtagaacttgcgtccttcttacgaagtttattcctaagcagtttatcgtttttgttgctgcaataaatggacgtatttcttccttgatgtcctccacctaagattgtctgtat

SEQ ID NO: 445676 - DNA, 120 bp, Artificial Sequence
  ENSG00000154655_50 (sequence is synthesized)
ggaaagattgtatatttctgtgtattacatttaatcctgccactgtaatctcttctaatttgtaatttttttcatgtaattattttgggtttctaggtaaataaacatgtcacctacaaa

SEQ ID NO: 445677 - DNA, 120 bp, Artificial Sequence
  ENSG00000154655_51 (sequence is synthesized)
gactttaggtcgggtggcttctggggccttctgaggaacatgcacaagctgctacagctactggtaaaggggtgtgaaaagattgtcagggattgccctgaccccagcttttgagagcag

SEQ ID NO: 445678 - DNA, 120 bp, Artificial Sequence
  ENSG00000154655_52 (sequence is synthesized)
gtgcagcgtgtttttctcattcagtgggcaaggccaggtgaaagagctctgtgtgaagacattctctgtgggccagggtggagagcaccctgaggaggcagcactgatgtggttaatcca

SEQ ID NO: 445679 - DNA, 120 bp, Artificial Sequence
  ENSG00000154655_53 (sequence is synthesized)
ggccactcattttctaggaaggacacactggctaagtagcttaggccttcggcaagagtttattttaaagtgaggtaatggcaatggtaacaggagtgtctgtgaggctgtcttcttggc

SEQ ID NO: 445680 - DNA, 120 bp, Artificial Sequence
  ENSG00000154655_54 (sequence is synthesized)
cttcacagtgatggtttctagcttaagtatacagtgttcataaagtctacagcagtgtacggcaacgtcccagccttcccattcactcaccgctcattcactgatccacccagagcaact

SEQ ID NO: 445681 - DNA, 120 bp, Artificial Sequence
  ENSG00000154655_55 (sequence is synthesized)
cgggcgcctggccagcctgggacggcggctctcaggctcctgccaccgcctggaactgcggggggcgcgccggccacagtcgccctcgcctgctctccgggccttcttgggcccgcttgg

SEQ ID NO: 445682 - DNA, 120 bp, Artificial Sequence
  ENSG00000154655_56 (sequence is synthesized)
aattccgggtaatcaaaaactcagaatttctgtaatagaagaaatggtttgggaaggagccaaaattattggtattctgaatatttcattatatcatatagagaccatgaagggtcttat

SEQ ID NO: 445683 - DNA, 120 bp, Artificial Sequence
  ENSG00000154655_57 (sequence is synthesized)
taagattgctatgctatgccttgtatgactaagacctcttaccaagaatacgtgtcagaccataaaaccactgccaaggagtgcgggggtggcaatgaaacagcccaacaggaaaaggaa

SEQ ID NO: 445684 - DNA, 120 bp, Artificial Sequence
  ENSG00000154655_58 (sequence is synthesized)
tgcagttggatatgacaagtatgcacaactagctgatgacatctcatagcccagagtgggaagcagcctttcctcctctactcatcatccatctctcttactcatagaaccctgctttcc

SEQ ID NO: 445685 - DNA, 120 bp, Artificial Sequence
  ENSG00000154655_59 (sequence is synthesized)
tttatgggaattatgagagaagacttagggttttccaggaggcagatcctccatttccccatggctttgtccaagagtgcaggaagaagatctaagattggtcaattggatgctctttcc

SEQ ID NO: 445686 - DNA, 120 bp, Artificial Sequence
  ENSG00000154678_0 (sequence is synthesized)
cggctcccgctttgctcagccgccgcttttctctcccttctcactttctctcctccccacccagccctccttttcacctccaaaccctttagctgcgcgctgatcgcttctgtggctttg

SEQ ID NO: 445687 - DNA, 120 bp, Artificial Sequence
  ENSG00000154678_1 (sequence is synthesized)
tttgggggtagggggagaatacgaatagacccgaggtgctttctcttggagctggagtccaatcccaatccctatctctatccctatccctgtgcttatccctgggcattagcccgggac

SEQ ID NO: 445688 - DNA, 120 bp, Artificial Sequence
  ENSG00000154678_2 (sequence is synthesized)
catggctggttcccgcagctgcctccggagcgcacctggggccatggtttgccgcgatcggagtccgctctaagtcggagtctgggggcgcagaagggggagcgcgccgagaaagtgccg

SEQ ID NO: 445689 - DNA, 120 bp, Artificial Sequence
  ENSG00000154678_3 (sequence is synthesized)
ggcaaacgcgcgccgcgcctggctgggcatcgcgagctgggcgaggagacggggaggggacagcccaaactatctcagcttcaccgccagtggtcacctacctgcagctatggagtcgcc

SEQ ID NO: 445690 - DNA, 120 bp, Artificial Sequence
  ENSG00000154678_4 (sequence is synthesized)
aaccaaggagattgaagaatttgagagcaactctctgaaatacctgcaaccggaacagatcgagaaaatctggcttcggctccgcgggctgaggaaatataagaaaacgtcccagagatt

SEQ ID NO: 445691 - DNA, 120 bp, Artificial Sequence
  ENSG00000154678_5 (sequence is synthesized)
acggtctttggtcaaacaattagagagaggggaagcttcagtggtagatcttaagaagaatttggaatatgcagccacagtgcttgaatctgtgtatattgatgaaacaaggagactcct

SEQ ID NO: 445692 - DNA, 120 bp, Artificial Sequence
  ENSG00000154678_6 (sequence is synthesized)
ggatacagaggatgagctcagtgacattcagtcagatgctgtgccttctgaggtccgagactggctggcctccaccttcacgcggcagatggggatgatgctcaggaggagcgacgagaa

SEQ ID NO: 445693 - DNA, 120 bp, Artificial Sequence
  ENSG00000154678_7 (sequence is synthesized)
gccccggttcaagagcatcgttcacgcagtgcaggctgggatatttgtggagagaatgtatagacggacatcaaacatggttggactgagctatccaccagctgttattgaggcattaaa

SEQ ID NO: 445694 - DNA, 120 bp, Artificial Sequence
  ENSG00000154678_8 (sequence is synthesized)
ggatgtggacaagtggtcctttgacgtcttttccctcaatgaggccagtggggatcatgcactgaaatttattttctatgaactactcacacgttatgatctgatcagccgtttcaagat

SEQ ID NO: 445695 - DNA, 120 bp, Artificial Sequence
  ENSG00000154678_9 (sequence is synthesized)
ccccatttctgcacttgtctcatttgtggaggccctggaagtgggatacagcaagcacaaaaatccttaccataacttaatgcacgctgccgatgttacacagacagtgcattacctcct

SEQ ID NO: 445696 - DNA, 120 bp, Artificial Sequence
  ENSG00000154678_10 (sequence is synthesized)
actggctgacggagctggagatctttgctataatcttctcagctgccatccatgactacgagcataccggaaccaccaacaatttccacattcagactcggtctgatccagctattctgt

SEQ ID NO: 445697 - DNA, 120 bp, Artificial Sequence
  ENSG00000154678_11 (sequence is synthesized)
ataatgacagatctgtactggagaatcaccatttaagtgcagcttatcgccttctgcaagatgacgaggaaatgaatattttgattaacctctcaaaggatgactggagggagtttcgaa

SEQ ID NO: 445698 - DNA, 120 bp, Artificial Sequence
  ENSG00000154678_12 (sequence is synthesized)
ccttggtaattgaaatggtgatggccacagatatgtcttgtcacttccaacaaatcaaagcaatgaagactgctctgcagcagccagaagccattgaaaagccaaaagccttatccctta

SEQ ID NO: 445699 - DNA, 120 bp, Artificial Sequence
  ENSG00000154678_13 (sequence is synthesized)
tgctgcatacagcagatattagccatccagcaaaagcatgggacctccatcatcgctggacaatgtcactcctggaggagttcttcagacagggtgacagagaagcagagctggggctgc

SEQ ID NO: 445700 - DNA, 120 bp, Artificial Sequence
  ENSG00000154678_14 (sequence is synthesized)
ctttttctcctctgtgtgaccgaaagtccactatggttgctcagtcacaagtaggtttcattgatttcatcgtggaacccaccttcactgtgcttacggacatgaccgagaagattgtga

SEQ ID NO: 445701 - DNA, 120 bp, Artificial Sequence
  ENSG00000154678_15 (sequence is synthesized)
gtccattaatcgatgaaacctctcaaactggtgggacaggacagaggcgttcgagtttgaatagcatcagctcgtcagatgccaagcgatcaggtgtcaagacctctggttcagagggaa

SEQ ID NO: 445702 - DNA, 120 bp, Artificial Sequence
  ENSG00000154678_16 (sequence is synthesized)
gtgccccgatcaacaattctgtcatctccgttgactataagagctttaaagctacttggacggaagtggtgcacatcaatcgggagagatggagggccaaggtacccaaagaggagaagg

SEQ ID NO: 445703 - DNA, 120 bp, Artificial Sequence
  ENSG00000154678_17 (sequence is synthesized)
ccaagaaggaagcagaggaaaaggctcgcctggccgcagaggagcagcaaaaggaaatggaagccaaaagccaggctgaagaaggcgcatctggcaaagctgagaaaaagacgtctggag

SEQ ID NO: 445704 - DNA, 120 bp, Artificial Sequence
  ENSG00000154678_18 (sequence is synthesized)
aaactaagaatcaagtcaatggaacacgggcaaacaaaagtgacaaccctcgtgggaaaaactccaaagccgagaagtcatcaggagaacagcaacagaatggtgacttcaaagatggta

SEQ ID NO: 445705 - DNA, 120 bp, Artificial Sequence
  ENSG00000154678_19 (sequence is synthesized)
aaaataagacagacaagaaggatcactctaacatcggaaatgattcaaagaaaacagatgattcacaagagtaaaaaagacctcatagacaataaaagaggctgccagtgtcttgcatca

SEQ ID NO: 445706 - DNA, 120 bp, Artificial Sequence
  ENSG00000154678_20 (sequence is synthesized)
gtggtgtgtggttcccttcgtccccatcagtcgcttcaatatttcaaaatggatccggttctgtggcgggtgcgagagtgaggctgtgggggacctccaggcccaacctccgcgaagcct

SEQ ID NO: 445707 - DNA, 120 bp, Artificial Sequence
  ENSG00000154678_21 (sequence is synthesized)
agctgagcttcttcattctccttcttctccttcttccacaaagacccatatctggagaaggtgtacaactttcaaacacaagccccccaccccctgacccttggccttccctcacaccat

SEQ ID NO: 445708 - DNA, 120 bp, Artificial Sequence
  ENSG00000154678_22 (sequence is synthesized)
ctccttccaggggatgaatctttgggggttggtttgaggtcttagaactctgggggatattcccctgagcaaaacaaacaacgtgagatttttactcaaacagaaacaaaacatgaaggg

SEQ ID NO: 445709 - DNA, 120 bp, Artificial Sequence
  ENSG00000154678_23 (sequence is synthesized)
gcatcctcaaaatcctttgctaatgacctggctttcaaggcatctgtctggcctgatgagaatggacatcctggatatgctgggagaggcctgaaaaaagccacacacacagtaattgcc

SEQ ID NO: 445710 - DNA, 120 bp, Artificial Sequence
  ENSG00000154678_24 (sequence is synthesized)
attttatgactgtcaatgccgttactttaaatgttgtcatttttgcactggctactgatgatacagccatgctgacattcatcaccgcaaagatgatgattccagtctctggttcctttc

SEQ ID NO: 445711 - DNA, 120 bp, Artificial Sequence
  ENSG00000154678_25 (sequence is synthesized)
ctgagtcaggaacatttgttttctccaatttcctttcagacttaaaattgttcttatgctttttttcccacttctgtaatacagaattctgtttgttttctaaaaaagattattctatag

SEQ ID NO: 445712 - DNA, 120 bp, Artificial Sequence
  ENSG00000154678_26 (sequence is synthesized)
gaatctttatttgatggctaatttattttctctgtgcattcattagtataaacctgaatgttcagctggtgactgtactgttgagtgggaacccattgtttccactggtagcattgataa

SEQ ID NO: 445713 - DNA, 120 bp, Artificial Sequence
  ENSG00000154678_27 (sequence is synthesized)
ctaagtggttactgaaatttttaccactggctggacatcttcttttggatatctgtggttttatttcatcactcttctttttattcagtaaagtgctaagggaattagtatcagggagat

SEQ ID NO: 445714 - DNA, 120 bp, Artificial Sequence
  ENSG00000154678_28 (sequence is synthesized)
atggcagataattctttgcattttagtgagtttttaaaaatacaagatagaagtggattaatagcacgaataaaaaataagaatagtagatgtagcatggaaagagaataacattgcagc

SEQ ID NO: 445715 - DNA, 120 bp, Artificial Sequence
  ENSG00000154678_29 (sequence is synthesized)
ccccttgagaccaaattacaggtgggatctaagggagtgcaagtaaagtgggattttatgagtctaaatgatgtgatttagataaaagtgattcttaaaatgtggttattggtcacacag

SEQ ID NO: 445716 - DNA, 120 bp, Artificial Sequence
  ENSG00000154678_30 (sequence is synthesized)
gaatctctgagtccttcccaagagtgaagcacatgaatatgctgatgatgaagtggggattagtaatagaaagagagctaggcaataggtttaagtgtattccccactacagatttaatt

SEQ ID NO: 445717 - DNA, 120 bp, Artificial Sequence
  ENSG00000154678_31 (sequence is synthesized)
tctacatgaaaaagcacgagaacagatatttaaacgtccttttattactaaggtgaaatattggcattttttcaggcagaaagaaagagactgtatgtggtcttcctggacctttgcctt

SEQ ID NO: 445718 - DNA, 120 bp, Artificial Sequence
  ENSG00000154678_32 (sequence is synthesized)
gccaaaatgttccccaacagaaagatctgaagaactttgtagtatcgaatgcacaacagcatgctgatatttgaacagatttcttctgtcagctttacattttgccttggagaaacactt

SEQ ID NO: 445719 - DNA, 120 bp, Artificial Sequence
  ENSG00000154678_33 (sequence is synthesized)
agatttttctgttgtgctccctgtgttcataacaatgacctcaccacataatgtggccagaaattcaaatgacttcaggggcctagcaggtcaagtaaatgaataaagcaagccatgtaa

SEQ ID NO: 445720 - DNA, 120 bp, Artificial Sequence
  ENSG00000154678_34 (sequence is synthesized)
tatcacagtcattgtggtaaatggcaattcatagtgggcctttgtatcagcaagacaggaaggagcaatggggactgtgagaaattggagagggtgggtgctgtcaaaacagggtagttg

SEQ ID NO: 445721 - DNA, 120 bp, Artificial Sequence
  ENSG00000154678_35 (sequence is synthesized)
gtaggcagcaactgaatttgagctgtgtggggatgggggtcctagatacctaggatttgatataagctctctccaaatttttacatattgacaactaactcaaaaacttacaaacactgt

SEQ ID NO: 445722 - DNA, 120 bp, Artificial Sequence
  ENSG00000154678_36 (sequence is synthesized)
gctaatcaaatgaaacatgcctgtgagctgcattcaatccatggggcattggtttgcaagctatgttcttagaggtggtatgattttgtattgaaattaaatataaccaagagtatgtca

SEQ ID NO: 445723 - DNA, 120 bp, Artificial Sequence
  ENSG00000154678_37 (sequence is synthesized)
atttttgaccttggaacctggaccttttacctcatttatattctgtatttttgtatgtggggctttttggccagtcaaaatagaaagtctacagcttccattttataatctaacaagcaa

SEQ ID NO: 445724 - DNA, 120 bp, Artificial Sequence
  ENSG00000154678_38 (sequence is synthesized)
caagaaacaacatttgaaaaagaaacaggaatatagccattttttctagcaccaataaaaatggaaatgtttttcatttgctttaagtcattaatcagctgaaaaagaatagaaagagaa

SEQ ID NO: 445725 - DNA, 120 bp, Artificial Sequence
  ENSG00000154678_39 (sequence is synthesized)
tttcgaagggatattgagtaaaaatgcagttatctattaaaaatacaaaatgctatattatatgatgctatgaattgatactggagctgataaaacattaaagtaattattccaaatcag

SEQ ID NO: 445726 - DNA, 120 bp, Artificial Sequence
  ENSG00000154678_40 (sequence is synthesized)
tgctgactgcaaaagcaatatttccaaagctctagcttattttctgcggtcttttaattcccttgaaatagctttcttcaagttgagcagcaatttgggacaaacattattctattgcac

SEQ ID NO: 445727 - DNA, 120 bp, Artificial Sequence
  ENSG00000154678_41 (sequence is synthesized)
agattatggcatcttactctggtttacacacacagagcaagggcttacacacctgaattaagaattaactagcatgtggggacagcaatagggatagtcctaccacagacgaaaccatgc

SEQ ID NO: 445728 - DNA, 120 bp, Artificial Sequence
  ENSG00000154678_42 (sequence is synthesized)
gctctacacgtccctggataaaatgtgacaagttagcccttgaatttgggtccccatgtcaccaaatagctctatatttaagttgtgttaatgtggtacgtttcagtggcataatgaccc

SEQ ID NO: 445729 - DNA, 120 bp, Artificial Sequence
  ENSG00000154678_43 (sequence is synthesized)
attcttatcgaggcctttgttccatattttatttgtgccaatctttcttaggttatgagccctaatagtttatggcagcagacaagagactcatttctaacccattaaattcaaatggac

SEQ ID NO: 445730 - DNA, 120 bp, Artificial Sequence
  ENSG00000154678_44 (sequence is synthesized)
tttcttccactgtccatttcatttttggagctgttataaactaccgaaaacatttgacaggatcccattgtggatctgatacacttaaacagtaaaatgatatctaaacatctgaaagcc

SEQ ID NO: 445731 - DNA, 120 bp, Artificial Sequence
  ENSG00000154678_45 (sequence is synthesized)
aaagaataacctagtgcacgtgttcattcatttgtagaatttaagccattgtattatattttccacttggaaccatgcctttagatacaaaagtgtaaagtaaaaagcaacattatcatg

SEQ ID NO: 445732 - DNA, 120 bp, Artificial Sequence
  ENSG00000154678_46 (sequence is synthesized)
ggatgtgagacggtaatccaaaagttgaagaccaatttttgttatccatattttggaagtatggatactgtttattttaatatcacttctctcatgggtcacttttccttagataggtag

SEQ ID NO: 445733 - DNA, 120 bp, Artificial Sequence
  ENSG00000154678_47 (sequence is synthesized)
tgagcagagactttgatgatggaaattactttgtaacattccccatggagcctaggaaaaacaatagaaaaaaagcatgaaatctttttctcatagtgaaatagagaagattctaagatt

SEQ ID NO: 445734 - DNA, 120 bp, Artificial Sequence
  ENSG00000154678_48 (sequence is synthesized)
ggaaatctgtgtatgtggtgttctatcccaaataaagagaatttagggaattcaggcaacaatttttttcctaattggaaactttgttctgatcctgagatgcccacacaccccacagga

SEQ ID NO: 445735 - DNA, 120 bp, Artificial Sequence
  ENSG00000154678_49 (sequence is synthesized)
gacgcagtgctggcccaccacagtgtttggaacacggtcagcattcaggaaacacattcaaaatcgtctaactgaattccactatccacttgtgaatgcaaacaaaattcaaatttccct

SEQ ID NO: 445736 - DNA, 120 bp, Artificial Sequence
  ENSG00000154678_50 (sequence is synthesized)
gaaaatttattcaacttctatatgccaagcacactgctaaaggcttatcttctaagtatatgcaggcataccctactcacacaaatagcttattaccagagataggaaattgcaggtaat

SEQ ID NO: 445737 - DNA, 120 bp, Artificial Sequence
  ENSG00000154678_51 (sequence is synthesized)
gataggaaattgcaggtaatttgggagaaattgtcatagccaaatttatggaaaaaataaaataaaaacttctctatggcctcttgatttaagaaaaaaacagaacaatacaaaaaaaaa

SEQ ID NO: 445738 - DNA, 120 bp, Artificial Sequence
  ENSG00000154678_52 (sequence is synthesized)
atctgagaatgtctttccaaaagggaagatgacaccaatctatataaaacgtcagtggatttactgagaatccgagtggaaacttttaaaaccttaaacagactctcctacagcaaatag

SEQ ID NO: 445739 - DNA, 120 bp, Artificial Sequence
  ENSG00000154678_53 (sequence is synthesized)
attctctatgtgcagcatgaggaatcactgcatagttctgctccaccaataatatgattggtacagcaccaaaccatggcaaagttagatgttaaagaacataatgttgcaataatgatg

SEQ ID NO: 445740 - DNA, 120 bp, Artificial Sequence
  ENSG00000154678_54 (sequence is synthesized)
ttatattggatcttatgcatgaacaaatggaaagtaataatttatcaactgtgatccatgattaaaggcctcattatcactaagaaaatgaacttaatgaaaaaaattataatgagcaat

SEQ ID NO: 445741 - DNA, 120 bp, Artificial Sequence
  ENSG00000154678_55 (sequence is synthesized)
gacaatattcctataaaacctccctctgggtatcaagagacatattacctgccaaggccagattttactttttaaggtttcctctctctcaccaaagacactagtgggcacagaggtgac

SEQ ID NO: 445742 - DNA, 120 bp, Artificial Sequence
  ENSG00000154678_56 (sequence is synthesized)
actagagttagaatgttaccagagtcatttgcattagacagtttatctgatcatgaacatgttcccagggagattagaaaaatgggaagcaggcctctaaagatcctccttggacatttg

SEQ ID NO: 445743 - DNA, 120 bp, Artificial Sequence
  ENSG00000154678_57 (sequence is synthesized)
taaaaaggctggctgcttctccaggaatgtctgaattaagcaagaattgtgccactgaaatagcttcttgtttttatattaaacaaggaacgattgtgcagtggatgacctggactgaaa

SEQ ID NO: 445744 - DNA, 120 bp, Artificial Sequence
  ENSG00000154678_58 (sequence is synthesized)
gatgtatgatggtcaagtttaaacatattaattcctgattgttttcttaaatacccaccctagtcattttttggaaaatattgccagacatatttgacatgaattcatgtttattctggc

SEQ ID NO: 445745 - DNA, 120 bp, Artificial Sequence
  ENSG00000154678_59 (sequence is synthesized)
ttctgttcccaagcagaagtggattaaccctggcaatggctggcttcactaactgtacttgcacccagcctgggctgccatctgctcagccaggagaagcagggagtggggtgtgggccc

SEQ ID NO: 445746 - DNA, 120 bp, Artificial Sequence
  ENSG00000154678_60 (sequence is synthesized)
tttaagttcgctcagggcacactcattcagtctcccctgaggagaccttgtccccctttgtggggtgaatgctggctgttgcaggccagaggcagtgccaactggagactcatcctctca

SEQ ID NO: 445747 - DNA, 120 bp, Artificial Sequence
  ENSG00000154678_61 (sequence is synthesized)
gctttggtcagcttcagccacgtattcttcatgagtgctggcttctgaacctgcaggatcatttctcagtcagtttatggtgcagggtaattcatttaaaataaagcccattaaaacccc

SEQ ID NO: 445748 - DNA, 120 bp, Artificial Sequence
  ENSG00000154678_62 (sequence is synthesized)
atggctatagaatgggttttaaatagattgtcctggagacacatcattgtatagtctttgcttccctctcatgacctatcttggagtagaatttgtgtactactgtccttgtctttgagt

SEQ ID NO: 445749 - DNA, 120 bp, Artificial Sequence
  ENSG00000154678_63 (sequence is synthesized)
gggtatatgtgtgatggtacagaaatacagtcacatattatattaatatatatagatggataggaaaaacctacagccataggtattgtccaataactgattctagaggtagaactatag

SEQ ID NO: 445750 - DNA, 120 bp, Artificial Sequence
  ENSG00000154678_64 (sequence is synthesized)
agtatacatttccttttttcttgctttgatgatatttttatacaattttatatgctataaaattttcaaaaatatatttgctattttcatttgtagagcttggttaggtttttatcagct

SEQ ID NO: 445751 - DNA, 120 bp, Artificial Sequence
  ENSG00000154678_65 (sequence is synthesized)
cttgtgcccactgtacaaccagattcccctcatctaatttaaatgtcttccctttttcaaactctcctttatgttttcctttttttttcctcccatttttctacccttcacaaattcctt

SEQ ID NO: 445752 - DNA, 120 bp, Artificial Sequence
  ENSG00000154678_66 (sequence is synthesized)
cttttgcttctgtccaggtaacccattctgcttgcagtatcattttagcacgtacaaacacaaaataatgggaaaaataaaagcaccttgttccatgcaattcgtatgggaaagttttgg

SEQ ID NO: 445753 - DNA, 120 bp, Artificial Sequence
  ENSG00000154678_67 (sequence is synthesized)
gtgtcaaaggtcgctggggatagatggggaggcagaaatagcttgggaaaaggaagcaggaaaaaaggaaatctttatgggaaatcaattacccaaagcaaggtgagtcacctagaggtg

SEQ ID NO: 445754 - DNA, 120 bp, Artificial Sequence
  ENSG00000154678_68 (sequence is synthesized)
aatatgatgttgttattgtcctcccttagtgtacagcacagtttttgctctcacagggtttttctctttaggatgcgtagcaccctatgcattaaatacatagcatcctaaagacaccct

SEQ ID NO: 445755 - DNA, 120 bp, Artificial Sequence
  ENSG00000154678_69 (sequence is synthesized)
actcaccttgagtctgtaggctctttcctgatgagggcactggccatatatgaatggaaaactcaactcatctcctcagctttagatgttgctgctgttcagctggatttgtgagaaata

SEQ ID NO: 445756 - DNA, 120 bp, Artificial Sequence
  ENSG00000154678_70 (sequence is synthesized)
tctggattactatcaagaacatttagcaagactcaaaagagagaggcaagcagaaccaaaacccaaacctcaaccaatgactagctgaataaacaattctttggaggaataaggaaggta

SEQ ID NO: 445757 - DNA, 120 bp, Artificial Sequence
  ENSG00000154678_71 (sequence is synthesized)
tttctggatgtattctgagaatgctcttccaaaagggaagatggtaataatggacttgttttgatttcatggttgtgatagaatgtacttccatgatgtgaaatacacttctggcagata

SEQ ID NO: 445758 - DNA, 120 bp, Artificial Sequence
  ENSG00000154678_72 (sequence is synthesized)
aaatgcaggttgtaatttgcatttgtacatcacagggtaaaagaatggccatccattctgaggaagagtgttctgttctctaagatgctgcttaaccaatgttatccaaatgccatagca

SEQ ID NO: 445759 - DNA, 120 bp, Artificial Sequence
  ENSG00000154678_73 (sequence is synthesized)
tcatatctccaaatacaagattaaatcataaggattcatgtaaaacagagtatactgagctgttctcagaaaaattaatgatgtgtttattgtaaatctttattgcacagatgagcctga

SEQ ID NO: 445760 - DNA, 120 bp, Artificial Sequence
  ENSG00000154678_74 (sequence is synthesized)
cagtccttcaatgtataattttcccccagcatctagtaatgcataagtacttgtatgttcttctgattaccaaataaaaacaatgagttaacctcttaattggaattggaaaaatgaaaa

SEQ ID NO: 445761 - DNA, 120 bp, Artificial Sequence
  ENSG00000154678_75 (sequence is synthesized)
gaggtgagggttccggaagcccacgcagctccgcaggtcggtggtggccgcggctgccctgcgggggtgagtgtgcccggccggggtcggagcccagcgtgtgcccggcagacggcggtg

SEQ ID NO: 445762 - DNA, 120 bp, Artificial Sequence
  ENSG00000154678_76 (sequence is synthesized)
tccacgtgtcgccttacgttgccagtcatcaagcctcctttgcgtcattttaaacgccctgcttacgcatctagctcctatgcaccttcagtctcaaagaaaactgatgagcatcctgca

SEQ ID NO: 445763 - DNA, 120 bp, Artificial Sequence
  ENSG00000154678_77 (sequence is synthesized)
aggtacaagatgctggatcagaggatcaaaatgaaaaagattcagaacatctcacataactggaacagaaaataggccgaggggaagaagagagggagtgaaggagggtctacctatctg

SEQ ID NO: 445764 - DNA, 120 bp, Artificial Sequence
  ENSG00000154678_78 (sequence is synthesized)
cttctcagcacccactggccacagcaggacacacctccaagacccttggaggctgttggagcaggtactatcctggttgactccaccaaggtgaaatgaaagttgtatgtgattttcctc

SEQ ID NO: 445765 - DNA, 120 bp, Artificial Sequence
  ENSG00000154678_79 (sequence is synthesized)
tttgttgttcttgtatagacttttcaattgctgtatgtgggatcagcccagacgccagcaacaaactagcaagaggggtgtttttatggtataagtctctaaaagtctaaattggaccaa

SEQ ID NO: 445766 - DNA, 120 bp, Artificial Sequence
  ENSG00000154678_80 (sequence is synthesized)
aattaaaatgacacaaacttaaaaaaaaataaaattcctctcattgccacttttttcaatctctaaaagttagttgcccccaaaagaatattggtttaataatcatcatatttaagaaat

SEQ ID NO: 445767 - DNA, 120 bp, Artificial Sequence
  ENSG00000154678_81 (sequence is synthesized)
aaaaacatattttccaattttaaatacacctatttaaaatgtaaatacacttatttaaaattcaagtaaatatgtaactatcaaagtaaatgtattcaaaacagaagttgtgcttctgaa

SEQ ID NO: 445768 - DNA, 120 bp, Artificial Sequence
  ENSG00000154678_82 (sequence is synthesized)
cttctgaatgtaaaaatattaaaaggaagagaagacggatgaattgttgtattcatggacatttcagaattcacgcttataaagcaaatccaagttaaaaaacaaaaaaagatttttgtg

SEQ ID NO: 445769 - DNA, 120 bp, Artificial Sequence
  ENSG00000154678_83 (sequence is synthesized)
cctcatgaagattgtgcctcatgcccaataacctcatgtactttgaaggatgtgaaggtttgcaagagatgcatttggcttcattttcctctaatcttttacttctacccacagtagatg

SEQ ID NO: 445770 - DNA, 120 bp, Artificial Sequence
  ENSG00000154678_84 (sequence is synthesized)
atacaaaaaatcttgccttaaagactgcaggtttaagagtcattgcaaaagatgtcagtttgattttgtggtcctaggccaagagggtgtaaaattctgagcctagtttaaattctttat

SEQ ID NO: 445771 - DNA, 120 bp, Artificial Sequence
  ENSG00000154678_85 (sequence is synthesized)
tttcagattgttctggactgaaaataaagaatttaaactaggctagagatgcctttaagttacatttcagatcctcttcacagcacgctacatatctaaagcccttgagatcctgattgt

SEQ ID NO: 445772 - DNA, 120 bp, Artificial Sequence
  ENSG00000154678_86 (sequence is synthesized)
tctcacagttgttggtggaatccatagttttataactcacctctttttatggtggcattgttagcccttctgtgtctctccctaggatttttaattcaggactaaaatcacagaagtagc

SEQ ID NO: 445773 - DNA, 120 bp, Artificial Sequence
  ENSG00000154678_87 (sequence is synthesized)
aaggaaaggctcaagactagagatagctttcaatctcttcagaaatagcctggtgcagtgagaaaactaggtttgttttcaggccagtctgatcttcatcctattctgtctataactagt

SEQ ID NO: 445774 - DNA, 120 bp, Artificial Sequence
  ENSG00000154678_88 (sequence is synthesized)
tgcaggtccttgctcggatggcataattttttgatgcctccatttgcttaactagaaactaggattcatatacacactctgcactttgtattgaagattaatgataatgtaggttttggt

SEQ ID NO: 445775 - DNA, 120 bp, Artificial Sequence
  ENSG00000154678_89 (sequence is synthesized)
tgctgtggctgagcctggccagtaataggtgcataacagaagtagctaagagcatttcataatcaggatgaactctccaggacagccctacaaagaaggagctgtttgttcccggatggc

SEQ ID NO: 445776 - DNA, 120 bp, Artificial Sequence
  ENSG00000154678_90 (sequence is synthesized)
ctcgaccttccaggcttgattgtaaagagtttagtgtcctctccttctctcattccctgcagttcatttccaataaactgcagttattcaagttgagcaagttccggaatttagtgccta

SEQ ID NO: 445777 - DNA, 120 bp, Artificial Sequence
  ENSG00000154678_91 (sequence is synthesized)
ccatgctattgggcagtttatttataatgtgctttatgatgatacttcagagaaatttaattgctatacaaaaagacgaatcattgtgacttttcgttaaggaggcgattgcaattcttt

SEQ ID NO: 445778 - DNA, 120 bp, Artificial Sequence
  ENSG00000154678_92 (sequence is synthesized)
gctccctgcctggtgtctgggttagaaggcccttctgcaggctggtagtgtctgttccacctggattaggttaactcaacaggtaattcctatctgtttatacacagatgctttagcgct

SEQ ID NO: 445779 - DNA, 120 bp, Artificial Sequence
  ENSG00000154678_93 (sequence is synthesized)
tgctgtacaaagtcatttggctacacactgaggaggcccatgggagtagtagcctcctcaaataatgttccctacctatctgtcaataccttccatcttaggtattgagaatttaatgag

SEQ ID NO: 445780 - DNA, 120 bp, Artificial Sequence
  ENSG00000154678_94 (sequence is synthesized)
gctgtgttttcttggctgtgcttcttgatgttggaagccatgttcctggggaacaaatctgtattcttttctcctaagatgtgagtttttttcaacctttgctaatattttaatggagca

SEQ ID NO: 445781 - DNA, 120 bp, Artificial Sequence
  ENSG00000154678_95 (sequence is synthesized)
aatgtacagatgttgagattttgcactgcttataaaatgcctaccatgttttttgcataatggattgtatagaaatgcagattatattcttacagcaaataaaaagatgcttttaacaga

SEQ ID NO: 445782 - DNA, 120 bp, Artificial Sequence
  ENSG00000154678_96 (sequence is synthesized)
gacttccttgtttggagtaaacttcggcaacatctcatggctgaggggtttgcctttccatctgttgatgtgctttctggaagctccccggtctgccagagaaaacatatctagaagacg

SEQ ID NO: 445783 - DNA, 120 bp, Artificial Sequence
  ENSG00000154678_97 (sequence is synthesized)
cacgacgccaattcagccattcccttgggtccccaaatccccccagccaccagagacggaaggagaaggtgaagtagaaaacagactttcctgtggcgcgcgggatccgcggctgacaga

SEQ ID NO: 445784 - DNA, 120 bp, Artificial Sequence
  ENSG00000154678_98 (sequence is synthesized)
gagtagcgtggccaggcagggatctccgcgcccaccggtcagccccgtccacgcgctcgggcgcgcgtcctcccttcctgacactcctctcgccgcctctggaactcggcttggagatgg

SEQ ID NO: 445785 - DNA, 120 bp, Artificial Sequence
  ENSG00000154678_99 (sequence is synthesized)
ggcagtcgcgacggctcctgcctccgccgagctcctagcgctttagctgttgacattgggtccccgctgttgtctccaggcgctcagctgccagcgcgcggcggggctgagagtgacagc

SEQ ID NO: 445786 - DNA, 120 bp, Artificial Sequence
  ENSG00000154678_100 (sequence is synthesized)
aggattcgccgccgagccccgggctgctcactccgccgtgggggggaccgcagacgccgctggtctcgctgcgaggcccctgcccggccggccgagccatgacggacgccggcaacagga

SEQ ID NO: 445787 - DNA, 120 bp, Artificial Sequence
  ENSG00000154678_101 (sequence is synthesized)
gacgccggcaacaggaaggagggcttcaaaaaatgccggagcgccactttcagcatcgatggctacagcttcaccatagttgcaaatgaagctggagacaagaatgccagaccactggcc

SEQ ID NO: 445788 - DNA, 120 bp, Artificial Sequence
  ENSG00000154678_102 (sequence is synthesized)
cgcttctctcggtctaagtcacagaactgtctgtggaactccctcatcgatgggctcacagggaatgtcaaggagaagccaaggccaacaattgtccatgaccctcgacccccagaggag

SEQ ID NO: 445789 - DNA, 120 bp, Artificial Sequence
  ENSG00000154678_103 (sequence is synthesized)
cttcacaggaaaataacttatttctgtctctcagaaaacttgtgtttggcaatagcttaccagctgcagggtagaaaggcagcactgtgggtgtgttgtcagcaagctgaagactttgag

SEQ ID NO: 445790 - DNA, 120 bp, Artificial Sequence
  ENSG00000154678_104 (sequence is synthesized)
gaatagaagtaatacctataaagcactgagaaagcagcctgcacaaggttggtacctaagtagtagctgttatgtatgcaaattggaaaagaaggttaaaggtttgaatacgaagttaag

SEQ ID NO: 445791 - DNA, 120 bp, Artificial Sequence
  ENSG00000154678_105 (sequence is synthesized)
gtggtggtgaaaatagcaacctgtaactaatattttataacattcttagcagctcagtaatgctgttgactggttgactggtgctaattagaaatctagttcgcatctgttttctgttgg

SEQ ID NO: 445792 - DNA, 120 bp, Artificial Sequence
  ENSG00000154678_106 (sequence is synthesized)
tggtggctgttttgtttgttgctctttttttccagatgaccctgatttcaagaaaggctgtcctccgtggggcacttgaacatgtattgttagtaaatgcactggaaatgggtcttggtt

SEQ ID NO: 445793 - DNA, 120 bp, Artificial Sequence
  ENSG00000154678_107 (sequence is synthesized)
gagaggcagaatgtccacggagccagaagtcaggaggcctgcactgtcttgctgccctgccactagctggaggagagcagaccagccggagggaagctggcagacttcttggaccttcac

SEQ ID NO: 445794 - DNA, 120 bp, Artificial Sequence
  ENSG00000154678_108 (sequence is synthesized)
atgggctcggtctcctccgcgctggcgcggtcccgcaaagccgtagtgcagtcgggctcgttgccaccgcagcctgaggcgccaccggctgctcccgttgctgtcggagacccattcgcg

SEQ ID NO: 445795 - DNA, 120 bp, Artificial Sequence
  ENSG00000154678_109 (sequence is synthesized)
tccctaaaacccagaggccgggaccccggcgtggggagacactctcccctcccgtagcctgtgaggcacagcccgcggcgagacatcgagaagagctgccgaagttggcgaggcaggagc

SEQ ID NO: 445796 - DNA, 120 bp, Artificial Sequence
  ENSG00000154678_110 (sequence is synthesized)
tgtccccggtgctgaagcgtgaggcgagtatgtcccagccctgctggccacgaagccgcagcgcagcggttgcaaatgaagctggagacaagaatgccagaccactggcccgcttctctc

SEQ ID NO: 445797 - DNA, 120 bp, Artificial Sequence
  ENSG00000154710_0 (sequence is synthesized)
agacctacccgggcgaagcgggcgagcggtggtttggacgccggcggagacgcgggcgagtggttagcaggaagaagatgagccttaagtctgaacgccgaggaattcatgtggatcaat

SEQ ID NO: 445798 - DNA, 120 bp, Artificial Sequence
  ENSG00000154710_1 (sequence is synthesized)
cggatctcctgtgcaagaaaggatgtggttactacggcaaccctgcctggcagggtttctgctccaagtgctggagggaagagtaccacaaagccaggcagaagcagattcaggaggact

SEQ ID NO: 445799 - DNA, 120 bp, Artificial Sequence
  ENSG00000154710_2 (sequence is synthesized)
gggagctggcggagcgactccagcgggaggaagaagaggcctttgccagcagtcagagcagccaaggggcccaatccctcacattctccaagtttgaagaaaagaaaaccaacgagaaga

SEQ ID NO: 445800 - DNA, 120 bp, Artificial Sequence
  ENSG00000154710_3 (sequence is synthesized)
cccgcaaggttaccacagtgaagaaattcttcagtgcatcttccagggtcggatcaaagaaggaaattcaggaagcaaaagctcccagtccttccataaaccggcaaaccagcattgaaa

SEQ ID NO: 445801 - DNA, 120 bp, Artificial Sequence
  ENSG00000154710_4 (sequence is synthesized)
cggatagagtgtctaaggagttcatagaatttctcaagaccttccacaagacaggccaagaaatctataaacagaccaagctgtttttggaaggaatgcattacaaaagggatctaagca

SEQ ID NO: 445802 - DNA, 120 bp, Artificial Sequence
  ENSG00000154710_5 (sequence is synthesized)
ttgaagaacagtcagagtgtgctcaggatttctaccacaatgtggccgaaaggatgcaaactcgtgggaaagtgcctccagaaagagtcgagaagataatggatcagattgaaaagtaca

SEQ ID NO: 445803 - DNA, 120 bp, Artificial Sequence
  ENSG00000154710_6 (sequence is synthesized)
tcatgactcgtctctataaatatgtattctgtccagaaactactgatgatgagaagaaagatcttgccattcaaaagagaatcagagccctgcgctgggttacgcctcagatgctgtgtg

SEQ ID NO: 445804 - DNA, 120 bp, Artificial Sequence
  ENSG00000154710_7 (sequence is synthesized)
tccctgttaatgaagacatcccagaagtgtctgatatggtggtgaaggcgatcacagatatcattgaaatggattccaagcgtgtgcctcgagacaagctggcctgcatcaccaagtgca

SEQ ID NO: 445805 - DNA, 120 bp, Artificial Sequence
  ENSG00000154710_8 (sequence is synthesized)
gcaagcacatcttcaatgccatcaagatcaccaagaatgagccggcgtcagcggatgacttcctccccaccctcatctacattgttttgaagggcaaccccccacgccttcagtctaata

SEQ ID NO: 445806 - DNA, 120 bp, Artificial Sequence
  ENSG00000154710_9 (sequence is synthesized)
tccagtatatcacgcgcttctgcaatccaagccgactgatgactggagaggatggctactatttcaccaatctgtgctgtgctgtggctttcattgagaagctagacgcccagtctttga

SEQ ID NO: 445807 - DNA, 120 bp, Artificial Sequence
  ENSG00000154710_10 (sequence is synthesized)
atctaagtcaggaggattttgatcgctacatgtctggccagacctctcccaggaagcaagaagctgagagttggtctcctgatgcttgcttaggcgtcaagcaaatgtataagaacttgg

SEQ ID NO: 445808 - DNA, 120 bp, Artificial Sequence
  ENSG00000154710_11 (sequence is synthesized)
atctcttgtctcagttgaatgaacgacaagaaaggatcatgaatgaagccaagaaactggaaaaagacctcatagattggacagatggaattgcaagagaagttcaagacatcgttgaga

SEQ ID NO: 445809 - DNA, 120 bp, Artificial Sequence
  ENSG00000154710_12 (sequence is synthesized)
aatacccactggaaattaagcctccgaatcaaccgttagcagctattgactctgaaaacgttgaaaatgataaacttcctccaccactgcaacctcaagtttatgcaggatgatcacaat

SEQ ID NO: 445810 - DNA, 120 bp, Artificial Sequence
  ENSG00000154710_13 (sequence is synthesized)
ttagtggagagtatttatttgagcctaaattgtaggtagcccttactacactcaactgattgggatctagaatgtaactaaattgcttataaatgtcagcattttttaaaggtacagtat

SEQ ID NO: 445811 - DNA, 120 bp, Artificial Sequence
  ENSG00000154710_14 (sequence is synthesized)
atggggattgtttcgtttttcctagcaggggaaccttagttaataataaaatactacttatttgagttactgatacagattcatttaaggcttgtgtgcaaattttgtctcaatcttttt

SEQ ID NO: 445812 - DNA, 120 bp, Artificial Sequence
  ENSG00000154710_15 (sequence is synthesized)
ttcctatgtgcttcctctggcattcactgtggttttggtaaataattgccttttaaaggattaaacaaatgaatgctacaaagtgtatgttcaagaaaattaaatggtaccactcttcca

SEQ ID NO: 445813 - DNA, 120 bp, Artificial Sequence
  ENSG00000154710_16 (sequence is synthesized)
cagtttggaataattttataattgtaaagatagaaattatattgataagtaaatatgtaaaattgtaaatatgtaaaaaaaagaatggtgtctgctgtgcatggcattttatatgttaat

SEQ ID NO: 445814 - DNA, 120 bp, Artificial Sequence
  ENSG00000154710_17 (sequence is synthesized)
tttttagtttaaaatgaagtatattgaatgtttgcctttagcaccattttatttggtttgtcccactaaaatgactcgagaagtgtttagacaaactccccttaagatgtgcactccatc

SEQ ID NO: 445815 - DNA, 120 bp, Artificial Sequence
  ENSG00000154710_18 (sequence is synthesized)
tttaagaacgtgttagccttaactttgaggttctatatagtcagagactatgacaccactaaggttcagaataaagtttaggccacataaaattgctgtttaatgtagtcgatggaagac

SEQ ID NO: 445816 - DNA, 120 bp, Artificial Sequence
  ENSG00000154710_19 (sequence is synthesized)
tttaaactatgcttctagcttatttttccctcattcattcagcaaatctctattgagttcttcagtgagaaggagcaggcactgggcctggaatggaaggcgggaatgaatgggcctctg

SEQ ID NO: 445817 - DNA, 120 bp, Artificial Sequence
  ENSG00000154710_20 (sequence is synthesized)
atggtgagaggtgacggggtccctcagctgtgagatgcaaggggcgccttgcagcctccataatatacatttgactttgcaaacgtctagacatgttttctgaacctttttcaggacatt

SEQ ID NO: 445818 - DNA, 120 bp, Artificial Sequence
  ENSG00000154710_21 (sequence is synthesized)
tcaacctcgggactattcatattagtggcctgagaggtgtttgttgtggggccaccctgtgcatggtagaatgttcagcagcattcctgccatccatatccattaggtgccagtagcacc

SEQ ID NO: 445819 - DNA, 120 bp, Artificial Sequence
  ENSG00000154710_22 (sequence is synthesized)
cccgctagagctgtgaaaaattctctccagacatagtcagatgtctcctggggccatatcacccctccgttaagaaccactgatgtcttttacaaaccaggagttatcctcctggtggtt

SEQ ID NO: 445820 - DNA, 120 bp, Artificial Sequence
  ENSG00000154710_23 (sequence is synthesized)
aatatggtgtaaccaaagaatcttgcactcaatgcacagtgtgatgttaactaaaacgagttaaatatttaggaggcttgacagctacctgcattgtagaaccttttcttatctcagtgg

SEQ ID NO: 445821 - DNA, 120 bp, Artificial Sequence
  ENSG00000154710_24 (sequence is synthesized)
aaccttctataacctaaatataccattgatgattcttcttccattcagtgacatccacagattatgcagctatacttgtgaaatcgtgcatgaggccccagggcaccgttctagaacaac

SEQ ID NO: 445822 - DNA, 120 bp, Artificial Sequence
  ENSG00000154710_25 (sequence is synthesized)
gtcacttcacacaggcagctgagaaaggttctcttgcttttccagtatcttcctaaggatggagcccaaaattgcagagcagtaactttggaataaaaccagggtgggtataaaacttct

SEQ ID NO: 445823 - DNA, 120 bp, Artificial Sequence
  ENSG00000154710_26 (sequence is synthesized)
tattcttaaatttacatataagatctattaagcttgacacatctgtgtcatcacgcactgaagacaggaagcagttcactgagtcagctggttcccaagctcgcacagaaggtgataagt

SEQ ID NO: 445824 - DNA, 120 bp, Artificial Sequence
  ENSG00000154710_27 (sequence is synthesized)
tactatcaaatgccagtgagaatcttcttatagaataacctgggcccaagtgattttagtacaaaacttgcccttctttggtttaattttctatgtgcttttaggtgtgaatccagatat

SEQ ID NO: 445825 - DNA, 120 bp, Artificial Sequence
  ENSG00000154710_28 (sequence is synthesized)
gcggtcttaattcctttggaaatacacagttcgtttagttactgtacactctgtttgttcaataaactgcatatcaacttcccacaaaagctgacttttttgggtctcttacatataaag

SEQ ID NO: 445826 - DNA, 120 bp, Artificial Sequence
  ENSG00000154710_29 (sequence is synthesized)
taggttattgagttgatttttttggaggtatctcatattggtcgaattcttctggtatggactcttgccttatatagaggcttctatttctcttaagtcagcatcaatacaacggccgga

SEQ ID NO: 445827 - DNA, 120 bp, Artificial Sequence
  ENSG00000154710_30 (sequence is synthesized)
gtttctgtttttgcaataagaagatgttggtattttatgtagggtaaatgtgactggaatacacctttggaacggaattctttatcaataaagtttcacaatccgtccctcttccaaaaa

SEQ ID NO: 445828 - DNA, 120 bp, Artificial Sequence
  ENSG00000154710_31 (sequence is synthesized)
agacctacccgggcgaagcgggcgagcggtggtttggacgccggcggagacgcgggcgagaaaactgtggatttagttactccactctgccatgtctttccaccactgcctgcacatttg

SEQ ID NO: 445829 - DNA, 120 bp, Artificial Sequence
  ENSG00000154710_32 (sequence is synthesized)
agaccaaggatagagattgggaaaaattgatagttctcctgcctcagagtttggctcctgcactctcatttcagccatagctgcagacaaagcacacgattgctgggcactgtggctcaa

SEQ ID NO: 445830 - DNA, 89 bp, Artificial Sequence
  ENSG00000154710_33 (sequence is synthesized)
gcaatccaagccgactgatgactggagaggatggctactatttcaccaatctgagatggtttctaccccgactgtttcccaggctggtc

SEQ ID NO: 445831 - DNA, 120 bp, Artificial Sequence
  ENSG00000154710_34 (sequence is synthesized)
acgcctggctcagatgtctgttgaattgggcatttgcagtgccatgtctgtactaataattgctaccgtgtattcattgctcgctgcaggcctctcggaagcacgtgacatgttatgttg

SEQ ID NO: 445832 - DNA, 120 bp, Artificial Sequence
  ENSG00000154710_35 (sequence is synthesized)
catagcgatttaccatacagctgtgagactgaacaaatgagtttaaatattatacagtagaaaagaaaactgactttggaacttaagtggttagcaggaagaagatgagccttaagtctg

SEQ ID NO: 445833 - DNA, 120 bp, Artificial Sequence
  ENSG00000154710_36 (sequence is synthesized)
tttggaattatttgtccaagctaacgtttggacaaataatgttttgttatatttaacattaaaactctgacattgacattcacattcattttggaagcattatatttaatcatatgaaag

SEQ ID NO: 445834 - DNA, 120 bp, Artificial Sequence
  ENSG00000154710_37 (sequence is synthesized)
ttggtgaaccttggattacagattgcaaatgctaataagtcttttattagaatgatggcgtcttcataccatgaagtggttagcaggaagaagatgagccttaagtctgaacgccgagga

SEQ ID NO: 445835 - DNA, 120 bp, Artificial Sequence
  ENSG00000154710_38 (sequence is synthesized)
gttatgttttttttgagacaggatctcgctctgctgtcacccggcctggagttcagtggagggatctctgcaccgtcaacttcctgggctatcaagcgatcctcccacctcagcctccct

SEQ ID NO: 445836 - DNA, 120 bp, Artificial Sequence
  ENSG00000154710_39 (sequence is synthesized)
gcctccctggtagttgggaccacaggtgcccgccatcatgtccggctgatttgtaaaatttcttttgtagagatggtgaccttgctctgtggcccaggctggtctcgaactcctggactc

SEQ ID NO: 445837 - DNA, 120 bp, Artificial Sequence
  ENSG00000154710_40 (sequence is synthesized)
ctcctgcctgggcctcctaaagattcagctgcttttggatcaaccgatcgccttaagaccttttaactcgaacacctgtcacatcctaggatccgcgaaggactgaaacagagtttctga

SEQ ID NO: 445838 - DNA, 120 bp, Artificial Sequence
  ENSG00000154710_41 (sequence is synthesized)
agcgtccctcggcgcagtagctccgctccacctcccattcgcgctaccaccgcggccgcagccccaggagtcgccgcggagccagcgtcgccctccagctgttgcgcgtcggaagccgga

SEQ ID NO: 445839 - DNA, 120 bp, Artificial Sequence
  ENSG00000154710_42 (sequence is synthesized)
agcagggactgagcgacagactaggaaacgccggtttctccggggctccccagcgccccacctttaccccggaggccgccctcttccatttgctcttgggcgtcagggcggtaccccact

SEQ ID NO: 445840 - DNA, 120 bp, Artificial Sequence
  ENSG00000154710_43 (sequence is synthesized)
ccgctcgaccctttggatccactcgcacttcctcccgtccagagtcaaaggccccggaagtgacgtttacgcgccgcgcgtaacgtgcgttcgctggcggtgccgggggcggggcgagca

SEQ ID NO: 445841 - DNA, 120 bp, Artificial Sequence
  ENSG00000154710_44 (sequence is synthesized)
ccagacctgccgagcgacgtgggcgagcggtgacctggaccacggcgcagacgcgggcgagctgcggctcggacgccagcggacacgcgggcgagatcactttgggaagcagtgacatcc

SEQ ID NO: 445842 - DNA, 120 bp, Artificial Sequence
  ENSG00000154719_0 (sequence is synthesized)
agggcggagaaggacttgcgcgcgacggttctcaccgctgctatggaggcgctggccatgggttcccgggcgctgcggctctggctggtcgcacccggtggcgggatcaaatggagattt

SEQ ID NO: 445843 - DNA, 120 bp, Artificial Sequence
  ENSG00000154719_1 (sequence is synthesized)
atagcaacatcgtcagcttctcagctgtcaccgacagaattgacagaaatgcggaatgatctctttaataaagagaaagccaggcagttatcattaactccccgaactgagaagatagaa

SEQ ID NO: 445844 - DNA, 120 bp, Artificial Sequence
  ENSG00000154719_2 (sequence is synthesized)
gttaagcatgttgggaaaactgaccccggtactgtcttcgtgatgaataaaaacatttcaactccctacagttgtgccatgcatttaagcgagtggtattgcaggaagtccattctggct

SEQ ID NO: 445845 - DNA, 120 bp, Artificial Sequence
  ENSG00000154719_3 (sequence is synthesized)
ctggtggatggacagccttgggacatgtataagcctttaacaaagtcctgtgaaattaaatttcttactttcaaagattgtgatccaggagaagtgaataaggcatattggcgttcctgt

SEQ ID NO: 445846 - DNA, 120 bp, Artificial Sequence
  ENSG00000154719_4 (sequence is synthesized)
gcattcaaagatgaatatatggtcaatttggtcagagctccagaagttcctgtaatttctggtgccttctgttatgacgtagttttggatagcaaacttgatgagtggatgccaacaaaa

SEQ ID NO: 445847 - DNA, 120 bp, Artificial Sequence
  ENSG00000154719_5 (sequence is synthesized)
gagaacttacgttccttcacaaaagatgctcatgctttaatttataaagatcttccatttgaaactctggaagttgaagcaaaagtggcattggaaatatttcaacacagcaagtacaaa

SEQ ID NO: 445848 - DNA, 120 bp, Artificial Sequence
  ENSG00000154719_6 (sequence is synthesized)
gtagatttcatagaagagaaggcatctcagaaccctgagagaatagtcaagctacacagaataggtgacttcattgatgtgagtgagggccctcttattccaagaacaagtatttgtttc

SEQ ID NO: 445849 - DNA, 120 bp, Artificial Sequence
  ENSG00000154719_7 (sequence is synthesized)
cagtatgaagtatcagcagttcacaatcttcaacccacccagccaagtctcatacgaagattccagggcgtgtctttacctgttcacttaagagcacattttacaatatgggataagcta

SEQ ID NO: 445850 - DNA, 120 bp, Artificial Sequence
  ENSG00000154719_8 (sequence is synthesized)
ttggaaagatctcggaaaatggtaactgaagatcaaagtaaagcaacagaggaatgtacatctacctaataactttctaaaatttaaatatgtataataaaataaatgttttaaatataa

SEQ ID NO: 445851 - DNA, 120 bp, Artificial Sequence
  ENSG00000154719_9 (sequence is synthesized)
cctccatggaacagtctcagagtaactgaagatcaaagtaaagcaacagaggaatgtacatctacctaataactttctaaaatttaaatatgtataataaaataaatgttttaaatataa

SEQ ID NO: 445852 - DNA, 120 bp, Artificial Sequence
  ENSG00000154721_0 (sequence is synthesized)
agaaagaagttttgagccaacgaggggaagaaaggagttggggcaaaacaggaggcgtttccctacccgcatacatccccgtccccgagacacccaatccccccacccccagcctgcccg

SEQ ID NO: 445853 - DNA, 120 bp, Artificial Sequence
  ENSG00000154721_1 (sequence is synthesized)
cgcctcccgcccccagctcctcgccctggggacagctggcagccccgcgcggaccagacacaaagccgatcaatcccggaggcgtgggggcggagggacgacccgccggggctttcccgg

SEQ ID NO: 445854 - DNA, 120 bp, Artificial Sequence
  ENSG00000154721_2 (sequence is synthesized)
gcgctgctctcctcctgctgccccctcgctaggacccggcggacgcctcgtctggttttcacgccctctagcccctacccccacacccccaaaacagaacagacccccatccctgggctg

SEQ ID NO: 445855 - DNA, 120 bp, Artificial Sequence
  ENSG00000154721_3 (sequence is synthesized)
gaggacccgcctcttggcagccagctgagaaggcgccccggggagggggaaactgacatcccatctagagccgtccctcctcttcctcccctcccgactctctgctcctttcccgcccca

SEQ ID NO: 445856 - DNA, 120 bp, Artificial Sequence
  ENSG00000154721_4 (sequence is synthesized)
gaagttcaagggcccccggcctcctgcgctcctgccgccgggaccctcgacctcctcagagcagccggctgccgccccgggaagatggcgaggaggagccgccaccgcctcctcctgctg

SEQ ID NO: 445857 - DNA, 120 bp, Artificial Sequence
  ENSG00000154721_5 (sequence is synthesized)
ctgctgcgctacctggtggtcgccctgggctatcataaggcctatgggttttctgccccaaaagaccaacaagtagtcacagcagtagagtaccaagaggctattttagcctgcaaaacc

SEQ ID NO: 445858 - DNA, 120 bp, Artificial Sequence
  ENSG00000154721_6 (sequence is synthesized)
ccaaagaagactgtttcctccagattagagtggaagaaactgggtcggagtgtctcctttgtctactatcaacagactcttcaaggtgattttaaaaatcgagctgagatgatagatttc

SEQ ID NO: 445859 - DNA, 120 bp, Artificial Sequence
  ENSG00000154721_7 (sequence is synthesized)
aatatccggatcaaaaatgtgacaagaagtgatgcggggaaatatcgttgtgaagttagtgccccatctgagcaaggccaaaacctggaagaggatacagtcactctggaagtattagtg

SEQ ID NO: 445860 - DNA, 120 bp, Artificial Sequence
  ENSG00000154721_8 (sequence is synthesized)
gctccagcagttccatcatgtgaagtaccctcttctgctctgagtggaactgtggtagagctacgatgtcaagacaaagaagggaatccagctcctgaatacacatggtttaaggatggc

SEQ ID NO: 445861 - DNA, 120 bp, Artificial Sequence
  ENSG00000154721_9 (sequence is synthesized)
atccgtttgctagaaaatcccagacttggctcccaaagcaccaacagctcatacacaatgaatacaaaaactggaactctgcaatttaatactgtttccaaactggacactggagaatat

SEQ ID NO: 445862 - DNA, 120 bp, Artificial Sequence
  ENSG00000154721_10 (sequence is synthesized)
tcctgtgaagcccgcaattctgttggatatcgcaggtgtcctgggaaacgaatgcaagtagatgatctcaacataagtggcatcatagcagccgtagtagttgtggccttagtgatttcc

SEQ ID NO: 445863 - DNA, 120 bp, Artificial Sequence
  ENSG00000154721_11 (sequence is synthesized)
gtttgtggccttggtgtatgctatgctcagaggaaaggctacttttcaaaagaaacctccttccagaagagtaattcttcatctaaagccacgacaatgagtgaaaatgatttcaagcac

SEQ ID NO: 445864 - DNA, 120 bp, Artificial Sequence
  ENSG00000154721_12 (sequence is synthesized)
acaaaatcctttataatttaaagactccactttagagatacaccaaagccaccgttgttacacaagttattaaactattataaaactctgctttgtccgacatttgcaaagaggtacacg

SEQ ID NO: 445865 - DNA, 120 bp, Artificial Sequence
  ENSG00000154721_13 (sequence is synthesized)
aggaaatggaattggtatttcattttaattttcatgactactaactcacctgaacttgctattttaaacaaatagttctgtcgacacctaaaatataatctggcttcttgtgtctggact

SEQ ID NO: 445866 - DNA, 120 bp, Artificial Sequence
  ENSG00000154721_14 (sequence is synthesized)
aagttaaaagaattaaaatactttgtaatgtcctgggctttgggaaatgttaaccacgtcctaacttctagagaacgttactaaaatataacatactgattgtgaagtcaatccacaggt

SEQ ID NO: 445867 - DNA, 120 bp, Artificial Sequence
  ENSG00000154721_15 (sequence is synthesized)
catgaaaatataaatcagactctgcacgagagtctgatttagggggtccaacaaatactctgacagatgcaaaaggaacctctggtctcatttctgccagaatcctcttttctcccctaa

SEQ ID NO: 445868 - DNA, 120 bp, Artificial Sequence
  ENSG00000154721_16 (sequence is synthesized)
tatcatccttattctgatgctcgttcatcactaacacacccacagaaaggaggaagcgggatgggtcttatgcccaaggatttgcactttgtgtttacttccattcctgggaactaaaag

SEQ ID NO: 445869 - DNA, 120 bp, Artificial Sequence
  ENSG00000154721_17 (sequence is synthesized)
caacatcaaaagaaatgcctaatggctggagcccacaggtgtgcaccacaggatttgcctggtgtgtgtcactgatttcttcattaaacgtaatttagatggtcaaacacaaacccaagt

SEQ ID NO: 445870 - DNA, 120 bp, Artificial Sequence
  ENSG00000154721_18 (sequence is synthesized)
tgcttccttcttgtaagatttctttgaagaggatcagtgactttgacatcagaactcaccactggagcctacacaagtttgcagatacctttccctgcaggagtggtgacttcacatctt

SEQ ID NO: 445871 - DNA, 120 bp, Artificial Sequence
  ENSG00000154721_19 (sequence is synthesized)
tctgtctctaaaaattgtgcagtgacattccgggccaagtcccttagtcaggggttgacaattctgcttttggacaaggagggatgtggagggaagaagtaatagtctaccaggaaaatg

SEQ ID NO: 445872 - DNA, 120 bp, Artificial Sequence
  ENSG00000154721_20 (sequence is synthesized)
agacgaaaaagctcagtatgactccctgcatctggtacccctcttgaaacacagtgggcacatgagcaatggctcaaacgaaaagtggatctaatgtgggtttctcaaccgatgaaccac

SEQ ID NO: 445873 - DNA, 120 bp, Artificial Sequence
  ENSG00000154721_21 (sequence is synthesized)
aaaagcttccagctactattacaatgtgaaaattccaatgatccgtttaccagagcaattagactatgttaaaaattcatatcatttgtaacttcttttaattactgaattgatattaaa

SEQ ID NO: 445874 - DNA, 120 bp, Artificial Sequence
  ENSG00000154721_22 (sequence is synthesized)
taaaaacaaaatatggctagggcatgtcctattcttctgggcaaatgtggatgaaaaggtcacttgctacctttgacaactatgaacatgatggttaatcttctttcttttttttttttt

SEQ ID NO: 445875 - DNA, 120 bp, Artificial Sequence
  ENSG00000154721_23 (sequence is synthesized)
tgggattataggcatgagccactgcactgggcaggttaatcttctttcaaaagagtctgctctttctacccaattggcgaagcaaatccccaggattcaccgaacaaatggattaagcac

SEQ ID NO: 445876 - DNA, 120 bp, Artificial Sequence
  ENSG00000154721_24 (sequence is synthesized)
cgaacaaatggattaagcacccactgagtgcctagcatgtgcctggacaccaggccaccgggaagatgctccccctttgacttgtctatgacatgctatgtctctcaccagatcccttcc

SEQ ID NO: 445877 - DNA, 120 bp, Artificial Sequence
  ENSG00000154721_25 (sequence is synthesized)
tggaggtcgggcttctgtaacatggctctgcccccaaaataaaattttcaccacgagtcagggatcggcaaacattttctgtaaagagccagaaagtagatattttaagtcataaggtcc

SEQ ID NO: 445878 - DNA, 120 bp, Artificial Sequence
  ENSG00000154721_26 (sequence is synthesized)
ctgttaacaactacttgactctgccattgtagcacaaaggcagccacagacaaaacaagcaagtagtcatgtctgtgttccaataagactttatttacaaaaacagcaggcacagacaag

SEQ ID NO: 445879 - DNA, 120 bp, Artificial Sequence
  ENSG00000154721_27 (sequence is synthesized)
atttggcccacaggcatagattcccaactcatggtggtgaagtacagaaaaaaacacctgtctacaagcttttgtaagaaatcaggctaaatgttacctatgttttggttggaagatttc

SEQ ID NO: 445880 - DNA, 120 bp, Artificial Sequence
  ENSG00000154721_28 (sequence is synthesized)
tttggtttgaggaatgctttcctcttgcattggcatgccaagaggatagatgactctgaaagacgcctcttcagacatacctgtcatcacacaagatcaacttcttcagtttaaatgaca

SEQ ID NO: 445881 - DNA, 120 bp, Artificial Sequence
  ENSG00000154721_29 (sequence is synthesized)
caaatccatattgtggaaggaaaatatgtagtgccttagcttcactaatagttgtaaaacttctttttaagacatcaaaggctagaggattcattttatgcagtgcgaacatctaataac

SEQ ID NO: 445882 - DNA, 120 bp, Artificial Sequence
  ENSG00000154721_30 (sequence is synthesized)
actctctgtgtcaaatatatattgtacattaccttaaactattgtaatagctaggtaaaaatccttgtataaaagaatgttttcccccacacaaagggcagagtattgagcactaatttc

SEQ ID NO: 445883 - DNA, 120 bp, Artificial Sequence
  ENSG00000154721_31 (sequence is synthesized)
ctattaaaagtatatatatgtatctgtgggtcactggtgtccagacttgtatttgcatttgtgtttacttgaggaacttgaacactaacaactggtaaaatcccattgtaattcttacag

SEQ ID NO: 445884 - DNA, 120 bp, Artificial Sequence
  ENSG00000154721_32 (sequence is synthesized)
cattttgactttattttcctgcagtgaattgtgttgtgtaaagattagggctttaaaatcttattagcaagctttgttttgttttaattattgttgctgttgtaactagatttaatttat

SEQ ID NO: 445885 - DNA, 120 bp, Artificial Sequence
  ENSG00000154721_33 (sequence is synthesized)
ttttagttggaggtttgacctaagtctggaccaattgattgcttttcaatacaactttgcaaagaacttcctttttccacaggtggctttgttcgattaaagtctacactaataaaaata

SEQ ID NO: 445886 - DNA, 80 bp, Artificial Sequence
  ENSG00000154721_34 (sequence is synthesized)
atcacgccactgcataaaataaataaataaataaatactggtttttacctgtagaattcttacaataaatatagcttgat

SEQ ID NO: 445887 - DNA, 120 bp, Artificial Sequence
  ENSG00000154721_35 (sequence is synthesized)
aaaatattaaatgttaatatattaaattaaaagttagtaagtctctggtttgtgtattccacaaaaatctttagtatactagccacaagctacatttacgtgcacaaggcttcacactga

SEQ ID NO: 445888 - DNA, 120 bp, Artificial Sequence
  ENSG00000154721_36 (sequence is synthesized)
tgttttgttgcatgactttctctgtgaatattgtctgtaaatataagaaattcagtaagaattgtctttttttctacctaagatatatgttcatgttcttgctgagaaaatgtatggaag

SEQ ID NO: 445889 - DNA, 120 bp, Artificial Sequence
  ENSG00000154721_37 (sequence is synthesized)
agagcatatatgttccagattggaagtgataatgtagtaaatattgtcttttatattccacaaacaggaagagtaattcttcatctaaagccacgacaatgagtgaaaatgatttcaagc

SEQ ID NO: 445890 - DNA, 120 bp, Artificial Sequence
  ENSG00000154721_38 (sequence is synthesized)
ctctatgggcgtagagagaagatggatgacaaactatctgaggctatggcagctgggagtggagaagatatactgaagccatggcttcagacagtttgtcatctcctaattcctttgaag

SEQ ID NO: 445891 - DNA, 120 bp, Artificial Sequence
  ENSG00000154721_39 (sequence is synthesized)
tgtctttctcctatgtcaactaattttctattaatcatctgtttaaagtcaaaagagagaagttgggttatttgtgtaggtttactctcacaagaagttactcaagtttatcaagaaata

SEQ ID NO: 445892 - DNA, 120 bp, Artificial Sequence
  ENSG00000154721_40 (sequence is synthesized)
cctggcaccaacactgcttggcttttggggaggcctcaggaagctttttactcatggctgaaggcaaagcgggagcaggcacgtcacatggcaaaagcaggagcaaggttggggaggtgc

SEQ ID NO: 445893 - DNA, 120 bp, Artificial Sequence
  ENSG00000154721_41 (sequence is synthesized)
cacatacttttaaacaaccagatttcaagaaaactcagtcactattctgaggacagcatcaagggggcggtactaaaccattcatgagaaatccgcccccatgatttaatcggctccaac

SEQ ID NO: 445894 - DNA, 120 bp, Artificial Sequence
  ENSG00000154721_42 (sequence is synthesized)
caacattggggattacaattcaacataagatttgggcaaggcaaatatccagactctatcaacatcccacttcacacttcatacctacttgtaaatggtagtacagagagaatgatgatt

SEQ ID NO: 445895 - DNA, 120 bp, Artificial Sequence
  ENSG00000154721_43 (sequence is synthesized)
agaatgatgattacccagcctacttgtaaatggtagtacagagagaatgatgattacccagacaagaaatatggtcactaatttgatttcataggcatttgtataaactaacttaaaaaa

SEQ ID NO: 445896 - DNA, 120 bp, Artificial Sequence
  ENSG00000154723_0 (sequence is synthesized)
tgaaacggcggcccataatgcattgcgatggcgggtaggcgtgtgggggcggagccagggccggaagtagagcggaggtggtggcggcggaggctttggcagctcgggactgagtgcaag

SEQ ID NO: 445897 - DNA, 120 bp, Artificial Sequence
  ENSG00000154723_1 (sequence is synthesized)
aatcagcatgattcttcagaggctcttcaggttctcctctgtcattcggtcagccgtctcagtccatttgcggaggaacattggtgttacagcagtggcatttaataaggaacttgatcc

SEQ ID NO: 445898 - DNA, 120 bp, Artificial Sequence
  ENSG00000154723_2 (sequence is synthesized)
ttgtggacaagattagagaatacaaatctaagcgacagacatctggaggacctgttgatgctagttcagagtatcagcaagagctggagagggagctttttaagctcaagcaaatgtttg

SEQ ID NO: 445899 - DNA, 120 bp, Artificial Sequence
  ENSG00000154723_3 (sequence is synthesized)
gtaatgcagacatgaatacatttcccaccttcaaatttgaagatcccaaatttgaagtcatcgaaaaaccccaggcctgaagaaataaagtaaaattaatctggtaatttgtcacggatt

SEQ ID NO: 445900 - DNA, 120 bp, Artificial Sequence
  ENSG00000154723_4 (sequence is synthesized)
agttgtacaactagttagaagtttcagaataaacatgcatttcataactgtcaaatgttcttttaattctgagtccaaataaattatttggtgatgttgagtgtgttcttgatgaattga

SEQ ID NO: 445901 - DNA, 120 bp, Artificial Sequence
  ENSG00000154723_5 (sequence is synthesized)
ccggaacgaggccggcccgcgagggcccgcgctcccctcctccccggcggccgcactcacccactccggaatcggccctgtcgcccccgcccgcactccagagccggctgagaacggcag

SEQ ID NO: 445902 - DNA, 120 bp, Artificial Sequence
  ENSG00000154723_6 (sequence is synthesized)
aacggcagcggcgagggctccacgtgcagcgtctctccgggtaagacctgcagctcccgcgactagaagtgtgaggtcccagggcccttcccgcggaatcggcgctgagaagccccaacc

SEQ ID NO: 445903 - DNA, 120 bp, Artificial Sequence
  ENSG00000154723_7 (sequence is synthesized)
tacaaggaagcacaacgccccaatccgctttgttttacacagtctcactttccctgcacctttatacacttcgataaccctaacgaacaggacgctgactcggaggggagcttgaactag

SEQ ID NO: 445904 - DNA, 120 bp, Artificial Sequence
  ENSG00000154723_8 (sequence is synthesized)
cagagatgatgacattctaatcttaagcagctaaccagcagctagccttgtagctacagaagaaaatgtttgccgatccctgactcgtggtgaaaattttattttgggggcagagccatg

SEQ ID NO: 445905 - DNA, 120 bp, Artificial Sequence
  ENSG00000154723_9 (sequence is synthesized)
atatttacacttacctggatttttagagaactgaatgacagtgttgacatgtgaatttattaggaccatgacgtgtgcctgagaagctgccggctaaatgtttgctgttagaataagagc

SEQ ID NO: 445906 - DNA, 120 bp, Artificial Sequence
  ENSG00000154723_10 (sequence is synthesized)
agtataggagatcacataacatagtgattaaatggtggggatctgaaatcgaactgcccaatcttgaatccttataatcactttcagctgtgtaatcttgagtaattaactggtgcatgt

SEQ ID NO: 445907 - DNA, 120 bp, Artificial Sequence
  ENSG00000154723_11 (sequence is synthesized)
ctcctcatctgacatttggggagaattatagtatcttctgcatatgtagttaaatgacataatatatgcaaagtcaattaatggaatgcatggctcatagaaagtgttgcataaatgttt

SEQ ID NO: 445908 - DNA, 120 bp, Artificial Sequence
  ENSG00000154723_12 (sequence is synthesized)
agctatatttctatgtaaatgtttacaaacagtgtttactaaaaaaatcagaaaattgatgagttaaatcttgagcattctacataatccattttattgcaatttggctaagcttgaccc

SEQ ID NO: 445909 - DNA, 120 bp, Artificial Sequence
  ENSG00000154727_0 (sequence is synthesized)
gccccagccaggctgcgggcccgagacccccgggcctccctgccccccgcgccgccccgatttgccctcagagagggtatcgatcttatttctgggtctacggcaaactccaaggtctac

SEQ ID NO: 445910 - DNA, 120 bp, Artificial Sequence
  ENSG00000154727_1 (sequence is synthesized)
aaacgtagaggtcagctgtgaccccgggccaggccgtgaaggtccccaggacacagagctgctctctcctcctagtaaaggtgagaggcagcccaggcctcgtgaaaaaacccagaactg

SEQ ID NO: 445911 - DNA, 120 bp, Artificial Sequence
  ENSG00000154727_2 (sequence is synthesized)
gagtcccaaaaggccacgctgatctagctaccctcccagtcaccttgcactcagtcccgagctgccaaagcctccgccgccaccacctccgctctacttccggccctggctccgccccca

SEQ ID NO: 445912 - DNA, 120 bp, Artificial Sequence
  ENSG00000154727_3 (sequence is synthesized)
cacgcctacccgccatcgcaatgcattatgggccgccgtttcagtcggtcgacgctcaccggacaggaagcgtctcggagacagtctgcgaccggacgggtctaggtgagacagaagcca

SEQ ID NO: 445913 - DNA, 120 bp, Artificial Sequence
  ENSG00000154727_4 (sequence is synthesized)
aacaggaggaggaagtggagggactgatcctttgaaatactccagccatgactaaaagagaagcagaggagctgatagaaattgagattgatggaacagagaaagcagagtgcacagaag

SEQ ID NO: 445914 - DNA, 120 bp, Artificial Sequence
  ENSG00000154727_5 (sequence is synthesized)
aaagcattgtagaacaaacctacgcgccagctgaatgtgtaagccaggccatagacatcaatgaaccaataggcaatttaaagaaactgctagaaccaagactacagtgttctttggatg

SEQ ID NO: 445915 - DNA, 120 bp, Artificial Sequence
  ENSG00000154727_6 (sequence is synthesized)
ctcatgaaatttgtctgcaagatatccagctggatccagaacgaagtttatttgaccaaggagtaaaaacagatggaactgtacagcttagtgtacaggtaatttcttaccaaggaattg

SEQ ID NO: 445916 - DNA, 120 bp, Artificial Sequence
  ENSG00000154727_7 (sequence is synthesized)
aaccaaagttaaacatccttgaaattgttaaacctgcggacactgttgaggttgttattgatccagatgcccaccatgctgaatcagaagcacatcttgttgaagaagctcaagtgataa

SEQ ID NO: 445917 - DNA, 120 bp, Artificial Sequence
  ENSG00000154727_8 (sequence is synthesized)
ctcttgatggcacaaaacacatcacaaccatttcagatgaaacttcagaacaagtgacaagatgggctgctgcactggaaggctataggaaagaacaagaacgccttgggataccctatg

SEQ ID NO: 445918 - DNA, 120 bp, Artificial Sequence
  ENSG00000154727_9 (sequence is synthesized)
atcccatacagtggtccacagaccaagtcctgcattgggtggtttgggtaatgaaggaattcagcatgaccgatatagacctcaccacactcaacatttcggggagagaattatgtagtc

SEQ ID NO: 445919 - DNA, 120 bp, Artificial Sequence
  ENSG00000154727_10 (sequence is synthesized)
tcaaccaagaagatttttttcagcgggttcctcggggagaaattctctggagtcatctggaacttctccgaaaatatgtattggcaagtcaagaacaacagatgaatgaaatagttacaa

SEQ ID NO: 445920 - DNA, 120 bp, Artificial Sequence
  ENSG00000154727_11 (sequence is synthesized)
ttgatcaacctgtgcaaattattccagcatcagtgcaatctgctacacctactaccattaaagttataaatagtagtgcgaaagcagccaaagtacaaagagcgccgaggatttcaggag

SEQ ID NO: 445921 - DNA, 120 bp, Artificial Sequence
  ENSG00000154727_12 (sequence is synthesized)
aagatagaagctcacctgggaacagaacaggaaacaatggccaaatccaactatggcagtttttgctagaacttcttactgataaggacgctcgagactgcatttcttgggttggtgatg

SEQ ID NO: 445922 - DNA, 120 bp, Artificial Sequence
  ENSG00000154727_13 (sequence is synthesized)
aaggtgaatttaagctaaatcagcctgaactggttgcacagaaatggggacagcgtaaaaataagcctacgatgaactatgagaaactcagtcgtgcattaagatattattacgatgggg

SEQ ID NO: 445923 - DNA, 120 bp, Artificial Sequence
  ENSG00000154727_14 (sequence is synthesized)
acatgatttgtaaagttcaaggcaagagatttgtgtacaagtttgtctgtgacttgaagactcttattggatacagtgcagcggagttgaaccgtttggtcacagaatgtgaacagaaga

SEQ ID NO: 445924 - DNA, 120 bp, Artificial Sequence
  ENSG00000154727_15 (sequence is synthesized)
aacttgcaaagatgcagctccatggaattgcccagccagtcacagcagtagctctggctactgcttctctgcaaacggaaaaggataattgagccccaggacattctgagactccaaagt

SEQ ID NO: 445925 - DNA, 120 bp, Artificial Sequence
  ENSG00000154727_16 (sequence is synthesized)
ctttcttaaaatgtttagagcaagtatagctcttacctttattactgaatttgaatcttcttttatttctaggctgtacagtctgatgcatgatttttttataaatatttcatactcttg

SEQ ID NO: 445926 - DNA, 120 bp, Artificial Sequence
  ENSG00000154727_17 (sequence is synthesized)
tgaatttggatctttttactttgagcatatattttagaatatgtgtatgttaaaggatctccacaatgtctgcagtgtgaaggcaggttcattgtggaatagtttaacagtcaggaaggc

SEQ ID NO: 445927 - DNA, 120 bp, Artificial Sequence
  ENSG00000154727_18 (sequence is synthesized)
taaactggtcagtattaatgtgtagccctaccaaaaatagccagtagtatctgaaaatgaaaaataaatgaagtatctctaggaaacagtctggcttaactatttttgaaaatataactg

SEQ ID NO: 445928 - DNA, 120 bp, Artificial Sequence
  ENSG00000154727_19 (sequence is synthesized)
tttcccctctctgctgctttagatgttgctttacatagaaccagaaaatggaatttctcagctaaagcatgtgtgcctgtttcatctaatcaagcagagctaaaatgttcataccgaata

SEQ ID NO: 445929 - DNA, 120 bp, Artificial Sequence
  ENSG00000154727_20 (sequence is synthesized)
aatttatattaataaattactaaactaagagtatcaggttatttatatatttgcaagcaaaggacagtaagaagttgactggcaaaagagcagtgctgaaggaggagatccaggtttaaa

SEQ ID NO: 445930 - DNA, 120 bp, Artificial Sequence
  ENSG00000154727_21 (sequence is synthesized)
agagaggcatttaattctaataaaccagctgttataaaaattataaaatgatctctgtttttcctgtcagagatttaaaaaactgaaaaggtatacctcaacccaaaaataaaggtttgt

SEQ ID NO: 445931 - DNA, 120 bp, Artificial Sequence
  ENSG00000154727_22 (sequence is synthesized)
tttggtttgttatggcttccttttttaaaaaattaccctgtagtgccagtttattatgcaaagcagcttatattcctttgtttctgataaaatgaagactttaaatcagtcagtagtact

SEQ ID NO: 445932 - DNA, 120 bp, Artificial Sequence
  ENSG00000154727_23 (sequence is synthesized)
ttacctttcaaggcattagtaaattacttgcaaatagttttaaaaggaaaatacgacctttgttataggcagtcttctctttaagacaatacttttccacttgttttccttttccatatt

SEQ ID NO: 445933 - DNA, 120 bp, Artificial Sequence
  ENSG00000154727_24 (sequence is synthesized)
gtattcatatagctgtatacatattcagttgatcattttataaacatatgaaggcataaagatatacagaagaaaaattattaaacaactcattttaagattcaaattaactaattcctg

SEQ ID NO: 445934 - DNA, 120 bp, Artificial Sequence
  ENSG00000154727_25 (sequence is synthesized)
aattcctgcatatatgacattccttacataagcgaacactaaacaaaaatggctagaaatgtctttttctttcttttctctctttgttgtttaaggtattaagcacgaattattacatga

SEQ ID NO: 445935 - DNA, 120 bp, Artificial Sequence
  ENSG00000154727_26 (sequence is synthesized)
gactggcagatagctattaatcctcttacagatttgagaaagttgattctcaaatatttatgcaccttctccttcattgttttctttaaatctgtcctcttaaaaagcttcttaagagct

SEQ ID NO: 445936 - DNA, 120 bp, Artificial Sequence
  ENSG00000154727_27 (sequence is synthesized)
cagttaatgcttttgacttaactaggagaaaaaggcatgataatacaggcaagatggcattgttagcaattctggtagtggtttggaatgaatcctaagaggcagggatcttaaggacaa

SEQ ID NO: 445937 - DNA, 120 bp, Artificial Sequence
  ENSG00000154727_28 (sequence is synthesized)
ggaagagaagagagagagggagggatctttgatctctttctctggtaatcttaatgcataattttactaaaacatgttctcaattcattcatattattaagctcttcctgcagttgatat

SEQ ID NO: 445938 - DNA, 120 bp, Artificial Sequence
  ENSG00000154727_29 (sequence is synthesized)
ctgagcagagtaagatttgtatttccatttttacttttttgaaagagaatatatggacagattattagtacaatttgggcactgtggttttaagaatatctgagtaaaataacaatatga

SEQ ID NO: 445939 - DNA, 120 bp, Artificial Sequence
  ENSG00000154727_30 (sequence is synthesized)
aataataaacagaagctctaacgtcaggtaacaaatagacagcaagaaaggttttgcaccatcctcttacggcctagagagttgacaagttgcttgtagttttaaaaaaataataaagta

SEQ ID NO: 445940 - DNA, 120 bp, Artificial Sequence
  ENSG00000154727_31 (sequence is synthesized)
tacccttctggtatatcatcaagagcttaagaatcttggctttcatatttaaaatgcttttggggagacatatattaaaattttagccaagatgatagacatgtctcaattatatatgtg

SEQ ID NO: 445941 - DNA, 120 bp, Artificial Sequence
  ENSG00000154727_32 (sequence is synthesized)
tgtgtatgtttttaaagctaaaaacattacttttagatccctagaatgaaaatttttttctcatctatgcaattcccatatggtttttttttaaatcatattttattcattttctccctt

SEQ ID NO: 445942 - DNA, 120 bp, Artificial Sequence
  ENSG00000154727_33 (sequence is synthesized)
tagcaattttcattttatttctcataatttgaacagagacagttctcatacatgatcagatgctttttttttcttcttaccatcatttatgcatgacataggtaatgtgactaatttctc

SEQ ID NO: 445943 - DNA, 120 bp, Artificial Sequence
  ENSG00000154727_34 (sequence is synthesized)
cagttgattcaagaaactcattactttgcctcaaattatatgtaaaatatttgttttacttaggttacagttatcagaaaggtagtttttttcttctattaaaatataacattgtgaaag

SEQ ID NO: 445944 - DNA, 120 bp, Artificial Sequence
  ENSG00000154727_35 (sequence is synthesized)
aaaataaaatttatgctattctttgctttgtttttataaatgaatttttcatagaatttacagtatattcaaaggaagaaagataaaattattggtcatcatttgtaccttagaagtaca

SEQ ID NO: 445945 - DNA, 120 bp, Artificial Sequence
  ENSG00000154727_36 (sequence is synthesized)
agaatttaagtaaaagaaatgttcatttttgttttaaaatttgttttccatgtgaagtttttattgagccaactttcatacatatcttgctagcctaaagtctaaatatttgtgttggca

SEQ ID NO: 445946 - DNA, 120 bp, Artificial Sequence
  ENSG00000154727_37 (sequence is synthesized)
tcagaaaaacaaatgaggcagaattgctatgtgtggttgatcttcagataaattgactgatcacagttatttttgtatcagtctatgttattaggaaaaattgtttagttgttttctccc

SEQ ID NO: 445947 - DNA, 120 bp, Artificial Sequence
  ENSG00000154727_38 (sequence is synthesized)
ctgattaatggtgatattcaagtatgatacaaaaagaattgtaccaccaaatatttttgtgaggtctgctgttttccatattcattttatgctactgcctttaagaaagaactagtgtat

SEQ ID NO: 445948 - DNA, 120 bp, Artificial Sequence
  ENSG00000154727_39 (sequence is synthesized)
ccttgaaatagcacaaaaatgttttaaaattcataattgcaaaacaaatctgtgactaacttaatgtcttcagatctaaagggtgtaaaaatattgatacttcaatatttcacttgctgc

SEQ ID NO: 445949 - DNA, 120 bp, Artificial Sequence
  ENSG00000154727_40 (sequence is synthesized)
caggaaaaacaaaattctcaatcttttgtaaatgggaggaggacttttgcatacatttttactctttaaataacgacaacgacacttatactgtcataataacaattatgtatttctttg

SEQ ID NO: 445950 - DNA, 120 bp, Artificial Sequence
  ENSG00000154727_41 (sequence is synthesized)
gacacttatactgtcataataacaattatgtatttctttgtggttttaattttttttgtaattttacataaaacagttattttctatttttacgcagataaatatttgtgcataaaatgt

SEQ ID NO: 445951 - DNA, 120 bp, Artificial Sequence
  ENSG00000154727_42 (sequence is synthesized)
aggtgcctgggaggcgggaggggggttggggcttctcagcgccgattccgcgggaagggccctgggacctcacacttctagtcgcgggagctgcaggtcttacccggagagacgctgcac

SEQ ID NO: 445952 - DNA, 120 bp, Artificial Sequence
  ENSG00000154734_0 (sequence is synthesized)
gcactcgctggaaagcggctccgagccaggggctattgcaaagccagggtgcgctaccggacggagaggggagagccctgagcagagtgagcaacatcgcagccaaggcggaggccgaag

SEQ ID NO: 445953 - DNA, 120 bp, Artificial Sequence
  ENSG00000154734_1 (sequence is synthesized)
aggggcgccaggcaccaatctccgcgttgcctcagccccggaggcgccccagagcgcttcttgtcccagcagagccactctgcctgcgcctgcctctcagtgtctccaactttgcgctgg

SEQ ID NO: 445954 - DNA, 120 bp, Artificial Sequence
  ENSG00000154734_2 (sequence is synthesized)
aagaaaaacttcccgcgcgccggcagaactgcagcgcctccttttagtgactccgggagcttcggctgtagccggctctgcgcgcccttccaacgaataatagaaattgttaattttaac

SEQ ID NO: 445955 - DNA, 120 bp, Artificial Sequence
  ENSG00000154734_3 (sequence is synthesized)
aatccagagcaggccaacgaggctttgctctcccgacccgaactaaaggtccctcgctccgtgcgctgctacgagcggtgtctcctggggctccaatgcagcgagctgtgcccgaggggt

SEQ ID NO: 445956 - DNA, 120 bp, Artificial Sequence
  ENSG00000154734_4 (sequence is synthesized)
tcggaaggcgcaagctgggcagcgacatggggaacgcggagcgggctccggggtctcggagctttgggccagtacccacgctgctgctgctcgccgcggcgctactggccgtgtcggacg

SEQ ID NO: 445957 - DNA, 120 bp, Artificial Sequence
  ENSG00000154734_5 (sequence is synthesized)
cactcgggcgcccctccgaggaggacgaggagctagtggtgccggagctggagcgcgccccgggacacgggaccacgcgcctccgcctgcacgcctttgaccagcagctggatctggagc

SEQ ID NO: 445958 - DNA, 120 bp, Artificial Sequence
  ENSG00000154734_6 (sequence is synthesized)
tgcggcccgacagcagctttttggcgcccggcttcacgctccagaacgtggggcgcaaatccgggtccgagacgccgcttccggaaaccgacctggcgcactgcttctactccggcaccg

SEQ ID NO: 445959 - DNA, 120 bp, Artificial Sequence
  ENSG00000154734_7 (sequence is synthesized)
tgaatggcgatcccagctcggctgccgccctcagcctctgcgagggcgtgcgcggcgccttctacctgctgggggaggcgtatttcatccagccgctgcccgccgccagcgagcgcctcg

SEQ ID NO: 445960 - DNA, 120 bp, Artificial Sequence
  ENSG00000154734_8 (sequence is synthesized)
ccaccgccgccccaggggagaagccgccggcaccactacagttccacctcctgcggcggaatcggcagggcgacgtcggcggcacgtgcggggtcgtggacgacgagccccggccgactg

SEQ ID NO: 445961 - DNA, 120 bp, Artificial Sequence
  ENSG00000154734_9 (sequence is synthesized)
ggaaagcggagaccgaagacgaggacgaagggactgagggcgaggacgaaggggctcagtggtcgccgcaggacccggcactgcaaggcgtaggacagcccacaggaactggaagcataa

SEQ ID NO: 445962 - DNA, 120 bp, Artificial Sequence
  ENSG00000154734_10 (sequence is synthesized)
gaaagaagcgatttgtgtccagtcaccgctatgtggaaaccatgcttgtggcagaccagtcgatggcagaattccacggcagtggtctaaagcattaccttctcacgttgttttcggtgg

SEQ ID NO: 445963 - DNA, 120 bp, Artificial Sequence
  ENSG00000154734_11 (sequence is synthesized)
cagccagattgtacaaacaccccagcattcgtaattcagttagcctggtggtggtgaagatcttggtcatccacgatgaacagaaggggccggaagtgacctccaatgctgccctcactc

SEQ ID NO: 445964 - DNA, 120 bp, Artificial Sequence
  ENSG00000154734_12 (sequence is synthesized)
tgcggaacttttgcaactggcagaagcagcacaacccacccagtgaccgggatgcagagcactatgacacagcaattcttttcaccagacaggacttgtgtgggtcccagacatgtgata

SEQ ID NO: 445965 - DNA, 120 bp, Artificial Sequence
  ENSG00000154734_13 (sequence is synthesized)
ctcttgggatggctgatgttggaactgtgtgtgatccgagcagaagctgctccgtcatagaagatgatggtttacaagctgccttcaccacagcccatgaattaggccacgtgtttaaca

SEQ ID NO: 445966 - DNA, 120 bp, Artificial Sequence
  ENSG00000154734_14 (sequence is synthesized)
tgccacatgatgatgcaaagcagtgtgccagccttaatggtgtgaaccaggattcccacatgatggcgtcaatgctttccaacctggaccacagccagccttggtctccttgcagtgcct

SEQ ID NO: 445967 - DNA, 120 bp, Artificial Sequence
  ENSG00000154734_15 (sequence is synthesized)
acatgattacatcatttctggataatggtcatggggaatgtttgatggacaagcctcagaatcccatacagctcccaggcgatctccctggcacctcgtacgatgccaaccggcagtgcc

SEQ ID NO: 445968 - DNA, 120 bp, Artificial Sequence
  ENSG00000154734_16 (sequence is synthesized)
agtttacatttggggaggactccaaacactgccccgatgcagccagcacatgtagcaccttgtggtgtaccggcacctctggtggggtgctggtgtgtcaaaccaaacacttcccgtggg

SEQ ID NO: 445969 - DNA, 120 bp, Artificial Sequence
  ENSG00000154734_17 (sequence is synthesized)
cggatggcaccagctgtggagaagggaaatggtgtatcaacggcaagtgtgtgaacaaaaccgacagaaagcattttgatacgccttttcatggaagctggggaatgtgggggccttggg

SEQ ID NO: 445970 - DNA, 120 bp, Artificial Sequence
  ENSG00000154734_18 (sequence is synthesized)
gagactgttcgagaacgtgcggtggaggagtccagtacacgatgagggaatgtgacaacccagtcccaaagaatggagggaagtactgtgaaggcaaacgagtgcgctacagatcctgta

SEQ ID NO: 445971 - DNA, 120 bp, Artificial Sequence
  ENSG00000154734_19 (sequence is synthesized)
accttgaggactgtccagacaataatggaaaaacctttagagaggaacaatgtgaagcacacaacgagttttcaaaagcttcctttgggagtgggcctgcggtggaatggattcccaagt

SEQ ID NO: 445972 - DNA, 120 bp, Artificial Sequence
  ENSG00000154734_20 (sequence is synthesized)
acgctggcgtctcaccaaaggacaggtgcaagctcatctgccaagccaaaggcattggctacttcttcgttttgcagcccaaggttgtagatggtactccatgtagcccagattccacct

SEQ ID NO: 445973 - DNA, 120 bp, Artificial Sequence
  ENSG00000154734_21 (sequence is synthesized)
gtaaaagctggttgtgatcgcatcatagactccaaaaagaagtttgataaatgtggtgtttgcgggggaaatggatctacttgtaaaaaaatatcaggatcagttactagtgcaaaacct

SEQ ID NO: 445974 - DNA, 120 bp, Artificial Sequence
  ENSG00000154734_22 (sequence is synthesized)
ggatatcatgatatcatcacaattccaactggagccaccaacatcgaagtgaaacagcggaaccagaggggatccaggaacaatggcagctttcttgccatcaaagctgctgatggcaca

SEQ ID NO: 445975 - DNA, 120 bp, Artificial Sequence
  ENSG00000154734_23 (sequence is synthesized)
tatattcttaatggtgactacactttgtccaccttagagcaagacattatgtacaaaggtgttgtcttgaggtacagcggctcctctgcggcattggaaagaattcgcagctttagccct

SEQ ID NO: 445976 - DNA, 120 bp, Artificial Sequence
  ENSG00000154734_24 (sequence is synthesized)
ctcaaagagcccttgaccatccaggttcttactgtgggcaatgcccttcgacctaaaattaaatacacctacttcgtaaagaagaagaaggaatctttcaatgctatccccactttttca

SEQ ID NO: 445977 - DNA, 120 bp, Artificial Sequence
  ENSG00000154734_25 (sequence is synthesized)
gcatgggtcattgaagagtggggcgaatgttctaagtcatgtgaattgggttggcagagaagactggtagaatgccgagacattaatggacagcctgcttccgagtgtgcaaaggaagtg

SEQ ID NO: 445978 - DNA, 120 bp, Artificial Sequence
  ENSG00000154734_26 (sequence is synthesized)
aagccagccagcaccagaccttgtgcagaccatccctgcccccagtggcagctgggggagtggtcatcatgttctaagacctgtgggaagggttacaaaaaaagaagcttgaagtgtctg

SEQ ID NO: 445979 - DNA, 120 bp, Artificial Sequence
  ENSG00000154734_27 (sequence is synthesized)
tcccatgatggaggggtgttatctcatgagagctgtgatcctttaaagaaacctaaacatttcatagacttttgcacaatggcagaatgcagttaagtggtttaagtggtgttagctttg

SEQ ID NO: 445980 - DNA, 120 bp, Artificial Sequence
  ENSG00000154734_28 (sequence is synthesized)
agggcaaggcaaagtgaggaagggctggtgcagggaaagcaagaaggctggagggatccagcgtatcttgccagtaaccagtgaggtgtatcagtaaggtgggattatgggggtagatag

SEQ ID NO: 445981 - DNA, 120 bp, Artificial Sequence
  ENSG00000154734_29 (sequence is synthesized)
aaaaggagttgaatcatcagagtaaactgccagttgcaaatttgataggatagttagtgaggattattaacctctgagcagtgatatagcataataaagccccgggcattattattatta

SEQ ID NO: 445982 - DNA, 120 bp, Artificial Sequence
  ENSG00000154734_30 (sequence is synthesized)
tttcttttgttacatctattacaagtttagaaaaaacaaagcaattgtcaaaaaaagttagaactattacaacccctgtttcctggtacttatcaaatacttagtatcatgggggttggg

SEQ ID NO: 445983 - DNA, 120 bp, Artificial Sequence
  ENSG00000154734_31 (sequence is synthesized)
aaatgaaaagtaggagaaaagtgagattttactaagacctgttttactttacctcactaacaatggggggagaaaggagtacaaataggatctttgaccagcactgtttatggctgctat

SEQ ID NO: 445984 - DNA, 120 bp, Artificial Sequence
  ENSG00000154734_32 (sequence is synthesized)
ggtttcagagaatgtttatacattatttctaccgagaattaaaacttcagattgttcaacatgagagaaaggctcagcaacgtgaaataacgcaaatggcttcctctttccttttttgga

SEQ ID NO: 445985 - DNA, 120 bp, Artificial Sequence
  ENSG00000154734_33 (sequence is synthesized)
ccatctcagtctttatttgtgtaattcattttgaggaaaaaacaactccatgtatttattcaagtgcattaaagtctacaatggaaaaaaagcagtgaagcattagatgctggtaaaagc

SEQ ID NO: 445986 - DNA, 120 bp, Artificial Sequence
  ENSG00000154734_34 (sequence is synthesized)
tagaggagacacaatgagcttagtacctccaacttcctttctttcctaccatgtaaccctgctttgggaatatggatgtaaagaagtaacttgtgtctcatgaaaatcagtacaatcaca

SEQ ID NO: 445987 - DNA, 120 bp, Artificial Sequence
  ENSG00000154734_35 (sequence is synthesized)
caaggaggatgaaacgccggaacaaaaatgaggtgtgtagaacagggtcccacaggtttggggacattgagatcacttgtcttgtggtggggaggctgctgaggggtagcaggtccatct

SEQ ID NO: 445988 - DNA, 120 bp, Artificial Sequence
  ENSG00000154734_36 (sequence is synthesized)
ccagcagctggtccaacagtcgtatcctggtgaatgtctgttcagctcttctgtgagaatatgattttttccatatgtatatagtaaaatatgttactataaattacatgtactttataa

SEQ ID NO: 445989 - DNA, 120 bp, Artificial Sequence
  ENSG00000154734_37 (sequence is synthesized)
gtattggtttgggtgttccttccaagaaggactatagttagtaataaatgcctataataacatatttatttttatacatttatttctaatgaaaaaaacttttaaattatatcgcttttg

SEQ ID NO: 445990 - DNA, 120 bp, Artificial Sequence
  ENSG00000154734_38 (sequence is synthesized)
tggaagtgcatataaaatagagtatttatacaatatatgttactagaaataaaagaacacttttggaatgtgtgtgtctgttttttgaagtgggaattcattcctaggaaggaaacctga

SEQ ID NO: 445991 - DNA, 120 bp, Artificial Sequence
  ENSG00000154734_39 (sequence is synthesized)
ggcacaaatattgaatctgaagaccgaattattttcttaaattatttggcaataagattttgttctagaggaaggtgaagcaagacggctgaatagaagatttttttctaatgagatgta

SEQ ID NO: 445992 - DNA, 120 bp, Artificial Sequence
  ENSG00000154734_40 (sequence is synthesized)
tttcttatatccttggtatacatgattgctaaaaagaaagaaatttatgatgtcatttgttactaatgtatctaataatatacatcagtggttggcaaacttcttttgtaaaaagccaaa

SEQ ID NO: 445993 - DNA, 120 bp, Artificial Sequence
  ENSG00000154734_41 (sequence is synthesized)
tggtaaatatttgcaactttgtcaatcctgtcaataactatcctgtcaataccatctatgtcacaactgctcaactgtgctgttgtagcacaaaactagccataaagaatgagtaagtga

SEQ ID NO: 445994 - DNA, 120 bp, Artificial Sequence
  ENSG00000154734_42 (sequence is synthesized)
atggacatggctgtgttctaaaaaaactacttgcaaaaacaaataatgggtcagatttgttctgcagattcagtttgccaaccctggtatataccataaattaaatggaaagagctttca

SEQ ID NO: 445995 - DNA, 120 bp, Artificial Sequence
  ENSG00000154734_43 (sequence is synthesized)
aacatggtcatttttattaaagtaaaaaataagatagtagtagctctggacatttggaaatgtgtatgtttgtttacaccctgtgaaaagtagacatggtctgcaaaagagccaatctcc

SEQ ID NO: 445996 - DNA, 120 bp, Artificial Sequence
  ENSG00000154734_44 (sequence is synthesized)
taaatatatttctttctctagaaatgttattttgggacaaatgaatgaatccctgttgggaaaaaagaacctgctgcatatcatccatattttattttattattattttttttgagatgg

SEQ ID NO: 445997 - DNA, 120 bp, Artificial Sequence
  ENSG00000154734_45 (sequence is synthesized)
cccatccgtgtcctctagcaggaatgcgagatagcttatttttagaactgattctttgtcccatgtggctttctttgataccctaaaagttctctttagataattctaatgctgatgatt

SEQ ID NO: 445998 - DNA, 120 bp, Artificial Sequence
  ENSG00000154734_46 (sequence is synthesized)
ttcgttttgcagcccaaggtagttcgtttttaccttatttttacctaaaaatcaaggcctgggcttgctaccttttcaaacaatttttgttatactttctttgctttccatattaacata

SEQ ID NO: 445999 - DNA, 120 bp, Artificial Sequence
  ENSG00000154734_47 (sequence is synthesized)
tcttcaatttcaaatttgaactccttttcttttacattaattggcaactgcctgctttgagtttagtgttttcagttatgaatgaagcttaaatctaacacttcacatgcttgcaattgc

SEQ ID NO: 446000 - DNA, 120 bp, Artificial Sequence
  ENSG00000154734_48 (sequence is synthesized)
tcgctattactcttttatatgcaaagaaaagctttttggacagtcaagcgctcctctgtgcgactaggcttcacatacagctcatagttagatacattttatattcacacagtaaccagt

SEQ ID NO: 446001 - DNA, 120 bp, Artificial Sequence
  ENSG00000154734_49 (sequence is synthesized)
agttttggaaaatagtctatgcatggtccaaaatacttgttactgggtaactagcagtagcaggtgcaaacagaataatagaagtggtagtctgagtattgattatttttatgtttgaaa

SEQ ID NO: 446002 - DNA, 120 bp, Artificial Sequence
  ENSG00000154734_50 (sequence is synthesized)
acacatattgaactaggaaaagcatcatttcttttgctgttttgctaagggaatacatctggatctgagacagaaaatggaatttaatgtgattgagatgatcgtgtgtcattagcacca

SEQ ID NO: 446003 - DNA, 120 bp, Artificial Sequence
  ENSG00000154734_51 (sequence is synthesized)
taggctatgaaaatattcccaagttgcagattcaatattcagcaagtgatttctgaagcacttactcttgccagatactaattattctaggctctgaagatacagcagtaaacaaagtga

SEQ ID NO: 446004 - DNA, 120 bp, Artificial Sequence
  ENSG00000154734_52 (sequence is synthesized)
cataggtcaatagataaataatttttaaaaatatctaatttcttcagatgtctatacgtagtactgaaaaatatgccaaagtgaagggtaaatgcatgaaatgcataatgtgtagagggt

SEQ ID NO: 446005 - DNA, 120 bp, Artificial Sequence
  ENSG00000154734_53 (sequence is synthesized)
actgtgtttaattagcatggtcaggaaagtagagagaaaatgtttacacttatcattgcagcatctccttcctttgcttgtatgtaacactagacatgtgtccttttttcaggttgtaga

SEQ ID NO: 446006 - DNA, 120 bp, Artificial Sequence
  ENSG00000154736_0 (sequence is synthesized)
acagcgctcgcgctgctctcggcgctcgcagctgccgactggggatgacggcgggcaggaggagaccgcagccgaagggacacagacacgccgcttcaccagctcgcctcaggctgcccc

SEQ ID NO: 446007 - DNA, 120 bp, Artificial Sequence
  ENSG00000154736_1 (sequence is synthesized)
cctgcatttttgttttaatttttacggctttttcccctctctttcttcccttcctcctggtcccagcagagccaaggaaacccacaaaataagaaaggaagtgggccccggagcttggaa

SEQ ID NO: 446008 - DNA, 120 bp, Artificial Sequence
  ENSG00000154736_2 (sequence is synthesized)
cctccacagccggcttgtccagcgcagcgcgggggcgggaggctgcgcgcaccagttgccagcccggtgcgcggtacctttccttacttttcttgaaacagcgatcgtgcctgcatttgg

SEQ ID NO: 446009 - DNA, 120 bp, Artificial Sequence
  ENSG00000154736_3 (sequence is synthesized)
tggttttttggtttttgtttttttccttttcccgtatttgctgaatctccactatccgactttttttttttaatcttttctttccccccccccccaccccacctctttctggagcacgaa

SEQ ID NO: 446010 - DNA, 120 bp, Artificial Sequence
  ENSG00000154736_4 (sequence is synthesized)
tccaaacattttcccaagcaacaaagaaaagttcgcacgctggcaccgcagcccggacaggctggcgctgctgccgggcccccctccctccgacacttgactcaatcctgcaagcaagtg

SEQ ID NO: 446011 - DNA, 120 bp, Artificial Sequence
  ENSG00000154736_5 (sequence is synthesized)
tgtgtgtgtccccatcccccgccccgttaacttcatagcaaataacaaatacccataaagtcccagtcgcgcagcccctccccgcgggcagcgcactatgctgctcgggtgggcgtccct

SEQ ID NO: 446012 - DNA, 120 bp, Artificial Sequence
  ENSG00000154736_6 (sequence is synthesized)
gtgggcgtccctgctgctgtgcgcgttccgcctgcccctggccgcggtcggccccgccgcgacacctgcccaggataaagccgggcagcctccgactgctgcagcagccgcccagccccg

SEQ ID NO: 446013 - DNA, 120 bp, Artificial Sequence
  ENSG00000154736_7 (sequence is synthesized)
ggaggaggtgcaggagcgagccgagcctcccggccacccgcaccccctggcgcagcggcgcaggagcaaggggctggtgcagaacatcgaccaactctactccggcggcggcaaggtggg

SEQ ID NO: 446014 - DNA, 120 bp, Artificial Sequence
  ENSG00000154736_8 (sequence is synthesized)
ctacctcgtctacgcgggcggccggaggttcctcttggacctggagcgagatggttcggtgggcattgctggcttcgtgcccgcaggaggcgggacgagtgcgccctggcgccaccggag

SEQ ID NO: 446015 - DNA, 120 bp, Artificial Sequence
  ENSG00000154736_9 (sequence is synthesized)
ccactgcttctatcggggcacagtggacggtagtccccgctctctggctgtctttgacctctgtgggggtctcgacggcttcttcgcggtcaagcacgcgcgctacaccctaaagccact

SEQ ID NO: 446016 - DNA, 120 bp, Artificial Sequence
  ENSG00000154736_10 (sequence is synthesized)
gctgcgcggaccctgggcggaggaagaaaaggggcgcgtgtacggggatgggtccgcacggatcctgcacgtctacacccgcgagggcttcagcttcgaggccctgccgccgcgcgccag

SEQ ID NO: 446017 - DNA, 120 bp, Artificial Sequence
  ENSG00000154736_11 (sequence is synthesized)
ctgcgaaacccccgcgtccacaccggaggcccacgagcatgctccggcgcacagcaacccgagcggacgcgcagcactggcctcgcagctcttggaccagtccgctctctcgcccgctgg

SEQ ID NO: 446018 - DNA, 120 bp, Artificial Sequence
  ENSG00000154736_12 (sequence is synthesized)
gggctcaggaccgcagacgtggtggcggcggcggcgccgctccatctcccgggcccgccaggtggagctgcttctggtggctgacgcgtccatggcgcggttgtatggccggggcctgca

SEQ ID NO: 446019 - DNA, 120 bp, Artificial Sequence
  ENSG00000154736_13 (sequence is synthesized)
gcattacctgctgaccctggcctccatcgccaataggctgtacagccatgctagcatcgagaaccacatccgcctggccgtggtgaaggtggtggtgctaggcgacaaggacaagagcct

SEQ ID NO: 446020 - DNA, 120 bp, Artificial Sequence
  ENSG00000154736_14 (sequence is synthesized)
ggaagtgagcaagaacgctgccaccacactcaagaacttttgcaagtggcagcaccaacacaaccagctgggagatgaccatgaggagcactacgatgcagctatcctgtttactcggga

SEQ ID NO: 446021 - DNA, 120 bp, Artificial Sequence
  ENSG00000154736_15 (sequence is synthesized)
ggatttatgtgggcatcattcatgtgacaccctgggaatggcagacgttgggaccatatgttctccagagcgcagctgtgctgtgattgaagacgatggcctccacgcagccttcactgt

SEQ ID NO: 446022 - DNA, 120 bp, Artificial Sequence
  ENSG00000154736_16 (sequence is synthesized)
ggctcacgaaatcggacatttacttggcctctcccatgacgattccaaattctgtgaagagacctttggttccacagaagataagcgcttaatgtcttccatccttaccagcattgatgc

SEQ ID NO: 446023 - DNA, 120 bp, Artificial Sequence
  ENSG00000154736_17 (sequence is synthesized)
atctaagccctggtccaaatgcacttcagccaccatcacagaattcctggatgatggccatggtaactgtttgctggacctaccacgaaagcagatcctgggccccgaagaactcccagg

SEQ ID NO: 446024 - DNA, 120 bp, Artificial Sequence
  ENSG00000154736_18 (sequence is synthesized)
acagacctacgatgccacccagcagtgcaacctgacattcgggcctgagtactccgtgtgtcccggcatggatgtctgtgctcgcctgtggtgtgctgtggtacgccagggccagatggt

SEQ ID NO: 446025 - DNA, 120 bp, Artificial Sequence
  ENSG00000154736_19 (sequence is synthesized)
ctgtctgaccaagaagctgcctgcggtggaagggacgccttgtggaaaggggagaatctgcctgcagggcaaatgtgtggacaaaaccaagaaaaaatattattcaacgtcaagccatgg

SEQ ID NO: 446026 - DNA, 120 bp, Artificial Sequence
  ENSG00000154736_20 (sequence is synthesized)
caactggggatcttggggatcctggggccagtgttctcgctcatgtggaggaggagtgcagtttgcctatcgtcactgtaataaccctgctcccagaaacaacggacgctactgcacagg

SEQ ID NO: 446027 - DNA, 120 bp, Artificial Sequence
  ENSG00000154736_21 (sequence is synthesized)
gaagagggccatctaccgctcctgcagtctcatgccctgcccacccaatggtaaatcatttcgtcatgaacagtgtgaggccaaaaatggctatcagtctgatgcaaaaggagtcaaaac

SEQ ID NO: 446028 - DNA, 120 bp, Artificial Sequence
  ENSG00000154736_22 (sequence is synthesized)
ttttgtggaatgggttcccaaatatgcaggtgtcctgccagcggatgtgtgcaagctgacctgcagagccaagggcactggctactatgtggtattttctccaaaggtgaccgatggcac

SEQ ID NO: 446029 - DNA, 120 bp, Artificial Sequence
  ENSG00000154736_23 (sequence is synthesized)
tgaatgtaggctgtacagtaattccgtctgcgtccgggggaagtgtgtgagaactggctgtgacggcatcattggctcaaagctgcagtatgacaagtgcggagtatgtggaggagacaa

SEQ ID NO: 446030 - DNA, 120 bp, Artificial Sequence
  ENSG00000154736_24 (sequence is synthesized)
ctccagctgtacaaagattgttggaacctttaataagaaaagtaagggttacactgacgtggtgaggattcctgaaggggcaacccacataaaagttcgacagttcaaagccaaagacca

SEQ ID NO: 446031 - DNA, 120 bp, Artificial Sequence
  ENSG00000154736_25 (sequence is synthesized)
gactagattcactgcctatttagccctgaaaaagaaaaacggtgagtaccttatcaatggaaagtacatgatctccacttcagagactatcattgacatcaatggaacagtcatgaacta

SEQ ID NO: 446032 - DNA, 120 bp, Artificial Sequence
  ENSG00000154736_26 (sequence is synthesized)
tagcggttggagccacagggatgacttcctgcatggcatgggctactctgccacgaaggaaattctaatagtgcagattcttgcaacagaccccactaaaccattagatgtccgttatag

SEQ ID NO: 446033 - DNA, 120 bp, Artificial Sequence
  ENSG00000154736_27 (sequence is synthesized)
cttttttgttcccaagaagtccactccaaaagtaaactctgtcactagtcatggcagcaataaagtgggatcacacacttcgcagccgcagtgggtcacgggcccatggctcgcctgctc

SEQ ID NO: 446034 - DNA, 120 bp, Artificial Sequence
  ENSG00000154736_28 (sequence is synthesized)
taggacctgtgacacaggttggcacaccagaacggtgcagtgccaggatggaaaccggaagttagcaaaaggatgtcctctctcccaaaggccttctgcgtttaagcaatgcttgttgaa

SEQ ID NO: 446035 - DNA, 120 bp, Artificial Sequence
  ENSG00000154736_29 (sequence is synthesized)
gaaatgttagcctgtggttatgatcttatgcacaaagataactggaggattcagcactgatgcagtcgtggtgaacaggaggtctacctaacgcacagaaagtcatgcttcagtgacatt

SEQ ID NO: 446036 - DNA, 120 bp, Artificial Sequence
  ENSG00000154736_30 (sequence is synthesized)
gtcaacaggagtccaattatgggcagaatctgctctctgtgaccaaaagaggatgtgcactgcttcacgtgacagtggtgaccttgcaatatagaaaaacttgggagttattgaacatcc

SEQ ID NO: 446037 - DNA, 120 bp, Artificial Sequence
  ENSG00000154736_31 (sequence is synthesized)
cctgggcttacaagaaacactgatgaatgtaaaatcaggggacatttgaagatggcagaactgtctcccccttgtcacctacctctgatagaatgtctttaatggtatcataatcatttt

SEQ ID NO: 446038 - DNA, 120 bp, Artificial Sequence
  ENSG00000154736_32 (sequence is synthesized)
cacccataatacacagtagcttcttcttactgtttgtaaatacattctcccttggtatgtcactttatatcccctggttctattaaaatatccatatatatttctataaaaaaagtgttt

SEQ ID NO: 446039 - DNA, 120 bp, Artificial Sequence
  ENSG00000154736_33 (sequence is synthesized)
gaccaaagtaggtctgcagctatttcaacttccttccgtttccagaaagagctgtggatattttactggaaattaagaacttgctgctgttttaataagatgtagtatattttctgacta

SEQ ID NO: 446040 - DNA, 120 bp, Artificial Sequence
  ENSG00000154736_34 (sequence is synthesized)
caggagataaaatttcagtcaaaaaaccattttgacagcaagtatcttctgagaaattttgaaaagtaaatagatctcagtgtatctagtcacttaaatacatacacgggttcatttact

SEQ ID NO: 446041 - DNA, 120 bp, Artificial Sequence
  ENSG00000154736_35 (sequence is synthesized)
taaacctttgactgcctgtatttttttcaggtagctagccaaattaatgcataatttcagatgtagaagtagggtttgcgtgtgtgtgtgtgatcatactcaagagtctaaaaactagtt

SEQ ID NO: 446042 - DNA, 120 bp, Artificial Sequence
  ENSG00000154736_36 (sequence is synthesized)
tccttgtgttggaaatttaaaaggaaaaaaatcgtatttcactgtgttttcaatttatattttcacaactactttctctctccagagctttcatctgatatctcacaatgtatgatatac

SEQ ID NO: 446043 - DNA, 120 bp, Artificial Sequence
  ENSG00000154736_37 (sequence is synthesized)
gtacaaaacacacagcaagttttctatcatgtccaacacattcaacactggtatacctcctaccagcaagcctttaaaatgcatttgtgtttgcttatttgttttgttcaagggttcagt

SEQ ID NO: 446044 - DNA, 120 bp, Artificial Sequence
  ENSG00000154736_38 (sequence is synthesized)
aagacctacaatgttttgtatttcttgacttattttattagaaacattaaagatcacttggtagttagccacattgagaagtggttatcattgttaatgtggttaatgccaaaaagtggt

SEQ ID NO: 446045 - DNA, 120 bp, Artificial Sequence
  ENSG00000154736_39 (sequence is synthesized)
taatattaataagactgtttccacaccataggcaataatttcttaatttaaaaaatctaagtatattcctattgtactaaatatttttcccaactggaaagcacttgattgtacccgtaa

SEQ ID NO: 446046 - DNA, 120 bp, Artificial Sequence
  ENSG00000154736_40 (sequence is synthesized)
atgattttcagaaagttgttgtttttgtttccatagcctgtttaagtaggttgtaagtttgaatagttagacatggaaattattttataagcacacacctaaagatatctttttagatga

SEQ ID NO: 446047 - DNA, 120 bp, Artificial Sequence
  ENSG00000154736_41 (sequence is synthesized)
taaaatgtacacccccccatcaccaacctcacaacttagaaaatctaagttgtttgatttctttgggatttcttttgttgtgaaacactgcaaagccaatttttctttataaaaattcat

SEQ ID NO: 446048 - DNA, 120 bp, Artificial Sequence
  ENSG00000154736_42 (sequence is synthesized)
agtaatcctgccaaatgtgcctattgttaaagatttgcatgtgaagatcttagggaaccactgtttgagttctacaagctcatgagagtttatttttattataagatgtttttaatataa

SEQ ID NO: 446049 - DNA, 120 bp, Artificial Sequence
  ENSG00000154736_43 (sequence is synthesized)
aagaattatgtaactgatcactatattacatcatttcagtgggccaggaaaatagatgtcttgctgttttcagtattttcttaagaaattgcttttaaaacaaataattgttttacaaaa

SEQ ID NO: 446050 - DNA, 120 bp, Artificial Sequence
  ENSG00000154736_44 (sequence is synthesized)
ccaataattatcctttgaattttcatagactgactttgcttttgacgtagaaattttttttctcaataaattatcactttgagaaatgaggcctgtacaaggctgataacctatatgtga

SEQ ID NO: 446051 - DNA, 120 bp, Artificial Sequence
  ENSG00000154736_45 (sequence is synthesized)
tggagatcacccaatgccaagggcagaaagcaaacctagttaaataggtgagaaaaaaaataataatcccagtgccatttgtctgtgcaaagagaattaggagagaggttaatgttactt

SEQ ID NO: 446052 - DNA, 120 bp, Artificial Sequence
  ENSG00000154736_46 (sequence is synthesized)
ttttccattttggaaataattttaatcaagtaactcaaatgtgacaaaatttatttttattttttgtggttatattcccaacaacattaaaaaatactcgaggcataaatgtagttgtct

SEQ ID NO: 446053 - DNA, 120 bp, Artificial Sequence
  ENSG00000154736_47 (sequence is synthesized)
cctactctgcttctcttactatactcatacatttttaatatggtttatcaatgattcatgtttccctcaaatagtgatggtttacacctgtcatggaaacaatcctagagagctcagagc

SEQ ID NO: 446054 - DNA, 120 bp, Artificial Sequence
  ENSG00000154736_48 (sequence is synthesized)
aattaaaccactattccatgcttttaagtagttttctccacctttttcttatgagtctcactagattgactgaggaatgtatgtctaaattcctggagaagatgatatggattggaaact

SEQ ID NO: 446055 - DNA, 120 bp, Artificial Sequence
  ENSG00000154736_49 (sequence is synthesized)
gaaattcagagaaatggagtgttcaatagataccacgaattgtgaacaaagggaaaattctatacaactcaatctaagtcagtccactttgacttcgtactgtctttcacctttccattg

SEQ ID NO: 446056 - DNA, 120 bp, Artificial Sequence
  ENSG00000154736_50 (sequence is synthesized)
ttgcatcttgaattttttaaaatgtctagaattcaggatgctaggggctacttctttaaaaaaaaaaaaaaaaaagaattcgtctgaaaatgctcaggtttgtaagaatctaatctcact

SEQ ID NO: 446057 - DNA, 120 bp, Artificial Sequence
  ENSG00000154736_51 (sequence is synthesized)
tacataactaagcactccataataagttttattaagtacaaagggagccagaaaaaatgacatttatttcttctagatcagaaaaatttaaattaagccctgccttgctgtttagaaata

SEQ ID NO: 446058 - DNA, 120 bp, Artificial Sequence
  ENSG00000154736_52 (sequence is synthesized)
tgtgggcattgttataatttattcaataaatttatgttcctttgccttcctgtggaaacagttttatcccactaaactaggaattaggggataaatcacaaacaaaaaaaaagttgcagc

SEQ ID NO: 446059 - DNA, 120 bp, Artificial Sequence
  ENSG00000154736_53 (sequence is synthesized)
actgaaaaaaagtaatttattgtttttgcaactggtatgtgaatttgtgtgataaaattatttattcttatttaacaaaaatatgttcaaatttttctatatttaaaatgttttgctgtt

SEQ ID NO: 446060 - DNA, 120 bp, Artificial Sequence
  ENSG00000154736_54 (sequence is synthesized)
gtcctactttttaatttatgcttcatgtttgtgtataaagtacacttttacactttgtgagtttacataatatacagcactggttgcttttgtatttttttacagaaagctttctgtgtg

SEQ ID NO: 446061 - DNA, 120 bp, Artificial Sequence
  ENSG00000154736_55 (sequence is synthesized)
aagcaggtgtatatgtatatattcctcatgtattcttattctgatactatcatttttctttccaaggaaattttaatctgtcatgaccaatagtgttcattacttgtgcctatgataata

SEQ ID NO: 446062 - DNA, 120 bp, Artificial Sequence
  ENSG00000154736_56 (sequence is synthesized)
ggttttttacatcacattaacactattttttccaagtcacaaataagaaaaacacttattcaatgaaacaaggtgcaagttttaaatttgggtacacaaatagcctagaagcttcctaca

SEQ ID NO: 446063 - DNA, 120 bp, Artificial Sequence
  ENSG00000154736_57 (sequence is synthesized)
gacgctaagacacagccaataatcagatcctttcacttcatcgagaaacttggacaagtcgatattgatgtattagatgaaagttgtctacacacaacttctgagggatacaaacgataa

SEQ ID NO: 446064 - DNA, 120 bp, Artificial Sequence
  ENSG00000154736_58 (sequence is synthesized)
taaaaccaaatgttgtctgtttctcctttagaaacacctcctaaaattaatatcatttagtctctagtgtctgtaggattctacagatgagcacaaatagattgggtttgtataacaaat

SEQ ID NO: 446065 - DNA, 120 bp, Artificial Sequence
  ENSG00000154736_59 (sequence is synthesized)
gctaatagtcataactgtttctacaaatatggggtgtccattaagagaatgtgatgttttcctactgctgttgaatcccatggggtgattataggacttgaaataggcagagtcacctct

SEQ ID NO: 446066 - DNA, 120 bp, Artificial Sequence
  ENSG00000154736_60 (sequence is synthesized)
gatgacatcagcttgcctctgtgatttcacagtctgatcctggcaacaagacaaagcacccttggacacacagccaatctctggttgtgatatttccccattgattccttccttgttaac

SEQ ID NO: 446067 - DNA, 120 bp, Artificial Sequence
  ENSG00000154736_61 (sequence is synthesized)
aaggtcattttaatggttcaggtgaggacagcagccagattcaaagtccagaatttgtgctgttacatagagttcacactgtcaaataacattgaatttaataatgatcaaatttttcta

SEQ ID NO: 446068 - DNA, 120 bp, Artificial Sequence
  ENSG00000154736_62 (sequence is synthesized)
gtagtctttggcagagtgtataatctcattggcatgattggtgaatattactaatctctttataatgaaagatgctttacaaataccttatatttgctaacatttcaaaactactaaata

SEQ ID NO: 446069 - DNA, 120 bp, Artificial Sequence
  ENSG00000154736_63 (sequence is synthesized)
aatgaaatagccatgtgtacagaaatggtcatttaaagctttaatagaaccaaattcaagacaatgtatcatttagacacacagaaaaggaacttgtatgttttccctattatttttctc

SEQ ID NO: 446070 - DNA, 120 bp, Artificial Sequence
  ENSG00000154736_64 (sequence is synthesized)
atttgccaacaatctatagttttaggttatcaaacagatagatcaacttaactggctagtacattgaaaaatcttcctaagaatcctttgttagcataatctatagagataatttctcaa

SEQ ID NO: 446071 - DNA, 120 bp, Artificial Sequence
  ENSG00000154736_65 (sequence is synthesized)
attatatcatcatgatgcatataaactctataatgtataattgtgtttcatttatttaatgtatgagaacatattgaaatacaaaaccatgcattagccaaaaaattggaatacaggtag

SEQ ID NO: 446072 - DNA, 120 bp, Artificial Sequence
  ENSG00000154736_66 (sequence is synthesized)
tgttcagatcagcaaaacattcagtctggtaaatgcctgcctggggctatgatatcattctcaatgcaggttttatggaaaaactaaaagaatatgttgttagatgatgttggttttgaa

SEQ ID NO: 446073 - DNA, 120 bp, Artificial Sequence
  ENSG00000154736_67 (sequence is synthesized)
aaaaaaaagacattaacatacacattagttagcccagttaattgcattctactaatatagttgcacattagcaataattttgctgtctctggtctttattttgtggcttcaactaactgg

SEQ ID NO: 446074 - DNA, 120 bp, Artificial Sequence
  ENSG00000154736_68 (sequence is synthesized)
accatgtggactgtaaaggtcaaatggaaaaaacgagcagtggcccctcatcctgtaaggtactgctacatcagagtgacctaaaagtctaacactgtgaggaaaactgtgatttgtagg

SEQ ID NO: 446075 - DNA, 120 bp, Artificial Sequence
  ENSG00000154736_69 (sequence is synthesized)
aaaaaaaaaaaaaacaaataaaaaacagggcatgctttttaatttttttccactttcctttggcacacccaatgaacaattctaatttttattgaggtgctaacatctttcgtgaccgac

SEQ ID NO: 446076 - DNA, 120 bp, Artificial Sequence
  ENSG00000154736_70 (sequence is synthesized)
tgtcaaatgtggtatttttgagttactatttttctacatgattttacagtttgcaagaaagacctctaagctttgtgtcacggtagggcacaacttgatactcaaaatttgaaaaataag

SEQ ID NO: 446077 - DNA, 120 bp, Artificial Sequence
  ENSG00000154736_71 (sequence is synthesized)
cacatccaatgattgttttgaccaacagtggtcagtgacgtaaactgcatgtgcatctgaggacatttaaggggtcattaaaatttgaggagcatcaggccggagtagcagacttttaga

SEQ ID NO: 446078 - DNA, 120 bp, Artificial Sequence
  ENSG00000154736_72 (sequence is synthesized)
tgagtcatatttcagcattcactaagtcctcagcattccattcaaactgtcgtgtatatttggcctgattttttttcaagctttgcaataatttatgttattggtaaacacttggtgact

SEQ ID NO: 446079 - DNA, 120 bp, Artificial Sequence
  ENSG00000154736_73 (sequence is synthesized)
atatctcagccttttctttaacaactcacaatatattagaaacacgtctacctatactgagagtatatttacaatagaagaacatactgtatgtgactttgtaaagctagacttttgatt

SEQ ID NO: 446080 - DNA, 120 bp, Artificial Sequence
  ENSG00000154736_74 (sequence is synthesized)
aagaaatatataatctctggatgctatttttgcattatacactcaggcacaacgtaaaccttgatggctcatcttgctacaattacgagttgaaaaacactacttacgtatttgtatgac

SEQ ID NO: 446081 - DNA, 120 bp, Artificial Sequence
  ENSG00000154736_75 (sequence is synthesized)
ctattagtcagaggaaatcatacatatgctttgtaaatagactttgcagataactaaatagactgaagaaatatgttgcatttgatagaagcaattgcataaatatttggtttctatatt

SEQ ID NO: 446082 - DNA, 120 bp, Artificial Sequence
  ENSG00000154736_76 (sequence is synthesized)
agagtctgtgagtaaagtcaagtaataaacctaagtaggtataacagatttttaaaccttgaaacttgctttgatggtagagaaaatcattgaagatttacatactgtatataagatgta

SEQ ID NO: 446083 - DNA, 120 bp, Artificial Sequence
  ENSG00000154736_77 (sequence is synthesized)
aaatgtacgctgcttattaccctcaattttccagaagcaatggtatataatgcagttgaaaaaccaaaaatcttggaaaactaagacgggtcttgtttaaaatgtctctcagctttggca

SEQ ID NO: 446084 - DNA, 120 bp, Artificial Sequence
  ENSG00000154736_78 (sequence is synthesized)
accttcaaatcttaatcaactatttaaagcattactgtgtcttgtagcctgcattccacaacagctctgttattcaggtaaaagacttgaactgagccgtttgggacctatactgtaata

SEQ ID NO: 446085 - DNA, 120 bp, Artificial Sequence
  ENSG00000154736_79 (sequence is synthesized)
ttttcattgaggaacaatatcctattttgtaaagcatttccctatgtgtgactttaaactgtaaaattaaacactgcttttgtgggttcagtgggcataataaatataaattgtaaacta

SEQ ID NO: 446086 - DNA, 120 bp, Artificial Sequence
  ENSG00000154736_80 (sequence is synthesized)
aaaaggagaagccatgtctcatgggacccccctcctcccaaccttggccaagatacttgtagacattctgcagtgtttatacaagctagctctaggcaagctggctaggagtatgatcct

SEQ ID NO: 446087 - DNA, 120 bp, Artificial Sequence
  ENSG00000154743_0 (sequence is synthesized)
gttgccggggtaacggcgagcgcgtggggccaagaaaggtaagggccctgggcgaggaaagcgcggccctttccgagtttggtgttttgcagcgaaaggaaatctcgctcttccgaaagt

SEQ ID NO: 446088 - DNA, 120 bp, Artificial Sequence
  ENSG00000154743_1 (sequence is synthesized)
cctccagggcgagagaggaaagggcctaggtactgtgctggggtcgcacagccggccgagacagtgccgggacggggagccaggcttccgagtgcgcccggtcactgactcctccgcgct

SEQ ID NO: 446089 - DNA, 120 bp, Artificial Sequence
  ENSG00000154743_2 (sequence is synthesized)
ttcctcgtgcgcctgcagcccttggttcttggaaacgccggcgccttgttcagggctggtggggctggggcgcaaggtgcagctgacaatgcccgagaggagccgcagcctctggtggag

SEQ ID NO: 446090 - DNA, 120 bp, Artificial Sequence
  ENSG00000154743_3 (sequence is synthesized)
ttcggtcgggtgtgggggtagtcaaggaaagaagcaaagggaatacctcctctgaaaaatggcagaagcagttttccatgccccaaagaggaaaagaagagtgtatgagacttacgagtc

SEQ ID NO: 446091 - DNA, 120 bp, Artificial Sequence
  ENSG00000154743_4 (sequence is synthesized)
tccattgccaatcccttttggtcaggaccatggtcctctgaaagaattcaagatattccgtgctgaaatgattaacaacaatgtgattgtgaggaatgcggaggacattgagcagctcta

SEQ ID NO: 446092 - DNA, 120 bp, Artificial Sequence
  ENSG00000154743_5 (sequence is synthesized)
tgggaaaggttattttggaaaaggtattctttcaagaagccgtccaagcttcacaatttcagatcctaaactggttgctaaatggaaagatatgaagacaaacatgcctatcatcacatc

SEQ ID NO: 446093 - DNA, 120 bp, Artificial Sequence
  ENSG00000154743_6 (sequence is synthesized)
aaagaggtatcagcatagtgttgagtgggcagcagagctgatgcgtagacaggggcaggatgagagtacagtgcgcagaatcctcaaggattacacgaaaccgcttgagcatcctcctgt

SEQ ID NO: 446094 - DNA, 120 bp, Artificial Sequence
  ENSG00000154743_7 (sequence is synthesized)
gaaaaggaatgaagaggctcaagtgcatgacaagcttaactctggaatggtttccaacatggaaggcacagcagggggagagagaccttctgtggtaaacggggactctggaaagtcagg

SEQ ID NO: 446095 - DNA, 120 bp, Artificial Sequence
  ENSG00000154743_8 (sequence is synthesized)
tggtgtgggtgatccccgtgagccattaggctgcctgcaggagggctctggctgccacccaacaacagagagctttgagaaaagcgtgcgagaggatgcctcacctctgccccatgtctg

SEQ ID NO: 446096 - DNA, 120 bp, Artificial Sequence
  ENSG00000154743_9 (sequence is synthesized)
ttgctgcaaacaagatgctctcatcctccagcgtggccttcatcatgaagacggcagccagcacatcggcctcctgcatcctggggacagagggcctgaccatgagtacgtgctggtcga

SEQ ID NO: 446097 - DNA, 120 bp, Artificial Sequence
  ENSG00000154743_10 (sequence is synthesized)
ggaagcggagtgtgccatgagcgagagggaggctgccccaaatgaggaattggtgcaaagaaacaggttaatatgcagaagaaatccatataggatctttgagtatttgcaactcagcct

SEQ ID NO: 446098 - DNA, 120 bp, Artificial Sequence
  ENSG00000154743_11 (sequence is synthesized)
tcagaaccacctacatggcctaccattactttcgaagcaagggctgggtgcccaaagtgggactcaagtacgggacagatttactgctatatcggaaaggccctccattttaccatgcaa

SEQ ID NO: 446099 - DNA, 120 bp, Artificial Sequence
  ENSG00000154743_12 (sequence is synthesized)
gttattctgtcattatcgagctagttgatgaccattttgaaggctctctccgcaggcctctcagttggaagtccctggctgccttgagcagagtttccgttaatgtctctaaggaactta

SEQ ID NO: 446100 - DNA, 120 bp, Artificial Sequence
  ENSG00000154743_13 (sequence is synthesized)
tgctgtgctatttgattaaaccctctactatgactgacaaggaaatggagtcaccagaatgtatgaaaaggattaaagttcaggaggtgattctgagtcgatgggtttcttcacgagaga

SEQ ID NO: 446101 - DNA, 120 bp, Artificial Sequence
  ENSG00000154743_14 (sequence is synthesized)
ggagtgaccaagacgatctttaacaattcaacctcaaatttctaatttcaccaacaactatttattgagggctaggtaaaaagttctttttgttgtaatcgtccattaattcataagttt

SEQ ID NO: 446102 - DNA, 120 bp, Artificial Sequence
  ENSG00000154743_15 (sequence is synthesized)
taaagggcatggtgctcccagcaccagaaaactatcagtgtttttaaagataaattacacaagggaggagaaagatccctgtgctaggactgcagattctatacttgcgttggcctctaa

SEQ ID NO: 446103 - DNA, 120 bp, Artificial Sequence
  ENSG00000154743_16 (sequence is synthesized)
ctctccaatccagagcctcctgcctctggcgtcagtcttttccctcatccactcactggggagattggactagaggagtcctgagaggacacttccaacaagagacatttattctctgat

SEQ ID NO: 446104 - DNA, 120 bp, Artificial Sequence
  ENSG00000154743_17 (sequence is synthesized)
tttacctgaaaatggtagtagtttacatttatacagtacagtttatgaagcactttcatacgcaggcatctcttgttacctacatctaagctgttcccgaaagagtgttacagaacacaa

SEQ ID NO: 446105 - DNA, 120 bp, Artificial Sequence
  ENSG00000154743_18 (sequence is synthesized)
cagtattgtacaatattcgataagcatatcttcactgcacttgttataaaaatgagtggtgaaataatgtttggagacataatgaaagcgattaacatttggcaaaatataataaagcct

SEQ ID NO: 446106 - DNA, 120 bp, Artificial Sequence
  ENSG00000154743_19 (sequence is synthesized)
ttttgtaattggtgagaaagtcatgaagacttaagttgcctcagggcatctggtggcaagaggagggagatgggtggctgggcatggtggcccatacctataatcccagcacttgggagg

SEQ ID NO: 446107 - DNA, 90 bp, Artificial Sequence
  ENSG00000154743_20 (sequence is synthesized)
gttgcctctctactaacaaaaattatccaagcattgtagcacatgcctgtaattccagctgctcaggagactaaggtaggaggatcgctt

SEQ ID NO: 446108 - DNA, 120 bp, Artificial Sequence
  ENSG00000154743_21 (sequence is synthesized)
tactaacaaaaattatccaagcattgtagcacatgcctgtaattccagctgctcaggagactaaggtaggaggatcgcttgagcccaggaggaagaggttgcagtgagcggagattgtgc

SEQ ID NO: 446109 - DNA, 120 bp, Artificial Sequence
  ENSG00000154743_22 (sequence is synthesized)
cccctgagcctccatgtgtcgggtcaggcaaaatgaaattgacacaggctggaattttactgatttcagtcattgctgggctcgtttgtgcaaatagactcagaagagctcctttaaaag

SEQ ID NO: 446110 - DNA, 120 bp, Artificial Sequence
  ENSG00000154743_23 (sequence is synthesized)
gagtgaccatttcctgatttagattctgagggggtttttggttttttttactgttgttcactatcatgagcttaccatgtgcttttttctttttttttttcttgtgatgtagtctcgctc

SEQ ID NO: 446111 - DNA, 120 bp, Artificial Sequence
  ENSG00000154743_24 (sequence is synthesized)
ttttctttttttttttcttgtgatgtagtctcgctctgtcgtccaggctggagtccaatgctgcgatcttggatcactgcaacctctgcctgctgggtttaagcgattctcatgcctcag

SEQ ID NO: 446112 - DNA, 120 bp, Artificial Sequence
  ENSG00000154743_25 (sequence is synthesized)
gctgccccaaatgaggaagcctttttcttggtctatgctctgggatgtttaagtatttactatgagaaggagcctttaacgatagtgaagctctggaaagctttcactgtagttcagccc

SEQ ID NO: 446113 - DNA, 120 bp, Artificial Sequence
  ENSG00000154743_26 (sequence is synthesized)
acacaacatcagctttgccattggagtgtcacttaaatggttcagtttttttttttttcttaaatgtagtagaatcaaaaaagttagttgtagaaacttcataacattcctgccagtgac

SEQ ID NO: 446114 - DNA, 120 bp, Artificial Sequence
  ENSG00000154743_27 (sequence is synthesized)
atgctggaagatttggggtcattcgtacccttcccttattgcgctagaagttgtcctcccctcatgttacattttattgtcccctccctcccaactgctgctgagctccaatgacggagc

SEQ ID NO: 446115 - DNA, 120 bp, Artificial Sequence
  ENSG00000154743_28 (sequence is synthesized)
tttggagtgtcccatggtgatctgatctgggtaggcattgcttctcttcccaggggtatcgttgctatgtgacttgttttatactgcaatttaacattcactcatacacatattcacaaa

SEQ ID NO: 446116 - DNA, 120 bp, Artificial Sequence
  ENSG00000154743_29 (sequence is synthesized)
tgttgttatcctcatcctgaggatgagaaaccaaggttggagccgttgagtggctaatccaagatcacacagctcatgtgcatactcgggatccaaacccacagctctctggctccctgg

SEQ ID NO: 446117 - DNA, 120 bp, Artificial Sequence
  ENSG00000154743_30 (sequence is synthesized)
cttttgtttcactatatccttcgtgttgccatcagagataggagggactcagcttacacaaggactatcaagaaagaaagctgtgtgtgttctcattactcagtgatttgctggctgaaa

SEQ ID NO: 446118 - DNA, 120 bp, Artificial Sequence
  ENSG00000154743_31 (sequence is synthesized)
acaaattgtagataccctctaatttcatcctcatgctgctggaggtgaggtggggctgaggccagagggtcttgcagggctagagatgactgccctttagagcaggttaggttgcctagg

SEQ ID NO: 446119 - DNA, 120 bp, Artificial Sequence
  ENSG00000154743_32 (sequence is synthesized)
ctttagcttggtcctatagaaaattagggagcctatactgtttctagaatttttatgcccattttaggggacttgtagcatatacttaatatgtcctcacttaacattgttgatatgttc

SEQ ID NO: 446120 - DNA, 120 bp, Artificial Sequence
  ENSG00000154743_33 (sequence is synthesized)
ttggaaactgcaactttaatgtcgtataacaaaaccgttttttcttctcatcatttcaagaaaacaatgttgaagtttatttgaagacctgctgtacatctgtattagtccattctcatg

SEQ ID NO: 446121 - DNA, 120 bp, Artificial Sequence
  ENSG00000154743_34 (sequence is synthesized)
tcagagggtggcaggagcaagaatgagaggatgagtgaaggaggaagccccttataaaaccatcacatctcatgagaactcactgtcacaagaacagcatggggaccgtcccccataatc

SEQ ID NO: 446122 - DNA, 120 bp, Artificial Sequence
  ENSG00000154743_35 (sequence is synthesized)
cactgtcacaagaacagcatggggaccgtcccccataatctaatcacctcccacgaggtccctccatgacacgtggggattgtgggaactacaagatgagatttgggtgggggcacagcc

SEQ ID NO: 446123 - DNA, 120 bp, Artificial Sequence
  ENSG00000154743_36 (sequence is synthesized)
gaacctatcaaggacatttgaggacttactatatttagtattcttaatgctgtgtttataatcaatgtatctgcttatatctgttgccatgttcagtgattactaaacggcaggtactta

SEQ ID NO: 446124 - DNA, 120 bp, Artificial Sequence
  ENSG00000154743_37 (sequence is synthesized)
gtcagaacgtaaatcccagttatggtttccccaggaggaaactgatgtgctctgtgagtttccacttggagtgcacagtgagagggactggagaccacctgcatttcctgctgatgcacc

SEQ ID NO: 446125 - DNA, 120 bp, Artificial Sequence
  ENSG00000154743_38 (sequence is synthesized)
ttggcctcccaaagtgctgagagtacaggcgtgagccactgcatccagctcttagcatgtgcttttaaagtaaaaaccacgaggagaaggtactcattacttcataacttgtgtctcacc

SEQ ID NO: 446126 - DNA, 120 bp, Artificial Sequence
  ENSG00000154743_39 (sequence is synthesized)
caccttgctgtcttcacatccccactttctgtatgcacattggaaggtgaatttgttcagctcacattaatttataggaataattttcattgctctgtgaataaaatgtgctaccacttt

SEQ ID NO: 446127 - DNA, 120 bp, Artificial Sequence
  ENSG00000154743_40 (sequence is synthesized)
tgaatattgtaattcagtattgaaatcactatgggtagctcccaagtaggcctgcctttcactcctcagcctttatttcatcagttctaagatatgtgtttgcaatcattccacagaaga

SEQ ID NO: 446128 - DNA, 120 bp, Artificial Sequence
  ENSG00000154743_41 (sequence is synthesized)
tatgtgtttgcaatcattccacagaagattcgaggggtttttctgagtacttcttttctcattaagattttagattgttaggccgggtgcgggggctcacacctgtgatcccagcacttt

SEQ ID NO: 446129 - DNA, 120 bp, Artificial Sequence
  ENSG00000154743_42 (sequence is synthesized)
tttgcggccgcactgcttgacggcagcggtgtccgccccacggccggcgttgccggggtaacggcgagcgcgtggggccaagaaagaatacctcctctgaaaaatggcagaagcagtttt

SEQ ID NO: 446130 - DNA, 120 bp, Artificial Sequence
  ENSG00000154760_0 (sequence is synthesized)
ggaaacgcggagtgtcctggagcttgacgcgctggagcttgagaggtctttcaggactgattttggtggaagaagacagcaggcggtgggcattcactgtgctggtgggaagtctggtta

SEQ ID NO: 446131 - DNA, 120 bp, Artificial Sequence
  ENSG00000154760_1 (sequence is synthesized)
cattaagaaaggaattctagcaaagttattctgtaaatacaacagaatcagttgcttttgttaaatatattggtgcaagttcaacatggaggcaaatcactgctccctgggtgtgtatcc

SEQ ID NO: 446132 - DNA, 120 bp, Artificial Sequence
  ENSG00000154760_2 (sequence is synthesized)
atcttacccagacctggtcatcgatgtcggagaagtgactctgggagaagaaaacagaaaaaagctacagaaaactcagagagaccaagagagggcgagagttatacgggccgcgtgtgc

SEQ ID NO: 446133 - DNA, 120 bp, Artificial Sequence
  ENSG00000154760_3 (sequence is synthesized)
tttattaaactcaggaggaggagtgattcagatggaaatggccaacagggatgagcgtcccacagagatgggactggatttagaagaatccttgagaaagcttattcagtatccatattt

SEQ ID NO: 446134 - DNA, 120 bp, Artificial Sequence
  ENSG00000154760_4 (sequence is synthesized)
gcaggctttctttgagactaagcaacacggaaggtgtttttatatttttgttaaatcttggagtggtgatcctttccttaaagatggttctttcaattcccgcatttgcagccttagttc

SEQ ID NO: 446135 - DNA, 120 bp, Artificial Sequence
  ENSG00000154760_5 (sequence is synthesized)
ttcattatactgtagatctggcacctctgtgcttcacatgaattcaagacaggcattcgatttcctgaagaccaaggaaagacagtccaaatataatctgattaatgaagggtctccacc

SEQ ID NO: 446136 - DNA, 120 bp, Artificial Sequence
  ENSG00000154760_6 (sequence is synthesized)
tagtaaaattatgaaagctgtataccagaacatatctgagtcaaatcctgcatatgaagttttccaaactgacactattgaatatggtgaaatcctatcttttcctgagtctccatccat

SEQ ID NO: 446137 - DNA, 120 bp, Artificial Sequence
  ENSG00000154760_7 (sequence is synthesized)
agagtttaaacagttctctacaaaacatatccaacaatatgtagaaaatataattccagagtacatctctgcatttgcaaacactgagggaggctatctttttattggagtggatgataa

SEQ ID NO: 446138 - DNA, 120 bp, Artificial Sequence
  ENSG00000154760_8 (sequence is synthesized)
gagtaggaaagtcctgggatgtgccaaagaacaggttgaccctgactctttgaaaaatgtaattgcaagagcaatttctaagttgcccattgttcatttttgctcttcaaaacctcgggt

SEQ ID NO: 446139 - DNA, 120 bp, Artificial Sequence
  ENSG00000154760_9 (sequence is synthesized)
agagtacagcaccaaaatcgtagaagtgttttgtgggaaagagttgtatggctatctctgtgtgattaaagtgaaggcattctgttgtgtggtgttctcggaagctcccaagtcatggat

SEQ ID NO: 446140 - DNA, 120 bp, Artificial Sequence
  ENSG00000154760_10 (sequence is synthesized)
ggtgagggagaagtacatccgccccttgacaactgaggaatgggtagagaaaatgatggacgcagatccagagtttcctccagactttgctgaggcctttgagtctcagttgagtctatc

SEQ ID NO: 446141 - DNA, 120 bp, Artificial Sequence
  ENSG00000154760_11 (sequence is synthesized)
tgacagtccttcactttgcagaccagtgtattctaagaaaggtctggaacacaaagctgatctacaacaacatttatttccagttccaccaggacatttggaatgtactccagagtccct

SEQ ID NO: 446142 - DNA, 120 bp, Artificial Sequence
  ENSG00000154760_12 (sequence is synthesized)
ctggaaggagctgtctttacagcatgaaggactaaaggagttaatacacaagcaaatgcgacctttctcccagggaattgtgatcctctctagaagctgggctgtggacctgaacttgca

SEQ ID NO: 446143 - DNA, 120 bp, Artificial Sequence
  ENSG00000154760_13 (sequence is synthesized)
ggagaagccaggagtcatctgtgatgctctgctgatagcacagaacagcacccccattctctacaccattctcagggagcaggatgcagagggccaggactactgcactcgcaccgcctt

SEQ ID NO: 446144 - DNA, 120 bp, Artificial Sequence
  ENSG00000154760_14 (sequence is synthesized)
tactttgaagcagaagctagtgaacatggggggctacaccgggaaggtgtgtgtcagggccaaggtcctctgcctgagtcctgagagcagcgcagaggccttggaggctgcagtgtctcc

SEQ ID NO: 446145 - DNA, 120 bp, Artificial Sequence
  ENSG00000154760_15 (sequence is synthesized)
gatggattaccctgcgtcctatagccttgcaggcacccagcacatggaagccctgctgcagtccctcgtgattgtcttactcggcttcaggtctctcttgagtgaccagctcggctgtga

SEQ ID NO: 446146 - DNA, 120 bp, Artificial Sequence
  ENSG00000154760_16 (sequence is synthesized)
ggttttaaatctgctcacagcccagcagtatgagatattctccagaagcctccgcaagaacagagagttgtttgtccacggcttacctggctcagggaagaccatcatggccatgaagat

SEQ ID NO: 446147 - DNA, 120 bp, Artificial Sequence
  ENSG00000154760_17 (sequence is synthesized)
catggagaagatcaggaatgtgtttcactgtgaggcacacagaattctctacgtttgtgaaaaccagcctctgaggaactttatcagtgatagaaatatctgccgagcagagacccggga

SEQ ID NO: 446148 - DNA, 120 bp, Artificial Sequence
  ENSG00000154760_18 (sequence is synthesized)
aactttcctaagagaaaaatttgaacacattcaacacatcgtcattgacgaagctcagaatttccgtactgaagatggggactggtataggaaggcaaaaaccatcactcagagagaaaa

SEQ ID NO: 446149 - DNA, 120 bp, Artificial Sequence
  ENSG00000154760_19 (sequence is synthesized)
ggattgtccaggagttctctggatctttctggactactttcagaccagtcacttgggtcacagtggccttccccctctctcagcacagtatccaagagaagagctcaccagagtagttcg

SEQ ID NO: 446150 - DNA, 120 bp, Artificial Sequence
  ENSG00000154760_20 (sequence is synthesized)
caatgcagatgaaatagccgagtacatacaacaagaaatgcaactaattatagaaaatcctccaattaatatcccccatgggtatctggcaattctcagtgaagctaaatgggttccagg

SEQ ID NO: 446151 - DNA, 120 bp, Artificial Sequence
  ENSG00000154760_21 (sequence is synthesized)
tgttccaggcaacacaaagattattaaaaactttactttggagcaaatagtgacctatgtggcagacacctgcaggtgcttctttgaaaggggctattctccaaaggatgttgctgtgct

SEQ ID NO: 446152 - DNA, 120 bp, Artificial Sequence
  ENSG00000154760_22 (sequence is synthesized)
tgtcagcaccgtgacagaagtggagcagtatcagtctaagctcttgaaagcaatgaggaagaaaatggtggtgcagctcagtgatgcatgtgatatgttgggtgtgcacattgtgttgga

SEQ ID NO: 446153 - DNA, 120 bp, Artificial Sequence
  ENSG00000154760_23 (sequence is synthesized)
cagtgtccggcgattctcaggcctggaaaggagcatagtgtttgggatccatccaaggacagctgacccagctatcttacccaatattctgatctgtctggcttccagggcaaaacagca

SEQ ID NO: 446154 - DNA, 120 bp, Artificial Sequence
  ENSG00000154760_24 (sequence is synthesized)
cctatatatttttctgtgaagtgactattaggaagaactccaaaccaaaatactgtgtaaatgtctatgggtgacagtctgctgatggtagaaacctttctttttagttcacaagtcagt

SEQ ID NO: 446155 - DNA, 120 bp, Artificial Sequence
  ENSG00000154760_25 (sequence is synthesized)
tagagatttggacagagctgacacaaagagtttggagctcccccatttctggctctcctttcaggggttcctcccccaactcttttcagcagtggtggctgccccccattctgacccctg

SEQ ID NO: 446156 - DNA, 120 bp, Artificial Sequence
  ENSG00000154760_26 (sequence is synthesized)
actcttgcagccagaaagatggtggttttctaaaggaactttagctgtgctgcacaatgcagacctgtgtcttgctctctgggtaaaagccataaaaataagaaactcagcctgtggcct

SEQ ID NO: 446157 - DNA, 120 bp, Artificial Sequence
  ENSG00000154760_27 (sequence is synthesized)
ttcttccaaggctggagttctcgagttcttttatgtgacttcgtgtagtttgttgctttaaaaaatttgtccagaattgttttctgcagaagcatggtctgttaggagcttacaggccat

SEQ ID NO: 446158 - DNA, 120 bp, Artificial Sequence
  ENSG00000154760_28 (sequence is synthesized)
aggagaagcagttgtttcctgaatttatctttgctgtattcatttagggcttgggagagtcccaagataattcagtcactgtcagattaatcatttcggcagaacaaacaatattgttat

SEQ ID NO: 446159 - DNA, 120 bp, Artificial Sequence
  ENSG00000154760_29 (sequence is synthesized)
gattatttaatccttaaaattgtgatctccagagtttgttatcagaataacccagaccaaggcttaattgtaatagtgaacattaatggtacctttacagagaaattataggccaagaga

SEQ ID NO: 446160 - DNA, 120 bp, Artificial Sequence
  ENSG00000154760_30 (sequence is synthesized)
aaatgctggctttcagtagaagttaatattagaaacccaaatctggttctgaaagtgtgtatcagatgtacggtgaacaaacttgggaaagattttctttaaaaatcaatgagcgttggc

SEQ ID NO: 446161 - DNA, 120 bp, Artificial Sequence
  ENSG00000154760_31 (sequence is synthesized)
caacagagtgagactgtctcaaaaagaagaagaagaaaaaaaatgcagtgagtttatgttgttacattgtaacatctcagcgtagctgtatgcattactctatagcataactacttaagt

SEQ ID NO: 446162 - DNA, 120 bp, Artificial Sequence
  ENSG00000154760_32 (sequence is synthesized)
ttcccatgttgaagccccaaccttcactgtggagctggggctgctaaggaagtaattaaggttacacgaagtcacagtggagaatctgatctgctaagactggtgtccttatagggagag

SEQ ID NO: 446163 - DNA, 120 bp, Artificial Sequence
  ENSG00000154760_33 (sequence is synthesized)
accccagagagcttgttcccttcctccctgtgcacacaaacaagagggcatgggagcacacagagagatggcagccacctacaagccaagaggagaagcctcacaatgaacccccccccc

SEQ ID NO: 446164 - DNA, 120 bp, Artificial Sequence
  ENSG00000154760_34 (sequence is synthesized)
caccctgctggcacctatgtcttcgacttccagcccccagactgtgagaaataaatttctgttggttcagccatccagtctctagtgttttgttattgcagcctgagaacacagctgtat

SEQ ID NO: 446165 - DNA, 120 bp, Artificial Sequence
  ENSG00000154760_35 (sequence is synthesized)
gatcattcatcaaactaaaaacactgatacttaacaatgctaatgcaattacttatttgcttttcagtctctacaaaacattctaaaacactaatctaaatactaacaataaaatatttg

SEQ ID NO: 446166 - DNA, 120 bp, Artificial Sequence
  ENSG00000154760_36 (sequence is synthesized)
cataactaatgaaaattaagaaaccacatgcccaatattccatttataagtaatcctatttggctgatttccctccatattgtaagttttgaacttttctgccagtctttctcctatttg

SEQ ID NO: 446167 - DNA, 120 bp, Artificial Sequence
  ENSG00000154760_37 (sequence is synthesized)
tgttaactcatggaattccagttgtctagccttgaaattgtaggctcttctaacttgagcaaaatctgacagatcagcaaaataaggagaaaaatatttcttctttctttctggctgcat

SEQ ID NO: 446168 - DNA, 120 bp, Artificial Sequence
  ENSG00000154760_38 (sequence is synthesized)
taaatgagatacagctcagcaccaaaaagctatctttgtaaatgttcttagtaaactccctggtctttggagttatttcagcctttgagagtaattctttaaaagtctaattctgactgg

SEQ ID NO: 446169 - DNA, 120 bp, Artificial Sequence
  ENSG00000154760_39 (sequence is synthesized)
ttgaatctctctatatgatttattgccctagtaatatttgaaacagtatcatattttaaaatatataaatatttatgaatttttgttcagcccaaagaggattactgatgctttcttctt

SEQ ID NO: 446170 - DNA, 120 bp, Artificial Sequence
  ENSG00000154760_40 (sequence is synthesized)
tttccatatgatgaggaaatgtttagcttatatatttattgcatttctgttttaaataaaaaattgagagtttgtgtttcattaaactgaaaaaaaaggttctgtaaaataaatgattaa

SEQ ID NO: 446171 - DNA, 120 bp, Artificial Sequence
  ENSG00000154760_41 (sequence is synthesized)
atggaggaaaaggagaagactgaggccagcaactccatgatacagccaaaaatgagccagtaaaagattaagcaagattaactgtaaattttttttttttttttttttaaagagaaaagg

SEQ ID NO: 446172 - DNA, 120 bp, Artificial Sequence
  ENSG00000154760_42 (sequence is synthesized)
taaattttttttttttttttttttaaagagaaaaggtctcactgtgtttcccaggctggagggtagtggtgtgatcatagttcactagagccctgaactcctgggctcaagtgatcctct

SEQ ID NO: 446173 - DNA, 120 bp, Artificial Sequence
  ENSG00000154760_43 (sequence is synthesized)
gccactgtgtcaggcttaattgggttttgatgggtacctgcctatctctgtaatttggctctagtcatataggacctgcttcattaaagatctgaaaatctatccagccattgtaaaatg

SEQ ID NO: 446174 - DNA, 120 bp, Artificial Sequence
  ENSG00000154760_44 (sequence is synthesized)
aaacaaaatgttttgaaaatttaaattagccttttattttagttcagacatatagaaaagttgcaagcatagtacagaaagttcctatataccccacttagtgccctcctttttaaaatt

SEQ ID NO: 446175 - DNA, 120 bp, Artificial Sequence
  ENSG00000154760_45 (sequence is synthesized)
tttttaaacctagcttatttcctttaagatttctgagaattccaggaatgctcacagatctgtccttgtagtctcctgccacttcttgctatggagtgctgtaccaaggtctctgctagt

SEQ ID NO: 446176 - DNA, 120 bp, Artificial Sequence
  ENSG00000154760_46 (sequence is synthesized)
ttctagttggcttgacataatgactttcctaaacttcttctgctctgaatctcaagcatggaaagcggtcacatcttttgtttcacgaattaacagtcaacacctggccctacttttaac

SEQ ID NO: 446177 - DNA, 120 bp, Artificial Sequence
  ENSG00000154760_47 (sequence is synthesized)
aaaacttagtaaagccttgagcatagtgaaagacaaatatttaaattatatattagcaggaggctgaggtgggaggatcatatgaggccagcctgggcagcatagcatgacccccccctc

SEQ ID NO: 446178 - DNA, 120 bp, Artificial Sequence
  ENSG00000154760_48 (sequence is synthesized)
gagaagacaacaaaaaattatctgggtgtggtggtgtgctcctgcagtcctagctattccagaggccgaggcgagaggatcgcttgattccaggagttcaaggctgtagttagcgataat

SEQ ID NO: 446179 - DNA, 120 bp, Artificial Sequence
  ENSG00000154760_49 (sequence is synthesized)
cgtgtcactgaatcctagcctgggcaacagaataagaccccatgtctaacaaaataataataaaacaatcaaaagtttaaaattagttattaaatgtcagtgtgcccagagtcctttgac

SEQ ID NO: 446180 - DNA, 120 bp, Artificial Sequence
  ENSG00000154760_50 (sequence is synthesized)
cacagatgatcctgatggccttctctcgccttgtccctgtgcctccttctaccatttttcttcctgagattcaaaagtaagtagcggacagggttcccatttaccactaaatacttcagt

SEQ ID NO: 446181 - DNA, 120 bp, Artificial Sequence
  ENSG00000154760_51 (sequence is synthesized)
gggtgtttcctaaaaggacatttatagtaccatcatcaaaatcagtaaattaaccctgatactattatctaatctgtagactttattgaattatatcagttgtgcctcaagtgtctttat

SEQ ID NO: 446182 - DNA, 120 bp, Artificial Sequence
  ENSG00000154760_52 (sequence is synthesized)
gtttttttctcaaaagagaaaaagttctggtccaggatttgatctaagatcatgcattgtattgagctttcctttcttttaagtctcatttaatctggagatgttaatctgtctttgtca

SEQ ID NO: 446183 - DNA, 120 bp, Artificial Sequence
  ENSG00000154760_53 (sequence is synthesized)
tatctttgacactattgaagaggactggcctattattttgcagagtatctgattttgggtcatttcatgtgttctcatgattagattcaggttatgcatttttggcatgaattccataga

SEQ ID NO: 446184 - DNA, 120 bp, Artificial Sequence
  ENSG00000154760_54 (sequence is synthesized)
agggctgttacggttctcagttcacggtattagaaggcacttgatagtgattagttccattcctgatgatgttaactctgatcatttggataaagtggcgtctgccaggtttccctactg

SEQ ID NO: 446185 - DNA, 120 bp, Artificial Sequence
  ENSG00000154760_55 (sequence is synthesized)
tgcagttacaatttgctttttgtaattaataaagtgtgtgtgtgtgtgtgtgtggagggggggtgtttttgcttctgaacgcataatatttgagatttttttctaattaaaaagtaatta

SEQ ID NO: 446186 - DNA, 120 bp, Artificial Sequence
  ENSG00000154760_56 (sequence is synthesized)
ttcaaagagttcagagaactgatactgatcacattctttgaccccacatgcaaatacattataaactagtaataaaacggtaactagaaaaatgttcatatcttttggaattaaaaaagt

SEQ ID NO: 446187 - DNA, 120 bp, Artificial Sequence
  ENSG00000154760_57 (sequence is synthesized)
gtttaactcgtggatcaaagcagaaattctgtaaccattgtcacagcaggttctaacaagcaagtttaaggaggagagaatttcagtcctagagaatttcagtcttattcaaatgctttc

SEQ ID NO: 446188 - DNA, 120 bp, Artificial Sequence
  ENSG00000154760_58 (sequence is synthesized)
ctagaaagaggaaacagttcctaactaatttcatgaggctggcataatcttgataacaagtctgataggtaaagtatgaaaggaaaattgcaggtcactcaattatcactcaaatatcta

SEQ ID NO: 446189 - DNA, 120 bp, Artificial Sequence
  ENSG00000154760_59 (sequence is synthesized)
catgaaaaattctaaacaaaattttagcaaacaaaatccaacaatttgtaaaagtgataatacaccacgaccaaggtggttcaagtcaggaattcaacgttgattttggcgttaaaaaat

SEQ ID NO: 446190 - DNA, 120 bp, Artificial Sequence
  ENSG00000154760_60 (sequence is synthesized)
caatcatcaggcccagtgaggtggctcactcctgtaatcccagactttctggaggctgaaggaggaaagatccttcaggccagaagtttgagtctgcactgagctgtgactgcatcaccg

SEQ ID NO: 446191 - DNA, 120 bp, Artificial Sequence
  ENSG00000154760_61 (sequence is synthesized)
cactctagcctgggtgccagtttgagaccctgtctccaagaaaaaaaaattaatcagtgtaattcaccacagattaagagttcaaaagagaaaaatcacatgatcatctgaatagaggaa

SEQ ID NO: 446192 - DNA, 120 bp, Artificial Sequence
  ENSG00000154760_62 (sequence is synthesized)
aaagcttttgataaagttcaacatccattcataataaggactctcagcaacttagaagtataaaaacacttttggaaatcaacaaagggaatttacagcatgaacaaacagcaagccagc

SEQ ID NO: 446193 - DNA, 120 bp, Artificial Sequence
  ENSG00000154760_63 (sequence is synthesized)
aaggcaggagaatcacttgagcccaggggttagagacaagccttggcaacatagcaagatcctggctctacaaaaaataaaataaaatgaaataaaatttaaaaattagctgggtttggt

SEQ ID NO: 446194 - DNA, 87 bp, Artificial Sequence
  ENSG00000154760_64 (sequence is synthesized)
ggtgttgagaggatcactggagcccaggaggtgaaggctgcagtgggctaaaaacaaccagaacaaccccccaaccccctccccgca

SEQ ID NO: 446195 - DNA, 120 bp, Artificial Sequence
  ENSG00000154760_65 (sequence is synthesized)
ctaaaaacaaccagaacaaccccccaaccccctccccgcaaaacactataaagaatagcaacacaaggttcaatgtaaactttgatatggtgttttacctctgaggagaggcttattgtt

SEQ ID NO: 446196 - DNA, 120 bp, Artificial Sequence
  ENSG00000154760_66 (sequence is synthesized)
aatattctttagccgtgtaaggggttcacagatgttcatacttttgttctttataccttatatgtattctataaatattgtttctactcaatagttaataaaaacataatttaaaagttc

SEQ ID NO: 446197 - DNA, 120 bp, Artificial Sequence
  ENSG00000154760_67 (sequence is synthesized)
gtgcatcttttaagtcttggcctaaatggaacctactcctggaagtcttatggaaccatggtctccagattcgttcagataccctattcaatgtgttttccctcttagagcccatgtcac

SEQ ID NO: 446198 - DNA, 120 bp, Artificial Sequence
  ENSG00000154760_68 (sequence is synthesized)
agatgatggtaaaggctaatttcattagttcccttccctgccagccagtcagctcctaaagagactatacctgtctttcttgctattgtcttatcccagcacatattagacacgttttaa

SEQ ID NO: 446199 - DNA, 120 bp, Artificial Sequence
  ENSG00000154760_69 (sequence is synthesized)
atattttctaataaatgaattgcaggcctgtaacaattttttaatcaaaaatgaaacaaatattctaatactttaaggtgcaagttcaacatggaggcaaatcactgctccctgggtgtg

SEQ ID NO: 446200 - DNA, 120 bp, Artificial Sequence
  ENSG00000154760_70 (sequence is synthesized)
ttgaatagttcagttttatttagggtttcaattttatttaggaaacaatatctctaccttacaaagaatctgcaagtagcactgactataatacctttatacccaaaggaagagctggga

SEQ ID NO: 446201 - DNA, 120 bp, Artificial Sequence
  ENSG00000154760_71 (sequence is synthesized)
tagagctccctaagacttttctgcctgcaaaagatatgggtggggttgccatttgaatacagttaccaatgaaaaactatcagcttatctaggctttaacaataaagttcatgggggtaa

SEQ ID NO: 446202 - DNA, 120 bp, Artificial Sequence
  ENSG00000154760_72 (sequence is synthesized)
aaaacagaaagcccctgcccagcgagcagcggtttccgcgggggcggaacaaacaggcagagccaagtgcgtcctggaggcttcccccgttgcgaaggtctttcaggactgattttggtg

SEQ ID NO: 446203 - DNA, 120 bp, Artificial Sequence
  ENSG00000154764_0 (sequence is synthesized)
acacttgcaccggtcgctcgcgcgcagcccggcgtcgccccacgccgcgctcgctcctccctccctcctcccgctccgtggctcccgtgctcctggcgaggctcaggcgcggagcgcgcg

SEQ ID NO: 446204 - DNA, 120 bp, Artificial Sequence
  ENSG00000154764_1 (sequence is synthesized)
gacgcctcggctcgcgcctcccgggcgggctatgttgattgccccgccggggccggcccgcgggatcagcacagcccggcccgcggccccggcggccaatcgggactatgaaccggaaag

SEQ ID NO: 446205 - DNA, 120 bp, Artificial Sequence
  ENSG00000154764_2 (sequence is synthesized)
cggccaatcgggactatgaaccggaaagcgcggcgctgcctgggccacctctttctcagcctgggcatggtctacctccggatcggtggcttctcctcagtggtagctctgggcgcaagc

SEQ ID NO: 446206 - DNA, 120 bp, Artificial Sequence
  ENSG00000154764_3 (sequence is synthesized)
atcatctgtaacaagatcccaggcctggctcccagacagcgggcgatctgccagagccggcccgacgccatcatcgtcataggagaaggctcacaaatgggcctggacgagtgtcagttt

SEQ ID NO: 446207 - DNA, 120 bp, Artificial Sequence
  ENSG00000154764_4 (sequence is synthesized)
cagttccgcaatggccgctggaactgctctgcactgggagagcgcaccgtcttcgggaaggagctcaaagtggggagccgggaggctgcgttcacctacgccatcattgccgccggcgtg

SEQ ID NO: 446208 - DNA, 120 bp, Artificial Sequence
  ENSG00000154764_5 (sequence is synthesized)
gcccacgccatcacagctgcctgtacccagggcaacctgagcgactgtggctgcgacaaagagaagcaaggccagtaccaccgggacgagggctggaagtggggtggctgctctgccgac

SEQ ID NO: 446209 - DNA, 120 bp, Artificial Sequence
  ENSG00000154764_6 (sequence is synthesized)
atccgctacggcatcggcttcgccaaggtctttgtggatgcccgggagatcaagcagaatgcccggactctcatgaacttgcacaacaacgaggcaggccgaaagatcctggaggagaac

SEQ ID NO: 446210 - DNA, 120 bp, Artificial Sequence
  ENSG00000154764_7 (sequence is synthesized)
atgaagctggaatgtaagtgccacggcgtgtcaggctcgtgcaccaccaagacgtgctggaccacactgccacagtttcgggagctgggctacgtgctcaaggacaagtacaacgaggcc

SEQ ID NO: 446211 - DNA, 120 bp, Artificial Sequence
  ENSG00000154764_8 (sequence is synthesized)
gttcacgtggagcctgtgcgtgccagccgcaacaagcggcccaccttcctgaagatcaagaagccactgtcgtaccgcaagcccatggacacggacctggtgtacatcgagaagtcgccc

SEQ ID NO: 446212 - DNA, 120 bp, Artificial Sequence
  ENSG00000154764_9 (sequence is synthesized)
aactactgcgaggaggacccggtgaccggcagtgtgggcacccagggccgcgcctgcaacaagacggctccccaggccagcggctgtgacctcatgtgctgtgggcgtggctacaacacc

SEQ ID NO: 446213 - DNA, 120 bp, Artificial Sequence
  ENSG00000154764_10 (sequence is synthesized)
caccagtacgcccgcgtgtggcagtgcaactgtaagttccactggtgctgctatgtcaagtgcaacacgtgcagcgagcgcacggagatgtacacgtgcaagtgagccccgtgtgcacac

SEQ ID NO: 446214 - DNA, 120 bp, Artificial Sequence
  ENSG00000154764_11 (sequence is synthesized)
caccctcccgctgcaagtcagattgctgggaggactggaccgtttccaagctgcgggctccctggcaggatgctgagcttgtcttttctgctgaggagggtacttttcctgggtttcctg

SEQ ID NO: 446215 - DNA, 120 bp, Artificial Sequence
  ENSG00000154764_12 (sequence is synthesized)
caggcatccgtgggggaaaaaaaatctctcagagccctcaactattctgttccacacccaatgctgctccaccctcccccagacacagcccaggtccctccgcggctggagcgaagcctt

SEQ ID NO: 446216 - DNA, 120 bp, Artificial Sequence
  ENSG00000154764_13 (sequence is synthesized)
ctgcagcaggaactctggacccctgggcctcatcacagcaatatttaacaatttattctgataaaaataatattaatttatttaattaaaaagaattcttccacctcgtcgggatccgtt

SEQ ID NO: 446217 - DNA, 120 bp, Artificial Sequence
  ENSG00000154764_14 (sequence is synthesized)
ttctgcaatcaaagtggactgcttgctttcctagcaggatgattttgttgctaggacaaggagccgtgtagaagtgtacataactattctttatgcagatatttctactagctgattttg

SEQ ID NO: 446218 - DNA, 120 bp, Artificial Sequence
  ENSG00000154764_15 (sequence is synthesized)
caggtacccaccttgcagcactagatgtttaagtacaagaggagacatcttttatgcatatatagatatacacacacacatttttttttttttttttgctgtttgctgctacttatccag

SEQ ID NO: 446219 - DNA, 120 bp, Artificial Sequence
  ENSG00000154764_16 (sequence is synthesized)
ttttccagagtatgttttccatccttttgccctccccagttcaaacttcaccattagaaaaatccagtttggaataaatagagaggaaaaataataaattcccagcagtttccatctttc

SEQ ID NO: 446220 - DNA, 120 bp, Artificial Sequence
  ENSG00000154764_17 (sequence is synthesized)
ggaaagtgagccaccggataagagagaatattttgtaagagactatttttatatgaatattttatttatatcgagtctactgtatcattccacggcctgtgcttcttcttaattctggta

SEQ ID NO: 446221 - DNA, 120 bp, Artificial Sequence
  ENSG00000154764_18 (sequence is synthesized)
ctcacttaggggtaaggaggggcgatgcctggttgtggcgtcaggccccatggggccccttgcacagctggattcttgagttctgtttgccaagtgggcacaagctgcccctggatgcct

SEQ ID NO: 446222 - DNA, 120 bp, Artificial Sequence
  ENSG00000154764_19 (sequence is synthesized)
ggggttgaggcatcatctcatccatgttagccgggaaagaaatcaaatccccagcctcagcctgttaagctcaggcctttcaagcagggccactgagtggtagcttcgaaatgagtcact

SEQ ID NO: 446223 - DNA, 120 bp, Artificial Sequence
  ENSG00000154764_20 (sequence is synthesized)
gtggtgggtggtcatcgtgcccctcacagggacttgaccgtcatcctgcagcagaggccagttcagggagccccacacctcaccaagacactagccattgcctgcgtgtcctggaaggtg

SEQ ID NO: 446224 - DNA, 120 bp, Artificial Sequence
  ENSG00000154764_21 (sequence is synthesized)
agatgtagtcctcaggtgaggtgacccaaagcagatggggtgaggggccgatgagcagccgggcccagcggggcttcctggatatcctgctcccaaggccaagcagcagagagaggttca

SEQ ID NO: 446225 - DNA, 120 bp, Artificial Sequence
  ENSG00000154764_22 (sequence is synthesized)
agtgaggccactttgctttgggtccagctacacccagagcctcagcctagaaagctgtcctccagcaggctgggggtgttctaatatgtgtccgtttgcatttccggtgtgtgtgtgtgt

SEQ ID NO: 446226 - DNA, 120 bp, Artificial Sequence
  ENSG00000154764_23 (sequence is synthesized)
gtgtgtgtgtgtgtgtgtgtgtactgtatcttcttagggacttgagtgtagtcacgtgactttgcgccttgcagcgcctccgccgtactcgtgtgtgtatgtgtctgtgtgtttccgtgc

SEQ ID NO: 446227 - DNA, 120 bp, Artificial Sequence
  ENSG00000154764_24 (sequence is synthesized)
gtgtttccgtgctacccaagcgtctgtttctctccgtgtgcctgggagatcaggtctcaggcatggagctgcatgcctttgcatctgctgctccccagagtctctgcttgcatgtgaggg

SEQ ID NO: 446228 - DNA, 120 bp, Artificial Sequence
  ENSG00000154764_25 (sequence is synthesized)
ctggtggtatgaggcagacagcagagattgtgtgtgattgtgttgaaccgccaagagaaggcacctctgaactctgtccccacacccatgggtgaaaaccagacacctctgagaccacag

SEQ ID NO: 446229 - DNA, 120 bp, Artificial Sequence
  ENSG00000154764_26 (sequence is synthesized)
cacagccccatggccccacctgctgggagcccttcagtatctaggctgtgtctgactcctcagtgtccacactgagcctggatcacagcatgggcaaataaaagtgactggatggttgca

SEQ ID NO: 446230 - DNA, 120 bp, Artificial Sequence
  ENSG00000154764_27 (sequence is synthesized)
tggtttcttcccttggacatttttttccatttttcttttacttgggtgtctggaggagtgggcatgtgaaggggccatggagtgaatggatggagggatggatgaatgtgtgagtaggta

SEQ ID NO: 446231 - DNA, 120 bp, Artificial Sequence
  ENSG00000154764_28 (sequence is synthesized)
ggtaggtgaatgggtagatgtgtggatggataagtaggtgggtgggtgaatggataaatggatggatgggtagatggatggatgaagggataaacagatgggtggatggattgataagtg

SEQ ID NO: 446232 - DNA, 120 bp, Artificial Sequence
  ENSG00000154764_29 (sequence is synthesized)
agcggatgaatggatgaatagctaggaaagtgggtgggtggatgagggtgggttgatgaggtaggtacacctacagataggtaagtgagcagtttcttgggagtccacaggtcacatttt

SEQ ID NO: 446233 - DNA, 120 bp, Artificial Sequence
  ENSG00000154764_30 (sequence is synthesized)
atctttgctttggaaaacctagcagatctgccatgatcaggatggcttcccgaccttgcaacccttctgcttctgacctccttggcacctgggaatgggggagattctgaccagcctccc

SEQ ID NO: 446234 - DNA, 120 bp, Artificial Sequence
  ENSG00000154764_31 (sequence is synthesized)
cagatgagtgttcaatgatagttacataaacacagtctcagaagagtcatccctgtgtcctccctcactgtgggttcccagctctggggcctgccctctctcgggtgccctgttcagctg

SEQ ID NO: 446235 - DNA, 120 bp, Artificial Sequence
  ENSG00000154764_32 (sequence is synthesized)
tgctctgagccccagtttctccacctgtgaaatcagaataacacctacctcacagggctgttgtgaggatcctcccagtaatgactgtatggcactttgagttgcaaagcaatggatgaa

SEQ ID NO: 446236 - DNA, 120 bp, Artificial Sequence
  ENSG00000154764_33 (sequence is synthesized)
ggaaaggtcacatgagctgctgtttgtggcagcacccaccatactgccttggcacatagtagggacactgcccaagtttactgatgcatttgatgcatatttggggggcacctgccatgt

SEQ ID NO: 446237 - DNA, 120 bp, Artificial Sequence
  ENSG00000154764_34 (sequence is synthesized)
aataggtactcacccggagccacatctttgaagtgccacaatccatttattcagcagtcatttagtgaaccagcagacagcctccctgccctcagggagctcatcctctcaggaggaaga

SEQ ID NO: 446238 - DNA, 120 bp, Artificial Sequence
  ENSG00000154764_35 (sequence is synthesized)
aagtgggtgactgcctgggctgagggtcccatgtctggggatccccacactctgcaaaaaggactccatcattttacccatctagggctgtgagagtgcaacacatgtctggtgagctgg

SEQ ID NO: 446239 - DNA, 120 bp, Artificial Sequence
  ENSG00000154764_36 (sequence is synthesized)
tgaatgcttagaaggatggatttgaagacctttccagtgagagagacagaagcaaggggcgggccagctccattttctctctgccatttcttaacaatacgccatcttgcccaagcaaaa

SEQ ID NO: 446240 - DNA, 120 bp, Artificial Sequence
  ENSG00000154767_0 (sequence is synthesized)
atacaccggaaatagagagaaacctgttgtgctctttcctgcttcccgcagttttttagtggccacgggtatggggtggagcttcctttaggggcgtgactaggcctccaacgaaggggc

SEQ ID NO: 446241 - DNA, 120 bp, Artificial Sequence
  ENSG00000154767_1 (sequence is synthesized)
gtggccaagcgcaccgcctcggggcggggccggcgttctagcgcatcgcggccgggtgcgtcactcgcgaagtggaatttgcccagacaagcaacatggctcggaaacgcgcggccggcg

SEQ ID NO: 446242 - DNA, 120 bp, Artificial Sequence
  ENSG00000154767_2 (sequence is synthesized)
gggagccgcggggacgcgaactgcgcagccagaaatccaaggccaagagcaaggcccggcgtgaggaggaggaggaggatgcctttgaagatgagaaacccccaaagaagagccttctct

SEQ ID NO: 446243 - DNA, 120 bp, Artificial Sequence
  ENSG00000154767_3 (sequence is synthesized)
ccaaagtttcacaaggaaagaggaaaagaggctgcagtcatcctgggggttcagcagatggtccagcaaaaaagaaagtggccaaggtgactgttaaatctgaaaacctcaaggttataa

SEQ ID NO: 446244 - DNA, 120 bp, Artificial Sequence
  ENSG00000154767_4 (sequence is synthesized)
aggatgaagccctcagcgatggggatgacctcagggactttccaagtgacctcaagaaggcacaccatctgaagagaggggctaccatgaatgaagacagcaatgaagaagaggaagaaa

SEQ ID NO: 446245 - DNA, 120 bp, Artificial Sequence
  ENSG00000154767_5 (sequence is synthesized)
gtgaaaatgattgggaagaggttgaagaacttagtgagcctgtgctgggtgacgtgagagaaagtacagccttctctcgatctcttctgcctgtgaagccagtggagatagagattgaaa

SEQ ID NO: 446246 - DNA, 120 bp, Artificial Sequence
  ENSG00000154767_6 (sequence is synthesized)
cgccagagcaggcgaagacaagagaaagaagtgaaaagataaaactggagtttgagacatatcttcggagggcgatgaaacgtttcaataaaggggtccatgaggacacacacaaggttc

SEQ ID NO: 446247 - DNA, 120 bp, Artificial Sequence
  ENSG00000154767_7 (sequence is synthesized)
accttctctgcctgctagcaaatggcttctatcgaaataacatctgcagccagccagatctgcatgctattggcctgtccatcatcccagcccgctttaccagagtgctgcctcgagatg

SEQ ID NO: 446248 - DNA, 120 bp, Artificial Sequence
  ENSG00000154767_8 (sequence is synthesized)
tggacacctactacctctcaaacctggtgaagtggttcattggaacatttacagttaatgcagaactttcagccagtgaacaagataacctgcagactacattggaaaggagatttgcta

SEQ ID NO: 446249 - DNA, 120 bp, Artificial Sequence
  ENSG00000154767_9 (sequence is synthesized)
tttactctgctcgagatgatgaggaattggtccatatattcttactgattctccgggctctgcagctcttgacccggctggtattgtctctacagccaattcctctgaagtcagcaacag

SEQ ID NO: 446250 - DNA, 120 bp, Artificial Sequence
  ENSG00000154767_10 (sequence is synthesized)
caaagggaaagaaaccttccaaggaaagattgactgcggatccaggaggctcctcagaaacttccagccaagttctagaaaaccacaccaaaccaaagaccagcaaaggaaccaaacaag

SEQ ID NO: 446251 - DNA, 120 bp, Artificial Sequence
  ENSG00000154767_11 (sequence is synthesized)
aggaaacctttgctaagggcacctgcaggccaagtgccaaagggaagaggaacaagggaggcagaaagaaacggagcaagccctcctccagcgaggaagatgagggcccaggagacaagc

SEQ ID NO: 446252 - DNA, 120 bp, Artificial Sequence
  ENSG00000154767_12 (sequence is synthesized)
aggagaaggcaacccagcgacgtccgcatggccgggagcggcgggtggcctccagggtgtcttataaagaggagagtgggagtgatgaggctggcagcggctctgattttgagctctcca

SEQ ID NO: 446253 - DNA, 120 bp, Artificial Sequence
  ENSG00000154767_13 (sequence is synthesized)
gtggagaagcctctgatccctctgatgaggattccgaacctggccctccaaagcagaggaaagcccccgctcctcagaggacaaaggctgggtccaagagtgcctccaggacccatcgtg

SEQ ID NO: 446254 - DNA, 120 bp, Artificial Sequence
  ENSG00000154767_14 (sequence is synthesized)
ggagccatcgtaaggacccaagcttgccagcggcatcctcaagctcttcaagcagtaaaagaggcaagaaaatgtgcagcgatggtgagaaggcagaaaaaagaagcatagctggtatag

SEQ ID NO: 446255 - DNA, 120 bp, Artificial Sequence
  ENSG00000154767_15 (sequence is synthesized)
gacctatgtggtgggcattgacagtgacggctgggtccgagatgtcacacagaggtacgacccagtctggatgacagtgacccgcaagtgccgggttgatgctgagtggtgggccgagac

SEQ ID NO: 446256 - DNA, 120 bp, Artificial Sequence
  ENSG00000154767_16 (sequence is synthesized)
cttgagaccataccagagcccatttatggacagggagaagaaagaagacttggagtttcaggctaaacacatggaccagcctttgcccactgccattggcttatataagaaccaccctct

SEQ ID NO: 446257 - DNA, 120 bp, Artificial Sequence
  ENSG00000154767_17 (sequence is synthesized)
gtatgccctgaagcggcatctcctgaaatatgaggccatctatcccgagacagctgccatccttgggtattgtcgtggagaagcggtctactccagggattgtgtgcacactctgcattc

SEQ ID NO: 446258 - DNA, 120 bp, Artificial Sequence
  ENSG00000154767_18 (sequence is synthesized)
cagggacacgtggctgaagaaagcaagagtggtgaggcttggagaagtaccctacaagatggtgaaaggcttttctaaccgtgctcggaaagcccgacttgctgagccccagctgcggga

SEQ ID NO: 446259 - DNA, 120 bp, Artificial Sequence
  ENSG00000154767_19 (sequence is synthesized)
agaaaatgacctgggcctgtttggctactggcagacagaggagtatcagcccccagtggccgtggacgggaaggtgccccggaacgagtttgggaatgtgtacctcttcctgcccagcat

SEQ ID NO: 446260 - DNA, 120 bp, Artificial Sequence
  ENSG00000154767_20 (sequence is synthesized)
gatgcctattggctgtgtccagctgaacctgcccaatctacaccgcgtggcccgcaagctggacatcgactgtgtccaggccatcactggctttgatttccatggcggctactcccatcc

SEQ ID NO: 446261 - DNA, 120 bp, Artificial Sequence
  ENSG00000154767_21 (sequence is synthesized)
cgtgactgatggatacatcgtctgcgaggaattcaaagacgtgctcctgactgcctgggaaaatgagcaggcagtcattgaaaggaaggagaaggagaaaaaggagaagcgggctctagg

SEQ ID NO: 446262 - DNA, 120 bp, Artificial Sequence
  ENSG00000154767_22 (sequence is synthesized)
gaactggaagttgctggccaaaggtctgctcatcagggagaggctgaagcgtcgctacgggcccaagagtgaggcagcagctccccacacagatgcaggaggtggactctcttctgatga

SEQ ID NO: 446263 - DNA, 120 bp, Artificial Sequence
  ENSG00000154767_23 (sequence is synthesized)
agaggaggggaccagctctcaagcagaagcggccaggatactggctgcctcctggcctcaaaaccgagaagatgaagaaaagcagaagctgaagggtgggcccaagaagaccaaaaggga

SEQ ID NO: 446264 - DNA, 120 bp, Artificial Sequence
  ENSG00000154767_24 (sequence is synthesized)
aaagaaagcagcagcttcccacctgttcccatttgagcagctgtgagctgagcgcccactagaggggcacccaccagttgctgctgccccactacaggccccacacctgccctgggcatg

SEQ ID NO: 446265 - DNA, 120 bp, Artificial Sequence
  ENSG00000154767_25 (sequence is synthesized)
cccagcccctggtggtgggggcttctctgctgagaaggcaaactgaggcagcatgcacggaggcggggtcaggggagacgaggccaagctgaggaggtgctgcaggtcccgtctggctcc

SEQ ID NO: 446266 - DNA, 120 bp, Artificial Sequence
  ENSG00000154767_26 (sequence is synthesized)
agcccttgtcagattcacccagggtgaagccttcaaagctttttgctaccaaagcccactcaccctttgagctacagaacactttgctaggagatactcttctgcctcctagacctgttc

SEQ ID NO: 446267 - DNA, 120 bp, Artificial Sequence
  ENSG00000154767_27 (sequence is synthesized)
tttccatctttagaaacatcagtttttgtatggaagccaccgggagatttctggatggtggtgcatccgtgaatgcgctgatcgtttcttccagttagagtcttcatctgtccgacaagt

SEQ ID NO: 446268 - DNA, 120 bp, Artificial Sequence
  ENSG00000154767_28 (sequence is synthesized)
tcactcgcctcggttgcggacctaggaccatttctctgcaggccacttaccttcccctgagtcaggcttactaatgctgccctcactgcctctttgcagtaggggagagagcagagaagt

SEQ ID NO: 446269 - DNA, 120 bp, Artificial Sequence
  ENSG00000154767_29 (sequence is synthesized)
acaggtcatctgctgggatctagttttccaagtaacattttgtggtgacagaagcctaaaaaaagctaaaatcaggaaagaaaaggaaaaatacgaattgaaaattaaggaaatgttagt

SEQ ID NO: 446270 - DNA, 120 bp, Artificial Sequence
  ENSG00000154767_30 (sequence is synthesized)
aaaatagatgagtgttaaactagattgtattcattactagataaaatgtataaagctctctgtactaaggagaaatgacttttataacattttgagaaaataataaagcatttatctaaa

SEQ ID NO: 446271 - DNA, 120 bp, Artificial Sequence
  ENSG00000154767_31 (sequence is synthesized)
tactctgctcgagatgatgaggaattggtccatgtaagtgatcctcccggatcactgttttttatcagtactgttaactaatgataatggcagccatgtgccagatgccattccaggtgt

SEQ ID NO: 446272 - DNA, 120 bp, Artificial Sequence
  ENSG00000154767_32 (sequence is synthesized)
gttaccgacactaccttattcagtcctcataatgacgttgatagctgctgaagcccagaatagctacatgatgcctctaaggtcttttccttggtgagcctgagaatcgagattgggatc

SEQ ID NO: 446273 - DNA, 120 bp, Artificial Sequence
  ENSG00000154767_33 (sequence is synthesized)
agagtctgagtggagggcctgtatgctttcctccctatcgcctctagttgtggtgtaccaaaaagcccgtagtttttggtcagatgtgctagaaatattttcattaatttttccaatttt

SEQ ID NO: 446274 - DNA, 120 bp, Artificial Sequence
  ENSG00000154767_34 (sequence is synthesized)
gtcttcagaagtcccaaggaaatgttttttcaaattggatgctgaagtccttgagaatgtgtttttgtatctcacatttgggtgttgacactggcaggcagcagtgcagtgaggagggtt

SEQ ID NO: 446275 - DNA, 120 bp, Artificial Sequence
  ENSG00000154767_35 (sequence is synthesized)
tccgtgtgctcccaggctcttcccagccctctctgacatcatggcaggcacccgagggagcgagcactgaatacagcaggctcctgcccaccccgcagactatcactgtccctgaggagc

SEQ ID NO: 446276 - DNA, 120 bp, Artificial Sequence
  ENSG00000154767_36 (sequence is synthesized)
ctgggtccgggctctggggtctactgcccctgctgcccacacctgcctctgtcttgaattgcctgtgtccaggttctggaagacctcacccactaaagattttggagtcagtaacgatta

SEQ ID NO: 446277 - DNA, 120 bp, Artificial Sequence
  ENSG00000154767_37 (sequence is synthesized)
aaaagttatctgtttttgtggctttcaggtatagtatatcactttgtaaatcagatcaattttttggaagtgagacttggtgtgaaggagaggctatattctaaagtggtgtatatatct

SEQ ID NO: 446278 - DNA, 120 bp, Artificial Sequence
  ENSG00000154781_0 (sequence is synthesized)
gcgacggaggtaggcttacgaggcctgtgtcgggtagaaagggtccttcctggaccgggaccctctgccacgaccatggaccgtaggaaaaagcctttggacgtcacggcctcctcgttg

SEQ ID NO: 446279 - DNA, 120 bp, Artificial Sequence
  ENSG00000154781_1 (sequence is synthesized)
gtagatcttaaggctgaactcttccgaaagcaagaagaattcaaacaagaaaaacttctaaaagattctggagtttttggaaaaccaaaaacaactaacaagaaaccaagtatctggagc

SEQ ID NO: 446280 - DNA, 120 bp, Artificial Sequence
  ENSG00000154781_2 (sequence is synthesized)
aaacagaatgtaggcgtttcaaatcgagctgagaaggatgctgaacagaagattgaagaacagaagactttagacaaagcaagggaaaaattggaagaaaaagccaaattatatgaaaaa

SEQ ID NO: 446281 - DNA, 120 bp, Artificial Sequence
  ENSG00000154781_3 (sequence is synthesized)
atgactaaaggagactttatagatgaagaagtagaggatatgtaccttgtggatttcacacagaagatcatagacaagcgcaaagaaatggaggcatctggtgcccatagagattctcaa

SEQ ID NO: 446282 - DNA, 120 bp, Artificial Sequence
  ENSG00000154781_4 (sequence is synthesized)
aaggcaggagaaagggacgacgatgaggaaaaccttcctgagggagagatccctcctccccaagaccccagtgaagaatgggtggattacgtggactctttggggcgttcccggcgctgt

SEQ ID NO: 446283 - DNA, 120 bp, Artificial Sequence
  ENSG00000154781_5 (sequence is synthesized)
atgagaaaggatttgccagatctgctggagatggataaaaatcttcaggggagactttttattagtcctgctaatgaaaaaaccctattatctgaagatatgagaaaagaacttcagcgc

SEQ ID NO: 446284 - DNA, 120 bp, Artificial Sequence
  ENSG00000154781_6 (sequence is synthesized)
cagcaatgggaggaagaagaaagagaggccctgaagaggcccatggggcccgtacattatgaagacattcgggaaaatgaggcccggcaacttggtgttgggtattttgcctttgcccga

SEQ ID NO: 446285 - DNA, 120 bp, Artificial Sequence
  ENSG00000154781_7 (sequence is synthesized)
gacaaagagttgagaaacaagcagatgaaaaccttagagatgctgcgtgaacagacaacagatcagagaacaaaacgagaaaacataaaggaaaagcgaaaggctatcttagaggcaaga

SEQ ID NO: 446286 - DNA, 120 bp, Artificial Sequence
  ENSG00000154781_8 (sequence is synthesized)
cttgccaaacttcgacaaaaaaagatgaaaaaatcaaaagaaggtggaacagaagaagaaaatagagatggagatgttattgggcctttgccaccggagccagaggctgtgccaacccca

SEQ ID NO: 446287 - DNA, 120 bp, Artificial Sequence
  ENSG00000154781_9 (sequence is synthesized)
cgtcctgctgcccagagtagcaaagtagaagtcattgtccaggagaggaaggacaccaagcctggagtgccacacatccgggagtgggaccgcggaaaagaattttcctttggatactgg

SEQ ID NO: 446288 - DNA, 120 bp, Artificial Sequence
  ENSG00000154781_10 (sequence is synthesized)
tcgaagaggcagtcagatctccgggctgagagagatcctgagtttgccccgccgtcagattactttgtgggtcagaagagaactggtttttccagcagccaggcatggagcagacctggg

SEQ ID NO: 446289 - DNA, 120 bp, Artificial Sequence
  ENSG00000154781_11 (sequence is synthesized)
ccagcacagagtgacccagggcagtgccctgaccagagccacggacctagccctgaacatacgtcacccactcctgcccccgacaacccaccacaagcccccacagttactttcaaaact

SEQ ID NO: 446290 - DNA, 120 bp, Artificial Sequence
  ENSG00000154781_12 (sequence is synthesized)
gggtttgtactttgacagtgcctttctctcccagagggagaaataactttaggaactgaattgtacctttgtcctgtcctttccctaggaggcacagacttcgggttggatttgtcagca

SEQ ID NO: 446291 - DNA, 120 bp, Artificial Sequence
  ENSG00000154781_13 (sequence is synthesized)
aggaggaaagttatggaaactttggccacttggctgttcattttattctaagtgggatagggacatacctacctggatttacatgtgagctgcgatagaatagaagtatttattctgtaa

SEQ ID NO: 446292 - DNA, 120 bp, Artificial Sequence
  ENSG00000154781_14 (sequence is synthesized)
aattagacactgagatgtgcttataaccctgtttcatatctactcccacgacttactcatatttaagggttcttttccattccttttgcaaatccgagcatgcaggtgtctttattccaa

SEQ ID NO: 446293 - DNA, 120 bp, Artificial Sequence
  ENSG00000154781_15 (sequence is synthesized)
gggttcagcttccagatcagccgatggaccataggtcacgaggaatttctccctgtcaagcagtggaaaactgcatgggaggcaaaatgctctgttctccaagaggacccggaagtaatc

SEQ ID NO: 446294 - DNA, 120 bp, Artificial Sequence
  ENSG00000154781_16 (sequence is synthesized)
acataggaaatgataaggaagaccaggaggagctcttcgtagtccagaaaggtagaagtgggagttgtttacttaattttactgtcataccatgctattacctacactcctgtgtgcagt

SEQ ID NO: 446295 - DNA, 120 bp, Artificial Sequence
  ENSG00000154781_17 (sequence is synthesized)
gggcattcagtaaatgtgtgttgaaggactgggacgtacgtggaggctgctggacctggtcagagactgatgtgccttagcggcaatggttagagcttttcagtgcatcccacctccctg

SEQ ID NO: 446296 - DNA, 120 bp, Artificial Sequence
  ENSG00000154781_18 (sequence is synthesized)
tcgcccccatgctcggcttcctcacattcaggagcctgacttggatcagacttggggctgcacagtggagcaggtgggttcccgtgtcattagtaataaggagagggttgggggtgggca

SEQ ID NO: 446297 - DNA, 120 bp, Artificial Sequence
  ENSG00000154781_19 (sequence is synthesized)
gggctccagaaagtcagcagtgtgcctgggcacccaccccatcctctacctgccacacctcagagggttcctacagctgcacacaagcagttgagagttgatgaccaggcccatagggct

SEQ ID NO: 446298 - DNA, 120 bp, Artificial Sequence
  ENSG00000154781_20 (sequence is synthesized)
cccacagctggttcccaggccagtgagtgctgtgagaatacagtagcacaagtccttgttctctgaagagtgggaaggagaggagtgagtgaagtagcctgtcccctgcaggtcctctgc

SEQ ID NO: 446299 - DNA, 120 bp, Artificial Sequence
  ENSG00000154781_21 (sequence is synthesized)
gatggcattgtctcggttcccgcagtgctgcagtgtggaagggagtgccccatcctcattacagatgacacactggagtgtggaggggtcgatgacttgtgcagggtcatatggtaccta

SEQ ID NO: 446300 - DNA, 120 bp, Artificial Sequence
  ENSG00000154781_22 (sequence is synthesized)
aggggcagatctcagacttaaacacaattgatgtctaacccctagacagtctttttagtgccctctgctctcagtcttgttgccctagtatcaagcaatcttagacaaacatcctgaatt

SEQ ID NO: 446301 - DNA, 120 bp, Artificial Sequence
  ENSG00000154781_23 (sequence is synthesized)
cttacaaacttacctctaaactctgaggataaagttgccagtccttttaatggtcagcctaatcattctgtcagcctaatcgggtaattgctttttttaataaatacacataaaaaccaa

SEQ ID NO: 446302 - DNA, 120 bp, Artificial Sequence
  ENSG00000154781_24 (sequence is synthesized)
ggttgttatcgagccatttctctttattcttcctgggtgttcttttgagacttccctttaagttaggttggattaggttattatagttgtaaaaacagtagctcaaatgaagacataatt

SEQ ID NO: 446303 - DNA, 120 bp, Artificial Sequence
  ENSG00000154781_25 (sequence is synthesized)
gggaaaatggtatgactattttcttgcagctttgcaaatcttatttttaaccttaaactgatggcaaacataaagggaagtattcataaagcaatagcttttacatggaaattaaagatc

SEQ ID NO: 446304 - DNA, 120 bp, Artificial Sequence
  ENSG00000154781_26 (sequence is synthesized)
ctgctttggaaatagaaaatatctcctttgttcacttcatagccttaaaatactcacatttgggaatatcttcctgacagagggtctggtaatccaagggattgttccctgagagaagtg

SEQ ID NO: 446305 - DNA, 120 bp, Artificial Sequence
  ENSG00000154781_27 (sequence is synthesized)
gagacagcccatggctgaaagcaaacgaacccttgttatgcttcccttggcaaacaggacgaaaacttggtctaacttttgtgtttctttggttttttgtttcttcgcttagctgttttc

SEQ ID NO: 446306 - DNA, 120 bp, Artificial Sequence
  ENSG00000154783_0 (sequence is synthesized)
caaaaccacctgtcgctcccaagccaaagactaccagtccactgacgccagtgaccgcgcccaaattcccttcctcagccaggcccgagagtcttcacagtccaaactccatgttcaggg

SEQ ID NO: 446307 - DNA, 120 bp, Artificial Sequence
  ENSG00000154783_1 (sequence is synthesized)
gtccgaagccccccattgcccccaagcccaggctgactgccccaaacgagtggagagccagtgtgtacctgaatgacagcttgaacaaatgcagcaacgggcggctgccctgtgtagaca

SEQ ID NO: 446308 - DNA, 120 bp, Artificial Sequence
  ENSG00000154783_2 (sequence is synthesized)
gggggcttgatgaggggccccggtccatcccaaagtgctctgagtcggagaccgacgaggattacatcgtggtccccagggttccgctgagggaggatgaacccaaggacgagggcagtg

SEQ ID NO: 446309 - DNA, 120 bp, Artificial Sequence
  ENSG00000154783_3 (sequence is synthesized)
tggggaacaaagccctggtgtctcccgagtcctctgcggaagaggaagaggagcgtgaagagggaggcgaggcatgtggcctggagggtacaggagctggtgaggattcagtggcccctg

SEQ ID NO: 446310 - DNA, 120 bp, Artificial Sequence
  ENSG00000154783_4 (sequence is synthesized)
ctgctccgggtgcaggagcgctgagcagggagggtgaggaaggcacagaccttgctcttgaggatgaaggggagggctgcgctgatgagccagggacactggagcaggtgtccagaagtg

SEQ ID NO: 446311 - DNA, 120 bp, Artificial Sequence
  ENSG00000154783_5 (sequence is synthesized)
aggaggaagagaagctagtgcagccacacagggagtgcagcctggaggacagtgggccttgggctggagagggggtcttccagagcgacctcctcctgcctcacatccatggagaggacc

SEQ ID NO: 446312 - DNA, 120 bp, Artificial Sequence
  ENSG00000154783_6 (sequence is synthesized)
aggagccccccgacacccccggggaggcagaggaggatgatgaggaaggctgtgccagcacagacccagcaggggcagatgagggttcgggtcctgacaggcccacggaggacatgggac

SEQ ID NO: 446313 - DNA, 120 bp, Artificial Sequence
  ENSG00000154783_7 (sequence is synthesized)
aggatgctgaggacaccagtgaggagccccctgagaaggaggagctggccggggtccaggaggcagagacagccacagactgccctgaagttcttgaggagggatgtgaagaggccacgg

SEQ ID NO: 446314 - DNA, 120 bp, Artificial Sequence
  ENSG00000154783_8 (sequence is synthesized)
gtgtcacaggtggggaacaggttgacctcagtgaaccacctgaccacgagaagaaaaccaaccaagaagtggcagccgccaccctggaggaccatgcacaggatgagtccgccgaggaga

SEQ ID NO: 446315 - DNA, 120 bp, Artificial Sequence
  ENSG00000154783_9 (sequence is synthesized)
gctgccagattgtcccttttgagaatgactgcatggaggacttcgtgacttccctcacaggaagcccctatgagttcttcccaactgagagcacctctttttgcagcgagagctgttctc

SEQ ID NO: 446316 - DNA, 120 bp, Artificial Sequence
  ENSG00000154783_10 (sequence is synthesized)
ctctttctgaatcagcgaaaggtttagaatcagagcaggcaccaaagctggggctgcgtgcggaggagaaccccatggtgggggctttgtgtggccagtgtggctccctacagggtggag

SEQ ID NO: 446317 - DNA, 120 bp, Artificial Sequence
  ENSG00000154783_11 (sequence is synthesized)
cggccgagggtcccgcagcccctgatgtggtggtcgtgctggaggaggaggccttggatgatgcactggccaacccctatgtgatgggagtgggcctgcccggtcaggcggcccctggag

SEQ ID NO: 446318 - DNA, 120 bp, Artificial Sequence
  ENSG00000154783_12 (sequence is synthesized)
aaggagggcaggctgcatcggacgccctgggtggttatggctcgaaagaagaattgaactgtgaggcagagggtggcctggttcccgcggacaggaagaacaccagcacgagggtccggc

SEQ ID NO: 446319 - DNA, 120 bp, Artificial Sequence
  ENSG00000154783_13 (sequence is synthesized)
cccactctgggaaggtggccggctatgtcccagaaaccgtccctgaagaaaccggacctgaggcgggctcgtcagcccctggcattggaggtgccgcagaggaggtgggaaagacgcttt

SEQ ID NO: 446320 - DNA, 120 bp, Artificial Sequence
  ENSG00000154783_14 (sequence is synthesized)
tgtcattggaggggaagcccttggaagccagcagggccttgccagcaaagcccagggcctttactttataccctcggtcgttctccgtggaaggccgagagattccagtgtccgtgtacc

SEQ ID NO: 446321 - DNA, 120 bp, Artificial Sequence
  ENSG00000154783_15 (sequence is synthesized)
aggagcctgaggggtcagggttggatgaccacaggataaagaggaaagaggacaatctctctctgtcgtgtgtaattggctcctctgggagtttctcccagagaaaccaccttccgtcca

SEQ ID NO: 446322 - DNA, 120 bp, Artificial Sequence
  ENSG00000154783_16 (sequence is synthesized)
gcggcacctccacgccttcttccatggtcgacatcccacctcctttcgacctggcctgcatcaccaagaagcccatcacaaagagctctccctcactcctgatcgagagcgactccccgg

SEQ ID NO: 446323 - DNA, 120 bp, Artificial Sequence
  ENSG00000154783_17 (sequence is synthesized)
acaagtacaagaagaagaagtcatcctttaagcgcttcctggcactgacgtttaagaagaagacggagaacaaattgcatgtggatgtgaacgtgtcttcctctaggtcctcttcagagt

SEQ ID NO: 446324 - DNA, 120 bp, Artificial Sequence
  ENSG00000154783_18 (sequence is synthesized)
ccagctaccacgggccttccaggattctggaagttgaccggagaagcctcagcaactcccctcagcttaagtctcggactgggaagctccgggcttctgaatccccctcctccctcatct

SEQ ID NO: 446325 - DNA, 120 bp, Artificial Sequence
  ENSG00000154783_19 (sequence is synthesized)
tttatagagatggcaagaggaaaggtgtccccttcagcaggacggtgtccagagtggagtcctttgaagaccgctcccggccgcccttcctgcccttgccactgaccaagccacggtcca

SEQ ID NO: 446326 - DNA, 120 bp, Artificial Sequence
  ENSG00000154783_20 (sequence is synthesized)
tctccttccccagcgctgacacttcagactatgagaacattccagccatgaactcggactatgagaatatccagattccaccccggagacctgccagggctggcgcgttcacgaagctgt

SEQ ID NO: 446327 - DNA, 120 bp, Artificial Sequence
  ENSG00000154783_21 (sequence is synthesized)
ttgaagatcagagcagagccctgtccacagcaaacgaaaatgatggctacgtggacatgagcagcttcaacgcctttgagagcaaacagcagagtgcagaccaggacgcagaaagcgcct

SEQ ID NO: 446328 - DNA, 120 bp, Artificial Sequence
  ENSG00000154783_22 (sequence is synthesized)
acacagagccctacaaagtctgtcccatctcgtcggcagcccccaaagaggaccttacgtcggatgaagagcagagaagctcggaggaggaggacagtgcttcaagagaccccagtgtca

SEQ ID NO: 446329 - DNA, 120 bp, Artificial Sequence
  ENSG00000154783_23 (sequence is synthesized)
cccacaaggtggaaggacagtccagagcccttgtcatcgcacaggaactgctatcttcagagaaagcatacgtggagatgctccagcacttaaatctggatttccatggagctgtcatga

SEQ ID NO: 446330 - DNA, 120 bp, Artificial Sequence
  ENSG00000154783_24 (sequence is synthesized)
gaaggcagagacacattggcccgggaggagctgaggcagggcctgagtgaactcccagccatccacgaccttcatcaaggcatcctggaggagctggaggaaaggctgtcaaattgggag

SEQ ID NO: 446331 - DNA, 120 bp, Artificial Sequence
  ENSG00000154783_25 (sequence is synthesized)
agccagcagaaggtagctgacgtcttcctggcccgggagcaggggtttgatcaccacgccactcacatcctgcagttcgacaggtacctaggtctgctcagtgagaattgcctccactct

SEQ ID NO: 446332 - DNA, 120 bp, Artificial Sequence
  ENSG00000154783_26 (sequence is synthesized)
ccccggctggcagctgctgtccgtgaatttgagcagagtgtacaaggaggcagccagactgcgaagcatcggctgctgcgggtggttcaacgcctcttccagtaccaagtgctcctcaca

SEQ ID NO: 446333 - DNA, 120 bp, Artificial Sequence
  ENSG00000154783_27 (sequence is synthesized)
gactatttaaacaacctttgtccggactccgccgagtacgacaacacacagggtgcactgagcctcatctccaaagtcacagaccgtgccaacgacagcatggagcaaggggaaaacctg

SEQ ID NO: 446334 - DNA, 120 bp, Artificial Sequence
  ENSG00000154783_28 (sequence is synthesized)
cagaagctggtccacattgagcacagcgtccggggccaaggggatctcctccagccaggaagggagtttctgaaggaagggacgctgatgaaagtaacagggaaaaacagacggccccgg

SEQ ID NO: 446335 - DNA, 120 bp, Artificial Sequence
  ENSG00000154783_29 (sequence is synthesized)
cacctatttctgatgaacgatgtgctcctgtacacctatccccagaaggatgggaagtaccggctgaagaacacattggctgtggccaacatgaaggtcagccgccctgtgatggagaaa

SEQ ID NO: 446336 - DNA, 120 bp, Artificial Sequence
  ENSG00000154783_30 (sequence is synthesized)
gtgccctacgctctaaagattgagacttccgagtcctgcctgatgctgtctgcgagctcctgtgcagagagggacgagtggtatggctgtctgagcagagccctccctgaggactacaag

SEQ ID NO: 446337 - DNA, 120 bp, Artificial Sequence
  ENSG00000154783_31 (sequence is synthesized)
gcccaggcgctggctgcattccaccatagcgtggagatacgagagaggctgggggttagccttggggagaggccccccaccctggtgcctgtcacacacgtcatgatgtgcatgaactgc

SEQ ID NO: 446338 - DNA, 120 bp, Artificial Sequence
  ENSG00000154783_32 (sequence is synthesized)
ggctgcgacttctccctcaccctgcggcgtcatcactgtcacgcctgtggcaagatcgtgtgccggaactgttcgcggaacaagtacccgctgaagtacctgaaggacaggatggccaag

SEQ ID NO: 446339 - DNA, 120 bp, Artificial Sequence
  ENSG00000154783_33 (sequence is synthesized)
gtctgcgacggctgcttcggggagctgaagaagcggggcagggctgtcccgggcctgatgagagagcggcctgtgagcatgagcttcccgctgtcttcaccccgcttctcgggcagtgcc

SEQ ID NO: 446340 - DNA, 120 bp, Artificial Sequence
  ENSG00000154783_34 (sequence is synthesized)
ttttcatccgtcttccagagcattaacccctcgaccttcaagaagcagaagaaagtcccttcagccctgacagaggtggctgcctctggagagggctctgccatcagtggctatctcagc

SEQ ID NO: 446341 - DNA, 120 bp, Artificial Sequence
  ENSG00000154783_35 (sequence is synthesized)
cggtgtaagaggggcaagcggcactggaagaagctctggtttgtcatcaaaggcaaagttctctacacctacatggccagtgaggacaaagtggccttggagagtatgcctctgctaggc

SEQ ID NO: 446342 - DNA, 120 bp, Artificial Sequence
  ENSG00000154783_36 (sequence is synthesized)
ttcaccattgctccagaaaaggaagagggcagcagtgaagtaggacctatttttcacctttaccacaagaaaaccctattttatagcttcaaagcagaagataccaattcagctcagagg

SEQ ID NO: 446343 - DNA, 120 bp, Artificial Sequence
  ENSG00000154783_37 (sequence is synthesized)
tggatcgaggccatggaagatgcgagtgtgttatagcagttatcaagcatgtggacttgtaacaaattcttaggtcaatatgtgaatgcttttagaagctaagctgtggctcaactcatc

SEQ ID NO: 446344 - DNA, 120 bp, Artificial Sequence
  ENSG00000154783_38 (sequence is synthesized)
cggacacacacctggattcagcaatgaggcctgaccttttttgctataaccgccccaccactcccctgcccttgccaacatcttcatgaatggaatccttaagggatatttatggacctc

SEQ ID NO: 446345 - DNA, 120 bp, Artificial Sequence
  ENSG00000154783_39 (sequence is synthesized)
tccttttctgtgttttccacccctacccccacccgccacccagtaataaactatttccttaccccgcagtgagttaaaatttagtaagatgaagatgtggaaaccaatgaaaagtacatt

SEQ ID NO: 446346 - DNA, 120 bp, Artificial Sequence
  ENSG00000154783_40 (sequence is synthesized)
tagaaatgcaggctttttagtagaaagaagctcttacagtttttactcatgataaatcttatcacctttcaaaaattgattgtggtgcctcaggtgaaatgagaagctatcagtaacagc

SEQ ID NO: 446347 - DNA, 120 bp, Artificial Sequence
  ENSG00000154783_41 (sequence is synthesized)
tactctcatcgaaagcactttattattttacggagctgcaacctccaattttgtgttttctaagtgatttacttaagtcaataacagatggaatcctgtggactaatgtgccaccagttt

SEQ ID NO: 446348 - DNA, 120 bp, Artificial Sequence
  ENSG00000154783_42 (sequence is synthesized)
tctaacaagggtgtacataaaatggatttgtgcagacctggctgtggcttgctggtgtgcaagcacacatcactttagaggggctgcgccccaccagataggaaggggaggattttctcc

SEQ ID NO: 446349 - DNA, 120 bp, Artificial Sequence
  ENSG00000154783_43 (sequence is synthesized)
tccagtcgaccttgtgacctgtatactaacataacttattaaaggaggggtccctcctcccccagagcagtcctcaacactatgtcagtgctggaaatgcagccactggcagatctggcc

SEQ ID NO: 446350 - DNA, 120 bp, Artificial Sequence
  ENSG00000154783_44 (sequence is synthesized)
ccccagacgtcaccgcagggcctctgaagagtcaaggtctgctttaatttattgtgtgcctttctgtgtttacctcactcaagctgacaacattgtttatgggaatctatccttctttta

SEQ ID NO: 446351 - DNA, 120 bp, Artificial Sequence
  ENSG00000154783_45 (sequence is synthesized)
gacacacggtaatccttgggctgtattactgaaggctttttattttttgagaggtgaaaaaaagagaaaacaagttagactccaaaggtgaattcctggtcttggcagatggctctggga

SEQ ID NO: 446352 - DNA, 120 bp, Artificial Sequence
  ENSG00000154783_46 (sequence is synthesized)
acagcgagggagcacagaagtcgtggcctgaggctgttctatgggcacttggggctaaatcgcctcctgagggtgactgttgcttattctgctggacaggtttttacataaagcaaaggg

SEQ ID NO: 446353 - DNA, 120 bp, Artificial Sequence
  ENSG00000154783_47 (sequence is synthesized)
catgtgaggggtgggattccttgttactcttactgcaataaaaatcaattgtttgatatcctgtccccattctgttgctgccctgtcccctacaaaaaagggaatttgctgacaaacttt

SEQ ID NO: 446354 - DNA, 120 bp, Artificial Sequence
  ENSG00000154783_48 (sequence is synthesized)
ttgtaaaaagcaccatctctggacttacttgcattaaatattttcaggggaatttttttttccagtttgcagttcttttaaaatgtttgcattaaacatgtaactaatggttcacactaa

SEQ ID NO: 446355 - DNA, 120 bp, Artificial Sequence
  ENSG00000154783_49 (sequence is synthesized)
ttatttaagcctcgaattctcttttaatgttttgtagtttttagtgtagacatcttatacttctattaatatatttctaaatatttttttggatgccattgtgaatggcatttattttat

SEQ ID NO: 446356 - DNA, 120 bp, Artificial Sequence
  ENSG00000154783_50 (sequence is synthesized)
tttctagttgtttgctgctactatatacacataaaaactgattatcttgtgacctttctaaattgatttttagttctagtagttattttgttttttttcttttgcaagcacaaatagttc

SEQ ID NO: 446357 - DNA, 120 bp, Artificial Sequence
  ENSG00000154783_51 (sequence is synthesized)
tacctcttttctgatctttatctctttctttttctttccttaatgtaatagttatggtctccagtacaatgttgaattgaactgatgagagtgaacaccattcttgccttgtttccaatt

SEQ ID NO: 446358 - DNA, 120 bp, Artificial Sequence
  ENSG00000154783_52 (sequence is synthesized)
ttaagggaaaagcatttggtgtttcactattaagtatgatgttagctgtaggtattttatagatgccctttgttagttaatgaagtttccttctactctagtttgctaagaggtttgttt

SEQ ID NO: 446359 - DNA, 120 bp, Artificial Sequence
  ENSG00000154783_53 (sequence is synthesized)
ttttgttgttgtttttgtttttaccatgaatggatattgaattttgtcaaaggctttttctgatctagcaatccttgagaattgattccttttattttaaaaaaatatttcttagttttc

SEQ ID NO: 446360 - DNA, 120 bp, Artificial Sequence
  ENSG00000154783_54 (sequence is synthesized)
attgattccttttattttaaaaaaatatttcttagttttctggggttttagggatgaggtctcactatgttgtccaggctggactcaaattcttggcctcaagcagtcctcctgccttgg

SEQ ID NO: 446361 - DNA, 120 bp, Artificial Sequence
  ENSG00000154783_55 (sequence is synthesized)
ccagcttgattctattctatacacaaaccgtactccccttcttcttcctcccaccaccattctaatatgcttaattatatctctttatgtgtttttacaaagtctgtattgtttatgaac

SEQ ID NO: 446362 - DNA, 120 bp, Artificial Sequence
  ENSG00000154783_56 (sequence is synthesized)
atgtatgtttttacataactgtgtataaaaatgtctttacctatatataaaaatctttttccactgagcactatgtgtgtaagatccatctgtgttctttgggtatatctcatcaaattg

SEQ ID NO: 446363 - DNA, 120 bp, Artificial Sequence
  ENSG00000154783_57 (sequence is synthesized)
ttagcaactttatagcacagacagtgcaagtgctccatattgaaatactgtaaatgaggttttggaagaatgagtatagaatatgtgatcagaagtaactgcaaaactgagtcactgact

SEQ ID NO: 446364 - DNA, 120 bp, Artificial Sequence
  ENSG00000154783_58 (sequence is synthesized)
cttagaatgggagtgacaccttctatgattgttgtgaagattaaatataatgaagatgtaactgcctggtccctgataaactgtcacaatatgttgagacatattgtctcaacatacgtc

SEQ ID NO: 446365 - DNA, 83 bp, Artificial Sequence
  ENSG00000154783_59 (sequence is synthesized)
ctgtcacaatatgttgagacatattgtctcaacatacgtcacatatgttgagacaatatgtgagacagagtctcactctgccc

SEQ ID NO: 446366 - DNA, 120 bp, Artificial Sequence
  ENSG00000154783_60 (sequence is synthesized)
ggcgtgagccaccacacccagccagtgtcgtttctttccttcctcagggctggctctggggggaagcgagggtcaacagtttgtgtgtggtgagcccgaaggtgccaaagcacaccccac

SEQ ID NO: 446367 - DNA, 120 bp, Artificial Sequence
  ENSG00000154783_61 (sequence is synthesized)
ttgtgtgtggtgagcccgaaggtgccaaagcacaccccacacagaggcactcttcacgcatctcagattggagataacagtaaatgactatgcagagtgtggtgtttaatgtcaattttt

SEQ ID NO: 446368 - DNA, 120 bp, Artificial Sequence
  ENSG00000154783_62 (sequence is synthesized)
gggtgtggaaacagctctgcaccccttcttgattgctgaacactatgatgtgaatatttctacatagccaccacctttatcatttttagtgacagcttaatataccatagggtggatgcc

SEQ ID NO: 446369 - DNA, 120 bp, Artificial Sequence
  ENSG00000154783_63 (sequence is synthesized)
tataatttccttagacttcgttttgaaacaacatagctcatgaacctcttcaaagatgaataatgagaaagcaaaaccttctgcttcgttatagaaggaattacccaatctctcccctat

SEQ ID NO: 446370 - DNA, 120 bp, Artificial Sequence
  ENSG00000154803_0 (sequence is synthesized)
ggcggggctgcgggaccgcgagtgagtgtggtcgctcctggttctgccagctcccctgagagcctgaacccgggcttgagagcctcgccaccccgggtgacatccctgccgtgggcttgg

SEQ ID NO: 446371 - DNA, 120 bp, Artificial Sequence
  ENSG00000154803_1 (sequence is synthesized)
gggctctgggtgtgattccgccggtccgggtcccgcagcgaccacctacccagcgcagtcaggggcggggctgggacccagagcgggaccccggctgccgagtccaggtgtcccgcgggc

SEQ ID NO: 446372 - DNA, 120 bp, Artificial Sequence
  ENSG00000154803_2 (sequence is synthesized)
ctcgatttggggagcagaaaacgccaggtcttcaagggtgtctgccaccaccatgcctgacccatttggcagcagcctcgtgtgtggtggtctggtgtggacggtggaagcgtgattctg

SEQ ID NO: 446373 - DNA, 120 bp, Artificial Sequence
  ENSG00000154803_3 (sequence is synthesized)
ctgagtgtcagtgtgaccactcgtgctcagccgtatctcagcaggaggacaggtgccggagcagctcgtgcagctaagcagccaactgcagaaacgtcaggcctgttgcagtctccaagg

SEQ ID NO: 446374 - DNA, 120 bp, Artificial Sequence
  ENSG00000154803_4 (sequence is synthesized)
caccatgaatgccatcgtggctctctgccacttctgcgagctccacggcccccgcactctcttctgcacggaggtgctgcacgccccacttcctcaaggggatgggaatgaggacagtcc

SEQ ID NO: 446375 - DNA, 120 bp, Artificial Sequence
  ENSG00000154803_5 (sequence is synthesized)
tggccagggtgagcaggcggaagaagaggaaggtggcattcagatgaacagtcggatgcgtgcgcacagccccgcagagggggccagcgtcgagtccagcagcccggggcccaaaaagtc

SEQ ID NO: 446376 - DNA, 120 bp, Artificial Sequence
  ENSG00000154803_6 (sequence is synthesized)
ggacatgtgcgagggctgccggtcacttgctgcagggcacccgggatatatcagccatgataaagagacctccattaaatacgtcagccaccagcaccccagccacccccagctcttcag

SEQ ID NO: 446377 - DNA, 120 bp, Artificial Sequence
  ENSG00000154803_7 (sequence is synthesized)
cattgtccgccaggcctgtgtccggagcctgagctgtgaggtctgccctggccgtgaaggccccatcttcttcggagatgagcagcacggctttgtgttcagccacaccttcttcatcaa

SEQ ID NO: 446378 - DNA, 120 bp, Artificial Sequence
  ENSG00000154803_8 (sequence is synthesized)
ggacagcctggccaggggcttccagcgctggtacagcatcatcaccatcatgatggaccggatctacctcatcaactcctggcccttcctgctggggaaggtccggggaatcatcgatga

SEQ ID NO: 446379 - DNA, 120 bp, Artificial Sequence
  ENSG00000154803_9 (sequence is synthesized)
gctccagggcaaggcgctcaaggtgtttgaggcagagcagtttggatgcccacagcgtgctcagaggatgaacacagccttcacgccattcctacaccagaggaacggcaacgccgcccg

SEQ ID NO: 446380 - DNA, 120 bp, Artificial Sequence
  ENSG00000154803_10 (sequence is synthesized)
ctcgctgacatcgctgacaagtgatgacaacctgtgggcgtgcctgcacacctcctttgcctggctcctgaaggcgtgtggcagccggctgaccgagaagctcctggaaggtgctccgac

SEQ ID NO: 446381 - DNA, 120 bp, Artificial Sequence
  ENSG00000154803_11 (sequence is synthesized)
cgaggataccttggtccagatggagaagctcgctgatttagaagaggaatcagaaagctgggacaactctgaggctgaagaggaggagaaagcccctgtgttgccagagagtacagaagg

SEQ ID NO: 446382 - DNA, 120 bp, Artificial Sequence
  ENSG00000154803_12 (sequence is synthesized)
gcgggagctgacccagggcccggcagagtcctcctctctctcaggctgtgggagctggcagccccggaagctgccagtcttcaagtccctccggcacatgaggcaggtcctgggtgcccc

SEQ ID NO: 446383 - DNA, 120 bp, Artificial Sequence
  ENSG00000154803_13 (sequence is synthesized)
ttctttccgcatgctggcctggcacgttctcatggggaaccaggtgatctggaaaagcagagacgtggacctcgtccagtcagcttttgaagtacttcggaccatgcttcccgtgggctg

SEQ ID NO: 446384 - DNA, 120 bp, Artificial Sequence
  ENSG00000154803_14 (sequence is synthesized)
cgtccgcatcatcccatacagcagccagtacgaggaggcctatcggtgcaacttcctggggctcagcccgcacgtgcagatccccccccacgtgctctcctcagagtttgctgtcatcgt

SEQ ID NO: 446385 - DNA, 120 bp, Artificial Sequence
  ENSG00000154803_15 (sequence is synthesized)
aagtacgagtttgtggtgaccagtgggagccctgtagctgcagaccgagtgggccccaccatcctgaataagattgaagcggctctgaccaaccagaacctgtctgtggatgtggtggac

SEQ ID NO: 446386 - DNA, 120 bp, Artificial Sequence
  ENSG00000154803_16 (sequence is synthesized)
cagtgcctcgtctgcctcaaggaggagtggatgaacaaagtgaaggtgctttttaagttcaccaaggtggacagtcgacccaaagaggacacacagaagctgctgagcatcctgggtgcg

SEQ ID NO: 446387 - DNA, 120 bp, Artificial Sequence
  ENSG00000154803_17 (sequence is synthesized)
tccgaggaggacaatgtcaagctgctgaagttctggatgactggcctgagcaagacctacaagtcacacctcatgtccacggtccgcagccccacagcctcggagtctcggaactgaccc

SEQ ID NO: 446388 - DNA, 120 bp, Artificial Sequence
  ENSG00000154803_18 (sequence is synthesized)
gtcacacacacctgcctaaagacagggatggctgtccacaggatcctccagccccgtgagagggactgtcccttgagtttctcaactgctggaaggagctgtgtcccagcaaggaaggga

SEQ ID NO: 446389 - DNA, 120 bp, Artificial Sequence
  ENSG00000154803_19 (sequence is synthesized)
aaccatcagggctgggctcggccctgtcaggtttggggcctgtgtgcttcccagactctccctccagccgttggaatcgctgaagatggcaatgaaaggcggagggatgatgggctctct

SEQ ID NO: 446390 - DNA, 120 bp, Artificial Sequence
  ENSG00000154803_20 (sequence is synthesized)
ctgtgttcaaactccttggagagacgactaggaggacagcttgcctcccaggccccttgtggacttagactcaaaacccgcaggagaaacaggtccgactcagtatgcagtcgcaataac

SEQ ID NO: 446391 - DNA, 120 bp, Artificial Sequence
  ENSG00000154803_21 (sequence is synthesized)
atgtctgctcccgaggttaacattcaagcgtttctactttgaaattcagcaagagtttctgggccttatgtttgagggtaccttttgctgcagttgtgaatattcagtacattgccagct

SEQ ID NO: 446392 - DNA, 120 bp, Artificial Sequence
  ENSG00000154803_22 (sequence is synthesized)
cttggtcactgagtgattgagttagggctccgcaagagactttggggagtgaagtggatctcttcctcatcttttggtcctctgaaatgtgtgttctgaagccatggggctcgtcttctg

SEQ ID NO: 446393 - DNA, 120 bp, Artificial Sequence
  ENSG00000154803_23 (sequence is synthesized)
gggtgttcccctgcaggtgctggtgaaggtaacctggggcttaatgatggagtccctgatcatttttgcacaagacaggttgctgaggggtcggcaagcatctgacttgcccaatcccct

SEQ ID NO: 446394 - DNA, 120 bp, Artificial Sequence
  ENSG00000154803_24 (sequence is synthesized)
ggatatggtgagccccgccatgcttttattctgtatcgcttttgtctttattgctgctttcaacatttacgtttggttacagttaactattttcggagtgtggtgattgaagacaatttc

SEQ ID NO: 446395 - DNA, 120 bp, Artificial Sequence
  ENSG00000154803_25 (sequence is synthesized)
tggtcttgaactcctgagttcaagcagtcctcctgcttcaacatacagctacaggtaccccccactatacatttttaataaggattcatggctcagagggattttctgatggttttgctg

SEQ ID NO: 446396 - DNA, 120 bp, Artificial Sequence
  ENSG00000154803_26 (sequence is synthesized)
ttttgctgatttgtttctagtttttttgtgtttatatttaacatgaagaccaagtttatataactaggtatctgtataatgcaacaacattggaacacaataaagatgtatttttgtaaa

SEQ ID NO: 446397 - DNA, 120 bp, Artificial Sequence
  ENSG00000154803_27 (sequence is synthesized)
gccccgtaagccagtccttccaggctcctgcctcctctggtcattccctgcgtgggcctctcgcaggaagcagttttcctgtgtcccccgccgaccccctgcaggaggcctgttgcagtc

SEQ ID NO: 446398 - DNA, 120 bp, Artificial Sequence
  ENSG00000154803_28 (sequence is synthesized)
gactccatctcaaaaaaaaaaagaaaggaaaaaatgttgctccttctgccctccagaagcacagatggtgctgagggccttgtttgtctcagctcattgaccagagccagtcacgtgtgc

SEQ ID NO: 446399 - DNA, 120 bp, Artificial Sequence
  ENSG00000154803_29 (sequence is synthesized)
cttagccaagtagtgcacccagaaggggaggtggagacaggtggggagcagcgcagatggccactcacgagaatccccctgggtgccttgggtcactcattaggaaggggacaggagaag

SEQ ID NO: 446400 - DNA, 120 bp, Artificial Sequence
  ENSG00000154803_30 (sequence is synthesized)
ctcaaccgatttctgttctcggatagctcctgatgtagccggggcagagctatgctgttgggaatgattggactggtggcactttgtgtgctctgcatggagagagtatagtgggactga

SEQ ID NO: 446401 - DNA, 120 bp, Artificial Sequence
  ENSG00000154803_31 (sequence is synthesized)
caggggtgctgttgccggggccttggcccggatggccgtggggcggtaccagctgtctgctctcctggcaggaatcgctgagggagggaaacgcggctctgaatcagcccagaacgagcc

SEQ ID NO: 446402 - DNA, 120 bp, Artificial Sequence
  ENSG00000154803_32 (sequence is synthesized)
ttcgggaagctcaccctccgatctcggtgtgattgttgtgattgttgtgatttcctgtctcgtttgccttgaccgccatgtgaaagaatctgttccccagctaggtggggaaaattcaca

SEQ ID NO: 446403 - DNA, 120 bp, Artificial Sequence
  ENSG00000154803_33 (sequence is synthesized)
ggtgggctgtctgtagagagaactggctgattaaaggcttctcgtcccgattttgtgatagccaagtgcttggcctggtcgacggtctttgctcctttacaaataaagtgttctgtttca

SEQ ID NO: 446404 - DNA, 120 bp, Artificial Sequence
  ENSG00000154803_34 (sequence is synthesized)
gttcgtcccaagttttccatgaagggcagtggttccctgacctcccaggtgcctgggcttccccaggttcctgatctggggcttggggccctgtgtttggggatcgtggcactgtgtgca

SEQ ID NO: 446405 - DNA, 120 bp, Artificial Sequence
  ENSG00000154803_35 (sequence is synthesized)
ccagcctggaagcactgggccagtcttggccaagctttccatcagggatgatttgatcttggtgctacaggtctgtggtacgaccattgttccacaccacatgtcattaataatgcttcc

SEQ ID NO: 446406 - DNA, 120 bp, Artificial Sequence
  ENSG00000154803_36 (sequence is synthesized)
tgtttcgaggtgtttctgcaggcaggtgcaggcgtgccctcaaataagctttgccaatggagtctcagcaagagcaaaacctggtcaggaaagacaaagcctgggaatccacccccatgc

SEQ ID NO: 446407 - DNA, 120 bp, Artificial Sequence
  ENSG00000154803_37 (sequence is synthesized)
cctgcaggttggctggccctggagccatttattatagtgctaatcatgtttctaggcaggtgcagatggcaagggcagtgtcttggtgagctttttagcacgaagagccaggtctgtcga

SEQ ID NO: 446408 - DNA, 120 bp, Artificial Sequence
  ENSG00000154803_38 (sequence is synthesized)
agcctttgtgagagctggaaacgcaggtgtgctgggcatgcgcagtatggggtttcgggctcagggcttgccctttggcatcagacagacctggcttcgcatcctggatttgcttctgac

SEQ ID NO: 446409 - DNA, 120 bp, Artificial Sequence
  ENSG00000154803_39 (sequence is synthesized)
gtgcacccttccctttgggtctcgtgatgtgaaatggagatgttgtcatttgtgagggctccatgaagtttcgttgaaatgacaaatactaatttcttcatctgtgaaatggagataata

SEQ ID NO: 446410 - DNA, 120 bp, Artificial Sequence
  ENSG00000154803_40 (sequence is synthesized)
gtgctgacctcagaacagctgagaggactaaatgaaatgatgttggatgtagccataaagaacgaagtcaggcactggtgcacgcctggaatcccagctcttgggagaccgagacaggtg

SEQ ID NO: 446411 - DNA, 86 bp, Artificial Sequence
  ENSG00000154803_41 (sequence is synthesized)
gagtttgagaccagcctgagcaacatagggaggtccagtctctacaaaaaatatgaaaagctacttggaaggcttcgttgggagga

SEQ ID NO: 446412 - DNA, 90 bp, Artificial Sequence
  ENSG00000154803_42 (sequence is synthesized)
ctacttggaaggcttcgttgggaggatcacttgagcccagaagattgaggctgcagtaagccgtgatcgtgccactgcattccagcctgg

SEQ ID NO: 446413 - DNA, 120 bp, Artificial Sequence
  ENSG00000154803_43 (sequence is synthesized)
atagtagacactgggggctccagaaggagggagggagggaggaaggggaggaagggctgaaatgctttctattggatactatctgggcatattacttcctgtggttcactgtctgggtga

SEQ ID NO: 446414 - DNA, 120 bp, Artificial Sequence
  ENSG00000154803_44 (sequence is synthesized)
caggattcatagaagcccaaactttagcaccacgcagcatacccttgtaacaaagccgcacacgtacgccctcaagctaaaacaaaagtggaccgggaggccgaggtcgggggatcatga

SEQ ID NO: 446415 - DNA, 120 bp, Artificial Sequence
  ENSG00000154803_45 (sequence is synthesized)
gaagcgtgattctgctgagtgtcagtgtgaccactcgtgctcagccgtatctcagcaggaggacaggtgccggagcagctcgtgcagctaagcagccaactgcagaaacgtcaggtgggt

SEQ ID NO: 446416 - DNA, 120 bp, Artificial Sequence
  ENSG00000154803_46 (sequence is synthesized)
aagcagttccaggcatgggccgccggcagagaggctggctgcagcaccccccaccaccatgcacatcgtcctttgcttcttcctagagttagcggctttggcaggccatgccttgtttgt

SEQ ID NO: 446417 - DNA, 120 bp, Artificial Sequence
  ENSG00000154803_47 (sequence is synthesized)
gttcacagcctgcctgtcaggagcgaagacagaacgtctgacttttggatccgtaacaggggtgggggctccccagaagagaagaggctttgggtcctggccagtgtccactactcagtc

SEQ ID NO: 446418 - DNA, 120 bp, Artificial Sequence
  ENSG00000154803_48 (sequence is synthesized)
tttaagtggaatcctacagtgtttatccgtttgtgaccagtgtagatcatttcgtgtaatgtccttcagtttcagccgtgccgtagcttgtggcagggtttccttcctttttaaggccat

SEQ ID NO: 446419 - DNA, 120 bp, Artificial Sequence
  ENSG00000154803_49 (sequence is synthesized)
gtgacattccagtcccaccttgctaaagcagtttacctggtcactggggtgactctggagctcccctctggcctcactgcctgtgcttggtcatgttggctagctgtcctcccttctcca

SEQ ID NO: 446420 - DNA, 120 bp, Artificial Sequence
  ENSG00000154803_50 (sequence is synthesized)
cctctgagtctacaagggctgcactccacggaggtcccatgcgtcagccccgaccgcagcgcttggctctgctgctgtgtcccgtccccgtgaaggctcagcaggcactcactgggcctt

SEQ ID NO: 446421 - DNA, 120 bp, Artificial Sequence
  ENSG00000154803_51 (sequence is synthesized)
ctcccctgctcactgctccgcactctgcaccccacccgcactgtgcgtcttcaccctgcctggcctgggccactgtcccttcctgctcagatcagtcagcagggtgcctcagcttgttcc

SEQ ID NO: 446422 - DNA, 120 bp, Artificial Sequence
  ENSG00000154803_52 (sequence is synthesized)
ccacctccaccctggccccctgccatcttttctgcacatgggcatgagtgaacctattcaagtgaaattcacattttctcatgtctcatcagaacccccaaagcctccccagtctctgat

SEQ ID NO: 446423 - DNA, 120 bp, Artificial Sequence
  ENSG00000154803_53 (sequence is synthesized)
aacacatccagggtctttcggtggcctggaggagctataagatctgcttcctacagcctccaccctgtctgctgctgctctttggacaccggaccttacacacccctcagacagtacagc

SEQ ID NO: 446424 - DNA, 120 bp, Artificial Sequence
  ENSG00000154803_54 (sequence is synthesized)
acccaccctgcccttcaactcttgcttggccccgtaagccagtccttccaggctcctgcctcctctggtcattccctgcgtgggcctctcgcaggaagcagttttcctgtgtcccccgcc

SEQ ID NO: 446425 - DNA, 120 bp, Artificial Sequence
  ENSG00000154803_55 (sequence is synthesized)
gaccccctgcaggaggtaagctgcatgagggcagtatcatgttgcctagcaccttggcccacatggagcaggtgccaagcagatatgtattgggtggaggaccctctccctgtggccttt

SEQ ID NO: 446426 - DNA, 120 bp, Artificial Sequence
  ENSG00000154803_56 (sequence is synthesized)
tatctatttgttctcacagggtttgccaggtttggctgcagttcatgtcacttgaggacattcctttccagcgccgttggctttgtggctgtggctctgtcacagctccagctgtgctat

SEQ ID NO: 446427 - DNA, 120 bp, Artificial Sequence
  ENSG00000154803_57 (sequence is synthesized)
cattggtccacattgtcccctcccctatttgctgtgactcccatgggaagatcctatctctgttcctctcgcactggggcaaagcagtgctggcagggggctggggaactggcgggtggc

SEQ ID NO: 446428 - DNA, 120 bp, Artificial Sequence
  ENSG00000154803_58 (sequence is synthesized)
ctctcctgggcaggaagtccatggcacccaggtgctccctgtgctccagaggggctggggaggtttcatggagtcaataggcattggcaagctgacatgtcccctgtcccacgcaggcct

SEQ ID NO: 446429 - DNA, 120 bp, Artificial Sequence
  ENSG00000154803_59 (sequence is synthesized)
gggctcggagccagcattgcacagggaggcaggcactggtcctctctcagggcggacccgcagatcagcacagcacagggtacaggacgcctcccttgtccagaattgcgggaggagtca

SEQ ID NO: 446430 - DNA, 120 bp, Artificial Sequence
  ENSG00000154803_60 (sequence is synthesized)
tgttggacttgctgagcattttctgattgagtgctagcttttgcactttaagcaccgaacttttattatttgtcctttctttattattattgttttcttttttccttcttttgtgtcagg

SEQ ID NO: 446431 - DNA, 86 bp, Artificial Sequence
  ENSG00000154803_61 (sequence is synthesized)
ttattattattgttttcttttttccttcttttgtgtcagggtctcgctctgtcgtccagactggagtgcagtggtgccgtcatggt

SEQ ID NO: 446432 - DNA, 120 bp, Artificial Sequence
  ENSG00000154803_62 (sequence is synthesized)
cttagcctcccaggtggctgggaccactggtgtgtgccaccatgctcaactggggtttgttttttgttgttgttaagacagagtctcactcggttgcccaggctggagtgcagtggtgca

SEQ ID NO: 446433 - DNA, 77 bp, Artificial Sequence
  ENSG00000154803_63 (sequence is synthesized)
tgcaatctcggcttactgcaacctccaccctgggtttaagtgattcttctgtctcagctatcctgagtagctgggac

SEQ ID NO: 446434 - DNA, 90 bp, Artificial Sequence
  ENSG00000154803_64 (sequence is synthesized)
ccgtgccccacctttttaaaatttttttgtagagatgaggtctcagtatgttgcccaggttggtctcgaactcaagcaatcctctggctc

SEQ ID NO: 446435 - DNA, 120 bp, Artificial Sequence
  ENSG00000154803_65 (sequence is synthesized)
tttaaaatttttttgtagagatgaggtctcagtatgttgcccaggttggtctcgaactcaagcaatcctctggctcatcctcccaaagcactaggattacaggtgtgagccgccatgccc

SEQ ID NO: 446436 - DNA, 120 bp, Artificial Sequence
  ENSG00000154803_66 (sequence is synthesized)
agataggaagcatttctaggttaggtggttcattgcatcaacatcacctttttttattatctcagtcctcattccaagtctcagtgatgatcccgtgctgctctcagcctgctgaggtgt

SEQ ID NO: 446437 - DNA, 120 bp, Artificial Sequence
  ENSG00000154803_67 (sequence is synthesized)
ggatgatttcttcctaaactacgtcgctgctgctgttgctcttgactctgagctcaggtctttgttacaaagaattcgtcgttcagttactaaacttccttgtcattggtgtccacccag

SEQ ID NO: 446438 - DNA, 120 bp, Artificial Sequence
  ENSG00000154803_68 (sequence is synthesized)
ttcgacacaccaagctcccttactgttctcattcagtgtggctgtgtgcctgccctcaactgtcctctccttttaatttcctaccgctggtctgctagcaggcagctcggcatgtctgtt

SEQ ID NO: 446439 - DNA, 120 bp, Artificial Sequence
  ENSG00000154803_69 (sequence is synthesized)
agaattgtgtgttaaggaagagtaagtatgtaatgaggagggactgaaatcctcttataagaataaagtacgtggggctgggcatggtggcccactcctgtaatcccagccctttgggag

SEQ ID NO: 446440 - DNA, 120 bp, Artificial Sequence
  ENSG00000154803_70 (sequence is synthesized)
gagagtgcagtggctgctctgacctgctggttcttctgcatgctccaggtgagtaagctggtacatttgagtctgggagaggtgtgacatatgcatgggagttatttatggctcaaggtg

SEQ ID NO: 446441 - DNA, 120 bp, Artificial Sequence
  ENSG00000154803_71 (sequence is synthesized)
gaagaaaagcaataagccttgttaccggcccttgcagtccacaatgacaagtgttgttggaagcttgatcacaggagcagaagagtacagtcttcggctctcatggcccccactgtgcca

SEQ ID NO: 446442 - DNA, 120 bp, Artificial Sequence
  ENSG00000154803_72 (sequence is synthesized)
ctctccccgttattaacgctggctgatttgtgccagctgactctgaaaagtctgaagaagaggctttgatttggtgtcactaagcgaggaaagggctgtctgagtcgccggtgtccctcc

SEQ ID NO: 446443 - DNA, 120 bp, Artificial Sequence
  ENSG00000154813_0 (sequence is synthesized)
gaagttaaaccctcggagctggcctcggactgctggggcgttaccccttcggccacccccgctgaccatggcagtgtttcatgacgaggtggaaatcgaggacttccaatatgacgagga

SEQ ID NO: 446444 - DNA, 120 bp, Artificial Sequence
  ENSG00000154813_1 (sequence is synthesized)
ctcggagacgtatttctatccctgcccatgtggagataacttctccatcaccaaggaagatttggagaatggggaagacgtggcaacgtgtcctagctgctctctcattataaaagtgat

SEQ ID NO: 446445 - DNA, 120 bp, Artificial Sequence
  ENSG00000154813_2 (sequence is synthesized)
ttatgacaaagatcagtttgtgtgtggagaaacagtcccagccccttcagccaacaaagaattagttaaatgctgaagaagccttcaggaatccaaatcctgaacatttggaatgagccc

SEQ ID NO: 446446 - DNA, 120 bp, Artificial Sequence
  ENSG00000154813_3 (sequence is synthesized)
agatagaaatatcgaatgcaaagctactggcttcacagagacaaccatttatgatttgctgttctgtaagagtgtggattctttctatcaactgctgatatcatcttcaggaagcaagtc

SEQ ID NO: 446447 - DNA, 120 bp, Artificial Sequence
  ENSG00000154813_4 (sequence is synthesized)
cataacatgacatatctggattttgtgcttagaaccttaaattggaagcattcttaattatgcatctaaatttaaaagaagataatttcaaaacagtgctttctttcccttggtttcatc

SEQ ID NO: 446448 - DNA, 120 bp, Artificial Sequence
  ENSG00000154813_5 (sequence is synthesized)
attttcatatcttaaaccaaattacttcggtatctgacaacagcatcatctacctcagtcattaggatttcttaataaaaaagagattgtatttttgacttggttattaagattattaaa

SEQ ID NO: 446449 - DNA, 120 bp, Artificial Sequence
  ENSG00000154813_6 (sequence is synthesized)
attagcccttcctttgaaatatgacatcagctttgctgttctaaatttaaaattagttgcttcatcagtaccacacttccagtttctataccaagccagtctcctcagttttcccattag

SEQ ID NO: 446450 - DNA, 120 bp, Artificial Sequence
  ENSG00000154813_7 (sequence is synthesized)
aatggacatgttctgttcagcgtgtcatttctgtaatgcttcatgcagagagtttggtcatagtattaaagagaaaatacagtgaggtcacaatgtctccagagctaaaagttagtgaac

SEQ ID NO: 446451 - DNA, 120 bp, Artificial Sequence
  ENSG00000154813_8 (sequence is synthesized)
aagaaagaaagtccaaaatgaagtgatgaaagaatgaggacttttcttatattctgcatattccttggaagtcaggacaagatgaaaagaaaaacatccaaaagaagtgaaattggtgac

SEQ ID NO: 446452 - DNA, 120 bp, Artificial Sequence
  ENSG00000154813_9 (sequence is synthesized)
agaatgagaggagcaaagcataccagtgtagtaagtggaatgtttgaatgactttgccaggtcagagcaagtaatatttctgtatctgagtttttgtttgtgttttgataaggctaatga

SEQ ID NO: 446453 - DNA, 120 bp, Artificial Sequence
  ENSG00000154813_10 (sequence is synthesized)
aattgcattccaggtaggggttaacgtcaaatttccatggctggtagctgtgcttttggcatatcacagtgttgtgtcactactacaaggtaaagcatctacagcggagaatgagcttga

SEQ ID NO: 446454 - DNA, 120 bp, Artificial Sequence
  ENSG00000154813_11 (sequence is synthesized)
aaatgagagacctattgtgaataaatatgcccatgagagcatatttaataagcctctataacatgcagccaaaccagacattcactcctgcagagaaatgttgccctggagaaaaagaaa

SEQ ID NO: 446455 - DNA, 120 bp, Artificial Sequence
  ENSG00000154813_12 (sequence is synthesized)
tatataaagataggctatcacccttcttttgctgcagtactaagcatagcaagaaattagaatcatttacattggaaatttgaaaattccctttatatacacaactttactgtgtataaa

SEQ ID NO: 446456 - DNA, 120 bp, Artificial Sequence
  ENSG00000154813_13 (sequence is synthesized)
taaaaaatatttattaatgcagtgatgtccgtcaggttgttttaggaatggcttctgcaattagaaaaatagcttgctagaatgtaaatgttctgttactggtaaatgtactgcacacat

SEQ ID NO: 446457 - DNA, 120 bp, Artificial Sequence
  ENSG00000154813_14 (sequence is synthesized)
tcattggacgttaaaacaagtgagtagccttttttacctgccagcagcatggctgtgtgcagccactaggctgagacaataaattaccaaaaattataatgtaccgagctgaaaatgctc

SEQ ID NO: 446458 - DNA, 120 bp, Artificial Sequence
  ENSG00000154813_15 (sequence is synthesized)
agtacattatgtggcatattctggatgtgatgagaaatctcattgccatttgggacactgacatcccagaagtaatccacaactgctttgcaaaagcaaagtgactgctcagatgaacag

SEQ ID NO: 446459 - DNA, 120 bp, Artificial Sequence
  ENSG00000154813_16 (sequence is synthesized)
atcatgttgatggttttctagatactgccaacatgttagctctttctgatgctgatgagtttcaaacacgaacagacacccttgatgtgggtttgctaagaacatagaagaacaggaaga

SEQ ID NO: 446460 - DNA, 120 bp, Artificial Sequence
  ENSG00000154813_17 (sequence is synthesized)
aaagttgccaggttcacacatcccaggaaaaaagaagcataaaaagcattagcagtcagtgactgatgataatgctgcaataatgggaatggttttgtttctaaaccaaattatttctaa

SEQ ID NO: 446461 - DNA, 120 bp, Artificial Sequence
  ENSG00000154813_18 (sequence is synthesized)
atcaaatcatttattgctttgtttctaaagcaattgagtcactaagtttgtgaactgtaggagaacacatcaagattgaatcctgtgttaagcagaaggtaaaaccagagccaggcgcag

SEQ ID NO: 446462 - DNA, 82 bp, Artificial Sequence
  ENSG00000154813_19 (sequence is synthesized)
caggaggatcatgaagaccctgtctctaaaaaatcttcttttaattagcaaggtgtggggccttgagcaaattgcttgggcc

SEQ ID NO: 446463 - DNA, 120 bp, Artificial Sequence
  ENSG00000154813_20 (sequence is synthesized)
aattagcaaggtgtggggccttgagcaaattgcttgggcccaggagtttgaggctgtggtgagctgtgatcacaccactgcgttccagcctgtgtgacagggcaagacctcatgcctaaa

SEQ ID NO: 446464 - DNA, 120 bp, Artificial Sequence
  ENSG00000154813_21 (sequence is synthesized)
aaataaagagaaagcagagtaaaactggactctgagatacgactaaagttctgtgtgatacgtgtgccttatttagctcaagacattcctggagcacctataaaaactgacttgtaatcc

SEQ ID NO: 446465 - DNA, 120 bp, Artificial Sequence
  ENSG00000154813_22 (sequence is synthesized)
aggctatgtctctttttagcttcgtaatctttggcaaggccattggattcttcagctgtacaattaggagactcgatcaggtgattgcctttctcagctgtcagttctctaatttcaggc

SEQ ID NO: 446466 - DNA, 120 bp, Artificial Sequence
  ENSG00000154813_23 (sequence is synthesized)
ttggtagcttgtaggaactgaaattgcaattaaaacctttataaactcaaactaaatcatgaattacagaaaaagtccattcttccaaaacttgatgttaccacacttacaagtttaaaa

SEQ ID NO: 446467 - DNA, 120 bp, Artificial Sequence
  ENSG00000154813_24 (sequence is synthesized)
tatgaagtcgactgtttaaaggattctgcatatattctagtgtgcacattcagaaacatttttcttggaaaaagtacccaacattttttataactgcacatattaatttattgccagaat

SEQ ID NO: 446468 - DNA, 120 bp, Artificial Sequence
  ENSG00000154813_25 (sequence is synthesized)
aaattgcattgcatgctaaataaagtcagataattcaaatccatttgcttttatgtagtttttcttctaaatgtcaacattttgaattaaaatgtttatgattttatatgaggtagaaat

SEQ ID NO: 446469 - DNA, 120 bp, Artificial Sequence
  ENSG00000154813_26 (sequence is synthesized)
cttaactgctttggggtattgttaatagactttttgttatggacagtagtttttaaataaggaaattgccaatttctacagtttgggctctggatttctattgtttgggaaaaaaataac

SEQ ID NO: 446470 - DNA, 120 bp, Artificial Sequence
  ENSG00000154813_27 (sequence is synthesized)
tgagtcaagtggtagtaagacaaagttgacattcttagatgagtaactcagtttattacaaggaaagaaaactgattgtttaaggctgatgatcaattcttggagtggtttcagagccca

SEQ ID NO: 446471 - DNA, 120 bp, Artificial Sequence
  ENSG00000154813_28 (sequence is synthesized)
gctctggtcagaagacaatttgaatcttagttcctccactgtgatctccgagaagttacttaataattatattctggtttgtgaaatctggatcatagtacctctttgacagggttgctg

SEQ ID NO: 446472 - DNA, 120 bp, Artificial Sequence
  ENSG00000154813_29 (sequence is synthesized)
tgtgaacccattcattctgcaattagaaaaatagctgtcatgtgctatgcactaggcaaagaagtacctgtcacatgctaggcactaggggaagaagattcggtttctacatttggaaac

SEQ ID NO: 446473 - DNA, 120 bp, Artificial Sequence
  ENSG00000154813_30 (sequence is synthesized)
ttagtggaactagaagagacagaagcaagattacagatgagttagagcccccaaggaaacaaaccaggtgatgtgggagagagtaactgggtcaggtgactttttaagggagtctgagct

SEQ ID NO: 446474 - DNA, 120 bp, Artificial Sequence
  ENSG00000154813_31 (sequence is synthesized)
ctggcactttttctaagacctgaaggatgagaaggaaacagccttgtgaaaatgattaaatgagctagtatctataaaacatgacagctaatgcctgtcatgtgcaaaaaatggttaact

SEQ ID NO: 446475 - DNA, 120 bp, Artificial Sequence
  ENSG00000154813_32 (sequence is synthesized)
attctaactccgaaaggaattaaacattgttttgcgctttctcctagtccatgttctgctgctgtaacaatacctgagactggataatttatcaagaataaaggttaatttggctcatga

SEQ ID NO: 446476 - DNA, 120 bp, Artificial Sequence
  ENSG00000154813_33 (sequence is synthesized)
atcaccaaggtaacttcagggtcccgcccggcggttcacccaagcaagcgcagtttggttccgcccgttccttccatcattgggtagcctttgctgcgctgtgtcacccacgccctcttt

SEQ ID NO: 446477 - DNA, 120 bp, Artificial Sequence
  ENSG00000154813_34 (sequence is synthesized)
cgcagttctggccttagattaggtcagggagagggtggcggagagcctctgtctctctgcccgatccctgccttagggtcccaacctgggatatttctgtcgaggaggggactcgttttt

SEQ ID NO: 446478 - DNA, 120 bp, Artificial Sequence
  ENSG00000154813_35 (sequence is synthesized)
tgtttcccagggcttttggggcgaccgaagctcgcctgaccttcctaggtgtttcccctaagtgacgcttctaggggaaaatgatgtcggcatttctcgctgaaggccctggggttctca

SEQ ID NO: 446479 - DNA, 120 bp, Artificial Sequence
  ENSG00000154814_0 (sequence is synthesized)
gtattccaggcgcctgcaactaaacgtggccgggtctgcaagctaggtgccagcggggaaagtttccctgcttcttatcgtctgctttaacgccttaaatagcccgctgaaggctgcagc

SEQ ID NO: 446480 - DNA, 120 bp, Artificial Sequence
  ENSG00000154814_1 (sequence is synthesized)
aggtgctaggtagcagcctcccggccctcgggaaaggcggggtggggaggcgagagcagcttagcctcctcgacctcccttcctggtgacggacgaacagttcccgtagaatttcgcttc

SEQ ID NO: 446481 - DNA, 120 bp, Artificial Sequence
  ENSG00000154814_2 (sequence is synthesized)
accgagtgaccttgagcccagggcgacggtcagcttgttaattcctggctgcaggaactttgtgagaattttaatgcatggaaaagctgtccatgttccaactgctgtacatccaaaagt

SEQ ID NO: 446482 - DNA, 120 bp, Artificial Sequence
  ENSG00000154814_3 (sequence is synthesized)
ctcagtgtaatagcaggaccaaaatattctgtcaatcagctgaccatatacttaatgactcctaaaatctcgtggacttctaagaaagcgccatggcctgtgctgctgttatgattcctg

SEQ ID NO: 446483 - DNA, 120 bp, Artificial Sequence
  ENSG00000154814_4 (sequence is synthesized)
ggttgttgcggtgctctgttggagccatccgtattgaggctgcgtcactgagattgacactcagcactttgcgccaccttactctaaccagcataatgaaatccaaaaggaaaactgatc

SEQ ID NO: 446484 - DNA, 120 bp, Artificial Sequence
  ENSG00000154814_5 (sequence is synthesized)
acatggagagaactgcaagtgtccttcgacgggagattgtgtcagcagctaaggtgtgtggagctgccagtgagtcaccgtcagtgaagagcctccgcttgcttgttgctgatcaagact

SEQ ID NO: 446485 - DNA, 120 bp, Artificial Sequence
  ENSG00000154814_6 (sequence is synthesized)
tttcctttaaagctggccagtgggttgatttctttattccaggagtctctgtggttggtgggttttcaatatgctccagtcccagactgctagaacaagagagagtgatagaattggcag

SEQ ID NO: 446486 - DNA, 120 bp, Artificial Sequence
  ENSG00000154814_7 (sequence is synthesized)
tgaaatatacgaaccaccctcctgccctctgggttcacaatacgtgtacacttgactgtgaagtggctgtgagagtgggtggagagttcttctttgaccctcagcctgcggatgcctcta

SEQ ID NO: 446487 - DNA, 120 bp, Artificial Sequence
  ENSG00000154814_8 (sequence is synthesized)
gaaacctcgtgttgattgcaggaggagtcggaattaaccctctgctttccatcctgcggcacgcagcagatctcctcagagagcaggcaaacaaaagaaatggatatgagataggaacaa

SEQ ID NO: 446488 - DNA, 120 bp, Artificial Sequence
  ENSG00000154814_9 (sequence is synthesized)
taaaactattctacagtgcaaaaaataccagcgaactcctgtttaagaaaaatatccttgatttagtaaatgaatttcctgagaagattgcatgcagtttgcatgttacaaaacagacta

SEQ ID NO: 446489 - DNA, 120 bp, Artificial Sequence
  ENSG00000154814_10 (sequence is synthesized)
cacaaatcaatgcggaactcaagccatacatcacggaaggaagaataacggagaaggagataagagatcatatttcaaaagagactttgttctatatttgtggcccacctccaatgacag

SEQ ID NO: 446490 - DNA, 120 bp, Artificial Sequence
  ENSG00000154814_11 (sequence is synthesized)
actttttctccaagcaactggaaaacaaccatgtacccaaagaacacatttgctttgagaagtggtggtaggaggcagacaaaggcagaaaaaataaagaggtgagatctactcaggaga

SEQ ID NO: 446491 - DNA, 120 bp, Artificial Sequence
  ENSG00000154814_12 (sequence is synthesized)
gctcctgtcctttgtggcatgattaattttttttatctctacttgagttgtcttattttttaaggctataaacttagtgaccagctggataataaaagccagctggcagacttaaatgat

SEQ ID NO: 446492 - DNA, 120 bp, Artificial Sequence
  ENSG00000154814_13 (sequence is synthesized)
aaactttttgcaaagacctcagtgatcaaactattttttactatactgattttctgttattaacaacgatttaattgtctcatgatgtaccatgattggtcagtatagatttttcttttg

SEQ ID NO: 446493 - DNA, 120 bp, Artificial Sequence
  ENSG00000154814_14 (sequence is synthesized)
tctttaggcaaaaaaaagatatatacttatgtctaatcataggaaaatgtgatttttgagtataaaatgtgggctagctttaaattatttgacagccatctatatatcttatgtttaatg

SEQ ID NO: 446494 - DNA, 120 bp, Artificial Sequence
  ENSG00000154814_15 (sequence is synthesized)
aaagtataatttaaatacaatcttaataattttactttgaaaattctttttatttaatgcctttgtttactgtaccatggcctacagtcttatttggtccatcaaagttaagtttggaca

SEQ ID NO: 446495 - DNA, 120 bp, Artificial Sequence
  ENSG00000154814_16 (sequence is synthesized)
gtgtgtatcctgactaattgttagtttcttctcaaatgaaaccctttctgtgtcttggctgtctgccttaacgctgtaggaggcagcttcttgcttgggacaaaggcattggtgatgtgt

SEQ ID NO: 446496 - DNA, 120 bp, Artificial Sequence
  ENSG00000154814_17 (sequence is synthesized)
tccatgttgaatctgccttcagtgcctgggctggcttgctatggaaatgtgcttagcattgattagggggtagagagctgtttctaaatcctgcttttctactttttatttcactcattt

SEQ ID NO: 446497 - DNA, 120 bp, Artificial Sequence
  ENSG00000154814_18 (sequence is synthesized)
gccagaattgttcttggcaccagcagctccttaacatatagttgttgaatgactgaaagaaagcaactaatgttttaactccttgctaagtctgagattgggaggcagtcccctagagtg

SEQ ID NO: 446498 - DNA, 120 bp, Artificial Sequence
  ENSG00000154814_19 (sequence is synthesized)
gatagaaagaatggtggagcctcatcccaaagctgctctgatgaaactgctagaaagcagattgtagttctttgtttagatttttaaaaatccaaaagaagtcctgactgaggccaggcc

SEQ ID NO: 446499 - DNA, 120 bp, Artificial Sequence
  ENSG00000154814_20 (sequence is synthesized)
attccttttatgacaagtagtcctgggcccaaggttgcctgcatagagatcacaggagggtgaagggagcctgggaagaaggacagataagtgctggagacctaggagctccagttgaga

SEQ ID NO: 446500 - DNA, 120 bp, Artificial Sequence
  ENSG00000154814_21 (sequence is synthesized)
ttctgttctggagcggatgagagaagacaggttaccctttcttatctttgttgttgcaggcctcccagggacttgtgggcttgaacagatatgattcatgggacctgaaggtgactctag

SEQ ID NO: 446501 - DNA, 120 bp, Artificial Sequence
  ENSG00000154814_22 (sequence is synthesized)
cttctgcccagttttgagttttgtcaagttttaagcagagatcatttgtcaactattttgatcccagatttgaatttggggaggaagggaggagctactgacctgatgggaatatcataa

SEQ ID NO: 446502 - DNA, 120 bp, Artificial Sequence
  ENSG00000154814_23 (sequence is synthesized)
tccattcaaggaaatggtcattagtacctcagaggtgaagggaatatgtgaagctctggatcactacaaggagccctgacttaccagttggccccaaagtgcccaggctgagggcatagg

SEQ ID NO: 446503 - DNA, 120 bp, Artificial Sequence
  ENSG00000154814_24 (sequence is synthesized)
agcatgatgagatgcaaggatgtgggattatcaaggggcacgtctactaactggtgaaggcagtctgcgggggaggacacctaaaggtatgcggaaagtacctaacccagacctctctgc

SEQ ID NO: 446504 - DNA, 120 bp, Artificial Sequence
  ENSG00000154814_25 (sequence is synthesized)
attaggagtggaggtgcaaagtgagcatctccagtgcagcatgggatgggaagatagggaggtgtcgcccactgtctcggtttagccagcaccacggctggctgtgtgcctgctactgtc

SEQ ID NO: 446505 - DNA, 120 bp, Artificial Sequence
  ENSG00000154814_26 (sequence is synthesized)
agagagcaagggtcatctgtcctgcccagctatgcctgccaccctgttgctgactcagtattggcagaattgctgagatgggccaggtcatcacctttgcctggagtgttcatcctttca

SEQ ID NO: 446506 - DNA, 120 bp, Artificial Sequence
  ENSG00000154814_27 (sequence is synthesized)
gtgccattattctggtgctaagtgctgaagaacattttcaggtctagccgagaatgtcctcttgctcttgcctgccaggcctgtccagatctttttggtacttaaattgagctaactcca

SEQ ID NO: 446507 - DNA, 120 bp, Artificial Sequence
  ENSG00000154814_28 (sequence is synthesized)
gccagagtggcttggaattcatagtgcggtggctcagagtataggctcgaaagcccttgagccagattgcctgggttcagatctcacctatactacttactaggtagatgaccttgagca

SEQ ID NO: 446508 - DNA, 120 bp, Artificial Sequence
  ENSG00000154814_29 (sequence is synthesized)
agtcacttaactgctctatgcctcatttaaaattacatacaactacatgtaaaagggagatgatactgctgcctacctacctacatgatagggctgttacggggattgaaggtgatcata

SEQ ID NO: 446509 - DNA, 120 bp, Artificial Sequence
  ENSG00000154814_30 (sequence is synthesized)
catgtaaagtgcttggcagagcactgcatgagtgtgttgtcgttattaatttgctattccttgtcctattcagaaaggatttcaagaggctggatgccttagatgtggtctaacttgaaa

SEQ ID NO: 446510 - DNA, 120 bp, Artificial Sequence
  ENSG00000154814_31 (sequence is synthesized)
ccttcatgtgggtgtgcgtctgtcttgtttattgctgtgccaggcacaaaataggtatttcataaatatttgttaatatgctcagagttgataagctggattaaagtgacttcttaagga

SEQ ID NO: 446511 - DNA, 120 bp, Artificial Sequence
  ENSG00000154814_32 (sequence is synthesized)
tacgccatgaggacaggcccaggctagccttcggatgatgagagacctgtggccctgctaagcagcagacgtgagagatgccatcttggagctgctagctgtggtccacccatcagcgcc

SEQ ID NO: 446512 - DNA, 120 bp, Artificial Sequence
  ENSG00000154814_33 (sequence is synthesized)
tgcaggcacatgctgagattagtcgatttcctaaaagttgaaggaaaaatcacccagctgacctgtttgggttatgattttaactcactaagctttggggagctttattacacagcagaa

SEQ ID NO: 446513 - DNA, 120 bp, Artificial Sequence
  ENSG00000154814_34 (sequence is synthesized)
atttcagaggctcagaggaaagttcaatatggccccatggcaagaaatacaggcatgctggctccaggtggacttgtcaccctaagataaaagttggaggcaactaaggaaaaccactgt

SEQ ID NO: 446514 - DNA, 120 bp, Artificial Sequence
  ENSG00000154814_35 (sequence is synthesized)
ggctgtagagatggatgagtgtgaatttataaggacagaagggggtacctgagcctccagggatggtgacaaaagtaaggcaaacccaaaagaggaggaatgttgagcctggaatgagct

SEQ ID NO: 446515 - DNA, 120 bp, Artificial Sequence
  ENSG00000154814_36 (sequence is synthesized)
gaggtgtgcaggtggcgtgaggtatacacacatgcacctcagcctagaatgagatgaggtatgtgaactacgtatgtgcatgtgtgcacacgtatacacatacgccatttaaaatcatgc

SEQ ID NO: 446516 - DNA, 120 bp, Artificial Sequence
  ENSG00000154814_37 (sequence is synthesized)
tcaaagcaagaagttgcacaagaaaagggtatgttcaagacaataaaaatgggattattcaactcctattttacttgcttttctacaaggagacaaatttggctaaagtctaagagactg

SEQ ID NO: 446517 - DNA, 120 bp, Artificial Sequence
  ENSG00000154814_38 (sequence is synthesized)
tgaagttttctccccattaatggcatcacagcatttgtatctgattcatcaggattctcctgagaaagagaatcagtaggctatcttgtatctagaaagattcattttgaggaactggct

SEQ ID NO: 446518 - DNA, 120 bp, Artificial Sequence
  ENSG00000154814_39 (sequence is synthesized)
tacatgactgtggaggatgtaaaatccaaagtttgcagggtagcccagcaggctggatattccagcaggagtcgatgttgcagttttgagtctgcaggctgaattccttcctcttccggg

SEQ ID NO: 446519 - DNA, 120 bp, Artificial Sequence
  ENSG00000154814_40 (sequence is synthesized)
atctcaatcttttttcttaaggccttcaactgattgaagtccactcacattaggaagggtaatgtgctttactcttctactgagtggaatgttaatcacatctaaaaatactttcatagc

SEQ ID NO: 446520 - DNA, 120 bp, Artificial Sequence
  ENSG00000154814_41 (sequence is synthesized)
aacatctagattggtgtttgatcaagtaagtgagtactatagcccaacaaagctgacataaaattaaccatcacaggacaattctgcaacttaattttctcgtttaacatttcctgtaat

SEQ ID NO: 446521 - DNA, 120 bp, Artificial Sequence
  ENSG00000154814_42 (sequence is synthesized)
tccttccatgtcagcttatacagaatgacctcatctataataagaatatattatcctttgtttaaccattcccctactgatggacatgaacattattaccttttttgatattacaagtaa

SEQ ID NO: 446522 - DNA, 120 bp, Artificial Sequence
  ENSG00000154814_43 (sequence is synthesized)
cagattttttccaccatattcagactatagaaagctaatctaccacctgaaggggtgtcaagggctgagaaataaaggatcctcaccctttacctcaattgtgtcagcagctaaggtgtg

SEQ ID NO: 446523 - DNA, 120 bp, Artificial Sequence
  ENSG00000154814_44 (sequence is synthesized)
gtcattaagacttctgtgtcatttgaagttaattttcaaagagacccgacctgctgatggttgtgggaggcatatcaaactcccggaaaggtaacaccttagcttcaatgtgcatgctgt

SEQ ID NO: 446524 - DNA, 120 bp, Artificial Sequence
  ENSG00000154814_45 (sequence is synthesized)
cacagatgcatacccacctctgtgtgcacactcacctctgtgtgtacaccacctcctctctggaaggagctttctctgtgaaaggggaactagggaattgagggtcagaggagagaggag

SEQ ID NO: 446525 - DNA, 120 bp, Artificial Sequence
  ENSG00000154814_46 (sequence is synthesized)
gattcagtctttactatatacacatttgcactgtaagcattttgtttaaaattattataaagcctccaataacttttatctcgatttgcaatgtaatattcctcaatgggacttttttac

SEQ ID NO: 446526 - DNA, 120 bp, Artificial Sequence
  ENSG00000154814_47 (sequence is synthesized)
gtattcacgtgcaagtaacttattaaggatgtgctgccagtgagggagcgggagaagtcgtacaacagagtagaagcagcccaggaaggacacaattttaagaacatcccgtgaccagcg

SEQ ID NO: 446527 - DNA, 120 bp, Artificial Sequence
  ENSG00000154814_48 (sequence is synthesized)
gctcagtctgatcctgtggggagctctgagggcagaagagtactagcggccatctccagagacaagaagaaaaagaatttcagaggctcagaggaaagttcaatatggccccatggcaag

SEQ ID NO: 446528 - DNA, 120 bp, Artificial Sequence
  ENSG00000154822_0 (sequence is synthesized)
gaaacgtacctaagtattattggacagccggagtattttacagtggttgctgctcaggaaatttgagtgaaggactgcaaaagaggagcaaagcagacccgagagagaaggcagcagtgc

SEQ ID NO: 446529 - DNA, 120 bp, Artificial Sequence
  ENSG00000154822_1 (sequence is synthesized)
tcccctgtgacgtgctccatcaccgggcagggaagacaccgctgccacctctccacagccttgttcaagagcactggaaattgatggtacaaaacagaagagggaacggaaaaagacagt

SEQ ID NO: 446530 - DNA, 120 bp, Artificial Sequence
  ENSG00000154822_2 (sequence is synthesized)
ctcattcagcagcatgccaacagagaagaagatcagcagtgcaagtgattgtattaattcaatggttgagggttcagaactcaaaaaggttcgctccaactctagaatttatcataggta

SEQ ID NO: 446531 - DNA, 120 bp, Artificial Sequence
  ENSG00000154822_3 (sequence is synthesized)
ctttttactggatgctgacatgcagagcctaaggtgggagccatctaagaaggattctgagaaagccaagattgacattaaatccatcaaggaagtgagaacaggaaaaaacacagacat

SEQ ID NO: 446532 - DNA, 120 bp, Artificial Sequence
  ENSG00000154822_4 (sequence is synthesized)
attccgcagcaatggcatttctgaccagatatctgaagattgtgcgttttccgtcatatatggagagaattatgagtcactggatttggttgccaactccgcagatgttgcaaacatctg

SEQ ID NO: 446533 - DNA, 120 bp, Artificial Sequence
  ENSG00000154822_5 (sequence is synthesized)
ggttacaggactgcggtacctaatttcttatggaaaacatacacttgatatgttagaaagtagccaagataacatgaggacttcttgggtttcacaaatgtttagtgaaattgatgtaga

SEQ ID NO: 446534 - DNA, 120 bp, Artificial Sequence
  ENSG00000154822_6 (sequence is synthesized)
taaccttggacatataactctgtgtaatgctgtgcaatgtatcagaaacctcaatcctggtttaaaaacgagcaaaattgagcttaagttcaaagaattgcataaatcaaaggacaaagc

SEQ ID NO: 446535 - DNA, 120 bp, Artificial Sequence
  ENSG00000154822_7 (sequence is synthesized)
tggtaccgaggtcacaaaggaagaatttattgaggtttttcatgagctttgtactagacctgaaatttatttccttttagttcagttttcaagcaataaagaattccttgataccaagga

SEQ ID NO: 446536 - DNA, 120 bp, Artificial Sequence
  ENSG00000154822_8 (sequence is synthesized)
ccttatgatgtttcttgaggcagaacagggtgtggcacatataaatgaggaaataagccttgaaattattcacaaatatgaaccatccaaagagggtcaggaaaagggctggctctccat

SEQ ID NO: 446537 - DNA, 120 bp, Artificial Sequence
  ENSG00000154822_9 (sequence is synthesized)
agacgggttcactaattaccttatgtcacctgactgttatatattcgatccagaacataagaaggtctgtcaggatatgaagcaacctctgtctcattactttataaactcatctcataa

SEQ ID NO: 446538 - DNA, 120 bp, Artificial Sequence
  ENSG00000154822_10 (sequence is synthesized)
tacatacttaatagaggatcagttccgaggtccctccgacatcacaggatatattcgagctcttaaaatgggttgccggagtgttgaattagatgtatgggatgggccggacaatgaacc

SEQ ID NO: 446539 - DNA, 120 bp, Artificial Sequence
  ENSG00000154822_11 (sequence is synthesized)
tgtaatttacacaggccacaccatgacctctcagatagttttccgcagtgtcattgatattattaacaagtatgcattctttgcttcagagtatcctcttatcttgtgtttagaaaacca

SEQ ID NO: 446540 - DNA, 120 bp, Artificial Sequence
  ENSG00000154822_12 (sequence is synthesized)
ctgttccattaaacaacagaaggtaatggttcagcacatgaagaaacttttaggagacaagctctatacaacatcacccaatgttgaggaatcttatctaccatccccagatgtcctgaa

SEQ ID NO: 446541 - DNA, 120 bp, Artificial Sequence
  ENSG00000154822_13 (sequence is synthesized)
agggaaaatactaattaaagcaaagaagctgtcctcaaattgctctggggtagaaggagatgttactgacgaagatgaaggagcagaaatgtctcagaggatgggaaaagagaacatgga

SEQ ID NO: 446542 - DNA, 120 bp, Artificial Sequence
  ENSG00000154822_14 (sequence is synthesized)
gcaacccaataatgtgcctgtgaagcgatttcagctttgtaaagaactgtctgaactggtcagcatctgcaaatcagttcagttcaaagaatttcaggtgtcgtttcaggttcagaagta

SEQ ID NO: 446543 - DNA, 120 bp, Artificial Sequence
  ENSG00000154822_15 (sequence is synthesized)
ctgggaagtctgttcctttaatgaagtgcttgccagcaagtacgccaatgaaaatccaggggactttgtaaattacaacaaacgttttcttgctagggtttttcccagtccaatgagaat

SEQ ID NO: 446544 - DNA, 120 bp, Artificial Sequence
  ENSG00000154822_16 (sequence is synthesized)
ggctggtttaggcagaacggaaactgtggctatgtcctccggccagccatcatgagggaggaggtctccttcttcagcgccaatacaaaagactctgtcccaggggtctcacctcaactt

SEQ ID NO: 446545 - DNA, 120 bp, Artificial Sequence
  ENSG00000154822_17 (sequence is synthesized)
cttcacattaaaatcatcagtgggcagaactttcccaagcccaaaggatcaggtgccaaaggtgatgtggtagatccttatgtctatgttgaaatccatggaatccctgctgattgtgca

SEQ ID NO: 446546 - DNA, 120 bp, Artificial Sequence
  ENSG00000154822_18 (sequence is synthesized)
gaacaaaggacaaaaacagtgcaccagaatggagacgctcccatttttgatgaaagctttgaatttcaaatcaacctgcctgaactggccatggtgcgctttgtagtgctggatgatgac

SEQ ID NO: 446547 - DNA, 120 bp, Artificial Sequence
  ENSG00000154822_19 (sequence is synthesized)
tacattggggatgaattcatcggccagtacacaattccctttgaatgtttacagacgggctaccgccatgtccccctgcagtccttaactggagaggtccttgcacatgcttctttattt

SEQ ID NO: 446548 - DNA, 120 bp, Artificial Sequence
  ENSG00000154822_20 (sequence is synthesized)
gtccacgtggctattactaaccgaagaggaggaggaaagcctcataaaaggggcctttctgtgagaaaagggaagaaatccagggaatatgcatctttgagaacactgtggattaaaacc

SEQ ID NO: 446549 - DNA, 120 bp, Artificial Sequence
  ENSG00000154822_21 (sequence is synthesized)
gtggatgaggtattcaagaatgcccagccccctatacgggatgccacagatctgagagaaaacatgcagaatgcggtggtgtcattcaaggagctgtgtggcctctcctctgtggccaat

SEQ ID NO: 446550 - DNA, 120 bp, Artificial Sequence
  ENSG00000154822_22 (sequence is synthesized)
ctcatgcagtgcatgttggcggtgtctccccgctttctggggcccgataacacacccctagtggtcctaaatctcagcgagcagtaccccacaatggagctgcagggaattgtgccggag

SEQ ID NO: 446551 - DNA, 120 bp, Artificial Sequence
  ENSG00000154822_23 (sequence is synthesized)
gttctgaagaagatcgtaacaacttatgacatgatgattcagtccctcaaggcgttgattgaaaatgcagatgctgtatatgaaaagatcgtacattgtcagaaggcagccatggaattc

SEQ ID NO: 446552 - DNA, 120 bp, Artificial Sequence
  ENSG00000154822_24 (sequence is synthesized)
catgaacacttgcacagcataggcaccaaggaaggtttgaaggaaagaaaactacaaaaagcagtggagagctttacctggaatattaccatcttaaagggacaagcagatcttttgaaa

SEQ ID NO: 446553 - DNA, 120 bp, Artificial Sequence
  ENSG00000154822_25 (sequence is synthesized)
tatgctaagaatgagacattggagaacctgaaacaaatccattttgctgctgtttcatgtggactgaataaaccaggcaccgaaaatgctgatgtccagaagccacgccggagcttggaa

SEQ ID NO: 446554 - DNA, 120 bp, Artificial Sequence
  ENSG00000154822_26 (sequence is synthesized)
gtcatacccgaaaaagcaaacgatgaaactggagaatgaggaaacttacaataaaccattatggagtttataactctaggaccaattgtagtcagatgggacatttgctttgcactcact

SEQ ID NO: 446555 - DNA, 120 bp, Artificial Sequence
  ENSG00000154822_27 (sequence is synthesized)
aatgagaataatattcgggattttaaagcacaactggaatagctaattacagtctattaaaactgtgaatgtatgtagcaatcctgcgtgtgaaggcaaataaactctttaacaggcaat

SEQ ID NO: 446556 - DNA, 120 bp, Artificial Sequence
  ENSG00000154822_28 (sequence is synthesized)
tatattgctggccaaaatatgctatatttgtatacaaagacattctaactcagttccagtatgaagaaagattattcactctagctccactgagaaacattttcctaagtgaaaacaatt

SEQ ID NO: 446557 - DNA, 120 bp, Artificial Sequence
  ENSG00000154822_29 (sequence is synthesized)
tcttaagatggaaatggattggattgtcaaattattatttattggagaaaaaaacctgatctacacatttttacttatatggggttgccagagtctctgggttctagatgattttggtgg

SEQ ID NO: 446558 - DNA, 120 bp, Artificial Sequence
  ENSG00000154822_30 (sequence is synthesized)
catgcttgctgagccataattactaaagagaatgtaagtggacgggttccctgaatccccggggtccttggagagccatcgaggagaatgtgcaattggactgaagctccctggctgaag

SEQ ID NO: 446559 - DNA, 120 bp, Artificial Sequence
  ENSG00000154822_31 (sequence is synthesized)
atacatgccgagtcagcacatgggtagagatgatgtaaaagcagccaatctggaaacaatacattgtaaatagtttttcattgtatgaagtagtgttcacattaaaaagatgttttatga

SEQ ID NO: 446560 - DNA, 80 bp, Artificial Sequence
  ENSG00000154822_32 (sequence is synthesized)
gcccgaggcggcggcggggacgcggggacgcgaggacgcggctttgtgcaggcgggtcgcggggcgcccatggcggagtg

SEQ ID NO: 446561 - DNA, 120 bp, Artificial Sequence
  ENSG00000154822_33 (sequence is synthesized)
gcccggccctcggcgccaagggcgccctgaaagccggagtgggggaaggcggtggcgggggaggtcgcctcggccacgggcgggcgcgctatgacagcggcggggtttccaacggagact

SEQ ID NO: 446562 - DNA, 120 bp, Artificial Sequence
  ENSG00000154822_34 (sequence is synthesized)
cggggtttccaacggagactgcagcctcggcgtgtccggggacgaagcccgggctagccctaccaggggaccccgcggcgttgcgctcgccccgacccccagcgcggtcgtctgtaccct

SEQ ID NO: 446563 - DNA, 120 bp, Artificial Sequence
  ENSG00000154822_35 (sequence is synthesized)
atacttgtctgtgagcacagagtggggaagtggctgaaggcagaacaagaacacaggggtccactttctaaggcctcgtggcctttatagctctacaaaccccaagtgtccctaactctt

SEQ ID NO: 446564 - DNA, 120 bp, Artificial Sequence
  ENSG00000154822_36 (sequence is synthesized)
ctctctcaagggatacagactctgatataactggattctatgctccaaactcaaagggaatgcagtagaagctgaaaaacgaattttttgatgtatttttctagaacactattgtctaat

SEQ ID NO: 446565 - DNA, 120 bp, Artificial Sequence
  ENSG00000154822_37 (sequence is synthesized)
tttcatggcagcctagcatggtgcaaggttgtcttggtttaagttccaggaaaaaatacccagcaagaagaatctgagtacaagaaattttggggagagatggtcccaggaagcaaagga

SEQ ID NO: 446566 - DNA, 120 bp, Artificial Sequence
  ENSG00000154822_38 (sequence is synthesized)
gataagaaagacaggaaggaggagtatttttgtgcctcagactcccataatggtatgagtaccctcctccttctcctccctcacactgcatgtgatttggaagaaaagtgtctgctggcc

SEQ ID NO: 446567 - DNA, 120 bp, Artificial Sequence
  ENSG00000154822_39 (sequence is synthesized)
cccagggaatggaaggtgctaatctttgctgtcttcaacatccaagcatgtggccattacacaggtggcagagggcaggggaagtcttagctgccgcactggatccctcacctcagaagt

SEQ ID NO: 446568 - DNA, 120 bp, Artificial Sequence
  ENSG00000154822_40 (sequence is synthesized)
aagacaactgtttttctctaatagatagttggacaaaaggactttgaaaaaattagccagatgtagaatccctgttgttttgcccctacgtctgaataaaagcaatgacttgtgattgtt

SEQ ID NO: 446569 - DNA, 120 bp, Artificial Sequence
  ENSG00000154832_0 (sequence is synthesized)
tgaagtcggagacgacagaggaactggtttcctccgccccgcaaggcacacagcctgccgacgccccattaatacatgtggaaggggaaagagactgaatggaggaatgaatacaacttg

SEQ ID NO: 446570 - DNA, 120 bp, Artificial Sequence
  ENSG00000154832_1 (sequence is synthesized)
atccaggtcgtgcttcggaagcggtcactttacctgtgaacctctctgcctgacaaacgggcaatgtacggaatcaaccaccaagatggcggcgcccgtgaagaatccgcaattaggtcg

SEQ ID NO: 446571 - DNA, 120 bp, Artificial Sequence
  ENSG00000154832_2 (sequence is synthesized)
ccgtcatatgtcgcctaggaacgtacggaattcgacccacgtacggaatcggattccaagatgacggcatctatgaggaagtcacgcagtaggtgcagccatgttgcctgtacgtcgagg

SEQ ID NO: 446572 - DNA, 120 bp, Artificial Sequence
  ENSG00000154832_3 (sequence is synthesized)
ccgtacaagcagccgccgtacggactctactgacaaggtggcggcgccctcgggaaagccacattagagcgcggccatgttcccggcgaacatatggattcggccaccatacggatacga

SEQ ID NO: 446573 - DNA, 120 bp, Artificial Sequence
  ENSG00000154832_4 (sequence is synthesized)
taagcaagatggcggcgcctgaggggtcttgggggctctaggccggccacctactggtttgcagcggagacgacgcatggggcctgcgcaataggagtacgctgcctgggaggcgtgact

SEQ ID NO: 446574 - DNA, 120 bp, Artificial Sequence
  ENSG00000154832_5 (sequence is synthesized)
agaagcggaagtagttgtgggcgcctttgcaaccgcctgggacgccgccgagtggtctgtgcaggttcgcgggtcgctggcgggggtcgtgagggagtgcgccgggagcggagatatgga

SEQ ID NO: 446575 - DNA, 120 bp, Artificial Sequence
  ENSG00000154832_6 (sequence is synthesized)
gggagatggttcagacccagagcctccagatgccggggaggacagcaagtccgagaatggggagaatgcgcccatctactgcatctgccgcaaaccggacatcaactgcttcatgatcgg

SEQ ID NO: 446576 - DNA, 120 bp, Artificial Sequence
  ENSG00000154832_7 (sequence is synthesized)
gtgtgacaactgcaatgagtggttccatggggactgcatccggatcactgagaagatggccaaggccatccgggagtggtactgtcgggagtgcagagagaaagaccccaagctagagat

SEQ ID NO: 446577 - DNA, 120 bp, Artificial Sequence
  ENSG00000154832_8 (sequence is synthesized)
tcgctatcggcacaagaagtcacgggagcgggatggcaatgagcgggacagcagtgagccccgggatgagggtggagggcgcaagaggcctgtccctgatccagacctgcagcgccgggc

SEQ ID NO: 446578 - DNA, 120 bp, Artificial Sequence
  ENSG00000154832_9 (sequence is synthesized)
agggtcagggacaggggttggggccatgcttgctcggggctctgcttcgccccacaaatcctctccgcagcccttggtggccacacccagccagcatcaccagcagcagcagcagcagat

SEQ ID NO: 446579 - DNA, 120 bp, Artificial Sequence
  ENSG00000154832_10 (sequence is synthesized)
caaacggtcagcccgcatgtgtggtgagtgtgaggcatgtcggcgcactgaggactgtggtcactgtgatttctgtcgggacatgaagaagttcgggggccccaacaagatccggcagaa

SEQ ID NO: 446580 - DNA, 120 bp, Artificial Sequence
  ENSG00000154832_11 (sequence is synthesized)
gtgccggctgcgccagtgccagctgcgggcccgggaatcgtacaagtacttcccttcctcgctctcaccagtgacgccctcagagtccctgccaaggccccgccggccactgcccaccca

SEQ ID NO: 446581 - DNA, 120 bp, Artificial Sequence
  ENSG00000154832_12 (sequence is synthesized)
tggcgtcatcaacagtcaaggagcctcctgaggctacagccacacctgagccactctcagatgaggacctacctctggatcctgacctgtatcaggacttctgtgcaggggcctttgatg

SEQ ID NO: 446582 - DNA, 120 bp, Artificial Sequence
  ENSG00000154832_13 (sequence is synthesized)
accatggcctgccctggatgagcgacacagaagagtccccattcctggaccccgcgctgcggaagagggcagtgaaagtgaagcatgtgaagcgtcgggagaagaagtctgagaagaaga

SEQ ID NO: 446583 - DNA, 120 bp, Artificial Sequence
  ENSG00000154832_14 (sequence is synthesized)
aggaggagcgatacaagcggcatcggcagaagcagaagcacaaggataaatggaaacacccagagagggctgatgccaaggaccctgcgtcactgccccagtgcctggggcccggctgtg

SEQ ID NO: 446584 - DNA, 120 bp, Artificial Sequence
  ENSG00000154832_15 (sequence is synthesized)
tgcgccccgcccagcccagctccaagtattgctcagatgactgtggcatgaagctggcagccaaccgcatctacgagatcctcccccagcgcatccagcagtggcagcagagcccttgca

SEQ ID NO: 446585 - DNA, 120 bp, Artificial Sequence
  ENSG00000154832_16 (sequence is synthesized)
ttgctgaagagcacggcaagaagctgctcgaacgcattcgccgagagcagcagagtgcccgcactcgccttcaggaaatggaacgccgattccatgagcttgaggccatcattctacgtg

SEQ ID NO: 446586 - DNA, 120 bp, Artificial Sequence
  ENSG00000154832_17 (sequence is synthesized)
ccaagcagcaggctgtgcgcgaggatgaggagagcaacgagggtgacagtgatgacacagacctgcagatcttctgtgtttcctgtgggcaccccatcaacccacgtgttgccttgcgcc

SEQ ID NO: 446587 - DNA, 120 bp, Artificial Sequence
  ENSG00000154832_18 (sequence is synthesized)
acatggagcgctgctacgccaagtatgagagccagacgtcctttgggtccatgtaccccacacgcattgaaggggccacacgactcttctgtgatgtgtataatcctcagagcaaaacat

SEQ ID NO: 446588 - DNA, 120 bp, Artificial Sequence
  ENSG00000154832_19 (sequence is synthesized)
actgtaagcggctccaggtgctgtgccccgagcactcacgggaccccaaagtgccagctgacgaggtatgcgggtgcccccttgtacgtgatgtctttgagctcacgggtgacttctgcc

SEQ ID NO: 446589 - DNA, 120 bp, Artificial Sequence
  ENSG00000154832_20 (sequence is synthesized)
gcctgcccaagcgccagtgcaatcgccattactgctgggagaagctgcggcgtgcggaagtggacttggagcgcgtgcgtgtgtggtacaagctggacgagctgtttgagcaggagcgca

SEQ ID NO: 446590 - DNA, 120 bp, Artificial Sequence
  ENSG00000154832_21 (sequence is synthesized)
atgtgcgcacagccatgacaaaccgcgcgggattgctggccctgatgctgcaccagacgatccagcacgatcccctcactaccgacctgcgctccagtgccgaccgctgagcctcctggc

SEQ ID NO: 446591 - DNA, 120 bp, Artificial Sequence
  ENSG00000154832_22 (sequence is synthesized)
ccggaccccttacaccctgcattccagatgggggagccgcccggtgcccgtgtgtccgttcctccactcatctgtttctccggttctccctgtgcccatccaccggttgaccgcccatct

SEQ ID NO: 446592 - DNA, 120 bp, Artificial Sequence
  ENSG00000154832_23 (sequence is synthesized)
gcctttatcagagggactgtccccgtcgacatgttcagtgcctggtggggctgcggagtccactcatccttgcctcctctccctgggttttgttaataaaattttgaagaaaccaaggaa

SEQ ID NO: 446593 - DNA, 120 bp, Artificial Sequence
  ENSG00000154832_24 (sequence is synthesized)
gggaggggttcggcggtggaggtcggtcggttggcaacagtggggtctgtcggccgactcaggggtctgtggtgagccataaccggagtctgtggactgaacggcgggagtctatgggca

SEQ ID NO: 446594 - DNA, 120 bp, Artificial Sequence
  ENSG00000154832_25 (sequence is synthesized)
caaccagccaggacagatggacctcccttccctccctctactgccctctctactccaaatccccagggccacacgactcttctgtgatgtgtataatcctcagagcaaaacatactgtaa

SEQ ID NO: 446595 - DNA, 120 bp, Artificial Sequence
  ENSG00000154832_26 (sequence is synthesized)
tggggaggtaaggccaggccaggtgggtagggctagggcaaggccgccctccatccacctggggctgacctgggccttcctcctgccggcacaggaatcgtacaagtacttcccttcctc

SEQ ID NO: 446596 - DNA, 120 bp, Artificial Sequence
  ENSG00000154832_27 (sequence is synthesized)
ggtgagtccagccccccagggtggggtggggcatgcgggcagggcggtcagggccagtcctgagattctgccctgcagctctcaccagtgacgccctcagagtccctgccaaggccccgc

SEQ ID NO: 446597 - DNA, 120 bp, Artificial Sequence
  ENSG00000154832_28 (sequence is synthesized)
gaccatgtgggaacatcagtgggccagtgggggacagatttgttgtctgggtggtgtcttgggagggcatgcagcgcacatccacagttccctccatttgtgctcatccctccagtatga

SEQ ID NO: 446598 - DNA, 120 bp, Artificial Sequence
  ENSG00000154832_29 (sequence is synthesized)
ccctgcctcgctgtcccacattcatcccttccttcctcacctcacttttccttcactttttcctctcagcttccctgctgcttcaccctccattcctccttttccatgcctcctcaccgt

SEQ ID NO: 446599 - DNA, 120 bp, Artificial Sequence
  ENSG00000154832_30 (sequence is synthesized)
ccatgacccattagcgagtgtggacgcagggagcgggtgtcggtgggtgcgtgatgggaagtatggagcagagtaataggatgtcagaggaagggatgggggtcagtggggactgtgatg

SEQ ID NO: 446600 - DNA, 120 bp, Artificial Sequence
  ENSG00000154832_31 (sequence is synthesized)
gagaggttttttgggggccccgatgtgaaatctgcaggcagagtggggatccctgctgaccacggtggagttgtaatggggggatgagccgccacggtgggggctgcttaaggatccgta

SEQ ID NO: 446601 - DNA, 120 bp, Artificial Sequence
  ENSG00000154832_32 (sequence is synthesized)
cttggtggccacacccagccaggtgagtggctgcataaagtgaatggatgtgtaaagtggttccgtttcagccctgcctgggtccatgatttctgttctgggccccctcctgcagcatca

SEQ ID NO: 446602 - DNA, 120 bp, Artificial Sequence
  ENSG00000154832_33 (sequence is synthesized)
tttgcaaccgcctgggacgccgccgagtggtctgtgcaggttcgcgggtcgctggcgggggtcgtgagggagtgcgccgggagcggagatatggggtctgtggtgagccataaccggagt

SEQ ID NO: 446603 - DNA, 120 bp, Artificial Sequence
  ENSG00000154832_34 (sequence is synthesized)
gcgcctttgcaaccgcctgggacgccgccgagtggtctgtgcaggttcgcgggtcgctggcgggggtcgtgagggagtgcgccgggagcggagatatgcatcaccagcagcagcagcagc

SEQ ID NO: 446604 - DNA, 120 bp, Artificial Sequence
  ENSG00000154832_35 (sequence is synthesized)
gagccagacgtcctttgggtccatgtaccccacacgcattgaagggtaagtgagggtgccacgcagtgagaggtggggggttaaggcgggggtcagaagtgggatgtgtgtggagctggg

SEQ ID NO: 446605 - DNA, 120 bp, Artificial Sequence
  ENSG00000154839_0 (sequence is synthesized)
gtgcgcctgcgctgcgctagggcgcggcgggcggtttgaattttgcttacagagtcccgtctcaccatcctgggcttccaacggagactgcggtatccgcagctggagacccagcggcga

SEQ ID NO: 446606 - DNA, 120 bp, Artificial Sequence
  ENSG00000154839_1 (sequence is synthesized)
gtagccttttgctcccggacggacttgagaggcttaaaggatggcctcgtcagatctggaacaattatgctctcatgttaatgaaaagattggcaatattaagaaaaccttatcattaag

SEQ ID NO: 446607 - DNA, 120 bp, Artificial Sequence
  ENSG00000154839_2 (sequence is synthesized)
aaactgtggccaggaacctaccttgaaaactgtattaaataaaataggagatgagatcattgtaataaatgaacttctaaataaattggaattggaaattcagtatcaagaacaaaccaa

SEQ ID NO: 446608 - DNA, 120 bp, Artificial Sequence
  ENSG00000154839_3 (sequence is synthesized)
caattcactcaaggaactctgtgaatctcttgaagaagattacaaagacatagaacatcttaaagaaaacgttccttcccatttgcctcaagtaacagtaacccagagctgtgttaaggg

SEQ ID NO: 446609 - DNA, 120 bp, Artificial Sequence
  ENSG00000154839_4 (sequence is synthesized)
atcagatcttgatcctgaagaaccaatcaaagttgaagaacctgaacccgtaaagaagcctcccaaagagcaaagaagtattaaggaaatgccatttataacttgtgatgagttcaatgg

SEQ ID NO: 446610 - DNA, 120 bp, Artificial Sequence
  ENSG00000154839_5 (sequence is synthesized)
tgttccttcgtacatgaaatcccgcttaacctataatcaaattaatgatgttattaaagaaatcaacaaggcagtaattagtaaatataaaatcctacatcagccaaaaaagtctatgaa

SEQ ID NO: 446611 - DNA, 120 bp, Artificial Sequence
  ENSG00000154839_6 (sequence is synthesized)
ttctgtgaccagaaatctctatcacagatttattgatgaagaaacgaaggataccaaaggtcgttattttatagtggaagctgacataaaggagttcacaactttgaaagctgacaagaa

SEQ ID NO: 446612 - DNA, 120 bp, Artificial Sequence
  ENSG00000154839_7 (sequence is synthesized)
gtttcacgtgttactgaatattttacgacactgccggaggctatcagaggtccgagggggaggacttactcgttatgttataacctgagtcccttgtgaacttttgaacataccaacagg

SEQ ID NO: 446613 - DNA, 120 bp, Artificial Sequence
  ENSG00000154839_8 (sequence is synthesized)
cttttgaacataccaacagggtatagagtatagaggctatttctataattttcttatatataatttttttaacttttaatcttttttgtttccttttttttttttttgagacaggatctt

SEQ ID NO: 446614 - DNA, 74 bp, Artificial Sequence
  ENSG00000154839_9 (sequence is synthesized)
tttttttgagacaggatcttgctttgtcacccaggggcttgctttgtcacgcaggctagagtgcagtggcgcaa

SEQ ID NO: 446615 - DNA, 120 bp, Artificial Sequence
  ENSG00000154839_10 (sequence is synthesized)
aggcgtgagccaccgcgcccggccaacttatatattttcaagattcacctcctctcaccaaatatttaactacctgctgaatacgcctctgtactaggcacataatggaactaaaaaatg

SEQ ID NO: 446616 - DNA, 120 bp, Artificial Sequence
  ENSG00000154839_11 (sequence is synthesized)
gcctctgtactaggcacataatggaactaaaaaatgctcatgtccagtttttgtgttgagtgaacaatgctgcagaccctaataagattgggtacagatcggcatgcgcctgtagtccca

SEQ ID NO: 446617 - DNA, 120 bp, Artificial Sequence
  ENSG00000154839_12 (sequence is synthesized)
ctgggtacagatgtgatattggaagaaaaagatcaagctgatgaggttaggatacccaggccctttggacttaaagatcactagtgtctaaattccatcgatggcatttcagtctatagg

SEQ ID NO: 446618 - DNA, 120 bp, Artificial Sequence
  ENSG00000154839_13 (sequence is synthesized)
taaacttcctggaagctggatttggagacagtttatcatctgattattgggctttcgtataggtccttagggagcagcttacctgaaatgcatttagtgtacaccagtctgtaaacttca

SEQ ID NO: 446619 - DNA, 120 bp, Artificial Sequence
  ENSG00000154839_14 (sequence is synthesized)
acctgtaatgaaagtgtaataaatgtacattgagttgatgtgataatgtgatataataagaaatatatatttgatcttcctatctagttccttgttcagagctcctaaaacccttgtaat

SEQ ID NO: 446620 - DNA, 120 bp, Artificial Sequence
  ENSG00000154839_15 (sequence is synthesized)
ttccaaagtgatggagtacatcttttgttctagtatttggtctttgaccccagttcctgacacaaagctcctaaattcctttaaatttcccagtgataggagaattttttgttctaatga

SEQ ID NO: 446621 - DNA, 120 bp, Artificial Sequence
  ENSG00000154839_16 (sequence is synthesized)
ggtcactcttgatgggcacctggataactcaggatgggggctgctcacaaagaccacatcatgattggaagtttcaaactttcagtctcccacctccagagaggggagaggggctggaga

SEQ ID NO: 446622 - DNA, 120 bp, Artificial Sequence
  ENSG00000154839_17 (sequence is synthesized)
tttgtgtcaataatccatcaggcctatgtcaacaagacataatccgttaactatggagttcagggagcttcagggttggcaaacattttgatgtgccaggaaggtgacgcactccagctt

SEQ ID NO: 446623 - DNA, 120 bp, Artificial Sequence
  ENSG00000154839_18 (sequence is synthesized)
tatgaagtcagcaagtcctgtgctcaggatgcttctggaccttgccccaggtaccccttcatgtggctgttgttcatctgtatcctttgtagtagccttaaaataaactgttaaacacaa

SEQ ID NO: 446624 - DNA, 120 bp, Artificial Sequence
  ENSG00000154845_0 (sequence is synthesized)
ccggctccccggctcgcgccgctccatgtagccccggctccccgggcggccgcggaggagggggcgaccacaagatggcggacctctcgctgcttcaggaggacctgcaggaggacgcag

SEQ ID NO: 446625 - DNA, 120 bp, Artificial Sequence
  ENSG00000154845_1 (sequence is synthesized)
acggatttggtgtggatgactacagctcagagtctgatgtgattattataccttcagccctggactttgtctcacaagatgaaatgttgacgcccctggggagattggacaagtatgctg

SEQ ID NO: 446626 - DNA, 120 bp, Artificial Sequence
  ENSG00000154845_2 (sequence is synthesized)
caagtgagaacatatttaacagacaaatggtggcccggagtttgctcgataccttgagggaagtctgcgatgatgaaagagattgtattgctgttttggaaagaattagcagattggccg

SEQ ID NO: 446627 - DNA, 120 bp, Artificial Sequence
  ENSG00000154845_3 (sequence is synthesized)
atgattcagaaccaactgtgagagcggagctgatggaacaggtgcctcacatcgcactgttttgtcaagaaaaccggccttcaataccatatgctttttcaaaattcttactacctattg

SEQ ID NO: 446628 - DNA, 120 bp, Artificial Sequence
  ENSG00000154845_4 (sequence is synthesized)
tggttagataccttgcagatcagaataatcaggtgaggaaaacaagtcaggcagctttgctggctctgttggagcaggagctcattgaacgatttgatgtggagaccaaagtgtgccctg

SEQ ID NO: 446629 - DNA, 120 bp, Artificial Sequence
  ENSG00000154845_5 (sequence is synthesized)
tcctcatagagctgacagccccagatagcaatgatgatgtgaaaacagaagctgtggctataatgtgcaaaatggctcccatggttgggaaggatattacagagcgtcttatcctcccta

SEQ ID NO: 446630 - DNA, 120 bp, Artificial Sequence
  ENSG00000154845_6 (sequence is synthesized)
ggttttgtgagatgtgctgcgattgcagaatgtttcacgttcgaaaggtctgtgctgccaattttggagatatttgcagtgtagttggccagcaagctactgaagaaatgttgctgccca

SEQ ID NO: 446631 - DNA, 120 bp, Artificial Sequence
  ENSG00000154845_7 (sequence is synthesized)
gatttttccagctttgttctgataatgtatggggagtccgaaaggcttgtgctgaatgcttcatggcggtttcatgtgcaacatgtcaagaaatccgacggaccaaattatcagcacttt

SEQ ID NO: 446632 - DNA, 120 bp, Artificial Sequence
  ENSG00000154845_8 (sequence is synthesized)
ttattaatttgatcagtgatccttcacgttgggttcgccaagcagcttttcagtctctgggacctttcatatctacttttgctaatccatctagctcaggccagtattttaaagaagaaa

SEQ ID NO: 446633 - DNA, 120 bp, Artificial Sequence
  ENSG00000154845_9 (sequence is synthesized)
gcaaaagttcagaagagatgtcagtagaaaacaaaaataggaccagagatcaagaagccccagaggatgtacaagtcaggccagaggatactccttcagatctcagtgttagtaattcca

SEQ ID NO: 446634 - DNA, 120 bp, Artificial Sequence
  ENSG00000154845_10 (sequence is synthesized)
gtgtcatactggaaaacacgatggaagaccatgctgctgaggcatccgggaagcctctaggtgaaattagtgttccactggacagctctttactttgtactttgtcctcagaatctcacc

SEQ ID NO: 446635 - DNA, 120 bp, Artificial Sequence
  ENSG00000154845_11 (sequence is synthesized)
aggaagcagctagtaatgagaatgataaaaaacctggtaactacaaatctatgttacgaccagaggttggcaccacttcacaagattcagctctcttagatcaggaattgtataactcct

SEQ ID NO: 446636 - DNA, 120 bp, Artificial Sequence
  ENSG00000154845_12 (sequence is synthesized)
tccatttctggaggactcctcttcctgaaatagatctagacatagagcttgaacagaactctgggggaaaacccagcccagagggaccagaggaagaatctgagggccctgtgcccagtt

SEQ ID NO: 446637 - DNA, 120 bp, Artificial Sequence
  ENSG00000154845_13 (sequence is synthesized)
ctccaaacatcaccatggccaccagaaaggaactggaagaaatgatagaaaatctagagccccacattgatgatccagatgttaaagcacaagtggaagtgctgtccgctgcactacgtg

SEQ ID NO: 446638 - DNA, 120 bp, Artificial Sequence
  ENSG00000154845_14 (sequence is synthesized)
cttccagcctggatgcacatgaagagaccatcagtatagaaaagagaagtgatttgcaagatgaactggatataaatgagctaccaaattgtaaaataaatcaagaagattctgtgcctt

SEQ ID NO: 446639 - DNA, 120 bp, Artificial Sequence
  ENSG00000154845_15 (sequence is synthesized)
taatcagcgatgctgttgagaatatggactccactcttcactatattcacagcgattcagacttgagcaacaatagcagttttagccctgatgaggaaaggagaactaaagtacaagatg

SEQ ID NO: 446640 - DNA, 120 bp, Artificial Sequence
  ENSG00000154845_16 (sequence is synthesized)
ctgtgcatatagcctccctggtgtggccttgacactcggaagacagaattggcactgcctgagagagacgtatgagactctggcctcagacatgcagtggaaagttcgacgaactctagc

SEQ ID NO: 446641 - DNA, 120 bp, Artificial Sequence
  ENSG00000154845_17 (sequence is synthesized)
attctccatccacgagcttgcagttattcttggagatcaattgacagctgcagatctggttccaatttttaatggatttttaaaagacctcgatgaagtcaggataggtgttcttaaaca

SEQ ID NO: 446642 - DNA, 120 bp, Artificial Sequence
  ENSG00000154845_18 (sequence is synthesized)
cttgcatgattttctgaagcttcttcatattgacaaaagaagagaatatctttatcaacttcaggagtttttggtgacagataatagtagaaattggcggtttcgagctgaactggctga

SEQ ID NO: 446643 - DNA, 120 bp, Artificial Sequence
  ENSG00000154845_19 (sequence is synthesized)
acagctgattttacttctagagttatatagtcccagagatgtttatgactatttacgtcccattgctctgaatctgtgtgcagacaaagtttcttctgttcgttggatttcctacaagtt

SEQ ID NO: 446644 - DNA, 120 bp, Artificial Sequence
  ENSG00000154845_20 (sequence is synthesized)
ggtcagcgagatggtgaagaagctgcacgcggcaacaccaccaacgttcggagtggacctcatcaatgagcttgtggagaactttggcagatgtcccaagtggtctggtcggcaagcctt

SEQ ID NO: 446645 - DNA, 120 bp, Artificial Sequence
  ENSG00000154845_21 (sequence is synthesized)
tgtctttgtctgccagactgtcattgaggatgactgccttcccatggaccagtttgctgtgcatctcatgccgcatctgctaaccttagcaaatgacagggttcctaacgtgcgagtgct

SEQ ID NO: 446646 - DNA, 120 bp, Artificial Sequence
  ENSG00000154845_22 (sequence is synthesized)
gcttgcaaagacattaagacaaactctactagaaaaagactatttcttggcctctgccagctgccaccaggaggctgtggagcagaccatcatggctcttcagatggaccgtgacagcga

SEQ ID NO: 446647 - DNA, 120 bp, Artificial Sequence
  ENSG00000154845_23 (sequence is synthesized)
tgtcaagtattttgcaagcatccaccctgccagtaccaaaatctccgaagatgccatgagcacagcgtcctcaacctactagaaggcttgaatctcggtgtctttcctgcttccatgaga

SEQ ID NO: 446648 - DNA, 120 bp, Artificial Sequence
  ENSG00000154845_24 (sequence is synthesized)
gccgaggttcagtgggcattcgccacgcatgtgacctgggatagctttcgggggaggagagaccttcctctcctgcggacttcattgcaggtgcaagttgcctacacccaataccaggga

SEQ ID NO: 446649 - DNA, 120 bp, Artificial Sequence
  ENSG00000154845_25 (sequence is synthesized)
tttcaagagtcaagagaaagtacagtaaacactattatcttatcttgactttaaggggaaataatttctcagaggattataattgtcaccgaagccttaaatccttctgtcttcctgact

SEQ ID NO: 446650 - DNA, 120 bp, Artificial Sequence
  ENSG00000154845_26 (sequence is synthesized)
gaatgaaacttgaattggcagagcattttccttatggaagggatgagattcccagagacctgcattgctttctcctggttttatttaacaatcgacaaatgaaattcttacagcctgaag

SEQ ID NO: 446651 - DNA, 120 bp, Artificial Sequence
  ENSG00000154845_27 (sequence is synthesized)
gcagacgtgtgcccagatgtgaaagagaccttcagtatcagccctaactcttctctcccaggaaggacttgctgggctctgtggccagctgtccagcccagccctgtgtgtgaatcgttt

SEQ ID NO: 446652 - DNA, 120 bp, Artificial Sequence
  ENSG00000154845_28 (sequence is synthesized)
gtgacgtgtgcaaatgggaaaggaggggtttttacatctcctaaaggacctgatgccaacacaagtaggattgacttaaactcttaagcgcagcatattgctgtacacatttacagaatg

SEQ ID NO: 446653 - DNA, 120 bp, Artificial Sequence
  ENSG00000154845_29 (sequence is synthesized)
gttgctgagtgtctgtgtctgattttttcatgctggtcatgacctgaaggaaatttattagacgtataatgtatgtctggtgtttttaacttgatcatgatcagctctgaggtgcaactt

SEQ ID NO: 446654 - DNA, 120 bp, Artificial Sequence
  ENSG00000154845_30 (sequence is synthesized)
cttcacatactgtacatacctgtgaccactcttgggagtgctgcagtctttaatcatgctgtttaaactgttgtggcacaagttctcttgtccaaataaaatttattaataagatctata

SEQ ID NO: 446655 - DNA, 120 bp, Artificial Sequence
  ENSG00000154845_31 (sequence is synthesized)
gagagagatatatacacttttgattgttttctagatgtctaccaataaatgcaatttgtgacctgtattaatgatttaaagtggggaaactagattaaaatatttgtcttttaactagtt

SEQ ID NO: 446656 - DNA, 120 bp, Artificial Sequence
  ENSG00000154845_32 (sequence is synthesized)
aggcaggcatgactttgtcagtcaaccatcccgcagccgggccctgggctttgttagcagccacttggcgagggccccgggcgggtggggaggcggcgcttcctccaagaggaggtggga

SEQ ID NO: 446657 - DNA, 120 bp, Artificial Sequence
  ENSG00000154845_33 (sequence is synthesized)
ccccggccccgacgacctcggagccgcccccggccccggatcgccgacgacacctctcgctgcttcaggaggacctgcaggaggacgcagacggatccctggactttgtctcacaagatg

SEQ ID NO: 446658 - DNA, 120 bp, Artificial Sequence
  ENSG00000154845_34 (sequence is synthesized)
atgtagccccggctccccgggcggccgcggaggagggggcgaccacaagatggcggacctctcgctgcttcaggaggacctgcaggaggacgcagacggatgtgagtggcccggcctcgc

SEQ ID NO: 446659 - DNA, 80 bp, Artificial Sequence
  ENSG00000154845_35 (sequence is synthesized)
ggccgggccctggctggctgaggggacggtgggcgagggcggccccaggcgggctggggtggcgatcgggggggaaaatc

SEQ ID NO: 446660 - DNA, 120 bp, Artificial Sequence
  ENSG00000154845_36 (sequence is synthesized)
ctgggggagggagacgcccggagtaacgcccaagttcgctttccgcccttcgctctcttctcccggcgcccccgaatcgcctgcgggctcagcagtggcgcggctgttttggaaggagaa

SEQ ID NO: 446661 - DNA, 120 bp, Artificial Sequence
  ENSG00000154845_37 (sequence is synthesized)
gcggtggggcaggatttgaagtggggtttgggtgtgtttctgcccctggtgtccccttcccccgtcactctaggaaggaagaggctcgcgcgggaggtgtgtttccttagagtcgctctt

SEQ ID NO: 446662 - DNA, 120 bp, Artificial Sequence
  ENSG00000154845_38 (sequence is synthesized)
tatccactttaaaggaggtattattaacaggcacaatctgagtcaccaagttttattcataatcacagcatgagcagttttgtacttgtttattctttgatcctagtaagcatacaacat

SEQ ID NO: 446663 - DNA, 120 bp, Artificial Sequence
  ENSG00000154845_39 (sequence is synthesized)
gtaacttttaaatttttttgcataaaaacacaacaaaattctgccgtaatctaaatctttatcttctgctatcaccaagagaggtttctttgtgtttctatgtaagaaaacacagccata

SEQ ID NO: 446664 - DNA, 120 bp, Artificial Sequence
  ENSG00000154845_40 (sequence is synthesized)
agttgatgttaagatgcaacttaaaaaagaaatggtcccataattatactctcacttttaaaacagtattagatgatagtttacagacatttgtatctttttctttttcaaaattattga

SEQ ID NO: 446665 - DNA, 120 bp, Artificial Sequence
  ENSG00000154845_41 (sequence is synthesized)
cttcttcatattgacaaaagaagagaatatctttatcaacttcaggagtttttggtgacagataatagtagaaattggcggtttcgagctgaactggctgaacaaagtttcttctgttcg

SEQ ID NO: 446666 - DNA, 120 bp, Artificial Sequence
  ENSG00000154845_42 (sequence is synthesized)
agtagactcaatgttaatgtagctcactgcagtgaaatagtcttactggaaacaaagccctttatcaagaataattaactcttcccttttctttttggagaggtgctttgtttctgatcg

SEQ ID NO: 446667 - DNA, 120 bp, Artificial Sequence
  ENSG00000154845_43 (sequence is synthesized)
gaccatttcactgcagcaagcaacacagtattctgagcagaagatcgggacttgaggccatgttgcggagggccagtgacattatctggactctggagtgtgaggaatatggactccact

SEQ ID NO: 446668 - DNA, 120 bp, Artificial Sequence
  ENSG00000154845_44 (sequence is synthesized)
cagtgtacttggggcttcagtttttctcgctgtgggctgccactaccattgtcgtttgctgagggtggcagctggggtaccagtggtcttctagtgtgagtattccacccggcgtttagc

SEQ ID NO: 446669 - DNA, 120 bp, Artificial Sequence
  ENSG00000154845_45 (sequence is synthesized)
ggtacctgcacccctgcgtaatgggtgggacctcctatctgtgcttggtctcgggcaggacttcctacagctcctcctggaataaggagcattagttctcctctcccacagttgcagtat

SEQ ID NO: 446670 - DNA, 120 bp, Artificial Sequence
  ENSG00000154845_46 (sequence is synthesized)
ttttgctgggcccacagggtggacaggctttggggcccctccaccagcaggttaagccttttgctttgcacgagaaaagggcccagcagagtgcttgatgattcatggctgtcagtcagt

SEQ ID NO: 446671 - DNA, 120 bp, Artificial Sequence
  ENSG00000154845_47 (sequence is synthesized)
tgcttctgcctgctatgagacatctctcctgtttttcctgaccatctttcttgaagcacccatgggaggcaggtaccctgtggaagtcagaaggttgtctgggaatgtgagctccctgtg

SEQ ID NO: 446672 - DNA, 120 bp, Artificial Sequence
  ENSG00000154845_48 (sequence is synthesized)
tcgggcacatctggctttgtttgagccaccccatgctcctgccagccaccatctggccctgggcagctgactgcaattcgagctgatttctccctgccctgttaggtgctagcaggtgtc

SEQ ID NO: 446673 - DNA, 120 bp, Artificial Sequence
  ENSG00000154845_49 (sequence is synthesized)
ctgtccatccgggctctgctgaggggcagttctctttcccatcttgggaagttaggttgtttgtgtgctttgcaaccccagctctctgatgggctcaagaaaagatcttgaagtttatgt

SEQ ID NO: 446674 - DNA, 120 bp, Artificial Sequence
  ENSG00000154845_50 (sequence is synthesized)
agctttttctactgtagggtcagtgacgttctttgcagttttctgtattctaagcagaaactggtcctatttggaatttttattttgaattttgtcagaaaataagtgtgtctctttgag

SEQ ID NO: 446675 - DNA, 120 bp, Artificial Sequence
  ENSG00000154845_51 (sequence is synthesized)
gatgcatatttgtatacacaggtgcatttatcattgctgcataatctatattcatgttacagttgactttctgcttattagaaatgtaaatcctcttgaacataaaatctgaaaggcaaa

SEQ ID NO: 446676 - DNA, 120 bp, Artificial Sequence
  ENSG00000154845_52 (sequence is synthesized)
agtctcacatccaaggtatttcttcaaggccatcattgaagctttcaggttagcttggtagatgtcatgaaagtctcagggcccctcagatgtgatgggaaggttgctggaggacaccct

SEQ ID NO: 446677 - DNA, 120 bp, Artificial Sequence
  ENSG00000154845_53 (sequence is synthesized)
ccctctgttatccctagcaaatcccttccaggaaggctcctcagagcctcgacaggtacacagtggactccctccctctgcggggacttcttactgagaaacttgattgtagatggaagc

SEQ ID NO: 446678 - DNA, 120 bp, Artificial Sequence
  ENSG00000154845_54 (sequence is synthesized)
ttctcagcacattccaaactgtgaccatggatcagtgtgggccatgttccagttgaacatactaggaagtgctttgctctgtctcagtccccatggatgcagaactctacagcttttgtt

SEQ ID NO: 446679 - DNA, 120 bp, Artificial Sequence
  ENSG00000154845_55 (sequence is synthesized)
ttccttacactctaaggaacttgaatagcatgtaagtgcatttccagatacacagagactggaggtaactgtacaggagaggtctgcttaatcactcctctttgcgtatgtttgagacag

SEQ ID NO: 446680 - DNA, 120 bp, Artificial Sequence
  ENSG00000154845_56 (sequence is synthesized)
gcccggccgggttccggcactcgccgcagggtcccggccggcggcaggttgcgcgcccccgtccgcagcgctcggcgtgagggcggctcgggaggagggtacctctcgctgcttcaggag

SEQ ID NO: 446681 - DNA, 120 bp, Artificial Sequence
  ENSG00000154845_57 (sequence is synthesized)
atgtagccccggctccccgggcggccgcggaggagggggcgaccacaagatggcggacctctcgctgcttcaggaggacctgcaggaggacgcagacggatgattggagaaatggccctg

SEQ ID NO: 446682 - DNA, 120 bp, Artificial Sequence
  ENSG00000154845_58 (sequence is synthesized)
attatgttacctcgaggagggctttttatatttatgttcgacttcgtaaatagaagattcatttattcagcaagtatttatgactggagcaaaaacttctcactcctgaaggatgaaatg

SEQ ID NO: 446683 - DNA, 120 bp, Artificial Sequence
  ENSG00000154845_59 (sequence is synthesized)
gtttactgaaattgactccttttaataagccggaggcagctccagcaactagatagcatttctcttttcatactaacgcagaataatgtacagtagcagataaacatttttaatctcatg

SEQ ID NO: 446684 - DNA, 120 bp, Artificial Sequence
  ENSG00000154845_60 (sequence is synthesized)
aaagcatattagttttctactttttctcttgaaggactaatgatttaccacagtagaaatttttttccagctttttgattgcagtgtcaaaaaagtatatatttcattgataacgtacag

SEQ ID NO: 446685 - DNA, 120 bp, Artificial Sequence
  ENSG00000154845_61 (sequence is synthesized)
tttctttgcaaaaaaaaaaattaccattaattaccattgcttttctgccactggacataattttggtattcatataaattgcttattgggaagtacattattccttcaacacatgatgtt

SEQ ID NO: 446686 - DNA, 120 bp, Artificial Sequence
  ENSG00000154845_62 (sequence is synthesized)
aggaacagaaccttatagtagcctggctgtttataggatcatctgcccccattgttgggcatctggtggcccctctctcccagctagccaagcccctccttacactggcatgcaccacac

SEQ ID NO: 446687 - DNA, 120 bp, Artificial Sequence
  ENSG00000154845_63 (sequence is synthesized)
aacagtcttataaaggagaaaactgaggccagatgagagtggctgagtggcttttacagctctgatttataattaataagccctggactttgtctcacaagatgaaatgttgacgcccct

SEQ ID NO: 446688 - DNA, 80 bp, Artificial Sequence
  ENSG00000154856_0 (sequence is synthesized)
gaagagacgctgcagctgcggtggcggtggcggccactgcagctcagagcggcgcacgcggcggccggggcgggacgcgg

SEQ ID NO: 446689 - DNA, 80 bp, Artificial Sequence
  ENSG00000154856_1 (sequence is synthesized)
agaagtcggggcgggcggcagagaggccgggacgcggaccgggccggggcgcccacagccgcccgacggcgcccagagag

SEQ ID NO: 446690 - DNA, 120 bp, Artificial Sequence
  ENSG00000154856_2 (sequence is synthesized)
cctggcccggccgcacccggccggaggcggagggcagagcgcgcgcccagttgcccgggcaccaaatcggagcgcggcgtgcgggaggccccagagcaggactggaaatgtcctggccgc

SEQ ID NO: 446691 - DNA, 120 bp, Artificial Sequence
  ENSG00000154856_3 (sequence is synthesized)
gccgcctcctgctcagatacctgttcccggccctcctgcttcacgggctgggagagggttctgccctccttcatccagacagcaggtctcatcctaggtccttagagaaaagtgcctgga

SEQ ID NO: 446692 - DNA, 120 bp, Artificial Sequence
  ENSG00000154856_4 (sequence is synthesized)
gggcttttaaggagtcacagtgccatcacatgctcaaacatctccacaatggtgcaaggatcacagtgcagatgccacctacaatcgagggccactgggtctccacaggctgtgaagtaa

SEQ ID NO: 446693 - DNA, 120 bp, Artificial Sequence
  ENSG00000154856_5 (sequence is synthesized)
ggtcaggcccagagttcatcacaaggtcctacagattctaccacaataacaccttcaaggcctaccaattttattatggcagcaaccggtgcacaaatcccacttatactctcatcatcc

SEQ ID NO: 446694 - DNA, 120 bp, Artificial Sequence
  ENSG00000154856_6 (sequence is synthesized)
ggggcaagatccgcctccgccaggcctcctggatcatccgagggggcacggaagccgactaccagctgcacaacgtccaggtgatctgccacacagaggcggtggccgagaagctcggcc

SEQ ID NO: 446695 - DNA, 120 bp, Artificial Sequence
  ENSG00000154856_7 (sequence is synthesized)
agcaggtgaaccgcacatgcccgggcttcctcgcagacgggggtccctgggtgcaggacgtggcctatgacctctggcgagaggagaacggctgtgagtgcaccaaggccgtgaactttg

SEQ ID NO: 446696 - DNA, 120 bp, Artificial Sequence
  ENSG00000154856_8 (sequence is synthesized)
ccatgcatgaacttcagctcatccgggtggagaagcagtaccttcaccacaacctcgaccacctggtcgaggagctcttccttggtgacattcacactgatgccacccagaggatgttct

SEQ ID NO: 446697 - DNA, 120 bp, Artificial Sequence
  ENSG00000154856_9 (sequence is synthesized)
accggccctccagttaccagccccctctgcagaatgccaagaaccacgaccatgcctgcatcgcctgtcggatcatctatcggtcagacgagcaccaccctcccatcctgcccccaaagg

SEQ ID NO: 446698 - DNA, 120 bp, Artificial Sequence
  ENSG00000154856_10 (sequence is synthesized)
cagacctgaccatcggcctgcacggggagtgggtgagccagcgctgtgaggtgcgccccgaagtcctcttcctcacccgccacttcatcttccatgacaacaacaacacctgggagggcc

SEQ ID NO: 446699 - DNA, 120 bp, Artificial Sequence
  ENSG00000154856_11 (sequence is synthesized)
actactaccactactcagacccggtgtgcaagcaccccaccttctccatctacgcccggggccgctacagccgcggcgtcctctcgtccagggtcatgggaggcaccgagttcgtgttca

SEQ ID NO: 446700 - DNA, 120 bp, Artificial Sequence
  ENSG00000154856_12 (sequence is synthesized)
aagtgaatcacatgaaggtcacccccatggatgcggccacagcctcactgctcaacgtcttcaacgggaatgagtgcggggccgagggctcctggcaggtgggcatccagcaggatgtga

SEQ ID NO: 446701 - DNA, 120 bp, Artificial Sequence
  ENSG00000154856_13 (sequence is synthesized)
cccacaccaatggctgcgtggccctgggcatcaaactacctcacacggagtacgagatcttcaaaatggaacaggatgcccgggggcgctatctgctgttcaacggtcagaggcccagcg

SEQ ID NO: 446702 - DNA, 120 bp, Artificial Sequence
  ENSG00000154856_14 (sequence is synthesized)
acgggtccagcccagacaggccagagaagagagccacgtcctaccagatgcccttggtccagtgtgcctcctcttcgccgagggcagaggacctcgcagaagacagtggaagcagcctgt

SEQ ID NO: 446703 - DNA, 120 bp, Artificial Sequence
  ENSG00000154856_15 (sequence is synthesized)
cgcagatagaagttttagaaagttctatttttccaaaccaggattccttactattgacagatttgctttaccaaaagaaaagacatttattcttttgatgcacttgaatgccagagaact

SEQ ID NO: 446704 - DNA, 120 bp, Artificial Sequence
  ENSG00000154856_16 (sequence is synthesized)
gtccttctttttctcctctccctccctcccagcccctgagtcatgaacagcaaggagtgtttgaagtttctgctttgaactccgtccagcctgatccctggcctgagcaacttcacaaca

SEQ ID NO: 446705 - DNA, 120 bp, Artificial Sequence
  ENSG00000154856_17 (sequence is synthesized)
gtaattgcactttaagacagcctagagttctggacgagcgtgtttggtagcagggatgaaagctagggcctcttatttttttctcttaattattattatatttctgagttaaacttagaa

SEQ ID NO: 446706 - DNA, 120 bp, Artificial Sequence
  ENSG00000154856_18 (sequence is synthesized)
gaaacaactatcaagctacaacttttcctgccattttcctgtggttgcagcctgtcttcctttgaaattgttttactctctgagttttatatgctggaatccaatgcagagttggtttgg

SEQ ID NO: 446707 - DNA, 120 bp, Artificial Sequence
  ENSG00000154856_19 (sequence is synthesized)
gactgtgatcaagacaccttttattaataaagaagagacacaggtgtagatatgtatatacaaaaagatgtacggtctggccaaaccaccttcccagcctttatgcaaaaaaaggggaga

SEQ ID NO: 446708 - DNA, 120 bp, Artificial Sequence
  ENSG00000154856_20 (sequence is synthesized)
atcaaagctttcatttcagaaatgttgcgtggaaaagtatctgtaattaaagtttcgaagtaatttaacctatttttacatcatttgtcttaccttgttgagagaggagactggcttgtt

SEQ ID NO: 446709 - DNA, 120 bp, Artificial Sequence
  ENSG00000154856_21 (sequence is synthesized)
ggcttctggttgttgcaggaggcatgtggcttcctgccttctcagtagacaggatcattaggaaaatagcaacatcaatcctgttacacaggagcagtgacacgggtggctgcagtgtgg

SEQ ID NO: 446710 - DNA, 120 bp, Artificial Sequence
  ENSG00000154856_22 (sequence is synthesized)
tacatgccacacaaatgatagagaaagtgcccgttcattgcagtttcctcttcctgggggacctgagccctgactcactgtcttattaggggcaggcggaagaagctgcactctggcatc

SEQ ID NO: 446711 - DNA, 120 bp, Artificial Sequence
  ENSG00000154856_23 (sequence is synthesized)
catgccaccttctaagatgaacatgcagagacagaacttcagctgctcagagagagtgcagtgggcatggtctgccctgggggcttgctccattacaccctgacttggcatgcaaccgag

SEQ ID NO: 446712 - DNA, 120 bp, Artificial Sequence
  ENSG00000154856_24 (sequence is synthesized)
tctttgtgtaaagccatcctgtcattgcacatactggctcactcagtgtctttcctgctgctgatgtggctctgtgctggcagtttcagggtcagtgtgctgctttcctagggacattag

SEQ ID NO: 446713 - DNA, 120 bp, Artificial Sequence
  ENSG00000154856_25 (sequence is synthesized)
aagggcgcaggagtgcatgtctgcccattcctttggagtatcgcagatgatgctatacgataccaagtgttaccgctcacagagactgggaaagggaaatgggagtaaccgaaagccaga

SEQ ID NO: 446714 - DNA, 120 bp, Artificial Sequence
  ENSG00000154856_26 (sequence is synthesized)
tggaacgaaagcaaacatggaaaccatgatcacggcaaagagccatccttgtatttaagaagtaactttggccaggtgtgatggctcacgccgtaaccccagcactttgggagaccaagg

SEQ ID NO: 446715 - DNA, 120 bp, Artificial Sequence
  ENSG00000154856_27 (sequence is synthesized)
aaagtaactttatgaaatgccacagcattcagtgtggcattaagttacaacgaccacatagagtaccaaagtgcttcaggttatattttaagttgtggtgcagactgagggggcttattc

SEQ ID NO: 446716 - DNA, 120 bp, Artificial Sequence
  ENSG00000154856_28 (sequence is synthesized)
aaaatgaaaatactaacttaaatggccaccaagttcaataaacaaagatgtcaaaatactctcagaaatacaactgatactatctttaaaagacgtaataaaatcatgtgaaaaactgta

SEQ ID NO: 446717 - DNA, 72 bp, Artificial Sequence
  ENSG00000154856_29 (sequence is synthesized)
ccagaggatgttctaccggccctccagttaccagccccctctgcagaatgcccgacctccagtgatccgccc

SEQ ID NO: 446718 - DNA, 120 bp, Artificial Sequence
  ENSG00000154856_30 (sequence is synthesized)
tgcacaacgtccagggtcatgggaggcaccgagttcgtgttcaaagtgaatcacatgaaggtcacccccatggatgcggccacagcctcactgctcaacgtcttcaacgggaatgagtgc

SEQ ID NO: 446719 - DNA, 120 bp, Artificial Sequence
  ENSG00000154856_31 (sequence is synthesized)
ttcaggaagttttcagatccttccccaggacagctctgagaaggaacaaaatggactcagccattggtgtctttccagacccgggcaccagaaagactgggcactgtgtgcccacgcggg

SEQ ID NO: 446720 - DNA, 120 bp, Artificial Sequence
  ENSG00000154856_32 (sequence is synthesized)
cccagccacagcaggttgtccgagctgtctgtggccgccagcggagacaggaagaaaggctgggagaacgtcttcaaagaccgtacacgcctgcccaggagaggctggaacctcctcctt

SEQ ID NO: 446721 - DNA, 120 bp, Artificial Sequence
  ENSG00000154856_33 (sequence is synthesized)
tgaactcttctacttccctaattgctggtccatagagaccaagctgaaaattagtttaaatgctaaattgagtttcaaaccacgagcctcagcccctctagaaacaggacaccgtgtaaa

SEQ ID NO: 446722 - DNA, 120 bp, Artificial Sequence
  ENSG00000154856_34 (sequence is synthesized)
aatagaaactttaagtcaacttgtttttctaagctttatacagctttgctgtgaggtccagagtcctttggcaaataagtgacgtttgaagagattcaggtgtgctgggagggttcattc

SEQ ID NO: 446723 - DNA, 120 bp, Artificial Sequence
  ENSG00000154856_35 (sequence is synthesized)
aggatggaactggctactcttcattataaaaaagtcaagacagcgtaaagtaaccctgaaagaagatgctttgcctgaatcaagtttagcgtcagagcagccataatcctctgccgagat

SEQ ID NO: 446724 - DNA, 120 bp, Artificial Sequence
  ENSG00000154856_36 (sequence is synthesized)
tcttcagaactatgcagttggaggggtagaagccaggctcattctttcagggatggaatcaaatggtaattaaaagcaaatgattgccaaggtcgttagagatgccagagcctcaggatc

SEQ ID NO: 446725 - DNA, 120 bp, Artificial Sequence
  ENSG00000154856_37 (sequence is synthesized)
agactcgtaagcaaatggaattggtctttctccaaaatcctgcactgatttaaccacaggatcgtaaatcaaaggggctgtctgaaaaccagacagccttccccaggctgtgcatctgaa

SEQ ID NO: 446726 - DNA, 120 bp, Artificial Sequence
  ENSG00000154856_38 (sequence is synthesized)
cgggctttgggagtacctgagaactgcagaaaaagagcatgctgtgctttctctctcaaattctttaggagccgctaggctggagccagcatatgtttttgaggtagcttgcctctcaga

SEQ ID NO: 446727 - DNA, 120 bp, Artificial Sequence
  ENSG00000154856_39 (sequence is synthesized)
ggctttttagaggatgtgtgacctgtgcagcttcctgatgtcagtgacaccatggggatgttgagtcaggtggtcttggagcctggacttttcagcctagctgcaggagccagcatggag

SEQ ID NO: 446728 - DNA, 120 bp, Artificial Sequence
  ENSG00000154856_40 (sequence is synthesized)
ggacgtctcctgagcatgtgcttggtgtggctcctgggtgggtgggcggctgcgtctctggggtatagaaggagccaggtgcttgtggaagaattccataccacttttctttctgctagt

SEQ ID NO: 446729 - DNA, 120 bp, Artificial Sequence
  ENSG00000154856_41 (sequence is synthesized)
gtggatttgcagaggtgatgggagatggacgaggtggtggacaaccagaagttcaagaagtcatgacctaagacagtttcaagaactagtcttacaggaaggagaaccctagaagaaaac

SEQ ID NO: 446730 - DNA, 120 bp, Artificial Sequence
  ENSG00000154856_42 (sequence is synthesized)
tgtgactgctccctggagccaggtgtttcctataaggcagcaaatgttgcacaattctatgaaaaaacagagctggcaattgggataggttgagggggtcttgaccctgaaggggttgct

SEQ ID NO: 446731 - DNA, 120 bp, Artificial Sequence
  ENSG00000154856_43 (sequence is synthesized)
tttgtggaccttttatctgggccgaggtgtgcagtgtcacaatcactgggctacaaggctgctgatagacacttctattgcagaaacagctcattatatttcttgactccagagtatttc

SEQ ID NO: 446732 - DNA, 120 bp, Artificial Sequence
  ENSG00000154856_44 (sequence is synthesized)
agcagataaacaggcatgcaaggttgctttatttaaggagttaggggaccaggaaatatttgttgtcagggacaatgcaagtggtaaatattttatcccttaaaaggcaagaaagctcag

SEQ ID NO: 446733 - DNA, 120 bp, Artificial Sequence
  ENSG00000154856_45 (sequence is synthesized)
aggacatgaggaaaccctgcaaaagcaggaaattggccatttaaaaagtacgcatgaggtccctactccagggagtgtttgctgagccccaggggagaaaggaagaggatgggccagcca

SEQ ID NO: 446734 - DNA, 120 bp, Artificial Sequence
  ENSG00000154856_46 (sequence is synthesized)
ggagtgcccagtggatttacagcagatttaataagtctactttaattatttaaatgaatcaaaatgcataggagtggaagaaagaaacaagtaaaaagaaataaaaattcttttcggaaa

SEQ ID NO: 446735 - DNA, 120 bp, Artificial Sequence
  ENSG00000154864_0 (sequence is synthesized)
atggcctcagaagtggtgtgcgggctcatcttcaggctgctgctgcccatctgcctggcagtagcatgtgcattccgatacaatgggctctcctttgtctaccttatctacctcttgctc

SEQ ID NO: 446736 - DNA, 120 bp, Artificial Sequence
  ENSG00000154864_1 (sequence is synthesized)
attcctctgttctcagaaccaacaaaaacgacgatgcaaggacatacgggacggttattaaagtctctgtgcttcatcagtctttccttcctgttgctgcacatcattttccacatcacg

SEQ ID NO: 446737 - DNA, 120 bp, Artificial Sequence
  ENSG00000154864_2 (sequence is synthesized)
ttggtgagccttgaagctcaacatcgtattgcacctggctacaactgctcaacatgggaaaagacattccggcagatcggctttgaaagcttaaagggagctgatgctggcaatgggatc

SEQ ID NO: 446738 - DNA, 120 bp, Artificial Sequence
  ENSG00000154864_3 (sequence is synthesized)
agagtgtttgtacctgacatcgggatgttcattgctagtctgaccatctggctcctctgtagaaacattgttcagaaacctgtgacagacgaagcagcacagagtaacccggagtttgaa

SEQ ID NO: 446739 - DNA, 120 bp, Artificial Sequence
  ENSG00000154864_4 (sequence is synthesized)
aatgaagaattggctgaaggagaaaaaattgattcagaagaggcactgatctatgaagaggatttcaatggaggagatggtgttgaaggcgagttggaagaaagcacgaagttaaaaatg

SEQ ID NO: 446740 - DNA, 120 bp, Artificial Sequence
  ENSG00000154864_5 (sequence is synthesized)
ttccgcaggcttgcctctgtggcctctaagctcaaggagttcattggcaacatgatcaccactgctgggaaagtcgttgttaccatcttactgggctcctcgggcatgatgttgccgtct

SEQ ID NO: 446741 - DNA, 120 bp, Artificial Sequence
  ENSG00000154864_6 (sequence is synthesized)
ttgacatcatctgtgtatttttttgtatttttgggtctgtgcacctggtggtcctggtgccggacgttcgacccattgctgttcagctgtctctgtgttctgctggctattttcactgct

SEQ ID NO: 446742 - DNA, 120 bp, Artificial Sequence
  ENSG00000154864_7 (sequence is synthesized)
ggacatttgattggactttatttataccagttccaattctttcaagaggcagttccacccaatgactactatgcaaggttgtttggtatcaagtcagtaattcaaacggactgttcaagt

SEQ ID NO: 446743 - DNA, 120 bp, Artificial Sequence
  ENSG00000154864_8 (sequence is synthesized)
acttggaagatcatagtgaacccggacctgtcgtggtaccaccacgccaaccctatcctcctgctggtgatgtactacactctggccactctgatccgcatctggctgcaagagcccctt

SEQ ID NO: 446744 - DNA, 120 bp, Artificial Sequence
  ENSG00000154864_9 (sequence is synthesized)
gtgcaggatgaggggaccaaagaagaggacaaagccctggcttgtagccccatccaaataacagcggggaggaggcggagcctgtggtacgcaacccattaccccactgatgagagaaaa

SEQ ID NO: 446745 - DNA, 120 bp, Artificial Sequence
  ENSG00000154864_10 (sequence is synthesized)
cttttatccatgacccaggatgactacaaaccatctgatggcctgctggtgactgtgaacggcaaccccgtggattaccacaccatccacccaagcctgcccatggagaacggccctggc

SEQ ID NO: 446746 - DNA, 120 bp, Artificial Sequence
  ENSG00000154864_11 (sequence is synthesized)
aaagccgacctctactccacccctcagtaccggtgggagccctctgatgaatcctcagaaaagcgagaggaggaagaggaagagaaagaagaatttgaagaagaaaggagccgtgaggaa

SEQ ID NO: 446747 - DNA, 120 bp, Artificial Sequence
  ENSG00000154864_12 (sequence is synthesized)
aaaagaagtatcaaagttcatgccatggtctccgtattccaatttattatgaaacaaagttacatctgtgccctcatagctatgatggcctggagcatcacctatcacagctggctgacc

SEQ ID NO: 446748 - DNA, 120 bp, Artificial Sequence
  ENSG00000154864_13 (sequence is synthesized)
ttcgtgctgctgatctggtcgtgcactctttggatgattcgcaacagaagaaaatatgccatgatcagctctcccttcatggtggtttatggaaacctattgttgatattacagtatata

SEQ ID NO: 446749 - DNA, 120 bp, Artificial Sequence
  ENSG00000154864_14 (sequence is synthesized)
tggagttttgaacttcctgaaattaaaaaagttccaggatttttagaaaagaaagagccaggagaacttgcttccaaaatccttttcaccattactttttggctactgctgaggcagcac

SEQ ID NO: 446750 - DNA, 120 bp, Artificial Sequence
  ENSG00000154864_15 (sequence is synthesized)
ctcacagagcaaaaagctctgcaagaaaaggaagctcttttatcggaagtcaaaattggcagtcaggaaaatgaagaaaaagatgaggaacttcaagatatacaagtggaaggagagccc

SEQ ID NO: 446751 - DNA, 120 bp, Artificial Sequence
  ENSG00000154864_16 (sequence is synthesized)
aaagaggaggaagaagaggaagcgaaggaagagaagcaagagagaaagaaggtagagcaagaggaagctgaagaagaagatgagcaggacatcatgaaagtcctgggcaatctggtggtg

SEQ ID NO: 446752 - DNA, 120 bp, Artificial Sequence
  ENSG00000154864_17 (sequence is synthesized)
gccatgttcatcaagtactggatctacgtctgcggaggcatgttcttcttcgtcagcttcgagggtaaaatcgtaatgtacaaaatcatctacatggtgctgttcctgttctgtgtggcc

SEQ ID NO: 446753 - DNA, 120 bp, Artificial Sequence
  ENSG00000154864_18 (sequence is synthesized)
ctataccaggtgcactatgaatggtggaggaaaattctaaaatatttttggatgtcagtggttatttacactatgctggtgcttatctttatatacacatatcagtttgagaacttccca

SEQ ID NO: 446754 - DNA, 120 bp, Artificial Sequence
  ENSG00000154864_19 (sequence is synthesized)
ggcctgtggcaaaatatgactggactgaaaaaagaaaagcttgaggatcttggcttaaagcagtttactgtggctgaactattcactcgcatattcatcccaacctcctttctgctggtg

SEQ ID NO: 446755 - DNA, 120 bp, Artificial Sequence
  ENSG00000154864_20 (sequence is synthesized)
tgcattttacacctgcactacttccatgaccggttccttgaactcacagacctcaagtccattcccagcaaagaagacaacaccatctacagactggcccacccggaaggaagcctcccg

SEQ ID NO: 446756 - DNA, 120 bp, Artificial Sequence
  ENSG00000154864_21 (sequence is synthesized)
gacctcaccatgatgcatctgactgccagcctggagaagccggaggtgaggaagttggctgagcctggggaggagaagcttgagggctactctgaaaaagcccagaagggtgatcttggg

SEQ ID NO: 446757 - DNA, 120 bp, Artificial Sequence
  ENSG00000154864_22 (sequence is synthesized)
aaagacagcgaggagtcagaggaggacggagaggaagaggaggaatccgaggaggaggaagaaacatcagacttaaggaacaaatggcacctggtgattgaccgcctcactgtgctcttc

SEQ ID NO: 446758 - DNA, 120 bp, Artificial Sequence
  ENSG00000154864_23 (sequence is synthesized)
ttaaaattcctggagtattttcacaagctgcaggtgttcatgtggtggattttggagttgcacatcatcaaaatcgtttcctcttacattatctgggtttctgtgaaagaggtgtctctg

SEQ ID NO: 446759 - DNA, 120 bp, Artificial Sequence
  ENSG00000154864_24 (sequence is synthesized)
ttcaactatgtatttttgatttcttgggcttttgctctgccgtacgccaagctgcgccgtctggcttcaagtgtctgcacagtctggacgtgtgtgatcatcgtctgcaaaatgttgtac

SEQ ID NO: 446760 - DNA, 120 bp, Artificial Sequence
  ENSG00000154864_25 (sequence is synthesized)
cagctccaaaccattaagcctgagaacttctctgttaactgttccttgccaaatgaaaatcaaacaaacatcccctttaatgagttgaacaagtctctgctctacagcgctcctatcgat

SEQ ID NO: 446761 - DNA, 120 bp, Artificial Sequence
  ENSG00000154864_26 (sequence is synthesized)
cctacagagtgggtcggcctgcggaagtcttcgcctctgctagtctacctgaggaataacctcctgatgctggctatcctggcctttgaagtcaccatttaccgccatcaggaatactat

SEQ ID NO: 446762 - DNA, 120 bp, Artificial Sequence
  ENSG00000154864_27 (sequence is synthesized)
cgaggtcgaaataacctgacggcccctgtgtctagaactatctttcatgacattacaagactacatctagatgatggacttattaattgtgccaaatatttcattaattacttcttttac

SEQ ID NO: 446763 - DNA, 120 bp, Artificial Sequence
  ENSG00000154864_28 (sequence is synthesized)
aagtttggtctggagacctgtttcctaatgtcagttaacgtcattggccagcgaatggatttctatgccatgatccacgcctgctggctgatcgctgtcttatatagacgcagaaggaaa

SEQ ID NO: 446764 - DNA, 120 bp, Artificial Sequence
  ENSG00000154864_29 (sequence is synthesized)
gccatcgcagagatctggcccaagtactgctgcttcctggcatgcatcatcaccttccagtatttcatctgcattggcatcccacctgctccttgccgagattacccgtggagattcaag

SEQ ID NO: 446765 - DNA, 120 bp, Artificial Sequence
  ENSG00000154864_30 (sequence is synthesized)
ggtgccagcttcaatgacaacatcataaagtggctgtacttcccagatttcattgtgcggcccaaccctgtgtttctcgtctatgacttcatgctgcttctgtgtgcctccttacaacgg

SEQ ID NO: 446766 - DNA, 120 bp, Artificial Sequence
  ENSG00000154864_31 (sequence is synthesized)
cagatttttgaggatgagaacaaggctgcagtgcgaatcatggcaggtgacaatgtcgagatctgcatgaaccttgatgcggcctccttcagccaacataaccctgtgccagattttatt

SEQ ID NO: 446767 - DNA, 120 bp, Artificial Sequence
  ENSG00000154864_32 (sequence is synthesized)
cactgcagatcttacttagacatgtccaaagtgatcatcttcagctacctcttctggtttgtgctcaccatcatcttcatcactgggaccaccaggatcagcatcttttgcatggggtac

SEQ ID NO: 446768 - DNA, 120 bp, Artificial Sequence
  ENSG00000154864_33 (sequence is synthesized)
ctggtggcctgtttctacttcctgctctttgggggcgatttgctgttgaaacccatcaagagcatcctgcgctactgggactggctgatcgcatacaacgtttttgtgattacgatgaaa

SEQ ID NO: 446769 - DNA, 120 bp, Artificial Sequence
  ENSG00000154864_34 (sequence is synthesized)
tatcaaatgcctgctgctaattcaccctgtacacttcccagtggggaagcaggaatcatttgggacagcatatgttttgccttcctcctgctgcaaagaagagttttcatgagttattat

SEQ ID NO: 446770 - DNA, 120 bp, Artificial Sequence
  ENSG00000154864_35 (sequence is synthesized)
tttctacatgttgtggctgatataaaagcttcccagattctggcatcaagaggagctgaacttttccaggccacaattgtaaaagctgtaaaggcaagaattgaggaagagaagaagtcc

SEQ ID NO: 446771 - DNA, 120 bp, Artificial Sequence
  ENSG00000154864_36 (sequence is synthesized)
atggaccagctgaagcgacagatggatcgcatcaaggccaggcaacagaaatataaaaagggtaaggagaggatgctgagcttgacccaggagccaggggaaggccaggacatgcaaaaa

SEQ ID NO: 446772 - DNA, 120 bp, Artificial Sequence
  ENSG00000154864_37 (sequence is synthesized)
ctctctgaagaggatgatgaaagagaagcagacaaacagaaagccaagggcaaaaaaaagcagtggtggcggccttgggttgatcatgcttccatggtcaggagtggagattattatttg

SEQ ID NO: 446773 - DNA, 120 bp, Artificial Sequence
  ENSG00000154864_38 (sequence is synthesized)
tttgaaacggatagtgaagaggaggaagaggaagaattaaagaaggaagatgaagaacctccacgaaggtcagcattccagtttgtttatcaagcctggattactgatcctaaaacagca

SEQ ID NO: 446774 - DNA, 120 bp, Artificial Sequence
  ENSG00000154864_39 (sequence is synthesized)
ctccgacaaagacacaaagagaaaaaaaggtctgcaagagaagaacggaaacgaaggcggaaaggatccaaggagggtcctgtggaatgggaagaccgggaggatgaaccaatcaaaaag

SEQ ID NO: 446775 - DNA, 120 bp, Artificial Sequence
  ENSG00000154864_40 (sequence is synthesized)
aaatccgatggaccagataatatcatcaagaggatatttaatattttgaaatttacctgggtcctatttctggcaacagtggacagtttcactacttggcttaactccatttcaagggag

SEQ ID NO: 446776 - DNA, 120 bp, Artificial Sequence
  ENSG00000154864_41 (sequence is synthesized)
catattgatatatctacagttctgagaattgaacgatgcatgctgaccagagaaattaagaagggcaatgttccaactcgggagagcatccacatgtactatcagaaccacatcatgaac

SEQ ID NO: 446777 - DNA, 120 bp, Artificial Sequence
  ENSG00000154864_42 (sequence is synthesized)
ctttccagagagtcgggactggacaccattgacgagcatcccggagctgcttcaggtgcacagacagcccacaggatggatagtttagattcacatgacagtatctccagcgagcccacg

SEQ ID NO: 446778 - DNA, 120 bp, Artificial Sequence
  ENSG00000154864_43 (sequence is synthesized)
cagtgtaccatgctgtactcacgccaggggaccactgagaccatcgaggaggtggaggctgagcaggaggaggaggcagggagcacggcgcctgagcccagggaggccaaggagtacgag

SEQ ID NO: 446779 - DNA, 120 bp, Artificial Sequence
  ENSG00000154864_44 (sequence is synthesized)
gccactgggtacgatgtgggagccatgggtgccgaggaggccagcctcaccccagaggaagagctgacacagttctccaccttggacggggatgtggaggccccaccctcctacagcaag

SEQ ID NO: 446780 - DNA, 120 bp, Artificial Sequence
  ENSG00000154864_45 (sequence is synthesized)
gctgtgagcttcgagcatctgtccttcggctcgcaggacgactctgcaggcaagaaccgtatggcagtcagcccggacgacagccgcaccgacaagctggggtccagcatcttacctccc

SEQ ID NO: 446781 - DNA, 120 bp, Artificial Sequence
  ENSG00000154864_46 (sequence is synthesized)
ctgacccatgagctgacggccagcgagctgctgctgaaaaagatgtttcacgacgatgagcttgaagagtcagagaaattctacgtggggcagccccgatttctgctgctcttctatgcc

SEQ ID NO: 446782 - DNA, 120 bp, Artificial Sequence
  ENSG00000154864_47 (sequence is synthesized)
atgtacaataccctggtggcccgctcggagatggtgtgctacttcgtgatcatcctcaaccacatggtctctgcctccatgatcacgctcctgcttcccatcctcatcttcctctgggcc

SEQ ID NO: 446783 - DNA, 120 bp, Artificial Sequence
  ENSG00000154864_48 (sequence is synthesized)
atgttgtccgtccccaggcccagccgccggttctggatgatggccatcgtctatactgaggtggcaattgtagtcaagtatttcttccaatttgggttctttccctggaataagaatgtg

SEQ ID NO: 446784 - DNA, 120 bp, Artificial Sequence
  ENSG00000154864_49 (sequence is synthesized)
gaggtgaacaaagataaaccgtatcaccccccaaacatcataggagtggaaaagaaggaaggttatgttctctatgacctcatccagctcctggctctgttctttcatcgatcaattttg

SEQ ID NO: 446785 - DNA, 120 bp, Artificial Sequence
  ENSG00000154864_50 (sequence is synthesized)
aagtgccatggcttatgggatgaagatgacatgactgaaagtggcatggccagggaggaatcagatgatgagctctccctcggtcatggcaggagggactcctccgattctctcaagtcc

SEQ ID NO: 446786 - DNA, 120 bp, Artificial Sequence
  ENSG00000154864_51 (sequence is synthesized)
atcaacctggccgcgtctgtggagtcagtgcatgtgaccttcccggagcagcagacagctgtccggaggaagcgctccggcagcagctccgagccatcccagagatccagcttttcttca

SEQ ID NO: 446787 - DNA, 120 bp, Artificial Sequence
  ENSG00000154864_52 (sequence is synthesized)
aacagatcccaaagaggcagcacaagcacccgaaacagcagtcaaaaaggaagcagtgttttgagtattaagcaaaaaggcaaaagggaactttatatggaaaagcttcaagaacattta

SEQ ID NO: 446788 - DNA, 120 bp, Artificial Sequence
  ENSG00000154864_53 (sequence is synthesized)
atcaaagcaaaagcctttaccataaagaagacgctggagatctatgtgcccatcaaacagttcttttacaacctcatccacccggagtatagcgccgtgactgacgtgtatgtactcatg

SEQ ID NO: 446789 - DNA, 120 bp, Artificial Sequence
  ENSG00000154864_54 (sequence is synthesized)
ttcctggctgacactgtggacttcatcatcattgtcttcggcttttgggcctttgggaaacactcagcagctgcagacatcacctcttcactgtcagaggaccaggtcccggggccgttt

SEQ ID NO: 446790 - DNA, 120 bp, Artificial Sequence
  ENSG00000154864_55 (sequence is synthesized)
ttggtgatggtcctcattcagtttggaaccatggtggtggaccgagccctctacctcaggaagactgtactgggaaaggtcatcttccaggtcattcttgtgttcggaattcacttctgg

SEQ ID NO: 446791 - DNA, 120 bp, Artificial Sequence
  ENSG00000154864_56 (sequence is synthesized)
atgttcttcatcttacctggtgtgactgagaggaaattcagccagaacctggttgcccagctttggtactttgtgaaatgtgtttacttcgggttgtctgcttaccagatccgttgtggc

SEQ ID NO: 446792 - DNA, 120 bp, Artificial Sequence
  ENSG00000154864_57 (sequence is synthesized)
tacccaacgcgagtcctggggaacttcctcaccaagagctacaattacgtcaacctcttcttattccaagggtttcgcctcgtgccctttttgactgagctgagggcagtgatggactgg

SEQ ID NO: 446793 - DNA, 120 bp, Artificial Sequence
  ENSG00000154864_58 (sequence is synthesized)
gtgtggacggacacaactttgagcctgtccagctggatctgtgtggaggacatctatgctcacatattcatcctgaagtgttggcgggagtcggagaagagataccctcagccacggggc

SEQ ID NO: 446794 - DNA, 120 bp, Artificial Sequence
  ENSG00000154864_59 (sequence is synthesized)
cagaagaagaagaaagtggtgaagtatggcatgggaggaatgatcatcgtcctgctcatctgcattgtctggtttcctcttctcttcatgtctttgatcaaatctgtggctggggtcatc

SEQ ID NO: 446795 - DNA, 120 bp, Artificial Sequence
  ENSG00000154864_60 (sequence is synthesized)
aaccagcccctggacgtctccgtcacaattaccctgggagggtatcagcctattttcacaatgagtgcccaacaaagccagttgaaagttatggaccagcagagctttaacaaatttata

SEQ ID NO: 446796 - DNA, 120 bp, Artificial Sequence
  ENSG00000154864_61 (sequence is synthesized)
caagctttttctagggacaccggtgctatgcaatttctggaaaattatgaaaaagaagacataacagtagcagaactggaaggaaactcaaattctttgtggaccatcagcccacccagt

SEQ ID NO: 446797 - DNA, 120 bp, Artificial Sequence
  ENSG00000154864_62 (sequence is synthesized)
aagcagaaaatgatacacgaactcctggaccccaatagtagcttctctgttgttttttcatggagtattcagagaaacttaagtctgggtgcaaaatcggaaatagcaacagataagctt

SEQ ID NO: 446798 - DNA, 120 bp, Artificial Sequence
  ENSG00000154864_63 (sequence is synthesized)
tcttttcctcttaaaaatattactcgaaagaatatcgctaaaatgatagcaggcaacagcacagaaagttcaaaaacaccagtgaccatagaaaagatttatccatattatgtgaaagca

SEQ ID NO: 446799 - DNA, 120 bp, Artificial Sequence
  ENSG00000154864_64 (sequence is synthesized)
cctagtgattctaactcaaaacctataaagcaacttttatctgaaaataatttcatggatattaccatcattttgtccagagacaatacaactaaatataacagtgagtggtgggttctc

SEQ ID NO: 446800 - DNA, 120 bp, Artificial Sequence
  ENSG00000154864_65 (sequence is synthesized)
aacctgactggaaacagaatatacaatccgaactctcaggccctggaactggtggtcttcaatgacaaagtcagtcccccaagtctggggttcctggctggctatggtattatgggatta

SEQ ID NO: 446801 - DNA, 120 bp, Artificial Sequence
  ENSG00000154864_66 (sequence is synthesized)
tatgcttcagttgtccttgtgattgggaaatttgtccgtgaattcttcagtgggatttctcactccatcatgtttgaagagcttccaaatgtggatcgaattttgaagttgtgcacagat

SEQ ID NO: 446802 - DNA, 120 bp, Artificial Sequence
  ENSG00000154864_67 (sequence is synthesized)
atttttttagttcgagagacaggagaactggagctagaagaagatctctatgccaaattaatattcctatatcgctcaccagagacaatgatcaaatggactagagaaaaaacaaattga

SEQ ID NO: 446803 - DNA, 120 bp, Artificial Sequence
  ENSG00000154864_68 (sequence is synthesized)
gccccgggagcgtgccctcggggcggagagcgtcgcggcccgcgccgaggcgatgctcgggtggctgcgagctgccggcggcgagaggccatagacgggcatgggccttgcgtcccacca

SEQ ID NO: 446804 - DNA, 120 bp, Artificial Sequence
  ENSG00000154864_69 (sequence is synthesized)
tttctagttcgacggaaatggtttgtttctcttctgataggtagacaaaaggagctgatatccttctgcagtaaaagctaccttgcaagttaaggcactgttgaaaatgttatttgtaac

SEQ ID NO: 446805 - DNA, 120 bp, Artificial Sequence
  ENSG00000154864_70 (sequence is synthesized)
tccatttctctgaaatcagggctacttgctttatgttttagtcaacagtgtctcgcattctgattgatcatgtgaaggaatcatttatgggccccgtccctaagagaaacagaagaggag

SEQ ID NO: 446806 - DNA, 120 bp, Artificial Sequence
  ENSG00000154864_71 (sequence is synthesized)
tcagaaagaaagatgcctgtgttttcctctgtggggcccgtgcacttcctggagagatgctacaatgcaatatacagcgctccatccccactggggaagctgctgtgatgagactagatg

SEQ ID NO: 446807 - DNA, 120 bp, Artificial Sequence
  ENSG00000154864_72 (sequence is synthesized)
agccttcaacacactcagaaaatgcaacagcaatagggggcagacagctcctacctgtgtttctaggagcaaaagagagggaactaattgcccgtgaagacgccagtggaaggatcagcc

SEQ ID NO: 446808 - DNA, 120 bp, Artificial Sequence
  ENSG00000154864_73 (sequence is synthesized)
tcattctaagcaaaaacatagtattagtgatactcttactgccttatcttaaccaaggactaataggatacctttccattaaacaccagtgacttctcaggaaaaaaaaaaaaaaggagc

SEQ ID NO: 446809 - DNA, 120 bp, Artificial Sequence
  ENSG00000154864_74 (sequence is synthesized)
aaaacaaatgatgtgtacacctgctttgttatggtccaccagtgaccagcttcaatgaggggaaccattctggagggctgcggtctcctgtgcaaacagacatgaggcagaagagtaaaa

SEQ ID NO: 446810 - DNA, 120 bp, Artificial Sequence
  ENSG00000154864_75 (sequence is synthesized)
agaccaacccagtgggacctagaatactttgtaactctttaataactgaggtcaggaccgctcttctgccttccccttcccttaacgtgctttttcccatttccatgatttaaggcaatg

SEQ ID NO: 446811 - DNA, 120 bp, Artificial Sequence
  ENSG00000154864_76 (sequence is synthesized)
gtttttccagtatgtgacattttccttcctgtttttcaggtatatcaaagagtttacatattccaattcacatttttacatctgagacgggttttttaagttcataattatgaaagaaat

SEQ ID NO: 446812 - DNA, 120 bp, Artificial Sequence
  ENSG00000154864_77 (sequence is synthesized)
atgtatattgagcttggggaaataaaaatggccttttcttaaattattattattggtaatacaacctcttcattaaataacaatgtagcatgaaaaatttatgattgaaatgtagttttc

SEQ ID NO: 446813 - DNA, 120 bp, Artificial Sequence
  ENSG00000154864_78 (sequence is synthesized)
attccatattaagatacagtttctgagaagaatcattgaatggactagaatatgtcaaaaattgatcctgtgtagtttgggttcagggctgacttaaaataaagcacatcctgcaaagtc

SEQ ID NO: 446814 - DNA, 89 bp, Artificial Sequence
  ENSG00000154864_79 (sequence is synthesized)
tgctgttctcgtgataactaaggggattttcccccacttcacactgcacgtctcttgctgcctccatgtgaagaaggatgtgtttgctt

SEQ ID NO: 446815 - DNA, 82 bp, Artificial Sequence
  ENSG00000154864_80 (sequence is synthesized)
atggttttctaaggggattttcccccacttcacactgcacgtctcttgctgcctccatgtgaagaaggatgtgtttgcttct

SEQ ID NO: 446816 - DNA, 120 bp, Artificial Sequence
  ENSG00000154864_81 (sequence is synthesized)
aaacaccagtgtaagtgtattttttcctactaatagagctttgttaggtatatgcagctggtacaaaatgtccatctacagattcatgtgtatgaggaatgcaacttcattctttggtaa

SEQ ID NO: 446817 - DNA, 120 bp, Artificial Sequence
  ENSG00000154864_82 (sequence is synthesized)
cacaaagttaatttctatttggaggccccattttgcaagattaaagaaacttaatctcagctatggagttttctgtccactgtccccagggttatgtctatgttccaaatgagggtttgg

SEQ ID NO: 446818 - DNA, 120 bp, Artificial Sequence
  ENSG00000154864_83 (sequence is synthesized)
tggtggtcttcaatgacaaagtcagtcccccaagtctggggttcctggctggctatggcttttaggctgcatgtgagaccatgtccagatgttcatccagacccacagcatggcagaggc

SEQ ID NO: 446819 - DNA, 120 bp, Artificial Sequence
  ENSG00000154864_84 (sequence is synthesized)
ccttccgtcccaggatgttctttggaggatcttcaaaggcaaccttcctgtggctgcttctccgtgtttgcagtttgaaaatggactagaaccactagcacaagacagcggttatcttgc

SEQ ID NO: 446820 - DNA, 120 bp, Artificial Sequence
  ENSG00000154864_85 (sequence is synthesized)
atgtccatagcaaagatattagtatcttaaatgtttaaattattatcctttacaatgttgccttttctaagtttgtattatttatacttctaacaccattacagtttaaacctgcagtaa

SEQ ID NO: 446821 - DNA, 120 bp, Artificial Sequence
  ENSG00000154864_86 (sequence is synthesized)
gcaatttctggaaaattatgaaaaagaagacataacagtagcagaactggaaggaaactcaaattctttgtggaccatcagcccacccaaaacttaagtctgggtgcaaaatcggaaata

SEQ ID NO: 446822 - DNA, 120 bp, Artificial Sequence
  ENSG00000154864_87 (sequence is synthesized)
ctgaacagaaccacagtaggtcatcattttccttttccagctgtccatgatttttttaatgtgatccgcattacatcggagtatcaagactccaagactaagtacttacacttacagaaa

SEQ ID NO: 446823 - DNA, 120 bp, Artificial Sequence
  ENSG00000154864_88 (sequence is synthesized)
tccgagggtcagcagcactgagaaaaaggaaagaggctcgtggctgagtttctcgttggcttggtcatattacaaaggctacttattttcatcgaatccttagggaagagtgtgagagca

SEQ ID NO: 446824 - DNA, 120 bp, Artificial Sequence
  ENSG00000154864_89 (sequence is synthesized)
ggctgcccttctgcccctgcctatgggaatctatctccctaaattctccaaggaaaacagtagcattccagtttacattaccaaggagaaagctcaggttccaaaatctaataaaatctt

SEQ ID NO: 446825 - DNA, 120 bp, Artificial Sequence
  ENSG00000154864_90 (sequence is synthesized)
tatccttgaccagaattcaggcgttcccgtgacccatgtgttccatgcatggtttgatccttgtgacttgatagggggtcggagtgtaggaaaattttaatgtcagtgggtctttgagcc

SEQ ID NO: 446826 - DNA, 120 bp, Artificial Sequence
  ENSG00000154864_91 (sequence is synthesized)
cggggtccaattcttccagagacatcagcacagacgttctgacattcttgtgctggctgtagaaagccaaacacgtggcttatagactctagggcataatttatgggctcagaaagggaa

SEQ ID NO: 446827 - DNA, 120 bp, Artificial Sequence
  ENSG00000154864_92 (sequence is synthesized)
gaagaattgaatattatattgcccaattctgaggtcgagagccctattcacatacatattttatggctaaatacccttactaaaaatgagcttgggctccaccttggactctgatttaag

SEQ ID NO: 446828 - DNA, 120 bp, Artificial Sequence
  ENSG00000154864_93 (sequence is synthesized)
gatgatcattctattcaaagggtcagtgaccctttctctgtaaggcactaggcatggatgccagtgagcctcccctcccctcattcccacagctttgattttatttgcatttaaggattt

SEQ ID NO: 446829 - DNA, 120 bp, Artificial Sequence
  ENSG00000154864_94 (sequence is synthesized)
ttggcaatttattaaatagaaagatgagggataacttaaaatgcactcactttcttactacgcctcctccccaatttcaaaaaggcactctaaattccaatgcccacatgtggcacagcc

SEQ ID NO: 446830 - DNA, 120 bp, Artificial Sequence
  ENSG00000154864_95 (sequence is synthesized)
ttcaagccacctgatgctcagagacgaccaatgaacagcaaaaaccagaaaactatttttaaaagcagatcctgatagccacatagaatgcagtgtgtttccctcctgatcataaagatg

SEQ ID NO: 446831 - DNA, 120 bp, Artificial Sequence
  ENSG00000154864_96 (sequence is synthesized)
aatgaggaattctggaactcagtggctatatttgctctgcttagcaaagaaaatatcactataggtcgatgggattatagtggaatgccccattccaatccagtcctctttaaatttcat

SEQ ID NO: 446832 - DNA, 120 bp, Artificial Sequence
  ENSG00000154864_97 (sequence is synthesized)
agaatattgaataattattattttgcaagttacgtataatgtcgtcttcagtctttacatgatgtctccatacttgcagctaatctaactggacaaggaatatcactgagacaaataaca

SEQ ID NO: 446833 - DNA, 120 bp, Artificial Sequence
  ENSG00000154864_98 (sequence is synthesized)
tcacacaattgtaggagtgaatctactaggaggatatttagaatcactaggaaatcaaataaagtagaacttcttcccatacctaattattggtttcacatagatctgacgttggcctct

SEQ ID NO: 446834 - DNA, 120 bp, Artificial Sequence
  ENSG00000154864_99 (sequence is synthesized)
ctctcccaagacataattttctaaatcggcaagctagtttttaataaagcaatatttgaaatttgcttggtatatctggatgtaatcaaatttaatcccaaatattgaatttcaacatta

SEQ ID NO: 446835 - DNA, 120 bp, Artificial Sequence
  ENSG00000154864_100 (sequence is synthesized)
caacaaaaaaagaaaaacacaagattagaaagagttttatttaattttctccccaagtccaaagacaaaagattccagtcggagtccagtgtgactcttctatttactgttcagggtatg

SEQ ID NO: 446836 - DNA, 120 bp, Artificial Sequence
  ENSG00000154864_101 (sequence is synthesized)
acagtcacgctaacaatctggtaaatgcagtgcacaaatgcctatttctatcaagtcacaagtaaactgtgcttttctttatgtttttaaagggcctctgctaatttagagagacctatc

SEQ ID NO: 446837 - DNA, 120 bp, Artificial Sequence
  ENSG00000154864_102 (sequence is synthesized)
tttcctcatgtaaaaatcgcatttgcaaaggaattggatatggtctgtgataactatcttacaagttgtaataatataaagaacttcctgtgaatgttgttgactttagattttctggtt

SEQ ID NO: 446838 - DNA, 120 bp, Artificial Sequence
  ENSG00000154864_103 (sequence is synthesized)
catttcaccctcattatatcaagttattgaagattgatgttaaactacatgtgccttgttacaaaaccttatgatgcaataatgcagaaatgtgtgtaattcatagtttggaatcatatt

SEQ ID NO: 446839 - DNA, 120 bp, Artificial Sequence
  ENSG00000154864_104 (sequence is synthesized)
cagactgtggtgttaaattttttgctgcaaaatgtatttctttttacaagtgaatgaagaatgaaagggaaagaatgtgtgctgtattgttgtgtctatgatgagttccagaatttatct

SEQ ID NO: 446840 - DNA, 120 bp, Artificial Sequence
  ENSG00000154864_105 (sequence is synthesized)
ttagatctggaagtactttgttggaagcccttaatttgatcttttgagtaactgggctttcaaacagctatttcttagagaagccaagtgtaagaattagtgtagttggatacacatgtg

SEQ ID NO: 446841 - DNA, 120 bp, Artificial Sequence
  ENSG00000154864_106 (sequence is synthesized)
taaatctattgacaatacaaaaatgttgctatgttcttgatgttattagtaagcagtgaagattttagcatggtctgtatagggacagatttcctacttccatacctatgtacacacaca

SEQ ID NO: 446842 - DNA, 120 bp, Artificial Sequence
  ENSG00000154864_107 (sequence is synthesized)
agattgcattattgctgttcaatgataccttccattccaataccttatgtttcaatattggttcagtactgcctaaattaataccaagcttcatcttattgataaatatctgaaacagaa

SEQ ID NO: 446843 - DNA, 120 bp, Artificial Sequence
  ENSG00000154864_108 (sequence is synthesized)
ggccaagttctgaggataaaagtagtggaatttaaaaagttaatttccaacttagtaatttagcagtaacatcaacatccatgatatgtatgtggacacaggctggagtcaggttcgcca

SEQ ID NO: 446844 - DNA, 120 bp, Artificial Sequence
  ENSG00000154864_109 (sequence is synthesized)
tctgagctaacaaacacgtgtgtaagagcttttctactcactaatttaacagatggcatgaatgaaaatgtgctctgtcattttcctagtttcatttcaataacattttataaggaaata

SEQ ID NO: 446845 - DNA, 120 bp, Artificial Sequence
  ENSG00000154864_110 (sequence is synthesized)
agagacttttttacattttcttttttcttatgtgataattccactagctcacataaatattggtggtttctaatggtaaaatcaatgttaccactgcttgagatgaaaaccttttgaact

SEQ ID NO: 446846 - DNA, 120 bp, Artificial Sequence
  ENSG00000154864_111 (sequence is synthesized)
tgtccatatgaataaaagttatcgaaggtatgattgaatacaatttaagctaatgttgattttggaacctataatgagggtaaaattctcgatcttataatagtctgtgttttcccaaac

SEQ ID NO: 446847 - DNA, 120 bp, Artificial Sequence
  ENSG00000154864_112 (sequence is synthesized)
gaccacgtgatgtagagtccacatcactttcctgcaaatctctcggcttatgtgaaggcattactttaatggtcttcttcactatcaaatgtaatgctgtaactttggtttgttcttgct

SEQ ID NO: 446848 - DNA, 120 bp, Artificial Sequence
  ENSG00000154864_113 (sequence is synthesized)
tattctcacttgtgttgtattgcatttatttcccaaggcctggacccagtactctgggcctggttctttcttcaaaatgaaaataacgaatgacagtgcttctgttcaaggatataaggc

SEQ ID NO: 446849 - DNA, 120 bp, Artificial Sequence
  ENSG00000154864_114 (sequence is synthesized)
ccaattcacccactgtgtatcttcatgaatggaggcttcagatttttctgaaatcgtgggcaaaattacttaacttttggccatgtgaagtgatattcaagcaattaattttaaacaagc

SEQ ID NO: 446850 - DNA, 120 bp, Artificial Sequence
  ENSG00000154864_115 (sequence is synthesized)
caaggttttccattaccttacaatgtataggcccaaaagacaacttaagatcaaaatatgtcatccaaaagatgcctgagcatttgaaaacctgaatataatttgaaaatatgttttcct

SEQ ID NO: 446851 - DNA, 120 bp, Artificial Sequence
  ENSG00000154864_116 (sequence is synthesized)
gcgatgatgggacattgcttgtagcatcagaaatgtatatgttgggcctcttttctctggtagactttaaataatgatcaaactgataaagatttaatttattaaatttccttaaatctc

SEQ ID NO: 446852 - DNA, 120 bp, Artificial Sequence
  ENSG00000154864_117 (sequence is synthesized)
caaccacggaccagcacctcaaggaagaccacctgttgcagctgatttcctgcccaggtggaagttgttagaaaggttgggttcatcttcctcaggacttgcgtggtgcttctggcaccc

SEQ ID NO: 446853 - DNA, 120 bp, Artificial Sequence
  ENSG00000154864_118 (sequence is synthesized)
gatggacaagaaattcctaaaacaagcgagcgtgctcggcctaggctccgtaaaatgctcagcatggatatgtcctcctcatcagctgacagtggcagtttagcatcaagcgagcccacg

SEQ ID NO: 446854 - DNA, 120 bp, Artificial Sequence
  ENSG00000154889_0 (sequence is synthesized)
gcagttcccgggtccctcggccaccgaagccaccctgccctggtgaaagggctcccgcaccgcccggtgctccccatctgcctggcgttgtgcgcagagctggaaagcatggctgttata

SEQ ID NO: 446855 - DNA, 120 bp, Artificial Sequence
  ENSG00000154889_1 (sequence is synthesized)
aatgaattctgattttggggagcagatgccaacttagagcctcgtaccaatctctctgtctttaaaagatgaggtgacttggtgattttcctggaaaattataggtgcccagctaagacc

SEQ ID NO: 446856 - DNA, 120 bp, Artificial Sequence
  ENSG00000154889_2 (sequence is synthesized)
tgaatgccatcaccctccccagggctctgcagttttctcgtggtgaacccttgatggatttgttgttgcttgagaaatggcgatgatcgaattggggtttggaagacagaattttcatcc

SEQ ID NO: 446857 - DNA, 120 bp, Artificial Sequence
  ENSG00000154889_3 (sequence is synthesized)
attaaagaggaagagttcattgctgttgaaactcatagctgttgtctttgctgtgcttctattttgtgaatttttaatctattacttagcgatctttcagtgtaattggcctgaagtgaa

SEQ ID NO: 446858 - DNA, 120 bp, Artificial Sequence
  ENSG00000154889_4 (sequence is synthesized)
aaccacagcctctgatggtgaacagaccacacgtgagcctgtgctcaaagccatgtttttggctgacacccatttgcttggggaattcctaggccactggctggacaaattacgaaggga

SEQ ID NO: 446859 - DNA, 120 bp, Artificial Sequence
  ENSG00000154889_5 (sequence is synthesized)
atggcagatggagagagcgttccagacagctctgtggttgctgcagccggaagtcgtcttcatcctgggggatatctttgatgaagggaagtggagcacccctgaggcctgggcggatga

SEQ ID NO: 446860 - DNA, 120 bp, Artificial Sequence
  ENSG00000154889_6 (sequence is synthesized)
tgtggagcggtttcagaaaatgttcagacacccaagtcatgtacagctgaaggtagttgctggaaaccatgacattggcttccattatgagatgaacacatacaaagtagaacgctttga

SEQ ID NO: 446861 - DNA, 120 bp, Artificial Sequence
  ENSG00000154889_7 (sequence is synthesized)
gaaagtgttcagctctgaaagactgttttcttggaaaggcattaactttgtgatggtcaacagcgtggcgctgaacggggatggctgtggcatctgctctgaaacagaagcagagctcat

SEQ ID NO: 446862 - DNA, 120 bp, Artificial Sequence
  ENSG00000154889_8 (sequence is synthesized)
tgaagtttctcacagactgaactgctcccgagaggcacgtggctccagccggtgtggacctgggcctctgctgcccacgtctgcccctgtcctcctgcagcattatcctctgtatcggag

SEQ ID NO: 446863 - DNA, 120 bp, Artificial Sequence
  ENSG00000154889_9 (sequence is synthesized)
aagtgatgctaactgttctggggaagacgctgctcctgcagaggaaagggacatcccatttaaggagaactatgacgtgctttcacgggaggcatcacaaaagctgctgtggtggctcca

SEQ ID NO: 446864 - DNA, 120 bp, Artificial Sequence
  ENSG00000154889_10 (sequence is synthesized)
gccgcgcctggttctcagtggccacacgcacagcgcctgcgaggtgcaccacgggggccgagtccccgagctcagcgtcccatctttcagttggaggaacagaaacaaccccagtttcat

SEQ ID NO: 446865 - DNA, 120 bp, Artificial Sequence
  ENSG00000154889_11 (sequence is synthesized)
catgggtagcatcacgcccacagactacaccctctccaagtgctacctcccacgtgaggatgtggttttgatcatctactgtggagtggtgggcttccttgtggtcctcacactcactca

SEQ ID NO: 446866 - DNA, 120 bp, Artificial Sequence
  ENSG00000154889_12 (sequence is synthesized)
ctttgggcttctagcctcaccttttctttctggtttgaacttgctcggaaagcgtaagacaagatgaagagcaggcgccattataaatatcaaagcccaagaaatggaactttgggcaga

SEQ ID NO: 446867 - DNA, 120 bp, Artificial Sequence
  ENSG00000154889_13 (sequence is synthesized)
gcaaaataaatagttgattgtactgttctcatgctataaaagtggacaggtactctacaacaaatctgttttctcatttttatcaaatatatgtatcatcaaaggttgcatctgtacagt

SEQ ID NO: 446868 - DNA, 120 bp, Artificial Sequence
  ENSG00000154889_14 (sequence is synthesized)
atgtaaatgctattaatgtcgtcactcacatgcacgacagtccttgttcccccaggaagggcctggtggccccagcacacacttgggattatgtgtatacataaataaatattgggctgt

SEQ ID NO: 446869 - DNA, 120 bp, Artificial Sequence
  ENSG00000154889_15 (sequence is synthesized)
atacataaataaatattgggctgtttccctcttcctgtgaagtggttctcaaattcctatgtactgtaaagctgtacccttaaaagtacagatgtggccgggcacagtggctcacacctg

SEQ ID NO: 446870 - DNA, 120 bp, Artificial Sequence
  ENSG00000154889_16 (sequence is synthesized)
ctggccaacatggtgaaacctcgtctccgctagaaatacaaaaattagccaagcatggtagcaagtgcctataataccagctgaggctgaggcaggagaatcccttgagcccgggaggcg

SEQ ID NO: 446871 - DNA, 62 bp, Artificial Sequence
  ENSG00000154889_17 (sequence is synthesized)
aaaattagccaagcatggtagcaagtgcctataataccagctgaggctgaggcaggagaatc

SEQ ID NO: 446872 - DNA, 120 bp, Artificial Sequence
  ENSG00000154889_18 (sequence is synthesized)
aaaaaaaaaaaagtacagatgtgatgtgcagaacatattgttttcgtagatttttatacttgatcaattaatggaatcagatttttagataagtgtaattttctctataggagaccacgt

SEQ ID NO: 446873 - DNA, 120 bp, Artificial Sequence
  ENSG00000154889_19 (sequence is synthesized)
tgctacatctgttaatgcctgtcagtgatcaaaagaaacttaaaaagtggaatgggatatggcttttggtacctgaaaataaatgctttaataattgtaagccagataaaagttattctt

SEQ ID NO: 446874 - DNA, 120 bp, Artificial Sequence
  ENSG00000154889_20 (sequence is synthesized)
tttgttttttttcttaacagtctggctgttgtttgaattaaactcttaaacaggatgtttagttagagggtaattgttgagtaatgatgcatacaacagcatacttccctttcttgctgg

SEQ ID NO: 446875 - DNA, 120 bp, Artificial Sequence
  ENSG00000154889_21 (sequence is synthesized)
gggtgcagcttttcagttttcttgttttactttgacagtgcaaggggaactgaaaataatttccattgtattatttatcttagttcagctgagggctttatgagacagtggatggggagg

SEQ ID NO: 446876 - DNA, 120 bp, Artificial Sequence
  ENSG00000154889_22 (sequence is synthesized)
cagtaagacggtgatgagataaaatgtgtgtgttgcactgactgtctataaagttatcctttcttcatgaaaaagtagcatttaaatctggatgagtttataaaggattacaaaatgctg

SEQ ID NO: 446877 - DNA, 120 bp, Artificial Sequence
  ENSG00000154889_23 (sequence is synthesized)
atttatagagtaaactttaaaatattaaagactaaagactaaaagaagagtaataatgaagtaatgtaggctgtcacttctctagatttgtattgttgaaaatttaactttggacatctt

SEQ ID NO: 446878 - DNA, 120 bp, Artificial Sequence
  ENSG00000154889_24 (sequence is synthesized)
tatagattattattttagacctacaaaaactaccctcaactctgtggctacagctagaatatgaagcatcattgctacaccagttcttactttctagatattgttggtgtgtcataatgt

SEQ ID NO: 446879 - DNA, 120 bp, Artificial Sequence
  ENSG00000154889_25 (sequence is synthesized)
ttgaggctgtatttgtaagtcttgcaagtgtgagaaagagccgtatcttttgactttatacttcagattaaggttttgtaatgtttcttcttcaaaaggcaagtgaagctgtcatcctca

SEQ ID NO: 446880 - DNA, 120 bp, Artificial Sequence
  ENSG00000154889_26 (sequence is synthesized)
ttctcctaggccagacacaaacattgacacgtcaaggttttttttttttttttttttggcctgagtctcactttgatgtccaggctggagtgcgatggcacgacctcggctcactgcaat

SEQ ID NO: 446881 - DNA, 120 bp, Artificial Sequence
  ENSG00000154889_27 (sequence is synthesized)
catcaaggggcaggaagacacctttccctccttgttcctcgctgaccgatgaccctggaactccacggtgcctctctgaatctctgttatggatcccccactatatttgatgggaaccca

SEQ ID NO: 446882 - DNA, 120 bp, Artificial Sequence
  ENSG00000154889_28 (sequence is synthesized)
ttttgcgcctcttagtcataactgctcaaacaaggctcactctgatgaagagaagggggtgtagaagaggaattatcaaggtgtcattctggtatttcatcttgggaaaccagaaaccta

SEQ ID NO: 446883 - DNA, 120 bp, Artificial Sequence
  ENSG00000154889_29 (sequence is synthesized)
ccaaacagcaagggtttgcatactggaagactcctcagcctgccccagaagaatattaatgaaactttatcatcttggtgagaaaagcattctaatagctttattctgacatacggaggt

SEQ ID NO: 446884 - DNA, 120 bp, Artificial Sequence
  ENSG00000154889_30 (sequence is synthesized)
cctggaaaattatagaagcactgaggtggacactgcgggttgtgaggttcaggaggggtaagtggctggcacaaggtcacagagcagcgctgccatttggctactttccaattcagcata

SEQ ID NO: 446885 - DNA, 120 bp, Artificial Sequence
  ENSG00000154889_31 (sequence is synthesized)
gctgccctctctgctggtggtattcacagcatgcaagataaaatactcaccaaggaacaagtggctaactcctcacagagctctcacggtttcctctttcctgacaaaaagaatattaat

SEQ ID NO: 446886 - DNA, 120 bp, Artificial Sequence
  ENSG00000154889_32 (sequence is synthesized)
ggtgaaagggctcccgcaccgcccggtgctccccatctgcctggcgttgtgcgcagagctggaaagcatggctgttgtatgtattcttgcgcccgtgtgacaacatttaaacttctaaaa

SEQ ID NO: 446887 - DNA, 120 bp, Artificial Sequence
  ENSG00000154889_33 (sequence is synthesized)
acggaacctccttccgtgttaggattgcaagttaacctaggaaaaacagcattctgcaaattatttgctggaaaatctcggtgacttaaggcccatgtattactttgcaggggtctctca

SEQ ID NO: 446888 - DNA, 120 bp, Artificial Sequence
  ENSG00000154889_34 (sequence is synthesized)
agttgatgagattgcaattaatatatttaagatagtgaattagagaaaaactacagataaatgaattctgattttggggagcagatgccaacttagagcctcgtaccaatctctctgtct

SEQ ID NO: 446889 - DNA, 120 bp, Artificial Sequence
  ENSG00000154889_35 (sequence is synthesized)
ttaaaagatgaggtgacttggtgattttcctggaaaattatagggaagctggaggactgcagttttgcatcctatcctgccctgagcctcactttgggctgtcagccagccttgtctcca

SEQ ID NO: 446890 - DNA, 120 bp, Artificial Sequence
  ENSG00000154889_36 (sequence is synthesized)
cttctgtcccgtgttgctccgcttcggttgctcactcagccccctagcgcttcttgccctttgatgagggtcaggtgtgcggattaatggcctgacttgtacccagcaggcacgtggctc

SEQ ID NO: 446891 - DNA, 120 bp, Artificial Sequence
  ENSG00000154889_37 (sequence is synthesized)
aacgttcatgacttagttatcacctggggggacaggggtggaggcctggctttcacagtatctcagattttcatttaatcgctttttttttttccagtaaacctacttctgtttcctacc

SEQ ID NO: 446892 - DNA, 120 bp, Artificial Sequence
  ENSG00000154889_38 (sequence is synthesized)
ctcaagtcagtaatagtctcagctattctttgtattcagagtttttcaccaacttaaatgtatttagaaatgtgaatggaactgaaaagtcaattttttagggacttaattaaaattaaa

SEQ ID NO: 446893 - DNA, 80 bp, Artificial Sequence
  ENSG00000154889_39 (sequence is synthesized)
atgtataaaatatttataaagataaaataccgtaaaaagtatataaaatctgggatgagaacaaagggctgaccttacct

SEQ ID NO: 446894 - DNA, 120 bp, Artificial Sequence
  ENSG00000154889_40 (sequence is synthesized)
atataaaatctgggatgagaacaaagggctgaccttacctttgatttagtgtaaataaaccaaaggatttttaaggaaaaaaataaaccagtccttcaaaataaggatttagtatgtaat

SEQ ID NO: 446895 - DNA, 120 bp, Artificial Sequence
  ENSG00000154889_41 (sequence is synthesized)
agaatccacgaatcagtgtcagcttgagctggagattttatggaagttgtacttactactgatattaaaaatgcgtaggctatttggaagatgattagaattcataggctatctaagatt

SEQ ID NO: 446896 - DNA, 120 bp, Artificial Sequence
  ENSG00000154889_42 (sequence is synthesized)
attagaacaactcaatcttgagttaggttggctaattgtaaacatttgtctatgtaggaaatatgtcgattagccagatatcatttagttggaatacactgttttgtgaacctcttggga

SEQ ID NO: 446897 - DNA, 120 bp, Artificial Sequence
  ENSG00000154889_43 (sequence is synthesized)
aagggagaaacgggcaagatagatgttatttcagttgtcaccgaaattgcaaaatacatattgaaatgtacatttaatttcacactcttattgaaccatgacattatgagaatcgtgctg

SEQ ID NO: 446898 - DNA, 70 bp, Artificial Sequence
  ENSG00000154889_44 (sequence is synthesized)
aaaagactggagtgcagtggcccaatctctgctcattgcaagctctgcctcccaggttcaactaagacct

SEQ ID NO: 446899 - DNA, 120 bp, Artificial Sequence
  ENSG00000154889_45 (sequence is synthesized)
tgatcttaataagactgataaattgaacttgggagtgaaaacagtaacactttaagaaattttgaattttaaggctgaggactaggctctgattttttttctatcctcacagaagcactg

SEQ ID NO: 446900 - DNA, 120 bp, Artificial Sequence
  ENSG00000154889_46 (sequence is synthesized)
ggccataacattgaagacaaccttgggaatgctaattcaatgagtctttggtagaggaagaaaaggaatttcccaagatttgagcaaaaggtgcccagctaagacctgaatgccatcacc

SEQ ID NO: 446901 - DNA, 120 bp, Artificial Sequence
  ENSG00000154889_47 (sequence is synthesized)
tgtgaggttcaggagggaggctctccagcagagaacccaggcccttcaccatactggtgcatggttcctgccacttgtgcagtccattccgaagtttcttacagatgagaatattaatga

SEQ ID NO: 446902 - DNA, 120 bp, Artificial Sequence
  ENSG00000154914_0 (sequence is synthesized)
acacctggcccgcaggtagccggcaccaggagccttagagaagctgtagggcctgctggccgctcgtccgcctcgcgcccgggggctccgcgcctggagctgcgccggcggcagccatgg

SEQ ID NO: 446903 - DNA, 80 bp, Artificial Sequence
  ENSG00000154914_1 (sequence is synthesized)
cccgccgccgccgctccctgcgccgcctgttcagccgcttcctgctggcgctgggcagccgctcacgccccggggactca

SEQ ID NO: 446904 - DNA, 120 bp, Artificial Sequence
  ENSG00000154914_2 (sequence is synthesized)
gcttcctgctggcgctgggcagccgctcacgccccggggactcaccgccccggccccagccgggacactgtgatggcgacggtgaggggggcttcgcctgcgccccgggcccagttccag

SEQ ID NO: 446905 - DNA, 120 bp, Artificial Sequence
  ENSG00000154914_3 (sequence is synthesized)
gaccccagccccagctccagctccccgccggcgatggggcgcggccgccgggcgctcagggcttgaagaaccacggcaacacctgtttcatgaacgcggtggtgcagtgtctcagcaaca

SEQ ID NO: 446906 - DNA, 120 bp, Artificial Sequence
  ENSG00000154914_4 (sequence is synthesized)
ccgacctgctggccgagttcctggcgctggggcgctaccgggcggctccgggccgcgccgaggtcaccgagcagctggcggcgctggtgcgcgcgctctggactcgcgaatacacgcccc

SEQ ID NO: 446907 - DNA, 120 bp, Artificial Sequence
  ENSG00000154914_5 (sequence is synthesized)
aactttccgcggagttcaagaatgcagtttccaagtacggctctcagttccaaggcaattcccagcacgacgccctggaattcctgctctggttgctggatcgtgtacatgaggacctgg

SEQ ID NO: 446908 - DNA, 120 bp, Artificial Sequence
  ENSG00000154914_6 (sequence is synthesized)
agggttcatcccgagggccggtgtcggagaagcttccgcctgaagccactaaaacctctgagaactgcctgtcaccatcagctcagcttcctctaggtcaaagctttgtgcaaagccact

SEQ ID NO: 446909 - DNA, 120 bp, Artificial Sequence
  ENSG00000154914_7 (sequence is synthesized)
ttcaagcacaatatagatcttccttgacttgtccccactgcctgaaacagagcaacacctttgatcctttcctgtgtgtgtccctacctatccccttgcgccagacgaggttcttgagtg

SEQ ID NO: 446910 - DNA, 120 bp, Artificial Sequence
  ENSG00000154914_8 (sequence is synthesized)
tcaccttggtcttcccctctaagagccagcggttcctgcgggttggcctggccgtgccgatcctcagcacagtggcagccctgaggaagatggttgcagaggaaggaggcgtccctgcag

SEQ ID NO: 446911 - DNA, 120 bp, Artificial Sequence
  ENSG00000154914_9 (sequence is synthesized)
atgaggtgatcttggttgaactgtatcccagtggattccagcggtctttctttgatgaagaggacctgaataccatcgcagagggagataatgtgtatgcctttcaagttcctccctcac

SEQ ID NO: 446912 - DNA, 120 bp, Artificial Sequence
  ENSG00000154914_10 (sequence is synthesized)
ccagccaggggactctctcagctcatccactgggtctgtcggcctccccacgcctggcagcccgtgagggccagcgattctccctctctctccacagtgagagcaaggtgctaatcctct

SEQ ID NO: 446913 - DNA, 120 bp, Artificial Sequence
  ENSG00000154914_11 (sequence is synthesized)
tctgtaacttggtggggtcagggcagcaggctagcaggtttgggccacccttcctgataagggaagacagagctgtttcctgggcccagctccagcagtctatcctcagcaaggtccgcc

SEQ ID NO: 446914 - DNA, 120 bp, Artificial Sequence
  ENSG00000154914_12 (sequence is synthesized)
atcttatgaagagtgaggcccctgtacagaacctggggtctctgttctccatccgtgttgtgggactctctgtggcctgcagctatttgtctccgaaggacagtcggcccctctgtcact

SEQ ID NO: 446915 - DNA, 120 bp, Artificial Sequence
  ENSG00000154914_13 (sequence is synthesized)
gggcagttgacagggttttgcatctcaggaggccaggaggccctccacatgtcaagctggcggtggagtgggatagctctgtcaaggagcgcctgttcgggagcctccaggaggagcgag

SEQ ID NO: 446916 - DNA, 120 bp, Artificial Sequence
  ENSG00000154914_14 (sequence is synthesized)
cgcaggatgccgacagtgtgtggcagcagcagcaggcgcatcagcagcacagctgtaccttggatgaatgttttcagttctacaccaaggaggagcagctggcccaggatgacgcctgga

SEQ ID NO: 446917 - DNA, 120 bp, Artificial Sequence
  ENSG00000154914_15 (sequence is synthesized)
agtgtcctcactgccaagtcctgcagcaggggatggtgaagctgagtttgtggacgctgcctgacatcctcatcatccacctcaaaaggttctgccaggtgggcgagagaagaaacaagc

SEQ ID NO: 446918 - DNA, 120 bp, Artificial Sequence
  ENSG00000154914_16 (sequence is synthesized)
tctccacgctggtgaagtttccgctctctggactcaacatggctccccatgtggcccagagaagcaccagccctgaggcaggactgggcccctggccttcctggaagcagccggactgcc

SEQ ID NO: 446919 - DNA, 120 bp, Artificial Sequence
  ENSG00000154914_17 (sequence is synthesized)
tggatggccagtggtacagttatgatgacagcacggtggaaccgcttcgagaagatgaggtcaacaccagaggggcttatatcctgttctatcagaagcggaacagcatccctccctggt

SEQ ID NO: 446920 - DNA, 120 bp, Artificial Sequence
  ENSG00000154914_18 (sequence is synthesized)
cagccagcagctccatgagaggctctaccagctcctccctgtctgatcactggctcttacggctcgggagccacgctggcagcacaaggggaagcctgctgtcctggagctctgccccct

SEQ ID NO: 446921 - DNA, 120 bp, Artificial Sequence
  ENSG00000154914_19 (sequence is synthesized)
gcccctccctgccccaggttcctgactctcccatcttcaccaacagcctctgcaatcaggaaaagggagggttggagcccaggcgtttggtacggggcgtgaaaggcagaagcattagca

SEQ ID NO: 446922 - DNA, 120 bp, Artificial Sequence
  ENSG00000154914_20 (sequence is synthesized)
tgaaggcacccaccacttcccgagccaagcagggaccattcaagaccatgcctctgcggtggtcctttggatccaaggagaaaccaccaggtgcctccgtcgagttggtggagtacttgg

SEQ ID NO: 446923 - DNA, 120 bp, Artificial Sequence
  ENSG00000154914_21 (sequence is synthesized)
aatccagacgaagacctcggtccacgagccagtccattgtgtcgctgttgacgggcactgcgggtgaggatgagaagtcagcatcgccgaggtccaacgtcgcccttcctgctaacagcg

SEQ ID NO: 446924 - DNA, 120 bp, Artificial Sequence
  ENSG00000154914_22 (sequence is synthesized)
aagatggtgggcgggccattgaaagaggtccagccggggtgccctgtccctcggctcaacccaaccactgtctggcccctggaaactcagatggtccaaacacagcaaggaaactcaagg

SEQ ID NO: 446925 - DNA, 120 bp, Artificial Sequence
  ENSG00000154914_23 (sequence is synthesized)
aaaatgcagggcaggacatcaagcttcccagaaagtttgacctgcctctcactgtgatgccttcagtggagcatgagaaaccagctcgaccggagggccagaaggccatgaactggaagg

SEQ ID NO: 446926 - DNA, 120 bp, Artificial Sequence
  ENSG00000154914_24 (sequence is synthesized)
agagcttccagatgggaagcaaaagcagcccaccctccccctatatgggattctctggaaacagcaaagacagtcgccgaggcacctctgagctagacagacccctgcaggggacactca

SEQ ID NO: 446927 - DNA, 120 bp, Artificial Sequence
  ENSG00000154914_25 (sequence is synthesized)
cccttctgaggtccgtgtttcggaagaaggagaacaggaggaatgagagggcagaggtctctccacaggtgccccccgtctccctggtgagtggcgggctgagccctgccatggacgggc

SEQ ID NO: 446928 - DNA, 120 bp, Artificial Sequence
  ENSG00000154914_26 (sequence is synthesized)
aggctccaggctcacctcctgccctcaggatcccagagggcctggccaggggcctgggcagccggctcgagagggatgtctggtcagcccccagctctctccgcctccctcgtaaagcca

SEQ ID NO: 446929 - DNA, 120 bp, Artificial Sequence
  ENSG00000154914_27 (sequence is synthesized)
gcagggccccgagaggcagtgcactgggcatgtcacaaaggactgttccaggggagcaggcttcttatggcacctttcagagagtcaaatatcacactctttctttaggtcgaaagaaaa

SEQ ID NO: 446930 - DNA, 120 bp, Artificial Sequence
  ENSG00000154914_28 (sequence is synthesized)
ccttaccggagtccagcttttgatggagcgtgtcagtattgtgtgacgctggcattcttgggactttgccaagcaactgtaggcagctcatgttgagaatgggtttccaggaaacccgtt

SEQ ID NO: 446931 - DNA, 120 bp, Artificial Sequence
  ENSG00000154914_29 (sequence is synthesized)
gtcttgtaatctctaaaaaaaaatttttttttttttgtggtggggggtctccatatctagacttccaacacccaaggtccatataacccaaggtcgaaaaccttcctgcatcattgggtg

SEQ ID NO: 446932 - DNA, 120 bp, Artificial Sequence
  ENSG00000154914_30 (sequence is synthesized)
ctttgctacagtttggccactagaggatgctattgggtcagtattaccagtttcagggcaagaactgatatttactaaagagttttggatgtgggcaaacaagatgaggctggtttaata

SEQ ID NO: 446933 - DNA, 120 bp, Artificial Sequence
  ENSG00000154914_31 (sequence is synthesized)
agaatcttcaatgtcatgtcaaatactgtcaatggcttttcctttttctttcttttttttttttaaattgtggacttaaagaaaaatattttatttttaatgcttttctgggataagcat

SEQ ID NO: 446934 - DNA, 120 bp, Artificial Sequence
  ENSG00000154914_32 (sequence is synthesized)
taaagatgccaaaaagaaaaaaaaaacaaaagaatgatagtgatggtaaggcaagattctagcaaagagagatgggagataaatggctgagagttcaggtgaatatttaatatattaaaa

SEQ ID NO: 446935 - DNA, 120 bp, Artificial Sequence
  ENSG00000154914_33 (sequence is synthesized)
aggaggagcaggtcccgccctgggggtccatgccccggccgggaagggggctggctgcctttggtgggttggccacgtgctgcgggggcctcacagtccgggtggtttgctttccagctg

SEQ ID NO: 446936 - DNA, 120 bp, Artificial Sequence
  ENSG00000154914_34 (sequence is synthesized)
aaaccgcgtagggggcgcgcctgagagcctgaaaacttcctggttagcaaatactgaggctggaaagggcctgaacttggcagtccatagatccaggtcgagttccggtttccctgctta

SEQ ID NO: 446937 - DNA, 120 bp, Artificial Sequence
  ENSG00000154914_35 (sequence is synthesized)
cggatcgggcggcctccctacgttgcgataacctctctgagcccccttccttgccgattaaagcaagggtgatcaagtcttgcaagtttttggaaaatgattctaacccaatctgtggtg

SEQ ID NO: 446938 - DNA, 120 bp, Artificial Sequence
  ENSG00000154914_36 (sequence is synthesized)
taaaaaagcaaaccacaaccactcgggggcttttttcacagggcaacacgtggctcccagttcaggtcccgggttggcgggtgcaggcacagactctgcctccccccaaggggcagacgg

SEQ ID NO: 446939 - DNA, 120 bp, Artificial Sequence
  ENSG00000154914_37 (sequence is synthesized)
tctggaaggaggtggcgacacctgtccgcacacacctgagcctgcggaggaaccagcggtgcacaaaagcgctccccacccccacacagcgcccagcgcgcgcctctcaccacgcccgag

SEQ ID NO: 446940 - DNA, 120 bp, Artificial Sequence
  ENSG00000154914_38 (sequence is synthesized)
gctgtgctctggagatgcctgccttgcccttttcttcctgcagtagccaggcctttaccatttactaggcgctttcagaatgttcatttctccgtaatttccactgcttgaaggctgctc

SEQ ID NO: 446941 - DNA, 120 bp, Artificial Sequence
  ENSG00000154914_39 (sequence is synthesized)
ttcttttcggagctgaaaacagagtgacaaggagtctgccattttaataactgggcacagagtattccaggcagaggacacagcacaggcaaagggccagaagtgggaataatcctggca

SEQ ID NO: 446942 - DNA, 80 bp, Artificial Sequence
  ENSG00000154917_0 (sequence is synthesized)
acagagcgcaggcgccggcggaggaggcaggcgggagggggccgactggcgcggctctggagagcgctcctccgccccgc

SEQ ID NO: 446943 - DNA, 120 bp, Artificial Sequence
  ENSG00000154917_1 (sequence is synthesized)
agcgccgcgcctcgggcgtaaagagcgcgcccctcgcaccgcagccagtgccgaccgcagcagcccagccccagccttcctccgcctccgcctctctctcctcctcctcctccgccgccg

SEQ ID NO: 446944 - DNA, 120 bp, Artificial Sequence
  ENSG00000154917_2 (sequence is synthesized)
gacacgcagccgcaggccgggaccgggacgcagctggggagtcagggacgcgcgcagccagcccttccccctccggctcccgcaccgccggccgcctcccctcgccctcctactctcccc

SEQ ID NO: 446945 - DNA, 120 bp, Artificial Sequence
  ENSG00000154917_3 (sequence is synthesized)
tccctgctccttcgctttttcctcctcctcctctcccggccccggctgccagcaccatgtccgcagggggagattttgggaatccactgagaaaattcaagttggtgttcttgggggagc

SEQ ID NO: 446946 - DNA, 120 bp, Artificial Sequence
  ENSG00000154917_4 (sequence is synthesized)
agagcgtcgggaagacgtctctgattacgaggttcatgtacgacagcttcgacaacacataccaggcaaccattgggattgacttcttgtcaaaaaccatgtacttggaggaccgcacgg

SEQ ID NO: 446947 - DNA, 120 bp, Artificial Sequence
  ENSG00000154917_5 (sequence is synthesized)
tgcgactgcagctctgggacacagctggtcaggagaggttccgcagcctgatccccagctacatccgggactccacggtggctgtggtggtgtacgacatcacaaatctcaactccttcc

SEQ ID NO: 446948 - DNA, 120 bp, Artificial Sequence
  ENSG00000154917_6 (sequence is synthesized)
aacagacctctaagtggatcgacgacgtcaggacagagaggggcagtgatgttatcatcatgctggtgggcaacaagacggacctggctgataagaggcagataaccatcgaggaggggg

SEQ ID NO: 446949 - DNA, 120 bp, Artificial Sequence
  ENSG00000154917_7 (sequence is synthesized)
agcagcgcgccaaagaactgagcgtcatgttcattgagaccagtgcgaagactggctacaacgtgaagcagctttttcgacgtgtggcgtcggctctacccggaatggagaatgtccagg

SEQ ID NO: 446950 - DNA, 120 bp, Artificial Sequence
  ENSG00000154917_8 (sequence is synthesized)
agaaaagcaaagaagggatgatcgacatcaagctggacaaaccccaggagcccccggccagcgagggcggctgctcctgctaatgcagagccgacctgtggcttcccatgacactccttg

SEQ ID NO: 446951 - DNA, 120 bp, Artificial Sequence
  ENSG00000154917_9 (sequence is synthesized)
cttgttgtgttgcttcctattggctagcttcctaaggggggagggaaccgagttatcaagatgggaggatttttcttttctctctgtctttaggagtagggtgggatggggagggaggct

SEQ ID NO: 446952 - DNA, 120 bp, Artificial Sequence
  ENSG00000154917_10 (sequence is synthesized)
gggcatcagggatcacatcactcttaacggctgttacttaaacaactattttttggtttggttgtaatatattgtactttattaagattgccaaaaactgttaaaatttaaaaaaaattt

SEQ ID NO: 446953 - DNA, 120 bp, Artificial Sequence
  ENSG00000154917_11 (sequence is synthesized)
aaatcatgtgtatacaattttttgccagataaaaatgtagtcatttttatttgaaagatgtgctttttgtttttgtatatttgtaaacttatagagaaccttttccacacacctcctcct

SEQ ID NO: 446954 - DNA, 120 bp, Artificial Sequence
  ENSG00000154917_12 (sequence is synthesized)
tcctgttctctttgaaccattcatcacctctgccttcctcctatccccagcccaataaattaaaacaattaactgagcaaattaattaggcttcagtctggggccatctggccccactct

SEQ ID NO: 446955 - DNA, 120 bp, Artificial Sequence
  ENSG00000154917_13 (sequence is synthesized)
ctaggccctactccagttaaatcaaacattggttgaacacatcagcctctgaaaaggtagctctgactcttgtctttccatggccagagtgggtcgtcaacctcgtgtggagctgagacc

SEQ ID NO: 446956 - DNA, 120 bp, Artificial Sequence
  ENSG00000154917_14 (sequence is synthesized)
aaggtctgtgggctctaggcagcccggcagcagcccccagaggaactgctcccacctctccttctctttccctgaaaagccttgaagggggttgagggtacaggcaaccttgtgttctct

SEQ ID NO: 446957 - DNA, 120 bp, Artificial Sequence
  ENSG00000154917_15 (sequence is synthesized)
gtgccctcagggactggcagagcaagaggccatcagaaggacgaggtgctgttggcaattgcagctgcgtggtgcgtggtttatagactggggtgccatgtgtacttctgaaaatatttt

SEQ ID NO: 446958 - DNA, 120 bp, Artificial Sequence
  ENSG00000154917_16 (sequence is synthesized)
aaccagcccacccagcagtcagtacacatgcctgggccaagtctaagaaactcagtgtgtgatgttgggcagtgtgccatcctgaagccttcctcctggatgtcagggaagctggaccac

SEQ ID NO: 446959 - DNA, 120 bp, Artificial Sequence
  ENSG00000154917_17 (sequence is synthesized)
ctggagttgatcctctgtgatggggaggcgggggggggggggggtgttgtctgcagaaccaccaccttgaaagatccatgttcttagagcctcagctgctaatattgttgagtgctttct

SEQ ID NO: 446960 - DNA, 120 bp, Artificial Sequence
  ENSG00000154917_18 (sequence is synthesized)
ggaaaagctgatttgttgctatgttttcaccccagtggcatggcgcagttgaagtctttgtggacatatctttgtggctactgtggctgcgctgtggtcacctgaggatgtggttcaggt

SEQ ID NO: 446961 - DNA, 120 bp, Artificial Sequence
  ENSG00000154917_19 (sequence is synthesized)
ggggtctccagaaggctgcttgcccccagagagccatctcttccatttttgattcattcctgagaatggcttagtcctgagaatctgcaaagtctctgaagagaactctctcttcccact

SEQ ID NO: 446962 - DNA, 120 bp, Artificial Sequence
  ENSG00000154917_20 (sequence is synthesized)
aagtgatataacctacttggccagcattccaaatagactcagactcactgccctgagcctgcacagagccaggtgcaatgggcagtgagtctggccaaaatgtaaaccccaccctccctg

SEQ ID NO: 446963 - DNA, 120 bp, Artificial Sequence
  ENSG00000154917_21 (sequence is synthesized)
ctgtcattggctctccctccaggctgctgctgggcatgtcatagatgggatgaatgaccatctggggtatggtgggctgaactccacaaggtcgttggaatgaattttgaaacttctcag

SEQ ID NO: 446964 - DNA, 120 bp, Artificial Sequence
  ENSG00000154917_22 (sequence is synthesized)
aaattaatctgaaatggcaggcagtaagtgcagcagaatctggcaggactgatatttgtgcagtgggcctgccacacaccctctgcctaggaggctgtatgccagagctcatctctagca

SEQ ID NO: 446965 - DNA, 120 bp, Artificial Sequence
  ENSG00000154917_23 (sequence is synthesized)
tttgaacgtgtttcagatgtcatgtgtttagtttttatatgtgtgtacataattatatatagagatagacttgtgtatacaccttccacaaacacatcctcacggagatacatgtgctca

SEQ ID NO: 446966 - DNA, 120 bp, Artificial Sequence
  ENSG00000154917_24 (sequence is synthesized)
atgtatattcttgtttctcctgctctcaagttggaacttgcattgtgataagttttggaaattcaaaagtactgcaacgtgttgaaataagaaatacttaatattgtcaaataacttgtg

SEQ ID NO: 446967 - DNA, 120 bp, Artificial Sequence
  ENSG00000154917_25 (sequence is synthesized)
attgtcttgccatcaataaaataatgcatagttgtgttaaactacaggcaaacatagcccacgggaatatctccaccatttctctatgtactttatatgcacgggtgtgcatgcctgtgt

SEQ ID NO: 446968 - DNA, 120 bp, Artificial Sequence
  ENSG00000154917_26 (sequence is synthesized)
gggccagtgtccccccaccatgggcacacccccaagtggtgcttgttggaagagtgcttacttacctcgagagaatttacaggagtccacatgacagtgtcctgcctggttggcagcggg

SEQ ID NO: 446969 - DNA, 120 bp, Artificial Sequence
  ENSG00000154917_27 (sequence is synthesized)
ggccatcacctgtggcctctgagaccgccccatttacaggaatctgcactgggtctcagtgaatgaacgtatggtagatttttattttcttggcactaaagattagcttttttaaaaaaa

SEQ ID NO: 446970 - DNA, 120 bp, Artificial Sequence
  ENSG00000154917_28 (sequence is synthesized)
catcccataaaacagtagaaactcagttcccttctcaggggcacacacatccaaggcaccgtggactgtgtttccatcctggcctagaggagcagtaaaagatagcatttggtttgacat

SEQ ID NO: 446971 - DNA, 120 bp, Artificial Sequence
  ENSG00000154917_29 (sequence is synthesized)
ggccttagtgagtcctgcctttcctagcatgcacacaacatcctctctttgagtttgggttctccccagccccttggcctctgaggctgagggtggcttcctcccatcctcccatctcag

SEQ ID NO: 446972 - DNA, 120 bp, Artificial Sequence
  ENSG00000154917_30 (sequence is synthesized)
tggttccatggcgctcccttcggcacgtgcggtttccgcccctcccttcctggggtgtggaaaggcagccagacctctttttcagaagttgttggttccctgatttttgtcttgagcagg

SEQ ID NO: 446973 - DNA, 120 bp, Artificial Sequence
  ENSG00000154917_31 (sequence is synthesized)
caccatccctgtccccttgcttgcaggtagaattggcacagagttaaggttccataataaactgttaggtgctcttgaagaagatgtcatggcattgcctcagcaccccagcaagagcat

SEQ ID NO: 446974 - DNA, 120 bp, Artificial Sequence
  ENSG00000154917_32 (sequence is synthesized)
tgcatctttgctgaatccagatgggttagcagagggcaaattggaggattcctttgaggaaatgttctcaattgagcaattcagtccctctccccaaagactagacgtgacctggcagat

SEQ ID NO: 446975 - DNA, 120 bp, Artificial Sequence
  ENSG00000154917_33 (sequence is synthesized)
tagcaggatcctcttggccttcttttttggggatggtgggagtgaagggggtgaatcttaaaagcttatcaacaaagctcctgttctgcaggcatcaggaaagttgagtgtaagatggaa

SEQ ID NO: 446976 - DNA, 120 bp, Artificial Sequence
  ENSG00000154917_34 (sequence is synthesized)
aaagcaaacagcctatttacaagtggaaacacattggttctgatcactcctaacttgctgggtgatcatacatacatcaacatgaaggtgtgacatcagaatcatgagcaccatggctgc

SEQ ID NO: 446977 - DNA, 120 bp, Artificial Sequence
  ENSG00000154917_35 (sequence is synthesized)
agttgtgtgatccaaggctagttggcttggtagctgttggcagcagtttcccttggtcagaggcctccttgctatctatcgctgctctcttcttgtcatccttaaacattcagtcatgtt

SEQ ID NO: 446978 - DNA, 120 bp, Artificial Sequence
  ENSG00000154917_36 (sequence is synthesized)
cccaggtctgaggggagcaatggccagaccagtttcagtatctctggcaacagaaacaaggattgaaatggtggtagttaagagtgcagacacatctggggtgcaacgtctgcatcatcc

SEQ ID NO: 446979 - DNA, 120 bp, Artificial Sequence
  ENSG00000154917_37 (sequence is synthesized)
tggtggctagccagtgcggggaggccctgccctgggataccagttgtgacaataaagggatggccctcctggcttcagcatcctgcaggtagagcagcctcattccttcacaagatggaa

SEQ ID NO: 446980 - DNA, 120 bp, Artificial Sequence
  ENSG00000154917_38 (sequence is synthesized)
ggcaggtgaggatgtcaggatgagatgggaccaggtagccgaggacagtgaggcatgtctgagccacttgaggggcagctgaacagaaggatgtctgtgtgcatcaaccgagcagattgt

SEQ ID NO: 446981 - DNA, 120 bp, Artificial Sequence
  ENSG00000154917_39 (sequence is synthesized)
gcgcacactcgtttccgaactgcctctccccaaagaatgtgaggcattgtcaccttgttacagctatgtgaagcagagctgtcacaacttttcctgtctacaggcaggaaaaccaggatg

SEQ ID NO: 446982 - DNA, 120 bp, Artificial Sequence
  ENSG00000154917_40 (sequence is synthesized)
gagaagggcaacttgcttattaagatcacccagcaagttaggagtgatcagaaccagtgaagtttccatttttcatccattgctgccctgtgtgtgaacaaatgtgactccatatttatt

SEQ ID NO: 446983 - DNA, 120 bp, Artificial Sequence
  ENSG00000154917_41 (sequence is synthesized)
acacagcaaggactgctgtgtgtgggtgtgttcctcagaccatctctactctttttggttaggacactaggttcttcccagcatatgagtgagaatattggtggtattttgggctcctct

SEQ ID NO: 446984 - DNA, 120 bp, Artificial Sequence
  ENSG00000154917_42 (sequence is synthesized)
actgcacaagggccagtccccaagtctactctgattgattgtcatgggcacccacacagatcaggacaccctttgaatttttgtttgacatgaactatttaggtgttccaaaaccttggg

SEQ ID NO: 446985 - DNA, 120 bp, Artificial Sequence
  ENSG00000154917_43 (sequence is synthesized)
atctcaatgtgcaaactccttggactccagacccctgtctggttggcactcccagcagtgtgtggtttcatcaggaaatccttgcagcaggggtttagatggttccttcaggaggtggga

SEQ ID NO: 446986 - DNA, 120 bp, Artificial Sequence
  ENSG00000154917_44 (sequence is synthesized)
agcctccatagcattgaaggccagcctgcatctcgcggtgtgtgtccacttctcccctcactttcccctcacccatccctttaaagtgattggctgtgaggagcacagagggtggcaatt

SEQ ID NO: 446987 - DNA, 120 bp, Artificial Sequence
  ENSG00000154917_45 (sequence is synthesized)
ccatctgttatgggctcagaagacatagccgccatgttgatttcacattaaactgtgtaaaatgtggaaaagactcagcatgttggtcaaacaataaactgtcctaattctcaaaacaaa

SEQ ID NO: 446988 - DNA, 120 bp, Artificial Sequence
  ENSG00000154917_46 (sequence is synthesized)
gagattttgggaatccactgagaaaattcaagttggtgttcttgggggagcagagcgtgccctgggttccctgactgctctggccttccatgggtgttctgcgggactgctggcagccct

SEQ ID NO: 446989 - DNA, 120 bp, Artificial Sequence
  ENSG00000154917_47 (sequence is synthesized)
gttagtctccttgctgcccagggatctgggcaattgcagtgagggctaccccaactcgaggcgatttggggaatgatacaggggcacctcacaccgagaggctgtgaagtctggctctgg

SEQ ID NO: 446990 - DNA, 120 bp, Artificial Sequence
  ENSG00000154917_48 (sequence is synthesized)
gcagagaaaggcccaggcgacacgccctgcctagcttcccagcactcctccagagagcatcggtggattcttcccacccccacctcccagctcaccgcccttcttgggggaggggaggtc

SEQ ID NO: 446991 - DNA, 120 bp, Artificial Sequence
  ENSG00000154920_0 (sequence is synthesized)
aggagatctacttccgggccctgcgtggcagttgaaagagtggcgggagaagttgcagggaattatttgatagcacatactgatggctctaaagaagtcatcaccctcactggattctgg

SEQ ID NO: 446992 - DNA, 120 bp, Artificial Sequence
  ENSG00000154920_1 (sequence is synthesized)
tgatagtgactctgaggagttgccaacatttgcctttctgaagaaggaaccatcttcaacaaagaggagacagcctgaaagggaagagaagattgtagtggttgacatctcagattgtga

SEQ ID NO: 446993 - DNA, 120 bp, Artificial Sequence
  ENSG00000154920_2 (sequence is synthesized)
agcctcctgtcctccagcaccagagttattttcaccacctgtcccagaaatagctgaaactgtcacacaaacacagccagtcaggttgctaagcagtgaaagtgaagatgaagaagaatt

SEQ ID NO: 446994 - DNA, 120 bp, Artificial Sequence
  ENSG00000154920_3 (sequence is synthesized)
tattcctctggctcaaaggcttacatgtaagtttctgacccacaagcaactgagccctgaggactctagctccccagttaaaagtgttttggatcatcaaaataatgaaggtgcatcatg

SEQ ID NO: 446995 - DNA, 120 bp, Artificial Sequence
  ENSG00000154920_4 (sequence is synthesized)
tgactggaaaaagccctttccaaagatccctgaagttcccctccatgataccccagagaggagtgcagcagataacaaggacctgatcttagatccatgctgtcagcttccagcctacct

SEQ ID NO: 446996 - DNA, 120 bp, Artificial Sequence
  ENSG00000154920_5 (sequence is synthesized)
gtctacctgccctggccagagcagcagcttggcagtaaccaaaacaaattctgacatccttccaccccagaagaaaaccaagccgagtcagaaggtccagggaagaggctcacacggatg

SEQ ID NO: 446997 - DNA, 120 bp, Artificial Sequence
  ENSG00000154920_6 (sequence is synthesized)
ccggcagcagagacaagcaaggcagaaggaaagcaccctgagaagacaggaaagaaagaatgcagcactggttaccaggatgaaagcccagaggccagaggaatgcttaaaacacatcat

SEQ ID NO: 446998 - DNA, 120 bp, Artificial Sequence
  ENSG00000154920_7 (sequence is synthesized)
tgtagtgctggatccagtgctcttacagatggaaggtgggggccagctcctaggagcactgcagaccatggagtgccgctgtgtgattgaggcgcaggctgtgccttgcagtgtcacttg

SEQ ID NO: 446999 - DNA, 120 bp, Artificial Sequence
  ENSG00000154920_8 (sequence is synthesized)
gaggagaagggctgggccgtctgaggacagagaggactgggtggaggagccaacagtactggtgttgctccgggcagaggcatttgtgtccatgatcgacaatggaaagcagggaagcct

SEQ ID NO: 447000 - DNA, 120 bp, Artificial Sequence
  ENSG00000154920_9 (sequence is synthesized)
agacagcagggaaagctctgtcactggtgattgtggatcaggagaaatgcttcagtgctcagaatcctccaagaagagggaaacagggagcaaataaacagaccaagaagcagcagcaga

SEQ ID NO: 447001 - DNA, 120 bp, Artificial Sequence
  ENSG00000154920_10 (sequence is synthesized)
gacaaccagaggccagcatagggtccatggtatccagggtagacgctgaagaggcattggtggatctgcagctacacacagaagcccaggctcaaattgtgcagagctggaaagagctgg

SEQ ID NO: 447002 - DNA, 120 bp, Artificial Sequence
  ENSG00000154920_11 (sequence is synthesized)
ccgacttcacatgcgcattcacaaaggctgtggctgaggcgcccttcaagaagctccgagatgaaactaccttctccttctgtctggagagtgactgggctggaggggtgaaggtggacc

SEQ ID NO: 447003 - DNA, 120 bp, Artificial Sequence
  ENSG00000154920_12 (sequence is synthesized)
ttgctggcaggggactcgcactagtctggaggagacagattcagcagctgaaccgagtcagcctggaaatggccagtgcagttgtgaatgcctatccctccccacagctcctggtacagg

SEQ ID NO: 447004 - DNA, 120 bp, Artificial Sequence
  ENSG00000154920_13 (sequence is synthesized)
cttatcagcagtgtttttcggataaagaacgccagaatttgctcgcagacatacaggtgcgccgtggggaaggtgtgacatccacttctcgccgcattggaccagaactatccaggcgta

SEQ ID NO: 447005 - DNA, 120 bp, Artificial Sequence
  ENSG00000154920_14 (sequence is synthesized)
tctaccttcagatgaccactttacagccacatctctctttagatagtgctgactgattctagccctcagggatgaggatgaaaagctggaaacttccacttccccaacctcagagcctga

SEQ ID NO: 447006 - DNA, 120 bp, Artificial Sequence
  ENSG00000154920_15 (sequence is synthesized)
ctgtaatgaagagactggcagcacctcctggaacacaagcctaggtgaggcccagtctttcttgggtcttattatttgtgaaggtctctctgcctgtcggctggggcagagactgaaata

SEQ ID NO: 447007 - DNA, 120 bp, Artificial Sequence
  ENSG00000154920_16 (sequence is synthesized)
ctgccacctacctttggcatttaatgttcctctcctggcaaaaattcactgccacagacaaaccacccccactcctacccagccagccctcaaaacacaaaggaacaaagacagtccact

SEQ ID NO: 447008 - DNA, 120 bp, Artificial Sequence
  ENSG00000154920_17 (sequence is synthesized)
cagacacttatttaataactgtagaaatccaaaagaattagcatcaaatcttgaagtcgtgagtgaagctgcgggttggcttgactgggctcagccactgagctgcctcaaccggccaag

SEQ ID NO: 447009 - DNA, 120 bp, Artificial Sequence
  ENSG00000154920_18 (sequence is synthesized)
gaacgggattatgatgactatgcggacttctatattgtcttcatctcattgtgtgtattatgtatttagtttcaataaagcatttgtaccaatggctctggagcttggaggaagactaaa

SEQ ID NO: 447010 - DNA, 120 bp, Artificial Sequence
  ENSG00000154920_19 (sequence is synthesized)
ctctgtcactggtgattgtggatcaggagaaatgcttcagcctggagctgctgttctttgatttcctcccctgcaccagtgctcagaatcctccaagaagagggaaacagggagcaaata

SEQ ID NO: 447011 - DNA, 120 bp, Artificial Sequence
  ENSG00000154920_20 (sequence is synthesized)
ttctcctttcgcctatatgtaagtatgtgttctgcaggctgatatcataggccaggttaccataggccaagttaccaggattaattacaggtcagatcacaatgtaataagcactaggaa

SEQ ID NO: 447012 - DNA, 120 bp, Artificial Sequence
  ENSG00000154920_21 (sequence is synthesized)
agcaaatttttggcctactcagttcaagaagtgttcactgtcagaatttaaaataagtaaatgacctcagagacaatccagtccaagtcccttattttatacttgaggggactgaggcct

SEQ ID NO: 447013 - DNA, 120 bp, Artificial Sequence
  ENSG00000154920_22 (sequence is synthesized)
gaagagattgacttgtctaagctcctagcagttagaagaaccagaaatagattgcagattgccagatatccaaagaatctggtatcttttcttctactataatggactagatgtagtttt

SEQ ID NO: 447014 - DNA, 120 bp, Artificial Sequence
  ENSG00000154920_23 (sequence is synthesized)
taaatgaatcagcaactggccctatacctggcaacaaagtgagcactcaaattgtcaaaggcacaaaaaggccagatgtaacatggcgcccacctcttccaaggtcagtgggggggtttt

SEQ ID NO: 447015 - DNA, 120 bp, Artificial Sequence
  ENSG00000154920_24 (sequence is synthesized)
cagttgccacttgaggggaacaggtgtagaagagtaatgagcaacttacagctctccaaccacgctgttgcaggaagctccgagatgaaactaccttctccttctgtctggagagtgact

SEQ ID NO: 447016 - DNA, 120 bp, Artificial Sequence
  ENSG00000154920_25 (sequence is synthesized)
agaaatgcttcaggtttggatttgccctggtgatttcatgttaaaaggggcagctcttgggccaaggggggtgagtttagtttattcattgcagatgtaggtcactctgcaaggtagtcc

SEQ ID NO: 447017 - DNA, 120 bp, Artificial Sequence
  ENSG00000154920_26 (sequence is synthesized)
cagcctccatgctgggcctgtcctttaccatggctcttgcagtcaaagcaaatgtccctttcccctcatctctgcagtcagcccattgtctctcaagcttgaggcagaaggagctgacct

SEQ ID NO: 447018 - DNA, 120 bp, Artificial Sequence
  ENSG00000154928_0 (sequence is synthesized)
agtctggccggctccgtcctcccgtaggctccgctgtagctagcaatgtgacaccaggacgcactcgctctcgcgcgctctcccaggctcgttctccctcgccctctctctctcacacac

SEQ ID NO: 447019 - DNA, 120 bp, Artificial Sequence
  ENSG00000154928_1 (sequence is synthesized)
gcacgcacacacccacctctcccataaacacacacacacacatgcacacccacacccacgcgcgcccgcaccgccccacgcgcacacactcctgcccacgcccacgcagcgctccgggaa

SEQ ID NO: 447020 - DNA, 120 bp, Artificial Sequence
  ENSG00000154928_2 (sequence is synthesized)
gtccggtccgggcgagagcgcgaaaggataccgagaagccacccgcggagagcgcagcggcgccctgggacgcggcgctctcccggcgctgctgcctcggcttggtctcggcctgcgggc

SEQ ID NO: 447021 - DNA, 120 bp, Artificial Sequence
  ENSG00000154928_3 (sequence is synthesized)
cgtcggccggcgatggccctggattatctactactgctcctcctggcatccgcagtggctgcgatggaagaaacgttaatggacaccagaacggctactgcagagctgggctggacggcc

SEQ ID NO: 447022 - DNA, 120 bp, Artificial Sequence
  ENSG00000154928_4 (sequence is synthesized)
aatcctgcgtccgggtgggaagaagtcagtggctacgatgaaaacctgaacaccatccgcacctaccaggtgtgcaatgtcttcgagcccaaccagaacaattggctgctcaccaccttc

SEQ ID NO: 447023 - DNA, 120 bp, Artificial Sequence
  ENSG00000154928_5 (sequence is synthesized)
atcaaccggcggggggcccatcgcatctacacagagatgcgcttcactgtgagagactgcagcagcctccctaatgtcccaggatcctgcaaggagaccttcaacttgtattactatgag

SEQ ID NO: 447024 - DNA, 120 bp, Artificial Sequence
  ENSG00000154928_6 (sequence is synthesized)
actgactctgtcattgccaccaagaagtcagccttctggtctgaggccccctacctcaaagtagacaccattgctgcagatgagagcttctcccaggtggactttgggggaaggctgatg

SEQ ID NO: 447025 - DNA, 120 bp, Artificial Sequence
  ENSG00000154928_7 (sequence is synthesized)
aaggtaaacacagaagtcaggagctttgggcctcttactcggaatggtttttacctcgcttttcaggattatggagcctgtatgtctcttctttctgtccgtgtcttcttcaaaaagtgt

SEQ ID NO: 447026 - DNA, 120 bp, Artificial Sequence
  ENSG00000154928_8 (sequence is synthesized)
cccagcattgtgcaaaattttgcagtgtttccagagactatgacaggggcagagagcacatctctggtgattgctcggggcacatgcatccccaacgcagaggaagtggacgtgcccatc

SEQ ID NO: 447027 - DNA, 120 bp, Artificial Sequence
  ENSG00000154928_9 (sequence is synthesized)
aaactctactgcaacggggatggggaatggatggtgcctattgggcgatgcacctgcaagcctggctatgagcctgagaacagcgtggcatgcaaggcttgccctgcagggacattcaag

SEQ ID NO: 447028 - DNA, 120 bp, Artificial Sequence
  ENSG00000154928_10 (sequence is synthesized)
gccagccaggaagctgaaggctgctcccactgcccctccaacagccgctcccctgcagaggcgtctcccatctgcacctgtcggaccggttattaccgagcggactttgaccctccagaa

SEQ ID NO: 447029 - DNA, 120 bp, Artificial Sequence
  ENSG00000154928_11 (sequence is synthesized)
gtggcatgcactagcgtcccatcaggtccccgcaatgttatctccatcgtcaatgagacgtccatcattctggagtggcaccctccaagggagacaggtgggcgggatgatgtgacctac

SEQ ID NO: 447030 - DNA, 120 bp, Artificial Sequence
  ENSG00000154928_12 (sequence is synthesized)
aacatcatctgcaaaaagtgccgggcagaccgccggagctgctcccgctgtgacgacaatgtggagtttgtgcccaggcagctgggcctgacggagtgccgcgtctccatcagcagcctg

SEQ ID NO: 447031 - DNA, 120 bp, Artificial Sequence
  ENSG00000154928_13 (sequence is synthesized)
tgggcccacaccccctacacctttgacatccaggccatcaatggagtctccagcaagagtcccttccccccacagcacgtctctgtcaacatcaccacaaaccaagccgccccctccacc

SEQ ID NO: 447032 - DNA, 120 bp, Artificial Sequence
  ENSG00000154928_14 (sequence is synthesized)
gttcccatcatgcaccaagtcagtgccactatgaggagcatcaccttgtcatggccacagccggagcagcccaatggcatcatcctggactatgagatccggtactatgagaaggaacac

SEQ ID NO: 447033 - DNA, 120 bp, Artificial Sequence
  ENSG00000154928_15 (sequence is synthesized)
aatgagttcaactcctccatggccaggagtcagaccaacacagcaaggattgatgggctgcggcctggcatggtatatgtggtacaggtgcgtgcccgcactgttgctggctacggcaag

SEQ ID NO: 447034 - DNA, 120 bp, Artificial Sequence
  ENSG00000154928_16 (sequence is synthesized)
ttcagtggcaagatgtgcttccagactctgactgacgatgattacaagtcagagctgagggagcagctgcccctgattgctggctcggcagcggccggggtcgtgttcgttgtgtccttg

SEQ ID NO: 447035 - DNA, 120 bp, Artificial Sequence
  ENSG00000154928_17 (sequence is synthesized)
gtggccatctctatcgtctgtagcaggaaacgggcttatagcaaagaggctgtgtacagcgataagctccagcattacagcacaggccgaggctccccagggatgaagatctacattgac

SEQ ID NO: 447036 - DNA, 120 bp, Artificial Sequence
  ENSG00000154928_18 (sequence is synthesized)
cccttcacttacgaggatcccaacgaagctgtccgggagtttgccaaggagattgatgtatcttttgtgaaaattgaagaggtcatcggagcaggggagtttggagaagtgtacaagggg

SEQ ID NO: 447037 - DNA, 120 bp, Artificial Sequence
  ENSG00000154928_19 (sequence is synthesized)
ttcgaccatcctaacatcattcgcctggagggtgtggtcaccaagagtcggcctgtcatgatcatcacagagttcatggagaatggtgcattggattctttcctcaggcaaaatgacggg

SEQ ID NO: 447038 - DNA, 120 bp, Artificial Sequence
  ENSG00000154928_20 (sequence is synthesized)
cagttcaccgtgatccagcttgtgggtatgctcaggggcatcgctgctggcatgaagtacctggctgagatgaattatgtgcatcgggacctggctgctaggaacattctggtcaacagt

SEQ ID NO: 447039 - DNA, 120 bp, Artificial Sequence
  ENSG00000154928_21 (sequence is synthesized)
aacctggtgtgcaaggtgtccgactttggcctctcccgctacctccaggatgacacctcagatcccacctacaccagctccttgggagggaagatccctgtgagatggacagctccagag

SEQ ID NO: 447040 - DNA, 120 bp, Artificial Sequence
  ENSG00000154928_22 (sequence is synthesized)
gccatcgcctaccgcaagttcacttcagccagcgacgtttggagctatgggatcgtcatgtgggaagtcatgtcatttggagagagaccctattgggatatgtccaaccaagatgtcatc

SEQ ID NO: 447041 - DNA, 120 bp, Artificial Sequence
  ENSG00000154928_23 (sequence is synthesized)
aatgccatcgagcaggactaccggctgcccccacccatggactgtccagctgctctacaccagctcatgctggactgttggcagaaggaccggaacagccggccccggtttgcggagatt

SEQ ID NO: 447042 - DNA, 120 bp, Artificial Sequence
  ENSG00000154928_24 (sequence is synthesized)
gtcaacaccctagataagatgatccggaacccggcaagtctcaagactgtggcaaccatcaccgccgtgccttcccagcccctgctcgaccgctccatcccagacttcacggcctttacc

SEQ ID NO: 447043 - DNA, 120 bp, Artificial Sequence
  ENSG00000154928_25 (sequence is synthesized)
accgtggatgactggctcagcgccatcaaaatggtccagtacagggacagcttcctcactgctggcttcacctccctccagctggtcacccagatgacatcagaagacctcctgagaata

SEQ ID NO: 447044 - DNA, 120 bp, Artificial Sequence
  ENSG00000154928_26 (sequence is synthesized)
ggcatcaccttggcaggccatcagaagaagatcctgaacagcattcattctatgagggtccagataagtcagtcaccaacggcaatggcatgagaactcttgtttcttggggaaggagag

SEQ ID NO: 447045 - DNA, 120 bp, Artificial Sequence
  ENSG00000154928_27 (sequence is synthesized)
gagggaaaaggaccagggtcaagggggaccagaggttgaccactgtggaatgtactggagagactggcttctcagctgaggaatgcatttccatcagtgaagaatcaaccggacctgttg

SEQ ID NO: 447046 - DNA, 120 bp, Artificial Sequence
  ENSG00000154928_28 (sequence is synthesized)
ctagcaggcaatctccatttctcagtgacagaagcatgtttgagatgccgtgggaaaccaaatatataataataaaaatataaaaaggtgatgttcaacagaagtgaagacaaaacaata

SEQ ID NO: 447047 - DNA, 120 bp, Artificial Sequence
  ENSG00000154928_29 (sequence is synthesized)
tgcatcaggagaacaagagtaaacccagctcccattctcagtgggctgcagttgcccaaccacaggaagaaagggaaggaggtagagggaagaaacagaagcagtgttccattttcttcc

SEQ ID NO: 447048 - DNA, 120 bp, Artificial Sequence
  ENSG00000154928_30 (sequence is synthesized)
tcaccaatgacattcttttcttttctcctttcgtactcctccctgagagtcccctcccttctcccacactcgtttccctttgctcatgactcctgtagggaagtttcttcaaacaaaacc

SEQ ID NO: 447049 - DNA, 120 bp, Artificial Sequence
  ENSG00000154928_31 (sequence is synthesized)
cagctcctgagtctccagatgttgttctgtcagttgccaaaggactttgctgaccactgcatggggatccaaccaattcaattaatgtcttcatattgaagaagagatgtaccttcaatt

SEQ ID NO: 447050 - DNA, 120 bp, Artificial Sequence
  ENSG00000154928_32 (sequence is synthesized)
gaaaacctcgtttttcttttgtttgcattttctgcaaaaaggaaaaagaaaccacaaattggggaaaaaaaaagaagaaaaacctgtttccgtgtgcaaaagcacacatatgtatgtctg

SEQ ID NO: 447051 - DNA, 120 bp, Artificial Sequence
  ENSG00000154928_33 (sequence is synthesized)
tgttataaaatgactgtgcttgttcgtaacagatgcaaacaagaaagaagaactgggaagtctttgtccctaggaaatccaaaggggctggaatatggtgttggtttggctttctggttg

SEQ ID NO: 447052 - DNA, 120 bp, Artificial Sequence
  ENSG00000154928_34 (sequence is synthesized)
gcccaatcggcctattggctcaatgggaagagaggagagggagaaaaataaaatgaaaggaaaaaaaaaagtttgcaaattcagacaggaaacaggtgagtggtttgaattggatgcagt

SEQ ID NO: 447053 - DNA, 120 bp, Artificial Sequence
  ENSG00000154928_35 (sequence is synthesized)
gtgggccatcctggaatgatactgactgattaattattcctgataacatctcaagaaaaggagaaggaaagtgtttctggagaatgttctttcacatcactggaatctgcaattcaagaa

SEQ ID NO: 447054 - DNA, 120 bp, Artificial Sequence
  ENSG00000154928_36 (sequence is synthesized)
gtgacaagggagaattcttgctttacctatggactggcttaagccgtgtggcatccgaggaatgtttcaaatgtgtctgtgtttctctttacattccttgttgtacctcattgttcaatt

SEQ ID NO: 447055 - DNA, 120 bp, Artificial Sequence
  ENSG00000154928_37 (sequence is synthesized)
cacttttgtaaattccacctaacatttaattattttaaatttctccttttaccttaatctccttgctaattttatctgtctaattaaaaagagcagaagcatgtctgggtttacgtaaaa

SEQ ID NO: 447056 - DNA, 120 bp, Artificial Sequence
  ENSG00000154928_38 (sequence is synthesized)
gatttttgtaggtgcatccaactgcaacagaatacatcagcctcatcggaaggagaatggaaggcctgagaacgcacaaaaggagcatttggagaggaaacgttaatggacaccagaacg

SEQ ID NO: 447057 - DNA, 120 bp, Artificial Sequence
  ENSG00000154928_39 (sequence is synthesized)
ttttttcacgtgtgaaaacatctattgggaaaatggaaaaatcatttgacctcatattcctcatagctgacatgacaaaaccaaaatgtggtggtgagccaacttcaattttgcagaaac

SEQ ID NO: 447058 - DNA, 120 bp, Artificial Sequence
  ENSG00000154928_40 (sequence is synthesized)
tgacttggaaagaactgattacctgaaggaccgtgaggatcaaagttgtcccactgaccaggctgtaaactttggaactgataagtgagagagataagaaacgttaatggacaccagaac

SEQ ID NO: 447059 - DNA, 120 bp, Artificial Sequence
  ENSG00000154928_41 (sequence is synthesized)
gtattgcctccagcacactgtttacattcctactgtgtctcagcatctgttctcctgggaatagaactggtccacctgaacatatgatctgtgctgctgttggtgcaggaggacaggagg

SEQ ID NO: 447060 - DNA, 120 bp, Artificial Sequence
  ENSG00000154928_42 (sequence is synthesized)
gaaataagctggaagccatggatgtggagagtctggcttcaagatggagcttgtttacctgcaggttgtcccccaggatgccctcacagcttgtgcgtgacaaagatgtcctccgtgtac

SEQ ID NO: 447061 - DNA, 120 bp, Artificial Sequence
  ENSG00000154928_43 (sequence is synthesized)
gtagcgctgagaagccacgagaaagcacctagtgattttaacataaacatttccacagcattttcaagttctgcgaaaaagcccggtgatagatcagcctcgcggtgtgcagcgccggca

SEQ ID NO: 447062 - DNA, 120 bp, Artificial Sequence
  ENSG00000154928_44 (sequence is synthesized)
gctccgcacttcggacacctgggggcgcccgtgccattccgccggcgactgggactcgtcgcccgggaaacaaagatggggatttaaagaaaagccttcaaaatgcaactccgaatgtct

SEQ ID NO: 447063 - DNA, 120 bp, Artificial Sequence
  ENSG00000154928_45 (sequence is synthesized)
cctcatgagacgtgacttcagaggcctcctctctgaaggtgagggaggcgtcagctgttcagagagagaggctgccttgcctggggacacacagctagccagtggccggagcagcagtgg

SEQ ID NO: 447064 - DNA, 120 bp, Artificial Sequence
  ENSG00000154928_46 (sequence is synthesized)
catttgacctcatattcctcatagctgacatgcctggctcctttctgtggagaagatcctgagaggaaccacaacttgacaaaaccaaaatgtggtggtgagccaacttcaattttgcag

SEQ ID NO: 447065 - DNA, 120 bp, Artificial Sequence
  ENSG00000154928_47 (sequence is synthesized)
agatgcctgcaacagcagaatgagaagaaagcagggaaatgctctgtatcggccaaataaaatcaatctggctctcagatgcattggaaacttcaaattaaagcaggacaaatagcctaa

SEQ ID NO: 447066 - DNA, 120 bp, Artificial Sequence
  ENSG00000154928_48 (sequence is synthesized)
ggaggcttcacaaggatggaggcagtaggatgagagattcctgaaaggaggcagggatgactacatcataaaaagaaacgttaatggacaccagaacggctactgcagagctgggctgga

SEQ ID NO: 447067 - DNA, 120 bp, Artificial Sequence
  ENSG00000154928_49 (sequence is synthesized)
cttttctccagctcgcagtccacgggctagtggactctgcttggcgtgcaagcactgcgcgcgggggccggagaagctctgccgtggtatcccgcaagtggccgccgaaggagaggggtg

SEQ ID NO: 447068 - DNA, 120 bp, Artificial Sequence
  ENSG00000154928_50 (sequence is synthesized)
gtctggtggtccgggcgcctgcgggactgcaggtttccagggtcagtcggggagaggtggaaacccttttcgcctcttgagccttggaacaggagtgggctgggaaacgttaatggacac

SEQ ID NO: 447069 - DNA, 120 bp, Artificial Sequence
  ENSG00000154928_51 (sequence is synthesized)
tttttttcacgtgtgaaaacatctattgggaaaatggaaaaatcatttgacctcatattcctcatagctgacatgtctccttgttcccaccccactgaccactgaattgctgcttgaatt

SEQ ID NO: 447070 - DNA, 120 bp, Artificial Sequence
  ENSG00000154928_52 (sequence is synthesized)
gccaggaacttcctggtgtggcagaaggaagactaagaaccaggaagtggctgacaagaaagggagctgcattctgcaactggagttagtatttgctctgacctaacactttgggtgatt

SEQ ID NO: 447071 - DNA, 120 bp, Artificial Sequence
  ENSG00000154928_53 (sequence is synthesized)
cagctctacctgcaagcttgcaagacccaaggccagccactgttccatggatggttgctagctgaaggcacaaaggagataggctgctgaggtggggaggattctggtgacagaggccag

SEQ ID NO: 447072 - DNA, 120 bp, Artificial Sequence
  ENSG00000154928_54 (sequence is synthesized)
actcccaccatccccctctaacagcacggagtcagtttccaggcagtgggcaaggagggctaagaacttgccccaggctacctgcctcccagctgaaaagggctttagttcttcccctgc

SEQ ID NO: 447073 - DNA, 120 bp, Artificial Sequence
  ENSG00000154928_55 (sequence is synthesized)
ctgtggagtctgcatgccagattcgcaccctcccctgagttctggccaggaggcttctgaacaagttcatattgttacaaagttcagctggagacttccttctccctgtggcattttccc

SEQ ID NO: 447074 - DNA, 120 bp, Artificial Sequence
  ENSG00000154928_56 (sequence is synthesized)
agtgcctctggctgccctcctgagggatccctgtggtgccaggcaggaatttcctgcttggggaacccagtgggctcccagagcctttctcgcagcttcctctacccctgtatttcgctc

SEQ ID NO: 447075 - DNA, 120 bp, Artificial Sequence
  ENSG00000154930_0 (sequence is synthesized)
actctgggagcacagagagctcaggtagcctgcctagatggcggcgcgcaccctgggccgcggcgtcgggaggctgctgggcagcctgcgagggctctcggggcagcccgcgcggccgcc

SEQ ID NO: 447076 - DNA, 120 bp, Artificial Sequence
  ENSG00000154930_1 (sequence is synthesized)
gtgcggggtgagcgcgccgcgcagggcggcctcgggaccctcgggcagcgctcccgcagttgcagcagcagcagcacagccaggctcgtatcccgcgctgagtgcacaggcagcccggga

SEQ ID NO: 447077 - DNA, 120 bp, Artificial Sequence
  ENSG00000154930_2 (sequence is synthesized)
gccggccgccttctgggggcctctggcgcgggacactctcgtgtgggacaccccctaccacaccgtctgggactgcgacttcagcactggcaagatcggctggttcctgggaggccagtt

SEQ ID NO: 447078 - DNA, 120 bp, Artificial Sequence
  ENSG00000154930_3 (sequence is synthesized)
aaatgtctctgtcaactgcttggaccagcatgttcggaagtcccccgagagcgttgctttgatctgggagcgcgatgagcctggaacggaagtgaggatcacctacagggaactactgga

SEQ ID NO: 447079 - DNA, 120 bp, Artificial Sequence
  ENSG00000154930_4 (sequence is synthesized)
gaccacgtgccgcctggccaacacgctgaagaggcatggagtccaccgtggggaccgtgttgccatctacatgcccgtgtccccattggctgtggcagcaatgctggcctgtgccaggat

SEQ ID NO: 447080 - DNA, 120 bp, Artificial Sequence
  ENSG00000154930_5 (sequence is synthesized)
cggagctgtccacacagtcatctttgctggcttcagtgcagagtccttggctgggaggatcaatgatgccaagtgcaaggtggttatcaccttcaaccaaggactccggggtgggcgcgt

SEQ ID NO: 447081 - DNA, 120 bp, Artificial Sequence
  ENSG00000154930_6 (sequence is synthesized)
ggtggagctgaagaaaatagtggatgaggctgtgaagcactgccccaccgtgcagcatgtcctggtggctcacaggacagacaacaaggtccacatgggggatctggacgtcccgctgga

SEQ ID NO: 447082 - DNA, 120 bp, Artificial Sequence
  ENSG00000154930_7 (sequence is synthesized)
gcaggaaatggccaaggaggaccctgtttgcgccccagagagcatgggcagtgaggacatgctcttcatgctgtacacctcagggagcaccggaatgcccaagggcatcgtccataccca

SEQ ID NO: 447083 - DNA, 120 bp, Artificial Sequence
  ENSG00000154930_8 (sequence is synthesized)
ggcaggctacctgctctatgccgccctgactcacaagcttgtgtttgaccaccagccaggtgacatctttggctgtgtggccgacatcggttggattacaggacacagctacgtggtgta

SEQ ID NO: 447084 - DNA, 120 bp, Artificial Sequence
  ENSG00000154930_9 (sequence is synthesized)
tgggcctctctgcaatggtgccaccagcgtcctttttgagagcaccccagtttatcccaatgctggtcggtactgggagacagtagagaggttgaagatcaatcagttctatggcgcccc

SEQ ID NO: 447085 - DNA, 120 bp, Artificial Sequence
  ENSG00000154930_10 (sequence is synthesized)
aacggctgtccggctgttgctgaaatacggtgatgcctgggtgaagaagtatgatcgctcctccctgcggaccctggggtcagtgggagagcccatcaactgtgaggcctgggagtggct

SEQ ID NO: 447086 - DNA, 120 bp, Artificial Sequence
  ENSG00000154930_11 (sequence is synthesized)
tcacagggtggtgggggacagcaggtgcacgctggtggacacctggtggcagacagaaacaggtggcatctgcatcgcaccacggccctcggaagaaggggcggaaatcctccctgccat

SEQ ID NO: 447087 - DNA, 120 bp, Artificial Sequence
  ENSG00000154930_12 (sequence is synthesized)
ggcgatgaggcccttctttggcatcgtccccgtcctcatggatgagaagggcagcgtcgtggagggcagcaacgtctccggggccctgtgcatctcccaggcctggccgggcatggccag

SEQ ID NO: 447088 - DNA, 120 bp, Artificial Sequence
  ENSG00000154930_13 (sequence is synthesized)
gaccatctatggcgaccaccagcgatttgtggacgcctacttcaaggcctacccaggctattacttcactggagacggggcttaccgaactgagggcggctattaccagatcacagggcg

SEQ ID NO: 447089 - DNA, 120 bp, Artificial Sequence
  ENSG00000154930_14 (sequence is synthesized)
gatggatgatgtcatcaacatcagtggccaccggctggggaccgcagagattgaggacgccatcgccgaccaccctgcagtaccagaaagtgctgtcattggctacccccacgacatcaa

SEQ ID NO: 447090 - DNA, 120 bp, Artificial Sequence
  ENSG00000154930_15 (sequence is synthesized)
aagatagtgcgggtgactcagatgtggtggtgcaggagctcaagtccatggtggccaccaagatcgccaaatatgctgtgcctgatgagatcctggtggtgaaacgtcttccaaaaacca

SEQ ID NO: 447091 - DNA, 120 bp, Artificial Sequence
  ENSG00000154930_16 (sequence is synthesized)
ggtctgggaaggtcatgcggcggctcctgaggaagatcatcactagtgaggcccaggagctgggagacactaccaccttggaggaccccagcatcatcgcagagatcctgagtgtctacc

SEQ ID NO: 447092 - DNA, 120 bp, Artificial Sequence
  ENSG00000154930_17 (sequence is synthesized)
agaagtgcaaggacaagcaggctgctgctaagtgagctggcaccttgtggggctcttgggatgggcgggcacccaagccctggcttgtccttcccagaaggtacccctgaggttggcgtc

SEQ ID NO: 447093 - DNA, 120 bp, Artificial Sequence
  ENSG00000154930_18 (sequence is synthesized)
ttcctacgtcccagaagcagcccccaccccacacatgacccacaccgccctcacgtgaagctgggctgagagccctttctcccatccattggaggtcccaggagtgtcacccatggagag

SEQ ID NO: 447094 - DNA, 120 bp, Artificial Sequence
  ENSG00000154930_19 (sequence is synthesized)
gctatgcgacatggctagggctggttctgccatctgagtttggtttcctggaatgaaaaggcattgccatctccattcctctgccctcttgagccagcacaggaaggtgaggccctggga

SEQ ID NO: 447095 - DNA, 120 bp, Artificial Sequence
  ENSG00000154930_20 (sequence is synthesized)
tagcgcgcctgctcagataacacagagctagttagctagtagcaaccgtgttttctccagatctgtctagatacaaaggtcagaaatcttatttttatacttttatattgtggaagaaca

SEQ ID NO: 447096 - DNA, 120 bp, Artificial Sequence
  ENSG00000154930_21 (sequence is synthesized)
gcatgcaacactcacatgtagtgtgtggatttacttgaacatgttctttttaacatgtagttatgaaaatctccttttttgcctctactggtgaggaaacatgaggatcagaggccacat

SEQ ID NO: 447097 - DNA, 120 bp, Artificial Sequence
  ENSG00000154930_22 (sequence is synthesized)
ttttaattattgttagtgtatttggaagtctgaattggagatgtttgtacctctgtctaaacagttcccttgagaacttccaagcctccggcatcttttcctggtgagtgtttctcctgt

SEQ ID NO: 447098 - DNA, 120 bp, Artificial Sequence
  ENSG00000154930_23 (sequence is synthesized)
gcttggttgtgtataatggagctaactcctaagcggtggggtgaatgtggccgccttagttctgaagctactccagttatgttctgtttcttcaagctgtgatccagaaagatttttgtg

SEQ ID NO: 447099 - DNA, 120 bp, Artificial Sequence
  ENSG00000154930_24 (sequence is synthesized)
cccccagatgcctcttgataggagaggcaacatactccaaatagttgggttcttcagggaagctattagaaactcaggtgacttgttagagcactaacttggtcagagccaaatcctggc

SEQ ID NO: 447100 - DNA, 120 bp, Artificial Sequence
  ENSG00000154930_25 (sequence is synthesized)
aaacgctgcctgaccttcactctgtggttggggcggtgagaaccactgaggtccaatgatgagacttggaggtctggatccagtctctctttgttttaatgtgacttaggtgctgtcaac

SEQ ID NO: 447101 - DNA, 120 bp, Artificial Sequence
  ENSG00000154930_26 (sequence is synthesized)
attagcaagataatggaaatcacgacgccagtgggtgcttacctccctgctaggcatgcaggggctggcggttggcaggggaaggaggcccagtgagccgggtcccttaggggagggaga

SEQ ID NO: 447102 - DNA, 120 bp, Artificial Sequence
  ENSG00000154930_27 (sequence is synthesized)
gtttgtcctctttgccccacagtctacccttcagggccttgtggcagtgccagtgttcggggggtgtctgggccactgagtacccactcggtcgtggttgtgctggcctcttgggtgagt

SEQ ID NO: 447103 - DNA, 120 bp, Artificial Sequence
  ENSG00000154930_28 (sequence is synthesized)
gaacctgtgaagcccaggaggtggtgttggctgcagggtacacaaatactgagtggtggtcttttgttacaggcttagcaacaaagctgtgccctgggcatggggggctgtagtgtagct

SEQ ID NO: 447104 - DNA, 120 bp, Artificial Sequence
  ENSG00000154930_29 (sequence is synthesized)
acagttgtgcgtttgtgaaatggcttagctttccatgttgctgagaggaacctggacatggtcccgggcatctgaatgatctgtaggggagggagttcaaataaagctttattttgttca

SEQ ID NO: 447105 - DNA, 120 bp, Artificial Sequence
  ENSG00000154930_30 (sequence is synthesized)
aaaaggaaaacgaggcaccgagaagttaaggaacttgctcaaggtcacagagtttgaactcaggctacagatgctgcagcaactggagaaagtcctcatcgccccatatcacccaccacc

SEQ ID NO: 447106 - DNA, 120 bp, Artificial Sequence
  ENSG00000154930_31 (sequence is synthesized)
gacccccagcaggacgtgacccccgccaggacggaggccggcagctggggggctggagcatgggacccagaacacggactcaggcttgcgcagcctcctggcttctaggcgggagcctag

SEQ ID NO: 447107 - DNA, 120 bp, Artificial Sequence
  ENSG00000154930_32 (sequence is synthesized)
aaaggcgccagcccctttcgcgtgctgctgagactccaggggtggggttcactctcaggggcgcacaaaggcatgaaaaccttggcttcagcctctgagatgcggaactgaccgacctat

SEQ ID NO: 447108 - DNA, 120 bp, Artificial Sequence
  ENSG00000154930_33 (sequence is synthesized)
tgtcttgggacccaccagtgcgcttgggtgcaccagcccccttaacgttggtgccggctccctcccggctcctccccatcccagagggtcccctcgccccaggccctgagcctgcgtcct

SEQ ID NO: 447109 - DNA, 120 bp, Artificial Sequence
  ENSG00000154930_34 (sequence is synthesized)
ggggtcctgggccgcacgtgcctctggcagctcgaagaagctgtcggggcttgcaggagagcgtgcaaactgaaaccaaaacaggccgactcgaggaacatccgggtgggaccgcagact

SEQ ID NO: 447110 - DNA, 120 bp, Artificial Sequence
  ENSG00000154930_35 (sequence is synthesized)
caccggagcgcagcgcctgggccagggcctgggaccctgctccgccccgcgctcccctgcaccccttccccacgctgctcccctcttcctaagcggccccccctctcccgggcagcagaa

SEQ ID NO: 447111 - DNA, 120 bp, Artificial Sequence
  ENSG00000154930_36 (sequence is synthesized)
ctcccgggcagcagaagaaggggtgggacccgggcgggctccgggagggggccctggaggaatggatggtggcggaagggcggagcaggggcggggcccgcggagactccacggggcgcc

SEQ ID NO: 447112 - DNA, 120 bp, Artificial Sequence
  ENSG00000154930_37 (sequence is synthesized)
ggcccctgcacactggagtgtgcttggctctgaagacccaagctgctgcagctgcccctcgccacggtgggcccagctccatctgcctgcgaacaaagccccttctgagaaggaacttga

SEQ ID NO: 447113 - DNA, 120 bp, Artificial Sequence
  ENSG00000154930_38 (sequence is synthesized)
ggctgctgcccctggagtagttcttcagtaaaagatgaaaaccctctgttgggggtcgggggctaaggagctaactggacacctggaggtccggcagggagggcccagccatggcactcc

SEQ ID NO: 447114 - DNA, 120 bp, Artificial Sequence
  ENSG00000154930_39 (sequence is synthesized)
ccgaagggccagtttctctccatcagtctctcaggtgtgcctggaccctggggcaggcaggttgtgtgccacgccccctcggctggacgctgcccgtgggagcactgagtgtgtgctaag

SEQ ID NO: 447115 - DNA, 120 bp, Artificial Sequence
  ENSG00000154930_40 (sequence is synthesized)
tagcggttcggtctgtgagcggggctggagccctgtggagacgtgtggttaaacataaaccatgtgagaattctcaggaccacagccagcctgtggaagctaaggacagcttcaggtcca

SEQ ID NO: 447116 - DNA, 120 bp, Artificial Sequence
  ENSG00000154930_41 (sequence is synthesized)
gtggaagctaaggacagcttcaggtccatgacactgaaatggccctggcaaagtacttattactctgtctctaaaaataaacaggggccggtcgcagtggctcatgccggtaatcccagc

SEQ ID NO: 447117 - DNA, 120 bp, Artificial Sequence
  ENSG00000154930_42 (sequence is synthesized)
tttccccttctgtccatggtgtatctggtggggacaccgtccagccccattacagagagtttatgagaaaatgtccagcctcatgtatcctcacgggcttggtcatagcactcaagccag

SEQ ID NO: 447118 - DNA, 120 bp, Artificial Sequence
  ENSG00000154930_43 (sequence is synthesized)
ctctgcagccgccacgcgtgtgtgccagagtgtgctctggagtgtgcaggctgtgtgctgcgctgggactctttggacgaatctgacctgtggttcccactgcacagcgacatgctgggg

SEQ ID NO: 447119 - DNA, 120 bp, Artificial Sequence
  ENSG00000154930_44 (sequence is synthesized)
gaatgcagaatgagggactagaatggcctttaccaaggccacgctttgtttcgagtctgccagcttcttggtggctgggtctgggaaggggcgggagcacctaggtgttgcaatgccagg

SEQ ID NO: 447120 - DNA, 120 bp, Artificial Sequence
  ENSG00000154930_45 (sequence is synthesized)
tccatccaggcacactgcctggcctggcgtgacctggacacacactgaccccatgccagggcactgctgggcagactggcttctcctgccctgcccagtggcttggggtcaggcttgccc

SEQ ID NO: 447121 - DNA, 120 bp, Artificial Sequence
  ENSG00000154930_46 (sequence is synthesized)
tcccgctgggaggccaccctgtgtcacagtgtgtcccagatgtcaccttcctccctgcacttctatgtgccgttattccattatttacttaaatgctctctttaaattgacgcattgcaa

SEQ ID NO: 447122 - DNA, 120 bp, Artificial Sequence
  ENSG00000154930_47 (sequence is synthesized)
gattgagaatttgtttcagtgctttacaaacagcattttcagttgccatggaaaggctatgctggtaaggctgggatgtgggagagagctggtagggacccctgcccggtgacatgtcca

SEQ ID NO: 447123 - DNA, 120 bp, Artificial Sequence
  ENSG00000154930_48 (sequence is synthesized)
gatgtgatcaggagggtcagagaggacggagacgaggacagtttctcaggtgtgactagggtaacttagtgcccccctgaggttacctcgctctggcaggagcctgggcccctcctctga

SEQ ID NO: 447124 - DNA, 120 bp, Artificial Sequence
  ENSG00000154930_49 (sequence is synthesized)
ggactcctgcatttcacatctctgggctgggggtccacagggcactgacgtgtcctgggatttgaaagccccatctatgtctgagtccagtggctgagccagtactccctggggccactg

SEQ ID NO: 447125 - DNA, 120 bp, Artificial Sequence
  ENSG00000154930_50 (sequence is synthesized)
agaggggtccgggcatggtccactgtgtctggggattcagcagcccctggattgaactccataaagcaagtgcaagatcaaggaaaggacaatggaagtgacctttagacaaacgtttgg

SEQ ID NO: 447126 - DNA, 120 bp, Artificial Sequence
  ENSG00000154930_51 (sequence is synthesized)
gcatcacaatcactgtctttcatagggtggcctagccttaggtctgttggggtggtgttggggcatggtctgctgtggacgctgctgcccagggcacgttctgcgtgtgtggagctattg

SEQ ID NO: 447127 - DNA, 120 bp, Artificial Sequence
  ENSG00000154930_52 (sequence is synthesized)
caagtctggtgttgccaggcttcttaatgtctgccagatgtgtggggataatttgtctatcatgtgtatgatgatgtgcattttcctgatttctaatgaatttgagtatccattctataa

SEQ ID NO: 447128 - DNA, 120 bp, Artificial Sequence
  ENSG00000154930_53 (sequence is synthesized)
ttatgaagagctgatgaacagctcttggttggctctaaagctgcctgtgaatatcgtatatttgtccccactctctctgttttgcagcagctctgaaaaagggcagcccctggaccttgt

SEQ ID NO: 447129 - DNA, 120 bp, Artificial Sequence
  ENSG00000154930_54 (sequence is synthesized)
ctaggacctagacccagcaagcctctggtgctgctggccaggctcttgtctctcttgtctccagtgtcctgagccttgcctgcctcgtcctggctcttaactggctcctccacccatgtg

SEQ ID NO: 447130 - DNA, 120 bp, Artificial Sequence
  ENSG00000154930_55 (sequence is synthesized)
gaaggtttcctccctccagctccatcctcagaactcaacagtccaggcccacttctgatcccatatcaacgaccaagatgagaaaaacggtgttctttccctcaaagatctaacagccta

SEQ ID NO: 447131 - DNA, 120 bp, Artificial Sequence
  ENSG00000154930_56 (sequence is synthesized)
gtggggtggcagcagggggactgacagctgttcccacatagcatgtgccataaactagattcatgggtggagtcaggaaaggcttcacagagcaggaggtggctgaactgagtcttgagg

SEQ ID NO: 447132 - DNA, 120 bp, Artificial Sequence
  ENSG00000154930_57 (sequence is synthesized)
gatgaataggagttcgccacatggatataggaaggcctttcaggcaaaggctgtaggtctttacagatcatagcttgttcagaaaaccaatcatccattcatgcacttaacaaccatgtg

SEQ ID NO: 447133 - DNA, 120 bp, Artificial Sequence
  ENSG00000154930_58 (sequence is synthesized)
ttgagcacctcctgtgttccaggcatggttctagatgctggggacacagcagtgagtgagaaggtctctgaccccatagaggggtcaagagtagaggagagagacagacaaagagcaaga

SEQ ID NO: 447134 - DNA, 120 bp, Artificial Sequence
  ENSG00000154930_59 (sequence is synthesized)
aagatgatcaccaaggaaacgacacagtcagttaggtgctacatgccagggaagaatgggtgaaggtggcatggggctggggcagatgagcagtaggagagccacacatatatagaagct

SEQ ID NO: 447135 - DNA, 120 bp, Artificial Sequence
  ENSG00000154930_60 (sequence is synthesized)
tcgagggagagacagagcacctcacaggccagtggggacgggcaggctatcagggatggcaccgggatgagcaactccttatatggacaacaatcaaattagatccctcttcacagtgtg

SEQ ID NO: 447136 - DNA, 120 bp, Artificial Sequence
  ENSG00000154930_61 (sequence is synthesized)
ctctcagctgcctctcagctgtctgtgttgtccagggtggcagcctctggctgctcatggtgctgaatggcacttgaagtgtggctcatgcagccagggagctgctgatttaattgaact

SEQ ID NO: 447137 - DNA, 120 bp, Artificial Sequence
  ENSG00000154930_62 (sequence is synthesized)
gaaatagctaccctggcccatggcaccatgttgcacacacacccccaaaggctggtggtgcccatttgctgtgcatctgtgcaccttctcatggaagtctcattccatcaaaccacatta

SEQ ID NO: 447138 - DNA, 120 bp, Artificial Sequence
  ENSG00000154930_63 (sequence is synthesized)
tgggttatttcacagatgtgtacacagagaggggaggtcccatgtcccaggtcacacgcagccagtcagcattagagctgagatgccaagctctcagccacacatgtgcactcacctgga

SEQ ID NO: 447139 - DNA, 120 bp, Artificial Sequence
  ENSG00000154930_64 (sequence is synthesized)
acatctgtggagctgttagaatcgctgccacttttcatgaaactgaagtgcatctttgggtttgcaactaaagaaaccagctgctacaatgtcactaacataggattcaaaagcccttcg

SEQ ID NO: 447140 - DNA, 120 bp, Artificial Sequence
  ENSG00000154930_65 (sequence is synthesized)
agccctttccttgactaccctttgaacagaggagagctatgcaaacacgctgcgagcggccttgagagcccgaggagggtctgctttctgggcccctgcagagggcaggggtcgcgggct

SEQ ID NO: 447141 - DNA, 120 bp, Artificial Sequence
  ENSG00000154930_66 (sequence is synthesized)
ggtggtctgccccgcccagagagaaagggccttggcttcccctcattcttcgttctgtgttagctctttttattgcaaataattaattaaagtcagtacagcaagagtgggaaagtggtt

SEQ ID NO: 447142 - DNA, 80 bp, Artificial Sequence
  ENSG00000154945_0 (sequence is synthesized)
gaacagggtcccccggagccggccttcgggaggcgcggcccgggaggaggcctgggcctgcgggccgggagcagcagggg

SEQ ID NO: 447143 - DNA, 80 bp, Artificial Sequence
  ENSG00000154945_1 (sequence is synthesized)
gggagggagcggaagtcccggggcgggcgcgggcagcggcgcgagcagggcgggcgagttccgcgctccctccccatggc

SEQ ID NO: 447144 - DNA, 120 bp, Artificial Sequence
  ENSG00000154945_2 (sequence is synthesized)
gggcctggggctgtgggaagatgaacgccctcctagagcagaaggagcagcaggagaggctgcgggaggccgcggccttaggggacattcgggaggtgcagaaactggtggagagcgggg

SEQ ID NO: 447145 - DNA, 120 bp, Artificial Sequence
  ENSG00000154945_3 (sequence is synthesized)
tggatgtgaactcccaaaatgaggtcaacggctggacttgtttacactgggcatgtaaacgaaaccatggtcaggtggtctcttacctgttaaaatcaggagctgacaaagaaattctta

SEQ ID NO: 447146 - DNA, 120 bp, Artificial Sequence
  ENSG00000154945_4 (sequence is synthesized)
ccacaaaaggagaaatgccagtccagttaacatcaaggagagaaatcaggaagattatgggagtggaagaagaagatgatgatgatgatgatgatgacaacctcccccagctgaagaagg

SEQ ID NO: 447147 - DNA, 120 bp, Artificial Sequence
  ENSG00000154945_5 (sequence is synthesized)
agtcagaactgccctttgttcccaactatttggccaacccagccttcccttttatctatacacccacagcagaggattcagcccagatgcagaatgggggcccctccacaccccctgcat

SEQ ID NO: 447148 - DNA, 120 bp, Artificial Sequence
  ENSG00000154945_6 (sequence is synthesized)
caccccctgcagatggctcacctccattgcttccccctggggaacctcccctgttagggacctttccccgggaccacacctctttggcactagttcagaatggtgatgtgtcggccccct

SEQ ID NO: 447149 - DNA, 120 bp, Artificial Sequence
  ENSG00000154945_7 (sequence is synthesized)
ctgccatactcagaacaccagaaagcacaaaaccgggtcctgtttgtcagccaccagtgagtcagagccgctccctgttttcttctgtcccgtccaagccaccaatgtctctggagcctc

SEQ ID NO: 447150 - DNA, 120 bp, Artificial Sequence
  ENSG00000154945_8 (sequence is synthesized)
aaaatgggacgtatgcaggaccagcgccagcattccagccatttttcttcactggagcatttccatttaatatgcaagagctggtactcaaggtgagaattcagaacccatctcttcgag

SEQ ID NO: 447151 - DNA, 120 bp, Artificial Sequence
  ENSG00000154945_9 (sequence is synthesized)
aaaatgatttcattgaaattgaactggaccgacaggagctcacctaccaagagttgctcagagtgtgttgctgtgagctgggtgttaatccagatcaagtggagaagatcagaaagttac

SEQ ID NO: 447152 - DNA, 120 bp, Artificial Sequence
  ENSG00000154945_10 (sequence is synthesized)
ccaatactctgttaaggaaggacaaggatgttgctcgactccaagatttccaggagctggaactggttctgatgataagtgaaaataattttctgttcagaaatgctgcatccacactga

SEQ ID NO: 447153 - DNA, 120 bp, Artificial Sequence
  ENSG00000154945_11 (sequence is synthesized)
ctgaaaggccttgctataacaggagagcttcaaaactgacttactaatgcagcagggacttttatcactgagtattatgacagtgtgcatcacctctgggccaaggacaagccattgatc

SEQ ID NO: 447154 - DNA, 120 bp, Artificial Sequence
  ENSG00000154945_12 (sequence is synthesized)
taaatgcctcagatgcccgggagggcctctggtgccactgcatagtatatactaacatcattctgccaaggtaggaagcccctgacccccaagcagtggtgccactcttccaagcctctt

SEQ ID NO: 447155 - DNA, 120 bp, Artificial Sequence
  ENSG00000154945_13 (sequence is synthesized)
ggtgcacagtaaacctattgcttgaagctttgaacagctgagaagtggtctggagaggcagaagctgaaggttctatatccagtgtgttttatgtccagaatgtaagagagttgtctaag

SEQ ID NO: 447156 - DNA, 120 bp, Artificial Sequence
  ENSG00000154945_14 (sequence is synthesized)
cagcagctgagagagagcggagcctatttctagccactcctgttgacagtgcacctgaagggctgggatgcgtttttcttggtgttgcatgctcacaactctgctgacattgggaactta

SEQ ID NO: 447157 - DNA, 120 bp, Artificial Sequence
  ENSG00000154945_15 (sequence is synthesized)
tgagagaggaagactcgggaaagcacagatactggacagatggattctggtgtggggaaagcacagatactggacagatggattctagtgtgacttgtgactgtgaggtttcctataaca

SEQ ID NO: 447158 - DNA, 120 bp, Artificial Sequence
  ENSG00000154945_16 (sequence is synthesized)
tatttataaatgttactcaggttaaaagtatttaagaatacagttaactaattgtaaatatgctgttaaccaaaagagctttccctccctcactttttcctttgtaaacactcatgactg

SEQ ID NO: 447159 - DNA, 120 bp, Artificial Sequence
  ENSG00000154945_17 (sequence is synthesized)
ttttacaatgccccccacccccaccccgcccatagagacagggtctcactatgtggcccaggctggtctcaaacttctggccttaagtgatgctcctgtccttggcctcccaaagtgctg

SEQ ID NO: 447160 - DNA, 120 bp, Artificial Sequence
  ENSG00000154945_18 (sequence is synthesized)
ggtgtgagccactgcacccagcccactttttttttactctgaagtgattccagtcatatgtgtgtgtaactgcatcctatgagaagagcacaaatattgctgttccatgttctccacttt

SEQ ID NO: 447161 - DNA, 120 bp, Artificial Sequence
  ENSG00000154945_19 (sequence is synthesized)
tccactttcattttccactacaaatgaaaagcaatttttgagactgaatctgttgctattttaaaggttattgtgggaaactgagctaaaggagttagcatctttatttttgtatcaaaa

SEQ ID NO: 447162 - DNA, 120 bp, Artificial Sequence
  ENSG00000154945_20 (sequence is synthesized)
ataaaggttattttgaaattattaggatttttacacaattctgaaatctgttgcttttgtaaacaaattgtttgatcttagtgatccccctactactaccaccaattcacttcacaaagt

SEQ ID NO: 447163 - DNA, 120 bp, Artificial Sequence
  ENSG00000154945_21 (sequence is synthesized)
cagttatgagtctaccagactttgttctgaaaaatagaaacaaaacacctgattaagctcttgagtatggcataggaattttttagaagaatgcattcaaggattcttttcctttccttc

SEQ ID NO: 447164 - DNA, 120 bp, Artificial Sequence
  ENSG00000154945_22 (sequence is synthesized)
agtgtcattaatgttaaaagagcagccactgttttgttgaaacaaacagcttaacttcagaaataagaactagcacacttagacaaacaggagagcaggggtttgaagccagctgtcgaa

SEQ ID NO: 447165 - DNA, 120 bp, Artificial Sequence
  ENSG00000154945_23 (sequence is synthesized)
gagcatccctgctgtcttaagaagctttttccccatagtgcctatagtttccaaagaaactcaacttcctaactgtgttaacttaattttattagaacactacagttgagtgagaacgtg

SEQ ID NO: 447166 - DNA, 120 bp, Artificial Sequence
  ENSG00000154945_24 (sequence is synthesized)
cagaagatgtcaacagaagagaatgttgtgctaagataatggcctcctgctgctgcctaaatgctgaaatgaggttgagatgtttttcaaggctaacttcatggactcactctgtttagt

SEQ ID NO: 447167 - DNA, 120 bp, Artificial Sequence
  ENSG00000154945_25 (sequence is synthesized)
gacttaattgtatcccaccaattactgctggtgacttactcacccttgtacagtgtttgcatagcagagtgaaggttacttattaccctctttctctcaagtgctttaaagaagaaacct

SEQ ID NO: 447168 - DNA, 69 bp, Artificial Sequence
  ENSG00000154945_26 (sequence is synthesized)
tattaccctctttctctcaagtgctttaaagaagaaacctccctggtgaagtgcagtggcataatctca

SEQ ID NO: 447169 - DNA, 120 bp, Artificial Sequence
  ENSG00000154945_27 (sequence is synthesized)
acctgccttggcctcccaaagtgctccgattacaggtgtgagccacccggcccagcccctcccttgtgtttcaaccaatcggaagtgaatttaactagatgtagtaaccttttttttctt

SEQ ID NO: 447170 - DNA, 120 bp, Artificial Sequence
  ENSG00000154945_28 (sequence is synthesized)
cttttttttctttacttctaaaacagttacagtttactaataaagttaagtctggttctgtcctagaggaaataaattcactattaattcatgtcttaagttacttgggttaaaacactt

SEQ ID NO: 447171 - DNA, 120 bp, Artificial Sequence
  ENSG00000154945_29 (sequence is synthesized)
tcagccacccagattaattaaagtggagcagtggagcccctggctgggagatggcctccagaggagcagctgcagggcatgttctgggcttagcgacagaggcaagcaagggactggtgt

SEQ ID NO: 447172 - DNA, 120 bp, Artificial Sequence
  ENSG00000154945_30 (sequence is synthesized)
ctctggtgagaggtgggtttgatgtatctctgtcctatgctggtctctcttctcctttataaaatcctctgtggtcaactgactactgcgtatcgcagtggaataagactgcacagttgc

SEQ ID NO: 447173 - DNA, 120 bp, Artificial Sequence
  ENSG00000154945_31 (sequence is synthesized)
tggtaggtgagtttaaagtcttaatctatgcattcagagaaatatttttatatgctttgtgtaatttataacaaggattttttttttagctttgttaactgtgaattcacccctcctcct

SEQ ID NO: 447174 - DNA, 120 bp, Artificial Sequence
  ENSG00000154945_32 (sequence is synthesized)
ccactgcatatttaaagcatgtgttcacactgtgtgtaaacattcactgaagattttttctttgtgcattgctgactgttcaaacataacaagtattattaaaattaaatattaactgac

SEQ ID NO: 447175 - DNA, 120 bp, Artificial Sequence
  ENSG00000154945_33 (sequence is synthesized)
cctcagactcattgaagacttgtggtattattggctacgttcttaatgctggtcaaacaactgctctatttctttctttttttttttttttccgagacggagtttagctcttgttgccca

SEQ ID NO: 447176 - DNA, 120 bp, Artificial Sequence
  ENSG00000154945_34 (sequence is synthesized)
tccatagtccctgaaaaggaatatagcaatagaaaaatatgtttcagagactgagatgatctaatgagcgatactgatagagtatattccacggtatcattggagttagccagccagtga

SEQ ID NO: 447177 - DNA, 120 bp, Artificial Sequence
  ENSG00000154945_35 (sequence is synthesized)
gcttaccttctggaggctattgaaattaaaactcctaggttaagttagtttttctcaggagccagaaatgaaatttaaaaacaaaatttaagcatattaaatattttgctcatcggcttt

SEQ ID NO: 447178 - DNA, 120 bp, Artificial Sequence
  ENSG00000154945_36 (sequence is synthesized)
gtgaaaagttgagattaccagcccggttacctggttctagctgaactctaacaggcttgtttatacattatttactaatgtttagaatctgaaatccaaaatcacttctcctctttttca

SEQ ID NO: 447179 - DNA, 120 bp, Artificial Sequence
  ENSG00000154957_0 (sequence is synthesized)
atctgcgtccgcacctgactcagctgggcaccccggagctacggaggggccagcgggctcccttgcccatgcgtctgggagcgcgcgggggacgtggcgaggctgaaaatgagtctctgg

SEQ ID NO: 447180 - DNA, 120 bp, Artificial Sequence
  ENSG00000154957_1 (sequence is synthesized)
aagaggaaacccgatgggatgatgcctggagtctctccctctctcatcagagtgcagtcggcatttggggggcgcatggtggagaatacatatccaatgagcagcgctgccctggcctcg

SEQ ID NO: 447181 - DNA, 120 bp, Artificial Sequence
  ENSG00000154957_2 (sequence is synthesized)
agcactaaatgccagttcccctagctgcttgtgacaaccagaaaacgccccaacaaatcaccagacgttggcagttctccccaaagcaaaggctttagagcttcctgggttaatctggct

SEQ ID NO: 447182 - DNA, 80 bp, Artificial Sequence
  ENSG00000154957_3 (sequence is synthesized)
ccaaagcaaaggctttagagcttcctgggttaatctggctgccacttgtgagcctcggaggttcctgatctgtacaccag

SEQ ID NO: 447183 - DNA, 120 bp, Artificial Sequence
  ENSG00000154957_4 (sequence is synthesized)
ggctgttctcctacctcagcctcctgagttgctgggattacagtgtcctggtgaagacctagttcttgccggagacaattccactgcagaagcactttacttaaaaggacttgccaggct

SEQ ID NO: 447184 - DNA, 120 bp, Artificial Sequence
  ENSG00000154957_5 (sequence is synthesized)
ggacaatgcccgttgacttggggcaggccctaggcctgctgccatcgctggcgaaggccgaggactcccagttctcagaatcagatgctgcccttcaagaggaactctccagccctgaga

SEQ ID NO: 447185 - DNA, 120 bp, Artificial Sequence
  ENSG00000154957_6 (sequence is synthesized)
ccgcacgccagcttttcaggcagttccgttaccaggtgatgtctgggcctcatgagaccttgaagcaacttcggaagctctgtttccagtggctacagccagaggttcacaccaaagagc

SEQ ID NO: 447186 - DNA, 120 bp, Artificial Sequence
  ENSG00000154957_7 (sequence is synthesized)
agatcctagagatcctcatgttggagcagtttctgaccatcctgcctggggagatccagatgtgggtgcggaaacagtgtccaggaagtggagaagaggcagtgacccttgtggaaagct

SEQ ID NO: 447187 - DNA, 120 bp, Artificial Sequence
  ENSG00000154957_8 (sequence is synthesized)
tgaagggggacccccagagactgtggcaatggatcagtatccaggttctaggacaggacatcttatcagagaagatggaatctccaagctgccaagtgggggaagtggagccccatcttg

SEQ ID NO: 447188 - DNA, 120 bp, Artificial Sequence
  ENSG00000154957_9 (sequence is synthesized)
aagtggtgcctcaggagttgggacttgagaattcatcctcagggcctggggagcttctgagccacatcgtgaaagaggaatctgacacagaagcagaactagccctggctgcctcccagc

SEQ ID NO: 447189 - DNA, 120 bp, Artificial Sequence
  ENSG00000154957_10 (sequence is synthesized)
ctgcccgactggaggaaaggctgatcagagaccaggacctcggagcctcactgctcccagcagcacctcaggaacagtggagacaactggattccactcaaaaggagcaatactgggatc

SEQ ID NO: 447190 - DNA, 120 bp, Artificial Sequence
  ENSG00000154957_11 (sequence is synthesized)
ggagacctatgggaaaatggtctcaggagcaggcatttcccatcccaaatctgacctgactaattcaatagaatttggggaagagctggcaggaatataccttcatgtcaatgagaagat

SEQ ID NO: 447191 - DNA, 120 bp, Artificial Sequence
  ENSG00000154957_12 (sequence is synthesized)
cccaagacccacctgcataggagatagacaagagaatgacaaggagaacctaaatttggagaatcacagggaccaggagctcctgcatgcttcctgtcaagcttcaggagaggttccttc

SEQ ID NO: 447192 - DNA, 120 bp, Artificial Sequence
  ENSG00000154957_13 (sequence is synthesized)
tcaggcttccttgaggggcttcttcactgaggatgagccaggatgctttggagaaggagagaatctccctgaggctctgcaaaacattcaggatgagggaacaggggaacagctgtctcc

SEQ ID NO: 447193 - DNA, 120 bp, Artificial Sequence
  ENSG00000154957_14 (sequence is synthesized)
tcaagaaaggatttctgagaaacaactaggtcagcatttgcctaatcctcattcaggagaaatgtccaccatgtggcttgaggagaagagagagacctcccagaaggggcagccaagagc

SEQ ID NO: 447194 - DNA, 120 bp, Artificial Sequence
  ENSG00000154957_15 (sequence is synthesized)
ccccatggcccagaagctccccacctgcagggagtgtgggaagaccttttataggaattctcagcttatttttcaccaaagaactcacaccggagagacatactttcagtgcaccatctg

SEQ ID NO: 447195 - DNA, 120 bp, Artificial Sequence
  ENSG00000154957_16 (sequence is synthesized)
caaaaaagcctttctgcggagttcagactttgtgaagcatcagagaactcacacgggagagaagccctgtaaatgtgattactgtgggaaaggctttagtgacttctcaggattgcgcca

SEQ ID NO: 447196 - DNA, 120 bp, Artificial Sequence
  ENSG00000154957_17 (sequence is synthesized)
ccacgagaaaatccacacaggagagaaaccctataaatgtcctatctgtgagaaaagtttcattcagagatcaaactttaatagacatcagagggttcacactggagagaaaccttataa

SEQ ID NO: 447197 - DNA, 120 bp, Artificial Sequence
  ENSG00000154957_18 (sequence is synthesized)
atgttcgcactgtgggaaaagtttcagctggagctcgagccttgacaaacatcaaagatcccacttaggaaagaagccctttcaatagccagtaaccaaactctctttccccatttctat

SEQ ID NO: 447198 - DNA, 120 bp, Artificial Sequence
  ENSG00000154957_19 (sequence is synthesized)
ctcccagcccagtcacaaaaatactcagctccatcaagaggaattgtgtctaagaggatacccctgttaatctccttttttcttggattggagaggagagaatctggacatggctttgga

SEQ ID NO: 447199 - DNA, 120 bp, Artificial Sequence
  ENSG00000154957_20 (sequence is synthesized)
cttggaggatatcttggattggattgcacaatggcttaaattcttgattctgcctcaggagaaagaatagtcttcatgtttccactcatccttcctttggacccatcggggaaaaagtct

SEQ ID NO: 447200 - DNA, 120 bp, Artificial Sequence
  ENSG00000154957_21 (sequence is synthesized)
aaattggagatccagttttagaagtgctttctgggaagcatttaatgggattagctgtagtcactgcttatgggaagaacctcagatcagccccttaaaatgagttctagagcaggtctt

SEQ ID NO: 447201 - DNA, 120 bp, Artificial Sequence
  ENSG00000154957_22 (sequence is synthesized)
ctgttccagaaggggagaagcatagagggcctgtgagctcacgtgtgttctttgtcataggggtgaaaaactaacttcaagtgtcccttgtttgaaataaacttagcagagtcactttct

SEQ ID NO: 447202 - DNA, 68 bp, Artificial Sequence
  ENSG00000154957_23 (sequence is synthesized)
acccagctcccggaagtgcgcccggagccggcgccgcgggccgacgtgatccacctgcctcggcctcc

SEQ ID NO: 447203 - DNA, 120 bp, Artificial Sequence
  ENSG00000154975_0 (sequence is synthesized)
ttcaattcccctgcatccacactgcaaccgggtgcaagtctttcctaggttatagacagcccgcctccccacgagaccttctgcggactggctgcccctggcctcggcctgggtgggtgg

SEQ ID NO: 447204 - DNA, 120 bp, Artificial Sequence
  ENSG00000154975_1 (sequence is synthesized)
gtggtgctcgcgccgcccctactttcccctggggccctggagagccgcgcgctgggtgtgtgtgtgtgtgcgcgcgcgggtttggtggggaaatctccttcagtggaagctgctgagtgt

SEQ ID NO: 447205 - DNA, 120 bp, Artificial Sequence
  ENSG00000154975_2 (sequence is synthesized)
cgttggcggaaagtatcctggagcccagcaaaagcctccaaagcactagagcttccctaaagaaaagcagaataaaagaaagacaagaagggaagcccgttcctctaaagcccgggtttc

SEQ ID NO: 447206 - DNA, 120 bp, Artificial Sequence
  ENSG00000154975_3 (sequence is synthesized)
caatagtcccggatcctcctggagttgggcgaaggcgcagttggcagcagccgctgctggcacccggacttggaaaggcggtgttcccccttttcgggaggagggaggcagggacttgca

SEQ ID NO: 447207 - DNA, 120 bp, Artificial Sequence
  ENSG00000154975_4 (sequence is synthesized)
ggcaagagttgcacctggtctaggaacctgcagagaaaagaactctggggagaagaactgccccggagcgcagcagccaccctccgaccatgccccggtgaggggggcggacttcgaggg

SEQ ID NO: 447208 - DNA, 120 bp, Artificial Sequence
  ENSG00000154975_5 (sequence is synthesized)
caacttgccgcggactgcctgggcttagccagcgagctacgcgctcccgggagcccggaattgcacggcgcagcccggcggggggctatcgtctatgtcttcttggggcgccagacgaat

SEQ ID NO: 447209 - DNA, 120 bp, Artificial Sequence
  ENSG00000154975_6 (sequence is synthesized)
cggggtctcgtttttgctggaagagcccagtgttggtggcttcaggtggctgctgccgccgccgccgccgccgccgctgctagtgcggtttccgccgctggtgcgaagagaagagacacg

SEQ ID NO: 447210 - DNA, 120 bp, Artificial Sequence
  ENSG00000154975_7 (sequence is synthesized)
cgagcggggagacctccaaggcagcgaggcatcggacatgtgtcagcacatctggggcgcacatccgtcgagcccgaggggagatttgccggaacaattcaaactgcgatattgatcttg

SEQ ID NO: 447211 - DNA, 120 bp, Artificial Sequence
  ENSG00000154975_8 (sequence is synthesized)
ggggtgactgtccctggccggctgtcgggtgggagtgcgagtgtgcactcgctcggaagtgtgtgcgagtgtgtatgtgtgtgtgccgtgtcgggctccccccttccccccgttttcccg

SEQ ID NO: 447212 - DNA, 120 bp, Artificial Sequence
  ENSG00000154975_9 (sequence is synthesized)
tcgagtgatgcacttggaatgagaatcagaggatggaaatagtctgggaggtgctttttcttcttcaagccaatttcatcgtctgcatatcagctcaacagaattcaccaaaaatccatg

SEQ ID NO: 447213 - DNA, 120 bp, Artificial Sequence
  ENSG00000154975_10 (sequence is synthesized)
aaggctggtgggcatacaaggaggtggtccagggaagctttgttccagttccttctttctggggattggtgaactcagcttggaatctttgctctgtggggaaacggcagtcgccagtca

SEQ ID NO: 447214 - DNA, 120 bp, Artificial Sequence
  ENSG00000154975_11 (sequence is synthesized)
acatagagaccagtcacatgatcttcgacccctttctgacacctcttcgcatcaacacggggggcaggaaggtcagtgggaccatgtacaacactggaagacacgtatcccttcgcctgg

SEQ ID NO: 447215 - DNA, 120 bp, Artificial Sequence
  ENSG00000154975_12 (sequence is synthesized)
catgacatacagccaccggctggaggagatccgactacactttgggagtgaggacagccaagggtcggagcacctcctcaatggacaggccttctctggggaggtgcagctcatccacta

SEQ ID NO: 447216 - DNA, 120 bp, Artificial Sequence
  ENSG00000154975_13 (sequence is synthesized)
taaccatgagctatatacgaatgtcacagaagctgcaaagagtccaaatggattggtggtagtttctatatttataaaagtttctgattcatcaaacccatttcttaatcgaatgctcaa

SEQ ID NO: 447217 - DNA, 120 bp, Artificial Sequence
  ENSG00000154975_14 (sequence is synthesized)
cagagatactatcacaagaataacatataaaaatgatgcatatttactacaggggcttaatatagaggaactatatccagagacctctagtttcatcacttacgatgggtcgatgactat

SEQ ID NO: 447218 - DNA, 120 bp, Artificial Sequence
  ENSG00000154975_15 (sequence is synthesized)
cccaccctgctatgagacagcaagttggatcataatgaacaaacctgtctatataaccaggatgcagatgcattccttgcgcctgctcagccagaaccagccatctcagatctttctgag

SEQ ID NO: 447219 - DNA, 120 bp, Artificial Sequence
  ENSG00000154975_16 (sequence is synthesized)
catgagtgacaacttcaggcctgtccagccactcaacaaccgctgcatccgcaccaatatcaacttcagtttacaggggaaggactgtccaaacaaccgagcccagaagcttcagtatag

SEQ ID NO: 447220 - DNA, 120 bp, Artificial Sequence
  ENSG00000154975_17 (sequence is synthesized)
agtaaatgaatggctcctcaagtagggaacaaagccaagaagaatcccacctcagtgaaatgctacaactgtgaattgacgtaacctagaatgtcccccttcttgcttctctctccttct

SEQ ID NO: 447221 - DNA, 120 bp, Artificial Sequence
  ENSG00000154975_18 (sequence is synthesized)
ttcccccaagcctcattcattcttgggattggccctttcttcatgaaaagtgtctgcaaaaccatggcagaggaatacatctctcacacatactcacaaacacacacacaagcacttgca

SEQ ID NO: 447222 - DNA, 120 bp, Artificial Sequence
  ENSG00000154975_19 (sequence is synthesized)
catacatacaaacacatgcaaacatacctacacacacacacactcttacaacctccatcatgggaagtcaagtttcagaaacaaaagtctcattcataagaggtcttagaagaaaataac

SEQ ID NO: 447223 - DNA, 120 bp, Artificial Sequence
  ENSG00000154975_20 (sequence is synthesized)
cagttaacctgatttcaattttgataccgttttcctgaactaataaatctacccaatgagacttttcagcctttgtacatacaaaattcttccaaaagagagaggagaaaatacagctct

SEQ ID NO: 447224 - DNA, 120 bp, Artificial Sequence
  ENSG00000154975_21 (sequence is synthesized)
gatggcatcaaacggactttgcatcaagtaatttcagatagtgtcctaggatcctttgagggtgctggtagcaggtgagcaggacaaagttgaccaaggacacttatttctagattatga

SEQ ID NO: 447225 - DNA, 120 bp, Artificial Sequence
  ENSG00000154975_22 (sequence is synthesized)
ttcttctgtttactcaacaatttacaaagaaaaaaaggacagacattgaagagctacacattgtatatatatcaccacagactataaggaaatggaattatttccctctttgtcacatat

SEQ ID NO: 447226 - DNA, 120 bp, Artificial Sequence
  ENSG00000154975_23 (sequence is synthesized)
ctgtagtaggatttgccaagatcagaaatgatccatttgctgtttcttgttttccaaaggtcatacattgtgtttggttattgttaccagctcaataaatgtgtttaacgagttaatttc

SEQ ID NO: 447227 - DNA, 120 bp, Artificial Sequence
  ENSG00000154975_24 (sequence is synthesized)
acagttcccaatcgggacaagcgcgccgagaaatcctggatcttcccagggattccctctacgctccctcctcttcttcaataaccccaaagaggagaagaactgccccggagcgcagca

SEQ ID NO: 447228 - DNA, 120 bp, Artificial Sequence
  ENSG00000154975_25 (sequence is synthesized)
ttttgttcatttgcagccagtttttactgagtttgtggcaatcaggaatgcatttgctaagcaagtatgactttaattccactccatggctcaatcattcacatgaggtgagcttcagcc

SEQ ID NO: 447229 - DNA, 120 bp, Artificial Sequence
  ENSG00000154975_26 (sequence is synthesized)
tgagatagcaggcgacagacttcttgcgtttcaaaactgccatgcccccctgtgatgctcccgtgaaggaatgcactttgccttgtaagttcctgggaaaggggtatgttttctctccag

SEQ ID NO: 447230 - DNA, 120 bp, Artificial Sequence
  ENSG00000154975_27 (sequence is synthesized)
gtgcagccagatctcacaaagtacaaaacgaatgcctttcttttcttgtttataatggtcactcactgtgtttggttactgtcaagaaatcaataaatgtgtttaacaagttacccagta

SEQ ID NO: 447231 - DNA, 120 bp, Artificial Sequence
  ENSG00000154975_28 (sequence is synthesized)
gtattgcggaaaatctcgacagcggcgctagttgcgggcgatggaagccaggcaactgggggttctggggagttcaggaaaatagcagaggagcaggaagggcgcgcgcgacctggagag

SEQ ID NO: 447232 - DNA, 120 bp, Artificial Sequence
  ENSG00000154975_29 (sequence is synthesized)
agagtctgtgtgcccccaccgcgccccagtccccggggcccagcccttcccctcggcgccctggacgcactgccggaacccggctgagaggctgcaggctgcgcgcggacctggggagca

SEQ ID NO: 447233 - DNA, 120 bp, Artificial Sequence
  ENSG00000154975_30 (sequence is synthesized)
gggtcggcggaggctgccggcggctggcggtttcgggcaataatccctgcctctctttctctgtgtgtctgctgtgtctgctccttccccgccccccggaagcaggagaagaactgcccc

SEQ ID NO: 447234 - DNA, 120 bp, Artificial Sequence
  ENSG00000154975_31 (sequence is synthesized)
acagtcaggaaaatgaagctgaacatcaagtcccagcaagaaaagaaggaaaaggaatgccaagcagtcatgttagcagtttgaaggggctggagcaagatggaatcaggaataaggagt

SEQ ID NO: 447235 - DNA, 120 bp, Artificial Sequence
  ENSG00000154975_32 (sequence is synthesized)
acccctgaattacagtatgagccattcggaatgcatttctctttaaaagttctcgcctcattcagtgtctggaacacagtgggtgctccccaataggtgacaccttcctcaagtttcctt

SEQ ID NO: 447236 - DNA, 120 bp, Artificial Sequence
  ENSG00000154975_33 (sequence is synthesized)
gggagaacagactcaatgtcggatccacaaaggagacctgcacatacctaacccctatttctgcagaagctgaaggctgtattatctattgcttgcataataaatattgcataacaacaa

SEQ ID NO: 447237 - DNA, 120 bp, Artificial Sequence
  ENSG00000154975_34 (sequence is synthesized)
ctgggttcttcatctgtaaaatggagataaggactaaatcagccttgtgagttccttctttctggggattggtgaactcagcttggaatctttgctctgtggggaaacggcagtcgccag

SEQ ID NO: 447238 - DNA, 120 bp, Artificial Sequence
  ENSG00000154975_35 (sequence is synthesized)
gaggctctggtggcagtctgggttggagatgcaggtaacctgttgaaggtgatggcacacatggagagcaatggccagcatcaggagccgttcaggatgtggattcacagagcctgatga

SEQ ID NO: 447239 - DNA, 120 bp, Artificial Sequence
  ENSG00000154978_0 (sequence is synthesized)
gtcgcgaagcgcgcctgcgacccggcgtccgggcgcgctggagaggacgcgaggagccatgaggcgccagcctgcgaaggtggcggcgctgctgctcgggctgctcttggagtgcacaga

SEQ ID NO: 447240 - DNA, 120 bp, Artificial Sequence
  ENSG00000154978_1 (sequence is synthesized)
agccaaaaagcattgctggtatttcgaaggactctatccaacctattatatatgccgctcctacgaggactgctgtggctccaggtgctgtgtgcgggccctctccatacagaggctgtg

SEQ ID NO: 447241 - DNA, 120 bp, Artificial Sequence
  ENSG00000154978_2 (sequence is synthesized)
gtacttctggttccttctgatgatgggcgtgcttttctgctgcggagccggcttcttcatccggaggcgcatgtaccccccgccgctgatcgaggagccagccttcaatgtgtcctacac

SEQ ID NO: 447242 - DNA, 120 bp, Artificial Sequence
  ENSG00000154978_3 (sequence is synthesized)
caggcagcccccaaatcccggcccaggagcccagcagccggggccgccctattacaccgacccaggaggaccggggatgaaccctgtcgggaattccatggcaatggctttccaggtccc

SEQ ID NO: 447243 - DNA, 120 bp, Artificial Sequence
  ENSG00000154978_4 (sequence is synthesized)
acccaactcaccccaggggagtgtggcctgcccgccccctccagcctactgcaacacgcctccgcccccgtacgaacaggtagtgaaggccaagtagtggggtgcccacgtgcaagagga

SEQ ID NO: 447244 - DNA, 120 bp, Artificial Sequence
  ENSG00000154978_5 (sequence is synthesized)
gagacaggagagggcctttccctggcctttctgtcttcgttgatgttcacttccaggaacggtctcgtgggctgctaagggcagttcctctgatatcctcacagcaagcacagctctctt

SEQ ID NO: 447245 - DNA, 120 bp, Artificial Sequence
  ENSG00000154978_6 (sequence is synthesized)
tcaggctttccatggagtacaatatatgaactcacactttgtctcctctgttgcttctgtttctgacgcagtctgtgctctcacatggtagtgtggtgacagtccccgagggctgacgtc

SEQ ID NO: 447246 - DNA, 120 bp, Artificial Sequence
  ENSG00000154978_7 (sequence is synthesized)
cttacggtggcgtgaccagatctacaggagagagactgagaggaagaaggcagtgctggaggtgcaggtggcatgtagaggggccaggccgagcatcccaggcaagcatccttctgcccg

SEQ ID NO: 447247 - DNA, 120 bp, Artificial Sequence
  ENSG00000154978_8 (sequence is synthesized)
ggtattaataggaagccccatgccgggcggctcagccgatgaagcagcagccgactgagctgagcccagcaggtcatctgctccagcctgtcctctcgtcagccttcctcttccagaagc

SEQ ID NO: 447248 - DNA, 120 bp, Artificial Sequence
  ENSG00000154978_9 (sequence is synthesized)
tgttggagagacattcaggagagagcaagccccttgtcatgtttctgtctctgttcatatcctaaagatagacttctcctgcaccgccagggaagggtagcacgtgcagctctcaccgca

SEQ ID NO: 447249 - DNA, 120 bp, Artificial Sequence
  ENSG00000154978_10 (sequence is synthesized)
ggatggggcctagaatcaggcttgccttggaggcctgacagtgatctgacatccactaagcaaatttatttaaattcatgggaaatcacttcctgccccaaactgagacattgcattttg

SEQ ID NO: 447250 - DNA, 120 bp, Artificial Sequence
  ENSG00000154978_11 (sequence is synthesized)
aagtgcatgtagagcgtcctgccctttgaaatcagactgggtgtgtgtcttccctggacatcactgcctctccagggcattctcaggcccgggggtctccttccctcaggcagctccagt

SEQ ID NO: 447251 - DNA, 120 bp, Artificial Sequence
  ENSG00000154978_12 (sequence is synthesized)
ggtgggttctgaagggtgctttcaaaacggggcacatctggctgggaagtcacatggactcttccagggagagagaccagctgaggcgtctctctctgaggttgtgttgggtctaagcgg

SEQ ID NO: 447252 - DNA, 120 bp, Artificial Sequence
  ENSG00000154978_13 (sequence is synthesized)
gtgtgtgctgggctccaaggaggaggagcttgctgggaaaagacaggagaagtactgactcaactgcactgaccatgttgtcataattagaataaagaagaagtggtcggaaatgcacat

SEQ ID NO: 447253 - DNA, 120 bp, Artificial Sequence
  ENSG00000154978_14 (sequence is synthesized)
tcctggataggaatcacagctcaccccaggatctcacaggtagtctcctgagtagttgacggctagcggggagctagttccgccgcatagttatagtgttgatgtgtgaacgctgacctg

SEQ ID NO: 447254 - DNA, 120 bp, Artificial Sequence
  ENSG00000154978_15 (sequence is synthesized)
tcctgtgtgctaagagctatgcagcttagctgaggcgcctagattactagatgtgctgtatcacggggaatgaggtgggggtgcttattttttaatgaactaatcagagcctcttgagaa

SEQ ID NO: 447255 - DNA, 120 bp, Artificial Sequence
  ENSG00000154978_16 (sequence is synthesized)
attgttactcattgaactggagcatcaagacatctcatggaagtggatacggagtgatttggtgtccatgcttttcactctgaggacatttaatcggagaacctcctggggaattttgtg

SEQ ID NO: 447256 - DNA, 120 bp, Artificial Sequence
  ENSG00000154978_17 (sequence is synthesized)
ggagacacttgggaacaaaacagacaccctgggaatgcagttgcaagcacagatgctgccaccagtgtctctgaccaccctggtgtgactgctgactgccagcgtggtacctcccatgct

SEQ ID NO: 447257 - DNA, 120 bp, Artificial Sequence
  ENSG00000154978_18 (sequence is synthesized)
gcaggcctccatctaaatgagacaacaaagcacaatgttcactgtttacaaccaagacaactgcgtgggtccaaacactcctcttcctccaggtcatttgttttgcatttttaatgtctt

SEQ ID NO: 447258 - DNA, 120 bp, Artificial Sequence
  ENSG00000154978_19 (sequence is synthesized)
tattttttgtaatgaaaaagcacactaagctgcccctggaatcgggtgcagctgaataggcacccaaaagtccgtgactaaatttcgtttgtctttttgatagcaaattatgttaagaga

SEQ ID NO: 447259 - DNA, 120 bp, Artificial Sequence
  ENSG00000154978_20 (sequence is synthesized)
cagtgatggctagggctcaacaattttgtattcccatgtttgtgtgagacagagtttgttttcccttgaacttggttagaattgtgctactgtgaacgctgatcctgcatatggaagtcc

SEQ ID NO: 447260 - DNA, 120 bp, Artificial Sequence
  ENSG00000154978_21 (sequence is synthesized)
cacttcggtgacatttcctggccattcttgtttccattgtgtggatggtgggttgtgcccacttcctggagtgagacagctcctggtgtgtagaattcccggagcgtccgtggttcagag

SEQ ID NO: 447261 - DNA, 120 bp, Artificial Sequence
  ENSG00000154978_22 (sequence is synthesized)
taaacttgaagcagatctgtgcatgcttttcctctgcaacaattggctcgtttctcttttttgttctcttttgataggatcctgtttcctatgtgtgcaaaataaaaataaatttgggca

SEQ ID NO: 447262 - DNA, 120 bp, Artificial Sequence
  ENSG00000154978_23 (sequence is synthesized)
agatgttctcaccactcaacagaggaggatactgcagggtctgcgggcgccagagctttatttatgtgtgctccgtattggagggctgcgtgtgacccagcagtgacaggaccgtgggcg

SEQ ID NO: 447263 - DNA, 120 bp, Artificial Sequence
  ENSG00000154978_24 (sequence is synthesized)
actggcataaaaaatagccacatccaaggaagcagtgaggtgtggggaccatctatttcggtgggccttcccacccccaggccggccttcccatcacgcgtgggtgtgggggcactgccc

SEQ ID NO: 447264 - DNA, 120 bp, Artificial Sequence
  ENSG00000154978_25 (sequence is synthesized)
gcaagtgaggaatggaaggaagccattcatgtgttcattctgcagtcgtttactgaatgctgatgaagtgatagtcaatgagaattcacagatgggttggacaaagtttctctgtaatta

SEQ ID NO: 447265 - DNA, 120 bp, Artificial Sequence
  ENSG00000154978_26 (sequence is synthesized)
aggtgtgctccaggaagggtacttctgtttccttgtgggtgttgatgtgataatggagacgtggtctggaggataaatgtgctctgccttggtgctttgacagtgaagaatggaaaacag

SEQ ID NO: 447266 - DNA, 120 bp, Artificial Sequence
  ENSG00000154978_27 (sequence is synthesized)
gaccatatactccttgacgacagggactaccaccttcaccttcatgcccacaaggtgtcacactgcaaggctgagctgacccccactttcctttggtccgcctcctgctgttatctggaa

SEQ ID NO: 447267 - DNA, 120 bp, Artificial Sequence
  ENSG00000154978_28 (sequence is synthesized)
agcagctcccgccccttggcttgcattctctcctcgagttgagcttctgcttgggcctcgcttcctcagctcctttgccagcacggcctgaaacaggggccaccgtgtgagcttcctgga

SEQ ID NO: 447268 - DNA, 120 bp, Artificial Sequence
  ENSG00000154978_29 (sequence is synthesized)
gcgccgggcagtttggggttaggaaaggatgggtgccgagccggggtgaggggagcgggcggaggggactgtggggaagtgtcgcgggagtgccgggagttgtggaggtgagcagcggga

SEQ ID NO: 447269 - DNA, 120 bp, Artificial Sequence
  ENSG00000154978_30 (sequence is synthesized)
tttgttctcagcctgtgcggagtgtaacgagcccactctaattgggctcaagctgaaagcagctgggatctcattgcctgtgtgtcaagttctgcttttgatgaatgcagaagcagtgtg

SEQ ID NO: 447270 - DNA, 120 bp, Artificial Sequence
  ENSG00000154978_31 (sequence is synthesized)
aggcacagcagggggcccctcccttttgaaaaagatggagtccttgggctgatcttctttggggccgtcccaccatcctgaagcaaaccctggacttctggcccgggacagactgttggc

SEQ ID NO: 447271 - DNA, 120 bp, Artificial Sequence
  ENSG00000154978_32 (sequence is synthesized)
atagtgctccgtcacctttctgggttgagcatggctgagtgactcagcccatgggaggtttcctaggagaacaggctccacttgctgcctctctgcgtgaactccgtgtgccggcaacct

SEQ ID NO: 447272 - DNA, 120 bp, Artificial Sequence
  ENSG00000154978_33 (sequence is synthesized)
attcacatgctttgtttccttccctttcagcctcacatgtggccctttaacagctcattagttttgttttaaggacaggcagggagagagcaatggggagaagctgaattcagtttggtt

SEQ ID NO: 447273 - DNA, 120 bp, Artificial Sequence
  ENSG00000154978_34 (sequence is synthesized)
agagacttgggagcagccctgctgtgcggctgcaatctgaaaggaaatgatgcctcgttgctaggcctaggaagaggtgcacagaagccaaaaagcattgctggtatttcgaaggactct

SEQ ID NO: 447274 - DNA, 120 bp, Artificial Sequence
  ENSG00000154978_35 (sequence is synthesized)
agagctccctgagcagtggggatgctggcctgcctcacttgctggaggtttgtgagagcctccaggtggcatctggcccctgctccgatgcctgtgtgcactcacccaccctgccctgcc

SEQ ID NO: 447275 - DNA, 120 bp, Artificial Sequence
  ENSG00000154978_36 (sequence is synthesized)
ctgccctgccctgccctgtggggctgggccctgcctccgggatgttaggagctggacttacctggaaagcccaggagaggctcccattgtctttccttgttccttctttctcttcctgca

SEQ ID NO: 447276 - DNA, 120 bp, Artificial Sequence
  ENSG00000154997_0 (sequence is synthesized)
agaaaggacaccagcttggaatcagttcggacctgtgtctgctgcacagctgaatccctgggaaactcttttagtgtagcatggcagaaagaacaatggctatgcccacacaaatacctg

SEQ ID NO: 447277 - DNA, 120 bp, Artificial Sequence
  ENSG00000154997_1 (sequence is synthesized)
ctgatggagatacacaaaaagaaaataatattcgttgtttaactacgattggacattttggttttgaatgtttgcccaatcagttggtgagcagatctatccgacaaggattcactttta

SEQ ID NO: 447278 - DNA, 120 bp, Artificial Sequence
  ENSG00000154997_2 (sequence is synthesized)
atattctctgtgtgggggagactggaattggaaaatcgacactgatagacacattgtttaatactaacttgaaagataacaaatcctcacatttttactcaaatgttggacttcaaattc

SEQ ID NO: 447279 - DNA, 120 bp, Artificial Sequence
  ENSG00000154997_3 (sequence is synthesized)
agacatatgaacttcaggaaagcaatgttcagttgaaattgactgttgtggagacagtagggtatggtgatcaaatagacaaagaagccagctaccaaccaatagttgactacatagatg

SEQ ID NO: 447280 - DNA, 120 bp, Artificial Sequence
  ENSG00000154997_4 (sequence is synthesized)
cccaatttgaggcctatcttcaagaagaactgaagattaaacgttccttgtttgagtaccatgattctcgcgtccacgtgtgtctttacttcatttcacctacaggacattccctgaagt

SEQ ID NO: 447281 - DNA, 120 bp, Artificial Sequence
  ENSG00000154997_5 (sequence is synthesized)
ctcttgatctattaacaatgaagaaccttgacagtaaggtgaatattataccactgattgccaaagcagacactatttctaaaaatgatttacagacgtttaagaataagataatgagtg

SEQ ID NO: 447282 - DNA, 120 bp, Artificial Sequence
  ENSG00000154997_6 (sequence is synthesized)
aattgattagcaatggcatccagatatatcagctcccaacagatgaagaaactgctgctcaagcgaactcctcagttagtgggctgttaccctttgctgtggtagggagtacagatgaag

SEQ ID NO: 447283 - DNA, 120 bp, Artificial Sequence
  ENSG00000154997_7 (sequence is synthesized)
tgaaagttggaaaaaggatggtcagaggccgtcactacccttggggagttttgcaagtggaaaatgaaaatcactgtgacttcgttaagctccgagatatgcttctttgtaccaatatgg

SEQ ID NO: 447284 - DNA, 120 bp, Artificial Sequence
  ENSG00000154997_8 (sequence is synthesized)
aaaatctaaaagaaaaaacccacactcagcactatgaatgttataggtaccaaaaactgcagaaaatgggctttacagatgtgggtccaaacaaccagccagttagttttcaagaaatct

SEQ ID NO: 447285 - DNA, 120 bp, Artificial Sequence
  ENSG00000154997_9 (sequence is synthesized)
ttgaagccaaaagacaagagttctatgatcaatgtcagagggaagaagaagagttgaaacagagatttatgcagcgagtcaaggagaaagaagcaacatttaaagaagctgaaaaagagc

SEQ ID NO: 447286 - DNA, 85 bp, Artificial Sequence
  ENSG00000154997_10 (sequence is synthesized)
tacaaagaaagacaaacatcgtaagaaataatagtttctcttactattctgagagccctatcattctacatcgcaagaagttctc

SEQ ID NO: 447287 - DNA, 74 bp, Artificial Sequence
  ENSG00000154997_11 (sequence is synthesized)
gagattgtctttgtagcatttaactctgaagttctcgtgaactcctagcggggtgtggtggctcatgcctgtaa

SEQ ID NO: 447288 - DNA, 120 bp, Artificial Sequence
  ENSG00000154997_12 (sequence is synthesized)
tgaactcccagaaggcagatcctgtgtccctcttttcagattctgtatcttggcacttaggacgtacactaacacaaatatgactttcaatcaatatttgccaaaatgaaaaaacaaaag

SEQ ID NO: 447289 - DNA, 120 bp, Artificial Sequence
  ENSG00000154997_13 (sequence is synthesized)
aaacacgtagcatcatgtaaaaggagctggttaggtggagaaatttatttaccatagtcctgcttttggatccagtagtgacttttaacttttatatccaaatagaagctggaggctttg

SEQ ID NO: 447290 - DNA, 120 bp, Artificial Sequence
  ENSG00000154997_14 (sequence is synthesized)
ttggggactcataggcataaaatgttaagttatacaaatctaattaataggcctattttcctttttaagttctactactgataatttcttgacagtttttatgataaaaggttggaattt

SEQ ID NO: 447291 - DNA, 120 bp, Artificial Sequence
  ENSG00000154997_15 (sequence is synthesized)
gataagaactcccatgcttttgtgtcagacttaaaactgatattagaataaagaattcaaaagctagagaaagagttgcatttgaatgataatattatgtgttacagatttggggtatat

SEQ ID NO: 447292 - DNA, 88 bp, Artificial Sequence
  ENSG00000154997_16 (sequence is synthesized)
agcttgagaacagcctaatacaaaagttagccgggtgtggtgttgtgcacctgtagtccctgctactcggaaagctgaggcaggagaa

SEQ ID NO: 447293 - DNA, 85 bp, Artificial Sequence
  ENSG00000154997_17 (sequence is synthesized)
ctgagtcaccacacctggtataagccactgtgcctgacccacaatgacttttatacatattgttaaatcatcttacagattttat

SEQ ID NO: 447294 - DNA, 75 bp, Artificial Sequence
  ENSG00000154997_18 (sequence is synthesized)
aagccactgtgcctgacccacaatgacttttatacatttttactaaatgatcttttaatggaaactctacaagaa

SEQ ID NO: 447295 - DNA, 120 bp, Artificial Sequence
  ENSG00000154997_19 (sequence is synthesized)
gcctagaaaaatgtctgacgcatagcagcaattattcattgaataaatggacccagcaatagtacattagctatgccatatgcatacattaaaaatgtagattattgactttcaaaagat

SEQ ID NO: 447296 - DNA, 120 bp, Artificial Sequence
  ENSG00000154997_20 (sequence is synthesized)
tattattccatatttaaaaataacatctaccttataaaaattatcattgtgctgcatttgagaatagactttttaggtaataatggtataatccatagggtttttgagggcacagaagga

SEQ ID NO: 447297 - DNA, 120 bp, Artificial Sequence
  ENSG00000154997_21 (sequence is synthesized)
ttcatgctaacagaacattttattttctattttccaagagctataaaacatgatattatatgatactataaggcatatttttattttccataattttttctaaaaaaaattagtgttggt

SEQ ID NO: 447298 - DNA, 120 bp, Artificial Sequence
  ENSG00000154997_22 (sequence is synthesized)
tttccatataacttttaactttataagtaaatatttgtctctttcagctccagtttcatgtgaaatagagtttccagatttatgtagcatggaaagttttaatacgtcagttactgattt

SEQ ID NO: 447299 - DNA, 120 bp, Artificial Sequence
  ENSG00000154997_23 (sequence is synthesized)
ttgccagtcattttctcaattatttacttcttttatctttagttgattttttttgtagtgacaagttttgtttctattctcatttccttttgtgtatattctatgtagatttcgtttttg

SEQ ID NO: 447300 - DNA, 120 bp, Artificial Sequence
  ENSG00000154997_24 (sequence is synthesized)
gttactatgaaaattacatataacatcctggagttataacattctgatttgaatttatttcaacttaacttcaatcacataccaaaattctactgctatataggtctactctttttaggt

SEQ ID NO: 447301 - DNA, 120 bp, Artificial Sequence
  ENSG00000154997_25 (sequence is synthesized)
tattgatgtaacaaattgtatctttattcattgtacaccacctaacagatttataattacattttatgcatttgtcttttaaatcctgtagaaaataaaaagcggagttacaaaccaaaa

SEQ ID NO: 447302 - DNA, 120 bp, Artificial Sequence
  ENSG00000155008_0 (sequence is synthesized)
ctccgtctgaaaaccttggccgaaagggttgtagacatggcggccatcaggatgggaaaactgacaaccatgcctgcaggtctgatatatgcatctgtaagtgtacatgcagccaaacaa

SEQ ID NO: 447303 - DNA, 120 bp, Artificial Sequence
  ENSG00000155008_1 (sequence is synthesized)
gaggaatccaaaaagcagctagtgaaaccagagcagctccccatatatactgcaccaccgctccagtctaaatatgttgaagagcagcctggtcatttacaaatgggctttgcttccatc

SEQ ID NO: 447304 - DNA, 120 bp, Artificial Sequence
  ENSG00000155008_2 (sequence is synthesized)
cgcactgcaactggttgttacattggctggtgcaagggtgtttatgtctttgtgaaaaatgggataatggatacagtacaatttggaaaagatgcttatgtctatctgaagaatcctcct

SEQ ID NO: 447305 - DNA, 120 bp, Artificial Sequence
  ENSG00000155008_3 (sequence is synthesized)
cgagattttcttccgaaaatgggagttattacagtttcaggattggcgggcttggtttcagcgagaaaaggttccaagtttaagaaaattacttatcctctgggactggccactttagga

SEQ ID NO: 447306 - DNA, 120 bp, Artificial Sequence
  ENSG00000155008_4 (sequence is synthesized)
gcaactgtttgctacccagttcagtccgtaataattgctaaggtaacagcaaaaaaggtatatgctacaagccagcaaatttttggagcagttaaatcattgtggacaaaaagcagcaaa

SEQ ID NO: 447307 - DNA, 120 bp, Artificial Sequence
  ENSG00000155008_5 (sequence is synthesized)
gaagagtcactccctaaacctaaagaaaaaactaagctaggatcctcttccgaaatagaagtacctgcaaaaacaactcacgtcttgaaacactcagtgcccttgccaacagaactcagc

SEQ ID NO: 447308 - DNA, 120 bp, Artificial Sequence
  ENSG00000155008_6 (sequence is synthesized)
tctgaagcaaagaccaaatcagaatccacttcaggtgcaacccagtttatgcctgaccccaagctcatggatcacgggcagtcccacccagaagatatagatatgtacagcactagaagc

SEQ ID NO: 447309 - DNA, 120 bp, Artificial Sequence
  ENSG00000155008_7 (sequence is synthesized)
tgaagtagactgcatgcagagactacacagaaaactacaagatgtgtggcgttgcaaataatgatgaaaataaatcatgtaatgggtaactgatacatagagtattacctaaaccaagtt

SEQ ID NO: 447310 - DNA, 120 bp, Artificial Sequence
  ENSG00000155008_8 (sequence is synthesized)
tctcccttacatttccaaatatgccatttgataaattacataagtggttaacacacaaactgtgaatgcagtgtaaacaatattaaatgattgatgaggagacttaggtagaagtattag

SEQ ID NO: 447311 - DNA, 120 bp, Artificial Sequence
  ENSG00000155008_9 (sequence is synthesized)
ttagcttgcatttgatgacctttaagggcacttaaaaaaaaatgaagacatgaattctagtgagattaaaatctaaaaatacatatatatatatgtatgtataaatacatacatatttat

SEQ ID NO: 447312 - DNA, 120 bp, Artificial Sequence
  ENSG00000155008_10 (sequence is synthesized)
acatacatatttatacatatatatgtataaatacatacatatttatacatataaacatatatttctgctctagctttcccagattaatgctagttaaattagaatggtgtatggaaaggt

SEQ ID NO: 447313 - DNA, 82 bp, Artificial Sequence
  ENSG00000155008_11 (sequence is synthesized)
ctagagctggaataaaatatccatgttttatgggacttgagcttggctttgtcccttggttttgttaatgttaattcctctt

SEQ ID NO: 447314 - DNA, 120 bp, Artificial Sequence
  ENSG00000155008_12 (sequence is synthesized)
ttggctttgtcccttggttttgttaatgttaattcctcttaaatatctaaaaacatctctacctatttgagagggccatatgctacacaggcttcctaatactgcttagcaatccttcta

SEQ ID NO: 447315 - DNA, 120 bp, Artificial Sequence
  ENSG00000155008_13 (sequence is synthesized)
ctggttcctaagtggtttactattgtgttccctggaagaggtattacaaacgttttattcttctcaagcctcttagaactgtcaaagttgactgtgcctcctatttcatagagaaaaaac

SEQ ID NO: 447316 - DNA, 120 bp, Artificial Sequence
  ENSG00000155008_14 (sequence is synthesized)
taaattattagatatgaccattcccaaaacttcttcccatctaccttcaagacttacctcttttcagccatgcatcccccttttctaagacatgcttctctttgtgttcttgacctcatt

SEQ ID NO: 447317 - DNA, 120 bp, Artificial Sequence
  ENSG00000155008_15 (sequence is synthesized)
ccttcccatctaagaccatattccaccctgtttaatttctagtcttcggtttctctttttacagtgagcaaattagaagaataggttagaagaatagggtagtagatactgtagtttctt

SEQ ID NO: 447318 - DNA, 120 bp, Artificial Sequence
  ENSG00000155008_16 (sequence is synthesized)
tcctccacctctacatagctgcaggtcttctctgtcttaaatcaacaataacaaaacaagacaaaaacctttccttaacttggcctcttcccttgaactattttttctctctccttccta

SEQ ID NO: 447319 - DNA, 120 bp, Artificial Sequence
  ENSG00000155008_17 (sequence is synthesized)
taattgttatacttctttaaaaagtaattgttactttttgacaaaagtaaatattgtcccttttttccctactttcaagtcctctctgtcttgtgacattctggcctccatacctgctta

SEQ ID NO: 447320 - DNA, 78 bp, Artificial Sequence
  ENSG00000155008_18 (sequence is synthesized)
tcccaggatcaagcaatcctcccatctcataattttttgtatttttggtagtgacagggtttcaccatgttgtccagg

SEQ ID NO: 447321 - DNA, 120 bp, Artificial Sequence
  ENSG00000155008_19 (sequence is synthesized)
tacaggcgtgagccaccgcacccagcccctacttgaatttttatgtcattattgactcttcaccactctctccttgagactcacttatccctttgctctctatttttcctgcttttgtta

SEQ ID NO: 447322 - DNA, 120 bp, Artificial Sequence
  ENSG00000155008_20 (sequence is synthesized)
tatttttcctgcttttgttattcttcatttttcttctcttgctctgaatcccttaaatgctgaggctgctcaagtttcatccctagtcctattttctcattctatatgcacactcatttt

SEQ ID NO: 447323 - DNA, 120 bp, Artificial Sequence
  ENSG00000155008_21 (sequence is synthesized)
tcatttaacagacttcactggcttcaggcaccatttgttttattattcatattttcaacccccatatctctctagtgctgtagacctttatttctacttactagttatattcacctaaca

SEQ ID NO: 447324 - DNA, 120 bp, Artificial Sequence
  ENSG00000155008_22 (sequence is synthesized)
tcccatagatatgccaatgtcaatgtgcctaaaacaaaattgtctctacctcccgctccttcaaatctattctgtcttctctaatcctataattactctccctcaagtcatcatcatcac

SEQ ID NO: 447325 - DNA, 120 bp, Artificial Sequence
  ENSG00000155008_23 (sequence is synthesized)
ttttctgggttactgtaatagccttcaggctaatttgctcactgtcaatcttgctgtctctcatttcagaatatgttctgcttgcaggtgacagtaaactagttaaacaaatatttaata

SEQ ID NO: 447326 - DNA, 120 bp, Artificial Sequence
  ENSG00000155008_24 (sequence is synthesized)
ttagcttaagcaaaaaaaaaaaaaaaggcctatcctatttatagcctagaattaggcagtatagggttgggacagtggctcattggtgctatcaaggacgtagactttttctctttccac

SEQ ID NO: 447327 - DNA, 120 bp, Artificial Sequence
  ENSG00000155008_25 (sequence is synthesized)
tctgtcctctacagcatgctggtttgtcacctcatggtcacaagatgtctgctgtacctccagggagcagatacacattcaaagtaggaaatagcagataaaaatgtacacaagatgcgt

SEQ ID NO: 447328 - DNA, 120 bp, Artificial Sequence
  ENSG00000155008_26 (sequence is synthesized)
ctgactcccttttaccagaaaagtaaatgctttcttagaatctcctcagaagacctctgtgtatatctcaaccagtacttgtcatatagccacacacttagctcaaggaagatagggaat

SEQ ID NO: 447329 - DNA, 120 bp, Artificial Sequence
  ENSG00000155008_27 (sequence is synthesized)
agggaaatcatgtttcttttcccctgtggtgaggaaggcaaggggtaaggggttgggaacaggtgctgaattaaagctaacatacagtatctactaccctattcttctaacccatttgtc

SEQ ID NO: 447330 - DNA, 120 bp, Artificial Sequence
  ENSG00000155008_28 (sequence is synthesized)
tattatgatatagttgtcttgacaactataatgaatagctgtctttctgaaatctttagtggctcatcattgcctgcagaatcaaaactccttagtctgatatacaaggcccttcatatc

SEQ ID NO: 447331 - DNA, 120 bp, Artificial Sequence
  ENSG00000155008_29 (sequence is synthesized)
tgattccagcttaccttctaatcctatcttccctctccttacccaccctactgctaatgtgtattatattgtctttatgacataccatttgtttcttgaacatgctttgctcattattgc

SEQ ID NO: 447332 - DNA, 120 bp, Artificial Sequence
  ENSG00000155008_30 (sequence is synthesized)
ctctttctctgcctgtgctagtgtgtcctcttagaatgttcttccatcttatcctgctctacattctaacttctacccatcctacaagtccaattccagtgtcatgttccctttctcaat

SEQ ID NO: 447333 - DNA, 89 bp, Artificial Sequence
  ENSG00000155008_31 (sequence is synthesized)
ggtaatggcctcaagcgatcctcccacctcagccaaccagacatgagtgactgtgctcagccttttttaaaaaaatgaaggtatttggt

SEQ ID NO: 447334 - DNA, 86 bp, Artificial Sequence
  ENSG00000155008_32 (sequence is synthesized)
ctcaagcgatcctcccacctcagccaaccagacatgagtgactgtgctcagccttttttaaaaaaatgaaggtatttggtatggcc

SEQ ID NO: 447335 - DNA, 120 bp, Artificial Sequence
  ENSG00000155008_33 (sequence is synthesized)
tatataatatgtcttagatttgatgaaatatgagtgtgtttgagatctgatccaaggttttaaaaaattcatttcaaatcctggagataaattctgaggagcttacttatgaaaaactag

SEQ ID NO: 447336 - DNA, 120 bp, Artificial Sequence
  ENSG00000155008_34 (sequence is synthesized)
caagtgatagctggtatttacagatatggtactttacacaatttatgtaattaatattttctcacagacaaggttccttgtggatatcactgaataatttttgtgtagtttctatgccca

SEQ ID NO: 447337 - DNA, 120 bp, Artificial Sequence
  ENSG00000155008_35 (sequence is synthesized)
tgaagtgcctggtaggtagtaggaactcacacgttctgctatgctggttgcagcacaggacacaaaagttagaattatttcaaaggacttatactctactaggaaagagagaaacataga

SEQ ID NO: 447338 - DNA, 120 bp, Artificial Sequence
  ENSG00000155008_36 (sequence is synthesized)
aatatagtgttgtatgtggtatcttccctaagataagtacaaccaaagagctatggatgttcagagatagaatgtagtactgggatgatgtcaaggaggcagtggtacttaagctgctca

SEQ ID NO: 447339 - DNA, 120 bp, Artificial Sequence
  ENSG00000155008_37 (sequence is synthesized)
aggtagggaagcagtttacttgctagtttttcataagtaagctcttcagaatttatctccagtatttgaaatgaatttttttaaacctcagatctgaatatattcaaacacccatatttc

SEQ ID NO: 447340 - DNA, 120 bp, Artificial Sequence
  ENSG00000155008_38 (sequence is synthesized)
tctgaatatattcaaacacccatatttcatcaaatctaaggcatatcatatacctttaatttaaaaaaaaatgctgagcagagttgcttatgtctgggaggctgaagtgggaggattgct

SEQ ID NO: 447341 - DNA, 120 bp, Artificial Sequence
  ENSG00000155008_39 (sequence is synthesized)
gcaacatagcaagatcctgcctctaaaaacaaacaaacaaaaaatgctgccagttgatcattacatttatcccgacatcagatatgtcaaattgtgaaaagcaccttaattttgatgaaa

SEQ ID NO: 447342 - DNA, 120 bp, Artificial Sequence
  ENSG00000155008_40 (sequence is synthesized)
tatgataggtaaaaaatagcgcaaagctaagtataagtgacttttaaattatctgctcttttggattatcactactgctactagccgttagaatattggtttggataatggaaagttgac

SEQ ID NO: 447343 - DNA, 120 bp, Artificial Sequence
  ENSG00000155008_41 (sequence is synthesized)
tagagctacaaaatctgtttcaaaataaaagatctgctcaaacaagaatgtgatgatcacttgctgtattgtacaacaaagtcaaactgctgttagactcaggtgacagtcaaatgttgg

SEQ ID NO: 447344 - DNA, 120 bp, Artificial Sequence
  ENSG00000155008_42 (sequence is synthesized)
aggctgtgttgggatgagttgttacaaagcctctttcattcttcccatgccatgtccaggagttcttctctgttaaacctgaagagatgccagccctcctcagaggaaaggtctaaagcc

SEQ ID NO: 447345 - DNA, 120 bp, Artificial Sequence
  ENSG00000155008_43 (sequence is synthesized)
cctcgactagtatagtagttgatagaagcctggttccaaatgacgacaagaaagtgcatgcagttacattgagttgtgatggctatctgtttaaaaacaaacaagcaaatattactttca

SEQ ID NO: 447346 - DNA, 120 bp, Artificial Sequence
  ENSG00000155008_44 (sequence is synthesized)
tttgaaagtataatcttcgttaacacatatattttattgaaggtctactctatgcaagacactatgtgtgaataatacttccaaatatagtagttaccttttgaacttttctatagctgt

SEQ ID NO: 447347 - DNA, 120 bp, Artificial Sequence
  ENSG00000155008_45 (sequence is synthesized)
aaaaagaaaaaagtctcactgttctgagctttaaagccctctttaaaatctcaaaactgatttgcaaagcctttatcatacagaaaaggtgtacctaaaagaacacatgttctcatatgt

SEQ ID NO: 447348 - DNA, 120 bp, Artificial Sequence
  ENSG00000155008_46 (sequence is synthesized)
ttccaaaatacaagaagatcttgcttttatagtcttgtaatattcatactgtgagcctgtgtttttgaataaaaatgctttctaatctccctccttcttactttcccttgatagcaaaaa

SEQ ID NO: 447349 - DNA, 120 bp, Artificial Sequence
  ENSG00000155008_47 (sequence is synthesized)
gggtgtatagtgtggttgtggattatatataaatcaattttaattgactataattcatatactgtatatgatcatctgatttgaaaatccagtttaatttgggtagaaatttgaagtata

SEQ ID NO: 447350 - DNA, 120 bp, Artificial Sequence
  ENSG00000155008_48 (sequence is synthesized)
tgttggggttatgttcaaatggtgagattaatgatttaatttatgccctgtgaatatttattaagaaaaggttaatgtatagaatatcaatactaattgtaatacatacctgacttagcc

SEQ ID NO: 447351 - DNA, 120 bp, Artificial Sequence
  ENSG00000155008_49 (sequence is synthesized)
tcttcagcatttcagctccaatacctaggccttttaaatagacaatgcaaagtgaaaactgcaaatttcacttaacttgttatttgctttagtttaaaataaataatatctaaaactctg

SEQ ID NO: 447352 - DNA, 120 bp, Artificial Sequence
  ENSG00000155008_50 (sequence is synthesized)
ccagttcagtccgtaataattgctaaggtaacagcaaaaaggtatatgctacaagccagcaaatttttggagcagttaaatcattgtggacaaaaagcagcaaagaagagtcactcccta

SEQ ID NO: 447353 - DNA, 120 bp, Artificial Sequence
  ENSG00000155011_0 (sequence is synthesized)
agcagagagagagaaagcgggagcccgcggcgagcgtagcgcaagtccgctccctaggcatcgctgcgctggcagcgattcgctgtctcttgtgagtcaggggacaacgcttcggggcaa

SEQ ID NO: 447354 - DNA, 120 bp, Artificial Sequence
  ENSG00000155011_1 (sequence is synthesized)
ctgtgagtgcgcgtgtgggggacctcgattctcttcagatctcgaggattcggtccggggacgtctcctgatcccctactaaagcgcctgctaactttgaaaaggagcactgtgtcctgc

SEQ ID NO: 447355 - DNA, 120 bp, Artificial Sequence
  ENSG00000155011_2 (sequence is synthesized)
aaagtttgacacataaaggataggaaaagagaggagagaaaagcaactgagttgaaggagaaggagctgatgcgggcctcctgatcaattaagaggagagttaaaccgccgagatcccgg

SEQ ID NO: 447356 - DNA, 120 bp, Artificial Sequence
  ENSG00000155011_3 (sequence is synthesized)
cgggaccaaggaggtgcggggcaagaaggaacggaagcggtgcgatccacagggctgggttttcttgcaccttgggtcacgcctccttggcgagaaagcgcctcgcatttgattgcttcc

SEQ ID NO: 447357 - DNA, 120 bp, Artificial Sequence
  ENSG00000155011_4 (sequence is synthesized)
agttattgcagaacttcctgtcctggtggagaagcgggtctcgcttgggttccgctaatttctgtcctgaggcgtgagactgagttcatagggtcctgggtccccgaaccaggaagggtt

SEQ ID NO: 447358 - DNA, 120 bp, Artificial Sequence
  ENSG00000155011_5 (sequence is synthesized)
gagggaacacaatctgcaagcccccgcgacccaagtgaggggccccgtgttggggtcctccctccctttgcattcccacccctccgggctttgcgtcttcctggggaccccctcgccggg

SEQ ID NO: 447359 - DNA, 120 bp, Artificial Sequence
  ENSG00000155011_6 (sequence is synthesized)
agatggccgcgttgatgcggagcaaggattcgtcctgctgcctgctcctactggccgcggtgctgatggtggagagctcacagatcggcagttcgcgggccaaactcaactccatcaagt

SEQ ID NO: 447360 - DNA, 120 bp, Artificial Sequence
  ENSG00000155011_7 (sequence is synthesized)
cctctctgggcggggagacgcctggtcaggccgccaatcgatctgcgggcatgtaccaaggactggcattcggcggcagtaagaagggcaaaaacctggggcaggcctacccttgtagca

SEQ ID NO: 447361 - DNA, 120 bp, Artificial Sequence
  ENSG00000155011_8 (sequence is synthesized)
gtgataaggagtgtgaagttgggaggtattgccacagtccccaccaaggatcatcggcctgcatggtgtgtcggagaaaaaagaagcgctgccaccgagatggcatgtgctgccccagta

SEQ ID NO: 447362 - DNA, 120 bp, Artificial Sequence
  ENSG00000155011_9 (sequence is synthesized)
cccgctgcaataatggcatctgtatcccagttactgaaagcatcttaacccctcacatcccggctctggatggtactcggcacagagatcgaaaccacggtcattactcaaaccatgact

SEQ ID NO: 447363 - DNA, 120 bp, Artificial Sequence
  ENSG00000155011_10 (sequence is synthesized)
tgggatggcagaatctaggaagaccacacactaagatgtcacatataaaagggcatgaaggagacccctgcctacgatcatcagactgcattgaagggttttgctgtgctcgtcatttct

SEQ ID NO: 447364 - DNA, 120 bp, Artificial Sequence
  ENSG00000155011_11 (sequence is synthesized)
ggaccaaaatctgcaaaccagtgctccatcagggggaagtctgtaccaaacaacgcaagaagggttctcatgggctggaaattttccagcgttgcgactgtgcgaagggcctgtcttgca

SEQ ID NO: 447365 - DNA, 120 bp, Artificial Sequence
  ENSG00000155011_12 (sequence is synthesized)
aagtatggaaagatgccacctactcctccaaagccagactccatgtgtgtcagaaaatttgatcaccattgaggaacatcatcaattgcagactgtgaagttgtgtatttaatgcattat

SEQ ID NO: 447366 - DNA, 120 bp, Artificial Sequence
  ENSG00000155011_13 (sequence is synthesized)
agcatggtggaaaataaggttcagatgcagaagaatggctaaaataagaaacgtgataagaatatagatgatcacaaaaagggagaaagaaaacatgaactgaatagattagaatgggtg

SEQ ID NO: 447367 - DNA, 120 bp, Artificial Sequence
  ENSG00000155011_14 (sequence is synthesized)
acaaatgcagtgcagccagtgtttccattatgcaacttgtctatgtaaataatgtacacatttgtggaaaatgctattattaagagaacaagcacacagtggaaattactgatgagtagc

SEQ ID NO: 447368 - DNA, 120 bp, Artificial Sequence
  ENSG00000155011_15 (sequence is synthesized)
ctgattgcttatacaaataacctacatgccagatttctattcaacgttagagtttaacaaaatactcctagaataacttgttatacaataggttctaaaaataaaattgctaaacaagaa

SEQ ID NO: 447369 - DNA, 120 bp, Artificial Sequence
  ENSG00000155011_16 (sequence is synthesized)
atgaaaacatggagcattgttaatttacaacagaaaattaccttttgatttgtaacactacttctgctgttcaatcaagagtcttggtagataagaaaaaaatcagtcaatatttccaaa

SEQ ID NO: 447370 - DNA, 120 bp, Artificial Sequence
  ENSG00000155011_17 (sequence is synthesized)
taattgcaaaataatggccagttgtttaggaaggcctttaggaagacaaataaataacaaacaaacagccacaaatacttttttttcaaaattttagttttacctgtaattaataagaac

SEQ ID NO: 447371 - DNA, 120 bp, Artificial Sequence
  ENSG00000155011_18 (sequence is synthesized)
tgatacaagacaaaaacagttccttcagattctacggaatgacagtatatctctctttatcctatgtgattcctgctctgaatgcattatattttccaaactatacccataaattgtgac

SEQ ID NO: 447372 - DNA, 120 bp, Artificial Sequence
  ENSG00000155011_19 (sequence is synthesized)
tagtaaaatacttacacagagcagaattttcacagatggcaaaaaaatttaaagatgtccaatatatgtgggaaaagagctaacagagagatcattatttcttaaagattggccataacc

SEQ ID NO: 447373 - DNA, 120 bp, Artificial Sequence
  ENSG00000155011_20 (sequence is synthesized)
tgtattttgatagaattagattggtaaatacatgtattcatacatactctgtggtaatagagacttgagctggatctgtactgcactggagtaagcaagaaaattgggaaaactttttcg

SEQ ID NO: 447374 - DNA, 120 bp, Artificial Sequence
  ENSG00000155011_21 (sequence is synthesized)
tttgttcaggttttggcaacacatagatcatatgtctgaggcacaagttggctgttcatctttgaaaccaggggatgcacagtctaaatgaatatctgcatgggatttgctatcataata

SEQ ID NO: 447375 - DNA, 120 bp, Artificial Sequence
  ENSG00000155011_22 (sequence is synthesized)
tttactatgcagatgaattcagtgtgaggtcctgtgtccgtactatcctcaaattatttattttatagtgctgagatcctcaaataatctcaatttcaggaggtttcacaaaatggactc

SEQ ID NO: 447376 - DNA, 120 bp, Artificial Sequence
  ENSG00000155011_23 (sequence is synthesized)
ctgaagtagacagagtagtgaggtttcattgccctctataagcttctgactagccaatggcatcatccaattttcttcccaaacctctgcagcatctgctttattgccaaagggctagtt

SEQ ID NO: 447377 - DNA, 120 bp, Artificial Sequence
  ENSG00000155011_24 (sequence is synthesized)
tcggttttctgcagccattgcggttaaaaaatataagtaggataacttgtaaaacctgcatattgctaatctatagacaccacagtttctaaattctttgaaaccactttactacttttt

SEQ ID NO: 447378 - DNA, 120 bp, Artificial Sequence
  ENSG00000155011_25 (sequence is synthesized)
ttaaacttaactcagttctaaatactttgtctggagcacaaaacaataaaaggttatcttatagtcgtgactttaaacttttgtagaccacaattcactttttagttttcttttacttaa

SEQ ID NO: 447379 - DNA, 120 bp, Artificial Sequence
  ENSG00000155011_26 (sequence is synthesized)
atcccatctgcagtctcaaatttaagttctcccagtagagattgagtttgagcctgtatatctattaaaaatttcaacttcccacatatatttactaagatgattaagacttacattttc

SEQ ID NO: 447380 - DNA, 120 bp, Artificial Sequence
  ENSG00000155011_27 (sequence is synthesized)
tgcacaggtctgcaaaaacaaaaattataaactagtccatccaagaaccaaagtttgtataaacaggttgctataagcttggtgaaatgaaaatggaacatttcaatcaaacatttccta

SEQ ID NO: 447381 - DNA, 120 bp, Artificial Sequence
  ENSG00000155011_28 (sequence is synthesized)
acaattattatatttacaatttggtttctgcaatatttttcttatgtccacccttttaaaaattattatttgaagtaatttatttacaggaaatgttaatgagatgtattttcttataga

SEQ ID NO: 447382 - DNA, 120 bp, Artificial Sequence
  ENSG00000155011_29 (sequence is synthesized)
tagagatatttcttacagaaagctttgtagcagaatatatttgcagctattgactttgtaatttaggaaaaatgtataataagataaaatctattaaatttttctcctctaaaaactgaa

SEQ ID NO: 447383 - DNA, 120 bp, Artificial Sequence
  ENSG00000155011_30 (sequence is synthesized)
gctatctggagagaaagagcatgttaaattagaaacagatgggaagaatgacacacatagctctggaattcacagtgcagggcggcagagttcagtcaggttcttgacatcctgacaatc

SEQ ID NO: 447384 - DNA, 120 bp, Artificial Sequence
  ENSG00000155011_31 (sequence is synthesized)
ttgtctctgcaggaaaaggaaagaaaacacctggagatcctgcgtttggtggtgaccaagtatccttttgagacaataaaggaaataatgtataaccaggctgtgcagttattccacgtg

SEQ ID NO: 447385 - DNA, 120 bp, Artificial Sequence
  ENSG00000155011_32 (sequence is synthesized)
ggatatctgtagttctggggtttttttaaaataaagaaatagaagaaaaatatagataattaattccattggttttagaaaaaattacaaggaagtttctttaatcctagctagtcatta

SEQ ID NO: 447386 - DNA, 120 bp, Artificial Sequence
  ENSG00000155011_33 (sequence is synthesized)
aacttgttatttaggtggcaaataatggaaacagaccataatagatttatgtgataagaggcagagccaattggtatcaaccaagacttttcattataaatggtaacaacatagaagata

SEQ ID NO: 447387 - DNA, 120 bp, Artificial Sequence
  ENSG00000155011_34 (sequence is synthesized)
gtataagtaaaaatattttatgtgcttctgattgcaaaatagaattttttttttctgaagtgtcagggtaacatctattggtcatcatctctgcagggcatgaaggagacccctgcctac

SEQ ID NO: 447388 - DNA, 120 bp, Artificial Sequence
  ENSG00000155016_0 (sequence is synthesized)
agagcagagcaggacactggcgccgcgggtcaggcagctgcgtgcgcgtctcctccaggcagcaaggggaacccgaggccgccggcgcccggaccatgtcgtctccggggccgtcgcagc

SEQ ID NO: 447389 - DNA, 120 bp, Artificial Sequence
  ENSG00000155016_1 (sequence is synthesized)
gaggacccgccctggcccgcgcgcctcctgcgtgcgcctctggggctgctgcggctggaccccagcgggggcgcgctgctgctatgcggcctcgtagcgctgctgggctggagctggctg

SEQ ID NO: 447390 - DNA, 120 bp, Artificial Sequence
  ENSG00000155016_2 (sequence is synthesized)
tggagctggctgcggaggcgccgggcgcggggcatcccgcccgggcccacgccctggcctctggtgggcaacttcggtcacgtgctgctgcctcccttcctccggcggcggagctggctg

SEQ ID NO: 447391 - DNA, 120 bp, Artificial Sequence
  ENSG00000155016_3 (sequence is synthesized)
gcaggaccagggccgcagggattgatccctcggtcataggcccgcaggtgctcctggctcacctagcccgcgtgtacggcagcatcttcagcttctttatcggccactacctggtggtgg

SEQ ID NO: 447392 - DNA, 120 bp, Artificial Sequence
  ENSG00000155016_4 (sequence is synthesized)
tcctcagcgacttccacagcgtgcgcgaggcgctggtgcagcaggccgaggtcttcagcgaccgcccgcgggtgccgctcatctccatcgtgaccaaggagaagggggttgtgtttgcac

SEQ ID NO: 447393 - DNA, 120 bp, Artificial Sequence
  ENSG00000155016_5 (sequence is synthesized)
attatggtcccgtctggagacaacaaaggaagttctctcattcaactcttcgtcattttgggttgggaaaacttagcttggagcccaagattattgaggagttcaaatatgtgaaagcag

SEQ ID NO: 447394 - DNA, 120 bp, Artificial Sequence
  ENSG00000155016_6 (sequence is synthesized)
aaatgcaaaagcacggagaagaccccttctgccctttctccatcatcagcaatgccgtctctaacatcatttgctccttgtgctttggccagcgctttgattacactaatagtgagttca

SEQ ID NO: 447395 - DNA, 120 bp, Artificial Sequence
  ENSG00000155016_7 (sequence is synthesized)
agaaaatgcttggttttatgtcacgaggcctagaaatctgtctgaacagtcaagtcctcctggtcaacatatgcccttggctttattaccttccctttggaccatttaaggaattaagac

SEQ ID NO: 447396 - DNA, 120 bp, Artificial Sequence
  ENSG00000155016_8 (sequence is synthesized)
aaattgaaaaggatataaccagtttccttaaaaaaatcatcaaagaccatcaagagtctctggatagagagaaccctcaggacttcatagacatgtaccttctccacatggaagaggaga

SEQ ID NO: 447397 - DNA, 120 bp, Artificial Sequence
  ENSG00000155016_9 (sequence is synthesized)
ggaaaaataatagtaacagcagttttgatgaagagtacttattttatatcattggggatctctttattgctgggactgataccacaactaactctttgctctggtgcctgctgtatatgt

SEQ ID NO: 447398 - DNA, 120 bp, Artificial Sequence
  ENSG00000155016_10 (sequence is synthesized)
cgctgaaccccgatgtacaagaaaaggttcatgaagaaattgaaagagtcattggcgccaaccgagctccttccctcacagacaaggcccagatgccctacacagaagccaccatcatgg

SEQ ID NO: 447399 - DNA, 120 bp, Artificial Sequence
  ENSG00000155016_11 (sequence is synthesized)
aagtgcagaggctaactgtggtggtgccgcttgccattcctcatatgacctcagagaacacagtgctccaagggtataccattcctaaaggcacattgatcttacccaacctgtggtcag

SEQ ID NO: 447400 - DNA, 120 bp, Artificial Sequence
  ENSG00000155016_12 (sequence is synthesized)
tacatagagacccagccatttgggagaaaccggaggatttctaccctaatcgatttctggatgaccaaggacaactaattaaaaaagaaacctttattccttttgggatagggaagcggg

SEQ ID NO: 447401 - DNA, 120 bp, Artificial Sequence
  ENSG00000155016_13 (sequence is synthesized)
tgtgtatgggagaacaactggcaaagatggaattattcctaatgtttgtgagcctaatgcagagtttcgcatttgctttacctgaggattctaagaagcccctcctgactggaagatttg

SEQ ID NO: 447402 - DNA, 120 bp, Artificial Sequence
  ENSG00000155016_14 (sequence is synthesized)
gtctaactttagccccacatccatttaatataactatttcaaggagatgaagagcatctccaagaagagatggtaaaaagatatataaatacatatccttctaagcagattcttcctact

SEQ ID NO: 447403 - DNA, 120 bp, Artificial Sequence
  ENSG00000155016_15 (sequence is synthesized)
gcaaaggacagtgaatccagcaactcagtggatccaagctgggctcagaggtcggaaggagggtagagcacactgggaggtttcatcttggaggattcctcagcaggatacttcagccat

SEQ ID NO: 447404 - DNA, 120 bp, Artificial Sequence
  ENSG00000155016_16 (sequence is synthesized)
tttagtaatgcaggtctgtgatttgggggatagaaaacaaagtacctatgaaacgggatatctggattttacttgcagtggcttccaccgatgggccaatcttctcatttcttagtgcct

SEQ ID NO: 447405 - DNA, 120 bp, Artificial Sequence
  ENSG00000155016_17 (sequence is synthesized)
cagacatcccatatgtaaaatgagagtaataaaacttggcttctctctacctctcagcactaatgatggtcaaatgccttacatcttttctgatatctctaaaatgctgttaagttctgg

SEQ ID NO: 447406 - DNA, 120 bp, Artificial Sequence
  ENSG00000155016_18 (sequence is synthesized)
agaagaacttcaggagaagaagatctatcagctggcttttaaagacctatgacaacatgaaagtggtgttcagcctggaatgctttgtcagagatgggtgtggatttaggttatactggg

SEQ ID NO: 447407 - DNA, 120 bp, Artificial Sequence
  ENSG00000155016_19 (sequence is synthesized)
tttgtagatgtgggatgaagtggactctgtcgtgtatattgaggaaaaaagaaattataattttaaaaaatcccttgtaggattattatctaaatttatatgtctaacttctactacaac

SEQ ID NO: 447408 - DNA, 120 bp, Artificial Sequence
  ENSG00000155016_20 (sequence is synthesized)
tacaggaacagtgagccttgctacttctttagtagcttcttggcagaattcctttctactgagttatttgcaaagatgcagctctacctttttacttaaggcctgaatggtgagcatggg

SEQ ID NO: 447409 - DNA, 120 bp, Artificial Sequence
  ENSG00000155016_21 (sequence is synthesized)
gattttgatactgggactcatcaggaaaggattctgctttcaaactatactgaacattcctgtcctagcgtccctgccaccaggcccaatgcatctgatccttgaatatactctcaaaga

SEQ ID NO: 447410 - DNA, 120 bp, Artificial Sequence
  ENSG00000155016_22 (sequence is synthesized)
attcactctctttttattaagagaactaaattgtttctaaatgtagatggtccctctggaaaagcagttttcagcaggggtggtaaccccttcagagggagtttggaaatgtgtgggtat

SEQ ID NO: 447411 - DNA, 120 bp, Artificial Sequence
  ENSG00000155016_23 (sequence is synthesized)
gattcttggttatcataatgatgggggtgctactggccttctgctgccatgggaccaggatgctaaatgtcaaggtagtcctatacagtgaagaattgtcctgctcaagatgccaggatt

SEQ ID NO: 447412 - DNA, 120 bp, Artificial Sequence
  ENSG00000155016_24 (sequence is synthesized)
tcccccagtgagaacatgctctaaggaatgaccacccctttcttttattctcccacagtgctccatgtacagaagtaagcatagcagtcatatgagcaaccacattcctgaacctttcct

SEQ ID NO: 447413 - DNA, 120 bp, Artificial Sequence
  ENSG00000155016_25 (sequence is synthesized)
catgctggctctacacttaatcctttacttgtatgtttctgtaattcttacataaattctattaagagggtggcatactgtagtggatgaagctgaggcttatagtaggtaaggcacaaa

SEQ ID NO: 447414 - DNA, 120 bp, Artificial Sequence
  ENSG00000155016_26 (sequence is synthesized)
gttaaaaagtaacatcactgggtttcaaacctactggtctctgtgactaaagaacactttcagaaccacttcttgattctgccaccacttgatcccataacaggctaccccttggcctca

SEQ ID NO: 447415 - DNA, 120 bp, Artificial Sequence
  ENSG00000155016_27 (sequence is synthesized)
tgctggagttgtgtgtgtctgtcttcatcccaggctgagctccttgaggtgaggatgttgtgctgtttgcctccctcacagtgccttggtcttagtggatgcccagttgtcttgtgaatg

SEQ ID NO: 447416 - DNA, 120 bp, Artificial Sequence
  ENSG00000155016_28 (sequence is synthesized)
acttttaagaagtgtacttaagagaaaaatcctaccttatttgaataattacaagtcatgtttttgttgcttaaaggtgataaatcagtgtatattatttgttaatgtccattaaagcca

SEQ ID NO: 447417 - DNA, 120 bp, Artificial Sequence
  ENSG00000155016_29 (sequence is synthesized)
gtttttaaaaaaatcactggacttttgtgtttaccatttaaaacaaccattttaaacaaacttagaacgatgccttagctgtttataggtaacagaatgtaaactcccaccacctggaga

SEQ ID NO: 447418 - DNA, 120 bp, Artificial Sequence
  ENSG00000155016_30 (sequence is synthesized)
ctaggccatatccagggacctcacactgactttcctaaaggagagaagcagctacgctgttcatactgatagagaagagggcaagaaaagatccagagtggctgttactttgaaaattaa

SEQ ID NO: 447419 - DNA, 120 bp, Artificial Sequence
  ENSG00000155016_31 (sequence is synthesized)
acgaaagatgaaattctgaacttaaaacacttctgtttggccttctataactgatcacccttctttgctctgttttccagataaatggagacaccagatctccctaacctctgacttctg

SEQ ID NO: 447420 - DNA, 120 bp, Artificial Sequence
  ENSG00000155016_32 (sequence is synthesized)
ccgttagccatactctgtgtagttagatctcagtctgggaatggcattccagggcaattgtgaacatgaggctagatttttcctttgatttagcacattcctaggcagacttttgcaagc

SEQ ID NO: 447421 - DNA, 120 bp, Artificial Sequence
  ENSG00000155016_33 (sequence is synthesized)
tcaaaaaatgaaaataatatctgcttaaccaaaacataatcataggaagaagaaaaattttaaaatgattgatttttgactctacattctttatctaccatactgctcttttccttttta

SEQ ID NO: 447422 - DNA, 120 bp, Artificial Sequence
  ENSG00000155016_34 (sequence is synthesized)
gaaatattactaagcactttccgtatagataaatgaaatacaggctaatctttaggtgtcttaggaatttttgctttttgaaaaagaaaagctaatagcctaactgcagaggaactgagt

SEQ ID NO: 447423 - DNA, 120 bp, Artificial Sequence
  ENSG00000155016_35 (sequence is synthesized)
ggatggggtagctgctgtatagatttttagatgagatgatacagtgtggattacactgtaccttgggcgggagagtttgttcttgatatggaattcatatgcttttgaattgcactaata

SEQ ID NO: 447424 - DNA, 120 bp, Artificial Sequence
  ENSG00000155016_36 (sequence is synthesized)
actcagcattaacaagtatattactccttaaattatacatgcattttcaatattcctaaccaaatagtttatagcttattgagaagaagtctgttcttggagagatgttgaaattagatg

SEQ ID NO: 447425 - DNA, 120 bp, Artificial Sequence
  ENSG00000155016_37 (sequence is synthesized)
tttattaaactttaaaatataatgccttaagctgtggcactttaaaaacatctttatatataaattgctaaaaggactgttaatgcttttctcagacacattggcattttacaattttgc

SEQ ID NO: 447426 - DNA, 120 bp, Artificial Sequence
  ENSG00000155016_38 (sequence is synthesized)
acatggtttatttgaaatcaaaaaataactatactttgttttataagtctacctaatatctcatttttgattctcatcgttagcacagttttgttgcttttattaaactattttaactga

SEQ ID NO: 447427 - DNA, 120 bp, Artificial Sequence
  ENSG00000155016_39 (sequence is synthesized)
atgatcatcaaaggatgaaggaacagatgaggtgtgagtggacttcccagatcaagaaatggacagcattatcagcctgaagaaaagaggccactgtgactacagtcaagatgctcagct

SEQ ID NO: 447428 - DNA, 120 bp, Artificial Sequence
  ENSG00000155016_40 (sequence is synthesized)
gcaagacttgaggacagctcaaaccatctttggctactgtgcccagtagcaaaggagtaaatgtgatactgtccagaaacaagatgtgtaggccataagagaaaagaaattatgttagga

SEQ ID NO: 447429 - DNA, 120 bp, Artificial Sequence
  ENSG00000155016_41 (sequence is synthesized)
attagaggccaataacattattgaatatttattattttttgaaagaactttgctgctgaagttggtgagaatagcagagaagggtatgtttcataacgcaaagagaggctagaaatagtt

SEQ ID NO: 447430 - DNA, 120 bp, Artificial Sequence
  ENSG00000155016_42 (sequence is synthesized)
gacttaatacatttgctgaaaagttccagaatgtaggaattttattttttatgtttaaatttttcaaaatttcatgattagacaaggtggtcttcttcttaagcccataaaaactacagt

SEQ ID NO: 447431 - DNA, 120 bp, Artificial Sequence
  ENSG00000155016_43 (sequence is synthesized)
aaactagataggccataaagatgctgtgtccatcattctgattgattcttttcctaagcacaaaaagaaaagaaaattacaaaatcagagctaaggctaccaaaggagcgtttcactctt

SEQ ID NO: 447432 - DNA, 120 bp, Artificial Sequence
  ENSG00000155016_44 (sequence is synthesized)
aagtgtgctgatatggtttgaaggtgtccccaaatgtttatgtattagaaacttaatccctaatgcaacagtgtcaagagatgggaacttaaaagatgactaggtcatgagggctctgcc

SEQ ID NO: 447433 - DNA, 120 bp, Artificial Sequence
  ENSG00000155016_45 (sequence is synthesized)
ttcatcaatggattagtgctgttatcaccagagtgggttagttattgtgggagtgggtttctgagaagaaggatgagtttggccccctttctctctctctctctttcatcctctcttacc

SEQ ID NO: 447434 - DNA, 120 bp, Artificial Sequence
  ENSG00000155016_46 (sequence is synthesized)
cttctgccttccaccatgggatgatgcagcatgaaggcccttgccagatgccagtgctatcctcttggacttcccagccttcagaactgtaagaaataaatctctgttctttataaatta

SEQ ID NO: 447435 - DNA, 120 bp, Artificial Sequence
  ENSG00000155016_47 (sequence is synthesized)
ctgttccttggacaagaatacctgcttcttctgaggaattccttttttctgacctcagtcccttttacccttaactgtggttgaacggcagatgccatatctttacataaactcaccttc

SEQ ID NO: 447436 - DNA, 120 bp, Artificial Sequence
  ENSG00000155026_0 (sequence is synthesized)
cagataaaactcatcagtgctttgaaacaagcagctctgaaccaaagaaatcatttgattcaagtaaccattggatcttcccaaggcaatggtgaaagaaaagaaaaaagcagacaaaaa

SEQ ID NO: 447437 - DNA, 120 bp, Artificial Sequence
  ENSG00000155026_1 (sequence is synthesized)
aggggagaagtctgcccgctctccctcatctctctctgataatctagacttttccaaacaagatggcaacaccactaggcaagagatgtccccagctggtgtcccattgctgggaatgca

SEQ ID NO: 447438 - DNA, 120 bp, Artificial Sequence
  ENSG00000155026_2 (sequence is synthesized)
gctcaacgaagtgaaacccaaaaaagaccgccaaaacgttcagcagaacgaagatgccacccaatacgaagagtccattctgaccaaactcatagtggaaagctatgaaggggaaaaggt

SEQ ID NO: 447439 - DNA, 120 bp, Artificial Sequence
  ENSG00000155026_3 (sequence is synthesized)
tcgtgggctgtatgagggagaaggcttcgcagcctttcaaggcggttgtacctatcgtggtatgttttcagaaggactcatgcatggacaggggacttatatttgggccgatggattaaa

SEQ ID NO: 447440 - DNA, 120 bp, Artificial Sequence
  ENSG00000155026_4 (sequence is synthesized)
atatgagggcgactttgtgaagaatgtcccgatgaaccacggcgtgtacacgtggccggacggcagcatgtatgaaggcgaagtggtcaacggcatgaggaacggattcgggatgttcaa

SEQ ID NO: 447441 - DNA, 120 bp, Artificial Sequence
  ENSG00000155026_5 (sequence is synthesized)
gtgcagcacccagcctgtgtcctacatcggccactggtgcaatggcaagcggcacgggaagggctccatttattacaatcaagagggtacgtgttggtacgagggagactgggtacaaaa

SEQ ID NO: 447442 - DNA, 120 bp, Artificial Sequence
  ENSG00000155026_6 (sequence is synthesized)
catcaaaaagggctggggaataagatgttataaatctggaaatatatacgaaggccagtgggaagacaacatgcgccacggggaggggaggatgaggtggctgaccaccaacgaagagta

SEQ ID NO: 447443 - DNA, 120 bp, Artificial Sequence
  ENSG00000155026_7 (sequence is synthesized)
caccgggcggtgggagaggggcatccagaatggctttggaacacacacatggtttctaaagagaatccgcagttcccagtatcctttgagaaatgaatacataggggagtttgtaaatgg

SEQ ID NO: 447444 - DNA, 120 bp, Artificial Sequence
  ENSG00000155026_8 (sequence is synthesized)
atatcgtcacggacgtggcaagttttattatgccagtggagccatgtatgatggagaatgggtttccaataagaaacatggcatgggccgattaactttcaagaacgggcgtgtgtacga

SEQ ID NO: 447445 - DNA, 120 bp, Artificial Sequence
  ENSG00000155026_9 (sequence is synthesized)
aggcgcattctccaatgaccacatagctgggtttccggatcttgaagttgaattcatcagctgcctggacctgtcttcaggagttgccccaagactgtccaggagcgccgaactgatcag

SEQ ID NO: 447446 - DNA, 120 bp, Artificial Sequence
  ENSG00000155026_10 (sequence is synthesized)
aaagcttgatggcagtgaaagtcattctgtgttgggatcgagcattgagctggatctaaatttgctcctggacatgtaccctgagacagtccaacctgaagaaaagaagcaggtggaata

SEQ ID NO: 447447 - DNA, 120 bp, Artificial Sequence
  ENSG00000155026_11 (sequence is synthesized)
tgccgtcttaagaaatattacagaattaagaagaatttacagcttttacagcagcctgggatgcggccactctctggataatacctttctgatgacaaagcttcacttctggagatttct

SEQ ID NO: 447448 - DNA, 120 bp, Artificial Sequence
  ENSG00000155026_12 (sequence is synthesized)
atggacaggatattaagtgccaataatgacataccagttgaagaaatccattctccatttacaacaatacttttgagaacatttttgaattacctcctgcatttggcgtaccacatttat

SEQ ID NO: 447449 - DNA, 120 bp, Artificial Sequence
  ENSG00000155026_13 (sequence is synthesized)
catgaagaattccaaaagagaagcccatccctcttcttgtgttttacaaaactgatgaccgagaacattcgtccaaatgccttccagataaaaggcaatttattccgtgagcaacagcgg

SEQ ID NO: 447450 - DNA, 120 bp, Artificial Sequence
  ENSG00000155026_14 (sequence is synthesized)
acgctctactctatgagttacatgaataagtgctgggagatttatctcgcttactgcagacccagtgcagcgcctccccacgagcctacgatgaagatgagacacttcctctggatgctg

SEQ ID NO: 447451 - DNA, 120 bp, Artificial Sequence
  ENSG00000155026_15 (sequence is synthesized)
aaagactttaaaatgataaataaagaattaacagcagctacatttatggaggtcatagcagaggataatcgtttcatatatgatggaattgacagcaactttgaacctgagctggttttc

SEQ ID NO: 447452 - DNA, 120 bp, Artificial Sequence
  ENSG00000155026_16 (sequence is synthesized)
ctggaattctttgaagctctcttaagctttgcattcatctgtgttactgaccaaatgactaaatcctatacaaatgttccagctgatgatgtgtctggaaataaacatgaaactatttat

SEQ ID NO: 447453 - DNA, 120 bp, Artificial Sequence
  ENSG00000155026_17 (sequence is synthesized)
acaatactaaatcaggacgcccagaacaagagtcccagcgcggtcatgagccacgaatcggatgctgctcactctgacagtgccaggtcatcttccagcaagttagaactctcgcctgat

SEQ ID NO: 447454 - DNA, 120 bp, Artificial Sequence
  ENSG00000155026_18 (sequence is synthesized)
gttaacaaaataaggaaatcagagcccaagatcaagaagtctgtaagtcatgaaagagtctccaaaatgaattttaaattgactggaaaagggatcacctttttctcatctgagagcaag

SEQ ID NO: 447455 - DNA, 120 bp, Artificial Sequence
  ENSG00000155026_19 (sequence is synthesized)
aaatatgagagacccaaggatgatcgagaggaagagttcaacacgtgggtcaataatatgtacgtcttctttgtgaacacgctctttcatgcgtataaacgtgaagaagctatcaaggag

SEQ ID NO: 447456 - DNA, 120 bp, Artificial Sequence
  ENSG00000155026_20 (sequence is synthesized)
aaaataagggcagacaggttacgtagcacagcacaggcccagcagcggaagatggaagatgacgaactggaagcaaggctgaacatcttcatcttgagagaggaagaggccaagagacat

SEQ ID NO: 447457 - DNA, 120 bp, Artificial Sequence
  ENSG00000155026_21 (sequence is synthesized)
gactatgaggtggacatcacagtgctcaaggagccggcagacgtgtcatcctctcacctcatactggaccctcccaaggaggatgtgaccgtgtccccatccagcaagaccatcaccagc

SEQ ID NO: 447458 - DNA, 120 bp, Artificial Sequence
  ENSG00000155026_22 (sequence is synthesized)
aagaagaagaaaaagtagagagacacgaggacacacacacaggcttaggatggcacgtgctgtaagatttcctgagcattacagttcttagcactgaactcgtcacagtgttttaacata

SEQ ID NO: 447459 - DNA, 85 bp, Artificial Sequence
  ENSG00000155026_23 (sequence is synthesized)
acagttcttagcactgaactcgtcacagtgttttaacataccccttggcccactgcatctcaggtttcctacatggctggattac

SEQ ID NO: 447460 - DNA, 120 bp, Artificial Sequence
  ENSG00000155026_24 (sequence is synthesized)
gggacgccgagagcccggcaacacctcagcccgagcccggcgaggtctctgggctcctggagcgagagaggtggcatctcactacgtggcctaggctgatctccctctcctggactcaca

SEQ ID NO: 447461 - DNA, 120 bp, Artificial Sequence
  ENSG00000155026_25 (sequence is synthesized)
tgatcctcccaccttggcccttcaacgtgctgagatcgcaggtgtgagccaccacacccggccctggtaactaatttttcagactttgtcaggagaatgataatgacattgtgttgtaaa

SEQ ID NO: 447462 - DNA, 120 bp, Artificial Sequence
  ENSG00000155026_26 (sequence is synthesized)
actggcggggcgaggaggatctccaagttccaggggagcctgaggattgggcccccaccttgggttcatgccagctcccttcccacgcgacatcccgccttctagccggtggctgacatg

SEQ ID NO: 447463 - DNA, 120 bp, Artificial Sequence
  ENSG00000155026_27 (sequence is synthesized)
cttcctgtcttccgtagctgccagaacgcatcaggaccaagtgctttccggacaagccgtaatttcctatgggcgtcgttgacataaaaaggaatgaatatttggtctctgttcctggca

SEQ ID NO: 447464 - DNA, 120 bp, Artificial Sequence
  ENSG00000155026_28 (sequence is synthesized)
ggctcctggagcgaggtgagcgccccaggccgcggtcctgcgtacgccgggacagccatggcgactgggtcctgctccttcccggccggactgacgcggcctcccaggacccgagcacgt

SEQ ID NO: 447465 - DNA, 120 bp, Artificial Sequence
  ENSG00000155026_29 (sequence is synthesized)
cctctccttaagcccaggagaacagaggaaacattaggaaacgcactgagaaacgaaattggcttgatttgtagttcacttatttgtagatcactgacagaagaccgaaaagctcgtagt

SEQ ID NO: 447466 - DNA, 120 bp, Artificial Sequence
  ENSG00000155026_30 (sequence is synthesized)
aaaggcccctctaaatttagagataaaactcatcagtgctttgaaacaagcagctctgaaccaaagaaatcatttgattcaagtaaccattggatcttcccaaggcaatggtgaaagaaa

SEQ ID NO: 447467 - DNA, 120 bp, Artificial Sequence
  ENSG00000155026_31 (sequence is synthesized)
ggccagtgtaatctataaataggcagcaggagagagactcaacaccaaaccagaattttaaaaacttttaacaatttattagtcttattttccagtaaaatattcacataatgtcaaaag

SEQ ID NO: 447468 - DNA, 120 bp, Artificial Sequence
  ENSG00000155026_32 (sequence is synthesized)
aatgaaatgatagcgatatagccaactacctttaattaattccacataaatatttaaaatctaaaaacctcagatcagcagaccgagtcgaaatgtgattcttcaaagcaagtattgctt

SEQ ID NO: 447469 - DNA, 120 bp, Artificial Sequence
  ENSG00000155026_33 (sequence is synthesized)
tacccttgtcctgaatgcagtccgtcatatgaccactaacttgcatgtgaccaaatgtttgcagagtgttttttagatatgctctcggtgagccgtcatccgtcaatccaagaagaagat

SEQ ID NO: 447470 - DNA, 120 bp, Artificial Sequence
  ENSG00000155026_34 (sequence is synthesized)
gttgttgaactgcgttgcacaaagtttcttgacctcttctgcaacaaggacacaacagtgaggaaggaagaggcagtcacttaaaaggttacatgatatataattaaattcttcttgggt

SEQ ID NO: 447471 - DNA, 120 bp, Artificial Sequence
  ENSG00000155034_0 (sequence is synthesized)
ggaagtgacgagagcccgctccttgccggggtctcggttgagcggtggacgcgccggcttcgagcatccctagccgggcaggtgggaggcacggggttgcggatcccgcggccgcggttc

SEQ ID NO: 447472 - DNA, 120 bp, Artificial Sequence
  ENSG00000155034_1 (sequence is synthesized)
ggacccgccggcgacatggccagctccggagaggacatatccaatgatgatgatgacatgcaccctgcagcagccgggatggcagacggggtccacctcctagggttctctgatgagatc

SEQ ID NO: 447473 - DNA, 120 bp, Artificial Sequence
  ENSG00000155034_2 (sequence is synthesized)
ctccttcacatcctgagtcacgtccccagcacagatctgattctgaacgtccggcgtacctgtcggaagcttgcagccctgtgccttgacaagagcctcatccacaccgtgttgctgcaa

SEQ ID NO: 447474 - DNA, 120 bp, Artificial Sequence
  ENSG00000155034_3 (sequence is synthesized)
aaggactatcaggcgagcgaggacaaagtgaggcagctggtgaaggagatcggccgggagatccagcagctgagcatggctggctgctactggctgcctggctccaccgtggaacacgtg

SEQ ID NO: 447475 - DNA, 120 bp, Artificial Sequence
  ENSG00000155034_4 (sequence is synthesized)
gcccgctgccgcagcctggtgaaggtgaacctctcgggctgccacctcacttccctgcgcctctccaagatgctctcggccctgcagcacctgcgctcgctggccatcgacgtgagcccc

SEQ ID NO: 447476 - DNA, 120 bp, Artificial Sequence
  ENSG00000155034_5 (sequence is synthesized)
ggcttcgacgccagccagctgagcagcgagtgcaaggccaccctgagccgcgtgcgggagctcaagcagacgctgttcactccctcctacggcgtggtgccctgctgcaccagcctagag

SEQ ID NO: 447477 - DNA, 120 bp, Artificial Sequence
  ENSG00000155034_6 (sequence is synthesized)
aagctgctgctctacttcgagattctggaccgcacgcgcgagggcgccatcctctcgggccagcttatggtgggccagagcaacgtgccgcactaccagaacctgcgggtcttctatgcg

SEQ ID NO: 447478 - DNA, 120 bp, Artificial Sequence
  ENSG00000155034_7 (sequence is synthesized)
cgcctggcccccggctacatcaaccaggaggtggtgcggctctacctggctgtgcttagcgaccgcactcctcagaacctccacgccttcctcatctccgtccctggcagcttcgcggag

SEQ ID NO: 447479 - DNA, 120 bp, Artificial Sequence
  ENSG00000155034_8 (sequence is synthesized)
agcggcgccaccaagaacctcctggactccatggcgcgcaatgtcgtgctggatgccctgcagctgcccaagtcctggctgaacggctcttccctcctgcagcacatgaaattcaacaac

SEQ ID NO: 447480 - DNA, 120 bp, Artificial Sequence
  ENSG00000155034_9 (sequence is synthesized)
ccgttctacttcagtttcagccgctgtaccctgtcaggcggccatctgatccagcaggtcatcaacggcgggaaggacctgcggagcctggccagcttgaacctcagcggctgcgtccac

SEQ ID NO: 447481 - DNA, 120 bp, Artificial Sequence
  ENSG00000155034_10 (sequence is synthesized)
tgcctgtccccagactcgctgctccgcaaggcggaggacgacatcgacagcagcatcctggagactctggtggcgtcctgctgcaacctgcgccacctgaacctctcggccgcccaccac

SEQ ID NO: 447482 - DNA, 120 bp, Artificial Sequence
  ENSG00000155034_11 (sequence is synthesized)
cacagctcggagggcctgggccgccacctctgccagctcctggcccggctgcgtcacctgcgctccctctccctgcctgtctgctctgtcgctgactccgcgccgcgcgccgaccgcgcg

SEQ ID NO: 447483 - DNA, 120 bp, Artificial Sequence
  ENSG00000155034_12 (sequence is synthesized)
cccgcccagccggccatgcacgcagtgccgcgcggctttggcaagaaagtgcgtgtgggcgtgcagtcctgtcccagccccttctcgggccaggcgtgcccccagccctcctccgtgttc

SEQ ID NO: 447484 - DNA, 120 bp, Artificial Sequence
  ENSG00000155034_13 (sequence is synthesized)
tggtctctgctgaagaacctgcccttcctggaacacctcgagctgattgggtccaacttctcctccgccatgccccgcaacgagcccgccatccgcaactcgctcccaccctgcagccgc

SEQ ID NO: 447485 - DNA, 120 bp, Artificial Sequence
  ENSG00000155034_14 (sequence is synthesized)
gcacagagtgtcggggactcggaggtggccgccatcggccagctggccttcctgcggcacctgacgctcgcacagctgcccagcgtccttacgggctccgggctggtcaatatcggcctg

SEQ ID NO: 447486 - DNA, 120 bp, Artificial Sequence
  ENSG00000155034_15 (sequence is synthesized)
cagtgccagcagttgcggtccctgtcgctggccaacctgggcatgatggggaaggtggtgtacatgcccgcgctctcagacatgttgaagcactgcaagcggctgagggacctcaggctg

SEQ ID NO: 447487 - DNA, 120 bp, Artificial Sequence
  ENSG00000155034_16 (sequence is synthesized)
gagcagccctacttcagcgccaacgcccagttcttccaggcgctgagccagtgcccctcgctgcagcgcctgtgcctggtctctcgcagcggcaccctccagcccgatgccgtgctggcc

SEQ ID NO: 447488 - DNA, 120 bp, Artificial Sequence
  ENSG00000155034_17 (sequence is synthesized)
ttcatggctcgctgcctgcaggttgtcatgtgccacctgttcaccggggagtccctcgccacctgcaagagcctgcagcagtcgcttctccgcagcttccaggccgagcggcccgcgtta

SEQ ID NO: 447489 - DNA, 120 bp, Artificial Sequence
  ENSG00000155034_18 (sequence is synthesized)
aacgtcgtcatcttccctctgctccacgagggcctgaccgacgtcatccgggacgtccccctggtgcacctggatgagatcaccttatttaagagcagagtggccgaggaaccgccgaac

SEQ ID NO: 447490 - DNA, 120 bp, Artificial Sequence
  ENSG00000155034_19 (sequence is synthesized)
ctgtggtggtgagaggcggagccgccgcccatcggtctcagtcacctcgagaagctgcaggagcctgggacgccagggacccttggtttgtcacaagaggaagggggcctctctcccggc

SEQ ID NO: 447491 - DNA, 120 bp, Artificial Sequence
  ENSG00000155034_20 (sequence is synthesized)
cagccacgccccacctggctcctggggctcccggcgtctccacggctctctcatggggactgttgctctgtgaagtttaggtcgaggggatgcgttctgggtgacatgagggggctcggg

SEQ ID NO: 447492 - DNA, 120 bp, Artificial Sequence
  ENSG00000155034_21 (sequence is synthesized)
ggacggtcgatgtggggggctggctgaaccaggctgacccttggggcctggctggggggtttgtatactgagccgcaatccctgggggccctgtccacgggcctggagggcccgaacccc

SEQ ID NO: 447493 - DNA, 120 bp, Artificial Sequence
  ENSG00000155034_22 (sequence is synthesized)
ctgccacttccgaccgggaagcgtgtcccttggctgttgtgtttgtggtcacctgccaccggggccccgtggatgggcggccacatgctgtccccctgaagtccagtcggccgggctggt

SEQ ID NO: 447494 - DNA, 120 bp, Artificial Sequence
  ENSG00000155034_23 (sequence is synthesized)
caccgtgtatctgagtgtccccttgcatggtcaagtgtgacatggggaagggcctgccagtttagtggctgcagacttgggactctccatcccattaggacacacttgagcccactcatg

SEQ ID NO: 447495 - DNA, 120 bp, Artificial Sequence
  ENSG00000155034_24 (sequence is synthesized)
tctctggggcttttctagccagatgatgcctgtggccccagagaggtcccctgaggttgggactgctggttggagcctctcctgtgacttttcagcccaaccagcagggcccgtttctaa

SEQ ID NO: 447496 - DNA, 120 bp, Artificial Sequence
  ENSG00000155034_25 (sequence is synthesized)
cgagagaggcctcctccccctcccacccaccccacggccttcagcttccctgggaaggtccatgcgcgttcctggggaaatcgatacacattcggctttgttagaataacgcgaaacatt

SEQ ID NO: 447497 - DNA, 120 bp, Artificial Sequence
  ENSG00000155034_26 (sequence is synthesized)
gaaacattaaaacccagaaaggattcttaaggctggagtagcaatcacatgaccccatttcaaatgacttcatttaagactttaaaaatactcagctgggcgcgatggctcacgcctgta

SEQ ID NO: 447498 - DNA, 120 bp, Artificial Sequence
  ENSG00000155034_27 (sequence is synthesized)
ggataccccatctctgaaaaagaaagagaaaaaaacaaagttattccaaaaatgaggacatcctcctggcatctgagtcctcaccccatgtgccacggtggccgcttctgccgtcctcca

SEQ ID NO: 447499 - DNA, 120 bp, Artificial Sequence
  ENSG00000155034_28 (sequence is synthesized)
cctccaggcgctcctagagctgtccctgggccagtggcttccaaagggggctgtagttgggccctgctagcctggaccgccgccctggccgctcttggtgaagggccccttgtccagccc

SEQ ID NO: 447500 - DNA, 120 bp, Artificial Sequence
  ENSG00000155034_29 (sequence is synthesized)
gccttcctcctcctgggtttccgtgtgacagatgccccgtcctgtggggtggtgtctcacatttgctttgctgttaaaaaatggggtacaccatccccaggcctccaatcaccggccctg

SEQ ID NO: 447501 - DNA, 120 bp, Artificial Sequence
  ENSG00000155034_30 (sequence is synthesized)
cccctgagtggggatggttttcagcagctccttgctctgggggccaagctccttgtccaggaggcctttggagaactggggtcagagctgtggggaggtacagccctcctgtgcaggctg

SEQ ID NO: 447502 - DNA, 120 bp, Artificial Sequence
  ENSG00000155034_31 (sequence is synthesized)
atgtatggggtcatcgcctcctctctgaagcccacgggtcctctcccagccccaggctgcacccagtgcagaacctttgcctcctggccagagggacccttctgcaggctgattccagca

SEQ ID NO: 447503 - DNA, 120 bp, Artificial Sequence
  ENSG00000155034_32 (sequence is synthesized)
gtgcccgatggtgggacccacaccagaccaagccttcgcctcccagaggcctcctggccctcctgtcatggcctgtgagagccacacccctaggccccgtctcctagtctgcaggccgca

SEQ ID NO: 447504 - DNA, 120 bp, Artificial Sequence
  ENSG00000155034_33 (sequence is synthesized)
ggaccagctgcccacggccccagggggcaggggctgtagatgagggtctcagaggtggtgggagcaccccccccacccacagttcctgggcatttctttagagctttaaaatggcacctg

SEQ ID NO: 447505 - DNA, 120 bp, Artificial Sequence
  ENSG00000155034_34 (sequence is synthesized)
gagaccaccaggcgcggcgatcagatcgggtggtgtggtgcctcctgggactgaccacttcttgctctccgaccaggcaggggcgagtggcctgggaggttcccggaccctcagggggcc

SEQ ID NO: 447506 - DNA, 120 bp, Artificial Sequence
  ENSG00000155034_35 (sequence is synthesized)
tgtgtctctgggcaccgcagctccgccccactccttcctccagaacattccccactcgggctagagaattgcgtctgctccaggaatgcatcctagcgtgtgtacgatcgcgcctgggtg

SEQ ID NO: 447507 - DNA, 120 bp, Artificial Sequence
  ENSG00000155034_36 (sequence is synthesized)
tcctgttctcatgagcaagcggttttaaccagcagcataatttatactcatagacaggactgggggaagggctgttcctgaggctggggtgcagtgccttggaaagcacccctgaaacag

SEQ ID NO: 447508 - DNA, 120 bp, Artificial Sequence
  ENSG00000155034_37 (sequence is synthesized)
tggaccttgtatttttagtgtcccctgcaaccatcctctgacttagagcaagaatttccgctgctgctacccccgagatgggcttcaccagatgttaataacgtgcttattttctctaag

SEQ ID NO: 447509 - DNA, 120 bp, Artificial Sequence
  ENSG00000155034_38 (sequence is synthesized)
tgctattttggcaccagcgttagttgcaatttatattctgcagcatttgatgctgggaaaagaacccaccctaatggtccccaattggcagagctcggctgttaagcagcagaccatatg

SEQ ID NO: 447510 - DNA, 120 bp, Artificial Sequence
  ENSG00000155034_39 (sequence is synthesized)
ctgcctgctggaggagcgtggtcagcacttgtccccgtgcctgcgtgcgtgtgcctgcgtgcacgtgtgcctgcgggtacctgtgccctgtgtgtgcacatgtgcctgcatgcgtgtgcc

SEQ ID NO: 447511 - DNA, 120 bp, Artificial Sequence
  ENSG00000155034_40 (sequence is synthesized)
tgcgtgcacgtgtgcctgtgtgtacatgtgcctgcgtgtacctgtgccctgtgtgtgcacgtgtgccttcgtgtacctgtgccctgtgtgtgcatgtgtgtgtgagtcacgtcttccgtg

SEQ ID NO: 447512 - DNA, 120 bp, Artificial Sequence
  ENSG00000155034_41 (sequence is synthesized)
tgtgtatgtgagggagagactgtggggttggagggagggaggaggggaaagggtatgtatccctttgttctttaaaagggagagccccaacctctctggctgccccctcctgcctgtgct

SEQ ID NO: 447513 - DNA, 120 bp, Artificial Sequence
  ENSG00000155034_42 (sequence is synthesized)
cccagctcaccccacacctagctgctatttattctcctgacccccttcccggccctgcagccccgtgtcccgcagcctccgccccgcctcctgctccacgtcaccaggcaacactcggct

SEQ ID NO: 447514 - DNA, 120 bp, Artificial Sequence
  ENSG00000155034_43 (sequence is synthesized)
ccaccaggcttccgaaggtggcccagagcaggcacttgagcctgatgacccagagcaaagctgcctttctgggccttgagtactcctttctgctatggaaggcttttcttgttttcaacg

SEQ ID NO: 447515 - DNA, 120 bp, Artificial Sequence
  ENSG00000155034_44 (sequence is synthesized)
gcccgtccagcccaggggggctgggtgagggccgcttccttctgcagcagagggggcgggctctatccttgccatctgctgcccccagaggccctgccaggacatgggcctgagcggttt

SEQ ID NO: 447516 - DNA, 120 bp, Artificial Sequence
  ENSG00000155034_45 (sequence is synthesized)
cttctccaagaggccctcctgggacctgtctgtgcacagggcgggaagacacttgctgcttcgacccaggacggcagccaggacgggctgagctcctcttgcgctgcaaacacacaaggg

SEQ ID NO: 447517 - DNA, 120 bp, Artificial Sequence
  ENSG00000155034_46 (sequence is synthesized)
ttgcctgccagctcagcagcgccctccctcaaccacaccctgggtccggacccagagccacaggccgttggacccaggggaccggggctgggctcaggcgtgggcctggagggcttgtgg

SEQ ID NO: 447518 - DNA, 120 bp, Artificial Sequence
  ENSG00000155034_47 (sequence is synthesized)
aggggccagacctagagccgtagggctccaacagctgagggctgggcccctgccggccaatgaagctccagaccagtgctccggccttggcggtgccagcagtgctcctgcagggatgga

SEQ ID NO: 447519 - DNA, 120 bp, Artificial Sequence
  ENSG00000155034_48 (sequence is synthesized)
gggtgctggaggcctggatgcggggaccttgatcccccagcaggcagcgctgtggcagcctcccacctcctcttcccctgttatctgctccttttaggatctgaaaattacagagccttt

SEQ ID NO: 447520 - DNA, 76 bp, Artificial Sequence
  ENSG00000155034_49 (sequence is synthesized)
gattctcccacaccggctaatttttgtatttttgcagagatggggttgcaccatgttggtcaggctggccttgaac

SEQ ID NO: 447521 - DNA, 120 bp, Artificial Sequence
  ENSG00000155034_50 (sequence is synthesized)
cctgcctcggcctcccaaagtgctaggataacaggtgtgagccaccgtgcctggcgcattacagagctcttgtaagaaaacgtgtgaaattcatggacaaagtgaggtgatgaagtgtgg

SEQ ID NO: 447522 - DNA, 120 bp, Artificial Sequence
  ENSG00000155034_51 (sequence is synthesized)
ggccactaaaccaaaggcagaggagacgtcggccacttcctgtggacgtgggcagagcgctgctgccagttcctggtagccttgaccacgacgctggggggtctttgtgatggtcatggg

SEQ ID NO: 447523 - DNA, 85 bp, Artificial Sequence
  ENSG00000155034_52 (sequence is synthesized)
cttgaccacgacgctggggggtctttgtgatggtcatgggtctcatttgcacttgggggtgtgggattcaagttagaagtttcta

SEQ ID NO: 447524 - DNA, 120 bp, Artificial Sequence
  ENSG00000155034_53 (sequence is synthesized)
gatctactgggcatgatgaacacaaaccccacagacactgaggaacccagtggtggcagtgactcgggctcctctgctctctaaagctcctttgagaaacatgggaggggccgggcgtgg

SEQ ID NO: 447525 - DNA, 61 bp, Artificial Sequence
  ENSG00000155034_54 (sequence is synthesized)
atcgctacataaaataaaaaaaaaagttagctgggcattgtacatgtgcctgtggtcccag

SEQ ID NO: 447526 - DNA, 71 bp, Artificial Sequence
  ENSG00000155034_55 (sequence is synthesized)
gttgcagtgagccaagatcgcaccattgccctccactctgggccacggagcaataccctgtctcagaaaac

SEQ ID NO: 447527 - DNA, 120 bp, Artificial Sequence
  ENSG00000155034_56 (sequence is synthesized)
tccactctgggccacggagcaataccctgtctcagaaaacaaacaacaaaaagcagaaacgctgaaggggtcggtttacgggaaaaccgcctgtcagaacacttggctactcctacccca

SEQ ID NO: 447528 - DNA, 120 bp, Artificial Sequence
  ENSG00000155034_57 (sequence is synthesized)
gatcagtggacctgggaatgagggttggtcccgggaggcttttctccaagctgttgccaccagacccgccatgggaaccctggccacagaagcctcccggggagtgagccagagcctgga

SEQ ID NO: 447529 - DNA, 120 bp, Artificial Sequence
  ENSG00000155034_58 (sequence is synthesized)
ccgctgtgctgatgtgtctggggtggagggagggtggggagtgtgcaagggtgtgtgtgtgcccggggggtgttcatgggcaagcatgtgcgtgcctgtgtgtgtgcgtgcccctcccct

SEQ ID NO: 447530 - DNA, 120 bp, Artificial Sequence
  ENSG00000155034_59 (sequence is synthesized)
gcagccgtcggtggtatctccctccagccccttcgccaccttctgagcattgtctgtccacgtgagactgcccagagacagcagagctccacgtggttttaaggggagacctttccctgg

SEQ ID NO: 447531 - DNA, 120 bp, Artificial Sequence
  ENSG00000155034_60 (sequence is synthesized)
acctgggggtctcgccgtatctcatgaccaggtgctaaatgacacgacatgcatcacctgcctttcgatgaccaacctccctgtccccgtcccgctgacctgcccccgtggcgtctcacg

SEQ ID NO: 447532 - DNA, 120 bp, Artificial Sequence
  ENSG00000155034_61 (sequence is synthesized)
gtgatgcctgctcctgacattggtgttcactgtagcaaactacattctggatgggaattttcatgtacatgtgtggcatgtggaaaatttcaaataaaatggacttgatttagaaagcca

SEQ ID NO: 447533 - DNA, 120 bp, Artificial Sequence
  ENSG00000155034_62 (sequence is synthesized)
tcaggaatggcagcctgcagcaactggaacaaggccccaccgtaaagctctgtgtgtcccagggtcttcctgtcacccaggctggagtacagtagcgtgatcacagctcactgcagcctt

SEQ ID NO: 447534 - DNA, 120 bp, Artificial Sequence
  ENSG00000155034_63 (sequence is synthesized)
agcctcctgagtagctgggactgcagttgtaagccaccgtgtccagccagtttctgttgtttgaagcccccaacttctagattgggaaacgaagctctgctgggcgtggtggctcacacc

SEQ ID NO: 447535 - DNA, 120 bp, Artificial Sequence
  ENSG00000155034_64 (sequence is synthesized)
tgtgagtggctcccagcactttgagaggccgaggagggaggactgcttgaagccagaagttcaagaccagcctgcacatcacgagacccgccctccccccaccaatctctataaaacatt

SEQ ID NO: 447536 - DNA, 120 bp, Artificial Sequence
  ENSG00000155034_65 (sequence is synthesized)
gtcgctgactccgcgccgcgcgccgaccgcgcgcccgcccagccggccatgcacgcagtgccgcgcggctttggcaagaaagtgcgtgtgggcgtgcagtcctgtcccccccttctcggg

SEQ ID NO: 447537 - DNA, 120 bp, Artificial Sequence
  ENSG00000155034_66 (sequence is synthesized)
agccactgggcgccgacaaccctgcttgccagactctggggtagtctgttgtccttgcggtcggccgctggctgtctcaggaataatcctggttggggtttccccctctctggttgtaaa

SEQ ID NO: 447538 - DNA, 120 bp, Artificial Sequence
  ENSG00000155034_67 (sequence is synthesized)
ctggttggggtttccccctctctggttgtaaaaacaacttgtgtttatagagtactttttaaaaatttagactatgcatcaatcttttttcttgtttgtttgtttgagacagagtctcac

SEQ ID NO: 447539 - DNA, 120 bp, Artificial Sequence
  ENSG00000155034_68 (sequence is synthesized)
attacaggcgtgagccacaacgcctggccaacatcaacctatttttaagtgaaggtttcccaacagtgaatgctgccaactttccctggagaatgaactggagatagggttctcatattg

SEQ ID NO: 447540 - DNA, 120 bp, Artificial Sequence
  ENSG00000155034_69 (sequence is synthesized)
cctggagaatgaactggagatagggttctcatattgttttgtaatctgatttttaaaaatgtaacactacaccgtggagtcctcttgtgtcagtaaataaagccctaagtgattattctc

SEQ ID NO: 447541 - DNA, 120 bp, Artificial Sequence
  ENSG00000155052_0 (sequence is synthesized)
gattccagctctcgcgcccgacgaggtggatttggctgtccaccgagctccggcgcctgtcgttctaattgggtttggatttgcaccgttaaggaggggggaagagaaggaagaggcggg

SEQ ID NO: 447542 - DNA, 120 bp, Artificial Sequence
  ENSG00000155052_1 (sequence is synthesized)
cgaggaaggcgagtccagctagcggctgttgcggggaccgtagccccagctgcagctccgaagaatcccccgccacggtttcggtggagcgtctgggcacgggatggagtgaaagagcga

SEQ ID NO: 447543 - DNA, 120 bp, Artificial Sequence
  ENSG00000155052_2 (sequence is synthesized)
gtgcctctccaagcgggggtgggagggggtcaggctgtgcagaggagagagacagcgagaagaagccgcggctggctactgcgaatttgggattcgattgggagggaccgctcactcggg

SEQ ID NO: 447544 - DNA, 120 bp, Artificial Sequence
  ENSG00000155052_3 (sequence is synthesized)
ggaaatggattctttaccacggctgaccagcgttttgactttgctgttctctggcttgtggcatttaggattaacagcgacaaactacaactgtgatgatccactagcatccctgctctc

SEQ ID NO: 447545 - DNA, 120 bp, Artificial Sequence
  ENSG00000155052_4 (sequence is synthesized)
tccaatggctttttccagttcctcagacctcactggcactcacagcccagctcaactcaactggagagttggaactggcggttggtccccagcagattccaatgctcaacagtggctcca

SEQ ID NO: 447546 - DNA, 120 bp, Artificial Sequence
  ENSG00000155052_5 (sequence is synthesized)
gatggacctgggaaacagagtagagattacagcagtggccacgcagggaagatacggaagctctgactgggtgacgagttacagcctgatgttcagtgacacaggacgcaactggaaaca

SEQ ID NO: 447547 - DNA, 120 bp, Artificial Sequence
  ENSG00000155052_6 (sequence is synthesized)
gtacaaacaagaagacagcatctggacctttgcaggaaacatgaatgctgacagcgtggtgcaccacaagctattgcactcagtgagagcccgatttgttcgctttgtgcccctggaatg

SEQ ID NO: 447548 - DNA, 120 bp, Artificial Sequence
  ENSG00000155052_7 (sequence is synthesized)
gaatcccagtgggaagattggcatgagagtcgaggtctacggatgttcctataaatcagatgttgctgactttgatggccgaagctcacttctgtacaggttcaatcagaagttgatgag

SEQ ID NO: 447549 - DNA, 120 bp, Artificial Sequence
  ENSG00000155052_8 (sequence is synthesized)
tactctcaaagatgtgatctccctgaagttcaagagcatgcaaggagatggggtcctgttccatggagaaggtcagcgtggagaccacatcaccttggaactccagaaggggaggctcgc

SEQ ID NO: 447550 - DNA, 120 bp, Artificial Sequence
  ENSG00000155052_9 (sequence is synthesized)
cctacacctcaatttgggtgacagcaaagcgcggctcagcagcagcttgccctctgccaccctgggcagcctcctggatgaccagcactggcactcggtcctcattgagcgggtgggcaa

SEQ ID NO: 447551 - DNA, 120 bp, Artificial Sequence
  ENSG00000155052_10 (sequence is synthesized)
gcaggtgaacttcacggtggacaagcacacacagcacttccgcaccaagggcgagacggatgccttagacattgactatgagcttagttttggaggaattccagtaccaggaaaacctgg

SEQ ID NO: 447552 - DNA, 120 bp, Artificial Sequence
  ENSG00000155052_11 (sequence is synthesized)
gacctttttaaagaaaaacttccatggatgcatcgaaaacctttactacaatggagtaaacataattgacctggctaagagacgaaagcatcagatctatactggcaatgtcactttttc

SEQ ID NO: 447553 - DNA, 120 bp, Artificial Sequence
  ENSG00000155052_12 (sequence is synthesized)
ctgctccgaaccacagattgtgcccatcacatttgtcaactccagcggcagctatttgctgctgcccggcaccccccaaattgatgggctctcagtgagtttccagtttcgaacatggaa

SEQ ID NO: 447554 - DNA, 120 bp, Artificial Sequence
  ENSG00000155052_13 (sequence is synthesized)
caaggatggtctgcttctgtccacagagctgtctgagggctcgggaaccctgctgctgagcctggagggtggaatcctgagactcgtgattcagaaaatgacagaacgcgtagctgaaat

SEQ ID NO: 447555 - DNA, 120 bp, Artificial Sequence
  ENSG00000155052_14 (sequence is synthesized)
cctcacaggcagcaacttgaatgatggcctgtggcactcggttagcatcaacgccaggaggaaccgcatcacgctcactctggatgatgaagcagcacccccggctccagacagcacttg

SEQ ID NO: 447556 - DNA, 120 bp, Artificial Sequence
  ENSG00000155052_15 (sequence is synthesized)
ggtgcagatttattctggaaatagctactattttggagggtgccccgacaatctcaccgattcccaatgtttaaatcccattaaggctttccaaggctgcatgaggctcatctttattga

SEQ ID NO: 447557 - DNA, 120 bp, Artificial Sequence
  ENSG00000155052_16 (sequence is synthesized)
taaccagcccaaggacctcatttcagttcagcaaggttccctggggaattttagtgatttacacattgatctgtgtagcatcaaagacaggtgtttgccaaactactgtgaacatggagg

SEQ ID NO: 447558 - DNA, 120 bp, Artificial Sequence
  ENSG00000155052_17 (sequence is synthesized)
aagctgctcccagtcctggactaccttctattgtaactgcagtgacacaagttacactggtgccacctgccacaactccatctacgagcaatcctgcgaggtgtacaggcaccaggggaa

SEQ ID NO: 447559 - DNA, 120 bp, Artificial Sequence
  ENSG00000155052_18 (sequence is synthesized)
tacagccggcttcttctacatcgactcagatggcagcggcccactgggacctctccaggtgtactgcaatatcactgaggacaagatctggacatcagtgcagcacaacaatacagagct

SEQ ID NO: 447560 - DNA, 120 bp, Artificial Sequence
  ENSG00000155052_19 (sequence is synthesized)
gacccgagtgcggggcgctaaccctgagaagccctatgccatggccttggactacgggggcagcatggaacagctggaggccgtgatcgacggctctgagcactgtgagcaggaggtggc

SEQ ID NO: 447561 - DNA, 120 bp, Artificial Sequence
  ENSG00000155052_20 (sequence is synthesized)
ctaccactgcaggaggtcccgcctgctcaacacgccggatggaacaccatttacctggtggattgggcggtccaatgaaaggcacccttactggggaggttcccctcctggggtccagca

SEQ ID NO: 447562 - DNA, 120 bp, Artificial Sequence
  ENSG00000155052_21 (sequence is synthesized)
gtgtgagtgtggcctagacgagagctgcctggacattcagcacttttgcaattgcgacgctgacaaggatgaatggacaaatgatactggctttctttccttcaaagaccacttgcctgt

SEQ ID NO: 447563 - DNA, 120 bp, Artificial Sequence
  ENSG00000155052_22 (sequence is synthesized)
cagatagttatcactgataccgacagatcaaactcagaagccgcttggagaattggtcccttgcgttgctatggtgaccgacgcttctggaacgccgtctcattttatacagaagcctct

SEQ ID NO: 447564 - DNA, 120 bp, Artificial Sequence
  ENSG00000155052_23 (sequence is synthesized)
tacctccactttcctaccttccatgcggaattcagtgccgatatttccttcttttttaaaaccacagcattatccggagttttcctagaaaatcttggcattaaagacttcattcgactc

SEQ ID NO: 447565 - DNA, 120 bp, Artificial Sequence
  ENSG00000155052_24 (sequence is synthesized)
gaaataagctctccttcagagatcacctttgccatcgatgttgggaatggtcctgtggagcttgtagtccagtctccttctcttctgaatgacaaccaatggcactatgtccgggctgag

SEQ ID NO: 447566 - DNA, 120 bp, Artificial Sequence
  ENSG00000155052_25 (sequence is synthesized)
aggaacctcaaggagacctccctgcaggtggacaaccttccaaggagcaccagggagacgtcggaggagggccattttcgactgcagctgaacagccagttgtttgtagggggaacgtca

SEQ ID NO: 447567 - DNA, 120 bp, Artificial Sequence
  ENSG00000155052_26 (sequence is synthesized)
tccagacagaaaggcttcctaggatgcattcgctccttacacttgaatggacagaaaatggacctggaagagagggcaaaggtcacatctggagtcaggccaggctgccccggccactgc

SEQ ID NO: 447568 - DNA, 120 bp, Artificial Sequence
  ENSG00000155052_27 (sequence is synthesized)
agcagctacggcagcatctgccacaacgggggcaagtgtgtggagaagcacaatggctacctgtgtgattgcaccaattcaccttatgaagggcccttttgcaaaaaagaggtttctgct

SEQ ID NO: 447569 - DNA, 120 bp, Artificial Sequence
  ENSG00000155052_28 (sequence is synthesized)
gtttttgaggctggcacgtcggttacttacatgtttcaagaaccctatcctgtgaccaagaatataagcctctcatcctcagctatttacacagattcagctccatccaaggaaaacatt

SEQ ID NO: 447570 - DNA, 120 bp, Artificial Sequence
  ENSG00000155052_29 (sequence is synthesized)
gcacttagctttgtgacaacccaggcacccagtcttttgctctttatcaattcttcttctcaggacttcgtggttgttctgctctgcaagaatggaagcttacaggttcgctatcaccta

SEQ ID NO: 447571 - DNA, 120 bp, Artificial Sequence
  ENSG00000155052_30 (sequence is synthesized)
aacaaggaagaaacccatgtattcaccattgatgcagataactttgctaacagaaggatgcaccacttgaagattaaccgagagggaagagagcttaccattcagatggaccagcaactt

SEQ ID NO: 447572 - DNA, 120 bp, Artificial Sequence
  ENSG00000155052_31 (sequence is synthesized)
cgactcagttataacttctctccggaagtagagttcagggttataaggtcactcaccttgggcaaagtcacagagaatcttggtttggattctgaagttgctaaagcaaatgccatgggt

SEQ ID NO: 447573 - DNA, 120 bp, Artificial Sequence
  ENSG00000155052_32 (sequence is synthesized)
tttgctggatgcatgtcttccgtccagtacaaccacatagcaccactgaaggctgccctgcgccatgccactgtcgcgcctgtgactgtccatgggaccttgacggaatccagctgtggc

SEQ ID NO: 447574 - DNA, 120 bp, Artificial Sequence
  ENSG00000155052_33 (sequence is synthesized)
ttcatggtggactcagatgtgaatgcagtgaccacggtgcattcttcatcagatccttttgggaagacagatgagcgggaaccactcacaaatgctgttcgaagtgattcggcagtcatc

SEQ ID NO: 447575 - DNA, 120 bp, Artificial Sequence
  ENSG00000155052_34 (sequence is synthesized)
ggaggggtgatagcagtggtgatattcatcatcttctgtatcatcggcatcatgacccggttcctctaccagcacaagcagtcacatcgtacgagccagatgaaggagaaggaatatcca

SEQ ID NO: 447576 - DNA, 120 bp, Artificial Sequence
  ENSG00000155052_35 (sequence is synthesized)
gaaaatttggacagttccttcagaaatgaaattgacttgcaaaacacagtgagcgagtgtaaacgggaatatttcatctgagaaactgcagggttcctactactcttttttcttgttgtt

SEQ ID NO: 447577 - DNA, 120 bp, Artificial Sequence
  ENSG00000155052_36 (sequence is synthesized)
caattatctcctccccctcttctctcctgtcttttgatttggtcattctctttattttctgcttgccatgtcttttctggaacatacttgcatccaccacagcatcaattcccttgatcc

SEQ ID NO: 447578 - DNA, 120 bp, Artificial Sequence
  ENSG00000155052_37 (sequence is synthesized)
agcccaagagaccaggcagccatggccactgccttcctctctgatgaacctatcgggtgaaaacgaccactcaagagactgacttcgccattcaagacaaggaagagacacatgtgtgca

SEQ ID NO: 447579 - DNA, 120 bp, Artificial Sequence
  ENSG00000155052_38 (sequence is synthesized)
ctcctgcatgttcagttctgtacttccagtttctaaaatgcactgttcagttttccaaccacttggtggttcaggcttgctttgaacctgagctcttaggcacatgacggtcattcctga

SEQ ID NO: 447580 - DNA, 120 bp, Artificial Sequence
  ENSG00000155052_39 (sequence is synthesized)
catcctccccagctcaagtctattcttaccatagaacccagggcagggagagaagaacctagaggcctggtttgctttggtggcattgtaaaaagagtaagagaggtttggtttgtggtg

SEQ ID NO: 447581 - DNA, 120 bp, Artificial Sequence
  ENSG00000155052_40 (sequence is synthesized)
gtttgctttctttaccataagcaatcccttgccttaactcatcaccctttttcactatgacccttagaccctgagtattttcaaatatatgattgctgatagtagtgaccaaaactactt

SEQ ID NO: 447582 - DNA, 120 bp, Artificial Sequence
  ENSG00000155052_41 (sequence is synthesized)
tgttcctttcttaccactctctcctggggccgacacgttgggacagcacaccatagcataaagctaggggatgcatggaaatagcagcttgaaactaggaggtaacaagaaagcttctag

SEQ ID NO: 447583 - DNA, 120 bp, Artificial Sequence
  ENSG00000155052_42 (sequence is synthesized)
gcttctaggaagtagatgttccatatcttcaaaatgcctcctccaattttgtaagaatgctagctaggtattcctgggattattatactgagatatatatatatacacacacacacacat

SEQ ID NO: 447584 - DNA, 70 bp, Artificial Sequence
  ENSG00000155052_43 (sequence is synthesized)
atatacacacacacacacatatgtgtatatatgtatatatatatgtgagcacacatatatgttgctgcag

SEQ ID NO: 447585 - DNA, 120 bp, Artificial Sequence
  ENSG00000155052_44 (sequence is synthesized)
caaacttgaggctcttaatagaatggcaagaagaacaagaagtaagaaagcctggagaacaagaagtaagaaagcctgaaagactcaaacactgtataatttttctctgaataagctaat

SEQ ID NO: 447586 - DNA, 120 bp, Artificial Sequence
  ENSG00000155066_0 (sequence is synthesized)
ggtagctcaggaacccaaacctgtcgggcaggttttgagagctgtggagagagggacagaggctggagaaggatgtatggcctgccctgggcttgtctgttccctcctgagcctgagccc

SEQ ID NO: 447587 - DNA, 120 bp, Artificial Sequence
  ENSG00000155066_1 (sequence is synthesized)
cttaccttcctgaccccatgaagcacacactggctctgctggctcccctgctgggcctgggcctggggctggccctgagtcagctggctgcaggggccacagactgcaagttccttggcc

SEQ ID NO: 447588 - DNA, 120 bp, Artificial Sequence
  ENSG00000155066_2 (sequence is synthesized)
cggcagagcacctgacattcaccccagcagccagggcccggtggctggcccctcgagttcgtgcgccaggactcctggactccctctatggcaccgtgcgccgcttcctctcggtggtgc

SEQ ID NO: 447589 - DNA, 120 bp, Artificial Sequence
  ENSG00000155066_3 (sequence is synthesized)
agctcaatcctttcccttcagagttggtaaaggccctactgaatgagctggcctccgtgaaggtgaatgaggtggtgcggtacgaggcgggctacgtggtatgcgctgtgatcgcgggcc

SEQ ID NO: 447590 - DNA, 120 bp, Artificial Sequence
  ENSG00000155066_4 (sequence is synthesized)
tctacctgctgctggtgcccactgccgggctttgcttctgctgctgccgctgccaccggcgctgcgggggacgagtgaagacagagcacaaggcgctggcctgtgagcgcgcggccctca

SEQ ID NO: 447591 - DNA, 120 bp, Artificial Sequence
  ENSG00000155066_5 (sequence is synthesized)
tggtcttcctgctgctgaccaccctcttgctgctgattggtgtggtctgtgcctttgtcaccaaccagcgcacgcatgaacagatgggccccagcatcgaggccatgcctgagaccctgc

SEQ ID NO: 447592 - DNA, 120 bp, Artificial Sequence
  ENSG00000155066_6 (sequence is synthesized)
tcagcctctggggcctggtctctgatgtcccccaagagctgcaggccgtggcacagcaattctccctgccccaggagcaagtctcagaggagctggatggtgttggtgtgagcattggga

SEQ ID NO: 447593 - DNA, 120 bp, Artificial Sequence
  ENSG00000155066_7 (sequence is synthesized)
gcgcgatccacactcagctcaggagctccgtgtaccccttgctggcggccgtgggcagtttgggccaggtcctgcaggtctccgtgcaccacctgcaaaccttgaatgctacagtggtag

SEQ ID NO: 447594 - DNA, 120 bp, Artificial Sequence
  ENSG00000155066_8 (sequence is synthesized)
agctgcaggccgggcagcaggacctggagccagccatccgggaacaccgggaccgcctccttgagctgctgcaggaggccaggtgccagggagattgtgcaggggccctgagctgggccc

SEQ ID NO: 447595 - DNA, 120 bp, Artificial Sequence
  ENSG00000155066_9 (sequence is synthesized)
gcaccctggagctgggtgctgacttcagccaggtgccctctgtggaccatgtcctgcaccagctaaaaggtgtccccgaggccaacttctccagcatggtccaggaggagaacagcacct

SEQ ID NO: 447596 - DNA, 120 bp, Artificial Sequence
  ENSG00000155066_10 (sequence is synthesized)
tcaacgcccttccagccctggctgccatgcagacatccagcgtggtgcaagagctgaagaaggcagtggcccagcagccggaaggggtgaggacactggctgaagggttcccgggcttgg

SEQ ID NO: 447597 - DNA, 120 bp, Artificial Sequence
  ENSG00000155066_11 (sequence is synthesized)
aggcagcttcccgctgggcccaggcactgcaggaggtggaggagagcagccgcccctacctgcaggaggtgcagagatacgagacctacaggtggatcgtgggctgcgtgctgtgctccg

SEQ ID NO: 447598 - DNA, 120 bp, Artificial Sequence
  ENSG00000155066_12 (sequence is synthesized)
tggtcctattcgtggtgctctgcaacctgctgggcctcaatctgggcatctggggcctgtctgccagggacgaccccagccacccagaagccaagggcgaggctggagcccgcttcctca

SEQ ID NO: 447599 - DNA, 120 bp, Artificial Sequence
  ENSG00000155066_13 (sequence is synthesized)
tggcaggtgtgggcctcagcttcctctttgctgcacccctcatcctcctggtgttcgccaccttcctggtgggtggcaacgtgcagacgctggtgtgccagagctgggagaacggcgagc

SEQ ID NO: 447600 - DNA, 120 bp, Artificial Sequence
  ENSG00000155066_14 (sequence is synthesized)
tctttgagtttgcagacaccccagggaacctgcccccgtccatgaacctgtcgcaacttcttggcctgaggaagaacatcagcatccaccaagcctatcagcagtgcaaggaaggggcag

SEQ ID NO: 447601 - DNA, 120 bp, Artificial Sequence
  ENSG00000155066_15 (sequence is synthesized)
cgctctggacagtcctgcagctcaacgactcctacgacctggaggagcacctggatatcaaccagtataccaacaagctacggcaggagttgcagagcctgaaagtagacacacagagcc

SEQ ID NO: 447602 - DNA, 120 bp, Artificial Sequence
  ENSG00000155066_16 (sequence is synthesized)
tggacctgctgagctcagccgcccgccgggacctggaggccctgcagagcagtgggcttcagcgcatccactaccccgacttcctcgttcagatccagaggcccgtggtgaagaccagca

SEQ ID NO: 447603 - DNA, 120 bp, Artificial Sequence
  ENSG00000155066_17 (sequence is synthesized)
tggagcagctggcccaggagctgcaaggactggcccaggcccaagacaattctgtgctggggcagcggctgcaggaggaggcccaaggactcagaaaccttcaccaggagaaggtcgtcc

SEQ ID NO: 447604 - DNA, 120 bp, Artificial Sequence
  ENSG00000155066_18 (sequence is synthesized)
cccagcagagccttgtggcaaagctcaacctcagcgtcagggccctggagtcctctgccccgaatctccagctggagacctcagatgtcctagccaatgtcacctacctgaaaggagagc

SEQ ID NO: 447605 - DNA, 120 bp, Artificial Sequence
  ENSG00000155066_19 (sequence is synthesized)
cccgggagatgggctacttctcccagtacgtggcctgggtgagagaggaggtgactcagcgcattgccacctgccagcccctctccggagccctggacaacagccgtgtgatcctgtgtg

SEQ ID NO: 447606 - DNA, 120 bp, Artificial Sequence
  ENSG00000155066_20 (sequence is synthesized)
acatgatggctgacccctggaatgccttctggttctgcctggcatggtgcaccttcttcctgatccccagcatcatctttgccgtcaagacctccaaatacttccgtcctatccggaaac

SEQ ID NO: 447607 - DNA, 120 bp, Artificial Sequence
  ENSG00000155066_21 (sequence is synthesized)
gcctcagctccaccagctctgaggagactcagctcttccacatcccccgggttacctccctgaagctgtagggccttgtggggtgaggtgaccctgaggctgcctgtcctcccctttgat

SEQ ID NO: 447608 - DNA, 120 bp, Artificial Sequence
  ENSG00000155066_22 (sequence is synthesized)
ttagcctgggccacaggacttcggtagctcttgccccagagcccaggctggcatccaggcctggactgtccccagttccggcttacctggccccaccttgcctgctcctttccacccctt

SEQ ID NO: 447609 - DNA, 120 bp, Artificial Sequence
  ENSG00000155066_23 (sequence is synthesized)
tctgctcacgacccccatcattcacgctcagaatcacatgggacttctgtgcagctgcagagccagcaagtccctccaggtgtcaccccttacccccatgctggtggcatcctcacagga

SEQ ID NO: 447610 - DNA, 120 bp, Artificial Sequence
  ENSG00000155066_24 (sequence is synthesized)
agagcctgttctccacctgctggagcctggaccctggggtgggacagaggcctcgtccaaccccactccccttcccgtgtgtcttccccctgccaagcctccccctgccaagcctccccc

SEQ ID NO: 447611 - DNA, 120 bp, Artificial Sequence
  ENSG00000155066_25 (sequence is synthesized)
tgcccctctctgagcccctcgccccccacaccgtcctcatctggcctcccccctggcccccacttccctcttatgcccttcctggccctttgcttcctcccttagtcccctcttcaccat

SEQ ID NO: 447612 - DNA, 120 bp, Artificial Sequence
  ENSG00000155066_26 (sequence is synthesized)
atctccactgctaccttgctggccccagagaccaccctgcccaaccaaaccactcaggtaacgccactaatcaggcaggggccaccatggcctaggtctgggctggctgcaggccctgcc

SEQ ID NO: 447613 - DNA, 120 bp, Artificial Sequence
  ENSG00000155066_27 (sequence is synthesized)
tcatggcctctgagccctccactgccccagggccttgggccctctgcagatctcatccaggatttattggtgtccagtggggtgagggaggcctgtctgaaggccgagcctccctgcctg

SEQ ID NO: 447614 - DNA, 120 bp, Artificial Sequence
  ENSG00000155066_28 (sequence is synthesized)
cacccaagttagaaatgggggtaccagcacttagcttctctctgagtgctggctcccaaggaagggacctgggacctgggccacagtgggggcttgcccttacctcttcagaaggaagca

SEQ ID NO: 447615 - DNA, 120 bp, Artificial Sequence
  ENSG00000155066_29 (sequence is synthesized)
tcttccacagcccccacccaactttcttaggagtgatctggtggccagaacaggattttgcacggccccttttatcctgcgcatgtggcctagggtcatccccagcccatccctgtgtca

SEQ ID NO: 447616 - DNA, 120 bp, Artificial Sequence
  ENSG00000155066_30 (sequence is synthesized)
gccctgagtgctggacactgcgttccagaaatgaggaagaggagagagaagagatggacagacctcagatccattaaagtgttctcacttccctgagacttggttctgggtccttaaaac

SEQ ID NO: 447617 - DNA, 120 bp, Artificial Sequence
  ENSG00000155066_31 (sequence is synthesized)
caggtttcctaggctgggaccctgtacatagttggtgtttaatgagtgtttatggagaggagagttctaaggtcacctctggctgcaggcatccagggattattccagcaatctgcaggt

SEQ ID NO: 447618 - DNA, 120 bp, Artificial Sequence
  ENSG00000155066_32 (sequence is synthesized)
agggagtgggtcccagcctgggagcctgctgtcaggagcaggcagacctggactcacagcctggctgtgatgcttgttcgctcagcttctccatttatgagatggggagaatagtcacag

SEQ ID NO: 447619 - DNA, 120 bp, Artificial Sequence
  ENSG00000155066_33 (sequence is synthesized)
cctcctcaaagggttgtgaaaatcaaatgtgataatttgtggaaagcccttagcagtggcctggcacaaaacaaatgctcagtggatggaagctgcctattattattgtcgttgttgttg

SEQ ID NO: 447620 - DNA, 120 bp, Artificial Sequence
  ENSG00000155066_34 (sequence is synthesized)
tttgccatgactgctctgggccgggggtagagctagcatccgggcatgtacgagggaagagggaggcaggcctctattcaaaggcagaaattcctttaagattgtggtctgctgggtttc

SEQ ID NO: 447621 - DNA, 63 bp, Artificial Sequence
  ENSG00000155066_35 (sequence is synthesized)
aaggcagaaattcctttaagattgtggtctgctgggtttcagggagtgtctgtgttgtttgtt

SEQ ID NO: 447622 - DNA, 120 bp, Artificial Sequence
  ENSG00000155066_36 (sequence is synthesized)
gaagtgtctatgtttaactgcatcttataaaccagcaacaagttttctactgggaattagaatggtgcatacacaatgtattattatcactgtcagatgagcatgcttgaatgtagcatg

SEQ ID NO: 447623 - DNA, 120 bp, Artificial Sequence
  ENSG00000155066_37 (sequence is synthesized)
actgcctctttttgcttttcctagaggttttttttttgcttgttactcatctgttgacctacctgggggaagtagcacccttgcatttcaaaaataaaattgatggcattacaaatggaa

SEQ ID NO: 447624 - DNA, 120 bp, Artificial Sequence
  ENSG00000155066_38 (sequence is synthesized)
ctccgtgaaggtgaatgaggcagaagccagggctgggcagtgggggtcgggtcacccctcatgccctgctgcctgcccaggtggtgcggtacgaggcgggctacgtggtatgcgctgtga

SEQ ID NO: 447625 - DNA, 120 bp, Artificial Sequence
  ENSG00000155066_39 (sequence is synthesized)
tgatttctccctcacctgccaagtgagggcctctgtttcccccttttgggcaggaacccagttgaacctaatatttggggtcccacccaccacacagcaccctgggcaggggactcccga

SEQ ID NO: 447626 - DNA, 120 bp, Artificial Sequence
  ENSG00000155066_40 (sequence is synthesized)
cgaccatccttggtgtgcacacaatctgtgctcagatgggagagctgggcccttcaaggcggcaggcgtctgggggtggcaagggagcagtgctcagtctgagcccagagggcaggcggc

SEQ ID NO: 447627 - DNA, 120 bp, Artificial Sequence
  ENSG00000155066_41 (sequence is synthesized)
tcccctgggtggagatgggccaagggggaggatgcggtgttgtgagtcagcgcccaggacccaggacctggagctggggaaatgatgagtcagccatgctgggtggctggagtggaaggt

SEQ ID NO: 447628 - DNA, 120 bp, Artificial Sequence
  ENSG00000155066_42 (sequence is synthesized)
tccagaaggaaggaagtcagagctgaggctagaagggtggactggagctggaccttcaggagctagacctggcagttgtgtggagggcggctgagagttcactgcaatggtgggagaggg

SEQ ID NO: 447629 - DNA, 120 bp, Artificial Sequence
  ENSG00000155066_43 (sequence is synthesized)
atgggggtaggaagaagaggtccgggaggagcaacgttttgggaagttgagtcagactgggccaggggatgggagaggagggcagcgaccaagagaaaagagggaaactgggagcactga

SEQ ID NO: 447630 - DNA, 120 bp, Artificial Sequence
  ENSG00000155066_44 (sequence is synthesized)
ggggggccctccctctaggcctggtgactttggggtctcccaagaggggacactgggcagagatggggaggcccagcactacttggttcctgcaggagaacagcaccttcaacgcccttc

SEQ ID NO: 447631 - DNA, 120 bp, Artificial Sequence
  ENSG00000155066_45 (sequence is synthesized)
cagccctggctgccatgcagacatccagcgtggtgcaaggttaggccacacgggtcagaggcagctgccaggcatggcttcccaccccacccctaccagggaggcttgttgagagaggac

SEQ ID NO: 447632 - DNA, 120 bp, Artificial Sequence
  ENSG00000155066_46 (sequence is synthesized)
tggggtggcgggggactgtcttccctctgtggttcccagatgttcttcctgcccgcttgtcttgttcctgggccccagggtgccctccgcatcccacaagtccctgttactttgggcaga

SEQ ID NO: 447633 - DNA, 120 bp, Artificial Sequence
  ENSG00000155066_47 (sequence is synthesized)
ccccgggttacctccctgaagctgtagggccttgtgggtgagttttccccaactcgcttaattgctccctgccagggattaagggagtggggtggggaggggctggggtctggggtttcc

SEQ ID NO: 447634 - DNA, 120 bp, Artificial Sequence
  ENSG00000155066_48 (sequence is synthesized)
tattgggtgtggcccatccagcagtggggctgacagccctgttctcccctccctccccttcacccgtttccttcttaatccctgacagggtgaggtgaccctgaggctgcctgtcctccc

SEQ ID NO: 447635 - DNA, 120 bp, Artificial Sequence
  ENSG00000155066_49 (sequence is synthesized)
ttttacacttgaggacattggggttcagaggcccctgcccccctcatccaccctcagggatccccttcaggcctctccatgaactttgtcataacccaccttcccccatttcaggtgccc

SEQ ID NO: 447636 - DNA, 120 bp, Artificial Sequence
  ENSG00000155085_0 (sequence is synthesized)
gaggtcgggtagaggctcccgggacctgcgtgctgccgagagaggaagcgaagggcaccatctttgtattttgtgtcatgacttctcaagagaagacagaagagtatccttttgcagata

SEQ ID NO: 447637 - DNA, 120 bp, Artificial Sequence
  ENSG00000155085_1 (sequence is synthesized)
tatttgatgaagatgaaactgaaaggaattttttgttgtccaaacctgtttgctttgttgtatttgggaaaccaggtgttgggaaaacaacattagcccgttacataacacaggcatgga

SEQ ID NO: 447638 - DNA, 120 bp, Artificial Sequence
  ENSG00000155085_2 (sequence is synthesized)
aatgtattcgtgttgaagctttgccaattttagaagaacagattgctgctgaaaccgaatcaggagttatgttgcaatcaatgttgatcagcggtcaaagcattccagatgaacttgtca

SEQ ID NO: 447639 - DNA, 120 bp, Artificial Sequence
  ENSG00000155085_3 (sequence is synthesized)
taaagctaatgttggagaagctcaactccccagaagtctgtcactttggttatattatcactgaaataccatcactttcacaggatgccatgactaccttacagcaaatagaattaatta

SEQ ID NO: 447640 - DNA, 120 bp, Artificial Sequence
  ENSG00000155085_4 (sequence is synthesized)
aaaacttaaacctgaaacctgatgttataatcaatataaagtgtcctgactatgatttgtgccagagaatttctgggcaaagacagcacaataatacgggatacatatacagtagagacc

SEQ ID NO: 447641 - DNA, 120 bp, Artificial Sequence
  ENSG00000155085_5 (sequence is synthesized)
agtgggatcctgaagtcattgagaatcataggaaaaagaagaaagaagcccaaaaggacggaaaaggagaagaggaagaagaggaagaagagcaagaagaagaagaggcatttattgccg

SEQ ID NO: 447642 - DNA, 120 bp, Artificial Sequence
  ENSG00000155085_6 (sequence is synthesized)
aaatgcagatggtggctgaaattcttcatcatctagttcagaggcctgaagattatttggaaaatgttgaaaacattgttaagctttataaggaaacaattctccaaactttagaagaag

SEQ ID NO: 447643 - DNA, 120 bp, Artificial Sequence
  ENSG00000155085_7 (sequence is synthesized)
taatggctgaacacaatccccagtatctcattgagctaaatggaaataaaccagcagaggagctctttatgattgttatggatcgacttaaatatctgaacctaaaaagagcagctattc

SEQ ID NO: 447644 - DNA, 120 bp, Artificial Sequence
  ENSG00000155085_8 (sequence is synthesized)
taaccaaacttcagggtgcagaggaagaaattaatgacacaatggaaaatgatgagctatttcgtactcttgcatcttataaacttattgcaccaagatacagatggcaaagaagtaaat

SEQ ID NO: 447645 - DNA, 120 bp, Artificial Sequence
  ENSG00000155085_9 (sequence is synthesized)
ggggacgtacatgtcctgtgaatttaaaagatggtaacatttattcaggattaccagattattctgtgagttttctaggtaaaatctactgtctttcatcagaagaagcattaaaaccat

SEQ ID NO: 447646 - DNA, 120 bp, Artificial Sequence
  ENSG00000155085_10 (sequence is synthesized)
ttttgttgaacccacgtccctatctgcttccacctatgccaggaccaccatgtaaagtattcatacttggacctcaatattcagggaaaacaacactttgcaatatgcttgcagaaaatt

SEQ ID NO: 447647 - DNA, 120 bp, Artificial Sequence
  ENSG00000155085_11 (sequence is synthesized)
acaaaggaaaggtagtcgactatgcccaacttgttcagccacgttttgataaagcccgtgaaacattagtagaaaataccatagctgaggccactgcagcagcaattaaagttgtgaaag

SEQ ID NO: 447648 - DNA, 120 bp, Artificial Sequence
  ENSG00000155085_12 (sequence is synthesized)
aaaagcttctcagggaactgcaagctagaaaacaagctgaaacagctttaagagaatttcaaaggcaatatgaaaaaatggagtttggagtattcccaatggaggcaacacactcatcaa

SEQ ID NO: 447649 - DNA, 120 bp, Artificial Sequence
  ENSG00000155085_13 (sequence is synthesized)
ttgatgaagaagggtacattcaaggctcccaaagggacagaggcagctctttagtggacaccgaagaagccaaaacaaagtcagaaaatgtcctccatgatcaagctgctaaagttgata

SEQ ID NO: 447650 - DNA, 120 bp, Artificial Sequence
  ENSG00000155085_14 (sequence is synthesized)
aagatgatggaaaagaaactggtgaaacattcacatttaaaaggcattctcaagatgctagtcaagatgtaaagttgtattcagatacagccccaacagaagacttgatagaagaggtaa

SEQ ID NO: 447651 - DNA, 120 bp, Artificial Sequence
  ENSG00000155085_15 (sequence is synthesized)
ctgcagatcatccagaggttgtgaccatgattgaagagactataaaaatgtcacaggatataaactttgaacagccatatgaaaaacatgctgaaatcttacaggaagtccttggagagg

SEQ ID NO: 447652 - DNA, 120 bp, Artificial Sequence
  ENSG00000155085_16 (sequence is synthesized)
taatggaagaaaacaaggataggtttcctggtgccccaaaatatggaggctggattgtggacaactgccctattgtaaaagaattgtggatggccttaatcaagaaaggaattatacctg

SEQ ID NO: 447653 - DNA, 120 bp, Artificial Sequence
  ENSG00000155085_17 (sequence is synthesized)
atttggtcatctatttatcagatacagaaaacaatggaaaatgtttatttaatagaatatatttacagaagaaatctgaaattgactctaagattttagaaagattattagaagaactac

SEQ ID NO: 447654 - DNA, 120 bp, Artificial Sequence
  ENSG00000155085_18 (sequence is synthesized)
aaaagaaaaaaaaagaagaagaagaagcaagaaaagccacagaagaggaattgagactcgaagaagaaaatcgaaggctactggaacttatgaaagtgaaggcaaaagaagctgaagaga

SEQ ID NO: 447655 - DNA, 120 bp, Artificial Sequence
  ENSG00000155085_19 (sequence is synthesized)
ctgataatgaggatgaagaggagattgaaggtgatgagttggaagttcacgaagagcctgaggcatctcacgatacccgagggtcatggttacctgaggagtttgaagcatctgaggtcc

SEQ ID NO: 447656 - DNA, 120 bp, Artificial Sequence
  ENSG00000155085_20 (sequence is synthesized)
ctgaaactgagcctgaagcagtatctgagcctatcgaggaaactacagtggaaacagaaatcccaaaaggatccaaagagggcctggaaattgaaaaattatctgaaacagttgtactac

SEQ ID NO: 447657 - DNA, 120 bp, Artificial Sequence
  ENSG00000155085_21 (sequence is synthesized)
ctgagtttccagaagactcttatcctgatgttcccgaaatggagccatttaaagagaagattggttctttcatcatcctctggaaacagctagaagcaacaattagtgaggcttacatta

SEQ ID NO: 447658 - DNA, 120 bp, Artificial Sequence
  ENSG00000155085_22 (sequence is synthesized)
aaattttaaacttggagattgctgacagaactccacaggaattacttcaaaaagtagttgagactatggaaaaaccatttcaatatactgcatgggagttaactggggaagattatgagg

SEQ ID NO: 447659 - DNA, 120 bp, Artificial Sequence
  ENSG00000155085_23 (sequence is synthesized)
aagaaacagaagactaccagactgaagcagaggttgatgaggagctagaggaagaggaagaggaagagggtgaagataaaatgaaggagagaaagaggcatttgggagacacaaaacact

SEQ ID NO: 447660 - DNA, 120 bp, Artificial Sequence
  ENSG00000155085_24 (sequence is synthesized)
tttgtccggtggtcctcaaagaaaacttcatcctgcaaccaggaaacacagaagaagcagccaagtatcgagaaaagatctactacttttcaagtgctgaggctaaagaaaagtttttgg

SEQ ID NO: 447661 - DNA, 120 bp, Artificial Sequence
  ENSG00000155085_25 (sequence is synthesized)
agcatcctgaggattatgtggctcatgaagaaccattgaaggctcctccattaagaatatgccttgtcggcccccagggctctggcaaaactatgtgtggaagacagttggcagaaaaat

SEQ ID NO: 447662 - DNA, 120 bp, Artificial Sequence
  ENSG00000155085_26 (sequence is synthesized)
gaagattctgagaacgagcaagctgccaaacaagaacttgaagagcttgcaattcaggccaatgtcaaagttgaggaagaaaatacaaaaaagcagcttccagaagtacaacttacagaa

SEQ ID NO: 447663 - DNA, 120 bp, Artificial Sequence
  ENSG00000155085_27 (sequence is synthesized)
gaagaagaagtaatcaaatcaagtctaatggaaaatgagcccttgcctcctgaaattcttgaagtaattctttctgagtggtggcttaaggaaccaatacgttccacaggttttatatta

SEQ ID NO: 447664 - DNA, 120 bp, Artificial Sequence
  ENSG00000155085_28 (sequence is synthesized)
gatggtttcccacgatatccagaagaggcccagtttttgggagatcgtggatttttcccagatgcagctgtttttatacaagttgatgatcaagatatttttgatcgcctccttcctgcc

SEQ ID NO: 447665 - DNA, 120 bp, Artificial Sequence
  ENSG00000155085_29 (sequence is synthesized)
caaattgaaaagtggaaactaaaacaaaagaagaaattagaaaggaagaaactgatcaaagacatgaaggcaaaaatcagggttgatacgattgctaaaagaagggctgaacttatatta

SEQ ID NO: 447666 - DNA, 120 bp, Artificial Sequence
  ENSG00000155085_30 (sequence is synthesized)
gagagagataaaaaaaggagggagaatgttgttagagatgatgaagagattagtgaggaagaacttgaagaagacaatgatgatattgaaaacatccttgaagatgagtttccaaaagat

SEQ ID NO: 447667 - DNA, 120 bp, Artificial Sequence
  ENSG00000155085_31 (sequence is synthesized)
gaggaagagatgagtggcgaggaagatgaagaacaggaaactgatgcaattgagcgcctgagaggtgaactaggagaaaaatttgaagcagatacacataatttacaaataatacaggat

SEQ ID NO: 447668 - DNA, 120 bp, Artificial Sequence
  ENSG00000155085_32 (sequence is synthesized)
gaacttgagaggtatttgataccaataatttccattaatggagctcggagaaatcacattgtacaatatacattgaatatgaaactgaaaccactggtggaaaatcgtgcaagcattttt

SEQ ID NO: 447669 - DNA, 120 bp, Artificial Sequence
  ENSG00000155085_33 (sequence is synthesized)
gagaaatgtcatccaataccagcaccccttgcccagaaaatgctcacctttacctacaagtatataagctcattcggctattgggaccctgtaaagctaagtgaaggagagacaatcaag

SEQ ID NO: 447670 - DNA, 120 bp, Artificial Sequence
  ENSG00000155085_34 (sequence is synthesized)
ccagttgaaaatgcagagaatccaatttatcctgtaatccatcgtcagtatatttattttttatctagtaaagaaacaaaagaaaaatttatgaagaacccaatcaaatatatccgccaa

SEQ ID NO: 447671 - DNA, 120 bp, Artificial Sequence
  ENSG00000155085_35 (sequence is synthesized)
cccaaacctaagcctactgtgcccattaggattataattgtggggcctccaaaatctgggaaaactacagttgccaaaaaaattacaagtgaatatgggttaaagcatttatcaatagga

SEQ ID NO: 447672 - DNA, 120 bp, Artificial Sequence
  ENSG00000155085_36 (sequence is synthesized)
ggagctttgcgttatgtactaaacaatcacccggaaacagagctggcacttatgttaaattggcatcttcataaaggaatgacagcacctgatgaactggctattcaagccttagaactt

SEQ ID NO: 447673 - DNA, 120 bp, Artificial Sequence
  ENSG00000155085_37 (sequence is synthesized)
tctctgatggaaagtgtgtgcaatactgcaggtgttgtcatcgatggatatcctgtaactaaacatcaaatgaatctcttggaagctaggtcaatcattcccatggtcatctttgaattg

SEQ ID NO: 447674 - DNA, 120 bp, Artificial Sequence
  ENSG00000155085_38 (sequence is synthesized)
agtgtgccttccaaggagattttcaaaagattgctcctagaaaaagaaaatgaacaaagattgccttatccattgcacaatagtgcacaaattgtagctgtcaataatgtaaagtatcgc

SEQ ID NO: 447675 - DNA, 120 bp, Artificial Sequence
  ENSG00000155085_39 (sequence is synthesized)
aaaaatattggtgagattaggcaatattatcaagaacagcatcagaactggtatgtgattgatggatttcacagcaaatggtgggtatggaatgaagtcattaagaatgttcaaatggtg

SEQ ID NO: 447676 - DNA, 120 bp, Artificial Sequence
  ENSG00000155085_40 (sequence is synthesized)
aataaatacatgcagacatacctggaaagaataaaagcaggaaaagctgcctgcattgacaagttatgtatcacacctcaagagctgctttctcgcctgggagaatttgaacagttctgc

SEQ ID NO: 447677 - DNA, 120 bp, Artificial Sequence
  ENSG00000155085_41 (sequence is synthesized)
cctgtcagcctggcagaatcccaggaattatttgattgctctgcaactgactccttggaatttgcagcagagttcagggggcactactataaaatgagttctcaggaaaaactgaataaa

SEQ ID NO: 447678 - DNA, 120 bp, Artificial Sequence
  ENSG00000155085_42 (sequence is synthesized)
ttcttggagaacccagaattgtacgtgcctcccttagcacctcatccactcccatctgctgacatgatccccaaaagactgacactgtcagagctgaagagtcgattccctaagtgtgcg

SEQ ID NO: 447679 - DNA, 120 bp, Artificial Sequence
  ENSG00000155085_43 (sequence is synthesized)
gagctccagggctactgtccagtgacctataaggatggaaaccaaagatatgaagctctagtacctggtagcattaactatgctttagaatatcataatcgtatatatatttgtgagaac

SEQ ID NO: 447680 - DNA, 120 bp, Artificial Sequence
  ENSG00000155085_44 (sequence is synthesized)
aaagaaaaactccagaaatttttgaggtcgccactgaaatactgggaacagaagcttccacacaagcttcccccattaagggaaccgatacttcttactagtcttcctttgcctggatat

SEQ ID NO: 447681 - DNA, 120 bp, Artificial Sequence
  ENSG00000155085_45 (sequence is synthesized)
ctggaacagggtattgcaacttctctaattaaagcaatgaatgcagcgggatgcttaaagcccaagttcccctttttaagtataaggagatctgcactgctatatatagcacttcatctc

SEQ ID NO: 447682 - DNA, 120 bp, Artificial Sequence
  ENSG00000155085_46 (sequence is synthesized)
aaagcatttaatcccaaaggttccgaatacacaagaaaaaagtataagaagaagatggagcagtttatggagagttgtgaactcataacatacttgggtgccaagatgaccagaaaatac

SEQ ID NO: 447683 - DNA, 120 bp, Artificial Sequence
  ENSG00000155085_47 (sequence is synthesized)
aaggaacctcagttcagagccattgactttgatcataagttaaagacctttctctctctcagaaatatagacccaattaatgggtagtttacttaggtgatagcagcctgaatctcaaga

SEQ ID NO: 447684 - DNA, 120 bp, Artificial Sequence
  ENSG00000155085_48 (sequence is synthesized)
gttatctgaaagtgatagagggaaactgagagaagtagattgaaaatctgggcctcttggaagtacttttgcctcctgagcaaggtaccatggctgccagacttcaggtgaactcaaagg

SEQ ID NO: 447685 - DNA, 120 bp, Artificial Sequence
  ENSG00000155085_49 (sequence is synthesized)
tctgccagccaggaaggagcactcttatggaaacaagttttaatacaattttaaaatgtattgctctttgcctgaactttgatgctttaacaaaataaacattctatttataattccata

SEQ ID NO: 447686 - DNA, 120 bp, Artificial Sequence
  ENSG00000155085_50 (sequence is synthesized)
tagaaaagttaagtgacttatttaataaatgtattattttcctttttaacattttcagtagaaaagtcagtctctgttaaaattactcattaaatgttagaaagctttaagacatttaac

SEQ ID NO: 447687 - DNA, 120 bp, Artificial Sequence
  ENSG00000155085_51 (sequence is synthesized)
attgttataaatgaaaccaaaatatgggttatacattttacatacaaaactgtttgtgaactttgtgaacataagatactatcattttcccaataaaataaatggattttgcaacaactt

SEQ ID NO: 447688 - DNA, 120 bp, Artificial Sequence
  ENSG00000155085_52 (sequence is synthesized)
attctcagtgctgctttattttcctcatgaaaataaagaaacttagaatgtgcacttagagtaatatatgagaaactgatttttaattaattaaaataatataaggactggctttttgtg

SEQ ID NO: 447689 - DNA, 120 bp, Artificial Sequence
  ENSG00000155085_53 (sequence is synthesized)
gatagttttcaagttgctacagattaaatattattcaagaagcattttaaaaaattatctgcatcaaaatacttttttagtttaatgttctccaaactttgaataccgtttctagggtga

SEQ ID NO: 447690 - DNA, 120 bp, Artificial Sequence
  ENSG00000155085_54 (sequence is synthesized)
gcttaagacactcttgtaacagcttttcaaggctgaccctcttgtaacctgatttccatctgtataaaaatgtccagccaaacaaggagaagagaaaaagaggaatatcagaaaatacaa

SEQ ID NO: 447691 - DNA, 120 bp, Artificial Sequence
  ENSG00000155085_55 (sequence is synthesized)
cttgctacaagtgcaaccacatgtcaccctggtgtgaatatgctggacttccgtacagaggactgctgatattgtacagtgcaactgcaactgcaactgcaggcacaaagcattgcagaa

SEQ ID NO: 447692 - DNA, 120 bp, Artificial Sequence
  ENSG00000155085_56 (sequence is synthesized)
gcggggccaaagtaattgttgctttgtcaaaacaaaatattcacaaccaaaagtagataagaaaaaaccattggactgagaaaattatggcaccatgtaagaataagaaccctcctctta

SEQ ID NO: 447693 - DNA, 120 bp, Artificial Sequence
  ENSG00000155085_57 (sequence is synthesized)
attatttgcctcgattttcattcatttattcattcagtccatcagcaaacattaattgagctttgtgtctgacactgtttcaaatactggcaaatcagccatgagcaaaacttacagaaa

SEQ ID NO: 447694 - DNA, 120 bp, Artificial Sequence
  ENSG00000155085_58 (sequence is synthesized)
tcgtagcctcattataatgctcatttctctcatcaaacatgttctgaaagtttgctctgtttaaggtgtcatgctaatgtttaggatcaaaaagatgtcctaacctggaattaagtacag

SEQ ID NO: 447695 - DNA, 120 bp, Artificial Sequence
  ENSG00000155085_59 (sequence is synthesized)
ttaactactttaagcccttgggagtccctagtggtccccttctgaatcacttcaaatgtttcagcagtgaaggagtccaggctttgcagttaaacacacctacgcagtatcccttctcca

SEQ ID NO: 447696 - DNA, 120 bp, Artificial Sequence
  ENSG00000155085_60 (sequence is synthesized)
gttctcactgactttgttcactgctctccagtgcctggtggagtgctgacacatgtgacattcaacttcagttgtttcgctgaggttgtataacattgagtaagtcacttagcctctgta

SEQ ID NO: 447697 - DNA, 120 bp, Artificial Sequence
  ENSG00000155085_61 (sequence is synthesized)
aacctagggctttttattgtaaaatgggaaaaattaatacatttagtttccctaattaataataatttaatttccctttgctactcttcagttaaatcttcttttcttaagaattaattt

SEQ ID NO: 447698 - DNA, 120 bp, Artificial Sequence
  ENSG00000155085_62 (sequence is synthesized)
tcaggataaactttaaatgttctttataattttttcatttgttaacattagaatggtgtgatttcttctgatttttcattcggaaattcaatattctatgtagaggttaaataggatttt

SEQ ID NO: 447699 - DNA, 120 bp, Artificial Sequence
  ENSG00000155085_63 (sequence is synthesized)
gtaagtcagctctcctgagacttcatgtttgtaaaactgtctgtgtatcccacaaaactgatacaaacaaactcgcagcacaactcctgagatgtttgatgaataaaaaattaaaactgt

SEQ ID NO: 447700 - DNA, 120 bp, Artificial Sequence
  ENSG00000155085_64 (sequence is synthesized)
ataaatgccaaattaggtacaaaagtgactatttcgaattggaaaagaaatgacaaagaactacagccccgcctctcgaggccccgccccaccaagcagcaggtgcgtggcggccagagg

SEQ ID NO: 447701 - DNA, 120 bp, Artificial Sequence
  ENSG00000155085_65 (sequence is synthesized)
tctccccggcaaccgcccgacagccccgcggagtccctggaggcagttgcttccctgaggagggtccggctgcggccagtattttgtgtcatgacttctcaagagaagacagaagagtat

SEQ ID NO: 447702 - DNA, 120 bp, Artificial Sequence
  ENSG00000155085_66 (sequence is synthesized)
gtgatcacatttcccaatttgtccatgagagcccaggtttatgcctatattcttgaagtctttatagtaccttttattcttaaagtgttccagtttgtatactaaataatattgttactg

SEQ ID NO: 447703 - DNA, 120 bp, Artificial Sequence
  ENSG00000155085_67 (sequence is synthesized)
tgagctaaatggaaataaaccagcagaggagctctttatggatgagctatttcgtactcttgcatcttataaacttattgcaccaagatacagatggcaaagaagtaaatggggacgtac

SEQ ID NO: 447704 - DNA, 120 bp, Artificial Sequence
  ENSG00000155085_68 (sequence is synthesized)
agctctttatggtgagtgcagtgttaagcaggaatacttcacagcatggaaaatttaaatctattgacagtattgtacttcttttaataaacagaagcatatttatatttgaacaccatt

SEQ ID NO: 447705 - DNA, 120 bp, Artificial Sequence
  ENSG00000155085_69 (sequence is synthesized)
atctatctatctatctatctatgtctatctgtcatgtatctatactcgattataatttgtaggattttatttgtactcagtttttaaaatttcatgttttaattgaataattgttccact

SEQ ID NO: 447706 - DNA, 120 bp, Artificial Sequence
  ENSG00000155085_70 (sequence is synthesized)
gttccactgggcttggggtagggtaggcattctttttgttgtttattgctgcttccagaccagagtccctccctgcttcccaaaagctcccacatgtgaatatcgtgtcattcagactct

SEQ ID NO: 447707 - DNA, 120 bp, Artificial Sequence
  ENSG00000155085_71 (sequence is synthesized)
gccacctattagctttcttggttctactcatcttctgtcccctgggtttcacttctcctggctcactctcactctccccatataatcactcctgtcctaattcttggtgatttcagtatt

SEQ ID NO: 447708 - DNA, 120 bp, Artificial Sequence
  ENSG00000155085_72 (sequence is synthesized)
acaaagatgatcctcccaacaccttgacacctccctcagtaatcttgttctccactctcagtaaatgaaattatttttagcttagacaagagtgatagcagtaaaagtggtatgaaacaa

SEQ ID NO: 447709 - DNA, 120 bp, Artificial Sequence
  ENSG00000155085_73 (sequence is synthesized)
gcatatttgggatataatttgaagacaaagctgaaagatttgatgagggattggaatgtggaggaattctagaaggggcaatgtggcttgaggattgcctatgcaagaaggaatggcaca

SEQ ID NO: 447710 - DNA, 120 bp, Artificial Sequence
  ENSG00000155085_74 (sequence is synthesized)
agatcatggctaaagacagagcaattcaggccacagaaaggtgttagaagttgttcaaagtgctgttgcattcttttaagcgccggagtatcattttctatttgcttttaactttttcat

SEQ ID NO: 447711 - DNA, 120 bp, Artificial Sequence
  ENSG00000155085_75 (sequence is synthesized)
tgtgaaacatgacaaacatacagaaaagtgaagcccactgagttaccgcaaaatgaacccccatgtaaccaccaaccaggtcaaatctggaatgttgccagcacccagacgccctctcat

SEQ ID NO: 447712 - DNA, 120 bp, Artificial Sequence
  ENSG00000155085_76 (sequence is synthesized)
gtttcttctcaataccagtctcctcactctccacacaaaggtaaccactgcccagaattttatggcattcacttccatacttctcctatggttttgccgtggaagcatacatccaaatac

SEQ ID NO: 447713 - DNA, 120 bp, Artificial Sequence
  ENSG00000155085_77 (sequence is synthesized)
cataggctagttttgcatggtttttttgaattttatagacctaaacaatttatcttctttgtgcctggcttctttcacttaacattataattatgatatttgtccagactattgaatgta

SEQ ID NO: 447714 - DNA, 120 bp, Artificial Sequence
  ENSG00000155085_78 (sequence is synthesized)
gctgtagtttattcatttttattgttttattgtattctgttgattgacttataccataatgtatttatccacatttgagcactaataaaacttggattgattccagattggagtaaataa

SEQ ID NO: 447715 - DNA, 120 bp, Artificial Sequence
  ENSG00000155085_79 (sequence is synthesized)
ttgctcccacaggatttttttgggactgattaccaatcaccatcaatttacttaagggtgaaatccccaatctgatattacaatataaagaaaatatctaggccgggcgcggtggctcac

SEQ ID NO: 447716 - DNA, 120 bp, Artificial Sequence
  ENSG00000155085_80 (sequence is synthesized)
tcacagcaaatggtgggtatggaatgaagtcattaagaatgttcaaatggtgaataaatacatgcagacatacctggaaagaataaaagcagagctgctttctcgcctgggagaatttga

SEQ ID NO: 447717 - DNA, 120 bp, Artificial Sequence
  ENSG00000155087_0 (sequence is synthesized)
agaacacaagctttaaagtaagtgaatcatgtgtgcctcatttatttttaaaagcaacttctgagaagggcttagaacaaattttttcccggagtgccatttcccaaaggtactcacaga

SEQ ID NO: 447718 - DNA, 120 bp, Artificial Sequence
  ENSG00000155087_1 (sequence is synthesized)
acaatcaggtgtgaccataatggctgcactgagttgtctcttggacagtgtcagaagggacataaagaaggtggacagagaactaaggcaactgagatgcatcgacgaatttagcacacg

SEQ ID NO: 447719 - DNA, 120 bp, Artificial Sequence
  ENSG00000155087_2 (sequence is synthesized)
gtgcctgtgcgacttgtatatgcacccctattgctgctgtgacttgcacccatatccgtactgcttgtgctattccaagcgatcacgctcttgcggcctgtgtgatctctacccatgttg

SEQ ID NO: 447720 - DNA, 120 bp, Artificial Sequence
  ENSG00000155087_3 (sequence is synthesized)
cctgtgtgattataagctttactgtctgcgaccatctctcagaagtttggagaggaaagccatcagagccatagaagatgagaagcgagagcttgccaaactgagaagaacaacaaatag

SEQ ID NO: 447721 - DNA, 120 bp, Artificial Sequence
  ENSG00000155087_4 (sequence is synthesized)
cgatcaagtcaaagttcgagtgaaggatggaaaggtatgtgtgtcggctgagcgggagaacaggtacgactgccttggatcgaaaaagtacagctacatgaacatctgcaaagagttcag

SEQ ID NO: 447722 - DNA, 120 bp, Artificial Sequence
  ENSG00000155087_5 (sequence is synthesized)
cttgccgccctgtgtggatgagaaggatgtaacatactcctatgggctcggcagctgtgtcaagatcgagtctccttgctacccttgcacttctccttgcagcccctgcagcccctgcag

SEQ ID NO: 447723 - DNA, 120 bp, Artificial Sequence
  ENSG00000155087_6 (sequence is synthesized)
cccctgcaacccctgcagcccctgcaacccgtgcagcccatatgatccttgcaacccgtgttatccctgtggaagccgattttcctgtaggaagatgattttgtaaagtgcgcataggaa

SEQ ID NO: 447724 - DNA, 120 bp, Artificial Sequence
  ENSG00000155087_7 (sequence is synthesized)
cccattacttaatagaagtcagttactccagccaggcagctctcccaatgtttctcctctccttcccatggcccctgttgttgaagtacgtaggaaactgaatacataactgcaatctgc

SEQ ID NO: 447725 - DNA, 120 bp, Artificial Sequence
  ENSG00000155087_8 (sequence is synthesized)
acaacaaatagaattctggcttcctcctgctgtagcagtaacattttaggatcggtgaatgtatgcggttttgaacccgatcaagtcaaagttcgagtgaaggatggaaagcccctgcag

SEQ ID NO: 447726 - DNA, 120 bp, Artificial Sequence
  ENSG00000155090_0 (sequence is synthesized)
gcagacggcgctgagcgcggcggcggcgggagcggcgtcgagtgtctccgtgcgcccgtctgtggccaagcagccagcagcctagcagccagtcagcttgccgccggcggccaagcagcc

SEQ ID NO: 447727 - DNA, 120 bp, Artificial Sequence
  ENSG00000155090_1 (sequence is synthesized)
aaccatgctcaacttcggtgcctctctccagcagactgcggaggaaagaatggaaatgatttctgaaaggccaaaagagagtatgtattcctggaacaaaactgcagagaaaagtgattt

SEQ ID NO: 447728 - DNA, 120 bp, Artificial Sequence
  ENSG00000155090_2 (sequence is synthesized)
tgaagctgtagaagcacttatgtcaatgagctgcagttggaagtctgattttaagaaatacgttgaaaacagacctgttacaccagtatctgatttgtcagaggaagagaatctgcttcc

SEQ ID NO: 447729 - DNA, 120 bp, Artificial Sequence
  ENSG00000155090_3 (sequence is synthesized)
gggaacacctgattttcatacaatcccagcattttgtttgactccaccttacagtccttctgactttgaaccctctcaagtgtcaaatctgatggcaccagcgccatctactgtacactt

SEQ ID NO: 447730 - DNA, 120 bp, Artificial Sequence
  ENSG00000155090_4 (sequence is synthesized)
caagtcactctcagatactgccaaacctcacattgccgcacctttcaaagaggaagaaaagagcccagtatctgcccccaaactccccaaagctcaggcaacaagtgtgattcgtcatac

SEQ ID NO: 447731 - DNA, 120 bp, Artificial Sequence
  ENSG00000155090_5 (sequence is synthesized)
agctgatgcccagctatgtaaccaccagacctgcccaatgaaagcagccagcatcctcaactatcagaacaattcttttagaagaagaacccacctaaatgttgaggctgcaagaaagaa

SEQ ID NO: 447732 - DNA, 120 bp, Artificial Sequence
  ENSG00000155090_6 (sequence is synthesized)
cataccatgtgccgctgtgtcaccaaacagatccaaatgtgagagaaacacagtggcagatgttgatgagaaagcaagtgctgcactttatgacttttctgtgccttcctcagagacggt

SEQ ID NO: 447733 - DNA, 120 bp, Artificial Sequence
  ENSG00000155090_7 (sequence is synthesized)
catctgcaggtctcagccagcccctgtgtccccacaacagaagtcagtgttggtctctccacctgcagtatctgcagggggagtgccacctatgccggtcatctgccagatggttcccct

SEQ ID NO: 447734 - DNA, 120 bp, Artificial Sequence
  ENSG00000155090_8 (sequence is synthesized)
tcctgccaacaaccctgttgtgacaacagtcgttcccagcactcctcccagccagccaccagccgtttgcccccctgttgtgttcatgggcacacaagtccccaaaggcgctgtcatgtt

SEQ ID NO: 447735 - DNA, 120 bp, Artificial Sequence
  ENSG00000155090_9 (sequence is synthesized)
tgtggtaccccagcccgttgtgcagagttcaaagcctccggtggtgagcccgaatggcaccagactctctcccattgcccctgctcctgggttttccccttcagcagcaaaagtcactcc

SEQ ID NO: 447736 - DNA, 120 bp, Artificial Sequence
  ENSG00000155090_10 (sequence is synthesized)
tcagattgattcatcaaggataaggagtcacatctgtagccacccaggatgtggcaagacatactttaaaagttcccatctgaaggcccacacgaggacgcacacaggagaaaagccttt

SEQ ID NO: 447737 - DNA, 120 bp, Artificial Sequence
  ENSG00000155090_11 (sequence is synthesized)
cagctgtagctggaaaggttgtgaaaggaggtttgcccgttctgatgaactgtccagacacaggcgaacccacacgggtgagaagaaatttgcgtgccccatgtgtgaccggcggttcat

SEQ ID NO: 447738 - DNA, 120 bp, Artificial Sequence
  ENSG00000155090_12 (sequence is synthesized)
atctatcagccaagaagctaccaaactggcagatggaagtgagcaagctaaatgacattgctctacctccaacccctgctcccacacagtgacagaccggaaagtgaagagtcagaacta

SEQ ID NO: 447739 - DNA, 120 bp, Artificial Sequence
  ENSG00000155090_13 (sequence is synthesized)
actttggtctcagcgggagccagtggtgatgtaaaaatgcttccactgcaagtctgtggccccacaacgtgggcttaaagcagaagccccacagcctggcacgaaggccccgcctgggtt

SEQ ID NO: 447740 - DNA, 120 bp, Artificial Sequence
  ENSG00000155090_14 (sequence is synthesized)
aggtgactaaaagggcttcggccacaggcaggtcacagaaaggcaggtttcatttcttatcacataagagagatgagaaagcttttattcctttgaatattttttgaaggtttcagatga

SEQ ID NO: 447741 - DNA, 120 bp, Artificial Sequence
  ENSG00000155090_15 (sequence is synthesized)
ggtcaacacaggtagcacagattttgaatctgtgtgcatatttgttactttacttttgctgtttatacttgagaccaacttttcaatgtgattcttctaaagcactggtttcaagaatat

SEQ ID NO: 447742 - DNA, 120 bp, Artificial Sequence
  ENSG00000155090_16 (sequence is synthesized)
ggaggctggaaggaaataaacattacggtacagacatggagatgtaaaatgagtttgtattattacaaatattgtcatctttttctagagttatcttctttattattcctagtctttcca

SEQ ID NO: 447743 - DNA, 120 bp, Artificial Sequence
  ENSG00000155090_17 (sequence is synthesized)
gtcaacatcgtggatgtagtgattaaatatatctagaactatcatttttacactattgtgaatatttggaattgaacgactgtatattgctaagagggcccaaagaattggaatcctcct

SEQ ID NO: 447744 - DNA, 120 bp, Artificial Sequence
  ENSG00000155090_18 (sequence is synthesized)
taatttaattgctttgaagcatagctacaatttgtttttgcatttttgttttgaaagtttaacaaatgactgtatctaggcatttcattatgctttgaactttagtttgcctgcagtttc

SEQ ID NO: 447745 - DNA, 120 bp, Artificial Sequence
  ENSG00000155090_19 (sequence is synthesized)
ttgtgtagatttgaaaattgtataccaatgtgttttctgtagactctaagatacactgcactttgtttagaaaaaaaactgaagatgaaatatatattgtaaagaagggatattaagaat

SEQ ID NO: 447746 - DNA, 120 bp, Artificial Sequence
  ENSG00000155090_20 (sequence is synthesized)
cttagataacttcttgaaaaagatggcttatgtcatcagtaaagtacctttatgttatgaggatataatgtgtgctttattgaattagaaaattagtgaccattattcacaggtggacaa

SEQ ID NO: 447747 - DNA, 120 bp, Artificial Sequence
  ENSG00000155090_21 (sequence is synthesized)
atgttgatgttgtcctgttaatttataggcgttttttggggatgtggaggtagttgggtagaaaaattattagaacattcacttttgttaacagtatttctcttttattctgttatatag

SEQ ID NO: 447748 - DNA, 120 bp, Artificial Sequence
  ENSG00000155090_22 (sequence is synthesized)
tggatgatatacacagtggcaaaacaaaagtacattgcttaaaatatatagtgaaaaatgtcactatatcttcccatttaacattgtttttgtatattgggtgtagatttctgacatcaa

SEQ ID NO: 447749 - DNA, 120 bp, Artificial Sequence
  ENSG00000155090_23 (sequence is synthesized)
aacttggacccttggaaaacaaaagttttaattaaaaaaaatccttgtgacttacaatttgcacaatatttcttttgttgtactttatatcttgtttacaataaagaattccctttggta

SEQ ID NO: 447750 - DNA, 80 bp, Artificial Sequence
  ENSG00000155090_24 (sequence is synthesized)
ggttcctaagggaacggcggctcgcggggagctggaaggggcgggcgcctcccggagcctggcgcccgcagccccgcccc

SEQ ID NO: 447751 - DNA, 120 bp, Artificial Sequence
  ENSG00000155090_25 (sequence is synthesized)
ggcgcccgcggcccctcccccgggtcgggcgcgggcgggggcccgcaagctcaggaagtaggggaaaggtgacggcgcggcaattcccagttcacgtttcctgcgcctcccggagcagcc

SEQ ID NO: 447752 - DNA, 120 bp, Artificial Sequence
  ENSG00000155090_26 (sequence is synthesized)
gagcagccgctgatcacgctttgttcacatgcctcgccccctcctcgcccacgcccccgccccgggccgcacagccaatccgggctcgggccgccgagccggccggccaatggcgggggc

SEQ ID NO: 447753 - DNA, 120 bp, Artificial Sequence
  ENSG00000155090_27 (sequence is synthesized)
ggggacgtgcgagcggcgaggaatgttcccagtgactcacccgtgagcctcattgaggttagggcggccccatccgtcggtctccgccagctaggatctcccccgccgtccgcccccgcc

SEQ ID NO: 447754 - DNA, 120 bp, Artificial Sequence
  ENSG00000155090_28 (sequence is synthesized)
cctcgtctgcctcccccgcccgcgcctccgcccgcgcttccctttcctgcctcgcgccccactccctttcctcccctccctgtttcccttcctgtccttcccagctcacgctctctttcc

SEQ ID NO: 447755 - DNA, 120 bp, Artificial Sequence
  ENSG00000155090_29 (sequence is synthesized)
ctgccgcctgcctttcttttttcctttttttgcattggcgtcttggggctgttacacacacgcgcgctgtccattgcagcttacataaaggcgggcgcgattatgcaattatattgttag

SEQ ID NO: 447756 - DNA, 120 bp, Artificial Sequence
  ENSG00000155090_30 (sequence is synthesized)
cgatatttcaagagcaatggctcgttttcttaggatttcaacacgaaggcatcatgcatttttgaaaaactagtattgagaataataccttgcaacgtaaagaatgttttttggtatttt

SEQ ID NO: 447757 - DNA, 80 bp, Artificial Sequence
  ENSG00000155093_0 (sequence is synthesized)
gtccggtgctgaagctcggcccggcgtcgccgcaagagcgcgagaggcgcggcgggaggagccggcggcgcgcgcctccc

SEQ ID NO: 447758 - DNA, 120 bp, Artificial Sequence
  ENSG00000155093_1 (sequence is synthesized)
ccatggactgagcgccgccggccaggccgcggggatggggccgccgctcccgctgctgctgctgctactgctgctgctgccgccacgcgtcctgcctgccgccccttcgtccgtcccccg

SEQ ID NO: 447759 - DNA, 120 bp, Artificial Sequence
  ENSG00000155093_2 (sequence is synthesized)
cggccggcagctcccggggcgtctgggctgcctgctcgaggagggcctctgcggagcgtccgaggcctgtgtgaacgatggagtgtttggaaggtgccagaaggttccggcaatggactt

SEQ ID NO: 447760 - DNA, 120 bp, Artificial Sequence
  ENSG00000155093_3 (sequence is synthesized)
ttaccgctacgaggtgtcgcccgtggccctgcagcgcctgcgcgtggcgttgcagaagctttccggcacaggtttcacgtggcaggatgactatactcagtatgtgatggaccaggaact

SEQ ID NO: 447761 - DNA, 120 bp, Artificial Sequence
  ENSG00000155093_4 (sequence is synthesized)
tgcagacctcccgaaaacctacctgaggcgtcctgaagcatccagcccagccaggccctcaaaacacagcgttggcagcgagaggaggtacagtcgggagggcggtgctgccctggccaa

SEQ ID NO: 447762 - DNA, 120 bp, Artificial Sequence
  ENSG00000155093_5 (sequence is synthesized)
cgccctccgacgccacctgcccttcctggaggccctgtcccaggccccagcctcagacgtgctcgccaggacccatacggcgcaggacagaccccccgctgagggtgatgaccgcttctc

SEQ ID NO: 447763 - DNA, 120 bp, Artificial Sequence
  ENSG00000155093_6 (sequence is synthesized)
cgagagcatcctgacctatgtggcccacacgtctgcgctgacctaccctcccgggtcccggacccagctccgcgaggacctcctgccgcggaccctcggccagctccagccagatgagct

SEQ ID NO: 447764 - DNA, 120 bp, Artificial Sequence
  ENSG00000155093_7 (sequence is synthesized)
cagccctaaggtggacagtggtgtggacagacaccatctgatggcggccctcagtgcctatgctgcccagaggcccccagctccccccggggagggcagcctggagccacagtaccttct

SEQ ID NO: 447765 - DNA, 120 bp, Artificial Sequence
  ENSG00000155093_8 (sequence is synthesized)
gcgtgcaccctcaagaatgcccaggcctttgctggcaccagccgccccccagaagtggccttcacctctgggagattccgaagacccctccagcacaggcgatggagcacggattcatac

SEQ ID NO: 447766 - DNA, 120 bp, Artificial Sequence
  ENSG00000155093_9 (sequence is synthesized)
cctcctgaaggacctgcagaggcagccggctgaggtgaggggcctgagtggcctggagctggacggcatggctgagctgatggctggcctgatgcaaggcgtggaccatggagtagctcg

SEQ ID NO: 447767 - DNA, 120 bp, Artificial Sequence
  ENSG00000155093_10 (sequence is synthesized)
aggcagccctgggagagcggccctgggagagtctggagaacaggcggatggccccaaggccaccctccgtggagacagctttccagatgacggagtgcaggacgacgatgatagacttta

SEQ ID NO: 447768 - DNA, 120 bp, Artificial Sequence
  ENSG00000155093_11 (sequence is synthesized)
ccaagaggtccatcgtctgagtgccacactcgggggcctcctgcaggaccacgggtctcgactcttacctggagccctcccctttgcaaggcccctcgacatggagaggaagaagtccga

SEQ ID NO: 447769 - DNA, 120 bp, Artificial Sequence
  ENSG00000155093_12 (sequence is synthesized)
gcaccctgagtcttccctgtcttcagaagaggagactgccggagtggagaacgtcaagagccagacgtattccaaagatctgctggggcagcagccgcattcggagcccggggccgctgc

SEQ ID NO: 447770 - DNA, 120 bp, Artificial Sequence
  ENSG00000155093_13 (sequence is synthesized)
gtttggggagctccaaaaccagatgcctgggccctcgaaggaggagcagagccttccagcgggtgctcaggaggccctcagcgacggcctgcaattggaggtccagccttccgaggaaga

SEQ ID NO: 447771 - DNA, 120 bp, Artificial Sequence
  ENSG00000155093_14 (sequence is synthesized)
ggcgcggggctacatcgtgacagacagagaccccctgcgccccgaggaaggaaggcggctggtggaggacgtcgcccgcctcctgcaggtgcccagcagtgcgttcgctgacgtggaggt

SEQ ID NO: 447772 - DNA, 120 bp, Artificial Sequence
  ENSG00000155093_15 (sequence is synthesized)
tctcggaccagcagtgaccttcaaagtgagcgccaatgtccaaaacgtgaccactgaggatgtggagaaggccacagttgacaacaaagacaaactggaggaaacctctggactgaaaat

SEQ ID NO: 447773 - DNA, 120 bp, Artificial Sequence
  ENSG00000155093_16 (sequence is synthesized)
tcttcaaaccggagtcgggtcgaaaagcaaactcaagttcctgcctcctcaggcggagcaagaagactccaccaagttcatcgcgctcaccctggtctccctcgcctgcatcctgggcgt

SEQ ID NO: 447774 - DNA, 120 bp, Artificial Sequence
  ENSG00000155093_17 (sequence is synthesized)
cctcctggcctctggcctcatctactgcctccgccatagctctcagcacaggctgaaggagaagctctcgggactagggggcgacccaggtgcagatgccactgccgcctaccaggagct

SEQ ID NO: 447775 - DNA, 120 bp, Artificial Sequence
  ENSG00000155093_18 (sequence is synthesized)
gtgccgccagcgtatggccacgcggccaccagaccgacctgagggcccgcacacgtcacgcatcagcagcgtctcatcccagttcagcgacgggccgatccccagcccctccgcacgcag

SEQ ID NO: 447776 - DNA, 120 bp, Artificial Sequence
  ENSG00000155093_19 (sequence is synthesized)
cagcgcctcatcctggtccgaggagcctgtgcagtccaacatggacatctccaccggccacatgatcctgtcctacatggaggaccacctgaagaacaagaaccggctggagaaggagtg

SEQ ID NO: 447777 - DNA, 120 bp, Artificial Sequence
  ENSG00000155093_20 (sequence is synthesized)
gaacgtgcccaagaaccgctccctggccgtgctgacctatgaccactcccgggtcctgctgaaggcggagaacagccacagccactcagactacatcaacgctagccccatcatggatca

SEQ ID NO: 447778 - DNA, 120 bp, Artificial Sequence
  ENSG00000155093_21 (sequence is synthesized)
cgacccgaggaaccccgcgtacatcgccacccagggaccgctgcccgccaccgtggctgacttttggcagatggtgtgggagagcggctgcgtggtgatcgtcatgctgacacccctcgc

SEQ ID NO: 447779 - DNA, 120 bp, Artificial Sequence
  ENSG00000155093_22 (sequence is synthesized)
ggagaacggcgtccggcagtgctaccactactggccggatgaaggctccaatctctaccacatctatgaggtgaacctggtctccgagcacatctggtgtgaggacttcctggtgaggag

SEQ ID NO: 447780 - DNA, 120 bp, Artificial Sequence
  ENSG00000155093_23 (sequence is synthesized)
cttctatctgaagaacctgcagaccaacgagacgcgcaccgtgacgcagttccacttcctgagttggtatgaccgaggagtcccttcctcctcaaggtccctcctggacttccgcagaaa

SEQ ID NO: 447781 - DNA, 120 bp, Artificial Sequence
  ENSG00000155093_24 (sequence is synthesized)
agtaaacaagtgctacaggggccgttcttgtccaataattgttcattgcagtgacggtgcaggccggagcggcacctacgtcctgatcgacatggttctcaacaagatggccaaaggtgc

SEQ ID NO: 447782 - DNA, 120 bp, Artificial Sequence
  ENSG00000155093_25 (sequence is synthesized)
taaagagattgatatcgcagcgaccctggagcacttgagggaccagagacccggcatggtccagacgaaggagcagtttgagttcgcgctgacagccgtggctgaggaggtgaacgccat

SEQ ID NO: 447783 - DNA, 120 bp, Artificial Sequence
  ENSG00000155093_26 (sequence is synthesized)
cctcaaggcccttccccagtgagcggcagcctcaggggcctcaggggagcccccaccccacggatgttgtcaggaatcatgatctgactttaattgtgtgtcttctattataactgcata

SEQ ID NO: 447784 - DNA, 120 bp, Artificial Sequence
  ENSG00000155093_27 (sequence is synthesized)
gtaatagggcccttagctctcccgtagtcagcgcagtttagcagttaaaagtgtatttttgtttaatcaaacaataataaagagagatttgtggaaaaatccagttacgggtggagggga

SEQ ID NO: 447785 - DNA, 120 bp, Artificial Sequence
  ENSG00000155093_28 (sequence is synthesized)
atcggttcatcaattttcacttgcttaaaaaaaatactttttcttaaagcacccgttcaccttcttggttgaagttgtgttaacaatgcagtagccagcacgttcgaggcggtttccagg

SEQ ID NO: 447786 - DNA, 120 bp, Artificial Sequence
  ENSG00000155093_29 (sequence is synthesized)
aagagtgtgcttgtcatctgccactttcgggagggtggatccactgtgcaggagtggccggggaagctggcagcactcagtgaggccgcccggcacacaaggcacgtttggcatttctct

SEQ ID NO: 447787 - DNA, 120 bp, Artificial Sequence
  ENSG00000155093_30 (sequence is synthesized)
ttgagagagtttatcattgggagaagccgcagggacagaactgaacgtcctgcagcttcggggcaagtgagacaatcacagctcctcgctgcgtctccatcaacactgcgccgggtacca

SEQ ID NO: 447788 - DNA, 120 bp, Artificial Sequence
  ENSG00000155093_31 (sequence is synthesized)
tggacggccccgtcagccacacctgtcagcccaagcagagtgattcaggggctccccgggggcagacacctgtgcaccccatgagtagtgcccacttgaggctggcactcccctgacctc

SEQ ID NO: 447789 - DNA, 120 bp, Artificial Sequence
  ENSG00000155093_32 (sequence is synthesized)
acctttgcaaagttacagatgcaccccaacattgagatgtgtttttaatgttaaaatattgatttctacgttatgaaaacagatgcccccgtgaatgcttacctgtgagataaccacaac

SEQ ID NO: 447790 - DNA, 120 bp, Artificial Sequence
  ENSG00000155093_33 (sequence is synthesized)
caggaagaacaaatctgggcattgagcaagctatgagggtccccgggagcacacgaaccctgccaggcccccgctggctcctccaggcacgtcccggacctgtggggccccagagagggg

SEQ ID NO: 447791 - DNA, 120 bp, Artificial Sequence
  ENSG00000155093_34 (sequence is synthesized)
acatttccctcctgggagagaaggagatcagggcaactcggagagggctgcgagcatttccctcccgggagaggagatcagggcgacctgcacgcactgcgtagagcctggaagggaagt

SEQ ID NO: 447792 - DNA, 120 bp, Artificial Sequence
  ENSG00000155093_35 (sequence is synthesized)
gagaaaccagccgaccggccctgcccctcttcccgggatcacttaatgaaccacgtgttttgacatcatgtaaacctaagcacgtagagatgattcggatttgacaaaataacatttgag

SEQ ID NO: 447793 - DNA, 120 bp, Artificial Sequence
  ENSG00000155093_36 (sequence is synthesized)
tatccgattcgccatcaccccctaccccagaaataggacaattcacttcattgaccaagatgatcacatggaaggcggcacagaggcagctgtgtgggctgcagatttcctgtgtggggt

SEQ ID NO: 447794 - DNA, 120 bp, Artificial Sequence
  ENSG00000155093_37 (sequence is synthesized)
tcagcgtagaaaacgcacctccatcccgcccttcccacagcattcctccatcttagatagatggtactctccaaaggccctaccagagggaacacggcctactgagcggacagaatgatg

SEQ ID NO: 447795 - DNA, 120 bp, Artificial Sequence
  ENSG00000155093_38 (sequence is synthesized)
ccaaaatattgcttatgtctctacatggtattgtaatgaatatctgctttaatatagctatcatttcttttccaaaattacttctctctatctggaatttaattaatcgaaatgaattta

SEQ ID NO: 447796 - DNA, 120 bp, Artificial Sequence
  ENSG00000155093_39 (sequence is synthesized)
tctgaatataggaagcatatgcctacttgtaatttctaactccttatgtttgaagagaaacctccggtgtgagatatacaaatatatttaattgtgtcatattaaacttctgatttcaca

SEQ ID NO: 447797 - DNA, 120 bp, Artificial Sequence
  ENSG00000155093_40 (sequence is synthesized)
cccttccccacacccgttcaccttcttggttgaagttgtgttaacaatgcagtagccagcacgttcgaggcggtttccaggaagagtgtgcttgtcatctgccactttcgggagggtgga

SEQ ID NO: 447798 - DNA, 120 bp, Artificial Sequence
  ENSG00000155096_0 (sequence is synthesized)
acactttcaggctctgatcgcggccgcagtttttccttttttcttctgccgtcgccttctctgcctcttctcatcctttctcgctctgctgctctgcagtgtgacgagtccgaatcctct

SEQ ID NO: 447799 - DNA, 120 bp, Artificial Sequence
  ENSG00000155096_1 (sequence is synthesized)
tcccacccagcccgcgcctttcttcttttgcctgcgctgttctatttctccttcggccgccgccgccactgctgcacacagctggtgtcggtgccgcgcttttacccccaagtcgttccc

SEQ ID NO: 447800 - DNA, 120 bp, Artificial Sequence
  ENSG00000155096_2 (sequence is synthesized)
gcagcctatggcccaggccgccttgggtatttctgctcaaggtaaccacatccctctttaaaaattccgccgaaaaagagaagacgctttacccgactctttgggccgttatctcacggc

SEQ ID NO: 447801 - DNA, 120 bp, Artificial Sequence
  ENSG00000155096_3 (sequence is synthesized)
gaactttctgaccaagtatacaactacccagagggcctaggagaagtgctgtatagagagcagttcgacttcaacgctgagccaccttgggaacctagctgatgataggggggttccatc

SEQ ID NO: 447802 - DNA, 120 bp, Artificial Sequence
  ENSG00000155096_4 (sequence is synthesized)
tcccaacttgtccattttgttgcatattctaaggacccagacataggcttggtggcccgtctcttgtctttcctggtttatgactttcggctttgtggaatacggctgagatgaaaggat

SEQ ID NO: 447803 - DNA, 120 bp, Artificial Sequence
  ENSG00000155096_5 (sequence is synthesized)
ttattgatgatgcaaactactccgttggcctgttggatgaaggaacaaaccttggaaatgttattgataactatgtttatgaacataccctgacagggaaaaatgcattttttgtgggag

SEQ ID NO: 447804 - DNA, 120 bp, Artificial Sequence
  ENSG00000155096_6 (sequence is synthesized)
atcttggaaagattgtgaagaaacacagtcaatggcagaatgtagtggctcagataaagccattctacacagtgaagtgcaactctgctccagctgtacttgagattttggcagctcttg

SEQ ID NO: 447805 - DNA, 120 bp, Artificial Sequence
  ENSG00000155096_7 (sequence is synthesized)
gaaccggatttgcttgttccagtaaaaatgaaatggctttagtgcaagagttgggtgtacctccagaaaacattatttacataagtccttgcaagcaagtgtctcagataaagtatgcag

SEQ ID NO: 447806 - DNA, 120 bp, Artificial Sequence
  ENSG00000155096_8 (sequence is synthesized)
caaaagttggagtgaatatcctgacatgtgacaatgaaattgaattgaagaaaattgcacgtaatcacccaaatgccaaggtcttactacatattgcaacagaagataatattggaggtg

SEQ ID NO: 447807 - DNA, 120 bp, Artificial Sequence
  ENSG00000155096_9 (sequence is synthesized)
aagagggtaacatgaagtttggcactaccctgaagaactgtaggcatctcttggaatgtgctaaggaacttgatgtccaaataattggggttaaatttcatgtttcgagtgcttgcaaag

SEQ ID NO: 447808 - DNA, 120 bp, Artificial Sequence
  ENSG00000155096_10 (sequence is synthesized)
aatctcaagtatatgtacatgctctatctgatgctcgatgtgtgtttgacatggctggagaaattggctttacgatgaacatgttagacattggtggaggattcacgggaactgaatttc

SEQ ID NO: 447809 - DNA, 120 bp, Artificial Sequence
  ENSG00000155096_11 (sequence is synthesized)
aattggaagaggttaatcatgttatcagccctctgttggatatctactttcctgaaggatctggtgttaagataatttcagaacccggaagctactatgtgtcttctgcatttacactcg

SEQ ID NO: 447810 - DNA, 120 bp, Artificial Sequence
  ENSG00000155096_12 (sequence is synthesized)
cagttaatatcatagcaaagaaagttgttgaaaatgataaatttccctctggagtagaaaaaaccggaagtgatgaaccagccttcatgtattatatgaatgatggtgtttatggttctt

SEQ ID NO: 447811 - DNA, 120 bp, Artificial Sequence
  ENSG00000155096_13 (sequence is synthesized)
ttgcaagtaaactgtctgaggacttaaataccattccagaggttcacaagaaatacaaggaagatgagcctctgtttacaagcagcctttggggtccatcctgtgatgagcttgatcaaa

SEQ ID NO: 447812 - DNA, 120 bp, Artificial Sequence
  ENSG00000155096_14 (sequence is synthesized)
ttgtggaaagctgtcttcttcctgagctgaatgtgggagattggcttatctttgataacatgggagcagattctttccatgaaccatctgcttttaatgattttcagaggccagccattt

SEQ ID NO: 447813 - DNA, 120 bp, Artificial Sequence
  ENSG00000155096_15 (sequence is synthesized)
attacatgatgtcattcagtgattggtatgagatgcaagatgctggaattacttcagactcaatgatgaagaacttcttctttgtgccttcttgcattcagctgagccaagaagacagct

SEQ ID NO: 447814 - DNA, 120 bp, Artificial Sequence
  ENSG00000155096_16 (sequence is synthesized)
tttccgctgaagcttaaacaggcattaacgcttctttagatctgaagttgcaggttaagcttgtctggtcaacattccagtgtggaaaaataatttaaacaatcttattctcttaattct

SEQ ID NO: 447815 - DNA, 120 bp, Artificial Sequence
  ENSG00000155096_17 (sequence is synthesized)
agtttgtcctaccccttaagcgtttaaaataaaatatgcaacaaaatggatgacttagtggagatggaagcccattaattgggttccccattaaatcgtttacatacaagaacacagttt

SEQ ID NO: 447816 - DNA, 120 bp, Artificial Sequence
  ENSG00000155096_18 (sequence is synthesized)
ttatactaaggatttgtgtttaaagtcttgtaaagttcatgtctttcacccagatatatcaaatgttagaagaccagtgtgacttcattagataacgtttagtgtatttagaatgtgtaa

SEQ ID NO: 447817 - DNA, 120 bp, Artificial Sequence
  ENSG00000155096_19 (sequence is synthesized)
atttgtgctttgaactgtagtttaataaatgtaaaattgcatcatagtatttgttgacctaatgtaacccttgtatgattgcaataaaattttgtgtagattttactgttttttcaggct

SEQ ID NO: 447818 - DNA, 120 bp, Artificial Sequence
  ENSG00000155096_20 (sequence is synthesized)
aaaactttgggaaaggggctagctagcaaaggtagttttgaaatagatgtgtatatggactgttttgaagggtttttttctttatagcccagttaagttttgtttggctcggtgcatttt

SEQ ID NO: 447819 - DNA, 120 bp, Artificial Sequence
  ENSG00000155096_21 (sequence is synthesized)
tcatttatttaattagtaatttaagtaaagtgtttggtaaatcattgtgaagttcagattcattatggagagttgatgtgcagtaagcatgatgtttaacaattttaacaccaaaaatgt

SEQ ID NO: 447820 - DNA, 120 bp, Artificial Sequence
  ENSG00000155096_22 (sequence is synthesized)
taatcctgcataaatcaactgtaataataaataggtgtttctgtatagatagaatgcatagagtaccttagtaaatctttgaatcacaatcttttggctgaaatggaagattctgttaaa

SEQ ID NO: 447821 - DNA, 120 bp, Artificial Sequence
  ENSG00000155096_23 (sequence is synthesized)
tactttgaataaacttggggggagggaaataaaattgcagaaaactgcagagcactaaaacttaaagaagggctacatctttatccagaaacctgttgctcttttgcacggaatgtttaa

SEQ ID NO: 447822 - DNA, 120 bp, Artificial Sequence
  ENSG00000155096_24 (sequence is synthesized)
attcagagttgggatgggggttggggtgaagcacacttattatcttcagttgcagtgatttcaaatttaggattttttgttgttggtttgaactgtccccttagtttcttgttatttcca

SEQ ID NO: 447823 - DNA, 120 bp, Artificial Sequence
  ENSG00000155096_25 (sequence is synthesized)
atttgttctgcttagtcattacttttaattcttttcttactaaaattttatggtggttgggggaagggagttagcatcactaacctgacagttgttgccaggaatttgctttgtttactg

SEQ ID NO: 447824 - DNA, 120 bp, Artificial Sequence
  ENSG00000155096_26 (sequence is synthesized)
ctagtatattagaaatcctagatctcagaatcacaatagtaataaacaacaggggtcattttttcctaacttactctgtgttcaggtgtggaatttctgtctcccaagaggaaatgtgac

SEQ ID NO: 447825 - DNA, 120 bp, Artificial Sequence
  ENSG00000155096_27 (sequence is synthesized)
ttcactttggtgccaatggacagaaaattctacctgtgctacataggagaagtttggaatgcacttaatagctggtttttacaccttgatttcgaggtggaaagaaattgatcatgaatc

SEQ ID NO: 447826 - DNA, 120 bp, Artificial Sequence
  ENSG00000155096_28 (sequence is synthesized)
tctaataaatttaaatctcttaaaccagtaggtgcttaatattttttgatttgattaatgcccatttaaatctcatgggttctattaaaaatatatatatatagggccccaatccattgc

SEQ ID NO: 447827 - DNA, 120 bp, Artificial Sequence
  ENSG00000155096_29 (sequence is synthesized)
catcaaattgcccttggacttttccaaggtatattatggggttttatgcaaaattccaagctaccatgtaactttttttaaccatttaacaaggagggggaactgtttcctaccttcttt

SEQ ID NO: 447828 - DNA, 120 bp, Artificial Sequence
  ENSG00000155096_30 (sequence is synthesized)
acatgttgtgcattgttgtggtccagaaatgccaaacctttttaaagatggtgcaactttgagtccttggcttgactatacaggccttgaacttcatggcatatcaactttgccatatct

SEQ ID NO: 447829 - DNA, 120 bp, Artificial Sequence
  ENSG00000155096_31 (sequence is synthesized)
gcaggagagctgttctataagaaatagctcagagttgcaaatatcacatgtgaatgatacggtaacttttaagaaatgtctgtattgtatttgaagactgtttgccataaatctgaaatt

SEQ ID NO: 447830 - DNA, 120 bp, Artificial Sequence
  ENSG00000155096_32 (sequence is synthesized)
tgaacctatgtatttcaatttggtatgctaaaaagttctgaattaatgtaaagttttttgttataatattgtaatctcagttcaaaagttaactgcaaatataaaacccaatgatttcta

SEQ ID NO: 447831 - DNA, 120 bp, Artificial Sequence
  ENSG00000155096_33 (sequence is synthesized)
tatagtaaattgaactgtaaaggtaacttgtgtgtgattctgaatacatagataaatgtttttattcctcatgttttactttggcttctatctgaaatagaggtaaaattttacatatca

SEQ ID NO: 447832 - DNA, 120 bp, Artificial Sequence
  ENSG00000155096_34 (sequence is synthesized)
acacatggaggttcctggagagtggcgggcccagggagggcatggaggtttcacatccctccccctgtatcttgccctatgtgtctcttcatctgtatccttcgcaatatcctttataat

SEQ ID NO: 447833 - DNA, 120 bp, Artificial Sequence
  ENSG00000155096_35 (sequence is synthesized)
ttgtacataaataggtggtagtcttttaaacaaagaatgggatcatgctgtgccttacacaatagataacattccatgtcagtctagttttaagttttaatttaagtcaacataaaaatt

SEQ ID NO: 447834 - DNA, 120 bp, Artificial Sequence
  ENSG00000155096_36 (sequence is synthesized)
aatgaagtactatctcgaatagatgaagggaaaagaagaatggactttacgggtacagttctatggattttagtacttgtgtgaccactgccacaatcaggaagtattctattctgaaac

SEQ ID NO: 447835 - DNA, 120 bp, Artificial Sequence
  ENSG00000155096_37 (sequence is synthesized)
tttatcactagtaatactagtgaataatagtaatgctgttactcagcttgattaatgttcatttttatttatttcacaacagacacatttttgtatttggttgggtaaaattgaatgttc

SEQ ID NO: 447836 - DNA, 120 bp, Artificial Sequence
  ENSG00000155096_38 (sequence is synthesized)
gataattgacttattgttaagaatttttgtttatagaattacagttttatcttggcattgccttttctataaagctggtactgtaacttttgggtaattagaagctaatgcttctaatac

SEQ ID NO: 447837 - DNA, 120 bp, Artificial Sequence
  ENSG00000155096_39 (sequence is synthesized)
tttaaatatttggtaaagttaatggggatacttaatggtatgaatatgatgagtgacagttgaaagaaattacaggaggtgtctctacaactttctgctcctttaaatttagtattctat

SEQ ID NO: 447838 - DNA, 120 bp, Artificial Sequence
  ENSG00000155096_40 (sequence is synthesized)
gtgtttcagatttcatgtttcgagtgcttgcaaagaatctcaagtatatgtacatgctctatctgatgctcgatgtgtgtttgacatggctggagaaattggctttacgatgaacatgtt

SEQ ID NO: 447839 - DNA, 120 bp, Artificial Sequence
  ENSG00000155096_41 (sequence is synthesized)
actccctgtcctgctgccctgtgaagaaggtgcctgcttctcttttgccttctaccatgattagttaattgagaaagaagccatgtggtctgtggcagcagctggaggaaggcatggtga

SEQ ID NO: 447840 - DNA, 120 bp, Artificial Sequence
  ENSG00000155096_42 (sequence is synthesized)
ctcaacagggctctgcatggaagagtacaaggtggttctgggaagcagcaaagattggccaccccaaggctctgagggagccgcatgcaggctctaagcagaatcaggccaacccctggc

SEQ ID NO: 447841 - DNA, 120 bp, Artificial Sequence
  ENSG00000155096_43 (sequence is synthesized)
actcatattcatccagcttggtgtcaagtgggctgttgctgccagaattatcttgtgattatttgagagatgtatcagtttcttctgaagtacaatcaactgtagaagcctttgtagcag

SEQ ID NO: 447842 - DNA, 120 bp, Artificial Sequence
  ENSG00000155096_44 (sequence is synthesized)
caacataatcaacacacttcctacaatcttcaggcttcacatgtgctgatgatgatgtaaaccaactctgccccaatcatctccccttctcttagggtcttactacatattgcaacagaa

SEQ ID NO: 447843 - DNA, 74 bp, Artificial Sequence
  ENSG00000155096_45 (sequence is synthesized)
agtgctaggattacagtagaaaaaaccggaagtgatgaaccagccttcatgtattatatgaatgatggtgttta

SEQ ID NO: 447844 - DNA, 120 bp, Artificial Sequence
  ENSG00000155097_0 (sequence is synthesized)
gctgggctggcacgtgacttgttctgtgttcgcttgggtagaggaagccgtgaggccggagcttaggtcgggaagggatggatcgctgagccgatagcgtccgctaggctgtctgcctcg

SEQ ID NO: 447845 - DNA, 120 bp, Artificial Sequence
  ENSG00000155097_1 (sequence is synthesized)
aatctctcttgatttttgaggaaatacctagtaacaaacatgactgagttctggcttatatctgctcctggggagaaaacctgtcagcaaacatgggagaaattgcatgcggcaacttca

SEQ ID NO: 447846 - DNA, 120 bp, Artificial Sequence
  ENSG00000155097_2 (sequence is synthesized)
aagaacaataatcttgctgtcacttccaagttcaatattcctgacttaaaggttggcacgttggatgtcttggttggcttgtcagatgaactggctaaactggatgcatttgtagaagga

SEQ ID NO: 447847 - DNA, 120 bp, Artificial Sequence
  ENSG00000155097_3 (sequence is synthesized)
gtggttaagaaagtagctcaatacatggctgatgtattggaagatagcaaagacaaagttcaagagaatctgttggctaatggagtggacttggttacttatataacaaggttccagtgg

SEQ ID NO: 447848 - DNA, 120 bp, Artificial Sequence
  ENSG00000155097_4 (sequence is synthesized)
gacatggccaaatatccaatcaagcagtccctgaaaaatatttctgaaataattgccaagggagtaactcagattgataatgacctgaaatctcgagcatctgcatacaataacctgaaa

SEQ ID NO: 447849 - DNA, 120 bp, Artificial Sequence
  ENSG00000155097_5 (sequence is synthesized)
ggaaatcttcagaatttggaacgaaagaatgcaggaagtttgctaactagaagtctagcagaaattgtgaagaaggatgactttgttcttgattcagagtatctcgtcacattactggta

SEQ ID NO: 447850 - DNA, 120 bp, Artificial Sequence
  ENSG00000155097_6 (sequence is synthesized)
gtagttcccaagttaaaccacaacgactggattaagcagtatgaaacactagccgaaatggtagttccaaggtctagcaatgttctttcagaggaccaagacagttacctgtgtaatgtc

SEQ ID NO: 447851 - DNA, 120 bp, Artificial Sequence
  ENSG00000155097_7 (sequence is synthesized)
accttgtttaggaaggcagttgatgacttcagacacaaagccagagaaaacaaattcattgttcgtgacttccagtataatgaagaggagatgaaagcagataaagaagaaatgaacagg

SEQ ID NO: 447852 - DNA, 120 bp, Artificial Sequence
  ENSG00000155097_8 (sequence is synthesized)
ctttctactgataagaaaaaacaatttggaccacttgtacggtggctgaaagtgaattttagtgaagcatttattgcatggattcacgtgaaagcattacgggttttcgttgagtctgtt

SEQ ID NO: 447853 - DNA, 120 bp, Artificial Sequence
  ENSG00000155097_9 (sequence is synthesized)
ttaaggtatggcttgccagtgaacttccaagcaatgctacttcagcccaataagaaaactttgaagaaactgagagaagtattacatgaattgtataaacatctagacagcagtgcagca

SEQ ID NO: 447854 - DNA, 120 bp, Artificial Sequence
  ENSG00000155097_10 (sequence is synthesized)
gctattattgatgctcctatggatattccaggtttaaacctgagtcaacaagaatactacccctatgtgtactacaagattgattgcaacttgctggaattcaagtgaaaatgggctcct

SEQ ID NO: 447855 - DNA, 120 bp, Artificial Sequence
  ENSG00000155097_11 (sequence is synthesized)
cccccgacaatcctgtccttgtgtttgtgtgtgctaacagaaataagttgcagtatggtcgtacttttaactctagtatcctttgcttgcttcttacgccctttcctaggtgaattctcc

SEQ ID NO: 447856 - DNA, 120 bp, Artificial Sequence
  ENSG00000155097_12 (sequence is synthesized)
cacagtggtctgtatctcaacattttctttttaaaggaaaaaatatatatatatagtttctttttattgatcaggtctgtaaatgtgtactaaaaaaatcagagtttatttataaacaaa

SEQ ID NO: 447857 - DNA, 120 bp, Artificial Sequence
  ENSG00000155097_13 (sequence is synthesized)
atagtttatttaaagagaaggtctcttccttattgatatcatggtatgcattaattccatttgttactattgtgcacaaaagccctgttcacaggggaatggtgtaaacatttatactgt

SEQ ID NO: 447858 - DNA, 120 bp, Artificial Sequence
  ENSG00000155097_14 (sequence is synthesized)
tttgttcactgtatttagtagacataactgttgaatagttactgaatcatgatgtaaagaatatgtgaccatcttcaggtatgggatttctgaacgtttcaaatttcaatcaatgagcac

SEQ ID NO: 447859 - DNA, 120 bp, Artificial Sequence
  ENSG00000155097_15 (sequence is synthesized)
tgtcaacacccacaggagagaataaaattacctgtgcaaaggtgtattgtggtgtgtgtaacttaagattacagttctgtttgagagttaaatgatgtcatagctcacttgctatgctgc

SEQ ID NO: 447860 - DNA, 120 bp, Artificial Sequence
  ENSG00000155097_16 (sequence is synthesized)
ttccaggattttgttatatgctgaggtgtaaccatttgtgttgtctgactttcgtatgatttaattgagccaaatttgggtcagaacacaaatttgaagatgacttttcagtatatgatg

SEQ ID NO: 447861 - DNA, 120 bp, Artificial Sequence
  ENSG00000155097_17 (sequence is synthesized)
ggtatttacatttgaacactagaattttaggtctctcaaataattaagaatagagccagttttgaataaagtctagcagaactatgcagctttagtcatttgttttgtctaagtctgtat

SEQ ID NO: 447862 - DNA, 120 bp, Artificial Sequence
  ENSG00000155097_18 (sequence is synthesized)
tttatgtgttgtcttcttaagatctataattttggcatttatgtcatttgtgacatagtctgaaaatagagacattgttggcctttaaaatctcagaaatgaatgacttaatttagtgtc

SEQ ID NO: 447863 - DNA, 120 bp, Artificial Sequence
  ENSG00000155097_19 (sequence is synthesized)
ctgaaagagcttttaaaagaggattttgtggcaatgtttctcttactacgtactcacaggtttgcaaatgggaaaaaagtttacatttcagtttaggggcatatctaagctatgctattc

SEQ ID NO: 447864 - DNA, 120 bp, Artificial Sequence
  ENSG00000155097_20 (sequence is synthesized)
cctttagaaaattagcctccaaaatcttttgtttcaaaatattatattatttcataaataatttcaagcaaatacagacatccacaatgtagaacatgagagaccccctccctcaatttc

SEQ ID NO: 447865 - DNA, 120 bp, Artificial Sequence
  ENSG00000155097_21 (sequence is synthesized)
cacctcccaagggaagtttatgtatttttctaggcccttttctatgtctttacatctctgtctcacacacacacacgtatacacacacacagtttatttttaataaaataggattatacc

SEQ ID NO: 447866 - DNA, 120 bp, Artificial Sequence
  ENSG00000155097_22 (sequence is synthesized)
acacacatcctgtcacttgcttttttgcttaagagtatatctaagagaatcctttgtgtcagtgaagctggagctacctcattcttttaactggctgcgtggcgttccattgagtgtctg

SEQ ID NO: 447867 - DNA, 120 bp, Artificial Sequence
  ENSG00000155097_23 (sequence is synthesized)
tttctttgtatacttgtattagtatttctgtaagatctgagaagtggaatttgtagggtcataggttatgtacacttaagtttttgacactcactgccaagtcatctgtcagaattctaa

SEQ ID NO: 447868 - DNA, 120 bp, Artificial Sequence
  ENSG00000155097_24 (sequence is synthesized)
actaaagacatgtttggagtgtggatttatcttcagtttttctttggacaagaggaagctgtgaaagattttgctatcagaaaattttggttctttgtcttttgcacatgttctttgagt

SEQ ID NO: 447869 - DNA, 120 bp, Artificial Sequence
  ENSG00000155097_25 (sequence is synthesized)
cttagtatctgtaacgtggcgctactctctctatcatgggggggcatgttttgacattaaattgacttttaagaaaaacatgtcactaacctgaagctcagccacacagtgacttttaag

SEQ ID NO: 447870 - DNA, 120 bp, Artificial Sequence
  ENSG00000155097_26 (sequence is synthesized)
gttttatttagactttactgttgttctcatgagagtaggtacagactgcataaggtttagaatcccagcatatgtctgaaacgacgggactttcactgtgatttccaccagagaaattat

SEQ ID NO: 447871 - DNA, 120 bp, Artificial Sequence
  ENSG00000155097_27 (sequence is synthesized)
agcagagtggctgagcatgtgctctgaggccaggccccagctctgctgctgacgagctgtgtggtcctgggcagagtggtctccgagttccagtccctcctctgtaaaatgggcatgatt

SEQ ID NO: 447872 - DNA, 120 bp, Artificial Sequence
  ENSG00000155097_28 (sequence is synthesized)
agagtgcccaccgcattagggatgttggggtgagtcagtgtgaccccacgtgcacagaaagtgctgcgagtggtgcatggtgagaggttgatgcaggtacttagcccttggggaacacag

SEQ ID NO: 447873 - DNA, 120 bp, Artificial Sequence
  ENSG00000155097_29 (sequence is synthesized)
gtagttccttttcactgtgtttaatttgggaaaatccagatccacatcattgtagagtctgagggttagaaggaagtcattgtgtctaacataacaacagagcagtttgtgtcactgagc

SEQ ID NO: 447874 - DNA, 120 bp, Artificial Sequence
  ENSG00000155097_30 (sequence is synthesized)
tccagtctgtgctggattattgatattgttggtggcggtcaccattcctggaaagggactgtcccaagccacttaccttcccgaggagtctgctggttctccttgaggatagtgcttaga

SEQ ID NO: 447875 - DNA, 120 bp, Artificial Sequence
  ENSG00000155097_31 (sequence is synthesized)
taacagactcattaaacatttactgagtgtctgtcagggatcattcacatccacatcatcctcccggcccctccccgtgttgttcatggagggagtactggcggtccccattttcatgta

SEQ ID NO: 447876 - DNA, 120 bp, Artificial Sequence
  ENSG00000155097_32 (sequence is synthesized)
tggagacttcaggtgaaagaagttaagtgaattctttgttgagtcacaaatcttgagccagtcagaatttgaacctaagatttttgactgctggttgtcacacttcccgccccacactca

SEQ ID NO: 447877 - DNA, 120 bp, Artificial Sequence
  ENSG00000155097_33 (sequence is synthesized)
actgttgtgtgaatgagccagacacattgcttaacctgagtccgagatggacaatggtataggaaagatattcggtatggagaatcagatgttaacttgtgttgctatttttgttttgtt

SEQ ID NO: 447878 - DNA, 84 bp, Artificial Sequence
  ENSG00000155097_34 (sequence is synthesized)
cccaggctagagtgcagtggcatgatcagggcttactgcagcctcaccctcgataagtagctgggcctacaggtgcgtgctacc

SEQ ID NO: 447879 - DNA, 120 bp, Artificial Sequence
  ENSG00000155097_35 (sequence is synthesized)
ctcagcccccaagtagctgggcctacaggtgcgtgctaccacgcctggccaattttttaaattttagcacagatgaggtctcactatgttgcccgggctggtctcgaactcctgagctca

SEQ ID NO: 447880 - DNA, 120 bp, Artificial Sequence
  ENSG00000155097_36 (sequence is synthesized)
tcccgcctcagcctcccaaagtgctggtgttacaggcataagccaccacgcctggcctgtgttgctattatatttggcaggaacccagagtccagaacatttcatctatgatgggttaga

SEQ ID NO: 447881 - DNA, 120 bp, Artificial Sequence
  ENSG00000155097_37 (sequence is synthesized)
gggttagataatgtgtctagttgtttgcatgccaatttcagtagcctcagttattcaacctaggagatttttctacctctttactaccctgctgaagttgctcttcagcagaaaatcttt

SEQ ID NO: 447882 - DNA, 120 bp, Artificial Sequence
  ENSG00000155097_38 (sequence is synthesized)
gtggaacacattccacactttgaaatcttcgtggaacaaaagatatttgtggaaccaatctttgtggaacatattccagctttttgaatgagtgcatatccagtagtacctttaaagtaa

SEQ ID NO: 447883 - DNA, 120 bp, Artificial Sequence
  ENSG00000155097_39 (sequence is synthesized)
cactttgtacataacaaatactcagcaaatgtgaaactttatttgctcttacttcaaaattagtccaaaatgttggaaataaaatataagacattgatctagatatgaggtttttctcct

SEQ ID NO: 447884 - DNA, 120 bp, Artificial Sequence
  ENSG00000155097_40 (sequence is synthesized)
tcattctcagctgtcgaagaaatcaaagtagcatatgcacaaggttaaaaaccacatatacaaatactatagaacagcttataatgaaaaccttgcctgcctttataaaaaatgtgatta

SEQ ID NO: 447885 - DNA, 120 bp, Artificial Sequence
  ENSG00000155097_41 (sequence is synthesized)
tcttcttctgttaatgtcaataaaagatggtttgtcctagaaggtctataaatggtattatgttctggaggaaacctagcaaaaactttgctagtttagtacttgtctctaaattgatgt

SEQ ID NO: 447886 - DNA, 120 bp, Artificial Sequence
  ENSG00000155097_42 (sequence is synthesized)
tcacccatttcaatattgcacttattaatggtctttatttttctagcatagataacaattgattctttagattcatatatggaggtaattcttgctttctaaagaaaggaatatggcaca

SEQ ID NO: 447887 - DNA, 120 bp, Artificial Sequence
  ENSG00000155097_43 (sequence is synthesized)
ttggaaccattttattcaccagtggatttacccttagagtatttttagatctgagctgatgacttgtgagagaaaaagggaacagagtaaagccatggaagccatgaacagtaagagact

SEQ ID NO: 447888 - DNA, 120 bp, Artificial Sequence
  ENSG00000155097_44 (sequence is synthesized)
gccgcctggcatggtttcttcttctgcagaagatgaaactgaggagaaacaagacaacatccttcataccaggaatggtcaagataatgcaagaagaaaaaagctttcaaacaaatcaga

SEQ ID NO: 447889 - DNA, 120 bp, Artificial Sequence
  ENSG00000155097_45 (sequence is synthesized)
aggcagtcaacaaacagaaagggggacattccttccctggcagttactcaaaactgaaattgcttattgtgtacaccggggcttgtacttggggaatttaataaaaatgctcattaccaa

SEQ ID NO: 447890 - DNA, 120 bp, Artificial Sequence
  ENSG00000155097_46 (sequence is synthesized)
gttctgtgttcgcttgggtagaggaagccgtgaggccggagcttaggtcgggaagggatggatcgctgagccgatagcgtccgctaggctgtctgcctcggtacctgttactgctgctac

SEQ ID NO: 447891 - DNA, 120 bp, Artificial Sequence
  ENSG00000155097_47 (sequence is synthesized)
agataatgagaataatagtgaaacatgtagaaagtgaattatgcgacttaattcttctatagattcctaataggtagtcacttaaaaaaatatttggtctatctaattgctatttctaag

SEQ ID NO: 447892 - DNA, 120 bp, Artificial Sequence
  ENSG00000155099_0 (sequence is synthesized)
agcagcagctgcagcggcagcagcggcagcagaggcagcagcagtagccaccactccgccgaggccgcaaccccggctcggcctccccaggccccgccgctgccgcagtcatggctgctg

SEQ ID NO: 447893 - DNA, 120 bp, Artificial Sequence
  ENSG00000155099_1 (sequence is synthesized)
atggggtggacgaacgctcgcctctgctgtcagcatcccactccggaaatgtcactcccaccgccccaccgtacttgcaagaaagcagccccagagcggagctcccacctccatatacag

SEQ ID NO: 447894 - DNA, 120 bp, Artificial Sequence
  ENSG00000155099_2 (sequence is synthesized)
ccattgccagtccagacgccagtggtattccagtaataaactgccgtgtgtgccaatcactaatcaatttggatggcaagcttcaccagcatgtggttaagtgcacagtttgcaatgaag

SEQ ID NO: 447895 - DNA, 120 bp, Artificial Sequence
  ENSG00000155099_3 (sequence is synthesized)
ctacgccaatcaaaaaccccccaacaggcaagaaatatgttagatgcccttgtaattgtcttctcatttgtaaggacacatctcggcgaataggatgcccaagacccaactgtagacgga

SEQ ID NO: 447896 - DNA, 120 bp, Artificial Sequence
  ENSG00000155099_4 (sequence is synthesized)
taattaaccttggcccagtaatgcttatttctgaagaacaaccagctcagcctgcattgccaatccaaccagaaggtacaagggtcgtgtgtgggcactgtggaaacacattcctgtgga

SEQ ID NO: 447897 - DNA, 120 bp, Artificial Sequence
  ENSG00000155099_5 (sequence is synthesized)
tggaactgaggttcaacactctggcaaaatgcccacactgcaaaaaaatctcctcagtgggtagtgcacttccacgaagacgctgctgtgcatatattaccattggaatgatatgtattt

SEQ ID NO: 447898 - DNA, 120 bp, Artificial Sequence
  ENSG00000155099_6 (sequence is synthesized)
tcattggagttgggttaactgttggcaccccagattttgcaaggcgatttcgagcaacctatgtttcttgggcaattgcttatctcctaggattgatctgccttatccgagcttgttatt

SEQ ID NO: 447899 - DNA, 120 bp, Artificial Sequence
  ENSG00000155099_7 (sequence is synthesized)
ggggagccataagagtcagttatccagaacacagttttgcataagcttgtttatgattcagtaatgcaggtgagagtgtctagcagttcttggtaagctactctggacatctttaaatta

SEQ ID NO: 447900 - DNA, 120 bp, Artificial Sequence
  ENSG00000155099_8 (sequence is synthesized)
tttatcctaatggattccattctggtttatgtataatcgtttcaagactttgggagtcttttatgaacaaatgctcattgcactatattatatgcaaattgttttgctgctaggttttca

SEQ ID NO: 447901 - DNA, 120 bp, Artificial Sequence
  ENSG00000155099_9 (sequence is synthesized)
aaatttgaataataaagccttttcatgttcttttacatctcttatagatatttttggatttgttaccaaacattacatttactctcacccttttattatttttaaataagttatttcatt

SEQ ID NO: 447902 - DNA, 120 bp, Artificial Sequence
  ENSG00000155099_10 (sequence is synthesized)
acttgctgatacatgagtattcctaagtgtttataaatatttctataatagtttcacatttatatttacattttaattaaacagtatcaaaattgcttgcttaaaacctaagcaatatgc

SEQ ID NO: 447903 - DNA, 120 bp, Artificial Sequence
  ENSG00000155099_11 (sequence is synthesized)
ttctagatactgtttgcttgttttttgttgtttgtagaaagataaaatattttggtagtaatttaaaatacaagaacgaatatttatttgtccacagttggagatgttggataaatgtct

SEQ ID NO: 447904 - DNA, 120 bp, Artificial Sequence
  ENSG00000155099_12 (sequence is synthesized)
tttctcaaagatcacaggacttttgtctttcatttttgcctttttatttaccatttataaaagatctggtctggattatggaatttaatgtttatcagctctatgtattcctttatagag

SEQ ID NO: 447905 - DNA, 120 bp, Artificial Sequence
  ENSG00000155099_13 (sequence is synthesized)
gcttgaggaagtatttcacataacatgttttataatacttaaccatttatccaaagatatatttacattgggttgtgcccctttcccttagatcatggtaaatttttcttattgaggtaa

SEQ ID NO: 447906 - DNA, 120 bp, Artificial Sequence
  ENSG00000155099_14 (sequence is synthesized)
ttatgtactacttatatttgaaggaagcttatgacattttacagtagctaaaatgttgagattagaggtacttttactattcttctcaaaggtaactgatcagataattacccaaattat

SEQ ID NO: 447907 - DNA, 120 bp, Artificial Sequence
  ENSG00000155099_15 (sequence is synthesized)
tcaagaaaatagatcagaaataaagaacaacataattttctaagaattcattgaaatttatggaatcagctctcgcactgcccatctttgcagttttgaaaaagaaattgcttaatcaca

SEQ ID NO: 447908 - DNA, 120 bp, Artificial Sequence
  ENSG00000155099_16 (sequence is synthesized)
aatgttctacagtctttaaatgtagtagaattagacagtgagatcatctgagtaaattgattggtgattccagagataagactaatattttaaattatttatgatactgattagtataaa

SEQ ID NO: 447909 - DNA, 120 bp, Artificial Sequence
  ENSG00000155099_17 (sequence is synthesized)
aacgtactcatcacagaatttgaagcaaaatacatgtacacttcaaagagtaaatgacaaatgtataaatgctgtagctcaggattatatgtacctttaaaaatacactaataaagatta

SEQ ID NO: 447910 - DNA, 120 bp, Artificial Sequence
  ENSG00000155099_18 (sequence is synthesized)
ttgttcaaaaattaccttgttttattccattaaaaataatgtcacttccagagttgccttgaaatcttgctgtaaagttttcatgtttaggaatgtacctgtttctttatataatattca

SEQ ID NO: 447911 - DNA, 120 bp, Artificial Sequence
  ENSG00000155099_19 (sequence is synthesized)
gtactattttcaaatggttttatttttaaaatatagtttttaaatccatttgtaatacacttgatgttaggtataaaataatcttacttcttttcctaatggttaactagttgtaacagc

SEQ ID NO: 447912 - DNA, 120 bp, Artificial Sequence
  ENSG00000155099_20 (sequence is synthesized)
agttgtaacagcattgtatactgaataatccattctttccctcattgattggaaagctcacattaaattatatgctatgtcatattccttctggaataataactttatgagagcaagaac

SEQ ID NO: 447913 - DNA, 120 bp, Artificial Sequence
  ENSG00000155099_21 (sequence is synthesized)
cctggtagtcttgttcacagctttatccccacttagaacagttcttagtgtacatgtgctcaatttacgtgaatgaatatgcatgaatgaataaatggttgaatgaattgctattttaaa

SEQ ID NO: 447914 - DNA, 120 bp, Artificial Sequence
  ENSG00000155100_0 (sequence is synthesized)
gcgcacgcgcagcaccccatttaagtttctcgtctttgcagtggctttgcttagatccggtgccgccttgaaggcggggctgggtcccagccgtagccaatggagccccgggtgagggtt

SEQ ID NO: 447915 - DNA, 120 bp, Artificial Sequence
  ENSG00000155100_1 (sequence is synthesized)
gaggggtggaaggtgcctactagccggtgcaggtttcttctagcgcgtgtgctggggtacctggtcgtcatggaggcggtattgaccgaagagcttgatgaggaagagcagctgctgaga

SEQ ID NO: 447916 - DNA, 120 bp, Artificial Sequence
  ENSG00000155100_2 (sequence is synthesized)
aggcatcgcaaagagaagaaggagttgcaagccaaaattcagggcatgaagaatgctgttcccaagaatgacaagaagaggaggaagcaactcaccgaagatgtggccaagttggaaaaa

SEQ ID NO: 447917 - DNA, 120 bp, Artificial Sequence
  ENSG00000155100_3 (sequence is synthesized)
gaaatggaacagaaacatagagaggaactggagcaattgaagctgactactaaggagaataagatagattctgttgctgttaacatttcaaacttggtgcttgagaatcagccacctcgg

SEQ ID NO: 447918 - DNA, 120 bp, Artificial Sequence
  ENSG00000155100_4 (sequence is synthesized)
atatcaaaagcacaaaagagacgggaaaagaaagctgcattggaaaaggagcgagaagaacggatagctgaagctgaaattgaaaacttaacaggagccagacatatggaaagtgagaaa

SEQ ID NO: 447919 - DNA, 120 bp, Artificial Sequence
  ENSG00000155100_5 (sequence is synthesized)
cttgctcaaatattggcagctagacagttagaaattaaacagattccatctgatggccactgtatgtataaagccattgaagatcaactgaaagaaaaggattgtgctctgactgtggtt

SEQ ID NO: 447920 - DNA, 120 bp, Artificial Sequence
  ENSG00000155100_6 (sequence is synthesized)
gccttgagaagtcagaccgctgagtatatgcaaagccatgtggaagactttctgccatttttaacaaaccctaatacaggagatatgtatactccagaagaatttcagaagtactgtgaa

SEQ ID NO: 447921 - DNA, 120 bp, Artificial Sequence
  ENSG00000155100_7 (sequence is synthesized)
gatattgtaaacacagctgcatggggaggtcagcttgagctaagagctctgtctcacattttacaaacaccaatagagataatacaggcagattctcctcccattatagttggtgaagaa

SEQ ID NO: 447922 - DNA, 120 bp, Artificial Sequence
  ENSG00000155100_8 (sequence is synthesized)
tattcaaaaaaaccactaatacttgtatatatgagacatgcatatggcttaggagaacattataattcggttacacggttggtaaacatagttactgaaaattgcagctaatttatacaa

SEQ ID NO: 447923 - DNA, 120 bp, Artificial Sequence
  ENSG00000155100_9 (sequence is synthesized)
tgttgtacaattatgttttaatacagtgtgctgaactgagtatttctaccaagtgttgggttgttctaaatgctactgaaaaacacaactaccttatatcagttttatggcaaagctact

SEQ ID NO: 447924 - DNA, 120 bp, Artificial Sequence
  ENSG00000155100_10 (sequence is synthesized)
aacaggtgtttttagaaatatgtcagagataaactttaaccagtgtcttcttagtggaattttaaaaatttgttaagttcattgtagagaacaccattcatagaccaagatggtccccta

SEQ ID NO: 447925 - DNA, 120 bp, Artificial Sequence
  ENSG00000155100_11 (sequence is synthesized)
ttagctgatattttcatttatgtaagatcctggacattctgttttgtgttggaacaaattttcaatgtttttaattctcccttttctgcctgttcctaaaaactttcaaaataaccattt

SEQ ID NO: 447926 - DNA, 120 bp, Artificial Sequence
  ENSG00000155100_12 (sequence is synthesized)
caatgtaatttgtcttgaagaagtttacccaatatctttgtcattgcaataatgtagtatggtgatggtcaatttaattattgcttataaaatgaacttgattgcagtaaccatggtatc

SEQ ID NO: 447927 - DNA, 120 bp, Artificial Sequence
  ENSG00000155100_13 (sequence is synthesized)
taagaagcttgctttaataattaataatttaaaaatatttatttagatgggattcagttgtttaaagaagtgagataaattcaaaggtaaataggtattctctgtcaaatttaaatctct

SEQ ID NO: 447928 - DNA, 120 bp, Artificial Sequence
  ENSG00000155100_14 (sequence is synthesized)
aaagaattagagattagttttttatttgtgtataatttaaaaaagacctaataggttactgtctttttaatgcatttgttattctttcgtattttttaagcatcggactggagttagtac

SEQ ID NO: 447929 - DNA, 120 bp, Artificial Sequence
  ENSG00000155100_15 (sequence is synthesized)
catcatctcttgagtctttcataactacacatttttatatttccttttgtgttttctactttgctttccttgaaggaacaagcattttgtggcctttaccttgtgcaattttagggagta

SEQ ID NO: 447930 - DNA, 120 bp, Artificial Sequence
  ENSG00000155100_16 (sequence is synthesized)
gcagtgtaaaaggtccaagaccacatttacttgaaattcttcctcttttctgatttgtcttaccagatatttcccttcttgcctcattctctaggatttgaataaaacctttgccactta

SEQ ID NO: 447931 - DNA, 120 bp, Artificial Sequence
  ENSG00000155100_17 (sequence is synthesized)
ttttattagccttattaatgtcacctttccttcaactcaaatatttgagaaattttatgttacatatatgaatgaagttgaaagctactgtttggaagctaagacttgtatagagtagtt

SEQ ID NO: 447932 - DNA, 120 bp, Artificial Sequence
  ENSG00000155100_18 (sequence is synthesized)
ttgtatatgaatggttgttctagctcagatttcaggttactcacaacagtattctttctaagaggatatatacaaatgtctctcataatttatgtaaggaaatattatgaaaatgagact

SEQ ID NO: 447933 - DNA, 120 bp, Artificial Sequence
  ENSG00000155100_19 (sequence is synthesized)
tttttagtttgatgtgtgtttcccaaactagagataaaactagtaagatttagtatcgtttataacatttgaatttttgctccatgagtacaactaatttttataagtaaatattgggtt

SEQ ID NO: 447934 - DNA, 120 bp, Artificial Sequence
  ENSG00000155100_20 (sequence is synthesized)
tatatgaaaaatggggtgtcagtcttttcacacgcccagcaggtaacaatgtgggaagctggcagggtcattgatagcaagtaagtacttcctgaaggctttccagttcaaaagattaca

SEQ ID NO: 447935 - DNA, 120 bp, Artificial Sequence
  ENSG00000155100_21 (sequence is synthesized)
agccattctgcctgccaaacaaattatattctgaagatgcctgttttgtaacccttgatgtgaattttttggtgtctgaaatttacaaaagaatgaaattgaaattgtaaaacactaaat

SEQ ID NO: 447936 - DNA, 120 bp, Artificial Sequence
  ENSG00000155100_22 (sequence is synthesized)
gctttgggtttattttgaagtaatctgttactttaaaatgtcaacattaggaagccataaaacaagatattatgaaacccagtattataaatgttatctacatctaaagtattttaaaat

SEQ ID NO: 447937 - DNA, 120 bp, Artificial Sequence
  ENSG00000155100_23 (sequence is synthesized)
aacttattggcagctttattctttttttccttacaagatttagaatctttttggttatatgtctatttttcaattttgttatatttttaatttaagtggccaatgtggttatgaacaaga

SEQ ID NO: 447938 - DNA, 120 bp, Artificial Sequence
  ENSG00000155100_24 (sequence is synthesized)
tttgtatggtcagcttctgttctttcctaaaacttcagataaatatcattttagctataacctaaaaaagtgtttaaataaaatgacagatgttaatttaaaagcagcatatgctaattt

SEQ ID NO: 447939 - DNA, 120 bp, Artificial Sequence
  ENSG00000155100_25 (sequence is synthesized)
actttttcatatgatgatggtctaatggaagttacatatgctttcttttgtcctaactctgaaaagtatatgtcagagttctggaatatgtctttagccaagaattttattcacttaaat

SEQ ID NO: 447940 - DNA, 120 bp, Artificial Sequence
  ENSG00000155100_26 (sequence is synthesized)
ttgtttacaacttgtataaagcaaaaaagaatgtgtgtaactatagtgaacgcatagttttgcttatattatgtgatgtttgccaaaaaaagaataaaaaatgaatgaattaaatcaaca

SEQ ID NO: 447941 - DNA, 120 bp, Artificial Sequence
  ENSG00000155100_27 (sequence is synthesized)
atatcaaaagcacaaaagagacgggtgcctggatagaaggagctctctgtgttgtccttggtccctgctctgctcttaccagctgtatggcctttggaaatctttctgcgtgctgtttcc

SEQ ID NO: 447942 - DNA, 120 bp, Artificial Sequence
  ENSG00000155100_28 (sequence is synthesized)
ggtgcttcccagcactgagcgtaagaagaacccagatgatccttatgaggaaaaaacatcacaagatttaggcagaattattttctgtaattttaatagatgttggtgtatttttctcta

SEQ ID NO: 447943 - DNA, 120 bp, Artificial Sequence
  ENSG00000155100_29 (sequence is synthesized)
aattacttagttattttgtaattataatatgctaatcattttatgtaagatagaagtaggaataagagtcatttttgaaaaaaatgtaagttcttatttgacaaagtgaagtattgagga

SEQ ID NO: 447944 - DNA, 120 bp, Artificial Sequence
  ENSG00000155100_30 (sequence is synthesized)
aagtattgaggaaggtaagcttcaggaagtatatatagggtctgaagaccataaggagagaatgactaggaaaaccatttcctgcttttatcttataatttgggaactttacttttattt

SEQ ID NO: 447945 - DNA, 120 bp, Artificial Sequence
  ENSG00000155100_31 (sequence is synthesized)
acaataagctataattaggaagattagtgttcaagtaaaacaaatgggttaataacctgctttattctatacaatactatcacagttaagataaaatatttatgaggaagtaaaaaagta

SEQ ID NO: 447946 - DNA, 120 bp, Artificial Sequence
  ENSG00000155111_0 (sequence is synthesized)
agtgagttcgctaatgagctcgaggaagccacggcgcggcccaccaggttccaaaacaaggaaatgaaggagggaggcgggactgggggtgcctgcgggagccgccgccgccgtcgcgga

SEQ ID NO: 447947 - DNA, 120 bp, Artificial Sequence
  ENSG00000155111_1 (sequence is synthesized)
ggaggaggaggaagaggtggaggaggtggctgctgtggccgccgaggagtcccttgctgaaggcggaccgcggagcggcgggcggcgggcggcgcgcgcgcgcgcgcgagaggcggctgt

SEQ ID NO: 447948 - DNA, 120 bp, Artificial Sequence
  ENSG00000155111_2 (sequence is synthesized)
tggagaagtggagcggcggtcgcggggggaggaggaggagggactgagcggcggcggcccccgcgtcccgtgcctctatgggggaagcagacaatggattatgatttcaaggcgaagctg

SEQ ID NO: 447949 - DNA, 120 bp, Artificial Sequence
  ENSG00000155111_3 (sequence is synthesized)
gcggcggagcgggagcgggtggaggatttgtttgagtacgaagggtgcaaagtgggacgcggcacctacggtcacgtctacaaggcgaggcggaaagatggaaaagatgaaaaggaatat

SEQ ID NO: 447950 - DNA, 120 bp, Artificial Sequence
  ENSG00000155111_4 (sequence is synthesized)
gcattgaagcaaattgaaggcacaggaatatccatgtcggcttgtagagagattgcacttttgcgagaattgaagcaccctaatgtgattgcattgcagaaggtgttcctttctcacagt

SEQ ID NO: 447951 - DNA, 120 bp, Artificial Sequence
  ENSG00000155111_5 (sequence is synthesized)
gacaggaaggtatggctgctgtttgattatgcagagcatgacttgtggcatattattaagtttcaccgtgcatcaaaagcaaataaaaagcccatgcagttgccaagatctatggttaaa

SEQ ID NO: 447952 - DNA, 120 bp, Artificial Sequence
  ENSG00000155111_6 (sequence is synthesized)
tccttactttaccagattcttgatggtatccattacctccatgcaaattgggtgcttcacagagacttgaaaccagcaaatatcctagtaatgggagaaggtcctgagagggggagagtc

SEQ ID NO: 447953 - DNA, 120 bp, Artificial Sequence
  ENSG00000155111_7 (sequence is synthesized)
aaaatagctgacatgggttttgccagattattcaattctcctctaaagccactagcagatttggatccagtagttgtgacattttggtatcgggctccagaacttttgcttggtgcaagg

SEQ ID NO: 447954 - DNA, 120 bp, Artificial Sequence
  ENSG00000155111_8 (sequence is synthesized)
cattatacaaaggccattgatatatgggcaataggttgtatatttgctgaattgttgacttcggaacctatttttcactgtcgtcaggaagatataaaaacaagcaatccctttcatcat

SEQ ID NO: 447955 - DNA, 120 bp, Artificial Sequence
  ENSG00000155111_9 (sequence is synthesized)
gatcaactggatcggatatttagtgtcatggggtttcctgcagataaagactgggaagatattagaaagatgccagaatatcccacacttcaaaaagactttagaagaacaacgtatgcc

SEQ ID NO: 447956 - DNA, 120 bp, Artificial Sequence
  ENSG00000155111_10 (sequence is synthesized)
aacagtagcctcataaagtacatggagaaacacaaggtcaagcctgacagcaaagtgttcctcttgcttcagaaactcctgaccatggatccaaccaagagaattacctcggagcaagct

SEQ ID NO: 447957 - DNA, 120 bp, Artificial Sequence
  ENSG00000155111_11 (sequence is synthesized)
ctgcaggatccctattttcaggaggaccctttgccaacattagatgtatttgccggctgccagattccataccccaaacgagaattccttaatgaagatgatcctgaagaaaaaggtgac

SEQ ID NO: 447958 - DNA, 120 bp, Artificial Sequence
  ENSG00000155111_12 (sequence is synthesized)
aagaatcagcaacagcagcagaaccagcatcagcagcccacagcccctccacagcaggcagcagcccctccacaggcgcccccaccacagcagaacagcacccagaccaacgggaccgca

SEQ ID NO: 447959 - DNA, 120 bp, Artificial Sequence
  ENSG00000155111_13 (sequence is synthesized)
ggtggggctggggccggggtcgggggcaccggagcagggttgcagcacagccaggactccagcctgaaccaggtgcctccaaacaagaagccacggctagggccttcaggcgcaaactca

SEQ ID NO: 447960 - DNA, 120 bp, Artificial Sequence
  ENSG00000155111_14 (sequence is synthesized)
ggtggacctgtgatgccctcggattatcagcactccagttctcgcctgaattaccaaagcagcgttcagggatcctctcagtcccagagcacacttggctactcttcctcgtctcagcag

SEQ ID NO: 447961 - DNA, 120 bp, Artificial Sequence
  ENSG00000155111_15 (sequence is synthesized)
agctcacagtaccacccatctcaccaggcccaccggtactgaccagctcccgttgggccaggccagcccagcccagagcacaggctccagcaatatgtctgcattgaaaagaaccaaaaa

SEQ ID NO: 447962 - DNA, 120 bp, Artificial Sequence
  ENSG00000155111_16 (sequence is synthesized)
aatgcaaactatgatgccatttaaaactcatacacatgggaggaaaaccttatatactgagcattgtgcaggactgatagctcttctttattgacttaaagaagattcttgtgaagtttc

SEQ ID NO: 447963 - DNA, 120 bp, Artificial Sequence
  ENSG00000155111_17 (sequence is synthesized)
cccagcaccccttccctgcatgtgttccattgtgacttctctgataaagcgtctgatctaatcccagcacttctgtaaccttcagcatttctttgaaggatttcctggtgcacctttctc

SEQ ID NO: 447964 - DNA, 120 bp, Artificial Sequence
  ENSG00000155111_18 (sequence is synthesized)
atgctgtagcaatcactatggtttatcttttcaaagctcttttaataggattttaatgttttagaaacaggattccagtggtgtatagttttatacttcatgaactgatttagcaacaca

SEQ ID NO: 447965 - DNA, 120 bp, Artificial Sequence
  ENSG00000155111_19 (sequence is synthesized)
ggtaaaaatgcaccttttaaagcactacgttttcacagacaataactgttctgctcatggaagtcttaaacagaaactgttactgtcccaaagtactttactattacgttcgtatttatc

SEQ ID NO: 447966 - DNA, 120 bp, Artificial Sequence
  ENSG00000155111_20 (sequence is synthesized)
tagtttcagggaaggtctaataaaaagacaagcggtgggacagagggaacctacaaccaaaaactgcctagatctttgcagttatgtgctttatgccacgaagaactgaagtatgtggta

SEQ ID NO: 447967 - DNA, 120 bp, Artificial Sequence
  ENSG00000155111_21 (sequence is synthesized)
atttttatagaatcattcatatggaactgagttcccagcatcatcttattctgaatagcattcagtaattaagaattacaattttaaccttcatgtagctaagtctaccttaaaaagggt

SEQ ID NO: 447968 - DNA, 120 bp, Artificial Sequence
  ENSG00000155111_22 (sequence is synthesized)
ttcaagagctttgtacagtctcgatggcccacaccaaaacgctgaagagagtaacaactgcactaggatttctgtaaggagtaattttgatcaaaagacgtgttacttccctttgaagga

SEQ ID NO: 447969 - DNA, 120 bp, Artificial Sequence
  ENSG00000155111_23 (sequence is synthesized)
aaagtttttagtgtgtattgtacataaagtcggcttctctaaagaaccattggtttcttcacatctgggtctgcgtgagtaactttcttgcataatcaaggttactcaagtagaagcctg

SEQ ID NO: 447970 - DNA, 120 bp, Artificial Sequence
  ENSG00000155111_24 (sequence is synthesized)
aaaattaatctgcttttaaaataaagagcagtgttctccattcgtatttgtattagatatagagtgactatttttaaagcatgttaaaaatttaggttttattcatgtttaaagtatgta

SEQ ID NO: 447971 - DNA, 120 bp, Artificial Sequence
  ENSG00000155111_25 (sequence is synthesized)
ttatgtatgcataattttgctgttgttactgaaacttaattctatcaagaatctttttcattgcactgaatgatttcttttgcccctaggagaaaacttaataattgtgcctaaaaacta

SEQ ID NO: 447972 - DNA, 120 bp, Artificial Sequence
  ENSG00000155111_26 (sequence is synthesized)
tttgcatttccattatctatgaattagtggctgagttctttcttagctgctttaaggagcccctcactccccagagtcaaaaggaaatgtaaaaacttagagctcccattgtaatgtaag

SEQ ID NO: 447973 - DNA, 120 bp, Artificial Sequence
  ENSG00000155111_27 (sequence is synthesized)
gggcaagaaatttgtgttcttctgaatgctactagcagcaccagccttgttttaaatgttttcttgagctagaagaaatagctgattattgtatatgcaaattacatgcatttttaaaaa

SEQ ID NO: 447974 - DNA, 120 bp, Artificial Sequence
  ENSG00000155111_28 (sequence is synthesized)
ctattctttctgaacttatctacctggttatgatactgtgggtccatacacaagtaaaataagattagacagaagccagtatacattttgcactattgatgtgatactgtagccagccag

SEQ ID NO: 447975 - DNA, 120 bp, Artificial Sequence
  ENSG00000155111_29 (sequence is synthesized)
gaccttactgatctcagcataataatgctcactaataatgaagtctgcatagtgacactcatcaagactgaagatgaagcaggttacgtgctccattggaaggagtttctgatagtctcc

SEQ ID NO: 447976 - DNA, 120 bp, Artificial Sequence
  ENSG00000155111_30 (sequence is synthesized)
tgctgttttaccccttccattttttaaaataagaaattagcagccctctgcataatgtagctgcctatatgcagttttatcctgtgccctaaagcctcactgtccagagctgttggtcat

SEQ ID NO: 447977 - DNA, 120 bp, Artificial Sequence
  ENSG00000155111_31 (sequence is synthesized)
cagatgcttattgcaccctcaccatgtgcctggtgccctgctgggtagagaacacagaggacagggcatacttcttgtccttaaggagcttgtgatctgtgacagtaagccctcctggga

SEQ ID NO: 447978 - DNA, 120 bp, Artificial Sequence
  ENSG00000155111_32 (sequence is synthesized)
tgtctgtgccatgtgattgacttacaagtgaaactgtcttataatatgaaggtctttttgtttacttctaaacccacttgggtagttactatccccaaatctgttctgtaaataatatta

SEQ ID NO: 447979 - DNA, 120 bp, Artificial Sequence
  ENSG00000155111_33 (sequence is synthesized)
tggaagggtttctatgtcagtctaccttagagaaagccagtgattcaatatcacaaaaggcattgacgtatctttgaaatgttcacagcagccttttaacaacaactgggtggtccttgt

SEQ ID NO: 447980 - DNA, 120 bp, Artificial Sequence
  ENSG00000155111_34 (sequence is synthesized)
aggcagaacatactctcctaagtggttgtaggaaattgcaaggaaaatagaaggtctgttcttgctctcaaggaggttacctttaataaaagaagacaaacccagatagatatgtaaacc

SEQ ID NO: 447981 - DNA, 120 bp, Artificial Sequence
  ENSG00000155111_35 (sequence is synthesized)
aaaatactatgccccttaatactttataagcagcattgttaaatagttcttacgcttatacattcacagaactaccctgttttccttgtatataatgacttttgctggcagaactgaaat

SEQ ID NO: 447982 - DNA, 120 bp, Artificial Sequence
  ENSG00000155111_36 (sequence is synthesized)
ataaactgtaaggggatttcgtcagttgctcccagtatacaatatcctccaggacatagccagaaatctccattccacacatgactgagttcctatccctgcactggtactggctctttt

SEQ ID NO: 447983 - DNA, 120 bp, Artificial Sequence
  ENSG00000155111_37 (sequence is synthesized)
ctcctctttccttgcctcagggttcgtgctacccactgattccctttacccttagtaataattttggatcattttctttcctttaaaggggaacaaagccttttttttttttgagacgga

SEQ ID NO: 447984 - DNA, 70 bp, Artificial Sequence
  ENSG00000155111_38 (sequence is synthesized)
ttagtagagatggggtttcaccctattggtcaggctggtcttgaattcctcacctcaggtcatccgcctg

SEQ ID NO: 447985 - DNA, 120 bp, Artificial Sequence
  ENSG00000155111_39 (sequence is synthesized)
gattataggtgtgagccaccgcacccagttgggaacaaagcctttttaacacacgtaagggccctcaaaccgtgggacctctaaggagacctttgaagctttttgagggcaaactttacc

SEQ ID NO: 447986 - DNA, 120 bp, Artificial Sequence
  ENSG00000155111_40 (sequence is synthesized)
tacctttgtggtccccaaatgatggcatttctctttgaaatttattagatactgttatgtcccccaagggtacaggaggggcatccctcagcctatgggaacacccaaactaggaggggt

SEQ ID NO: 447987 - DNA, 120 bp, Artificial Sequence
  ENSG00000155111_41 (sequence is synthesized)
tattgacaggaaggaatgaatccaagtgaaggctttctgctcttcgtgttacaaaccagtttcagagttagctttctggggaggtgtgtgtttgtgaaaggaattcaagtgttgcaggac

SEQ ID NO: 447988 - DNA, 120 bp, Artificial Sequence
  ENSG00000155111_42 (sequence is synthesized)
agatgagctcaaggtaaggtagctttggcagcagggctgatactatgaggctgaaacaatccttgtgatgaagtagatcatgcagtgacatacaaagaccaaggattatgtatattttta

SEQ ID NO: 447989 - DNA, 120 bp, Artificial Sequence
  ENSG00000155111_43 (sequence is synthesized)
tatctctgtggttttgaaactttagtacttagaattttggccttctgcactactcttttgctcttacgaacataatggactcttaagaatggaaagggatgacatttacctatgtgtgct

SEQ ID NO: 447990 - DNA, 120 bp, Artificial Sequence
  ENSG00000155111_44 (sequence is synthesized)
gcctcattcctggtgaagcaactgctacttgttctctatgcctctaaaatgatgctgttttctctgctaaaggtaaaagaaaagaaaaaaatagttggaaaataagacatgcaacttgat

SEQ ID NO: 447991 - DNA, 120 bp, Artificial Sequence
  ENSG00000155111_45 (sequence is synthesized)
gtgcttttgagtaaatttatgcagcagaaactatacaatgaaggaagaattctatggaaattacaaatccaaaactctatgatgatgtcttcctagggagtagagaaaggcagtgaaatg

SEQ ID NO: 447992 - DNA, 120 bp, Artificial Sequence
  ENSG00000155111_46 (sequence is synthesized)
gcagttagaccaacagaggcttgaaggattcaagtacaagtaatattttgtataaaacatagcagtttaggtccccataatcctcaaaaatagtcacaaatataacaaagttcattgttt

SEQ ID NO: 447993 - DNA, 120 bp, Artificial Sequence
  ENSG00000155111_47 (sequence is synthesized)
tagggtttttaaaaaacgtgttgtacctaaggccatacttactcttctatgctatcactgcaaaggggtgatatgtatgtattatataaaaaaaaaaacccttaatgcactgttatctcc

SEQ ID NO: 447994 - DNA, 120 bp, Artificial Sequence
  ENSG00000155111_48 (sequence is synthesized)
taaatatttagtaaattaatactatttaatttttttaaagatttgtctgtgtagacactaaaagtattacacaaaatctggactgaaggtgtcctttttaacaacaatttaaagtacttt

SEQ ID NO: 447995 - DNA, 120 bp, Artificial Sequence
  ENSG00000155111_49 (sequence is synthesized)
ttatatatgttatgtagtatatcctttctaaactgcctagtttgtatattcctataattcctatttgtgaagtgtacctgttcttgtctcttttttcagtcattttctgcacgcatcccc

SEQ ID NO: 447996 - DNA, 120 bp, Artificial Sequence
  ENSG00000155111_50 (sequence is synthesized)
ctttatatggttatagagatgactgtagcttttcgtgctccactgcgaggtttgtgctcagagccgctgcaccccagcgaggcctgctccatggagtgcaggacgagctactgctttgga

SEQ ID NO: 447997 - DNA, 120 bp, Artificial Sequence
  ENSG00000155111_51 (sequence is synthesized)
gcgagggtttcctgcttttgagttgacctgacttccttcttgaaatgactgttaaaactaaaataaattacattgcatttattttatattcttggttgaaataaaatttaattgactttg

SEQ ID NO: 447998 - DNA, 120 bp, Artificial Sequence
  ENSG00000155111_52 (sequence is synthesized)
agcgggtggaggatttgtttgagtacgaagggtgcaaagtgggacgcggcacctacggtcacgtctacaaggcgaggcggaaagatggattccaggagggcttcgtgtatggacctcaag

SEQ ID NO: 447999 - DNA, 120 bp, Artificial Sequence
  ENSG00000155111_53 (sequence is synthesized)
tttcaaggcgaagctggcggcggagcgggagcgggtggaggatttgtttgagtacgaagggtgcaaagtgggacgcggcacctacggtcacgtctacaaggcgaggcggaaagatgggag

SEQ ID NO: 448000 - DNA, 120 bp, Artificial Sequence
  ENSG00000155111_54 (sequence is synthesized)
ttgagggagaactgtaggaacaccttgggaagcctttactggttgtcctcttaagaagagctggataatgtactgagaatacctgtcctttcttggtcctggagggcagacagcagctac

SEQ ID NO: 448001 - DNA, 120 bp, Artificial Sequence
  ENSG00000155111_55 (sequence is synthesized)
agcaggactggtggaaccagcttcctggcaggaattaccctcccccaaagctagggacccaggaagatgccctgtccagcatagactttaaagagagtcaaactctacggaagaggattg

SEQ ID NO: 448002 - DNA, 120 bp, Artificial Sequence
  ENSG00000155111_56 (sequence is synthesized)
taacggaccatttctgaataaagtgatgatcagccacaatgacattagtaaaatttgaagtgccgcttatctttgtgcgtgctgttataatttgatgtggttggtatatgaactctagga

SEQ ID NO: 448003 - DNA, 120 bp, Artificial Sequence
  ENSG00000155111_57 (sequence is synthesized)
aagtacgttgtgtgcgtatgcactaacttcataaaacaactctattataaagtgttttgtcataaggtatcgtgaaaattgcaaagtgctatccaagtgtaaaggattattattattgca

SEQ ID NO: 448004 - DNA, 120 bp, Artificial Sequence
  ENSG00000155111_58 (sequence is synthesized)
gaattttttttttcttttgtaactgaacaggccttaaggtactcagttgtttctcataattcctttaattaccaggtgtccttgaatgcttatcatggaatgtgagatactataattaac

SEQ ID NO: 448005 - DNA, 120 bp, Artificial Sequence
  ENSG00000155111_59 (sequence is synthesized)
atattttggttttggaatatccactccacctgttatactagtgttcttgtgggaattttatcagttatatttggggaaagcacatccagttttccgtttggacattgttaataaatctga

SEQ ID NO: 448006 - DNA, 120 bp, Artificial Sequence
  ENSG00000155111_60 (sequence is synthesized)
ggtgggtttttcccatactcctcatgctaactttgtggtatacttttggttttaaaaaatgtatcttagtgttttttttgttaaaatagctttcttttattagggaacttttgagaagtt

SEQ ID NO: 448007 - DNA, 120 bp, Artificial Sequence
  ENSG00000155111_61 (sequence is synthesized)
aaaaattctgcttctgaattgtatttgaatagtatgggcttacaacaaaaaccagataattcttgcttctattctttttgaatatttttcccctctaataaagtacttgattcgaataca

SEQ ID NO: 448008 - DNA, 120 bp, Artificial Sequence
  ENSG00000155111_62 (sequence is synthesized)
agggggaggggcggccctggtacgcaggcgcgcatgctttgtgggggcgaggctgtggtggcccgagattccaggagggcttcgtgtatggacctcaagcgttggaggtagcagactttt

SEQ ID NO: 448009 - DNA, 120 bp, Artificial Sequence
  ENSG00000155111_63 (sequence is synthesized)
aggacgtcattctccagcccccgccaatgagcagcgggacggggggcggggcaataggcggacccactgccctagaaaagaaacaagctgcggtacaactgtcctcaccagccctcgcct

SEQ ID NO: 448010 - DNA, 120 bp, Artificial Sequence
  ENSG00000155115_0 (sequence is synthesized)
gtactcaagatggcggctccgggcgggcgtggccagtgactagaaggcgaggcgccgcgggaccatggcggcggcggcggacgagcggagtccagaggacggagaagacgaggaagagga

SEQ ID NO: 448011 - DNA, 120 bp, Artificial Sequence
  ENSG00000155115_1 (sequence is synthesized)
ggagcagttggttctggtggaattatcaggaattattgattcagacttcctctcaaaatgtgaaaataaatgcaaggttttgggcattgacactgagaggcccattctgcaagtggacag

SEQ ID NO: 448012 - DNA, 120 bp, Artificial Sequence
  ENSG00000155115_2 (sequence is synthesized)
ctgtgtctttgctggggagtatgaagacactctagggacctgtgttatatttgaagaaaatgttgaacatgctgatacagaaggcaataataaaacagtgctaaaatataaatgccatac

SEQ ID NO: 448013 - DNA, 120 bp, Artificial Sequence
  ENSG00000155115_3 (sequence is synthesized)
gggtggaatggctgcaaataaaggataatgatttctcctatcgacccaacatgatttgtaactttctacatgaaaatgaagacgaagaagtggtagcttcagccccagataaatctttgg

SEQ ID NO: 448014 - DNA, 120 bp, Artificial Sequence
  ENSG00000155115_4 (sequence is synthesized)
aattggaagaggaagagattcaaatgaacgacagttcaaacctgagttgtgaacaggagaaaccaatgcacttggaaatagaagattctggtcctcttattgatataccttctgagacag

SEQ ID NO: 448015 - DNA, 120 bp, Artificial Sequence
  ENSG00000155115_5 (sequence is synthesized)
aaggttctgtttttatggaaactcaaatgctgccttagaaatcactcctagatgaaatgtttctcataataacttgtcaagaactttttagagttgttacataaaaataattgctgtgta

SEQ ID NO: 448016 - DNA, 120 bp, Artificial Sequence
  ENSG00000155158_0 (sequence is synthesized)
aagtggcccggccagcggcgcggcgtccggggaggaaatggatgctgtgctggcctgccggctccgggggcggggaaatcgagtagctgcactcaggccccgcccgagacccggagggag

SEQ ID NO: 448017 - DNA, 120 bp, Artificial Sequence
  ENSG00000155158_1 (sequence is synthesized)
cgccgggccgtccccttttgccctcctttgcgctgggctgagcccagagccgagagcaggagtcggctctgagttccctgcttggtttttgggtggcagcagccagaggaggaatatggc

SEQ ID NO: 448018 - DNA, 120 bp, Artificial Sequence
  ENSG00000155158_2 (sequence is synthesized)
gctcttaggcagccgagcggagctggaagcggacgaggacgttttcgaagatgccttggaaaccatctcaatatcttctcactcagatatggcaacaagcagccttcactttgcatcatg

SEQ ID NO: 448019 - DNA, 120 bp, Artificial Sequence
  ENSG00000155158_3 (sequence is synthesized)
tgatacacaacaggcgcccagacagcgcggagcgtctactgtcagcagttcatcatcaaccaaggtggatctcaagagtggcctcgaagaatgtgctgtggcattgaacttatttctaag

SEQ ID NO: 448020 - DNA, 120 bp, Artificial Sequence
  ENSG00000155158_4 (sequence is synthesized)
caacaaatttacagacgccttagaattgcttcgcccctgggctaaggagagtatgtaccatgccttgggctacagtaccattgtggtgttgcaggctgtcctgaccttcgagcaacagga

SEQ ID NO: 448021 - DNA, 120 bp, Artificial Sequence
  ENSG00000155158_5 (sequence is synthesized)
catccagaacggcatttctgccatgaaggacgctttacaaacctgccaaaaatacaggaaaaaatacacagttgtagaatctttctcaagtcttctttctagaggatccctggagcaact

SEQ ID NO: 448022 - DNA, 120 bp, Artificial Sequence
  ENSG00000155158_6 (sequence is synthesized)
gagtgaagaggaaatgcatgctgaaatctgttatgccgagtgtctcctacagaaagctgcactcacgtttgtgcaggatgaaaatatgatcaacttcatcaaaggtggactcaaaattag

SEQ ID NO: 448023 - DNA, 120 bp, Artificial Sequence
  ENSG00000155158_7 (sequence is synthesized)
aacaagttaccaaatatataaagaatgtctttctatcctgcatgaaattcagaagaacaaacttcagcaggaattcttctatgagtttgaagggggtgtcaagcttggcagtggggcctt

SEQ ID NO: 448024 - DNA, 120 bp, Artificial Sequence
  ENSG00000155158_8 (sequence is synthesized)
taatttgatgctgtcccttttaccagcaaggattatcagactactagaatttattggattttctgggaatagggagttgggcctcctgcagttacgtgaaggtgcttcaggaaggagcat

SEQ ID NO: 448025 - DNA, 120 bp, Artificial Sequence
  ENSG00000155158_9 (sequence is synthesized)
gaggtctgcactgtgctgcttaaccatcttagcttttcatacttacatctccctaatacttggtacaggagaagtgaatgttgcggaagcagagcgtctcctggcacccttcctccagca

SEQ ID NO: 448026 - DNA, 120 bp, Artificial Sequence
  ENSG00000155158_10 (sequence is synthesized)
gtttccaaatggctcactcgtgttgttttatcatgcccgaatagagttgctgaaagggaatcttgaagaggcacaagaagtatttcaaaaatgcatttcagttcaagaagaatggaaaca

SEQ ID NO: 448027 - DNA, 120 bp, Artificial Sequence
  ENSG00000155158_11 (sequence is synthesized)
gtttcaccatctctgctactgggagctaatgtggattaatgttttccaacaaaactggatgcaggcatattactattcagatctgctttgcaaagagagtaaatggtccaaggcaactta

SEQ ID NO: 448028 - DNA, 120 bp, Artificial Sequence
  ENSG00000155158_12 (sequence is synthesized)
tgtgttcttgaaagcagcaattttgagtatgcttccagaggaggatgtagtagcaacgaatgagaatgtggtaactttattcagacaggtggacagcttgaagcagagaattgccgggaa

SEQ ID NO: 448029 - DNA, 120 bp, Artificial Sequence
  ENSG00000155158_13 (sequence is synthesized)
atctatccctactgagaagtttgctgtgaggaaggctcggcgttactccgcctccttacctgcacctgtgaagctcatcttacctgccctggaaatgatgtatgtctggaatggtttttc

SEQ ID NO: 448030 - DNA, 120 bp, Artificial Sequence
  ENSG00000155158_14 (sequence is synthesized)
aatagtgagcaaaagaaaagacctttctgaaaatctgttagtaactgttgaaaaagctgaggcagctttacaaagtcaaaattttaacagcttctctgtggatgatgagtgcttagtgaa

SEQ ID NO: 448031 - DNA, 120 bp, Artificial Sequence
  ENSG00000155158_15 (sequence is synthesized)
gttacttaaaggatgttgcctcaagaacttacagcggcccttgcaagctgaactatgttacaatcatgttgtggaaagtgaaaagctactgaagtatgaccactacctagtgccgttcac

SEQ ID NO: 448032 - DNA, 120 bp, Artificial Sequence
  ENSG00000155158_16 (sequence is synthesized)
tctatttgaattggcatctttgtataaaagccagggggaaattgacaaggccataaagttcctagaaactgcaaggaacaactacaaagattactccctggagtccagactacacttcag

SEQ ID NO: 448033 - DNA, 120 bp, Artificial Sequence
  ENSG00000155158_17 (sequence is synthesized)
aattcaggcagctcttcacctctggagaaaaccttcctcagattgatcagaacttgaaggatggaatttttcctcaattagcatcggcatctgctatagattcaaccttatattaaagtg

SEQ ID NO: 448034 - DNA, 120 bp, Artificial Sequence
  ENSG00000155158_18 (sequence is synthesized)
gaaaaatgatcttgtgaataagagacaaaaaaacagtttttttggtcaatattttctatcatctgagagatttactgttggtctacataattttttttcctatggaatggcattctatat

SEQ ID NO: 448035 - DNA, 120 bp, Artificial Sequence
  ENSG00000155158_19 (sequence is synthesized)
tatctagaaaattcttatattttgcctcccccaaaagaatttcatattatttgaattagggggcgaagaagtcttttgaaagacttgcagatgcaatagtctaattagattatttatttt

SEQ ID NO: 448036 - DNA, 120 bp, Artificial Sequence
  ENSG00000155158_20 (sequence is synthesized)
tttaatgtgaaaattaatattgtttagcaaatagcttacaagttgagccaattttggatttgttgggtagttaaacttcagagatattttgttgcctgtatttaaatttcagaagataaa

SEQ ID NO: 448037 - DNA, 120 bp, Artificial Sequence
  ENSG00000155158_21 (sequence is synthesized)
taaatatcattgcatttaaaatagcttaacagtgaccttcagaagacttctgaaaaagacagtctgagaacatgaacacggatcgatataatgtacttcatgggttgaagagacctttct

SEQ ID NO: 448038 - DNA, 120 bp, Artificial Sequence
  ENSG00000155158_22 (sequence is synthesized)
ctataaaggatgatgcagtattcagttagtggttttttactcttcatttgattaaaggtggtgacgttttggagagactgattttgaatgtacttaagtctattataataacaaaattca

SEQ ID NO: 448039 - DNA, 120 bp, Artificial Sequence
  ENSG00000155158_23 (sequence is synthesized)
aaacccctgtgtatctaaagggaaggaagtgtcatattttaggaatttttcttaaccttagcaatgagagcctaaaatacatacatggattatttttcttctaggaagtaaatttcctgc

SEQ ID NO: 448040 - DNA, 120 bp, Artificial Sequence
  ENSG00000155158_24 (sequence is synthesized)
tgctttaaatgatatgtaaaatatcaataatttttacacttaagatgttggtaagacctagttttctaatctctctagcactgtgatgtctccttgtagataatctggaccttgcttagt

SEQ ID NO: 448041 - DNA, 120 bp, Artificial Sequence
  ENSG00000155158_25 (sequence is synthesized)
cctttagttgggaaacagaatcagggcatagagcagaagagagcttgacactccatatggtcctggttctgctacccattagcgattagtgaggagacctttagggagtccactgtgccc

SEQ ID NO: 448042 - DNA, 120 bp, Artificial Sequence
  ENSG00000155158_26 (sequence is synthesized)
tgtgtgtcaccacattttcttctgtgaaatcaagattaaagaacagatgactttcaaggtctttttcagttttataactgtgagtctatgtattaggtatttattttcaacaaatgactt

SEQ ID NO: 448043 - DNA, 120 bp, Artificial Sequence
  ENSG00000155158_27 (sequence is synthesized)
taaaatgtcgaatgcaaaccattcccacttggagtgttttatttttcaatcatcatcattgcccccaactccccacatgtatgtgttgtggcatccagagtgagaaaagacaatttatga

SEQ ID NO: 448044 - DNA, 120 bp, Artificial Sequence
  ENSG00000155158_28 (sequence is synthesized)
gttgatgaatctgggccttatttctatttccattttgaagaataacttgtcatagaagcctctgcagtttaacagaaggagccacatattgggagtcacgagttcatctctgtgggttaa

SEQ ID NO: 448045 - DNA, 120 bp, Artificial Sequence
  ENSG00000155158_29 (sequence is synthesized)
tagttccatgacacggagtacgtagctcagcttttcaggggttcagttgccccactatggatagcggtgtggtatttggtacttgtgagggctcaattagataaaacatatgatagcttt

SEQ ID NO: 448046 - DNA, 120 bp, Artificial Sequence
  ENSG00000155158_30 (sequence is synthesized)
ttgtaaactgtaaaaggctatacaaaagtatgaattattataataattatggttttttatgtctggattacagtatcaacacaaaagtattggctgatactgtggtttgtgttgtaaaat

SEQ ID NO: 448047 - DNA, 120 bp, Artificial Sequence
  ENSG00000155158_31 (sequence is synthesized)
gaaagaagtgtagaaattcaaataccttactgtgtattcatgtgtttgatgttgacagtaggctacccaggttatatgaacctgctcctgccgttccctgccacatggacctgtatcaag

SEQ ID NO: 448048 - DNA, 120 bp, Artificial Sequence
  ENSG00000155158_32 (sequence is synthesized)
cagtgtgtggcttgttttcttcaaggtactgattcttgaccaacactgaggatgtatatccaatgaaagatagatatcaatggcggtagatatcaatgtgttattagtaatacaacttta

SEQ ID NO: 448049 - DNA, 120 bp, Artificial Sequence
  ENSG00000155158_33 (sequence is synthesized)
ggtacagacaaaatagaaaataaaattaactgtcattataattagtagtggaaaatacattaaaaattatttgtgtatagctttggaaaaaagttttccaaaaaaagctttttggaaaaa

SEQ ID NO: 448050 - DNA, 120 bp, Artificial Sequence
  ENSG00000155158_34 (sequence is synthesized)
agctcttagaagagctttggtaacattatttttgaaagcgcacactcacattgtgactgtgggtatactgagcatatattcttacattgttactgtgagaagctgcaagtcagtgctgca

SEQ ID NO: 448051 - DNA, 120 bp, Artificial Sequence
  ENSG00000155158_35 (sequence is synthesized)
agtcagtaacaaattctcttttggggataaaatgaaacagttttaagcttagagtggccatttttattttaactctgcattactaaacaaatataaaagaaattcatctccatttaaaaa

SEQ ID NO: 448052 - DNA, 120 bp, Artificial Sequence
  ENSG00000155158_36 (sequence is synthesized)
tcttttttgttatttatattttgttttatttttgtttcctattctttatgcagttacctgatactatggacagtatatccagtggatcttttagtactgtaatatcaaaatgctacaaat

SEQ ID NO: 448053 - DNA, 120 bp, Artificial Sequence
  ENSG00000155158_37 (sequence is synthesized)
atttatgtttcctgctatgttcaagatattgtagtggcaccaacttcttgggcatcagctaatattgcattttggagtcattagggtgttctgtgaagaatgaatactgaagtgacagtt

SEQ ID NO: 448054 - DNA, 120 bp, Artificial Sequence
  ENSG00000155158_38 (sequence is synthesized)
ttatctagttttttgaggggcatttatgatggggttgggttgccattgtgtctgacagtgcaattcatgtagttcctggcataattgccttttttttttccttaatggagaggcagggtt

SEQ ID NO: 448055 - DNA, 120 bp, Artificial Sequence
  ENSG00000155158_39 (sequence is synthesized)
ctgattggtgctgtataaatttaagtaactttgtgctttgtaggaatggtgacaaggaaggcatgatttccccctgacaaggaatgaaaggtgaactgtatcagctcttatctggacata

SEQ ID NO: 448056 - DNA, 120 bp, Artificial Sequence
  ENSG00000155158_40 (sequence is synthesized)
tatgttaatgttttctatgctccctgatacaagaagtttccaagttatataggaaaattaagtccattgatcctgtctttatcctcagagggcagaaatgagacaagtggataaaggctg

SEQ ID NO: 448057 - DNA, 120 bp, Artificial Sequence
  ENSG00000155158_41 (sequence is synthesized)
taggaagctgaattccagattaatcagtgccgaggaagatttttcattatcggaaaacccaacagtctaaaatcaataaccagttcttctgcaaaggggtgagtttaagcagggctaatg

SEQ ID NO: 448058 - DNA, 120 bp, Artificial Sequence
  ENSG00000155158_42 (sequence is synthesized)
tgactgtcatttctgcctgtcctgcaagcttagactagttgaactttgaggtcactctatgattcttttattagggcttcaaatcagcagggagtgtgtaaagaaaaaatgctccccccc

SEQ ID NO: 448059 - DNA, 120 bp, Artificial Sequence
  ENSG00000155158_43 (sequence is synthesized)
aaagctactattagaggtagttgtgatagacactaacaatccccggtgttaatactttccactccttttattttattttaatttaatattattttattgagacagagtctcgctctgtca

SEQ ID NO: 448060 - DNA, 84 bp, Artificial Sequence
  ENSG00000155158_44 (sequence is synthesized)
tcctttttaaagtgagtctagtctgttgatcttcataaataggagggttttcctccagcttggacattaaaaataatttttaaa

SEQ ID NO: 448061 - DNA, 120 bp, Artificial Sequence
  ENSG00000155158_45 (sequence is synthesized)
gggttttcctccagcttggacattaaaaataatttttaaaaagatctttgtggctaactggaaaatcttctggaattatctaatgcttcattcatttccctccatttctgtttttttttt

SEQ ID NO: 448062 - DNA, 120 bp, Artificial Sequence
  ENSG00000155158_46 (sequence is synthesized)
ttgtatttatactctgcatatttagaaatcttaaattcaaatacatttagttaaaatgagttgacgaagactccagtgatgttttaataccctaagattttgtgattccttgggcctgga

SEQ ID NO: 448063 - DNA, 120 bp, Artificial Sequence
  ENSG00000155158_47 (sequence is synthesized)
atggatcttagaaaattaccttgccctcatgagcctgtaaaccgtgttgtttcccctcagtcttgctctgtccagtacagtagcccctcgccacacatggctgcggagcacccggaatgg

SEQ ID NO: 448064 - DNA, 120 bp, Artificial Sequence
  ENSG00000155158_48 (sequence is synthesized)
cttacagcacatgtgggaatggtgctgaatgctgaggaagcattcactcatacgtgctgcacttcttaaaggcctcccaatagcctgctttgcggagttctggcttttacttgctgtcta

SEQ ID NO: 448065 - DNA, 120 bp, Artificial Sequence
  ENSG00000155158_49 (sequence is synthesized)
ctatgatcacctgatttgtgcttcacatacatatctgtgaagtttgctttttctatttaaagtgcccttaaactttcatttgatcgtgtttatctgcagatggtcagtgtcattggcata

SEQ ID NO: 448066 - DNA, 120 bp, Artificial Sequence
  ENSG00000155158_50 (sequence is synthesized)
tttgaacattattctgccctccctccgccaaactccttatgtactagattaagaaattttatttttgagatgatgattttaatttgattttacagacattcttttttacaaagtacagtt

SEQ ID NO: 448067 - DNA, 120 bp, Artificial Sequence
  ENSG00000155158_51 (sequence is synthesized)
tttacagacattcttttttacaaagtacagttgttagagttatagaagagtgattcacatctttgagaagatagatttcatgattaatatatatattttttgagacagagtttcgctctt

SEQ ID NO: 448068 - DNA, 120 bp, Artificial Sequence
  ENSG00000155158_52 (sequence is synthesized)
ctaagataaaattattctgagaaatctagtggaatcttttccattgctttgttattaatgtttcaacactgactttctcaactaggccagtattactatttaaaggtttttagaggctgg

SEQ ID NO: 448069 - DNA, 120 bp, Artificial Sequence
  ENSG00000155158_53 (sequence is synthesized)
caatggtggctcacgcctgtaatcctaaaactttgggaagccaaagttggggggcgtcacttgggaccaggggtttgaggccagcctgggcaatacagtgagaacctgtctttacaaaaa

SEQ ID NO: 448070 - DNA, 120 bp, Artificial Sequence
  ENSG00000155158_54 (sequence is synthesized)
aaaaaaaaaaaaaaaaaatgagccgtgcatggtggagtgcacttgtagtcctagctactagggagacttaggtgggataattgcttgatcccaggagtttgaggctacagtgagctaaga

SEQ ID NO: 448071 - DNA, 120 bp, Artificial Sequence
  ENSG00000155158_55 (sequence is synthesized)
aataaaggtttgtggacacatgttacccatttagagaataatttatttttgaatgtgtatgatacctaagtgatatgcatatatataattaagacattttaaatctcttcagatatttct

SEQ ID NO: 448072 - DNA, 120 bp, Artificial Sequence
  ENSG00000155158_56 (sequence is synthesized)
tcataagatacatgtatctatagatagctatatacaaaactacttacaaataataaatagacattgttttatacagttctttccaaagaaatgcaggatttcttatcctagtccttcctc

SEQ ID NO: 448073 - DNA, 120 bp, Artificial Sequence
  ENSG00000155158_57 (sequence is synthesized)
cccgagtccagttatttacatatttttgtctttaagtgttagattgcttgtttctgctgcctattgttggtagttttgtcttttacacatttgctgttagatttagttattttgaaatgt

SEQ ID NO: 448074 - DNA, 120 bp, Artificial Sequence
  ENSG00000155158_58 (sequence is synthesized)
tgaacttgaaatgtaatgaaaaggacacatcagaatttatcatcagggaagatatcttttatgttgagcagctgctatctgatcttgacagactgtcctcttagaggactgttgaagtcc

SEQ ID NO: 448075 - DNA, 120 bp, Artificial Sequence
  ENSG00000155158_59 (sequence is synthesized)
attctagtcattttgtaacttcataactgcagaaagaaatgatgcaaggactgtttagtggactgagatggctgagcaggttcttggcctgaattatccagaggagataggtggatctag

SEQ ID NO: 448076 - DNA, 120 bp, Artificial Sequence
  ENSG00000155158_60 (sequence is synthesized)
cttcagaggaagtctacaccccattcccttctgcttacaatgtacccatgatatgtgtttagcacagtaatactgtaacaggacatcacatggaaaaatcaaagcagctggctcactgta

SEQ ID NO: 448077 - DNA, 120 bp, Artificial Sequence
  ENSG00000155158_61 (sequence is synthesized)
tttaactgaaaagaatgcctacagattggatatttaatagggaaaattaaggcactttaataacaaacttcattatgtgaaacttgttgaatattaacatacaatataccttgtatatta

SEQ ID NO: 448078 - DNA, 120 bp, Artificial Sequence
  ENSG00000155158_62 (sequence is synthesized)
atgccatagtttttagaaacactaatttaaacaacaaatttaaggggtgctggcatatcccagtgacaccttcagttttattgctgcttagtattttctagtaaattagttttaattatt

SEQ ID NO: 448079 - DNA, 120 bp, Artificial Sequence
  ENSG00000155158_63 (sequence is synthesized)
ggtagtctgttgggcaccatttgggaaagaaataaattggtctcagtgtagcagacttgtagccaaaaactttgaataaaaaataagtataataaagaatattatttcatttttaaagga

SEQ ID NO: 448080 - DNA, 120 bp, Artificial Sequence
  ENSG00000155158_64 (sequence is synthesized)
taaagaatattatttcatttttaaaggaattgtattattttgaagtgctgtgtggttgatatggtttggttgtgtctctacccaaatctcttattgaattgtagttcccataatccccac

SEQ ID NO: 448081 - DNA, 120 bp, Artificial Sequence
  ENSG00000155158_65 (sequence is synthesized)
ccacatgggagggacccagtgggaggtgactgaatcatgggggcagttttccccatgctattctcatgatagtgattgagttctcacgagatttgatggttttataaggggcttttcccc

SEQ ID NO: 448082 - DNA, 120 bp, Artificial Sequence
  ENSG00000155158_66 (sequence is synthesized)
gtgaagaagaaggtgcctttctttccctttgccttccgccattattctaagtttcctgaggccttctcagccatgcagaattgtgagtcaattatacctcttttttaaataaattatcca

SEQ ID NO: 448083 - DNA, 120 bp, Artificial Sequence
  ENSG00000155158_67 (sequence is synthesized)
catagcagtgtgagaatggactaatacaatggtcttaatcaatttgaaggtatgacactctttgctttggaaatcatgtagacattttaagtcattcctatttttaatgtagacaaacgt

SEQ ID NO: 448084 - DNA, 120 bp, Artificial Sequence
  ENSG00000155158_68 (sequence is synthesized)
taatgtagacaaacgtccaggtagcaattttggggataataaatgagttcaccctttttttttctttttttccctgagacagagtttgctcttgttgcccaggctggagtttaatggcac

SEQ ID NO: 448085 - DNA, 120 bp, Artificial Sequence
  ENSG00000155158_69 (sequence is synthesized)
ttcagcttttattcacattttttccccaaagtgatttattcttcaaagtagacagttatgttctatagagtgttttgttttttctttaagaaaataatttacataaacagagattatggt

SEQ ID NO: 448086 - DNA, 120 bp, Artificial Sequence
  ENSG00000155158_70 (sequence is synthesized)
aaacattttaaatcttaggctgttggttaaatttaatggtttaagcactgttgggttctctttaattaatatttgcagaaggagaacatatgtgtttcactgatatgtatggtccagaaa

SEQ ID NO: 448087 - DNA, 120 bp, Artificial Sequence
  ENSG00000155158_71 (sequence is synthesized)
aattacttaattctcaaaaatatgttgcattctcatattgtgttagggaaaattccataagtagtctatttttttttttcttttgctgactgttaacatccaaacacctgaatgaaaact

SEQ ID NO: 448088 - DNA, 120 bp, Artificial Sequence
  ENSG00000155158_72 (sequence is synthesized)
gactcatttctgtattggtgtttaaaaatattgatttgcagatgttcacagaacacttgcattttttgattcacattgctaaatcaaatgtaaaggcaaatatgtatatttaataaatga

SEQ ID NO: 448089 - DNA, 120 bp, Artificial Sequence
  ENSG00000155158_73 (sequence is synthesized)
gaagtatttttttattactgaaatttattctcaaagcaaatgtattttgtagatgtttcatttgggagattttgctttgccttaaaacatacaaaataaacctgtcttgtggtctgccca

SEQ ID NO: 448090 - DNA, 120 bp, Artificial Sequence
  ENSG00000155158_74 (sequence is synthesized)
cctcaaaacctctgttaacttgacatgtagaaggagttcagaattctttgataatgtgtggttttcacttttgtttggattaaacaaaaataaaattagagtccatagcactttgtaaac

SEQ ID NO: 448091 - DNA, 120 bp, Artificial Sequence
  ENSG00000155158_75 (sequence is synthesized)
taatgtgaagtttcttgttgaatcataaaagctacctgtatgtactttataatttaatgttctgttagtaaaaattgtcagcattttatctttttctcttctcattacattttagtctcc

SEQ ID NO: 448092 - DNA, 120 bp, Artificial Sequence
  ENSG00000155158_76 (sequence is synthesized)
aatctttcccactctcagcagtcacagttttgcagagcaaaacatttttagaaactgaatatgtgtgagttctatataaaatgaatgtgttagtaacatccatctgctgatcaaggaggc

SEQ ID NO: 448093 - DNA, 120 bp, Artificial Sequence
  ENSG00000155158_77 (sequence is synthesized)
attggatctggtactagaaggtgaaattgattgtagctatcaaagcattttatcaatgtaagtcaagaaaaaagaagaaaactgtgaacctctgatatttttaacataaaaactgttccc

SEQ ID NO: 448094 - DNA, 120 bp, Artificial Sequence
  ENSG00000155158_78 (sequence is synthesized)
aatgagtgttctcttgctgattttgtgttaatgttattgtctatgatttttaagctaatgctaatataaaatctaaaatttcaacatgatgacaacaattcctgtagcctgtttttacca

SEQ ID NO: 448095 - DNA, 120 bp, Artificial Sequence
  ENSG00000155158_79 (sequence is synthesized)
ttaggatgtttttgaaaacagatgtcatcttagaaattatatttttaagtgcaaataaatcatcctgacttgaaagtcaacacattttatttttcattccgtagtatcacagaatatgct

SEQ ID NO: 448096 - DNA, 120 bp, Artificial Sequence
  ENSG00000155158_80 (sequence is synthesized)
gcatttagatacaggtttaatttgccagattttctcaaaattctgtatttttatattgctacaactggtttacttaacatgcaattgaattgttatttaaataaattacatttgatggaa

SEQ ID NO: 448097 - DNA, 120 bp, Artificial Sequence
  ENSG00000155158_81 (sequence is synthesized)
atgttggtttcttctcatctagagaggctactgctttttctttttgaatttattttcatttagatgggcgtcccccccacctcccgtttccacctcttctaggggtgtaactatagcgtt

SEQ ID NO: 448098 - DNA, 120 bp, Artificial Sequence
  ENSG00000155158_82 (sequence is synthesized)
agtatgttgggtagggtcttttgggttcgcttctaaggccctgcgcgattctgtctgcaggttttatattggtctgtgcagtttgacctggagatcttctcactcagatatggcaacaag

SEQ ID NO: 448099 - DNA, 120 bp, Artificial Sequence
  ENSG00000155158_83 (sequence is synthesized)
cagccttcactttgcatcatgtgatacacaacaggcgcccagacagcgcggagcgtctactgtcagcagagagccataacaaaagagaagagaatggaggaaggaaccttttgggaacac

SEQ ID NO: 448100 - DNA, 120 bp, Artificial Sequence
  ENSG00000155158_84 (sequence is synthesized)
agaacattgaagcatggctgagacagtgaccgttcaaacaagagctacatagatgtgtgagagaggaagactacaagttggtggccacaggacaggcaagggacttgggggaaggttcat

SEQ ID NO: 448101 - DNA, 120 bp, Artificial Sequence
  ENSG00000155158_85 (sequence is synthesized)
actttgcttgtgcctgagaattgagagtctcactggagaccaaggaataaaatagaaattgaggatttttgttggctctaaaattgaggtttgtctcttcttttagttggcttaaaaaaa

SEQ ID NO: 448102 - DNA, 120 bp, Artificial Sequence
  ENSG00000155158_86 (sequence is synthesized)
aatctggtagaagagagggaaagacatcttcatagtgggactatattcattcctccaaagttacagctgctctaaatctttcatcatcaaccaaggtggatctcaagagtggcctcgaag

SEQ ID NO: 448103 - DNA, 120 bp, Artificial Sequence
  ENSG00000155158_87 (sequence is synthesized)
caggacagttcatcatcaaccaaggtggatctcaagagtggcctcgaagaatgtgctgtggcattgaacttatttctaagcaacaaatttacagacgccttagaattgcttcgcccctgg

SEQ ID NO: 448104 - DNA, 120 bp, Artificial Sequence
  ENSG00000155158_88 (sequence is synthesized)
gtagcaacgaatgagaatgtggtaactttattcaggtatgtgagacactattcctataacaaaggctctgagggtataaaggggcaaaatctcatctctactgaaaatacaaaaaattag

SEQ ID NO: 448105 - DNA, 120 bp, Artificial Sequence
  ENSG00000155158_89 (sequence is synthesized)
ctacttgggaagcttaggtgggaggattgcttaagcctgggaggtggaggttgcaagtgagctgaaataatgccattgcactgcagcctgggtgacagacagagtgagactctgtctcca

SEQ ID NO: 448106 - DNA, 120 bp, Artificial Sequence
  ENSG00000155158_90 (sequence is synthesized)
aaaaaaaaccatgtatattaactgtagcatcaacatcaacattagtaaaagccatggcatgataaatgtcactttttactgtaaagttcatttccttattttacggaaacaacaattaat

SEQ ID NO: 448107 - DNA, 120 bp, Artificial Sequence
  ENSG00000155158_91 (sequence is synthesized)
gacgaggacgttttcgaagatgccttggaaaccatctcaatttggcttaaaaaaaaatctggtagaagagagggaaagacatcttcatagtgggactatattcattcctccaaagttaca

SEQ ID NO: 448108 - DNA, 120 bp, Artificial Sequence
  ENSG00000155158_92 (sequence is synthesized)
gctgctctaaatctgtgagtgctgaaattgaagaaaatagtgtgacttgctgcggaggaggatctggtcttcccgggatgccatggctggtttattgctgctgcaaggtgtgcgtctggg

SEQ ID NO: 448109 - DNA, 120 bp, Artificial Sequence
  ENSG00000155158_93 (sequence is synthesized)
gtttgtcttatgtcctctgctggtttcattatagcattttgttttgttttgttagggtaattagaaccttagagattagtaaagtggcttgtcctcagaaatagcatgtgttgattgtcc

SEQ ID NO: 448110 - DNA, 120 bp, Artificial Sequence
  ENSG00000155158_94 (sequence is synthesized)
tagactctcacctctgaccttgctgtgctggctttagtggtctctttgtagcagattacagtaaatgtgagctaccaaaaagtgacctttgtatggccaccttttaaaattgtgcatcag

SEQ ID NO: 448111 - DNA, 120 bp, Artificial Sequence
  ENSG00000155158_95 (sequence is synthesized)
aatcaatgctgggtattttttttgtgtgtgtgacgcagaccctggagtctaaacatctgtccttagtcatcgtgtcccattttccccctttggaatttcctggacgttagaattgtatcc

SEQ ID NO: 448112 - DNA, 120 bp, Artificial Sequence
  ENSG00000155158_96 (sequence is synthesized)
ttgctgaattagtgagtgagttttgagcattctctaaagataagttaatttttgattctcaccataacccccatatgttcctgatttgtctttgttgaataaaagtcatattattgaaca

SEQ ID NO: 448113 - DNA, 120 bp, Artificial Sequence
  ENSG00000155189_0 (sequence is synthesized)
ggagctcgctgccgccgagctgagaagatgctgctgtccctggtgctccacacgtactccatgcgctacctgctgcccagcgtcgtgctcctgggcacggcgcccacctacgtgttggcc

SEQ ID NO: 448114 - DNA, 120 bp, Artificial Sequence
  ENSG00000155189_1 (sequence is synthesized)
tggggggtctggcggctgctctccgccttcctgcccgcccgcttctaccaagcgctggacgaccggctctactgcgtctaccagagcatggtgctcttcttcttcgagaattacaccggg

SEQ ID NO: 448115 - DNA, 120 bp, Artificial Sequence
  ENSG00000155189_2 (sequence is synthesized)
gtccagatattgctatatggagatttgccaaaaaataaagaaaatataatatatttagcaaatcatcaaagcacagttgactggattgttgctgacatcttggccatcaggcagaatgcg

SEQ ID NO: 448116 - DNA, 120 bp, Artificial Sequence
  ENSG00000155189_3 (sequence is synthesized)
ctaggacatgtgcgctacgtgctgaaagaagggttaaaatggctgccattgtatgggtgttactttgctcagcatggaggaatctatgtaaagcgcagtgccaaatttaacgagaaagag

SEQ ID NO: 448117 - DNA, 120 bp, Artificial Sequence
  ENSG00000155189_4 (sequence is synthesized)
atgcgaaacaagttgcagagctacgtggacgcaggaactccaatgtatcttgtgatttttccagaaggtacaaggtataatccagagcaaacaaaagtcctttcagctagtcaggcattt

SEQ ID NO: 448118 - DNA, 120 bp, Artificial Sequence
  ENSG00000155189_5 (sequence is synthesized)
gctgcccaacgtggccttgcagtattaaaacatgtgctaacaccacgaataaaggcaactcacgttgcttttgattgcatgaagaattatttagatgcaatttatgatgttacggtggtt

SEQ ID NO: 448119 - DNA, 120 bp, Artificial Sequence
  ENSG00000155189_6 (sequence is synthesized)
tatgaagggaaagacgatggagggcagcgaagagagtcaccgaccatgacggaatttctctgcaaagaatgtccaaaaattcatattcacattgatcgtatcgacaaaaaagatgtccca

SEQ ID NO: 448120 - DNA, 120 bp, Artificial Sequence
  ENSG00000155189_7 (sequence is synthesized)
gaagaacaagaacatatgagaagatggctgcatgaacgtttcgaaatcaaagataagatgcttatagaattttatgagtcaccagatccagaaagaagaaaaagatttcctgggaaaagt

SEQ ID NO: 448121 - DNA, 120 bp, Artificial Sequence
  ENSG00000155189_8 (sequence is synthesized)
gttaattccaaattaagtatcaagaagactttaccatcaatgttgatcttaagtggtttgactgcaggcatgcttatgaccgatgctggaaggaagctgtatgtgaacacctggatatat

SEQ ID NO: 448122 - DNA, 120 bp, Artificial Sequence
  ENSG00000155189_9 (sequence is synthesized)
ggaaccctacttggctgcctgtgggttactattaaagcatagacaagtagctgtctccagacagtgggatgtgctacattgtctatttttggcggctgcacatgacatcaaattgtttcc

SEQ ID NO: 448123 - DNA, 120 bp, Artificial Sequence
  ENSG00000155189_10 (sequence is synthesized)
tgaatttattaaggagtgtaaataaagccttgttgattgaagattggataatagaatttgtgacgaaagctgatatgcaatggtcttgggcaaacatacctggttgtacaactttagcat

SEQ ID NO: 448124 - DNA, 120 bp, Artificial Sequence
  ENSG00000155189_11 (sequence is synthesized)
cggggctgctggaagggtaaaagctaaatggagtttctcctgctctgtccatttcctatgaactaatgacaacttgagaaggctgggaggattgtgtattttgcaagtcagatggctgca

SEQ ID NO: 448125 - DNA, 120 bp, Artificial Sequence
  ENSG00000155189_12 (sequence is synthesized)
tttttgagcattaatttgcagcgtatttcactttttctgttattttcaatttattacaacttgacagctccaagctcttattactaaagtatttagtatcttgcagctagttaatatttc

SEQ ID NO: 448126 - DNA, 120 bp, Artificial Sequence
  ENSG00000155189_13 (sequence is synthesized)
atcttttgcttatttctacaagtcagtgaaataaattgtatttaggaagtgtcaggatgttcaaaggaaagggtaaaaagtgttcatggggaaaaagctctgtttagcacatgattttat

SEQ ID NO: 448127 - DNA, 120 bp, Artificial Sequence
  ENSG00000155189_14 (sequence is synthesized)
tgtattgcgttattagctgattttactcattttatatttgcaaaataaatttctaatatttattgaaattgcttaatttgcacaccctgtacacacagaaaatggtataaaatatgagaa

SEQ ID NO: 448128 - DNA, 120 bp, Artificial Sequence
  ENSG00000155189_15 (sequence is synthesized)
cgaagtttaaaattgtgactctgattcattatagcagaactttaaatttcccagctttttgaagatttaagctacactattagtacttccctttgtctgtgccataagtgcttgaaaacg

SEQ ID NO: 448129 - DNA, 120 bp, Artificial Sequence
  ENSG00000155189_16 (sequence is synthesized)
ttaaggttttctgttttgttttgtttttttaatatcaaaagagtcggtgtgaaccttggttggaccccaagttcacaagatttttaaggtgatgagagcctgcagacattctgcctagat

SEQ ID NO: 448130 - DNA, 120 bp, Artificial Sequence
  ENSG00000155189_17 (sequence is synthesized)
ttactagcgtgtgccttttgcctgcttctctttgatttcacagaatattcattcagaagtcgcgtttctgtagtgtggtggattcccactgggctctggtccttcccttggatcccgtca

SEQ ID NO: 448131 - DNA, 120 bp, Artificial Sequence
  ENSG00000155189_18 (sequence is synthesized)
gtggtgctgctcagcggcttgcacgcagacttgctaggaagaaatgcagagccagcctgtgctgcccactttcagagttgaactctttaagcccttgtgagtgggcttcaccagctactg

SEQ ID NO: 448132 - DNA, 120 bp, Artificial Sequence
  ENSG00000155189_19 (sequence is synthesized)
cagaggcattttgcatttgtctgtgtcaagaagttcaccttctcaagccagtgaaatacagacttaatttgtcatgactgaacgaatttgtttatttcccattaggtttagtggagctac

SEQ ID NO: 448133 - DNA, 120 bp, Artificial Sequence
  ENSG00000155189_20 (sequence is synthesized)
acattaatatgtatcgccttagagcaagagctgtgttccaggaaccagatcacgatttttagccatggaacaatatatcccatgggagaagacctttcagtgtgaactgttctatttttg

SEQ ID NO: 448134 - DNA, 120 bp, Artificial Sequence
  ENSG00000155189_21 (sequence is synthesized)
agaaatatatcagtggcccacattaaacataccagttggatcatgataagcaaaatgaaagaaataatgattaagggaaaattaagtgactgtgttacactgcttctcccatgccagaga

SEQ ID NO: 448135 - DNA, 120 bp, Artificial Sequence
  ENSG00000155189_22 (sequence is synthesized)
ataaactctttcaagcatcatctttgaagagtcgtgtggtgtgaattggtttgtgtacattagaatgtatgcacacatccatggacactcaggatatagttggcctaataatcggggcat

SEQ ID NO: 448136 - DNA, 120 bp, Artificial Sequence
  ENSG00000155189_23 (sequence is synthesized)
gggtaaaacttatgaaaatttcctcatgctgaattgtaattttctcttacctgtaaagtaaaatttagatcaattccatgtctttgttaagtacagggatttaatatattttgaatataa

SEQ ID NO: 448137 - DNA, 120 bp, Artificial Sequence
  ENSG00000155189_24 (sequence is synthesized)
tgggtatgttctaaatttgaactttgagaggcaatactgttggaattatgtggattctaactcattttaacaaggtagcctgacctgcataagatcacttgaatgttaggtttcatagaa

SEQ ID NO: 448138 - DNA, 120 bp, Artificial Sequence
  ENSG00000155189_25 (sequence is synthesized)
ctatactaatcttctcacaaaaggtctataaaatacagtcgttgaaaaaaattttgtatcaaaatgtttggaaaattagaagcttctccttaacctgtattgatactgacttgaattatt

SEQ ID NO: 448139 - DNA, 120 bp, Artificial Sequence
  ENSG00000155189_26 (sequence is synthesized)
ttctaaaattaagagccgtatacctacctgtaagtcttttcacatatcatttaaacttttgtttgtattattactgatttacagcttagttattaatttttctttataagaatgccgtcg

SEQ ID NO: 448140 - DNA, 120 bp, Artificial Sequence
  ENSG00000155189_27 (sequence is synthesized)
atgtgcatgcttttatgtttttcagaaaagggtgtgtttggatgaaagtaaaaaaaaaaataaaatctttcactgtctctaatggctgtgctgtttaacattttttgaccctaaaattca

SEQ ID NO: 448141 - DNA, 120 bp, Artificial Sequence
  ENSG00000155189_28 (sequence is synthesized)
ccaacagtctcccagtacataaaataggcttaatgactggccctgcattcttcacaatatttttccctaagctttgagcaaagttttaaaaaaatacactaaaataatcaaaactgttaa

SEQ ID NO: 448142 - DNA, 120 bp, Artificial Sequence
  ENSG00000155189_29 (sequence is synthesized)
gcagtatattagtttggttatataaattcatctgcaatttataagatgcatggccgatgttaatttgcttggcaattctgtaatcattaagtgatctcagtgaaacatgtcaaatgcctt

SEQ ID NO: 448143 - DNA, 120 bp, Artificial Sequence
  ENSG00000155189_30 (sequence is synthesized)
aaattaactaagttggtgaataaaagtgccgatctggctaactcttacaccatacatactgatagtttttcatatgtttcatttccatgtgatttttaaaatttagagtggcaacaattt

SEQ ID NO: 448144 - DNA, 120 bp, Artificial Sequence
  ENSG00000155189_31 (sequence is synthesized)
tgcttaatatgggttacataagctttattttttcctttgttcataattatattctttgaataggtctgtgtcaatcaagtgatctaactagactgatcatagatagaaggaaataaggcc

SEQ ID NO: 448145 - DNA, 120 bp, Artificial Sequence
  ENSG00000155189_32 (sequence is synthesized)
aagttcaagaccagcctgggcaacatatcgagaacctgtctacaaaaaaattaaaaaaaattagccaggcatggtggcgtacactgagtagtttgtcccagctactcgggagggtgaggt

SEQ ID NO: 448146 - DNA, 120 bp, Artificial Sequence
  ENSG00000155189_33 (sequence is synthesized)
gggaggatcgcttcagcccaggaggttgagattgcagtgagccatggacataccactgcactacagcctaggtaacagcacgagaccccaactcttagaaaatgaaaaggaaatatagaa

SEQ ID NO: 448147 - DNA, 120 bp, Artificial Sequence
  ENSG00000155189_34 (sequence is synthesized)
atataaaatttgcttattatagacacacagtaactcccagatatgtaccacaaaaaatgtgaaaagagagagaaatgtctaccaaagcagtattttgtgtgtataattgcaagcgcatag

SEQ ID NO: 448148 - DNA, 120 bp, Artificial Sequence
  ENSG00000155189_35 (sequence is synthesized)
taaaataattttaaccttaatttgtttttagtagtgtttagattgaagattgagtgaaatattttcttggcagatattccgtatctggtggaaagctacaatgcaatgtcgttgtagttt

SEQ ID NO: 448149 - DNA, 120 bp, Artificial Sequence
  ENSG00000155189_36 (sequence is synthesized)
tgcatggcttgctttataaacaagattttttctccctccttttgggccagttttcattacgagtaactcacactttttgattaaagaacttgaaattacgttatcacttagtataattga

SEQ ID NO: 448150 - DNA, 120 bp, Artificial Sequence
  ENSG00000155189_37 (sequence is synthesized)
cattatatagagactatgtaacatgcaatcattagaatcaaaattagtactttggtcaaaatatttacaacattcacatacttgtcaaatattcatgtaattaactgaatttaaaacctt

SEQ ID NO: 448151 - DNA, 120 bp, Artificial Sequence
  ENSG00000155189_38 (sequence is synthesized)
caactattatgaagtgctcgtctgtacaatcgctaatttactcagtttagagtagctacaactcttcgatactatcatcaatatttgacatcttttccaatttgtgtatgaaaagtaaat

SEQ ID NO: 448152 - DNA, 120 bp, Artificial Sequence
  ENSG00000155189_39 (sequence is synthesized)
ctattcctgtagcaactggggagtcatatatgaggtcaaagacatataccttgttattataatatgtatactataataatagctggttatcctgagcaggggaaaaggttatttttagga

SEQ ID NO: 448153 - DNA, 120 bp, Artificial Sequence
  ENSG00000155189_40 (sequence is synthesized)
aaaccacttcaaatagaaagctgaagtacttctaatatactgagggaagtataatatgtggaacaaactctcaacaaaatgtttattgatgttgatgaaacagatcagtttttccatccg

SEQ ID NO: 448154 - DNA, 120 bp, Artificial Sequence
  ENSG00000155189_41 (sequence is synthesized)
gattattattggttcatgattttatatgtgaatatgtaagatatgttctgcaattttataaatgttcatgtctttttttaaaaaaggtgctattgaaattctgtgtctccagcaggcaag

SEQ ID NO: 448155 - DNA, 120 bp, Artificial Sequence
  ENSG00000155189_42 (sequence is synthesized)
aatacttgactaactctttttgtctctttatggtattttcagaataaagtctgacttgtgtttttgagattattggtgcctcattaattcagcaataaaggaaaatatgcatctcaaaaa

SEQ ID NO: 448156 - DNA, 120 bp, Artificial Sequence
  ENSG00000155189_43 (sequence is synthesized)
tggagcagtcagaacacacacgacatttatcaattaaatttgtcatcttatatgggtgcaattcatggcacccccaaacaattacaatagtaacatcagagatcacagatcacaataaca

SEQ ID NO: 448157 - DNA, 120 bp, Artificial Sequence
  ENSG00000155189_44 (sequence is synthesized)
cttgccttttcatcttctgccctttattattctcagccactgccattacttcagttatccattcccatggtttccacatgcttagcttcggttgattcttgccattttacagaccatatt

SEQ ID NO: 448158 - DNA, 120 bp, Artificial Sequence
  ENSG00000155189_45 (sequence is synthesized)
tccaactacttctagaatgttttgttccttcagcctcagtatgcccaatttgaactcatgttctctctcccccttctttcttccttctttctttcgctctctctcccttccttcttttct

SEQ ID NO: 448159 - DNA, 120 bp, Artificial Sequence
  ENSG00000155189_46 (sequence is synthesized)
cattcttctccctccctctcttccttctctcccccactccccaacttccaggctaaagcagtcctcctgagtagttaggactacagacatacacgtgccaccgcgcccggctccgtgttc

SEQ ID NO: 448160 - DNA, 120 bp, Artificial Sequence
  ENSG00000155189_47 (sequence is synthesized)
tctttgtttccctgcctcctgctcttccacttatctttgcatggcaggccttgcagtattaaaacatgtgctaacaccacgaataaaggcaactcacgttgcttttgattgcatgaagaa

SEQ ID NO: 448161 - DNA, 120 bp, Artificial Sequence
  ENSG00000155189_48 (sequence is synthesized)
cttcttcgagaattacaccggggtccaggtgagccgcctcccgctcccgggtctcggcgtccacccgagctcccgggggcgcggacctctccgctcccccacagctggcgagggtcaccc

SEQ ID NO: 448162 - DNA, 120 bp, Artificial Sequence
  ENSG00000155189_49 (sequence is synthesized)
gtcgtcctgaggctacgagtgggacccgccgcccctttccccgcccctcgcctgggtctgatgctgcttagcaaaagattggattcgtagattaaacttgagaaacaaaccataaaagtg

SEQ ID NO: 448163 - DNA, 120 bp, Artificial Sequence
  ENSG00000155189_50 (sequence is synthesized)
gaaggccctctttaacaatattgctatatggagatttgccaaaaaataaagaaaatataatatatttagcaaatcatcaaagcacagttgactggattgttgctgacatcttggccatca

SEQ ID NO: 448164 - DNA, 120 bp, Artificial Sequence
  ENSG00000155229_0 (sequence is synthesized)
gcatgtgaccgacagcaccgccccctagggctgggcctgattttctcattggcttcccccgtgttcgcgttatggccgctgccgcggctgtggaggcggcggcgcctatgggtgccctat

SEQ ID NO: 448165 - DNA, 120 bp, Artificial Sequence
  ENSG00000155229_1 (sequence is synthesized)
ggggcctcgtgcacgacttcgtcgtgggtcagcaagagggccccgctgaccaggtggctgcagatgtgaaatctggcaactatacagtgttacaagttgtggaagcccttgggtcctctc

SEQ ID NO: 448166 - DNA, 120 bp, Artificial Sequence
  ENSG00000155229_2 (sequence is synthesized)
tagagaatccagaaccccgaactcgggcacgagcaatccagcttttgtcacaggtgctactccactgtcacaccttgctcctggagaaggaagtggtacacctgatactgttctatgaga

SEQ ID NO: 448167 - DNA, 120 bp, Artificial Sequence
  ENSG00000155229_3 (sequence is synthesized)
accggctgaaggaccatcatcttgtgatcccatctgtcctgcagggtttgaaggcacttagcctgtgtgtggccctgcccccagggctggctgtttctgtgcttaaagccatcttccagg

SEQ ID NO: 448168 - DNA, 120 bp, Artificial Sequence
  ENSG00000155229_4 (sequence is synthesized)
aagtgcatgtacagtccctgccacaggtggaccgacacacagtctacaatatcatcaccaattttatgcgaacccgggaagaagagctaaagagcctaggagctgacttcacctttggct

SEQ ID NO: 448169 - DNA, 120 bp, Artificial Sequence
  ENSG00000155229_5 (sequence is synthesized)
tcatccaggtgatggatggggaaaaggatccccgtaatcttctggtggccttccgcatcgtccatgacctcatctccagggactatagcctgggaccctttgtggaggagttgtttgaag

SEQ ID NO: 448170 - DNA, 120 bp, Artificial Sequence
  ENSG00000155229_6 (sequence is synthesized)
tgacatcctgttatttccctatcgattttacccctccacctaatgatccccatggtatccagagagaagacctcatcctgagtcttcgcgctgtgctggcttctacaccacgatttgctg

SEQ ID NO: 448171 - DNA, 120 bp, Artificial Sequence
  ENSG00000155229_7 (sequence is synthesized)
agtttctgctgcccctgttgattgagaaagtggattctgaggttctgagtgccaagttggattctctacagactctgaatgcttgctgtgctgtgtatggacagaaggaactgaaggact

SEQ ID NO: 448172 - DNA, 120 bp, Artificial Sequence
  ENSG00000155229_8 (sequence is synthesized)
tcctccccagcctttgggcttctatccgcagagaggtgttccagacggcaagtgagcgggtggaggcagagggcctggcggccctccactccctgactgcgtgtttgtctcgctctgtgc

SEQ ID NO: 448173 - DNA, 120 bp, Artificial Sequence
  ENSG00000155229_9 (sequence is synthesized)
tgagggctgatgctgaggacctccttgactccttccttagcaacattctacaggactgcaggcaccacctgtgtgaaccggacatgaaactggtgtggcctagtgccaagctgttgcagg

SEQ ID NO: 448174 - DNA, 120 bp, Artificial Sequence
  ENSG00000155229_10 (sequence is synthesized)
cagctgcaggtgcatctgcccgggcctgtgactctgtcaccagcaatgtactgcctttactgctggaacagttccacaagcacagtcagagcagccagcggcggacaatccttgaaatgc

SEQ ID NO: 448175 - DNA, 120 bp, Artificial Sequence
  ENSG00000155229_11 (sequence is synthesized)
tcctgggtttcttgaagctgcagcagaaatggagctatgaagacaaagatcaaaggcctctgaatggcttcaaggaccagctgtgctcactggtattcatggctctaacagaccccagca

SEQ ID NO: 448176 - DNA, 120 bp, Artificial Sequence
  ENSG00000155229_12 (sequence is synthesized)
cccagcttcagcttgttggcatccgtacactgacagtcttgggtgcccagccagatctcctatcttatgaggacttggagctggcagtgggtcacctgtacagactgagcttcctgaagg

SEQ ID NO: 448177 - DNA, 120 bp, Artificial Sequence
  ENSG00000155229_13 (sequence is synthesized)
aggattcccagagttgcagggtggcagcactggaagcatcaggaaccctggctgctctctaccctgtggccttcagcagccacctcgtacccaagctcgctgaggagctgcgtgtagggg

SEQ ID NO: 448178 - DNA, 120 bp, Artificial Sequence
  ENSG00000155229_14 (sequence is synthesized)
ctgtctgcaagccttgtcagctgtatcaacacatcccagcatcgtcaaggagacactgcctctgctgctgcagcatctctggcaagtgaacagagggaatatggttgcacaatccagtga

SEQ ID NO: 448179 - DNA, 120 bp, Artificial Sequence
  ENSG00000155229_15 (sequence is synthesized)
cgttattgctgtctgtcagagcctcagacagatggcagaaaaatgtcagcaggaccctgagagttgctggtatttccaccagacagctataccttgcctgcttgccttggctgtgcaggc

SEQ ID NO: 448180 - DNA, 120 bp, Artificial Sequence
  ENSG00000155229_16 (sequence is synthesized)
ctctatgccagagaaggagccctcagttctgagaaaagtactattggaggatgaggtgttggctgccatggtgtctgtcattggcactgctacaacccacctgagccctgagttagctgc

SEQ ID NO: 448181 - DNA, 120 bp, Artificial Sequence
  ENSG00000155229_17 (sequence is synthesized)
ccagagtgtgacacacattgtgcccctcttcttggatggcaacgtgtcctttctgcctgaaaacagcttcccgagcagattccagccattccaggatggctcctcagggcagaggcggct

SEQ ID NO: 448182 - DNA, 120 bp, Artificial Sequence
  ENSG00000155229_18 (sequence is synthesized)
gattgcactgcttatggcctttgtctgctccctgcctcgaaatgtggaaatccctcagctgaaccaactcatgcgggagcttttggaactgagctgctgccacagctgccccttttcttc

SEQ ID NO: 448183 - DNA, 120 bp, Artificial Sequence
  ENSG00000155229_19 (sequence is synthesized)
caccgctgctgccaagtgctttgcaggactcctcaacaagcaccctgcagggcagcagctggatgaattcctacagctagctgtggacaaagtggaggctggcctgggctctgggccctg

SEQ ID NO: 448184 - DNA, 120 bp, Artificial Sequence
  ENSG00000155229_20 (sequence is synthesized)
tcgtagtcaggccttcactcttcttctctgggtaacaaaggccctagtgctcagataccatcctctcagctcctgccttacagcccggctcatgggcctcctgagtgacccagaattagg

SEQ ID NO: 448185 - DNA, 120 bp, Artificial Sequence
  ENSG00000155229_21 (sequence is synthesized)
tccagcagcagctgatggcttctctctgctcatgtctgactgcactgatgtgctgactcgtgctggccatgccgaagtgcggatcatgttccgccagcggttcttcacagataatgtgcc

SEQ ID NO: 448186 - DNA, 120 bp, Artificial Sequence
  ENSG00000155229_22 (sequence is synthesized)
tgctttggtccagggcttccatgctgctccccaagatgtgaagccaaactacttgaagggtctttctcatgtacttaacaggctgcccaagcctgtactcttgccagagctgcccacgct

SEQ ID NO: 448187 - DNA, 120 bp, Artificial Sequence
  ENSG00000155229_23 (sequence is synthesized)
tctttccttgctgctggaggccctgtcctgccctgactgtgtggtgcagctctccaccctcagctgccttcagcctcttctactggaagcaccccaagtcatgagtcttcacgtggacac

SEQ ID NO: 448188 - DNA, 120 bp, Artificial Sequence
  ENSG00000155229_24 (sequence is synthesized)
cctcgtcaccaagtttctgaacctcagctctagcccttccatggctgtccggatcgccgcactgcagtgcatgcatgctctcactcgcctgcccacccctgtgctgctgccgtacaaacc

SEQ ID NO: 448189 - DNA, 120 bp, Artificial Sequence
  ENSG00000155229_25 (sequence is synthesized)
acaggtgattcgggccttagccaaacccctggatgacaagaagagactggtgcgcaaggaagcagtgtcagccagaggggagtggtttctgttggggagccctggcagctgagccctcag

SEQ ID NO: 448190 - DNA, 120 bp, Artificial Sequence
  ENSG00000155229_26 (sequence is synthesized)
tcctggcctagactgttctgacaatctaacctgggattactaactgttgagccatcttccccaaagcagggaaaccactggtctctgactgcctttcccacagacacagcacaaatgcta

SEQ ID NO: 448191 - DNA, 120 bp, Artificial Sequence
  ENSG00000155229_27 (sequence is synthesized)
ggcctctgttgcatggctgtacaaagaacataagagtccatatttctagtggatttgtaaaataagtgtgtgtgagacacttgcgtttgaagaaagatctagggtcctgggtctcttgca

SEQ ID NO: 448192 - DNA, 120 bp, Artificial Sequence
  ENSG00000155229_28 (sequence is synthesized)
tttatatgtcagaaaaggggcgatatgctgctgaggggtgagtgcatatgagtgtggccctgaggaccagggctggcagatgttgtctacctgctgaagaataaagatttcttttggtaa

SEQ ID NO: 448193 - DNA, 120 bp, Artificial Sequence
  ENSG00000155229_29 (sequence is synthesized)
cattttacctggggttatatagaagagctggtatcctgagagagaatgataaagggaaagagggggtctgctccctcccagtgaagtaaagaaagggtagagtttgtttgagccagtgtt

SEQ ID NO: 448194 - DNA, 120 bp, Artificial Sequence
  ENSG00000155229_30 (sequence is synthesized)
ttaaattcttgcctccacagcaatgtgtatattgttgcacatctcttcactgagtactttcttggaatggaaaaagggtcagccctgaagagaaaggggaggcaatgatagcagagggag

SEQ ID NO: 448195 - DNA, 120 bp, Artificial Sequence
  ENSG00000155229_31 (sequence is synthesized)
aacacaggctaggagaaagcccacactttctgtgctgtgggacagtatagtaaccttattctctccttcccagagctaaagagcctaggagctgacttcacctttggcttcatccaggtg

SEQ ID NO: 448196 - DNA, 120 bp, Artificial Sequence
  ENSG00000155229_32 (sequence is synthesized)
atgtgaagccaaactacttgaagggtctttctcatgtacttaacaggctgcccaagcctgtactcttgccagagctgcccacggctgtccggatcgccgcactgcagtgcatgcatgctc

SEQ ID NO: 448197 - DNA, 120 bp, Artificial Sequence
  ENSG00000155229_33 (sequence is synthesized)
aatcgcctccggctgcgtgcccagcagccgccttccctctcggtgccaccgccccatttcaggccccgcccctccctggaactgcctaggcagaagccggcaggcacgtgaccccggcgc

SEQ ID NO: 448198 - DNA, 120 bp, Artificial Sequence
  ENSG00000155229_34 (sequence is synthesized)
cccgcccccttgcgcttccccggagattggctcgggaggcgcatgcgcggagagcccgtctcgagccaccgcccatatcccctcccacggtctctagttcgcgttatggccgctgccgcg

SEQ ID NO: 448199 - DNA, 120 bp, Artificial Sequence
  ENSG00000155229_35 (sequence is synthesized)
tgtcctgggactgcccgtgggaaaagcgtcaagaccacagttgggcagagctttatagtacctaagaagagaagggagcacaaagagtctagttctgccgtcctactccctacagtgggg

SEQ ID NO: 448200 - DNA, 120 bp, Artificial Sequence
  ENSG00000155229_36 (sequence is synthesized)
ctagtgtggataattctttattggaagtagatgaccctctcttttcaaatggcagcacctctgtattatgagaataccaggctcttatgcaggtgtccaatcattttgtccacaggcaaa

SEQ ID NO: 448201 - DNA, 120 bp, Artificial Sequence
  ENSG00000155229_37 (sequence is synthesized)
tttccttgcatctccagggacaccagggacaacatttctatttcttatgttaagaatgttcatcttagctatccctctttcccactgttggcctagtctaaagactgtgcagagttctca

SEQ ID NO: 448202 - DNA, 120 bp, Artificial Sequence
  ENSG00000155229_38 (sequence is synthesized)
ggagcgctctgtggccccaggtcagaccactcctgtttctggtgccctgattctcaggactatagcactaccagagaccagattaagaactgctgtcgtggctagagtcaagccccagag

SEQ ID NO: 448203 - DNA, 120 bp, Artificial Sequence
  ENSG00000155229_39 (sequence is synthesized)
tgtaagtgagcacatttgggaagtactgttatttaaccttgacaaggtgactccgggctgaaatttgccacaggctaagctgatcttttacttcccccaccagagaagttagttctcatc

SEQ ID NO: 448204 - DNA, 120 bp, Artificial Sequence
  ENSG00000155229_40 (sequence is synthesized)
cgtcccggtccctgctgccactatgtactggttctcttggagttcaagtgttctctgggtccattacatggccaggttttctgtaggtggaaatccctcagctgaaccaactcatgcggg

SEQ ID NO: 448205 - DNA, 120 bp, Artificial Sequence
  ENSG00000155229_41 (sequence is synthesized)
ggtgcccgcgccgccgccaccacccgccccaggtgcgcatgtgaccgacagcaccgccccctagggctgggcctgattttctcattggcttcccccgtgatgtgaaatctggcaactata

SEQ ID NO: 448206 - DNA, 120 bp, Artificial Sequence
  ENSG00000155229_42 (sequence is synthesized)
gctttggtccagggcttccatgctgctccccaaggtgaggagtctgaaagaaggtccccacatatacacatctctcctttgcttggccacattccctaagataatttagggcccgcttgc

SEQ ID NO: 448207 - DNA, 120 bp, Artificial Sequence
  ENSG00000155229_43 (sequence is synthesized)
ttctttagagctatattgtggtctgtgcctagaagactaaacttctagattcttgtcccacttcttcctttcatgggcgtatcttgcttattctgagcgtgaagggctctttcacccgtt

SEQ ID NO: 448208 - DNA, 120 bp, Artificial Sequence
  ENSG00000155229_44 (sequence is synthesized)
tgtaggctgatgtctcagcctcaccacagattggaattgatttctcaagctatatatctaagtccaatttctcccctaagcctttccattttttacagatgtgaagccaaactacttgaa

SEQ ID NO: 448209 - DNA, 120 bp, Artificial Sequence
  ENSG00000155229_45 (sequence is synthesized)
gggtctttctcatgtacttaacaggctgcccaagcctgtactcttgccagagctgcccacggtaagtcccacaggcagagcttctaagcaaaggacaaagctattcttccccagatgggg

SEQ ID NO: 448210 - DNA, 120 bp, Artificial Sequence
  ENSG00000155229_46 (sequence is synthesized)
atgcgaacccgggaagaaggtgatggatggggaaaaggatccccgtaatcttctggtggccttccgcatcgtccatgacctcatctccagggactatagcctgggaccctttgtggagga

SEQ ID NO: 448211 - DNA, 120 bp, Artificial Sequence
  ENSG00000155249_0 (sequence is synthesized)
tgccaatcattgtgacatttttctgatttcttttttttaggtaactgaatattggatacatggctcacacaaatgaatcgatggtgtctgagtttgtacttttgggactctctaattcct

SEQ ID NO: 448212 - DNA, 120 bp, Artificial Sequence
  ENSG00000155249_1 (sequence is synthesized)
ggggacttcaacttttcttttttgccatcttctctatagtctatgtgacatcagtgctaggcaatgtcttaattattgtcattatttcttttgactcccatttgaactctcctatgtact

SEQ ID NO: 448213 - DNA, 120 bp, Artificial Sequence
  ENSG00000155249_2 (sequence is synthesized)
tcttgctcagtaatctttctttcattgatatctgtcagtctaactttgccacccccaagatgcttgtagacttttttattgagcgcaagactatctcctttgagggttgcatggcccaga

SEQ ID NO: 448214 - DNA, 120 bp, Artificial Sequence
  ENSG00000155249_3 (sequence is synthesized)
tattcgttcttcacagttttgttgggagtgagatgatgttgcttgtagctatggcatatgacagatttatagccatatgtaagcctctgcactacagtacaattatgaaccggaggctct

SEQ ID NO: 448215 - DNA, 120 bp, Artificial Sequence
  ENSG00000155249_4 (sequence is synthesized)
gaccttcccttggtgatagagctggcttgcatggatacatatgaaatggaaattatgaccctaacgaacagtggcctgatatcattgagctgtttcctggctttaattatttcctacacc

SEQ ID NO: 448216 - DNA, 120 bp, Artificial Sequence
  ENSG00000155249_5 (sequence is synthesized)
atcattttgatcggtgtccgatgcaggtcctccagtgggtcatctaaggctctttctacattaactgcccacatcacagtggtcattcttttcttcgggccttgcatttatttctatata

SEQ ID NO: 448217 - DNA, 120 bp, Artificial Sequence
  ENSG00000155249_6 (sequence is synthesized)
tggccttttagcagacttcctgtggacaaatttctttctgtgttctacactgtttgtactcccttgttgaaccccatcatctactctctgaggaatgaagatgttaaagcagccatgtgg

SEQ ID NO: 448218 - DNA, 120 bp, Artificial Sequence
  ENSG00000155249_7 (sequence is synthesized)
aagctgagaaaccgtcatgtgaactcctggaaaaactagggatcattacgaaggagcataatcctgaattagaatgaagaccctccagtgtatcatagtgtcatgccaaccatctttgcc

SEQ ID NO: 448219 - DNA, 120 bp, Artificial Sequence
  ENSG00000155249_8 (sequence is synthesized)
aggtgatcagagccctcactacatcaggacaggacctgaggacctgagaggcttccttccatacggcatagtgtagggaaccaagttaaaatgcatcaagttaagattatattacaaata

SEQ ID NO: 448220 - DNA, 120 bp, Artificial Sequence
  ENSG00000155249_9 (sequence is synthesized)
ttttcagtatgaagactcatagcagaaagtgggaaatggaaacaaaccagaggacaccaaactgggaaaataaggaagaagtgaaagacttggacaactttttcaaagtgtaactgaata

SEQ ID NO: 448221 - DNA, 120 bp, Artificial Sequence
  ENSG00000155249_10 (sequence is synthesized)
tatgaagactcatagcagaaagtgggaaatggaaacaaaccagaggacaccaaactgggaaaataaggaagaagtgaaagacttggacaactttttcaaagtatgcaaaaacagcaacta

SEQ ID NO: 448222 - DNA, 120 bp, Artificial Sequence
  ENSG00000155249_11 (sequence is synthesized)
gaagatagcaaagtggaagttattgctgtctcagacaaattgaaaactccctctggaagaagaatattcctgttctccacttctctgtctatatcattcttccactgcactgcttctggg

SEQ ID NO: 448223 - DNA, 120 bp, Artificial Sequence
  ENSG00000155252_0 (sequence is synthesized)
cggccgcgagcgcagtggtgtggagcgcgccgggtcccggagccggctgtctgagggatggacgagacgagcccactagtgtcccccgagcgggcccaacccccggactacaccttcccg

SEQ ID NO: 448224 - DNA, 80 bp, Artificial Sequence
  ENSG00000155252_1 (sequence is synthesized)
ccttcccgtcgggctcgggcgctcactttccgcaggtgcccgggggcgcggtccgagtggcggcggcggccggctcgggc

SEQ ID NO: 448225 - DNA, 120 bp, Artificial Sequence
  ENSG00000155252_2 (sequence is synthesized)
ggcggcccagggccagacccaaaccgtggcggcgcaggcccaggctctggccgctcaggccgcggcggcagcccacgccgctcaggcccaccgcgagcggaacgagttcccggaggatcc

SEQ ID NO: 448226 - DNA, 120 bp, Artificial Sequence
  ENSG00000155252_3 (sequence is synthesized)
aacgagttcccggaggatcctgagttcgaggcggtggtgcggcaggccgagctggccatcgagcgctgcatctttcccgagcgcatctaccagggctccagcggaagctacttcgtcaag

SEQ ID NO: 448227 - DNA, 120 bp, Artificial Sequence
  ENSG00000155252_4 (sequence is synthesized)
gaccctcaggggaggatcattgctgtcttcaaacccaagaatgaagagccctatgggcatcttaatcctaagtggaccaagtggctgcagaagctgtgctgtccttgctgctttggccgt

SEQ ID NO: 448228 - DNA, 120 bp, Artificial Sequence
  ENSG00000155252_5 (sequence is synthesized)
gactgccttgtccttaaccagggctatctctcagaagcaggggccagcctggtggaccaaaaactggaactcaacattgttccccgtacaaaggtagtatacctggccagtgagaccttc

SEQ ID NO: 448229 - DNA, 120 bp, Artificial Sequence
  ENSG00000155252_6 (sequence is synthesized)
aactatagtgccattgaccgagtgaagtccaggggcaagcggcttgcactagagaaagtgccaaaagttggacagcggtttaaccgcatcgggctaccaccaaaggttggttcattccag

SEQ ID NO: 448230 - DNA, 120 bp, Artificial Sequence
  ENSG00000155252_7 (sequence is synthesized)
ctctttgttgaaggctacaaagatgcagactattggctgcggcgttttgaagcagaacctcttcctgagaacactaaccggcaactactgctccagtttgagcggttggtggtgctggat

SEQ ID NO: 448231 - DNA, 120 bp, Artificial Sequence
  ENSG00000155252_8 (sequence is synthesized)
tacatcatccgcaacactgatcgaggcaatgacaactggctgattaaatatgactgtccaatggatagttctagctctcgggacacagactgggtggtggtgaaggagcctgttatcaag

SEQ ID NO: 448232 - DNA, 120 bp, Artificial Sequence
  ENSG00000155252_9 (sequence is synthesized)
gtggctgccatagacaatgggctggccttcccactgaagcatcctgactcctggagggcatatcctttttactgggcctggttgccccaggcgaaagtcccattttctcaggagatcaaa

SEQ ID NO: 448233 - DNA, 120 bp, Artificial Sequence
  ENSG00000155252_10 (sequence is synthesized)
gatctgatccttccaaagatatcggaccctaacttcgtcaaggacttggaagaggacctatatgaactcttcaagaaagatcctggtttcgacaggggccagttccataagcagattgct

SEQ ID NO: 448234 - DNA, 120 bp, Artificial Sequence
  ENSG00000155252_11 (sequence is synthesized)
gtcatgcggggccagatcttaaatctgacccaggccttgaaagacaacaagagtcccctgcacctcgtccagatgccacctgtgattgtcgagacggcccgttcccaccagcggtcttct

SEQ ID NO: 448235 - DNA, 120 bp, Artificial Sequence
  ENSG00000155252_12 (sequence is synthesized)
agcgagtcctacacacagagctttcagagccggaagcccttcttttcatggtggtagctccagaggcaggcagaggaaatattgtcagagactggtgggaggaagcctggggagtggggt

SEQ ID NO: 448236 - DNA, 120 bp, Artificial Sequence
  ENSG00000155252_13 (sequence is synthesized)
gcaggaaaagccagagaagccggtggagagcagcacctttaagagccctctctctctgcttgccaccctgctcagagctttccacccacagggagaagcacaatcaggaacagtgagtgc

SEQ ID NO: 448237 - DNA, 120 bp, Artificial Sequence
  ENSG00000155252_14 (sequence is synthesized)
tcctcgcccttctgatgtgggggaggctggagctccatgcacgtagtccagatgcctgggaaggaacatctcccttccagcatctgctggtagcaggctgggacagtcccttccttccct

SEQ ID NO: 448238 - DNA, 120 bp, Artificial Sequence
  ENSG00000155252_15 (sequence is synthesized)
gaaaccctgctctattgcaattccctattatattctgcatcagaaaaacaaacaaaacaaaaacaactttaaatgcttgtagcagaaccccgggtcatctcatgtcagaaacctttaatc

SEQ ID NO: 448239 - DNA, 120 bp, Artificial Sequence
  ENSG00000155252_16 (sequence is synthesized)
caggcctaaatttgcatagacctgacattcagctgccttgcagttgcttcctcccatgagccaaggtggtgtcagagggcaactggatgactcgcagtaccacagcactgggacagacag

SEQ ID NO: 448240 - DNA, 120 bp, Artificial Sequence
  ENSG00000155252_17 (sequence is synthesized)
tacccccgccagcacttccgcacacaatcatagagaacctctctgctctctgctggcctacagcttgtctgtttctcaagcagaggcaggaagagctagtcttagcatttatattttaat

SEQ ID NO: 448241 - DNA, 120 bp, Artificial Sequence
  ENSG00000155252_18 (sequence is synthesized)
aggaagttgactcccagcatgtaaaagtgatccacgcagccggagtgtatgccgggagctaagtggtctatgggtgaacatatcccaccttgcttcctgagtccttggtcccaatcttct

SEQ ID NO: 448242 - DNA, 120 bp, Artificial Sequence
  ENSG00000155252_19 (sequence is synthesized)
catttgttcctctcgttttaaattttttccccccaactcttttgatgtaagagttcagtttgtcttcgggagtgggtctctgcaagggctctgggatgagtcttggcttccaagaggaca

SEQ ID NO: 448243 - DNA, 120 bp, Artificial Sequence
  ENSG00000155252_20 (sequence is synthesized)
ggctattaggttcttggacttttttctgtgctaccgctgctgcttggtggaagtaacaggacgtggattctgcctcataagtggcagtttcccttttctctctgacttgtcctaggccga

SEQ ID NO: 448244 - DNA, 120 bp, Artificial Sequence
  ENSG00000155252_21 (sequence is synthesized)
tttctctatggcttccctgagaaaggtgaggcccaaaggagagaggccttcaaactgtcccaggtcctgcgcagctcagtgcgtatcttcttgcttccatgtgtcttttcccctgctgcc

SEQ ID NO: 448245 - DNA, 120 bp, Artificial Sequence
  ENSG00000155252_22 (sequence is synthesized)
tcactccccacccccacttgccaggtgtttgagccatttctacaccaaagcaaagtacggcctcaggagggagtaaaaagggtgccatctgtgtctggaggggcagctgtgttcatgccc

SEQ ID NO: 448246 - DNA, 120 bp, Artificial Sequence
  ENSG00000155252_23 (sequence is synthesized)
tgtgctactggacatttcacaattctggcaccttgcgattggtcagtcaacctcagaaagtaactatcttgaaggtttgaaaaacaaccaaagaaagggagtgaggactatggctgcatg

SEQ ID NO: 448247 - DNA, 120 bp, Artificial Sequence
  ENSG00000155252_24 (sequence is synthesized)
tcctctgcttgcccggctgcagagcagagatgtgcagccctctggtcagctggtccaggctggtccccgccggtccccttccagtccagccaccaagagtccacttgtcccgggcttcca

SEQ ID NO: 448248 - DNA, 120 bp, Artificial Sequence
  ENSG00000155252_25 (sequence is synthesized)
cctggctgacaggaagaatttctgagagctggatgtgcatgccctgtggacgaaggtacagctcgcctgcctgccccaatcccagccccgacaatcacatgcagctgactcggacactgg

SEQ ID NO: 448249 - DNA, 120 bp, Artificial Sequence
  ENSG00000155252_26 (sequence is synthesized)
ccttgggaacaatgttcgagagaacacttgccccttgactgtaggagccagaaggggacccaggtgtgcatagctctctgtagacatttttacccaaacctgttggtaaagtgcccatct

SEQ ID NO: 448250 - DNA, 120 bp, Artificial Sequence
  ENSG00000155252_27 (sequence is synthesized)
ggtgctcaagagagcctgggggtctaacagggagcccggctgcctcacctggccacagcctccacaccagatctccacattgtcttgatccagaccagctctgtgatcagaaggaaattg

SEQ ID NO: 448251 - DNA, 120 bp, Artificial Sequence
  ENSG00000155252_28 (sequence is synthesized)
ggtccagtgtaggagagagctggtcctgggcctggcaggcaagagtgtgggcatcctttcctggcctttctccactctccctcaagcctgtgctcaggttgccttgaatgtggactctgg

SEQ ID NO: 448252 - DNA, 120 bp, Artificial Sequence
  ENSG00000155252_29 (sequence is synthesized)
aagagccaggggcccagaatgccgggggaggcttctgagtggcactcatggaacaccgtccctctgccagccataggccctgcctccagtgtcagggaatggaggctgggctgcgagagt

SEQ ID NO: 448253 - DNA, 120 bp, Artificial Sequence
  ENSG00000155252_30 (sequence is synthesized)
gttgctgccccctgtgtcattcttctaatccaatgtagaaattgtacgtaatgtatttaaatcaacgcaaatgtatgaataacaaatacagttctgaccttttttgtccagtttctttgg

SEQ ID NO: 448254 - DNA, 120 bp, Artificial Sequence
  ENSG00000155252_31 (sequence is synthesized)
gggaaggaagacaaagaaggtaggaacggaattttgagggcaaagaaacctgtgtttccatggaattgctgagacgtggctcctggggctatttctccctaataaaggatgatccaggtc

SEQ ID NO: 448255 - DNA, 120 bp, Artificial Sequence
  ENSG00000155252_32 (sequence is synthesized)
ctcatttccaaagtcccaatgctctgaaaaccaaaagtattttcataacccatttgaaaccaaacctgacctgaacttacactgataggaagctatgggtaattatgatgtgttcctttt

SEQ ID NO: 448256 - DNA, 120 bp, Artificial Sequence
  ENSG00000155252_33 (sequence is synthesized)
agtgtgattctttgttgcagaaatgtcaatatattttatgacatggttccctactagggattatacagtatttgctgactacttcctaagagccaaaaataaaaaatctgaattccaaaa

SEQ ID NO: 448257 - DNA, 120 bp, Artificial Sequence
  ENSG00000155254_0 (sequence is synthesized)
aggagaggaagagaggactaagaggggagcaaggcgaggaggccgcggcgggcgcagcgggcacctgggccgtgctgcccccgcgagcaaggcgccgccattccgctgctcggggcgccg

SEQ ID NO: 448258 - DNA, 80 bp, Artificial Sequence
  ENSG00000155254_1 (sequence is synthesized)
cgcgtgcggcccgcggcgcggtgcgcctgcagcggcccttcctgcgcagcccgctgggcgtgttgcggctgctgcagctg

SEQ ID NO: 448259 - DNA, 120 bp, Artificial Sequence
  ENSG00000155254_2 (sequence is synthesized)
ggcgtgttgcggctgctgcagctgctggccggcgctgccttctggatcactatcgccaccagcaagtaccagggccccgtgcacttcgcgctcttcgtgtccgtgctcttctggctgctc

SEQ ID NO: 448260 - DNA, 120 bp, Artificial Sequence
  ENSG00000155254_3 (sequence is synthesized)
accctgggcctctacttcctcacgctgctgggcaagcacgagctggtccccgtgctgggctcgcgctggctcatggtcaacgtggcgcacgatgtgctggcggccgcgctctacggcgcc

SEQ ID NO: 448261 - DNA, 120 bp, Artificial Sequence
  ENSG00000155254_4 (sequence is synthesized)
gccaccggcatcatgagcgaccagatgcagcgccacagctactgcaacctcaaggattacccgctcccctgcgcctaccacgccttcctggcggccgccgtctgcggcggcgtctgccac

SEQ ID NO: 448262 - DNA, 120 bp, Artificial Sequence
  ENSG00000155254_5 (sequence is synthesized)
ggcctctacctgctttcggcgctctatggctgcgggcgtcgctgccagggcaagcaggaggtggcgtgaggccgcccgcgcccgccgcggccccgatcggggcgggggaatccccggaga

SEQ ID NO: 448263 - DNA, 120 bp, Artificial Sequence
  ENSG00000155254_6 (sequence is synthesized)
ccagcctccttaatcccttcccccgccgccgccccgcgcgggtgcgccctggcaccctctccctgccctccagcgtttccactgtcgcccgcgcccgggaaccctgacgctcagctcccg

SEQ ID NO: 448264 - DNA, 120 bp, Artificial Sequence
  ENSG00000155254_7 (sequence is synthesized)
cccgacggcagcgccgccgccgcccagaatcccagcccagaatcccgaccgccgcgccggacgcgccgtctcccgggacaagcgcaggctgcgatccgaggggctgacacacactcgcag

SEQ ID NO: 448265 - DNA, 120 bp, Artificial Sequence
  ENSG00000155254_8 (sequence is synthesized)
acgagccgccccgaggcgaaacctcgcggttcctcttcccttccctgctgagactaagacgtggacaggggccgcgcagatccgggggaggctcccaaattggaaccaggcttctggctg

SEQ ID NO: 448266 - DNA, 120 bp, Artificial Sequence
  ENSG00000155254_9 (sequence is synthesized)
cccccttccctcccgccccgtggtcggaagagcactcccttccctggcccctcatccagcctccggtgctgtaaaacgcaggcgctgggccgcgggcggagctgaggacaggccttggct

SEQ ID NO: 448267 - DNA, 120 bp, Artificial Sequence
  ENSG00000155254_10 (sequence is synthesized)
ggtcccaggatgagcgacgagtttggttttagctggggattgtgctggcatcctgcgaagctcctcccagccggtctctctgtgctcggttgtcttggggtggggcccatccgccgaggt

SEQ ID NO: 448268 - DNA, 120 bp, Artificial Sequence
  ENSG00000155254_11 (sequence is synthesized)
ggggaccgataggagaagccggtgggttgtacccttacacttgtggagtctcctcttgcctctacctactccgcctttgtccttaaggtttttgcaggccagtgccaaacacacactaac

SEQ ID NO: 448269 - DNA, 120 bp, Artificial Sequence
  ENSG00000155254_12 (sequence is synthesized)
tgtcctggcctctccgtgacacaagtctcttcccagccttcctcacaggcttctgccgcccccctcatctccaccctcccccatatctgtttgcattaggagttccacgaccatggtgga

SEQ ID NO: 448270 - DNA, 120 bp, Artificial Sequence
  ENSG00000155254_13 (sequence is synthesized)
ccagcgctgtttgcattaaaagggtgggtgagtcaggacccctggctcaggagccgcctctcctaaaagagggtttcaaggccaaatgggtttgtcaacggtgctgtctccctttcttgg

SEQ ID NO: 448271 - DNA, 120 bp, Artificial Sequence
  ENSG00000155254_14 (sequence is synthesized)
agatgctcattagcttatcaaagactgagaagtcccgctgttacagaaataatttagtttgctgtattaactgctcctgggcctggagcagtattcccaccttaagattcccagcatccc

SEQ ID NO: 448272 - DNA, 120 bp, Artificial Sequence
  ENSG00000155254_15 (sequence is synthesized)
tgtgctgtcccggctctcattcatgccgaagggcccaacccattggctgtgttctgtttgaagatttggggggcgccttctctttcttccccagggaattctctagcagagggaggggac

SEQ ID NO: 448273 - DNA, 120 bp, Artificial Sequence
  ENSG00000155254_16 (sequence is synthesized)
ccaccccagtgaggaagtagattgctgcctctagccagagacctgaactggggaatttgaacattcctttacattgttggagaaatgaagccaaagttattcagatggttttcccaggct

SEQ ID NO: 448274 - DNA, 120 bp, Artificial Sequence
  ENSG00000155254_17 (sequence is synthesized)
aaaggaaagtcacctgcaagagatcccggcactgatctggagcagctgacagggtgggtctcccttaccaaagagaagaaccactctctggcgctggggtgacctgctggctgggcctgt

SEQ ID NO: 448275 - DNA, 120 bp, Artificial Sequence
  ENSG00000155254_18 (sequence is synthesized)
aaggtttccatgttgctgaggccatggagattcccagagctggtcacaccgaccgctctcagggcccgctgccctgggctggcaacaccattctggccttggcctgcagaagctttcaga

SEQ ID NO: 448276 - DNA, 120 bp, Artificial Sequence
  ENSG00000155254_19 (sequence is synthesized)
gtcttcactggcagtagggggagatggggagaggaatgatctctgcccagccccttcctttccaaaccatgcaatggaagagcccagatgggtgaagattgattttgccttaactcaaga

SEQ ID NO: 448277 - DNA, 120 bp, Artificial Sequence
  ENSG00000155254_20 (sequence is synthesized)
gaattcctgttctccttgtgctatgatttggacacaagattctggatacctggaacttagctgtgtactcctgtaccctaaacagtggatttgagttccagcgtttattcttttttcctt

SEQ ID NO: 448278 - DNA, 120 bp, Artificial Sequence
  ENSG00000155254_21 (sequence is synthesized)
ttttcagatcaccatctaagttacatctttagctcaggtccatccttctcaagatctccttcttagccccccagcccctggtgctgtctgtggtcaggtgaccttactcaggagcagata

SEQ ID NO: 448279 - DNA, 120 bp, Artificial Sequence
  ENSG00000155254_22 (sequence is synthesized)
tctccttggccgccatggagcctcatccatccacacgtgcctgtagcattccagagctcactgcccttctagatgtgccttcccgcttggcttccagcggcttgtgctcactctgtctgc

SEQ ID NO: 448280 - DNA, 120 bp, Artificial Sequence
  ENSG00000155254_23 (sequence is synthesized)
caggtatgagaagaacacgtaagaccgccaccacactcaccctccctcaaggccctgtgccataggggtggccacccgacctgcccccagaacttttggatactggaggcagttgcatag

SEQ ID NO: 448281 - DNA, 120 bp, Artificial Sequence
  ENSG00000155254_24 (sequence is synthesized)
gtctccctctctgggcaccaggactcagtccagcccaagactactctgggcagctcccatcccagtctggggccatttgcagactcaggaaaggatttctacagtgttctataaaagcca

SEQ ID NO: 448282 - DNA, 120 bp, Artificial Sequence
  ENSG00000155254_25 (sequence is synthesized)
aaagagagagtgggtttgggaagagtgagggtggttggggagaggggaccgatgtgcctcattgtttagtggtgattacaaatatgcttttctggataaagtttggttgtttgctcttgg

SEQ ID NO: 448283 - DNA, 120 bp, Artificial Sequence
  ENSG00000155254_26 (sequence is synthesized)
tggaacgagtggcggtgcctctggtgggtgatggactcttactccgacatgggtaactcggacagctttggacaggacgaggcgggccctggcaggagactgcggatgtccagatgggga

SEQ ID NO: 448284 - DNA, 120 bp, Artificial Sequence
  ENSG00000155254_27 (sequence is synthesized)
cgagctgggggcctggcgcagaggggaaaggggggcgccagggtgatggggacccagagcctgctcttgggaacagccagagtaagattggaacccagacttgcagtccagcgctgtttg

SEQ ID NO: 448285 - DNA, 120 bp, Artificial Sequence
  ENSG00000155256_0 (sequence is synthesized)
agagcgattcgcgtcccggaagcggcggtggcggccgcggcgtaggcggaggagattttcggacctgcgacttccgaacaaccctggcaggaggagcggcgttcagccgggggaggcctg

SEQ ID NO: 448286 - DNA, 120 bp, Artificial Sequence
  ENSG00000155256_1 (sequence is synthesized)
aagaaacgctccggggcccagtggctctacccctgctcctgcccgaccctgccgcctccctcacggagccagcggccgggtaggatgcagacatcagaacgtgaggggagtgggccggag

SEQ ID NO: 448287 - DNA, 120 bp, Artificial Sequence
  ENSG00000155256_2 (sequence is synthesized)
ctgagccccagcgtgatgcccgaggctcccctggagtctccaccttttcctaccaagtccccagcgtttgaccttttcaacttggttctctcctacaagaggctggagatctacctggaa

SEQ ID NO: 448288 - DNA, 120 bp, Artificial Sequence
  ENSG00000155256_3 (sequence is synthesized)
cccttgaaggatgcaggtgatggtgttcgatacttgctcaggtggcagatgcctttgtgttccttgctgacctgcctgggcctcaacgtcttgttcctcactttgaatgagggtgcatgg

SEQ ID NO: 448289 - DNA, 120 bp, Artificial Sequence
  ENSG00000155256_4 (sequence is synthesized)
tactcagtaggtgccctgatgatttcagtgcccgccctgctgggctaccttcaggaggtttgccgggcacggctgcctgattccgagctgatgcggaggaagtatcatagcgtgaggcag

SEQ ID NO: 448290 - DNA, 120 bp, Artificial Sequence
  ENSG00000155256_5 (sequence is synthesized)
gaggacctgcagagaggtcgcctgtctcgtcccgaggccgtggctgaggtgaagagcttcttgatccagctggaggccttcctgagccgcctgtgctgcacatgtgaagccgcctaccgc

SEQ ID NO: 448291 - DNA, 120 bp, Artificial Sequence
  ENSG00000155256_6 (sequence is synthesized)
gtgctgcactgggagaaccccgtcgtgtcctcacagttctatggggctcttctgggcacagtctgcatgctgtatttgctgccactctgctgggttctcacccttttaaacagcacgctc

SEQ ID NO: 448292 - DNA, 120 bp, Artificial Sequence
  ENSG00000155256_7 (sequence is synthesized)
tttctggggaatgtggagttcttccgagttgtgtctgagtacagggcatctctgcagcagaggatgaacccaaagcaggaagagcatgcctttgagagtcctccaccaccagatgttggg

SEQ ID NO: 448293 - DNA, 120 bp, Artificial Sequence
  ENSG00000155256_8 (sequence is synthesized)
gggaaggatggtctgatggacagcacgcctgccctcacacccacggaggacctcacaccgggcagcgtggaggaggctgaggaggctgagccagatgaagagtttaaagatgcgattgag

SEQ ID NO: 448294 - DNA, 120 bp, Artificial Sequence
  ENSG00000155256_9 (sequence is synthesized)
gagacccacttggtggtgctggaggatgatgagggcgccccgtgcccagcagaggatgagctggccctgcaggacaacgggttcctgagcaagaatgaggtgctgcgcagcaaggtgtct

SEQ ID NO: 448295 - DNA, 120 bp, Artificial Sequence
  ENSG00000155256_10 (sequence is synthesized)
cggctcacggagcggctccgcaagcgctaccccaccaacaacttcgggaactgcacgggctgctcggccaccttctcagtgctgaagaagaggcggagctgcagtaattgtggaaacagc

SEQ ID NO: 448296 - DNA, 120 bp, Artificial Sequence
  ENSG00000155256_11 (sequence is synthesized)
ttctgctctcgatgctgctccttcaaggtgcccaagtcctccatgggggccacagcccctgaagcccagagggagactgtgtttgtgtgtgcctcgtgtaaccagaccttgagcaagtga

SEQ ID NO: 448297 - DNA, 120 bp, Artificial Sequence
  ENSG00000155256_12 (sequence is synthesized)
tagaccccccactctccccacccctggcccactgtggtgtgtgctgggcaaatgtggcctgaatgctaggtaggcttccccttccttcctcactctctccagctggattctggagctgtt

SEQ ID NO: 448298 - DNA, 120 bp, Artificial Sequence
  ENSG00000155256_13 (sequence is synthesized)
ctccatccatgagagtggctggcaatggctgctctcaatcccttgagggagaagagcccctggagggcctggcatgtttgtcctgctctgcctgggactgagcgagtggacttagggctg

SEQ ID NO: 448299 - DNA, 120 bp, Artificial Sequence
  ENSG00000155256_14 (sequence is synthesized)
ggcaggcagtagccaccagagggcagcagcgaactaggccaggcctgactggggtctgaagatcagggtcagtgtggctgtgcctgggaattccagacctgaggttgggaaaagaggttt

SEQ ID NO: 448300 - DNA, 120 bp, Artificial Sequence
  ENSG00000155256_15 (sequence is synthesized)
ttctcctgcagggtactgggccaggccctcagcctcagagagcctgcagaagggcttgggagtgccacaccccatctctgctgattgaatgtccctccaggcaccaggatctcatcattt

SEQ ID NO: 448301 - DNA, 120 bp, Artificial Sequence
  ENSG00000155256_16 (sequence is synthesized)
ccccatcagagggtgtggccaggcctaacaagaccatgggtgcttctagaaacagggttgaagttcccagattccctgagaggagaatgtgtataggagggtttggctgagtccttcagc

SEQ ID NO: 448302 - DNA, 120 bp, Artificial Sequence
  ENSG00000155256_17 (sequence is synthesized)
gttaagtggaggaaagcttggggaagccccaatagctggacagacctcggcctcccctcgaagacacctcaattcacagactctcagcccacacaatgccccagtgtccccagctccgct

SEQ ID NO: 448303 - DNA, 120 bp, Artificial Sequence
  ENSG00000155256_18 (sequence is synthesized)
ggagcagctgcagggcacttggatcacaacttctgcaccctctgtccagagtctagggcagtcctccactggcccagcactccagtttcctttccctgcctcttgtccaatggagtggga

SEQ ID NO: 448304 - DNA, 120 bp, Artificial Sequence
  ENSG00000155256_19 (sequence is synthesized)
ggccaggtgagtggagcagaggtcctgaagcccttgacccctgggggcctgggtagtgtaggatctcgctgggctgggtcctggattccagggctattccctggaggacagtctcagtta

SEQ ID NO: 448305 - DNA, 120 bp, Artificial Sequence
  ENSG00000155256_20 (sequence is synthesized)
tgggataaggccccctgggggtctccatttctttccaacagtttcatgttcactactggactcttacgggctcagtatctctcccttagccatgagctggctcaggcatcccttcccttc

SEQ ID NO: 448306 - DNA, 120 bp, Artificial Sequence
  ENSG00000155256_21 (sequence is synthesized)
cctggagctgccctgcctttctcaagtatttatttatttattgcatggttcctgggaacatgtggcacaagtaatgggatgaggaggaattgggggtgggggtcttctacctaggactct

SEQ ID NO: 448307 - DNA, 120 bp, Artificial Sequence
  ENSG00000155256_22 (sequence is synthesized)
tccctggagtcatgggctgcctgggacccaggacccatgagggggctgagaggtttctacactcgaggagcaggggtccagagaggcaggctggggaggcaagggacccatcctaggccc

SEQ ID NO: 448308 - DNA, 120 bp, Artificial Sequence
  ENSG00000155256_23 (sequence is synthesized)
gctttcttgccgagccaagcagcttagctggggctgtgcagccaggggcttacccaggccagtggaggtgccacagccctggggagccagacaggctttggtatcgtatcgcctctgtgt

SEQ ID NO: 448309 - DNA, 120 bp, Artificial Sequence
  ENSG00000155256_24 (sequence is synthesized)
ccttttaagagaggagagttcagtaccccgtgctttctttacactggagaggaactaaaaggatctctgtgtctatggagaattgtcaataaaaaggcctcaagcttcttgtttttgtca

SEQ ID NO: 448310 - DNA, 120 bp, Artificial Sequence
  ENSG00000155256_25 (sequence is synthesized)
cggagctgcagtaattgtggaaacagcttctgctctcgatgctgctccttcaaggtgcccaagtcctccatgggggccacagcaaaatcctgaaacatttggtacatgccgaagaataga

SEQ ID NO: 448311 - DNA, 120 bp, Artificial Sequence
  ENSG00000155256_26 (sequence is synthesized)
gtaataacaagatgaatacctgtggctgcttcactaaagttgaaaaacaagagccctggcaacacccccgcagctcccagcactgctcctgccttcctggagtcaatcaccagccgcaat

SEQ ID NO: 448312 - DNA, 120 bp, Artificial Sequence
  ENSG00000155256_27 (sequence is synthesized)
tttaatctttttcttatttccttggcactttgaacaaaactaaaaattcctttttttccttttataaaatataaaatatttcctatacatattgtaaataaaaaacacagataagcaaaa

SEQ ID NO: 448313 - DNA, 120 bp, Artificial Sequence
  ENSG00000155256_28 (sequence is synthesized)
catatgtttgggtgattgctgtatttgttttcctccctgtggtagagttatttattacagaagccatgatttattgagcatttactacatttaatctctgtagctgtctggggcaggtgg

SEQ ID NO: 448314 - DNA, 120 bp, Artificial Sequence
  ENSG00000155256_29 (sequence is synthesized)
tggtatctaagttttgtttaagaggcttaagttaggtgactcgctcagagttaggagggtgactctttcctgtagtgaagggaagagaggccagccagctgcagaagtgggtacccctaa

SEQ ID NO: 448315 - DNA, 120 bp, Artificial Sequence
  ENSG00000155256_30 (sequence is synthesized)
tctgtagtaactaacactgaccatttaggcagtggctgggctgtcctttctgccctagtgaggagcagttctgggaggtctgttcggcctctgggtttatctaggcctaccctgtgtctc

SEQ ID NO: 448316 - DNA, 120 bp, Artificial Sequence
  ENSG00000155265_0 (sequence is synthesized)
cgccaaagctaaacccggccgttgcctgcaggagccgcggcagcgggcgatcgggccgtgaggagcctcgggcgcggcctcgcctcccgggcccggcgcctgcctcagcacagcggacag

SEQ ID NO: 448317 - DNA, 120 bp, Artificial Sequence
  ENSG00000155265_1 (sequence is synthesized)
gccgccaccgccgccgcccacctgctcccggggtcagcaccgcggagacccccctcgcccggccccgcgacagcctccgagcgcccccggatcatggccaccgaggtccacaatctgcag

SEQ ID NO: 448318 - DNA, 120 bp, Artificial Sequence
  ENSG00000155265_2 (sequence is synthesized)
atctgcaggagctccggcgaagtgcctcactggccaccaaggtctttatccagagagactacagcgatgggaccatctgtcagttccagaccaaattccccccagagctggacagccgga

SEQ ID NO: 448319 - DNA, 120 bp, Artificial Sequence
  ENSG00000155265_3 (sequence is synthesized)
tcgagcggcagctctttgaagagactgtgaagaccctcaacggattttacgcagaggctgagaagattgggggcagctcctacctcgagggctgcctggcctgcgccacggcctacttca

SEQ ID NO: 448320 - DNA, 120 bp, Artificial Sequence
  ENSG00000155265_4 (sequence is synthesized)
tcttcctctgcatggagacccactatgagaaggttctcaagaagatttcccgctacatccaggagcagaatgagaagatctttgcacctcgaggcctcctacttacagaccctgtggagc

SEQ ID NO: 448321 - DNA, 120 bp, Artificial Sequence
  ENSG00000155265_5 (sequence is synthesized)
gtgggatgagggttattgagatctccatctacgaggaccggtgcagcagtggcagctccagcagcggcagcagcagcggcagtggcagcagcagcggtgggggtggtggggcgggggccc

SEQ ID NO: 448322 - DNA, 120 bp, Artificial Sequence
  ENSG00000155265_6 (sequence is synthesized)
ggtgactggccgagagtccctgtagggaggtgtatggccggagtgagggccttgcagacctgcggcggctgcgctaccagagcacccgcttctgagtcattctttgggctcaccctgctg

SEQ ID NO: 448323 - DNA, 120 bp, Artificial Sequence
  ENSG00000155265_7 (sequence is synthesized)
cccggggtgggagggagggtgacgggcctcatatttcctgtgggccatcaacctatgccccctgtccctcacccccgtctggatcagtccatttcctgacctgggggcttttccttcccg

SEQ ID NO: 448324 - DNA, 120 bp, Artificial Sequence
  ENSG00000155265_8 (sequence is synthesized)
atggggctggtctgggccacacagagacagatcttcctaggaaggctggggtggggagaacacaacctaggcggcccctctcttccacagcccctctcccaaccctgcgaggggggccga

SEQ ID NO: 448325 - DNA, 120 bp, Artificial Sequence
  ENSG00000155265_9 (sequence is synthesized)
ggcctgccacatagaggactcccacactgcatgacccctcatcccaaacccatatccaccaggactctttcccttgggccctgcgtcccgtggctgtctcccagtatctgttccttctca

SEQ ID NO: 448326 - DNA, 120 bp, Artificial Sequence
  ENSG00000155265_10 (sequence is synthesized)
tgcccctgcagggccccggcctgtctatgatcctgcctccaccaaattcaaggtgtggggagacgggtgccgtggttgggagctgttcagcgcactcctgacctcttctagacctatggc

SEQ ID NO: 448327 - DNA, 120 bp, Artificial Sequence
  ENSG00000155265_11 (sequence is synthesized)
tttcctgtcctgcattcagagctagaggccagctcggccttgcgagaagcatccaactttgagactttgcaggctgccaggtgctggttggggggcacagagcctggggctctgggaggt

SEQ ID NO: 448328 - DNA, 120 bp, Artificial Sequence
  ENSG00000155265_12 (sequence is synthesized)
aatatgggggtctgggaaactccgtgaagagacatagccatgcggggcctgaatctcctgaactacagccagtttcctgagattagaacctgtgtgtatgcacatgtgaatgtatgtgtg

SEQ ID NO: 448329 - DNA, 120 bp, Artificial Sequence
  ENSG00000155265_13 (sequence is synthesized)
agtgcacatgtgtgtaagtgcagtgtgcgtaaatgtgtgagtctgcgtgtgttagcatgcctgtatgtgagcgcgtgtgtgagcgcatgtgtgtgcaccagtgcacaagtgtatgaatgt

SEQ ID NO: 448330 - DNA, 120 bp, Artificial Sequence
  ENSG00000155265_14 (sequence is synthesized)
ggacacatttataagcacacctgtgtgtgtctgagtacatgtgcacacacgtgtgcacaaatgtgcatttatatgagtgtgagtgcatgcatgtgcatgaacatgtgtgcacaagcatgt

SEQ ID NO: 448331 - DNA, 120 bp, Artificial Sequence
  ENSG00000155265_15 (sequence is synthesized)
gtgtatgagtgttcatgtgtatgagtgtgtgtgtatgcaggtgagtgcatgtgtgtgtgagtgtgtttgtgtgttccccttggctgccaggccaacgactgcttctctgcatcctgctgt

SEQ ID NO: 448332 - DNA, 120 bp, Artificial Sequence
  ENSG00000155265_16 (sequence is synthesized)
cttcgctacctgagggtctgtgacttcttccctgtgtgggtccagcctgaccccctgtaagtaaatgtccaaaagccccttgcccctcccctagggctaccagggaacatactctactgc

SEQ ID NO: 448333 - DNA, 120 bp, Artificial Sequence
  ENSG00000155265_17 (sequence is synthesized)
atatgttctagtggaagagaagccggggttctaggaaagaagagccaaactttggtggcctttggtgccccctctcagctccccatgacaagacaacggggctgcagacactgtgtgttc

SEQ ID NO: 448334 - DNA, 120 bp, Artificial Sequence
  ENSG00000155265_18 (sequence is synthesized)
agcctgcccaggggctggggctctttaaggctttgtaggtgaggtttccatggaccttcaaaggtgccagcagcctgcaggggaaaggcaaactccctccttgcaaggaaaggagatgtc

SEQ ID NO: 448335 - DNA, 120 bp, Artificial Sequence
  ENSG00000155265_19 (sequence is synthesized)
cagccaatgatgcccggcttctgaggcccagaggagcaggtgggatgggagcagcccctggggctggtgtcccgaagatgaaatgaagggggctgcctatctcagttggcgggaggtgtt

SEQ ID NO: 448336 - DNA, 120 bp, Artificial Sequence
  ENSG00000155265_20 (sequence is synthesized)
agaagtggatgtgcaagaccagccactggaggtagctctctggagtcaaagagaggcctgcttttctaccagacatgggagcagcatgtaggatacaagggcctacccagagaccagaga

SEQ ID NO: 448337 - DNA, 120 bp, Artificial Sequence
  ENSG00000155265_21 (sequence is synthesized)
gagtcagcctagtccttgcagcctcaggaagtcctcggcccaagtgagtcctggtccaaggatccccctggagagccgcagttcagtgggctccaccgcagcccctggccacggcctatg

SEQ ID NO: 448338 - DNA, 120 bp, Artificial Sequence
  ENSG00000155265_22 (sequence is synthesized)
ccctccctgggcccctgtggggctgggcattgtgtctgacctgtgcatctcccatgggagggctgggcacaggcagtgctatggccttttttttttttttctttttccaataaaagaact

SEQ ID NO: 448339 - DNA, 120 bp, Artificial Sequence
  ENSG00000155265_23 (sequence is synthesized)
tgcccagcgtgaagctctgtgatgctttctctgccccgtgacgatggagggtcagttctatgctccaggaccacatgaggggatactcagctgcctgaactggacctgacatggggagca

SEQ ID NO: 448340 - DNA, 120 bp, Artificial Sequence
  ENSG00000155265_24 (sequence is synthesized)
ggatgaactctgtcttcttggagcttgcagtctactgaagaggcagacacctcagcatctctaatctggaatctttggggcacttgtagccttgggtgggggaacaggttggactgaaag

SEQ ID NO: 448341 - DNA, 120 bp, Artificial Sequence
  ENSG00000155265_25 (sequence is synthesized)
cgaggccaaaagtaatcaattaatgatatcaataaatcctcatttcttgagctcttcccctgggttgggtcctgttgggagctggatcacacaggtcactcagtactgaagatgagaaag

SEQ ID NO: 448342 - DNA, 120 bp, Artificial Sequence
  ENSG00000155265_26 (sequence is synthesized)
ctggatgatcacttctcggccttttggccaagatcaaatatggagaaagtagctggatgttggaacctagcagagttgtgtcttgaattttataatttattgagcacctactatgtgcca

SEQ ID NO: 448343 - DNA, 120 bp, Artificial Sequence
  ENSG00000155265_27 (sequence is synthesized)
gatactttgctgaaaccatatgttagagctggcaggggatttaaagatcacttgaatcctgtcacagaggtccagagagggtgggtgacttgccctaggccacacagctggttgatgata

SEQ ID NO: 448344 - DNA, 120 bp, Artificial Sequence
  ENSG00000155265_28 (sequence is synthesized)
acagggcccaagcttggaacccaggtctcctgactcagtgcccactctgttaccacagggatggcacccagatgggaagctgcctgaggctgcagggaggctgggatcacaaactcaggc

SEQ ID NO: 448345 - DNA, 120 bp, Artificial Sequence
  ENSG00000155265_29 (sequence is synthesized)
ctgttcccagagaggggctcatcagactgtggggacaacggctccagcctcttaggtgggggctgggcagtcccctctgggtggttctcatgtttgttgtcactgccgctaagggctgca

SEQ ID NO: 448346 - DNA, 120 bp, Artificial Sequence
  ENSG00000155265_30 (sequence is synthesized)
gtgagctgtgtgcagcctggactcactccctctgctggaacctgggccgtgtgtgggttgccacaagtgagcgtgttctctaatatgagggcaggttcattctgttttgggataggaagt

SEQ ID NO: 448347 - DNA, 120 bp, Artificial Sequence
  ENSG00000155265_31 (sequence is synthesized)
ttgttctaccccgaggccagatttgaatccaaactcagctcttctagagatgaggtcctggggagggggtgaggatttactaaacgggtaaaaccaaatctgggtgcttatctgactgag

SEQ ID NO: 448348 - DNA, 120 bp, Artificial Sequence
  ENSG00000155265_32 (sequence is synthesized)
aggcattcaacccttccattttcaaatggtaatcataataataatagtagctgacgtttatttagcacttcctatgtgccaggcactaggctaagactctacataattagtcattcaatt

SEQ ID NO: 448349 - DNA, 120 bp, Artificial Sequence
  ENSG00000155265_33 (sequence is synthesized)
ctcacagcaaccctctatggcatggattcttatttcccattttacatatggggaaactgaggctcatggacgttaagtaactgggaaattgcagatcttggctttgaatctaggcaatct

SEQ ID NO: 448350 - DNA, 120 bp, Artificial Sequence
  ENSG00000155265_34 (sequence is synthesized)
gactccaaactgcaaggaagaagacagatccagcctcagaggccgcttaacagcttgagggcctcagccgtcctgggattaggatcaggcagattcccagggaaggacttggagccatgc

SEQ ID NO: 448351 - DNA, 120 bp, Artificial Sequence
  ENSG00000155265_35 (sequence is synthesized)
ctgggttttgaggccgggctggcacctccacttccagggcatcacgggagggtgcatgggctgtgctcgcaggcatgcgggacccagaggcagcccggtgaagggtagtgggggactcga

SEQ ID NO: 448352 - DNA, 120 bp, Artificial Sequence
  ENSG00000155265_36 (sequence is synthesized)
ctcactgtgggcctggggaggtgtggtttctctctgctggcttagttacaggtggtggcctgtctctccggggtctggctgtagccatgtccctgcacccaccttgccagccagggacag

SEQ ID NO: 448353 - DNA, 120 bp, Artificial Sequence
  ENSG00000155265_37 (sequence is synthesized)
gccccatcaagacccaggagcagctccagcctcagccagactgtccccgaggtcccaagtgaggccccagccactcaggcatgcctcaggaagctcctgctgcacatgctcctctccctg

SEQ ID NO: 448354 - DNA, 120 bp, Artificial Sequence
  ENSG00000155265_38 (sequence is synthesized)
cgccagcaccctgctgtctggcttccttcctttggccacagggcgggtgtgtgtgaaaccacagggtttacagaagctcgaggtgccactgagtggcaggattatgcactgcactcgggg

SEQ ID NO: 448355 - DNA, 120 bp, Artificial Sequence
  ENSG00000155265_39 (sequence is synthesized)
aatcaaaggtggagacagaaagaactatggctgttgtgacacgtcccccacggctccccggttggcagccactgccacccgcagggacttttctgtggcttccagaggtgtggggcaaag

SEQ ID NO: 448356 - DNA, 120 bp, Artificial Sequence
  ENSG00000155265_40 (sequence is synthesized)
gtggagtctggtgactttctccctagggccagcccctgggctgtcgagcctgggaaactccacatccctctccacacctctagaaggactcacaatgaggggggcccagacaggaggcat

SEQ ID NO: 448357 - DNA, 120 bp, Artificial Sequence
  ENSG00000155265_41 (sequence is synthesized)
caccacctggtttgggctttaccattcacccagggataaggcaaggcaaacaccactccacatcagatctgaatttgagctctggcttcatgacactgacacatgaagactcttggagcc

SEQ ID NO: 448358 - DNA, 120 bp, Artificial Sequence
  ENSG00000155265_42 (sequence is synthesized)
tcagattccccagttgttaaatagggagactaatatctcacagagttgtttagacccgaggcgttcaaccttggtggcaatggatgtcaactggaagcatgaaaaatcaccaatgcctga

SEQ ID NO: 448359 - DNA, 120 bp, Artificial Sequence
  ENSG00000155265_43 (sequence is synthesized)
tcctatcctcagagattctgatttaattgttttgggggacagcttgggcatcaggattttaaagagtttccctggtgattttaatgtgaaggtaaggctgagaatccctggttttgacag

SEQ ID NO: 448360 - DNA, 120 bp, Artificial Sequence
  ENSG00000155265_44 (sequence is synthesized)
tacctatagcctataagcctttaatacacctctgaaaatgcctgagacctgaataagaagtttatggttccacagaagcagccagacacaaaaatgcatatgcaccatgtgattcccctt

SEQ ID NO: 448361 - DNA, 120 bp, Artificial Sequence
  ENSG00000155265_45 (sequence is synthesized)
atatgaaactgaaagacaggccaaactcgcctttgattgggagtcaggatcaagattaccctgggtcgggggtagcgaatggatggggacctggggggcttctgggagctcaggatgttc

SEQ ID NO: 448362 - DNA, 120 bp, Artificial Sequence
  ENSG00000155265_46 (sequence is synthesized)
tgtttcttgatcagagtgccagttacacggggtgctcacttcatgagaattcactgagctgtatacttaagagctgtgtatttgtctgtactggtgatatatttcaataaaattcaccag

SEQ ID NO: 448363 - DNA, 120 bp, Artificial Sequence
  ENSG00000155265_47 (sequence is synthesized)
aaaagcctgttggctacaaaataggaaaagaaaggacacacttgaaattaacgttttgttaaatatctggaaatgtaacacatatgccaaacagacaactgcaactctatgttacgtgtg

SEQ ID NO: 448364 - DNA, 120 bp, Artificial Sequence
  ENSG00000155265_48 (sequence is synthesized)
tgtgtgtgtgtgtgtgtgaaaatgtaatgtctgctctgctgtgggtgggccctctaaaagggaaggtccctgatgcctaagaaaatctgaaaacagcccaggttcacaccaggagttctt

SEQ ID NO: 448365 - DNA, 120 bp, Artificial Sequence
  ENSG00000155265_49 (sequence is synthesized)
aacctcgacccgactgcattcaggtgcatattatgtgccgttatctgaggagagcatctacagctttcagcagattctcaaaggggtatgcaaccccctaaaaaggttaagaacaattgg

SEQ ID NO: 448366 - DNA, 120 bp, Artificial Sequence
  ENSG00000155265_50 (sequence is synthesized)
ttttgaggagtcagtaagaaactggccatgaatgtgcttggcatgaaagagatgcttggtaatgtcggtttctttccttcctttcagagcccagccttcggaggtttccgcatgagcctt

SEQ ID NO: 448367 - DNA, 120 bp, Artificial Sequence
  ENSG00000155265_51 (sequence is synthesized)
ctcgggcgacttctaggaggatttattcccctggcagtgccaagggcagcctgcaccaagctcacaactcttcctccaagaggatgttcaaagggcctgtcatttcagcatctgctggac

SEQ ID NO: 448368 - DNA, 120 bp, Artificial Sequence
  ENSG00000155265_52 (sequence is synthesized)
agcagaacttcgcatgcaggatcctggagctgcgtcgggttttgaatcagggacaatggaggaagtgggaaactgtgaagagagtcagagggctgtgccagctgccccctttcccacccc

SEQ ID NO: 448369 - DNA, 120 bp, Artificial Sequence
  ENSG00000155265_53 (sequence is synthesized)
cagcaattcacttaactttcctgagtctcacctttgtcattatgagaatgtgtatatttataaataatcatctgtttctccaatgtaagatattgttattgcagaagtgatactaggacc

SEQ ID NO: 448370 - DNA, 120 bp, Artificial Sequence
  ENSG00000155265_54 (sequence is synthesized)
tcgttatacgatggcctcatgatgtagatttatagcaggcttcagattctggcatagaataaacagatatttatccaagggttcactgattcccgaataaatgccaggaacattcatgta

SEQ ID NO: 448371 - DNA, 120 bp, Artificial Sequence
  ENSG00000155269_0 (sequence is synthesized)
aagccaccaggtcgctccagtttggtgccagcgcctggagggagaggcgtggcgagggctgtgctgcctaggatccactgagtggctcttgctggcgtgtcagctgcgcgcgaaccaggg

SEQ ID NO: 448372 - DNA, 120 bp, Artificial Sequence
  ENSG00000155269_1 (sequence is synthesized)
ctgggaggctcggctggaggtgtgaccagggcagggactgacctggcccggaacagaagcgcgcagagtcccatcctgccacgccacgaggagagaagaaggaaagatacagtgttagga

SEQ ID NO: 448373 - DNA, 120 bp, Artificial Sequence
  ENSG00000155269_2 (sequence is synthesized)
aagagacctccctcgcccctacgccccgcgcccctgcgcctcgcttcagcctcaggacagtcctgccgggacggtgagcgcattcagcaccctggacagcaccgcggttgcgctgcctcc

SEQ ID NO: 448374 - DNA, 120 bp, Artificial Sequence
  ENSG00000155269_3 (sequence is synthesized)
agggcggccccgggctgctcctgctccgcagagctacgccctccccccgggtgccccggaccctgcacttgccgccgctttcctcgcgctgctctggaccttgctagccggctctgcacc

SEQ ID NO: 448375 - DNA, 120 bp, Artificial Sequence
  ENSG00000155269_4 (sequence is synthesized)
tcccagaagccgtgggcgcgccgctcagctgctccatcgcctcactttcccaggctcgcgcccgaagcagagccatgagaaccccagggtgcctggcgagccgctagcgccatgggcccc

SEQ ID NO: 448376 - DNA, 120 bp, Artificial Sequence
  ENSG00000155269_5 (sequence is synthesized)
ggcgaggcgctgctggcgggtctcctggtgatggtactggccgtggcgctgctatccaacgcactggtgctgctttgttgcgcctacagcgctgagctccgcactcgagcctcaggcgtc

SEQ ID NO: 448377 - DNA, 120 bp, Artificial Sequence
  ENSG00000155269_6 (sequence is synthesized)
ctcctggtgaatctgtctctgggccacctgctgctggcggcgctggacatgcccttcacgctgctcggtgtgatgcgcgggcggacaccgtcggcgcccggcgcatgccaagtcattggc

SEQ ID NO: 448378 - DNA, 120 bp, Artificial Sequence
  ENSG00000155269_7 (sequence is synthesized)
ttcctggacaccttcctggcgtccaacgcggcgctgagcgtggcggcgctgagcgcagaccagtggctggcagtgggcttcccactgcgctacgccggacgcctgcgaccgcgctatgcc

SEQ ID NO: 448379 - DNA, 120 bp, Artificial Sequence
  ENSG00000155269_8 (sequence is synthesized)
ggcctgctgctgggctgtgcctggggacagtcgctggccttctcaggcgctgcacttggctgctcgtggcttggctacagcagcgccttcgcgtcctgttcgctgcgcctgccgcccgag

SEQ ID NO: 448380 - DNA, 120 bp, Artificial Sequence
  ENSG00000155269_9 (sequence is synthesized)
cctgagcgtccgcgcttcgcagccttcaccgccacgctccatgccgtgggcttcgtgctgccgctggcggtgctctgcctcacctcgctccaggtgcaccgggtggcacgcagacactgc

SEQ ID NO: 448381 - DNA, 120 bp, Artificial Sequence
  ENSG00000155269_10 (sequence is synthesized)
cagcgcatggacaccgtcaccatgaaggcgctcgcgctgctcgccgacctgcaccccagtgtgcggcagcgctgcctcatccagcagaagcggcgccgccaccgcgccaccaggaagatt

SEQ ID NO: 448382 - DNA, 120 bp, Artificial Sequence
  ENSG00000155269_11 (sequence is synthesized)
ggcattgctattgcgaccttcctcatctgctttgccccgtatgtcatgaccaggctggcggagctcgtgcccttcgtcaccgtgaacgcccagtggggcatcctcagcaagtgcctgacc

SEQ ID NO: 448383 - DNA, 120 bp, Artificial Sequence
  ENSG00000155269_12 (sequence is synthesized)
tacagcaaggcggtggccgacccgttcacgtactctctgctccgccggccgttccgccaagtcctggccggcatggtgcaccggctgctgaagagaaccccgcgcccagcatccacccat

SEQ ID NO: 448384 - DNA, 120 bp, Artificial Sequence
  ENSG00000155269_13 (sequence is synthesized)
gacagctctctggatgtggccggcatggtgcaccagctgctgaagagaaccccgcgcccagcgtccacccacaacggctctgtggacacagagaatgattcctgcctgcagcagacacac

SEQ ID NO: 448385 - DNA, 120 bp, Artificial Sequence
  ENSG00000155269_14 (sequence is synthesized)
tgagggcctggcagggctcatcgcccccaccttctaagaagccctgtggaaagggcactggccctgccacagagatgccactggggacccccagacaccagtggcttgactttgagctaa

SEQ ID NO: 448386 - DNA, 120 bp, Artificial Sequence
  ENSG00000155269_15 (sequence is synthesized)
ggctgaagtacaggaggaggaggaggagagggccggatgtgggtgtggacagcagtagtggcggaggagagctcggggctgggctgcctggctgctgggtggccccgggacagtggcttt

SEQ ID NO: 448387 - DNA, 120 bp, Artificial Sequence
  ENSG00000155269_16 (sequence is synthesized)
tcctctctgaaccttagcttcctcacccttgttctggggtcatggcgatgcttcgagacagtgggtagggaagtgccctgtgtggcatatggtactcgtgggcgtgctataagtgactgc

SEQ ID NO: 448388 - DNA, 120 bp, Artificial Sequence
  ENSG00000155269_17 (sequence is synthesized)
tgttcatgtgggtgaggtggtcactcttgctcagggtctgttgtgcagcccagatggacacctgtttctccaacctggttattagcattgttccgatttgttctcggcattgcccaggtt

SEQ ID NO: 448389 - DNA, 120 bp, Artificial Sequence
  ENSG00000155269_18 (sequence is synthesized)
gtctggttgggggctcccagagttcacatctgatagtctgtggtcaggacctggcaggcacgggcagtccctgggacatgcccatctctggaagcctaggggtccccagctccaggcctg

SEQ ID NO: 448390 - DNA, 120 bp, Artificial Sequence
  ENSG00000155269_19 (sequence is synthesized)
tccgctgtgactgcctgtgtgggcacgcagatggagcctgtctcctgccttcctttccatggtttgccaggggtttggcatcttgactgcggaagctgtggagtctgtgtgctcagagcc

SEQ ID NO: 448391 - DNA, 120 bp, Artificial Sequence
  ENSG00000155269_20 (sequence is synthesized)
ttttctggtgaagatatcatcagagcatgtgacctctgtttcctccccctgaaggccaccgctgggcctctggatcttagacatgagacggtcaagagattgaagtagtagccagggccc

SEQ ID NO: 448392 - DNA, 120 bp, Artificial Sequence
  ENSG00000155269_21 (sequence is synthesized)
aggtgtccagagagggtggcctgggatggggagggcccttgctccccaacagcagtgctgggggagccaagagaaggtggagcatccctgagtagtggtgtgcatcacccccagtttagt

SEQ ID NO: 448393 - DNA, 120 bp, Artificial Sequence
  ENSG00000155269_22 (sequence is synthesized)
aatcacggggtgccattccccggtgggagcacccaccatcaatgtcattgaatgtccccatgggacagtgttgaggacttttgtgacatctgtcctatttcacagctcagggaaaggtgc

SEQ ID NO: 448394 - DNA, 120 bp, Artificial Sequence
  ENSG00000155269_23 (sequence is synthesized)
acagtgcacacgggcacccggtggagaggtgtgtgtgtgaatgagtgagcgagtgaatgaatggacacgattctctcttcagcctctgtcattgctgttttcttcaaggcccagggccat

SEQ ID NO: 448395 - DNA, 120 bp, Artificial Sequence
  ENSG00000155269_24 (sequence is synthesized)
cccctgcagaggtagggtgggctgcaagacctcaggcccctgcctcatgggactctctgatgggcttcaaccgtgggctcttgcaggcatggagcctgtatcatgacaccttacacccaa

SEQ ID NO: 448396 - DNA, 120 bp, Artificial Sequence
  ENSG00000155269_25 (sequence is synthesized)
ggccagcaatgcaaggagagtatggacatcaaattctttccttccagaggctgaattcttcaaagacacacgcggtcgtcacttgctcttggcattaacggtggagaacccagctgaggt

SEQ ID NO: 448397 - DNA, 120 bp, Artificial Sequence
  ENSG00000155269_26 (sequence is synthesized)
gctgaggtggcttcacagattcttccccaaaaacacaggtgttattattatacttttaaaaaactttttgagacagggtctgactctgttgcctaggctagagtgcagtggtgcaatctc

SEQ ID NO: 448398 - DNA, 120 bp, Artificial Sequence
  ENSG00000155269_27 (sequence is synthesized)
atttgctgactcaccaatgcctcccccaaaaggataaatttaaaggtgtgtataacccatgaagtgtaattcaaataaaacaaattatcgtttggaataataacaactataggtatgtgg

SEQ ID NO: 448399 - DNA, 120 bp, Artificial Sequence
  ENSG00000155269_28 (sequence is synthesized)
tcaggaagcagttaaaaacattaaaatacagacctggccagttcaatccaacccaggggttccaagcaggaggtggggcaggtgggcgtcatgccctgattcacagagggcacaggtggg

SEQ ID NO: 448400 - DNA, 120 bp, Artificial Sequence
  ENSG00000155269_29 (sequence is synthesized)
tgtcatgccctggttcacagagggcacgtgaactcgagaccgtgctgcaccccggtgcccctgtgcttataagggagggcacgtgcacagcagaagcaggttgttccccatttaaagttc

SEQ ID NO: 448401 - DNA, 120 bp, Artificial Sequence
  ENSG00000155269_30 (sequence is synthesized)
tggagcccaggctgtgagctccttggctgagccctctcctgtccctgggagctccccaggtgcgaggagcctgccagccagtggggcctacactctgtgttattgcatctccgccaggct

SEQ ID NO: 448402 - DNA, 120 bp, Artificial Sequence
  ENSG00000155269_31 (sequence is synthesized)
aaaagccttggtcactactttagagccactcaaggaaacgcgtgcaccctgccctgctggaaggcaccatggttagagggaggcacactgtttcttagagacggggactgcttgctgtca

SEQ ID NO: 448403 - DNA, 120 bp, Artificial Sequence
  ENSG00000155269_32 (sequence is synthesized)
tgtttcgccttcctcggcagctccatggaatgttctggagcaggcatcttagggcattccctccgcacttctctgccagcccatgtggctcccacactgggctatcccttgccttaggct

SEQ ID NO: 448404 - DNA, 120 bp, Artificial Sequence
  ENSG00000155269_33 (sequence is synthesized)
tgtggccttttttttttttttttttttaatttgaaaaatatttttcatgtgcacttaaacgtgttgtggaatgatgctgggtctcaagaatgctgtgaatcaataaacattttattcaga

SEQ ID NO: 448405 - DNA, 120 bp, Artificial Sequence
  ENSG00000155269_34 (sequence is synthesized)
gtgcttcagctcctgggaaagatcctgggagggaggtggcactggctcccatcctgtcctataaatgaggagactctccttgtccaggcacaggcagatatggggtctgtgaatcagcac

SEQ ID NO: 448406 - DNA, 120 bp, Artificial Sequence
  ENSG00000155269_35 (sequence is synthesized)
ctggctctttaaacctagaaagctttcaaaatcaggcaacctgggactaactcaggcctcagactccgcatctcctgggcgtggagttgggaatctgggtggaagctccagctggagcct

SEQ ID NO: 448407 - DNA, 120 bp, Artificial Sequence
  ENSG00000155269_36 (sequence is synthesized)
cgattgctcatcgctgggcctggaagatcacacagagggtttggcttggagtgactcctccaagcagggtctgcaccgccctgtgggctcaaggagggagaggagctgtggagaaatgct

SEQ ID NO: 448408 - DNA, 120 bp, Artificial Sequence
  ENSG00000155269_37 (sequence is synthesized)
ttgatgtctcttgcagatgaaacagtggagggggagtgggcaagactgggccaccatgggccacttgtctctgaggtgtgcaaagaggtgccagagggccacttggcagcggggctggtt

SEQ ID NO: 448409 - DNA, 120 bp, Artificial Sequence
  ENSG00000155269_38 (sequence is synthesized)
gggggccctgcatggagtcccctgtgtctgttgtctcacgagtcggtgtccaccagagaccctgcatgatccgcagcagtcctggcccgttagacctttctgtgtaaaagaaatgttcta

SEQ ID NO: 448410 - DNA, 120 bp, Artificial Sequence
  ENSG00000155269_39 (sequence is synthesized)
ttgtgttctgtccaagacagttaccactggccgcatgtggcccccaaggcttgggatgtggctcttgccactgaggcctggatgtgggcgtttcatcgcatttgaatgagtctgaacctg

SEQ ID NO: 448411 - DNA, 120 bp, Artificial Sequence
  ENSG00000155269_40 (sequence is synthesized)
tctttgaagagcctagggccagtgtgtgccacattcaactgtgcagggcagtgtccgctcatggttgggttcagaggatctgactgcgggtgccacacatgtgctagctcacgcgagtct

SEQ ID NO: 448412 - DNA, 120 bp, Artificial Sequence
  ENSG00000155269_41 (sequence is synthesized)
cacgacagccttgctccatggaagaggaagtggagcctcgggaagggtgacagcagtggggtctttagctggagtggcccaagcccattgcggatggagggatggatttggccatttgtc

SEQ ID NO: 448413 - DNA, 120 bp, Artificial Sequence
  ENSG00000155269_42 (sequence is synthesized)
aaacagctaccgagcacccactgtacatgtggctttgtgctgggacattgaggagggcaggagaaggaaggcagacaaacacccgggccgggctccagcaagccctgggttccgggctat

SEQ ID NO: 448414 - DNA, 120 bp, Artificial Sequence
  ENSG00000155269_43 (sequence is synthesized)
gtcaggtgctcagggctgaacctggcatgtcttgcagcctctggctcccaatctgagaagggtggaccctgggctcccatgcgatgcagcggtagggggggtgccctttgccagcaggtg

SEQ ID NO: 448415 - DNA, 120 bp, Artificial Sequence
  ENSG00000155269_44 (sequence is synthesized)
ggagccgtctgtctgcagagctcagtccctgtagaggtggtggagctgcctgtgggaggccagggaggcgaggaaggaagccaagcccacagccctgggaaagcccaaggagtcggttgg

SEQ ID NO: 448416 - DNA, 120 bp, Artificial Sequence
  ENSG00000155269_45 (sequence is synthesized)
agattattttgggcatctctaccaccaaattgccggcttcctctgctagtctttcccctggagaaccgttttgagcagaagcaaaaccacagggcaaggagaagcttagaggagcacatt

SEQ ID NO: 448417 - DNA, 120 bp, Artificial Sequence
  ENSG00000155269_46 (sequence is synthesized)
aactctctgtggacccaggaacagcctgcgggcacctgcgtcctgctcctgtgggcctgactgctgcaaagcccctggcggggtggagggagctaagcgtcatcggggtggccctcaggg

SEQ ID NO: 448418 - DNA, 120 bp, Artificial Sequence
  ENSG00000155269_47 (sequence is synthesized)
cacctctgttctagtggatgacaggatggtggggaagctggtgcgtatgtggtgtagagacgttcgtattctagttccagaacccctccctcttccccagcccccttttttcttcctccc

SEQ ID NO: 448419 - DNA, 120 bp, Artificial Sequence
  ENSG00000155269_48 (sequence is synthesized)
ccaagtacttcccagagcccccctttctgtttccttcctggacaggcactcactgttgtaccgatgaggttgtaacagaaacactgggaagcctcacagcagccggagggggcaccacaa

SEQ ID NO: 448420 - DNA, 120 bp, Artificial Sequence
  ENSG00000155269_49 (sequence is synthesized)
ggagccttcctgtttccaccattagccaagcaaatgaagcagaatactgaactgcctgagtgccactgtcatggaaaacacgcccaggaaaatcccctctgcacacccagcaggggtttg

SEQ ID NO: 448421 - DNA, 120 bp, Artificial Sequence
  ENSG00000155269_50 (sequence is synthesized)
ccttggggggtccaggaccccatatatctgtcttcctttctgttgtcctgctccgtattttaggagcttcccacagtggccccatagtatgtttactcacagtcacgttaggaaccatgg

SEQ ID NO: 448422 - DNA, 120 bp, Artificial Sequence
  ENSG00000155269_51 (sequence is synthesized)
cgctgtgctgtgtacatacctcaggtgccgtttggcttagatatcgttgtaggcactgcagagggaactctaattaaagatagagatgtccaagcatggctgtcgtgcagaggggactaa

SEQ ID NO: 448423 - DNA, 120 bp, Artificial Sequence
  ENSG00000155269_52 (sequence is synthesized)
gggtgctgtgtgtggtcagcgttcccaggcagtggtaggaagcctgggggcctgacactgactgagcccccccactgctcccccaggaggcctggaggctgacgaggcactgccctcagg

SEQ ID NO: 448424 - DNA, 120 bp, Artificial Sequence
  ENSG00000155269_53 (sequence is synthesized)
gctgccgcccaccttcatccgcttcagccaccactcctacgcccagatggtgcgtgtgctgaggcggacggcctcccgctgcgcccacgtggccaggacctacagcatcgggcgcagctt

SEQ ID NO: 448425 - DNA, 120 bp, Artificial Sequence
  ENSG00000155269_54 (sequence is synthesized)
cgacggcagggagctgctggtcatcgagttctccagccgccccggccagcacgagctgatggagcccgaggtgaagctcatcggcaacattcatggcaacgaggtggcgggccgggagat

SEQ ID NO: 448426 - DNA, 120 bp, Artificial Sequence
  ENSG00000155269_55 (sequence is synthesized)
gctcatctacctagcccagtacctgtgctctgagtacctgcttggtaacccccgcatccagcgcctgctcaacaccacccgcatccacctgctgccctccatgaaccctgacggctatga

SEQ ID NO: 448427 - DNA, 120 bp, Artificial Sequence
  ENSG00000155269_56 (sequence is synthesized)
ggtggcagctgccgagggtgccggctacaacgggtggacgagcgggaggcagaacgcgcagaacctggatctgaaccgaaatttcccggacctgacgtccgagtactaccggctggcgga

SEQ ID NO: 448428 - DNA, 120 bp, Artificial Sequence
  ENSG00000155269_57 (sequence is synthesized)
gacccgcggcgcacgcagcgaccacatccccatcccccagcactactggtggggtaaggtggccccggagacaaaggcaatcatgaagtggatgcagaccataccctttgtgctctcagc

SEQ ID NO: 448429 - DNA, 120 bp, Artificial Sequence
  ENSG00000155269_58 (sequence is synthesized)
cagccttcatgggggcgacctggtggtgtcctaccccttcgacttctccaagcacccccaggaggagaagatgttttctcccacgcccgacgagaagagggagccccctcctcagcacag

SEQ ID NO: 448430 - DNA, 120 bp, Artificial Sequence
  ENSG00000155269_59 (sequence is synthesized)
acctgtcctgcttggtggggccctgatgagctcatgcagggtgagcccttcgcctgcctgacccaccaggagcctctgcccaagatgttcaagctgctgtccagagcctacgctgacgtc

SEQ ID NO: 448431 - DNA, 120 bp, Artificial Sequence
  ENSG00000155269_60 (sequence is synthesized)
caccccatgatgatggacaggtcggagaataggtgtggaggcaatttcctgaagagggggagcatcatcaacggggcggactggtacagcttcacgggaggcatgtccgatttcaactac

SEQ ID NO: 448432 - DNA, 120 bp, Artificial Sequence
  ENSG00000155269_61 (sequence is synthesized)
ctgcacaccaactgctttgagatcacggtagagctgggctgtgtgaagttcccccccgaggaggccctgtacatactctggcagcacaacaaggagtcactcctgaatttcgtggagacg

SEQ ID NO: 448433 - DNA, 120 bp, Artificial Sequence
  ENSG00000155269_62 (sequence is synthesized)
gtgcaccggggcatcaaaggtgtggtgacagataaattcggcaagccagtcaaaaacgcccggatctcagtcaaaggcattcgccacgacatcaccacagccccagatggtgactactgg

SEQ ID NO: 448434 - DNA, 120 bp, Artificial Sequence
  ENSG00000155269_63 (sequence is synthesized)
agactgctgcccccaggtatccacattgtcattgcccaagcccctggctacgccaaagtcatcaagaaagtcatcatccccgcccggatgaagagggctggccgtgtggacttcattctg

SEQ ID NO: 448435 - DNA, 120 bp, Artificial Sequence
  ENSG00000155269_64 (sequence is synthesized)
caacctctggggatgggacccaagaactttattcatgggctgcggaggactgggccccacgacccactgggaggtgccagctctttgggggaggccacggagcccgacccgctccgggcg

SEQ ID NO: 448436 - DNA, 120 bp, Artificial Sequence
  ENSG00000155269_65 (sequence is synthesized)
cgcaggcagccctcggccgacgggagtaagccctggtggtggtcctacttcacatcgctgagcacccacaggccacgctggctgctcaagtactagccccggccccagcacccgccagga

SEQ ID NO: 448437 - DNA, 120 bp, Artificial Sequence
  ENSG00000155269_66 (sequence is synthesized)
tgtggagaccgaggcccatctccgcatcccgggctcctggctcttgattttgtctgccacagacatcccacaaagccgctgccattttattaaagtgttttgatccactttgcactggaa

SEQ ID NO: 448438 - DNA, 120 bp, Artificial Sequence
  ENSG00000155269_67 (sequence is synthesized)
ctgcccaaagctgggtcttctggctccaagtcgggagcacgctgcacacctcatgccatggatcaggccttgaagctctccgtgaaggtgtacattgtgcccctcattgaccggcagaga

SEQ ID NO: 448439 - DNA, 120 bp, Artificial Sequence
  ENSG00000155269_68 (sequence is synthesized)
tcaacaaacgtcgatgcagtcacagttcctgggctgaggctgggggatgggaggaagtcctgagggcagcccccgcccccttccccgccccgtcactccctctgccccgcctgcacagct

SEQ ID NO: 448440 - DNA, 120 bp, Artificial Sequence
  ENSG00000155269_69 (sequence is synthesized)
gaactaatcctgaactttatcattgcaatgcgtatctcagcaagaatgggcaggattgcatagttaggagtactgccttactttttaaagaagtggtgaaaatatttaatattttcatat

SEQ ID NO: 448441 - DNA, 120 bp, Artificial Sequence
  ENSG00000155269_70 (sequence is synthesized)
actttttctttttggaagataaaaggattaggtccagcatttcaccctacagaggatttaaatttttcatcaggaatgagatttgagtgtaagaagatgaaacgatattatactgataag

SEQ ID NO: 448442 - DNA, 120 bp, Artificial Sequence
  ENSG00000155269_71 (sequence is synthesized)
accacagggttcaaaaccaccccctacaacccagggaaggggggcagccaggctggcaagatctgaggccagaagcactggggctttggggagagcagcaaacagaacagatctagacct

SEQ ID NO: 448443 - DNA, 120 bp, Artificial Sequence
  ENSG00000155269_72 (sequence is synthesized)
atcaaggtgccctcaccagagtccagagatctcaccacacacattttctcattcatgcagttgtccagtacatccttgcagatgagcaaatggcctgcctttcataatacaggctggtgg

SEQ ID NO: 448444 - DNA, 120 bp, Artificial Sequence
  ENSG00000155269_73 (sequence is synthesized)
agcttccccatgctcatgtctcagaagagatgctctctgctcccctgcaagtggaattgtctccctttggagtagttgagaggtgacagaggctgctgtgagtggctagaccaaagtctc

SEQ ID NO: 448445 - DNA, 120 bp, Artificial Sequence
  ENSG00000155269_74 (sequence is synthesized)
cctgtgaagccacgtgatgactccaccgctccccagagctgcacatggtcgctcagaagccttggaggggttgggggaggcccctgctctcaagcccccactatcacaatcactttgtcc

SEQ ID NO: 448446 - DNA, 120 bp, Artificial Sequence
  ENSG00000155269_75 (sequence is synthesized)
cagctattcacctgcaaacttgcttgatctgcagaagctgcagagtggcccactcttcctggacatgtcaggaaaactttgacgtggctgctctagcttcagggaaggtctaatttggtg

SEQ ID NO: 448447 - DNA, 120 bp, Artificial Sequence
  ENSG00000155269_76 (sequence is synthesized)
aaaatttgaaagcaggtttgtgggagtgccagggagaaatggggagagagaaagcctctgtatttgatggatggcaatggcttggagctggtgtgatggcctctctggatgacaaggaca

SEQ ID NO: 448448 - DNA, 120 bp, Artificial Sequence
  ENSG00000155269_77 (sequence is synthesized)
ttggacttagagccagaaggactgagtggccacgaatggattagaagattcccactgggtgagaaggctcagaagccaccacagaggatggcggaggtgggagaggcctcgcaccgcggg

SEQ ID NO: 448449 - DNA, 120 bp, Artificial Sequence
  ENSG00000155269_78 (sequence is synthesized)
gctccaggagccaggtgaaggacaggcatttctgtatggcacccagttctgggtgggtcctcccaaggtgcccccttctttgtctctccctctgttgcttttctctcctcttccctcttc

SEQ ID NO: 448450 - DNA, 120 bp, Artificial Sequence
  ENSG00000155269_79 (sequence is synthesized)
attgctattgcgaccttcctcatctgctttgccccgtatgtcatgaccaggtgaatgccacaggccaccagctgcagacagcgccacctgcgtggacctgcagctcaggacctgcagcga

SEQ ID NO: 448451 - DNA, 120 bp, Artificial Sequence
  ENSG00000155269_80 (sequence is synthesized)
tgccgcctacaaccacaccaccttccccaacctgcttcagcaccggtcgtgggaggtggtggaggccagctccgagtacatcctgctgagcgttctacaccagctcctggaaggccagtg

SEQ ID NO: 448452 - DNA, 120 bp, Artificial Sequence
  ENSG00000155269_81 (sequence is synthesized)
caacccggacctgcggctgctgggctgtgctgtgctggccccccggtgtgagggcggctgggtgcgcagaccctgccggcacatctgcgagggcctgcgggaggtctgccagcccgcctt

SEQ ID NO: 448453 - DNA, 120 bp, Artificial Sequence
  ENSG00000155269_82 (sequence is synthesized)
cgacgccattgacatggcctggccctacttccttgactgccaccgctacttcacgagagaggacgagggctgctatgacccgctggagaagcttcggggaggcctggaggctgacgaggc

SEQ ID NO: 448454 - DNA, 120 bp, Artificial Sequence
  ENSG00000155275_0 (sequence is synthesized)
gtcatctcggcgcgccgctgccagggctgtacacctgctggctgccatggctgaggtgggccgtaccgggatcagctacccaggcgcgcttctcccacagggcttctgggctgcggtcga

SEQ ID NO: 448455 - DNA, 120 bp, Artificial Sequence
  ENSG00000155275_1 (sequence is synthesized)
agtgtggctggagaggccgcaggtggcaaacaaacggctttgcggcgcccgcctggaggcccgctggagcgccgccctgccctgcgcggaggcccgcggccccgggactagcgcaggctc

SEQ ID NO: 448456 - DNA, 120 bp, Artificial Sequence
  ENSG00000155275_2 (sequence is synthesized)
ggagcagaaggagcggggtccgggacccggccagggttcccccggagggggcccgggtcccaggtcgctatcaggacccgagcagggcacggcatgttgcgaacttgaggaggcccaggg

SEQ ID NO: 448457 - DNA, 120 bp, Artificial Sequence
  ENSG00000155275_3 (sequence is synthesized)
ccagtgccagcaagaggaggcacagagggaagccgcctcagtgcccctgagggactccgggcaccccggccatgctgaaggaagggagggcgacttccccgccgcagatctggattcgct

SEQ ID NO: 448458 - DNA, 120 bp, Artificial Sequence
  ENSG00000155275_4 (sequence is synthesized)
ttgggaggatttctcccaaagtctcgcccgtggcaattcggagttgctggccttcctcaccagctccggggcgggatcgcagccagaggcgcagcgtgagctcgacgtggttctcagaac

SEQ ID NO: 448459 - DNA, 120 bp, Artificial Sequence
  ENSG00000155275_5 (sequence is synthesized)
cgtcatcccgaaaactagcccacattgcccccttacaactcccaggagggaaatagtcgtgcaagatgtcctcaatggaaccataacgtttttgcctttggaagaagatgatgaggggaa

SEQ ID NO: 448460 - DNA, 120 bp, Artificial Sequence
  ENSG00000155275_6 (sequence is synthesized)
cctaaaggttaagatgagcaatgtgtatcaaattcagctcagtcatagcaaagaagaatggttcatatctgttttaattttctgtccagaaagatggcattcagatggaatcgtgtatcc

SEQ ID NO: 448461 - DNA, 120 bp, Artificial Sequence
  ENSG00000155275_7 (sequence is synthesized)
caaacccacgtggcttggagaagagttgctggccaagttggccaagtggtctgtagagaacaagaagagtgactttaaaagcaccctttccctcatctccattatgaagtatagcaaggc

SEQ ID NO: 448462 - DNA, 120 bp, Artificial Sequence
  ENSG00000155275_8 (sequence is synthesized)
ttaccaggaacttaaagagaagtataaggaaatggttaaggtgtggcctgaagtcactgatcctgagaagttcgtgtatgaagatgtggctatcgcagcatacctgctgattctatggga

SEQ ID NO: 448463 - DNA, 120 bp, Artificial Sequence
  ENSG00000155275_9 (sequence is synthesized)
agaagaaagggctgagaggagactaactgccaggcagtcctttgtggacctgggatgtggaaatggcctcctggtccacatcctgagcagtgaggggcatccaggcagagggattgatgt

SEQ ID NO: 448464 - DNA, 120 bp, Artificial Sequence
  ENSG00000155275_10 (sequence is synthesized)
ccgaagaagaaaaatctgggacatgtatggaccacaaactcagttagaggaagatgcaatcacacccaatgataagacccttttccctgatgttgattggttaatcggtaaccattctga

SEQ ID NO: 448465 - DNA, 120 bp, Artificial Sequence
  ENSG00000155275_11 (sequence is synthesized)
taagaagactcagtaccgggaataccttgacttcattaaagaagtgggcttcacctgtgggtttcacgtggacgaagactgcctcaggattccttcaaccaaaagagtctgtctcgttgg

SEQ ID NO: 448466 - DNA, 120 bp, Artificial Sequence
  ENSG00000155275_12 (sequence is synthesized)
aaaatccagaacatacccttcctccagagaagcttccgtggatgaaaagaggactcagtacattaagagcaggcggggctgccctgtaagcccacctggctgggagctttccccttctcc

SEQ ID NO: 448467 - DNA, 120 bp, Artificial Sequence
  ENSG00000155275_13 (sequence is synthesized)
acgctgggttgctgctggcagtgctggtcactgtgacggtcagcaagctctggacgccagggtcgggtgtgtaaccagggcctgggccgctgagcatggagcagggccccaggctgaagg

SEQ ID NO: 448468 - DNA, 120 bp, Artificial Sequence
  ENSG00000155275_14 (sequence is synthesized)
accctggctacctggatttcatcccagagaaaaggctgagcgtgtgaggaactgtgccgccctgccacgagattttattgaccaagtggttttgcaagtagcgaatttactgttaggtgg

SEQ ID NO: 448469 - DNA, 120 bp, Artificial Sequence
  ENSG00000155275_15 (sequence is synthesized)
aaagcaattaaacacaagaagttctcgaaatgggagtttgaagacctggaatgggggagagagcctatctctggcagaagtagccaacgagctggacacggagaccctgcggaggctgaa

SEQ ID NO: 448470 - DNA, 120 bp, Artificial Sequence
  ENSG00000155275_16 (sequence is synthesized)
gcgggagtgtgggggcctgcagacgctgctccggaacagccaccaggtgttccaagttgtgaatgggagagttcacatccgcgactggcgagaggagacactgtggaagacaaagcaacc

SEQ ID NO: 448471 - DNA, 120 bp, Artificial Sequence
  ENSG00000155275_17 (sequence is synthesized)
ggaagcgaaacagagactgctctctgaagcctgcaaaacccgcctctgctggttcttcatgcatcaccctgatggctgcgctctgtccacggactgctgcccgtttgcccatgggcctgc

SEQ ID NO: 448472 - DNA, 120 bp, Artificial Sequence
  ENSG00000155275_18 (sequence is synthesized)
ggagctgcggccaccccggaccaccccgaggaagaagatttcatgagctgcatccttgccagccgaggcctggttggggaggccaaaccaaggagagcttccccagcagtcgtcagtgct

SEQ ID NO: 448473 - DNA, 120 bp, Artificial Sequence
  ENSG00000155275_19 (sequence is synthesized)
gtggtctctgctctggctgtgtttcagcccacctcctcccagctttctccacatcctcacagtgatgaaccgtatttcataaacatcacacgccagagaagccacagttactcggaagcc

SEQ ID NO: 448474 - DNA, 120 bp, Artificial Sequence
  ENSG00000155275_20 (sequence is synthesized)
cccagctgactgcctggcttgtttcagatgcagccgcttgaaacgtgcgcagcatcttcatatcataaagattgtgcacggatccttacaatgtctcctgggggagagcggctgaggctg

SEQ ID NO: 448475 - DNA, 120 bp, Artificial Sequence
  ENSG00000155275_21 (sequence is synthesized)
ccttgcacaggcccttcccagggcgctgtccgacgcctgccccaccatgtccacatctgtgaagaggatggggctcctcgagaagtaagaccgtatctgccagcgtttctcaccacactg

SEQ ID NO: 448476 - DNA, 120 bp, Artificial Sequence
  ENSG00000155275_22 (sequence is synthesized)
gagagcagctgctctggagcagggatccaccagattggtatttttaaaaaaggtgtcaggcttgctatgttgaggttgtttttagagttacagagaataaaaacactcataatttcctga

SEQ ID NO: 448477 - DNA, 120 bp, Artificial Sequence
  ENSG00000155275_23 (sequence is synthesized)
gattcggagacgagaccaagctgttgctgaggacgacagccctgctctggtcactccggaggctgaccagtctacacacggctgaagcttgaagaaacaacaagcccggctctagtcacg

SEQ ID NO: 448478 - DNA, 120 bp, Artificial Sequence
  ENSG00000155275_24 (sequence is synthesized)
ggagtttgaagacctggaatgggggaggtaagctgtccaccatcttagggaggggctagcacgctcccaggcttgagggcaggaattcacgtcttcagaaccgacatgaaatggtgtggc

SEQ ID NO: 448479 - DNA, 120 bp, Artificial Sequence
  ENSG00000155275_25 (sequence is synthesized)
cctgtgactacacactttgaaaaagccattgatggtgggtgcataggctctcttcaagcaaattctttaaaattttccaaatagctcttataaacataaaggactttgttatttccaggg

SEQ ID NO: 448480 - DNA, 120 bp, Artificial Sequence
  ENSG00000155275_26 (sequence is synthesized)
cggtgtggtgtgggttaggtgagatggaatcgtccttcgtgctggagtgcataacgcgtgtgagtgtatggaactgaaatggactgtttctgcctgtgtgacaggttcgtaatattttgc

SEQ ID NO: 448481 - DNA, 120 bp, Artificial Sequence
  ENSG00000155275_27 (sequence is synthesized)
tgttgttttggggaaaaaaaaaacccgtttttccacagagagcctatctctggcagaagtagccaacgagctggacacggagaccctgcggaggctgaagcgggagtgtgggggcctgca

SEQ ID NO: 448482 - DNA, 120 bp, Artificial Sequence
  ENSG00000155275_28 (sequence is synthesized)
accacccaaatagataaattggcccatctggtcttgtggcccccacccaggaatggactcagctcaagaggacagcttcagctccctaagattttatcttggacccgaccaatcagcact

SEQ ID NO: 448483 - DNA, 120 bp, Artificial Sequence
  ENSG00000155275_29 (sequence is synthesized)
cccgacttactggccctctactcaccaagttatccttaaaaacctcaatccctgagttttcagagagactgatttgaataataataaaactccggtcttccacacggccgactctgcatg

SEQ ID NO: 448484 - DNA, 120 bp, Artificial Sequence
  ENSG00000155275_30 (sequence is synthesized)
ccctgaacccgccaccttgttcccagcagctagagccctgtcgagcattaactgtgtagaggtgttggactcaagtttactctagcagacctgacctccgagaccagccttgggcatcag

SEQ ID NO: 448485 - DNA, 120 bp, Artificial Sequence
  ENSG00000155275_31 (sequence is synthesized)
tagactgggagctatacatggacgggagcagcttcatcaacccacaaggagagagatgtgcaggatatgcagtgataaccctggacactgtcgttaagctgagctcattgctttaattca

SEQ ID NO: 448486 - DNA, 120 bp, Artificial Sequence
  ENSG00000155275_32 (sequence is synthesized)
ttaagactaatagttttcctgtaatactgttttcctattgttctgtcactgtattcaatctttttcccaggtaaggacctcttttgtccttgctggatacaaatatgctgtatattgttt

SEQ ID NO: 448487 - DNA, 120 bp, Artificial Sequence
  ENSG00000155275_33 (sequence is synthesized)
tgttattgttaccccccataaccatgctagaagaaacacctatataaggtgtccccattgtacacatactacttagtcaggaaacccagacccgtccagcccagcaacaattccgagtct

SEQ ID NO: 448488 - DNA, 120 bp, Artificial Sequence
  ENSG00000155275_34 (sequence is synthesized)
atccgaggactgtaatcctcaacccgttcctcagagcaacttggtgaaagggagtgtctgtctgctgtcagaagcagtggtggagatggcggctcctgtgctgaggtagagtcccagggg

SEQ ID NO: 448489 - DNA, 120 bp, Artificial Sequence
  ENSG00000155275_35 (sequence is synthesized)
tgacagggctttaaaaatgtaaatatcacagatgacaaaggtaagacctacaccttcctccctcctccatgagaccctctccccagaaatactgcagcagtcctttttagtccttccaga

SEQ ID NO: 448490 - DNA, 120 bp, Artificial Sequence
  ENSG00000155275_36 (sequence is synthesized)
agaaatactgcagcagtcctttttagtccttccagaaaaaaaaatcctgatttgtttctcttttatttttatgaagtgatagggtcttgatctctcgcccaggctggagtgcagtggcaa

SEQ ID NO: 448491 - DNA, 120 bp, Artificial Sequence
  ENSG00000155275_37 (sequence is synthesized)
aagccatccttctgcctcagcctgtcaagtgactgggactgtagatgcacgccaccatgcctggccaacttttaaaattttagaggcggggtctcgctatgttgcccaggctggccttga

SEQ ID NO: 448492 - DNA, 120 bp, Artificial Sequence
  ENSG00000155275_38 (sequence is synthesized)
ctcccacctcagcctcccaaagtgctggcatgacagctgcgagccatggcgtctgacccccgatgtttctatttaaagttatttctatggttttatacaaaaggtcacatgcagtccaca

SEQ ID NO: 448493 - DNA, 120 bp, Artificial Sequence
  ENSG00000155275_39 (sequence is synthesized)
aaggtcacatgcagtccacactgttctgccgttgactttctgcagtgtaccctggtgcctctccattgggtatatctgcctgattattggcagcagccgtgtggcattccgtggcagcgc

SEQ ID NO: 448494 - DNA, 120 bp, Artificial Sequence
  ENSG00000155275_40 (sequence is synthesized)
cgcactcatcacacctgagcagtgagaataaatgggcatcttctctgaaggcacctcagctctgcagcaccacggggcggcgctgccacgggcccagaccctgccctctgagttccaagt

SEQ ID NO: 448495 - DNA, 120 bp, Artificial Sequence
  ENSG00000155275_41 (sequence is synthesized)
cagtcccagagcgcagatcccaggctgaggatgtgccaggaggtgcctggccctggaagtgtccacccttcatcttactgggagactggcgctccgtggccctttggggcaggccccagt

SEQ ID NO: 448496 - DNA, 120 bp, Artificial Sequence
  ENSG00000155275_42 (sequence is synthesized)
ttgtcgagcagctgcagctctgactagtgaggcacaagggagctctgctgaggcctctggggtccccacgctgggaagttctccctgcaggggacacctggtgtagaagccccgagggag

SEQ ID NO: 448497 - DNA, 120 bp, Artificial Sequence
  ENSG00000155275_43 (sequence is synthesized)
cagccaggagcccagcactgagggtggtggagcaggtagatggaaagaactctcttcccaaagacaagccgcagagccgcatcccttccccagcccctgtgttaggccgtgaggcatctt

SEQ ID NO: 448498 - DNA, 120 bp, Artificial Sequence
  ENSG00000155275_44 (sequence is synthesized)
gatgcccctcggccccccagtcctgcagcctcgctggagctctccctgcagcaggaagggctgaggccaaccacaaaggggcttggggcgacatcaagggatggcagagcgagagggaag

SEQ ID NO: 448499 - DNA, 120 bp, Artificial Sequence
  ENSG00000155275_45 (sequence is synthesized)
tgcagggagcctggcccagaagaccagccctgccgccgcctcctggaaggggcacacctcctgagctaagcccaggatgccgcccaagcctcggggcctcccaaggtgtcccccatgcca

SEQ ID NO: 448500 - DNA, 120 bp, Artificial Sequence
  ENSG00000155275_46 (sequence is synthesized)
gagtgtgtggcctctgccaggcccaggatggctccaggtggttggactcccatttcctctccccttcccaggtctttcccaagcccagagcccctgctttagttttccagtgtggggaga

SEQ ID NO: 448501 - DNA, 120 bp, Artificial Sequence
  ENSG00000155275_47 (sequence is synthesized)
caggagagtggccacagagcctggttctgcgcttggtgctgctggactccaaacctggctctggagctgcagtcctggtgagggcggtggccctggggaagatgagctccccaacacttg

SEQ ID NO: 448502 - DNA, 120 bp, Artificial Sequence
  ENSG00000155275_48 (sequence is synthesized)
ttacggcagtttccagtcacaagccgcaaggacacagtctcaaaggagcatcagatggggttgggggcatgtggggtggccctggctctcccaggtggggtcctgccaggccaagagcta

SEQ ID NO: 448503 - DNA, 120 bp, Artificial Sequence
  ENSG00000155275_49 (sequence is synthesized)
tgctaagtggggcccaccatggccataggcccctccgtgtcacctggcataatcagctggtagaaacagcccttggggactacatcacctgacctgatctccaggttccaggtaccattt

SEQ ID NO: 448504 - DNA, 120 bp, Artificial Sequence
  ENSG00000155275_50 (sequence is synthesized)
cttactgccccccagcagcactgtgcccctgtccacaggtcatgtgactgggtgtcgggcacggttcccttgcagcaatgaacagtacatctgtggatgaaggtgggcagatagaggttt

SEQ ID NO: 448505 - DNA, 120 bp, Artificial Sequence
  ENSG00000155275_51 (sequence is synthesized)
ggcggggggtggagcggggcactgatcatggcagcctgctgtggccagccccaagggcttcccggtgacttctcagagcctgaatgtctcccctggacaggtgggatcgagggaatgcca

SEQ ID NO: 448506 - DNA, 120 bp, Artificial Sequence
  ENSG00000155275_52 (sequence is synthesized)
tgaaggtgggcatgagggggaatctcgccaggggtacagtgcgtctacactgcttttcagactagtgccacgcaggcactaggtctcactggctgaggggcagcctctgtccccaggcgc

SEQ ID NO: 448507 - DNA, 120 bp, Artificial Sequence
  ENSG00000155275_53 (sequence is synthesized)
cgcgacttgccccatctgctgcagaggaggcccacctgtggtgagcattgtggtcttggggcctgcaggcgcccttgtggagttaccatggtgaccgcagccccttggactggtgctggg

SEQ ID NO: 448508 - DNA, 120 bp, Artificial Sequence
  ENSG00000155275_54 (sequence is synthesized)
gattcagacaccaggtcacgtaggccttggctcgtggcatggccaagccctggggtctgtcggggttggcagggcaggcttcctggaggaggggctgaggccgcgtattctccctctcat

SEQ ID NO: 448509 - DNA, 120 bp, Artificial Sequence
  ENSG00000155275_55 (sequence is synthesized)
cctgccatccgctgcggctactctccagggccacaactgtcacagaacgaggaacccgggccttgtgcagaagagccttgtgtaggtggattgagaagagagtcccagaggagaagctga

SEQ ID NO: 448510 - DNA, 120 bp, Artificial Sequence
  ENSG00000155275_56 (sequence is synthesized)
gccctctgctgacttgcccccagctcatttctgcttgacctttccttgttgccgtttttgcttggaaactatattgtggacctcatcattctgggaaaaggtggttcacgagaaagcaca

SEQ ID NO: 448511 - DNA, 120 bp, Artificial Sequence
  ENSG00000155275_57 (sequence is synthesized)
gtcatgtgtcaattaacagtgcagatgcattctgagaaatgcgttgttaggtgatttcatcatcctgcaacatcagagtgtgccccgcgctcatggatgagacagcctgccccacaccca

SEQ ID NO: 448512 - DNA, 120 bp, Artificial Sequence
  ENSG00000155275_58 (sequence is synthesized)
ggctgtgggggacgggatggcctgttgcttctggaccagacgcctgcacagcacattaactgtgctgaatgctgtaggcagttgtaacgcaatgaccctgtattcagtggatcagctggc

SEQ ID NO: 448513 - DNA, 120 bp, Artificial Sequence
  ENSG00000155275_59 (sequence is synthesized)
aagctcttagaggcgtaggcaaatatgtgcaggccatcagtacagtactgtgcagtacagcagcaagaaaatcagcttggtaccaccagactgggctgcaggttccagctgttgctgcta

SEQ ID NO: 448514 - DNA, 120 bp, Artificial Sequence
  ENSG00000155275_60 (sequence is synthesized)
ggtatggagcctggcaccgtgctgccgggtacacgcggggcctcatctcatcctgcactcatggcagagcaggcctttcctccttgaacatgtagacaagtctcagagaggtcagtgcgc

SEQ ID NO: 448515 - DNA, 120 bp, Artificial Sequence
  ENSG00000155275_61 (sequence is synthesized)
cggcccgatgtctcccagtgagtggagaggccacgccacagtccgggccaggtctgacccagcactggcacccctgagcctatggcatcatccgaggactgtaatcctcaacccgttcct

SEQ ID NO: 448516 - DNA, 80 bp, Artificial Sequence
  ENSG00000155287_0 (sequence is synthesized)
cggcagtggtggcagcggcggcgggggtgggcgccgcagctggcccgggtggatggagttggaggggcggggtgctggcg

SEQ ID NO: 448517 - DNA, 80 bp, Artificial Sequence
  ENSG00000155287_1 (sequence is synthesized)
ctgcagcggggcgtgggccggggggccggcggcggggaggccggggcctgcaggcccccggtacgacaagatccggactc

SEQ ID NO: 448518 - DNA, 120 bp, Artificial Sequence
  ENSG00000155287_2 (sequence is synthesized)
ccggggcctgcaggcccccggtacgacaagatccggactccggcccggactacgaggcgctgccggctggagccactgtcaccacgcacatggtggcaggcgccgtggcagggatcctgg

SEQ ID NO: 448519 - DNA, 120 bp, Artificial Sequence
  ENSG00000155287_3 (sequence is synthesized)
agcactgcgtgatgtaccccatcgactgcgtcaagacccggatgcagagtctacagcctgacccagctgcccgctatcgcaatgtgttggaggccctctggaggattataagaacggagg

SEQ ID NO: 448520 - DNA, 120 bp, Artificial Sequence
  ENSG00000155287_4 (sequence is synthesized)
gcctatggaggcccatgagggggctgaacgtcacagcaacaggcgcagggcctgcccacgccctttattttgcctgctacgaaaagttaaaaaagacattgagtgatgtaatccaccctg

SEQ ID NO: 448521 - DNA, 120 bp, Artificial Sequence
  ENSG00000155287_5 (sequence is synthesized)
ggggcaatagccatattgccaatggtgcggccgggtgtgtggcaacattacttcatgatgcagccatgaaccctgcggaagtggtcaagcagaggatgcagatgtacaactcaccatacc

SEQ ID NO: 448522 - DNA, 120 bp, Artificial Sequence
  ENSG00000155287_6 (sequence is synthesized)
aacgttcctttccaagccattcacttcatgacctatgaattcctgcaggagcactttaacccccagagacggtacaacccaagctcccacgtcctctctggagcttgcgcaggagctgta

SEQ ID NO: 448523 - DNA, 120 bp, Artificial Sequence
  ENSG00000155287_7 (sequence is synthesized)
gctgccgcagccacaaccccactggacgtttgcaaaacactgctcaacacccaggagtccttggctttgaactcacacattacaggacatatcacaggcatggctagtgccttcaggacg

SEQ ID NO: 448524 - DNA, 120 bp, Artificial Sequence
  ENSG00000155287_8 (sequence is synthesized)
gtatatcaagtaggtggggtgaccgcctatttccgaggggtgcaggccagagtaatttaccagatcccctccacagccatcgcatggtctgtgtatgagttcttcaaatacctaatcact

SEQ ID NO: 448525 - DNA, 120 bp, Artificial Sequence
  ENSG00000155287_9 (sequence is synthesized)
aaaaggcaagaagagtggagggctggcaagtgaagtagcactgaacgaagccaggggttcagatgacactgctgcatcctggtcacattctctgtctcctggaatgctcccacctcaagt

SEQ ID NO: 448526 - DNA, 120 bp, Artificial Sequence
  ENSG00000155287_10 (sequence is synthesized)
ggagttagaaggaaggtagaggggctctcccccaggattttggtgttttgactaacaccagttcctgccaacctctgttgccaccacctttccttccaggccctaagcacgtgcagcaaa

SEQ ID NO: 448527 - DNA, 120 bp, Artificial Sequence
  ENSG00000155287_11 (sequence is synthesized)
gcacaccacagcacctttgataacctctctccatcctgggcctgatgacctgctctagactgttatagagggataagcagctcattcccctggttcctaataaaaagcctttaaattaaa

SEQ ID NO: 448528 - DNA, 120 bp, Artificial Sequence
  ENSG00000155287_12 (sequence is synthesized)
catattgccaatggtattgagccttcctgtgctggttcccccactttcccaactctttgggctttgctgctgtcagtgctttccagtctcagcatggtttggagctgaagctttgggctg

SEQ ID NO: 448529 - DNA, 120 bp, Artificial Sequence
  ENSG00000155287_13 (sequence is synthesized)
ggataggccagattataagggagggacttccaaacctgatgttctcagacaacgggccgcttcaaccctgccttttcctttggggcacctcaacaaagggttacagtatcctcccttacc

SEQ ID NO: 448530 - DNA, 120 bp, Artificial Sequence
  ENSG00000155287_14 (sequence is synthesized)
cgaggcgctgccggctggagccactgtcaccacgcacatggtggcaggcgccgtggcagggatcctggagcactgcgtgatgtaccccatcgactgcgtcaaggtgcggccgggtgtgtg

SEQ ID NO: 448531 - DNA, 120 bp, Artificial Sequence
  ENSG00000155304_0 (sequence is synthesized)
atcacaagcctgttcggcgggactgtgatggccagagagatgacgatcttaggatcggctgttttgactctcctgttggccggctatttggcacaacagtatttaccattgcctactcct

SEQ ID NO: 448532 - DNA, 120 bp, Artificial Sequence
  ENSG00000155304_1 (sequence is synthesized)
aaagtgattggtattgatcttggcaccacctattgttctgttggggtgttttttcctggcacaggaaaagtaaaggtgattccagatgaaaatgggcatatcagcatacccagcatggtg

SEQ ID NO: 448533 - DNA, 120 bp, Artificial Sequence
  ENSG00000155304_2 (sequence is synthesized)
tcttttactgacaatgatgtatatgtgggatatgaaagcgtagagctggcagattcaaatcctcaaaacacaatatatgatgccaaaagattcataggcaagatttttaccgcagaagag

SEQ ID NO: 448534 - DNA, 120 bp, Artificial Sequence
  ENSG00000155304_3 (sequence is synthesized)
ttggaggctgaaattggcagatacccatttaaggttttaaacaaaaatggaatggttgagttttctgtgacaagtaatgagaccatcacagtgtccccagaatatgttggctctcgacta

SEQ ID NO: 448535 - DNA, 120 bp, Artificial Sequence
  ENSG00000155304_4 (sequence is synthesized)
ttgttgaagttaaaggaaatggcagaggcatatcttggaatgccagttgccaatgctgtcatttctgtaccagcagaatttgatctaaaacagagaaattcaacaattgaagctgctaac

SEQ ID NO: 448536 - DNA, 120 bp, Artificial Sequence
  ENSG00000155304_5 (sequence is synthesized)
cttgcaggactgaagattttgagggtaataaatgaacccacagcagcagctatggcctatggtctccacaaggctgacgtcttccacgtcttggtgatagacttgggcggaggaactcta

SEQ ID NO: 448537 - DNA, 120 bp, Artificial Sequence
  ENSG00000155304_6 (sequence is synthesized)
gatgtgtctttactgaataaacaaggagggatgtttctaacccgagcaatgtctggaaacaataaacttggaggacaggacttcaatcagagattgcttcagtacttatataaacagatc

SEQ ID NO: 448538 - DNA, 120 bp, Artificial Sequence
  ENSG00000155304_7 (sequence is synthesized)
tatcaaacatatggcttcgtgccctctaggaaagaggaaatccacagattgagacaagctgtggaaatggtcaaattaaatctgactcttcatcaatctgctcagttgtcagtattacta

SEQ ID NO: 448539 - DNA, 120 bp, Artificial Sequence
  ENSG00000155304_8 (sequence is synthesized)
acggtggaggagcaggacaggaaggaacctcacagtagtgacactgaactgccaaaagacaaactttcctcagcagatgaccatcgcgtgaacagtgggtttggacgtggcctttctgat

SEQ ID NO: 448540 - DNA, 120 bp, Artificial Sequence
  ENSG00000155304_9 (sequence is synthesized)
aagaaaagtggagaaagtcaggttttatttgaaacagaaatatcacggaaactctttgatacccttaatgaagacctctttcagaaaatactggtacccattcagcaagtattgaaagaa

SEQ ID NO: 448541 - DNA, 120 bp, Artificial Sequence
  ENSG00000155304_10 (sequence is synthesized)
ggccacctggaaaagactgagattgatgaggtggttttagttgggggctccactcgtattcctcggatccgtcaagtcattcaagagttctttggaaaagatcccaacacatctgtagac

SEQ ID NO: 448542 - DNA, 120 bp, Artificial Sequence
  ENSG00000155304_11 (sequence is synthesized)
cctgacctagcagtagtaacgggagtggctatccaagcagggattgatggaggctcttggcctctccaagtcagtgctttagaaattcccaataagcatttacaaaaaaccaacttcaac

SEQ ID NO: 448543 - DNA, 120 bp, Artificial Sequence
  ENSG00000155304_12 (sequence is synthesized)
tgaattctgcagaaataatggttatttgtgaacttgtctgatgatctcttcccatttatcagattaccttttccacaaaagaaagtctctaaaatatcacagatttacctagagggcaac

SEQ ID NO: 448544 - DNA, 120 bp, Artificial Sequence
  ENSG00000155304_13 (sequence is synthesized)
atttagatacaggaaaattttacatagtgttttgtcttaggattagacgtgaccagattgatcctgtttgattttggagagatcctattctaacaaatactctaaaatgataaaattgag

SEQ ID NO: 448545 - DNA, 120 bp, Artificial Sequence
  ENSG00000155304_14 (sequence is synthesized)
gtacaactctcttaaaagagtatggataactatattttctggattctggaggttgataaccatatgcacttaacattatattctataaacattaagtagtgccagttatgagattcccag

SEQ ID NO: 448546 - DNA, 120 bp, Artificial Sequence
  ENSG00000155304_15 (sequence is synthesized)
ttcttactaaattgtattagcaggagctggtaattacttgtattatcacatgtaactaataatttgaactatacttgaaggaccgtgttgatgtcaggtatttacagtggttggaagata

SEQ ID NO: 448547 - DNA, 120 bp, Artificial Sequence
  ENSG00000155304_16 (sequence is synthesized)
taatctgcattctccaggagttttatgtgtttaatagatgaatttattttatttctaaaggtattcaaatgtttcagcaccatataatagaaatacccaattatattctagttcctttat

SEQ ID NO: 448548 - DNA, 120 bp, Artificial Sequence
  ENSG00000155304_17 (sequence is synthesized)
gtcctgtacatcattctctgcttggatttccattattctgtttggttagagaataaaattggtaattgcatttgaagaatgtgttaatgtcataataaagccatgattgctatcttattt

SEQ ID NO: 448549 - DNA, 120 bp, Artificial Sequence
  ENSG00000155304_18 (sequence is synthesized)
ttgttatccgagacctttgcaaacattggcaaatagcatcaattacctactgtatttgtttctttgtttatattttcagtaagccctggggaatatagcatggaattgagctactaaatg

SEQ ID NO: 448550 - DNA, 120 bp, Artificial Sequence
  ENSG00000155304_19 (sequence is synthesized)
gttttggttccgttttacggagatttttcctcatatttagttttgaatgaggaaaatgtgctcaattataaaagctgtgttattgttttctattattatttttaaataatcacacttgga

SEQ ID NO: 448551 - DNA, 120 bp, Artificial Sequence
  ENSG00000155304_20 (sequence is synthesized)
ctcttttcaaacattaggttagtttgtaatgaaagcaaaaaatttgtgaatactggaagtaacgtggaaatctaatgtggaagccattgtggcaaggtttctacaaatcggcatttggag

SEQ ID NO: 448552 - DNA, 120 bp, Artificial Sequence
  ENSG00000155304_21 (sequence is synthesized)
cagagttgtttgtttttgttgtttgtttcctttaagaaaaaccacagggaccaagaaagaaaatataacagtttgatttctgtcatacccattgtatttgaagatatatggatacagatt

SEQ ID NO: 448553 - DNA, 120 bp, Artificial Sequence
  ENSG00000155304_22 (sequence is synthesized)
atatatatatatacatattttccttaatagaggaatgcttcatattattcaaaaattatatcctgatcacctttttttgttttttattgtaaagtatctctgctttatccattgctgaat

SEQ ID NO: 448554 - DNA, 120 bp, Artificial Sequence
  ENSG00000155304_23 (sequence is synthesized)
tcgataggatgttgaaatgctggtcaccaaaaaaggaaactgagcaaattcatttcaacaacatcaaaacttcagcttctcatagtaaaaagctgaatgttactaatatttttcatatct

SEQ ID NO: 448555 - DNA, 120 bp, Artificial Sequence
  ENSG00000155304_24 (sequence is synthesized)
aaaaaaaaattcttagcaatgaaattgctgttaaaacacaaatttcaatcaaatacttttgtgtatagaaaatatgtatagtaggtagatagaaaagtataaaatgtttgttgaagtatc

SEQ ID NO: 448556 - DNA, 120 bp, Artificial Sequence
  ENSG00000155304_25 (sequence is synthesized)
ttattttagaatgaatggagaaatgccaaagatgaatccttcactgcattatgaaaatatttcacatgttctcttggactttatataaatctgtaatagattttagaattgaaaaattct

SEQ ID NO: 448557 - DNA, 120 bp, Artificial Sequence
  ENSG00000155304_26 (sequence is synthesized)
ttgtgaaggtcttctaaaagtgttccaatttatctcaaaatctccatatataggatcagcttaaaacataaagaaaaccttgaatttctcaaatgtttgagatgttcaagacagtctctt

SEQ ID NO: 448558 - DNA, 120 bp, Artificial Sequence
  ENSG00000155304_27 (sequence is synthesized)
aatccgttaatgcttttggaaacaattgacaaaatagggcaggcagctcatctcatgtcctgaagttggaatttaaataattcctatttgcaaattagaatgacagtgttggaatttgga

SEQ ID NO: 448559 - DNA, 120 bp, Artificial Sequence
  ENSG00000155304_28 (sequence is synthesized)
ggcagtagttgagcatattctctagtatatagctacacctttaataaaatgaaggaatgtcttcaatcatattttagtgggctatttataaatagtcttgaagtcaatttagtttattta

SEQ ID NO: 448560 - DNA, 120 bp, Artificial Sequence
  ENSG00000155304_29 (sequence is synthesized)
tttaaaagataatgcatcctgaaagggatcatttatgaataacaatctgaagtcttttcataaaaaaaattaataaactttagttgtacatttagccagtgttatttgaagtatgtaact

SEQ ID NO: 448561 - DNA, 120 bp, Artificial Sequence
  ENSG00000155304_30 (sequence is synthesized)
tttaaaatattaagtgtcttgtatgattagaatatgtgaatgagtaacttattttgtatcaggaatgttttggtactgtgttttcactcaaaccactgacttaacagatactgctgtgta

SEQ ID NO: 448562 - DNA, 120 bp, Artificial Sequence
  ENSG00000155304_31 (sequence is synthesized)
taacatgtactaaatattacagttattgtgcataacagattgttcctcttatatttgtgtgtatacaggcaattcatgttttaatgtaaataaataccattttgcagtttgttttttaaa

SEQ ID NO: 448563 - DNA, 120 bp, Artificial Sequence
  ENSG00000155304_32 (sequence is synthesized)
gaatgcaaagcgcggggcggggctaaagagatagcctgttttccctcaagtaggatcgcgggaccacaggtttgattataaacgccagtctctcgccacggcgctcctccccctcagtct

SEQ ID NO: 448564 - DNA, 120 bp, Artificial Sequence
  ENSG00000155304_33 (sequence is synthesized)
cactggtcctgccggccgttgcgtggaagggggactcagtcgtcactggcagcggttgaatggaggctctttgccccgcgccctcacggatcggctgttttgactctcctgttggccggc

SEQ ID NO: 448565 - DNA, 120 bp, Artificial Sequence
  ENSG00000155307_0 (sequence is synthesized)
attagacagcacactgctgactgttttcagttgtttctgtaacagcagaaagtgcactcactaggagtagtcagaattcaaaatgctcaagagaaagccatccaatgtttcagagaagga

SEQ ID NO: 448566 - DNA, 120 bp, Artificial Sequence
  ENSG00000155307_1 (sequence is synthesized)
gaaacatcaaaaaccaaagcgaagcagcagttttgggaatttcgatcgttttcggaataattctttatcaaaaccagatgattcaactgaggcacatgaaggagatcccacaaatggaag

SEQ ID NO: 448567 - DNA, 120 bp, Artificial Sequence
  ENSG00000155307_2 (sequence is synthesized)
tggagaacaaagtaaaacttcaaataatggaggcggtttgggtaaaaaaatgagagctatttcatggacaatgaagaaaaaagtgggtaaaaagtacatcaaagccctttctgaggaaaa

SEQ ID NO: 448568 - DNA, 120 bp, Artificial Sequence
  ENSG00000155307_3 (sequence is synthesized)
ggatgaggaagatggagagaatgcccacccatatagaaacagtgaccctgtgattgggacccacacagagaaggtgtccctcaaagccagtgactccatggatagtctctacagtggaca

SEQ ID NO: 448569 - DNA, 120 bp, Artificial Sequence
  ENSG00000155307_4 (sequence is synthesized)
gagctcatcaagtggcataacaagctgttcagatggtacaagtaaccgggacagctttcgactggatgacgatggcccctattcaggaccattctgtggccgtgccagagtgcatacgga

SEQ ID NO: 448570 - DNA, 120 bp, Artificial Sequence
  ENSG00000155307_5 (sequence is synthesized)
tttcacgccaagtccctatgacactgactccctcaaaatcaagaaaggagacatcatagacattatttgcaaaacaccaatggggatgtggacaggaatgttgaacaataaagtgggaaa

SEQ ID NO: 448571 - DNA, 120 bp, Artificial Sequence
  ENSG00000155307_6 (sequence is synthesized)
cttcaaattcatttatgtggatgtcatctcagaagaggaagcagcccccaagaaaataaaggcaaaccgaaggagtaacagcaaaaaatccaagactctgcaggagttcctagagaggat

SEQ ID NO: 448572 - DNA, 120 bp, Artificial Sequence
  ENSG00000155307_7 (sequence is synthesized)
gaattaaatattgaaaacccagatgacagaagaaggttactatcagctgctgaaaacttccttgaagaagaaattattcaagagcaagaaaatgaacctgagcccctatccttgagctca

SEQ ID NO: 448573 - DNA, 120 bp, Artificial Sequence
  ENSG00000155307_8 (sequence is synthesized)
gacatctccttaaataagtcacagttagatgactgcccaagggactctggttgctatatctcatcaggaaattcagataatggcaaagaggatctggagtctgaaaatctgtctgacatg

SEQ ID NO: 448574 - DNA, 120 bp, Artificial Sequence
  ENSG00000155307_9 (sequence is synthesized)
gtacataagattattatcacagagccaagtgactgaacacgcattcccaactatatatctacagatgcattccattttaactcttcttgagctaaaacgtcaaataggagaggaagataa

SEQ ID NO: 448575 - DNA, 120 bp, Artificial Sequence
  ENSG00000155307_10 (sequence is synthesized)
acgtcaaataggagaggaagataagataaatatttgtaaataaaacctaaagtttaaatgttttaatctgaataattgtacataaaattttgtatctctaacattccaaattactgtcaa

SEQ ID NO: 448576 - DNA, 120 bp, Artificial Sequence
  ENSG00000155307_11 (sequence is synthesized)
atgctatgtgttaatatttcacttgcttgtattagaaaggcaaaatgtaagactttggtatgtgtgacatatgctttatttggctttattttacaagtacagtatctgcaaaaaacaaag

SEQ ID NO: 448577 - DNA, 120 bp, Artificial Sequence
  ENSG00000155307_12 (sequence is synthesized)
taaccttttttcatacctgccagttttgaatttatatatgttattgaacaaatagtaatagaggattcgctgttgaaacaagttgtccaagcaatgttatattcatttttatacttattg

SEQ ID NO: 448578 - DNA, 120 bp, Artificial Sequence
  ENSG00000155307_13 (sequence is synthesized)
ggaaagtgtgagttaatattggacacattttatcctgatccacagtggagttttagtaattatattttgttgatttcttcattttgttttctggtataaaagtagagataatgtgtagtc

SEQ ID NO: 448579 - DNA, 120 bp, Artificial Sequence
  ENSG00000155307_14 (sequence is synthesized)
acttctgatttagtgaaaccaattgtaataattgtggaaatgttttgtctttaagtgtaaatattttaaaatttgacataccctaatgttaataataaaaagaactatttgcatattgca

SEQ ID NO: 448580 - DNA, 120 bp, Artificial Sequence
  ENSG00000155307_15 (sequence is synthesized)
attggctgctcatcttccagctctccatgtgtagcttggctgctccgtggtcaaggtgacttgttagagatcattttagatctgtgaatctaggagacaataaaaaattagcagaaagtg

SEQ ID NO: 448581 - DNA, 120 bp, Artificial Sequence
  ENSG00000155307_16 (sequence is synthesized)
ggagtttctaatttagagaatgcaaaaccaaaaaagagaaagttattccggagatttatgtctgaaaataaaatatttggttagtgattcctaaggttacaagtgtaaacgatgtattct

SEQ ID NO: 448582 - DNA, 120 bp, Artificial Sequence
  ENSG00000155307_17 (sequence is synthesized)
gaagaacattttttaaaagtggcttcattctaactttaaatggctatgacaaagaaatcattgatttatttgcaatattttccgtttatatttaaacagaataatcctctttggtagttc

SEQ ID NO: 448583 - DNA, 120 bp, Artificial Sequence
  ENSG00000155307_18 (sequence is synthesized)
gagggctctatggatagcttatatgagccaatcccagagcaacaagctaaccaagaaaacatgtctagtagaactgattctcctatcccaccctttggagagagtgaacaaacaccaaac

SEQ ID NO: 448584 - DNA, 120 bp, Artificial Sequence
  ENSG00000155307_19 (sequence is synthesized)
aatctcttcgtgggagtttctaatttagagaatgcaaaaccaaaaaagagaaagttattccggagatttatgtctgaaaataaaatatttgaaggaaaaactgtgaatgacaaaatctgg

SEQ ID NO: 448585 - DNA, 120 bp, Artificial Sequence
  ENSG00000155307_20 (sequence is synthesized)
caggaacacagcaagcataagaatgattcccacatcagaaggccctgtcagctaaaagatctaaatgaagatgattttctaagtaacaacatacatacctatcaaggaaaaactctacaa

SEQ ID NO: 448586 - DNA, 120 bp, Artificial Sequence
  ENSG00000155307_21 (sequence is synthesized)
ggaacttcctatcaggtgacctctgaatgttggagtccatttcactatcaaagacatgttgagaccactgttgatgaactggctcaagaatttatgtaaagtaacaaaagaagatactta

SEQ ID NO: 448587 - DNA, 120 bp, Artificial Sequence
  ENSG00000155307_22 (sequence is synthesized)
gaagggctgaagtgcagagaggagaagtggctcactcaagttcacatggccagtcacaaagcagattttcaaagcagaacaatcattagtcggcacacaagggcaggttcttactctagg

SEQ ID NO: 448588 - DNA, 120 bp, Artificial Sequence
  ENSG00000155307_23 (sequence is synthesized)
ttttcttaacatttcttgtgtatatgaaataaatattagataaaaatgtttttttactgtgtaattttccattcatagctcctcttcttgctaagaatccaatagatacttaataaaaat

SEQ ID NO: 448589 - DNA, 120 bp, Artificial Sequence
  ENSG00000155307_24 (sequence is synthesized)
taattaatttgcatactggctcttaaatttcctattgttcataatttttggtcagctaggaggtgtacccagaaacagaaatgttcttatgagtagttctagaaacttcttcaaaatttc

SEQ ID NO: 448590 - DNA, 120 bp, Artificial Sequence
  ENSG00000155307_25 (sequence is synthesized)
agagcagaggatattacgcaggaagtaagaaagatgtggcttctgtggccttttctcttaaatcaacacaacccccatttgcaatgctggtttgtgtaatcctggcaactcccagctagc

SEQ ID NO: 448591 - DNA, 120 bp, Artificial Sequence
  ENSG00000155307_26 (sequence is synthesized)
ttggcagtgtgtccacattcaaagactgacccaaagctataggtcagtgagcaaaaagcagtcttggcttcccctgcagaagtggagaaatggcagtgacattgcgacttcattatacta

SEQ ID NO: 448592 - DNA, 120 bp, Artificial Sequence
  ENSG00000155307_27 (sequence is synthesized)
ccactcattttaatgccacaagcactgttttctatagttctttattacttctgttttcagctgccacatggaagtgtttctaaagaacataaatagaggcttgtccttactgagtggttt

SEQ ID NO: 448593 - DNA, 120 bp, Artificial Sequence
  ENSG00000155307_28 (sequence is synthesized)
tctgaactaaaaggaacataaagcatttccttcaaagaaggaaaggttgttatataaaaaattttccctaaaatttagcaatttttcctgagataggaaaaaatttataatgttaaaaag

SEQ ID NO: 448594 - DNA, 120 bp, Artificial Sequence
  ENSG00000155307_29 (sequence is synthesized)
ggaagctcagcagtgtccactgtcgccattccttggccatagaaaacaatgtatttgaattttgatgtaagcataacaaattgaagatgaagatgacacgttgatttcttgtttgaaatt

SEQ ID NO: 448595 - DNA, 120 bp, Artificial Sequence
  ENSG00000155307_30 (sequence is synthesized)
aaccaagtcccgagaaaagaaagtgaatagtgttagcacgaggaggaaggaagaaatggagattagattggatactctttctgcatcactgggtagatccagcactttaaataactgcaa

SEQ ID NO: 448596 - DNA, 120 bp, Artificial Sequence
  ENSG00000155307_31 (sequence is synthesized)
cttggaagataaattagcttggtatgaaggtgaagcttacatgtggcatcactggaagccttttcctgaaaaccctctctggacatgtcttgatttccaaatagcacaagttggaccctg

SEQ ID NO: 448597 - DNA, 120 bp, Artificial Sequence
  ENSG00000155307_32 (sequence is synthesized)
gtattttgcccaatttgcagatgaggcaaaaatttggagatgaatttcaaagaagtcgaacagctagatgagtgcagagatggagatttaatcaaagggagtctgctgtaaaactcctcc

SEQ ID NO: 448598 - DNA, 120 bp, Artificial Sequence
  ENSG00000155307_33 (sequence is synthesized)
tttctatatcagaaggtaaaaggcgagaggcttccatggctgcctgtcaacagggtttgtggagagaaggggctgggaacctgggcaagcagcactttcagcaataaacagtatcctcag

SEQ ID NO: 448599 - DNA, 120 bp, Artificial Sequence
  ENSG00000155307_34 (sequence is synthesized)
gggcccacagagggaagatggtttcagtgccaaaggcttgagtccccttaattttttcattccacttcactcatcacctgtctcctttctatgctagcaaaagaacaattattcatagat

SEQ ID NO: 448600 - DNA, 120 bp, Artificial Sequence
  ENSG00000155307_35 (sequence is synthesized)
ggtaaaattatttatagagccgatgtaattaaaaagaaaaaaaaagaaaagaaacacctgatgcaaaattcttccattgcaaggtgagaagatgaaaatccaagtagctaagtggctttc

SEQ ID NO: 448601 - DNA, 120 bp, Artificial Sequence
  ENSG00000155307_36 (sequence is synthesized)
tcaagctcacaaatctataattcagtctcttacatctatcagaaacatgttccgccttatcctggtctctgaaaacaaaacatagtgtctccaaagcattaaatggtttttgatgtttga

SEQ ID NO: 448602 - DNA, 120 bp, Artificial Sequence
  ENSG00000155307_37 (sequence is synthesized)
atcaaagacatgttgagaccactgttgatgaactggccataaaatcaggcagtgaccctgtggaatcaatggggacattaaagcgactacagaaactggtttggactaagaaagccagag

SEQ ID NO: 448603 - DNA, 120 bp, Artificial Sequence
  ENSG00000155313_0 (sequence is synthesized)
aagcagcccgcggaccggcagcaaaggaacgtgcgaacgcgtgacgccgcccgactggctcgcgctctcccgtgccccggcgtcctccgcccgctcatggcccgggccgccgcggacgag

SEQ ID NO: 448604 - DNA, 80 bp, Artificial Sequence
  ENSG00000155313_1 (sequence is synthesized)
cggcgctgaggcgggccgcgtggagacgtgaggcggccgccgtggccctcacagtcggcgtttcgccgcctgcccgcggt

SEQ ID NO: 448605 - DNA, 80 bp, Artificial Sequence
  ENSG00000155313_2 (sequence is synthesized)
gggcgctgtcctcccaggccgtccgcgccgctccctggagctcggcggagcgcggcagccagggccggcggaggcgcgag

SEQ ID NO: 448606 - DNA, 120 bp, Artificial Sequence
  ENSG00000155313_3 (sequence is synthesized)
gcgggggccatgaccgtggagcagaacgtgctgcagcagagcgcggcgcagaagcaccagcagacgtttttgaatcaactgagagaaattacggggattaatgacacccagatactacag

SEQ ID NO: 448607 - DNA, 120 bp, Artificial Sequence
  ENSG00000155313_4 (sequence is synthesized)
caagccttgaaggatagtaatggaaacttggaattagcagtggctttccttactgcgaagaatgctaagacccctcagcaggaggagacaacttactaccaaacagcacttcctggcaat

SEQ ID NO: 448608 - DNA, 120 bp, Artificial Sequence
  ENSG00000155313_5 (sequence is synthesized)
gatagatacatcagtgtgggaagccaagcagatacaaatgtgattgatctcactggagatgataaagatgatcttcagagagcaattgccttgagtttggccgaatcaaacagggcattc

SEQ ID NO: 448609 - DNA, 120 bp, Artificial Sequence
  ENSG00000155313_6 (sequence is synthesized)
agggagactggaataactgatgaggaacaagccattagcagagttcttgaagccagcatagcagagaataaagcatgtttgaagaggacacctacagaagtttggagggattctcgaaac

SEQ ID NO: 448610 - DNA, 120 bp, Artificial Sequence
  ENSG00000155313_7 (sequence is synthesized)
ccttatgatagaaaaagacaggacaaagctcccgttgggctaaagaatgttggcaatacttgttggtttagtgctgttattcagtcattatttaatcttttggaatttagaagattagtt

SEQ ID NO: 448611 - DNA, 120 bp, Artificial Sequence
  ENSG00000155313_8 (sequence is synthesized)
ctgaattacaagcctccatcaaatgctcaagatttaccccgaaaccaaaaggaacatcggaatttgccttttatgcgtgagctgaggtatctatttgcacttcttgttggtaccaaaagg

SEQ ID NO: 448612 - DNA, 120 bp, Artificial Sequence
  ENSG00000155313_9 (sequence is synthesized)
aagtatgttgatccatcaagagcagttgaaattcttaaggatgctttcaaatcaaatgactcacagcagcaagatgtgagtgagtttacacacaaattattagattggttagaagatgcc

SEQ ID NO: 448613 - DNA, 120 bp, Artificial Sequence
  ENSG00000155313_10 (sequence is synthesized)
ttccaaatgaaagctgaagaggagacggatgaagagaagccaaagaaccccatggtagagttgttctatggcagattcctggctgtgggagtacttgaaggtaaaaaatttgaaaacact

SEQ ID NO: 448614 - DNA, 120 bp, Artificial Sequence
  ENSG00000155313_11 (sequence is synthesized)
gaaatgtttggtcagtacccacttcaggtcaatgggttcaaagatctgcatgagtgcctagaagctgcaatgattgaaggagaaattgagtctttacattcagagaattcaggaaaatca

SEQ ID NO: 448615 - DNA, 120 bp, Artificial Sequence
  ENSG00000155313_12 (sequence is synthesized)
ggccaagagcattggtttactgaattaccacctgtgttaacatttgaattgtcaagatttgaatttaatcaggcattgggaagaccagaaaaaattcacaacaaattagaatttccccaa

SEQ ID NO: 448616 - DNA, 120 bp, Artificial Sequence
  ENSG00000155313_13 (sequence is synthesized)
gttttatatttggacagatacatgcacagaaacagagaaataacaagaattaagagggaagagatcaagagactgaaagattacctcacggtattacaacaaaggctagaaagatattta

SEQ ID NO: 448617 - DNA, 120 bp, Artificial Sequence
  ENSG00000155313_14 (sequence is synthesized)
agctatggttccggtcccaaacgattccccttggtagatgttcttcagtatgcattggaatttgcctcaagtaaacctgtttgcacttctcctgttgacgatattgacgctagttcccca

SEQ ID NO: 448618 - DNA, 120 bp, Artificial Sequence
  ENSG00000155313_15 (sequence is synthesized)
cctagtggttccataccatcacagacattaccaagcacaacagaacaacagggagccctatcttcagaactgccaagcacatcaccttcatcagttgctgccatttcatcgagatcagta

SEQ ID NO: 448619 - DNA, 120 bp, Artificial Sequence
  ENSG00000155313_16 (sequence is synthesized)
ttactcagtcccggatacctccagatttgcccatgcatccggcaccaaggcacataacggaggaagaactttctgtgctggaaagttgtttacatcgctggaggacagaaatagaaaatg

SEQ ID NO: 448620 - DNA, 120 bp, Artificial Sequence
  ENSG00000155313_17 (sequence is synthesized)
acaccagagatttgcaggaaagcatatccagaatccatcgaacaattgaattaatgtactctgacaaatctatgatacaagttccttatcgattacatgccgttttagttcacgaaggcc

SEQ ID NO: 448621 - DNA, 120 bp, Artificial Sequence
  ENSG00000155313_18 (sequence is synthesized)
aagctaatgctgggcactactgggcatatatttttgatcatcgtgaaagcagatggatgaagtacaatgatattgctgtgacaaaatcatcatgggaagagctagtgagggactcttttg

SEQ ID NO: 448622 - DNA, 120 bp, Artificial Sequence
  ENSG00000155313_19 (sequence is synthesized)
gtggttatagaaatgccagtgcatactgtttaatgtacataaatgataaggcacagttcctaatacaagaggagtttaataaagaaactgggcagccccttgttggtatagaaacattac

SEQ ID NO: 448623 - DNA, 120 bp, Artificial Sequence
  ENSG00000155313_20 (sequence is synthesized)
caccggatttgagagattttgttgaggaagacaaccaacgatttgaaaaagaactagaagaatgggatgcacaacttgcccagaaagctttgcaggaaaagcttttagcgtctcagaaat

SEQ ID NO: 448624 - DNA, 120 bp, Artificial Sequence
  ENSG00000155313_21 (sequence is synthesized)
tgagagagtcagagacttctgtgacaacagcacaagcagcaggagacccagaatatctagagcagccatcaagaagtgatttctcaaagcacttgaaagaagaaactattcaaataatta

SEQ ID NO: 448625 - DNA, 120 bp, Artificial Sequence
  ENSG00000155313_22 (sequence is synthesized)
ccaaggcatcacatgagcatgaagataaaagtcctgaaacagttttgcagtcggcaattaagttggaatatgcaaggttggttaagttggcccaagaagacaccccaccagaaaccgatt

SEQ ID NO: 448626 - DNA, 120 bp, Artificial Sequence
  ENSG00000155313_23 (sequence is synthesized)
atcgtttacatcatgtagtggtctactttatccagaaccaggcaccaaagaaaattattgagaaaacattactagaacaatttggagatagaaatttgagttttgatgaaaggtgtcaca

SEQ ID NO: 448627 - DNA, 120 bp, Artificial Sequence
  ENSG00000155313_24 (sequence is synthesized)
acataatgaaagttgctcaagccaaactggaaatgataaaacctgaagaagtaaacttggaggaatatgaggagtggcatcaggattataggaaattcagggaaacaactatgtatctca

SEQ ID NO: 448628 - DNA, 120 bp, Artificial Sequence
  ENSG00000155313_25 (sequence is synthesized)
taattgggctagaaaattttcaaagagaaagttatatagattccttgctgttcctcatctgtgcttatcagaataacaaagaactcttgtctaaaggcttatacagaggacatgatgaag

SEQ ID NO: 448629 - DNA, 120 bp, Artificial Sequence
  ENSG00000155313_26 (sequence is synthesized)
aattgatatcacattatagaagagaatgtttgctaaaattaaatgagcaagccgcagaactcttcgaatctggagaggatcgagaagtaaacaatggtttgattatcatgaatgagttta

SEQ ID NO: 448630 - DNA, 120 bp, Artificial Sequence
  ENSG00000155313_27 (sequence is synthesized)
ttgtcccatttttgccattattactggtggatgaaatggaagaaaaggatatactagctgtagaagatatgagaaatcgatggtgttcctaccttggtcaagaaatggaaccacacctcc

SEQ ID NO: 448631 - DNA, 120 bp, Artificial Sequence
  ENSG00000155313_28 (sequence is synthesized)
aagaaaagctgacagattttttgccaaaactgcttgattgttctatggagattaaaagtttccatgagccaccgaagttaccttcatattccacgcatgaactctgtgagcgatttgccc

SEQ ID NO: 448632 - DNA, 120 bp, Artificial Sequence
  ENSG00000155313_29 (sequence is synthesized)
gaatcatgttgtccctcagtcgaactcctgctgatggaagataaactgcacactttccctgaacacactgtataaactctttttagttcttaacccttgccttcctgtcacagggtttgc

SEQ ID NO: 448633 - DNA, 120 bp, Artificial Sequence
  ENSG00000155313_30 (sequence is synthesized)
ttgttgctgctatagtttttaacttttttttattttaataactgcaaaagacaaaatgactatacagactttagtcagactgcagacaataaagctgaaaatcgcatggcgctcagacat

SEQ ID NO: 448634 - DNA, 120 bp, Artificial Sequence
  ENSG00000155313_31 (sequence is synthesized)
tttaaccggaactgatgtataatcacaaatctaattgattttattatggcaaaactatgcttttgccaccttcctgttgcagtattactttgcttttatcttttctttctcaacagcttt

SEQ ID NO: 448635 - DNA, 120 bp, Artificial Sequence
  ENSG00000155313_32 (sequence is synthesized)
ccattcagtctggatccttccatgactacagccatttaagtgttcagcactgtgtacgatacataatatttggtagcttgtaaatgaaataaagaataaagttttatttatggctaccta

SEQ ID NO: 448636 - DNA, 120 bp, Artificial Sequence
  ENSG00000155313_33 (sequence is synthesized)
agtcgaaacctgaaaatactacaagccaaccactttctaatcagcgagttgtagaggtggcgatccctcatgtagggaaatttatgattgaatcaaaggagggggggtatgatgacgaga

SEQ ID NO: 448637 - DNA, 120 bp, Artificial Sequence
  ENSG00000155313_34 (sequence is synthesized)
tcatgatgacaccgaacatgcaaggtattatcatggcgataggtaaatccaggagtgtatatgacaggtgtggccctgaagcagggttctttaaggcaattaagttggaatatgcaaggt

SEQ ID NO: 448638 - DNA, 120 bp, Artificial Sequence
  ENSG00000155313_35 (sequence is synthesized)
ggatagttaatagattaatacaatcttttaattctgctctaatgctagcaaattggaaaatgtttaagtctttgacacttaaatttatctatatttttaacaaagttcttgaacttagta

SEQ ID NO: 448639 - DNA, 120 bp, Artificial Sequence
  ENSG00000155313_36 (sequence is synthesized)
tggcaccggaacctgttttgaattcagtcaggtttttactcaagtaagtggttgattttttttaagtcaaactacactgaaacttttatccttttcttagattaatcttactttttaaat

SEQ ID NO: 448640 - DNA, 120 bp, Artificial Sequence
  ENSG00000155313_37 (sequence is synthesized)
gtatttacaatatacagcaaggtgattatttcaagagaatcccaaagtacttgaataagggctattgtaaaatttaaaagaaatatttatatatacacatatatacacatacacacatgt

SEQ ID NO: 448641 - DNA, 120 bp, Artificial Sequence
  ENSG00000155313_38 (sequence is synthesized)
atatattcttcataatggaggacaatgttttgcaatatataaatcattctatttttgtaaattgtatatcactttaattgaaaatgttctctactaattaatactgtgaaacaaaattga

SEQ ID NO: 448642 - DNA, 120 bp, Artificial Sequence
  ENSG00000155313_39 (sequence is synthesized)
ttgatgttgtttaactagaagttatgagtatcttaactgcctttattccttttcaaaaaggaaaaagctgtagaacattttgtagatgaaactactgtttaagattaatgaattaatatt

SEQ ID NO: 448643 - DNA, 120 bp, Artificial Sequence
  ENSG00000155313_40 (sequence is synthesized)
gtgaatgaaaatcaaaatccatactttaaaggtaatcatgttactaacaacctatttttgaattcataaaaatttctttataaatgatgttttgtgaacatagtaaaatagaccattata

SEQ ID NO: 448644 - DNA, 120 bp, Artificial Sequence
  ENSG00000155313_41 (sequence is synthesized)
ctatgtgtatgtttgatacagcgtcgccaaaactagtgttctttattagtgcctctcacaaaagatcctggatggaggagtaagatgaaatattatgctattatatgatgctgtttgtaa

SEQ ID NO: 448645 - DNA, 120 bp, Artificial Sequence
  ENSG00000155313_42 (sequence is synthesized)
aggtattaatgtactagtaaggtgttaatgacaaggaattagtactattcctgttgtaaagttagattttgcatattgtatctatcaaaatatgtttgggtttagattttaagttgtcta

SEQ ID NO: 448646 - DNA, 120 bp, Artificial Sequence
  ENSG00000155313_43 (sequence is synthesized)
ctgagcagatttctgcattggttttccagtcctgttaaaagtttagaaacttcatatgtgtcatcacagcttttgtaaagaaagtatccttaatattttatgacattctaccacagtggt

SEQ ID NO: 448647 - DNA, 120 bp, Artificial Sequence
  ENSG00000155313_44 (sequence is synthesized)
gtacggtaggtatgatggtgaaggaaatgaaatcggcatgtcatagctgttgggtgagtgggaagaaggaaatggaagagtcaaagctgccaaacttactagtttttcgtttaatattag

SEQ ID NO: 448648 - DNA, 120 bp, Artificial Sequence
  ENSG00000155313_45 (sequence is synthesized)
ggagtctaataggaggaacaaggttggctttgaacatgttttatttaagagatttccaggacattctttgattcagtgaacttaacattaaacttgtcattaaattttatatatcattta

SEQ ID NO: 448649 - DNA, 120 bp, Artificial Sequence
  ENSG00000155313_46 (sequence is synthesized)
atgcatacttccaaaaattgtagtaaatacttgaagatttatctcattttattctcttaacccctatggttggaagataaaataccctattattaatataaagaaagtgaagctaacaga

SEQ ID NO: 448650 - DNA, 120 bp, Artificial Sequence
  ENSG00000155313_47 (sequence is synthesized)
attattaatataaagaaagtgaagctaacagatttagctaatctgttcacgattggtgtattagtccgttctcacactgctataaagatactacacaagactgggtaatttataaaggaa

SEQ ID NO: 448651 - DNA, 120 bp, Artificial Sequence
  ENSG00000155313_48 (sequence is synthesized)
tggggaggcctcaggaaacttaaaatgatggcggaaggtgaaggggaagcaaggaccttcatcacatggtggcaggagagagaagtgcaagcagaggaaatgccagatgcttatgaaacc

SEQ ID NO: 448652 - DNA, 120 bp, Artificial Sequence
  ENSG00000155313_49 (sequence is synthesized)
atcagatctcatgagactcactccctgtcacaagaacagcactggggaaactgtccctatgatctgatcacctcccaccaggtctcttcctcaacacctgggggttacaattcaagataa

SEQ ID NO: 448653 - DNA, 120 bp, Artificial Sequence
  ENSG00000155313_50 (sequence is synthesized)
gatttgggtggagacacaaagcctaaccatatcaattgggtaattgattcatggccaagttggacttaatagcacaaccatctttccaaaatcaaaataaattgcataagaattatgtgg

SEQ ID NO: 448654 - DNA, 120 bp, Artificial Sequence
  ENSG00000155313_51 (sequence is synthesized)
gtggtgtaaatctaaatatataactttttttatttgaaattcagcttaaaagtcatgtttatcatgctgtaaacataagattttaaataagaacccttaaatattataggtcttatacct

SEQ ID NO: 448655 - DNA, 120 bp, Artificial Sequence
  ENSG00000155313_52 (sequence is synthesized)
ttatctcttatgtttcttattgcatggatttctctgttctactagatcagtgatcagcacactatggcttgtgctccacctaccacttgtttttatagataagttttattgaaacatagc

SEQ ID NO: 448656 - DNA, 120 bp, Artificial Sequence
  ENSG00000155313_53 (sequence is synthesized)
catgcacattcatttatatattgggtattattgtctttgtactacaatggcagagttgaatagttgcaacagaaacttcatggccttcaaagcctataatagtcctcgtctggcccttca

SEQ ID NO: 448657 - DNA, 120 bp, Artificial Sequence
  ENSG00000155313_54 (sequence is synthesized)
agaaatttctggcacgtggtgttgactctgtaggaagtttttgaagggaaaagtgaattgattacctttatatttctgtatcaaggaatacaatagtatatattcagttgccattaatgg

SEQ ID NO: 448658 - DNA, 120 bp, Artificial Sequence
  ENSG00000155313_55 (sequence is synthesized)
agatgagtttttcaaaaattaatatggattctgaatttctttatttttaaaactattttgagtgcttatacaattttataatttggggaagttaatctctagagaagaaaaaatggcccc

SEQ ID NO: 448659 - DNA, 120 bp, Artificial Sequence
  ENSG00000155313_56 (sequence is synthesized)
tgtgttgatgatcggcataagccaaacatgactgaaaaacacaataatgttttctccaccgctgttgcttttgtttctgttgttgccatatgcatagctttttctaaagagagattttca

SEQ ID NO: 448660 - DNA, 120 bp, Artificial Sequence
  ENSG00000155313_57 (sequence is synthesized)
gttctagataggttgagattgttttctctaaataccgtttgttctaatactgtttgtgaacatatttatgttgtcttccttattaatacttacagatccttaatttaaaaaggaaacaaa

SEQ ID NO: 448661 - DNA, 120 bp, Artificial Sequence
  ENSG00000155313_58 (sequence is synthesized)
gttgtccaaatataatcttgtgcactatcaagtatcaagaatggtatgtcaaataaaagaaacttgactttttctcagaagtatgtcctccttgtgccagttgcaatgattctgagtata

SEQ ID NO: 448662 - DNA, 120 bp, Artificial Sequence
  ENSG00000155313_59 (sequence is synthesized)
agtagtacacagttgtaaaaaataaacctccaagactagtcatttttacattctgctaatggaattttccctcaggttatgttaaattgttgttctttttcagtcattatttaatctttt

SEQ ID NO: 448663 - DNA, 120 bp, Artificial Sequence
  ENSG00000155313_60 (sequence is synthesized)
tatttaatctgaacaatattaagcacctttcccaagaatatgagactatttgagatgcatgattctgctttattaaaaataacctggaaccatttaaaacatttgggagacttttaagag

SEQ ID NO: 448664 - DNA, 120 bp, Artificial Sequence
  ENSG00000155313_61 (sequence is synthesized)
aaaagtgatcttgaaggtgttaaaataaagttttaatttatattatgattgaaatgaaaacgatggatacaattaagattatttacaaatacataattaaacatgttcacaaatgtgtga

SEQ ID NO: 448665 - DNA, 120 bp, Artificial Sequence
  ENSG00000155313_62 (sequence is synthesized)
taacagaggatcattatagtacacatgcttttgatattcctgtgtttgctggcagggagtacttttccttaattacccagaaatggtttttgaaagatgttatctttgttattgttgctt

SEQ ID NO: 448666 - DNA, 120 bp, Artificial Sequence
  ENSG00000155324_0 (sequence is synthesized)
tccgacgtgtccaggtccgcggccccgggagcttggcgcggcccggcctggatgcgctgggcggagggtgcaggggagggcacggcgccgcttgcttggcctgcgcacccggacctagaa

SEQ ID NO: 448667 - DNA, 120 bp, Artificial Sequence
  ENSG00000155324_1 (sequence is synthesized)
ccggacctagaagccgggacgagccggggcagagccaggcgcgcggaagtctgaaggtgccctccagacacggccccgatgactgaactacagcaagatgtggaagacacaaagcctgcg

SEQ ID NO: 448668 - DNA, 120 bp, Artificial Sequence
  ENSG00000155324_2 (sequence is synthesized)
aaagtgctcgggaagagggagagcaaacttggctcagcccactcagaggctgagaatggtgtggaggagaaaaagaaagcctgcaggtcgccaacagcccaatcccctaccccatctgtg

SEQ ID NO: 448669 - DNA, 120 bp, Artificial Sequence
  ENSG00000155324_3 (sequence is synthesized)
gaggcggactccccagaccagaagaaaatcattagcctatggtcaaaatccagttttgatggtgcctctttagcaagtgataagaacgactgtaaaacagaaagcaaaaatgaccctaag

SEQ ID NO: 448670 - DNA, 120 bp, Artificial Sequence
  ENSG00000155324_4 (sequence is synthesized)
actgaaagaaaaaagtcttcatcttccagccagtacaaggccaatatgcactttcacaagttgtttcttagtgtcccaacggaggaaccactgaagcaaagctttacctgtgctctacag

SEQ ID NO: 448671 - DNA, 120 bp, Artificial Sequence
  ENSG00000155324_5 (sequence is synthesized)
aaagaaatactataccaaggaaagctctttgtatcagaaaactggatttgttttcattccaaagtctttggaaaagacacaaagatctctattccagctttctcggtaaccctaataaag

SEQ ID NO: 448672 - DNA, 120 bp, Artificial Sequence
  ENSG00000155324_6 (sequence is synthesized)
aaaaccaaaactgctcttctagtgccaaacgccctgatcatagcaacagtcacagacaggtacatatttgtctccttactctccagagattcaacttacaaactactaaaatctgtgtgt

SEQ ID NO: 448673 - DNA, 120 bp, Artificial Sequence
  ENSG00000155324_7 (sequence is synthesized)
ggacacttagaaaatacaagtgttggtaacagtcccaatccatcttctgctgaaaacagtttccgagcagaccgcccttcatctctgcctctggatttcaatgatgaattctcagatctg

SEQ ID NO: 448674 - DNA, 120 bp, Artificial Sequence
  ENSG00000155324_8 (sequence is synthesized)
gatggagtggttcaacaaagaaggcaagacatggaaggatatagcagttctggttctcaaactcctgaatctgagaactctcgagatttccatgcgacagaatcccaaacagttctgaat

SEQ ID NO: 448675 - DNA, 120 bp, Artificial Sequence
  ENSG00000155324_9 (sequence is synthesized)
gtctccaagggagaagcaaagccaactcgggcagatgcccatgtgaacagagtacctgaaggaaaagccaagagtctccctgtacagggtctgtcagaaactgttggaatcttacataaa

SEQ ID NO: 448676 - DNA, 120 bp, Artificial Sequence
  ENSG00000155324_10 (sequence is synthesized)
gtcaagtctcagaaatgtccgatgcttcaccatattcttatattctatgcaattgttgtctgtgcactaatcatctcgaccttctacatgagatacagaattaatactctggaggagcag

SEQ ID NO: 448677 - DNA, 120 bp, Artificial Sequence
  ENSG00000155324_11 (sequence is synthesized)
ctggggttactaacctccattgtggacacccataatactgaacaggcagcaccatctggcctgaggtcacaagtacaattcaatgtggaggttctctgtcaagagcttacagctaacata

SEQ ID NO: 448678 - DNA, 120 bp, Artificial Sequence
  ENSG00000155324_12 (sequence is synthesized)
acttacagaagttgcttgagaatggtgactgatcgaccagattgcttgggccatcggaatacctcatgtttccctttgaagaaggtgcttcctgaggcgttttgtttgagtgcaccctgc

SEQ ID NO: 448679 - DNA, 120 bp, Artificial Sequence
  ENSG00000155324_13 (sequence is synthesized)
tggtcagaggtgcaagcagatgagaatccagacattgcatgtggaggtctccagctcaggaaagtgaggagggaaataattttggttcttgtgcaataaaagttgaccttgactctctga

SEQ ID NO: 448680 - DNA, 120 bp, Artificial Sequence
  ENSG00000155324_14 (sequence is synthesized)
ggaagattttgctgcttttgcctgaagaaaacagacccatctctggaggtctcaggaagggcccagcgaacacactctcttggataattaccacgatggcgtcagcaaacactccaccct

SEQ ID NO: 448681 - DNA, 120 bp, Artificial Sequence
  ENSG00000155324_15 (sequence is synthesized)
gtgcctttttagtccttcccgccctcctgcctctcccttacacccctcttaacgactttcaaactaaaggatacatcatatactgacaaactcaatgtggtcctttcaagaattagccat

SEQ ID NO: 448682 - DNA, 120 bp, Artificial Sequence
  ENSG00000155324_16 (sequence is synthesized)
gagtctcaaaaaggcaataaatggctctaagtggacaggtttgcttcaaacaagtaacatctacattttgtcttttttttttcagttctcctgttatgttctggttgaaatcacctgtgt

SEQ ID NO: 448683 - DNA, 120 bp, Artificial Sequence
  ENSG00000155324_17 (sequence is synthesized)
gtcttaatttctcaattcctttttggcaagaatatcaagcaaggtgaatttaacattatgtttatgttttgttttgttgctgtaactaatagttaattggactgattcttacccagccct

SEQ ID NO: 448684 - DNA, 120 bp, Artificial Sequence
  ENSG00000155324_18 (sequence is synthesized)
ggtcaagaatctgtgaggcatgtgactgaagtactaaattaaacttattttgaaaccaaacctaatttttaagccaaaaggtgtaatagtgatttaatacaggatgaaaaacactgaatt

SEQ ID NO: 448685 - DNA, 120 bp, Artificial Sequence
  ENSG00000155324_19 (sequence is synthesized)
tttaagactgtaggtggactatgttagtagttttcaagcaggatgtctgtattcagcattcaataatgctaaaatccctttcagcatgaaatttgtatgtttttatcctttgctgactaa

SEQ ID NO: 448686 - DNA, 120 bp, Artificial Sequence
  ENSG00000155324_20 (sequence is synthesized)
aataaaataactggtggtttgctaactatttaccatatgggttggctggtttttattaataattgtttagggtatcataagatctgtaagtacaaaggatattctgtttctatctgcaat

SEQ ID NO: 448687 - DNA, 120 bp, Artificial Sequence
  ENSG00000155324_21 (sequence is synthesized)
gcatttgataatcatttctatgaaatgtattttatttaatcagataagctaataagcgaattggttacatcgtttgtatctgttggcctagtggacagctgtgcctggtgcacctctggc

SEQ ID NO: 448688 - DNA, 120 bp, Artificial Sequence
  ENSG00000155324_22 (sequence is synthesized)
ttttaataaatactcattggttgaaacaccctgctaacactgtgttttgtcagttcgtaaattcctttaaccaagacttaactatgctttttaactctttttccacctgccatctactac

SEQ ID NO: 448689 - DNA, 120 bp, Artificial Sequence
  ENSG00000155324_23 (sequence is synthesized)
taccaactcacttatacttccttcctcccaagtaatcatttcaaaactaaaaaaggatttaagttcttgggttacaacggtttaaaggaaagaaaatgaactttgaagtcaaaaaaaaaa

SEQ ID NO: 448690 - DNA, 120 bp, Artificial Sequence
  ENSG00000155324_24 (sequence is synthesized)
gagagattttaaaggggatctagtgaatgtcaccagccttttcttaatgtccaggccttttcttctctgggcttgtttgaggcaccagtgacaggcttttggagccttcattttgcccta

SEQ ID NO: 448691 - DNA, 120 bp, Artificial Sequence
  ENSG00000155324_25 (sequence is synthesized)
agcagagctgggcagcacagacctgggagccagcaagtccacacagtctggcatttacaagtgaaacaggtgcgacctgcagctactgccgttgggacaccaggcaaggggttagaatgg

SEQ ID NO: 448692 - DNA, 120 bp, Artificial Sequence
  ENSG00000155324_26 (sequence is synthesized)
agattgggaaagggcctcgctgtcaaagttaactagcctatcagtgaggaatgaaaatcattccattctctagaaaaccatgttacttcatcgttttccttccagctacctctctctgaa

SEQ ID NO: 448693 - DNA, 120 bp, Artificial Sequence
  ENSG00000155324_27 (sequence is synthesized)
tctcacacatgtgggtttcaagtgcggctggtgccatccctctgagcagacgctgaaagagaaaacttctgagatagcacttgtgagcgaaaagcacaccaactggctcaaagagctgtg

SEQ ID NO: 448694 - DNA, 120 bp, Artificial Sequence
  ENSG00000155324_28 (sequence is synthesized)
gttgggcagatctggtgtaaatacaaagttccttcccgacatttcccagagtttcttgaagatcacctggcctctagaagatgacaaggagacagcaagtcctacaagcaaaaaggagca

SEQ ID NO: 448695 - DNA, 120 bp, Artificial Sequence
  ENSG00000155324_29 (sequence is synthesized)
ttcagcaaacattccaagcacagcttatgccctggaagagtatgttccacgggagagaagtgaagccagtgggtccggacctggaactctcagaggctgagaatggtgtggaggagaaaa

SEQ ID NO: 448696 - DNA, 120 bp, Artificial Sequence
  ENSG00000155324_30 (sequence is synthesized)
agagctgggcagcacagacctgggagccagcaagtccacacagtctggcatttacaagtgaaacagctacctctctctgaatgtctaaagtgaagcggtttcctttcttcttcagctcag

SEQ ID NO: 448697 - DNA, 120 bp, Artificial Sequence
  ENSG00000155324_31 (sequence is synthesized)
acatgaagaaagagcttcctgcaattcaaggactgtacaaagctgaaacgcagagattttcatattatttgggagactcagaaatgagcttttaaggttgttccttgacttgcgggtcaa

SEQ ID NO: 448698 - DNA, 120 bp, Artificial Sequence
  ENSG00000155324_32 (sequence is synthesized)
taagcgcacaatggtgaagaaaaggctgccttctagtgacacggtgttccggtttgagactccgggcagcccaaggaaggccaacgtggaggcctcacgcagctccacagacagccccag

SEQ ID NO: 448699 - DNA, 120 bp, Artificial Sequence
  ENSG00000155324_33 (sequence is synthesized)
atctagagccggctgccctctaaaaatccccctgttacagtcgggatagaaaacaaaaagcttaatttaccaggaggctaaacagattgtgccttcttaggcaaatgttccacctgcttg

SEQ ID NO: 448700 - DNA, 120 bp, Artificial Sequence
  ENSG00000155324_34 (sequence is synthesized)
gccaattagcttcctctcccgaaagactcgttcaacaggtttcctttttctcttctctgcctcctgggttggggaaagaggctgtcacttcgcttcgaccctccccttccctccctctcg

SEQ ID NO: 448701 - DNA, 120 bp, Artificial Sequence
  ENSG00000155324_35 (sequence is synthesized)
caaagagaggtccatgttgtttgaaaatgcaaaagctgtatacagatacttttctgaactctcaactctcacttctcatccggcaatatctattcataattatcctgttttgtttttcag

SEQ ID NO: 448702 - DNA, 120 bp, Artificial Sequence
  ENSG00000155324_36 (sequence is synthesized)
attccatttcccctcccacgctgctcactcaaacacacgctagcctctgctgcttgaattctacatagtttcagtctgctgctgacaagacctccaagctcagaggctgagaatggtgtg

SEQ ID NO: 448703 - DNA, 120 bp, Artificial Sequence
  ENSG00000155324_37 (sequence is synthesized)
gcttgagaatggtgactgatcgaccagattgcttgggccatcggaatacctcatgtttccctttgaagaagttctcctgttatgttctggttgaaatcacctgtgtgtcttaatttctca

SEQ ID NO: 448704 - DNA, 78 bp, Artificial Sequence
  ENSG00000155324_38 (sequence is synthesized)
atcacctgtgtgtcttaatttctcaattcctttttggcaagaatatcaagcaagatagggtctcactctatcgaacct

SEQ ID NO: 448705 - DNA, 120 bp, Artificial Sequence
  ENSG00000155329_0 (sequence is synthesized)
ggttggaagccccgcccttccgaggagtttcccaaaaccctgcgcggccggctttgaccgcgctaagatggcgactcccatgcatcggctaatagcccggagacaagctgaagcaaataa

SEQ ID NO: 448706 - DNA, 120 bp, Artificial Sequence
  ENSG00000155329_1 (sequence is synthesized)
gcaacatgtaagatgtcagaaatgcttggaatttggacattggacttatgaatgcacaggaaaaagaaaatacctacataggccctcaaggacagcagaactaaagaaagctttaaaaga

SEQ ID NO: 448707 - DNA, 120 bp, Artificial Sequence
  ENSG00000155329_2 (sequence is synthesized)
aaaagaaaacagattattattgcaacaaagcattggagaaaccaatgtagaaagaaaggccaagaaaaaaaggtctaagagtgtaaccagttccagtagcagtagcagtgacagttctgc

SEQ ID NO: 448708 - DNA, 120 bp, Artificial Sequence
  ENSG00000155329_3 (sequence is synthesized)
cagtgattcttcatcagagagtgaagaaacatctacctcttcctcctcagaggacagtgacactgatgaaagctcctctagttcctcatcctcagcctcctccacaacctcttcctcctc

SEQ ID NO: 448709 - DNA, 120 bp, Artificial Sequence
  ENSG00000155329_4 (sequence is synthesized)
ctctgattcagactcagattccagctcttccagtagcagtagcaccagcacagatagcagctctgacgatgaaccaccaaagaagaagaaaaagaaatagagttgctccattcatattgg

SEQ ID NO: 448710 - DNA, 120 bp, Artificial Sequence
  ENSG00000155329_5 (sequence is synthesized)
actgatggactgaaaacattgatgtgattcttgaaagggaatttagaatatgttaaggccaagtaggttaactggtgaacatttctagaattcaaaagtttctaaatgttttacattgta

SEQ ID NO: 448711 - DNA, 120 bp, Artificial Sequence
  ENSG00000155329_6 (sequence is synthesized)
agagcatagagaatattaataatggcttatagagagagacttttatttgaagggtgaatcttgttttttttatctttaaaatatatctctagaacttaaagctgaaatctgcaaatctgt

SEQ ID NO: 448712 - DNA, 120 bp, Artificial Sequence
  ENSG00000155329_7 (sequence is synthesized)
ttgtgtgatgaaactatcttttctctctgtgaaataaatgccatactttgttatatatgttagtggtatgtatcagacatattttcaggatggtgcgtcaggatatctggcagtggattt

SEQ ID NO: 448713 - DNA, 120 bp, Artificial Sequence
  ENSG00000155329_8 (sequence is synthesized)
ctaatgcttttggctgtatgttatgtaagatttaatatgttgttactgtaagcttaggagttttcctactattaataaatgtgctctatttttacatttatgttcagaaagttatctgac

SEQ ID NO: 448714 - DNA, 120 bp, Artificial Sequence
  ENSG00000155329_9 (sequence is synthesized)
tgttcaaggagcctattaatatatttatagtttttgaatgctgtaagtttcaaattgctgtgttacgtcattcattttcttctggttccttaagtttttcaagttatccttttctgagga

SEQ ID NO: 448715 - DNA, 120 bp, Artificial Sequence
  ENSG00000155329_10 (sequence is synthesized)
aaattattctagaggaacctaaaaagggacaaaaaaattgaaacttcttaggagtctaatcttggtgccttctgttaaaagtcagtgtatcagaaaagaaagcagccatgtaagaggcta

SEQ ID NO: 448716 - DNA, 120 bp, Artificial Sequence
  ENSG00000155329_11 (sequence is synthesized)
acttaaatagaagtgctagaaatatctttgtgtattaacatgcaataaaaggtaccattcaaagcagggggaaaggtaggaagaagaggtaatttttactgaaaattagggcaatgttgg

SEQ ID NO: 448717 - DNA, 120 bp, Artificial Sequence
  ENSG00000155329_12 (sequence is synthesized)
tcgccttttattaaaagctttttttaagctttcataaagattgctttttgctatttttgaaaatatggtattatagtttgtatggtaactggtcatatatgacagtctactgcatatata

SEQ ID NO: 448718 - DNA, 120 bp, Artificial Sequence
  ENSG00000155329_13 (sequence is synthesized)
tgaatgactaggattaatctggtgtgtttacataggatatacatagttgaaatctagcatgaaaggttaaaaaggagatactgcacaatatttcttaaaagtaaaatgctgttattgtga

SEQ ID NO: 448719 - DNA, 120 bp, Artificial Sequence
  ENSG00000155329_14 (sequence is synthesized)
tgagtctttggtttaacatcacagtattctgtgatgtctttttaactttttggaaagaggtatcatttgtagaaaaaatttgatttgggttaaatataggtttttaaaactataaatgtt

SEQ ID NO: 448720 - DNA, 120 bp, Artificial Sequence
  ENSG00000155329_15 (sequence is synthesized)
gtcttttttatatttttatgaaaaagcagtagaaaattacttttgaagaaaacaggctatttaaatattgaaatatatgtatgttgtgagtttaaggagcctgtaattgtcagttttaca

SEQ ID NO: 448721 - DNA, 120 bp, Artificial Sequence
  ENSG00000155329_16 (sequence is synthesized)
aaaccatctgtgttcaatggttgtaaataaattctcaaaacatcatttcaaaggctgcctacagaatattatcacttgacagatagagttaataaattaccaatcaggcacattttataa

SEQ ID NO: 448722 - DNA, 120 bp, Artificial Sequence
  ENSG00000155329_17 (sequence is synthesized)
tgtttgtctctgtaaaggtaatattagcagttaaagaacacggatgagaaaagaatgtgttacataggttgcatcacttgcagttaaataaaactcacaatttgtgctcacaagcttaaa

SEQ ID NO: 448723 - DNA, 120 bp, Artificial Sequence
  ENSG00000155329_18 (sequence is synthesized)
gaccgcgctaagatggcgactcccatgcatcggctaatagcccggagacaagcattcgacacagagttgcagcctgtcaagaccttttggatcctgattcagccatccatcgttattagt

SEQ ID NO: 448724 - DNA, 120 bp, Artificial Sequence
  ENSG00000155329_19 (sequence is synthesized)
ccttccgaggagtttcccaaaaccctgcgcggccggctttgaccgcgctaagatggcgactcccatgcatcggctaatagcccggagacaagcattcgacacagagttgcagcctgtcaa

SEQ ID NO: 448725 - DNA, 120 bp, Artificial Sequence
  ENSG00000155329_20 (sequence is synthesized)
cctgccttggcctctcaaagtgccaggattataggcgtgagccactgcgtccagcctcatacctgagctttagatgatatttgtgaatgtcgtatttataacaataaaaaacaaactcca

SEQ ID NO: 448726 - DNA, 88 bp, Artificial Sequence
  ENSG00000155329_21 (sequence is synthesized)
gaccgcgctaagatggcgactcccatgcatcggctaatagcccggagacaagcagatggggtttcatcatcgtggccaggatggtcct

SEQ ID NO: 448727 - DNA, 120 bp, Artificial Sequence
  ENSG00000155330_0 (sequence is synthesized)
gtcgctgctgccgccgctaagggagaggagcatgtctgcaactcgagccaagaaagtgaagatggccaccaaatcatgccccgagtgcgaccaacaggttcctgttgcatgtaaatcatg

SEQ ID NO: 448728 - DNA, 120 bp, Artificial Sequence
  ENSG00000155330_1 (sequence is synthesized)
tccttgtggttacatatttattagcagaaaacttttaaatgcaaaacactcagagaaatcaccaccttctacagaaaacaagcatgaggccaagaggaggcgaacagagagagttaggag

SEQ ID NO: 448729 - DNA, 120 bp, Artificial Sequence
  ENSG00000155330_2 (sequence is synthesized)
agagaagataaattctacagtaaataaagatttagaaaacagaaagaggtctcgaagtaacagccattcagatcatatcagacgaggaagaggaagacctaaaagtgcatctgccaaaaa

SEQ ID NO: 448730 - DNA, 120 bp, Artificial Sequence
  ENSG00000155330_3 (sequence is synthesized)
acatgaggaagaaagagagaaacaggaaaaggaaattgacatctatgctaacctgtctgatgaaaaggctttcgtgttttcagtcgccttggcagaaataaatagaaaaattatcaatca

SEQ ID NO: 448731 - DNA, 120 bp, Artificial Sequence
  ENSG00000155330_4 (sequence is synthesized)
aagacttattctctgatacttgtttgcaaaatctgctgaaacttctgtcaggataacatcagcaaattctcaaacagttatggactctcaggagcattctgactgcatcaataagggcca

SEQ ID NO: 448732 - DNA, 120 bp, Artificial Sequence
  ENSG00000155330_5 (sequence is synthesized)
tcgattgtttctttctcgcctgtcgtttagcctgtgccacacttcgggagcaaagctgtgtaggcttggactgttctgggatttccttgtttaccaaggagtattgtcagtgttttgtgt

SEQ ID NO: 448733 - DNA, 120 bp, Artificial Sequence
  ENSG00000155330_6 (sequence is synthesized)
ttgggatataagtaagtgtatttgccaacaacaaaaaaaaaccaacaaaaatgctggatggatgttaaaggataaaaagtgatggggtatggggtaggtatgaaaactagggtaataaga

SEQ ID NO: 448734 - DNA, 120 bp, Artificial Sequence
  ENSG00000155330_7 (sequence is synthesized)
tgcttgattgttttcaggtttgccaccagagatgcaatattttaaatactgtcagaaagagtgatttttaaaaatatatatttcagattttcagtgctaacagattgcatatatacagtt

SEQ ID NO: 448735 - DNA, 120 bp, Artificial Sequence
  ENSG00000155330_8 (sequence is synthesized)
catttacttttattaaattggcaatcgatattttattgaatggggaattaagaatataaactgtaaattttgtcttaaattgattttttttcttggcctttatttttattacttaaggta

SEQ ID NO: 448736 - DNA, 120 bp, Artificial Sequence
  ENSG00000155330_9 (sequence is synthesized)
tgagttatattttaggagatactttctagacagtttgaagtttgggtgctatatgaagaaaaacatttaatgatatactcagatataaacaccttgttttcttgaatgtaatttatttat

SEQ ID NO: 448737 - DNA, 120 bp, Artificial Sequence
  ENSG00000155330_10 (sequence is synthesized)
tagctaaaaaaaaaaaacaaactgctctcaagatggtgcctgttaacctaaacatgaaatatatttattacatgcaaaatatttcttagccacttttaagcagtaatgttttatctgaat

SEQ ID NO: 448738 - DNA, 120 bp, Artificial Sequence
  ENSG00000155330_11 (sequence is synthesized)
atttgtttctatatcctgataattatttaaattgttactttcaatctggaagaaaaaataaaccttaatattgaaactaagtagattaaatagtgtgataaaagttttttgttctggtga

SEQ ID NO: 448739 - DNA, 120 bp, Artificial Sequence
  ENSG00000155330_12 (sequence is synthesized)
tctggtgaagtttgtgaaatatatttaaattcttaatttttctagtgttaagtcataatcgtttatagttgatttatattaaatgcttttgcattttggcatatcaatttaatgattaac

SEQ ID NO: 448740 - DNA, 120 bp, Artificial Sequence
  ENSG00000155330_13 (sequence is synthesized)
tcaaacttggtaatcactccccttattttcagtcgctcttcccccaatctgtttagaaatccttttaaagccttcttacagaagatagtcatcagttagatttagcccccttttaagaga

SEQ ID NO: 448741 - DNA, 120 bp, Artificial Sequence
  ENSG00000155330_14 (sequence is synthesized)
atctccctttcaattttagccgtaacattatcaatttcagacttcatcctgcatctcccatcacctcctcaaagaaaaaaggtcaacattttttcctactttatttaaatggtaaccagc

SEQ ID NO: 448742 - DNA, 120 bp, Artificial Sequence
  ENSG00000155330_15 (sequence is synthesized)
agagggagcttaagaggtactctagataggataaagaattttcctaaggattccttttcctttaatccctgtatctatctgcaggtactactgcaactattttgtatgcattttatttat

SEQ ID NO: 448743 - DNA, 66 bp, Artificial Sequence
  ENSG00000155330_16 (sequence is synthesized)
gcaggtactactgcaactattttgtatgcattttatttatttatttaggagacagagtctttgcct

SEQ ID NO: 448744 - DNA, 120 bp, Artificial Sequence
  ENSG00000155330_17 (sequence is synthesized)
ctcagcctcctgagtagctgtgactagaggcgtgcgccaccacgcctggctgtttttttttttgtattttttagtacagatggggtctcagcatgttggccaggctggtctcaaattcct

SEQ ID NO: 448745 - DNA, 120 bp, Artificial Sequence
  ENSG00000155330_18 (sequence is synthesized)
aggcatgagccactgcactcagccttgtgtgcgttttagagtcttaactagtagtttccccaataatgtaatgtgattttatctttgaaacatactgtaaggaaacttttgattttaagt

SEQ ID NO: 448746 - DNA, 120 bp, Artificial Sequence
  ENSG00000155330_19 (sequence is synthesized)
aacatactgtaaggaaacttttgattttaagtaaaaaagcttaaaaatgattaatatctaaaaatgcttgtatacatatatatgtcctcagaaaaagcaagaacagcttgtggaataagc

SEQ ID NO: 448747 - DNA, 120 bp, Artificial Sequence
  ENSG00000155330_20 (sequence is synthesized)
acgtctttaaggaattatcgatgtcagagtctatccatttaaagctgaagaccattacaggaaagtcatgttaaaatattcattggatatggtaaaggaggtactggtggctgggctgga

SEQ ID NO: 448748 - DNA, 120 bp, Artificial Sequence
  ENSG00000155330_21 (sequence is synthesized)
gcttgccgtatagaaaagtaattacttcagatctcataatgttaaattattggcttatttaaaaatttccgtggcagagaggcaaattaggtttcctctgtgacataacctatttaacca

SEQ ID NO: 448749 - DNA, 120 bp, Artificial Sequence
  ENSG00000155330_22 (sequence is synthesized)
atttttcaaaaaattgtactctatgagctttcttgttataaagctaaaaaatttaatttgtctaggcatgttgtaatggtcccagaaaatattactttgtcactggtgtcagagaaacct

SEQ ID NO: 448750 - DNA, 120 bp, Artificial Sequence
  ENSG00000155330_23 (sequence is synthesized)
ctgtcatcagcagatgtcctaagagtataattatagttctttacttaatccaaaatttgttctgctctgatatctataaatgatatgattattcaaaataccttgaaatgattccacaat

SEQ ID NO: 448751 - DNA, 120 bp, Artificial Sequence
  ENSG00000155330_24 (sequence is synthesized)
tagattaggtctgttgaagataacttattcttaaatatgagtaagattaaataaaagtagtttgagagttgttactccctgcctcaactccatggtattccaaaatgtttttgtgggcac

SEQ ID NO: 448752 - DNA, 120 bp, Artificial Sequence
  ENSG00000155330_25 (sequence is synthesized)
tttaatacttgtagtttgattttgtttgttagttttagaaatgaacatttcttagattttcatgggtattttttggctgtatttaaatgtaaatgatataaaagtaagggaaattgtgca

SEQ ID NO: 448753 - DNA, 120 bp, Artificial Sequence
  ENSG00000155330_26 (sequence is synthesized)
aattatttcttgtgtagtaatcagtggaagtgatcaaacagcttgaagcagtttatgatgagaaaatttaaaattgcaaatgacctgaaaatttagccagtctattcttatttctttaaa

SEQ ID NO: 448754 - DNA, 120 bp, Artificial Sequence
  ENSG00000155330_27 (sequence is synthesized)
tttcagaaatacttaagaaaaaaaaaaaaaaggtcagtatgacctctgagttgcttcctaaaagtaatcagatagtgttctccctcagataagatttcaaattgaaaagtatttgacttc

SEQ ID NO: 448755 - DNA, 120 bp, Artificial Sequence
  ENSG00000155330_28 (sequence is synthesized)
ctctagtaattgcacttgattctctaattctgatcattaaaatgacttggcaatatttaattttggcttgcctttcaatctgcatgtttgtcttaaatttagaaaaattaagctctttac

SEQ ID NO: 448756 - DNA, 63 bp, Artificial Sequence
  ENSG00000155330_29 (sequence is synthesized)
taagctctttacttacttttatataaagtattaattgagttgtttgaagccaggagtttgaga

SEQ ID NO: 448757 - DNA, 120 bp, Artificial Sequence
  ENSG00000155330_30 (sequence is synthesized)
gagaccagcctgggcaacatgatgagaccgcgtctctacaaaaagtaaaattagctgggtgtggtgcttccagctactaggcagctgaggctaaaggatcacttgagcccaggagttcga

SEQ ID NO: 448758 - DNA, 120 bp, Artificial Sequence
  ENSG00000155330_31 (sequence is synthesized)
gatcttgccactgcactccagcctgggaggcagagcaagaaacaccctgtgtgaaaaaagtattgaatttgtttgattccactttcaaaatatgctctagatacaggtagtcattctgcc

SEQ ID NO: 448759 - DNA, 120 bp, Artificial Sequence
  ENSG00000155330_32 (sequence is synthesized)
aaattgtgttcttctctaaaacattttgtccgtcattctttgaaactcattcttaattatttccactttaccttctagtttggtttgatgccttatattcttgctagttaaaagcatttt

SEQ ID NO: 448760 - DNA, 120 bp, Artificial Sequence
  ENSG00000155330_33 (sequence is synthesized)
ttccctagtattttctgtctttctagcctttaaggcatattgttgttaacaaatctcttatttaagttaattaaagttttttctgtgcagctgggttttttcttttactacatgacaagc

SEQ ID NO: 448761 - DNA, 120 bp, Artificial Sequence
  ENSG00000155330_34 (sequence is synthesized)
ttcatttttacatttggaagtacatgtatatatgtttatatatttttattctcaggatctattttctagggaactatttttttaaattattcttttgtgctgccttaacccatttattat

SEQ ID NO: 448762 - DNA, 120 bp, Artificial Sequence
  ENSG00000155330_35 (sequence is synthesized)
agtttgaatattagtagtacttactactcaaagattacaactatactaataactatcctaacatacaaagcagactctccaggattaaaagtatgagacatataacagagtctggaatag

SEQ ID NO: 448763 - DNA, 120 bp, Artificial Sequence
  ENSG00000155330_36 (sequence is synthesized)
aataattctttttaccccagtcaagtatttgccttttgcattattaaggaatctgttttgttcttttattgataatttctatatttttttctttgccttattgcactggttgggactttt

SEQ ID NO: 448764 - DNA, 120 bp, Artificial Sequence
  ENSG00000155330_37 (sequence is synthesized)
tgccttgatccagttgtaggggggaaacattcagtcattaagcattaaataactttgttgttgttgtgggcttgaaaaaataccctttagtagattgagggtagactcttttatttctgc

SEQ ID NO: 448765 - DNA, 120 bp, Artificial Sequence
  ENSG00000155330_38 (sequence is synthesized)
ttgttggaagttttctgtcaggaacagatgttgaattttgtcagatgctttttctgcataattgataggaccttttttctcccctttagaatgttcatatggtgaaacatactgatagct

SEQ ID NO: 448766 - DNA, 78 bp, Artificial Sequence
  ENSG00000155330_39 (sequence is synthesized)
cctctgcctcttgggttcaagcttccctcaccagcctcccaagtacctgggtatacaggtgtgcatcaccatgcccgg

SEQ ID NO: 448767 - DNA, 86 bp, Artificial Sequence
  ENSG00000155330_40 (sequence is synthesized)
accctctgcctcttgggttcaagcttccctcaccagcctcccaagtacctgggtatacaggtgtgcatcaccaggtttttaccatg

SEQ ID NO: 448768 - DNA, 70 bp, Artificial Sequence
  ENSG00000155330_41 (sequence is synthesized)
ttggccaggctggtcttcaactcctgactcagcctcccaaagtgttgggattacatgcaaccttgcaacc

SEQ ID NO: 448769 - DNA, 120 bp, Artificial Sequence
  ENSG00000155330_42 (sequence is synthesized)
aggcatgagccaccgtgcccggctgcatttctcttttgtaagaacctgctctggtttattgatattttgctgtttttctgttttaagtttcattaatttctgatctttagtattttctcc

SEQ ID NO: 448770 - DNA, 120 bp, Artificial Sequence
  ENSG00000155330_43 (sequence is synthesized)
agtattttctcctttctttgctttgggcttatttgctcccttttctagcttattgtggcggaagctcagatcattgattttaaaatttacttatttatttatttatttatttaattcaac

SEQ ID NO: 448771 - DNA, 120 bp, Artificial Sequence
  ENSG00000155330_44 (sequence is synthesized)
actgatcagaaggctttttgtgcttttctaaaaaaagcatttaatgctataaatttcccatttgctttatctcacaaattttattgtgttgtaattttgtgttcaatttagaatattctg

SEQ ID NO: 448772 - DNA, 120 bp, Artificial Sequence
  ENSG00000155330_45 (sequence is synthesized)
ttcttggtattactataattttcaaatatttagagtttttttcagttatctttctgttactgattgtaatttattgttttttaaaattatagttctttgaatagttttgcagtatttgct

SEQ ID NO: 448773 - DNA, 120 bp, Artificial Sequence
  ENSG00000155330_46 (sequence is synthesized)
tgctctagggattactataaacatacttcactttttacagttcacttagaagtcaatattttaccagttcaagtggaatgtagaaaaatcttaccactgtttacattcctttaccctctc

SEQ ID NO: 448774 - DNA, 120 bp, Artificial Sequence
  ENSG00000155330_47 (sequence is synthesized)
ccctttatgttataattttcttataaatcataagacttggctgggcacagtggctcacctgtaatcccaggactgggaggccgaggcgagcagattgcttaagtccaggagttcgagacc

SEQ ID NO: 448775 - DNA, 90 bp, Artificial Sequence
  ENSG00000155330_48 (sequence is synthesized)
gcttatgtggtgaaaccccaactctacaaaaaatacacaaaattagctaggcgtggtagcatgttcctgtagtcccagctactcaggagg

SEQ ID NO: 448776 - DNA, 120 bp, Artificial Sequence
  ENSG00000155330_49 (sequence is synthesized)
ggttgcagtgagccaagatcactccactccactccagcctgagtgacagagctagacactgtgtctcaaaaaataaaaataaaaaataagactcatcagataatgtattttttccttaca

SEQ ID NO: 448777 - DNA, 120 bp, Artificial Sequence
  ENSG00000155330_50 (sequence is synthesized)
tttttccttacaactatcatagatatttttaagaacccaagaggaaaacagtctatcacatttaccacaatatttatcatttgtattaatcttccttaattcttgatgttccaagtttac

SEQ ID NO: 448778 - DNA, 120 bp, Artificial Sequence
  ENSG00000155330_51 (sequence is synthesized)
ataggtatcagtccttttcatctggaaaatttcttttagtgcaggtctgttgacatttaattctcttattttttcttcatctgagaatgtctttattttgccttaattcatgaaagatat

SEQ ID NO: 448779 - DNA, 120 bp, Artificial Sequence
  ENSG00000155330_52 (sequence is synthesized)
ttttgctggatataaactactgtgttgacagttctttcagcctccatggtttctgatgagaaatgtgcagccattaaagtaatatttcccctgtatgaaacatgttatttttctctgagt

SEQ ID NO: 448780 - DNA, 120 bp, Artificial Sequence
  ENSG00000155330_53 (sequence is synthesized)
attttcaggaatctttgtctttggtttttattggtttgattatgatgtgcccgggtgtttgaatttattctctttgggatttgttgagcttaaatgtgtaagtttatgcctttcatcaga

SEQ ID NO: 448781 - DNA, 120 bp, Artificial Sequence
  ENSG00000155330_54 (sequence is synthesized)
ttatgtaaagttttaaaccattcagatattttctgctctactttctcctccctcttaggctccagtgatgcaagtgttagactctttggtattatctcacagatctcagaacctctgttc

SEQ ID NO: 448782 - DNA, 120 bp, Artificial Sequence
  ENSG00000155330_55 (sequence is synthesized)
atttattttattttaataaatcatttcagttaacaaaatcatatattgtatgcagcatgatgtttcaatatgtatgttcacattgtaggatgtctaaagtaaagataatgaacatatgca

SEQ ID NO: 448783 - DNA, 120 bp, Artificial Sequence
  ENSG00000155330_56 (sequence is synthesized)
ggaaactaggtaaagaaaagtcagcagagaaaaaggaaaagagagaaatactgcctggctcagaaaacaacattcttttcagttgaaatagagggaatgcagctgaaagaagagaatgct

SEQ ID NO: 448784 - DNA, 120 bp, Artificial Sequence
  ENSG00000155330_57 (sequence is synthesized)
acagcggtgggagcctgcgggccgcagccccggcgagagtgtgccgcacgcccgcctccgaggccaggccctagctccgagaacccctcctgcggccggggcggctttgttcccggttcc

SEQ ID NO: 448785 - DNA, 120 bp, Artificial Sequence
  ENSG00000155363_0 (sequence is synthesized)
aggagggaagcctggtggggagaagggagcccgcaggatcaggggtcagagttagggggcttccctcctgctgcaccctcatctcagggccgccaacttccagctgcagcggcgactttc

SEQ ID NO: 448786 - DNA, 120 bp, Artificial Sequence
  ENSG00000155363_1 (sequence is synthesized)
agtttcatttccacggaccctcctgcctgggccgcagccgccgccgcgatgcccagtaagttcagctgccggcagctccgggaggcgggccagtgtttcgagagtttcctggtcgttcgg

SEQ ID NO: 448787 - DNA, 120 bp, Artificial Sequence
  ENSG00000155363_2 (sequence is synthesized)
ggactggacatggagacagatcgcgagcggctgcggaccatttataaccgcgacttcaagatcagctttgggacccccgcccctggcttctcctccatgctgtatggaatgaagattgca

SEQ ID NO: 448788 - DNA, 120 bp, Artificial Sequence
  ENSG00000155363_3 (sequence is synthesized)
aatctggcctacgtcaccaagactcgggtcaggttcttcagactcgaccgctgggccgacgtgcggttcccagaaaagaggagaatgaagctggggtcagatatcagcaaacaccacaag

SEQ ID NO: 448789 - DNA, 120 bp, Artificial Sequence
  ENSG00000155363_4 (sequence is synthesized)
tcactgctagccaagatcttttatgacagggctgagtatcttcatgggaaacatggtgtggatgtggaagtccaggggccccatgaagcccgagatgggcagctccttatccgcctggat

SEQ ID NO: 448790 - DNA, 120 bp, Artificial Sequence
  ENSG00000155363_5 (sequence is synthesized)
ttgaaccgcaaagaggtgctgaccctgaggcttcggaatggcggaacccagtctgttaccctcactcacctcttcccactctgccggacaccccagtttgctttctacaatgaagaccag

SEQ ID NO: 448791 - DNA, 120 bp, Artificial Sequence
  ENSG00000155363_6 (sequence is synthesized)
gagttgccctgtccactgggccccggtgaatgctatgaactccatgtccattgtaagaccagctttgtgggctacttcccagccacagtgctctgggagctgctgggacctggggagtcg

SEQ ID NO: 448792 - DNA, 120 bp, Artificial Sequence
  ENSG00000155363_7 (sequence is synthesized)
ggttcagaaggagccggcacattctacattgcccgcttcttggctgccgtcgcccacagccccctggctgcacagctgaagcccatgactcccttcaagcggacccggatcaccggaaac

SEQ ID NO: 448793 - DNA, 120 bp, Artificial Sequence
  ENSG00000155363_8 (sequence is synthesized)
cctgtggtgaccaatcggatagaggaaggagagagacctgaccgcgctaagggctatgacctggagttaagtatggcgctggggacatactacccacctccccgcctcaggcagctgctc

SEQ ID NO: 448794 - DNA, 120 bp, Artificial Sequence
  ENSG00000155363_9 (sequence is synthesized)
cccatgcttcttcagggaacaagtatcttcactgcccctaaggagatcgcagagatcaaggcccagctggagacagccctgaagtggaggaactatgaggtgaagctgcggctgctgctg

SEQ ID NO: 448795 - DNA, 120 bp, Artificial Sequence
  ENSG00000155363_10 (sequence is synthesized)
cacctggaggaactgcagatggagcatgatatccggcactatgacctggagtcggtgcccatgacctgggaccctgtggaccagaaccccaggctgctcacgctggaggttcctggagtg

SEQ ID NO: 448796 - DNA, 120 bp, Artificial Sequence
  ENSG00000155363_11 (sequence is synthesized)
actgagagccgcccctcagtgctacggggcgaccacctgtttgcccttttgtcctcggagacacaccaggaggaccccatcacatataagggctttgtgcacaaggtggaattggaccgt

SEQ ID NO: 448797 - DNA, 120 bp, Artificial Sequence
  ENSG00000155363_12 (sequence is synthesized)
gtcaagctgagcttttccatgagcctcctgagccgctttgtggatgggctgaccttcaaggtgaactttaccttcaaccgccagccgctgcgagtccagcaccgtgccctggagctgaca

SEQ ID NO: 448798 - DNA, 120 bp, Artificial Sequence
  ENSG00000155363_13 (sequence is synthesized)
gggcgctggctgctgtggcccatgctctttcctgtggcacctcgggacgtcccgctgctgccctcagatgtgaaactcaagctgtacgaccggagtctggagtcaaacccagagcagctg

SEQ ID NO: 448799 - DNA, 120 bp, Artificial Sequence
  ENSG00000155363_14 (sequence is synthesized)
gggcaccacccgtccagccccctacatcatctttgggcctccaggcaccggcaagactgtcacgttagtggaggcaattaagcaggtggtgaagcacttgcccaaagcccacatcttggc

SEQ ID NO: 448800 - DNA, 120 bp, Artificial Sequence
  ENSG00000155363_15 (sequence is synthesized)
ctgcgctccatccaactcaggggctgacctactctgtcaaaggctccgggtccaccttcctagctccatctaccgcctcctggcccccagcagggacatccgcatggtacctgaggacat

SEQ ID NO: 448801 - DNA, 120 bp, Artificial Sequence
  ENSG00000155363_16 (sequence is synthesized)
caagccctgctgcaactgggacgcaaagaagggggagtatgtatttcccgccaagaagaagctgcaggaataccgggtcttaattaccaccctcatcactgccggcaggttggtctcggc

SEQ ID NO: 448802 - DNA, 120 bp, Artificial Sequence
  ENSG00000155363_17 (sequence is synthesized)
ccagtttcccattgatcacttcacacacatcttcatcgatgaggctggccactgcatggagcctgagagtctggtagctatagcagggctgatggaagtaaaggaaacaggtgatccagg

SEQ ID NO: 448803 - DNA, 120 bp, Artificial Sequence
  ENSG00000155363_18 (sequence is synthesized)
agggcagctggtgctggcaggagaccctcggcagctggggcctgtgctgcgttccccactgacccagaagcatggactgggatactcactgctggagcggctgctcacctacaactccct

SEQ ID NO: 448804 - DNA, 120 bp, Artificial Sequence
  ENSG00000155363_19 (sequence is synthesized)
gtacaagaagggccctgatggctatgacccccagttcataaccaagctgctccgcaactacaggtctcatcccaccatcctggacattcctaaccagctctattatgaaggggagctgca

SEQ ID NO: 448805 - DNA, 120 bp, Artificial Sequence
  ENSG00000155363_20 (sequence is synthesized)
ggcctgtgctgatgtcgtggatcgagaacgcttctgccgctgggcgggcctacctcgacagggctttcccatcatctttcacggcgtaatgggcaaagatgagcgtgaaggcaacagccc

SEQ ID NO: 448806 - DNA, 120 bp, Artificial Sequence
  ENSG00000155363_21 (sequence is synthesized)
atccttcttcaaccctgaagaggctgccacagtgacttcctacctgaagctgctcctggccccctcctccaagaagggcaaagctcgcctgagccctcgaagtgtgggcgtcatctcccc

SEQ ID NO: 448807 - DNA, 120 bp, Artificial Sequence
  ENSG00000155363_22 (sequence is synthesized)
gtaccggaaacaggtggagaaaatccgttactgcatcaccaaacttgacagggagcttcgaggactggatgacatcaaggacttgaaggtgggttcagtagaagaattccaaggccaaga

SEQ ID NO: 448808 - DNA, 120 bp, Artificial Sequence
  ENSG00000155363_23 (sequence is synthesized)
acgaagcgtcatcctcatctccaccgtgcgaagcagccagagctttgtgcagctggatctggactttaatctgggtttccttaagaaccccaagaggttcaatgtagctgtgacccgggc

SEQ ID NO: 448809 - DNA, 120 bp, Artificial Sequence
  ENSG00000155363_24 (sequence is synthesized)
caaggccctgctcatcatcgtggggaacccccttctcctgggccatgaccctgactggaaagtattcctggagttctgtaaagaaaacggagggtataccgggtgtcccttccctgccaa

SEQ ID NO: 448810 - DNA, 120 bp, Artificial Sequence
  ENSG00000155363_25 (sequence is synthesized)
actggacctgcaacagggacagaatttactgcaaggtctgagcaagctcagcccctctacctcagggccccacagccatgactacctcccccaggagcgggagggtgaagggggcctgtc

SEQ ID NO: 448811 - DNA, 120 bp, Artificial Sequence
  ENSG00000155363_26 (sequence is synthesized)
tctgcaagtggagccagagtggaggaatgagctctgaagacacagcacccagccttctcgcaccagccaagccttaactgcctgcctgaccctgaaccagaacccagctgaactgcccct

SEQ ID NO: 448812 - DNA, 120 bp, Artificial Sequence
  ENSG00000155363_27 (sequence is synthesized)
ccaagggacaggaaggctgggggagggagtttacaacccaagccattccaccccctcccctgctggggagaatgacacatcaagctgctaacaattgggggaaggggaaggaagaaaact

SEQ ID NO: 448813 - DNA, 120 bp, Artificial Sequence
  ENSG00000155363_28 (sequence is synthesized)
gcttttcactgagtcccgaggctctggagggtgggcgtgagggtagccctggctgaggctcggaggtcctcccgggctgttcagagggccccaagcggtagccacgttctgatactggct

SEQ ID NO: 448814 - DNA, 120 bp, Artificial Sequence
  ENSG00000155363_29 (sequence is synthesized)
agaagccaggggagggagcttggggtaaggggagggccctgagggaggggtcagacgctttaggaaagagttaatgcgaagagggggaggggataggacgaagaaaccgaagggaaagct

SEQ ID NO: 448815 - DNA, 120 bp, Artificial Sequence
  ENSG00000155363_30 (sequence is synthesized)
ccacttgcccacttccagagacttcctcaagcttccactccagcccacgtccccgtcccacccctgctgccttgaatagagctcgagctctccctgagcctctcactcctggagattcca

SEQ ID NO: 448816 - DNA, 120 bp, Artificial Sequence
  ENSG00000155363_31 (sequence is synthesized)
acttaagggtctgggatgggatcaggaagcctgcatgtttaacaaacacctcctgtcattcttagactgaggcaggtttgaggcctctgccctaaggataaagtccaaattccgtggcct

SEQ ID NO: 448817 - DNA, 120 bp, Artificial Sequence
  ENSG00000155363_32 (sequence is synthesized)
gtcatgtgatgctgccacccccacccccagtagcctctctcttaaggttctggtctcaacactggctgcagataacaatcacctggagagcttttaataccccgcccccatgccagggcc

SEQ ID NO: 448818 - DNA, 120 bp, Artificial Sequence
  ENSG00000155363_33 (sequence is synthesized)
atatgatcttgccactcccctgcttaaaacccaccaaccgcagtggttctgtaaccacagtgtagcctctgacgtgggctgaaagcacaaagccaggctatttgatctctggagaaggat

SEQ ID NO: 448819 - DNA, 120 bp, Artificial Sequence
  ENSG00000155363_34 (sequence is synthesized)
cctttcccttcctgcttgggttccacctgcaccctatgacttcgggtggaaactgctgtctgatcagccaccttgcccacacacttggacatctgtactgtctctgatcccttctctcct

SEQ ID NO: 448820 - DNA, 120 bp, Artificial Sequence
  ENSG00000155363_35 (sequence is synthesized)
aggttagaaggccagtctcagtccttgtcccttaaaggtctggggaacctgggggctgggccctccagcgtccatccctgggacagaagcttgcttgtgttcacaccccataggttcctg

SEQ ID NO: 448821 - DNA, 120 bp, Artificial Sequence
  ENSG00000155363_36 (sequence is synthesized)
ttgaagaacactttgcaggccccagccctcagcaggattcaaccttcatgtttcagcttccacagcctacctcccatcccctttccctgggccgtgtcgcagcactggttcactcactga

SEQ ID NO: 448822 - DNA, 120 bp, Artificial Sequence
  ENSG00000155363_37 (sequence is synthesized)
tctacaattgcccagtgacctctctgtaccctccttggaaggcaagctccctggggtagggcacccctttgacacccctggctggtctcaggccctgcctctttccccactaggtgggtt

SEQ ID NO: 448823 - DNA, 120 bp, Artificial Sequence
  ENSG00000155363_38 (sequence is synthesized)
aacccccttctcctgggccatgaccctgactggaaagtgtgagcattcccaccccattctccctcttagtggccacagcccctgcctagggcaggtggatcttttttaagcgcttgctta

SEQ ID NO: 448824 - DNA, 120 bp, Artificial Sequence
  ENSG00000155363_39 (sequence is synthesized)
tcgctcagttaatcctcagatgtgtccattttcacagcatcactattgtatttataagttaaatgacatccagaggttgagcaagtacagctcagatgggacaggaccgtggcttagcct

SEQ ID NO: 448825 - DNA, 120 bp, Artificial Sequence
  ENSG00000155363_40 (sequence is synthesized)
gggttgtttgtattttcttttctgtcccaaacagtttcccccacaaaaagaactttatgtctttctctgtcttccctcagtccttccagtcagcagcctgtgattgggcttttcccctca

SEQ ID NO: 448826 - DNA, 120 bp, Artificial Sequence
  ENSG00000155363_41 (sequence is synthesized)
gaaacgaacaatccagaacccactgtttaaaacaactgtattttgccttgggaagtcccattgccttccctgaaaacattaaacattcctccgatccccagcctgagtctctctgtctct

SEQ ID NO: 448827 - DNA, 120 bp, Artificial Sequence
  ENSG00000155363_42 (sequence is synthesized)
gggccccatcctgctccacagcagggctggtgtgtccagcacagagtgaccctccgatgccctttcccacccgccgccctgcctccctcgagccctgccttccctcacttcccagtctcc

SEQ ID NO: 448828 - DNA, 120 bp, Artificial Sequence
  ENSG00000155363_43 (sequence is synthesized)
cctcagttaccagcaagggtggggcccctcccccagatggtacctccttaatatccagaccactaggcagaggctccaggagcttaggcctctgctggctccgtatctcagaagagcacc

SEQ ID NO: 448829 - DNA, 120 bp, Artificial Sequence
  ENSG00000155363_44 (sequence is synthesized)
ggcgtaatgggcaaagatgagcgtgaaggcaacagcccatccttcttcaaccctgaagaggctccctcttgcattaggttaatggcacgagagaaaggcacctgtcccctccttccaggt

SEQ ID NO: 448830 - DNA, 120 bp, Artificial Sequence
  ENSG00000155363_45 (sequence is synthesized)
ctgttgaagatggagttgctctgattcaaagagctctgacaataacaattagaaccccatgtgaagtagatttttctggatgaaattgtttagagaagttccattgtaaacaaagccaca

SEQ ID NO: 448831 - DNA, 120 bp, Artificial Sequence
  ENSG00000155363_46 (sequence is synthesized)
aagaataatagggatttagatttgctggtcagaatggagccagacattcagtttgagtacggttgatggtacgtttttgagatgctgcagcggcgactttcagtttcatttccacggacc

SEQ ID NO: 448832 - DNA, 120 bp, Artificial Sequence
  ENSG00000155363_47 (sequence is synthesized)
agcttctcaggtgattctaatatgcagccagggttgaaaacactgctctaagacttacaggcctctctcttggaaattctgatcgggggtccgggttagggcccagggttgtatattctt

SEQ ID NO: 448833 - DNA, 120 bp, Artificial Sequence
  ENSG00000155366_0 (sequence is synthesized)
agtctgagcctccggcaccggccgcgcagctggaggcggcggagcggaaggtgtagggtgggccggcaaagtcaaccggccgctctggatcatctgggaattcaagagagcgattggaga

SEQ ID NO: 448834 - DNA, 120 bp, Artificial Sequence
  ENSG00000155366_1 (sequence is synthesized)
gaggtctgatgtagccacactgtcttgtcttggggaaggccccagaagttccaggctccattccaggccctgtgtggggctcagttgcccctcttaaggggtcagtgggacagtccctct

SEQ ID NO: 448835 - DNA, 120 bp, Artificial Sequence
  ENSG00000155366_2 (sequence is synthesized)
ggggctgcctctcacagggagttgtccatgccatcttggccttgggcctagtgtcctggcctgggctgcctgctgttctggcccaatcatagcctggagggaaagtcttctaattgggct

SEQ ID NO: 448836 - DNA, 120 bp, Artificial Sequence
  ENSG00000155366_3 (sequence is synthesized)
ggaggctccaggtcccttaacgcatgcctcaaccccgggtttctgtcctctgcctcccaccactctggtgccgtctgaattaccctgctggggggacagcagtggcatactcatgcctaa

SEQ ID NO: 448837 - DNA, 120 bp, Artificial Sequence
  ENSG00000155366_4 (sequence is synthesized)
gtgactggctttcaccccagtagtgattgccctccatcaacactgcccaccccaggttggggctaccccagcccatctttacaaaacagggcaaggtgaactaatggagtgggtggagga

SEQ ID NO: 448838 - DNA, 120 bp, Artificial Sequence
  ENSG00000155366_5 (sequence is synthesized)
gttggaagaaatcccagcgtcagtcaccgggatagaattcccaaggaaccctctttttggaggatggtttccatttctggaggcgatctgccgacagggtgaatgccttcttgcttgtct

SEQ ID NO: 448839 - DNA, 120 bp, Artificial Sequence
  ENSG00000155366_6 (sequence is synthesized)
tctggggaatcagagagagtccgttttgtggtgggaagagtgtggctgtgtactttgaactcctgtaaattctctgactcatgtccacaaaaccaacagttttgtgaatgtgtctggagg

SEQ ID NO: 448840 - DNA, 120 bp, Artificial Sequence
  ENSG00000155366_7 (sequence is synthesized)
caagggaagggccactcaggatctatgttgaagggaagaggcctggggctggagtattcgcttcctaaagggcagtgtgaggtggtggtggggtgtggggagtagaggcgttcagtcagc

SEQ ID NO: 448841 - DNA, 120 bp, Artificial Sequence
  ENSG00000155366_8 (sequence is synthesized)
ccagtttgacaggatgtgggactgagagaaaaagctaggtttgaggctgagatcaggttaccgtcgctttcttaactgctccctgcctggttggtgctgggactggccctcatttgtctc

SEQ ID NO: 448842 - DNA, 120 bp, Artificial Sequence
  ENSG00000155366_9 (sequence is synthesized)
cccccttcccaacagccttgacttcatctcagctccagagcccgccctctcttcctgcagcctgggaacttcagccggctggagccccaccatggctgcaatccgaaagaagctggtgat

SEQ ID NO: 448843 - DNA, 120 bp, Artificial Sequence
  ENSG00000155366_10 (sequence is synthesized)
cgttggggatggtgcctgtgggaagacctgcctcctcatcgtcttcagcaaggatcagtttccggaggtctacgtccctactgtctttgagaactatattgcggacattgaggtggacgg

SEQ ID NO: 448844 - DNA, 120 bp, Artificial Sequence
  ENSG00000155366_11 (sequence is synthesized)
caagcaggtggagctggctctgtgggacacagcagggcaggaagactatgatcgactgcggcctctctcctacccggacactgatgtcatcctcatgtgcttctccatcgacagccctga

SEQ ID NO: 448845 - DNA, 120 bp, Artificial Sequence
  ENSG00000155366_12 (sequence is synthesized)
cagcctggaaaacattcctgagaagtggaccccagaggtgaagcacttctgccccaacgtgcccatcatcctggtggggaataagaaggacctgaggcaagacgagcacaccaggagaga

SEQ ID NO: 448846 - DNA, 120 bp, Artificial Sequence
  ENSG00000155366_13 (sequence is synthesized)
gctggccaagatgaagcaggagcccgttcggtctgaggaaggccgggacatggcgaaccggatcagtgcctttggctaccttgagtgctcagccaagaccaaggagggagtgcgggaggt

SEQ ID NO: 448847 - DNA, 120 bp, Artificial Sequence
  ENSG00000155366_14 (sequence is synthesized)
gtttgagatggccactcgggctggcctccaggtccgcaagaacaagcgtcggaggggctgtcccattctctgagatccccaaggcctttcctacatgccccctcccttcacaggggtaca

SEQ ID NO: 448848 - DNA, 120 bp, Artificial Sequence
  ENSG00000155366_15 (sequence is synthesized)
gaaattatccccctacaaccccagcctcctgagggctccatgctgaaggctcccattttcagttccctcctgcccaggactgcattgttttctagccccgaggtggtggcacgggccctc

SEQ ID NO: 448849 - DNA, 120 bp, Artificial Sequence
  ENSG00000155366_16 (sequence is synthesized)
cctcccagcgctctgggagccacgcctatgccctgcccttcctcagggcccctggggatcttgccccctttgaccttccccaaaggatggtcacacaccagcactttatacacttctggc

SEQ ID NO: 448850 - DNA, 120 bp, Artificial Sequence
  ENSG00000155366_17 (sequence is synthesized)
tcacaggaaagtgtctgcagtaggggacccagagtcccaggcccctggagttgttttcggcaggggccttgtctctcactgcatttggtcaggggggcatgaataaaggctacaggctcc

SEQ ID NO: 448851 - DNA, 120 bp, Artificial Sequence
  ENSG00000155366_18 (sequence is synthesized)
attgaaggctgggcagagtctgagtccacccgggtcgtgctccccccgctcgcccggctcctccgcagtccaggaatctccccgtggctctccccgacctggaggggtggacgcccctgg

SEQ ID NO: 448852 - DNA, 80 bp, Artificial Sequence
  ENSG00000155366_19 (sequence is synthesized)
cccgtggctctccccgacctggaggggtggacgcccctggcccccagtccccggcctgcggagggggccggtggctgcgg

SEQ ID NO: 448853 - DNA, 120 bp, Artificial Sequence
  ENSG00000155366_20 (sequence is synthesized)
aggtaccctgggccggggctgcgggcggtggggcgtcttgggaactcgtccccaggagagcactttcccttcctcgctggcccggagatcggggcccgtgcgaggaggggcttcggcctg

SEQ ID NO: 448854 - DNA, 120 bp, Artificial Sequence
  ENSG00000155366_21 (sequence is synthesized)
gttccctccaagcggagtcggcatccgggctgggcggtggtcggaccgcgtcggcccctccccgggctgcagcgagggggcccggacctgccggcaggggctctggcctcctgaggtccg

SEQ ID NO: 448855 - DNA, 120 bp, Artificial Sequence
  ENSG00000155366_22 (sequence is synthesized)
tcctgaggtccgagtcggagccccttcccttctcctcccagcttcccggaacctgccccgccgggcgaggggcgagggaacttcaactcagacgccccagcccccaggccttgacttcat

SEQ ID NO: 448856 - DNA, 120 bp, Artificial Sequence
  ENSG00000155366_23 (sequence is synthesized)
aggaaggggctgttccagagtgggtggaggcatctgggtaccgaaggagataattcctgccaaaatgcccgacagagtgcctggcacctaggggctctataactattcttcctttaccca

SEQ ID NO: 448857 - DNA, 120 bp, Artificial Sequence
  ENSG00000155366_24 (sequence is synthesized)
tcagttcccctccccagggaaggaggaagtgagggaagctgcgaaggtgtgatgaactgtgcagatgctcgctgtgtgtgctgggggtgggggacacatggaagcccgggaagctgactc

SEQ ID NO: 448858 - DNA, 120 bp, Artificial Sequence
  ENSG00000155366_25 (sequence is synthesized)
ggattcttctcagtcactgtgctgtggtagatgtgtggctccctacagtgtggtcattgtcccctgccgggggctgagtgacccagtgttgctggcaggcctaggaggaaggggggagga

SEQ ID NO: 448859 - DNA, 120 bp, Artificial Sequence
  ENSG00000155366_26 (sequence is synthesized)
aggcagcctgcccaaactcgagctgtgggcattgctgggactgagcctcctttgtattacttggggctttggggaccgggtggggtggaccagggaagctggctggctgctacccctgtc

SEQ ID NO: 448860 - DNA, 120 bp, Artificial Sequence
  ENSG00000155366_27 (sequence is synthesized)
ctgagaccccgccccccagtcactgaatgacctagtatgtccttccccattcctacccctgtctttgcttcattctccctgctggaaccagtaaaagttaggaagtaaatctgcagtctt

SEQ ID NO: 448861 - DNA, 120 bp, Artificial Sequence
  ENSG00000155366_28 (sequence is synthesized)
gcactcaggccctgttggtctcctttactgtggtaactggccctctgagggcatactactgttgaggttttgagctgtgaaagggaccatcatgctgaatggcttctaagactgctctgg

SEQ ID NO: 448862 - DNA, 120 bp, Artificial Sequence
  ENSG00000155367_0 (sequence is synthesized)
gggccggttcctggggtggcccagagcaagggcaagtttcgcccgggacccgcccagctggccgggagccagtagcagggaagggccggctggcgcgagcaccgcccacgcggagccatg

SEQ ID NO: 448863 - DNA, 120 bp, Artificial Sequence
  ENSG00000155367_1 (sequence is synthesized)
gcggccgagggcggggcagggaggcagcatgctaaaccgggtgcgctcggccgtggcgcacctggtgagctccgggggcgctccgcctccgcgccccaaatccccggacctgcccaacgc

SEQ ID NO: 448864 - DNA, 120 bp, Artificial Sequence
  ENSG00000155367_2 (sequence is synthesized)
gccccaaatccccggacctgcccaacgccgcctcggcgccgcccgccgccgctccagaagcgcccaggagccctcccgcgaaggctgggagcgggagcgcgacgcccgcgaaggctgttg

SEQ ID NO: 448865 - DNA, 120 bp, Artificial Sequence
  ENSG00000155367_3 (sequence is synthesized)
aggctcgagcgagcttctccagaccgacctttctgcagctgagccccggggggctgcgacgcgccgatgaccacgcgggccgggctgtgcaaagccccccggacacgggccgccgcctgc

SEQ ID NO: 448866 - DNA, 120 bp, Artificial Sequence
  ENSG00000155367_4 (sequence is synthesized)
cctggagcacaggctacgccgaggtcatcaatgctggcaagagtcggcacaatgaggaccaggcttgctgtgaagtggtgtatgtggaaggtcggaggagtgttacaggagtacctaggg

SEQ ID NO: 448867 - DNA, 120 bp, Artificial Sequence
  ENSG00000155367_5 (sequence is synthesized)
agcctagccgaggccagggactctgcttctactactggggcctatttgatgggcatgcagggggcggagctgctgaaatggcctcacggctcctgcatcgccatatccgagagcagctaa

SEQ ID NO: 448868 - DNA, 120 bp, Artificial Sequence
  ENSG00000155367_6 (sequence is synthesized)
aggacctggtagagatacttcaggacccttcgccaccacccctctgcctcccaaccactccggggaccccagattcctccgatccctctcacttgcttggccctcagtcctgctggtctt

SEQ ID NO: 448869 - DNA, 120 bp, Artificial Sequence
  ENSG00000155367_7 (sequence is synthesized)
tggatgagcagatggcccgggagcggcgtggccaccaagtggaggggggctgctgtgcactggttgtgatctacctgctaggcaaggtgtacgtggccaatgcaggcgatagcagggcca

SEQ ID NO: 448870 - DNA, 120 bp, Artificial Sequence
  ENSG00000155367_8 (sequence is synthesized)
tcattgtccggaatggtgaaatcattccaatgtcccgggagtttaccccggagactgagcgccagcgtcttcagctgcttggcttcctgaaaccagagctgctaggcagtgaattcaccc

SEQ ID NO: 448871 - DNA, 120 bp, Artificial Sequence
  ENSG00000155367_9 (sequence is synthesized)
accttgagttcccccgcagagttctgcccaaggagctggggcagaggatgttgtaccgggaccagaacatgaccggctgggcctacaaaaagatcgagctggaggatctcaggtttcctc

SEQ ID NO: 448872 - DNA, 120 bp, Artificial Sequence
  ENSG00000155367_10 (sequence is synthesized)
tggtctgtggggagggcaaaaaggctcgggtgatggccaccattggggtgacccgaggcttgggagaccacagccttaaggtctgcagttccaccctgcccatcaagccctttctctcct

SEQ ID NO: 448873 - DNA, 120 bp, Artificial Sequence
  ENSG00000155367_11 (sequence is synthesized)
gcttccctgaggtacgagtgtatgacctgacacaatatgagcactgcccagatgatgtgctagtcctgggaacagatggcctgtgggatgtcactactgactgtgaggtagctgccactg

SEQ ID NO: 448874 - DNA, 120 bp, Artificial Sequence
  ENSG00000155367_12 (sequence is synthesized)
tggacagggtgctgtcggcctatgagcctaatgaccacagcaggtatacagctctggcccaagctctggtcctgggggcccggggtaccccccgagaccgtggctggcgtctccccaaca

SEQ ID NO: 448875 - DNA, 120 bp, Artificial Sequence
  ENSG00000155367_13 (sequence is synthesized)
acaagctgggttccggggatgacatctctgtcttcgtcatccccctgggagggccaggcagttactcctgaggggctgaacaccatccctcccactagcctctccatacttactcctctc

SEQ ID NO: 448876 - DNA, 120 bp, Artificial Sequence
  ENSG00000155367_14 (sequence is synthesized)
acagcccaaattctgaagttgtctccctgacccttctttagtggcaacttaactgaagaagggatgtccgctatatccaaaattacagctattggcaaataaacgagatggataaaggtg

SEQ ID NO: 448877 - DNA, 120 bp, Artificial Sequence
  ENSG00000155367_15 (sequence is synthesized)
gacagggtgctgtcggcctatgagcctaatgaccacagcagtggcaacttaactgaagaagggatgtccgctatatccaaaattacagctattggcaaataaacgagatggataaaggtg

SEQ ID NO: 448878 - DNA, 120 bp, Artificial Sequence
  ENSG00000155367_16 (sequence is synthesized)
cctctccccagctccgcatccccggcgctaggacgcgttccccacgccgcgtccgggccaggagctcccttttccgtggacctttgctatcctctggtcttcgggccgcaccccctccca

SEQ ID NO: 448879 - DNA, 120 bp, Artificial Sequence
  ENSG00000155367_17 (sequence is synthesized)
acccattttccagtggggggcagcctgtgtcaccttcttcacgtccttcccgctcattgactgccctcgcccacgccgcctcaggaccctgttctgccccagagcccggagggcggagag

SEQ ID NO: 448880 - DNA, 120 bp, Artificial Sequence
  ENSG00000155367_18 (sequence is synthesized)
cccggcgaaggatgagttggccagttccccgtcgcggcccggcagcttaaaggctaagggaaaaggggtttcacgaaggagcggggttctttttaataggggacatagcggttgggaaga

SEQ ID NO: 448881 - DNA, 120 bp, Artificial Sequence
  ENSG00000155367_19 (sequence is synthesized)
ctcgctcacccgcttcccggctccagcgccccagttccctgtccctcttaccgtagttcccctccccctccacacccagaaatagcccgcgacaccaggaggccgccagcttccccagga

SEQ ID NO: 448882 - DNA, 120 bp, Artificial Sequence
  ENSG00000155367_20 (sequence is synthesized)
gcggggagggggacgcccggggtagaggagggtcccatttagatgcccttcagcctgccaactcgtgctggcctggcaaagaagcggaccccctgcccggagcggccggctggcccccgg

SEQ ID NO: 448883 - DNA, 120 bp, Artificial Sequence
  ENSG00000155367_21 (sequence is synthesized)
gctgtgtgtattttaaatgcatctgccgggaacgcagagcaccgagggagatgggggcgctcagttcgctgaggaaggtggctggtggcccatggacccaccaccacctcccttagcctc

SEQ ID NO: 448884 - DNA, 120 bp, Artificial Sequence
  ENSG00000155367_22 (sequence is synthesized)
ctgtgtgggaggagtttatgggtatgtggctcctgcccagtccaggtgggctttcacttctactctatttcagttcctctttcccgatctgggctggagagcttcctcattgttaaggca

SEQ ID NO: 448885 - DNA, 120 bp, Artificial Sequence
  ENSG00000155368_0 (sequence is synthesized)
ggtgctcgcccgagcagggttggggcgagtggaccgcgcctctaaaggcgcttgccagtgcaatctgggcgatcgcttcctggtcctcgcctcctccgctgtctccctggagttcttgca

SEQ ID NO: 448886 - DNA, 120 bp, Artificial Sequence
  ENSG00000155368_1 (sequence is synthesized)
agtcggccaggatgtctcaggctgagtttgagaaagctgcagaggaggttaggcaccttaagaccaagccatcggatgaggagatgctgttcatctatggccactacaaacaagcaactg

SEQ ID NO: 448887 - DNA, 120 bp, Artificial Sequence
  ENSG00000155368_2 (sequence is synthesized)
cttcacgggcaaggccaagtgggatgcctggaatgagctgaaagggacttccaaggaagatgccatgaaagcttacatcaacaaagtagaagagctaaagaaaaaatacgggatatgaga

SEQ ID NO: 448888 - DNA, 120 bp, Artificial Sequence
  ENSG00000155368_3 (sequence is synthesized)
gactggatttggttactgtgccatgtgtttatcctaaactgagacaatgccttgtttttttctaataccgtggatggtgggaattcgggaaaataaccagttaaaccagctactcaaggc

SEQ ID NO: 448889 - DNA, 120 bp, Artificial Sequence
  ENSG00000155368_4 (sequence is synthesized)
tgctcaccatacggctctaacagattaggggctaaaacgattactgactttccttgagtagtttttatctgaaatcaattaaaagtgtatttgttactttaaataactttagtgatctga

SEQ ID NO: 448890 - DNA, 120 bp, Artificial Sequence
  ENSG00000155368_5 (sequence is synthesized)
agtgcaatctgggcgatcgcttcctggtcctcgcctcctccgctgtctccctggagttcttgcaagtcggccaggatgtctcagcacagggcaggacgtcgcggcggagtggggaagcga

SEQ ID NO: 448891 - DNA, 120 bp, Artificial Sequence
  ENSG00000155368_6 (sequence is synthesized)
acaggtatgcagagcgggggttggaagggcatctgctcatcaaagcaggctcagcagctcagactggaagtccctgggaacttcactctcaaactgcctgaggccctactcttcaggtgg

SEQ ID NO: 448892 - DNA, 120 bp, Artificial Sequence
  ENSG00000155368_7 (sequence is synthesized)
acagaattcaaatcctggttttagaaggtctttactggttatcaccagcagctactctctactagggaagaagcaaaggctgcagcttggaaaagacttgctgaaggctctcagctcagt

SEQ ID NO: 448893 - DNA, 120 bp, Artificial Sequence
  ENSG00000155368_8 (sequence is synthesized)
agtatcattgttgagccgttcagcttctgccctagatgggcaggatcaaagttggagcactttttggagcacttgacagcctggccaagcctgatgtcaggagcagagaagcacctggtt

SEQ ID NO: 448894 - DNA, 120 bp, Artificial Sequence
  ENSG00000155368_9 (sequence is synthesized)
tcttgggctaggtcagagcatttcgctaacaagtctgtgccttcctgatgataactttttccctgcccagaaatcttggtgcagattttgaggctgtgctttggactgtcatgttctgta

SEQ ID NO: 448895 - DNA, 120 bp, Artificial Sequence
  ENSG00000155368_10 (sequence is synthesized)
tgcccaccccgcaactgccggaaagttgcccatggggtggacttcgctgtgtagcgggagaggggtgggagtcgagggtgcttgatggagagatgggggaaggggttgcacggattggag

SEQ ID NO: 448896 - DNA, 120 bp, Artificial Sequence
  ENSG00000155368_11 (sequence is synthesized)
ggctgcgaaggtgcagcgggcgggaggcccgttgggggctcagccggctgccagaagctctcgggctctttccttccgtgcccctcacttgctcatgggcccatgcctagccctgattcg

SEQ ID NO: 448897 - DNA, 120 bp, Artificial Sequence
  ENSG00000155368_12 (sequence is synthesized)
cggccaggatgtctcaggtacagcgcgtgcacagccaggctgcgaagtgtagacccttgtctgagaccgagctatgtggggcgacctctggctcctcccgcctgcctctgccaatccggg

SEQ ID NO: 448898 - DNA, 120 bp, Artificial Sequence
  ENSG00000155368_13 (sequence is synthesized)
ggaggggaccaacgggctccggcgctgacaccgcggcactcatgccctgtcccctttcagctgtttccagcatactgtgccccgtctgtcctcaggccagggcttcgctgcagccccggc

SEQ ID NO: 448899 - DNA, 120 bp, Artificial Sequence
  ENSG00000155368_14 (sequence is synthesized)
cactccctagtgcctggcccggtggtggccaggcagttggccgcgctgcttctcccgcagaggggacccccactgggggcgaaggcttggcctgccctcttcactgctgtatttccagac

SEQ ID NO: 448900 - DNA, 120 bp, Artificial Sequence
  ENSG00000155368_15 (sequence is synthesized)
agaaaccttaccctcggtgaaatctcccacagatcagcaagaaatagactaacaattcggtagaaaaatggggctaggatataaacagttcataggaaaggacacctgatatcattaatg

SEQ ID NO: 448901 - DNA, 120 bp, Artificial Sequence
  ENSG00000155368_16 (sequence is synthesized)
attagggagagaaattgggtagctaacagcaggggtgagagagaaactttatagtattttcctctgtagcttttgaattttaagacatatgaatggattttttttttaattgtaattaaa

SEQ ID NO: 448902 - DNA, 120 bp, Artificial Sequence
  ENSG00000155368_17 (sequence is synthesized)
gtataatttttttaaaagagaaattttggagtcatttaacttgtaagacaaaggctatcttgtaataagaatactgttcttcctatttgctctagattttaagtttggattggcatacat

SEQ ID NO: 448903 - DNA, 120 bp, Artificial Sequence
  ENSG00000155368_18 (sequence is synthesized)
gttttcttagggcagaacccactctactagacctatttaaccccatgacagagcctagaaggaacaggtgtaatagaagatggcatttatggcaagaaggttgatcaagttctccattag

SEQ ID NO: 448904 - DNA, 120 bp, Artificial Sequence
  ENSG00000155380_0 (sequence is synthesized)
agagggcgcgcgcggctgaaagcgtgtggaggcgcgggctgcagttcggatgtctgtgtggcggggagggggcggcggccgggagagacgactccgccccctgcgcgcatgctccggccc

SEQ ID NO: 448905 - DNA, 120 bp, Artificial Sequence
  ENSG00000155380_1 (sequence is synthesized)
cggcgggttataaggcagcctcgctggcccggccagacaaagtggtgagctgcgacgtgactggctagctgcgtgggtactggaacaagcaaacgaggcagcgagcgaaggacgggagcc

SEQ ID NO: 448906 - DNA, 120 bp, Artificial Sequence
  ENSG00000155380_2 (sequence is synthesized)
ggaccctgggccccgtggaactccagcctgcgccaccacgtcacgcacacgctcggcgctgcgatccgcgcatataacgatatttggatttgacctgcattttggaatttatctacactt

SEQ ID NO: 448907 - DNA, 120 bp, Artificial Sequence
  ENSG00000155380_3 (sequence is synthesized)
aaaatgccaccagcagttggaggtccagttggatacacccccccagatggaggctggggctgggcagtggtaattggagctttcatttccatcggcttctcttatgcatttcccaaatca

SEQ ID NO: 448908 - DNA, 120 bp, Artificial Sequence
  ENSG00000155380_4 (sequence is synthesized)
attactgtcttcttcaaagagattgaaggtatattccatgccaccaccagcgaagtgtcatggatatcctccataatgttggctgtcatgtatggtggaggtcctatcagcagtatcctg

SEQ ID NO: 448909 - DNA, 120 bp, Artificial Sequence
  ENSG00000155380_5 (sequence is synthesized)
gtgaataaatatggaagtcgtatagtcatgattgttggtggctgcttgtcaggctgtggcttgattgcagcttctttctgtaacaccgtacagcaactatacgtctgtattggagtcatt

SEQ ID NO: 448910 - DNA, 120 bp, Artificial Sequence
  ENSG00000155380_6 (sequence is synthesized)
ggaggtcttgggcttgccttcaacttgaatccagctctgaccatgattggcaagtatttctacaagaggcgaccattggccaacggactggccatggcaggcagccctgtgttcctctgt

SEQ ID NO: 448911 - DNA, 120 bp, Artificial Sequence
  ENSG00000155380_7 (sequence is synthesized)
actctggcccccctcaatcaggttttcttcggtatctttggatggagaggaagctttctaattcttgggggcttgctactaaactgctgtgttgctggagccctcatgcgaccaatcggg

SEQ ID NO: 448912 - DNA, 120 bp, Artificial Sequence
  ENSG00000155380_8 (sequence is synthesized)
cccaagccaaccaaggcagggaaagataagtctaaagcatcccttgagaaagctggaaaatctggtgtgaaaaaagatctgcatgatgcaaatacagatcttattggaagacaccctaaa

SEQ ID NO: 448913 - DNA, 120 bp, Artificial Sequence
  ENSG00000155380_9 (sequence is synthesized)
caagagaaacgatcagtcttccaaacaattaatcagttcctggacttaaccctattcacccacagaggctttttgctatacctctctggaaatgtgatcatgttttttggactctttgca

SEQ ID NO: 448914 - DNA, 120 bp, Artificial Sequence
  ENSG00000155380_10 (sequence is synthesized)
cctttggtgtttcttagtagttatgggaagagtcagcattattctagtgagaagtctgccttccttctttccattctggcttttgttgacatggtagcccgaccatctatgggacttgta

SEQ ID NO: 448915 - DNA, 120 bp, Artificial Sequence
  ENSG00000155380_11 (sequence is synthesized)
gccaacacaaagccaataagacctcgaattcagtatttctttgcggcttccgttgttgcaaatggagtgtgtcatatgctagcacctttatccactacctatgttggattctgtgtctat

SEQ ID NO: 448916 - DNA, 120 bp, Artificial Sequence
  ENSG00000155380_12 (sequence is synthesized)
gcgggattctttggatttgccttcgggtggctcagctccgtattgtttgaaacattgatggaccttgttggaccccagaggttctccagcgctgtgggattggtgaccattgtggaatgc

SEQ ID NO: 448917 - DNA, 120 bp, Artificial Sequence
  ENSG00000155380_13 (sequence is synthesized)
tgtcctgtcctcctggggccaccacttttaggtcggctcaatgacatgtatggagactacaaatacacatactgggcatgtggcgtcgtcctaattatttcaggtatctatctcttcatt

SEQ ID NO: 448918 - DNA, 120 bp, Artificial Sequence
  ENSG00000155380_14 (sequence is synthesized)
ggcatgggcatcaattatcgacttttggcaaaagaacagaaagcaaacgagcagaaaaaggaaagtaaagaggaagagaccagtatagatgttgctgggaagccaaatgaagttaccaaa

SEQ ID NO: 448919 - DNA, 120 bp, Artificial Sequence
  ENSG00000155380_15 (sequence is synthesized)
gcagcagaatctccggaccagaaagacacagatggagggcccaaggaggaggaaagtccagtctgaatccatggggctgaagggtaaattgagcagttcatgacccaggatatctgaaaa

SEQ ID NO: 448920 - DNA, 120 bp, Artificial Sequence
  ENSG00000155380_16 (sequence is synthesized)
agttgttcattgatgggatttttgtttgactccttaccaatagcctgaatttgaggagggaatgattggtagcaaaggatgggggaaagaagtaggttctgttttgttttgttttaatct

SEQ ID NO: 448921 - DNA, 120 bp, Artificial Sequence
  ENSG00000155380_17 (sequence is synthesized)
tagcttttaatagtgtcataaagattataatatgtgccttaagttttagtctttagaactctagagagccttaacttcttaaaccatttttgctgaattcatctatttcgagtgttgtgt

SEQ ID NO: 448922 - DNA, 120 bp, Artificial Sequence
  ENSG00000155380_18 (sequence is synthesized)
taaaaggaaaaataacaactaacttgtttgaggcaaatctaaaatttaaaattaatcttgcttcattgttacatgtaatatatttcagacattttcactggaagatttatgaacagaaat

SEQ ID NO: 448923 - DNA, 120 bp, Artificial Sequence
  ENSG00000155380_19 (sequence is synthesized)
attggttgaaagttagagattttacaaaatgctgacaaaaatattttcctagcatcagtagatttctggcatatgtttctgctagctatatatttaggaaattcaaagcataaaactttg

SEQ ID NO: 448924 - DNA, 120 bp, Artificial Sequence
  ENSG00000155380_20 (sequence is synthesized)
gcaacatcttggctgttctagacacagtgtacttgtcaacccctctcaggtaccttttcttgggatgcttattagaagccaagtaaagtgcttaaggtttgttttcattaaattagctat

SEQ ID NO: 448925 - DNA, 120 bp, Artificial Sequence
  ENSG00000155380_21 (sequence is synthesized)
ttctgctcccctgttcaaagatgcattttgagtgtttatagatcactgccctttttgaaatcacctggtattatttttcttactggaaaagttagtattaaaatctacagaactacatat

SEQ ID NO: 448926 - DNA, 120 bp, Artificial Sequence
  ENSG00000155380_22 (sequence is synthesized)
ttgtgcctccttggtaaatacaacacatctaattaaatgtagacagatatttcaaacatcagctgaattcacttaagtttttccaaaacctcagttaaactgtgaagctattggaatttt

SEQ ID NO: 448927 - DNA, 120 bp, Artificial Sequence
  ENSG00000155380_23 (sequence is synthesized)
tttttttttcctggaatttttcccctttgattcacagtggtcccatttatatctgcttctagcttagtgctatgtgtgagatatgtgtgtgtttggtgtttttgtttttttgtttttttt

SEQ ID NO: 448928 - DNA, 120 bp, Artificial Sequence
  ENSG00000155380_24 (sequence is synthesized)
taaggtttgcaaattaaaaagggccagaaaaatttggcaccaggcaaacgaataaagataggattgggaaagaagttgctaagtgtgcttagttttaataagtaattccttctctttttt

SEQ ID NO: 448929 - DNA, 120 bp, Artificial Sequence
  ENSG00000155380_25 (sequence is synthesized)
cagagaaggccttacagaaaattgttgtgcttagaattgctggatgcatttttaccctccacacaaacctaaaaattttgtgacccctttcacttacctgaaaagtagagaaatggattc

SEQ ID NO: 448930 - DNA, 120 bp, Artificial Sequence
  ENSG00000155380_26 (sequence is synthesized)
agtataaggataaggagggaaggtggaccagaatgaaaactgtaaatatttttttaacctaatatcacttaaatcgaggcagaaagatacagacattcaatgaattatattcaatgcatt

SEQ ID NO: 448931 - DNA, 120 bp, Artificial Sequence
  ENSG00000155380_27 (sequence is synthesized)
taaaataccactgtaattgacagagtaaaagtatagatacaaaaccttgtgtaagaggctgacttttccaaataaacattttttaagaaaacatttcttctcccaaatgtctattttctt

SEQ ID NO: 448932 - DNA, 120 bp, Artificial Sequence
  ENSG00000155380_28 (sequence is synthesized)
gaggaaaatattgctgtgtcttcattttcattaccaggtttcattttgggccttgctaaattgattgaattaaatcctccagcttttgaaccttgatatttgtgtatatgatttattttc

SEQ ID NO: 448933 - DNA, 120 bp, Artificial Sequence
  ENSG00000155380_29 (sequence is synthesized)
atttgaatttctcctttcctcttctttgctgtaaggcaaggaggaggggaattttaaaaccatcttatttgaactgagagcatccagagcagttaaccttaaggaaacaatgaaaaactc

SEQ ID NO: 448934 - DNA, 120 bp, Artificial Sequence
  ENSG00000155380_30 (sequence is synthesized)
cctttgtatgcctgggcatcatggcagatagaggaagagtgttagaggagaaaactgctgctgagagtattggcaggcttggcctcagtttggactctgtaattttctttggacccaagt

SEQ ID NO: 448935 - DNA, 120 bp, Artificial Sequence
  ENSG00000155380_31 (sequence is synthesized)
ctgtaacctctgcgtacttcttctctcttaccttctataaaaatgaggattactgttggtgagggaataaggaatgtaagtaaaggaaatctgaaaaaataaaagtaaagcaagtataaa

SEQ ID NO: 448936 - DNA, 120 bp, Artificial Sequence
  ENSG00000155380_32 (sequence is synthesized)
gctcggcgctgcgatccgcgcatataacggttagttgggtaacagccggcggcacgcggcgcggaccccacggtgccctcgctgccctggtggggtcggaggggacctccggggttggga

SEQ ID NO: 448937 - DNA, 120 bp, Artificial Sequence
  ENSG00000155380_33 (sequence is synthesized)
gactttgtctccggcggagggaggcggcccagcagagggcatcgtggtcacaggcagccgcgtggcctcggactgcagtgctggtgaaggagaccttgaggcgctggggtcagcgcctct

SEQ ID NO: 448938 - DNA, 120 bp, Artificial Sequence
  ENSG00000155380_34 (sequence is synthesized)
cttagccgagccgcgggccccgtgctaagatgccggtcccaggcctggccgaggagttgggtcgtggtgcccggtgacggtggggaagtcccttcccccctaagtcttcaataggctcct

SEQ ID NO: 448939 - DNA, 120 bp, Artificial Sequence
  ENSG00000155380_35 (sequence is synthesized)
cgagagatgctttgatctggaaaagggataacatgaggctgctgcatgtggtacctccagactctcctggccgcttctgccccaagggaagggactcggggcagaagttatttatgattc

SEQ ID NO: 448940 - DNA, 120 bp, Artificial Sequence
  ENSG00000155380_36 (sequence is synthesized)
gtgacattgtccgccccaaccttcttggcccgccgatccttgccccacctggtgacttgcgagagtggtgcggagagccgcattccccacagccaaggcgtgactgcagggttcgagtag

SEQ ID NO: 448941 - DNA, 120 bp, Artificial Sequence
  ENSG00000155380_37 (sequence is synthesized)
actttgcggaggggacggggcagcccgcagactcctgggagtggtgctgacgggggctctttgtcattcaacctgtggctgccagcgtccgccgcagcgcccttctactcatggacttaa

SEQ ID NO: 448942 - DNA, 120 bp, Artificial Sequence
  ENSG00000155380_38 (sequence is synthesized)
tccagaatgaagttcagagaaacaaaggaatgaatgataacatgacaacatagaagggagagtaagagagtagatagcatgggaaggtccaacccatatccagttggagtctgagaaaag

SEQ ID NO: 448943 - DNA, 120 bp, Artificial Sequence
  ENSG00000155380_39 (sequence is synthesized)
tccacgtggccgaggtgcacaccccaacccactgggccagtctccccaccctcttacctgctcttctttcccgactcgtctttaatacccaccaggcgccaaccgccgcgggcctggctc

SEQ ID NO: 448944 - DNA, 120 bp, Artificial Sequence
  ENSG00000155380_40 (sequence is synthesized)
gattaaggataacttcaggtcttttgtattttagtaaaattccatccagtatttttagatttagaacctgcacaattaattatgttttctaacatctttattttagtacacatgtgactc

SEQ ID NO: 448945 - DNA, 120 bp, Artificial Sequence
  ENSG00000155393_0 (sequence is synthesized)
agacgacgcgccgtgcgcctgcgcacggcttgcccatgtgtgctgcagccgtcagccggcccagctgagcagcagcaacggaccttgttaacggcgcggcagcctccaccgcctgctgtt

SEQ ID NO: 448946 - DNA, 120 bp, Artificial Sequence
  ENSG00000155393_1 (sequence is synthesized)
gccctcctctctcggtggtctgtccgcccagcgcacgtcaccatgggcaagagccggacgaagcgcttcaagcgacctcagttctcccctacgggcgactgtcaggccgaggcggctgcg

SEQ ID NO: 448947 - DNA, 120 bp, Artificial Sequence
  ENSG00000155393_2 (sequence is synthesized)
gcggcgaatgggaccggaggcgaggaggacgacgggccggcggcggagctgctggaaaagctccagcacccgagcgccgaggtccgcgagtgcgcctgcgcagggctggcccggctggtg

SEQ ID NO: 448948 - DNA, 120 bp, Artificial Sequence
  ENSG00000155393_3 (sequence is synthesized)
cagcagcggccggcactcccgggcctggcgcgacgagacgccgtgcgccgcctcgggccgctgctgctagaccccagcctggccgtcagggagactgcagccggcgcgctgagaaatctc

SEQ ID NO: 448949 - DNA, 120 bp, Artificial Sequence
  ENSG00000155393_4 (sequence is synthesized)
agtgcttgtggaggttttgaagtttgtgatgacatggtgactaaggatatcatgacccctctggttgcgctgctaaaagagtgtagtgctggactggattcaaatgagatgtctctgcag

SEQ ID NO: 448950 - DNA, 120 bp, Artificial Sequence
  ENSG00000155393_5 (sequence is synthesized)
gagaaaaaagatcagaacagaaattctattgagaacatagccaatgagactgtgaacgtgctgtggaatatatgtgaatgcagtagtagagcagtgtctatattcaacaaagaagggtgt

SEQ ID NO: 448951 - DNA, 120 bp, Artificial Sequence
  ENSG00000155393_6 (sequence is synthesized)
ttggagattgtgttaaagtatttaagtaggtttcctaccaatgttgacctggctatttcagtagcatattgtttgcagacagtgactgaggataacccagagctgctgaagtctttcagt

SEQ ID NO: 448952 - DNA, 120 bp, Artificial Sequence
  ENSG00000155393_7 (sequence is synthesized)
gctacagcattgaacatgctggaatcagcactgctttctcctgtcagttccatggaatctcttctattgaagacattggtagcaggcacaatttggaatctaaaggacattattccatgc

SEQ ID NO: 448953 - DNA, 120 bp, Artificial Sequence
  ENSG00000155393_8 (sequence is synthesized)
aagagtcaagcagaaatcataaatgccttactaaagatcttatctgaagttttgggaatggatgctggtgaaatggttattcaaatgaaagaggctgaaacgcaaaggttaaaaactgct

SEQ ID NO: 448954 - DNA, 120 bp, Artificial Sequence
  ENSG00000155393_9 (sequence is synthesized)
gcagaggctgaggaaatattagagaacactaatggggatgatttgattgaagatgatgaaatggaaggaatttctcataaaagaagagtcagaaggaaaactttcgtttcagatttactt

SEQ ID NO: 448955 - DNA, 120 bp, Artificial Sequence
  ENSG00000155393_10 (sequence is synthesized)
ccgcccactgacaaggaactgagagagactatagcattgctgacagcccaacagactgctctggaaattattgtcaacatgtgctgcaatgaagatccctctgatgacgaatgggaagag

SEQ ID NO: 448956 - DNA, 120 bp, Artificial Sequence
  ENSG00000155393_11 (sequence is synthesized)
ctttctagcagtgatgaaagtgacgcatttatggagaattccttcagtgagtgcgggggacagctgttttctcccctctgcctctcccatgaagttcacacggctctcaccaactacctc

SEQ ID NO: 448957 - DNA, 120 bp, Artificial Sequence
  ENSG00000155393_12 (sequence is synthesized)
atcccaaagaagatttttgagaaaactgcctttccaaacagcattgcagttgacctatgttctaggaaccctacttggaaacctttgattagaaaaatgaacactattcagtgcagagcc

SEQ ID NO: 448958 - DNA, 120 bp, Artificial Sequence
  ENSG00000155393_13 (sequence is synthesized)
ctcttctgtctccagagtcttgtgtccctcctggatgtggagcacctgggaggagccgcagcccttcagacgcttgcacagcatctgtcacagctgcttttttctcaaccagattttgct

SEQ ID NO: 448959 - DNA, 120 bp, Artificial Sequence
  ENSG00000155393_14 (sequence is synthesized)
aaacatgttgactttctagaagccataagtagtgctttgagggcccttttgcaaacaatggcctccaagaacatttcccagtgcatgactcctgatcagctgatgacattatgcaaagca

SEQ ID NO: 448960 - DNA, 120 bp, Artificial Sequence
  ENSG00000155393_15 (sequence is synthesized)
ggcattcatagtagtaatgtcggggttagagtgaatgtcgttagcattttaggaatcactggcagcgtccttgccaaagaagatggtacacttgaaactcttaagaacattgggtgcttt

SEQ ID NO: 448961 - DNA, 120 bp, Artificial Sequence
  ENSG00000155393_16 (sequence is synthesized)
ctgcttgaagttaccaccaaagatccttcccttgtggtagcaggagaagctttggatgccctctttgatgtttttgcagatggtaaagaagccgaaagagcctcgattcaaattaaatta

SEQ ID NO: 448962 - DNA, 120 bp, Artificial Sequence
  ENSG00000155393_17 (sequence is synthesized)
ttatctgctctgaaagaattccagccggtctttaaaatgaagatacgtaaagaagggagaggtaactatagcacagatcagctgtgtgttcttgacaatgtgaaaatgaatttgcgaaga

SEQ ID NO: 448963 - DNA, 120 bp, Artificial Sequence
  ENSG00000155393_18 (sequence is synthesized)
gcttagaatactaaaaggttttctttgaatgtatatgtttctgaaagtcattttttaatgattacattctgtacattctgtaaaaacttcaaaacctggccaggcatggtggctcacgcc

SEQ ID NO: 448964 - DNA, 89 bp, Artificial Sequence
  ENSG00000155393_19 (sequence is synthesized)
aaaaaaaaaaaaaaaaaaacttcaaaacctgtcagaaactctgttgctggtttttttgtgtgtgtgttttgtttggagatggagtctca

SEQ ID NO: 448965 - DNA, 80 bp, Artificial Sequence
  ENSG00000155393_20 (sequence is synthesized)
tttcttttttgagatggagtctcactgctgcccaggctgtattacagtgctgcgatcttggcttactgcaacctctgcca

SEQ ID NO: 448966 - DNA, 120 bp, Artificial Sequence
  ENSG00000155393_21 (sequence is synthesized)
gcatgagccaccgtgcctggccagaaactcttttttaagtgatgagatctgtgtggcatttctagcgctctctaaattatgtctctggcatattttaatcactggaaactcaaagagtgg

SEQ ID NO: 448967 - DNA, 120 bp, Artificial Sequence
  ENSG00000155393_22 (sequence is synthesized)
gaaactcaaagagtggaagagtggaagtgcgaaggaatctcaggtagctcttaactaattcgccagcagtgaagaaacttcaaccaatcatgttttccttgaattttgcaaagaaagaaa

SEQ ID NO: 448968 - DNA, 120 bp, Artificial Sequence
  ENSG00000155393_23 (sequence is synthesized)
atccaaagcattgcttggatgttcttttaaggcattttatatcagttgaaccttaaactgaaatatgaagacaagctttataaactagttttttgatatgaagtatatcaattatgtttg

SEQ ID NO: 448969 - DNA, 120 bp, Artificial Sequence
  ENSG00000155393_24 (sequence is synthesized)
ccttttgtgaagaagtaaatgagttgaatttctatttcacttactagattatactaatgagctaatggggtcattgccatcctccctactcatgactttgatgagttattgctgtaacat

SEQ ID NO: 448970 - DNA, 120 bp, Artificial Sequence
  ENSG00000155393_25 (sequence is synthesized)
cacttcttgatttaatttgatatggaatcagaattgggagaaggtatttttaaataaacaactttttaatggaaagttttgtgtcttacaaaatcttttttaagataccaaataaagggt

SEQ ID NO: 448971 - DNA, 120 bp, Artificial Sequence
  ENSG00000155393_26 (sequence is synthesized)
tattagtagaaaatgagatgatactattcgtggatatttgtttgctaatgcatattgcttggaatatatgtgagacattaaaaaaatgacagcacgactttgcagcattacctctcagtg

SEQ ID NO: 448972 - DNA, 120 bp, Artificial Sequence
  ENSG00000155393_27 (sequence is synthesized)
tcttcgaagtactaggtgacagctggggctcgagggagtttccctgtgcatcattgtctcggctgggcctctgaaccggcttcattgtccatccgtttgcctgatgagaagggaaatttg

SEQ ID NO: 448973 - DNA, 120 bp, Artificial Sequence
  ENSG00000155393_28 (sequence is synthesized)
aaaatttctgtacagttgatctcagttgccctgacaaaaggcccaatccccagtacaggacttaattttaattcactgcttccacagcagcacaaaatgagctagtagtgttagatttca

SEQ ID NO: 448974 - DNA, 120 bp, Artificial Sequence
  ENSG00000155393_29 (sequence is synthesized)
tctgcactgtgatgtattttacagttttcacctatatgatatagactgttgggaaaccaagattgtttcccagccctaagagttcctagcccatggcaccaagtaaaataacccaaattg

SEQ ID NO: 448975 - DNA, 120 bp, Artificial Sequence
  ENSG00000155393_30 (sequence is synthesized)
tgtatatggtgggaaaacagaaatgtataccatatacaacacctcgctttattatggtccttgctcatgaattttaaggtatatatgtatgtttagtgatcatttcagctaaatgattgg

SEQ ID NO: 448976 - DNA, 120 bp, Artificial Sequence
  ENSG00000155393_31 (sequence is synthesized)
cccaagcatgtctccttggagaacgactcttccaaaaaagaaagtattagagttctctctgcctcaattatttataaaatataattattttcaaggagaaaaaagttcctcattctgttt

SEQ ID NO: 448977 - DNA, 120 bp, Artificial Sequence
  ENSG00000155393_32 (sequence is synthesized)
attcttccccacagtttctgacctataaacaatatccaggatatttagcacaggacctagtatatagtcgactcttcataaatatttgttgagtaaataaatgctggtgattttctcgtt

SEQ ID NO: 448978 - DNA, 120 bp, Artificial Sequence
  ENSG00000155393_33 (sequence is synthesized)
agcggtcacccagcgccttctgtgtgccatcaggcactggcccggtctcccgtttgcagagatttgaagccagtctccaggctccggagaagcccagtatccccgcatctcatctgtcca

SEQ ID NO: 448979 - DNA, 120 bp, Artificial Sequence
  ENSG00000155393_34 (sequence is synthesized)
cctggctgcttcacctgcagcgtccacctgctcaggcgtcctgccctcacgccttgcgcacgttttacactctccaaaagccctccttagggtcccttgcttggatgaactcttcagttc

SEQ ID NO: 448980 - DNA, 120 bp, Artificial Sequence
  ENSG00000155393_35 (sequence is synthesized)
agtgtttggagagatcactcaggcagctggaggaagggagagcacaggggcctggcagcaggaggaccagtcaggaggctgccgaaggacgatgaaggctgagttggaaggaggcaatca

SEQ ID NO: 448981 - DNA, 120 bp, Artificial Sequence
  ENSG00000155393_36 (sequence is synthesized)
cggaggcgaggaggacgacgggccggcggcggagctgctggaaaagaaatctcagtgcttgtggaggttttgaagtttgtgatgacatggtgactaaggatatcatgacccctctggttg

SEQ ID NO: 448982 - DNA, 120 bp, Artificial Sequence
  ENSG00000155393_37 (sequence is synthesized)
cgctgctaaaagagatgacaaagccgaggcacagacattaggaacttgtgaagattacatgtagtgctggactggattcaaatgagatgtctctgcaggagaaaaaagatcagaacagaa

SEQ ID NO: 448983 - DNA, 120 bp, Artificial Sequence
  ENSG00000155428_0 (sequence is synthesized)
gagcatgatggggcatgtgcgggagcgccaggcggggcatgtaaccagagcgtgcggggcatgatggggcacggacatggggggttaggtggggcacgtaattggagctcgcggggcagg

SEQ ID NO: 448984 - DNA, 120 bp, Artificial Sequence
  ENSG00000155428_1 (sequence is synthesized)
atggggcatctaactggagcgacagagagcacgatggggcacttacaggggccggaggctggcccgggcagtgagtgtggatggcttggcaggtgagcctgctggagctggaggactggc

SEQ ID NO: 448985 - DNA, 120 bp, Artificial Sequence
  ENSG00000155428_2 (sequence is synthesized)
ttcagtgtcccatctgcctggaggtcttcaaggagtccctaatgctacagtgcggccactcctactgcaagggctgcctggtttccctgtcctaccacctggacaccaaggtgcgctgcc

SEQ ID NO: 448986 - DNA, 120 bp, Artificial Sequence
  ENSG00000155428_3 (sequence is synthesized)
ccatgtgctggcaggtggtggacggcagcagctccttgcccaacgtctccctggcctgggtgatcgaagccctgaggctccctggggacccggagcccaaggtctgcgtgcaccaccgga

SEQ ID NO: 448987 - DNA, 120 bp, Artificial Sequence
  ENSG00000155428_4 (sequence is synthesized)
acccgctcagccttttctgcgagaaggaccaggagctcatctgtggcctctgcggtctgctgggctcccaccaacaccacccggtcacgcccgtctccaccgtctgcagccgcatgaagg

SEQ ID NO: 448988 - DNA, 120 bp, Artificial Sequence
  ENSG00000155428_5 (sequence is synthesized)
agcaggagcagaagaaggtggatgagctcatcgccaaactggtgaaaaaccggacccgaatcgtcaatgagtcggatgtcttcagctgggtgatccgccgcgagttccaggagctgcgcc

SEQ ID NO: 448989 - DNA, 120 bp, Artificial Sequence
  ENSG00000155428_6 (sequence is synthesized)
acccggtggacgaggagaaggcccgctgcctggaggggatagggggtcacacccgtggcctggtggcctccctggacatgcagctggagcaggcccagggaacccgggagcggctggccc

SEQ ID NO: 448990 - DNA, 120 bp, Artificial Sequence
  ENSG00000155428_7 (sequence is synthesized)
aagccgagtgtgtgctggaacagttcggaaatgaggaccaccatgagttcatctggaagttccactccatggcctccaggtaataaccttggagagagctcagccagggtctggtggctg

SEQ ID NO: 448991 - DNA, 120 bp, Artificial Sequence
  ENSG00000155428_8 (sequence is synthesized)
cgggcacgggcatctcagctccactggttcctccattcagcttaaccagcgcctcccaagcagctgcctatagctggctctataactgagcctggggaagatagaggaaagtcacgtccc

SEQ ID NO: 448992 - DNA, 120 bp, Artificial Sequence
  ENSG00000155428_9 (sequence is synthesized)
tgccttcaagggtctcgcagacaggtggggaggcagatggtgaactgtgggtacctagaacagcagaagttcactcaagctacagaaatactagaggagggtagctcatgcctgcaatcc

SEQ ID NO: 448993 - DNA, 90 bp, Artificial Sequence
  ENSG00000155428_10 (sequence is synthesized)
cagtactttgggaggccaaggcaggagtattgctggaggccgaacacccccgtctctacaaaaaatacaaaaataaaaaaattagttggg

SEQ ID NO: 448994 - DNA, 120 bp, Artificial Sequence
  ENSG00000155428_11 (sequence is synthesized)
ggcgtccagctgcacttcccacttctgactctgtgcctgctgttccctgctgggaagaagaaaagccagtgatgctggcttgaggccatagtgggaggcccagtggatcctgagaagcta

SEQ ID NO: 448995 - DNA, 120 bp, Artificial Sequence
  ENSG00000155438_0 (sequence is synthesized)
gtggttagcgtcggcggcttttggcatggcgactttttctggcccggctgggccaatcctgtcgcttaatccgcaggaagatgtcgagtttcaaaaggaggtggcgcaggttcgcaagcg

SEQ ID NO: 448996 - DNA, 120 bp, Artificial Sequence
  ENSG00000155438_1 (sequence is synthesized)
cataacccagcgaaaaaaacaagaacaacttactcctggagtagtctatgtgcgccacctacctaacctacttgacgaaacccagatcttttcatatttctcccagtttggcactgtgac

SEQ ID NO: 448997 - DNA, 120 bp, Artificial Sequence
  ENSG00000155438_2 (sequence is synthesized)
acggttcaggctgtccagaagtaaaaggactggaaatagcaaaggctatgcatttgtggagtttgagtctgaggatgttgccaaaatagttgctgaaacaatgaacaactacctgtttgg

SEQ ID NO: 448998 - DNA, 120 bp, Artificial Sequence
  ENSG00000155438_3 (sequence is synthesized)
tgaaagactcttggagtgtcattttatgccacctgaaaaagtacataaagaactctttaaagactggaatattccatttaagcagccatcatatccatcagtgaaacggtataatcggaa

SEQ ID NO: 448999 - DNA, 120 bp, Artificial Sequence
  ENSG00000155438_4 (sequence is synthesized)
tcggacactaacacaaaagctacggatggaggagcgatttaaaaagaaagaaagattactcaggaagaaattagctaaaaaaggaattgactatgattttccttctttgattttacagaa

SEQ ID NO: 449000 - DNA, 120 bp, Artificial Sequence
  ENSG00000155438_5 (sequence is synthesized)
aacggaaagtatttcaaaaactaatcgtcagacgtctacaaaaggccaggttttacgtaagaagaagaaaaaagtttcaggtactcttgacactcctgagaagactgtggatagccaggg

SEQ ID NO: 449001 - DNA, 120 bp, Artificial Sequence
  ENSG00000155438_6 (sequence is synthesized)
ccccacaccagtttgtacaccaacatttttggagaggcgaaaatctcaagtggctgaactgaatgatgatgataaagatgatgaaatagttttcaaacagcccatatcctgtgtaaaaga

SEQ ID NO: 449002 - DNA, 120 bp, Artificial Sequence
  ENSG00000155438_7 (sequence is synthesized)
acaagagactcaaacacctacacattcacggaaaaaaagacgaagaagcagcaatcagtgattttcaatgtattatatttcttttgaaaaatataatatttttatgagagtggactttgt

SEQ ID NO: 449003 - DNA, 120 bp, Artificial Sequence
  ENSG00000155438_8 (sequence is synthesized)
atttcactaggtacaatggaatacaacctttgacaagattttcagaggaaaaatacactgtttggtcaagttaaggaaagcagtgtgtaattttggattgcctgcccttggctgaaatac

SEQ ID NO: 449004 - DNA, 120 bp, Artificial Sequence
  ENSG00000155438_9 (sequence is synthesized)
aggggtgcataccatcttgcagtggcttggctgacattgcctctttgtcctggcctctagttttcttttgatatttcatagctctccttagtttactctgcctggatagaaagttgacca

SEQ ID NO: 449005 - DNA, 120 bp, Artificial Sequence
  ENSG00000155438_10 (sequence is synthesized)
ctaactgcaggtttaagtactaaactgcagccttttctgtcgccagcaattaaagaccaccaatcttgtttgtccatctacatggtttgtcggggacatttaactcatggaggtgcttta

SEQ ID NO: 449006 - DNA, 120 bp, Artificial Sequence
  ENSG00000155438_11 (sequence is synthesized)
gatttcaacatcagatggttgaagctggaagtttaattatatgtagagtgagaaggcagttccagttttagcacagatttgtttatgtgttcagattttaatagagattcaaaaatgact

SEQ ID NO: 449007 - DNA, 120 bp, Artificial Sequence
  ENSG00000155438_12 (sequence is synthesized)
catttttaccaataatgttaaattagttttggttgtgctagcatgaattaataaccaccattttataccagtatcatcagtgaagaattgtatttcaagattcaaacaataaccagcaat

SEQ ID NO: 449008 - DNA, 120 bp, Artificial Sequence
  ENSG00000155438_13 (sequence is synthesized)
taaacttttttctacaatgtatttgtttgcgagtaggacttgggagtcattgggaaaaaaaaataataaattttccccttcattaacgaattcagactcattaaaaacattgccatcaga

SEQ ID NO: 449009 - DNA, 120 bp, Artificial Sequence
  ENSG00000155438_14 (sequence is synthesized)
ttgtggtttgttgtggggaggggagggggcagctttgtaccttgtaaagtacctagcctagcacttaccacaatcttgactcactgcaacttccacatcctgggttcaagcaattctcct

SEQ ID NO: 449010 - DNA, 90 bp, Artificial Sequence
  ENSG00000155438_15 (sequence is synthesized)
tgacctcaggtgattcacccacctcagcgtcccaaagtgttggaataataggcatgagccacgtgcccagccagttttttgactaaaccc

SEQ ID NO: 449011 - DNA, 120 bp, Artificial Sequence
  ENSG00000155463_0 (sequence is synthesized)
atggtaacgtggctttacagatttttacccacttcaaatatggccgccaagctccgttctcttttaccgcctgatctgcggctacaattctggcttcatgcccgcctccaaaagtgcttc

SEQ ID NO: 449012 - DNA, 120 bp, Artificial Sequence
  ENSG00000155463_1 (sequence is synthesized)
ctctcgaggggttgtggttcttactgcgcaggcgcaaaagcaagtcctcttccgggcaaaatggcgatgggactaatgtgcggacgccgggagcttctgcgcttgctacagtccgggcgt

SEQ ID NO: 449013 - DNA, 120 bp, Artificial Sequence
  ENSG00000155463_2 (sequence is synthesized)
cgggtccacagcgtcgcagggccctcgcaatggcttgggaaaccgctgaccacacggctcctattcccagcagccccgtgctgctgtcgcccacactacctcttccttgcggcttccggc

SEQ ID NO: 449014 - DNA, 120 bp, Artificial Sequence
  ENSG00000155463_3 (sequence is synthesized)
ccccgcagcctcagtacctctgctatctcttttgcagaagtccaggttcaggcccctcctgttgttgctgcaactccctcacccacagcagtacctgaggtggcttctggagagactgca

SEQ ID NO: 449015 - DNA, 120 bp, Artificial Sequence
  ENSG00000155463_4 (sequence is synthesized)
gatgtagtccaaactgctgcagagcagagcttcgctgaactggggctggggtcatacaccccagtgggactgatccagaatttactggaatttatgcatgttgatctgggcctaccttgg

SEQ ID NO: 449016 - DNA, 120 bp, Artificial Sequence
  ENSG00000155463_5 (sequence is synthesized)
tggggggccattgctgcatgtacagtctttgcccgctgcctgatttttcctctcatcgtgacgggccagcgagaggcagccaggatccacaatcacttgccagagatccagaagttttcc

SEQ ID NO: 449017 - DNA, 120 bp, Artificial Sequence
  ENSG00000155463_6 (sequence is synthesized)
agtcgaatcagagaggccaagttagcaggagaccatattgagtattacaaggcttcctcggagatggcactttaccagaaaaaacatggtattaaactctataaacctctcattctccct

SEQ ID NO: 449018 - DNA, 120 bp, Artificial Sequence
  ENSG00000155463_7 (sequence is synthesized)
ttgagagagatggccaaccttcctgtgcccagcctgcagacaggtggcctctggtggttccaggatctcacggtatccgatcccatctacatattaccactggcagtcactgctacaatg

SEQ ID NO: 449019 - DNA, 120 bp, Artificial Sequence
  ENSG00000155463_8 (sequence is synthesized)
tgggctgttcttgagctaggtgctgagacaggtgtgcaaagttctgaccttcagtggatgagaaatgtcatcagaatgatgcccctgataaccttgcccataaccatgcatttccccacg

SEQ ID NO: 449020 - DNA, 120 bp, Artificial Sequence
  ENSG00000155463_9 (sequence is synthesized)
gcagtgtttatgtactggctctcctccaatttgttttccctggtccaagtatcctgtctccggattccagcagtacgcactgtacttaaaatcccccagcgtgttgtacatgacctggac

SEQ ID NO: 449021 - DNA, 120 bp, Artificial Sequence
  ENSG00000155463_10 (sequence is synthesized)
aaattacctccacgggaaggcttcctagagagcttcaaaaaaggctggaaaaatgctgaaatgacgcgtcagctgcgagagcgtgaacaacgcatgcggaatcagttggagctagcagcc

SEQ ID NO: 449022 - DNA, 120 bp, Artificial Sequence
  ENSG00000155463_11 (sequence is synthesized)
aggggtcctttacgacagacctttacccacaaccctctcctacaacctggaaaggataaccctcccaatatccctagcagcagcagcaaaccaaagtcaaagtatccctggcacgacaca

SEQ ID NO: 449023 - DNA, 120 bp, Artificial Sequence
  ENSG00000155463_12 (sequence is synthesized)
cttggctgacttatgttctgtgcgcattctggcaggaattctgtctcttcagagactcatcctcaaaacaagacttgacactgtgtccttgccccagtcctaggaactgtggcacacaga

SEQ ID NO: 449024 - DNA, 120 bp, Artificial Sequence
  ENSG00000155463_13 (sequence is synthesized)
gatgttcattttaaaaacggatttcatgaaacactcttgtacttatgtttataagagagcactgggtagccaagtgatcttcccattcacagagttagtaaacctctgtactacatgctg

SEQ ID NO: 449025 - DNA, 120 bp, Artificial Sequence
  ENSG00000155463_14 (sequence is synthesized)
gtgcggacgccgggagcttctgcgcttgctacagtccgggcgtcgggtaaggatgccccggggcagagcaccgggatgctgccctgacccagtgaaccaggccccaggacagctcgtgct

SEQ ID NO: 449026 - DNA, 120 bp, Artificial Sequence
  ENSG00000155463_15 (sequence is synthesized)
aggggtatcagcagacgctgacctgctcaccgggacctgaatgtcatgacctcgggtcatgtgaggacgcgctagggttagtccccgacactatgggcccagcagcccggtgtcagcttc

SEQ ID NO: 449027 - DNA, 120 bp, Artificial Sequence
  ENSG00000155463_16 (sequence is synthesized)
gggagactgtctcaaaaaaaaaagaaaactgaagaatagagtgagtcatgattgcttttgctggcccatggccttggaaaatataatgttttaacctggcattaagggtttaaacttcca

SEQ ID NO: 449028 - DNA, 74 bp, Artificial Sequence
  ENSG00000155463_17 (sequence is synthesized)
cttccaacccatgcatgtgttgttctatgcacatttggattgcagtctagaggtgtggctgataagttgaatgt

SEQ ID NO: 449029 - DNA, 120 bp, Artificial Sequence
  ENSG00000155463_18 (sequence is synthesized)
ttggattgcagtctagaggtgtggctgataagttgaatgttgagattgtatctaaatatagtaaccgcacttcttgatcccaagattactttaaaaatttcaagaagtagatgtgtgcaa

SEQ ID NO: 449030 - DNA, 81 bp, Artificial Sequence
  ENSG00000155463_19 (sequence is synthesized)
caagattactttaaaaatttcaagaagtagatgtgtgcaaattcttagtgataattaagaatgaaagttccaggctgggca

SEQ ID NO: 449031 - DNA, 84 bp, Artificial Sequence
  ENSG00000155463_20 (sequence is synthesized)
gagaccagcctgggcaacatggcgagaccttgtctctgctaaaaagttagctgagcatggtggtgcttgtccaagcttaagccc

SEQ ID NO: 449032 - DNA, 120 bp, Artificial Sequence
  ENSG00000155463_21 (sequence is synthesized)
gaggctgcagtgatccaagatcatgctgctatactccagccttggctacagagcaagatcctgtctcaaaaaggaagttcatgtcatttttatgtaacaatccaacatttgactagagca

SEQ ID NO: 449033 - DNA, 120 bp, Artificial Sequence
  ENSG00000155463_22 (sequence is synthesized)
ttgttttgtttgggagcagggggaatatggagcagagttcttgtccacgctccacacagctctccaaaatgatagcatctctgcttaggatggattttcaattcagtggggaaatgattg

SEQ ID NO: 449034 - DNA, 120 bp, Artificial Sequence
  ENSG00000155463_23 (sequence is synthesized)
aaagtacaacaggagagatgttatatttggttttctgagctgttttaaagaaaagcaattgtttcatgttaatatatggcaaaaatcatgatagtgatattcaaatggctgaagtttgga

SEQ ID NO: 449035 - DNA, 120 bp, Artificial Sequence
  ENSG00000155463_24 (sequence is synthesized)
ccctggacatgggttagggatttaacctcatagatggcaattctttgaatggattcaggaagtagttgcagaagctctggggtcagaagagcagatgatttcaaatgagcaatagaggtt

SEQ ID NO: 449036 - DNA, 120 bp, Artificial Sequence
  ENSG00000155463_25 (sequence is synthesized)
tatatttcttaaagagcattataaaaccaccagatcatctgggattcaagaagtgtagatatttgaatacaaacatggggttagagtcaggggaccttattaacagtcatgaagctatcc

SEQ ID NO: 449037 - DNA, 120 bp, Artificial Sequence
  ENSG00000155463_26 (sequence is synthesized)
tggtttagaacagaggttcaggtcaggcacttaaacccctaaattgggaagccactagcattgcttttgtaaaggctagaactctgctttgaattatgtgtctttctgccacgttgctcc

SEQ ID NO: 449038 - DNA, 120 bp, Artificial Sequence
  ENSG00000155463_27 (sequence is synthesized)
atcaattatcttttctcccctgtgtcttcagcatttccctcctcactgccctaccccgaacatgtaaacatgctcaggcacacccatgtgttacctgggggaaggtttcttcccttcatc

SEQ ID NO: 449039 - DNA, 120 bp, Artificial Sequence
  ENSG00000155463_28 (sequence is synthesized)
cttagttccccttcacttactatcctatcttcttcctttgatggctgttatttattttgttgttgttaatttttgtggatacctagtaggtgtatatatttatgggctacatgagatgtt

SEQ ID NO: 449040 - DNA, 120 bp, Artificial Sequence
  ENSG00000155463_29 (sequence is synthesized)
ttgatagaggcatgcaaggtgtaataatcacattatggagaatgagatatccatccccttaagcatttatcctttaagttacaaacaatccaattacacttttattttattttttatttt

SEQ ID NO: 449041 - DNA, 120 bp, Artificial Sequence
  ENSG00000155463_30 (sequence is synthesized)
catccagtacccatgaaatttcctctctgtgtttcatgtgtcccaggtcccccaaaaaacaggtggtggtggattatacatggctttcagtagtggggtgatgaaaatgttctctctggt

SEQ ID NO: 449042 - DNA, 120 bp, Artificial Sequence
  ENSG00000155463_31 (sequence is synthesized)
cttccgggcaaaatggcgatgggactaatgtgcggacgccgggagcttctgcgcttgctacagtccgggcgtcggccccgtgctgctgtcgcccacactacctcttccttgcggcttccg

SEQ ID NO: 449043 - DNA, 120 bp, Artificial Sequence
  ENSG00000155465_0 (sequence is synthesized)
atttcagtccccgttaccctctgctttttctgctcctcagagtcaacagctgttgcagcatgagcgatacgcttggttctcctaactagcaccttcccctctcccctgactcagctggta

SEQ ID NO: 449044 - DNA, 120 bp, Artificial Sequence
  ENSG00000155465_1 (sequence is synthesized)
gcccctcctccccgcacctgcccaaaggtcactggacaggcatttgtctggccttcccttttactgctggctgggaaggaggagcatcagaccacagatcctggaaggcacttctctccc

SEQ ID NO: 449045 - DNA, 120 bp, Artificial Sequence
  ENSG00000155465_2 (sequence is synthesized)
tgactgctgctcacactgccgtgagaacctgcttatatccaggaccaaggagtgagtggcaatgccaggaagctggtgaagggtttcctctcctccaccatggttgacagcactgagtat

SEQ ID NO: 449046 - DNA, 120 bp, Artificial Sequence
  ENSG00000155465_3 (sequence is synthesized)
gaagtggcctcccagcctgaggtggaaacctcccctttgggtgatggggccagcccagggccggagcaggtgaagctgaagaaggagatctcactgcttaacggcgtgtgcctgattgtg

SEQ ID NO: 449047 - DNA, 120 bp, Artificial Sequence
  ENSG00000155465_4 (sequence is synthesized)
gggaacatgatcggctcgggcatctttgtttcccccaagggtgtgctcatatacagtgcctcctttggtctctctctggtcatctgggctgtcgggggcctcttctccgtctttggggcc

SEQ ID NO: 449048 - DNA, 120 bp, Artificial Sequence
  ENSG00000155465_5 (sequence is synthesized)
ctttgttatgcggaactgggcaccaccattaagaaatctggggccagctatgcctatatcctggaggcctttggaggattccttgctttcatcagactctggacctccctgctcatcatt

SEQ ID NO: 449049 - DNA, 120 bp, Artificial Sequence
  ENSG00000155465_6 (sequence is synthesized)
gagcccaccagccaggccatcattgccatcacctttgccaactacatggtacagcctctcttcccgagctgcttcgccccttatgctgccagccgcctgctggctgctgcctgcatttgt

SEQ ID NO: 449050 - DNA, 120 bp, Artificial Sequence
  ENSG00000155465_7 (sequence is synthesized)
ctcttaaccttcattaactgtgcctatgtcaaatggggaaccctggtacaagatattttcacctatgctaaagtattggcactgatcgcggtcatcgttgcaggcattgttagacttggc

SEQ ID NO: 449051 - DNA, 120 bp, Artificial Sequence
  ENSG00000155465_8 (sequence is synthesized)
cagggagcctctactcattttgagaattcctttgagggttcatcatttgcagtgggtgacattgccctggcactgtactcagctctgttctcctactcaggctgggacaccctcaactat

SEQ ID NO: 449052 - DNA, 120 bp, Artificial Sequence
  ENSG00000155465_9 (sequence is synthesized)
atactgtgctagacatgagagacatcttggccagtgatgctgttgctgtgacttttgcagatcagatatttggaatatttaactggataattccactgtcagttgcattatcctgttttg

SEQ ID NO: 449053 - DNA, 120 bp, Artificial Sequence
  ENSG00000155465_10 (sequence is synthesized)
gtggcctcaatgcctccattgtggctgcttctaggcttttctttgtgggctcaagagaaggccatctccctgatgccatctgcatgatccatgttgagcggttcacaccagtgccttctc

SEQ ID NO: 449054 - DNA, 120 bp, Artificial Sequence
  ENSG00000155465_11 (sequence is synthesized)
tgctcttcaatggtatcatggcattgatctacttgtgcgtggaagacatcttccagctcattaactactacagcttcagctactggttctttgtggggctttctattgtgggtcagcttt

SEQ ID NO: 449055 - DNA, 120 bp, Artificial Sequence
  ENSG00000155465_12 (sequence is synthesized)
atctgcgctggaaggagcctgatcgacctcgtcccctcaagctcagcgttttcttcccgattgtcttctgcctctgcaccatcttcctggtggctgttccactttacagtgatactatca

SEQ ID NO: 449056 - DNA, 120 bp, Artificial Sequence
  ENSG00000155465_13 (sequence is synthesized)
actccctcatcggcattgccattgccctctcaggcctgcccttttacttcctcatcatcagagtgccagaacataagcgaccgctttacctccgaaggatcgtggggtctgccacaaggt

SEQ ID NO: 449057 - DNA, 120 bp, Artificial Sequence
  ENSG00000155465_14 (sequence is synthesized)
acctccaggtcctgtgtatgtcagttgctgcagaaatggatttggaagatggaggagagatgcccaagcaacgggatcccaaatctaactaaacaccatctggaatcctgatgtggaaag

SEQ ID NO: 449058 - DNA, 120 bp, Artificial Sequence
  ENSG00000155465_15 (sequence is synthesized)
caggggtttctggtctactggctagagctaaggaagttgaaaaggaaagctcacttctttggaggcacctgtccagaagcctggcctaggcagcttcaacctttgaacttactttttgaa

SEQ ID NO: 449059 - DNA, 120 bp, Artificial Sequence
  ENSG00000155465_16 (sequence is synthesized)
atgaaaagtaatttatttgttttgctacatactgttccagacttttaaaggggacaatgaaggtgactgtggggaggagcatgtcaggtttgggcttggttgttttagaagcacctgggt

SEQ ID NO: 449060 - DNA, 120 bp, Artificial Sequence
  ENSG00000155465_17 (sequence is synthesized)
gtgcctacctactcctcttttcttttaaaagggcccacaatgctccaatttcctgtctcctttagagagacatgaaactatcacaggtgctggatgacaataaaagtttatgttcctaaa

SEQ ID NO: 449061 - DNA, 120 bp, Artificial Sequence
  ENSG00000155465_18 (sequence is synthesized)
gcatggaggacacagagagagagagtgctgtgtattccttccccgctactgtcctgtcctcagctaacttgctctgggacagcttccccagggctacagatactgcactcagctgactgt

SEQ ID NO: 449062 - DNA, 120 bp, Artificial Sequence
  ENSG00000155465_19 (sequence is synthesized)
cctttcttctgggcccctggtcccagagcagagctgacaaaggagattcctgagagagcaccttcttatcacagaaagtgctgagccaagagctcctagctgccccttttgcagatgtga

SEQ ID NO: 449063 - DNA, 120 bp, Artificial Sequence
  ENSG00000155465_20 (sequence is synthesized)
agggccagtgaaccttggacccagatggttgcttaatactcctttccccctccctcactccttcctttgcgggctgcctcacctcctccacccttcttgcttaaatccataggcatttgt

SEQ ID NO: 449064 - DNA, 120 bp, Artificial Sequence
  ENSG00000155465_21 (sequence is synthesized)
attgcgacatattctgcttcttttcccagagctgtcaaatctctgctatatcagtactggctaaattaggtgttaaatgattgagcttcaagatgggcaaatcatgacttcggactacat

SEQ ID NO: 449065 - DNA, 120 bp, Artificial Sequence
  ENSG00000155465_22 (sequence is synthesized)
tcctccttgcctggcggctgggaaattccgtaagctctgtgtgtttctatcagactgctcttgaaggcggtggctctctgtggatctccgcagagcgccaacgttggcttaaaaaacccc

SEQ ID NO: 449066 - DNA, 120 bp, Artificial Sequence
  ENSG00000155465_23 (sequence is synthesized)
attatccacattttaagtggtttactatgcttaccaagaagttgtttgcttcagaagattgcatgtgatgaagatatgtaataatttttttcttttttttttttggactggagtgctcac

SEQ ID NO: 449067 - DNA, 120 bp, Artificial Sequence
  ENSG00000155465_24 (sequence is synthesized)
cattttcctctcagctgtctcctgttcggtgttttccagcatgtgctgcctggctgcagctgtctccctgccttggctcggggtgatatctctccagcagcaactctgggggcaatgcca

SEQ ID NO: 449068 - DNA, 120 bp, Artificial Sequence
  ENSG00000155465_25 (sequence is synthesized)
ttacaggcgtgagccaccgcgtctggcctgatttcctcatattttttaggaaagtggagtcaacttatatttgaggaaggcgtttataggaatttatgcttatcccagagatcttggtat

SEQ ID NO: 449069 - DNA, 120 bp, Artificial Sequence
  ENSG00000155465_26 (sequence is synthesized)
gttttgtcaagaatgaaaaggcacgtgggtctggtggggatgcagtcagatatttgatctcttgactgtgtttcttttgaagtagtctgaggctcagactttggggcagtggcccaggct

SEQ ID NO: 449070 - DNA, 120 bp, Artificial Sequence
  ENSG00000155465_27 (sequence is synthesized)
tggaggcaaccccccagtctctctttgcatggggaagtgtgcagagttctcttagaacacccagtcacatggtgtagagactgctcttacacttcctgtaatctcagcatgggaacaagc

SEQ ID NO: 449071 - DNA, 120 bp, Artificial Sequence
  ENSG00000155465_28 (sequence is synthesized)
aacagtaataccacagagtcagagtgctgtgtcctggagcccatggggaatgggaggtaggagggagagaccatgacttttcagagccaagagccggaacaatcactaatcctgtacagt

SEQ ID NO: 449072 - DNA, 120 bp, Artificial Sequence
  ENSG00000155465_29 (sequence is synthesized)
gtcaaatctctgctatatcagtactggctaaattaggtgttaaatgattgagcttcaagatgggcaaatcatgacttcggactacattcctccttgcctggcggctgggaaattcctggg

SEQ ID NO: 449073 - DNA, 120 bp, Artificial Sequence
  ENSG00000155465_30 (sequence is synthesized)
agtgctgacagcaaacaaatgacaccgggaatggacaatatcactgggaagcatgttccaggcagggagaacaggagttgcaaaagctgtgaggcgggagcatgcttgctgtgcggccac

SEQ ID NO: 449074 - DNA, 120 bp, Artificial Sequence
  ENSG00000155465_31 (sequence is synthesized)
cgcagggaagccagtgaagctggagtggagtggggaagacagcagggaggcccatgcagacaaggacagcttctctctttctaggacctcccttacgacttggacccgactccagagtgc

SEQ ID NO: 449075 - DNA, 120 bp, Artificial Sequence
  ENSG00000155465_32 (sequence is synthesized)
tcaaagggctatgcagtggacagaacttacaggacccagcctttgattacttgtgttctccaaccgataccacaacctctttcttcttgtttctagcagaagcctgcagttgtcattaat

SEQ ID NO: 449076 - DNA, 120 bp, Artificial Sequence
  ENSG00000155465_33 (sequence is synthesized)
cttaatactgagctccagtccatattatccaaatacttttgaaggaagggatggcagagagggagggccatgtggcaggtgaaccaggctgcaccgtgtccaccaattttctcagcttct

SEQ ID NO: 449077 - DNA, 120 bp, Artificial Sequence
  ENSG00000155465_34 (sequence is synthesized)
ttgtgggtttccagcaggtttctgaagcctttagttttggcagacgtagagtccttggggaaaagagcagtgtcatgagacgctcccacagattagctgctggtaggggcaatgccagga

SEQ ID NO: 449078 - DNA, 120 bp, Artificial Sequence
  ENSG00000155495_0 (sequence is synthesized)
gtctgaaggacctgaggcattttgtgacgaggatcgtctcaggtcagcggagggaggagacttatagacctatccagtcttcaaggtgctccagaaagcaggagttgaagacctgggtgt

SEQ ID NO: 449079 - DNA, 120 bp, Artificial Sequence
  ENSG00000155495_1 (sequence is synthesized)
gagggacacatacatcctaaaagcaccacagcagaggaggcccaggcagtgccaggagtcaaggttcccagaagacaaaccccctaggaagacaggcgacctgtgaggccctagagcacc

SEQ ID NO: 449080 - DNA, 120 bp, Artificial Sequence
  ENSG00000155495_2 (sequence is synthesized)
accttaagagaagaagagctgtaagccggcctttgtcagagccatcatgggggacaaggatatgcctactgctgggatgccgagtcttctccagagttcctctgagagtcctcagagttg

SEQ ID NO: 449081 - DNA, 120 bp, Artificial Sequence
  ENSG00000155495_3 (sequence is synthesized)
tcctgagggggaggactcccagtctcctctccagattccccagagttctcctgagagcgacgacaccctgtatcctctccagagtcctcagagtcgttctgagggggaggactcctcgga

SEQ ID NO: 449082 - DNA, 120 bp, Artificial Sequence
  ENSG00000155495_4 (sequence is synthesized)
tcctctccagagacctcctgaggggaaggactcccagtctcctctccagattccccagagttctcctgagggcgacgacacccagtctcctctccagaattctcagagttctcctgaggg

SEQ ID NO: 449083 - DNA, 120 bp, Artificial Sequence
  ENSG00000155495_5 (sequence is synthesized)
gaaggactccctgtctcctctagagatttctcagagccctcctgagggtgaggatgtccagtctcctctgcagaatcctgcgagttccttcttctcctctgctttattgagtattttcca

SEQ ID NO: 449084 - DNA, 120 bp, Artificial Sequence
  ENSG00000155495_6 (sequence is synthesized)
gagttcccctgagagtactcaaagtccttttgagggttttccccagtctgttctccagattcctgtgagcgccgcctcctcctccactttagtgagtattttccagagttcccctgagag

SEQ ID NO: 449085 - DNA, 120 bp, Artificial Sequence
  ENSG00000155495_7 (sequence is synthesized)
tactcaaagtccttttgagggttttccccagtctccactccagattcctgtgagccgctccttctcctccactttattgagtattttccagagttcccctgagagaactcagagtacttt

SEQ ID NO: 449086 - DNA, 120 bp, Artificial Sequence
  ENSG00000155495_8 (sequence is synthesized)
tgagggttttgcccagtctcctctccagattcctgtgagcccctcctcctcctccactttactgagtcttttccagagtttctctgagagaactcagagtacttttgagggttttgccca

SEQ ID NO: 449087 - DNA, 120 bp, Artificial Sequence
  ENSG00000155495_9 (sequence is synthesized)
gtcttctctccagattcctgtgagcccctccttctcctccactttagtgagtcttttccagagttcccctgagagaactcagagtacttttgagggttttccccagtctcctctccagat

SEQ ID NO: 449088 - DNA, 120 bp, Artificial Sequence
  ENSG00000155495_10 (sequence is synthesized)
tcctgtgagctcctcctcctcctccactttattgagtcttttccagagttcccctgagagaactcacagtacttttgagggttttccccagtctcttctccagattcctatgacctcctc

SEQ ID NO: 449089 - DNA, 120 bp, Artificial Sequence
  ENSG00000155495_11 (sequence is synthesized)
cttctcctctactttattgagtattttccagagttctcctgagagtgctcaaagtacttttgagggttttccccagtctcctctccagattcctgggagcccctccttctcctccacttt

SEQ ID NO: 449090 - DNA, 120 bp, Artificial Sequence
  ENSG00000155495_12 (sequence is synthesized)
actgagtcttttccagagttcccctgagagaactcacagtacttttgagggttttccccagtctcctctccagattcctatgacctcctccttctcctctactttattgagtattttaca

SEQ ID NO: 449091 - DNA, 120 bp, Artificial Sequence
  ENSG00000155495_13 (sequence is synthesized)
gagttctcctgagagtgctcaaagtgcttttgagggttttccccagtctcctctccagattcctgtgagctcctctttctcctacactttattgagtcttttccagagttcccctgagag

SEQ ID NO: 449092 - DNA, 120 bp, Artificial Sequence
  ENSG00000155495_14 (sequence is synthesized)
aactcacagtacttttgagggttttccccagtctcctctccagattcctgtgagctcctcctcctcctcctccactttattgagtcttttccagagttcccctgagtgtactcaaagtac

SEQ ID NO: 449093 - DNA, 120 bp, Artificial Sequence
  ENSG00000155495_15 (sequence is synthesized)
ttttgagggttttccccagtctcctctccagattcctcagagtcctcctgaaggggagaatacccattctcctctccagattgttccaagtcttcctgagtgggaggactccctgtctcc

SEQ ID NO: 449094 - DNA, 120 bp, Artificial Sequence
  ENSG00000155495_16 (sequence is synthesized)
tcactactttcctcagagccctcctcagggggaggactccctatctcctcactactttcctcagagccctcctcagggggaggactccctgtctcctcactactttcctcagagccctca

SEQ ID NO: 449095 - DNA, 120 bp, Artificial Sequence
  ENSG00000155495_17 (sequence is synthesized)
actccatgtctcctctctactttcctcagagtcctcttcagggggaggaattccagtcttctctccagagccctgtgagcatctgctcctcctccactccatccagtcttccccagagtt

SEQ ID NO: 449096 - DNA, 120 bp, Artificial Sequence
  ENSG00000155495_18 (sequence is synthesized)
tccctgagagttctcagagtcctcctgaggggcctgtccagtctcctctccatagtcctcagagccctcctgaggggatgcactcccaatctcctctccagagtcctgagagtgctcctg

SEQ ID NO: 449097 - DNA, 120 bp, Artificial Sequence
  ENSG00000155495_19 (sequence is synthesized)
agggggaggattccctgtctcctctccaaattcctcagagtcctcttgagggagaggactccctgtcttctctccattttcctcagagtcctcctgagtgggaggactccctctctcctc

SEQ ID NO: 449098 - DNA, 120 bp, Artificial Sequence
  ENSG00000155495_20 (sequence is synthesized)
tccactttcctcagtttcctcctcagggggaggacttccagtcttctctccagagtcctgtgagtatctgctcctcctccacttctttgagtcttccccagagtttccctgagagtcctc

SEQ ID NO: 449099 - DNA, 120 bp, Artificial Sequence
  ENSG00000155495_21 (sequence is synthesized)
agagtcctcctgaggggcctgctcagtctcctctccagagacctgtcagctccttcttctcctacactttagcgagtcttctccaaagttcccatgagagtcctcagagtcctcctgagg

SEQ ID NO: 449100 - DNA, 120 bp, Artificial Sequence
  ENSG00000155495_22 (sequence is synthesized)
ggcctgcccagtctcctctccagagtcctgtgagctccttcccctcctccacttcatcgagtctttcccagagttctcctgtgagctccttcccctcctccacttcatcgagtctttcca

SEQ ID NO: 449101 - DNA, 120 bp, Artificial Sequence
  ENSG00000155495_23 (sequence is synthesized)
agagttcccctgagagtcctctccagagtcctgtgatctccttctcctcctccacttcattgagcccattcagtgaagagtccagcagcccagtagatgaatatacaagttcctcagaca

SEQ ID NO: 449102 - DNA, 120 bp, Artificial Sequence
  ENSG00000155495_24 (sequence is synthesized)
ccttgctagagagtgattccttgacagacagcgagtccttgatagagagcgagcccttgttcacttatacactggatgaaaaggtggacgagttggcgcggtttcttctcctcaaatatc

SEQ ID NO: 449103 - DNA, 120 bp, Artificial Sequence
  ENSG00000155495_25 (sequence is synthesized)
aagtgaagcagcctatcacaaaggcagagatgctgacgaatgtcatcagcaggtacacgggctactttcctgtgatcttcaggaaagcccgtgagttcatagagatactttttggcattt

SEQ ID NO: 449104 - DNA, 120 bp, Artificial Sequence
  ENSG00000155495_26 (sequence is synthesized)
ccctgagagaagtggaccctgatgactcctatgtctttgtaaacacattagacctcacctctgaggggtgtctgagtgatgagcagggcatgtcccagaaccgcctcctgattcttattc

SEQ ID NO: 449105 - DNA, 120 bp, Artificial Sequence
  ENSG00000155495_27 (sequence is synthesized)
tgagtatcatcttcataaagggcacctatgcctctgaggaggtcatctgggatgtgctgagtggaataggggtgcgtgctgggagggagcactttgcctttggggagcccagggagctcc

SEQ ID NO: 449106 - DNA, 120 bp, Artificial Sequence
  ENSG00000155495_28 (sequence is synthesized)
tcactaaagtttgggtgcaggaacattacctagagtaccgggaggtgcccaactcttctcctcctcgttacgaattcctgtggggtccaagagctcattcagaagtcattaagaggaaag

SEQ ID NO: 449107 - DNA, 120 bp, Artificial Sequence
  ENSG00000155495_29 (sequence is synthesized)
tagtagagtttttggccatgctaaagaataccgtccctattacctttccatcctcttacaaggatgctttgaaagatgtggaagagagagcccaggccataattgacaccacagatgatt

SEQ ID NO: 449108 - DNA, 120 bp, Artificial Sequence
  ENSG00000155495_30 (sequence is synthesized)
cgactgccacagaaagtgcaagctccagtgtcatgtcccccagcttctcttctgagtgaagtctagggcagattcttccctctgagtttgaagggggcagtcgagtttctacgtggtgga

SEQ ID NO: 449109 - DNA, 120 bp, Artificial Sequence
  ENSG00000155495_31 (sequence is synthesized)
gggcctggttgaggctggagagaacacagtgctatttgcatttctgttccatatgggtagttatggggtttacctgttttacttttgggtatttttcaaatgcttttcctattaataaca

SEQ ID NO: 449110 - DNA, 120 bp, Artificial Sequence
  ENSG00000155495_32 (sequence is synthesized)
ggtttaaatagcttcagaatcctagtttatgcacatgagtcgcacatgtattgctgtttttctggtttaagagtaacagtttgatattttgtaaaaacaaaaacacacccaaacacacca

SEQ ID NO: 449111 - DNA, 120 bp, Artificial Sequence
  ENSG00000155495_33 (sequence is synthesized)
cattgggaaaaccttctgcctcattttgtgatgtgtcacaggttaatgtggtgttactgtaggaattttcttgaaactgtgaaggaactctgcagttaaatagtggaataaagtaaagga

SEQ ID NO: 449112 - DNA, 120 bp, Artificial Sequence
  ENSG00000155495_34 (sequence is synthesized)
ttgttaatgtttgcatttcctcaggtcctttagtctgttgttcttgaaaactaaagatacatacctggtttgcttggcttacgtaagaaagtagaagaaagtaaactgtaataaataaaa

SEQ ID NO: 449113 - DNA, 120 bp, Artificial Sequence
  ENSG00000155506_0 (sequence is synthesized)
gccagagccaggaggcagctgtgcgatctggatgtacctaaaccctccagggccacatagtgaccccaggccctggtcactccatgctttggagggtgcttttgtcaaagaggcctcctt

SEQ ID NO: 449114 - DNA, 120 bp, Artificial Sequence
  ENSG00000155506_1 (sequence is synthesized)
tccctcacccagagctggatttccaagaggctcccatacctagctgccctggcagactcccagggaggaaaaacagcgtggccttggcagctgccccgaggaaggagcccacaggtgaca

SEQ ID NO: 449115 - DNA, 120 bp, Artificial Sequence
  ENSG00000155506_2 (sequence is synthesized)
gggagaagccattgccattccctgtcctggcccccttcagcaaccctgaacactctgctccagccaaggtggtgagggcagctgttcctaaacagcgcaaaggcagcaaggttggtgact

SEQ ID NO: 449116 - DNA, 120 bp, Artificial Sequence
  ENSG00000155506_3 (sequence is synthesized)
ttggagatgcaatcaattggcccacacctggagagatagcccacaagagtgttcagccacagtcccacaagcctcagcctacccgtaaactgccacccaagaaggacatgaaggaacagg

SEQ ID NO: 449117 - DNA, 120 bp, Artificial Sequence
  ENSG00000155506_4 (sequence is synthesized)
agaaaggagaagggagtgatagtaaggagagtccaaaaaccaaatcagatgaatcaggggaggaaaagaatggagatgaggattgccagcgaggcgggcagaagaagaaaggaaacaaac

SEQ ID NO: 449118 - DNA, 120 bp, Artificial Sequence
  ENSG00000155506_5 (sequence is synthesized)
acaagtgggttccattacaaatagacatgaagcctgaagtgcccagagagaaactggcttcacgccccactcgcccaccggagcctagacacatacctgccaatcgcggagagatcaaag

SEQ ID NO: 449119 - DNA, 120 bp, Artificial Sequence
  ENSG00000155506_6 (sequence is synthesized)
ggtctgagtctgccacctacgtgcccgtggccccccccaccccagcctggcaaccagagatcaaaccggagcctgcctggcacgaccaggatgagacatcgagtgtgaagagtgatgggg

SEQ ID NO: 449120 - DNA, 120 bp, Artificial Sequence
  ENSG00000155506_7 (sequence is synthesized)
ctggtggggcgcgggcttccttccgtggccgtggacgggggcgtggtcgcggccggggacgcggccggggtggcactcgaacccattttgactaccagtttggctaccgaaagtttgatg

SEQ ID NO: 449121 - DNA, 120 bp, Artificial Sequence
  ENSG00000155506_8 (sequence is synthesized)
gtgtggaggggcctcgtacgcccaagtacatgaacaacatcacctactactttgacaatgtcagcagcaccgagctttacagtgtggatcaggaactgctcaaagactacatcaagcgcc

SEQ ID NO: 449122 - DNA, 120 bp, Artificial Sequence
  ENSG00000155506_9 (sequence is synthesized)
agattgaatactacttcagcgtggacaatttagagcgagacttcttcctgcgaaggaaaatggatgctgatggtttcctacccatcacccttattgcttccttccaccgagtgcaggccc

SEQ ID NO: 449123 - DNA, 120 bp, Artificial Sequence
  ENSG00000155506_10 (sequence is synthesized)
ttaccactgacatttcactcatctttgcggccctaaaggacagcaaggtggtggagatcgttgatgagaaagttcgtaggagggaggaaccagaaaagtggcctcttcccccaatagtgg

SEQ ID NO: 449124 - DNA, 120 bp, Artificial Sequence
  ENSG00000155506_11 (sequence is synthesized)
attattcacagactgatttctcccagcttctcaactgccctgaatttgttccccgtcagcactaccaaaaggagacagagtcggcacctggctctcctcgtgcagtcaccccagtgccaa

SEQ ID NO: 449125 - DNA, 120 bp, Artificial Sequence
  ENSG00000155506_12 (sequence is synthesized)
ccaaaacagaggaggtcagcaacctaaagacactacccaagggcctgtctgccagcctgcctgacctggattctgagaactggattgaagtgaagaagaggcctcggccatccccagcac

SEQ ID NO: 449126 - DNA, 120 bp, Artificial Sequence
  ENSG00000155506_13 (sequence is synthesized)
ggcccaagaagtcagaggagtccagattttcccacctgacctctctgcctcagcagctgccttcccagcagctgatgtccaaggatcaggatgagcaagaggaactggattttctgtttg

SEQ ID NO: 449127 - DNA, 120 bp, Artificial Sequence
  ENSG00000155506_14 (sequence is synthesized)
acgaggagatggagcagatggatgggcggaagaacaccttcactgcctggtctgatgaggaatctgactatgagattgatgacagggatgtcaacaagatcctcattgtcacccagacac

SEQ ID NO: 449128 - DNA, 120 bp, Artificial Sequence
  ENSG00000155506_15 (sequence is synthesized)
cacattacatgcgccggcacccagggggggaccgcacaggcaaccacacctcgcgtgccaagatgagcgccgaactggccaaggtcattaatgatggcctcttctactatgagcaggacc

SEQ ID NO: 449129 - DNA, 120 bp, Artificial Sequence
  ENSG00000155506_16 (sequence is synthesized)
tgtgggctgaaaagtttgaacctgagtattcccagatcaagcaagaagtcgagaacttcaaaaaggtcaatatgatcagccgggagcagtttgacacactgacccctgagccccctgtgg

SEQ ID NO: 449130 - DNA, 120 bp, Artificial Sequence
  ENSG00000155506_17 (sequence is synthesized)
atcccaaccaggaagttcctcctgggccacctcggttccagcaagttcctacggatgccctggccaacaagttgtttggtgctcctgagccctccaccatcgcccgctctctaccaacca

SEQ ID NO: 449131 - DNA, 120 bp, Artificial Sequence
  ENSG00000155506_18 (sequence is synthesized)
ctgtcccagagtcaccaaactaccgcaacaccaggacccctcgcactccccggacaccacagctcaaagactcaagccagacatcacggttttacccagtggtgaaagaaggacggacac

SEQ ID NO: 449132 - DNA, 120 bp, Artificial Sequence
  ENSG00000155506_19 (sequence is synthesized)
tggatgccaagatgcctcgaaaaagaaagacaagacacagttcaaacccacccttggagagccatgtgggctgggtgatggattcccgtgagcacaggccccgtactgcttccatcagct

SEQ ID NO: 449133 - DNA, 120 bp, Artificial Sequence
  ENSG00000155506_20 (sequence is synthesized)
ccagcccctcagaagggacgcctacagttggcagctatggctgtacccctcagtcattgcccaagttccagcatccttcccatgaactgctcaaggaaaatggcttcacacaacacgtct

SEQ ID NO: 449134 - DNA, 120 bp, Artificial Sequence
  ENSG00000155506_21 (sequence is synthesized)
accataagtatcgtaggcgctgccttaatgagcggaaacgcttgggcattggccagtctcaggagatgaacacactcttccgcttctggtccttcttcctccgagatcacttcaacaaaa

SEQ ID NO: 449135 - DNA, 120 bp, Artificial Sequence
  ENSG00000155506_22 (sequence is synthesized)
agatgtatgaggagttcaagcagctggctctggaggacgccaaagaaggctacagatatggtttggagtgcctttttcgatactacagttatggcctggaaaagaagttccggctggaca

SEQ ID NO: 449136 - DNA, 120 bp, Artificial Sequence
  ENSG00000155506_23 (sequence is synthesized)
tattcaaggattttcaggaggaaacggtgaaggactatgaagctggccaactgtatgggctggagaagttctgggccttcttgaaatattccaaagccaaaaatttggacattgacccca

SEQ ID NO: 449137 - DNA, 120 bp, Artificial Sequence
  ENSG00000155506_24 (sequence is synthesized)
aactgcaagaatacctcggcaaattccgacgtcttgaagacttccgagtagatccccccatgggtgaggagggcaaccacaagcgacactcagtggtagcaggaggtggcggcggtgagg

SEQ ID NO: 449138 - DNA, 120 bp, Artificial Sequence
  ENSG00000155506_25 (sequence is synthesized)
gcaggaagcggtgcccctcccagtcttccagcaggcctgctgccatgatcagccaaccccctacaccacccaccggccagcctgtccgggaagatgccaaatggacaagccagcactcga

SEQ ID NO: 449139 - DNA, 120 bp, Artificial Sequence
  ENSG00000155506_26 (sequence is synthesized)
acacacagactttgggaaagtgaaaagctccttagccctggggcttgaggggggaaaggggtagggtgggtaagagtccatgggggtgcccagtcccaggaaaggggacaatgaagggac

SEQ ID NO: 449140 - DNA, 120 bp, Artificial Sequence
  ENSG00000155506_27 (sequence is synthesized)
atttgggctatcagaggtacccctgggcaggagcctctacatccccttccccctcctctctccatgactcttgacatcctagcttcttctaaggggggagggaaaggggggagattttta

SEQ ID NO: 449141 - DNA, 120 bp, Artificial Sequence
  ENSG00000155506_28 (sequence is synthesized)
tatatatatacatatatatatatcaagttttaaattattgatagttcatctggattaccaaaatcactctgcagccctgcccgaggctagtaggctgcaaccctggtccccacccctaac

SEQ ID NO: 449142 - DNA, 120 bp, Artificial Sequence
  ENSG00000155506_29 (sequence is synthesized)
ctcctgctccccctcaagccaactatgcagcccacaagaaggccctgcgggcccccccattgcccagcactgtctcatagaaggctctggtggtacctctgggccccaggagcatcagcc

SEQ ID NO: 449143 - DNA, 120 bp, Artificial Sequence
  ENSG00000155506_30 (sequence is synthesized)
ccttgatcatctggggtttgtcatcaccatattttctccctgctgttcccaccatgcccttctgccatcttctgggagaaggaaaccaaaggatctaaaactggggtttgggggaaggtt

SEQ ID NO: 449144 - DNA, 120 bp, Artificial Sequence
  ENSG00000155506_31 (sequence is synthesized)
tcagcctctccccactccccttgccccacaccctttactccccagcccagagagacgctgcttttaccaggaaagactattgaaagatgttttattttatttttctctgacctttccatc

SEQ ID NO: 449145 - DNA, 120 bp, Artificial Sequence
  ENSG00000155506_32 (sequence is synthesized)
cttgaaaaaatggggaaaaaagaagaaaaaagacaaaatcgaccataaaagaccaaaaaaaaaaaaaaaatcagaaaacccccacctaatccacagaaagtaatgtctttcccctcccct

SEQ ID NO: 449146 - DNA, 120 bp, Artificial Sequence
  ENSG00000155506_33 (sequence is synthesized)
tggaatttttgttttgtttttggaaataatatttttttaaaagttgccttattgtggagcgggaatctgaaatacccaaatgcctgttttcctcggtggagtcaacccgaagagctccca

SEQ ID NO: 449147 - DNA, 120 bp, Artificial Sequence
  ENSG00000155506_34 (sequence is synthesized)
ccttctctggatgtgcctgggcttggactggctagaatctttctctggactgttgcatgtacagtgcctccatcctggaggcaagagagttgggagtggctcgaatcagagccgtgccca

SEQ ID NO: 449148 - DNA, 120 bp, Artificial Sequence
  ENSG00000155506_35 (sequence is synthesized)
agatatccctgctgttgcatcgtttgaagctgacgtcctgtgtctgtacactgctgccactgttgtgtcctcgctctgcttgctgttgcctcacgccaggccccgtcctgccgtgacacc

SEQ ID NO: 449149 - DNA, 120 bp, Artificial Sequence
  ENSG00000155506_36 (sequence is synthesized)
cttcatcctacccttggaaccccaaggccaagttggttcaaactgttggagaacagagttggcctgcatctggaacacacttgtcctcagcttaccatctcctcacaccccagagtggaa

SEQ ID NO: 449150 - DNA, 120 bp, Artificial Sequence
  ENSG00000155506_37 (sequence is synthesized)
aggtgaacacctgcagctgaggcttggaaacgtttcttgtgttgccctgaaaaatctttgagacctcagggaggctctgtctctcttaaaaggtggagaaagatgccattctctccctaa

SEQ ID NO: 449151 - DNA, 120 bp, Artificial Sequence
  ENSG00000155506_38 (sequence is synthesized)
ggtctggtggagtctccccatcttgcatacccttctgcaagccatctatctctgctcactctccaattgacccgcctgggaacaagggatgaggaggagttgggggctggggggaatcct

SEQ ID NO: 449152 - DNA, 120 bp, Artificial Sequence
  ENSG00000155506_39 (sequence is synthesized)
gccagttggtgaagccctgtggcaggaaggtatatgtggacatagagtatacctgattctctttcttcagccactgactgcttgggttgggctgtgaatgataatggaatggctggagtc

SEQ ID NO: 449153 - DNA, 120 bp, Artificial Sequence
  ENSG00000155506_40 (sequence is synthesized)
tgctgttgtcagaaggcagggagggtgatgaaggactgacccacatggactgggatgtgtgtcggttatgggcatgactgcacgttcactctcagtgggatctgggcaacatggagttca

SEQ ID NO: 449154 - DNA, 120 bp, Artificial Sequence
  ENSG00000155506_41 (sequence is synthesized)
ttgtcctgttgcttacttactgcaatgtctttggccctccttttcaactggttcctctgttgggcccaaaggttgggagtaggagacagtatcccaggctgacaagggcttgccctttac

SEQ ID NO: 449155 - DNA, 120 bp, Artificial Sequence
  ENSG00000155506_42 (sequence is synthesized)
cttgggcaccttgttaatttttagcctgtgcccttccccacctttgccctcccagtggttggtatgtgggaagcccatctcagttcctgtgacttcatgtctcaaaccaaggatgagcgt

SEQ ID NO: 449156 - DNA, 120 bp, Artificial Sequence
  ENSG00000155506_43 (sequence is synthesized)
ctggtctctgctatgatggtggtatccgaggcctttccctgcccagtctggtgcctgccccacattgtaccggacactggattcctggacccccttctcctttcctttctttccttcagg

SEQ ID NO: 449157 - DNA, 120 bp, Artificial Sequence
  ENSG00000155506_44 (sequence is synthesized)
tcacgcagccctgtactgtatccagcaccacagaaacctcagtgtttttcctctgctggtttggggcacaaggaagccttagggtatggggaaaggctgttattacctagagtttactcc

SEQ ID NO: 449158 - DNA, 120 bp, Artificial Sequence
  ENSG00000155506_45 (sequence is synthesized)
caggccagggggctgccatcttcttcacagacatccctgaaaggaagcccctttggggcagggaggtgaggacttcatctcaacatcggctggtggttggtaggggagctttttcttttc

SEQ ID NO: 449159 - DNA, 120 bp, Artificial Sequence
  ENSG00000155506_46 (sequence is synthesized)
ttgtttttgtttttgtttttgtttttggtaacatgttaggagttaatgttgcaaagagtagtttacatcttcactttctgaagacacttgaatttaggaccgatgtatctgtgacaagca

SEQ ID NO: 449160 - DNA, 120 bp, Artificial Sequence
  ENSG00000155506_47 (sequence is synthesized)
ctgtgacaagcatgccagaagtggcaggggccatcagggctaaccacttcacacctaccatcgtcccatggggatccaagacctgagataaagcaacagcctgcccagatccctctgttc

SEQ ID NO: 449161 - DNA, 120 bp, Artificial Sequence
  ENSG00000155506_48 (sequence is synthesized)
atcctatcccttccaaggttggtccatgccaacataacctctgggcatcagacatcagcaggtctgtgtgcctcagccctgttaaggggcaggtttctctttagccctcttcctgcactt

SEQ ID NO: 449162 - DNA, 120 bp, Artificial Sequence
  ENSG00000155506_49 (sequence is synthesized)
gggagcaaaggcactaccagtagagaagggccatccagccgtgccccagcctggacccctggggctcagatagaggtgctgagcccctgtgtcaaagttgttaaatgtttttgttttgtt

SEQ ID NO: 449163 - DNA, 120 bp, Artificial Sequence
  ENSG00000155506_50 (sequence is synthesized)
ccattgtagctctttttttttttttttcccctttcctggtgattgattttacaaaagaaagtaagctgcttagaaggccctggaagggaagtgaggaggagggacaaggaagatgactag

SEQ ID NO: 449164 - DNA, 120 bp, Artificial Sequence
  ENSG00000155506_51 (sequence is synthesized)
ttacggagggtgagggttgttttttgccaaaaagcctgggtagagtgatctgaattatctggcaccctcctgaatggaaccccagagtacctcctgtgtggaagggtccctggattttcc

SEQ ID NO: 449165 - DNA, 120 bp, Artificial Sequence
  ENSG00000155506_52 (sequence is synthesized)
ctaacacccaccctctcccccttcagccatgctgatggcagagaagataagaacttggagcccatttctcactggagaggaaaacttgtcatctggctttgcggagaaggttccacctta

SEQ ID NO: 449166 - DNA, 120 bp, Artificial Sequence
  ENSG00000155506_53 (sequence is synthesized)
cgctcgtagtacattatctttactatgtgctaggatatcatatttaaaaggacaaaaaaatgtaaaatacttgaatgagcttgtattataacattaatattattgagagtatctgctttc

SEQ ID NO: 449167 - DNA, 120 bp, Artificial Sequence
  ENSG00000155506_54 (sequence is synthesized)
caggctgaagtgattcattcattattctagtcctgctttagtcctttgtaatttgtggtaattatgcttttctttttaatacaaaaaaatgtataaaaataaacacttgaaaaggcaaaa

SEQ ID NO: 449168 - DNA, 120 bp, Artificial Sequence
  ENSG00000155506_55 (sequence is synthesized)
tggtcatgtaggcctcctcttccccagttggacctgggtctttctgtgtattacacaacacctccctctctcctctgagcttctttatcctcaccagctcagcttttctgtacctctccc

SEQ ID NO: 449169 - DNA, 120 bp, Artificial Sequence
  ENSG00000155506_56 (sequence is synthesized)
aagacacagttcaaacccacccttggagagccatgtgggctgggtgatggattcccgtgagcacaggccccgtactgcttccatcagagatggcacagactgcaaataggcatgcttttg

SEQ ID NO: 449170 - DNA, 120 bp, Artificial Sequence
  ENSG00000155506_57 (sequence is synthesized)
ccagaagccttaccaataacatatagtcaattagcacatgttttgcatattatatgtattacatactgtattcttacaataagctaaataaaaaatattactaagaaaatcacaaagaag

SEQ ID NO: 449171 - DNA, 120 bp, Artificial Sequence
  ENSG00000155506_58 (sequence is synthesized)
ggaacaacaaacactggggcctacttggtggggagagggaggagagtgaggtacagtttacctacttaacaaacctgtacacatacctctgaacctaaaataaaagttaaaatcataaga

SEQ ID NO: 449172 - DNA, 120 bp, Artificial Sequence
  ENSG00000155506_59 (sequence is synthesized)
ggcctccttgtttgataccctgtgagaggatggatcttggctgacagaacggatcagagggacccctcctgacatggtggggctgctgtggggaacctggtgacagtattttttgtggtt

SEQ ID NO: 449173 - DNA, 120 bp, Artificial Sequence
  ENSG00000155506_60 (sequence is synthesized)
ggatttacggcggctgcatctaactgggagggggccgcacctcgcgtgaaccccgacccttctctgcagggactggggcccagcgccccggaggaaggcgtcgcgggcgctctgctagcc

SEQ ID NO: 449174 - DNA, 120 bp, Artificial Sequence
  ENSG00000155506_61 (sequence is synthesized)
aagttcgaggcgggggaggcagcctcgggcgcgcccggcttctccgggggggcgggcgcgcagatggccactcaggtggagccgctgctgcctgggggcgccacgctcttgcaggccgaa

SEQ ID NO: 449175 - DNA, 120 bp, Artificial Sequence
  ENSG00000155506_62 (sequence is synthesized)
ttgcaggccgaagagcacggggggctggtgaggaagaagccgccgccggcgcccgagggcaagggcgagcccgggccaaacgacgtccgcgggggggagccggacggcagcgctcggaga

SEQ ID NO: 449176 - DNA, 80 bp, Artificial Sequence
  ENSG00000155506_63 (sequence is synthesized)
tgcgccaagccgcacaaggagggcaccgggcagcaggagcgcgagagcccgcggccgctgcagctgcccggcgccgaagg

SEQ ID NO: 449177 - DNA, 120 bp, Artificial Sequence
  ENSG00000155506_64 (sequence is synthesized)
ggcgctggcggaggagctgccggagccgcgggcgcggggcgccgggacttcgtggaagcccccccgcccaaggtgaacccgtggactaagaacgcattgccgccggtcctgaccaccgtg

SEQ ID NO: 449178 - DNA, 120 bp, Artificial Sequence
  ENSG00000155506_65 (sequence is synthesized)
cggagacctgtggacagataagctgctgggcccagtcatcagtaactgtttactcagaaaaacaagggaagtgctctaagattacactaagaaggcttttgacccattcctcgccagtag

SEQ ID NO: 449179 - DNA, 120 bp, Artificial Sequence
  ENSG00000155506_66 (sequence is synthesized)
tggagagatagcccacaagagtgttcagatgaagctgctgagacttgcagaggttaattactagcccttgatggccaagtggggattggaagtcagccacagtcccacaagcctcagcct

SEQ ID NO: 449180 - DNA, 120 bp, Artificial Sequence
  ENSG00000155506_67 (sequence is synthesized)
acgtggtgcctccccgcgcggggagcggcatgtgactgccgaccggcgctccgcgagtcctccctctccctcctccgcgttttggtccttttggaccgtgcccctttccggggggagaac

SEQ ID NO: 449181 - DNA, 120 bp, Artificial Sequence
  ENSG00000155506_68 (sequence is synthesized)
acggccaccgcctgggccgcagcggttagtgggcaacggtgtggttcgggcctacctcgtcggcagagggtgggcgctggtttcagtgaaacgatccccaccgcatgctggtaacactct

SEQ ID NO: 449182 - DNA, 120 bp, Artificial Sequence
  ENSG00000155508_0 (sequence is synthesized)
gggtagagtggtgccgtccggttgtttggtgggaggcacgtaagaccgctctgggcacgggggcgctcacctcactggctcgttcggttctaggagcagatccggggtagagggaaaaga

SEQ ID NO: 449183 - DNA, 120 bp, Artificial Sequence
  ENSG00000155508_1 (sequence is synthesized)
gctccgggccaggggctgccgtcgccgccgtcggggagtcagcccgccagcccgccagctcgtcagcccgccagccagcgcttcgcgggccctgtcggtcccgatcagaccaaacattgt

SEQ ID NO: 449184 - DNA, 120 bp, Artificial Sequence
  ENSG00000155508_2 (sequence is synthesized)
ctggcttgcactgtaaaactagttagctgaagacgacttctcaggtttcttcaggatgcctgcagcacttgtggagaatagccaggttatctgtgaagtgtgggccagtaatctagaaga

SEQ ID NO: 449185 - DNA, 120 bp, Artificial Sequence
  ENSG00000155508_3 (sequence is synthesized)
agagatgaggaagatccgagaaatcgtgctcagttacagttatattgccatggacacagaatttccaggtgttgtggtgcgaccaattggtgaatttcgtagttccatagattaccaata

SEQ ID NO: 449186 - DNA, 120 bp, Artificial Sequence
  ENSG00000155508_4 (sequence is synthesized)
tcagcttctgcggtgcaatgttgaccttttaaaaattatccagctgggccttacattcacaaatgagaagggagagtatccttctggaatcaatacttggcagttcaatttcaaatttaa

SEQ ID NO: 449187 - DNA, 120 bp, Artificial Sequence
  ENSG00000155508_5 (sequence is synthesized)
ccttacagaggacatgtactcccaggattccatagatctccttgctaactcaggactacagtttcagaagcatgaagaggaagggattgacacactgcactttgcagagctgcttatgac

SEQ ID NO: 449188 - DNA, 120 bp, Artificial Sequence
  ENSG00000155508_6 (sequence is synthesized)
atcaggagtggttctctgtgacaatgtcaaatggctttcatttcatagtggctatgattttggctatatggtaaagttgcttacagattctcgtttgccagaagaggaacatgaattctt

SEQ ID NO: 449189 - DNA, 120 bp, Artificial Sequence
  ENSG00000155508_7 (sequence is synthesized)
tcatattctgaaccttttcttcccatccatttatgatgtgaaatacctgatgaagagctgcaaaaatcttaagggaggtcttcaggaagttgctgatcagttggatttgcagaggattgg

SEQ ID NO: 449190 - DNA, 120 bp, Artificial Sequence
  ENSG00000155508_8 (sequence is synthesized)
aaggcagcaccaggcaggctcagactcactgctgacaggaatggctttctttaggatgaaagagttgttttttgaggacagcattgatgatgccaagtactgtgggcggctctatggctt

SEQ ID NO: 449191 - DNA, 120 bp, Artificial Sequence
  ENSG00000155508_9 (sequence is synthesized)
aggcacaggagtggcccagaagcagaatgaggatgtggactctgcccaggagaagatgagcatcctggcgattatcaacaacatgcagcagtgatggcgccaggctctgcagggtgggcc

SEQ ID NO: 449192 - DNA, 120 bp, Artificial Sequence
  ENSG00000155508_10 (sequence is synthesized)
gagtggtgcttactgtgctgactgtgtacttatcttccccaagagaaaatgcttcttttgagcacactgtacctaccatctgcattgagcagaaagacttttgttttactgaagacaaaa

SEQ ID NO: 449193 - DNA, 120 bp, Artificial Sequence
  ENSG00000155508_11 (sequence is synthesized)
gatgtttttattttagacccagaagagaggagtttgctctgaatttgtaaataagtcttccccattcctcatactcgagcctctcctctctggttgcctcctgccaccagcatccatggc

SEQ ID NO: 449194 - DNA, 120 bp, Artificial Sequence
  ENSG00000155508_12 (sequence is synthesized)
tcatttgacacctttttaaatatcaggacaagtctgaaacaaagtagtaaaatgtatataactcttacctgttgtcattctttttcttttaaatttgttgctaatctctgataatgaaga

SEQ ID NO: 449195 - DNA, 120 bp, Artificial Sequence
  ENSG00000155508_13 (sequence is synthesized)
ttcttactctgattctcagctgagctgtgagggcttccagggaaaatggaacaaaatggtgttcttaggtaatgggttgtagatactgagtcttcctttccttttctgacccttctcgag

SEQ ID NO: 449196 - DNA, 120 bp, Artificial Sequence
  ENSG00000155508_14 (sequence is synthesized)
gacatttgctttcctcacacttttgtagtctctctttacatattactatatggaaatgaattgctctgtgctgaaatttgaagaccagataatgaaactgaaaagcaaacaattttactg

SEQ ID NO: 449197 - DNA, 120 bp, Artificial Sequence
  ENSG00000155508_15 (sequence is synthesized)
aatctgtctacccttcattcatgagaactccagaatgagtgttgaccactgaagcatcttttaagtctgtgttccattgtgccattcaggtttgctgtcacatatgcatcatctgaaatc

SEQ ID NO: 449198 - DNA, 120 bp, Artificial Sequence
  ENSG00000155508_16 (sequence is synthesized)
atttgaaatttttgtacaataaaatatcctggatttgatcctgaaggaaactagtaagatcagatttttgggtcatgtctgttgtattttcagtaatgtgatttcagatggtcatctgga

SEQ ID NO: 449199 - DNA, 120 bp, Artificial Sequence
  ENSG00000155508_17 (sequence is synthesized)
ttctcccacttctctactccattatttctctacttttccttccagcaaacctgaaacgtgagggagatggattaatgtgagtaacaggaatgtgtctttaaaaagctagagtggttacat

SEQ ID NO: 449200 - DNA, 120 bp, Artificial Sequence
  ENSG00000155508_18 (sequence is synthesized)
ttaatcaggcagtaagataatttgggttcttgagttgttttggagtaatatcccacaactggggtaggaagctcaggacttttttctttaaagctagtcatttcaaaagcatattgtatt

SEQ ID NO: 449201 - DNA, 120 bp, Artificial Sequence
  ENSG00000155508_19 (sequence is synthesized)
tttttgaatgactacagtatggacaatttcaaaaaccaaaacccactttggattggtggaagtaaaaactggtaactcactcaagtgaatgaatggtcttgcattttaaaagcttatggg

SEQ ID NO: 449202 - DNA, 120 bp, Artificial Sequence
  ENSG00000155508_20 (sequence is synthesized)
aaactcaatttgaaatgattagaaaatgtcaagtattataagctggtatttaagatgcttgtaaatactatttatgtttttaattttgtaaaataaagatttctttttaaccactggcat

SEQ ID NO: 449203 - DNA, 120 bp, Artificial Sequence
  ENSG00000155508_21 (sequence is synthesized)
gaggaccaaaatggaggagtaagaatcatgattaaattgagcgagcgcaactaatcacgcgaagagggccgcaggcgggccgtcttccgcaagcgtgcttccaggcctccactccccacc

SEQ ID NO: 449204 - DNA, 120 bp, Artificial Sequence
  ENSG00000155508_22 (sequence is synthesized)
tattcggcggcaccctgttacttctgctcctgcgcgctgcttcccgcgacctcacaggcagagcgaacacgcacggagtcgcaggggcgcgcaaagggggaggagcgggcgtgaccaggc

SEQ ID NO: 449205 - DNA, 120 bp, Artificial Sequence
  ENSG00000155508_23 (sequence is synthesized)
ggagaacacgaggcggaggcgcgccccagctggccacacgctgcccagggccggcgtcggtcaagagccctctcttcaagcaggattaagagggaaccaaggggctggcagaggggcctc

SEQ ID NO: 449206 - DNA, 120 bp, Artificial Sequence
  ENSG00000155508_24 (sequence is synthesized)
agaagctcctgggcgaggcctgagcccgtgggtctcgacactaaaatctggcgagctccctgcgcgtccgcaaagattttggagctctgaagagcccggcgacgcctgcgctggccaggc

SEQ ID NO: 449207 - DNA, 120 bp, Artificial Sequence
  ENSG00000155508_25 (sequence is synthesized)
gcccacgggaggcgccgtcctctttgtaactcgagcagaccctggcgggccagttgctatggcaatgttcctcgctctgctcggtgaggccgggaggagcagatccggggtagagggaaa

SEQ ID NO: 449208 - DNA, 120 bp, Artificial Sequence
  ENSG00000155508_26 (sequence is synthesized)
agactcaacgtttcttttcccgagcaaggccttgattgcttgcagagaaaactttcctgtggctttatcattagttgcccttcagagctttcctgtgtaaataagaagctatgttttgga

SEQ ID NO: 449209 - DNA, 120 bp, Artificial Sequence
  ENSG00000155508_27 (sequence is synthesized)
tttagtttatggaggaaaatctcatttttctatctgtcacagaaatatgatctactttgcatgcttgtttgaatgttggaaagagtgaattgatctattaagttaggaaaagcatttcaa

SEQ ID NO: 449210 - DNA, 120 bp, Artificial Sequence
  ENSG00000155508_28 (sequence is synthesized)
ccctgtcggtcccgttcttgcggccccataactttttcttggtgttctatggctttatgaatggaggagccaactcacagacctgggccattcgggtggttttaagaagtttgaactgcg

SEQ ID NO: 449211 - DNA, 120 bp, Artificial Sequence
  ENSG00000155508_29 (sequence is synthesized)
cttaccggaaagaggagcgtaagatgaaagagtttcttgcggccccataactttttcttggtgttctatggctttatgaatggaggagccaactcacagacctgggccattcgggtggtt

SEQ ID NO: 449212 - DNA, 120 bp, Artificial Sequence
  ENSG00000155511_0 (sequence is synthesized)
agttaatctggctgtcagttggtgttaacgctgcagtttaagtgttcggattccaagggaaacagacaaacctcacgaaaggaaggaagcaagcaagcaaggaaggaactgcaggaggaa

SEQ ID NO: 449213 - DNA, 120 bp, Artificial Sequence
  ENSG00000155511_1 (sequence is synthesized)
aagaacaggcagaacagcgagaagaataaagggaaagggggggaaacaccaaatctatgattggacctgggcttctttttcgccaatgcaaaaaggaatatgcagcacatttttgccttc

SEQ ID NO: 449214 - DNA, 120 bp, Artificial Sequence
  ENSG00000155511_2 (sequence is synthesized)
ttctgcaccggtttcctaggcgcggtagtaggtgccaatttccccaacaatatccagatcgggggattatttccaaaccagcagtcacaggaacatgctgcttttagatttgctttgtcg

SEQ ID NO: 449215 - DNA, 120 bp, Artificial Sequence
  ENSG00000155511_3 (sequence is synthesized)
caactcacagagcccccgaagctgctcccccagattgatattgtgaacatcagcgacagctttgagatgacctatagattctgttcccagttctccaaaggagtctatgccatctttggg

SEQ ID NO: 449216 - DNA, 120 bp, Artificial Sequence
  ENSG00000155511_4 (sequence is synthesized)
ttttatgaacgtaggactgtcaacatgctgacctccttttgtggggccctccacgtctgcttcattacgccgagctttcccgttgatacatccaatcagtttgtccttcagctgcgccct

SEQ ID NO: 449217 - DNA, 120 bp, Artificial Sequence
  ENSG00000155511_5 (sequence is synthesized)
gaactgcaggatgccctcatcagcatcattgaccattacaagtggcagaaatttgtctacatttatgatgccgaccggggcttatccgtcctgcagaaagtcctggatacagctgctgag

SEQ ID NO: 449218 - DNA, 120 bp, Artificial Sequence
  ENSG00000155511_6 (sequence is synthesized)
aagaactggcaggtgacagcagtcaacattttgacaaccacagaggagggataccggatgctctttcaggacctggagaagaaaaaggagcggctggtggtggtggactgtgaatcagaa

SEQ ID NO: 449219 - DNA, 120 bp, Artificial Sequence
  ENSG00000155511_7 (sequence is synthesized)
cgcctcaatgctatcttgggccagattataaagctagagaagaatggcatcggctaccactacattcttgcaaatctgggcttcatggacattgacttaaacaaattcaaggagagtggc

SEQ ID NO: 449220 - DNA, 120 bp, Artificial Sequence
  ENSG00000155511_8 (sequence is synthesized)
gccaatgtgacaggtttccagctggtgaactacacagacactattccggccaagatcatgcagcagtggaagaatagtgatgctcgagaccacacacgggtggactggaagagacccaag

SEQ ID NO: 449221 - DNA, 120 bp, Artificial Sequence
  ENSG00000155511_9 (sequence is synthesized)
tacacctctgcgctcacctacgatggggtgaaggtgatggctgaggctttccagagcctgcggaggcagagaattgatatatctcgccgggggaatgctggggattgtctggctaaccca

SEQ ID NO: 449222 - DNA, 120 bp, Artificial Sequence
  ENSG00000155511_10 (sequence is synthesized)
gctgttccctggggccaagggatcgacatccagagagctctgcagcaggtgcgatttgaaggtttaacaggaaacgtgcagtttaatgagaaaggacgccggaccaactacacgctccac

SEQ ID NO: 449223 - DNA, 120 bp, Artificial Sequence
  ENSG00000155511_11 (sequence is synthesized)
gtgattgaaatgaaacatgacggcatccgaaagattggttactggaatgaagatgataagtttgtccctgcagccaccgatgcccaagctgggggcgataattcaagtgttcagaacaga

SEQ ID NO: 449224 - DNA, 120 bp, Artificial Sequence
  ENSG00000155511_12 (sequence is synthesized)
acatacatcgtcacaacaatcctagaagatccttatgtgatgctcaagaagaacgccaatcagtttgagggcaatgaccgttacgagggctactgtgtagagctggcggcagagattgcc

SEQ ID NO: 449225 - DNA, 120 bp, Artificial Sequence
  ENSG00000155511_13 (sequence is synthesized)
aagcacgtgggctactcctaccgtctggagattgtcagtgatggaaaatacggagcccgagaccctgacacgaaggcctggaatggcatggtgggagagctggtctatggaagagcagat

SEQ ID NO: 449226 - DNA, 120 bp, Artificial Sequence
  ENSG00000155511_14 (sequence is synthesized)
gtggctgtggctcccttaactatcactttggtccgggaagaagttatagatttctccaaaccatttatgagtttggggatctccatcatgattaaaaaaccacagaaatccaagccgggt

SEQ ID NO: 449227 - DNA, 120 bp, Artificial Sequence
  ENSG00000155511_15 (sequence is synthesized)
gtcttctccttccttgatcctttggcttatgagatttggatgtgcattgtttttgcctacattggagtgagtgttgtcctcttcctggtcagccgcttcagtccctatgaatggcacagt

SEQ ID NO: 449228 - DNA, 120 bp, Artificial Sequence
  ENSG00000155511_16 (sequence is synthesized)
gaagagtttgaggaaggacgggaccagacaaccagtgaccagtccaatgagtttgggatattcaacagtttgtggttctccctgggagccttcatgcagcaaggatgtgacatttctccc

SEQ ID NO: 449229 - DNA, 120 bp, Artificial Sequence
  ENSG00000155511_17 (sequence is synthesized)
aggtccctgtctggtcgcatcgttggtggcgtctggtggttcttcaccttaatcatcatctcctcatatacagccaatctggccgccttcctgaccgtggagaggatggtgtctcccatt

SEQ ID NO: 449230 - DNA, 120 bp, Artificial Sequence
  ENSG00000155511_18 (sequence is synthesized)
gagagtgcagaggacctagcgaagcagacagaaattgcctacgggacgctggaagcaggatctactaaggagttcttcaggaggtctaaaattgctgtgtttgagaagatgtggacatac

SEQ ID NO: 449231 - DNA, 120 bp, Artificial Sequence
  ENSG00000155511_19 (sequence is synthesized)
atgaagtcagcagagccatcagtttttgtgcggaccacagaggaggggatgattcgagtgaggaaatccaaaggcaaatatgcctacctcctggagtccaccatgaatgagtacattgag

SEQ ID NO: 449232 - DNA, 120 bp, Artificial Sequence
  ENSG00000155511_20 (sequence is synthesized)
cagcggaaaccctgtgacaccatgaaggtgggaggtaacttggattccaaaggctatggcattgcaacacccaaggggtctgccctgagaaatccagtaaacctggcagtgttaaaactg

SEQ ID NO: 449233 - DNA, 120 bp, Artificial Sequence
  ENSG00000155511_21 (sequence is synthesized)
aacgagcaggggcttttggacaaattgaaaaacaaatggtggtacgacaagggcgagtgcggcagcgggggaggtgattccaaggacaagacaagcgctctgagcctcagcaatgtggca

SEQ ID NO: 449234 - DNA, 120 bp, Artificial Sequence
  ENSG00000155511_22 (sequence is synthesized)
ggcgtgttctacatcctgatcggaggacttggactagccatgctggttgccttaatcgagttctgctacaaatcccgtagtgaatccaagcggatgaagggtttttgtttgatcccacag

SEQ ID NO: 449235 - DNA, 120 bp, Artificial Sequence
  ENSG00000155511_23 (sequence is synthesized)
gcggcggcagtggagagaatggtcgggtggtcagccatgacttccccaagtccatgcaatcgattccttgcatgagccacagttcagggatgcccttgggagccacgggattgtaactgg

SEQ ID NO: 449236 - DNA, 120 bp, Artificial Sequence
  ENSG00000155511_24 (sequence is synthesized)
agcagatggagaccccttggggagcaggctcgggctccccagccccatcccaaacccttcagtgccaaaaacaacaacaaaatgaaacgcaaccaccaccaaccactgcgaccacaagaa

SEQ ID NO: 449237 - DNA, 120 bp, Artificial Sequence
  ENSG00000155511_25 (sequence is synthesized)
ggatgattcaacaggttttcctgaagaattgaaaaaccattttgctgtcccttttccttttttgatgttctttcacccttttctgtttgctaagtgaggatgaaaaaataacactgtact

SEQ ID NO: 449238 - DNA, 120 bp, Artificial Sequence
  ENSG00000155511_26 (sequence is synthesized)
gcaataaggggagagtaaccctgtctaatgaaacctgtgtctctgagagtagagtcactggaacactaatgaggaaactgcactgttttattttaattcagttgttagtgtgtcttagtg

SEQ ID NO: 449239 - DNA, 120 bp, Artificial Sequence
  ENSG00000155511_27 (sequence is synthesized)
tgtgcaattttttttcttactaatatccatggtttgcaggttctgttaggccctttccttctccttacttcttatccccaactccctacccacccctcttcagttttcagattggagatt

SEQ ID NO: 449240 - DNA, 120 bp, Artificial Sequence
  ENSG00000155511_28 (sequence is synthesized)
caagatttgttccactttacaagcaagaggaaaaaaaagcaaccttcaaactaattctccatgggggctctccatgttaccctccactccttggcccaaacctctgatggagatagacat

SEQ ID NO: 449241 - DNA, 120 bp, Artificial Sequence
  ENSG00000155511_29 (sequence is synthesized)
tgttggagaagtgggctgccttccccaagtggggcactgcttaagcacttattcagtggagaacacaggtgaaaagcaactcaggatgagggtggtggagagggcaggggcagatgtgca

SEQ ID NO: 449242 - DNA, 120 bp, Artificial Sequence
  ENSG00000155511_30 (sequence is synthesized)
gtcagagaaggactcctgaagttactgctgctcagaaaaacagttcctttaatgtggaagagccatttcataggtcataggtggtatggtatatttcttcagagtcaaccttggccctga

SEQ ID NO: 449243 - DNA, 120 bp, Artificial Sequence
  ENSG00000155511_31 (sequence is synthesized)
gaagtatgtcctcctggtgtgctcaggctcaacggcagtctggtggctgaaggcacttggcctcctaaaccaagcagaattttgggaagagataacagccagggagatattgcccatgat

SEQ ID NO: 449244 - DNA, 120 bp, Artificial Sequence
  ENSG00000155511_32 (sequence is synthesized)
tctcactttttctttgcctggcatctaagcaggaacccattgtggagtagactctcttcttctatggagcctctgacatggggagcaatgctaagcaagctaagtgtaaaagaaaagtga

SEQ ID NO: 449245 - DNA, 120 bp, Artificial Sequence
  ENSG00000155511_33 (sequence is synthesized)
cagaataattttggaagaggaagcctcatcaaaagctcacacaaaatagagcttcccatggtgtgccctatcctaggtttaagaaaacacgtatgaagtttatgctgatgcaaagaactt

SEQ ID NO: 449246 - DNA, 120 bp, Artificial Sequence
  ENSG00000155511_34 (sequence is synthesized)
gggtttttatgttaatataaagtgttgttttagcatgtggccagatgatgctctgtcatctttagaaagtgagataaccaaggaaataattgaaggagtatagggagatggattaagttg

SEQ ID NO: 449247 - DNA, 120 bp, Artificial Sequence
  ENSG00000155511_35 (sequence is synthesized)
ataatgacatttagggcaacttaagacctttgatcccaggttctaactcaaagaggctgaccttcccccagctaagatagcatgaggacgttgtattccaatatacgtatgattggggct

SEQ ID NO: 449248 - DNA, 120 bp, Artificial Sequence
  ENSG00000155511_36 (sequence is synthesized)
acaaagctgaactaaagcaagattggtgaagtggcagggtttatagagagaagcccaggctgagttcagcttttgttggaagtgagaatccctgacatatagctttcttggagatcccaa

SEQ ID NO: 449249 - DNA, 120 bp, Artificial Sequence
  ENSG00000155511_37 (sequence is synthesized)
ctctcattcttggtgcaactggcttccagctctccagcagtcactctcctaggtgcatgattcagtgcgtgccatgtgtcattagcttttactgataaccatattctggcttgttccctt

SEQ ID NO: 449250 - DNA, 120 bp, Artificial Sequence
  ENSG00000155511_38 (sequence is synthesized)
accccctacttctatccaattttctctgctaggggttatcattagcaattgacatgctaaaggttttggagcccacctaggggtaggtgcagctttattggcttttctgtggattctctc

SEQ ID NO: 449251 - DNA, 120 bp, Artificial Sequence
  ENSG00000155511_39 (sequence is synthesized)
agtggacccacaccatctctatgtctctccactctcctgccttcagccatagcaaagaatccttccaaaatcaaactcttcacttttttgactcaagtgttgttgttcagtctctcgcgt

SEQ ID NO: 449252 - DNA, 120 bp, Artificial Sequence
  ENSG00000155511_40 (sequence is synthesized)
gtcaatgtggtcatggttcatgaaaccggaccctcaagatggatgattgcttttaactactgccagctgatgtctctcagcccctgccctcatacaagatttttctcagccttcagccta

SEQ ID NO: 449253 - DNA, 120 bp, Artificial Sequence
  ENSG00000155511_41 (sequence is synthesized)
ccactgcagaatccgatgtgacccaccattagggagtctgcatcttggaagagttggaaataaccctttaacatcaacatgcttcaaagactttttgcctttggcctagtaagatgcctc

SEQ ID NO: 449254 - DNA, 120 bp, Artificial Sequence
  ENSG00000155511_42 (sequence is synthesized)
tccagctactgagcccacaagtaacatgagcggataaaaagagacttgtttgtgctagaaatgagggtctatgctatgagggggtccaagactctggcgaaatgtgctttttcatcaatg

SEQ ID NO: 449255 - DNA, 120 bp, Artificial Sequence
  ENSG00000155511_43 (sequence is synthesized)
gagaaatgaaaggaaaacacaagcaagaaaaaagttaacttgtattatgtatttttactacacttttcttaaaaatagagcattgggaaaactctgaaagagactgacatttttctcaac

SEQ ID NO: 449256 - DNA, 120 bp, Artificial Sequence
  ENSG00000155511_44 (sequence is synthesized)
aggaatccatacttaacagttctggctttcattaaattttgctctttggtacctgggccttttatttaacatctatatttgttttaactctcttggcagatgtgtgaaaggattcttgct

SEQ ID NO: 449257 - DNA, 120 bp, Artificial Sequence
  ENSG00000155511_45 (sequence is synthesized)
tgatcaaacactaagtatttttttggttcttgtttttctttcaaatagccaggtttttttcttttggtatttgcataaaatgaaaatatcaccgaatattaaatcactgtggatccatta

SEQ ID NO: 449258 - DNA, 120 bp, Artificial Sequence
  ENSG00000155511_46 (sequence is synthesized)
ggtctgccctgagaggtcccgtaaacctagcggttttgaaactcagtgagcaaggcgtcttagacaagctgaaaagcaaatggtggtacgataaaggggaatgtggaagcaaggactccg

SEQ ID NO: 449259 - DNA, 120 bp, Artificial Sequence
  ENSG00000155511_47 (sequence is synthesized)
ctcacagagcccccgaagctgctcccccagattgatattgtgaacatcagcgacagctttgagatgacctatagatcctagtgcagtgattctcagctgggagtgattttgcccctttcc

SEQ ID NO: 449260 - DNA, 120 bp, Artificial Sequence
  ENSG00000155511_48 (sequence is synthesized)
ggagaactactattgacatttaggtaaaagcaatggatgtgctaaccatcctgtaatgcacagaacaaacccctacaacaaataattatctgggctaaaatgtcaataatgctgaggtta

SEQ ID NO: 449261 - DNA, 80 bp, Artificial Sequence
  ENSG00000155511_49 (sequence is synthesized)
aataattatctgggctaaaatgtcaataatgctgaggttaagaaacctcattctattttttgtactcattaactatcccc

SEQ ID NO: 449262 - DNA, 120 bp, Artificial Sequence
  ENSG00000155511_50 (sequence is synthesized)
atattttatgttgggctaggggcctgcctggaggacatttacaagtgttcagtggctggtaactgaattagagtgcctggagatatagtctgttcccagttctccaaaggagtctatgcc

SEQ ID NO: 449263 - DNA, 120 bp, Artificial Sequence
  ENSG00000155511_51 (sequence is synthesized)
tgacttacagctgaacccacattcccagcagcttcagcctgggggctgggggagcgggcagaccgagctcagaaaggcaggggagggtaaagaggactgtggggttgcccctttcaggac

SEQ ID NO: 449264 - DNA, 120 bp, Artificial Sequence
  ENSG00000155511_52 (sequence is synthesized)
cgcactccaggcaagagcatgtgaaatggaggaaccatcgctttggaggaaaaaaaaaatcaggctggaaagggtggtgggtgtttaaggagttaactctattgcttggtagatggtgct

SEQ ID NO: 449265 - DNA, 120 bp, Artificial Sequence
  ENSG00000155511_53 (sequence is synthesized)
cttcttctggaatacctcctgaaggacttgcctgaggctattttacagctacctttttttataagtagaaagagtgcactgtaaaataacaacatatatagtaaatgtataaaccagtta

SEQ ID NO: 449266 - DNA, 120 bp, Artificial Sequence
  ENSG00000155511_54 (sequence is synthesized)
accagttacataactgcttattatcaagtattatgtactgtacatgactgtatgtgttatacttttatatacaaccacagcacagtaggtttgtttaagccagcatcaccacaaacacat

SEQ ID NO: 449267 - DNA, 120 bp, Artificial Sequence
  ENSG00000155511_55 (sequence is synthesized)
gtgcaattgatattttgtcgggcatacatgtgctgcagtacccatctctttcagcctctccagctagctggcggcttggagtggccatggagtaacttgctttgtttcctgacacctgtt

SEQ ID NO: 449268 - DNA, 120 bp, Artificial Sequence
  ENSG00000155511_56 (sequence is synthesized)
aaaaactgtattctgtggcggctagtggctgctgctttgcatttaacactactatcctgaacacagctgatctctctacaggttatttcagcagaagccctggtctaggagagtctatga

SEQ ID NO: 449269 - DNA, 120 bp, Artificial Sequence
  ENSG00000155511_57 (sequence is synthesized)
agttccagcttacaccagacatgaccagcatccagaaagacctgaaagaagcttgaatcctctcactagaatccctgcaaaatgactcatgtaattgctctgtggggattatttccaaac

SEQ ID NO: 449270 - DNA, 120 bp, Artificial Sequence
  ENSG00000155511_58 (sequence is synthesized)
ctttctgcgctagaccaatgaaaggagggcctgtgggtaggtggtggtgttgcaaaaatgacttcagttgccattcgtctttgtaagagaaagccctccaagaaaaatttctagaggctt

SEQ ID NO: 449271 - DNA, 120 bp, Artificial Sequence
  ENSG00000155511_59 (sequence is synthesized)
ctgagtgattccagcagttggcattttagcccctgcaatgcttcatgtaatggatttgctttttcactgtcagctaactttaatgccagcacgatgggtgcttgggttgactgcatcttc

SEQ ID NO: 449272 - DNA, 120 bp, Artificial Sequence
  ENSG00000155530_0 (sequence is synthesized)
acaggccccagaatcctccgcggttccccttgcctggggtcagtctcctaggcaaccccgctaaacaagatggcgacctccgagagggctctcctgaggaccagagctgcctctctcctg

SEQ ID NO: 449273 - DNA, 120 bp, Artificial Sequence
  ENSG00000155530_1 (sequence is synthesized)
agaggcttgggcagatcccgaactggagcccgatcgttacagtttcgcgcagaaaaagagcgtcagccttgctggtcttttcccatggggcagaagacgaaaggcagctctaacatagcc

SEQ ID NO: 449274 - DNA, 120 bp, Artificial Sequence
  ENSG00000155530_2 (sequence is synthesized)
tcctcctacctgctccagcagctcatgcaccgctatcaggagctggactcggacggagatgaggaccagggcgagggcgaggcgggatccgaggagtcctcagagtccgaaatgctgaat

SEQ ID NO: 449275 - DNA, 120 bp, Artificial Sequence
  ENSG00000155530_3 (sequence is synthesized)
ttggaggaggaatttgatggggtcctgagagaggaggctgtggccaaagcactccatcacttggggcgctcaggctctgggactgagcaagtctacctcaatctaactttatcaggttgt

SEQ ID NO: 449276 - DNA, 120 bp, Artificial Sequence
  ENSG00000155530_4 (sequence is synthesized)
aatttaattgatgttagcattctctgtggatatgttcatctacagaagttggatctttcagcgaataaaattgaagatttatcttgtgtgagttgtatgccttatctcctagaacttaat

SEQ ID NO: 449277 - DNA, 120 bp, Artificial Sequence
  ENSG00000155530_5 (sequence is synthesized)
gcttctcaaaataatttgactacgttcttcaatttcaagccacccaaaaacctcaagaaggcggatttttcccacaaccaaatttctgaaatttgtgatttgtcagcgtatcatgctctc

SEQ ID NO: 449278 - DNA, 120 bp, Artificial Sequence
  ENSG00000155530_6 (sequence is synthesized)
actaaactaattttggatggcaatgagatagaagaaatcagtggactagagatgtgcaacaacctaattcaccttagtttggccaacaataagatcacgacaattaatggcttaaacaag

SEQ ID NO: 449279 - DNA, 120 bp, Artificial Sequence
  ENSG00000155530_7 (sequence is synthesized)
ttaccaatcaaaatactttgtctgagcaataaccagattgagatgatcacaggtttggaggatctgaaagccctgcagaacctggatctgtcccacaatcagataagcagcctccaaggc

SEQ ID NO: 449280 - DNA, 120 bp, Artificial Sequence
  ENSG00000155530_8 (sequence is synthesized)
ttagagaatcatgacctcctggaagtgatcaacctggaggataataagattgctgagctgagagaaatagaatacattaaaaatttacccatccttcgagttctcaatcttctagaaaat

SEQ ID NO: 449281 - DNA, 120 bp, Artificial Sequence
  ENSG00000155530_9 (sequence is synthesized)
ccaattcaggaaaagtctgaatattggttcttcgtaatttttatgcttctgcgattaacagaattagatcagaagaagattaaagtggaagaaaaggtttcagcagtgaataaatatgat

SEQ ID NO: 449282 - DNA, 120 bp, Artificial Sequence
  ENSG00000155530_10 (sequence is synthesized)
cctccccctgaagtggttgcagctcaagaccacctgacccatgttgtcaacagcgtgatgcagccgcagaggatctttgacagcactcttcccagcctggatgccccttatcccatgctg

SEQ ID NO: 449283 - DNA, 120 bp, Artificial Sequence
  ENSG00000155530_11 (sequence is synthesized)
atactagctggtcctgaagcttgtgggaaacgagagcttgcccatcgcctctgcagacagtttagcacttacttcagatatggggcctgtcataccacaagaccaccttactttggagaa

SEQ ID NO: 449284 - DNA, 120 bp, Artificial Sequence
  ENSG00000155530_12 (sequence is synthesized)
ggggatcgagttgattatcattttatctctcaagacgtttttgatgaaatggtgaacatggggaaattcattctaacatttagttatggtaatcacaagtatggattaaatagggacacc

SEQ ID NO: 449285 - DNA, 120 bp, Artificial Sequence
  ENSG00000155530_13 (sequence is synthesized)
tggaaatagaaggtgtaagaagtttgaaatattcctattttgagcctcgttatatcctggtggtgcccatgaacaaggaaaaatatgagggatatttgcggagaaaaggattattcagtc

SEQ ID NO: 449286 - DNA, 120 bp, Artificial Sequence
  ENSG00000155530_14 (sequence is synthesized)
gtgcagaaattgaatttgctgtctccagagtggacctttatattaaaattaatcagaattttccgggatattttgatgaggtaatcaatgcagatgatctggatgttgcctaccaaaaac

SEQ ID NO: 449287 - DNA, 120 bp, Artificial Sequence
  ENSG00000155530_15 (sequence is synthesized)
tgagtcagctcattagagaataccttggattgactgaggaacctgccaagagtttggctacaactgcagatgttaagacatcccacctgaaacctgaagcgcatcctacaaagtatattt

SEQ ID NO: 449288 - DNA, 120 bp, Artificial Sequence
  ENSG00000155530_16 (sequence is synthesized)
cttcgaatatgggtgatttcctgcattctacagacagaaactacctcattaaattttgggccaaactttcagccaaaaaaacaccagcggaaagagattctatacacagacagcacgagg

SEQ ID NO: 449289 - DNA, 120 bp, Artificial Sequence
  ENSG00000155530_17 (sequence is synthesized)
cagcccggcaagctctaatgggaaggatacgccctgatcacacactcctatttcaaaggggtccagtaccagcacctctcaccagtggtctacactattatacaactttagaagaactct

SEQ ID NO: 449290 - DNA, 120 bp, Artificial Sequence
  ENSG00000155530_18 (sequence is synthesized)
ggaaaagttttgatctttgtgaagactattttaaacctccatttggaccatatcctgaaaagagtgggaaggattccttggtttccatgaaatgttcattgtttcggttctgtccgtggt

SEQ ID NO: 449291 - DNA, 120 bp, Artificial Sequence
  ENSG00000155530_19 (sequence is synthesized)
caaaagaattgcctttccagcctccggaggggagcatttcttcacacctaggatcaggagccagtgacagtgagaccgaagagacccggaaagcactacctatacaatcattttcacatg

SEQ ID NO: 449292 - DNA, 120 bp, Artificial Sequence
  ENSG00000155530_20 (sequence is synthesized)
aaaaagagtctcaccaacacagacaacactcggtcccagtcatcagtcgcccaggttccaacgtcaaacccaccctccctccaatccctcagggccgcaggtagactagcacttgatgtc

SEQ ID NO: 449293 - DNA, 120 bp, Artificial Sequence
  ENSG00000155530_21 (sequence is synthesized)
tgatcctaacatggaaaacctgctctgctgatgtcgaattccttgccttacctggccatgggtccagctgtttctcactcaacccattacccacggaagaatgttctacctgccttaatt

SEQ ID NO: 449294 - DNA, 120 bp, Artificial Sequence
  ENSG00000155530_22 (sequence is synthesized)
ctatcagccagtttctcttgtgattctttggctggtgtcttttagttttttaattaaaaaattgtttcttaaatgatttttaaagatgtgagtttttttaatgtgagttattcttagctt

SEQ ID NO: 449295 - DNA, 120 bp, Artificial Sequence
  ENSG00000155530_23 (sequence is synthesized)
ttaaaaatgtcatttcatttttttttctatagctataaataattttttccacctgctccctgctcggaaatatcagatggaaaaatctcccaagatctctgcaccgtgatatgcagagtg

SEQ ID NO: 449296 - DNA, 120 bp, Artificial Sequence
  ENSG00000155530_24 (sequence is synthesized)
gctttctgatatatccaactgggattgtgctcttaaaatttcaatatgtccatttacaacattcctgtatgctctagaggattgatttattttgctctgattatgaaaggattgcagagt

SEQ ID NO: 449297 - DNA, 120 bp, Artificial Sequence
  ENSG00000155530_25 (sequence is synthesized)
tccatttaacttgtcgccaacatgatatcgactgcatctctcaaaaggaattaatgtaattttggggggttcttgacttactttagcaacacgaaagaataaagagcaacagttgattct

SEQ ID NO: 449298 - DNA, 120 bp, Artificial Sequence
  ENSG00000155530_26 (sequence is synthesized)
acaactgcaggagctcccgctagcaagaagactgtctctggggtgccagcacacctggttccatctcccaggtgcttggcgaaactgcaagcagatggccagatgacagagcatctctct

SEQ ID NO: 449299 - DNA, 120 bp, Artificial Sequence
  ENSG00000155530_27 (sequence is synthesized)
ggaatgcaaattcatgccaaggacctagaaaatcagagcgtaactcctgcccagaaccaagagctggctcaggatggagaaacccatcaaaaagagctttctcctgacagccatctcaat

SEQ ID NO: 449300 - DNA, 120 bp, Artificial Sequence
  ENSG00000155530_28 (sequence is synthesized)
cctgagctccctcaacacctcagttcatcagcactgggtcttcctcagcaggcccaggacctatccctaaacccaacggaagaggatgtccaacaatcagatcttcccctaaaacaaata

SEQ ID NO: 449301 - DNA, 120 bp, Artificial Sequence
  ENSG00000155530_29 (sequence is synthesized)
gccactgagacagatgtccctgaggtggaagccagtgaggttgggcagtctcccatcaccccgaccctggtgcctcctgtgcacccttcccctccctcgtcccgcagccctcagccaggc

SEQ ID NO: 449302 - DNA, 120 bp, Artificial Sequence
  ENSG00000155530_30 (sequence is synthesized)
caggacaaggagtcaggggaggcccaggtaacccctactggccctcctctgtctgaacctctacagggacctggccccactcccctcagccctcagagaattcaggatgaggaaattgag

SEQ ID NO: 449303 - DNA, 120 bp, Artificial Sequence
  ENSG00000155530_31 (sequence is synthesized)
tcagacaaacttccacccagcagttcccaccatgatcctccaaaagattcttcccacactgacttggtgcagaaacttgctggcgattctcagcaagctctgaaggaggaaacctccaaa

SEQ ID NO: 449304 - DNA, 120 bp, Artificial Sequence
  ENSG00000155530_32 (sequence is synthesized)
ccggaagccatccgagtcagtatccctcacccagaactgccacatccccaagacttagcaacagataccaagcagccccaggccaggggagccccggggaccttgcttcctagaagccgg

SEQ ID NO: 449305 - DNA, 120 bp, Artificial Sequence
  ENSG00000155530_33 (sequence is synthesized)
ctggctcccactcggctgccccagcctcaggtgctggctcccctccagagcaggaggcccacacccaaactcctatcgcccagcagggaagaggctttaggaacaacctcccatcaaacc

SEQ ID NO: 449306 - DNA, 120 bp, Artificial Sequence
  ENSG00000155530_34 (sequence is synthesized)
atgacggtctctcccaggcttccaccaacccgggaagcagacaccagtaaacttcctcccatcagccctccgcactcaaaaccaccaccaaatctgagcccccaggcagcccacagtctt

SEQ ID NO: 449307 - DNA, 120 bp, Artificial Sequence
  ENSG00000155530_35 (sequence is synthesized)
cagcaagtccaggaagagaaggtcagtgaggtgaaactccctcttatcagtccccccagccaggagcaagcagaacctcgcatcctcagtcccgcccaggaggaggcggctcagaaagtg

SEQ ID NO: 449308 - DNA, 120 bp, Artificial Sequence
  ENSG00000155530_36 (sequence is synthesized)
aggctccctcgcattcctgctcctcttccggagccagggctgccccagaactcggggactcagcctgatccaaggcctgcaaaggaaaggaaagctccccaagcaggcagctcctccagg

SEQ ID NO: 449309 - DNA, 120 bp, Artificial Sequence
  ENSG00000155530_37 (sequence is synthesized)
aggaagattccagacatgcgggcctcaccccacaaccaggggccacttcagcagacaggggctagggaaaaaaagctccccaaccagaaagggacggctagaggactggcacctctggaa

SEQ ID NO: 449310 - DNA, 120 bp, Artificial Sequence
  ENSG00000155530_38 (sequence is synthesized)
gaggcaccacctgggaaccaccagccagccttgcagctagaaccccacgatcagccagctcccaccatggtgcccgacgatcccaaccccagccctcctcttgtttcttgtctaagctag

SEQ ID NO: 449311 - DNA, 120 bp, Artificial Sequence
  ENSG00000155530_39 (sequence is synthesized)
cagaagttggatctttcagcgaataaaattgaagctaagtactagctgctgcttctgcttcaagaaggatctccatttacctgcccacagaaagatcatctttcaggagagtctggtggt

SEQ ID NO: 449312 - DNA, 120 bp, Artificial Sequence
  ENSG00000155542_0 (sequence is synthesized)
ctcgatccgccttccccgcgccgtcctggtcacggccccgcggggcagccatgcctggccgtctgctgcggggcctgtggcagcgatggcgccgttacaagtaccgcttcgttccctgga

SEQ ID NO: 449313 - DNA, 120 bp, Artificial Sequence
  ENSG00000155542_1 (sequence is synthesized)
tcgcactgaacctaagccacaacccgaggaccctccgatatgttccagaggaatccaaagacaaagttatctcagatgaagatgtcctaggaacattactgaaagttttccaggctctat

SEQ ID NO: 449314 - DNA, 120 bp, Artificial Sequence
  ENSG00000155542_2 (sequence is synthesized)
tcttaaatgatttcaataaacaatcagaaatcttgtctatgcttccagaatctgttaaatcaaaatatcaagacctactggcagttgaacatcaaggggtgaaactgcttgaaaacagac

SEQ ID NO: 449315 - DNA, 120 bp, Artificial Sequence
  ENSG00000155542_3 (sequence is synthesized)
atcaacagcaaagtacctttaaaccagaagaaattctttacaagactttgggtttcagtgttgcccaagcaactagctcattgatttctgctggaaaaggtgtcttcgttactaaaggat

SEQ ID NO: 449316 - DNA, 120 bp, Artificial Sequence
  ENSG00000155542_4 (sequence is synthesized)
tggtaccaaaaggcgcagtcgtatctatgtatcctggtacagtatatcagaagtatgagccgatctttttccagtccattggaaatccgtttatttttagatgcctggatggggtactca

SEQ ID NO: 449317 - DNA, 120 bp, Artificial Sequence
  ENSG00000155542_5 (sequence is synthesized)
aatgagtgatagtacatggctaacgtcagaaattcataaccctctggctgtgggacagtatgtcaacaattgttccaatgacagagcagctaatgtctgttatcaggaatttgatgtgcc

SEQ ID NO: 449318 - DNA, 120 bp, Artificial Sequence
  ENSG00000155542_6 (sequence is synthesized)
tgcagttttccctatagaactgaagcagtatcttccaaacattgcctacagctatgacaaacaaagcccacttcgatgtgttgttcttgtcgcacttagggacatcaatcaaggagaaga

SEQ ID NO: 449319 - DNA, 120 bp, Artificial Sequence
  ENSG00000155542_7 (sequence is synthesized)
gcttttttcaaactactacacaattgtcagctaactctgtgaatcagaaattattaggttttctactcagctattaattctaagtgttttttgttaatcacttctctgagttctacctgt

SEQ ID NO: 449320 - DNA, 120 bp, Artificial Sequence
  ENSG00000155542_8 (sequence is synthesized)
aaaacaaatattttgagacttaattggaataggaatttcttatgtttttgttgatattatatttatgttccaatttcatgataaaagctacttgcttcattacaatttcaaatttgtaat

SEQ ID NO: 449321 - DNA, 120 bp, Artificial Sequence
  ENSG00000155542_9 (sequence is synthesized)
gcaattccaagtttaattggttttcacctaaatacacaatagcttattaaattaaaacctactctttgaacttataatttcaatttttcttttgtttattttgtaagctctgtggtggtt

SEQ ID NO: 449322 - DNA, 120 bp, Artificial Sequence
  ENSG00000155542_10 (sequence is synthesized)
tataaaattgtagccaggcatcagcagttcttgtagtactgctgatgtgtacaaacttctgtaaaaactttatttttacagaattgagtaaaaaatacctattgtgttgccatgagtaaa

SEQ ID NO: 449323 - DNA, 120 bp, Artificial Sequence
  ENSG00000155542_11 (sequence is synthesized)
ttgcgttcggcactgactggggagcttgtatctgggcaaaaatggaaactttttaaaaagactgcccttaccgcgtgagagtgcgtggctttttctccaccaggggttaattaggtgctt

SEQ ID NO: 449324 - DNA, 120 bp, Artificial Sequence
  ENSG00000155542_12 (sequence is synthesized)
acgtggttaaagaagcccatcccggctgtgagaatagcgtgcagtagctcgcgcgttaagaacgggcagaacgccactcaaaagcacgtcgggatggtgggtttcggattggggaccctc

SEQ ID NO: 449325 - DNA, 120 bp, Artificial Sequence
  ENSG00000155542_13 (sequence is synthesized)
aatggaataatgtaaggaccccacagcatgtggtatagaatgggcctttcataagtactgactacttgggtgggaagtgttgggagttagctaactagaactccctcaaacaattctttt

SEQ ID NO: 449326 - DNA, 120 bp, Artificial Sequence
  ENSG00000155542_14 (sequence is synthesized)
cacacatgagaataagcttatagttccttaaggccaggaacccagaagttatgcaggtaagtttggcttttatcagttgaagggtagtgaatagaaacttttcccattttcaggaccctc

SEQ ID NO: 449327 - DNA, 120 bp, Artificial Sequence
  ENSG00000155542_15 (sequence is synthesized)
aaccagggctagcgcttgtgtgcgcccacggaagcacccgagcgaccggagaaagaaaaagtggtcaaggggacctccttccagctctacgcgcctctcattcagagaggtgaggtcagg

SEQ ID NO: 449328 - DNA, 120 bp, Artificial Sequence
  ENSG00000155542_16 (sequence is synthesized)
aaaggggaaggacgaagccccagagcaacagaagtcaggcggtgccaggaacactgagagcggagccaggggaaggcggccgagcgcggccccctctcctcccgggccggggcgggcccg

SEQ ID NO: 449329 - DNA, 120 bp, Artificial Sequence
  ENSG00000155542_17 (sequence is synthesized)
agtatcttccaaacattgcctacagctatgacaaacaaaggtgacatgactgtctacgtagaaaactccaaagaatcaacaaaaaatcgcctgtaactaataagcacttacagcaaagtt

SEQ ID NO: 449330 - DNA, 120 bp, Artificial Sequence
  ENSG00000155542_18 (sequence is synthesized)
tcaggagacaaggttaatacacaaaagtcaactgctttcctatataacagcaatgacgattgaaatttgaaatttaaaacacaagaccatttacattagcaccccaaaattaaaatactt

SEQ ID NO: 449331 - DNA, 120 bp, Artificial Sequence
  ENSG00000155542_19 (sequence is synthesized)
agacagccgtgacagagaaactaggcggtccgctcctgggacgcggtctcgggggcgggttcgcccctgaggcccggtgacccttcgcccgcaaccagggctagcgcttgtgtgcgccca

SEQ ID NO: 449332 - DNA, 120 bp, Artificial Sequence
  ENSG00000155542_20 (sequence is synthesized)
cggaagcacccgagcgaccggagaaagaaaaagtggtcaaggggacctccttccagctctacgcgcctctcattcagagagaatctgttaaatcaaaatatcaagacctactggcagttg

SEQ ID NO: 449333 - DNA, 120 bp, Artificial Sequence
  ENSG00000155542_21 (sequence is synthesized)
gtgatgacattcagcttggctgttgggtgtagtacgggaaagagctgaacttcgtttctgcctctggctctcccacttactggctttgggaccttgaacaagttccctaacaattttgct

SEQ ID NO: 449334 - DNA, 120 bp, Artificial Sequence
  ENSG00000155545_0 (sequence is synthesized)
tcgttcgccctaaaggtaccaatatggcggaggcttcttttggaagttcgagcccagttgggtctttgtcttctgaggatcatgattttgaccccactgctgagatgttggtccatgact

SEQ ID NO: 449335 - DNA, 120 bp, Artificial Sequence
  ENSG00000155545_1 (sequence is synthesized)
atgatgatgaaagaactcttgaagaagaggaaatgatggatgagggtaaaaacttcagttcagaaattgaagacttagaaaaggaaggaaccatgcctctagaagatttactggcattct

SEQ ID NO: 449336 - DNA, 120 bp, Artificial Sequence
  ENSG00000155545_2 (sequence is synthesized)
atggctatgaacctacaattccagcagttgcaaattccagtgcaaatagttccccaagtgaactggcagatgaactaccagacatgacactagacaaagaggaaatagcaaaagacctgt

SEQ ID NO: 449337 - DNA, 120 bp, Artificial Sequence
  ENSG00000155545_3 (sequence is synthesized)
tgtcaggtgatgacgaggaaactcagtcttctgcggatgatctgacgccatctgtgacttcccatgaaacttctgatttcttccctaggcctttacgatcaaatactgcatgtgatggtg

SEQ ID NO: 449338 - DNA, 120 bp, Artificial Sequence
  ENSG00000155545_4 (sequence is synthesized)
ataaggaatcagaggttgaagatgttgaaacagacagtggtaattcacctgaagatttgaggaaggaaataatgattggtttacaatatcaggcagagattcccccttatcttggagagt

SEQ ID NO: 449339 - DNA, 120 bp, Artificial Sequence
  ENSG00000155545_5 (sequence is synthesized)
acgatggtaatgagaaagtatatgaaaacgaagaccagttactttggtgtcctgatgtggttttggagagcaaagttaaggaataccttgttgagacttcattaaggactggcagtgaaa

SEQ ID NO: 449340 - DNA, 120 bp, Artificial Sequence
  ENSG00000155545_6 (sequence is synthesized)
aaataatggataggatttctgcaggaacacacacaagggacaatgaacaggcattatatgaacttctcaagtgtaaccacaatataaaggaagcaatcgaaagatactgctgcaatggaa

SEQ ID NO: 449341 - DNA, 120 bp, Artificial Sequence
  ENSG00000155545_7 (sequence is synthesized)
aggcctctcaaggaatgactgcatggacggaagaagaatgccgaagctttgaacatgcactcatgctttttggaaaagattttcatcttatacagaagaataaggtgagaactaggacag

SEQ ID NO: 449342 - DNA, 120 bp, Artificial Sequence
  ENSG00000155545_8 (sequence is synthesized)
ttgctgagtgtgtagcattctactatatgtggaagaaatctgaacgttatgattactttgctcaacagacaagatttgggaaaaaaagatataaccatcaccctggagttacggactata

SEQ ID NO: 449343 - DNA, 120 bp, Artificial Sequence
  ENSG00000155545_9 (sequence is synthesized)
tggatcgtttagtagatgaaacagaagctttgggtgggacggtaaatgcttcagccttaacttctaaccggcctgagcctattcctgatcaacagctaaacattctcaactccttcactg

SEQ ID NO: 449344 - DNA, 120 bp, Artificial Sequence
  ENSG00000155545_10 (sequence is synthesized)
ccagtgacttgacagctttgaccaacagtgtagcaaccgtctgcgaccccacagatgtgaattgtttggatgatagctttcctccactgggcaacacaccccgtggacaagttaatcatg

SEQ ID NO: 449345 - DNA, 120 bp, Artificial Sequence
  ENSG00000155545_11 (sequence is synthesized)
tgcctgttgtaacagaagagttactcaccctgcccagcaatggggaaagtgattgttttaatttatttgagactggattttatcactcggagctaaaccctatgaacatgtgcagtgaag

SEQ ID NO: 449346 - DNA, 120 bp, Artificial Sequence
  ENSG00000155545_12 (sequence is synthesized)
agtcagagagaccagcaaaaagattgaaaatgggcattgccgtccctgaatcctttatgaatgaagtttctgtaaataacctgggtgtggactttgaaaatcacacacatcacatcacca

SEQ ID NO: 449347 - DNA, 120 bp, Artificial Sequence
  ENSG00000155545_13 (sequence is synthesized)
gtgccaaaatggctgtttctgtggctgactttggcagtctctctgccaacgagaccaatggtttcatcagtgcccatgctctgcatcagcacgcggccctacactctgagtgacctgagt

SEQ ID NO: 449348 - DNA, 120 bp, Artificial Sequence
  ENSG00000155545_14 (sequence is synthesized)
gaggatcccggaactgcgtgtgcagcaccagtaaacttgaggggagctatcaggtttgcatagtctttcactggaagtttgaacctttctcactatgacatcagtgatgtcagtatgtat

SEQ ID NO: 449349 - DNA, 120 bp, Artificial Sequence
  ENSG00000155545_15 (sequence is synthesized)
agaactatatcttgatttatcaagagtattttcatttttcaatccataaatgtggaaatgaactatgatcagcagagttgggaactaagattgaactctgtggtgcagctttaagctctg

SEQ ID NO: 449350 - DNA, 120 bp, Artificial Sequence
  ENSG00000155545_16 (sequence is synthesized)
cttctctcttcctcatctcccaatacctcttccccactcccttctttttctattcttttgtgttccccactgccctcactcccaattttaaaacctgtagacagaggccaccagctcaaa

SEQ ID NO: 449351 - DNA, 120 bp, Artificial Sequence
  ENSG00000155545_17 (sequence is synthesized)
accagcacagatgttctgaactgaatggtgtggcctgtttttgtgtaaattccttttgccgtaatggatgcagtggaataacaatgtttacaggtaccgatcccgatccctgctcaatgt

SEQ ID NO: 449352 - DNA, 120 bp, Artificial Sequence
  ENSG00000155545_18 (sequence is synthesized)
agcatttttttggttttattttcttaataaaagcaggggtaggtttctttaaactgcacaaacatgcaaggattttttaaaaatggaaacttctctcatgttattcaactagagcacttc

SEQ ID NO: 449353 - DNA, 120 bp, Artificial Sequence
  ENSG00000155545_19 (sequence is synthesized)
agtttacaaaacagcaagtccatctttatggaagccagcacaaggaactgtgtgcaaataatgaagacgcttgcttggatcctgtttcaaaattctagaccagggctaccttacacagaa

SEQ ID NO: 449354 - DNA, 120 bp, Artificial Sequence
  ENSG00000155545_20 (sequence is synthesized)
ttggtcatgttactgccaggagatttctgtgtaacttcatttattggctacagttttggcatttgaagatgtggtactcagatggggttttgtccaccattgtcaagattgtaatcttaa

SEQ ID NO: 449355 - DNA, 120 bp, Artificial Sequence
  ENSG00000155545_21 (sequence is synthesized)
gcagtcgacttgcagaggcacagtctacaaagcctaggatgttgccactcaatggtttacattttgggacatcttttaagttgtttgtagcactgcagttcaaagtgttaatatttagag

SEQ ID NO: 449356 - DNA, 120 bp, Artificial Sequence
  ENSG00000155545_22 (sequence is synthesized)
ggacttctagattttatacctaatgcagtagaaccttgaagtatatttaagcttttttgttaagcttgaacagttggcaagaataatgtgagttcctatctgaaatagaatggtacatta

SEQ ID NO: 449357 - DNA, 120 bp, Artificial Sequence
  ENSG00000155545_23 (sequence is synthesized)
ccacttttaagttttaaaaattgatagatgttcagatgtatctcaaactcagttttatttttattccaaatattgtgaatgagaagccattgtcctaaactttggccatttttgtgctat

SEQ ID NO: 449358 - DNA, 120 bp, Artificial Sequence
  ENSG00000155545_24 (sequence is synthesized)
aaacatgcatttttaagttataaggtgaatcaaacaatatgtaatacagtattaggatgtaatctttgcttttgtagtactgttaaaatagagaattatgttgtttgcaccgtcttaatt

SEQ ID NO: 449359 - DNA, 120 bp, Artificial Sequence
  ENSG00000155545_25 (sequence is synthesized)
aaaattcttgatttttactagttgctttgcaaaaaacaaatgtttggctgcattgctaatatttgtaagtataagttgcttcaaggttgtgctgatgagtagataggatgtagtgatctt

SEQ ID NO: 449360 - DNA, 120 bp, Artificial Sequence
  ENSG00000155545_26 (sequence is synthesized)
agtagtgattgaaagggagggtatttattatacaaactgtgaactgcaatgacatccttagttttggatgatgtgtattcttgtttttctttgcagcattttaatgaagattgctttgaa

SEQ ID NO: 449361 - DNA, 120 bp, Artificial Sequence
  ENSG00000155545_27 (sequence is synthesized)
gtgtttacgcagtagcacattagtataaaatttagtttagcacagtggacaaaaagtagttaaattaataacttaaaatcagtctctaatttatacatctgaagtatagcattcctgtat

SEQ ID NO: 449362 - DNA, 120 bp, Artificial Sequence
  ENSG00000155545_28 (sequence is synthesized)
gcacacagtaaataatgggtagcctgggctctgtgttactttcttgtatttttatccaagttgtcagcttcttattgctgtgttgttgtgctaaactttgaaccttatttcttttattaa

SEQ ID NO: 449363 - DNA, 120 bp, Artificial Sequence
  ENSG00000155545_29 (sequence is synthesized)
aaatcagtacactttctataatttagtaagatactggccataatcttccattgttataaccttaattttcactctgggtttacagtggctggtctgtataaataatttacacaaagatga

SEQ ID NO: 449364 - DNA, 120 bp, Artificial Sequence
  ENSG00000155545_30 (sequence is synthesized)
ctgaatgctaataccagttgcacttaaatgaacatgcccattctcagtagctgatgcagtaatatattcagtttatctatgcattgctggggtcttgatataagatggaaacagtgtttc

SEQ ID NO: 449365 - DNA, 120 bp, Artificial Sequence
  ENSG00000155545_31 (sequence is synthesized)
ttatctaaagttttgattatcagcaagttgaatggacactttagttatttaaataaagatttttgaccaaaatccagaaaatggtatgagagaaaaataaattccagctagtttaataga

SEQ ID NO: 449366 - DNA, 120 bp, Artificial Sequence
  ENSG00000155545_32 (sequence is synthesized)
tttttaaatgtcaatctgattttagcctcttagagagtgctaactagctggtaatgtttacttttaattccttgttaaaatgaggcaataatttgcaagatttttgtatataagtgtaaa

SEQ ID NO: 449367 - DNA, 120 bp, Artificial Sequence
  ENSG00000155545_33 (sequence is synthesized)
ttcttcatatctttttagatctaattcaatattttctgactacttctgccatgtataataccatttttgtgcatgcttgatgtgacattcataaattgtaccactatgactttatccatg

SEQ ID NO: 449368 - DNA, 120 bp, Artificial Sequence
  ENSG00000155545_34 (sequence is synthesized)
taaaatagctatttattgaattttcttttaaaagctggatttactgggttttttttttctctcagtttaaacatcttaacagagaatttgttactgtttattaaaagaattgcatttgga

SEQ ID NO: 449369 - DNA, 120 bp, Artificial Sequence
  ENSG00000155545_35 (sequence is synthesized)
agcaagaaaacaaccggatttgcaatcatgtgaagaaacaataatgcctttattatcaagtgttaagcacaattcttataacaaactgtgataaattctttttgtttttttttcctttgc

SEQ ID NO: 449370 - DNA, 120 bp, Artificial Sequence
  ENSG00000155545_36 (sequence is synthesized)
cccattattttcttatgaacaaaccaaaaattcatggtgagcagttgcagtgttggctgatatatcttttatgtacagggaatttgaaaaggacagtggattcatttagaagtgtaactg

SEQ ID NO: 449371 - DNA, 120 bp, Artificial Sequence
  ENSG00000155545_37 (sequence is synthesized)
gtgctgtgattatagcaatacatttgttagttgtacttcatctttttcatgctagctttttaaatgtttagttttcctcttgtcatggtcagctgctgaatttacttgaaggatgtagaa

SEQ ID NO: 449372 - DNA, 120 bp, Artificial Sequence
  ENSG00000155545_38 (sequence is synthesized)
tactgtttaaaaaatactaaaatttgtacaattagatcaaagaattgtgcaatcatttcctttttaatttttaaaatgttgaggctcataaatatttgagaacatcagatctaatagagc

SEQ ID NO: 449373 - DNA, 120 bp, Artificial Sequence
  ENSG00000155545_39 (sequence is synthesized)
atagtgatactatttaatttaaccaaagtctctagtgaatatttcaactttgaatgtaaactaacaaataaacctgaccaccaaggagattgtttgcccagagtttcaaagcacattgtc

SEQ ID NO: 449374 - DNA, 120 bp, Artificial Sequence
  ENSG00000155545_40 (sequence is synthesized)
tgtctacaaatggaaattgaaataatttataaaatattgacgttactatgttttttaaaaagttcctaattttttcactaaatggaggaaactattagttttattgttaaatatggtaga

SEQ ID NO: 449375 - DNA, 120 bp, Artificial Sequence
  ENSG00000155545_41 (sequence is synthesized)
aatattcctcttagatgaccagtgattccaattgtcccagtttgaaataagtaccctgtgagtatgagataaattagtgacaatcagaacaagtttcagtatcagatgttcaagaggaag

SEQ ID NO: 449376 - DNA, 120 bp, Artificial Sequence
  ENSG00000155545_42 (sequence is synthesized)
ttgctattgcattgattttaatatttgtacataaacactgatttttttgagcattattttgtatttgttgtactttaatacctggtgtacagttccagaaataaaaatctgggaatcttt

SEQ ID NO: 449377 - DNA, 120 bp, Artificial Sequence
  ENSG00000155545_43 (sequence is synthesized)
aagactgaattccttgtgagcagggattcttcagtaaatttcatttgtatgtccagtagcaagtagctagtagccctcagccaagcacttagaactgagtaaatgatgggaaggtggacc

SEQ ID NO: 449378 - DNA, 120 bp, Artificial Sequence
  ENSG00000155545_44 (sequence is synthesized)
aagattcaagtctgccatctcatgctaaacctggagcatatcctttgaatggaatggagaacagaggcactggcatcccttgggtctttgtcttctgaggatcatgattttgaccccact

SEQ ID NO: 449379 - DNA, 120 bp, Artificial Sequence
  ENSG00000155545_45 (sequence is synthesized)
gccgggcggaccgcggcggtggcggcggcggctgcgattggctcaggcgccccatccggggactgggctcggcgctgctcgttcgccctaaaggcttcttttggaagttcgagcccagtt

SEQ ID NO: 449380 - DNA, 120 bp, Artificial Sequence
  ENSG00000155561_0 (sequence is synthesized)
agaagggctctgttagtgcgcctctaagatggcgacgcctttggcggtaaattcggctgctagtctatggggtccttacaaagacatttggcataaagtgggaaatgctctttggagaag

SEQ ID NO: 449381 - DNA, 120 bp, Artificial Sequence
  ENSG00000155561_1 (sequence is synthesized)
acaacctgaagctgttcaccttcttgataagattttgaagaaacacaaacctgacttcatctcattgttcaaaaatccgccaaaaaatgttcaacagcatgagaaggttcagaaagccag

SEQ ID NO: 449382 - DNA, 120 bp, Artificial Sequence
  ENSG00000155561_2 (sequence is synthesized)
tacagagggagtcgccattcagggtcaacagggaactcgacttcttcctgaacagctcattaaagaagcctttattctcagtgacctttttgatattggagaattggcagctgttgagct

SEQ ID NO: 449383 - DNA, 120 bp, Artificial Sequence
  ENSG00000155561_3 (sequence is synthesized)
tcttcttgctggagagcatcaacagccacattttcctggccttaccagaggattagtagctgttcttctgtactgggatggaaagcgatgcattgcgaattccttgaaagccttgataca

SEQ ID NO: 449384 - DNA, 120 bp, Artificial Sequence
  ENSG00000155561_4 (sequence is synthesized)
gtctagacggggaaagacatggaccctagaactcagtccagagctggcttccatgacaacacgctttacagatgagctgatggagcaaggattgacttataaagttcttacgctggtgtc

SEQ ID NO: 449385 - DNA, 120 bp, Artificial Sequence
  ENSG00000155561_5 (sequence is synthesized)
acagattgatgtgaataatgagtttgagaaactacagcgagagagaggtttgggcagtgaaaaacatcgcaaagaggtttctgatctcattaaggagtgcaggcagtctcttgcagaaag

SEQ ID NO: 449386 - DNA, 120 bp, Artificial Sequence
  ENSG00000155561_6 (sequence is synthesized)
cctttttgcctgggcttgccagtcacctttaggcaaagaagacactctcctcctcattggacatttggaaagagtgacagttgaggctaatggctcactggatgcagtgaatctggctct

SEQ ID NO: 449387 - DNA, 120 bp, Artificial Sequence
  ENSG00000155561_7 (sequence is synthesized)
tcttatggcgcttctatactgttttgatatcagttttatagagcaaagcacagaggaacgagatgatatgattcatcaacttccactgttgacagaaaaacagtacattgcaacaattca

SEQ ID NO: 449388 - DNA, 120 bp, Artificial Sequence
  ENSG00000155561_8 (sequence is synthesized)
ctctcgtcttcaggactcacagctttggaaactgcctgggctccaagccactgttagacttgcctgggcgctggcattgaggggaatatcccagctacctgatgtgacagctctggcaga

SEQ ID NO: 449389 - DNA, 120 bp, Artificial Sequence
  ENSG00000155561_9 (sequence is synthesized)
attcacagaggcagatgaagcaatggcagaactcgcaattgctgacaacgttttcctgttcctcatggaatctgtagtggtatcagaatacttttatcaggaagaattttatattcgcag

SEQ ID NO: 449390 - DNA, 120 bp, Artificial Sequence
  ENSG00000155561_10 (sequence is synthesized)
agtccataatctcatcacagatttccttgcacttatgccaatgaaggtgaaacagctgaggaatcgggcagatgaagatgctcgaatgattcacatgagtatgcagatgggtaatgaacc

SEQ ID NO: 449391 - DNA, 120 bp, Artificial Sequence
  ENSG00000155561_11 (sequence is synthesized)
ccccatttcacttagaagggacctggaacacttaatgcttttgattggcgagctatataaaaagaacccttttcatctggagcttgctctagaatattggtgtcccacagagcctcttca

SEQ ID NO: 449392 - DNA, 120 bp, Artificial Sequence
  ENSG00000155561_12 (sequence is synthesized)
gactccgactatcatgggctcttatctaggggtggctcatcagcggccccctcaacgccaggttgtcttgtcaaagtttgttaggcaaatgggtgacctgttgcctccaactatttatat

SEQ ID NO: 449393 - DNA, 120 bp, Artificial Sequence
  ENSG00000155561_13 (sequence is synthesized)
tccttatttgaagatgctccagggattggccaatgggcctcagtgtgcccactactgtttcagcctgctcaaagtcaatggtagtagtcatgttgaaaatattcagggagcaggtggcag

SEQ ID NO: 449394 - DNA, 120 bp, Artificial Sequence
  ENSG00000155561_14 (sequence is synthesized)
tcctgtttcctgggaacatttctttcactccttgatgctttaccacgaacaccttcggaaggatcttccaagtgcagatagtgtccagtaccgtcaccttccttcccgtggcatcaccca

SEQ ID NO: 449395 - DNA, 120 bp, Artificial Sequence
  ENSG00000155561_15 (sequence is synthesized)
gaaggagcaagatggattgattgcttttttgcagctcacgtctaccatcattacttggagtgaaaatgctcgcttggcactctgtgaacaccctcagtggacccctgttgtggtgattct

SEQ ID NO: 449396 - DNA, 120 bp, Artificial Sequence
  ENSG00000155561_16 (sequence is synthesized)
gggactcctccaatgcagtattccccctgtcctaaaagctgagctactgaagacactcgcagcttttggaaaatctcctgaaattgctgcttccctctggcagtcattggaatacactca

SEQ ID NO: 449397 - DNA, 120 bp, Artificial Sequence
  ENSG00000155561_17 (sequence is synthesized)
gatactgcagaccgtgaggattccaagccaaaggcaagctattggtattgaggttgaactaaatgaaatagaatcccggtgtgaagaatacccattgactcgggccttttgccagcttat

SEQ ID NO: 449398 - DNA, 120 bp, Artificial Sequence
  ENSG00000155561_18 (sequence is synthesized)
tagtactctggtggagagctcatttccttctaatttgggtgctggactgcggccccctggctttgacccttatttgcagttccttagagactctgtgtttctacgattccgtacaagagc

SEQ ID NO: 449399 - DNA, 120 bp, Artificial Sequence
  ENSG00000155561_19 (sequence is synthesized)
ttaccggagagcagctgaaaagtgggaagttgctgaggtggttttggaggtgttttataaattgctcagagattatgagcctcagcttgaagattttgtagaccagtttgtggaactaca

SEQ ID NO: 449400 - DNA, 120 bp, Artificial Sequence
  ENSG00000155561_20 (sequence is synthesized)
aggagaagaaatcatagcctataagccacctggatttagtctgatgtatcatctgctgaatgagtcaccaatgttggagcttgctctcagtttactggaagaaggagttaagcagcttga

SEQ ID NO: 449401 - DNA, 120 bp, Artificial Sequence
  ENSG00000155561_21 (sequence is synthesized)
cacctatgccccctttcctgggaaaaaacacctggagaaagcagtacagcattgccttgcacttctcaatcttactctgcaaaaggaaaatctttttatggaccttctaagagagagtca

SEQ ID NO: 449402 - DNA, 120 bp, Artificial Sequence
  ENSG00000155561_22 (sequence is synthesized)
actggctctaatagtctgtcctttagaacagcttttgcagggaattaatcccagaactaagaaggcagataatgtggtaaacattgccagatacctatatcatggcaatactaatccaga

SEQ ID NO: 449403 - DNA, 120 bp, Artificial Sequence
  ENSG00000155561_23 (sequence is synthesized)
attggcttttgaaagtgccaagatcctctgttgtatctcttgcaactctaatattcagataaagttggttggagatttcacacatgaccagagtataagtcagaaactaatggctggatt

SEQ ID NO: 449404 - DNA, 120 bp, Artificial Sequence
  ENSG00000155561_24 (sequence is synthesized)
tgtggagtgtttggattgtgaagatgcagaagaatttgtacgtctggaagagggatcagaacttgaaaagaaattagttgcaattcgtcatgaaacaagaatccacatcttgaatcttct

SEQ ID NO: 449405 - DNA, 120 bp, Artificial Sequence
  ENSG00000155561_25 (sequence is synthesized)
cattacctctctggaatgcaatccacccaatcttgctctctacctgttgggctttgaattgaaaaaacctgtcagtactacaaacctacaagatccaggagtgttaggttgccctcggac

SEQ ID NO: 449406 - DNA, 120 bp, Artificial Sequence
  ENSG00000155561_26 (sequence is synthesized)
cttggagaaaggaacggaagggagaacaggcccagtggcggtgcgagaatctcctcagctggctgagctatgttaccaggtcatatatcagttatgtgcatgctctgatacatctggtcc

SEQ ID NO: 449407 - DNA, 120 bp, Artificial Sequence
  ENSG00000155561_27 (sequence is synthesized)
tactatgaggtacttgagaaccagccaggatttcttattttcccagttgcagtatctaccattttctaacaaagaatatgaaatatctatgctgaaccagatgtcatggcttatgaaaac

SEQ ID NO: 449408 - DNA, 120 bp, Artificial Sequence
  ENSG00000155561_28 (sequence is synthesized)
tgcctcaatagagctaagggtaacctctctgaatcgtcagcggtcacatacccagaggctcctacacctcttactggatgacatgccagtgaaaccatactcagatggtgaaggaggaat

SEQ ID NO: 449409 - DNA, 120 bp, Artificial Sequence
  ENSG00000155561_29 (sequence is synthesized)
agaagatgaaaacaggtctgtttctgggttccttcactttgacactgctacaaaagtacgtcgaaaaattctaaatattcttgactcgattgacttcagtcaggagatccctgagccttt

SEQ ID NO: 449410 - DNA, 120 bp, Artificial Sequence
  ENSG00000155561_30 (sequence is synthesized)
gcagttggatttttttgatcgggcccagattgaacaagttattgctaactgtgaacacaagaatttacggggacagacagtctgcaatgtcaagcttcttcatagggttcttgtagctga

SEQ ID NO: 449411 - DNA, 120 bp, Artificial Sequence
  ENSG00000155561_31 (sequence is synthesized)
agtaaatgcccttcagggtatggcagccataggacagagacctctactaatggaggaaatcagcactgtacttcagtatgtggtaggaagaaataaattgctgcagtgtcttcatgcaaa

SEQ ID NO: 449412 - DNA, 120 bp, Artificial Sequence
  ENSG00000155561_32 (sequence is synthesized)
acgtcatgctctggagtcgtggaggcaactagtagaaattatactgacagcttgtccccaggacctcattcaggcagaggatcgacaactgattattcgtgatattttacaagatgtgca

SEQ ID NO: 449413 - DNA, 120 bp, Artificial Sequence
  ENSG00000155561_33 (sequence is synthesized)
tgataagatactggatgatgaagctgcgcaagagttaatgcctgtggtcgccggggcagtgttcacactgactgctcacctaagccaggccgtcctcactgaacagaaggaaacatcagt

SEQ ID NO: 449414 - DNA, 120 bp, Artificial Sequence
  ENSG00000155561_34 (sequence is synthesized)
cttgggaccagcagaggcccattacgcttttatgcttgatagttgcttcacctcacctcctcctgaagagaacccattagtgggttttgcttctattggagattcttcactttacatcat

SEQ ID NO: 449415 - DNA, 120 bp, Artificial Sequence
  ENSG00000155561_35 (sequence is synthesized)
attgaagaaactgttagacttcattttgaagacaggtggtggattccaacgagtgaggactcacttgtatggctctctgctttattacttacagattgcccagagacctgatgaaccaga

SEQ ID NO: 449416 - DNA, 120 bp, Artificial Sequence
  ENSG00000155561_36 (sequence is synthesized)
caccttagaagcagccaagaaaaccatgtgggaaaggctgacagcccctgaagatgtatttagcaaattacagcgagaaaacatagccattattgaaagttatggcgccgccctcatgga

SEQ ID NO: 449417 - DNA, 120 bp, Artificial Sequence
  ENSG00000155561_37 (sequence is synthesized)
agtggtctgtcgagatgcttgtgatggtcatgagattggaaggatgctggccctggctctacttgatagaattgtctccgtggataaacagcagcagtggcttttgtatctttctaacag

SEQ ID NO: 449418 - DNA, 120 bp, Artificial Sequence
  ENSG00000155561_38 (sequence is synthesized)
tggctacttgaaggtcctcgtagacagcttggtagaagatgaccgtactttgcagagcttactcaccccacagcctccccttttaaaagcactttatacttatgaatctaaaatggcatt

SEQ ID NO: 449419 - DNA, 120 bp, Artificial Sequence
  ENSG00000155561_39 (sequence is synthesized)
tctcacaagagtggcaaagatacagcagggtgcattagagctgctaagatcaggggtgattgtgagactagctcaatgccaagtctatgacatgcgcccagaaacggacccgcagagcat

SEQ ID NO: 449420 - DNA, 120 bp, Artificial Sequence
  ENSG00000155561_40 (sequence is synthesized)
gtttggcatgagagaccctccaatgttcatccctaccccagtggatcgctaccgccagattctcctcccagctctccagctgtgccaggtcatcctcacatctagtatggcccagcactt

SEQ ID NO: 449421 - DNA, 120 bp, Artificial Sequence
  ENSG00000155561_41 (sequence is synthesized)
gcaggcagcagggcaggtattgcagtttcttatttcacattctgataccatacaagcaattctgcgctgtcaggatgttagtgctgggtctttgcaggaattggctctgctgacaggaat

SEQ ID NO: 449422 - DNA, 120 bp, Artificial Sequence
  ENSG00000155561_42 (sequence is synthesized)
tataagtaaagcagcacttcctggaatattaagtgaacttgacgttgatgtaaatgaagggtctctaatggagctacagggacatattggaagattccagcgccagtgcttaggactact

SEQ ID NO: 449423 - DNA, 120 bp, Artificial Sequence
  ENSG00000155561_43 (sequence is synthesized)
aagtcgctttggtggctctgacagactgcgtcagtttaaatttcaagacgataatgtggagggagataaagtaagcaagaaagatgagattgaactggctatgcagcagatttgtgccaa

SEQ ID NO: 449424 - DNA, 120 bp, Artificial Sequence
  ENSG00000155561_44 (sequence is synthesized)
tgtaatggaatattgccagtcactcatgttacagagttcccctaccttccagcatgctgtgtgtctcttcactcctagcctttcagaaacagttaatagagatggaccgcggcaagatac

SEQ ID NO: 449425 - DNA, 120 bp, Artificial Sequence
  ENSG00000155561_45 (sequence is synthesized)
ccaagctccagtggttccatactggcgcctgcctggtttaggcattatcatctacctgctgaaacagagtgctaatgatttcttcagctattatgacagtcatcgacagagtgtcagcaa

SEQ ID NO: 449426 - DNA, 120 bp, Artificial Sequence
  ENSG00000155561_46 (sequence is synthesized)
gctacaaaatgtagagcagcttcccccagatgagataaaagagttgtgtcagtctgtgatgcctgctggtgttgataaaatctccactgctcagaaatatgttctagcaagacggcgctt

SEQ ID NO: 449427 - DNA, 120 bp, Artificial Sequence
  ENSG00000155561_47 (sequence is synthesized)
ggtgaaggtgatcaacaatcgagctaaactgctttccctttgttcttttatcatagagacctgcctatttattctttggcgccatctggagtactacttgttacattgcatgcccacgga

SEQ ID NO: 449428 - DNA, 120 bp, Artificial Sequence
  ENSG00000155561_48 (sequence is synthesized)
ttctcaagattccttatttgcctcgagaaccttgtttaaaagcagaagactgcaagattccttcgcctcagaaaccaatctagattttagaagtgggctggctatagtgagccaacatga

SEQ ID NO: 449429 - DNA, 120 bp, Artificial Sequence
  ENSG00000155561_49 (sequence is synthesized)
tttagaccagcttcaggctgatgcaatcaacgcttttggagaatcactacaaaagaaacttctggacattgaaggattatattcaaaagttcgatctcgatatagtttcatacaggctct

SEQ ID NO: 449430 - DNA, 120 bp, Artificial Sequence
  ENSG00000155561_50 (sequence is synthesized)
tgtcagacgtatccgtggcctcttgaggatatcaaggaactgagagcccgtgcttatgctcttctatgagagagatgaattggggagaattgtctccattttatagattagtttctttct

SEQ ID NO: 449431 - DNA, 120 bp, Artificial Sequence
  ENSG00000155561_51 (sequence is synthesized)
aaattatgaccaaaaatattttgctatttctttctttgtatatggacatcttttctgtaaacttcttcccctagttccatcctcactagtaaaaaataaatactttttaaaaaaacaaaa

SEQ ID NO: 449432 - DNA, 120 bp, Artificial Sequence
  ENSG00000155561_52 (sequence is synthesized)
ggggctgatccagctctagaagaatggaggaggtctgctattatgctgattcttattgctggagtgggcctctgtgactgatggccatatattggatcccttaggtggaaggaaatagag

SEQ ID NO: 449433 - DNA, 120 bp, Artificial Sequence
  ENSG00000155561_53 (sequence is synthesized)
tagatttttcttgaaaactaaaaatgccttttaagatcatttcactctgcattttagattggctttgaatgcgcatgtaccggtgctgttattaatatataacaggtacttacagtcttt

SEQ ID NO: 449434 - DNA, 120 bp, Artificial Sequence
  ENSG00000155561_54 (sequence is synthesized)
gtaaaatcatagttctcaaaacttttttatggcaagaatatctgttcatgcacataaacaatataaaatattagaacctctcttcctagtttttaatgtttttgtttattataataatat

SEQ ID NO: 449435 - DNA, 120 bp, Artificial Sequence
  ENSG00000155561_55 (sequence is synthesized)
tgaaaattgagttcccaatcttgagccgtgtttttcatggtgctattgttattattcattgtcatcaggttcctccactgtgtggtagataggtacttgcacagccggtatgactctgtt

SEQ ID NO: 449436 - DNA, 120 bp, Artificial Sequence
  ENSG00000155561_56 (sequence is synthesized)
gtcattttggtggacattgtgagatctgtgggtccagtgggtgaggtatgtgactattatattgcaaagccactaatattcattgatgaatgaggaatgctcctgacatctacttcttac

SEQ ID NO: 449437 - DNA, 120 bp, Artificial Sequence
  ENSG00000155561_57 (sequence is synthesized)
ctcttttaaaagaaacattaaagatttctgttttaaattcaagtttggggacagtaagtgggaatttggagttcttccatctgactcatctggattcatataatacttttttatcttttc

SEQ ID NO: 449438 - DNA, 120 bp, Artificial Sequence
  ENSG00000155561_58 (sequence is synthesized)
ctctaaatgaaaaacagaaatatctgttatatcttttggtgtgagttagcactattaatatgttaatgtctgcataatactcttcacttcatagctaatagtttttattaccaagttttc

SEQ ID NO: 449439 - DNA, 120 bp, Artificial Sequence
  ENSG00000155561_59 (sequence is synthesized)
gtgcgcctctaagatggcgacgcctttggcggtaaattcgggtaagtgtggccagacagaaagacgattgagctgagcgataaccaggtcttcatggagagacgagaccgtgaggtttct

SEQ ID NO: 449440 - DNA, 120 bp, Artificial Sequence
  ENSG00000155561_60 (sequence is synthesized)
cggagtctaggaccccacttatgtgcggtgcctgcttttccctaattctgggcctagagtcccacccctccccagtttgaatggcgcgcgtcggtgctgcggctccagccctcgagttgg

SEQ ID NO: 449441 - DNA, 120 bp, Artificial Sequence
  ENSG00000155592_0 (sequence is synthesized)
agcgccccccgcgctctccgcgggccgagtggacgaggccgaacgcgagcagcctgccgctgccccctgcgagccctggcttcgccccgcagctcttctcccttccgggcggaacagttt

SEQ ID NO: 449442 - DNA, 120 bp, Artificial Sequence
  ENSG00000155592_1 (sequence is synthesized)
ttgcggcctttcctcggcggcagcggtttcctcaggacggtcggggccgtcgtgggcccgaaagagcccggcgccgctctcggaatccggcggccccagcggcacccgcggcggcctgga

SEQ ID NO: 449443 - DNA, 120 bp, Artificial Sequence
  ENSG00000155592_2 (sequence is synthesized)
cgtgctgcggtgacccgagcccggaacctggcgccgggcggggcctgcacatccggccccacccactcggggactcgcctctccgcgcccgacccgggagtagcggacacaccccctccc

SEQ ID NO: 449444 - DNA, 120 bp, Artificial Sequence
  ENSG00000155592_3 (sequence is synthesized)
ggcccggctgtccgcctccgcccagcctttcctcagcctgcttcatttttctcccagtcgtccagcctcccggtttccgactttgcactaagagggatgcactctggaaaaccacattgc

SEQ ID NO: 449445 - DNA, 120 bp, Artificial Sequence
  ENSG00000155592_4 (sequence is synthesized)
gcggtcacatcttgtttggagaagaggccaggcttttgcatcttagagtatacgttcaccttttcaagggcctggcatagatttgattaatcagcctggaataccctgttcctgccgacc

SEQ ID NO: 449446 - DNA, 120 bp, Artificial Sequence
  ENSG00000155592_5 (sequence is synthesized)
tggccgtttttacctccgtaccttatcacactcccaggaacattaagcagggagcgcttggagtcttctttgggtccccaccttgagctagacgtgaagttgacccctgggctgcagcat

SEQ ID NO: 449447 - DNA, 120 bp, Artificial Sequence
  ENSG00000155592_6 (sequence is synthesized)
ggctgtcgccctcgactctcagatcgacgcgcccctggaggttgagggatgcctaataatgaaggtggaaaaggaccctgagtgggcatcagagcccattctggaaggatcggatagctc

SEQ ID NO: 449448 - DNA, 120 bp, Artificial Sequence
  ENSG00000155592_7 (sequence is synthesized)
tgagaccttccgcaaatgcttcaggcaattctgttatgaggatgtgactggaccccatgaagctttcagtaaactctgggaactttgctgccggtggctgaagccagaaatgcgttccaa

SEQ ID NO: 449449 - DNA, 120 bp, Artificial Sequence
  ENSG00000155592_8 (sequence is synthesized)
ggagcaaatacttgagctgctggtgattgagcagtttctcaccattttacccgagaagattcaggcttgggcacagaagcagtgtccgcaaagtggagaggaagcggtggccctggtagt

SEQ ID NO: 449450 - DNA, 120 bp, Artificial Sequence
  ENSG00000155592_9 (sequence is synthesized)
gcatttggagaaagagactggaagactaagacagcaggtcagcagtcccgtgcaccgggagaagcactccccacttggagcagcgtgggaggtggcagacttccagccagagcaggtgga

SEQ ID NO: 449451 - DNA, 120 bp, Artificial Sequence
  ENSG00000155592_10 (sequence is synthesized)
gacccaacccagggcggtgtctcgggaggaacctggaagcctccactcaggacaccaggaacagctgaaccgaaagcgagaacgtcggcccttacccaagaatgctcggccttctccctg

SEQ ID NO: 449452 - DNA, 120 bp, Artificial Sequence
  ENSG00000155592_11 (sequence is synthesized)
ggttcctgcccttgctgatgaatggaataccctagatcaggaagtgacaaccacacggcttcctgctgggtcccaggaaccagtgaaagatgtccacgtggccagaggcttttcctacag

SEQ ID NO: 449453 - DNA, 120 bp, Artificial Sequence
  ENSG00000155592_12 (sequence is synthesized)
aaagagtgtgcatcagattcctgcccaaagggacctctaccgggatttcaggaaggagaatgttgggaacgtggtctccctgggaagtgcagtgtctacatctaacaagataacccggtt

SEQ ID NO: 449454 - DNA, 120 bp, Artificial Sequence
  ENSG00000155592_13 (sequence is synthesized)
ggaacagagaaaggagccatggactctaggtctgcattcctctaacaagagaagtatcctacgaagcaactacgtcaaggaaaagtcagttcatgctattcaggtccctgcaaggagtgc

SEQ ID NO: 449455 - DNA, 120 bp, Artificial Sequence
  ENSG00000155592_14 (sequence is synthesized)
aggaaaaacatggagagagcagcagcagtggggtttagaagatgaaaagatagcaggtgtgcattggagctatgaggaaacaaagactttcctggcaattctcaaagagtctcgctttta

SEQ ID NO: 449456 - DNA, 120 bp, Artificial Sequence
  ENSG00000155592_15 (sequence is synthesized)
tgaaacacttcaggcctgtccccgaaatagccaagtgtatggtgctgtggctgaatggttgcgagaatgtggcttccttagaaccccagaacagtgtcgaaccaagttcaaaagtctcca

SEQ ID NO: 449457 - DNA, 120 bp, Artificial Sequence
  ENSG00000155592_16 (sequence is synthesized)
gaaaagctatcgaaaggtgagaaatggccacatgctagaaccctgcgccttctttgaggacatggatgctttgttgaaccctgcagcccgtgctccgtccactgataaaccaaaggagat

SEQ ID NO: 449458 - DNA, 120 bp, Artificial Sequence
  ENSG00000155592_17 (sequence is synthesized)
gatacctgtccccagactgaagagaattgccatcagtgctaaggaacacatcagcttggtggaggaggaggaagctgcagaagattctgatgatgatgaaataggcatcgaatttatccg

SEQ ID NO: 449459 - DNA, 120 bp, Artificial Sequence
  ENSG00000155592_18 (sequence is synthesized)
caagtctgaaatccatggtgcccctgtcttgtttcagaatctcagtggcgtgcactggggctatgaagaaaccaagacttttcttgatatcctccgtgagactcggttttatgaagcgct

SEQ ID NO: 449460 - DNA, 120 bp, Artificial Sequence
  ENSG00000155592_19 (sequence is synthesized)
tcaagcctgtcatcggaagagcaaattgtatggggctgtagctgaacagcttcgagagtgcggcttcctccggacaccagaacagtgccgaaccaagttcaaaagccttcagaagagtta

SEQ ID NO: 449461 - DNA, 120 bp, Artificial Sequence
  ENSG00000155592_20 (sequence is synthesized)
ccgcaaggtgaaaaatggccacgtgctagagtcctgcgcgttctacaaggagatggatgccctgattaactctcgggcatctgctccttcccccagcaccccagaggaagtcccatcacc

SEQ ID NO: 449462 - DNA, 120 bp, Artificial Sequence
  ENSG00000155592_21 (sequence is synthesized)
ttcaaggcaagaaagagggggtattgaggttgaaccccaggaacctacaggctgggaacctgaagagacctcacaggaggcagtaatagaagactcttgcagtgagagaatgagcgagga

SEQ ID NO: 449463 - DNA, 120 bp, Artificial Sequence
  ENSG00000155592_22 (sequence is synthesized)
ggaaattgtgcaagagccagagttccagggacctccaggtctactgcagagcccaaatgattttgaaatcggaagtagcatcaaggaggatccaacacagatagtatataaggacatgga

SEQ ID NO: 449464 - DNA, 120 bp, Artificial Sequence
  ENSG00000155592_23 (sequence is synthesized)
acagcatagggcattaatagaaaagtctaaaagagttgtttcccagagtaccgaccccagcaaatatcgcaaaagggaatgcatctcaggaagacaatgggaaaatcttcaaggaattag

SEQ ID NO: 449465 - DNA, 120 bp, Artificial Sequence
  ENSG00000155592_24 (sequence is synthesized)
acagggaaagccgatgtctcagcctagagatttagggaaagccgttgtgcatcagaggccttttgtggggaagagaccctacagacttctcaaatatggagaaagctttggaaggagcac

SEQ ID NO: 449466 - DNA, 120 bp, Artificial Sequence
  ENSG00000155592_25 (sequence is synthesized)
tcgtctgatgtgccggatgacccaccacaaggagaatccttacaagtgtggtgtctgtgggaagtgctttggtagaagcaggagcctgatcagacaccaaagaatccacacaggcgaaaa

SEQ ID NO: 449467 - DNA, 120 bp, Artificial Sequence
  ENSG00000155592_26 (sequence is synthesized)
accttttaaatgtcttgactgtggaaaaagctttaatgactcctcaaattttggtgcccaccagagaatccacacaggagagaaaccctacagatgcggagagtgtggaaaatgctttag

SEQ ID NO: 449468 - DNA, 120 bp, Artificial Sequence
  ENSG00000155592_27 (sequence is synthesized)
tcagagctctagtcttattatacatcagagaacgcacaccggtgagaagccctatcagtgtggagagtgtgggaaaagtttcaccaacagttctcatttcagcgcccaccggagagttca

SEQ ID NO: 449469 - DNA, 120 bp, Artificial Sequence
  ENSG00000155592_28 (sequence is synthesized)
cactggggagaatccctacaaatgtgtggactgtgaaaaaagtttcaataactgtacgagatttcgagaacatcggagaatacacactggagagaagccctatggatgtgcccagtgtgg

SEQ ID NO: 449470 - DNA, 120 bp, Artificial Sequence
  ENSG00000155592_29 (sequence is synthesized)
caaacgtttcagtaagagttctgttcttaccaaacatcgggaagttcatgtgagagaaaagcctctgccacaccctccatctctgtattgccctgagaacccacataagggaaagactga

SEQ ID NO: 449471 - DNA, 120 bp, Artificial Sequence
  ENSG00000155592_30 (sequence is synthesized)
gataaacttgagaatataaataaactaaacactttcatcctgttctcacctctgcctctaacttcatcagtctgttcctcctcttctgtgtgtctcagcttctcctttaagaatgtggcg

SEQ ID NO: 449472 - DNA, 120 bp, Artificial Sequence
  ENSG00000155592_31 (sequence is synthesized)
aagatacattgtccgagttcagaatgaaatacccttcagtacattgaggccactgcaactggattgctaagttcggcaacattcaagatcttccatatgggtgagagttgtcttcaagga

SEQ ID NO: 449473 - DNA, 120 bp, Artificial Sequence
  ENSG00000155592_32 (sequence is synthesized)
tataaaaaatgccaaaagtttttttgttgttattacctactccgtgagatcctggatgaaacttgataacagattttcacatttagatagaactttgaggagtctgatcggaactacatc

SEQ ID NO: 449474 - DNA, 120 bp, Artificial Sequence
  ENSG00000155592_33 (sequence is synthesized)
aaatccatcttggttttgaagagatccacaaaagaagagtgaagattttatagctttcctcagaagtctgttacagtgtacctttttttttttttttgtcaagaagttgatccaaatagc

SEQ ID NO: 449475 - DNA, 120 bp, Artificial Sequence
  ENSG00000155592_34 (sequence is synthesized)
tagggcagaatccctgtattgtcactgaaatcctgttactaatgccttgccctccatggaggtgagaagcaattgatcacccctcatccttttctgtacccgaagacttaaatcccctgg

SEQ ID NO: 449476 - DNA, 120 bp, Artificial Sequence
  ENSG00000155592_35 (sequence is synthesized)
ctgctgcttctccagcctataagtaatcccaggtcctcctactgtttctcatagccctgcacttgcctctcagttgctctgggtgctcctgccggcctcttccgaactaccatgccctcc

SEQ ID NO: 449477 - DNA, 120 bp, Artificial Sequence
  ENSG00000155592_36 (sequence is synthesized)
tcagatagaataggaggcctgctcgtggtgtgtctcactaaagcaaagtaggatttcagatgcgttctagttctatcctctaacttctctggctcttatctagaacatgactggcatgtt

SEQ ID NO: 449478 - DNA, 120 bp, Artificial Sequence
  ENSG00000155592_37 (sequence is synthesized)
ggcatatttcgtacctcccacccctgcactgcagtataatattataatagtgtttctaaaactttaaggggatagggaagaggtaatagacacctgaagcatttctaagaccagttggac

SEQ ID NO: 449479 - DNA, 120 bp, Artificial Sequence
  ENSG00000155592_38 (sequence is synthesized)
tcctttggcctgctgtcgatcagatagccacctcagcttagaccagcgctctcaggtctggctgttaaatctcccagtctcttttcctgaggcttctagtccctgttcaccgcatcagaa

SEQ ID NO: 449480 - DNA, 120 bp, Artificial Sequence
  ENSG00000155592_39 (sequence is synthesized)
acctaactgtagtgtgccaagtaacttaacacaactctagagctcactgggtgaaaagtgggaacatttataaaaacttcaatccagaaatccagaacaccgtttttgttttcctcattt

SEQ ID NO: 449481 - DNA, 120 bp, Artificial Sequence
  ENSG00000155592_40 (sequence is synthesized)
acttgttttgtctgaaaaatctctttgagaacccccggcagtaacccagtaaacactgaaggaaaagttctgatgggggatggttaattgacttttgaagttacagatgaaacccagaga

SEQ ID NO: 449482 - DNA, 120 bp, Artificial Sequence
  ENSG00000155592_41 (sequence is synthesized)
tttgattttccatggccagttgcttcaggatggagtcagtggcgtttattcccttagtatgtaggtgacccagggtggctttgctttggcaagggagaagtcacaagtttaatgggaagg

SEQ ID NO: 449483 - DNA, 120 bp, Artificial Sequence
  ENSG00000155592_42 (sequence is synthesized)
gaaccggagttagggctgtttgtgggtgattattttgctcttctctctccctttctttgtcaaatgctcttatttgaagccatctggaaatgatatttttccttttggtatgtttcaatc

SEQ ID NO: 449484 - DNA, 120 bp, Artificial Sequence
  ENSG00000155592_43 (sequence is synthesized)
ttttgaaacttgttcagcaaagtacctaggagggtaggcactgtagaaagaaatctaatttatggtgccagaatagggtgtggcctgttggaaggcaggtgactcaggtagacattgata

SEQ ID NO: 449485 - DNA, 120 bp, Artificial Sequence
  ENSG00000155592_44 (sequence is synthesized)
aatgtttctgatttacatttgttggaaatattatgactgttcacatctcaataggttgatttttctgtgttgtccaagttatagatttctaatgctaagtacagttccatgttggtagtg

SEQ ID NO: 449486 - DNA, 120 bp, Artificial Sequence
  ENSG00000155592_45 (sequence is synthesized)
tgcgtagcacagtaagatgtttgtggtgccagtgggcttgtgtttatattgtgtagatgttctggaattccagctctagagaagatgtaaattaatagaaatcaccacttaataatatgt

SEQ ID NO: 449487 - DNA, 120 bp, Artificial Sequence
  ENSG00000155592_46 (sequence is synthesized)
acacaggattgatattatgtggaagcatgattcaggaaagtagatgacttattcataaatatgaagcactgttacatgtaaggccatgttctagccacagtgaatgatagaaaaaggaag

SEQ ID NO: 449488 - DNA, 120 bp, Artificial Sequence
  ENSG00000155592_47 (sequence is synthesized)
gaaggggcatggtgcctgggctcaaggaactcacagtttgatagaggaagcatcacagcaaaagttggggccacttacaccatggcagttacagaaggccaggagctcagtcatgagaac

SEQ ID NO: 449489 - DNA, 120 bp, Artificial Sequence
  ENSG00000155592_48 (sequence is synthesized)
atcaccttcccctgcagaagagttgcgctaagttgcccagaatcatattctgtaccttcatctctcaaccttccccagtggcaggaaagggtcaagcaagacccattccctctctagtgg

SEQ ID NO: 449490 - DNA, 120 bp, Artificial Sequence
  ENSG00000155592_49 (sequence is synthesized)
gacaaactgattctgtttaactctcatatgcctgggagcaagctgaggtggaatttgggttcccctatctctactcctaattgtaaatgggctgtctagacatgtgttacattaatttga

SEQ ID NO: 449491 - DNA, 120 bp, Artificial Sequence
  ENSG00000155592_50 (sequence is synthesized)
tgaactttgttctgaagaaatggaaggtctcccccccattttagaccaacactacctgtctccctgcattttatttgttttcacctggtacatgtaagtcaaaatgaataatcatgttct

SEQ ID NO: 449492 - DNA, 120 bp, Artificial Sequence
  ENSG00000155592_51 (sequence is synthesized)
gaccaatgtgtcttttagatcacataacattgcctttatgaagattcatagaaaaaggtttttttatctagatctcagtgccaaggaaagctctgatcctaagcgcagtatgtgtacaca

SEQ ID NO: 449493 - DNA, 120 bp, Artificial Sequence
  ENSG00000155592_52 (sequence is synthesized)
cacacgtctacatgtgtgtgtagatctgtatgtatgtattacaaacactgtgatttttgtaacttaagctgctttttctctctttgttctggctgctggaaagttcaacaaaacttacag

SEQ ID NO: 449494 - DNA, 120 bp, Artificial Sequence
  ENSG00000155592_53 (sequence is synthesized)
cccacctcaaccaactaccccaacctatatttatttaatttcatcttatttccttgtaaattgtgtcaaatcctgtttttgaaaagcagcatagactgacaacttttcactatcatctta

SEQ ID NO: 449495 - DNA, 120 bp, Artificial Sequence
  ENSG00000155592_54 (sequence is synthesized)
tcgaaggcattttggaaactggggtcgtatgtcccacctaggcttgctttgttactgccacaaatacctccagttcttaccagtgatgttattatgcattcaacctaattcattcatctg

SEQ ID NO: 449496 - DNA, 120 bp, Artificial Sequence
  ENSG00000155592_55 (sequence is synthesized)
gaaagaaacagttttttaaaaagggaaacctcacacgtaaatggctcagggcagcctggccttggtggaatgagcatgagactggaagctgaaagaagcaagttttaatcttgtcactaa

SEQ ID NO: 449497 - DNA, 120 bp, Artificial Sequence
  ENSG00000155592_56 (sequence is synthesized)
atgagtgttgtttgacacatcatagcctctctgggcctcggctcctcatctgaagagaagttgaacttaactgctaagttgctctggctctaatgtttcatgaggctgtggagcgtgata

SEQ ID NO: 449498 - DNA, 120 bp, Artificial Sequence
  ENSG00000155592_57 (sequence is synthesized)
tagatgcggaagaggttagaagaccaggctgccggcccagctgtcctgtgcctgccacatctggccataccaaatccatcgcatgcttcaggaaagggaggggatgctgtgacagcaaac

SEQ ID NO: 449499 - DNA, 120 bp, Artificial Sequence
  ENSG00000155592_58 (sequence is synthesized)
tcagcccaggagcttgttggggaaggagaaagggcaagtccctcgtggtccacagcaggcaccccccaagcacctcgataaccagtggcaggtaggctgaagtgaaggaagcctctgtca

SEQ ID NO: 449500 - DNA, 120 bp, Artificial Sequence
  ENSG00000155592_59 (sequence is synthesized)
ggaggtctggcgcccagtgacagacaagacagctgtgagggagctggggcagccctggctaaaggaatgtctgagtaacttgtgaaactggaagcctctgcctctgaatgcattccaaga

SEQ ID NO: 449501 - DNA, 120 bp, Artificial Sequence
  ENSG00000155592_60 (sequence is synthesized)
cctggtgcaaatggatgtccattcattgttttgtatcagtgttcacttagatgtcttcttgaaaacttgtttgtggaataaatgtctaaaataaatggctcccactggtttctgccataa

SEQ ID NO: 449502 - DNA, 120 bp, Artificial Sequence
  ENSG00000155592_61 (sequence is synthesized)
gtctgaaatccatggtgcccctgtcttgtttcagaatctcagtggtaagaattgtgctttgtttctctggtaggaaaacagatgtgtgatcttgtggaaaaaggagtagaccagaagtgg

SEQ ID NO: 449503 - DNA, 120 bp, Artificial Sequence
  ENSG00000155592_62 (sequence is synthesized)
ccaaacccggggggtgctgtcacacacacctcaccactttcactgtggtgtggccacatcactgaagtactctcaggtgcttgctgctgcccccattgcagtcagagtaacagctccaag

SEQ ID NO: 449504 - DNA, 120 bp, Artificial Sequence
  ENSG00000155592_63 (sequence is synthesized)
tggccgtggagaagtcgttttcactttagagcacagcatggattttgagtgtttgggtccttgtggaaggaagacaaatggagttacagggttctaaggatcttgtattatctgataatt

SEQ ID NO: 449505 - DNA, 120 bp, Artificial Sequence
  ENSG00000155592_64 (sequence is synthesized)
ggcataaagcaatcaattgtattgcattataagtcaagcatgcattattacgttatctaaaataaccagtacaaaattttgtaacagtttcaacaggttttcattaaaaataaaataaac

SEQ ID NO: 449506 - DNA, 120 bp, Artificial Sequence
  ENSG00000155621_0 (sequence is synthesized)
attgacagaagcgtcaattcctgggagtagttcgttggttttctttcccctcatccttttgcctgctcccggcgaggggtggctttgatttcggcgatgagctcccagaaaggcaacgtg

SEQ ID NO: 449507 - DNA, 120 bp, Artificial Sequence
  ENSG00000155621_1 (sequence is synthesized)
gctcgttccagacctcagaagcaccagaatacgtttagcttcaaaaatgacaagttcgataaaagtgtgcagaccaagaaaattaatgcaaaacttcatgatggagtatgtcagcgctgt

SEQ ID NO: 449508 - DNA, 120 bp, Artificial Sequence
  ENSG00000155621_2 (sequence is synthesized)
aaagaagttcttgagtggcgtgtaaaatacagcaaatacaaaccattatcaaaacctaaaaagtgtgttaaatgtttacaaaagacagtgaaggattcttatcacataatgtgcaggcca

SEQ ID NO: 449509 - DNA, 120 bp, Artificial Sequence
  ENSG00000155621_3 (sequence is synthesized)
tgtgcctgtgaacttgaagtttgcgcaaaatgtggaaagaaagaagacattgttattccgttgaataaagaaacagaaaaaatagaacatactgaaaataatctaagttccaaccataga

SEQ ID NO: 449510 - DNA, 120 bp, Artificial Sequence
  ENSG00000155621_4 (sequence is synthesized)
gactctgtctcaaaaaaaataaaataaaaagtcaatttagaatgtgaaattctgaccaccttttggctttgagtattttccaaaagatatttgaaatcctaatgaggaaatcagaaaaag

SEQ ID NO: 449511 - DNA, 120 bp, Artificial Sequence
  ENSG00000155621_5 (sequence is synthesized)
agatatttgaaatcctaatgaggaaatcagaaaaagctatggaaaaatagacaaatttcatacatgaacaatataaattgtgtatattacttaacatcaaactaaacaagattcagaatt

SEQ ID NO: 449512 - DNA, 120 bp, Artificial Sequence
  ENSG00000155621_6 (sequence is synthesized)
gatggttgtataagaactagctcatgtaaaaataaaataacattattacattgcctcaaaaattggtcctcggtaagtgccttttgataaatgatctcaaataaatgactcatagcaaaa

SEQ ID NO: 449513 - DNA, 83 bp, Artificial Sequence
  ENSG00000155621_7 (sequence is synthesized)
gaattacaggtgtgagccatcatgcctggcctaatttgtatatttctaatgactcatgatgttgactgagcatcgagatggag

SEQ ID NO: 449514 - DNA, 63 bp, Artificial Sequence
  ENSG00000155621_8 (sequence is synthesized)
ttttcacaatgttggccaggatggtctccatctactgaccttgtgatccgcccccctaggcct

SEQ ID NO: 449515 - DNA, 120 bp, Artificial Sequence
  ENSG00000155621_9 (sequence is synthesized)
aaaatgacaagttcgataaaagtgtgcagaccaagtctttatctgcaaactctagtcatgatgtttgagtttgtctccctgtggagcaggggtccccagcccccgacccccgcatcggtc

SEQ ID NO: 449516 - DNA, 120 bp, Artificial Sequence
  ENSG00000155621_10 (sequence is synthesized)
ggctgcgccgcgtggagtggcttggcttaacagcagggagggcagagcgatgctctttgacctcccagaagagtcacgtgggctgacccagagccggggcggaaaggctgcgtttgtttc

SEQ ID NO: 449517 - DNA, 120 bp, Artificial Sequence
  ENSG00000155621_11 (sequence is synthesized)
atgaagaaagtgatgatgatttagattttgatattgatttagaagacacaggaggagaccatcaaatgaattaatatcactgtattaaaagtctgccgggcacagtggctcacgcctgta

SEQ ID NO: 449518 - DNA, 120 bp, Artificial Sequence
  ENSG00000155621_12 (sequence is synthesized)
gaactgcaggtgtggtaacagtattgtggttaagcacgagaaggtctttattgctaggatatgatgagtattaagaagtgaagtgtcttgatatccataagttattttacctgtacccat

SEQ ID NO: 449519 - DNA, 120 bp, Artificial Sequence
  ENSG00000155621_13 (sequence is synthesized)
cgctgtaaagaagttcttgagtggcgtgtaaaatacagcaaatacaaaccattatcaaaacctaaaaagtgatggagtcttgctctatagcccgggctggagtgcagtggcaccatttca

SEQ ID NO: 449520 - DNA, 120 bp, Artificial Sequence
  ENSG00000155621_14 (sequence is synthesized)
tcttcactggtgaaatgtctattcagatgtgttgcccattttaaaaattgggttgttttcttaccattgagttatgagtcttttatatatattctagatacaagtcctttatcagatata

SEQ ID NO: 449521 - DNA, 120 bp, Artificial Sequence
  ENSG00000155621_15 (sequence is synthesized)
atttggaaatattttctcgctgtctgtaatgtgttatacatcaattttgagatatccttcacattaagaaactaacggtgtggataataatcctggtattgacagaggtttggactcctg

SEQ ID NO: 449522 - DNA, 120 bp, Artificial Sequence
  ENSG00000155621_16 (sequence is synthesized)
aagcctgaaagtctatctgctgccacgcctgggcacatactgcatcatttacaaaactgtagagcacctgttgtgtgtgcagttgtgatttcttatagatttttagaattggaaggcatg

SEQ ID NO: 449523 - DNA, 120 bp, Artificial Sequence
  ENSG00000155621_17 (sequence is synthesized)
taaagaacacgtaatctggtacattgcttcagtaggtaagtcagtatgaacttctaagaatttttgttttcttctgtattgggtctattgtgggtatgtccaacgtgacaggggaggtaa

SEQ ID NO: 449524 - DNA, 120 bp, Artificial Sequence
  ENSG00000155621_18 (sequence is synthesized)
gggaagtggcatcccctgagatagtgactgaaatggctttcatcatctttaagtcaaagtgagatgccagtaataggatatatgtatgtatgtacttgtgtctctgtatgtatgtaaata

SEQ ID NO: 449525 - DNA, 120 bp, Artificial Sequence
  ENSG00000155621_19 (sequence is synthesized)
aacaaacatgctggaaggaggaggtgattcaatcagggactttgtgaaagaaaaaaagaataactggaccttcctttaatgatgaaaactgtttatacagcaaaccatcaaagccaaaat

SEQ ID NO: 449526 - DNA, 120 bp, Artificial Sequence
  ENSG00000155621_20 (sequence is synthesized)
gtgaattttggtattagcccgatttttcctaagaaactgttgatgtaaccactgtagttgcagagatcgttttggtatattctagaccctctttgttttgttctgtttggggtttcttcc

SEQ ID NO: 449527 - DNA, 120 bp, Artificial Sequence
  ENSG00000155621_21 (sequence is synthesized)
ccctcaagttgctcttgtccaccactagactggctgccttttattccatagcagacagtccttaagtctttgcatatgtccttattcaaaaattaatcttcatcagtttttttctgcaga

SEQ ID NO: 449528 - DNA, 120 bp, Artificial Sequence
  ENSG00000155621_22 (sequence is synthesized)
gttcccattggtagaataaatctgctccttcttaaatcctgagctgaaaatgtccacacttcccagaagtgtactttagaatcacctgtaacatgtatttaaaatacagattccccagct

SEQ ID NO: 449529 - DNA, 120 bp, Artificial Sequence
  ENSG00000155621_23 (sequence is synthesized)
ccacgggcaaagctctcctgccatgtgacaccctgatacagttcagggagccactaaggcaggccaaaatggctcagcaggcaaaggtccaagctgccagggtagtgtgtcattacagca

SEQ ID NO: 449530 - DNA, 120 bp, Artificial Sequence
  ENSG00000155621_24 (sequence is synthesized)
tgcttagcatagctaggaggacaggctcacacccagccccacagctgttgcgctacagactcaggcacagggctgtctaactggcagatgtgggccacaactgttggagacaagccagcc

SEQ ID NO: 449531 - DNA, 120 bp, Artificial Sequence
  ENSG00000155621_25 (sequence is synthesized)
atatttgggaaaatcttattgtaaggggcaagtgtgagtgagatttaggagtcatgggaaaatacaccaacacagtaaatcttgtgttataggagagatgtggaagaaagagataaacta

SEQ ID NO: 449532 - DNA, 120 bp, Artificial Sequence
  ENSG00000155621_26 (sequence is synthesized)
ctggccagggtgtctcctgactgggtgacttgccaccacatgggccaggcaggttgcggcagctctgcctttgggaggtggctggaggaggggaggagagagaggcatgatgaagacaga

SEQ ID NO: 449533 - DNA, 120 bp, Artificial Sequence
  ENSG00000155621_27 (sequence is synthesized)
tgcaccctttcctgagcaggggttaacattcagggtgccgaaaggaattccacagcctgtttcccatctctcttgtcctcatcaagtactggtcctcgtgtatgtgttctgcttccgctt

SEQ ID NO: 449534 - DNA, 120 bp, Artificial Sequence
  ENSG00000155621_28 (sequence is synthesized)
tctcaggatgtttacgtttttgcaaatacgtttatggaaaagagttacctcacccacctctccaaacatctatttgttttacatttttattgcgggggagtgatctctttacatagcttc

SEQ ID NO: 449535 - DNA, 120 bp, Artificial Sequence
  ENSG00000155621_29 (sequence is synthesized)
aaatggcataacattcagcagtatccaagcttagatatatctgatgagaggaaagtaattgtgaggcctttgttctagttacaactttgtcactatctgactccatgactccagcaaatt

SEQ ID NO: 449536 - DNA, 120 bp, Artificial Sequence
  ENSG00000155621_30 (sequence is synthesized)
gcttcaactgtctggcctgcagtttttttcttgcgttaaataacagacttagtctagatcggtggttcttatcatgtggtttctggactagcagcatcaatattacctgggaaacttgtt

SEQ ID NO: 449537 - DNA, 120 bp, Artificial Sequence
  ENSG00000155621_31 (sequence is synthesized)
agaaatgcaaattcttgggctctgccctagacctactgaaacatactctgtgggcggggcccagcaatctgtgtttgaaacgcgattctgattatttgacaaaagtttgcaaaccactgg

SEQ ID NO: 449538 - DNA, 120 bp, Artificial Sequence
  ENSG00000155621_32 (sequence is synthesized)
tctagataagtagctcttagccttggctgcacattaaaatcatctgggcaacttttataacctaccaatcctggcctcttcctccaaagattctgacttaaatggtttcagatggggacc

SEQ ID NO: 449539 - DNA, 120 bp, Artificial Sequence
  ENSG00000155621_33 (sequence is synthesized)
attgttatgcggttatagccgacgcctaggtgctacctgaggtcttcaaagctaaaggtcagtgtttcccagccgtaaatgcatacctctagacctggccttctcaagccactaggtgtt

SEQ ID NO: 449540 - DNA, 120 bp, Artificial Sequence
  ENSG00000155621_34 (sequence is synthesized)
gctataatagagaagaaaaggcattttcagaaccgtctttggatatggatgaggaggaggaaaatgtatttcttagcttctgataagagattattttgttattttaatctgagtgcaatt

SEQ ID NO: 449541 - DNA, 120 bp, Artificial Sequence
  ENSG00000155621_35 (sequence is synthesized)
tgctaaatattcatttgcaacttgttaaatttattcaaagaaattaaatgcccataagtgacagaaagaataaagaattgtgatatatatttacaataaaatactctttagcaataaaaa

SEQ ID NO: 449542 - DNA, 120 bp, Artificial Sequence
  ENSG00000155622_0 (sequence is synthesized)
agtgtgcatgttccttggacacctgcctcagtgtgcatgttcactgggcatcttcccttcgacccctttgcccacgtggtgaccgctggggagctgtgagagtgtgaggggcacgttcca

SEQ ID NO: 449543 - DNA, 120 bp, Artificial Sequence
  ENSG00000155622_1 (sequence is synthesized)
gccgtctggactctttctctcctactgagacgcagcctataggtccgcaggccagtcctcccaggaactgaaatagtgaaatatgagttggcgaggaagatcaacatataggcctaggcc

SEQ ID NO: 449544 - DNA, 120 bp, Artificial Sequence
  ENSG00000155622_2 (sequence is synthesized)
gattggggctatgcttgaacccactgatgaagagcctaaagaagagaaaccacccactaaaagtcggaatcctacacctgatcagaagagagaagatgatcagggtgcagctgagattca

SEQ ID NO: 449545 - DNA, 120 bp, Artificial Sequence
  ENSG00000155622_3 (sequence is synthesized)
agtgcctgacctggaagccgatctccaggagctatgtcagacaaagactggggatggatgtgaaggtggtactgatgtcaaggggaagattctaccaaaagcagagcactttaaaatgcc

SEQ ID NO: 449546 - DNA, 120 bp, Artificial Sequence
  ENSG00000155622_4 (sequence is synthesized)
agaagcaggtgaagggaaatcacaggtttaaaggaagataagctgaaacaacacaaactgtttttatattagatattttactttaaaatatcttaataaagttttaagcttttctccaaa

SEQ ID NO: 449547 - DNA, 120 bp, Artificial Sequence
  ENSG00000155629_0 (sequence is synthesized)
ctccagcccgagccaggacgccgccggccccggtcccggccccgggcacgcagcgagccagggatgtgagcggcgccccgcggcatggcagcctcaggggtgcccagaggatgcgacatc

SEQ ID NO: 449548 - DNA, 120 bp, Artificial Sequence
  ENSG00000155629_1 (sequence is synthesized)
atggcagcctcaggggtgcccagaggatgcgacatcctcatcgtctacagcccggatgccgaggaatggtgccagtacctgcagaccctgttcctgtccagtcggcaggtccgcagccag

SEQ ID NO: 449549 - DNA, 120 bp, Artificial Sequence
  ENSG00000155629_2 (sequence is synthesized)
aagatactgactcacaggctgggccccgaggcctccttctcggcagaggacctaagccttttcctcagcacccgctgtgtcgtggtgctgctgtccgcggagctggtgcagcacttccac

SEQ ID NO: 449550 - DNA, 120 bp, Artificial Sequence
  ENSG00000155629_3 (sequence is synthesized)
aagcccgccttgctgcccctgctgcagagagctttccatcctccgcaccgcgtggtcaggctgctctgcggcgtgcgggacagcgaggagttcctagacttctttccagattgggcccat

SEQ ID NO: 449551 - DNA, 120 bp, Artificial Sequence
  ENSG00000155629_4 (sequence is synthesized)
tggcaggagctcacctgtgacgatgagccagagacctacgtggcagctgtgaaaaaagccatttccgaagattctggctgtgactcagtcactgacactgagcctgaggacgagaaggtt

SEQ ID NO: 449552 - DNA, 120 bp, Artificial Sequence
  ENSG00000155629_5 (sequence is synthesized)
gtttcctactcgaagcagcagaacctgccgacggtgacttcacctgggaacctgatggtggtgcagccggaccgcattcgctgtggggcagaaaccactgtctatgttattgtgagatgt

SEQ ID NO: 449553 - DNA, 120 bp, Artificial Sequence
  ENSG00000155629_6 (sequence is synthesized)
aagctggatgacagggtggcgacagaagcagagttttctcctgaggattctccctctgtaaggatggaagccaaggtggagaatgagtacaccatttcagtgaaggctcccaacctttca

SEQ ID NO: 449554 - DNA, 120 bp, Artificial Sequence
  ENSG00000155629_7 (sequence is synthesized)
tctgggaacgtttctctgaagatatattctggagacttagtggtgtgtgaaaccgttatcagctattatactgacatggaagaaattgggaatttattgtccaatgccgcgaatcctgtg

SEQ ID NO: 449555 - DNA, 120 bp, Artificial Sequence
  ENSG00000155629_8 (sequence is synthesized)
gaattcatgtgtcaggcctttaaaattgtgccctacaacacagagacccttgataaactgctaaccgaatccctgaagaacaatatccctgcaagcggactgcacctctttggaatcaac

SEQ ID NO: 449556 - DNA, 120 bp, Artificial Sequence
  ENSG00000155629_9 (sequence is synthesized)
cagctggaagaagaagatatgatgacaaatcagagggatgaagagctgcccaccctgttgcattttgctgcgaagtatggactgaagaacctcactgccttgttgctcacctgcccagga

SEQ ID NO: 449557 - DNA, 120 bp, Artificial Sequence
  ENSG00000155629_10 (sequence is synthesized)
gccctgcaggcgtacagcgtggccaacaagcatggccactaccccaacaccatcgctgagaaacacggcttcagggacctgcggcagttcatcgacgagtatgtggaaacggtggacatg

SEQ ID NO: 449558 - DNA, 120 bp, Artificial Sequence
  ENSG00000155629_11 (sequence is synthesized)
ctcaagagtcacattaaagaggaactgatgcacggggaggaggctgatgctgtgtacgagtccatggcccacctttccacagacctgcttatgaaatgctcgctcaaccccggctgtgac

SEQ ID NO: 449559 - DNA, 120 bp, Artificial Sequence
  ENSG00000155629_12 (sequence is synthesized)
gaggatctctatgagtccatggctgcctttgtcccagctgccactgaagacctctatgttgaaatgcttcaggccagtacatctaacccaatccctggagatggtttctctcgggccact

SEQ ID NO: 449560 - DNA, 120 bp, Artificial Sequence
  ENSG00000155629_13 (sequence is synthesized)
aaggactctatgatccgcaagtttttagaaggcaacagcatgggaatgaccaatctggagagagatcagtgccatcttggtcaggaagaagatgtttatcacacggtggatgacgatgag

SEQ ID NO: 449561 - DNA, 120 bp, Artificial Sequence
  ENSG00000155629_14 (sequence is synthesized)
gccttttctgtggacctggccagcaggccccctgtcccagtgcccagaccagagaccactgctcctggtgctcaccagctgcctgacaacgaaccatacatttttaaagtttttgcagaa

SEQ ID NO: 449562 - DNA, 120 bp, Artificial Sequence
  ENSG00000155629_15 (sequence is synthesized)
aaaagtcaagagcggcctgggaatttctacgtttcctcagagagcatcaggaaagggccgcccgtcagaccatggagggacaggccccagtcgagtatatatgacccttttgcgggaatg

SEQ ID NO: 449563 - DNA, 120 bp, Artificial Sequence
  ENSG00000155629_16 (sequence is synthesized)
aaaacgccaggccagcggcagcttatcaccctccaggagcaggtgaagctgggcattgtcaacgtggatgaggctgtgctccacttcaaagagtggcagctcaaccagaagaaacgatcg

SEQ ID NO: 449564 - DNA, 120 bp, Artificial Sequence
  ENSG00000155629_17 (sequence is synthesized)
gagtcctttcgtttccagcaggaaaatcttaaacggctaagagacagcatcacccgaagacagagagagaagcaaaaatcaggaaagcagacagacttggagatcacggtcccaattcgg

SEQ ID NO: 449565 - DNA, 120 bp, Artificial Sequence
  ENSG00000155629_18 (sequence is synthesized)
cactcacagcacctgcctgcaaaagtggagtttggagtctatgagagtggccccaggaaaagtgtcattccccctaggacggagctgagacgaggagactggaaaacagacagcacctcc

SEQ ID NO: 449566 - DNA, 120 bp, Artificial Sequence
  ENSG00000155629_19 (sequence is synthesized)
agcacagcaagtagcacaagtaaccgctccagcacccggagcctcctcagtgtgagcagcgggatggaaggggacaacgaggataatgaagtccctgaggttaccagaagtcgcagtcca

SEQ ID NO: 449567 - DNA, 120 bp, Artificial Sequence
  ENSG00000155629_20 (sequence is synthesized)
ggccccccacaagtggatgggacacccaccatgtccctcgagagaccccccagggtgcctccgagagctgcctcacagaggcctccgaccagggagaccttccatcctcctccacctgtt

SEQ ID NO: 449568 - DNA, 120 bp, Artificial Sequence
  ENSG00000155629_21 (sequence is synthesized)
ccacccagaggacgctgattccacctcctaaaacctgcctacttcaggactttaagactcacagtcttcagcctgttaatgatgtcttcatgttgagttttatagcatgactgttgacct

SEQ ID NO: 449569 - DNA, 120 bp, Artificial Sequence
  ENSG00000155629_22 (sequence is synthesized)
taagatccattctcattgctgataatgctgcagccctgctggtttgggcttgcctcgaagattttattaaggcacgaagaagtgaaaaactaagggcttcattcaccatcaccaagtata

SEQ ID NO: 449570 - DNA, 120 bp, Artificial Sequence
  ENSG00000155629_23 (sequence is synthesized)
tcgaaccatatacttgtttgccaaaaggatgaagacttaatcgaaatacttacctctaatttgccatatcagaagcctaaaaagaatgatcataaatgtacttcaccagtgattttactg

SEQ ID NO: 449571 - DNA, 120 bp, Artificial Sequence
  ENSG00000155629_24 (sequence is synthesized)
aaatgcacttatattagtctttatgtatttgctagttcagcctgatttctagaagaggttatagtgtgagacttgtagtattcaagtaagataagtgacctaattttaaaataattcttc

SEQ ID NO: 449572 - DNA, 120 bp, Artificial Sequence
  ENSG00000155629_25 (sequence is synthesized)
tacttttctgtatattcagcagggtatttaagtgctagggctggtcacacacaaccaactgaaaaagactagagggattagtacaaactcctcttatacagaaggcaaatctgaggttcc

SEQ ID NO: 449573 - DNA, 120 bp, Artificial Sequence
  ENSG00000155629_26 (sequence is synthesized)
acagaagtctggaaccaagactattcagttggttaaataaagaggttagtctagactgggcctgctcattctaggtcaccacattttccatctccaaatagccaggccctctctccctca

SEQ ID NO: 449574 - DNA, 120 bp, Artificial Sequence
  ENSG00000155629_27 (sequence is synthesized)
agaaatgcccagatgtagaaattcatcagtgcctattggtcttccagaattttccatcttccgtatctcccaggcatgagactaccaagtttgtttgttttctttccaatttgggaattt

SEQ ID NO: 449575 - DNA, 120 bp, Artificial Sequence
  ENSG00000155629_28 (sequence is synthesized)
atacttcagtatggtttcaacgcagttatgtttccagagaacatctagaagtggctggaaaccagaagctggggattccagggaccccacttagtgctctatttcctttataggttttat

SEQ ID NO: 449576 - DNA, 120 bp, Artificial Sequence
  ENSG00000155629_29 (sequence is synthesized)
ttctggtcatagagagagaaggacctttgactttttcttcgttgaggcttctgaggaggaaaaacaaacctaaaatagaaatacagtcagcctttcaaatccatgggttctgtgtccgtg

SEQ ID NO: 449577 - DNA, 120 bp, Artificial Sequence
  ENSG00000155629_30 (sequence is synthesized)
gattcaaccaaccttggatcaaaaatatttgaaaaaaaatctacaaagtttcaaaaagcaaaacttgaatttgctgcatgccaagaagtatgttgaattcatgtaaatgaagtgatgtgt

SEQ ID NO: 449578 - DNA, 86 bp, Artificial Sequence
  ENSG00000155629_31 (sequence is synthesized)
ccaagaagtatgttgaattcatgtaaatgaagtgatgtgtaggcattgtattagatattataagaaatctagaaatgatttaaagc

SEQ ID NO: 449579 - DNA, 120 bp, Artificial Sequence
  ENSG00000155629_32 (sequence is synthesized)
ttgatactgggggatcctggaaccaatcccccatggataccaaagtacgactgtagttatctattttttacatacttattattaccaccatgctcagtaagtccatttttgcatggaata

SEQ ID NO: 449580 - DNA, 120 bp, Artificial Sequence
  ENSG00000155629_33 (sequence is synthesized)
tggagccttaaaacatgtcatgaatttggagtccctggcacataaatctaccttcaaatcagaggtccttaatgatgcctaaacatacagtaaaattagaatcagaaatacttctttaaa

SEQ ID NO: 449581 - DNA, 120 bp, Artificial Sequence
  ENSG00000155629_34 (sequence is synthesized)
aaatattcaaaatgtgtttgtttcccatgggattattctctatcccacacgaatgtaaaaaaatccacattaatgatccatttaagtatagttttattgggtccttttctaatgattaaa

SEQ ID NO: 449582 - DNA, 120 bp, Artificial Sequence
  ENSG00000155629_35 (sequence is synthesized)
ggttctttctcaatttcattcctcagtcctgcaagtaaggactcatactgaagagtactgaaacaaggacttcttgtcagaaacagcttctggaatcttgggttttgtttttgttttttg

SEQ ID NO: 449583 - DNA, 120 bp, Artificial Sequence
  ENSG00000155629_36 (sequence is synthesized)
acaaaatacactattggccatgtccatcacgagagtgtttgtagtaattaattaccttgtacaggacctggcacttagtagcattcttcaaatgttccctcagtgatccttttactctcc

SEQ ID NO: 449584 - DNA, 120 bp, Artificial Sequence
  ENSG00000155629_37 (sequence is synthesized)
ttgtcacttatttgggagaaataggggcacgtgagataagaagaagaataattttgatgttggtatgcttgccctgttacttatagacagtctttgtcataggcaaacttgaatttgatt

SEQ ID NO: 449585 - DNA, 120 bp, Artificial Sequence
  ENSG00000155629_38 (sequence is synthesized)
taaaatagggctgggaaaaatattcaataactgtaagcccccttttggatgccaaacttagaattttgtacattctctgatgaacaagcatttagatcgtaacatggtaaagcctattac

SEQ ID NO: 449586 - DNA, 120 bp, Artificial Sequence
  ENSG00000155629_39 (sequence is synthesized)
cagccaatgttgttagcatctttgtatgcacatcactgtttgtgcaatatatgaatattttgttgcattgtattcttatataaaaataagtagaaaacataaaattgaaattgctgatga

SEQ ID NO: 449587 - DNA, 120 bp, Artificial Sequence
  ENSG00000155629_40 (sequence is synthesized)
agttaagaacagccagggctctagagctggcagcctgaatttacatctttattctgctatttgatgaccttgaccttgctgtgcctcatatgaaaggggaggactaggtgatataagcta

SEQ ID NO: 449588 - DNA, 120 bp, Artificial Sequence
  ENSG00000155629_41 (sequence is synthesized)
agaagagaagggagtcagaccctctgagcaaaggggaagttgctgcgctctgctcggtgtcgtggcctcgcagatgattctggctgtgactcagtcactgacactgagcctgaggacgag

SEQ ID NO: 449589 - DNA, 120 bp, Artificial Sequence
  ENSG00000155629_42 (sequence is synthesized)
ggtgagagctgggactccaccccacctatcctgtcctaggggtcgtttcatcgcaagagatagaaacccaggtgaaaggagccaggcacaaaaggtcatatattataggattccatttat

SEQ ID NO: 449590 - DNA, 120 bp, Artificial Sequence
  ENSG00000155629_43 (sequence is synthesized)
atgaaatgccagagtgggcaaatccacagagacagtttgaagattggtggttgccagcggctggagggaggaggaatgggaagaaactgcttaatggggacaggtgtattagggttctct

SEQ ID NO: 449591 - DNA, 120 bp, Artificial Sequence
  ENSG00000155629_44 (sequence is synthesized)
aaatggctcctgattggtaaattgcatctggaactgggaggatctgtacaggaactagaaatacttgaaagggacagcattctttgggctttcctgagggcattgactctggcatacctc

SEQ ID NO: 449592 - DNA, 120 bp, Artificial Sequence
  ENSG00000155629_45 (sequence is synthesized)
tcatggtgaccctggaagctccgcctctggagttgctatgagagaaattgctcttgtaggacatgaggtttttcaccagcgtggcctgctatggatcttgtctctttgcatctgagttgc

SEQ ID NO: 449593 - DNA, 120 bp, Artificial Sequence
  ENSG00000155629_46 (sequence is synthesized)
tgatcagatgcaaggactggctcaaaggaagaccagctctcttcactgccctgctagcttgtgtcctttatctttgtgagtggactggtgccaagcatgtcccagggtcatcttatgttg

SEQ ID NO: 449594 - DNA, 120 bp, Artificial Sequence
  ENSG00000155629_47 (sequence is synthesized)
aactcctgagctcaagcaatcctcccgactcggcttcccaaagcacttggattacagattctggctgtgactcagtcactgacactgagcctgaggacgagaaggttgtttcctactcga

SEQ ID NO: 449595 - DNA, 120 bp, Artificial Sequence
  ENSG00000155636_0 (sequence is synthesized)
ctcccggaagcggagcaccgagccggcaaaggcttgggtgtgagacagcagcggtggcagacaccgcagaagcaaagagcagtgaggctcctgcattcgggtggagcaccatggacgaag

SEQ ID NO: 449596 - DNA, 120 bp, Artificial Sequence
  ENSG00000155636_1 (sequence is synthesized)
ctggcagctctgcgagcggcgggggcttccgcccgggcgtggacagcctggacgaaccgcccaacagccgcatcttccttgtgatcagcaagtacacacctgagtcggtgctgagggagc

SEQ ID NO: 449597 - DNA, 120 bp, Artificial Sequence
  ENSG00000155636_2 (sequence is synthesized)
gcttctcgccttttggcgacatccaggacatctgggtggtgcgggacaagcacaccaaggagtccaagggcattgctttcgtcaagttcgcccgcagctcacaggcctgcagggccatgg

SEQ ID NO: 449598 - DNA, 120 bp, Artificial Sequence
  ENSG00000155636_3 (sequence is synthesized)
aggagatgcatggccagtgcctcggccccaacgacaccaagcccatcaaggttttcattgctcagtcccgatcatctggaagtcaccgagatgttgaagatgaagaacttacaagaatct

SEQ ID NO: 449599 - DNA, 120 bp, Artificial Sequence
  ENSG00000155636_4 (sequence is synthesized)
ttgttatgataccaaagtcctacacagaagaagatctgcgggaaaaatttaaggtgtatggagatatcgagtattgcagcattattaagaataaagtgactggagaaagtaaaggtttgg

SEQ ID NO: 449600 - DNA, 120 bp, Artificial Sequence
  ENSG00000155636_5 (sequence is synthesized)
gctacgtacgatacttaaaaccatcacaagctgcccaagcaatagaaaactgtgatcgaagttttagagcaatcttggctgaacctaaaaataaagcatctgaatcctctgaacaagatt

SEQ ID NO: 449601 - DNA, 120 bp, Artificial Sequence
  ENSG00000155636_6 (sequence is synthesized)
attatagtaatatgaggcaagaagctttgggacatgaacctagagtaaatatgtttccatttgaacaacaatctgaattttcaagttttgacaagaatgatagccgaggccaggaagcaa

SEQ ID NO: 449602 - DNA, 120 bp, Artificial Sequence
  ENSG00000155636_7 (sequence is synthesized)
ccaaacgcttgtcagttgtatcaagagttcctttcactgaagaacagcttttcagcatttttgatatagtaccaggattggaatattgtgaagttcaacgagatccttattcaaattatg

SEQ ID NO: 449603 - DNA, 120 bp, Artificial Sequence
  ENSG00000155636_8 (sequence is synthesized)
gtcatggagtggttcagtattttaatgtagcatcagctatttatgcaaaatacaaattacatggatttcagtaccctcctgggaaccgaataggtgtttccttcattgatgatggaagta

SEQ ID NO: 449604 - DNA, 120 bp, Artificial Sequence
  ENSG00000155636_9 (sequence is synthesized)
atgcaacagatctccttagaaaaatggcaacacagatggtagctgcacagcttgcatcaatggtgtggaataacccaagtcagcaacaatttatgcaatttggaggaagctctggatcac

SEQ ID NO: 449605 - DNA, 120 bp, Artificial Sequence
  ENSG00000155636_10 (sequence is synthesized)
agttgcctcaaatccagacagatgttgtacttccatcatgcaaaaaaaaagctcctgctgaaactcctgtgaaagaaagactttttattgtgtttaatcctcatcctttacctttagacg

SEQ ID NO: 449606 - DNA, 120 bp, Artificial Sequence
  ENSG00000155636_11 (sequence is synthesized)
tattagaagatatattctgtcgttttggtaacctgatcgaagtttaccttgtgtcaggaaaaaatgtggggtatgccaagtatgccgatagaataagtgctaatgatgccattgccactc

SEQ ID NO: 449607 - DNA, 120 bp, Artificial Sequence
  ENSG00000155636_12 (sequence is synthesized)
tacatggaaagattctgaatggggtgagacttaaagttatgctggcagattcgccaagagaagaatctaacaaacggcaaagaacttactgattcttgagaacaaagactaaataatgac

SEQ ID NO: 449608 - DNA, 120 bp, Artificial Sequence
  ENSG00000155636_13 (sequence is synthesized)
ataatcctcagctgactgactgaaaatgtgactggacgcattccctgtggacagttgacagctttttttttttccatatacctgatagtctgtgtacagcattgttttgtctgggaagca

SEQ ID NO: 449609 - DNA, 120 bp, Artificial Sequence
  ENSG00000155636_14 (sequence is synthesized)
gggattgctgacatgtatttttgaatccatacattaatgctaaaacgaatatagtagttgttccttagagcaatatgttgttacgtgtagcagaaataaagttttctttgcttaactaaa

SEQ ID NO: 449610 - DNA, 120 bp, Artificial Sequence
  ENSG00000155636_15 (sequence is synthesized)
caagagaagaatctaacaaacggcaaagaacttactgattcttgagaaacagtagctcaagaacacatggatcctgggaactgaagtggccctgaagctgcactatgttggaggtttcct

SEQ ID NO: 449611 - DNA, 120 bp, Artificial Sequence
  ENSG00000155636_16 (sequence is synthesized)
agtcataaaagatctcgcctctgaccagaagagtatgaatgacaaaggtgacataaccagcacagaaagatgtcttagcctctgcacatcagctgatttagaatacttatgtagatagcg

SEQ ID NO: 449612 - DNA, 120 bp, Artificial Sequence
  ENSG00000155636_17 (sequence is synthesized)
gttggggtcgggggggtgcggaatgttcttttcagcttctttgccctgagaactttgatcttattgcaaggaagtcccttaccctcttctaccctagatctgatggacctcctgggattt

SEQ ID NO: 449613 - DNA, 120 bp, Artificial Sequence
  ENSG00000155636_18 (sequence is synthesized)
gagagttgtctcttcttgtcattagtcccatcggtagttctgatgaccagaagcgtactacaaaatacagtgcctttattcagtacaatggactctgttttctagtatttaaaatgttaa

SEQ ID NO: 449614 - DNA, 120 bp, Artificial Sequence
  ENSG00000155636_19 (sequence is synthesized)
tgattgataggacttgaagaataaaaatagaaacaattgacctctcaggtgagaaagtcacacaaaacaagctactgttaaaagactgaatatttttagttttctgtaaattatcagtta

SEQ ID NO: 449615 - DNA, 120 bp, Artificial Sequence
  ENSG00000155636_20 (sequence is synthesized)
tctctgcaattggcctagataaactcattgtgaaataagtaactaaatgggcaaaagatttgaacaagcacttcacaaaagaagaccaagaagagggcagggttttttgtttggggagtt

SEQ ID NO: 449616 - DNA, 120 bp, Artificial Sequence
  ENSG00000155636_21 (sequence is synthesized)
ttatttagttttgttttggggttgttttgttttggcaggggacaggagtagtggatagattcattttgtaaagaaatattaaaatattctttttaatttgatagttaatataagcttaag

SEQ ID NO: 449617 - DNA, 120 bp, Artificial Sequence
  ENSG00000155636_22 (sequence is synthesized)
aatcttttaaaactcagaatgttcagccgtattagtcatcaatgaactgctcattaaaactacaataagctaccctaacagtggtatgaacagcaagaattaaaatgttgacaataccaa

SEQ ID NO: 449618 - DNA, 120 bp, Artificial Sequence
  ENSG00000155636_23 (sequence is synthesized)
gtactggtgacagtgtgaagcaacaagaactgctgatgcaaattggctcaaccgcttgggaaaatgtttgacagtatctactaaagttgaacatatgtataccctcgactcagcaattcc

SEQ ID NO: 449619 - DNA, 120 bp, Artificial Sequence
  ENSG00000155636_24 (sequence is synthesized)
acttctaagcatatatccaacaaagatgtgtacatatatgtaccaaaagacacatacaaaaacattcttggtattattcatagtagccccaaagtggaaacaaccccaatgtccatgaac

SEQ ID NO: 449620 - DNA, 120 bp, Artificial Sequence
  ENSG00000155636_25 (sequence is synthesized)
ttgaacaaaagcaaccagccaacaaaagatgtgctgtaggattcccagttacagagttcaaaaacaagcaaaacatatctttgagcagaatggaatgggggagttcacaaagggagttat

SEQ ID NO: 449621 - DNA, 120 bp, Artificial Sequence
  ENSG00000155636_26 (sequence is synthesized)
ggtgtgctggtggtcttgtttttcttgaccaggatggggataactgatcgtttttgagctgtactctatggagtatgcattttttatttatcttatacttcaattaaagtttttctttct

SEQ ID NO: 449622 - DNA, 120 bp, Artificial Sequence
  ENSG00000155636_27 (sequence is synthesized)
tagtgaataaagcaaaaatcagcatgaggctggtgaaacagacagttctgcagaatgagagaagaacaatgtcctgaagcatttagaaagaaggactttgttcttccagtgcttatagaa

SEQ ID NO: 449623 - DNA, 120 bp, Artificial Sequence
  ENSG00000155636_28 (sequence is synthesized)
caaaaaatattagaaaatatctgcttttgctccccctatggtgcagcagggtattatgatggcaagagggcaggaaaataagagtgagaaaagaaagggagaagctaaattaatatttga

SEQ ID NO: 449624 - DNA, 120 bp, Artificial Sequence
  ENSG00000155636_29 (sequence is synthesized)
gtcagaaatagtaaatagtcatagcactaaagaaaattgaatccatgatgaacagtgaatactgaactacttttcagaatcctgtgggttctcatgagtccacaaagcgaagatggaggg

SEQ ID NO: 449625 - DNA, 120 bp, Artificial Sequence
  ENSG00000155636_30 (sequence is synthesized)
aagttcccccactttttgttcattatccagatcagaactgctttcatcaatgttatatattgtgctttaaaagctttcttttaaaggattctctgcagcttaaataagttaggatgaaca

SEQ ID NO: 449626 - DNA, 120 bp, Artificial Sequence
  ENSG00000155636_31 (sequence is synthesized)
aaaagcaccagagcaaaagataaaaagcaccctccgacaaatatagtaagagaaaaggtgcagatcaaaaaggctgattacagagatttatcctttgactaatagatgttcccaataaac

SEQ ID NO: 449627 - DNA, 120 bp, Artificial Sequence
  ENSG00000155636_32 (sequence is synthesized)
aataactcgttttaatagaagaaacatggttgatctaaaaaattttaaaagtcacaagactgaagatcctcttctacacattttaaatgccatctggaatggagcaatgtctgtagtttt

SEQ ID NO: 449628 - DNA, 120 bp, Artificial Sequence
  ENSG00000155636_33 (sequence is synthesized)
gtagcccaagattcctctactcatccaaattgtaaaggtaacaggcattctgtgatatacaatgtactgctcatttgccctttctggaaaaaaattaatcaccacactcccaaaatgaat

SEQ ID NO: 449629 - DNA, 120 bp, Artificial Sequence
  ENSG00000155636_34 (sequence is synthesized)
caaaattaagaataaaagaagaaggaaagaaaggccagtcggtgagtattgaaatcatcactgaaactattagaataatgaaggtaattgtaaatttcattttttaaaaaaagttttatt

SEQ ID NO: 449630 - DNA, 120 bp, Artificial Sequence
  ENSG00000155636_35 (sequence is synthesized)
atatgacttatctattccgaaatttttcagtgggatttataaccctaggttaagttaatgaaggccaagaaggaatggcagtttattttttgggggggatggaggtgggtgaggggtaaa

SEQ ID NO: 449631 - DNA, 120 bp, Artificial Sequence
  ENSG00000155636_36 (sequence is synthesized)
ggggtaaaatccttctcttttgtaaagaaatattaaaattcattctttttttactttgataattaaatgtaagattaagaatcttttgaagtctgttaaggtgcttaataataaaattaa

SEQ ID NO: 449632 - DNA, 120 bp, Artificial Sequence
  ENSG00000155657_0 (sequence is synthesized)
gcagtcgtgcattcccagcctcgcctcgggtgtagggattgcatagaaaagcaaaactacacagtcttgactgtgtagttttgtttttaggattagaggctcaccgattcatgtcggaga

SEQ ID NO: 449633 - DNA, 120 bp, Artificial Sequence
  ENSG00000155657_1 (sequence is synthesized)
tggtcagaaaaaccaactctccataggacgtcgtttcagaagcaaccttgggcttagtcccaccctttttaggcactcttgagaaatcagagtgcctagaaagatgacaactcaagcacc

SEQ ID NO: 449634 - DNA, 120 bp, Artificial Sequence
  ENSG00000155657_2 (sequence is synthesized)
gacgtttacgcagccgttacaaagcgttgtggtactggagggtagtaccgcaacctttgaggctcacattagtggttttccagttcctgaggtgagctggtttagggatggccaggtgat

SEQ ID NO: 449635 - DNA, 120 bp, Artificial Sequence
  ENSG00000155657_3 (sequence is synthesized)
ttccacttccactctgcccggcgtgcagatctcctttagcgatggccgcgctaaactgacgatccccgccgtgactaaagccaacagtggacgatattccctgaaagccaccaatggatc

SEQ ID NO: 449636 - DNA, 120 bp, Artificial Sequence
  ENSG00000155657_4 (sequence is synthesized)
tggacaagcgactagtactgctgagcttctcgtgaaagctgagacagcaccacccaacttcgttcaacgactgcagagcatgaccgtgagacaaggaagccaagtgagactccaagtgag

SEQ ID NO: 449637 - DNA, 120 bp, Artificial Sequence
  ENSG00000155657_5 (sequence is synthesized)
agtgactggaatccctacacctgtggtgaagttctaccgggatggagccgaaatccagagctcccttgatttccaaatttcacaagaaggcgacctctacagcttactgattgcagaagc

SEQ ID NO: 449638 - DNA, 120 bp, Artificial Sequence
  ENSG00000155657_6 (sequence is synthesized)
ataccctgaggactcagggacctattcagtaaatgccaccaatagcgttggaagagctacttcgactgctgaattactggttcaaggtgaagaagaagtacctgctaaaaagacaaagac

SEQ ID NO: 449639 - DNA, 120 bp, Artificial Sequence
  ENSG00000155657_7 (sequence is synthesized)
aattgtttcgactgctcagatctcagaatcaagacaaacccgaattgaaaagaagattgaagcccactttgatgccagatcaattgcaacagttgagatggtcatagatggtgccgctgg

SEQ ID NO: 449640 - DNA, 120 bp, Artificial Sequence
  ENSG00000155657_8 (sequence is synthesized)
gcaacagctgccacataaaacacctcccaggattcctccgaagccaaagtcaagatccccaacaccaccgtctattgctgccaaagcacagctggctcggcagcagtccccatcgcccat

SEQ ID NO: 449641 - DNA, 120 bp, Artificial Sequence
  ENSG00000155657_9 (sequence is synthesized)
aagacactccccttccccggtcagacacgtgcgggcaccgaccccatctccggtcaggtccgtgtctccagcagcaagaatctccacatcccccatcaggtctgttaggtctccattgct

SEQ ID NO: 449642 - DNA, 120 bp, Artificial Sequence
  ENSG00000155657_10 (sequence is synthesized)
catgcgtaagactcaggcatccaccgtggccacaggtcctgaagtgcctcccccttggaagcaagagggctacgtggcctcctcatctgaggctgagatgagagagacaacgctgacaac

SEQ ID NO: 449643 - DNA, 120 bp, Artificial Sequence
  ENSG00000155657_11 (sequence is synthesized)
ctctactcagatcaggacagaagagagatgggaagggagatacggtgtccaggagcaagtgaccatcagtggtgctgcgggtgctgccgccagtgtgtcggccagtgctagctacgcagc

SEQ ID NO: 449644 - DNA, 120 bp, Artificial Sequence
  ENSG00000155657_12 (sequence is synthesized)
agaggctgttgccactggtgctaaagaggtgaaacaagatgctgacaaaagtgcagctgttgcgactgttgttgctgccgttgatatggccagagtgagagaaccagtgatcagcgctgt

SEQ ID NO: 449645 - DNA, 120 bp, Artificial Sequence
  ENSG00000155657_13 (sequence is synthesized)
agagcagactgctcagaggacaaccacgactgctgtgcacatccaacctgctcaagaacaggtaagaaaggaagcggagaagactgctgtaactaaggtagtagtggccgccgataaagc

SEQ ID NO: 449646 - DNA, 120 bp, Artificial Sequence
  ENSG00000155657_14 (sequence is synthesized)
caaggaacaagaattaaaatcaagaaccaaagaagtaattaccacaaagcaagagcagatgcacgtaactcatgagcagataagaaaagaaactgaaaaaacatttgtaccaaaggtagt

SEQ ID NO: 449647 - DNA, 120 bp, Artificial Sequence
  ENSG00000155657_15 (sequence is synthesized)
aatttccgcagctaaagccaaagaacaagaaactagaatttctgaagaaattactaagaaacagaaacaagtaactcaagaagcaataagacaggaaactgagataactgctgcatccat

SEQ ID NO: 449648 - DNA, 120 bp, Artificial Sequence
  ENSG00000155657_16 (sequence is synthesized)
ggtggtagttgccactgcaaagtccacaaaactagaaacagtcccgggagctcaagaagaaactaccacacaacaagatcaaatgcacctaagttatgaaaagataatgaaggaaactag

SEQ ID NO: 449649 - DNA, 120 bp, Artificial Sequence
  ENSG00000155657_17 (sequence is synthesized)
gaaaacagttgtacctaaagtcatagttgccacacccaaagtcaaagaacaagatttagtatcaagaggtagagaaggcattactaccaaaagagaacaagtgcaaataactcaggagaa

SEQ ID NO: 449650 - DNA, 120 bp, Artificial Sequence
  ENSG00000155657_18 (sequence is synthesized)
gatgagaaaggaagccgagaaaactgccttgtctacaatagcagttgctactgctaaagccaaagaacaagaaacaatactgagaactagagaaactatggctactagacaagaacaaat

SEQ ID NO: 449651 - DNA, 120 bp, Artificial Sequence
  ENSG00000155657_19 (sequence is synthesized)
ccaagttacccatggaaaggtggacgttggaaaaaaggctgaagctgtagcaacagttgttgctgcagtagaccaggcccgagtcagagagcccagagagcctgggcatcttgaagaatc

SEQ ID NO: 449652 - DNA, 120 bp, Artificial Sequence
  ENSG00000155657_20 (sequence is synthesized)
ctatgctcagcagaccactttggagtacggatataaggaacgcatttccgccgcaaaggtagctgagcctccccaacgtccagcctcagaaccccacgttgtccctaaagcagtcaagcc

SEQ ID NO: 449653 - DNA, 120 bp, Artificial Sequence
  ENSG00000155657_21 (sequence is synthesized)
tagagtaatccaggctccttctgagactcatatcaaaactactgatcaaaagggaatgcacatatcatcacagatcaagaaaactacagatctaacaacggaaagattagtccatgtgga

SEQ ID NO: 449654 - DNA, 120 bp, Artificial Sequence
  ENSG00000155657_22 (sequence is synthesized)
taaacgcccccgcacagctagccctcactttactgtttcaaaaatttctgttcctaagacagaacatggatatgaggcatcaatagccggtagtgctattgccacattacaaaaagagtt

SEQ ID NO: 449655 - DNA, 120 bp, Artificial Sequence
  ENSG00000155657_23 (sequence is synthesized)
gtcagccacatcttctgctcagaagatcaccaaatcggtgaaggctcctactgtgaagcccagtgagactagagtaagggcagagcccacacccttgccacagttccccttcgctgacac

SEQ ID NO: 449656 - DNA, 120 bp, Artificial Sequence
  ENSG00000155657_24 (sequence is synthesized)
accagatacttacaagagtgaagctggcgttgaggtgaaaaaggaagtaggggtgagcatcactggcaccaccgtccgtgaagagcgctttgaagtactgcacggacgcgaagccaaggt

SEQ ID NO: 449657 - DNA, 120 bp, Artificial Sequence
  ENSG00000155657_25 (sequence is synthesized)
aacagaaacagcaagagtaccagcacctgttgaaattcctgttactccaccaactttggtctcgggcttaaaaaatgtgactgtcatagaaggtgaatctgtcaccttggagtgccacat

SEQ ID NO: 449658 - DNA, 120 bp, Artificial Sequence
  ENSG00000155657_26 (sequence is synthesized)
ctctggatacccatccccgacagtgacatggtacagggaagactaccaaatcgaaagttccattgacttccagataaccttccagagtggaattgctcgtcttatgattcgcgaagcatt

SEQ ID NO: 449659 - DNA, 120 bp, Artificial Sequence
  ENSG00000155657_27 (sequence is synthesized)
tgcggaagacagcgggcgatttacttgcagtgctgtaaatgaggctggaaccgtcagcacatcctgctatctggctgtgcaggtgtcagaagaatttgaaaaggaaaccacagccgtgac

SEQ ID NO: 449660 - DNA, 120 bp, Artificial Sequence
  ENSG00000155657_28 (sequence is synthesized)
tgagaaatttactacagaagagaaacgctttgttgagtcaagagatgtggttatgactgatactagcctcacagaggaacaagcagggcctggagaacctgccgcgccttactttattac

SEQ ID NO: 449661 - DNA, 120 bp, Artificial Sequence
  ENSG00000155657_29 (sequence is synthesized)
aaaaccagtggtccagaaactggtggaaggtgggagcgtggtgtttggatgccaagttggcggcaacccaaagccccatgtatactggaaaaaatctggtgttcctctaaccactggata

SEQ ID NO: 449662 - DNA, 120 bp, Artificial Sequence
  ENSG00000155657_30 (sequence is synthesized)
cagatacaaagtgagttacaacaaacaaaccggtgaatgcaagctggtgatttctatgacttttgctgatgatgctggagaatacactattgttgttcgcaataagcatggagaaacttc

SEQ ID NO: 449663 - DNA, 120 bp, Artificial Sequence
  ENSG00000155657_31 (sequence is synthesized)
tgcatctgcttccttgcttgaagaagctgattatgagttactgatgaagtcccagcaagaaatgctttatcagacacaagtgactgcatttgttcaagaacctaaagttggagaaacagc

SEQ ID NO: 449664 - DNA, 120 bp, Artificial Sequence
  ENSG00000155657_32 (sequence is synthesized)
acctggatttgtatactctgagtatgaaaaagagtatgaaaaagaacaagccttaattaggaagaaaatggccaaagatactgtagtggtcagaacttatgtagaagatcaggaattcca

SEQ ID NO: 449665 - DNA, 120 bp, Artificial Sequence
  ENSG00000155657_33 (sequence is synthesized)
tatttcttcctttgaagagagacttattaaagaaattgaatatagaataataaagactacattagaagaacttcttgaagaagatggagaagaaaagatggcagttgacatttctgaatc

SEQ ID NO: 449666 - DNA, 120 bp, Artificial Sequence
  ENSG00000155657_34 (sequence is synthesized)
tgaagctgttgaatcaggatttgattcaagaatcaagaattatagaattcttgaggggatgggtgtcacttttcattgcaagatgtctggatatccattaccaaagattgcttggtacaa

SEQ ID NO: 449667 - DNA, 120 bp, Artificial Sequence
  ENSG00000155657_35 (sequence is synthesized)
agatggcaagcgcatcaaacatggagaaagataccaaatggactttctacaagatggcagagctagtctgcgtatacctgttgttcttccagaagatgaaggaatctacactgcatttgc

SEQ ID NO: 449668 - DNA, 120 bp, Artificial Sequence
  ENSG00000155657_36 (sequence is synthesized)
cagcaatattaaaggaaatgcaatttgctcagggaaattgtatgtggagcctgctgcaccacttggagctccgacttacattcccacactagagccagtgagcagaatcagatctctctc

SEQ ID NO: 449669 - DNA, 120 bp, Artificial Sequence
  ENSG00000155657_37 (sequence is synthesized)
tccacgttcagtgagcaggtctcctatacgcatgtctcctgcacggatgtcacctgcaaggatgtctcctgcacggatgtcccctgcaagaatgtcccctggacgtaggctggaggagac

SEQ ID NO: 449670 - DNA, 120 bp, Artificial Sequence
  ENSG00000155657_38 (sequence is synthesized)
agatgagtcacaacttgagagactatataaaccagtctttgtgttaaaacctgtttctttcaaatgtttagaagggcaaactgccagatttgacttaaaggttgttggtagacctatgcc

SEQ ID NO: 449671 - DNA, 120 bp, Artificial Sequence
  ENSG00000155657_39 (sequence is synthesized)
agagacgttctggtttcatgatggccagcaaattgtcaatgactatacccataaagtagtcattaaagaagatggtactcaatcactaattattgtccctgccacacccagtgattctgg

SEQ ID NO: 449672 - DNA, 120 bp, Artificial Sequence
  ENSG00000155657_40 (sequence is synthesized)
ggaatggactgtggttgcccaaaacagggcaggcagatcttcaatttcagtgattttaactgtggaagctgtggaacatcaggtaaaaccgatgtttgtagaaaaactgaaaaatgtcaa

SEQ ID NO: 449673 - DNA, 120 bp, Artificial Sequence
  ENSG00000155657_41 (sequence is synthesized)
tataaaggaaggttcccgacttgaaatgaaagtcagagctacgggtaaccccaaccctgacattgtatggttgaaaaacagtgacatcattgtgcctcataaatatcccaaaatcagaat

SEQ ID NO: 449674 - DNA, 120 bp, Artificial Sequence
  ENSG00000155657_42 (sequence is synthesized)
tgaaggaaccaagggagaagctgcccttaaaatcgattccactgtcagccaagattctgcctggtatactgcgactgctattaataaagctggcagagacactacaagatgcaaagtaaa

SEQ ID NO: 449675 - DNA, 120 bp, Artificial Sequence
  ENSG00000155657_43 (sequence is synthesized)
tgttgaagttgagtttgcagagcctgagccagagagaaagttaatcatcccacgggggacatatagagcaaaggagattgcagccccagaactggagcccctccatttgcgatatggcca

SEQ ID NO: 449676 - DNA, 120 bp, Artificial Sequence
  ENSG00000155657_44 (sequence is synthesized)
agagcaatgggaagaaggtgatctctatgacaaagagaaacaacagaaaccatttttcaagaaaaaactcacttccttaagacttaagcgctttgggcctgcccactttgaatgcaggct

SEQ ID NO: 449677 - DNA, 120 bp, Artificial Sequence
  ENSG00000155657_45 (sequence is synthesized)
aacacccattggtgacccaacgatggtggtggagtggctccatgatggaaagccacttgaagcagccaacaggctccgtatgatcaatgaatttgggtactgcagccttgattatggcgt

SEQ ID NO: 449678 - DNA, 120 bp, Artificial Sequence
  ENSG00000155657_46 (sequence is synthesized)
tgcatattctagagacagtggtatcattacttgcagagccactaacaaatatggaacagatcacacatctgctacccttattgttaaagatgagaaaagtcttgtggaagaatcccaatt

SEQ ID NO: 449679 - DNA, 120 bp, Artificial Sequence
  ENSG00000155657_47 (sequence is synthesized)
gcctgaggggaggaaaggcttacagagaattgaagaattagagagaatggctcatgaaggtgcacttacaggtgtaacaacagatcagaaagaaaagcaaaagccagacattgtcttgta

SEQ ID NO: 449680 - DNA, 120 bp, Artificial Sequence
  ENSG00000155657_48 (sequence is synthesized)
cccagagccagttagagtacttgaaggggagactgcaaggttccgctgcagggtaacaggctaccctcagcccaaagtcaactggtacctcaatggacagctcatccgcaaaagcaaaag

SEQ ID NO: 449681 - DNA, 120 bp, Artificial Sequence
  ENSG00000155657_49 (sequence is synthesized)
gttcagagttcgctatgatggtatccattacctggacatcgtggactgcaaatcatatgacacaggtgaagtgaaggtcaccgcggaaaatcctgaaggtgtgatagagcataaagtgaa

SEQ ID NO: 449682 - DNA, 120 bp, Artificial Sequence
  ENSG00000155657_50 (sequence is synthesized)
gcttgagattcaacagagggaagattttaggtctgtccttaggagagctcctgaaccaaggcctgagtttcacgtacatgaaccaggaaagcttcagtttgaagtacaaaaagtggatag

SEQ ID NO: 449683 - DNA, 120 bp, Artificial Sequence
  ENSG00000155657_51 (sequence is synthesized)
acctgttgacaccactgaaaccaaagaagttgtgaagttgaaaagggctgaaagaattacccatgaaaaagtgcctgaagagtcggaagagctgcgcagtaaattcaagcgcagaacaga

SEQ ID NO: 449684 - DNA, 120 bp, Artificial Sequence
  ENSG00000155657_52 (sequence is synthesized)
agagggctattatgaagccattaccgctgtggagctcaagtctcgaaagaaggatgaatcctatgaggaactcctcaggaagacaaaagatgaacttctccactggaccaaagagttaac

SEQ ID NO: 449685 - DNA, 120 bp, Artificial Sequence
  ENSG00000155657_53 (sequence is synthesized)
tgaagaggaaaagaaagctcttgccgaagaaggcaaaatcacgattccaacttttaaacctgacaagattgaactaagtcctagtatggaggctccaaaaatcttcgaaagaatccagag

SEQ ID NO: 449686 - DNA, 120 bp, Artificial Sequence
  ENSG00000155657_54 (sequence is synthesized)
ccaaacagtgggccaaggatctgatgcacacttccgggtcagagtcgtggggaaaccagaccccgaatgtgaatggtacaaaaatggtgtcaaaattgaacggtctgaccggatctactg

SEQ ID NO: 449687 - DNA, 120 bp, Artificial Sequence
  ENSG00000155657_55 (sequence is synthesized)
gtactggcccgaagacaatgtttgtgaattggtcataagagatgtgactgctgaggactctgccagcatcatggtaaaagccatcaacatagctggagaaacctccagtcacgcattctt

SEQ ID NO: 449688 - DNA, 120 bp, Artificial Sequence
  ENSG00000155657_56 (sequence is synthesized)
acttgtccaagccaagcaattgatcactttcacacaggaattacaagatgttgttgctaaggaaaaagacactatggcaacctttgaatgtgaaacttcagaaccatttgtcaaagtgaa

SEQ ID NO: 449689 - DNA, 120 bp, Artificial Sequence
  ENSG00000155657_57 (sequence is synthesized)
atggtataaagatggtatggaggttcatgagggagataaatacaggatgcactctgacagaaaggttcacttcctctccatactgaccattgatacgtctgatgctgaagattacagctg

SEQ ID NO: 449690 - DNA, 120 bp, Artificial Sequence
  ENSG00000155657_58 (sequence is synthesized)
tgtacttgtggaagatgaaaatgtcaaaacgactgctaaacttattgttgaaggtgcagttgttgagtttgtgaaagaacttcaggacatagaagttccagaatcatattcaggagaatt

SEQ ID NO: 449691 - DNA, 120 bp, Artificial Sequence
  ENSG00000155657_59 (sequence is synthesized)
agagtgcattgtatccccagaaaatatagaaggaaaatggtatcataatgatgtggagcttaaatccaatggcaaatatacaattacatctcgtcgtggacgtcagaacctcacggtcaa

SEQ ID NO: 449692 - DNA, 120 bp, Artificial Sequence
  ENSG00000155657_60 (sequence is synthesized)
ggatgtaaccaaggaggaccagggagaatacagctttgtcatcgacgggaaaaagacaacctgtaaattaaagatgaaaccccgccccattgctatcctacaaggacttagtgaccaaaa

SEQ ID NO: 449693 - DNA, 120 bp, Artificial Sequence
  ENSG00000155657_61 (sequence is synthesized)
agtctgtgagggtgacattgttcagcttgaagttaaagtctccttggaaagtgtggaaggcgtctggatgaaagacggccaagaagtgcagcccagtgacagggttcacattgtgataga

SEQ ID NO: 449694 - DNA, 120 bp, Artificial Sequence
  ENSG00000155657_62 (sequence is synthesized)
caaacaatctcatatgctgctcattgaagacatgactaaggaagatgctggaaattactctttcaccattccagcccttggcctctccaccagtgggcgtgtctctgtctatagtgtgga

SEQ ID NO: 449695 - DNA, 120 bp, Artificial Sequence
  ENSG00000155657_63 (sequence is synthesized)
cgtgataacacctctaaaagatgttaatgtgattgaaggcaccaaggctgtgcttgaatgtaaggtgtcagtccctgatgtgacttctgttaagtggtacttaaatgatgaacaaatcaa

SEQ ID NO: 449696 - DNA, 120 bp, Artificial Sequence
  ENSG00000155657_64 (sequence is synthesized)
gcctgatgaccgtgtacaggccattgtgaaaggtactaaacagcgactagtcattaaccgaactcatgcttcagacgaaggaccttacaagctgatagttggcagagttgaaaccaactg

SEQ ID NO: 449697 - DNA, 120 bp, Artificial Sequence
  ENSG00000155657_65 (sequence is synthesized)
taatctctctgtagaaaaaattaaaattatcagaggtcttcgtgaccttacctgtacagaaactcaaaatgtggtgtttgaggttgagctgtcccactctggaattgatgtcctgtggaa

SEQ ID NO: 449698 - DNA, 120 bp, Artificial Sequence
  ENSG00000155657_66 (sequence is synthesized)
ttttaaggacaaggaaatcaagcccagttctaaatataaaattgaagcacatggaaaaatatataaattgacagttctaaatatgatgaaagatgatgaaggaaaatacacattttacgc

SEQ ID NO: 449699 - DNA, 120 bp, Artificial Sequence
  ENSG00000155657_67 (sequence is synthesized)
gggagaaaatatgacatctggaaaacttactgtggcaggtggggccatctccaagccactcacagatcagaccgtagctgaatcccaggaagctgtgtttgaatgtgaagttgccaaccc

SEQ ID NO: 449700 - DNA, 120 bp, Artificial Sequence
  ENSG00000155657_68 (sequence is synthesized)
agattccaaaggcgaatggttgagggatggcaaacacctaccactgactaacaacatcagaagtgagtctgatggccacaaaaggagacttatcattgctgccaccaaattagatgacat

SEQ ID NO: 449701 - DNA, 120 bp, Artificial Sequence
  ENSG00000155657_69 (sequence is synthesized)
tggagaatatacctacaaggtggccacctccaaaacatctgccaaactcaaagttgaagctgtcaaaattaagaagactctgaagaacctcacagtgacagaaacacaggatgctgtttt

SEQ ID NO: 449702 - DNA, 120 bp, Artificial Sequence
  ENSG00000155657_70 (sequence is synthesized)
cactgtcgagcttacacaccctaatgtcaaaggtgtccagtggatcaaaaatggagttgtgctggaatccaatgaaaagtatgctatctctgtcaaaggaacaatttactctctgaggat

SEQ ID NO: 449703 - DNA, 120 bp, Artificial Sequence
  ENSG00000155657_71 (sequence is synthesized)
taaaaactgtgccatcgtggatgagtctgtttatggcttcaggcttggaaggcttggagccagtgccagactgcacgtggagactgtcaagatcattaaaaagccaaaggatgtgacagc

SEQ ID NO: 449704 - DNA, 120 bp, Artificial Sequence
  ENSG00000155657_72 (sequence is synthesized)
cttggaaaatgccactgttgcctttgaagttagtgtttcccatgacactgttccagtaaaatggttccataagagtgtggaaattaagccaagtgacaaacacagactggtctcagaaag

SEQ ID NO: 449705 - DNA, 120 bp, Artificial Sequence
  ENSG00000155657_73 (sequence is synthesized)
gaaagtccacaagctgatgctgcagaacatctccccctcagatgctggggaatacacagctgtggtcgggcaattggaatgcaaagcaaaactgtttgtggagacattacatattacaaa

SEQ ID NO: 449706 - DNA, 120 bp, Artificial Sequence
  ENSG00000155657_74 (sequence is synthesized)
aaccatgaaaaatatcgaggtgcctgagaccaaaactgcctcttttgagtgtgaggtgtcccacttcaatgtcccttccatgtggctgaagaatggtgtggaaattgagatgagtgaaaa

SEQ ID NO: 449707 - DNA, 120 bp, Artificial Sequence
  ENSG00000155657_75 (sequence is synthesized)
gttcaagatagttgtgcagggaaaactccatcagctgatcatcatgaacaccagcacagaggactcggcagaatacacatttgtctgtggcaatgaccaagtcagtgccaccctgacagt

SEQ ID NO: 449708 - DNA, 120 bp, Artificial Sequence
  ENSG00000155657_76 (sequence is synthesized)
caccccaatcatgattacttccatgctgaaagacatcaacgctgaagaaaaagacactattacttttgaggtgacagtgaactatgaaggcatctcttacaaatggttaaagaatggtgt

SEQ ID NO: 449709 - DNA, 120 bp, Artificial Sequence
  ENSG00000155657_77 (sequence is synthesized)
ggaaatcaaatcaactgacaagtgccagatgagaaccaaaaagctcacacactcactgaacatcaggaatgttcactttggggatgctgctgactacacctttgtggctggaaaagcaac

SEQ ID NO: 449710 - DNA, 120 bp, Artificial Sequence
  ENSG00000155657_78 (sequence is synthesized)
atcaacagccacactttatgtggaagctcgtcatatagaatttaggaaacacattaaggacattaaggtactggagaagaagcgagccatgtttgaatgtgaagtttctgaacctgacat

SEQ ID NO: 449711 - DNA, 120 bp, Artificial Sequence
  ENSG00000155657_79 (sequence is synthesized)
cactgtacagtggatgaaagatgaccaggaactgcagatcacagacagaataaagattcagaaggagaaatatgtccaccgccttctgatcccatccacccggatgtctgatgctgggaa

SEQ ID NO: 449712 - DNA, 120 bp, Artificial Sequence
  ENSG00000155657_80 (sequence is synthesized)
gtacacagtggtggcaggaggcaacgtgtcaactgcaaaactctttgtagaaggcagagatgttcgcatccgaagtattaaaaaggaggttcaggtcattgagaaacagcgtgctgttgt

SEQ ID NO: 449713 - DNA, 120 bp, Artificial Sequence
  ENSG00000155657_81 (sequence is synthesized)
tgaatttgaggtcaatgaagacgatgttgatgcccactggtataaagatggcattgaaatcaatttccaagttcaagaacgacacaaatatgtagtggaaagaagaatccaccgaatgtt

SEQ ID NO: 449714 - DNA, 120 bp, Artificial Sequence
  ENSG00000155657_82 (sequence is synthesized)
tatctctgagaccagacagagcgatgcaggagaatacacctttgtggcaggaaggaacaggagttctgtcactctctatgtcaatgctcctgaaccgccccaagttctgcaggagctcca

SEQ ID NO: 449715 - DNA, 120 bp, Artificial Sequence
  ENSG00000155657_83 (sequence is synthesized)
gcctgtcactgtgcagtctggcaagcctgcccgcttctgtgccgtgatatccggaagaccacagcccaaaatttcctggtacaaggaagagcagctgctttccactggcttcaagtgcaa

SEQ ID NO: 449716 - DNA, 120 bp, Artificial Sequence
  ENSG00000155657_84 (sequence is synthesized)
atttcttcatgatgggcaagaatacacgcttttgctaattgaagccttcccagaggatgcggcagtctatacctgtgaagccaagaatgactatggtgttgccacaacatcagcttcact

SEQ ID NO: 449717 - DNA, 120 bp, Artificial Sequence
  ENSG00000155657_85 (sequence is synthesized)
ctcagtggaagttccagaagttgtgtctcctgatcaggaaatgcctgtttatccacctgccatcatcaccccgcttcaggacactgtcacttctgaagggcagccagcccgttttcaatg

SEQ ID NO: 449718 - DNA, 120 bp, Artificial Sequence
  ENSG00000155657_86 (sequence is synthesized)
ccgggtttctggaacagatctaaaagtgtcgtggtacagcaaagacaagaaaatcaagccatctcggttctttagaatgactcaatttgaagacacttatcaactggaaattgccgaagc

SEQ ID NO: 449719 - DNA, 120 bp, Artificial Sequence
  ENSG00000155657_87 (sequence is synthesized)
ttatccagaagatgaaggaacttacacgtttgttgctagtaatgctgtaggccaagtatcaagcacagccaacctgagtctggaagctcctgaatcaattttgcatgagaggattgaaca

SEQ ID NO: 449720 - DNA, 120 bp, Artificial Sequence
  ENSG00000155657_88 (sequence is synthesized)
agagattgagatggaaatgaaagctgccccagtgatcaagaggaaaatcgaacccctggaagtagcactgggccacctagccaaattcacctgtgagatccaaagtgctcccaatgtccg

SEQ ID NO: 449721 - DNA, 120 bp, Artificial Sequence
  ENSG00000155657_89 (sequence is synthesized)
gttccagtggtttaaagctggccgagaaatttatgagagtgacaagtgttctattcgatcttcaaagtatatctccagccttgaaatcctgagaacccaggtggttgactgcggcgagta

SEQ ID NO: 449722 - DNA, 120 bp, Artificial Sequence
  ENSG00000155657_90 (sequence is synthesized)
tacatgcaaagcttccaatgagtatggcagtgtcagctgtacagccacactaactgtgacagaggcatatccaccaacctttctctccagacctaagtcccttacaacttttgtgggtaa

SEQ ID NO: 449723 - DNA, 120 bp, Artificial Sequence
  ENSG00000155657_91 (sequence is synthesized)
ggcagccaagttcatctgcacagtgacagggactcctgtgatagaaaccatttggcagaaagatggtgctgcactctcaccttcacctaactggaggatttccgacgcagaaaacaaaca

SEQ ID NO: 449724 - DNA, 120 bp, Artificial Sequence
  ENSG00000155657_92 (sequence is synthesized)
cattttagaactctcaaaccttaccattcaagatagaggagtttattcttgtaaggcttccaacaagtttggagcagacatctgccaagcagagttgatcatcattgataagccacattt

SEQ ID NO: 449725 - DNA, 120 bp, Artificial Sequence
  ENSG00000155657_93 (sequence is synthesized)
cattaaagaattagagcctgtgcagtccgctatcaataagaaggtccaccttgagtgccaagtagatgaagacagaaaagtcacagttacgtggagcaaagatgggcaaaaactcccccc

SEQ ID NO: 449726 - DNA, 120 bp, Artificial Sequence
  ENSG00000155657_94 (sequence is synthesized)
agggaaagattataagatctgttttgaagataaaatagcaacacttgagattcctttggccaaactgaaagattcaggaacctatgtctgtacagcttcaaatgaggctggaagcagctc

SEQ ID NO: 449727 - DNA, 120 bp, Artificial Sequence
  ENSG00000155657_95 (sequence is synthesized)
ctgctcagccacagtcactgtcagagagccaccatccttcgtgaagaaggtggatccctcttatttaatgctcccaggtgaatcagcacgcctccattgcaagctgaaaggctcacctgt

SEQ ID NO: 449728 - DNA, 120 bp, Artificial Sequence
  ENSG00000155657_96 (sequence is synthesized)
gatccaggttacttggtttaaaaataacaaagaactcagtgaaagtaacacagtccgaatgtattttgtcaattctgaggctatacttgatattacggatgtaaaagttgaagacagtgg

SEQ ID NO: 449729 - DNA, 120 bp, Artificial Sequence
  ENSG00000155657_97 (sequence is synthesized)
gagttactcatgtgaagcagtgaatgacgtcggcagtgatagctgcagtactgaaatagttatcaaagaacctccttctttcatcaaaactcttgagcctgcagacatagtgagaggaac

SEQ ID NO: 449730 - DNA, 120 bp, Artificial Sequence
  ENSG00000155657_98 (sequence is synthesized)
aaatgctctacttcagtgtgaagtctcaggcactggaccatttgaaattagctggttcaaagacaagaaacaaattcgaagtagtaaaaaatacagattgttttctcagaagtctcttgt

SEQ ID NO: 449731 - DNA, 120 bp, Artificial Sequence
  ENSG00000155657_99 (sequence is synthesized)
gtgtctggagatcttttcgtttaatagtgcagatgttggtgaatatgaatgtgttgttgctaatgaagtcggcaagtgtggctgcatggcaacccacttactcaaagaacctccaacctt

SEQ ID NO: 449732 - DNA, 120 bp, Artificial Sequence
  ENSG00000155657_100 (sequence is synthesized)
tgtaaagaaagtagatgatttgattgcactaggaggacaaaccgttaccctgcaagctgctgtgagagggtcagagcccatttctgtcacatggatgaaaggtcaagaggtcatcagaga

SEQ ID NO: 449733 - DNA, 120 bp, Artificial Sequence
  ENSG00000155657_101 (sequence is synthesized)
agacggaaaaatcaaaatgagcttttccaatggtgttgcagtcttgataatccctgatgttcagattagttttggaggcaaatacacgtgcctggctgaaaatgaagctggaagccaaac

SEQ ID NO: 449734 - DNA, 120 bp, Artificial Sequence
  ENSG00000155657_102 (sequence is synthesized)
atctgttggggaattaatagttaaagaacctgccaaaatcattgagcgagcagaactgatccaggtgacagcaggagatcccgccacactggagtacacagtggcaggcacgccagaact

SEQ ID NO: 449735 - DNA, 120 bp, Artificial Sequence
  ENSG00000155657_103 (sequence is synthesized)
gaagcccaaatggtacaaagatgggagacccttggtcgccagtaaaaaataccgaataagttttaaaaacaatgttgcccagctcaaattttattcagctgagctgcacgacagtggcca

SEQ ID NO: 449736 - DNA, 120 bp, Artificial Sequence
  ENSG00000155657_104 (sequence is synthesized)
atacacatttgagatttccaatgaagtgggcagcagctcctgtgagactacattcactgtattagatcgagacattgctccattttttaccaaacccttgcgcaacgtggatagtgttgt

SEQ ID NO: 449737 - DNA, 120 bp, Artificial Sequence
  ENSG00000155657_105 (sequence is synthesized)
taatggtacctgcagactggactgcaaaattgcaggctccctccccatgagggtgtcctggtttaaggatggcaaagaaatagctgcttctgacagatacaggatagcatttgtggaagg

SEQ ID NO: 449738 - DNA, 120 bp, Artificial Sequence
  ENSG00000155657_106 (sequence is synthesized)
cacagcctctttggagatcatcagagtagacatgaatgatgcagggaatttcacttgtcgagccacaaattccgtgggaagcaaagacagcagtggagccctgattgtgcaagaaccacc

SEQ ID NO: 449739 - DNA, 120 bp, Artificial Sequence
  ENSG00000155657_107 (sequence is synthesized)
cagttttgtaactaaacccggctcaaaggatgttctgcctggctcagcagtctgcctgaagagcactttccaaggatctactcctctcacaatcagatggtttaagggcaacaaagagct

SEQ ID NO: 449740 - DNA, 120 bp, Artificial Sequence
  ENSG00000155657_108 (sequence is synthesized)
ggtttctggtggaagctgctatattaccaaagaagctttagagagttccctggaactctatttagtaaaaacctctgattcgggcacgtacacatgtaaagtcagcaatgtcgctggagg

SEQ ID NO: 449741 - DNA, 120 bp, Artificial Sequence
  ENSG00000155657_109 (sequence is synthesized)
ggtggaatgcagtgcaaacttgtttgtaaaagaacctgccacatttgttgaaaagttagagccatcacagctgttaaagaagggagatgccacccagctagcctgcaaagtaactggtac

SEQ ID NO: 449742 - DNA, 120 bp, Artificial Sequence
  ENSG00000155657_110 (sequence is synthesized)
ccctccaattaaaataacatggtttgcaaatgatagagaaattaaggagagcagcaaacacagaatgtcttttgtggagtctactgcagttctaagactgacagatgttggcatcgaaga

SEQ ID NO: 449743 - DNA, 120 bp, Artificial Sequence
  ENSG00000155657_111 (sequence is synthesized)
cagtggtgaatatatgtgtgaggcccaaaatgaggctggcagtgaccactgcagtagcattgtaatagtcaaagagtcaccttattttaccaaggaatttaagccaattgaagtcttaaa

SEQ ID NO: 449744 - DNA, 120 bp, Artificial Sequence
  ENSG00000155657_112 (sequence is synthesized)
ggagtacgatgtcatgttgctggctgaggtggcaggcactcctccctttgagatcacttggttcaaagataacacaatcctgcgaagtggtagaaagtataagactttcattcaggatca

SEQ ID NO: 449745 - DNA, 120 bp, Artificial Sequence
  ENSG00000155657_113 (sequence is synthesized)
tctggttagcctgcagatcctcaagtttgtagctgcagatgctggcgaataccagtgtcgggtgaccaatgaggtgggcagcagcatctgcagtgccagggtgactttaagagaaccccc

SEQ ID NO: 449746 - DNA, 120 bp, Artificial Sequence
  ENSG00000155657_114 (sequence is synthesized)
atccttcataaagaagatcgagagtaccagctccctccggggaggcacagctgccttccaggccactctgaagggctccttgccaattacggtgacttggctaaaagacagcgatgaaat

SEQ ID NO: 449747 - DNA, 120 bp, Artificial Sequence
  ENSG00000155657_115 (sequence is synthesized)
cactgaagacgataatataagaatgacctttgagaacaatgtggccagtttgtacctcagtggcattgaagtcaagcatgatgggaaatatgtctgtcaggccaaaaatgatgcaggaat

SEQ ID NO: 449748 - DNA, 120 bp, Artificial Sequence
  ENSG00000155657_116 (sequence is synthesized)
acaaagatgttctgcattactctcagtaaaagaacctgcaacaatcaccgaggaagctgtgtctatagatgtcacccaaggagacccagccactttgcaggttaaattttcagggactaa

SEQ ID NO: 449749 - DNA, 120 bp, Artificial Sequence
  ENSG00000155657_117 (sequence is synthesized)
ggagattacagccaaatggtttaaagatggccaagaactgaccctgggctcaaaatataaaatcagtgtcactgatacagtctcaatactgaagattatttctacagaaaagaaagatag

SEQ ID NO: 449750 - DNA, 120 bp, Artificial Sequence
  ENSG00000155657_118 (sequence is synthesized)
tggagaatatactttcgaggtccaaaatgatgttgggaggagcagctgcaaggctagaattaatgtattagatcttatcatacctccttcattcaccaaaaagctgaagaaaatggacag

SEQ ID NO: 449751 - DNA, 120 bp, Artificial Sequence
  ENSG00000155657_119 (sequence is synthesized)
cattaaaggttctttcattgatttagaatgtatagtggctgggtcacatcccataagcatccagtggttcaaagatgaccaagaaatatcagctagtgaaaagtacaaattctcttttca

SEQ ID NO: 449752 - DNA, 120 bp, Artificial Sequence
  ENSG00000155657_120 (sequence is synthesized)
tgacaatactgccttcttggaaatcagccagctggaaggtacagacagtgggacatacacttgttctgccacaaataaggcagggcacaaccaatgcagtgggcatctgacagtcaaaga

SEQ ID NO: 449753 - DNA, 120 bp, Artificial Sequence
  ENSG00000155657_121 (sequence is synthesized)
acccccttactttgtggaaaagccacagtcacaagatgtcaatcccaacacaagggtacagttaaaggctcttgtgggtggcactgcacccatgacaataaagtggtttaaagataacaa

SEQ ID NO: 449754 - DNA, 120 bp, Artificial Sequence
  ENSG00000155657_122 (sequence is synthesized)
agagttacactcaggagcagcccgctcagtttggaaggatgacacctctaccagtctagagctctttgcagccaaagctaccgattctggaacctacatttgccaactaagcaatgatgt

SEQ ID NO: 449755 - DNA, 120 bp, Artificial Sequence
  ENSG00000155657_123 (sequence is synthesized)
tggcacagcaaccagcaaagccactctctttgtaaaagaacctcctcaattcattaagaagcccagtccagtcttagtgctgaggaatggacagtcaacaacatttgaatgccaaataac

SEQ ID NO: 449756 - DNA, 120 bp, Artificial Sequence
  ENSG00000155657_124 (sequence is synthesized)
aggcactcctaaaatccgagtgtcttggtatctagacgggaatgaaataacagccattcagaaacatggcatttccttcattgatggtttagccactttccagatttctggtgccagggt

SEQ ID NO: 449757 - DNA, 120 bp, Artificial Sequence
  ENSG00000155657_125 (sequence is synthesized)
agaaaatagtgggacttatgtgtgtgaagctcgaaatgacgcaggcacggcgagctgcagcattgaactcaaagtgaaagaaccccccacctttatcagagagctgaagcctgtggaggt

SEQ ID NO: 449758 - DNA, 120 bp, Artificial Sequence
  ENSG00000155657_126 (sequence is synthesized)
agtaaaatatagtgacgtggagctggagtgtgaagttacgggaacacctccgtttgaagtcacttggctgaagaataacagggaaattcgaagcagcaaaaaatacacattgaccgacag

SEQ ID NO: 449759 - DNA, 120 bp, Artificial Sequence
  ENSG00000155657_127 (sequence is synthesized)
agtgtctgtgtttaacctccatataaccaagtgtgacccttcagacactggggaataccagtgcattgtatccaatgaaggcggcagctgctcatgcagtactagagttgccctgaaaga

SEQ ID NO: 449760 - DNA, 120 bp, Artificial Sequence
  ENSG00000155657_128 (sequence is synthesized)
accaccatcattcattaagaagatagaaaataccactactgttttgaaaagttctgccacctttcagagtaccgtggcaggttctcctcctatttctataacctggctaaaggatgatca

SEQ ID NO: 449761 - DNA, 120 bp, Artificial Sequence
  ENSG00000155657_129 (sequence is synthesized)
gattcttgatgaagatgataatgtctatatttcatttgtggacagtgtggccacacttcaaatcagaagtgtggataatggacacagtgggagatatacctgtcaagccaagaatgagtc

SEQ ID NO: 449762 - DNA, 120 bp, Artificial Sequence
  ENSG00000155657_130 (sequence is synthesized)
aggagttgagaggtgttatgctttccttttagtacaagaaccagctcaaatcgtagagaaagctaaatcagttgatgttacggagaaagatcccatgaccttggaatgtgttgtggctgg

SEQ ID NO: 449763 - DNA, 120 bp, Artificial Sequence
  ENSG00000155657_131 (sequence is synthesized)
aacaccagaactcaaagtgaaatggcttaaagacgggaaacaaatagttcccagtagatacttttcaatgagttttgaaaataacgtggccagttttagaattcagtcagtaatgaagca

SEQ ID NO: 449764 - DNA, 120 bp, Artificial Sequence
  ENSG00000155657_132 (sequence is synthesized)
ggacagcggtcagtacactttcaaggtggaaaatgacttcggaagcagtagctgtgatgcctacttaagagtgctagatcaaaatattcctccatcattcaccaaaaaattaaccaaaat

SEQ ID NO: 449765 - DNA, 120 bp, Artificial Sequence
  ENSG00000155657_133 (sequence is synthesized)
ggataaagttctgggctcttctattcatatggagtgcaaggtgtctggttcacttcccattagtgctcagtggtttaaggatggaaaagaaatatctacaagtgcaaaatacagacttgt

SEQ ID NO: 449766 - DNA, 120 bp, Artificial Sequence
  ENSG00000155657_134 (sequence is synthesized)
gtgccatgagagatctgtgtctctggaagttaataatctggaattagaagatactgcaaattacacatgcaaagtgtcaaatgtagcaggagatgatgcatgcagtggcatcttaactgt

SEQ ID NO: 449767 - DNA, 120 bp, Artificial Sequence
  ENSG00000155657_135 (sequence is synthesized)
gaaagaaccaccaagcttcctagtgaaacctgggcgacagcaagccatacctgattctacagtggaatttaaggcaatactaaaaggaacaccaccatttaaaataaaatggtttaagga

SEQ ID NO: 449768 - DNA, 120 bp, Artificial Sequence
  ENSG00000155657_136 (sequence is synthesized)
tgatgtggaacttgtctcaggtcctaaatgtttcattggcttggaagggtcgactagcttcttaaatctctactcagtggatgcttctaagactggacagtatacttgccatgttaccaa

SEQ ID NO: 449769 - DNA, 120 bp, Artificial Sequence
  ENSG00000155657_137 (sequence is synthesized)
tgatgttggtagcgactcttgtactacgatgttgcttgtgacagaaccaccaaagtttgtaaagaaattagaagcctccaaaattgtgaaagcaggtgactcttcacgacttgaatgcaa

SEQ ID NO: 449770 - DNA, 120 bp, Artificial Sequence
  ENSG00000155657_138 (sequence is synthesized)
gatagctggatccccagaaatcagagttgtgtggttccgaaatgaacatgaacttccagccagtgataagtacagaatgactttcattgactcagtggccgtcatacagatgaacaatct

SEQ ID NO: 449771 - DNA, 120 bp, Artificial Sequence
  ENSG00000155657_139 (sequence is synthesized)
cagtactgaggacagtggagatttcatttgtgaggctcagaatcccgctggcagcacaagctgcagtaccaaggttatagtaaaagagccacctgtttttagcagcttccctcctatagt

SEQ ID NO: 449772 - DNA, 120 bp, Artificial Sequence
  ENSG00000155657_140 (sequence is synthesized)
agaaacccttaaaaatgctgaagtcagtcttgaatgtgaactttcgggaacaccaccgtttgaggtggtatggtacaaagacaagcggcaactcagaagcagcaagaaatacaagattgc

SEQ ID NO: 449773 - DNA, 120 bp, Artificial Sequence
  ENSG00000155657_141 (sequence is synthesized)
atccaaaaacttccacacaagtattcacattctcaatgtggacacttcagacatcggtgaataccactgcaaagcacagaatgaagtgggaagtgatacttgtgtttgtactgtaaaatt

SEQ ID NO: 449774 - DNA, 120 bp, Artificial Sequence
  ENSG00000155657_142 (sequence is synthesized)
gaaagaaccaccaagatttgtctccaaactgaacagcctcactgttgtagccggagagcctgctgaattacaagcatccatagaaggcgcccagcctatttttgtccagtggcttaaaga

SEQ ID NO: 449775 - DNA, 120 bp, Artificial Sequence
  ENSG00000155657_143 (sequence is synthesized)
gaaggaagaagtgattagagaaagtgaaaacatcaggattacatttgtggaaaatgttgcaactctacagtttgcaaaagcagagccagctaatgctggaaagtatatctgccaaatcaa

SEQ ID NO: 449776 - DNA, 120 bp, Artificial Sequence
  ENSG00000155657_144 (sequence is synthesized)
gaatgatggtggaatgagggagaacatggccacactgatggtcttagagcccgcagtcattgttgagaaggcaggaccgatgacggtgactgtaggagaaacgtgcactctggagtgtaa

SEQ ID NO: 449777 - DNA, 120 bp, Artificial Sequence
  ENSG00000155657_145 (sequence is synthesized)
ggtggctggcactccggaactctctgttgaatggtacaaggatggaaagctgttgaccagcagccaaaaacacaaatttagcttctacaacaaaatctcttccttaaggattctctcagt

SEQ ID NO: 449778 - DNA, 120 bp, Artificial Sequence
  ENSG00000155657_146 (sequence is synthesized)
tgaaaggcaagatgcaggcacatacactttccaggttcaaaataatgttgggaaaagcagctgcacagctgtggttgatgtttcagaccgagcagttcctccctctttcacacgaagact

SEQ ID NO: 449779 - DNA, 120 bp, Artificial Sequence
  ENSG00000155657_147 (sequence is synthesized)
gaaaaatactggtggggtgttaggtgcttcttgcatcttggaatgcaaagtagctggatcatcacctatttcagttgcctggtttcatgagaaaaccaagattgtcagtggagcaaagta

SEQ ID NO: 449780 - DNA, 120 bp, Artificial Sequence
  ENSG00000155657_148 (sequence is synthesized)
ccaaaccacattttcagataatgtctgcacattgcagttgaattctctggattcctcagatatgggcaattacacatgcgtggctgctaatgtcgctgggtctgatgaatgtcgtgcagt

SEQ ID NO: 449781 - DNA, 120 bp, Artificial Sequence
  ENSG00000155657_149 (sequence is synthesized)
gctaactgtacaagaaccaccctcttttgtgaaagaacctgaacctttggaagtactaccaggcaaaaatgtaaccttcacaagcgttattagaggaacccctccattcaaagtcaactg

SEQ ID NO: 449782 - DNA, 120 bp, Artificial Sequence
  ENSG00000155657_150 (sequence is synthesized)
gttcagaggtgccagagaactagtgaaaggagaccggtgcaacatctattttgaagacactgtggcagaactggaattatttaatattgacatatctcagagtggggaatacacctgtgt

SEQ ID NO: 449783 - DNA, 120 bp, Artificial Sequence
  ENSG00000155657_151 (sequence is synthesized)
ggtttctaacaacgctggccaagcatcttgcactacccgtctctttgtgaaagaaccagctgcatttttgaagagattaagtgatcattctgtagaaccagggaagtccataattctgga

SEQ ID NO: 449784 - DNA, 120 bp, Artificial Sequence
  ENSG00000155657_152 (sequence is synthesized)
gagcacctacactggaacacttccaatttctgtcacttggaaaaaggatggttttaacataactacctctgaaaaatgtaacatagtcacaacagagaaaacttgtatcctggaaattct

SEQ ID NO: 449785 - DNA, 120 bp, Artificial Sequence
  ENSG00000155657_153 (sequence is synthesized)
gaatagcacaaaaagagatgcagggcagtattcctgcgagattgaaaatgaggcaggaagggatgtttgtggagctctggtatctacattagaaccgccttattttgttacggaactgga

SEQ ID NO: 449786 - DNA, 120 bp, Artificial Sequence
  ENSG00000155657_154 (sequence is synthesized)
acctctggaggcagcagttggagattcggtttctttacaatgccaagttgctgggacaccagaaattacagtgtcttggtacaaaggagataccaaattacggccaactcctgaatacag

SEQ ID NO: 449787 - DNA, 120 bp, Artificial Sequence
  ENSG00000155657_155 (sequence is synthesized)
gacctactttacaaacaatgtggccacacttgtttttaataaagtgaacatcaatgacagtggagagtacacatgcaaagcagaaaatagtataggaactgcttcttctaagactgtgtt

SEQ ID NO: 449788 - DNA, 120 bp, Artificial Sequence
  ENSG00000155657_156 (sequence is synthesized)
cagaattcaagagcgccaactcccaccttcttttgcaagacaattaaaggacattgaacaaactgtggggttacctgttacactcacttgtcgattaaatggctctgcacccatccaagt

SEQ ID NO: 449789 - DNA, 120 bp, Artificial Sequence
  ENSG00000155657_157 (sequence is synthesized)
gtgctggtatagagatggagtacttttaagagacgatgaaaatctacagacttcatttgtagataatgtggcaactttaaaaattttgcaaactgacttgagtcactctggccagtactc

SEQ ID NO: 449790 - DNA, 120 bp, Artificial Sequence
  ENSG00000155657_158 (sequence is synthesized)
ttgctcagcttccaacccacttggaacagcatcttctagtgctagactcacagcaagagaacccaagaaatctcccttctttgacatcaagcctgtatctatagatgttattgctggaga

SEQ ID NO: 449791 - DNA, 120 bp, Artificial Sequence
  ENSG00000155657_159 (sequence is synthesized)
aagtgctgattttgagtgtcatgttactggtgctcaaccgatgcgaatcacttggtcaaaagataacaaggagatccgtcctggaggaaactatacaatcacatgtgtgggaaacactcc

SEQ ID NO: 449792 - DNA, 120 bp, Artificial Sequence
  ENSG00000155657_160 (sequence is synthesized)
tcatttgagaattcttaaagtaggcaaaggagactctggtcaatatacttgccaagcaaccaatgatgttggcaaagacatgtgctcagctcagctcagtgtaaaagaacctccaaagtt

SEQ ID NO: 449793 - DNA, 120 bp, Artificial Sequence
  ENSG00000155657_161 (sequence is synthesized)
tgttaagaaattagaagcttcaaaagttgcaaagcagggagaatccattcaactggaatgtaaaataagtggctccccagaaatcaaagtttcatggttccgaaatgacagcgaacttca

SEQ ID NO: 449794 - DNA, 120 bp, Artificial Sequence
  ENSG00000155657_162 (sequence is synthesized)
tgaaagttggaaatacaacatgtcattcattaattctgtggcattgcttacgatcaatgaagctagtgctgaagacagcggggactacatttgtgaggctcataatggtgttggtgacgc

SEQ ID NO: 449795 - DNA, 120 bp, Artificial Sequence
  ENSG00000155657_163 (sequence is synthesized)
cagctgcagcacagcgttgacagtgaaagcacctcctgttttcacccagaagccttctccagtaggagctcttaaaggttctgatgtgattctccaatgtgaaatttcgggaactccccc

SEQ ID NO: 449796 - DNA, 120 bp, Artificial Sequence
  ENSG00000155657_164 (sequence is synthesized)
atttgaagtagtatgggttaaagatcgaaagcaggttagaaacagcaagaaatttaaaatcacttcaaaacattttgatacaagtcttcatatccttaatcttgaagcctccgatgtcgg

SEQ ID NO: 449797 - DNA, 120 bp, Artificial Sequence
  ENSG00000155657_165 (sequence is synthesized)
ggaatatcactgcaaagctactaatgaggtgggaagtgacacgtgttcttgctctgtcaagttcaaagaacctccacgattcgtgaaaaagctaagtgacacctcaacccttattgggga

SEQ ID NO: 449798 - DNA, 120 bp, Artificial Sequence
  ENSG00000155657_166 (sequence is synthesized)
tgctgttgagttacgggccatagtggagggcttccagccaatttctgttgtctggctgaaagatagaggtgaagtcatcagagagagtgaaaataccaggatttcattcattgataacat

SEQ ID NO: 449799 - DNA, 120 bp, Artificial Sequence
  ENSG00000155657_167 (sequence is synthesized)
tgcaaccctccagctggggagtccagaagcatctaattctggaaaatatatatgccaaatcaaaaacgatgctggaatgagagaatgctctgcagtcttgactgtactagaaccagcaag

SEQ ID NO: 449800 - DNA, 120 bp, Artificial Sequence
  ENSG00000155657_168 (sequence is synthesized)
aatcatagagaagcccgaacccatgactgtcactactggaaatccttttgcattagagtgtgtagtgactggaacaccagaactctcagccaagtggttcaaagatggaagagaattgtc

SEQ ID NO: 449801 - DNA, 120 bp, Artificial Sequence
  ENSG00000155657_169 (sequence is synthesized)
tgcagacagcaaacatcacattacattcatcaataaagtggcttcccttaaaatcccctgtgccgaaatgagtgacaaaggattatatagctttgaagtgaaaaacagtgttggcaaaag

SEQ ID NO: 449802 - DNA, 120 bp, Artificial Sequence
  ENSG00000155657_170 (sequence is synthesized)
taactgcactgtatccgtccatgtttctgatcggattgtgcctccttccttcatccgcaagctgaaagacgtgaatgccatcctgggggcctcagttgttttggagtgccgagtctctgg

SEQ ID NO: 449803 - DNA, 120 bp, Artificial Sequence
  ENSG00000155657_171 (sequence is synthesized)
ctcagccccgatttcagttggctggtttcaggatggaaatgagattgttagtgggcccaaatgtcagtccagcttttcggaaaacgtctgtactttgaatctgagcttgttggagccctc

SEQ ID NO: 449804 - DNA, 120 bp, Artificial Sequence
  ENSG00000155657_172 (sequence is synthesized)
cgacacaggcatatacacgtgtgtggctgccaatgtagctggttccgatgagtgctcagcagtcctgactgtgcaagaaccaccatcttttgaacaaacccctgattctgtggaagtttt

SEQ ID NO: 449805 - DNA, 120 bp, Artificial Sequence
  ENSG00000155657_173 (sequence is synthesized)
gcctggaatgagcctcacattcaccagtgtcatcagaggcacccctcctttcaaggtcaagtggtttaaaggcagcagggaactggtgcctggggagtcatgcaacatctctctggaaga

SEQ ID NO: 449806 - DNA, 120 bp, Artificial Sequence
  ENSG00000155657_174 (sequence is synthesized)
ttttgtcacagaactggagttgtttgaggtgcagccattagaaagtggagactattcttgcctcgttacaaatgatgctggcagtgcttcctgtaccacacatctttttgtgaaagaacc

SEQ ID NO: 449807 - DNA, 120 bp, Artificial Sequence
  ENSG00000155657_175 (sequence is synthesized)
agccacctttgtgaaaagattggctgatttcagtgttgagacaggaagccccatagttctcgaggccacatacactggcacacctccaatctcagtgagctggataaaggacgagtatct

SEQ ID NO: 449808 - DNA, 120 bp, Artificial Sequence
  ENSG00000155657_176 (sequence is synthesized)
tatttcacaatctgagagatgcagtattactatgacagaaaaatctaccatactggaaattcttgagagcacaatagaggattatgcacagtacagctgcctgatagaaaatgaggctgg

SEQ ID NO: 449809 - DNA, 120 bp, Artificial Sequence
  ENSG00000155657_177 (sequence is synthesized)
tcaagatatctgtgaagctctggtgtctgtcttagaaccaccgtactttattgaacctctggaacatgtggaagcagtcattggagaacctgcaactttacagtgtaaagtggatggaac

SEQ ID NO: 449810 - DNA, 120 bp, Artificial Sequence
  ENSG00000155657_178 (sequence is synthesized)
tccagaaattagaatttcttggtataaagaacacacaaagctacgatcagctcctgcatataaaatgcaattcaaaaataacgttgcttccttagtaatcaacaaagtggatcacagtga

SEQ ID NO: 449811 - DNA, 120 bp, Artificial Sequence
  ENSG00000155657_179 (sequence is synthesized)
tgtgggagagtattcatgcaaggcagacaacagtgtgggggcagtcgcttcttcagctgtgcttgttatcaaagcgcgcaaacttccacctttctttgcaagaaaactgaaagacgttca

SEQ ID NO: 449812 - DNA, 120 bp, Artificial Sequence
  ENSG00000155657_180 (sequence is synthesized)
tgagactctaggcttcccagttgcatttgaatgccgcatcaatggctcagaacctcttcaagtgtcttggtacaaggatggggttcttttgaaagatgatgctaatttgcagacatcttt

SEQ ID NO: 449813 - DNA, 120 bp, Artificial Sequence
  ENSG00000155657_181 (sequence is synthesized)
tgttcataatgtagcaactcttcagattttacaaactgaccagagccacatagggcagtataattgctctgcttctaatcctcttgggactgcttcatccagtgccaagctcattctctc

SEQ ID NO: 449814 - DNA, 120 bp, Artificial Sequence
  ENSG00000155657_182 (sequence is synthesized)
agagcatgaagtgcctcctttctttgatctaaagcctgtatcagtagatcttgctcttggagaaagtggtacttttaaatgtcatgtaactgggactgcaccaatcaaaatcacttgggc

SEQ ID NO: 449815 - DNA, 120 bp, Artificial Sequence
  ENSG00000155657_183 (sequence is synthesized)
caaagataaccgagagattcgccctggaggcaactacaagatgactttggtagaaaatactgccactctgacagttctcaaagtaggcaaaggcgatgccgggcagtacacctgctatgc

SEQ ID NO: 449816 - DNA, 120 bp, Artificial Sequence
  ENSG00000155657_184 (sequence is synthesized)
aagcaacatcgctggaaaagactcttgttctgctcagctgggtgtacaagaaccacccaggttcattaagaagctagaaccttcaagaattgtgaaacaggatgaattcacaaggtatga

SEQ ID NO: 449817 - DNA, 120 bp, Artificial Sequence
  ENSG00000155657_185 (sequence is synthesized)
atgcaaaatcggtgggtctccagaaatcaaagttttatggtataaggacgagactgaaattcaagagagcagtaaattcagaatgtcattcgttgactcggtggctgtgctggaaatgca

SEQ ID NO: 449818 - DNA, 120 bp, Artificial Sequence
  ENSG00000155657_186 (sequence is synthesized)
caatctcagtgttgaagacagtggagactacacctgtgaggcccacaatgcagcaggcagtgccagcagcagcacatccttaaaagttaaagaaccacccattttccgcaaaaagcctca

SEQ ID NO: 449819 - DNA, 120 bp, Artificial Sequence
  ENSG00000155657_187 (sequence is synthesized)
tcctatagagacactgaaaggagctgatgttcaccttgaatgtgagcttcagggcactcccccatttcacgtttcttggtataaagacaagagagaacttaggagcggcaagaagtacaa

SEQ ID NO: 449820 - DNA, 120 bp, Artificial Sequence
  ENSG00000155657_188 (sequence is synthesized)
gataatgtctgagaacttcctaaccagtatccacatcctgaatgtcgatgctgcagacattggggaatatcagtgtaaagccacaaatgatgtgggaagcgacacttgcgttggttccat

SEQ ID NO: 449821 - DNA, 120 bp, Artificial Sequence
  ENSG00000155657_189 (sequence is synthesized)
cgctctcaaagcaccaccaagatttgtgaagaagctcagtgacatatctactgtcgttggtaaagaagttcagctgcagactaccattgaaggcgctgaacccatttcagtggtgtggtt

SEQ ID NO: 449822 - DNA, 120 bp, Artificial Sequence
  ENSG00000155657_190 (sequence is synthesized)
caaagataagggagaaatcgttagagaaagtgacaacatatggatttcttattcagaaaacattgcaaccttacagttttcaagagtggaaccagccaatgctggaaaatacacttgtca

SEQ ID NO: 449823 - DNA, 120 bp, Artificial Sequence
  ENSG00000155657_191 (sequence is synthesized)
gatcaaaaacgatgctgggatgcaagagtgcttcgccacgctatccgttctcgagcctgcaacaattgtagaaaagccagaatccataaaagttaccacgggagacacctgtaccttgga

SEQ ID NO: 449824 - DNA, 120 bp, Artificial Sequence
  ENSG00000155657_192 (sequence is synthesized)
gtgtacagtagctggcacccctgaactcagtactaagtggtttaaggatggaaaagagctaacaagtgacaacaaatacaaaataagcttcttcaacaaagtatccggccttaagatcat

SEQ ID NO: 449825 - DNA, 120 bp, Artificial Sequence
  ENSG00000155657_193 (sequence is synthesized)
caatgtagcaccgagtgacagtggggtatacagttttgaggtgcagaaccctgttggcaaagacagctgcacagcttcattgcaggtttcagaccgaaccgttcctccttcattcacaag

SEQ ID NO: 449826 - DNA, 120 bp, Artificial Sequence
  ENSG00000155657_194 (sequence is synthesized)
aaaattgaaagagacaaatggtctatccggctcctcagttgtaatggagtgtaaagtctatgggtcacctccaatctctgtctcctggttccatgaaggaaatgagatcagtagtggaag

SEQ ID NO: 449827 - DNA, 120 bp, Artificial Sequence
  ENSG00000155657_195 (sequence is synthesized)
gaaataccagaccaccctgacagataatacttgtgctttaactgtgaacatgctggaagaatcagacagtggtgactacacatgtatagctactaatatggctggttctgatgaatgtag

SEQ ID NO: 449828 - DNA, 120 bp, Artificial Sequence
  ENSG00000155657_196 (sequence is synthesized)
tgctcctttgactgtgagagaaccaccatcttttgttcagaaacctgatcccatggatgttttaactgggaccaatgtaactttcacaagtatcgtaaaaggaacacctcctttcagtgt

SEQ ID NO: 449829 - DNA, 120 bp, Artificial Sequence
  ENSG00000155657_197 (sequence is synthesized)
tagctggttcaaaggtagcagtgaactagtaccaggtgacagatgcaacgtgtctttggaggattcagttgctgaactggagttgttcgatgtagatacatcacaaagtggagaatatac

SEQ ID NO: 449830 - DNA, 120 bp, Artificial Sequence
  ENSG00000155657_198 (sequence is synthesized)
ttgcatagttagcaatgaagctggcaaggcttcttgtacaacacatctctacataaaagccccagccaaatttgtgaagaggctgaatgattacagcatagagaaaggaaaacccctgat

SEQ ID NO: 449831 - DNA, 120 bp, Artificial Sequence
  ENSG00000155657_199 (sequence is synthesized)
cctagagggtacattcactggaactcctcccatttcggttacctggaagaaaaatggcataaatgtaactccttctcagaggtgtaatataactacgactgaaaaatcggcaatcctgga

SEQ ID NO: 449832 - DNA, 120 bp, Artificial Sequence
  ENSG00000155657_200 (sequence is synthesized)
aattccaagtagcacagtagaggatgcaggacaatacaactgctacattgaaaatgcctctggaaaagattcctgttcagcacaaatactcatactagaaccaccgtattttgtcaagca

SEQ ID NO: 449833 - DNA, 120 bp, Artificial Sequence
  ENSG00000155657_201 (sequence is synthesized)
gttggagccggttaaggtgtctgttggagattctgcctctctacaatgccagcttgctggaacccctgaaattggggtatcctggtataaaggagatacaaaattgagacccactacgac

SEQ ID NO: 449834 - DNA, 120 bp, Artificial Sequence
  ENSG00000155657_202 (sequence is synthesized)
ttacaaaatgcattttaggaataatgttgctacactggttttcaaccaggttgatattaatgatagtggagaatatatctgcaaagctgaaaacagcgtgggagaagtttctgcatcaac

SEQ ID NO: 449835 - DNA, 120 bp, Artificial Sequence
  ENSG00000155657_203 (sequence is synthesized)
tttccttaccgttcaagagcaaaaacttccaccatcattttctcgacaattgagagatgttcaagaaacagttggactgccagttgtttttgattgtgccataagtggatcagaacctat

SEQ ID NO: 449836 - DNA, 120 bp, Artificial Sequence
  ENSG00000155657_204 (sequence is synthesized)
ctccgtgtcttggtataaagacggcaagccattgaaagacagcccaaatgtacaaacatcatttttagacaatacagccacactcaatatttttaaaactgaccggagccttgcaggcca

SEQ ID NO: 449837 - DNA, 120 bp, Artificial Sequence
  ENSG00000155657_205 (sequence is synthesized)
gtattcctgcacagctacaaaccctataggctctgcttcttccagtgccaggctcattctcacagaggggaagaacccacccttctttgacatccgtcttgcccctgtggatgctgtggt

SEQ ID NO: 449838 - DNA, 120 bp, Artificial Sequence
  ENSG00000155657_206 (sequence is synthesized)
gggagaaagtgctgactttgagtgccacgtcacgggcacacaaccgataaaggtcagctgggccaaagacagcagagaaatacgaagtggcggaaagtaccagattagttatctggaaaa

SEQ ID NO: 449839 - DNA, 120 bp, Artificial Sequence
  ENSG00000155657_207 (sequence is synthesized)
cagcgcccacctgacagtcctcaaagtagacaaaggagattctggacaatatacctgctatgctgtgaatgaagtgggaaaagactcttgcacagctcagctgaatataaaagagcggct

SEQ ID NO: 449840 - DNA, 120 bp, Artificial Sequence
  ENSG00000155657_208 (sequence is synthesized)
catcccaccaagtttcactaaaagactctcagagacagtagaagaaacagaagggaattctttcaaacttgagggacgtgtggctggttcccaacctataactgttgcctggtacaaaaa

SEQ ID NO: 449841 - DNA, 120 bp, Artificial Sequence
  ENSG00000155657_209 (sequence is synthesized)
taatatagagatacaaccaacttctaactgtgaaataacattcaagaacaacacgttagtgctgcaagtcaggaaagcaggcatgaacgacgctggtttgtacacatgcaaagtgtccaa

SEQ ID NO: 449842 - DNA, 120 bp, Artificial Sequence
  ENSG00000155657_210 (sequence is synthesized)
tgatgcaggctctgctctgtgcacgtcttcaatcgtcatcaaagaacctaagaagccacctgtatttgatcagcaccttactccagtaacagtgagtgaaggagaatacgtgcagctcag

SEQ ID NO: 449843 - DNA, 120 bp, Artificial Sequence
  ENSG00000155657_211 (sequence is synthesized)
ctgccatgtccagggatctgagccaattaggatccagtggttgaaggctggcagggaaataaagccttcagacagatgcagcttcagctttgctagtgggacagctgtactggaactcag

SEQ ID NO: 449844 - DNA, 120 bp, Artificial Sequence
  ENSG00000155657_212 (sequence is synthesized)
agatgtggctaaagcagattcgggagattatgtgtgtaaagcttcaaatgtggctggaagtgacactaccaaatcaaaagtgaccattaaagacaaaccagctgtggccccagcaaccaa

SEQ ID NO: 449845 - DNA, 120 bp, Artificial Sequence
  ENSG00000155657_213 (sequence is synthesized)
gaaagctgcggtagatggaagactcttttttgtgtcagaacctcagagtatcagagtcgtagaaaaaaccactgcgaccttcattgcaaaagttggaggtgacccaatcccaaatgttaa

SEQ ID NO: 449846 - DNA, 120 bp, Artificial Sequence
  ENSG00000155657_214 (sequence is synthesized)
atggacaaaagggaagtggagacagctgaaccaaggaggtcgtgttttcatccaccaaaaaggcgatgaagcaaaactggagattagggacaccacaaaaactgattctgggttataccg

SEQ ID NO: 449847 - DNA, 120 bp, Artificial Sequence
  ENSG00000155657_215 (sequence is synthesized)
atgcgtggcatttaacgaacatggtgaaattgaaagtaatgttaacttacaggtggatgaaaggaagaaacaagagaaaattgaaggcgatcttagagcaatgctgaaaaagactccaat

SEQ ID NO: 449848 - DNA, 120 bp, Artificial Sequence
  ENSG00000155657_216 (sequence is synthesized)
cttaaagaaaggagctggagaagaagaggaaattgatatcatggaacttctcaaaaatgttgatcctaaagaatatgaaaaatatgcccgcatgtatggaatcactgacttccgaggtct

SEQ ID NO: 449849 - DNA, 120 bp, Artificial Sequence
  ENSG00000155657_217 (sequence is synthesized)
tcttcaagcatttgaactgctcaagcaaagccaagaagaagagacacatagactggaaattgaggaaatagagaggtcagagagggacgaaaaggaatttgaggaacttgtatcatttat

SEQ ID NO: 449850 - DNA, 120 bp, Artificial Sequence
  ENSG00000155657_218 (sequence is synthesized)
tcagcaaagactgtcacagacagagcctgtcactctgatcaaggacattgaaaatcagacagttttgaaagataatgatgctgtctttgaaattgacattaaaattaattatccagaaat

SEQ ID NO: 449851 - DNA, 120 bp, Artificial Sequence
  ENSG00000155657_219 (sequence is synthesized)
caagctttcgtggtacaaaggaactgaaaaactggaacccagtgataaatttgaaataagcattgatggtgaccgacatacactcagagtcaaaaactgtcaacttaaagaccagggcaa

SEQ ID NO: 449852 - DNA, 120 bp, Artificial Sequence
  ENSG00000155657_220 (sequence is synthesized)
ttatcgattggtttgtggtccacacatcgctagcgctaaactaactgtaattgagcctgcatgggaacggcatcttcaggatgtgactctgaaagaaggccagacttgcaccatgacatg

SEQ ID NO: 449853 - DNA, 120 bp, Artificial Sequence
  ENSG00000155657_221 (sequence is synthesized)
ccaattttctgtaccaaatgtaaaatctgaatggttcagaaatggcagaatccttaaaccccaaggtagacataaaacagaagtggaacacaaagtccataaattgaccattgcagatgt

SEQ ID NO: 449854 - DNA, 120 bp, Artificial Sequence
  ENSG00000155657_222 (sequence is synthesized)
tcgagcagaagaccagggtcagtacacctgcaaatatgaagaccttgaaacttcagcagaactcagaatcgaagctgaaccaattcagtttacaaagcgcatacagaacatcgtggtgag

SEQ ID NO: 449855 - DNA, 120 bp, Artificial Sequence
  ENSG00000155657_223 (sequence is synthesized)
tgagcatcagtctgccacctttgagtgtgaagtgtcctttgatgatgccattgtaacatggtacaaaggaccaacagaactgacagagagccagaaatacaacttcaggaatgatggccg

SEQ ID NO: 449856 - DNA, 120 bp, Artificial Sequence
  ENSG00000155657_224 (sequence is synthesized)
ctgccattatatgaccatccacaatgtgaccccagacgatgaaggtgtctactcggtcatcgctcggctggagccaagaggtgaagcaagaagcacggcagagctgtacctaacgacgaa

SEQ ID NO: 449857 - DNA, 120 bp, Artificial Sequence
  ENSG00000155657_225 (sequence is synthesized)
agaaatcaaacttgagctgaagcctcctgatattcctgactccagagttccaatcccaaccatgcctatcagagcagtgccaccagaagaaatccctcctgtggttgctcctcctatccc

SEQ ID NO: 449858 - DNA, 120 bp, Artificial Sequence
  ENSG00000155657_226 (sequence is synthesized)
ccttttgctaccaacacccgaagaaaagaaaccaccaccaaaacgtattgaagttaccaaaaaggctgtgaagaaagatgccaaaaaagttgttgcaaagcccaaagagatgacaccacg

SEQ ID NO: 449859 - DNA, 120 bp, Artificial Sequence
  ENSG00000155657_227 (sequence is synthesized)
tgaagagattgtcaagaagcctccacctcctactaccttaattccagcaaaagctcctgaaatcattgatgtatcctctaaagctgaagaagtaaaaataatgactataaccagaaagaa

SEQ ID NO: 449860 - DNA, 120 bp, Artificial Sequence
  ENSG00000155657_228 (sequence is synthesized)
agaggttcagaaagaaaaagaagctgtgtatgagaaaaagcaagcagtccacaaggagaagagagtcttcattgaatctttcgaagaaccttatgacgaactggaggtagaaccatacac

SEQ ID NO: 449861 - DNA, 120 bp, Artificial Sequence
  ENSG00000155657_229 (sequence is synthesized)
agagccatttgaacaaccttattatgaagaaccagatgaagactatgaagagattaaggtagaagctaaaaaagaagttcacgaggaatgggaagaagattttgaagaagggcaagaata

SEQ ID NO: 449862 - DNA, 120 bp, Artificial Sequence
  ENSG00000155657_230 (sequence is synthesized)
ctatgaaagggaagaaggctatgacgaaggggaggaagagtgggaagaggcttaccaagaaagggaagtaattcaagttcaaaaggaggtctatgaagaatcacatgagagaaaagttcc

SEQ ID NO: 449863 - DNA, 120 bp, Artificial Sequence
  ENSG00000155657_231 (sequence is synthesized)
agccaaagtacctgaaaagaaagcaccaccacctcctaaagttataaagaagccagtaattgaaaaaattgaaaagacttctcgaagaatggaggaagaaaaagttcaagtcaccaaagt

SEQ ID NO: 449864 - DNA, 120 bp, Artificial Sequence
  ENSG00000155657_232 (sequence is synthesized)
acctgaagtttcaaagaagattgttccacaaaaaccttcccggactccagtacaggaagaagttattgaagtgaaagtaccagctgtgcatacaaagaagatggttatttcagaagaaaa

SEQ ID NO: 449865 - DNA, 120 bp, Artificial Sequence
  ENSG00000155657_233 (sequence is synthesized)
gatgttctttgcttctcacacagaggaggaggtgtcagtcacagtccccgaggtacaaaaggaaattgttactgaagagaaaattcacgttgccatttccaaaagggttgaaccaccacc

SEQ ID NO: 449866 - DNA, 120 bp, Artificial Sequence
  ENSG00000155657_234 (sequence is synthesized)
taaagtccctgagctacctgagaaaccagctccagaagaagtggcccctgttcctatccctaaaaaagtggagcccccagcaccaaaagttcctgaggttcccaagaaacccgtgccaga

SEQ ID NO: 449867 - DNA, 120 bp, Artificial Sequence
  ENSG00000155657_235 (sequence is synthesized)
ggagaaaaagccagttcctgtgcctaagaaggaacctgctgctcccccaaaagtcccagaggtgccaaagaaacctgtccctgaagaaaagattcccgttcctgttgcaaagaaaaagga

SEQ ID NO: 449868 - DNA, 120 bp, Artificial Sequence
  ENSG00000155657_236 (sequence is synthesized)
agctcccccagctaaagttcctgaagtacagaagggagttgtgacagaagaaaaaataaccattgtaactcaaagagaggaatctccaccaccagcagtgccagaaataccaaagaagaa

SEQ ID NO: 449869 - DNA, 120 bp, Artificial Sequence
  ENSG00000155657_237 (sequence is synthesized)
agttcctgaagaaaggaaacctgttcctcggaaggaggaagaagttccaccaccaccaaaagtgccagctctgcctaagaaacccgtcccagaggagaaagttgcagtgccagttcctgt

SEQ ID NO: 449870 - DNA, 120 bp, Artificial Sequence
  ENSG00000155657_238 (sequence is synthesized)
cgctaagaaagctcctcctccccgagctgaagtctctaagaaaactgttgtagaagaaaagagatttgttgctgaagaaaaactatccttcgcagttcctcaaagagtggaagtcacgcg

SEQ ID NO: 449871 - DNA, 120 bp, Artificial Sequence
  ENSG00000155657_239 (sequence is synthesized)
gcacgaagtatctgcagaggaggaatggagttactcagaagaggaggaaggtgtgtccatttcagtttatagagaagaagaaagagaggaggaggaagaagcagaggttacagaatatga

SEQ ID NO: 449872 - DNA, 120 bp, Artificial Sequence
  ENSG00000155657_240 (sequence is synthesized)
agtgatggaagagcctgaggaatatgttgtggaagaaaagctgcacattatttctaagagagtggaagctgagccagctgaagtgacagagaggcaggagaagaaaattgtactgaaacc

SEQ ID NO: 449873 - DNA, 120 bp, Artificial Sequence
  ENSG00000155657_241 (sequence is synthesized)
aaaaattcctgctaaaatagaggagcctccaccggctaaagttcctgaagcacctaagaaaattgtgccagaaaagaaagttcctgctccagttcctaaaaaggaaaaggtgcccccacc

SEQ ID NO: 449874 - DNA, 120 bp, Artificial Sequence
  ENSG00000155657_242 (sequence is synthesized)
taaagtgccagaagagccaaagaaaccagttccagaaaaaaaggttcctccaaaagtcattaagatggaagaacctctcccagccaaagtgactgagaggcacatgcaaattacccagga

SEQ ID NO: 449875 - DNA, 120 bp, Artificial Sequence
  ENSG00000155657_243 (sequence is synthesized)
agaaaaagttcttgttgctgtaactaaaaaagaggcgcctccaaaagcaagagtgccagaggaaccgaagagagctgtcccagaagaaaaagttctgaaactcaaacctaaaagagagga

SEQ ID NO: 449876 - DNA, 120 bp, Artificial Sequence
  ENSG00000155657_244 (sequence is synthesized)
ggaaccaccagctaaagtgactgaattcagaaaaagagtggttaaagaagaaaaagtatcaattgaagctccaaaaagagaacctcaacccatcaaagaagtaactataatggaagagaa

SEQ ID NO: 449877 - DNA, 120 bp, Artificial Sequence
  ENSG00000155657_245 (sequence is synthesized)
agaaagggcttataccctagaagaagaagctgtttcagtacaacgggaagaagaatatgaggaatatgaagaatatgattataaagaatttgaggagtatgaaccaacagaagaatatga

SEQ ID NO: 449878 - DNA, 120 bp, Artificial Sequence
  ENSG00000155657_246 (sequence is synthesized)
ccaatatgaagaatacgaggagcgggagtatgaacgatatgaagagcatgaagaatacatcacagaaccagagaagcctatccctgtaaagcctgtcccagaagaaccagttcccacaaa

SEQ ID NO: 449879 - DNA, 120 bp, Artificial Sequence
  ENSG00000155657_247 (sequence is synthesized)
accaaaggccccaccggctaaagtgctgaagaaagctgtccctgaagaaaaagtaccagtgcccattcctaagaaactcaaacctccaccacccaaagtgcctgaagaaccaaagaaagt

SEQ ID NO: 449880 - DNA, 120 bp, Artificial Sequence
  ENSG00000155657_248 (sequence is synthesized)
ttttgaggaaaaaatacgtatttcaattaccaaacgtgaaaaagagcaggtgactgaacccgctgctaaagtgcccatgaagcccaagagggttgtcgcagaagaaaaagtacctgtccc

SEQ ID NO: 449881 - DNA, 120 bp, Artificial Sequence
  ENSG00000155657_249 (sequence is synthesized)
tagaaaagaagtagcaccacctgttagagtgccagaagtgcctaaagaacttgaaccagaagaggttgcctttgaagaggaagttgtaacccatgtagaagaatatcttgtagaagaaga

SEQ ID NO: 449882 - DNA, 120 bp, Artificial Sequence
  ENSG00000155657_250 (sequence is synthesized)
agaagagtacattcatgaagaagaggagttcataactgaggaagaagtggtgccagtgataccagtcaaagtgcctgaggtacccaggaaacctgttccagaagagaagaaacctgttcc

SEQ ID NO: 449883 - DNA, 120 bp, Artificial Sequence
  ENSG00000155657_251 (sequence is synthesized)
tgttcccaagaagaaggaagctccaccggcaaaagtgcctgaggttcctaagaagccagaggagaaagttcctgtgcttattcctaaaaaggagaagcctccgccagcaaaagttcctga

SEQ ID NO: 449884 - DNA, 120 bp, Artificial Sequence
  ENSG00000155657_252 (sequence is synthesized)
agtgcccaagaaacctgtgccagaggagaaagtaccagtaccagttcctaaaaaggtggaagctccacctgccaaagtgccagaggtacccaagaagcctgtgcctgagaagaaggtgcc

SEQ ID NO: 449885 - DNA, 120 bp, Artificial Sequence
  ENSG00000155657_253 (sequence is synthesized)
agttcctgctcctaagaaagtggaggctccacctgcaaaagtgccagaggtgcccaagaagctcatcccagaagaaaagaaaccaacacctgttccgaaaaaagtggaagcaccaccacc

SEQ ID NO: 449886 - DNA, 120 bp, Artificial Sequence
  ENSG00000155657_254 (sequence is synthesized)
caaagtgccaaagaaacgtgaaccagttccagttcctgtagctctacctcaggaagaggaagttctatttgaagaagaaattgttcctgaagaggaagttctacctgaggaagaggaagt

SEQ ID NO: 449887 - DNA, 120 bp, Artificial Sequence
  ENSG00000155657_255 (sequence is synthesized)
tctacctgaggaagaggaagttctacctgaagaagaggaagttctacctgaagaagaggaaattccacctgaggaagaggaagttcctcccgaagaagaatatgtacctgaggaagaaga

SEQ ID NO: 449888 - DNA, 120 bp, Artificial Sequence
  ENSG00000155657_256 (sequence is synthesized)
atttgtacctgaagaagaagtccttccagaagttaaacctaaggtgccagtacctgcaccagtgcctgaaattaagaagaaagtgacagagaagaaagtggtcattcccaagaaagagga

SEQ ID NO: 449889 - DNA, 120 bp, Artificial Sequence
  ENSG00000155657_257 (sequence is synthesized)
ggctccccctgccaaagttcctgaggtgcctaagaaggtggaagaaaaacgaatcattctccctaaagaagaggaagttctaccagttgaagtgactgaggagcctgaagaagagcctat

SEQ ID NO: 449890 - DNA, 120 bp, Artificial Sequence
  ENSG00000155657_258 (sequence is synthesized)
ttcagaagaagaaatcccagaagaaccacctagcatagaggaagttgaagaggtggcaccacctagagtgcctgaagtgattaagaaagcagtacctgaagcacctactcctgttcctaa

SEQ ID NO: 449891 - DNA, 120 bp, Artificial Sequence
  ENSG00000155657_259 (sequence is synthesized)
aaaagtggaggcaccaccagctaaagtgtcaaagaaaattcctgaggaaaaagtacctgttcctgttcagaaaaaagaggcacccccagccaaagtgcctgaagtaccaaagaaagtccc

SEQ ID NO: 449892 - DNA, 120 bp, Artificial Sequence
  ENSG00000155657_260 (sequence is synthesized)
agaaaagaaagtccttgtgcctaaaaaggaagctgttcccccagctaaagggagaactgtccttgaagaaaaagtatcagttgccttccgccaagaagtagtagtaaaagaaagactaga

SEQ ID NO: 449893 - DNA, 120 bp, Artificial Sequence
  ENSG00000155657_261 (sequence is synthesized)
attagaagtagtagaagcagaagtggaagaaattccggaagaagaagagttccatgaagttgaagaatattttgaagaaggcgagtttcatgaagtagaagaattcatcaaattagaaca

SEQ ID NO: 449894 - DNA, 120 bp, Artificial Sequence
  ENSG00000155657_262 (sequence is synthesized)
acatagagttgaagaagaacacagagttgaaaaagttcatagggtaatagaagtttttgaggctgaagaagtggaagtatttgaaaaaccaaaagctccacctaaagggcctgagatatc

SEQ ID NO: 449895 - DNA, 120 bp, Artificial Sequence
  ENSG00000155657_263 (sequence is synthesized)
tgagaaaatcatccctccaaaaaaaccgcccactaaagttgttcctcgaaaagagccaccagctaaagtaccggaggtgcctaagaaaattgtggtagaagaaaaagtacgtgttcctga

SEQ ID NO: 449896 - DNA, 120 bp, Artificial Sequence
  ENSG00000155657_264 (sequence is synthesized)
agagcccagagttccaccaactaaagtgcctgaagtgctgccaccgaaggaagtggtcccagaaaagaaagtaccggtgcctcctgccaaaaagccagaagctccacctcctaaagtgcc

SEQ ID NO: 449897 - DNA, 120 bp, Artificial Sequence
  ENSG00000155657_265 (sequence is synthesized)
tgaggctcccaaagaagttgttcctgaaaagaaagtgccagtgcctcctcctaaaaagcctgaagtgccacccacaaaagtcccagaggtgccaaaggcagctgtcccagaaaagaaggt

SEQ ID NO: 449898 - DNA, 120 bp, Artificial Sequence
  ENSG00000155657_266 (sequence is synthesized)
gcctgaagctattcctcccaaaccggaaagtcctccccctgaagtgccagaggctccgaaagaagttgttcctgaaaagaaagtgccagcggctcctcctaaaaagcctgaagtcacacc

SEQ ID NO: 449899 - DNA, 120 bp, Artificial Sequence
  ENSG00000155657_267 (sequence is synthesized)
tgttaaagtgcctgaggctcccaaagaagttgttcctgaaaagaaagtgccagtgcctcctcctaaaaagcctgaagtgccacccacaaaagtcccagaggtgccaaaggtagctgtccc

SEQ ID NO: 449900 - DNA, 120 bp, Artificial Sequence
  ENSG00000155657_268 (sequence is synthesized)
agaaaagaaggtgcctgaagctattcctcccaaaccggaaagtcctccccctgaagtgttcgaggagcctgaggaagttgccctagaagagcctcctgctgaagttgtggaagagccaga

SEQ ID NO: 449901 - DNA, 120 bp, Artificial Sequence
  ENSG00000155657_269 (sequence is synthesized)
gccagcggcgcctccacaagtgaccgtaccacctaagaaacctgtcccagaaaagaaagcacctgctgtcgttgccaaaaaacctgaactaccaccagtgaaagtgcccgaggtgcccaa

SEQ ID NO: 449902 - DNA, 120 bp, Artificial Sequence
  ENSG00000155657_270 (sequence is synthesized)
ggaggttgttcctgaaaagaaggtgcctctggtggttcccaaaaagccagaagccccacctgctaaagtgcctgaagttccaaaagaagttgttccagaaaagaaagtagctgttcccaa

SEQ ID NO: 449903 - DNA, 120 bp, Artificial Sequence
  ENSG00000155657_271 (sequence is synthesized)
aaagccagaagtcccaccagcaaaagtgccagaagtgccaaagaaacctgtcttggaagagaaaccagctgttcctgttccagaaagagcggagtctcctcccccagaagtatatgaaga

SEQ ID NO: 449904 - DNA, 120 bp, Artificial Sequence
  ENSG00000155657_272 (sequence is synthesized)
acctgaggaaattgctcctgaagaggaaattgctcctgaagaggaaaagccagttcctgttgcagaagaggaggaaccagaggttccacctccagcagtgcctgaagagcccaagaagat

SEQ ID NO: 449905 - DNA, 120 bp, Artificial Sequence
  ENSG00000155657_273 (sequence is synthesized)
catcccagagaagaaagttcctgtcatcaaaaaaccagaagcaccgcctcctaaagaacctgaacctgaaaaggttattgagaagccaaaactcaaaccaagacccccacctcctccacc

SEQ ID NO: 449906 - DNA, 120 bp, Artificial Sequence
  ENSG00000155657_274 (sequence is synthesized)
tgctccacctaaggaagatgtgaaggagaaaatattccaacttaaagctattccaaagaagaaagttcctgaaaaacctcaggttccagaaaaagtggagcttacacctctgaaagtgcc

SEQ ID NO: 449907 - DNA, 120 bp, Artificial Sequence
  ENSG00000155657_275 (sequence is synthesized)
tggaggtgaaaagaaagttcgcaaattacttccggaacgtaaacctgaaccaaaggaagaagttgttctgaaaagcgttctaagaaaaagacctgaagaagaagaacctaaagtagaacc

SEQ ID NO: 449908 - DNA, 120 bp, Artificial Sequence
  ENSG00000155657_276 (sequence is synthesized)
taaaaaactagaaaaagttaaaaaacctgcagtaccagaaccaccacctccaaaacctgttgaagaggttgaagtacctactgttacaaaaagggaaaggaagattcctgaaccaacaaa

SEQ ID NO: 449909 - DNA, 120 bp, Artificial Sequence
  ENSG00000155657_277 (sequence is synthesized)
agtgcctgaaatcaagccagcaatacctctccctgcacctgaaccgaaaccaaagcccgaagcagaagtgaaaacaatcaaaccacctcctgtggaacctgaaccaacccccatcgctgc

SEQ ID NO: 449910 - DNA, 120 bp, Artificial Sequence
  ENSG00000155657_278 (sequence is synthesized)
cccagtaacagtgccagtggttggaaagaaagcagaagccaaagcacctaaggaagaggctgccaagccaaaaggtcctatcaaaggtgtacccaaaaagactccttcaccaatagaagc

SEQ ID NO: 449911 - DNA, 120 bp, Artificial Sequence
  ENSG00000155657_279 (sequence is synthesized)
cgaaaggagaaagttaaggccaggaagtggtggagagaaacctcctgatgaagccccgttcacctaccagctaaaggctgtgccactgaagtttgtgaaagaaatcaaagacatcatctt

SEQ ID NO: 449912 - DNA, 120 bp, Artificial Sequence
  ENSG00000155657_280 (sequence is synthesized)
gacagaatcagagttcgttggctcttcagcaatctttgaatgtttggtctccccttccactgcaattacaacctggatgaaagacggtagcaatatccgtgagagtcccaagcacaggtt

SEQ ID NO: 449913 - DNA, 120 bp, Artificial Sequence
  ENSG00000155657_281 (sequence is synthesized)
tattgcagatggtaaagacagaaagctgcacatcattgatgttcaactttccgatgctggtgaatacacctgtgttttacgtttgggaaacaaagaaaagacctccacggctaaacttgt

SEQ ID NO: 449914 - DNA, 120 bp, Artificial Sequence
  ENSG00000155657_282 (sequence is synthesized)
tgtagaagaacttcctgtgcgttttgtaaaaacactggaagaggaagtcacagtggtcaaaggacagccattgtacttgagctgcgagttaaacaaagagcgtgacgtggtctggaggaa

SEQ ID NO: 449915 - DNA, 120 bp, Artificial Sequence
  ENSG00000155657_283 (sequence is synthesized)
ggatggcaagattgtggtggagaaacctggccgaattgtgccaggcgtcattggcttgatgcgggctctgaccatcaacgatgcagatgacacagatgctggaacatacacagttactgt

SEQ ID NO: 449916 - DNA, 120 bp, Artificial Sequence
  ENSG00000155657_284 (sequence is synthesized)
ggaaaacgccaacaacctggagtgttcatcttgcgtaaaagtagtagaagtcattagagattggctggtgaaacctatacgagaccagcatgtgaaacccaaggggacagctatttttgc

SEQ ID NO: 449917 - DNA, 120 bp, Artificial Sequence
  ENSG00000155657_285 (sequence is synthesized)
ctgtgatatagcaaaagatactccaaacattaagtggttcaaaggatatgatgaaatccctgcggaaccaaatgataagactgaaatactgagagatggaaatcatctgtacctcaaaat

SEQ ID NO: 449918 - DNA, 120 bp, Artificial Sequence
  ENSG00000155657_286 (sequence is synthesized)
taagaatgctatgccagaagatattgctgagtatgcagtggaaattgaaggaaaaagataccctgcaaagctgacacttggagagcgtgaagttgaactgcttaaaccaatagaggacgt

SEQ ID NO: 449919 - DNA, 120 bp, Artificial Sequence
  ENSG00000155657_287 (sequence is synthesized)
taccatttatgagaaagaaagtgcaagctttgatgcagaaatctcagaggcagacattcctggacaatggaaactgaaaggagaacttctaaggccctcacctacttgtgaaatcaaagc

SEQ ID NO: 449920 - DNA, 120 bp, Artificial Sequence
  ENSG00000155657_288 (sequence is synthesized)
agaaggtggaaaacgcttcttaactttgcacaaagtcaaactggaccaagctggtgaagtcctctaccaggcccttaatgcaattacaactgccattttgacagtaaaagaaatcgaact

SEQ ID NO: 449921 - DNA, 120 bp, Artificial Sequence
  ENSG00000155657_289 (sequence is synthesized)
tgactttgctgtgcccctgaaggatgtcactgttccagaaaggcgacaggctcgattcgaatgtgtcctcacccgagaggcaaatgttatatggtccaaaggacctgatataattaagtc

SEQ ID NO: 449922 - DNA, 120 bp, Artificial Sequence
  ENSG00000155657_290 (sequence is synthesized)
atctgacaaatttgatatcatcgctgatggaaagaaacatattcttgttattaatgattctcaatttgatgatgaaggggtctatactgctgaggtggagggcaagaagacctcagctcg

SEQ ID NO: 449923 - DNA, 120 bp, Artificial Sequence
  ENSG00000155657_291 (sequence is synthesized)
gttgtttgtcacaggtataagactgaaattcatgtcacctcttgaagatcaaacagtaaaagaaggtgaaacagcaacttttgtttgtgaactttctcatgaaaaaatgcatgtagtctg

SEQ ID NO: 449924 - DNA, 120 bp, Artificial Sequence
  ENSG00000155657_292 (sequence is synthesized)
gttcaaaaatgatgccaaactccatacaagcagaacagtactcatctcttctgagggcaagactcacaaattggaaatgaaagaagtgacattggatgatatatctcagataaaagctca

SEQ ID NO: 449925 - DNA, 120 bp, Artificial Sequence
  ENSG00000155657_293 (sequence is synthesized)
agtcaaggagctgagctccacagcacagctgaaggtcttagaggccgatccctacttcactgtgaaattacatgacaaaactgcagtggagaaggatgagattactttgaagtgtgaagt

SEQ ID NO: 449926 - DNA, 120 bp, Artificial Sequence
  ENSG00000155657_294 (sequence is synthesized)
gagcaaagatgtaccagtgaaatggttcaaagatggtgaagagattgtcccttcacccaaatattctatcaaggcagatggcctgcgccgcatcttaaaaatcaaaaaggcggaccttaa

SEQ ID NO: 449927 - DNA, 120 bp, Artificial Sequence
  ENSG00000155657_295 (sequence is synthesized)
agataaaggcgaatatgtgtgtgactgtggcacagacaagaccaaggcaaatgttactgttgaggctcgactaataaaagtggaaaagcctctgtacggagtagaggtgtttgttggtga

SEQ ID NO: 449928 - DNA, 120 bp, Artificial Sequence
  ENSG00000155657_296 (sequence is synthesized)
aacagcccactttgaaattgaactttctgaacctgatgttcacggccagtggaagctgaaaggacagcctttgacagcttcccctgactgtgaaatcattgaggatggaaagaagcatat

SEQ ID NO: 449929 - DNA, 120 bp, Artificial Sequence
  ENSG00000155657_297 (sequence is synthesized)
tctgatccttcataactgtcagctgggtatgacaggagaggtttccttccaggctgctaatgccaaatctgcagccaatctgaaagtgaaagaattgcctcttatcttcatcacacctct

SEQ ID NO: 449930 - DNA, 120 bp, Artificial Sequence
  ENSG00000155657_298 (sequence is synthesized)
cagtgatgttaaagtcttcgagaaagatgaggctaagtttgagtgtgaagtatccagggagcccaaaacattccgttggctaaaaggaacccaggaaatcacaggtgatgacagatttga

SEQ ID NO: 449931 - DNA, 120 bp, Artificial Sequence
  ENSG00000155657_299 (sequence is synthesized)
gcttataaaggatggcactaagcattcaatggtgatcaagtcagctgcttttgaagatgaagcaaaatacatgtttgaagctgaagataagcacacaagtggcaaactgatcattgaagg

SEQ ID NO: 449932 - DNA, 120 bp, Artificial Sequence
  ENSG00000155657_300 (sequence is synthesized)
aatccggctcaaattcctcacccctctcaaagatgtaactgccaaagagaaggaaagtgctgtatttactgtggagttatctcatgataacatccgagttaaatggttcaagaatgacca

SEQ ID NO: 449933 - DNA, 120 bp, Artificial Sequence
  ENSG00000155657_301 (sequence is synthesized)
gcgcctacacaccaccaggtcggtctcaatgcaagacgaagggaaaactcattcgatcacattcaaagacctgtctattgatgacacctcccaaattagagtagaagctatggggatgag

SEQ ID NO: 449934 - DNA, 120 bp, Artificial Sequence
  ENSG00000155657_302 (sequence is synthesized)
ttcagaagctaaactcactgtgcttgagggagacccatattttacaggaaaacttcaagattatactggtgtagagaaagatgaagttattctacagtgtgaaattagcaaagcagatgc

SEQ ID NO: 449935 - DNA, 120 bp, Artificial Sequence
  ENSG00000155657_303 (sequence is synthesized)
accagtgaaatggtttaaggatgggaaggaaataaagccatccaaaaatgctgttattaaggcagatggcaagaaacgcatgctaatcctaaagaaagccttgaaatcagatattggaca

SEQ ID NO: 449936 - DNA, 120 bp, Artificial Sequence
  ENSG00000155657_304 (sequence is synthesized)
gtacacctgtgactgtgggacagataagacctcaggaaaacttgacattgaggatcgggaaattaaactggtgcgacccctgcacagtgtggaggtgatggagactgagacagcacgctt

SEQ ID NO: 449937 - DNA, 120 bp, Artificial Sequence
  ENSG00000155657_305 (sequence is synthesized)
tgaaaccgaaatctctgaagatgatatccacgccaactggaaactcaagggagaggccctactccaaacacctgattgtgaaattaaggaagaaggcaaaatacactcccttgttttgca

SEQ ID NO: 449938 - DNA, 120 bp, Artificial Sequence
  ENSG00000155657_306 (sequence is synthesized)
caactgtcgcctggaccagacgggtggggtggatttccaagctgccaatgttaaatctagtgcccacctccgagttaagccacgagtaattggtcttctgaggcctttaaaggatgtcac

SEQ ID NO: 449939 - DNA, 120 bp, Artificial Sequence
  ENSG00000155657_307 (sequence is synthesized)
cgtgactgcaggggaaacagccaccttcgactgcgagctctcctacgaagatatcccagtggaatggtatctcaaagggaagaaactagagcccagcgataaggtggtcccacgttcaga

SEQ ID NO: 449940 - DNA, 120 bp, Artificial Sequence
  ENSG00000155657_308 (sequence is synthesized)
aggaaaagttcatacacttactctgagggatgtaaagttagaagatgctggggaagtccaactaacagcaaaagatttcaaaactcacgccaacctctttgtgaaagaacccccagttga

SEQ ID NO: 449941 - DNA, 120 bp, Artificial Sequence
  ENSG00000155657_309 (sequence is synthesized)
attcactaagcctcttgaggaccagacggtcgaagagggagccactgcagtgctggagtgtgaagtctccagagaaaatgctaaggtgaaatggttcaaaaatgggacagaaatcctcaa

SEQ ID NO: 449942 - DNA, 120 bp, Artificial Sequence
  ENSG00000155657_310 (sequence is synthesized)
aagcaagaagtatgaaattgttgctgatggcagggtcagaaaacttgttatacatgactgtaccccagaggatattaaaacatacacttgtgatgctaaggattttaagacttcctgtaa

SEQ ID NO: 449943 - DNA, 120 bp, Artificial Sequence
  ENSG00000155657_311 (sequence is synthesized)
cctgaatgtcgtgcctcctcatgtggaattcttaagaccactcaccgaccttcaagttagagaaaaagaaatggctcgatttgagtgtgaactttcccgagaaaatgctaaggttaagtg

SEQ ID NO: 449944 - DNA, 120 bp, Artificial Sequence
  ENSG00000155657_312 (sequence is synthesized)
gtttaaagatggtgctgaaattaaaaagggcaaaaaatatgacatcatatccaagggagcagtgcgcattcttgtcatcaacaaatgtctactggatgatgaagctgaatattcctgtga

SEQ ID NO: 449945 - DNA, 120 bp, Artificial Sequence
  ENSG00000155657_313 (sequence is synthesized)
agtaaggacagcgagaacttctggcatgctgacagttctggaagaagaagctgtctttaccaaaaatcttgccaacattgaagttagtgaaacagacactataaaactggtttgtgaagt

SEQ ID NO: 449946 - DNA, 120 bp, Artificial Sequence
  ENSG00000155657_314 (sequence is synthesized)
ctccaaacctggcgcagaagtgatttggtataaaggggatgaggagatcattgaaacaggaagatatgaaatactgactgaaggacggaagagaatcctggtcattcagaacgctcacct

SEQ ID NO: 449947 - DNA, 120 bp, Artificial Sequence
  ENSG00000155657_315 (sequence is synthesized)
tgaggatgctggcaactacaactgtcgactcccaagctctcgaaccgatggcaaagtcaaagtacatgaactggctgctgaatttatctcaaagcctcaaaaccttgaaatacttgaagg

SEQ ID NO: 449948 - DNA, 120 bp, Artificial Sequence
  ENSG00000155657_316 (sequence is synthesized)
agaaaaggctgaatttgtctgctctatatcaaaagaaagctttccagtccagtggaagagggatgataagacacttgaatctggagataaatatgacgttattgctgatggtaaaaagag

SEQ ID NO: 449949 - DNA, 120 bp, Artificial Sequence
  ENSG00000155657_317 (sequence is synthesized)
ggtcctagttgtgaaagatgccacattacaagatatgggcacttacgttgtcatggtaggggccgccagagcagcagctcacttgacagtcattgaaaaactcaggatcgtagttcctct

SEQ ID NO: 449950 - DNA, 120 bp, Artificial Sequence
  ENSG00000155657_318 (sequence is synthesized)
taaggacacccgggtgaaggaacaacaggaagttgtcttcaactgtgaagtcaatactgaaggtgccaaagccaaatggttcagaaatgaagaagctatatttgatagttcaaaatacat

SEQ ID NO: 449951 - DNA, 120 bp, Artificial Sequence
  ENSG00000155657_319 (sequence is synthesized)
cattctccaaaaagacctagtctacaccctcagaattagagatgcacacttagatgaccaagccaactataatgtgtctttgaccaatcacagaggtgaaaatgttaaaagtgcagccaa

SEQ ID NO: 449952 - DNA, 120 bp, Artificial Sequence
  ENSG00000155657_320 (sequence is synthesized)
tctaatagtagaagaggaagaccttaggattgttgagcctcttaaagatattgaaacaatggagaagaaatctgtcacattctggtgcaaggtgaatcgtctcaatgtaacactgaagtg

SEQ ID NO: 449953 - DNA, 120 bp, Artificial Sequence
  ENSG00000155657_321 (sequence is synthesized)
gaccaaaaatggtgaagaagtgccttttgacaaccgtgtctcatacagagttgataagtacaagcacatgttaaccattaaagactgtggcttcccagatgaaggtgaatacattgtcac

SEQ ID NO: 449954 - DNA, 120 bp, Artificial Sequence
  ENSG00000155657_322 (sequence is synthesized)
tgctggacaagataaatctgttgctgagcttctcatcatagaagccccgacagaatttgtggaacacttggaagatcagacagtcactgagttcgatgacgctgtcttctcctgccagct

SEQ ID NO: 449955 - DNA, 120 bp, Artificial Sequence
  ENSG00000155657_323 (sequence is synthesized)
ctccagagagaaagccaatgtaaaatggtacagaaatgggagagaaatcaaagaaggcaaaaaatacaaatttgaaaaagatggaagtatacacagactcattataaaagattgcaggct

SEQ ID NO: 449956 - DNA, 120 bp, Artificial Sequence
  ENSG00000155657_324 (sequence is synthesized)
ggatgatgagtgtgaatatgcttgcggggtagaagacaggaagtctcgtgctagactttttgtggaagaaattcctgttgagatcatcaggcctccacaagatattcttgaagcccctgg

SEQ ID NO: 449957 - DNA, 120 bp, Artificial Sequence
  ENSG00000155657_325 (sequence is synthesized)
tgctgatgttgtctttttagcagaactcaataaagataaggtggaagtccaatggctaagaaataacatggttgttgtccagggtgataaacaccagatgatgagtgaaggaaagataca

SEQ ID NO: 449958 - DNA, 120 bp, Artificial Sequence
  ENSG00000155657_326 (sequence is synthesized)
tcgactacagatttgtgatattaagccccgtgaccagggtgaatacagatttattgccaaagacaaagaagccagagctaagcttgaactggcagctgcaccaaaaatcaagacagctga

SEQ ID NO: 449959 - DNA, 120 bp, Artificial Sequence
  ENSG00000155657_327 (sequence is synthesized)
ccaagaccttgtggttgatgttggcaagcctctgacaatggtggtgccatatgatgcctaccccaaagcagaagctgaatggtttaaagaaaatgaacctttatctacaaaaaccattga

SEQ ID NO: 449960 - DNA, 120 bp, Artificial Sequence
  ENSG00000155657_328 (sequence is synthesized)
tactacggctgaacaaacttctttcagaattttagaagccaagaaaggagacaaagggaggtataaaattgtgcttcagaacaaacatggaaaagcagaaggattcatcaatttaaaagt

SEQ ID NO: 449961 - DNA, 120 bp, Artificial Sequence
  ENSG00000155657_329 (sequence is synthesized)
tattgatgttcctgggccagtacgtaacttagaagtgacagaaacatttgatggtgaagtgagccttgcttgggaagaacctttaactgatggtggaagcaaaatcataggttacgttgt

SEQ ID NO: 449962 - DNA, 120 bp, Artificial Sequence
  ENSG00000155657_330 (sequence is synthesized)
tgaaagacgtgacattaagagaaagacctgggttctggccacagaccgtgcagagagttgtgagtttactgtcactggtctacagaaaggaggagttgagtacctattccgtgtgagtgc

SEQ ID NO: 449963 - DNA, 120 bp, Artificial Sequence
  ENSG00000155657_331 (sequence is synthesized)
aagaaacagagttggcactggtgagccagtagaaactgacaatcctgtagaagcaaggagtaaatatgatgttccaggccctcctttgaatgtaaccatcactgatgtgaatcgatttgg

SEQ ID NO: 449964 - DNA, 120 bp, Artificial Sequence
  ENSG00000155657_332 (sequence is synthesized)
tgtctcactgacatgggaaccaccagagtatgatggaggtgctgagatcacaaactacgtcattgaattaagagacaagacttctatcaggtgggatactgccatgactgtgagagctga

SEQ ID NO: 449965 - DNA, 120 bp, Artificial Sequence
  ENSG00000155657_333 (sequence is synthesized)
agacctgtctgcaactgttactgatgtggtagaaggacaggagtacagtttccgagtgagagcccaaaatcgaattggagttggaaaaccaagtgcagccacacccttcgtcaaagttgc

SEQ ID NO: 449966 - DNA, 120 bp, Artificial Sequence
  ENSG00000155657_334 (sequence is synthesized)
tgatccaattgagagaccaagtcctcctgtaaacctaacttcctcagatcagactcagtcatcagttcagctcaaatgggaacctcctctgaaagatggaggaagcccaatattaggcta

SEQ ID NO: 449967 - DNA, 120 bp, Artificial Sequence
  ENSG00000155657_335 (sequence is synthesized)
tataattgagcgatgcgaagaaggaaaagataattggattcgttgcaatatgaaacttgtccctgaactgacttacaaggttaccggattggaaaaaggaaataaatatttatatagagt

SEQ ID NO: 449968 - DNA, 120 bp, Artificial Sequence
  ENSG00000155657_336 (sequence is synthesized)
atctgcagaaaataaagctggtgtttcagatccatctgaaattcttggtcctctcaccgctgacgatgcatttgttgaaccaacaatggatttaagtgcatttaaagatggtctggaagt

SEQ ID NO: 449969 - DNA, 120 bp, Artificial Sequence
  ENSG00000155657_337 (sequence is synthesized)
tattgtcccaaatcctatcacgatcctggttccaagtacaggctatccaaggccaactgcaacctggtgttttggagataaagtactagaaacaggggaccgggtgaaaatgaagacctt

SEQ ID NO: 449970 - DNA, 120 bp, Artificial Sequence
  ENSG00000155657_338 (sequence is synthesized)
gtctgcctatgccgaacttgtcatttctccaagtgaacgttcagacaagggcatttatacactgaaattagaaaaccgtgtgaaaacaatttctggggaaattgatgtcaatgtaattgc

SEQ ID NO: 449971 - DNA, 120 bp, Artificial Sequence
  ENSG00000155657_339 (sequence is synthesized)
tcgcccaagtgcacccaaagaattgaaatttggtgatataaccaaggactcagtacatttgacttgggaaccacctgatgatgatggaggaagtccgttaactggatacgttgttgaaaa

SEQ ID NO: 449972 - DNA, 120 bp, Artificial Sequence
  ENSG00000155657_340 (sequence is synthesized)
acgagaagtcagccggaaaacatggactaaagttatggactttgtgactgatctagaattcacagttcctgatcttgttcaaggaaaagagtacttatttaaagtttgtgctcgtaacaa

SEQ ID NO: 449973 - DNA, 120 bp, Artificial Sequence
  ENSG00000155657_341 (sequence is synthesized)
atgtggccctggagaacctgcatatgttgatgaacctgtaaatatgtcaactcctgcaacggtacctgacccaccagagaatgttaaatggagagatcgaacagccaatagcatcttctt

SEQ ID NO: 449974 - DNA, 120 bp, Artificial Sequence
  ENSG00000155657_342 (sequence is synthesized)
aacatgggatccacctaaaaatgatggtggttcacgcatcaaaggatatatagttgaaagatgtccacgtggttctgataaatgggttgcctgtggagaacctgttgcagaaacaaaaat

SEQ ID NO: 449975 - DNA, 120 bp, Artificial Sequence
  ENSG00000155657_343 (sequence is synthesized)
ggaagtgacaggtcttgaggaaggcaaatggtatgcctaccgcgtgaaggccttaaacaggcagggtgctagcaaaccaagcagacccacagaggaaatccaggctgtggacacacaaga

SEQ ID NO: 449976 - DNA, 120 bp, Artificial Sequence
  ENSG00000155657_344 (sequence is synthesized)
ggccccagaaatcttcctcgatgtgaagctccttgctggtctcactgtaaaagctgggaccaagattgaacttcctgccaccgtaaccggaaaacctgaacctaaaataacttggacaaa

SEQ ID NO: 449977 - DNA, 120 bp, Artificial Sequence
  ENSG00000155657_345 (sequence is synthesized)
ggctgatatgattctgaagcaggacaaaagaattaccattgaaaatgtccctaagaaatccacagtgactattgttgatagtaagagaagtgacactggcacatatatcattgaggctgt

SEQ ID NO: 449978 - DNA, 120 bp, Artificial Sequence
  ENSG00000155657_346 (sequence is synthesized)
gaatgtgtgtggccgggccactgctgtggtggaagtgaacgtcttagataaacccggaccaccagctgcctttgacatcacagatgtaaccaatgagtcatgtcttctaacatggaaccc

SEQ ID NO: 449979 - DNA, 120 bp, Artificial Sequence
  ENSG00000155657_347 (sequence is synthesized)
accacgcgatgatggtggatctaagatcacaaactatgttgtggagagacgagcaactgatagtgaagtgtggcacaagctctcatccaccgtcaaggatacaaacttcaaggccaccaa

SEQ ID NO: 449980 - DNA, 120 bp, Artificial Sequence
  ENSG00000155657_348 (sequence is synthesized)
attaatccccaataaagagtacatcttcagagttgctgcagaaaacatgtatggtgttggtgaaccagttcaggcctctccaataacagccaaatatcagtttgatccacctggtcctcc

SEQ ID NO: 449981 - DNA, 120 bp, Artificial Sequence
  ENSG00000155657_349 (sequence is synthesized)
aactcgcctagaaccttctgatatcactaaagacgcagtgactctcacatggtgtgagccagatgatgatggtggcagcccaatcacaggatactgggttgaaagactggatcctgatac

SEQ ID NO: 449982 - DNA, 120 bp, Artificial Sequence
  ENSG00000155657_350 (sequence is synthesized)
agataaatgggttagatgcaataagatgccagtaaaggacacaacatacagagtgaaaggtctcactaataagaaaaaatacagattccgtgtgttggctgaaaatcttgctggacctgg

SEQ ID NO: 449983 - DNA, 120 bp, Artificial Sequence
  ENSG00000155657_351 (sequence is synthesized)
aaaaccaagcaaatcaactgaaccaatcttaataaaggatcccatagatcctccatggccccctggaaaaccaactgtaaaagatgtaggcaaaacatcagtaaggttgaattggacaaa

SEQ ID NO: 449984 - DNA, 120 bp, Artificial Sequence
  ENSG00000155657_352 (sequence is synthesized)
accagaacatgatggaggtgcaaagattgagtcttatgtcattgaaatgctgaagactggaacagatgagtgggtcagagtggcggaaggggttcccaccactcagcacttgctcccagg

SEQ ID NO: 449985 - DNA, 120 bp, Artificial Sequence
  ENSG00000155657_353 (sequence is synthesized)
gctcatggaaggacaggaatactcattccgagttagagctgtgaataaggctggggaaagtgaacccagtgaacccagtgaccctgtgctttgccgggagaagctatatcctccatcacc

SEQ ID NO: 449986 - DNA, 120 bp, Artificial Sequence
  ENSG00000155657_354 (sequence is synthesized)
accacgctggcttgaagttattaatatcacaaaaaatacagcagacctaaaatggacagttcctgagaaagatggagggtcccccatcaccaactacattgtggaaaagagagacgtcag

SEQ ID NO: 449987 - DNA, 120 bp, Artificial Sequence
  ENSG00000155657_355 (sequence is synthesized)
gcgaaaaggctggcaaacagtggataccactgtcaaggacaccaagtgcacagtcaccccactgactgagggctctttatatgtgttccgagttgctgcagaaaatgctataggacaaag

SEQ ID NO: 449988 - DNA, 120 bp, Artificial Sequence
  ENSG00000155657_356 (sequence is synthesized)
cgactacaccgaaattgaggactctgtgctggccaaagacacctttaccactcctggaccaccctacgccctggcagtggttgatgtgacaaaacgacatgttgacctaaagtgggagcc

SEQ ID NO: 449989 - DNA, 120 bp, Artificial Sequence
  ENSG00000155657_357 (sequence is synthesized)
acctaaaaatgatggtggaagaccaatacagagatatgtcattgagaagaaagaaaggttaggtacccgttgggtgaaagctggaaagactgcaggacctgactgtaacttcagagtaac

SEQ ID NO: 449990 - DNA, 120 bp, Artificial Sequence
  ENSG00000155657_358 (sequence is synthesized)
tgatgtcatcgaaggaacagaggtccagtttcaggttcgggctgaaaatgaagctggagttggccacccaagtgaacccacagaaatcctatccattgaagatccaacaagtcctccctc

SEQ ID NO: 449991 - DNA, 120 bp, Artificial Sequence
  ENSG00000155657_359 (sequence is synthesized)
accaccccttgacctacatgtgactgatgctgggagaaaacacattgccattgcttggaagcctccagagaaaaatggtggaagtcctatcataggataccatgttgaaatgtgtccagt

SEQ ID NO: 449992 - DNA, 120 bp, Artificial Sequence
  ENSG00000155657_360 (sequence is synthesized)
aggcactgagaaatggatgagagttaattctcgcccaataaaggacttgaaattcaaggttgaagaaggtgttgttcctgacaaagaatatgtcctgagagtgagagcagtcaatgctat

SEQ ID NO: 449993 - DNA, 120 bp, Artificial Sequence
  ENSG00000155657_361 (sequence is synthesized)
tggtgtcagcgagccatctgaaatctctgaaaatgtggttgccaaagacccagactgcaagccaacaattgacctggagactcatgacattattgttattgaaggtgaaaagttaagcat

SEQ ID NO: 449994 - DNA, 120 bp, Artificial Sequence
  ENSG00000155657_362 (sequence is synthesized)
tcctgttcccttcagagctgtcccagttccaactgttagttggcataaagatggcaaagaagttaaagcaagtgatagattaacaatgaagaatgatcacatctctgcacaccttgaagt

SEQ ID NO: 449995 - DNA, 120 bp, Artificial Sequence
  ENSG00000155657_363 (sequence is synthesized)
tcccaagagtgtccgtgcagatgccggaatttataccattacactggagaataagctcggctcagcaacagcctcaatcaatgtcaaagtcataggcctacctggaccatgcaaagatat

SEQ ID NO: 449996 - DNA, 120 bp, Artificial Sequence
  ENSG00000155657_364 (sequence is synthesized)
taaagcaagtgacattaccaagagttcttgtaagttaacttgggaacctccagaatttgatggtggaaccccaattcttcattatgtcctggagcgcagagaagctgggaggagaacata

SEQ ID NO: 449997 - DNA, 120 bp, Artificial Sequence
  ENSG00000155657_365 (sequence is synthesized)
tataccagtcatgtctggtgagaacaaactgtcatggactgtgaaggatctcataccaaatggtgaatacttcttccgtgttaaagcagtcaacaaggttggtggaggagaatatattga

SEQ ID NO: 449998 - DNA, 120 bp, Artificial Sequence
  ENSG00000155657_366 (sequence is synthesized)
actgaaaaatccagtcattgctcaagatccaaagcaaccccctgatccacctgtagatgtagaggttcataatcctacagcggaggcaatgactattacatggaagccacctttgtatga

SEQ ID NO: 449999 - DNA, 120 bp, Artificial Sequence
  ENSG00000155657_367 (sequence is synthesized)
tggagggagcaagataatgggctacatcatagagaagattgctaagggtgaagaaaggtggaagagatgcaatgaacacctggtaccaatcctgacctatacagcaaaaggacttgaaga

SEQ ID NO: 450000 - DNA, 120 bp, Artificial Sequence
  ENSG00000155657_368 (sequence is synthesized)
ggggaaagagtaccaattccgtgtgcgagcagagaacgccgcgggtattagtgaaccttctcgggctactcctccaaccaaagctgtagatcccattgatgcccccaaagtcattctgag

SEQ ID NO: 450001 - DNA, 120 bp, Artificial Sequence
  ENSG00000155657_369 (sequence is synthesized)
aacaagcctagaagtgaaacgaggtgatgaaatagcacttgatgcaagtatttctggatcaccttacccaactattacatggataaaggatgaaaatgttattgtaccagaggaaattaa

SEQ ID NO: 450002 - DNA, 120 bp, Artificial Sequence
  ENSG00000155657_370 (sequence is synthesized)
gaagcgtgcagcacccttggttaggagaaggaagggtgaagttcaagaagaagaaccatttgtcctgcctctgacacagcgtttgagtattgacaacagcaaaaagggagaatctcagct

SEQ ID NO: 450003 - DNA, 120 bp, Artificial Sequence
  ENSG00000155657_371 (sequence is synthesized)
acgcgtccgagattctctccgacctgaccatggtctgtatatgatcaaagttgaaaatgaccacggtattgcaaaagctccttgtactgtcagtgtgttagatacaccgggaccaccaat

SEQ ID NO: 450004 - DNA, 120 bp, Artificial Sequence
  ENSG00000155657_372 (sequence is synthesized)
caactttgtatttgaagatatcagaaagacctcagtcctttgtaaatgggaaccaccccttgatgatggtggcagtgaaatcataaactacactttggaaaagaaagacaagacaaaacc

SEQ ID NO: 450005 - DNA, 120 bp, Artificial Sequence
  ENSG00000155657_373 (sequence is synthesized)
cgactcagaatggattgttgtcacttcaacacttagacattgcaaatattcagtaacaaaactgattgaaggaaaagagtacctcttccgtgtaagagctgaaaacagatttgggccagg

SEQ ID NO: 450006 - DNA, 120 bp, Artificial Sequence
  ENSG00000155657_374 (sequence is synthesized)
tccaccatgtgtttcaaagccacttgtggctaaagatccatttggaccacctgatgcaccagataagcccattgtggaagatgttaccagcaacagtatgctagtgaaatggaatgaacc

SEQ ID NO: 450007 - DNA, 120 bp, Artificial Sequence
  ENSG00000155657_375 (sequence is synthesized)
aaaagataatggaagccccattttgggttactggcttgaaaaacgtgaagttaacagtacacattggtctcgtgtcaacaaaagccttctgaatgccttgaaagccaatgtagatggctt

SEQ ID NO: 450008 - DNA, 120 bp, Artificial Sequence
  ENSG00000155657_376 (sequence is synthesized)
attagaaggactcacctatgtcttcagagtatgtgctgaaaatgcagctggacctggaaagttcagtccaccttcagatcccaaaacagcacatgatccaatctctcctcctgggccacc

SEQ ID NO: 450009 - DNA, 120 bp, Artificial Sequence
  ENSG00000155657_377 (sequence is synthesized)
tatcccaagagtcactgacacaagctctacaactattgaactagaatgggaacccccagctttcaatggtggtggggaaattgttggctattttgttgataagcagttggttggcacaaa

SEQ ID NO: 450010 - DNA, 120 bp, Artificial Sequence
  ENSG00000155657_378 (sequence is synthesized)
tgaatggtcacgctgcacagagaagatgatcaaggtccgtcagtacaccgtcaaagaaatccgagagggtgctgattacaaacttcgggtgagtgctgtcaatgccgcaggggaaggacc

SEQ ID NO: 450011 - DNA, 120 bp, Artificial Sequence
  ENSG00000155657_379 (sequence is synthesized)
gcctggagaaacacaacctgttactgtggctgaaccacaagagcctccagctgtggaactggatgtttctgtcaagggtggaatacaaataatggctgggaagactcttagaattccagc

SEQ ID NO: 450012 - DNA, 120 bp, Artificial Sequence
  ENSG00000155657_380 (sequence is synthesized)
tgtggtgactggtcgccctgtacctacaaaagtatggaccaaagaagaaggggagctggataaagaccgtgttgtaatagacaacgttggaaccaaatctgaactaattatcaaggatgc

SEQ ID NO: 450013 - DNA, 120 bp, Artificial Sequence
  ENSG00000155657_381 (sequence is synthesized)
actgcgaaaagaccatggcagatatgtgattacagctacaaatagctgtggttccaaatttgcagcagccagggtagaagtttttgatgtccctggtccagttcttgacttaaaacctgt

SEQ ID NO: 450014 - DNA, 120 bp, Artificial Sequence
  ENSG00000155657_382 (sequence is synthesized)
tgtaacaaacagaaaaatgtgtctacttaactggtctgatccagaagatgatggaggaagtgaaataacaggctttatcattgaaagaaaagatgccaagatgcatacttggagacaacc

SEQ ID NO: 450015 - DNA, 120 bp, Artificial Sequence
  ENSG00000155657_383 (sequence is synthesized)
aatagagactgagagatctaaatgtgacatcacaggtctgcttgagggacaagaatataagttccgtgttattgccaagaacaagtttggctgtggccctcctgttgaaataggaccaat

SEQ ID NO: 450016 - DNA, 120 bp, Artificial Sequence
  ENSG00000155657_384 (sequence is synthesized)
tcttgcagttgatccactaggtcctccaacatctccagagaggctcacatacactgaaaggacaaagtccactatcacacttgactggaaagagccccgcagtaatggtggcagtcccat

SEQ ID NO: 450017 - DNA, 120 bp, Artificial Sequence
  ENSG00000155657_385 (sequence is synthesized)
ccaaggatatatcattgaaaaacggcgtcatgacaaacctgactttgaaagagttaacaagcgactctgcccaaccacatcttttctggttgaaaatcttgatgaacaccaaatgtatga

SEQ ID NO: 450018 - DNA, 120 bp, Artificial Sequence
  ENSG00000155657_386 (sequence is synthesized)
gttccgtgtcaaagctgtcaatgaaattggtgaaagtgaaccatccctacctcttaatgtagtcatacaagatgatgaagtgcctccaactattaagttgcgtctgagtgttcgaggaga

SEQ ID NO: 450019 - DNA, 120 bp, Artificial Sequence
  ENSG00000155657_387 (sequence is synthesized)
cactatcaaagttaaggcaggagagcctgtccacatccctgcagatgtgacaggccttccaatgcctaagattgaatggtccaaaaatgaaactgtaattgaaaaacccactgatgcact

SEQ ID NO: 450020 - DNA, 120 bp, Artificial Sequence
  ENSG00000155657_388 (sequence is synthesized)
tcagataaccaaggaagaggtatcccgaagtgaggcaaaaactgagcttagcattcccaaagcggtccgggaggacaaaggcacttacacagttactgcttccaatcgccttggctcagt

SEQ ID NO: 450021 - DNA, 120 bp, Artificial Sequence
  ENSG00000155657_389 (sequence is synthesized)
gttccgaaatgttcacgttgaagtatatgaccgcccatccccaccaagaaatcttgctgttactgacattaaagctgaatcttgctacttgacatgggatgcccctcttgataatggtgg

SEQ ID NO: 450022 - DNA, 120 bp, Artificial Sequence
  ENSG00000155657_390 (sequence is synthesized)
cagtgaaatcacccattatgttattgacaaacgtgatgcaagtaggaagaaagcagaatgggaggaagtcaccaacactgctgtagagaaaagatatgggatctggaaacttatccccaa

SEQ ID NO: 450023 - DNA, 120 bp, Artificial Sequence
  ENSG00000155657_391 (sequence is synthesized)
tggtcagtatgagttccgagtcagggcagtgaataaatatggaatcagtgatgagtgcaaatcagataaagtagtcattcaagatccttatcgccttcctggacctccaggaaaaccaaa

SEQ ID NO: 450024 - DNA, 120 bp, Artificial Sequence
  ENSG00000155657_392 (sequence is synthesized)
agttttggcacgcaccaaaggatcaatgctagtgagctggactcctcctttggacaatggtggctctccaattactggctactggctggagaaaagagaagagggaagtccttattggtc

SEQ ID NO: 450025 - DNA, 120 bp, Artificial Sequence
  ENSG00000155657_393 (sequence is synthesized)
acgtgttagccgagcaccaataaccaaagtgggattgaaaggcgtggaatttaatgttcctcgtttgcttgaaggcgttaaataccagttcagagccatggcaataaatgctgcaggaat

SEQ ID NO: 450026 - DNA, 120 bp, Artificial Sequence
  ENSG00000155657_394 (sequence is synthesized)
tggtcctcccagtgaaccatcagatccagaggttgcaggagatcccatatttccaccggggccaccttcttgcccagaagttaaagataaaacgaagtcaagcatctcactaggatggaa

SEQ ID NO: 450027 - DNA, 120 bp, Artificial Sequence
  ENSG00000155657_395 (sequence is synthesized)
acctccagccaaagatggtggcagcccaatcaaaggatacattgtagaaatgcaagaagaaggtactactgactggaaaagagtaaatgaaccagacaaacttataactacctgtgaatg

SEQ ID NO: 450028 - DNA, 120 bp, Artificial Sequence
  ENSG00000155657_396 (sequence is synthesized)
tgtggtgcctaatctgaaagagctcaggaagtacagattcagagtgaaagctgtcaatgaagctggtgaatctgaaccaagtgatacaactggggagatccctgccactgatattcaaga

SEQ ID NO: 450029 - DNA, 120 bp, Artificial Sequence
  ENSG00000155657_397 (sequence is synthesized)
ggaaccagaagttttcattgacattggagcacaggactgtctggtttgtaaagctggctcacagattaggattcctgctgtcatcaagggacgcccaacaccaaaatcatcttgggaatt

SEQ ID NO: 450030 - DNA, 120 bp, Artificial Sequence
  ENSG00000155657_398 (sequence is synthesized)
tgatggaaaggcaaagaaagcaatgaaggatggagttcatgacatacccgaagatgcacagctggagactgctgaaaactcctcagtaattattattccggagtgtaaacgatctcatac

SEQ ID NO: 450031 - DNA, 120 bp, Artificial Sequence
  ENSG00000155657_399 (sequence is synthesized)
aggcaaatacagcatcacagccaagaataaagcaggacaaaagactgcaaattgcagagttaaagtcatggatgtaccaggcccacccaaagatctgaaagtcagtgatatcacaagggg

SEQ ID NO: 450032 - DNA, 120 bp, Artificial Sequence
  ENSG00000155657_400 (sequence is synthesized)
tagttgcagactttcatggaagatgccagacgacgatggaggagacaggatcaaaggctatgttattgagaagaggactattgatggaaaagcctggaccaaagtcaatccagactgtgg

SEQ ID NO: 450033 - DNA, 120 bp, Artificial Sequence
  ENSG00000155657_401 (sequence is synthesized)
aagcaccacatttgtagtgcctgatctcctctctgaacagcaatatttcttccgtgtgcgagcagaaaaccgttttggtattggcccacctgtggaaaccattcagaggaccactgccag

SEQ ID NO: 450034 - DNA, 120 bp, Artificial Sequence
  ENSG00000155657_402 (sequence is synthesized)
agatccgatatatcctcctgatcctcctattaaactcaagattggcctcatcacaaagaacacagtgcatctgtcatggaaacccccgaagaatgatgggggctcccctgttacccacta

SEQ ID NO: 450035 - DNA, 120 bp, Artificial Sequence
  ENSG00000155657_403 (sequence is synthesized)
tattgttgagtgccttgcatgggaccctactgggacaaagaaagaagcctggaggcagtgcaataagcgtgatgtggaagaactgcaatttactgttgaagacctagtagagggtgggga

SEQ ID NO: 450036 - DNA, 120 bp, Artificial Sequence
  ENSG00000155657_404 (sequence is synthesized)
atatgaattccgagtcaaagctgtcaatgctgcaggagtcagcaagccttcagccactgttggccctgtgactgtcaaagaccagacatgcccaccatcaattgatctaaaagaattcat

SEQ ID NO: 450037 - DNA, 120 bp, Artificial Sequence
  ENSG00000155657_405 (sequence is synthesized)
ggaggttgaagaaggaaccaatgttaacattgtggccaaaattaaaggtgtgccattcccgacactaacctggtttaaagctcctccaaagaagcctgataacaaagaacctgttctcta

SEQ ID NO: 450038 - DNA, 120 bp, Artificial Sequence
  ENSG00000155657_406 (sequence is synthesized)
tgacacccatgtcaacaaactggtggtagatgatacttgcactttagttattccgcagtctcgcaggagtgacactggcttatataccatcacagctgtaaataatctgggaacagcatc

SEQ ID NO: 450039 - DNA, 120 bp, Artificial Sequence
  ENSG00000155657_407 (sequence is synthesized)
aaaggagatgagactgaatgtcctgggtcgtcctggccctccagtgggacccataaaatttgaatctgtttcagcagatcaaatgacactatcttggtttccacctaaagatgatggtgg

SEQ ID NO: 450040 - DNA, 120 bp, Artificial Sequence
  ENSG00000155657_408 (sequence is synthesized)
gtctaagattacaaactatgtaattgagaaaagagaagctaacaggaagacatgggtccatgtctccagtgaacctaaggagtgcacgtacacgattcccaaattgctagaaggccatga

SEQ ID NO: 450041 - DNA, 120 bp, Artificial Sequence
  ENSG00000155657_409 (sequence is synthesized)
atatgtattccgaatcatggcccagaataaatatggcattggagaacctcttgacagtgaacctgaaacagcaagaaacctcttctctgtccctggagcaccagataaaccaacagttag

SEQ ID NO: 450042 - DNA, 120 bp, Artificial Sequence
  ENSG00000155657_410 (sequence is synthesized)
cagcgtgactcgtaactccatgactgtcaactgggaagagccagaatatgatggaggctctcctgtgacagggtactggctggaaatgaaagacaccacttcaaagagatggaagagagt

SEQ ID NO: 450043 - DNA, 120 bp, Artificial Sequence
  ENSG00000155657_411 (sequence is synthesized)
taaccgagatcctatcaaagccatgactttgggtgtttcttataaagtgactggtcttattgaaggttccgactatcaattccgggtatatgcaatcaatgctgctggcgtgggtccagc

SEQ ID NO: 450044 - DNA, 120 bp, Artificial Sequence
  ENSG00000155657_412 (sequence is synthesized)
aagtctgccatcagacccagcgactgctagagatccaattgcccctcctggtcctccatttcccaaagtgacagattggactaaatcatctgcagatctggagtggtctcccccactaaa

SEQ ID NO: 450045 - DNA, 120 bp, Artificial Sequence
  ENSG00000155657_413 (sequence is synthesized)
agatggtggatccaaagtaactggatacatcgttgaatataaagaagaaggaaaagaagaatgggaaaagggtaaagataaagaagtgagaggaacaaagcttgttgtgacaggattaaa

SEQ ID NO: 450046 - DNA, 120 bp, Artificial Sequence
  ENSG00000155657_414 (sequence is synthesized)
ggaaggagcattctacaaatttagagttagagcagtcaacattgctggcattggagaacctggagaggtcacagatgtcattgaaatgaaggacagacttgtttcacctgaccttcagct

SEQ ID NO: 450047 - DNA, 120 bp, Artificial Sequence
  ENSG00000155657_415 (sequence is synthesized)
agatgccagtgtcagagatagaattgttgtccatgctggaggggtgatccgaatcattgcctatgtgtctggaaagcctcctccaaccgtcacctggaacatgaatgaaagaaccttacc

SEQ ID NO: 450048 - DNA, 120 bp, Artificial Sequence
  ENSG00000155657_416 (sequence is synthesized)
tcaagaagccaccattgagaccacagccattagctcatccatggtcatcaagaactgccagaggagccatcaaggcgtctattctcttcttgccaaaaatgaagccggagaaagaaagaa

SEQ ID NO: 450049 - DNA, 120 bp, Artificial Sequence
  ENSG00000155657_417 (sequence is synthesized)
gacaattattgttgatgtattagatgttccaggtcccgttggaacaccattcctagctcacaacctaaccaatgagtcctgcaaactgacatggttttctccagaagatgatggaggctc

SEQ ID NO: 450050 - DNA, 120 bp, Artificial Sequence
  ENSG00000155657_418 (sequence is synthesized)
tccaatcaccaattatgtcattgaaaagcgtgaatctgaccgcagagcatggaccccagtgacatatacagttacccgacaaaatgctactgtccagggtctcattcaaggaaaagccta

SEQ ID NO: 450051 - DNA, 120 bp, Artificial Sequence
  ENSG00000155657_419 (sequence is synthesized)
ctttttccgaattgcggctgaaaatagtattggcatgggtccatttgttgagacatcagaggcacttgttatcagagagccaataactgtaccagagcgtcctgaagacctggaagtcaa

SEQ ID NO: 450052 - DNA, 120 bp, Artificial Sequence
  ENSG00000155657_420 (sequence is synthesized)
agaagttactaaaaatactgtaactttgacttggaatcctcctaagtatgatggtgggtcagaaattattaactatgtcctagaaagtcggctcattgggactgagaagttccacaaagt

SEQ ID NO: 450053 - DNA, 120 bp, Artificial Sequence
  ENSG00000155657_421 (sequence is synthesized)
tacaaatgacaacttgcttagcagaaaatacactgttaaaggcttaaaagaaggtgatacctatgagtaccgtgtcagtgctgtcaacattgttggacaaggcaaaccatcattttgcac

SEQ ID NO: 450054 - DNA, 120 bp, Artificial Sequence
  ENSG00000155657_422 (sequence is synthesized)
ccaaagcctaaggtttcctggttcaaagatgaagctgatgtgctggaagatgatcgcactcatataaagactacaccagcaacacttgctttagagaagatcaaggccaaacgttcagat

SEQ ID NO: 450055 - DNA, 120 bp, Artificial Sequence
  ENSG00000155657_423 (sequence is synthesized)
tccggcaaatactgtgtggttgtggagaacagtacaggctctaggaaaggtttctgtcaagttaatgttgttgaccgtcctggaccaccagtaggaccagttagttttgatgaggtgacc

SEQ ID NO: 450056 - DNA, 120 bp, Artificial Sequence
  ENSG00000155657_424 (sequence is synthesized)
aaagattacatggttatctcttggaagcctcctttagatgatggaggcagtaaaatcaccaattatattattgagaagaaggaagtgggtaaagacgtctggatgccagtgacatctgca

SEQ ID NO: 450057 - DNA, 120 bp, Artificial Sequence
  ENSG00000155657_425 (sequence is synthesized)
agtgctaaaacaacatgcaaagtttctaaactacttgaaggaaaagattatattttccggatacatgctgaaaatctgtatggaataagtgatcctctggtgtctgattcaatgaaagcc

SEQ ID NO: 450058 - DNA, 120 bp, Artificial Sequence
  ENSG00000155657_426 (sequence is synthesized)
aaagatcgtttcagggttcctgatgcacctgatcagccaattgttacagaagttaccaaagactctgcattagtaacctggaataagccacatgatggaggaaaacccatcacaaactac

SEQ ID NO: 450059 - DNA, 120 bp, Artificial Sequence
  ENSG00000155657_427 (sequence is synthesized)
atcctggaaaagagagaaactatgtctaaacgatgggctagagttaccaaagatcctattcatccatacactaaatttagggttcctgatcttctagaaggatgtcagtatgaattccgg

SEQ ID NO: 450060 - DNA, 120 bp, Artificial Sequence
  ENSG00000155657_428 (sequence is synthesized)
gtttctgcagaaaatgaaattggtattggagatccaagcccaccatccaaaccagtctttgctaaagatccaattgctaaaccaagtccacctgttaatcctgaagcaatagatacaaca

SEQ ID NO: 450061 - DNA, 120 bp, Artificial Sequence
  ENSG00000155657_429 (sequence is synthesized)
tgcaattcagtcgatctaacttggcagccaccacgtcatgatggtgggagcaagattctgggttatattgttgagtaccagaaagttggagatgaagagtggagaagagccaatcacacc

SEQ ID NO: 450062 - DNA, 120 bp, Artificial Sequence
  ENSG00000155657_430 (sequence is synthesized)
cctgagtcatgtcctgaaactaaatataaagtcaccggtcttcgggacggtcaaacctataagtttagagtgttagcagtcaatgcagctggtgaatcagatccagctcatgttccggag

SEQ ID NO: 450063 - DNA, 120 bp, Artificial Sequence
  ENSG00000155657_431 (sequence is synthesized)
ccagtcctagtaaaagacaggcttgaaccccctgagttgattcttgatgccaacatggcaagagaacaacacattaaagttggtgatactctaagacttagtgccatcatcaaaggagtg

SEQ ID NO: 450064 - DNA, 120 bp, Artificial Sequence
  ENSG00000155657_432 (sequence is synthesized)
ccattcccaaaagtaacttggaaaaaagaagacagagatgctccaactaaagcaagaattgatgtgactccagttggtagcaagcttgaaattcgtaatgctgcccatgaagatggtgga

SEQ ID NO: 450065 - DNA, 120 bp, Artificial Sequence
  ENSG00000155657_433 (sequence is synthesized)
atttattctttaacagtggagaatccagctggttcaaaaactgtctcagtaaaagtacttgtattagataaacctgggccacctagagatctggaagtcagtgaaattaggaaagattca

SEQ ID NO: 450066 - DNA, 120 bp, Artificial Sequence
  ENSG00000155657_434 (sequence is synthesized)
tgttaccttacttggaaagaaccactggatgatggtggttctgttattaccaattatgtggttgagaggagagatgttgccagcgcccagtggtcacctctctcagctacatcaaagaaa

SEQ ID NO: 450067 - DNA, 120 bp, Artificial Sequence
  ENSG00000155657_435 (sequence is synthesized)
aagagtcacttcgctaagcatctgaatgaaggcaaccagtacctcttccgagtagctgcggagaaccagtatggacgtggtccttttgttgaaacaccaaaaccaatcaaggctttggat

SEQ ID NO: 450068 - DNA, 120 bp, Artificial Sequence
  ENSG00000155657_436 (sequence is synthesized)
cctctccatcccccagggccacccaaggacctgcaccatgtagatgttgacaagactgaagtctccctagtctggaataagccggatcgtgatggtggttctccaatcactggatatttg

SEQ ID NO: 450069 - DNA, 120 bp, Artificial Sequence
  ENSG00000155657_437 (sequence is synthesized)
gtagaatatcaagaagaaggcacccaggactggattaaatttaagactgtgacaaacttagagtgtgtggttactggactacaacaaggaaagacctatagattccgtgtaaaagctgaa

SEQ ID NO: 450070 - DNA, 120 bp, Artificial Sequence
  ENSG00000155657_438 (sequence is synthesized)
aacattgtgggtcttggtctccctgacacaactatcccgatagaatgtcaagaaaaactagtgcctccatccgtggagctagatgtgaaattaattgaaggtcttgtggtaaaggctgga

SEQ ID NO: 450071 - DNA, 120 bp, Artificial Sequence
  ENSG00000155657_439 (sequence is synthesized)
accacagtcagattccctgctattataagaggtgtgcctgttcctactgcaaagtggacaaccgatgggagtgagattaaaaccgatgagcactacacagttgaaacagacaacttctca

SEQ ID NO: 450072 - DNA, 120 bp, Artificial Sequence
  ENSG00000155657_440 (sequence is synthesized)
tcagtacttaccattaagaactgcttaaggagagacactggggaatatcaaatcacagtttccaatgcagccggtagcaaaacagtagccgtacatcttactgttcttgatgttcctggg

SEQ ID NO: 450073 - DNA, 120 bp, Artificial Sequence
  ENSG00000155657_441 (sequence is synthesized)
ccaccaacaggtcctattaatattctggatgttactcctgaacacatgactatctcatggcagccacctaaggatgatggaggaagccctgtgataaattatattgttgagaaacaagat

SEQ ID NO: 450074 - DNA, 120 bp, Artificial Sequence
  ENSG00000155657_442 (sequence is synthesized)
acaaggaaagacacgtggggtgttgtctcttccggaagcagtaagacaaagctgaaaatcccacatctgcagaagggctgtgaatatgttttccgagttagagcagagaataagataggt

SEQ ID NO: 450075 - DNA, 120 bp, Artificial Sequence
  ENSG00000155657_443 (sequence is synthesized)
gttggtcctccccttgactccacacctactgttgctaagcataaatttagtcctccgtctcctcctggtaaaccagtggttactgacattactgaaaatgcagcaacagtgtcttggacc

SEQ ID NO: 450076 - DNA, 120 bp, Artificial Sequence
  ENSG00000155657_444 (sequence is synthesized)
ctgccaaaatctgatggtggcagtccaataactggctactatatggaacgtcgagaagtaactggcaaatgggtgagggtcaacaaaacacctatcgctgacctgaagttcagagtgact

SEQ ID NO: 450077 - DNA, 120 bp, Artificial Sequence
  ENSG00000155657_445 (sequence is synthesized)
ggactctatgaaggaaatacatatgagtttagagtttttgctgaaaatcttgcaggactaagcaaaccatccccaagttctgatccaataaaagcttgccggcccatcaaaccacctgga

SEQ ID NO: 450078 - DNA, 120 bp, Artificial Sequence
  ENSG00000155657_446 (sequence is synthesized)
ccacctattaatcctaaactgaaagacaagagcagagaaacagctgatttggtgtggacaaagcctctcagtgatggtggtagccccattctaggatatgtagtggaatgtcagaaacct

SEQ ID NO: 450079 - DNA, 120 bp, Artificial Sequence
  ENSG00000155657_447 (sequence is synthesized)
ggcacagcacaatggaacaggattaataaagatgaactcattaggcaatgtgcctttagggtacctggactaattgaaggaaatgagtacagattccgtataaaggcagctaatattgta

SEQ ID NO: 450080 - DNA, 120 bp, Artificial Sequence
  ENSG00000155657_448 (sequence is synthesized)
ggagagggtgagccaagagaactagcagaatctgtgattgcaaaagatatccttcatcctccagaagtagaacttgatgttacttgtcgtgatgttattaccgtgagagtaggccaaact

SEQ ID NO: 450081 - DNA, 120 bp, Artificial Sequence
  ENSG00000155657_449 (sequence is synthesized)
atccgcattctagctcgagtcaaaggcagacctgaaccagacataacttggactaaggaaggcaaagtattggtccgagaaaagagggtggaccttattcaggatctacctcgtgttgag

SEQ ID NO: 450082 - DNA, 120 bp, Artificial Sequence
  ENSG00000155657_450 (sequence is synthesized)
ttacaaattaaagaagctgttagagctgatcatggcaagtatatcatctcagctaagaacagcagtggacatgcccaaggttcagccatcgttaacgtccttgacagacctgggccttgc

SEQ ID NO: 450083 - DNA, 120 bp, Artificial Sequence
  ENSG00000155657_451 (sequence is synthesized)
cagaatttgaaggttaccaatgtaaccaaagagaactgtacaatttcttgggaaaacccactagataatggtggctcagaaataacaaacttcatagtagaatatcgcaaaccaaaccag

SEQ ID NO: 450084 - DNA, 120 bp, Artificial Sequence
  ENSG00000155657_452 (sequence is synthesized)
aaaggctggtcaattgttgcatcagatgtcactaaacgattaatcaaggccaaccttttagccaacaatgaatactatttccgagtttgtgcagagaataaagtaggtgttgggccaacc

SEQ ID NO: 450085 - DNA, 120 bp, Artificial Sequence
  ENSG00000155657_453 (sequence is synthesized)
atcgaaacaaaaactcccattctggctattaaccctattgacagaccaggtgagcctgaaaaccttcacattgcagataaaggaaagacatttgtctatctaaagtggcggaggcctgac

SEQ ID NO: 450086 - DNA, 120 bp, Artificial Sequence
  ENSG00000155657_454 (sequence is synthesized)
tatgatggtggcagtccaaatctgtcatatcatgttgagagaaggcttaagggctccgatgactgggaaagagtgcataaaggaagcattaaagaaactcactacatggttgacagatgt

SEQ ID NO: 450087 - DNA, 120 bp, Artificial Sequence
  ENSG00000155657_455 (sequence is synthesized)
gttgaaaaccagatttatgagttcagagtgcaaacaaagaatgaaggtggggaaagtgactgggtgaagacagaggaagttgttgtgaaagaagacttacaaaaaccagtacttgatctg

SEQ ID NO: 450088 - DNA, 120 bp, Artificial Sequence
  ENSG00000155657_456 (sequence is synthesized)
aaattaagtggggtcctaactgtcaaagcaggggacaccattaggcttgaggcaggggttagaggcaaaccattcccagaagttgcatggaccaaggacaaagacgctacagacttaaca

SEQ ID NO: 450089 - DNA, 120 bp, Artificial Sequence
  ENSG00000155657_457 (sequence is synthesized)
agatcaccaagggtcaagattgatacccgtgctgattcatctaaattttctcttactaaagcaaagcgaagtgatgggggtaaatatgtagttacggcaactaacacggctggcagtttt

SEQ ID NO: 450090 - DNA, 120 bp, Artificial Sequence
  ENSG00000155657_458 (sequence is synthesized)
gtggcctatgccactgtcaatgttttagataagcctggtcctgtgagaaatctgaaaattgttgatgtgtccagtgataggtgtactgtttgctgggatccaccagaagatgatggtggc

SEQ ID NO: 450091 - DNA, 120 bp, Artificial Sequence
  ENSG00000155657_459 (sequence is synthesized)
tgtgaaatccaaaattatattctagaaaaatgtgagacaaagcgaatggtttggtctacctattctgctactgtcttgacacctggtactacagtaacacgtctcatagaaggaaatgaa

SEQ ID NO: 450092 - DNA, 120 bp, Artificial Sequence
  ENSG00000155657_460 (sequence is synthesized)
tatattttcagagtccgtgcagaaaataaaataggcacagggcctccaacagaaagtaaaccagtcatagccaaaaccaagtatgataaacctggtcgccctgatcccccagaagtcact

SEQ ID NO: 450093 - DNA, 120 bp, Artificial Sequence
  ENSG00000155657_461 (sequence is synthesized)
aaagtaagcaaagaagagatgactgtggtttggaatccacctgaatatgatggtggaaagtctataactggatactttttggagaaaaaggaaaagcattcaacacgatgggtccctgtc

SEQ ID NO: 450094 - DNA, 120 bp, Artificial Sequence
  ENSG00000155657_462 (sequence is synthesized)
aacaagagtgcaatccctgagagacgtatgaaagtacagaatctcctcccagaccatgaatatcagttccgtgtcaaggcagaaaatgaaattggaattggagaaccaagcttgccttca

SEQ ID NO: 450095 - DNA, 120 bp, Artificial Sequence
  ENSG00000155657_463 (sequence is synthesized)
agaccggtggtggcaaaagaccccatagagccacctggtccaccaaccaatttcagagtggttgatacaaccaaacattccataactcttgggtggggaaaaccagtctatgatggtggt

SEQ ID NO: 450096 - DNA, 120 bp, Artificial Sequence
  ENSG00000155657_464 (sequence is synthesized)
gcaccgatcattggatatgttgtggaaatgagaccaaaaatagcagatgcgtctcctgatgaaggctggaaacggtgtaatgctgcagcacagcttgtacgcaaggaattcactgttacc

SEQ ID NO: 450097 - DNA, 120 bp, Artificial Sequence
  ENSG00000155657_465 (sequence is synthesized)
agcttggatgaaaaccaggaatatgagttcagggtgtgtgcccaaaaccaagttggtattgggcgccctgcagagctaaaggaagctatcaaacctaaagaaatactagaacctccggag

SEQ ID NO: 450098 - DNA, 120 bp, Artificial Sequence
  ENSG00000155657_466 (sequence is synthesized)
attgatttggatgccagcatgaggaaactggtcatagtgagagcaggatgccctattcgtctctttgctatagtgagaggacgaccagcccctaaagtcacttggcgaaaagttggcatt

SEQ ID NO: 450099 - DNA, 120 bp, Artificial Sequence
  ENSG00000155657_467 (sequence is synthesized)
gataatgtggtcagaaaaggacaagttgatctggttgacactatggccttccttgtcatccccaattctacccgtgatgactcaggaaaatattccttaacacttgtgaacccagcagga

SEQ ID NO: 450100 - DNA, 120 bp, Artificial Sequence
  ENSG00000155657_468 (sequence is synthesized)
gaaaaggctgtattcgtaaatgtcagagtattagacactcctgggcctgtgtctgatttaaaagtttcagatgtcactaaaacatcatgccatgtgtcctgggcccctcctgaaaacgac

SEQ ID NO: 450101 - DNA, 120 bp, Artificial Sequence
  ENSG00000155657_469 (sequence is synthesized)
ggtgggagccaagtgacacattatatcgtggagaaacgtgaggcagacagaaagacatggtcgaccgttaccccagaagttaagaaaacaagcttccatgtaaccaatcttgtccctggg

SEQ ID NO: 450102 - DNA, 120 bp, Artificial Sequence
  ENSG00000155657_470 (sequence is synthesized)
aatgagtattacttcagagtaactgctgtcaacgaatatggccctggcgtcccaacagatgtcccaaaaccagtgcttgcatcagatcctctaagtgagccggatcccccaaggaaatta

SEQ ID NO: 450103 - DNA, 120 bp, Artificial Sequence
  ENSG00000155657_471 (sequence is synthesized)
gaagtgactgaaatgaccaagaacagtgccaccttagcctggttacctcccctacgtgatggaggtgctaaaatcgatggctacatcactagttacagagaagaagagcagcctgcagat

SEQ ID NO: 450104 - DNA, 120 bp, Artificial Sequence
  ENSG00000155657_472 (sequence is synthesized)
cgctggacagagtactcagtggtaaaagatctgagccttgttgtcactggcctaaaggaaggaaagaaatacaaatttagagtagcggccagaaatgctgttggagtcagtttgccaaga

SEQ ID NO: 450105 - DNA, 120 bp, Artificial Sequence
  ENSG00000155657_473 (sequence is synthesized)
gaagctgaaggagtgtatgaagccaaagaacaactgttgccaccaaagatccttatgccagagcaaataactatcaaagctgggaaaaaactccgaattgaagcccatgtgtatggaaag

SEQ ID NO: 450106 - DNA, 120 bp, Artificial Sequence
  ENSG00000155657_474 (sequence is synthesized)
cctcatcccacctgtaaatggaaaaaaggagaagatgaagttgtcacatccagccacctggcagtgcataaagcagacagctcttcaattctgatcataaaagatgtgactaggaaagac

SEQ ID NO: 450107 - DNA, 120 bp, Artificial Sequence
  ENSG00000155657_475 (sequence is synthesized)
agtggttactacagcctcacagcagagaacagttctgggacagacactcagaaaatcaaagttgtagtcatggatgcccccggcccccctcagcctccatttgacatttctgatatagac

SEQ ID NO: 450108 - DNA, 120 bp, Artificial Sequence
  ENSG00000155657_476 (sequence is synthesized)
gctgatgcttgctccctgtcatggcacatccctctggaggacggaggcagtaacatcaccaattatatagtggagaagtgtgatgtaagccgaggtgactgggtcacggctctagcttca

SEQ ID NO: 450109 - DNA, 120 bp, Artificial Sequence
  ENSG00000155657_477 (sequence is synthesized)
gtcacaaaaacttcctgcagggttggaaagctgatcccaggccaggagtacatcttccgggtccgtgctgaaaaccgatttggcatttcagagcctctcacatctccaaagatggttgcg

SEQ ID NO: 450110 - DNA, 120 bp, Artificial Sequence
  ENSG00000155657_478 (sequence is synthesized)
cagttcccatttggtgttcctagtgaaccaaagaatgcacgagtcaccaaagtcaacaaggactgtatttttgttgcttgggacagaccagatagtgatggagggagccccattattggt

SEQ ID NO: 450111 - DNA, 120 bp, Artificial Sequence
  ENSG00000155657_479 (sequence is synthesized)
tatctgattgaacgcaaggaaagaaacagtttgctgtgggtgaaagccaatgatactcttgtccggtcaactgaatatccttgtgctggccttgtagaaggtcttgagtattcattcaga

SEQ ID NO: 450112 - DNA, 120 bp, Artificial Sequence
  ENSG00000155657_480 (sequence is synthesized)
atctatgccctaaacaaagctggatccagcccacccagcaaacccacagaatatgtaactgcaagaatgccagttgatcctcctgggaaacctgaggttattgatgtcaccaagagtact

SEQ ID NO: 450113 - DNA, 120 bp, Artificial Sequence
  ENSG00000155657_481 (sequence is synthesized)
gtatctctgatctgggctcgtccaaagcatgatggaggcagtaaaattattggctatttcgtagaagcttgcaaacttcctggtgataaatgggtacggtgcaatactgcacctcaccag

SEQ ID NO: 450114 - DNA, 120 bp, Artificial Sequence
  ENSG00000155657_482 (sequence is synthesized)
attccccaggaagagtacacagctactggcctagaagagaaagctcagtatcaatttagagctattgccaggaccgcggtaaacattagcccaccttctgaaccttctgatccagtgact

SEQ ID NO: 450115 - DNA, 120 bp, Artificial Sequence
  ENSG00000155657_483 (sequence is synthesized)
atcctcgcagaaaatgtccctcccaggatagacctgagtgtggctatgaaatctttgcttactgtgaaagctggaactaatgtctgcttggatgctactgtttttggtaaaccgatgcca

SEQ ID NO: 450116 - DNA, 120 bp, Artificial Sequence
  ENSG00000155657_484 (sequence is synthesized)
acagtttcttggaaaaaagatggcacactgctaaaaccagcagaaggcataaagatggccatgcagcggaatctgtgcaccttggagctattcagcgtgaaccggaaggactcaggagac

SEQ ID NO: 450117 - DNA, 120 bp, Artificial Sequence
  ENSG00000155657_485 (sequence is synthesized)
tataccattactgctgaaaattcaagtggttctaaatcagccaccattaagcttaaagtgttagataaaccgggtcctccagcatctgttaaaatcaacaaaatgtattcagatcgtgct

SEQ ID NO: 450118 - DNA, 120 bp, Artificial Sequence
  ENSG00000155657_486 (sequence is synthesized)
atgctttcttgggaaccgcctcttgaagatggaggctcagaaatcaccaactatattgttgacaaacgtgaaacaagcaggcccaactgggctcaagtctctgcaactgtgcctatcacc

SEQ ID NO: 450119 - DNA, 120 bp, Artificial Sequence
  ENSG00000155657_487 (sequence is synthesized)
agctgcagcgtggagaaacttatagagggccatgagtatcagttccgtatttgtgctgaaaataaatatggagtaggcgatccagtcttcactgaaccagcaattgccaaaaacccatat

SEQ ID NO: 450120 - DNA, 120 bp, Artificial Sequence
  ENSG00000155657_488 (sequence is synthesized)
gacccaccaggacgctgtgatcctcctgttattagcaacataaccaaagatcacatgacagtcagctggaagccaccagcagatgatgggggctcacccatcactggctatttgcttgaa

SEQ ID NO: 450121 - DNA, 120 bp, Artificial Sequence
  ENSG00000155657_489 (sequence is synthesized)
aagcgggaaacccaggctgttaactggactaaggtcaacagaaaacctattatagaaagaacattaaaagcaacaggtcttcaagaaggtaccgaatatgagttccgtgttacagctata

SEQ ID NO: 450122 - DNA, 120 bp, Artificial Sequence
  ENSG00000155657_490 (sequence is synthesized)
aataaagctggaccaggcaaacccagtgacgcatccaaggccgcttatgctcgggaccctcagtatcctcctggcccaccggctttccctaaagtatatgatacaactcgcagctctgtg

SEQ ID NO: 450123 - DNA, 120 bp, Artificial Sequence
  ENSG00000155657_491 (sequence is synthesized)
agtctatcttggggcaagccagcctatgacggcggcagccctatcattggttatctcgttgaagtaaaacgggctgactccgataactgggtgaggtgcaacttaccacagaatctacag

SEQ ID NO: 450124 - DNA, 120 bp, Artificial Sequence
  ENSG00000155657_492 (sequence is synthesized)
aaaacccgctttgaggttactggcctgatggaagacacacaatatcaattccgtgtgtatgccgttaataagattggatacagtgaccccagtgatgtgccagataaacactatcccaag

SEQ ID NO: 450125 - DNA, 120 bp, Artificial Sequence
  ENSG00000155657_493 (sequence is synthesized)
gacatcttaattccacctgagggagaacttgatgcggacttaaggaagacactcatattacgtgctggagttactatgagactatatgtaccagtaaaaggacgcccacctccaaagatt

SEQ ID NO: 450126 - DNA, 120 bp, Artificial Sequence
  ENSG00000155657_494 (sequence is synthesized)
acttggtctaaaccaaatgtcaatctaagagacaggattggactggacataaagtcaactgactttgacactttcttgcgctgtgaaaatgtgaacaaatatgatgcaggaaaatatatc

SEQ ID NO: 450127 - DNA, 120 bp, Artificial Sequence
  ENSG00000155657_495 (sequence is synthesized)
ttaaccctggagaacagctgtggtaaaaaggaatataccattgttgtgaaagtgcttgatactcctgggccacctgtcaatgtgactgttaaggaaatatccaaagactctgcttatgtt

SEQ ID NO: 450128 - DNA, 120 bp, Artificial Sequence
  ENSG00000155657_496 (sequence is synthesized)
acctgggagcctcccattattgatggcggaagccccatcataaactatgtggtacaaaaacgtgatgcagagaggaaatcctggtctacagtgacaactgagtgctccaaaacaagcttc

SEQ ID NO: 450129 - DNA, 120 bp, Artificial Sequence
  ENSG00000155657_497 (sequence is synthesized)
agagtagctaatttggaggagggaaaatcctacttcttccgagtgtttgctgaaaatgagtatggcattggtgatcccggtgaaactcgtgatgctgtcaaagcttcccaaactcctgga

SEQ ID NO: 450130 - DNA, 120 bp, Artificial Sequence
  ENSG00000155657_498 (sequence is synthesized)
ccagttgtggacctgaaagtgaggtctgtatctaagtcatcctgtagcattggctggaaaaagcctcacagtgatggtggaagtcggattattggatatgtagttgatttcctgactgaa

SEQ ID NO: 450131 - DNA, 120 bp, Artificial Sequence
  ENSG00000155657_499 (sequence is synthesized)
gaaaataagtggcaacgagttatgaaatccttaagcctacagtactctgcaaaagatttgactgaagggaaggaatataccttcagagtgagtgctgagaatgaaaatggagaaggaacc

SEQ ID NO: 450132 - DNA, 120 bp, Artificial Sequence
  ENSG00000155657_500 (sequence is synthesized)
ccaagcgaaatcactgttgtggcaagggatgatgttgtggctcctgatcttgacttaaagggtctacctgatttgtgctacttggctaaagaaaacagcaacttccggcttaagatcccc

SEQ ID NO: 450133 - DNA, 120 bp, Artificial Sequence
  ENSG00000155657_501 (sequence is synthesized)
ataaaaggcaagccagctccatcagtctcctggaagaaaggggaagatcctctagcaactgacactagagtcagtgttgagtcatctgcggttaacacaactcttatagtgtacgattgc

SEQ ID NO: 450134 - DNA, 120 bp, Artificial Sequence
  ENSG00000155657_502 (sequence is synthesized)
caaaaatctgatgctggaaaatacacaatcacacttaagaatgttgctggcaccaaggaaggaactatctccataaaggttgttggcaagcctggcatccccactggaccaatcaaattt

SEQ ID NO: 450135 - DNA, 120 bp, Artificial Sequence
  ENSG00000155657_503 (sequence is synthesized)
gatgaagtcacagcagaagccatgaccttaaagtgggctcctccaaaggatgatggaggttctgaaatcaccaactatatcctagagaagagggattctgtgaacaacaagtgggtgacg

SEQ ID NO: 450136 - DNA, 120 bp, Artificial Sequence
  ENSG00000155657_504 (sequence is synthesized)
tgcgcctcagctgtccagaaaaccacctttagagtaaccagacttcatgagggcatggaatataccttcagggtcagtgccgaaaataaatatggtgtaggggaaggcctgaaatcggag

SEQ ID NO: 450137 - DNA, 120 bp, Artificial Sequence
  ENSG00000155657_505 (sequence is synthesized)
ccaattgttgcgagacatccatttgatgtgcctgatgctcccccacctcccaatattgtggatgtcagacacgattcagtatctctaacttggactgaccccaagaaaactggtggttct

SEQ ID NO: 450138 - DNA, 120 bp, Artificial Sequence
  ENSG00000155657_506 (sequence is synthesized)
ccaattacagggtatcatctcgagttcaaggaaagaaacagccttttgtggaagagagctaacaagactccgataaggatgagagactttaaagtgacaggattaactgaaggtcttgaa

SEQ ID NO: 450139 - DNA, 120 bp, Artificial Sequence
  ENSG00000155657_507 (sequence is synthesized)
tatgaattccgagttatggcaatcaatttagcaggtgtgggcaagccaagcctaccatcagagcctgttgtggcactggacccaattgatcctcctggaaaacctgaggttattaacata

SEQ ID NO: 450140 - DNA, 120 bp, Artificial Sequence
  ENSG00000155657_508 (sequence is synthesized)
acaaggaattcagtgactctcatttggactgaacctaaatatgacggtggtcataagttaactggatatatagtggagaagcgagatctaccttcgaagtcttggatgaaagccaaccat

SEQ ID NO: 450141 - DNA, 120 bp, Artificial Sequence
  ENSG00000155657_509 (sequence is synthesized)
gttaatgtcccagaatgtgcctttactgtaactgaccttgttgagggtggaaaatatgaattcagaattagagcaaagaatacagcaggtgctatcagtgctccatcagaaagtacagaa

SEQ ID NO: 450142 - DNA, 120 bp, Artificial Sequence
  ENSG00000155657_510 (sequence is synthesized)
accattatttgcaaggatgaatacgaggcaccaacaattgtccttgatcccacaataaaagatgggctaacaattaaagcaggggataccattgttttgaatgccattagcattcttggc

SEQ ID NO: 450143 - DNA, 120 bp, Artificial Sequence
  ENSG00000155657_511 (sequence is synthesized)
aaaccccttccaaaatcaagttggtccaaggcaggaaaagacattagaccatcagatatcactcagataacttcaaccccaacatcttccatgcttactatcaagtatgccactagaaaa

SEQ ID NO: 450144 - DNA, 120 bp, Artificial Sequence
  ENSG00000155657_512 (sequence is synthesized)
gatgcgggtgaatataccatcactgctaccaatccttttggcacgaaggtggaacatgtgaaggtaacagtccttgatgtacctggtcccccaggtcctgttgaaatcagtaatgtttct

SEQ ID NO: 450145 - DNA, 120 bp, Artificial Sequence
  ENSG00000155657_513 (sequence is synthesized)
gctgaaaaagcaacacttacatggacacctcccttggaagatggcggctcaccaattaagtcctatatacttgaaaagagagaaaccagccgacttttgtggacagtggtttctgaagat

SEQ ID NO: 450146 - DNA, 120 bp, Artificial Sequence
  ENSG00000155657_514 (sequence is synthesized)
attcagtcttgcaggcatgtggcaaccaaacttatccaaggaaatgagtacatcttccgggtctcagctgtaaaccactatggcaaaggagaacctgtacagtctgaacctgtcaaaatg

SEQ ID NO: 450147 - DNA, 120 bp, Artificial Sequence
  ENSG00000155657_515 (sequence is synthesized)
gtagacagatttggtccccctggccctcctgaaaaaccagaggtatcaaatgtcactaagaacactgccactgtcagctggaaaaggccagtggatgatggtggcagcgaaattacagga

SEQ ID NO: 450148 - DNA, 120 bp, Artificial Sequence
  ENSG00000155657_516 (sequence is synthesized)
tatcatgtagaaaggagagaaaagaaaagcctgcgatgggtgagagcaataaaaacaccagtttccgatctcaggtgcaaagtaacaggactgcaagaaggaagcacctacgaattccgt

SEQ ID NO: 450149 - DNA, 120 bp, Artificial Sequence
  ENSG00000155657_517 (sequence is synthesized)
gtcagtgcagaaaacagagcaggaattggtccacccagtgaggcttcagattctgttctgatgaaagatgcagcatatcctccaggaccaccttcaaatccgcatgtcactgatactacc

SEQ ID NO: 450150 - DNA, 120 bp, Artificial Sequence
  ENSG00000155657_518 (sequence is synthesized)
aagaaatctgcttctttggcatggggcaagcctcattatgatggtggacttgaaatcactggctatgtcgtggagcatcaaaaagtaggagacgaggcctggataaaagataccacagga

SEQ ID NO: 450151 - DNA, 120 bp, Artificial Sequence
  ENSG00000155657_519 (sequence is synthesized)
accgccctcagaatcactcagttcgttgttcctgatcttcagactaaagaaaaatacaacttcagaatcagtgccatcaacgatgcaggtgttggggagccagcggtgattccagatgtt

SEQ ID NO: 450152 - DNA, 120 bp, Artificial Sequence
  ENSG00000155657_520 (sequence is synthesized)
gaaatcgtagaacgggagatggctcctgattttgaactagatgccgagcttcgaagaacacttgttgttagagcaggactcagtattaggatatttgtgccaattaaaggtcgtcctgct

SEQ ID NO: 450153 - DNA, 120 bp, Artificial Sequence
  ENSG00000155657_521 (sequence is synthesized)
cctgaagtgacatggaccaaagataacatcaacctgaaaaaccgagccaacattgaaaatacggaatcatttactcttctgattatcccagaatgtaacagatatgataccggtaaattt

SEQ ID NO: 450154 - DNA, 120 bp, Artificial Sequence
  ENSG00000155657_522 (sequence is synthesized)
gtcatgaccattgaaaacccggctgggaagaaaagtggctttgtgaacgtcagagtcttggacacgccaggcccagtcctcaacctgcggcctacagacatcacaaaggacagtgtcacc

SEQ ID NO: 450155 - DNA, 120 bp, Artificial Sequence
  ENSG00000155657_523 (sequence is synthesized)
ctgcactgggacctccctctgatagatggaggctcacgtataacaaactacattgtagagaaacgtgaagcaacacggaaatcttattccacagccaccactaagtgccataaatgcaca

SEQ ID NO: 450156 - DNA, 120 bp, Artificial Sequence
  ENSG00000155657_524 (sequence is synthesized)
tataaagttaccggcttgtctgaagggtgtgaatatttcttcagagtgatggcagagaatgaatatggaattggtgagccaacagaaactacagagcccgtaaaagcctctgaagcacca

SEQ ID NO: 450157 - DNA, 120 bp, Artificial Sequence
  ENSG00000155657_525 (sequence is synthesized)
tctccaccagacagccttaacatcatggacataactaagagcaccgtcagcctggcatggcctaagcccaaacacgatggtggcagcaagatcactggctatgtgattgaagcccaaaga

SEQ ID NO: 450158 - DNA, 120 bp, Artificial Sequence
  ENSG00000155657_526 (sequence is synthesized)
aaaggctctgaccagtggacccacatcacaaccgtgaaagggttagaatgtgttgtgaggaatctaactgaaggagaggaatataccttccaagtgatggcagtgaacagcgcggggaga

SEQ ID NO: 450159 - DNA, 120 bp, Artificial Sequence
  ENSG00000155657_527 (sequence is synthesized)
agtgcccctagagaaagcagacccgtcattgtcaaggagcagacaatgcttccagagctggatctccgtggcatctatcagaaactggtcattgccaaagctggtgacaacatcaaagtt

SEQ ID NO: 450160 - DNA, 120 bp, Artificial Sequence
  ENSG00000155657_528 (sequence is synthesized)
gaaattccagtgctcggtcgaccgaagcccacagtgacatggaaaaaaggagaccaaattcttaaacagacacagagagttaattttgaaaccacagcgacttcaaccattttaaatatc

SEQ ID NO: 450161 - DNA, 120 bp, Artificial Sequence
  ENSG00000155657_529 (sequence is synthesized)
aatgagtgtgtcagaagtgatagtgggccctatccattaacagcaaggaacattgtaggagaggttggtgatgtcatcaccattcaagtccatgatatcccagggccacctactggacca

SEQ ID NO: 450162 - DNA, 120 bp, Artificial Sequence
  ENSG00000155657_530 (sequence is synthesized)
atcaaatttgatgaagtttcatctgattttgtaaccttctcttgggacccacctgagaacgatggtggtgtaccaataagcaactatgtagtggaaatgcggcagactgacagtactacc

SEQ ID NO: 450163 - DNA, 120 bp, Artificial Sequence
  ENSG00000155657_531 (sequence is synthesized)
tgggttgagttagcaaccaccgttatacgtactacctataaagccacccgccttactactggattagagtatcagttccgtgtaaaagctcagaatagatatggagttggaccaggcatc

SEQ ID NO: 450164 - DNA, 120 bp, Artificial Sequence
  ENSG00000155657_532 (sequence is synthesized)
acatcagcatgcatagttgccaactatccatttaaggttcctggacctcctggtacccctcaggtaactgcagttaccaaggattcaatgacaattagctggcatgagccactttctgat

SEQ ID NO: 450165 - DNA, 120 bp, Artificial Sequence
  ENSG00000155657_533 (sequence is synthesized)
ggtggaagccccattttaggatatcatgttgaaagaaaagaacgaaatggtattctctggcagactgtgagcaaagctttagtaccaggcaacattttcaaatcaagtggacttacagat

SEQ ID NO: 450166 - DNA, 120 bp, Artificial Sequence
  ENSG00000155657_534 (sequence is synthesized)
ggtattgcttatgagttccgggtgattgcagaaaacatggcaggcaaaagtaagccaagcaagccatcagaacctatgttggctctggatcccattgacccacctggaaaaccagtacct

SEQ ID NO: 450167 - DNA, 120 bp, Artificial Sequence
  ENSG00000155657_535 (sequence is synthesized)
ctaaatattacaagacacacagtaacacttaaatgggctaagcctgaatatactgggggctttaaaattaccagttatatcgttgaaaagagagaccttcctaatggacggtggctgaag

SEQ ID NO: 450168 - DNA, 120 bp, Artificial Sequence
  ENSG00000155657_536 (sequence is synthesized)
gccaacttcagcaacattttggagaatgaatttacagtcagtggcctaacagaagatgctgcatatgaattccgtgtgatcgccaaaaatgctgcaggtgccatcagtccaccatctgag

SEQ ID NO: 450169 - DNA, 120 bp, Artificial Sequence
  ENSG00000155657_537 (sequence is synthesized)
ccatctgatgctatcacttgcagggatgatgttgaggcaccaaagataaaggtggatgttaaatttaaggacacggttatattaaaagcaggtgaagcattcagactggaagctgatgtt

SEQ ID NO: 450170 - DNA, 120 bp, Artificial Sequence
  ENSG00000155657_538 (sequence is synthesized)
tcaggccgcccacctccaacaatggaatggagcaaagatggaaaagagctggaaggcacagcaaagttagaaataaaaattgcagatttctctactaatctggtaaacaaagattcaaca

SEQ ID NO: 450171 - DNA, 120 bp, Artificial Sequence
  ENSG00000155657_539 (sequence is synthesized)
agaagggatagtggtgcctatacccttacagcgactaatcctggtggctttgctaaacacattttcaatgtcaaagttcttgacagaccaggcccacctgaaggacctttggctgtaact

SEQ ID NO: 450172 - DNA, 120 bp, Artificial Sequence
  ENSG00000155657_540 (sequence is synthesized)
gaagtgacatcagaaaagtgtgtactatcatggttccctccactggatgatggaggtgccaaaattgatcattacatagtacagaaacgtgaaaccagcagattggcatggacaaatgta

SEQ ID NO: 450173 - DNA, 120 bp, Artificial Sequence
  ENSG00000155657_541 (sequence is synthesized)
gcctcagaagtccaagtaacaaagctaaaggtcactaaactcttgaaaggcaatgaatacatattccgtgtcatggctgtaaataaatatggagtgggagagccactggaatcagagcct

SEQ ID NO: 450174 - DNA, 120 bp, Artificial Sequence
  ENSG00000155657_542 (sequence is synthesized)
gtgcttgcagtgaatccttatggaccccctgatccgcccaaaaaccctgaagtgacaactattactaaagattcgatggttgtctgctggggacatcctgattctgatggtggaagtgaa

SEQ ID NO: 450175 - DNA, 120 bp, Artificial Sequence
  ENSG00000155657_543 (sequence is synthesized)
atcatcaattatattgtggaacggcgtgataaagctggccaacgctggattaaatgcaacaaaaaaactcttactgatttaagatataaagtgtctggactgacagaaggacatgaatat

SEQ ID NO: 450176 - DNA, 120 bp, Artificial Sequence
  ENSG00000155657_544 (sequence is synthesized)
gagttcaggattatggctgaaaatgctgctggaattagtgcaccaagtcctaccagtccattttacaaggcttgtgacactgtgtttaaacctggaccaccaggtaacccacgtgttctg

SEQ ID NO: 450177 - DNA, 120 bp, Artificial Sequence
  ENSG00000155657_545 (sequence is synthesized)
gatacaagcagatcatccatttcaatcgcttggaataaacctatctatgatggtggttcagaaatcactgggtatatggttgagattgccctgccagaggaagatgaatggcagattgtc

SEQ ID NO: 450178 - DNA, 120 bp, Artificial Sequence
  ENSG00000155657_546 (sequence is synthesized)
actccaccagcaggactcaaggcaacttcgtatactatcactggcctcacagagaatcaggaatataagatccgcatctatgccatgaattccgaaggacttggggaacctgcccttgtt

SEQ ID NO: 450179 - DNA, 120 bp, Artificial Sequence
  ENSG00000155657_547 (sequence is synthesized)
cctggaactccaaaggctgaagacagaatgctgcctccagaaattgaactggatgctgacctgcgcaaagttgttactataagggcctgctgcaccctgagactttttgttcccatcaaa

SEQ ID NO: 450180 - DNA, 120 bp, Artificial Sequence
  ENSG00000155657_548 (sequence is synthesized)
ggaaggcctgcacctgaggtgaagtgggcccgggaccatggagaatctttagataaagctagcatcgaatccacaagctcttacaccctgcttattgttggaaatgtaaacagatttgac

SEQ ID NO: 450181 - DNA, 120 bp, Artificial Sequence
  ENSG00000155657_549 (sequence is synthesized)
agtggcaaatatatactaactgtagaaaatagttcaggcagcaagtctgcatttgtcaatgttagagttctcgatacaccaggccccccacaggatctgaaggtaaaagaggtcactaag

SEQ ID NO: 450182 - DNA, 120 bp, Artificial Sequence
  ENSG00000155657_550 (sequence is synthesized)
acatctgtcacactcacatgggacccacctctccttgatggaggttcaaaaatcaagaactatattgttgaaaagcgggaatcaacaagaaaagcatattcaactgttgcaacaaactgc

SEQ ID NO: 450183 - DNA, 120 bp, Artificial Sequence
  ENSG00000155657_551 (sequence is synthesized)
cacaagacttcctggaaggtagaccagcttcaagaaggctgtagctactatttcagggttctcgcagaaaatgaatatggcattgggctgcctgctgaaaccgcagaatctgtgaaagca

SEQ ID NO: 450184 - DNA, 120 bp, Artificial Sequence
  ENSG00000155657_552 (sequence is synthesized)
tcagaacgacctcttcctccaggaaaaataactttgatggatgtcacaagaaatagtgtgtcactctcttgggagaaaccagagcatgatggaggcagccgaattctaggctacattgtg

SEQ ID NO: 450185 - DNA, 120 bp, Artificial Sequence
  ENSG00000155657_553 (sequence is synthesized)
gagatgcagaccaaaggcagtgacaaatgggccacgtgtgccacagtcaaggtcactgaagccactatcactggattaattcagggtgaagaatactctttccgtgtttcagctcagaat

SEQ ID NO: 450186 - DNA, 120 bp, Artificial Sequence
  ENSG00000155657_554 (sequence is synthesized)
gaaaagggcatcagtgatcctagacaactgagtgtgccagtgatcgccaaagatcttgtcattccaccagccttcaaactcctgttcaatactttcactgtactggcaggtgaagaccta

SEQ ID NO: 450187 - DNA, 120 bp, Artificial Sequence
  ENSG00000155657_555 (sequence is synthesized)
aaagttgatgttccattcattggccgccctaccccagctgtaacctggcataaagataatgtaccactgaagcagacaactagagtaaatgcagagagcacagaaaataattcactactg

SEQ ID NO: 450188 - DNA, 120 bp, Artificial Sequence
  ENSG00000155657_556 (sequence is synthesized)
acaataaaggacgcctgccgagaagatgttggccattatgtggttaaactgactaactcagctggtgaagctattgaaacccttaatgttatcgttcttgacaaaccagggcctccaact

SEQ ID NO: 450189 - DNA, 120 bp, Artificial Sequence
  ENSG00000155657_557 (sequence is synthesized)
ggaccagttaaaatggatgaagtgacagctgatagtattactctttcctggggcccacccaagtatgatggtggaagttctatcaataattacattgttgagaaacgggacacttccaca

SEQ ID NO: 450190 - DNA, 120 bp, Artificial Sequence
  ENSG00000155657_558 (sequence is synthesized)
accacctggcaaattgtatcagctacagttgcaaggacaacaataaaggcttgcagactgaagactggatgtgaatatcagtttagaattgcagctgaaaacagatatgggaagagtacc

SEQ ID NO: 450191 - DNA, 120 bp, Artificial Sequence
  ENSG00000155657_559 (sequence is synthesized)
tacctcaattcagagcctactgtagcccaatatccattcaaagttcctggtcctcctggcactccagttgtcacactgtcctccagggacagcatggaagtacaatggaatgagccaatc

SEQ ID NO: 450192 - DNA, 120 bp, Artificial Sequence
  ENSG00000155657_560 (sequence is synthesized)
agtgatggaggaagtagagtcattggctatcatctagaacgcaaggaaagaaatagcatcctctgggttaagttgaataaaacacctattcctcaaaccaagtttaagacaactggcctt

SEQ ID NO: 450193 - DNA, 120 bp, Artificial Sequence
  ENSG00000155657_561 (sequence is synthesized)
gaagaaggtgttgaatatgaatttagagtctctgcagagaacatcgtgggcattggcaagccgagtaaagtatcagaatgttatgtggctcgtgacccatgtgatccaccaggacggcca

SEQ ID NO: 450194 - DNA, 120 bp, Artificial Sequence
  ENSG00000155657_562 (sequence is synthesized)
gaggcaatcattgtcacaaggaattctgtgactcttcagtggaagaaacccacctatgacggtggaagcaagatcactggttatattgttgagaagaaagaattacctgagggccgttgg

SEQ ID NO: 450195 - DNA, 120 bp, Artificial Sequence
  ENSG00000155657_563 (sequence is synthesized)
atgaaagccagttttacaaatattattgacactcattttgaagtaactggcctagttgaagatcacagatatgagttccgggttatagcccgaaatgccgcaggagtgtttagtgagcct

SEQ ID NO: 450196 - DNA, 120 bp, Artificial Sequence
  ENSG00000155657_564 (sequence is synthesized)
tcagaaagcacaggagcaataacagctagagatgaggtagatccaccacgaataagtatggatccaaaatacaaagacacaatcgtggttcatgctggtgaatcattcaaggttgatgca

SEQ ID NO: 450197 - DNA, 120 bp, Artificial Sequence
  ENSG00000155657_565 (sequence is synthesized)
gatatttatggcaaaccaataccaaccattcagtggataaaaggtgatcaggagctttcaaacacagctcgattagaaataaagagcaccgactttgccaccagtctcagtgtaaaagat

SEQ ID NO: 450198 - DNA, 120 bp, Artificial Sequence
  ENSG00000155657_566 (sequence is synthesized)
gcagtacgtgtcgacagtggaaattacatactgaaggccaaaaatgttgcaggagaaagatcagttactgtgaatgtcaaggttcttgacagaccagggccacctgaaggacctgttgtt

SEQ ID NO: 450199 - DNA, 120 bp, Artificial Sequence
  ENSG00000155657_567 (sequence is synthesized)
atctcaggagttacagcagaaaaatgcacactagcttggaaacccccacttcaggatggtgggagtgacatcataaattatattgtggaaaggagagaaaccagccgcttagtttggact

SEQ ID NO: 450200 - DNA, 120 bp, Artificial Sequence
  ENSG00000155657_568 (sequence is synthesized)
gtggttgatgccaatgtgcagactctcagctgcaaggttactaagcttcttgaaggcaatgaatatactttccgtataatggcagtaaacaaatatggtgttggtgaacctcttgaatct

SEQ ID NO: 450201 - DNA, 120 bp, Artificial Sequence
  ENSG00000155657_569 (sequence is synthesized)
gagccagtagttgccaagaatccatttgtagtaccagatgcaccaaaagctccagaagtcacaacagtgaccaaggactcaatgattgttgtatgggaaagaccagcatctgatggtggt

SEQ ID NO: 450202 - DNA, 120 bp, Artificial Sequence
  ENSG00000155657_570 (sequence is synthesized)
agtgaaattcttggatatgttcttgagaaacgggataaagaaggcattagatggacaagatgccataagcgtctgattggagagttgcgcctgagagtaactggactcatagaaaatcac

SEQ ID NO: 450203 - DNA, 120 bp, Artificial Sequence
  ENSG00000155657_571 (sequence is synthesized)
gattatgagttcagagtttctgctgagaatgctgctggacttagtgaaccaagccctccttctgcttaccaaaaggcttgtgatcctatttataaaccaggacccccaaacaaccccaaa

SEQ ID NO: 450204 - DNA, 120 bp, Artificial Sequence
  ENSG00000155657_572 (sequence is synthesized)
gtcatagacataaccagatcttcagtattcctttcttggagcaaaccaatatatgatggtggctgtgaaattcaaggatacattgttgaaaaatgtgatgtgagtgttggtgaatggaca

SEQ ID NO: 450205 - DNA, 120 bp, Artificial Sequence
  ENSG00000155657_573 (sequence is synthesized)
atgtgcactccaccaacaggaattaataaaacaaacatagaagtagagaagctgttggaaaagcatgaatacaacttccgtatctgtgctattaataaagctggagttggagaacatgct

SEQ ID NO: 450206 - DNA, 120 bp, Artificial Sequence
  ENSG00000155657_574 (sequence is synthesized)
gacgtccctggacctattatagttgaagaaaaattagaagcaccagacattgatcttgacctagaactaaggaaaatcataaatataagggcaggtggctccttaaggttatttgttcct

SEQ ID NO: 450207 - DNA, 120 bp, Artificial Sequence
  ENSG00000155657_575 (sequence is synthesized)
ataaaaggtcgtcctacaccagaagttaaatggggaaaggtggatggtgaaatccgagatgcagctataattgatgtcactagcagtttcacctctcttgttcttgacaatgtcaaccga

SEQ ID NO: 450208 - DNA, 120 bp, Artificial Sequence
  ENSG00000155657_576 (sequence is synthesized)
tatgatagtggaaaatatacgcttacattagaaaacagcagtggaacaaagtctgcctttgttactgtgagagttctggacacgccaagtccacctgttaacctgaaagtcacagaaatc

SEQ ID NO: 450209 - DNA, 120 bp, Artificial Sequence
  ENSG00000155657_577 (sequence is synthesized)
accaaagactcagtatcaattacatgggaacctcctttgttggatgggggatccaaaataaaaaattacattgttgagaaacgtgaagccacaagaaaatcatatgctgctgttgtaact

SEQ ID NO: 450210 - DNA, 120 bp, Artificial Sequence
  ENSG00000155657_578 (sequence is synthesized)
aactgccataagaattcttggaaaatcgatcagctccaagaaggttgcagttattactttagagtcacagctgagaatgagtatggtattggccttcctgcccagactgctgatccaatt

SEQ ID NO: 450211 - DNA, 120 bp, Artificial Sequence
  ENSG00000155657_579 (sequence is synthesized)
aaggttgcagaagtgccacaacctcctggaaaaataactgtggatgatgtcaccagaaacagtgtctctctgagttggacaaaacctgaacatgatggtggcagtaaaatcattcagtat

SEQ ID NO: 450212 - DNA, 120 bp, Artificial Sequence
  ENSG00000155657_580 (sequence is synthesized)
attgtggaaatgcaagctaaacacagtgagaaatggtcagagtgtgctcgagtaaagtctcttcaggcagtaattaccaacctaactcaaggggaagaatatctttttagagttgttgct

SEQ ID NO: 450213 - DNA, 120 bp, Artificial Sequence
  ENSG00000155657_581 (sequence is synthesized)
gtaaatgaaaaggggagaagtgatcctcggtcccttgcagttccaatagttgccaaagatctggtaattgagccagatgtaaaacctgcattcagtagttacagtgtacaggttggccaa

SEQ ID NO: 450214 - DNA, 120 bp, Artificial Sequence
  ENSG00000155657_582 (sequence is synthesized)
gatttgaaaatagaagtgccaatttctggacgtcctaagccaaccattacctggactaaagatggtctcccactgaagcagaccacaagaatcaatgttaccgattcactggatctcacc

SEQ ID NO: 450215 - DNA, 120 bp, Artificial Sequence
  ENSG00000155657_583 (sequence is synthesized)
acactcagtattaaagaaactcataaggatgatggtggacaatatggaatcacagttgccaatgttgttggtcagaagacagcatccatcgaaattgtaactctagataaacctgatcct

SEQ ID NO: 450216 - DNA, 120 bp, Artificial Sequence
  ENSG00000155657_584 (sequence is synthesized)
ccaaaaggacctgttaaatttgatgacgtcagtgctgaaagtattacattatcttggaaccctccattatatacagggggctgccaaatcaccaactacattgttcagaaaagagataca

SEQ ID NO: 450217 - DNA, 120 bp, Artificial Sequence
  ENSG00000155657_585 (sequence is synthesized)
accaccacagtatgggatgttgtttctgctactgttgctagaactacactcaaagtgaccaaactgaaaactggtacagaataccaatttagaatatttgccgaaaacagatatggacaa

SEQ ID NO: 450218 - DNA, 120 bp, Artificial Sequence
  ENSG00000155657_586 (sequence is synthesized)
agctttgccttagagtctgatccaattgtagctcaatatccctacaaagaaccaggccctccaggtacaccatttgccacagccatttccaaagactccatggtcatacagtggcatgaa

SEQ ID NO: 450219 - DNA, 120 bp, Artificial Sequence
  ENSG00000155657_587 (sequence is synthesized)
ccagtcaacaatggtggaagccccgtcataggttaccacctggagagaaaagaaagaaacagtattttgtggacaaaggtcaacaaaactattattcatgacacccaattcaaagcacag

SEQ ID NO: 450220 - DNA, 120 bp, Artificial Sequence
  ENSG00000155657_588 (sequence is synthesized)
aatcttgaagaaggcattgaatatgaattcagagtgtatgctgaaaatattgttggtgtaggcaaagcaagcaagaattctgaatgctatgtagccagagatccctgtgacccaccagga

SEQ ID NO: 450221 - DNA, 120 bp, Artificial Sequence
  ENSG00000155657_589 (sequence is synthesized)
accccagaaccaataatggttaaaagaaatgaaatcactttacagtggaccaaacctgtgtatgatggtggaagtatgattacaggctacattgtagagaaacgtgatttgcctgatggt

SEQ ID NO: 450222 - DNA, 120 bp, Artificial Sequence
  ENSG00000155657_590 (sequence is synthesized)
cgttggatgaaagctagctttacaaatgtcattgaaactcaatttactgtgtcaggtcttactgaagatcaaagatatgaattcagagtcattgcaaagaatgcagctggtgcaataagt

SEQ ID NO: 450223 - DNA, 120 bp, Artificial Sequence
  ENSG00000155657_591 (sequence is synthesized)
aaaccctctgacagtactggaccaataactgccaaggatgaggttgaactcccaagaatttcaatggatccaaaattcagagacacaattgtggtaaatgctggagaaacattcagactt

SEQ ID NO: 450224 - DNA, 120 bp, Artificial Sequence
  ENSG00000155657_592 (sequence is synthesized)
gaggctgatgtccatggaaagcccctacctaccattgagtggttaagaggagataaggaaattgaagaatctgctagatgtgaaataaagaacacagatttcaaggctttacttattgta

SEQ ID NO: 450225 - DNA, 120 bp, Artificial Sequence
  ENSG00000155657_593 (sequence is synthesized)
aaagatgcaattagaattgatggtgggcagtatattttaagagcttccaatgttgcaggttctaagtcattcccagtaaatgtaaaagtattagatagaccaggacctccagaagggcca

SEQ ID NO: 450226 - DNA, 120 bp, Artificial Sequence
  ENSG00000155657_594 (sequence is synthesized)
gtccaggttactggagtcacttctgaaaaatgctctttaacatggtctccaccacttcaagatggtggcagtgacatttctcactatgttgttgaaaagcgagaaaccagtcgacttgcc

SEQ ID NO: 450227 - DNA, 120 bp, Artificial Sequence
  ENSG00000155657_595 (sequence is synthesized)
tggactgttgttgcttcagaagttgtgaccaattctctgaaagttaccaaactcttagaaggtaatgaatatgttttccgtataatggctgtcaacaaatatggtgttggagagcctttg

SEQ ID NO: 450228 - DNA, 120 bp, Artificial Sequence
  ENSG00000155657_596 (sequence is synthesized)
gaatctgcaccagtactaatgaaaaatccatttgtgcttcctggaccaccaaaaagcttggaagtcacaaatattgccaaagactccatgaccgtctgttggaaccgtccagatagtgat

SEQ ID NO: 450229 - DNA, 120 bp, Artificial Sequence
  ENSG00000155657_597 (sequence is synthesized)
ggtggaagtgagattattggttacattgtagagaaaagagacagaagtggcattcgatggataaaatgtaataaacgccgcattacagatttgcgtctaagagtgacaggattaacagaa

SEQ ID NO: 450230 - DNA, 120 bp, Artificial Sequence
  ENSG00000155657_598 (sequence is synthesized)
gatcatgagtatgaattcagggtctctgcagaaaatgctgctggagttggggaaccaagtccagctacagtttattataaagcctgtgatcctgtgttcaaacctggcccacctaccaat

SEQ ID NO: 450231 - DNA, 120 bp, Artificial Sequence
  ENSG00000155657_599 (sequence is synthesized)
gcacacattgtagacaccactaaaaattcaatcacacttgcctggggtaaacccatctatgatggcggcagtgagatcttgggatatgtagtagaaatctgtaaagcagatgaagaagaa

SEQ ID NO: 450232 - DNA, 120 bp, Artificial Sequence
  ENSG00000155657_600 (sequence is synthesized)
tggcaaatagttactccacagactggcctgagagtcactcgatttgaaatttcaaaactcactgaacaccaagagtataaaatacgagtctgtgccctcaacaaagttggtttaggtgag

SEQ ID NO: 450233 - DNA, 120 bp, Artificial Sequence
  ENSG00000155657_601 (sequence is synthesized)
gctacatcagttcctggtactgtgaaaccagaagataaacttgaagcacctgaacttgaccttgactccgaattaagaaaaggaattgttgtaagagctggtggatctgccagaattcac

SEQ ID NO: 450234 - DNA, 120 bp, Artificial Sequence
  ENSG00000155657_602 (sequence is synthesized)
attccattcaaaggtcgtccaacgcctgagatcacttggtctcgagaggaaggtgaattcacagataaggtccaaattgaaaagggagtaaactatacccaactatcaatagataactgt

SEQ ID NO: 450235 - DNA, 120 bp, Artificial Sequence
  ENSG00000155657_603 (sequence is synthesized)
gatagaaatgatgctggaaaatacattcttaagttggaaaacagcagtggatcaaagtctgcttttgtaactgtgaaagttcttgacactccaggaccaccacagaatttggcagtcaaa

SEQ ID NO: 450236 - DNA, 120 bp, Artificial Sequence
  ENSG00000155657_604 (sequence is synthesized)
gaagtgagaaaagattctgccttcctggtatgggagccacccatcattgatggaggggcaaaggtcaagaactatgtgattgacaaacgtgagtcaaccagaaaagcgtatgctaatgtg

SEQ ID NO: 450237 - DNA, 120 bp, Artificial Sequence
  ENSG00000155657_605 (sequence is synthesized)
agtagtaaatgcagcaaaacaagttttaaagtggaaaaccttacagaaggagccatttattacttcagagtcatggctgaaaatgaatttggagttggtgttccagtggaaactgttgat

SEQ ID NO: 450238 - DNA, 120 bp, Artificial Sequence
  ENSG00000155657_606 (sequence is synthesized)
gccgtgaaagctgctgaacctccttccccaccaggaaaggttacactcactgatgtgtcccagaccagtgcatcacttatgtgggagaaacctgaacatgatggcggtagcagagtcctg

SEQ ID NO: 450239 - DNA, 120 bp, Artificial Sequence
  ENSG00000155657_607 (sequence is synthesized)
gggtacgttgttgaaatgcagcccaaaggaactgaaaaatggagcattgtggctgaatccaaagtctgtaatgcagttgttactggtttgagttctggacaagaatatcagttccgtgtc

SEQ ID NO: 450240 - DNA, 120 bp, Artificial Sequence
  ENSG00000155657_608 (sequence is synthesized)
aaggcttataatgagaaaggaaaaagcgatccaagagtgttgggtgttcctgtcatagccaaggacttgactatacagcctagtttaaagttaccatttaacacatatagtatccaagct

SEQ ID NO: 450241 - DNA, 120 bp, Artificial Sequence
  ENSG00000155657_609 (sequence is synthesized)
ggagaagatcttaaaatagaaattccagttataggccgaccaagacctaacatttcttgggtcaaagatggtgagcctcttaaacagacaacaagagtaaacgttgaagaaacagctacc

SEQ ID NO: 450242 - DNA, 120 bp, Artificial Sequence
  ENSG00000155657_610 (sequence is synthesized)
tcaactgttttgcacattaaagaaggtaacaaagatgactttggaaaatacaccgtaacggcaacaaatagtgcaggcacagcaacagaaaatctcagtgttatcgttttagaaaagcct

SEQ ID NO: 450243 - DNA, 120 bp, Artificial Sequence
  ENSG00000155657_611 (sequence is synthesized)
ggacctccagttggcccagttcggtttgatgaagttagtgcagactttgtagtcatatcttgggaacctccagcctatactggtggctgccaaataagcaactacattgtagagaagcga

SEQ ID NO: 450244 - DNA, 120 bp, Artificial Sequence
  ENSG00000155657_612 (sequence is synthesized)
gatacaaccaccaccacttggcacatggtatcagcaacagttgcaagaacaacaattaaaataaccaaactgaaaacaggcacggagtaccagtttagaatttttgctgaaaacaggtat

SEQ ID NO: 450245 - DNA, 120 bp, Artificial Sequence
  ENSG00000155657_613 (sequence is synthesized)
ggaaaaagtgccccactggattctaaggcagttattgtacaatatccatttaaagaacctggaccacctggaactccttttgtgacatcaatctcaaaagatcagatgcttgtgcaatgg

SEQ ID NO: 450246 - DNA, 120 bp, Artificial Sequence
  ENSG00000155657_614 (sequence is synthesized)
catgagccagtgaatgatggaggcaccaaaattattggctaccatcttgaacagaaagaaaagaacagtattttatgggtcaagttaaataagacccccattcaggacaccaaattcaaa

SEQ ID NO: 450247 - DNA, 120 bp, Artificial Sequence
  ENSG00000155657_615 (sequence is synthesized)
acaactgggcttgatgagggccttgagtatgagttcaaagtttctgctgaaaatattgttggcattggcaagcctagcaaagtgtcagaatgctttgttgctcgtgatccatgtgaccca

SEQ ID NO: 450248 - DNA, 120 bp, Artificial Sequence
  ENSG00000155657_616 (sequence is synthesized)
cctggtcgccctgaagccattgttattacaagaaacaatgtcacactgaaatggaagaaacctgcctatgatggtggtagcaaaataacaggttatattgtagaaaagaaagatctacct

SEQ ID NO: 450249 - DNA, 120 bp, Artificial Sequence
  ENSG00000155657_617 (sequence is synthesized)
gatggccgctggatgaaagccagctttaccaacgtattagaaactgaatttacagtgagtggacttgtagaagaccaaagatatgaatttagagtaattgcaagaaatgcagctggaaac

SEQ ID NO: 450250 - DNA, 120 bp, Artificial Sequence
  ENSG00000155657_618 (sequence is synthesized)
tttagtgaaccatctgatagtagtggtgccattactgcaagagatgaaattgatgcaccaaatgcctctctggatccaaaatataaagatgtcatcgttgttcatgcaggagagactttt

SEQ ID NO: 450251 - DNA, 120 bp, Artificial Sequence
  ENSG00000155657_619 (sequence is synthesized)
gttcttgaagccgacatccgtggcaaacctatacctgatgttgtttggtcaaaagatggaaaagaacttgaagaaacagctgctagaatggaaattaaatctactattcagaaaacaact

SEQ ID NO: 450252 - DNA, 120 bp, Artificial Sequence
  ENSG00000155657_620 (sequence is synthesized)
cttgttgtcaaagactgtatacggactgatggaggacaatatattctgaaactcagcaatgttggtggtacaaagtctatacccatcactgtaaaggtacttgacaggccagggcctcct

SEQ ID NO: 450253 - DNA, 120 bp, Artificial Sequence
  ENSG00000155657_621 (sequence is synthesized)
gaagggcctctgaaagttactggagttactgcggaaaaatgttacctggcatggaacccacctttgcaagatggtggtgctaatatttcacattacatcattgaaaagagggagacaagc

SEQ ID NO: 450254 - DNA, 120 bp, Artificial Sequence
  ENSG00000155657_622 (sequence is synthesized)
cgactctcttggacccaggtttcaactgaggtacaggcccttaactacaaagttactaaacttcttcctggtaatgagtacattttccgtgtcatggctgtgaataaatatggaattgga

SEQ ID NO: 450255 - DNA, 120 bp, Artificial Sequence
  ENSG00000155657_623 (sequence is synthesized)
gagcccttggaatctgggcctgttacggcctgtaatccttataagccaccaggtcctccctcaacacctgaagtctcagcaatcaccaaagattctatggtagtaacatgggcacgccca

SEQ ID NO: 450256 - DNA, 120 bp, Artificial Sequence
  ENSG00000155657_624 (sequence is synthesized)
gtagacgacggaggtaccgaaattgagggctacattcttgaaaaacgagataaggaaggcgttagatggaccaagtgcaacaagaaaacattaacggatctgcggctcagggtaactggt

SEQ ID NO: 450257 - DNA, 120 bp, Artificial Sequence
  ENSG00000155657_625 (sequence is synthesized)
cttaccgaaggccattcctatgaattcagagttgctgctgaaaatgcagctggtgtgggagaacctagtgagccatctgttttctaccgtgcgtgtgatgccttgtatccaccaggtccc

SEQ ID NO: 450258 - DNA, 120 bp, Artificial Sequence
  ENSG00000155657_626 (sequence is synthesized)
ccaagcaatccaaaagtgacggacacttccagatcttctgtctccctggcatggagtaagccaatttatgatggtggcgcacctgttaaaggctatgttgtagaggtcaaagaagctgct

SEQ ID NO: 450259 - DNA, 120 bp, Artificial Sequence
  ENSG00000155657_627 (sequence is synthesized)
gcggatgaatggacaacctgcactccaccaacaggattacaaggaaagcagttcacagtgaccaagcttaaagaaaacactgaatataacttccgtatttgtgccatcaattctgaaggt

SEQ ID NO: 450260 - DNA, 120 bp, Artificial Sequence
  ENSG00000155657_628 (sequence is synthesized)
gtaggtgaacctgcaactctacctggctcagtggttgctcaggagaggatagagccaccagaaatagaactcgatgctgatctcagaaaggtggtcgttctgcgtgcaagtgctacttta

SEQ ID NO: 450261 - DNA, 120 bp, Artificial Sequence
  ENSG00000155657_629 (sequence is synthesized)
cgcttatttgtcactatcaaaggtcgaccagaacccgaagttaaatgggaaaaggcagaaggcattctcactgacagggctcagatagaggtgaccagctcatttacaatgttggtgatt

SEQ ID NO: 450262 - DNA, 120 bp, Artificial Sequence
  ENSG00000155657_630 (sequence is synthesized)
gataatgttaccagatttgacagtggtcggtataatctgacattagaaaataatagtggctccaaaacagcttttgttaacgtcagagttcttgactcaccaagtgcccctgtgaatttg

SEQ ID NO: 450263 - DNA, 120 bp, Artificial Sequence
  ENSG00000155657_631 (sequence is synthesized)
accataagagaagtgaagaaagactcagtgacgttgtcctgggaaccaccacttattgatggtggagctaagattacaaactacattgtcgaaaaacgagaaactacaagaaaagcctat

SEQ ID NO: 450264 - DNA, 120 bp, Artificial Sequence
  ENSG00000155657_632 (sequence is synthesized)
gctaccattacaaataattgcactaaaactactttcagaattgaaaatctacaagaaggatgttcttactacttccgagtcttggcttccaatgaatatgggattggtttgccagctgaa

SEQ ID NO: 450265 - DNA, 120 bp, Artificial Sequence
  ENSG00000155657_633 (sequence is synthesized)
acaacagaacccgttaaagtgtctgaaccacccctcccacctggaagagtaactcttgttgatgtgacccgtaatacagctacaattaagtgggagaaaccagaaagtgatggtggcagc

SEQ ID NO: 450266 - DNA, 120 bp, Artificial Sequence
  ENSG00000155657_634 (sequence is synthesized)
aaaattactggttatgtggttgaaatgcagactaaagggagtgaaaagtggagcacctgcacacaagttaagactctagaagcaactatatctggcttaactgcaggagaagagtatgtc

SEQ ID NO: 450267 - DNA, 120 bp, Artificial Sequence
  ENSG00000155657_635 (sequence is synthesized)
ttcagggtagctgcagttaacgaaaagggaagaagtgatccaagacaacttggagtgccagtaattgcaagggatattgaaataaagccttcagttgagcttcctttccatactttcaat

SEQ ID NO: 450268 - DNA, 120 bp, Artificial Sequence
  ENSG00000155657_636 (sequence is synthesized)
gtaaaggctagagaacaacttaagattgatgtgccattcaaaggaagacctcaagctactgtgaactggagaaaagatggtcagactcttaaagagacaactagagtcaatgtttcttct

SEQ ID NO: 450269 - DNA, 120 bp, Artificial Sequence
  ENSG00000155657_637 (sequence is synthesized)
tcaaagactgtaacatcactatctattaaggaagcttcaaaggaagatgttggaacttatgaattatgtgtttcaaacagtgctggatccataacagttcctattactataattgtcctt

SEQ ID NO: 450270 - DNA, 120 bp, Artificial Sequence
  ENSG00000155657_638 (sequence is synthesized)
gacagaccaggacctccaggtcctatacgtattgatgaggttagttgtgacagcataaccatttcttggaatcctccagaatatgatggtggctgccaaattagcaattacattgttgaa

SEQ ID NO: 450271 - DNA, 120 bp, Artificial Sequence
  ENSG00000155657_639 (sequence is synthesized)
aagaaagaaaccacctctacaacatggcacatagtttcacaagcagttgcaagaacatccattaaaatagttcgcctgacaacaggaagtgagtatcagttccgtgtttgtgcagaaaac

SEQ ID NO: 450272 - DNA, 120 bp, Artificial Sequence
  ENSG00000155657_640 (sequence is synthesized)
cgctatggaaagagctcctacagtgaatcttcagctgttgttgcagagtatccattcagtcccccaggtcctcctggtactcctaaagttgtgcatgccacaaaatctaccatgcttgta

SEQ ID NO: 450273 - DNA, 120 bp, Artificial Sequence
  ENSG00000155657_641 (sequence is synthesized)
acctggcaagtgccagttaatgatggaggaagtcgagtaattggctatcatcttgagtataaagaaagaagcagcattctttggtcaaaagcaaataaaatcctcattgctgatactcaa

SEQ ID NO: 450274 - DNA, 120 bp, Artificial Sequence
  ENSG00000155657_642 (sequence is synthesized)
atgaaagtctccggccttgatgaaggactgatgtatgagtatcgtgtatatgctgaaaatattgctggaattggtaaatgcagtaaatcttgtgaaccagtccctgcaagagatccttgt

SEQ ID NO: 450275 - DNA, 120 bp, Artificial Sequence
  ENSG00000155657_643 (sequence is synthesized)
gaccctcctggacaacctgaagtcacaaatatcacaagaaaatcagtgtcacttaaatggtctaaaccacattatgatggtggagctaagatcacaggatacattgttgaacgcagagaa

SEQ ID NO: 450276 - DNA, 120 bp, Artificial Sequence
  ENSG00000155657_644 (sequence is synthesized)
ctaccagatggccggtggctgaagtgcaattatactaatatacaagaaacatactttgaagtaactgaacttactgaagatcagcgttatgaattccgggtttttgcaaggaatgctgct

SEQ ID NO: 450277 - DNA, 120 bp, Artificial Sequence
  ENSG00000155657_645 (sequence is synthesized)
gactcagttagtgagccatctgaatccactgggcctattatagttaaagatgatgttgagcctccaagagttatgatggatgtcaagttccgagacgttattgttgtcaaagctggagag

SEQ ID NO: 450278 - DNA, 120 bp, Artificial Sequence
  ENSG00000155657_646 (sequence is synthesized)
gtccttaagataaatgcagacattgcagggcgacctctgccagtaatttcctgggccaaggatggtatagaaattgaagaaagagcaagaacagaaatcatctcaacagacaatcatact

SEQ ID NO: 450279 - DNA, 120 bp, Artificial Sequence
  ENSG00000155657_647 (sequence is synthesized)
ttgttaacagttaaagactgtataagacgagacactgggcaatatgtactaacactgaagaatgttgccggcactcggtctgtggccgttaattgcaaagtacttgataagcctggtcca

SEQ ID NO: 450280 - DNA, 120 bp, Artificial Sequence
  ENSG00000155657_648 (sequence is synthesized)
ccagcaggaccacttgaaataaatggcctcactgctgagaaatgctctctttcctggggacgtccccaagaagatggtggtgcagatatcgactattacatcgtagaaaaacgtgaaaca

SEQ ID NO: 450281 - DNA, 120 bp, Artificial Sequence
  ENSG00000155657_649 (sequence is synthesized)
agccaccttgcatggacaatatgtgaaggagagttacagatgacatcctgtaaagtaaccaagttactcaaaggcaatgaatatatatttagagtaactggtgttaataaatatggtgtt

SEQ ID NO: 450282 - DNA, 120 bp, Artificial Sequence
  ENSG00000155657_650 (sequence is synthesized)
ggtgagcccctagagagtgtagctataaaggcactagatccatttacagttccaagtccacccacgtctttggaaattacttctgtgaccaaagaatctatgacactttgctggtcaaga

SEQ ID NO: 450283 - DNA, 120 bp, Artificial Sequence
  ENSG00000155657_651 (sequence is synthesized)
cccgagagtgatggaggtagtgaaatatctggatatataattgaaaggcgagagaaaaatagcctaagatgggtgcgtgtaaacaaaaaaccagtttatgatctaagagtgaaatcaaca

SEQ ID NO: 450284 - DNA, 120 bp, Artificial Sequence
  ENSG00000155657_652 (sequence is synthesized)
ggacttcgggaaggatgtgaatatgaatatcgtgtttatgcagaaaatgctgctggcctaagtcttccaagtgaaacctctcccttaattagggcagaagatccagtgttcctaccatct

SEQ ID NO: 450285 - DNA, 120 bp, Artificial Sequence
  ENSG00000155657_653 (sequence is synthesized)
cctccatccaaacccaaaattgtggactcaggcaagacaactataactattgcctgggttaagccgctgtttgatggtggggccccgataactggatatactgtagaatacaaaaaatct

SEQ ID NO: 450286 - DNA, 120 bp, Artificial Sequence
  ENSG00000155657_654 (sequence is synthesized)
gatgacactgactggaaaacttccattcagagcttacgagggacagaatatacaataagcggactaacaacaggagctgaatatgttttcagagtaaaatctgtcaataaggttggtgct

SEQ ID NO: 450287 - DNA, 120 bp, Artificial Sequence
  ENSG00000155657_655 (sequence is synthesized)
agtgaccccagtgatagctctgaccctcagatagcaaaggaaagagaagaagaacctttatttgatattgacagtgaaatgaggaagaccttgattgtcaaggctggtgcctcatttacc

SEQ ID NO: 450288 - DNA, 120 bp, Artificial Sequence
  ENSG00000155657_656 (sequence is synthesized)
atgactgtgcctttccgaggaagaccagtacccaatgtcttgtggagtaagccagacactgacctccgtactagagcttatgttgataccacagactctcgtacatcactgaccattgaa

SEQ ID NO: 450289 - DNA, 120 bp, Artificial Sequence
  ENSG00000155657_657 (sequence is synthesized)
aatgccaacagaaatgactctggaaagtacacattaacaattcagaatgttttgagtgctgcttcactgaccttagttgtcaaagttttagataccccaggtcctccaaccaacattact

SEQ ID NO: 450290 - DNA, 120 bp, Artificial Sequence
  ENSG00000155657_658 (sequence is synthesized)
gtgcaagatgtaaccaaagagtctgcagtgttatcctgggatgttcctgaaaacgatggtggagcaccagtgaagaattaccacatagaaaaacgtgaggccagcaagaaagcatgggtc

SEQ ID NO: 450291 - DNA, 120 bp, Artificial Sequence
  ENSG00000155657_659 (sequence is synthesized)
tctgtgaccaacaactgtaaccgcctctcctacaaagttaccaatttacaagaaggagctatctattacttcagagtctctggagaaaatgagtttggtgttggtataccagctgaaaca

SEQ ID NO: 450292 - DNA, 120 bp, Artificial Sequence
  ENSG00000155657_660 (sequence is synthesized)
aaggaaggagtaaaaataacagaaaaaccaagcccacctgaaaaacttggagtaacaagtatatccaaagacagtgtttccctgacctggctgaagcctgaacatgatggcggaagcaga

SEQ ID NO: 450293 - DNA, 120 bp, Artificial Sequence
  ENSG00000155657_661 (sequence is synthesized)
attgtacactatgtcgttgaagcactagaaaaaggacagaaaaactgggttaaatgtgcagtggcaaagtcaacccatcacgttgtttccggtctgagagagaattctgaatactttttc

SEQ ID NO: 450294 - DNA, 120 bp, Artificial Sequence
  ENSG00000155657_662 (sequence is synthesized)
cgagtgtttgctgaaaatcaagctggcctgagtgacccgagagagcttctgcttcctgttcttattaaggagcaactagaaccacctgaaattgatatgaagaatttcccaagtcacact

SEQ ID NO: 450295 - DNA, 120 bp, Artificial Sequence
  ENSG00000155657_663 (sequence is synthesized)
gtatatgttagagctggttcaaaccttaaagttgacattccaatctctggaaaaccacttcccaaagtgaccttatcaagagatggtgtcccccttaaggcaaccatgagatttaatacc

SEQ ID NO: 450296 - DNA, 120 bp, Artificial Sequence
  ENSG00000155657_664 (sequence is synthesized)
gaaattactgctgagaacctgaccatcaatctcaaagaaagtgttacagctgacgctgggagatatgaaatcactgctgccaactccagtggtacaaccaaagctttcattaacattgtt

SEQ ID NO: 450297 - DNA, 120 bp, Artificial Sequence
  ENSG00000155657_665 (sequence is synthesized)
gtgctagacaggcctggtcctccaactggccctgttgttattagtgatataactgaagaaagtgtgactctcaaatgggagccacctaagtatgacggtggaagtcaagttaccaactac

SEQ ID NO: 450298 - DNA, 120 bp, Artificial Sequence
  ENSG00000155657_666 (sequence is synthesized)
attctactcaaaagagaaacaagtactgcagtgtggactgaagtgtctgcaacagttgcaagaaccatgatgaaagtcatgaaactgaccacaggagaagaataccaattccgcatcaag

SEQ ID NO: 450299 - DNA, 120 bp, Artificial Sequence
  ENSG00000155657_667 (sequence is synthesized)
gcagaaaaccgctttggcatcagtgatcatatagattcagcttgtgtgactgtcaaactaccatacacaacacctggaccaccatctacaccatgggtcactaatgttactcgagaaagc

SEQ ID NO: 450300 - DNA, 120 bp, Artificial Sequence
  ENSG00000155657_668 (sequence is synthesized)
atcactgtgggctggcatgaaccagtgtcaaatggaggcagtgcagtcgtaggctatcacctggaaatgaaagacagaaacagtattttatggcaaaaagccaacaaactggtcatccgc

SEQ ID NO: 450301 - DNA, 120 bp, Artificial Sequence
  ENSG00000155657_669 (sequence is synthesized)
acaactcacttcaaagtcacaacaatcagtgctggacttatttatgaattcagggtgtatgcagaaaatgctgctggagttggaaaacctagccatccttctgaaccagtcttggcaatt

SEQ ID NO: 450302 - DNA, 120 bp, Artificial Sequence
  ENSG00000155657_670 (sequence is synthesized)
gatgcttgtgaacccccaagaaatgttcgtatcactgatatttcaaagaactctgtcagcctttcatggcaacaaccagctttcgatggaggtagcaagattacaggctacattgttgag

SEQ ID NO: 450303 - DNA, 120 bp, Artificial Sequence
  ENSG00000155657_671 (sequence is synthesized)
agacgtgaccttccagatggcagatggaccaaggccagcttcaccaatgttactgaaactcaattcatcatctctggcttgactcagaattcccagtatgaattccgtgtctttgctagg

SEQ ID NO: 450304 - DNA, 120 bp, Artificial Sequence
  ENSG00000155657_672 (sequence is synthesized)
aatgctgttggttccattagcaatccatctgaggttgtagggcccattacttgcatcgattcttatggtggtcctgtaattgatttgcctctagaatatacagaagttgtcaaatacaga

SEQ ID NO: 450305 - DNA, 120 bp, Artificial Sequence
  ENSG00000155657_673 (sequence is synthesized)
gcaggtacatctgtgaagctcagagctggcatttctggcaaacctgcgcctactattgagtggtataaagatgataaagaattacaaaccaatgcactggtgtgtgttgaaaataccacg

SEQ ID NO: 450306 - DNA, 120 bp, Artificial Sequence
  ENSG00000155657_674 (sequence is synthesized)
gacctcgcatctatactcatcaaagatgccgatcgccttaatagtggatgctatgaattaaaactaaggaatgccatgggctcagcctcagccaccatcagagtacagatccttgacaaa

SEQ ID NO: 450307 - DNA, 120 bp, Artificial Sequence
  ENSG00000155657_675 (sequence is synthesized)
ccaggcccacctggtggaccaattgaatttaagactgtaactgctgagaagatcacccttctctggcggcctccagctgatgatggtggtgcaaaaatcactcactacattgtggaaaag

SEQ ID NO: 450308 - DNA, 120 bp, Artificial Sequence
  ENSG00000155657_676 (sequence is synthesized)
cgtgagacaagccgcgttgtgtggtctatggtgtctgaacatttggaagagtgcatcattacaaccaccaaaattatcaaaggaaatgaatacatcttccgggtccgagccgtgaacaaa

SEQ ID NO: 450309 - DNA, 120 bp, Artificial Sequence
  ENSG00000155657_677 (sequence is synthesized)
tatggaattggcgagccactggaatctgattccgttgtagccaagaacgcatttgttacacctgggccaccaggcataccagaagtgacaaagattaccaagaattcgatgactgttgta

SEQ ID NO: 450310 - DNA, 120 bp, Artificial Sequence
  ENSG00000155657_678 (sequence is synthesized)
tggagcaggccaattgcagatggcggtagtgatataagtggctatttccttgaaaaacgagacaagaagagcctaggatggtttaaagtactaaaagagactatccgtgacaccagacaa

SEQ ID NO: 450311 - DNA, 120 bp, Artificial Sequence
  ENSG00000155657_679 (sequence is synthesized)
aaagtaacaggactcacagaaaacagtgactatcaatacagagtttgtgctgtaaacgctgctggacagggtccattttctgaaccatctgaattctacaaagctgctgatcctattgat

SEQ ID NO: 450312 - DNA, 120 bp, Artificial Sequence
  ENSG00000155657_680 (sequence is synthesized)
cctccaggtccacctgctaagataagaatcgcagattcaaccaagtcatccatcacccttggctggagtaagcctgtctatgatgggggcagtgctgttactgggtatgttgtcgagata

SEQ ID NO: 450313 - DNA, 120 bp, Artificial Sequence
  ENSG00000155657_681 (sequence is synthesized)
agacaaggagaggaagaggaatggactactgtctctaccaaaggagaggtcagaactacagaatatgtggtatccaacctgaaacctggagtcaattactacttccgggtatctgctgta

SEQ ID NO: 450314 - DNA, 120 bp, Artificial Sequence
  ENSG00000155657_682 (sequence is synthesized)
aactgtgctggacaaggagaacctatagaaatgaatgaacctgtacaagctaaagatatacttgaggcaccagagattgacctggatgtggctctcagaacttctgttattgccaaagct

SEQ ID NO: 450315 - DNA, 120 bp, Artificial Sequence
  ENSG00000155657_683 (sequence is synthesized)
ggtgaagatgtacaagtgttgattccctttaaaggcagacctccacctactgtcacatggagaaaagatgagaagaatcttggcagtgatgccagatacagcattgaaaacactgattca

SEQ ID NO: 450316 - DNA, 120 bp, Artificial Sequence
  ENSG00000155657_684 (sequence is synthesized)
tcctcattactcaccattcctcaagttactcgcaatgatacaggaaaatatattctcacaatagaaaatggagttggtgaacctaagtcttcaactgtgagtgttaaagtgcttgacaca

SEQ ID NO: 450317 - DNA, 120 bp, Artificial Sequence
  ENSG00000155657_685 (sequence is synthesized)
ccagctgcctgccagaaactacaggttaaacatgtttctcgaggcacagtcactttgctctgggatcctcctctcattgatggaggatctccaataattaattatgtcattgaaaagaga

SEQ ID NO: 450318 - DNA, 120 bp, Artificial Sequence
  ENSG00000155657_686 (sequence is synthesized)
gatgccaccaagagaacatggtctgtcgtgtcacacaaatgttctagcacatccttcaagctaatagatttgtcggagaagactccattcttcttcagagttcttgcagaaaatgaaatt

SEQ ID NO: 450319 - DNA, 120 bp, Artificial Sequence
  ENSG00000155657_687 (sequence is synthesized)
ggaattggggaaccctgtgaaactacagagccagtgaaggctgctgaagtaccagctcctatacgtgatctctcaatgaaagactcaacaaagacatctgtcatcctcagctggaccaaa

SEQ ID NO: 450320 - DNA, 120 bp, Artificial Sequence
  ENSG00000155657_688 (sequence is synthesized)
cctgactttgatggtggtagcgtcatcacagaatatgttgtagaaaggaaaggtaaaggtgaacagacgtggtcccacgctggcataagtaagacatgtgaaattgaggttagccaactt

SEQ ID NO: 450321 - DNA, 120 bp, Artificial Sequence
  ENSG00000155657_689 (sequence is synthesized)
aaggagcagtcagtcctggagttcagagtgtttgccaaaaatgagaaaggactgagtgatcctgtcactattgggccaattacagtgaaagaacttattattacacctgaagttgacctg

SEQ ID NO: 450322 - DNA, 120 bp, Artificial Sequence
  ENSG00000155657_690 (sequence is synthesized)
tcagatatccctggggcacaagtcactgtgagaattgggcacaatgtgcaccttgaattaccttataagggaaaacccaaaccatccatcagttggctgaaagatggcttgccactgaaa

SEQ ID NO: 450323 - DNA, 120 bp, Artificial Sequence
  ENSG00000155657_691 (sequence is synthesized)
gaaagtgaatttgttcgcttcagtaaaactgaaaacaaaattactttgagtattaagaatgccaagaaggagcatggaggaaaatacactgttattcttgataatgcagtgtgtagaatt

SEQ ID NO: 450324 - DNA, 120 bp, Artificial Sequence
  ENSG00000155657_692 (sequence is synthesized)
gcagtccccattacagtcatcacccttggcccaccatcaaagcccaaaggacccattcgatttgatgaaatcaaggctgatagtgtcatcctgtcatgggatgtacctgaagataatgga

SEQ ID NO: 450325 - DNA, 120 bp, Artificial Sequence
  ENSG00000155657_693 (sequence is synthesized)
ggaggagaaattacttgttacagcatcgagaagcgggaaacttcacaaactaactggaagatggtgtgttcaagtgttgccagaacgactttcaaagttcctaatctagtcaaagatgct

SEQ ID NO: 450326 - DNA, 120 bp, Artificial Sequence
  ENSG00000155657_694 (sequence is synthesized)
gagtaccagtttagagtgagagcagaaaacagatacggagtcagccaaccacttgtctcaagcattattgtggcaaaacaccagttcaggattcctggtcccccaggaaagccagttata

SEQ ID NO: 450327 - DNA, 120 bp, Artificial Sequence
  ENSG00000155657_695 (sequence is synthesized)
tacaatgtgacttctgatggcatgtcactaacttgggatgctccagtttatgatggtggttcagaagttactggattccatgttgaaaagaaagaaagaaatagcatcctctggcaaaaa

SEQ ID NO: 450328 - DNA, 120 bp, Artificial Sequence
  ENSG00000155657_696 (sequence is synthesized)
gttaatacatcaccaatctctggaagagaatatagagccactggactggtagaaggtctggattaccaattccgtgtatatgctgaaaattctgctggcctaagctcacctagtgaccca

SEQ ID NO: 450329 - DNA, 120 bp, Artificial Sequence
  ENSG00000155657_697 (sequence is synthesized)
agcaaatttaccttagctgtttctccagtagacccacctggcactcctgactacattgatgtcacccgggaaaccatcacacttaaatggaacccaccattgcgtgatggaggcagtaag

SEQ ID NO: 450330 - DNA, 120 bp, Artificial Sequence
  ENSG00000155657_698 (sequence is synthesized)
attgtgggctatagcattgagaaacggcaaggaaatgaacgctgggtgagatgcaactttactgacgtcagtgaatgtcagtacacagttacaggactcagtcctggggatcgctatgag

SEQ ID NO: 450331 - DNA, 120 bp, Artificial Sequence
  ENSG00000155657_699 (sequence is synthesized)
ttcagaataattgcaagaaatgctgttggaactataagcccgccctcacagtcttctggcattattatgacaagagatgaaaatgttccaccaatagtagagtttggccctgaatacttt

SEQ ID NO: 450332 - DNA, 120 bp, Artificial Sequence
  ENSG00000155657_700 (sequence is synthesized)
gatggtctcattattaagtccggagagagccttagaattaaagctttggtacaaggaagaccagtgcctcgagtaacttggttcaaagatggagtggaaatcgaaaagaggatgaatatg

SEQ ID NO: 450333 - DNA, 120 bp, Artificial Sequence
  ENSG00000155657_701 (sequence is synthesized)
gaaataaccgacgtacttggatccaccagcctatttgttagagatgctactcgggaccatcgtggtgtatacacagtggaagccaaaaatgcatctggttctgcaaaagcagaaattaaa

SEQ ID NO: 450334 - DNA, 120 bp, Artificial Sequence
  ENSG00000155657_702 (sequence is synthesized)
gtgaaagtacaagatacaccaggaaaagtagttgggccaataagattcaccaatattactggggagaagatgactctgtggtgggatgccccactcaatgacggttgtgctcccataacc

SEQ ID NO: 450335 - DNA, 120 bp, Artificial Sequence
  ENSG00000155657_703 (sequence is synthesized)
cactacatcattgaaaaacgggaaaccagcagacttgcctgggcactaattgaggataaatgtgaagcccaaagttacactgccattaaactaataaacggcaatgaataccaattccgt

SEQ ID NO: 450336 - DNA, 120 bp, Artificial Sequence
  ENSG00000155657_704 (sequence is synthesized)
gtttctgcagttaacaagtttggtgttggcaggccacttgattctgatccagtggttgctcaaatacaatatactgttcctgatgcccctggcattccagaacctagcaacataacaggc

SEQ ID NO: 450337 - DNA, 120 bp, Artificial Sequence
  ENSG00000155657_705 (sequence is synthesized)
aacagcattaccctgacatgggcaaggccagaatcagatggtggcagtgaaattcaacagtatatccttgaaagaagagaaaagaaaagcacaagatgggtaaaagtgatcagcaaacga

SEQ ID NO: 450338 - DNA, 120 bp, Artificial Sequence
  ENSG00000155657_706 (sequence is synthesized)
ccaatctctgaaacaagattcaaagtcactggtctgacagaaggcaatgagtatgaattccatgtcatggctgaaaatgctgcaggagttggacctgcaagtggcatctcaagactcatt

SEQ ID NO: 450339 - DNA, 120 bp, Artificial Sequence
  ENSG00000155657_707 (sequence is synthesized)
aaatgtagagagcccgtcaacccaccaggtcctcccacagtggtcaaagtaacagacacatcaaagacaactgtgagcttagaatggtccaaaccagtgtttgatggtggcatggaaata

SEQ ID NO: 450340 - DNA, 120 bp, Artificial Sequence
  ENSG00000155657_708 (sequence is synthesized)
attgggtatattattgaaatgtgtaaggccgacttaggagactggcacaaggtgaatgcagaggcatgtgtgaaaacaagatatacagtcactgatctacaagcaggtgaagaatacaaa

SEQ ID NO: 450341 - DNA, 120 bp, Artificial Sequence
  ENSG00000155657_709 (sequence is synthesized)
ttccgagttagtgctatcaatggtgctggaaaaggcgacagctgtgaagtgactggcacaattaaagcagttgaccggttaacagctcctgagttagacatagatgcaaacttcaaacag

SEQ ID NO: 450342 - DNA, 120 bp, Artificial Sequence
  ENSG00000155657_710 (sequence is synthesized)
actcatgttgttagagctggggccagtattcgcctcttcattgcctaccaaggtagacctactcctacagctgtgtggagcaaaccagactctaaccttagccttcgggctgatatccat

SEQ ID NO: 450343 - DNA, 120 bp, Artificial Sequence
  ENSG00000155657_711 (sequence is synthesized)
acaacagattccttcagcaccctcactgtggaaaactgcaacagaaatgatgcagggaaatatacccttactgtggaaaacaacagtggtagtaagtcaatcacattcaccgtgaaagtg

SEQ ID NO: 450344 - DNA, 120 bp, Artificial Sequence
  ENSG00000155657_712 (sequence is synthesized)
ctagacactccaggcccacctggcccaattaccttcaaagatgtgacccggggatctgctacattgatgtgggatgcccctcttcttgacggtggtgcccgaatccatcattatgtggta

SEQ ID NO: 450345 - DNA, 120 bp, Artificial Sequence
  ENSG00000155657_713 (sequence is synthesized)
gagaaacgagaggcaagtcgccgtagttggcaggttatcagtgaaaaatgcactcgtcagatcttcaaggtcaatgacctggccgaaggtgttccgtactatttccgtgtttctgcagta

SEQ ID NO: 450346 - DNA, 120 bp, Artificial Sequence
  ENSG00000155657_714 (sequence is synthesized)
aatgagtatggtgttggtgagccctatgaaatgccagaaccaattgtagccacagaacagcctgctccacctaggagacttgatgttgttgatactagcaaatcctccgcagtcttagct

SEQ ID NO: 450347 - DNA, 120 bp, Artificial Sequence
  ENSG00000155657_715 (sequence is synthesized)
tggcttaaacctgaccacgatggaggcagccggatcactggctacctgcttgaaatgagacaaaagggatctgacttctgggttgaagctggtcacaccaaacagctaactttcacagta

SEQ ID NO: 450348 - DNA, 120 bp, Artificial Sequence
  ENSG00000155657_716 (sequence is synthesized)
gagcgtcttgttgagaaaactgaatatgaattccgtgtgaaggccaagaatgatgctggctatagtgaacccagagaagccttctcttctgtcatcattaaggagcctcaaatcgagccc

SEQ ID NO: 450349 - DNA, 120 bp, Artificial Sequence
  ENSG00000155657_717 (sequence is synthesized)
actgctgacctcactggaattaccaatcagcttataacttgcaaagcaggaagcccatttaccattgacgtaccaatcagtggtcgtcctgcccccaaagtaacatggaaactggaagaa

SEQ ID NO: 450350 - DNA, 120 bp, Artificial Sequence
  ENSG00000155657_718 (sequence is synthesized)
atgagacttaaagagacagatcgagtgagcattacaacaacaaaagacagaaccacactgactgtaaaggacagcatgagaggtgactctggaagatacttcttgaccctggaaaataca

SEQ ID NO: 450351 - DNA, 120 bp, Artificial Sequence
  ENSG00000155657_719 (sequence is synthesized)
gctggtgttaaaacatttagcgtcacagttgtggtcattggaaggccaggtccagtaaccggccccattgaggtctcatctgtctcagctgaatcgtgtgtcctgtcatggggagaacct

SEQ ID NO: 450352 - DNA, 120 bp, Artificial Sequence
  ENSG00000155657_720 (sequence is synthesized)
aaagatggaggaggcactgaaattactaattacatagttgaaaagcgtgaatcgggtacaacagcttggcagcttgtcaattccagtgtcaagcgcactcaaattaaagtcactcatctc

SEQ ID NO: 450353 - DNA, 120 bp, Artificial Sequence
  ENSG00000155657_721 (sequence is synthesized)
acaaaatacatggaatattctttccgtgtcagttcagagaacagatttggtgtcagcaaacctctagaatcagcaccaataattgctgaacatccatttgtcccaccaagcgctcctacc

SEQ ID NO: 450354 - DNA, 120 bp, Artificial Sequence
  ENSG00000155657_722 (sequence is synthesized)
agacctgaggtctaccatgtgtctgccaatgccatgtctattcgttgggaagaaccctaccacgatggtggcagtaaaatcattggctactgggttgagaagaaagaacgtaatacaatt

SEQ ID NO: 450355 - DNA, 120 bp, Artificial Sequence
  ENSG00000155657_723 (sequence is synthesized)
ctttgggtgaaagaaaacaaagtgccatgcttagagtgcaactacaaagtaactggtttagtagaaggactggaatatcagttcagaacttatgcactcaatgctgcaggtgttagcaag

SEQ ID NO: 450356 - DNA, 120 bp, Artificial Sequence
  ENSG00000155657_724 (sequence is synthesized)
gccagcgaagcttcaagacctataatggctcaaaatccagttgatgcaccaggcagaccagaggtgacagatgtcacaagatcaacagtatcactgatttggtctgccccagcgtatgat

SEQ ID NO: 450357 - DNA, 120 bp, Artificial Sequence
  ENSG00000155657_725 (sequence is synthesized)
ggaggcagcaaggttgtgggctacatcatagagcgtaagccagtcagtgaggtaggagatggtcgctggctgaagtgcaactacaccattgtatctgacaatttcttcaccgtgactgct

SEQ ID NO: 450358 - DNA, 120 bp, Artificial Sequence
  ENSG00000155657_726 (sequence is synthesized)
ctcagtgaaggagacacttatgagttccgtgtgttagccaagaatgcagcaggcgtaattagcaaagggtctgaatctacaggccctgtcacttgccgagatgaatacgctccacccaaa

SEQ ID NO: 450359 - DNA, 120 bp, Artificial Sequence
  ENSG00000155657_727 (sequence is synthesized)
gccgaactggatgcccgattacacggtgatctggttaccatcagagcaggttctgatcttgttctggatgctgcagttggtggcaaacctgaacccaaaattatctggaccaaaggagac

SEQ ID NO: 450360 - DNA, 120 bp, Artificial Sequence
  ENSG00000155657_728 (sequence is synthesized)
aaggagctagatctctgtgaaaaagtctctttgcagtatactggcaaacgagcaactgctgtgatcaagttctgtgacagaagtgacagtggaaaatacactttaacagtgaaaaatgcc

SEQ ID NO: 450361 - DNA, 120 bp, Artificial Sequence
  ENSG00000155657_729 (sequence is synthesized)
agcgggaccaaggccgtgtctgtcatggtcaaagtgcttgattcccctggcccatgtggaaagctcaccgtcagcagagtaacacaggagaagtgcactttagcctggagccttccgcag

SEQ ID NO: 450362 - DNA, 120 bp, Artificial Sequence
  ENSG00000155657_730 (sequence is synthesized)
gaagacggaggagcagaaatcactcactacatcgtggaaagacgcgagactagcaggctcaactgggtgattgttgaaggcgaatgcccaaccctatcctatgtcgttaccaggctcatc

SEQ ID NO: 450363 - DNA, 120 bp, Artificial Sequence
  ENSG00000155657_731 (sequence is synthesized)
aagaacaatgagtacatattccgagtgagggcagtaaacaaatatggccctggtgtgcctgttgaatcagagccaattgtagccagaaactcattcactattccatcaccacccggcata

SEQ ID NO: 450364 - DNA, 120 bp, Artificial Sequence
  ENSG00000155657_732 (sequence is synthesized)
cctgaagaagttgggactggcaaagagcatatcatcattcagtggacaaaacctgaatctgatggtggcaatgaaatcagcaactacctagtagacaaacgtgagaagaagagcctgcgc

SEQ ID NO: 450365 - DNA, 120 bp, Artificial Sequence
  ENSG00000155657_733 (sequence is synthesized)
tggacacgtgtcaacaaagactatgtggtgtatgataccaggctgaaggtgaccagcctgatggagggttgtgattaccagttccgggtgaccgcagtgaatgcagctggtaacagtgag

SEQ ID NO: 450366 - DNA, 120 bp, Artificial Sequence
  ENSG00000155657_734 (sequence is synthesized)
cccagcgaagcttccaacttcatctcatgcagagaaccatcatatacccctggaccaccttctgctccaagagttgtggataccaccaaacacagcattagtttggcatggaccaaaccc

SEQ ID NO: 450367 - DNA, 120 bp, Artificial Sequence
  ENSG00000155657_735 (sequence is synthesized)
atgtacgatggtggtactgacattgtaggatatgttctggaaatgcaagagaaggacactgatcagtggtaccgagtgcataccaatgccacaataagaaatactgaattcactgtgcca

SEQ ID NO: 450368 - DNA, 120 bp, Artificial Sequence
  ENSG00000155657_736 (sequence is synthesized)
gaccttaaaatgggccagaaatattccttcagagttgctgccgtgaacgtgaagggtatgagcgaatacagcgaatcaattgctgaaattgagcccgtggaaagaatagaaataccagat

SEQ ID NO: 450369 - DNA, 120 bp, Artificial Sequence
  ENSG00000155657_737 (sequence is synthesized)
cttgagcttgcagatgatctaaagaagactgtgaccatcagggctggggcctccttgcgcttgatggtgtctgtatctggaagaccacctcctgtcataacgtggagcaagcagggcatt

SEQ ID NO: 450370 - DNA, 120 bp, Artificial Sequence
  ENSG00000155657_738 (sequence is synthesized)
gaccttgcaagccgggcaattattgacaccactgagagctactcattgctaatagtggacaaagttaatcggtacgatgctggaaaatacacaattgaagctgaaaaccaatctggcaag

SEQ ID NO: 450371 - DNA, 120 bp, Artificial Sequence
  ENSG00000155657_739 (sequence is synthesized)
aaatcagcaacagtccttgttaaagtctatgatactcctggtccctgtccttcagtgaaagttaaggaagtatcaagagattctgtgactataacttgggaaattcccacgattgatggt

SEQ ID NO: 450372 - DNA, 120 bp, Artificial Sequence
  ENSG00000155657_740 (sequence is synthesized)
ggagctccagtcaacaattacatcgttgagaagcgtgaagctgctatgagagcattcaaaacagtaactaccaaatgcagcaagacactttacagaatttctggacttgtagaaggaacc

SEQ ID NO: 450373 - DNA, 120 bp, Artificial Sequence
  ENSG00000155657_741 (sequence is synthesized)
atgtactatttcagagtgctgccagaaaatatttatggcattggagaaccttgtgaaacatctgatgcagtactggtctcagaagtgcctttggtgcctgcaaagctagaagtggtcgat

SEQ ID NO: 450374 - DNA, 120 bp, Artificial Sequence
  ENSG00000155657_742 (sequence is synthesized)
gtcaccaaatccactgttacccttgcctgggaaaaaccactctacgatggtggtagccgactcactggatatgttctcgaggcctgcaaagctggcacagagagatggatgaaggttgtc

SEQ ID NO: 450375 - DNA, 120 bp, Artificial Sequence
  ENSG00000155657_743 (sequence is synthesized)
accttaaaacccacagtcctagagcacactgttacttccttaaatgaaggtgaacaatacttatttagaataagggcacaaaatgagaaaggtgtgtcagaaccaagagagactgtcaca

SEQ ID NO: 450376 - DNA, 120 bp, Artificial Sequence
  ENSG00000155657_744 (sequence is synthesized)
gccgtgactgtacaagacctcagagtgttgccaacaatcgatctttctacaatgcctcagaagaccatccatgtcccagctggcagaccagtagagctggtgatacctattgctggccgt

SEQ ID NO: 450377 - DNA, 120 bp, Artificial Sequence
  ENSG00000155657_745 (sequence is synthesized)
ccacctcctgctgcttcctggttctttgctggttctaaactgagagaatcagagcgtgtcacagttgaaactcacactaaagtagctaaattaaccatccgtgaaaccactatcagagat

SEQ ID NO: 450378 - DNA, 120 bp, Artificial Sequence
  ENSG00000155657_746 (sequence is synthesized)
actggagaatacacacttgaattgaagaatgttaccggaactacttcagaaaccattaaagttatcattcttgacaagcctggtccaccaacaggacctattaagattgatgaaattgat

SEQ ID NO: 450379 - DNA, 120 bp, Artificial Sequence
  ENSG00000155657_747 (sequence is synthesized)
gctacatcaattaccatttcctgggaaccacctgaattggacggtggtgctccactgagtggttatgtggtagaacaacgtgacgctcatcgtccaggatggctgcccgtttctgaatca

SEQ ID NO: 450380 - DNA, 120 bp, Artificial Sequence
  ENSG00000155657_748 (sequence is synthesized)
gtgactaggtccacgtttaagtttaccagactcaccgaaggaaatgagtatgtgttccgtgtggctgcaacaaaccgcttcgggattggctcttacttgcagtctgaggtcatagagtgt

SEQ ID NO: 450381 - DNA, 120 bp, Artificial Sequence
  ENSG00000155657_749 (sequence is synthesized)
cgcagcagcatccgtattcctggacccccagaaacattacagatatttgatgtttcccgtgatggcatgacacttacttggtacccaccagaggatgacggtggctcccaagtgactgga

SEQ ID NO: 450382 - DNA, 120 bp, Artificial Sequence
  ENSG00000155657_750 (sequence is synthesized)
tatattgtggagcgcaaagaagtgagagcagatcgatgggtccgtgtaaataaagtacctgtgacaatgacacggtaccgctccactggccttactgaaggcttagaatatgaacaccgt

SEQ ID NO: 450383 - DNA, 120 bp, Artificial Sequence
  ENSG00000155657_751 (sequence is synthesized)
gtcacagccattaatgcaagagggtctgggaaaccaagtcgtccttccaaacccatcgttgccatggatccaattgctcctccaggaaagccacaaaacccaagagttactgatacaaca

SEQ ID NO: 450384 - DNA, 120 bp, Artificial Sequence
  ENSG00000155657_752 (sequence is synthesized)
aggacatcagtctccctggcctggagtgttccagaagatgaaggaggatctaaagtcacaggctacttgattgaaatgcaaaaagtagatcaacatgaatggaccaagtgtaacaccact

SEQ ID NO: 450385 - DNA, 120 bp, Artificial Sequence
  ENSG00000155657_753 (sequence is synthesized)
ccaaccaagattcgagagtatactctaacacacctacctcagggtgcagaatacaggttccgcgtcctagcttgtaatgctggtggacctggtgagcctgctgaggtaccaggaacagtc

SEQ ID NO: 450386 - DNA, 120 bp, Artificial Sequence
  ENSG00000155657_754 (sequence is synthesized)
aaagtcactgaaatgcttgaatatcctgattatgaacttgatgaaagataccaagaaggtatctttgtaaggcaaggtggcgtcatcagacttaccataccaatcaaaggaaaaccattc

SEQ ID NO: 450387 - DNA, 120 bp, Artificial Sequence
  ENSG00000155657_755 (sequence is synthesized)
ccaatatgtaaatggaccaaggaaggccaggatattagtaagcgtgccatgattgcaacatctgaaacacacactgagcttgtgatcaaagaagcagacaggggtgattctggcacttat

SEQ ID NO: 450388 - DNA, 120 bp, Artificial Sequence
  ENSG00000155657_756 (sequence is synthesized)
gacctggttctggaaaataaatgtggcaagaaggctgtctacatcaaggtcagggtgataggaagtcccaacagtccagaagggccactggaatatgatgacatccaagtccgctctgtg

SEQ ID NO: 450389 - DNA, 120 bp, Artificial Sequence
  ENSG00000155657_757 (sequence is synthesized)
agggtcagctggagacctcctgctgatgatggtggtgctgacatcttaggctacatcctcgagagacgagaagtgcctaaagccgcctggtataccattgattccagagtccgaggtaca

SEQ ID NO: 450390 - DNA, 120 bp, Artificial Sequence
  ENSG00000155657_758 (sequence is synthesized)
tctctggtggtaaaaggcctcaaagagaatgtagaataccatttccgtgtttcagcagaaaaccagtttggcataagcaaacccttgaaatctgaggaaccagtcacaccaaaaacacca

SEQ ID NO: 450391 - DNA, 120 bp, Artificial Sequence
  ENSG00000155657_759 (sequence is synthesized)
ttgaatcctccagaacctccaagcaatcctccagaagtactcgatgtaaccaagagttctgttagcttgtcctggtcccggcccaaagatgatggtggttctagagtcacaggctactac

SEQ ID NO: 450392 - DNA, 120 bp, Artificial Sequence
  ENSG00000155657_760 (sequence is synthesized)
atcgaacgcaaagagacatccactgacaagtgggtcagacacaacaagactcagatcaccaccacaatgtacactgtcacagggcttgttcccgatgctgagtatcagttccgcatcatc

SEQ ID NO: 450393 - DNA, 120 bp, Artificial Sequence
  ENSG00000155657_761 (sequence is synthesized)
gcacagaatgatgttggcctgagtgagaccagccctgcttctgaaccagttgtttgcaaagatccatttgataaaccaagccaaccaggagaacttgagattctttcaatatccaaagat

SEQ ID NO: 450394 - DNA, 120 bp, Artificial Sequence
  ENSG00000155657_762 (sequence is synthesized)
agtgtcactctacagtgggagaaacctgaatgtgatggtggtaaagaaattcttggatactgggttgaatatagacagtctggagacagtgcctggaagaagagcaataaggaacgtatt

SEQ ID NO: 450395 - DNA, 120 bp, Artificial Sequence
  ENSG00000155657_763 (sequence is synthesized)
aaggacaagcaattcacaataggaggtttgctggaagctactgagtatgaattcagggtttttgctgagaatgagactgggctgagcagacctcgcagaactgctatgtctataaagact

SEQ ID NO: 450396 - DNA, 120 bp, Artificial Sequence
  ENSG00000155657_764 (sequence is synthesized)
aaactcacatctggagaggccccaggaatacgcaaagaaatgaaggatgttaccacaaaattgggtgaagctgctcaactctcatgccagattgttggaaggcctcttcctgacattaaa

SEQ ID NO: 450397 - DNA, 120 bp, Artificial Sequence
  ENSG00000155657_765 (sequence is synthesized)
tggtacagatttggtaaagagctcatacaaagccggaaatacaaaatgtcttcagatggacgcacacacactcttacagtaatgacagaggaacaggaagatgaaggtgtttatacctgc

SEQ ID NO: 450398 - DNA, 120 bp, Artificial Sequence
  ENSG00000155657_766 (sequence is synthesized)
atagccaccaatgaggttggagaagtagaaaccagtagtaagcttctcctgcaagcaacaccgcagttccatcctggttacccactgaaagagaaatattatggagctgtgggttccaca

SEQ ID NO: 450399 - DNA, 120 bp, Artificial Sequence
  ENSG00000155657_767 (sequence is synthesized)
cttcggcttcatgttatgtacattggtcgtccagtacctgccatgacttggttccatggtcagaaacttttgcaaaactcagaaaacattactattgaaaacactgagcactatactcat

SEQ ID NO: 450400 - DNA, 120 bp, Artificial Sequence
  ENSG00000155657_768 (sequence is synthesized)
cttgtcatgaagaatgtccaacgtaagactcatgctgggaaatacaaagtccagctcagcaatgtttttggaacagttgatgccatccttgatgtggaaatacaagataaaccagacaaa

SEQ ID NO: 450401 - DNA, 120 bp, Artificial Sequence
  ENSG00000155657_769 (sequence is synthesized)
cctacaggaccaattgtgatcgaagctctattgaagaactccgcagtgatcagctggaaaccacccgcagatgacggaggctcctggatcaccaactatgtggtggaaaaatgtgaggcc

SEQ ID NO: 450402 - DNA, 120 bp, Artificial Sequence
  ENSG00000155657_770 (sequence is synthesized)
aaggagggggctgaatggcaattggtgtcttcagccatctcagtgacaacctgtagaattgtgaacctcacagaaaatgctggctattacttccgggtttcagctcagaacactttcggc

SEQ ID NO: 450403 - DNA, 120 bp, Artificial Sequence
  ENSG00000155657_771 (sequence is synthesized)
atcagtgaccctctagaagtgtcctcagttgtgatcattaagagtccatttgaaaagccaggtgctcctggcaaaccaactattactgctgtcacaaaagattcttgtgttgtggcctgg

SEQ ID NO: 450404 - DNA, 120 bp, Artificial Sequence
  ENSG00000155657_772 (sequence is synthesized)
aagccacctgccagtgatggaggtgcaaagattagaaattactaccttgagaagcgtgagaagaagcagaataaatggatttctgtgacaacagaagaaattcgagaaactgtcttttca

SEQ ID NO: 450405 - DNA, 120 bp, Artificial Sequence
  ENSG00000155657_773 (sequence is synthesized)
gtgaaaaaccttattgaaggtcttgaatacgagtttcgtgtgaaatgtgaaaatctaggtggggaaagtgaatggagtgaaatatcagaacccatcactcccaaatctgatgtcccaatt

SEQ ID NO: 450406 - DNA, 120 bp, Artificial Sequence
  ENSG00000155657_774 (sequence is synthesized)
caggcaccacactttaaagaggaactgagaaatctaaatgtcagatatcagagcaatgctaccttggtctgcaaagtgactggtcatccaaaacctatcgtcaaatggtacagacaaggc

SEQ ID NO: 450407 - DNA, 120 bp, Artificial Sequence
  ENSG00000155657_775 (sequence is synthesized)
aaagaaatcattgcagatggattaaaatataggattcaagaatttaagggtggctaccaccagctcatcattgcaagtgtcacagatgatgatgccacagtttaccaagtcagagctacc

SEQ ID NO: 450408 - DNA, 120 bp, Artificial Sequence
  ENSG00000155657_776 (sequence is synthesized)
aaccaagggggatctgtgtctggcactgcctccttggaagtggaagttccagctaagatacacttacctaaaactcttgaaggcatgggagcagttcatgctctccgaggtgaagtggtc

SEQ ID NO: 450409 - DNA, 120 bp, Artificial Sequence
  ENSG00000155657_777 (sequence is synthesized)
agcatcaagattcctttcagtggcaaaccagatcctgtgatcacctggcagaaaggacaagatctcattgacaataatggccactaccaagttattgtcacaagatccttcacatcactt

SEQ ID NO: 450410 - DNA, 120 bp, Artificial Sequence
  ENSG00000155657_778 (sequence is synthesized)
gttttccccaatggggtagagagaaaagatgctggtttctatgtggtctgtgctaaaaacagatttggaattgatcagaagacagttgaactggatgtggctgatgttcctgacccaccc

SEQ ID NO: 450411 - DNA, 120 bp, Artificial Sequence
  ENSG00000155657_779 (sequence is synthesized)
agaggagtcaaagttagtgatgtctcacgagattctgtcaacttaacatggactgagccagcctctgatggtggcagcaaaatcaccaactacattgttgaaaaatgtgcaactactgca

SEQ ID NO: 450412 - DNA, 120 bp, Artificial Sequence
  ENSG00000155657_780 (sequence is synthesized)
gaaagatggctccgtgtaggacaggcccgagaaacacgttataccgtgatcaacttatttggaaaaacaagttaccagttccgggtaatagctgaaaataaatttggtctgagcaagcct

SEQ ID NO: 450413 - DNA, 120 bp, Artificial Sequence
  ENSG00000155657_781 (sequence is synthesized)
tcagagccttcagaaccaaccataaccaaagaagataagaccagagctatgaactatgatgaagaggtagatgaaaccagggaagtctccatgactaaagcatctcactcttcaaccaag

SEQ ID NO: 450414 - DNA, 120 bp, Artificial Sequence
  ENSG00000155657_782 (sequence is synthesized)
gaactctatgagaaatatatgattgctgaagatcttgggcgtggtgagtttggaattgtccatcgttgtgttgaaacatcctcaaagaagacatacatggccaaatttgttaaagtcaaa

SEQ ID NO: 450415 - DNA, 120 bp, Artificial Sequence
  ENSG00000155657_783 (sequence is synthesized)
gggactgatcaggttttggtaaagaaggaaatttccattctgaatattgctaggcatagaaacatcttacacctccatgaatcatttgaaagcatggaagaattagttatgatctttgag

SEQ ID NO: 450416 - DNA, 120 bp, Artificial Sequence
  ENSG00000155657_784 (sequence is synthesized)
tttatatcaggacttgacatatttgagcgcattaacacaagtgcttttgaacttaatgaaagagaaattgtaagttatgttcaccaggtctgtgaagcacttcagtttttacacagtcat

SEQ ID NO: 450417 - DNA, 120 bp, Artificial Sequence
  ENSG00000155657_785 (sequence is synthesized)
aatattggacactttgacattagaccagaaaatatcatttaccaaaccagaagaagctctaccattaaaatcatagaatttggtcaagcccgtcagctgaaaccaggggacaacttcagg

SEQ ID NO: 450418 - DNA, 120 bp, Artificial Sequence
  ENSG00000155657_786 (sequence is synthesized)
cttctattcactgccccagaatactatgcacctgaagtccaccagcatgatgttgtcagcacagccacagacatgtggtcacttggaacactggtatatgtgctattgagtggtatcaac

SEQ ID NO: 450419 - DNA, 120 bp, Artificial Sequence
  ENSG00000155657_787 (sequence is synthesized)
ccattcctggctgaaactaaccaacagatcattgagaatatcatgaatgctgaatatactttcgatgaggaagcattcaaagagattagcattgaagccatggattttgttgaccggttg

SEQ ID NO: 450420 - DNA, 120 bp, Artificial Sequence
  ENSG00000155657_788 (sequence is synthesized)
ttagtgaaagagaggaaatctcgcatgacagcatcggaggctctccagcacccatggttgaagcagaagatagaaagagtcagtactaaagttatcagaacattaaaacaccggcgttat

SEQ ID NO: 450421 - DNA, 120 bp, Artificial Sequence
  ENSG00000155657_789 (sequence is synthesized)
taccacaccctgatcaagaaagacctcaacatggttgtgtcagcagcccggatctcctgtggtggtgcaattcgatctcagaagggagtgagtgttgctaaagttaaagtggcatccatt

SEQ ID NO: 450422 - DNA, 120 bp, Artificial Sequence
  ENSG00000155657_790 (sequence is synthesized)
gaaattggcccagtttctgggcagataatgcatgcagttggtgaagaaggaggacatgtcaaatatgtatgcaaaattgaaaattatgatcagtctacccaagtgacttggtactttggc

SEQ ID NO: 450423 - DNA, 120 bp, Artificial Sequence
  ENSG00000155657_791 (sequence is synthesized)
gtccgacagctggagaacagtgagaaatacgaaatcacctacgaagatggagtggccatcctctatgtcaaagacattaccaaattagatgatggtacctacagatgcaaagtagtcaat

SEQ ID NO: 450424 - DNA, 120 bp, Artificial Sequence
  ENSG00000155657_792 (sequence is synthesized)
gactatggtgaagacagttcttatgcagagctatttgttaaaggtgtgagagaagtctatgactattactgccgtagaaccatgaagaaaattaagcgcagaacagacacaatgagactc

SEQ ID NO: 450425 - DNA, 120 bp, Artificial Sequence
  ENSG00000155657_793 (sequence is synthesized)
ctggaaaggccaccagaatttaccctgcctctctataataagacagcttatgtaggtgaaaatgtccggtttggagtaactataactgtccacccagagcctcatgtaacatggtataaa

SEQ ID NO: 450426 - DNA, 120 bp, Artificial Sequence
  ENSG00000155657_794 (sequence is synthesized)
tcaggtcagaaaatcaaaccaggtgacaatgacaagaagtacacatttgagtcagacaagggtctttaccaattaacaatcaacagtgtcactacagatgatgacgctgaatatactgtt

SEQ ID NO: 450427 - DNA, 120 bp, Artificial Sequence
  ENSG00000155657_795 (sequence is synthesized)
gtggcaaggaacaaatatggtgaagacagctgtaaagcaaagctgacagtaaccctacacccacctccaacagatagtaccttaagacccatgttcaaaaggttactggcaaatgcagaa

SEQ ID NO: 450428 - DNA, 120 bp, Artificial Sequence
  ENSG00000155657_796 (sequence is synthesized)
tgccaagaaggccaaagtgtctgctttgagatcagagtgtctggcatccccccaccaacattaaaatgggagaaagatggtcagccactgtccctcgggcctaacattgaaattatccat

SEQ ID NO: 450429 - DNA, 120 bp, Artificial Sequence
  ENSG00000155657_797 (sequence is synthesized)
gaaggcttggattattatgctctgcacatcagggacactttgcctgaagacacgggttattatagagtcacagccactaacacagctgggtccaccagctgccaggctcacctacaagtg

SEQ ID NO: 450430 - DNA, 120 bp, Artificial Sequence
  ENSG00000155657_798 (sequence is synthesized)
gaacgcctgaggtacaagaaacaggaattcaagagtaaggaggagcatgagcgacacgtacaaaaacaaattgacaaaaccctcagaatggctgaaattctttctggaactgaaagtgta

SEQ ID NO: 450431 - DNA, 120 bp, Artificial Sequence
  ENSG00000155657_799 (sequence is synthesized)
ccactgacacaggtagctaaagaggctctgagagaagctgctgtcctttataaaccggctgtaagcaccaagactgtaaaaggggaattcagacttgagatagaagaaaagaaggaggag

SEQ ID NO: 450432 - DNA, 120 bp, Artificial Sequence
  ENSG00000155657_800 (sequence is synthesized)
agaaaactccggatgccttatgatgtaccagagccacgcaagtataagcagactaccatagaagaagaccaacgcatcaagcagttcgtgcccatgtctgacatgaagtggtataaaaag

SEQ ID NO: 450433 - DNA, 120 bp, Artificial Sequence
  ENSG00000155657_801 (sequence is synthesized)
atacgtgatcagtatgaaatgcctgggaaacttgacagagttgtacagaaacgacccaagcgcatccgcctttcaagatgggaacagttctatgtgatgcctcttccacgcattacagat

SEQ ID NO: 450434 - DNA, 120 bp, Artificial Sequence
  ENSG00000155657_802 (sequence is synthesized)
caatacagacctaaatggcgtattcctaaactgtcccaagatgatcttgagatagtgagaccagcccgccggcgtacaccttctcctgattatgacttttactaccgacctagaagacgt

SEQ ID NO: 450435 - DNA, 120 bp, Artificial Sequence
  ENSG00000155657_803 (sequence is synthesized)
tctcttggggacatctctgatgaagaattactcctccccattgatgactacttagcaatgaaaagaacagaggaagagaggctgcgtcttgaagaagagcttgagttaggtttttcagct

SEQ ID NO: 450436 - DNA, 120 bp, Artificial Sequence
  ENSG00000155657_804 (sequence is synthesized)
tcacccccaagtcgaagccctccacactttgagctttctagcctacgttactcttcaccacaagctcatgtcaaggtggaggaaacaagaaaagacttcaggtattcaacctatcacatc

SEQ ID NO: 450437 - DNA, 120 bp, Artificial Sequence
  ENSG00000155657_805 (sequence is synthesized)
ccaacgaaggctgaagctagtacaagttatgcagaactgagggaacggcatgcccaggctgcgtacagacagccaaagcaacggcaaagaatcatggctgagagggaggatgaagagttg

SEQ ID NO: 450438 - DNA, 120 bp, Artificial Sequence
  ENSG00000155657_806 (sequence is synthesized)
cttcgcccagttacgaccacccagcatctctcagaatacaaaagcgaacttgacttcatgtcaaaggaggaaaagtctagaaagaaatcaaggcgacaaagagaagtgacagaaataaca

SEQ ID NO: 450439 - DNA, 120 bp, Artificial Sequence
  ENSG00000155657_807 (sequence is synthesized)
gaaattgaggaagaatacgaaatctcaaaacatgctcaaagagaatcatcctcatctgcgtctagactactgagacgacggcgctccctgtctccaacttatattgagttaatgaggcca

SEQ ID NO: 450440 - DNA, 120 bp, Artificial Sequence
  ENSG00000155657_808 (sequence is synthesized)
gtgtctgagctgatccggtcacgtccacaaccggctgaggaatacgaagatgacacagaaagaaggtcacctactccagagagaactcgcccacgatcccccagccctgtgtctagtgag

SEQ ID NO: 450441 - DNA, 120 bp, Artificial Sequence
  ENSG00000155657_809 (sequence is synthesized)
agatcactctcgagatttgagaggtctgcaagatttgatatcttttccaggtatgagtccatgaaagctgctttaaaaactcagaagacatcagaaaggaagtatgaagttttgagtcag

SEQ ID NO: 450442 - DNA, 120 bp, Artificial Sequence
  ENSG00000155657_810 (sequence is synthesized)
cagcctttcacactggaccatgcccctcgaatcacactgagaatgcgctcgcacagggtaccatgtggccaaaatacacgttttattttaaatgttcagtctaagccaactgccgaggtt

SEQ ID NO: 450443 - DNA, 120 bp, Artificial Sequence
  ENSG00000155657_811 (sequence is synthesized)
aaatggtaccacaatggtgtggaactccaagaaagcagtaagattcattacaccaacacgagtggagtcctcaccctggaaattctggactgtcatactgatgacagtggaacctaccgt

SEQ ID NO: 450444 - DNA, 120 bp, Artificial Sequence
  ENSG00000155657_812 (sequence is synthesized)
gctgtgtgcaccaactacaagggcgaagcttctgactatgcaacgttggacgtgacaggaggggattataccacctatgcttcccaacgcagagatgaagaggtccccagatctgttttc

SEQ ID NO: 450445 - DNA, 120 bp, Artificial Sequence
  ENSG00000155657_813 (sequence is synthesized)
cctgagctgacaagaacagaggcgtatgctgtttcatcatttaagaaaacatctgagatggaagcttcgtcttctgtcagggaagtgaaatcacagatgacggagacaagggaaagtctc

SEQ ID NO: 450446 - DNA, 120 bp, Artificial Sequence
  ENSG00000155657_814 (sequence is synthesized)
tcctcatatgaacactctgcatctgcagaaatgaaaagtgctgcattagaagaaaagtcactggaagaaaaatccacaaccagaaagatcaagacgactttggcagcaagaattctaaca

SEQ ID NO: 450447 - DNA, 120 bp, Artificial Sequence
  ENSG00000155657_815 (sequence is synthesized)
aagccacggtccatgaccgtctacgagggcgagtctgcaaggttttcttgtgacaccgatggtgagccggtaccaactgtgacctggctgcgtaaaggacaagtgctaagtacttctgcc

SEQ ID NO: 450448 - DNA, 120 bp, Artificial Sequence
  ENSG00000155657_816 (sequence is synthesized)
cgccaccaagtgaccaccacaaagtacaaatcaacctttgagatctcttcagtccaggcttccgatgagggcaattacagcgtggtggtagaaaacagtgaagggaaacaagaagcagag

SEQ ID NO: 450449 - DNA, 120 bp, Artificial Sequence
  ENSG00000155657_817 (sequence is synthesized)
ttcactctgactattcaaaaggccagggtaactgaaaaggctgtgacatcaccaccaagagtcaaatccccagagcctcgggtgaaatccccagaagcagttaagtctccaaaacgagtg

SEQ ID NO: 450450 - DNA, 120 bp, Artificial Sequence
  ENSG00000155657_818 (sequence is synthesized)
aaatctccagaaccttctcacccgaaagccgtatcacccacagagacaaaaccaacaccaacagagaaagttcagcacctcccagtctctgccccaccaaagattactcagttcctgaaa

SEQ ID NO: 450451 - DNA, 120 bp, Artificial Sequence
  ENSG00000155657_819 (sequence is synthesized)
gcagaagcttctaaagagattgcaaaactgacctgtgtggttgaaagcagtgtattaagggcaaaagaggtcacctggtataaagatggcaagaaactgaaggaaaatgggcatttccag

SEQ ID NO: 450452 - DNA, 120 bp, Artificial Sequence
  ENSG00000155657_820 (sequence is synthesized)
tttcattattcagcagatggtacctatgagctcaaaatcaataacctcactgaatctgatcaaggagaatatgtttgtgagatttctggtgaaggtggaacgtctaaaaccaacttacaa

SEQ ID NO: 450453 - DNA, 120 bp, Artificial Sequence
  ENSG00000155657_821 (sequence is synthesized)
tttatggggcaagcctttaagagtatccatgagaaggtatcaaaaatatcagaaactaagaaatcagatcagaaaaccactgagtcaacagtaaccagaaaaactgaaccaaaagctcct

SEQ ID NO: 450454 - DNA, 120 bp, Artificial Sequence
  ENSG00000155657_822 (sequence is synthesized)
gaaccaatttcctcaaaaccagtaattgttactgggttgcaggatacaactgtttcttcagacagtgttgctaaatttgcagttaaggctactggagaaccccggccaactgccatctgg

SEQ ID NO: 450455 - DNA, 120 bp, Artificial Sequence
  ENSG00000155657_823 (sequence is synthesized)
acaaaagatggaaaggccattacacaaggaggtaaatataaactctctgaagacaagggagggttcttcttagaaattcataagactgatacttctgacagtggactttatacttgtaca

SEQ ID NO: 450456 - DNA, 120 bp, Artificial Sequence
  ENSG00000155657_824 (sequence is synthesized)
gtaaaaaattcagctggatctgtgtcctctagctgcaaattaacaataaaagctataaaagatactgaggcacagaaagtctctacacaaaagacttctgaaattacacctcagaagaaa

SEQ ID NO: 450457 - DNA, 120 bp, Artificial Sequence
  ENSG00000155657_825 (sequence is synthesized)
gctgttgtccaagaggaaatttcccaaaaagccctaaggtctgaagaaattaagatgtcagaggcaaaatctcaagaaaagttagccctcaaagaggaagcttcaaaggttctgatttct

SEQ ID NO: 450458 - DNA, 120 bp, Artificial Sequence
  ENSG00000155657_826 (sequence is synthesized)
gaagaagtcaagaaatcagcagcaacctccctggaaaaatccattgtccatgaggaaatcactaaaacatcacaggcatcagaagaagtcagaactcatgctgagattaaagcattttct

SEQ ID NO: 450459 - DNA, 120 bp, Artificial Sequence
  ENSG00000155657_827 (sequence is synthesized)
actcagatgagcataaacgaaggtcaaagactggttttaaaagccaacattgctggtgccactgatgtgaaatgggtactgaatggcgtagagcttaccaactctgaggagtaccgatat

SEQ ID NO: 450460 - DNA, 120 bp, Artificial Sequence
  ENSG00000155657_828 (sequence is synthesized)
ggtgtctcaggcagcgatcagaccctaaccatcaagcaagccagtcacagagatgaaggaatcctcacctgcataagcaaaaccaaggaaggaatcgtcaagtgtcagtatgatttgaca

SEQ ID NO: 450461 - DNA, 120 bp, Artificial Sequence
  ENSG00000155657_829 (sequence is synthesized)
ctgagcaaagaactctcagatgctccagccttcatctcacagcctagatctcaaaatattaatgaaggacaaaatgttctctttacttgtgaaatcagtggcgagccatcccctgaaatc

SEQ ID NO: 450462 - DNA, 120 bp, Artificial Sequence
  ENSG00000155657_830 (sequence is synthesized)
gaatggtttaaaaacaacctgccaatttctatttcttcaaatgtcagcataagccgctccagaaatgtatactcccttgaaatccgaaatgcatcagtcagcgacagtggaaagtacaca

SEQ ID NO: 450463 - DNA, 120 bp, Artificial Sequence
  ENSG00000155657_831 (sequence is synthesized)
attaaggccaaaaatttccgtggccagtgttcagctacagcttccttaatggtccttcctctagttgaagaaccttccagagaggtagtattgagaacaagtggtgacacaagcttgcaa

SEQ ID NO: 450464 - DNA, 120 bp, Artificial Sequence
  ENSG00000155657_832 (sequence is synthesized)
ggaagcttctcgtctcagtcagtccaaatgtctgcctccaagcaggaggcctccttcagcagtttcagcagcagcagtgctagcagcatgactgagatgaaatttgcaagcatgtctgcc

SEQ ID NO: 450465 - DNA, 120 bp, Artificial Sequence
  ENSG00000155657_833 (sequence is synthesized)
caaagcatgtcctccatgcaagagtcctttgtagaaatgagttccagcagctttatgggaatatctaatatgacacaactggaaagctcaactagtaaaatgcttaaagcaggcataaga

SEQ ID NO: 450466 - DNA, 120 bp, Artificial Sequence
  ENSG00000155657_834 (sequence is synthesized)
ggaattccgcctaaaattgaagctcttccatctgatatcagcattgatgaaggcaaagttctaacagtagcctgtgctttcacgggtgagcctaccccagaagtaacatggtcctgtggt

SEQ ID NO: 450467 - DNA, 120 bp, Artificial Sequence
  ENSG00000155657_835 (sequence is synthesized)
ggaagaaaaatccacagtcaagaacaggggaggttccacattgaaaacacagatgacctgacaaccctgatcatcatggacgtacagaaacaagatggtggactttataccctgagttta

SEQ ID NO: 450468 - DNA, 120 bp, Artificial Sequence
  ENSG00000155657_836 (sequence is synthesized)
gggaatgaatttggatctgactctgccactgtgaatatacatattcgatccatttaagagggcctgtgcccttatactctacactcattcttaacttttcgcaaacgtttcacacggact

SEQ ID NO: 450469 - DNA, 120 bp, Artificial Sequence
  ENSG00000155657_837 (sequence is synthesized)
aatctttctgaactgtaaatatttaaagaaaaaaaagtagttttgtatcaacctaaatgagtcaaagttcaaaaatattcatttcaatcttttcataattgttgacctaagaatataata

SEQ ID NO: 450470 - DNA, 120 bp, Artificial Sequence
  ENSG00000155657_838 (sequence is synthesized)
catttgctagtgacatgtacatactgtatatagccggattaacggttataaagttttgtaccatttattttatgacattttacaatgtaagttttgaaactaactgttggtaggagaaag

SEQ ID NO: 450471 - DNA, 120 bp, Artificial Sequence
  ENSG00000155657_839 (sequence is synthesized)
tttcttatggaacgaataccctgctcaacatttaatcaatctttgtgcctcaacatactgttgatgtctaagtatgcctcagtgggttgagaaaatccccattgaagatgtcctgtccac

SEQ ID NO: 450472 - DNA, 120 bp, Artificial Sequence
  ENSG00000155657_840 (sequence is synthesized)
ctaaaagagaatgatgctgtgcatatcacttgatatgtgcaccaatacctactgaatcagaaatgtaaggcattggtgatgtttgcatttaccctcctgtaagcaacactttaacgtctt

SEQ ID NO: 450473 - DNA, 120 bp, Artificial Sequence
  ENSG00000155657_841 (sequence is synthesized)
acattttctctgatgatgtcacacaaaattatcatgacaaatattaccagagcaaagtgtaacggccaacactttgttcgctcattttacgctgtctctgacataaggagtgcctgaata

SEQ ID NO: 450474 - DNA, 120 bp, Artificial Sequence
  ENSG00000155657_842 (sequence is synthesized)
gcttggaaaagtaacatctcctggccatcccttcatttaaccaagctattcaagtattcctatgccagagcagtgccaactcttggaggtcccagagtgcagccaatgcctttgtgtggt

SEQ ID NO: 450475 - DNA, 120 bp, Artificial Sequence
  ENSG00000155657_843 (sequence is synthesized)
agttctaaattttaattgcacctgaaaaacctgggcacctaagcaatgagccacagcaaaaagtaaagaacaacaacaaaataaagctgttgttaaattttaaacaatattactaattgc

SEQ ID NO: 450476 - DNA, 120 bp, Artificial Sequence
  ENSG00000155657_844 (sequence is synthesized)
ccaaaatgtcaatttgatgtagttcttttcatgcaagtataaattcaattgttagttataattgttggacctccttgagatagtaacaacaaaataaagcaagctatctgcacctcaaaa

SEQ ID NO: 450477 - DNA, 120 bp, Artificial Sequence
  ENSG00000155657_845 (sequence is synthesized)
tcccaatggcatgtctctttatcagtttcatttaagaaggagccccttggccaaaagcccagcttcatccagcctctgtcaagcctcagggtgcacaacggggagacagtcagatttcat

SEQ ID NO: 450478 - DNA, 120 bp, Artificial Sequence
  ENSG00000155657_846 (sequence is synthesized)
gcgagggtttctggcattcccaagccagaaatccaatggtttcataaccagcagctaattctaccaacaaaagatgtagttttccattttgaggagtccacaggcatggctttaatgctt

SEQ ID NO: 450479 - DNA, 120 bp, Artificial Sequence
  ENSG00000155657_847 (sequence is synthesized)
atagttgatgcttactcagagcatgctgggcagtactcttgcaaagcagccaatagtgctggggaagccacttgtgcagctacactcacagtgactccaaaagtgcaagccctagatagg

SEQ ID NO: 450480 - DNA, 120 bp, Artificial Sequence
  ENSG00000155657_848 (sequence is synthesized)
caaagttctgggaaagatgtaagagagtccaccaagtcccaggcagtggcagattcctctttcacaaaggaggagagcaaaatatctcaaaaggaaattaagtcatttcaaggatcatca

SEQ ID NO: 450481 - DNA, 120 bp, Artificial Sequence
  ENSG00000155657_849 (sequence is synthesized)
tatgaatatgaagtgcaggtttttgaaagtgtatctcaaagttccatccacacagctgcatctgttcaagatacacagttgtgccatactgcatccctttcacaaattgcagaaagcact

SEQ ID NO: 450482 - DNA, 120 bp, Artificial Sequence
  ENSG00000155657_850 (sequence is synthesized)
gagctatctaaggaatgtgctaaagagtccacgggtgaggcgcccaagattttcctgcatcttcaggacgtcactgtaaagtgcggtgacacggctcaattcctctgtgttttaaaagat

SEQ ID NO: 450483 - DNA, 120 bp, Artificial Sequence
  ENSG00000155657_851 (sequence is synthesized)
gattctttcattgatgtaacctggactcacgaaggtgcaaagatagaggaatccgagagactgaaacaatcacaaaatggaaatattcagtttcttaccatatgtaatgttcagctggta

SEQ ID NO: 450484 - DNA, 120 bp, Artificial Sequence
  ENSG00000155657_852 (sequence is synthesized)
gaccaaggactatacagctgcattgtacacaatgactgtggagagaggacaacgtcagcagtactaagtgtagaaggtgctcctgaatcaattttgcatgagaggattgaacaagagatt

SEQ ID NO: 450485 - DNA, 120 bp, Artificial Sequence
  ENSG00000155657_853 (sequence is synthesized)
gagatggaaatgaaagagttttctagttcttttctgtctgccgaggaagaaggacttcatagcgccgaacttcaattatctaaaataaatgaaacacttgaacttttgtctgaatctcca

SEQ ID NO: 450486 - DNA, 120 bp, Artificial Sequence
  ENSG00000155657_854 (sequence is synthesized)
gtttacccaactaaatttgattccgaaaaggaaggcactggcccaattttcatcaaagaagtgtcaaatgctgatataagcatgggggatgtggctacactgtctgtaactgtcattggc

SEQ ID NO: 450487 - DNA, 120 bp, Artificial Sequence
  ENSG00000155657_855 (sequence is synthesized)
atccccaaacctaaaattcagtggttctttaatggagtgctattaaccccttctgctgactacaaatttgtttttgacggtgatgatcatagcctgatcattctgttcaccaaattggag

SEQ ID NO: 450488 - DNA, 120 bp, Artificial Sequence
  ENSG00000155657_856 (sequence is synthesized)
gatgagggagagtatacatgtatggccagtaatgactatggaaagacaatatgtagtgcctatctaaaaattaattccaaaggagagggtcacaaagacactgaaacagaatcagcagtg

SEQ ID NO: 450489 - DNA, 120 bp, Artificial Sequence
  ENSG00000155657_857 (sequence is synthesized)
gcaaaatctctggaaaagctgggaggtccttgtcctcctcacttccttaaggagttaaaaccaattcgctgtgctcaagggcttcctgccatctttgagtacacagtggttggagagcct

SEQ ID NO: 450490 - DNA, 120 bp, Artificial Sequence
  ENSG00000155657_858 (sequence is synthesized)
gcccctactgttacatggttcaaagaaaacaagcagctttgcaccagtgtttattacactatcattcataaccctaatggctctggaactttcattgtcaatgaccctcagagggaagac

SEQ ID NO: 450491 - DNA, 120 bp, Artificial Sequence
  ENSG00000155657_859 (sequence is synthesized)
agtggcctctatatctgtaaagcagagaatatgttgggtgagtccacctgtgcagcagagctgcttgtgcttctggaagacacagacatgactgataccccctgcaaagcaaagtccaca

SEQ ID NO: 450492 - DNA, 120 bp, Artificial Sequence
  ENSG00000155657_860 (sequence is synthesized)
ccagaggctcctgaggattttccacagacacccttaaagggtcccgcagttgaagcacttgactcagagcaggaaattgcaacgtttgtaaaagacaccattttgaaagctgctttaatt

SEQ ID NO: 450493 - DNA, 120 bp, Artificial Sequence
  ENSG00000155657_861 (sequence is synthesized)
acagaagaaaaccagcaactatcttatgagcatattgctaaagccaatgaattgagcagtcagcttcctttgggagctcaggaattgcaatccattttggagcaagacaagctcactcct

SEQ ID NO: 450494 - DNA, 120 bp, Artificial Sequence
  ENSG00000155657_862 (sequence is synthesized)
gaaagcaccagggaatttctttgcatcaatggcagtattcactttcagcctctcaaggaaccatctcccaacctacagctgcagattgtacagtcccagaaaaccttctccaaagaaggt

SEQ ID NO: 450495 - DNA, 120 bp, Artificial Sequence
  ENSG00000155657_863 (sequence is synthesized)
attctaatgcctgaagagcctgagacacaggcagttctatcagataccgagaaaatcttcccaagtgccatgtccatagaacaaattaattcattaacagttgagcctctgaaaacttta

SEQ ID NO: 450496 - DNA, 120 bp, Artificial Sequence
  ENSG00000155657_864 (sequence is synthesized)
ttagctgaacctgaagggaattatccacagtcttcaatagaacctccaatgcattcttatctaacctctgtggctgaggaagtactttcaccaaaagaaaagacagtatctgacaccaac

SEQ ID NO: 450497 - DNA, 120 bp, Artificial Sequence
  ENSG00000155657_865 (sequence is synthesized)
agagagcaaagagtgactcttcaaaagcaagaggcacaaagtgcgctcatcttgagtcagagcttagctgagggacacgtggagagtctccagagtcctgatgtcatgatctctcaggta

SEQ ID NO: 450498 - DNA, 120 bp, Artificial Sequence
  ENSG00000155657_866 (sequence is synthesized)
aactatgagcccctagtcccttcagaacactcatgcacagaaggaggtaaaattttgatagaaagtgcaaatccactggaaaatgcagggcaagattctgcggtcagaattgaggaaggc

SEQ ID NO: 450499 - DNA, 120 bp, Artificial Sequence
  ENSG00000155657_867 (sequence is synthesized)
aagtccttaagatttccactagcacttgaagaaaagcaggtactgctcaaagaagagcattctgacaacgtggtgatgcccccagaccaaatcattgagtctaaaagagagcccgtggca

SEQ ID NO: 450500 - DNA, 120 bp, Artificial Sequence
  ENSG00000155657_868 (sequence is synthesized)
ataaagaaagtgcaggaggtacagggaagggaccttctttctaaggaaagcttgctttctggtattccagaagagcagagattaaacctgaaaattcaaatctgccgggctttgcaagca

SEQ ID NO: 450501 - DNA, 120 bp, Artificial Sequence
  ENSG00000155657_869 (sequence is synthesized)
gccgtggccagcgagcagccaggtcttttctctgagtggctaagaaatattgaaaaggtggaggtcgaggctgtaaacatcacccaagagcccagacacatcatgtgcatgtaccttgtt

SEQ ID NO: 450502 - DNA, 120 bp, Artificial Sequence
  ENSG00000155657_870 (sequence is synthesized)
acttcggcaaagtctgtaacagaagaagtaaccatcattattgaagatgttgatcctcaaatggctaacctgaaaatggaacttagggatgctttgtgtgctattatatatgaggaaata

SEQ ID NO: 450503 - DNA, 120 bp, Artificial Sequence
  ENSG00000155657_871 (sequence is synthesized)
gacatcctaacagctgagggtcctagaattcagcaaggagccaaaacaagtttgcaagaagaaatggattctttttcaggttcacagaaggttgaacccattactgaaccagaagttgaa

SEQ ID NO: 450504 - DNA, 120 bp, Artificial Sequence
  ENSG00000155657_872 (sequence is synthesized)
tctaaatatctgatctcaactgaagaggtcagttattttaacgtgcaaagtagggttaaatatttggatgccacacctgtcactaaaggggttgcttcagctgttgtctctgacgaaaaa

SEQ ID NO: 450505 - DNA, 120 bp, Artificial Sequence
  ENSG00000155657_873 (sequence is synthesized)
caagatgagagtctgaaaccatcagaggaaaaagaggagtcttcctctgaaagtggtactgaggaggttgctacagtaaagatacaggaagctgagggtggcttaatcaaagaggatggc

SEQ ID NO: 450506 - DNA, 120 bp, Artificial Sequence
  ENSG00000155657_874 (sequence is synthesized)
cccatgatacatacacctttagtggacactgtttctgaggaaggtgatattgtacacctcacaacatccataacaaatgctaaagaggtgaattggtattttgagaataaactggtgcct

SEQ ID NO: 450507 - DNA, 120 bp, Artificial Sequence
  ENSG00000155657_875 (sequence is synthesized)
tcagatgaaaagttcaagtgtttacaagatcaaaatacatatacgctagtcatcgacaaagtaaataccgaagaccatcaaggagagtatgtctgtgaggccttgaatgacagcggaaaa

SEQ ID NO: 450508 - DNA, 120 bp, Artificial Sequence
  ENSG00000155657_876 (sequence is synthesized)
gttcccgcccctaaaaaagtggaacctccaccaccacccaaagtgcctgaaattaagaagaaagtgacagagaagaaagtggtcattcccaagaaagaggaggctccccctgccaaagtg

SEQ ID NO: 450509 - DNA, 120 bp, Artificial Sequence
  ENSG00000155657_877 (sequence is synthesized)
gaagaaaaagttcgtgaagctgttctgaaaaagcctgaagttccaccagctaaagttcctgggatgcctaagaaaagtgttcaagaagaaaaatcacctattgttatttctgaagacaca

SEQ ID NO: 450510 - DNA, 120 bp, Artificial Sequence
  ENSG00000155657_878 (sequence is synthesized)
gagatgtacatttatgaagcatctgaagaagcagtcctagaagaaaaagtacttgtgactcaacctcaaaagacaaaacccaaactagcaaaagtgcctgagccacccaagaaagttgtt

SEQ ID NO: 450511 - DNA, 120 bp, Artificial Sequence
  ENSG00000155657_879 (sequence is synthesized)
ccagaagacaaaatatatgtgactattcctaaaaagagagaaacaccagcaactaaagaacctgatacaaccagaggcatttttccagaggtggagccacctgaggctattcctgaaatt

SEQ ID NO: 450512 - DNA, 120 bp, Artificial Sequence
  ENSG00000155657_880 (sequence is synthesized)
ccagaacatcctccaactgaagagtttgaagtcttcaaggaagtcattccagagggagaaactcctattgttaaaagaagaaaaacaccatcaccaacagtgcctgaatcacctcgagaa

SEQ ID NO: 450513 - DNA, 120 bp, Artificial Sequence
  ENSG00000155657_881 (sequence is synthesized)
attgtccctgtaaaggaaacacccatggctgctccccttgaaattgaaatacctcccactaaagcaccagaagctatgaaagaagttgtccctgaaatgaaaatatttgaggatgtacct

SEQ ID NO: 450514 - DNA, 120 bp, Artificial Sequence
  ENSG00000155657_882 (sequence is synthesized)
gaagagccagaaactccacgtatgaaaacgcccgaagctcctcaagaaattattcctgccaagacagttccttccaaaaaaagagaacccccatcagttaaagtgcctgaagctctccaa

SEQ ID NO: 450515 - DNA, 120 bp, Artificial Sequence
  ENSG00000155657_883 (sequence is synthesized)
gaaattgtccctgaaaagaaaacgcttgtggttcctctcagaaagcctgaagtccttcctgatgaagtgccggaggctctcagagaagttgtcccggaaaagaaagtgcatcctccccaa

SEQ ID NO: 450516 - DNA, 120 bp, Artificial Sequence
  ENSG00000155657_884 (sequence is synthesized)
agggctgaagttgtacctgtcaaagtgcacgaagctcccaaagagattatccctgaaaagaaagtgtcggtggtgcctcctaaaaagcctgaagtcccacctgttaaagtgccagaagct

SEQ ID NO: 450517 - DNA, 120 bp, Artificial Sequence
  ENSG00000155657_885 (sequence is synthesized)
tccaaagaggttatccgcgaagagaaagtgcccttggctcctcctaaagagcctgaagtcccacctgttaaagtaccagagcctcccaaagaagtagttcctgaaaagaaagcgccagtg

SEQ ID NO: 450518 - DNA, 120 bp, Artificial Sequence
  ENSG00000155657_886 (sequence is synthesized)
gaaaagaaagtaccggtgcctcctgccaaaaagccagaagctccacctcctaaagttcctgaagctcctaaagaagttgtacttgaaaagaaagcatctgtggctgtgcccaaaaaaccg

SEQ ID NO: 450519 - DNA, 120 bp, Artificial Sequence
  ENSG00000155657_887 (sequence is synthesized)
gaagccccacgtgcaaaagtgcctgaagctgctcaagaagttgtcccagaaaagaaaattcccaaggcaccaatcaaaaaaccagaagcccccgcagttacagtgccagaagttcctcaa

SEQ ID NO: 450520 - DNA, 120 bp, Artificial Sequence
  ENSG00000155657_888 (sequence is synthesized)
gaagccacagaaaaagaaattcccgtggctccacccaaaaaaccagaagctccaattgtcccagtgcctgaagctcaagaagttgtcccagaaaagaaagttcctaaggctcctcccaca

SEQ ID NO: 450521 - DNA, 120 bp, Artificial Sequence
  ENSG00000155657_889 (sequence is synthesized)
aaaccagaagccccacctgccacagtgcctgaagtcccacaagaaattgtgccagaaaagaaaacactggtgcttcctaaaaagccagaagttccacctgttacagtgccagaggctccc

SEQ ID NO: 450522 - DNA, 120 bp, Artificial Sequence
  ENSG00000155657_890 (sequence is synthesized)
cctgaagtgctgccaccgaaggaagtggtcccagaaaagaaagtaccggtgcctcctgccaaaaagccagaagctccacctcctaaagttcctgaagctcctaaagaagttgtacttgaa

SEQ ID NO: 450523 - DNA, 120 bp, Artificial Sequence
  ENSG00000155657_891 (sequence is synthesized)
aagaaagcatctgtggctgtgcccaaaaaaccggaagccccacgtgcaaaagtgcctgaagctgctcaagaagttgtcccagaaaagaaaattcccaaggcaccaatcaaaaaaccagaa

SEQ ID NO: 450524 - DNA, 120 bp, Artificial Sequence
  ENSG00000155657_892 (sequence is synthesized)
gcccccgcagttacagtgccagaagttcctcaagaagccgcagaaaaagaaattcccgtggctccacccaaaaaaccagaagctccgattgtcccagtgcctgaagctcaagaagttgtc

SEQ ID NO: 450525 - DNA, 120 bp, Artificial Sequence
  ENSG00000155657_893 (sequence is synthesized)
ccagaaaagaaagttcctaaggctcctcccacaaaaccagaagccccacctgccacagtgcctgaagtcccacaagaaattgtgccagaaaagaaaacactggtgcttcctaaaaagcca

SEQ ID NO: 450526 - DNA, 120 bp, Artificial Sequence
  ENSG00000155657_894 (sequence is synthesized)
cctcccaaaccggaaagtcctccccctgaagtgcctgaagtgctgccaccgaaggaagtggtcccagaaaagaaagtaccggtgcctcctgccaaaaagccagaagctccacctcctaaa

SEQ ID NO: 450527 - DNA, 120 bp, Artificial Sequence
  ENSG00000155657_895 (sequence is synthesized)
gttcctgaagctcctaaagaagttgtacttgaaaagaaagtatctgtggctgtgcccaaaaaaccggaagccccacgtgcaaaagtgcctgaagctgctcaagaagttgtcccagaaaag

SEQ ID NO: 450528 - DNA, 120 bp, Artificial Sequence
  ENSG00000155657_896 (sequence is synthesized)
aaaattcccaaggcaccaatcaaaaaaccagaagcccccgcagttacagtgccagaagttcctcaagaagccgcagaaaaagaaattcccgtggctccacccaaaaaaccagaagctcca

SEQ ID NO: 450529 - DNA, 120 bp, Artificial Sequence
  ENSG00000155657_897 (sequence is synthesized)
attgtcccagtgcctgaagctcaagaagttgtcccagaaaagaaagttcctaaggctcctcccacaaaaccagaagccccacctgccacagtgcctgaagtcccacaagaaattgtgcca

SEQ ID NO: 450530 - DNA, 120 bp, Artificial Sequence
  ENSG00000155657_898 (sequence is synthesized)
gaaaagaaaacactggtgcttcctaaaaagccagaagttccacctgttacagtgccagaggctcccaaagaagttgtccttgaaaagaaagtgcccttggctcctcctaaaaagcctgaa

SEQ ID NO: 450531 - DNA, 120 bp, Artificial Sequence
  ENSG00000155657_899 (sequence is synthesized)
gtcccacctgttaaagtgccagaggctcccaaagaagttgttcctgaaaagaaagtgccagtgactcctcctaaaaaacctgaagtcccacctgttaaagtgccagaggctcccatagag

SEQ ID NO: 450532 - DNA, 120 bp, Artificial Sequence
  ENSG00000155657_900 (sequence is synthesized)
gttgttcctgaaaagaaaatgcccttggctcctcctaaaaagcctgaagtccctcctgttaaagtaccagaggctcccaaagaggttgttcctgaaaagaaagtgccctcggctcctcct

SEQ ID NO: 450533 - DNA, 120 bp, Artificial Sequence
  ENSG00000155657_901 (sequence is synthesized)
gttcctgtcatcaaaaaaccagaagcaccgcctcctaaagaacctgagatgccaaagaaagttgttccagtgaagaaggtcccaactgttaagaagccagaaacaccagcagctaaagtg

SEQ ID NO: 450534 - DNA, 120 bp, Artificial Sequence
  ENSG00000155657_902 (sequence is synthesized)
cctgaggtgcccaagaaacttgttccagtaaagaaagaacctgtgcctgttaccaaaaaaccagaagttcttccagaaaaagtgcccaaagtgcctgagaaaatcatcccagaaaaggaa

SEQ ID NO: 450535 - DNA, 120 bp, Artificial Sequence
  ENSG00000155657_903 (sequence is synthesized)
gtgtctgtgcctatccctgcagagccagaagttccacctgctgaagttgaagagactcctgaggaaataatatatgaagaaaaagcatctataaccattggtagaaaagagactccccct

SEQ ID NO: 450536 - DNA, 120 bp, Artificial Sequence
  ENSG00000155657_904 (sequence is synthesized)
gttgaagaacgtgaaattgaaaagtatattaaacctgaagagcccgaacctgaaccacagcctgaagaaataccagtaaaagaacctgaacctgaaaaggttattgagaagccaaaactc

SEQ ID NO: 450537 - DNA, 120 bp, Artificial Sequence
  ENSG00000155657_905 (sequence is synthesized)
ttgcacattttggaactaggttttgaaacgagaaagattcccttgtccccctcgcagggcatgcgacgcggagagtggttcgcttcttcagtgtcccgctgctcaaacctctaggggagc

SEQ ID NO: 450538 - DNA, 120 bp, Artificial Sequence
  ENSG00000155657_906 (sequence is synthesized)
aaacgggcaggttgtggggctccgtgttcctctggacatccagccgcttgtgtgtctgcctactagggtctcaggggtttttataggcatagggtgtgggcgtggcaggtcagggtgatc

SEQ ID NO: 450539 - DNA, 120 bp, Artificial Sequence
  ENSG00000155657_907 (sequence is synthesized)
ttgggaaatgcaacatttgggcgggaaggcaggagtgtttgtcctcacctaggtccatgggcacaggcctcgctagggaccacgcacttctcttcccagcacttccctgccctcctcccg

SEQ ID NO: 450540 - DNA, 120 bp, Artificial Sequence
  ENSG00000155657_908 (sequence is synthesized)
tgtaagtttcatgcactcaaaaatgtagcaggtgacaaaggaggtaaaccaagaagttactgaatatgattttcacaaatcctcactgtccacaggtaaattgaagacccttataaactt

SEQ ID NO: 450541 - DNA, 120 bp, Artificial Sequence
  ENSG00000155657_909 (sequence is synthesized)
ctgaattcttatttatatttcatgtaataaatatctactttaggggccaaaatatggcacagtgaaaggagaagagcacagaagttagagttcaaagccctaaggacaaatcagcctgat

SEQ ID NO: 450542 - DNA, 120 bp, Artificial Sequence
  ENSG00000155657_910 (sequence is synthesized)
cacttaacagtttgatttagggcaataagtataaataataaaataattgttattatatatggatcacttcctctatcagattggaactatacatacattatctcattaaatgttcacaac

SEQ ID NO: 450543 - DNA, 120 bp, Artificial Sequence
  ENSG00000155657_911 (sequence is synthesized)
ctgtaagaattattatcctcaatgttattgataggtaactggaattaaagaagttaagcagtttatttaaggtttcagttgtgtcatctgtaaattaaagagagtcacaataagaatgat

SEQ ID NO: 450544 - DNA, 120 bp, Artificial Sequence
  ENSG00000155657_912 (sequence is synthesized)
ctcaagctgcattttggggcttcaatgagataattagttgaaagtgccttgtaaatagaaaataattatgccaatattcttatattcagatggtaagtaaaaccttttaaatattttgca

SEQ ID NO: 450545 - DNA, 120 bp, Artificial Sequence
  ENSG00000155657_913 (sequence is synthesized)
gttccagttctgctgagacacaacttcccctgggaagcctcctgacccatcaagtccagagtagatggtcctgccatgtgcactgtcagcacctgcactgcccagccacgcccctgaata

SEQ ID NO: 450546 - DNA, 120 bp, Artificial Sequence
  ENSG00000155657_914 (sequence is synthesized)
tacacaaaggaatcgcagatcaagagagaaaaaatagaaggaaattgtaattacaggattgctgagctgggctttctccaataataacatgatcaaaataaaataaaagaagtccttttg

SEQ ID NO: 450547 - DNA, 120 bp, Artificial Sequence
  ENSG00000155657_915 (sequence is synthesized)
cagttggtcatctgctgtgctgcaggaatgaatgtagctactgtggtatgaagcaaaattctaacgttcctagaaagtgttagacctgtcaacctccaggaaggatgagatctgcttcca

SEQ ID NO: 450548 - DNA, 120 bp, Artificial Sequence
  ENSG00000155657_916 (sequence is synthesized)
accacaaatccatggctgctaaaagatatgcaagtagaatatcatctacaagctcctggcctgaatattttaagccttcttttacccagaaacttacatttaaatatgttttagagggtg

SEQ ID NO: 450549 - DNA, 120 bp, Artificial Sequence
  ENSG00000155657_917 (sequence is synthesized)
aaccggttgtttttacatgtagattaattgcctgtccaactccagaaatgacttggtttcataacaatcggcccatcccaacaggtcttcgtcggattataaaagctgagagtgatttac

SEQ ID NO: 450550 - DNA, 120 bp, Artificial Sequence
  ENSG00000155657_918 (sequence is synthesized)
accatcactcttccagcttagagattaaaagggtccaagacagagattctggaagttataggttactagcaattaatagtgaagggtctgcagaatcaactgcatcattgcttgttatcc

SEQ ID NO: 450551 - DNA, 120 bp, Artificial Sequence
  ENSG00000155657_919 (sequence is synthesized)
aaaaagggcaagatgagaaatatttagaatttctgaaaagagcagaacggacacatgaaaatgtggaggctttagttgaaaggggagaagataggataaaggttgacctgaggtttactg

SEQ ID NO: 450552 - DNA, 120 bp, Artificial Sequence
  ENSG00000155657_920 (sequence is synthesized)
gctctccctttaacaaaaaacaagatgtggaacaaaagggaatgatgagaactatacattttaagacaatgagttctgccaagaaaacagattacatgtatgatgaagaatatttagaaa

SEQ ID NO: 450553 - DNA, 120 bp, Artificial Sequence
  ENSG00000155657_921 (sequence is synthesized)
gtaaatctgacataagaggttggcttaatgtaggtgaaagtttcctggacaaggagaccaaagtgaagttgcaacgtttaagggaggctagaaaaacattaatggagaaaaagaaattat

SEQ ID NO: 450554 - DNA, 120 bp, Artificial Sequence
  ENSG00000155657_922 (sequence is synthesized)
ctcttttagatacgtcttctgaaataagctcaagaactttgagaagtgaagctagtgataaagatattctgttctctagagaggacatgaaaatcagatctatgtctgatctagctgaaa

SEQ ID NO: 450555 - DNA, 120 bp, Artificial Sequence
  ENSG00000155657_923 (sequence is synthesized)
gttataaggtagatcattcagctgagagtattgtgcaaaatccacatgccctttctaatcaaatggatcaaaatatagaatctgaggaacttcccacaagctttcaaactattgttgatg

SEQ ID NO: 450556 - DNA, 120 bp, Artificial Sequence
  ENSG00000155657_924 (sequence is synthesized)
aagaaattttccagactgaaataagaatgagccaagaagcactggtaaaggaaagtctaccaaaagaccatttatatggtgaaattctagtaaatgaaaatacccaagcaagaggacagc

SEQ ID NO: 450557 - DNA, 120 bp, Artificial Sequence
  ENSG00000155657_925 (sequence is synthesized)
tggaagaaattatggccaatactacaattggagagtcatccacatatatcactaatgtatgtgagaaggaggaagtatatgagactcctgaaaatgtgtctcaagctattacaccacatg

SEQ ID NO: 450558 - DNA, 120 bp, Artificial Sequence
  ENSG00000155657_926 (sequence is synthesized)
ccagcgaatcttttggtacacttgtaaatgttgaagaaagtgaagaaatagctagtgaaagaataaaaaaggatgatttgagagaattacaactctctgcttctacacgaattgatgaat

SEQ ID NO: 450559 - DNA, 120 bp, Artificial Sequence
  ENSG00000155657_927 (sequence is synthesized)
tcaaaaccgaacagaaggaagaaaacatgagattttttgaaaattcttttcgaaaacgcccacaacgttgcccaccttcatttcttcaagaaattgaatctcaagaagtttatgaaggtg

SEQ ID NO: 450560 - DNA, 120 bp, Artificial Sequence
  ENSG00000155657_928 (sequence is synthesized)
acagttgtaattttgtgtgtcattttcaaggatatcctcaacctatagtgacgtggtataacaatgacatgccaatcccacgtaatcaaaactttatcattcattcgttggaaaactatt

SEQ ID NO: 450561 - DNA, 120 bp, Artificial Sequence
  ENSG00000155657_929 (sequence is synthesized)
caatattaactctttcatctgttcatcatcagaatgaaggttctattacttgtgtgctatttaaccaatatggaacagtaaaaacaaccagtatgcttaaagtgaaagcaaaacaaaaac

SEQ ID NO: 450562 - DNA, 120 bp, Artificial Sequence
  ENSG00000155657_930 (sequence is synthesized)
atgatgtcaaagcacataaagtcccagtgttccatgactacttggatgaggaagaagagttagcattggtgtttgaccaagcaaaaggcgcccatccatctatgagtcaagagggccaaa

SEQ ID NO: 450563 - DNA, 120 bp, Artificial Sequence
  ENSG00000155657_931 (sequence is synthesized)
caaatcttcatttgttaaaaactaacccaccagttcctccctctggagacacagaattgctttcctttcctgtagaaattcaggtaacagcagctactcctatcccagaacaggataaag

SEQ ID NO: 450564 - DNA, 120 bp, Artificial Sequence
  ENSG00000155657_932 (sequence is synthesized)
agtctaaagaagtgtttcaaactgaggagctggaacctaaagcaatgcctcaagatcaagttactcaatcaccaaaacacagatttgtatttttgtctgatattactaatgaaccaccaa

SEQ ID NO: 450565 - DNA, 120 bp, Artificial Sequence
  ENSG00000155657_933 (sequence is synthesized)
aaatgttacaagaaatgccaaagcatgccaggtgtagagaaggggattccatcattcttgaatgtttaatatctggtgagccccagccagttgtaacatggtttcaaaatggagtccttt

SEQ ID NO: 450566 - DNA, 120 bp, Artificial Sequence
  ENSG00000155657_934 (sequence is synthesized)
taaagcagaaccagaagtttcagtttgaagaagttaattgtagccaccaattatatattaaggatgttaattctcaagattctggaaaatataaatgtgttgctgaaaacaattcagggg

SEQ ID NO: 450567 - DNA, 120 bp, Artificial Sequence
  ENSG00000155657_935 (sequence is synthesized)
cagttgaaagtgtttcagatctaacagtggagcctgtcacttatagagaaaatagtcaattcgaaaatattggtgaaatttatggaaaatattccagagatcagcaactgcaagaccagg

SEQ ID NO: 450568 - DNA, 120 bp, Artificial Sequence
  ENSG00000155657_936 (sequence is synthesized)
gagaatctgtaagggcacatttttatgattatccagctggtccctttactccctggacaaatgtaaaagaatattcagtaagggactattttcaaagccttgagactattgagcaaatag

SEQ ID NO: 450569 - DNA, 120 bp, Artificial Sequence
  ENSG00000155657_937 (sequence is synthesized)
accagaaagagcaggtgcgttgcataccttctagagaaaaaattcccagatttgtgcatggtgcttcaagaaccataaaaatcagcaagcccatcagggctgaattcatacaatgtcagg

SEQ ID NO: 450570 - DNA, 120 bp, Artificial Sequence
  ENSG00000155657_938 (sequence is synthesized)
ctgaagggaaagagagacatgtaagtgaaaaatcaaagctgcaccaagcagagggtactgtttatccatttgttgatgatttcagtgatgtcactattaagaaagaaataagaaataatt

SEQ ID NO: 450571 - DNA, 120 bp, Artificial Sequence
  ENSG00000155657_939 (sequence is synthesized)
ttggaaaacttggtagatcagaaaaggaaaatgtacaagaatgtgcccaaagtgactatttaccaaatattcactctgagagaatttctgacagttacaatacaaaagattcatctgcca

SEQ ID NO: 450572 - DNA, 120 bp, Artificial Sequence
  ENSG00000155657_940 (sequence is synthesized)
ttgtatatgaagaatcccttggtgaagagatacactacccggggaaaaaggtgaagcatagaattatcgaatttgaaaaattacatgtagaaaaaggagttctagaaaaaagacctacca

SEQ ID NO: 450573 - DNA, 120 bp, Artificial Sequence
  ENSG00000155657_941 (sequence is synthesized)
gaacatcaattgttaatcctcctcaaaagaagattgatgacaaagccttttcattaaagcaaagagaatcaagatcaagcaatctaaatgcaaatatgtatcaggcagagaaaatgtctc

SEQ ID NO: 450574 - DNA, 120 bp, Artificial Sequence
  ENSG00000155657_942 (sequence is synthesized)
caaatactgaatcagattcatctaacattgcaataaatttaaagctgctttcctctcaaactcataaagaatttgacgcacaagaaagggaacaacaggaaaaaataagtcttatagata

SEQ ID NO: 450575 - DNA, 120 bp, Artificial Sequence
  ENSG00000155657_943 (sequence is synthesized)
aacctgcaatttctaaaagagctgaacatgaatcacctattacatttgacttaaagcagtttcacactcaaataaaacacacagatgtgaaattccaagaattagatagtggtcaaccag

SEQ ID NO: 450576 - DNA, 120 bp, Artificial Sequence
  ENSG00000155657_944 (sequence is synthesized)
aagaagcttattttaaaatccaacatcctgctgacactgagaacattgtatttgatctaaaacaaatgtattctcatataggagatccagctctggagttccaagggcaagaaactaggg

SEQ ID NO: 450577 - DNA, 120 bp, Artificial Sequence
  ENSG00000155657_945 (sequence is synthesized)
aacagcaggaaatacattataaagaaaaaattcctagccctgaaacgttacaacctgacacacacaatatctctaaaagtgtgcaaaataatgtatttgccagtcaagaaatttcttcca

SEQ ID NO: 450578 - DNA, 120 bp, Artificial Sequence
  ENSG00000155657_946 (sequence is synthesized)
gtcaagagctttcaaatagaactatggtggagaaaagtagtattgatgaaaattccatttctttagaaaaagaagtccgacatgtacaggaacaaaacttagacattttaaaaactgatc

SEQ ID NO: 450579 - DNA, 120 bp, Artificial Sequence
  ENSG00000155657_947 (sequence is synthesized)
tttctcttaaatccttttctgaagaaatctatagtgaatcatgtgccctacttccaacctcatctgcagatatagaagaaactgatctttctgagaaaagttgtcctctagaaaatggag

SEQ ID NO: 450580 - DNA, 120 bp, Artificial Sequence
  ENSG00000155657_948 (sequence is synthesized)
gcagaagttccatctcacatttgaaaaaagcagcaagtgaggaaaagcctttaggggttggtgaaatggaagaagaatgcactctagaaccagagttggcagcatttccaaagcaggatg

SEQ ID NO: 450581 - DNA, 120 bp, Artificial Sequence
  ENSG00000155657_949 (sequence is synthesized)
gtgggacacaggaatatacagatgccactttggaagaccacagaggtgatgttcaggaagctgacacactccatagacagctctccctgagtcagtgcttcccactcttgatgactgaag

SEQ ID NO: 450582 - DNA, 120 bp, Artificial Sequence
  ENSG00000155657_950 (sequence is synthesized)
aacaacagaatccaggtgaacaaataagtacaaacattcatgcctctggagaagaaaaatgttatgaagaagttcaagttcagaatgaagcttctttctccactttagaaggagaaatga

SEQ ID NO: 450583 - DNA, 120 bp, Artificial Sequence
  ENSG00000155657_951 (sequence is synthesized)
tagaaactagtttttctcaaaatattcctaaattagatgaggcacataccactgaggcagcagaatctgagacctccctaacacaatatttacttgctgctggaaagcgtgaggttcctg

SEQ ID NO: 450584 - DNA, 120 bp, Artificial Sequence
  ENSG00000155657_952 (sequence is synthesized)
aaactaaagacaccagagaccaggcaaagcttgtccagagtgaatcaatcacttcaatggaggtggaagaagtaactttcaacactgtgtatgaatactacaaccagaaacaggaatcac

SEQ ID NO: 450585 - DNA, 120 bp, Artificial Sequence
  ENSG00000155657_953 (sequence is synthesized)
taggtcgtccactttctcctgagtctgacatttccattggtgtgggaagtacaaccagtgaagaaatatctgagttagatcagttttataccccaccatcatctgttgaatattttgaat

SEQ ID NO: 450586 - DNA, 120 bp, Artificial Sequence
  ENSG00000155657_954 (sequence is synthesized)
ctccaaagtcccctgacttatattttaatccttcagatataactaaacaatcctcaatacattcaggaggtgagacagttgaaagatattccacacctttaggggaagttgctgaaagat

SEQ ID NO: 450587 - DNA, 120 bp, Artificial Sequence
  ENSG00000155657_955 (sequence is synthesized)
attcaacaccttccgaaggtgaggtaggagaaagatactccacacccccaggggagacactagagagatactccacacctccaggagagactctagagagatactccacacccccaggag

SEQ ID NO: 450588 - DNA, 120 bp, Artificial Sequence
  ENSG00000155657_956 (sequence is synthesized)
agactctagagagatattccacacccccaggagagactctggagagatactccacacccccaggagagactctagagcgatattccacacccccaggggaggcactagagagatattcta

SEQ ID NO: 450589 - DNA, 120 bp, Artificial Sequence
  ENSG00000155657_957 (sequence is synthesized)
ttcctactggaggaccaaaccccactggtacttttaaaacatatccatcaaaaatagaaagggaagacggtacaccaaatgagcatttctacacacctacagaagagaggggttcagctt

SEQ ID NO: 450590 - DNA, 120 bp, Artificial Sequence
  ENSG00000155657_958 (sequence is synthesized)
atgaaatatggcgttccgattcatttggtacacccaatgaagccattgagccaaaagacaatgaaatgcctccatcttttattgaacctctgaccaaaaggaaggtatatgaaaacacaa

SEQ ID NO: 450591 - DNA, 120 bp, Artificial Sequence
  ENSG00000155657_959 (sequence is synthesized)
cactaggcttcattgttgaagttgaaggtcttccagttcctggtgtgaaatggtatcgaaataaatctttactagagccagatgaaagaatcaaaatggaaagagtgggtaatgtgtgtt

SEQ ID NO: 450592 - DNA, 120 bp, Artificial Sequence
  ENSG00000155657_960 (sequence is synthesized)
cactggaaatttctaacattcaaaaaggagaagggggagagtacatgtgtcatgctgtaaacatcataggggaagcaaagagctttgcaaatgtagacataatgccccaggaagaaagag

SEQ ID NO: 450593 - DNA, 120 bp, Artificial Sequence
  ENSG00000155657_961 (sequence is synthesized)
tggtggcactaccacctccagtaacacatcagcatgtcatggagtttgatttggaacacaccacatcatcaagaacaccttctcctcaagaaattgtcctggaagttgaattaagtgaaa

SEQ ID NO: 450594 - DNA, 120 bp, Artificial Sequence
  ENSG00000155657_962 (sequence is synthesized)
aagacgttaaagaatttgagaagcaggtgaaaatagtgacagttcccgaatttactcctgaccataaaagtatgattgtgagtctagatgttcttccatttaattttgtagatccaaata

SEQ ID NO: 450595 - DNA, 120 bp, Artificial Sequence
  ENSG00000155657_963 (sequence is synthesized)
tggattcaagggagggagaagacaaagaactaaaaattgatttagaagtatttgaaatgcctcctcgctttataatgcctatttgtgattttaaaattccagaaaattcagatgctgtat

SEQ ID NO: 450596 - DNA, 120 bp, Artificial Sequence
  ENSG00000155657_964 (sequence is synthesized)
tcaaatgttcagtcatagggatcccgactcccgaagttaagtggtataaagaatatatgtgtattgagccagataatattaaatacgtgattagcgaggagaagggaagtcacactctta

SEQ ID NO: 450597 - DNA, 120 bp, Artificial Sequence
  ENSG00000155657_965 (sequence is synthesized)
aaattcgaaatgtctgtctttctgatagtgcaacatacaggtgcagagctgtgaattgtgtaggagaggctatctgtcggggattcctcaccatgggagattctgaaatatttgctgtga

SEQ ID NO: 450598 - DNA, 120 bp, Artificial Sequence
  ENSG00000155657_966 (sequence is synthesized)
tagcaaagaaaagcaaagtgactttaagcagtttaatggaagaattggtcttaaagagcaactacacagacagtttttttgaatttcaggtggtggaagggcctcccaggtttatcaaag

SEQ ID NO: 450599 - DNA, 120 bp, Artificial Sequence
  ENSG00000155657_967 (sequence is synthesized)
gtatttctgactgttatgcaccaataggtacagcagcatattttcagtgcttagttcgtggctctccaagacccacggtttactggtacaaagatggaaaattagtccaaggaagaaggt

SEQ ID NO: 450600 - DNA, 120 bp, Artificial Sequence
  ENSG00000155657_968 (sequence is synthesized)
tcactgttgaggaaagtggcacagggttccataacctgtttataacaagcttagtaaagagtgatgaaggagagtataggtgtgtagctacaaacaaatcaggaatggctgagagctttg

SEQ ID NO: 450601 - DNA, 120 bp, Artificial Sequence
  ENSG00000155657_969 (sequence is synthesized)
cagcactcaccttaacttaaaatgtaatgttttagtgcctcagtaattattagcattgatctgagtgctttcatattttccaaattatgtggatctaataaacttccaaacaggtccacc

SEQ ID NO: 450602 - DNA, 120 bp, Artificial Sequence
  ENSG00000155657_970 (sequence is synthesized)
atatttgaattcattaccttggagacccctaaagaaataatctctatgtagaaatctcatctttgtaatacatgtaaatattttgttatctgaactgtggaatcatcacttgtgtcaatc

SEQ ID NO: 450603 - DNA, 120 bp, Artificial Sequence
  ENSG00000155657_971 (sequence is synthesized)
atgctgtgtaatatcaaacacaattaaatctctccttggctacctaattgtttgtacttctatttaccctcatgcctcctccacaaagtgtttcagtggaatggactctcttttagcaga

SEQ ID NO: 450604 - DNA, 120 bp, Artificial Sequence
  ENSG00000155657_972 (sequence is synthesized)
taaaccatatatgcaaaagtacaatgtaaaagtggagaccatatcagatgaccacgcagacaaattggtaagggcaaatctctctgctcccattctaagttatttttggaattttaaccc

SEQ ID NO: 450605 - DNA, 120 bp, Artificial Sequence
  ENSG00000155657_973 (sequence is synthesized)
ctttgcatccaaactcatgtttatttactttgacttagaataggcaaaacaaacaacaaaaaccagcttctcccaattggcaactaactctataatctgtttgacatttcaatcttaata

SEQ ID NO: 450606 - DNA, 120 bp, Artificial Sequence
  ENSG00000155657_974 (sequence is synthesized)
tattaacttcatctcttttaaaaatgttttcgttattaatattcctcttcataagtgctttaattctcactggcttcaagggaccaattgtgctctttgtgggcagggttcacctagaca

SEQ ID NO: 450607 - DNA, 120 bp, Artificial Sequence
  ENSG00000155657_975 (sequence is synthesized)
tttgcaaaataagcaaatagatctttccacttttggagataccttatttttctccatttttgagatgacatcaagtgtaaaatgcagcaataatttagtattggcctggggaaaaaaggg

SEQ ID NO: 450608 - DNA, 120 bp, Artificial Sequence
  ENSG00000155657_976 (sequence is synthesized)
aaactatcatattgtgtttacatatagattttaaaactgtattctgatttcagaatctttaaaatttaaaaaaaggtgggatatttttagaattgagacaatatggtaatttgtatttca

SEQ ID NO: 450609 - DNA, 120 bp, Artificial Sequence
  ENSG00000155657_977 (sequence is synthesized)
gattatatataaataacaagataacaagctttcctatcagtttcactgaatttcatctttaaaacgaatatagcttaataagcattcaatttttattgtgatgtttatgtttctaaagta

SEQ ID NO: 450610 - DNA, 120 bp, Artificial Sequence
  ENSG00000155657_978 (sequence is synthesized)
actctttaattttgtcttttaaaattaaaataacagtaaattaacatactccttaatatcttacctatatactaatgtggacccaagtcttctcatataagactcgacaaatataaaaaa

SEQ ID NO: 450611 - DNA, 120 bp, Artificial Sequence
  ENSG00000155657_979 (sequence is synthesized)
cactaaaagtattaaaacactcagagagtcacaaattaaaacaacccgtgaagtaaaaagagaatcgtcaaagaaaacatcaagtttgtcattaacttcatgccaaaaaccgtaagaaac

SEQ ID NO: 450612 - DNA, 120 bp, Artificial Sequence
  ENSG00000155657_980 (sequence is synthesized)
tgagaacaagggaataaagtctactgacaggataccacgtggactgaagactgagagtgatacgagagccccagcctttcccaaggagctgccctagatatgactgtgtctaaaagctgt

SEQ ID NO: 450613 - DNA, 120 bp, Artificial Sequence
  ENSG00000155657_981 (sequence is synthesized)
gcatattccttgtggaataaaaacagttttgataagtctttgttttgtttcttaatatgtaatttggacttcatgtagttcaaagtttgaaaggtgattcaaatcaaaggagtgtttact

SEQ ID NO: 450614 - DNA, 120 bp, Artificial Sequence
  ENSG00000155657_982 (sequence is synthesized)
agcaggaaaaactgagaatagccctctgctaaagtagcaatttagaaaatgcatgttctttctaaatgtgatttcatctcttagcaagtgtttagtcaataggacattttttagaaaata

SEQ ID NO: 450615 - DNA, 120 bp, Artificial Sequence
  ENSG00000155657_983 (sequence is synthesized)
atattccttcggtttgtagattgctttctgcatgcatgtaaaggcatggggaattatagaactaaaagtggaaatttcatgaagaacctaaaataaaaatgttttaaatctttctgtcaa

SEQ ID NO: 450616 - DNA, 120 bp, Artificial Sequence
  ENSG00000155659_0 (sequence is synthesized)
acagacgctggcggccaccagaagtttgagcctctttggtagcaggaggctggaagaaaggacagaagtagctctggctgtgatggggatcttactgggcctgctactcctggggcacct

SEQ ID NO: 450617 - DNA, 120 bp, Artificial Sequence
  ENSG00000155659_1 (sequence is synthesized)
aacagtggacacttatggccgtcccatcctggaagtgccagagagtgtaacaggaccttggaaaggggatgtgaatcttccctgcacctatgaccccctgcaaggctacacccaagtctt

SEQ ID NO: 450618 - DNA, 120 bp, Artificial Sequence
  ENSG00000155659_2 (sequence is synthesized)
ggtgaagtggctggtacaacgtggctcagaccctgtcaccatctttctacgtgactcttctggagaccatatccagcaggcaaagtaccagggccgcctgcatgtgagccacaaggttcc

SEQ ID NO: 450619 - DNA, 120 bp, Artificial Sequence
  ENSG00000155659_3 (sequence is synthesized)
aggagatgtatccctccaattgagcaccctggagatggatgaccggagccactacacgtgtgaagtcacctggcagactcctgatggcaaccaagtcgtgagagataagattactgagct

SEQ ID NO: 450620 - DNA, 120 bp, Artificial Sequence
  ENSG00000155659_4 (sequence is synthesized)
ccgtgtccagaaactctctgtctccaagcccacagtgacaactggcagcggttatggcttcacggtgccccagggaatgaggattagccttcaatgccaggctcggggttctcctcccat

SEQ ID NO: 450621 - DNA, 120 bp, Artificial Sequence
  ENSG00000155659_5 (sequence is synthesized)
cagttatatttggtataagcaacagactaataaccaggaacccatcaaagtagcaaccctaagtaccttactcttcaagcctgcggtgatagccgactcaggctcctatttctgcactgc

SEQ ID NO: 450622 - DNA, 120 bp, Artificial Sequence
  ENSG00000155659_6 (sequence is synthesized)
caagggccaggttggctctgagcagcacagcgacattgtgaagtttgtggtcaaagactcctcaaagctactcaagaccaagactgaggcacctacaaccatgacataccccttgaaagc

SEQ ID NO: 450623 - DNA, 120 bp, Artificial Sequence
  ENSG00000155659_7 (sequence is synthesized)
acagtgaagcagtcctgggactggaccactgacatggatggctaccttggagagaccagtgctgggccaggaaagagcctgcctgtctttgccatcatcctcatcatctccttgtgctgt

SEQ ID NO: 450624 - DNA, 120 bp, Artificial Sequence
  ENSG00000155659_8 (sequence is synthesized)
atggtggtttttaccatggcctatatcatgctctgtcggaagacatcccaacaagagcatgtctacgaagcagccagggcacatgccagagaggccaacgactctggagaaaccatgagg

SEQ ID NO: 450625 - DNA, 120 bp, Artificial Sequence
  ENSG00000155659_9 (sequence is synthesized)
gtggccatcttcgcaagtggctgctccagtgatgagccaacttcccagaatctgggcaacaactactctgatgagccctgcataggacaggagtaccagatcatcgcccagatcaatggc

SEQ ID NO: 450626 - DNA, 120 bp, Artificial Sequence
  ENSG00000155659_10 (sequence is synthesized)
aactacgcccgcctgctggacacagttcctctggattatgagtttctggccactgagggcaaaagtgtctgttaaaaatgccccattaggccaggatctgctgacataattgcctagtca

SEQ ID NO: 450627 - DNA, 120 bp, Artificial Sequence
  ENSG00000155659_11 (sequence is synthesized)
gtccttgccttctgcatggccttcttccctgctacctctcttcctggatagcccaaagtgtccgcctaccaacactggagccgctgggagtcactggctttgccctggaatttgccagat

SEQ ID NO: 450628 - DNA, 120 bp, Artificial Sequence
  ENSG00000155659_12 (sequence is synthesized)
gcatctcaagtaagccagctgctggatttggctctgggcccttctagtatctctgccgggggcttctggtactcctctctaaataccagagggaagatgcccatagcactaggacttggt

SEQ ID NO: 450629 - DNA, 120 bp, Artificial Sequence
  ENSG00000155659_13 (sequence is synthesized)
catcatgcctacagacactattcaactttggcatcttgccaccagaagacccgagggaggctcagctctgccagctcagaggaccagctatatccaggatcatttctctttcttcagggc

SEQ ID NO: 450630 - DNA, 120 bp, Artificial Sequence
  ENSG00000155659_14 (sequence is synthesized)
cagacagcttttaattgaaattgttatttcacaggccagggttcagttctgctcctccactataagtctaatgttctgactctctcctggtgctcaataaatatctaatcataacagcaa

SEQ ID NO: 450631 - DNA, 120 bp, Artificial Sequence
  ENSG00000155659_15 (sequence is synthesized)
catttttgaccccgtccctgccctcaattttgattactggcaggaaatgtggaggaaggggggtgtggcacagacccaatcctaaggccggaggccttcagggtcaggacatagctgcct

SEQ ID NO: 450632 - DNA, 120 bp, Artificial Sequence
  ENSG00000155659_16 (sequence is synthesized)
tccctctctcaggcaccttctgaggttgttttggccctctgaacacaaaggataatttagatccatctgccttctgcttccagaatccctgggtggtaggatcctgataattaattggca

SEQ ID NO: 450633 - DNA, 120 bp, Artificial Sequence
  ENSG00000155659_17 (sequence is synthesized)
agaattgaggcagaagggtgggaaaccaggaccacagccccaagtcccttcttatgggtggtgggctcttgggccatagggcacatgccagagaggccaacgactctggagaaaccatga

SEQ ID NO: 450634 - DNA, 120 bp, Artificial Sequence
  ENSG00000155659_18 (sequence is synthesized)
gtggctcagtggaaatatgttttgagaaagaaggaagctggggacttgaccagagcgtgtgatgggaagaatctttgtggctagaagtaactgaccagaatcttaataaggaaagagcct

SEQ ID NO: 450635 - DNA, 120 bp, Artificial Sequence
  ENSG00000155660_0 (sequence is synthesized)
gcgtcgctaaggagcgacgggctgtcggccagaccccgagttctcggtgcgctcagcggccgccgacgctaggaggccgcgctccgcccccgctaccatgaggccccggaaagccttcct

SEQ ID NO: 450636 - DNA, 120 bp, Artificial Sequence
  ENSG00000155660_1 (sequence is synthesized)
gctcctgctgctcttggggctggtgcagctgctggccgtggcgggtgccgagggcccggacgaggattcttctaacagagaaaatgccattgaggatgaagaggaggaggaggaggaaga

SEQ ID NO: 450637 - DNA, 120 bp, Artificial Sequence
  ENSG00000155660_2 (sequence is synthesized)
tgatgatgaggaagaagacgacttggaagttaaggaagaaaatggagtcttggtcctaaatgatgcaaactttgataattttgtggctgacaaagacacagtgctgctggagttttatgc

SEQ ID NO: 450638 - DNA, 120 bp, Artificial Sequence
  ENSG00000155660_3 (sequence is synthesized)
tccatggtgtggacattgcaagcagtttgctccggaatatgaaaaaattgccaacatattaaaggataaagatcctcccattcctgttgccaagatcgatgcaacctcagcgtctgtgct

SEQ ID NO: 450639 - DNA, 120 bp, Artificial Sequence
  ENSG00000155660_4 (sequence is synthesized)
ggccagcaggtttgatgtgagtggctaccccaccatcaagatccttaagaaggggcaggctgtagactacgagggctccagaacccaggaagaaattgttgccaaggtcagagaagtctc

SEQ ID NO: 450640 - DNA, 120 bp, Artificial Sequence
  ENSG00000155660_5 (sequence is synthesized)
ccagcccgactggacgcctccaccagaagtcacgcttgtgttgaccaaagagaactttgatgaagttgtgaatgatgcagatatcattctggtggagttttatgccccatggtgtggaca

SEQ ID NO: 450641 - DNA, 120 bp, Artificial Sequence
  ENSG00000155660_6 (sequence is synthesized)
ctgcaagaaacttgcccccgagtatgagaaggccgccaaggagctcagcaagcgttctcctccaattcccctggcaaaggtcgacgccaccgcagaaacagacctggccaagaggtttga

SEQ ID NO: 450642 - DNA, 120 bp, Artificial Sequence
  ENSG00000155660_7 (sequence is synthesized)
tgtctctggctatcccaccctgaaaattttccgcaaaggaaggccttatgactacaacggcccacgagaaaaatatggaatcgttgattacatgatcgagcagtccgggcctccctccaa

SEQ ID NO: 450643 - DNA, 120 bp, Artificial Sequence
  ENSG00000155660_8 (sequence is synthesized)
ggagattctgaccctgaagcaggtccaggagttcctgaaggatggagacgatgtcatcatcatcggggtctttaagggggagagtgacccagcctaccagcaataccaggatgccgctaa

SEQ ID NO: 450644 - DNA, 120 bp, Artificial Sequence
  ENSG00000155660_9 (sequence is synthesized)
caacctgagagaagattacaaatttcaccacactttcagcacagaaatagcaaagttcttgaaagtctcccaggggcagttggttgtaatgcagcctgagaaattccagtccaagtatga

SEQ ID NO: 450645 - DNA, 120 bp, Artificial Sequence
  ENSG00000155660_10 (sequence is synthesized)
gccccggagccacatgatggacgtccagggctccacccaggactcggccatcaaggacttcgtgctgaagtacgccctgcccctggttggccaccgcaaggtgtcaaacgatgctaagcg

SEQ ID NO: 450646 - DNA, 120 bp, Artificial Sequence
  ENSG00000155660_11 (sequence is synthesized)
aggcgccccctggtggtcgtctactacagtgtggacttcagctttgattacagagctgcaactcagttttggcggagcaaagtcctagaggtggccaaggacttccctgagtacaccttt

SEQ ID NO: 450647 - DNA, 120 bp, Artificial Sequence
  ENSG00000155660_12 (sequence is synthesized)
gccattgcggacgaagaggactatgctggggaggtgaaggacctggggctcagcgagagtggggaggatgtcaatgccgccatcctggacgagagtgggaagaagttcgccatggagcca

SEQ ID NO: 450648 - DNA, 120 bp, Artificial Sequence
  ENSG00000155660_13 (sequence is synthesized)
gaggagtttgactctgacaccctccgcgagtttgtcactgctttcaaaaaaggaaaactgaagccagtcatcaaatcccagccagtgcccaagaacaacaagggacccgtcaaggtcgtg

SEQ ID NO: 450649 - DNA, 120 bp, Artificial Sequence
  ENSG00000155660_14 (sequence is synthesized)
gtgggaaagacctttgactccattgtgatggaccccaagaaggacgtcctcatcgagttctacgcgccatggtgcgggcactgcaagcagctagagcccgtgtacaacagcctggccaag

SEQ ID NO: 450650 - DNA, 120 bp, Artificial Sequence
  ENSG00000155660_15 (sequence is synthesized)
aagtacaagggccaaaagggcctggtcatcgccaagatggacgccactgccaacgacgtccccagcgaccgctataaggtggagggcttccccaccatctacttcgcccccagtggggac

SEQ ID NO: 450651 - DNA, 120 bp, Artificial Sequence
  ENSG00000155660_16 (sequence is synthesized)
aaaaagaacccagttaaatttgagggtggagacagagatctggagcatttgagcaagtttatagaagaacatgccacaaaactgagcaggaccaaggaagagctttgaaggcctgaggtc

SEQ ID NO: 450652 - DNA, 120 bp, Artificial Sequence
  ENSG00000155660_17 (sequence is synthesized)
tgcggaaggtgggaggaggcagacgccctgcgtggcccatggtcggggcgtccacgccgaggccggcaacaaacgacagtatctcggattcctttttttttttttttaattttttatact

SEQ ID NO: 450653 - DNA, 120 bp, Artificial Sequence
  ENSG00000155660_18 (sequence is synthesized)
ttggtgtttcacttcatgctctgaatactgaataaccatgaatgactgaatagtttagtccagatttttacagaggatacatctatttttatcattatttggggtttgaaaaattttttt

SEQ ID NO: 450654 - DNA, 120 bp, Artificial Sequence
  ENSG00000155660_19 (sequence is synthesized)
ttacaccttctaatttctttatttctcaaagcagataattcttctgtgtgaaaatgttttctttttttaatttaaggtttaaaattccttttccaaatcatgttgattttgctctttgct

SEQ ID NO: 450655 - DNA, 120 bp, Artificial Sequence
  ENSG00000155660_20 (sequence is synthesized)
ttttcgttgtctgagaaattgttggcgtagatttggcttctggtatgtgtttctgattgcttcctgttgagcacaaagtgagagctgccactgagcagccctgccaggggtgctgtttca

SEQ ID NO: 450656 - DNA, 120 bp, Artificial Sequence
  ENSG00000155660_21 (sequence is synthesized)
ggctgggcatcgccaggcggcctccctgcaaaccaagggctgggggcaaaggggcatgatccagggtcccccagggtgggctcagctccagggagaggccacccacgtggcagccccacc

SEQ ID NO: 450657 - DNA, 120 bp, Artificial Sequence
  ENSG00000155660_22 (sequence is synthesized)
tcttgagagcccccagtgccggagcagaaaggaccctggacccagaggcagatactgcggggtggtagaaaaggtagagtaggctgtggcaatggaataaaacacgattaaaaacgttaa

SEQ ID NO: 450658 - DNA, 120 bp, Artificial Sequence
  ENSG00000155660_23 (sequence is synthesized)
gcaggagtagggagggcctagggcggcggagccgactcgtcgcggccgaggcgcgcgcggtccgtgccggcgtcagtctgggattggccggcccgcgacttcctccgccccctgccaatc

SEQ ID NO: 450659 - DNA, 120 bp, Artificial Sequence
  ENSG00000155660_24 (sequence is synthesized)
gtttgccttttcccaagaagccacctacggttcactggagggaaaggagccccaaaagacggtagggaatgactgggctgtgcttgagtggggtcgagccctggggtgttttgcctccta

SEQ ID NO: 450660 - DNA, 120 bp, Artificial Sequence
  ENSG00000155660_25 (sequence is synthesized)
agactgatccccttcaaagtcgccactcccccaaagtccctcaaacattgtactcaagaacaatggtggggagatggtgggccccctcacctgttccctctttgaagcagggctccaccc

SEQ ID NO: 450661 - DNA, 120 bp, Artificial Sequence
  ENSG00000155660_26 (sequence is synthesized)
gtggcgggtgccgagggcccggacgaggattttcgtcaggtccaggctaactccaggcgaacgcgcccaggcagtgggaagggagagggagagccactggagagaaggggcgagggcgtg

SEQ ID NO: 450662 - DNA, 120 bp, Artificial Sequence
  ENSG00000155666_0 (sequence is synthesized)
gtcgtgatcagacgagcggtgagcgatcgatactcctatgctagcctctggctcctcaggggacacagccgagtggtcggaccaaacgcaacgagtcttcgccagcccaaaggcgactcg

SEQ ID NO: 450663 - DNA, 120 bp, Artificial Sequence
  ENSG00000155666_1 (sequence is synthesized)
acaccgtcccagctgaagagaggcacgggactgaaccagctggtggtggcccgatggctggagacacccactgccccgcagagcccctggccagagaaggcactttatgggaggccctca

SEQ ID NO: 450664 - DNA, 120 bp, Artificial Sequence
  ENSG00000155666_2 (sequence is synthesized)
gggcgctcctgccgcacagtaaagaagacctgaagttggacctcggggagaaagtggagaggagcgtggtgacattgttgcagcgagccactgagctcttctacgagggcaggagggacg

SEQ ID NO: 450665 - DNA, 120 bp, Artificial Sequence
  ENSG00000155666_3 (sequence is synthesized)
agtgtctgcagagcagcgaggtgatcctggactactcctgggagaagctcaacacgggcacatggcaggacgtagacaaagactggcgccgggtctacgccatcggctgcctcctgaaag

SEQ ID NO: 450666 - DNA, 120 bp, Artificial Sequence
  ENSG00000155666_4 (sequence is synthesized)
ccctgtgtctgtgccaggcacctgaggatgccaacactgtggccgcagccctgcgggtctgtgacatgggcctgctgatgggggcagccatcctgggggacatccttcttaaagtcgctg

SEQ ID NO: 450667 - DNA, 120 bp, Artificial Sequence
  ENSG00000155666_5 (sequence is synthesized)
ccatcctccagacacacctccctggaaagaggcctgcccgtggctccctcccagagcaaccctgcacaaagaaagcaagggcggaccatggtttgattccagatgtgaagttagaaaaaa

SEQ ID NO: 450668 - DNA, 120 bp, Artificial Sequence
  ENSG00000155666_6 (sequence is synthesized)
cagtcccccggctgcaccgtccgtccctccagcatttcagggagcagtttttggttccagggaggcccgtgatcctgaaaggcgtggctgaccactggccgtgcatgcagaagtggagtt

SEQ ID NO: 450669 - DNA, 120 bp, Artificial Sequence
  ENSG00000155666_7 (sequence is synthesized)
tggagtatatccaggagatcgctggctgccgaactgtcccagtggaagttggttcgaggtacacagatgaggaatggtcccagaccctcatgacggtcaacgagttcatcagcaaataca

SEQ ID NO: 450670 - DNA, 120 bp, Artificial Sequence
  ENSG00000155666_8 (sequence is synthesized)
tcgtgaatgagccaagggacgtcgggtaccttgctcagcaccagctctttgaccagatcccggagttgaagcaggacatcagcatccccgactactgcagcctgggcgatggggaggagg

SEQ ID NO: 450671 - DNA, 120 bp, Artificial Sequence
  ENSG00000155666_9 (sequence is synthesized)
aggaaatcaccatcaatgcctggtttggtccccagggaaccatctccccactacatcaggatccccagcaaaacttcctagtgcaggtgatggggaggaagtacatccggctgtattccc

SEQ ID NO: 450672 - DNA, 120 bp, Artificial Sequence
  ENSG00000155666_10 (sequence is synthesized)
gacgtggagaatcccgacctggaaaagttccccaagtttgccaaggccccattcctgtcctgcatcctgtctcctggagagatcctgttcatcccggtgaaatactggcattacgtgcgg

SEQ ID NO: 450673 - DNA, 120 bp, Artificial Sequence
  ENSG00000155666_11 (sequence is synthesized)
gctctggatttgagcttctcggtcagcttctggtggtcgtagccaggataggagctgaaagggcctgacatgcagacagcattcatctgttcactaatttcctgggtcctggaatctata

SEQ ID NO: 450674 - DNA, 120 bp, Artificial Sequence
  ENSG00000155666_12 (sequence is synthesized)
gagacaagcaggactgaacctgtgtcctgaagagccttcactgcccagtggcagccctggggggctgagctccagcactggacaggcacagagcaggggctgcccaggaaggagcacact

SEQ ID NO: 450675 - DNA, 120 bp, Artificial Sequence
  ENSG00000155666_13 (sequence is synthesized)
ccaggccaggggtgcatggcagaggaaggtggggagagcccagaaggacattgcagacagacagcctgcatggggactctggcatcagaaagccgaatgtttttgggaaacgggtgggtc

SEQ ID NO: 450676 - DNA, 120 bp, Artificial Sequence
  ENSG00000155666_14 (sequence is synthesized)
acacaggcaggggtgaaacatgggctctgaggttggctacctgattcaaacccggccgcgctgtgcacctgctgggtgacttggccaggatcccccacttcgctgtgcccatatggaaaa

SEQ ID NO: 450677 - DNA, 120 bp, Artificial Sequence
  ENSG00000155666_15 (sequence is synthesized)
gagggcaaggccagtcctcactgccgagggccgagaaggcggtgccgagcccctgctgctgcatgaaccttagccgctgtcactgatcccaattactctgatccttttgcccttccttcc

SEQ ID NO: 450678 - DNA, 120 bp, Artificial Sequence
  ENSG00000155666_16 (sequence is synthesized)
cataacggcctgctggacgccacagcctgaatactggagagagctgggcattgcccaggtcacaggagagagtccgtagagacctgcgcaggagccgggacccctgctgagcagtgggag

SEQ ID NO: 450679 - DNA, 120 bp, Artificial Sequence
  ENSG00000155666_17 (sequence is synthesized)
ctttctgtcatccccatggctcaaggataacctacctgcctgcagagaagtgcgaaggtcttgctggatgacttttcacccgcactcacccaggagcaggctcccaagtgaagaaaccac

SEQ ID NO: 450680 - DNA, 120 bp, Artificial Sequence
  ENSG00000155666_18 (sequence is synthesized)
cgaaccatcaccagctcctagaagcctccctcctaccaccttctagtcaccatcccccagaagtaatgactctcaaacctgggggatttgaggccagggggagagccaggctctatgctt

SEQ ID NO: 450681 - DNA, 120 bp, Artificial Sequence
  ENSG00000155666_19 (sequence is synthesized)
tctgtaattgtgtctcgtttgtgtgcacgcaggtttgttttatgttttggccattaagattttccccagccctctgttttttgttttttaaactaaatagagatgggatcttgctatgtt

SEQ ID NO: 450682 - DNA, 120 bp, Artificial Sequence
  ENSG00000155666_20 (sequence is synthesized)
aaccagacttaccggccctgtctgcaaagctgcacagcactgtgtatgagccacacagccttgagcagggagccccacctctccatgccggttcctcatcagtgaagctggggatgacag

SEQ ID NO: 450683 - DNA, 120 bp, Artificial Sequence
  ENSG00000155666_21 (sequence is synthesized)
tccttgtctctgcacgtgaggttttccgaggatgaaaggggaccacatgcaaagcacacttagtactatgcccaacagatattagcagtgacgatgccaatgtgtgtctttctgctagtt

SEQ ID NO: 450684 - DNA, 120 bp, Artificial Sequence
  ENSG00000155666_22 (sequence is synthesized)
cccctcaccgtctcaccttcccctctcctcccctcctgggctcagtgcggctggagcagtgagcgtgagtaggagggaggcagcaggtgaggctaggaaggtgacaggacgtgggtgatg

SEQ ID NO: 450685 - DNA, 120 bp, Artificial Sequence
  ENSG00000155666_23 (sequence is synthesized)
cagcggcagcccgtttctttcagcttcttggtgggcttgctgaagtctcacccaggcgaggcgatacctccagctgctcctgtctctctgctcctgggtttggatgagatactacaacta

SEQ ID NO: 450686 - DNA, 120 bp, Artificial Sequence
  ENSG00000155666_24 (sequence is synthesized)
gctgatgtctgttttggggtcaatctctcccaccccttgggtctatgtgcctgttccaaagagcacccccaggaacagagcatggtttactctgaaggcttcaggtcctggtgccaacac

SEQ ID NO: 450687 - DNA, 120 bp, Artificial Sequence
  ENSG00000155666_25 (sequence is synthesized)
acaggcctcacttgcaacacacccaagcaagtcacttaacctcctttgagcctcggtttccttgtctgtagagtggcagagtactgacccacagaaagaaatgactaagactgtactaga

SEQ ID NO: 450688 - DNA, 120 bp, Artificial Sequence
  ENSG00000155666_26 (sequence is synthesized)
ctaagactgtactagacacttggtagtggaattatgggatgtttctgacatttttctaaatgctttgctatgttttccgaatttcctacaatgcatattattattattattatttttgag

SEQ ID NO: 450689 - DNA, 120 bp, Artificial Sequence
  ENSG00000155666_27 (sequence is synthesized)
ttcagcagagaggcagcagagaaacttcgtggttcctgagggaaacagcttaaagcgattgtaaagcaagggcggaccatggtttgattccagatgtgaagttagaaaaaacagtccccc

SEQ ID NO: 450690 - DNA, 120 bp, Artificial Sequence
  ENSG00000155666_28 (sequence is synthesized)
tactctgctatatgtgtgtccgctgcttttaggcaaccagccgctgcccctgggccgcaaggcaggctggaaacgattccgccgtcaggtcccaaatatgagccgcgagaaatgcagccc

SEQ ID NO: 450691 - DNA, 120 bp, Artificial Sequence
  ENSG00000155666_29 (sequence is synthesized)
gcacagaggccagagtgggcttggggcagcagtggagtgaggccaccagctgactgtcagggtctctctccccaggtgatggggaggaagtacatccggctgtattccccgcaggagtca

SEQ ID NO: 450692 - DNA, 120 bp, Artificial Sequence
  ENSG00000155666_30 (sequence is synthesized)
cgtcaggtcccaaatatgagccgcgagaaatgcagccccggggaaggcgctgaggagggaagggggtctgaggcctcggggctcaaggccagtgcggggaatcgccgtgctcaggaggac

SEQ ID NO: 450693 - DNA, 120 bp, Artificial Sequence
  ENSG00000155666_31 (sequence is synthesized)
aggaggtgcgcaggcgttggggccacacggacgacccaaacacaagactgtgtgccccttagagagccaaagggatccctgtgccatgaattaaagctttctggaaaatgttccaaactt

SEQ ID NO: 450694 - DNA, 120 bp, Artificial Sequence
  ENSG00000155666_32 (sequence is synthesized)
caaaacttcctagtgcaggttgacgtggagaatcccgacctggaaaagttccccaagtttgccaaggccccattcctgtcctgcatcctgtctcctggagagatcctgttcatcccggtg

SEQ ID NO: 450695 - DNA, 120 bp, Artificial Sequence
  ENSG00000155714_0 (sequence is synthesized)
attgggactgactccagcctctgctccgggaggccctcccgggctgcctgacctcccgggaccatgcagaaggcctcccacaaaaacaaaaaagaaagaggagtcagcaacaaggtcaaa

SEQ ID NO: 450696 - DNA, 120 bp, Artificial Sequence
  ENSG00000155714_1 (sequence is synthesized)
acatctgtacacaacttgagcaaaacacagcagaccaaactcactgtgggtagcctgggattaggcctcatcatcatccagcatggaccctacctccagatcacccacctcatcaggaag

SEQ ID NO: 450697 - DNA, 120 bp, Artificial Sequence
  ENSG00000155714_2 (sequence is synthesized)
ggggctgcagccaacgacgggaaactccagccaggtgatgttctgattagtgttggccatgccaatgtgttaggatatactcttcgagaatttttacagcttttgcaacatatcactatt

SEQ ID NO: 450698 - DNA, 120 bp, Artificial Sequence
  ENSG00000155714_3 (sequence is synthesized)
ggaacagtgctacaaatcaaggtttaccgagattttattaacattcctgaagaatggcaagaaatatatgatttaatccctgaggccaaattcccagtaacaagcacaccaaagaaaatt

SEQ ID NO: 450699 - DNA, 120 bp, Artificial Sequence
  ENSG00000155714_4 (sequence is synthesized)
gagctggcaaaagatgaatctttcacaagcagtgatgataatgaaaatgtagatttagataaaagacttcaatattatagatatccgtggtcaactgtgcatcaccctgcaaggagacca

SEQ ID NO: 450700 - DNA, 120 bp, Artificial Sequence
  ENSG00000155714_5 (sequence is synthesized)
aaagacattaattgtgacgtgatgattcacagagacgacaagaaagaagtgagggccccttctccatactggataatggtgaagcaagacaatgaaagctcttcctcctctacctcctct

SEQ ID NO: 450701 - DNA, 120 bp, Artificial Sequence
  ENSG00000155714_6 (sequence is synthesized)
acctcagatgcattttggctggaagattgtgcccaagttgaagagggtaaagcccaactggtatcaaaggttggttagcaaatctgtggtcatatgagcatttatcttgcagacacccaa

SEQ ID NO: 450702 - DNA, 120 bp, Artificial Sequence
  ENSG00000155714_7 (sequence is synthesized)
gttttgtgcctcaccaggcacaagtttgctgtacttatcaaggactgtctgtagactcaccaattctcttctcttatgactgcgttataaagcctttagagatgttcttcaacaggatta

SEQ ID NO: 450703 - DNA, 120 bp, Artificial Sequence
  ENSG00000155714_8 (sequence is synthesized)
tctaaagacttccttgggttcttgcaggcctcacaaatcttattttcagaataagaccctcctttttgagaagaatttctttcttttagaaaatgccgtagagaaatccaatatcagaat

SEQ ID NO: 450704 - DNA, 120 bp, Artificial Sequence
  ENSG00000155714_9 (sequence is synthesized)
gtctgaacatagtagagaatgtcactttatgtaaacactacatttttctttaaatatttagtttctctcttttttttggtaaacttcaagtactataattaaaataactaagagacataa

SEQ ID NO: 450705 - DNA, 70 bp, Artificial Sequence
  ENSG00000155714_10 (sequence is synthesized)
gcatggaccctacctccagatcacccacctcatcaggaagggggctgcagccaacgacgggaaactccag

SEQ ID NO: 450706 - DNA, 120 bp, Artificial Sequence
  ENSG00000155719_0 (sequence is synthesized)
aatgtctcaggaacctacgacatactcccttttcctattcctttttctgagccatggagtgtcgagttatacagtgccaaattccaggcaggatttgcatccattgttgcaaaacatggc

SEQ ID NO: 450707 - DNA, 120 bp, Artificial Sequence
  ENSG00000155719_1 (sequence is synthesized)
ggaagaaataatagatggaagctatctgaatgcactgctggatctcatacagtttcaaagctcccacgtgtggacggatgacctgtcccacagagtcctggcctatctgaattcccggaa

SEQ ID NO: 450708 - DNA, 120 bp, Artificial Sequence
  ENSG00000155719_2 (sequence is synthesized)
tgttgccttcaccatccccagcctgcaggcagccgtggaaaaccacctggagcagcgtctgcaccagccccagaagctgctggaggacctgaggaagacagacgcccagcagttccgcac

SEQ ID NO: 450709 - DNA, 120 bp, Artificial Sequence
  ENSG00000155719_3 (sequence is synthesized)
tgccatgaaatgcctcttagaagacaagaaggacggcttggacctgaaagacatcatcatcgacttaggagagattcgagaacgagccttgcagagccctggcgtgaaccgcagcctgtt

SEQ ID NO: 450710 - DNA, 120 bp, Artificial Sequence
  ENSG00000155719_4 (sequence is synthesized)
tctcatcacactggagaggtgtttccagatgctgaactccctggagtgtgtggagatcctgggcaaggtgctgagggggtcctcagggagctttctccagccagacatcacagagcggct

SEQ ID NO: 450711 - DNA, 120 bp, Artificial Sequence
  ENSG00000155719_5 (sequence is synthesized)
ccctcgggacctgcgcgaggatgcctttaagaacctatctgcagtgttcaaagatctctacgacaaaacctcggctcattcccagagagctctctattcctggatgactggaatactgca

SEQ ID NO: 450712 - DNA, 120 bp, Artificial Sequence
  ENSG00000155719_6 (sequence is synthesized)
gacatcctccaatgccactgatgactctgcttcatgggtcagtgcggaacacttatgggttttgggcagatacatggttcacctatcgtttgaagaaattacgaaaattagtcctataga

SEQ ID NO: 450713 - DNA, 120 bp, Artificial Sequence
  ENSG00000155719_7 (sequence is synthesized)
aattgggctgtttatcagctatgacaacgccaccaagcagctggacatggtctatgacatcacacctgagctggcccaggcgtttctggagaggatcagctcctccaactttaacatgag

SEQ ID NO: 450714 - DNA, 120 bp, Artificial Sequence
  ENSG00000155719_8 (sequence is synthesized)
gaatacctccaccatccacaggctggggctgctggtttgtttctacaatgacctggaattgctggatgccactgtggctcaagtcctgctttaccagatgatcaagtgcagccacctgag

SEQ ID NO: 450715 - DNA, 120 bp, Artificial Sequence
  ENSG00000155719_9 (sequence is synthesized)
gggcttccaggctggcgtccagaagctcaaagcagaactcctggacattgccatggagaaccagaccctcaatgagaccctgggttctttgtcggatgcagttgtaggtttgacctacag

SEQ ID NO: 450716 - DNA, 120 bp, Artificial Sequence
  ENSG00000155719_10 (sequence is synthesized)
ccaactggaatccctctcccccgaggctgtgcacggagccatctccaccctcaaccaggtctcaggttgggccaagagccaggtcatcatcttgtctgccaaatacttggcccatgagaa

SEQ ID NO: 450717 - DNA, 120 bp, Artificial Sequence
  ENSG00000155719_11 (sequence is synthesized)
ggtgctgtctttctacaatgtcagccagatgggcgcactgctggctggggtcagcacccaggccttctgcagcatgaaacgcaaggacatctcgcaggtcctgagaagtgccgtctccca

SEQ ID NO: 450718 - DNA, 120 bp, Artificial Sequence
  ENSG00000155719_12 (sequence is synthesized)
gtatgtatccgacttgtcacctgcccagcagcaaggtatcctcagcaagatggtccaagcggaagacactgccccaggcatcgtggagatacaaggggctttctttaaggaagtgtctct

SEQ ID NO: 450719 - DNA, 120 bp, Artificial Sequence
  ENSG00000155719_13 (sequence is synthesized)
ctttgatttaaggaggcaacctggattcaactctacagtcctgaaggataaggaacttggaaggagccaggctctgttcctgtatgagcttctgttaaagaccaccagaaggcctgagga

SEQ ID NO: 450720 - DNA, 120 bp, Artificial Sequence
  ENSG00000155719_14 (sequence is synthesized)
gcttttgagtgctgggcagctggtcaaaggcgtgacctgctcacacattgatgccatgagcactgacttctttctggcccatttccaggattttcagaacaacttcgccctgctttcacc

SEQ ID NO: 450721 - DNA, 120 bp, Artificial Sequence
  ENSG00000155719_15 (sequence is synthesized)
taattgtttggcgtggaaatactgggaagtttccagattgtctatgccacctttcctcttggctgcactcccggcccgctacctggcttctgtcccagcctcccagtgtgtgccctttct

SEQ ID NO: 450722 - DNA, 120 bp, Artificial Sequence
  ENSG00000155719_16 (sequence is synthesized)
gatcagcctggggaagagctggttggactccttggttttagattcccacaaaaagacttcagtcctcaggaaagtgcagcagtgcctggacgactccattgctgatgagtacactgtgga

SEQ ID NO: 450723 - DNA, 120 bp, Artificial Sequence
  ENSG00000155719_17 (sequence is synthesized)
catcatggggaacctgctgtgtcacttgccggcagccatcatcgacagggggatctcccccagggcttgggcgactgctctacacggcctcagagactgcccagacctcaaccctgagca

SEQ ID NO: 450724 - DNA, 120 bp, Artificial Sequence
  ENSG00000155719_18 (sequence is synthesized)
aaaggctgcagtgaggctcaagctcctgggacagtatggactccctcagcactggacagccgagaccacgaaggacttgggaccctttctagtacttttctcaggagatgaattaagctc

SEQ ID NO: 450725 - DNA, 120 bp, Artificial Sequence
  ENSG00000155719_19 (sequence is synthesized)
tatagccacaaagtttcctgagatccttctgcaagcagcttccaagatggccaggaccctgcccactaaagaattcctctgggctgtctttcagtctgttcggaacagcagtgataagat

SEQ ID NO: 450726 - DNA, 120 bp, Artificial Sequence
  ENSG00000155719_20 (sequence is synthesized)
ccccagctatgaccctatgcctggttgccatggagtcgtggccccctcttctgatgacatcttcaagttggccgaagccaacgcctgctgggccctggaggacctgcggtgcatggagga

SEQ ID NO: 450727 - DNA, 120 bp, Artificial Sequence
  ENSG00000155719_21 (sequence is synthesized)
agacacattcatcaggaccgtggaactgctgggagctgtccagggtttcagccggcctcagctgatgaccctgaaggagaaagcaatacaggtttgggacatgccatcttactggagaga

SEQ ID NO: 450728 - DNA, 120 bp, Artificial Sequence
  ENSG00000155719_22 (sequence is synthesized)
acaccatatcgtctccctggggcgcattgctctggctcttaatgagagtgagctggagcagctggacctcagctccatagacactgtggcttccctaagctggcaaacagaatggacccc

SEQ ID NO: 450729 - DNA, 120 bp, Artificial Sequence
  ENSG00000155719_23 (sequence is synthesized)
gggacaggctgaatccattttgcaagggtacctggatgattcaggatacagtatccaggacctgaagagctttcatttggtaggacttggtgcaaccctgtgtgctataaacatcactga

SEQ ID NO: 450730 - DNA, 120 bp, Artificial Sequence
  ENSG00000155719_24 (sequence is synthesized)
aatcccacttataaagatctcagaattcagggtggtagtggccagaattgggaccctgctctgcagcacacatgtcttagccgagtttaagaggaaggctgaagttgtgtttggggatcc

SEQ ID NO: 450731 - DNA, 120 bp, Artificial Sequence
  ENSG00000155719_25 (sequence is synthesized)
cactgagtggaccagttctgtcttgcaggagcttgggaccattgcagctggattaactaaggcagagctccggatgcttgacaaggatttgatgccatatttccagccatcagcaataaa

SEQ ID NO: 450732 - DNA, 120 bp, Artificial Sequence
  ENSG00000155719_26 (sequence is synthesized)
atgccttcctgatgagatattcaaagagctgtccgcggagcagatcgcctccctgggtccggagaacgccgcggcggtgacccacgcccagcgccggcggctcagtccactgcagctgca

SEQ ID NO: 450733 - DNA, 120 bp, Artificial Sequence
  ENSG00000155719_27 (sequence is synthesized)
gagcctccagcaggcgctagatggcgccaagactcactcctggcaggacgcgcccgctagcgccggtcccactagaacctcatcctcgcgttctcccgcaggagctctccagtcgtgggg

SEQ ID NO: 450734 - DNA, 120 bp, Artificial Sequence
  ENSG00000155719_28 (sequence is synthesized)
tctttggcttggttgtcccctgctggttctaatggccaagctcctgtggtgagtggcctgagcgcatcgtcctgtgttgccccaagcagctggccaacatgtgtagagacaggatgctcc

SEQ ID NO: 450735 - DNA, 120 bp, Artificial Sequence
  ENSG00000155719_29 (sequence is synthesized)
agatggtgggacacccttccctggatccagaccctcatctagggcagggaaaccctggggccttgatggtgaaaatgcaccccaaatgaaaaataattattaaaaatgatcttgcaaatt

SEQ ID NO: 450736 - DNA, 120 bp, Artificial Sequence
  ENSG00000155719_30 (sequence is synthesized)
gccccgaagagtggctggggagcaggcatttgtgcgtcttgcaagcttcgacagataggaagtcccaggcggggactgtgacccccgccgctgccctggctgagttcccacctgggccgc

SEQ ID NO: 450737 - DNA, 120 bp, Artificial Sequence
  ENSG00000155719_31 (sequence is synthesized)
cgccgctctcctgcctgcccgctccccgcatgagccccgcggccccgccctgcgccacccgcccgcccgtgggactcagtgcggccaagccgggctccgcaggagaatgtctcaggaacc

SEQ ID NO: 450738 - DNA, 120 bp, Artificial Sequence
  ENSG00000155719_32 (sequence is synthesized)
ttcgcctgtattttgctcctgcgctggtagcttgggtttgggcacagtgccatctggggttctaaacttcctggacaaaggccagctgctgctgatgggaaactcaatcacctacaggga

SEQ ID NO: 450739 - DNA, 120 bp, Artificial Sequence
  ENSG00000155719_33 (sequence is synthesized)
attccttggtctcgtctgagcagttaggttccgcctgtggttgcacatttggttcatctgaggatgttcaggttatgtgaccttcaacctgggagtccgtggcaactgaaaaacaactca

SEQ ID NO: 450740 - DNA, 120 bp, Artificial Sequence
  ENSG00000155719_34 (sequence is synthesized)
cacacagcattagtcgggatttaagtccagtcacagcagatggcatctcaaatactgagctcaaagcagaactcctggacattgccatggagaaccagaccctcaatgagaccctgggtt

SEQ ID NO: 450741 - DNA, 120 bp, Artificial Sequence
  ENSG00000155719_35 (sequence is synthesized)
atgggttcagacaagtatataataacatgtattcaccattatagtatcatacggagtattttcactgccctaaaaatccttccgggctttgcctgttcattcctctctcactcctaattc

SEQ ID NO: 450742 - DNA, 120 bp, Artificial Sequence
  ENSG00000155719_36 (sequence is synthesized)
ctggcaaccactgatacttttgccttttctagaatatcatatatttggaatcatacagtagatagccttttcagatagacttctttcacttagtaatatgcacttaagttttctccaggt

SEQ ID NO: 450743 - DNA, 120 bp, Artificial Sequence
  ENSG00000155719_37 (sequence is synthesized)
agctcatttctttttagtgctgaatcatatttcattgtcttaatgaaccacagtttatttagccattcacctacagaaggacatttggttgcttccaagttttggcaattatggataaag

SEQ ID NO: 450744 - DNA, 120 bp, Artificial Sequence
  ENSG00000155719_38 (sequence is synthesized)
gcaattatggataaagctgctatcaacatccatatacaggttttcatgtagacgtaagttttcaactcctttgtgtaaataccaaagagtgtgtttgctgggttatatggcaaaaacatg

SEQ ID NO: 450745 - DNA, 120 bp, Artificial Sequence
  ENSG00000155719_39 (sequence is synthesized)
tttgcttttgtaagaaaccaacaaaatgtcttccaaagtggctgtatgattttgcattcccaccagctgtcactgctaattgggcagacctcctttagagatgtcgccaaagatagtgta

SEQ ID NO: 450746 - DNA, 120 bp, Artificial Sequence
  ENSG00000155719_40 (sequence is synthesized)
atgctcttcactgtaggcatttatgatctatacaagaataacagtggattctgggtcagtgcctttattttatcctgccaagttcaagagaaaggttttttcttattctaagagaagact

SEQ ID NO: 450747 - DNA, 120 bp, Artificial Sequence
  ENSG00000155719_41 (sequence is synthesized)
gttatggtaaagtaaaaggaagaaatatataattactcttctattgaggagggagaagaaggacacactgtgatgtaaatggcagaaattcaataatttaattcaaactaaagagaacgg

SEQ ID NO: 450748 - DNA, 120 bp, Artificial Sequence
  ENSG00000155719_42 (sequence is synthesized)
gaatgtattgaattcaggaatggaatgtaacgggaaactccactggtggtcttcaggcatggctgaatcccgtgtctcaaatgatatcttcaggaatatgttcctcccatccctcagctc

SEQ ID NO: 450749 - DNA, 120 bp, Artificial Sequence
  ENSG00000155719_43 (sequence is synthesized)
tgtgttccttggtgtggtctttactttttccacttggtaatatgaatgtcctccaatatcctcccctactgccagagataccagagaaaggagagcttctctgatagttccatcaaaact

SEQ ID NO: 450750 - DNA, 120 bp, Artificial Sequence
  ENSG00000155719_44 (sequence is synthesized)
cccagggatgactctgattggtcagcctgcatcacatgccaattttcttggtcaaggaagtgggaccatgtgattgacatgagtataagacaatctattcctgaaagaaaagggtgctgg

SEQ ID NO: 450751 - DNA, 120 bp, Artificial Sequence
  ENSG00000155719_45 (sequence is synthesized)
gccagagcagcctacttttccaggtgggagagttaggcagtcacatctgtagcttgtatctgatcatatctgccttctctcgctctttctttcctctcctcctcacttccttcctctccc

SEQ ID NO: 450752 - DNA, 120 bp, Artificial Sequence
  ENSG00000155719_46 (sequence is synthesized)
cctaacatttgcatgtatcatttgtagtcagttcttcaactttagctcccaatcaaccttaaatgcaggtttctagattaatagtcagacctgacggaactacattaacagatagttcag

SEQ ID NO: 450753 - DNA, 120 bp, Artificial Sequence
  ENSG00000155719_47 (sequence is synthesized)
ctcaaaaaccaatataagggaaaaaactattatagaagccagagggatgaacagagagattgaaatcttaaagctattcatttttcaacagttaatattgcctaaaagtgttggtattaa

SEQ ID NO: 450754 - DNA, 120 bp, Artificial Sequence
  ENSG00000155719_48 (sequence is synthesized)
ttgtcttggaatcattacatatacactggtctcgtcactcaaggaaatttattttaacttatcaccttgcaggctgagcttgcattttccgggtttcagtggcaaggacaatttaatacc

SEQ ID NO: 450755 - DNA, 120 bp, Artificial Sequence
  ENSG00000155719_49 (sequence is synthesized)
atatcttcaaagtaattttatttaaattgtatttttgcactttcattttaaagtgagcgtgcctgatagttgaggagcccaaattgctctgagtcaactagtgaaacctgattatgaaga

SEQ ID NO: 450756 - DNA, 120 bp, Artificial Sequence
  ENSG00000155719_50 (sequence is synthesized)
cttaataagaaaaatttgaaaactaacttgaatctccatcttttctccatagccaaacaccttcactggctaagagtatgggccctggaatcagactgcctgggttttgatcctagaacc

SEQ ID NO: 450757 - DNA, 87 bp, Artificial Sequence
  ENSG00000155719_51 (sequence is synthesized)
ggccctggaatcagactgcctgggttttgatcctagaaccatcattttcttttctctttcttcttcttcttttttttttttagaaaa

SEQ ID NO: 450758 - DNA, 120 bp, Artificial Sequence
  ENSG00000155719_52 (sequence is synthesized)
ccgacctcaggtgatctgcccgcctttgtctcccaaagtgctgggattacgggcaggagctacggcgcctggccagaacgatcattttctagctgtgtgatcttggcctagttacttaac

SEQ ID NO: 450759 - DNA, 120 bp, Artificial Sequence
  ENSG00000155719_53 (sequence is synthesized)
ctctccttgcctcagtttgctcatctgcaaactagggatactattaatacttacctcatagtgttatttaggaggattagatgagatagtatgtgtaaagtggtcaaagtggtgccagca

SEQ ID NO: 450760 - DNA, 120 bp, Artificial Sequence
  ENSG00000155719_54 (sequence is synthesized)
cacagtatgcactcaagaaatgttagctacaataaatgttagctattaccactttggatatacagtcccattaagtcaaagacatataagtctaagcatggtgttactgcatcccccgcc

SEQ ID NO: 450761 - DNA, 120 bp, Artificial Sequence
  ENSG00000155719_55 (sequence is synthesized)
cccatagtagctgtgagctttgtaatcatggaggacaacttgatgaggacactgaccagtccgattttcagaaacatgagaaatcttcctgaagccagtctattacatgaaggcagcaaa

SEQ ID NO: 450762 - DNA, 120 bp, Artificial Sequence
  ENSG00000155719_56 (sequence is synthesized)
atgaagcatgtcaaataatatatattgcccacgacttttgcattatgctaggtgctggggactcattggtaaactacctggatatggtccttttcttttgggagcctacttggtgataca

SEQ ID NO: 450763 - DNA, 80 bp, Artificial Sequence
  ENSG00000155729_0 (sequence is synthesized)
acttccgcgtccgccccgcggcgtccggcggccgcgccgagggtctggcgggccgcaggtcagtctgggaagctgccgac

SEQ ID NO: 450764 - DNA, 120 bp, Artificial Sequence
  ENSG00000155729_1 (sequence is synthesized)
cggaaggcggcggggcgccctgaggaagggcacgggccgcgctggtaacgcgcgcgccccgggctgcaggctcgggcttcgggccgatttggggtctccaggccgcggaagaccgtggcg

SEQ ID NO: 450765 - DNA, 120 bp, Artificial Sequence
  ENSG00000155729_2 (sequence is synthesized)
aagaccgtggcggggctttctggctccccagctcctcccggctcttcccgcttcggaagaggagtgtgagccccttgagcgatgtttttcaaagtggggttcgcgggcagatcccgaccc

SEQ ID NO: 450766 - DNA, 120 bp, Artificial Sequence
  ENSG00000155729_3 (sequence is synthesized)
ctcctcagactttctgaggaactgtgtgctgtggccggagtgtcttcgttttcccaagcgtccctgatggttttgatgcagagggagaccaagacatcattgttttgaagtttctgaaag

SEQ ID NO: 450767 - DNA, 120 bp, Artificial Sequence
  ENSG00000155729_4 (sequence is synthesized)
tgttgggcggcaaaaattcaggtgcctgggggagaaatggaaggccacaaggcagaagaagaggtgctagatgttctccgactgaacgtgggtggctgtatttacacagcccggcgggag

SEQ ID NO: 450768 - DNA, 120 bp, Artificial Sequence
  ENSG00000155729_5 (sequence is synthesized)
tccttgtgccgcttcaaggactccatgttggcatctatgttcagtggtcgctttcctctaaaaacagatgagtcaggggcttgtgttattgaccgtgatggacgtctatttaaatacctt

SEQ ID NO: 450769 - DNA, 120 bp, Artificial Sequence
  ENSG00000155729_6 (sequence is synthesized)
ttggattaccttcatggagaagttcagattcccacagatgagcaaacccgcatcgccctacaggaagaggctgattactttggcatcccttatccatacagcctgtctgaccatttggcc

SEQ ID NO: 450770 - DNA, 120 bp, Artificial Sequence
  ENSG00000155729_7 (sequence is synthesized)
aatgaaatggagacatattctttaaggtcaaatatagaacttaaaaaggctttaacagacttctgtgattcatatggcttagtctgcaataaaccaacagtttgggttctccactatctt

SEQ ID NO: 450771 - DNA, 120 bp, Artificial Sequence
  ENSG00000155729_8 (sequence is synthesized)
aacacatctggtgcaagctgtgagagtagaattattggtgtatatgccacaaaaactgatggaacagacgctattgaaaagcagctgggaggaagaattcacagcaaaggcatttttaaa

SEQ ID NO: 450772 - DNA, 120 bp, Artificial Sequence
  ENSG00000155729_9 (sequence is synthesized)
agagaggcgggaaataatgttcagtacatttggagctattattcagtagcagagttgaagaaaatgatggatgcctttgatgcttgggaaggaaaaggtgttagctactggcgggtgcct

SEQ ID NO: 450773 - DNA, 120 bp, Artificial Sequence
  ENSG00000155729_10 (sequence is synthesized)
catgagctgatagagtgttggactctagaagaacggcctttacttggaagcctgcgtcacatggctccaattcgaaagaggcgactgataacgttcaatgaagcggacgaaagtgtgaac

SEQ ID NO: 450774 - DNA, 120 bp, Artificial Sequence
  ENSG00000155729_11 (sequence is synthesized)
tataagactggtcctaagccagttagatttttgggcccttccacaagtacccaaattaaagtcaagaactcggcctcagtcacggtgtctccagccagtgccatccagacgtcggctggg

SEQ ID NO: 450775 - DNA, 120 bp, Artificial Sequence
  ENSG00000155729_12 (sequence is synthesized)
ttccagagccacggccctggtgggcacgggggcacctgggcatcctcaggcttcccctggggctgcgagcgctgaaaatggaggcacgcacttacctccagctaaggtgctactctccga

SEQ ID NO: 450776 - DNA, 120 bp, Artificial Sequence
  ENSG00000155729_13 (sequence is synthesized)
caagaagcctacaccccagcgggtgataaagctgaagaggactccgctgtgcgccaccgcgccttgcctgccctcccccacggccacgaggcaggccaactccctcaagccgcttcccgg

SEQ ID NO: 450777 - DNA, 120 bp, Artificial Sequence
  ENSG00000155729_14 (sequence is synthesized)
cgaagctgcccgtgccttgggagtgcggactgagaacgggaagaacaagggaaattgatgaaagtggtggacttgaaatttcccgttcatctcccaaagctttcaacccattcgacgcaa

SEQ ID NO: 450778 - DNA, 120 bp, Artificial Sequence
  ENSG00000155729_15 (sequence is synthesized)
agaagtgacactttcttaatgcagcagaggggaagcttaggtttatgttgaggattctgttcctggaattgtgtgagctaggaatggaggaggggagactttcaatggttaaggctccat

SEQ ID NO: 450779 - DNA, 120 bp, Artificial Sequence
  ENSG00000155729_16 (sequence is synthesized)
ttctcattttcccaacttttatatgattgtctatgggcagtttgaatttctggttttcaatttattttttaatgattaattcgtattaaggcaacaagacagtacaacaaataatctcta

SEQ ID NO: 450780 - DNA, 120 bp, Artificial Sequence
  ENSG00000155729_17 (sequence is synthesized)
gagaggtccactttgttgctgaagtaaacgttacttgttgcaacccgaggatgggcatgaggtttggccttaggtattcctgtctgggaaaatggagggggtgatattagtggttccctg

SEQ ID NO: 450781 - DNA, 120 bp, Artificial Sequence
  ENSG00000155729_18 (sequence is synthesized)
tactatatcacagccaagagagattagagagagaaaatgtagatcaaggcgagctgcctacaaattactctgtctccaaaggcaacgtgaaaagaaatgatggggaggaaaaaaccccat

SEQ ID NO: 450782 - DNA, 120 bp, Artificial Sequence
  ENSG00000155729_19 (sequence is synthesized)
agattgaattagcactttgactctcacttaattcaacgattttctttcctagattggcttttcttactcttttctgttagtagatttatttataaacaccacaagaagatctcttgggat

SEQ ID NO: 450783 - DNA, 120 bp, Artificial Sequence
  ENSG00000155729_20 (sequence is synthesized)
caccacaagaagatctcttgggatcagaattatataatatctttgaagtaaattattaaaatatcctatttaatttgaatagtgaagttttgaaaatactttgaaaaagagaagtaaaag

SEQ ID NO: 450784 - DNA, 120 bp, Artificial Sequence
  ENSG00000155729_21 (sequence is synthesized)
atttgtttttcagaaatgaccactgaagattcattctgattatacaatatgatttttatgcataaaatttccatgtaacttgaatttaatatttttaaacagaatattttgactaatcct

SEQ ID NO: 450785 - DNA, 120 bp, Artificial Sequence
  ENSG00000155729_22 (sequence is synthesized)
ctattttttcatgactattcagttgtgtgtgtttattcgtaaatgttatgttttgtaattggatcacatatttctactttcagtgagagtatgccttcactatgttaaaaaataagctca

SEQ ID NO: 450786 - DNA, 120 bp, Artificial Sequence
  ENSG00000155729_23 (sequence is synthesized)
taaaacagggtactttttattcaaatgcttatcattgtactttcattgctttgaaagagtaaagtaagtatactcaaaacattacgttttacaaaatcaaataaaacttttccataaaaa

SEQ ID NO: 450787 - DNA, 89 bp, Artificial Sequence
  ENSG00000155729_24 (sequence is synthesized)
ccaagccccattcatgagggagaccaagacatcattgttttgaagtttctgaaagtgttgggcggcaaaaattcaggtgcctgggggag

SEQ ID NO: 450788 - DNA, 120 bp, Artificial Sequence
  ENSG00000155729_25 (sequence is synthesized)
aaaaaagacaaagtaagctcaaatactgcatttctttttttagaaagtattcttttgagtcttacaatgtatttgtcatctcatgataacactgaggcagtttacttacaaatctttaaa

SEQ ID NO: 450789 - DNA, 120 bp, Artificial Sequence
  ENSG00000155729_26 (sequence is synthesized)
tcccatgagttgctagatattattaatagtttataattcagtaactaggtatgtttctgttagctaggcttatttaatttaattaaataagagttcatttagtacctactgtgcattgga

SEQ ID NO: 450790 - DNA, 120 bp, Artificial Sequence
  ENSG00000155729_27 (sequence is synthesized)
aaaatacttcaaattaagcataaaatatgtaatcaaggaaagggagagaaaataatgttggagaagatgtctaaagagcccttataaaataattacaataatctttaaatgtacactttg

SEQ ID NO: 450791 - DNA, 120 bp, Artificial Sequence
  ENSG00000155729_28 (sequence is synthesized)
aaaactggtcatttttctcaaactacagagtgagagttggtaataataatgctgttttatatccccgataagtagtttacattcagtatctcttagtcctaacacaatcctgtacgctac

SEQ ID NO: 450792 - DNA, 120 bp, Artificial Sequence
  ENSG00000155729_29 (sequence is synthesized)
cagaagggctttgacactttcataaggatcacaggttacgtgttctgttctatgcctaagcattttttttcttaattaacaaccatgtattgagtgtctgttaggtgcaaagtatgataa

SEQ ID NO: 450793 - DNA, 120 bp, Artificial Sequence
  ENSG00000155729_30 (sequence is synthesized)
caagtcctaaaattggatccaaagataaataagacttattccatcctcaaataatcctgaaagctagtaaagactgactgccagtcacacaatggataaaagatctgggcctggtgtcat

SEQ ID NO: 450794 - DNA, 78 bp, Artificial Sequence
  ENSG00000155729_31 (sequence is synthesized)
ggaggattgcctgagcccaggagtttgagggtggagtgagctgttaaaaggagaggaagaggcttttaaaaactgcat

SEQ ID NO: 450795 - DNA, 75 bp, Artificial Sequence
  ENSG00000155729_32 (sequence is synthesized)
tccagcctgggtgacagagcaagacataaaaggagaggaagaggcttttaaaaactgaaggccgaggcaggtgga

SEQ ID NO: 450796 - DNA, 61 bp, Artificial Sequence
  ENSG00000155729_33 (sequence is synthesized)
ctgtatcagctgttcttccttcaggtgtcgtgccagctccagtccttcttcctttcctcaa

SEQ ID NO: 450797 - DNA, 120 bp, Artificial Sequence
  ENSG00000155729_34 (sequence is synthesized)
caggtgtcgtgccagctccagtccttcttcctttcctcaactttgcccccctcactttccttcctttttcctttccagtcatacccctcaagaggcaggatgacatctttcagctttcta

SEQ ID NO: 450798 - DNA, 120 bp, Artificial Sequence
  ENSG00000155729_35 (sequence is synthesized)
ttttatatttaatttactttgagacacttatgctcaagttggagaacaaactccatggtgttctctgtgtctctctttgtgcctctggactggcaagatgtccaggagcccactgcctta

SEQ ID NO: 450799 - DNA, 63 bp, Artificial Sequence
  ENSG00000155729_36 (sequence is synthesized)
gcctctggactggcaagatgtccaggagcccactgccttagaaagctgaaggagggctgggca

SEQ ID NO: 450800 - DNA, 120 bp, Artificial Sequence
  ENSG00000155744_0 (sequence is synthesized)
agttggcaggctgctgcgggaggcggcggcggtaggaagccggagacagcagggtgacagaattggaaaatatttaactcttaacaaatgaattccccacttgaactctgccgaattcct

SEQ ID NO: 450801 - DNA, 120 bp, Artificial Sequence
  ENSG00000155744_1 (sequence is synthesized)
gtgccacctcctcctttagaaaactgatcttaatacagagataaaagaggagtagaaggtaaaagaaaatgctgggaactgaccgttgtgttgtggaagaatggttatcagaattcaagg

SEQ ID NO: 450802 - DNA, 120 bp, Artificial Sequence
  ENSG00000155744_2 (sequence is synthesized)
cattacctgacactcagatcaccagttatgcagcaactttacaccggaaaaaaacacttgtaccagccctctataaagttattcaagattcaaataatgagctcctggagcctgtctgcc

SEQ ID NO: 450803 - DNA, 120 bp, Artificial Sequence
  ENSG00000155744_3 (sequence is synthesized)
atcagctgtttgagctctatcgtagctcagaggttcgacttaagaggttcacactgcagttcttgccagaattgatgtgggtttatttacggcttacagttagccgagacagacagagta

SEQ ID NO: 450804 - DNA, 120 bp, Artificial Sequence
  ENSG00000155744_4 (sequence is synthesized)
atggttgcattgaagcacttctgttaggaatttacaatttggaaatcgctgataaagatgggaacaataaagttctgtctttcactatcccctccttatccaagccttcaatataccatg

SEQ ID NO: 450805 - DNA, 120 bp, Artificial Sequence
  ENSG00000155744_5 (sequence is synthesized)
aaccttcaacaattggatccatggctttgacagaaggggcattgtgtcagcatgatctcatcagagttgtttatagtgatcttcatcctcagagggaaacattcactgcacagaaccggt

SEQ ID NO: 450806 - DNA, 120 bp, Artificial Sequence
  ENSG00000155744_6 (sequence is synthesized)
ttgaagtcctgagttttctcatgctgtgttataattctgctattgtatatatgcctgcctcatcttaccaatctctttgtcggatgggttccagggtttgtgtgagtggctttccacggc

SEQ ID NO: 450807 - DNA, 120 bp, Artificial Sequence
  ENSG00000155744_7 (sequence is synthesized)
aacatgaaaaacactggaaagaactctgtggtcgaatagtattggatcctgaatttatggtgcaacttctcacaggggtttattatgccatgtataatggacagtgggaccttggccagg

SEQ ID NO: 450808 - DNA, 120 bp, Artificial Sequence
  ENSG00000155744_8 (sequence is synthesized)
aagttcttgatgatatcatttatagagcccagctagagcttttttctcaaccactattggttgccaatgccatgaaaaactcattaccatttgatgctcctgattctacacaagaaggcc

SEQ ID NO: 450809 - DNA, 120 bp, Artificial Sequence
  ENSG00000155744_9 (sequence is synthesized)
agaaagtccttaaagttgaagtcactccaacagtgccgaggatttctcggactgcaattacaacagcttcaatccgtcgtcatagatggagaagagaaggtgctgagggtgtaaatggag

SEQ ID NO: 450810 - DNA, 120 bp, Artificial Sequence
  ENSG00000155744_10 (sequence is synthesized)
gagaggagtctgtaaacctgaatgatgcagatgaaggattttcatcaggggcttccctcagcagtcagccaattgggaccaaaccatcctcctcttctcagaggggaagcttaaggaaag

SEQ ID NO: 450811 - DNA, 120 bp, Artificial Sequence
  ENSG00000155744_11 (sequence is synthesized)
tagcaactgggcgttcagccaaggataaagaaacagcctctgccatcaaatccagtgagagccctcgagattcagtagttcgcaagcagtatgtacagcaaccaactgatcttagtgtag

SEQ ID NO: 450812 - DNA, 120 bp, Artificial Sequence
  ENSG00000155744_12 (sequence is synthesized)
attcagttgagctgacaccaatgaagaaacacctgagcctgcctgctggccaggtggtgccaaaaatcaatagcttaagtctaatccggacagccagtgcttcctcaagtaaatcatttg

SEQ ID NO: 450813 - DNA, 120 bp, Artificial Sequence
  ENSG00000155744_13 (sequence is synthesized)
actatgtaaatggcagtcaagcaagtaccagcattggggttggcactgagggaggtactaatttagcagccaacaatgctaatcgatactcaactgtcagtctgcaggaagaccggctag

SEQ ID NO: 450814 - DNA, 120 bp, Artificial Sequence
  ENSG00000155744_14 (sequence is synthesized)
gtcaagctggcgaaggtaaagagctcctcagcccaggagcccccttgaccaagcagtctcgatccccaagtttcaatatgcagctaatatcccaggtgtagttttgacatcctccctcat

SEQ ID NO: 450815 - DNA, 120 bp, Artificial Sequence
  ENSG00000155744_15 (sequence is synthesized)
ctttctgcttaccttttaaactgaacatttcattgtgcaagaagacacttcatcccacattgtgaaaatattggtcactgttatcagatttcatttagtttaggtatcttcatactgtat

SEQ ID NO: 450816 - DNA, 120 bp, Artificial Sequence
  ENSG00000155744_16 (sequence is synthesized)
tttgtatcaaaacagcaataaggttttctttatccctctttcctacatcttctcttcacctatcccttgtaaatgtgtttgtgaagcagtataaaatggttgccttttccatgccttcct

SEQ ID NO: 450817 - DNA, 120 bp, Artificial Sequence
  ENSG00000155744_17 (sequence is synthesized)
ttctccttgggtgatgtgcaatccatcgtaggctgatcggtcccatttcaacactgtgagactgagggtacattagaggaaatggtgtatatgatccctatgaaacgattctttggcttt

SEQ ID NO: 450818 - DNA, 120 bp, Artificial Sequence
  ENSG00000155744_18 (sequence is synthesized)
tgtttaaaaacaaaacgggtttgttctcataatctatagaactatgaagattactggatcatatttttttctcttaaccaggagtgcctcagagattctgctatgactttggacttctct

SEQ ID NO: 450819 - DNA, 120 bp, Artificial Sequence
  ENSG00000155744_19 (sequence is synthesized)
gagtctgtgcaatcattttctggagaagcatggggaaaggtggtagactgctgcactttttcattaaaatgagggtagctctttctccacccccccatctcctttatcccgaagacataa

SEQ ID NO: 450820 - DNA, 120 bp, Artificial Sequence
  ENSG00000155744_20 (sequence is synthesized)
atgttcaattacggaggcatttaaatcaagttgtgaccacctccattggagggcaggactcttgattgtgtaattgataatgcactttctcaatggctgtatagtcattattaacgtgtc

SEQ ID NO: 450821 - DNA, 120 bp, Artificial Sequence
  ENSG00000155744_21 (sequence is synthesized)
ttccctcttccccacaaggacatataaggtcatttctgtccttcaagtttggccaactaacaaatcagaatctgaggggcatgttctatttcccaggaatgattgacactttggtgctgg

SEQ ID NO: 450822 - DNA, 120 bp, Artificial Sequence
  ENSG00000155744_22 (sequence is synthesized)
ggttttgtgggggcggggggtagtttttgtttagcttttgtggagattgtgtgtgtgagaggagatttgatttttttttcttcttttcctttgtgagctgatggctgaagtgtaacagta

SEQ ID NO: 450823 - DNA, 120 bp, Artificial Sequence
  ENSG00000155744_23 (sequence is synthesized)
catcttcaggtaaagagagggatttctcaatctactttctgttatgtcagactataagagaaaccctttcagctgctttctagatgtacctaaattcagtcagacattttggattaagaa

SEQ ID NO: 450824 - DNA, 120 bp, Artificial Sequence
  ENSG00000155744_24 (sequence is synthesized)
acctaaagtcctgatacattacatactccaaggaaatatatcagggacagacaattggctgaaacactgatacttcaatgtgacacatttttatagaacatttctaccagggggtactga

SEQ ID NO: 450825 - DNA, 120 bp, Artificial Sequence
  ENSG00000155744_25 (sequence is synthesized)
ccttgatttctcctacaaggaccacactgcctttgtgtttaatgtaatgcaatttgtgtaccttctaatcatatatctgcagttcctcatttttataaaactttgatatcatgccagtaa

SEQ ID NO: 450826 - DNA, 120 bp, Artificial Sequence
  ENSG00000155744_26 (sequence is synthesized)
gctagatgttgaatgtatgtaagtagcatttggtaactgctaagaggttacaaaaacattattggtaaaaaaaatttccttagttctgatctggttggataagattttatcataactttt

SEQ ID NO: 450827 - DNA, 120 bp, Artificial Sequence
  ENSG00000155744_27 (sequence is synthesized)
ctgggtctcaggctctgatgtttgaaaaagaagggaatatattgggttttaaaaaagtgtattgtgacttaaactgttataagttatccttccacagaatacatcagagctatcagtgct

SEQ ID NO: 450828 - DNA, 120 bp, Artificial Sequence
  ENSG00000155744_28 (sequence is synthesized)
tgctttgtacatttagatgtttttacttgattattgtttaagaaaaatatactgaatttatagaaagcaagtattctcctaattagcaaaagttaaaattttatctctaccattaaaatt

SEQ ID NO: 450829 - DNA, 120 bp, Artificial Sequence
  ENSG00000155744_29 (sequence is synthesized)
tagattttgataaataaccagaaaaaacgcctttttttttttcacacctagcaatcctcccgtttttattgtaaggactttcttttttccctaagagactttctgttagactctttatat

SEQ ID NO: 450830 - DNA, 120 bp, Artificial Sequence
  ENSG00000155744_30 (sequence is synthesized)
atgagatgcttgtttaaatatggtggtctgtaacatttttccagctcatgtgaaaatggaaaactagaacctgaactagtatctacaacattgccaaagtccagggtaaagctaaaagtt

SEQ ID NO: 450831 - DNA, 70 bp, Artificial Sequence
  ENSG00000155744_31 (sequence is synthesized)
atctacaacattgccaaagtccagggtaaagctaaaagttgataagtagacaatttattgtttgtatatg

SEQ ID NO: 450832 - DNA, 120 bp, Artificial Sequence
  ENSG00000155744_32 (sequence is synthesized)
tttcttttaatttaagggatgtcaaataaatgaaaggagtttaaaaatagccaaaataaatgagctataaaggcccataacatactaaaacaggcagtttcaggtatgtaaggaaaggaa

SEQ ID NO: 450833 - DNA, 120 bp, Artificial Sequence
  ENSG00000155744_33 (sequence is synthesized)
attaaaaataaataaaaaataaaaaagaaagtgagatcttggctatggctggaggtcagtcactttatggcataaattatttgggaggtaaaaagactgttttcaattcaaattgtgcat

SEQ ID NO: 450834 - DNA, 120 bp, Artificial Sequence
  ENSG00000155744_34 (sequence is synthesized)
gaggtaaaaagactgttttcaattcaaattgtgcatttattggcatctaaatctagcatgattttggttagagcacaaaagaaataccacataataccaaatcacagcaaatgttagaat

SEQ ID NO: 450835 - DNA, 120 bp, Artificial Sequence
  ENSG00000155744_35 (sequence is synthesized)
atcacagcaaatgttagaattaatacaacaaaattttcctttggctagaaatcttatgttatacctgaaaaattggttttaaaaaatgttcatcttggccgggcacggtggctcacgcct

SEQ ID NO: 450836 - DNA, 69 bp, Artificial Sequence
  ENSG00000155744_36 (sequence is synthesized)
tgcactactgtactccagcctaggcaacagtgcaagactccatctctgaaaaaaaaaaaaaaaaaaaaa

SEQ ID NO: 450837 - DNA, 120 bp, Artificial Sequence
  ENSG00000155744_37 (sequence is synthesized)
attaacattttatgaccctgtaacatttgttttctattcttttaggtgatgtgaattgacctcagtgaagaaacatttcatttagtctaagccttgcattcagggtcttacaacagattt

SEQ ID NO: 450838 - DNA, 120 bp, Artificial Sequence
  ENSG00000155744_38 (sequence is synthesized)
cttgtgcaagaattattattagttaaaatggaaggtgttagtttaacaaactgagagtcaaattttctaagtttttaaatatgcattttaacatgcattatttttggcatttaatttaaa

SEQ ID NO: 450839 - DNA, 120 bp, Artificial Sequence
  ENSG00000155744_39 (sequence is synthesized)
atagttttgtttcatgtatacaacagctgttacagatatatgccagcaatattcatacttttttaacaagcttttgttatatattttctaatctccataaaagtctaatcatctatgaaa

SEQ ID NO: 450840 - DNA, 120 bp, Artificial Sequence
  ENSG00000155744_40 (sequence is synthesized)
aagatatttagggagaaaatacttgttttctgtaataaaacaattaggttggtgccatgtatgccaagttggataaaagaatacaaagaaacagctgaaggttttgggagctcgctctga

SEQ ID NO: 450841 - DNA, 120 bp, Artificial Sequence
  ENSG00000155744_41 (sequence is synthesized)
cattaattactagaaagcaaactaaaatgcaaagtgaatagttaactcagaagatttgaattttttgaaatagggtctcactctgtcctctaggctagagtgcagtggcactatcacggc

SEQ ID NO: 450842 - DNA, 64 bp, Artificial Sequence
  ENSG00000155744_42 (sequence is synthesized)
agagtgcagtggcactatcatggagtagctggaactccaggcatgcaccaccacacctggctaa

SEQ ID NO: 450843 - DNA, 120 bp, Artificial Sequence
  ENSG00000155744_43 (sequence is synthesized)
gctggtctcgaactcctgggcttaagagatccacccacctggcctcccagaagtgctaggattacagacataactaccacacctggcctgaagatttttaaatgtgaaaatattttaaga

SEQ ID NO: 450844 - DNA, 120 bp, Artificial Sequence
  ENSG00000155744_44 (sequence is synthesized)
aatgtgaaaatattttaagaagctaaggggaaaatcgttattttaaaatcctgatccccttaactttaccccttaccattccccttacctttccaattcacttttgtctatttattatag

SEQ ID NO: 450845 - DNA, 120 bp, Artificial Sequence
  ENSG00000155744_45 (sequence is synthesized)
aatcagaattgtgctaagaagaaaccctggagataatctagctagtctcccactccctcaccccaaccttcatcctcaagaaacagaggctcagaggttgtggtgtgatcaagatcatat

SEQ ID NO: 450846 - DNA, 120 bp, Artificial Sequence
  ENSG00000155744_46 (sequence is synthesized)
acctaaagcagagccagaatcaaacccagtctcccatgggtttggggaggcagtgggttgttaactccatttttgcagtttctttatagttctggtctagtagttggtgaatacaacaca

SEQ ID NO: 450847 - DNA, 120 bp, Artificial Sequence
  ENSG00000155744_47 (sequence is synthesized)
ttaagaaaagtgttaaatccagaaaaaatgtagagtaatctagatggggaaatgttggaaatgttaagtatatctacagatgtaaggatcaatacattattctaatttatgccttactat

SEQ ID NO: 450848 - DNA, 120 bp, Artificial Sequence
  ENSG00000155744_48 (sequence is synthesized)
tttctgccacataacagttgtatgctgccattttatagttgaatacatttgttgggatttatttaaatataaaataaaccctgtgaaatggctttgatcagtgttttctagttattttaa

SEQ ID NO: 450849 - DNA, 120 bp, Artificial Sequence
  ENSG00000155744_49 (sequence is synthesized)
agtaatttttgagtcagccagctttcagtcaccagtgtggcaagctaattatattgcacaatagagtattgcaaagtaaagattaaataaatttgattccattactttttaatgtagaaa

SEQ ID NO: 450850 - DNA, 120 bp, Artificial Sequence
  ENSG00000155744_50 (sequence is synthesized)
gagactgaatcttatgcttagagcaaatgcaagcaatatttccttatatgattgaaaaaggttctatagtgtgaagcttatgattccataatggaacagtgaccatgatgtcatttaaag

SEQ ID NO: 450851 - DNA, 120 bp, Artificial Sequence
  ENSG00000155744_51 (sequence is synthesized)
tgtgtatataccatataaaatgtcttaaatgcggtagtctcagctatataagctcagtatttccagtctgtattctcagattccatctagtagctttaaattaattaaaattgtttatta

SEQ ID NO: 450852 - DNA, 120 bp, Artificial Sequence
  ENSG00000155744_52 (sequence is synthesized)
gacactggaatactgagaataacttctttcagattgttttgtttgcaccacttttgtgaatattttaatgaagtggagtccatttttgagtacttcagttgttgacaatcagttgtctcg

SEQ ID NO: 450853 - DNA, 120 bp, Artificial Sequence
  ENSG00000155744_53 (sequence is synthesized)
tttaaatctctgcatgttcatttgtaaataaaaaatgtagtacctgtctttaggggtagtcccctatttattacaaacactggcaaggaatatctgtccatttctgaccttggattacaa

SEQ ID NO: 450854 - DNA, 120 bp, Artificial Sequence
  ENSG00000155744_54 (sequence is synthesized)
agtatgttttgggtttttccttttttaatcagtatttcagttacatctttgttttcagctttaaaaagtttaacgggtcatgccaatgatcagaaaatctgtaagaattttagagcaatt

SEQ ID NO: 450855 - DNA, 120 bp, Artificial Sequence
  ENSG00000155744_55 (sequence is synthesized)
tttctatgtacagctatgttaaacagtctgaacatgagactttttctttcaagttgaagattattgtcatcgttttaccactaagttggttgagacacttacttgtaatactttaatttt

SEQ ID NO: 450856 - DNA, 120 bp, Artificial Sequence
  ENSG00000155744_56 (sequence is synthesized)
tttaaagtgtttttagaaacaagttgtttgaaaaccaattagaaattagaatatttgccagattataagcagatggaatgcagtgtaaaactgttaacaatgctaataaaattatgagtc

SEQ ID NO: 450857 - DNA, 120 bp, Artificial Sequence
  ENSG00000155744_57 (sequence is synthesized)
atcagattggtacagttttccctgccaagatggtcatattgataatgtaagacaaattttagtattacttgcattatgtgtacctaataggtatatcatactggtactgagcatatatag

SEQ ID NO: 450858 - DNA, 120 bp, Artificial Sequence
  ENSG00000155744_58 (sequence is synthesized)
aaaatactattcatagaggagtcatcaccacccaacctccttgcctgtgtaggcatatttcttctgaacctgaccacacaagtacaacattttggtaacttcagtcttttcagtattttt

SEQ ID NO: 450859 - DNA, 120 bp, Artificial Sequence
  ENSG00000155744_59 (sequence is synthesized)
gtaatcttagccatagtcctatgagaaatgtacataagagcaaacaattcaggatagaaattagcagaaagctgggaatgatgtgaaataactggcagcatagtacagaaatgtaaggta

SEQ ID NO: 450860 - DNA, 120 bp, Artificial Sequence
  ENSG00000155744_60 (sequence is synthesized)
tatgttttgcttctggatttttagaaattgtgctaatcatgtttacaaattaaggcatattcagatgtctgctattatgtttaatattgatttgataaaaaaatggaattaggtgtagct

SEQ ID NO: 450861 - DNA, 120 bp, Artificial Sequence
  ENSG00000155744_61 (sequence is synthesized)
tagagtataaatgagtctttttaaaaatgtgtatctggaagtagggctaataaagaaatccttttattttcaaagaaatgaacttaattggacaactcatccccaattacagaattgata

SEQ ID NO: 450862 - DNA, 120 bp, Artificial Sequence
  ENSG00000155744_62 (sequence is synthesized)
tcaatatggtttgctgtatttgagtataaacagctcagtgttaattatatcaaaggaagttctttacatcttcattgattacaaaatttaccaaagaaaatgtatctaccaaatataatt

SEQ ID NO: 450863 - DNA, 120 bp, Artificial Sequence
  ENSG00000155744_63 (sequence is synthesized)
tttaaagtacttgttaaggaatgaggcctctttaacatataaagtatcttaaaaatattctctgacctggaaaataggtttacagtagctacaagattccattttaggttttcttatgtc

SEQ ID NO: 450864 - DNA, 120 bp, Artificial Sequence
  ENSG00000155744_64 (sequence is synthesized)
aataaatgtcaatattttacacttccagcaaaagtacccgttaaagctaaatctaaatattattcctcatagcacagtttctggtctccttaaattaaggatcctactcatcaggattga

SEQ ID NO: 450865 - DNA, 120 bp, Artificial Sequence
  ENSG00000155744_65 (sequence is synthesized)
ataaaaagggggaaattcctaaaattggtatattgtataatattgtgggttaagtaaaatttaggggggcattatggaaatgtacctattttaaagggcagtggcaattactataatatt

SEQ ID NO: 450866 - DNA, 120 bp, Artificial Sequence
  ENSG00000155744_66 (sequence is synthesized)
ggttaaactggtaaagtttgttaaataatttatgtccatgatcattctgagtgttttttttctttgcagaaaaacaggattgggttaagaaaagctaaaatactcatttttttaaaatgt

SEQ ID NO: 450867 - DNA, 120 bp, Artificial Sequence
  ENSG00000155744_67 (sequence is synthesized)
atagcccaataagaactaaatgatttatttcaaaagttaaataattttttttggaaatcatggaatgtatttgcatattgatgttccaaacaggttttatgtattgttttttatagcagg

SEQ ID NO: 450868 - DNA, 120 bp, Artificial Sequence
  ENSG00000155744_68 (sequence is synthesized)
gagtagttgaaaagtaatgagtatattgattagctgtcttggaaagagaggattggctttctaacaatcactgatacaggtttgggtttgggggggtttgtttgtttgtttttaagtttt

SEQ ID NO: 450869 - DNA, 120 bp, Artificial Sequence
  ENSG00000155744_69 (sequence is synthesized)
atcatccatactgaattgagagatatgctccatgtttaaaaatatttgtaataagttcatctacttgacactgaatcttttttattcttactctaaaattattctggctttacattcagt

SEQ ID NO: 450870 - DNA, 120 bp, Artificial Sequence
  ENSG00000155744_70 (sequence is synthesized)
ttaagtggttaagtgaaacagtttttagggtgcaaaaattattttcccactgtttttctcatgataatttgagtctcctgagctataatttctgaaggatttttactactttggcattat

SEQ ID NO: 450871 - DNA, 120 bp, Artificial Sequence
  ENSG00000155744_71 (sequence is synthesized)
gtaatctgatctctgtcacaatgatattaaataagaactatctcactttcatatgtttgcttcataaaaggatatggaatgtacacatcagctctttttttttttttaaactagcatcaa

SEQ ID NO: 450872 - DNA, 120 bp, Artificial Sequence
  ENSG00000155744_72 (sequence is synthesized)
cctataacttggtataaacttcccaagtatttagagaatagtgctggtgaaaatttaaataggataggcatatagaaattatgacttgtattgagtgatgtcctttcaacctaggactag

SEQ ID NO: 450873 - DNA, 120 bp, Artificial Sequence
  ENSG00000155744_73 (sequence is synthesized)
tgacaaccttcattttttcagagctgaagaaaaaaccgtgaatttaagatcatatttattggtgcatgtaagccattatcctgtcttaatgaaccgattaatgctgttgattgttgaaat

SEQ ID NO: 450874 - DNA, 120 bp, Artificial Sequence
  ENSG00000155744_74 (sequence is synthesized)
gtgaaatgtagtcactgttgaccttgtaaatatctgccagagatgaaaaaatattttaagttattgtaaataaagatgtataaaattcagtatcagtctgcaatgcagaaacatatctta

SEQ ID NO: 450875 - DNA, 120 bp, Artificial Sequence
  ENSG00000155744_75 (sequence is synthesized)
gatgttaaaatactgtgtttgagagatgtgtaatttacccttagatgtatctagttacattaagagtgtaaatttttttgtacagtataaaaatacagctctatttggcttttaactgga

SEQ ID NO: 450876 - DNA, 120 bp, Artificial Sequence
  ENSG00000155744_76 (sequence is synthesized)
atgtataccaaaacacataaatttaagttttataattttctttccttgtggatctggaaaattttctttctgctgtttttcattctgatagttgctttggctttccctattccctgcctt

SEQ ID NO: 450877 - DNA, 120 bp, Artificial Sequence
  ENSG00000155744_77 (sequence is synthesized)
tccatattttgaaatgttttggtcaaattttttcctgttgagtgtgcagtatgttttgattgttaattttattgaccatcatctcagtggattatttatttgaaacttttctgtttcctg

SEQ ID NO: 450878 - DNA, 120 bp, Artificial Sequence
  ENSG00000155744_78 (sequence is synthesized)
tcatatttatttgatagatatttattgagcacattctctaagccaagcactgttctaacttctggtattacagcagtaaacaaaactcatggagcttgcattcctgtaggagtccttatc

SEQ ID NO: 450879 - DNA, 120 bp, Artificial Sequence
  ENSG00000155744_79 (sequence is synthesized)
ctcatgaggctgtttttgttgttgttgttgttttggttttttatgagataggatttctctctgtcgcctaggctggagtacagtggctcaatcatagctcactgtgccctcagccttctt

SEQ ID NO: 450880 - DNA, 120 bp, Artificial Sequence
  ENSG00000155744_80 (sequence is synthesized)
gtgtacaccacgactctcagctaatttttgtagagaaagggtcttgctatgttgcccaggtttgtcttgaagttctggcctcaagcattcttgccacatcagccttccaaagtgctgcga

SEQ ID NO: 450881 - DNA, 120 bp, Artificial Sequence
  ENSG00000155744_81 (sequence is synthesized)
gtacaggtgtgagccaccatgcctggcctcgtgcattcttgaaaatgttttcagcattaaagaaatattttctagctgaacgtggagttgtaccaagacatccaaatctagggttgttta

SEQ ID NO: 450882 - DNA, 120 bp, Artificial Sequence
  ENSG00000155744_82 (sequence is synthesized)
gtgatatatcttattccctggttgccagtttttgtaaatcactttgagatctttgaaaaaaaatagtgctatatatggggaaagtcttaaggaatatgaacctcttcccatacatttcat

SEQ ID NO: 450883 - DNA, 120 bp, Artificial Sequence
  ENSG00000155744_83 (sequence is synthesized)
aaataactgtctctgtgttggagaaagtgattagcaatagtaccaatgatgtgtgtgtctcatttgtatgtagggggtggatattctgtatctcatggattataatctttactaaatcat

SEQ ID NO: 450884 - DNA, 90 bp, Artificial Sequence
  ENSG00000155744_84 (sequence is synthesized)
catattggctcattcaacctttgcctctcaggttcaagtgatcttctcacctcagtctcctgagtagttaggactacaggtgcccaccac

SEQ ID NO: 450885 - DNA, 120 bp, Artificial Sequence
  ENSG00000155744_85 (sequence is synthesized)
ctcagtctcctgagtagttaggactacaggtgcccaccaccatgctgggctattttttttttttaaaagagaccaggtttcacaatgttgcacaggcaggtcacaaactcctgggattaa

SEQ ID NO: 450886 - DNA, 120 bp, Artificial Sequence
  ENSG00000155744_86 (sequence is synthesized)
ttacaggcatgagccaccacacctggcgttaaatttctaccatagaaaaaatgtaggccagggtcagtggcccatgcctgtaatcccagcatgatgggaggccaaggcctgaggtcagga

SEQ ID NO: 450887 - DNA, 81 bp, Artificial Sequence
  ENSG00000155744_87 (sequence is synthesized)
acaaaaatacaaaaattagctgggtggtagcgcatgcctataatcccagctatttgagaggctgaggcatgtggatcactt

SEQ ID NO: 450888 - DNA, 120 bp, Artificial Sequence
  ENSG00000155744_88 (sequence is synthesized)
caaaaatacaaaaattagctgggtggtagcgcatgcctataatcccagctatttgagaggctgaggcatgtggatcacttgaacctggtaggcagggttgcagtgatctgagatcacgcc

SEQ ID NO: 450889 - DNA, 120 bp, Artificial Sequence
  ENSG00000155744_89 (sequence is synthesized)
aaagtgctagatgaagaggggttttcttctccttcggccgcggaaactacagacgggagctggcgagggtggtctggaaaggcggtagccggtgtgttggtggtcccggaacctctcgta

SEQ ID NO: 450890 - DNA, 90 bp, Artificial Sequence
  ENSG00000155744_90 (sequence is synthesized)
ggcggtagccggtgtgttggtggtcccggaacctctcgtaaaccagatggagtttcgctctcccaggctggagtgcaatgctgcagtctc

SEQ ID NO: 450891 - DNA, 120 bp, Artificial Sequence
  ENSG00000155744_91 (sequence is synthesized)
ggagacagcagggtgacaggtaggcggcggtgctgtctttgggggaggcaaagtgctagatgaagaggggttttcttctccttcggccgcggaaactacagacgggagctggcgagggtg

SEQ ID NO: 450892 - DNA, 120 bp, Artificial Sequence
  ENSG00000155744_92 (sequence is synthesized)
aaaaaaacacttgtaccagccctctataaagttattcaagattcaaataatgagatacagcctccaagagtgcctctgctgtgtactggagtgagtttgaagaagttcagtgtatttctg

SEQ ID NO: 450893 - DNA, 120 bp, Artificial Sequence
  ENSG00000155744_93 (sequence is synthesized)
aatgttttataactctgggtatgcataatgtacgtatatgcatatccatatggtcaagagttttcagaattctttgtttgaataatgaatgtgtgtattccctaccccttgttttgctct

SEQ ID NO: 450894 - DNA, 120 bp, Artificial Sequence
  ENSG00000155744_94 (sequence is synthesized)
attgtaagctcttcatgggcagtggtcagatattctgtatttgtaacttcccgagaatctagtattttatcatgtacataatgaacatagaatagtattgattggaaggacagtgaagta

SEQ ID NO: 450895 - DNA, 120 bp, Artificial Sequence
  ENSG00000155744_95 (sequence is synthesized)
caaaatgagattctaaaatgacattttcattagggctcacaagtgtataagaagtatccctttcctatttttttgtttaatactttagaagctattacattaaaaaagctattctcatta

SEQ ID NO: 450896 - DNA, 120 bp, Artificial Sequence
  ENSG00000155744_96 (sequence is synthesized)
atagtctttaatattgtttgtataattataagcagttgtactcattctggaatatagacattaaaatggatgtatttttaacctttagttttttcagcaacttttcatactctcttaaat

SEQ ID NO: 450897 - DNA, 120 bp, Artificial Sequence
  ENSG00000155744_97 (sequence is synthesized)
atagatttattacatgacttttaaaaaatgtttttagttttatattttacaggcaatttccaaaagaagctatagaatttatataattgacagttgaaagattctgaaccttttccgtga

SEQ ID NO: 450898 - DNA, 120 bp, Artificial Sequence
  ENSG00000155744_98 (sequence is synthesized)
agaatgagaagaataaatgatccaaaactgccttttatggaaaagaaaattaaatattattacatgatacagatttttacttcatggtagagacattgtctcatactgtaccttattttt

SEQ ID NO: 450899 - DNA, 120 bp, Artificial Sequence
  ENSG00000155744_99 (sequence is synthesized)
cataaaaatatggtaggaagtggaaatggcaaaatacaaaataacgtgtttctgtaattgcagttcttaaaaatggtactaatatgaataatggctagaaggtgatacataaagatgaaa

SEQ ID NO: 450900 - DNA, 120 bp, Artificial Sequence
  ENSG00000155744_100 (sequence is synthesized)
atagttgttaggattgatgagacgatattttaaaatatattcagtaaaagagaagatccatcaagctttaataaggcacaaaaataggatttatgcctacgtttttctgtcctataatta

SEQ ID NO: 450901 - DNA, 120 bp, Artificial Sequence
  ENSG00000155749_0 (sequence is synthesized)
caagagcctcctgatctagcagccaagactccccctgacctttggccatgtaccccaaccctctcatctactgcacctgctgggacccctggaacttgggaccacggaagctaatcaaga

SEQ ID NO: 450902 - DNA, 120 bp, Artificial Sequence
  ENSG00000155749_1 (sequence is synthesized)
cccctcaactaccacgcaagaactccacagggagttccaagctaactcctcttgtaccagctccaaaaaatcacaattacctccaaccaacaaaacctgttgtttccccaaaaatgaaaa

SEQ ID NO: 450903 - DNA, 120 bp, Artificial Sequence
  ENSG00000155749_2 (sequence is synthesized)
tccattcagcaaggcaagaagagactaataaatcattttatgaagtgatcaacgtgtcacctggctatcaacttgttcggaatcgggaacagatttctgtcaccttaggggatgagatgt

SEQ ID NO: 450904 - DNA, 120 bp, Artificial Sequence
  ENSG00000155749_3 (sequence is synthesized)
ttgataggaaaaagcggtgggaatcggagatcccggacaaaggcagattttccaggaccaacatcatttctgacctagaagagcaaatctcagagctgacagcaataattgaacaaatga

SEQ ID NO: 450905 - DNA, 120 bp, Artificial Sequence
  ENSG00000155749_4 (sequence is synthesized)
acagagaccaccagtctgcccagaaattgctctccagtgaaatggatctccgctgtgctgagatgaaacagaactttgaaaacaagaacagggagctcaaagaggcccatgaagcagaac

SEQ ID NO: 450906 - DNA, 120 bp, Artificial Sequence
  ENSG00000155749_5 (sequence is synthesized)
tcagtgagttggagaacaactacaaagcagccttgaaggcagagaagttggctgcccaagagaagctagaggagatgggaaaagaatacaagtatttgaagaatatgtttcgtacgtatc

SEQ ID NO: 450907 - DNA, 120 bp, Artificial Sequence
  ENSG00000155749_6 (sequence is synthesized)
aggacagtatttatgatgaaatggaagagaagtggtcaaaacagaaggcgaaatggaagaaggatgagaagttcgagcgagaaaatatcctgctacagcaaaaaaaaaagatgaccaaaa

SEQ ID NO: 450908 - DNA, 120 bp, Artificial Sequence
  ENSG00000155749_7 (sequence is synthesized)
ctcttgaaacaacatcaaagtgacaccttgcaattagaagagctgagaaaaaccaaagaggtgccctggagaagagaccaaataaatagacattggcatgatgtcctgcaacagcttctt

SEQ ID NO: 450909 - DNA, 120 bp, Artificial Sequence
  ENSG00000155749_8 (sequence is synthesized)
cttatgcaggtcatgcaggaagaattgcatgcacaagcccttatcctagagtcactgaacacaaacctctactatacccagttggaactccagaaagagaaagctatagtgggaaatctg

SEQ ID NO: 450910 - DNA, 120 bp, Artificial Sequence
  ENSG00000155749_9 (sequence is synthesized)
gagaaaatgcttcaaaccaagtttgctgaaactgaagaaaagtataagcacaccatacagatcctgacggaagagaacattcatctgaagcaaaagataatttctaagaatgaagaaatt

SEQ ID NO: 450911 - DNA, 120 bp, Artificial Sequence
  ENSG00000155749_10 (sequence is synthesized)
tgtgaaggatgttctgggagattggcctctattactgtttctaaggatgattctgacactgtgcaagatggtagcaagaaaggacaagaatcataaacaaaaagttgctctgcattgttg

SEQ ID NO: 450912 - DNA, 120 bp, Artificial Sequence
  ENSG00000155749_11 (sequence is synthesized)
aagatggttggcacaccatttctgtaggcccaggaaactcctgggagggttttcttgagaaaatgcatataatgagtttagttcttgggttgctctgactctctgaatgtctgaaaatgt

SEQ ID NO: 450913 - DNA, 120 bp, Artificial Sequence
  ENSG00000155749_12 (sequence is synthesized)
ttgaattcgcatctgaatttcacagcttatcacggactcttcactgaaaaatgatgctctccatactgggagctgagctttctctgagttttgtactatttttcttctaccttgacgtat

SEQ ID NO: 450914 - DNA, 120 bp, Artificial Sequence
  ENSG00000155749_13 (sequence is synthesized)
ttcgttagaaagaaactgatttgaaggccttcttcatattgaacttttactatatttgggaggtgtacctttgtcccctggggcatttaggtagcaaaaaaagatgatgtgttgatttta

SEQ ID NO: 450915 - DNA, 120 bp, Artificial Sequence
  ENSG00000155749_14 (sequence is synthesized)
ctttggcctgccatctcccaagggcaaacctcacaactcaggcccaagtcacaggaatctgaatggtggggtgaccttctcctctagtttaatttcattgcaatactgagaaacttcaac

SEQ ID NO: 450916 - DNA, 120 bp, Artificial Sequence
  ENSG00000155749_15 (sequence is synthesized)
tgttttgtctttagaagggaaattcatgtttgtgccaggccagcctttgtaaaagcctttgattggattcactagaagtctgtcttcccgcagtacatatactgtgaattttctccttcg

SEQ ID NO: 450917 - DNA, 120 bp, Artificial Sequence
  ENSG00000155749_16 (sequence is synthesized)
gcatttcaaccacttggaatggccactaaagtggcttttgatctaaagtaaactctgattctgtgttgatggggaaccatttctctctaacatggtggtttctttaagatgtttgacttg

SEQ ID NO: 450918 - DNA, 120 bp, Artificial Sequence
  ENSG00000155749_17 (sequence is synthesized)
ctcagtagcttcatctatagtatcagcataacaataattgagcagttttacctggctcacagcaaggactcggctatggcaaattttattttattttaattattttgttttatttttatt

SEQ ID NO: 450919 - DNA, 120 bp, Artificial Sequence
  ENSG00000155754_0 (sequence is synthesized)
agcgggccgtcggttgggcgcagacaggccgcagaagatggagagatggagccaccccaagagacaaataggcctttcagcacacttgataaccgcagcgggcaggtccaagtcctgtcc

SEQ ID NO: 450920 - DNA, 120 bp, Artificial Sequence
  ENSG00000155754_1 (sequence is synthesized)
gccaccccgctattgcagaggaatccctacagcagcccggatatcatgcacattaaagggtcggaggcttcttcggtcccttacgccctgaaccagggcacgacggccctgcctaagaac

SEQ ID NO: 450921 - DNA, 120 bp, Artificial Sequence
  ENSG00000155754_2 (sequence is synthesized)
aagaaccaggagggcaccgggcaccggctgctgaacatgctgagaaaaactcttaaagagtctgatagtgaagaactggaaataacacaggagacgccaaatttggtgccatttggggat

SEQ ID NO: 450922 - DNA, 120 bp, Artificial Sequence
  ENSG00000155754_3 (sequence is synthesized)
gtggttggctgcctgggcattcatataaagaactgcagacattttatgcctaagatcagtttacaacattatgctaatttattcattcgcatctctataaacaaagctgtgaaatgtaca

SEQ ID NO: 450923 - DNA, 120 bp, Artificial Sequence
  ENSG00000155754_4 (sequence is synthesized)
aaaatgtgtagcttgctatccaaaaacgatgagaagaacactgtaattaagttcgatgaagtgaagtatttttctgtacaggttcccagacgttatgatgataagcggaataatatttta

SEQ ID NO: 450924 - DNA, 120 bp, Artificial Sequence
  ENSG00000155754_5 (sequence is synthesized)
ttggaactcatacaatatgacaatagagaaaaacgtgctttcttgttagggagtgttcagatacatctttatgaggtaattcagaaagggtgcttcattgaagaggtccaagtgttgcat

SEQ ID NO: 450925 - DNA, 120 bp, Artificial Sequence
  ENSG00000155754_6 (sequence is synthesized)
ggaaacatatttgtctgcaggctggaggtggaatttatgttctcctatggaaactttggttatggattttcacatcagttaaaacctcttcagaaaattactgagccatccatgtttatg

SEQ ID NO: 450926 - DNA, 120 bp, Artificial Sequence
  ENSG00000155754_7 (sequence is synthesized)
aatcttgcaccacctccagaaagaacagatcccgtgacaaaagttattacaccacagacagtagaatatccagcattcttatccccagacctgaatgttactgttgggactccagctgtg

SEQ ID NO: 450927 - DNA, 120 bp, Artificial Sequence
  ENSG00000155754_8 (sequence is synthesized)
tggaaaagatgaaaaaagaatatagaaatctgaatacatggatagataaagctaactatttagaaagcattctaatgccaaaattggaacataaggattctgaggaaactaatatagatg

SEQ ID NO: 450928 - DNA, 120 bp, Artificial Sequence
  ENSG00000155754_9 (sequence is synthesized)
aggcatctgaaaacacgaaaagtaatcatcctgaagaggagcttgaaaatattgtaggagtagatatccctcttgtaaatgaggaagctgaaactactgcaaatgagttactggataatg

SEQ ID NO: 450929 - DNA, 120 bp, Artificial Sequence
  ENSG00000155754_10 (sequence is synthesized)
attctgagaaaggcctgactataccaactttgaaccaatcggaccaagataattcaactgctgatgcttctaaaaatgatgaatcaacaccttcacccacagaagtgcactcattgtgca

SEQ ID NO: 450930 - DNA, 120 bp, Artificial Sequence
  ENSG00000155754_11 (sequence is synthesized)
ctatttctaaccaggaaacaataaaagcaggcagaataccacctttaggtgaacgtcaatcagaaagcatgccagacagaaaaatgaaaaatgtattttttccattagaagtaaaattaa

SEQ ID NO: 450931 - DNA, 120 bp, Artificial Sequence
  ENSG00000155754_12 (sequence is synthesized)
aagataactatccaagcattttaaaagcagactcatctctatcagaggtggctttttcaccaaaagaatataattcaccatctttcagaccagaatatatagaattcaaaccaaaatttc

SEQ ID NO: 450932 - DNA, 120 bp, Artificial Sequence
  ENSG00000155754_13 (sequence is synthesized)
aggattgttcagataaatttgaggatttacatgacatgacctcatttacacaccttaaaaaagtaaaatcaagatcaaggcttttaggaaaaagctcagatgatatccataaccatgcca

SEQ ID NO: 450933 - DNA, 120 bp, Artificial Sequence
  ENSG00000155754_14 (sequence is synthesized)
gacactctgcaagaccatatactgctccggaggttaacaagcaacgagaaagctacagtggaaagtttacaagtcgtcgaatggtttcatcaggcttagttcatataaatgataaaacat

SEQ ID NO: 450934 - DNA, 120 bp, Artificial Sequence
  ENSG00000155754_15 (sequence is synthesized)
cagattatgaaatgcataaaatgcggccaaaaaaaattaaaagaggatattgaaaaatgttcgctcatttgtgatattataaaacatgtttaactcagaatgatatgtgaggccagcagt

SEQ ID NO: 450935 - DNA, 120 bp, Artificial Sequence
  ENSG00000155754_16 (sequence is synthesized)
cagaatatcacttctccattaacaaaatggtttggagatctcttcttttgtgtgacagaagtcagcaaccaaatttcatcttgttagaaccattttgttttgattaaaatgaaaaacaaa

SEQ ID NO: 450936 - DNA, 120 bp, Artificial Sequence
  ENSG00000155754_17 (sequence is synthesized)
aaaatgtcagtcagaaaaagaaaagatcaagatatatacaaatatagaaatatcttaggtgcagaggtcatagagcatgaagaccaggatcctccttatccagcacaatcaaaaactgca

SEQ ID NO: 450937 - DNA, 120 bp, Artificial Sequence
  ENSG00000155754_18 (sequence is synthesized)
ggacctgctaatacaacctgggcccatgaccctaatatcttcacaacaaagatgttagaaactgagaataagttagcccctgatcctactatcaatacaataaagggtttagatacaaag

SEQ ID NO: 450938 - DNA, 120 bp, Artificial Sequence
  ENSG00000155754_19 (sequence is synthesized)
aatagtttaaaagaaaatctaccaaatgtatctttaccaagcatcaaaggagaatcatcaagggctggaaatgtacaggcaaacacatgtcacctctcgaagtctttaaattttaccccc

SEQ ID NO: 450939 - DNA, 120 bp, Artificial Sequence
  ENSG00000155754_20 (sequence is synthesized)
catatagaatatttaaaacaatcaatgatactcaagtcaattttaagtgaaaatctgcaagacctttcagacaaattattttctaaaccagaagttagtatgaacagtgaagcaagagag

SEQ ID NO: 450940 - DNA, 120 bp, Artificial Sequence
  ENSG00000155754_21 (sequence is synthesized)
aaaagtagttctccacttctaagcattcatgataaatcatcaagtagtatggaagacaacgtattggaaaaaaaacaagatttaaacaactggctttcagaaaaagacattttaaattca

SEQ ID NO: 450941 - DNA, 120 bp, Artificial Sequence
  ENSG00000155754_22 (sequence is synthesized)
aagactactttaagtcaaataattaaaaatattcctgcagattcattttcagaaggtagtcaaataattgaaaatattcctgcagattcacttttagaaggtggtcaagtaattaaaaat

SEQ ID NO: 450942 - DNA, 120 bp, Artificial Sequence
  ENSG00000155754_23 (sequence is synthesized)
attcctgaatattcactttcagaagggggtcagataattaaaaatattcctgcagattcatttttagaaagtggaccaggacaatctccagaggtagaagaacatgtctctaaaaaacac

SEQ ID NO: 450943 - DNA, 120 bp, Artificial Sequence
  ENSG00000155754_24 (sequence is synthesized)
ttcgaagctgatgagagagattttccaattaaaaaaaatagtagtaccaaaaagaaacatttaataagcgaagtacctaactccaaatcaggttcaagtggcactgtacatgactacatt

SEQ ID NO: 450944 - DNA, 120 bp, Artificial Sequence
  ENSG00000155754_25 (sequence is synthesized)
atgaggcaaatattcactgcaccaatattctcagaattggagatagaagtgaaagagccaagtgaaacaccaatgaacttggaaaatcaattacctacaccttggaagagaagtttgtca

SEQ ID NO: 450945 - DNA, 120 bp, Artificial Sequence
  ENSG00000155754_26 (sequence is synthesized)
tacaagccagataatacaagcatttcctatagatacacttttagaatctgggataatcaaagtgatagaattagataaagaacaccataagagttctttgctgggtacggggatcacttc

SEQ ID NO: 450946 - DNA, 120 bp, Artificial Sequence
  ENSG00000155754_27 (sequence is synthesized)
tcctaaaggaaacctaaaggattcccaagagtattattcagaaatcagaagcgagacagaacctctttctgagcagagtatacccatcattcccaaagacactacttctgttagtagagc

SEQ ID NO: 450947 - DNA, 120 bp, Artificial Sequence
  ENSG00000155754_28 (sequence is synthesized)
tgaatttatacaggaagaccaaaatatgttcccacaagattcaagttattattcaatagcaaataaagaactgtatttgccaagaaatggtcagaggctttgtaaagacaaaaatgatct

SEQ ID NO: 450948 - DNA, 120 bp, Artificial Sequence
  ENSG00000155754_29 (sequence is synthesized)
cagttctactttagaaagtttaactaactcattaatggataaacttagtgaatcagatgaaataatgttaaaatcctttttaaaaaacatcttcaatgtttttttcaaatataatcattc

SEQ ID NO: 450949 - DNA, 120 bp, Artificial Sequence
  ENSG00000155754_30 (sequence is synthesized)
tgaaagaagaggacaaccagaaaaagaattagaaagactaattcaaccttcttttacaagtgacacagaacaccttgaagaactccaagaggattttgataaagcagacaaattagacag

SEQ ID NO: 450950 - DNA, 120 bp, Artificial Sequence
  ENSG00000155754_31 (sequence is synthesized)
aaaacctattttgagtccaaagttgcgtgtgtttctagaagaactctcagagtcagaagtaaaacatttaaaatctgaattaagtaaacaaatccagcattaccttgtagaaagactttc

SEQ ID NO: 450951 - DNA, 120 bp, Artificial Sequence
  ENSG00000155754_32 (sequence is synthesized)
agaatcaggacatatcaccaaggaggacttaccaaaaatctatcaaaatctgtatctgatgaatgagaaagcagagcagaaagggccaaacagttttcaggggaaatattctgaaactgt

SEQ ID NO: 450952 - DNA, 120 bp, Artificial Sequence
  ENSG00000155754_33 (sequence is synthesized)
gaaagaaatcatgtcttttgtcaacaatttcaatcatcatttcatagataaacatttggaaataaagctgagatcttttttaaaagagattctccaaaactatttcctaaaaaacatttc

SEQ ID NO: 450953 - DNA, 120 bp, Artificial Sequence
  ENSG00000155754_34 (sequence is synthesized)
agaaagcagtttatttaatgagacagcatctgagactatatacccaaacatatcttctctaaggactaaaagtgtctcaatatcttttcatgaactagaacaagatatttcaaaggggag

SEQ ID NO: 450954 - DNA, 120 bp, Artificial Sequence
  ENSG00000155754_35 (sequence is synthesized)
ttttggtagaaggtttgaaataaacatgaaatatcctttaagtaaatctctacaaaactatctgatagctttatcagaaaatgaattattacatctaaaagctgatttaagcaaacacct

SEQ ID NO: 450955 - DNA, 120 bp, Artificial Sequence
  ENSG00000155754_36 (sequence is synthesized)
ccagagtctttttatagaaaaactttcaaaatcaggactaatgacaaaaaagcaattagaagggatcaaccagcatataaatttgcttaattctagttctataccattaaaatatataaa

SEQ ID NO: 450956 - DNA, 120 bp, Artificial Sequence
  ENSG00000155754_37 (sequence is synthesized)
aacacatttaccttttagagatgactgtcactttgtggagaagcattcagaaaagcaaaataaatattcaagaattgttcaacaaaccactttacaaacggtttctgaggataaacttag

SEQ ID NO: 450957 - DNA, 120 bp, Artificial Sequence
  ENSG00000155754_38 (sequence is synthesized)
agaagcagaattgattcgagagaaagaaaagaaatattttcccttacagaatttaaagggaaattcatctttaattaaggaacagaaaagttattacactaaggaagaagctaaaacacc

SEQ ID NO: 450958 - DNA, 120 bp, Artificial Sequence
  ENSG00000155754_39 (sequence is synthesized)
aagtttaatcaaagtacaaccttcttccaatgaaaatatccaggcaagtccattaagtaagtcatcagaaatacttacagatatactgcttaagaaactaaggaaagaacatgtattcac

SEQ ID NO: 450959 - DNA, 120 bp, Artificial Sequence
  ENSG00000155754_40 (sequence is synthesized)
gcagcttcctcaagcagaaaattctgttcataaaacagagattcaagacccatatagttggggtggtaaatcaaaaataactcaatcaaaagcttggtgtgaaaagacactgaaaatgaa

SEQ ID NO: 450960 - DNA, 120 bp, Artificial Sequence
  ENSG00000155754_41 (sequence is synthesized)
gtcccttgatagaaaggagcatgtaaacatctataaatggactgttcaggaaaaacctgaagcagtattaacatcgtatccaagaattcctaatgccagaatgccaagggaagatgagta

SEQ ID NO: 450961 - DNA, 120 bp, Artificial Sequence
  ENSG00000155754_42 (sequence is synthesized)
cttaaacagaatcactttcccttcctggcaaagtagcactttaactcatttcaatacagagactggggaaaaatcaaaattagaagaccagtattgtcagacattgaaaggaaataataa

SEQ ID NO: 450962 - DNA, 120 bp, Artificial Sequence
  ENSG00000155754_43 (sequence is synthesized)
caataataaaaagcatttagtaacatttgcacaatacaaaaaagaaatacaaactctttatataaaaccagatgaaatttgcagtgaaaaatgtgccaagttccctgaaatacagtcatt

SEQ ID NO: 450963 - DNA, 120 bp, Artificial Sequence
  ENSG00000155754_44 (sequence is synthesized)
ccaatataaggttgtagaagatgagaaaaacttgaaaccacacctcttcccagaattatttaagatagaagatctaaaacccaaggtccgaaaagaaagagaccgtgtcgcccaaccaaa

SEQ ID NO: 450964 - DNA, 120 bp, Artificial Sequence
  ENSG00000155754_45 (sequence is synthesized)
aaagtcatttaacaagatagtcaggatactaccaaccacactgcccaccacaagaattcacctaaagaagtctgttccaaggacactgcttcactggactgcaagaagaactatacatga

SEQ ID NO: 450965 - DNA, 120 bp, Artificial Sequence
  ENSG00000155754_46 (sequence is synthesized)
acagaaattagctggcaaaacaacaatctaaacttagctgaaagggagaacacaggcttagtttccaccagattaaaaattaaaaggtagctttcaaagccaagacccaaaagaaggcct

SEQ ID NO: 450966 - DNA, 120 bp, Artificial Sequence
  ENSG00000155754_47 (sequence is synthesized)
tgagctcaaggtgtctgcccttatattagaagtataagactagggagacaaaataatctattttaaaaaattaaatacaaataaatcgaaaatgcattcaaatgtctccaagtggaaatg

SEQ ID NO: 450967 - DNA, 120 bp, Artificial Sequence
  ENSG00000155754_48 (sequence is synthesized)
tgtctaagtatattaaatattcctgctttacttatatcaatcaagaaatgaggataaaaaactttcaagaaaagcaaagtgatttgagatgccagtaatacaaattaatctcttgggtta

SEQ ID NO: 450968 - DNA, 120 bp, Artificial Sequence
  ENSG00000155754_49 (sequence is synthesized)
gtaattcagctgaaagtgtaacgacaataacaaaatgtaaattcaaaggaaatttaaaagcctgaggagttatttcagtggaaattcttaataaaactattatattataggaaataacat

SEQ ID NO: 450969 - DNA, 120 bp, Artificial Sequence
  ENSG00000155754_50 (sequence is synthesized)
gttctccttattacaaataattttatagtttaaaatgagaataagagtgtgaatttaaaggtacaccaaataatagactttctcaaaatgacagccattctacttatatctttatatctt

SEQ ID NO: 450970 - DNA, 120 bp, Artificial Sequence
  ENSG00000155754_51 (sequence is synthesized)
attggaataactattacaggtagttcatcaaatggtataaaaagatatataggtcagaagataaagaatttgagttctaagtgagattctgcttctaaatactagcttgggcatctaagt

SEQ ID NO: 450971 - DNA, 120 bp, Artificial Sequence
  ENSG00000155754_52 (sequence is synthesized)
ctctagacctatttttctcattatttgaatggtagatcagactaggtcatttctaaattctctcccaaatttcaaaagacataattttaactgggaattactctcagttacctatgtcaa

SEQ ID NO: 450972 - DNA, 120 bp, Artificial Sequence
  ENSG00000155754_53 (sequence is synthesized)
ataacattcttgttttttctgaatgtgaaagtaatgcacagtcacagaaaatttagaaaatggagagaaatgtaaaagaaaaaataaaagcagttataattctactgctagatttaacaa

SEQ ID NO: 450973 - DNA, 120 bp, Artificial Sequence
  ENSG00000155754_54 (sequence is synthesized)
aactcatagctgattcaggattgttcagataaatttgaggatttacatgacatgacctcatttacacaccttaaaaaagtaaaatcaagatcaaggcttttaggaaaaagctcagatgat

SEQ ID NO: 450974 - DNA, 120 bp, Artificial Sequence
  ENSG00000155755_0 (sequence is synthesized)
ccacaggtcccggaggccgctgcgtcgcggggagctgggctcgggccgccggcggttgcgccggggcagccccgcggggagagcaccatgaggactgactcgggggctcggctggaggag

SEQ ID NO: 450975 - DNA, 120 bp, Artificial Sequence
  ENSG00000155755_1 (sequence is synthesized)
ggctcggctggaggagggccacctgcgtcctccacgagctcttccacctgtgccaagtcaagatgatattccacttagtcgtcctaagaaaaagaagcccagaacaaaaaacacaccagc

SEQ ID NO: 450976 - DNA, 120 bp, Artificial Sequence
  ENSG00000155755_2 (sequence is synthesized)
aagtgcttctttggaaggccttgctcagactgctggtcgaaggccctctgagggcaatgagccatcaactaaagaactcaaagagcacccagaggctcctgttcaaagaagacagaaaaa

SEQ ID NO: 450977 - DNA, 120 bp, Artificial Sequence
  ENSG00000155755_3 (sequence is synthesized)
gacaaggctacctcttgaattggagacttcctccacccaaaagaagtcatctagttcatctttattacgaaatgaaaatggtattgatgcggagccagctgaggaggcagttattcaaaa

SEQ ID NO: 450978 - DNA, 120 bp, Artificial Sequence
  ENSG00000155755_4 (sequence is synthesized)
acctcggaggaagacaaagaaaacccagccagcagaattacagtatgccaatgagctaggagtagaagatgaagacataatcactgatgagcaaactactgtggaacagcagtctgtatt

SEQ ID NO: 450979 - DNA, 120 bp, Artificial Sequence
  ENSG00000155755_5 (sequence is synthesized)
cactgcacccactggcattagccagcctgtaggcaaagtatttgtggaaaaaagccggagattccaggctgctgatcgttcagagttgataaagaccacagaaaacatagatgtgtcaat

SEQ ID NO: 450980 - DNA, 120 bp, Artificial Sequence
  ENSG00000155755_6 (sequence is synthesized)
ggacgtgaagccttcctggaccaccagagatgtggcacttacagtgcaccgggctttcaggatgattggtctcttttctcatggattcttggctggctgtgctgtgtggaatattgttgt

SEQ ID NO: 450981 - DNA, 120 bp, Artificial Sequence
  ENSG00000155755_7 (sequence is synthesized)
gatatatgttctagcaggagatcagctatccaacctctcaaaccttctgcaacaatacaagaccctagcgtatccattccagagtcttctgtacttgcttttggctctgagtacaatttc

SEQ ID NO: 450982 - DNA, 120 bp, Artificial Sequence
  ENSG00000155755_8 (sequence is synthesized)
agcttttgacaggattgactttgctaaaatatcagtagcaatccgaaattttttggccctggatcctacagctttagcatctttcttgtactttactgctcttatactatctctgagtca

SEQ ID NO: 450983 - DNA, 120 bp, Artificial Sequence
  ENSG00000155755_9 (sequence is synthesized)
gcaaatgacaagtgacagaatccacctttacacaccttcttctgttaatggtagcctctgggaagcaggaattgaggaacagattctccagccatggattgtggtgaatctcgtggtggc

SEQ ID NO: 450984 - DNA, 120 bp, Artificial Sequence
  ENSG00000155755_10 (sequence is synthesized)
tcttctggttggattatcttggctatttttgtcttataggccaggcatggatcttagtgaagagttaatgttctcctcagaggtggaagaatatcctgataaagagaaagaaatcaaagc

SEQ ID NO: 450985 - DNA, 120 bp, Artificial Sequence
  ENSG00000155755_11 (sequence is synthesized)
ctcttcataataccagctcacctttggaggaataatgacccagtatttgtcccatttttgtttttaaatgtatttttataagatgtatacatgtgtatttgtaatagattttttgattat

SEQ ID NO: 450986 - DNA, 120 bp, Artificial Sequence
  ENSG00000155755_12 (sequence is synthesized)
ataatactgaaacatctctcaatattatgaaaaatgttaaaattgtgtttgctgtttatgtctaaacattaatttgtctagcattatcatcttaatgacaaagggaataatgaactagaa

SEQ ID NO: 450987 - DNA, 120 bp, Artificial Sequence
  ENSG00000155755_13 (sequence is synthesized)
accagcaagtgaaagtgtttatttcctattttctcaaaacagttgtatttataactattaccttaaaaagcactggtttagaaaaagccataacttaaatagtgttataaaatatatatc

SEQ ID NO: 450988 - DNA, 120 bp, Artificial Sequence
  ENSG00000155755_14 (sequence is synthesized)
aggtttaaacataaatttagcgaatatggtagaagggaaaaaagccttcatttttgacctccccttactgaataaattgaaatatgaagtttgtcttttctgaaactggcttagtgattg

SEQ ID NO: 450989 - DNA, 120 bp, Artificial Sequence
  ENSG00000155755_15 (sequence is synthesized)
agtatcatgtaataattataatataatttagcttgaaagatgctctacattatgaccaataaaaagggaatgtatgttttgtttgaaaaattatataacctaaattttttacctagaagt

SEQ ID NO: 450990 - DNA, 120 bp, Artificial Sequence
  ENSG00000155755_16 (sequence is synthesized)
aactaaaaagttgcttctcattataatctgtactagtggttctcatatctggttgtacatcaggatcatagagggagattttaaaaatctatgtagcaaaagaggctgagcagggcaagg

SEQ ID NO: 450991 - DNA, 120 bp, Artificial Sequence
  ENSG00000155755_17 (sequence is synthesized)
ctcaggggaataaaggagagacctgtgagcttgtgggctcccagttgacatctgcagtaccctttcctctgtcccttttttctgagtgacaagaaataggagtagaaattcaccatctct

SEQ ID NO: 450992 - DNA, 120 bp, Artificial Sequence
  ENSG00000155755_18 (sequence is synthesized)
gttctccagctctttgtcagagaggtttctggttttccaggaaatccccctcttgagatgggtcctgcactgggaaagatctcttcagaactatatccaatggtacctcagctgttgtat

SEQ ID NO: 450993 - DNA, 120 bp, Artificial Sequence
  ENSG00000155755_19 (sequence is synthesized)
atgagaccctaaagctcaagttgaggagaagactagctatgggaaaaaatgtttcaaaggctgttgagcacatcaataaaactattgagcctgccctgattagcaagcacctgaatgtta

SEQ ID NO: 450994 - DNA, 120 bp, Artificial Sequence
  ENSG00000155755_20 (sequence is synthesized)
tagaacagaagaggattgacaaattgatgatagagacagttgaccctgacaataggtctaaatttggagtgaacattatactgggaatctcttttgctgtttgtaaggctggagctgccg

SEQ ID NO: 450995 - DNA, 120 bp, Artificial Sequence
  ENSG00000155755_21 (sequence is synthesized)
aaaagggattctccctgctgtcacagaattgtgaatttgctggcaattctgaaggcatcctgctagttccagctttcactgtgaccagcaatggttctcaatctggcaataagctggcag

SEQ ID NO: 450996 - DNA, 120 bp, Artificial Sequence
  ENSG00000155755_22 (sequence is synthesized)
gtgggggattgtggtaggctgcataatgtctcctaaagatgtccatgtcctaatccctggaacttgtgaatatactactttacttggccaaagggatttgcagatatgattaaggttatg

SEQ ID NO: 450997 - DNA, 120 bp, Artificial Sequence
  ENSG00000155755_23 (sequence is synthesized)
aaccttaaaacggggacattatcctgtattatccagaagggtccagtgtaatcttatgagtccttaaaagcagagaagaaagccttttatgtctgtggtcagagaggtcagaagttatga

SEQ ID NO: 450998 - DNA, 120 bp, Artificial Sequence
  ENSG00000155755_24 (sequence is synthesized)
tattgctggctttgaagatggaagagggggccatgagccaaggagagtgatgaccttgcagctgagtacggcccttggccaacaatgagcaaggaaatggatttcagtcacataaccaca

SEQ ID NO: 450999 - DNA, 120 bp, Artificial Sequence
  ENSG00000155755_25 (sequence is synthesized)
aggaactgagttctatgagtatcccaaatgagcaaggaaacaaatcctcccctagagccaagaaaggaaggcagctctgtggataccttggttttggcctggtgctgcccatgtcatact

SEQ ID NO: 451000 - DNA, 120 bp, Artificial Sequence
  ENSG00000155755_26 (sequence is synthesized)
tttgacatacagaactgtaagatagcaagtgtatgttgactaagctgctaaattggtggtgattgcttatggcagcaatagaaagctatatatcctagagaataaagaaggctagagctg

SEQ ID NO: 451001 - DNA, 120 bp, Artificial Sequence
  ENSG00000155755_27 (sequence is synthesized)
ctgtggaatgcacttgggaaagctggctacattgataatatgtaactgccatgggcatagttgcctttgtattcttccaggtctgggaagtacaacttagacttcagatctcgtaatgac

SEQ ID NO: 451002 - DNA, 120 bp, Artificial Sequence
  ENSG00000155755_28 (sequence is synthesized)
ccaggaggcatataaacctgagcagctagtggccctgtacaagtccttcatcagggaaaaacattgagtattccctgattaaggacttgtacagaggactctgttttccctggtgtttct

SEQ ID NO: 451003 - DNA, 120 bp, Artificial Sequence
  ENSG00000155755_29 (sequence is synthesized)
ggtgtgtctcaaaaattgtttgactgtgatgacagggaagtttggaagaagttcactgctaatgcatgtctccaggaagcagggaatgatctcacagtgacacttgaggcacattgctga

SEQ ID NO: 451004 - DNA, 120 bp, Artificial Sequence
  ENSG00000155755_30 (sequence is synthesized)
ggccgtcgatgagaattcatgtaactttctccagcttacagtggactagattgacatgcaagctgatccagtccaattggtagggcatcatggtttctcattactcactgacttaaaata

SEQ ID NO: 451005 - DNA, 120 bp, Artificial Sequence
  ENSG00000155755_31 (sequence is synthesized)
cttttattgccatcctggtgaagcactgcactgggtagataacacaggggcaccttgctgatcagagcccttggccaggtacaaagagctcagtttctaaaactctgtcatttcaataat

SEQ ID NO: 451006 - DNA, 120 bp, Artificial Sequence
  ENSG00000155755_32 (sequence is synthesized)
gttataaattgaatcatacagtatgtaattttatgggattcgctttttttctgttgatctctttttttctgagtcatctcagctgttgtgtgtatcaatagttcatttccttttactgtt

SEQ ID NO: 451007 - DNA, 120 bp, Artificial Sequence
  ENSG00000155755_33 (sequence is synthesized)
ttgtttggtttaactcattgacctattgaaggatatctgggctcattccagtctgtgaataatgctgctgtggacattcatgtgcaagtttttgtgtgaacattaagttttcatttcttt

SEQ ID NO: 451008 - DNA, 120 bp, Artificial Sequence
  ENSG00000155755_34 (sequence is synthesized)
aagataaatgcccaggagtgaaactgatgggttgtatgtagttacaaactgccaagctgttttccagagttggcggtaccattctaatttcccatgacaattttttgaagagtccaagct

SEQ ID NO: 451009 - DNA, 120 bp, Artificial Sequence
  ENSG00000155755_35 (sequence is synthesized)
agttgctttagagtgcctcacctacattttttaattgtctgactttttcctaatgacatcacttaatttgttcctcaatctcctgaatttcctatagactggaggttaggtctggtggtt

SEQ ID NO: 451010 - DNA, 120 bp, Artificial Sequence
  ENSG00000155755_36 (sequence is synthesized)
tgattagattttttaaaaaaatatgacttcatctgtgatgctgtgtactttatgttgcataacatgaaccctaagaacagagtgagctgctggacagcaagtttcatggggtgcagtaat

SEQ ID NO: 451011 - DNA, 120 bp, Artificial Sequence
  ENSG00000155755_37 (sequence is synthesized)
taacacaccacatagtataaatctgaaataatgacaaatgtgttaagggccttgggatattgggccatgtactctgaggagcacaaggtgaggtgcaggttcctgcccctaaagaactct

SEQ ID NO: 451012 - DNA, 120 bp, Artificial Sequence
  ENSG00000155755_38 (sequence is synthesized)
atcttttgagattagcaactaacagtgtgagcccactaataggatgtgaaagttgtcaaaatcaagttctggtcattgtgttaaaaatcctaacaaatagagctggggaaggccgtgaaa

SEQ ID NO: 451013 - DNA, 120 bp, Artificial Sequence
  ENSG00000155755_39 (sequence is synthesized)
ggacgattttcatgcacagatgtctgataatgaggactatcattaaaagactgcacaaaaccacaccttgcacaaaggccatcacaacctgacacacacaaaaaatacttctatgaggac

SEQ ID NO: 451014 - DNA, 120 bp, Artificial Sequence
  ENSG00000155755_40 (sequence is synthesized)
atttgcccagcaactccctgtccaatgtccaactggcaacatccttgttattgatccttgtagccaaggataattctctcaaaacaatcatttttgctttaaaaaccgttgtcttccttg

SEQ ID NO: 451015 - DNA, 120 bp, Artificial Sequence
  ENSG00000155755_41 (sequence is synthesized)
acctccctgtatatgcacatagtttactgtggcacttgtattcttattgcaatgcctactcctgaataaacatcattttctttcagagagtctccctctctgttatttaggctgacaagg

SEQ ID NO: 451016 - DNA, 120 bp, Artificial Sequence
  ENSG00000155755_42 (sequence is synthesized)
atatgccaagaagtagcttggatatagcagttaactctgcctttaggatatgtgtatggggatataagagttaactaaaagctgacctttgagttggtccttgaataaaagaagaataga

SEQ ID NO: 451017 - DNA, 120 bp, Artificial Sequence
  ENSG00000155755_43 (sequence is synthesized)
ttccaaaaataagaggaataaataatgatcctgagctaggagagtacattttgcagacctttggtttccatattaagaaattcagatttttatgtacaataaagaagttctggaattctc

SEQ ID NO: 451018 - DNA, 120 bp, Artificial Sequence
  ENSG00000155755_44 (sequence is synthesized)
ttcccgcaaacaaatcaccgccaccacttaggaaaccacgggaaagctgtgattgcagcgccacggtcgccagatttctgctcctgggcacattacccccaactccgaggcccccttttt

SEQ ID NO: 451019 - DNA, 120 bp, Artificial Sequence
  ENSG00000155755_45 (sequence is synthesized)
ggcagggctagtctggactggccaatccaggtccctgcacgcctctcaccgcaacatccccgcagggcgctgcgcgcggggtactagccaggcggcgcggcccgatgacgcattgcgcct

SEQ ID NO: 451020 - DNA, 120 bp, Artificial Sequence
  ENSG00000155755_46 (sequence is synthesized)
gagccgggaggggtggggcgccaggtgcttgggggccggcggccgccgaggccggctaaacgcagaatggggaagaatcctgtgcgtcctccacgagctcttccacctgtgccaagtata

SEQ ID NO: 451021 - DNA, 120 bp, Artificial Sequence
  ENSG00000155755_47 (sequence is synthesized)
aaataccaccgactaagtggcttaaaccacggacatttatttctcatagttcctaaagctaggaagtgcaagacaaggttccagcagattaggttactggagaaggccccttcctggctt

SEQ ID NO: 451022 - DNA, 120 bp, Artificial Sequence
  ENSG00000155755_48 (sequence is synthesized)
gccgacagctgccactgtgtcgtcatgtggcagagagagctctggtgtgtcttcttcttcttaaaaggattataatctcatcatgggagctttatcctcatgacttcatcgaaatctaat

SEQ ID NO: 451023 - DNA, 120 bp, Artificial Sequence
  ENSG00000155755_49 (sequence is synthesized)
tacctcccagtgacctcgcactcactggggggttagggcttcaacatatgaatttttgggggacgcattccgtctataacacagtgtttaagaaaaacctactcaaagcatgatcatgac

SEQ ID NO: 451024 - DNA, 120 bp, Artificial Sequence
  ENSG00000155755_50 (sequence is synthesized)
cttgttctcattatatatgtggtatattttacagggaaattatattttctttcacactttacttgttatttctctaggagaggactgctgttttttcttaaagttcataaaatagatata

SEQ ID NO: 451025 - DNA, 120 bp, Artificial Sequence
  ENSG00000155755_51 (sequence is synthesized)
aaacctctctgctttcatttctttccccctatccatatcccacaggtggtttcttgcttttatgtttaaaatatttaccactagaataactccaatggcttaagccaagaatactttaca

SEQ ID NO: 451026 - DNA, 120 bp, Artificial Sequence
  ENSG00000155755_52 (sequence is synthesized)
ggcaacaaatacaggactaaacagaaagttcagatctcagtgcatagaaaaatctagtaaatgatgaaatggacatttcagattagtggggaaatggtagattctgtactaacaataata

SEQ ID NO: 451027 - DNA, 120 bp, Artificial Sequence
  ENSG00000155755_53 (sequence is synthesized)
tagtgaaacaacagctaacatttgtttagtctttctatgtcccaggcagttcacaaggtaaataaaatactataccattttttggcctatcaaattggcaatgcttttttcaaattataa

SEQ ID NO: 451028 - DNA, 120 bp, Artificial Sequence
  ENSG00000155755_54 (sequence is synthesized)
aatccaatattgatgggaaatgggtgcactcatgctttgctcataggagcatagatacagcctgtctggatttctgggaatagtagtaaattcaatagctgcagtaattaaaggatgtta

SEQ ID NO: 451029 - DNA, 120 bp, Artificial Sequence
  ENSG00000155755_55 (sequence is synthesized)
agaacaaaaaacacaccaggtaagacgttattctttgttgtgtgggatcacaagttttcccaggacctcaggcgtagtaaacatcacagataagggagaattaaggccccagcagccccg

SEQ ID NO: 451030 - DNA, 120 bp, Artificial Sequence
  ENSG00000155755_56 (sequence is synthesized)
gtgggcagcctgaggagtatctggacgcattcatggaatagaaggtggtgccatctaagctcctatttccatgatattcctggactctttaaggtcttttatccccagacaacatacatg

SEQ ID NO: 451031 - DNA, 120 bp, Artificial Sequence
  ENSG00000155755_57 (sequence is synthesized)
gttttaagctatgattgattccagacccttgaacaagatactgaatttagaaacacagagttcttaaatctcacttcaatcagaatatctctacattacagcatgagtctgaaggcatgg

SEQ ID NO: 451032 - DNA, 120 bp, Artificial Sequence
  ENSG00000155755_58 (sequence is synthesized)
ccacatcatcatttaaatagtaaagcttcagtcatgagcagaactcgtttttgtcttagtcatccactgataatcctggaagttgcatccgtaactctaaactcagcacatctagaatcc

SEQ ID NO: 451033 - DNA, 120 bp, Artificial Sequence
  ENSG00000155760_0 (sequence is synthesized)
ctctcccaaccgcctcgtcgcactcctcaggctgagagcaccgctgcactcgcggccggcgatgcgggaccccggcgcggccgctccgctttcgtccctgggcctctgtgccctggtgct

SEQ ID NO: 451034 - DNA, 120 bp, Artificial Sequence
  ENSG00000155760_1 (sequence is synthesized)
ggcgctgctgggcgcactgtccgcgggcgccggggcgcagccgtaccacggagagaagggcatctccgtgccggaccacggcttctgccagcccatctccatcccgctgtgcacggacat

SEQ ID NO: 451035 - DNA, 120 bp, Artificial Sequence
  ENSG00000155760_2 (sequence is synthesized)
cgcctacaaccagaccatcctgcccaacctgctgggccacacgaaccaagaggacgcgggcctcgaggtgcaccagttctacccgctggtgaaggtgcagtgttctcccgaactccgctt

SEQ ID NO: 451036 - DNA, 120 bp, Artificial Sequence
  ENSG00000155760_3 (sequence is synthesized)
tttcttatgctccatgtatgcgcccgtgtgcaccgtgctcgatcaggccatcccgccgtgtcgttctctgtgcgagcgcgcccgccagggctgcgaggcgctcatgaacaagttcggctt

SEQ ID NO: 451037 - DNA, 120 bp, Artificial Sequence
  ENSG00000155760_4 (sequence is synthesized)
ccagtggcccgagcggctgcgctgcgagaacttcccggtgcacggtgcgggcgagatctgcgtgggccagaacacgtcggacggctccgggggcccaggcggcggccccactgcctaccc

SEQ ID NO: 451038 - DNA, 120 bp, Artificial Sequence
  ENSG00000155760_5 (sequence is synthesized)
taccgcgccctacctgccggacctgcccttcaccgcgctgcccccgggggcctcagatggcagggggcgtcccgccttccccttctcatgcccccgtcagctcaaggtgcccccgtacct

SEQ ID NO: 451039 - DNA, 120 bp, Artificial Sequence
  ENSG00000155760_6 (sequence is synthesized)
gggctaccgcttcctgggtgagcgcgattgtggcgccccgtgcgaaccgggccgtgccaacggcctgatgtactttaaggaggaggagaggcgcttcgcccgcctctgggtgggcgtgtg

SEQ ID NO: 451040 - DNA, 120 bp, Artificial Sequence
  ENSG00000155760_7 (sequence is synthesized)
gtccgtgctgtgctgcgcctcgacgctctttaccgttctcacctacctggtggacatgcggcgcttcagctacccagagcggcccatcatcttcctgtcgggctgctacttcatggtggc

SEQ ID NO: 451041 - DNA, 120 bp, Artificial Sequence
  ENSG00000155760_8 (sequence is synthesized)
cgtggcgcacgtggccggcttccttctagaggaccgcgccgtgtgcgtggagcgcttctcggacgatggctaccgcacggtggcgcagggcaccaagaaggagggctgcaccatcctctt

SEQ ID NO: 451042 - DNA, 120 bp, Artificial Sequence
  ENSG00000155760_9 (sequence is synthesized)
catggtgctctacttcttcggcatggccagctccatctggtgggtcattctgtctctcacttggttcctggcggccggcatgaagtggggccacgaggccatcgaggccaactcgcagta

SEQ ID NO: 451043 - DNA, 120 bp, Artificial Sequence
  ENSG00000155760_10 (sequence is synthesized)
cttccacctggccgcgtgggccgtgcccgccgtcaagaccatcactatcctggccatgggccaggtagacggggacctgctgagcggggtgtgctacgttggcctctccagtgtggacgc

SEQ ID NO: 451044 - DNA, 120 bp, Artificial Sequence
  ENSG00000155760_11 (sequence is synthesized)
gctgcggggcttcgtgctggcgcctctgttcgtctacctcttcataggcacgtccttcttgctggccggcttcgtgtccctcttccgtatccgcaccatcatgaaacacgacggcaccaa

SEQ ID NO: 451045 - DNA, 120 bp, Artificial Sequence
  ENSG00000155760_12 (sequence is synthesized)
gaccgagaagctggagaagctcatggtgcgcatcggcgtcttcagcgtgctctacacagtgcccgccaccatcgtcctggcctgctacttctacgagcaggccttccgcgagcactggga

SEQ ID NO: 451046 - DNA, 120 bp, Artificial Sequence
  ENSG00000155760_13 (sequence is synthesized)
gcgcacctggctcctgcagacgtgcaagagctatgccgtgccctgcccgcccggccacttcccgcccatgagccccgacttcaccgtcttcatgatcaagtacctgatgaccatgatcgt

SEQ ID NO: 451047 - DNA, 120 bp, Artificial Sequence
  ENSG00000155760_14 (sequence is synthesized)
cggcatcaccactggcttctggatctggtcgggcaagaccctgcagtcgtggcgccgcttctaccacagacttagccacagcagcaagggggagactgcggtatgagccccggcccctcc

SEQ ID NO: 451048 - DNA, 120 bp, Artificial Sequence
  ENSG00000155760_15 (sequence is synthesized)
ccacctttcccaccccagccctcttgcaagaggagaggcacggtagggaaaagaactgctgggtgggggcctgtttctgtaactttctccccctctactgagaagtgacctggaagtgag

SEQ ID NO: 451049 - DNA, 120 bp, Artificial Sequence
  ENSG00000155760_16 (sequence is synthesized)
ggcgaggggtgatttggaaaagaagacctgggtggaaagcggtttggatgaaaagatttcaggcaaagacttgcaggaagatgatgataacggcgatgtgaatcgtcaaaggtacgggcc

SEQ ID NO: 451050 - DNA, 120 bp, Artificial Sequence
  ENSG00000155760_17 (sequence is synthesized)
agcttgtgcctaatagaaggttgagaccagcagagactgctgtgagtttctcccggctccgaggctgaacggggactgtgagcgatccccctgctgcagggcgagtggcctgtccagacc

SEQ ID NO: 451051 - DNA, 120 bp, Artificial Sequence
  ENSG00000155760_18 (sequence is synthesized)
cctgtgaggccccgggaaaggtacagccctgtctgcggtggctgctttgttggaaagagggagggcctcctgcggtgtgcttgtcaagcagtggtcaaaccataatctcttttcactggg

SEQ ID NO: 451052 - DNA, 120 bp, Artificial Sequence
  ENSG00000155760_19 (sequence is synthesized)
gccaaactggagcccagatgggttaatttccagggtcagacattacggtctctcctcccctgccccctcccgcctgtttttcctcccgtactgctttcaggtcttgtaaaataagcattt

SEQ ID NO: 451053 - DNA, 120 bp, Artificial Sequence
  ENSG00000155760_20 (sequence is synthesized)
ggaagtcttgggaggcctgcctgctagaatcctaatgtgaggatgcaaaagaaatgatgataacattttgagataaggccaaggagacgtggagtaggtatttttgctactttttcattt

SEQ ID NO: 451054 - DNA, 120 bp, Artificial Sequence
  ENSG00000155760_21 (sequence is synthesized)
tctggggaaggcaggaggcagaaagacgggtgttttatttggtctaataccctgaaaagaagtgatgacttgttgcttttcaaaacaggaatgcatttttccccttgtctttgttgtaag

SEQ ID NO: 451055 - DNA, 120 bp, Artificial Sequence
  ENSG00000155760_22 (sequence is synthesized)
agacaaaagaggaaacaaaagtgtctccctgtggaaaggcataactgtgacgaaagcaacttttataggcaaagcagcgcaaatctgaggtttcccgttggttgttaatttggttgagat

SEQ ID NO: 451056 - DNA, 120 bp, Artificial Sequence
  ENSG00000155760_23 (sequence is synthesized)
aaacattcctttttaaggaaaagtgaagagcagtgtgctgtcacacaccgttaagccagaggttctgacttcgctaaaggaaatgtaagaggttttgttgtctgttttaaataaatttaa

SEQ ID NO: 451057 - DNA, 120 bp, Artificial Sequence
  ENSG00000155760_24 (sequence is synthesized)
ttcggaacacatgatccaacagactatgttaaaatattcagggaaatctctcccttcatttactttttcttgctataagcctatatttaggtttcttttctatttttttctcccatttgg

SEQ ID NO: 451058 - DNA, 120 bp, Artificial Sequence
  ENSG00000155760_25 (sequence is synthesized)
atcctttgaggtaaaaaaacataatgtcttcagcctcataataaaggaaagttaattaaaaaaaaaaagcaaagagccattttgtcctgttttcttggttccatcaatctgtttattaaa

SEQ ID NO: 451059 - DNA, 120 bp, Artificial Sequence
  ENSG00000155760_26 (sequence is synthesized)
catcatccatatgctgaccctgtctctgtgtggttgggttgggaggcgatcagcagataccatagtgaacgaagaggaaggtttgaaccatgggccccatctttaaagaaagtcattaaa

SEQ ID NO: 451060 - DNA, 120 bp, Artificial Sequence
  ENSG00000155760_27 (sequence is synthesized)
agaaggtaaacttcaaagtgattctggagttctttgaaatgtgctggaagacttaaatttattaatcttaaatcatgtactttttttctgtaatagaactcggattcttttgcatgatgg

SEQ ID NO: 451061 - DNA, 120 bp, Artificial Sequence
  ENSG00000155760_28 (sequence is synthesized)
ggtaaagcttagcagagaatcatgggagctaacctttatcccacctttgacactaccctccaatcttgcaacactatcctgtttctcagaacagtttttaaatgccaatcatagagggta

SEQ ID NO: 451062 - DNA, 120 bp, Artificial Sequence
  ENSG00000155760_29 (sequence is synthesized)
ctgtaaagtgtacaagttactttatatatgtaatgttcacttgagtggaactgctttttacattaaagttaaaatcgatcttgtgtttcttcaaccttcaaaactatctcatctgtcaga

SEQ ID NO: 451063 - DNA, 120 bp, Artificial Sequence
  ENSG00000155760_30 (sequence is synthesized)
tttttaaaactccaacacaggttttggcatcttttgtgctgtatcttttaagtgcatgtgaaatttgtaaaatagagataagtacagtatgtatattttgtaaatctcccatttttgtaa

SEQ ID NO: 451064 - DNA, 120 bp, Artificial Sequence
  ENSG00000155760_31 (sequence is synthesized)
gaaaatatatattgtatttatacatttttactttggatttttgttttgttggctttaaaggtctaccccactttatcacatgtacagatcacaaataaatttttttaaatacaaaatgaa

SEQ ID NO: 451065 - DNA, 120 bp, Artificial Sequence
  ENSG00000155761_0 (sequence is synthesized)
actgtggtagcggggacgcttaggcagggcctgcgcccagtttagaggccaatgcttctcccgtcctttgcatggcacccaagaaggagaaaggaggaactgtgaacaccagttctaaga

SEQ ID NO: 451066 - DNA, 120 bp, Artificial Sequence
  ENSG00000155761_1 (sequence is synthesized)
tatgggaaccctcgctcatagctgcacagttcaatcagaacgattggcaggcctccattgcttttgtggttgggaaccagattgaagatgatcttctcatccaagcccttaccgtggctg

SEQ ID NO: 451067 - DNA, 120 bp, Artificial Sequence
  ENSG00000155761_2 (sequence is synthesized)
tccaggtccctcagcgtaaactcttcagtatggtgtcgtggcaagacattctccagcagattaatgaaataaatacacttgttggatctgcttcatctaaaaaggcaaaaaaacctgtag

SEQ ID NO: 451068 - DNA, 120 bp, Artificial Sequence
  ENSG00000155761_3 (sequence is synthesized)
gtggtaatgctcctttatattatgaggtgttaacggcagcaaaagcaattatggatagtggagagaaattaaccttaccactgatagggaaactcttgaaatttcaacttctccagatta

SEQ ID NO: 451069 - DNA, 120 bp, Artificial Sequence
  ENSG00000155761_4 (sequence is synthesized)
aatttaaggaccaacagcgacgggaaaatgaaaagaaggtaatagaagacaaacctaagttagaaaaggataaagggaaagcaaaatctcccaaggagaaaaaggctccaagtgccaagc

SEQ ID NO: 451070 - DNA, 120 bp, Artificial Sequence
  ENSG00000155761_5 (sequence is synthesized)
ctgccaaaggaaagggaaaggatcagcctgaggcaaatgcaccagtgaaaaagaccacccagttaaagcggagaggagaagacgaccacaccaatcgttacattgacgatgagccagatg

SEQ ID NO: 451071 - DNA, 120 bp, Artificial Sequence
  ENSG00000155761_6 (sequence is synthesized)
atggtgcccaacattacattatagttgtgggctttaacaatcctcagctattagcaattatggctgagcttggcattcctataaccagcgtgattaaaatatcttcagagaattatgaac

SEQ ID NO: 451072 - DNA, 120 bp, Artificial Sequence
  ENSG00000155761_7 (sequence is synthesized)
ctctgcagacacacctggcagcagttaaccagcagcaggaagttcttcttcagtcagaagatctagaagcagaaaaattgaagaaagaaaatgccataaaagagcttaaaactttctgga

SEQ ID NO: 451073 - DNA, 120 bp, Artificial Sequence
  ENSG00000155761_8 (sequence is synthesized)
agtacttggaaccagtcctgaataatgagaaacctgaaacaaatctctttgatgttgctcgacttgagtacatggtcaaagcagctgattttccttctgactggtcagatggtgagatga

SEQ ID NO: 451074 - DNA, 120 bp, Artificial Sequence
  ENSG00000155761_9 (sequence is synthesized)
tgctgaaattgggcactgatatttttgaaaatattgcctgcttgatgtatgacatcctggattggaaaaggcagcaccagcactatttggaaagcatgcagcttattaatgttccacaag

SEQ ID NO: 451075 - DNA, 120 bp, Artificial Sequence
  ENSG00000155761_10 (sequence is synthesized)
tggttaatgagaaacctgtattagaagccatgccaacttcagaggctccacaacctgctgtaccagctcctggaaagaagaaagcacagtatgaagaaccgcaagctccaccaccagtga

SEQ ID NO: 451076 - DNA, 120 bp, Artificial Sequence
  ENSG00000155761_11 (sequence is synthesized)
cttcagtcatcacaactgaagtagacatgagatattacaattatttgctgaatccaattcgagaggaattcatttctgtgcccctgatactgcattgtatgctggaacaggttgttgcaa

SEQ ID NO: 451077 - DNA, 120 bp, Artificial Sequence
  ENSG00000155761_12 (sequence is synthesized)
ctgaagaagatctcgtcccacccagtctgcgggagccatcccccagagcagacgggctagaccacagaatcgcagctcacattgtgtcccttctgccctcactctgtctctcagagaggg

SEQ ID NO: 451078 - DNA, 120 bp, Artificial Sequence
  ENSG00000155761_13 (sequence is synthesized)
agaaaaagaatcttcatgacatatttttatctgaagaagaaaatgaaagcaaagcagtgcccaaaggccccctcctactgaactatcatgatgcacacgcccacaagaagtacgcactac

SEQ ID NO: 451079 - DNA, 120 bp, Artificial Sequence
  ENSG00000155761_14 (sequence is synthesized)
aggaccaaaagaattttgatccagttcaaattgagcaggagatgcagtccaagttgccactgtgggaatttcttcaattccctctacccccaccatggaacaacactaaacgtctagcta

SEQ ID NO: 451080 - DNA, 120 bp, Artificial Sequence
  ENSG00000155761_15 (sequence is synthesized)
caattcatgagcttatgcacttttgtacgagtgatgtcttgagctggaatgaagtagaacgagccttcaaggtgtttacttttgagagcctgaagctctctgaggttgatgaaaaaggga

SEQ ID NO: 451081 - DNA, 120 bp, Artificial Sequence
  ENSG00000155761_16 (sequence is synthesized)
aactgaaaccttctgggatgatgtgtgggtcagattctgaaatgttcaacataccgtgggacaaccctgccagatttgctaaacagataaggcagcaatatgtcatgaaaatgaatactc

SEQ ID NO: 451082 - DNA, 120 bp, Artificial Sequence
  ENSG00000155761_17 (sequence is synthesized)
aagaggccaagcagaaagcagatattaaaatcaaagacagaacactatttgtggatcagaatttgtcaatgtctgtgcaagataatgaaagcaaccgagaaccttcagatcctagtcagt

SEQ ID NO: 451083 - DNA, 120 bp, Artificial Sequence
  ENSG00000155761_18 (sequence is synthesized)
gtgatgctaacaatatgaagcattctgacttgaataatctcaaactctcagtccctgataatagacagctgttagagcaggagagcatcatgaaggctcagccccaacatgagtctctgg

SEQ ID NO: 451084 - DNA, 120 bp, Artificial Sequence
  ENSG00000155761_19 (sequence is synthesized)
agcagaccacaaacaatgagatcaaagatgatgcagtcacaaaggctgattctcatgaaaagaaacccaagaagatgatggtggaagcagatttagaggacataaagaaaacacagcagc

SEQ ID NO: 451085 - DNA, 120 bp, Artificial Sequence
  ENSG00000155761_20 (sequence is synthesized)
gcagtctaatggactggagttttactgaacattttaaaccgaaagtactgcttcaggtccttcaagaagcccataagcaatataggtgtgttgattcttactaccacacccaagacaact

SEQ ID NO: 451086 - DNA, 120 bp, Artificial Sequence
  ENSG00000155761_21 (sequence is synthesized)
ctttacttttagtctttcacaatccaatgaatagacaacgtttgcattgtgaatattggaacattgctctccactccaatgttggattcaggaattatttggaacttgttgcaaaatcta

SEQ ID NO: 451087 - DNA, 120 bp, Artificial Sequence
  ENSG00000155761_22 (sequence is synthesized)
ttcaagattggattacaaaagaagaagctatatatcaggaatctaaaatgaatgagaaaatcatcaggaccagagctgagctggaattgaaatcttctgctaatgccaaacttacttctg

SEQ ID NO: 451088 - DNA, 120 bp, Artificial Sequence
  ENSG00000155761_23 (sequence is synthesized)
ctagcaaaattttttccattaaagaatctaaaagtaacaaaggaatcagcaaaacagagatatcagatcaagaaaaagaaaaagagaaggaaaagattcctttcattttagaaggctctc

SEQ ID NO: 451089 - DNA, 120 bp, Artificial Sequence
  ENSG00000155761_24 (sequence is synthesized)
tcaaggcatggaaagaagagcaacatcgattagcagaagaggagcgcttaagggaagaaaagaaagcagagaagaagggtaaagaagctggtaaaaagaaaggcaaggataacgcagaga

SEQ ID NO: 451090 - DNA, 120 bp, Artificial Sequence
  ENSG00000155761_25 (sequence is synthesized)
aagaggatagtaggtctttgaagaaaaaatcaccttacaaggagaaatctaaagaagaacaagtcaagatccaagaagtaacagaagagtccccccaccaaccagaacctaagataactt

SEQ ID NO: 451091 - DNA, 120 bp, Artificial Sequence
  ENSG00000155761_26 (sequence is synthesized)
acccgtttcacggatacaatatgggaaatatacccactcaaatctcagggtcaaattactacctgtatccttctgatggggggcagattgaagtggaaaagacaatgtttgaaaaaggcc

SEQ ID NO: 451092 - DNA, 120 bp, Artificial Sequence
  ENSG00000155761_27 (sequence is synthesized)
caacttttatcaaagtgagagtggtaaaggacaaccacaattttatgattcatttaaatgaccctaaggaaattgtgaaaaaggaagagaaaggggattattatttagaagaggaagaag

SEQ ID NO: 451093 - DNA, 120 bp, Artificial Sequence
  ENSG00000155761_28 (sequence is synthesized)
aaggagatgaggaacaaagtcttgaaacggaagtatcagatgcaaagaataaagctttcagcaagtttggatctttttctgccaccttagaaaatggaatctgcctctcgataagttact

SEQ ID NO: 451094 - DNA, 120 bp, Artificial Sequence
  ENSG00000155761_29 (sequence is synthesized)
atggatcaaatggaatggcaccagaagataaggatcctgatttagaaacaatattgaatatcccttcagcactcactccaacagtggttcctgttatagtgaccgttcctcaaagcaaag

SEQ ID NO: 451095 - DNA, 120 bp, Artificial Sequence
  ENSG00000155761_30 (sequence is synthesized)
aagggaaaataaaaggcaaagaaaaacccaaagaatcccttaaagaagaagaacacccaaaagaagaagagaaaaaggaagaagaagtagaaccagaacctgttttacaagagactttgg

SEQ ID NO: 451096 - DNA, 120 bp, Artificial Sequence
  ENSG00000155761_31 (sequence is synthesized)
atgttcccaccttccagagcctaaatgtgtcttgccccagtgggctcctgttgactttcattggacaagaatctacaggtcaatatgttatagatgaggaacccacctgggacatcatgg

SEQ ID NO: 451097 - DNA, 120 bp, Artificial Sequence
  ENSG00000155761_32 (sequence is synthesized)
tccgtcagagctacccccagagggtgaagcactatgagttctataaaacggtgatgccacccgcagagcaggaggcttcaagggttatcaccagtcaaggcactgttgtcaaatatatgt

SEQ ID NO: 451098 - DNA, 120 bp, Artificial Sequence
  ENSG00000155761_33 (sequence is synthesized)
tggatggatccacacagattctctttgcagatggtgctgtgagcaggagtcccaattcaggtcttatttgtcctccttctgaaatgccagcaacgcctcacagtggagatttgatggact

SEQ ID NO: 451099 - DNA, 120 bp, Artificial Sequence
  ENSG00000155761_34 (sequence is synthesized)
ctatttctcagcagaaatcagaaacgataccatctgagattaccaacacaaagaaaggaaaaagtcacaaaagtcagtcatcaatggcccataagggtgaaatccatgaccctcctccag

SEQ ID NO: 451100 - DNA, 120 bp, Artificial Sequence
  ENSG00000155761_35 (sequence is synthesized)
aggcagttcaaactgtaactcctgtggaggttcacataggcacctggtttacaaccacacctgaaggaaatcggatcggcaccaaaggattagaaagaatagcagacttgaccccattgt

SEQ ID NO: 451101 - DNA, 120 bp, Artificial Sequence
  ENSG00000155761_36 (sequence is synthesized)
tatcctttcaggccacagatcctgtcaatggaacggttatgacaactcgagaagacaaagttgtcatagttgaaaggaaagatggtactcggatagtggatcatgctgatggtaccagaa

SEQ ID NO: 451102 - DNA, 120 bp, Artificial Sequence
  ENSG00000155761_37 (sequence is synthesized)
tcacaaccttttatcaagtttatgaagatcaaattattctgccagatgatcaagaaacaaccgagggtcctcggactgtcaccaggcaggtgaagtgtatgcgggtagaaagctcacgct

SEQ ID NO: 451103 - DNA, 120 bp, Artificial Sequence
  ENSG00000155761_38 (sequence is synthesized)
atgccactgttatcgccaactgtgaggacagtagctgctgtgccacctttggagatggaacaactattattgcaaagccacagggaacataccaggtgttacctccaaacacaggctctc

SEQ ID NO: 451104 - DNA, 120 bp, Artificial Sequence
  ENSG00000155761_39 (sequence is synthesized)
tttatattgacaaggattgttcagctgtgtactgccatgagtcaagcagtaatatatactatccttttcaaaagcgtgagcagctgcgagctggcaggtacatcatgaggcatacttcag

SEQ ID NO: 451105 - DNA, 120 bp, Artificial Sequence
  ENSG00000155761_40 (sequence is synthesized)
aggttatctgtgaggttctggatcctgagggaaacacttttcaggtcatggctgatggtagcatatcaactatattacctgaaaaaaaattggaagatgatttaaatgagaaaactgagg

SEQ ID NO: 451106 - DNA, 120 bp, Artificial Sequence
  ENSG00000155761_41 (sequence is synthesized)
gctatgatagtctgtcctctatgcaccttgaaaagaatcatcagcaaatctatggtgaacatgtccccaggttttttgttatgtatgctgatggatcaggaatggaacttcttcgagaca

SEQ ID NO: 451107 - DNA, 120 bp, Artificial Sequence
  ENSG00000155761_42 (sequence is synthesized)
gtgacatagaagaatatctatctttggcatataaagaatcaaatactgttgttctccaagagccagtgcaggaacagccaggcaccctaaccatcacagtccttcgccctttccatgaag

SEQ ID NO: 451108 - DNA, 120 bp, Artificial Sequence
  ENSG00000155761_43 (sequence is synthesized)
catcaccatggcaagtaaaaaaggaagatacaattgtccctcctaatctccggtcaaggtcatgggaaacatttccctcagttgagaaaaaaactccaggacctccgtttggtactcaga

SEQ ID NO: 451109 - DNA, 120 bp, Artificial Sequence
  ENSG00000155761_44 (sequence is synthesized)
tttggaaaggcctttgcattgagtccaaacagctagtgagtgccccgggtgccatactcaagagccccagtgtgctacagatgcgccaattcattcagcatgaggtcataaagaatgagg

SEQ ID NO: 451110 - DNA, 120 bp, Artificial Sequence
  ENSG00000155761_45 (sequence is synthesized)
tgaaactgaggctgcaggtttcccttaaggattacataaactatattctaaagaaagaagatgagctgcaggaaatgatggttaaagattccagaactgaggaggagagaggcaatgctg

SEQ ID NO: 451111 - DNA, 120 bp, Artificial Sequence
  ENSG00000155761_46 (sequence is synthesized)
ctgatctcctcaagctggttatgtctttccctaaaatggaggaaactacaaaaagtcatgttactgaagttgcagctcacctaactgatttattcaagcagtctttggctacgcctccaa

SEQ ID NO: 451112 - DNA, 120 bp, Artificial Sequence
  ENSG00000155761_47 (sequence is synthesized)
aatgcccaccagacacatttggtaaagatttctttgaaaagacatggagacacacagcatcctcaaaacgctggaaagaaaagatagacaaaacgaggaaggaaattgagacaacacaga

SEQ ID NO: 451113 - DNA, 120 bp, Artificial Sequence
  ENSG00000155761_48 (sequence is synthesized)
attacctaatggatattaagaaccgcataataccacccttttttaaatctgaattgaaccagttatatcagtctcagtataatcacctggacagtctttccaaaaaactgccttctttta

SEQ ID NO: 451114 - DNA, 120 bp, Artificial Sequence
  ENSG00000155761_49 (sequence is synthesized)
caaagaaaaatgaagatgcaaacgaaacagctgttcaagatacatctgatcttaatctagatttcaagccacataaggtttcagaacagaaatcctcaagtgtgcctagtcttccaaaac

SEQ ID NO: 451115 - DNA, 120 bp, Artificial Sequence
  ENSG00000155761_50 (sequence is synthesized)
cagagatttctgcagataagaaggatttcactgctcagaaccaaactgaaaatttaacaaaatctcctgaagaagcagaatcttatgagcccgtgaaaattccaacccagtccttgctgc

SEQ ID NO: 451116 - DNA, 120 bp, Artificial Sequence
  ENSG00000155761_51 (sequence is synthesized)
aggatgttgcgggacaaacaagaaaagaaaaagtgaagttgcctcattatttgctgagttccaagcctaagtctcaacctcttgcaaaggtgcaagattctgttggaggaaaagtgaaca

SEQ ID NO: 451117 - DNA, 120 bp, Artificial Sequence
  ENSG00000155761_52 (sequence is synthesized)
catcctctgttgcatctgctgccattaataatgcaaagtcatccctttttgggttccatcttctcccatcatcagtcaagtttggagtgcttaaggaaggacatacctatgccacagttg

SEQ ID NO: 451118 - DNA, 120 bp, Artificial Sequence
  ENSG00000155761_53 (sequence is synthesized)
taaagctcaagaatgttggagtggacttctgcaggtttaaagtaaagcagcccccacccagcacaggactgaaagtgacttacaaacctggacctgtggcagctggtatgcagacagaac

SEQ ID NO: 451119 - DNA, 120 bp, Artificial Sequence
  ENSG00000155761_54 (sequence is synthesized)
tgaatatagagttatttgccacagctgttggagaggatggggccaagggatcagcacacatctctcacaatatcgagattatgacagagcatgaggttctgttcctacctgtggaagcaa

SEQ ID NO: 451120 - DNA, 120 bp, Artificial Sequence
  ENSG00000155761_55 (sequence is synthesized)
ctgttttaacaagcagcaattatgataaacgaccaaaagactttccccagggaaaagaaaatccaatggtccagagaacttctacaatttattcctccacacttggagtcttcatgtctc

SEQ ID NO: 451121 - DNA, 120 bp, Artificial Sequence
  ENSG00000155761_56 (sequence is synthesized)
gtaaagtttctccacattagtttcttctcggtacaactcaatagcctccataatcctctcagcctacagaggatgagaaaggaaagaagtcatcacaacatactccatcatcccaggaca

SEQ ID NO: 451122 - DNA, 120 bp, Artificial Sequence
  ENSG00000155761_57 (sequence is synthesized)
ctgaaactggaagaactgaccagaaatttgccaaatgaaatagcttcaatctgtttaataaagacgtgcgaatagagtgccaaaaagcatttaaagacatttttggttttcttatttttt

SEQ ID NO: 451123 - DNA, 120 bp, Artificial Sequence
  ENSG00000155761_58 (sequence is synthesized)
aatgtacagggaagagactgagtgtcatggactcaggtgggatgatatctagacactctgaatagggcaggtcccaggaacacctgaaaggagcacatattgatcaaagagattcaggac

SEQ ID NO: 451124 - DNA, 120 bp, Artificial Sequence
  ENSG00000155761_59 (sequence is synthesized)
tactcccatctttggttacaagagaaggaaacaggttataatccccatctttaaatctcatcaactttttgccaaaaaaatggctttctggttgatacagaataaaacttttactaaaaa

SEQ ID NO: 451125 - DNA, 120 bp, Artificial Sequence
  ENSG00000155761_60 (sequence is synthesized)
cactgatagtttcctgccattttgtgtcatcagtggtacttgggtcccagaaatggactggttcttactaagcagtgggaatgcagcaatgagcagtgagtatcactaaagagcggaccc

SEQ ID NO: 451126 - DNA, 120 bp, Artificial Sequence
  ENSG00000155761_61 (sequence is synthesized)
tttttgtgtttttagaaaaaagaattgaagtaataatttgatagccatttttaaatttcattctttgaaaataaatgcctgctcctcattggagatatttgttcctgatggtgaacacac

SEQ ID NO: 451127 - DNA, 120 bp, Artificial Sequence
  ENSG00000155761_62 (sequence is synthesized)
tcatctcccatactattaataattcatcatatagtggtgagggtttttggttttgtttttaagctgaaatcattgccccttttcaccatactttcctttcctttcacatagacacacagc

SEQ ID NO: 451128 - DNA, 120 bp, Artificial Sequence
  ENSG00000155761_63 (sequence is synthesized)
agtgtgccccacagccaagggtccctgccactgcccattctcagtctgctcacttgtcaataacatgttatgatttaatgctcctcattgtttttcctgcaggatggtaatagaagagaa

SEQ ID NO: 451129 - DNA, 120 bp, Artificial Sequence
  ENSG00000155761_64 (sequence is synthesized)
caaaatgcatctctactttattaattctatcttcaaaatcagagttaaatttattaagacaaagagcatcttcattcatctttgaaagcacctagccaaatctaaaaaaatacctgacac

SEQ ID NO: 451130 - DNA, 120 bp, Artificial Sequence
  ENSG00000155761_65 (sequence is synthesized)
atagtatatgtgcagtaacttcagattgaataaatgtaaatgttattggctatctacggaatatcagacagaataataaaacagcaagtatctatcacaaaaaaattataattttatgga

SEQ ID NO: 451131 - DNA, 120 bp, Artificial Sequence
  ENSG00000155761_66 (sequence is synthesized)
aggataggaaataccttattattataaaggttgggtattcactgaattatgcatgcattcctccttatcagtgtcttcagccaaacagatattagatagatatcaagaacctattacctc

SEQ ID NO: 451132 - DNA, 120 bp, Artificial Sequence
  ENSG00000155761_67 (sequence is synthesized)
caaggtactgtataaaatagtttatcatatataaaaatggataattggactctgtcttaaaaggtattatataatttgtagcagaaataaagtcttcacattttatttctattttgtact

SEQ ID NO: 451133 - DNA, 120 bp, Artificial Sequence
  ENSG00000155761_68 (sequence is synthesized)
ttctccagtggcatgaattgtgtgctgcttgtgttacagttctctatttatttgatttttgagctggatcttatagaatgtgaaaacttgattgacgggaactttaagtaaaaataatga

SEQ ID NO: 451134 - DNA, 120 bp, Artificial Sequence
  ENSG00000155761_69 (sequence is synthesized)
acaaaaccatggcaacaggaaagctccaggtgtttgggatgattggcagggagttcaacttgccaaaagcttgagtattaggaatatagtgggaaagtaggttggagtcaagttatgaaa

SEQ ID NO: 451135 - DNA, 120 bp, Artificial Sequence
  ENSG00000155761_70 (sequence is synthesized)
gatcttaaatccttggcttgaattttattatttaagcagcagtgaaccactgcagattcctgaccctgtgggtgacatgatcagcatatctttattaagatgaatccagggttattgtgc

SEQ ID NO: 451136 - DNA, 120 bp, Artificial Sequence
  ENSG00000155761_71 (sequence is synthesized)
aggacatgtcaaaggggaacaactggatgtgtaaaagtaccattagaagtctacctgaatgggccatgtgtgaggacaagaactgggagtgggggaacagtcaacataaaagagggacat

SEQ ID NO: 451137 - DNA, 120 bp, Artificial Sequence
  ENSG00000155761_72 (sequence is synthesized)
gaatgaaagacatggtgggggaaggaaactgcaaaatctgaggtagaagccattgatggatggaagaaagaggacatcgagttcaacttcaaagttttgggctgaggtaatgaatcatgt

SEQ ID NO: 451138 - DNA, 120 bp, Artificial Sequence
  ENSG00000155761_73 (sequence is synthesized)
atatgtaatattagatctcaactgagaagtcagaattggagatataataattttaagcatcgtttacacagaggtgatggctgaatgtatgggcaaggaacagaaatctggagtcggttt

SEQ ID NO: 451139 - DNA, 120 bp, Artificial Sequence
  ENSG00000155761_74 (sequence is synthesized)
agggagcaggaggaagaagagccagtggagacaaaagcagcaattagaaaatggtgaaatacttcaaaagccttaggaagaatttcaaggaaaagacggacacaattgacggatgctatt

SEQ ID NO: 451140 - DNA, 120 bp, Artificial Sequence
  ENSG00000155761_75 (sequence is synthesized)
gagatgtcaaagaaaattcagatttaaagtgttaaatttggttgggataaaaactaaattgcaaaaggtaaagaatgactgtattaagaaagcagaaacattagttatggatattctttc

SEQ ID NO: 451141 - DNA, 120 bp, Artificial Sequence
  ENSG00000155761_76 (sequence is synthesized)
aacttgtgtcagatagcactgatgtcaataaatgaagtttagttcatttgttcatttatgctttcaaagatgccgaaacgcctgcctttatgtagcttacattccagtgggaggacagac

SEQ ID NO: 451142 - DNA, 120 bp, Artificial Sequence
  ENSG00000155761_77 (sequence is synthesized)
gagttatagttggcctgagttttctcttcagtggatgtatttatataaatgctgaactgaattggctgtatggttttcccctaaatcaaaatggaacgttcatgctgtcaccttcaccag

SEQ ID NO: 451143 - DNA, 120 bp, Artificial Sequence
  ENSG00000155761_78 (sequence is synthesized)
cccaaggcaagatggaactagtagcaaaaatagcagaccacaaacaatgagatcaaagatgatgcagtcacaaaggctgattctcatgaaaagaaacccaagaagatgatggtggaagca

SEQ ID NO: 451144 - DNA, 120 bp, Artificial Sequence
  ENSG00000155792_0 (sequence is synthesized)
agtcagagcagcggagctgccccgaacaaagatggcgcgggaagcgtctgtgagggcagactgatccgagcacccaaaccctcggcggacagcggagccagtggtagccgcacggcccta

SEQ ID NO: 451145 - DNA, 120 bp, Artificial Sequence
  ENSG00000155792_1 (sequence is synthesized)
aaaccatggaggagggcggcagcactggcagtgctggcagtgacagcagcaccagcgggagtggcggggcgcagcaaagggagctggagcgcatggctgaggtcttggtcaccggggaac

SEQ ID NO: 451146 - DNA, 120 bp, Artificial Sequence
  ENSG00000155792_2 (sequence is synthesized)
agctacggctcaggctgcacgaagaaaaggttattaaagatagacgtcatcatctcaagacctacccaaactgttttgtcgcaaaagaactgattgactggctgattgaacacaaagagg

SEQ ID NO: 451147 - DNA, 120 bp, Artificial Sequence
  ENSG00000155792_3 (sequence is synthesized)
cttctgacagagagacggcaattaaactcatgcagaaattagcagaccggggcattattcaccatgtgtgtgatgagcataaggaattcaaggatgtcaaactcttctaccgctttagaa

SEQ ID NO: 451148 - DNA, 120 bp, Artificial Sequence
  ENSG00000155792_4 (sequence is synthesized)
aggatgacggcaccttcccattggataatgaagtgaaggcctttatgagaggacagaggctatatgaaaagctgatgagccctgaaaacacactcctgcagcccagggaggaggaagggg

SEQ ID NO: 451149 - DNA, 120 bp, Artificial Sequence
  ENSG00000155792_5 (sequence is synthesized)
tcaagtatgagcgcaccttcatggcatctgaattcctggactggctggttcaggaaggtgaggccaccacgaggaaagaggcagagcagctttgccaccggcttatggagcatggcatca

SEQ ID NO: 451150 - DNA, 120 bp, Artificial Sequence
  ENSG00000155792_6 (sequence is synthesized)
tccagcatgtgtccaacaagcacccatttgtggacagcaatcttctctaccagttcagaatgaacttccggcggaggcgaagactgatggagctgctcaatgaaaagtccccctcctccc

SEQ ID NO: 451151 - DNA, 120 bp, Artificial Sequence
  ENSG00000155792_7 (sequence is synthesized)
aggaaactcatgacagtcccttctgcctgaggaagcagagccatgacaatcggaaatctaccagctttatgtcagtgagccccagcaaggagatcaagatcgtgtctgcagtgaggagaa

SEQ ID NO: 451152 - DNA, 120 bp, Artificial Sequence
  ENSG00000155792_8 (sequence is synthesized)
gcagcatgagcagctgtggcagcagcggctacttcagcagcagccccaccctcagcagcagcccccctgtgctctgcaaccccaagtccgtgctgaagagacctgtcacctctgaggaac

SEQ ID NO: 451153 - DNA, 120 bp, Artificial Sequence
  ENSG00000155792_9 (sequence is synthesized)
tccttactcccggggctccgtatgcaaggaagacattcacgattgttggtgacgcggttggctggggttttgtggtgcgaggaagtaagccatgccacatccaggctgtagaccccagtg

SEQ ID NO: 451154 - DNA, 120 bp, Artificial Sequence
  ENSG00000155792_10 (sequence is synthesized)
caacgggctcaatgtcctgcatgtagactaccggaccgtgagcaatctgattctgacgggcccacggacgattgtcatggaagtcatggaggagttagagtgctgagctcctgggcctcc

SEQ ID NO: 451155 - DNA, 120 bp, Artificial Sequence
  ENSG00000155792_11 (sequence is synthesized)
cagccctccagtggcctgtgggtgagggaagccagaatgacacaaagcaatgcaaagacaagattgccatgcaaatggatggttttggacatacgagtcttctccgcacatacatgtcta

SEQ ID NO: 451156 - DNA, 120 bp, Artificial Sequence
  ENSG00000155792_12 (sequence is synthesized)
aagttgagttttatacactgaatgtggaagaaccgggtatcatatcttttttaaaaaatgtcagtgtagaaaacatttgggaaaccattttcctacatgatagaactgccttactagatt

SEQ ID NO: 451157 - DNA, 120 bp, Artificial Sequence
  ENSG00000155792_13 (sequence is synthesized)
tctatttgtagctctcattcattgttttttatcttagtttgcagaaaggtgttgaaatgcttctctagcccaaacagcgacatgctaaagtccccttcttcagagtcaatagagtagttg

SEQ ID NO: 451158 - DNA, 120 bp, Artificial Sequence
  ENSG00000155792_14 (sequence is synthesized)
ttaaaggttttaaattgtactttctccaaaattagcatgcagctatttaatagggaatctagatttcaccaagattcaaatcaaagcaacatttaaaggaataagacctgttcactagca

SEQ ID NO: 451159 - DNA, 120 bp, Artificial Sequence
  ENSG00000155792_15 (sequence is synthesized)
ttttcaagggggttctaaagcattcaagtgcttaaaagccataaaaaatgacttcttaattcctgcctttagtgtcaacttttaagttaatacaggtttcaattgtggcattaggaaaaa

SEQ ID NO: 451160 - DNA, 120 bp, Artificial Sequence
  ENSG00000155792_16 (sequence is synthesized)
aaaaaaccttgtgatgctatggttgggggtagttagggagagactacatgaaattgtgtgcccctattttctttctgatcctaaatcattttgttttataaatcagctatagcatctttc

SEQ ID NO: 451161 - DNA, 120 bp, Artificial Sequence
  ENSG00000155792_17 (sequence is synthesized)
tagaattaatcctgaatatgttgaatgttaaaatagagaagtttgtatatacacataattaaaaatcaacccttctggcaagatttcactttgaaggtgtctgtttttaagggaaggcta

SEQ ID NO: 451162 - DNA, 120 bp, Artificial Sequence
  ENSG00000155792_18 (sequence is synthesized)
aaactttgctgatatgtgataaaacttgaactctaaattgcctccttagcctgaatttttactagctttctagtgtaacatattctaaggacatgacatgctgcttatttggggggatta

SEQ ID NO: 451163 - DNA, 120 bp, Artificial Sequence
  ENSG00000155792_19 (sequence is synthesized)
tttttcaccaaaatgatcatcttgtgttgtaacttttcagctcacttgtatatacgcacgttttcatttttggtctagaaaatagtgcattttggggctcagcgtgcagaggaaattcct

SEQ ID NO: 451164 - DNA, 120 bp, Artificial Sequence
  ENSG00000155792_20 (sequence is synthesized)
caaagtgccaaattaggcagtcaggaaatactaaattcttcattccaaataatggatctgaatgatgacgttaattttttatcatgcattaacaaaataaaatatgagaattgtaccaca

SEQ ID NO: 451165 - DNA, 120 bp, Artificial Sequence
  ENSG00000155816_0 (sequence is synthesized)
agccgccgcgcattatgcaaagcggcggcagatgcgagcggggccagccgggcgcgcgtcggcctcccctcccagcggctccccccgccgccgcctgactctcccgggagactccctagg

SEQ ID NO: 451166 - DNA, 120 bp, Artificial Sequence
  ENSG00000155816_1 (sequence is synthesized)
cgccgcctgactctcccgggagactccctaggcccggacctggggccgaggagggccgggatggcctgagtgcccgcggcgcggcggcgcagcagcgggattgcaccatggggaaccagg

SEQ ID NO: 451167 - DNA, 120 bp, Artificial Sequence
  ENSG00000155816_2 (sequence is synthesized)
atgggaagctgaagaggagcgcaggtgatgctttgcacgaaggcggcggtggcgccgaggatgcgctggggcccagggatgtggaagccacaaagaaggggagcgggggcaagaaggcgc

SEQ ID NO: 451168 - DNA, 120 bp, Artificial Sequence
  ENSG00000155816_3 (sequence is synthesized)
taggcaagcacggcaaggggggagggggcggcggcggcggcggggagtcgggcaagaagaagagcaagtccgactccagagcctcggtgttttccaacctgcggatcaggaagaatctgt

SEQ ID NO: 451169 - DNA, 120 bp, Artificial Sequence
  ENSG00000155816_4 (sequence is synthesized)
ccaaggggaaaggcgccggcggctcccgcgaagatgtactggattcccaggccctgcagaccggggagctggacagcgctcactccctgctcaccaagactccagacctcagcctctcgg

SEQ ID NO: 451170 - DNA, 120 bp, Artificial Sequence
  ENSG00000155816_5 (sequence is synthesized)
cggacgaggccggcctgtcggataccgagtgtgcggacccttttgaggtgaccggtccagggggtcctgggcctgccgaggctagggtcgggggccggccgatcgccgaggatgtggaaa

SEQ ID NO: 451171 - DNA, 120 bp, Artificial Sequence
  ENSG00000155816_6 (sequence is synthesized)
ctgcagcaggggcgcaggatggacaaaggaccagctcgggctcggacacggacatctatagcttccattcggctacggagcaagaggatttgctttcagacatccagcaggcgatccgcc

SEQ ID NO: 451172 - DNA, 120 bp, Artificial Sequence
  ENSG00000155816_7 (sequence is synthesized)
tgcagcagcagcagcagcagcagctccagctccagctccagcaacagcagcagcagcagcagctccagggcgccgaggagcctgcagcgccccccactgccgtctcccctcagcccgggg

SEQ ID NO: 451173 - DNA, 120 bp, Artificial Sequence
  ENSG00000155816_8 (sequence is synthesized)
ccttcctgggcctggaccggttcctgctggggccgagcggcggggctggggaggccccgggcagtccggacaccgagcaggcgctgtccgcgctctccgacctgcccgagagcctggccg

SEQ ID NO: 451174 - DNA, 120 bp, Artificial Sequence
  ENSG00000155816_9 (sequence is synthesized)
ccgagccccgggagccccagcaaccgccgtcccccggcggcctcccggtctccgaggcgcccagtctcccggcagcgcaacccgcggccaaagactcgccctcctccacggctttcccat

SEQ ID NO: 451175 - DNA, 120 bp, Artificial Sequence
  ENSG00000155816_10 (sequence is synthesized)
ttcccgaggccgggccgggggaggaagcggccggagcccccgtgcgaggggctggggacacggatgaggagggtgaggaggatgcttttgaggatgcgccccggggctctccgggggagg

SEQ ID NO: 451176 - DNA, 120 bp, Artificial Sequence
  ENSG00000155816_11 (sequence is synthesized)
ccggaggtgggagaggacgccccgcagaggctgggggaagagccggaggaggaggcgcaaggacctgacgcccccgcggccgcttccctgcccggcagccccgcgcctagccagcgctgt

SEQ ID NO: 451177 - DNA, 120 bp, Artificial Sequence
  ENSG00000155816_12 (sequence is synthesized)
agcgctgtttcaagccctacccgctcatcaccccctgctacatcaagaccaccacccggcagctcagctcgcccaatcactccccgtctcagtcccctaatcagagccccaggatcaaga

SEQ ID NO: 451178 - DNA, 120 bp, Artificial Sequence
  ENSG00000155816_13 (sequence is synthesized)
ggcggccggaaccctccctgagccgagggtccagaactgccctggcctccgtagccgccccggccaagaagcaccgggccgacggcggccttgcggccggcctgagccgctcggctgact

SEQ ID NO: 451179 - DNA, 120 bp, Artificial Sequence
  ENSG00000155816_14 (sequence is synthesized)
ggacggaggagctaggcgcccgcacgccccgggtgggaggctccgcgcacctgctggagcgcggggtggcgagtgacagcggcggtggggtgtccccagcactggccgccaaggcgtctg

SEQ ID NO: 451180 - DNA, 120 bp, Artificial Sequence
  ENSG00000155816_15 (sequence is synthesized)
gggcccccgcggctgcggatggcttccagaacgtgttcacagggcgaacgctgttggagaagctgttcagccagcaggagaacgggcctccagaagaagcagagaagttttgctcccgga

SEQ ID NO: 451181 - DNA, 120 bp, Artificial Sequence
  ENSG00000155816_16 (sequence is synthesized)
tcattgccatgggtcttctccttccttttagtgattgcttcagggaaccgtgtaatcagaatgcccagacgaatgcagcttcgtttgatcaagatcaactttatacctgggctgcagtta

SEQ ID NO: 451182 - DNA, 120 bp, Artificial Sequence
  ENSG00000155816_17 (sequence is synthesized)
gtcaacccacacactcattggactattcagaagggcagtttcctaggcgagttccatccatggggccaccatccaaacctcccgatgaggaacacaggctcgaggatgctgaaacagaat

SEQ ID NO: 451183 - DNA, 120 bp, Artificial Sequence
  ENSG00000155816_18 (sequence is synthesized)
ctcaatctgctgtttcagaaactccccaaaaacgctcagatgctgtccagaaggaagttgttgacatgaagtctgagggacaggccactgtaattcagcagctggaacagactattgagg

SEQ ID NO: 451184 - DNA, 120 bp, Artificial Sequence
  ENSG00000155816_19 (sequence is synthesized)
atctgagaaccaaaatagctgaactagagaggcagtatcctgccctggacacagaggtggccagtggtcatcaagggcttgagaatggagtgacagcctcaggcgatgtctgtctcgaag

SEQ ID NO: 451185 - DNA, 120 bp, Artificial Sequence
  ENSG00000155816_20 (sequence is synthesized)
ctctcaggttagaagaaaaggaagtacggcatcataggattttagaggcgaaatcgatacagacttcccccacggaagagggcggggtgctgacactgcctcctgtggatgggctgccag

SEQ ID NO: 451186 - DNA, 120 bp, Artificial Sequence
  ENSG00000155816_21 (sequence is synthesized)
ggcgtcctccatgcccccctggggctgaaagtggacctcagacaaagttctgttcagagatttctttgattgtgtctccaaggcgaatatcagtccagctcgacagccatcagcccacac

SEQ ID NO: 451187 - DNA, 120 bp, Artificial Sequence
  ENSG00000155816_22 (sequence is synthesized)
agagcatctcacagcctccaccacctccatcccttctgtggtctgctgggcaaggacagcctgggtcacagccgccccattctatttctaccgagtttcaaaccagccacgaacactctg

SEQ ID NO: 451188 - DNA, 120 bp, Artificial Sequence
  ENSG00000155816_23 (sequence is synthesized)
tttcctctgcctttaaaaacagctgtaacatcccatctccaccacctctgccttgcacagagtcctccagctccatgcctggcctgggcatggtgcctcccccacctccccctctccctg

SEQ ID NO: 451189 - DNA, 120 bp, Artificial Sequence
  ENSG00000155816_24 (sequence is synthesized)
gcatgacagtgcctactctgcccagtacagccattccccaacctcctcctctgcagggtacagaaatgctgccaccccctccccctcctcttcccggagcgggcatacctcctccgccgc

SEQ ID NO: 451190 - DNA, 120 bp, Artificial Sequence
  ENSG00000155816_25 (sequence is synthesized)
ctctacccggagcaggcatactccctctgccccctctacccggagcgggaatacctcctccgccccctctacccggagcggcaataccccctccgccccctcttcccggggcaggcatac

SEQ ID NO: 451191 - DNA, 120 bp, Artificial Sequence
  ENSG00000155816_26 (sequence is synthesized)
ctcctcccccacttcccggagcgggcataccccctccgcccccacttcccggagcgggcataccccctcctccccctcttcccggagcgggcatacctcctccaccccctctacccggag

SEQ ID NO: 451192 - DNA, 120 bp, Artificial Sequence
  ENSG00000155816_27 (sequence is synthesized)
cgggcataccccctccgcccccacttcccggagcgggcataccccctccgcccccacttcccggagcgggcataccccctcctccccctcttcccggagcgggcatacctcctccacccc

SEQ ID NO: 451193 - DNA, 120 bp, Artificial Sequence
  ENSG00000155816_28 (sequence is synthesized)
ctctacccggagcgggcataccccctccgcccccacttcccggagcgggcatacccccacctccccctctacccggagcgggcataccccctccgccccctctacccggagtgggcatac

SEQ ID NO: 451194 - DNA, 120 bp, Artificial Sequence
  ENSG00000155816_29 (sequence is synthesized)
ctcctccgccccctctacccggagcgggcataccccctcctccccctctacccggagcgggcataccccctcctccccctcttcccggagcgggcatacctcctccaccccctctaccca

SEQ ID NO: 451195 - DNA, 120 bp, Artificial Sequence
  ENSG00000155816_30 (sequence is synthesized)
gagtgggcataccccctccgcccccacttcccggagcgggcatacccccacctccccctctacccggagcgggcataccccctccgccccctctacctggagtgggaatacctcctccgc

SEQ ID NO: 451196 - DNA, 120 bp, Artificial Sequence
  ENSG00000155816_31 (sequence is synthesized)
cccctctacctggagtgggaatacctcctccgccccctctacctggtgctgggattcccccacctcctcccttgccaggtatggggattccacctgctccagctcccccactccctccac

SEQ ID NO: 451197 - DNA, 120 bp, Artificial Sequence
  ENSG00000155816_32 (sequence is synthesized)
ctgggacaggaatcccaccgccccctctgcttcctgtatcaggccctccactcctcccacaagttgggagtagcactttaccaaccccacaggtgtgtggatttcttcctcctccattgc

SEQ ID NO: 451198 - DNA, 120 bp, Artificial Sequence
  ENSG00000155816_33 (sequence is synthesized)
caagtggcttgtttggattagggatgaatcaggacaaagggagtaggaagcagcccatagagccttgtcgaccaatgaagcctctttactggaccaggattcaactacatagtaaaagag

SEQ ID NO: 451199 - DNA, 120 bp, Artificial Sequence
  ENSG00000155816_34 (sequence is synthesized)
actccagtacttcacttatttgggaaaaaattgaagagccatccatagattgtcatgaatttgaggaattattttctaaaactgctgtaaaggagagaaagaaacctatctctgatacta

SEQ ID NO: 451200 - DNA, 120 bp, Artificial Sequence
  ENSG00000155816_35 (sequence is synthesized)
tctcaaagacgaaggctaaacaagttgtcaagttattaagcaacaaaagatcacaagcagttggaatactaatgtctagccttcatttagatatgaaagacatacaacatgctgttgtga

SEQ ID NO: 451201 - DNA, 120 bp, Artificial Sequence
  ENSG00000155816_36 (sequence is synthesized)
acttggataattctgtggttgacctggagacccttcaagctctctatgagaatagagcacagtcagacgaactcgaaaaaatagaaaagcatggccgatcttccaaagacaaggaaaatg

SEQ ID NO: 451202 - DNA, 120 bp, Artificial Sequence
  ENSG00000155816_37 (sequence is synthesized)
ccaagtctctggacaaacctgaacagttcctttatgaactgtcactaatccccaacttttcagagcgagtcttttgcatcctgttccagtccacattttcagaaagcatttgctcaattc

SEQ ID NO: 451203 - DNA, 120 bp, Artificial Sequence
  ENSG00000155816_38 (sequence is synthesized)
gtcgcaaactggaattactacagaaattgtgtgagacattaaaaaatggcccaggggttatgcaggttctaggtttggttcttgcctttggcaactacatgaatggaggaaataagactc

SEQ ID NO: 451204 - DNA, 120 bp, Artificial Sequence
  ENSG00000155816_39 (sequence is synthesized)
gaggacaggcagatggctttggattagacattcttccaaaactgaaagatgtcaagagcagtgacaatagcagaagccttttgtcatatattgtttcgtattatctccgaaattttgatg

SEQ ID NO: 451205 - DNA, 120 bp, Artificial Sequence
  ENSG00000155816_40 (sequence is synthesized)
aggatgctggaaaagaacagtgcctctttccactgccagaaccccaggacctttttcaggcctcacagatgaagtttgaagattttcaaaaagatctcagaaaactgaagaaagacttga

SEQ ID NO: 451206 - DNA, 120 bp, Artificial Sequence
  ENSG00000155816_41 (sequence is synthesized)
aagcctgtgaagttgaagcagggaaagtataccaggtctcctcaaaagagcatatgcagcctttcaaggaaaacatggaacaatttattattcaagccaaaattgaccaagaggcagagg

SEQ ID NO: 451207 - DNA, 120 bp, Artificial Sequence
  ENSG00000155816_42 (sequence is synthesized)
aaaattcactgacagagactcataaatgctttttggagaccacggcatatttcttcatgaaaccaaaacttggagagaaggaggtgtccccaaatgctttcttcagtatctggcatgaat

SEQ ID NO: 451208 - DNA, 120 bp, Artificial Sequence
  ENSG00000155816_43 (sequence is synthesized)
tcagctctgactttaaagacttctggaagaaagagaacaaacttcttctacaagagagagtaaaagaagccgaagaggtgtgtagacagaagaaaggaaaatcactttataaaataaaac

SEQ ID NO: 451209 - DNA, 120 bp, Artificial Sequence
  ENSG00000155816_44 (sequence is synthesized)
caagacatgactctggaattaaagcaaagataagcatgaaaacttgaacaatgaaaagcagaatgaaaatgagtcattgcaacgactttcacaaaattcagctgacctgagagtgggagg

SEQ ID NO: 451210 - DNA, 120 bp, Artificial Sequence
  ENSG00000155816_45 (sequence is synthesized)
gaaactaccgtcattctgctcatgtttcttcttgacctcttgcataatctttttgttttctagacagttcactaattgttgaattttactgtatattcatataaaaatgcaaacgtacta

SEQ ID NO: 451211 - DNA, 120 bp, Artificial Sequence
  ENSG00000155816_46 (sequence is synthesized)
gaccagtggagaatttgacaccttttctttttgtaaaagtttatggtattataccgatagaccaaaacagcatgtgtaagaggcagtatctgcactaattctcaacatgctaaacattaa

SEQ ID NO: 451212 - DNA, 120 bp, Artificial Sequence
  ENSG00000155816_47 (sequence is synthesized)
ctacaattcactgttgtgagaatattcctcgtcacagcaaaaacactttcctttctactgacaaccagtcctccacatcacagcatttagacatatgggtaaaatgttatttctagtgaa

SEQ ID NO: 451213 - DNA, 120 bp, Artificial Sequence
  ENSG00000155816_48 (sequence is synthesized)
ttgtttgtatcagtttcatgtctaagtataaattttctattttaaaatttaagaaccgtttataatcagtgctttcccaactcttgggttgctctccataactatgtatttgtgaaagaa

SEQ ID NO: 451214 - DNA, 120 bp, Artificial Sequence
  ENSG00000155816_49 (sequence is synthesized)
aatggtcattttttttactgaagtcatataatgacttgggtcagctcgtaatgcattgtgatggttttgtatgagctgggtgtttttttccattacttttaatgatcttcgttgcaagtt

SEQ ID NO: 451215 - DNA, 120 bp, Artificial Sequence
  ENSG00000155816_50 (sequence is synthesized)
atagttgtggataaaggggagaatttattgctcttgcaaaccaattatggaaagcaacttaagaaaaccaatgttctaaatcataattgtttgtatttatgtaaagtatggtctcttact

SEQ ID NO: 451216 - DNA, 120 bp, Artificial Sequence
  ENSG00000155816_51 (sequence is synthesized)
ttttagtttgtagtttaagtgcaaagaaacagtagtggttttttttctattgttttgtagtcttcctgtccccttcagtccctccagtgtgtatattaccattctccaatgaaataatag

SEQ ID NO: 451217 - DNA, 120 bp, Artificial Sequence
  ENSG00000155816_52 (sequence is synthesized)
ggcatttaacaaagatcgctatgtgcaatactgtatttagtgtttctatttcaatttttctaggatgttaatttatatgaaaataaaatgaataataaaagaataaagatacttgcaaaa

SEQ ID NO: 451218 - DNA, 120 bp, Artificial Sequence
  ENSG00000155816_53 (sequence is synthesized)
atcgccagaatggctgaacccaggcgctttctacggctctctttcctcttggtcagctccaagtatgagatttatgaacgttgaagaggttcattgattcaccattgtggtacaggatgt

SEQ ID NO: 451219 - DNA, 120 bp, Artificial Sequence
  ENSG00000155816_54 (sequence is synthesized)
gttaaaaggggactgacaggatgaaggcagtacagaatgctgggctgagagcaggactgagatcctagaggcagaatcccagtctacccgtactctctgggaggaagtgatgagaacttg

SEQ ID NO: 451220 - DNA, 120 bp, Artificial Sequence
  ENSG00000155816_55 (sequence is synthesized)
cagcagggtggtggtagtgaaagagaagaatgaaagacaaggaagcatcagtggaacttgatgtgtggctggataccagaaatgcagaggaagttagtcaaaggttcccgtcctgatgac

SEQ ID NO: 451221 - DNA, 120 bp, Artificial Sequence
  ENSG00000155816_56 (sequence is synthesized)
attcctgccctggtggagcttacattatagaagggaggtccagaccatcaataaatatacagcgaagctccaaggaaaaacagagcagggcaaagagaagacagctatgggaggtggttt

SEQ ID NO: 451222 - DNA, 120 bp, Artificial Sequence
  ENSG00000155816_57 (sequence is synthesized)
attttatataaattagccagacagtgcctctgagaggtgatgtctaagcagggactcggagatgagggaataagctaatggatatctgaagaaagaaccttccacatggatgaagcatcg

SEQ ID NO: 451223 - DNA, 120 bp, Artificial Sequence
  ENSG00000155816_58 (sequence is synthesized)
catgcaaagctcaaggaaggagcatgtttagtcaagtgcctaaagtggctggagcagagtgagtgagagttgagaggtagaagatgaattcggagagggagcattggggccagactatgt

SEQ ID NO: 451224 - DNA, 120 bp, Artificial Sequence
  ENSG00000155816_59 (sequence is synthesized)
agcctagtgggccaagtgaggtcaggcctttaagaaggagcgtattgaggaagaaccatgcacactactgctagtgctagggtgagaaagatgaggactgagaactgacctggatttggg

SEQ ID NO: 451225 - DNA, 120 bp, Artificial Sequence
  ENSG00000155816_60 (sequence is synthesized)
atcttgggtgaatgagtgacatccgcaagagtagtctctgttgactggttagggacagatgtctgattaactgggagcacaggaagctggggcagtgactctaggtaacacgctcttgag

SEQ ID NO: 451226 - DNA, 120 bp, Artificial Sequence
  ENSG00000155816_61 (sequence is synthesized)
gcattggtatatgtaaagggtcacaatggaaaggaaagctagcaggagggcaagggaattagggttttgtttttgtgtttatttttggtgctgggataaacagcgtatgtgtcactgggt

SEQ ID NO: 451227 - DNA, 120 bp, Artificial Sequence
  ENSG00000155816_62 (sequence is synthesized)
agaaatgatccagtaaaggaaaaattgtgaactttgttctctcttaatatgtgtgtttcgttgattcattcctgacttgtatctcccacatcttatcccttaattaagccattcttcctc

SEQ ID NO: 451228 - DNA, 120 bp, Artificial Sequence
  ENSG00000155816_63 (sequence is synthesized)
ttgcataattgcaaattattatgatataaatagctttgttgtactcttttatgagttttacagggaggaaattgcataaactctctataaagtaatttctatgtttaaaagcccttaagt

SEQ ID NO: 451229 - DNA, 120 bp, Artificial Sequence
  ENSG00000155816_64 (sequence is synthesized)
tctcccgccccatagcctgaccaaaaaagtcttactaaacaaaaataggatacaaatgatccatacacatcatcctggctagagaagggtcagaaactacagtgttgttagaaccaatag

SEQ ID NO: 451230 - DNA, 120 bp, Artificial Sequence
  ENSG00000155816_65 (sequence is synthesized)
agcttaactttatatctcactggctttaataaaaaacttttctgagctatttgacacaaaaatcactaagattaagaaaatatcttaacacaggtggaaatagtaaaaggatgtttgcat

SEQ ID NO: 451231 - DNA, 120 bp, Artificial Sequence
  ENSG00000155816_66 (sequence is synthesized)
gaaaaccgtcaaatgtaataaacagcactattctctgataataaaagatgaatctggctgtcagatgcaattttataatagcttcgaccatcatgtacggcaggagtatttttttttatt

SEQ ID NO: 451232 - DNA, 120 bp, Artificial Sequence
  ENSG00000155816_67 (sequence is synthesized)
tactatcgttaagtttgtggaaccagtgattgttgttttactattttgttaaggaaacctaaaacattcttagaatgtacagaaagaatatggtcattcttataggaccaaagggcgtat

SEQ ID NO: 451233 - DNA, 120 bp, Artificial Sequence
  ENSG00000155816_68 (sequence is synthesized)
accatgaaaatccaagtctgacatggaattaaaatcatctctactacaagatgcagaaaaaaaccaaactcttttttttctatatcagagacttaaaaatattagtgatgaccaatgtga

SEQ ID NO: 451234 - DNA, 120 bp, Artificial Sequence
  ENSG00000155816_69 (sequence is synthesized)
ttagaagctttaaaatcctaacatttatgtgaacaaaaatcttcctgttttcagagacttaagcatatcatctgagcattgaaaaaagctcttaatagtacctttcagatttctcatctg

SEQ ID NO: 451235 - DNA, 120 bp, Artificial Sequence
  ENSG00000155816_70 (sequence is synthesized)
ttttcagatcccatattaaactccttgtggaagaatgagaaagaaagctactctaaattttacagaatagaattcaggctctttatttacaaaatggagtgtgaaccttgctgtttactc

SEQ ID NO: 451236 - DNA, 120 bp, Artificial Sequence
  ENSG00000155816_71 (sequence is synthesized)
atctaccccctcaagcaattgtgttttccttccttatcagcacagaccatcacagttccaggatttgtctgagatgctagccacctctgattgctattcactggacactcttgtgattgt

SEQ ID NO: 451237 - DNA, 120 bp, Artificial Sequence
  ENSG00000155816_72 (sequence is synthesized)
gatttaagattgtaggccaggcatgagccaccgcgcccagccggcatgtaaatttttatgtgacactttttttttggtggggggtggcaggggagagggtctcactgttgcccaggctag

SEQ ID NO: 451238 - DNA, 87 bp, Artificial Sequence
  ENSG00000155816_73 (sequence is synthesized)
ggggtggcaggggagagggtctcactgttgcccaggctagagtgcagaggtgctgatcacagctcactgcagggcacgtgtggagtc

SEQ ID NO: 451239 - DNA, 120 bp, Artificial Sequence
  ENSG00000155816_74 (sequence is synthesized)
aagtgctgggattgcaggcatgagctactccgccctggctgtgatactctttaattattctaatgcttctaacttacgtcatggtgccaatcctatttatataatagaatcaatctcata

SEQ ID NO: 451240 - DNA, 120 bp, Artificial Sequence
  ENSG00000155816_75 (sequence is synthesized)
aatcctatttatataatagaatcaatctcatactctcagctgacaatgaggggtatttcattttttacttgtatataagattccttttatataggatgaaatgcatacacactctgcata

SEQ ID NO: 451241 - DNA, 120 bp, Artificial Sequence
  ENSG00000155816_76 (sequence is synthesized)
gaaattcttatgtgtttgtatattactccattcaatcatactatgattccaagttaagaactcctagataaattagcgtctgtagctgtaacagttgaggctttcaattcaaatgtcaga

SEQ ID NO: 451242 - DNA, 120 bp, Artificial Sequence
  ENSG00000155816_77 (sequence is synthesized)
taacattcttctgtgtattgtattattttctgcagtaattcaaatctttattgagttgaggtttgctcacttactataaggtagaatgaggtgatctaagtaggttttgtttaaatacat

SEQ ID NO: 451243 - DNA, 120 bp, Artificial Sequence
  ENSG00000155816_78 (sequence is synthesized)
aagcttttcctgtcttctggtgaagtcaaccagtacctttgagaataaggagccatctcccctcttcttcctctgccccatatcaaagttggcctggcagaaaaaaatcccacccagaat

SEQ ID NO: 451244 - DNA, 120 bp, Artificial Sequence
  ENSG00000155827_0 (sequence is synthesized)
aagttctgccttgtctccgccgcgggtcaggggtgagagctggaatctctgcacgggccttggaaaacgactgtcttcttctgccaaaatgtcaggaattggaaataaaagagcagctgg

SEQ ID NO: 451245 - DNA, 120 bp, Artificial Sequence
  ENSG00000155827_1 (sequence is synthesized)
agaacctggcacctccatgcctcctgagaagaaggcagctgttgaagattcagggaccacagtggaaacaattaagctaggaggtgtctcttcaacggaggaactagacattagaacact

SEQ ID NO: 451246 - DNA, 120 bp, Artificial Sequence
  ENSG00000155827_2 (sequence is synthesized)
gcaaaccaaaaatcgcaagctggcagaaatgttggatcagcggcaggccattgaagatgaacttcgtgagcacattgaaaaactggaacgacgacaggccactgatgatgcctcactatt

SEQ ID NO: 451247 - DNA, 120 bp, Artificial Sequence
  ENSG00000155827_3 (sequence is synthesized)
gattgtcaaccgatactggagtcagtttgatgaaaacatccgtatcatccttaaacgttatgatctggagcagggcttgggagacctactcacagaacgaaaagcccttgttgtgcctga

SEQ ID NO: 451248 - DNA, 120 bp, Artificial Sequence
  ENSG00000155827_4 (sequence is synthesized)
accagaaccagactctgatagcaatcaggagcgtaaagatgaccgagagagaggggaagggcaagagccagctttctctttccttgctactttggccagcagttccagtgaagagatgga

SEQ ID NO: 451249 - DNA, 120 bp, Artificial Sequence
  ENSG00000155827_5 (sequence is synthesized)
gtctcagctgcaggaacgtgtggagtcttcccgccgagccgtgtcccagattgtgactgtttatgataaattgcaagaaaaagtggagctcttatcccggaagctaaacagtggagataa

SEQ ID NO: 451250 - DNA, 120 bp, Artificial Sequence
  ENSG00000155827_6 (sequence is synthesized)
tctgatagtggaggaagcagtgcaggagctgaactctttcctcgcacaggagaatatgaggctacaggaattgacagatcttcttcaggaaaagcatcgcaccatgtctcaggagttctc

SEQ ID NO: 451251 - DNA, 120 bp, Artificial Sequence
  ENSG00000155827_7 (sequence is synthesized)
caagttgcagagtaaagtggagacagccgaatcacgagtgtctgtcctggagtccatgattgatgacctgcagtgggatattgacaaaattcgaaagagggaacagcgactcaaccgaca

SEQ ID NO: 451252 - DNA, 120 bp, Artificial Sequence
  ENSG00000155827_8 (sequence is synthesized)
cttagcagaagtcctagaacgggtgaattccaaaggttataaggtgtatggagcggggagcagtctgtatggcggcacaatcactatcaatgctcggaagtttgaggaaatgaatgcaga

SEQ ID NO: 451253 - DNA, 120 bp, Artificial Sequence
  ENSG00000155827_9 (sequence is synthesized)
gcttgaggagaacaaagagttggctcagaaccgtctctgtgagctggagaaacttcggcaagactttgaggaggtcactacacaaaatgaaaagctgaaggtggaattgcggagtgcagt

SEQ ID NO: 451254 - DNA, 120 bp, Artificial Sequence
  ENSG00000155827_10 (sequence is synthesized)
ggagcaagtcgttaaggaaactccagaatatcgctgcatgcagtcacagttctccgtcttgtataatgagagcctacagttgaaagcacacttggatgaggctcggaccctgcttcatgg

SEQ ID NO: 451255 - DNA, 120 bp, Artificial Sequence
  ENSG00000155827_11 (sequence is synthesized)
caccagaggaacccaccagcaccaggttgagcttattgagcgagatgaggttagtcttcataagaagctgaggactgaagtaattcagctagaagatacattggcccaggtccgcaagga

SEQ ID NO: 451256 - DNA, 120 bp, Artificial Sequence
  ENSG00000155827_12 (sequence is synthesized)
gtatgaaatgctgaggatagaatttgagcagacccttgctgccaatgaacaagcaggccctataaacagggagatgcgccacctcatcagtagcctccagaatcacaatcaccagctgaa

SEQ ID NO: 451257 - DNA, 120 bp, Artificial Sequence
  ENSG00000155827_13 (sequence is synthesized)
aggggaggtcctgagatataagcggaaattgagagaagcccagtctgacctgaacaagacacgcctgcgtagtggtagtgccctcctgcagtcccagtctagtactgaggacccgaagga

SEQ ID NO: 451258 - DNA, 120 bp, Artificial Sequence
  ENSG00000155827_14 (sequence is synthesized)
tgagcctgcggagctaaaaccagattctgaggacttatcctcccagtcctcagcttcaaaggcatctcaggaggatgccaatgaaatcaagtctaaacgggatgaagaagaacgagaacg

SEQ ID NO: 451259 - DNA, 120 bp, Artificial Sequence
  ENSG00000155827_15 (sequence is synthesized)
agaaaggagggagaaggagagggaacgagaaagagaacgggagaaggagaaggagagagaacgagagaagcagaagctaaaagagtcagaaaaagagagagattctgctaaggataaaga

SEQ ID NO: 451260 - DNA, 120 bp, Artificial Sequence
  ENSG00000155827_16 (sequence is synthesized)
aactattgctggatatgtaccgttctgccccaaaggaacagagagacaaagttcagctgatggcagctgagaagaagtctaaggcagagttggaagatctaaggcaaagactcaaggatc

SEQ ID NO: 451261 - DNA, 120 bp, Artificial Sequence
  ENSG00000155827_17 (sequence is synthesized)
tggaagataaagagaagaaagagaacaagaaaatggctgatgaggatgccttgaggaagatccgggcagtggaggagcagatagaatacctacagaagaagctagccatggccaagcagg

SEQ ID NO: 451262 - DNA, 120 bp, Artificial Sequence
  ENSG00000155827_18 (sequence is synthesized)
aagaagaagcactcctctctgaaatggatgtcacaggccaggcctttgaagacatgcaggagcaaaatatccgtttgatgcagcaattgcgggagaaggatgatgcaaatttcaagctca

SEQ ID NO: 451263 - DNA, 120 bp, Artificial Sequence
  ENSG00000155827_19 (sequence is synthesized)
tgtcagagcgtatcaagtccaatcagatccataagttgcttaaagaagagaaggaggagctggcagaccaggtgttgactctgaagactcaggttgatgcccagctacaggtagtaagga

SEQ ID NO: 451264 - DNA, 120 bp, Artificial Sequence
  ENSG00000155827_20 (sequence is synthesized)
aactggaagagaaggagcatctgttacagagcaacattggcacaggggagaaagagctgggtcttaggacccaagccttagagatgaataaacgcaaggcaatggaggcagcccagcttg

SEQ ID NO: 451265 - DNA, 120 bp, Artificial Sequence
  ENSG00000155827_21 (sequence is synthesized)
cagatgacctcaaagcacaactggagttggctcagaagaagctacatgattttcaggatgagatcgtggagaacagtgttaccaaagaaaaggacatgttcaatttcaaacgagcccagg

SEQ ID NO: 451266 - DNA, 120 bp, Artificial Sequence
  ENSG00000155827_22 (sequence is synthesized)
aggacatctctagacttcgcaggaagctggagaccacaaagaaaccagacaatgtacccaagtgtgatgagattctgatggaagagattaaggattacaaggcacgcttgacctgtccgt

SEQ ID NO: 451267 - DNA, 120 bp, Artificial Sequence
  ENSG00000155827_23 (sequence is synthesized)
gctgtaacatgcgtaaaaaggatgctgttcttactaagtgttttcatgtcttctgctttgagtgtgtgaagacacgctatgacacccgccagcgcaaatgtcccaagtgtaatgctgctt

SEQ ID NO: 451268 - DNA, 120 bp, Artificial Sequence
  ENSG00000155827_24 (sequence is synthesized)
ttggtgccaatgattttcatcgcatctacattggttgatctaagtcaagagaagaagaggagctggctagtcaggaacttattcattaaccaccaaacctctacctcttctctccttgac

SEQ ID NO: 451269 - DNA, 120 bp, Artificial Sequence
  ENSG00000155827_25 (sequence is synthesized)
tgtcacctgtaggacagtttatcagtcaactacctttcctccagactttacttccaggctctcctcttcagtagctggatgactttagcagaaaggactggtaaatacaagccttgggtt

SEQ ID NO: 451270 - DNA, 120 bp, Artificial Sequence
  ENSG00000155827_26 (sequence is synthesized)
tcagaatgaattagaaacaaataactcttactgtcttccctcccagctttgtttattttgtgcttttagacttttcagtgttttctttttccagcccactgtataaacttggattgtcca

SEQ ID NO: 451271 - DNA, 120 bp, Artificial Sequence
  ENSG00000155827_27 (sequence is synthesized)
ttcctcctgaagaaatcaagttggtatttttgatgtggaaaagggaacaaaagtggaaacatggctacttttggggagtgatattttaaaaaataagttgtctatgggcacaaagttttc

SEQ ID NO: 451272 - DNA, 120 bp, Artificial Sequence
  ENSG00000155827_28 (sequence is synthesized)
ttcatttgtgtagcaaacttcttgtgaatgtggattacaaaatggtataattgtgctactctcccctgggtggtttgcagccctaatgaaattatgtctaggatgattcagtctatttcc

SEQ ID NO: 451273 - DNA, 120 bp, Artificial Sequence
  ENSG00000155827_29 (sequence is synthesized)
catttactagcagagtaacttgttaagatcagctggctttcttgttaaagttatttaagttttgaatgctctactacttcaagtctttaaatttcttgagactagaataattttaaataa

SEQ ID NO: 451274 - DNA, 120 bp, Artificial Sequence
  ENSG00000155827_30 (sequence is synthesized)
tatgaccctttgtcttctaatgaaataaagattgaagaggttgagtcaggactgagctggtgaagaaatcttgtgggtattctggaaatttgatacggagagaacttggtgagctatgaa

SEQ ID NO: 451275 - DNA, 120 bp, Artificial Sequence
  ENSG00000155827_31 (sequence is synthesized)
ttactctcagtctcctttttacagggttgttgtgatccctcttttccagaaaattctgtggaatgtttctgtaggactttgttctccacaagcttgaattaaagcaggattcagtttgca

SEQ ID NO: 451276 - DNA, 120 bp, Artificial Sequence
  ENSG00000155827_32 (sequence is synthesized)
aaagaacttaggttagatcacgcttagggcccaacaggactgtgccaggcctcaggagtctccaccctctccagttttggggccgtcagtctcctgggcctgcaattatccacgctgagg

SEQ ID NO: 451277 - DNA, 120 bp, Artificial Sequence
  ENSG00000155827_33 (sequence is synthesized)
ctgaggtctttggcttttagcgagttggattgcagccttgttctgcttctgtgtcttctctctccaggcgaggtcctactgaggttgttgccagcgatagtcctctcctggagcttgaat

SEQ ID NO: 451278 - DNA, 120 bp, Artificial Sequence
  ENSG00000155827_34 (sequence is synthesized)
ggaagcagagtagtcttgttagtctcggtgatggctgcgttgtttcctgaagtagccaaagtgctttagcatccattccgcctcctttgagcaccctgggaggaaaacgactgtcttctt

SEQ ID NO: 451279 - DNA, 120 bp, Artificial Sequence
  ENSG00000155827_35 (sequence is synthesized)
gaggtgtctcttcaacgactaatacgattggtttactgggcaggaggaactagacattagaacactgcaaaccaaaaatcgcaagctggcagaaatgttggatcagcggcaggccattga

SEQ ID NO: 451280 - DNA, 120 bp, Artificial Sequence
  ENSG00000155827_36 (sequence is synthesized)
acgggccttggtgagtaactgctgcgagttctgttcccgcgcggcgccagttcaaagaacttaggaaaacgactgtcttcttctgccaaaatgtcaggaattggaaataaaagagcagct

SEQ ID NO: 451281 - DNA, 120 bp, Artificial Sequence
  ENSG00000155827_37 (sequence is synthesized)
atcagtaatagtttgagatttctaacatactgtattttgtgggcttatagattaacagaatagttttttttctttttttaatcttttcatttgtgttaaaatctgattttctgttcaaag

SEQ ID NO: 451282 - DNA, 120 bp, Artificial Sequence
  ENSG00000155827_38 (sequence is synthesized)
ctagacttgaggaagtttgttgagggaagagagtaagtctgttttcttcactgccatatcctcagactcttttatggtgccttgcacctagtaggcacaaaataaatatttgttaaatta

SEQ ID NO: 451283 - DNA, 120 bp, Artificial Sequence
  ENSG00000155833_0 (sequence is synthesized)
agtttgaacttacaatacttaagtcctggcaagtcataagtggggaaaatgtctctcccaagattccaaagagtaaactttgggccatatgataattacattccagtcagtgaattaagc

SEQ ID NO: 451284 - DNA, 120 bp, Artificial Sequence
  ENSG00000155833_1 (sequence is synthesized)
aaaaaatcatggaatcagcaacactttgccctgttatttcccaaaccacaacggccaggaaccaaaaggagatcaaaaccttctcaaatacgggacaacacggtttctataattgatgaa

SEQ ID NO: 451285 - DNA, 120 bp, Artificial Sequence
  ENSG00000155833_2 (sequence is synthesized)
gaacaattaagaggagatcgtagacaaccattatggatgtaccgttctttaatgagaatttctgagagaccatctgtttatttagctgccaggaggcagcctctcaaaccaactcgtact

SEQ ID NO: 451286 - DNA, 120 bp, Artificial Sequence
  ENSG00000155833_3 (sequence is synthesized)
gtcgaggtggattctaaagcagcagaaattggtaagaaaggtgaagacaagacaacacagaaggacacaacagattcggaatcagaattaaaacaaggaaaaaaagattcaaagaaaggc

SEQ ID NO: 451287 - DNA, 120 bp, Artificial Sequence
  ENSG00000155833_4 (sequence is synthesized)
aaggatatagagaaaggaaaagaagaaaagctagatgcaaagaaagatagcaaaaaaggtaaaaaggatgcagagaagggcaaagactcagcaacagaatctgaagatgaaaaaggaggt

SEQ ID NO: 451288 - DNA, 120 bp, Artificial Sequence
  ENSG00000155833_5 (sequence is synthesized)
gcaaagaaagataacaaaaaagataaaaaggattcaaacaaaggcaaagactcggcaacagaatctgaaggtgaaaaaggaggtacagagaaagatagcaaaaaaggtaaaaaggattca

SEQ ID NO: 451289 - DNA, 120 bp, Artificial Sequence
  ENSG00000155833_6 (sequence is synthesized)
aagaagggcaaggattcagccatagaattacaagctgtaaaagcagatgaaaagaaggatgaggatggaaaaaaagatgcaaacaaaggtgatgaatcgaaggatgccaagaaagatgca

SEQ ID NO: 451290 - DNA, 120 bp, Artificial Sequence
  ENSG00000155833_7 (sequence is synthesized)
aaggagattaaaaaaggtaagaaagataagaagaagcccagtagtacagacagtgactcaaaggatgatgtcaagaaagagtctaagaaggacgccacgaaagatgccaagaaagttgcc

SEQ ID NO: 451291 - DNA, 120 bp, Artificial Sequence
  ENSG00000155833_8 (sequence is synthesized)
aggatgcaaagaagaagggcaagtaggccttggataagaatttgaaccgaaagaataattcaaaagcatatttgatgaaacaatagtggtagtctgcagctgaatttgtgagaaaacaag

SEQ ID NO: 451292 - DNA, 120 bp, Artificial Sequence
  ENSG00000155833_9 (sequence is synthesized)
aggcctcaaagaattaaataatttttaaaaggtggtaaagaaggatacaaaggagaactcagcagagatttataaaaatatataagaaagatgttaagaaaaattaaggggggatccatt

SEQ ID NO: 451293 - DNA, 120 bp, Artificial Sequence
  ENSG00000155833_10 (sequence is synthesized)
gaaagacttgaagaatacatatacttatattcggggatatgaaggattcaatgaatgatctctagaaagatttaaagaagaatattcagataaggatgttgaagataatgacactaaatc

SEQ ID NO: 451294 - DNA, 120 bp, Artificial Sequence
  ENSG00000155833_11 (sequence is synthesized)
cacacacacacacacacacacacagtttaatgaaggcttaaagaatccaaggagacagatgttgtatctatagatttaaaataatctcaagctgcatccacagatacaaaaaaatatagg

SEQ ID NO: 451295 - DNA, 120 bp, Artificial Sequence
  ENSG00000155833_12 (sequence is synthesized)
tctcaagctgcatccacagatacaaaaaaatataggagccatgaaatgaagttaaacaccttgtagaaagcctactttcaagtaaatatagcattcctttggcaaaaagaaaaaaaaagt

SEQ ID NO: 451296 - DNA, 120 bp, Artificial Sequence
  ENSG00000155833_13 (sequence is synthesized)
aaaagaaaagaaaaaaaatgtattaccacccgatgagcctacatctttctttctgaagtttaaacaaccacagtcatgtttatggttgttggatgtgccacttccaatccaaaagaagca

SEQ ID NO: 451297 - DNA, 120 bp, Artificial Sequence
  ENSG00000155833_14 (sequence is synthesized)
gccacttccaatccaaaagaagcacacttgtctcgctctgttgccctggctggagttcagtgacatgatctcaggcttactacagcctccaccttcaggttcaagtgattctcctgcctc

SEQ ID NO: 451298 - DNA, 120 bp, Artificial Sequence
  ENSG00000155833_15 (sequence is synthesized)
agggaaggaaaatagctggcatttcttgctggagaaagttatcacaagtggaaaggttaccctagaaacaaaagatgactaccgtgaggatggattggacattacaccacactggaaaag

SEQ ID NO: 451299 - DNA, 120 bp, Artificial Sequence
  ENSG00000155833_16 (sequence is synthesized)
tgaaacatctcattcagttggtgatcttcctgtcatgaaagttgcttgacagctctaattacgaattgaacacattaaacacctggtgaaattatcaattaaaaacatctagtcaccata

SEQ ID NO: 451300 - DNA, 120 bp, Artificial Sequence
  ENSG00000155833_17 (sequence is synthesized)
ttctattcataattgctcacaatcagcctctcctcctactactgttcctactctctataccctttgtgtctgctcagactaccgtgaggatggattggacattacaccacactggaaaag

SEQ ID NO: 451301 - DNA, 120 bp, Artificial Sequence
  ENSG00000155846_0 (sequence is synthesized)
gactccgccgcacgctgcagccgcggctggaagatggcggggaacgactgcggcgcgctgctggacgaagagctctcctccttcttcctcaactatctcgctgacacgcagggtggaggg

SEQ ID NO: 451302 - DNA, 120 bp, Artificial Sequence
  ENSG00000155846_1 (sequence is synthesized)
tccggggaggagcaactctatgctgactttccagaacttgacctctcccagctggatgccagcgactttgactcggccacctgctttggggagctgcagtggtgcccagagaactcagag

SEQ ID NO: 451303 - DNA, 120 bp, Artificial Sequence
  ENSG00000155846_2 (sequence is synthesized)
actgaacccaaccagtacagccccgatgactccgagctcttccagattgacagtgagaatgaggccctcctggcagagctcaccaagaccctggatgacatccctgaagatgacgtgggt

SEQ ID NO: 451304 - DNA, 120 bp, Artificial Sequence
  ENSG00000155846_3 (sequence is synthesized)
ctggctgccttcccagccctggatggtggagacgctctatcatgcacctcagcttcgcctgccccctcatctgcaccccccagccctgccccggagaagccctcggccccagcccctgag

SEQ ID NO: 451305 - DNA, 120 bp, Artificial Sequence
  ENSG00000155846_4 (sequence is synthesized)
gtggacgagctctcactgctgcagaagctcctcctggccacatcctacccaacatcaagctctgacacccagaaggaagggaccgcctggcgccaggcaggcctcagatctaaaagtcaa

SEQ ID NO: 451306 - DNA, 120 bp, Artificial Sequence
  ENSG00000155846_5 (sequence is synthesized)
cggccttgtgttaaggcggacagcacccaagacaagaaggctcccatgatgcagtctcagagccgaagttgtacagaactacataagcacctcacctcggcacagtgctgcctgcaggat

SEQ ID NO: 451307 - DNA, 120 bp, Artificial Sequence
  ENSG00000155846_6 (sequence is synthesized)
cggggtctgcagccaccatgcctccagagtccccggctccctgccaaggaggacaaggagccgggtgaggactgcccgagcccccagccagctccagcctctccccgggactccctagct

SEQ ID NO: 451308 - DNA, 120 bp, Artificial Sequence
  ENSG00000155846_7 (sequence is synthesized)
ctgggcagggcagaccccggtgccccggtttcccaggaagacatgcaggcgatggtgcaactcatacgctacatgcacacctactgcctcccccagaggaagctgcccccacagacccct

SEQ ID NO: 451309 - DNA, 120 bp, Artificial Sequence
  ENSG00000155846_8 (sequence is synthesized)
gagccactccccaaggcctgcagcaacccctcccagcaggtcagatcccggccctggtcccggcaccactccaaagcctcctgggctgagttctccattctgagggaacttctggctcaa

SEQ ID NO: 451310 - DNA, 120 bp, Artificial Sequence
  ENSG00000155846_9 (sequence is synthesized)
gacgtgctctgtgatgtcagcaaaccctaccgtctggccacgcctgtttatgcctccctcacacctcggtcaaggcccaggccccccaaagacagtcaggcctcccctggtcgcccgtcc

SEQ ID NO: 451311 - DNA, 120 bp, Artificial Sequence
  ENSG00000155846_10 (sequence is synthesized)
tcggtggaggaggtaaggatcgcagcttcacccaagagcaccgggcccagaccaagcctgcgcccactgcggctggaggtgaaaagggaggtccgccggcctgccagactgcagcagcag

SEQ ID NO: 451312 - DNA, 120 bp, Artificial Sequence
  ENSG00000155846_11 (sequence is synthesized)
gaggaggaagacgaggaagaagaggaggaggaagaggaagaagaaaaagaggaggaggaggagtggggcaggaaaaggccaggccgaggcctgccatggacgaagctggggaggaagctg

SEQ ID NO: 451313 - DNA, 120 bp, Artificial Sequence
  ENSG00000155846_12 (sequence is synthesized)
gagagctctgtgtgccccgtgcggcgttctcggagactgaaccctgagctgggcccctggctgacatttgcagatgagccgctggtcccctcggagccccaaggtgctctgccctcactg

SEQ ID NO: 451314 - DNA, 120 bp, Artificial Sequence
  ENSG00000155846_13 (sequence is synthesized)
tgcctggctcccaaggcctacgacgtagagcgggagctgggcagccccacggacgaggacagtggccaagaccagcagctcctacggggaccccagatccctgccctggagagcccctgt

SEQ ID NO: 451315 - DNA, 120 bp, Artificial Sequence
  ENSG00000155846_14 (sequence is synthesized)
gagagtgggtgtggggacatggatgaggaccccagctgcccgcagctccctcccagagactctcccaggtgcctcatgctggccttgtcacaaagcgacccaacttttggcaagaagagc

SEQ ID NO: 451316 - DNA, 120 bp, Artificial Sequence
  ENSG00000155846_15 (sequence is synthesized)
tttgagcagaccttgacagtggagctctgtggcacagcaggactcaccccacccaccacaccaccgtacaagcccacagaggaggatcccttcaaaccagacatcaagcatagtctaggc

SEQ ID NO: 451317 - DNA, 120 bp, Artificial Sequence
  ENSG00000155846_16 (sequence is synthesized)
aaagaaatagctctcagcctcccctcccctgagggcctctcactcaaggccaccccaggggctgcccacaagctgccaaagaagcacccagagcgaagtgagctcctgtcccacctgcga

SEQ ID NO: 451318 - DNA, 120 bp, Artificial Sequence
  ENSG00000155846_17 (sequence is synthesized)
catgccacagcccagccagcctcccaggctggccagaagcgtcccttctcctgttcctttggagaccatgactactgccaggtgctccgaccagaaggcgtcctgcaaaggaaggtgctg

SEQ ID NO: 451319 - DNA, 120 bp, Artificial Sequence
  ENSG00000155846_18 (sequence is synthesized)
aggtcctgggagccgtctggggttcaccttgaggactggccccagcagggtgccccttgggctgaggcacaggcccctggcagggaggaagacagaagctgtgatgctggcgccccaccc

SEQ ID NO: 451320 - DNA, 120 bp, Artificial Sequence
  ENSG00000155846_19 (sequence is synthesized)
aaggacagcacgctgctgagagaccatgagatccgtgccagcctcaccaaacactttgggctgctggagaccgccctggaggaggaagacctggcctcctgcaagagccctgagtatgac

SEQ ID NO: 451321 - DNA, 120 bp, Artificial Sequence
  ENSG00000155846_20 (sequence is synthesized)
actgtctttgaagacagcagcagcagcagcggcgagagcagcttcctcccagaggaggaagaggaagaaggggaggaggaggaggaggacgatgaagaagaggactcaggggtcagcccc

SEQ ID NO: 451322 - DNA, 120 bp, Artificial Sequence
  ENSG00000155846_21 (sequence is synthesized)
acttgctctgaccactgcccctaccagagcccaccaagcaaggccaaccggcagctctgttcccgcagccgctcaagctctggctcttcaccctgccactcctggtcaccagccactcga

SEQ ID NO: 451323 - DNA, 120 bp, Artificial Sequence
  ENSG00000155846_22 (sequence is synthesized)
aggaacttcagatgtgagagcagagggccgtgttcagacagaacgccaagcatccggcacgccaggaagcggcgggaaaaggccattggggaaggccgcgtggtgtacattcaaaatctc

SEQ ID NO: 451324 - DNA, 120 bp, Artificial Sequence
  ENSG00000155846_23 (sequence is synthesized)
tccagcgacatgagctcccgagagctgaagaggcgctttgaagtgtttggtgagattgaggagtgcgaggtgctgacaagaaataggagaggcgagaagtacggcttcatcacctaccgg

SEQ ID NO: 451325 - DNA, 120 bp, Artificial Sequence
  ENSG00000155846_24 (sequence is synthesized)
tgttctgagcacgcggccctctctttgacaaagggcgctgccctgaggaagcgcaacgagccctccttccagctgagctacggagggctccggcacttctgctggcccagatacactgac

SEQ ID NO: 451326 - DNA, 120 bp, Artificial Sequence
  ENSG00000155846_25 (sequence is synthesized)
tacgattccaattcagaagaggcccttcctgcgtcagggaaaagcaagtatgaagccatggattttgacagcttactgaaagaggcccagcagagcctgcattgataacagccttaaccc

SEQ ID NO: 451327 - DNA, 120 bp, Artificial Sequence
  ENSG00000155846_26 (sequence is synthesized)
tcgaggaatacctcaatacctcagacaaggcccttccaatatgtttacgttttcaaagaaatcaagtatatgaggagagcgagcgagcgtgagagaacacccgtgagagagacttgaaac

SEQ ID NO: 451328 - DNA, 120 bp, Artificial Sequence
  ENSG00000155846_27 (sequence is synthesized)
tgctgtcctttaaaaaaaaaaaaaatcaatgtttacattgaacaaagctgcttctgtctgtgagtttccatggtgttgacgttccactgccacattagtgtcctcgcttccaacgggttg

SEQ ID NO: 451329 - DNA, 120 bp, Artificial Sequence
  ENSG00000155846_28 (sequence is synthesized)
tcccgggtgcacctcgaagtgccgggtccgtcacccatcgccccttccttcccgactgacttcctctcgtagacttgcagctgtgttcaccataacatttcttgtctgtagtgtgtgatg

SEQ ID NO: 451330 - DNA, 120 bp, Artificial Sequence
  ENSG00000155846_29 (sequence is synthesized)
atgaaattgttacttgtgaatagaatcaggactataaacttcatttttaattgaaaaaaaaagtatatccttaaaataatgtatttatggctcagatgtactgtgcctgggattattgta

SEQ ID NO: 451331 - DNA, 120 bp, Artificial Sequence
  ENSG00000155846_30 (sequence is synthesized)
ttgcttccttgattttttaactatgcactgtcatgaggtgtttgccactgagctgccctgctccccttgccagattgccctggaggtgctgggtggccgctaggctggtctgcaggaaag

SEQ ID NO: 451332 - DNA, 120 bp, Artificial Sequence
  ENSG00000155846_31 (sequence is synthesized)
cgcggcctgccgtttccgggccgtatctgccaagccctgccttgtctcttactgagcaagtttggctcaaattataggagcccccatcttgtgcccagctcatgctccaagtgtgtgtct

SEQ ID NO: 451333 - DNA, 120 bp, Artificial Sequence
  ENSG00000155846_32 (sequence is synthesized)
atccatttgtactcagactcttgagtaccttgtaaggaaggcggggcaagctgcatcattcctgttttccaggggaggctggcagctcctcaagaggcgaaatgactgtgggaggtccgg

SEQ ID NO: 451334 - DNA, 120 bp, Artificial Sequence
  ENSG00000155846_33 (sequence is synthesized)
ttaccagtgaggaggcagagcggtgacccagaccaggccttctggttcttggtcccgtgcttccgtagtagctggggtaaagacaccgtttcagggactggtagaggtgagttcggctaa

SEQ ID NO: 451335 - DNA, 120 bp, Artificial Sequence
  ENSG00000155846_34 (sequence is synthesized)
attgggcaccgggctagaagcctaagggctcattttaggggttacattaggtgttgattcaccagcatcaggtgaattcaagccctggcatgtgtcttggatgcaccatcagctttgatc

SEQ ID NO: 451336 - DNA, 120 bp, Artificial Sequence
  ENSG00000155846_35 (sequence is synthesized)
ctgagtggtcctgcggtttgtctgtgcctgtggacacactgtcagaacttcagtgacacccctggcagcggtacagacaggtggtctgggagcagtcatcttttttgggccagccaccag

SEQ ID NO: 451337 - DNA, 120 bp, Artificial Sequence
  ENSG00000155846_36 (sequence is synthesized)
cccatcctactccctcaggtagtccttcgtctttaccttgtccttgtctgtaaagttgttttggtggctggggcaggggagccaggaggagggagtgaaggttgggaatagataggacaa

SEQ ID NO: 451338 - DNA, 120 bp, Artificial Sequence
  ENSG00000155846_37 (sequence is synthesized)
tctcctagctctcctccaattgagaaaacactccaattgggctttgctttaaactttgtgttcttaagtgatgtcaaagccatttccagcttaatgttctgtgggtaccttgggggccat

SEQ ID NO: 451339 - DNA, 120 bp, Artificial Sequence
  ENSG00000155846_38 (sequence is synthesized)
tcatgcagggagcatggccaggcagggtatgagtacattgtttctgatttctttcatacatcagggttcctcgggaaatttttgtattttttttttaagtcctgctgctttaaaaatttg

SEQ ID NO: 451340 - DNA, 120 bp, Artificial Sequence
  ENSG00000155846_39 (sequence is synthesized)
aaagtggctcattaaactaaacaggctaatgtaatttgttgcttatgccaagcctagactgttgagaattgacgtttttaaagattatcaaatacctcagtaggtaaaatgagcccatga

SEQ ID NO: 451341 - DNA, 120 bp, Artificial Sequence
  ENSG00000155846_40 (sequence is synthesized)
tcttccactgagtggtgagcatactcccagcccatggacaaggccggaagagacaggctttagtaggggtagggaatttgaactgttgtgtgtcacagcagttgacctctctggactcca

SEQ ID NO: 451342 - DNA, 120 bp, Artificial Sequence
  ENSG00000155846_41 (sequence is synthesized)
atttcctttcctgtgaaatgaactgattagacatgtttcaacattgttagcttctgctgaggcagtgtctagcccaagatggcaaatacatagctcatgtgccactactcccacctcctt

SEQ ID NO: 451343 - DNA, 120 bp, Artificial Sequence
  ENSG00000155846_42 (sequence is synthesized)
gaccaatacagacataactaatcaatcacaccactcaggttccctgagcctggatgtgctataagaatcctgaaatcagtgctctggtaagtcattactaattgattagagttcaatcta

SEQ ID NO: 451344 - DNA, 120 bp, Artificial Sequence
  ENSG00000155846_43 (sequence is synthesized)
tttgacatcttgggctaatctttggaaggtttccaacaatcacacaaaaccatatgctggctgggtttcatgctggcctatccctgtctgtgatgttccgttccatgagagaaaactccc

SEQ ID NO: 451345 - DNA, 120 bp, Artificial Sequence
  ENSG00000155846_44 (sequence is synthesized)
ttccatggcgtaacactcccaatactattttgacgcccacgtccccttgcagagggtgcagggggcggtagacgaatgacagacaggaacatatttggggaaggcagggcttaggaagat

SEQ ID NO: 451346 - DNA, 120 bp, Artificial Sequence
  ENSG00000155846_45 (sequence is synthesized)
ggaccaaaaagggacttcccacagcacagacctgatcattcggatttcctctttagctattcactgcctagcacatagtaggcacacaataaatgattatggaatgggataaaatttaga

SEQ ID NO: 451347 - DNA, 120 bp, Artificial Sequence
  ENSG00000155846_46 (sequence is synthesized)
tctttctgctgcctccactaagttaagtcctgatttacatcaaggagagaactgagataggaaagaacactagattccaagtctggagagttgggggagtccagattctaccaagaattt

SEQ ID NO: 451348 - DNA, 120 bp, Artificial Sequence
  ENSG00000155846_47 (sequence is synthesized)
cctttgtaactttggtaagtcccttttactccctggcaccccggtgtgctgaaaggagttggtccatatatgatctcttagcccctcctatttgcttcttccttgattgctcttggtcaa

SEQ ID NO: 451349 - DNA, 120 bp, Artificial Sequence
  ENSG00000155846_48 (sequence is synthesized)
agggtcagccttgggctggtgatactttagagtaaagaaatggagagttttagcaaaggaccagtctgtccctccctgctttggggtcagctaaagctgtcctttcatgtcagattaacc

SEQ ID NO: 451350 - DNA, 120 bp, Artificial Sequence
  ENSG00000155846_49 (sequence is synthesized)
taggacacttgtagttagcttagacgttggcccttgagcagagacctgagcgtggcattgggacatgacatacctaaagtcagggctaggggacgctgcctgccaagggcatcgagtagt

SEQ ID NO: 451351 - DNA, 120 bp, Artificial Sequence
  ENSG00000155846_50 (sequence is synthesized)
ctctacttgctatcccgtacataaaatgctacaagttctaaaatttaccgaccctgcagacaacctctatcccgaaggactcattcggtgctgtgtattatttagggcaactccaaggtc

SEQ ID NO: 451352 - DNA, 120 bp, Artificial Sequence
  ENSG00000155846_51 (sequence is synthesized)
tattcagaaaaacgagtgaaccttggtctctttcccaccaaattgaggagtaacccagagggagcagctgccattggcaaccatctcgttgtagctctgtcctagtgtttgctcttgatg

SEQ ID NO: 451353 - DNA, 120 bp, Artificial Sequence
  ENSG00000155846_52 (sequence is synthesized)
atgtttacatgtgatcgccataaagcttgctgtagactgtgtcgatagccgcccgcacagggcaggtcgtactgtccgtttctgtgccgtgctggtgttttccaaaaatgtctgatccaa

SEQ ID NO: 451354 - DNA, 120 bp, Artificial Sequence
  ENSG00000155846_53 (sequence is synthesized)
ccactaagtggaattcttccatctccttcctcagtctgtacaaggctgaatcagaatccccattctcgggggctctggttaccgaaggaaaatgcatcaaagagttaaagaatatgagtg

SEQ ID NO: 451355 - DNA, 120 bp, Artificial Sequence
  ENSG00000155846_54 (sequence is synthesized)
gatggagtgcagctaaggcccccaccccctgctccgtcacaacttgccccctcaaccaaaaagctgctttgagtcaaaaagcacccataagatacctgcatctgccttgaaatcttgcag

SEQ ID NO: 451356 - DNA, 120 bp, Artificial Sequence
  ENSG00000155846_55 (sequence is synthesized)
catggagtgtcatatgtactcaggagagaggcagggctttgcgggcaggagaaggaagggaggaatgctctgagctgcaaagacccagtactcaagttctgacgtgggaggagatgcagt

SEQ ID NO: 451357 - DNA, 120 bp, Artificial Sequence
  ENSG00000155846_56 (sequence is synthesized)
gagacgtctcttgttgcctaaagcctgttcctgttggttttcttagagtgatttctcctagacatgtgcagtaggcccactggggctgctgtgcagtggtgagtaaaagggcagggaagg

SEQ ID NO: 451358 - DNA, 120 bp, Artificial Sequence
  ENSG00000155846_57 (sequence is synthesized)
catggacagcctggtccttctgcatggacagctcagtccatggcccatcccaggtatagagttcagttaatcccatttgagcctgcagcttaagagatggctcatcctaactgtgaagca

SEQ ID NO: 451359 - DNA, 120 bp, Artificial Sequence
  ENSG00000155846_58 (sequence is synthesized)
aaatcagccccagaggatgtattgatctgactcactgatgtcaaaattgcagtatttttttagcatttgagatttagcagctgccttcagtttggggttacccacatcccagcatcagat

SEQ ID NO: 451360 - DNA, 120 bp, Artificial Sequence
  ENSG00000155846_59 (sequence is synthesized)
atgattaaggaaagaaattggatgtacaacagcaaagaaagtgaatgtcatggtttccctggccaaagaagagggaccctgtcatccttaccaatggggaagaagaaaactagtgcatgt

SEQ ID NO: 451361 - DNA, 120 bp, Artificial Sequence
  ENSG00000155846_60 (sequence is synthesized)
gcaatatgtcaaagttagtcccctagtccctgaggggtttttacacacagatgggctccaggtctgctcgtcaagtttggaggtaccgggtaaatggaggggagctgcagagttggaaac

SEQ ID NO: 451362 - DNA, 120 bp, Artificial Sequence
  ENSG00000155846_61 (sequence is synthesized)
ccacatgcatggatgtgtccttggcccagaaccaccatgggatgggggaggccctgagccggctacaagacacccaggaagtaggcaaaggctgactttgcattaaacaataaaagcact

SEQ ID NO: 451363 - DNA, 120 bp, Artificial Sequence
  ENSG00000155846_62 (sequence is synthesized)
ttgagaaaaccccaacacttcagcctgggtccgtgtttctacactggaaaatacgagtctcctttggctgtgtgaagtgatcttctagagactgggacagggagtttgggaatggggctg

SEQ ID NO: 451364 - DNA, 120 bp, Artificial Sequence
  ENSG00000155846_63 (sequence is synthesized)
ctgtcaggtaggagagagcagagatgcctttggagatgtcagcagcaggagagccagtgctggggccaaccctttgctggccttttgttggaagcccttgaaacagggagccatgggttt

SEQ ID NO: 451365 - DNA, 120 bp, Artificial Sequence
  ENSG00000155846_64 (sequence is synthesized)
agatcttggtacctacctttacagaaagatgaaaacagcccagctgagtgaaatgagtttgtagagtaagtcacttaactgtaagccatctcagaatcagaaaccctaatgtttcttact

SEQ ID NO: 451366 - DNA, 120 bp, Artificial Sequence
  ENSG00000155846_65 (sequence is synthesized)
tgctatgtgaccttgggcccctgtttcctcatctaccaaatgagaatgttgaatatgagcattaaagtccctttcacctctgagaggctcagatccccaaccaggagcattgggaatcca

SEQ ID NO: 451367 - DNA, 120 bp, Artificial Sequence
  ENSG00000155846_66 (sequence is synthesized)
tcactcctccttgaaactgattccattctctgacttgacccagctcctgttcagggtgagggttctctgcaagaaccaaccagcagtaggttcaatcccactgtgtcctggctgagttgc

SEQ ID NO: 451368 - DNA, 120 bp, Artificial Sequence
  ENSG00000155846_67 (sequence is synthesized)
cttatccaagaagaccagctccccgggacagatctaagccatagtttctagtggggacagtaaggaattaaacccccaacttggctaggtaacgatgtcaaatctcacattaaccttgtc

SEQ ID NO: 451369 - DNA, 120 bp, Artificial Sequence
  ENSG00000155846_68 (sequence is synthesized)
tttgtccccactggatagctgttaatccgaatgttgtgaccatttggctgtttctctcttgttctcagacaatactagcaatacactttttttttttttttttaaagaaaaacagcttag

SEQ ID NO: 451370 - DNA, 120 bp, Artificial Sequence
  ENSG00000155846_69 (sequence is synthesized)
gagcttttcacacatttctttcaaatgattgtaaaacatatggggcaacaggaggcattgatcgcgctgcatatgtttagggcagcttttgttttttgtttctttaatggtatagcagca

SEQ ID NO: 451371 - DNA, 120 bp, Artificial Sequence
  ENSG00000155846_70 (sequence is synthesized)
gtgactgagccttcgtgattcctggggacagcttttcagatactctgtttcatcagtatgctttgcacatccggaaggagtacaaaaatccaactgcccaaatttggggcttggaaaata

SEQ ID NO: 451372 - DNA, 120 bp, Artificial Sequence
  ENSG00000155846_71 (sequence is synthesized)
ggttttataggtggtcggtccctgggctgtgcaacaactcctcaaagaggggtttatataactagaacccccctgggctgtatttttggtcaaaggagtctccaaggcggcttacaaaag

SEQ ID NO: 451373 - DNA, 120 bp, Artificial Sequence
  ENSG00000155846_72 (sequence is synthesized)
cttcctttttcacttgaccacccttgctcattggttacttgtgaagggaattggtcagtttccacctcagcactttgccttatcaacatgcggtcgccatctagtggccaaaggttgtct

SEQ ID NO: 451374 - DNA, 120 bp, Artificial Sequence
  ENSG00000155846_73 (sequence is synthesized)
ccaccagctacccagatggaaggcaaataaatcctttcggccaccctgctgtccatcgtgaactttgggaatgaaatataatggcctgaacgaactgcctttgtgttcagagatcagtgc

SEQ ID NO: 451375 - DNA, 120 bp, Artificial Sequence
  ENSG00000155846_74 (sequence is synthesized)
aacactagggtcagaagactccagaagcagccacttagtagactctcacgcagaactgagaaatgcactagctgtcctgtgggcagaagagacaggagtggaccaggagaggtccaggtg

SEQ ID NO: 451376 - DNA, 120 bp, Artificial Sequence
  ENSG00000155846_75 (sequence is synthesized)
cccgggaagggtttactgtaactgcaatactggcagcccagctgctgaccttgttaagtaaacctttgctgggtggtccgaattctgccctcaaggcaagataagaagttgggtgtaagg

SEQ ID NO: 451377 - DNA, 120 bp, Artificial Sequence
  ENSG00000155846_76 (sequence is synthesized)
attttgtggggggcctggccatgatctttgatatgatccccgaatagccaaatagttttttttgttcaattttttgtttctgtattttgtatttttaaaatcttgtcaaatgtttttgtg

SEQ ID NO: 451378 - DNA, 120 bp, Artificial Sequence
  ENSG00000155846_77 (sequence is synthesized)
ttaggaataaaaagtcataaactattcccaactttgtttcttgagggatgttctgattccaatggaaacaggtgggaaatctcaaggggagcgtggacaaggtggtatgtgcagcagggg

SEQ ID NO: 451379 - DNA, 120 bp, Artificial Sequence
  ENSG00000155846_78 (sequence is synthesized)
aatagactgcttggatttccaaatggtttctggggaagatgaccatccagaagtccagcttagtgcagtctgctctggaattcacacccaccccctcgcctccttgtgccatgttgttag

SEQ ID NO: 451380 - DNA, 120 bp, Artificial Sequence
  ENSG00000155846_79 (sequence is synthesized)
cattggcttggagcatctgcttcttccagaggcagctgctaatgttgaaaccaacacgagccctctccccaaccccaggtttctaaagaaggtgtctgtagccagccttaatcaactggg

SEQ ID NO: 451381 - DNA, 120 bp, Artificial Sequence
  ENSG00000155846_80 (sequence is synthesized)
caaggtggtccctatggtcctttccagcatttccaaatcttggactcaaattattttctcttggtgtgaccacacagcctagagaattctgagcaataggagccagggctttccctgact

SEQ ID NO: 451382 - DNA, 120 bp, Artificial Sequence
  ENSG00000155846_81 (sequence is synthesized)
ctgcgacagggtcaaaccaaggaatggctaaacctgtgaggttttgtcatccccgggggtactactgtagggggcattatttattaggaagcttaacaaggtaactacggcctgagtgcg

SEQ ID NO: 451383 - DNA, 120 bp, Artificial Sequence
  ENSG00000155846_82 (sequence is synthesized)
caaggtaactacggcctgagtgcgtgagtgtaaggctgtgtttgtggtgggggtgtgtgtgtgtgtatctgtgcacacatacacacgtctgtgcctgtgtgtgtgtgtttgtgtgtgtgt

SEQ ID NO: 451384 - DNA, 120 bp, Artificial Sequence
  ENSG00000155846_83 (sequence is synthesized)
atttattgagaaaggtgcaagaatttcacctacacagagggacacatctgctttgttatttataatagaaagctaaattttaattttttaaaggacactgctaatgattgagaatcaagt

SEQ ID NO: 451385 - DNA, 120 bp, Artificial Sequence
  ENSG00000155846_84 (sequence is synthesized)
ttttagttttgctattttttttaattggtagaggatttttatatattttttccattttgttgggttgtgtccttatttatataaatactttatccgtaagaggcaaggaggaaaccttct

SEQ ID NO: 451386 - DNA, 120 bp, Artificial Sequence
  ENSG00000155846_85 (sequence is synthesized)
ttgcttttacatattgtggttgtcatcgtccctattttatttctggtgtgatttctctgtcttaccttctaaatgagaaaatgttttcttgtatttgtacattgtcagattctatagttt

SEQ ID NO: 451387 - DNA, 120 bp, Artificial Sequence
  ENSG00000155846_86 (sequence is synthesized)
cctagataatttaaccaaattgctctatgtattattattctgtgagtataaagttctattttaatgtctgtaaatacttcagaactggcttcttttctcaaactcccactgtggggttat

SEQ ID NO: 451388 - DNA, 120 bp, Artificial Sequence
  ENSG00000155846_87 (sequence is synthesized)
tgtttacatcacagaaactgtagaatctctatgctcatgtactgtaaatagtgaagtgatctgcttataaataaacttaacaaatacactatggagattaaaaacaaaataccacccaca

SEQ ID NO: 451389 - DNA, 120 bp, Artificial Sequence
  ENSG00000155846_88 (sequence is synthesized)
ccacaccccagtgtgctgcttggtataactttgcagccactttgcctgaagactaccatcctgtttctcttctggcctctggtccaccttatcctgtcctgtgactgctaccaaagagaa

SEQ ID NO: 451390 - DNA, 120 bp, Artificial Sequence
  ENSG00000155846_89 (sequence is synthesized)
tccagcctcccacggcctctaggaagattcagtcatgtgcacagccagctggcagaaccgtggctacggtctccttgacttcacagggccagctgctaccctgtccccttcaggggcatt

SEQ ID NO: 451391 - DNA, 120 bp, Artificial Sequence
  ENSG00000155846_90 (sequence is synthesized)
cattccgtggtgaccccagacaaggcagcagccacctggggacaagatgatgaagaaggacaaagaagtacaatgtacgaaagaattacttggccaggctcagtggctcatgcctgtaat

SEQ ID NO: 451392 - DNA, 90 bp, Artificial Sequence
  ENSG00000155846_91 (sequence is synthesized)
gctagaggtgggaggatcacctgaacccaagaggttggagctgcagtgagccatgatggcactactgcattccagcctgggcaacagagc

SEQ ID NO: 451393 - DNA, 120 bp, Artificial Sequence
  ENSG00000155846_92 (sequence is synthesized)
ccctgtctcaaaaggaaagaaaaaaaaaaaaacacttactggagagaatccaatgcagccttgatggtacaggactgagtgtcagtgacccggctgggtgccaggccaggcggccctgcc

SEQ ID NO: 451394 - DNA, 120 bp, Artificial Sequence
  ENSG00000155846_93 (sequence is synthesized)
cccggctgggtgccaggccaggcggccctgcccttggctgcatgtccatttatgggaatcagtttcccaatctattaaaaaattctagtgttggctgggtgcagttgctcacgcctgtaa

SEQ ID NO: 451395 - DNA, 68 bp, Artificial Sequence
  ENSG00000155846_94 (sequence is synthesized)
cagtgagctgagatcacatccttctagtgttgttagccctcccttatgtggcactgcagcaggttact

SEQ ID NO: 451396 - DNA, 120 bp, Artificial Sequence
  ENSG00000155846_95 (sequence is synthesized)
gttgttagccctcccttatgtggcactgcagcaggttactaatggacgagaagctgttgggggaagtagagttgtagggtgttggagctagaaaggctctggagtgctctagtttgggcc

SEQ ID NO: 451397 - DNA, 120 bp, Artificial Sequence
  ENSG00000155846_96 (sequence is synthesized)
tccaggtctctagataggacagccaaggccctgagacactgataccatggccaagatgtcccagcaggatggcaggcagtgcccacagtccagcgctcatcccagctccccaaggccttg

SEQ ID NO: 451398 - DNA, 120 bp, Artificial Sequence
  ENSG00000155846_97 (sequence is synthesized)
acattctcattttaatcctcaagcaactctgaattagttgctgttatcccagacttacaggcaggaagcaggctcagagaagtgaaggtttccaacttagacgtgccaggctgtgcacag

SEQ ID NO: 451399 - DNA, 120 bp, Artificial Sequence
  ENSG00000155846_98 (sequence is synthesized)
cggcgttgactccgccgcacgctgcagccgcggctggaagatggcggggaacgactgcggcgcgctgctggacgaagagctctcctccttcttcctcaactatctcgctgacacgcagga

SEQ ID NO: 451400 - DNA, 120 bp, Artificial Sequence
  ENSG00000155846_99 (sequence is synthesized)
tagagaccgaattgctacccagatctggagtaggagaccagagacgagacctgagagactttcacaaatggtgggataaagccattgattaactgtccccaaaggcctgtgatgactgtt

SEQ ID NO: 451401 - DNA, 120 bp, Artificial Sequence
  ENSG00000155846_100 (sequence is synthesized)
tcagagagatctgcactctcacgttcattgcagcattatttacaacagccaagatatggaaacaacctaagtgtttgttgacagatgaatggataaagaaaatgtgatgtcaactcacgg

SEQ ID NO: 451402 - DNA, 120 bp, Artificial Sequence
  ENSG00000155846_101 (sequence is synthesized)
aggaaggagctgagtcttatataacacagtgcctggctcatagtagcattgaacatgcccactagaatggctaaaataaagtgactgacaataccaagtgttggagagggtgcagaagaa

SEQ ID NO: 451403 - DNA, 120 bp, Artificial Sequence
  ENSG00000155846_102 (sequence is synthesized)
ccacgtgatgtgggtatcgaatcactgtggcagtcggttcctcatctagtaatgggtggtctcacagtgtccacccagccagcccaataacatactctccttgctccctccccgcagagg

SEQ ID NO: 451404 - DNA, 120 bp, Artificial Sequence
  ENSG00000155849_0 (sequence is synthesized)
aattagtgcctccaaacgccgtgtgtgagctcatcgaagtcatgctctgcacacatattatttatagcagatctgaggcatgcatggtgtttgacatttctgtcttttaagtagggggac

SEQ ID NO: 451405 - DNA, 120 bp, Artificial Sequence
  ENSG00000155849_1 (sequence is synthesized)
ttcaaaaagtcgtgggcatccccctaggcaaagtgcagtgggcagggaccaggcagggtgcgggcgcaaggcgaacgcgcagaccacgagtgtcctggcgcaggtgccgggggcggcggc

SEQ ID NO: 451406 - DNA, 120 bp, Artificial Sequence
  ENSG00000155849_2 (sequence is synthesized)
tgcaactccgcagcgtccgctcgggaggagagttcgcggctgatctccggatgccttgcagatgcaaaatgtgtctctggccagcaggaggaaggaagaggaagtgagagcagcggcagc

SEQ ID NO: 451407 - DNA, 120 bp, Artificial Sequence
  ENSG00000155849_3 (sequence is synthesized)
cggcggtgcagcagccggccgacccagagtgtaagtgcgtgtgctggggcgagcgggagcgggcgaggatgggcacaggatagaggcagagccacccacgccgccgcggccccacgctgg

SEQ ID NO: 451408 - DNA, 120 bp, Artificial Sequence
  ENSG00000155849_4 (sequence is synthesized)
gcgacagagcctccagttccccttcaatggtggcgggtcgccggagctctgatcgccgggaacccttgccgctgctgtcctgcgaccccaagcaggtatagacacgtgtggccgtttacg

SEQ ID NO: 451409 - DNA, 120 bp, Artificial Sequence
  ENSG00000155849_5 (sequence is synthesized)
ctgtaggatcctcattcccactggctttgaacattttggggacttacaatgccgccacccgcggacatcgtcaaggtggccatagaatggccgggcgcctaccccaaactcatggaaatt

SEQ ID NO: 451410 - DNA, 120 bp, Artificial Sequence
  ENSG00000155849_6 (sequence is synthesized)
gatcagaaaaaaccactgtctgcaataataaaggaagtctgtgatgggtggtctcttgccaaccatgaatattttgcactccagcatgccgatagttcaaacttctatatcacagaaaag

SEQ ID NO: 451411 - DNA, 120 bp, Artificial Sequence
  ENSG00000155849_7 (sequence is synthesized)
aaccgcaatgagataaaaaatggcactatccttcgattaaccacatctccagctcagaacgcccagcagctccatgaacgaatccagtcctcgagtatggatgccaagctggaagccctg

SEQ ID NO: 451412 - DNA, 120 bp, Artificial Sequence
  ENSG00000155849_8 (sequence is synthesized)
aaggacttggccagcctctcccgggatgtcacgtttgcccaggagtttataaacctggacggtatctctctcctcacgcagatggtggagagcggcactgagcgataccagaaattgcag

SEQ ID NO: 451413 - DNA, 120 bp, Artificial Sequence
  ENSG00000155849_9 (sequence is synthesized)
aagatcatgaagccttgctttggagacatgctgtccttcaccctgacggccttcgttgagctgatggaccatggcatagtgtcctgggatacattttcggtggcgttcattaagaagata

SEQ ID NO: 451414 - DNA, 120 bp, Artificial Sequence
  ENSG00000155849_10 (sequence is synthesized)
gcaagttttgtgaacaagtcagccatagacatctcgatcctgcagcggtccttggccattttggagtcgatggtgctcaatagccatgacctctaccagaaagtggcgcaggagatcacc

SEQ ID NO: 451415 - DNA, 120 bp, Artificial Sequence
  ENSG00000155849_11 (sequence is synthesized)
atcggccagctcattccacacctgcaagggtcagatcaagaaatccaaacctatactattgcagtgattaatgcgcttttcctgaaggctcctgatgagaggaggcaggagatggcgaat

SEQ ID NO: 451416 - DNA, 120 bp, Artificial Sequence
  ENSG00000155849_12 (sequence is synthesized)
attttggctcagaagcaactgcgttccatcattttaacacatgtcatccgagcccagcgggccatcaacaatgagatggcgcaccagctgtatgttctacaagtgctcacctttaacctc

SEQ ID NO: 451417 - DNA, 120 bp, Artificial Sequence
  ENSG00000155849_13 (sequence is synthesized)
ctggaagacaggatgatgaccaaaatggacccccaggaccaggctcagagggacatcatatttgaacttcgaagaattgcttttgatgctgagtctgaacctaacaacagcagtggcagc

SEQ ID NO: 451418 - DNA, 120 bp, Artificial Sequence
  ENSG00000155849_14 (sequence is synthesized)
atggagaaacgcaagtccatgtacacgcgagattataagaagcttgggttcattaatcatgtcaaccctgccatggacttcacgcagactccacctgggatgttggctctggacaacatg

SEQ ID NO: 451419 - DNA, 120 bp, Artificial Sequence
  ENSG00000155849_15 (sequence is synthesized)
ctgtactttgccaagcaccaccaagatgcctacatccggattgtgcttgagaacagtagtcgagaagacaagcatgaatgtccctttggccgcagtagtatagagctgaccaagatgcta

SEQ ID NO: 451420 - DNA, 120 bp, Artificial Sequence
  ENSG00000155849_16 (sequence is synthesized)
cttcacccacgacagatcctttgaggagtttttctgcatctgtatccagctcctgaacaagacatggaaggaaatgagggcaacttctgaagacttcaacaaggtaatgcaggtggtgaa

SEQ ID NO: 451421 - DNA, 120 bp, Artificial Sequence
  ENSG00000155849_17 (sequence is synthesized)
ggagcaggttatgagagcacttacaaccaagcctagctccctggaccagttcaagagcaaactgcagaacctgagctacactgagatcctgaaaatccgccagtccgagaggatgaacca

SEQ ID NO: 451422 - DNA, 120 bp, Artificial Sequence
  ENSG00000155849_18 (sequence is synthesized)
ggaagatttccagtcccgcccgattttggaactaaaggagaagattcagccagaaatcttagagctgatcaaacagcaacgcctgaaccgccttgtggaagggacctgctttaggaaact

SEQ ID NO: 451423 - DNA, 120 bp, Artificial Sequence
  ENSG00000155849_19 (sequence is synthesized)
caatgcccggcggaggcaagacaagttttggtattgtcggctttcgccaaatcacaaagtcctgcattacggagacttagaagagagtcctcagggagaagtgccccacgattccttgca

SEQ ID NO: 451424 - DNA, 120 bp, Artificial Sequence
  ENSG00000155849_20 (sequence is synthesized)
ggacaaactgccggtggcagatatcaaagccgtggtgacgggaaaggactgccctcatatgaaagagaaaggtgcccttaaacaaaacaaggaggtgcttgaactcgctttctccatctt

SEQ ID NO: 451425 - DNA, 120 bp, Artificial Sequence
  ENSG00000155849_21 (sequence is synthesized)
gtatgactcaaactgccaactgaacttcatcgctcctgacaagcatgagtactgtatctggacggatggactgaatgcgctactcgggaaggacatgatgagcgacctgacgcggaatga

SEQ ID NO: 451426 - DNA, 120 bp, Artificial Sequence
  ENSG00000155849_22 (sequence is synthesized)
cctggacaccctgctcagcatggaaatcaagctccgcctcctggacctggaaaacatccagatccctgacgcacctccgccgattcccaaggagcccagcaactatgacttcgtctatga

SEQ ID NO: 451427 - DNA, 120 bp, Artificial Sequence
  ENSG00000155849_23 (sequence is synthesized)
ctgtaactgaagtggccgggcccagacatgccccttccaaaactggaacacctagctaacaggagagaggaatgaaaacacacccacgccttggaaccgtcctttggtaaagggaagctg

SEQ ID NO: 451428 - DNA, 120 bp, Artificial Sequence
  ENSG00000155849_24 (sequence is synthesized)
tgggtccacattcccttcagcatcacctctagccctggcaactttcagcccctagctggcatcttgctcaccgccctgattctgttcctcggctccactgcttcaggtcacttcccatgg

SEQ ID NO: 451429 - DNA, 120 bp, Artificial Sequence
  ENSG00000155849_25 (sequence is synthesized)
ctgcagtccactggtgggacaagagcaaagcccactgccagtaagaaggccaaagggcccttccatcctagccctctgcaggcatgcccttccttcccttgggcaggaaagccagcagcc

SEQ ID NO: 451430 - DNA, 120 bp, Artificial Sequence
  ENSG00000155849_26 (sequence is synthesized)
ccagactgcccaaaaacttgcccaccagaccaagggcagtgccccaaggcccctgtctggaggaaatggcctagctatttgatgagaagaccaaaccccacatcctcctttcccctctct

SEQ ID NO: 451431 - DNA, 120 bp, Artificial Sequence
  ENSG00000155849_27 (sequence is synthesized)
ctagaatcatctcgcaccaccagttacacttgaattaagatctgcgctcaaatctcctcccacctctctccctgcttttgccttgctctgttcctctttggtcccaagagcagcagccgc

SEQ ID NO: 451432 - DNA, 120 bp, Artificial Sequence
  ENSG00000155849_28 (sequence is synthesized)
agcctcctcgtgatcctccctagcataaatttcccaaacagtccacaggtcccatgcccactttgcgtctgcactgtgatcgtgacaaatcttccctcctcaccagctagtctggggttt

SEQ ID NO: 451433 - DNA, 120 bp, Artificial Sequence
  ENSG00000155849_29 (sequence is synthesized)
cctctccctgccccaggccagaactgccttcttcatttccacccacgctcccagcctcttagctgaaagcacaaatggtgaaatcagtagtctcgctccatctctaatagactaaaccta

SEQ ID NO: 451434 - DNA, 120 bp, Artificial Sequence
  ENSG00000155849_30 (sequence is synthesized)
aatgcctctaggacggactgttgctatccaagcgtttggtgttaccttctcctgggaggtcctgctgcaactcaagttccacaggatggtcaagctgtcagacatccaagtttacatcat

SEQ ID NO: 451435 - DNA, 85 bp, Artificial Sequence
  ENSG00000155849_31 (sequence is synthesized)
gcaaaagagtctaacattttttgccaaacagatatatatttaatgaaaagaagagatacataaatgtgtgaatttccagtttttt

SEQ ID NO: 451436 - DNA, 120 bp, Artificial Sequence
  ENSG00000155849_32 (sequence is synthesized)
aaaagaagagatacataaatgtgtgaatttccagtttttttttaattattttaatcccaaacatcttcctgaaaataacattcccttaaacatgctgtggaataaaatggattgtgatga

SEQ ID NO: 451437 - DNA, 120 bp, Artificial Sequence
  ENSG00000155849_33 (sequence is synthesized)
ataaacgcaggtcacctgagccagtagcagcaacctgggtccccttccacgctgtggaatctttgtttttttttcactgctcgcaataaatcttgctgctgcttattatttgggtccgtg

SEQ ID NO: 451438 - DNA, 120 bp, Artificial Sequence
  ENSG00000155849_34 (sequence is synthesized)
aataaatcttgctgctgcttattatttgggtccgtgttacctttatgagctgtagcactcaccgcgaaggtttgcagcttcgctattcactcttgaagccagcgagaccacgaacccacc

SEQ ID NO: 451439 - DNA, 120 bp, Artificial Sequence
  ENSG00000155849_35 (sequence is synthesized)
acctttaagagctgtaacactaacggtgaaagtctgcggtatcactcctgaagtcagggagaccacgaaccccccagaagaaactccggacgcatctgaacatctgaaggaacaaactct

SEQ ID NO: 451440 - DNA, 120 bp, Artificial Sequence
  ENSG00000155849_36 (sequence is synthesized)
catctttaagaactgaaacaccgcgacagttcgctgcttcattcttaaaggcagtgagaccgagaacgcaccaattctggacacaaaaggaccttagcaggctcaggaaatggcaagcca

SEQ ID NO: 451441 - DNA, 120 bp, Artificial Sequence
  ENSG00000155849_37 (sequence is synthesized)
tttatgaagagggaagagatagcaaacgttggtctcaagttctctagttctttacccagaccatagctggctgggggatgatcctgatttagtctggggggttcctttacgcattgccac

SEQ ID NO: 451442 - DNA, 120 bp, Artificial Sequence
  ENSG00000155849_38 (sequence is synthesized)
ttgtttgtttgtttgtttgtttgtttttgtggcctctctggaagggagatgctgaagaaaggagaataacacagttttggtggcgggcgaggaggcaggcggtgctgtcaccttggacac

SEQ ID NO: 451443 - DNA, 120 bp, Artificial Sequence
  ENSG00000155849_39 (sequence is synthesized)
caccttggacactcattgagcctctctaagccccacctcataaaggagatgaaaacacttgctacatgggctgcatgcgaattaaatgagatagttcacagaccgccgtgaatggagaga

SEQ ID NO: 451444 - DNA, 120 bp, Artificial Sequence
  ENSG00000155849_40 (sequence is synthesized)
aggaatcatgccgtgaaccttgaagagcatggttcctccttccatcagcctcattgcagctccgcttggctagacaagctggccctatgccatggtcaatgtgcagccatttgcaactgc

SEQ ID NO: 451445 - DNA, 120 bp, Artificial Sequence
  ENSG00000155849_41 (sequence is synthesized)
gcgaccccaagcagggggcagagcagggagcacttataccatacaaggcagagaagatacagatcaagatatgcccaaggcccttctagttcagcctctccttggagtaggtatagacac

SEQ ID NO: 451446 - DNA, 120 bp, Artificial Sequence
  ENSG00000155849_42 (sequence is synthesized)
agatgcaaaatgtgtctctggccagcaggaggaaggaagaggaagtgagagcagcggcagccggcggtgcagcagccggccgacccagagtaaaaccttcttggcctctaactgagcagc

SEQ ID NO: 451447 - DNA, 120 bp, Artificial Sequence
  ENSG00000155849_43 (sequence is synthesized)
cctccatagaggattattagttcatgcctctgtgcaagaaagaaaaacaaaaacaaaatgcatgagttcattcactctcccatctcccctgctggcctgagagcacctgaacatagtgat

SEQ ID NO: 451448 - DNA, 120 bp, Artificial Sequence
  ENSG00000155849_44 (sequence is synthesized)
tgaagatcagcccttttccctgcctgtaagcacctctaggaaaagatttaagagatgttgcaaacaaatcactccaacgtatttgggattgctcattgtgatgcctgatctgtgccagcc

SEQ ID NO: 451449 - DNA, 120 bp, Artificial Sequence
  ENSG00000155849_45 (sequence is synthesized)
tcttcctaccacatctatgactgttacaggggtaactgttccatcccttagtctgcagcacccggaatggatgtggaatcactgaaggaggtgagtggggaagaagacaagttggatcct

SEQ ID NO: 451450 - DNA, 120 bp, Artificial Sequence
  ENSG00000155849_46 (sequence is synthesized)
tgatgaatatgaactatctccagcccatcaccagctttttctttttcttcttgtccttatttgttttttagttctttataagaaaaagtgggggatatattgagaagtaccaagacgggg

SEQ ID NO: 451451 - DNA, 120 bp, Artificial Sequence
  ENSG00000155849_47 (sequence is synthesized)
agctatgggtttattgacaaaagagcataggacactaaaatagaaacgaagttattatttttctcttgtgatactctaagagaaaagctcttcctggaaaagccgatgatctctgaagat

SEQ ID NO: 451452 - DNA, 120 bp, Artificial Sequence
  ENSG00000155849_48 (sequence is synthesized)
gctaaataaatgagcaggagtttccctgaaatggaggcgccctttgattggctgatctttccccgactcctgccaatcggagcatccctgggctccagctccataaacataagcaaagct

SEQ ID NO: 451453 - DNA, 120 bp, Artificial Sequence
  ENSG00000155849_49 (sequence is synthesized)
acatgcttattcttctggacttggagtgtataccatttaaaggtgtgcggcgggtctctgttcacatggctcaactggaaacctgtttcatgaacaagcttactcaggaaccatctggtg

SEQ ID NO: 451454 - DNA, 120 bp, Artificial Sequence
  ENSG00000155849_50 (sequence is synthesized)
gtattccagcacattgttcttcagggggacgactctaagtcgctttgtggtggcagcagcttagaatcagtatttgtggttgggaaagatggacttacgggagcttggtaatgcaggtgg

SEQ ID NO: 451455 - DNA, 120 bp, Artificial Sequence
  ENSG00000155849_51 (sequence is synthesized)
atcaagaaatccaaacctatactattgcagtgattaatgcgcttttcctgaaggctcctgatgagaggaggcaggttgatgtagagagcaatgttgacatccttgattgtcctctgactg

SEQ ID NO: 451456 - DNA, 120 bp, Artificial Sequence
  ENSG00000155849_52 (sequence is synthesized)
tggaggggcagcgtggggaacgagaaactctttgcctgtagggacccttctagctgcaaacttaaaaatgtatgtggcaagatgcaacccaagcaccgagcaggattccagacgagttat

SEQ ID NO: 451457 - DNA, 120 bp, Artificial Sequence
  ENSG00000155849_53 (sequence is synthesized)
gcaagaagccccttttcagatattgtgtgtttcctactcaatgttaatttcaaactcacaaatacggagggattacctttagatgagtgaccccatattttctgtctttcttagtaaact

SEQ ID NO: 451458 - DNA, 120 bp, Artificial Sequence
  ENSG00000155849_54 (sequence is synthesized)
cgattaaccacatctccagtaagttgatcttagcttctgacttccagcaaactctttgctctgcgtttctgctatatgtgattgtgggatattaatttttgaggttgactttagtgcaaa

SEQ ID NO: 451459 - DNA, 120 bp, Artificial Sequence
  ENSG00000155849_55 (sequence is synthesized)
gcaaaaggcttccagaatgtcctgacatgcagattctggattagcaggaatgcccctccgtagatttcccactgcagaggaggaagaccttattccaggcgaagggcaagcttgtctaac

SEQ ID NO: 451460 - DNA, 120 bp, Artificial Sequence
  ENSG00000155849_56 (sequence is synthesized)
ctgcggcccaggatagctttgaattcacaaattcgtaaactttctcaaaacattatgagttgttctgtattttatttagttcatcagctatcgttagcgtattttatgtgtggcccaaga

SEQ ID NO: 451461 - DNA, 120 bp, Artificial Sequence
  ENSG00000155849_57 (sequence is synthesized)
cccagggaagccaaaagattggacacttctgctttaagatttgagtttggaggtcatcttaacaacttctgtgttacagctgggatcactcacctgtaccaattggttttacccacctac

SEQ ID NO: 451462 - DNA, 120 bp, Artificial Sequence
  ENSG00000155849_58 (sequence is synthesized)
aattggttttacccacctactcacacatccacctaatgccatctgagcaaattcagacaacaaacaaagcaaacaaaaccaaagtcagttactttcctttaaagtcggttactttccttt

SEQ ID NO: 451463 - DNA, 62 bp, Artificial Sequence
  ENSG00000155849_59 (sequence is synthesized)
acctaataggtggagcttgcagtgagcagaggtagtgccactgcactccagcctgggtgaga

SEQ ID NO: 451464 - DNA, 120 bp, Artificial Sequence
  ENSG00000155849_60 (sequence is synthesized)
tgtgtgtgtgtgagagagagagagagtttaagtattttgtagctttaatgggttattatgacaattcataaaaataatttagaaatattgaccacttcactgatccattgacagctgatt

SEQ ID NO: 451465 - DNA, 120 bp, Artificial Sequence
  ENSG00000155849_61 (sequence is synthesized)
ctacataagaactttagagtcttctgaattaaagctgctaaacaagacgctacagtatatttagactattgtagctgatgatgtctctcttcttggtctttcctacttgcttggagatac

SEQ ID NO: 451466 - DNA, 120 bp, Artificial Sequence
  ENSG00000155849_62 (sequence is synthesized)
tttaggtagtaacattagcatatttaactatattattttacagtgcatttcattgctttcctaaaaaattatctgccccaaatacaccaagtgttactattttcactctgcatatgtgat

SEQ ID NO: 451467 - DNA, 120 bp, Artificial Sequence
  ENSG00000155849_63 (sequence is synthesized)
gaaaactgtgtctaactatcattttcagtttccactgaagccatgtggtagactaaaaataaatttaaaaattgggaaaagcatctggctaaaattaagctgtgggtactgtaactacca

SEQ ID NO: 451468 - DNA, 120 bp, Artificial Sequence
  ENSG00000155849_64 (sequence is synthesized)
taaatccttattgttgaaaattacattagtgtggcttagaaactcctaaacattttgcccaataacatcctgaacctaaaaacagtgatgagctcaatggagtgagttgctacagttggc

SEQ ID NO: 451469 - DNA, 120 bp, Artificial Sequence
  ENSG00000155849_65 (sequence is synthesized)
tgaactgtctttgatgcctgctttgctacttaatggagattataatctactcatttttcagtggctacatgatgagctgaggcgttttcgtctgactttgcattggtcttcttactcaag

SEQ ID NO: 451470 - DNA, 120 bp, Artificial Sequence
  ENSG00000155849_66 (sequence is synthesized)
tcagcatgaatgaatgttaatttgacctttacaccattgttttatgtgttttttgtagtttctgattatcctgctaaaagtcatcatctgcttgctggacagaaaaagtagaccttgcct

SEQ ID NO: 451471 - DNA, 120 bp, Artificial Sequence
  ENSG00000155849_67 (sequence is synthesized)
tttatttcattttagagtctaaaagacagctttttaatcaaagccttctctaagccaaagaaggagttagtttcatttttttactgctgtggatttatgaacaaaaattccgcaatctaa

SEQ ID NO: 451472 - DNA, 120 bp, Artificial Sequence
  ENSG00000155849_68 (sequence is synthesized)
gtcactccttgagagaaggcttagatgttaggcagagtgaagtttttcagcatcccaaaagaaacttagcgtgacttgtcatcaggaagaatggaatttgtgttcttgagataatgatcc

SEQ ID NO: 451473 - DNA, 120 bp, Artificial Sequence
  ENSG00000155849_69 (sequence is synthesized)
tttgtgttcttgagataatgatcctcacattcccagctcagtgaatggaaagatgtgaaagccagtgtaagaggcactattaaaagatgggagcagccgggtgcagtggctcacgcctgt

SEQ ID NO: 451474 - DNA, 120 bp, Artificial Sequence
  ENSG00000155849_70 (sequence is synthesized)
attctgaagacgagagaaagaggagcaggaagaatcttccatgaactctgcaaacctacaaactttccaatgagaagtggtgcacactcccgagatggtgcttgggacaacatggttaaa

SEQ ID NO: 451475 - DNA, 120 bp, Artificial Sequence
  ENSG00000155849_71 (sequence is synthesized)
gaccatgacttcctgggcaatctgtccttcctcagactgttgagtgccagacgtttatatgcatgtctggacagagagtgagcctggctcattcagaccctgggcaccattcagagcaga

SEQ ID NO: 451476 - DNA, 120 bp, Artificial Sequence
  ENSG00000155849_72 (sequence is synthesized)
cataactgatgtctcttccgagcgtgtggtcctcttgcgctttacggaatagtttccacatttccagatgtttagctggtttaaacaggatcacatgaaaatctcttctggcttcagtga

SEQ ID NO: 451477 - DNA, 120 bp, Artificial Sequence
  ENSG00000155849_73 (sequence is synthesized)
aatggaataacttgcacaagtgtgactaatactgcatttgtttattcagttctgattaagtgtaaccgagagtagttagcccggaatgtatctcgacttcattaaatctatttcacaaga

SEQ ID NO: 451478 - DNA, 120 bp, Artificial Sequence
  ENSG00000155850_0 (sequence is synthesized)
gtgacggcctcggccgcgggcgtttacactggctctgcctccggcatctcttcgccggtgcgtcctcgccgcgcccgtaggtcccggcagccgggccccgcctccttcggagtccgagcg

SEQ ID NO: 451479 - DNA, 120 bp, Artificial Sequence
  ENSG00000155850_1 (sequence is synthesized)
atgggcggggaaagggacaggcaggtatagctctgtcggcgccgcggtgtccacctcagtcaggccacggtggaagacgcgtgccgcggcgcctggttgcctgcagcggcccggacccga

SEQ ID NO: 451480 - DNA, 120 bp, Artificial Sequence
  ENSG00000155850_2 (sequence is synthesized)
gaggaagctgaaccatctatctccagaaatgtcttcagaaagtaaagagcaacataacgtttcacccagagactcagctgaaggaaatgacagttatccatctgggatccatctggaact

SEQ ID NO: 451481 - DNA, 120 bp, Artificial Sequence
  ENSG00000155850_3 (sequence is synthesized)
tcaaagggaatcaagtactgacttcaagcaatttgagaccaatgatcaatgcagaccttatcataggatccttattgagcgtcaagagaaatcagatacaaacttcaaggagtttgttat

SEQ ID NO: 451482 - DNA, 120 bp, Artificial Sequence
  ENSG00000155850_4 (sequence is synthesized)
taaaaagctgcagaagaattgccagtgcagtccagccaaagccaaaaatatgattttaggtttccttcctgttttgcagtggctcccaaaatacgacctaaagaaaaacattttagggga

SEQ ID NO: 451483 - DNA, 120 bp, Artificial Sequence
  ENSG00000155850_5 (sequence is synthesized)
tgtgatgtcaggcttgattgtgggcatattattggtgccccagtccattgcttattccctgctggctggccaagaacctgtctatggtctgtacacatctttttttgccagcatcattta

SEQ ID NO: 451484 - DNA, 120 bp, Artificial Sequence
  ENSG00000155850_6 (sequence is synthesized)
ttttctcttgggtacctcccgtcacatctctgtgggcatttttggagtactgtgccttatgattggtgagacagttgaccgagaactacagaaagctggctatgacaatgcccatagtgc

SEQ ID NO: 451485 - DNA, 120 bp, Artificial Sequence
  ENSG00000155850_7 (sequence is synthesized)
tccttccttaggaatggtttcaaatgggagcacattattaaatcatacatcagacaggatatgtgacaaaagttgctatgcaattatggttggcagcactgtaacctttatagctggagt

SEQ ID NO: 451486 - DNA, 120 bp, Artificial Sequence
  ENSG00000155850_8 (sequence is synthesized)
ttatcaggtagcgatgggcttctttcaagtgggttttgtttctgtctacctctcagatgccttgctgagtggatttgtcactggtgcctccttcactattcttacatctcaggccaagta

SEQ ID NO: 451487 - DNA, 120 bp, Artificial Sequence
  ENSG00000155850_9 (sequence is synthesized)
tcttcttgggctcaaccttcctcggactaatggtgtgggctcactcatcactacctggatacatgtcttcagaaacatccataagaccaatctctgtgatcttatcaccagccttttgtg

SEQ ID NO: 451488 - DNA, 120 bp, Artificial Sequence
  ENSG00000155850_10 (sequence is synthesized)
ccttttggttcttttgccaaccaaagaactcaatgaacacttcaaatccaagcttaaggcaccgattcctattgaacttgttgttgttgtagcagccacattagcctctcattttggaaa

SEQ ID NO: 451489 - DNA, 120 bp, Artificial Sequence
  ENSG00000155850_11 (sequence is synthesized)
actacatgaaaattataattctagtattgctggacatattcccactgggtttatgccacccaaagtaccagaatggaacctaattcctagtgtggctgtagatgcaatagctatttccat

SEQ ID NO: 451490 - DNA, 120 bp, Artificial Sequence
  ENSG00000155850_12 (sequence is synthesized)
cattggttttgctatcactgtatcactttctgagatgtttgccaagaaacatggttacacagtcaaagcaaaccaggaaatgtatgccattggcttttgtaatatcatcccttccttctt

SEQ ID NO: 451491 - DNA, 120 bp, Artificial Sequence
  ENSG00000155850_13 (sequence is synthesized)
ccactgttttactactagtgcagctcttgcaaagacattggttaaagaatcaacaggctgccatactcagctttctggtgtggtaacagccctggttcttttgttggtcctcctagtaat

SEQ ID NO: 451492 - DNA, 120 bp, Artificial Sequence
  ENSG00000155850_14 (sequence is synthesized)
agctcctttgttctattcccttcaaaaaagtgtccttggtgtgatcacaattgtaaatctacggggagcccttcgtaaatttagggatcttcccaaaatgtggagtattagtagaatgga

SEQ ID NO: 451493 - DNA, 120 bp, Artificial Sequence
  ENSG00000155850_15 (sequence is synthesized)
tacagttatctggtttgttactatgctgtcctctgcactgctaagtactgaaataggcctacttgttggggtttgtttttctatattttgtgtcatcctccgcactcagaagccaaagag

SEQ ID NO: 451494 - DNA, 120 bp, Artificial Sequence
  ENSG00000155850_16 (sequence is synthesized)
ttcactgcttggcttggtggaagagtctgaggtctttgaatctgtgtctgcttacaagaaccttcagattaagccaggcatcaagattttccgctttgtagcccctctctactacataaa

SEQ ID NO: 451495 - DNA, 120 bp, Artificial Sequence
  ENSG00000155850_17 (sequence is synthesized)
caaagaatgctttaaatctgctttatacaaacaaactgtcaacccaatcttaataaaggtggcttggaagaaggcagcaaagagaaagatcaaagaaaaagtagtgactcttggtggaat

SEQ ID NO: 451496 - DNA, 120 bp, Artificial Sequence
  ENSG00000155850_18 (sequence is synthesized)
ccaggatgaaatgtcagtgcaactttcccatgatcccttggagctgcatactatagtgattgactgcagtgcaattcaatttttagatacagcagggatccacacactgaaagaagttcg

SEQ ID NO: 451497 - DNA, 120 bp, Artificial Sequence
  ENSG00000155850_19 (sequence is synthesized)
cagagattatgaagccattggaatccaggttctgctggctcagtgcaatcccactgtgagggattccctaaccaacggagaatattgcaaaaaggaagaagaaaaccttctcttctatag

SEQ ID NO: 451498 - DNA, 120 bp, Artificial Sequence
  ENSG00000155850_20 (sequence is synthesized)
tgtgtatgaagcgatggcttttgcagaagtatctaaaaatcagaaaggagtatgtgttcccaatggtctgagtcttagtagtgattaattgagaaggtagatagaagaatgtctagccaa

SEQ ID NO: 451499 - DNA, 120 bp, Artificial Sequence
  ENSG00000155850_21 (sequence is synthesized)
taggttaaaatttcaagtgtccaacatttcccagttccacagtgggaaattttgcacacttgaaattttaaccaagtggctagatattattcctcctttgaagctaatggcatttgtata

SEQ ID NO: 451500 - DNA, 120 bp, Artificial Sequence
  ENSG00000155850_22 (sequence is synthesized)
tacacactgcagcagagcttgtagctggacagagtcaaaaagaagaaaatacggtttcaggctttcttgcagatatgaagtattcttggaatgcaataagtatgtattgaactgtactgt

SEQ ID NO: 451501 - DNA, 120 bp, Artificial Sequence
  ENSG00000155850_23 (sequence is synthesized)
aaagtagctccaaaacttaattactctcctgttttaggggttatacatttggactgtgcattctccaagagatgaagcggtgaagttgggatttacattggaagtgctgtagacttcttt

SEQ ID NO: 451502 - DNA, 120 bp, Artificial Sequence
  ENSG00000155850_24 (sequence is synthesized)
atgtggctcagtggagagagggaaagaatgttgcacctgctctagtaccataggtcaagaggcttctggatcacaaagtcataactagacaggtttgttcttgtagttttctatccccag

SEQ ID NO: 451503 - DNA, 120 bp, Artificial Sequence
  ENSG00000155850_25 (sequence is synthesized)
tctttgctccccagatggcagtagtttttagtaggaaagtgccattcctgtccttaaggcacagtctcatcagaagtctaatacctgggcaggtttataacatcctgagagccagcctga

SEQ ID NO: 451504 - DNA, 120 bp, Artificial Sequence
  ENSG00000155850_26 (sequence is synthesized)
cattagacagaataccctttgtaatacattggaaatttttactcatgcctttttgtttaggataaataggtaagcacaaagagctcttcaaaatcagaaaaaacaataggagtccttcct

SEQ ID NO: 451505 - DNA, 120 bp, Artificial Sequence
  ENSG00000155850_27 (sequence is synthesized)
tgtcttttctgtgatctctgtccttgtttctgagactttctctaccattaagctctattttagctttcagttattctagtttgtttcccatggaatctgtcctaaactggtgtttttgtc

SEQ ID NO: 451506 - DNA, 120 bp, Artificial Sequence
  ENSG00000155850_28 (sequence is synthesized)
agtgacagtcttgccagtcagcaatttctaacagcattttaaatgagtttgatgtacagtaaatattgatgacaatgacagcttttaactcttcaagtcacctaaagctattatgcagga

SEQ ID NO: 451507 - DNA, 120 bp, Artificial Sequence
  ENSG00000155850_29 (sequence is synthesized)
ggatttagaagtcacattcataaaacccaagtgctatgggtgtattattcatgatagctggcccacaggtcatgaattgaggaggaatttgctttcaaaaagcaagaatgtccaacactg

SEQ ID NO: 451508 - DNA, 120 bp, Artificial Sequence
  ENSG00000155850_30 (sequence is synthesized)
aaagtttatagttttatatttggaccttgaaaggtaagaaaaaaccaggttctccaaagttaggaatagggaactaatttatgaaacagccatcttaaaaaaaaaaaaagtaaactgcaa

SEQ ID NO: 451509 - DNA, 120 bp, Artificial Sequence
  ENSG00000155850_31 (sequence is synthesized)
aagtacaaaatcatttttcaatctgttcccagtttctaaacaattttaaatatttatgagaagcaaaccctatgtgtagggcatctgttggagtgggatgcttttagacatatattaagt

SEQ ID NO: 451510 - DNA, 120 bp, Artificial Sequence
  ENSG00000155850_32 (sequence is synthesized)
atgtacatgtttaatatgtatatttaaaatgcatatatattttattatatctatattatcctatatagatatatgtaacttagctttattgttagctccataagctgccagtgttgcttt

SEQ ID NO: 451511 - DNA, 120 bp, Artificial Sequence
  ENSG00000155850_33 (sequence is synthesized)
cctttccattatcacaacaaagcagttgctcagtagaaagtctagatttctgtcttataggtgatttctgtcttataggtgattataatcaagtgtaggcttcctgaattttgacatcct

SEQ ID NO: 451512 - DNA, 120 bp, Artificial Sequence
  ENSG00000155850_34 (sequence is synthesized)
tttagaacttgggtctggaattccagaaatgttaattgctgcttgtatttgttcttgtttgttttttagccagtatttgccctttctatccagccttatgaataatagcagtaaaatcac

SEQ ID NO: 451513 - DNA, 120 bp, Artificial Sequence
  ENSG00000155850_35 (sequence is synthesized)
agtatcttggtcagtctttatttttttccttttttcttttttaagagacagtcatccaggccagagtgcagtttgatgatagcttactgaagcttcccactcctgggctcaagttatcct

SEQ ID NO: 451514 - DNA, 120 bp, Artificial Sequence
  ENSG00000155850_36 (sequence is synthesized)
tcaagttatccttccattttggcctcctgagtagctagaccataggtatgcatcaccacaccctgctaattttttaaatttttttctagagagagggtctcactgtgttgcccaggctgg

SEQ ID NO: 451515 - DNA, 120 bp, Artificial Sequence
  ENSG00000155850_37 (sequence is synthesized)
gttgggattacaggcgtgagccactgcacttggccaagttatttatttttaatctctcttgcccttctcccaaggcaggcttaagttgagactattataggtgtctaataacctgtgaca

SEQ ID NO: 451516 - DNA, 120 bp, Artificial Sequence
  ENSG00000155850_38 (sequence is synthesized)
gttgagactattataggtgtctaataacctgtgacagagtaatgagtacatgcttaagatgttataattagccaacaccaacacagcaaaaaatataattccagccaaagattctggaaa

SEQ ID NO: 451517 - DNA, 120 bp, Artificial Sequence
  ENSG00000155850_39 (sequence is synthesized)
atccctcagaaggagggataacaggatttgacctttaccagcgatttctgtccatatgtggatgtaaacagttctggaacgttatgcatgcagttagcgaatccttgaattatgttctgg

SEQ ID NO: 451518 - DNA, 120 bp, Artificial Sequence
  ENSG00000155850_40 (sequence is synthesized)
tttgtacttgtcccatccatccaaacaagagattctgcttttggtagccatctgtagaaacatttaagatgtcactagaatttacatttcatcctctctacttgggttgaggttgcctat

SEQ ID NO: 451519 - DNA, 120 bp, Artificial Sequence
  ENSG00000155850_41 (sequence is synthesized)
ctatacttgcatattgttaaaatgttttggttgctgatattcagaggaatgaaacctggaaccaaagcctaatttgccgataaaaaaactgttttcggccaggtgcagtggctcatgcct

SEQ ID NO: 451520 - DNA, 120 bp, Artificial Sequence
  ENSG00000155850_42 (sequence is synthesized)
gactccgtctcaaacaaacaaacaaaaaactgttttcatttgctctcttgaccaaaggataggactttagttctttaagcattattttaaacactatattgatacaaaaatatcttgctt

SEQ ID NO: 451521 - DNA, 120 bp, Artificial Sequence
  ENSG00000155850_43 (sequence is synthesized)
gcttactctaaactttagagtctaaatgaagctttttctcagtacaagattctgagtatcataaaatggttatttaattgaaacgtagtgtggtatactcttgatggttagaactcttac

SEQ ID NO: 451522 - DNA, 120 bp, Artificial Sequence
  ENSG00000155850_44 (sequence is synthesized)
agccttatttatttttaagtttgttacagccaaagggttggagtgtgccagtgcacaggtagactaaggaaaacattatagaggagtgaagagaacagaccattgaaaagactattatct

SEQ ID NO: 451523 - DNA, 120 bp, Artificial Sequence
  ENSG00000155850_45 (sequence is synthesized)
gaccagcggaggcagaaaagagaggaacccagttgaataggatccaatccctggttagcctctacacaataatagggagacaaggattaggagccatacctcccagagcaaggtatcttt

SEQ ID NO: 451524 - DNA, 120 bp, Artificial Sequence
  ENSG00000155850_46 (sequence is synthesized)
ctagagcaaatttctctttctagaaggggagggtcacagggtcacagattcaccaaagctgaaagggctgaggagctcatggtagcctgggctgacctactctggagcacggtgtcttcc

SEQ ID NO: 451525 - DNA, 120 bp, Artificial Sequence
  ENSG00000155850_47 (sequence is synthesized)
ttctaaactgagtgactgtagtactatctgtgcctctgatggtaataaaactgacaagatgtctaatttttttttaagtaggaccaaaggaaaacaagatttagatagtctgactttgct

SEQ ID NO: 451526 - DNA, 120 bp, Artificial Sequence
  ENSG00000155850_48 (sequence is synthesized)
tttgaacaacagacattgcaagtcaaaattgttgtcaaatttacatatggtaaatgatgaactttaaaaatgtgtccaggtgttagatgagttcattagactcttttaatgctaatggct

SEQ ID NO: 451527 - DNA, 120 bp, Artificial Sequence
  ENSG00000155850_49 (sequence is synthesized)
agtacgtttaaacaaaacagcagttctctgctgcaatattcccattgaccacttaaatgaccataagtggtcatttaagaacatgttagggttagccctgatctgaatataaaagtgaga

SEQ ID NO: 451528 - DNA, 120 bp, Artificial Sequence
  ENSG00000155850_50 (sequence is synthesized)
aaagggctacagtgcatttcttggtaacttaaactgagtcttgaagttataatgatccattcgagttctgtgatccttattgttcttaattgtgtttctctacgtattgttacagatgag

SEQ ID NO: 451529 - DNA, 120 bp, Artificial Sequence
  ENSG00000155850_51 (sequence is synthesized)
ccatacgtttctttgtatcaatgtagacatgacttcagatacctctgaggacctacccagcagtctaggaccctgggccaagtgctgggactatggtactaaatccagtagatgggctgt

SEQ ID NO: 451530 - DNA, 120 bp, Artificial Sequence
  ENSG00000155850_52 (sequence is synthesized)
gtagcaactctcccagggaacacactagggtacttagggaggtgctttgtggagcatgttgaagctttgagatctgagcaggaggcagtgatgtccctggtctattcagggaaagatttc

SEQ ID NO: 451531 - DNA, 120 bp, Artificial Sequence
  ENSG00000155850_53 (sequence is synthesized)
agtgtgaaatggtaaacatccaattgacaggatttagattttgcttagtttttctgctttttaatgtttctatcccccatctcagtgttttctttatccatcccagtgatgccttatttg

SEQ ID NO: 451532 - DNA, 120 bp, Artificial Sequence
  ENSG00000155850_54 (sequence is synthesized)
aaactgggcttaaactgcaaaaagaatgaagttggatttaggaagctgttagatcattgagtggtgttgagagtgaagtttcactagcagggaagtttccttgagcctaaaataaaaaga

SEQ ID NO: 451533 - DNA, 120 bp, Artificial Sequence
  ENSG00000155850_55 (sequence is synthesized)
aaaaattaaaaagaatcagtttttttaattaaaaaaatagaaagctgttaggctcctaattcgtggggtttttttttgtaaaaacagtttagataatcctgaatgcaatcattaacttgg

SEQ ID NO: 451534 - DNA, 120 bp, Artificial Sequence
  ENSG00000155850_56 (sequence is synthesized)
ttgctaattacaagaatgaaaattataatggaaaaggacaaaataatataccagctggtttgttattatagtccgtgtattaaaatactattgaaatacgttaaaggtaaatttttaagg

SEQ ID NO: 451535 - DNA, 120 bp, Artificial Sequence
  ENSG00000155850_57 (sequence is synthesized)
tttaaaaaaaatttagtaacttacagggatggagaatttagatgtcagaggtggggagatttatttttataaggtaatttttatcctgataaggacttaaaaaaaagttttgcaactgaa

SEQ ID NO: 451536 - DNA, 120 bp, Artificial Sequence
  ENSG00000155850_58 (sequence is synthesized)
attttaaagtaaacatgttaagtacagttaaaaagtaagcattgtagtaaatagtggattctctggtgtgtattttttatctcagtgttgaaaattggaaaagaatggactgaagtctaa

SEQ ID NO: 451537 - DNA, 120 bp, Artificial Sequence
  ENSG00000155850_59 (sequence is synthesized)
aaactggaataatgaaggacactaaatgcctttattgtagatactatgtttgtaagtctatagctaagcaacttaagccaaaaaggtctttcaactgaagctttaatcaacttattttgg

SEQ ID NO: 451538 - DNA, 120 bp, Artificial Sequence
  ENSG00000155850_60 (sequence is synthesized)
agatgttctcttcccttatctcatgcgtcatccctaaaataataagatacatgggatcaaatagcccttgccttttcaacacaaatcagttggaaaattatggtttgagtcctgttgctg

SEQ ID NO: 451539 - DNA, 120 bp, Artificial Sequence
  ENSG00000155850_61 (sequence is synthesized)
ccatggcttctgtttctcagaaatgagtgtgtatgaacataccaatctatgtaataggctacctttttttgtcttctttggaactttgtacacaaaccaagacaatatcagggtgacagg

SEQ ID NO: 451540 - DNA, 120 bp, Artificial Sequence
  ENSG00000155850_62 (sequence is synthesized)
tgaatgaacttaaattctcagtcttgtctattcaccaaaaaagtatactgcctgttttttctttaattattcaaggttgatgacttttaggaacatgttttatactgtattttttaatta

SEQ ID NO: 451541 - DNA, 120 bp, Artificial Sequence
  ENSG00000155850_63 (sequence is synthesized)
aagcaagtgccttgatgtaattccatgtaaatcattgcttaaccctcttatgggatgaggatgagttattaatgtattgcagcctactggaaaggagggggagttggttaatagcagata

SEQ ID NO: 451542 - DNA, 120 bp, Artificial Sequence
  ENSG00000155850_64 (sequence is synthesized)
cttttcttctagaagcttatgttttatgctgtttattatgtaagatcctgtatgtgtgttgagatttagaggtttcatttgttttgtctgctaataaattgttactctaataatacatta

SEQ ID NO: 451543 - DNA, 120 bp, Artificial Sequence
  ENSG00000155850_65 (sequence is synthesized)
aagctcactcgttcagcatcatctagcgtgtggagtcctggatctcatccttggatttgcagggatggtcctaagaagctaacggctctctgtatttgacaattattgtactgtaatgtg

SEQ ID NO: 451544 - DNA, 120 bp, Artificial Sequence
  ENSG00000155850_66 (sequence is synthesized)
ctgcctcctaggggaagatctagaggaagctgaaccatctatctccagaaatgtcttcagaaagtaaagagcaacataacgtttcacccagagactcagctgaaggaaatgacagttatc

SEQ ID NO: 451545 - DNA, 120 bp, Artificial Sequence
  ENSG00000155850_67 (sequence is synthesized)
ttttgttaatgtggaagcaacattttctatgattaatctgctgttacctgttttgactgagctactacaaaaagaaaaatcactgaattgctatgggtttctgaaatatccaaaaaatta

SEQ ID NO: 451546 - DNA, 120 bp, Artificial Sequence
  ENSG00000155850_68 (sequence is synthesized)
acctgaagcagggggaaaaatgacatcacaccattagcaggtattgtgtgaaacttctaaaaatgaaactgacatttatctgacttattaggaataaatactctctaatgaactctctaa

SEQ ID NO: 451547 - DNA, 120 bp, Artificial Sequence
  ENSG00000155858_0 (sequence is synthesized)
ccttcttcccatcggcctcggcttgcgggcctttcaaacatggaggagcgggagcggggggcgaggtcggctggcgccgggagccccgcgcgcccgcccagcccgcggctggatgtcagc

SEQ ID NO: 451548 - DNA, 120 bp, Artificial Sequence
  ENSG00000155858_1 (sequence is synthesized)
tctgacagcttcgacccgctgctggccctgtacgcgccccgcctgcctcccattccctaccccaatgccccctgcttcaacaacgtggcggagtacgagagcttcctcaggaccggagtc

SEQ ID NO: 451549 - DNA, 80 bp, Artificial Sequence
  ENSG00000155858_2 (sequence is synthesized)
gtacgagagcttcctcaggaccggagtccggggcggcgggcgcgggcgcgggcgggctcggggcgcggccgcgggctctg

SEQ ID NO: 451550 - DNA, 120 bp, Artificial Sequence
  ENSG00000155858_3 (sequence is synthesized)
gagcgcatccagcgcctccgccgtctcatggtggccaaagaggaaggggacggggccgcaggagcgggccggaggggtccgggtcggagcaggaaggcgccacgcaacgtgctcacgcga

SEQ ID NO: 451551 - DNA, 120 bp, Artificial Sequence
  ENSG00000155858_4 (sequence is synthesized)
atgcccttgcacgaaggcagccctctgggtgaactccatcgctgtatccgtgagggggtgaaggtgaatgttcacatccgcactttcaagggacttcggggcgtctgtacaggcttcctt

SEQ ID NO: 451552 - DNA, 120 bp, Artificial Sequence
  ENSG00000155858_5 (sequence is synthesized)
gttgcattcgacaagttctggaatatggcacttactgatgtggatgagacctaccgaaaacctgtcctaggcaaagcatatgaacgggattcttcactgactctcactaggctatttgat

SEQ ID NO: 451553 - DNA, 120 bp, Artificial Sequence
  ENSG00000155858_6 (sequence is synthesized)
cggctgaaacttcaagattcctccaagaaggaagcagattctaagtctgcagttgaagattccactctgtctagatactcacagacatccacttggaagttggcttcagtgtggggaaga

SEQ ID NO: 451554 - DNA, 120 bp, Artificial Sequence
  ENSG00000155858_7 (sequence is synthesized)
gcagacactggccggggctcacacaagcgttcccgctctgtcccttcttccctgcaggcctctgcaagggaggagtccaggtcagagctgtcagggaggactacacggacagacggctcc

SEQ ID NO: 451555 - DNA, 120 bp, Artificial Sequence
  ENSG00000155858_8 (sequence is synthesized)
agtgtgggaggtaccttttccagggctaccaccctttccagaggccagtcccgtaagaaaaagcgaaagcccaaagtggattaccagcaggtattcactcgacacataaatcagattttc

SEQ ID NO: 451556 - DNA, 120 bp, Artificial Sequence
  ENSG00000155858_9 (sequence is synthesized)
attcgaggcgagaatgtcctgctggttcatcttgcacagtgaccagctcagcctgagctttggtttttagaaataaagtgcatgaattgctgctatgctgtatcctagtatcccagtgaa

SEQ ID NO: 451557 - DNA, 120 bp, Artificial Sequence
  ENSG00000155858_10 (sequence is synthesized)
actctgagttggaatgattccctctggtcctgcatatgcagaggacggagcaggctcagccccctggaagatgagctcaaggggaggacaggccttgggagggcaggcgtttgcattaat

SEQ ID NO: 451558 - DNA, 120 bp, Artificial Sequence
  ENSG00000155858_11 (sequence is synthesized)
atcaaggcaaaaagcattcatagatacatgcatctgatttggtattgtgatttacttcagaccctgaaaccaaatatctgatcttccattagacttaggggtcatgatatgagtggaatt

SEQ ID NO: 451559 - DNA, 120 bp, Artificial Sequence
  ENSG00000155858_12 (sequence is synthesized)
tacattttagatactataggggaaagaaaagtctcaaaaagaagtattgcatgtctaaaagctagtgccctgagtactcatgaattcgattccaagagtagtggtgtaaattgccttgga

SEQ ID NO: 451560 - DNA, 120 bp, Artificial Sequence
  ENSG00000155858_13 (sequence is synthesized)
gccctgcatccacgtcttgtaactaacttttgaattttgcctgacatgattctctcttgatgaagaaatgacatatattatctttgaatatctacaaggaaagttaccaacttatgtagg

SEQ ID NO: 451561 - DNA, 120 bp, Artificial Sequence
  ENSG00000155858_14 (sequence is synthesized)
ggtgaaatttggataggcggtatgctcaaagcagccagcaatgagtgctctgttttgatccttcttcttattatggaaaggagtacaggacctcttcagtcttccccttaccagaggtag

SEQ ID NO: 451562 - DNA, 120 bp, Artificial Sequence
  ENSG00000155858_15 (sequence is synthesized)
cctctgcaaatggcataccagatgggactctaagatgcttgtgtggtggcttcttgtccttctctttgacttctgtggcatggtgctagtgcatgtaccctgtggtattgcccctctgtc

SEQ ID NO: 451563 - DNA, 120 bp, Artificial Sequence
  ENSG00000155858_16 (sequence is synthesized)
cgtagtgtgaactgtcctgtgagctttatgtcaggagactgtgaccttcatgtccagcttcaaagagttgtgcatgaactcggtaatacacatcacacggctgagagtcccctttccagg

SEQ ID NO: 451564 - DNA, 120 bp, Artificial Sequence
  ENSG00000155858_17 (sequence is synthesized)
cagggccagcatgtgtagaatatctttcagaatatggtttcaccatgaaacaggggtggtagatttattcccttgtgtcaggccaaagaagttcttacaaagtacagtgggtagtgtcta

SEQ ID NO: 451565 - DNA, 120 bp, Artificial Sequence
  ENSG00000155858_18 (sequence is synthesized)
aagcgacactttactcacagcctggcttgagtcaacaggaacaccatagcacccacaaatacttctacttgaatcatattctgtgctttttcaatcactagtgcagaataggctgcattt

SEQ ID NO: 451566 - DNA, 120 bp, Artificial Sequence
  ENSG00000155858_19 (sequence is synthesized)
gacacagactgttaggcaatattgatttttttgttttgtttttatttggttttatctgagataacttatgttcaaggtgagaataagaaatagccaactagttaaaatgtatgaaaagaa

SEQ ID NO: 451567 - DNA, 120 bp, Artificial Sequence
  ENSG00000155858_20 (sequence is synthesized)
aactttcccctgctgtatttgttgtgtaacataaataagccttctgagaagcagggtgaataaagtttagggagctgggacacctggtcctgctagctggaccactggctcatcatgcaa

SEQ ID NO: 451568 - DNA, 120 bp, Artificial Sequence
  ENSG00000155858_21 (sequence is synthesized)
tgaaaaggtgagcagacttaacccctccgtgcctcagctttttccccacagacacctacctcacaggggcattgagaaaaaaaaaatgaaggcattttacagtctctaaacatctttaag

SEQ ID NO: 451569 - DNA, 120 bp, Artificial Sequence
  ENSG00000155858_22 (sequence is synthesized)
tgccatgagtaatttttcctgactctgtttcatagctttgtaagaattctgtgtctttataagacacagaagcaaggcaggtgctacataaaaaagtaatctcagccaggcacggtggct

SEQ ID NO: 451570 - DNA, 120 bp, Artificial Sequence
  ENSG00000155858_23 (sequence is synthesized)
cagagcaagactctgtctcaaaaaaaggaaaaaaaaaaaaagtaatcttagggttcatagttatgatcctgttgtaactatcttcggaaggcagcagtatcttctggaacttccatattc

SEQ ID NO: 451571 - DNA, 120 bp, Artificial Sequence
  ENSG00000155858_24 (sequence is synthesized)
attccattccttcctcctaagggacaatggaagttctcagaagagtatcttcagtaagaggagagtaactttttttttgctgctcccgctatatcccaggcctcacccttttctgatcat

SEQ ID NO: 451572 - DNA, 120 bp, Artificial Sequence
  ENSG00000155858_25 (sequence is synthesized)
agggcaatctgtggaagtttgttgtttgtttgtttttatttttaaatgcattgtaaagtgtactctagagccagatcaggtgcactaaagtttatagaggttccagtttacaaactcaag

SEQ ID NO: 451573 - DNA, 120 bp, Artificial Sequence
  ENSG00000155858_26 (sequence is synthesized)
tgaacagtaatctttggaagctgccagtctaaattctaaatagtgtatctgaaatctcagttcccaaaatagttgtcaggtttaatcatcaggcaacactgcgtatacctgtgtggctat

SEQ ID NO: 451574 - DNA, 120 bp, Artificial Sequence
  ENSG00000155858_27 (sequence is synthesized)
cctcatctgcctgccctctcatccctcggctagaatgatgtactctactttcccaataaggtagaaatttggaatccaacggaatataatcagttttcattcattccagtgcctagttaa

SEQ ID NO: 451575 - DNA, 120 bp, Artificial Sequence
  ENSG00000155858_28 (sequence is synthesized)
atctaacctgacttaaacatatgcctgtttttatgtttacctataattttcatatagccgtataaggattgatttaccattttttgcccaacatgacaattctggctatgaaaattatgt

SEQ ID NO: 451576 - DNA, 120 bp, Artificial Sequence
  ENSG00000155858_29 (sequence is synthesized)
ttaaactgtgtatgatctattttatgtgctctatgttcccatttgtttgtttggtctggacagtggttctggaatgaattctatctagtaaattagtaaatgtgctgttttgtataaagc

SEQ ID NO: 451577 - DNA, 120 bp, Artificial Sequence
  ENSG00000155858_30 (sequence is synthesized)
atgataattactttttaacagaagttcatttttaaagattactcccttttctttctctcttttttttgagacaatttctctcttgttgcctaggcagtgcagtggcgcgatctcagctcc

SEQ ID NO: 451578 - DNA, 74 bp, Artificial Sequence
  ENSG00000155858_31 (sequence is synthesized)
ccgcccggtccccttttctttattatcgaagatattgtttaaaagaaagaaaaagtaggtcccaataatatatg

SEQ ID NO: 451579 - DNA, 120 bp, Artificial Sequence
  ENSG00000155858_32 (sequence is synthesized)
ttgtttaaaagaaagaaaaagtaggtcccaataatatatgtgctattcaaaaaatgtgatcatttaggacattatcacaagttgctatggaaataactgaagacttcctcaggagaagga

SEQ ID NO: 451580 - DNA, 120 bp, Artificial Sequence
  ENSG00000155858_33 (sequence is synthesized)
aagaaaatgaggaacataatgatagagtcggggaactcccactagctcacctgaggggggctcgatgcagctgaaatactgaatactgaaatactagaaaccaacaaaactggtttctag

SEQ ID NO: 451581 - DNA, 120 bp, Artificial Sequence
  ENSG00000155858_34 (sequence is synthesized)
aattctccagggatttgggcttgggaaacttggtaagaatagtttttatttttgaacattcaactttggttcttcaaagtaatctttaaacatgggaatatgttttcaagacaatttata

SEQ ID NO: 451582 - DNA, 120 bp, Artificial Sequence
  ENSG00000155858_35 (sequence is synthesized)
ggacatacttatgtagttggtgaggtcttctcaaaagtatctacctttgttagataataacaagtgattaagaaaggggagatatggttttatactcataacaatttcctgtgccattct

SEQ ID NO: 451583 - DNA, 120 bp, Artificial Sequence
  ENSG00000155858_36 (sequence is synthesized)
ctgtacacagaggtgattcatttactctcccattagtagaacttgcactttgggctgtctgttctagtatttgggaagtgtttatgcttccttccagggaccatcttatgatcagaggca

SEQ ID NO: 451584 - DNA, 120 bp, Artificial Sequence
  ENSG00000155858_37 (sequence is synthesized)
ggatgtctgtgagatggttagctagagttagcagtgtccggggagagtggctttagaccagtcagtaccttgctctttgtgcatggtgcatgtcaagtcaggaagccaagaaaccgttgg

SEQ ID NO: 451585 - DNA, 120 bp, Artificial Sequence
  ENSG00000155858_38 (sequence is synthesized)
cattaaaatctagatgcatagagatccttgctatgagttgtggataggagtggctccatctatccttgtggtgaaagagtccaggagctcctttagagattgtcaagtcctgagcgatga

SEQ ID NO: 451586 - DNA, 120 bp, Artificial Sequence
  ENSG00000155858_39 (sequence is synthesized)
gctgcccttaatcctcagaagccttacaaaaattgagatgtaccatttctaccctttgagaaaaaagaaatagaaacttacttgatgcagaatggatatttatatttctgcttgcaccat

SEQ ID NO: 451587 - DNA, 120 bp, Artificial Sequence
  ENSG00000155858_40 (sequence is synthesized)
ttccatagcagctgacaaaggcaaaatcatgaaatagaatcatttctataaattgcttctttaagttttctctaaattttgcctctaggaaaaaattaaaactattcaatgacagctagc

SEQ ID NO: 451588 - DNA, 120 bp, Artificial Sequence
  ENSG00000155858_41 (sequence is synthesized)
tgtcactggtgctaccccaaagctttccaatcttttatgtattttttgtgaatgaaactgttgctgtaggaaagtcaaggttcatgtaagagtatcgtggtgtaaatataatggtttcac

SEQ ID NO: 451589 - DNA, 120 bp, Artificial Sequence
  ENSG00000155858_42 (sequence is synthesized)
agctgtttgaatttttcttttcctgtgccagatatagaatgcagtcaaccctttttcagtaacttatgttcaccagtctgtgcttttcttctcccagaaggcttttcttagtggttgtaa

SEQ ID NO: 451590 - DNA, 120 bp, Artificial Sequence
  ENSG00000155858_43 (sequence is synthesized)
atgcaagaatcctgagccctgtgttgcaaaggtgggtggtctgtcagcactttctggcaaattgagttgatggatttaagataagcctttggggttcctgtcagttttctgggccctgag

SEQ ID NO: 451591 - DNA, 120 bp, Artificial Sequence
  ENSG00000155858_44 (sequence is synthesized)
gaagggttgggcctcctttactctcagtattttgagtgtttttcaaatgtttgtacgttatcttgcactgctctaataaaaatgaaagctctctgacaagaaatagttctggatggtttg

SEQ ID NO: 451592 - DNA, 120 bp, Artificial Sequence
  ENSG00000155858_45 (sequence is synthesized)
aagatctgcggggaaaaataagtgtgcacctgagaccttcagttagtcttttatttatttagaataaaaaatagtttgataacctaccagagttagtgcttctttaaaaacactccttgg

SEQ ID NO: 451593 - DNA, 120 bp, Artificial Sequence
  ENSG00000155858_46 (sequence is synthesized)
aaagatggggactgtcccttaggaaagccataaaagtgattcccaatactttgcaattgcttttgatttttagtcctttggaacaaatgtgtgatgttatgtctgatgttgtgtttttag

SEQ ID NO: 451594 - DNA, 120 bp, Artificial Sequence
  ENSG00000155858_47 (sequence is synthesized)
agctgtgaaaagtctgaaaaatttcaaggggtattatttaaatgatgattatctggctgaattatgtgtgagctagaatctagggtagctgtccacttctttttctgttgtcctgacagt

SEQ ID NO: 451595 - DNA, 120 bp, Artificial Sequence
  ENSG00000155858_48 (sequence is synthesized)
aaagcaaatagtaagccatgtcttgaaagtgatttgcttgtttcatactgacatctaaagacatcagccttctctttggcaaccctggggatactcctctgcaccataacttattaatgt

SEQ ID NO: 451596 - DNA, 120 bp, Artificial Sequence
  ENSG00000155858_49 (sequence is synthesized)
ttttttagacaaggctaaacctgaatgactctacgtatctatagtttcactgctcatataccagctgctacaagaaaaaccatgacttgtaagtttgtctttactcctaattgctaaatt

SEQ ID NO: 451597 - DNA, 120 bp, Artificial Sequence
  ENSG00000155858_50 (sequence is synthesized)
aactgaaacccttcctgtctagggagaattgctgctagtaaggtcagtttgcaatgttcagctttagatatgtgtcgtaatgggagtctgaaaactgtaataaactgtattcatatcctg

SEQ ID NO: 451598 - DNA, 120 bp, Artificial Sequence
  ENSG00000155868_0 (sequence is synthesized)
cggctgcagaggggaaggcggctaccagtgtaaagccagagctgaggttcttgatagtccacaatgggtgaaccacagcaagtgagtgcacttccaccacctccaatgcaatatatcaag

SEQ ID NO: 451599 - DNA, 120 bp, Artificial Sequence
  ENSG00000155868_1 (sequence is synthesized)
gaatatacggatgaaaatattcaagaaggcttagctcccaagcctccccctccaataaaagacagttacatgatgtttggcaatcagttccaatgtgatgatcttatcatccgccctttg

SEQ ID NO: 451600 - DNA, 120 bp, Artificial Sequence
  ENSG00000155868_2 (sequence is synthesized)
gaaagtcagggcatcgaacggcttcatcctatgcagtttgatcacaagaaagaactgagaaaacttaatatgtctatccttattaatttcttggaccttttagatattttaataaggagc

SEQ ID NO: 451601 - DNA, 120 bp, Artificial Sequence
  ENSG00000155868_3 (sequence is synthesized)
cctgggagtataaaacgagaagagaaactagaagatcttaagctgctttttgtacacgtgcatcatcttataaatgaataccgaccccaccaagcaagagagaccttgagagtcatgatg

SEQ ID NO: 451602 - DNA, 120 bp, Artificial Sequence
  ENSG00000155868_4 (sequence is synthesized)
gaggtccagaaacgtcaacggcttgaaacagctgagagatttcaaaagcacctggaacgagtaattgaaatgattcagaattgcttggcttctttgcctgatgatttgcctcattcagaa

SEQ ID NO: 451603 - DNA, 120 bp, Artificial Sequence
  ENSG00000155868_5 (sequence is synthesized)
gcaggaatgagagtaaaaactgaaccaatggatgctgatgatagcaacaattgtactggacagaatgaacatcaaagagaaaattcaggtcataggagagatcagattatagagaaagat

SEQ ID NO: 451604 - DNA, 120 bp, Artificial Sequence
  ENSG00000155868_6 (sequence is synthesized)
gctgccttgtgtgtcctaattgatgagatgaatgaaagaccatgaaagatgtttctttttctttttttccttttgataatagcatcatatattagttcattttcttttggacagtcttaa

SEQ ID NO: 451605 - DNA, 120 bp, Artificial Sequence
  ENSG00000155868_7 (sequence is synthesized)
gagaagtttcactaaaaatgtaaacagctttaatcttgactccaaatttttcaattatgagatgtcataggcagtaatttcgctgtataacaagcatagacaaatgagtgtccctgcact

SEQ ID NO: 451606 - DNA, 120 bp, Artificial Sequence
  ENSG00000155868_8 (sequence is synthesized)
gctgctgttgtatgggacattcctatgttttagagttgcagtaaaactttgatgataacctcaataatagcaaagttttcgtctttgaaaaggggatttagcatttgctttaagaatgat

SEQ ID NO: 451607 - DNA, 120 bp, Artificial Sequence
  ENSG00000155868_9 (sequence is synthesized)
agataaatggatattaagctctctacatgtaaaactatgaaatctttagacttattccattaaaaattttgcttaagctccaaaaagtagcataacatgttgatagagaggagcccagta

SEQ ID NO: 451608 - DNA, 120 bp, Artificial Sequence
  ENSG00000155868_10 (sequence is synthesized)
gagttataaaatagaaacttcattttttcctcatgactgcttctgtaaacccactagctcagtcttttctccctatcctgaatggactcttgcagggaagtcccataaattgttgttttt

SEQ ID NO: 451609 - DNA, 120 bp, Artificial Sequence
  ENSG00000155868_11 (sequence is synthesized)
ttttccagtcactcaggtaataagtcctttggtcactttaagttacagacattaattttagtaattaagatgtctgtgtcattagctatacattttctttaaagctaagctcagacttgt

SEQ ID NO: 451610 - DNA, 120 bp, Artificial Sequence
  ENSG00000155868_12 (sequence is synthesized)
ttaagtccacaatgggaaaggggtttgatggcagagactgctaggtgtctaccaaagattcttgctctttgaagatatgttgtcaagatgtggcaatccagccagggacatttccctact

SEQ ID NO: 451611 - DNA, 120 bp, Artificial Sequence
  ENSG00000155868_13 (sequence is synthesized)
cccagcatctctgtgagaacatatgactaagtcgtaggcggtgaaatgtgggcataggaatccaggcttgccccataaacatttcttgcatgatcctccattctcttctcccagctgctg

SEQ ID NO: 451612 - DNA, 120 bp, Artificial Sequence
  ENSG00000155868_14 (sequence is synthesized)
gttggacggtcgtatccaggataagtttggaagccaccgaagatggcaaagattgtcagtctggttctttgaatgaccgtgaggactaagtcttcctttcagtaactccactctgcccct

SEQ ID NO: 451613 - DNA, 120 bp, Artificial Sequence
  ENSG00000155868_15 (sequence is synthesized)
agctaattggactttatatgagcactttcttctcttcttcccccgactgtccatctgctcttccaccaaggtgttagtggagagttgaccttgtgtctgaggatctctgcctgccgtttt

SEQ ID NO: 451614 - DNA, 120 bp, Artificial Sequence
  ENSG00000155868_16 (sequence is synthesized)
cttaatgtaggcccgtggttcttaaagtgtgtggtcctggaccagcagcattggtatcacttggggacttactagaaataaaagttttagtataatccgtaggttcagaaaaataaaaaa

SEQ ID NO: 451615 - DNA, 120 bp, Artificial Sequence
  ENSG00000155868_17 (sequence is synthesized)
ttttcttccggaccccgcagcttcctctgtgctgggctgggaactggggaggcatggctgagttcggcctccaaaggcggtctttcgtctttctctcccgagtctctccgagagtgcggt

SEQ ID NO: 451616 - DNA, 120 bp, Artificial Sequence
  ENSG00000155868_18 (sequence is synthesized)
ctctccgagagcgcggaggcctcggggtggacagcctggaggagggggctctaagcgtggcagtctcggggcttcctccgtgttgggacgccgagccggagtggaggttgggagacctgg

SEQ ID NO: 451617 - DNA, 120 bp, Artificial Sequence
  ENSG00000155868_19 (sequence is synthesized)
cgtctagtccccgcgccgctgtttttctaagctgtgtggccttgggcgagtcatttgccctctccggctctttgtaacatgagagtagccctccctgcccttccttcttctgggagcagt

SEQ ID NO: 451618 - DNA, 89 bp, Artificial Sequence
  ENSG00000155868_20 (sequence is synthesized)
gatctataaaatgagattacaggagatgttttgaaagacatgttcccattagaaatgtccatgtgatggctgggtgctgtggctcatgg

SEQ ID NO: 451619 - DNA, 120 bp, Artificial Sequence
  ENSG00000155868_21 (sequence is synthesized)
tggcggatcacctgagaaacgaagaaacggaaccctcagctacgacttttaaaagtcagtaacgggtggatgggaggagtcaaacatacgtaggcgcaacagcgagggatcggtctgagg

SEQ ID NO: 451620 - DNA, 120 bp, Artificial Sequence
  ENSG00000155875_0 (sequence is synthesized)
agtcagccgctccaggtgcttaagtctggactgcggaggccggggcggtggcgtgcagggtgaggtctcccgggctggcgcgcgtgcaagccccctgctgctacctcgcgctaggccagc

SEQ ID NO: 451621 - DNA, 120 bp, Artificial Sequence
  ENSG00000155875_1 (sequence is synthesized)
tccaggagggcaacagacgacaggacattgcaaaagggccacttaaattttccttcgagtaaacagaacacctgccaagaccctcgagcctgggcgtgccccaagacaggtggttggggt

SEQ ID NO: 451622 - DNA, 120 bp, Artificial Sequence
  ENSG00000155875_2 (sequence is synthesized)
ctaggagtcggctgcagctggcgatgctctgaggggacgtcagggcctcaggatcgcccctatgaagacgaagtgcatctgtgaactgtgctcctgcgggcggcatcactgtccacatct

SEQ ID NO: 451623 - DNA, 120 bp, Artificial Sequence
  ENSG00000155875_3 (sequence is synthesized)
ccctaccaagatttatgataaaacagagaaaccatgtcttctctccgaatataccgagaactaccctttctatcactcctacctgcccagagagtccttcaagccaaggcgggagtacca

SEQ ID NO: 451624 - DNA, 120 bp, Artificial Sequence
  ENSG00000155875_4 (sequence is synthesized)
gaaagggcctataccaatggaaggcctgactacatcaaggagagattttgggcctcacaaagtggcaccagtgaaggtccaccagtatgaccagttcgtcccgagtgaagagaatatgga

SEQ ID NO: 451625 - DNA, 120 bp, Artificial Sequence
  ENSG00000155875_5 (sequence is synthesized)
tttgctcacgacgtataagaaagattacaatccctaccctgtctgtcgagtggaccccatcaaacctcgggacagtaaatatccatgtagcgacaagatggagtgtttgcctacttataa

SEQ ID NO: 451626 - DNA, 120 bp, Artificial Sequence
  ENSG00000155875_6 (sequence is synthesized)
agctgattatttgccttggaaccaaccaaggcgagagccacttcgtctggaacacaaataccagccggcatcagtcaggtttgataacagaaccacacaccaggacgattaccccataaa

SEQ ID NO: 451627 - DNA, 120 bp, Artificial Sequence
  ENSG00000155875_7 (sequence is synthesized)
aggccttgtgaagaccataagctgtaaacctctggccatgccaaagctctgtaacatccccttggaggatgtgactaactacaagatgagctatgtggcccaccccgtggagaagcgctt

SEQ ID NO: 451628 - DNA, 120 bp, Artificial Sequence
  ENSG00000155875_8 (sequence is synthesized)
gagcctgccaagagcttgaaacctctagccaggcctcctgggctagacatgcctttctgtaacaccactgagtttcgagataagtaccaagcttggccaatgccccggatgttctccaaa

SEQ ID NO: 451629 - DNA, 120 bp, Artificial Sequence
  ENSG00000155875_9 (sequence is synthesized)
gctcccatcacctacgtccctcccgaagacaggatggatcttctgacaacagtgcaggcccattacacatgccctaagggtgccccagctcagtcctgccgacctgcacttcagattaag

SEQ ID NO: 451630 - DNA, 120 bp, Artificial Sequence
  ENSG00000155875_10 (sequence is synthesized)
aagtgcggtcgctttgaaggctcttccaccaccaaggatgactacaagcagtggtccagcatgcgcacagagccagtcaagcccgttccccagctggacttgcccaccgagcccctggac

SEQ ID NO: 451631 - DNA, 120 bp, Artificial Sequence
  ENSG00000155875_11 (sequence is synthesized)
tgcctgaccaccactcgggcccactatgtgccccacctgcctatcaataccaaaagctgtaagcctcattggtctggccctcgaggaaatgtccctgtggaaagccagaccacctacacc

SEQ ID NO: 451632 - DNA, 120 bp, Artificial Sequence
  ENSG00000155875_12 (sequence is synthesized)
atcagctttactcccaaggaaatgggcaggtgcctagcttcatatcctgagcctcctggctacacctttgaggaagtggatgctttgggtcacaggatatacaaaccagtttcccaggca

SEQ ID NO: 451633 - DNA, 120 bp, Artificial Sequence
  ENSG00000155875_13 (sequence is synthesized)
ggctctcagcagagcagccatctttctgtagatgattcagaaaaccccaaccagagggagttggaagtgttagcctgattttgaaaaatagtaatttagaaattacacagtacttttaaa

SEQ ID NO: 451634 - DNA, 120 bp, Artificial Sequence
  ENSG00000155875_14 (sequence is synthesized)
agcagacaactgagaattatttgttggacaaaaaagaattccctaaaatgacaaaaaacaaaaaacaaaaaaccttcaccacttccagagcacttgaataaaatgagaatcacttgactc

SEQ ID NO: 451635 - DNA, 120 bp, Artificial Sequence
  ENSG00000155875_15 (sequence is synthesized)
agggaaaatgacatttaatcaccggctaattaactccccttaccttctcctttactgcatccccaccccgtttcaggtcctttactttgtgcttatggaatcaaagttggtctgtgaggg

SEQ ID NO: 451636 - DNA, 120 bp, Artificial Sequence
  ENSG00000155875_16 (sequence is synthesized)
tttctctgatccagatgtattttattaatttaatcattgtatgaactgacataatgattaacccttgccaagtatgaagcgccaaagaataaattttattttggggggaatgaatctgta

SEQ ID NO: 451637 - DNA, 120 bp, Artificial Sequence
  ENSG00000155875_17 (sequence is synthesized)
ctccctcgctccgccctccgtgcccgacgagccttgaaaagccgctgctctaatgaaacctaaccggggcggcgtgagccctaagatggaagggaagctcgaggacttcggtcttttgtt

SEQ ID NO: 451638 - DNA, 120 bp, Artificial Sequence
  ENSG00000155875_18 (sequence is synthesized)
tggtctggagtcttgttttgggttctctctgtgcagggctgcttcacaaagcatccttctacctcttcactgcatgacataccagcaagaatagtgctgttcgatggggtgtggatctct

SEQ ID NO: 451639 - DNA, 120 bp, Artificial Sequence
  ENSG00000155875_19 (sequence is synthesized)
ttagtcacaggtgatggagggaaagaaagagggaggcagtgatgcatgaacctaccagacctctccccaaccccaagctggtacaggctatgattccagggagaggagggagaaaaagca

SEQ ID NO: 451640 - DNA, 120 bp, Artificial Sequence
  ENSG00000155875_20 (sequence is synthesized)
cccttggcaaccaggcagtcgacgcctggtccttgagctgtgagcaaaagctgtgggctcttctaaatgctcagagcctggaagaaatttccccaggctggcctggtttctggagagcct

SEQ ID NO: 451641 - DNA, 120 bp, Artificial Sequence
  ENSG00000155875_21 (sequence is synthesized)
ggatgtgcttgtcctaaaatgacagctgtgaccagacctgtgacaaagtttaacatagtggtgagccacattccgccctggagtttctctcctgagcctaaggtttttaccacgtttgtt

SEQ ID NO: 451642 - DNA, 120 bp, Artificial Sequence
  ENSG00000155875_22 (sequence is synthesized)
tctaaggccaagtaatttaaagttatcttatttatatttttttaactgagcaaaattgaggagggactttgttaaagagggtccgatacagccaattaacttgcagatttttttttttaa

SEQ ID NO: 451643 - DNA, 120 bp, Artificial Sequence
  ENSG00000155875_23 (sequence is synthesized)
ctgggcagaattgaggaaagactttgtgccagttaggtgagctcatgggtctgggtgagcctcacagagggacgtagacttaagtctgggacacttgcctctctcgagttcacagaatcc

SEQ ID NO: 451644 - DNA, 120 bp, Artificial Sequence
  ENSG00000155875_24 (sequence is synthesized)
tgaaatgtactccatggtctcagggaacttgggagtagcatggagaaggtggggggagttcagctcatgtctaaagccttgggcttgggctcagggcctggtggagggaccaggggcctg

SEQ ID NO: 451645 - DNA, 120 bp, Artificial Sequence
  ENSG00000155875_25 (sequence is synthesized)
ttcctttctatctagggctctgtctttccatggctctcacccacctgacccaggcttcgcaggtccccacaccttgcatcctcaccatgagctttgttttcattgttgggttgggatcta

SEQ ID NO: 451646 - DNA, 120 bp, Artificial Sequence
  ENSG00000155875_26 (sequence is synthesized)
tgttatttaatcctctcattggtttgtatggggtctgagtgcctgcccttaggggtagaaaggctcagagtggttaagcacctttcccaaggccatacagcacggagcagcagagccaag

SEQ ID NO: 451647 - DNA, 120 bp, Artificial Sequence
  ENSG00000155875_27 (sequence is synthesized)
gtcagaatccaggttttctgacccatggctcttccacaacaccaggcgcctcccatcttctgtgtctcagatctcctggctccacaaaccacatcaaaccaccttctgtctgagcctact

SEQ ID NO: 451648 - DNA, 120 bp, Artificial Sequence
  ENSG00000155875_28 (sequence is synthesized)
ggagttcattaagctaaaggattacactaagaagggaagggaagaagctgaaggatgggattgacctggctgactgaggagcacagaccctgttggagtgaagaattttgtctgagcttt

SEQ ID NO: 451649 - DNA, 120 bp, Artificial Sequence
  ENSG00000155875_29 (sequence is synthesized)
gcctttgtaatgaggccatcttcatggtgaccccaggctggagaggccaccctagggcatccctgccttgcctgttcttcttggtcttaagaaaccaactctctttgggaggccgagatg

SEQ ID NO: 451650 - DNA, 120 bp, Artificial Sequence
  ENSG00000155875_30 (sequence is synthesized)
aggatgaggaagacaattgctgaattgggactggctgaatctacttatgatttcatcagtcagtgtttacaagtgtgcagaaaaagggcttatttggctcatggtcttacaggcagtata

SEQ ID NO: 451651 - DNA, 120 bp, Artificial Sequence
  ENSG00000155875_31 (sequence is synthesized)
agaagcatggcaccagcaactgcttgtggtgaggcctcaggaagcttacaatcatagaggaaggcaagaggagctggcttgtcacatggccactcttctgtagggctgctgcagtttgct

SEQ ID NO: 451652 - DNA, 120 bp, Artificial Sequence
  ENSG00000155875_32 (sequence is synthesized)
gggggatcactccaggccctagttgcctaggttttccccttacctggatgtatcaccagtgaagtctgcaaaacagcaaagatggcagcctgccccttcctctaggagctctgtcccagg

SEQ ID NO: 451653 - DNA, 120 bp, Artificial Sequence
  ENSG00000155875_33 (sequence is synthesized)
agtggaatgtggaggtttgagaagcatctacagtttgaagcacaatatcagcaatattatcagcagaaaaacatcaacaggattgtgagatgaagtatttgtctgcaatctgtaatgcct

SEQ ID NO: 451654 - DNA, 120 bp, Artificial Sequence
  ENSG00000155875_34 (sequence is synthesized)
caagccttgctactctttcaagcgtagcccttggactagcagcactgatgttaccagaagttttgagaaattcagcatccccagttctacctcagacctaccatattagaatttgcatct

SEQ ID NO: 451655 - DNA, 120 bp, Artificial Sequence
  ENSG00000155875_35 (sequence is synthesized)
ttaataagattcccaggaaacataatcactggtgcaccatacgtccctccttgagtgaccttgatgacacagtgcagaaacatctgtcatttgtagccggatctgtttgctattgtaatt

SEQ ID NO: 451656 - DNA, 120 bp, Artificial Sequence
  ENSG00000155875_36 (sequence is synthesized)
ttacaaactgccaataagcctcgagggcctggaaccagagctgtcttgagatgaatgtgacctatgagaagcaggcttttccagggtctcgctcggtcacccaagctggagtgcagtggt

SEQ ID NO: 451657 - DNA, 120 bp, Artificial Sequence
  ENSG00000155875_37 (sequence is synthesized)
atcgtagctcacagcaacctccaactcccaagtagctacaattacaggtgaagaagatgagatgcctgctcctgatactttgcacacacaactatgaaaatgtgactgtactgtaagata

SEQ ID NO: 451658 - DNA, 120 bp, Artificial Sequence
  ENSG00000155875_38 (sequence is synthesized)
gagtttggccgtgttaaacagcatgcttctccaggattgactgggccacctctagggggtagcaggcaggcaggctctaggaaattagtccaattttaaaagttcacagtactgttgatc

SEQ ID NO: 451659 - DNA, 120 bp, Artificial Sequence
  ENSG00000155875_39 (sequence is synthesized)
agaattgaacctacctcatgaggataatacacagggttcccataagtccttctctgccagtaggctcttggcataaaatataccttttaaaaacacatcagcattttttttaaagtttca

SEQ ID NO: 451660 - DNA, 120 bp, Artificial Sequence
  ENSG00000155875_40 (sequence is synthesized)
actttctgggtttataagtccctagttgactctaccctcaggctgctggcaggtgccacctggcctgcaggagggaagaccaggatgaccctagggaggcctggctgcaggctgcctgga

SEQ ID NO: 451661 - DNA, 120 bp, Artificial Sequence
  ENSG00000155875_41 (sequence is synthesized)
gctaaggaagtaatttcaatccacagatgagatggccttttaatgaactctagaatgtggatcatacttgggtcataccatacttttgaggagagtcctaggtcagaaattcccctctct

SEQ ID NO: 451662 - DNA, 120 bp, Artificial Sequence
  ENSG00000155875_42 (sequence is synthesized)
gtgtatacttatctatcacgcacaccaagattagattctgtaaggaatgaaattgatgtttcacatttggtctgaaataggacattattttaggactttcaaggaagcgctctataatca

SEQ ID NO: 451663 - DNA, 120 bp, Artificial Sequence
  ENSG00000155875_43 (sequence is synthesized)
aggtgctactgctctgagaagaaaacaacagtttcagaggaaaacctgcggactctatgaatattcccttctcttgagtgatatagctgttctcatcccctcactccagccaatggaaag

SEQ ID NO: 451664 - DNA, 120 bp, Artificial Sequence
  ENSG00000155875_44 (sequence is synthesized)
gcaagctagaaaatacacagatcagcttggaggaaaaacaaaagccagcagcagctccgagccagcatgcctcaggaactcaggctaagttttgctctgattttgggtgagagcctctgc

SEQ ID NO: 451665 - DNA, 120 bp, Artificial Sequence
  ENSG00000155875_45 (sequence is synthesized)
aaaagaaataacgccctttaccccaacacaaaaaaagaaccttcgctcacagccctgtctacatcccatttcatttctcttctgctgaaccaaagccacagcatagcagtggatatgaag

SEQ ID NO: 451666 - DNA, 120 bp, Artificial Sequence
  ENSG00000155875_46 (sequence is synthesized)
aatggctaatattcctagcacgtatcccgggaggcctcactgggcacagcacagggttcagctgcaagccacaggaaggagccgctgctgactaggaattccacggtgagcagtgggggt

SEQ ID NO: 451667 - DNA, 120 bp, Artificial Sequence
  ENSG00000155875_47 (sequence is synthesized)
ggagctaccaggggaacgcaaagacctttcctggatttattattcccacattagtctcctgggtcttgaggctccagaaacttctcaacaaaggaaagaaaataacaaacaatgtgaggg

SEQ ID NO: 451668 - DNA, 120 bp, Artificial Sequence
  ENSG00000155875_48 (sequence is synthesized)
aagtaaagacgggggagagttgagtggtgagctgaagtagggatgagagccatggcaagggagcaggaggaggagtaaggacagaggtgtctgaaaggatctggctggctcgctcctggg

SEQ ID NO: 451669 - DNA, 120 bp, Artificial Sequence
  ENSG00000155875_49 (sequence is synthesized)
ataagaatatgctctggcaagtgatgtctggcctttggcagccaagcccaaagagcgaatggtttttcaaggacccataaatagataggtcctataaagaaacatcagaaatccatccac

SEQ ID NO: 451670 - DNA, 120 bp, Artificial Sequence
  ENSG00000155875_50 (sequence is synthesized)
agcccttactggaaacgtcacagcatcagtgtgatgggcatctgaagggcagagagttgtccaaatgcctgctatttgtcttgcaacctacatttctagtattgatttgttttggctcct

SEQ ID NO: 451671 - DNA, 120 bp, Artificial Sequence
  ENSG00000155875_51 (sequence is synthesized)
aatcttctttgggtgtggttctcagtttgccttggatttatatactccagagactcctgtggagcatttagtggactctctgatggcttaaggaagaagtggcctggttcagattcctgg

SEQ ID NO: 451672 - DNA, 120 bp, Artificial Sequence
  ENSG00000155875_52 (sequence is synthesized)
gtccaattctgacctttccgagattcacatggacttaggagccctaaaaccaatgcagtctccttaggcaacctgggattcaggccaatttagacctggatgaggcagagcacatgctgt

SEQ ID NO: 451673 - DNA, 120 bp, Artificial Sequence
  ENSG00000155875_53 (sequence is synthesized)
tctgctgggaattgataacttgattgaatcagttctttttgggcttccctattttccatagcactcacattgcatgaaggtggagggtctagaatgggaaatgtgtatcaaaagagggat

SEQ ID NO: 451674 - DNA, 120 bp, Artificial Sequence
  ENSG00000155875_54 (sequence is synthesized)
gtgtatatgatctctgtataatgagggatgtgtatatgatctctgtataacgagggatatgtatatgatctctgtataatgagggatgtgtatatgatctctgtataacgagggatgtgt

SEQ ID NO: 451675 - DNA, 120 bp, Artificial Sequence
  ENSG00000155875_55 (sequence is synthesized)
atatgatctctgtataatgagggatgtgtatatgatctctgtgaaacgagggatgtgtatgtgatctctgcataacgaatggaagtgagaactaaagtttccacagagcttctcaaaggc

SEQ ID NO: 451676 - DNA, 120 bp, Artificial Sequence
  ENSG00000155875_56 (sequence is synthesized)
attccaaggacagcagatttgaaagcctaaatccagacgtggacagagcaagtacgcttactgtgggacagaaattatgcctgttatccagtaacattactgggcacctgtattctgctt

SEQ ID NO: 451677 - DNA, 120 bp, Artificial Sequence
  ENSG00000155875_57 (sequence is synthesized)
taaaatgtacaattagcatttcattagagtttgctcttagatctctctaaagaccaaagctgagaaaccctagaatatagagaaggaaaaccaaccttttcctacagtaatgagattttt

SEQ ID NO: 451678 - DNA, 120 bp, Artificial Sequence
  ENSG00000155875_58 (sequence is synthesized)
tccccttaaaatttatttttgaattatgatggtgggggtgggaattgggaatgaacagtgtttacaataaggtgtttacatattgccatctgactcttcactcttgtcaaaaaattatta

SEQ ID NO: 451679 - DNA, 120 bp, Artificial Sequence
  ENSG00000155875_59 (sequence is synthesized)
aaaacaaagtagtcaaaagatgtttgtcattgttggtaagaaggccagagcaggagttggcaattttttttttttttaagggccagatagtgaatattgtagactttgtgagccatatgg

SEQ ID NO: 451680 - DNA, 120 bp, Artificial Sequence
  ENSG00000155875_60 (sequence is synthesized)
tctctgtcacaactactcaactctgccattgtaacttgagatcagccatagacaatacataaacaaatgggtggggctgtgccccactaaaatcttatttataaaggggtggtggtctag

SEQ ID NO: 451681 - DNA, 120 bp, Artificial Sequence
  ENSG00000155875_61 (sequence is synthesized)
acttgccttcaggaccaacccctggtcgagggtatgagatcatttgagtttctgtatgctgagaacaaatggcctagtaaaaccactaactgcctgggcaagatatatttttacccccaa

SEQ ID NO: 451682 - DNA, 120 bp, Artificial Sequence
  ENSG00000155875_62 (sequence is synthesized)
agaaagcagccattttcacaagacaaggaagatgaattcaataccttcttttctaattaaaagatccaacttgttactttaaaaaataccaatgcatgttcattatagactaaaagctca

SEQ ID NO: 451683 - DNA, 120 bp, Artificial Sequence
  ENSG00000155875_63 (sequence is synthesized)
caaaaatataaaaattcaaaaatccctcaagtcccacttctcagacgtaattgatctgaatgtctctctttccaatcacacatatgcacacacatcattaggcagattaataaatcttgg

SEQ ID NO: 451684 - DNA, 120 bp, Artificial Sequence
  ENSG00000155875_64 (sequence is synthesized)
acaattttcttgtcaatgaatgtaagtctacctcattctttaaatgggtgatgggtgcactaaaatctcaggattcaccactatgtaattcattcatccatgtaacaaaaaaaccacttg

SEQ ID NO: 451685 - DNA, 120 bp, Artificial Sequence
  ENSG00000155875_65 (sequence is synthesized)
taccccaaaagatattgaaataaaaaaaaaatcagcaccattatgaagcaaaaaaaagaatctttaatcaactctttatagataattacatgtttccaatttttcactaatataaactac

SEQ ID NO: 451686 - DNA, 120 bp, Artificial Sequence
  ENSG00000155875_66 (sequence is synthesized)
gctgtggtgaatttcctagtacatacatctctgtgaccaaatatttccctaggttacatgactgaagtagcactgatagctcagtaggtatcatttgaaaatactgatatacattgctaa

SEQ ID NO: 451687 - DNA, 120 bp, Artificial Sequence
  ENSG00000155875_67 (sequence is synthesized)
attgcccttcagaaatgttatcctaatttacgttttgggcaacaatgcatgatagtatatattatttaattctttgatcttctgataggcagaataactgcccccctaaagaaatccaca

SEQ ID NO: 451688 - DNA, 120 bp, Artificial Sequence
  ENSG00000155875_68 (sequence is synthesized)
ccctaatccccgaaacctatgaatatgctacctcacatgacaaaagggactttgcaaatgtgattaagaaagaatactgagatgggggattatcctcgattatgcaagtaggcctcatgt

SEQ ID NO: 451689 - DNA, 120 bp, Artificial Sequence
  ENSG00000155875_69 (sequence is synthesized)
catcaaaaggggccttataatggggaagatagcgagtcagagagaaatgtgaagatgctatgctgccattcttgcagatgggagaagggccacagccaagggatgcaggtggctttgagg

SEQ ID NO: 451690 - DNA, 120 bp, Artificial Sequence
  ENSG00000155875_70 (sequence is synthesized)
agctggaaaagacgaatatatttccccgtagagcctccagaaggaaacatcttggtcaatcttgattttagcccagtaagatctgttttggacttctgacctccagaactgtaacagagt

SEQ ID NO: 451691 - DNA, 120 bp, Artificial Sequence
  ENSG00000155875_71 (sequence is synthesized)
aaatgtgtcttgttttaagccactaaatctatggtaatttgttacagctgcaatcaagttaatacagatttcacaaactttttcatcttcaccaacctatttatggcaaatagtatttca

SEQ ID NO: 451692 - DNA, 120 bp, Artificial Sequence
  ENSG00000155875_72 (sequence is synthesized)
ttttatttgcttttctttaattattggtaagaccgaatttgttgtcaaccttttgatgtagagcaagtagttaatgttgctgggtaatgcatctattaagaaactgaataaagttctgga

SEQ ID NO: 451693 - DNA, 120 bp, Artificial Sequence
  ENSG00000155876_0 (sequence is synthesized)
gtatctcccgagccgttgccactgacagccgcgggcgctcccatctgagtaagagccagcccgtccgcggcctctccagccccgggttcgcgctctcgactctcctgcctgcccagctgc

SEQ ID NO: 451694 - DNA, 120 bp, Artificial Sequence
  ENSG00000155876_1 (sequence is synthesized)
cggagcggagcgaggcgcggcctgcgagtccccggcagcccccgacccctccctcggcgctgcgtgtaggccgcgccctcaggcccagtccgcggtgccccggcgggtgatgccaaatac

SEQ ID NO: 451695 - DNA, 120 bp, Artificial Sequence
  ENSG00000155876_2 (sequence is synthesized)
atacagccatgaagaaaaaggtgctgctgatggggaagagcgggtcggggaagaccagcatgaggtcgataatcttcgccaattacattgctcgcgacacccggcgcctgggggccacca

SEQ ID NO: 451696 - DNA, 120 bp, Artificial Sequence
  ENSG00000155876_3 (sequence is synthesized)
ttgacgtggaacactcccacgtccgattcctagggaacctggtgctgaacctgtgggactgtggcggtcaggacaccttcatggaaaattacttcaccagccagcgagacaatatcttcc

SEQ ID NO: 451697 - DNA, 120 bp, Artificial Sequence
  ENSG00000155876_4 (sequence is synthesized)
gtaacgtggaagttttgatttacgtgtttgacgtggagagccgcgaactggaaaaggacatgcattattaccagtcgtgtctggaggccatcctccagaactctcctgacgccaaaatct

SEQ ID NO: 451698 - DNA, 120 bp, Artificial Sequence
  ENSG00000155876_5 (sequence is synthesized)
tctgcctggtgcacaaaatggatctggttcaggaggatcagcgtgacctgatttttaaagagcgagaggaagacctgaggcgtctgtctcgcccgctggagtgtgcttgttttcgaacgt

SEQ ID NO: 451699 - DNA, 120 bp, Artificial Sequence
  ENSG00000155876_6 (sequence is synthesized)
tcgtctaccagctgattcccaacgttcagcagctggagatgaacctcaggaattttgcccaaatcattgaggccgatgaagttctgctgttcgaaagagctacattcttggttatttccc

SEQ ID NO: 451700 - DNA, 120 bp, Artificial Sequence
  ENSG00000155876_7 (sequence is synthesized)
actaccagtgcaaagagcagcgcgacgtccaccggtttgagaagatcagcaacatcatcaaacagttcaagctgagctgcagtaaattggccgcttccttccagagcatggaagttagga

SEQ ID NO: 451701 - DNA, 120 bp, Artificial Sequence
  ENSG00000155876_8 (sequence is synthesized)
attccaacttcgctgctttcatcgacatcttcacctcaaatacgtacgtgatggtggtcatgtcagatccgtcgatcccttctgcggccactctgatcaacattcgcaatgcccggaaac

SEQ ID NO: 451702 - DNA, 120 bp, Artificial Sequence
  ENSG00000155876_9 (sequence is synthesized)
actttgagaagctggagagagtggatggccccaagcacagtctccttatgcgttgaatattgccaaatgctctttctgaaaatgctgaattgccttttttgtttgcatcctttattttta

SEQ ID NO: 451703 - DNA, 120 bp, Artificial Sequence
  ENSG00000155876_10 (sequence is synthesized)
atattcataatgtcgtgtgcttaaaagtgggctttgaagtgtgtgctgcttactcctttcatctttctccccgcttccccagtctttaaacattggacgctatttactcagctacccagt

SEQ ID NO: 451704 - DNA, 120 bp, Artificial Sequence
  ENSG00000155876_11 (sequence is synthesized)
agagcttgaagctgacctttctgagaagttggtatggtgtaacactaaagtaggtggttcgtgtgtgttctcattacctggttatgatagatatgcacatcaaagcctttaccagtatct

SEQ ID NO: 451705 - DNA, 120 bp, Artificial Sequence
  ENSG00000155876_12 (sequence is synthesized)
tcctgtattccgtatcagattgcaaagacggaatgttactattttatcagcaaggtattaaaatgcatttataaattcttcttggcttcattcatgaataaacgtgttagcaatttaaaa

SEQ ID NO: 451706 - DNA, 120 bp, Artificial Sequence
  ENSG00000155886_0 (sequence is synthesized)
tgaaagaaccatctggttgagtctaaagttggaagatcaccatatccaccagaagacccaggatggatctgcaacaaagcaccaccatcacttccctagagaaatggtgtttggatgagt

SEQ ID NO: 451707 - DNA, 120 bp, Artificial Sequence
  ENSG00000155886_1 (sequence is synthesized)
cactgtctggctgcagaagacattatagtgtcaagaaaaaactgaagttaattcgagtcttaggccttttcatgggtctggtagccattagcactgtctcattttcaatcagtgcctttt

SEQ ID NO: 451708 - DNA, 120 bp, Artificial Sequence
  ENSG00000155886_2 (sequence is synthesized)
ctgagacagatacacagagcacaggagaggccagtgttgtaagtggccctagggtagcacagggttaccatcagagaactctcttagatttaaatgacaagattctggattatactccac

SEQ ID NO: 451709 - DNA, 120 bp, Artificial Sequence
  ENSG00000155886_3 (sequence is synthesized)
agccacctctttctaaggaaggcgagtctgagaatagtacagatcacgcccaaggagactacccgaaagacatcttttcccttgaggagagaagaaaaggtgcgatcattctgcatgtca

SEQ ID NO: 451710 - DNA, 120 bp, Artificial Sequence
  ENSG00000155886_4 (sequence is synthesized)
ttggaatgatctacatgttcatagccttagccattgtctgtgatgagttctttgttccttctttgactgtcatcactgaaaaactgggcatctctgatgatgtggctggagccaccttca

SEQ ID NO: 451711 - DNA, 120 bp, Artificial Sequence
  ENSG00000155886_5 (sequence is synthesized)
tggctgcaggagggtcagccccagaacttttcacatctctcataggggtatttatcgctcacagcaacgttggcataggcacaattgtaggttcagcagtattcaacatcctctttgtta

SEQ ID NO: 451712 - DNA, 120 bp, Artificial Sequence
  ENSG00000155886_6 (sequence is synthesized)
ttggcatgtgtgctctgttttctagagaaatcttaaacctgacatggtggccgctctttcgagatgtgtctttctacattgttgacttgatcatgctgatcatatttttcctggataatg

SEQ ID NO: 451713 - DNA, 120 bp, Artificial Sequence
  ENSG00000155886_7 (sequence is synthesized)
tcatcatgtggtgggaaagcttgcttctcttaacagcttatttttgctatgtggttttcatgaaattcaacgtccaagtagaaaaatgggtgaagcaaatgataaaccgcaataaggtcg

SEQ ID NO: 451714 - DNA, 120 bp, Artificial Sequence
  ENSG00000155886_8 (sequence is synthesized)
tcaaggtgacagcaccagaagcccaagcaaagccatctgcagccagggacaaggatgaaccaactctaccggctaagccgcgtctccagcgaggtggaagctctgcctccctccacaaca

SEQ ID NO: 451715 - DNA, 120 bp, Artificial Sequence
  ENSG00000155886_9 (sequence is synthesized)
gtctcatgaggaatagcatcttccaactcatgatacacacccttgacccactcgccgaagaacttggatcatatggaaaactaaaatattatgacacaatgactgaagaagggaggttca

SEQ ID NO: 451716 - DNA, 120 bp, Artificial Sequence
  ENSG00000155886_10 (sequence is synthesized)
gagaaaaggcttcaattctccacaagatcgccaagaagaaatgtcatgtggatgagaacgagaggcagaatggggctgccaaccacgtggaaaaaattgagcttccaaacagcaccagca

SEQ ID NO: 451717 - DNA, 120 bp, Artificial Sequence
  ENSG00000155886_11 (sequence is synthesized)
cagatgttgaaatgacaccatccagtgatgcttcagaacctgtacaaaatggaaatctctcccacaacattgaaggtgcagaagcccagaccgctgatgaggaggaggaccagcctctca

SEQ ID NO: 451718 - DNA, 120 bp, Artificial Sequence
  ENSG00000155886_12 (sequence is synthesized)
gccttgcctggccttctgaaacccgcaagcaagtcacgtttctgattgttttccccatagtgtttcctctctggattacgttacctgacgttcgcaaaccttcatcgaggaagttttttc

SEQ ID NO: 451719 - DNA, 120 bp, Artificial Sequence
  ENSG00000155886_13 (sequence is synthesized)
ccatcacgttctttggctccattacctggattgcagtattctcttacttgatggtctggtgggcgcaccaggttggagagacaattggcatcagtgaagagattatgggcctgaccatct

SEQ ID NO: 451720 - DNA, 120 bp, Artificial Sequence
  ENSG00000155886_14 (sequence is synthesized)
tggctgctgggacctccatccctgatcttatcaccagtgtcatagtggcccggaaggggttaggggacatggctgtgtccagctctgttggaagcaacatttttgacatcactgtagggc

SEQ ID NO: 451721 - DNA, 120 bp, Artificial Sequence
  ENSG00000155886_15 (sequence is synthesized)
tcccactgccctggctcctgtacaccgtcattcacagattccagccagtggctgtcagcagcaatggccttttctgtgccatcgtccttctcttcatcatgctgctcttcgtcatcctct

SEQ ID NO: 451722 - DNA, 120 bp, Artificial Sequence
  ENSG00000155886_16 (sequence is synthesized)
ctatcgccctctgcaagtggcgaatgaacaaaatcctgggcttcatcatgtttggcctctactttgtgttcctggtggtgagcgttctcctagaagacagaattcttacatgccccgtct

SEQ ID NO: 451723 - DNA, 120 bp, Artificial Sequence
  ENSG00000155886_17 (sequence is synthesized)
ccatctagcaggaaaagccatatcttgcaccagcagcatgaatggtccctccacactctgggctctgggctccttgacctcttgagaagaggcagctggcacacagccctgggtgccaag

SEQ ID NO: 451724 - DNA, 120 bp, Artificial Sequence
  ENSG00000155886_18 (sequence is synthesized)
tgtccctccttggtgaatttgaggagagatggattcacactgggcccattcacttcacaggctgcttccaccctgcctactgaaatgacttcatgtaaaagacaaagagaaccgtcaata

SEQ ID NO: 451725 - DNA, 120 bp, Artificial Sequence
  ENSG00000155886_19 (sequence is synthesized)
cagggcttctccctattcaccactgacaagtacacctcgctggtcggaggtacagtcgatgcaaacaaggacacaggctatatatatctataaatacacatattataaatatacgcacat

SEQ ID NO: 451726 - DNA, 120 bp, Artificial Sequence
  ENSG00000155886_20 (sequence is synthesized)
gaacacacaaatcctgcctgttcctgtactatacctctccttgcatacctatagattagtacatacctgtaaataaagacaaagaaaaattatatatatatatataaaatcagatatata

SEQ ID NO: 451727 - DNA, 120 bp, Artificial Sequence
  ENSG00000155886_21 (sequence is synthesized)
taaaagtacaaatgcatcttttcagggatagctctagtatatttatagtacttatttgaagaggggcatcaacttgcagtctgggctttacctcttaagtacaagaggtgaactaatgga

SEQ ID NO: 451728 - DNA, 120 bp, Artificial Sequence
  ENSG00000155886_22 (sequence is synthesized)
accaacaagacaaaggtagcattgctgtgaccttcagcctaccttggacttgctgtgatcctgcctagtaaggtagatggtttagggaaatagcttgcagggaggagggcttagtggaga

SEQ ID NO: 451729 - DNA, 120 bp, Artificial Sequence
  ENSG00000155886_23 (sequence is synthesized)
aggtctgtaggggccctgagttgagccttccaaaacattcctacaagccaaacagagagactatctgcccacctccaccagagtaccctgaccaagaaactcagggtacttaggacagaa

SEQ ID NO: 451730 - DNA, 120 bp, Artificial Sequence
  ENSG00000155886_24 (sequence is synthesized)
agaggtaaaaacccaggctgggtggcttggtttggggaagtggggaggtaaccagggttgggttgttttgttttgttcttatattgtcccagcatgcaagtagaaaatatgactacaaac

SEQ ID NO: 451731 - DNA, 120 bp, Artificial Sequence
  ENSG00000155886_25 (sequence is synthesized)
caaattagtgctttttctaggacagcaagactatataaactgaacctgtatttttccagcgcatgtcccattatcatcaaaagaagaggggtaagtttagctgtgattgtcatgtagata

SEQ ID NO: 451732 - DNA, 120 bp, Artificial Sequence
  ENSG00000155886_26 (sequence is synthesized)
tattttgatgctaagggctgccaagagagcctagatgtgcaataagaagtcatccagtaaaggtgcttagtgggccttgccacctaatgggatgtaagggcatagttctttaaaacgttt

SEQ ID NO: 451733 - DNA, 120 bp, Artificial Sequence
  ENSG00000155886_27 (sequence is synthesized)
tccagtgtagtcataaagggctttagtgtctgaagaaatcattattcccaatagcactaacttaactctgatcagcactgcttgggttgaggcaacttagcgatgcttggaaaggcattt

SEQ ID NO: 451734 - DNA, 120 bp, Artificial Sequence
  ENSG00000155886_28 (sequence is synthesized)
gcacactcagtgcaccccaggaaggtttctgagtgccaggtcgagtggtaccaggaccaggctttggttaaagttcttgtaacatctatgtctcttcttccatcaagaccttatctggga

SEQ ID NO: 451735 - DNA, 120 bp, Artificial Sequence
  ENSG00000155886_29 (sequence is synthesized)
ttctgtctaagttttagagtacacggtatttgacagcttccttatactggtttcaagctattcactccaacaatttgatttcttgattttgctcaacattacattgaatgcatgaaatta

SEQ ID NO: 451736 - DNA, 120 bp, Artificial Sequence
  ENSG00000155886_30 (sequence is synthesized)
aaatattccacgcccccaagttctgtatgacaccttgtgtgttttctcagatctatgtcagtcgaaaataaagccagcaagggggaaaaaataggcaaactgaatcaatggaaaactatg

SEQ ID NO: 451737 - DNA, 120 bp, Artificial Sequence
  ENSG00000155886_31 (sequence is synthesized)
tagagcacttttcttttctccaagtcatgctttccttaaaatcagttgaaaaattgaatcaaggatggttcattattctgtacccatcctacgtctaagttggtacatatggcatatggg

SEQ ID NO: 451738 - DNA, 120 bp, Artificial Sequence
  ENSG00000155886_32 (sequence is synthesized)
aaatttcaccatatgtgttcctatctccaatctattctgtcattgacgcctgctatgattttgttgtgagcacatacctcttaacataagaggacaggatgcagaactcacagcagaata

SEQ ID NO: 451739 - DNA, 120 bp, Artificial Sequence
  ENSG00000155886_33 (sequence is synthesized)
agaggaaaggtaacctgacagccccagatcaagctcagtattccttccagaaaacctcagctcaccccacagagcatggcaataacaggaaatgcccatcattcctcttcacccagaagt

SEQ ID NO: 451740 - DNA, 120 bp, Artificial Sequence
  ENSG00000155886_34 (sequence is synthesized)
aaaaagcacttcaaacccgaggccccctgggaaaacaagaaatcaagatggctgccagtcggaggctggctttcaagtctctccaactcggcagattggggtcttcagatgtgggacaat

SEQ ID NO: 451741 - DNA, 120 bp, Artificial Sequence
  ENSG00000155886_35 (sequence is synthesized)
gccttccaagacattgaaacaccatccaatagaggcgctgagtggaacctgccacctaatgggaatgaatctcattcatcaaggtcaggactttgtactggggcaagaatttgtcctgct

SEQ ID NO: 451742 - DNA, 120 bp, Artificial Sequence
  ENSG00000155886_36 (sequence is synthesized)
tccttagagagtgaaagaatgaggaagtgaactttacgtttaaaaactccagttgttttccctgtgtatttcttgaagggcaaccaagttggttattgtgtgaattttatattattgact

SEQ ID NO: 451743 - DNA, 120 bp, Artificial Sequence
  ENSG00000155886_37 (sequence is synthesized)
ggtgcgttgtttgaaataaggtttaaataggtgactgactcaactgcaaacagaccatgtaaaacagaagttgaaggagacctgatgccgccctcttcttattcctgatcctccctctgc

SEQ ID NO: 451744 - DNA, 120 bp, Artificial Sequence
  ENSG00000155886_38 (sequence is synthesized)
ctcctcactccctcccatttattcccagcttacagtgaaggctgatcaaagcagctatggtgccctttgcttgtctcggagctccacttcacaggaagtgttgtggtctttcatgtgaag

SEQ ID NO: 451745 - DNA, 120 bp, Artificial Sequence
  ENSG00000155886_39 (sequence is synthesized)
ttgcatttgagaagacaaaatttccaagccccgttcccacatcagtcatgtgcactgagcctgacctacaacagcactgctccctcactggatgggacacaagtgattccacagcctgcc

SEQ ID NO: 451746 - DNA, 120 bp, Artificial Sequence
  ENSG00000155886_40 (sequence is synthesized)
cttgctttcccttcatttctgtgtctgtaagtggttatgtgttgagccagggtaaattcagagagatgtgtacagagttcaacaatgggtctttaaaccattcaaatcattggcataatt

SEQ ID NO: 451747 - DNA, 120 bp, Artificial Sequence
  ENSG00000155886_41 (sequence is synthesized)
attggcataattataagaactttccacaccgtggtttccaaaacaggtcatctctaactcgtttcctgcatgcctgtgtatatacatatataaatatatacatatatatatatatacata

SEQ ID NO: 451748 - DNA, 120 bp, Artificial Sequence
  ENSG00000155886_42 (sequence is synthesized)
tatatatctttataccagatctatatgtacacatataatatgacttacatcatcaccctctgaccctatcacattcaggattctaaagcagggagcatcaagtttgccaaagtcaaggaa

SEQ ID NO: 451749 - DNA, 120 bp, Artificial Sequence
  ENSG00000155886_43 (sequence is synthesized)
aaggaaagtcatgcacacaaaccaaagggaacatttcttcctgatttcataaggttgtttgttccatgcacatatatttacaaatatacacatatgtacccatattttcccaccctaaga

SEQ ID NO: 451750 - DNA, 120 bp, Artificial Sequence
  ENSG00000155886_44 (sequence is synthesized)
acaacagaaaatacaaagcaaaaatttagactgcagatactctctttgcttctctggagcagggtataaaagatatcaacaattcaagagccaacattgtactaatcaatctaaaataaa

SEQ ID NO: 451751 - DNA, 120 bp, Artificial Sequence
  ENSG00000155886_45 (sequence is synthesized)
tgagttgcacgcaaatgatttcatttattcacagcaaaccgagcaggtcttgcttgctgtcaccgcctaccctcccccatacttccaaggcagcagagcagcttggctcaaactgacaat

SEQ ID NO: 451752 - DNA, 120 bp, Artificial Sequence
  ENSG00000155886_46 (sequence is synthesized)
tcccaaatagaaactcctaaattgcatctgagaatgcccatgccaactccagctgccctctgcacctgaccagatcctgatgaactgaagctgaagatcagatggtgtttatgcagcttc

SEQ ID NO: 451753 - DNA, 120 bp, Artificial Sequence
  ENSG00000155886_47 (sequence is synthesized)
ccaggacctaaactgagtcaggcagtgacagagcaatgatatatgcagggactaagggatagggttgtttataccctcggcagatgcagcagaatgtcctaaagccttgcccagaagatt

SEQ ID NO: 451754 - DNA, 120 bp, Artificial Sequence
  ENSG00000155886_48 (sequence is synthesized)
ataaaaagaggcggagactgttttatattcaggaaaaatgctttgtaaggcttctaacaggtgtcacctgacaagggccatcataatttattttatagggaagacatgaatcaggtggtt

SEQ ID NO: 451755 - DNA, 120 bp, Artificial Sequence
  ENSG00000155886_49 (sequence is synthesized)
tggagccctttcagcaaaacgcagctgcctcgctgattagacatttgacaatgttaatgtacatccattcctgggcagggagagagttggcaaactccccaccactgcacatagctttta

SEQ ID NO: 451756 - DNA, 120 bp, Artificial Sequence
  ENSG00000155886_50 (sequence is synthesized)
aaggcctctggaacagtgagagaagagatgagctacaaagggagcccacccccagaccactttaacaaaaagttgaccaaagaaaagacacctggtagagtggctggccagatagagctg

SEQ ID NO: 451757 - DNA, 120 bp, Artificial Sequence
  ENSG00000155886_51 (sequence is synthesized)
aagaagatggaagttgcattaaatgctctgcagaaattactgcgttggactatctaacatgggtctgatggcaggcatttcagaacatggcagtgtgctttcctccccacatctaccaaa

SEQ ID NO: 451758 - DNA, 120 bp, Artificial Sequence
  ENSG00000155886_52 (sequence is synthesized)
cacacacccacacccccacacacacgcgagattatgtggatgctatgcctccttgcacctggacagattgtttttctggtaagtaggtggccctattataggtggcagctgtgttccaga

SEQ ID NO: 451759 - DNA, 120 bp, Artificial Sequence
  ENSG00000155886_53 (sequence is synthesized)
agaaacaaagtgaagctgttctcagggtgatttctggagaaaactactgtctcctgaaagcatgcatagaagtcagtgctcactcttgctaagccacatattccttaacgatccggctta

SEQ ID NO: 451760 - DNA, 120 bp, Artificial Sequence
  ENSG00000155886_54 (sequence is synthesized)
atatttttaaaagatacctcctcaacccctatacctgtctcaacaatactgtcttcaattattaggtaaggccttgtcattaagagaggggtaggagaaaaaatagaataataaggaaag

SEQ ID NO: 451761 - DNA, 120 bp, Artificial Sequence
  ENSG00000155886_55 (sequence is synthesized)
ggaagaaaggagatattaatttcctaggattccaagaaaacaagtgtcacgtggaaatatatccctatgtagtttaaaacagtaacaaatatcaggctatgtttagccaattacaagagc

SEQ ID NO: 451762 - DNA, 120 bp, Artificial Sequence
  ENSG00000155886_56 (sequence is synthesized)
ccatatacagttttagatttttttaaaaaataatctcaggaagaccttgggtaagaaaagtaaccctgccctattccaccttctatttactgttagctccctgactctgcctctgcctct

SEQ ID NO: 451763 - DNA, 120 bp, Artificial Sequence
  ENSG00000155886_57 (sequence is synthesized)
gtctttgcgtttcatttttaatctcagagcttcatattttttaaatatatagcaaacaagaaaagcaataagggaactactcacagccagctcaactctattacttatgattacaccatg

SEQ ID NO: 451764 - DNA, 120 bp, Artificial Sequence
  ENSG00000155886_58 (sequence is synthesized)
gcaatattcctttttcaccaggagctttggacctgcgcaggttgtggcatgtaatcacccggagcatgtagtcgtctgtagaaatcacaggcacactcatgtttgctctggaaggaatct

SEQ ID NO: 451765 - DNA, 120 bp, Artificial Sequence
  ENSG00000155886_59 (sequence is synthesized)
gttttccacaatgactccccccagctaatgtacacactggcattttgcatgccttcctcacacatggggcaccagccttgctcagaaccacccaaactccacagaggcccttaatatggc

SEQ ID NO: 451766 - DNA, 120 bp, Artificial Sequence
  ENSG00000155886_60 (sequence is synthesized)
tagggacagatttcttaagaaagagtaagaagcagctacaaaggacaagcaaatccacaagtcaggcagcattcgagaggcaaaaatgaccctgcaattacgacaggctaggcaactgtt

SEQ ID NO: 451767 - DNA, 120 bp, Artificial Sequence
  ENSG00000155886_61 (sequence is synthesized)
ttcaaattagcgtacgaacagtgagggactgtgtagagcaccatattatctaagccaaagcacttctaccagatcattcattgacagactggaaaacctaataaaatctttaaaaacaga

SEQ ID NO: 451768 - DNA, 120 bp, Artificial Sequence
  ENSG00000155886_62 (sequence is synthesized)
caaatatctaagtctgaaagaatgccatggagtttgcctaggcttccaccaaagatttaattccattaagagggtttgtctagcctatcacgctaatccaaaggacagtcctcttacggg

SEQ ID NO: 451769 - DNA, 120 bp, Artificial Sequence
  ENSG00000155886_63 (sequence is synthesized)
ggagatcccagcatagatgctggtgtgacccagctcaatgattaacaaccatcagcatcaagaaaagcctccctccaagttaacccaaacccatccacttaatgacttaacttttttttt

SEQ ID NO: 451770 - DNA, 120 bp, Artificial Sequence
  ENSG00000155886_64 (sequence is synthesized)
ttttttttttttttttggcaaaaagtaactgcatctgggcactcttcactctttgccccatagttggaagttaccgctatgtgactctttacctattttcaattaaaattatctttagat

SEQ ID NO: 451771 - DNA, 120 bp, Artificial Sequence
  ENSG00000155886_65 (sequence is synthesized)
ttttatttgagtctttaaccctcttaataatttttatagttcctctctactaagcctttttaagttctttatattgttcttaaatgatggaaccttatgactaatgataatcactgtctg

SEQ ID NO: 451772 - DNA, 120 bp, Artificial Sequence
  ENSG00000155886_66 (sequence is synthesized)
aacagtgttgaactatactgggtgcagcatgaccatgaagctctggtgaagtcaaggtcacaaactgcttttaaggtcattaggtcataatctcagactcacaaagaactcaaaattggg

SEQ ID NO: 451773 - DNA, 120 bp, Artificial Sequence
  ENSG00000155886_67 (sequence is synthesized)
gagacaccactttagattactccaaaactctgggcctgtacttacccactaatttatcaagaggaatcaatatttttattttaaatatgaaactgggataaatgattggatctccactta

SEQ ID NO: 451774 - DNA, 120 bp, Artificial Sequence
  ENSG00000155886_68 (sequence is synthesized)
ttaaccagtactgcagtgtgtttatatccttttgtgtggtaggttggataggatttgtaaagctactgattgatctcatgggccagggttcaccaaaaggatgggaatttgtttctgcat

SEQ ID NO: 451775 - DNA, 120 bp, Artificial Sequence
  ENSG00000155886_69 (sequence is synthesized)
tcttacatattgggttgcatattccttcataatggatccataagtaactaaggccttggagactaacagttctccaaaatactcagctaaccaaaagaaaatactaatttttaaaatcat

SEQ ID NO: 451776 - DNA, 120 bp, Artificial Sequence
  ENSG00000155886_70 (sequence is synthesized)
gtcataaaaaacagaaaagtaaaaaaagtctgaaatcctgaataaaattattttaaggatgaaattacatgcataaattaagggtagataacttcttgccatttaattaaacaaatcccc

SEQ ID NO: 451777 - DNA, 120 bp, Artificial Sequence
  ENSG00000155886_71 (sequence is synthesized)
aattcttatcagaataaaactgaaggacaatggatgccttttgggttttttaattttttaatattgcactttatagtacttcataagagacaactgtcttaattaaagccataaaatacc

SEQ ID NO: 451778 - DNA, 120 bp, Artificial Sequence
  ENSG00000155886_72 (sequence is synthesized)
aataatacatatattcagggcttctgaatatagtcaatcaataagcagtccatgagtcattcctgttttgtattgtttattgtaaattggagtttatctgttctattttttattaactac

SEQ ID NO: 451779 - DNA, 120 bp, Artificial Sequence
  ENSG00000155886_73 (sequence is synthesized)
aattattgttctaggcaatcctaatctacttatacattttagatgtgtgctttaataaaactgtttgaaaatcaaagaaattattcatttcacaaaagcagtcttcgttttcaaaatagc

SEQ ID NO: 451780 - DNA, 120 bp, Artificial Sequence
  ENSG00000155886_74 (sequence is synthesized)
ttattacagtttctttagcaagttctaatactacatggaaattattttaaaattgtagatttttttcaggaatccattttgttatataaagcaaagttcacccatatggaaaatgaaata

SEQ ID NO: 451781 - DNA, 120 bp, Artificial Sequence
  ENSG00000155886_75 (sequence is synthesized)
gataattagcaaacatatacctgggaaatgtaggatgtgtttgagcttttatataaatataggatgggtctaagaagttcccttataaaaatgggaaatagaggtatacaatttatcaat

SEQ ID NO: 451782 - DNA, 120 bp, Artificial Sequence
  ENSG00000155886_76 (sequence is synthesized)
aattccttatgcctaaattactaaccttccttgggaggacatgtaaagcagcagatttcataatgctttggtggttattttcctcctctccgctaaaatacacaatttctaacctagtat

SEQ ID NO: 451783 - DNA, 120 bp, Artificial Sequence
  ENSG00000155886_77 (sequence is synthesized)
ggtacactgtttacacacacatatataaagatgtccccacaactaaaaactttaatgtttcaacttcatcacaaatttttatataattttttttttaacagacagggtcttgctctgtca

SEQ ID NO: 451784 - DNA, 120 bp, Artificial Sequence
  ENSG00000155886_78 (sequence is synthesized)
agagtgcagtggtgcaatcatagctcagtgtagcctcaaacacctggactcaagcgatcctcccacttcagcctcttgagtagctgggacctcaggcacatgccaccatgcctggctaat

SEQ ID NO: 451785 - DNA, 62 bp, Artificial Sequence
  ENSG00000155886_79 (sequence is synthesized)
cacatgccaccatgcctggctaattttgttgttgttgttaagagatggtttggcctcccaaa

SEQ ID NO: 451786 - DNA, 120 bp, Artificial Sequence
  ENSG00000155886_80 (sequence is synthesized)
aatgagccaccatacccagcccttttatgtaatttgagtaaaagtaattactaaaaagcacttaatagtctagaaatccaccagaactgggtacctaaattgtccatatagagtaaacat

SEQ ID NO: 451787 - DNA, 120 bp, Artificial Sequence
  ENSG00000155886_81 (sequence is synthesized)
gggtactaaactggacaaccccatcaattttatgcttaagtggccaaattgccctaaagaaagggtatctgaaccaagggccagtgatattcctctgttagaggctgttttgtggtctga

SEQ ID NO: 451788 - DNA, 120 bp, Artificial Sequence
  ENSG00000155886_82 (sequence is synthesized)
agagtttctctaaagggctgagactctattcggaagagggagcctcagttactgaattgcgctattgaaccctgaacacaaagtacacatatataccctgcatctagccttgatatttct

SEQ ID NO: 451789 - DNA, 120 bp, Artificial Sequence
  ENSG00000155886_83 (sequence is synthesized)
tctgctcaagtcaaaaaactccggaagcaacagcttccaccatcaagcaatccacatacttaaaaagccatcaaagctaagaatagcaaaagctaccttcctgattcagtgaagttgctg

SEQ ID NO: 451790 - DNA, 120 bp, Artificial Sequence
  ENSG00000155886_84 (sequence is synthesized)
ctagcactaaaagcaagagaaattatacttttgttcttcagatacggttaaaacaaagaaaatgttgtcaacgttgacgccaacatagacatttgctctataacatataaactgtctttt

SEQ ID NO: 451791 - DNA, 120 bp, Artificial Sequence
  ENSG00000155886_85 (sequence is synthesized)
agacaggttatgttaaaaatatcagaatgccatttttgtaaaggatcttttttaggatagacgtggtctcatgcttcctttgttcgcctccgttttaaaggagcattgtaacccctatcc

SEQ ID NO: 451792 - DNA, 120 bp, Artificial Sequence
  ENSG00000155886_86 (sequence is synthesized)
tcatccctacaaaaatccagtggatgcacttccaaattacttctgtcattttgtatgtgttgtgtttattatgcgtaattttcactggatgatgagatacatggtgatactatgtcagtt

SEQ ID NO: 451793 - DNA, 120 bp, Artificial Sequence
  ENSG00000155886_87 (sequence is synthesized)
tattctctgtgaatatgtctgtacatagacaggaagctctacttatttgtacataggctgtctgaagtatgtacttctgtcacatggacttcattctgataaagggtgtttcttcttgtt

SEQ ID NO: 451794 - DNA, 120 bp, Artificial Sequence
  ENSG00000155886_88 (sequence is synthesized)
tcactgtccatacctttgtgcttctactactgataatcaattcatagaatatcactttatgtaactaagtctcctcagtgtgaaaaataatagtaataaaattattgactcaaagaagta

SEQ ID NO: 451795 - DNA, 120 bp, Artificial Sequence
  ENSG00000155890_0 (sequence is synthesized)
agggacaccagctgtgaagtcctcataacagccaacttcttgcaactttcaagctgacggcctcaggaatgggaggaaggactcctccactggagaactgatagcagtattctggtagag

SEQ ID NO: 451796 - DNA, 120 bp, Artificial Sequence
  ENSG00000155890_1 (sequence is synthesized)
gaggcatcaagagtcctgggaggccggtggtaatcatgtaggcaccatggaaactgctatgtgcgtttgctgtccatgttgtacatggcagagatgttgtcctcagttatgctcctgtct

SEQ ID NO: 451797 - DNA, 120 bp, Artificial Sequence
  ENSG00000155890_2 (sequence is synthesized)
gtgctgcaagttcatcttcacctcagagcggaactgcacctgcttcccctgcccttacaaagatgagcggaactgccagttctgccactgcacctgttctgagagccccaactgccattg

SEQ ID NO: 451798 - DNA, 120 bp, Artificial Sequence
  ENSG00000155890_3 (sequence is synthesized)
gtgttgctgctcttgggccaatgatcccaactgtaagtgctgctgcacagccagcagcaatctcaactgctactactatgagagccgctgctgccgcaataccatcatcactttccacaa

SEQ ID NO: 451799 - DNA, 120 bp, Artificial Sequence
  ENSG00000155890_4 (sequence is synthesized)
gggccgcctcaggagcatccatacctcctccaagactgccctgcgcactgggagcagcgatacccaggtggatgaagtaaagtcaataccagccaacagtcacctggtgaaccacctcaa

SEQ ID NO: 451800 - DNA, 120 bp, Artificial Sequence
  ENSG00000155890_5 (sequence is synthesized)
ttgccccatgtgcagccggctgcgcctgcactcattcatgctgccctgcaaccacagcctgtgcgagaagtgcctgcggcagctgcagaagcacgccgaggtcaccgagaacttcttcat

SEQ ID NO: 451801 - DNA, 120 bp, Artificial Sequence
  ENSG00000155890_6 (sequence is synthesized)
cctcatctgcccagtgtgcgaccgctcgcactgcatgccctacagcaacaagatgcagctgcccgagaactacctgcacgggcgtctcaccaagcgctacatgcaggagcacggctacct

SEQ ID NO: 451802 - DNA, 120 bp, Artificial Sequence
  ENSG00000155890_7 (sequence is synthesized)
caagtggcgctttgaccgctcctccgggcccatcctctgccaggtctgccgcaacaagcgcatcgcttacaagcgctgcatcacctgccgcctcaacctgtgcaacgactgcctcaaggc

SEQ ID NO: 451803 - DNA, 120 bp, Artificial Sequence
  ENSG00000155890_8 (sequence is synthesized)
cttccactcggatgtggccatgcaagaccacgtctttgtggacaccagcgccgaggaacaggacgagaagatctgcatccaccacccatccagccgcatcatcgagtactgccgcaatga

SEQ ID NO: 451804 - DNA, 120 bp, Artificial Sequence
  ENSG00000155890_9 (sequence is synthesized)
caacaaattgctctgcaccttctgcaagttctctttccacaatggccacgacaccattagcctcatcgacgcctgctccgagagggccgcctcactcttcagcgccatcgccaagttcaa

SEQ ID NO: 451805 - DNA, 120 bp, Artificial Sequence
  ENSG00000155890_10 (sequence is synthesized)
gcgcagcattcttcaggagaaagagaagatcatcatggagcagatagagaatctagaagtgtccaggcagaaggaaattgaaaaatatgtgtatgttacaaccatgaaagtgaacgagat

SEQ ID NO: 451806 - DNA, 120 bp, Artificial Sequence
  ENSG00000155890_11 (sequence is synthesized)
ggatggtctgatcgcctactccaaggaagccctgaaggagactggccaggtggcattcctgcagtcagccaagatcctggtggaccagatcgaggacggcatccagaccacctacaggcc

SEQ ID NO: 451807 - DNA, 120 bp, Artificial Sequence
  ENSG00000155890_12 (sequence is synthesized)
tgacccacagctccggctgcactcaataaactacgtgcccttggactttgttgagctttccagtgccatccatgagctcttccccacagggcccaagaaggtacgctcctcaggggactc

SEQ ID NO: 451808 - DNA, 120 bp, Artificial Sequence
  ENSG00000155890_13 (sequence is synthesized)
cctgccctccccctaccccgtgcactcagaaacaatgattgccaggaaggtcactttcagcacccacagcctcggcaaccagcacatataccagcgaagctcctccatgttgtccttcag

SEQ ID NO: 451809 - DNA, 120 bp, Artificial Sequence
  ENSG00000155890_14 (sequence is synthesized)
caacactgacaagaaggccaaggtgggtctggaggcctgtgggagagcccagtcagccacccccgccaaacccacagacggcctctacacctactggagtgctggagcagacagccagtc

SEQ ID NO: 451810 - DNA, 120 bp, Artificial Sequence
  ENSG00000155890_15 (sequence is synthesized)
tgtacagaacagcagcagcttccacaactggtactcattcaacgatggctctgtgaagaccccaggcccaattgttatctaccagactctggtgtacccaagagctgccaaggtttactg

SEQ ID NO: 451811 - DNA, 120 bp, Artificial Sequence
  ENSG00000155890_16 (sequence is synthesized)
gacatgtccagcagaagacgtggactcttttgagatggaattctatgaagtcattacttctcctcctaacaacgtacaaatggagctctgtggacaaattcgggacataatgcagcaaaa

SEQ ID NO: 451812 - DNA, 120 bp, Artificial Sequence
  ENSG00000155890_17 (sequence is synthesized)
tctggagctgcacaacctgacccccaacacagaatacgtgtttaaagttagagccatcaatgataatggtcctgggcaatggagtgatatctgcaaggtggtaacaccagatggacatgg

SEQ ID NO: 451813 - DNA, 120 bp, Artificial Sequence
  ENSG00000155890_18 (sequence is synthesized)
gaagaaccgagctaagtggggcctgctgaagaatatccagtctgccctccagaagcacttctgagccccttcagagcaggaaacaacctcagactcatcacaaagtagacatatacacac

SEQ ID NO: 451814 - DNA, 120 bp, Artificial Sequence
  ENSG00000155890_19 (sequence is synthesized)
acatatatgtatgtatatttttctcaccacattcttcaaggaggttgtagacaaatgtttccatgacctctcagctttccaacaggaatcttgtaagagctaataaaaggaaatacctga

SEQ ID NO: 451815 - DNA, 120 bp, Artificial Sequence
  ENSG00000155893_0 (sequence is synthesized)
gcctcccctcgcgccgggaggagctggcggcgagcgccgagccgggcgcgcagcgacggagctggggccggcctgggaccatgggcggacatgttcccgatttgaggtgaaaccatgaag

SEQ ID NO: 451816 - DNA, 120 bp, Artificial Sequence
  ENSG00000155893_1 (sequence is synthesized)
agaaaatagaatacttaataatgcttttccgcaaccgcttcttgctgctgctggccctggctgcgctgctggcctttgtgagcctcagcctgcagttcttccacctgatcccggtgtcga

SEQ ID NO: 451817 - DNA, 120 bp, Artificial Sequence
  ENSG00000155893_2 (sequence is synthesized)
ctcctaagaatggaatgagtagcaagagtcgaaagagaatcatgcccgaccctgtgacggagccccctgtgacagaccccgtttatgaagctcttttgtactgcaacatccccagcgtgg

SEQ ID NO: 451818 - DNA, 120 bp, Artificial Sequence
  ENSG00000155893_3 (sequence is synthesized)
ccgagcgcagcatggaaggtcatgccccgcatcattttaagctggtctcagtgcatgtgttcattcgccacggagacaggtacccactgtatgtcattcccaaaacaaagcgaccagaaa

SEQ ID NO: 451819 - DNA, 120 bp, Artificial Sequence
  ENSG00000155893_4 (sequence is synthesized)
ttgactgcactctggtggctaacaggaaaccgtatcacccaaaactggaagctttcattagtcacatgtcaaaaggatccggagcctctttcgaaagccccttgaactccttgcctcttt

SEQ ID NO: 451820 - DNA, 120 bp, Artificial Sequence
  ENSG00000155893_5 (sequence is synthesized)
acccaaatcacccattgtgtgagatgggagagctcacacagacaggagttgtgcagcatttgcagaacggtcagctgctgagggatatctatctaaagaaacacaaactcctgcccaatg

SEQ ID NO: 451821 - DNA, 120 bp, Artificial Sequence
  ENSG00000155893_6 (sequence is synthesized)
attggtctgcagaccagctctatttagagaccactgggaaaagccggaccctacaaagtgggctggccttgctttatggctttctcccagattttgactggaagaagatttatttcaggc

SEQ ID NO: 451822 - DNA, 120 bp, Artificial Sequence
  ENSG00000155893_7 (sequence is synthesized)
accagccaagtgcgctgttctgctctggaagctgctattgcccggtaagaaaccagtatctggaaaaggagcagcgtcgtcagtacctcctacgtttgaaaaacagccagctggagaaga

SEQ ID NO: 451823 - DNA, 120 bp, Artificial Sequence
  ENSG00000155893_8 (sequence is synthesized)
cctacggggagatggccaagatcgtggatgtccccaccaagcagcttagagctgccaaccccatagactccatgctctgccacttctgccacaatgtcagctttccctgtaccagaaatg

SEQ ID NO: 451824 - DNA, 120 bp, Artificial Sequence
  ENSG00000155893_9 (sequence is synthesized)
gctgtgttgacatggagcacttcaaggtaattaagacccatcagatcgaggatgaaagggaaagacgggagaagaaattgtacttcgggtattctctcctgggtgcccaccccatcctga

SEQ ID NO: 451825 - DNA, 120 bp, Artificial Sequence
  ENSG00000155893_10 (sequence is synthesized)
accaaaccatcggccggatgcagcgtgccaccgagggcaggaaagaagagctctttgccctctactctgctcatgatgtcactctgtcaccagttctcagtgccttgggcctttcagaag

SEQ ID NO: 451826 - DNA, 120 bp, Artificial Sequence
  ENSG00000155893_11 (sequence is synthesized)
ccaggttcccaaggtttgcagccaggttgatctttgagctttggcaagacagagaaaagcccagtgaacattccgtccggattctttacaatggcgtcgatgtcacattccacacctctt

SEQ ID NO: 451827 - DNA, 120 bp, Artificial Sequence
  ENSG00000155893_12 (sequence is synthesized)
tctgccaagaccaccacaagcgttctcccaagcccatgtgcccgcttgaaaacttggtccgctttgtgaaaagggacatgtttgtagccctgggtggcagtggtacaaattattatgatg

SEQ ID NO: 451828 - DNA, 120 bp, Artificial Sequence
  ENSG00000155893_13 (sequence is synthesized)
agagcatagggaaaggtccacttctagttttgtctgttactaagggtagaagattattgctttttaaaggctaaatattgtttgtgggaaccacagatggttggggttgaacagtaagca

SEQ ID NO: 451829 - DNA, 120 bp, Artificial Sequence
  ENSG00000155893_14 (sequence is synthesized)
cattgctgcaatgtggtacgtgaattgcttggtacaaaatggccagttcacagaggaatagaaggtactttatcatagccagacttcgcttagaatgccagaataatatagttcaagacc

SEQ ID NO: 451830 - DNA, 120 bp, Artificial Sequence
  ENSG00000155893_15 (sequence is synthesized)
tgaagttgccaatccaagtttgcactcttctggcctgccccatgttactatgtgatggaaccagcacacctcaaccaaaatttttttaatcttagacatttttaccttgtccttgttaag

SEQ ID NO: 451831 - DNA, 120 bp, Artificial Sequence
  ENSG00000155893_16 (sequence is synthesized)
aatttcttgaagtgatttatctaaaataaaggttggcaaactttttctgtaaagggccagattgtaaatatttcagactgtgtggaccaaaaggccacatacagtctctgtcataactac

SEQ ID NO: 451832 - DNA, 120 bp, Artificial Sequence
  ENSG00000155893_17 (sequence is synthesized)
tcaactctgtttctgaagcaggaaagccaccacagacagtacataaaggaatatgtgtagctgggttcccaggccggacaaaacagatggtgaccagatttggcccctgggctgtagttt

SEQ ID NO: 451833 - DNA, 120 bp, Artificial Sequence
  ENSG00000155893_18 (sequence is synthesized)
gctgacccctcatctaaaaaataggctatactacaattgcacttccagcactttgagaacgagttgaataccaagaattattcaatggttcctccagtaacttctgctagaaacacagaa

SEQ ID NO: 451834 - DNA, 120 bp, Artificial Sequence
  ENSG00000155893_19 (sequence is synthesized)
tttggtctgtatctgacactagaacaaaacttgagggtaaataaacattgaattagaatgaatcatagaaaactgattagaagaatacttgatgtttatgatgattgtggtacaagatag

SEQ ID NO: 451835 - DNA, 120 bp, Artificial Sequence
  ENSG00000155893_20 (sequence is synthesized)
ttttaagtatgttctaaatatttgtctgctgtagtctatttgctgtatatgctgaaatttttgtatgccatttagtatttttatagtttaggaaaatattttctaagaccagttttagat

SEQ ID NO: 451836 - DNA, 120 bp, Artificial Sequence
  ENSG00000155893_21 (sequence is synthesized)
gactcttattcctgtagtaatattcaatttgctgtacctgcttggtggttagaaggaggctagaagatgaattcaggcactttcttccaataaaactaattatggctcattccctttgac

SEQ ID NO: 451837 - DNA, 120 bp, Artificial Sequence
  ENSG00000155893_22 (sequence is synthesized)
aagctgtagaactggattcatttttaaaccattttcatcagtttcaaatggtaaattctgattgatttttaaatgcgtttttggaagaactttgctattagatagtttacagatctttat

SEQ ID NO: 451838 - DNA, 120 bp, Artificial Sequence
  ENSG00000155893_23 (sequence is synthesized)
aaggtgttttatatattagaagcaattataattacatctgtgatttctgaactaatggtgctaattcagagaaatggaaagtgaaagtgagattctctgttgtcatcggcattccaactt

SEQ ID NO: 451839 - DNA, 120 bp, Artificial Sequence
  ENSG00000155893_24 (sequence is synthesized)
tttctctttgtttttgtccagtgttgcatttgaatatgtctgtttctataaataaattttttaagaatacctatactatacaactaatggtttgtacctataagtcactcgagttatttt

SEQ ID NO: 451840 - DNA, 120 bp, Artificial Sequence
  ENSG00000155893_25 (sequence is synthesized)
caagtgagagccagtattttatttttcccccttcattcaaatgtcatgcagagaaccagtattttaaaattttattttaactgctttactaactgctgaaagttgtgttatctctcaagt

SEQ ID NO: 451841 - DNA, 120 bp, Artificial Sequence
  ENSG00000155893_26 (sequence is synthesized)
attcaaagactaaatgtgttttctttccttcccactcacaatatatctgaattagaactgctaaacacagcttgaagacttaaaaataaaagtgactcggaagattttttaaaaaatcaa

SEQ ID NO: 451842 - DNA, 120 bp, Artificial Sequence
  ENSG00000155893_27 (sequence is synthesized)
ccgagccgggcgcgcagcgacggagctggggccggcctgggaccatgggcgtgagtgcaatctacggatcagtctctgatggtgggtcgttaacctcagtggggactccaagatttccat

SEQ ID NO: 451843 - DNA, 120 bp, Artificial Sequence
  ENSG00000155893_28 (sequence is synthesized)
gaagaaaatcagttgtcttcattcaagaattggggtctggctcagaattcctgcagctggtgaaaatctgttttctagaagaggtttaattaatgcctgcagtctgacatgttcccgatt

SEQ ID NO: 451844 - DNA, 120 bp, Artificial Sequence
  ENSG00000155893_29 (sequence is synthesized)
aaaattttgcagggtaaattagcctgtctgggtctgagctctttattcttggatacgttggagatcggaaagatattaagatatggacgttcttactgctcttcttttagtccacctgat

SEQ ID NO: 451845 - DNA, 120 bp, Artificial Sequence
  ENSG00000155893_30 (sequence is synthesized)
ggaaagccagtccaagttccaaaactgaggaacttggatccgatgttcaagggcagggcgcatccagcatgggagaaagatgtaggttgggaggctaggccagcctgtctattcatattt

SEQ ID NO: 451846 - DNA, 76 bp, Artificial Sequence
  ENSG00000155893_31 (sequence is synthesized)
tgtaggttgggaggctaggccagcctgtctattcatattttttctgcctgcttatattccagctgcattggcagct

SEQ ID NO: 451847 - DNA, 120 bp, Artificial Sequence
  ENSG00000155893_32 (sequence is synthesized)
ctcatagacacaccaaggagcaatactttgtgttcttcaacccaatcaagtggacacccagtattaaccatcacatctggtaacttcccaatatttcctttatatccatgtcttcactgc

SEQ ID NO: 451848 - DNA, 120 bp, Artificial Sequence
  ENSG00000155893_33 (sequence is synthesized)
atcgtttccatacctgcaccccccaaccagcaaccagtgagtgcagggggccccgtgcctgagaaggctattttctccttatggtccatgtgctttctccccaccttttcttatttaatg

SEQ ID NO: 451849 - DNA, 120 bp, Artificial Sequence
  ENSG00000155893_34 (sequence is synthesized)
tctgactgtcccccgcaactggattgtaaaccccgtgagggcagagaccttgtccattttattctctgaagaatccccagcatgtgctccatacatgttggatggccagatggacaaatg

SEQ ID NO: 451850 - DNA, 120 bp, Artificial Sequence
  ENSG00000155893_35 (sequence is synthesized)
cataaataccgagcttagtgggtgagcaggtccgggcttacaggcttcaggaccttaggtaactcccttgacctgcctctgcctaaggtctactgtctggctgatggttactcttcctag

SEQ ID NO: 451851 - DNA, 120 bp, Artificial Sequence
  ENSG00000155893_36 (sequence is synthesized)
gttgagatccaaagctgggaaaagcagagagaggatcagtttggcttgcatcctagctatagctatgggaatgtttactagtaatacatacagagtcatccactgtgcattcgggagatg

SEQ ID NO: 451852 - DNA, 120 bp, Artificial Sequence
  ENSG00000155893_37 (sequence is synthesized)
gggtggggaagggtggtggggagggagcctgcgtgggatagcatctggttgttttactcatgattctaagaaatttgttggttgcttttgagagggagggtcccaaggagatgctttaga

SEQ ID NO: 451853 - DNA, 120 bp, Artificial Sequence
  ENSG00000155893_38 (sequence is synthesized)
ggtcatgttctctgccatttctttgaaattgagaccttgtcggcatctttacacatgagggttatagatgtgtggacaggatgaaagtgatcgtagatgagatgagcagagaacaccgcc

SEQ ID NO: 451854 - DNA, 120 bp, Artificial Sequence
  ENSG00000155893_39 (sequence is synthesized)
ataaaagagaggcttatttccaaaggtagcttacggaaatttgccctcctacttggtaatcacaccacagagaaattgcatgcccgttggtacagagttaatcatcagtaaaagatatct

SEQ ID NO: 451855 - DNA, 120 bp, Artificial Sequence
  ENSG00000155893_40 (sequence is synthesized)
cgtatcctgttattcgtgttggtcctggtggcacagtggccccaggacactcatttagattcatgggttttcccacctacataatgaaactcgttatccttccatctatttatctgccca

SEQ ID NO: 451856 - DNA, 120 bp, Artificial Sequence
  ENSG00000155893_41 (sequence is synthesized)
ctattctttctgatgcccccacagcctctttctcttgccctgtgacatctgagctgctgtcatctgcctgaggtcagcagagtttctaattgttccacaggacagctagaggcacggggg

SEQ ID NO: 451857 - DNA, 120 bp, Artificial Sequence
  ENSG00000155893_42 (sequence is synthesized)
gcctgggcaaagcctgctgggaggagcagtgtcctggagcagtgtctgcccccagcccctgggtctgtccctcagctccctttatctaggtgatcggggcaagcctcaagagctgatgtg

SEQ ID NO: 451858 - DNA, 120 bp, Artificial Sequence
  ENSG00000155893_43 (sequence is synthesized)
gtgagtagcacagcaccagggcagaggcggcctgcagcccggggtctgctcctccaggccccttcccagccttcctcctggagcccggcctgcacatcgaccctggtgaggccaacctga

SEQ ID NO: 451859 - DNA, 120 bp, Artificial Sequence
  ENSG00000155893_44 (sequence is synthesized)
ccaggccttacgggacccaaggcgtatcctgagccagcttgctgacccccatctgccatgtttggctgtgtttcacggcctcccctctgctcctctcctcttcccctccacacagccagc

SEQ ID NO: 451860 - DNA, 120 bp, Artificial Sequence
  ENSG00000155893_45 (sequence is synthesized)
ttcatcagtttttcaggcccagctaggtgtctcctctgggaagcctgtttggatgcccctcaccccagactggttcggcaaccctcagtgctccacatgaggagtcaatgagatatttca

SEQ ID NO: 451861 - DNA, 120 bp, Artificial Sequence
  ENSG00000155893_46 (sequence is synthesized)
gagattttggccccagaacctgtccctggacaaggttcctggttggtggataaggaagtgtgcccacattccagtgtaggggttaccagttaggagcaaagtcactgagataggaaaaat

SEQ ID NO: 451862 - DNA, 120 bp, Artificial Sequence
  ENSG00000155893_47 (sequence is synthesized)
gaccccatgggaatctgaaatccatttgctgggcccatcattctggttttgagaaggccttgaaagccagctgagacttgggcttagcacggcaggagagcactgagctgtttgaagttt

SEQ ID NO: 451863 - DNA, 120 bp, Artificial Sequence
  ENSG00000155893_48 (sequence is synthesized)
ttgaatgaggtgtgtgcccttttggaaataatggcttgagcaagattggtctggggtttggcctgggaagccactttaccatggcttaatttataggccctgagctgtagccccagtccc

SEQ ID NO: 451864 - DNA, 120 bp, Artificial Sequence
  ENSG00000155893_49 (sequence is synthesized)
aaaaggatccggagcctctttcgaaagccccttgaactccttgcctctttacccaaatcacccattgtgtgagatgggagagctcacacagacaggagcataatcaacatactgttctac

SEQ ID NO: 451865 - DNA, 120 bp, Artificial Sequence
  ENSG00000155893_50 (sequence is synthesized)
atcatacagagaatgcatgtgtgttgacgagtctgtaaagcccccaggatcaggcagaacgtacccagcaggagttgtgcagcatttgcagaacggtcagctgctgagggatatctatct

SEQ ID NO: 451866 - DNA, 120 bp, Artificial Sequence
  ENSG00000155893_51 (sequence is synthesized)
gttcagcaaaagaatgggagtatggaggctcaaagtgtggcccctggagaagctgaatgagaagtagccctggatatggtgtagactcccacaaaccagagatcctgccctcagtgcctc

SEQ ID NO: 451867 - DNA, 120 bp, Artificial Sequence
  ENSG00000155893_52 (sequence is synthesized)
agctttaggaagctgctccctgccttgctcctgggcagacagaagccagagagaccacaggtcgaagcaggaccacgcaaggacgcgcacgcctctttcccacgccgcagagcgatagaa

SEQ ID NO: 451868 - DNA, 120 bp, Artificial Sequence
  ENSG00000155893_53 (sequence is synthesized)
cccgcaacaggaaaacggaaaggccgtgcgccggaagaacaggatgcagggtgaagaaataatcagcctctgttcatcttattagagaaataaatacctgtgtatatgaagcaagcaagg

SEQ ID NO: 451869 - DNA, 120 bp, Artificial Sequence
  ENSG00000155893_54 (sequence is synthesized)
ccactgagtctttggggaaacagagcagggaggtgcccagaggcattttctgcagagaaggaagaaaagaataaacaagtcttctgccaaaaatgcctggaacttaaagcgatttcctca

SEQ ID NO: 451870 - DNA, 120 bp, Artificial Sequence
  ENSG00000155893_55 (sequence is synthesized)
tccacctgcctagggattcaaactacatggaacaagtgcaattcctcagagtggcaactggcagagctcccaggaacaaggtagaactacacaatgtcccaggcatcagaggcatagatt

SEQ ID NO: 451871 - DNA, 120 bp, Artificial Sequence
  ENSG00000155893_56 (sequence is synthesized)
gcctgagtcagggagagtggtctctgtgacctgacaccccacccacagtgggaaggaaagctgtgggtgtgttatcaaggaggcctccacaaggggctggaaattcctggttttgtcttc

SEQ ID NO: 451872 - DNA, 120 bp, Artificial Sequence
  ENSG00000155893_57 (sequence is synthesized)
ctcttggaatgagacatttactctaagagaatcatggaaaagtacaaaccacagaatcataaaccacagagggagaagctacctcgtaggtcattcttatgctgggcccagataccccga

SEQ ID NO: 451873 - DNA, 120 bp, Artificial Sequence
  ENSG00000155893_58 (sequence is synthesized)
taagcagatgttctcttctcaccacccctcctcgcctttgcttgcccacagccattgccaggactcttcctcaggcccagaaaggcagctgattcctggtaggagggcgctaagagtaga

SEQ ID NO: 451874 - DNA, 120 bp, Artificial Sequence
  ENSG00000155893_59 (sequence is synthesized)
aagtaactaccattgtcaggtccagatctgttcccaatcccttctcactcctcctgcactctaaaaccacaccacagttccaactctttctgagtctggaatctttgagagtgccgtcat

SEQ ID NO: 451875 - DNA, 120 bp, Artificial Sequence
  ENSG00000155893_60 (sequence is synthesized)
gtccttcttcctgtagccttcttgtccaccccagatggactgaccctcccacctacatccatgaggccagaaggcaacaaagacaagcgtggactctggctcccgccgaggtactctgta

SEQ ID NO: 451876 - DNA, 120 bp, Artificial Sequence
  ENSG00000155893_61 (sequence is synthesized)
ccccgtggctctcggattttgcatctaccacatgccacaggcttgcgtccatccgacctccctagtttctcatccccacttgaacctgatgactgattcgccctcctggctacgctgagt

SEQ ID NO: 451877 - DNA, 120 bp, Artificial Sequence
  ENSG00000155893_62 (sequence is synthesized)
aagccacccacttgccaaacctcagacctggtgttgacgcagtaagaaggcatgaggcccatgttgccagaacattcctaattgtttcattgtttccttgtaggatgtggtttcaagtcc

SEQ ID NO: 451878 - DNA, 120 bp, Artificial Sequence
  ENSG00000155893_63 (sequence is synthesized)
catctttgtctcttttctcctggccaggttgcccttggtcaatattccttcattcactccagccactcagcaccgtgattaagaaaacaggatgtgagattagatgatccaggctctgcc

SEQ ID NO: 451879 - DNA, 120 bp, Artificial Sequence
  ENSG00000155893_64 (sequence is synthesized)
atgaactaactagctgtgaggctttagagaagtgtcttaacctctctgagcatccatttctttctctatagcattaggaatattaatagtacctacctcacagcttttttgttgtgataa

SEQ ID NO: 451880 - DNA, 120 bp, Artificial Sequence
  ENSG00000155893_65 (sequence is synthesized)
tttctgttgcagtttgaatgatggaaagaagggcaggtggctcgaattggaaaagaggtcaaaagaaggtgggcatcagaagtttaaaaatattccagatggcaaatgaattgtaaaatc

SEQ ID NO: 451881 - DNA, 120 bp, Artificial Sequence
  ENSG00000155893_66 (sequence is synthesized)
gacggagctggggccggcctgggaccatgggcgccctctcccgcacggcccccgcactcccgccgctggattccagccgagattcaagctcccgggatcccccttcccgggcggtcctga

SEQ ID NO: 451882 - DNA, 120 bp, Artificial Sequence
  ENSG00000155893_67 (sequence is synthesized)
cccattttccaatggaggaagcttccagggagacagggtaccacttggagagcccccatggccacttcagattgcagccattgccacttcatctcacctgaggtgctgaggggagagtct

SEQ ID NO: 451883 - DNA, 120 bp, Artificial Sequence
  ENSG00000155893_68 (sequence is synthesized)
agtttacagggcatccttttgtcacctgctcgccacccttatgcccctgggtgtgaccagcttcctcagaaagagctgtaatcaatagcatattgattaaaaagcatattaagatgaaaa

SEQ ID NO: 451884 - DNA, 120 bp, Artificial Sequence
  ENSG00000155893_69 (sequence is synthesized)
aaatcacccattgtgtgagatgggagagctcacacagacagtaagaaggtggctatctgcaagccaggaagagaggcctcactagcaactgaaaatgctgtctccctgaccttggacttc

SEQ ID NO: 451885 - DNA, 120 bp, Artificial Sequence
  ENSG00000155893_70 (sequence is synthesized)
tcagcctccagacctgtgagaaataaatgtctgttatttaaggcaaaaaagagaaatcagtaactggaaaaagactaagagggttggaaatggagcacgagatgcactttatgtgcagga

SEQ ID NO: 451886 - DNA, 120 bp, Artificial Sequence
  ENSG00000155893_71 (sequence is synthesized)
tgggccagcacttgttgagcatttcaacgcccaagacatgcagtgtgctttttacgcagaaccttgtttcatctcacagtaacctgtgacttaaagattatcatccccttttcttttttt

SEQ ID NO: 451887 - DNA, 89 bp, Artificial Sequence
  ENSG00000155893_72 (sequence is synthesized)
ttttttttttttttttttttggagacaagctctcacccttgtcatccaggcaggagtacaatggcagtaatagctccctgcagcctcaa

SEQ ID NO: 451888 - DNA, 120 bp, Artificial Sequence
  ENSG00000155893_73 (sequence is synthesized)
cccgagcagctgggattgcaggcacgagctaccacactcagctaattttcatatatttttttggagatggggtcttgctgtgttgctcaggatggtctcaaactcctgggctcaagcaat

SEQ ID NO: 451889 - DNA, 120 bp, Artificial Sequence
  ENSG00000155893_74 (sequence is synthesized)
ctgtctagcttggcctcccacagtgctgggattatagacatgagccaccccgcccagcctatcatccccatttttaagacagggaaagaaactgagaggagaggtcacttgccaaggcct

SEQ ID NO: 451890 - DNA, 120 bp, Artificial Sequence
  ENSG00000155893_75 (sequence is synthesized)
ctcagccacgaagtggcagaactgggaggcaaactagtctgactcaagcccttactcatagtcattatatcattatattaaacattcctcacaggggtctacagaaagcatgtgtgatgg

SEQ ID NO: 451891 - DNA, 120 bp, Artificial Sequence
  ENSG00000155893_76 (sequence is synthesized)
cttaccaatacatactaaatagttctctccggcatgtatagattttacattcatgacagcgtaaatcaaattaaaaacgcttccttggccctccacagccttccagataaaatccaggct

SEQ ID NO: 451892 - DNA, 120 bp, Artificial Sequence
  ENSG00000155893_77 (sequence is synthesized)
ccctaagggcctccctgagtacatggactgcagttgttgatggattttctgcatgtctggaagacagaaaaagcgtcttggatcatggtgtggggtgtgagattgacaggatctccgaga

SEQ ID NO: 451893 - DNA, 120 bp, Artificial Sequence
  ENSG00000155893_78 (sequence is synthesized)
ggacagtcgcttccagagcacttcagaagccagtgatttctcagtcctccactcttctccccttccctatctgtggtctccagtgtgatcacctagaaaaagagctttggaaccatatag

SEQ ID NO: 451894 - DNA, 120 bp, Artificial Sequence
  ENSG00000155893_79 (sequence is synthesized)
accaagctcaaatccagttctctaccacttcgcaggtgtggagcctcaagcaaggtacccaggctcctacaatccctaaaccagggatgatgactcccgcagagtgtatgtgaagctcca

SEQ ID NO: 451895 - DNA, 120 bp, Artificial Sequence
  ENSG00000155893_80 (sequence is synthesized)
gacacatggaccatctccacctggcaggagtcattatttctcacaaatgactctctccattgctctgagacaccaaaaccagttgaaaccagaatgacagccctgcccacattttttttt

SEQ ID NO: 451896 - DNA, 120 bp, Artificial Sequence
  ENSG00000155893_81 (sequence is synthesized)
aatgtgaaagatgaaaggtcctcatttcttgttctgatagcttcctgccacacactgaagtctcctcaaggacacgtcttttactgcatgcagcttcacagtcagctcctcaagcagaag

SEQ ID NO: 451897 - DNA, 120 bp, Artificial Sequence
  ENSG00000155893_82 (sequence is synthesized)
actgaaccgtgacttgtttttagaagctctccgggtagggaggacatatccatatgcaggacagaaccttgcttttcaaattcaagaaaaaacagtaactaatctatcgattcttctgtg
